United States Patent Application Publication US 2026/0103690 A1 - sequence listing, part 50

SEQ ID NO: 239658 - protein, 366 aa, unidentified
MKKISTMAKRGNEIFKEPKLTIGLDLGDRTSHYCILDEAGNVILEHRLPTTPRGIRQVFCRIPRSRIALETGTHSPWVSRQLTQLGHEVIVAHARNVRLIGESSRKDDQLDARTLARLARIDPGLLGPVRHRSAKAQIHLTVIRARAGLVSARTALVNTARGLTKSYGERLRKCGSGQMNREIAKGLSQELRDALDPLLGEIESLNERIAEYDRRIERIAKEVYPEVTLLQQVKGVGTLIALTYVLTLDDPHRFRRSRDTGCFLGLRPGRRNSGMSEPQMHISKEGDGYLRTLMVQGAHYILGPFGEDSDLRRWGLKLAERGGKNAKKRAVVAVARKLAVLLHKLWVSGEVYEPLRNNHKVVSAVA

SEQ ID NO: 239659 - protein, 473 aa, unidentified
MARAARRPGARQHHKRHSSRARSAPLAQMNLNAAGIDVGATEHWVAVPEDRDEEPVQRFGAFTADLYALAAWLQQCQIETVVLESTGVSWMTLFAVLEERGCDVKLVDAHDARQVPGRKTDVKDGQWLQELHTYGLLPGAFRPEDHVGVLRSSLRQRSMLVAMASRAVQPMQKALEQMHLTLTEVVSDMNGKTGMEIIHAILAGERDPQCLASHRDRRCQHDQATIAKALEGHWRAEHLFALQQALEQYEFLQQQLQACETQIEACLQTFVTHVEVDAPPPAPARKRRARQRHAPGCDVHGYLAAMTGVDLTQIDGMDALTALKVISEIGLDMTRWPTGKHFASWLGLCPGNKVSGGKRSRMRSKPTANRAASALRLAAQGLVHSHSALGAYYRRMRARLGAPKAITATAHKLARLVYSMLRYGTAYVDAGQQAYEQQYRDRVLTNLQRKARVLGYQLVHVVDPGSAQAAATL

SEQ ID NO: 239660 - protein, 343 aa, unidentified
MESIHYIGLDVHKKTIAYCIKSVSGKTVRQGVVNAERKALRQWLTELPGPWMGALEATLFTGWIYDFLKPHAVELKVAHPEMLKAITAAKKKNDRADAEKLADLLRVNLLPECTMMSEELRELRRILRYRNLVVRTAVKMKNKMSGLLMEVGATYDKRRLYGRKYFGELLERVEDVPDSVKDLLRLSRGNLELFTVAQKQLIKTLREQPLIRGRVERLMSIAGVGEIMALTWVLEIGDPARFNSSRQAISYCGLCSAQRESAGKEQRGPISKKRNKHLQTMLIEAAKLAPHWNPNLAVLHEKELAKGNRNRASLAVARKLVEYLLAVDRRGTPFVVEDTSQVA

SEQ ID NO: 239661 - protein, 331 aa, unidentified
MKQEALVGIDVSARSLDVALERGKAPRQDMVFENTAEGHRKLAKKLTRGGMRARICLEATGVYHLDLSLALHATNGIEIMVVNPRAAKDFARAQLQRSKTDRVDARSLLEFNRRMEFVPWQPPPRTILALRALSRRIQALLVNRAQEKNRLHADDAVADTTPAIQESIERHIQSINDEIAALTQAALEIVRADAELKPKFDHLVSIKGIADASAITILAELAALPDDMTVRQWVAHAGIDPRCVQSGTSVQGQVRISKVGNRHLRAALFLPAMVASQHEPQIKAFYQKLIANGKKPMQALVAVMRKLLHAIHGMFQHDENFIGEKFYAGKA

SEQ ID NO: 239662 - protein, 421 aa, unidentified
MEETGELAELVERVAALDIGKAALTACIRVPHEDKPGRRCQEVREYATTTRALLALADRLRCQGVTLVVMEATSDYWKPPYYLLEAEGFECWLLNARHVKNAPGRPKTDKLDAVWLAKVAERGMCAPSLVHPKPVRQLRALTRYRRTLIRERAREKQRLEKILEDAQIKLSAVVSDLFGVSGRAMIEALVAGERSPWALARLARGTLRNKTKILEDALTGHFDDHHGFLCQMMLDRIDGLSAQIGQLDARVEEAIAPFARQVTQLDEIAGVGTTSAQELIAEIGADMSRFPTAGHLVSWAKFAPIENSSAGKKKGGSTGKGNPWIGGTLGEIVLGASRTHTFLAERYRRIARRRGKKRAIVATGNTVLTIAYHLLSDPDARYTDLGPGFYDSKAGRDRQARNLIRQLEHLTGKKAALNEAA

SEQ ID NO: 239663 - protein, 497 aa, unidentified
MSRNIFPERSQGAAELLANAESRNVLVVPIDFAKRIHVVQFARGTGEYLLKRPLNVRNNVAGKQFLLDRIAKCCAKHRIPKCNVLVGGEDPAEYAVNFALWVQAAGYRFVRVNPMEAKKHRTNTRATSDALALDGIAQIMLLRRGYDLQAHDELYGALKMAERARRSLRKQVTATRNRIHKDVELLCPGLLDRKLSGLLPFGGGSLELMATGCSVAQLGRMRTARLVKLLAKAGTQKPAEAAAKLKAFAQSALPPDPAIVPYRQRSLAGKVRLFREQCANLACEENEMARCLVQTPGFLLTSIPGLRVVLGGGIVAECGDPDRWPEPDRIASYAGLAVRQQQTGGPNSEPVTGRLPLDANHHLKDQLLQAAFHVGTTPHPAWQALGLPGHHPLREHYEQIEQRGGHSRMGTVKKLLRIARAMMRERRIYLPTAALDPNAPDAMPPVRLIAYRRAVGRMLVAKWRRYDLEGIPDEANQLKLWLRETDQIEEFLNNQDK

SEQ ID NO: 239664 - protein, 408 aa, unidentified
MLFVGDDWAEDHHDVEIVDDSGRRLATRRLAEGLAGLTGLHALIAEHLPDPGPDAETAQVKVGIETDRGPWVAALVAAGYEVFAINPMQVARYRQRHSTSGAKSDAADAHLLAEIVRLDREHHRPIAGDTPLAEAVKLMARAHQTLIWDRSRAVLRLRAALRDFFPAALEVFDDLDAPEALELLSRAPDPDRAARLSKAKITAAFTRARRKDVEARALHIQQIFRAPQLRQPPAVQTAYAVIVANTVRLISQLNAQIGEPGEVVSEHFGRHRDAEPYLSQPGLGSILAARVLAEFGDDPQRFTDAKARKNYAGTSPITRASGTRRIVLARYARNRRLGDAVHQWAFCAMRGSPGAKAYYKTMRARGIGHQAALRQLSNRLVGILHGCLKTGTHYDENTAWAHHISAAA

SEQ ID NO: 239665 - protein, 348 aa, unidentified
MNTSVVSVGIDVGKAKLDVACMHQDRKMVHQVFSNNVKGIRSLRSFLKRQRTASTVPCTLESTGAYHLLVALSLNEAGYRVNCVNPIITKKYMKATVRDAKSDKIDAKRTAELGYNEPDLQRFTATREDIAAKSVLSALAQLETLRQQLSAHIEHTKEMRRTLGVIIDRKAATKSLEHIERQIAAHRTRLCELAPKEAQVLASNITGLSLEQVSVLLVALGDKTFVDRDQLVAFVGLDVRVRQSGKWVGRQVLSKRGNGYLRKVLFQIGWSLYMNNDEYQAVYTRMRARGKNYKTCIIAIARKFLRFLFAFYWKKTITFAHQEETPALLLPTPAIDTAIHSLKVAFPL

SEQ ID NO: 239666 - protein, 383 aa, unidentified
MKAVCGLDVHKDSIFLCILHSDGELFEQVFGVLTFQLEEMRKLLQKHHVFEVCMESTSIYWIPIWRVLSPHFTLRLVNPYFIKQLPGHKSDIKDAQWIAECTLKELVRGSFVPPEIIQQLRQYDRRIFDLNAEIVRKVSKVDGVLQRCNIRLSNYVSNIECKSYRDVVRRLSEGVTNPNELMKLVHGRIINRHGAETILASLTGVVSQAEIDVLRQLHEEIGIAESHRNECQQRMLEICEKHFPEELERLQKIPGIKERAATSLIAEIGTDMSKFETANHLASWSGLRPRNDESNKKIKSRKITHGNVYLRNTIIQCAWAASRQKDCFFSRFSYHQTIVRRKNKMKVIVAVARKLLVAVWHVLHDKTDYVDFKPDREESANNG

SEQ ID NO: 239667 - protein, 366 aa, unidentified
MKKTSTVRVNGNMIFKGHKLTIGLDLGDRWSNYCVLDEAGEVLLEQKLATTPEAMKQTFEKIPRSLIAMETGTHSPWVSRLLKELGHEVLVAHAQKVNLISKSTRKDDRHDARTLARLARIDPELLGPVRHRSAKAQIHLTVIRARAELVSARTALVNAARGLAKSYGERLRKCGTEQVSRELAAELSVELREVLEPLLKEVESLNERIKEYDARMEKIARESYPQVALLKQVKGVGTQIALTYVLTLDDPHRFPKSREVGCFLGLRPGRRDSGQSQPQMHISKEGDRYLRTMLVQGAHYILGPFGEDSDLRRWGLRLAERGGKNAKKRAVVAVARKLAVLLHRLWVSGEVYEPLRNSHKAMRAAA

SEQ ID NO: 239668 - protein, 340 aa, unidentified
MGEVSTVGIDLAKSVFQVHGADTSGAVVFRKKLRRDQVLTFFSTLPRCVVAMEACASAHYWAREIALAGHETRLIPPAYVKPFVKRQKNDMADAEAICEAAQRPTMRFVQGKSAQAQASAVVFRTRDLLVRQRTQLINALRGHLTEFGYVVRQGVGHVGQLVAIVRDPTSDVPAEARPVLAIIAGSLEALQAQIALLDREIAQRAEDDAVAKRLMTIPGVGPVIATALVALAPAASTFRRGRDFAAWLGLVPRQHSSGGKERLGRTTKMGERSLRRLLILGASSATKVAARDPDKAGAWLAGMLSRKPRMLITVALANKMARIVWALMAHGGSYRAPATA

SEQ ID NO: 239669 - protein, 350 aa, unidentified
MKIFVGIDIAKLNHFAAAISSDGEILIEPFKFTNDADGFQLLVSKLESFDKNSIIIGLESTAHYGDNLVRYLVAEFYQVCVLNPIKTCQMRKNNVRKTKTDKVDTFVIAKTLMMQDDLRFITFFDLDMMDLKALGRFRQKTIKQRTRLKIQLTTYVDQVFPEIQYFFKSGLHQNAVYALLKEAPSPKEIASMHMTHLANLLKVNSHGHFTKEQAKELRVLAQKSVGANDSAISIQITQTIQQIELLDSQLQKIEAEITDIMKFNDSVIMTIPGIGYINGGMILGEIGDIHRFSNPNKLLAFAGLDPSVYQSGNFQAKTTRMSKRALVFYDMPCKCSLERCQKQRDLQGLL

SEQ ID NO: 239670 - protein, 402 aa, unidentified
MFVGIDWAAEEHTVCVLDADGRRADRFDVAHSADGFDQLIARLNRHDAASEMPVAIERPDGRLVDRLLEAGHPVVPVKTNAIKIWREAEVLSGAKSDPRDAEVIADYLRQRLGRLRPLQPFSAQTRALRAVVRSRTDLVEQRVAAANQLEANLDAFWPGAKVVFADIWTPIALDFLERYPTPASAARLGEARMAAFLTKHGYSGRRSPAELLARLRQAPPGIIDGPEAEARRDTVLALVRVLRALGRAIKDLDRSIAAHLDEHPDAEVFRSLPRSGQINAAQMLAEWGDCREAFDSPEAVAALCGATPVTKKSGKHEAVHFRWACNKRFRNAMTTYADNSRHASPWANSIYRAALARGHDHPHAVRILARAWIRVIYRCWIDQIPYQPERHGAIQRTHASAA

SEQ ID NO: 239671 - protein, 317 aa, unidentified
MSKSFIGIDVSKNSLDVHILPESMSLSYRYETKPMKALIKKLKTYAPELVVLEATGGYEITIGIALADAGLPVAIVNPRQVRDYARALGILAKTDKIDAYVIARFAQDVKPEARGQLTFKEQELKSLVVRRQQLVEMRSAEVNRLSRTTIPQVKNGIQKVVRVLDAQIKAIDDDLDNEIKKNPIWNQKLEVITSFTGVGDHTANTLLFGLPELGTLNRQEIAALVGVAPFNRDSGMLRGKRTISGGRANIRKALHMPTLSAATRWNKDLMVFYQRLIARGKKHKVALTACMRKLLITLNAMVKNNELYNPKFREVRP

SEQ ID NO: 239672 - protein, 374 aa, unidentified
MSIVMGVDQHRAQITAEWIDVDSGEISRARVRPADRAAVRRFLERFAGQQLEVALEATTGWRFFVEELRAVGAVVHLAEPAETAARRGNKKRAKTDRADARHHRELLLAGRLPESWIPPDHILDLRARVRLRHTLIEQHSEWQQRIQAVLYHHGCPQRRKLMQGDGPDWLSAQPLPETARQQITVALAMIDALGSQIAPLDRQLRPYARRQIGCRALIDAYYGVGELVAVTILSELGDCRRFANSRDAVRYGGMDITVYQSDRHRSPGHLSRQGPPALRWALYEAAQHARFPNSPDRAYYLQAAERLGGNRACLALARKLLKRCYHTLRELGDDALAPPTDQPPGSAAARRASSASPHKTERPATRKPTDALAA

SEQ ID NO: 239673 - protein, 331 aa, unidentified
MVKKQIMTDKLSCCGIDVSHLTLDVTYQNNLGELFYLQVGNNNAGFKKLLEHTGQNCHFVMEATGVYYIRLAFFLDSLGCKLSVVNAMSIKRYIQMHLERNKTDKKDSRWICQYAIEQRPPFWEKPDSEYFECKQIYNTIREYAEQIKRFNNQLHSLKLLPFPSKETIKSIEKMKSYLEKEMDHLEVKLQVLLKKWQPEQYKSIHSIKGLGKRATALLIIFTQGFKHTTNHRQLISFAGLSPTEYSSGTSIKGSNRIYKKGGKPIRDVLYMCAMNAKQTNEACKLLFDRLKANGKSGKQALIAVMNKLLKQVFAVVKNNSLYQPNYCSTLH

SEQ ID NO: 239674 - protein, 389 aa, unidentified
MKIYVGIDIAKLNHFAAAISSDGEILIEPFKFTNDADGFQLLVSKLESFDKNSLIIGLESTAHYGDNLVRYLVTELYQVCVLNPIKTCQMRKNNVRKTKTDKVDTYVIAKTLMMQDNLRFVSFFDLDMMDLKALGRFRQKTIKQRTRLKIQLTTYVDQVFPEIQYFFKSGLHQHAVYALLKEAPSPKEIASMHMTHLANLLKVNSHGHFTKEQAKELRVLAQKSVGANDSAISIQITQTIQQIELLDSQLQKIEAEITDIMKFNDSVIMTIPGIGYINGGMILGEIGDIHRFSNPNKLLAFAGLDPSVYQSGNFQAKTTRMSKRGSRVLRYALVNAAWNVVRNNATFKAYYDAKRAEGRSHYNALGHCSGKLVRVIWKMLTDNVEFNLK

SEQ ID NO: 239675 - protein, 340 aa, unidentified
MLSVGLDIHTKHIALCVLSEAGHVVQRARVRGLEELLRLLKGLPDRFEVCYEASCGYGHYHDLLRPLAARVLVAHPGRLRLIFRSRDKNDRKDAERLAKLLYLGETPTAHVPSLDVRTWRELINCRSQVIAKRTRAKNALRALLRGAGVVPPKSPGPWTKKGLAWLRQLGLPTASQQLRRDLLLEEVEALNGQVRRLEQELNRRAQQTPAVARLRSIPGVGIRTAEAVAAFVDDPQRFRHAKAVGRYFGLVPCQDQSGDKNRLGHITREGPAVVRRLVAEATWQAVRRSPAVRAFLERTQRGDPQRKKIAVVATAHYLVRVMWALLKRGTVWQENEARAK

SEQ ID NO: 239676 - protein, 360 aa, unidentified
MSLVAEVVDAVVGGDTHRDTHALEITAPSGVTIATVVVNNDQAGYAEALSWIADHAPGPQIVVGLEGTRSYGIGLARAAAAAGMVVLECEQPHRKTRRGKGKSDPIDAHLAVLTALRLNTSQLPIPRADGDREALRILLSARHELTVTSTAQINRLRALLRDAHNDTDRQLARAALTDAALTRLARRRLSGDASREHAIRHAEIRRLALAIHDARHALKDNRAQLQSIVEDLAPGLTQRAGVGPVTAAQAIAAFSHPGRCRNDAAFASLAGTCPIPASSGRTVRHRLNRGGDRALNRAIHTIATVRMRDCPATQAYIARRTAEGKTIREIKRCLKRYITRELYRSLTASMTPTTNNPAVA

SEQ ID NO: 239677 - protein, 347 aa, unidentified
MTIVDSTRLLVGGVDTHLDVHVAAVVDPNGGVLGIKSFPTRSAGYNDLSSWMYSFGPLQRVGVEGTGAYGAGLARHLAGHGLEVIEVDRPNRQARRRNGKNDELDAVEAARGALSGRVTGHAKAGNGNVEALRVLLIAKRSARSQRIATVVQLRHLVFTAPDDLRQRMAPLTAAGLVKEAARLRPRPGTDTVVHAVKTTAVVLARRVQALDDELRLLDAQIEPLVKATAPALLNIYGVGFDTAAVLLTAAGDNANRIHSEAAWAKLCGAAPIPVMTGKSSTRYRLNPGGNRHANNALWRIVLTRLGQHEPRTVAYMNRRLAEGRTKPEIIRCLKRYVAREVFRALPR

SEQ ID NO: 239678 - protein, 408 aa, unidentified
MTITSDIRVSVDVGCHRHSVAIGLPSGQVLDEFDVEHRPEGFNLFFQRIDDYQHRYGGVVSVAMEGYNGWARPLDTLVRSHGYRLFNINNLKLARFKEIFPAAAKSDRIDARKGLELFQLCDHLPLARGVLQEVAATPEENDVLKRLTRRRRSLVDEKSRVLSRMQGDLQAVCPGLLTITNDVENVWFLNFLSHSDDLTQLARLRRKTVLGIHAVGRKYAAMIGAWQKNASFSHEVEWVGPMIIEDARRVVELRARIKALEANCEELVEQSQIARLVDSIPGFGLVCSAELAGELGAIDRFASEAGLALYVGMANLDNSSGSLRGSKNPKHVNTRAKAAMMVGVDRHRKMVPESQRYYEKKRAQGKTHNQAIRALGRHLCRVMFRMLMQGRPYEVRGSNTSENNAKNA

SEQ ID NO: 239679 - protein, 312 aa, unidentified
MAMLSFCGIDVSKDRLDVVVLPEGWFFSVSNDTAGWGELVARLRPLTVSAIGLEPSGGYERGIIRALLAAGLSVRRINPNKLRQFARARGVLAKNDRLDARLIAEYVAIIPTRVVQRDAAVERLAEIVTMRRQLCDEHVAAENQAAHLEDAMLRRLSKRRQMRLEADIRLLDKRLAEMVAANVALAQRYELLISMPGVGPVLAFTLIALLPELGKMSRKQIAALVGLAPYDFDSGKLKGHRSIYGGRMPVRNVLYMAALSASRYSPALKTFHKRLAAADKKSKVIIVAVMRKMITTLNAMLRDSAAWQPRSA

SEQ ID NO: 239680 - protein, 294 aa, unidentified
MKYIGLDWHKRKIFSTVLEDDGTILARNTIGTNKQDIYYYLNNIKSKDNISIAMEASYNWQYTYRIAENITDNIVLAHTSKTRIIGEAKIKTDKIDSHILAYMLKADMLPKVYVPTKLSMENKVLLRSRISLVKLRTQIRNRIHAIIDRNKDCYTGLDELTDIFGKTGLSILKNTIIADIDYRILTEYIVLIEEINRKITGIEKIISERIVTDPDIELLRTIPGIGILTAFLVKSEIDNIERFSSKEKLCSYFGLIPSTHQSGSRSYNGRITKQGNKFLRWALTEAACPFGKPA

SEQ ID NO: 239681 - protein, 403 aa, unidentified
MNAVGIDVSKRKSTVTIRRPGDKVILKPCDFQHTQSDINALIQIIKGLDGETKVCMEHTGRYYEPIATWLSNSGIFVSAVNPVLIRSFGDESLRAPKTDKADSRKIARYTLDRWDKLKQYCHMDEIRNQLKTMNRQFGFYMDQKTAMKNNLIALLDQTYPGANDFFTCPTRSDGSQKWVDFVYTYWHVDCVRSRSLKAFTEHYQNWCKRKGYNFSADKAEQIYRVSTDLIAVFPKDACTKMLIHQAVDMLNTTSRTVETFRTEMDKTASMLPEYPVVMAMNGVGPTLGPQLMAEIGDVTRFEKRGSLTAFAGVDPGKKESGDYIQKSVHTSKKGSPHLRKTLFQIMESLIQRSPSDDPVYAFMDKKRTQGKPYYVYMTAGANKFLRIYYGRVKEYLAGQSESE

SEQ ID NO: 239682 - protein, 320 aa, unidentified
MSNIVQICTVGIDVSKDSLDLAVRPSGEHWSIKHDPQEFPALVEKLTQLAPSRIVMEATGGLETLVATHLAAAGLPVCIINPRQARDFAKATGQLAKTDLVDAHLLAHFGEALQPQLRELPSPEAQLFEALLTRRRQLVQMRTAEMNRLATSGHLRKIAKGLEAHITWLNKQISKCDDELKTALQASPVWRTNDQLLRSVPGIGQVVSRTLLAELPELGRLSSKKIAALVGVAPFANDSGGFHGKRHIRGGRTSVRSALYMATLSAIRSNYRIRAYYERLLATGKPKKVALTACMRKLLVILNAIIKQQATWRTFTLLNA

SEQ ID NO: 239683 - protein, 320 aa, unidentified
MLSSCGIDVSKDRLDVIVLPDEQCFSVPNDKAGWAALIAQLGSCAITAIGIEASGGYERGVTRSLHAAGMPVRQVNPFKLRQFARASGVLAKSDPLDARMIASFVAIMPTRPAQPHVPAAEQLAATLAVRRQLSAEKVAAENGSRLVEDAMLKRLSRRRIARLAADIDLLDERLVEIVMADAGLDQRYRLLTSMPGVGPVLACTLIALLPELGQMSRKQVAALVGVAPYAFDSGKLKGRRCIWGGRANVRHVLYMAAMSASNWNPGLKAFHDRLKAAGKLPKVAIVAVMRKMLTTLNAMVRDGVVWADRSSGRHNVPTTR

SEQ ID NO: 239684 - protein, 364 aa, unidentified
MNAFWRRTLLTQGGNLMRFYTQQHQYYCGIDLHARSMYICILDQEGNTRLHKNVRSNPESFLRAIQPYREDIVIAVECMFVWYWLADLCSRESIPFVLGHTLYMKAIHGGKSKNDKIDSKKIAVLLRGGTLPTAYVYPEAMRSTRDLLRRRNHLVHKRTELLAHIYNTNSQYNLPEFGKKLSIKSHRVGIADHFPDPSVQKSMEVNLQLSELYDRLLTDLELYIVKQAKGHDVRSFYLLRSIPGIGKILSLVILYEVHDINRFERVQDFVSYCRLVKCPRESGGKKSGPKNSKIGNAHLKWAFSEAACLFLRGNEQAQTYHDRLVNKHGKGKALSILAHKIGRAVYFMLKRKEPFNMDTFFARA

SEQ ID NO: 239685 - protein, 415 aa, unidentified
MNDLIRIGMDTSKSVFVLHGVNAAERPVLRKRLRRRQVIEFFAKLPSTQVGMEACGGAHHWGRELGALGHEVKLLPAQRVKPYVARNKNDAADAEAICEAMSRPRMTFVPVKTAEQQAALMLVGMRDQLVARRTQVSNTIRGYAAEFGLVAATGLDKLEPLLARIATDATLPALARELFAVLGEEYAELKLKLGQIEAQLMAWHRQNELSRRLAEIPSVGPIGAALMAMKVVHPRAFRSGRDFAAWLGLTPKDHSTAGKLRLGVITRAGDEALRRVLVLGATAVIQQVRRGRGHPSSWLVALLKRKPPKLAAVALANKTARIAWKLMVSGERYRGTRATAVAHGNPCSDGASSQSRKPRAVLAAVKARPISAAARCTQTTTAGLDGGCARRVTATAVGTKKRSAVEQRNESQRQD

SEQ ID NO: 239686 - protein, 369 aa, unidentified
MSAHVMSAHVAAAHVAAAPSTESASLNHHWCVGIDLHKETLTACTYCRCCGEHSFKKLACKNRTQIVEFFATLPRPHTVAIETVGFYRWLWETLEPIVEKLVLADATQARALAGRRLKTDREDAFNIAELLAAGRLPTSYAPPLEVQLLRDAARHRSGFSRQHARVLCRVKSLMNANNRPGPARLEADGLIRYLKAQGEKLPERHVAMLWQCVDHLALLEQHIGQVERTIAELVKRPTFAVDYERLVSFPGVALVTAATVLGEVGDFRRFKDAKAIGRYAGLNPRVFASGGKQRMGHIAKTGSPHLRWILQQAAWTAIRTDEHVKKIYLRIAKRAGKKAAAVAIARKLLTWMWAAVVKGETYQRRAIAA

SEQ ID NO: 239687 - protein, 356 aa, unidentified
MSREIKYIGMDVHQEAIVIAVLNGSGKLVMETILETKASSIVQFLQGLRGELHVTWEEGTWAAWLYDLLQPQVQQVLVCNPRRNALLKEGSKSDKVDARKLAELLRTGMLRPVYHGENGLRTLRELGRSYQTISKDLTRVMNRLKALYRGWGIPCAGTQVYAPRYREEWLNKIAQAGVRRRAELLYQQLDGLQALRRTLRPELLAESQKHKAAKLLRQIPCIGPIRAARLIALIQTPHRFRSKRQLWTYSGLGIETHDSAQYRYVGGQLQRSKKPQQLRGLNQNHNHEMKEIFKSAATRASCGPGPFCDFYAALLAKGMKPEMARLTLARKIAAITLTLWKRGEGFDAEQLKTQAA

SEQ ID NO: 239688 - protein, 378 aa, unidentified
MPSLTLETHARSDGVDAPRRHLCAKVTVSKLPPKEASMEQATTIGLDIAKHVFQVHGADAAGHVLFRKRITRGKLLGFLAAQAPCVVAMEACAGAHYWAREIGKLGHHVRLIAPAYVKPFIRRQKNDAADAEAICEAAQRPSMRFVPVKTEEQQANGIVFRARDLLVRQRTQCVNALRGHLMEYGHVFPKGITHVETLVAVVEDPRSSLPDSVRVILKLLVDTFTALEAQITALDAEINQRSKSDPTARRLMTIPGVGPIASTAITALVPAAEGFPAGRDFAAWLGLTPLQKSTGGKQKLGAVSKRGERTIRRLLIIGASAVVQQASRRGAPKGSWLAQMLARKPKMLVTVALANKMARIIWALLVKGGTYRTPTAAA

SEQ ID NO: 239689 - protein, 335 aa, unidentified
MKHYAGIDLSMETSHVCVVDADGRKVGALCVESTPEAIATMLERCGPVERAVIETGRMTPSVALGLRELGVAIVCIDARQAHQSLKAMKANKTDPHDAAGLAQLARTGFYKEVHVKSPAANGVRSVITARGHLVEARVRLDNTIRGLCATFGIRLGIGQGERFLARMRAAAAVPGLGEAVASLLGVRERLVEQIGQLDRQLKAISATSPVCQALMSIPGVGVQTSAAFAAAIDDAARFKRSRTVGAYFGLVPRRHQSGELDWTGRITKQGDSTVRKLLYEAANSILTRTKTTFALKSWALKIARRRGLRKARVALARRLAVIMHAMLRDGTLFEV

SEQ ID NO: 239690 - protein, 405 aa, unidentified
MEKVQAVPARFIGLDIHKEYFVATGVNAIRKVVFGPEKSSVYQLDEWILRHLTCSDAVVLEMTANAYTFYDALLPHVHSVIVVHPQQVSLVTNVPVKTDKKAALALAQLHAVGLLTGIWIPPQKVRDLRALVAQREKMVRLSTIAKNRLHSVLHRNHLILPVKPFEIEQRAWWESLHLSSTELFRLRSDLDTLAFAEKQVDQIEAFMKQDCTQDSRIPLLIQLPGVGMLTAITILAAIGDITRFPSSKELVGYAGLGTRVHNSGMTHSSGRITKTGRKDLRQAMVNAANNAVQNHKHWKKELEQMEPHLGRSKAIVAIARKLLVAVWHVLSKAISDRFADPCDVACSFYRFAYKVGVKNLPNDQSALTFTREQLDRLGIGKDLREIPWGSMRHKLPPSKLLLEKE

SEQ ID NO: 239691 - protein, 338 aa, unidentified
MNYVGIDHHRQYSHMTLMDQEGQTIRAGRVPNLRAEIEKFLEGIEEVEAVIETGRSSYTMVDVLEEMGVAVKIAHPNEVKAIARAKIKTDKRDSEVLAHLLRMNMIPEVYRRSVENRQAQRVLRQRAFYVSAMTALKNRVYAFIAQQREEVREAVARKTNIFSEKGQKVLMGLDLARGEKKLLEALLKTYRYLETRIEESTALVEKLYEESREAQLIRTIPGFGKYLSVLVAVEIADLARFADATHLNAYAGVIPSTHSSGDRTHHGKIVRAGNRWLRWAAVEAVWPAIRADYDLRCFFERLARGKGANKAKVATARRLLTIIYKVWKEARNYIAYRR

SEQ ID NO: 239692 - protein, 517 aa, unidentified
MAKSTSSGKEKKKGKKVVIVNDNGKDVIEEENGKEIRTTRDFGCGLDVHNLFIEVNVLVKNNLSVYEYRKSFDTDWISVNKAKEWVFDTIRNNSNPPVNPENNFHYTLESTATYHCVILAAWGGHPSIVNPYLARSGTKKTDKLDARGLSLADLTGVWEPSYIPSIDVIELRMLVDERKQFMSKATQIGNHINNLLLKLGINLGREGSVTKSYSIRSMIEAMFQDEAPESDDSNEENKTSSEDSNHYPPLPSIPESVRCVFKNDYEEYDNYCRIADDYFKRILDKIYSMKWETGSGEISGEEMMSLLTSTPGVGNQTAVLWLSRVITPRRFKNEKALAAYCGLDPSLKVSAGKVTSTVKRGGRKDLHSAFCMSASTLMRRHTEPFGKFGYNIAIQNGIWKKGVSALARKLATSMYYVSLRGEPFSYEKYKMINEPDVLNVSVETLVLLEPSFKRYLRFLYQNDIKDTKTLVHKYFICELPSIKGLGKNFFALVKDFINNQKKYNESYERMVSNEDNT

SEQ ID NO: 239693 - protein, 403 aa, unidentified
MNAVGIDVSKGKSMVTILRPFGEIVSSPFEIKHTSSDIHSLIKLIHSIEGESRVVMEHTGRYYEALAHQLSAADLFVSAVNPKLVKDFNNDSLRKIKSDKADSVKIARYALDKWQSLEPYSITDELRAQLKVMNRQFHFYVKQKTAMKNNLIGLIDQTYPNANTYFNSPTRSDGSQKWVDFVSTYWHVDCIGKMSLNAFVEHYQNWCKRKKYAFNKSKAEEIYTKTKELVPVFPKNEITKHIIRQAIDQLNSTSVTVETIRTLMNETASKLPEYSIVMQFKGIGPSLGPQLMAEIGDVTRFTHKGALTAFAGVDPGVNESGSYAQKSVPTSKRGSSNLRKTLFQVMDVLIKTMPQDDPVYQFMDRKRTQGKPYYVYMTAGANKFLRIYYGRVKEYLSVLPDPS

SEQ ID NO: 239694 - protein, 373 aa, unidentified
MRRSNQDRIVGLDVHPDSFAGAILQGIDPWKARVVSTSTRVALPLLEKWALRHTREEDILVMEASGNAFCVAERLRALKRKVVILESHRAGKVGKTYCATDRVDAIKIARIYLSALSPVVWQPDAKTRERREVFSAYQAVVKEGMRLKQQIKSMLNEHCVRLEKGFRLSHPSALGRLLRRRKWTEAQKMLLSQLHAGLVGARVRRQRLRHYMAQEILAEKKLLRLTRLCGINLITLYGLIAAIGDIQRFANARKLSTYFGLNPTVEQSGNYEGSGALKRHGRGAIRALLVQSAKKLLQVNNPLQKWGLAIAARRRRNKAAVAVARKLCVAVWHVLQGHVIGAIERMDTLHTKLHKLATELGVPTIKQLGFQTK

SEQ ID NO: 239695 - protein, 355 aa, unidentified
MYGLKHQKEKRSMDHFAGLDVSVKETSVCIVDDTGKIVREVKLASEPDALLAELRNPAYRFKRIGLEAGPLSQWLLSALAEAELPVICVETRHMRAVLKAQINKTDRNDARGIAQMMRVGLYRPVHVKTLRSQKLRMLLTHRKLLQSKAIAIENDLRATLRNFGLKVGIAGKVKFEARIKELVENQPDLAVLVEPLLIVRRVLREQIGILHRRLLAVVRDDEVCRRLMTVPGVGPVVALTYRATVDVPARFRKSKAVGAVFGLTCSKYQSGEIDRSGRISRCGDEMMRVMLYEAAQSMLFHSTKWSWLKAWAMKIARHRGMKKAIVALARRLAVIMHRIWVDGTEFRWTKEVVTA

SEQ ID NO: 239696 - protein, 355 aa, unidentified
MKKICIGIDIAKETFDATAIFAEDLDVFNQLGYAQFKNSPSGFRNLVSWVRKQCKQCKKHINDDCVFCMETTGGYDRQICSYLYDKGLHVWRESAIQIRRSSGFRRGKDDKADSRNIAEYAAKNQSKLVEFSPDAETVAELKEMVNYRSRLVERRKEAKTRLSEKQATSSKTAKQPQGVHTIVKLSKREIQCLDKMIEECDDEIKRIVESDEDMKKHFQHITSIKGVGAVNAAYLIAYSGDFRKITTPNKMACYMGAVTFYEDSGTSVHKRDPNKNVCCKMIKNNLRMAAKCAMDYNMEIKEYADRLKKKGKPYGIVVNNVINKLTHIIYSLIKNDCDYEYNHELLRKMKGKEAA

SEQ ID NO: 239697 - protein, 436 aa, unidentified
MDPVNSTAAEASGNSNKQFDVLTHFGGFDWAMDEHQFAVIDQDGTVLLNLRFSNDADGWSELRTKIAAYPRLGVAIETSCGPAVERLLELGVIVYPINPKAAERFRDRKSPSGSKNDPLDAWCFADALRTDGHGWRELRPLDPLTAELRILCRDEIALIEQRTAMILQLRQALHEYYPTALSAFDDWTQRSAWDFVVAFATPNALVKAGKRKWEKFLHTHKLYRPETARKRLDLFAKATGFASPSQAVTNAKSLLATTLARQLRTLQAQLDEYRVRITELFNNHPDRDGFGSLPGAGPKIAPRLLSELGNDRARFDSHEALQAYAGTAPVTQQSGKRSIARMRRACNKTLRATVHHWADLSRPLCAWAQAYYQQKKDQGMGHAAALRCLGQRWLKILWKMWQTRTAYNEALHTRNQVRHGSWVIGLMASAGSSTTK

SEQ ID NO: 239698 - protein, 392 aa, unidentified
MIYVGIDVAKDKHDCFITNSNGEVLYKPFTISNNREGFDTLFQRIESVSDDFTKVKVGLEATGHYSYNLLGFLLDKGLPTYVINPLHTNLYRKSLSLRKTKTDKVDSRTIATMMMSDMNLKSYSDISYHNEELKSLTRYRFGKVKERAKLKSSVSRLICILFPELEELVPTLHMASVYALLSEFPGADAVANAHLTRLSNLLSESSKGRYGKDTAITFRDAAKISIGSYMPAKSLELKHTIKLIQELTVEIDEIEAAIKRIMDEEIKSPILTIPGISYRMGAMILAEVGDFSRFDSADKILAYAGMSPSTYQSGQLDNCYSHMEKRGSRYLRYALYNATKYVCHWDKSFGAYLEKKRSEGKHYNVALSHATKKLVRLIFAMEKSGKAYLPAA

SEQ ID NO: 239699 - protein, 341 aa, unidentified
MKNLFIGVDFSKEKVDVAIIFADGLTETAARVFNEFKTTVSGYKQLVKWVEQNSYGIDSSLWLFCGENTGDYSKGLCNFLYGKGYDMWLENAKSIKDASGLRRLKSDRADASMIAEYAMRNYDKAIMYEPLSESLAQLRELFLYRQMVVRHRCSFQVRRGEKRLTMEKSPIKTMISQSGRHIVSELNKEVEKIDKRITELIKSDEELTEVFTIVTSVPGIGTQNAVCLMVYTDNFRRFNYDSRKIACYYGIAPFGKDSGTSVHSDPHVHYMANRQIKAMLTQAALAAVNFNPIMARYYMRLVERGKKKQVALNNVKNKLVHLITAMVRNRQLFSPEYKISA

SEQ ID NO: 239700 - protein, 418 aa, unidentified
MKSMEITAVGIDVSKSKSTVAIRRPGGVIVARPFDISHSNHDLEKLVSILKTTGGDIRVVMEHTSNYWKPIALTLKEAGFYVSVVNAMLIHDFSDNSIRKLKTDRADSLKIANYALTFWNELPPFNDEDETRLVLREQSRMYERLASTATSLRNGLIALADQTFPSIDQAFGHAIKNADGHEKWVDFFSIYWHRDCVLRLSIEKFTESYRKWCLRRNYKFRTNTAHKLYALAQDAVPTLPKNNGTKALVLQACKSLNAVCEAKQSTQEEMNRLASLLPEYEVVMQMEGTGPITGPALIAEIGDVRRFKNKKALVAFAGIDAPPFQSGNFESKSRHVSKRGSPHLRRAVFLVANIILTLSHKDNSVFCFMDKKRAEGKHYYVYTIAGSAKFLRIYYARVTEYLRTQEIPVAASCLNGNS

SEQ ID NO: 239701 - protein, 432 aa, unidentified
MIELSNEPDVRSYRIRLSDWLHRKAHSGAGRGRRSRHSTLRFRCIESWLVAGIVPGVEHLPLKKLAADENGLLKLLERWRAEAEKAGHKIDRMTVAFEAGRDGFWLARWLRARGIDAHVIHAASVAVPREHRRAKTDRLDTEHLKRAFLGWLRGEREHCKMCAIPTFAEEDAKRPHRERETLVGEHTTIINRIKGTLARLGVRSFNPKLKKAPERLEHLRTPEGEPIPPNTLAELQRDLARKQLVAEQIREIEKARLEQLNPKARPNLMVLVLMRVIGIGIETADMLVKEILSRNLRDRRAVARYGGLTGSPDESGKTRREKGLARAGNARVRRGMIQLAWRFLDYIEGCGTNVRAPHAGSPRLRHPDHSKCAAVLEAVKDEPSVGADAPILDRFSARRLRIRAGRDEETGAPGRTKKQRAKKMNRTLGAPP

SEQ ID NO: 239702 - protein, 381 aa, unidentified
MRTTYDEQHKADDRVLAVALELSKASWKVAMSDARHHPRIKNADAQQPLERLEQVLALIKDARARWALPEDVRVVVLYESGQDSFWIQRALATRGIETLVIDAASLPVERKARRAKTDRLDACRLVEALLGWLRGERQRFRVVRQPSVAQEDSRHWGRERQQLQREMQQHRDRMVKLLTTQGCWEKFDRGFAQRLANGELRDWEGKPLGATLQVRLQRELTRWQQARDQLKQLEQERAERFSVQQQAQLTQLVQLRGVGPVSAQRLVLELFWRHFANARQLGACVGLVPQPYDSGTMRKDQGISKQGNRRVRALLIELAWMWLRYQPNSALSRWFASKVQGDSKRSRRVAIVALARRLLIALWRYLERGMPPEGSQLKAAA

SEQ ID NO: 239703 - protein, 315 aa, unidentified
MDSISVGIDVAKEWLDIHFDRPHSKRMRVENSLIGIEKLKEQLVGGAYLIALESSGRYEALVRHELEAAGYRVRVKNPRLQRRLAEGLGRQAKTDGIDAKCLAETAKLGRTGEPRSKTRESLGDISRTIEALKKDRTGHLKRIQMPGFSQIAIRSLKATIEAIDTQIKKLEREFVKLVRKSPLADRYRLALGVEGIGPACARIAVCELPENLHNWSVRQLSSYAGVAAIDHSSGNCNPPARVPSHGNGHLKGALYMPAISLLASQDWAKKLYARLTARGLTHQQAIIAVMHKLLLHLVAVLKRGSPWQDEPPKKA

SEQ ID NO: 239704 - protein, 341 aa, unidentified
MKNKSFIGIDISKNVIDASIFCEGTPIKDFPHDVFNNSRKGFGEMCTWLKKNHVVLSNCLFGMEFTGSYSMELEKFLTARKYQFCMLSTHVVKHYPMGPKDKSDKIDSAKIADFLYRYNGTECVKPYKMPDKTMQRLKTLMNERKFLVEQRTCFMNRKQLCTTKEDAQLYDGYIKKLSHDIENIELEEQKLLATDESLFTTYWNLLTIPGIGFVNAINVIVITRNFTAFETARQYASYVGVAPHFRTSGTSVRWRPRPSARCDGQAKADLSMAATVAVQYDAELQSFYNRKLGGKQDSDTKRKALNAVKFKLVLRMFAIGKQNRKWEPLDSKSSNEKLAIS

SEQ ID NO: 239705 - protein, 338 aa, unidentified
MPVTTVSIDLAKHVFHLYGEDAQGKTVLRKRLSRAALKPFLATLPPCRMGMEACGGAHYWARECQHLGHEVRLINPKFVKPFVKSNKNDSRDAEAICEAMTRPNMRFVPVKTVAQQDIQALHRVRSRLVGQRTALVNQIRGLLAEYGLILPQQISHVRRGLPALLENTENGLTALARELGRELYAELGQLDERIERLEGLLQRVFRQQADCQRLAQVEGIGLLTATALVAAVGDPTLFRNGREFAAWLGLVPRQHSSGGKTVLLGISKRGDRYLRTLLIHGARAVVCRADTKSDARSRWVAAVKRRRGLLKACVALANKNARIAWALMAHAEPYRKAA

SEQ ID NO: 239706 - protein, 356 aa, unidentified
MTTLHYIGFDVHKKTISFCVKTASGEIVEEGVVLAQRPALQQWAVARPQAWRGALEATLFSGWIYDTLKPYGEQLEMAHPAKMKAISAGKKKSDTIDARTIADLVRCNLLPACYVAAPRIRELRRLLRYRSLVVSEAVRMKNKMAGLLMETGAVYVKEKLHRKKYFATLLEELEEVPESVIDLLRLSRGALDMFENTQKRLVRELLADPELTQRVERLMTIPAVGEITALTWALEIGDPQRFRSGSEAMSYCGLTAALKSSAGKQQRGPISKQRNHWLQSTLIEAAKLAPRWNPQLAALHARELERGHRNRATLAVARKLVTYLLAVDKSGQSFQLRALSPENGAEKEGAQKIKTA

SEQ ID NO: 239707 - protein, 400 aa, unidentified
MISVGIDVSKGKSTVCILKPYGEIVSKPFNITHTQKDLSELSSMLFRLNDEVKIVMEATGIYHLPVLTYLQEKGFFVSVINPYLMKSYRNESLRKAKTDKIDSRIIANYGIDHWFKMKEFQISGVIYEELKLLGQQYRHYMKLHLLSLAELTHLLDLTMPGIKNLLASWNETNRKDKRSDFVERFWHYDIITSMSEQEFTEKYILWAKEKKYVPSQEKAKVIYTLAQESIPTLPSETSSVKMLVTEAVRVLKEVDATLGLILSRMQEIAKTLPEYSVVREMGGVGNTLAPKLIAEIGDVRRFRNGKALVAFAGIDPPPYESGQFVGCNRKISKRGSASLRKVGYETMRSLKMRSRPEDPVYRYVVKKESEGKSKKSAKIAGLNKFLRIYYARVTELYKNI

SEQ ID NO: 239708 - protein, 471 aa, unidentified
MSKLSDRSSLSTEQSAPIVRPFEGLSRIQPQVAGIDIGAHELAVCIPGADETQIVRFFGTYTADLHALADWLAANDIQSVAAESTGVYWIPIFEVLEGRGFECCLISAVSIRRFPGRKSDVLDCQWIQTLHSYGLLADSFRPEADLIALRTLLRHRAQLIQHRSPHILRMQKALIQMNIQLSQVLSDVTGKTGLAIIRSIVAGERNPRKLAALRNYRCKKSEEEIALALTGTWREEHLFILRQSLDFFDFYSRQIDACDEEIERTYSSIRPDWGSPHPDKAPLLPRKRGSHSKNEPAHAAAIRHHIRRIAGVDLVALPGLSVSLAQIILSEVGSSLQRFENVKAFSSWLGLAPHNDISGGKVLRSRTFSHHNRARQALIQAAAALIRSDTPFGAFYRRLKSRIGPAQALIATAHKLARVLFVMLKFKRPYRPATAAQYEQKFRQREIAYLRRKAKRLGLTLTVPAPADAVS

SEQ ID NO: 239709 - protein, 345 aa, unidentified
MELHTIGIDLGKTVFHLVGLNLRGEVVVRKKFSRTQLLRFTANIHVELIGMEACGGAHFLGRALREQGHEVRLIPAQYVRPYVKTNKSDYIDAEAIAEAVARPTMRFVPIKTDDQLDMQSLHRVRERWVMRRTAVINQIRGLLLERGITLRKGRHHVDAALPLILEDADVRLSGAVRMLLAQLKLDLDQLAVRIDEADAVIQKTAHENEACRRLVAIPGIGPVTASALIAAIGNGGAFHKGREFAAWMGLVPREHSTGGQQKLLGISKRGNSYLRKLFVQGARAVLQQRTKQSSGLSAWLAQLTSRTHRNVAAVALANKLARIAWAVLAKNEQYRPPVLADVAAA

SEQ ID NO: 239710 - protein, 346 aa, unidentified
MILIGCDFHPRWQQVCWLNMADGETNNQKLVHASGDAEKFYRRLTVPVRVGIEATGNCQWFLELLGKLGHEVWVGDAAKIRACDPRQQKHDPRDARLLLQLLMENRFPRIWTPSSEEKDLRQLLLHRYKLVRMRVQVKNELQHLAMNKGITKGRRLWSAAGEKVLCELPLAPWASRRREDLFKLRSMLNEQVAALDEAVKHVAEENDRARLLMTQPGVGPITSMAFVLTMGDVSRFPRGKQVASYLGLIPREYSSGGHQRFGSISKQGNRFKRMLLVEAAQCVVRYDEGFRNEYLHRCHTKPRGVAKVAAARKLAVRLYWMLRTNTAYPEIARVGSSSRVPLAGAS

SEQ ID NO: 239711 - protein, 377 aa, unidentified
MKNCTRYLGLDVHAETITAAIAEGRGRIRSLGKFPNRPEAVRKLIDKLDGKRNLKVCYEAGPTGYALYWQLTRLGVECEVIAPSLAPKKAGDKVKTDRRDAERLAQSYQAGDLTPVWVPTPEHEALRDLVRQRAAAKTDESRAKHRLIKLLLRHALREPDESRAWTHPWWRWVQALKFEHEARQVAFADCIAEVLRMGERLARLDQAIERLVKSAPEHMRAVIEALQAFRGVAKLTAVTIVTEVGTFQRFRRPTELMGYTGLVPCEYSSGERQAKGAITHTGNAHLRGVLVESAWHARHRPWLNLRLKKVLPNLPAGVADIAWKAQERLHRKFTKMLYCRKHAGVVATAVARELVGFIWAVGCLVEAQHSNTQARAA

SEQ ID NO: 239712 - protein, 437 aa, unidentified
MRRKKKNANKSINLQVLPLLHPNAAGIDVGAKEHVVAVPCDRDPKPVRTFQAFTPDLHELAAWLKRCGIETVALESTGIYWISLYEVLEQYGFEIRVVNARHVKHVPGRTKTDVLDCQWIQKLHSFGLLNGSFRPDPQIRKLRTYMRLRDNLVVASSQAVHHMQKALFEMNVQLSNVISDIVGETGLRITEAIIAGQRDPMQLAALCSTRIKASRETVAKSLHGNWEEALLFALKAALETYRFIQTKIQECDCCIQQHLAQFESRAEAINSPQDLKAQLHRVCGVDLTKIPSIKEQSAQIIISEVGLDMNQWKTEKQFCSFLGLCPDNSISGGKVLHRATRKVYNRAADTLRLCAQSLTHSKSALGAKYRRLRARLGAPKAIVAMAHHLARLVYRMLRYGQNYVEQGIHQYELKFQLQRVKWLRKEAKSLNLQLVPA

SEQ ID NO: 239713 - protein, 385 aa, unidentified
MKEHNTSQGKRTKAKKPTLQQIEAVSKEENLTVGIDIGDRWSRYCVVNSKGATLIEGKLATTHQDLSKGFQSFARVKIAVEAGTHSPWISRHLAAMGHEVVVANPRRVALIGHSSRKNDRVDASKLAMLAQTNSRLLFPIRHRGESAQADLAVIRAREELVKCRTSLINASRGQAKSFGYRLESCDADTVKPEMADKLPETVRGSVKLLLETAALLTAQIKAADQQIHKIAERYPEISLLTAIWGVGELTALAFLLTIDDKERFDKSREIGPYLGIVPGQDQSGDSDKPQRITKEGDRMLRWLLVQCAHCILKKNAPDSDLQRWGLKKIDDQVKRGKKPNKKKVLVGIARKLAVLMHRLWANGEVYDPLFNAKQQEALANTNQAA

SEQ ID NO: 239714 - protein, 424 aa, unidentified
MNDTPTSDFAAYIGIDWADRKHDVCVQAAGVTKPQHRVIAHTPEAIDAWACELRERFEGKPIAVCLELTKGPLVSALQRYDFFVLFPVNPRALAKYRQSWSPSGKKDDHSDALLILDVLLKHPERLKALRPQSAQMRALQQLVEDRRKLVHDRVRVTNRITAALKAYFPQPLDWFEDKGTAIFCDFLERWPTAELARSARRPVLESFFHSHNVRNAERIEQRIAAIKQAVALTDDIGVVLAAKLRVVTLVSELRVLISAIAEYDVEIAQLCERLADYKIFASLPGAAEVFAPRLLAAFGEDRERFGSAAELQRYAGLAPVTEASGNSRWVHWRWACTSFVRQSFVEWVAQTIPRSFWAGAFYQQQKAKGASHQAALRALAFKWARILYRCWVERTPYDESRYLKALQKRRSSLLHSAASAATSA

SEQ ID NO: 239715 - protein, 348 aa, unidentified
MSHPTRWVGIDLHRRRSQIAILDERGELTLQKRIPTGRETFAELLGDSDGTHVALEATYGWEWLAELLENIGFDVHLAHPLRTRAIAAARVKTDAVDARTLAHLLRSGLLPEAYIAPPQLRDLRDLLRHRATLVHLRTSIKNRVHALLARQGILPEHSDLFGAAGREYLAALELPEGPRRRLDSLLALIADFDREITATTSEIDQLAKSDERVKLLCQIRGIGRYTAMLIIAEIGEVKRFPTAKHLCQWAGLTPTVRSSDGKARLGHISRQGSTIMRWALTEAAQHTPTGGGPLRAQYERIAKRRGSKIARVAIARQILTLCYYGLRDGEIRCLTSHPTDNDDLAEAA

SEQ ID NO: 239716 - protein, 353 aa, unidentified
MRKVQDFIVRGKRIFVGLEDSKRTWKLCVRCEGMIVHETSMPAEYDNLWSYLRGRYPECTIQVMYEAGFGGFWLHDLLAADGIDCLVTPAHKVTQEKVNTVKTDRVDARRLAKNLENGDYTSCHVPDRERREDRQISRTLNQIQRDIVRTKNRIRRFLDFHGLNGQLPAGAWGSSHYQSLKRLALSRSLQISLDAYLRVLDELAALRSELTAQLKALCDKDRYRQGVGSKKSCVGVGWLSAIRFTLEWGNLSRFPSGDHLASYTGLTGREYSTGETIHRGRITRQGNGQVRAWLIQCAWRAISRDPVLLDKFDRVRCNCGSRKKAIVAVARKLVVRMRALELADQPYCAGVVE

SEQ ID NO: 239717 - protein, 386 aa, unidentified
MQKLNDLSRSPNPLDPDGTLVAVIELSLSSWLVAGIVPGVERQPLKKLAADENALLKLLHRWREEAAKAGHRIKRIAVAFEAGRDGFWLARWLRARDIEAHVIHASSVAVSREHRRAKTDRLDTELLKRSFLGWLRGERDHCKMVAIPTTQDEDAKRPNREHESLVGEQSRIVNRMKATLIRLGIRGFNPKLKKAAERLDGLRTPEGEPIPPNTLAELRRDMVRRRLVSDQIRQVEDARLERLKQAPSDGPHAMVRLLARVIGVGVETADMLVQEVLSRSMRDRRAVARYAGLTGSPDESGRKRREKGLARSGNARVRRGMIQLAWRFLMFQKDSVLAQWFRTRTENARGTRKTMIVALARKLLIALWRLVREGVVPDGVALRPAQ

SEQ ID NO: 239718 - protein, 409 aa, unidentified
MKLIHERCAGLDVHKDTVVACVRIHRRSGQHEVRTFATTTAGLLALGDWLAEMRCTHAVMESTGVYWKPVWHILSDGDIKLVLANAEHVRNVPGRKTDVKDAVWLADLLAHGLVSASFVPPAEIEELRDLTRTRRQLVRQRVQHVQRIQKTLEDANIKLDSVLSDVMGASGRAMLDAIVEGENDASKLADLAHPRLQTAREDLVAALHGRITAHHRFMLRTHLEQVDAADRTIAALDEEVERVLAPFRGQVELLKTIPGVGNLVAQTLIAEIGLDMSQFPTAAHLISWAGLCPQLKESAGKRRSTRLRKGAPWLKPVLVQAAWSAVRKKDSYLRSQFGRLKARRGPKKAVVAVAASMLTAAYFMLRDGTAYQDLGAQYFDQVDRPRATKSLVRRLERLGYHVELTETAA

SEQ ID NO: 239719 - protein, 368 aa, unidentified
MKRVFVRTGCGLDISKNDFHACFGGQDTEGNFVIRARKKFKNQPSGINAYLAWLDKQRSKLSGQGELPFQAVMETTGVYHENLLFAAYEAGLPVCLELAKKVKRYLHSIGQESKTDKLDAAGICQMSCERRCKRWEPFSPNIYSLRAALRHRKSLIKAKTRFSNQLHAMRYSRVADKEVKASVERLLKQTEKEIKKAEQRIMELYQADTCLSSRLQPIVESVKGLGLFTALTAVAETNGFAQITSRKQLASYAGYDVLENSSGNVTKKGRMSKRGNARIRAAMYMSAVCVIRFKEGPLYELFTRVRRRNPKVYKIANVAVQRKLLLLIYTLFKKGEAFDPLKYGKFENKHTDGSSEPSPELREIETAG

SEQ ID NO: 239720 - protein, 346 aa, unidentified
MKSLFIGIDVSKEKLDLCIQSKGKVVKEWILPNTAAAIKSSFKSLQKEHGVEKSAFLVCAEHTGQYTYPLMCACEEIGFDLWLDNPAQIKHRSGIKRGDNDRLAARNIADYAARFQDKAQLFSLPQKNIASLRQLVSERDLYVSDRGKYQGQLTDQKRFMNEDDYAKKSKRLKSLIEGLDETISNVEKEMEQLIKSDDVLSNQYDLLCSIDGVGKQTSVKMIVETNAFKDFDNGRKFCCHAGVAPFQYTSGTTKRSRNKVSHRADKSIKTLLHMAALSVATRKKDGELREYYLRKVAEGKNKMSVLNAVRAKLVLRMFSVIKNNKKYDKNWNEKKVDKVDKVDKVD

SEQ ID NO: 239721 - protein, 369 aa, unidentified
MLSSGLIKGDSQSTKFGQSLYSSKSKNMEKNCFIGIDVSKDTLDVALLSLSAPEKYVEKRFENSPVGYKALLSWIKKQKSKPEESVFCMEHTGVYSLNPAVFFAEQSLFVSVVPALEIKRSIGVTRGKNDKIDARRIASFAFDKRKKLRPYTLPGKSLLQIKQLLTYRNQLRKECSSYKVSIKSHERYRLNTGLDYVTSELKNQIEELERRIVNVEKQIEHIINEEDSLKKNNDLVRSVKGIGPVTSAFLLVTTSNFSNFDCGRKYACYSGVAPFEHSSGTSIRGKTAVSHLANKRMKTLLYNAANSAVIYDPELKNYYQRKKSEGKDHQLIMNAICCKLIYRVFAVIKRQSPFVNLYKENFQNGLHKS

SEQ ID NO: 239722 - protein, 407 aa, unidentified
MAGKKLWVGIDVGKKSHHACSIDDRGNIVFSRKVGNGQAAIEDLIARTNTKVGPESEVVWAVDMTSGSAALLLMLLLRTGQRVLSVPGRLVNRMAGAFAGEGKTDAKDAHTIAETARLRTDLSEVTVPDRIVGDLQVLTARREDLMADWVRGVNRIRELLGSIFPGLEQAFDYSTRSALILLTGFQTPAGLRATGGTGVSEYLREHRAWAPGIPAMAQTAVTVAGEQSLALPGQAVTAPLIARLAQQLLDLDREIKDLDKQLGARFAEHPHAEIITSVDGFGPILGAELLADTGGDLATAFGTPDRLAAYAGLAPVPRDSGRVRGNLHRPQRYHRGLRRVFYLAAQTASNRPDSPSRAFYQRKRAEGKRHIQALIALARRLVNLVWALIRDNRPFTTEAPAPAATAA

SEQ ID NO: 239723 - protein, 326 aa, unidentified
MVSALGIDVAKAKLDVVLVNDAQQEYSGLFANSPKGFEQLQHWLSKRVKGDLHACLEATGQYGDGVAAFLYAAGCTVSVVNPARIKAFAASRLSRQKTDQTDARLIALFCQSQQPEAWTPPAPEQRALQAMVRHLRDIKAIRQQEYNRLTSGVSADVVAHALQQHIAFLDQQILELERQIHDHLERFPLLKQQRDLLDTIPGLGETTIAILLAEVPDIRAFDSASQFAAYAGVTPRHFRSGTSVRGRTRISKCGNATLRAALYFPAMVALRHNPLICSFGQRLRANGLAPKAIVVAAIRKLLHLVYGLLKSGRPFDPHYLIQVSNA

SEQ ID NO: 239724 - protein, 372 aa, unidentified
MYYNTIYVGMDVHKSSFTLCSYTIEAEKVSHFQRTEADYKKVLKYLEFLRTVYGDDARFVCGYEAGCLGYTLYHQLTEHHVECVILAPTTMLEQRSRKRIKTDKRDAEVIARCLAQHNYSAVHIPTATDEETKEYLRMRNDHKLALKRIKQQILAFCLRHGHIYGGKSNWTISHLKWLKELELNSMHREILDEYLLTYTTLTDKLERLDSRIEEIASKPEYNESVKKLSCFIGIKTHTALSTLVEVGDFHRFATASKFASYLGLVPGEDSSGDDQTRLGITKAGNRHLRLLLTEAAQCYARGQIGYKSKALKARQSGNPPEIIAYADKANERLRRKYYKMVLQERKTHNVAKTAITRELACFIWGMMTDRIA

SEQ ID NO: 239725 - protein, 392 aa, unidentified
MMVSVGIDVSKDKHDCFIVNSEGEVLADVFTIQNTRDGFNFLLQKIQDCTTPQDKIKVGLEATGHYSYNLLGFLLDNGLPTYVLNPLRTNIYRKSLSLRKTKTDRVDARTIASMLLSDAGLKPYTSTAYHNEELKSLTRYRFDKVKERAKLKSSISRLVCILFPELEKLVPTLHMASVYALLEEFPGAKQIAGAHLTRLKALLETASKGRYKRDVALQIREAARNSIGSRMPAKSLELQHTIRLIRELDTEISEIENQIQSIMKELHSPITTIPGVGFRMAAMILAEVGDFTRFASPDKLLAYAGMSPSTYQSGQLKNCYPHMEKRGSRYLRYALYNATKYVCLWDPTFSAYLAKKLTEGKHYNVALSHASKKLVRLIFAMEKSRQPYRVAP

SEQ ID NO: 239726 - protein, 343 aa, unidentified
MDHFAGLDVSVKETSICIVDDTGRIVREVKVASEPEALLSVLANPAYHFTRIGLEAGPLSQWLYSVLAEAGLPVICVETRHMRAVLKAQINKTDRNDARGIAQMMRAGLYRPVHVKTLRSQKLRMLLTHRKLLQSKAIAIDNDLRGTLRNFGLKVGVVGTVRFEARIKELVENHSDLAVLIEPLLVVRRVLREQLGILHRRLLTIVRDDEVCRRLMTVPGVGPVVALTYRATVDVPGRFRNSKAVGAAFGLTPSKYQSGEINRTGGISRCGDDMMRMMLYEAAQVMLLRSAKWSWLKAWAMKIARHRGVKKAIVALARRLAVIMHRIWVDGTEFQWTREVAAA

SEQ ID NO: 239727 - protein, 386 aa, unidentified
MSQPSDLNRSHTALEQDCTLIAVVEMSLNSWLVAGIVPGIDRHPLKKLAVDEHALLKLLRRWQAEATKVGYTVKRIVVAFEAGRDGFWLARWLRARDIEPYVIHASSVAVSREHRRAKTDRLDTELLKLSFIGWLRGEPHHCHMAAIPTIEEEDAKRANRERENLVCERSRIINRMKACLIRFGVRAFKPTLRKASDRLVKLRTPERVPLPPNTIAEMRRDMARLLFVRDQIKEIERARLQRLAQAPRQRTHAMVRLLARVIGVGIETADMLVREVLSRNMRDRRAVARYAGITGSPDESGRRRREKGLARAGNARVRRGMIQLAWRFLKFQKDSALAQWYRDRTAGARRGARNTMIVALARKLLIALWRLVTAGEVPAGVVMRAA

SEQ ID NO: 239728 - protein, 341 aa, unidentified
MQHVAIDLGGRESQVCVRAENGQILDERKIATRGIEAYLKGQPPSRVVVETCAEAFCIADQALRSNHEVRVVPATLAPTLGVGSRGIKTDRRDAQMLSEVSCRIDLPSVHLPTQLARERRNRCGVREELVAVRTALINCVRGWTRGLLLKFPSGVTATLTKRIRDAATKHPQGLPEYIERVLASIDAIQEQIVKADKELLQLAAEDPVCQRLMSVPGVGTVTSMRFVAAIDDVARFPSAHAVQSYLGLTPGEHSSSDRRQRTGITKAGPAPVRRTLTQAAWALRRSHPKDPISLWAADIELRRGKFVATIAVARKLAGVLYALWRDNSRYTPNYVARNNKA

SEQ ID NO: 239729 - protein, 418 aa, unidentified
MTTQVFKYQAGIDWASDHYDVCVVDESGTALGEERFEHSGEGIGKCIDWMLQMAGGDTSSIAVAIEVPHGAMVESLIEHNLAVFAINPKQMDRFRDRHTVAGAKDDDLDAFVMADSLRTDQRCFHRVELDEPAVLRLRELSRMADELQTDSNRLANQLWEQLRRYYPQMLKLSSAANEDWVWDLLESAPLPSTVGTLKLAKVKTILKAHRIRRVTAEQVLEHLRQPALRLAPGAAEAASEHVLMLLPRLRLLQDQRGAIAKRIRGILEELCTAPPAGERREHRDAEILLSLPGIGLIIAATMLAEASQPLRDRDYQALRNYAGAAPVTRRSGKKKVIVMRHACNERLRNALYHWARTSMQNDARAKQHYAEMRARGHSHGRALRGLADRNLAMLMSMLKSGTLYDPTRRGGTALAQAS

SEQ ID NO: 239730 - protein, 367 aa, unidentified
MKKVSTVAAKPSKKIFQQKLTVGLDLGDRNSCYCVLDECGQIQLEQRVRTNAKALREVFGEMPHKRIALEIGTHSPWISRLLSELGHEVIVANARKVRLIGESRKKDDRLDAQTLARLARIDPKLLYPVKHRSAQAQADLMMIRARAGLVRARTGLVNTARGLAKSYGERLRGCNVRNMNAEKAEGLSPELQMALEPLLACIESLSEQIREYNERIEKLAQDSYPQVALLKQIKGVGTLIALTFLLTLEDPHRFRKSRDVGCYLGLQPGRRNSGRSEPQMHISKEGDPYLRTLLVQGAQHILGPFGVDCDLRSWGLKLAERGGRNGKKRAIVATARKLAVLLHHLWVSGEVYEPLHNNRGTTVAAAA

SEQ ID NO: 239731 - protein, 387 aa, unidentified
MDGAHYATIGMDVSDRKAQVCVMAEDGKSPKIAMETVVPTTKEGLAKFLSTQDRSAPVAFETGMHCRWMNEAAEGPGFKVYAANPCRLRMITESKTKNDVNDARMLARLALSDPGLLHPVKLRGPGRRRMPNLHEMRNLLVKRRTGVIVQMRAIARAMGFRIPKCPTGRFHRLDTSPWPREFRDIARPTMKNLGQPAVTIKTYERQIRGLAQTPAFKAQVGRPMEIRYVGLHVATGFVAVTGGDVDRFEKPRDVGPWLGLTPRQDQSGDIDRQFRITKAGSPSMRRLPVESAQMILRDGPAGTGLKARGRRMCARGAKMAKRRAATAVARAPAVLMAATLKRPDAPYVPPSGRCEKEPPAMRATAWAADSGGNPGRRFREQEAEPRR

SEQ ID NO: 239732 - protein, 366 aa, unidentified
MKKVSTAAAKQSRNFSEQSLTIGLDLGDRSSWYSVLNETGEVLLEKKVSTTPKAMKEVLGGMPRSRIALETGTHSPWVSRLLSGLGHEVIVAHARNVRLIGESRRKDDRLDAQTLARLARIDPQLLSPVKHRSARAQADLTIIRARAGLVRARTALVNTARGLAKSYGERLRGCNVRNMNREKADALSPELQRALQPLLAGIEVVSEQIHEYNERIECLAQESYPQVALLKQVKGVGTLIALTFLLTLEDAHRFRKSRDVGCYLGLQPGRRNSGQSEPQMHISKEGDPYLRTLLVQGAQHILGPFGPDSDLRRWGLKLAERGGRNAKKRAIIATARKLAVLLHRLWVSGEVYEPLRNNQGTIAAAA

SEQ ID NO: 239733 - protein, 327 aa, unidentified
MRQPVLGIDISKATFDVVLLIGEKKLHRQFANNTEGFNQLDSWLHKNGANKVHACMEATGQYGEWLAEYLYQNGHDISVVNPARIKAYAGSKMRRNKTDKTDAELIAEYCLKENPSLWSPPEADFRDLQAMERHLEDLQAMLLQEQNRLESGVKTFWVVEELLNHIKYLKERISATKEAMQDLIKTNAKLKREHDLLVSIPGIGELTAAKILGEIRDIHQFESARQLAAYAGITPRQFISGTSVHKKSRITKTGNSNIRRILYMSAISAKKYNPIVAVFCARLLQNGKTPMQAVCAAIHKLLHLIFGILKSGRPFDPNYLQVSTITP

SEQ ID NO: 239734 - protein, 372 aa, unidentified
MIVVGTDTHKQTHTCGAVDALSARARGELTAAARRGSFGKLLVWARKLDGERVWAIEDCRHVSGAFERFLVARGERVVRVAPKHMAGARRSARERGKSDSIDAFAVARAALKEGIENLPGAHLDGRALDIRLLSDHRDDLIHARTQDQQRLRWHLHDMWPELEIPSGALDTQKWLGKVSRRLARTGQTVRVRVARELVHQIAARTTRINELERDLARLVADYAPQLLAEPGCGPLTAAKLVGEIAGADRFATDAKLARTSGTAPIPASSGATHRHRLDRGGNRQLNCALHRLAVNKGKWDPAAAAYLERKQAEGKSRKEALRCLKRHLARRVWKLLHAPSTAVAPRAAAPATTNTTTPIEIVGAPNPMICLR

SEQ ID NO: 239735 - protein, 320 aa, unidentified
MEKAKVYIGVDVSKATLDAAVHSSPKKWQFSNDEAGIDRAVGFLVELAPHLVVMEATGGYETPLAYALRTAGIPCAVVNPREVRDFAKATKKLAKTDSLDAQVLAHFAAVLEPAPQPMSSEQTEELGALLARRRQVIEMLTAEKNRLHSARKPVKEAIKAHITYLESELGEIETNLEGRIQESPVQRMKDKILRSVPGVGPTLSTTLLADLPELGSLDRRQIAALVGVAPLNRDSGTFRGKRSIWGGRGQVRAALYMAALVVTRFNPVIANFYHRLLASGKAKKVALIACMHKLLVILNAMIKHRTTWHSSLPEAPVPCP

SEQ ID NO: 239736 - protein, 405 aa, unidentified
MDIIVERGAGLDVHKGTVVACIMGTGIKKEIRTYLTMTNDLFRLKEWLKETRITHVAMESTGVYWKPVFNVLEDTFEVMLVNARHVKNVPGRKTDVKDSEWLCKLLRNGLVRGSFIPPKPVRELRDLTRYKRKLIQSITSEKQRVEKILEDANIKLSSVASDTFGASGKRIIEELMKGELRPDEMAELSKGKLRQRKEELKEALVGNIEDHHKRMIETSLKHINAMEEILSTVELKIQKQIELRFEEEFELLKTIPSVKDSASVIIAEMGVNMDLFPTEMHLSSWAGMSPGNNESAGKKKSGTTTHGNKYLKTILTEFAWIASKMKGTYLFAKYRSLVGRRGKKKALVAVGHKILISCYQILKYKVPYKELGANYLTQQKRDHIAKSYIKRLSNLGYAVTLKEVA

SEQ ID NO: 239737 - protein, 309 aa, unidentified
MSGTGAGVDVSKAYLDVAVHGHRPVQRFPNTTDGFASLVAWLKGFDIGQIILEATGGYEQAALDALFRTGMPVARVNPRQARDFAKALGQLAKTDRLDARMLAHMATVIPQTRYRPLDEKAFHLKQLHLRRTHVVGMIAAEKQRRRQIVEPDIRTMLDDHIRYLEADRNRLDTAIAAKIEGSLQARVLGVTKGVGAVFLTTAICDMPELGYLHRKSAAKLYGVAPLSRDSGTFRGKRTTWGGRASARSALYMATLSAVRYDPALKAFYQGLIARGKLKKVALVAAMRKLLTVMNARMRDALAASANAAG

SEQ ID NO: 239738 - protein, 365 aa, unidentified
MLHRLNSAATLIQRTPTEAPRLHMYYIGLDVHKKTISYCVKDVSGRIQQEGKVGSSRRELDGWMKTLPQPWSVGMEATIFSGWIYDHLLPHAAQIKVAHPLMLRAIAAAKKKNDQIDASKIADCLRCDFLPESHMMPQEIRDRRRTLRYRHLLVRQMVQMKNRVSGLLMETGVEYNKQRLHKVSYFRELLSTNTEVHPSIRPLLKLSRETIERCQKTEYALVSSLQRDPVLADRIKRLRTVPGVGPITALTWALEIGDVSRFRTIKNAISYCGLCGDERSSADKVMRMPLSKQRNKHIQRALVEAAKLAPRQSHELAVIYDKEKQKGNGNRATLAVARKMVSYLLAVDRQQRDFISGEERRTGAA

SEQ ID NO: 239739 - protein, 356 aa, unidentified
MTYVGLDVHARSTHAAAIDVHSGELRRSRFGLGSDEVLAWLQALPQPLRGCYEAGPTGFALYRAAADAGVQLDVVAPSKTPRAPGDRIKSDRKDAELLARLLLAGQLKPISVPSPALEAARHLCRAREQVRSDLMRCRHRVSKLLLLHGRVYAEPTTWNERHRRWLARQRFEETETELAYLDTLAAVDGLVARKAALDERLSRLALEGEWAPTVARLRCFRGIDTLSALVLALEVGDFSRFARPAQLASWLGLVPTLDQSGESRRQGAITKTGSSYARRLLVEAAWQYLREPRIGVTLRNRQQGQPAQVLQIAWRAQHRLYRLQKRLRARGKPGNVATVAVARELACFLWAAAVAE

SEQ ID NO: 239740 - protein, 713 aa, unidentified
MVGREVVESQQGVAVLDQASRCLLVLGPVFLGEGVHGGLGGGAGRGLPDLAQVGLHRRLHRFRELVQDVGGLVNPTPLMTRAGEGFIEGVPEPHGPIAHGDLRQDREAAGLDIDQQFAPTLRALSHPDLEAKQFLAPLRCRADDHQHAFGGRLHAGLQVDPIGPNVDIAARGEVAALPAVVILLPARREARDHARRQVRRVSPEQRRQRFLELPGGNTTQVKNRQQGIEALRPPRPARQDVRGEADPSLGRHAGGAVAHLLALHRDRANPGLDHPSRPGAMPHDAMASIGQAFILELCNEARRLGPERGGQHLARALAGDLGERVKDRSGLVKRGDRGIVFHRWGGCRPPETASQCAKVVVLRATKRRGRQMKDTMIGVDLAKNAFQLHGASMTGQVKFRKKLTRLQFLKFMAEQLPTVVVMEACGSASYWAREMVKFGHEVKLIAPQYVRPFVKRQKNDMADAEAIVIAAQRPEMRFVEPKSEDQQARAVMFRSRERLVHQRTELVNALRAVLYEYGHTIPLGIGQLKRIEALLDEPNSDLPALVREECRDMMAQIAEKTTRIEARTKRAAELAASADTAKRLQTMPGVGPLTALAVEAFAPDMTSFRRGRDFAAWLGLVPRQHSTGGKQRLGRVSKAGQADIRRLLIIGAMSRLNWLGRRTIPEGSWLARMAARKPRMLVAIALANKMARAIWAMLTKNEDYRDPAWAAAA

SEQ ID NO: 239741 - protein, 346 aa, unidentified
MTYSTTVGVDLAKNVIQISVVSGRGKELSNRSLTRNKFAEFLGKQKPSLVAFESCASAHYWARAAKRHGHQARIIPAKAVVPFRQGHKTDSNDALAVAEAARRPNIKEAPMKTAEQQGLQAIQRSRELLIGECTALSNHLRGILLEFGVAIPQGFASLLRALPEILEDGDNELPDLYRPTLHRMHQRLLELREDIESMTREIDGLVKQHPVCKRLTAIEGIGPIGALSLYAVMGSGKAFTKSREFSAYLGLTPRQYSSGGKTNIVGISKKVGNRRLRSILIQGARAYVYRMKEPRSLKDHWLKDLIERAGPNRAAVALANKNVRTAWAMVTQGTEYQRRLQLEMAA

SEQ ID NO: 239742 - protein, 352 aa, unidentified
MPTITTVGLDLAKKVFQVHGVDAEGKVVVARKLRRKEVLAFFAKLAPCLVGMEACGSAHYWAREIAKLGHSVKLMPPKYVKAYVKRGKTDAGDAAAICEAVTRPSMSFVPVKGVEQQGLSMLHSARSQLIGQRTQLINAVRAHLNELGIIAARGLLGLAELAAIVRDESDQRLSATARTALMVLVRQIEIVSTEIAALDTALRKENKASELGPRLETIPTIGPVIASALRARVTDPKLFDNGRHLSAWLGIVPENDSTGGKVKQKGLSKKGDRYLRSLLITGAMAVVRQAKVRPDKRPWVTKLLGRMSKKQAAVAIANKTARIAWAIMVHGGVYDAAHRAPQCRAEACAATK

SEQ ID NO: 239743 - protein, 469 aa, unidentified
MVLKMKCKSNKKNTQVKESSSSSLPILFPDTAGIDIGSKSHFVAVPSNRDTNPVREFSTFTADLHKMVNWLKECKIKTVIMESTGVFWIPAFELLESNGFEVKLVNARHVKNVSAHKTDVLDCQWLQQLGTFGLLKGAFRPSDSILPLRAYLRQREMLIQIAAQHIQHMQKALTQMNLHLHNVISDITGKTGMLIIRNIVGGIRDPKVLAALRDERCHSSEAVIEASLEGNYRDEHLFALKQALLLYDMYSERISECDSQIEQAAKNLETKCDPKKMAELNQLMKPKNKTRKSLKKHEYPFELRMELIRITGVDLTLIPSIGASTALTIISEIGLDMSSWPSAKHFASWLGLCPGNKVSGGKRLSGKTKPCANRVSIALRVAANTLYNSECAFGAFLRRMKARLGSPKAITALAHKLAKLIYIMLKYGHEYVEKGVEFYEDMYRKRREVSLRRKAKEMGYELIPLALAA

SEQ ID NO: 239744 - protein, 412 aa, unidentified
MEVLHPRCAGLDVHKETVVACVRIVSGGEVSRAVRTFETTTARLIELAEWLEASGCTQAAMEATGVYWKPVWQVLAGGGFGLVLANASHVKNVPGRKTDVNDATWLAELLAHGLIRASFVPGPEIQELRGLLRTRKQLVREKASHVQRLQKTLEEANIKLESVLSDVMGRSGPAMIQALIAGETDPAKLAALAHPKVRAPQARLREAFRGRVKRHHRFLLDLHLQQIDALDAGIAAIDREVDAGLASFRDAVKQLSTIPGVSELSAQVIVSEIGIDMSRFATAAHLRSWAGLCPRNDESAGKRRSTRLRTGAPWLKATLVQCGWAAARTKATYLNAQFVRLRARRGPKKAVCAVAASILTAAYHMLKDGTFYEDLGPAHFDRRRPVAQARRLVKRLADLGFSVELKPAAAVS

SEQ ID NO: 239745 - protein, 416 aa, unidentified
MSNYFRFWVGIDWAKANYQICVIHSGGEILNEFVVDHSGTGIAGFLEWLLKLAGGDISAIALAIEMPQGSMVESLAERGFAVFSINPKQVDRFRDRHTVAGAKDDRRDAFVIADSLRTDEHCFHRVRLDDPLTLQLRELSRMEEDLRQDTNRTVNQFRQQLHRYFPQLLVLSPGAEEPWLWELLDLAPTPEKASRLTKPRIEKLLKAHRIRRLEAELVQRELRTPALQLAPGAVDAASRHALMLLPRLRLLRQQRQEIASQIEKLLEQMSESEQSEGQSDKHRDAKILLSCPGIGRIIAATMLSEGSQAIRERDYHALRSYAGTAPVTKQSGRKRVVQMRKACNPRLRDALYHWARVASMCEERSREHYKQLRRQGQTHGRALRGIADRLIGMLIAMLKTSTLYQPNRRPLQNLAA

SEQ ID NO: 239746 - protein, 344 aa, unidentified
MEEIIRIGMDTSKSVFQLHGVNAAEQPVLRKKLSRREMVKFFEKTPPTTIALEACGGSHHWARLLSSSGHEVKLIAPQLAKPYVKRGKNDAADAEALCEAMSRPTMRFVPVKSADQQAALMLVGLRERLIRNRTQLANAIRGFAMEFGIAAAKGMCRIEPLLERIAADQSLPALARELFAMHGVEYRDLLAETKAVEEKLTALHRSDECSRRLAEIPGVGPVGASLLMMKTPDPRLFRSGRDFAAWIGLTPKDHSTAGKVRLGVITRAGDEMLRSILVVGATALLQHVRAGRSRHASRWIIELLQRKKPKLVAVALANKIARIAWKLMVSGETYRRTEGQSETF

SEQ ID NO: 239747 - protein, 367 aa, unidentified
MLKKLFAGIDLHSNNLVIAIMDQDGRRIKHQKLACDLKLVKEFLKPYRRRLQSIAVESTYNWYWLVDGLLADGYAVQLANPAKMEQYNGRKYTADTHDAYFLAELQRLKILPTGYIYDPQLRPVRDLLRRRLSLVHQRTALMLSFKSLYTRTTGQDLSLSRLKGLTVQAAEGLYEHEANGLIARIQREHMEKLDQSIATLEATVLASARPLPCYSRLLTLPGVGRILGMTITMEMGELERFKAAGNFASYSRTVDARRLSNGKKKGDNNEKCGNKYLAWAFVEAANFAKRYDERCRQWFDRKAGKRGKVIATKALACKLAKAAWHVVQANSDYDPQRMLPGKNPPAAGTVLESRRQPVKGLVKTLQD

SEQ ID NO: 239748 - protein, 415 aa, unidentified
MTECNRMPEAMTLVAIDIAKSYHEVLVEPPPPARRRRFLVANTLPEYQRLATYLRQLATRVLVGFEATSNYHRTLAYFLHRQGFDLRLIPTLALARTREAMHNSWDKNDPKDAQVILHLLKTGLSQTWHDPLLSGTNDAQELSKTYHQVTLARTRVWHSLRNHYFSLYFPEIESFIRSNHSDWLIQLLLLFPTPGAVTALPREEFIAQAWGIIGRKVHKADLLANIYIAAQCSVGLPVTTDSRAISMFRLMLEQYLTLGRLREQIAAQAETALAGDSDCRRMMTAPGIGPTTALTILAEAGDLRRFVHYRQFLKFCGMSLSTQQSGRFRGQSRLSKYGNARLRTAFWMAAKVAVRMRENSIRRKFDRYVRTNPLDADLRRKAYSAVAAKLARIVYGLIKNETDYRPFFEEAIPGG

SEQ ID NO: 239749 - protein, 403 aa, unidentified
MVFVGIDWSEKWHDICLMDKDGAVLARRRIEDSLAGLTQLQTLIAEQAADPAETVVCIEKSQGLMVHALQAADYIIYAVNPLSASRYRDRHTPSRRKSDGGDALMLADLVRTDRHRHRQLAQDSDPAEAIKVLARSHKTLIWTRQQLCNQLRSALLGFYPGALEALADDLCGLDALSLLKQAPTPEQGRRLSLAKISSTLRRAGRRNVEQRAASIQHALRAPRLEGSELVAQAYGVTVVSLAGVLEEVIANIEQQEKELGSWLQMHPDAEIYRSLPGLGNVLSARVLAEFGDDPNQFHDGRARKNYAGTSPITRASGRSKVVSARFIRNHRLADACQLWAFSALSASPGARRYYDAQRANHKGHEEALRIVANRLIGILHGCLRYRQPYSEDIAWPAPTAAAA

SEQ ID NO: 239750 - protein, 450 aa, unidentified
MGKARPQVIEDEEHQRVFERVAAVDVAKASGVVCVRVPGAGGRPRASRVWEVTAVMSAVTELGRQLVRDQIQMVTLEATSDYWRIWYYVLEMCGLAVQLVDPAQARAIKGRPKTDKLDAMWLARLTEWGMLRPCFVPPAPVRRLRDYARARTDLVQERTRCFQRLEKLLEDALIKLSSVASKLTTVSAQDMIKAMIAGERDPRALAALARTSMKAKHAALVAALEGMFDSHHGELAQLELDQIAFLDTRIGWAENRITAVLAEIPAAWGIDAGGATGPDAGTGPDAIALPAARRLAEIDGVSVLTAAQIIAEIGLDMARFPTAAHLVSWAGLCPVDRQSGRSRKKRKGHGNTYLRGYLGQAATGASGTATFLGERYRRIARRRGKAKAQVAVARSILIIIWHLLADPAARYTDLGPGYYQARTDKDRRIRNHIRQLEALLGHPITITTTP

SEQ ID NO: 239751 - protein, 371 aa, unidentified
MQYTTVYVGMDVHKENFSLCCYTNEKEKAEYGQKVEAHYSKILNYLEAMRFHYGQDALFICGYEAGCLGFTLYHQLTYHHVQCVILAPTTMLVQQGKKRIKTDKRDAALIARCLAHHDYSAVHVPTAQDEETKEFIRMRDDHKLALKKIKQQILAFCLRHNCSYSGNNWTQTHIAWLRSLRPGGLYEEILTEYLLTYSNLVDKLERLDRRIEELAGDERYAEDVHKLSCFLGVRTHTALSVLTETGDFNRFGSAQQYASYLGLVPGEDSSGPDQNRLSITKAGNRHLRMLLVEAAQSYSRGKIGYKSKAIKERQSGNPPEVIAYADKANERLRRKYYHMVLGQNKRNNVAKTAVARELACFIWGMLTGNIA

SEQ ID NO: 239752 - protein, 347 aa, unidentified
MLHAGLDLSRRKVDVCLLSGQGGQLAQLAVPPDADALRGLARRIEESYREPVCAVIESMTGARFVHDTLEQAGWAVEIADAQKVKGLAPLACKTDKIDSRVLAVLSHRDLVPAIWLPDPRVREERELARFRLHLVKHKSALKNRVHSTLINFGKPCPVTDLFGVEGRRLLARLRVPEPWRGNVTASVELIDDLERQIAEINRRLKQGHADHRYIPLLMSAPGIGWVLAFTIAAEIGQIERFPSPQKLAGYTGLCPRVNQSGDKDRRGPLTKHGPTYLRWALLEATMHALKHPAYAERYQRNKRRLGKQRGAKVAQIDIARRLAHAIWHMLSRNQQFAPRGAAFRLAA

SEQ ID NO: 239753 - protein, 345 aa, unidentified
MKKSTTIAIDLAKHSFQVCKLHGSSDEFNKAFTRDKLKAWLIQQPPTIVVMEACSTAHYWGRFCCNHGHSVRLIAPKYVTAYRTGQKTDKNDATAIAVASQQANARFVALKSIDEQALQSIDRIRQHLTDSMTATSNMVRSLLSEFGFIIPKGHSAFKRHIIEILEDGQNSLPDILREHVANAFHLHETLAKKRADLETSLTQHLKHHDACKKLEALEGVGPVNALGLYLSLGANGGNFKNGREASACIGLTPKQHSTGGRVTLLGISKKVGQKKLRSSLIQGALAVAKVVDKREPRNVKETWLKSLIQRAGLMKAAVALANKTTRTAWALLHYGSEYQAPLTYE

SEQ ID NO: 239754 - protein, 346 aa, unidentified
MTEVYDGRQVVGIDLHRRRSVIVRMTEDGRKLGTVRITNSPAALRAEIARAGKNPRVAEATYGWYWAADVLEEAGAEVHLAHPLGVKAYSYRRVKNDERDACDLADLLRMGRLPEAWIAPPEIRELREITRYRHKLVKTRTSVKDQVHGVLAKLGIPVTCTDIFGVWGNTWLDGLDLPQPYAGKVASLRQLAGTLTGEITLLEKVIGDLLAGHEGYAAIQQLPGIGPVLAAVIVAGIGDIRRFPGPGQLCSRAGLTPRHYESDTKVIRGHITKQGSRLLRWAVAEAIQRQPAGTRPRQVKDAIIARRGKEAKNIAEVAAARELLTLVFYGMRDGHVRRALQRGQAA

SEQ ID NO: 239755 - protein, 331 aa, unidentified
MKFSTIIGIDVSKLTLDLHVLPLNQTFQAQNDETGFKQVFKWLKRDCKLDLSSSLFAFEFTGFYSFKLASTLQDLDYNFVMIPGLELKRSQGISRAKSDPVDAEQIADYAYLRRNKLTLTLLPEKDIMRIKRLLSLRQKLVRQRSGFKVTLSEAKRAFNRKDDPTYYKVQEDLVNLYTKKIDILENEIMLLVKNNQVLQKQYDLITSIKGVGMITALTMIAFTHAFNKFPTWRKFACYSGIAPFPYQSGTSIKGKTKVSHLANKRMKALLGNITGSAIQHNTEMKMYYQRRLEEGKHKMSTQNAIRNKLLARIFAVVQRGTPYADTTKYAA

SEQ ID NO: 239756 - protein, 381 aa, unidentified
MTTPATRTAYGTTPAGTLWMALELSEKNWKLGFTTGPAQKPRERTVTALAQERVLDEITQAKRRLGLPEMAPVVSCYEAGREGFWLHRFLEAHGITNHVVDSSAIEVSRRQRRAKSDGLDVRKLLSMLMRYEQGERQVWQVVHVPSVEAEDQRHLHRDLETLKRERARTTARIHGLLSSQGLRVTSLTKLPEQLDALRLWDGSPLPSGLRQRVLRVYAHHIFLSEQIAAVEAERRALLQTSTDASIDKIRQLMMLKGIGINGAWLLVMEFFGWRAFTNRREVGGLAGFTPTPYQSGESAREQGISKSGNRHVRWMTTELAWSWLRYQPDSALSVWFRERFGSGGKRLRRIGIVAVARKLLIALWRFLETGGLPEGAVLKEG

SEQ ID NO: 239757 - protein, 338 aa, unidentified
MNYYAGIDVSLEALSVGVIDATGKIFRETKVASEPEALIAWLGSLGVSLTRIGLEAGPLSQWLYAAMRQAGLAVELLETRHVRNAFKIMPVKTDRKDARGIAELMRLGWFRPVHCKSMEAQETRAILTSRKLVQKMLHETEMSLRGVLRNFGLKVGKVAAGQFEFRIRELVEGHPTLAAIAAALLATRATLRREFNALEKRLRAIARTDTRARLLMTTPGVGMIVALTYACAIDDPSRFKSSKTVGAHFGLTPTRYQSGETDYTGRISKIGDSSVRAVLYEAAHVILTKPVKGCTALKSWAMRIAKRAGMNKAKVALARKLAVIMHRMLADGTTFQPA

SEQ ID NO: 239758 - protein, 367 aa, unidentified
MKMVIGMDVHSKATMYMAQSEKGEPVSEGTVTTSLDGFSEMVEKLGASPGTRIGLETGTQMTFVARILSSLGMAPVVIDAREVRQKARRMNQKSDRRDAFEICDGLRRGVFVSEVYVPDEEVHRLRRVLSRRRHFVNLCTSQVNAARFVLRSVGLRNRGATLTTRAAWEKMLSDPELSAVRAHLDMHYRIWVSSSENLTALDRELEEALKPFEDTEDLLRSVPGVGRICAATFIAALGRADRFAGSAQVASYAGLVPTGYDSGEVIRRGHITKAGSPELRAMLCEAAHQAARANHPLNPYWRRIAAKGGYKKAVVAVAHRLSRILFRMWRKRERFDVNQLNVVRDKVVRQKTYYYRFKEEPMSAQAR

SEQ ID NO: 239759 - protein, 355 aa, unidentified
MTITKYIGMDVHKESISIAVMNSAGKFVMECVIETKGSMLLQFIDGLRGDVRITFEEGTWAAWLYDLLKPHVSEVVVCNPRKNALLKDGSKSDRIDARKLAELLRGNHLKPVYHGEQGLRTLKELARSYLNISKDVTRVMNRLKALYRSWGIACAGTQVYAPRHRSGWLGRISEAGVRRRAEHCYQQLDALRLLHQQVRRDLLLESKKHQAWRLLGLIPGIGPIRAALLIALIQTPHRFRTKRQLWTYSGLGLETHDSAQYRVVEGQLQRSKKPVTLRGLNQDHNHDLKDIFKGAATRASSSRGPFHDFYEHLLAQGRKPTMARLTLARKIAAITLIVWKKEVRFDASYLKSQAA

SEQ ID NO: 239760 - protein, 276 aa, unidentified
MKSYEKVMGIDVSKKSLHLSLFDGVRHRQYQIGNDIPSLKEFLSHHPEEDFSQILFVMESTGVYHLRIALFLSKDLGYQVSVANPFVIKKYAEMLLKRAKTDKVDARLIAQYGYNNPSSPFLVRDEESYELDQLLKGIEDLKLEIVTLKNQIEALTHQPYINQLMLSTYQELLSQLKKKVKELEKEIKKIIANYAPEEFLLLKSIPGIGDRVAAALVAMLNRFEPFDNAKEVCSFCGLSPSPYQSGETVKKKKGIVKKGNRYLRKLLYVAALSASR

SEQ ID NO: 239761 - protein, 391 aa, unidentified
MQKLNDLSRSLTPLESDGTLIAVIEMSLSSWLVAGIVPGVERQPLKKLEGDESALLKLLNRWREEAKKAGHRIERIAVAFEAGRDGFWLARWLRARGIEAHVIHASSVAVSREHRRAKTDRLDTELLKRAFLGWLRGERDHCKMVAIPTIKDEDAKRPNRERESLVGEQSRIVNRMKAALFRLGIRGFNPKLKKAAGRLEDLRTPEDEPIPPNTLAELRRDMERRRLISDQIRQIEEARRERLKQAPYDGPHAMVRLLARVIGIGIETADTLVQEVLSRNMRDRRAVARYAGLTGSPDESGRKRREKGLARSGNARVRRGMIQLAWRFLMFQKDSALAQWFRARTENARGTRKTMIVALARKLLIALWRLVREGIVPEGIVLASGTMNGGR

SEQ ID NO: 239762 - protein, 315 aa, unidentified
MAMRVTLEKPIIGVDVAKNELVIYHDQYDRLEAIPNTKVAITQWLKALASSCAIAIEATNVYHVLFADAAHEAGCDVYMVDGYQLSHYRKGVNIRAKTDAQDARLLARYLKNELDELRPWIPASPLYRQLLSLFRRRAVLVQARTGLVQSWTNEPFLRTAFANQVNSMKRFEALVEKKIRDVLQEAGLMRQVNRCMKVEGIGFLTAARLVTSFQRGEFSGANAFIAFLGLDLRVSKSGQSDGPRRLTKRGDPEARRLLHNAAMSGSRTPAWKPFYEEQRKRGFSTTQALVMLSRKLARVVFALLKNQSEYQTKVA

SEQ ID NO: 239763 - protein, 354 aa, unidentified
MPKTASTEIAVIGIDIGKNSFHVVGHDSRGSIVLRQKWSRGQIEARLANLPPCLIGMEACVGAHHLSRRLKALGHDARLMPAKYVRPYAKGQKNDFNDAEAIAEAVQRPTMKFVATKTADQLDLQALHRVRERLVSQRTGIINQIRAFMLERGIAVRQGIRFLRTELPIILASRTDVLSPRMLRVIEDLAGDWRRLDEHIESLSREIETIARQDAGCDRLMSVPGIGPIISSAVVAAIGSGDVFSKGRDFAAWLGLVPKQISTGDRTILGKISKRGNRYLRVLFVQAAWVVLVKPMSWERHGLKSWIEAAKKRLHHNVLAIALANKLARIAWAVLAKGRGFEATRTIDGSTQPA

SEQ ID NO: 239764 - protein, 349 aa, unidentified
MEFYTKQRRYYCGVDLHADAMYVCILDATGEIVLHKNIPTRPKVFLRLIKPYREQLVVGCECMFTWYWLADLCAEEGIDFVLGHALYMRAIHGGKAKNDKIDSHKIAVLLRGGSFPLAYPYPKKMRATRDLLRRRNHLARKRAELLAHIQNTASQYNLPESLGPIAKASSRGDLLTPFRDPIVRAMVQVDLATIEHYEELLATLETHLEKIAIGHDPVNLALLKSIPGVGRILSLVLLYEIEDIARFPRVQDFVSYCRLVKPARESNGKSYGHSGKKIGNAHLRWAFGEAVVLMLRGNKSAQAALQRLASRHGKGKALAILAHRLGRAVYFMLKNQVPFEQERFLRLGS

SEQ ID NO: 239765 - protein, 418 aa, unidentified
MPNGLRKGQFTGWGRLIPPAIKNERRYKSHFAAAAPPAPRAIQTTFDDNASSTAVVGVDGPTASCAKVELFMINERAARMKFKRIAIDTSKHVFTLHGVDEQDRPVLRRELKRGQVEGFFGKLLPTDVVLEACGGSHHWARVLRDLGHHVRLIPPQYVKPFVKRSKNDRNDAEAISEAAARPSMRSVAIKTVEQQADGIILKHREMLVGQRTQAINALRGHATEFGVVAAKGTIKVTALLAVLAADSAIPATARAMFEQMGTHIEAFDHRIAILDTELAALHKANPVSQLLAEIPGVGPMIAITMALTVAPENFASPRHFAAWAGLTPREHSTGGKQRLGKISKAGNERLRTLLVVGAMSVIRFAKPGSKSASPWLLQLLERKPRKLAAVALANKMARIIWAMMARGEAYRRQPINAA

SEQ ID NO: 239766 - protein, 350 aa, unidentified
MNITAIGMDIGKRVFHLIAHDAKGHEVWRRALRRAEVLPFMAQVPACRVVIEACGGSNYWGRELERLGHEVVRLPTQHVRAYVRGNKHDYNDADALLEAAGRARHRSVALKGLEAQDVQSLHRVRQTYLKQRTSLVNQWRGLLAEYGVVLPAGITAFRREAPKILATEDPRFTAVLRELLTMQWEWLKSLEAQIATVERRLRQVERDDPRMGLLRGNLPGVGTLTATALVSRIGDGRDFRRGRDLSAWLGIVPRQHSTGGKTKLLGISKRGDPYLRTLFIHGARTVVQHATRKSDPFSAWVNRLRARRGMNIAVVAVANKNARMAWALLHKQAHGLSIRPVSAAADAPTE

SEQ ID NO: 239767 - protein, 346 aa, unidentified
MKVLIGVDPHKASVAVALVDEATSELVERAAFQQDRAGLRALERWAQRFPERRWAVENAGGLGRYLAARLAAAGESVVDVPPKLSAQVRVLSSGNARKNDGLDALATALAASRNGRLATVDPEATSEVLRLLSERREDLVAERTRALNRLHGFLRDLVPGGVAGTLSAPRAARILRGIRPRGASARLRRRLASEVLRDISTLDRKIADLDGRIEAEVEASGTTLTEIFGVGPILAARIIGTVGNVARFPSKAHFASYSGTAPVEASSGEAVRHRLSLAGNRKLNYALHMVATCQARSDARGGVYYRKKIAEGKSRKEALRCLKRRVSDAVFRSLVTDSQVPSCSAA

SEQ ID NO: 239768 - protein, 343 aa, unidentified
MSEISIVGLDLAKNVFQVHAVDGSGKVVLRRQLRRGAVEKFFAQLSPCTVGIEACGSAHHWARVIGRYGHQVRLMPPAYVKPYVKRNKNDGRDSEGICEAVGRPTMRFVAVKSVEQQATMAVHTARALLVRQRTMIANSLRACLSELGIVAAQGMEGLRQLMTKLEAPSEDIPEVMRSALLILARHWQALDADERALEQQIAKAARGDRQARRLMEVPGVGPIIASTVLAKVPDAKVFRSGRDFAAWIGLTGRDHGTGGKHRPGRISKQGDRMLRALLISGASAHMRQQKRRGVSDPWLRDLLARRPYKVVMVALAAKTARILWAMLVKGEPYRDRASAPAAA

SEQ ID NO: 239769 - protein, 346 aa, unidentified
MDATTVAVDLAKTVFELALANAQWRVIGRQRLNRAQFTRFLTETASTHIVMEACGMAHFWGRLAQQHGHRVTLVPPSYVRPYVRRNKTDRADAEAILEAVRSGEMPSVPVKRVEQQALVALHRVREQWMTTRTARINTLRGILREHGLLLPAGARAAVQAVPVLLEEAQTILPLHLRMVLTDVRAEIRALETRIANLERELRALADADPVVARLLTIPGIGVLTATALVGSVGHVHAFRRARQFASWLGLTPREHSSGTRRRLGSISKRGDVYLRCLLTHGARAVMITAQRRRAAAQPLTRLHHWALTVRDRRGHNKATIAVANKLGRTVWAVWHHDVPFAVPDAA

SEQ ID NO: 239770 - protein, 345 aa, unidentified
MEITTIGLDLAKNVYQVHAINGAGEVVVRKTIRRAQVLRFFERLDPCLVGIEACGTSHYWAREISTFGHEVRLMPPAYVKPYVKRGKTDASDAEAICEAVSRPTMRYVAIKSCEQQAALTIHRTRDLFVKQRTQLVNMIRGLLAEFGIEIRRGITHALSLAERIAAGDMPGIPALAAKMIASLAGQILDLEARLREIERELLAWHRSSEIARRLATIPGVGTVCATAFAASVTDPHQFRSGRQFAAWLGLTPLQHSSGGKERLGRISKMGDKYLRRLLVVGMTSLVRRAKYKPEAVDRWLTDLLSRKPARVVTVALANKAARVIWAIMARGGTYRAPQPAGAAVA

SEQ ID NO: 239771 - protein, 408 aa, unidentified
MNAVGIDVSKGKSMVAALRPMGEVALLPQEFLHTEVGLEQMAYAIVALGEDTRVIMEATGRYHEPIAAALHEYGIYVCVLNPLFIKQSGGGSIRKVKTDKADAMKIAKYGLDNWVELREYTPMDTVRQQLKLCSRQYNLYMKTVVSLQNNLISLTDKTFPGVNKLFSSPERADGHQKWVDFVMTFWHCDCICRVSEKAFTDRYQKWCKRKGYHFSTEKALDLYAGSCGHFTTLPKNDNTKLLITTAAQQLLAGKTTLAALRAEMTRLAKQLPEYDTVRAMYGVGETTAAQLMAEIGDVRRFPRRSSIVGFAGVDPAVDQSGKHSAKSVPTTKRGSPHLRKTLYQIVCTYLKRSPADEPVYQFLDKKRAEGKPYFVYMTAAQNKFLRIYYARVKECLEAFDERQDTVQN

SEQ ID NO: 239772 - protein, 301 aa, unidentified
MQHLPVPNTPTGFRELVRRCGAACLYGLEATGTYYLAVAYHLVAAGAEGAVVNPLVVRRFLQMHLGKGKSDRKDAQWLLGFGQQQAPARWQPEEKTLGECRQLQQAAEGLLRQQTMVSNALEALLHQPLVCPEARRQRRLTLHRLEQQVQQLEAELLTRIEQRYAAERPLLTSIPGIGRKTAALLLLFAGGFARFDNHRQLLAKAGLCPHEYTSGTSVRGQTRISKLGGGLMRSKLYLCSWSACRANHACKALYERLVAKGKHKKVALIAVCNKLLKQAFAIVKSGVAYQANFAQKTVPMT

SEQ ID NO: 239773 - protein, 336 aa, unidentified
MNVITIGFDLAKTVFQVHGVDRQGAVVLRRQLRRQHVERFFAKLPPCLVGMEACGTAHHWARRLRELGHEVRLIPPAYAKAYVRRNKTDAADAAAICEAVGRPSMSFVPVKSVAQQAIASVHRVREALVQQRTKLANMIRGQMAEFGIVVRRGMSHVAELLARLAEPGAVPEMLRRMLLGLGEALAMTDQQIKAADREILSWHKENECSQRLASIPGFGPIASSAMAARVVQPTRFKSGRYFAAWLGLVPKQASSGGKVRLGGISKRGDVYLRRLLVNGAQSVLIGREAKLTPWTARLLAHKPRKVAAVALANKMARIAWALMVRGTKFGAASPAA

SEQ ID NO: 239774 - protein, 422 aa, unidentified
MLGVGIDWAEDFHLVALGLPGDGVFEIARVEHRPDAVAALVARIAALEPDPAEVRVVLETRHGALVEALVDAGYVVVPVNPDLVARRRGPAKKKDDAEDARIACLIALDRFERLRPLVPHGDLAAELRSVARDDERAARDERRLLNRLRQDLLGTFPAAIRIAGDDMGRPTFLRLLERWPTASALVSATHEDLVAFARAAKHGWPDRFADDVQQALASDDFVPQDYLVRAKADTIRLAATQLLAIGTQRRAWERRMGELLLGAPRPRPGQPPRETDPGKAFPGGEIYLSFPGLGDRLAARVAGEIGDHPECFETPNSLQCYGGKAPVTRRSGKSELVVANRLACNRFLRDAVQQWAFCSLRGSAWAREFYDEQRARRKTHHAALRALGNRWLEILWHCLHKGVHYDEAIHVANRNRALGHAA

SEQ ID NO: 239775 - protein, 319 aa, unidentified
MTRTFIGVDVSQDFLDVHVRPASIRQRFANTTAGIAQLLAWVLPHAAERIVFESTGPYQKAAVGALLAAQLPAVVVNARQVRDFAKAMNQLAKTDKIDAAVIAHFGEVATTTVRPLESQEIRDLRELFDRRGQLVHMLAVEKNQRHSATVAQASAKVLKSIDKHIDYLEGHIKDLEQRMDRIIESSAAFQARNEILQTITGIGPQVSRTLIAYLPELGRYNRQTITALVGLAPFNDDSGTHAGQRHIRGGRSKVRVGLYQAAIAAIRHCARMKAFYASLKARGKASRVAIIAVARKLLVLANALVRDMKPYQAPANSVC

SEQ ID NO: 239776 - protein, 385 aa, unidentified
MIIIGVDFHPEFQQIASVDTGTGEFQEKRLTHREEAENFYRTRAGQKVGVGMEASGHARWFERWLSELQLELWIGDAAEIRSKRVRKQKTDRQDARLILQLLLEERFPQIWVPSWENRDLRQLLWHRHRMVQCRPRIMNQLQAVALNEGLRSKKRLWRERGRQQLESFRLAPWANRRRRDLLELLDRLNPTIAELTQAIEQEAEKCPPAQRLRTHPGVGALTALAYVLILGEADRFHCGKQVASYLGLVPLEDSSGNRRRLGHITKQGNSLITFPAGGSGASDGAQPSGMAEQVCPPDDAARTENRQGGNGAKTGGSPLLDDAQAMGLRAGEKVRFARGTTWTLLWCEVKHRVIDGVSRSLHGGVRTSNHDRKPDRRDAWVELSF

SEQ ID NO: 239777 - protein, 385 aa, unidentified
MTKQLQYTGFIARNYEIFGGLDVDKKSMAVTFRDHGIMRKSLRLPYSASDLLNYTRKHFPGQRVAFVYEAGPTGFGLHDELTAASHPCLVVSPSMVPTVQRKRVKTNRLDSLKLAEGLRGGQLRGIHVPPPSYRELRHLVQLRDTQVGQLRATKCRIKSLLLYEGIPFPTANGKWSAPALRELEALPCNATVRFKLDQLIDALQFHFQSAAKVQKQIRYFCQNDPELRGCISFLVSLPGVGTITATHALARLGDWRQIKDVRQIAGFLGLVSSEHSTGDKENRGEITRIGDSRLRNKLIQCAWTAIRKDPELRAFYRRIYERQPKKVAARKAIVAVARKLTTRMYAVLKEQRPFVIRADSSIAPLTAEETGGPRERLDAAQNEQP

SEQ ID NO: 239778 - protein, 465 aa, unidentified
MPKTTIKKALSSSFVSLPLVNPNAAGIDIGDTLHAVAVPAGRDEQQVQTFGTMTCDLEEIVTWLKNCQVETVAMESRGVYWKPLFTVLIQNGFEVYLVDAKRVRNVTGRKNDQTDAQWLQQLHSCGLLNSCYLPDEEQEALRTLTRYRKCLVGDSSRFVLRMQKALELMNIKLHTVIRDITGKTGIAILEAIIGGERKGENFLPFVDRGIKADRATIVASLQGNWREEHLFTLAQSYQFYQFYQERIASCDLQIERQLQQLNSFDNTPEPQLYASNTSPAEVALQLNSKQPKKKKNKNSPRFDIPTYLKSIHGVDVVAIYGISDRAALEILAQTGTNLSKWPTQKHFVSWLNLCPNNKISGGKLISSMLMKKKANTASQALGSAANAAQKSNHWLGDYFRRMRAKGGNKYALVATAHKMATIYYKMVRYKQEFTPLDLFDYQQKYKLAKIAFLERKLEQLKKQAA

SEQ ID NO: 239779 - protein, 332 aa, unidentified
MYLGIDVHKQYAQVAVMDEAGEIAEEVRVENANLDELAQQYAGSQAAIEATSNYYHIHDTLSEHLDVVVAHPKELTQIVNSDKKTDRVDAKELARMVRLNSVPESYVPTPEIREARALVRGRQTLVENRTKYANKIHSLLSDHGITENVKPLGVKGREFLRELSLPTPWDTLLESYLELIETLTEEIQKIEKAIEERAGSQKETQLLMTIPGISYYSALTIYAELGEISRFDGHKQVVSYVGLNPVIRESGDSRIEGGISKRGSGRVRWLLVQATHTAVHTCNDRYLSRFYDRLASRKNSQKAAVATARKMLVSMYHMLDREEPYDPPGVSG

SEQ ID NO: 239780 - protein, 408 aa, unidentified
MFIVGIDIAKKTHVAAITDDTGKCIGKAFKVSNSVEGFNTLLQKLAEISTDISQFVFGMEATGHYWLNLYTWLGDKGFTIHVINPLQSDALRRLQIRRTKTDPIDAQLIAECIRLGKYCKTNLADDDMLALRDLTRQRFYLVDMAGDIKRKVISMMDRIFPEYESLFSDMFGRTSCQLLKECTTPEEILAVDTERLCEILRKSSKGRFKQQKADQVRESARNSFAVLLSSQSLSLLVKQMIEQLELLESQIGQIESLIEQLYAKFNCKLTKIHGVGITLAAVILSEIGDISRFQTPKQLTAFAGLDPVIKQSGSFSATTVHISKRGSPYLRRALWLAANTVKQWDPVFAFAYQKKINSGKNKTQALAFITHKLLNVVFTILKNNIDYLPLFSPDFDSNQLPQNFHFTP

SEQ ID NO: 239781 - protein, 391 aa, unidentified
MFYMGIDIAKFKHDFCIIDDDTGEVIVPPRTITNDKEGFQEMLEILTNLHCSQKIKIGLEATGHYGTLIKAFLTSNGYKFIELNPLQVSRFHSQTSLRRTKTDKIDCQVIARYLMAIATKTYQPQVYHLEALKSLTRLRETLVDQRSRCLVKLTNILDITFPEFKKFFTAKLRSETALFIIRKYKTPARIAKWTDEDIRLVHNVSRRISTSKLLEIKKSAIDSIGIAPKYLLDELPSILNVYETVNEEVSKLEEQIKSIIFELDPPSLSIPGMGPISLATILGEFGDFSRFPSAEQCIAYAGVDVGISQSGTKCHRGRMVKRGSSHLRYALMNVVRTVCIHTPTFKEYWVKKKVVGHKFLRVADSHAAKKLVRVIYYLETHNTKYDPSRCK

SEQ ID NO: 239782 - protein, 425 aa, unidentified
MTRPQLTPPAGVLVAIDVAKARNEVLIEVPGSGRRRRLSVLNTRAEHDRLITLLSDLGQPVTCGFEATGNYHRPIAWRLLQAGFAVRLISSVALARTREALHNGWDKNDPKDAQVMLHMIRIGASQVYQDPLFAGINDVQELSKTHDAVSKAKIEVLHRILTHYLPLYFPEIDRFRHNSRSDWFFAFLDRFPTPASITALSKEAFIAAAWDVVGRKVAKTQVLGDIYETARSSIGLPVPPDAPAVSMFRLVIGEARGLIRQRDAIEVAADTLLSDSADYKLLRRIPGIGPINALTILAEAGDLRRFGHHRQFLKFCGLDLATQQSGTFRGQTKLSKYGNARLRRTLWLAGQVAIRQRENSFRDKFERYIARDRHNADLRRKALTAITAKMARVVHAVIKTGADYRPFVEGPVPGGRTPLSRAVRA

SEQ ID NO: 239783 - protein, 341 aa, unidentified
MVTTIGIDPHKATHTAVAIDESEVVLGEITLPADRSQTKTLIDWADRVDGGGRIWAVEAAGGLGYLLSQQLVASGERVVDVPPVLASRVRVLGSGRSDKNDPNDALSVAVAALRQPGLAVVRREDHAQILRMLAKRHLELTGLRTQAVCRLHAVLVLLRPGGMTRRLSADKASRMLQGMRNLDVIGEQRRAMARTHLGDIRRLDRELKANKQRIRTAVAASGTTVTDVYGVGPIVAAFLIGYSGDMTRFESAGHYASYNGTAPIEVSSGGKKKHRLSLRGNRKLNHAIHMVAVSQIRYSDTPGRVYYDKKRAEGKTKKEALRALKRQVSDTVYQRLVADQK

SEQ ID NO: 239784 - protein, 410 aa, unidentified
MELLHQRCCGLDVHKDTVVACLRLVSNGKVTTEVRTFETITADLLKLSEWLATNDCTHVAMEATGVYWKPVWHILDDGEFMLVLANAAHVKNVPGRKTDVNDAMWLAELLAHGLIRASFVPDQPTQEMRNLMRTRKQLVREQSRHLQRVQKTLEDANIKLDSVLSSLMTKSGRAMIAALIAGETNPAKLARLADPRVKASPQDLREALRGRVTDHHRFLLRLHLKQIDTLTAALAEVDAQVATNLEPFRTAVDLIKSIPGFDDIGSHVVVSEIGIDMSRFLSAPHLVSWAGICPRNDESAGKRRSNRLRKGAPWLKTTVVQCSWAAIKKKGSYLQALYHRIKARRGPKKAIIAVAASILTAIYHMLKDGTMYHDLGADHFNRRSTDRQKTRLVKRLADLGYAVELKPLAA

SEQ ID NO: 239785 - protein, 427 aa, unidentified
MSYRIAGIDVHKRMLHVVVSDVQVDGEYDFTRRIFGSLPEALRSLAAWLLEQQVQEVVMESTAQYWKPVWGTLERYWKQICQTREGALATSGTLHLAQAQSNRGRRGRKKDFRDAERLVKRLVAHELVLSFVPDVEQRLWRTVVRTKYQLTRNRVQLQNRLEALLEETHIKLSSLVSDLLGASARRMLHAIADGETNRETLAALADRGLRATQEQLQDALGVCQELNPVYRRLIRMVLDEVASIDKRIEQLNQEMANLLRPHEDQVKRLAEVPGLGVDSAQQVIAEVGATAATFPSEKHLSSWVGACPGDEESAEVNYSRRSPQGNRHMRRILNQAANAAVKHKGSIFEILYRRYVPRLGHNQTIGIIAHKLCRLVWKILHRGIRYEERGPEVSKASKQKRTRKMIQALRRLGYRIEPSLSPSAIPA

SEQ ID NO: 239786 - protein, 419 aa, unidentified
MAFKILRKNCCGLDIHKTWIFACIGITDSNGRTEYKQARFSSFSNGLRDVHDWLAKYYCLGICMESTEKCWIPVFNILEKTCWVTLAHPKYTKPQKGNKTDRKDAKWICDLYMCGMVKPSFIPPPDIRQLRDLMRYRVKLTNMLTGEKNRAQNCLTVSNLKLDDVFSDVFGKSSRSIIQYILEHPGEQFDVTPFIHRRCKHPVEEIQAAVDGVVSREQAAKLKECLLHIDQLNAHRERIEAEILRLAEPYPYQLELIRTVPGFAAAPLTAVALISEIGVDMSVFPSAKHLASWAGCCPRNDQSNKKVKSTRISRAGCYLKPLLVQIANAVIKSDRHPECRERYRRIKARRGHKKAIIAVCRMLLTAIWNVLSKLEPYSAKGYLADKLTEHSVVISKAEGLALLRKRGYIFKDELAVESG

SEQ ID NO: 239787 - protein, 379 aa, unidentified
MEKSSTLYVGLDVHKDSIDIAVADAPRDAEVRHLGSVAGGVTAVSKSMRRLVSTGHRLHIVYEAGPCGFVLQRHFTALGWRCDVVAPSSIPHPSGERIKTDRRDAMKLARLARSNDLAVVRVPDGADEAIRDLVRARDDAVREQRNGRHRLKALLLRNGTPYAGKCSWTAAHLRWLATVKLEHAAQQISFQEYLHSITESGARIGRLEQAMRDALPDWSLRPLVQALQALRGVQLIAAMTLVAELQDFLRFDNARKLMAYVGLVPGEHSSGPKRRQGSITKAGNSAARRMLVEMAWHYQQGARVSASIATREADLPAAVTTIARAAQLRLPAKFKRLVARRVMKTKVIVAVARELAGFVWAIGREVQISGWQGVKPATA

SEQ ID NO: 239788 - protein, 384 aa, unidentified
MNKHSMIFIGLDTHKEFHEVAYCEEQRGASAVHYGRIPSSKVSVKKLIRQFESKFPGATIHVVYEAGPCGYWIYRLITSLGHCCYVVAPSLIPKKPGERIKTDRCDALKLVKLLKSEDLTPIYVPEPEDEAVRDLSRAREATMKDLKEAKYQLKALLLRNNIRYEGTANWSKKHLRWLTELILPHPAQQIVLQEQLQTIEERIRRLERLDNELTHHVHQWRYYPVVKSIQAMRGVRLLVAVGVVAELGDLNRFDHPRKLMAYLGLVPSEQSSGGKRHLGAITKAGNGRARRLLIEGAHSYRYPANVSTELQLRQEGLPKDIVDIAWKAQLRLCKRYQRMSKKGKHYNLIITAIAREMAAYIWAIAKEVVLTPVNPKLRLSRVPA

SEQ ID NO: 239789 - protein, 307 aa, unidentified
MEKIVYVGLDVHADTIAVAIADDGRNREIRFHGVIENTADSVLGLTKRLVAANTQPIFCYEAGPCGYGLHRLLTKLGFDCAVVSPAMIPRRAGDRIKTDRRDAEMLARLWRAGELTPVWTPDEEQEAMRDLIRTRKQSLDALKIAKQQLQSFLLRHGLRYNRPTYWTKIHWRWVNELRKFRFPHQQLAFEELKRTIRQIEECIATLDQAIKDAVKDWRFGALVDALRSLHGVNTIIAATLAAEIGDINRFDNPRQLMAWLGLVPSEHSSGSTVRRGRITKTGNALARTMMVEASCRIDTHLEKDILF

SEQ ID NO: 239790 - protein, 389 aa, unidentified
MPSVSERPEAPTAIQTHLAASFVSLELSRSIWLITSLSPGSGEKMSKHSVRAGDVAALLARFSELKRKASERTGKSFPIVVIQEAGLDGFWLHRVLQSEGVESHVVDPSSIATSRRRRRAKTDRIDGEALLRALLAYKRGEPRVCAMVKVPTPEEEDRRRLCRERKVLIAERVKHVNRVKGLLFSQGISGYEPLRRDRRQRLDELTTGDGRPLPVHLKTQIRRELDRLELLLDQIKEAEAERDALLAAPQPAAPAPAGRMLLEFKGIGAELAAVLWLEALFRHFDNRRQLASYAGLAPTPWQSGSVDHEQGVSKAGNPRLRTSLIQLAWLWLRHQPQSALTLWFKERVSGNGGHFKKSTIVALARKLLVALWKYVTAGVVIDGAVMKDA

SEQ ID NO: 239791 - protein, 348 aa, unidentified
MSKISQYVGLDVSLKETSICVIDEAGKIVWRGRTDTTPEAIASAVKQHAPNAVRIGLESGQLSTWLFHELKAVGLPVICVDARHAKAALSLKVSKTDANDALGLAQIMRVGWYREVSVKGLDCQAVRTLLVVRAQLVSQVTTLKNCVRGVLKTFGLVLPKGLRSQFPGRVRAAIDGHPVLGAIIEPTLLVLEATRAQLIVYDRAIIQRARSDDTARQLMSAPGVGTVVALAYMTGVEDPARFKRSSSVAAYFGMTPRRYQSGEVDHAGRISKCGDGMVRGLLFEAAKVLLSRSARPSALKTWGEALGKRIGPKKATMAVARKLAVILHRMWITGTTFQWNAEAASLAA

SEQ ID NO: 239792 - protein, 440 aa, unidentified
MSKVTVFETVHENAAGIDVGAAEIFVSTDGQEVVKFQTFTSDYYACAEYLQRHNVVCVAMEATGVYWMALYSMLEACGLKVSLVNPKETKQVKGRKTDVKDCRWIQKLFSAGILRESFVPEGMLMEIRQLVRERLDIISMGSTYVNKMQKCLELMNIKLKEVISQIHGTSGIKMIKAILENKREPAYLLSLCDERIIKNKSEKILKALEGNYNDTYLFMLQSNMEMWEQHQKHIDRIDRAIEVLLVALSKGKAIVSTNIPRKEIKHHKPKINKLHTMMNQLYGINMNSIAGINDYTLLRLVGETGTDMSRFPTAKHFASWCGLSPRCHQSGKTNKRIRGNKCNKAGQIFKECAQGLLNSKYNAIGAFMKKLKSHKDAGIVIKAGARKIAIAYYNSITKGTEYVEQGIEKYKERLQQKEIALVHKLAKKHNLQITSHQEVA

SEQ ID NO: 239793 - protein, 344 aa, unidentified
MEISTIGLDLAKNVFQVHGVDADGNVVVRRTLRRAQLLPFFVSLPPCLVGMEACGTAHHWARELIKLGHDVRQMPAAYVKPYVKRGKTDAADAEAICEAVTRPTMRFVPVKSPEQQAALSMHRARDLLVKQRTQLVNMVRALLAEFGINIPQGVRLALEMARKIVDGEAPPVPREAAKIAGRLSQQALDTHAQLREIDLDLLAWQRTNDIARRLMSIPGIGPIGATALAASVTDASQFRSGREFAAWLGLTPRQHSSGGKERLGRISKMGDKYLRTLLVVGMTSLIKGVKRKPETADPRLVALLARKPVRVATVAMANHTARVAWAIMARGETYRAGHQPRLAA

SEQ ID NO: 239794 - protein, 428 aa, unidentified
MADRLNNKPYGAWIAIDIAKDFNAVLSETNEGKRQHFRMANSAQDHDRFIVFLKSLPSPCIIGFEATGNYHRALGHRLISEGFEVCFISSIASARYREVMFNSWDKNDPKDAAVLLELLKQEITQRYVDPLIAGHHDLQELSKTYYQVTLSRTRLQHSILTHYLPLYFPEMGKWWNSTRSAWWINYLLHFPIPSAVTKHSQETFCEIASPIVGRKVNKAAKLIELYETAQHSIGLPITEDSLACKTFQIQLRRYQEINDCRTELEKTAQAVLANNLDSAILQSVPGIGPINALTILAEGGDLRRFNHHRQFLKYCGFDLAKNQSGNYRGQEHISKRGNARLRLALWMAVNTAITQPENSFQQKYNRYIKDAPQDKDIQRKARTAVAAKMARVVYGLVKSKQMYQGYYEKALPSGSIPLCRAVEAVRTS

SEQ ID NO: 239795 - protein, 377 aa, unidentified
MSKIRFVGLDVHADTIAVAVAEADGEVRSHGVIPNRLESVRKLIVKLGPVNQLRVCYEAGPTGYVLYWQLIQLGVVCEVIAPSLVPSKAGDRVKTDRRDAEKLARCYRAGELTPVWVPDADHEALRDLVRAREAAKKDQLRARHRLGKFLLRHGRRRPEGTTAWTKKHLEWIKSHVRFPQAALEATLADYVQEVDHVASRIVKLEKAIDEAVQQAAPEIRAVIEALQALRGVAQIAAATIVSELGSLSRFESPRQLMGYSGLVAREHSSGNRIQRGSITKTGNAHLRRVLVEAAWPYQHRPNVTGYLLRRQKSLALTDEVKQIAWKAQYRLHKRYKTFASRGKNKNQIVTALARELLGFVWAIAVETERQHSLTAAA

SEQ ID NO: 239796 - protein, 343 aa, unidentified
MHTITTIGLDIAKSVFQVHGTDAGGQVVIRRQLKRRAVLTFFQKLPPCLVGIEACASSHHWSRELQALGHAVRLMPPAYVKPYIKRQKNDMVDAEAICEAVTRANMRFVPTKTPEQQSCLMLHRTRHLFIRQQTAVINSIRAHLAELGIVAPVGRKGVMELLQVVADPSDKRVPEIARACLAALGNQLLSLKEQILEFDRMIMAWHRSNEPSKRLRYIPGVGPMLATALVASVADPKTFRSGRNFSAWIGLVPKQHSSGGKDRLGSISKQGDRYLRSLFVAGALSVIRYAKIHGTKHRPWLTALLARKPTKVAAIALANKLARMAWAMMARGERYRNPVALAA

SEQ ID NO: 239797 - protein, 369 aa, unidentified
MPHVTSIGLDVHARSVAAAAFNPFTGEVVHRDFGTDAAEIAEWALGFEEPRACYESGPTGFRMARELRALGLDCAVAAVSRMQRPAADARRKNDRRDAEFIARMLATHNIVEVPLPDAAAEAARDLDRALDDATADYLRARQRLNMFLIRIGRVWDERNADGTRKKAWTRAHWRWISETRLEGPQRDVLEHYVTAARCAESDKRQLERKVVALAGTDRWRPAVEALSCIKGIDTLTAFRLAAEAGSFSRFRSAPAFASWCGLTPSERSSGETERRGGITKAGNRLVRTALIESAWHYSMCTPRPKVPAPGADVPAAIRSRADECTARLCRRREALSAAGKNACKANAAVARELACWVWEIGCRAEGTLG

SEQ ID NO: 239798 - protein, 435 aa, unidentified
MEEVTDEPLYRDRVCGIDIGKAELYATIRVPSDKDPARRASETRRFAATRRGVLALADWLRCWQVPAVVMEATGDYWKGPFYRLEAEGFECVLADAKQVKHLPGRPKRDPSDSSWLAQCFERGAVRPCFVPDPEFRIIRLHTRYRRDLTDERTREKNRTEKLLESAAIKLSSVITDLHGVTGRDIMDHLIAGERNPKVLAQLARARARRKITELEHAVEGAEFFTAEHAALLKAMLERIDGLTAEIGKLSEVIERLLAPYEEQLQQAESMPGWGRRSAQDAVAETGTDMTRFPAGGHLSSWAGKTPLDHQSGKRTGRARHKKGNKYLAAVTGETAVAAGKTATREGARYRKLARSRGKAKAQVALGNTQLKVYHKLLSNPGMRYQDLGPDYYERQAATRRKIAYHVREIEALGLEVTLARIPDPDPDGPASTQVA

SEQ ID NO: 239799 - protein, 337 aa, unidentified
MDYFAGLDISMDETHVCVLDREGVVVHESKTASTAEAIAGELAKAPSCRRIVFETGRMAPILFHGLSQLGLPVICVESRQAYQALKSLATHKTDRNDARGLAHLARTGFFKPVHVKSLSAHALRSLIVARKKLVGQRVTLENQIRGLAVVFGIRLPRALTAAFIDKALQASEGIAGLSAAMRGLIAARTAVMAAVAAIDADMRRMARASAPCRRLMTIPGVGQLTALAFVAAIDDPSRIRRSRDVGAYLGLVPRRYQSGEVDYVGGISKCGDRRVRTLLYEAANVMLTRYKGQLKLKDWAFAIAKRSTMRKARVALARRLAIIMHAMLRDGTEFASA

SEQ ID NO: 239800 - protein, 341 aa, unidentified
MDRELYFGVDVSKKTLDLAYYDGETIDWKNAHIQVSNDNAGFKKIGSWVAKVGKDFDTFLFCMEYTGLYNQNFRLWLESKEYIYGMVDPRKMHHFEPDLDDDQRSLDRIKTDELDAFRIAIYCEQNHKKIFRNPSKLPSPVYLKLKRLLVERKQNTKQSTLCKQQLHDTCAYDTDLSVERKKLLLKNMQENQKAIDKEIDSYIQEDASISKNYELLTSIPGIGRIIALETIVLTENFTAISNPRKYACYIGIALFKKESGTSVRKKTGVSKKGFSEAKADLSIAVLSAITYNPAIRGYWIRKKKEKCGGIVLNAIKFKLVLRMFAVIKRGTPYVETDAYKN

SEQ ID NO: 239801 - protein, 318 aa, unidentified
MEKSPVFVGIDVAKKRLDVAVRPSGEVFQVANDATGLHQLVQHLHLLRPRLIVLEASGGYELMALATLRQEDLPAERVNPRQVRDFARALGILAKTDRLDALSLARYAEAVQPEVRPFPEAEQLELAALMGRHRQLTEMVVMEKNRLDTTFSVRVRQSLLAHLRSLKHQLQELEDELDDFLKQHPLFADKAKLLRSTPGVGPGTCYCLLAWLPELGTLNRKQIAALAGVAPFNRESGQWRGRRAVWGGRAQVRAFLYMATVTATRCNPVIRAFYQRLRRAGKPAKVALTACMRKLLTILNAMLKNHQPWSCQENFSLL

SEQ ID NO: 239802 - protein, 425 aa, unidentified
MNYKQNEKINQVKESTLVVGIDIGSTTQYARAFDWRGIELGKVFTFSNSREGFESFKAWMQHLQDKYRKSDVIVGIEPTGHYWFDLGAYLEDEGILLVMVNPYAVKQTKELDDNSQSKNDRKDPKVIAKLVTEGRYSAPYTPDGVYADLRIMVANRKRLIREMTQIKNRFARWFAIYFPEYTDVFGDYEAQSSMLLLKKVCTPEAIVELGAGKINQIWRDAKLRAVGMKRATTLCETAKRSIGLKKGSSAARYEMKLLLEDYEYKKAQLDAVMEEIEKLCRKIPESEQMLAIKGIGVITVAGFLAEVGDVRRFESPRQIQKLAGLSLRENSSGKHKGQTTISKRGRSKLRAVLFNAAIPLIAKNPEFKSLHEYYTTRANNPLKKKQAVIAISCKLIRVFYAILANGVTYDAQKMLSDIHRQPQAA

SEQ ID NO: 239803 - protein, 448 aa, unidentified
MNDGSGLSRGDRNRNARLARLRELVPVSHAIVGIDLADETQAAVVTDHDSRVIARRRVSVRAWELGELLDWAVAKAAGAGFASVTVACEPTGHRWRVLDQLAAGRGLALVCVQPLLVYRAREGEDLTRDKSDPKDAVLIARLAGELRCYEPERADAVWARLRHLGARRSQLTTGATAAVNQIRDLLECAWPAVLAASGSPFRSVSWCASLAVVLDRCAGDLSRVRRLGLARFTAAVRRELPRWGGIRPCLRIIRAVFAALADPAGVTAHRPGALERAHLALGDWRDIRARLADAETRMCAVLEELGLAGLVTTIAGLTVTGAAAILAETGDPARFATPRALVKHAGLCPRDNASGAAQGKTSISGRGRPGLRLAAWRAVWAAMPNNPVMAARFTHLTTRQDNRLARQQARTACAAALLRWIHVVVTRHVPWDPAIAAGIRPALATASQ

SEQ ID NO: 239804 - protein, 418 aa, unidentified
MSHEAEYVALVGIDWADTKHDVCLRATGAEQEEYGVMGHLPEAIDQWAKGLADRFPGRKIAVCLEQSKGSLIYALLKYDHVVLYPINPRMLAKFREALVPSGKKDDPADAQLLLELVSKHREKLKPWRPADEHTRTLQFLVEHRRKLVHDKTRLTNRLTSVLKGYFPQVLCWFAALDAPLVCDFLKRWPTLEAAQKTDDATLRTFFQEHHAYTRAINQQRMDGIRQAIPATTDQAVIRSSVMIVHTLVEQVSCVTEALRRFEKEIDALTRSHADFQLFASLPGAGPVHASRFISALGTDRSRYEHVEDLLTFTGIAPIMERSGKTTVTHFRWFCPKFLRQSFHEFAGQSIQYSRWAQAFYRQQRVRGKDHQASVRSLAFKWTRIIFRLWKNQTPYNERTYVAALQRRGSPLWQVMAAQ

SEQ ID NO: 239805 - protein, 376 aa, unidentified
MKHVRFVGLDVHAETIAVAVAEPAGEVRSLGVIPNRSEAIRKLVKKLGPAEELRVCYEAGPTGYVVYWELTRLGVKCEVVAPTLVPVKAGDRVKTDRRDALKLARSYRAGDLTAVWVPDAAHEALRDLVRAREAAKKDQLRARHRLGKFLLRHGRRPATAMNAWTQRHLTWVKTVHFAHAAQDVTLLDYLNEVEHMADRLARLERAIDDAVTAAPEPMRAVIEALQALRGIAQVSAVTIVAEVGTLSRFARPRQLMGYSGAVASEDTSGERTRRGGITKTGNAHLRRIVIEAAWAYQHRPSIGRALRQRQTTVTPEVKELAWKAQHRLHARYRHLTAKGKCRQEVVTAVSRELLGFIWAIGVKVETQTRRQPSAAA

SEQ ID NO: 239806 - protein, 456 aa, unidentified
MPGGIPFVIMEQAMSLRKSVAPLTLAHPDAAGIDIGSASHFVAVPADRDEQPVREFKSFTADLYRLAQWLKDCGITAVAMESTGVYWIPLYELLDSQGFTVYLVNARHVKNVSGRKSDVLDCQWLQQLMSYGLLASAFRPSDQICVLREFSRQRQMLLASQVRHVQHMQKALTQMNIQLTQVLSDVVGVTGQAIIRAIVAGERDPHVLARLKKRQVKASEDDIAAALQGTWRHEHLFALRQALALYDAYQSQLDECDQLIQTELHKLQRHDGDPGKSQRRWPKKAMAFDLRTHLFAMCGVDLTRINGVDEMTAFKVLAEVGPDMTRFPTSKHFASWLGLCPGTRISGGKVLSSATKRSPNRAAQALRLAAAALRTSQSALGAYYRRLCARLDKPRAITAAAHKLARLIYAMLTKGTEYVDQGELYYEERYKQRVMHHLTKRAQAMGYSLTPLPETP

SEQ ID NO: 239807 - protein, 357 aa, unidentified
MLSSNAKYIGLDVHKEAIAIAVVNGAGKLVMESIVETKSSTVLDFLHGLRGELHVTLEEGTWAAWLYDVLKPHVREIVVCNPRRNALLKEGSKSDKVDARKLAELLRSGMLRAVYHGENGLQMLRELARSYLTISKDLKRVKNRLKALYHSWGICCAGKQVYAARHREQWLSKITQVGVHRRAELFYQQLDGLVVLRNTVRGELLAESRKHQAVRILRQVPSIGPLRAALLLALMQTPHRFRSKGQLWTYSGLAVVTHDSAQHRYVDGQLQRSKKPQQIRGLNQNHNHAMKEIFKSAALNASRCAGPLQDFYARLLAKRMKPDMARLTLARKIAAITLALWKKGGSFDAEHLKSQAA

SEQ ID NO: 239808 - protein, 338 aa, unidentified
MKTYAGIDLHSSNNYIGVIDAKDKRLYSKRHGNNLKQVIEALRPFKKNLQSIAIESTYNWYWLVDGLQENGFKVHLANPAAIKAYSGLKHTDDKWDSFWLAHMLRLGILPEGYIYPKQHRAMRDLVRRRLMFVRQRTSQILSLQSMITRNRGLNYTGTDIKRFRDEFIDVLFTDPHLNFTAKKNIETIRFLDRIVGEIETKVNSQIKLKKQFRMLLTTPGIGNILGMTIMLEVGTITRFAKVGHYSSYCRCVESKKISNGKKKGENNKKNGNRYLAWAYVEAANHAIRTCPKAQRFFQRKMSKSNRALATKALANKLTKATYYIMRDQLAFDAAKLFG

SEQ ID NO: 239809 - protein, 347 aa, unidentified
MEHYVGLDVSLKLTAICIVDRTGKIVREGAVASNPEVIAAFVTSHAPQVARIGLEAGATSTWLWTELDKMGLPIICIDARHAKAALKMQINKSDRNDAVGIARIMQCGWYKEVRVKDLDSHAIKALLVSRALLVKIKRDIENQIRGLLKNLGLVIGRAKMNVFAVRAAELIEDRPELAATVEPLLKAREAIEQQIADFDRKVLRLARNDAQVRRFMTTPGVGAITASLLPLRPSHDPTRFKRSRSVGAYVGLTTRRYASGEIDWKGRISKCGDAMLRSYLYEAANVLLTRVAKWSALKAWGIRLAKRSGLRKAKVAVARKLAVILHRMWVDSTEFNWSSKEIAAQRA

SEQ ID NO: 239810 - protein, 457 aa, unidentified
MNANNARLQSAAKIGISPLIIVQPYLLMKGGDLVKNFMSTLFVGIDVSSKTNVLCALDFQGNKLLNLKALNNQPGAEAILASIIDCLNSNSLKYVVIALESTSFYSTHIANFLSSNEELLFFKPLVYCLNPKSVANYRKSFVDIDKTDPLDAFVIADFARCGRITSAPWRGAQFLALQRLSRHRLHLVECITREKAYMVSNIYLKFSELAVLDKDEQPFSNTYGATSAAVLTEFLSLDDITYSSIEDLVAFVSAKGKNRFSDPYETAKLLQKAARDSYRLDKVLYEPLNTSIASSFNVIKTLDDEIKIIDKAIIKAIKGISTTEYQSLTSIPGIGPVLASGILAEIGTITSFGSHDALAKYAGLTWRVNQSGNYSADDTRMTKTGNKYLRYYLIEAANSVKKHIPEYRDFYKKKFGEVTTHQHKRALALTSRKLVRLIFGLLTKNQIYSSDKVGEIQ

SEQ ID NO: 239811 - protein, 315 aa, unidentified
MANLKKSKTVVNVGVDIGKQYLDVCIHEKGIYWREDNTSAGIKRIFKRLSYYQVERLVMEATGRYEFELAQLAYSRKLPVCIVKPLLIRRYAGANDQLAKTDKLDAQIIAEFGAVLKPRVTPAKSKNLIAIKDLITRRRQLVNLRTQETNRSGIMGKTLAVSCRRIIRYLNAEIKRIEKQLARHVAEQAEWTEKQSLLKTVPGVGDTLVYTLLADLPELGDLNNKEISKLVGVAPINRDSGRMRGKRRIQGGRANIRTVLYMATLSATQCNPVIKAFYRKLVAQGKHKKVALTACMRKFIIILNTMVKNKTEWAF

SEQ ID NO: 239812 - protein, 344 aa, unidentified
MDQIIRIGMDTSKHVFQLHGVNAAEEPVLRKKLRRQDLITFFGKLPPTVVALEACGGSHHWARLLQSLGHQVKLIAPQLAKPYVKRGKNDAADAEAICEAMSRPTMRFVPVKTADQQAALMLVGVRDRLIRQRTQLINVIRGYAAEFGLIAPTGLCRVGPLLDRVKTDETLPALARELFEMQATEYAQLQARLEEIEDRLMAWHRAHEISRRLAKIPGVGPIGAAMLVMKTPAPEAFRSARHFAAWLGLTPKDHSTAGKVRHGVITRAGDEALRSVLVVGATAVIRQLRRGQCAPPSPWLVALLQRKPSKLVAVALANKIARIAWKLMVTGDSYRAPTSVSAAA

SEQ ID NO: 239813 - protein, 433 aa, unidentified
MQDAQDEPLFAERVAGLDIAKAEVEATIRVPSDTTPGRRQQETRTFTATRAGLLSLADWLGCWGVTKVGMEATGDYWKPVFFLLESCGFDCELYNAAQVKALPGRPKTDRADSIWLAKIVERGMISASFVPPEPIRRLRTHTRYRRHLTQARTAEKQRVEKLLEDGHLKLSSVISNIHGVSGRDMLDAIAAGQRDPKALAQFARGTMRGKIRRLEEALECSFFTDEHAAVLAMMLAVIDHYTAQIEALTATIETLTEPWLHQIAQLDAIDGIGTVCAQDIIAEIGPDMTVFPTAAHLVSWARWSPQVKQSAGKRKGSNATGRGNPYLSAALGEAAISAGRTQSFLGARYRRLTRRMPKKKALVATGNSMLVIIHALLSDPAARYADLGADYYEQRMHARRQARNHVKSLERLGYKVIIQALSPDTSQPLTTAS

SEQ ID NO: 239814 - protein, 352 aa, unidentified
MNEKYVAMDVHKASVAIGIRDSGGNYIQESIVETKAVTLLELVKGLSGTIHLTFEEGTQSAWLYDLLRPHVAECVVCNPRQNKLLDAGNKGDRVDVQKLSELLYLGSLRAVYHGDHGTRALKELARNYESLVRDRTRVKNRLKAIYRGRGISCEGQEVYNLRKRDQWLRRLAEPGVRQRATSLYSQLEGLNAMVAEAQRQMLAESRKHRAAAILRSLSTLGPVSVAMIIATCDTPHRFRTKRQFWTYCGFAVVTRSSSDHYFERGELRKRRKPALTRGLNRNYNRRLKRVFKSAATSGARQGPFKPFYEQLLARGLKPDLAKLTLARRIAAITLAMWKKGERFDPKKLEVNS

SEQ ID NO: 239815 - protein, 342 aa, unidentified
MEITTIGLDLAKSIFQVHAVDAAGAVVVRKALRRSQVLPFFTKLPPCLIGIEACGTSHHWARTLAKLGHEVRLMPPAYVKPYVKRGMTDANDAEAICEAVTRPTMRFVPVKSPEQQAALALHRTRDLLVKQRTQLVNMIRGLLAEFGIEIVRGLHHAIELAARIAKGDAPEVPDLAVRVITCLAGQIGDVQVRLAALEKKLLAWHRSNELSQRLGTIPGVGLISATAFAASVTDPGRFRSGRQFAASLGLTPLQNSSGGKERMGRISRMGDQYLRRLLVIGMTSLVRRARAKPESVDPRIAAMLARKPARVVTVAAANRTARVAWAIMARGGTYRAPIGMAV

SEQ ID NO: 239816 - protein, 349 aa, unidentified
MTIVETTCSVTAGVDTHAEVHVAAVVDHVGGVLGIETFATTEAGCQQLVDWLRTQGDVNLVGVEGTGSYGAGLTRQLERAGIAVVEVDRPNRQVRRREGKSDPVDAVVAARAALSGQALGQPKSRNGDVEAIRVLMIARRSAASERITALCQLRHLCFTADHQLRRRFERLSVAQLTAQAAALRPRPTDTVRYSTLLAMRTLARRVAYLDDELDNLAVVIRPLVQRTAPGLLAMHGVGYDVAAKLLVAAGDNPDRLRSEAAFAHLCGVAPLEASSGKTRRHRLNRGGDRQANNALYRIAVTRMASHPPTKIYVARRRAEGKSTGEIVRILKRYVAREAFKHLRPSAVTG

SEQ ID NO: 239817 - protein, 366 aa, unidentified
MPVTELLNKMDQIRQKKYTFFIGTDVSRNKLDHAVMQGKMLLFHRETGNDTESILAFIAEVKALKGFTMTKGIFAMEQTGIYCNPMLDCLQKVKANIVMDGALQIRNSMGNIRGKNDKIDAVRIAEYAYKCREHLRLWAPKRQIIQQLANLNALRSRVLSLQIALNMPLKEQLGFVKKGTARAADRLCSRSVVAMKADLQDIEHAINQLLKSDDQLSRLMKIVTSVPSVGPVTALQILLCTNEFRDICNPKKFACYSGVAPFTRQSGTMKSKSKVSHMANKKMKALLHTCAVSAIKWVPDLKDYYLRKTVVEGKHKMLVLNAIRNKLILRVFACVNQDRLYEKEYTRLVLSTENLVYDTSVVAAEL

SEQ ID NO: 239818 - protein, 404 aa, unidentified
MYPRCAGLDVHLRTVVACIRIAEGRSLRQEVRTFATTTSGLLALTDWLSAEGVTHVVMESTGVYWQPVWYALEGTFDLTLANARHVRNVPGRKTDVNDSMWLADLLAHGLVQGSFVPPEPIQEARDLTRTRTQLTREIAKHTQRIQKTLEKANIKLETVLTHVLGVTGRAIIRALIEGQTDPDALLALRRGKIKASVDEMREALRGRPTESQRLLLRIHLHQIEELEKSIDLIERRLGDVLRPFRREFELLLTIPGVSDTIASIILAEIGADMSRFPSSAHLVSWAGLCPGNDESAGKKRSTRLRKGDTWLKTALVQGAWAATRKKNSTLRAQYYRLKPRRGGKKAAVALAASMLTSAFHMLTRAVPYAEAAPITDPHRQKETAKRLVFRLKHLGFDVQIRPAA

SEQ ID NO: 239819 - protein, 338 aa, unidentified
MNIVFLGIDLAKNVFQLCGLNQAGKPVYTKRTGRKELLQTLANIPACLIGIEASTGAFYWQREFEKLGHKVKVISPQYVKPFVCGQKNDGNDAQAIAVALMQPTMQFVPPKSPEQQDIQALHRARQRIVNHRTATVCQIRGLLLDRGIPIGSAVSRARRAIPLILEDAENGLSSRMRRTIAELYDLFNDLGRRIHFFDKEIETVFRQSEACQRIAKVKGIGPETATAVVAAIGKGTEFKNGRHFAAWLGLVPRQHSSGDRQVLMNMTKKGDKHLRTLFIHGARAVVRVATNNNDGHMNQRVNQLKERRGFNKTTVAVANKNARIIWSMLRNETGYQVV

SEQ ID NO: 239820 - protein, 388 aa, unidentified
MQVIGDRPEAASAIRTNLGAIFVSLELSQSTWLITSLLPGSSEKMSKHVVHGGDIAGLLERFARLQEKARARTGRNFPIIVIHEAGLDGFWIDRVLKNEGIESHVVDPASVATSRRRRRAKTDKIDGEALVRTLLAYKRGEPRVCAMVKAPTPEEEDRRRLCRERKVLVTERVKHVNRLKGLLFSQGVCGYEPLRRNRRRRLDELRTGDGRPLPKNLKAQISRELDRLELLLEQIKVVETERDALLAAQQIAAPTSAAMLLAIKGIGPDFAAILWSEGLFRHFDNRRQIASYAGLAPTPWKSGSIDREQGVSKAGNPRLRTTLIQLAWLWLRHQPQSALALWFKERVVRNGGRLKKVTIVALARKLLVALWKYVTAGVVIEGAVMKVA

SEQ ID NO: 239821 - protein, 339 aa, unidentified
MKDTIYDHYIAIDWATKNMAIARMTKNSNKVSAIDVPSDVAELKAYIKRLKGTKILTIEETTTSQWLYTELKDCVDEIIICDPHRNKLLNEGAKTDKIDASKLVQLLKANLLKEVYHSTNRFLYLRRVVSGYEDLVKAGVRLQNQKASLLRACGKKGDKKTADELTIQGDQFVHESLDKQIGWYESEKKTYEKEFKALAKKYPEIRHQKSLPGIGDINAVKIVARVVSPDRFADNGHYLSYTGLIKHEKISGQKSYGKRSPRYCRQLKGVYKTGVMAAIGGNNPINEYYEYLIHEKGEPPHDARNKACRRLATLSLGVFKSGKKYQPYRRGNIKGKQAE

SEQ ID NO: 239822 - protein, 411 aa, unidentified
MRRVIGMDIHRTFAEVVFWEDGKLRPAGRVSMTRSGLEGFGRSLGKEDEVVIEATGNAMAVVRVLSPYVARVIVANPLQVKAIAHAHVKTDKIDAGVLASLRAANFLPEVWLPDSDTERRRRLVARRNQVVRHRTRIKNEVHAILHTHLIPPCPHADLFGRLGRIWLAQQLIPDDEGAAIERHLRELDRLSEDLGVLDTQIAQAGNDDPAVKRLLTITGVNLIVAAGLVAAIGDVRRFTSPQQLVSYVGLNPRVRQSGLGVAQHGRISKRGRSHARAMLVEAAWAAAKAPGPLRAFFLRIRARRGHQIAAVAVARKLAVLCWHLLTKSADYQWARPALVASKLRAMELQAGQPARKGNKRGPAYAYNVKALRDREIELARHAEQAYERFVSQWQRRGTAKQRTGAANEERR

SEQ ID NO: 239823 - protein, 353 aa, unidentified
MKTYYVGMDVHSATIRIAALNGAGKVVMESTIETGAERVRGFLKQLRGKVYVTFEEGTQANWLHDVVRGLVTEVVVCDPRHNKLLQSGNKNDQVDALKLAELLRNRSLKAVYHGDNGVRTLKELVRNYDCLVGDTTRVMNRLKAIFRGRAIACAGHEIYRQDRRKQWLEKLSESGAKQRADFLYEQLAALKPLRHRAKLVMVKEARRQAAYPWLMSVPQLGAVSVGQLIAVVGTPYRFRSKRQFWTYVGLAVVTCSSADHEVVNGVLRRSTRPQATRGLNRNHNHLLKRVFKNAATSACHSGPFQAGYDARVKRGMAPSLARLTIARQLAATTLTIWKRGEQFSPERMKQQAT

SEQ ID NO: 239824 - protein, 350 aa, unidentified
MTIIGCDYHPGFQQIVFVDTKTGEWKEQRLEHREPAEKFYRELASRREKMRVGMEASGHARWFERLLAELDIELWIGDAAAIRAKRGRRKPKTDRQDAQHILHLMLKDDFPQIWVPSWENRDQRQLLWHRHRMVQARTRLMNQLQAVALNEGLRCKRRLWREKGRKQLEAIRLGPWASRRRKDLLQLLDGLNPTITELTQAIQQEVEKSVEARRLMTHPGVGPITALAFVLIIGRAERFQCGKQIAAYLGLVPLEDSSGERRRLGHITKQGSAMLRFLLVESAQMAARSIPQWRNQYFHLAMRRGRKIAKVALARKLAIRLFWMMRQAWDYEQMTKFGSHAGQPASCNGV

SEQ ID NO: 239825 - protein, 421 aa, unidentified
MYNTRVKHQKRSFVNDKALISTVDIAKDELMVYIRCPFGEEVKPFNVTNNYQGLKEYWATIMLYQKRYHLQDIIVGFESTGIYSEPLKNFMMDKAVKLVQINPMHTKKMKDITDNSPGQTDRKDTRVIADIIQLGHYLSLIVPEGAAAQLRELAQARENQMVHQTRLINQLEALIFKIFPEFVQIIKNLSTKTAQYLMSKYPTPQRLKGVSLEQLTSEIKMVSRGQLGKDLAQRIYQASRESLGTKEAQESILLEVNYLLGQLIQTAQFIKVLEKKMATALDQIPYAGNLLSIKGIGVVLLGGVIGEVGDFRRYRRQSDLVKLAGLDLYEMSSGKYHGLRRISKRGRWFLRKLLFYGALNTVRTGGILRDYYQGLIGRGMKKIKALIAVSRKLLRIMFALVRDNTHYHQKEEQINSIKVPA

SEQ ID NO: 239826 - protein, 362 aa, unidentified
MEYFCGLDVSIDETAVCVVDEQGEVHLQATAVTDAEALFAVLKPYLPRLRRVGHEAGSLSPWLHPEMLKLGLPAICLETVHVRAAMSAQRNKTDKADALGIAHIMRTGWFRRAHVKTEGCYRMRLLLTHRRNLKRKFLGLENAIRHSLKAFGIRLGGIGRGKFDAAVREAVADDPFTTDLMEVMLTARAALWKEYCRLHDLVVKMVAQSELCRRFMAIPGVGPVTALSFMTAIDDPSRFRRSRDVAAYFGLTSRRWQSGTSIDVKGRISKAGDADVRRALYEAASALMTRFKGKDSLKMWGAALAKRSCHRKAVVAVARKLAVIMHAMWSAGTFYTGAPNDGAAQADARQMRKERKLLGAHA

SEQ ID NO: 239827 - protein, 344 aa, unidentified
MVEVSTIGLDIAKAVFQVHGVDGAGAVVIRKRISRSKMLEFFAELPPCLIGIEACPSAHHWGRELQELGHTVKLMPPSYVKAYLKRSKNDANDAAAICEAVTRPSMRFVPIKTKEQQTALMLHRTRQLLVRQRTMLSNALRGHLAELGIVSAKGRIGMGELLRIIADGADHRVPPAVRSILDVLARQYSAIGSEIGSIDKSILALHRSCEASRRLAEIPGIGPIVATALVAEIGDWKTFSSGRSLAAWIGLVPKQHTTGGKDRLGSITKQGNRYLRWLLVVGAMAVIRYARKHGTQKRPWLGRLMERRPTKVAAVALANKIARIAWAIMVHGERYKEPKLLLAA

SEQ ID NO: 239828 - protein, 373 aa, unidentified
MANVEKDFAKGKPVYVGLDVHKQEWVVTVLCQGEELYHAAIAADPQGLIRTLRRFEASEVHTVYEAGPTGYWLHDALMEAGFDSMVTPPSLVPHVGGRVKTDHRDSKKLASMLAGGFLKRVHVLRPEERAHRQLLRTRNQIERHRKQTQNQIKSLLLFHGKRTPATLRERWSDGFVRWIETLSWEHDALKTSMSTLLTLYRQADEQYKMLTKQIEALALAEKYRERAQLLIQIPGIGIFTAMAILIELQNVERFKRADELASYLGLTPSQRSSGERIRMGRITRCGNARVRTRFVESSWTLIRYDAQAKATYERIKHQTGSGKKAITAIARRLALRVRRVLIDKQPFRLAEGGRLAIGRDKMREARRFVLKQQ

SEQ ID NO: 239829 - protein, 356 aa, unidentified
MEYIAFDAHKHYTLASVVTPDGQLVREERIEHDRGTLREFLERCERGSPVAVETIGNWYWIVDEIEAAGCLPRLVHARKAKLMMGEINKTDRLDVRGLNRLQRSGTLPTVWIPPGELRDQRDLPRTRMVFVRQRTQLKNRIHATLAKYALHDLDVSDLFGVRGRALLRERFELLPPHTAYASQQLLGQVEELGRQVHAFEQRIQATFKLTPAIQRLLTLPGVGYTLAVVIALEVGDVARFASAERLAAYAGTTPRVHASGGKSRFGRPRPDVNRYLKWAFVEAANAICLHRGRAADRHVSRLYERLARRKGHAKAIGAVARHLAEATYWMLSKEEAYREPQSVGRVVHGGSARVAP

SEQ ID NO: 239830 - protein, 455 aa, unidentified
MPRIKRSRMAMSPVHANAAAIDIGATLHVAAVGPDRDPEPVRSFGTFTGDLHRLADWFEQCGVTTVAMESTGVYWIPVFEILEQRGFTVVLVNARDAKHVPGRKSDVSDAQWLQRLHEYGLLRASFRPERRIAALRDYLRQRERLLDYAASHIQHMQKALMQMNLQLHHVVSDITGATGMRIIRAFVAGERNPVTLAALRDQRCKESAETIRQALVGNEREEHIFALAQAVELYDAYMAKVDACDKRIEAVLTELKATCPPPAAPLPAPRHRTKQPNALSFPAREALHRIVGVDLTQIHGLGPYLALKLVGECGTDLSPWPSAKHFTSWLCLAPSNKISGGKVLSSRTRRSSNRASALLRLAAVTVGRTDTALGAFYRRLAGRVGKAKAVTATARKIAVLFYNTLRHGMGYSDPGASYYEDRYRQRVLANLKRRAKSLGYSLQLTEPTSPGAEVS

SEQ ID NO: 239831 - protein, 348 aa, unidentified
MIVIGIDSHKRTHTAVAVDGTGRKLAEKTVVAVSAGHLELVRWATRFPDRTFALEDCRHLSRRLSTDLLVAGEGVVRVPPKLMAGARRSSREPGKSDPIDALAVARAALREDLPVATLDGPDREVRLLVDHREDLVAERTRAQNRLRWHLHELEPGLEPVARGLDRTVVLAALERDLAEVPGTVGRIARELVVRIRDLTTAINDLEREIGRLVADLAPSLLALTGCGPLTAAKLVGETAGIGRFRSRAAFARHNGSAPLPVWSGNTERHRLSRTGNRQLNVALHRIAITQLQREGPGRTYLEHRRGQGNTKTEAIRALRRRISDEVFRRMRHDEAARAASPSGLAAAA

SEQ ID NO: 239832 - protein, 420 aa, unidentified
MEDERNWFVGVDWASETHHVRVSDARGRKLGARAFAHSGEGLAAMAAWILEVTGAPPEAVFVAIEVPYGPVVESLMERGFRVHAINPKQLDRFRDRFSPAGAKDDTRDAEVLGDALRTDPRCFRALQPLDPVVVELREASRMAEDLKQERNRLGNRVRELLWRFYPQMLGLTDDVAAPWFLDLWRLIPIPEKATRVREVTVDRLLKRHRIRRLSAADVLEALRRPAILLAPGTVSAAVSHREAIAKRLDLVNRQMLAVDERLDRLTQSLAGAQERAGGQRPEPCDVTILRSLPGVGRIVLATLLAEAVEALQRRDDRALRCLAGVAPVTKRSGKSRIVLMRQAAHVRLRNAVYHWARVAVQHDPRSQAKYAALRARGRGHGRALRSVADRLIGVACAMLKAKTIFDPNLASQRAPNLGGS

SEQ ID NO: 239833 - protein, 358 aa, unidentified
MNAVGIDVSKGKSMVAIMRPFGEIVSTPFEIKHTTSDINSLVELISSVEGESRIVMEHTGRYYEVLAHQLSEANLFVSTINPKLIKDFDNDSLRKVKSDKADAVKIARYALDKWQNLKQYSVMDELRNQLKTINRQFCFYMKHKTAMKNNLISILDQTYPGVNTYFDSPARSDGSQKWVDFASTYWHVDCVRKMSLNAFTDHYQNWCKRKKYNFSQSKAEEIYGRAKELVPVLPKDAITKLIIKQAVDQLNSAATTVESLRTLMNETASKLPEYPVVMTMKGVGTSLGPQLMAEIGDVSRFTHKSAITAFAGVDPGVNESGTYEQKSVPTSKRGSADLRKTLFQVMDVLIKTHPQDGK

SEQ ID NO: 239834 - protein, 376 aa, unidentified
MEHDSTLYVGLDVHKESITAAYAFGMGEVELLGKVGTTKTDIDRLCKRLQSKASRICIVYEAGPCGYGLYRQLQQKGIDCMVCAPSLIPRKPGERVKTDRRDAIKLVRSLRAGDLSEVCVPTVEDEAFRDLARAWVSAKDDLKRARQRLKSFLLSHGVSYTGRADWRAAHRRWLSTFAFDSTWQQLAFEEHRRTIEDRLAQCDRLEAALREAVVAWRFYPAVLGLQTMRGMQFTTAVGMLAELGDLSRFTHPRQLMAWLGVTPSEHSSGEKRRQGSITKNGNSYARKLLVESAWSYRHPARVSPEIQRRHEGIPKPIVDRSWDAQVRLCRRYRTLVARGKQKNIAVVAVARELSGFIWDISQLAMSLALQPQKHAA

SEQ ID NO: 239835 - protein, 388 aa, unidentified
MIFVGIDIAKLNHFASAISSDGEILMEPFQFSNDADGFHMLVSRLDSLDSDNIIIGLESTAHYGDNLVRYLVASSFHVCVLNPIKTSSMRKNNIRKTKTDKVDTYIIAKTLMMQDSYRFVSFYDLDLMDLKQLGRFRQKAIKQRTRLKIQLTSYVDQVFPELQYFFKSGLHQKAVYALLKEAPSPQDIASMHMTHLSHLLTTASHGHFKKEQANELRALARKSVGANDSALSIQITQTIAQIELLDSQLKTVETEMTEIMKFHDSVIMTIPGIGSINGGIILGEIGDIHRFSHPSKLLAFAGLDPSVYQSGNFQARRTRMSKRGSRVLRYALINAAHNVVKNNATFKAYYDKKMTEGRTHYNALGHCAGKLVRIIWKMLTDEVEFNLD

SEQ ID NO: 239836 - protein, 449 aa, unidentified
MSAIPTSSTHPEFGALIGINWGDKKHAWALQVGDSTKIEKGDIEHTPEAIQQWAVGLRQRFPTGRLAVALEQSRGPLVFALSKYEHLTLFPIHPTSAAEYRKIFRPSGAKSDGPDAVLHLDMLARHRDKLRPLNPDTPETRALQLLTEDRRQLVNERTRYSNRLTANLKSYYPQVLQWFDDLYAPVTLDFLDQWPTLEELQKAKPGVWSEFFQEHNCRDAKTQQRLAAIPMAVTATTDFAVVTAGRAGVCAAVRLLRNLNQAIQEYDRQIDQLAKGHPDFAIFQSLPGAGKVMVPRLIAAFGTQRDRYQRAADIQQYSGIAPVTEASGQQLWVHWRWGCPKFLRQTFHEWAAQSIAQCDWAAAYYRVQREDKNKSHHAAVRSLAYKWIRIAFRCWKDRQLYDDSKYELALKTRAKATPEPKQPSAFPLPLRWISCAGFQKLAEKNEENT

SEQ ID NO: 239837 - protein, 404 aa, unidentified
MKGPIVSIDVSKGKSDYQAFKEMNVKYTGSRSIKHTKEGFDEIVSLVREMEKKLETEVCVVYEATGVYHRVLKKVLEDNNIKQFIINPLLSAKTRKNDSLRSPKTDKLDPKSIAKTYYSHSLHNSHKPETIYHELRELSRYYEDILVHLRKDKVAFRAQLDVVFPGYDTLYDDLYGPVALAVIEKYPHPEMLQKKKINTVSKVIQSKTCHRQAMSDTMADKAIEYSKTIYSGCDKDDIEVLILQRFIKKLKEDMAEAERTIGEMIKLAQELPDFSIIKSIPGIGDNLAARIIAELGDMTRFKKKNELVAFAGLDPRINESGQNDGDHMHITKKGNKRLRCLLYLAVTCFIRLKRDDNSIKDFYIKKKQQSNPMCSKAAKTACASKLVRIIYSMCKTGELYQYNK

SEQ ID NO: 239838 - protein, 342 aa, unidentified
MQYLGIDWGTRRASWCALDEHGALREGVISADQDGLARLALTLDGDEVYGCIEMMSGAVWVRDRLATVGWDIRLADARKVKAIAPLACKTDRVDARVLADLVRRDLVPEVWVPGLEERANRERLRRRSHLVRLRTSAINRTFGVLTQWGLRRNLTALRKPDAIDELAAHGVPPVWLQSITTLLAVIDDLDRQLDVLERELRPVARADERVKLLMTIPGIAELLGLTIASEIGDIARFPSARKLVGYSGLTPTIKQSGQSSRTGRLSKAGPDTLRWAAVEAAQQAWRPNNPWHRLYTDTKTRHGKSNPAKAAVARKVLIAAWHVLARGEPFKPSATAAAAAAA

SEQ ID NO: 239839 - protein, 368 aa, unidentified
MSEVTTRHLGLDVHKATISVAVADPGAAPVLYGTIANEVGAVRKLVSQLKRGCQLVAAYEAGPTGYGLHRQLSELGVKCVVIAPALIPRRAGDRVKTDNRDAITLARLLRSGDLTPVWVPSQEDEALRDLVRARFDAKDDLRRAQHRLSKFLLRQGIQPPVGMTTWSARFQSWLNTLKLERPGSQLVLEDYRATERAARDRIRRLEADLKSCAEKSPRLDLVLALQVLRGIAFLSAVTIVAEVGDFRRFADAPRFMSFTGLTASEYSSGQSRRQGGITHAGNRYLRHILVQAAHNARYTPTLDGTVKRRLRGVPADLVELSLRAQTRLHRRYRHLDRRIGRAKAVTAVARELAGFVWAVGQRMEATAA

SEQ ID NO: 239840 - protein, 319 aa, unidentified
MQSKLTIGMDIGKAEVVVACHESAFAVLKMANAVPVLRRWLATLPAGSRLGLEATGGYHEPVAQLAHSLGFTVYILNPKDVHHYARALGARGKTDRLDAQVIAAYVAEHNARLHAFVPLSADEKLLRELARRRATLVNAKSMLQQSLRVLPGFEREGRELLRAMGSFADRLERKLAEIAARSSERAALVKRLQTIDGVGTLTSIRCATLFTRVPLHRSDAAVAFFGLDPRPHDSGQHRGRRRLSKRGPSEDRRLLYNAAMSAIRTPTWRPLYQHLRNRGLASTEAIIIIARRMVRIAFAMYQNHSDFNPRLVPRPSCPA

SEQ ID NO: 239841 - protein, 419 aa, unidentified
MNSSNTKKVTIINEKTMIAALDIGKGSHFAYFRAPNGKDSKPFPFNNFKKGFDEFWMKLSQFKRNEGLKEVVIGFESTGPYAEPLLHYLRKKPVKLVQINPVHSKRLKELTGNSPNKTDKKDPRVIADIISLGHALTLVVPEGPAAQLRRLTQARERAIKSRTAMINQIQHLIFVIFPEFLKIFKDISVKSAMYLIKNHPSPEIVSSVGLESLTDILRKVSRGKLTQGRIKELFEAAKQSIGINEGKESILMEIEHLVSAIENENRFIDDLENQMAHYLHQIPYSHCMLSIKGIGLITVAGLIGEVGDFKKFNTISEMMKLAGLNLFEISSGKHSGKRRISKRGRSLMRKLLYFAAINVVKSHGIMHEPYQEMLDRGMPKMKALVAIARKLLGLIFALARDNTVYVENYSHRHHFKLAA

SEQ ID NO: 239842 - protein, 419 aa, unidentified
MSFKILKFNCCGLDVHKTWIYACIGITDSNNRTEYKQARFSSFTRGLNELCDWLAKYNCKDVCMESTGKYWIPVFNILEQRSLWVTLSHPKYTKPMKGNKTDRKDAKWICDLYMCGMVKPSFIPPADIRELRDLVRYRFKLICMITGEKNRAQNCLTVSNLKLDDVFSDVFGKSSRSITEQILQHPGENFDVAPFVDGRCKTPVEEIQDAVDGAISKEQAVKLRQCLDHIDELNQHISQVEQEILRLSDKYEAALNLIRTVPGFDKNPMTAIQVLSEIGGDMSVFPTDKHLVSWAGCCPRNDKSDRKIKSTRISRAGSYFKPVLVQIANALIRSKKHPEFTTRYQRIKARRGHKKAIIAICRMILTAIWHILTDLKPYTPDGFLELRPVTKEKVLTASQALNLMRQRGYIIKDDLPATS

SEQ ID NO: 239843 - protein, 317 aa, unidentified
MSKRSIICAGIDTGKHKLDVALHGRPERLQVANTAEGHEELFVWLRQHRVKRVGIEATGGYEQTVVRRLRQGRFVVVVFQPAQVRAYGRFHLRLAKNDKIDAALIAACTSDVRTIHAPPDRRLAELAELQTQIDQVVRAMARFKNHRESCRDAGLRQLWDDEIRRFRGLFRQRLKQLVAAIRQHPDLAERLDLILSVDGIALRTASALVVRMPEIGQLSRGQAGALAGLAPYDDDSGEHAGDRHIAGGRERLRNNLYAAAWIASLRWNPQLTALYKRLRAAGKEHKVAVVACARKLLIFANAVVARGTPWEVRTIAH

SEQ ID NO: 239844 - protein, 345 aa, unidentified
MPIVGGLDIHRKQITFDYLDTVTGEVRRGQIAPADREHLRAWLARFAGHGDVAFAVEGCTGWRYVTRELAAAGIAAHLGEPADTAALRGRKRHAKTDKTDSAHLRRLLAEGRLPECWIPPEHILEYRALLETYHDLRREHTAWVQRIHAVFFHQGAPPLGEGVLRTEAGLARLRAAAAAHLSAAGQQQVATALDMLAATEAQLGPLRHQLRQAAAHLMGAKVLAERLYGVGPVTGLALTCWLAGAGRFSSSRKAVRFTGLDITVHSSDRKGPPGRLSRQGPPVLRWAVYEAGKTHARAAAPDHGYYAAVKDRSNGKRAALSEARKIVRQACHILAELGDDALTAA

SEQ ID NO: 239845 - protein, 343 aa, unidentified
MTKDTMIGVDLAKNVFQLHGASMTGQPKFRKKLSRQSFPRFMAEQPSAVVVMEACGSAHYWAREMIRLGHEVKLIAPHYVKPFVKRQKNDAADAEAIVIAAQRPEMRFVDPKSAEQQSRAILFRGRERLVHQRTELVNALRACLYEYGHVVPQGIHQIKRIGEILDAPNSDLPDLMREECQDLLEQIGEKTARINARTGKIKVLSAEADTARRLQTIPGVGPMTALAVEAFAPPMENFRCGRGFAAWLGLVPRQFSSGGKERLGRISKAGQSDIRRLLIIGAMSRLNWLGRKSIPEGSWLARMAARKPRMLVAIALANKMARTIWAMLTKDEDFRAPTQAAAA

SEQ ID NO: 239846 - protein, 410 aa, unidentified
MTLFCGIDWAESHHDVAIIDDTATVIAKARIGDDATGFARLLDLLAEAGDTADAQIPVGIETDHGLLVAALRSTGRTIYAINPLSASRYRARHQVSGAKSDAADAALLANIVRTDAAAHRPLPADTELAQAVRVLARAQQDAVWARQQLGNQLRSLLKEFYPAALEAFAGQPEGGLARRDARTVLAAAPTPALAATLTRARLRTLLTKAGRRRNVDADVDRLHGVFRSERLRQPPIVENAMGIQFSALLSQFEAACAASDSLAEAARTHFEQHPDATIITSFPGLGLLAGARVLAEIGDDRTRFTDPRGLKAYAGSAPITRASGRKTVVSHRHIKNRRLAAVGPVWALASLRASPGARRHFDTRRAAGDWNHQAQRHLFNKFLGQLHHCLQTDRLYDEHQAFPPPPAHTA

SEQ ID NO: 239847 - protein, 343 aa, unidentified
MEKITTIGVDLAKSIFQVHAIDETGGVVLQKALKRRDMFPFFEKLPPCLIGLEACSSAHHWGRMLRQLGHDVRLIPPAYVKPYVRRQKNDAADAAGICEAVTRPKMRFVPIKTEEQQAALMLHRARSLLLSHRTALICAIRGHMAELGLVAPRAVRNMDALLDVLTDQADDSLPPLARAALRPLADQLGLIDIQLANLNREVQKWHQANAVSQRLASIPGAGPITASAIAASVTEPSMFASAREFSAYLGLAPRQNSSAGRTKLGRVSKMGDRYIRTLLVNGAVSLLSPKRKNSCMLDAWARNLIEKGKATKLIAIALANKMARIAWALMTRQEAFREPVPAT

SEQ ID NO: 239848 - protein, 356 aa, unidentified
MPAAPTRPHGSDRVVIAIDPHKASWTAVVVDSGLTPVAALRVEVNRAGYRQLLRFAAKWPQARWAIEGAAGLGAPLTERLRAEGIAVIDVPAKLARRVRLLSTGHGRKNDQADALSVGIAAWSAPALRTVEVDEAIAALRALTEHRDDLVRTRTQLVNRLHAMLVKLVPSGLPRGLTAESAAETLRRIRPRDPLGRTLRRLAVELVGELRRIDRRIAEATQALSDAVAASGTTLTRLLGVGDVVAAKLLARTGPISRFPSAAAFASFCGVAPIEVSSGDGVRHRLSRAGDRQLNYALHVMAMTQIRYDSPGQAYYQRKRAAGKSHKEALRCLKRRLADVVYRIMIRDTVSSLTLAA

SEQ ID NO: 239849 - protein, 312 aa, unidentified
MIEQCFGGIDVSQDRLDVLLLPQGTGFSVANDEAGWSTLIGRLRGLPVAAIGLEPSGGYERGVLRALLAAGLSVRRINPNRLRQFARARGALAKNDRIDARLIAEYVATMPTHVVRHDPAAARIAEIVTMRRQLCDEHVAIENQAAQLEDAMLRRLAKRRLARIETDIRLLDKRLTQMIAAEADLARRYARLTSMPGVGPVLAFTLIALLPELGRMSRKQIAALVGLAPYDFDSGKLRGHRSIYGGRMPVRNVLYMAALSACRYNPALRTFHKRLAAAGKKPKVILVAVMRKMITTLNAMLRDGASWQPQAA

SEQ ID NO: 239850 - protein, 343 aa, unidentified
MQTVTTIGLDIAKSVFQVHGVDAEGNVLIRRQLKRRYVLAFFEKLPPCLVGIEACATSHHWSRELKARGHNVRLMPPAYVKPYVKRQKNDAADAEAICEAVTRANMRFVETKTPEQQSCLMLHRTRQLFIRQQTSVINAIRAHMAEFGIVAPVGRKGVEQLLDVVADARDRRVPEVARACIAALGAQLRLLKAQILEFDRRILAWHRSNETSRRLDELPGVGPALATALVASVADAKAFRSGRNFSAWIGLVPKQHSSGGKDKLGSISKQGDRYLRSLFTAGALAVIRYAKIHDTQHRPWLTALLARRPTKVAAIALANQIARMAWAMMARGERYREPVALAA

SEQ ID NO: 239851 - protein, 412 aa, unidentified
MKLFIGIDVSSKDLQVAITDSENHQKPLLNQSFSNDLTGANKVKKLILQLAKQNSYDKVIIGMEATSIYSFHPAYFFANDEDLQKLNLETDVVNPKNTKRFHDVYEENKNDPIDAYYIAEYLRFGKYHVTIARQEEYLALQRLTRTRYEITSSLARAKQHFIEALYYRLNKLVTVDKENIKTSIFGATMLSIVTDSKTIDEITEMPIEDLIDYLQTKGRGRFSDPEALAKAIREAVRGSYRLGKVMKDSIDAVLSVYYTEIKTNQKLIKNLDKAITDIVQALPEERILQSIPGIGPVYSAGIIAEIGSIDRFDTEAQLAKYAGLAWRQKQSSDFDSEHKPMTKNGNHYLRYYLVEAANLIRLRDPVFRKYYQKKYDEAFYSPHKRACVLCARKLVRTIFTLLKNGQIYQTPR

SEQ ID NO: 239852 - protein, 421 aa, unidentified
MSHAIVKKYDELRVFVGYLSDTRSQRPIQHNRIPKLIMKIQYYIGLDVHKETVAIAYIKSNSRGDAIYKATCGGSNAAVERALRKLAKELGVKFQELSICYEAGPTGFVLGRRLIQLGVECVLCSPSKTERKSGEKIKTDKRDAMKLAKLYKNGDITPVRIPPALDEAVRDVCRARTDAVDDLTRSKQRLNSFLLRLGMSYTGRSKWTPAHMRYLRDLTMPTDVQKIVLEAYITSIDLNESKVRELKESMLSILQDWEWKPVVAALMGCKGFQEVAAMTVVSELGDLRRFDNPRKLMAFLGLVPSEHTSGAKRRQGAITKCGNSHARWMLIECSQHFRKSPQIGAALTTRQIGLTTEVKELSWRMQHRLHTRYVKLKMRGKNENKCIVAIARELVAFIWELQNKCNLTMPEPSDARNMIEN

SEQ ID NO: 239853 - protein, 356 aa, unidentified
MNIATLGIDLAKNVFALHGVDIAGKAALVRPRVSRGEFLEVIASLPPCLIGMEACGGAHHWARRCIAYGLQPRIMAAQFVTPFRKANKTKNDRADAEAIATAARQGNMRFVPIKSVDQQLRLCWHRAREGYKVEHRALGNRIRGLLAEFGNVVPNTDAALRAALADLDHAKLPASLNALLADMTAHWHAIGKRRDACEAQIQAHALADERCQRLRSIIGVGALSADALVASVGSAQEFKNGRQMAAWLGLVPSQHSTGGVTRLGPISCRGDAYVRTLLIQGARSSLQRAKAVSVEKSTPEQMWIRSLACRLPFGKVLVAIANKHARQLWALLAHDVDYDPTAFTRHPMQRRSNPAT

SEQ ID NO: 239854 - protein, 439 aa, unidentified
MNNHTIQSNSQLPLVPAPIDIWIGADWADQAHVLAIRTRSGATRTCSLEQKPELLDQFFLGLRQEHPQSRIGVCIEQTRGALIYALMKYDFLVIYSINPRSLADFRRAFCVSGAKSDPSDAQLLCEMGCKHQERLRPLQAEDACTRKLRLLVEARRSFVDRNTSVLNEFGAVLKCYYPLMIELFEGNLDSQMACDLLKRWPHLAALKQAKPATLRAFCYAHNCRGKQRIEQRLEAIAKAVPLTEDPAIVEPLQLQALALAELLCVLAKQIKSYDERIQRVFNEHSEAWLFRELPGAGLVIAPRLAALFGTQRANWPNALDLLCRTGVAPVQKQSGNQCLVQFRWARPKFLHQTVVEFAKCSLRFCPWAKLLYEDQLAKGKSRFSAIRMVAFKWIRILWRCWTQRVAYHETTYVLGLQRRGVKLYQSLYGNPAGEPVNNP

SEQ ID NO: 239855 - protein, 461 aa, unidentified
MVTKKWSRRKKRGAVKTDWELGLSVMHPRAAGIDVGQGEHYVAVPPHLDRDQEPVRRFETFTADLHRLVGWLKACGIETVAMQSTGVYWIPLYELLAQEGVQVFLVNARETKNLPGRKTDVQECQWLLKLHVYGLLKNSFRPTEEICVLRALWRQRQQHIADASTCIQRMQKALIQMNVQLANIISDITGKTGMAILKAILEGERDPEKLAGFRDPNIKASRQQIAHSLEGNWRKEHLFVLGQEVALLETYQDKIQECDQAIQEHLQSLPAKGDLRQLPPAQKRATGNVPRHFDLRDELYAISGVDLTRIDGINVLVAQTLIAEVGLDMNRWPAEAHFASWLGLCPDNRISGGKVLKRGTRKVVCRAATALRQAASTLLRSKTYLGAQYRRLRTKLGAPKAITAMAHKLARLVYRMLKFGEEYVDRGMQYYEQRLRQQRILALFRTANELGLEVIQPTGGH

SEQ ID NO: 239856 - protein, 391 aa, unidentified
MICVGIDVAKDKHDCFILSSEGEVLADVFTIPNNAEGFGILLQTIRRCTRPADKIKVGLEATGHYSYNILGFLLDCGLPTFVINPLHTNLYRKSLSLRKTKTDRIDARTIATMLMSDVDLKSYTDTSYHNEELKSLTRYRFDKVRERAKLKCSVARLVCILFPELEKLVPTIHMASVYALLSEFPGAHQISEAHLTHLKSVLSDASKGRYGREKAVEIRDAARNSIGSRMHAKSLELKHTIRLIRELDAEIEEIESEINSIMGEIQSPITTIPGISTRMGAMILAEVGDFSNFDSADKILAYASMSPSTYQSGQLTSSHSHMEKRGSRYLRYAIFNATRFVCNWDPAFAAYLAKKRAEGKHYNVAISHAAKKLVRLIYAMEKSQQPYRQAA

SEQ ID NO: 239857 - protein, 341 aa, unidentified
MGEVSTIGLDIAKSVFQVHGVDVAGAVVIRKRVSRAKVLEYFGELPPCLVGIEACPSAHHWGREIQALGHTVRLIPPSYVKAYLKRGKNDANDAAAICEAVTRPSMRFVPIKTKEQQTALMLHRARQLLVRQRTMLSNALRGHLAELGIVSAKGRNGTAELLRIIADGRVSPAVCGILKVLARQYGAIGTEIASIDKSIMALHRGCEASRRLAEIPGIGPIGATALVAEIGDWKTFSSGRSVAAWIGLVPKQHTTGGKDRLGSITKQGNRYLRWLLVVGAMAVIRYARKHGTQKRPWLGRLMERRPTKVAAVALANKIARMAWAIMVRGERYKEPKLLLAA

SEQ ID NO: 239858 - protein, 452 aa, unidentified
MEKPQEVEDEEYERVWERVAAVDVAKASGVACTRVPDEDRPGRRRTHVWTVTATVSAVTELADHLRCQGIQIVTLESTSDYWRIWWVVLEAAGLKVQLVNARAVRNVPGRAKTDKKDAVWLAKLTERGMLRPSFVPPPEIRRLRDFTRLRAELVHERTRYWARLEKLLERALIKISSVASTLDTDSTRAMIEALIAGQRNPKALAELAIGKMRPKRAQLAEALDGKFEPHHGELARIILDQIDALTARIDQLSDRVTELIDQIPAAQGVDADGTTGPGAGTGPGAPVLPAVARLDEITGCGTVAAQAIIAEIGLDMTVFGTPGRLVSWARRCPQTRQSGTKTSAGKAGKGNPYLNGVLGEIAASAGRTDTFLGERYRRLARRRGKRKAVTAVARSVLVVIFHLLADPQARFRDLGPDYHDNRISRDRKIANHVRQLQALGLTVTLTPAEEAA

SEQ ID NO: 239859 - protein, 411 aa, unidentified
MDVLYPVCCGLDVHKKTITACLRFASARARAEEVRTFGTTTRELLRLADWLTAAGCTHVAMESTGVYWRPVYHILEASFEVLLVNAQHVKAVPGRKTDVKDCQWLAQLLEHGLLRGSFVPPAPLRELRELTRYRRQLVQEHAREANRVQKVLETANIKLGDVATDVLGVSGRAMLHALIAGERDPERLADLARGALRQKADALREALVGRFTLHHAFMLQGLLDHIEFLDQQIARFDERIEEQTRPFGPAIERLDTIPGVGRRSAEQILAELGDDMRRFPTAAQAASWSGICPGNHESAGKRRNGRTRKGNAWLRSTLVESARAAVRNRGCYLSAQYHALARRRGDKKAVVAVAHSILVAAWHILRDGVEYHDLGPDHFDRLNRDRLVQYHTRRLAELGLTVQLPGAQATA

SEQ ID NO: 239860 - protein, 297 aa, unidentified
MTQQERFVGIDVSKASLDIAVLPEERVWRIEREEASIAGLVKELRTLAPCLIVLEATGGLESPLTAALATAGLPVAVVNPRQARDFAKATGRLSKTDALDAQVLARLGQTLRPPVRALKNEETQELEALLTRRRQIVEMLTMEKNRLPSAGQRVRKDITAHIAWLTKRLKDVDGDLQSAIAASDFWRIKDDIIRSLPGAGKVLSTTLLASLPELGTLNRRQIAALAGVAPFNGDSGTIVAVATSGAGGQRSGRCYTWPRSAPFAATPTFARSTPGCGAPARNPRWRSPRACASSLPF

SEQ ID NO: 239861 - protein, 338 aa, unidentified
MNYMGIDHHKQYSHITMLNEKGEKLKSGRVANYRSELERFLDCSGEVKAVIEAGRSSYTMVDLLDELSIDVTIAHPLQVKAIAKAKIKTDKRDSFMLAHLLRTDLIPEVYKRSRENRSYQRILRQRAFYVGSTTRTKNKIRALLAQQGEELRDKASRKKNLFTGSGIKFLKTLNLPDTDKKLLSALLKTFNHLEERKKETNGLVEKLYQEIPEARLIHTVPGYGVFLSVLTAVEIADIERFSEVSKFHSYAGVIPSTHSSGGRTYHGKIVKQGNRWLRWAAVEAVWPSLKADFDMRCFYNKLKKRKGPNPAKVAAARRMLTIIFRVLKENRPYISYKR

SEQ ID NO: 239862 - protein, 459 aa, unidentified
MSPRFKGKKKIPSVSKTTPSLPVLQPHAAGIDIGAREIYVAVPPGRDPKPVRTFATFTEDLHALRDWLKACGVTSVAMESTSVYWIPLFQILEAAGIEVCLVNARHCKNLPGRKTDVQDCQWLQYLHAVGLLRGSFRPPETVCAVRSLLRHRDGLVRAAATCVHRLHKALTQMNIQLQHVIADVTGVTGLAILEALLAGEREPVALAKLKDGRIRASTDTIAKSLRGDWRAEHLFTLRQTLATWKHYQGQITACDEEIARRLQGFAAKVDVTAQPLPARTSTHKAPQKNEPRFAAREELYRTCGVDLTQVPGIQSGTALVLLGELGPDFAERFPTAKHFGSWLGLCPDNRITGGKIMSSATRDVKSRAATALRLAAQCLNSAQNYFGDLYRRWKARLGTPKAITAMAHKLARILWHLFKYRQAFDPEVFRKEEEKMRRKKLARLHHTAAALGLKLVPAQ

SEQ ID NO: 239863 - protein, 401 aa, unidentified
MPTMRDNAMRVKRFRELKATLRTNRRRLLVGLDIARSEHVAHLRHAHTRIVVPTLTIPNSTQGFKTLWARIEQAQRATGCREVVCGLEPTGTYHEAMARFLEAQGADVLLVSSAVAYWNRRTQDGTWDKRDPKDAANCADLLEQGKVLFYSQPAGPLAELRRLVRCLRRARTELAACKARWRTTLRPALGPMGEPLPNRLRAELPAGLQTWERAAPGRPALAKGRLPLGLATACTDLGAQVTAVQARIATIEQALTPVAEQLPAYALLRTIPGVGPTVAAILLAEIGDVAWFTKFSQLRKLAGLDIVRVQSGQSAGQARISKCGRGLLRWALYHAAMGLARTAGGRARLAALKAKRQGDRFAGFKAIVELAAKVLRIVWGVWRSGTPYEPRRTGGLTRQAR

SEQ ID NO: 239864 - protein, 370 aa, unidentified
MRRPAASYAVGKGELFVNKRSKRPSIAAIGIDLGDKWSHYCSIDEKGAVAADGRLKMTRQAFSDLFGEISPTRIAIEAGSQSMWVSEHLADMGHEVLVANVRELRAITDSDRKHDRADAEKLARYARVDPTILRPVKHRSSLAHADLILVRSRAVLVETRTRLTNTARSLVKPFGYRLPPISVSGYARKALASIPERLQSVVAPLLALVDALTSQILNFDKEIDRLAEAKYPETLSLRQVHGVGALTALAFVLTLEDKNRFRKSRDVGCFLGLRPKLSQSGRSNPQLGITKAGDPYLRTLLVQCAHHILGPFGPPTALRIWGRKLAEHGGKNGRRRAVVAVARKLAVLLHRLWVTQAAYEPLRGVITEAA

SEQ ID NO: 239865 - protein, 392 aa, unidentified
MVVSVGIDVSKDKHDCFIVSSEDEVLADVFTIPNNMDGFRFLLQRIQDYTHAQDKIKVGLEATGHYSYNLLGFLLDNGLTTYVLNPLRTNLYRKSLSLRKTKTDRVDARTIASMLLSDVGLKPYTDTAYHNEELKSLTRYRFDKVKERAKLKSSIARLVCILFPELEKLVPTLHMVSVYALLEEFPGAKQIAAAHLTRLKALLETTSKGRYKRDMALEIRDAARNSIGFPMPAKSLELQHTIRHIRELDNEIAEIEEQIQAIMDELNSPITTIPGLGFRMAAMILAEVGDFTRFDSPDKLLAYAGMSPSTYQSGQLKNCYPHMEKRGSRYLRYAIYNATKYVCHWEPTFAAYLAKKRAEGKHYNVALSHAAKKLVRLIFAMEKSRQPYCLAA

SEQ ID NO: 239866 - protein, 340 aa, unidentified
MGTARVLNFLIFSGNQPPVINLIGVKRMQDLLEVCCGLDVHKETIVACLLKGSVNDEKPQKIIRTFSTLLEGLEELKAWLESENCHNVAMESTGIYWQPIYNVLESAFDGTMSIIVANARHMKNVPGKKTDMKDAEWIATLLRAGLLNGSFIPPQEIRELRDLTRYRKSIIEEISSQKNRIEKHLQSCGFKLSNFLTDIFGVSGRAILNHIAEHGSITAKEVENYVRGKARAKLNDIKLSISGRMNKHQREFLKLLLKHLDEMYEHLREIEENINSELGKYKRQIEQLDSIPGIDVTAAAAIIAEIGTDMSKFKTQEHICSWAGLSPGNNESAGKKSPLE

SEQ ID NO: 239867 - protein, 346 aa, unidentified
MMIIGCDYHPSWQQVAWVETETGECGERKLVHATGEAKVFYQQLGSPALIGMEATGNSQWFIELVEDLGHAIWIGDAAQIRASYVRKQKTDKRDAAHILRLVVENRFPRLWTPDREQRDLRQLVLHRHKLVEMRSRVKNELQHLAMNKGMQKKATLWSQAGQQMLRELPLKPWAGCRREDLLGLLGMLNQQVGTLDQAVQKAAEEHAQARLLMTQPGVGPNTALAYVLTLGDVTRFQRGKQVASYLGLIPREESSGGRQKLGAISKQGNRLLRSLLVEAAQIAMRFDPGFRKQYLHRCHQKPKGVAKVAAARRLAVRLYWMLRTQVAYPEIVRIESSPRVPRVGAS

SEQ ID NO: 239868 - protein, 385 aa, unidentified
MSQFSGSSQAAIDYNSTIIGALELSEKKWVLAVQLPGVSRHSRHVLDACGDGLVSFVERLKAKCAAAGRKIARVILTHEAGRDGFWLARFLARRGIEVHVMQPSSLPVDRRARRAKTDMIDVEMLLRTLMAWLRGEPRVCSMVPIPSEADEEARRANREREDLSRERRSIVNKIDGILATLGIKGYKALRRDRREQLNCARQPGGDPIPQKARARIERLLDRLDLVLKLIDQVESARDAILKKDAPADEAERMIRSLTDLRSIDPDIATLLVREAFVRQFRNRRALGGYVGLGGTPFSSGGSEREQGIGKDGNRRVRAAMVELAWMWLRWQPDSALSVWFRARVGAMGGRIRKIMIVALARKLLVALWHYVNDGVVPDGAKLKVA

SEQ ID NO: 239869 - protein, 322 aa, unidentified
MSEKHYLGVDVSLRKLNLHLTGPTSGDWEIPNEKEAVERFIREQKLNPAEYISGAESTSRYHLVCQEIFVRLGYEFRIINPILTGKKIVTSIRKKKTDISDAVIIANLLKQGEGRVVTEKQLNTVKRTILRARKTVVNHRTAIRVLIKDIERDTNIAGLGEAVSSLEALADQMGQTADELSSLAENCQPPSPEEKLIRSIPGFAATLSAIVSSEVGDFTRFPSATQFKAYVGIDPKVMQSGDSLRNGKITKRGNVHLRSAFYLAAQVARCHDPELKAFYQKKKGERKPTRVAICAVARKLCERVYAVVTRGVPYQIRRPENI

SEQ ID NO: 239870 - protein, 360 aa, unidentified
MMETMTWVGLDVHARSTHAAALTLPTAELQRARFGAESEAIVAWLQRLPQPVHACYEAGPTGFVLYRTVRAAGIAIDVVAPTKTPRATGDRVKTDRKDAELLARLLPTGSLRPIAVPPPEVEGARDLARAREQLRVDLCRARHRVSKMLLRHGRVYPGKSTWTQAHHRWLAGQCFDNANSELAYLDYLAAVDGLVARRRALDERLSRLAVEGDWWPTVQRLRSFRGLDTLSALVPALEVGDFARFRSPRQLASWLGLVPSLSQSGESSTQGAITKTGSRYARRLLVEAAWHYGRPPRIGVTLRQRQDGQPAHVLQIAWRCQHRLYRLHQLLSQRHKPGNIVTVALARSLACYLWAAAVAP

SEQ ID NO: 239871 - protein, 411 aa, unidentified
MLQPDKLIYVGVDLHKQHHTAVIIDCWNRKLGEIKFDNKPSAFPQLEKEVKKHAKKGISVVYGLEDVGGFGRALAVYLTEKNCWVKEVNAKLANNRRKSHVTVEKSDAWDAECVARVLRDELYNLPDAKPIDLYWAISQLVTQRKWQAKSLTGMVKRLHQQLGYHYPSYKKFFSEVDGKTALAFWHKYPSPSRLSGVGAEELAKYLRKLSNNGLSTKKAEQILSLVAEDGDTTRDFQDKRDFIVKGLVRNIRFYGRELTRIEREIESLMKQLGFQLETMTGIELVTAAELVSEIGDIHRFASPDKLARFAGAAPVVAASGNKFRNYKSKQGNRELHDIIKALAIRQIAVTRTKKEPRNPFFYNYYGERLAAGKTKQQAIICIMRKLVNVIYYLMKTKAAYEIPVVPSKEAA

SEQ ID NO: 239872 - protein, 355 aa, unidentified
MNDSKFIGLDVHKTSISAAVLDHDGKLVMQSVFATHAAAILSFIRGLRGTLRITFEEGTHSSWLYDLLRPYVTEVLVCNPRKNALLKSGNKSDQIDARKLAELLRAGLVSPVYHGQTSTVTVKELGRTYTALTEDTTRVMSRLKALYRSQAIATEGKKLYTKRRREQWLKELTQAGRRYRAERMFEQLDALQGFRRQARRDLFVECRKHAATAILTSIPFLGPIRAALLIARVQTPFRFRGKRQFWAYCGLALETRSSADYRLVEGELHRAKKPVFIRGLNLNHNHDLENIFKAAATTASACPGPFRDYYETLLGRGMKPEMARLTLARKIAAISLIVWKKGERFDPEQLKAQAA

SEQ ID NO: 239873 - protein, 348 aa, unidentified
MQRYIGLDVHATSCSFGVINEQGKKVGQAVVETNGAALVEHIKTIPGRKSLCLEEGTQSAWLYEVLSPHVDQVVVTRVDQKSAGNKDDIRDAFRLAEMLRLGNVLPVFKEKGRFGKLRAQSDLYSKMSSDSVRVQCRLKALFRSRGVPTPDADVFAPEQREQWLKKLPAAYRPAAEVMYRQYDSACRAKQEAAELLKKESHLHPISRMLETAPGMGPLRVAQLMAIVVTPYRFRTSRQLWSYSGLAVEMRSSSDWIRTEQGWQRVNLDKTRGLNRSYNRTAKYIFKGAATSVLQHRMQPLYNGYLRQLEQGTKPPMAKLTLSRRIAATLLAMWKNKEVYDPAKYRCET

SEQ ID NO: 239874 - protein, 343 aa, unidentified
MEYYVGLDVSLKQTSICVVNQTGLIVHEGVVESDPEMISAFVRLKAPGAVRIGLETGPTATWLWTELKRFGLPVVCIDARHAKAVLKMQINKSDRNDAAGIARIMQTGWFKEVRVKDLDSHSVRALLASRALLVKIKRDLENQVRGLLKNFGHVIGRAKFNVFAVRAEELIEGRPELIAAVRPLLEARHAIEQQVDGLDRKVQKLARHDAQVRSFMTAPGVGPITALCFKATIDDPARFKRSRSVGAYVGLTSRRHASGELDWSGRISKCGDAMLRMYLFEAAGVLLTRVPKWSALKAWGTRLIKRNGLRKAKVAVARKLAVILHRMWIDGTEFNWSKKAIAA

SEQ ID NO: 239875 - protein, 372 aa, unidentified
MNYNTVYVGMDVHKESFSLCAYTIEAEKASHYQRTEADYKKVLNYLEFLRTIYGDDANFICGYEAGCFGYTLYHQLTANNVKCIILAPTTMLEQRSKKRIKTDRRDAEIIAKCLAQHNYSPVHIPTAKDEATKEFLRMRDDHKLALKKVKQQILAFCLRHNYRYDGKSHWTAAHLKWLKALTPEALYKEILDEYLLTYQTLSDKIERLDKRIEELATQDEYKEAVKKLCCFIGVKTHTALSVLVEVGDFKRFASAQHFASYLGLVPGEDSSGDDQNRLGITKAGNRHVRLLLTEASQCYARGQVGFKSKELKSRQSGNTPAVIAYADKANERLRRRYYKMVLNKYKKHNVAKTAIARELACFMWGMMTDNIA

SEQ ID NO: 239876 - protein, 474 aa, unidentified
MKKHKQAEAKTKSEAIKPIGEQEPDSAGIDLGANEIWVAVPADRDQKPVRQFGAFTRDLMAIVQWLVQLGVRSVAMESTGVYWIPLYQLLEEAGLKVCLVNARHVKNVPGRKSDVRDCQWLQYLHSVGLLLGSFRPAQAICASRSIYRYRQNLLSMAAQHVQHMQAALDQMNIKLHHVIDDLSGVTGQAIIAAILSGQRDPVQLAQLRDKRIKAPEATIAKALEGDWRKEHLFVLAKAWAQYQEVQKQIQDCDQELWNYTRELEACTQVIKPAKVVRLKSELMGVEPLSNPPTQKRFRRKTSKNQPEGPWQQELERFFGVDLTAIPGISVLTGLTLMTELGNDLRAFKTEHHFASWLCLCPDNETSAGKVLRRRTRRSQNRVRQALRMAASSLHHDKSYFGDKYRRLRARLGAPKAITAMAHQLARILWTLITRQLPFDPSVFAYHEKAHQQRRLKRLATSARQMGYHLTPLAA

SEQ ID NO: 239877 - protein, 402 aa, unidentified
MTDAPNRYIGLDIHKEYFVAVGVNEQLETVFGPQRVSNYQLDDWILRCLTPGDAVVLEMSTNTYQFYDALLPHVHSVMAVHSPNVAMVTNVRVKTDKKAAMALAQLHAAGLLTGVWIPPYPIRDLRSLIARRDKMVRLSTMAKNRLHSMLHRHHLVTPEKPFAPEQRTWWESLPLSANEQLLVRSDLDTLDFAEKQVEQIEECLKQESAEDERIPLLIQLPGIAMLTAITILAAIGDITRFPSAKKLVGYAGLGTRVHDSGMTHSSGRITKAGRKDLRRAMVNAANHAVEHHVHWKKELERLQPHLGRSKAIVAIARKLLVAVWHVLSKQVADRFADPRDVASSFIRYAYRIGVRNLPDQQPALAFARDQLDRLGVGKDLKEIPWGSKRCKLPPSKIRLEKE

SEQ ID NO: 239878 - protein, 399 aa, unidentified
MRPAVGIDVSKGESHIQAFRKQKDVFGRILNIQHTKEGFREFHAFSQKLEREVEQKPVFIMEATGHYHLPMIFFLEEKGYEAIVINPYISSHTRKHSLRRVKTDVADAYHLGQLFYKEEFETYKQRSQQAIKLRQLTRQRDSLTDMHTQIKLQFQATIEKIFPTYPKLFHKFFSKASLQVLESYTTPASVLETPKEQIANDIYEAIKPARDYNWAEGKADHLIELANIAPIQDIEEGLLINLNIQMKLLEQYLMHITTLEKEIKTVTKDMEEYHLLTSIPGVGDITAADIIAEIGSIDRFNNPRKLVAFAGVDPEVYSSGRFTSSSNRISKRGSRQLRRAMYMAAKCGLSGKVNGPLQAFYDKKRAEGKPFKVAVMACANKLLHWIYAMLTKKEYFINE

SEQ ID NO: 239879 - protein, 344 aa, unidentified
MTYFAGIDVSLRSVNICVVEGDGELVAEAKLSSDVQEIIAYLDELAHDIDIVGLEAGTLAQYLTYGLQAAGLNVVCMEARQVKAALSAMRNKTDKHDARGIAQLLRCGWYSAVHVKSMDSHHIRMLLASRKAVLTKCIDLENEIRGIFKIFGIKLPPRLGHGAFDAAVRAIIEADDALSHALLPMLDARLVLYKTFRVLDNRTRHPAQDDAICKLFMTAPGVGFITALTYKAGVDDPTRFKRSRTVAAHFGITPRRLQSGEIDIEGRISKCGDAEVRCALYTAANAMLTRSSRWSPLKAWGMKLAKTRGHKKAVVAVARKLAVILHRMWIDETQFQWGTEVVRS

SEQ ID NO: 239880 - protein, 339 aa, unidentified
MTKTKISMLAIDLAKDSFQVCAVGSDGAVLSNRAMSRTRLASLLAEQPVCVVAMEACATSHHWGRIAQAHGHEVRIVPAAYVKAFVKRQKNDHADAEAIAEAAMRPTMRFVAVKSAETQARAVAFRTHQCLVRQRTQFINALRGHLAEFGLVAPKGPASLKLLENALDDETTDLPDPVRKMGTVYLEQIANLTEVIERLAAELEAATKTDEELRRLCTIPGIGPVTAGAVAAFAPDLDTFDTGRNFAAWLGLVPRQRSTGGKTKLGSVSKMGQTDIRRLLIVGAMSVIRWVVRKGGSPNRWLAALVARKPKMVAAVALANKMARMIWAVTTKREDYRMA

SEQ ID NO: 239881 - protein, 350 aa, unidentified
MVVVGADVHKRTHTFVAVDEVGRKLGEKVVAATTAGHAEAVMWARERFGAEVVWAIEDCRHLSARLERDLMGFGQSVVRVPPKLMAHTRASARTRGKSDPIDALAVARGFLREPDLPVASHDEVSRELTLLVDRREVLVAQRTATINRLLWRVHELDPERAPQSRSLDLAKHRRILGDWLKTVPGLVAELARDELADITRLTETINALAKRIGQRVRDVAPALLSLPGCGELTAAKLVGEVAGVTRFKSEAAFARHAGVAPVPVWSGNTAGRVRMTRSGNRQLNAALHRIAVTQIRLDGLGQAYYRHRIAVGDSRTEALRCLKRRLARVVFGHLHIDQQNRQKPCQPAAA

SEQ ID NO: 239882 - protein, 444 aa, unidentified
MVASKGRTGRSRLEVMYPDAAGIDVGGKSHYVAVPNERAEQPVRQFGVYTRDLEDLAHWLQECGVKIVAMESTGVYWVPLYEMLERRGFEVMLVDARHVKGVHGRKSDVLDCQWLQQLLSYGLLRAAFRPREQFCTLRELNRIRNRTLRDQGRSVQHMQKAMTLMNIQLGRAISDVAGVTGLKIVRAIVGGERDPVELAAYRDRRIKASEEEIAASLQGTWRAEQVFALKQALATFDFCGEQLAQCDAEIEQVMQQLHAHDGEPAKGKKRSRSKNAPRFDAREQLFKMCGVDITRIDGIDVSTALTVVSETGTDLSRFASDKHFASWLGLCPGTRISGGKVLGAGSKHSVNRATQAFKQAAAALRTSQSALGAYYRRLCSRMDKAKAVTAAAHKLARLFYALLTKGQEYVDQGQRYYEERYRQRVIRHLQHKAQRLGMSLVPST

SEQ ID NO: 239883 - protein, 365 aa, unidentified
MGIMHSIGIDDHADKWTIAHLEGTDEKAAHEFELVPNEQGYRKLIGFLKGLEGEVRVCYEAGPCGYDLYRRLNKAGIKCEVAAPSLTPSKPGQRVKTNRRDAMKIARNLRAGELTFIAVLDEGRESLRELTRARSTVQKDVVRVRHQIIKLLLRYGQRYRDGKAWTQRFWAWLAKVEFTGEYTKEVFDEMLITLDSRTSQLARLDQLIDEASKKPEYVVYVNALRVLRGIDTLSAMVILAEMGDLRRFPTAPQLMAAIGLVPSEYSTGDKTSRYSITKTGNAHLRHIVVEAAWQYRGRVTTGRTIAARRKGQPPELIQIAEKCDARLRRKFSRMTSRGKLSTVAAVAVARELVGFIWALGQIAHP

SEQ ID NO: 239884 - protein, 494 aa, unidentified
MPQLAKNATLFNWAGEPKTRRPTKRRASKGKGSKGKTDPTEGLQVAHPNAAGIDIGCSEHWVSVPPGRAERSTQRFGCATAELNRLAEWLKGCGVDTVVMEATGNYWVVLYDILEECRLNPVVVNPRYAKNMSGKKGDIPDCQWMQKLHTYGLFANSFRPTKEIRILRSYLRQRERLVVASSQEIQHMQKALTEMNVQLANVISDISGETGIAIIDAILAGERDPVTLAKLKGPRIAASKAVLERALEGHWKQEELFVLEQARLSYTHFQEQIQQCQRCIEQQIEAIQSRLSLEVQVPSERSSQSQVPCDSESGVSPRGNQKVQSFDLGAQLKRILGVDLTQIDGVGPVAAQVILSEVGTDMSRWRTEKHFASWLGLCPDHRISGGKILGRSTRPVVSRARNALRLCAYTLTHSKSWLGAKYRRLKSKLGTPKAIVAMAHHLARLVYRMIKSGEEYVDKGMEVYEAKYRAQRINWLQKQAKEMNMELVQMQTVA

SEQ ID NO: 239885 - protein, 455 aa, unidentified
MPKATTGDRPELKPVNVGAAAIDIGSKMHMAAVNPNCTDLPVRAFGTFTQDLHDLADWFKACGVTSVAMESTGVYWIPAYEILEQRGFEVILVNARYAKNVPGRKTDVSDAAWLRQLHSYGLLRGSFRPDAEIATLRAYLRQRERLVEYAAAHIQHMQKALMEMNLQLHHVVSDITGATGMRIIRAIVAGERSPDVLATYRDVRCHSSIETIRAALVGNDRDEHIFALTQSLELYDTYQAKMLDCDRKLESLIATLTEKGAKRVGKLSKPRVKTKQVNTPSFDVRAALYGVLGFDLTEIHGLGPSLALKLIGECGKDLKAWPTAKHFTSWLCLAPGNKISGGKVLSSRTRRSSSRAAALLRLAATTIGRSDTALGAFYRRLSSRAGKAKAVTATARKIAVLFYNTVRHGMTYRDPGADQYEEQYRSRVLANLKRRAKSLGFVLQAVPFSAEVAVS

SEQ ID NO: 239886 - protein, 384 aa, unidentified
MINSNIVFIGLDTHKEFTEVAYVEEGRNAKVIHLGRVPSSKLSIKKLVRQFQSKYPHSTLHFVYEAGPCGYWVYRLITSLGYPCYVVAPSLIPKKPGEHIKTDKRDAIKLASLLRTGDLDPIYVPEPEDEAIRDLSRARETAMKDLKDGKYQLKALLLRNNIKPTVKDNWSQKHLRWLTELVLPYPSQQIVLQEYIQTINERVKRLERLDNELIHHVKNWRYYPVVKAIQAMRGVRLLVAVGVIAELGDLTRFDHPRKLMSYLGLVPSEHSSGGHRRRGSITKCGNGRARRLLIEGAHSYRYSANISTDLQKRQEPLSKEIVDIGWEAQLRLCRRYQRLIKRGKHYNVVVTAIAREMIAYIWAIAREVVLSPIDSSKRLSRVPA

SEQ ID NO: 239887 - protein, 345 aa, unidentified
MNVSTIGLDLAKNVFQVHAIDEAGEVVVRRSLRRRQMIPYFSKLSPCLIGVEACGTSHFWARELAALGHEVRLMPPAYVKPYVRRGKTDAADAQAICEAVTRPTMRFVTIKSAEQQSVLALHRTRDLLVGQRTQLINMIRSQLAEYGVVLAKGIHHALKLVDRLVEGVVPEIPELACKIAIALAAQVRELEERIVMLEREIKAWFRGNDLARRLETIPGIGYITASALAATVTDPHQFSSGRQFSASLGLTPKADCSGGKARMGHISKMGDRYLRRLLVIGMTSQLQTAQRKPEAYPWVAGLLASGKPRKLVAVAMANKAARIAWVIMTRGEVYRAHRPTAEGAG

SEQ ID NO: 239888 - protein, 355 aa, unidentified
MNQEKYIGMDVHQATISVAVMDSSGKLIMECILETKAATILEFIAGLRGTLSLTFEEGTSAAWLHDLLKPHVSHLVVCDPRRNALLKDGSKSDRIDARKLAELLHSNKLHAVYHGEHGLRTLKELGRSYLTITKDLTRVMSRIKALYRSWAIPCSGATVYAPRHRAEWLAKILEPGVRLRAERLYQQLDLLQPVRQEARRDLLVESHKHHAVKLLRQIPSIGPIRAALLLALLQTPHRFRTKRQLWTYSGFAVETHDSGEYRFVRGKLVRNRERITVRGLNHNHNHDLKNLFKGAALSASTRPGPLCDFYVALVEKGMRPTMARLTLARKMAAITLTIWKKGVEFDAKQLNRQAA

SEQ ID NO: 239889 - protein, 321 aa, unidentified
MDQRTRQHDWIGIDVSKATLDVCVLPSGAAWQVANRAATIEALVEQLAAGEPERIVLEASGGYELLVVAALADRHLPVVVVNPRQVRDFARATGQLAKTDRIDAHVLARFGEAIRPEVRPLPDATTRALRALVSRRRQLQDMLIAEQHRLVSAAVEDAPQPLRDQLGEHIEWLRRQLADVDDELRRQLQTSPVWHAREDLLRTIPGIGPVTSAMLLSYVPELGQLDRKAIAKLVGVAPLNRDSGTLHGARRVWGGRSQVRAVLYMAALVAVRCNPTIHAFYVRLRGAGKPAKVALVACMHKLLLVCNSVIRSATAWRPTTP

SEQ ID NO: 239890 - protein, 316 aa, unidentified
MEHNIGAAGIDTGKSTLDVALAGDLSQLQVDNDAAGHRGLASWLRDNGVERVGIEASGGYERTVVSHLRKEGFTVIMFQPIQVRAYATYRQQRAKNDRIDAALIAACTAAAATIKDAPDPRLEAFAEPLTLIEQIEEDIARCKTRLEAFRDPRHRDLLKAEIKRLKAWRAAEIKRMVAELRRHDDLARRLDLIESVPGIGLRTALALLVRMPELGTLAREQAAALAGLAPFDDDSGKRHGARRIAGGRTRLRKSLYAAALPAAFQWNPALINFYQRLIRDGKPHKVALVACARKLVIFANAVVARGTPWTKNTMPT

SEQ ID NO: 239891 - protein, 376 aa, unidentified
MGTPSAQTLDDVGVREIFQELEEVPLMTMVGGLDVHRAQITFDYVDDDGLVHWGQIRAATRKTLRGWLAEHCPDGDAEFALEGCTGWRYVSEELAGAGVGVHLGDPAEIAVLRGPKKRAKTDRADARLLRTLLLQGRFPESWIAPAHVLEIRTLGRRYCTLMDERRAWQQRIHAQLFHQGCPPVRALLSVTGRAALAGAELSAVGGQYVDTALGRIDELSTEIEPLRAQLVNFARHQTGCQALPRHYGIGWLCAAIIWAEIGDARRFSSSDQLVRFAGLDVTVYSSDGKRSPGHLSRQGSPELRWAAFEAAKCAARRGSPDYGYYRKLAAKRDGHNGKNPTLAVERKILRRCHHTLRELGDAAVALPVAEPQEVAA

SEQ ID NO: 239892 - protein, 315 aa, unidentified
MANLRKSKSVVNVGVDVGKFVLDVYIHEKDIYWQDENTEEGIKRILKRLSHYQVKRLVMEATGRYEFAIAQAAYQKQIPVCIVKPLRIRRYAQSMEQLAKTDKLDAKLIAEFAAKGQPDVTPKKSKNLLAIRDLITRRRQLMNMRTQEMNRCQVMGSSLEASYKRIMREIDKEIERIEKRLAKHVEDQTEWTEKQGILKSAPGVGDTLVYTLLADLPELGAINRKEISKLVGVAPLNRDSGRMKGRRRIQGGRHAIRAVLYMATLSATQCNPVIKTFYNQLVAQGKHKKVAITACMRKFIIMLNAMVRDRCEWAY

SEQ ID NO: 239893 - protein, 316 aa, unidentified
MIIGIDVSKRTLDVAALGDAGEVEHARVRNDPQGHQELVTWLQRFQRPKVALEATNSYHQHLVQVLQEHGVSVSVLNPAQVSYFVKSNHRRNKTDKADALWLALYLKERKPQPTPPATNLRSSLARELQALTNDLSRLKNRLDAARAGRVHPKVVESLERRISQLEAERSALEAELKRETSETHQQQLDLLTSIPGVGWRTACQFLAEVGDIHRFATPRKLVAFAGLTPAQFVSGSSVVKRSRITKLGSSHLRKLLYMPALTAIRWDPVICAFFERLVARGKNRKAALVACMGKLLKIIHAVLTKLQPFQPPPQVT

SEQ ID NO: 239894 - protein, 310 aa, unidentified
MKQVTFNQVVSRGCGLDVHKKVVVATIDGEGIRKVTKEFGTFTSSLTELRDWLLEHGITHVAMESTGVYWKPVYHILEPTGMKVWIVNARHVKYVPGHKTDKKDSSWLCKLLLAGLLKPSYIPPREQRELRDLTRYRKKLIESVAANKNRINRILEDCNVKLSSVMSHTSGVVAIKLINKMIDGIQITMEDIDHVYHHKLHASKEELFEACNGYITDHHVFMLQTIRDNIDSTETDISKIDIRIKDMLSSYDNVLELLKEVPGLNTKNVEDLVAEIGLDMSVFPNEKHLCSWVGIAPGNNESAGKKKADG

SEQ ID NO: 239895 - protein, 379 aa, unidentified
MRRVCGLDVHKDSIYMCILYENGSKIESVFGVLTPELDKLRDLLVSHHVCEVALESTSIYWIPIWNILSVDFSLKLVNPYFIKQLPGRKSDVKDAEWIATVLQKGLIRGSYVPDRMIQCLRQYERRNHELSKNIVHAEQRMDMILQRCNIRISNYVSCISCKGYQKVVNAIISGESNPKVLVTLIHKRTLNKHGRQVVEDSLNGFVSDTDRDILRQYRDERMQMEQHKSENKAKMQAICEAHYCEELELLQTLPGIKEESAANIIAEIGVDMKMFLTASAIVGWAGLKPRNDQSAGRIKSRKITHGNKYLRKILVEAAWSAARTKDSRFMKMYQRLLARGKSKQKALIAVARKLLVLIWNMLSKKEAFNPEYKRRIQAA

SEQ ID NO: 239896 - protein, 418 aa, unidentified
MNSRVVAALDVHKIVLMAVIIVNGEVVERRRFLTGTAERKRLVELLLAHQVEDVVMESTAQYWKPIWLDPEEQFPPERLHLAQAYSKRARKGGKHDFKDAERLGRRLLAGELILSLVPDPEQRSWRMLSRTRVQLVEDHTRLQNQIEALLEEMRIKLSSVVSDLAGVSGLRILRAIASGATDGAKLAALGDSGLKCTREALTDALNVPVSTLHRQILKLMLDRLEMMRTQIEEIDKLLSTELKSNEPAIQRLAEVRGLGPQSAMQIVAEVGADLKTFRSAAEFASWIGTCPGSGISAELNKNDTSPKGNIFLRRLLMQAAMAAVKTKGSIFEVKFRQLLPKGYKQAAWAIAHKLSRVIWKILHEAVDYIELGPSRNLKAANDRIRRMCKELTRLGFKVQNSNAGTGDWLVSIHSRFRP

SEQ ID NO: 239897 - protein, 329 aa, unidentified
MFYLGIDVAKAKIDCCLILENSESKKKTKTFSNMPKGFEQLQTWLNHHAANSTQTIILMEATSIYHERLAKYLFDAGYQVCVTNPARARYFAQSMSKLNKTDKADSEVLARFAMTADLHFWQPLPEHIQLLNALLDRRAVLCEDLQREKNRLEKAESTFTIEPVLQSIHKSIKQLNKHIQDIDQQIDDHIDQNPDLKNDKELLSSIPAIADRTSLLMLSFLRSHNFERASQAAAFVGLVSIQRQSGSSIHGRSRLSKAGSSKIRAGLYMAAIVATRHNPHIKEMNERLLANGKTKMMAIGAAMRKLVHLCYGVLKHQQPYQENYCINSQ

SEQ ID NO: 239898 - protein, 317 aa, unidentified
MATSSYVGIDVSKTRLDVAKLGGHVWQADNTPDGIAQLVQQLADIQPELIVVEATGGYQRNVVDALFHAGLCVAVVNPARVRQFARACGLLAKTDKLDAFVLAEFGQRVQPKRYEGKNEAEKQLSALLVRRKQVEEMLKAEQNRLRTVSPALRGSVERMIAVLKEEKKRLDEQIRELMNEHKAWQEQTEILGSAPGVGPVTTATLLADLPELGKMDRKKIAALVGVAPMNYDSGKKRGYRKTKGGRGDVRSILYMSTLVATRHNPLIRTQYQHMLKRGKLKKVALTACTPALAGGTRVRKFLTILNAMVRDQQPFRR

SEQ ID NO: 239899 - protein, 436 aa, unidentified
MRGDRGQIFADLVRGIPPEQILCVSVDISKYFHVAMIHNGLGEIITSPFEVDIYQSGFDQLCQKIDAARLQVQAQVVLVGMEPTSHYFENLARHLLEHSQPVKLVNSFSVKQNREQQLMRREKTDQIDVAAIGDLLRRGEGTPYQPPSRVYLQLQQIDRVRLGKLKIETMLKNQIIGHLDRIFPGLVLIGDAAQDRYTPFFNIDFWRCQTLQALIRICPNPHQLVGMSPEQLIQLFHAQKCRMGPAMAAKIIAQAQKTLLPDPELATIRCELLQHDLALLESVQTHIALLEQRLISLLAQTPYQVWTKFKGISAVQAASLAAAIGDPAHYTEAAQVFRRSGLVSGRNDSGTHQRKGRGNPILKIGDVYLRRSLMNAVSTLLVHQPALYCYYKRLSLSKPAGVARVATARKTIGLLWAAQRDQVSNTLIHCKGAGML

SEQ ID NO: 239900 - protein, 430 aa, unidentified
MKKKNHSNEKLEAITFKTLIVGVDIAKHNQWARFVDCRGIEHDKALKFENNRNGFHAILARIYEICKKEDFNKAIVGMEPTGHYWKAFANFLMKQAKITVVLVNPYHTKKAKELDDNSQTKSDKKDALTIARLVKDGRYFETYLPHDVYAELRGLTTTRHSMNKRKKSIMNTITAVLDEYFPEFESVFRHPFKGKASIHLLKVCPIPKFVLELGEEGVLEEIKKAVKKTVGRKKAAQLIEAAKESIGVDYGEYAARFKIQQLMEELELMNSQLEALETEMAETLKKTEISEYLLSITGMGVVSLATCLGELGDPLRFEDARQMSRLAGYNLIEDSSGKNKSGTCISKRGRKNLRSVLYQISLVMVATNKEMRQLYDYLKTRENNPLKKMQALVVISKKVLTLIFTLSKKKEYYQPELVFGEYRKSQLLAA

SEQ ID NO: 239901 - protein, 338 aa, unidentified
MFIIGIDPHKGSHTAAVLDRTETVIGELRVCADRRQRDQLLRFAASFTPRTWAIESASGLGALLAQQLVAAGETVLDVPPTLSARVRLLDSGCTDKTDPHDARAAAIVALRHSRLRQVSAVDHTAVLRLLADRHHDLTGLRTQAICRLHALLCGLTPGGAGRLLSASQAGRILRGVRPLEPVEYERKRMALELLGDVRRFDNQLIATNQRIVEAVLASGTTVTDIHGVGPLGAAIILGHTGDIGRFPTSGHFARYTGTAPIAASSGPKQRHRLNPRGNRQLNRALHVAAVTQIRNDTPGRGYYQRKLDEGKSTKEALRTLKRQIAKTVYRHLVADAHH

SEQ ID NO: 239902 - protein, 366 aa, unidentified
MSKCIMLGVDVHDATLVIKVATGTEKAETRRVENTAKGRRDLWRELHSRAKRLRVARVVMAYEASCQGFGLCDEAGDQGFECHVLAPTKIERSASHRRRKTDEQDAQRILEIVRGHVLAGNALPSVWVPDHQTREDREIVRSRLDVAEKIAVLKAQVQTLLKRHGLRRTSSTGSGWTNAFEAWLRGLTGAHSALPHGARVALATLLRQKAALEEEVARLDCDVEALTETARYAEPARALMSVRGVGLLSAMVVLTEMGDLSRFANRKQIGAYLGLVPSSDETGECGERKGHITHQGSWRVRRALCQCTWSRVRTEASERAVYDRIVRKNPKHKKVAVVAAMRRLAVLLWHLGREAQARHGCFSKAA

SEQ ID NO: 239903 - protein, 343 aa, unidentified
MSEYAGKQFVGIDLHRRRSVIVRTTADGEVLETVQILNDVDRLRSVMANAGVDPEVVLEATYGWYWAVDALQDAGARVHLAHPLGVKMFEYRRVKNDVRDAKDLADLLRMGRLPEAWIAPPETRELRELVRHRAKLVGLRSHCKAEVHAVLAKCGIQISLTDLFGVSGLELLDRLDLAAPYAARVASLRRLLDDLDFEIDLFARLARGRLANDPGYRAVQEIPGIGPVLGAVFVAEVGDVTRFDTAAQLACWAGLTPKHRESDTHVHRGRITKQGSRLVRWAAVESVQILPTTSKVGQIRERIGSRRGHNIGVVAAARQQVEYVFYALRDHHVRALHHRRAVA

SEQ ID NO: 239904 - protein, 338 aa, unidentified
MSILYVGIDLAKNVFAVHGVDEHGKPALVRASVPRGKLHALMASLAPCTIGMEACSGAHHWARLFGALGHSVRLMAPKFVTPYRLSGKRGKTDAADAAAICEALQRPNMRFVPVKSLEQQATLTLHRVRQGFVEQRTALINRVRGLLSEFGIVMPLKASTVRHQAAAALEDLPGWANTAIGDCLSELHRLDERIVQYDRHVAVQARQDARACALMRLHGIGETTATAIVAMVGNGHEFACGRQFAAWLGLVPGQYSSGGKTRLGHITKAGDGYLRSLFVLGARSVLNAAKGRTDVLSGWALALQERRGYWRAVVAIAAKNARMAWAMLARGEGFVMPA

SEQ ID NO: 239905 - protein, 296 aa, unidentified
MMIIGVDYHPSFQQIAFLMEETGEYDEQRLNHEGGEAERFYRDLQQRGIRVRVGMEATGYSRWFERLLAELGYEVWIGDPAEIKAKRVRKPKTDPEDARLLLKLLLEDRFPQIWVPSPENRDLRQLLWHRHRLVQMRTRIMNQLQALAMNENKCRKGKLWSERGRAELEKLPLAFWASRRRQELLELLDRMNPAIDELTSAVEKEARKRPEALRLMTHPGVGALTALAYVLIIGTPQRFACGKQISNYVGLIPSEDSSGGKQRLGHITKQGSSLLRFLLVEAAQAAVRCNADWRRR

SEQ ID NO: 239906 - protein, 330 aa, unidentified
MGVDVSKQSVDVCVLWGDDILLEKGISNTISCIESFMESFFKKHSFTASDVLVCAEYTGKYTYPLCLACERVRVDLWLENPYVIKHSGGLERGKNDRQDAKKIARYARRYEDKVCLFVLPEQAIGSLRELVSEQELYIVDKNKYQAQLTDEKGFMNSQDYREKSARLNILLKDLKAVIKQIERKIQKIIEGDETLSRQFKLLCSIDGVGERTAVKVIVETNAFRDFTDARKFCCHAGVAPFSYTSGSSIRSRNRVSHRADKSIKSLLHMGALTAATRTKGELHEYYLKKVSEGKNKMSVLNAVRAKLVHRMFAVIRNNKFYEKDYLNTLA

SEQ ID NO: 239907 - protein, 400 aa, unidentified
MVHDGYGVYLGLDVGKEGHHAVGLGPDGKRLHDAPLPNTEARLRQLFDKLARHGTVLVVVDQPASIGALPVAVARACGHQVAYLPGLAMRRIADLHPGSAKTDARDAYVIADAARTLPHTLRRVDIGDETLAELEVLVGFDDDLAGEATRVSNRIRGLLTQIHPALERVLGPKVHHKATLELLSRCGGPVGLRKAGRRKLMSIAGPHAPRMGERLVEQVMIALDEQTVTVPGTQAAETILPRLADSLRDVLRQRDQIADQVERMLDAHPLAPVLTSMPGIGVRTAARILLEVGDGTAFATPGHLAAYAGLAPVTRRSGSSIRGEHPPRGGNKNLKRAFFLAAFASLADPVSRAYYDRKRAEGKRHNAALICLARRRCDVLYAMLRDKIPYQPRPTTPIVA

SEQ ID NO: 239908 - protein, 411 aa, unidentified
MDVLIERCAGLDVHRDTVVATVRRPGPGGTRRSETRTFATMTRQLEMLVDWLTEQKVTLVGMESTGIYWKPVYYVLEDRFPVWVINAEHLRNVPGRKTDVADSVWIAQLIEHGLVSPSFVPPRNVRLLRDVTRHGRRLTEERTRAIQRLEKVLQDAGIKLTSVASTILGKTGRAILAALLAGEEDPAVLAELAKGRLRPKIPALREALTHRFRQEHHGALIAQMLAHIDFLESAILETHQRIEVLLRPVADTVELVMTIPGVGRRVAEVLIAEVGLDMTVFPTAGHLASWAGICPGNNSSGGKHRPGRTRHGSMWLRIALTEAAHVAARGKGTYLAAHHAQIRGRRGTQKAIGATRHDILTAYYHIVRDKVPYQDLGPDWNNRRRSTEQQTRRLVRQLERLGVNVTVEPIP

SEQ ID NO: 239909 - protein, 411 aa, unidentified
MEVVHSRCAGIDVSKRDAKVCVRIQGETGRKTSSTVTTWGAMTNDILALRDHLAAAQVTVVVMEATSNYWRPFYYLLEADFEVMLVNARDVKNVPGRKTDVSDAAWLADLGVHGLLRASFVPPEPIRQLRDLTRTRTHITRERTREVQRLEKLLEDAGIKLSSVATDITGVSGRLMLHALIDSRGAADPAVMADLAKQRLRSKIPVLTEALTGRFNKHHAFLTQMLLDRIDLHTKDIQTLSERIDKLMKPFLSGRDLLESIPGFSQNLAEIFIAETGGDMNQFPTPQQLASWAGVSPGSNESAGRVKSSKTRPGNRYLKGAVGVAALNQARTTKTYFSAKYRRLASTRGPMKALVAVEHSMIIAAWHMLKSGEFYRDPGPDYYTRRDPAKAKARAVRQLEALGYKVSIQPG

SEQ ID NO: 239910 - protein, 317 aa, unidentified
MAKIICGVDVSSCSLEARIGVDGPSGCFSNHGEGIAELAEFCRQHQVELVVMEATGGYERQPLAHLWGEGVAVAIVNPCSVRRFAEGMGVLEKTDSIDAGMIAWFAEVKHVAPLAPVSAEQARLKALVLRLRQLTDMRSQQRNQRLLVQDAMVLESFGRILGMLKSEIDELAKAIAKLIAADPLWEKLDQTFRTIKGVADRTVAHLMAEMPEIGSLSNKAISKLAGLAPLARDSGKQEGKRVVRGGRRGIRRILFVVSGVVRRYDADFAAFYQRLAAAGKPKKVIRIALAHKLLVRLNAKARQVRAQLGEATVSAQT

SEQ ID NO: 239911 - protein, 414 aa, unidentified
MDIINPHCAGLDVHKKTVVACRLNRDAQGNKQRETRTFGTMTHDLLALSDWLQEGGATQVALESTGEYWKPIYNILEENFTLLLVNARHIKAVPGRKTDVKDAEWIADLLEHGLLRASFVPPPVQRGLRDLCRHRSNFIRERATLANRVQKVLEGSNIKLSSVATDVLGVSGRAMLDAIVVGQTDPTMMADLAKGRLRDKREQLEQALRGRVLTYHRFILSELLCQIDSLDETITRFNEEIEACCAPFEEAVVHLDTIPGVARATAELIVSEIGTDMSRFPSARHLAAWAGVAPGNNESAGKRLSGRLRQGNQVLRTGLVQAAHAAARTKSYFSAQYHRLAGRRGKKRAIMAVAHSILVIAFHLIQRGEDYRELGKDYFDQRRPDLAARRLTQRLNQLGYEVTLNQLEAVQPPT

SEQ ID NO: 239912 - protein, 313 aa, unidentified
MIIPLRCVGIDVSKHHLDVFDETIGASERIANVPHAITELVARWRCDAFVVFEATGVYDRELREALHQAGIRFSRINPARARDFARASGQLAKTDPIDACMLAAFARAMRPATEQVSTAARNALARLAKRRDQLVLMRAQEKNRRSEVDDCAMAERISRLIEVLDHEIAGIEAEISVLIKAEPELSEDAQLMRSLPGVGPVTCTQLITQMPELGHVGPKQAAALAGLAPFNVDSGAHRGKRKISGGRKRVRDALYMAALNAVRRAHPFKAFYAKLRQAGKPAKIALIAVARKLLTILNAMLRDRKEYTITQAT

SEQ ID NO: 239913 - protein, 377 aa, unidentified
MEKDSRFVGLDVHAETIAVAVAEPGGEVHSLGTIPNTPQAVRRLVNKLGPPETLRICYEAGPTGYVLYRQLTALGAPCAVIAPTLVPVKAGDRVKTDRRDAEKLARSYRSGDLTPVWVPDPDHEALRDLVRAREAAKKDQLRARHRLGKFLLRQGRRAPTGSKAWGVKHRAWLQTIRFAHAAQDATLLDYRTEIDHAADRIARLERAIATAADLTPAPVRAVIAGLQALRGIAKLSAVSVVTEVGALSRFAKPRQLMGYSGAVTSEHSSGPHHRRGGITKTGNAHLRRIVIEAAWAYRHRPAIGGTLRTRQEGLSEEVKALAWKAQHRLHGRYARLLAKGKAPTQVVTAIARELLGFIWAIGVHIERHTAGGAPAAA

SEQ ID NO: 239914 - protein, 361 aa, unidentified
MFTIGLDVHQSRTSLCVLDDKGNLVKQQEVKGDYAAVAQELGKIKKPFQVCYEASTGYGALYDRVAPLAQRVQVAHPGQLAVIFKSKKKSNKADAKKLAMLMHLNQVPAVHVPGQDVRSWRGLIEHRRHMVGQATAAKNQIRALMRHCGIKGLKGRSQWSGRGIKWLGEIGEGGGWPTKIEQMRLEIMIESLLSLQKRIDRVTVALDEIQERHPGVVLVRTIPYVGPRTAEAFVAYVDDPHRFTSTTIGSYFGLVPREDSTGDHRRLGHITCDGPPSVRQYLTEVAWRGTSHNQQFKEVYERFLRGDPLRKKIAMVAVGHWLCRVMLAMLKTGEVFRTSPDENDTKGLPPSDESMLARIKM

SEQ ID NO: 239915 - protein, 359 aa, unidentified
MFKDSTTYIGVDLGDKQSHVVILDSNGEMVEEARLPTTRSSFQRKFSSLPGCRVAMEVGTHSRWASHLLENLGHDVLVANARKLRAIYSNPRKGDRADAETLARLGRLDPELLSPIHHRSPQAQADLAVLRSRDAVVRSRSLLINHARSIVKSCGARLPSCSADSFAHKVAPDIPESLRPALAPILDTIACLTQQIRAYDRKIEELCSECYPETKQLRRINGVGPLTALAFVLTLENPDRFRKSREVGPALGLVPRTDQSGDRDPQLRITKTGDSYLRRLLVGSAQYILGPFGPDCDLRRWGLRLAERGGKNAKKRAVVGVARKLAILLHHIWKNGEIYDPFYQSDTNALEPLPASKAA

SEQ ID NO: 239916 - protein, 306 aa, unidentified
MKLNRVGIDLAKNVFQVHGVDGRGELVWKRRLKRATWLKVFVETVESGCEVGMEACSGAHYWARELQSRGYAVKLIPPQFVKPFVKSQKDDAKDAEAICEAVGRPGMRYVAVKTIEQQDIQAVHRVRSELMSHRNAKANQIRGLMAEYGLVAPKQLGPLRAAIPCWLEDGENGLTDRFRALLHGLWGDLDSLDQRIKVLDAEIEAIATTHPDAKRLQQLRGVGPLIATALVARFGDASHFNRGRQAAASVGLTPRHHGTGGKNRLLSITKRGDRYLRSILIHGARAVVSQAKRRDDRLSRWTTELA

SEQ ID NO: 239917 - protein, 393 aa, unidentified
MFYVGLDIAAEKHDCCIMTEERQVLKQFVFRNDAEGFEFLKKTLTKLAPTEEIKIGLENTGVYGSNLVQFLRRNGYKTYTFNPLLINKSIQATTLRKTKTDKADAKFLAQYLTWDNSQPDHDVSYHISELKSLSRLRFSLVQQRSKCKTQAKGVLAQVFPELTQVFSDVFGTTARTILSLCPSAQRIAAYPVPQLADLLRTTSRGQLGLEKAELLHALAVHSVGNSSIALELQLQIYLEQITQLSFHICRCEAALRTILAQMDSPITTIPGIGTVLGATILGENGDIFRFSSPAKLLSFAGLEPSITCSGKSVSAPGRMVKHGSHYLRWAFGQAARCIILRDQTFAAYASKKRAEGKHFNVVCSHVAKKLVRLVFALLKNHSSFIPNYSSLAA

SEQ ID NO: 239918 - protein, 354 aa, unidentified
MSNKSNATIATMGIDIGKNSFHIVGLDQRGAIVLRQKWSRGQVEARLANMPPCLIGMEACVGAYHLSRKLQSLGHDARLMPARYVRAYLKGQKNDFRDGEAIAEAVQRPTMKFVATKTAEQLDLQALHRVRARLVGQRTGIVNQIRAFLLDRGVAVRKGPRFLRTELARILATRCDVLSPRMVHVIEELAGDWHRLDERIKSVSSEIEALADQDPACERLMTVPGIGPIISSATVAAIGNGAAFSKGRDFGAWLGLVPRQISTGDRTILGKISKQGNRYLRVLFVQAARVVLLKPNSWERYGLKSWIEAAKKRLHHNVLAIALANKLARIAWAVLNKERKFECVRTSAMAPRSA

SEQ ID NO: 239919 - protein, 343 aa, unidentified
MLSNNIIAIDLAKNVLQVCHISVHGEMLSNKPLSRQKTKEFLAKAKSSIVAMEGCCGCHYWGQLAEQFGHEVRIINPKKVKGYLEGHKTDHNDALAIANAAIQIGIKYSRPKSLEQQSMHSLETSRRFLSRSVVSLALHIRGTILGYGIANSRGEKGLKASVQTVLDGETSIPTNVVSVLSMLWEQYKELKAKLIAFEKEKNALTRQIEPCQRLMEIEGVGETTAAMLYTTLGDGKQFKNGRQASAFVGLTPKQHSSGGKVFMIGIDKCGGVKELRSLLYLGAMSYVGRLPEKPKTQKDAWLRSIIDRIGFKKACIALANKVVRTAWAMLRYETEYKPVLLTD

SEQ ID NO: 239920 - protein, 392 aa, unidentified
MRFAGIDVGGERHMVAMVGEDGKVLCRSSPFSEDASGYAQLFELLGPPEGCLLALEATGHYWRNLFVALLGKGYAVAVLNPLRTRRFAEEELQRTKTDAIDALGIARFAAQKRPPAAQLPDVATEELRELSRLRDRLQEDFASRLRQLHRAVDLGFPEFTRHVHTLESQLAATILSRYPTAASFDGASVKKLARIVYDGSHKIGEELARALIEAAAKSVGSFHSEPYRLRIKYLCEDLDVLRRRLKDLARDIERRLDNHEVGKLIMTIDGIGPLTAATLIAELGDPARFRSAGAIASYVGVAPRLRQSGKKRFSGSPTIPFGNARLRKALWMVVLNAVRCNPWLRQYYERLRAARKPGKVAVIAAMRKLLAAVWSVATHRRAFVPRLPFQVA

SEQ ID NO: 239921 - protein, 325 aa, unidentified
MIGEASTPTTKAGIAKVFGAMARCRVALEAGGHSPWVSRQLQEFGHEVIVANPRNVRLIGESTRKDDRLDARTLARLARIDPMLLSPVRHRGADAQADLAVIRARRALVRARTMLINAARGLTKSFGERLRKCGAGQAGPTLAAELSPEIRAAVLPLLAEVEVLNQRIAAYDRQIEQLAKEHYPEVARLKQVKGVGTLIALTFVLTVDDPNRFPRSREVGCYMGLRPGRRNSGKSEPQLHISKEGDRYMRTLLVQGAHYILGPFGPDCDLRRWGLKMAERGGKNAKKRALVAVARKLAVLLHKLWVSGEAYDPLRNSHQLVTRAA

SEQ ID NO: 239922 - protein, 422 aa, unidentified
MKEIETRKCKIINEKTLLVTVDMGKAMHTGYCRCPDDTETKVFEFFNTGQGFHKFWGHITQVMSAKNLEEMVVGFESTGSYAEPLLHYLMKRRVKLVQVNPMHTKRLKELQGNSPNKTDQKDPKVIADIIELGHALTVIIPEGATAELRRLTQARERAIQRRTAIFNQLHDLVFILFPEFLQVMNTVKTVSSQYLLKHYPTPQDIIHHGLDALTDTLRRTSRGKLDEERARSLYEAARESAGIKEGQTSILIEIREILAIIESSERFIAEIEKEMSCRLDEIPYKNSLLSLKGIGEIIAAGLIGEVGDFTKFKTISEITKLAGLDLFEVSSGKHKGQRHISKRGRPLMRKLLFFAAINVVRKGGIMHEQYQKYINRGMPRMKALVAIARKLLCVIFALVRDHREYISNFRKGQNTVPVKEAA

SEQ ID NO: 239923 - protein, 393 aa, unidentified
MICVGIDVAKDKHDCFILSSDGEVLADVFTIPNNAEGFGQLLQTIRRCTSPQSKIKVGLEATGHYCYNILGFLLDKGMPTYIINPLHTNLYRKSLSLRKTKTDRVDARTIATMLMSDVDLKSYTDTAYHNEELKSLTRYRFDKVRERAKLKQSVSRLVTILFPELEKLVPSLHIASVYALLSEFLGAKQIAGAHLTRLKSLLEDASKGRYGRDMATILRDAARCCVGSVMPAKSLELQHTIRLIRELDAEIDDIETAIQDMMEKIQSPITTIPGIGVRMGAMILAEIGDFSRFDSPDKILAYAGMSPSTYQSGQLSLSGTYSHMEKRGSRYLRYALYNATKYVCLWDPTFAAYLAKKRAEGKHYNVALSHAAKKLVRLIFAMEKSRQPYNAAV

SEQ ID NO: 239924 - protein, 342 aa, unidentified
MIASTIGLDLAKHNFHVHAVDAAGLVIKTAALRRSEMIKFFQSAKPCLVGMEACATAHYWARELTKLGHDVKLIPPPYVKPFVRRGAKNDAADAAAICEAVRRPDMRFVPIKSEANQGFLMLHRARGLLVRQRTMAVCAIRAHLAEFGIIFGQGRQRIETIMPSIEEVAASLPEHARFALNSLMRTVGELNTQIEGIETKLAEVGRSDPVSNLLSSIPGVGPITSTAIAATVPNARMFRSGREFAAWLGLTPRQNSSGGTTRLGGITKQGDAYLRHLLVIGARNIVRYPKARAKVGGAWIDALLQRRRPMIVAVAVANKLARIIWAMMTNGEMFREAHVKAA

SEQ ID NO: 239925 - protein, 321 aa, unidentified
MEREKEQITFEQVFDRGCGLDVHMKVLVATIRGKGLKEETRTFSSFTESIEELRDWLKTNQITHIAMESTGVYWKPVFNILEEDFEIILVNASHLKNIPGDKTDKKDSKRIAKLLLAGLLKGSFIPCKSVRELRDLTRYKRKVIGQIASEKNRIHKFLEDANIKLSSVVSDLSGVVATKIIDDMIGGQEDVKELVKLRHGKMKATVEELAAALTGKLTDHHRFLLRMVKRSIGDKESLIEELDKEIDRLLIENEMVLDSELLSTIPGVDKDSAASILAEIGNKMEQFPNEQHLASWAGLSPGNNESAGKKKVPESPMATIG

SEQ ID NO: 239926 - protein, 325 aa, unidentified
MNKFSHYYGIDISKDVFDIMDEQGAHYQYQNDLSGFKRFCKQLKENSCCVMEATGVYQVQLADYLFEKHVFVSVVNPLVIKRFIQMNLRRIKTDKADAEMISKYAQMNRLQGYKPAPVYVRESRIIVENIDLLIKSRTMFKNRMHAMTHKASKHRLVLINPIKRAIKDLTIQIQKLEDELKRLIESSEPDLFSRLQSIPGIGKSTAMFMIVISDGFKKFESAKQFTCYIGLSPVEKQSGTSVKGSSRISKQGNGKLRNLLFLCSFNACKSNKACEALYQRIVAKGKSKKLALIAVANKLLKQAFAIAKSGLVYDAEYRSIKPSLN

SEQ ID NO: 239927 - protein, 332 aa, unidentified
MKHYTYFLGVDISKKTMDVALQKLGETGSIHRKFANNDEGMEELLPWLKASAVDLSETLFCMETTGLYCFPLTQFLTEQGIDIWIEHAAQIKKSNALSRGKNDKTDAQRIAAYAAKNLDRLRLWKPLPATLEKIKHLARLRERLVETKKKLLTPIHEFEDVGNSEMAALLTKSIHASLTAIDKDLLKVEAKIISIVDGDENLKKLYKVITSVVGIGFVTAINLLIYTQGFTVMNDARKLACYSGVAPFEYSSGSSIRGRTKVHFMANRQLKCNLHMASLAAVKFDMGLKAYYERKVAEGKNKMSVLNAVRNKLLARVVACVNNNRLYVDNFA

SEQ ID NO: 239928 - protein, 367 aa, unidentified
MSSVASQAGLIHLGMDTSKNAIVVATLLPGEQSPVTDRIANEEAAVRRLVGRFADRSVLRAWYEAGPGGYELCRLLASMGVACQVVAPSLIPKGSSDKVKTDKRDSRRLARLGRAGELTPVRVPAPAEEAVRDLVRAREAMLADRKRAQQRLTAVLMRHGRIWRGATYWTAAHRSWIAAQRYGEPALAAAVGYYRATLAVREAELAAVEAELLPWAGREPLAGPVARLGCYRGIAELGALTLAAEVVDWRRFPAARAFMGYTGLVPAEYSSGERTRRGHITKAGSEPVRTALTEAAWAYRFQPAIGAGLRRRQHGAGPDTLARSWKAQRRLHDRYVHLTRDGGKAAPEAAVAVARELAGFIWAEMTA

SEQ ID NO: 239929 - protein, 344 aa, unidentified
MPSIVGGFDIHRKQLTFDYLGTVAGEVRRGQITPADRGHLRSWLAQLENPQDAAFAAEACTGWRYVTEELARAGVQAHLAEPADTAAARGRKKRAKTDRADARLLRDLLAEGRLPECWIPPEHIVECRALLECYHDLRAEHTAWVQRIHAPLFHQGAPPFQGLRQADGPGQLTALAREHLSPAGQAQIAVCLRVLAALEAELTAMRHRLLAAAAHLRGAKALTGAIYGVGPITGLALTCWLGGAGRFSSARKAVRFAGLDITVYSSDGKRSPGHLSRQGPPVLRWCAYEAGKVSAHATAPDHPYYAAVKDRAGGKRAALAEARKIIRRACHILTELGDDAFTTG

SEQ ID NO: 239930 - protein, 421 aa, unidentified
MQEKEFEVSHSDQEWRRLLTPEQYNFPACPMLAIWPLSGVTRTSASVDQSRFMMGWTPRTASMCQSGVFEQHLREASVSGVITVGLDIAKHVFHAHGVDDQGRALFSKRISRGKLLDFFAAQPSCTVALEACGGAHHWARQLTQLGHEVRLIPPAYVKPFVKRQKNDAIDAEAICEAAQRPNMRFVAMKSEQQQAAGLVFRTRDLLVRQRTQLINAVRGHLTEYGWIAPKGPSHVAELAHLIEEKRMAGSLPEAARAMFRLMLDQLASLNGRIAVLDKEIARRAREDEVSRRLMTIPGIGPISATAIAALAPPVETFAKGRDFAAWLGLTPVQRSTGGKQKLGATSKMGERTLRRLLIIGSSAVVQQASKRGAAKGSWLEQMLARKPRMLVTVALANKMARIVWALLVKREVYRAPVAANA

SEQ ID NO: 239931 - protein, 384 aa, unidentified
MSADHRPEQTAIRTDLGAIFVSLGLSRATWLITSLSPGREKMSKHQVRGGDTAGLLARLAELQAKAHARTGQHFPLIVIQEAGLDGFWIHRVLQSEGIESHVVDPASIATSRRRRRAKTDKIDGEALLRALLAYKRGEPRVCAMVKAPTSREEDDRRISRERKVLTTERVAHVNRIKGLLFAQGISDYEPMHRDRRARLHDLTTGDGRPLPQHLKAQVSRELDRLELLLEQLKAVEAERDALLTATEAPAKPGSAELLLDLKGIGPEFASVLWSEGLYRNFANRRQVAAYAGLAPTPWQSGTVDHEQGVSKAGNPRLRTTMIQLAWLWLRHQPDSALSRWFHERVERRGGLRKTMIVALARKLLVALWRYVTAGVVIQGATMKV

SEQ ID NO: 239932 - protein, 360 aa, unidentified
MEQIKSIKEDCLLEAPLIFVGIDVSKAQLDVAIRPSAQSLSVTNDRAGIKSLIKHLKKLRPQLVVLEATGGLERQVLSALIAGEIPVVMANPRHIRDFAKSIGQLAKTDRIDASVIAHYAEAVRPKPRPLPDEASLELRALSARRRQVLDMIVAEKNRLATASKVVKKRITAHIAYLEQELNDADQDLDRFIEKNAAWKENQQILCSTPSIGPVSSRTLLVELPELGALDRKKISALVGVAPFPRDSGTLKGRRTIWGGRASVRSALFMATVVATRFNPVIRDFYKRLKAKGKPSKVCLVACMHKLLTILNAMIKNKIRWSENLLTRPLDMKHSCYISGLRLRLARSCTGEFIPSADCGF

SEQ ID NO: 239933 - protein, 387 aa, unidentified
MYFVGIDISKFKHDCAIIDELGDVITPSWSFQNDREGFSLLRELLDALEGEKKIGLESTGHYGQNLKLFLENNGFSFMEFNPLLVNRFVRSKSLRKTKTDSIDALMIAQYLMTVEYKPYPPSFYTLEKLKSLTRFRDSLIRQRSKQLVELTNVLDKVFPEFKPFFKGKFSVTALYILSHYTSPEKISNMNSKSYESLRRLSRGKFSMVDFVELKTLARNTVGSTRDYLLQEMEIIIDIYNQLQSKVEEVEQQINDCVLVLDPPMLTIPGIGVSSAAVILSEFGDLSKFDSPSKLLSFAGLEPGYFQSGISESVGKMVKHGSSHLRYAIMNCAQTVINNEPTFAAYYAKKRAEGKEHRVALTHVAKKLLRVVYALQTKELPYNPDLIR

SEQ ID NO: 239934 - protein, 347 aa, unidentified
MDKVSVIGMDMGDKTHKAVGLTEDGQIADRTEVPATPAGVSAYLERHPGALLAIETGTHCRWVSQLGASLGHQTLVGNARKLRVIWKSSRKNDWNDAEMLARVARADRKLFSPVRLRGDDDHALMRLVKARDLLVRNRTGIVNELRGFCKADGARLPKCSPEAFARMEYEVPESVRKVAKPMFAVLKELARKIGVYDKMIAEGTRKLYKEELELLEPIGGVGPVTTAAFLAAVGDPAAFASARDAGPYFGLAPKQDQSGQTDRQTRISKEGNAVVRRLLVIASNYIMGPFGKDCDLRRHGLKIAERGGKNARRRAKVAVARKLAVLMLAILKNRTAYNPLNGAEVAA

SEQ ID NO: 239935 - protein, 367 aa, unidentified
MKKVSTAAAKQSRNFSQQKLTIGLDLGDRSSWYCVLDEAGNVLGEHRVSTTAKAMREVFSAMPHSRIALETGMHSPWVSRLLSELGHEVIVAHARNVRLIGESRRKDDRLDARTLARLARIDPQLLCPVRHRSAKAQADLTVIRARAGLVRARTALVNTARGLAKSYGERLRGCNVRNMNPDKAEGLSPELQAALKPLLAAIESLSKHIREYNERIEALAQQSYPEVALLKQVKGVGTLIALTFLLTLEDAHRFRTSRDVGCYLGLQPGRRNSGQSEPQMHISKEGDPYLRTLLVQGAQHILGPFGPDCDLRRWGLKLAERGGRNGKKRAIIATARKLAVLLHRLWVSGEVYEPLRNSSCLMTPAAA

SEQ ID NO: 239936 - protein, 346 aa, unidentified
MNFYTTEHRYYCGVDLHARSMYLCIIDAKGTILLHKNLKTEPAAFLAAIEPYRDGLVVAVECMFTWYWLSDLCSREKIPFVLGHALYMKAIHGGKAKNDRIDANKLAVLMRGGMFPRAYVYPPKMRSTRDLLRRRMFLTRKRAALITHIKCTFAQYNLPEPEQNVSRVSQREGVAEQLPDPGARRNVQLDLDLLDFYDQTLTKLEQELTVIAKDHDPNSYFRLRSVPGIGKILSLVILYEIHDINRFPSVQDFASYCRLVKPAKESGGKRLGSGGAKIGNVHLKWAFSEAAVLFLRKNEAAKIYRAKLVKRHGKAKSLTILAHKIARAVFFILKRRTVFEAETFFA

SEQ ID NO: 239937 - protein, 356 aa, unidentified
MKGIAGKTGITIGLDVSDRFTEAYAIDANGEFVASWRIPTKAAAFREQLSRYPGARVVLEVGCHSPWISRQLRGDGFEVVVANPRRVRLIAESDSKCDRLDAEHLARLGRIDPGLLAPIVHRSEQAQRDRMLLLAREGLVRSRTVLINQARGFAKSLGTRLPSSSSEAFAKRVRDGVGENLFPGLAAILRTVEQLTREIHSIDRQIERLCEDRYPMTEQLRQPSGVGALTALAYVLTLEDPHRFAKSRDVGAFLGLRPRQRDSGDRHPQLRITKAGDQLMRRLLVGAAHYILGPFGPDTDLRRFGLRLAERGGKAAKKRASVAVARKLAVLLHRLWVTGEMYQAIGYGFTEGEQAA

SEQ ID NO: 239938 - protein, 405 aa, unidentified
MAVMIGVDPHKASHTAAAIGPAEEPLGQVRIRASESQVQQLVAWAAAWPERTWAVEGATGLGGLLARQLVAAGERVLDVQPKLAARVRLLEAGNTNKNDANDARSVAVAALRSAARREVVADGHAAVLKVWSKRYRDLGRARTQAACRLHALLADLVPGGFAGEITAGQAAGLLARITPADPAARARCELAAEFLADLRYLDTQIRGTRDRITAAVRASSTTLTEIFGVGPVIAAAIVGAVGEVSRFADRNRFAAYNGTAPVEVSSGGRKIHRLSLRGNRRLNHAIHMAAITQIRYQHSPGRAYFDRKIAEGKTGKEALRALKRQLSDAIYARLVADAARRGATTQAEGPGGQSGNGSVSSAAGSHPGRRLFGQATPGPQPSLRPTAPGRPRTPATASANSLRTT

SEQ ID NO: 239939 - protein, 352 aa, unidentified
MQAISVGCDAHKHYSQLELQDASGQVLNRVRIDHSPGAVSSFFSRLPGGTPVALESVGNWYWIADEIEAAGCLPLLTNPAKAKLMMGHVNKTDKLDANGLATLLRIGSLPTVWLPPAALRDQRELPRTRMALTALRTSIKNRIHSLLAKYNLSPEDGSQLFSKKGRSWLESSLSRLPPETGRCLAQQLELLDSLSLQIDTLEQRIHNLIALTPTMQLLKSLPGVGDMLAIVIEREVGTISRFPSAPQFSSYCGTTPRVSSSGGKTRYGKLRTESNQYLKWAFIEAANAISAHHAQRGWTARHVSKLYLRIRSRKGSSVAIGAVARHLAESTFWVLTKNEPYRESSKVSPRQG

SEQ ID NO: 239940 - protein, 278 aa, unidentified
MTHNITFVGIDVGKFEFCVFCEGADSTFSLPNDAVGHRKLIKHLGRSDGKIIALEPTGGCEWALWETLEKNGFDVRQVSAAHVRNFAKSLGNLAKTDPLDARMITRFIAFRPEAGRRLPAEILRKLNALVTKRRQLVEMKKRLSCQIKQRGSSELDSLDKAHMALLTGQLATLEEYIEQLLQSDTALKQRSQILRSIPGFGPVISAVLIGQMPELGALGEKQIAALAGLAPINNDSGKYAGKRSIKGGRTWLRQLLYQAALVASNHNPVLKSFAQRLR

SEQ ID NO: 239941 - protein, 398 aa, unidentified
MNAVGIDVSKGKSMVAALRPMGEVALLPKEYPHSEVGLEQMAYAIIALGEDTRVVMEATGRYHEPVAAALHEYGIYVAVLNPLLIQRSGGGSIRKVKTDKADAMKIAKYGLDNWVDLREYTPMDTVRQQLKLCSRQYNLYMKTVVSLQNNLISLTDKTFPGVNELFSSPERADGHQKWVDFVLSFWHCECVCHISEKAFMERYRKWCKRKGYNFSEEKALSLYTDSCGNITTLPKNDNTKLLITTAAQQLISAKTTLVAMRTEMLRLAKLLPEYDTVLAMYGVGEITAAQLMAEIGDVRRYPRRSSLVAFAGVDPAVNQSGKHEAQSNHTTKRGSPHLRKTLYQIVCTHLKKSPTDEPVYQFIDKKRSEGKPYFVYMTAGANKFLRCLLYTSPSPRDA

SEQ ID NO: 239942 - protein, 318 aa, unidentified
MDAKFETFVGVDIAKDSLDVCFLAADKRFTTTNDQAGFQQLLQELPTVGSCLIVAEATGGYQREMVAELIAAGHQVAVVNPRQVRDFARGLGILAKTDRLDAEVIARFGQQAKPRPTEKMPEKQDELQQLVVRRRQLIDLRTAENNRLPLARSKSVIKSIRSMVEQLQKKIRQIEKEITDLVESDDQLQCQATLMKSVPGVGAVTAAALLAELPELGRLNRQEIAALAGLAPFNRDSGKFHGRRSIWGGRRAVRKALYMAALTARRCNPVIRALSQRLEAAGKPFKVVLTACMRKLLVILNTIVKNNSVWNNKLQISN

SEQ ID NO: 239943 - protein, 572 aa, unidentified
MSRPSLLLRDAALGYASRGIPVLPLHYPLPHRSDLQALAGGRPLGPAAGSGCSCRDPGCSQVGKHPLGVLVPHGVKDATCNRARVLAWWTQHPQANIGLATGNRFDVLDVDGPEGAHAIQAFAAEHGLESSGPLVRTGGGGWHYCEGEQGRCAKRRSRPGLTLGITGVLPSDRSVDQLPRTPPGAPSVDGVTSEEPGLGPRRSTVRRLAVGALPANRRAGKDDMASLPAVVRQVTVGVDSHKDVHVAAAVDQVGRVLGTTWIPTTTQGSAQLLRWATRLGQVQRFGIEGTGSFAAGLSRWLQQQGYQVVEVNRPNRQTRRRRGKSDPVDAEAAARAVLAGEATTTPKAANGTVEMLRVLRVARRSAIKARGQAANQLHSLLVTAPDPLRHQLGALPLARLVQVAAAVRPGPLTDPLAATKFTLRELARRYQFLTAELDRLDAQLAALAPKAAPRLLTRRGVGAQVAGALLVVAGDNPGRLRSEAAFSMLCGSSPLEASSGKTVRHRLNRGGDREANNALWTIAMTRLSCDERTQRYLARRTAEGKSKREIIRCLKRYIAREIYQDMTATVGS

SEQ ID NO: 239944 - protein, 353 aa, unidentified
MYVGADTHKANHVLVAIDAHGRTVGTRTVPNTPEGWATALAWARQQQQQIQWGVENSGSLGKGFAQFLLAQGAGDVREVVPHRTAQYRRRGRTQDKTDTADALAMARLLRAEAEALPQVHADDCSTELRLLSDHRDNLVVDRTRLINQLHAQMLQLDPRYEEQSGPLTQAAGVRYCQGFAPPQADNLVQARLLIVRQLAARITALMTEIKELTARLEQRVAALGTPLRALRGVGPVVAARLLGELGSTPRVHSAAALAALAGIAPIAVSSGGRHGHRVNCGGNRQLNRAIHVIALTQRCCEPLARAYYDKKRAEGKTARAAMRCLKRRLVDVLFRLLLPLPAVSPAPLLPIAA

SEQ ID NO: 239945 - protein, 311 aa, unidentified
MEHSLFVGIDVAKERLDVHLRPTGETFSIGHDEAGLVALTERLVPCAPAIVVLEATGGYEVTVAAALASARLPIAVVNPRQIRDFARATGQLAKTDALDARVIALFAEAVRPGARPLPDAQAQVLGEFVARRRQLVDMLGAETNRRRLVRDPQLQRRIATHIRWLERALRDLETDLHDTIRSSPVWREAEDLLRSVPGIGPVTAFTLIADLPELGRLTRRKIAALVGVAPFNRDSGTLRGRRMVTGGRAPVRRVLYMATITAIRRNPPIASFYQRLRAAGRLAKVALTAAMRKLLSILNAILRDHRSWQSA

SEQ ID NO: 239946 - protein, 390 aa, unidentified
MIFVGIDVAKDKHDCCILSAEGEKLAQFTFANDRAGFECLLVAIAAHEELENAKIGLESTGHYSTNIQNYLLQKRLCVKVFNPLQVSLVRKAETLRKTKTDRSDSAFLAQLLLSDGKLKSYSQPVLAVSELRMLTRSRFRLVGMRSKYKQSISRLITVLFPELPQAVWSVNQKSTYALLLEFPTTQDIANAHLTRLSNLLVANSHGKYGREKAIEIRKLARNSIGLSSRAAGFELQQTIRLVQNLQEEIDLLDKEIRGIMRKIQSPVLSIPGIGFVLGAMILSEIGNVENFENPAKLLAFAGLEPSTYQSGNYNANKTPMVKRGSKYLRWALLQAARLVAYRDETFGAYNAKKRAEGKHHFVALNHTAKKLVRVMFHLLKTGQNFQPQFG

SEQ ID NO: 239947 - protein, 392 aa, unidentified
MSTFVGIDVAKEVHWVCAIDMQGQVLLNRRLLNTPEDLNRLVAELRALPAPMRIGIDVLGGIAALAQAVLLDAGFELVHVPGLAVNRARQGTTGGEAKSDPRDAHVIADQVRTRCDLRSVSTESELDIELRLLVSRRRDLSEDQTRRLARMHDLLVGIFPELEHVLDMTSKTALVLLSGFVTPAELRSADEQTLRTHLGTLANRSYTRQLIEHARACAQRQTIAVPGETLTARLIKELAREALHVIDQLAALDRDIELRLVRHPDAALIRSLPGMGALLTAEFIAQAGCIARFKSADALAAAAGLAPILKQSGKSRWLQRPLRGNKRLKRVFYQSAFASLRNRDSRAFYTRKRQEGKRHHQAVIALARRRVNVLWAMLTNRQLFVSRAPMNA

SEQ ID NO: 239948 - protein, 372 aa, unidentified
MDESSKPLYVGLDVQKDSLAVAYAPDDRGAEVVSLGAIGTRQCDIDKLIRTLQSKGATPLVFVYEAGPCGYWLYRYLTGKRLACHVVAPSLIPRKAGDRVKTDRRDAITLARLMRSGDLSSIYVPGIEDEALRDLSRGRDDAMQDLKRSKRRLKSFLLRQDIRYEGRAAWNPAHLRWLSEVVCPTPPQQIVFQEYLRAVSEQHERVQRVEHELHEAVQGWRLYPVVKALQALRGVELTGAVILMTELGDLTRFENPRQLMSYLGLTPSEYSSGARRLQGGITKAGNSHARRALVEGAWAYRYPAKVSRHLQLRLETLPTEVQAISWKAQVRLCKRYRQLTARGKHVNQVVVAIAREMAAFAWAIARIVPLAA

SEQ ID NO: 239949 - protein, 412 aa, unidentified
MLFVGDDWAEDHHDIEIVDEKGRRVARRRLPEGLDGVSRLHALIAAAMPAEWAELEEGEAAARVKVGIETERGPWVAALVAAGYEVFAINPMSTARYRERHSTSGAKSDAGDAHVLAEIVRLDRAHHRPVAVDTDNGEAMKLVTRGHQTMIWERTRHVLRLRSALREYFPAALTAFGDLDEPDTLALLAAAPDPDLAARLPKARIAAALKRANRRHIDTRAAEIQAVLRAPALRQPAPVQQAFAVIAAGEVRLIAALNIEVDALGEVVAQHFGRHPDAEIYASQPGLGVILGARVLAEFGDDPHRYADARARKNYAGTSPITRASGTKKIVIARYAKNDRLADALQQWAFGSMRGSSGARAYYDAMRARKIGHQAALRQLANRHVGILHGCLKTRNLYNETTAWRHHNDAAD

SEQ ID NO: 239950 - protein, 407 aa, unidentified
MQVFLGIDWSHTHHDACFLNERGQVLSRLTVPHATDGLAQLDQAREQLGVARAECQVGLETAHTLLIDFLWDQGYPHVFVIPPGAIKGARRRYRQTNAHTDQSDAWVIADVLRTDPQTLHPWCPDGLIVRQLRAKVGLLHFLTKEIRRVSNRLGAVLARYYPAALHVFHDPASPIALLFLQAFPTPEVVRGLTRQAFGQFARAHRYRQSDLALSAAYARLQAAYPTASATTVAAYCEEAVWLAQHLLAAIEHKKREIARLQELFEQHPDRALFAALPGTGDFLAPALLAKFGDDRERFPQPGSLQCLAGTCPVTEQSGKGRRVRFRQACDHEFRQIAQQWAKASISQSSWAATYWHTVRQHSRSNSHAYRCLANRWLAIAWKCWQSRQPYDEAVHLQNRARRLATRA

SEQ ID NO: 239951 - protein, 443 aa, unidentified
MPVVADRSAAPAAIRTDLGAIFVSLELSKSTWLITSLSPGSGEKMSNHAVRGGDITGLLARFARLQDKAQARTGRHFALVVIQEAGLDGFWIHRILEAEGIESHVVDAASIATSRRRRRAKTDKIDGEALVRALLGYKRGEPRVCAMVRVPSVKEEDHRRIGRERKALVGERTCHVNRIKGLLFAQGITGYEPLGRDRRHRLEELRTGDGRALPEHLKGQIRRELDRLELVIAQIKEVQAERDALLAIEVAETPAATLLDLKGIDPDCAAILYSEGLFRHFDNRRQVAAYAGLAPTPWQSGLVQREQGVSKAGNPRLRTTMIKLAWLWLRNQPSSALTRTRDAQPRAPQKDNHRRPCKEAARGAVEIRDRGRRHRRCCHEGRLTRSHRYTHPSRPDQPRRIQEANRDPSWLECRIKDGSRLLGPCRRKRDIGAAVSSGDRMWV

SEQ ID NO: 239952 - protein, 320 aa, unidentified
MTSTKYIGMDVHKESISIAVRNDAGKIVMECVVETKASMILQFIEGLRGDVHVTLEEGTWAAWLYDLLKPHVTKVVVCDPRRNALLQEGNQNDRVDARKLAELLHNNQLRSVYHGDHGLRTLKELVRSYLTITQDLSRVMTRVKAIYRSWAILCTGKQVYASRHRAEWLAKISEPGVRRRAEFYYQQLDALRCLRQEVRRDLLAESKKHKAWKLLCQIPSIGPIRAAALLGILQTPHRFRTKRQLWTYGGVGIETSSSADHHLVKGQLERNKKQVEIRGLNRNYNHDLKNLFKGAAVVAATKPGPFAEFYAELLARGMRP

SEQ ID NO: 239953 - protein, 421 aa, unidentified
MEVLYRRCCGLDVHKETVVACLRIVSGGEIVREVRTFETTTASLIALSEWLAENGCTHVAMEATGVYWKPVWHILADGEFQLILANASHVKNVPGRKTDVKDATWLADLLAHGLIRASFVPDTQTQELRNLLRTRKQLVREKARHVLRVQKTLEDANIKLDSVITEVMGMSGRAMIEALIAGESDPAKLASLANYRLKTSQEKLREALRGRVTKHHRFLLRLHLNQIDALDAAIATIDRQVEAGIAPFRVAVEQVSSVPGIRDIGAQVIVSEIGTDMSRFPSDGHLISWAGLCPRNDETAGKRRSTRLRKGAPWLKTTLVQCAWAAVRKKDSYLQAQFLRLKSRRGPKKAIIAVAASILTAIYHMLKDGTLYQDLGSNHFQSRTKSQQTKRLIKRLADLGYDVALTPLPTNEVPAEGAVSF

SEQ ID NO: 239954 - protein, 349 aa, unidentified
MVTIGVDLHKRTHTLVVVEPTGRQLATRTVRATVAGHVEALRWAQGWAERAWALEDCRHLSRRFEADLLRAGEAVVRVAPKLMAGVRRTARTPGKSDPIDALAVARAALREPDLPVAQLDGVAREIQLLLDHRDDLVVERTRIQNRLRWHLHELDPGNEPAPRSLNRVRVLRALEDRLATAPGVVARLARDLVVRCGELTGKINELEHEIAVRVWELAPSLLALQGCGALTAAKLIGEVANIARFRSRAAFAMYNGTAPIPAWSGNSDHHRLNRGGNRQVNAALHRIAITQMQRPGRGRDYFEHRLAEHDTKREAMRALRRRLSDEVYRRLCSDQLHAGSTTSGLETAA

SEQ ID NO: 239955 - protein, 369 aa, unidentified
MKSIAYAGNDVHQSTITAVVFKDYEQEPFLKETITNDKRKVQKFYLRLKRDYEIRACYEASGCGYVFYRWLKEIGISCEVVAPHSIAQRRGRKIKTDKRDARKLGQQYRNGELAIVHIPKEKEEAARSLTRLREQIMKQKKQTKQYILKFLQLRDLVYKEGDNWTQKHKRYLEGIRFDNETERFIFNTYLERLEHIGVETRLIEEKIHDMAFSETYKEAVGKLRCFRGIDTITAMSLITEIIDFKRFGSARQIMAFLGVVPGQDSSGEVRKYLGITKTGNKRIRRLLVESARHYRHRPAITDSLKKRQQGQPQKVINHSWKAQKRLHNKYIRLFSRGKKKQQIITAVARELIGFVWSVMRDDELNLSAA

SEQ ID NO: 239956 - protein, 352 aa, unidentified
MYYVGLDLHKKYVTGCVLDSQGVVVAEQRRLPPVLETMLGWLAPLGQPVAVALEATLYWAWLHDRLTAAGYQVAVAHPQQVKLICHARCKTDPVDAHKLADLLRTDLLPAIWIPDAATRARRTQLRGRAWVVRMRTRVKARIQAYLAAENERVPVSDLFSRGGRAWLATVVLPAEVREQVDRLLALVEQLDGQIAEQDRAVRELARATPEAALLQTIPGIGPFGALLLLAEIGTIARFGSSHELAAYAGLVPSTRSSGGKTAHGSVGPAGSAWLKWLFVEAVQTLKRQPGPVRSQYERLLRAKGKPKATVAAARKLCCYVYWMMKEGRSYDDWLRQRQQREVRPIQAVASVA

SEQ ID NO: 239957 - protein, 364 aa, unidentified
MYDSTTTVTVGLDVHARSVRLAAVRADELLEERTLPYDEDAVERVLRRWPGVRCCYEAGPTGFGLYRHLIGRGIDCSVVAPGLVPQRPGDRVKTDPRDARKLARLLAGGLLEPIHVPSRELEAARDLVRAREDARLDRMRDRHRLSKFCLRHGRVLPTSSWTVMRRKWLGEQRFEFAAQQITFDSYVHTVDLVDARIEQLERAIRETAEQEPWCGLVARLRCLRGIETLTALALVTEIGDFDRFKTAEELMAFVGLVPSEHSSGEKRRQGSITKVGNSHVRRLLVESAWHARRRPKVGYELARRQRGQDAVVVERAWRCQQRLYQRWQRMAGRGKPQQKIVVACARELAGFVWAIATEQPLRST

SEQ ID NO: 239958 - protein, 359 aa, unidentified
MTSMQDAPQRRRVVVGVDTHKHLHVAVALDELGGRIEARNFAADRSGYEQLIDWASSLGREVMFGVEGTGSYGAGLASAIRRRSIGVLEVLRTDRWDRRLRGKSDTIDAENAARAVLNGQASAVPKSADGTVEMIRLVKVAKDVAVKARTSAMISLKAVLVNAPAELREQLQPLTKMALIRRCAALRPGPVTNPTTAAKHTLRAIARRWLALDAEIKTHQQILNRLTTELVPDLVAAFGIGADIAAEMLIVAGDNPERVKSEPAFARLCGVAPIPASSGMTTRHRLNRGGHRQANSALYRAVIVRLQYHHPTQAYYQRRTAEGRTKAEIIRCLKRLLAREIWSHLRPLRQARQPLVLAA

SEQ ID NO: 239959 - protein, 411 aa, unidentified
MRYYIGVDWADAAHAIWVEDEHGVKMLTRTVPHTAEGLAEWGRWAEWGRWLDEQRARGMELWAAIERPDGRVVDFLLDHGVVVYPINPKALDRARDRYRTSNSKSDFFDARVLASFLRTDQAHLQALQPSSEAAQELKLLTRDYDRLVREQTRLLNQLTATLKEYYPRVFEICLDLTAKRTAAFLRAYPTPAALAALTEDTWQQFATAHRWTAEQAAALWAVLQRPQLPVPEHVVRAKRRLVEVLLRQLEPVVEAVDDYRKVVMDFFAALPAAEWASTLPASQGTLVPPIWAELGDAVGRWRSWQHLQGHSGVVPVTRRSGKSQSIAFRFACNRHLRRALQQFAFCSLKSSDWARAYYDRQRARGHRHQAAVRALAAKWVKIIFVLWSRHMAYDENIHLAMMARQHLRQAA

SEQ ID NO: 239960 - protein, 355 aa, unidentified
MNSEKYIGLDVHQATISVAVLDSTGKLVMESILETKAATILEFLAGLRGTLSVTFEEGTWAAWLYDLLKPHVAKLVVCNPRKNALLKDGNKSDRIDAHKLAELLYLNKLSSVYHGETGVRMLRELARSYLTIVKDLTRVMCRLKAVYRSWAIPCAGRDVYYTRHRAEWLGKIKEAGVRRRAERLYQQLDMLQYLRQQARRELLAESRKHAITVKLRQIPSLGPIRSALAVALIQTPHRFRTKRQLWAYSGLALETRTSAEYCYVKGGLRRSKKQISIRGLNKDHNHDLKGLFKGAATRASVLPGPFQDFYQRSLAKGIKPTMARLTLARKIAAITLTLWKKGENFDADKLKSQAA

SEQ ID NO: 239961 - protein, 372 aa, unidentified
MNYNTVYVGMDVHKESFSLCAYTIEAEKASQYQRTEADYKKVLNYLEFLRTIYGDDANFICGYEAGCFGYTLYHQLTANNVKCIILAPTTMLEQRSKKRIKTDRRDAEIIAKCLAQHNYSPVHIPTAKDEETKEFLRMRDDHKLALKKVKQQILAFCLRHNYRYDGKSHWTAAHLKWLKALTPEALYKEILDEYLLTYQTLSDKIERLDKRIEELATQDEYKEAVKKLCCFIGVKTHTALSVLVEVGDFKRFASAQHFASYLGLVPGEDSSGDDQNRLGITKAGNRHVRLLLTEASQCYARGQVGFKSKELKSRQSGNTPAVIAYADKANERLRRRYYKMVLNKYKKHNVAKTAIARELACFMWGMMTDNIV

SEQ ID NO: 239962 - protein, 321 aa, unidentified
MTYVGIDVSKVTFVVAYSSVKTNKTRTFKNTVNGVHEFVQTISASEHNCVLEATGNYSALLVYLLSEAGITISLENPLKIKNFARVMLTVTKTDEIDARLIALYGEKMQPAPYKLRSDAILVLKQKRTVLRQLKKQLVATRNLKGSMEVLPFFDPKCKKTIEKTITFLEKQIKEMEEELASLAQGEYKKQMDLLTSIKGIGVTLAATLIVATGRFSYFDNAKQLTRYLGLSPTYQQSGTSVNVKGHINRNGDSSLRSQLYVAAFSSLRCNTECKACFDRLRSNGKPGKVVVIAVANKLVRQAFAVVTQGKPYVDGFKSEKP

SEQ ID NO: 239963 - protein, 358 aa, unidentified
MEPKYIGFDIDSKNTVACAVQQGRKDVFQCFPTDTRRMQKYLRQLGRDGSPLHLTFEISGEAGYRHDALRPYVESLTVSNPNKMTWIFRTSRKNDRIDARKQAVLLSIDEVPKVHIPVLEVRQWRATIQHRRLLVNRRTAVKNRIRALLKAHGLAQPPHRGSWWKRANQRWMEQLTQDWSEVSGETLWRVQLKNLLEELTLLGGQLKQVTSYLDQYLDRHPGGVLLMSIPGVGPRTAEAVLAYTDDIRRFLRSKQYCAYFGLTPKLDESGLRRRLGHISKEGPSVVRWLLVESAWRVVARVPAFQAFYERVQAGQPNRRKVAVVAVARKLLAVMRAMLQSGELFNESLVAAVPAKSRR

SEQ ID NO: 239964 - protein, 455 aa, unidentified
MQTFYLGIDASKGYADFIILNSQKEVVVESFQLDDTFDGHCFLYDLLMKFLTDHTDSIIYAALESTGGYENNWYNALLEFQGTLNLQTARLNPLGVYHNSKADMKRNVTDKISAQSVAEYMIAHPLKVSYQSQDHLASLRKQWGFIKMLTKQCTQLLNQLESLLYSANPEILAYCKDGMPAWVLKLLVKYPTAANLGKSKVSAVARIPFVSTAKAKDLVLNAKKSVASASDEVTQQLVTATVKQIMHLKETIKAQSGIMTRACAVPEVELLKTFIGIGDSSGIGLMLNIQSVKRFKTVKKLAAFFGLHPKLKISGDGVSAVRMSKEGRAEPRQILFMVAMTAITQNPMIRDIYQEHVRQGMKKMAAIGLCMHKILRIIYGMLKNNSPFDPEIDRRNRQKPVSQRKPRQNKVRRYQDYDSNAPISRRQKTKRMEQRQSQSDNSAECGILAPIPFPT

SEQ ID NO: 239965 - protein, 353 aa, unidentified
MGFQLGQATIAIDIAKRVFQVHKVDPDTGEVSRKKLGRHEVTEYFAQLKPCVIAMEACGTAQHWARVFRSHGHEVMLISPQFVRAFVKTNKNDAADAQAIWTAAQQPEMRTVAIKSAEQQSILALHTVRERFKKARTAAVNQLHGLMGEYGVELPKGWRTMLPKAAEALDDATSAVPAILRPQLRAQLDEIRALTVKIDEVEAQLSRWQRKEEDCQRIAAIPGVGLLTATAIVATVGDDAKVFRSGREFAAFLGLVPRQTGTGGKIKLLGISKRGDVYIRTLLIHGARSVMNWNESKQDPESWLSRMIERRPHNVVATALANKMARQIWALLAHKRIYEANRSTGHAGVAEAE

SEQ ID NO: 239966 - protein, 342 aa, unidentified
MEITTIGLDLAKSIFQVHAIDAAGIVVVRKALRRSQVLPFFTKLPPCLIGIEACGTSHHWARELAKLGHEVRLMPPAYVKPYVKRGKTDANDAEAICEAVTRPTMRFVSVKSPEQQAALALHRTRDLLVKQRTQLVNMIRGLLAEFGIEIVRGLHHAIELAERISKGDAPEVPELAVRVITGLAGQIGDVQVRLAALEKELLTWHRSNELSQRLGTIPGVGLISATALAASVTDPGRFRSGRQFAASLGLTPLQNSSGGKERMGRISRMGDRYLRRLLVIGMTSLVRRARAKPDSVDPRIAAMLARKPARVVTVAAANRTARVAWAIMARGGTYRAPIGLAA

SEQ ID NO: 239967 - protein, 347 aa, unidentified
MHFYTGQHRYYCGIDLHARTMYLCILDHEGGKVVLHRNLRCEPALFLEAVAPYRDDLVVATECIYCWYWLADLCTREGIPFVLGHALYMKAIHGGKAKNDKIDSYKIAVLLSGGMFPVAYVYPPGMRATRDLLRRRLFFVRKRGELFAHIRTTFHQLNLPAPSGQLLYQSNRAGVPRAIPDPVVRASIEADLALAAHYDEVIRSLGRTLRRQARIEDPDTLTLLRTIPGVGPVLALTLLYELHDIARFKRVQDFLSYARLVKSQKGSAGKVLGTSGAKIGNAHLKWAFSEAAVLFLRKNRRGQKLLDRVRSKHGKGKALSILAARLGRTSYYMLRRNVAFDMDRFMN

SEQ ID NO: 239968 - protein, 410 aa, unidentified
MSKLFVGIDVSLKDNSVRCLDANGDTVRKFSVPNTVDGASVLVDNLVELAAQHSMQQVVLGLEATSNHGYHLTAFCQNSEKLAPFSPQIHVLNPRSVNNFKKSYNDLPKNDDIDAWVIADKLRFGRLPEEVFMDERFLALQRLTRTRFHLAQTIAREKTYFLNNLFLKFSSLRQEKIFSDPFGTTAMAVVEEFYSPDEIAAMPLEELVSFLQEKSKNRLVDAEGVAKALQKAARSSYRLSKSLADPVNACLAASISVIRALQSELKRLDKLIAQHLEAIPQTLTSIKGIGPVYAAGIMAEIGDIRRFKNQKALAKYAGLVWNEHQSGQWKAQDTPRVRSGNKYLRYYLVEAANLIRVHDQEYREFYQAKYNEARTHKHKRALVLTARKLVRLVFALLRSNQLYTPRKRGD

SEQ ID NO: 239969 - protein, 321 aa, unidentified
MVIGIDVSKHKLAVAVLFNGKFRTKTVTNDQAGFNVLWGWLERFESLPEHVCLEATGPYGEDVATFLYDQGLVVSIVNPTRIKGYAQSEGLRTKTDKVDARLIASFCQSKQDKLQRWKPAPIEHRELRDLMRRLESLKNMRVQEENRLEGNLSDVVVANLKEHIQYLNKQIQQLEKMVKDHIDRHPGLRQQCDLLITIPGISDTTSANLISELSFDQFSTARQAAAYAGLTPSDRESGTSVKGRPRISKIGNRRLRKALYMPALAAIRYNPILSEFSNRLERKGKAGKVIISAVMRKIIHIAFGVLKSGQPFDPNYQPLLP

SEQ ID NO: 239970 - protein, 402 aa, unidentified
MNAVGIDVSKGKSMVAIMRPFGEIVSAPFEIKHTASGINSLVELINSVEGESRIVMEHTGRYYEVLAHQLSEANLFVSAINPKLIKDFDNDSLRKVKSDKADAVKIARYTLDKWQNLKQYNVMDELRNQLKTMNRQFGFYIKHKTAMKNNLIGILDQTYPGVNTYFDSPARSDGSQKWVDFASTYWHVDCVRKMSLNSFIDHYQNWCKRKKYNFSQSKAEEIYGKAKELVPVLSKDAITKLIIKQAVDQLNSASTTVESLRTLMNETASKLPEYPVVMAMKGVGTSLGPQLIAEIGDVSRFTHKSTITAFAGVDPGVNESGSYEQKSVPTSKRGSSDLRKTLFQVMDVLIKTHPQDDPVYQFLDKKRAQGKPYYVYMTAGANKFLRIYYGRVKEYLSSLPES

SEQ ID NO: 239971 - protein, 350 aa, unidentified
MASKVKDNKVNFKGKTVNIGIDMHKISWRITALVEGDTVLAITLAKPNYDTFEKIISCFEGNHVRIVYEVGPGGFELYDKLTDDGIECIVTPPSLIPTESGSKVKTDKKDSYKLALLLQSGLLKEVWVLSPEERTHRQLVGTRRQIVNHRSDVMRQIKSLLLFNSIDVPFKGTQHWRGPFMTCLVNLDLGYDSLNRSLKALVDLFNHLSAEKKAITEEILELAKEEKYAKRVELLESIPGIGTLSAMEILIEIQDITRFKTADELAAYLGLTPSQYSSGEHIRMGHITHAGNSQVRTTLVESSWTLIGKDREMERKYQRIKNEERRQKSRCCSRQKPQRLYANRGFGFLE

SEQ ID NO: 239972 - protein, 358 aa, unidentified
MKKRAECVLRNEKVFVGLEDSKKTWALCIRSGGIVVQETSMPAQYEVLRNYLNNKFPECQVKVMYEAGFAGFDLHDRLEMDGWDCVVTPPHTVTQEKCQRQKNDRTDCRRLARNLENGDYRSCFVPDKQLREDRQISRTYGQVQADIIRVCNRIRRMLDFHGLDKSIPAELWRSGTAYTRLKERLEEMEMSDSLQFSFGVMFKELEHLRQLKKEVLQQLRKLAKSDRYQESAKLLKSAPGIGELTAIRLVLEWGDVSRFGRKQEFASFLGLVPSDYSSGEQDHRGHITKQGNRRVRSWLIESAWVAIRHDPVLLEKFRAVSRNCGSKKKAIVAVARKLALRLRRLLLRREPYVIGVVE

SEQ ID NO: 239973 - protein, 329 aa, unidentified
MAVTVSIDLAKTVYELAAADETGRILERRRVSRRQLEQYFANRTVGKVVMEACGTAHYWGRWFARQGIQVLLLPPHYVRAYVRRDKTDRADATALLEASRAPDIIPVTVKSVEQQALQGLHRIRAAWGSTRIARGNQLRGLCREFGIIAPVGDRGVEQLGRAINAKGSEVPEFIRDMLYQLLEEIRELKAREIGIERQLAEIARRSEVCNRLYTIPGVGLMTATAMVGGVGDIHTFRNARCFASWLGLTPREHSSGTKRRLGSISKRGDGYLRMLLVFGARAVLWSANSAKRAGRLLFASAIAALLWQVRASRPGFSAAGRASCYGLRQ

SEQ ID NO: 239974 - protein, 433 aa, unidentified
MQDAEDEPLFAERVAGLDIAKAEVEVTIRVPSDTTPGHRQQETRTFGATRKELLSLADWLRCWGVTKAGMEATGDYWKPVFFVLESRGFDCELYNAAQVKALPGRPKTDRADSIWIARITERGMISSSFVPPEPIRRLRTHTRYRRHLTQARTAEKQRVEKLLEDGHLKLSSVISDIHGVSGRDMLNALAAGERDPRALAQLARGTMRGKIRRLEEALECSFFTGEHAAVLAMMLVTIDHYTAQIDQLTAKIENLAGPYLHQVAQLDAVPGIGVVCAQDIIAEIGADMSVFPTAAHLVSWARWSPQVKQSAGKRKGSNATGRGNPYLGAALGEAAISTGRTQTFLGARYRRLSKRMPKKKALVATGNSMLTSVHALLSDPSACYQDLGADYYEQRMHTRRQARNHVKSLERLGYKVTIQALNPDTDQPLTAAG

SEQ ID NO: 239975 - protein, 346 aa, unidentified
MSHSTTVGVDLAKNVIQVSVVSARGKELSNRSFTRRKFAEFLSKQKPALVAFEACATAHYWARAAERHGHVARIIPAKFVTPFRQGHKTDSNDALAVAEAARRPSIKEAPMKTVEQQGLQAIHRSRQLLIQESTALSNHLRGLLMEFGVVIPQGFASLLRAVPEVLEDGENELPDMYRPTLHRMYTRLLELREHIEAMTSEVEVLVKQHPICSRLTALEGIGPIGALLLYATLGSGSVFSSSREFAAYLGLAPRQYSSGGKTNIVGLSKKIGNSRLRSILILGARAYTYRLKEPKSSKDRWLKDVIERNGHSRAAIALANKNVRTAWAMVTQGTEYQRRGQQKVAA

SEQ ID NO: 239976 - protein, 342 aa, unidentified
MERVYVGVDLGSSSFQQVGVNEPGMVVMKREFQTSAAHLVKAFSGLKGEIHVHLEAGELAPWAMEIIRPLVHRVVCSHPQSNAWIAKDADKCDRVDAYKLADLLRVNRFKEVHYPREQLRRDFKTLVQHYDELTQQQARLKTKVKARLRMQGVIVRGERVFSITGRQAVLAAVKSVAVRTAIKQLYQVLDQSLASQTEARLLMLRTAQALPEIKWFKTAPGVGPIGACRFSAYVHTPQRFSSTRKLWKYCRLSISHRSSNGKPLRRPRLDRSGCGRLKDVSRKAFEAALRTHGDNAFKRTYQRALQTTHDQTHARLTVQRKIVSTLRAMWINQTPYSDQMTP

SEQ ID NO: 239977 - protein, 456 aa, unidentified
MAKKQMSLEVVNPNAAGIDIGSRSHWVSVGQNSEDVKEYGVYSEDHQKLCEWLKKHKVSTIAMESTGTYWQNLFSSLVAYGFDVILVNGRQTKNIKGKKTDILDCQWIQKLHTLGLLSSSFLPDSTTDIIRTYSRHRQNIIKQSASTVMKMQKYFRLMNMRLDVVVNDIVGLTGTKIINDFVKGKKSGKELAKNRHYNCKKSEDEIAKALQYNGREDYYFALQHEWNTYLHLQKQIDEVDVQIKKHLTAVIDKDDNKKQHIASKKPYKRKNKNTIRDIDMNQMSYQYFEGIDLMAIEGVNDATIMALISEIGLEGIKKFDTAKQFTSWLRLAPNNKISGGKVLSHYLPKGSNRLKISLRQAANAIGNLKEGHLSDFFRKINYKRGRATAVSATARKLAVIIWIMLVKGVPYQPPTEYLFLDQKRKMKLVNRIKKNIAKFELKPEDVGFNNMLSVSI

SEQ ID NO: 239978 - protein, 403 aa, unidentified
MERVFGMDVHKNVLVTTIITEEGEETRWSGVDAADLKNLMEWLKDKKCMKGVMESSGIYWVPIYVTLVDNGFQVTVANAHQVKAIPGRKTDELDSQWLARIFSAGLVKPSYIPEKKIMELRNLTRLRVALLEEQTAFKNRAHKTLQICNIRLASKLSDIFGKDGQMLLNALMKRESIDEVIEKYGSKRLKAKKEEVKESILGVLNETDIIELKICLDNINRLEEQIRQLNAKIATLVNKKDVERISKVPGVGEVSASTVIAEIADPKRFQNEKKLFSWSGLAPLTYQTGGKKPKSGHITKRGNKWLRRTLAQCATSAIKARNSQIRLFYLRIRGRRGHKIAIVATARKLLGIIWHLLITGEEYIDKHYVKKTMTKSRKKTLKLALDEAIPLLKQAGYTIIAPG

SEQ ID NO: 239979 - protein, 355 aa, unidentified
MRPSASSVLIRCSKLEPLIERARMHWAGLAFASMSQNNHPILYAGVDVAKATLDLSLNGVSHRVGNDPKGHAHILKLLVQAEASGRKTHVILEATGGYEAALCAVLHAAGQTLSVLQPARIRHFARAQNQHAKTDAIDAAVLAAFGQAIQPTPAIPPSAAQSRLSALVGRRAQLVESRTCESNRAAHYREPVLCQQSRRLLKLLDTQIAECDLAIAAQIQADQDLAARAARLQQVSGIGPVVAAVLQAQLPELGRLEDGEAAALAGLAPYNSDSGPRQGHRSIRGGRAAVRCALYMAAMNAVRFDPILRQFYQRLLAAGKVPKVALTAAMRKLLLLLNRLLKKPTFQLQTAGPRP

SEQ ID NO: 239980 - protein, 362 aa, unidentified
MVYLGIDLHRNRSVVAALNDNGDVLLSRRIESRPEAFQRIFGELELGSLSVAFEATYGWYWLADMLKDAGIEAHMAHPLATKAIATARVKNDSVDARTLAHLLRTHLLPEAWIAPTPVRERQRLARTRTSLVRIRSRLLCQLHGILADHCIHPPTRTLLCAAGRAFLAGAPLPELERGRVDAAMRLIDEVTAEVQQLDQELRAAFAGDARIGRLVAIPGIGFTTAAIVLAEIGEPGRFACADRLCSWAGLTPTERSSDLQTRRGHISKQGSRWLRWVLVEAAARPVRDPLLRRFKEGVASRRGTKIATVALARLLLTLCFYALRDDAGCKAFPVRARARTSRSADPGALVVRHDLPQGTVAV

SEQ ID NO: 239981 - protein, 501 aa, unidentified
MKTKRRKAKLQAGIRSISVTSNEAEQKLEIMRPDAAGIDCGAQEHYVAVPVDRVSAGQPTVRSFSAFTEGLDAAVDWLKECRVTTVAMESTGVYWIPLHQKLEAAGIEVYLVNARHVRCVPGRKTDVKDSQWLRQLHRFGLLNASFRPEDITCRLRSLHRHRDNLVSSSASEIQHMQKALQQMNLHLHHVVSDITGLTGLRIIDAILSGQRDPKELIKLRDKRVSKSTPQQMQAALVGDYRAEHLFVLSQSLQAYRFHQARIEECDRQTQPLLEKLAQQVEAASARLKPLKGAPQEETLPVPRNEPKTGTSASSPLNKAKRKHKPIANEPKIELAGLLERICGIDLTQVVGLNVLSVLLIVSEIGIDMSKWRSAKAFCSWLGLCPGNKISGGKVLDSRTRQVANRVADALRLAAQSAGRTETCLGIFYRRKQAHLGAPKATTATARKLACLIYHLLKYKQPYQKLDPAIYQLRLQKSALRKLQNQATTLGYKLIPTANVPA

SEQ ID NO: 239982 - protein, 409 aa, unidentified
MLYVGIDWASDRHDVCLTNDSAQTLAAFRISHGSEGFERLHRVIKGHEPEPQQVLVALETTRGLLVHDLLRSDYQVYAINPKAVNRYKDRHLVSKAKTDSLDASCLAHLLRTDRHRFKPLVLLPEDYRLLDRFCLDLRKLVEDRTRVVNQINDCLKEFYPQALELFYKIDSATSIAFLETFSDPNTLLATTKHRFRAFLKKQNYPYVEKAGQLYDKIHALAPEADPVIVQTGKLRLEALLGQFLAVREHQKVYEQQIRTVLRKLPESKPIRTLPGLGKRLVPELVAVLGPRQSHRRFDSARALSNLAGCSPITQASGKWQTVRMRTACVKPLRRTFRHWSFASLTCSKWAWAYYQYRRSRNHLHETILRSLAQKWTKILFAVWTTGQPYDERLHIQRLKQHGVAWALSL

SEQ ID NO: 239983 - protein, 355 aa, unidentified
MRQQAVQYLAMDVHQATVVACVRDERGTITMRATVPTEARAILALVRGAGDRVHVAFEEGTQAQWLHDLLQAYAERVVVCNVRGKSEISNKSDRIDAEHRSELLRVGALKTVYHGAPGVLTLKELVRNYNSLVEDATRVMLRIKALFRARAIRTPGRSVYSASKRQEWLEQLTTPGARVRAASLLTQLDLLLELRPKAKAAMIAEARKQPGWKPLRSIPFLGVVRVAQLLAIMATPYRFRTKRNLWPYAGLAVVTRSSADREFADGKLRRRNRAPQTRGLNRNHNPMLKSIFKGAATAAAAKAGPLQDLYHACVARGTKPELAKVTLARKIASITLRLWKKGELWDPDKLTMQTT

SEQ ID NO: 239984 - protein, 357 aa, unidentified
MNYTGIDYHKKYSVACTLDGQGRRLHEARIDANAPEAFAAYFKHLGEPSEVVIEACWNWGTLYELLKETEGVSKVVLSHPAKNRIIADAQIKNDRIDAKALATLLRGDFVAKVHVSSRDVRQRKNTIRQRLWLARLRTMIRNRIHTVIDRHPQLERPAVKDLFCNQGKAWMKRAPLPGIDRTLLDDDLALHALLQTQIDALETRIVADNAANPLAVRLQTLPGVGKILAPVLALEIDQIERFRHADKLCAYAGLVPTTHSSGGKVAHGRMLPFCNRWLKWAFVEAAWVAVGCSDYFGSFYRKQRLRGKGANDAIIITARRMAKIAWKMLTDERNYMPQAPVARRVTSSSSPAALATD

SEQ ID NO: 239985 - protein, 372 aa, unidentified
MRDYSAYIGLDVHKDTVAVAVALQKGGEPLYRGDIAHTTKALTKLLHRLTASYGEKIAFCYEAGPTGYGLYRWLIKRGFYCEVIAPSLIPRKPGDRIKTDRRDAISLSRLFRVGDQTAVWVPDHEQEAMRDLTRVREDMKGMETQAKHRLNSFLLRHSRRFSGRSKNTPAYFSWLEGLKFENPTSQIVFQEYVNAVLTAQARVTGIVEEMENALSSWALAPVVEALRALRGVDLVAAMTVMAELGDITRFTSPKQLMAFLGLVPSEDSSGLKQRRGGITKTGNGHVRRVLIESAWSYRYPARMTRHLRKKAENASPEVKTIAWQAQKRMCGRYWYLMGKGKCQQQVVTAIARELIGFIWAIAKEMQPKAITA

SEQ ID NO: 239986 - protein, 340 aa, unidentified
MTLVGVDLHTREQSVAVLDTETGEIQELRLRHEGDATERFYAALPPPVTVAIESTGYALWFHALMQRLGHTLVVGDAAKIRATVVRKTKTDRRDARHILRLLSEDRFPTIWVPDPRVRDLRALVAHRMRLVRVRTMLRNGVHAIALNYRLTLGRSLFTRYGLAQLEQLSLPAHTAHRRDESLELLAWLDARITALEATMTEVAAADPEARRLMTHPGVGPVTALTTLLVLGPVDRFPTSKHVVSDIGLAPAIASSAGKHRLGGITKHGNRMLRHVLGQAGQTALRMDPDLKRLYGRIRHRRGTARAKVAVARTLLVRLHIMRRDQVDYAEFRRRGQITAA

SEQ ID NO: 239987 - protein, 374 aa, unidentified
MTGEIILQPVAFSNNAQGFEFLISQIALYPVDSVLIGMEDTGHYHFALLRFLLQKNYNVALINPKTTDLNRRMDGGITKNDKLDTLNICDILSSNKLKKPYRLTSSKKFDLYEQKQLTRLHHSLKEQINVLSNRLQKCIDLVFPEYNSLFKSKYGKVYMSILKQFGSAKAIAQADIRTLRKCFEITGRGNRISLTAEKLKESAKTSVGISSLADEMQIKHLIAHIELLNDQLKEIDKKIEEFSTDLNSPIISVPGISHFSGTSILAEYGDIFNYSKPSKIIKVAGVAPFHYESSQYEAKHSAITKQGSSYLRKTLYQVIVPVIRFNKVFKDDYDLKRSQGKSHRCAQGHCIRKLLRVIYHLVTTNQQFGASLLR

SEQ ID NO: 239988 - protein, 325 aa, unidentified
MKSQNLVCGIDVSRNTLDVYYNDNAGKEYYLQVCNDRKGHLQLINELGVIRTYLMESSGPYYLRLAFLLKEKGADVRVENPIVIKRFIQMQMERNKSDRKDAKWIYRFGQQCEASEWKMPSDQQLQCSETLSAIDLYKRQITMIGNQLESLAQIPCREKTVIKSLKQMQSKLVTEVEKLELRVDDILKQWQGEQLKNLKTVPGLGKRAVALLIVYTDGFRKIQNHRQLTALCGLAPREYMSGTSVRGRKGICKMGNGHLRNVLYMCSMSAIKHNKACKDLYERLRAKGKRGKVALIAVCNKLLKQAFAIATRGTQYQADYRNSLS

SEQ ID NO: 239989 - protein, 367 aa, unidentified
MSHIIYCGVDFHARQQTICCLKTETGELTSHELKHDHKEALRKFYSELGGPVIVGLEASGYTPWFEELLEELGHQVWLGDATEIRRRARRRQKNDRRDAELILELLYHDEFPRIHRPPPQSREILRMLRYRHKLVKVRTLVKNSLQALSIQAGLSLQARLFTRQGTQQLEALTLSPVMGHQRQQWLELLQELNQRISETEGWLKQQALSDPRIQLLRTHPGLGLLSSLGIVHTLMPVNRFPNTRKLAAYGGFDPMERSSADKKRYLGISKAGSRLLRFLLIEATQTAVKTDPELKRFYHRLVQRRGKPKAKVAVARKLLIRSFIMLRDEINYAEFQQRAIAARLAREFARPNMPVPLIGQPASPAKG

SEQ ID NO: 239990 - protein, 431 aa, unidentified
MKYKQSKKQNQRIQQITELTLVVGADIAKKTHVARAVDFRGIEIGKDCVFGNDHSGLTKLVSWMKELQRQYAKTDIILGIEPTGHYWFPLAEFLHRENIKVVIVNPHHVNKSKELEDNSPTKNDYKDARLIADLVRNGKYSEPKLPTCVYADLRILMNLREKVMVNFGQVQRRIQNWLDRFFPEYSLVFKDWEGKASLITLREFPTPQEIVSLGASAIERRWKEDVKRAVGSKRAAQLLQAATNSIGLTEGLTAAKIELRALLEQYELFSRQLEEIMALVEALLAQIPGTKEMLTVPGIGAVTLAGFLAEVGDLSGYDHGQQIIRLAGFNLKENSSGKKKGKSTITKRGRSRLRALLFRAVMPMVAKNAEFKALHHYFTKRSQNPLKKKQSIVALCGKLIRVLYTLGTKCVPYNATDVLGPVRQSQIQMVA

SEQ ID NO: 239991 - protein, 407 aa, unidentified
MAVVMIGVDPHKGSHTAVVIGAAEELLGQLRVRACVAQAERLLAWAAAWPQRTWAVEGAGGLGHLLAQQLVAAGEPVLDVPPKLAARVRLLQAGDTNKNDPNDALSVAVAALRSKARREVAAEDHAAVLKVWSKRHRDLARARNQVACRLHAVLCDLLAGGVSKEITAAHAARILEQVTPSGPVAAARCELAGQFLEDLRGLDAQLRDTKKKLAAAVKASGTSLTEVFGFGPVNTGTVIGDVTDVTRFPSRDHFASYNGTAPVEVSSGNRKIYRLSLRGNRRINHALHMAAITQIRHAHSDGRAYYDRKIAEGKTHKEALRCLKRRISDAVFARLQADARKATATAAAKGPGGQPGNDSDSSAASSHPATPALRTSHSRARHHPTARSPRGRAIPAAPASKRTRGTG

SEQ ID NO: 239992 - protein, 423 aa, unidentified
MEVMHQRVAGLDVHKETVVACVRIMTGRRPTRECRTFTTTTQGLSELLAWLTAGRVTHVAMEATGVYWMPVWKILSEGGFTLIVANAAHIKQVPGRKTDMNDAMWIADLLACGLLKASFVPPEEIQELRSLTRTRKQLVREQTRHVQRIEKTLEEANIKLGAVLSDVMGVSGRRMIEAMIAGEGNPHRLAALAERSVKASPKALHDALHGRLREPHRFLLQLHLRQWDALDAAIRQIDDQVAGHIARLDEAAADGQPPFRELIARLCAIPGVSFLSATAILAEIGRDMSRFASAGHLIAWAGLCPGQNESAGKRKSSRLRKGAPWLKTMLVQCAWAAKRARHSYYSAQFHRLCARRGPQKAICAVAASLLTAIYHMVQSGASHRDLGADYFDRRTPEAKAKRLVAQLAKLGFAAQLQPLAEAA

SEQ ID NO: 239993 - protein, 355 aa, unidentified
MTSAKYIGMDVHKESISIAVMNSVGKVVMECVIETKASVILQFLNGLSGDLHVTFEEGTAAAWLYDLLKPHVARLVVCNPRRNALLKVGNKSDRIDARKLSELLRGNQLHPVYHGEHGLRALKELVRSYLTISKDLARVMTRVKALYRSWGIPCSGTQIYSRLHRVTWLSKISEPGVRLRAAFYFQQLDALRTLRQEVRQELLAESHKHSAWKRLCGIPSIGPIRAAVALGVLQTPHRFRTKRQLWSISGFAIETRSSADHRHVNGQLQKVKKRVSIRGLNQNHNHDLKNLFKGAAVIASTKPGPFQEFYTALLAKGMRPEMARLTLARKIATIVWIVWKRGVSFDAQYLKPQTV

SEQ ID NO: 239994 - protein, 340 aa, unidentified
MSLYGGIDLHANNSVIVLLNEQDEVIYRKRLPNTLPTILEQLAPYHTEVKGLVVESTYNWYWLVDGLMEAEYRVHLANPAAMQQYSGLKYTDDHSDARWLAHLLRLGVLPEGYIYPKAERAVRDLLRKRAHLVRQHTANVLSVQNIMARNTGSRFSVKRIQELTKQELTTLLAEETQVLAVTSSLMVLDCLRQQIKTLEQSVHKRLHHTPSYEQLLTVQGIGTILAQTITLETGAINRFPSVGHYASYCRCVDSTKISNGKRKGTGNVKNGNPYLAWAYMEAAQFAMRFQPEAQRFYQRKLAKSRNNTVLARKAVAHKLSRACYYMMRDLVPYEATKAFG

SEQ ID NO: 239995 - protein, 340 aa, unidentified
MNIKRIGLDLAKNVFQIHGVDHHEKVVLRKTLRRAHMMTFFSGLSPCLIGIEACGSSHYWTRELTRMGHTVRIIPPKLVKPYLKGNKNDANDAAAICEAISRPGMRFVALKSEAQQTLQAEHRVRARIIRERTALCNEIRGLLSEFGLVLPVGINHVRKALPEILSQQEQWNDRFIRLLCELSEEMQMLDERISRHDRRLQQAARDDIRIKRLMEIEGFGPIVASALVAAVGDAKQFKNGREMSAFIGLVPRQHSSGGKERLGHISKRGDSYLRTLIIHGARAVLRFSAGKTDRRSLWLQSVAERRNNNIAVVALANKNIRIAWAILNRGEEYHGVKNAA

SEQ ID NO: 239996 - protein, 433 aa, unidentified
MEQTERNRLEAFRQLRKEIRHSEEYLVVGIDIAKERHHAFFGTARGRSLLRRLVFSNDHEGFRKLLDQAEALRVQHGLKKVVYGMEPTANYHKPLGEYLIKLGKVVVLVSGVTVARNRESLDGRWDKHDGKDSANVADLISQGKCLYYEHPSAELRGLRRLLSLKRRLKKQEHGYRVRIRNHLIAQYYPEMDRDYERLGAEGLSIVKWCWAASEIAQLEVNPFIERVTSRRIRLEKRRRLEEVWERAAESIGCDAVPGLDHEAKVMVEGLKQIREMIKETEQRIEELCQQFLEYRYLLTIPGFGPDVSAKVLGAIGDPDRFLNGRQVLKLAGYDLSADRSGKTSEKMIPEISKRGKADLRYALYQAALVVSSQNRALMIYYTNKIRGREREKGIHTKMRVKLAAKLLVIAWTLMKRKEAFNPAYLKADLNQTF

SEQ ID NO: 239997 - protein, 343 aa, unidentified
MGAQITGGVDTHLDVHVAAALDDHGGVLGTASFAATRDGYVALARWLGSFGDVALVGVEGTGSYGAGLTRQLQREGMPVVEVDRPNRQRRRRVGKADTHDAVSAARAAFAGDALGVPKDRDGDVEAIRVLRLARSSAARDRTKALNQMRSIVSTAPEELRDQLRGLTIPKLVRAAAGFRPAGRTDVTNACRVALRTLARRIKELDDEIRTLDELLAPLVAQTAPEMIQRVGVGTDTAGALLVAAGENSSRIRNERSFARLCGAAPLDASSGKQQRHRLSRAGDRQANSALWRIVITRLSYDPATRQYLERRCAEGKTKTEAIRCLKRYVARELYACLPPETLA

SEQ ID NO: 239998 - protein, 361 aa, unidentified
MDKYIGFDISSKDVSVCIIQKNQKERYATISPDAGSMRKFLINEKKDGLRVHLTFEISGQAGYLYDSLIDCVDSIKVANPDKMTWIYRTAKKNDRIDARKMAVLLSIGEIPAVYMPSKEVRQWRMVICHRKKLLDGLVAAKNRIRALLKSQGIVKPLHKGGLWKIVNRLWMRGLTEGGFDINNLWKVQLVNLLDELEQKEKQIAFVTEYLDGYLDKQAGGKLLMSIRGVGPRTAEAVLAYTDDVERFAGGKEYCGYFGVTPRLDESGGSRRLGHISKKGPSVVRWVLVECSWKVIRYNPSLREFYERVRAGQTGRKKIAIVAVARKLLSIMRAMLLTGATFDDKCVSSLEYGRIEKLRKSA

SEQ ID NO: 239999 - protein, 374 aa, unidentified
MNEEVYLKVWSLTDFRHHSAQYGMHKAPSDWRLHSMKYTPVGVDIAKHLIQVHFINEHTGEVVDKQLQRQDFLTFFSNRESCLIGMEACGGSQHWARELQKLGHKVRLMQGRFVKAFVMGNKNDVMDARAIWMAVQQPGKAIAVKTEEQQSVLVLHRSRRQLVKFRTAQINALHGTLLEFGETIHKGRSAMDRELPAALERLKTKLPPYLITVLEDQYHRLNELDILIDGFEKQLISVARQNETCKRLMDIPGVGPLIATAAIATMGEASAFKSGREFAAYVGLVPKQTGSGGKVRLLGISKRGDTYLRTLFIHGARAASLRAKEPGPWITELKKRRPAGVAIVAMANKLARTIWAIAAHERQHDKNHVSIRPY

SEQ ID NO: 240000 - protein, 439 aa, unidentified
MRIASSVPMPSEVPIENEIVAYVGLDWADQQHVICWQAAGSARVQSAVVQQRPEELQAWVAELRQRFPQGLVAIALEQSRGAVIAALMHFDFLRLYPINPKSLARYREAFASSGAKDDPDDAGLLLELLVKHRDRLTPWVPDDALSRELALRVEHRRQLVNLQTKLIQQLRSHLKVYFPQALDWVGELDSLQACDFLQRWPTLAAVQKARPSQLEKFYHQHHCRRPQLIQQRLEQIRQAQPLTQDPAIVQAYSQMVLALVAQLRVLIPTLQQWQQQISQLFAQHPDAALFASFPTAGPVFAPRLQAAFGSRRDRFGSAAEVLQFSGVAPVTKRSGKSRQVQRRWARPKFLHQSFVEFTGLSIPHCCWARALYQQLRARGHRHWAAIRVVAYKWIRILFRCWQDRVPYDEQKYLKSLERRNPTLWAAIQQLPAQPSRKEV

SEQ ID NO: 240001 - protein, 412 aa, unidentified
MLKIVYPICCGIDVHKTFLVACLATTNDKGVTTYKSHRFSTFTNDLRKLSEWLSSNSCTHVCMESTGKYWIPVYNILESNCKITLAHPKYVKAIRGKKTDKKDAKWIADLFKHDLVAGSFMPPLPIRQLRDLMRYRFKLTNFKSSEKNRIQNCLTVSNIQLANVVSDTFGKSSMRIIDYLLENPDDKDFDFVPLLHPSMLDKVDKIRLALDGMITPEQQQKMNIILQHFDGLEKCKSDLESVILSLSEPYTKELSLVSTVPAFQNPYSAIAVISEIGVDMSVFPTSKHLCSWAGVTPQNNESAGKKHSVRISRAGVYIKPLLVQCANAVVKSEKHPEIKNRYLSIKKRRGHKRAIIAVSRMLLTAIYHVLKKGEPYNPDLYNRAEIMPQTRKITVEQAILIAQRHGYSVING

SEQ ID NO: 240002 - protein, 349 aa, unidentified
MGEVITIGVDIAKSVFQVHGVDADGTVVIRRRVGRARVLEFFADLPPCLVGMEACATAHQWARELKKFGHDTRLMPPAYVKAYVKRGKNDAADAAAICEAVTRPSMRFVPIKNVEQQSVLMLHRTRDLLIRQRTQLINALRAHLAELGLVAAKGREGVHQLVTVVTECGGERLPSNARFACQAIVTQLHAVQIEISGLDKRITQTHRVNADSKRLDTIPGFGVILSTAVVATMTDPKAFKTGREFAAWIGLVPRQNSTGGKQRLGSISKQGDRYLRRLLVVAATSVINSARARPYKYPWVIELLGRRPTKVVAVALANKMARIAWALLANGETYRAPTYSSNAVVPAAA

SEQ ID NO: 240003 - protein, 318 aa, unidentified
MISEVKPTKVLGIDVSKELLECHWVPSGHHSQHNNDLKGFHALLEALKKEPVERIILEATGGYEIPLVVELSLMKQPVVVINPRRGRDFAKANNMLAKTDRLDAIGLAEFGCSVRTEVRPLPEEKYSMLSQLVGRRRQVIEMLISERNRLGTSYGAIRKNIEKHIRFLEKDLLGIDDEIKTEVKKSPVWEEKSRIMQTMKGIGVVTAQTLLAELPELGQTHHKRITALVGLAPYNRDSGKFRGLRMICGGRKTVRTALYMATLVATRCNPDIKAFYQRLRKAGKKPKVALTACMRKVLIILNAMLANGTPWKTHCVNL

SEQ ID NO: 240004 - protein, 359 aa, unidentified
MESKVSNLDYGGHKIFIGLDVHLTNWKATIMLEETPFKTFSLDPSAVLLRSYLEKHFPGGEYFSAYEAGFTGFSTHRSLEQNGINNIVVNPADIPTTDKERKQKEDKRDSRKIANSLRNGQLQAIYIPRIEMEELRSLVRYRKTLVKEISRNKARVKSFLYRNGISIPLELSGASKHWSHNFTNWLKTVKLTTDYGHIVLMKTLEIVVHLRTTLLSITKDIKRIIKSDAQYTKAIADLRSIPGIGFIVAVTLLTEIEEICRFKDLDHLCSFIGLVPSTNSTGDKDRTRGITPRSNKPLREVLIESAWVAIRNDSSMALAYSSLCKRMEPNKAIIRIAKKLLNRVRYVLKNNTTYEIKTV

SEQ ID NO: 240005 - protein, 343 aa, unidentified
MKLIRVGVDLAKNVFQVHGVDRNEKAAWRRKLMRENWLKVLLETVEPGCEIGMESCGGAHHWARRLQAHGFRVRMIAPQFVKPYVKSNKNDANDAEAICEAMSRPHMRFVSVKTVEQQDIQAVHRIRAELTKQRTAKANQIRGLVAEYGLVAPKELLHLRRALPCWLEDAENGLSARFRRLLNGLWGDLRTLDERMAELDREIAMIAQSDPAARRLQQLRGVGPIIATALVAAVGNGEQFVNGRQMSAAFGLTPRQHSSGGKERLLGISKRGDAYLRALLIHGARSVIHHSKDKDDRLSQWVTRLAARRHPNVALVAMANKTTRMAWAMLSNGTDYQPAMVTS

SEQ ID NO: 240006 - protein, 361 aa, unidentified
MVVQRTSVGLDVHARSVVASALDGVTGELVERRLTPAYRDVAAWIGGLPAPVQVTYEAGPTGFGLARFLTAAGVDVQVAAPSKLLRPSGDRVKTDVRDARHLARLLHAGQIVAVSVPDEATEAARDLVRAREDVRGDLMSARHRVSKLLLRQGIVYCGGKAWTGVHDVWLRRQRFDSPALQLTYDTAYETMLAAVDRRDRLDRAITVMAADSAFTPVVRRLGCLRGVSTLTGFALAVEIGDWRRLTGRSIGAYLGLVPTESSSGASRCQGGITKTGNAHARRLLIEAAWHHRPPYARPGVDLRRRWEAASPAARDRGRRGNRRLHARWVAFDARGKRTVVANAAIARELAGWCWSLAVLDD

SEQ ID NO: 240007 - protein, 297 aa, unidentified
MSVYVGIDVHRKRSQVAVVAEDGTVQLNKNTVNGTEPLLRLIGDLPAGTPVAFEAAFGWGWLLRLLEDYGFEPHLVHPLRCKAIASARLKNDKVDAATLAQLLRADLLPEAQLAPAEVRQLRALLRHRISLVRLGTQQRNRIHAVVADFGFDRSGSYLSGPGRGWLAGLDLPAVSREVVADCLAVIGGLAPVTGRIDGELRAHAKADPRVKVLTALPGAVQFTALVMVAEIGDITRFGSARKLASQSGLTPAVRGSDRTVRHGHISKMACAGGTVPLHRPGGVRWRWLEDSICTGVS

SEQ ID NO: 240008 - protein, 463 aa, unidentified
MKKQTILKRKQKRISKHLEQVNLYAAGIDIGSTSHFVAVPAELDDDPVREFSCFTGDLHRMADWLVEIGIQTVAMESTGVYWIPAFEILEERGLQVFLVNAHHVSNVPGRKSDVQDCQWLQQLHTYGLLRGCFRTPEENIALRSYMRQRENLIQSASDHIRRMQKALRQMNLLLDNVVTDITGKTGMGIIRSILEGMREPAELAKLRDARCKKDEQTIASSLEGHYREEHLFSLKQEVEFYDFHQQKILDCDAAIEMQMRTLDSKGDPDDLASVKKRKNKNALAFDVRSELYRMTGVDLTRIDGMDENSVLKALSETGTDMSAWPTEKHFASWLGLSPNNKITGGKVLSSKTKPSANRAAAAFRMAAFALFNSKSALGAYLRRMRTRLGAPKAVTATAHKLAKIFYNMLKNGTEYVDQGQDYYEEQYQERVMKNLKKRAASLGLDLVPMDKIGDTKIAELSTT

SEQ ID NO: 240009 - protein, 355 aa, unidentified
MDSIKYIGLDVHQSTISVAVLNADGKLVMQSVIATHAATILDFLHGLRGSLHVTFEEGTHSAWLYDLLVRRVSKLLVCNPRKNALLKAGNKSDQIDARKLAELLHAGLLSAVYHGQNSTAAVKHLGRSYAALTEDTTRIMGRLKALYRGQAIACAGKKPYGSRHREEWLAQLSDSGWQRRARRLYQELDLVQQLRREARHDLILECGKYSEAKLLRTVPWLGPIRAALLIGRVQTPHRFRTKRQFWAYCGLALETRSSADYGLVNGQLQRRKKPVFIRGLNLNHNHDLKNLFKSAATTASGSDGPFRPFYENLLGKGMKPEMARLTLARKIAAITLHVWKKGEPFDAEYLKPQAA

SEQ ID NO: 240010 - protein, 464 aa, unidentified
MRAGKQLWRNRKEKKEWGRRLQSEDPGLEVVHPHAAGIDVGNSTHYVAVRPDRDPEPVRRFECFTADLHRLADWLQSCGVKTVAMQSTGVYWIPLYEILEEHGLEVYLVNARHTKNLPGRKTDVQESQWLLKLHTYGLLNNSFQPVSEIRVLRTYWRQRGEHVRGAATCIQRMQKALTQMNVQLANVISDISGLTGQAIIRAIVAGERNPLKLAMLSDPRVHASHEEIAKSLEGNWRPELLFVLHQELDMYDTYQKRIAECDQRLQKHLASFTRPLSIRPPTQKLKTKKPAAKNAPRFDLSSELQRVTGVDLTRIDGIDVMVAQTLLSEVGLDMSRWKTESHFASWLGLCPDNRISGDKVLSRGTRRVVNRAATALRQAANTLMRSRSYLGAQYRRLRTKLGAPKAITAMAHRLARLVYRMLKYGQTYVDKGTEYYEERFRQQQIQLLRKRAAKLGLQVAEIHA

SEQ ID NO: 240011 - protein, 345 aa, unidentified
MQQITTIGLDLAKQVFQVHGAEADGSPVVSRKLRRADVLGFFKKLSPCLVGMEACGGAHFWAREIAKLGHDVRLIPPSYVKPFVKRGKTDAADAEAICEAVIRKTMRFVPVKSADQQAAAMVLKTRELLVRQRTQVINALRAHLSELGIIAGTGPAKTATLIEIVRDEEDARLPPAARFALSELANQIEWTRKRIDKLERAIVIEAKRDEDMRRLVTIPGVGVIIAASIKALVPDPNGFKSGRHFAAWLGLTPRSHSSGGRERLGRISKMGNSTLRSLLILGATSVLKHARHRTDASTWLAAILARRPFKVVATALANKMARIIWALLTKGGTYKSGLAIGTANA

SEQ ID NO: 240012 - protein, 352 aa, unidentified
MNNIKFIGMDVHQATISVAVVSEKGALLLETVLEARERCIVEFMQRWSGEVHVTFEEGTWASWLYELLQPHAERVLVCNPRKIAKRGNKSDKIDARKLAYWLRSGDLSPVYHHDCGVRHLKELSHSYMTLSKDLTRIMNRIKALYRSWGVACAGKSCYGERQRSQWLAKLPQGGVRQRADQLYQHFDAVHPLLQAARKAMLAESKKHMVCARLKKIPYIGPIRATLLIALVQTPHRFRTKRQLWSYAGLGLVTVASGEYQMVQGKPQRHKNPLIRGLNPDCNHDLKYVFKSTANRASGGQGPFHDFYQNLLAQGMRDDMARLTLARKIAAIVLVLWKKGVDFDPQQLKRQAA

SEQ ID NO: 240013 - protein, 359 aa, unidentified
MAKASVSKIKDFVSLNCGNQVWVGVDVHKATYHVAVLRGDGLVKDWSATASPQLLVKQLRSWEVEIGSVAYEAGPTGFGLARALEEAGIKAIVAPPSRIPRPVSKGAKTDRLDCIALAIYASKGMLKSIALPSRDQEAKRSLGRRRDQISREVRRTRQRIKSFLLVNGIAEPAGLRGWSNKGIEGLRTLELPEGHRYTLDSLLLDLDHHLVSRQIVDEQLKQLIDHHEDDRKAVDCMQTVPGVGIVTATKFRLEIFDPQRFRHPKEVACLVGLAPMDRRTGHQKGQAKLKPSGQKELRSLLVEAAWRLRAQEKWAREFYNRVLAANRIPQKAIVALARKLCIILWRICVETRPYRTSAV

SEQ ID NO: 240014 - protein, 369 aa, unidentified
MPHVTSIGLDVHARSVAAAAFNPFTGEVVHRDFGTDAAEIAEWALGFEEPRACYESGPTGFHMARELRALGLDCAVAAVSRMQRPAADARRKNDRRDAEFIARMLATHNIVEVPLPDAAVEAARDLDRALDDATVEYRRARQRLNMFLIRLGHVWDERNADGTRKGSWTRAHWRWISGIRLEGPQRDALEYYVTAARCAESDRRQLEKKVLALARTDRWRPAVEALSCIKGIDTLTAFRLAAEAGSFTRFRTAPAFASWCGLVPSERSSGETERRGGITKTGNRLARTALVESAWHYLTCTPRPKAPAPGADVPAAIRARADDCTARLCRRREALAAAGKSSCKANAAVARELACWVWEIGRRAEGTLG

SEQ ID NO: 240015 - protein, 305 aa, unidentified
MFSRFIGVDVSKTKIDVFLSETGEVLQVKNSTANIEKFVQKIDCRSNTLAVIDLTGGYETACVDVFYRAGFAIHRAEGRKVKAFMRAVGQLAKTDSIDARALADYGQRLQDKLILFQPIENEIKPYVFRLTELKQILKSERNRLNAPSTVPRIRLEISKHTEFLQTEIDELSKELQEIVKQNPILLKKQQALTSQIGIGETSANVLLACLPELGILSRRKIAALAGLAPYAQDSGTIQKVRHVIGGRCDVKRTLFICSLVAIQKDPIMRAFYEKLIQKGKRKMVAIVAVMRKMIIILNAKCKNID

SEQ ID NO: 240016 - protein, 353 aa, unidentified
MDRYLGGDVHAASVSFTVRGESGKILRRDVVETHGQALVAYLRQQPGHVHLCIEERELSQWLYEILSPHVGELVVYRARWEPGNKSDRLDADALSEKMLSRKFGNPVYKDLGPYGALRQAARTYRMLTKDQARVKARIKSRFRSRGIACSGEGVYDGDRRRELAGTLPAPQRHAVEVLAQELEALRALQATAEQEMLRESHRHAISRVLETAPGFGPIRVALLLPIVVTPYRFRTKRQFWSYCGFSIVTRSSSDWVQQGGGWRRAPVTQTRGLTREYNKTLKWLFKGAATTVLQHSAPGPLRDHYDALLDAGTRPNLAKLTIARQIAAIVLAMWKNQGRYEPKLIYPTAAPGS

SEQ ID NO: 240017 - protein, 407 aa, unidentified
MRLFVGDDWAEDHHDVELMDAAGRVLARRRLPEGVAGMARLHELIGLQLGEDAEDAEVVIGIETDRGPWVAALVAAGYIVYAVNPLQASRYRERHGVSGAKSDTGDAHMLTDMVRTDSHQLRAVAGDSPDGGAVKVVARAHKTLIWERTRQVQRLRHQLREYFPAAVEAFADLDAPDALELLGKAPDPARAARLTRAQVSAALKRARRRDIPGKATAIMAALRGAQLGQPPAITAAYAATVRSLIAVITTLNEQVKTLQGQVEADFGRHPDAEIYLSQPGLGPVLGARVLGEFGDDPDRYASGKARKNYAGTSPITRASGKKKTVIARFIHNDRLIDALMAQAFTALNASPGARALYDAERARGTEHNAALRKVANRLVGILHGCLKTRTLYDEATAWSNRENKLAA

SEQ ID NO: 240018 - protein, 368 aa, unidentified
MFTERTGVGLDVHARSVAAAAIDTVTGEVIERRLGGDYGSVVDLARRLEAGHGPLRITYEAGPTGFGLARDLAAAGLTVQVAAPSRLLRPAGQRVKTDRTDAMLLARLTINDDIVAVRVPTMSQESARDLVRARDDARADLMRARHRLSKMMLRRGWVYPGRTTWGPAHDAWLRRIRANDVPALGSGAAAAFDDAYDAVAHALARRDRLDEAITALAADSEFTATTTRLSCLRGISTLTGFALAVEIGDWNRFTGATIASYLGLVPCEHSSGQTRSQGGITKTGNTHARRLLIESAWQHKPAYRPGPGLRAAWAKAPAVVAERADRGNRRPHRRWTALAARHKRHAVANTAIARELAGWCWSLATMDA

SEQ ID NO: 240019 - protein, 393 aa, unidentified
MRYIGIDIGSEKHFFAVVNAEGEVARKATSFFEDDVGYAKLLADLGEPTETLVAMEATGHYWQNLFAALAARGFKIALLNPLRTHRFAQEDLRRAKTDAIDALGIARFAQQKKPPATPLDDDATQELRELVHHRDRLVQELGDQVRRLHRIVDLGFPELTRYLKDLSSDLSIGILSRYPTARAFDGVPAGELANLRCGRYTVGRKLAGEILDAAKRSVGAHHGPAYRLQAEHACEDIETLKRRLSRVEPQIKDALDKHEVGKLLTTIDGIGDTTAARLIAELGDITDFDSADALAAYVGVVPGTRHSGKSAPVSQRLTPIGHAALRAKLFMPTLSATKRNAWLRRFYERLRAAGKPAKVALVAAMRKLLHAIYSVAKNRRAFVPRLSLTEAPA

SEQ ID NO: 240020 - protein, 313 aa, unidentified
MANYIGIDISKETLDVYHQVLGYHSFENRGSGFSAFKKWIDNFQGVHVVLEATGGYQRQLIEFLEGVGVLYSVVNPKRVRDFAKARGVLAKTDKVDARVLADLGITLAPEATNRPSRDVLDLNELTTRRAQLIDLLVQEKNRLEHAQGSILKDIKSLVSFITRKIEKIDEEIDKLIARSKELKKKADLLQGVKGVGATVCAILLSKLPELGTLPGKQIASLVGLAPFADQSGKLKGRRSIMGGREKVRSMLYMGTLRAIRSNPQIKAFYDRLVAKGKNKKLAITACMRKLLVILNAILRKETVWDKTMGLAVS

SEQ ID NO: 240021 - protein, 349 aa, unidentified
MTKVTIGVDLGDQYSQLYVVDAAGTCVETGRVRTTRAGLEQWFAGQAPARVVLEAGTHSPWASRALQALGHEVLVANPRKLRGLYENDSKDDRVDAEYLARVGRLDPALLKPITHRGAAAQADLAVLHARDALVRTRTQLISHTRGVVKALGGRLPRCSAEAFARRASGDVPAELQPALAPVLAQVQQVTAAIRAFDRELERRCAEQYPATARLRQVSGVGPVTALAYVLVLEDPRRFARSRAVGAYLGLRPRRSQSGERDPQLGITKGGNPFLRRLLVQGAQYILGPRGPDCDLRRHGERIAARGGKNAKKRAVIAVARKLAVLLHRLWISGAVYEPLRHSTALAQAS

SEQ ID NO: 240022 - protein, 401 aa, unidentified
MNAVGIDVSKGKSMVCVMRPFGEVVLEPFEVLHTAQSLNDLAGKLKALDGETRVVMEATGNYHKPVAFVLHDAGLFVSVVNPVLIHDYDNNSLRRVKTDRKDAVKIANYTLDKWTRLRQYLPEDDTRLALKNCYRQYQQAVAVRTMLKNNLISSLDLTFPDANKLFSSPAKSNGCEKWVDFIGDFWHSECVSSLSSDAFAKKYLKWCQKHGYNFTRSKSDTIYDCAVNAASLPKSPTSKLLIQQQVAQLKAVSQSVAAFQQEMLRLSQQLPEFDTVMEMYGVGPSLGPQLMAEIGDVRRFSSKKSLIAFAGIEPQPNDSGKIVGNDSGISKVGSAVLRRTLFLIMTVILKTQPQDEPVFQFMNKKRSEGKPYKVYMMASANKFLRIYYARVKAVMDSKHSK

SEQ ID NO: 240023 - protein, 345 aa, unidentified
MELMYYIGLDVHKQKISYCVKDSGGKVYAEGSLPATRLDLDLWMKTLPQPWSGAMEATIFTGWIYDHLKPHAAALKVAHPLMLRAIAAAKKKNDRIDASKICDCLRCDFLPECYMASTAIRERRRTLRYRNLLVCQMVQMKIKISSLLMEAGVSYNKQRLHKAGYFRELLAKNPDIDEGLVPLLRLCRETVVRLGKTESALVRSLERDSLLVERVERLMTIPAVGPITALTWALEVGDVQRFSSLKKAINCCGLCGAEKSSGNTVQRTPLSKQRNKHLQTTLIEAAKMAPRNSPELAMLYDKKKQKGNANRATLAVARKLVAYLMAVDRGQRNFRIAETSSNIAA

SEQ ID NO: 240024 - protein, 349 aa, unidentified
MLADDVDYVIGVDTHRDQHVLAVLTAAAGAVVAGEALPANARGYRETLRFVERYAAGRRAWAIEGTGSYGAGLARFLTGRGESVLEVNRTPRAERRLRGKDDTLDAARTARAALASDTLALPRSGERREALRLLLVARRSAVDVRREALTQLRGVIVTAPERLREELRGLATGKLLHRCSRLRRSSAASVDEVATRLVLRSLARRIQAATLEADELERDLLAHVRALAPALLDEPGVGPIVAAQLIVAWSHRGRLRSEACFARLAGVAPVPASSGQTVRHRLSRGGDRQLNRAIHTIVLHRRQHDAATKNYIARRVAEGKTRRDATRLLKRYLARHLYRVLNNQAPLMT

SEQ ID NO: 240025 - protein, 423 aa, unidentified
MPYRIAGIDVHKRKLAVVVADVEVEDEYQFERRWYGSNPEQLQVLAEWLIQQQVEEVVMESTAQYWKPVWGALEQYWKPSCEKREGAGRMSGTLHLAQALSNRGRRGRKRDFRDAERLLKRLVSQELTLSFVPNVEQRLWRTVTRTKYQLRRNKVRLHNQLEALLEEAHIKLSSLVSDLLGASARRMLQALADGETDPAALAALADQRLRATSAQLRDALGACTELNPVYRRLVKMALEELQLIEQRIGQLDQEMASLLRQHQDAVQRLAEVPGLGVDSAQQIIAEVGAKAATFPSAKNLSSWVGACPGEEESAGVNYSPRSPKGNRHMRRLLNQAANAAVKRKGSIFEIVYRRLVPRLGHNKTIGAIAHRLCHLIWMILYKGVRYEERGPAVCEQSKRVRTVRMIRTLRKLGYRVELQPDPA

SEQ ID NO: 240026 - protein, 307 aa, unidentified
MFVGIDVSKDRLDIHLCPSGEAFAVPRDGKGLAELVERLGALSVELVALEATGGFETVVAAALAAAGLPLAVVNPRQIRDFARATGRLAKTDALDAGAIARFAEAVRPEPRPVPTAEAQALGELVARRRQIVETMVAERNRRRHLTQPRLLKGVDRVLAVLQAQLSEIESDIDGAIRQTPAWREREDLLKTVPGIGPATARTLIAELPELGSLDRRKIASLVGLAPMNRDSGTLRGRRTIVGGRSTVRSALFMSIMVAIRHKLPLQATYERLRQAGKPPKVAIVACMRKLLTIANAIIRDAKPWQHA

SEQ ID NO: 240027 - protein, 338 aa, unidentified
MSTAILGIDIAKDTFQVTLLQAEQSRRAEFPNEPKGFAQLARWLAKRKVEQVHACLEATGRYGEALAEHLHQAGHTVSVVNPARIKAYAQSRLARNKTDKLDGDVIADFCRTQQPPAWTPPAPEIRELQALLHQLEALDKMHQQEANRLAAGVLSAVVRETIEAHLAFLDTQKQKLAQQIHEHIQGQPSLKEQFELLRSIKGIGDHTAYCLVAKDLRRYDDARAAVADAGLNPRVVTSGLFKGRTRMSKIGDANLRKALYFPAIVAWQHNPVVKPFCERLAKRGLCKMALIGAAMRKLLCLAYGVLKSGQPFDPNYQSAHKKREKAAAKPLASLVRVG

SEQ ID NO: 240028 - protein, 447 aa, unidentified
MNTRIIGIDLAVTARHRAAILDPATGQFLVKELTFTSSDADLDRLLARAQAGVTPAPHLIVILEATSMAWHPVSLYLAAHGATIFRVNGRMTKEMRRVSSPHARSDRLDGQALAQLYTTCRARLVRLQVPSGEELTFQRACREFAQWREVATAITNRLTAYDNWAWQGLTHLVPAAALNWVRTAWYDPWTVVATGPTALSALWQQTAAGAEDDAAWIPAWVARASALTRLFGNPRALDYPGLMATIRRNLVAQAYADQLQQTLYTTVIAPLYQRLYPDCLLTSIYGIGPESAAIYMAFIHSITRFPSVARFRQWTGMVPASDQSGTAQNKGLPLTQAGPNIIKATLYLNANVARQWDPQLAQIYYTQMVGYGKHHTQAVCACASHLANRIYTVLKENRPYELRDLEGKPILAADAHRLIQERLHVPEEVRQRTTKRWRRGRHLMPTQ

SEQ ID NO: 240029 - protein, 304 aa, unidentified
MTVQAQVAVYSQVFVPREYDVFGGLDVDHHSIAATFTDHQRLMQSLRLPYSAGQLLNYVGKHFPGQRLVFVYEAGPTGFGLYDELEAAGYPCLVVAPPMVPRAPGQRVKTNRLDSRKLSTALRGGELKSIHVPAPKYRELRHLVQLRDTHVQQLNATKCRTKALLLYEGIAFPSDEGKEKQWSQQVVNELLDLPCSESVRFKLDQLIGTLHFNFNSAAAEQKQIRHFCQKDPELRQSLAWLKSLPGIGEIIATHLVARLGDPTLITNVRQIAGFLGLVSSEHSTGDKQNRGEITRAGAAACATS

SEQ ID NO: 240030 - protein, 411 aa, unidentified
MIYLGDDWAEAHHDVYVCDEHGTRLVQRRLPEGIEGVTVLHGLIAELVDDPAEVVVGIETDRGLWVQSLVEAGYQVYAINPKAASRYRDRHTLSGAKSDPGDAKMLAELVRTDRHNHRLVAGDSDLAESIKVLARAHQNLIWDRTRATNRLRSSLREYFPAALDTFDDLADRDALAVLVKAPTPAQAKALSVAKIRTALRAAGRQRNIDTRARQIADSLRVDTLHAPDVVVSAFAATTRSTVAIITAINTQIAVLDAELATHFEQHPDADIYLSQPGIGVILGARALSEFGDDPNRYADAKSRKNYAGTSPITRASGNRRVALARHVRNQRLADAIDRWAFCSLSTSPGARAYYDQRRQAGDSHHTALRALSNRLVGILHGCLRTHTPYNEHTAWAHRPENQLIHHTEHAA

SEQ ID NO: 240031 - protein, 363 aa, unidentified
MTMLAEHVDGVIGVDTHRDTLAAAAVSPIGAVLETTDAPAHGRGYRRLLDVARQHIPGQRYWALEGAGSYGAGLATFLENAGERVVEVCRPQRPAVRGGRKTDMLDAVRAAREALSTEHVIQPRTRGEREALRVPPATRHGAVLASTAAINQLKALTVSAPEDLRADLRKLSRPAQVSRCAQVSRCASLRDRPAQEIEHRMTVRPLRSTAERIKNLQDEARQLEREILQLVRQEAPELLDLVGVGPIVAAQILISWSHPGRFRSEAAFASFAGAAPIPASSGLTNKHRLDRGGDRQPNRALHTITLTRMRLDPSTKTYVAPRTSEGKSPRDAQRCLKPVICRQLFKILERRSRPSTEELDQAA

SEQ ID NO: 240032 - protein, 457 aa, unidentified
MPKKRQNREVKLPVLRPDAAGVDIGAEEIFVAVPADRDSEPVRRFATFTQDLNALADWLTACHIHTVAMESTGVYWIPLHQILEGRGFEVYLVNAQYVRNVPGRKSDVSDCQWIQYLHSVGLLRASFRPPAEICAIRSLWRHRESLIQMASQHTLHIQKALDQMNLQIHQVLSEITGWSGLRILDAILAGDRNPVALAKLCNWRVRTSRDIVAKALEGDYRPEHVFTLRQSLAGYRYYQNLIAELDEEINKYLRDLPKASEAKASPPPRTKTRVYQKQHNDPAFDLRGELYRIVGVDLTDIPGINAVTAHTIISEIGTDVSRFRNASAFASWLGLCPEKQVSGGKVLYTKTRPVKNRVANALRMGAHSLHHANNYLGEFLRQMRRKLGAAEAVTAAAHKLARILYHVLRTKEACNESVFLRHDREAIKRAEERLRKQAAKLGFQLAPSRNMKVRHSL

SEQ ID NO: 240033 - protein, 456 aa, unidentified
MAPRPKSNLRKSRSTSPAPPVLHPHAAGLDVGARQIYVAVPPGSAPRPVRCCNTFTEDLLAVRDWLQQCGVTTVAMESTGVYWIALFQILEAAGLEVVLVNARHCKNLPGRKTDVQDCQWLQYLHAVGLLRGSFRPAEQVCAVRSILRHRESLMDGAARCVNHLHKALTQMNIQLQHVISDLTGVTGLAILEAILKGERDPVALAKLKDHRIQASREVLAKSLRGDWREEHLFTLGQSYELWKTHQQLIGACDAQIAAMLGEFDTRAEKEAALAPARTSHKKPQKNEPQFLAREECFRVLGVDLTAVPGFQTPTVLVLCCELGPTFAEKFATAKHFGSWLGLCPDNRITGGKIYSVKTRDVKSRVAKALRLAAQNLGRAQNYFGDVYRRWKARLGAPKAITAMAHKLARVLWHLLKFKQEFDWSVFQKEEEKMKRQKLARLHNLAAALNYQLTPLA

SEQ ID NO: 240034 - protein, 308 aa, unidentified
MTLPTYFVGCDVGKTEIVVYSSRDQTITTLVNEPISLARFADSLDPGCLVVCEATGGYEVALLDALVAADRPAHRADARKVKAFIRSLGTLAKTDAIDARALARYGQERHDRLQRWVPGDTEQLALHALVMARRDIVADKTAWNNRQKAPGAKAAYTLIAPILTALDDQLAAINTAIASLVQSGHLATRARVLQAIPGIGAVTAHSIVALMPELGTLDRKQAASLAGLAPHPKQSGQTNAYRRVRGGRPILRQAMFMAAMSATRHNPALKAFYQRLIAKGKKPIVALTATMRKLITIANAKIRDAQII

SEQ ID NO: 240035 - protein, 436 aa, unidentified
MKHTQKSSATPAEAKEWDAGIVVGIDPGLDQHGVVALVAGSCYRLERRMFPNSIAGMQMLAGRLQEWQHRGQGRLTIAIEEASAYGEALECYLSQAGFQVVVVNELKVARFKDAIGADASDLDDAEAIARFVMVQPDQARTPARQAVQADTHGPVHRRLRQWSRRYERWTREHTATCNELHAVLRMAWLADYQRFFSRIDGAAALAFWQQYPTPVEVAAADDQQIAALLRHASHGRLATKTCAARARDIRETAVLMVAAFGRNDPNRWSAWAQDIRLLAGHLAYINAGRKQLEASIQEALESIGSPLPSFKGIGPILSAMIHGETLSIRRFGTADQFARYNGTAPREDSSGRQPRHVKNVRCNRRLRQAFMQLALNAPRYQVASRAYEKHLEARGITGGAARIRLARRLSNIVFAMLRDNQPYDLELYMNKKKPAA

SEQ ID NO: 240036 - protein, 433 aa, unidentified
MHDAVLSIDVSLDQLDVALRTDDTGWQWPHRAYANNRPGFEKLKAELLSELSPLAAAQLTVVAETTGPYWWPAFYQVAHDPELASYQPHLAVLNPQHVKGFRKALPQQDKNDLLDPQLIDRYYQAVGVKHFYQFNDRYLQLRFLSRAYARLIHTLAAEKAYLRSLLFIYASDYQRLEPFSDLFGATSLAVLDEYDDIQRLADMPLDDLTAQLRLLSANTLPDPQSNVQTLQQVAADSYRLPQALAASLQLILQHSIAHIRFLSDNQKSMRLLIEQQLQQLPEANLALQHRGLGPILVAGCLSEIQDTRRFITGTKFDRKLKRSRPRTYRDGQAAVAKLAGLWWPQNDSGRFQADERHLARERNPYLRYWLVQAAYTLQCYQPEYTAFYWRKFHQVQKHQHKRALILTARKAVRLIFALLHKGQQAGLKEVPTA

SEQ ID NO: 240037 - protein, 373 aa, unidentified
MSFTSDTILVALELSNSLWLVGTRQAGARVSQMHRVSAGDTAMLMRLLDELQASGRGQGTPSPIAVCFEAGRDGFWLHRLLTAQGITAYVVEPTSILVNRRAKRAKTDRLDAEGMLRVLAAYIAGDTQICSMVQVPTPDEEDGKRVHREREYLVQERTRIENRISALLVTQGIRSRPSLRSWERDMALLETGDGRKLPQHLASELNRLRRRLVLVRELISELDTERDEHLIATSGDAITTKVTALSEIYGVGDNFAAVLTREVFYRRFGNRKQLASYVGLAPMPHQSGNVDKDRRIGRAGNARARKTLVQAAWLWLRYQPKSELAAWFHKRVGDLKGRARRIAIVAMARKLLIALWRYTESGEIPAGAVFRSA

SEQ ID NO: 240038 - protein, 394 aa, unidentified
MKLVGIDVGKNSHHFCVMDKETGEFNVTPTSFSNNKEGFDFLINSLKPYSKKSTLLGMEDTGHYHVALLKFLLSNGYTVALINPKTTDLTRKMEGGITKNDKLDTITICDVLDTPERKKQYRITKVDRFDFYEQRQLTRHHHNLKEELNVYCNRLQKSIDLVFPEFNTLFGSKYGIVYMNLLKTFGSAEIIASTDIRTIRKCFEIKGRGNRISLTPEKLKECAKNSIGISSEVETIQIKHLVSQIMLIKEQIAEIDKKIEEFSITNNSPILSIPGISHFSGTSILAELGDIGNYSKPSQIIKFAGVAPYHYESSQYNAQHTGITKKGSKYLRKTLYQIILPVINNNPVFKKYYLLKISQGKGHRCAQGHCIRKLLRIIYHLLETGQSFDPALLR

SEQ ID NO: 240039 - protein, 351 aa, unidentified
MEEYIAFDSHKHYTWVEHEQVKTGRIRQYRLEHTPGAIRRALQGSKPGTAVALEATANWYWIVDEIEQAGLKPRLVHPRKAKMMMGLINKTDKLDAHGLNRLQRNGTLPTVWIPPGRLRELRELTRTRVVLVAQRTRWKNRLTATLAKYGVPASEYSDPYGKGARAELEERIERLPEQTRWAARQMLAQLDTLSEQILQFEGRLKELVEVTPPMQWLMTLPGVGVILAATVALEIGEIERFPSAEHLASYGGTTPRVHASGDRVRYGRTRPDVNRYLKWAFAEAANSVAVNHTRCPERHVSQLYLRLRLRKGHGKAIGAVARHLAEAAFHVLSRQEAYQDPTVRPGRTREV

SEQ ID NO: 240040 - protein, 355 aa, unidentified
MSSEKYIGLDVHQATISVAVVDSQGKVVMESILETKASTLLEFLAGLRGSLFVTFEEGTWAAWLYDLLKPHVTEVLVCNPRKNAALKQGNKSDQIDARKLAERLRLHDLKPVYHGETGVRMLRELARSYLTVVKDLSRVMNRLKALYRSWAIPCAGRDVYYGRHRSQWLEKIPEAGTRRRAEQLYQQLDLLRRLRQQARRELLGESRKHALTAKLRQIPSLGPIRSALAVALIQTPHRFRSKRQLWTYSGLGLETRDSGEYHYVRGQVRRRKKQATIRGLNKDYNHDLKSLFKGAAPWASVKPGPLQEFYQRSLAKGIKPTMVRLTLARKIAAITLTLWKKGEDFNIHKLNSQAA

SEQ ID NO: 240041 - protein, 320 aa, unidentified
MTTFDSQVVVGVDVAKDEIVVHRRDLEKTQIIANETPALKKWLRSLPSDSAIAIEATNIYHVETVELAYSMGHRVFVVDPGKLSKYRDSLGKRAKTDASDAALLARYLAHEGAALRLWSPPPEVYTELKNLLHRRAKLVSIQVTLKQSWGNRADLPKEFGAVIDSLKALDQAIQDLMKDILNKAGLMPQIKRCEGIEGVGFLTATAFLTAYMRGDFASSDAYIAYLGLDLCVRDSGKKTGRRRLTKKGDPEIRRLGHNASMAACRSETWKPFYQRHLNSGKARTQALVILTRKLARVAFALMKNQTDYRPNSIFGASPQT

SEQ ID NO: 240042 - protein, 411 aa, unidentified
MRVHHNVCCGIDVHKKSVTACLMWGPADKEPEFEIRRFGTMTRDLQKLAEWLKQAGCEAATMESTGSYWKPVWNVLEGQIPRLILANAQHVRALPGEKTDRKDGKRLAELTRHGQVRPSYVPPRAILELRDLTRYRSKLLSAGSSERNRIQKVLEDANIKLGSVLSDVFGLSGQKMLQQLVKNDTVDIANVIPLAHWKLKPKMEAIEQSLEGKLTDHHRFLVKASLEHMRFIEEQLKRLDEEIQRRLQPYQEEYALLQTIPGIKETGAARILAEIGADMSPFPDGDHLSSWGGVCPGNNESAGKKFQSKIRKGNVHLLSALTQCAWAATKKKDCHFRNKYYRLKSRRGSQRAIVAVDHAMLKCIYVVLSQRKPYEEPKPVSLTEAQKQRKASSLCRQLRALGYDVKIQQTA

SEQ ID NO: 240043 - protein, 347 aa, unidentified
MRFYTNSHPYYCGIDLHARTLYVCILNQAGEKVVHREIKADPQALLGLLEPYIGNVIVGVECMHCWYWVSDICEDNGIDFILGHALYMKAIHGGKAKNDKIDSYKIAILMRDGTFPLAYVYPKEMRATRDLLRRRCKLVRFGADLKAHVKNTLSQYNEAPHNLNLRYPKAREKMRDVFEEQDVQQNIDLDLNVIGHLSAELARIEWHLEKQAKQHNPKDYYLLQSISGVGQILALTILYEIGDINRFPSVQNFASYARLVKCKAESAGKSYGTQGNKIGNAQLKWAFSEMAVLYLRGNDNAKKYLLKLQKRMSKAKALSALAHKLGRCVYFMLKNKQVFDEKRLLRG

SEQ ID NO: 240044 - protein, 335 aa, unidentified
MEFKFFIGIDVSKDTLDIGLLNAENSEIVNHQQVSNNDSGIATMLRWLEEHKISIENSLFCLEHTGMYNYPLLQFFSKQGASVWVETPIQIKKSLGLQRGKNDKVDAIRIAQYAFRLRDQAKLWHPAREVIDRLKHLTALRERLVETRKRLLTPVEELFKIGSDAMAKVLERAMRKTMKALEKDLEAIEAQMKDIIDKDDNLKSLYKLVTSVVGIGFVTAVNLIVCTNEFKLFSSHRQFACYSGIAPFEYRSGSSIRGRTKVSHMANKKMKRYLHMASLTGIKLDEGLKNYYNRKVQEGKNKMSVLNAIRNKLVARVFAVVNRGLVYQKKYLVLS

SEQ ID NO: 240045 - protein, 385 aa, unidentified
MLYVGIDIAKNKHDLACISDTGQILIKHFKFTNSHHGFSELKVRLNQLSPITTNILIALESTGHYNYNLVAFLRNLGYTIFSYNPLLIKEFAKAQSLRKTKTDVKDALLIARKLRSDDATQHHQIDEKMDDLKELTRFQNRLIQARSKNKNLYVRLLDIVFPELHSVVGNLHNNYVYELLSKYPTPAKIKRAHFSSLLKINYLTVDKAKKIQETASLTIGRHSPALTLELVQLIETIRHYDKQIAQVQEQINDMMVELDSPITSIAGIGNRLGAIILAEIKNIHNFKNPAQLQAFAGLEPAIFQSGKMDNTGGMVKRGSSYLRYALIQAAKLTCIYSPHFKGYLKLKISQGKHYNVAISHAAKKLIRIIFYLLKTNQTFDEAKLR

SEQ ID NO: 240046 - protein, 290 aa, unidentified
MDDVSTEQTKKMTVGLDLGDKYSYLCVLDTESGALVEEGRLRTTPDDLHRRFDSAEQMKIAIEVGTHSTWISRLLEECGHEVLIANPRKTRLIYGDKRKTDKLDAQKLARLARVDPELLYPIEHRSKDSQTHLALIHSRDALIRSRTQLINHIRGTVKSFGARLPKCSAESFHKKVAENQLPHELAEALEDVVATIGSLTERIRDYNKRIERVCEESYPEETGLLRQVPGVGALTSLTFVLTLEDPRRFEKSRSVGAYLGLVPGKDQSGESDPGKRISGEGDEMLTLGFW

SEQ ID NO: 240047 - protein, 461 aa, unidentified
MNKQKPAGKQKRSVPKRMDWKALEIVHPDAAGIDVGGSEHWVAVGPDRDPEPVRRFGCFTADLHEMGRWLVAKGVRSVAMQSTGVYWMPVFEVLEQQGLEVYLVNAQHTKNVPGRKSDIQECQWLLKLHAFGLLNNSFQPTDEIRIARTLWRQRSSLVAEAASVIQRMQKVLTEMNVQLSNVLSDVSGMSGMKIIEAILEGERDPWGLAALVEPEVKATPDEIAKSLEGNWRAELLFVLRQHIELYRIYQEKITDCDFQLRKHLGSLGSKVDLKTQPIGDRPRGKKISKNAPGFDLRTELYRITGIDWSQINGIDVLTAQTVIAEAGADLSAFPTEKQFASWLGLSPTNEQSGAKILNRRTRRVVNRATVAFRNAALTLLRSQSYLGAQYRRLRTRLGAPKAITAMARKLACLFYRLIKHGQPYVDKGTEYYEAKYREQQIQTLAKRAHKLGLQLVIPKTA

SEQ ID NO: 240048 - protein, 348 aa, unidentified
MRFYKQPHAFYAGIDLHARNMFTHILDSAGKTVFEGDLAAGPEAFLSAVAPYRAGLVVGVECMFAWYWLADLCEDEAIPFTLGHALYMKAIHGGKSKNDRIDAAKIAGLLRGGMFPMAYVYPRAKRATRDLLRRRCFFVNQRSQLIAHVVNTNSQYNHPPLTARLCYPRNRTEDFADRFADPATQLSVRADLKLIDHFDEQIDDIERVVLKTAKIDDPVSLAFLRTIPGIGKILSLVMLYEIDQAARFPEVGNFLSYARLVRCEHESAGKKKGSGGKKIGNAHLKWAFGEAACLMLRAMPDAKKWLARQERKRGKKKALSVLEAKIGRTVYHLMRKQQAFDAKRFFAN

SEQ ID NO: 240049 - protein, 348 aa, unidentified
MAEQRSYTREHIYVGVDVHKATYTVTCVCQRQIVKTATVPAEPARFAESLSRWFPGAILSSAYEAGFSGFVLHRALTTAGITNLVVNPASVAVAANDRVKTDRRDSKRLAIDLADGRLRGIAVPTEAEELARLLPRTRAQIVEHRATITRQIKAKLHQFGLIPPASRRLMSSRYLREITTWPLPPELCASLTLLADQWRFATRQLLELRRLLRAQATAQAALETVYRSAPGIGEVVARTLATELGDMTRFPNERGLCSSTGLTPSEYSSGASIRRGHISRQGASRLRHVLVETAWRALPRDPALQEICDRIAAPRGKQRAIVAIARRLIGRIRACFRHGTLYAVGTAG

SEQ ID NO: 240050 - protein, 339 aa, unidentified
MKKSDCPTYLGIDVSKESLDCCLYNGTEHKTRSFNSNKLSTVQKIISHFKISPDSCRVVLEATGVYHSAAFIGFTSQGFDVAVENPLRIRSFATMKNLLRTKTDPVDAKTIAEYGFANNPVSTKPKEAYQCKVVARLKLIGFFKKLIAQNRNHIEALNNNSFECNATSLITHVKNEINHLNVTINEIKSDIEKILTKHCPELYKQYKSIPGIGPTVAGAIICFYGDFSGFSNSKKAAAFAGLCPKVCKSGSSVDKKGSISKKGNSMLRTLFYMAALSAARCNDTCQEVYLRLRQAGKPAKVALIAVANKLLRQAMALARKGESFIENYKEISPCAAKTT

SEQ ID NO: 240051 - protein, 537 aa, unidentified
MEAIIERCCGLDVHQRSVVACILSGPAESKPTKEVRKFGTMRHELGELREWISQQGCTHVAMESTGVYWMPVYKELEGSVELVVGNAQHLSKVPGRKTDVLDSEWLAELLRHGLIKKSFIPPPPIRELRELTRYRRKLVQSRSGERNRLQKMLETANIKLASVMSDVFGVSGMAMLRALVAGEQSREQIARLARGPLRNKRELLELALDGRMEEHHRYLLQVQLERLEQLEAAIGQLDERIETKLEPYRDQYERLKQIPGVSRVVASVIIAELGVDMNVFPSKQDCASWAGVCPGNNESAGKRKSARSRRGNKHLKTALVEAAQGAVRSKGTYLRSKFHQLRARTDYKTAAVAVAHKILTAAYYMLATGEDYRELGETYLEQKNPQQVADRLVRRLEKLGYSVELKHGDYEEAKESKCPAQVVPRPAERAQQASEVNGAKVEGEPAQTRKETSTEAAVANGIEPNGQQGVEVVGEQHEEQMSSPSCPVASEPRANEYVCVPPRRDDVDCPSVFLVTSNSQAPVPSEPEQAGESAPDN

SEQ ID NO: 240052 - protein, 339 aa, unidentified
MGYYAAVDLHGDNGYYGVADETGKRVFEKRIANDLPMVLKHLEPYRKQLTNGVVVESTFNWYWLVDGLMDNGYQVHLANPAAIEQYEGIKNTNDETDTFFLIELKRLGVLPTGYIYPQEIRPVRDLLRRRMILVQQRTAHILSYQSLVARQSGQAISANKVSKLRVEDLAEIYEDPNLRLMGETSIDVIRFLTGKIRVLEKKIEEQSRLTPAYEKLLTVPGIGKILALTIMLETGPIGRFADVGKYTSYCRCVRARGWSNGKAKSTHNRKNGNRYLSWAYVEAANFIRRYCPEAKSWYQRKAAKTKVVVATKALSSKLAKACYFIMRDQVDFDVKKIFG

SEQ ID NO: 240053 - protein, 352 aa, unidentified
MTRITTIGLDIAKSIFQVHAIDAGDRVVVTKAIRRAQMLAFFGRLEPCLVGIEACGSAHFWAREIGELGHTVKLMPPKYVKAYVKRGKTDAGDAEAICEAVTRQTMTFVAVKSAGQQALAMLHSVRETLIGQRTQAINALRGHLSELGVIAPQGLLGQAELARIVRDDDDARLPLIARVALKLLVAQIEAVSGRIAETDAALRAEHQSSAKSRALETVPSIGPVIASALRARVGDAHGFENGRHMAAWIGLVPEQDSSGGKVKQRGISKKGDRYLRRLLVSGAMAMVQHAQRKPDKYPWIAKLLGSKPPKLVAVAVANKTARIAWAIMARGGTYDPGFHAKRTAAAVLAAPV

SEQ ID NO: 240054 - protein, 333 aa, unidentified
MKKKWFIGIDISKKTLDVVIYDACKKRSDVTNYRKVSNSEEGYRELLSWFKSKRMPLSSVVVGMEHTGAYGFDLRLFLENHGIDYCAFMPLALKYSLGLSRGKNDKVDAERIAAYTYSRREQLVYAKLAGSSILKLRELSNERKLLVRQRAEHEAVLTEMKGRESNGTYTRCLRIKDMLDREIDDIEQEMDALVKSSPELANNYRLLTGIKGIGSVNAIATIVYTDNFKGFETARQYACYLGIAPFEHTSGTSVRGRTHVSRIGAKQLKADLSQAAKSAIVWDQEIKAYYKRKIKEGKAFGVVLNAVKFKLVCRMFAVVRRGTPFVELMTYKN

SEQ ID NO: 240055 - protein, 375 aa, unidentified
MTMMHHRDIRYLGLDVHKATISVAIAEQSGAPTTYGRIPNDPSAIRTLMTRLGGPQVELRVAYEAGPTGYALHRQLTKMDIPCMVVAPSLIPRQSGNKVKTDRRDALKLARLLRSGDLTPVWVPDEADEALRGLVRARADAKADQLRAKHRLSKFLLRQGCWPPIGVRNWSQRYFTWLHQLEFEHLPDRVVFADYLAEVTAAAERIKRLEAALHQCAQSSSQVALIRALQAFRGIGFLSAVTLVAEAGDLRRFRTAPQFMAYAGIVPSESSSGGKQQRGSITKTGNSLLRHVLGEAAHHARHAPRVTSKVKQRQTDLPTEIIDLAWRAQVRLHTRYRHLSGRIGALKALTAIARELAGFVWAAGQVLQKEVPAAA

SEQ ID NO: 240056 - protein, 346 aa, unidentified
MKLSACGIDLAKAVFQVHGVDLHGKPCLRRQLRRAELLTFFVNLEPCLIGMEACGSAHYWARKLSEMGHTVKLMAPQFVKPYVKTNKNDAADAEAICEAVTRPNMRFVAIKTEQQQALLAIHRARQGFVKARTAQANQIRGLLAEFGIVIPKGLCNLGPRLGLLSDESTGQLPGSFCTLLQRLAENLKQLDLQVRELEKEIGLWHAHNQTSRRLAEIPGIGPITATALVASIGDARCFKNGRQLAAWMGLVPRQHSSGGKQVLLGISKRGDGYLRALLIHGARAVLRHAEHKVETATSWLGHLLSRRNKNVATVALANKNARRVWALLMYDERRFRADYVPTAAGT

SEQ ID NO: 240057 - protein, 351 aa, unidentified
MDKGITVGMDMGDKNHSICVLDADGAVRERTTLANTAETLRKYFGALPPCRIALEAGTHSGWISRLLEGLKHEVLVGNPRKLRVIWDSDDKNDARDAEMLARIARFDPQLLHPIHHRGQAAHSDLAVIKARDMLVKSRSMLIAHARGAVKTLGQRVSPCSAEAFHTRLLDEMPAELRPALEPVMKSIEELTVRIRHYDQLLGKLCAQDYPETEGLRAISGVGPVTALAYVLTIEEHSRFAKSRDVGPFLGLVPKRDQSGQTDKQLHITKAGDSYLRRLLVGSAQYILGPFGPDCDLRRFGLKLAERGGKNAKRRAVVAVARKLAVMMHHLWTSGEAYDPCYRQTKKQGKAA

SEQ ID NO: 240058 - protein, 408 aa, unidentified
MEAIHARCAGLDVHKDTVVACARIGAGRKVEQSVATFQTTSTGLLALSDWLAVHRCTHVAMEATGVYWKPVWHVLEGSFELVLANATHVRNVPGRKTDVNDAMWIADLLAHGLIRGSFVPPEPIQQLRDLTRTRKQLVREIARHTQRIQKTLEDANVKITGVITDLLGVSGRAIVKALIQGETDPERLAALARGRLIAKRTALSEALRGRVNDHHRFLFKLHLGQIEALEQAKQELDTRLGEILNPFHAQAELLTTMPGVSAVVAEVIIAEIGIDMSRFPTAGHLISWAGLCPRNDESAGKRRSTRLRPGAPWLKATLVQAAWAAVKRKDTYLRAQFLRLKTRRGPKKAILAVTASMLTATYHMLRDRTAYHDLGPYHFDQRDKIKLVNRLIRRVTDLGFQVELRPVA

SEQ ID NO: 240059 - protein, 371 aa, unidentified
MNSIVYVGMDVHKESYTLCCYCYDTDKVEYKQTIPSDYKLILKYIESMRKVYGEDATFVCGYEAGCLGYSLYHQLKEHAVDCKILAPTTMAITNTNRIKTDKRDAANIARCLAFHTYSEVYVPDDEDNSVKEYIRMRDDQKLMLKKIKQQILAFVLRQGKKFEGGKTYWTIAHMKWLKNLGLRGVAKETLSEYLVTYEYLVEKIERLDNRIEELASLEKYKEKVKNMGCFLGIKTHTALSMIVEIGDFNRFGKAPKFAGFLGLVPSEDSSGDDKNRYGITKAGNSHLRRLMVEAAQSYTRGTVGHKSIALKQRQQGCSADVIAYADKANERLRRRFYKMTLNKGVNRNVATTAIARELACFMWGMATGNIG

SEQ ID NO: 240060 - protein, 360 aa, unidentified
MQGHAGFSGSDLVVVGVDTHKAFHVAAVIDSVGGLLGSTTVPATAAGYAQLVAWARSFGRLERAGVEGTGSYGAGLARHIAERGIAVIEVNRPDKSTRRRRGKTDAIDAESAARAVLSGYAHGTAKSADGPVEMLRMFKLAKDSAMKSRTQAINQLRAVLVNTEPSLRESLSGLGTTRLVQRCARLLPEDGGDALAASKYTLRLLARRIQNLTAEIEDLQREIHRVVTAHRPQLLEGYGLGPDTAATLLITAGDNPDRLRSEASFASLCGVCPVEASSGNTSRRRLSRGGDRRANAAIYRIALSRLRWDQRTQSYLQRRIAEGKTKREALRCLKRDIARELYPLLLGQPNTGPERLPEAA

SEQ ID NO: 240061 - protein, 433 aa, unidentified
MLFVGDDWAEAHHDVELMDSAGRRLAKARLPEGVAGIARLHAMIGEQLGEGTDEAEVLVGIETDRGPWVAALVAAGYTVYAINPLQVARYRERRSVSGAKSDAADAHTLADMVRTDSHQLRPVAADTAAAEAVKVVTRAHKTMIWERTRHTQRLRHALREYFPAALEAFEDLDAADTLELLAKAPDPASAAKLTITQISAPLTRARRRNVAEKAARIQAVLRAEHLGQPEVITAAYAATTRAAVAVLTTLNEQVKILQGQVDAHFGRHPDAEIILSQPGLGPVLGARVLAEFGDDPDRYTDAKSRKNYAGTSPITRASGKKKVVLARFVHNDRLIDALMTQAFSALNASPGARAYYDQLKARGTEHNAALRQLANKLVGTLHGCLKPAPATTKRPHGRIMSRRPHNGTPPRKTPYTVPKLITRWLTWGFGDFT

SEQ ID NO: 240062 - protein, 351 aa, unidentified
MDNDITRVVGMDVSDRYSHLCVLGLDGEVEEESKVPTTPHGLRRRFSEMDRVRVALEVGTHSPWMGRLLEGLGHEVILANPRKVRIISQSNDKSDRVDAEMLARLARSDPKLLCPVQIRSEERHAGLVVIRSRRILVETRTKLINHVRGVCKSLGVRLPKCTTACFHRRVVSFIPDDILPSLEPVLRQLDGIEGSIRDCDLRIQEMASEIDGVEVLTSVAGVGALTAVTYVLTLGDPSRFRRSREVGSYVGLRPKRGQSGEVDKQLRVTRAGDKYLRSLLVGSAQYILGPFGPDSALRRWGLGLSERGGKAAKKRAVVAVARKLSVIMHSMWIRDEMYQAFPESKIEEKAA

SEQ ID NO: 240063 - protein, 479 aa, unidentified
MHETFATLRRRRHRGRYSLGAIKPDLKLDPGFLEHLRLSPRAVIGPGARFLEFFFTGPYADDATQEEEEMELLHRRCCGLDVHKETVVACLRLVSDGQVTTEVRTFQTTTADLLRLSEWLAANECTHVAMEATGVYWKPVWHILDDGEFELVLANAAHVKNVPGRKTDVNDAMWLAELLAHGLIRASFVPDTQTQEMRNLLRTRKQLVREQSSHVLRVQKTLEDANIKLDSVLTDLMGKSGRAMMEALIAGETNPTKLASLADPRVKASHEEFREALRGRVTKHHRFLLRLHLNQIDALDAAMATLDAQVEANLGPFRTAVDLIMSIPGIKNLSAHVIISEIGIDMSRFPSDAHLISWAGICPGNDESAGKRRSNRLRKGAPWLKTTLVQCAWAAVKKKNSYLQAQFYRIKVRRGPKKAIMAVAASILTAIYHMLKDGTMYQDLGCNHFDRRSTDQQKNRLVKRLTDLGYAVEIKPLAA

SEQ ID NO: 240064 - protein, 311 aa, unidentified
MDNFYFIGVDVSKKKLDFCVLFEGKVLREEQVSNHQQAVARLIGELKNDLEMDNEQFLICAEHTGQYTFPLVCACKSVECKLWLENPSQIKYSSGMQRGKNDKVDAKRIAIYASRFGDKVKYYDRPSEEIERLKQLERERALYVTDLAKYKGQMYDQKDFMPAALYRKKTKRMKGLIQELQAAIDAITAEMEKIIGSTEVLARQMELLMSIDGVGKVVALNVIIETEAFSRFDNPRKFCCHAGVAPFSYTSGSSQHSKNKVSHRANKNIKKLLHMAAVSVTHRKEGELKAYYMRKVEEGKNKNVGNQCVTC

SEQ ID NO: 240065 - protein, 309 aa, unidentified
MEIVVGIDVSKERLDVAILPQEEVFAVGNDHAGIDELVARLKAIGADAIALEATGGFEMLAVAGLSSAGLTVLVVNPAQVRAYAHAIGRRAKTDPIDAAVIAAFVLATKPEIRPLRDAETQALSELVARRRQIVQMVVAEENRLRMALAKQAQKSIKRLLKALRRELESLDADLDSHIRKSPVWRVREALLTSVPGVGATTARTLLAELPELGSLDRRQIASLAGLAPWTRQSGKWKGKSFIGGGRGKVRAVLFMAALVASRYNPDLKAFRDRLVAAGKPKIVAIVATMRKLLTILNAIIRDGRPWQNA

SEQ ID NO: 240066 - protein, 346 aa, unidentified
MLYAGLDLSRKRLDFHLLDVEGETVELGSAPPDADGLRGLSQRLDRHRAPIRAAIESMNGARFVHDRLELAGWQVEIADAQKVKGLAPLACKTDRIDAWVLAELARRDLVPAIWLPDPCVRAERERARFRLHIVRHRSSLKQRVHAVLIAHGKPCPVSDLFGGSGRRLLARLALPEPWAGTLEASLRLIDELDREIRDCERELRRLGADHRYVPLLLTMPGIGWVLAYTIAAELGDINRFPTPRKLAGYTGLCPRVYQSGESDRRGPLAKQGPRYLRWALVEAATHACTHPAYRDRYQRTKQRLGRQRGAKVAQVDLARRLAEAIWHMLTRNQPFAPAGATDPLAA

SEQ ID NO: 240067 - protein, 343 aa, unidentified
MNAFYYIGLDIHKKVIAYCIKALDGRLIGQGKIDADRKSLGEWVQGLPGPWIGAMEATIFTGWIYDFLKPYAVDLKVAHPEMLKAITAAKKKNDRADAEMIADLLRVNLLPECHMLSEEIRELRRILRYRNHIVRTAVKMQNKMSGLLMEVGASYSKKRLHGKKYFNGLLERVEEIPHSVKELLKLSRASFEMFSAVQKRLVVALRTNSLIRDRVQRLMSIGGIGEVTALTWVLEIGDPERFGSIRKAISYCGLCSAQKESAGKEQRGPISKKRNKHLQTMLIEAAKIAPLWNPQLAAVHERELKKGNRNRATLAVARRLVAYMMAVDKKQSDFMLREEEKAA

SEQ ID NO: 240068 - protein, 349 aa, unidentified
MSQNLNSAVTVIGIDIGKNSFHVVGLDNHGAIVLRQKWSRGQIEARLANLPPCLIGMEACVGAHHLSRKLQALGHDARLMPAKYVRPYSKGQKNDFRDAEAIAEAVQRPTMKYVATKTVEQLDLQALHRVRERLVSQRTGIINQIRAFLLERGVAVRQGLRFLRAELPRILATPPEVLSPRIVRVISDLAEDWRRLDDRIDQLSSEIAVLARQDAGCERLMSVPGIGPIISSAMVAAIGTGDAFSKGRDFAAWLGLVPKQMSTGDRTILGKISKRGNRYLRVLFVQAAWVVLIKPMSWDRHGLKRWIEAAKKRLHRNVLAIALANKLARIAWGVLAGGRTFEANKLQAA

SEQ ID NO: 240069 - protein, 456 aa, unidentified
MEVPLAKQSHRRCDQLPVLHPDAAGIDVGASELFVAVGADRDPQPVRRFPTFTRDLHALADWLQRCGVRSVAMESTSVYWIPIYQILEARGLEVCLVNAQHVKNVPGRKTDVSDCQWLQYLHSVGLLRASFRPPGAICAVRALWRHCGSLVQMAAEHIMHIQKALDQMNLQVHRVLTEITGLSGLRILDAILAGERDPLTLARLCHKRVKSSESTVAKSLEGDYRPEHIFALRQSLAAYRYYQQLVLETDQEIQRQMVELEAANNALAKMPKRTKRLPYQRQGHEPRVFDLRSELYRIFGVDLTNVPGISAMTSQTILCEVGTDVSRFRNASAFASWLGLCPERKISGGKVLFTKSRRVRSRVAIALRLAARSLHHAKDYMGEFFRRICRKLGKPQAITATAHKLARIVYHLLSTREPYDESVFHKCEEEALKRAEMRLRRHAAHLGFRIIPAAEG

SEQ ID NO: 240070 - protein, 339 aa, unidentified
MTTPFSTVESAPQGQLSNPAYSIVGVDVAKRKLDLYLLDKNEFLKIPNQTEDITRLFTSLSKNSQRPLLVAMEATGGYELTLLNALVAANIACTVLNPVRVRQFALGCGLLEKSDKIDAVIIAKHAHTRTPRLYVPREETSLQLSEFCTHRERLLAAFQQEKNRLENAFVPKLRQFITKHCCYIKRHIKKLEAEINLLIESNHEMTQKNEILTSVPGVGNVTSAVLIARLPELGSINRQKIAKLVGVSPIVKESGTKHGLRKISGGRRDVRRALYMAALVATRHNPVIKNLYQRLLAKGKEKKKALVACMRKLLTILNTLLKTRQHWKDKNIPNIPQPT

SEQ ID NO: 240071 - protein, 411 aa, unidentified
MIWVGDDWAEDHHDIELLDDHGRRLARARLPEGLDGIGRLHALIAEHMPASWADLEPAEAARRVQIGIETDRGTWVQALLAAGYQVYAINPMSVARYRERHSTSGAKSDAGDAHVLAEIVRLDHAHHRQVAGDSVLAEAVKLVARAHQSLIWDRTRQVLRLRSALREFFPAALQAFDDLTAGEALELLDRAPDPDRAARLPRITIIAALRRAGRRDLDAKATTIQQTLKAEQLRQPRPVQNAYAAIVSSQVQLINILNIEIAELGQVVASHFGRHRDAERYLSLPGLGTVLGARILGEFGDDPHRYTDAKARRNYAGTSPITRASGSRRVVLARYARNRRIADAVHQWAFCAMRGSPGARAYYQSLRERGTGHQAALRQLGNRLVGILHGCLKTGTPYDEATAWAHLQPTS

SEQ ID NO: 240072 - protein, 391 aa, unidentified
MIFVGIDVAKDKHDCFILNSEGTVLADVFTIANNRIGFETLLSRIQSCSQGESKIKVGLEATGHYSYNLLGFLLDSGLTTYVINPLHTNLYRKSLSLRRTKTDRIDARTIAMMLMSDVDLKSYSNTAYHNEELKSLTRYRFDKVKERAKLKSSVARLVNILFPELEKLVSSLHIAVVYALLSNYPGASYIANANTEELAETLCTASKGRYTKSKTEEIQVAAGVSIGSKMPAKSMELKHTIALIRELDKEISEVESAIDKITSQMDSPIFTIPGIGRHMGAMILAEVGDFSNFASADKLLAYAGLSPSTYQSGQLQNCYAHMEKRGSRYLRYALFNAAKYVCLWCPTFSAYLEKKRSEGKHYNVAISHAAKKLVRLIFAMQRSGKAFLADY

SEQ ID NO: 240073 - protein, 340 aa, unidentified
MTIVMGFDQHRAQITTEWLDSMTGEIGRARIAPAHREGVRRFLGRFAGQDLEVALEATTGWRFVVEELRRVGAGVHLAEPAQTSALRGNKKRPKNDRADARHLRELLMIGRLPESWIPPDHLLDLRSEVRLRHTLVDQRGEWQQRIRAVLYHHGLANRRELDLLGGEGRAWLEEVELPAAAREQITVAIAMSDALNVQIAPLDRQLRLYARCQAGCKALMGHYGIGELTSVAILAELGDCRRFSSSRQAVRYAGMDITVYESDQRRSPGHLSRQGPPVLRWALYEAAQVAHRAGSPDRDYYDQAAERLGSNRACLAVARKLLMRAYHTLRELGEEALQPA

SEQ ID NO: 240074 - protein, 425 aa, unidentified
MPYQIAGIDVHKKMLAVVVADVEIDGDFHFTRQKVGTTPADLRRLADWLVEHEVEEVVMESTAQYWRPVWEALEQHWRPRRRARDGAPRLAGTLHLAQAQSNRGPGGRKKDFPDAERLVKRLVAQELTLSFVPDTEQRLWRTVMRRKYQITRNRVQLHNRLEALLEEAHIKVSSLVSDLLGVSARRMLQALAEGETDPAALAALAASRLRATPAQLCDAFEACPTLHPVYRRLLKLTLEELRVIEDHLGQLDQQMADLLAAHHDAVQRLAEIPGLGVDSAQQIIAEVGATAATFPSPKHLASWMGACPGNEESAGVNYSHRCPKGNRQMRRVLNQAANAAVKAKGTIFAVVYRRIVPRLGHAQAIGAITHRLCRLIWKMLHERVRYEERGPAVSVEAKKVRARKMIRELRGLGYRVELVAPSSTV

SEQ ID NO: 240075 - protein, 475 aa, unidentified
MNVNGNRRKKQDAKLSVIDQQVILRKVEEIKSALKASTWHELETNGKFDRNDKLTFISEDMLILGCDIGNETHYARAIDTRGRKLSKSAFSFSNTEEGFKSVLDWALKLAAENEKHQIVMGLEPTGHYWFCVATRMVNNGISVVQVNPYAVKQTKEVEDNSQLKDDTKDSKLIANMVKDGNFGMSYLPEKLYAEIRRLSMFRDQLTEDRIRNLNRLHRELKIYFPEYKDAFGKTDGMFCLELLKVAPFPKDLMQLGADGIRQIWHDAKLRGRGYAKAESILDYAKKSVGIKDGSDASWQSVKWFVNKIQELDIQLEDVQQQLNKRCGEIPHAENIKEISGIGETTLTGILAEIGDISRFDDVKEVQKLSVLGLVACSSGKHKGETKISYRGRKRLRYWLFQAAKSAVVHADEYRKLHTYYATRTDNPLKKMQSLIVIACKLLRVIYVILTKETKYNPKKMLGDIKRSEKQLTAVA

SEQ ID NO: 240076 - protein, 317 aa, unidentified
MHGHYQVFLGLDVGRDGHHAVALDPGGKRLHDAALVNTEARLRQVFDKLARHGRILVVVDQPASIGALPVAVARACGHQVAYLPGLAMRRIADLHPGAAKTDARDAYVIADAARTLPHTLRRVEVGEEVDGILDAHPLARVLTSMPGIGVRTVARILLEVGDGTAFTSPGHLGAYAGLAPVTRRSGTSIRGEHPTKGRQQTAQTRVLPRRVRIPRTPAIAGLIRPQTSSRQTPQRRSHLPRPPPGRRPTKPDPQITPSPLDEPIGTPRPCAPGSCGCGQRRVSRKPCSARRSRPNFSTMRCPGRSSWHTWSMVKWAP

SEQ ID NO: 240077 - protein, 427 aa, unidentified
MKKRIKIDHLSTLCVGLDIGSRNNYITAMDFDSNRLINMKPVPNAVSGVEQMESMILAVLEANSQFKYLLIAMESTSFYGVHVANYLSTSDRLKHYAVKVFCINPKEVANYKKSFTGLGKNDGLDSFIVADYVRVGRIAIDPWRGAQYLALQRLTRQRRHVTEAITREKNYVLNNIFLKFSELALLGGEDSPLSSKFSATAEAILTEFKTTEDIANTPIEELVEFVTKASHGRFNDPDQVAELLQKAARNSYRLDKALYEPITTSIACSFNCIHAFEREKKSLDKAIEETVKGLNPTEYQILRSIPGIGPVYAAGILAEMGSVKCFPSNDALAKYSGIVWRDNQSGEFDADDTPMMKAGNRYLRYYLIQAADSIATYCPEYTAFYEKKYAEVKNHPHKRALALTARKLIRLIFGLLDKNQLYSAAKE

SEQ ID NO: 240078 - protein, 347 aa, unidentified
MLIIGCDFHPGFQQVAIFDNLTGEIQEKRLQHRAEAEQFYRGLAGQEVRVGMEACGHYPWFERLLAELGFELWFGDAAKVRASVVRKQKTDRRDAEHLLDLLRENRFPRIWVPSLEVRDVRQLLVHRHKQVQARTRTKNQLQAMALSQGVQKKYKLWTKAGREEMEQLPLLPYAAQRRKQLLQSLDGLEAEISELDRRVADEARQRPEAVRLMTHPGVGPVTALALVLTLGPADRFESAKQVGSYFGLIPSEDSSGGKQRLGRISKQGSSFLRFLLVEAGQTAARLDPQLKRFYRRLAARKNRSVAKVAVARKLATRLYLMLREDWTYAQLSQAVMQVSPSHSVAGQ

SEQ ID NO: 240079 - protein, 315 aa, unidentified
MNLGIDVSKDTLDCCLISDGIFFERQFKNNKAGFEQLKSWLKKSEATSALHCCCEATGKYYEAAADYLAESYVMSVENPRKIKGYGNAKLQRSKTDRLDARLIAQYCRDMKPRAWQKPSEAQTKLKELNQYCQRLKAQKAAEQTKLHTAPDYLAPLIEDTIRHLQKQIKAVQEKIGKFHQEHPDYKANRNRLKTITGVGDNTADTLLTVLAEQDRFENQRQFTAYLGLDPKQFKSGTSVKGRERISKVGSRRLRTALYMPAMHAYRSRTFAPFVSRLKANGKRPKQIIVALMRKLAVIAYNLIKTGKDFEPERYK

SEQ ID NO: 240080 - protein, 355 aa, unidentified
MTSPKYIGMDVHKESISIAVRNDAGKIVMECVIETKASMILEFIDGLRGDVHVTFEEGTWATWLYDLLKPHVTKVVVCDPRRNALLQEGNQNDRVDARKLAELLHNNQLRSVYHGDHGLRTLKELVRSYLTITQDLSRVMTRVKAIYRSWAIPCTGKQVYAPRHRAAWLAKINEPGVRRRAEFYYQQLDALRCLRQEVRRDLLAESKKHQAWKRLCGIPSIGPIRAAELLGILQTPHRFRTKRQLWTYGGVGIETSSSADHHVVKGQLERKKKQVEIRGLNRNYNHDLKNLFKGAAIVAATKPGPFAEFYAELLAKGMRQEMARLTLARKIATIVLIVWKRGVCFDAQHLKPQTA

SEQ ID NO: 240081 - protein, 478 aa, unidentified
MEEQEGQVVRRRLVGIDLGIASRHSVRVLEADGRVVCRSSCVPTAESLAGVERAALAGAAEGTRLEVVFEPTGPAWMPVAVFFARRGHAVFRVSSAKASDLRRFLRRHAKSNGIDAETLARLPLADPRGLQQLELPGPDAAALDRRVRACARLTSAASEHKVRIKDLVRQLLPMTPLTGDLGKAGLAVLESYAGPRTLLAAGEAGLTRLITTASNRQQGQERAGQWLAAAAAAIELYADHPAVPLEELAAEVATEIRLLRAIQAELAVHAAAREQHYLQVDPAQLARSLPGFAEISAPILVAAMGRPGRFRDGTRFKSYVGLTPRASETGETGRKGQPMSKAGPSLLRSAFVRAADTARKQDPQLAKIYYVQMTERGATHLKASCVVASHLAERAWATLNRGTPYVICDNNGNPATPAQARKIIAERWTVPEDVRKRRRSRKIAGKAPQAAATGPDRRGDPPRPRSSRPRRQGVKPAT

SEQ ID NO: 240082 - protein, 350 aa, unidentified
MERYIGLDAHKQTCLLGVIDATGKRVGPPRIVETNGEALVEALRSIPGRRHLCLEEGTQSAWLHELLAPHVDELVVTVPPKRQGPKSDAGDAYARAEELRIGALKTRVYKAPGELAQLRDAVRGYNTVVRDVVRAKNRLRSLFRSRGLQVGDEVYGTQRAQEAARLPPSSERLANLWGAQLDALTSIRDTAEEWLLEASKPHSIIGRLAKIPGLGPIRSAQLVAVVATPHRFRTRGQFWNYCGLGVVTSTSAEWDIVDGQRVRVREPATRGLNRNRQPLLKAVFKGAATTVIARMPEHPLCQGYRRQIAAGTDESLARVTLARKIASIARAIWKHNERYDPARHAGRQSG

SEQ ID NO: 240083 - protein, 311 aa, unidentified
MESGPFVGIDVSQEYLDVAVCGQKRVLRVTNDEAGLQSLMRQLQEKEPELIVMEASGGYERRAASMLLAAGLPVAVVNPRQARDFARSLGQLAKTDAIDARVLARFAEVLKPAPSRLSEEAAEQLRELELRRRQVVEMIVAERNRLRTAPRTADRIQEHLRWLEDEVKRTEKQIEGVIQSDPGLEAKAAILQSVPGVGPAVAATLLGSLPELGLLNGKEIASLVGVAPLNWDSGKLRGKRAIWGGRAHVRSILYMAALVASRRNPVIRALYERLRAAGKPKKLALVAAMRKLLIILNSMLRTRTLWHASTL

SEQ ID NO: 240084 - protein, 354 aa, unidentified
MKDTMIGVDLAKNVFQLHGASMTGHVKFRRKVTRPQFRQFMAGQPPAVVVMEACGSASYWSRELIKLGHEVRLIAPQYVRPFVKRQKNDAADAEAIVVAAQRPEMRFVQPKSRDQQACAVLFRARERLLHQRTELVNALRSVLYEYGHVVPKGLAHLKRIEAIVEEPNSDLPALVREECQDLLEQIAEKTARIEAKTQKAREPSMVTDTARQLQTMPGAGPQTALAISGFAPPMDSFKRGRDFAAWLGLVPRQYSSGGKERLGRVSKAGQTDIRSLLIIGAMSRLTWLARKKIPEGSWLARMLARKPLMLVAIALANSERQGATGPSPSRTARAIWAMLMKKEDYRDPAQAVAA

SEQ ID NO: 240085 - protein, 338 aa, unidentified
MTSFVGVDLHRNNFTYCIRENGEEKKIGKCEISELKGFASLLGKDTAMAVEATGNTFMFCRFLKAHVGRLVVVNPSQFKVISTSTKKTDKHDAKILAEFLEKDMLPEVRMKDDLQAKISSLTQTREKLVQLRTVLKNKVNNLLAANFIVLKREELSTETGLRKALSFHFDPITDTELFVVVEQIRSLNQSIEKLDKAIEDHGSKMDGFKNLKSIKGIGSKGAATLLSTIGNIHDFRSSKQLAAYIGIVPRVSNSNDTVCHGRITKNGSKIARTTLVQCALIAKRYSPYLHAFHESVKSRRGGAKANIALARKFLDIVYRTLKNNWMFEDFTQFKLVKN

SEQ ID NO: 240086 - protein, 406 aa, unidentified
MAGLPRECLDVGVIVAIDAGKASHRVWVTDRAGMVGEPVSLPNSRIGIERLEALVGEASATFAVEATGALHRAWAAELERRRPGALRLFAPSQTHAARAQLGTRRFKTDDRDCAALVWLARQGAGRPARSSGVEAMLAAVSHRRQLVLALTPLRQRLHDQLNALAPGLSAPAGHGRALLLSTPTGHAVLACAAAFAGRPPSPRSLQARANGRLTAATAALWAGRWRQCLAPPPDAELRAARLARDLDRFQALRADIAFVDGQLEHLLADSAGQILTTLPGVATARAAALTAYTLPIERFPTPEHLYSATGLAPASYESASVRRRSAIARTGLPEHRDALMGIAWGLGQFAPAFQRRRRELNQRGKTGIQARVALARHACRLCWRMLDTQQPYDDRRYDRARRDRGR

SEQ ID NO: 240087 - protein, 431 aa, unidentified
MKNKTDLRLEEITAGTLIVGVDIAKHEQWARFVDYRGVEIGKAFKFKNDLQGFESIVAKICEICKMKTLKYPIEQVIIGMEPTGHYWKPLANYLIKAGYRVVGVNPYHTKKAKELDDNSPTKSDKKDAITIARLVKEGRFFDPYLPEGIYSELRGLANARTSANKRLSAIKNTITAILDEYFPEIYEVFKKTLTGKASRQVLKSCPFPTFILELGEDGILAEIRKAVKKSVGMKKVRHLIDAAKESIGVQYGLDAARMRLKMLLEELELIERHMCDIEQAMESALYKTGYAEQLLGIKGIGVVTAASFLGEVGDPLRFQNARQIANYAGYNLTEDSSGQSKSGTCISKRGRKQLRSILYQMAFTMIGNNAEMKELYQYLTTRKNNALKKKQALVVISKKIITVIYSLLKKQEFYKPELVLGAVRKEFMKAA

SEQ ID NO: 240088 - protein, 392 aa, unidentified
MYIVGIDIGKNHHEASIVSPEGKQIGHSLRFATTHKGADSLMSFIFNNIGNSSCIFGMEATGHYWYPIYSFLKARGYTIYVINPIQSDSLRKMYIRQTKNDSIDSFLIAEVIRFGQFTTTSMADENILAMRQLCRYRDSVISSRTEIKLRISTIMEQIFPEYEKQFSSLWLSTSMGILEKYLTPENIENAPIDELFEIIKDKSHNKLTMKKAISIREAAADTFGIKIAQDAFSFQLKQLIDRMNFLDKQIEALDCQILEYYEKFDCYLHTIPGIGMIGAATILAEIGDISRFKNSSALVAFAGIDPTVRQSGEFNSTHNHMSKRGSPYLRHAIFLAATTCSFHNSPLNAYYKKKRDQGKHHLTATGAVARKLTTIIYAVLRDSKPYEPKKFC

SEQ ID NO: 240089 - protein, 432 aa, unidentified
MEEVEDEPLFCERVAGIDIGKKMIMVTIRVPSDTRKGGRAQETREFGTTRKELLALADWLRCWQVEKVGMESTSDYWKPVYFLLEREGFDCTLYRASQVKALPGRPKTDKLDSAWLARITERGSLAGSFVPPEDIRRLRTHTRYRRKLVQMRTAQKERCEKLLEDGHLKLSSVISDIHGVSGRDMLGAIAAGEHNPKVLADKARGVMRGKIARLEEALDCSFFTPEHAFVLQMMLDSIDQLTAQIQVLDGKIADMCQPYEQQIEQLDGIPGFGITTAQDLIAEIGVDMSAFPTAGHLASWARTAPRVSESAGKRKGKNATGRGNPYIGGTLGEASISTGRTQTFLGAQYRRMCKRMPKMKAQGAIMRKQLVIAHALLSDPEARYEDLGPDYHERRKDTHRRARSHLRELERLGYKVTIQAIDPATGELLPAS

SEQ ID NO: 240090 - protein, 423 aa, unidentified
MRFIGLDVHRDFCEVAIAEAGAVRLAGRVPTEPEALTLFAQSLGGDDEVALEATGNALKIARIIEPHVGRVVLANPKAVKGITRAGAKTDKIDARTLAKLLAGGFLPAVWLPDEQTRILRRRISARAQLVRQRTRAKNQVHATLVRNLKGKPPVSDLFGTRGRRWLAAQVLPADEQETVAACLRQIAFLDGEVALVERALAEQVLASPQMRRLLTLPGVNFVTAAALLAAIGDIGRFPTARQLVSYLGLDPRVNQSGTEPARHGRISKQGPGETRHVLVEAAWHASRAPGPLRAFHQRITARRGGNIATVAVARKLTVIAWHMLSRGEDYAFARPSLTREKIRRLELMTGAEHQKGKRIGVFASKEQHRLDKELAAQAELAYRRLVQDWQPTSKGTGAAPGRASRRPSSGQAARQETAPPPAL

SEQ ID NO: 240091 - protein, 427 aa, unidentified
MCFAPAFGDEEESMGKINERCGGIDVGKRFLLCCVLTGAAHEEPRSQTRRFDATVSDLVRLREWLAAERITHVVMESTGSYWVPVFNILEGHFIIVLANPEEVKNRKGHKTDRKDAEHLADLLRHDHIRASFIPPKPIRDLRDLTRRRLQLIQDATRERNRVEKLLEHVNVKIGNVLSDVFGVSGQSMLLALLDGKTTAEQIAHLARGQAKRKIPQLTEALEGHGMRDHERFLIRSCLRHLACLEEEVEQMDCEILQRMQESLFQGAFQRLQTIPGVGQLAAASILAETGVDLTTFPTAEKMASWAGLCPGNRESAGIKKGNPTTQGNSYLRTTLVQCAWSATRKTGCIFQTRFRELSPRRGQKRAIVAIAHQMLTVLHFMLKNNVPFNGAANAPTQRRRQRRAHRHLRCLRRLGISVQIADAAYPY

SEQ ID NO: 240092 - protein, 358 aa, unidentified
MVQRKELNFEGQNIYIGIDVHLKTWHVSILTESGCLKKHSQQSSAQALFEHLKKHYPNGNYLSAYEAGFSGFSTYYSLLDFGIECLPVHAADIPTGQYESVMKTDAIDSTKIARALKSGLLRGIYIPKKEVLDDRNVMRLRITLKRQLSGYKSRVKHLLYNNGVIYPECFQNSKSHWSKRYLKWVHEDVQLLSESRNSLDLLLRQVELFRKSLLEITRLVRTLSRNGRYGEAYENIVSIPGIGMITGMCLLTEIGDIHRFRNERQFASYPGLVPTSHSSGEKTSHGEMTFRGNKRLGPLLVESALVAIRQDRALAAAYGEYCKRMLPQEAIIRITRKLSNRILIILKSGKKYEHDRCY

SEQ ID NO: 240093 - protein, 343 aa, unidentified
MDIVVLGIDLGKNSCSLAGLDASGRVILRRRMRRSSVESFVNGLGRCIVAMEACCGAHHLGRVFAAQGHSVRLMSPEYVRPYVKAQKNDELDAEAIAEAATRPTMRFVAVKSQYQSDVQALHRARERLVSERTALINHLRALLLERGIVAPQGRRKLQEELAVFADEDGIEALSPRIRLLIEDLRSEWRALDERIAAFDAEFVRMAREDEAVRRLTTIPGIGTINATALAAAVGNARAFRRGRDMAAWLGLTPRQMTTGGKPRLLGISKRGNRYLRKNLIHGARAVLPYLVERETPLGRWARGLLARAHKNIVVVALANKLARIAWAVLARGCTYEAAGEAAA

SEQ ID NO: 240094 - protein, 346 aa, unidentified
MEHYAGIDVSLELSSVCVVDAKGKIVKEAKVASEPDALVSFLQGLGFPVQRIGLEAGPLSQWLHAGLARAGFETVLLETRHVKAALSAMTVKTDRKDARGLAQLLRMGWFRPVHAKSIGSQEMRALLVARKQLLGKLIDVELSIRGILRGFGLKVGQVTRKEFEVRIWELVTGQATLERIARAMLSARATLKAEYEKLHKAVLAIVREDAVCRKLMTVPGVGPLVAVTFKSAVDDPRRITKSKAIGALFGLTPKKYQSGEKDITGGITRAGDEMARTALYEAANVLLSRTTRFSKLKRWGMDVAKRRGSKRAKVALARKIGVILHRMWVDGTTYRWREAKLIAARA

SEQ ID NO: 240095 - protein, 313 aa, unidentified
MSIIGGLDVHRRQITYDWIDTDTGQTRQGRLAPASREHLRGWLERFAGQQASFALEGCTGWRYVVEELQLAGIAAHLAEPADTRALRGRKRHAKTDRADARHLRDLLLGGRLPESWIPPTHVLEARTQVRLYKALVDQRTAWQQRIHAVLFHHGVPAESDLLVAERRQRLTQGAGLTLPAHQAVLLALRMIDAIDAELDLLRTELAHLARRQPGCRALRELYGVGLITAVAIWAEFGDVRRFSSSRHAVRHTGLDVTVYASDDKRAPGHLAARARRCCAGRCSRQPSAPPEPAHPTTPTTPRSRHAWVATGQR

SEQ ID NO: 240096 - protein, 375 aa, unidentified
MWNVGAWVQADLCQMGMKARCSGWYNGQLEIDSYTGATGMESVPVKVGLDYHQQSVQVGVMDMEGRLLANRSCENDWQAIASFAERYGRVTGAAIEACTGAADLAEELVQKAGWSMHMAHPGYVNRMRQNPDKHDWGDARLLADLERVGYLPQVWLAPQETRELRRLVAYRQQLADERRTTKLRVGALLRDQRQRCGTARAWTLRWFGWLSDAALSEHSRWIIERHMARMKWVSREIAAVEKRLDKLTREDPVVQRLLKHKGIGPVTAWVMRAYIGRFDRFRTGKQLSRFCGLSPRNASSGERQADAGLIKAGHPDLRRTLMEAAHRLMRYVPEWQQRARVLFSKGKPYCVVSAAIANRWMRRLFHEMQVPSQVA

SEQ ID NO: 240097 - protein, 333 aa, unidentified
MNVTTVGLDLAKNVFHVVGLDTQGREVMKRRLTRAQVLKHFANMPRCIVAMEACDFAREFTELGHEPKLMPPQYVKAYVRGQKNDYNDARAIAEAARVPTMRFVAVKSIEQQDLQALTRTREGVLRSRTALVNRLRGLLSEYGIVRGRGVNTMRRALPELLEDATNGLSARFRRLLAQAQMELIELNTHIETLTAELKTAARADDAAQRLQTIPGFGPIVAAVFAASLGDGRQYPNGRAASAAVGLVPRQHSSGGKARLLGISKRGDRYLRSLLVHGARAVVRAAVNKDDRLSRWINRLRETRGINKATVALANKLTRIGWAVLAHRSTYQPA

SEQ ID NO: 240098 - protein, 439 aa, unidentified
MDTSRNVMAFTELTHFAGFDWASEKHDVAVVDRQGRQLLKLSFPDTAEGWGTLRAKLAALAAPAQELARIGVAIETCRGPAVERLLELGVTVYPMNPKAAERFRDRKAPSGAKDDPLDAWSFADALHTDGHAWRPLLPDDPATQELRILCRDEIGLIAERTALVLRLEEALHEYYPAARAAFDDWTLPSAWDFVLRFPTPADLARKGKRTWEKFLHTHRLGRPETYDKRLAIFAKAGEFVNPSAAVTSAKSLLAVSIVKQLQTLQEQLHTYRTRIEEAFAKHPDHDTFDSLPGAGGKLAPRLLGELGANRAVFAAPEDLQCYAGTAPVTLQSGKRRWAKFRRACNMTLRATVHLWADQSRHFCAWAQAYYQQKREEGHPHAEALRCLGQRWLKILWKMWQDHTSYDEARHALDQTRHGSWVIGLLPQTATPAQPAAKVC

SEQ ID NO: 240099 - protein, 370 aa, unidentified
MSQSSTLFLGMDVHKDSIAVAYVAQDHGAEVTYLGAIGTRQADIDQMIRKMQSKAKHLIFIYEAGPCGYWLYRYLMKKGYDCWVVAPSLIPKKPGDRVKTDRRDAVQLARLARSGDLTAVYVPKVEDEAIRDLTRAREDALSDLKDATFRLKALLLRQDIRYVGRANGGPAHLRWLSEVVCPTPAQPIVFQAYVRAVHEHTERLQRLEQELQDHVKAWRLNPVVEALQALRGVQFTVAVTMVSEIGDLTRVDHPRELMKFLGLIPSEYSSGEPRRQGAITKAGNTHARRALVEGAWAYRYPAKVSRHLPRRLETQPKIIQDISWKAQVRLCKRYRRLVSRGKHANVVTVAIARELAGFMWAIAREVPVTP

SEQ ID NO: 240100 - protein, 336 aa, unidentified
MKLYCGIDLHSNNHYVSIIDQKNNRLMEKRLSNDLSKTLTLLEPYKDDLQGIAIESTFNWYWLVDGLMDADYSVSLVNTTAVKQYEGLKHTDDQYDAYWLAHLMRLGILPTGYIYPKEQRGLRDLMRKRMQLVQCRTTHLISAQAQYWRSTGFRLRSQDIKKCPDNLLSVISDQNLFLSIQSNLKVIQLLNSQIETIEESILLQCKNLTEYEQLQTVFGIGEILALTITLETGDISRFHKVGNYASYCRCVDSKKTSNGKKKGSGNKKCGNKYLAWAFMEAANFAIRFYEPARKFYQRKSSKRNMIVARKALAHKLARASYYVMRDHVPFKPELLF

SEQ ID NO: 240101 - protein, 342 aa, unidentified
MPIVGGLDIHRKQLTFDYLDTATGEVKRGQIAPADRVHLRSWLVRFAGRDDVAFALEGCTGWRYVAEELAGAGVAAHVAEPADTAFARGRKRHAKTDKTDSRHLRELLAEGRLPECWIPPSHVLECRALLETYHDLRAEHTAWVQRIHAVFFHQGAPALGALRTEQDIDVVQAAAGHLSPAGQLQVDTALGMLAFLEGRLEVLRHRLLAAARSLTGARVLAARLYGVGPVTALALTCWLGGAGRFSSSRKAVRFAGLDITVYSSDSRRSPGRLSRQGPAVLRWAVFEAGKTHARASAPDHAYYAAVKDRKDGKRAALSEARKILRQACHILAELGDDALTAA

SEQ ID NO: 240102 - protein, 364 aa, unidentified
MKNSITWVGMDDSANKINVAVLHGLEDQIREEFVVTNDDSGMGRLAKHLKGLPGEVHCVYEAGTNGCHIHRFLKKHQLCCDVAAPSLTPRRAGQRVKTDRLDAKRLAFLYRAGQLTRITIPEKEQESIRDLLRAREDALEDLQRARHRLSRFLLRRGLKCRTGKAWSRGHLQWIKALRFEDAQDQMVVEEYRLALDEEMDRLHRFDEKVEELAQQPQYKKLVSYLMALKGIKTLTAMTILVEALDLRRFVDAPAFMSGIGVVGSEYSSGDKEQRGRITKTGNAHMRRVIIESAWHYRHGAVAGKTLKKRREGLPAEVIEIARKADRRLNKKYWHLVNRGKRTQAAAVAVARELAGFIWAIGQVA

SEQ ID NO: 240103 - protein, 388 aa, unidentified
MEARTVNNLPPAASHDETVRCLLAIELSKKSWITAVNTPLSDKISRHRLEGCDWKGLLELIERIRTRVARELNRPVEVISCYEAGYDGFWLHRLLEAHGVRNLVIDPASLQVDRRARRAKTDKIDAERLLRSLMAYLRGEPKVWSVVRVPSVAEEDDRRLHRERDRLINERVQHVNRIKGLCAVHGIYDYEPLRSNRLARLKQLRTGDGRELPQRLTAEVVRELQRLELVLKMIKTIEAERDAIAVSKISTHTHAKKIQDLVKLKSIGPEIATALVGEVFYRRFNGRHQVASYVGLTPSPFQGGSLNHDQGISKAGNPKARTIMIELAWLWLRHQRNSPLSVWFRERVGTARGRIRRISIVAVARKLLIALWRYLETGMVPTDAVLKG

SEQ ID NO: 240104 - protein, 330 aa, unidentified
MRKEMVAGIDVSKDVLDVAVRRDERRLETAHFDNDVGGHRKLVAWLTKRGCTARVVLESTGTYSLDVALALHHARGIAVMVANPRAVKQFAGALMQRSKTDLTAAAALREYAARMPFVVWQPPAAEVLALRGIARRIAALVVERTRERNRLHAVRATAEQLAIVVNDIEVNIRHLERRIELLTAEAVALISAHGELHRAFERLTSVPGIATHSAVQLLPELLVLPDDMTVRQWVAHAGLDPRACQSGTSVDKPARISKVGNAHIRRALFMPALVAVQHEPHVKAFFDKLVARGKKPIQVYVAVMRKLLHAIYGMFATETTFVGAKFHATA

SEQ ID NO: 240105 - protein, 349 aa, unidentified
MNEPYAGRQIVGFDLHRRRSVLVRMTEAGERLETVRISNDPEYLREVMTRAGEAPEVVLEACYGWYWAADTLAELGATVHLAHPLGVKMFSYRRLKNDERDAADLADLLRMGRLPEAWIAPPATRELRGWVRHRAKLVGLRSNLKCQVHGILANAGITVPMSDLFGASGQRLLATADLATESRSRIDSLQRMITALDFEVELFAKLVAGRLRTHPGYQAIQLIPGVGPILAAVFVAEIGDITRFRRPEQLASWAGLTPKHHESDTTVHRGRITKQGSRLVRWAAIEAVQRLPGHTRIGQVRDRVAARRGRNIGVVAAARELTELVFYGLRDHRVHALAVHSPARTPLPA

SEQ ID NO: 240106 - protein, 412 aa, unidentified
MDVVHPRCCGLDVHKQTVVACILLASPSGPPQKLVRTFGTLTDELLALGDWLTSESITHVALEATGWYWKPVWNLLEGRFELLLVNAQHIKAVPGRKTDVKDAEWLAELLRHGLLKPSFVPDRPQRELRELTRYRTSLIQERAAEVNRLQKVLEGANLKIGDVATDVLGRSARQMLEAIVGGATEADAATLAQLARGRLREKIPHLERALAGRVAPHQRFLLAQQLAHIDFLDETIERVSSQIAERLCPFDESLANLDAIPGVGRRTAEILLAEIGTDMTRFPSPAQLASWAGMCPGHAESAGKRHSGKTRKGSPALRHALTEAAHAAARSKNTYLAAQFRRLAARRGAKRAAVAVGHSIRSIVWHLLQHGYPYHDQGGNYFDTRTEPAVARNLVRRLKALGYTVKLEHPAA

SEQ ID NO: 240107 - protein, 389 aa, unidentified
MSALPPLLGAKRTSAQLLIYDGVDAPPTASMCQSGGVEHHLREASVSEVIIIGLDIAKHVFHVHGADERGRALFSKRISRGKLLDFFAAQPSCKVALEACGGAHHWARQLTQLGHEVRLIPPAYVKPFAKRQKNDAIDAEAICEAAQRPSMRFVAVKSEEQQAAGLLFRTRDLLVRQRTQLINAIRGHLTEYGWIAPKGRSHVAMLADLIDEEEMASSLPEAAHAMFRLMLDLLAGLNSRIADLDKEIARRAREDEVSRRLMTVPGIGPISATAIAALAPPAETFAKGRDFAAWLGLTPLQRSTGGKQKLGTTSKMGERTLRRLLIIGSSAVVQQASKRGAPKGSWLEQMLARKPRMLVTVALANKMARIVWALLVKQENYRAPAPARA

SEQ ID NO: 240108 - protein, 330 aa, unidentified
MKLNHVGVDVSAKVVTVIMDHEGDRTEAFDLPNDAMGHKKLIRMATQNGFHAKVVLEATGAYSLDLALALHRAKRVDVMVANPRAISQFAGAYMRRSKTDSLDANVIVEFAIRMDFEAWVPPEPHAFDLRAISRRIEGMVKMATQEKNRLHAATSFDEMSEIVRNDIEVNLRHLERRIDKMREKARELIAQHPDLERAFLHITSVKGIAQSAGIQILAELTVLPENMDVRQWVAHAGLDPRVFQSGTSINKPARISRQGNAHIRRALFLPAIVAAQHEPHVKAFYEKLLGRGKTKMQANVAVMRKLLHAIHGMLKHDRDFEGEKFYALGA

SEQ ID NO: 240109 - protein, 356 aa, unidentified
MQTQVTKKIDFSGKDLFIGLDVHKKSWSVTIVIDGMEHRTFTQPPDPWALNNYLQRMFPGGSYNSAYEAGFCGYGIHRELNSFGIKNIVINAADIPTSQKDKLQKRDPVDSRKIARSLEKGSLHGIHIFDRELEELRSLNRTRFYLMRDLRRSKTRIKSFLQYYGEPIPVEFDNNQWTLKFVSWLKQVKMQTMSGQDAYSNLISSYEYHRSLLLTLSRQIRERIREYDRELYTLLKSVSGIGPLTASALITELGDINRFKNIDQLCSYVGLIPRIRESGETTYTGGITFRCNSFLRTLLIESSWRAIRMDPAMMQYYHAHLINNKGHKVVIKVARKLLNRLRYVMKNRQPYVTGVV

SEQ ID NO: 240110 - protein, 387 aa, unidentified
MSRNARVPVPATTLDQDSTLVVVLELSARSWLVGARVPGIGRMSRYALAPSAEALAAWLGTAKARAGAAGRTAVRVVLAYEAGRDGFWLARYLEARGVEVYVIQPSSVLVDRRARRAKTDALDVEMLMRTLLAWLRGEPGVCSMVPIPDVAEEDGRRPVRERQGLIGERLALLNEIDGLLATLGITGYRPLRRDRRAQLAALRTPEGDPLATNAAARIGRILDRLELVMQQIAELEQARDAVLAKEAASGEAETMIRGLARLKGIGAELATVLVWEAYVRSFPNRKALGAYAGLTGTPFASGSTTREQGISKAGNRRLRSSLVELAWLWLRYQPDSKLAAWFRSRTGSVGSRMRKVMIVALARKLLVALWRFCRDGVLPEGAALKAT

SEQ ID NO: 240111 - protein, 358 aa, unidentified
MADRCRVGPQRPSCSTIAMSMLHQPEQLRGLGRPNSSAGILSLYGEEDEMTTSSYVGIDVSKDRLDVAVLGEKQPWQVDNTPDGIAGLVKQMVDLQPELIVVEATGGYQRCVVEALFHAGLSVAVMNPARVRQFARACGLLAKTDKLDAQVLAVFGQRVQPKRSEGKSEAEKQLSALLLRRKQLEEMLKAKQNRLRTISPSLRGSVERIIAILKEEKKLLEEQIQQFLKEQKAWQEQREILSSAPGVGLVTTATLLADLPELGKMDRKKIAALVGVAPMNYDSGRKRGYRKTKGGRGDVRSLLYMSTLVATRHNPVIQTQYQQMLKRGKLKKVALTACMRKFLTILNAMLRDQRPFRV

SEQ ID NO: 240112 - protein, 345 aa, unidentified
MAVLDLATGELCHRRVRGAPSQVADVVAQLGPSVRLVYEAGPTGFGLARAGAQLGIDVVVCAPGSVPRAAGDRVKTDRRDAERLLRLWRAGELSLVRVPSPVEEAFRDLVRAREDARGDLMRHRHRLSKFLLRHEIRPPAAMLGAWSVPWMKWVRRLRFDDAATRATHADYLAAVEAALQRRSALDSALEELWRQSPFQGTIARLRCFRGIDTLSACGVAAEVGGFERFERPDRLTGFLGIVPSEYSSGEKRRQGAITKAGSSHARRLLVEAAHHYRHSPRIGYELARRQRDQDPRVVNVAWRAQQRLHRRWRHLALKRHKPVGVSVVALARELVCFCWEAALID

SEQ ID NO: 240113 - protein, 329 aa, unidentified
MDSQSAFPVVGIDVSKATLAVCYQVDQQLKHLEVSNSKAGFQQLMKSCGTQCLFVMEATGTYNLALAYYLHEQGGQVAVVNPLVIKRFIQMHLSKGKSDRKDAQWLLRYGQQQPVRVWQPEETVLVECRQLEQVTEQLLKQKIMVSNALEALQRQPLISKLALKRLQQTLKALTQQVAAVEVELLALLEQRFAAQMTLLCSVPGIGRKTAGMLLLFAGGFTHLDNYRQLIAMAGLSPREHTSGTSIRGKVRITKMGGGLIRGKLFMCSFAAKKTNAACSALFDRLVAKGKNKKLALIAVCNKLLKQAFAIVKSGVPYQADFTSKLALKA

SEQ ID NO: 240114 - protein, 345 aa, unidentified
MIYVGIDLHRKRSQIAALDEQGRELLSRRVANEPEALKAILAELGGELKVALEATYGWEWLADLLEKEGHELHLSHPLRTKAIAAARVKTDAVDARTLAHLLRTDLLPEAYIAPRELRDLRDLLRQRVVLTRMRSALKNRVHALLARQGIENGHADLFGMGGRRYLAELPLREPTRRRLDSLLSLIGAFDREIELAKREIDALARHDPRVEVLCQLRGIGPYTAMLVIAEVGEIGRFRSARHLCAWAGLTPTVRSSDGRARLGHISQQGSPHIRWALVEAAQKAAQGGGPLRAAFERIAKRRGRNIAKVALARRMLTLCYYGLRDGEIRCLQHPGPASARPVKAA

SEQ ID NO: 240115 - protein, 328 aa, unidentified
MVGFDATGAIILRKKRSRNQLEQSLANVPLCLIGMEACAGAHHLGRKLEKLGHQVRLLPAQYVKPYLKGHKNDFRDAEAIAEAAQRPTMRFVPLKSAEQLDLQALHRVRSRLVTQRTAVINQIRGLLLERGLPVRQGAAALRLALPQILSMLSDNLSPRVVRLIQDLAEDWRFLERRVASITKEIDELADQDPHCRRLMSAPGVGPIISSAMIAAIGTGDAFHKGRDFAAWLGLVPKQISTGDRTIVGRISRRGNRYLRTLFIQEARAVLLRRQSWPRHGFGAWLEAASKRLHSNVLVVALAAKLARLAWSMLAKGRDYDANFMGHAA

SEQ ID NO: 240116 - protein, 376 aa, unidentified
MQEISKIHVGLDVHKDSIAVAVAEPGRAAAKVIGTIRHDVPKLLKLLVKLGNTEAVHVVYEAGPTGWGLQRALTAKGYSREVIAPSKMPRRPGDRIKTDRRDCAQLAECSRAGQLRAVWVPRPEDEAIRDLARAREDALNDRRQLRQQLKALLLRHDVRFPGKTSWTQAHHAWLGKLNFSEVATQAAFMDYWMAVQASDERLKRLNSALLEYVKNWRFAPQVSALQALRGIDVTCAIALVAEIGDFSRFDHPRKLMGYLGLVPSERSSGERTARGSITKTGNAHARRMLSEAAWSYRFKPRLGERARRRQEGLSQQLCAIGWTAQLRLTQRFAKLDARGVHRNKVCVAVARELTGFVWAVAQAADTPLQATQGGTT

SEQ ID NO: 240117 - protein, 326 aa, unidentified
MTQVLGIDISKETFDACLMVEGNTWQEKFDNTPAGFKKMQRWMSKHTSEKVHACMEATGQYGEGLAEFLYQEGFLVSVVNPARIKAYANSKLRRNKTDKADAELIALFCLREQPALWSPPPASFKGLQALVRHYEDLQTTCQQEKNRLKSGGTQPIVLADIKEHVAYLEERMKRIRQAIREHIQSYPELKQQQELLRSIPGIGEITASKLLGEIRDVCAFEDARQLAAYAGVTPRNFTSGTSVHKKSRMSKTGNANLRKALYMPAISAKHHNPIIKAFCERLLKSGLRPMEVIGAAMRKLLHLVFGILKSGKPFDPEFLNKTPATP

SEQ ID NO: 240118 - protein, 388 aa, unidentified
MGSVQTEITTAAGVRPAVYVAIELSKRCWLIALRGPAVDRISLHRLAAGDAAGLLALIERFRRAAVEATGTEVPVLACQEAGYDGFWLHRVLMAAGIASHVVDPASIHVDRRARRAKTDRIDAQALLRTLMAHHRGEGRVWSVVRAPTPEEEDARRPHRERQNLIKERGRHVNRIKGLCAQQGILGYEPMRADRHERLAELRTGDGRPLQPCLLAEIRRELARLELLLEQIAEVEAMREAALEAEPAGPAEAARVERTLALRRLLAVGPETSTVLGNEVFFRRFENGRQLAAHVGLAPSPHMSGGLSREQGIAKSGNPRARTALVELAWPWLRHQPGSALSEWFVRRVGEQRGRLRRIMVVALARKLLVALRRYLETGLVPQGATLRA

SEQ ID NO: 240119 - protein, 380 aa, unidentified
MTPITLYIGLDVHKDSIVIAIAEPGRNGELRNFGTITNDLQALEKAIHRIRKAHPEATLEFAYEAGPCGFGIARRLKQLKISCLVAAPSLIPKQPGSPFKTDQRDARGLARLLRAGELTAVYIPEPTDEAIRDLCRARTDAVDDHRRCRHRLKGFLLRHGFRYQGKANWSQAHMRYLRELVLPHPAMKTILEEYLQGIDAAHNRIERIEASMLTLLENWRLKPAVQALMAFRGFQLVASMITVSELGDIHRFEHPRQLMTYLGLVPTESSSGPHQRLGSISRCGNSHQRWLLAECAEHYAIPPKISKELSRRQEGQSEATKALSWKAQNRLHTRFIKLLSRRLQRNKAKVAVARELCGFVWALLRSQDCYKQSTSTNTPT

SEQ ID NO: 240120 - protein, 342 aa, unidentified
MDHSAGLDVSVKETSVCIVDDTGKIVREVKVVSEPEALLGVLKNPGYHFKRIGLEAGPLSQWLYGALAEAGLPVICVETRHMRAVLKAQINKTDRNDARGMAQMMRVGLYRPVHVKTLRSQKLRMLLTHRKLLQSKAIAIENDLRGTLRNFGLKVGMVGKMKFEARIKELVENLPDLAELVEPLLVVWRVLREQFVIQHRRLLAIVRDDEVCRRLMTVPGVGPVVSLTYCATVDVPARFRKSKAVGAVFGLTCAKYQSGEVEWSGRISRCGDEMMRVMLYEAAQSMLRSKRWSWLKAWAMQIARRRGMKKAIVALARRLAVIMHRIWIDGTEFRWTREAAAA

SEQ ID NO: 240121 - protein, 360 aa, unidentified
MQVEQSVTNRFVIGGVDTHKDLHVAAVVDEHNRVLGSQCFPTTRHGYKQMLAWMRSFGQLRRVGVEATGTYGAGLLRYLQNAGVEVLEVTTPDSGDRWKRGKNDDLDAQNAAHAAFAGKRTVTPKTRDGMIESLRVLKACRKTAVAARRVALQMIHNTVVCAPDELRDTLRKLTRMELIRTLAAWRPDMTDYRNVASAYRIALKSLARRYLELHDEIADLDAMIAAIVDELAPALVTRNSIGHASAAQLLLTAGDNSERLHSEASFAALCGVSPVPASSGKITRHRLNRGGDRAANSALHIIAIGRLRTDPRTKSYIAKRIAEGHSKLEAIRCLKRYIAREIFSLISQRRQEINQAQIAT

SEQ ID NO: 240122 - protein, 411 aa, unidentified
MNNTLFVGIDISKRSNVATFMNCEGKVVGRLAFSNNGSGADRLVAKILSYYEKGDFEAIRIGMENTSVYSKNLVWFLYEHEALNEHKLSIIPLNAIMVANYKKSFLDMDKDDITDSFAIADFIRIRPGLLPFKLDDRQEALKIMTRSRYNYVQALSRMKSQFLTRLFLSFSEMESGKPFYSIFSKTSLSLLEEEFTLDELAEKPIPELVEFLQEKGGGKFQNPEEIAKVLKKAASSSYRVPAMVRESLNRTMASDMEIMRILENEIHNCDKNIEKLMKSVPAILVSIPGIGPVLAAGIMSEIGDISRFQKQESLGKMAGFKWKRNQSGKKESEDKAAVLSGNKKLRYYLVEAANRVRIHDPVFEAYYRKKYAESKTHAHKRALILTARKLVRVIFYLLKENKLYKPDVGIS

SEQ ID NO: 240123 - protein, 332 aa, unidentified
MSAVVCGLDVHKESTYATVLDRDGQVLVQRKMPNEDIPRFLEPIHPDKLAMEASTYIIPLYRKLTEQGYDVTVSHPKKTRYIAEARIKSDRVDSKALAELLRLDSLPESYILPREIAMIRERVRRRTFLVRQVTKLKVEIRDTLAYEGVKPPTGYGLFTVKSVEWLHGLGMEPVDCYLRLIEPLKREVKLLSSRLKREAGDDPDVRLLMTIPGVGYYVALLVKAEIGDVKQFSSGDHLASYAGLVPSTRSSGGVERHGGITRQGSRWLRWAMVEAAMVHVRVDSPVTRFYHGVAERRGRKAALVAAARKLTTVCYSVLVHGRPYFNPLDAQA

SEQ ID NO: 240124 - protein, 399 aa, unidentified
MLKGYDEVAVFLGLDVGKEGHHAVAQDRSGRKLLDRALPNDEAKLRELYGRMKAHGPVLLVVDQPATIGALPVAVALDEGVTVAYLPGLAMRRIADLHPGSAKTDARDAAVIANAARTMPHTLRALQLDDETIAELTVMSGFDDDLAGQITATSNRIRGLLTQIHPALERVLGPRLDHPAVLDLLETWPTPAALAAAGKARVRTRLLKKAPRLGGRLAEEIFAALAAQTVVVTGTNAAGVVLPRLAAQLAALRQQRAEVAEKVEELVAAHPLSKVLMTMPGVGVRTCARILTEVVGKDFPTAGHLASYAGLAPVTRRSGTSIRGEHPPRGGNKVLKRSLFLSAFAALNDPVSRAYYDRKRAQQKKHNEALIALARRRVDVLYAMLRDNKPYANPTPAAA

SEQ ID NO: 240125 - protein, 345 aa, unidentified
MLYVGLDLSRKRLDYCLLDEQGVRLEQAAAPPDRDGLRSLADRVGRGSAVIAAVESMTGARFVHDELERYGWAVELADAARVRGLAPLACKTDRIDAWVLAELCRRDLIPAVWLPSFTVRGERERARFRMHLVKHRTALKNRIHQTLVSFGTPCPLSDLFGERGRRLLSQLQLPEPWAGTVAASLRLIDDLEREISTLEAELRRLGADHPYLPLVRTVPGISWILGYTIAAEIGDIARFASPAKLAGYTGLCPRVYQSGDNDRRGPLTKRGPRYLRWALLEASIHACRHPLYAERYHHTKQRLGRQRGPRVAQVDLARRLAEAIWHMLTRNQPFAPAGASQVLAP

SEQ ID NO: 240126 - protein, 440 aa, unidentified
MISAAIERCAGIDVHKKFLAVCVMIGPLDGEPRVEKRRYGTTVAELNGLREWLGSQEVTHVVMESTGSYWKPVFNVLEEAVRVYLANPQEVKNRKGHKTDDKDGWWLAHLLRHAMIQPSFIPPRVIRELRDLTRRRKRLLGDATSERNRIQKVLEDANVKLGSVLSDVFGASGQLMLDALLEGKATPEQVAQLAQRRAKKKIPQIIAALEGHQMGAHHRKLIRYSLEHLQFLEQQILQLDSDIASQIREAKLEPQWQLLQSVPAIRETSAASILAETSGEMTPFPSVKNLSSWAGLCPGNHRSAGKNRSSRTTGGNPWLRSSLVECSWAASVKRDCFLKEKFWRIVSKTRGHKKGPALIAVAHTLLQLIFQVLSTGKPYAERGLPILDEHQRNRIIRHHVRRLGKLGIAVYSRQPVATAGVGRPLKEVLLEPRSQPHPEK

SEQ ID NO: 240127 - protein, 349 aa, unidentified
MRFYTQQHRFYCGIDLHARTMFVCIVDQAGNKLVHQNIAANPKAFLKVIAPYRDDIAVCVECMFTWYWLADLCAEHKIAFVLGHALYMKAIHGGKAKNDKIDSAKIAHLLRGGNLPIAYVYPKGMRETRDLLRRRMYLVRHRAEALAHIQNTNSQYNLEPFGKKLKLVANREELNIAPRFADPSVRKTIEVDLTLIDKYDEMIGDLERYLIRTAKVDDVQTYHQLQTIPGVGKILGLVLLYEIHDIRRFPEAGQFLSYARLVRCAHESAGKKKGSGGKKIGNANLKWAFSEAVCQFLRCSERAKKWLARQEKKHGKKKALAILAARLGRSLYYMLHKKEAFDEQRFWGK

SEQ ID NO: 240128 - protein, 497 aa, unidentified
MLLGFELSGESAFGGYPDWNNFKVRSYIPGSSYYQPFKYFIMSKKHVSLEVVNPNAAGIDIGSRSHWVAVGQDAQDVREFGVYTEDYQELSKWLKKHEVTTIAMESTGTYWQNIFSFLVAEGFDVILVNGRQTKNIKGKKTDIKDCQWIQKLHTLGLLSSSLLPDSTTDVIRTYHRHRQNIIKQTGATVQKMQKYLRLMNLRLDVVVKDIVGLTGQKIISAFVAGERSGKELAKCRHYNIRKSEEEIAKALQYNGREDYFFALKQEWKTYLHLQKQIDETDKEIKKLLKKIIRSDENKKKHTAKKKDYKRKNKNAIRNTDMNKIGVQYFEGIDLMAIEGVNDATVMAFISEIGLEGIKKFKTAKEFTAWLRLAPNNKISGGKVLSHHLPKGSNRLKIALRQSANVIGNLKEGHLNDFFRRINYKKGRATAISATARKLAVIIWNMLAKGIQYQPPKEYLFLDQKRKLKLVSRIKKNISKFDIKPEDVGFSKYLIINN

SEQ ID NO: 240129 - protein, 391 aa, unidentified
MTIVGIDVAKDKHDCYIVNSDGEVLAEVFTIPNDQIGFNLLFQKLQSVAPDLSKVKVGLEATGHYSYNLLGFLLDKGLHTYVINPLHTNLYRKADSLRRTKTDPIDAHTIAGMIMSNVDLTSYTAKSYHNEKLKSLTRYRFDKVRERAKLKSSVARLVNILFPELEKLVPTLHMSSVYALLSEFPGAKQIASCHLTRLVHLLSASSKGQYKRNKAIEIREAARSSIGSVMPAKSLELKHTIHLIEVLSEEIDEIETLIREIMDENPSPILSIPGISYRMGAMILAEIGDFTRFNSPDQILAYAGLSPSTYQSGKLANAYPHMEKRGSRYLRYALFNATKYVCNWDPSFAAYLAKKRAEGKHYNVAISHAAKKLIRVICALQKSGKPYCPAT

SEQ ID NO: 240130 - protein, 379 aa, unidentified
MNSVAVVAMDIHKKFSKAVVMDAEAEVLGERRIPHGDHAVMAAFFSEFEASTDVVMEATFNWPWISEVAEAMGVRVHLAHAGRAREMAKGMAKSDRKDAIFLGRLFLAGEIFPEVYRAPVEVRRMRSLFRQRLLLVRMRTAVKNGTHGQLFRLGLLTDSEVSDLFSPKGRKVLARLDLDADERWLLEGKLATLDDLDRQMGLLERAIKKQLKQDARAEILMSLPGVGELTAYGMLAEIGQLGRFPNGRALAAYAGLLPLDRESAEKDFGKRTNRACNRHLRWVMLEAVSGAVRKSPRMRSLGSRVRAKNPKKPGKARVAVARELLELAHLLLSRGELYQEKAPGRPGSRVSGRNQASRPNRASRAALCARPEHGGQAAM

SEQ ID NO: 240131 - protein, 442 aa, unidentified
MSKNLSKLEPNGEPYLSVGLDVGADFTFMSIALPNGTFVGKPFKITHANPESRELAVKKIKEAQEQFSLKSRCFLESTGIYHIPLMRFLSDKGFVCETINPIITKNSTNIGIRKVHNDKFDSKKIATIGLMSSVKTSVTPSDEVVNLRNLVRDYFYFKDLQSAIIMKLTAELKVSFPQYKGIFSKITTKTSLKLLEKYPLAKNILEADKDNIVELIRSTARFGEKYAKTKYDALIVAAQDATIFGRSIDSNATRIQLYVRQINFYQTQIDELLIALHKTVDNLNEPLIRERINLLQTLQGVGFLSAVVLIAEMGFFELFSSPKKLFAYFGLDPAVKQSGKFTGDKVHMSKRGSKLARRVLHMIAINNLKVSGKDKIPVNHVIHDYYVAKCSSKKKNVAVGAVMHKVCNIIFAMLRDNSPFEIITPVEHCKHFFDTKSTKNVA

SEQ ID NO: 240132 - protein, 337 aa, unidentified
MRLYCGIDLHSNNAYVVVLDEQDRVVYRLRLRNDLGLILEELGPFAGQLVGIAVESTFNWYWLVDGLMEAGYRVHLANPAAMTQYNGLKFTDDRSDARWLAHMLRVGLLPEGYIYPREQRALRDLLRKRRRLVQQRTANLLSLQNLFHRNTGQRLGGQALMAMDLAELEQQLLDNVSLSMVSTKRVIECVAGEVKRLEQEVLRQLKPDPLLRLLKTVAGVGNILAPTIRLETGEIDRFPSAGNYVSYCRTVGSQRLSNGKSKGKGNKKNGNPYLAWAYVEAAHFAIRFHSPVRRFYERKQARTHRVVALKTVAHKLARASYHVMRDQVPFRIDLAFG

SEQ ID NO: 240133 - protein, 379 aa, unidentified
MQSIKTWAGIDVSADTLAAHRYRDGNEEAREFSNDSTGHQQLVKWLGKSARVAVEATGIYHLQLALTLRKAGVEVMVVNPRVAKDFARALSNRSKTDEVDAWTLLEFLRRMEFVAWEAPREAVLELRELGRRLTELVRVLVEEKNRLHAKRKGGVSKAVRADVEQHIKQLAHRINTMEKAAVEVILRDADLLEHYQILIGVPGIARRTAVLLLTELAVLDPTMSVRQLVAHAGLDPRTYESGTSVHRAVRISKQGNARIRSILYMNALSAIRNDRGARRFYAILVARGKKRMQAVVAVMRKLLHGIWIVMQRRIPFDSSVLFAASLAQAGSSDSAVAADQPQPDQDHPQGRSAAEELPRQLDPVPAEATPSRKKRSKAA

SEQ ID NO: 240134 - protein, 429 aa, unidentified
MQNESTPGARGPVFCGVDTHADSHWLCVLDWRGRKVLSRRFPADAAGYEALAGAIAAAGEPACVAMEGTSSYGAGLTRHLASLGMPVREALSPARMQRRRPGQGKCDEADAERAARAAMSGSKLGTPKSQDGWVDGVRCMLAARSGAVKARTSAINTARSLLTTAPEGLRSRFRGMAGPRLMEELPSVRAEGALGAALGALADLWAAARDAALDMERAIEASLEENCPALLAMYGCGPVSAAKLAVAAGDNPGRLRSEASFAAICGACPIPASSGKTVRHRLNRGGDRQANSALHEIARQRVMRDPETAEYAERARGRGKSDREVMRCLKRYVAREAYRALMHPHEIRRPGDASGLVAARRAARVSQVRAASILGTSEKYISMLERGQRELKPIRRAYEAWVEAGLPLDWDRQAFEAERKMNSKKHLAK

SEQ ID NO: 240135 - protein, 408 aa, unidentified
MEVVYRCCCGIDVHKKVIMACLNNGGEQDLREFGTTTSEIKSLAKWLTESGCEMIAMESTGVFWKPLYNLFELMDLDAIVVNAAHMKALPGRKTDVKDAEWIADLLRHGLLKASYIPSREQRELREITRYRKSLTEERCRETNRLQKILEGANIKLDSVVKDINGKSARKLLERIIEDDVPTSEAEVSRIVHGSMRSKLGQLVTAIEGITTPLQRKLLAQVIDHIDDLNKRISNLDKLVQNYMDEYEAAIAALCEIPGIARRSAEVILAEIGLDMSRFPSAAHLCSWADVCPGNYQSAGRRKHGKTTKGNKALKTILTQCAKSARSVKQSYFSAQYQRIAARRGKNRATLAVAHSMLIAIYHMLKNSMPFRDLDADYYDSFNRDRKIQGYLKRLKALGWEPDALPGSA

SEQ ID NO: 240136 - protein, 348 aa, unidentified
MLHAGLDLSRRKIDVCLLSAGGEVVEEFASPPDGDGLGGLARRVGGHGLAVRGVIESMTGSRFVHDRLEELGWDVLIADAAKVKGLAPLACKTDKIDARVLAVLSHRDLVPEIWLPDPRVRREREQARFRMHLVKHRSMLKHRIHATLISFGHPCPVTDLFGVAGRELLDRLDVPQPWRGTVDASLRLIDDLDRQIDTINKQLRASGADHPYVPLLLTVPGIGWVLAFTIAAEIGDISRFASAKKLCGYTGLCPRVYQSGDRDRRGPLTKQGPKYLRWAMLEATMHALRHPAYRERYQRNKRRLGRQRGAKVAQIDVARKLTEAVWHMLTNHEPFAPAPGGSAFRLAA

SEQ ID NO: 240137 - protein, 348 aa, unidentified
MVHFVGLDVSVKTTWVCVVDDAGKVILEQKVPTDPADIIAILSSLGVSFGRIGIEAGPLSQWLVNALTVANLPVICVETRHMKALLTAQQISKTDRSDARGIAQMMRVGLFKPVHVKTLVAQEQRMLLTSRKLLQRKLLDVESDLRGTLRNFGLKVGVVSGGRYEARIRELVAGFPRLAVIVEPLLSVRRVMRQQFAVLHKMLLDMVRADPVCRRLMTAPGVGAVVALTYRATVDQPQRFVHSRAVGAHVGLTPKCYQSGEIDYEGGVSKCGDALLRTMLYEAAHSLLTCNRKWSWLKAWGVRVAQRRGMRRAIVAVARRLAVVLHRMWVDGSEFRWRKDSAAVPAVA

SEQ ID NO: 240138 - protein, 451 aa, unidentified
MKRKRAGKGGAVPSLECIEPDAAGIDVGATEVYVAVPPGRDPNPVRSFPTFTEDLQALAAWLLACRIRTVAMESTGVYWIPLFQILEARGIQVCLVNSQHVKHVPGRKSDVADCQWLQYLHTVGLLRGSFRPADAICQVRSLLRHRDGLVEMAAEHTQHMQKALSQMNLQLHHVISDVTGQSGLAILDAIVAGERNPVVLAELRDPRVKTSVETIVKSLVGDYRREHLFTLKQSLQAYRHYQALVADCDAEIEKYLKEFDSTIDVDQHPLPPEPRRHKPRKNEFRFDMRTHLYRILGVDLTAVPGLNALTVHTLLAEVGPDLSRFRNASAFVAWLGLCPSNKTSGGRVLSSKTRRTQNRLNRALRIAAQTLHKSQSYLGTYYRRMRARLGAPKAVTAAAHKLARIIFHLLNAQQPYQESIFALEEQHHRTRLENRLRRQAKEFGYQLVALP

SEQ ID NO: 240139 - protein, 378 aa, unidentified
MIVIGADTHKRTHALAAVDAGTGRERGARQITAEEQGYLAAVRWARGLDDERVWAVEDCRHVSRRFEQALIAAGERVVRVAPHRMGASRRGEREPGKSDQIDALAIARAVVKDGVERFPAAHLDQAAMEIRLLSDHRKDLVAERTRVQNRLRWHLLELCPELERSLGRGALTESRQLARVDRRLSRLPADARVRIAREQVAQLRVLTRRVDALERELHALVSAHRPQLLAETGCGAVTAALLIGRTAGAQRFPTDASFARLTGTAPIPCSSGQRDRHRLDRGGDRQLNHALHIIAITRARHDPASKAYLARKEAEGKGKKGALRCLKRHLARRFHRLLSLPAQAPQPEPRTAAIPAGRPRRDDTVIVDAAPGLIPCIM

SEQ ID NO: 240140 - protein, 341 aa, unidentified
MKNKSFIGIDISKNVIDVSIFCEETPIKDFSHDVFNNSRKGFGEMCTWLKKNHVVLSNCLFGMEFTGSYSMELEKFLNAKKFQFCMLSTHVVKHYPMGPKDKSDKIDSAKIADFLYRYNGTECVKPYKMPDKTLQRLKALMNERKFLVEQRTCFMNRRQLCTTKEDTQLYDGYIKKLSHDIENIELEEQKLLATDDSLLATYKNLLTIPGIGFVNAINVIVITRNFTAFETARQYASYVGVAPHSHTSGTSVKWCPRPSARCDGQAKADLSMAATVVVQYDAELQSFYNRKLGGKQDSDTKRKALNAVKFKLVLRMFAIGKQNRKWEPLDSKSSNEKLAIS

SEQ ID NO: 240141 - protein, 311 aa, unidentified
MNYSTVYVGMDVHKETFSLCCYTNEKEQAEYSQKVDGHYSKVLNYLEAMRFHYGDDAVFICGYEAGCLGFTLYHQLTSHNVKCVILAPTTMPKPAGKKKVKTDKRDAALIARCLAHRDYSPVHIPTEQDEQVKEYIRMRQDHKLALKKVKQQILAFCLRHNYRYDATKNHWTQAHLQWLRSLKPDGLYQEILSEYLSSYDQLTDKLERLDRRIEELAAQPEYQEKTRHMSCFLGIKTQTALSTLVEVGDFKRFASAQQFASYLGLTPGEDSSGGDQNRLGITKAGNSHIRTLLIETAQRRCDRSCRRDRSR

SEQ ID NO: 240142 - protein, 350 aa, unidentified
MKKISHVGMDLGDRFHEICGMDRRGRIAERERITNTRESLERFFADRPPVVVAMEAGTHSGWIARLLEELGHRVVVANPRHVRAIWESDQKSDVTDAEMLVRLVRVDETLLHPIRLRSEATHVDHLTLKARHGLVQTRTKLINQVRGLVKSLGYRLVGSTTRCFVSRAREGLSGVIMESVEPLLTIIEAVEMQIRALDQKVKRIGAERYPVTARLQQVTGVGPLTSLAYVLMIEDPSRFRRSREIGPYLGLVPRRDQSGETDKQLPITKAGNGYLRSLLVGSAQYIMGPFGPPCALRTFGLRLAERGGRNAKRRAAVAVARKLAVLLHALWVGDEPYDPNRGLQKVTEAA

SEQ ID NO: 240143 - protein, 348 aa, unidentified
MIRYVGVDVGKAKCRAALMNQKGTVESEFFFENNTKGIERLVSRLTSEDKVVMESTGNLWLNLYDALDQKKIKVVLANPLKTKAIASAKIKTDKVDARILAHLLRADLVAESYVPQGSIREMRGLVRHRLSLVKMRTMVKNKVHALTDKYGYRCEYSDMFGKSGIAWMMALDFSELDRLLLENHLSLIESINLQIRKVDDVIKRKACEDEDVRLLLSLTGIDVYAALLIRSEVGPISRFSSYKKLISWAGLAPSVYQSGNVEYTGRITKRGSGMLRWVMVEAAWIAVRHDEKLGGFFERVRARRGDQKAVVAVACKMLKIVWFMLSRREAYGNVNGKRYGEKLKKIDA

SEQ ID NO: 240144 - protein, 360 aa, unidentified
MAKEKRVHSPSVVGGVDTHKDLHVAAVVDQNNQLLGSEFFATTRQGYRKMLAWMTSFGTVERIGVECTGSYGAGLLRYLQSAEIEVLEVTAPDKIERRKRGKSDTIDAESAAHAAFSRIRTVTPKTRNGMIEALRVLKVCRKTAVAARRVALQIIQMNIVSAPEELRDQIRNLTRMQLIRTLAAWRPDFTAYRNVQDAYRISLKSLTRRYLELHDEVADLDVMITSIVDELAPELIRRKAVGYECASQLLITAGDNPQRLNSESGFAALCGVSPVPVSSGKTNRHRLNRGGDRAANSALHIIAIGRLRTDEKTQEYIAKRVAEGHSKMEALRCLKRYIAREVYTLLRNQNRLINSTQITT

SEQ ID NO: 240145 - protein, 404 aa, unidentified
MEVMYDRCCGIDVHKKLIVACFKCGKKQEIRNCGTASDEIRELSKWLVDGKCQMIAMESTGSYWKPLYNIFEILGLDVIVANARDIKNVPGRKTDVGDAEWIADLLKHGLIRASYIPSREQRELREMSRYRQSLIGERSRELNRLQKMLEGGNVKLASVVSDVNGRSARNLLKAMLEKDDPLTEERVSQLVHGSLRPKVDAITKAMNGFLTPMEKALIRKVVDHIDDMTKRIGEMDDMLRDYLQPYEEAIAKLDEIPGIARRSAETILIETGLDMSRFPSARHISSWAGLAPGNNESAGKRRRSRTTHGNSTLKSALVQCAKVASKCKCYFRAQYQRIVIRRGANRATVAVAHSMLIAIYHMLKDNQSFRDLGEDFYLAVNRAKKINHSNFAHGKHPVCLDKSA

SEQ ID NO: 240146 - protein, 356 aa, unidentified
MPKIKQPDFSGQTIFCGIDVHKKSWRVNVRSEEFELEDYSQDPSEELLVRHLEKRYPGASFQVAYEAGFCGFGIHRSLKSSGVGCMVVNPADVPRSDKDRKRKNDRIDARRICRHLSNKTLRPIFVPSVKMEHARTLVRQRIHLVKDQTRCKNRIWGLLMFSGLKLKMDKPNDYWSLRFVESLRKLPCPTPSLRQALDMALEEYLFIRKLVGGMTKQLRVLAAQKTFAMMQNLIRSIPGIGLLNSMVIITELQDMKRFKTLDKLCSYAGIVPDTASSADRTTVKGITHRCNHYLRPAIVESSWVIIRKDPAMLHLYKKYCRKMVPNKAIIKISRHLLSRIRYVWTNQVEYEVGLVG

SEQ ID NO: 240147 - protein, 343 aa, unidentified
MTYYVALDVGLRTVSLCIVDEAGGVKLEKSLPSEIEDIVACLRGFGEEIACVGLEAGTLTQWLTYGLRAAGFKPVVLEARHVQAALAAMRNKTDRNDARGIAQILRTGWYRPVHVKSIESHYVRTLLAARKALLRKCIDLENEVRGLLKVFGIKLMPGLRHGAFDRAVREPIEANGALRHALVPLLDVRLHIYRTFLEMDRRVKALAQADQICRLFMTAPGVGYIAALTFKSAVDDPSRFKRSKTVAAHFGLTPRRYQSGERDNPGRISKAGDTEVRSALYAAANIIMTRSTKPSTLKAWGSRLARSKGRKRALVAVARKLAVILHTMWIDGTEFCMQAQEAA

SEQ ID NO: 240148 - protein, 342 aa, unidentified
METAVTIGLDLGKSVFQVHGVDAGGAVVVQRRLTRSKLLAFFVKQPPCLVGMEACAAAHHWGREIRKLGHSVRLMPPRYVKPYVKRQKNDAADAEAICEAVTRPTMRFVEIKTCEQQGTLVLHRVRLMLTRQRTQLSNAIRGHMAEYGLVAPVGRNGLQRLIAILGSPDDERVPAIARASLAPLVCQLGLVNDQVLENDRRVRASARSTEIGCRLMEVPGIGPVLASAIVATVPDPASFKTGRDLAAWIGLVPRQNSSGGKEKLGGITKQGDRYLRQLLVAGALAVIRYAQRHGTKRPWLVHLLARRSPKIAAVALANKMARMIWAMMMTGERYREPAVAAA

SEQ ID NO: 240149 - protein, 435 aa, unidentified
MILTSKIAKIDTTNKMTVAFDVGSKKLNYYSEITGKLTGNNCKEVIDVRDEIHNGTTVIKKTLNDLYELAHERGYSGLHIVCEPTGSYSDALMRLARKYGHTTAYVSGESVHKAKVIENNDASKSDIKDPRVIFMLSKMGKELIYRTLPPLYKRLRELNRMYDEADKSRVEARCKIHHLIVRLFCDYPMKKDFIYTASGHALLRHFGCNPYRIASFTYKDFRSIMIKEAPGIREKTLQSIYQNACFSSLHIIPAEEHLAIEQRLVYAWEDYVRADERKETLRKQIEACYEPLWQSGEPVPQADTIFTQFHICRFAGETGPLSDFPHWRVLFKYAGVNLRVRESGKFKGQLKFDKKGRNCVRGVAGKLIFRLVRKHEIYGPYYHRKRKQNPAAPGTKFMANAERKLIRLYFALGIRRAAFSMDRFTRCESRYRMAA

SEQ ID NO: 240150 - protein, 346 aa, unidentified
MNQIIRIGMDTSKHVFQLHGVDASEQPVLRKRLRRRDVVAFFARLAPTVVGLEACGGAHHWGRELAALGHEVKLLPPQYVKPYVKRGKNDAADAEAICEAMSRPGMRFVPVKPADAQAAQMLVGVRDRLVRRRTRLTNAIRGHAAEFGLIAAKGVDKIAPLLARVQAEETLPALARQLFAMLGEDYARLDEQLAQIEARLMAWHRENETSRRLAQIPGIGPVGAAMLAMKAPDPAAFPSGRHFAAWLGLTPRDHSTAGKTRLGVITRAGDEALRAVLVVGATAVIQQARRGRASPSPWLAALLARKQPKEAAVALANKMARIAWKLMVSGEAYDPRRAQAARGHAA

SEQ ID NO: 240151 - protein, 366 aa, unidentified
MLIHVPPEVTVLAMDVHKNTISTAVLEPRSTVPPVDKISADDESVRRLIARFPNRGRVWACYEAGPTGYELSRTLEAAGMHCEVIAPSLIPTRPGDRVKTDKRDARRLALLFRGGQLTSVRVPTPPEEAVRDLCRARADMVIDQTRARHRLGKFLLRHGRVWRGGDNWTLKHHVWIRQQRFDDPALTATFGHYQATLTAREAAVDAIDADVKAWHTRPPFADAVARLCAYRGITELGALTLASEVCDWRRFPTASMFMAFCGLIPSEQSSGERTQRGGITHAGNTHLRTQLVESAWAYKSRPAAGAVIHKRQAGLDPTVVARAWAAQLRLCGKFHRLDARKTNRKVVVTAVARELAGFVWAEMTAA

SEQ ID NO: 240152 - protein, 360 aa, unidentified
MMVPRVLERRREAPVMLYVGLDLSRKRLDWQALDQAGEQVAVGAAPPDRDGLAQLARRLGDCEIVAVIESMSGARFVHDELERWGWDVRVADASKARGIAPLACKTDRIDCWVLAELARRDLVPEVWLPDAAVRAERERARFRLYLVRHRVSLKNRVHAILFQHGIPVAHSDLFGAAGRRTLERLRLPEPWQSTVCCSLELIDTLNTEIRDCERELKRLGADHPYVSRLVTCPGIGPVLAYTIASEIGDIARFQSPRKLVGYTGLCPRVDQSGERDRRGALRKNGPTYLRWALIEAAHVAVRCYPPYRELAETMRDRHGRARGGNIAAVETGRRLSEAIWHMLTNDQPFAPAGARYRLAA

SEQ ID NO: 240153 - protein, 344 aa, unidentified
MTYYAALDVSLRSVHVCVIDDSGEIHSEIKLSSEVEDLVTFLRDLDYEICAVGFEAGTLTQYFTYGLQSAGFEVICMEARQVKAALSAMRNKTDKHDARGIAQILRSGWYSRVHVKSLESHQIRALLSSRKAVLSKCVDLENEIRGLFKVFGIKLPPRLRHGAFDAKVRPSIEADPALSRALLPLLDARLVLYRTFCELDNRTRQLAHRDTVCQRLMTAPGVGFVTALTFKAAVDDPTRFKRSRTVAAHFGLTPRRFQSGETNNPGRISRAGDPDVRCALYAAANVMMTRSARWSSLKLWGVQLVKTRGHRRAVVAVARKLAVILHRMWLDDTPFRWGAEEATP

SEQ ID NO: 240154 - protein, 370 aa, unidentified
MEQTIMCGIDMHDNSLVCRVAVNSEEPWTKRYGNTRRGRQQLFRELRTVSRRRAGGRIVVAHEASTHGFCFYDDCRDAGIECFILAPTNMRKSKKDRKKKTDEHDAQLILETLRGHVLAGNKLPSIWIPDDETREDREVVRARLDVAQKLTGVKTQVQTLLKGRRVRKPKGVGRSWTRGHRRWLASLCVGEPRWPALETLLRQIEALEGEIAILDKEIAALSRRARYAEACGALVEEIVGVGLLTAMVFLTEMGDLSRFRNRRQMGAYMGLAPSSHDSGETERKGHITREGSYRVRKVLCQGSWVRVIHDPVEARIYKGIVERNPKHKKIAVVAAMRRLGVRMWHVGLAAQQRAGVFPRREIHSTCARVA

SEQ ID NO: 240155 - protein, 429 aa, unidentified
MTKTEKIETASWESTTHYAGLDWAKDHHDVVVVDQRGKIVKDLTFDHTAEGWAQWKELVAAYPHLAVAIETSQGAAVEQLLESRAAVYPVNPKSAERYRDRKAPSGTKTDYLDAWSLADALRVDGHGWRALKPLDPRIQELRLLCRDEVDLIAKRTELVNQLQAALHEYYPAALEAFEDWTASPSWSFVQQFPTPELLRQAGRRKWEKFLHVNHLYRPELNEKRLEIFSHAHEFCGPEAVTRAKSRLALTLIQLLRALEKQLQDYRKEIRRLFEEHPDHELFGSLPGAGEKLAPRLLSEMGSDRTLFQSAQGLQCYVGTAPVSFQSGQVRQVYVRFMCNKPFRHAVHLWAASSRKFCSWAQVYYQQLRTRGKSHAAALRCLGQRWLKILWKMWQTKTCYDPDLHLKNQIKHGSWILALKPAHPSEELGE

SEQ ID NO: 240156 - protein, 320 aa, unidentified
MLSFGGIDVSKDRLDVMVLPEEQCSSVNNDVAGWAELVEQLRGSSIAAIGIEASGGYERGVMRALLAADLPVRQVNPFKLRQFARASGVLAKNDPLDARLIASFVAIMPTRPAQRQAPAAERLTEMLAVRRQLSAEKVAAENASRLLEDAMLRRLSRRRIARLAADIDLLDRHLVAIVGTDAALAHRYRLLTSMPGVGVVLACTLIALLPELGSMNRKQVAALVGVAPYAFESGTLKGRRCIWGGRANVRQVLYMAAMSASNWNPAFKAFHDRLKAAGKLPKVAIVAVMRKMITTLNAMVRDDVVWADRLTGRHSVPTAR

SEQ ID NO: 240157 - protein, 354 aa, unidentified
MRTKSIDFTGKNIYVGLDVHKKSWSVTVLLDEVEHRTFTTSPKAIFVSDYLKKHFPGGTYLSAYECGFSGYQTHRDLLAQGVQNIVINPADVPSNNKEKTTKTDKVDSRKIAKGLRNGELRGIHVFDQIHEEFRSLVRQRTTFQKDFRRSKQRIKSALMYHGIDVPEEFDFQNWSKSFESWLSGLELSTTNGTYMLENLYQNYLFNKTQIRVLAIEIKKYARRHFKEDYFLLRTIPGIGQLTAVAIISELGEITRFKNLNHLSSYVGIMPLMHNSGESERVGRMTYRANNWVRTILVEASWQAIRKDPAMLQYYLKHAGKTNGKKAIIKVTRKLLNRVRYVLKNKQPYELGVQE

SEQ ID NO: 240158 - protein, 389 aa, unidentified
MKIFVGIDIAKLNHFAAAISSDGEILLEPFKFTNDADGFQLLVSKLESFDKNSIIIGLESTAHYGDNLVRYLVAEFYQVCVLNPIKTCQMRKNNVRKTKTDKVDTFVIAKTLMMQDDLRFITFFDLDMMDLKALGRFRQKTIKQRTRLKIQLTTYVDQVFPEIQYFFKSGLHQNAVYALLKEAPSPKEIASMHMTHLANLLKVNSHGHFTKELAKELRVLAQKSVGANDSAISIQITQTIQQIELLDSQLEKTEAEMTDIMKFNDSVIMTIPGIGYINGGMILGEIGDIHRFSNPNKLLAFAGLDPSVYQSGNFQAKTTRMSKRGSRVLRYALVNAAWNVVRNNATFKAYYDAKRAEGRSHYNALGHCAGKLVRVIWKMLTDEVEFNLE

SEQ ID NO: 240159 - protein, 429 aa, unidentified
MKQATVASERTQAVWEAVIERCCGLDVHQKMVTACLLAGALDQQPGESLRTFSTTTKGLLELRDWLEEHGCSHVAIESTGIYWRPVFHILEDTVTVLLVNAYHMKQVPGRKTDLKDAQWIARLLRWGLLKPSLIPPRPIRDLRDLCRYRKKLTEQASAEKNRIQKVLEDANIKLASVVSSVFGVSGRAMLEALIQGVMSPEETANLAKRKLRSKIPQLVEALEGRVNEHHRFLMQMQMEHLEYLEKAIAQLHDRINEKIKPYQHEVELICTTPGIDTVGAQHIFAEIGGDITVFPSEGHLASWIGICPGNNESAGKRKSGRTTGGNRWLKSLLVQCAHGASRTKGTYLKAFYHRIAARRGKKRAALAVAHKQTAIIYHELSEGKPYQELGEDFFDRINQKALEQRLVRRLRSLGYRVDLHPEPVTPQCS

SEQ ID NO: 240160 - protein, 340 aa, unidentified
MGEITTIGLDLAKQVFQVHGIDADGTTVLRKQLRRSQVLSFFSRLAPCLVGMEACATAHYWARELAALGHEVRLMPAQYVKAYIKRNKNDAADAEAICEAVVRPTMRFVPAKTAEQQAALLLHRGRERLVRQRTGLVNALRGHLAEFGVIAPQGLRNVGKLIAVVRDPSDARLPDLARQVLEVLAAQIEQLEGAVAAVEKQLMAWHKSNPVSQRLATIPGIGPIIASAIAASVAEPGGFRSSREFAAWLGLVPRQNSTGGKHRLGGISKRGNQYLRRLLINGASANLLRSKATKADPWVIGLRRRRPSLVVAVALANKTARIAWAVMQRNENYQRMAAAA

SEQ ID NO: 240161 - protein, 417 aa, unidentified
MGSMKKCCCGVDVHKSFIIAVIARFENEKVTFTKHMRFSTFTQGLREFKEWLRSNNCYDICMESTGKYYVPVYRIVSDAQFRVDVVHPKYVRAPHGKKNDKRDAKRIADMYMRDHIAEYSIIPPAEILAIRDITRYRRKTVNTITAEKNRMSNCLTVSCIKLDEVLSDVYGKTGKALIGQIIAHGGCNFDPAPYIDRRVKAPIEEFKQALDGDVTPATLAKMKIIQQRLDSLGKQKAELESIMESLSQDFNRQLELLISAPGIDVISAITIISEIGVDMNIFGSVKKFLSWVGLVPQNNESAGKKKSTRIGKGNAWLKPVIVQCANAAKNDKKHPEIRNKYLALKKRRGYGKAIVAIAKRIMTAIYYMLLRNEKYNPITCVDRAPVRRKIRLQHLVNLYGAKGYDVITNDGEILQLA

SEQ ID NO: 240162 - protein, 339 aa, unidentified
MHVTTIGLDLAKNIFQIHGIYEDGEVAFNRALRRAQVLSFFEKLEPCLVGIEACGTSHHWARELIKLGHNVKLISPAYVKPYVKRGKSDAADAEAICEAVTRPTMRFVEVKTPEQQAILAVHRTRDLIVRQRTQTINMLRAQLAEFGIVLPQGIYHALQFAKDCLNGEQADLPAVAGDVVFELCDQLLFLHSKILRCSRQMTQIAKLEKRIALLRTIPGVGPITASAIVATVGSGRQFNNGREFAAWLGLTPLNKSSGGKERLGHISKMGDQYIRRLLVLGMISRIRSIRAKPEKFDPWFTDILSRKPSRVAAVAMANKTARMIWAVLTRNEPYKVRAV

SEQ ID NO: 240163 - protein, 345 aa, unidentified
MLYVGIDIAKNKHDVTALNVQGKTVLKPLTFSNNKAGFELLDLSLRQLNQDCLIALEDTGHYAFNLLNFLHEQGYKVYTYTPLLIKEFAKSLSLRKTKTDKKDAHGIALKLLSDPNREQFQHDNRQVELKILARHIHRLKKKQSDWKVQYTRCLDIIFPELDKIVGKHSEYTYQLLTCYPNPQKRLEAGFDKLIEIKRLTASKIQDILSVAPRSIGTTSPAREFEIIEIIEIIKHYKRLIDKAETCVNDLMAEFNSVITTVTGIGGRLGAVILAEIRNIHAFDNPAQLQAFAGLDSSIYQSGQIDLAGRMIKRGSPHLRWALIQAAKACARFSPAFKAYLKTKLE

SEQ ID NO: 240164 - protein, 367 aa, unidentified
MEVPTMAKVRSWAGLDVHAAKVLAVTVDGESGEVRARRLSGRTSEIVKFCAALPGPTRVAYEAGPTGFTLARVLRDAGIECVVAAPGKIERPAQDRVKTDRRDAERLVRLLMVDALHPVRVPSTEEEALRDLVRAREDVRGDLMRARHRMGKLLLRHDVTFDGPGANWSVRHHEWLGRLQLPDHAAQVTLLDYLGAIDALILRREGLEGAIAELVPSSPWAQTVARLRCMRGIDTLSAVGLCAEIGDWERFPRAGHLMSFLGVVPSEHSSGQTRRQGAITKSGSHHARRLLVEAAWHYRRTPAKGVTLRRRQEGQPPHVIALSWKAQQRLHRTWRRLDTERGKRKTIVAVAVARELAGFCWAIANAD

SEQ ID NO: 240165 - protein, 343 aa, unidentified
MDYFAGLDVSVKDTSVCIVDGTGKIVREVKVASEPEALLTVLRESAYRFKRIGLEAGPLSQWLFSALAEADLPVICVETRHMRAVLKARINKTDRNDARGIAQMMRVGLYRPVHVKTLRSQKLRMLLTHRKLLQAKAIAVENDLRATLRNFGLKVGAVGAVKFEARIKELIDNFPDLVALVEPLLVVRRVLREQISILHRRVLAAVRNDEVCRRLMTVPGVGPVVALTYRATVDVPARFRKSKSVGAVFGLTPARDQSGESDRPGAISRCGDEMMRTTLYEAAQVMLLRSAKWSWLKAWAMKIARHRGMKKAIVALARRLAVIMHRIWIDGTEFRWTREAAAA

SEQ ID NO: 240166 - protein, 422 aa, unidentified
MKAFVVEDFAALIGIDWADTKHDICENPSLSKAYHYSIISSKPEAIHKWASELATRYPNQKVAVGCELQKGPLIYALSKYKHIVIFPINPSSVAKYRKVFSPSGAKDDPTDAFIQVEILSLYMSKLRALSPESNSVRTLAQLVEYRRKLVQDRVDITNKITTTLKNYFPQPVEWFKEKDTAIFCDFLTRWPTLAVVKKARKSTLNAFFNQHNARYSLVNESRISAIKSATPLTEDEGVIAPNKLYTQALVPQLKALNESIDTFDKAIKQYYKPQRDKAIFDSFPGAGPQLSPRLFVAFGTNRERFKDASELQKYGGIAPVTERSGKKQWIHWRYSCPTFLRQTFVEWAGQSIKYSFWAKAYYEQQQAKGKPRNTIVRALAFKWIRIAFRCWQTRTPYSESKYLEALKLKDSPLLKYAVESKI

SEQ ID NO: 240167 - protein, 341 aa, unidentified
MNQPKYFIGIDVAADSFVVAIFTAPEKPIPTSDIFSNTPEGFPNFRQWLKKYNCDETTSIICMESTGVYSEQLCYFLYSQGYQIAVEPPLKVKRAFSQSPKKSDFIDSRQIAEYAYRFYDELYRWKPNNQIVEQVKVLLATREQFTKQLTANSNALQTIQRKYIQTPVANDMYQSAIEELKEKIKIIDKEIKKLINNHPTIKPMTALLMTIPGVGMLLASNIMVLTAGFTNPINSKQLAAYVGICPNEYQSGSSVYRRPRSAGYGPSRFRKLIHLASLSLRAHNEWFKRYFFRKVAEGKSGRLVINNIANKLLRIICAVIKSRAPFINNYRSVNPMLLKIA

SEQ ID NO: 240168 - protein, 431 aa, unidentified
MVGRDRAVLAIDLGEDKQVATLMDHDNVVLARKVALVKAHNLGSLLVWAGQHAVKHGFLGVTVACEPTGHRWKALMGLADGAGMGFVCVQSLAVHRAREGDDYTRDKTDHRDAVLIGKLVTRLDCYLPERADTQWARLRHLGARRARLVSEATACGQQVADLLSCAWPAALECAAKPLESTTWLACLGVITDRCNGDPAKIRKMGREKFVAAVRGELPRWEAKKVSHRVLGRVWDALNDSRGVLAQRRGALERVHLVMADWRSARARLRDVEGRMLEVLDQLGLRELVCSIVGLSGVGAAVILAETGDLTRFASARSVVKHAGLNPTENTSATMRGQTRVSHRGRPQLRAAAWRAVWGALPHNPVLGAKFVHLTKRETDRLAAGQARAACAAALLRWLYAVATKRQPWDQRVASGMVPAARSAGVGLPAAA

SEQ ID NO: 240169 - protein, 314 aa, unidentified
MQTDVVVGIDIAKAYLDVYLDTTDQLKRYSNTPSDREHLVVMLREQQPTLIVLEATGGLERLLVAELLAAALPVVVVNPRQVRDFAKATGRLAKTDALDARVLAAFGVAVKPALRPLPDETSIELAELLTRRRQLVDMLAAEKMRLKQATGKTLRRDLKAHVEWLEKRVRNSDEGLRQAVENSPVWQAKYDLLSEVKGIGPVTSMTLLALLPELGQLDRKRIAALVGIAPFNCDSGTLRGRRRIWGGRAEVRRVLYMATLGAIRGQNPPILELYNRLKAAGKQSKVAIVACMRKLLVILNAMMRDQAHFQVKTT

SEQ ID NO: 240170 - protein, 396 aa, unidentified
MTVTNQFAAHVGLDWADKKHDVCVQFKNGERVFDVIEHTAEALDAWLTELHQKVKGRIAIALELKKGPVVYALQKYPFITVFPVHALSLARYRQAFSPSGAKDDPQDAELALELMLRYPQKIKAIEPDNADIRLLQQLVEQRRQLVEDKRRFVNRIINTLKQYYPQPLEWFSHRGSLLLCELIIRWPSLQQLKRARRDTIRNFLNAKGGRAMALTEQRVASIDNAIPLTTDPSVIEANALMAAALATQIKVVSEIIKTYDERIETLFDTLPDAGLFKSLPGMGPCMGPRMLAALGDNRDRFNSAEEIQNYAGIAPVTERSGQKSWVHWRWQCAKFVRQTFVEWAAKTVNSSYWAKLYYQGLREKGKSHQSAIRALAFKWIRIIYRCWKARTALLNK

SEQ ID NO: 240171 - protein, 443 aa, unidentified
MPSTQTQRKAAGIDVGSEQLFAAITAGPVRVFTSFTASLMQLKDYLLAEKVTTVAMEATGVYWIPVYEVLEEAGLEVCVVNAAHARNLPARKTDMNDCQWIAELHDKEMLNSGFIPPTLIRELRDYTRLRHDHIEMCSPHILHMQKALDQMNIKIHEVLSDLTGVSGQRLVKAILDGERSADKLLALCDAQILKTKRQKMLEALRGRWKESQVFALRQAYENWQHYQRQIGACDQQIALVLGRLAEQAPTPPQNPKDPDAKPKTKRLHKNAPDINDLDQLMVRITGGCDLSQLPCLTSYSSMQIIAEVGTDMTRWKSAKHFTAWLGVAPGSRQSGKTKKSQPRFRGKAGRLFCVVAQSLARSKYLALGGFYRRVRGKRGGQIANIAAARKLAVLFYNTLRFGWAYVEQGLVEYEKKYKEQYLKRLKSAAKTLGMQLVAAQTVI

SEQ ID NO: 240172 - protein, 434 aa, unidentified
MDLSKRLQVGIDFSRAKVDVCLLDSGGEVLVMHKSFSNSPAGYQKAKELFQKVLDSRGLEGVDISGEATGFYWLPFYLQLANDAELKALDEQLFVLNPLWVRWFKKSLPQDDKTDAKDPFYIADRTRTRRPKETWSPQEDWMGLRIYTRVRFHLAQNLAREKNFFQAYLFLAHSGYNRVHPFTDTFSVTSRKLLQQPQKLAELVEMPEEQIAAELFRLSGHSLRDPLQNAQLLKQAMLESFSLPTGLSEPVQRVLELVMRHIEFLEGQIQQVEQWIAADAQAHHPQVQLLNSIPGIGLVFASGIAAEVGDLERFLSGRKWDPKRQAYRSKHLRDAEDAIAKFAGLWWPRSSSGDFEAEERSLAKTGNAYLRYYLIEAADSLRRHIPSFTAYYQKKYPEVNKHNHKRALVLTARMSLGLYVGLLHRHEAYRPEVG

SEQ ID NO: 240173 - protein, 422 aa, unidentified
MKNKAAEKRKQVPEGYLIIGVDPHKKRHAAVAITQDFTIYAKFKFDNTLEGLESMIERARAEMMKTGCRGVIFAIETGGHYWRNIAYFLDEKGITFRFINQFTLKRRREGKDINRRKNDYRDSEVAAQLLCTGEFTESKVPQGVYAELRAAHNAYRRLVKERTRITNLIKGLLDGLFPEFVQVFKDPCAITALSVLSTCPVPGIIAGMMEDEFVATIEAHYHGHRLMRKKLRQLHQSARESIGIAAGARSVASEISFLIEKYELIKGHIRTAEQTLAELVDETEEGKYLLSITGLNYIAAAGLIAELGCFRLYRSSKQMIKMAGSNPTESESAGKKSSRTPMSKQGRPVLRYCAWTAVIPMLRFNKDFRAWAKQRRERPVHANPLGGKEVVGAALNKLLRLAFALVKNQTFYGSPQLAPLIS

SEQ ID NO: 240174 - protein, 404 aa, unidentified
MKGPIVSIDVSKGKSNYQAFKNLNVKYTGSRSIKHTKEGFDEIVNLVREMEKKLETEVCVVYEATGVYHRVLKKVLEDNNIKQFIINPLLSAKTRKNDSLRSPKTDKLDPKSIAKTYYSHSLHNSHKPETIYHELRELSRYYEDILVHIRKDKVAFRAQLDVVFPGYDTLFDDLYSPVSLTIIEKYPHPEMLQKKKINTVSKVIQSKTCHRQAASDTMADKAIEYSKTIYSGCDKDDIEVLILQRFIKKLKEDMAEAERTIGEMIKLAQELPDFSIIKSIPGIGDNLAARIIAELGDMTRFKKKNELVAFAGLDPRISESGQDDGDHMHITKKGNKRLRCLLYLAVTCSIRLKRDDNSIKDFYIKKKQQSNPMCSKAAKTACASKLVRIIYSMCKTGELYQYNK

SEQ ID NO: 240175 - protein, 347 aa, unidentified
MSNITVLGIDLAKDVFQLHGVNEYGKPILKKKVKREALATFIAQMPQCKIVMEACGSANYWSRKFKSYGHDVSQISPQHVKPFVQGNKNDKNDARAIVIASQQSDMPSVPIKSIEQQEVQMLHGYRESLVQDRTALANRIRGYLREMGLFLKQGLSEVRKLVPLLLEDAENELTCEMRSMLSKCHEKLLALDEEIEEYTQKIEGFCKNNPKCRQLMALSGVGPMIASILFATIGDPMNFKNGRHFAAFLGLVPKEHSSGGKQRLMGISKRGDRYIRSLLIHGGRTVVKNSAKKTNYMNEWVRRIHKERGYNKAAVAVANKNARHIWAMLAYGDKYVDHLKVCTSKMA

SEQ ID NO: 240176 - protein, 344 aa, unidentified
MKHYAGLDVSVKETSICIVDETGKVCRELKVTSHPEDLLRVLQDPAWNLVRVGLEAGPLSQWLFNGLAEAGIPALCIETRHAKAYLKAQINKTDRNDARGIAQMMRVNLFRPVHVKTLASQKRRALLTARKLLQEKAIAIENDIRGLLRNFGLKVGVASAVMFEQRIRELVEGMPELGELMEVLLDARRKLREQFSKLHRKLLSIVREDEVCRRLMSVPGVGAVSALAFRATIDVPSRFRNSKAVGAVLGLTPAQHQSGESNWTGRISLCGDAMMRTLLYEGAQSILTRSVKWSWLKAWAMKIAKNRGLKRAIVALARRLAVIMHRLWVDGTEFRWTKEEAVSV

SEQ ID NO: 240177 - protein, 348 aa, unidentified
MTLVGCDLHARDQQVAVLDTATGEIQERRLVHDGDSVEQFYTALPGPVTVGIESTGYALWFHALLHRLGHEVIVGDAAKIRAMVVRKTKTDRRDAAHLLDLLRHDRFPTVWLPDPAVRDQRTLLAHRMRLVRMRTMVKNGVHAIALNYRLALGPSLFTRAGVAQLQALSLPPHTACRRSESLELLSWLNTRIKGLDDQIEEAAHAHPEAQRLMTHPGVGPLSALATVLVLGAVTRFPTSKHVVSYVGLAPAIESSAGKHRLGRITKQGNALLRYVLGQAGQAAIKRDPDLKRLYYAVLHRRGRSRAKIAVARKLLVRLYVMLRDQIDYQTFLHRAPAAARRKEMTPTS

SEQ ID NO: 240178 - protein, 353 aa, unidentified
MNNPATESTIHTIGLDIAKNSFSLHGFDEVGNTVLAKDLRRGQVLSFFERLKPCRVGLEACASAHHWARELIKFGHEVKLIPAQRVKAFLPRMKNDAQDAKAIARALRDPEMRFVGVKSVDQQASLMLFKARDLLIGQRTGLINALRGHFGEIGIVAPQGAHEVKVLINMVLHDDETQKLPPVMRHALKALVATLANVEDEIKVLNVAIAQQHKASEPSQRLATVPGIGILTASLLVATVSDPQSFSGGREFAAWIGLVPRQHSTGGKASLGKISKMGNRDLRRLLVVGAHAALYRIKSGKTQSPLADWARRLLAKKPFKLVAVALANKMARIAWAIMAKEDCYNPSHATATN

SEQ ID NO: 240179 - protein, 323 aa, unidentified
MKSRFEVDSDWTVVGIDVAKDELVTYADTKKEFGTCRNSTGDLRKMGRHLKKLGPRLVVLEASGGYEAKAAGIFTDLGLPVAVVYPRRVRQFGLGLGIIAKTDEVDACVIAYYGRVAGIKPMPPKSSELRQLQALTCRRSQLIEMRIAEQHRLETAHPSMHRDIKKHVDYVNHQIDTIEKKLARQISESGTWSEKAERLCSVPGVGPVLSSTLITELPELGSLSNKEIASLVGVAPFPRESGRRTGKRFCKGGRNSVRRVLYMATVSATRSNPVIIAFYKKLCDRGKLKKVALIACARKLLVTLNAISRDNSSWHPNNELFST

SEQ ID NO: 240180 - protein, 382 aa, unidentified
MTKNSKKQTQRAQKAKVAAVQLSALQQREANSLVIGIDLGDRTSAYCVRTLDQEEIATGTIATTVPAMAAFFQGMKRQRVVMEAGTPSRWVAELLELLGHEAIVGNSRKLKLITHSDRKNDKVDARLLSKLGCVGIEWLYPVYRRSERVQRDLSMVRAREVLMEMRTGLINHVRGQVKSFGCRISACDADRFVEVAKTELPEALRGALGGVLETLEGLEDQLYRYDCQVRQACEEKYPQTKWLLQISGVGPLTALTYVLTIEDPQRFASSRDVGAYLGLVAKERQSGGRDPQLGITKAGDEMLRKLLVNCAHHILGHRGADSDLRRWGLEIVARAQKAGQQGARKRAAAAVARKLAVVMHRLWVDERKYEPLRNSQATAPAA

SEQ ID NO: 240181 - protein, 339 aa, unidentified
MNRIVVGVDIAKRVFQLHWVESETGEIVALQLKREKFLEHFANRSKCLIGMEACGGSQHWARSLQKLGHEVKLLSARMVKPFVGGNKNDAADARGIWTAVQQPGIKAVAVKSEEQQAVLALHRMREQLVKFRTAQINGLRGLLTEYGEVMPQGRAGIKRDIPGALGRLSDRLPAMVIETLREQYARLGELDEQISQIERRLRQWQSQDSATQRIAAIPGVGLLGATAAVATMGDAKAFKSGREFAAWLGLVPRQTGTGGRVRLLGISKRGDKYLRTLLIHGARAVLTHSKSPPEWLTELMKRRPKNVAVVAMANKTARTIWALMAHERAYQSGYVSRPA

SEQ ID NO: 240182 - protein, 355 aa, unidentified
MKNQAVQYLAMDVHQATVVASVRNEQGAITMKATVATEARAILSLIRAVGTRVMVAFEEGTQAQWLHDLVLPHAEGVVVCNVRGKSELTNKSDRIDADALSELLRLGALKAVYHGAPSMLTLKELVRNYNTVVEDATRAMLRIKALFRARAIPTRGTSIYKVSDRAGWLDQLTIQGARVRAESLFKQLDLLRELRPKAKRAMIAEARKQSGWKSLRSIPFLGEVRTAQLIAIMATPHRFRTKRSIWPYAGLAVVTRSSADQEFADGKLRRRNRPPQTRGLNRNHNPMLKSIFKGAATAAAAKPGPLKNIYDACVARGTKPDMARVTLARKIASIALRLWKKGELWDPTKLTMQTT

SEQ ID NO: 240183 - protein, 427 aa, unidentified
MASLGRDSAQTVLCAAFVMGVAPGAIVAGFDVHRRQITVDALDTLSGELWRGQLDSTPAAVTEWAARFAGREVHVAVEACTGWLFVCRALEQAGGVAHLAEPVETSALRGRKRRAKTDRADAKWLRQLLCEGRLPESWIPPEHVRQWRSRARLRNTLLSERTSWIQRIRATLYHHGVDGAPDDLRTLAGRRFLEQLELSIDATERIRVALEIIDMLEIQLAAIERDLRTLARHQPGCQALMGQYGMGELSALVTLTELGDVTRMHASRQAVRMAGLDIGVHRSDRHAQLGKLTRQGSAPLRWALFEAAQSACRPASPDNADYHALKARGLSHNRASMTIARKLARRSYHLLRALGPAALDPPDPINRSVQAPQSPMRPKHAASSRSARGTHAQRGDPRKTERPQSLHRNDRSTISSPTATTGRRAPR

SEQ ID NO: 240184 - protein, 354 aa, unidentified
MKSITIGMDLGDKKIMVCVLNENIEKILKKEISNSKKELNKLISKYKNSKIIVALETGTHSPWISRHLEKLGCEVLVGNSRKLRMIYKNDRKSDEQDAEMLARIAKLDPELLSPIKHRSEKCHADLTLVKSRVVLLDSRKKIINNIRSISKTFGERLPSCTAKYFHKKVLEFIPEILKESLLPLLETIEHLTKQIDYFDKKMTELSEEKYPETKILKQITGVGPITSLAFVLTLETPDKFEKSRDVGAFLGMVPRRDQSGRIDKQLPISKKGDSYVRQSLVNCAQYILGVFGKDCDLRRFGERIMIRGGKNGKKRAVVAVARKLSVLMHKLWKTGDIYDPFYNSNKNKCSKKVA

SEQ ID NO: 240185 - protein, 340 aa, unidentified
MMAKTTYGLDLAKRVFQLYWVEPETGEVVNRRFSRNSLIRFFSNRPAGTIALEACGSAHWWARKLRSLGHEPKLLHARFVRPFVQNNKTDAADAKAIWTAVQQPEVRTVAVKTEEQQAILGLHRMRSNLVKSRTAYVNQLRGLLYEFGVTLRGGRQAGLQQIRERMAELEELLPSILFGELTEQLARVGQLDLGIKNLEQRIAAWCKQDPGCQAVLAVPGIGMLTATALVATIGDASTFKSGRELAAFIGLVPKQSGTGGIVRLGAISKRGEPYLRTLLIHGARAVAFTAKNKTPWAESLLERRPTNVAVVGMANKITRTVWAVLVHNRQYKRNYVSTAA

SEQ ID NO: 240186 - protein, 328 aa, unidentified
MSNDTLSDTVIGIDVSSKWLDIHVLPADKAERFANDPEGIASVVELSNELDVSLAVMESTGSYEMALAVELGLSDVPTAVVNPRQVRDFARAMGILAKTDTLDAKAIAQFAQRVRPEPRALPDHQARVLKAMVARRVQLIQMITMEKNRLHRALIPVHRRVTDHIAYIETELSDIDDDIARAIENSPIWRDKENLLRDVPGIGPVSSMTFIAALPELGTLSRQKIATLVGVAPMNRDSGSYRGKRSIWGGRSRVRRALYMARMVAVRYNPTIKAFHDRLIEAEKPKKVAIIASMRKLLTMVNAMLRDGTRWGQPRFVTADQTQVTPSA

SEQ ID NO: 240187 - protein, 342 aa, unidentified
MELYVGLDVSLDTTAVCVLDGAGKVVWRGRCSSTPDAIARVVREHAPTAVRIGLEAGQLSTWLVHGLRTLGLPAICLDARHAKAALSLQINKTDDNDALGLAQIVRTGWYREVAVKSMDSQAVRVLLMARAQLISQRQTTANLIRGLLKTFGLLVGQAGGGRFAVRVRELTADSPALVAIVEPLLTVWQTLREQVADLDRQVRVRAREDARVRRLMTAHGVGVVVALAYTAVIDDPARFAKSSSVGAYLGLTPRRYQSGEVDYDGHISRCGDGLLRSYLYEAANVVLSRLTKPSWLKEWGEALAKRIGARKAKVAVARKLAVVLHRMWMDKQEFRWSPKAAA

SEQ ID NO: 240188 - protein, 366 aa, unidentified
MENHSIVWVGMDTDTKKNQIALYRGGEKEPAEEWETGMDGGGIKRLIARLKREKNEVRCVYEAGPCGYELYRGLRKAGIHCDVIAPSLTPQKPGERVKTNRRDARNLGRLYRAGELTVIAVPSERQEALRDLTRAREDVREDLTRRQHRLNRFLHRQGYHYGDGDRWTQKHWAWIGRIHFEDSNLQVVLEESIRGVEQSLEQLKTYDGKIEENAQRPEYAEKVGRYQTLRGVKTVTAMTLVAEVPDMRLYGTAPQFMGSTGLVPSEHSTGEHERRGRITKTGNAHLRRVLVEAAWHYRHRPIAGPSIKKRRKQQPAAVVSIAERADQRLNRKFRRLTDRYNKKPAVAAVAVARELAGFIWAIGQQQ

SEQ ID NO: 240189 - protein, 400 aa, unidentified
MAVAVGVDVAKEFHWAALVHSETGRVLASRKVDNDPSAIQVLIDDIRAVQAEYGPATVAIDVLGGIAGLLQVMLVDAGLRLVHVSGLAVNRARRATRGGEHKSDPRDAKVIADQIRLRADELRPVEPATEAGSELRLLVGRRRELVVDQTRRIGRLRDLLASIHPGLERVVDPTHKVDTALLARYVTPTEIRRAGRRRISEYLRTTGRHHSTVIDALVDKALTAAGAQHVTVPGEAVAADIVRDLAREVLACRDKLADLDKRIHDALDRHPDAALIQSLPGMGATLTAEFLAVAGGITRFPTGDQLASAAGLAPVLQQSGKVHYLRRATSGDKTLKRVFYQSAFCALQRDPASRAFYDRKRAEGKRHHQALIALARRRINVLHAILRTRQPYRLTHALTA

SEQ ID NO: 240190 - protein, 414 aa, unidentified
MDVLHERCAGVDISKKDAKACVRTPSTRRRGTFTTETTTWGSTTNAVPALRDHLLAAEVTLVVIEATSDYWKPFYYLLADELNVILVNARQVKNLPGRKTDVSDAAWLAQLGAHGLVRPSFVPPQPVRELRDLTRARTQMTRERGQIVQRLEKLLEDTGIKLSAVASDIMGVSGRAMLEALTGGEHDPQVLAELARRKLRNKIPELTEALTGRFRAHHAFLTRLHLDHYDQLTDAIRQLDARIEEAMTPFRDALDLLDTIPGINRAVAEVIIAETGGDMSRFASAKHLASWAGVCPGHHESAGRTKNTKVRPGNPYLKGALGLAALGAVRTKDTYLQARYKRLTARRGPLRALVAVEHSIITAIWHMLTDHVPYQELGGTYFTQRDPERATRRAINALNQLGYIVTLNPLDSAA

SEQ ID NO: 240191 - protein, 342 aa, unidentified
MEHYAGIDVSLERSSVCVVDATGRVMREAKVASEPEALVGFFRQLGVAVSQIGLEAGPLSQWLHAGLTAAGFEAVLLETRHVKAALSAMIVKTDRKDARGIAQLLRMGWYRPVHRKSPAAQEVRALLVGRKLLQAKLRDVELSIRGILRGFGLKVGEVSKGRFAARVKELVAGHEMLETVIGAMLQACQGLQSEFMRLHRRMLAIVRGDAVCRRLMTAPGVGALVAVTFKTAVDDPERFRTAKAVGAHFGLTPKRYQSGETDVSGGISKVGDGMVRTALYEAANAMLTRTVRVSALKRWALAVARRRGMKRAKVALARKLAGVLHRMWAKGSDFRWGKEAVA

SEQ ID NO: 240192 - protein, 402 aa, unidentified
MSSSVALAPAAAVVAVDVGKATAAVLVSDAQRHRLLGPLDFSMTRAGLTQVITKTQAVLPAGLIRVGVEAAGHYHRPLATPAVWPGWQVVELNPAHVSEQRRVMGRRRVKTDALDLEAITELVLAGRGVVVGETSAPITELTAWAGLRRRRVATRVATKNQLLSQLDRCFPGLTLALPNVLDTRVGWLVAQEFADPRRLARLGASRFIRFAAVRGLQVRRPVADRLITAAREALPSADAPAARHMLAADFSLLTSLEEQARTAEAAMAKLLPDTAFAPLLSVPDWAVVRVGNYAAAVGDPDRWPSASQLYRAAGLSPIQYESAGRRRDSSISREGSVALRGALMDLGIGLWHGDPAAKHYAQQLRARGKHGGVIACAMAHRANKIAFALVRDQAGYDPARWA

SEQ ID NO: 240193 - protein, 374 aa, unidentified
MAEFSKYIGLDVHKETIAVAVADGDGGEVRYLGEIANEPAAVKRLLHKLSRDGGRLRFCYEAGPCGYELYRQIVGEGHACVVVAPALIPRKPGERIKTDRRDAASLARLDRAGELTAVWVPDPEQEAMRDLSRAREDMKIVERQLRQRLSGFLLRHRRRYGGKQAWSQAYWRWLEGERFERPQQQIVLEEYAEAVRQAQRRAAGLEQQLHRAIEGWSLGAAAQALTALRGVDRTAAATLLAELDDISRFDHPRQLMSYVGLVPSEYSSGARRRQGGITKTGNGHARRILIECAWGYRFPARKTATIQRRAERAPEAVQAIAWQAQLRLCDKYRRLSARGLNGSKVSAAIARELCGFVWAIVRQVQRTEQVSAPA

SEQ ID NO: 240194 - protein, 428 aa, unidentified
MNQTELSRVKEFRQLKNEIQASDTYLIVGIDVAKERHHASFGTGTGRTLLKKLIFDNTSAGFSELLARVEAVRAQNGLSDIVFGLEPTGNYHKPLGRYLISKGCHVVLVGGKAVKNNRELLDERWDKHDTKDAANVADLVSRGKCFYYDTPSREIEELRDLLSLRARLKKEEHSLSLRIRNNLLAKHFPELDSFYSACEKETLAIVRWCLNPQKIAAMPFDQFFKRVATNGRGIAQKLRLQKIYRLAHESIGCPVGCAVELQAALLVEKIKQVREQIAEVEQVIQRLCTQFPAYEYLLSIPGFGPYVASKVLATIADPWRFDGAKQVIRTAGYDLCAERSGKRSDQAVPVISKKGNSQLRYALYQAAMIASSRHRLFIAYFARMLQGRERERGIKTKMRVKLAAKMLVIAWTLMKKGEPFNPEYLNLQ

SEQ ID NO: 240195 - protein, 409 aa, unidentified
MSIFLYVGIDVSKDSLSVLINDSNHKRLWRNESIPNTECGFKRILKEVNSRRPKGKKERMNYGVALAVEASSIYQDDLLYFLKENCDFSLFCFNPSKVRSYAKSMGLRDKTDKIDAYVIAIYLADVLNKEKLPPLWTPPDPIFRSLRDLSDRRAELVKNRAQEKNRRHLMQCRTFCSFVADDINAGIEALDRRIDALDNELAKVIANSDALREPIRLLRTIPGIGVTVSIAFLALVPSLKGFHSAKQLASYIGLAPTCHESGTSVHKKGGISKQGNSAIRQYLFEAAKAATRSNSRNSCVKTFYTRLIERSKPANVATVAVAHKILRIIWGVLRSGKEFDWGYDPHSKSSEVSNSTSMSSQNQSLAQKSILKGEQESGPVSCQSASQSALPLLKVPLKNDPKVSPKKAS

SEQ ID NO: 240196 - protein, 380 aa, unidentified
MYKCERKSRHGVQKAELGQRLIQSQTQGGSSEQYMYYIGLDVHKKTISYCVKHGGSEVYAEGVLNATRGALDGWLKTLPQPWTGAMEATMFTGWIYDYLRPHAAALKVGHPLMLRAIACSKKKNDRVDAGKIADLLRCDLLPESYMAPSALRERRRALRYRNLLVRQNVQMKNKLAGLLMETGVTYNKEKLHQKRYFAELLSHNAEVEENAKPLLKIGRETIERLSQAERALVRTLERDPLLAARLQRLISIPGVGIVTALSWALEMGEVSRFASLKHAVSYCGLCSGENSSAGMQKRSPISKQRNKHLQTVLIEAAKLAPRWNSDLALLYEKEKQRGNRNRATLAVARKIVAYLLAVDRREQPFQGGKKEKAPLAQTAA

SEQ ID NO: 240197 - protein, 383 aa, unidentified
MNSVGIDISKGRSMVAVMRPFGEVVVSPFEVRHTDSELSELAKLLKSLDGETRVVMEATGNYHTPVAWLLHGAGLYVSVVNAKLVHGYGNNDLRRVKTDRKDAVKLANYGLDRWLTLPRYIPEEDTRLLLKNCYRQYQQYSKVQTMLKNNLISLLDTTFPGMNRLFNTPARADGSEKWVDFAADFWHCGCVCECSEKVFMNKYQRWCRKHGYNFSERKALDIYTEASGHIGVMPMSDTTKLLVAQAVSQLRATSAALAVLKQEMQTLASQLPEYPIVMEMFGVGPALGPQLMAEIGDVRRFHSKKALVAYAGIDAPPNDSGDVTGRHKGMSKVGAPSLRRTLFLVMSVYLQNAPLDEPIYQFMDRKRAEGKPYRVYMLSLIHI

SEQ ID NO: 240198 - protein, 400 aa, unidentified
MLSIGIDVSKGKSTVCGMKPGGEIVYAPFEVQHTREGMLELVSLLRSSGEEVRAVLESTGSYHCPVVAALLENGIFVSVVNSLRMKRFCSQSIRKVKTDRIDAMQIALYGLAYWQELQPTRLPEDTYRELQLLARQYYQMTSMLIKAKVDFNAICDQVLPGMQELMNDHAGRHKLSDFVLRYRHTTHILEMGETRFRKDYCKWAEKKGYRNCERMAALIFATAQNGIPVLPNAPSTQIVITEAIRVLHTVEASRDAILTQMQALAKTLPEYSLVREMPCIGDTLAPRLIAEIGDVRRFHSKRALIAYAGIDAPPYQSGKFCANNRHISKRGNRYLRKTGYEVMQSYVMHKPANDPIFTFIEKKRSEGKCGKLAMVAGLNKFLRVYYGKVTELYRSLPAIE

SEQ ID NO: 240199 - protein, 403 aa, unidentified
MSFNGASVMAASVVAVDVGKNRAALSITGADRHRLFGPADFAMTAPALAAVLERVWAVLPAGPVKVGVEAAGHYHRPLLGSGVWPAGWEVLELSPARVSEQRRIQGRRRVKTDAIDLEAITELVLAGYGVPVTARAAAVTELTGWAMHRGRRVQTRTATKNQLLAQLDRCFPGLTVVLPDVLGTKVGRLVAAEFADPHRLTALGASRFVSFAAHRGLRVRRSTADRLVAVARAALPCSEAQVARQVLADDLVLLACLDVQVAAAEAKLAQLLPDTPFAPLITVPGWGTVRAGNYGAAVGDPRRWLGASQLYRASGLSPAQYESAGKRRDGTISREGSVALRRALIDLGIRLWHADPAARRYGQALRARGKKGGVIGCAMAHRANKIAHALVRDQSSYDPDRWA

SEQ ID NO: 240200 - protein, 418 aa, unidentified
MTRKDDTRIIEIMHPICCGLDVHKENIAACIIYQDEHGHEKQDIQVFGTFTDDLMRLRTWLINHECPVVAMESTGIYWRPVHNVLEETVQVVLVNARDIKNVPGRKTDISDCIWLAGLLRHGLIRGSFIPPKQVTEWRDLTRLRKKYVHTVGDYRKRTHKLFESANIKIDSVVSDLFGTTGRNLMNLLASEASLTKEDIRLCVRGKLKGKEEELYRSIQGFFSDHHRFILKRLLMTIDMLEGEIAALNTRISDMMNDQKEVLNRMGEAPGIGSVSSCDILAEIGPDMSAFPTAEALISWAGLCPGNNESAGKRKSGKSPVRKHHLKTILIEVAWAAVKKKGSYFKDKYYRLKARRGAKKAIVAIAHRILLGIYHVIKHGVRFRDLGVDYLTQRNKAITLVRLRKQAQSLGFILVEDAA

SEQ ID NO: 240201 - protein, 463 aa, unidentified
MPKARKSRKKLALQVDVTAGLEALHHHAAGIDVGNAEHYAAVPVGRDPQPVQTFGSFTADLHRLAKWLQACQIETVVMQATGVYWIALYEVLEGYGLQVNVVNAKYTKTLPGRKTDVLECQWLQKLHTFGLLNNSFLPPEEIRVLRTYLRQRENLVAAAGTCIQQMQKVLTQMNVQLANVISDLSGMTGMAILQAILDGQRDPQQLAALADPRVQASRKEIAQSLEGHWREDLLFVLGQVHDLYFTYLESITACDQRIETHLKTMQGKVDVVAQPLPEARPKDRLPNRKHIPQFGLREELYRITGVDLTRIDGIQVQTAQVLVSEVGVDMTRWPTEHHFSSWLGLSPNNQITGGKVIRRGTKKVLNRAATALRLAAQTLHRSKSYLGAKYRRLRARLGAPKAITAMAHHLARLIYRLLRFGTQYHDKGVEYYERKYRETEMKWLQKQAAKLNMQLIPTGALTK

SEQ ID NO: 240202 - protein, 317 aa, unidentified
MMSIQNYGGIDIAKKNFVIGITGMAKTKTETNNPKGFQHTVEYLQKHHVSLVVLESTGGLEIPLAKALHHAGLRVVIVNPRQTHSYAQSFSLGKTDIKDAKMLADYAQAIELKGLTADMLYQPPSLAEEELEALVKRRSQLVEMRTAEKNRLMQIHPSQQQSVEDLIQHFSTLIADLDKQIAKHNDSNFDGKNKIIGDIKGVGDTTCATLMSMLPELGRLPHKRIALLVGVVPPANQSGESVGKTGCIGGRMEVRNALYMATLTASRFEPKIKAFYERLIGKGKPFKVAINACMHKLLRILNARVRDYLQSDELQSA

SEQ ID NO: 240203 - protein, 400 aa, unidentified
MKVTFQTCCGVDVHKSFLVATIIKTSSGIEPSYQKRRFSTFNNSILEFKKWLLENECLYVCMESTGKYWIPVFNLLEDEINVTIANPKWVKSVKGNKDDTKDSKWIGDLFRLGLVRGSYIPCKKIRILREFTRYRYKLVSCRSSEKNRYQNALTVCNVALDSVVSDIFGKSSTSIIDYLLEQSGTSIDHEVIASKLLKRLKAKEDAVIESIEGYQMTDSQKYRMHLVRAHMDYVTAATNDVDSEIESLIAFDPDYENAVELLCTIPGVKYDSAITIISEIGIDMSQFCSSKRLCCWAGLTPGSNESAGKKKSDKSPYYKKKYESLVKRRGKKRAIIAIARMILTAIFQMLTTGETWNPCDLYKIDMPEALLEKQKQKAIKQAQKLLIREGLLPPTEPIAS

SEQ ID NO: 240204 - protein, 341 aa, unidentified
MSLYAGLDISVKTTAICVVEGNGRVLLEATVDSSPDAIAGRLQELDQPLDRIGLEAGPLSQWIYAGLVDKGLAAICVETRHMHAALSARINKTDRNDARGIAQMMRVGLFKAVHVKTPASQHRRLLLTSRKLLQRKIYDIENDLRGSLRNFGLKVGVVGTAKFDDRIRALVSDHPVIAAIVGPLLEARAVLRIQFAKLHRMLLELVRTDPICRRLMSAPGVGPIVALTFRTCVDNPARFSRSKCVGAHYGLTPRLYQSGEISRTGRISRCGDVMLRSSLYEAALVVLTGPGRWNPLKAWGIAVARRRGMQKAIVAVARKLAIVLHRMWRDNTNFRWTGASA

SEQ ID NO: 240205 - protein, 310 aa, unidentified
MDCYVGIDVAKASLAVASWPDDTQWTTTQSEADLSALVARLQQRAPRVIVLEATGGYEAVVAGQLAAAGLPVVVVNPRQVRAFADALGQRAKTDPLDARVLALFGARVQPPVRVLADAATQDLLAQITRRRQLVEMLGAERNRLALARRPVRKPLQAHITWLERQLTTLDADIAATIHASPVWQAREDLLRSVPGIGPQTARALIAQLPELGHLSHRAVAALVGVAPFACDSGRRRGIRTIRGGRCAIRAPLYMATLTATRYNPRIAAFYQRLVAVGKPKKVALIAAMHKLLTVLNSVVRHNRPWDAQSA

SEQ ID NO: 240206 - protein, 408 aa, unidentified
MNPLYVGIDVSSKSNVIYLMLPDGAKHSCFSVANSQDGSSQMVKRILSAVTSRSLDTVVIGLEATSVYGDNLVFFLREDASLAPFNRKIHVLNPKQVKNFKEAYNDLPKNDYMDSFVIADCLRFGRINKEVYLGDYRYKALQNLTRARFFAVQNLVKEKQRFINVLFKKYSTMTQEKVFSDTFSTTALAVYEEFESAEALAAMDLQELTDFIMEKGKNRFPNPDAVAKAIQKAARSSYRLPKTVNDSINQVLSISITSIKALDAQIKEFNKAIEAQMELLPNVLISIPGIGPVISAGIMAEIGDINRFPGQAQLGKYAGLAWTQNQSGDFEAENTKLIRSGNRFLKYYLCEGALSLVRCDTEYSSFYHSKYKEVNRHQHKRALALTARKFVRLVFRLLKDNRLYRAAE

SEQ ID NO: 240207 - protein, 426 aa, unidentified
MARQKRSVEGEFDIFVGVDWGTEFHRACVLNARGEILRGCRIDHNGEAITEFLRSLQQLTNGGPSRIAVAIEVPRGPVVEAFLEGGFAVFSINPKQLDRFRDRHTTAGAKDDSRDAYVAADSLRTDQHCFRRIATDHPDVVRLRELSRTEESLGEALRRTVNQLYQLLLRYYPQLLQLNSAPDEPWVWALLEAAPHPQCGAKLTLARLKSLLAKHRIRRWAAEEVQVILRTPPLPLSAGSAEAISEHALLLLPQLRLLHTQRKKVHDRIEALLNHMTVVGRDHPECCQHRDIGLLLSIPGLGCLIAANLYTEAADSLAQRDYAALRAHSGVAPVTKQSGKSKQVIMRRGCSQRLRGSVYHLARCSVLHDPHSKQHYAHLRSIGHTHGRALRGVADRLLSMLVAMLKSGKPYDATRRSTAAATAPAT

SEQ ID NO: 240208 - protein, 339 aa, unidentified
MKVTTYGLDLAKRVFQLHWVDAVTGEICRRQLKRAEVAEFFANCEPSIVAMEACGTAHYWARKLSGYGHEVRLIAAQFVRPFVKSNKTDAADAHAIWEAAQRPGMKFVAVKSEAQQSVLTLHRMREQLVKMRTMQVNQLRGLLYEFGAELPQGRQRGIARIPGELAKLEGVLSVLVMDTIRQQLKRIESFDQDIGAIEKKLAIWKKEDQAVRRLMAIPGVGLLSATAAVATIGDAKAFKSGREFAAFLGLVPRQSGTGGRVKLLGISKRGDVYLRTLLIHGARSVITNAKERPVWLENLLSRRPLNVAVVALANKMARTIWALLAHERTYQKGYVARAA

SEQ ID NO: 240209 - protein, 424 aa, unidentified
MSVVEGWQLVDVLHDRCAGLDISKRDVKVCLRTPGKRRGQRHSEVRTFATTTNALLAMRDWLAAEQVTLAVMEATGDYWRAPFYLLEDVVTVELVNARQVKAVPGRKTDVADSVWLAQLAECGLLRGSFVPPEPIRQLRDLTRYRSVLTSERTREAQRLEKELEDAGIKLSAVVTDILGVSGRAMMEALIRGERDAEVLADMARGRMRPKIPDLLQAMVGRFGEHHAFLCRMHLDRIDAISRDIVTLSTRIEQLMAPFRDRLARLNTMPGISQRVAEVIIAETGGDMSVFPTAGHLASWAGVCPGNNESGGRRKSGKTTKGNRWLNETLGVAAMAAARSRNTYLGAQYGRFLRRLGNKQKALVAVEHSILTSIWHMLTTDSDYRDLGPDHFIKRDPDRERRRAITALNKLGYTVTLNPIETTAA

SEQ ID NO: 240210 - protein, 404 aa, unidentified
MASAVEADTVGQRVFGGVDSHADTLHVAVVSGNGGHLADAEFATTAAGYAAALAFVTAHGHVIAIGVEGTASYGAGFTRAARSAGRHVVEVNRPDRAERRRIGKSDPIDAYAAARAALSGRAQAAPKDDTVAGIRALHNAARSAVKARTAALNQIGGILISAPEAIRATYGRLKGPARTDALVRLRPCGDPVHAAILTALKSLARRVKELTAEHEALSKALDADVTAHNPGLRSTHGVGPDTAAQLLVTAGGNPERMRTEASFAALCGAAPVPASSGRTNRHRLSRGGDRAANAALYRIALVRMSSDARTREYVARQTTAGRTKKEIIRLLKRAIAREVFRCLTTTVLVPDIADLRPLRQSRGITLTAAAGHFGVWPAAISTLERGIRRDDALTHAYRDWLQAS

SEQ ID NO: 240211 - protein, 452 aa, unidentified
MDPGFLEHLRLSPRAVIGPGARFLEFFFTGPYADDATQEEEEMELLHRRCCGLDVHKETVVACLRLVSDGQVTTEVRTFQTTTADLLRLSEWLAANECTHVAMEATGVYWKPVWHILDDGEFELVLANAAHVKNVPGRKTDVNDAMWLAELLAHGLIRASFVPDTQTQEMRNLLRTRKQLVREQSSHVLRVQKTLEDANIKLDSVLTDLMGKSGRAMMEALIAGETNPTKLASLADPRVKASHEEFREALRGRVTKHHRFLLRLHLNQIDALDAAMATLDAQVEANLGPSRTAVDLIMSIPGIKNLSAHVIISEIGIDMSRFPSDAHLISWAGVCPGNDESAGKRRSNRLRKGAPWLKTTLVQCAWAAVKKKNSYLQAQFYRIKVRRGPKKAIMAVAASILTAIYHMLKDGTMYQDLGCNHFDRRSTDQQKNRLVKRLTDLGYAVEIKPLAA

SEQ ID NO: 240212 - protein, 349 aa, unidentified
MGEVSTIGVDIEKSVFQIRGVDAEGTVVIRKRVGRAKFLEFFEQLPPCLVGMEACATAHQWARELKKLGHDARLMPPTYVKAYVKRGKNDANDAAAICEAVTRPSMRFVPIKSVEQQSALMLHRTRDLLIRQRTQLINALRAHLAELGLVAAKGHEGLQQLVMAVTESSDERLPSDAGFACQTIVAQLHAVQTQVNGLDKRITQAHRANADSKRLDAIPGFGVILSTAVAATMTDPKAFRTGREFAAWIGLVPRQNSSGGKERLGSISKQGDRYLRRLLVLGAISIVRTARMRPDKYPWVIELLARRPAKVVAVALANKMARTAWAVLAKGETYRAPAHSSNAAIAAAA

SEQ ID NO: 240213 - protein, 316 aa, unidentified
MSSPGVFVGIDVAQAELVIALRPTGESWTVGNDEPGIAALMRRLRPLAVTLIVLEATGGYERAAVAALATAGFPLVVANPRHVRDFARGTGQLAKTDHVDAQILALFAERVHPTPRPLPDAATQALEALLARRRQLLDMLTAERNRLAHAGPPIAQDLRRHIRWLERRLGKLDHDLDQQIQRSPVWRTQDDLLQSAPGVGPVLSRTLLAALPELGRLTHKQIAALVGVAPLARDSGSRRGHRRVWGGRAAVRAVLYMGALAAAHHNPVIRAFYQRLVRAGKPKKVALTACMHKLLTILNAMVRSNTAWRANVAQTT

SEQ ID NO: 240214 - protein, 344 aa, unidentified
MNIATIGIDLAKNVSQLHGVNGHGKVVLRRQIRRGQMRGLFVNLPPCLIGMEACASAHHWARTLESYGHTVRLIAPHFVKPYVKTHKTDATDAEAICEAVNRPNMRFVPIKSIEQQSALSLHRVRQGFVRARTAQACQIRGLLAEFGLVMPRGIANIKQVPKLLQVAGKELPVPFCRLIERLLAHLKELDRQTRELEEQIVDWHERSEPSRRLAKIPGIGPITASALVASISDVRSFKNGRELAAWLGLVPRQHSSGGKPTLLGISKRGDRYLRTLRVHGARSVIVRVLKRDDQKDSWLKRLLERRHVNVATVALAHKTVRTVWAMLAHDREYCPNYKSLPVAA

SEQ ID NO: 240215 - protein, 466 aa, unidentified
MAHKRKNIKSKKQKRSPRSLKAIQPNAAGIDLGSREHWVAGPPLEDETPNVERFGTTTPELFRLADWLKQQGVETVAMESTGVYWIPLFEILESRGFEVVLANARQIRNVPGRKTDMIDSQWVQLLHACGLLRGSFRPSDDICQLRALIRERNTMVEQRSDWVRRMQKYLDQMNICVHQAVSDITGVTGMAIIRAIVDGERDPHTLARLRDRRCRKSEAQIAEHLTGNWRAEHLFNLRQALKMYDQLCAVITDYDSEILSYLATLQPADTSDESAPPPASKSKAKNLVKRGQEPMRQALYQLCGVDLTTIDGIGVDTSTVIVSELGLDFTVFPNENHFVSYLRLAPNLSISAGKKVPKKSKASTCTRVATALRMAALTLRRSKTALGAFYRRVAWRKGASVAVFATARKLAQLIYRLVRYGQAYVDTGTEAYEARFKQRRIKFFTKALNDMGYNVEPLKTEEAILV

SEQ ID NO: 240216 - protein, 411 aa, unidentified
MENVFPCCAGLDVHKESVEACVRRIEPNGRLHQQTNHWGTMTRDLLAMADWMAAQGVTHVAMESTGVFWKPIYNILEGRFTMLLVNARHLKQVPGQKSDVRDCQWIAQLLQYGLLKGSFIPPSSQRELRDLTRHRTQLVEEKARTANRIHKVLQDTNIKLSSVATDVLGASGRAMLQALITGEEDPVKLADLAQRKLRGKIPELEKALEGHLTEHHRFMLQLLWKQLAQQEELIAELDRKIEEQTRPFAAEIDRLDTVPGVDRRVAEVVLAEVGPDMNPFPTHASLASWAGMCPGNEESAGKRVRRRITPGNRWLKRTLAQATWAASHTKNTYLASQYRRLAGRRGRKRALIAVGHSILVIFYHMLKEGTSYTDLGGDFFDRLEPQRLTRYYVKRLESLGHKVTLESCAAA

SEQ ID NO: 240217 - protein, 395 aa, unidentified
MMYLGIDIGKNNHEAGIITEGGKKVGKSLRFSNDREGFTALLNFIGRSVPAGDDLSIGMEATGHYWIPLYSFLHEKGFKVHVINPIQSDSLRNFHIRQAKTDSIDCFLIAETLRFGNFTETQLADEDIMSLQKLARFRESLKDRCGDCKRQVIAVLDQVFPEYDTLFTDMFGESSKAFLKSCGTPEQTLEVDVKSLAALLSKASRGRHGTEKAGEIKDLAANSVGVTLCANTFAFQIRLLIEQIEFTEKQIEKIDKLLARLLKKLNSVIMTIPGVGPVTGAIILGEIKDINRFDNPKKLVAFAGIDPTVRQSGNYSGTNNRLSKRGSPYLRRAIWMSAVVAARFDPVFKAFYEKKRSEGKAYGTAIGAVARKLIYTIFAILKESKPYEVRLNPPG

SEQ ID NO: 240218 - protein, 337 aa, unidentified
MGMDQHRAQISAEWIETVTGEISRARVAPADRAGVRKFLAQFKGVGLEVALEATTGWRFVVEELERIGAEVHLAEVVQTSGLKGRGKRAKSDWADARHLRELLLIGRLPESWIAPAHLLDLRARVRCRHTLLHQRTEWQQRMQAVLYHHGAPHARGLLKLENRERVAALKLPPAAREQLTIALQMIDAIDLQLAPFDLALRAYARKQPGCRTLTDEIYGIGELTSVTILPELGDTRRFQNSRDAVRYSGLDVTVHQSDQRRAVGHLSRQGPPALRWALYEAAQAARRPGSPDRDYYEQLAARIGGNRACIAISRKLLKRSYHLLRALGDQALEPVTT

SEQ ID NO: 240219 - protein, 331 aa, unidentified
MKKTDFRYFIGIDVSKRTLDVAILKEQTTSSFVFDNTVKGIRAFLRLLRNQGIALRDTLICMEHTGVYGRLVLSKLLEKQANICVEMALRIARSMGIQRGKNDKIDAIRIARYAAKNCDELALYQPVPEILEKVKILVKIREKLVHFRADLSKHPNEIKAFAPELGKLAEKNIKKTINCLTKEINRIEAELRALVLSDDKLNTTIGLVTSVTGIGMMTALYLTIFTNFFTRYHNPKQLACYCGVVPFEHTSGSSVEKNSRVHHIANKTLKKQLHMCALVAVRCDPEIKIYFERKAEEGKNKMLLLNNVRNKLVLRVCAVIKRQKPYQKRVA

SEQ ID NO: 240220 - protein, 438 aa, unidentified
MAVVMIGIDPHKASHTAVAINAAEQSLGQLRVRASAVQAERLLGWAQAWPERAWAVEGAGGVGHLLAQQLLSAGERVLDVPPKLAARVRLLATGDVNKNDPNDARSVAVAALRSAGVRQARRDDHAAVLKVWSKRHQDLAQARTQVACRLHQVLCELIPGGVPGEITAGQAGQILAAITPAGAVEAARRELAAELTEDLRGAGTRIRETRKKTAAAVRAAGTSLTGLFGVGPVSAAAVIDDVRHVSRFPNRDHFAAYNGTAPIEVSSGGRKIYRLSRRGNRRLNHAIHMAAVTQIRYRHSPGRAYYDKKLAEGKTGKEALRCLKRQISDAIFACLQADARRAAAAPEKSPGGQPGNHSASRAAGLHPARRLFGQATPGPATHPTTPTAAFPAPLPTRASGRPGQEPGAARPRSGAPQGVLEATAREPIIPAAGKRPLR

SEQ ID NO: 240221 - protein, 340 aa, unidentified
MNISKQIVGIDVSKDTLNVCYGTYGPNNERNFSKTKIFSNNKEGHKKLLNWADTQTTLKDRDHRTSVIFVCEATGIYHENLLYFLSSNNMPVSVILPNKAKAFSRTRDMKSKTDKIDARMLTELGLEKELKLWKNPNITLKKLKQLSRAIKTIKDKQTAVKNQLHAIDHSYESNELIRSTLLEELAMHKKNIKKYEKAIKELIKADKVLEQKINNILPAKGIGLSSIVTVISETDGFALIENSKQLASYAGMDVVHRESGLYKGKTKISKKGNSHIRSSLYMPALSAKKSNRKFKEFYDRIIEKRKIPGIAIIAVARKILLLIYILWKKNELYDPNYKTI

SEQ ID NO: 240222 - protein, 317 aa, unidentified
MSFVGIDVSKTRLDIAERPGNKRWSAVNAEADIGKVVETVGALSPQVIVIEATGGMEVPLVAALSQARLPVVVVNPRQVRDFAKAVGRLAKTDRIDAEILAHFGEAVKPKVRALKDEDTQILTALVMRRRQVIEMLTAEKNRLGISPKVVHKDIEQHIDWLQTRLEDIDRHLDSAIRKSPVWREKDDLLRSVPGVGQVLSVSLITGLPELGTLSRRQIAALVGVAPLSCDSGLFRGKRTVWGGRSHLRSVLYMATLSASRFNPAISRFYRRLVEAGKKPKVALTACMRKLLIILNAIMKNRIPWQADYSTCSTPQIP

SEQ ID NO: 240223 - protein, 380 aa, unidentified
MKKNSIARLQVSKSQIRRMATKQRLTVGLDLGDLFSRYCVLNETGEKASEGALPTTKAGLDSMFANMAPCRIAIEVGTHSPWISRQLTALGHEVIVANPRKLKLITESLKKNDRMDAEQLARLARVDPQLLAPIRHRGPEAQGDLAIIRARAGLVDCRTELINMARGLAKPMGERLKKCDADYVKESLADGLSEAAQVVIRPLLKSVEGINQQIEAYDKQIEEIEKRYPETKVLKQVNGVGTLIALTFILTLEDAERFQHSRDVGPYLGLTRKLRDSGFSQPELGISKAGDQLLRRLLVQAAHCILREGAPDSDLRRWGLKLQDGGGKKVSQRKKKRAIVAVARKLAVLLHRLWVTGEVYDPQYNRKAEEAAKGKRKAAA

SEQ ID NO: 240224 - protein, 372 aa, unidentified
MGGNIFYVAVDVDDKNFHGCGINGQTGEIVEFVTRPGAGQLAKKLAEFRREGSEIKVCYEATYLGFSLQRDLAKHGFACEVIAPSMIPRKAGLGVKTDRVDSHEMAVYYMNGQLTAVHIPTVAEETVRDTVRARRFVSDQQASLKLHILSTCKRMGLHYREVNDKTKKHYWTKVHREWLTKKIKEEYSHQEFTMTMLLMQLQDLERRIELYDAKIVEIAESPNYREKVKSLSCYRGIELITAMTLITELHDIRRFKHPKQLCSYAGMDLREYSSGGHERRYGMSKMGNRHIRTSVIEACQQAKRIPNVGKSLKARRGGAKEKYIEIADRCMSRLYKKSQRMLENGKMGNKVKVACAREMLCFVWESLHAAIA

SEQ ID NO: 240225 - protein, 346 aa, unidentified
MTTMTQTKVKVIGGVDTHGDVHVAAAIDEIGRVLGTASFATTAAGNRELLAWLRDHGELDRVGIEGTGSWGAGLCRYLNDRDVNVVEVDRPNRQDRRRRGKSDTIDAEAAARAALNGTATGVPKTRDGDVEAIRALRVVRRSAMQGRVKGLHQLRALCSTAPQDVRDQLRGLNRKDLLDLCARMRVSDAGTPTTATKLALRELARRINTLENELGRLDAQLAPLVARACPELLELRGVGPDTAAILLVTAGDNRERLRSEASFAKMCGVAPLEASSGRVRRHRLNRGGDRQANHALWRIVLVRMHCDPRTREYVARRRAEGLSTQEIMRCLKRYVAREIYRVLTEH

SEQ ID NO: 240226 - protein, 350 aa, unidentified
MNKITTLGIDLAKSIFQLHGIDLAGKVVLRREVRRAQLMKSIAQLEPCLIGIEACGSAHYWARRFSEHGHEVKMMSPQFVKPYRKSDKNDRNDAEAICEAVTRPSMRFVAVKSVEQQDMLTLHRVREGLMKERVALINRIRGSLSEYGIVIAKNASNLRRELPGILEDAGNGLTVMARQIFNELYDDLSAREERIAQVERSIRTLGSHHEVVRRLETVPGIGYLSATALFGTVGDAKQYKNGRQLAAWMGLVPRQASSGGRQRLFGITKRGDKYLRKLLVHGARSITTRAEHKPQPQDHWLNELRVRRGKFRSYVAQANKTARIAWVIMAKGEVYKAPTETLKTSVAAAA

SEQ ID NO: 240227 - protein, 354 aa, unidentified
MKKIFIGIDFSKEKFDATLIKAEGLKECAPSVHEVFDNKTSGYRRLAKWVKAHAESFAVDTWLFCGENTGDYSIGLSNYLYASGHDMWLECAYKIKHSAGIQRVKNDKADSRAIAEYAMRNYDKMILHKPQRTSLTCLREVFLYRHSLVRQKVALQVRRDEKRLTQEKSGARAFMSFTSKHLITEVNKAIAKCDEKIKEIIASDDELREVFDIITSMPGIGVQNATCLIVYTDNFQKFDLDSRKIACYYGIAPFGRQSGTSVNSRPQVSPFANRMIKSLLSQAALAAIKFDANVHSYYQRLIERGKHPLLAHNNIKNKMLHILVAMVRDRVKYNPENVYRTSNKVSLAPQMLNI

SEQ ID NO: 240228 - protein, 337 aa, unidentified
MKYSGIDLHSNNSVVTVTDEEDRVVAERRLPNELERIVGFLSPWREELVGVVVESTFNWYWLVDGLQEAGFKVHLANTTAIKKYDGLKHSGDEADARYLAHLLRLGILPTGTILPPEQRAVRDLARKRMQLVRGRTTHVLAVENITARQQGARMSGHQVKRLTAEDIERMPLPAEVVLAVKANVAVITTLSAQIDILEKRLQQLLGERPEYRLLTSVPGIGQVLAATILLETGPIERFASVGNYASYARCVDSQRTSNGKKKGEGNTKNGNKYLAWAFVEAANYALRYCAEARRFYERKKAKANRVVAIKALAHKLARACFHILNEGKPFDVTRCFA

SEQ ID NO: 240229 - protein, 323 aa, unidentified
MNKDIKYFGIDISHLVFDVTDSEGNYYQFKNSISGFKKFVKLLDFNSHCVMEATGYYHYQLAYYLQEEGIKVSVENPLAVKRFIQMKLSKIKTDKSDSKLICEYAKDVKLKLWKGNSKHQLECLQMTRLLGVYTKQSTMLKNKLHGEAVLGNPSKVVVSSLKRSLKQVEKELKMIEDKLLALVKEVHQDVLTRLKSIPGIGPKTSLMLVVLTDGFDRFTSGSELCSYAGLTPVIRQSGSSVKGRPRISKIGNQKLRNLLFMCSFNACKYNYACKAIYDRLVAKGKSKKLALIAVCNKLLKQAFAIAKSGLTYDNNYRSVLLKN

SEQ ID NO: 240230 - protein, 340 aa, unidentified
MKVSTVGLDIAKQVFQVHGVDERGKVVLQKRLKRREMAEFFANLPPCLVGMEACGTSHYWGRQLAGFGHTVKLMTPRFVKPYLNREKNDANDAAAICEAVGRPSMRFVPLKSAEQQALLVLHRARSGLVRARPRASNQGRGVLLEFGITLRIGRREVAARLPEILEDAENGLPPVAREGIAVLGRQLKDLEQRIAEIEHAISVWHQSQEASVRLAAIPGIGVFSATALVATAGDATVFKNGRQFAAWLGLVPKQHSSGGRIRLAGISKRGDRYLRTLLIQGAHAVLRHRSPGADVWLDHLVQRRHPNVAAVAIANKNARLAWALLAHQRQYQSDFVSSAP

SEQ ID NO: 240231 - protein, 363 aa, unidentified
MEITTIGIDLAKSVFALSGADVRGKVVLRKQLRRGQVVELMGRLGRCEVGMEACGGAHHWARRIAALGHEVRLMSPALVAPYRKGNKHDRNDADAVLEAASRPSMRFVAIKSVAQQDLLALHRVRSRLMKQRIALSNQIRALLHERGAVARPGAAGLRAGVAAALADEHNELSGEMRALVAELMEELRALELRLKSFDQRIERAAGRDQRCVRLQEVPGVGPLIASALVATVGNAREFRNGRELSAYLGLTPRQHSSGGKTVMLGISKHGDRYLRTLMIHGARAVLYGKRRRTHPRAAWAARLVASRGPNVAAVALANHNARVLWALLSRDDRYQARRAVFRPDPPTPVERARAEKLLIVKAS

SEQ ID NO: 240232 - protein, 421 aa, unidentified
MKPQVSEAFAAFVGLDWADAKHAICLQAAGTVQREFLSITHSPETVHTWVQTLRTRFHGQPVAVCLELNKGPIVSALRHYDCLVLFPVNPLTVAKYREAFTPSRAKDDPTDAELLVDILLKHRDKLAPLNPQSPAMRALAQLVEHRRRLVGDKVRLTNRLTSALKNYFPQVLQWFAEKDTAIFCDFLSRWPTLKAAQLARRTALEGFFRTHHVRSTDLIATRIEAIKSARALTTDDGVITPNAILVHALVAQLRVTLQGIADFDRVIVQRAQDHPDFPLFDALPGAGAVFAPRLLVAFGEQRERFTSAEDLQKYAGIAPVTERSGKKAWVHWRLQCPKFLRPTFVEWAAESTRHSFWAQVYYQQQRDKGKAHQAAVRALAFKWIRILYRCWQERTPYDEAIYLQALKRRNAPLLHNLADMS

SEQ ID NO: 240233 - protein, 400 aa, unidentified
MKFVGWDWASTSHDVTVLDEQGRVVERWALRHTEQALAETLARLARHGQPAELPVIIERSAGLVVDRLLAAGHPVVPVHPTAFHAARPRWGAAGAKSDPGDSYKLADYLRTDGHRLRRLQPLDPGLRELQALVRLREDHVRARTAASNQLGALLDASWPGPKAMFCKLASDIALAFLTDYPTPQAAARLGQARLAAFCRRHAYRGGKPPAELLARLRAAPIPSSGLAPAVLAQLIGAQVQLLRSLQATIGELETAITQRVAQHPRAKLLRGLPGVGTINLAQLLAEVGPILDRVSTAEQAAAECGAAPVTRASGKTSGVYFRWAANSRARTALTAFAHNARMQSPWAGRLYADARARGKPNPHATRIVARAWLRVIWACWHTNTPYDPCAHRAEQRLTAA

SEQ ID NO: 240234 - protein, 343 aa, unidentified
MNATTKTVVGVDTAKQVFQLHWVDTATGEVFSKQLKRARFLEHFVNKAPCLIGMEACGGSQHWARRLQEMGHQVKLMPGKVVKAFVTGNKNDIADARAIWLAVQQPGVHAVAVKSEAQQAMLALHRMRQQLVKFRTMQSNGLRGLLGEYGEVMPVGRAALNRGMKEALERLAERLPAVLIETLREQWEMLARLDEQVVRIEQRLLAWMRQDRSCKTIAAIPGVGLLTATAAVATLGDAKAFRSGREFAAWLGLVPAQTGTGGKVRLLGMSKRGDTYLRTLLIHGARAVLMHAKEPGKWLQEIGKRRPPNVVIVALANKMARTIWALLAHSREYDKEHVSVRPI

SEQ ID NO: 240235 - protein, 345 aa, unidentified
MESMYYIGLDVHKKTISYCVKDGSGQIHAEGAIPATRADLDLWMKTLPQPWTAAMEATLFTGWIYDHLLPHAAALKVAHPLMLRAIAAAKKKNDRVDAHKIADCLRCDFLPECYMVSTAIRERRRTLRYRNLLVRQAVQLKNKISGLLMEAGVSYNKQKLHKVGYFRELLATNQEIGEGLRPLLRICRETLVRLQKTESALVRSLEHDPLLAERVERLMTIPAVGPITALTWVLEIGDVQRFSSIKKAISYCGLCGAEKSSANMIQRTPLSKQRNKHLQSVLIEAAKLAPRRSSGLALVYDQERQKGNANRATLAVARKLVAYLVAVDRSQREFLVVKNQNRTAA

SEQ ID NO: 240236 - protein, 324 aa, unidentified
MEHVIIGVDPHKLSATIEVVDELEKLLGSGRFTTDQAGYAAMRKYAKTWPDRVWAVEGANGVGRPLAQRLLEAGEHVVDVPAKLAARVRLFDTGHNRKTDARDAHSIAIVAVRTANLRVLHVDGELEALRMLTDRREALTRRRVQTVDRLQALLAELLPGQAKRDITTGQAKAMLATVRPRDIAGKTRRRIAAEELFELIAVEVKIKKATAELKAIVLARGSTLMDLHGVGPVVAARVLADVGDVSRFADRNRFASWTGTAPLDASSGEQNRHRLSRAGNRRMNHMIHIAAVTQLRLDTDGRTYYRRKRAEGKKSLEALRCLIG

SEQ ID NO: 240237 - protein, 499 aa, unidentified
MAKRKQSTFERLKNGTLNRKQRKQIMRRLSSDDPGLEIVHRHVAGIDVGNESHFVAVAPGDDAQPVREFGSWTEDLHKMVEWLKACGIQHVVMQSTGVYWIAVYDVLEKAGFQVCLANARDTRNLPGRKSDVQESQWLLKLHTYGLLRNSFRPPEEIRMVRTIWRLRTRLVQDAAREIRHMQKALTTMNVQLSNAISDISGTTGLAIIRAILQGQRDPFQLAKLKDYRIRAGEEEIARSLEGNWQEDVLFELRQALGTYDFHQQQIADCDVQLQKYLAALPDHAPAEVVKSEAGTGEQSENAPAAEKSEKKQKKSGKKSGKKSRRNQPKFDLEAEFTRICGVNLRCIDGVDVMTIATFVSEPGTDMSKWKTENHLVSWLKLSPFQATSGGRPVKQKRPKFRNRVADVLRMAAGSLVHSDSYLGARYRYLSSRRGAPKAIKAMAAHLARIICRMLKHGQAWVDRGAQQHEAKRAERERLSLQRKAAALGFRLEPAARVVH

SEQ ID NO: 240238 - protein, 315 aa, unidentified
MATSSKTYVGIDVSKDRLDVAVLGERQETQVENSREGIARLVEQMQDLQPELIVVEATGGYQRAVVEALFRAGLAVAVVNPARVRQFARACGLLAKTDKLDAQVLAIFGERVQPRRYESKSEAGKHLSALLVRRRQLDEMLKAEQNRLRTTSASLASSVKRMIACLKQEKKLLDEQVQQWVAEQEAWQEQTEILKSAPGVGPVTTATLLAELPELGKMDRKKIAALVGVAPMNYDSGKKRGYRKTKGGRGEVRSVLYMATLVATRRNPLIRAQYQQLLKRGKLKKVALIACMRKFLTVLNAMLRDRQPFRCVSTA

SEQ ID NO: 240239 - protein, 315 aa, unidentified
MNQELLVVGIDISKNFLDVFVSGSVTLQRYANDAPGRAQLAIDMLALVPHLIVAEATGGLERLLIAELAVQKLPLVLVNPRQVRDFAKASGQLAKTDALDARVLAAFGIAIRPAIRPLPDEQALELADLVGRRRQLVDMMVAEKLRLQQAVGKALRRDIKLHIQWLEKRLRASDAGLNDAIQKSEIWRAKDDLLAEVKGIGPVCRITLLALLPELGLLNRKQIAALVGVAPFNRDSGYYRGTRRVWGGRSEVRKVLYMATLSAIRSHNEVVYSFYRRLKEQGKPGKVAVVACMRKLLTILNAMLRDQAHFRPQVT

SEQ ID NO: 240240 - protein, 385 aa, unidentified
MTQPARVEDFIPRDYDLFGGLDVDKRSMAVTFTDHGTMRQSFKLPYSASALLNYTRKHFPGQRVAFVYEAGPTGFGLHDELTAAHHPCLVVSPSMVPTAPRKRVKTNRLDSNKLSEGLRGGQLRGIHVPPPSYRELRHLVQLRDTQVAQLTATKLRLKSLLLYEGIPFPAANGKWSGRALRQLETLPCNASVRFKLEQLIDTLQFHFLSAAKVQKQIRHFCESDPELNGCIKFLTSLPGVGTITATHALARLGDWRQIKDVRQIAGFLGLVSSEHSTGDKQNRGEITRIGDKRLRSKLIQCAWTAIRKDPELRAFYRRIYERHPKKVAARKAIVAVARKLTTRMYAVLKEQRPFVIREDNSIAPLTAEETTGRGERLDAAQNDQP

SEQ ID NO: 240241 - protein, 394 aa, unidentified
MHEVFVGIDISKNFFNVSIVNRRGEEIKRFKFDMDIYHFNKLLEELNGFNKKSIIIGMESSGVYHINLYSFLRENSFNVSLINPLIISSFTKLSLRKSKTDRKDSKEIAKYLLMVDENINYFESNEIKYLVRERERISKEIGRIKNDIEKVIIVTFPEIIKFYNIYNKTLLNLIKDYPSSNRIRDVSYEEIEEILNKNRRGRKSKISSKRIVELAKSSIGTHSEVKERILSFKISHLLFLMDKEKEIEEIIRRNIDWVMRRNIEIVTSIKGIGEVSAIHLLSEICDINRFSSYKKLIAYSGFDPTIYQSGNFEGRSRISKRGNRHIRRILWIIANSVIRYNEVFKSYFIKKIETGIPYKKAVISVCHKLIRVIYSLIKSGSYFDPNFHLVHNSL

SEQ ID NO: 240242 - protein, 440 aa, unidentified
MKTKLRIINPNAGGIDIGSEKIFICASDAGYQSFDTFTEDLKLAAEYLKKNTVNSVAMEATGVYWLPVKDILEAEGIEVVLVRAGDANQLPGREKTDGEDCQWIRTLHQHGLLRPCFIPEEIIRELRTIIRLRQDHIEMAAAHIQHMQKAFTLMNLRLHQVISQIQGVSGRRIIEAILNGERDAETLTMLCDKQIIRSKKEEVMKSLNGNYREEYLFMLGQAYKAWNFYNQLIGECDKKIESWFIRSTKNKPEVDHITPAKAIRHHKPDIENFHDKTLKLTEGKDASKLPGLTDYSVIRIIAEVGLDLKEWKSDKNFVSWLGLAPKRYSSGKMRRRYKGKQHTAAGQIFKEAAQSILNSKNIGLGSFARKVKSRKGPQIAIKATARKLAVLYYHAITKGMEYVEKGINEYNAQAKLTEEYRLRKQAFKLGFSLTEISVHQ

SEQ ID NO: 240243 - protein, 337 aa, unidentified
MSTIHILGIDLGKHCFHAVGNNHTGKDVIRRKFSRSQLLRFLSVLEPTIIAFEACGGAHWLARKCEAYGHRVRLIPPQYVKPYVKGNKNDFIDAAAIAEAASRPSMRFVSAKSEEAQVIAAIHRVRDGYIKERTACMSRIGAILLEFGLSFPKGHAKMKALFQWLAEQDIKLPPSLVAELLSIHEHYKYLNEQVSTQDRKLKAITENNENAELLKSIPGIGDLTATLCVANISSPSNFGGGREMAAWLGLVPRQYSTGGKSKLLGMSKRGNKHLRALFIHEARSVLSRIETTGKVFGDWLVNLRATKPFNVVVVALANKLARIAWAVLYHRQAFKAV

SEQ ID NO: 240244 - protein, 400 aa, unidentified
MSERQTRVWVGIDAGKGHHWAAAVDEAGATLWSKKVENDESAILTALGEILDLADEVRWAVDISGTPSALLLALLAAHGQQAVYVPGRTVNRMSGAYRGEAKTDARDAYVIAETSRHRRDFTAIDVPAQLAADLALLTAHRSDLVADRVRMINRLRDVLTGVFPALERAFDYSAQKGPLVLLTGYQTPAAIRRRGRTRLTAWLANRGVRSTDAVAATALDAAQAQQTALPGEGVAAQIIADLATQILALDDRLKRIDKQIRETFRSHPQAEIIESLPGMGPILGAEFVVAAGDLTAYADAGHLASAAGLVPVPRDSGRRTGNLHRPKRYSRRLRRVFYMSAQTSIIREGPNRDFYLKKRGEGCKHVQAVIALARRRASVLWALLRDGRVFTSAPPVTQAA

SEQ ID NO: 240245 - protein, 305 aa, unidentified
MSALGVDVSKRTLDCFLGGTSFVVANGKRAIAKLLKSLAAGTVIGLESTGDYWRLLADMAVEWGFCVYLVAPNKSKSYRQSLPWRANTDKIAAEALARYVEREHDQLRPYVPLPPAVLALVRLFRRRMKVLDAKVGLELSFSAVPELKKEGAALLKHMQAAVERFDQAIALRASQLPGYGELLRVTGLGPVCVAGLLTCFARGEFATAEALVSFVGLDPRPNDSGEKHGKRYLAKKGDPYVRRALYMAAMSASITRLWEPLFQRYVKRGLAKTEAYCILARKLVRVAWAVKTKGVAFDPCIAMRS

SEQ ID NO: 240246 - protein, 313 aa, unidentified
MATAVWVGIDVSKARLDVALGAAGELLSVANETRAIAGLVARLVELAPALLVLEASGGLETALVAELGAAQLPVVVVNPRQVRDFARATGQLAKTDALDARMLALFAERIRPALRRLPSEQERELKALVARQRELVEMITAERNRLGRAPKLLRKEIAAHIRWLEGRLKERDRDLDRMLRSSPLWREREDLLRAVPGVGPVLCATLLADLPELGALSRREIAKLVGVAPLNRDSGTLRGRRTVWGGRARVRAALYMATLVAVRFNPVLKAFYLRLRGAGKPAKVALTAAMRKLLTILNAMLKQRSPWRPPCVA

SEQ ID NO: 240247 - protein, 286 aa, unidentified
MKQQKKSSRDITIGLDLGDRRHRFCVLDKWGGLLEEGSVRNERVFLAQLSERYPGALAVVEAGCHSPWISRYLQEQGCRVLIANPRKLRAIYQHERKSDQRDAQMLARIGRLDPALLYPVRHGTAEAQQDLLRIKLRDSLVRARVAVINSVRFTLKSLGYTVRNPSSERFHKVAMEGLPAALCQMIAPSLQALEELTARIKALEAEINSLARRKYPHAIQLQQIPGVGPITALYFVLKIEDPTRFQKRARRRRLRGLMSKTRSKRAERSTTAHLQMWRRLPASIAR

SEQ ID NO: 240248 - protein, 351 aa, unidentified
MPSRSTVRAVATIGIDMGKNTLHMVGLDSYGAIVLREKVSRGRIASRLANLPPCLIGIEAGMATHYVARELAALGHDVKQVPPTYAKPFRQGHKNDFRDALAVAEAVQRPTTRFVPPKSNEQLDLQALHRVRSRLVSQRTAVINQIRGFLLERGIIVRQGLRFLRQLLPDILAKRTDVLSPRMVRIVSDLAGDWRQLDDRIETVTDEIETLAKNDDSCRRVMTVPGIGPIISSAMVAAIGNGSAFSRGRDYSAWLGLVPKQMSTGDRTILGRISKRGNSYLRMLFIQAARVILVRPANWPKHGFGAWLVRAIQRLHPNVLAAALANKLARIAWTVLAQERSYEARVTTVEA

SEQ ID NO: 240249 - protein, 319 aa, unidentified
MSKKRAQSFIGIDVSKKQLEVAVHESDYHFCCPNQPSAFVALIAELIALRPALIVLEATGGLERAVVAALHGSGLPIVIVNPRQVRDFARALGQLAKTDRLDARVLAHFAAAIKPPARPIKAQDEQELDALAGRRDQLIEMLSDEKNRRASAATDSVRAEIQGHIDWLRERIAELDQQLKKLVQHSPRWRAKDQILQSTPGIGPVVSVGLLSQLPELGTLNRQQISKLVGVAPLNRDSGQQRGLRHIFGGRAQVRRILYMAALTARRCNPVIKAFFEHLRARQKPFKVAITACMRKLLVIINVMIRESSTWRSQQPASA

SEQ ID NO: 240250 - protein, 419 aa, unidentified
MDVIHRRCAGLDVHQAEIAACVRVTTEGEVVRAQGRRFATVPTALKDLCEWLVSQGVTHVAMEATGVYWLPVYRELEAAGLDLTLCNAFHVKNVPGRKTDQSDAAWLAQLMASGLLRKSFVPEAQVREVRELTRARVHLVEDRTRAVNGLHRLLERAGVKLCSVVSDLQGKTARAIMGALVEGEKDAVALAKLACGRLRKKRPQLEAVLAAPLIAVERKLLAQTLARMDLFDAQIVALDIEIAESMKAWAVQLERTQAIPGINAIAARTILAEIGPTASAFDDPRRLAAWAGLAPGQRESAGKRKRAGTRDGNAYLRRILVQSAMAIAQTKKNPTDLTEFFRRKLPSLGFKKALVAVAHKLLTRIWVVLRRDVQYAPPPPKPLSERQRTRRIQRALSTLQSLGYAVAPNLPALPAIATG

SEQ ID NO: 240251 - protein, 461 aa, unidentified
MAKRKKSADNIPAIDVLEQINLHAAGLDIGSEEIYACVPADRDEQSVRVFPTFTVDLHALADWLAACQIETVAMESTGVYWIPVYEILESRGFEVYLVNARHVKNVPGRKTDVLDCQWIQQLHTYGLLRASFRPPAEICSLRALARHRDNLIRYRSAHIQHMQKALQLMNVKLTQVVSDITGKTGMSIIRSILDGERDPKLLARHRHAQCKRSEAEIAKALEGNYQPEHLFVLRQAVAQYDFYLQQMQECDAEMEARYAALALSGPDDLASPPPKPKRAKRRKNQPHFDLATSLYQMVGVDLTAIDGLDALTVQDIISEIGIDVSPWPTAKHFASWLGVAPHTDITGGKVLRSRTKKTKNRANTALRLAAQSLARSQSASGAFYRRIRARQGPAKAVTATAHRLARIIYRMLKYREAYVDPGADYFEQQLRARALRNLKRRAAILGMDLLPTEAPKPLVSQ

SEQ ID NO: 240252 - protein, 353 aa, unidentified
MRKQYNTVSFKNQTVFVGIDVHKKQWTVTIRHCGLAQKTFSMDPEPEKLAEYLTRNYPDAEYRSVYEAGFSGFEAHRALCRLGVQNIVINPADVPTSGKEREKKNDSCDSRKLARELENGSLEPIYVPTPENLMLRNLKRREDQLVQNLTRVKNRIKGHLNFNGIKFISWAGGSLKIMEEEAQKRNDWTLLSDLRELRFLRTEKLQVIRDERTCLKLLDREKIQENIQSVSGIGFRTAIALQAELWDMNRFKTNDHLNSYIGLAPHTFGSGEDVIAKCGNRKKKQLHYLMIEAAWRAVRHNLEYKARYGALLGRGMSSQKAIVVIAKKLMQAIRAVWLQDRKYKNYLETSKVK

SEQ ID NO: 240253 - protein, 436 aa, unidentified
MKKHLPILDANAAFVDVGSEHMHVSVGGDEPKVFGTVTSQLHALRDWLLTQEVRSVAMEATGVYWLPLYGVLEAAGLDVRMVNGRQTRNAPGRKTDMQDAQWGSTLHMHGLLRAGFVPPGDIRRLQDYLRLRADHVGQAGSCVQLMQKALERMNVKLHDAISSLAGASGMAVIRAIVAGERDPAALLALCDVQIRRAKADLVKETLRGTWSEEHIFALEQALQSWDHYQRLIADCDRRIESVLPPPDPKLPPLVGPAKRGGANAPEIGMLREILAQMCGGRDLTRLPAHTPYGVLQIIGETGTDLSKWATEKHFTAWTGLAPGSNDSGKRHGRVKRRRNRAGQLFCMLATSLVRSKNIALGAFYRRMAARRGKAVANKALARKLAAWFWRVMVKGDDYVEQGIAHYEAQIRKGKERALRRLASELGQQITPIHPGA

SEQ ID NO: 240254 - protein, 390 aa, unidentified
MIYVGIDVAKDKHDCCILDDEGRKMYPIFTISNDKVGFDELFSRIEKVTSDKTEIKVGLEATGHYSNNLLASLVDKGFPTVVINPLHTNLYRKGLSLRKTKTDKVDASSIAMMLMTDRTLKPYSETSYHNEELKSLTRYRFDKVHERSKLKSSLARLVNILFPELEKLVPSLHLNSVYTLLEELPGADYIAGCHLTHLKKLLESSSKGRYSRDKAIEIRNAAINSIGTPMDAKSMELRHTIHLIWILSEEIEEIEASIKAIMDEIQSPIITIPGISYRMGAMILAEVGDFERFDNADKILAYAGLSPSTYQSGQLDSSHSHMEKRGSRYLRYALFNATKFVCKWDESFGTYLGRKISEGKHYNVAVSHAAKKLIRTIYRMELTGQAYSPS

SEQ ID NO: 240255 - protein, 349 aa, unidentified
MSEPYAGRQIVGFDLHRRRSVLVRMTEAGERLETVRISNDPEYLREVMTRAGEAPEVVLEACYGWYWAADTLAELGATVHLAHPLGVKMFSYRRLKNDERDAADLADLLRMGRLPEAWIAPPATRELRGWVRHRAKLVGLRSNLKCQVHGILANAGITVPMSDLFGASGQRLLATADLATESRSRIDSLQRMITALDFEVELFAKLVAGRLRTHPGYQAIQLIPGVGPILAAVFVAEIGDITRFRRPEQLASWAGLTPKHHESDTTVHRGRITKQGSRLVRWAAIEAVQRLPGHTRIGQVRDRVAARRGRNIGVVAAARELTELVFYGLRDHHVHALAVHSPARTPLPA

SEQ ID NO: 240256 - protein, 321 aa, unidentified
MTRRMRTYKTVRIANSPAALRAVIARAGEHPRVVIEATYGWYWAADVLAAAGAEVHLAHPLGVKAFSYRRVKNDERDCTDLADLLRLGRLPEAWIAPPPVRELREVTRYRHKLVGQRTSCKDQVHAVLAKAGIPVTRTDIFGSGGGIWLDGLPLPQPYAGKVASLRALIAVLDGEIARLEEQAAAMLAGDRGYAAIRQLPGIGPVLGAVIAAEIGDITRFRKPGQLCSWAGLTPRHYESDTKVIRGHVSKQGSRMLRWALVEAIQRAPAGTRPRLAKDAILARRGDDARGIAKTAAARILLTQVFYAMRDGYLRRATSVAA

SEQ ID NO: 240257 - protein, 347 aa, unidentified
MTTMTQPARRVIGGVDTHKDVHVAAVVDDTGRILGVESFRNDTRGFRQMHVWMGRHGELDRVGIEGTGSYGAGLARHFTRAGVEVLEVCRHDRQRRRMKGKSDPVDAEAAARAALARDMVATPKSGTGSIEAIRALRIPRNSAMKARTQAANQIHTLIDTAPDQLREQLRGRSIRRLVGEMARWRPGPPTDPTTAHRYAMRVLAQRWLHLADEIRELDRQIKVLVEQTAPELVAVHGVGIETAATLLVAVGDNPGRVQHERGLAALCGVSPVDRSSGRQRHHSLNRGGNRDANRAIWRIALVRMSFDPATRAYVERRTKEGKSKRQIIRCLKRYIARELHPILLQHT

SEQ ID NO: 240258 - protein, 403 aa, unidentified
MNSVGIDISKGRSTIAVMRPFGEVVISPFEVRHTGSELSKLARQLKSLDGETRVVMEATGNYHASVAKLLHDAGLYVSVVNAKLVHDYGNNELRRVKTDRKDAVKLANYGLDRWLTLPRYIPEEDTRLLLKNCYRQYRQYSKVQTVLKNNLISLLDTVFPNANRLFSSPIRGDGSEKWVDFVAEFWHCRCVSEKSERAFTSKYLRWCRKHGYNFREAKAHTIYAEASGHIGVMPKSETTKLLVEQAVSQLRATSTALAALKHEMQSLASMLPECPVVMGMFGVGPTLGPQLIAEIGDVRRFYSKKALVAYAGLDAPPNDSGDVTGRHKSMSKIGASSLRRTLFLVMSVYLQTAPLDEPVYPFMDRKRAEGKLYRVYMMASANKFLRIYYATVKAYLESLEHTA

SEQ ID NO: 240259 - protein, 417 aa, unidentified
MSKSNISRPIVQELSESLHAGIDLGLEDNVVVVMDGNGKHVDRFHFSQDRGGYDFFLKRMAGLRQKHAGADLAVAMEPTNYFWKLLARELEAQGISYHLVNAYTVKKHREGDQLEISKDDRRDARQIAELSRTGHYTQTRLQRGAYEELRQYGTVYDQLQKSIRRERHVLWGLAGQVFPEVFQVFARLEGEACQALLRQRAVAAQIRQVSAEALVSEVRGAFRGQRLMVKKLHRAHQVAQNSIGVVEGCAAIQLAIRLHLDSLQALEAQLARVKQAMTSCVATLPEAPYLQSFLGGLSTALLLAEVGDPQRYQAASQWVKLAGIQPTPNTSGQKQRSRTPMSHHGRARLRTLLYFTCLRRIQYDAHFAKLYAHLQHRKHNPLTKMQAVGVLMNKQLHILWALMHNHSFYDPSFSVSA

SEQ ID NO: 240260 - protein, 341 aa, unidentified
MEIDVLGIDLAKQIFQLHGADRRGRVVHRSKVSRSSFFEAVRALNPKLVVMEACSTAHHWRRRFQSVGIEVRLISPQYVAPFVKTNKNDRNDAEAIVEAASRPTMRFVTIKSVEQQDIQAAHRMRAILLRHRTALINQIRGLLGERGLAIARSPEAFRRAIPELLRTSADELTSFCQTLLTELLQHMRAIEERVHLIEASIQTFMKKSALCRKIAEIPGIGPITATAVVAAVGDARQFRNGRHLSAWLGLVPRQYSSGGKPRLHGISRRGDTYLRTLLIHGARAVLRYAPKKTDPQSIWLQELMARRGHNCAAVALANRNARIIQALLSSEATYMTRSAAT

SEQ ID NO: 240261 - protein, 357 aa, unidentified
MESQEVKYVGVDCGKKSIEVVRINSENSLERRQFSTTESGINNLLQWLTLNDIVGLEAGSQSFRIAKSILNKGVQVIVLNPGNLATIYQSLKKTDKEDSLKIARLIQRHPIEELPTVPIPNDEEEDNRRLCTEQENWTKQLTQGKNRLHSLFTQAGLTQITKKHLRTKANREISVALLPSRYQKEAERILKVLDLVELNLKLIEKEIQEALKKNKAYVQTIMSMPGIGMITSLAIMSYMGDCKRFSSAKQAAYYAGLVPRVDISGDTVRYGRIINRGCHSIRRVIVQAAWSLVRCQHGGKVKEFYQRLYLKKGAKKSIIATSRKMIEVLYAMIRTGKLFDSMPENILNRKLTQYGLM

SEQ ID NO: 240262 - protein, 347 aa, unidentified
MTSVADWRAFLGLDYHVSSVQVCVLDAFGKVLGNRSLPNEMAAILAYVLSVADGRAICGGALEACCGAANLAEELRTQGWDIQLAHAGVCARMKQNPDKTDFGDAHLLADLVRVGYLPRVWLPPAAIRDLRRLVRYRTQLVEQRRNVKLRILALLREERLVAPSEAGNSWTKKWLAWVAKVALGTHSRWVLDQHLASLTRIVAEIKAAEQRMEEATKDDQVTQQLLAEKGIGLVTAVTMRAEIGSFQRFRCGKQLARYCAVTPKNASSGKHQADAGLIKAGSLPLRTVLIEAAHRLGRYAPKWRAMKEHLRKNKKPGGVIAAAIANRWVRQLYWQFSKLESELSAAA

SEQ ID NO: 240263 - protein, 318 aa, unidentified
MSKPEVTKVSIGIDVSKASFDVAIHETGQTWSAPNDAGGCAALGSQLIKLKPTRIVMEATGGYETLLAASLSAAALPVIVVNPRQVRDFARATGELAKTDRLDAGVLAHFAAAIAPPLRPTKSDEAQHLEALLARRRQIVEMLVAEKNRLAAHRDRAVVKDLKTHITWLERRLKQSDDELQRVLKASPVWRERDDLLRSTPGVGSVLSLTLLAQLPELGTLNRKQIAKLVGVAPFNRDSGQWRGSRHIWGGRAAVRAPLFMATLSAIRCNPIISSFYRRLIAAHKAPKVAITACMRKLLTILNTMVKSQTSWRTAYSS

SEQ ID NO: 240264 - protein, 415 aa, unidentified
MKVVFPTCCGVDVHKTFVVATIITTPADSLQPHYQKKRFSTFNSDLNHFADWLLEHNCLDVCMESTGKYWVPVFNILEKRGIRIVIANPKWVKAVKGNKDDTKDSKWIGDLFRIGLVKSSFIPELNIRILREFLRYRYKLVSMKSSEKNRFQNAFTVCNVALDSVVSDMFGKSATAITDYLTSDESFDLDHCVSLLQHSLKKKAEKVLESIEGYSISDEQKARIKIIREHYDFVEKLISKVDTCVNEMVEKYEGEIDLLCTIPGIDRNSAITIISEIGADMSQFGSSKRLCCWAGLTPGNNESAGKKKSVRISRAGVYLKPALVQVAHAAVKDKANHYYALKYERIAKRRGKKRAIIAIARMILTAIYKMLCTGEVWNPVDLFKIDMPEHLKEQQLAKAIKQATRFLEKQGLTVA

SEQ ID NO: 240265 - protein, 427 aa, unidentified
MYEHDHNRIKLFRQFKKEIRGSRDYLIVGIDIGKITHHGFLGTATGKVLRRIVVENTASGFEHLVTTVQFFSDREGLKKVVFGVEPTSVYHKPLAEFLLEQGFLVVYVTNEAIKKNRALLDGRWDKNDIKDAANVADLLSQGKCQYYDLPDMNLRDVRSLLLLRTRLMKQQHSARIRIRNNLVAQYFPELDQFWNKAESENLAIVRWCLSPHKIRELPCEVFCRMVAPRQRGEKQQRRILKIWEMSPYSIGCRAGRAVEQEAKILVEGLTTIQTHIVEVEETIEAICRCFDEYTLLLTIPGFGPYISAVVLAAIGNPYRFQSTKELIRLAGFDLNARRSGKKSTTAVPVISKKGKGNLRYALYQAALVATSSNTRFRAYFHRVLEGREREEGIRTKMRVKLAAKLLIIAWVMMKRKEPFNPDYLKVA

SEQ ID NO: 240266 - protein, 423 aa, unidentified
MSYRIAGIDVHKKMLAVVVSDVEVDGEYQFERVRYSSSPEHLRFLAQWLITQQVEEVVMESTAQYWKPVWEALERYWKPICQEREGAGPVSGTLHLAQAQSNRGRRGRKKDFPDAERLVKRLVADELVLSFVPDTEQRLWRTVTRRKYQLTRNHVRLQNQLEGLLEECHIKLSSLVSDLLGASARRMLKALAEGETNPVALAAMADKNLRATQAQLCDALGACTELKPIYRRLLQMFLEELKFIDQQISKLDQELASLLSRHHDAVVHLAEIPGLGVDSAQQIIAEVGAGAATFPSAKQLSSWVGACPGEEESAEVSKSHRSPKGNRHMRRILNQAANAAAKSKGTIFEIVYRRLVSRLGHNQTIGAIAHRLCRLIWIILHRSVRYEERGPSVNAKSRRHRTNRMIRELRSLGYRIEPLVATA

SEQ ID NO: 240267 - protein, 337 aa, unidentified
MLIIGCDFHPGFQQVAIFDNRKAGIEQKRLGHRQEAEEFYRSLKGQAVRVGMEACGHYPWFERLLASLGIELWMGDAARVRAAAVRKQKTDRADAEHLLRLLMEDRFPRIWVPSLEVRDVRQLLVERHKQVQARTRTKNQLQALALGQGVQKKRKLWSEAGRGELEKLELLPYARQRRQHLLQTLDQLEAEITELNRQVGEEVRRRPEAVKLMTHPGVGPVTALAMVLTLGPAERFENARKVGSYFGLIPSEHSSGGRQQMGPISKQGNPFLRFLLVEAGQSAARYDQELRRFYERLARRRHRALAKVAVARKLAMRLYLMLREDWNYAQLRKAVCR

SEQ ID NO: 240268 - protein, 402 aa, unidentified
MNSVGIDISKGRSTIAVMRPFGEVVISPFEVRHTDSELSELARQLKSLDGETRVVMEATGNYHAPVAKLLHDAGLYVSVVNAKLVHGYGNNDLRRVKTDRKDAIKLANYGLDRWLTLPRYVPEEDTRLLLKNCYRQYRQYSKVQTVLKNNLISLLDTVFPNANRLFSSPIRGDGSEKWVDFVAEFWHCRCVSEKSQKAFTNKYQRWCRKHGYNFSEEKAHTIHAEASGHIGIMPKSETTKLLVEQAVAQLRATSAALTALKHEMQSLASMLPEYPVVMDMFGVGPTLGPQLIAEIGDVRRFYSKKALVAYAGLDAPPNDSGDVTGKHKSMSKIGASSLRRTLFLVMSVYLQNAPLDEPVYQFMDRKRAEGKPYRVYMMASANKFLRIYYATVKAYLELLERT

SEQ ID NO: 240269 - protein, 395 aa, unidentified
MNKVIHYIGLDVHKESIAVYIAPAHSTEIRRYGIISGTLAAVDKLIKKLSLEGVELRLVYEAGPCGFVLCRHLRAKGLHCEVIAPSLIPKKASDRIKTDRRDADQLARLHRAGELTTIHVPDQEDEAVRDLIRARFSAMTDQRQARNRLKGFLLRLGFRYTGKSSWNDAHQRYLSGLVMPQAPQQIAFQEYIHAINDATDRLARLTRAVEDALAGWKWEPVVRALMSLRGVQVLTAMTLVAEVGDFSRFDDPRSLMHFFGLTPSEHSSSDKRVQGGITRCGNAHCRRVLTEAAWHYRLAPKVSAAIQIRQQAQSKEVRLIAWEAQQRLHKRFKQLSAKKKSVIAATAVARELAGFVWAIACQVKPAQQAPAPEIIRTCRGKVYRLDPNTKLQKNK

SEQ ID NO: 240270 - protein, 362 aa, unidentified
MKQFIGCDVHKKYSVFVTMDESGTASRAVRVEHGNGELEGYLSSLPDGTPVAVETTGHWYWILDAMEKAGLEPHLAHALAAKRMMVSPNKTDKLDAKGLATLLRNGTLPEVWVPGGSLRDLRGLMRSRLALRRMGTGLKNRISSALARYGLPQQFRGDLFGAGEAATKCRQESVAALPEYSRFATEQELDLLEAVETCVTAVTEEISGSIGKLGWVRRLRTMPGVGEILGPTIYLEIGVVDRFPTPAHLAAYAGLVPRVSSSGGHTRMGRTRRECNRFLKWAFVEAAEVVVAHQESMSARHVVRLYRRVKDHKPDRHGKAVVAVARHLAESAWHILRHNQDYREPQPTPGMIQRFHMEGRSL

SEQ ID NO: 240271 - protein, 428 aa, unidentified
MQKPKAKRMQSWQEITHYAGFDWAKNHHVVVVLDGQGQIVADFEFEHSLEGWQSFTDKTSIWPNLALAIETSQGAVVDQLLQGQGTVYPVNPVAAKSYRERKAPSGTKTDHLDAWALAAALRADGQGWKVLQPLDPLTQQLRLLCRDEVRLIEQRTALVNQLQQALLEYYSTALSAFDDWTQDFAWDFIVEFPTPEALTRAGKRRWEKFLHTHKLWRPETAAKRLELFAKAGLFKASEPIVRAKSQLALSLCKVLRTLGQQLDFYRQQIEALFEEHPDHDLFGSLPGAKKVLAPRLLAAIGSDPTRHGSLQALQCLAGTAPVSYQSGQLNKVHVRWCCDKFLRHTLHLWADSFRRVTAWGQTYYQNKRDQGMSHACALRCLGQRLLKILFRMISDKKPYDADFHARNQQKHGSWVLKLVNQPSASAGE

SEQ ID NO: 240272 - protein, 342 aa, unidentified
MKIIGCDFHPSFQQIAMVDADTGEYTERRLTPEEARRFYAELQGAVLVGMEACGNTLWFERLLASLGIELWLGDAGKIRAMEVRKQKTDRRDAQLLLQLLLENRFPRIWVPSVEQRDVRQLLLHRHKLVQMRRQVKNQLQHLALNQGVQQKRKLWSAAGRQRLEELPLEGWTARRRQEELELLDELNGRVAKLDVAAQQEADGDAVARLLQTHPGVGPITALAFSLTLGTIERFTRSRQVVSYLGLNPAEHSSGGRQHLGAISKQGNPLLRSLLVEAGQSAARSVPELQRAYQRLKHRKHSGVGKVMVARKLAVRLFWMWKTQQPYTAARTQGSPSHHVVAV

SEQ ID NO: 240273 - protein, 338 aa, unidentified
MKLYAGVDLHSNNNYLGIIDQKDKRVYKKKLPNELPAVLEELEPYREELEGIVVESTFNWYWLVDGLMENGYKVHLANPCAIKQYDGLKHSDDTKESFHLAHLLKLGILPEGYIYPKEERPVRDLLRKRSLLVRQKTAHILSFQNLVSRTIGTKMDGDEVIKLCEEDVERIFGEKHLVLSGKANIAAIRFLLEKIKEIEKAVLKVARLKGEYKKLLTVPGIGKILALTIMYETGDTERFPGVGNYASYCRCVRSTRLSNGKQKGKGNRKNGNKYLSWAYVEAANFAVWSYPYIKKYYQKKMAKTNKIVAIKTIAHKLARASYYIMKDQEVFIPRKAFR

SEQ ID NO: 240274 - protein, 363 aa, unidentified
MSKTERIPRICVGVDLHKLQFTVSAINEETGEVVLTGVFKTNSEGYKEFCEKMHTAEAEQGCLVELAVEATGNARYFKNKMEAEGFSVVVVNTSKFKVITTSTKKTDANDAATLAFYLSKDMLPQSHLCDQTSEEIRRMLKTRSILVSSTVKIKNQIHGMLLGYGIETKSSQFQSKKKRQELLKDLADQGYSQFTASSLEVTLSILDEICAQVKRIEAQIKEMVKEDEDVALLMTMPGIGFVGATTIASYTKDIQRFGGDFKRFSSYLGIVPSVHNSADTVRMGKITKRGPQDLRTAFVQVAMGIIRQPQNTSEWKLMKDYQAMKVSKGSGRAIIALTRKVARIVFAMLNKKEAFNPNLVVKC

SEQ ID NO: 240275 - protein, 343 aa, unidentified
MKQYIGFDVSLKDTAISIRQDGKRIWRGKCASDPQILAQIVRKHAPHAERVVFETGPLSTWFYHALTAAGVPAVCIEARHAQKILNETLNKTDANDADGLAQLAEAGFYKAVRVKSFDAMLTRTLVGARNLLLTISTQLSNQIRGVMKTFGIIVPKGTGRVFDGNVRELLDGRDGLAQIILPLLEAWRDIRKRAAELDRQLLAAARQSQAIKLLMTIPGVGAVTAVSYAAAIEDPANFKTSRAVGAWLGLTTRRYQSGEVDYDGHISRRGDNYLRGLLYEAATVILTRTHASNQSGLKDWGLRLRERLGFKRAAVAVARKLAVIMHTMLNTGEAFNTSAGVTA

SEQ ID NO: 240276 - protein, 315 aa, unidentified
MAEQLVVGIDVSKAKLDVAISPSGEQFTVSNDRLGAGQLVQRLTQLGPLRVVLEATGKLEHLAASELAAAGLPVAVVNPGQVRHYAKARGQRAKTDKIDARLIAEFARDLQPAIHPLPDAQTQALAALCQRRNQLLEMQQMENHRLERAPRASQKSIKAVLRFLDRQVAQVEQELDESIKQSPIWQAKRKLLESVPSIARVSSSTLLARLPELGQFSRQKICALVGVAPYEDDSGEWHGRRHIAGGRAPVRQVLYMAALSAVQYNPVLRDYDQRLLDRRVEKKAALIAVVRKMLTILNAMVRDHTPWRPPCPTPA

SEQ ID NO: 240277 - protein, 429 aa, unidentified
MTKTYILKTQTVPADRSAVETYLAPPPPSKGKIIGLDCHPDTFTAALFVGQTPHDARKIGSRENLSLDALLKWAAAELTPQDIILMEAGSNSFELCKRLGNLGLKACVLESCHVGKHAKTYADNDKMAAARFALVYLAGNAPCVWVPDEQSRERRELLHAYRKAVDEHTAATNSIKSYLNGRGLRLGKHSLDEKTTSQWILDQADWSVLQKNILAEHLANITESKERRKRLYRLIAAEMAADPKMMRCMKVLGVGIVSAFALLAVIGDIGRFHSPEKLVAYIGLNPGQRQSGKGKDIRLGVGRRGRGDIRNLLIQGAHAIMRSGRNTPLGQWGWKLFTRKGNRNVAVAAIARKLLVQVWHLLHGNPPLALESDTSFRIKLQKLAVALGSTLRTGIGLGKTLEDSVKTLISRCQTHAEPSASPCETPQPA

SEQ ID NO: 240278 - protein, 412 aa, unidentified
MNIVYERCAGVDVHKRNVVVCVITPDKQGQRHKEQRTFSTMMPDLIRMRQWFQSLRVTHVAMESTGSFWKPIFNILEGHMEVLVVNAQHLKTVPGRKTDLKDAEWIADLLQHGLLRPSFVPPAFQRELRELTRYRSSVIEERSRTINRLQKVLEDTNIKLSAVATDMMGQSARAMLSALLAGETDPAVLAELARGKMRAKRDLLAQALQGQFKPHHRVLISEQLAHIDTLDEEIERLSAEIAQRLRPYEPQLKRLETIPGIKRRLAEVILAEIGPDMQRFPSAKHLASWAGMCPGNRESAGKRKSGKTRKGSPWLRTALVEAAHAATHCKDCYLAAQYHRLVLRRGGKKATIAVGHTLLVIVYHVLAEEKDYQELGGNFFDEHDRQAVQKRLVHRLEKLGYQVTLAPTSLAS

SEQ ID NO: 240279 - protein, 348 aa, unidentified
MNYIGTDVHISTLNFKVVNDSGKIKMANEVQTSAMNFMTFIKSVPKPRQVIIEEGPLAAWLLEMCVENKEQLVITDPKQNHWIGGSGKKEDAIDAEKLAQLGRGGFVKEIHHPTGQRRRFRELVQAYHNTNKSIVRVKNQIKAKFLQNGIACLGQTVYLPNHRAAWRKKMPQESALRVIVDSYWKELDQVENSLETILKEIKLESKGYPEIKLIDEIPGVGFIIAMTIVAILETPHRFADKRKVWAYSGFGINKKSSANKIYSEKLGKEYNRLLKCVVEEAALAAINADNDNAFRLNYLEMTIKKGIAPQRAKLTIARDVIATAWAMWKKEEHYNPEIDRKLKIEVEV

SEQ ID NO: 240280 - protein, 400 aa, unidentified
MEKDRIVAGVDVHKDTIYLCVMDNTEAVIFAKVYGTLTPDLELMCSEMVSHGVTEAAMESTSTYWVPVWNALCESMSLKLVNPYFIKQLPGRKSDVKDAQWIAECLLKNLIRGSFVPDKRVQDMRKYNRRIFDLNEDLTYNSNKQDAALQRCGFRLSNYVSRVNGKSYQKCVRAIITGITDPEELVKLIHGKTLRKYGRNIIKDAVTGDFHQADICLLKQYAELIEVIERQIEECRNALIAMCQEHFPKQFKRLQSIPGVKERAASAIIAETGADMKPFEKATNLVGWCGLKPRNDISNNKVKSNRTTHGNRFLRQILIEISWVASRTRNCFFSNFSYVQCTQRHKNKMKIQVAIARKLLVAVWHMLTKDEDFIDVYLKRLEKQAEWQNDIQALESLLVG

SEQ ID NO: 240281 - protein, 406 aa, unidentified
MDVHRDFVVACIATTDADGVTQYVRRRFSTFSGDLRRMRDWLKENGCTDVCMESTGKYWIPVHNILEESCYVVVCHPKYVKAIKGKKTDKKDAKWIADMFKFDLVPGSFIPPENIRQLRDLCRYWTKLTYATTSEKARAQNCLTVSNLKLDSVFSNLSGKSANAIITYMLEHPGEKFDVKPFVDPRCKTPTDVIQEAVDGSFNYYQAYKLKIIREHISDIGELKEELSKLILELAQPFQRQIDLLLTVPGIADPMTAIRIIGEIGIDMSVFETSKRCCSWAGLTPQNNESAGKKKTTRIGKAGQYLKPLLVQCSWAASRSKKNPEIKGKYQQLKKRRGGKKANIAIARRLLTAIFQMLLKNEAYSPFVAQTKDTTPKNRTLTPEQGLALLRKHGFIIEERKPADVA

SEQ ID NO: 240282 - protein, 404 aa, unidentified
MKGPIVSIDVSKGKSDYQAFKNLNVKYTGSRSIKHTKEGFDEIVNLVREMEKKLKTEVCVVYEATGVYHRVLKKVLEDNNIKQFIINPLLSAKTRKNDSLRSPKTDKLDPKSIAKTYYSHSLHNSHKQETIYHELRELSRYYEDILVHIRKDKVAFRAQLDIVFPGYDTLYDDLYGPVALAVIEKYPHPEMLQKKKINTVSKVIQSKTCHRQAVSDTMADKAIEYSKTIYSGCDKDDIEVLILQRFIKKLKEDMAEAERTIGEMIKLAQELPDFSIIKSIPGIGDNLAARIIAELGDMTRFKKKNELVAFAGLDPRISESGQNDGDHMHITKKGNKRLRCLLYLAVTCSIRLKRDDNSIKDFYVKKKQQSNPMCSKAAKTACASKLVRIIYSMCKTGELYQYNK

SEQ ID NO: 240283 - protein, 375 aa, unidentified
MLRFRLMIKRGLNETATKHQKVKRSMKYYAGLDVSVKETSVCIVDESGKLCREKKVVTHPDDLVAVLSDPAFNFERIGLEAGPLSQWLFEGLAKAGFAVVCIETRHTKAFLKAQQLNKSDRNDARGIAHMMRVGLFKDVHVKTLTSQKRRALLTARKLLQEKAIAMENDMRGLLRNFGLKVGTIRAFKFDERIRELVEAAPDLAEIIESLLAARQKLREEFVKLDRKVRGEARVDPVCRQLMTVPGVGPIVALAYTSTIDIPSRFRHSRAVGAVLGLTPVLNQSGESSRIGHVSLCGDGMLRGLLYEAAQVLLIRVKKWSWLKAWAMNVAKRHGAKKAIVALARRLAVVLHRMWVDGSEFRWTREATPTTTDATA

SEQ ID NO: 240284 - protein, 400 aa, unidentified
MLSVGIDVSKEKSTVCGMRHLGEIVFGPFEIAHTESDLSELARMIVRLDDDARVVMEATGIYHLPVATFLREQGLFVSIINPYEMKVYRSQDIRKVKTDKRDSMVIANYGVDKWINLREFTPQEDVYAELRLLGRQYRFFMESRIEQLLNLTHLLDYTMPGLKNCFSGWSEYSGKDKLCDFVEEYWHYDNIIKFSESKFVERYQKWTKKKGYQFSETKAVQIYRLAKEGIPTVPSNAPSTKMLLLEATKALREINSALFAILTRMKELAKTLPEYPVVRAMSGVGDVLAVKLMAEIGDVRKYHSSKSLVAYAGIDPPPYESGKFIGTDRHITKRGSSTLRKIGYEVMRCVKANGRSEADPAVYDFMLKKESEGKAKKAAKIAALNKFLRIYYARVLEVYA

SEQ ID NO: 240285 - protein, 373 aa, unidentified
MKNCTRYLGLDVHAETITAAIAEGRGRIRSLGKFPNRPEAVRKLIDKLDGKRNLKVCYEAGPTGYALYWQLTKMDIDCEVIAPSLIPKKAGDKVKTDRRDAEKLAQSYQAGDLTPVWVPTPEHEALRDLVRQRAAAKSDESRAKHRLVKHLLRRGLREPDESRAWTHPWWRWVQSLKFDHEAQQVALDDCIAEVLHMGERLARLDKAIDRLVESAPAHMRAVIEALQALRGVAKLTAVTIVTEVGTFKRFRRPTEMMGYTGLVPSEYSSGGREAKGRCTRAGNAHLRHVLGEAAWHARHRPWLNRRMKKLLPTLPAGVAEIAWKAQERLHRKFTRMTYCRKPAGKVAAAVAREMVGFIWAIGTLVESQQPATK

SEQ ID NO: 240286 - protein, 332 aa, unidentified
MSIIGCDLHSRYQVIAMLETETGEVITRRLEHEEGEAKGFYAGLAKPVLIGIEATGYTQWFERLAAELGHELWVGDPAEIRARAVRRQKTDTRDAEHLLDLLVSNRFPRVWVPTPEERDFRQLLKHRDKLVKMQTSVRNQLHFLAMSQGVCRKQKLWSARGRQELEGLELGAWASRRRQELLELLDRLGPRIEELDAAVKAEAARRPEAVRLMGQKGVGPVTALAFVLTVGPVGRFPTSRKLVSYLGLNPSEASTGGHQRLGHISKQGNEMMRWLLIEAGHAAAQYDEELRRQYQRLKFRRGGKVAKVAIARRLAVRLYWSLRRYAAGSHVQ

SEQ ID NO: 240287 - protein, 375 aa, unidentified
MDNLIRIGVDTSKSVFQLHGVDTAEQPVLRRRLRRRQLLGFFEKLPRIRVGIEACGAAHYWARELGALGHEVVLLPPQRVKPYVPRNKNDMADAEAICEAMSRPRMRFVPVKTAEQQAALMLAGVRDQLVHRRTQLSNMIRGHAAEYGLVAPRGLDKVEPLLARIAADEKLPALGKELFAVLGEDYGRVKLELRKIEAKLMAWHRANALSRRLAEIPGIGPIGATLMVMKVADPGAFRSGRDFSAWLGMTPKDHSTAGKTRLGVITRAGDEALRWVLVAGATAVIQQVKRGRGHPSPWLMALIKRKPPKLAAVALANKTARIAWKLMISGERYDPAAAARRGRRTPLGESCAAPAQSRCTRQWRATILPAGSADA

SEQ ID NO: 240288 - protein, 369 aa, unidentified
MQGSTFIGLDVHKATISVAIAQGERGGEVRHLGTVPHRLDHVRKLVEKLAAGGARLHFCYEAGPCGYGLHRYLVEMGHDCIVVAPSLIPVRAGDRVKTDRRDAVMLAKLHRAGELTAVWVPDAAHEAMRDLVRARATAMRVAGKARQHLQGFLLRHSRIYPGKKGWTGAYRRWLAMVRFTHPAQQIVLQDYIDAVADAEARVERLTGQIADLLPTWSLAPVVDAVQAMRGVGFIVAVTVVAEVGDFRRFDTPRQLMAYLGLTPSEHSSGASVRRGGITKAGSGLARRALIEGAWSYRMQARVSPKLLARLEALPQVVRDIAWKGQLRMCQRYRHLVAAGKAKVVVITAIAREMAGFIWAIARTTTPAAA

SEQ ID NO: 240289 - protein, 345 aa, unidentified
MNTIKVTQSQGKGKSLCLDDFDHFLALDWSMKVMAIGHMRRRSKEPETFERPSDLKELKQYLATLKGRKVITIEETTTAQWLYVELIDHVDRIILCDPYHNRLLSNGPKTDKIDARKLCLLLRAGLLKEVFHSLSGLYELRRLVSAYEDLVKAGVRVLNQKASMEQGHFESGKHAPFILEHVEKSIELYQRSKERYERKFSELSKHNKLVKNLMEVSGIGIIGAVKIVAIVVDARRFARAGNYLSYCGLIKHEKISGGRSYGRRRPRFNHTLKAVYKLAAMSVIGGNNNPIRKYYEYLLAKGIAEHNARHAVARYIARLTYGMLKTGKRYQRYQWRSQAAGHQAA

SEQ ID NO: 240290 - protein, 340 aa, unidentified
MNNLNTISIDLAKNVFQVGVFSPQHKMQSNQQLSRQKLAPFMTKQDKAIVVMEACYSSHHWARVFNGMGHVVRLIPAQHVKPFVRGNKNDRNDSIAIAEASWRPNIKFVPLKSVEQQDIQALHRIRDKLIARRTSIINQTRGLLSEYGVIIPQGLKSFTQHIFALIDPKDEHISLRMKHQLRDTKEEYDQLSKRCQSIEIELKQYVQQNPLCQRLMTLPGVGVLNATALYAAIGNGSQFENPRALSVWLGVTPKQYASGEKSFYGGITKRGNQYLRKQLIHGARSVMHHIKKRDDKLSVWVKQLVERRGKNKAAVALANRLARLAWILLQRNENYQPVAS

SEQ ID NO: 240291 - protein, 402 aa, unidentified
MVQQSERVIIGVDPHKLSATIEVVDQHEQLLGSGRFTTDRAGYAAMRGYAKTWPDRVWAVEGANGAGRPLAQRLLEDSERVVDVPAKLSARVRLFDTGHNRKTDAHDAHAVAAVAVRTKNLRVLQVDGELEALRMLTDRREALTRRRFQTVDRLQALLAELLPGQAKRDLTTGQAKAMLASVRPRDIAGKTRRRIAAEELAELIAVEAKIKKSTAELMAIVLARGSHLMNIHGVGPVVAARTLADVGDVTRFADRNRFASWTGTAPLDASSGEQNRHRLSRAGNRRMNHMIHIAAMSQIRLDTDGRVYYRRKRAEGKKSLEAIRCLKRRISDAIYRQLIEDAQRAAGDAGTGPGGHCGATLRSSAVDLHPHIDTSDQPLPGPANQTLRPTPPTRKRSLETTG

SEQ ID NO: 240292 - protein, 350 aa, unidentified
MLIIGCDYHPGFQQIAFVDSETGECGERRLQHREEAEKFYRDLAAQGMKVRVGMEASGHARWFERLLAELNIELWMGDAAEIHRKRERKQKTDRQDAQHILRLLLKDDFPRIWVPSWENRDLRQLLWHRHRMVQARTRMMNQLQAVALNEGLRCKKKLWREAGRKQLEAFRLAPWASRRRHDLLELLDRLNPTIAALSQAIEQEVQNCPEAQRLMTHPGVGPLTALAFVLIIERADRFRCGKQIASYLGLVPLEDSSGNRRRLGHITKQGNSLLRFLLVEAAQVTVRSLPEWRSKYVHLTMRRGRKIAKVAMARKLAVRLYWMMRKEWDYEQVKKFGSHAGQPGNRYGVK

SEQ ID NO: 240293 - protein, 372 aa, unidentified
MAKLVVFTVALTDVHARSVAAAAFNPFTGEVVHRDFGTDAAEIAEWALGFEEPRACYESGPTGFHMARELRALGLDCAVAAVSKMQRPAADARRKNDRRDAEFIARMLATHNIVEVPLPDAAVEAARDLDCALDDATAEYRRARQRLNMFLIRLGHVWDERNADGARKGSWTRAHWRWISGIRLEGPQRDVLEYYVTAARCAESDRRQLEKKVLALARTDRWRPAVEALSCIKGIDTLTAFRLAAEAGSFTRFRTAPAFASWCGLVPSERSSGETERRGGITKTGNRLARTALVESAWHYLTCTPRPKAPAPGADVPAAIRARADDCTARLCRRREALAAAGKSSCKANAAVARELACWVWEIGRRAEGTLG

SEQ ID NO: 240294 - protein, 338 aa, unidentified
MNYYAGIDVSLEALSVCVIDASGKIFRETKVASEPEALIAWLGSLGVSLARIGLEAGPLSQWLYAAMRQTGLAVELLETRHVRNAFKIMPVKTDRKDARGIAELMRLGWFRPVHCKSMEAQETRAVLTSRKLVQKMLHETEMSLRGMLRNFGLKVGKVAAAQFEFRIRELVEGHPTLAAIAASLLATRATLRREFNALEKRLRAIARSDTRARLLMSTPGVGMIVALTYACAIDDPSRFKSSKIVGAHFGLTPTRYQSGETDRTGRISKIGDSSVRAVLYEAAHVILTKAVRGCTALKSWAMRIAKRAGMNKAKVALARKLAVIMHRMLADGTTFQPA

SEQ ID NO: 240295 - protein, 343 aa, unidentified
MQTVTTIGLDIVKSVFQVHGIDAAGQVVVRRQLKRRYVLAFFQKLPPCLIGIEACASSHHWSRELQTLGHTVRLMPPAYVKPYVKRQKNDATDAEAICEAVTRANMRFVPTKTPEQQSGLMLHRTRHLFIRQQTSVINAIRAHLAEFGIVAPVGRKGVEELLHVVADRNDKRVPAVARACLAALGSQLLGLKKQILTFDRMIMDWYRSNETSKRLHYIPGVGPLLATALAASVADPKVFRSGRNFSAWIGLVPKQYSSGGKDRLGSISKKGDRYLRSLFVAGALSVIRYAKIHGTKHRPWLTALLARRPTKVAAIALANKLARMAWAMMARGERYRNPVALAA

SEQ ID NO: 240296 - protein, 371 aa, unidentified
MGESSKMLFVGLDVHKDTIAVAYAPEDRGADVESLGAIGTRQCDIDKLIRRLESKGATLVFVYEAGPCGYWLHRYLTRRGFSCAVVAPSLIPRKAGDRVKTDRRDAVTLARLLRSGDLTSIYVPTVADEAIRDLSRGREDAVGDLKRSKVRLKAFLLRQDIRYEGRANWNAAHLRWLARVVCPTPAQQIVFQEYVHTVTEQSERLRRLESELHTAVKTWRLYPVVEAVQALRGLDLTGAGTLIAEVGDLTRFDTPRKLMSYLGLTPSEYSSGAHRRQGGITKAGNGHARRALVEGAWAYRYPAKVSRHLQLRLEHVPPQARAIAWKAQVRLCKRYRLLSARGKHVNQVVVAIAREMAAFAWAIARTVPVAS

SEQ ID NO: 240297 - protein, 353 aa, unidentified
MRKMQRHIVKGKRVFVGLEDSKRNWKLCVRCEGMIVDETSMPTEYENLHNYLRRGYPACEIGVIYETGFQGFWLHDLLEADEIDCVVTPANKVTQEKDNRVKTDKIDARRLARNLESGDYISCYVPDRELREDRQLSRTLTQIQRTIISTKNRIRKFLDFHGLNGDLPSGRWRKCDYQKLREFSLVRVLQKCLDTYLSLLSHLEEQERMLLAELRQLTRKDRYRESVAVKQSCPGVGWLSAIRFTLEWGDSSRFPSGRHFGSWLGLTASEYSSGDTVRRGHITRQGNSQVRSWLIECAWTSVRKDPVMLDKFRRVWRSSGSKKKAIVAVARKLAVRLLTIELRNESYRIGVVR

SEQ ID NO: 240298 - protein, 315 aa, unidentified
MTEKDERFVGIDVSKQTLQVCVLPDSVQRCLENSPSGHVELLQYLASVGPQLVVLEPTGGYELEPLCALWQAGIPVAVVNPRQIRDFGRSLGKLAKTDMLDAELIARYAQTVRPPVRPIPDEESQQLQALVVRRRQLVETRATEQARKHLAKGRVRASIESLIAYLSAQIDELDGELQKLVEAHPAWHKHDEILQSVEGVGDVTSATMIALLPELGTLNRKQISALVGVAPLNRDSGRKQGKRQVWGGRAAVRAGLYMATLAATRFNEQMSSHLQALRQRGKPFKVAMVACMRKLLCILNAMLRDGRPYNPQLQT

SEQ ID NO: 240299 - protein, 417 aa, unidentified
MNSPPETIPIQRYIGIDIHKYYMMIGGQNAHQEWILRPRQVQTVHFRTWAEKNLKEGDAVVVEATGSVWDIYDIVAPLVSKTVVANAHKVRQIAEARVKTDKEDIKRLITLLIADIVPEVWVPPIHVRELRSLISFRWRLTKQITMSKNRLHSVVQRFNLNAPKGGLLTDKNKSWWEKQEFTDLTGFQVDRDLEIVENLEFQKAAIDQKLAELSNTEPWASDMVYMMQIPGFGLIFSMVILSAIGDIKRFSHPKKLVGYAGLGAGVHASGEKYQEKSITKAGRKELRWALVEAAWVAVRFDPYWKANFIRLKKRMHVNKAIVAIARRMLVSIWHILTKREPYHHFDEETIAYKMLIWSWAMDEKSRDGMTPQQFAKYGLLRLGIGQDLERIVRGGAPRRIAPTEEILALKPELAPPR

SEQ ID NO: 240300 - protein, 365 aa, unidentified
MSTITIGVDLAKSTFSTCEVDGAGHVLRRQDLGREAFALWLAQRPAGTVVAMEACSGAHHWARRCLEYGLQPRLMAAQFVTPFRKSRNAKNDRNDAEAIATAARQGNMRFVPVKHVDQQARLAWHRVREGYKTESLAIGNRLRGLLAEFGVVVAKSDLALRRVLEALDQQATLPGEFKELLRDLSAHWAQLRAAIDACGARIDAHARQDARCVRIGAIVGVGPITVDAMVASVGNAREFRNGRQLAAWLGLVPTQHSSGGHARLGTISCRGDAYLRTLLIQGARSSLQRAKAVSVEKSTPEQIWIRQLDGRMPFGKVLVAIANKHARQLWAMLAHDLDYDPHACVKHPMAQRPADKHAATVAAVA

SEQ ID NO: 240301 - protein, 354 aa, unidentified
MRSQTITVPKLFIGMDIHKKSWSVHLRTDLFDHKGFSMPPDASKLVDYVTNHFGDHEVALTYEAGCCGFTAARYFLNMGWTVKVVNPNDVPRSDKQLYQKTDKLDCRNLCRQLQQDQLHGIYIPTEPEEQLKSLLRQRNQVVKQLRKAKSQIKGLLLFHGIRVPEEFDNPNWSKGFTQWLQDIKWSYATGTACMTSKLRILTMLKSEYLQTSNELRAWCRKHQKTDYYLLKSIPGIGGLLSAAILAELGDIRRFNNEREFSNCIGLVPGIHQSSESDSKMGLTPRCKALLRSYLIESAWVAIRIDPEIQAYYRKHAGRNSKNVIVKVAHKMCRRILSVIKSGTPYQMNYSKLKN

SEQ ID NO: 240302 - protein, 347 aa, unidentified
MDQQHHVGLDVSVKETAICIVDPHGKVVHRATVESHPEVIGRHLSDLGHAYARVGLEAGPLSPWLYAGLVEVGLPAICVETRHMHAALSARINKTDRNDALGIAQMMRVGLFKPVHVKTPASQQRRLLLTSRKLLQRKAYDIESDLRGQLRNFGLKVGVVGAVGFEQRVRDLVLDLPFVAAVVLPLLEARAALRTQLAKLHKMLLEQVRTDPVCRRLMTAPGVGPVVALTYRTCVDNPARFGRSQCVGAHYGLTPRLYQSGETMRVGRISKCGDRMMRAALYEAALVLLTGSRGRWSGLKVWGLAVAKRRGMQKALVAVARKLAIVLHRMWRDGTDFRWSAAATTAA

SEQ ID NO: 240303 - protein, 360 aa, unidentified
MSHRTWKLGNVKSASASEGDRMTVGLDVHKATACAAVRKNGQEIATWVMPMDNQTIVASLKRFGPALKKVVYEAGPTGYGLARALKKAGLPVEVIAPGKVPQAPNADSKTDRLDARKLAEEAEKGSLQKAVIAIPTEQEEADRQLARLRDQLIGKQRRVKQQIKSLLLQHGLPEPAGLAHWSAEGLAALKAMRLRHQLQLSLEVLVGELEHLVVLRKRVERHEVWLMKQRRHRKGARLLQTHPGVGVVTATAFRLEVYQPERFATPEQLAKYVGLAPRVRQTGTKRRGGPLIPAGRGSLRSLLIEASWRWIRDDAAAAKTYRRLVRNTGSGQKAVVAMARRMAVHLWCMLCRGQEYRPAA

SEQ ID NO: 240304 - protein, 371 aa, unidentified
MKQQTKSSNITVGLDLGDRRHRFCALDERGEVVEQDSICNDRVSLRKLAGRYHGALGVMEAGAHSPWISRFLEALGWRVVVSNPRKVRAIYQHERKSDQRDALMLARIGRMDLALLYPVRHGTAEAQQDLLRIKLRDSLVRARVAVINSVRFTLKSLGYTVRNPSSERFHKVVMEEVPESVREMITPSVQALAELTARIKMLELEINTLAQLKYPQSAQLQQIPGVGPITALYFVLKIEDPNRFAHVRDVGAYAGLCPRRDQSGESDPQLRISKRGDAYLRRLLVSAAHYILGPFGPQSALRAYGLMLAADGTAQAKKRATVAVARKLAVLLLSLWKSQQPYQPFPGACLNGKQEDRRSGTIALHRMEATD

SEQ ID NO: 240305 - protein, 401 aa, unidentified
MNAVGIDVSKGKSMVCVMRPFGEVVLEPFEVLHTAQNLHDLAEKLKALDGETRVVLEATGNYHKPVAFVLHDAGLFVSVVNPVLIHDYDNNSLRRVKTDRKDAVKIANYTLDKWTRLRQYLPEDDTRLALKNCYRQYQQAVAIRTMLKNNLISSLDLTFPDANKLFTSPAKSNGCEKWVDFIGDFWHSECISSLSANAFAKKYLKWCQKHGYVFTRSKSDEIYACAVNSASLPKSPTSKLLIQQQVAQLKAVSQSVAAFRQEMLRLSQQLPEFDTVMEMYGVGPSLGPQLMAEIGDVRRFSSKKSLIAFAGIEPQPNDSGKVVGNDKGISKVGSAVLRRTLFLIMTVILETQPQDEPVFQFMNKKRSEGKPYKVYMMASANKFLRIYYARVKAVMDSERSQ

SEQ ID NO: 240306 - protein, 343 aa, unidentified
MKITSVGIDLAKNVIQVHGVDERGKAVLKKQLRRDQVASFFANLPPCLIGMEACASAHHWARKLQSFGHSVKLMAPQFVKPYVKTNKNDVADAEAICEAMSRPNLRFVPIKNGEQQAVLSLHRARQGFVKARTAQANQIRGLLAEYGIVIPQGIGHIAKRLPEILEDGENDLPGAFRQLLDRLGDHLKELDRQVGELEVQIQRWHREHAASKKLAQIPGIGPITASALVASIGDAKSFENGRQLAAWLGLVPRQHSSGGKQVLLGISKRGDTYLRTLLIHGARAVIRVAEGKVGHADSWLARLMDRRNKNVAAVALANKNARTVWALLAHARDYQAGYAPTAA

SEQ ID NO: 240307 - protein, 454 aa, unidentified
MKKVKNAPQPKVQANLQIVFPNAAGLDIGASEIMVAIPPDREGVTVRGFGTYTPDLAALADWLKEGGVTHVAMESTGVYWIPIFELLEERGFEVIVVNARHIQHPPGRKSDVMDCQWIQQLHAHGMLRGSFRPEADMCTLRAYLRHRDNLLEDRAKHIQYMEKALLQMNLQLGQVLSDLTGETGLAILHAIVGGEHDPLVLSRMRHGNCKHSQEDLIKALTGHYRKEHLFVLKQALEMFASFSQRLQECDQEIERLLEEIKPELPDDFPPLPPDPKPNSHCKNAPSYDARALLYPLAGVDMMAIPGMNEILLQKILAEVGLDMSRFPTVKDFCSWLGLAPHNAISGGHILYSHTLKNHNRAGQCFRLAARAVSRGKTVYSEFYRHIRARSGAKEANVATAHKIARTFYFMLLRGQPFLAPDLQTYLQVQREKDIRRLQARAAKYGFCLQPMQVV

SEQ ID NO: 240308 - protein, 315 aa, unidentified
METVFVGIDVSKDQLDVALPDGTHSWTNDPDGHRQLVEHFGKLPLQMIVLEATGGYERAITAELAAAELPVVVVNPRQVRDFARATGRLAKTDQIDAAVLAEFGRAVRPPQRPMPDAEVEKLREKLARRRQLVQMLTAEGNRLQQAHEASVRKSIRDVQQTLTKQLAHIDDDLQRTIQQTPAWREKENLLRSVPGIGPQTALSLLVELPELGSCSRQQIAALVGVAPLNRDSGKFRGQRTTWGGRPTVRKALYMATLTATRHNPKIRNHYQGLLKAGKRKKVALVACMRKTLCILNAVLRDQQPWKTPKIQPVTT

SEQ ID NO: 240309 - protein, 429 aa, unidentified
MICAAVERCAGIDVGKTFLAVCRMSGPLEGEARVEKQRFGTIRSELEKLRDWLKEGGITHVVMESTGSYWKPVFNVLEGSVKVYLANPQEVKTRKGHKTDDKDGWWLAHLLRHAMIHPSFIPPRPIRELRDLTRRRKRLLSNATAEKNRIQKILEDANVKLGNVLSDVFGMSGQLMLEALLKGDTAPGQIALLAQGSAKKKIPEILAALEGHQMSDHHRRMIRYSLEHLKFLEEQLQQMDRDIAEQIRAAGLEEQWRRLQTVPGIQDRSAANVLAETGADMQQFPTPKHLSSWAGLCPGNNRSAGKNKSSRTTGGNPWLRGTLTESAWAAAATKNCFLKDKFWRLTSKSGGKKPPALIAVAHNILNLVYQVLSTGQPYQERGAPPLQENQRQRMIRHHFHRLGKLGIAIPRYVADSFEPKSKTCMPRTQ

SEQ ID NO: 240310 - protein, 463 aa, unidentified
MELRLGIDIACRAAHQASLADGRGEFVWSGRPFRTAPADLEALWASLPPGTAPADVTVVMEPTRNAWVPLAAWFRRRGASVVLVPPERAADLRAYYAKHTKSDRLDSRLLARLPLLHPDGLHPERGLGPGDALRRATKLHSTLVLRRGKSLARLDALLEIPGPGWHRALGGDLANKTPLRFLAAGYADPDAVRRLGRARLGRFFARHSRGAWGGAKADELLAAAAESNALWAGELDYPDLAEDVAIEARLALALTREIKELDERIAAMLEQADPAGIIRSAPGVGAITGAAILGRLGDPGRFASLAAVRAFTGLVPSLDSSGQSGRHGGPTKRGDAVLREALFLAADHARRLDPSLAARYHRLMTEAGKHHTSALCHIAPALLTRVVACWRAGERYVLRDVDGRPVDPVEARAIIAARYTVPSDVRLRQARVHPARRTGRRDQGSRGAPSASPFATDATTVPA

SEQ ID NO: 240311 - protein, 334 aa, unidentified
MKKDHYIGVDISKKTIDVAIYVKNPTGKFPIPHETFQNGNDGFKEMNRWLRSKGVAISKSFFCMEATGTYTYELCLFLEEHKVSYSVQSPLHLKRSFGLTHGKNDKVDAGRIAYYAYLHREDIKESRLASDSVRKLKSLLAERKSLVVEIARCKAQLKEVGAHTPESGTVKRTQALQVFLEAQVEAIEEEMTQTIECDEKLNKNYRLLLSVDGIGIVNAINTIIATHNFEMFDNARQYASYIGVAPFEHSSGTSVKGRTHVEPGAKMLKADLTGAVRTCINHDKEIKKYYERKMAEGKAYGVVANAIKFKLLLRMFAVIKRQTPFVRKPDFIFN

SEQ ID NO: 240312 - protein, 339 aa, unidentified
MNPIPVGVDIGKNVFQIHYIAPGNGEIINKPLKRANFLEYFANLEPCLIGMEACGGSQHWARSLSKLGHKVRLMAPRFAKAFNIGNKNDAADARAIWLAVQQPGNKVAVKSEAQQAVLALHRLRQQLVKFRTSQINCIRGLLGEYGEVMPASRRAFDANIAAVLDRVSQHVAAPLIDTLREQWSALTHLDEQIARIEQRLKQWMSTDSSAQAVGAIPGVGLLTATAAVATIGDASAYKSGREFAASIGLVPRQVGSGGRTTLLGISKRGDAYLRTLLVHCARVISVQLRSKHPWIEQLLKRRPYNVAIVALANKLARVIWAVLARGRPYQQDFVSTKPA

SEQ ID NO: 240313 - protein, 348 aa, unidentified
MKATTIGFDLAKAVFQVHGVDAAGKAVVRKKLSRVQVLPFFARLAPCTIGIEACGSAHHWARKLAELGHTVKLMAPHFVKPYVKANKTDAADAEAICEAVARPNMRFVPVKSVEQQAILAVHRVRSGLVAERTAQLNRLRALLAEFGLIAPRGRRALMERLPGLLADEALPGVARTLFERQSTRIRELEAEISAEEAVIMDWHRNNELSKRLDAVAGVGPITATALVASFGQGREFDNGRQMAACVGLVPRQHSSGGKTRLLGISKRGDGYLRMLLVHGARAVIRTLERRAKGAGNPTDQWLTKLLARRNPNVAAVALANKTVRVIWALLAHDRTYDRNWSGQRTATA

SEQ ID NO: 240314 - protein, 413 aa, unidentified
MTTHMIGWFAGIDWGSERHQACILNSSGDIVAERDFPHTGSGLADLGTWLANTAGEARNMAVAIEVPHGPVVDLLLDRGFAVYAVNPKQLDRLRDRFSIAGSKDDRRDARVAASGLRTDRHLFRLVQASNPATIELREWSRLAEELQQDRVRLCNRLRQQLWRYYPQFLELVDEMSAEWLLELWSMAPTPERAIRLRPSAISRLLARHRVRKFDAASVLNILGKSAVHVADGVSEAAVLHIRSVIARLHLVNQELRTAEKKLDQLLQTRINDTSCDQDQSPSDAAILTSLPGVGRITLGILLGEAFDPLIRRDYTALRALSGVAPVTKRSGKSHIVSMRYAAHPRLRNAVFYWMRAAIRNNPDINMRYEALRKRGHSYGRALRGLADRLLELACILLQRRQKFDPARFKPATS

SEQ ID NO: 240315 - protein, 341 aa, unidentified
MKMYGGIDLHSNNSVVAIIDEHDTVLYRKRLPNDLNSIVSALARFQQELEGVVVESTYNWYWLVDGLMEAGYPMHLANTAAIKQYEGLKYADDDTDACFLAKLLRLGLLPEGYIYPKERRPLRDLLRKRGQLVHQHTSNLLSVQNLFARNRGTSMNANEVKRLDFERLFQLLDNETLVLAVAANVVVMRAQQQMIGLIEKVAQRQVKQYAGSEDYQHLRTVNGIGEILGMTILLETGEIGRFERAGNYVSYCRCVDSKRVSNGKKKGQGNRKNGNKYLAWAFVEAANFAVRFEPRIRRFHQRKSARTKPVIATKSVAHKLARACYYILRDKVDFDIDRAFG

SEQ ID NO: 240316 - protein, 339 aa, unidentified
MEITTLGIDLAKSVFQLHGTDAGGRVVLRKRLRRNQVLEFMAGLPRCLVGMEACGTSHYWAREILALGHDVRLIPPAYVKPYVKRQKNDMADAAAICEAVTRPSMHFVPVKSAEQQGVLVLHRTRKLLSRQRTMMLNALRSHLAEFGIIAPKGPFHLAQLAIALRNGEQDLPEVARLALLGFADQLAALSEEIKSLEAQLLAWHRQSALSQRLQTIPGVGVLTATAMAASIPDATLFRSGRQFAAFLGLVPKQNSSGGKERLGRISKMGDPYLRTLLVNGATSVIRRITNAEGPTAIWIRRLLEKKPTRLVTVAIANKTACIAWAVMARGEDYRRPAMG

SEQ ID NO: 240317 - protein, 408 aa, unidentified
MNPLFVGIDVSSRNNVAYLMKPDGSKYSSFSVQNNLGGAKLLSERIVSALGSMQLSDVVIGLEATSIYGDSLVYALREDGRLGQFQRKIHVLNPKQVRKFKEAYPDLPKNDWVDAFVIADHLRFGRIAREVYMDDYRYKALQTLTRARFEVIQNLTREKQRFANYLFLKCSGMAQDKDIANSSSTTIALMERFETVDDLANSDLEELTAFVTETGRGRFADPAATAKAVRAAAKGSYRLPKTVNDTVNQAMSVSIASMRALKEQVKVLDKAIEQQFEIIPNTLTSIPGIGKVYSAGIIAEIGDIHRFDSQASVAKFAGLVWHKNQSGEFEAEHSRMIKSGNRYLRYYLLEAANSVRRCDSEFRRYYDFKFKEVNKYQHKRALALTARKLVRLVFRLLKDNRLYIPPES

SEQ ID NO: 240318 - protein, 401 aa, unidentified
MVACVRIVSGGEVSRAVRTFETTTARLIELAEWLEASGCTQAAMEATGVYWKPVWQVLAGSGFELVLANAAHVKNVPGRKTDVNDATWLAELLAHGLIRASFVPGPEIQELRGLLRTRKQLVREKASHVQRLQKTLEEANIKLESVLSDVMGRSGRAMIQALIAGETDPAKLAALAHPKVRAPQARLREALRGRVKRHHRFLLGLHLQQIEALDAGIAAIDREVDAGLASFRDAVKQLTTIPGVSELSAQVILSEIGTDMSRFATAAHLRSWAGRCPRNDESAGKRRSTRLRMGAPWLKAMLVQCAWAAARTKATYLNAQFVRLRARRGPKKAVCAVAASILTAAYHMLKDGTFYQDLGATHFDRRRPEAHARRLVKRLADLGFSVQLEPWQPSHDRSVSL

SEQ ID NO: 240319 - protein, 313 aa, unidentified
MDKIPVFVGIDVAKHRLEVHLRPSGESFTIDYSEEEVAALVERRLLPLEPTLIVLEATGGLEVRLAAALAGAALPVAVVNPRQVRSFARAMGRLAKTDRLDAKVIAHFAEAVRPSVRPLPDETTRHLGALVARRRQLLEMLVAERNRRQAADRALHERIDAHLSWLESALAEIEGDLDGAVRDSPVWRAKEELLRSVPGVGPVSARTLLAQLPELGSLTRRQVAALVGVAPFSRDSGKMRGKRTVGGGRATLRACLYMAAVAAARGANPPVAAFHERLRRAGKPAKLALTACMRKLVVTLNAVLRTGTAWKQA

SEQ ID NO: 240320 - protein, 425 aa, unidentified
MNYKQNEKINQVKESTLVVGIDIGSTTQYARAFDWRGIELGKVFTFSNSREGFEAFKAWMQRLQDKYRKSDVIVGIEPTGHYWFDLGAYLEDEGILLVMVNPYAVKQTKELDDNSQSKNDRKDPKVIAKLVTEGRYSAPYTPDGVYADLRIMVANRKRLIREMTQIKNRFARWFAIYFPEYTDVFGDYEAQSSMLLLKKVCTPEAIVELGAEKINQIWRYAKLRAVGMKRATTLCETAKRSIGLKKGSSAAQYEMKLLLEDYEYKKAQLDAVIEEIEKLCRKIPESEQMLAIKGIGVITVAGFLAEVGDVRRFESPRQIQKLAGLSLRENSSGKHKGQTTISKRGRSKLRAVLFNAAIPLIATNPEFKSLHEYYTTRANNPLKKKQSVIAISCKLIRVFYAILANGVTYDAQKMLSDIHRQPQAA

SEQ ID NO: 240321 - protein, 411 aa, unidentified
MNPVVGLDVSKGESQVQAFLDKGNPYRKSFKVSHTVEGLNSLVVFLEDVKRESGKKPSVILEATGHYQTPLVHYLEERGYLLIILNPLISYKARSSSLRKVKTDAVDAYLLCELFYKEELEPYKKRGVQLLNLRNLTRQHENITGVMIQTKLQFQAVLEQVYPEYKGVFGDLYSVVSLLTLSEFPSSEDILRASEETIRDKIFELCNSRSIKWANEKAIQLKAAAARNPFEKTVYQSHILSLGMYINILLQYKEHLSKLESEIDALAKEIEEYNIIKSIPGIGEKIAATIISEIGEIDRFNNPKKLVAFAGIDPSVFESGKFTATKNRITKRGSSRLRHALYMVVRCAIRDCRKKKTTDEIIPRNKKMREFYDKKREEGKPFKVAVIACVNKLLHWIFALLKNRTTFQDIA

SEQ ID NO: 240322 - protein, 343 aa, unidentified
MHGVTTIGFDIAKSVFQVHGIDAIGKVVIRRQLKRRYVLAFFEKLAPCLVGIEACASSHHWSRALQALGHTVRLMAPAYVKPYVKRQKNDAADAEAICEAVSRANMRFVATKTPEQQSCLMLHRTRHLLIRQQTAVINAIRAHLAEFGVVAPVGRRGVAELLDVAAASSEKLVPEVARGCVAALGVQLRMLKAQILEFDRQIMAWHRSNETSKRLDEIPGVGPALATALVASVADPKAFRSGRNFSAWIGLVPKQHSSGGKDRLGSISKQGDRYLRSLFTAGALAVIRYAKIHGTRHRPWLAALLARRPTKVAAIALANKIARMAWAMMVKGERYKEPAALAA

SEQ ID NO: 240323 - protein, 393 aa, unidentified
MVSVGIDVAKDKHDCFILNSEGEVLADVFTISNNREGFETLLHTIQSCAGSTERIKVGLEATGHYSYNILGFLLDYGLPTYVINPLHTNLYRKSLSLRQTKTDRIDARTIATMLMSDVDLKSYTNTAYNNEELKSLTRYRFDKVRERAKLKTSIARLVNILFPELESLVPVLHMPSVYALLSEFPGAKQIAEAHLTHLKSVLHDASKGHYSREKAEEIREAARHSIGSFMPAKSLELQHTIRLIRELDHAISEIEAAIKTIVDEMAPPILTIPGINYRMGAMILAEIGDISRFASPDQLLAYAGLSPSTYESGKLVASGSYSHMEKRGSRYLRYALFNAARFVCNWDPVFAAYLSKKRAEGKHYNVAISHATKKLVRVIYALQTSGQAYHIAV

SEQ ID NO: 240324 - protein, 352 aa, unidentified
MEEVSVIGIDLAKRVFQLCAMTRSATIVWEKRLRRAAFIKFLEDEAPRCLVGLEACGGAHHWARWLVARGFSVKLMPPKTVKAYREGVHKNDRRDARAVAEATSRSQVAAVRIKSAAAQATQALMRVRERRIRQRVQTANQLRGLLNEFGIVLPKGHRLLLVRLGELIPTAEFAALPAIVQELVQTLSDEIIEQAAKVAAASAALTTAVQADMNCRLLMSIPNIGPINAAALSVALETPGAFARGRAFAAFLGLVPRQHASAETARLLGVGQMQACEMRRYLVLAAQGLLTRVDRMKELPQDRLLAWAGRLLRRKMRNVAVVAVAAKLARIAWAVMAHNQPYQPRPVGAQPV

SEQ ID NO: 240325 - protein, 355 aa, unidentified
MNQEKYIGMDVHDATISAAVMNAEGKLLMECVLETKAATVLDFIRGLRGTLALTFEEGILAAWLHDLLKPHVSRLVVCDPRKNALLRDGNQNDRVDARNLAELLRTHQVHAVYHGKHGTRTLKEVGRSYLALTQDRTRVMNRIKSVYRSWAIACAGTSVYSRRHRAEWLAQLVEPGVRIRAEHLYQQLDSLEPVRQAARRELLRESGKHAAVKLLRQIPAIGPIRSALLVALLQTPHRFRTKRQLWAYSGLAVQTYDSGEFRFVRGKLHRNRERITVRGLNRNHNHDVKNLLKGAAISAIGHPGPLQDFYAALVEKGMRPSMARLTLARKIAAITLIMWKKGVSFDPKQLQPQAA

SEQ ID NO: 240326 - protein, 493 aa, unidentified
MIHCFLVGYIPLRRMRIIAPLRLRAIVLLFASKEKALSKRTKKSKFQKFNVQSLPEHLRHINLNAAGIDIGSERHMVAVPEGRDEVSVREFGAFTADLQALADWLQQCGVTTVAMESTGVYWIPLFELLERRGFEVKLVDARHVKNVSGRKSDVLDCQWIQQLHTYGLLAGAFRPTDELCVLRSYLRQREMLTQSSSMHIQHMQKALQQMNLLLHNVVSDITGVTGMKIIKAILAGERDPRMLARNRDRRCQNSSATIAKSLVGNYREEHLFALKQAVDLYETYQAKIADCDQAIIKQVEKQPDITDDTLPPSEQLIQARERIRSGVDVRELLFKKSGVDLFATPGLAADTLLTLSSEVGFDMSPWKTIKHFTSWLGVCPGTKISGGKVLNKKTKRNPNRATQAFRMAAATQARSKTALGAFYRRIKSRSGGKQAITATAHKIARIYYTLLTKGTAYVELGQQAYEDKYKERRIHHLMAQAKSLGLQLVPCAT

SEQ ID NO: 240327 - protein, 406 aa, unidentified
MTMIELEVIAGIDTHADTHHVAVIDTTGRRLGDAGFPTTLKGYKAIAAYLAAFGLVRRVGVEGTHSYGAGITQHLKDSGVRVVEVIRPNRQVRRMRGKTDQVDAYAAASAALATDDHPKPKQLDGLVEAARYIHAARRSAVKARTATRVQIKSLLVTAPEQIRARYRSTADTALFPALARTRPAPEENMLTRTIMSSLKSLARRYQHLTAETDILEAELEQLVFQINPGLAQTKGIGTVTAAQLLITAGGNTDRLKSEASFAALCGTNPIPASSGKTTRHRRGRGSYRHANSALHHISLTRMTYDQRTRDHIQRKKQEDKGTREILRCLKRAIAREVFTLITNPIPVVDHRKLRPLRQERGLIQVQAAAALGVSIAKISLAENGRVHDATFLATYETCLRNTDLTP

SEQ ID NO: 240328 - protein, 455 aa, unidentified
MAKKGKKHTRTLENMPILHPHAAGIDVGAEEHWVCVPADRDAQPVQKFSAFTCALHRLADWLTTCRITTVVMESTGVYWIPLFQILEARGFEVALVNARHVKNVPGRPKTDRFDCRWLQKLHSYGLLAPSFRPPEDICQLRSLLRHRDNLIQMTVKHIQHMHKALDQMNLHLHHVISDVTGVTGLRILRAIVAGERDPRTLAQYRDYRIKSSPDTIVKALEGDYRPEHVFTLTQSLALYDFTQQQIAACDQEIERVLGTFASLIDLDAHPLPPPTTAHRQPQRHEPAFDLRAHLYRITGVDLTQVPGFQALTIHTILSEVGLDMSKWPTDKHFASWLGLCPDNRISGGKVLATGSRRVQNRASRALRMAAQSLRKSPSYLGAFYRRMRSKLGPAKATTATAHKLAKILYHMLQEKTPYRERGAEAYRHKEHERQLRQLRKQAQHLGFALVPQTSN

SEQ ID NO: 240329 - protein, 400 aa, unidentified
MRVVFGIDVSKASSEVAILVNGEKVHGYTISNDAIGFARLLGDLRTVHKPEIIFEATGVYSRRLQAFLDEHGYAYTRLNPLEAKKQLDSLRVRKTDQIDAEKLAQSQFVLNRKPTYVQEEVYQNLRALSRFYQNLTEDIVRAKNRLHKVLQVTFPELENILSTPSGEQYWNLVTAFPCKDFVLDLSKDELSESIRQSTSKRISDKRVAYLAEKLIALANQSYCAVKKTSPILEEVRYYGKELLRLSEQRQTVLDQMVELAQPLPEYDILLSIPGIAETTATSIIGELGDIRRFQSANQINAFIGIDLRHYESGNFLAKEHITKRGNPYARKILFKCIHNIASASHTNPCHIADFYEKRKRQSQTTSTKPHTIASIHRLIRTMYYLITHNKLYDYRSTQNQ

SEQ ID NO: 240330 - protein, 360 aa, unidentified
MRALYAGFDLHGNSNYLGIIDGDGKRVLGKKLSNDLEWIREVLGPFEAEVVGVVVESTYNWYWLVDGLMEEGYRVHLANPSAIQQYSGMKHLDDKHDAFWLAEMLRLGILPEGYIYPKEERPVRDLLRKRGHLVRLRTSLVISLQNIVSRNLGRKVSVNDVKALREDRVTPLLESSEDLALAGRVSKEAIDFLTHQIRRIEGVVEQRIELREEYRYLLTLPGVGKILALTMMLETGPIGRFATVGDYVSYCRKVPSQWTSNGKRKGSGNKKNGNKYLSWAYSEASELARRFYSEPRAYYHRKMQKTNAPVAHSALAHKLARAGYYVMRDQVPFEPQKLFGRRGRGWNGEPELGLVKSHEA

SEQ ID NO: 240331 - protein, 391 aa, unidentified
MICAGIDVAKDKHDCFILSSEGVVLADVFTIPNNLEGFNTLLDKLRTCTTAQDSIKVGLEATGHYSYNILGFLLDNGLATYVLNPLRTNLYRKSFSLRKTKTDRVDARTIATMLLSDAGLKPYTDTACHNEELKSLTRYCFDKVKERAKLKQSISRLVCILFPELEKIVPSLHMVSVYTLLAEFPGAEQVAAAHLTRLKTLLADASRGHYGRDMALEIRDAARCSIASRMPAKSLELQHTIRLIQELDAEIEEIETAIRAIMDELHSPITSIPGIGYRMGAMILAETGDLSRFDSPDKLLAYAGMSPSTYQSGQLKNCYPHMEKRGSRYLRYALYNATKYVCHWDPSFAAYLAKKRAEGKHYNIALSHAAKKLVRLIFALEKSRQPYCPAA

SEQ ID NO: 240332 - protein, 367 aa, unidentified
MEKSTKVFVGMDVHKESIDITLAEEGGEVRRLGQIGGDRGSLLKMVRRQQSQGGERVFVYEAGPCGFWIYRELAALGERCMVVSPALIPKRAGDHVKTDRRDSERLASLARAGELAAIHVPDIRDEAIRDLVRGRDDAVIAQRRVRQQLKALLLRNDIRYVGKTSWTGAHRRWLSELKLPEPAQQIVFEEYVDAIAVATGRIERLTRAIGAEGIAWRFAPVVAALQALRGIQFVHAVTLIAELGDLTRFASARALMGYLGLVPRENSSGEHRRQGSITKAGNSYARRALVEAAWAYRHPARVTRIIATRQAGLPKAACDIAWRAQLRLSAKYRRLHARHLNHNKIVVALARELSGFVWAIGQCVKPQ

SEQ ID NO: 240333 - protein, 344 aa, unidentified
MQPQEYVGIDLHRRRSVIVRRSAEGETLEVSHVHNDDLLAFERAVTAAGEHPEVVLEASYGWYWATDLLEELGCNVHLAHPLGNNWGNRRVKNDTRDAEDLADLLRLGRLAEAWIAPPKVRELRELVRYRAKLVSLRTNCKLQAYAVLAKEGVSVPMTDLFGVSGTELLETCHLATAYRTRVESLRDLIEVFDREIAKLEGDLRHELRGQVGYQAIQQIPGVGPLFASVFVAEIGDVTRFRSPAQLASWAGLTPKHHESDLTVHRGPITKQGSRLVRWAAVEAAQRQANGTKLRADFARITAHHGDSAGARKIARVAVARKIVTLVYYGLRDGTIRSKAISEAA

SEQ ID NO: 240334 - protein, 343 aa, unidentified
MEEISTVGLDIAKSSFQVHAINAIGEVVVRRKLRRRQVLSFFSRLSPCLIGMESCATAHYWARELVGLGHEVRLMPPRYVKPYVKRNKNDAADAEAICEAVTRPTMRFVPIKSVEQQSVLMVHRTRELLVRQRTMLINAIRSHLAEYGIVAGVGRNGVEALLNLIAQGQDDRVPSLARECLMTLATQLDLVRKQILDADRRVLALHRSSALSRRLEAIPGVGPLIATALEASISDPHAFRSGRDLSAWIGLVPKQNSTGGKERLGSISKAGNRYLRKLLVVGALSVIKRAKQEGYSRYPWLVRLMERRSVKVAAIALANKIARIAWAMMARNESYRSLMPTTA

SEQ ID NO: 240335 - protein, 344 aa, unidentified
MSEYVGFDVSKEETAFCVKDLAGKVLARGKVATDPEALFEALKAHCLCPERIVLETGTLSGWLARELGRLGLAVDVIDARQAHAVMGLQHNKTDANDAALLAEIARTGFYRGVAVKSEAAREARILLKARGHLVRQRRDTENTIRGLLATLGIRFPRGSGKLAGRVREALEDAPGLRLMIEPLLSSVAALGRELGRLDKAVVARAKSAPACRLLMTVPGVGPVTALAFAATIDDPARFAKSRTVGAYMGLTSRRWQSGEMDYSGRISKHGDAMLRSLLYEAANSLLTVVRRAHPLKDWARRIRKRTSHKKACVALARKLAVILHRMLITGEAFRWPEKQAATVA

SEQ ID NO: 240336 - protein, 340 aa, unidentified
MKEVITTIGLDLGKKVFQVHGVDVAGGVRVRRSLRRSQVLEWFGKQQACLVGMEACATAHYWGRELSRLGHEVRLIAPAYAKACVRRNKNDAADAAAICEAVSRPGMRFVAIKTVAQQAAGGLHRVRDLLQKQRTMLINQLRGLMAEFGIVVAGGPQHVKDLLAVLADPADARVPELLRGPLLGLAQVLGDLERRVATLERQIVAWGRGNATYRHLITVPGYGPILAGAFAAFVVEPSALRSGRDFAASLGLVPRQEGTGGKLRLGSISKRGNGYLRRLLVNGAMSVLNTRRARQDPWIARLLASKPRKLVAVALANKMARIGWAMMVRQEDFRPRSAAA

SEQ ID NO: 240337 - protein, 352 aa, unidentified
MKFYTTTTEYNCGIDLHSRQMYMCLMDSKGNKLVHTNIEGNDFGYFLKKIAPYRHDLTVCCECTFNWYWLADACQAEGIEFVLAHALYVKAIHGGKNKNDRIDSEKLAHLLRSNLIPPAYVYPAEKRPVRDLLRRRTSFVWRRATLLGQLTCSMYVLGHEPIRKTQHKVRDKWFDQLRAHYEQPLTKMAAEANMYMIKEYDTIIERLELAILKHTKREHARDFNILQTIPGVGDILALTILYEVDDISRFLSVQNFSSYCRLVKGSVASAGKFKGLRGGKLGNPYLRWAFAEAAILCKRANPDLRAYAGKLEAQHIKPVANAILANKLARAVYFMLKQGKGFDPKMFAKSSN

SEQ ID NO: 240338 - protein, 392 aa, unidentified
MVVSVGIDVSKDKHDCFIISSDGEVLADVFTISNTLDGFHGLLQRIQECTAPQDKIRVGLEATGHYSYNLLGFLLDNGLATYVLNPLRTNLYRKSLSLRKTKTDRVDARTIASMLLSDAGLKPYTDTAYHNEELKSLTRYRFDKVKERAKLKSSIARLVCILFPELEKLVPSLHIASVYALLEEFPGAKQVAAAHLARLKALLETASNGHYKRDMALEIRDAAKNSIGSQMPAKSLELQHTIRLIRELDREIDEIEEQIQSIMDELHSPITTIPGLGFRMAAMILAEVGDFTRFDSPDKLLAYAGMSPSTYQSGQLKNCYPHMEKRGSRYLRYALYNATKYVCHWDSAFADYLAKKRAEGKHYNIAISHAAKKLVRLIFAMEKSRQPYCSAA

SEQ ID NO: 240339 - protein, 402 aa, unidentified
MIYAGIDIAKNKHVIGATDERGKDAAKPMPFANSTEGFDRCIAYLDGLADSKAGLMVGMEATGHYWLPLLCRLQDEGYPVVVVNPVRTDAMRRFKGSSRVKTDMIDCVLVAETLRCGEFEPSKLGDEAVIELRQLTRLHQELKESAADLKRQVIVALDQAFPEYDSIFSNTFGESSKAFLKRCPTPEECLGIRADSLARTLERASRGKLGRAKADEIKEIAKASCGISVAASAFSFQIKLLIDQIDFIEGQIDEAEARVRDGIEAVEPLILTIPGIGHVLGAQIVSEIGDIRRFHSAPAVVKYAGINPSVSQSGKFSSEDNRITKQGSPYLRRALYLAAMAQLKLKTPFYDYYAKKRADGKSHREALVAVSRKLVHVVYAVLSRQKPYDPDIARNPNESRSE

SEQ ID NO: 240340 - protein, 400 aa, unidentified
MAVMIGIDPHKGSHTAVAVIAAEELLGKVRVRACPAQAGQLVAWAAAWPDRTWAVEGASGLGHLLAQQLVAAGERVLDVQPKLAARVRLLHTENTGKSDPNDALSVAVAALRSTTRREAIADDQAMVLKVWAKRHRDLSRARNQVACRLHAVLCDLVPGGIADEITAGRAARILGQITPAGPAAQARCELAAELLADIRHLDAQRREVKKKLATAVKASGTSLTEVFGVGPVIAATVIGDVVTVARFPTRDRFAAYNGTAPVEVSSGEKKIYRLSLRGNRRLNHAIHMAAITQISHAHSQGRAYYQRKLAEGKTCKEALRCLKRRISDAIYARLRADARTKGPGGQLGSHSVSRAAGLTPRAPALRASHSRAQGQPTIPGRTHAAHAAARASARKARRAT

SEQ ID NO: 240341 - protein, 343 aa, unidentified
MQVSTIGVDLAKNVFQVHGVDSAGKVVITRQLRRKQVLDFFSKLPSCLVGMEACGTAHHWAREIAKLGHTVRLMPPSYVKGYVKRSKNDAADAAAICEAVTRPSMRFVPIKSTDQQALLMLHRTRDLLIRQRTQLINALRAHLAEFGLVAETGREGIAQLGAIITDESNHEALPSAMKQALQAIVDQLAALELQVGALDRAIHAHHRANDMSCRLETVPGIGVIGATAIASTVTDPSGFKSGRDFAAWIGLVPRQHSTGGKERLGGISKQGDRYLRRLLVIGATAVVRQARLHPQKHPWIMRLLAKKPAKLVAVAVANKMARIAWAIMAKGGYYRAPELAAAA

SEQ ID NO: 240342 - protein, 411 aa, unidentified
MATMFCGIDWGESRHDVAIIDQSGNVLGRAKITDDAAGFTELLTLLAEAGDCEDKQIPVAIEKDHGLLVSALRSTGRAIFPLNPLAASRYRARHQVSGAKSDATDAVLLANILRTDLAAHRPLPADTELAQAIRVLARAQQDMAWTRQRIGNQIRSLLKEFYPAALDAFAALARGGLAHPEARMILAVAPTPAKAARLTRARLRTLLAKAGRQRRINTEADRLFEALRGNYLRHPSVVEDAMGIQLTALLTHFDAVCQASDDLEVAAREHFERHPAATVINSFPGMGTLLGARVLAEIGDDRARFAAARGLKAFAGSAPVTRASGKKTVVTYRRIKNNRLAAVGTIWALSALSVSPGAKRHYDARRARGDWNRQAQRHLFNKFLGQLHHCLQTGVTYDETHAFPTPLGLAA

SEQ ID NO: 240343 - protein, 348 aa, unidentified
MKFYNKSHPNYCGIDLHARSLYICIINSEGETVLHREIKPSRDTLIEILAPYQDEVVVGSECMDCWYWVSDLCHDNHIPFVLGHALYMKSIHGGKAKNDKIDSYKIARLLRGGTFPMAYVYPNEMRATRDLLRRRKHMVTCGAQFKAHTKSTANQYNFDNPTADLRYPKDRELMKDVFTEANESVKRSINIDLDMVTHINKELVKVERYIEKQAKQHNEDDYLLLRSIPGVGQILALTIIYEIGYIDRFDSVQKFASYALLIKCKAESAGKTYGSQGNKFGNGHLKAAFSQIAVLYLRNNPSATKYLKNLQKRMSKAKALSVLAHKLGRCVYYMLKKKCVFDETRLLN

SEQ ID NO: 240344 - protein, 323 aa, unidentified
MPHVTSIGLDVHARSVAAAAFNPFTGEVVHRDFGTDAAEIAEWALGFEEPRACYESGPTGFHMARELRALGLDCAVAAVSKMQRPAADARRKNDRRDAEFIARMLATHNIVEVPLPDAAVEAARDLDRALDDATVEYRRARQRLNMFLIRLGHVWDERNADGTRKGSWTRAHWRWISGIRLEGPQRDVLEYYVTAARCAESDRRQLEKKVLALARTDRWRPAVEALSCIKGIDTLTAFRLAAEAGSFTRFRTAPAFASWCGLVPSERSSGETERRGGITKTGNRLASVSVNLFFTSFAKQARRSRKGGFTGCANVFSPIPVTA

SEQ ID NO: 240345 - protein, 301 aa, unidentified
MQIYAIDVSKEHLDIFSRLEDEKIFQKRIKNNFNSICKLLSALETEDFICAEFTGVYTNLLWHLSAMYGIKIALASGFDIKHSLGNRKGKSDKLDAERIWEYASRFSDKLNFVRPDDERMQELKMLFNLRNQLVKSLKTLHTSHTMSKLNPYLSIAENRIREQTGAFIKEQIKQTEDQLFELIESSEELSLNFELVTSITGIGKVTALELIISTGNFKRINSARKAAAYAGVCPYPNQSGNIAKKSRIHFRANKKLKSLLHICAKTICIHNKEFKLYRERKMMEGKHFYLVMNNVSNKLLF

SEQ ID NO: 240346 - protein, 340 aa, unidentified
MDKIMTIGLDLAKNVFHVVGCNEHGKIVRKRMLKRSQVLAYFANLPVSLVGMEACASAHYWARELDVLGHEVRLIPPQYVKPYVRGNKNDYNDAHAIAEALNRPRIQFVTIKTVEAHDMQAIHRMRSQCVRDRTALSNSTRGLLGEYGISLPKGLATLRRTIPDLLEDAENGLSIRFRTLLARRYQQLVELDEHIGFYTKELEFLSQQDDACQRLQTIPGFGPIVASAFRSAMGDGRAYVRGRHAAASLGLVPRQYSSGGKTVLLGISKRGDRYLRKLLVHGARTVVQSAVNRDDPFSQWINRVRERRGKNKAAVALANKLTRIGWAILRYNTRYDPALV

SEQ ID NO: 240347 - protein, 338 aa, unidentified
MQLYAGIDLHSNSNYLGVIDEEDHRMFKQKLPNCLSTILSSLEPFKRNLAGIVVESTFNWYWLVDGLMLNGYKLHLANPSAIQQYEGLKYTDDKWDSFWLAHMLRLNILPEGYIYPMQERPLRDLLRKRGRLVRERTSHILSLQSMWNRNLGSQITGNEVKKLKEDDAEKFYHHPDLMMSAKISIATIKYLTNHIKQIEKRVKSQIELKKPFQCLLGMPGIGDVLGLTIMLEVGEIGRFVRVGNYSSYCRCVSTKRLSNGKSKGKGNSKNGNRYLAWAYVEAANKAIRFCPYARKFYQRKRAKQKNVVAIKALSNKIARATYYMMRDQVEYDPKKLFN

SEQ ID NO: 240348 - protein, 344 aa, unidentified
MDTISIDLHKRESQLCIGHDDGTVEERRIATTRERFTAALGERPRARILLEASTESEWVARHLESLGHDVIVADPNFAPMYATRSRRTKTDRRDARALMEACRLGAYRPAHRLSDARRHVRAELAVREALVRTRTRYIALAKALVRRDGLRVPASESHLVAKRIVALELSECLAAELLPLFEILAPLNEQIAAADRRIAALTRDDATTTLLTTAPSIGPITAAAIVATIDDVTRFRSAHHFEAFLGVVPGEYSSGEKRRIGRITKAGNARARYLLVEAGWRILRSKDSDTEALRVWGLAIAARRGKRIAAVALARRLAGILYAMWREQRPYDASRLRLPRARGA

SEQ ID NO: 240349 - protein, 345 aa, unidentified
MQITTVGLDLAKRIFQVHAVDASGGVVVCKALRRSQVLPFFTKLPPCLIGMEACGTAHHWARELTELGHEVRLMPPSYVKPYVKRGKNDAVDAEAICEAVTRPTMRFVAMKSAEQQAALSLHRTRNLLVKQRTQLVNMIRGLLAEFGIDIPQGLERALRLARQIAAKEATPEVPAMATQVLSLLCGQVLDTHVRLQAIDRSINALQRTDDVARRLSTIPGIGPVGATALAASVADPGQFRSGREFAAWLGLTPSQNSSGGKDRLGRITKMGDRYLRKLLVIGATSLIRRARHKPEAADPRLLALLARKPARVASVAMANKMARVVWVIMTRGETYQARHAPNLAA

SEQ ID NO: 240350 - protein, 349 aa, unidentified
MRTKPNPKAAAYGIDIGKKVFHVVAMDAGGQPIQRAKFSRETLLRFFEAANPVLIGMEACAGSQWLARKLIALGHDARIIPAKFVKAYVKSNKSDSIDAEAIAEAVTRPTMRFVQVRSDDQVDLQALHRIRDRLVRNRTGLMNQARAFCIEYGLAMRTGAGGFHSDIRRHLGNEENDLSGAMRTLLTSLLDDLDQLERRIAELSKEIEAIAHSDETIKRLLTIPGIGPLGATALVAAAGDGKQFKKARDMAAWLGLVPAEHSSGGKQNLLGISKRGNGYVRRLLIHGARSCFLHLHRETHALGRWLSALEDRTHRNKAVVALANKLTRIAWAILTKPGENYLRTKGAAA

SEQ ID NO: 240351 - protein, 317 aa, unidentified
MATILGIDVSSETLDACALTEDGTKHSKAFVYSLEGCRSLVKWAQKHQVGVVVMEATGGYEQRAALALVQAEFPVKIINPSQVRNFARGIGKIAKTDQIDAYVIARFAQVVPLPETFRVSLGEIRLKRLVQRRVVLIEMLSAEKNRKSLADDEIMESISAIIGVLQSEVKRIESAMDEIRKEDPVITRKCEVLTKQKGIGSITALSLIALMPELGQINRKQAAALAGLAPIARDSGKMKGKRFISGGRFDVRRALYMPAWVSVQRDPEMRDSYERLVGKGKLKKVAIVAIMRKLLIRSNALLNRYCFGGGVVNESFC

SEQ ID NO: 240352 - protein, 391 aa, unidentified
MIYVGIDVAKDKHDCFITNSDGEVLFNVFTIANNLDGFNDLCQKIASVMEDVTKVKVGLEATGHYSYNLLGYLIDKGLPTYVINPLHTNLYRKSLSLRQTKTDKVDARTIASMLMSDVNLKSYSDTSYHNEELKSLTRYRFDKVKQRAKLKSSVSRLVCILFPELEKLVPTLHMASVYAMLSEFPGAKQVANAHLTRFTNLLSKVSKGRYGKETAIAFRNAARTSIGSNMPAKSLELKHTIKLIQELTSEIDEIENEIKLIMDEINSPILSIPGINYRMGAMIIAEIGDFNRFDSPDKILAYAGFSPSTYQSGQLDGAYSHMEKRGSRYLRYALYNAAKYVCNWDPTFAEYLAKKRAEGKHYNVAISHAVKKLVRVIYHLEKTNQQYIKAV

SEQ ID NO: 240353 - protein, 347 aa, unidentified
MVHVGLDLSRRRLDVCVLGENGDKLTVTTAPPDRDGLGVLARKIAGFGEPVNAAIESMNGARYIHDTLELLGWDVEIADAQKVKGLAPLACKTDRIDAWVLAELSRRDLVPAIWLPDPGVRAERERARYRLHLVRHRTMFKNRVHATLIAFGKPCPVSDLFGVSGRDLLRKLDLPEPWSTNVIRALQQIDQLEAEIDTCAVELRQLGADHRYVPLLTTVPGISWVLGYTIASEIGDISRFSSPKKLCGYTGLCPRVYQSGGKDHRGPLAKNGPKYLRWALIEATVHAARHPAYREHYERTAARLGKQRGKKVARVEVARKLAEAIWHMCTNDRPFTPARSHVNALVA

SEQ ID NO: 240354 - protein, 344 aa, unidentified
MIIIGCDFHPSWQQIASLDTETGETEERKLMHASGEARQFYEGLAGPVRVGLESTGNSHWFVDMLMELGHEAWVGDAARIRAKQVRKQKTDRRDAAHILDLLLKDDFPRIWTPSRQERDQRQLLIHRYKLVTLRARVKNELQHLALNQGMQKGRSLWSKAGQKLLLDLPLEFWAGTRRKNLLELLKQMDQQMVVLDQAVKKAAEENEKARLLMTQPGVGPITSLAYVLTMGDVTRFQRGKQVASYLGLIPREYSSAGKQRMGGISKQGNRFMRMLLVEAAQVVVRYDPKFRSEYLHRCHQKPKAVAKVAAARKLAVRLFWMLRTNTPYPEVVGIESSSRVPLAG

SEQ ID NO: 240355 - protein, 315 aa, unidentified
MSESHGPYVGIDASKASLEVGVRPTGESWSAANTPEGIARVIQRLVSLHPTLIVVESTGGLERPLLGELCFAHLAVALVNPGRVRDFAKSTGELAKTDKLDAGVLAHFAEAVKPAVVALPSEQEQLLSALMTRRRQLVEMLTAEKNHLLSTPSKARRWVERNITSLQQQLDELNREIDEFIQHDPAFRDKEQILRSAPGVGPITAAILLSDLPELGKLDRKKIAALVGVAPFNRDSGPRSGKRQVKGGRGAVRAVLYMATVCAVRFNPVLKAFYSRLLDHGKLKKVALVACMRKLLTFLNAMIRDSRMWAPSLSI

SEQ ID NO: 240356 - protein, 439 aa, unidentified
MGKLEKIKLKAAGIDIGSEKIFVAIEEQEVKSFRTFTSTLHQAVEYLQLHGIESVAMEATGVYWIALYDLLEQAGMEVFLVNPTETKNVPGRKTDVQDCQWIQQLHSYGLLRRSFIPDPTIRELRVYVRLREDHISMASAHVQHMQKALTMMNIRLHEVISQIQGSSGIKIIEAILSGERDAEKLTLLCNRQILKNKKGDVIESLKGNYRSEQLFALQQALDSWRHYHGKIEECDRKIELLLKEITQGKPPVEKLSKAKPIRHHRPNVANLHEKLSQILEGKDPTVLPGISDYTLMQLIAEVGTDLTQWSSEKHFTSWSGLAPGKNTSGKITKRSKKNINTRVGQIFRKAAQSLLQSKHIALGAFARRLRARKGPMIAIKATARKLAVMFYNLLTKGLDYVEQGVKKYEEQYRTQMTKFLQKKAAEFGYAMVPITNSSE

SEQ ID NO: 240357 - protein, 346 aa, unidentified
MMIIGCDFHPSWQQIVWLDTETGETGEHKLVHAEGEAQRFYGQLSAPVLIGMEATGNSQWFIELVEDLGHEIWIGDAAQIRASYVRKQKTDKRDAVHMLKLLVEGRFPRLWAPDREQRDLRQLVLHRHKLVMIRSRVKNELQHLSLNKGMQRKRRLWSEAGMQLLRELPLKPWASCRREDLLGLLAMLDEQIRKLDGAVGRAAEENPQSKLLLTQPGVGPNTALAFVLTIGDVRRFPRGKQVASYLGLIPREESSGGRQKLGAITKQGNRMLRSLLVEAAQIAVRYDPQFRREYLHRCHSKPKGVAKVAAARKLAVRLYWMLRTHVGYPEIVRIESSPRVALVGAS

SEQ ID NO: 240358 - protein, 412 aa, unidentified
MEVVYACCCGLDVHAKTVVACLVTKGRKEIRTFATMTDELLQLGDWLSSAGCTHVAIESTGVYWKPVFNILEGLLTVILVNARHIKAVPGRKTDVRDCEWLADLLRHGLLKASFIPPREIRELRELLRYRQTVVTEHTAVANRITKLIESANIKLGQVASEVLGLSGRLMLRALAAGETNAETLAELAQGKLKSKKAELRRALEGCLTQVQRWVLTELLTRVEELEAALTRVETRIGEEVAACPDPFVPEAVELLESIPGVGKRTAQTIVAEIGVEMSRFPSAKHLASWAGVCPGNHESAGKRKSGHPTKGNKSVRTILVEAAWAATHAKGTFLQAKYHRLVKRMPKQKALGAIAHRLLVISYHLLSRRVPYAELGTAPVDEQQVTRQRRRLVEQLVGLGVKVTLDEGGAVA

SEQ ID NO: 240359 - protein, 338 aa, unidentified
MKAYAGIDLHSTNSYIGIINDKDQRLFKKRLPNNLDIILSALEPFQQDLHGIVVESTYNWYWLVDGLQDHGYTIHLANPSAIKQYEGLKHTDDRWDSFWLAHLLRLNILPEGYVYPKGERPVRDLLRRRMMLVRQRTTHILSLQSMITRNLGINMSGRAIKRLTGDDAEQLFKDPCLVLAATNSISIMKFLKEKIRLIEQSVLSRVKLRKEFAPLLTLPGIGKILSLTIMLEVDNINRFPKVGNYSSYSRCVKSERISNGKKKGTGNTKNGNKYLSWAYVEAAHHAKRSYPYAKSFFQRKEAQTNRIVAVKALSNKLCRASYYVMRDRVPFDQEKLFR

SEQ ID NO: 240360 - protein, 342 aa, unidentified
MEIVYVGLDLGSSAFQQVAIKADGSVKVNRSFTTSETNLRTAFADQHGEIHVHLEAGELAPWAAAVIAPLVTRVVCSHPKDNAWIAKDADKCDRVDAYKLAELLRLNRFKEVHYAPDQPRRTFKQLVQHYDELTGQQARLKTKIKARLRMQGVIVTGERLFSSRGRKEVLVRVESRDLRTAIKQLYEVLDQSVAAQDQARLLMLRAAQAFPEIKLFRTAPGVGPIGSCRFSAYIHTPNRFSSKRKLWKYCRLSVSHRSSNGKPLRRPRLDRSGCGRLKDVSRKAFDVAIRSRHDNGFKRAYQRALETTHDKTHARLTVQRKIVSTLRAMWITRTPYCDELSR

SEQ ID NO: 240361 - protein, 361 aa, unidentified
MKSTTIIALDHHAATTVAAVLLPGHRSPALHPLTSDIPTIQRFIVRLQRQGPVSCCYEAGPCGFELQRALTAHRIPCEVIAPALSPRRAGDRVKTDRRDAGQLAVLYRAGALTAIHIPTEQEEAVRDLLRCREDIRADLLRARHRLSKFLLGHGRRFTASKKAWSKRHDSWLRAQTWALSALDQTHRAYLRAVDETLARLRDVEADLQACLEFEPLKPRIQRLRCFRGIDALTALTIAAELGDPKRFATAPRAMAFVGLVPSEHSSGSKRAQGGITKTGNSHLRRVLIESAWHYRHHPFVRATLRARQRGAPAGVITRAWTAPQRLHRRYQRLAARGKAKPHIVTSVARELTGFVWAALTQ

SEQ ID NO: 240362 - protein, 386 aa, unidentified
MNAGRDIILVADYHAENIEYRWFSEATGEERTGRYATGRAGILRQVEQAGSELEPGGRVVWIMESTTGWARVKDLLGDRVRFVLANVLQMPLPPKARRRKTDKIDTGRLLREYLNGQLPQSYQPSAWWRQARRVVDHRQDLVERQTAIKNWIGSLLHHETWQERANLWSGPGRSRLDDMKLPDSDRQMLDLKLAQLDQLGEQIRQVEAVMKGIYDRWPQARWVDAIRGIGMVTAVSVLAHIGPIERFRRAEQLISYAGLAPGVQESDRTCRHGKIGGGGTDAHLRYLLIEASTWLCQIPRYRPTYERVLNKRGAKIARIVVARLVLRSIHKMLTQRVPFNPVRTNASPDGAFIASGLPAENCRRSPSRQAGGKEKARRSRRALSAV

SEQ ID NO: 240363 - protein, 435 aa, unidentified
MSSLSKINPNCAGIDIGNESIFIGIEEQEVASFGTFTDDYLVAIAYLKEHKITAVAMEATGVYWITLFDMLEAAGIVVTLVNGKQVKYLPGRKSDVADCQWLQQLHSFGLLRPCFIPDDITRQIRTYTRLRADHLSMASSHIQHMHKALTLMNIKVQNVLSQIHGVSGMRIITAIVLGERNPERLANLCETSILKTKRDRVVASLKGNFKAEHIFALKQALCAYDFYQNQITECDKQIEALLNDHTDDMPAPSNLTPPKPIRHNAPNIDGLHTKLMKMTGGNDPSQITGLTDKTLLELIAETGTDLQKHWITEKQFSSWAALSPNMHQSGKTNKKRKLKKNSRAGQIFREAALSIAASKHSALSVFYKRMKAKKGFLHALKATARKIAVIYYRILTKGLAFVEHGIQLYQQKFKDQQLRLLQKKAKSLGFQLISG

SEQ ID NO: 240364 - protein, 344 aa, unidentified
MNEVITIGVDLAKNVFQVHGVDAEGNVVFRRQLRRSRMLPFFKKLPPCLVGMEACATAHHWAREIEALGHEVKLMPPHYVKPYVKRNKNDAADAEAICEAVTRPTMRFVSVKSTEQQSVLMLHRTNQVLTRQRTMLINAIRGHMAEFGIVAPTGVPQVTKLLRIIADTDDARLPTVARTCLESLARQFLSLHEEIGAAKKQIYAWHRSNEVSCRLETIPGLGPISSSAMAASVTDPDVFKNGRELAAWIGLVPRQNSTGGKQRLGKISKQGDQYLRWLLVVGAMAVIRQAKRRGTSNVPWLDHMIARKPTKVAAVALANKNARIIWALMKHGGTYQKPATVPAT

SEQ ID NO: 240365 - protein, 578 aa, unidentified
MAKRRMSTFERLESGRLNRKQRRELGRQVAVADPGLTIVHANAGGIDVGNESHYVAVPPDRDPNPVREFGCWTAALNQIAEWLQSCRIDTVAMQATGVYWIALYDVLEQHGIQVVLANAQHTKNVPGRKTDVQECQWLMKLHTYGLLRDSFRLAQEMESVRTIWRLRDRHVKEAGRAVQHMQKALTKMNIQLANVISDINGLSGQQIIAAILQGERDPWKLADLKHYRVRASREEVARSLEGNWREDVLFELQQAVDSYHFAHRQMQECDRKLEGYLASLPARMLDIPVQPEDTQAATPKKKTKKAKRPRGNQPHLDLKTELKRICGVDLTSIDGIDVMTALTIVSEIGTDVSRFQDETHFASWLGLTPAKDITGGKTIGRGKRKVKNRVAVALRTAATTLLKSDSYLGARYRSLRRKLPSFASAVKAMGRYLAVLIHRLLTKGEAWVDRGATHRATAHGTGAGEPELQSAGQRFQTDSDHRSQLNELQRSTDLTARNKRLPVVCSTRVRKTAFIPLNPRKSKTRRADSLVGERKFLESGGAAMRLHTKEELCLVPAWGTLKEATSSGSKPSCQWCCS

SEQ ID NO: 240366 - protein, 341 aa, unidentified
MGEQEKHPTGDTSGHTTPAVPAVFVGIDVAKATLDVTATPPEALATTTVTHDDAGIATLVSRLRALRPALALVVLEATGGLEAPLVAALVAAGLPVVQVNPRQIRDFARATGRLAKTDALDAQVLAHFAATVRPPVRALPDASTRELDAVLTRRRQLIEMITAEKNRLGTAMTTGAPRRVLAQLRDHLRWLEARVAQSDADLRDHLRSSPVWRAKDDLLRSVPGVGPVTSATLLATLPELGTLGRKQLAALVGVAPLNRDSGAFRGHRSIWGGRAATRATLYMATLVASRFNPVIRAHYTHLVAAGKPKKVALVACVRKLLTILNAVLRDALPWRAPLQTP

SEQ ID NO: 240367 - protein, 350 aa, unidentified
MQGNGRWIGLDLSKETYEMCYFDQKGKVGRSGGETTKGGRAKLYAKLKAEDIVAMEANSLAFVMEKEMRAIGCTVVILNASQLSVIYASTKKTDKEDALKLARLVRIYEKEDLPTVDVPTDKEYYRRKLIKEYKTLKGDRTQELNRLHALFVQCGITTIKRSNVQTDVNRQKVLPQLFGYEAEQAKRLCERLTMLEAQIEELEQLIKKECKEDKDIQRLQTIPGVGDKTALAFAAYVGDGKRFNNGNEVANYVGLVPRVDCSGTINKYGHITKKGNRVVRALLYQAAWAIVRSKHGGALKAKYCYMSEHGKGKKISITAIARKMAKLLYLVMKNKQMVYQELPFPDLQAG

SEQ ID NO: 240368 - protein, 538 aa, unidentified
MAVLRAWCEANPTTSMAPASRGWVIGGSRSRLGSGLRWNGWRARPRLGECRFNPHVGPSLHKRFKIREPTMKRKSRHAKQQKASLLSEDLQLIEPDAAAIDIGSRSHWVAVNPQRASEPVREFGTFTTDLNRLADWLTECRASSVVMEATGVYWVTLYELLEERGFKVYLVDAHTVRHLPGRKKSDVVDCQWIRRLQSYGLLQGSFRPPQQIRRLRTYLRSRSKVLECAAQQQLRMQKALTLMNIQLHHVISDLDGVTGMGIVRAIVAGERDAKQLARLRDPRIRASRETIEKSLQGNWQEELLFDLKIALESYDHFQTQIAAYDEQIRQELKALPSKVDLQKQPLGAPRPKSCRTRHGTTQQQQVDLRQELYRISGVDLTRIDGVSLQTAQKVLFEIGTDVSAWSDERKFSSWLGLSPNHHISGGKVLKRKSRKVINPLSIALRLAARTLRNSKSALGANFRRLIAKIGMPKAITAMARKLAVLIYRMLKYGSDYVDKGMQHYERKYQETKLQYLRRQAARLGMQLVPNQGVATSVH

SEQ ID NO: 240369 - protein, 418 aa, unidentified
MTPATRARKGRRQVRIWCGIDWSERHHDIALVDDQGVLVAKRRITESAAGFRQLLELLAEHQQRSDAPILVAMETAKGLLAAALRAAGYQLFPINPLAVSRYRDRYAVSRAKSDPGDALVLANILRTDPAAHRPMPDDSELAASIRVLARAQQDAVWDRQQAANKLRSLLREYYPTLLATFDDLTSGDARATLGVAPTPAAAGKLRRATLRAALIRAGRQRNIDYQVDRILAGLRGEQFRRPEPVEQAMGQAALAHLRALNAAAANVVELEHALTEAFVQHPDAAILTSFPGLGTVLGARILGEIGDDRTRFTDAKALKAFAGTAPVTRASGKKTSVTRRVVRNRRLCQAGYLWALPLLTHSPGARAHYDHRRERGDSYNAAARNLANRYFGILFHCLQHRISYDEAKAFPSPTKIAA

SEQ ID NO: 240370 - protein, 392 aa, unidentified
MSSTSDRVVIGMDPHKRSATIEVMTSDEAIRGGGRFATDRDGYAAMLHYGRRWPDRVWAIEGCAGIGKHIANRLLADGEQVVDVPPKLSARTRVFATGQGRKTDATDAHSVALVGTRMTGLRPVVNDEQLAVLRILVDRRRSLGEDHTRMVSQLHQLLLELIPGGAKKDLSARQARALLAKVRPRDAAGKTRRRVAAELIADLERIYARKKAANKELTDLLADTGTSLLDLPGIGPSGAARLLVEVGEITRFPNKAHFASWNGTAPIDASSGDQVRHRLSRGGNRQINRVLHIMARVQIRNPSTGRDYYDRKKADGKASMDAMRCVKRRLSDIVFQQMLNDVMRHSGTGPGGQQGNDSDSSVTDSHPSAGSSDKPLPGPATGQPKTPLRKAG

SEQ ID NO: 240371 - protein, 389 aa, unidentified
MEARTLNHLPPAASHDGAVRCLLAIELSKKSWIVAVNTPLSDKISRHTLQACDWKGLLELIERIRTRVSQAFSRPVEVISCYEAGYDGFWLHRLLEAHGVRNFVIDPASVQVDRRARRVKTDNIDVGRLLRSLMAYLRGEPKVWSVVRVPSVTEEDDRRLHRERDRLINERVQHVNRIKGLCAVHGIYDYEPLRPNRLARLEQLRAAGKRELPPRVKAEIARELQRLELVLNMIKTIEAERDAIASAGKSSTHANAKKIQNLTKLKSIGPEIGTTLVGEVFYRQFNNRQQLGSYVGLTPSHFQSGPLSRDQGISKAGNPKARTVMIELAWLWLRYQPNSPLSIWFRERVGTAKGRIRRIAIVAVARKLLIALWRYLETGVVPTATVLKV

SEQ ID NO: 240372 - protein, 441 aa, unidentified
MEVVYRRCCGIDVHQDFLTACVLVNEPGKPREVRKKEFRTYWSDLQKLKLWLYASKVERVAMESTGVYWKPVWNVLEGHFPLLLANPYHMRNIPGQKTDQKDSEWISDLLAHGLLRPSFVPPRPIQQLRDLTRYRVKLTGELNRVHGRIAKILEDANVKLGSVASDILGVTGRRVIKAIIAGQEHPDWLADKACGTLRTKRNQLRLVLKGRITDHHRYMLRELMDDLDRIEAKIMRLETEIAERMHPYADAIERLMSIPGFKLITAWSLLAEMGPDMSAFPDAAHAASWAGLAPGNNQSGGKRRRSRTKKGNRWLRRALVQSAWAVSHKGNCFLTAQFYRRAARQGEKKAIVATAHQLLVIAFYILRDGAVYHDKGGNYFDQLNPERTKRKLMARLERMGFDVILRNSTHPVPSPSAPPPPARRRGRPCKCVERGIDCKHR

SEQ ID NO: 240373 - protein, 313 aa, unidentified
MSDNLPQTIGIDISKASLDCHVHPAGAERQFANTAKGHKALIAWLGQWPIERIAYEATATYHRALEAALADWPCVKLNPERARRFAQATGTLAKTDRIDAMLLARMAATLQPPVRPARSPQQAQIAELINARDGLVRDRTALKNREKNLTIAFLKRQCRQRLEQIDRHIEALDTEIANLIAADAALARRHQILTSIAGVGTLTANQLIATMPERGSLENKQAASLAGLAPVARQSGQWKGKSFIRGGRAKVRQALYMPALVAARFSPDLKAKYQQLGTAGKPPKITITAVMRKLIVTANALLKADRCWQQSHA

SEQ ID NO: 240374 - protein, 347 aa, unidentified
MRFYTQKHKYYCGVDLHVRTMYLCIVNQAGKVLLHRNMPCDPQKFLRAITPYRKGLAVAAECMFTWYWLADLCDRERIPFVLGHALYMKAVHGGKAKNDKIDSKKIAMLFQGGNLPEAYVYPAKMRSTRDLLRRRTYFVRKRAELSGHIQNTRSQANLTPHGKKLKYNANREGVDEGIDDPAMKKNIELDLWTMEYYDGLIRNLELGLVQTAKIHNPNDFHLLKTVPGIGNILGMTILYEIHEIRRFPRVQDFASYARLVKCATESAGKRTGTSGAKIGNAHLKWAFSEGAALFLQKCEGAKKYFARLESKHGKGMALSVLAHKLGRAVYFMLKRKVAFDIERFIKA

SEQ ID NO: 240375 - protein, 333 aa, unidentified
MLPPNCGTATPYILRNTVGLDISKLTFDATAIVGNAEYSAKFDNDSKGLDQFSDRLKSLGCQNLHICMEATGNYYEEVADYFAQYYSVYVVNPLKISKYAESRFKRTKTDKQDAKLIAQYCRSAQESELVKRQKPTDEQYRLSRMTAAYAQIKSECAAMKNRHHAAKDEEAAKAYAEIIKAMNEQLEVLKEKIKEQTEKPKCKEGVKCLETIPGIGRMTAAVLFHHLTSSKFETSNKFAAFAGLSPQQKESGTSVRGKGKLTKFGNRKLRAVLFMLTMVAYRIRAFPDFIKRLEEKKKPKKVIIAALMRKLAVIAYHVHKKGGDYDPSRYKSA

SEQ ID NO: 240376 - protein, 502 aa, unidentified
MILPPEDACRNKLSRKSRAKAMARGQGKKKQKPQPASNKSQKPEDAPKTSSRGGLPVAASASLDQLEQVNRNAAGIDLGADVHFVAVPPGRDPETHVRCFSTFTADLVALADWLEQCGIETVAMESTGIYWIPLYDLLEQRGFEVLLINPSDFKKFRRKTDVSDCVWLQTLHTFGLLQGSFRPHERIVTLRSYLRHRDNLVKCATDEVRRMQKALEQMNVKLTEVLSDIMGVTGLAIIRAILAGERDPQRLAQLRDERCKNDVATIALALEGNWREEHLFALRQALELYEVYLQKLAQLDERIGAYLETFEDRSDGQELPAIPRNRALEPKLNLRDLMHKLTGVDLTEVDGIGGQAALQIISEIGTDMSKWQTDKHFVSWLCLCPELQLTGGSRKSKRSRTQPSKNRAAAVFRMGAQSLLKADCALGAFGRRIRAKKGGAQAVTAVARKLAIIVYHMLKEGRPYKDQGAAYYEARYRERLVEGLRRRAKQLGLDVVPLATDP

SEQ ID NO: 240377 - protein, 319 aa, unidentified
MTKIILGIDVSKKTLDAALIFDNRTLCKQFRNSSEDFKLLAAWLESLQITRVHACLEATGTYSEAVALFLHEQGHRVSVVNPLRIKGYAQSNMQRNKTDRLDARLIATFCLTQKPDEWQPPSAEVKHLQSLVRRVEVLEEMLQAEENRLTNAAPQIKSSIERIITLIKEEIGELERQIKQHISQNSNLKEQSELLQTIPGIGARTAHLLLSEIEFERYSSARSIAAQAGVTPRKRQSGTSLKQTSLSKLGNARLRKALYFPAIVARQHNEIVKEFAKRLKKNGKTPMQIVCAAMRKLLHIAFGVLKHKRAFDASLAFSA

SEQ ID NO: 240378 - protein, 400 aa, unidentified
MMTPDDINVWVGLDVGKSAHHAHALDHDGNTLYDKPLKQDEKAIRTMLGKLSKHGRVLLVVDQPNTIGSLPLTVARNMGIAVAYLPGTAMRRTAQLLPGDAKTDRRDAHVIAWAALKLPETLRDAGPDDETLAALKLLAGHDEDLAHESTRHVNRLRSLLLQTHPAFERALKGERITRDATLALLERYGGPMGVKRAGIEDVKDWAKSNGLRAGRIIDDMFKAIGEQTVTVPGTLMAETIIPSIAHDIKTIRDRRREVDRQVEKLLEGHPLLTVLTSMPGIGVRTASNILLGIGGDIANFKSSAHLAAYAGISPVTGQSGTSIKGERPSRRGNKRLKNALWQTAFVASTKHPPSVAYYKRKREQGKHHNAAIICLARRRCDVIYSMLKNGTLYQEPALVA

SEQ ID NO: 240379 - protein, 315 aa, unidentified
MKKIEVNIGIDVSKERLEIQQRPTGKQWSMGYTAAEIKKWIKQCKKMNPKRIVIEATGGWEREIVKALTRAKLPVVVINPRRIRDFAKASGRLAKTDKIDAGILAEFGEKMEPPLRAQMSGEEEVLKELVHRRGQLMDIRTQEKNRLGQAHPQLRESLKKHIEWLNQELKELDKRVENQMQSNPAWQAKEQCLRQVKGVGKVVSLGLISHVPELGKLNRREVAALVGVAPFNCDSGKYKGKRRIFGGRRSVRSLLYMGTLAAISFNHVIKPYYRRLRENGKLPKVALVACMRKLLSYLNNLMRQHIASVATLPAL

SEQ ID NO: 240380 - protein, 343 aa, unidentified
MDHFAGLDVSVKETSVCIVDDTGKIVREVKVPSEPKALLKVLTNPAYRFKRIGLEAGPLSQWLYSAVAEAGLPVICVETRHMRAVLQAQINKTDRNDARGIAQMMRVGLYRPVHVKTLRSQKLRMLLTHRKLLQSKAIAIDNDLRGTLRNFGLKVGIAGKVKFEARIKELVENYPDLAVLVEPLLIVRRVLREQIVILHRRLLAIVRDDDVCRRLMTVPGVGPVVALTYRATIDVPARFRKSKAVGAVFGLTCSKYQSGEINRTGAISRCGDDMMRVMLYEAAQSMLVRSTRWSWLKAWAMQIARRRGMKKAIVALARRLAVIMHRIWIDGAEFRWTREVAAA

SEQ ID NO: 240381 - protein, 354 aa, unidentified
MLIVGCDYHPGFQQIAFVDTETGEFQERRLQHRGEAEKFYRDLAARGVKVRVGMEASGHARWFERLLAELQLELWIGDAAEIRAKRVRKQKTDRQDAQHILTLLMENRFPRIWVADWENRDLRQLLWHRHRMVQTRTRMMNQLQAVALNEGLRCKKRLWGEKGRQQLESLRLAPWATRRRRDLLELLDRLNPLIAELTQAIEQEVEKHAEAQRLMTHPGVGALTALAFVLVIGTAERFQCGKQIASYLGLVPAEDSSGERRRLGHISKQGSAILRFFLVEAAQVTVRSVPEWRSKFFHLAMRRGRKIAKVAMARRLAVHLFWMWRKQWDYQQLKHFGPHAGKPGTGVGVQQNIA

SEQ ID NO: 240382 - protein, 341 aa, unidentified
MKKFIRIGVDLAKNYFQIHALAGEGAPAVTRKMTRVKMREFFSQIEPCLVGMEACGTAHYWARELKAMGHEVLLMPPAYTKPYVKRGKNDAVDADAICEAMSRPGMRFVPIKSAEQQATLMLHKTRELLVKQRTMSVNALRGHLSEFGIVAAKGIGRVDELLDLAESDATLPNAARASVKVLAQALEGLDKAIDDLEKEISGAHAQNEMSRLLDKVPGIGKLIASVIAASVPDPSVFKSGRDFAAWLGLTPRQNSSGGKQTLGGITKQGNRYIRKMLVLGATSLLNVVGKRKGALRDWIVGLLAKKPARLVTVALANKLARILWAMMKTGECFRTEMFAKA

SEQ ID NO: 240383 - protein, 383 aa, unidentified
MRRGGILIEANDSEGEAMKKHTMFNQSLSADVSACTTVAVDLAKKVFQVAGEDALGQVKFEDRIKSREAFQVFLHKLPERVTVLVETGPGAQAWARLLQIQGNPVRILPAQLVAKHRCGPKNDHNDAFAILRAGRDSTISAVPVKSPAALAMQALHRARQGYIRRRTAVGNQMRGLLLEHGVALAQGEMAISQLVPRILADVTQPLPDLLHELIAELLGEWSQLGERVNVLTGRLETAAKESEIARRLMTVRGVGPIIATALLAKQTEPERFANARQFAAYFGLVPNQHSSGDKIRLGKMCKHGDAYLRSLAIQGAHAVLRQIRSDSQQPDDQRLQRWISRLGRKEAAVRLANRNLRILWVLLQNDQTYRRRPGNGPEVAMSH

SEQ ID NO: 240384 - protein, 428 aa, unidentified
MSENSTTHPEPEFVAFVGIDWADQKHAWCSQRAGATQREHGEVEHTPEMVEVWVSQLAQRFGPGPIAVAVEQVKGALVYMLSKYECLHLFPVPSTMSASMRKSLYPSGSKDDPRDAELLLDLLLQHRNKLRRLTPDDEVTRRIQNLVEERRNLVDEKTTQLNRLTGYLKVYFPQMLEWFEKLDTKLVCDFLERWPSLEELQKVPPAELRKFFGQHRGRHQELTERRLEGIGKATPAIRDRAVLEAKRAMVQVSAQLLRILLEGIANLDSKIEEAASAHPDFFIFESLPGAGSALAPRLLAAFGSQRDRYGSAEEVQTHSGIAPVMEKSGKKKWVHFRWACPKFLRQSFHEWAGHSISQSTWARAYYQQQRGRGKDHHAAVRALAFKWIRILFRCWQDRVAYDENKYLAALARRGSPLSSVLTVTAATL

SEQ ID NO: 240385 - protein, 346 aa, unidentified
MEHYAGIDVSLERSSVCVVDALGKIVKEAKVSSEPAALVAFFEAFGFAVKRIGLEAGPLSQWLHAGLKGAGFEAVLLETRHVKAALSAMTVKTDRKDARGLAQLIRMGWFRPVHAKSMRSQEVRALLVARKQLLGRLIDVELSIRGILRGFGLKVGPVTRKGFDAPIRELVTGQATLERIAGAMLSARVALKAEYEKLHKTVLAIVRDDAVCRRLMTVPSVGPLVAITYKSAMDDPNRITKSKAAGALFGLTPKKYQSGEKDVTGGITRAGDEMVRTALYEAANVLLSRITRFSKLKRWAMDVAKRRGSKRAKVALARKIAVILHRMWVDGTTYRWAAEEPIAAQA

SEQ ID NO: 240386 - protein, 392 aa, unidentified
MVVSVGIDVSKDKHDCFIVSSEGEVLADAFMIPNNIDGFHCLLQRIQDCATPQDKIKVGLEATGHYSYNLLGFLLDNGLTTYVLNPLRTNLYRKSLSLRKTKTDRVDARTIASMLLSDAGLKPYTNTAYHNEELKSLTRYRFDKVQERAKLKSSVSRLACILFPELEKLVPSVHIASVYALLEEFPGAKQVASAHLTRLKALLETASKGRYKRDMALAIRNAARNSIGSRMPAKSLELQHTIRLIRELDTEITEIEEQIQSIMDELHSPITTIPGLGFRMAAMILAEVGDFSRFDSPDKLLAYAGMSPSTYQSGQLKNCYPHMEKRGSRYLRYALYNATKYVCHWDPTFAAYLSKKRAEGKHYNIALSHAAKKLVRLIFAMEKSKQPYCPAT

SEQ ID NO: 240387 - protein, 408 aa, unidentified
MKDSGKRYIGLDVHKHYLIAIGVDDELNIVLPVRRVELSHLESWMKKTLTQQDEVVLEMTTNTWQLYDELCAYARRVIVVHPPHVALITRSQVMNDKIAASILARLLAKGLLVGVWVPPQEVRELRGLVAQRKKMTGLATQAKNRLHAVLQRHHLVPPEGNPFHASQQSWWLTLPLGALEKVNVQSDLDTLHFAEAQRMHLTSMMEEIASQQEQVTCLLQIPGFGVVTAVTVWAAIGTIERFEDPQHLVGYAGLGARVHDSGMSTRTGRITKAGRRDLRMVLIEAAQVAANSHPHWKAELARLEPRLGRNKAIVAIARKLLITVWYILAQHQTDRFAEPEAIAQKFLKFAYQLGKANRPAGQSAAQFVRQRLETLHLGSDLTSIAWGAKKPIPLPPSTNKVSDVPNTK

SEQ ID NO: 240388 - protein, 401 aa, unidentified
MRIIALDLGTKGIAVSEVRGGTVIQRWMVADLKALEEVLGANTPPARVAFEACREAWHVHDWLLKRQHVPVLVDTTRVKTVVGIGHHGRKNDRIDADKLALALDAGRFPEAHVLTPPRRELRAALGVRATLVATRSEYITTIRGLARSRGVKLPACQSASFAMKVRGLQLEDSVSEIIKPLLSTLPGLDEQIQAQDVQLDRMTKNMPEVRLLATAPGVGMITACAFVAVIDYPDRFPNGHAVSSYLGLAPAEFSTGGGKQQRLGGITKHGNSYARTVLVEAAQSLLRAGAGDDPLARWGRQVEQRRGRSIAAVAIARRLAGILWAMWHTNTPYNCQVVKDTSVEGWEEQHRQRLDAALGRSSRKLKRRLAVGTASANGNRIPQQSSRRGSPRTRQPPAVAP

SEQ ID NO: 240389 - protein, 339 aa, unidentified
MLLTPVGIDIAKSVIQVHHMDAATGRTVSKTVKRASFLQYFANRPPCLIGMEACGGAQHWARELTKLGHQVRLLSPRFVKAFNIGNKSDAADARAIWLAVQQPGKQVAVKTETQQAVLAMHRVREQLVKMRTMQINALRGLMTEYGEVMGRSRATLEREMPGTLQRLAERLPAMLIDTLRERWNEVARMDEQIARIEQRLRVWLKQDRNCSAIAEIPGVGLLTATAAVATMADPKSFRSGREFAAFIGLVPRQSGSGGKVNLFGISKRGDSYLRTLLTHGARCVLANAKDPGPWVEQLKKRRPANVVVIALANKLARIIWAVLAHDRPYEKSYGSVRPA

SEQ ID NO: 240390 - protein, 366 aa, unidentified
MLQKQLIREKERAMTDIAMHDDRIATIGMDLGKRSFHLIGMDARGKVIMRQQLSRGRFERHMANLQPCLVGVEACAGAHHIGRRLSAFGHNVRLIPGQYVKPFRKGQKNDYRDAEAIAEAVQRPTMRFVPIKSAEQLDLQALHRIRSRLVGHRTAVINQLRGFLLECGVIVPQGPAMLRKTLPSVLAQRTDVLSPRMIRLIEELADDWRRLDDRVDAVTSEVQALARQDEGCRRLMSVPGIGALTASAVVATIGNGAAFTKGRDFGAWLGLVPKQLSTGDRTILGRLSKRGNKYVRTLFIIGARAVLAKPGSWAKFGLEGWLAAAAKRLHHNVLAAALANKLARIAWSVLYHGRSFARDFEPQSVS

SEQ ID NO: 240391 - protein, 361 aa, unidentified
MSESMALVGLDVHKSQTVAAVLDPSTGELRMQRLRGEPERVVPVFLEELDRPVAAVYEAGPTGFVLARVADQRGLDIRVVAPGSIPRAPGDRVKTDRRDAKRLVRLLAAGELGFVFVPSEADERFRDLVRCIDDVRRDLMRARHRLSKFLLRRGVRFQGKTWTQQHERWLCTLHFEDPLSQAVFVDYLSAVQGLAQRRKTLGVVLEAAVPGSAHAETVSRLRCFRSIDTLTAAGLCAEVGDFHRFSKPALLSGFLGIVPSEYSSDEKRTQRHITKAGPTNARRLLVEAAHNYRHRPAVGENLKARQSGQDPRVVQIAWRCQQRLHGRWVHLAAKRGKPAGTVAVAVARELAAFCWEAATLD

SEQ ID NO: 240392 - protein, 353 aa, unidentified
MKKMQKYIVKNNRIFIGLEDSKKTWKVCVRCDRMIVHETSMPTDYENLRNYLKNRYPGCVVKVIYEAGFNGFWLHDRLEADGIYCTVTPPNKVTQEKSNKVKTDKIDARRLAKNLENRDYVSCLVPDKERREDRQISRTLDQIQKNIIATKCRIRMFIYYHGLHEGLPEGEWKPSYYKRLKELELGHVLQVSLNVHLKLLDELVSLRKQLLKELKLLCRKERYKESVQLKKSCPGVGWLSAIRFTLEWGDLSRFKTGKHIASYAGLTSREYSTGDTVRRGRITGQSYERVRAWLIQCAWRAINRDPVLLHKYRAVWKNSGSKKKAIVAVARKLAVRMRALELTQIPYCIGVIE

SEQ ID NO: 240393 - protein, 402 aa, unidentified
MNAVGIDVSKGKSMVAIMRPFGEIVSAPFEIKHTASDIHSLVELINSVEGESRIVMEHTGRYYEVLAHQLSKANLFVSAINPKLIKDFDNDSLRKVKSDKADAVKIARYALDKWQNLKQYNVMDELRNQLKTMNRQFGFYIKHKTAMKNNLIGILDQTYPGVNTYFDSPARSDGSQKWVDFASTYWHVDCVRKMSLNAFIDHYQNWCKRKKYNFSQSKAEEIYGKAKELVPVLPKDAITKLIIKQAVDQLNSASTTVESLRTLMNETASKLPEYPVVMAMKGVGTSLGSQLMAEIGDVSRFTHKSAITAFAGVDPGVNESGSYEQKSVPTSKRGSSDLRKTLFQVMDVLIKTHPQDDPVYQFLDKKRAQGKPYYVYMTAGANKFLRIYYGRVKEYLSSLPES

SEQ ID NO: 240394 - protein, 353 aa, unidentified
MTPKLNSAIAVIGIDIGKNSFHIVGQDRRGALVLRQKWSRGQVEARLANLPPCLIGMEACTGAHHLSRKLQALGHDARLMPAKYVRPYCKGDKNDYRDAEAIAEAVQRPTMRFVATKTAEQLDLQALHRVRERLVSQRTGIINQIRAFLLERGIAVRQGLRFLRAELPGILAKRTDVLSPRMLRIIEDLSGDWRRLDERIENLSGEIAALACKDKGCERLMTIPGIGPLISSAIVAAIGTGDPFSKGRDFGAWLGLVPKQMSTGDRTILGNISRRGNRYLRTLFVQAAWVVLVKVGPKQWERYGLKSWIEAAKQRLHHNVLAIALANKLARIAWAVLHNGRAFEYVKTNATAS

SEQ ID NO: 240395 - protein, 397 aa, unidentified
MTSDYAVFCGLDVGKDAHHVVALDPSGKRLDDRGLPQDEARLRELFGRLQAHGPVLVIVDQPATIGALPIAVARDVGCEVAYLPGLAMRRIADLHPGSAKTDARDAYVIAEAARTMPHTLRRVDVGEETLAELGVLIGFDDDQAQEATRISNRIRGLLTPIHPALERVLGPKVATGVVLELLGRFGGPAGLRTAGKRRLLTVARKAAPRAGEQLITDLLAALDEQTVVVPGSAAAEKVLPRLAQSLAQVLTQRRKIADEVEEILDAHPLAEVLTSMPGIGVRTAARILLEVGDGSAFPTAGHLAAYAGLAPVTRRSGSSIRGEHPPQGGNKQLKRALFLSAFAALADSTSRAYYDRKRAAGKRHNAALICLARRRVDVLFAMLRKGSLYETRPARAA

SEQ ID NO: 240396 - protein, 414 aa, unidentified
MKLFVGIDVSSQELEACFMNSDGDKVEALKVKNDLHGASHLRDRIVAVADKLSSSEIHIGLEATSVYSWHPAMYMHEDAALKERKAKVFTINPKLVSKFREAYPDMDKTDRLDAWIIADRLRFGRLTTTIVMQEQYVALQRLTRMRFHMVHSLTREKQYFLQNLFYKCNAFTSEVESSVFGHAILEMLSDQYSLDDIATMDVAELADYLRDKGRNRFPDAENVARCIQKAARASYRLSKVVEDSIDLVLGTSIQTIRSIQSQLKDLDKAIARILEGIPGAQCLQSIPGIGKVYAAGILAELGDIERFSDQAAVAKYAGLVWRKHQSGPFEAEDTKRIRSGNRFLRYYLVEAANSVKNRDEEFGDYYRKKYKEVPKHQHKRALVLTARKLVRLVDVLLRNGQLYTPRRKVTTAKD

SEQ ID NO: 240397 - protein, 337 aa, unidentified
MGLYCGIDLHSNNHMLTVIDEADRRVYERRLPNELTITKAALEPYRAELVAVAVESTFNWYWLVDGLMEAGYAVRLVNTAAVQQYEGLKHTDDKHDAFWLAHLMRLGILPTGYIYPKSERGLRDLARQRMRLVQHRSSLITSVQSQVWRSLAVRLRSETIKGRGKQPWPEISDPDLALSVKAGRATIDTLTVQIERLEKLILKRVDRSPRFRMLKTVSGIGPILAMTIALEVGDIGRFAGVGEFASYCRCVDSQRLSNGKKKGEANRKCGNRYLAWAFMEAAHFAIRNLPAAKRFYERKRRQRHALLAVKALAHKLARACFYVLRDQVPFAPERLFV

SEQ ID NO: 240398 - protein, 387 aa, unidentified
MPQLNDLSRSLVALDQDSTIIAVVELSQSSWLVAGVLPGIERQPQKKLEPSAERLLGLLHRWRDEAVRAGKKITRIALAFEAGRDGFWLARWLNARGVEAHVIHPSSVAVSREHRRAKTDRLDTELLKRGFLGWLRGERGHCSMARVPTIAEEDAKRPNRERECLVGERTRIVNRMKATLARLGVRNFKPTLRKAAERLATVHTPEGTPLPRNVLAELQRDMARLGFVVSQIREIEQARQKRLEQEPETGPHAMVRQVARVIGIGLETADMLVHEVLSRPMRDRKAVARYAGLTGSPDESGARRREQGLAKAGNARVRRGMIQLAWRFLRFQKQSALAQWYRARTADSRLGTRKTMIVALARKLLIALWRFVTTGETLEGVILRPAG

SEQ ID NO: 240399 - protein, 429 aa, unidentified
MNVYETVNCVGIDVSKGKSTIAIMRPLGEIVQSPHEVKHTLSDLKALETTLRQLEGETRIVMEYTGKYYQPIARFLNNAGFFVCAVHAKLIHDFANNSIRQIKTDKADAVKIANYGLTNWNLLRRYSNEDETRLLLKTYNRQYNMFMKQYVASRNNFISLLDQTFPGINDLFSGHRRPDGHEKWVDVAARFWHAECVSGQSLNAFTKVYKDWCDRNGYRGRDDKAEAIYLLAKESIPSLPKNDYTKAVIQQAARELRNTCLALVELQQKMNFIASTLPEYPVVLDMGGVGTTLGPQIMAEIGDVRRFPRREKLVAFAGVDVPPYQSGQFEAKDRHITKRGSSDLRKNLYQVIGCLMQHSMEKDPVYRFVAHKKAEGKHFYSYMVAGCNKFLRIYYARVKAYLNLLEQQEPDSLGDGSGGSEVVLQPLDC

SEQ ID NO: 240400 - protein, 430 aa, unidentified
MGLIVPTAMHSERDNQPMPYEWFVGIDWGSQRHQVCVLDRDRRRVGERAIDHDGASLAQLAAWLWTVSAGQPQRVAVAIEVPRGAIVEGLLERGFHVFALHPKQLDRFRDRHSVAGAKDDRRDAFVLADAVRTDQPSFRRLQLDTPQLLRLRELSRAEETLLEDFRRSANRLQDQLHRFYPQMLQLCSAADASWLWDLIDLAPTPAHAALLSEEQVQRLLKAHRIRRVTAHEVLACLQAPALPVAPGAAEAAQAHCGFLLPCLRVLAEHLQACSQQVSALLHTLAAEPGDDEGPSDVAIVLSLPGVGRKITAWLFAEAAQPLAERDYQMLRTHSGVAPVTKQSGKRRVVVIRRGCNPRLRHALYHMARVAMQCDAHFNHVYAALRAKGQRHGQALRNIGGRLLRILMAMLRHRTCYDASRIRREPVVQMG

SEQ ID NO: 240401 - protein, 308 aa, unidentified
MEHHVGIDVSLKLSSLCVLDAAGKVIREAKVASESEALVAFLRGLGVTIVRVGLEAGPLSQWLYDGLHEAGFEAVLLETRHVKAALSAMAIKTDRRDARGIAQLLRMGWYRPVHRKSVPSQEVRALLAARKQMQIKAMDLEQTLRGLLRGFGLKVGDVSRGKLAVRIRELVTGHAMLERIAEPMLTARESLWSEFAKLHREVLAIVKQDQVCRRLMTVPGVGAVVSLTYRAGVDDPGRFAKSKSVGAFFGLTPKRYQSGETDVTGAITRVGDAGVRTALHDAANALLTRATKFSTLKRWAEAVKVPSA

SEQ ID NO: 240402 - protein, 329 aa, unidentified
MVELRIDVSKAKLDCTLLLDVDTLRGRSKSVPNTPEGVKVLLQWVERHSACTPEQVRAALEPTGVYHEAAALALYEAGVHVLVVNPAQLRDFAKGHAVRTKTDAKDSFVLALCAAQVKLKPWQPAPTEIRELRALTSRLDAVEAELRGELNRQEKAHIAADPPLVQRSIADAIAFWEAERKRLQQAIDEHIDRHPGLKSEQARLLSIPAVGEKTANRVLCLLHGGQFRRASQLAAYLGLVPVEHLSGTSIRGRPRLSKAGNARIRAALYMAAVTAIRHNPDVRALYQRLLGRGKAKMSALCAAMRKLVHICFGVFKNAQPYRPQIEESA

SEQ ID NO: 240403 - protein, 364 aa, unidentified
MYDSTTTVTVGLDVHARSIRLAAVRADELLEERTLPHDEEAVERVLRRWPGVRCCYEAGPTGFGLYRHLIGRGIDCSVVAPGLVPQRPGDRVKTDSRDARKLARLLAGGLLEPIHVPSRELEAARDLVRAREDARLDRMRDRHRLSKFCLRHGRALPTSTWTVTRRNWLATQRFEFAAQQITFDSYLHTVDLVDARIEQLERAIRETAEQEPWCALVARLRCLRGVDTLTALALVTEIGDFDRFTTAEQFMAFVGLVPTEHSSGEKRRQGSITKVGNSHVRRLLVESAWHARRRPKVGYELARRQRGQDAAVIERAWRCQQRLYQRWQRMAGRGKPQQKIVVACARELAGFVWAIATQQPLRNT

SEQ ID NO: 240404 - protein, 356 aa, unidentified
MSHDVKYIGMDVHKEAIVIAVLNEDGKQVMESVIETKASSILQFLHGLRGELHVTWEEGTWAAWLYDLLQPQVQHIVVCNPRRNALLKEGSKNDKVDAHKLANLLRTGMLRPVYHGENGLRTLRELGRSYQTISKDLTRVMNRLKALYRGWGIPCAGTQVYAARTREEWLGKLPQAGVRRRAELLYQQLDGLQALRREVRPEFLAESRKHKAAKLLRQIPCIGPIRAARLIALMQTPHRFRSKRQLWTYSGLGIETHDSAQYRFVRGQLQLSKKPQQLRGLNRNHNHEMKEIFKSAATRASCGRGPFHDFYAVLLAKGMKPEMARLTLARKIAAITLTLWKKEERFDAEQLKTQAA

SEQ ID NO: 240405 - protein, 323 aa, unidentified
MIISCPRPARRLRPGEFVPWVEALLGQGHSVHVVYEACGFGFSLYRQLIAAGAHCYVIAPCKLDEECSRVKTDPRDATTLCQRLSRYLEGNTRELAVIRVPSQEQEQARHVSRQRTQLVCHRQKLEAQGRSLLISYALPAPAHWWKEQTWTRLGQHLPAWITTRLQMARPALLSLQEQINALTNELEGSAPSTLPRGVGKLTSVMLTREICDWHRFNNRRAISSYTGLCPGERSSGSKRVPGSVTKRGNARVRAALVECAWRMVRFQPQYPPVQKRLGILAKGSRALGAVRKKAIVAVARRLAVDLWRLHTGRCTAEQLGLKL

SEQ ID NO: 240406 - protein, 338 aa, unidentified
MQVNTIGLDLSKQVFQVHGVDGAGVVVVRRRLRRSQVLGFFADLAPCVVGLEACGAAHHWGRELEKLGHAVRLMAPSYVKPYVKRGKKNDATDAEAICEAVGRPGMRFVKVKSADQQGALMLHRARALLVRQRTMLVNALRGHLAEFGIVAARGIWNVKGLMALVADDGEGRIPMVARPALRALADQIAALGERLREIDRAILAWHKDNEASRRLATIPGVGPIAASAIAATVGDGRQFRSGRHFAAWLGLVPRQHSSGGKEKLGRISKMGDRYLRTLLVIGATNRLRYARTKTSADATWINRLLARRPPRLVTVALANKMARVAWAIMAKGDVYRAA

SEQ ID NO: 240407 - protein, 366 aa, unidentified
MKKISTVATNRNEIFKEPKLTIGLDLGDRSSHYCILDETGNVILEHSLPTTPKGIHQVFSSIPRSRIALETGTHSPWVSRQLTQLGHDVIMAHAHNVRLMGESSRKDDQLDARTLARLARIDPGLLGPVRHRSAKAQIHLTVIRARAALVSTRTALVNAARGLTKSYGQRLRKCGTGQMNRESAKGLSQELRDALDPLLGEIESLNERLAEYDGRIEHIAQEVYPEVALLKQVKGVGTLIALTYVLTLDDPHRFRRSRDAGCFLGLRPGRRNSGHSEPQLHISKEGDRYLRTLLVQGAHYILGPFGQDSDLRRWGLQLAERGGKNAKKRAVVAVARKLAVLLHKLWVSGEVYEPLRNNHKVVSVAA

SEQ ID NO: 240408 - protein, 342 aa, unidentified
MKSIAQTMIGVDIAKQVFQVHEVNAETGEVIRRQIKRAKFLDYFANRQSCLIGMEACGGAQHWARRLMALGHAVKLLPAQQVRPFAVGNKNDVADAQAIWVAMLQPGIRAVAVKSEAQQAVLALHRMRQQLVKFRTAQMNGLRGLLAEYGEVMPKGRAALTKMIPLVLGRLTDRLPTVLIETLREQYARIGQMEGQIADIERRLQLWHREDEDCQRIAAIPGVGLLTATAAVASMGDPRAFRSGREFAAWLGLVPRQTGTGGKVRLLGISKRGDTYLRTLLIHGARSVLVHSRTPSPWTTAILQRRSFNVAAVALANKMARTVWALIAHRRIYQCGYVSQPA

SEQ ID NO: 240409 - protein, 416 aa, unidentified
MKKSSNSQMKREQSSKPTMARGPVQRDAKEMLAELVAKLTEKLGPKPGRASTEEEGKGNVLRPNLDRLTVGVDLGDKCSSYCILGMDGETLAEGQLRTRQQDFAEFFQALTGSRVVMEVGTHSAWIREIVAGCGHEVLVANPRQMEGPKRRKRKNDRIDAQKLARLGRVDPQSLFPIEHRSTEVRQDLVVLRARDALVAARTQFINTTRGLVKSMGARLPKCSSPSFQHKVEAALPPEVRESLLPLVRLVETLSDCIKVYDERIEKLASEKYEHTELLRQVKGVGPLTSLAYVLTLENPERFAKSREVGPYLGLVPKQEDSGDSRPQLRISKAGDEMLRRLLVGSAHYILGPFGPDTDLRRYGLRLCERGGKNAKKRAAVAVARKLAVLLHRLWISGEVYEPLRHAPPVPTEREAA

SEQ ID NO: 240410 - protein, 429 aa, unidentified
MNSTRNKKIEQVKETTMIVGIDIGSEKHYFRAFNWRGIELTRKPVAFSNSMEGFNSFYNAIVELIQKSELEEALVGIEPTGHYWFDLGQFMGEKNIKFVMVNPHHVHKSKELDDNSPSKNDRKDPRVIAGLVRDGRYFYSYMPTGVYAELRNASNRRFVLVEEQTRAKNRLQKWIAVYFPEYKGIYTRIDAKGGLLVLKQAQTPEEIVRLGVEGIIKIWKDAKLRGNGHKKAMLILNAAMKSIGLKAGLTEARMEIQDLIEDYELQTKRLERVNDLIKELCRKIRYADKLLEIKGIGITTIAGFIAEVGDITRFDSAKELQKLAGLELVADSSGKHNGKTKISKRGRKRLRYLLFEAAISVVGKNEEFKEIHRYYTTREKNPLKKMQSLIAVACKLIRVFHVILTKGISYDASKMLKDIQHPGEPLKAA

SEQ ID NO: 240411 - protein, 411 aa, unidentified
MVKENFIYVGIDLHKETHTAVMIDCYNQKLGEITFPNRPADFPKLVTKVKKCNTDAKEVVYGLENAYGYGRPLAVWLIDKGYFVKDVNTAISHRQAKHRGAMYRKSDSDDAEAIALATLNMLDKLPDACPNDAYWSLGQLVHRRDNIMKQRTRLVNQLHEQLCIAYPSYKSFFNDISRPTALYFWEHYPSRKYLRGKSVEDLREELVPVSHNRCSTKNCEKILDAVASDKVKNNAYQDARDMVTLSIVSDLQHYDSQLAEVDKMLEQMYKMLGCTLTTIPGVNVITAVKILAEIGDIKRFSNANKLAQFAGIAPLHLSSSGKGKDVATKQGNRRLQATIYFLAIQMVQLSSKGTPRNPVVRAYYEKRKAEGKTSQQALICISRRLISIIYGMLKYGTEYRMPVVENAGEKL

SEQ ID NO: 240412 - protein, 355 aa, unidentified
MDDAKYIGRDVHQAMISVAVLDSAGKLVMEAILETKTETILQFIHGLRGSLHATFEEGTCAAWLHDLLKPHVAHVLVCDPRKNALIKVGNKSDRIDARKLADLLYLDKLHPVFHGEVGNRALKELARSYLTLTRDTTRVMNRLKALYRSWAIPCAGQRVYAPRYRSEWLSKLNEAGVRRRAEIYYQQLDALRSLREQVRRDLLAEGRKHSAMNLLRRIPSIGPIRAVLLIALMQTPHRFRTKRQLWAYCGLALKTSSSGEYQIVEGRLKRSRKFLAIRGLNTNHNHDLKNIFKGAATRAAAVPGPFQDFHAGLVARGMKPTMARLTLARKIAAITLIVWKKGVDFDAEHLKQQAA

SEQ ID NO: 240413 - protein, 347 aa, unidentified
MVIVDSARPVVGGVDTHRDSNVAAVVDMNGGLLGVESFPTTAQGYQRLSLWMSSFGVIERVGIEGTGAYGAGLARHFTRASVTVIEVDRPDRRKRRQHGKSDQLDAVEAARGALSGRCEAVAKSGDGHAEALRALLVAKRSARSTRIRTIVQLRHLMFTAPDDLRARLGGLNASQLVSEAAKLRPRAGGDVAVHGLKTAAVILARRVLALDIELAVIDQQIAPLVKAAAPELLNIYGIGADTAAVLLVTAGDNPQRITSEGAWAMLCGIAPIPATTGLITNQHRLNYGGDRHANNAIWRIVITRLGQHEPRTVAYMNRRLAEGKSKRSIIRCLKRYIARETFRALPR

SEQ ID NO: 240414 - protein, 318 aa, unidentified
MNTDQNQNEITVGVDTGKSQLEIYIRPLDIFFTVNNDDKGVQLAIKEIKTHHPTRIVIEATGRLEYLFISACAKNSLPFIVANPIHVRRFAGAIGQLAKTDKLDAQLIAHYGESIKPPLSTLKPHTMQDMSDLIARRKQLITLQTMEKNRLQIMPKELASSITPVLTVIGNQIDKVDQKLQKIIACSETFKAKNKILQSMPGVGNVVALSLLSNMPELGCISNREAAALIGVAPINRESGRYQGHRKIRGGRHQIRTAMFMAMLSAIQCNPVFKATYNRLVRAGKPKKIAIIACIRKMIVILNSMVRDGVPWNPEMAR

SEQ ID NO: 240415 - protein, 343 aa, unidentified
MEIIRIGLDLAKSVFEVCGVDMRDHVVLRKTLRREAVPQFFAELPPCLIGMEACSSSHYWAKVLTDLGHQVRLIAPQFVTRYVKSNKNDRNDAEAICEAISRPSMRFVPPKSSEQLEIQAVHRIRQRLVSSRTRLVNQIRGLLAEHGVVIGRDISRLRRALSQIVEGSDGNLGDLIQELASDIHQELSALDERISSYDRRIRNLFRTNEMCQRIGKIEGIGPITATALVAAVGDQSCFENGRQFAAWLGLVPKQRSSGGKSRLFGISKRGDRYLRTLLIHGARAVLGKAGGKQDARSVWINRMRERRHPNVVAVALANKNARIVWSILSKNEDYRGPETPQAA

SEQ ID NO: 240416 - protein, 308 aa, unidentified
MEHYAGLDVSLKEISICVVDHDGKTIARGACPADPEGEAGWFRNRSLTPHRIVHESGMLSIWLQRGMTRLGLPTTCIDARKAHKSLSARLNKSDAADAEGLAQLARTNWFTPVHIRSEEADRLRSLIGARERLIRLRKDLEGHIRGVLKTFGIRMIGIGQGRQRQAFRDQLAAAGETDPILRTIADGFIVAHSNLCQAADNLDKAVKKKAKADPVARRLMTIPGVGPVNALSFIALVDNPDRFSRVSDVGAFLGLTPKRHQSGEMDWSGRVSKCGDGTMRGLLFEAASCLIRQVKRFSPLKSWAVRLA

SEQ ID NO: 240417 - protein, 336 aa, unidentified
MTKYIGLDIHSSTCSFCVINDAGEILDQSEIVSNGRLLIDYVDSIEGHKKLALEECELSAWGYELFASRVDEFIVCDPVKNGVYKKAKTDKLDAKNIAALLRGGFLKPVYHDGSERQQFRALMSGYQDIVDNGVRMKNRYASLFRKAGMRQRGSAFYGDESLLNDLPRPDQRFVAKSFYGMIAAIEKQREIYITEIKKLSRGFREIKLLKTIPGIGDIQAAKIVSQVVTPERFKNKHKFFSYCGLVRLTQSSGGRDYPSARTHGNRILKCVYKMAAHSAIAGSSALSEYYDRLRSQGVNAKAAKNAVSRKIAAISLGVWKNGSKYNDALILESVKN

SEQ ID NO: 240418 - protein, 322 aa, unidentified
MRYIGIDVSKATFVVAYSSDKGGEIRTFNNTTAGIRQFIGTLPKDGSIHCVMEATGNYSALLLYMLNVAGITVSMENPLKVKNFAKALLSTVKTDKSDARLITLYGEKMNPRPFKVQGEAILRLRQKRTVIRQLTKQITAMSNLRGSLACLPVPDKGATHTVDETIKFLEKKRDRLQSELTDLVEVEFSRQLALLTTIKGIGITLATALIITTGGFTYFQNAKQVSRYLGICPTYEQSGTSVNIKGHINRNGDAYTRGLLYIAAWPASRFNAQCKETYTRLRQNGKSGKLAMIAVANKLVRQAFAVVAHDKEYVDGFVSNRP

SEQ ID NO: 240419 - protein, 381 aa, unidentified
MKQDTRFVGLDVHAETIAVAVADAAGGEVRELGTIPNREESIRKLIKKLGPKERLHCCYEAGPTGYVLYWQLTQMGVSCVVIAPTLVPVRPGDRVKTDRRDARKLARLYRSGELTPVWVPDQAHEALRDVVRAREAAKRDETRARHRLSKFLLRHGRRPGKKLTAWTMKYLEWVRSVQFEHEALEATLSDYLTEVDHMAERVLRLERAIDKAAEKMPATMKAVVDGLQALRGVKKISAITVVAEVGPMSRFEKPRQLMGYSGAVSRESSSGEHVWRGSITKTGNAHLRRIVGEAVWSYRHRPCCGPALRKRQASLSEPVKAIAWKAQHRLHDRYYRLVGRGKHKNKAATAVARELLGFMWAIGVQVEKEQAQKASGKPLAA

SEQ ID NO: 240420 - protein, 343 aa, unidentified
MQVIIGVDPHKASHTAVAIDTNESQLDLKKVRASRTQVDQLLAWAAPYRARTWAIEGAEGMGYLLAQQLVAAGEHVLNVPAALAARTRVLGSRRSSKTDPNDALSVAVTALRTDGLHQVRPAGHSEVLRVLAKRNTDVGNQRSRVVCRLHAVVLELAAGGIAKEINASDVDEFLAEFTPATPAQQARYDLAVDLLDDIRRLDTQLKASHQRIRTAVAASGTTLTDVYGIGPIIAAMLIGYTGDIGRFVDRDRYAAYNGTAPVEFSSGGRTVHRASQRGNRQLNHAIHMAAITQLRQPSTEGRVYFDRRVTEGKTKKEAIRSLKRQISNTVYRHLVADAANVRG

SEQ ID NO: 240421 - protein, 436 aa, unidentified
MRGCRCSMFMGFSKPIEHFNLQRKKVITMNTLYVGIDVSSKSNVVYLMLPNGDKHSNFSVANSHDGSIQLVKRIHSALTSHSLDKVLIGLEATSVYGDNLVYFLREDTTLASFNRKIHVLNPRQVKKFHDTYNDLPKNDYVDSFVIADCLRFGRINKEVYMEDYRYKALQNLTRARFFTVQNLVKEKQRFINVLFKKYSTMTQEKVFSDTFSTTALAVYDEFESAEALANMDLQELTDFIIKKGKNRFPNPDSVAKAIQKAARSSYRLPKTVNNSVNQVLSISITSMKALESQIKEFDKAIKAQMELLPNVLISIPGIGPVYSAGIMAEIGDINRFDNQAALAKYAGLAWKQHQSGDFEAKFTRLISSGNRFLKYYLCEAAFSLVRCDKEYSNFYHLKYKEVNRYQHKRALALTARKFVRLVFRLLKDNRLYSPAK

SEQ ID NO: 240422 - protein, 400 aa, unidentified
MNKTSFSGFLGIDISKDKFDAYCIDINGEKQFYLSCSMDRAGFEKLVGHMDNLSIPKEGLLIGMESTACYHMNLFSFLLAGGYTAVVINPLLIANFVKMQLRKTKTDKKDAFVIAQFLLMYVDTLAQTSISPHVSDLRDLSRQRESLLNQMMALKCDMKRLLTMTFPELEKLTGVFTKSVLQLLSRFPSAHAIVQADPAEITQLLIDHSMGRNTATTTQDIIQAARSSVGTTSPSRELILKQKADVLIHLEGHLKELTAMMIELCRSDMGDDIDIMTSLRGIGEKTATNFLVEMGGDIRKFKDHKKLIAMAGLDPAIYQSGKHDGQGRITKRGNRHLRRVIWLMTVRVIQFNDCFRQHYQKRRQDGLPFKKAVLATAHKLLRVIFAMLTQRKTFCYATNS

SEQ ID NO: 240423 - protein, 322 aa, unidentified
MAMLSFGGIDVSKDRLDITVLPDEQCSSVSNDAAGWAELIEQLRGSSITAIGVEASGGYERGVVRALLAAGMSVRQINPFKLRQFAKASGILAKNDRLDARMIASFVAIMPTRPAQRQTPMIEQLAAMLTVRRQLSDHKVATENASRLLEGAMLQRLSRRRVAGLTADIALLDERLVEIVTADPALAHRFRLLTSMPGVGAVLACTLIALLPELGQMSRKQVAALVGLAPYDFDSGKLKGRRCIWGGRARVRHVLYMAALSASNWNPALKAFHDRLAATGKKPKVVIVAVMRKMITTLNAMLRDGTAWVDRYSGRRSASTAR

SEQ ID NO: 240424 - protein, 409 aa, unidentified
MKLFVGIDVSSEKLDVCFLDSSDTTLKEVTLPNNLNGASSIKESVLTFHHSFNYEKIVIGMESTSIYSFHPATFLSEDTDLKSLGCVEVVVQNPKSIHRYKGLFEEDKTDRIDAFRIADFLRIERFNKTVLKEERYIALQRLTRSRYQLVHQLTECKQHFLENLYYKCNTLSKELDTSVFGATMLDLLSDSLSLDEIAQMELEDLALLLQEKGRGRFSDPQKIAKMIKKAIRDSYRLAQVVQESVDMVLATYARLIQTLKKQIKDLEKSIVALFEIVSEVQCLKSIPGIGIVYAAGIVAEIGQIERFENEAQLAKYCGLYWKKNQSGNFESERTPMTRTGNQYLRYYMVEAANSIRRHEESYRLYYQKKYDEVPKFKHKRALVLTARKFVRLVDTLLRNRQLYTPERSV

SEQ ID NO: 240425 - protein, 379 aa, unidentified
MASAATPVSPAEIASATLFVALELSRSTWLVALHSPIANKVSQHRLDGGDADGLLALITRKRSQAEEKLGRPVRVVCCFEAGYDGFWLHRWLYARGIENRVLDAASLLVNRRARRAKTDRLDAAGLLRTLMALERGEAQVCRVVRVPTPEQEDARRRSRERARLVVERGQHTSRIKGLLMTQGIRDFEPTRRDWPARFEALRTPDGLPLAPCLRAELLRECRRLWLVMEMIAEVEAELRAVADAEDGPAARLAQLRGIGLTFATVLGNEVFFRDFRNRREVGGYLGLAPSPWQSGGVRRDQGIAKAGNPRARRTAIELAWLWLRHQPGSTLARWFHERVGSSKGRRRRIMLVAMARKLIVALWRYVTCGTVPEGAVLKI

SEQ ID NO: 240426 - protein, 367 aa, unidentified
MEKSSKVFVGMDVHKESIDITLAEQGGEVRRLGQIGGDRGSLLKMVRKQQSKGGERVFVYEAGPCGFWIYREITALGERCMVVSPALVPRRAGDHVKTDRRDSERLASLARAGELEAIHVPDIRDEAIRDLVRGRDDAVIAQRRVRQQLKALLLRNDIRYVGRTSWTGAHRRWLSELKLPEPAQRITFEEYVDAIAVATGRIERLTRAIETEVSSWRFAPVVGSLQAMRGIQFVHAVTLIAELGDLTRFHSARQLMGYLGLVPRESSSGEQRRQGSITKAGNSYARRALIEAAWAYRHPARVTRIIATRQTGLPKAACDIAWRAQLRLSAKYRRLNARHVNHNKIVVALARELSGFVWAIGQSVKPQ

SEQ ID NO: 240427 - protein, 473 aa, unidentified
MARKKGKDPAGIGGPGLTGEPAGVSDEPAEVIARAAAIDVAKGSGMVCTRVPHESGPRRRVQRVWQVSARYSEIAALMAELAKLGIQRLVLESTSDYWRIWYYLAEAAGLEVWLVNARDAKHLPGRPKTDKLDCVWLCKLNERGMLRRSFVPPEAVRDLRALTRLRSRLAQDQARHQSRIEKILEDALLKISSVISDLMGASGRRFLAALVAGERAPDKLAALGDRRLKASPAQLEEALAGRFRDIHALEIGMLLELIDDITAKMARLDAEITARLARIPGIAPACAGCGEIGGGHAPSCPQAGAPVLSVIERLDELTGIGIDAAQVIVAELGTDKTTFPTPGHAAAWAKLASRTIQSGSTSKDGRTGKGNPYLRAVLGRAAMTAAKTDTYLGERYRRIARRRGKQKAIVAVSRTICEIAWMIITDPSVRFSELGPDYYARLDAGRQTRNKIRELERLNPGMKVTLTPAATAA

SEQ ID NO: 240428 - protein, 430 aa, unidentified
MKKIRENAAGIDIGAAKVFVALPSGEVKTFDTFTEDFYAIALYLKENECKTVAMEATGVYWVILYDILQQTGFDVWLVDGRSTKQVPGRKTDVKDCQWVQQLHSYGLLNKCFVPEEMIQQLRSFQRLREDHIRTAAMHVNHMQKALTLMNIRLQEVISQVHGASGMNIIRAILEGERDPEKLVELCHAKILRNKRSEIVKALNGHYQNNRLFALKQAVECYDFYQAKIVECDQQIEQILDDLSNSKPTIKLENTKRKPIRHHKPEIDSLGDKMVQIFEGKDATKLPGISDYNWLQLLSELGLDMSKWKTEKHFTSWLGLAPKQNHSGKMKRNYRSKGNPKAGTIFKQAAAGLLNSKHIALGDFGRKIRARKGGALAIKAMARKLAELYYKLLTNVLDYVERGIEIYQQKLLFNKQQNVIKMAKSLRLTIT

SEQ ID NO: 240429 - protein, 347 aa, unidentified
MKFYTKQHKYYCGIDLHTKKMYVCILDAEGQIRLHQNIKTDPQHFIRILTPFREDIVVAAECMFTWYWIADLCIEQNIPFILGHALYMKAIHGGKAKNDKIDSHKIAALLRGGMLPQAYVYPARMRATRDLLRRRNHFMRKRAELFAHIQNTRSQYNLPDPLGCIAKPQNREGIAERFNDPSVQKSMTANLEMIQSYDRLLTQLEHDIIASAKEHDLTSYALLQTIPGVGRILALVILYEIESIERFPQVQNFVSYCRLIKSIKESNGKKYGSSGKKIGNAHLKWAFSEASVLFLKGNEPGKKFLERLTRKHGKAKALSILAHKLGRAVYFMLKNKEAFNQKKFLGL

SEQ ID NO: 240430 - protein, 353 aa, unidentified
MKKIVKQVVGIDVAQDELVVCIGCMYDDWIPELYGHKSFPNTVKGFNALVEWSVKLSGSDIAIRYVMEATGVYHESLAYFLSKRGDDLSIILPNKISNYSRTLDVKTVTDKTASEAITLFGLERKLDNWEPPKGIYKKLRQLTRERGQVVEARTVAKNQLHAEQSEAYPNKTSLTRIKKHIAFLDKQEKEIKAELVQLIKEDAETKKVMIILCSLSGIGLLTAATILGETNGFDLIRNKRQLASYAGFDVKEKQSGTSVRGKSRISKRGNKYLRKAMHLPALAAIRHDERFKAIFARIVSKHGIKMKAVVAVQRKLLEMTYTLYKKQEKYDNAYLTKNEIVLEGSVQEWTIKN

SEQ ID NO: 240431 - protein, 341 aa, unidentified
METTRHIGIDLHRNKFTCCMQLANGRNYLSEWKLENLPVFVKKLRATDEGAVEVTGNTRLFYDAVAPHVARVVAVDPNQFRVISHSVKKTDPNDARNLALYLSKGLLPEVRMKEKTQAQIASLTQTRDTLVKLRTALKNKVNNILSAHGVNLEKEALSSEKKLTEVLAMQFDLMIRIELKVIVEQIRSLNHSIAELEKTITEEGQKLKGHKNLTSIKGIGPLTGSILLSVIGDIHDFADEGKLAAYFGIVPRVSNSNETERSGRITKRGSKLGRTALVQCALIAQRYSPYLKKFYEKTKARRGTGKAIIALARKLLGIVYRTLKNNWVFQDFPNFVLAEES

SEQ ID NO: 240432 - protein, 355 aa, unidentified
MTFRPHALHLKAELFVKSSRVHVRDDGFTRCNFHLKFFIMVSRGIDISKSSFVAAYPSTNGNPTKTFPNTTARMRELIGTLAVAEHHCVMEATSNYGCCCTCYIRTVLPSVLPPPKKQIKHFSRMMMPVTKTDEKDAYMIAMYGEKMNPPVYKMPSQAIILLRQKKTVIRQLRKQLVASKNLRESLVVLPYRDKACVRALDKTIDFLTRQIEQLEAELADIASAEFDKQLKALTSTKGIGITLATALILTTGGFTFFDNAKQLSRFIGICPTYQQSRTSVNIREHINRNDDERLRSLLYIAFWTALRYNSRECYIRLKANEKPFKVALIAVTNKLVRPVLTITTINSIYRWICPG

SEQ ID NO: 240433 - protein, 398 aa, unidentified
MEAAKPTTWVGVDVGKGFHWAVAVGTEGETLLSRRVDNDEADLSALVEEARALADGEPLWAVDQPGGGAALLLTLLWERGQRVLYIPGLAVDQARDGFRGEAKTDRRDALVIAEQARMRRDLKRLEPTDELLAEMRLLLSRRRDLVADQSRALQRIRDALLALFPGLERALPDMRYRGALELLCRYQTPAAIRRSGRKRIEAYLKGRGARNAAGLALAAVSAAKAQKATMPAEGIAASIVADLAREVLDLKEKIAAFDGEIEVRFCDHPMAGVLTSLPGMGVLLGTEFLVTVGDPHDGFAGPDQLAAFAGLAPAARDSGKKTGNNRRMRGGNRALKRVFYQAAFASLRGCPASRAFYDRKRAEGKRHNQALVALARRRVNVLWAMLRDGTEFDPVLAT

SEQ ID NO: 240434 - protein, 356 aa, unidentified
MESTKYIGMDVHKEATTIAVLDPSGRLVMESIVETKAATIVQLVQGLRGDLHVTFEEGTWAAWLYDLLKPYVTKVVVCDPRKNALLQSGNKSDRIDARKLAELFRAGLVSGVYHGQISLRTLKELARSYLTISKDLTRTMNRLKALYRSWSIPCAGTSVYAPRHRAEWLSKIQEVGVRRRAELFYQQLDSLQLLRQQARQDLVAESRQQEATKLLRQIPYIGPIRAALLVAMIQTPHRFRTKRQLWAYSGLALETRSSGEYRYVQGQLERSHKPVTPRGLNQNHNHDLKSIFKGAAVKASSAAGPFQDFYLALLTKGMKPTMARLTLARKIATISLLMWKKGVCFDAGQLKRQESV

SEQ ID NO: 240435 - protein, 361 aa, unidentified
MARAYPPSEPDQIEATSQEVVLGVDTHKDRHVAAILTTVGMVLGTAAFPTTAAGYQQLLAWAHEHGTLRRAGVEGTGSYGAALARHLHIAGVTVLEINRPDRAARRRRGKTDTLDAEAAARAVLAGHATSTAKTGNGSVEMARMFRLARLWAVKARTQALNQLHAVLVCADTQVRESLAGLGRARLVRHCAALDPQDPTDPASAAIYTLRRLATRILTLTGEIDDLNRQLKTVLTRHAPDLLARPGPGPDTTAALLITAGDNPDRLVSDASFAALCGVSPVEASSGKIQRHRLNRGGDRQANAALHRIVITRLRYDPRTRAYQQRRLTEGKTPREIVRCLKRYVAREIYHALPTPPTAPAA

SEQ ID NO: 240436 - protein, 341 aa, unidentified
MISNVTTIGLDIAKSVFQVHGVDAAGEVAVRRKLTRGRVLPFFESLQRCLVGIEACSSSHYWARELIARGHDVRLLPAQYVKPYLKRQKNDAADAEAICEAVTRPTMRFVPVKSPEQQSVMMLHRVRLMLNRQRTQILNALRAHLSEFGVVAPIGRNGIEQLLVVINDDNDARIPADARLCLRMLEAQLRVVKEQILENDRLVRASARETELGRRLMEIPGVGPLLASAFVATVADPHAFKSGRCLSAWIGLVPKQNSSGGKEKLGSISKAGNRYLRQLLVVGAMAVIRYAERNGTRRPWLVQLMARRTTKVAAVALANKTARMVWALMTGGERYREPVIA

SEQ ID NO: 240437 - protein, 375 aa, unidentified
MEGAPMLDTTTFIGLDVHARSIKAVSLDVMTGEVRAATFGYDAGAVAEWVRSMDPRARCVYESGVTGFDLQKRLSGLGVDCVVGAVSKMIKPSADRRRKNDRNDAEFLARMLSVGNVVEVWVPDDECEAARDLTRALEDARDDLSRSKQRLSKFLLRHGLVFDERTPTGRRKGNWTRAHWSWIESIRFAERADNDVLAYYVDAVRRAAEEKARLEGLVEAEARKPRWRKRVDSLRCLKGVDTASAADLVFEAGEFSRFRNARSFAAWVGLTPSEHSSGESDRRGAITKAGNKHLRKALVEAAWHYLTCSGRPKDLAKGQAPDRGARRHAAKGVRRLVERREALLARGVHGNKANVATARELACWVWAVGLMAEEA

SEQ ID NO: 240438 - protein, 357 aa, unidentified
MIAMKYYTSTTQFNCGIDLHARQMYVCVMDRDGKKLVHSNIKNNDFEFFLKLVAPYRHDLTVCAECMFGWYWLADACQAAGLHFVLAHALYLKAIHGGKNKNDRIDSEKLAHLLRTNLIPPGYVYPAEKRPLRALLRQRLRYIWNRTELLARIQSHQLAYNRPISRQRPYNREAWKEQLLTSEPDPVRQLALQNDLALIGHFDAQLAVLEKDLLKLTKRTASRDFALLRTTPGIGDYIGLTLLHEIGDITRFPTVKDFLSYCRLVKGTVASAGKIKGLRGAKLGNPYLRWAFGEAAVVAKRDALLGSLAQRLEARMNGNKFKANAVLAIKLARAVYFMLKNKTAFDPDRLVAALSPN

SEQ ID NO: 240439 - protein, 401 aa, unidentified
MEGPIVSIDVSNGNSHYMCFIKNNKRFGKVKKIDHNIEGFKRLLEDIQKLEAETNEKVCAVFEATGVYTKPLERFLSKNSIKTYMINPLESARKRKEEIHNKKTDKLDPISISKVYYDKEEMMELKKKDETYNWLRKKNRLYEDQLNHLRKYKVTFQNQLSICFPGYLDLFKDGYSDIPMTILKKYPHPDLLKNKKAETVARYLEKNTCHTHKVSLEYALKIIEFAKKTYPGCEKDDVEVEIFKILLDKVIETQRECEKTLNEMITVASTLEEYRYILSIDGIGTNLAARIIAEIGDIEEFESREALVAYAGLDPHIYQSGDQDGKHLKISKKGNKYLRCLLFLAVGCSIRGAKDNPANRFYQKKKQQSNPLNSKAAKTACTAKLLKIIYGICKNKTTYER

SEQ ID NO: 240440 - protein, 364 aa, unidentified
MDPALGLGWDVEVSTTEQETSMNIVRIGLDLAKYVFHLHGVDERGKVVLRKTLRRPGVAPFFANLPRCVVGMEASNGAHYWAKTLSEFGHDVRLISPQFVTPYVKSSKNDRNDAEAICEAVGRPNMRFVSVKSAEQLAIQAVHRIRIRLVASRVRLVNQIRGLLGEHGVVVAQAIGNLRRALPPIIDDEANGLNSIVRALIGELREELSDLDGRITIYDRKIINLYRMSEACQRLGEVEGIGPITATALVAAAGDGKCFKNGRQFAAWIGLVPKQRSSGGRSRLLGISKRGDRYLRTLLIHGARAALGRTRGKQDPRSLWLLKMRERRHANVVAVALANKNARIAWGLLASGMNYDQHLTVSSA

SEQ ID NO: 240441 - protein, 428 aa, unidentified
MSIEDTIRRDQFVQIISEIRGSDDYLVVGIDVAKDKHHAFMGSATGKSLLRRLIFENNLEGFRKLLERSEATKIKNALSKVVFGMEPTANYHKPLGAYLIRSSRHVVLVTGKAVKYNRELLDGRWDKNDDKDAANVADLVSRGKCLYYDYPSSSINELRQLLSLRRRLKKEEHSLRMRIRNNLLALYFPELDRFYSACETESLAIVRWCLDPGKITAMEFDEFFSMVTRTKRGIAQKLRLQKIHRLAVESIGCTMGPAAEFEAELLVEKLKEVRGQLKEISDLMADICIQLAEYKWLLTIPGFGPYISARVIASLANPWRFDNSSQVLKLAGYDLNAQRSGKRSADAVPVISKRGNGELRYALYQAAHVASSRNRDFIRYFTRTLRGRERERGIKTKMKVKLAAKMLKIAWTIMKKKEAFDPNHLVIE

SEQ ID NO: 240442 - protein, 448 aa, unidentified
MVVRDPALGVPSINPKGGDTMKKRMKFDHLSTLCVGLDIGSRSNFITALNFDSDRLINMRPVSNAANGVETMEAMILAVLEGSPQFRYLLVAMESTSFYGVHVANYLSTSDLLKPYGVKVFCLNPKTVANYKKTFTGLGKNDGIDSFIVADYVRAGLIEIEPWRGSQYLALQRLTRQRRHISEAIAREKNYVLNNIFLKFSEFALLSGEDSPVSNKFSTTAEAVLTEFKTTEDIANAPLDELIDFISTSGHGRFSDPNQVASLLQKAARNSYRLDKALYEPITTSIACSFNCIRAFEKEQKALDKAIAATVAGLNPTEYQILKSIPGIGPVYAAGILAEIGSVRCFNSNNALAKYSGIIWRDNQSGEFDSEDTPMMKAGNRYLRYYLIQAAGSVIRYCPEYEDYYNKKFAEVPKHQHKRALALTARKLIRLIFGLLDKNQLYSPAKGR

SEQ ID NO: 240443 - protein, 471 aa, unidentified
MTPASTRAERRRQVRTASKPKVPLPPQLKRVNLNAAGIDIGSEEHWVAVPPGRDPEGQDVRRFGAFTGDLCAVAEWLKRCGIETVAMESTGVYWIPLYELLVERGFEVLLVDARQVRNVPGRKTDALDCQWLQELHTYGLLRGAFRPADQICVLRSYLRQRSMLVAYGSHHIQHMQKALEQMNLKLAHVVSDITGVTGMGIIKAILSGERDPAKLAKLRDPRCKHSEATVAHALEGHYREEHLFALRQAVELVEFYQRQITACDRQIEACLQQFEDKSAETSVSPRKGKRRRGEVSFDARAYLHRITGVDLTQIDGIEANTALTVVSEIGVDMNRWPTEKHFGSWLGLAPGSKISGGKRLSSRTKPSANRAAAALRLAAQALSHSQSALGAYFRRLKARLGAPKTITAAAYKLARLVYRMLKFGSGYVDQGEAAYEERYRERLFRNLKRRAAELGFELTPMSSTPGQPALT

SEQ ID NO: 240444 - protein, 325 aa, unidentified
MNIVFLGIDLAKNVFQLCGLNQAGKPVYTKRTGRKELLQALANIPACLIGIEASTGAFYWQREFEKLGHKVKVISPQYVKPFVRGQKNDGNDAQAIAVALMQPTMQFVPPKSPEQQDIQALHRARQRIVNHRTATVCQIRGLLLDRGIPIGSAVSRARRAIPLILGDAENGLSSRMRRTIAELYDLFNDLGRRIHFFDKEIETVFRQSEACQRIAKVKGIGSKTATAVVAAIGKGTEFKNGRHFAAWLGLVPRQHSSGDRQVLMNMTKKGDRHLRTLFIHGAPAVVRVATNNNDGHMNQWVNQLKERRGFNKTTVAVANKNARII

SEQ ID NO: 240445 - protein, 404 aa, unidentified
MDLAPLYRCVAALDVHQAKLTVCILQERSDGELRVELREFGGFKRDRRAMAAWVASFAPESVVMESTGIYWKSPYAALEQVGLRALVVNARHVKQVPGRKTDLADAQWLAILARGGLLRGGFVPAERFRRLRLIARQMQKLTGILAGEKNRVHKVLTDGGIRLAVVLSDVHGKSGRAMVRALVAGEPAQALLGYADPRLKASEEDLLDALDGDLSAEHRLVAGQLLDHIGYLERQIEALRQALLLGLAPQQGLLRALQTIPGLDETGAAMLVVEIGDDMQAFGSPERLASWAGVCPGNHESAGKRKSGRQRKGNPYVRRLLCEAAHAASRTRCALAEKFKGLLVRRGRKRAIFALAHKLLKTVFVLIDRGDYYRDASVDYEAMSVERNAPRWMKMLRKYGYLPA

SEQ ID NO: 240446 - protein, 402 aa, unidentified
MNAVGIDVSKGKSMVAIMRPFGEIVSAPFEIKHTASGINSLVELINSVEGESRIVMEHTGRYYEVLAHQLSEANLFVSAINPKLIKDFDNDSLRKVKSDKADAVKIARYALDKWQNLKQYNVMDELRNQLKTMNRQFGFYIKHKTAMKNNLIGILDQTYPGVNTYFDSPARSDGSQKWVDFASTYWHVDCVRKMSLNAFIDHYQNWCKRKKYNFSQSKAEEIYGKAKELVPVLPKDAITKLIIKQAVYQLNSASTTVESLRTLMNETASKLPEYPVVMAMKGVGTSLGPQLIAEIGDVSRFTHKSAITAFAGVDPGVNESGSYEQKSVPTSKRGSSDLRKTLFQVMDVLIKTHPQDDPVYQFLDKKRAQGKPYYVYMTAGANKFLRIYYGRVKEYLSSLPES

SEQ ID NO: 240447 - protein, 321 aa, unidentified
MNNKTKTNTNTHSHTQPQPIAKAKSIKLGIDVHADSYRVVRQIDHATPQPAQKFTPKDFLDWAKKQLALAHEVHSCYEAGPLGYGLHRKLEAMGIHNVVVRPQDWDELHKGVKTDKTDALMLAQRLSRFVDGNRNELAVVRVPTPEQELARSQSRLREQLMSHRLRLEAQGRSLLLFNGIRPRGRWWQERGWAALAGQLSSGLQELLEVIRGLVLAVQAQLEAATIRLESAATPQVCGVGALTSQVLEREVLDWKRFENRRQVASMTGLCPGVRASGLKSHHGPITKHGNRRLRTALIELAWRCLRFQPDYGPIKNGVRCC

SEQ ID NO: 240448 - protein, 338 aa, unidentified
MAILTVGIDLAKNVFAVHGVNEAGKPELVRPSVPRAKLHALVAALPPCTIGMEACSGAHHWARLFAAHGHTVKLMAPKLVAPYRMSGKRGKNDGADAAATCEAVQRPNMRFVPIKTEEQQSRLMVHRVRQGFIAARTATINRIRGLLAEFGVVLPQKAEVVRREAAAQLEDLPGYANLAIGDLLSEVHHLDERIKQYDVHIRAMAHECTAAKRLMQLMGVGEVTATAIVAMVGNATEFDSGRQFAAWLGLVPGQYSSGGKARLGHITKAGDAYLRGLLVIGARAVLNAAADKKDSLSRWAVKVAERRGYWKAVVAIAAKNARMAWAVLTKGEAFKLPA

SEQ ID NO: 240449 - protein, 497 aa, unidentified
MKTAPSSLSAKRRARNAQKLKRQDAKVAKAAPAASRPRSLDELQPVHRRAAGIDVGSAENYVAIPAEGLAAGQSSVRVFGVFSAEQDALVEWLRSHQITTVAMEATGIYWLTLYDKLEAAGIEVYLVDPHGVKAVPGRKSDWLDCQWLQKLHTYGLLHRAFRPDPPIRRLRTLTRQRAEVVLCGAAHLQHMGKALTAMNLHLQLVVSDLHGDTALRIIEAILAGERDPKQLVQLRDERCHKSTPKEMEAGLTGTYDEEQLWVLQQSLDAWKFYQKQMGQCDQRIAVVLEQIPTAKPPALPAPARQVVAAPPPAKAKRKRVLHGPNASKIDFTKVLARICGADLVKVCGLNLLSVLMLIGEIGTDMSRWRSARAFCSWLGLCPGTKISGGKVLSRRTRKVNNRASTILRLAAVAVGKTDTWLGAFYRRIRARRGGPKAVTATARKLACIVYHMMKYGEDFAWPDLEQYEAKAKAHRMRRLQKEAKSLGFEIKELEEAA

SEQ ID NO: 240450 - protein, 343 aa, unidentified
MYAFYYIGLDIHKRVIAYCIKALDGRLIGQGKIDADRKTLGEWVQGLPGPWIGAMEATIFTGWIYDFLKPHAVDLKVAHPEMLKAITAAKKKNDRADAEMIADLLRVNLLPECHMLSEEIRELRRILRYRNHIVRTAVKMQNKMSGLLMEVGASYSKKRLHGKKYFNELLERVEEIPPSVKELLKLSRASFEMFRAVQKRLVEALRTNSLIRDRVQRLMTIQGIGEVTALTWALEIGDPERFGSIRKAISYCGLCSAQRESAGKEQRGPISKKRNKHLQTMLIEAAKIAPLWNPQLAAVHERELKKGNRNLATLAVARRLVAYMMAVDKNQTDFRLREEEKAA

SEQ ID NO: 240451 - protein, 352 aa, unidentified
MNIYIGCDAHKRYSMFASMNERGQTGRPVRVEHTRAMYREFLRGLPPGSPIAIESVGNWYWMIEEMEKAGHEPQLTNARKAKMMMGQMNKTDKLDATGLATLLRNGTLPSVWIPPRDLRDARELPRMRMSLVSVRTMLKNRIHATLAKYMIEIDEVSDVFGVKGRELLKTRLEELPPYTRESVETQLQLLDEVEAHLDHCEQEIREVVKATPAMTLLKTIPGVGPILAVVIALEIGDIARFPSPEHLSSYAGTVPRVRSSGGKTSYGQVRPDVNRYLKWALVEAANIVVINQGRWPSRHVVRLYGRIKERKGHAKAVVAVARHLAEAAYWILRRNEPYKEPGTTNSISSTRK

SEQ ID NO: 240452 - protein, 383 aa, unidentified
MSKTQETLQSKNTTNDRTLHIAFELADKTWKLAFSDGSKFRYRSMEARNLPRLQDEIERAKSHYEINSQARVVRCYEAGRDGFWLHRCLDNWGIENVIVDSSSIEVDRRKRRVKTDRIDAGKLSRMLIRYHGGERGLWRVVRVPSLSDEDARHLNRQLDSLKKERTIHCSRIRGLLMQQGLKVTTLCKTKFRRQLDRLRLWDGRQLPTGLKARVLREYERLRLVEEQILALEKEKDRMLEKAESDNVRKIAQLQMLYGIGTVSSWTFVNEFFGWRQFKNRREVAALAGLTPTPYDSGDDTREQGISKAGSARIRKLAVEIAWSWLRFQPQSKLSRWYSKRFASGGKRMRRIGIVAVARRLLVDLWRYLEKGIVPEGARIRPIA

SEQ ID NO: 240453 - protein, 339 aa, unidentified
MEKVSTIGLDVAKSVFQVHGVNEEGQVVVERQLRRPQLLGWFAQLPACLIGIEACGTAHYWARALRKLGHEVRLIPPAYAKAYVRRNKNDAADAAAICEAVSRPTMRFVAIKSAEQQALAGLHRVRDLLMKQRTMLRNQLRGLMAEFGVVAWQGRRGLIDLLAVLCDDAEQRIPDTLRAALLADAEVLRDLEHRIEAIERQMVAAGRENATYRHLITAEGYGPILSSAMAAMVVDPGAFRRACDFAAALGLVPRQDGTGGKVRLGPISKRGNGYLRRLLVNGAASLIISGRAKRDPWLAKLLATKPRKVAIVALANKLARIGWALMVRQQDYRFTPAAA

SEQ ID NO: 240454 - protein, 347 aa, unidentified
MRFYNKIHDFYCGIDLHSTKMYLCILNKDGEKVLHRNMKVSPETFLKAIAPFRENLVVAAECIFSWYWLADLCEDEGINFVLGHALYMKAIHGGKAKNDRIDAFKIASILRGGTLPKAYVYPRAMRSTRDLLRRRSHMVAIRGDFLAHAQMSHYQHALEKPTARLAYKANRIGVADAFQDDSARRSVEIDFTMAGTLDHEIRALELDLKRKAKVHQPESLSLLKTIPGIGDILAMTILYEIHTIDRFERVQDFASYSRLVKCAKESNGKRMGTSGSKIGNAHLKWAYSEAAVLFLRCNERGKKYLARLERKHGKGKALSILAHKLGRASYYILKRKKPFDMERFMAA

SEQ ID NO: 240455 - protein, 367 aa, unidentified
MKKVSTAVAKQGRNISRQRLTIGLDLGDRNSWYCVLDEAGTIQLEQRVRTTAKALQEVFGAMPRSRIALEIGTHSPWISRLLSELGHEVIVANARKVRLIGESRKKDDRLDAQTLARLARIDPELLYPVKHRSAQAQADLMMIRARAGLVRARTGLVNTARGLAKSYGERLRGCNVRNMDPEKAEGLSPELQRALEPLLATIEELSERIVEYNDRIEALAQASYPQAALLKQIKGVGTLIALTFLLTLEDPHRFGKSRDVGGYLGLQPGRRKSGESEPQLHISKEGDPYLRTLLVQGAQHILGPFGIDCDLRRWGLKLAERGGRNGKKRAIVATARKLAVLLHHLWVSGEVYEPLHNSSRLTVAAAA

SEQ ID NO: 240456 - protein, 336 aa, unidentified
MLIIGCDFHTRFQQVAMVDTTSGEIIERRLQHENGEARAFYAALSGPARVGMEATGYAQWFERMLAELGHELWVGDAARIRAGVVRKQKTDLRDASHLLGLLLSDRFPRIWMPSPAERDVRELLRHRYKLVGFRTSVMNQLHALAMGRGMCRQKKMWTAAGRQGLEGLALGGWASRRRQELIEMLDRLNASIKELDQAVEQEAESRAETVLLMRQMGVGPVTALAFVLTIGPVSRFPKSRQVVSYLGLNPREDSSGGRQRLGSISKQGNKMMRCLLVEAAQTASRFDPELRRNYQRLKFRRGSGVAKVATARKLVVRLYWMLREAAQPRAAGSHAG

SEQ ID NO: 240457 - protein, 343 aa, unidentified
MQAITTVGLDIAKSVFQVHGVDAQGNVLVRRQLKRGHVLPFFQKLPPCLVGIEACATSHYWSRELQALGHKVRLMPPAYVKPYVKRQKNDATDAEAICEAVGRPNMRFVATKTAEQQGCLTLHRTRHLFIRQQTSVINAIRAHLAELGIVAPVGRRGVDQLLAVVADTSDKRLPEVARACIAALGAQLQMLKARILEFDRMITAWRRSSEASKRLDAIPGVGPVLATALVATVADPKAFRSGRDFSAWIGLVPKQNSSGGKDKLGSISKQGDRYLRGLFVAGALAVIRYAKIHGTKHRPWLTALLARRPTKVAAIALANKIARIAWAMMARGERYKVPAALAA

SEQ ID NO: 240458 - protein, 373 aa, unidentified
MPRYSTAFGMDVHLRSTTVCALDAETGEAVTRRFRGNPWGEVAEWMSGFPGPSLAAYESGYLGFAPQRELSGLGVDCVVAAVSRVPRSAADLSSKNDRNDAARMAKAILSHDISPVWVPSPEIEGLRDLAGAHDAATARLAAAKQRLLAFLARRGYAYGGTTPAGNPRRYWTYGFLRWLDKVRPADDGGIRALAALRSEVEAAAETRDDLLAEYRAAVAAGPLSAEVEALQSIKGCGFALAAAFASEVGDFSRFRSGRQVTAYFGLAPKQRSSADSVRLGGISGAGNALVRRLAVEGSWSYVQASHQPKLMPKGSGVPLEVRMHGRKGSERLLRRREEMLARGMPQAKANAATAAELVRWLWALGAMCREATE

SEQ ID NO: 240459 - protein, 386 aa, unidentified
MQASNERAPIAGHIGTIFVAIELSQKSWLVTIHSPDKDQISRHKLSGGDHAGLLALIDRICDRAARVLGAVPAVVSCYEAGYDGFWLHRLLTAAGITNHVFDPASIAVEQRARRAKSDQIDGEQMLRTLMAYCRGEPRVVRIVRVPSPEQEDVRRHTREQQRLTKEQTAHTNRIKALLRLLGMAVGNPRRRDWLSWLEGQRDWDGQAVPPRIMTELKREHARLMLVHEQLEALAQVPGAAERTPASAQMAQRTDHLLQLKSLGPVFAATLTNEVFYKDFRNRREVGSYFGLAPSPWQSGGTHREQGISKAGNPRARQKAIELAWLWLRHQPDSALSQWFRQRTLNASGRIRRIAIVALARKLMVALWRYLTTGLVPENAVLKAAKA

SEQ ID NO: 240460 - protein, 344 aa, unidentified
MIIIGCDFHPSWQQIASLDTETGEAEERKLIHAGGEARRFYQGLVGSVRVGLESTGNSHWFVDLLTELGHEVWIGDAAQIRASQVRKQKTDRRDAAHILELLLKDVFPRIWTPSREERDQRQLLIHRYKLVTLRARVKNELQHLALNQGMQKGRTLWSKAGQKLLLDLPLHYWAGTRRKNLLELLKQMDQQIVVLDQAVKKAAEENERAHLLMTQPGVGPITSLAYVLTMGDVSRFQRGKQVASYLGLIPKEYSSAGKQRLGGISKQGNRFMRMLLVEAAQCVVRYDPGFRSEYLHRCHQKPKAVAKVAAARKLAIRLYWMLRTNTAYPEVVRIESSSRVPLGG

SEQ ID NO: 240461 - protein, 346 aa, unidentified
MEHYAGIDVSLELSSVCVVDAQGKIVKEAKVASDPEGLIAFFASLGLAVKRIGLEAGPLSQWLQSGLKCAGLEVVLLETRHVKAALSAMTVKTDRKDARGLAQLIRMGWFRPVHAKSMGSQEVRALLVARKQLLGRLIDVELSIRGILRGFGLKIGLVTRKGFEARVRELVTGQATLEHITRAMLSARAVLKVEYEKLHKSMLAMVREDAVCRRLMTVPGVGPLVAMTYKSAIDDPSRITKSKAAGALFGLTPKKYQSGEKDITGGITRTGDEMVRTALYEAANVLLGRITRFSKLKRWGLDVAKRRGSKRAKVALARKIAVILHRMWIDGTTYRWSEAQMMATQA

SEQ ID NO: 240462 - protein, 401 aa, unidentified
MIVGETGKRLVSRKVATDPSAMAAFVAKRGTNVVSVGFEAGPLSSWLYHELKDAGLPVVCIDSWRARAALSARLNKTDRTDASSLADLLRCGFHHPLYVKSYAAHEVRAMLKARYSLVAQRRTLQNTIRGLLETFGLVQAKGAGGRFAVLVEDALESRPSLRASIEPLLRVWQATREAAAAMHRQLRAMARADVDCCRLMTMPLQGLLAASLPGIGSMASWPSMASARSPVGLRGPRGPAWALAFTSAIDDPSRFRDSRAVGAYFGLTPSRYQSGKFDHIGKISRADDGFMRSLLFEAAQCPAFRSAKAPALKAWFEALAARICRKKALVALARKRAVILHAMAGPRPRLRRDHPGDGSRRLNRAPASPATSAERGRVSGQAASWTRGAPIDETASMGLRP

SEQ ID NO: 240463 - protein, 343 aa, unidentified
MLHAGIDMHKEFLMVTVLDEEGSEVVSPRRIPTSGLSIEEFFGEFEPEEIAAVLEAGPNWYWLCAQLDELGIQNKLCHPLKTKAIASARIKTDKIDSRTLADLSRADLIAESYKPDAQTRYLRELMRGRSFMVNLRTGLKNRVHSILAKINIKNPYSDLFGIGGMGFLESLTLPDVYRDSLDSYLEVIESLNGEIADAEKKATRALEESHEARLLSTIPGVGLITSLMITAEIGDVSRFDSHRQLCSFAGLVPSTWQSGGATRHGRITRQGSRWLRFALVEACRHAVGRPGPLADFYQRLSRRKGKSTAKVAAARKLGTYVYYMLRDSKDYGELVCFINGERG

SEQ ID NO: 240464 - protein, 360 aa, unidentified
MGNGTWVGLDVHAKSTVAGVICEGTGELRVMRAPHRTEELVRWVDGFDRPVRVAYEAGPTGFGLARALEAQEISCLVAAPSLIARSPAGRTKKNDAHDAEHLARLLRQGELTPVRIPDPADEAARDLVRAREDARADLMRARHRLSKLLLRHGVLYEDGKPWTRAHEAWLRRIRLSHPAARAAFDDAYGAVLGAAIRRDSLDAQIARLATEPRWADVVGRLGCLRGVGTLTAFALCVEIGDWHRLTGATIGAYLGLVPSESQSGARHARGPITKAGNSHARRLLVEAAWHHRQQLRTSVAIERRRTGQRPEVRARAEQAGVRLHHRWYQLERRRGIRSTIVATAVARELAGWCWSLAVMD

SEQ ID NO: 240465 - protein, 418 aa, unidentified
MFKIFRKNCCGLDVHKTWIYACIGITDTNGRTEYHERRFSAFTSGLRELAAWLTRYDCKEVCMESAGRYWIPVFNVLEKTCWVSLSHPKYTKPQKGNKTDRKDAKWICDLFMCDMTKPSFIPPPDIRHLRDLVRYRFKLTCMLTGEKNRAQNCLTVSNLKLDDVFSDVFGKSARSITEYILAHPGERFDVTPFVDKRCKHPIEEIQAAIDGSISPEQAVKLRETIRHIDEIKAHRQRIETEILRLAAPYETLLKLIRTAPGFSSDPMTAIALISEIGVDMSVFLTAKHLSSWAGCCPRNDSSGGKRKSTRISRAGVYLKPLLVQVANAVVKSDKYPECKERYRRLKARRGHKKAIIAICRMLLTAIWNILSKVEPYNPYGYLADRKTEPSKTVTTAQALNLMRLRGYVIKDDVVISTA

SEQ ID NO: 240466 - protein, 399 aa, unidentified
MAVGAVAGIDWASEVHVACVIGKDGTVASRFSFTHDAAAIRTMTRRLRAAGVARVAIERGDGPVVEELLAARLVVFVVPSRQIKGLRTRYGSAGNKDDRFDAYVLADTLRTDGHRWKPLRPDTEPTRALRALCRSRKDLVETRVQLLAQLRANLELAFPGAIGLFTKPASGISLAFLQRFPNAAKAAWLSPARLASWLRSVGYTGGTSAEILHGRLTAAPPGLTGPEGEARGQITLALAAMIGALNAQITILDAEIGRVFAAHPDQHIFSSLPRSGTIRAASLLAEIGDCRQRFPTDDALAALAGACPSTRQSGKRSQAVFRWSCSKKLRAAVMDFANGSRMADPWAAGIYAAAIGRGCRHPHAIRILARAWLRIIWRCWQDGTAFDPALHRGRQTGTA

SEQ ID NO: 240467 - protein, 344 aa, unidentified
MPSIVGGFDIHRKQLTFDYLDTVSGEVTRGQITPADRGHLRAWLARLENPQDAAFAAEACTGWRYVAEELQRAGVQAHLAEPADTAAARGRKKRAKTDRADARLLRDLLAEGRLPECWIPPEHILECRALLECYHDLRAEHTGWVQRIHATLFHQGAPAFHGLGLADGPGQLTALAREHLSPAGQAQIGTCLRMLAAAGAELTAVRHRLLAAAAHLRGAKVLTQSLHGAGPVTGLALTCWLGGAGRFSSARKAVRFAGLDITVYSTGGKRSAGHLSRQGPPVLRWCAYEAGKTHAHTTAPDHPCYAAVKDRAGGKRAALAEAREIVRQACHILTELGDDAFTIM

SEQ ID NO: 240468 - protein, 398 aa, unidentified
MKRILRIGMDVHSTNYPLCAMEPVIGEDDRIFANIQVTPDYKNILMFIENLKMKLGLDAEYDIQCGYEAGCLGYSLYNQLTAAGVKGVILAPTTMLTPQGQRVKTDARDALMIAQCLSYGGYHAVYIPTEEDDSVKEYLRMRDDHKTALKKIKQQINALCLRHGYHYEGTKWTIKHVAWLRKLELLPLYRETLDEYMASYDEQTAKLERFDKRIGELASQSSYEEKAKRLGCFLGIKTHTALSLLVETGDFSRFAKGSTYAAFLGLAPGENSSGETINRRGITKAGNRHLGQLLIEAARGICKGAIGHKSRELRARQSGNTAEVIAYADRANTRLRSRYYKLIRHGKKKNVAVAAVARELACFVWGMMTDNTGMKMAERNSKDSCQSRALCTAGAAGP

SEQ ID NO: 240469 - protein, 422 aa, unidentified
MMHEERRWFVGVDWASQEHVVSLCDGEGKKIGQREFIHGGTGISDMIAWLLKASGGEPGEIHVAIETPHGPIVEALLERGFNVYSINPKQLDRFRDRFAVSGAKDDSLDSYVLADSLRTDMPLYRKLSVAESLIVELREWSRIDEELKVERVRFTNRLRDQLWRYYPQMLELGDLDEEWMLDLWEAAPTPEKAARTSKAAIVRVLKKHRIRRFDAAQVLKELRKPALNVAQGTIEAATAHIRMAIERLRVVNRQLADAEVQLNRLCKKLAEPVAADDGESVPGQRQEHRDATILDSLPGVGRVVLATMLAESPDALQRRDYHALRSLCGTAPVTRRSGKSCIVTRRRACNRRLRNAAFNWGAVAVQHDPISKAKYQALRARGHGHVRALRSVVDRLLYVACTMLENRTLFDHSLAEAKKAAA

SEQ ID NO: 240470 - protein, 336 aa, unidentified
MEPTTIAIDLAKRVFQIHYVEPETGAIHSKVLKRAQLAPFFANRPASRVVMEACGSAHHWARVLARLGHDVRLIAAQFVRPFVKSNKNDAADAAAIWEAAQRPGMRFVAVKTEDQQAMLAMHRIRQQLVRIRVMQVNQLRGLLYEFGVVLPQGRRASIEAAKAALASLADELPDMLLDSLQDQLSRLRALDEQIARIEQRILSWRRNDDACLRISEIPGVGVLTATAAVSVIGQARTFRSGREFAAYLGLVPRQNGSGGKIKLGGISKRGDVYLRTLLIHGARSVISSSKHLPERLRQMLSRRPTNVVAVALANKMARTIWALLAHGRTYEAAPSQ

SEQ ID NO: 240471 - protein, 323 aa, unidentified
MVVVAGIDVSKATLDLSISEGPVLSFENSATGIRRLLKHMDRAGVTKAVCESTGGYERLVVGKLRETAFSVQVAHPLRVRAFARACGYEAKTDPLDAQVLSRYGVVFSESDAAQSDVDPDREELRQLLSRRRQLVEQRVRERNRLDKGVSASVGKSISRNIRWLDREIERLEEEYKELLKHNASLSETAELYQTVPGVGQLTAATLIAYLPELGRWDGKALTSLAGLAPWSRDSGQKRGNRSIRGGRGMVRRALYICAWAVLRTDGDLRDFYQRLRGRGKPGKVAVIAVARKLLMQLNAVARRGTAWVKQHASNRVPLHAAQA

SEQ ID NO: 240472 - protein, 348 aa, unidentified
MQAITIGLDIAKNVLQVHGVEASGAVVVRKRLSRGKTLDFFKSLSPCLVGMEACGSAHYWGREITALGHETRLIPPVYVKPYVKRSKTDAADAAAICEAVDRPHMRFVPVKSEQAQAVALIYKTRGLLVAQRTALANALRSHLSEFGIIAAKGPEGLARLLAVLGSEDSGLPELACEGLNAMVDTMAAMQKQIAQLDARIAKTVRSDATCRRLLAVPTIGPVAAGSLVALAGDLARFRSGRDFAAWLGLTPRQDSSGDKVRLGRITKAGDKGLRTLLVMGALSVIRHARGDAAKGIKPQASAGRASEWLTKMLERRPPLVVAVALAAKTARIVWAMITRGEEYRLTDA

SEQ ID NO: 240473 - protein, 434 aa, unidentified
MQVVHERCCGLDVHKRTVVACVLITQPDGVVERQVRTFKTMTADLLALADWLSSLAITHVALESTGVFWRPVFNILEDDGRTLLLVNPQHMRAVPGRKTDVRDSEWLADLLRHGLLRASFIPPAPIRAIRELTRYRKTLVQERSDEVNRLHKTLDGANLKLAAVASDLLGVSSRAMLAALLGGEQDPEALADLARGALRAKLPALRQALAGRVQPHHLVLIGQLLAHIEFLEQAIAQVQAEIEQCLPPFEDALVLLQTIPGIRAVAAAAILAEIGVDMRRWPTAGHLVSWAGLCPSNKQSAGKRLNGPVNRGNVWLRAIMGEVAWAAVKRKQTYFAAQFHRVARRRGRNKAVIAVAHSLLVVIYHVLRTGQPYADLGADYFDRLDAARIERLTIRPAEGVSREPEARGHSICWRVACGPPPLARGRGIVGPQLW

SEQ ID NO: 240474 - protein, 339 aa, unidentified
MKFAGCDLHKQTITICVVDQSRRVLERRTVRCGEERTILAFFERLGEFEAVVEATASYEWFVRLIEPVAHRVLLAHPKKLRVIAESTRKSDRLDAQILAEFLALDMIPTSYRATPRQHEHRRLVRQRGGVQRRLTSVKNRLRRILCDYNADRPSLFTVDGLAYLAQVPLSGADRFAVDQMVEELHFGRRQLLAVNARLKEFAEAAPLREQEARTLLRTIPGVGFVTTEVVLAELADIDRFGSQKRVVAYAGLSPGQRESAGKSRELHLEKNGSTLLRSTLVEAAWRLVQHSLRWRRIYERLKLRVRAKKAIVAVARRLLCLMTAILKTGQPYSLSQQPT

SEQ ID NO: 240475 - protein, 425 aa, unidentified
MKAEEQNQIEFAAYIGLDWGDRTHAVSLRCEASDKVEHCQLEHKPEALAAWVNGLQQRFGGQPVAVALEQSRGAVVHALMGYDFLVLYPVNPKTAAKYRQAFRLANSKDDPDDAQLLLEILTLHRDKLRAWLPQDELTRTIALLVEHRRQLVKEQTRLSNRLTDVLKLYYPQALAWAGELATVQACDFLKRWPTLAQVRRARESELRHFYLAHGCRKKELLERRLTEIKVAQPLTRDQAIITASVVMVQATASQLRVIVGAIAQFDKQIEELFGSHPDHDLFSSFPGAGPALAPRLLTAMGTDRERFSAAPEGQQFSGIAPVTERSGKSCWVHKRWACPKFMRQSFHEYAGQSIRQSPWARAFYQQQRQRGNGHHAAVRSLAFRWIRIIFHCWKERVPYCEHTYCQSLVRRHSPLAQLLVVQPET

SEQ ID NO: 240476 - protein, 435 aa, unidentified
MAMRRRDDEVVFPNAAGIDVGASSHWVAAPRDATEDPVREFGPMTDDLNAMADGLLASGVDTVALESTGVYWIPVFEVLEQRGLKVWLVDARQMKYVPGRKSDIQDCQWLQKLMSLGFLRAAWRPEGDVCVVRAVARQREVLLAEQASWVQRIQKSLVQMNIQLTEVLTDVMSTTGQAIIRAIVAGERDPKALAKHRDRRVKASAEKVTKALTGNWRDEHLFVLCQALAMYDDIARHLTECDAKLQALLRARGQRRVDLGKVPRTGSKLREEFDARQILANWAGVDLTRINGLGLTAVMKILSEPGPDLSRFATVKHFCSWLGLCPGTKISGGKVLSANTKRSANRVRQTLKMAAMSLSRSNSALGAFYRRLCSRMDKPSANTATAHKLARMVYFMLTRGEDFVDQGQQRQRSIAALKRRAAASGFDINPTPVPA

SEQ ID NO: 240477 - protein, 428 aa, unidentified
MSKAAKPRRSAGRKSSTRVRLDDLTDVHDRCAGIDVHKQSVTVCISTGDGQGELREYQTTTGALRELKEWFQQMGVTHVVMESTGIYWQPVWQILEDDSYQLLLANARQVRNMPGRKTDGEDAIWLATLLRKGLIRGSFIPPAEVRALRDLCRTRANLVGDRASVSQRIEKILEQANIKLDTVVTDIMGVSSRRMIEELLDGETDRARIAELALGAMRAKIPQLQEALDGYFLPHQRTMLRVQLSQFDALSGAIAAMEEAIETYARPFAPQMEQLDQIPGIDRIAAATIIGEIGVDMNCFPTPEQFCRWATMAPGNNESAGKKKSGSIGKGNTWLRRIMTQTAWAATRTKNSYFAAQFKRLLRRGPQRALVAVAHSLLGVIWHMLTRHTAYRELGGDYFQRRNQQHLVRSHVRKLENLGFRVQLQPVG

SEQ ID NO: 240478 - protein, 421 aa, unidentified
MEKITRAAGCGEATRVGVDLAKRVIQVHAVNAQGKVLTTRALKREQFIEWSVQLPPGCMVAMEASSSAHHWARKLLAMGLDARIISAQLVSPYRLEGHTGKNDANDAAAICEAASRPQMRFIPVKSVEQQSMLCVHRLREGIKTDRTACINRIRGLLAEFGLVVTQGADKLKDVLSELLEDASNELGTLARLTLQRAQIQWHELDAHLAWCDERIAAHAKANPAVKAAATLMGIGPVSASAAIATVGDFKQFKNGAQFGAWIGLTPRQHSSGGKNSLGGITKRGDTYLRTLLIQGAKSAVMTAHRRQDRISNWALALRERGGCPLKLPKALLAMLGAKICAVFSWCRDITLLVEKRYQLLLEIKQLTRGSSSSCVRADAATSSWMSPMSVCSHCSTFMQCWRMYARAFRCSSGSTSFICDA

SEQ ID NO: 240479 - protein, 314 aa, unidentified
MTHRVHFVGVDVSKARLDVAIAGGPAFHVANSPKGRNALLARLKRVDDVAVGVEATGGYERKLIDALLAAGYDTRLLQPARVRAFADAKGLHAKTDDLDARLIVDYLAAVPTRSLRHDRAAQALAELVDARHRLVDDRTGARNVLGEHPPRDAGLKRMLERRLRQLDADILLLDKRIADLLADDPLLAPRARLLLQVPGVGPVLAATLLAHLPELGQLNARQIAALVGVAPFARDSGNARGKRVCRGGRGCVRNVLYMAALSAPRANPAVAILKERLKTAGKPPKVILVALMRKLIVTLNAIMRDQTEWKNSPA

SEQ ID NO: 240480 - protein, 414 aa, unidentified
MSETVYRRCCGMDVHKDTMVACVWPPDGQAGTVLRKTYHTFRNDLTRMRGGLKLRKVTEIAMESTGVYGRPVWNVLEGHGFRLRLVNPAQVKALQGRKSDGRDAKRIAEFLQDHRLDASFVPPPEIRELRQLLRHRLSLPPQRNEVHNQIRDLFETASLKWSWVASNLLGVSGRRIIEALIGGEDSPELLSWKLRGSLGKKEKLVRESRKGYYHDFHRLMLKTHYRHYEFLSGQVQELEAEISRRMEPYAQQIMALMSIPGVDRIVAWHFIAEMGTDMSVFPDADHCASWAGVSPGSCESAGKQMSGRTKKGNKYLRRVLAQAAWAVSHCKDGYLRALFYRVKGRRGWGKAVVAVGHKILVLAYSILKTGTAYQDLGGDYFDKLHPERTAKRLVQRLQQLGRNVVVTPPAEPTT

SEQ ID NO: 240481 - protein, 373 aa, unidentified
MPRYSTAFGMDVHLRSTTVCALDAETGEAVTRRFRGNPWGEVAEWMSGFPGPSLAAYESGYLGFAPQRELSALGVDCVVAAVSKVPRSAADLSSKNDRNDAARMAKAILSHDVTPVWVPSPEIEGLRDLAAAHDAATARLAAAKQRLLAFLARRGYVYGGTTPAGNPRKYWTYGFLRWLDGIHPADDGGIRALAALRNEVEAADETREALLAEYRAAVAAGPLSAEVEALQSIKGCGFALAAAFASEVGDFSRFRSGRQVTSYFGLAPKQRSSADSVRLGGISGAGNALVRKLAVEGSWCYAQAGHQPKLMPKGSGVPLEIRMHGRKGSERLLRRREEMIARGMPQAKANAATAAELVRWLWALGTMCREGAE

SEQ ID NO: 240482 - protein, 447 aa, unidentified
MSEKLNSEIAVIGIDIGKNSFHLVGQDRRGRIVLRQKWSRGQVEARLANLPPCLIGMEACTGAHHLSRKLQALGHDARLMPAKYVRPYSKGEKNDYRDAEAIAEAVQRPTMKFVATKSADQLDLQALHRVRERLVGQRTGIINQIRAFLLERGIAVRQGLHFLRAELPAILAKRTDVLSPRMLHVIEDLAGDWRRLDERIDALSDEIMTLARQDKGCERLMTVPGIGPIISSAMVAAIGSGDAFSKGRDFGAWLGLVPKQMSTGDRTILGSISKRGNRYLRTLFVQAAWVVLVKIKPEGWERYGLKSWIEAAKQRLHRNVLAIALANKLARIAWAVLHKGRAFECVKTKGTRLRVRQDQCDSAPTCLMLAPCSGPSRRGLQTLAQVEKSSRRPALTAPARVARLHAQAGTKERPARHEQRNSAKQEIIQIAQRDLPAEACERIDEME

SEQ ID NO: 240483 - protein, 412 aa, unidentified
MKVAGIDVHKKVLMVVVVDARMPEEKPARRRFVTMPSELHRLLTWLREQGVEEAVMESTAQYWRSVWMELEPHMRLHLAQAFSNRAPSGRKHDFKDAERLVRRLIANELILSFVPGGEQRIWRSMTRMKLQLTRDRVRLQNQIECLLEEMRIKLSIVVSNLLGASGLRILHALANGETDPKKLAQLGGERLQCTDEQLVDALTGRAQPVHGEMLALQLQRLQLIDQQMTRLNSMIAAAMKPQQDAVIRLAEVPGLGVDSAQQIIAEVGAQASTFPSAAELTSWVGTCPGKDESAEQNHSSRSAKGNKYMRRVLNQAAHAAVAKKGSHFQAVFRRLLPRLGYQSAIWAVAHRLCRLVWKILHEGVRFIEQGVQVGPREKKKRAQMLARALRKLGYEVTITPINQVASTAAIQI

SEQ ID NO: 240484 - protein, 346 aa, unidentified
MDQIIRIGMDTSKHVFQLHGVNAAEEPVLRKKLRRHDLEAFFTKLPPTVIGIEACGGSHHWARLLQSLGHEVKMLPPQFVKPYVKRGKNDAADAEAICEAMSRPTMRFVPVKTADQQAALMLIGLRDRLIRQRTQLTNAIRGYAAEFGLVAAKGICRIEPLLERIKADDTLPALARELFVVHGMEYAQLQAQLEEVEDKLMAWHRADECSRRLARIPGVGPIGASMLVMKTPAPGAFRSARHFAAWLGLTPKDHSTAGKVRLGVITRAGDEALRSVLVVGATAVIRHAQRSQARVAPWLVKLLKRKPPKLAAVALANKIARIAWKLMVSGEHYAARVGPVGLGAAA

SEQ ID NO: 240485 - protein, 415 aa, unidentified
MKKHSNSPKKSESRSKRAKLRGPVQQDTKEVLAELVGKLREKLDPKVGAASAGEEHQQGRPRPNLDRLTVGVDLGDQWSQYCILGLEGETLAEGQLRTTKQDVSEFFEALNAARVVLEVGTHSAWVREVIHSYGHEVLVANPRLMEGSKRRKRKNDRIDANKLARLGRVDPQSLHPMQHRSAEVRQDLVMLRARDALVAARTELINATRGLVKSMGTRLPKCSSPSFAQKVEEAVPAEIREALLPLVRMTAELSDCIKGYDEKIEKLASEKYGHTALLRQVKGVGPITALAYVLTLENPERFVKSRDVGPYLGLVPKQEDSGENQPQLGISKAGDTMVRRLLVGSAQYILGPFGPDTDLRRYGLRLCERGGKNAKKRAAIAVARKLAVLLHRLWASGEVYEPLRPALSSPITAAA

SEQ ID NO: 240486 - protein, 336 aa, unidentified
MEIATIGLDLAKQIFQIHGVDQAGDIVVKRRLRRAQVISYFASLPPCLIGMEACATAHFWARELRSLGHEVRLMPPQYVKAYVKRGKNDAADAAAICEAVTRPSMRFVPVKTEEQQSALTMHRARELLVRQRTQLINAVRGHLAEFGLVGAQGPWNLPLLLASMQEDRRVPELARQVLQLLAAQLDEVGTRIAELDTRIMAWHKTNPVSRRLVTIPGIGPLIATAIAATVPDPDVFRGGREFAAWLGLVPRQTSTGGKQRLGRISRLGDKYIRQLLIVGAQTVLLRSKVARSDAWIQDLLARRPRLVVAVALANKMARIVWAVMAQGQNYRQAVPA

SEQ ID NO: 240487 - protein, 341 aa, unidentified
MNIKRIGIDLAKQVFQLHGVDNHEKVVLKKQLSRKKMLVYFQSLAPCLIGMEACGSSHYWARELQKLGHTVKLMAPQFVKPYVKGNKNDTNDAEAICEAVSRPNMRFVSIKTVAQQDIQAVHRIRIGLVKQRTAKINQIRGLLAEYGIVESKGVNVLRNALLWILEDAENGLSADFRILLEELRQDLIALDERILTLTEKINVIAKADEDAQRLQQIPGIGPITATAIISAVGDGKQFKCGRDLAAWLGLTPKQHSSGGKERLLGISKRGDAYLRTLLIHGARAVLRFSEMKTDSLNCWLQDLCDRRNKNIAAVALANKNARIIWAILTKKTNYQMDSVTT

SEQ ID NO: 240488 - protein, 379 aa, unidentified
MYGPFIVASSTRIRFAVPLQLPRATTAVWFRRVEVGRMEVAHDDEQIIERVAALDIGKAEVVCCVRVPGLGPRARRMQEVRTYTTMTRSLLAMSDWLSGLGVTRVVMEATGDYWKPPFYLLENTFETWLVNAKDVKHLPGRPKTDRLDAVWLCKVAERQMLQPSFVPPPAFRQLRDLTRYRADLITARTAEKQRVEKLLEDAQIKVSVVVSDVFGVSGRAMMRALIAGERDPKVLADLARGPMRGKTARLEEAFTGRFTDHHAFLLRTMLARVDGIDADIKLVQGRIDEQIAPFAKAVVRLDEIPGVGVTIAQVIIAEVGLDMSRFATPAHLASWAKFAPGVSESAGRKKGTRRRRLAGSNREHQQYRARQPLPRPGAR

SEQ ID NO: 240489 - protein, 351 aa, unidentified
MDRYIGLDAHASSCTVAVLGPSGRKLQCQVLETNAKALINFLETIPKNRRLIFEEGTHSNWLYEVLAPHVQETVVVAVRQSRGPKDDQRDAIGLAEDLRIGNVKTKVYKKQGEFATLSHLARAHGTLVVDTVRSQNRIKSLMRSRGIPTGGKQVYSVNGRTQWVSQLPTQACGQANFLYEQYDALNEIRKQAEKKMLAEAQKHPVYKVIKTCPGMGKIRTAQIMPIVVTPYRFANKRQFWAYCGLGIVMRSSADWVRTQNGEWIKASIQKTRGLNRNFNRSLKHIFKGAATTIICRANKDDPLYQHYQGLLDGGTKPNLAKLTISRQIASIVLSVWRSQEVYDPKKLSPKT

SEQ ID NO: 240490 - protein, 400 aa, unidentified
MTHPQSCPVVTPTRIGVGCRGRPLTQKRKDTATVTIVAHTHPFVIGVDTHARNHALSILGMPHGEVIDDGEFSTTSAGIARAIEWVGRRTGGDLEVLWVIECSATYGAQLARSVTAAGYQVVEAARMSAADNRGVGKSDPMDARRIAASVLALRADQLRYLRKDDGPRAGLRVLLAARDHMTSERTATINALIALLRILDLGIDARRPLTGKQVIEVSRWRSRAEAVEVGIARAEAVRLARRVVDLDDELAQNIRTTTVLLRKSAARVLLDKPGIGPVTAAVALAAWSHDGRLHSEAAFASLAGVSPIPASSGNTVRHRLNRGGDRRLNKALHMAVIVRMTHDAETRAYVDRRLAEGLTKREIRRILKRYLARQIHRALTAASRADHLPINSTPATSFPT

SEQ ID NO: 240491 - protein, 412 aa, unidentified
MIQAVIERGAGIDVGKDFVAVCIMIGTLDEEPRIEQRTYSTMNPDLIRLREWLLEEGCTHVAMESTGSYWKPVFNILEEQLAVFLANPEEVKGRKGHKTDHKDSWWLAHLLRHAMIRPSFIPPRAIRELRDLTRRRKQLLHAATSERNRIQKVLEDANVKLSSVLADLFGASGQLMLEALLDGKASPEEMAQFARGRAKQKIPQLVIALEGHRMSDHHRSLIRFSLDHLVFLEEQIQSIDAAVLQKISLSGYQQPFELLQTIPGIQEDSAASILAETGADMSVFPSAGHLSSWAGVCPGNRRSAGKDQGGRTTRGNRWLNGMLTQCAWAAASKKDCYLKGKFWRLAAQGKKRALVAIAHNLLVVIYHVLNQGKPYQERGAPVLDERQRRKLIRHHTRCLGRLGVSAGFSTSH

SEQ ID NO: 240492 - protein, 329 aa, unidentified
MNPQLHLSVVGIDVSKASLAVCYLRQEQVQHLEVSNSKTGFQQLVKACGAQCLFVMEATGTYYLALAYYLHEQGGQVAVLNPLVIKRFIQMHLSKGKSDRKDAQWLLRYGQQQAVKIWQPDEQVLVECRQLEQVTEQLLKQKTMVSNALEALQQQPIISKQALKRLQHTLKVLTQQVQAVEAELLTLLEQRFASEMTLLCSIPGIGRKTAGMLLLFAGGFTRLDNYRQLIAMAGLSPREHSSGTSIRGKVRITKMGGGLIRGKLFMCSFAAKKFNAACQALYNRLVAKGKNGKVALIAVCNKLLKQAFAIIKSGVPYQADFTSKIPLKA

SEQ ID NO: 240493 - protein, 311 aa, unidentified
MKEPERFVGIDISKEELVVAVRPTAELQNFPNTEEGLAALVGFLQPLGAHSIVLEATGGFARAAVNTMALAALPVVVVNPRQIRDFARSVGLLAKTDAIDARIIARFAEAVRPELRPLKDLETQKLEDLNNRRRQIVEMITAEKNRLVMAPPWSQKDIRSHIAWLEKRLKRVNDDIDDLIKQSPIWRQKEKILTSVLGVGPVVTTTLLCSLPELGTLSARKLSALVGVAPFNRDSGQSRGRRSCWGGRAHVRAALYMAALTASRCNPVIREFYLRLRLAGKPAKVALVACMRKLLVILNAMIKNNTCWQQA

SEQ ID NO: 240494 - protein, 353 aa, unidentified
MASLPSPTALLKCVVGIDIAKDSFVACVGHATLSQQLHFGKETTFANAASGFAALLSWVDKQHQSGSPLWFVVEATGVYYEELAYFLADNQQLLSVLLPNKVKHFARSTELKSKTDQLDARLLCRLGLERALPAWQPPTPALRQLRALARERQVLVRQAAQLKIRAHAYQHSYQPDSRTLARLAAQQQLLVSQLKALDQDLADLLKAEPELARKLGQLTSIPGIGLTTAIVVVAETNGFILVENERQLASYAGLDVVQRQSGLSAHATRISRRGNVRLRTALYLPAVSSLRYNPQQIAFYARLRARQPSGKPGVIAVMRKLLVLCYSLWKNDCAYDPHYHPAHLAEKEVAPTA

SEQ ID NO: 240495 - protein, 341 aa, unidentified
MLYLGIDLHRKQMTVSLRDEKGDVLLRRQVSTRWSKVAEFREQLHQRLGAEEKYIAVVEVCGFHDWLVKWLRQDERCDQVLVVQPLGRAASKTDRRDAHGLSELLWVNRERLLRGERVHGVRTVHLPSEEEYAERCLTQTRERLVRRRTQTLNQIHKILRRRNLEWERPTKTFQTVKVRQWLKALPLDPVDRLAVNHLLVQWNLWDEQILAADGCIAERFRANREAQLLATMPGVSMFIAVAITCRIAPIERFPRGRSLANFLGLTPGCQSSGDTERVGSITKIGSRMVRYLLAQAIQHLLRRDSTVRAWYQRIKRPALAIGERHLGNIVVGRSSPHVSVE

SEQ ID NO: 240496 - protein, 356 aa, unidentified
MHESNTVVPAGTVGLDVSDRYTQVYVVDAAGQRVEETRIRTTPAGVQRWFTGRPRMRVVLEVGTHSPWLSRAVVACGHEVLVANARKLRLIYQNDRKSDRVDAASLARLGRLDPTLLAPIRHRGEAVQADLALLRARETLVRARAQLVNHVRGAVKAVGARLPACSTPSFPLRVAEALPDVLRPALEPLLATLRQLNTQIRQYDRTLARVAQERYPETTRLRQVKGVGPLTALCYVLTLEDPQRFRRSRAVAAYLGLCPRQWDSGERQAQLRITRAGDGMTRRLLVSAAQYILGPFGPDTALRRWGLGLVARGGRFPKQRAVVAVARKLAGLLHSLWMHDRDYVPEGLPGRVAAAA

SEQ ID NO: 240497 - protein, 340 aa, unidentified
MTITTIGLDLAKSVFQAHGVDENGNAVLVKRLHRKQMLPFFSKLSPCLIGVEACATAHYWARTLAAMGHEVRLIPPSYVKAFVKRGKSDALDAEAICEAVQRPTMRFVPVKNIEQQGILMTHRARSLLVRQRTMLANALRAHLAELGSVANPGIANLVKLAKQALADKDALPSNARAAVEILIRQIMTISGEITVLDQQLIAWHAENEASRRLAAIPGLGVITATAIAATVTDPDQFRSARQFAAWLGLTPQQHSTGGKTRLGGISKQGDRYLRRLLVVGATAVIRHIKDKSTPMANWIRKLMEKKPFRLVSVALANKLARIAWVVLTRKEAYRPYELAA

SEQ ID NO: 240498 - protein, 420 aa, unidentified
MPNIEIGVDSMVKENFIYVGIDLHKETHTAVMIDCYNQKLGEITFPNRPAAFPKLVTKVKKCNTDGKEVVYGLENAYGYGRALAVWLIDKGYLVKDVNTAISHRQAKHRGAMYRKSDSDDAKAIALATLNMLDKLPDACPNDAYWSLGQLVHCRDNIMKQRTRLVNQLHEQLCIAYPSYKQFFNDISRPTALYFWEHYPSRKYLKGKSVEDLRAELVPVSHNKCSTKTCEKILDAVASDKVKNNAYQDARDMVTLSIVSDLQHYDSQLTEVDKMLEQMYKMLGCTLTTIPGVNVITAVKILAEIGDIKRFSNANKLAQFAGIAPLHLSSSGKGKDVATKQGNRRLQATIYFLAIQMVQVSSKGTPRNSVVRAYYEKRKAEGKTSQQALICISRRLISIIYGMLKHGTEYRMPVVESAGEK

SEQ ID NO: 240499 - protein, 342 aa, unidentified
MLYVGIDVAKNKHDVTALNVPGKTVLKPLTFSNNKAGFELLDLSFRQLNQDCLIALEDTGHYAFNLLNFLHEQGYKVYTYTPLLIKEFAKSLSLRKTKTDKKDAHGIALKLLSDPNREQFQHDNRQVELKILARHIHRLKKKQSDWKVQYTRCLDIIFPELDKIVGKHSEYTYQLLTCYPNPQKRLEAGFDKLIEIKRLTASKIQDILSVAPRSIGTTSPAREFEIIEIIKHYKRLIDKAETCVNDLMAEFNSVITTVTGIGGRLGAVILAEIRNIHAFDNPAQLQAFAGLDSSIYQSGQIDLAGRMIKRGSPHLRWALIQATKACARFSPAFKAYLKTKLE

SEQ ID NO: 240500 - protein, 328 aa, unidentified
MSDDVAALFVGIDVSKARLDCAALVGKTVTQSKSFNNDSAGHERLLRWLQDGECQPGLIVVEATGGYESAVVAMLATAKLPIAVVNPRQARDFAKATGVLAKTDAVDARVLAQFGRAIRPQVRGPKSEELSLLEALLTRRRQLVEMITAETHRRGVATSPVIARQIDRHLRWLERQVQAADDDLNGMIGKSSLMQRKLDVLTSVPGVGRVTAVALLAQLPELGGLNERQLSALVGVCPFSRDSGTLRGRRVIWGGRARVRAALYMAALVASRHNPILRTFYRRLLNNGKAKKVALVACMHKLLLILNAMIKRDQMWQPAYVHPGAQVA

SEQ ID NO: 240501 - protein, 399 aa, unidentified
MRTIIGLDVSKASAKLSVAVDGKTAYDGEITLDAIGFHSLKSIIQSYGGAEVVFEATGVYSRRLEKYLIDNSILYHVLNPLVAKKRLDDGSRMRKNDVRDARGLAITEFTKELVPYVPQFSDPLYRELSDMSRYYDQQTEDIKREKNRVHKLMQLAFPNFTDEIDVDNISSLEVLRLFPHPDMIKEHTVTEITDIILSLGLRGIGQGRARTLAERLWRAHGVSYPAVEPSSFVVKQLQQQVTNIIEMTAEREVVISNMINLAKKLPEFDILLSIPSIAENTAVRLIGELGDVRRFEKRSQLNSFIGLDLTEIQSGDYVAQRHITKHGNPHARKLLYWTVVNMVSSTAQPNHIRDRYEKKRATATRKKPLLVSSMDRLIKTIHYLINTNQFYSYELARSL

SEQ ID NO: 240502 - protein, 351 aa, unidentified
MPAPARHVLGGVDTHAATHHAAVIDRSGRLLDSREFPATPTGYTQLLNWMRSKGQLDAVGIEGTGAYGAGLARHVAGQDVTVIEVPRPDRRLRRQHGKSDPIDAEAAARAVLAGTATVQPKLATGPVEAIRALRIARNGAIKAKTAATNALHAMVITAPEPLRTQLRGTSSAKLVRACLKLRPDLDRLDDPTQALKLALRSIARRAAALAVEARELENRLVSLTQAAAPATTAIFALGPDTAGALLVSAGDNPDRLRSEAAFARLCGAAPIPASSGKTRRHRLHRGGDRSANRALHIAIVVRLRYCERTKTYVARRTAEGLSKPEIIRCLKRYLIREVFTAVRADYAALTA

SEQ ID NO: 240503 - protein, 343 aa, unidentified
MTHYVGLDVSQKTTSICVVDEAGRRLWRGQCPSVPEQIERIVCQHAGGEARIGVETGPMTPWLVHKLRSRCLDVVCLDARHARAALKMQINKTDQNDADGLAQIMRTGWYRSVHVKSFEAHRARALLGARSQLVGMTTRLSNHIRGVLKTFGLLPGAMRGLPFDRRVEALLEDRADLAPIVQPMLAAWRQLREQIAVFDKAIRAIVRQSPSCRLLMSVPGIGALSVLAYVSTVEDPARFTRSRSVGAHLGLTPRQYQSGEIDRSGRISRCGDTLARTLMYEAAVVILARVKRASRLKDWALAIAKRSGMGKARVALARKLSVILHSVWRSGEPFRWSAPIAAA

SEQ ID NO: 240504 - protein, 391 aa, unidentified
MVCVGIDVAKDKHDCCILDSDGMVRADCFTIPNNMDGFKQLLQTIRNCTKKSDKIKVGLEATGHYSYNILGFLLDNDLAVYVMNPLHTNLYRKSLSLRKTKTDRVDARTIATMLLSDVDLKSYTDTAYHNEELKSLTRYRFDKVRERAKLKQSVSRLVTILFPELEKLVPSLHGVSVYALFSEYPGAKQISEAHLTKLTNLLSIASKGHYGKEKAIQIREAAKSSIGSVMPAKSLELKHTIKLIKELTSEIGEIEDSIQQIMDELHPPILSIPGVGIQSAAMILAEIGDFSNFESPDKILAYAGCSPSTYQSGKLTNCYAHMEKRGSRYLRYALYNATKYVCHWNPVFAEYLAKKRAEGKHYNVALSHATKKLVRLIYALQKSGKAYLVAA

SEQ ID NO: 240505 - protein, 363 aa, unidentified
MVNGTAVSVGLDVHKASIRLAAVRADELLDERTLPYDVEAVERVVLRWPGARVCYEAGPTGFGLYRHLVGRGIACEVVAPGSIPTKPGERIKTDRRDARKLARLHAGGLLDAIWVPDPGLEALRDLVRAREDARLDRMRDRHRTSKFVLRHDRRMPGKSWGVARRKWLGDQRFEHPAQQQAFQTYVHALDLVDARVAVLERQIEALALEGPWAGLVARLRCLRGIDTLTAVGIVCEIGNFTRFKRAEEFMSFIGLVPSEHSSGEKRRPGAITKVGNSHVRRLLVEAAWHARRPPRVGYELARRQGDQPPEVRERAWRAQQRLHQRWRRMAGRGKPHQKIVVACARELAGFVWAIATDQPLRRT

SEQ ID NO: 240506 - protein, 405 aa, unidentified
MSKAPAGQDADRVVVGMDPHKRSVTIEVMAGDETILGGGRFSTTVEGYRAMRAYVAQWSARVWAIEGCAGIGGHVATRLLADGEQVVDVPPKLSARARVFTTGQGRKTDATDAHSVALVGTRMSGLRPVIDNSQLAVLRVLVDRRRSLGEDHTRMVSQLHHLLLQLIPGGAKKDLSAAQAKALLASVRPRDAAGKTRRRVAAELIADLERIYQRKKAADKELTALLTQTGTSLLTLNGIGPSGAARLLVEVGDITRFPSRAHFASWNGTAPIDASSGDQIRHRLSRAGNRQINRVLHIMATVQLRNPTTGRSYYDRRRTDGKTSMEAMRALKRRLSDIVYRTMLGDAIHPTRAGAAAAQRTGPGGHSGAATNSSAVDSNPGIDASEKSLPGPATEQPTTPLPTAS

SEQ ID NO: 240507 - protein, 385 aa, unidentified
MSQFSGSSQAAVDYSSTIIGALELSAKKWVLAVQLPGVSRHSRHVLDALGDSLVSFIERLKARCAAAGRKITRVILTHEAGRDGFWLARFLARLGIEVHVMQPSSLPVDRRARRAKTDMIDVEMLLRTLMAWLRGEPRVCSMVPIPSEAEEEARRAYREREDLTRERRSIVNKIDGILATLGVKGYKALRRDRREQLNCVRQPNGELIPPQAKARIERLLDRLELVMKLIEQVESARDAVLKKDAPADEAEGMIRSLTELRSIGPDTATLLVREAFVRRFRNRRALGGYVGLGGTPFSSGGSEREQGIGKDGNRRVRAAMVELAWMWLRWQPDSALSVWFRARVGAMGGRIRKIMIVALARKLLVALWRYVTDGVVPEGAKMKAA

SEQ ID NO: 240508 - protein, 352 aa, unidentified
MMVLGADMHKRSHTIAAVAATTGELIDDRTIRVSDEAFLELLDWARALDEERVWALEDCRHVSGSFERFLIGCGERVVRVATKLMSEARRAGRERGKSDRIDALAVARAALREGVEHLPSAQLAGIELDLRLLIDHRERLIRSRVALNNDLQWHLHDLWPQLKLPVSALFSQKWSTRIGRRLARAEQTARVRIARDELRRLRDLTVATTALEAEIADLVAQVAPQLLDEPGFGPLTAAKLLGEIAGIERFATEAKLARAAGVAPIPVSSGKTNRHRLDRGGNRQLNTTIHRIALTRARCHPETQDYLARKRAEGKTGLEAMRCLKRHLTRRIWHLLQPPTPTENNAPQLGLP

SEQ ID NO: 240509 - protein, 314 aa, unidentified
MAATAVGIDVSKNKLDVHVLPQGESFSVSRDAKGIEEMIGRLKLVEAGVIAVEATGGFESVVAAGLAAEALPVVVVNPAQVRAFARSLGQRAKTDPIDAAVIARFAEATKPQIRALPDEDTRLLSDLVTRRAQIIQMIVAEKQRERRVTNRHLHRSIARLVKALEKEINAVDDEIDGMMRGSPRWLENEELLTSVPGVAKITSRTVLAELPEIGALDRRRIASLVGYAPFTRQSGQWRGKSFIAGGRTHVRSVIFMAAMTARRCNPVLKAFYERLIAKGKPKMVALVAVARKLLTILNAIVRNRKPWQPEAIPA

SEQ ID NO: 240510 - protein, 314 aa, unidentified
MQATVVVGIDVSKRTLEVALSSGGGFSVTNDEDGIGELLARLRPSGVALVVLEASGGYESPAYLALWEAGVPTALINPRDAYHFAQANRQLAKTDQLDARGLCEFGLRMQPEPLPPPEAADEELKALAVRRRQVIKMLAAERTRVQQAPRSVRSSVKRIVRALERELGAVDHQIEQRLRDNPRLAHRCAQLEQVPGLGPVTSAILVSRLPELGLLGPKQVAALVGVAPYDHQSGEWRGRSSIFGGRAEVRSALYMATLSAIRCNPVLRTFYRRLRAAGKPAKVAIIAAMRKLLVILNAMLKTNLPWSPPCAVTV

SEQ ID NO: 240511 - protein, 478 aa, unidentified
MKADRRWHTRKEKKEWARRLQSNDPGLDVIHPQAAGIDVGNASHYVAVRPDRDEEPVRQFECFTADLHRLADWLKSCGVRTVAMQSTGVYWIPLYDILEERGFEVYLVNARHTKNLPGRKSDVQECQWLLKLHTYGLLNNSFQPASQIRVLRTYWRQRAEHVQAAASCIQRMQKALTQMNVQLANVISDLGGLTGQLIVRAIVRGERDPQKLAALRDRRIQASPEEVAKSLEGNWRPELLFLVKQEVDTYDTYQKRIAECDEQLQQQLASLASVAPGVATPPVTQLQGDEQPKKSKAKRRKLAKNAPQFNLQQELQRVAGVDLTRIDGIDVMVAQTILAEVGLDMGRWETEGNFVSWLGLCPDNRITGNKVVGRGTRHVVNRAATSLRMAANALLRSQTYLGAQYRGLRTKLGAPKAITAMAHRIARLVYRMLKYGQRYVDKGAEYYEQRFRNQQLQFLRKKAAQLGFQLTEHEARTA

SEQ ID NO: 240512 - protein, 347 aa, unidentified
MLIIGCDLHTRTQQIAMLDTETGVVVEKRLEHENGGAKRFYEGLQEPALVGMESTGYALWFAALLAELGHELVVGDAAKIRAMEPRKQKHDRRDAAHLLNLLVRGDFPRLWLPSVEERDVRVLLEHRHQLVELRTRAKNGLQAIALNYGLARRSRLWSERGQAELQKLPLREGMARRREDLLRLLAQLDSWIHELDQRLKREAEEREAARRLMTHPGVGPLTALGTVLVLGPVERFPDARHVTSYVGLIPQEESSGGHQRFGHLTKQGNRLLRFLLVEAAQTASRFDPGLRRGYRRLAFRKGHALAKVAVARKLLIRLYIMLRDEIDYAEFVRRGSHAGMLGDVALV

SEQ ID NO: 240513 - protein, 320 aa, unidentified
MMAQNEVVVVGIDVAKDKVDACIRSLSQRQTFPSTAEGQRALIRWLRKHKVGKAVMEASGGYEREWAKALRNAKIEVRIVDPKRVRSFAQSAGRLAKNDAIDAEMIAWFAETFDEARGQAYDAAREELVQIVNARQALLEQQTQMQNRCEHTVPIPVRKMHERLLKAIALEVTKLEAVIAALTKASPHFAETAEIIESVPGLGKITSAGLIAAMPELGQVSNEAISALLGVAPYDDDSGKRQGERQIKGGRRKVRNLFYMACMGAATQHNPVLKTFYRRLIAKGKKPKVALVACMRKLIVILNIMIARREKWDASRYAVG

SEQ ID NO: 240514 - protein, 368 aa, unidentified
MKNITTYVGVDAHKKDLFIAMLVGDHTTPVTWQLANEPNAVRRLVRKLEREAPGPVRMCYEAGPCGYALQRQVTTPRVSCQVIAPALIPRKPGDRIKTNRRDARKLAELLRAGLLTEVRPPTPEEEAVRDLCRARDDAREDLQRCRHRLGKLLLRRGLHYSGRNWTRAHRQWVDSLQWTQPAERVVVDDYLLAIDQLETRLLEFDARLGEIAATAPYREPVGWLRCFRGIDTLTAILILAELHDFRRFHSPRALMAYLGLVPGEDSTGEKQRRGRITRTGNALVRRLLVETAWHYQHRPGSGVALTRRRKGQPGRVIAIADKAQQRLCRRFRRLAEHHKPAPKIAVAIARELAGFLWAALQPVPVPAK

SEQ ID NO: 240515 - protein, 433 aa, unidentified
MLKLNYMSTLFVGIDVSSKTNAVYAMDFEENKYISSSFGNNQPGADQLVTMIAQCMHKHKNLDTVLIVLESTSVYSVHISNFLSTSEVLMPYKPYVFCVNPKATSNYRKSYIGMEKTDPTDAYLIADFGRVGRTKKLEPWRGGQFIALKRLTRHRMHLSECITREKTYMVSNLYLKFSELQLLEGDDKPFGSLYGATSSSVLTEFLSPQEIIDMPEEELLTFLAGKSRNRISDLSKTSELLRKAARDSYRLDKCMYEPLSISLASSFNCIHAYQKEIKLIEQAIEKCINGMNPNALLILQSIPGIGPIWASGILSEIGDITVFHSSDALAKYAGLYWPKGDSGDFTSEDNKMSKAGNPYLRCYLGEAANSVRKHIPEYADFYARKYAEVTKHQHKRALALTSRKLVRLVFGLLVKNQLYTGEKLDTEYNIESN

SEQ ID NO: 240516 - protein, 416 aa, unidentified
MSLALPEALFFTRIDWAAETHAVYVLDAGGKIAAEFTIGHSADGIAALVRRLARYGIPGDMPVAIERPNGRLVDLLLEAGHPVVPVKPNAIKTWREGEVLSGAKSDAGDAAVIAGYLRLRQHRLRTAAPYSDETLALRTVVRSRGDLVEMRVAATNQLSALLEAHWPGARAIFADVESPVSLKFLTRYPTPAAAAHLGEKRMAAFLVKHGYSGRRTAAELLARLRAAPAGTNRESLTEALRDAVLAAVGVLAALNAAVKNLDRSVAAHLGEHPDGAIFTSLPRSGQVNAAQVLAEWGDCRQAYDGPDSVAALAGCTPVTSQSGKHRSVQFRWACNKRFRVAMTTFADNSRHASPWAAKTYSDARASGKDHPHAIRILARAWIRVIWPCWLEGIPYDPARHGAAAALARQTAQPIAA

SEQ ID NO: 240517 - protein, 324 aa, unidentified
MTSIASSDYTWVGIDVSKSYLDVDCLQSDPLARYANDEAGISELQRVVLNLEHPAIVCEASGGYEPERVLALSAAGVRVSVVNPRWVRELARALGQPAKTDALDAYSIARFGQIVCPEAIGLATELEQSIEALVKRRQQLVEMLSAEKNRRAQLKGLMRDDVEAHIDWLKEHIERLNEPIKSLTAEHPPWRDRQTLLPSPKGIGPIISIGLFVYLPELGRLNRQQIAALVGVAPFNRDSGKYRGKRRISGGRAEIRSLLYLAAVVAIRHNPPLRAYYQQLRERGKLKKVAIVACMRKLLTCLNAMVRDDEPWEDGKVSAFFQPT

SEQ ID NO: 240518 - protein, 422 aa, unidentified
MVQVETTKEKERRKAMISVGIDISKEKFTICALEQGSKIIWKPFDVSLNKRKVEEFLEKLEKLKKKVKITMEATGKYHLPILYELKDRGYFVAVINPLKMKQFCRALNFRKAKNDNIDAKQIAEYGLMYWKELEEYKIDEDNYMVLKELNRSYQHYMELRINQINFIDQTIHQTFPGIKKLIPHNSGDFSKDKLLDFLEKWWHKGLVLEKTEEEFIEEYKTWAKEKRYHPNANKAKAIYKLAEDSISTQPSHNSKIETNIREGINLIKQINQILNSILSQMIEISEPLEEYQEAKKFSGISEKLAVQIVAEFGDLSKFKNKKSLISFIGIDAPPYESGNFKADQRKISKRGNTILRKVGYQAMKCMMSAKDPENEIYKYMIKKEKEGKAKKVCKFAGLNKFLRIYYARVMESKAEKKELKAA

SEQ ID NO: 240519 - protein, 346 aa, unidentified
MNRMNYVGLDIHKKSISCCVRRADGTIIQEITITATRQALDEWMQQLPQPWMAGMEATLFTGWIYDHLESCGATVKVAHPAMLQAIAAGKKKNDRVDARKIADLLRCDYFPECHMAPREIRDRRRVLRYRNLLVRQAVQMKNKVSGLLMEAGVPYNQQKVHQKKYFAELLQKQKKEMPPSMPELLRLSRSTVEALTGMQRQLIRALERDALLAARVERLASIPGVGRVVALTWALEMGDIRRFASVKKAVSYCGLCGAEKSSGGKTERTPISKQRNKHLQTILVEAAKLAPRWNAELALVYEREKQKGNRNRATLAVARKMVAYLMAVDREQRPFDTQLRVAGNAA

SEQ ID NO: 240520 - protein, 365 aa, unidentified
MEKLLKQAIGIDCAKDDFVASHGKYFENTEIQITSTQTIKNTEQGFVKLESLIKKLAVKDMPINVVMEATGVYHEKLACFLYDKGYPVSVVLPQRAKAFMKTLKTKTVTDKESSKGLTVMGLEKKLDLWQKPDKIFNVLKQLTREREQVQKSLTQVKNQLHAEKSGAWPNAKSINRMKQLQRVYNNQITEIENEIKNIIKESPALQKKINHITTIPGVGFITAATVIAETNGFNLINNKKQLVSYSGYDVVEKTSGTSVRGKTHISHKGNRHIRRAMHMPALTSIRHTHLNKELFKRLVSKHGIKMKGVVAVQRKLLVLIYTLWKKQEDYDEAKYLCIKIEQPKKTALIELDRVRSLESIDSLQR

SEQ ID NO: 240521 - protein, 412 aa, unidentified
MESGYRLIVGIDWATETHQVCVLNSQGRLLEQRRVEHRAEAIAAMIDRLIGLAGGDPASIAVAIEVPRGAVVEALVERGLHVFAINPKQLDRFRDRHTVAGAKDDRRDAFVLADSLRTDLSAFRRIHLDDAWTIQIRELTRIEENLNTEITRLANQLRDLLLRFYPQLLRLCPAADQPWLWALLKLAPTPAKAQKLRRSTIQRLLHQYRIRKWTADQVRTELRTAPLSVAPGVTEATSAHIALLLPRMELLMAQYKLCSKAVQTALNERVSAEEQRREHRDAEIILSLPGIGRVVAATMLAEASQLLAQRNYHALRTLGGVAPVTRQSGKRWAVRRRYGCNRRLSNAFYHWARISSQCDPRAKHHYQTLRQLGHSHGRALRGVADPLLALFGAMLRDQTLYDATRAHAPIAA

SEQ ID NO: 240522 - protein, 447 aa, unidentified
MQSKDLNSGIFEILHPNAAGIDIASQMHYVAVPTDRDEQSVRKFGSFTEDLHDMARWLKLCKIDTVAMESTGVYWVQPFLVLEEYGFDVYLVNARHLKHVSGRKSDIKDCQWIQQLHSYGLLNKSFQPEDLMRELRTYVRQRKNLTQGYSTQVLLMQKAFDQMNIKLHNVISDITGKSGLLMIDAILKGERDAQVLAELADRRIKATKEDIVKSLQGIWRQDNLFELKQAYELYLVFRDKIVDCDKQIENVLKQIVDQSNETPNSSQKRKANGKNKFNFNASDYFKVISGVDLTEIFGISELSVAEIVSETGTDMTKWVTEKHFTSWLNLAPNTRTSGGKRLKSKPIKKKNKAGQAFLIAASSLKASNNWLGEFYRRIKAKSGSPVAIKATARKLAIIFYRMLKEKVNFSPLPIEEYNQYFKERKLKYINKQATSYGFKLVPLELVS

SEQ ID NO: 240523 - protein, 430 aa, unidentified
MSSANSANEKPIAAFVGIDWADQKHDIVLCAAMGNAQADHRSISSDPDALAEWALEMQGRFGSQGRILICLEQSRGALIYFLMGYECFDLYPINPKQLSSYRVAFRPSGAKDDPVDGKLLCQLICLHHQSLRPWRPDDEATRKLALLCEKRRKAVDTRTALSNQLKSELKLFFPLALTILDNDLTTALAGDFLLAWPNFDSLKKASVNKLRKFFYAHQSRSEQKIQERLKCIEAAQPLTRDSAIIETSTIAVRMLAQQLKDLVPFIALYDRLISELFDSHPDSALFNNLPGAGKQLAPRLLTAFGSHRERFQCSLEALTFFGLAPVTEQSGKSKRVHFRWACPKFLRQSFHEFAAQSVRSSPWAASFYQHQRAHGKGHHAAVRALAYKWIRILYRCWKTRQPYNPELYLTALLQRGSPYASPVNNSTKKI

SEQ ID NO: 240524 - protein, 374 aa, unidentified
MSSYENITFVGLDAHAKNINVAVILPGSGEVDEQWQITHDERSLRRLSRKLLKMAPGEVHAVYEAGPCGYALKRNLEALGLCCEVVAPSLIPVKPGDRVKTDRRDACKLASLFKADLLTIVHPPNEREEALRDLMRAREDAKKDLLSARHRLSKMLLRYGLQFLETKNWTLKHRAWLKGLRFEQAYAQQVFDNYLLSIEQVEERLKMLDAHIEEAAADDAYAEQVGWLRCLRGIDTVTAMTIVAELHDFRRFAHPRDLMAYLGLTPSEYSSGGRTKRGSITKAGNSHVRRVLIEVAWNYRHRPAVTAPLRKRRAGQPTAVIAIADRAQHRLYKRYYRLKEGHRKPHNVVAVAIARELVGFIWAVLHHQDAAQVL

SEQ ID NO: 240525 - protein, 371 aa, unidentified
MKSILSVGMDVHKNSFSLCAYDGYTGEIVSESTFASDVKLVIKFIEALKSRYENDVEIKCGYEAGCLGYSLYKLLTARGVDCVILAPTTMQVSAKNKMVKNDRMDALNIAKNLASGSYKTVYIPDEEDVEIKEYIRMIHDFKKELKRVKQEICAFVLRHGYQYDGKSKWTIRYMNWIRELEMSEIQRETLNEYIAEMENLNDKIDRFMNRINEIYQSERYHEKVSKLRCFKGIETFAAMTIQVETADFERFPNAKAYASYTGLTTGEHSSGDKNNRIGITKQGNTVIRKTLVECAQALVKGNVYAKKSQRLKSRQKGMDVNIIVYADKATERLKKKYQKLIERNVPRNKAIVAIARELACFIWGMETGNIH

SEQ ID NO: 240526 - protein, 348 aa, unidentified
MVVIGVDSHKHTHTVVAVDEAGRKLAERTAPATADGHLELLGWSRTWPERTWALEDCRNLTRRLEADLLRAGEAVLRVPTKLMAGARRSAREPGKSDPIDALSVARAALREPNLPVARLDGSERELRLLVDYREVLISDRTGHQSRLRWFLVELGIPEPPARKLAVRVVLTGIGQALAGRTEPCARIARDLVARISEMTGAIDCLARQIGDLTSTVSPTLLELVGCGPLSAAKIVAETAGIGRFRSRAAFAAHNGTAPIPVWSGNLVRHRLNRGGNRQLNAALHRIAITQLRCPGPGQAYVAKRLAAGDTKTEAIRALRRRLSDEVYRRLQADEAARAGLESVELVAA

SEQ ID NO: 240527 - protein, 354 aa, unidentified
MKELIRQSIGIDCAMCEHVAGFSTMDADRTVSHVSGMTFKNGESAFKKFEKWIKKQNPGPNLVIVMEATGVYHEKLACYLTERNYFVSVVLPNKAKYFAKTLDSKTVTDKISAQSLATMGLEKKLIKWEKPSELLNELRQLTRERDQIVHERSQIKCQLHAETSGAWINSSSVKRMNQRIKFLTKQVKEIELQVRELVKNDPDLSAKINRICTIKGVGPLTAVTVVAETNGFKSIRNKKQLVSYAGLDVKQHSSGISVNKKSRISKHGNKYLRKCLHFPALAAIRNDKSQKELFVRLVSKHGIKMKGAVAVQRKILVLIYTLWKNETVFDPEYELKKSRNELGQSRKTALKELA

SEQ ID NO: 240528 - protein, 411 aa, unidentified
MKRVIGMDIHRTFAEVVFWEDGRLRQHGRVDMTRSGLEGFGRGLTKEDEVVVEATGNAMAVVRVLSPYVARVIVANPLQVKAIAHARIKTDKIDAGVLASLRAADFLPEVWVPDAETERRRRMVARRNQVVRHRTRVKNEIHAILAAHLVPPCPHAELFNGPGRAWLAKQALPDDERAAIERHLRELDRLGEDLAVLDHEIGAAVVDDPAVRRLLTIAGMNVTVAAGLVAAIGEIGRFSSPQKLVSYFGLNPRVRQSGLGLAQHGRISKIGRAHARALLVEAAWAAAKAPGPLHAFFVRIRGRRGHQVAAVATARKMAVLVWHLLTKETDYLWARPALVAHKVRALELQAGRPMRKGNQRGPAYPYNVKALRAQEMAIAEQAERAYEQFVKQWREQPARRRTGAAPAAGSS

SEQ ID NO: 240529 - protein, 343 aa, unidentified
MSITTIGLDTAKSVFQIHAVDEAGKAQIRRKLRRSELIPFFEKQDACRVVLEACGAAHHWGRVLSCLGHDVKLIAPEAVKPFVKKGKKNDAADAAALCVAASRPDVKFVPIKNTGQQDILALHSARSLLVKQQTMLANAMRSLATEFGLTAPKGMDKLEDLAALVNADKAFPSRARQAFTELFLQCRALDESVATFEAEIVAHARHDETARRLAMIPGIGPITASLIAVTVVDFSVFKSARHFAAWLGLVPRQFSTGGKTRLGKITKAGNKEIRKLLVLGATSMVHRAPKWNSTVGVWTRGLLERRPVRLVTVALANKIARIAWALMTRKEVYHAKGRIAAVA

SEQ ID NO: 240530 - protein, 409 aa, unidentified
MQTVADRPEAPNAIRNDLGAIFVSMELSRSTWLITSLLPGGGEKMSKHGMPAGNVGALLARFAELRRKAFTRTGESLPIIVIQEAGLDGFWIHRVLQQEGIEDHVVDPASIATSRRRRRAKTDRIDGETLLRALLAYKRGEPRVCAMVKAPTVEEEDRRRLCRERKALIEERVLHVNRIKGLLFSQGVSGYAPLRRDRRRRLDELQTGDGRPLPKHLKTQIGRELDRLELLLEQIKAVEAERDALLGARQVATPTPAAMLLAIKGIGPEFAAILWSEGLFRHFDNRRQVASYAGLAPTPWQSGSVDREQGVSKAGNPRLRTTLIQLAWLWLRNQPQSALALWFKDRVSRNGGRLKKTTIVALARKLLVALWKYVTAGVVIEGAIVKSAWAHTAGKRLSAILQPRERRGF

SEQ ID NO: 240531 - protein, 423 aa, unidentified
MDTMHERCAGLDVHKAMIVACVRLTSGGKVNRECRTFDTTTAGLLALLAWLTESGCTHVAMEATGVYWKPVWNILSDGAFELILANAAHIKNVPGRKTDVNDAMWIADLVACGLIKASFVPEQAIQELRSLLRARKQLTREQTSHIQRIQKTLEEADIKLDSVISDILGLSGRRMIEAMIAGVRNPAKLAELADRRIKASPKELYDALHGRLTDHHRFLLRLYLKQYDALDDAVAEIDRQVDASVTRMDEEAKSGRPPFRSLIALLCTIPGVSTLGATVTLSEIGSDMSRFPTAGHLLAWAGLCPGQNESAGKRKSSRLRKGAPWLKTLLVQCAWSATRKKDSYYKAQFNRLRAKRGPKKAICAVAASMLTAIYHMLKDGTEHRDLGAAYFDRRSTKVKTNRLVAQLTKLGFKVELQPLAEAA

SEQ ID NO: 240532 - protein, 315 aa, unidentified
MSNVRYFAADVSKCELVIAVYPEAAEVVRVANTAAATTAWLDTLPAGSVIAMEATGTYHRRLAALAHERGLMVYVVNPRDVYYYARAMGARGKTDVTDARLLARYVAHEQAHLHRYVPPSPRSEQLTTLLERRALLVRTRQALKQSLAELPALDAEKPTALHALEALIKAIDRQLAQLNGSDPPTAQLVTRLRTISGVGPLVATLLAALFQRFAFHHADALIAYVGLDPRPDESGQHQGRRRLSKRGHPEWRRLLVAAAMSAARSRAWRDYVAHQRGKALPATAIHVILARKLLRVALALHKNGQEFVAPQLQTA

SEQ ID NO: 240533 - protein, 373 aa, unidentified
MGQAARPSVSADRNVARVVPSLLPKSSNSCQGYPSPHLSQGRATLEQIKSIKEDCLLEVPLIFVGIDVSKAQLDIAIRPSTQTLSVTNDKVGINSLIKHLKKLRPELVVLEATGGLERQVLSALAAEEIPVVMANPRRIREFAKSIGQLAKTDRIDASVIAQYAEAVRPKPRPLPDEVSLELRALTARRRQVVDMIVAEKNRLATASKAIKKRITAHIAYLEQQLNDADQDLHRFIENNAAWKENQEILCSTPSIGPVSSRTLLVELPELGTLDRKKISALVGVAPFPRDSGTLKGRRTIWGGRASVRTALFMATVVATRFNPVIRDFYKRLKAKGKPAKVCLIACMHKLLTILNAMIKNRTRWSENFAHQTT

SEQ ID NO: 240534 - protein, 356 aa, unidentified
MTTTETARSGHVIIGVDTHKHIHVAAVMDSIGGILATLTIATDATGYKQLLEWAAGFGKIIGFGIEGTGSYGAALTSFLRRHDCKVIEVARPDRRLRRLNGKSDTLDAENAARAVLAGFATAVPKSADGAVEMIRQLKVAHDTAVKDRTGAMITLKAMLVHASEYLRRETAGKTQKMIARHCATLRPRGLNTPEDANRHVLRSIAKRWLALNDEITELEAMLKDLVAQRAPHLLERFGIGVDTAAEILIVAGDNPERIKSEAAFAKLAGISPIPAGSGKTSGKHRINQGGHRQLNAAIYRTVIVRMRFHEPTIAYVARRTAEGKSKRDIIRCLKRYVIREVYHLVKTDPHTGVIRS

SEQ ID NO: 240535 - protein, 378 aa, unidentified
MAVMIGIDPHKGSHTAVAVGAAEEPLGKVRVRACVAQAEKLVAWAEAWPERAWAVGGARGLGRLLARQLIAAGERVLDVQPRLAARVRLLEAGDTNKTDPDDALSVAIAALRSRARREVIADDHASVLKVRAKRHRDLSRARNQVACRLHAVLCELIPGGMPKEITASQGARILEQVTPAGAVARARHELATELLAGMRHLDARRQEVSKKLAAAVKASRTTVTELFGVGPVIAATIIGDVVTVARFPSRDHFAACNATAPVEVSSGEKKICRLSLRGNRRLNHAIHMAAITQIRHKHSDGRACYERKIAEGKTHKEALRCLKRRISDAIYARLRADARAAGPGGQPGDDSVSRAAGSHPARRLFGQVVVSLRDAVLA

SEQ ID NO: 240536 - protein, 353 aa, unidentified
MYYSGIDLHKDMSLITTINENGALLSQRKVPNHKAHIITYFNQVSPQGSDHKAVVESTANWYWLSDLLTEQGIDLTLAHAKYLKAISYAKVKTDKVDSHTLANLLRLDMVPEAHQISQDLRPIRDLMRARLSLVVKKTSCRNSIHRLLAKYNLNLPQYPKPSDFALLKSKLLPEPKLQLSILEEQLQLIVRQIKTLEQSIHPKLIPNPDIQRLLYIPGIGKILAFTIYLEVDGIERFTSVNRFFSYCRLVPGADNSNRTVKHKSSKDGNKYLKMAFMEASVRAVQYFKEIKSFHQSKARKKHKHIAKALVAQELAKITYHVLESQTDFNHMFRGVPLSRHKTTKWPRLASPGA

SEQ ID NO: 240537 - protein, 351 aa, unidentified
MAMLADLVDVVIGVDTHKHTHTLAIVTAATGAVVNQATVAATTAGYQQLLALATQQPGQRIWAIESTGGYGAGLTRFLHASAEQVVELDRPKRAARRHGAKSDPLDATRAAREALGRDQLAQPRAAGHRAALQVQLTARRSAVQATGDAQRQLHALVTAAPETLRGRLRNMATPQLVTACRRLRQHTNWDTETTATAASLRALARRIQLLDTETAQHTRAITTLVRAWRPELLTRTGVGPIVAASVLCAWSHAGRCRSDAAFAMLGGAAPIPASSGQTMRYRLNRSGDRQLNQALHVVVMTRLRTDPATRAYAERRRAQGKTNREIKRCLVRYVARQLYRLLETQPALDAT

SEQ ID NO: 240538 - protein, 345 aa, unidentified
MKKIIIGIDFSKETFDATLFDCRNSELSEALQSAVHEKFTNKKEGFQAFLTWIKSFVKKINSDELLLCGEKTGKYSLALSNFLYAKGYSIWLDSGLRIKRSLGISRGKSDKADSLKIALYAYRYQDMAVCYVPLSKNVSRLKELFLYRQHLVSQMKAMAVRKNVTDDFKKELGDVRFIVDSATEIIQQIKATIKKCEEKMQEIIEEDEELKTTHDSITSVKGISLINATAFIAYTNNFKDFGGNAKKIATYWGVAAFAQESGTSVHKGARVSNIASKMLKSLLTQAARIAVRWEPKFSQYFEHLISRGKHQGVALNNVKNKLIHVITALAVSKEKYNQEYKCINR

SEQ ID NO: 240539 - protein, 409 aa, unidentified
MERIIERGCGLDVHKKSIAACVRLPGAEGQRTQEVRTFGTTATELLALRDWLQGHGVTHVAMESTGVYWKPVFYVLEEVLTCVLVNPVHMRQVPGRKTDVQDCAWIAQLLEHGLLRGSFVPPVPMRELRDLTRYRKTIVQERSRAINRLHKVLEDADIKLASVATDVLGVSGRAMLDALVGGTTDPDTLADLARGALRKKLAALRQALSGRFRAHHAFLLSQILAHIDYVEEAIEAISQQVGLLLAPFVEELERVTTIPGVKQRTAEVVIAEIGVDMSVFPSAGHLASWAALCPGNNESAGKHRSGKTRRGNPWLRTALTEAALGAIRHGRGALAARYRRIMRHRGHKKAVIAVAHAMLVAIYHMLTRHTPYQDLGDDYYDRRHAERAKHRALQTLERQGYRVSLEPAV

SEQ ID NO: 240540 - protein, 323 aa, unidentified
MSPIIGIDVAKRSFDVAIDLTNGKHRTKAKLSNDAKGFQALQAWLQTHAQPDSWIAMEATGTYHEALAEFLHERDYRVCVLNPAQTAAYARSQLSRVKTDRSDAKLIASYALRHREQLRRWQPDPPALRQLKALVRRRQDLQRMLQMERNRLDVAPIGVRDSIHSHLADLQAHIARIEQSIDDHIDQDPTLRGQRELLVSIQGIADTSAALMLAELGDVRRFADASAVTAFAGLNPRLQESGTSKGQVCISRTGSPRLRAGLFMPALVAMTHNPVIRALKQRLSERGKAGKQIVCAAMRKLLHIVYGVLKSNTAFDPKKALAC

SEQ ID NO: 240541 - protein, 339 aa, unidentified
MSHNVIGLDIAKSVFHLYTIQADGKILKKMLRRQQVLEFFANYPVSLIGIEACGSSHYWARELIALGHEVKLLNARHVKAFVKGNKNDFNDAEAIFDAVSRPNVRTIAIKTMEQQDIQLIHRIRQEAVKRRTALVNQIRGLLGERGIVIGQGIHQVRKHLPELLEDAENALTTLSRAAFAEQYERLLELDKEIKRYDQKMGELCKANELSKRLAEVPGVGPMTATIAAADLGEGQHYTNARHYSASLGIVPRQSSSGGKSVLLGISKRGNCYLRSLLIHGARAVLRTCHNKEDKLSLWLQKLIKRRGFNVAAVALANKNARILWALANKNEHYEMPVSA

SEQ ID NO: 240542 - protein, 416 aa, unidentified
MSLALPEALFFTGIDWAEVTHAVCVMDAAGKIAAEFTIEHSAEGIAALIRRLARYGDPAGMPVGIERPNGRLAGLLLEAGYPVVPVSPNAIKTWREGEVLSGAKSDAGDAAVIAEYLRLRQHKLRVATPYSGKTKALRTVVRTRDDLVAMRVAATSQLSALLDAYWPGARAVFADVESPISLAFLSRYPAPALAARLGEKRMTAFLVKNGYSGRRPAAELLARLHAAPAGTADETLTEALRDAVLALVAVLTALNTGVKDLDRSAAAHLGEHPDGKIFTSLPRSGQVNAAQMLAEWGDARQAYDGPDAVAALAGCTPVTRQSGKHRDVTFRWARNKRFRKAVTTFADNSRHASPWAAKVYADARASGKDHPHAIRVLARAWIRVIWPCWLTGTPYDPARHGAAAALAERASSQFAA

SEQ ID NO: 240543 - protein, 399 aa, unidentified
MYFVGIDWADTKHDILVMSGDGRELDNFTIQHSQDGFETLGTKLLKHDNNPENFCCLIETKHGLLTQYLLENNFTVYSVNPKLVDARRKASGAKTDFIDAKILANMGRSELHDLHKLEPDSEHIQELKVLTRDQDALIQESTRLTNRLISTLKEYYPVALELFSKITLPISLAFLRKYPTPKQARKASRDDIYKFLKKQNHPNPLSKANEIFTKLQRRNLEGNRAICSAKSKFLFTILDQLEPLLEHIKEYDREIEKLFKSHSDSKLFESLPGAGKRIAPRLLAEWGDDRSRYADASVVQALAGTSPVLHQSGKMRIVKRRHSCIKPFRNALHQFALQTARWVPWARDYYLRKRKEGKQHHEAARALANIWVRILYAMWLNKEPYNENKFLKAREKHAA

SEQ ID NO: 240544 - protein, 349 aa, unidentified
MNFYTNTHPYYCGIDLHTRLLYVCIIDNENNILVHKKIDDSPDKLLALLTPYLGNIVVGVECMHCWYWVSDFCEAHNIDFILGHALYMKAIHAGKTKNDKIDALKIAKLMRGGNFPLAHAYSKEHRSIRDALRRRTHIMRMSAQLKAHVASTVSQYNLPALETRLDLRNSPDREKMRHFFPDEAVQKSMDLNLNIIETMVSELYKIEHYVKTQAQTHCATDLHILKSFPGIGKILALTILYEVGDIKRFPSVQKFASYSRLVKCKAESAGKTHGTQGNKIGNAHLKWAFSEAAVLYLKGNDNAKRYLAKLQKRMSKAKALSALAHKIGRCTYFMLKNRQVFDEERFLNG

SEQ ID NO: 240545 - protein, 361 aa, unidentified
MKRSSKYVGLDVHQATTVSTVRDDAGRVLARTVVPTEAEALREFFRGMRGPIHVALEEGTQAQWLHDLLVPVVHRVVVCDRRGKSRQGNKGDQPDADELSDLLRCGRLRAVYHETGDRAMLKELARTYTNLVEDSTRVMQRLKALFRARGIRTSGRSVYQREQRADWLRQLPDAGVRFRATVLYQELELLQELRPNAKAAMLTEARRDSAWRVLRTIPYLGPVRVAMLLATVQTPWRFRTKRNLWAYAGLAVVTHTPAEYELDGQRRVRRRRRAPLTRGLNRNHNRVMKDVFKAAATAAATRVGPLQDWYHGLLTRGMREELARVTLARKLAAITLHLWKRGERFDPTQLTVQAVHAHQAR

SEQ ID NO: 240546 - protein, 382 aa, unidentified
MAKRGVARSSVLITEALAGNVVGSDPHKRTVTTTVLDGRGGVLGTEHHKVSGDGHRAMEAWVGSFGPVVRWGVEGAGSWGRHTAMFLCTRGYDVRDVCPNRTNERGKARQQGKSDSLDSERIARETLAHPLLPLAFKRSSAGEAGADEDHELLTLWHGARRSVLTSRQHLVNEAEFLLDALPEELRCRLPDSKAVRPRLAAAARLARRKNLDAATAVRLGLLRDHHQTVVALDAKERDVTRQLTVLVRASGSTLDQLCGLSTRSVAELLVEIGDPRRFTEGGFARFNGTAPLPASTAEGPGEPVRHRWNPAGNRRVNAVLHRMAVTQLRCEPRAQAIFADARRRGHSKKEARRVLKRHLSDVIYRRMIRDQAAREERTAGAA

SEQ ID NO: 240547 - protein, 296 aa, unidentified
MKVGIDVSKLTFDVTWGNKESLQHRCFDYNEEGIKALLDLLPNDAHIVMEATGVYHSRLALRCYEADLKVSVVNPVAIKRFGQMLFKRAKSDKTDSALIHQFAESQNPDLWVPSSEAINELRQAIGWVDDLIRERTVANNREEAVRHNARPSQFVLGEIKDFRKYIKVRAKKCDQYLKAVVKKHFPELYNRLQTIPSVGEKTAIDMIVITEGFTKFTNDKALAAYVGVSPTTYSSGTSVHGRGGISRASKGRSRQYLYLCSWTARRINPGCAALYQRMSEAGKPPKVISRDLCIKA

SEQ ID NO: 240548 - protein, 339 aa, unidentified
MNNSVIGLDIAKHIFHLFTQGTDGKMIKKKLKRSELLAYFVNYPVSIIGIEACGSAHHWARELTKLGHEVILLNARYVKSFVVGNKNDFNDAAAIYDAVTRPNKRVVAVKTVAQQDVQLVHSLRKGLVDKRTALVNQIRGLLSERGIIINQGIAQVRQQLPLIVEDAENGLTALSRELFAEQYEKLKAFDDEIKAQDQRINRLCNANELSKRFLAVPGVGPVTATMVAADIGDSGKGYESSRDYAASLGVVPRQHSSGDKQVYLGISKRGNRYIRTLLIHGARSVLKNCSKKTDKLSLWLQSLVARRGFNKAAVALANKNARILWAMANKNKDYDALVA

SEQ ID NO: 240549 - protein, 326 aa, unidentified
MKVIGIDVSKAKLDCVWIRDLAGMKVKSKVQANTPAGHQALIDWAMKQTGEAIAGLHFVMEATGVYHEALAYALHDAGARVSVVNPARIHNYAKSLGSLTKTDKKDSVIIARYGMTQSLRLWVPERVEVRQLKALIARCDAVKQDIQRELNRMEKAQVSSVSTEVRTSIETVHAQLEAERKRLESLIDNHIDRHPGLKDDRALLESIPGVGPVISQQMVAVIRSRSFNWASECAAFLGLVPIEHESGSSVRGRPRLSKQGDGRIRAKLYMAAVVATRHNPDIRHQYNRLLKRGKSKMAAIGAAMRKLVHICFGVLKHQTPYRPQPV

SEQ ID NO: 240550 - protein, 387 aa, unidentified
MRYWAGFDVGKAFHWLCVLDDEGGVLLSRRVEATEEDIEAACSQIRALGSSQERTVAVDMMGGPATLLEAILLGRGERVFYLPGMSVNRAREGYQGEQKSDRGDARVIADQLRMRRSSLREILPRDDEAVEMRLLVSYRRDLVVDQARCVTRLRALLNEVFPGLDALLNFQKDRAFVLLSKVATPKAARRLGISRLARWLRTQGIRRSDELAGKVVEAAKAQSCDLPASATRGALVCEMAAEVLRIRERVEELLSARPEAEVVRSLPGMGVVFTASFLAEVDDPGRFDSADTLAAAAGLVPATRQSGGTSFQTRARRGNRTLKNLFYRSAFSCTAHHAPSKAFYDRKRAEGKTHHQSVIALARRRVNVLWAMLRDGQLYEDRTPAAA

SEQ ID NO: 240551 - protein, 324 aa, unidentified
MEATLNVVGIDVSKATLAVCYPVQTRLQHAEVSNAKAGFEELVRRCGAECLYVMEATGSYYLALAYYLVEQGAQVAVVNPLVVRRFIQMHLGKGKSDRKDAQWLLRYGQQQTPTPWQPDDAVLVECRQLEQVSEQLIRQKTMTRNSLEALAQHPVVGPLAEQHLRQALNRLEEQIQVLEKELVTLLEQHYAREMPLLCSIPGIGRKTAAMLLLFAKGFTQVENYRQLTAKAGLCPREYSSGTSVRGKSRITRMGGGLIRSKLFMCSFSAKNANAACKALYDRLVAKGKNGKLALIAVCNKLLKQACAIVKSGVPYQPDFARISA

SEQ ID NO: 240552 - protein, 356 aa, unidentified
MSQTLNSKIAAIGIDIGKNSFHIVGQDRRGALVLRQKWSRGQVEARLANLPPCLIGMEACAGAHHLCRKLQALGHDARLMPAKYVRPYSKGDKNDYRDAEAIAEAVQRPTMKFVATKSSDQLDLQALHRVRERLVSQRTGIINQIRAFLLERGIAVRQGLRFLRIELPGILATRTDVLSHRMVRILEDLSGDWRRLDMRIEGLTSEIEMFARQDQHCERLMTVPGIGPIISSAMVAAIGTGDVFSKGRDFGAWLGLVPKQISTGDRTILGSISKRGNRYLRVLFVQAAWVVLVKLGPEHWERYGLKSWIEAAKRRLHHNVLAIALANKLARIAWAVLNKGRAFAYIKSDAIASRPA

SEQ ID NO: 240553 - protein, 319 aa, unidentified
MSEQREERFVGIDVSKASLEVAVNPGGEHWSTANDELEIPRLVDSLRQIGPKLIVVEATGGLQTLVVAELAAAGLPVAVINPRQARDFAKATGHLAKTDIIDAELLARFGEAIKPEVREFKDEETQLLTALMTRRRQIVDMLTAEKNRLAMAPKGVRKEIKKHIEWLEARIEVMNGQMSDAIKQHPIWREKDSILRSTPGVGPVLSVSLLAGVPELGRLNRQKLAALVGVAPLNRDSGLFKGRRKVWGGRAQVRAVLYMATLAAARANPVIRAFYQRLVAAGKPPKVVLTACMRRLLCILNTMIKNGTHWRGKEAEGAA

SEQ ID NO: 240554 - protein, 344 aa, unidentified
MIYIGMDISSKSFVVHGIDEKKRVLVNGEIEPTRAGLKGMIKGLGVQKKLVIFEAGNQLKWIAKTLKDMEGVEIHVVHPNEIKWISQSSGKTDKIDARKLAHLGRGDMLPRKVHIVEGKIRELRELLSARQRLQSKRVALINSIRGQMKQEGHSLPTKFFQSKHWREKLKGIKIGEVQKLIIESFMESIDSLLMAEKKLTEKIGAIRDKRIDLLESIPSLGTLSSRVIVSALDDAGRFDSKKCVAKYGALTPRIYQSGGITHLGRINRDGRQEVRRVLLQCAHVIVRMRSYGARPLREFFERIMKRRGKKIAIVAVARKLLTIAYGVLKSKTAYDPSRLTGVSA

SEQ ID NO: 240555 - protein, 325 aa, unidentified
MEPKKLCCGIDVSHTTLDVCYQNNLGDLFHLKVGNNNKGFATILEHTGRDYHFVMEATGVYYIRLAFYLHERCCKLSVVNALSIKRYIQMQLERNKSDKKDAGWICRYAIEQHPSYWEMPDSAYFESKQLYNTIREYAEQIKRFNNQLHSLKLLPVPSRDTIKSLEKVKQQLEKEIMNLEGKLETLLQSWQPGQLKSISSIKGIGKRATAMLIVFTQGFKNTHSHRQLISFAGLSPVEYSSGSSIQGKPRIYKRGGKNLRDVLYMCSMNAIKTNTACKTLYERLRANGKTGKQALIAVCNKLLKQVFAVVKNNSLYQHNYCSAKP

SEQ ID NO: 240556 - protein, 474 aa, unidentified
MPASLLEADPDARCDMNERSTIKDGTSNTSEATEQIAVWVGLDWADKEHSVSVYEVASGNSEAYTLKHTAEALQDWLSRLRTQYSGSKVAVVLEQSRGPVLYALMGCEFIVLYPVNPQSLANYRKAFQTSGTKNDPGDAQLLSEMVRKHPDRFRAWVADDADTRSLQLLVEGRRKLVNQMTRLTNRLTSHLKNYYPQALELAGEFNTRQACDFLKRWPTLEALQQTRPATLKKFYLSYGRPRTSTLNERLEHIKQAMPLTGDRAVVLAGSMMVQALVAQIRSLITEVEKYDDEIHRLFQQHPDREVFESFTGAGPVLAPRLLAAMGADRDRWQSAAEIQQLSGIAPVTEQSGRQRWVHRRWGCPKFLLQTFHEFAKQTIAWCDWSKAYYDQQRERGKGHHAAVRSLAFKWIRIVFRCWKDRVAYDENLYLRGLERRGSKLAARTQLVKQAKELRRKQRSGQSVEELSPNPQIGS

SEQ ID NO: 240557 - protein, 327 aa, unidentified
MSRYVILNEEGLAVEEGSFRNHLDSIAKHIGNRGRARVALEVGTQSAWIAREFSKLGHEVIVANARELKWISSSDDKNDRNDARKLARLARADRNLLAPVEHRTAEQQGELAVIRARDALVRSRTLLVNTARSLAKGFGLRLPASITSTFGARALAGLAEHLRAALGGLLEQIDALGVKIRDYDERIGELAARHPEVERLASVPGVGTLTAATFVWTLGRRERFAHSRDVGSFLGLRPRQRQSGERDPQLGISKSGDQYLRKLLVQCAHHILGHWGKDSALRQWGLSKSDGSAAKKRAVVAVARKLAVLLHRMWTTGEDFKPFPKMR

SEQ ID NO: 240558 - protein, 355 aa, unidentified
MTEAYDGRQIVGMDLHRRRSVLVRMTEDGRKLGTARITNSPAALRKEIARAGQHPRVVLEATYGWYWAADVLEAAGAEVHLAHPLGVKAFTYRRVKNDERDSAHLADLLRMGRLPEAWIAPREVRELRELTRYRLKLVGLRTSCKDQVHGVLAKLGITVTCTDIFGTAGSAWLGGLGLPQPYGGKVTSLRHLAGELTAEITMLSEVIASLLAGDRGYQVIQQLPGIGPVLAAVIVAEIGDVTRFRTAGQLCCWAGLTPRHRESDLKVARGHVTKQGSRLLRWALIEAIQRLPHDSVIGSAKAAIIARRGPQARNIAKVAAARKLLTLVYYGLRDHQIRALATPASEPPAPPALAA

SEQ ID NO: 240559 - protein, 334 aa, unidentified
MDVHVVDVAGRTVLETAAPPDADGLRELVERVEPLGPVRAAIESMNGARFVHDRLERLGWEVEIADAQKVKGLAPLACKTDRIDAWVLAELGRRDLVPAIWLPDPAVRAERERARWRLHLVRHRVQLKNRVHATLIAFGTPCPVSDLFGERGRRLLARLQLPDPWRSDVLAAVALIDELDRQIDGCERELRRLGAEHRDVPLLMSAPGIAWVLGSTIAAEIGDIERFSSPKKPAGYTGLCPRVYQSGGRDHRGSLAKNGPKFLRWALIEAATHAARHPAYRDHYQRTAQRLGRQRGKKVARVEIARKLSEAIWHMLTRNQPFAPAGPTSCSLAA

SEQ ID NO: 240560 - protein, 393 aa, unidentified
MLDLSGTKDTRRFSTCMEDLLNLREWLIETKCQRVAIESTGIYWIPTYTLLEGKVETIVANPFQIKNIPGRKNDDIDSEWIAEVCLNGQIKPSNIPPKEIREIRELTRTHVKLTQARTSFKNRVHKILSRAGVRISGVLTDIFGKSGMIIINGILNGKTIDQTFAEIKDKRIKIKKTEIKESLKGELSQNDIFVIKECLDSIKFLDEKIKKFDSKINQNLNLKGMQKEIKILMSIPGVGFTTAAAIMAEIGNIDVFSKPKKLVGWSGLAPSISESAGKSSNGHITKKGNKFLRTILVLAANSIAIGRLNKLRVFYQRIKAKKGHKKAIVALARKLASIIHHLLKFKEMYSEEEGKQKKVKLQKFIPVEDISIDEMIGILCEAGYSVDKPAANT

SEQ ID NO: 240561 - protein, 422 aa, unidentified
MKVVYPICCGVDVHKSFLVATIITTWGIKPEYRKKRFSTFNNAILAFKQWLLDNHCFDVCMESTGKYWIPVYNLLEDTIRVTVANPKWVAAVKGNKDDVKDSKWIGDLFRLGLVPSSFIPTKPIRILREYTRYRYKLVSCKSSEKNRFQNAFTVCNVALDAVVSDMFGKSATSITDYLVNGDSFDPAHCVSLLRRSLRTKAEEVLQSIEGFQMIEEQKQRLRFVRQHLDFVEQVLVGLDQVIDTMVAPLQSNIALLCTIPGIDRKSAITILSEIGTDMSQFSSSKRLCCWAGLTPGNNQSAGKKKSVRITRAGVYLKPALVQAAHAAVKDQKSAYYRVKYERISKRRGKKRAIIAIARMMLTAVYEMLRSGEVFCPCDLFKVDMPQELRQKQKDKAIQQAARLLVSQGIVAKVNLSLPLFSA

SEQ ID NO: 240562 - protein, 338 aa, unidentified
MRLYAGIDLHANSSHLGILNEDNRIVFKRKLTNDLGKVLAILEPFRHETEGVVVESTFNWYWLVDGLMDHGYRVHLANPAAIQQYEGLKHIDDQRDALWLANLLRLGILPEGYIYPKQDRPVRDLLRKRLQLVRHRTSHILSIQNIVSRSLGLRIRSNDVKRLDEDWTRDLFQEEYLFLAVDTSAGIIRYLGDRIKRIEAVVKSRVKLRKEFEGLLTLPGVGDILGLTIMLEVGDVGRFAEVGNYSSYCRCVRSTRISNGKTKGQGNRKNGNKYLSWAYVEAANFAIRSYPVVRRYYQRKAAKTNGVVAIKAISHKLSRASYYIMRDQVGYDANKLFH

SEQ ID NO: 240563 - protein, 416 aa, unidentified
MSVSLGTGSGRPTDRPTAGIDWATEDHAVSVVDPQGVQLERFAVSHTAAGLRQLLGRLHRAGVAEVGIERPDGPVVEALLGAELTVLVVAPNQLRSLRSRYGSAGNKDDRFDAFVLADTVRTDRARLQPLVADSAATVTLRMTVRARKDLVAARVAMANQLRAHLQTTLPGAIGLFRDLDSGISLRFLTRFPSQDKADWLSVVRLQNWLRAAGYNNPRNAPALHARLTAAPRGTSGAEAAGRAAVTLALVAALGALREQIRVLEQHIADQLTAHPDAAIFTSLPKSGTVRAARLLAEIGDARGRFPTPEALTCLAGAAPSTRQSGKAKVVSFRWAVDKQLRGAVIDFAGDSHHANPWAADLYTRARARGHDHPHAVRVLARAWLHVIWKCWQDRVPYDPAKHRALQALQALQARPA

SEQ ID NO: 240564 - protein, 411 aa, unidentified
MNPVVGLDVAKGESQVQMFLDKKVPYKNSVKIEHTVEGLEELHSYLLDLERQTGVKPPVVLESTGHYHAPVVQFLEAREYIAIIVNPLVSYRAKSSSLRKTKTDAIDAYHLGELYYKEDLEPQKKRGVQLLNLRHLTRQNENMTGIMIQTKLQFQAILDQIFPEYKGVFGDLYAEISLRTLQSFPTSESVLEADVEEIAQFIDTHCKACSFNWALEKSEKLIGAAERNPFQSTLYQSLLVSLNMYIDLLQVYHQQLSTLEREIDELAAQLEEYELLQSIPGIGEKIAATIISEIGEIDRFNHPKKLVAFAGLDPSVFESGRFKSTKNHITKRGSARLRHMLFTAVRCSIRDSRKKKTTPETIARNKRLRSFYDLKREEGKPYKVAIIACANKLLNWIYAMLKMKTPFQETI

SEQ ID NO: 240565 - protein, 356 aa, unidentified
MKTLKSIENFVANKTVFCGIDVHKSHWNLCYFCDGIVIEKMQIPSESEALISHTARCFQSAVGVRFVYEAGFSGFYLYRRLKAAGYNCIVTPPSRIPSLHDKIKTDKRDAQKLAQFLAGGLLKSVFVPPLSIEADRQLLRLRAGTQKKLTRVKNQIKSHLYLQGLSLPQTMGNRWSRKSIAWLENLEVEQPVFRFILDEYLLEYRFYRHTIAELTRKTRALSRADAYHAHFQRLVSCRGVGLITAMTYLLELHDLTRFPSGKKLGGYLGLTPSQHSSGKHVRLGHITREGNSHVRRVLVESAWTVIRHDPFLREKYNRIRAKGTNGKIAIVAVARSLAVRLRRCLLDDVPYQIGIC

SEQ ID NO: 240566 - protein, 343 aa, unidentified
MSAITIIGLDIAKNVFQVHGADADGAPVLRRQIRRGQVLTFFANLPPCVVALEACFTAHFWAREISKLGHEVRMIPPQYVKPFVKRNKTDSADAEAICEAAGRPTMRFVAIKSVEQQSILALHRSRDVLVRQRTKLIQALRGYLGEFGLVAPKGAWNVTLLETLMSDADPAQVPELLKEIAAVMIAQIRDFDERIDHLHDRLVAWHRANEVSRRLATIPGIGPVTASLISASVSDAAQFRSGRHFAAWIGLVPREFSTGGRQQLGGISKRGNPQMRRLLIVGAHAVLRWTRRGHGMPSAWLTALMGRRHPNIVAVAIANKLARIAWAIMSRGTSFSPQIAQAN

SEQ ID NO: 240567 - protein, 423 aa, unidentified
MKNSAARKLKQVPKGYLVMGVDPHKKRHAAVAVTQDFTTHSKFKFNNSREGFEMALERARAEMVRTGSRGVIFAIETGGHYWRNLAYFLDERGIPFHFINQFTLKRRREGKDLNRRKNDYRDSEVAAQLLCTGEFTDTKLQHGVYAELRAAYNAYRRLVKERTRITNLVKGLLDGIFPEFTRVFKGPCGQTALSVLSICSIPTVIARMTEEEFVDATRARHQGRLMRKKLRALHCAAQVSIGIDAGAQSVSSEISFLVEKLCLIRRQIRSIDETLARLVDKTEEGKYLLSIIGLNYISVAGLLAELGSFRSYRSAKQLIKMAGSNPTESESGGKRSAHTPMSKKGRPVLRYCAWTAVIPMLRFNADFRAWAKKLRERPVHANPLNGREIVGAALNKLLRLAFALVKKQTFYQVPQLEIVEVAV

SEQ ID NO: 240568 - protein, 418 aa, unidentified
MAMKIVRFNCCGMDVHKNLVVATIGITDRKTNVTEYFQRSFSTLNSDLYRLKDWLQSHHCSDVCMESTGKYWIPIFNILEDEINVHLTHPKYVKAIKGKKTDKKDSKWICDLFKHDLIKFSFIPPKEIRELREIARYRYKLVCMRSSERNRYQNCMTVSNVGLASVISDPFGKTASNIMKEVMKSNVIDDDKILKLVHKNCKNKDKILDSLHGYRIESDQRFKMEKSLDHMEYLDQLIDSCEVELIKRAYPFRRSFQHITQIKGISALSAILIISEIGIDMSQFGSDKQLVSWAGLSPANNESAGKKKSVRISKAGQYLKPLLVQCALSAIKDKTSYFGRKYSNIKKRRGHKKAIIAIARMMLVSIYHMILTGEEFQPCDYESFMDPKPNANPSLTVEKALNFLKQSGIDISSIPINL

SEQ ID NO: 240569 - protein, 383 aa, unidentified
MSEVGEKGNQLFIEHLINITMNFDILKYSVGIDVSMKTLDVCFKTLHSNQQAKIKSTRKFNNTSKGIIALFEWIEKHCKQANVPCIVVFEATGVYHENAAYYLYNNGLKVTIILPNYAKSFMQSLGFKSKTDAIDAKGLAQMGIERNPRLWTPPSKQLMDLRTLSRYKDKLEKQKTACLNRLHAQEYCAQSNQFVIRQLKQELKLITKQIVKTKEAIEKVLRQESDLTEKINKMADSIKGIGSASIACIVAETNGFELFESQGQLISYAGYDVVQNQSGKRSGKTKISKKGNKHIRKTMHFPALNVVRWNNDIFVNLYDRVYDRTKIKMKGYVAVQRKLLCLIYTLWKKDEVFDPKHRNKHQLKNIDEILTEEYKSSFSVSSC

SEQ ID NO: 240570 - protein, 392 aa, unidentified
MYIVGIDIGKNHHEASIVSPEGKQIGHSLRFATTHKGADSLMSFIFNNIGNSSCIFGMEATGHYWYPIYSFLKARGYTIYVINPIQSDSLRKMYIRQTKNDSIDSFLIAEVIRFGQFTTTSMADENILAMRQLCRYRDSVISSRTEIKLRISTIIEQIFPEYEKQFSSLWLSTSMGILEKYLTPENIENAPIDELFEIIKDKSHNRLTKAKAISIKGAAADTFGIKIAQDTFSFQLKQLIDRMNFLDKQIEALDIEIMKYYEQFDCYLHTIPGIGIIGAATILAEIGDISRFKNSSALVAFAGIDPTVRQSGEFNSTHNHMSKRGSPYLRHAIFLAATTCSFHNSPLNAYYKKKRDQGKHHLTATGAVARKLTTVIYAVLRDSKPYEPKKFC

SEQ ID NO: 240571 - protein, 355 aa, unidentified
MKRGHFIGMDTHCQSCEVAVVNSCGELVQRDCCNTSIPTLLDVIEKVPRPRALVIEEGPLAGWLWRNLHVAVDRMVVSEPRRNGLIAKEGDKDDDLDAEKLAQLLRGGYVKAVHQVETLPRAVFKQHVSLYHYRVRERVREALRISSLFRQHGVMIREKAFVAKEDRPAVVARLPESGLLREMIESLWISYDHLVEREHQWWKRLIQQARQEEVVRRFQELPGIGWIRAATLYAYLDTPGRFRSKSALWKYLGIGLQRHRSGNGPEHLGVPLQAHRLLKGTILGAARSAVASGNNPFADLHRRWIEQGLSLKLGRRNVARALAATLWGLWKNGSAYRPEWVGVAAAANPATKLPR

SEQ ID NO: 240572 - protein, 386 aa, unidentified
MQKLNDLSRSLTALEPNGTLIAVIEMSLSSWRVAGIVPGVERQPLKKLAVDESALLKLLHRWREEAEKAGRRIERIAVAFEAGRDGFWLARWLKARGIEAYVIHASSVAVSREHRRAKTDRLDTELLKRSFLGWLRGERDHCKMVEIPTMQDEDAKRPNREHDSLIGERSRIVNRMKAALVRLGIRGFNPKLKRATTRLDGLHTPEGEPIPPNALAELRRDMERRRLINNQIRQIEEERLERIEQAPCDGAHVMVRLLARVMGVGIETADMLVHEVLSRNMRDRRAVARYAGLTGSPDESGRKRREKGLARSGNARVRRGMIQLAWRFLLHQKNSALTKWFRSRTENARGTRKPMIVALARKLLIALWRLMREGIVPDGVVLRPAQ

SEQ ID NO: 240573 - protein, 328 aa, unidentified
MNQIGVDISNDVFDTTRCSNQRTVRRQFPNTPSGHRQFLSWALQQAQSAQVCLEATGVYHLQLAFAVDRHPDIDLMVVNPCAARRFVQARMIRAKTDAIDADGLLLYLQRMPFHAWLAPRQEVIQLQSLAHRISQLDKEISRERSRLHAARRAGPHTRMVQQDLQAHIKYLQRHTATIKQRAWQLVQSDKTMADQARLIKSIPGFAELTATKLLAELSALPDDMMPAQWVAHAGLDPRPLESGTSQRPPRRISKQGNVRIRAALFMPALVAAHHDAHVSAYYQSLLGRGKPKMVALTAVMRRLLHALWGILNHQQEWDGDKFYRLNPA

SEQ ID NO: 240574 - protein, 426 aa, unidentified
MRVMYDRVAAIDVHKDMVKVAIRVPGAKRGTRKTDVLEFRTFYGVLQAMARELRGCGVTHVVMEASGVYTDPVYYALRELDFEEVMVINPAHAKALKGHKTDAKDAIRLLDLYECGLLSGSYLPSEDLREVRDLARYRMKTVQARTSEIQRLQKTLETAGIKLSSVVSDVTGGSATAMIEALISGERRGSVMAGLAQTRMRTAGKMADLSMALTGRFTDHHALMCRLHVDRIKIFDDAVKDLDAKIAPRVARYAREADLLKTLPGFGDVIVAGWLGAIGPAPHQHFATASRLASWATICPGNYMSAKKSKGGRTGDGGAYIKPLLIQAAWAAVRVPGRLQARFHRLVRKFGGPRNKGAQKRAITAIAHTLLKIAYSVLKTGQPYADLGADFYTRRESPDARQDYLMRQLQKLNPGCVIAITPTEAA

SEQ ID NO: 240575 - protein, 341 aa, unidentified
MKLTTIGIDSAKNVFQIHGADERGTAVLKKQLKRDQVVPFFANLLPCKIGMEACGSAHYWARKLQALGHSVQLIAPQYVKPFVKRNKNDAADAEAICEAVTRPNMPAVPIKNASQQAILSVHRARQGFVKARTAQANQIRGLLAEFGIIIPQGISHIAKRVPEIIEDGENELPGSFRLLIQRLVDHLKVLDQQVGELEREIQAWHRENEASKKLAKIPGIGPMTASALVASVGNARSFRNGRQLAAWLGIVPKQHSTGGKATLLGISKRGDTYLRTLLIHGARAVIRVAERKPQPDAWLGKLLTRRNKNVAAVALANKNARTIWALLAHDRAYESDYRMAA

SEQ ID NO: 240576 - protein, 426 aa, unidentified
MAPQGNCTPLILLRVERGNVMELKPMYQRVIGLDVHQAKISACALAQQPDGTVTIEQREFGAFKRDRKALAQWAREFGPEVVVMESTGIYWKSPYAALETVGIAAWVVNARHVKNVPGRKTDVADAQWLATLARAGLLRGSFIPEAHVRHLRLIARQRQKLGGMLASEKNRLHKVLSDSGIRLGVLVSDMHGQAARDMTKALIAGKPLPAVLDLAGRLRASRADLFEALQPEELSQAHLFVLGETMAHIEELEARMQRFEQELLKGLSAWQTELVLLQTIPGIDIMGAAMLLVEISAEMQNFGSAERLASWVGICPGNNESAGKRKTGKTRKGNAWVRRLLCEFAQAASRSRCALKDKFAALSIRKGHKKSIVALAHKMLRIVFAVLKNKTPYLDKAVDYEALSVQRNAPRWMKMLIKHGYMPTAA

SEQ ID NO: 240577 - protein, 341 aa, unidentified
MKKNLFFIGLDIAKADFAASIYQTPDQPIVTKEAIPNDPKGFEMLLSWLKDHHIDKKNCRICMEATGVYSQAIAYYLLFQGFPVSVEPPLKVKRAFDPVGHKTDPVDSKQIAEYAYRFQDELTSWKPRDEILEKIRQLLSVREQFTKQKVALDNSLQAYSKQRVQVALIKKAHQETLNQLKKQIARIDKELANLIKQDPEIFQRASNLDSIPGCGMLLAAHLLVITENFTKIQNSKRLAAFIGIVPYQNQSGTSVFKRAKIRHFGPGPSRKLLRLAAQSVSTHNVTFRHYYLRKLDQGKAKPLVLNNIANKLLKVACTIIRNNTRYIKEHRSIHPMYLKSA

SEQ ID NO: 240578 - protein, 372 aa, unidentified
MKEDSVIFIGLDTSKLKISVAIANGSRNGEVRFFGDISSEPASVASMVSKLSKRGAKLHFCYEAGPTGYGLYRQIVELGHDCVVVAPSLVPKRAGDRVKTNRRDAMSLARLHRAGELTAVWVPDEGHEAIRDLVRAREAASDALKQARQQLQSFLLRHGRIYAGREPWTRAHRRWLTCQAFDHPAHQILLAEYCQAVADASVRLDRLTKLVVETAASWSMAPVVAAYQAMRGVAFMTAVTFVVEIGDVRRFDNPRQLMAYLGLVPSESSTGERVKRGGITKAGNTRARRVLIEGAWTYRFPARVSPKIQARLDDLPRTVREIAWKAQVRLCARYRKLLAAGKPKVVAVTAIAREMAAFLWAIGQEIAPTAKA

SEQ ID NO: 240579 - protein, 341 aa, unidentified
MEKATIIGIDLAKRVFQVHAASKDGRPLLRKKVSRAQLLGFLAKQPPTIVAMEACATAHEWGRAISGLGHDVRLVPPIYVKPFVRRQKNDAADAEAIAEAASRPTMRFVALKTEEQQARSMVFRTRDLLVRQRTQLVNALRGHLAEHGIVAAQGLAQVKVLATAMQDTGSLHPLVRELGQRYLDHIARLDAEIAELDKRLRQPSKDNETAKRLQSMPGMGPITAAAIEAFAPPMATFKRGRDFAAWLGLVPRQHTTGGKPRLGRTSKMGQRDIRRLLIIGAMTVVRWAIRKGAAKGSWLARMLAKKPRLVVAIALANKMARSAWAMLSKGEDYRGSALAPA

SEQ ID NO: 240580 - protein, 463 aa, unidentified
MAKPQRAQKHKQKKITVHDLKSLPVLHLHAAGIDVGSAEHYVAVPAHRDPQPVRRFGSFTADLHRLAQWLKACRIQTVAMQATGVYWIGLHQILEEYGLEVQVVNARHTKTLPGRKSDVQECQWLQTLHTFGLLNNSFRPPQAIQVLRSYMRQREVLVAAAATCVQHMQKALTEMNLQLTNVISDISGTTGMAILRAIVAGERDPHHLAALKHSLIRATRQEIAQSLQGHWREELLFVLSQNLNQYDFHLAQIKQCDQRIQTQLQTMEAKIDPAAHPIPAPRRVSWSRKRQPAFDLRGELYRVTGVDLTQVDGLDVQTIQTVLSEVGVDMSRWKTEKHFGSWLGLAPDNRVSGGKILKRGTRHVVNRAATALRLAAWNLIRSQSALGAKFRRLRARLGPPKAITAMAYQLARILYRMLKFGQPYHDQGVAHYEAKHRQRQLFWLKKQAATLNLQLIPTTEVTL

SEQ ID NO: 240581 - protein, 521 aa, unidentified
MSVYSPSDGRTSRNPFSQWCSCEPALQHGTRHCVEISDDVVPRLASGGDDLVWETASIFAAWPSLPSEKGSMHRKKYRNRRPSNKVFVRPVTNPDTAGIDVSPYCMYVAVPPDRDPEPIRKFNAFTTDLRAIGQWLKACRVRSVAMESTGVYWIPLYQILTDEGFDVCLVNARHYKNVPGRKTDVCDAAWLQYLHSVGLLLASFRPTQEICAIRSIARYRETLIRQAAEQVQRMQKALDEMNLHLHHVIDDLTGKTGLAIVNAILQGERDPHVLARLREKNVKAKAQTIEKALEGDYRTEHVFVLGQAFETWKHFGDQIAKCDHQMERMTQALGAIVDTAGYTPLKRPSKNQPQGDWGRLLYGSFGVDLTAVPSINVATVLVLFTEIGTDWSRFPTASQFASWLTACPDNDTSGEKVLRRKTRRSSQRVKRALRLAAQSLRHNKTALGEKYRRLRAHLGTPKALTAMAHALARILWYMVTHKTPYDESIFAENERKYQERRRKRLLKEARSLGLQLTEVNI

SEQ ID NO: 240582 - protein, 415 aa, unidentified
MKVVFPTCCGVDVHKRFLVATIITSPTDSLQPHYQKKRFSTFNSDLNRFADWLHENACLDVCMESTGKYWVPVFNILEMRGIRVVIANPKWVKAVKGNKDDTKDSKWIGDLFRIGLVKSSFIPDKNIRILREFTRYRYKLTSMKSSEKNRFQNAFTVCNVALDSVVSDMFGKSATAITDYLASNEPFDTEHCVSLLQRSLKKKADAVLESIEGCSITDEQKLRIGIIREHLNHIIGLIDKVDGCISTLVSEYEGLINLLYTIPGVRRDTAITIISEIGVDMSQFGSSKRLCCWAGLTPGNNESAGKKKSVRISRAGVYLKPALVEVAHATVKDKANPYYALKYERIAKRRGKKRAIIAIARMILTAIYEMFSTGEVWNPVDLYKVDMPQHLKEKKLAKAIKEATRFLEAQGLKVS

SEQ ID NO: 240583 - protein, 338 aa, unidentified
MRFYTQQHQFYCGIDLHARTMYLCILNQDGEILVHRNMPAGPEPFLKAVAPYREDLVVCVECIFTWYWLADLCAREGIPFVLGHALYMKAIHGGKAKNDKIDSQKIAVLLRGGMLPQAYVYPAAMRATRDLLRRRMHLMRKRAELLAHVQNTNSQYNLPGIGKNIAYKANRDGIAERFPDPAVQKSIEVDLALIGHYDHLLNDVELSIVHTAKQHDPQTLSRLQSVPGIGKILSLVLLYEIHTIDRFPRVQDFVSYCRLVKCAKESAGKRYGTSGAKIGNAYLKWAFSEAAVLFLRTNPAGQKYLARLEKKHGQGKALTVLAQKLARAVYYMLRPDIV

SEQ ID NO: 240584 - protein, 416 aa, unidentified
MVDDYHWFVGIDWATQNHSVCLLDAEGRRVGEREFAHGGAGLTELRDWLLEKTKAAPGQIAVAIETPHGPVVEMLLEHGFVVFAINPKQLDRFRDRFTVAGAKDDRRDAHVLAGSLRTDRKAFRQLAADNPVVIELREWSRIADELQQERTRLSNRVRQQLWRYYPQAAELTDDVADDWFLALWQKVPTPDRAAKATEKSIAAILKEHRIRRLDAATVLATLRKTPLFVAPGTTEAACAHIRSLAARLRLVNQQIKEAQQNLDRLCAKLEEESPSGQSFEQCDVTILRSWPGIGRIVLATLLAEATEALRRRDYHALRALAGAAPVTRRSGRQRFVIRRMACNRRLQTALYHWSRVAIQHDAAARRRYDALRQRGHGHARALRSVGDRLLYALCTTLKRQTPYDAAYHSAQMIAKA

SEQ ID NO: 240585 - protein, 401 aa, unidentified
MQDTQQRDAVDVFVGVDVGKGHHHAVALDRNGKRLYNKALPNDEAKLRALIAELKTHGRLLFVVDQPSTIGALPVAVARAEGVLVAYLPGLAMRRIADLHAGEAKTDARDAAIIAEAARSMPHTLRSLRLADEQLAELTMLCGFDDDLAAQVTQTSNRIRGLLTQIHPALERVLGPRLDHPAVLDLLERYPSPAALAGTSEKTLANRLTKLAPRMGKGLAAEIVQALSEQAVIVPGTQAATIVMPRLAQQLAALRKQRDEIAAEVERLVLAHPLWPVLTSMPGVGVRTAARLLTEVAHKSFASAAHLAAYAGLAPVTRRSGSSIRGEHPSRRGNKVLKRALFLSAFAALRDPVSRAYYSRKIQQGKRHNQALIALARRRCDVLFAMLRDGTIYQLKSAPSA

SEQ ID NO: 240586 - protein, 417 aa, unidentified
MEHVAIDLGGRESQICIRTQENVIRLEKRVPTRKLKEFFGSIEPSRIVLETCAEAFAVAGLAKDAGHDVRVVPATIVRSLGVAQRGIKTDQRDARALSEASVRIELASVHVPKKESREIKTACGMRESAVHARTQLINSVRGWLRGELERVRSGAPETFATRVRESRTSEKIPAHVERQLAIIEAITEQIKGADRDLLEMAKRDERCRLLMSVPGVGPITSLRFVAAVDEFERFSDAHQLESYFGLTPGENSSSDARRRTSLTKAGSKKVRWVMVQAAWSASICRRSDPMVLWMRQIAARRGKQVAIAALARKMLGIMFAILRDRVPYNPSRASKIRVEPTDSQTFNDGIGVPPARKYALRKSVDQSDTILPTTPKEASNEQRAAVKADPSTPDYTVAKKPRRSPVRRPLKDTLGRE

SEQ ID NO: 240587 - protein, 343 aa, unidentified
MEYYVGLDVSLKQTSICVVSGTGSVVREGVVDSNPDAIAAFVRSKAPGAIRVGLETGPTSTWLWTELKRLGLPVICIDARHAKAVLKMQINKSDRNDAAGIARIMQTGWFKEVRVKDLHSHTVKALLASRALLVKIKRDLENQIRGLLKNVGLVIGRAKFNVFAVRAEELIEDRPELIPVVGPLLKARQAIEQQTDDLDRKVLKLARHDAQVRRFMTVPGIGPITALCFKATVDDPTRFKRSRSVGAYVGLTTRRHASGEIDWTGRISKCGDAMLRSYLFEAAGVLLTRVPKWSALKAWGMRLAKRNGLRKATVAVARKLAVILHRMWIDRTEFNWSKKEVAA

SEQ ID NO: 240588 - protein, 345 aa, unidentified
MIVLGADMHKGSHSLAAVAAGSGELLGDKVVKVGQPGFAAALAWARELEAERVWALEDCRHVSGSFERFLLVNGERVVRVATRLMAGERRSSRERGKSDLIDAIAVARAALREGVERLPVAQLAGVELDIRLLVDHRERLVRMRTALNNDLLWHLHDLWPEQTLPGGALLSQKWTARLGRRLARAEQTARVRIARDELRQLRELSRSIDALEREISGLVAEVAPQLLTEPGFGPLTAAKLIGEIAGAQRFATDAKLARAGGVAPIPVSSGKTNRHRLDRGGNRQINTAIHRIAVTRARCHPETRDYIERKRSEGKTNREAIRCLKRHLTRRIWHLLQPPHPAPIS

SEQ ID NO: 240589 - protein, 449 aa, unidentified
MAKHRKKHGKLDRNLPELKPNAAGIDIGAREIFVAVPADRDVESVRSFPTFTEDLHRLADWLQQCRIDAVAMESTGVYWIPLFQILESRGIQVCLVNAQHVRHVPGRKSDVLDCQWLQYLHSVGLLKASFRPEQDVCAVRSVLRHRESLVQMTCVHVQHMHKALDQMNLQIHHVISDITGVTGLAIVDAIVEGKTNPRQLAKLRDYRIKAPIETVIKSLVGDYRPEHIFTLKQSLMAYRHYQQLIDECDREVEQRLQAFNTKDDGPNAAADGSSSTTPAQSSFDLHHHLERIFGTDLTLIPGFESLRIQTIFSELGADLSKFPTEDSFCSWLNLCPKDGTSAGRRIRGPRIKSQNRVANAFRLAAQCLFSNKSFLGHYFRSQRARHGALKATKNAAHKLARIFYHLVTTRLPYDETVFAKLEIRNQKRRLNKLQSLARRMGYALVQANA

SEQ ID NO: 240590 - protein, 534 aa, unidentified
MGTRRRRGRGRGTVHRQRRSKALEERVRRVGPERFGILAVDSAKKRFAVLLTDFYGRTLMDVLEVDNTGPALDGLVIELKAQCERHGLKDLVVAIEQTGRYHVPIRQVLRKHWDVQMVHPFATKQLRQPADPGNKTDPTDLQAIVRAIIVGYGTAEPELSPRWADWRLVSREREALVRRRAWVRVRLQMRLEALMPGYPALFGCLWNSPASLALARRYGSAAALLSAGEEAILDCGRQAGSHVQRRTVARVLAWAAEAAPADPGAEISRRLLGDQLELLSLLEAQIGRYERDLAEYLVDTPFVLLLGIPGINVVSAASYGAELGPIEHYLHPTKITGRAGIYPSRYQSDETDLADGPLVGQRNARLRDAIFEIAHNLISHNAYFKAWAELRQKRKWSKQKIHVAVASKFVRISYWMLAGRMPFQHPCLGGRDAILRKLFRFAKEQGLSAGTARSLLLHAMRQLPGGVHAEEARALIEDLPKGTRRRRRSGPVPISEILPEVIAHLVPGLCIPTQRSQPTPLHPAEDPSPGALER

SEQ ID NO: 240591 - protein, 385 aa, unidentified
MQKLNDLSRSPSPLDPDGTLIAVIELSLSSWLVAGIVPGVERQPLKKLAVDESALLKLLHRWREEAAKAGHRIKRIAVAFEAGRDGFWLARWLRARGIEAYVIHASSVAVSREHRRAKTDRLDTELLKRSFLGWLRGERDHCKMVAIPTTQDEDAKRPNREHESLVGEQSRIVNRMKATLIRFGIRGFNPKLKKAAERLDGLRTPEGEPIPPNTLAELRRDMVRRRLISDQIRQIEDARLERLKQAPNDGPHAMVRLLARVIGVGVETADMLVQEVLSRSMRDRRAVARYAGLTGSPDESGRRRREKGLTRSGNARVRRGMIQLAWRFLMFQKDSTLAQWFRARTESARGTRKTMIVALARKLLIALWRLVREGVVPDGVVLRPA

SEQ ID NO: 240592 - protein, 345 aa, unidentified
MNILKQTVGIDVSYKTFDARFGTTNIQQQITLSPSKSFKNSLPGFKLFLRWLKKYVLSDDIPLVFVMEATGVYYEHLAHFLFQHKYQVAVILPNKIRNYAKSLESKSKTDPIDAATITRFGLERRLSLWTPPSENIKVLRDLCREYHGLKANCTQIKNQLHALKSSFKPHRESFKRKTQLLKFLERQVALIKKELLALIKTEPDLAQRLKKIKTAKGLGDISILTVLAETRCFQLVTNQKQLASYAGFDVVFNDSGLKKGKTSISKKGNTFIRKALFMPALSACRANPQLKNLYLRLVAKGKNKKLAIIAVARKLLLLIYTLWKTNSPYIPDYKPLPLVSKTLST

SEQ ID NO: 240593 - protein, 399 aa, unidentified
MIRDHESVDVFIGVDVGKTNHHAVALDRSGKKLLDKALPQDEAKLRAIIDSLTKHGTLLLVVDQPATIGALPVAVAQAAGILVGYLPGLAMRRIADLHPGEAKTDARDAYIIAEAARSMPHTLRSIAVADEQAAELSMLCGFDDDLAKQATAASNRIRGLLTQIHPALERVIGPHLDHPVMAELLRKYPAPDALRRAGQTRVAGFMAKWAPRAGKRWAEEIFTALGEQTVVVAGTGAAGVVLPQLAAQLVQLRTSRAEIFAQVEKLVEAHPLHQLLTSLPAVGVRTAARIITEVVGKEFKTAGHLGSYSGLAPVTWRSGTSIRGDHSSRKGNKILKRAFFLSAFAALKDPVSRDYYDRKRAEGKRHNQALIALARRRCDVLFAMLRDGVLYEAPAAKAA

SEQ ID NO: 240594 - protein, 355 aa, unidentified
MTSTKYIGMDVHKESISIAVMNSVGKIVMECVIETKASTILQFVDGFRGDLRVTFEEGTWAAWLYDLLKPHVTEVVVCNPRKNALLKDGSKSDRIDARKLAEQLYMNKIKSVYHGEHGLRTLKELARSYLTITKDVTRVMNRLKALYRSWGIPCAGSEVYAPRHRSEWLGKVTEAGVRRRAEHSYQQLDVLRLMRQEVRRDLLAESRKHKAWKLLRLIPGIGPIRAALLVALIQTPHRFRTKRQLWTYSGLGLETHDSAQYRVVDGQLNRSKKSVTLRGLNKDHNHDLKDIFKGAATRVSSSRGPLRDFYEALLAKGRKPTMARLTLARKIAAITLIVWKKEVRFDANYLKPQAA

SEQ ID NO: 240595 - protein, 389 aa, unidentified
MIYVGIDVAKDKHDCCILGPDAEKLYPLFTISNNRDGFDELYEKIQAAETDIDQIKVGLEATGHYSLNLLGSLIDKGLTTCVINPLHTNLYRKGLSLRKTKTDKVDASSIAMMLITDKTLKPYSDTSYHNEELKSLTRYRFDKVQERARLKVSIARLVNILFPELEKLVPDIHMASVYALLSEFPGASHIAGCHLTRLKNLLETASKGRYGRDKAIEIRNAAHTSIGSVMPVKSLELKHTIHLINVLTKEIEEVEAVIKKIMDDSASPIMTIPGISYRMGAMILAEVGDFSRFENADQILAFAGLSPSTYQSGQLESSYAHMEKRGSRYLRYALFNATKFVCKWDETFNAYLAKKIQEGKHYNVAVSHAAKKLIRTIYRMELTGEAYRK

SEQ ID NO: 240596 - protein, 345 aa, unidentified
MLIIGCDFHPGFQQVAIFDNQTGEYTGKRLQHAEQARAFYAGISEPALIGMEACGFTQWFERMLGEMGHQLWLGDAAHIRASVVRRQKTDERDAEHILTLLLEQRFPRLWVPSPEERDVRQLLLHRHHLVRSRTQVKNQLQAMALNQGVQKKRKLWTEAGRAELQKLALPAYTAQRRDECLQRRDYLDEQIRQLSRKVVAEADAHETVRLLRTHPGVGAQTALAFVLTIGPVARFENAKKVASYVGLIPAEYSSGGKQRLGRISKQGSPLLRFLLVEAAQSAARFDPTLKRRYVRLCMRRSRGQAKVAVARRLATRLYWMLRSGKNYAQLTASGAGEPVSSRGAA

SEQ ID NO: 240597 - protein, 358 aa, unidentified
MLKLEAGQIVGGVDTHKDLHVAVAVDHHGRLLATRSFETTARGYRALATWLASHGEVIAAGVEGTSSWGAGLSRHLAASGMRVIEVNRPDRSARRMRGKSDPLDAEAAARAVLAGTARSTPKGGTGSVEAIRILRVARRSAMKARIQTGNQIRALIDTASDGLRAEFRAATVAQACARLVRQRPRREDSIDAVTRKTLVLLAKRWTYLAAEITQLDRDLDTLVTNAAPVLVALPAIGVDTAGALLVCVGDNPDRLTSEATFAALCGVAPLQASSGRTQRHRLNRGGDREANHALWRIVLVRMRWHAPTRAYVARRTAEGLSKAEIMRCLKRYTVRSIYRTLARHELVQPRPPQPRLAR

SEQ ID NO: 240598 - protein, 336 aa, unidentified
MRSIPVYVGLDYHQDSVQVCVLDRSGNVLRNGSCENDALVIATVVENHGTEVHAAIESCTGAADLADELTLRSGWTIDLAHPGYVARMKQNPDKTDFTDARMLADLERVGYLPKVWLAPREVRELRRPVRYRHQLVLQRRRIKLRSSALLRDQRVRSPYASGTKGWLNWLRTTKEVSEESQWILKRYVKRLTSLGREIGEVEARLGRVTKKDRLVAALQKQKGIGPVTAWTIRAEIGRFDRFRSGKQWSRFCGLSPGHASSGRRQADAGLIRAGNRELRSTLMEAAHRLIRFDDPWKAFAEKLLARGKPKCVVVAAAANRWMRRLYHQMQPEKLAA

SEQ ID NO: 240599 - protein, 347 aa, unidentified
MKFFNQQHKYYCGIDLHARKMYVCIIAQNGKVLVHQNIKTDPQVFFELVFPYVEDIVVGVECVFCWYWLADFCAEHSIDFVLGHALYMKAIHGGKTKNDKIDSYKLAMLLKGGNFPTAYPYPAKWRATRDLLRRRMYISRRCSELVAHIQNTNTQYNLPAFRKKLSRKYNHNGVAERFEDPAVKKSVEVDLAMIESLNKILKQLEWHIEKTARQHDYHTLYLLRSIPGVGQILALVILYEVHHIKRFPKVQDFSSYARLIKPVKESDGKWAGHSNKKIGNHHLKWAIKEAAILMLRDSFQAKHYVSKLERKYNKGKALGIFTHKLGRAIYFMLKNKKAFDMKKFFDQ

SEQ ID NO: 240600 - protein, 431 aa, unidentified
MNDVDRFIRFSQFRNQIRGSNTHLIVGIDIAKDKHHAFFGTANGKTLWRRLIFTNDLIGYSRLIEQVQAVSSQHQLEQVVFGVEPTSNYHKPLAHWLIKQDYLVVLVGGKAVKDNRELLTGRWDKNDTKDSANVADLISQGKCLFYEHPDDNMVCVRNLLVLRKQLKKEEHRLRMRIRNGLLAKYFPEMDRHWGNSLEENLAIVRWYLDPRKIANTEFDQFVKHVTTTDRGLRQMRRLKAIYQAAGESVGLPVDASAGYEAQMLVERLKLVKEQVSQTMQRIESVCQNISGYQLLQTIPGFGPYIGAVVLAALANPYRFSSRKQVIRLAGLDLNASRSGKKSQDSVPVISKKGDADLRYALYQAALIASYHNGSFRRLYHRMLEGRQGERGIKTKVRVKLAAKMLVVAWTMLKNNEPFDALRMLGESFQQR

SEQ ID NO: 240601 - protein, 470 aa, unidentified
MVAVMIGIDPHKASHTAVAIDPAEVPLGQLRVRASAVQAERLLGWAQAWPERAWAVEGAGGLGHLLPQQLLSAGERVLDVPPKLAARVRLLATGNINKNDPNDARSVAVAALRSAGVREVRRDDHAAVLKVWSKRYQDLGRARTQVACRLHQVMCELIPGGVPGEITAGQAERILASITPAEAVQAARWELAAELTEDLRGIDARIRQARTKLAAAVRAAGTSLTGLFGVGPVIAAAVIGDVRHVARFPDRDHFAAYNGTAPIEVSSGGRKIWRLSRRGNRRLNHAIHMAAVTQIRHRHSQGHAYYQKKLAEGKTGKEALRALKRQVSDAIYACLQADARRDAAHVKSPGGQPGNGSDSSAAGSHPGHRLFGQATPGLRHHTTTAASDPAPGPASARGRAGHSSIAATSPLAKPQVQVQRPQRSEDERPGGAASQRPYSAARKARGQGSQAKPQRPKTASRARENDRRNP

SEQ ID NO: 240602 - protein, 355 aa, unidentified
MSQEKYIGMDVHQATISVAAMDAQGKLIMECLLETKAATIVEFIQGLQGTLSLTFEEGTSAAWLHDLLKPHVSRLVVCDPRKNALLKDGSKSDRIDARKLAELLRTHQLRPVYHGEHGVRTLKELGRSYLTLTQDVTRVMNRIKALYRSWAIPCSGTAVYAPRHRAEWLAKIVEPGVWVRAQRLYQQLDLLQPLRQAARHDLLSESHKHPAVKLLRQIPSIGPIRAALLVALLQTPHRFRTKRQLWAYSGFAVETHDSGEYRNVRGKLQRNRERITVRGLSDNYNKDLKNLFKGAAISASTRPGPLHDFYVALVAKGMRPTMARLTLARKIVTLTLTIWKKGVSFDPQQLHRQAA

SEQ ID NO: 240603 - protein, 464 aa, unidentified
MVKPQQPQKNKPPKKITVHDLKSLPVLHLHAAGIDVGSAEHYVAVPAHCDPQSVRRFGSFTADLHRLAQWLKACRIQTVAMQATGVYWIGLHQILEEYGLEVQVVNARHTKTLPGRKSDVQECQWLQTLHTFGLLNNSFRPPQSIQVLRSYMRQREVLVAAAATCVQHMQKALTEMNLQLTNVLSDISGTTGMAILRAIVAGERDPHRLAALKHSLIRATRAEIAQSLQGHWREELLFILAQNLSLYDIYMAKIRECDHRIQAQMQTMEPKIDPVAHPIPAPRRVSWSRKRQPAFDLRGELYRLTGVDLTQVDGLDVQTIQTVLSEVGVDMTRWKTEKHFGSWLGLAPDNRISGGKILKRGTRHVVNRAATALRLAAWNLIRSQSALGAKFRRLRARLGPPKAITAMAYQLARIVYRMLKFGQPYHDQGVAHYEAKHRQRQLFWLTKQAAALNLQLIPMAEVTP

SEQ ID NO: 240604 - protein, 311 aa, unidentified
MPANATPHYVGLDIAKDQLDYCINDTDEGKFPNTAEARARFIQQLLRLRTARVVCEASGGYEKIIVAELLAAGIEVCVAQPGRVRAFAYAEGLLAKTDRIDARLLRRYGEKIALRLAVPTDPAATVLRELLEHRRQLTTQLAEVEGRLGLAGPTLLKLLQRQKTFLQKQLKTVATMIDDHIDHDPDLRAKSERLQQITGVGPVLSATVLAYMPELGQITDAQLSALVGVAPFPKDSGALHAPRHVRGGRSQVRHVLYMAAVAAARPNPILAAFYQRLLADGKPPKVCLVAVMRKLVCLMNRLIEDPNFVLA

SEQ ID NO: 240605 - protein, 355 aa, unidentified
MNSSSKVVKTDFTGKPFFIGIDMHKKNWVITVRTFALELRTLSIDPFPEVLEKFLEREYPGGIYHLVYEAGCFGYASYDYFQDRGIDIIVTPPNRMYRENRRVKTDKRDSRDLALLLSKGMLQSVVVPSQQVRELRQILRIRNKQRDRKKQIQQEILGMLRFLHIPLQTAGWGKRRLEELHQIRFSEEGLNFSLSLLLSEYEFYVKMLSESDRHIRQYSRQITEHWPTIERITRIKGIGSLTAFELTLRLFDRKDRFVHSGKLVHYLGLTPSEHSSGEKQRKGGIGGGNPQLRALIIQIAWQAVRWDPVLLDKFDRVYHHSGIKQKAIVAVARKLMVRIYTIIQKNERYQVGVAA

SEQ ID NO: 240606 - protein, 338 aa, unidentified
MYYVGLDIHSKSITICVLNGNGKVHRRCTVRQIDQMMAVLERLPEPFQVCYEASTGYGIFFELLSKVADHVAVAHPGLLKLIFRSKQKNDRRDAEKLAKLLYVGEVPIVHVPTADVRAWRELISFRRRLVEKRTRAKNGIRGLLRSLTIRSPQRPGLWTREGIAWLEQLPLDNAMHALRRDLLVEEVATLSGQIHRVETELARDSIHNPAVKLLRTIPGVGLRTAEAVVAFLDDPHRFANSKRVGAYFGLVPSQDQSGSTNRLGHITREGSATVRHLLVEAAWQAVRRSPTVAAYWARIGRGDKARRKIALVATAHYLVRVMWSMLKNQTVWKETVAA

SEQ ID NO: 240607 - protein, 402 aa, unidentified
MNCVGIDVSKGKSTIAVMRPFGEVVVSPFEVCHTASELSELARLLKSLDGETRVVMESTGNYHAPVAWLLHGAGFYVSVVNAMLVHDYGNNSLRRGKTDKKDAVKLANYGLDHWLTLPRYVPEEDARLMLKTCYRQYQQYSKVQTMLKNNLISLLDTAFPDANRLFTSPPRADGSEKWVDFVAAFWHCECVCGLSKKAFTTKYQKWCRKHGYNFSEDKALDIYVSACGRFGVMPKTKTAKLLVEQAISQLQATSAALAALKQEMQSLAASLPEYPVVMGMFGVGPTLGPQLIAEIGDVRRFHSKKALVAFAGIDAPPYQSGQIDVRSRSISKRGSASLRRTLFLVMGVLLQCAPMDEPVYQFMNKKRSEGKPYRVYMMASANKFLRIYYASVKNYLDSLEHN

SEQ ID NO: 240608 - protein, 441 aa, unidentified
MSHGRALSRGDRRRNERLARLRSIVRRDFAVVAVDLASAKQAAVVTDHDSVVLGRRMFTGDAWVIDDILDWAEPIAAKAGYAGVVVGCEPTGHRWKPLLDRSRVRGLELVCVNPMLVHRGREEEDFTRDRSDFKDATIIAKRVAELRCYVPYVMEGHWCRLRHLGARRADQLVAAGSARQRLRDLLECAWPAALSAAADPLDALTWRAAMAVSTDPGCIVAMGFDAFADAVREQLPRWGGIRRNLRVLRAVFDAAHAPGGVQTERAAACERAAYALDDWHYALGQVADVEHRMVEVLDTLDLSELVTTITGLSVVGAAAILAETGDPARFDCARTWAKHAGLCPRANESGNFHGSTKVSRRGRPGLRLAAWRALWPAVRHNPVYAARYTHLTTRANNPLCNGQARAAIAAALLRQLFIVVTRRVAWDPAIAAGTGVVPQAA

SEQ ID NO: 240609 - protein, 414 aa, unidentified
MSKPLIVGVDVHRKTNTFCLMDASGQEVRSRFTLDNNRPGTQAFVQQVAELMEADGFSELQIAAEATGWYWFHFFQSLQQEDLLAAWPVDLHALNPRLTANFKKSYVDVDKTDPIDAFVIADRLRWGRDIGTPFEYDETYLALRFLTRYRYHVVHNLAREKAYCTAILYLKASEYTRQDKKPFSDLFGAASRAVIQEFASIEEIAAMPFEELVEFIDIKGKRRFPDPSENARLLQQVALDSYPLPPALQLPINLVVSLSLKQISALENQEERLNTAIAEHIASIPNTLQTIPGFGPVFAAGILAELGNPQRFNYDQAKVAKFAGFKWRKTGSADFTADETRMTRTGNPYLRYYFCEAAFSVQRCDREYGQYFQRKLQEVRKHAHKRATVLTARKLVRLVMRLLATNQPYRPRRL

SEQ ID NO: 240610 - protein, 401 aa, unidentified
MNAVGIDVSKGKSMVCVMRHFGEVVLEPFEVLHTVQNLRDLAGKLKALDGETRVVLEATGNYHKPVAFVLHDAGLFVSVVNPVLIHDYDNNSLRRVKTDRKDAVKIANYTLDKWTRLRQYLPEDDTRLALKNCYRQYQQAVAVRTMLKNNLISSLDLTFPDANKLFTSPAKSNGCEKWVDFIGDFWHSECVSSLSPDAFAKKYLKWCQKHGYNFTRLKSDEIYASAVNAASLPKSATSKLIIQQQVAQLKAVSQSVAAFQQEMLRLSQQLPEFGTVMEMYGVGPSLGPQLMAEIGDVRRFSSKKSLIAFAGIEPQLNDSGKIVGNDKGISKVGSAVLRRTLFLIMTVILQNQPQDEPVFQFMDKKRSEGKPYKVYMMASANKFLRIYYARVKAVMDSTSSN

SEQ ID NO: 240611 - protein, 408 aa, unidentified
MKSNTQNAKIEAITEKTLVLGIDVGSETHYARAFDYRGVEYSKKPFKFSNTEAGFVTFKAWVLDIKEKHGKDKVIPGMEPTGHYWFNLGKFLQDNEMKPVLVNPHHVKKSKELDDNHPTKNDRKDPKVIAGLVREGRYMIPYLPDGVYADLRTASNIRFQLQAELTRIQNRINRWFNIYFPEYKTVYGKPDAKSGILILKEAPLPEDILTLGIDGVNQIWRDAKLRAVGKARAKTLIEAAEHSVGSKEGAVSARMEIRMLLEDYESRNIRLQEVMGLIEGLVNQIPMAEKLLEIKGVGIKTVSGFLAEVGDIRRFNDPKELQKLAGLALVENSSGKHKGKTTISRRGRKRLRYLLFEVAMSLVAKNPEFRELHNYYTTRRLNPLKKMQSLMAIAAKLDRKRVVFFMPY

SEQ ID NO: 240612 - protein, 354 aa, unidentified
MTDIKYIGIDVHQATSVLAVVNRRGKLISETIVDTSFTTIIDFIKSQRGTIWATFEEGTQANWLYDIIEPHVAKLIVCDPRKNKQDGSKDDKIDARRLANLLRMNGLTAVYHGKGEIRILKELARSYMKLQQDSKRVLNRVKAMYRGRGISCRGKSVYRPENRQKWLEKLDSHGSRERAKRLLQQLDLLSELNSEAVKDLVRESRKYKDYKLLRGIPGIGPIRAALILAFVMTPHRFRNKRQFWAYIGFSVVRRGSAEYEIVGGVLKRSKKKPLPRGLNHNYNHVLKNVFKGAALTAAYRGPFKELLDQRVENGTAPNLALLTLARKIASITLALWKKGESFDIERHRLSEQTT

SEQ ID NO: 240613 - protein, 447 aa, unidentified
MGKIKTKKEEVKMISRLSVINPTAAGIDVSDKEMMVAYPIGLEKLEIRAFGCFTRDLHSLARCLKSHGVTTVAMESTGVYWVALFLLLQEYGFEVYLVNAKHTKNVTGRKEDESDAEWIQKLHSCGLLRASFQPDNMMRTLRSMVRHRQNLVRTATNYINRMQKALELMNIKLHTIISDIDGKTGLLIIEAILAGERDPEVLADLRDRRIKASREDIIKSLEGYWTKEHLFELRQCYQMYCAHRDMIQECDLEIEEQLRDHIASENEGVIPEMSNIKRKSGKHKIPFNLTGYLKEMLGVDVTKVVGISEVSALGIMAEAGIDMTKWKTHNHFASWLGLAPNTKKSGGKIISSKVPKKKHYAGQAFRIAASSLYNSKSPLGDFYRRIRAKAGAGKAVVATARKLAIIYYEMVLKKEAFNPNALSEYQQKYKLKKINQLKKKIALLEAA

SEQ ID NO: 240614 - protein, 406 aa, unidentified
MSAYRFYVGLDWATEAHRVVVQDAERQGVAERTVPHEGGALEAFAAWLSELAAGVPRDVAVALESPRGAVVDILLANGFHVFALNPKQLDRFRDRYTVAGAKDDRRDATVLATALATDQPAFRRLAPEHPLVIELRELSRLEDELQQELQRLTNRLREQLHRYFPQLLQLVPAANEPWLWALLDRAPTPSAAQHLSRAALRTLLTRHRIRRVDADAVRALLQHPALPVAPGTVQAAQRHLAVLLPRLRLAHQQRAECATLIEDILERLGEQQEHRDVPILRSLPGVGRVVAATMLAEASRLLAARDYHGLRTHTGVAPVTKQSGKHWVVIRRSACNRRLRDAVHYWGQSVVRHDPRSRAHYDRLRARGHSHGRALRGVVDRLLRVLIAMLTTQTLYDSNRRLPIAA

SEQ ID NO: 240615 - protein, 341 aa, unidentified
MDKELYFGIDVSKKTLDLAYYDGETIDWKNAHIKVSNDDAGFKKIGSWVAKVGKDFDTFLFCMEYTGLYNQNFRLWLESKEYIYGMVEPRKMHRFEPDLDDDQRSLDRIKTDELDAFRIAIYCEQNHKKILRNPSKLPSPVYFKLKRLLAERKQNTKQSTLYKQQLHDICAYDTDLSVERKKLLLKNMKENLKAIDKEIDSYMQEDANISKNYNLLTSIPGIGRIIALETIVLTENFTAISNPRKYACYIGIAPFKKESGTSVRKKTGVSKKGFSEAKADLSIAVLSAIKNNPSIRDYWIRKRKEKCGGIVLNAVKFKLVLRMFAVIKRGTPYVETDAYKN

SEQ ID NO: 240616 - protein, 361 aa, unidentified
MFTERTSVGLDVHARSVVAAAIDGVTGEVFRARLTPNNEQVVGWVRSLPGPSVATYEAGPTGFGLARAMAAAQIRCVVAAPSKIRRSAGDRVKTDARDAMLLARLLRMDEIVAVTVPSVEQEDARDLVRAREDVRGDLMRSRHRVSKLLLRQGIVYCGGHAWTGAHLVWLRAQHFDTPGLALAFDAEYEAVLAAEARRDRLDEAIAAMAADSQFTPVVHRLGCLRGISTLTSFGLAVEIGDWDRLTGASIGAYVGLVPTESSSGQSRSQGSINKTGNTHARRLLVEAAWHHHKAYRTPGATMRARWELAPAAARARGHAGNRRLHERWLRFTERKKRPVVANVAIARELAGWCWSLAVMDP

SEQ ID NO: 240617 - protein, 418 aa, unidentified
MKTATEAIPIERYIAIDIHKHYVLIGGMNAQKAWLLRPRKVMMARFPEWVHKNLVGSDAVVIESTSNAWEIYDLIVPLVGKIVVANPLKVGQIAGAKVKTDKLDVERLLTLLIADIVPEVWVPPQPVRDLRALISHRWRLHKQIAMTKNRLQSFIHRFNLIPPEGQLFAEENRTWWRQQEFSSMVRLQIEQDLLILEHLSAQKKAIHQELARLSNRTPWADEMVFLMQIPGLGVVLAMTVLAAIGDISRFEHAKNLVGYAGLGAGVHDSGQKHQEKGITKSGRKELRWALVEAAWGAVRSDPHWNAQYENLKKRGKHSNEAIVAVARKLLVAIWHVLSKREPLCQSSDEDLAYKMLIWSQQMNEEALRGLTRQQFVKYGLIRLGAGQHLTRIVRNGFPRRIAPTAEVLKLRPDLRPPN

SEQ ID NO: 240618 - protein, 340 aa, unidentified
MAQNDLVVAGIDIAKDKADVCIRAVSQRQTFPNTAEGRRQLVSWLRKYKVTKAVMEASGGYERDWAKALREKDMEVRIVDPKRVRHFAQSAGRLAKNDIIDADTIAWFAETFGEAPGQAHDAARETLLQMVKARQGLLDMKTMLSNKGEHDVPEPVQKSHARLLKAIVVEIAKIEAAIAAMIKATPHFAALAEIIESVPGLAGTTSAGLIAAMPELGQVSNAAISALLGVAPYDDDSGKRRGERQIKGGTPQGPQSVLHGLPGSCDPAQPGAQGLLSSPDRQGQEGKGCPGRLHAQADRHSQHHDRPRREMGCQSPRGRLTSAPPPRSAFGRALAEPTDR

SEQ ID NO: 240619 - protein, 343 aa, unidentified
MKRNTIGLDLAKNIFHVVGFDHRGKQIFRKQLRRKQVTNWFAQQPVSLVGIEACSGSHYWARTLMELGHEVKLVAPQHVKAFVRGQKNDYNDASAIAEAVTRPQMHFVPIKSAAQLDLQALQRLRTRLIRERTGLSNQLRGLLAEHGIVIPRSLAALRRRLPELLEDADNGLSALFRRLLHAGWQHLLEIEEQVKTLHLELTRAVAQDENCQRLMTILGYGPVVASEFSVAVGDGRCYRRGRDVSAVLGLVPRQHTTGGKPKLLGISKRGDNLLRAHLIQGARSVLIHAEGKDDPLCRWALKIRAERGFNKATVAVANKLARIGWAVLRNQDTYRPEYRIHTT

SEQ ID NO: 240620 - protein, 367 aa, unidentified
MSKVRFIGLDVHKDSITIAVADQDGSAPEVVATVPHELRAVLKQLKKLAAPAQLRCCYEAGPTGFGLYRALNEAGVECVVVAPSLVPKQAGDRVKTDARDAIKLARFLRSGDLTVVHVPDAQTEAMRDLERARECAKRAERTARHALSKFLLRHGCNYSGKSWSQRHLDWIRTVHFESEAQQRVLVSYLHAVEQATERVAQLTRDIEELVETWSLKPLVKALQALRGIRLVTAVTVAAELGEMSRFVTAPQLMAYIGLVPSEHSSGGSVKRGAITRTGNQHVRKALVESAWSYRFRASMSYEIRRRNEGVSEEVRAIAWKAQERLHRRYQRLVGRGKSKQQTVTAIARELAGFIWAIGRQPALLQAA

SEQ ID NO: 240621 - protein, 475 aa, unidentified
MNVKGTKKKNQVVKVNIFEQQEIITKAEAIMSNLKASTWHELETNGKFDKNAKLTFISDDMLIIGCDVGSETHYVRAIDTRGRELSKSAFSFSNSAEGFKSAKEWAAKLAAVHHKNQIVMGLEPTGHYWFCLATWMISNGISVVQVNPYAVKQTKEVEDNSQLKDDRKDPKLIANLVKDGNFGMPYLPEKVYADLRRLSLLRDQLTEDRTRSLNRLHRDMKIYFPEYKDAYGKVDGAFCLELLKYAPFPEDLITLGADGIRQIWHDAKLRGRGYSRASEILQYAEKSVGIRDGADAAKMAVKWFVEEITEIDRRLLDIEKQMNQKCMEIPYAENLLEISGIGEHILSGILAEMGDITRFDDVKEIQKLSGLGLVACSSGKHKGETKISRRGRDRLRYWLFQGAKSVVAHAEEFRELHTYYITRTVNPLKKMQSLIVIACKLLRIIYTILTKGTVYDPKKMLMDIRRPAEEQAQAA

SEQ ID NO: 240622 - protein, 340 aa, unidentified
MRRLYAGCDLHGNNNLIGIVDGEGKRIFRRKLSNDLLLVRDTLKPFKEELVGIAVESTYNWYWMVDGLMETGYKIHLANPSAIQQYSGLKHSDDKHDAFWLAEMLRLGILPEGYIYPKEERPLRDLLRKRGHLVRLRTSLIVSLQNILSRNLGKKINVNDMKAIKEDRVNFLLERNEDLALAGRVSKEAIDHLTQQIHKIEWVVQKRTALKESYRYLLTLPGVGKILSLTIMLETGPISRFETVGDYVSYCRKVPSQWMSNGKWKGTGNRKNGNKYLAWAYSEASEFARRLYPEPRDYYNRKMQKTNAAVAHSALANKLSRAGYYVMRDQVPFQPEKLFG

SEQ ID NO: 240623 - protein, 361 aa, unidentified
MNVIHYIGLDVHKKTISYWVKTADGQIVQEGRLEASRSALRSWADGQRVPWRGAMEATLFSAWIYDTLKPYAQQLVMGHPARMKAITAGKKKSDSIDARTIADLLRCDLLPTCYVLPPEMRDLRRLLRYRNMVVQQSVRMQNKMAGLLMESGTAFHKDKLHGKKYFSELMKSLEEVPESVKDLLRMSRGSMEMFQSTQKQIIKRLLSEPALEQRVERLTSIRGVGAITALTWALEVADPYRFSSIGDAVRYCGLTAAFRESAGKQQRGPISKQRNAWLQTVLIEAAKLAPRWNPQLAKLHTKQLELGHPNRATLQVARKLVAYLLAVDKSGRPFQMATPPPPLPGPAKGKRRKRAALAKAA

SEQ ID NO: 240624 - protein, 347 aa, unidentified
MIVVGIDPHSRLHAAAAVDEQGRLLEGIQVGSGPGELARLQAWIERLPRPRLVAIENARGYGLAIVRLLLAQGEELVDVPATLTSNGRRGSGQRGKTDQGDALVVARIGLRDQDRLPRLDATLLDDELKLLADTRDQLIVEAGRWRNRAHALLRVSSPGYQSKTGALASAGSVRRARTIAKRSVAEDPVRGRLAVRALDRLASLERDAGKLEREIRELLRVRGCTRLLAIRGVGPIVAATILGETRGIGRFRSAAAFAAHSGTAPVPASSGRTQRHRLNRGGNRQLNRALYTIAMVQARWDPAARAYLDRKLAEGKSAAEARRCLKRHLANVIYRALTADTEAATLT

SEQ ID NO: 240625 - protein, 382 aa, unidentified
MGYQPVEVGLSTVECWRPQLIEYRSFVGLDVHARTVEGCVIDATTGQIVHRKLKANTPEVVSWVASLPGPPTVTYEAGPTGFGLFRHLVAAGIDCHVAAPSKLQRPSGDRVKTDTRDAEHLAKLLRLGQIVEVTVPTLEAEAVRDVVRAREDTRQVLMGNRHQLSKLLLRHGLVYDEGAAWTAKHDRWLREHRTSGDRSFMTAFDAYYEAVTQTVARRDRLDRVIGGLAANSSFTPMVNRLGCLRGVSALTGLALAVEIGDWHRFTGKTIGSFVGLVPSEYSSGQSRVQGGITKTGNSHVRRLLVEAAWQHRRDYSPSRQSILHARWEKAPAPARLRGQAGNARLHRQWVAFTARRKRPVVANTAIARELAGWCWSLAVMDD

SEQ ID NO: 240626 - protein, 417 aa, unidentified
MKCAPSFLPDQPANGLTAGIDWARDDHALAIVDARGKQIYRDTVEHSDAGLRALLKLLANHGVGEVAIERPDGPVIDALLDGGLTVVVISPNQVKNLRGRYGSAGNKDDRFDAFVLADTLRTDRARLRPLTPDSPATVALRRACRARKDLVAHRVALANQLREHLRRVFPGAVGLFADIDSPISLSFLSRFDCQDRADWLSPKRLAAWLASVGYCGRTDPAVLHARLTDAPRGATGDHGTAESRVTQAYLAVLASLTDQIKALSIQIDEQLALHTDAHIFTSLPRAGRIRAARLLAEIGDCRARFPTPESLACLAGVAPSTRQSGKIRSVGFRWSCDKQLRDAVTDFAGDSRRANPWAADLYDRAIARGHDHPHAVRILARAWIYVIWHCWQDNTAYNPDQHGALQRLIQSRNHAAA

SEQ ID NO: 240627 - protein, 371 aa, unidentified
MRFVGIDLHTNCFTCCYIEENGGKRTITYTLDDEGINEFRKTLDKTTHVLIEATLNTFAFVERFQELVGSVTIANTYKLKIISFTNKKTDRVDAEKLARIIKAQVMSGEEQIQPVSIPPKVVQDLRALFSTYRLLTKEITITKNRIHSLLKQHLLQISRAEVFNKKNRAAVREISDDPVLRFQLNLLFDSLEVVETKLDALSEQIQVTAPFLHEIDILTSMKGVSVMGAIALMSDIISVDRFPNSKHFASYLRSAPKVASSNETTIIKRTNRWGRRMTMVFLSQSAHHCRDADPHLLHWYEKLTQYKKKGLVRMGLCRRVITQLYQMLKNDEYCYYRDVANHASKMAAYLALLSRHGIVGERTESAQKIAS

SEQ ID NO: 240628 - protein, 431 aa, unidentified
MEMTIGVRRRIAKQTQRRAELTPETMIVALDLGKRQHAVWVTDSTRIPMGTWMMPATPQGFATLFDRTARLQQQFERPHVLFAMEPTSHFWKLAAQQIMDRGAHYRLVQPLSVRRAREEQRYTWAKGDRIDAELIATLIANGTWLEKQLETGPWGTWEQVARTRLHLVQQRADTLRELLASIELCFPNYPYLPSGVTQPGSLAILRSCPTPAQIRHLTPEAFLTRVRAHYAGARFLARRVLRVYHAAQSTWGLRAERLATSLRIPMAVDRYVLLTAQVAVMDRHLVRLYRASGAAPLLATIPGLGVAMAGTLVALMGPVGRYDRSRCVVRLAGAEPTQNASGLFRGETPMSHRGRGHLRLAAYQAVMGLVRHNAEFRARYDWLTTRPKRPLHKIAARIALADKLLRTIYTMLVTRCPYDASVARGEGQHSQ

SEQ ID NO: 240629 - protein, 340 aa, unidentified
MSLIKVVGIDLAKYVFSIHGVDEHGKCKLRKTIKRNNLLAEITKLPPCLIGMEACSSAHYWARAFTKLGHTVRIMASKFVIPYRQSEKNDANDAEAICEAVARPKTRFVSIKSEEQQAVLCLHRIRQGLIKDRTASINRLRGLLAEFGIVMPQGRYPAQNTISSILEDAENGLPQLARELLTDVWLSIQGLNQEILKYDRKLYALSKQMPAAKLLMSIPGIGEVTATAVVATVNDAKHFSSSRQFAAWVGLVPRQYTTGGNVHLGRISKRREKHIRTSLIHGARAVIANCKTKTDKTSLWVQGLIERRGFKRAVVALAAKNARLIWALLQSGKEYQLDYV

SEQ ID NO: 240630 - protein, 390 aa, unidentified
MFYLGIDIGKFHHTAALLTDEGKVIATVPSFSNTHAGFQVLLTLITSHLPPGEQLRIGMEATGPYWIPLAQWLNTHGWPPVVMNPIKTSSLRNYGVRGSKTDNIDSVLIANALRFEGDKPQQVFPKHSEELRHLTRLRADMVNDRTRVALRMTSLLDRLFPELLCSFSKTLSPCCLALLSQAPTPSRVLALGEERLTTLLCHASRGKLGVTRAREIMNKAAASIGVTSKALEEILPLLLQQINLLDSQLRTLDHRIAELYDQAGLYFTSIAGVGTLSAATILGEFGSVERFKQAKQMVAFAGVDPKLRDSGQHRGAVHISKRGSRYLRRALYLACQGVVRKDDYFNAIYQHHRDNGKSYKEAIIAVINRFIHVIYAIWRDKRPYYPLTPA

SEQ ID NO: 240631 - protein, 333 aa, unidentified
MGEQQTKESLGIDISKLTIDAALHHQGQHEQFSNNRTGFKAMLKWLSKLGIDTGNLVICFEHTGWYCLKLSHFLHGLGIAYHCANPIEIKRSSGLVRGKDDKADAFGIARYAWLHREELVESKPMSEQLIELQRMMALRTQLVKQMTALKNQRSGMKVVSDSPSTDFCIRSIDQILHHTKGQLLKLEKQMQELIKMDDEMQSNFELSRTVKGVGPILAMQMLLHTHNYSRFEAWRQFSAYCGLVPYQHSSGTSINRRPRSHAISDRGMKSLLSMSALSAIRCDAELKAYYQKRVEEGKEKMVVLNIIRNKIVSRVFATVKRGTPFVPLSKHAA

SEQ ID NO: 240632 - protein, 467 aa, unidentified
MRKDTQKKRSKSKKKGGKSLIQLPIHLDHINKMAAGIDIGSKSHFVAVPKGCAETCVREFKSFTRDLIALADWLEECGIETVAMESTGIYWIPLYELLESRGFEVKLVDARHVKNVSGRKTDVLDCQWLQQLHTYGLLNGAFRPNQEICELRTYSRQRGMLIQQASAHIQHMQKAMSQMNIQLHNVISDITGETGLKIICAIVGGERDPKVLATYRDRRCKNSLKIIQDSLTGSYREEHIFTLKQALELYTFYQGKIAACDDEIEKKLLTLDECRKVEESELNKRASKRKGKGRSKNAPLFNLKSHLIRITGVDLTAIPGIEATSALKIISEIGLDLSRWRNSKQFASWLGLCPGNKVSGGKRLGGKSKRTANHAASTLRMAASTLHRSDSALGAFFRRLKSRLGAPKATTAAAHKLGVIIFEMIKNGIEYDEVGQDYYEKLYRERLVKNLSFRAKMLGFDLVATTC

SEQ ID NO: 240633 - protein, 408 aa, unidentified
MEVLYPRCAGLDVHQQTVVACARVAAGSTVHQEVRTFGTSTADLLALADWLTSHGCTHVAMESTGVYWKPIWHVLDGQFDLILANALHIRSVPGRKTDVNDAMWIADLLAHGLIRSSFVPPAAIHELRDLTRTRKQLVREVAQHTLRIQKVLEDANLKLTSVISDVMGMSGRAMIEAIIQGEQDAERLADLSQGRLKASRPAVVAALQGRVTPHHRFLLRLHLTQIDALDVAVREVEARLGEALAPFQAAVDRLMTIPAVGRTVARVIVAEIGFDMSRFPTAGHLVSWAGLCPRQQESAGKRLSTRTRPGNPWLKTTLVQVAWVAARTRNTYLRAQFLRLKSRRGPKKAILAVAASILTAAYHILKDGVTYHDLGADYFERRDKAHITRRLIRRLEQLGLSVEVRPAA

SEQ ID NO: 240634 - protein, 319 aa, unidentified
MSDNVSKVYVGIDVSKSQLDVAIGKDGEYWQAGNDRIGIQRTIARLKIIQPTLIVVESTGGLETALITELFAAGLPFALVHPGRVRDFARSIGLLAKTDKLDARLLAHFGEAIKPPVTRLPGEAEQYLNALMLRRRQLLDMLVDENNHLASTRLSLRPKVEAHIAWLQAELADLDQQIEDQIQQIPHFREKETILRSAKGVGPVLCAKLLSGLPELGQLNRKKIAALVGVAPFNDDSGRKRGKRRIQGGREDVRHVLYMATLAAARSNPVIKPFYQHLLKQGKLKKVALVACMRKFLTILNAMIRDMRPFNASHLQHNP

SEQ ID NO: 240635 - protein, 380 aa, unidentified
MPEAVIGLDVGKSSHWACVATRDGEILLSAPVANREGDLDSLFGRFPDALVVVDQSRNIGALALARAKAAGMSAAYLPGLAAHGAARLFAGDAKTDERDAMVIAKTALGIPDALLPVGDPGPTVAAARALAAQRNFLTCENTRSRNRLRSILLESCPAFEALVDLSDGPQLRLMASLGGAWSVADAGPRRAAALTRGAARGKIEALVRSTASSTRPDAAAIAAEDRAVRLLALRISENSAEIDVITAEISALLEGDDTYRCLLTVPGIGPKTASELAISIDIEDFPSHDRLASYCGLAPRNRQSGTSISSVTASRQGNKRLKNLLIFSCNCLTRTEGRWGDYYARCRERGMPHGKALKALARKRLKVIYAIMRDRVPYAA

SEQ ID NO: 240636 - protein, 476 aa, unidentified
MQAVHWLHIPLGRFVLFKEQNARRARRAAEPPDTMTMKNPLDLPILNPHAAGIDVGSEKFFVSVGGQEPKVFLTVTEQLEELCRYFEAQGVRTVAMEATGVYWINLYGTLEAAGFEVVVVNGAHCRNFPGRKTDMKDCQWLAVLHAHGLLTSGFVPPADIRQLRDYLRLREDLVSMAAQHVQHMQKALDRLNVKLHVVISDITGVSGMKIIQAILAGQREPEQLLGLCDEQILKTKRAAVLASLHGLWRKEHLFALELALDSYQAYQKQIAKCDERIAEVIEKMRGGKTPPLELGPAKELRHNAMVIEGLQRSMAQIYGKDLTKLPCLNQSTVTMLLAEVGADMSRWKDWRHFGSWMALAPSHAQSGRHRRRVKRYLNPAGRILCRAVQCMAVGKHTWLASFYRRIRAKRGAKVAIKATAYKLAKLIYLVLTQGWEYVEQGIAKYQERMQQQQLKALQKLARKLDCVILPKQMATN

SEQ ID NO: 240637 - protein, 316 aa, unidentified
MPYATCFVGLDISKSCLDVCVLPDQKHARFANTPEGIATFIAFLVRLEGIERLILEPTGGYERLVVTALQAARLPVAMVNAGQVRQFAKACGQLAKTDAIDAFILADYGQRMQTRILPPRSGQQIALEQLVLRYRQLAHMIVQEKNRREKLNHSGHSRTRDWIEQTLRFLLDQRRAVVDAMAACLKADPDLGKKAEVLMSLKGIGMRTACFLLAGLPELGLLDKAQIAKLVGVAPLNRDSGAMRGQRMISGGRRPVRDALYVAALPAIRFDPDIKAFYTNLRKRGKPGKVAVVAVVRKMLIILNARMREHINIVDA

SEQ ID NO: 240638 - protein, 344 aa, unidentified
MEEYVGLDVSKEETSFCVMDGSGKVLVQGKVASDPDPIFEALRAHTLCPARIVLETGTLSNWLARGLREYGLAVDVIDARQAHGVMKLQHNKTDANDAHLLAEIARTGFCRPVSVNSETAQKHRILIKARRHLVCQKRTTENAIRGFLSSLGIRFPKGSGKLAKRVHAALAERPELKPMIEPLLASAEASRTQIKRLDEAVALAARTLPDCRLLMTVPGVGPVTALAFAATIDDAGRFAKSRAVGAYFGLTSRRNQSGEMDYSGRISKFGDSLLRSLLYEAANSLLTVVRKAHPIKDWARRIRKRSSHKKACVALARKLAVIMHRMLVTGEAFRWPQKEAGVTA

SEQ ID NO: 240639 - protein, 388 aa, unidentified
MDVLYQSCAGIDVHQATVVVCILHGPLTSTRPKREMAQFDTTTKGLKACHDFLTQFHVEAVGMESTGVYWRPVWHELCDDFELILAQPAHMKAIPGQKTDKKDAHWIAQLTRIGLLPRSFVPDETIQELREITRQRKHYVESRNRETNRIHKILQSGGIKLTTYIEDIMGASGRNLLQLLIDETPLTPRMIHQSVYTSLKRKVPQLLEALDGYFSAHHRFMLGQSLEIYDFYQKQIDCLEERMNGYLNLYERPVEILDSIPGMDLITASVIIAEIGVDMSQFPTAGHLASWAGLCPGNNESAGKKRSTKIRHGNSYLKRCLCQAVFAAKRQKGSPLAERYYQIQSRRGPQKATIALAHQLLKIAYILLKENLTYQEFVLQKRLLETSQ

SEQ ID NO: 240640 - protein, 343 aa, unidentified
MQTITTIGLDIAKSVFQVHGVDATGQVVIRRQLKRRSVLAFFQKLPSCLVGIEACASSHHWSRELQALGHTVRLMPPAYVKPYVKRQKNDMADAEAICEAVTRANMRFVPTKTPEQQSCLMLHRTRHLFIRQQTAVINSIRAHLAEFGIVAAVGRKGVTELLHIVADPNDKRVSEVARACLAALGGQLLSLKQQIVEFDRMILAWHRSNQTSKRLHYIPGVGPILATALVASVADPSTFRSARNFSAWIGLVPKQHSSGGKDRLGSISKQGDRYLRSLFVIGALAVIRYAKIHGTKHRPWLTALLARKPAKVAAIALANKMARMVWAMMAKGERYKEPVALAR

SEQ ID NO: 240641 - protein, 324 aa, unidentified
MTAPLEHDTLLIGIDVAKDKLDLARSDTDATATFANDPQGIAGLVATLRGLDARPGLIVAEATGGYERAVVAALLDADLPVALANPRHVRHLAKGLGLTAKTDAIDAKVLVAYARHARPRLVEKRSENREELEALVTCRRQLLEVRTEQTNRRQVTDSAKARKAIDAVLKTVERQIKSLDEQIRKLIESDDDMSRTDRIIRSVPGLGPVVSATLIASFCEAGRLDRRQAAALVGVAPYNRDSGKFKGPRAIQGGRAPVRNVLYMAALSAIRYNPVIKTFADRLKAAGKKNKVVIVAAMRKLTAILNAMIRDDLEWSQLQIHKSA

SEQ ID NO: 240642 - protein, 342 aa, unidentified
MRRKIGVDLHKNSFRVCYYENDKKYDFETHRVSVKGLEGFKKGLKKTDEVAVESTGNTGHFVRAIEGEIKRIRVINPFQFKIIAESVKKMDDEDALKIARFLSKDMIPEVRMKTKAESQLGSLIGTRDKLVKLRTALKNKVHNILNANGIVTKTELLTSDKSLEKVLGKGLDASYQFELEIIVGEIRHLNEAIAKIDGQINDRGRTLKGYEGVTSIAGIGGLSGTILLNAIGDVKYFRDEKALASYFGIMPRIYASNETVHMGRITKMGNKIARTALVQSTLIAIRYSPYLRAFYDSLKAKKGSGKAIIATARKLLGIVYNTLKNNWVFEDFGNYKLALSCS

SEQ ID NO: 240643 - protein, 407 aa, unidentified
MDWAKDHHAIVVLAPDGHKVLDVQIAQDAQGWQSLRKKLVAVAGANLAVVAATVETTCGPAVERLFELGCALYPINPKAGQRYRERKVPGGGKSDSLDAWCFADALRTDGHAWRRLAPEDPCLQELRLLCRDERHLIRQRTALVNQLRQALLEYYPAALEAFDDWTVPGPWDFVLRFPTPAALVQAGKQAWDKFLHSHHLYRPSTYAKRLEIFGRAAQFCGTEPVTKAKSLLAVSLAKELGTLQRQLSDYRERIEQLFREHPDHELFGSLPGAGDTLAPRLLSECGQDRQRFEDHEALQCYAGTAPVSFSSGQLHVVRFRRACNRDLRAAVHLWADCSRKTCTWAQVYYEHKRQEGKSHACALRCLGQRWLKILWKLWQTRQPYNEQVHTRNQVRHGSWGLALAAPQ

SEQ ID NO: 240644 - protein, 378 aa, unidentified
MTNGVTCVGLDAHKESIQVAMLVPGQREPLEWQLANEPQAVRRLAKKLLREAPEDVVCCYEAGPCGYALQRQMLAVGVQCQVVAPSLIPVKPGERVKTDRRDARKLADLLRAGMLTEVHPPTVEEEAARDLCRCREDAKEDLLRGRHRLVKLLLRRGRMWIAGKRSWTKAHHEWLRGLRFERPADQAVFEDYLLGIEQIEERIARLDAKLEVLAQEEPYREPVSWLRCFRGIDTVTAMTLVAELHDFRRFQSPRGLMAYLGLVPSEHSSGNSRRRGSITKAGNSHVRRVLIETAWHYRHAPALSKKYRRRRRGQSTWILALADRAQQRLHRRYLRMCARGKPHNKVTVAIARELVGFIWAALRGRPIEIVEPTALVEQ

SEQ ID NO: 240645 - protein, 349 aa, unidentified
MHATKIVAAVLDAETGQLQVFAMTGENAKAAAFCAGLPRPVRVAYEAGPTGYGLARELIKRGVECVVAAPSKIPRASGDRVKTDRRDAEHLVRLLLAGKLHAVRVPGDEEEALRDLVRARDAVRMDLMRCRHRLSKLLLRHGIRFEDGAAWTQRHRDWLATVTLQWAAAQATLLDARGAVDALAHRRDSLEREIVAMLPSSPWVVQVGRLRCLRGVDTLSAVGLCAEIGDFERFARPGKLMSYVGLVPCESTTGQQRRLGAITKTGSGHARRLLVEASWHYRSRPSVGRALTDRQQSQPPEAIAVSWSAQQRLYRTWTRLEARAKRRTIIAVAAARELAGFCWAITQIE

SEQ ID NO: 240646 - protein, 322 aa, unidentified
MQVNAILGVDISKKKFDVCLLMDNKKRHKVFQNNQDGFAKLVVWCNGHGANLIHLCLEATSWYGEDLATFMHDLGHNVSIVNPAQIKAFGKSELLRNKTDKSDAAMIARFCIANKPALWKPIAPEMRHLRDLYRCMQSLKNDKLQQMNRLENENMHSSCKEAISKVILAIEEQIIVLETEINEHINHYPHLKNMVENLKTIKGIGHLTAVAVIAEMPAADNFDNAKQFTAFAGLNPGHYESGSSVSKRSCICKIGSERVRKALYMPAIVVKNHNNHFQKFCQRLASKGKCPKVIVLALMRKLMHVFFGILKNNQPFNCNLVG

SEQ ID NO: 240647 - protein, 882 aa, unidentified
MDILYEQVAGLDVHKDTVVACVRIVAEGKTKRECRTFSTTTDQLVELRAWLEECRCTQVAMEATGVYWMPVFRILGEGLFELIVANAAHIKNVPGRKTDVNDATWIADLLACGLIKASFVPNEEIQELRSLTRTRKQLVREQTRHVQRIEKTLAEANIKLDSVISDIMGASGRRMIEAMIKGVRQPRQLAELAGKQIKATPKELYDALHGRLTDHHRFLLDLHLKQWDGLDKTIREIDREIDQRIGRLRTKGESGEVPFRTLIELLSTVPGISTVSASAIVSEIGCDMSRFPTAGHLVSWSGLCPGKNESAGKRKPSRLRKGAPWLKTMLVQCAWAAKRKKDSYYRAQFFRLQTKRGPQKAICAVAASILTAPTLIGAPSNSRPAGSLLVLKSSALTSNSNQSRRPPDASIQQLLPRRRSCAVSNHEATVRALSFETLAGASSSGRGSSFTEELMTASATFSFDAPGDAQRAAELKRVKAQATLVLAGTLTLFAVAKALLHLHPAFGFIAAFAEAATIGGLADWYAVVALFKRPLGLPIPHTAIIQSNQHRIADKLGEFIEVHFLEAGPIEAKLRQVDFGSFVADWLRDRKRCDDLARFALRLLPEAFSATETSGLMTFITRRMTTQLQSIDLAPLAAATLRAFVEERRHQALFDDFLRIIHDTMTQAETMAMIRAKIRAELPTLLRLYRADKFLVNKIVASATAFLEEVRNDPKHPFRGEFDRMVLSFVDRLGTDKSYADRIDGLKRDLLARPELTALARNIWSNMRSFIERSASGETQVLRHHLAGMFVAAGEALAGDAELRGEINQGLVTVLRSFIADQKSGVSTFISDQVKAWNMAQLISLIEINIGKDLQYIRFNGSLIGGLAGLALYTAEFLLRLL

SEQ ID NO: 240648 - protein, 412 aa, unidentified
MKDLLEISCGLDVHKDKIVACILTGPLGKPTNSEIREFTTLIPDMIALRDWIVSQNCHHVAMESTGIYWMPIYEILEEAFGGDITLLVVNARHMKNVPGKKTDMRDSEWISTLLRAGLLNGSFIPEKRIREFRDLNRYRKSVIRDITSQKNRVEKFLQSSGFRLSSFISDIFGASGRNIIRHLTEHGQIDRSALDSCLKTKTRNRIDEILMSVNGTLSEHQKAFLKILMDHYGSLKEHLAEIEKSLEADMAPFALQVEQLSSIYGISTTASCAIIAEIGIDMKPFKTAEHICSWAGLCPGNNESAGKRKSTSVTKGNPYIKSMLCEIAWVIAGKRNTYLSAWYWRIKQKKGAKKAIIALARKLLVIIYTMLKQGTLFDESCFEARRKSCEQKQLSRYIRELEKHGYHVEAQA

SEQ ID NO: 240649 - protein, 461 aa, unidentified
MLTPVSGHLHVGVDIGSRCHAVAIGLSDGRLLEEFEIPHSAAGFEDFFARIEAHSESHPYPVVVAMEGYGGHARPLDGLVAERGWSLFNVNNLKLARFKEIFPAAAKSDRIDTRKTLELLQLREHLPVAADVLQEVVARPEENDVLKRLTRRRRRLVNERVRLTSVLHSDLQAAAPGLVEITRDVANLWFLNFLTCRKDLRKLVRIRRASLLKLPAIGACYADRIQAWQTCACFSRDAALVGTMIRQDALRVLELKRQIKALDDEIARVAETSGAARRLASIPGFGAVCSAELAGEIGTIARFNNEGSLALYLGMAPLDHSSGKLRGSKSPKHVNTRAKAAMINALDRHRKEVLQSQRYYETKRAGGKTHNQAIRALGRHLCRVIFKMLRSDRPYRIDPRGDPADDQINASAREPASDSGNQPSNPPAADRENGPPEGEPSKVRSSPLAAIGSPACTAGPP

SEQ ID NO: 240650 - protein, 321 aa, unidentified
MNKGNQIYGVDISKKVFDVYSEDQQHQQYDNSSSGFKKFLKKLPSNALVVMEATGYYHYLLAQFLYSNDIAVSVVNPLSVKRFIQMKLAKVKTDKSDSKAICEYASNNEVPLYNALSELQSECLQLFRLLDIYIKQRTAIKNKIHGEKALGTPSKFVVSSLKRTLNQQTKEIQAIESKLLELVKEEHQQQLTLLKSIPGLGCKTALFLIIITEGFEKFENAQQLCSYVGITPTIRQSGSSVRGRSRISKVGNKKLRNLVFLCAFSARKYNKACKALFDRLVEKGKSKKLALIAVANKLLKQAFAIVKSGFVYNESFVSKLN

SEQ ID NO: 240651 - protein, 338 aa, unidentified
MRVTTVGIDLAKNVFHLCGMNSRGRVIWRRRESRGSLLRFLRSLEPCQVFMESCGGSHYWAREIRAIGHEPKLISGQFVKPFVKSNKNDVADAEAICEAGSRPTMRFVPIKTPEQQDIQAMHRIREQLVKFRTGLINQGRGLLMEHGVTVVKGRHGFQRQIPLILENGNLTDLFRELLRGLYEHVQSLNEKIAAIETKLKRVCKDSEAAQRLLEIPGVGPLSATALIAAVGNGSDFKNGRHMAAWLGMVPRQSTTGGKPRLLGISKRGDHYIRKLLIHGARSVLISPNDLGRRQSWARELKARTCANKAAVALANKNARIMWALLNREERYRHMAESA

SEQ ID NO: 240652 - protein, 344 aa, unidentified
MDHFAGLDVSVKETSVCIVDDTGRIVREVKVGSEPEALLKVLGTPAYRFKRIGLEAGPLSQWLFSALAEAGLPVVCVETRHMRAVLKAQINKTDRNDARGIAQMMRVGLYRPVHVKTLRSQKLRMLLTHRRPLQSKAIAIDNDLRGALRNFGLKVGMVGTVRFEARIRKLVEDLPDLAALIEPLLIVRRTLREQFCILHRRLLAIVRDDEVCRRLITIPGVGPVVSLTYRATVDVPARFRKSKSVGAVFGLTSSRYQSGEVDWSGKISRCGDEMMRTMLYEAAQSMLHSKKWSWLKAWAMQIARRRGMKKAVVALARRLAVIMHRIWVDGTEFRWTREQVAAAA

SEQ ID NO: 240653 - protein, 383 aa, unidentified
MLTVEARVHPLVQARALSKLLKPISNGDAPMSYDYHIGVDYHKAYTHLVVQDGGGKVLRSGKVKNDPRSLAGFLAPYLENSHAVMEASRNWTVMYDWLDELCDDVVLAHPLKVKAIADAKIKTDKIDATILAHLLRADLIPESYVPCEAARELRQALRERMFFVRLRTMVKNRVVTIFDRYPEQTRALREMSDLFGKIGRVQLELLSVSVIDREHIDRALAFIDDINQRIRESEKTIRRFSKDNADVKRLKTMPGLGEFFARLIAAEIDDVTRFRSAKKLAAYAGLVPSTYASGGKCWNGRIIKAGNKWLRWAFVEASIPAMRAEPALKFEYERLKATKGANRAKVVMARKLLTIAYQMLRDQRDYEHRDALGERPSDPSRLS

SEQ ID NO: 240654 - protein, 410 aa, unidentified
MQAIIERCCGLDVHQETVVACLLVGAPGEQPTKEVRTFRTVTRDLEALRDWLLEAGVTHVGMESTGVYWRPVYAVLEGHFDLIVGNARHIRNVPGRKTDVKDAEWIADLVRHGLIAKSFVPPKPLRELRELLRYRRKLVESQAGERNRLLKLLETANIKLASVASDVFGVSGRAMLRALIAGEASPAAMADLARGLLRRKRDDLILALDGRLEQHHRFLLAMQLHRLEPIEADIAALDRRIGERLEPYSAAHALLMQIPGVDWVVAAVLIAEIGVDMSVFVSVYHLSAWAGVCPGNHESAGRQRSGRTRKGNVHLRAILVGAAMSASRTKGSYLKDKFHRLKARRGALRAALAIARKIRLRLSHARQELGLSRAWRSLSRPDRPDPNRRKPQTPPRTPRISRNARTPPTS

SEQ ID NO: 240655 - protein, 344 aa, unidentified
MSAKTVGIDLGKDKMHVVTLDSEGRVVERRVCASRSALARFLAKLAPACVAMEACSGAHYAGRKAEAMGHEAKLLPAQYVRAYVKSQKNDYADAEAIAEAATRPTMREVPIKSVDQQELQLLHRQRSAWISQRTETANRARAMLLEFGIVLPKGMHRLRRQLPFVLEDADNGLPERSRALVYELWRDISALDERIQWSTKELEHIADADPRCQALLDVPGIGAVIATALVAAIGDARSFRRGRDLAAWMGLVPKQHSTGGKTRLLGISKQGNRYLRQVLIHGARSVLRYAHRRTDALGLWIQRLQTRKPANVVTVAIANKMARASWVILRDPQSFRAKALVAHG

SEQ ID NO: 240656 - protein, 377 aa, unidentified
MREKLRFLGLDVHAETIAVAIAEPDGEVRSLGTIANREESVRKLIRKLGPAEDLRACYEAGPTGFVIYWQLSQLGVECAVVAPSLVPKKPGDRVKTDRRDALKLARSHRSGDLTAVWVPDEDSEALRDLVRQREAAKQDQLRAKHRLTKFLLRTGQRPPLGLKAWTERYMSWLAQVRYTQPAQEVTRLDCMNEVEHMAARVKRLEEAILEVVKLAPEPMQELIRGLQALRGVAHISAVTIASELGKISSRFQSARKLMGYCGVFPSEDSSGKRIRRGGITKTGNAHLRRIVVESAWCYRHLPRVGEKLRKRHQGVPAEITEIAWKAQNRLHKRYMKMMNAGKDQRKVMTAVARELLGFIWAIGIKAEAATNRQQLAA

SEQ ID NO: 240657 - protein, 395 aa, unidentified
MFIVGIDVAKRSHEVCMITSDGQTVQRPFSIRNNCTGYNLMLEKIRKHTNIKSQIVFAMESTAHYWLALFTRLRKDGYHVILLNPIQTSAMRDMFIRKIKTDAKDSFIIAELIRFGRYAESNVAQDRLLALKELCRNRFYLVDMAGDLKRKLIALIDRIFPEYEAQFDTIFCKSSVAVLKKYPTPQRLSNAHLDKLTELLWNSSNGHFGEWKARELKELARNSFGVEDCDGAYSTLILLMLDQIQSLSGKADALEKEISRLFQSFDTTVTTIPGVGPIIGAVILSEVGDISRFSSADKLAAYIGVDPSVNQSGEFQAAHAHMSKRGSPYLRRCIWMASQVAVQRDPMFRAYYEKKAAEGLKYMTIIGHVTRKMTAVIFAILRDHKVYEPVLPTAA

SEQ ID NO: 240658 - protein, 354 aa, unidentified
MGSSAKYVGLDVHQATTVLSVRDGSGRVLARSVVATEDGALTGFLGSLRGNVSVALEEGTQAQWLHDLLEPVVARVVVCDRRGKARRGNKGDQVDADELSEALRTGALRAVYHGSPHQATLSELARAYRSVVADATRVMQRLKSLFRARGIKAPGARVYHPANRSLWLDKLPKGGARFRAEVLYAQLDALRELRPRVKATMVAEARRDPAWPSLTSIPFMGPVRVAQILAVARTPWRFRSKRGLWAYSGLAVVTTTSAEYVMREGQPVRRSRQPITRGLNRNHNAVLKEIFKGAALAATVRPGPLQDLFHAMTERGMRPELARVTLARKLAALTLRLWKTGERFDPTKLTTQAR

SEQ ID NO: 240659 - protein, 366 aa, unidentified
MSSLTSPAGAIHLGMDTSKNTIVVAVLMPGEEVPVIDRMWNEEGSVRHLVGRFADRAALRACYEAGPCGFELHRLLASMGVACDVVAPSLIPRRPGDRVKTDKRDAGRLARLHRAGELTAIRVPTEAEEAVRDLVRARAALLADRKRAQQRITAMLLRHGRVWRSGSYWTQAHEQWIAAQRFSEPALGAALAHYRAALDTRQAELDAVEAELAPWARREPLAAAVARLGCYRGIAELTGLVLAAEVVDWRRFPSARAFKCFTGLVPAEYSSGERTRRGSITKAGSEPARTALIEAAWSYRFRPAIGVTLRRRQHGAAPQTLARSWRAQRRLHARYKTMTARGKPAAVAVTAMARELAGFVWAEMTS

SEQ ID NO: 240660 - protein, 339 aa, unidentified
MGIYVGLDISLDAVAICIVGESGELLWQGKVLGDPEAVTAALERWRDDLVRVGLEAGATSEWIGGHLVDEGFPVVCLESRHVKAALSAMTVKTDRNDARGIAQIVRTGWFKPVHLKSAAGQRLRTLTAARKAAVRALTGNEQVIRGLLRPLGLKIGAVTRVRFEARVRLLIGTDRLLLAIFEPLLRLHKSLRESLADLHRLVLGAVRRDPICPRLMTMPGIGPVTALTYRATIDDPKRFRRSRSVGAYLGLTPRRYQSGEVDRVGRITKVGDGETRTALFEAANVILRPTTRWSSMKAWAMKIADRQGVRRAKVARARRMAVTLHRMWVDEQDFRWTAA

SEQ ID NO: 240661 - protein, 343 aa, unidentified
MQAITTIGLDIAKSVFQVHGVAADGQVVIRRQLKRRYVLAFFQKLSSCLIGIEACASSHHWSRELKALGHTVRLMPPAYVKPYVKRQKNDAADAEAICEAVARANMRFVETKTPEQQSCLMLHRTRHLFIRQQTSVINAIRAHLAEFGIVAPVGRNGVEELLDVVADPSDKRVPEIARACLFALGAQLRRLKEHILEFDRRIMAWHRANETSKRLDEIPGVGPALATALVASVADPKAFRSGRNFSAWIGLVPKQHSSGGKDRLGSISKQGDRYLRSLLMVGALAVIRYAKIHGTKHRPWLTALLARRPAKVAAIALANKIARMAWAMMAKGERYKEPVALAA

SEQ ID NO: 240662 - protein, 451 aa, unidentified
MSVHSTDPAVARVQVGIDAAVVADHHVTIRSTMTDGAVQLSRFHVPPTIAGLSRLGERLSCFPGVVAVAEPTSMTWLGLHVALQRAGCDLSLVGTRHAARLRGAISGKHKSDVIDADVLSLASDVFGLSPLEPPGPAELALRRAVVRRGKLVIDGNRARRRLISLARWAFPDVWTAFAGSWPTAIAVLTRWPDLRALASARRSSVTAVVAAHTRGVSGVAERAGAIRVAAAAWVEFWDGRLDLDALAWETAEHLRDITIASEQIERATAQAQRYWTRLYGDDPLLLSLPGMGPMTAPTIRAFLGDGTRFATAKAAASYVGLTPSTWSSGTVIQPSRAITKEGPAVLRLAFYQAANGARRVDPQLAAYYQHLMVERGHCHTQATVAVARKLAERTWTVLTRGQPYQYRDTAGQAVTRMVAKDQARHDHAVPDDVRARARARSAATHRSKLTK

SEQ ID NO: 240663 - protein, 326 aa, unidentified
MPMSATVSSTYCASFLGVDVSKASLDLSFGSGPPSADWPGPIGPVANEARAIQRLVGQLSLHPPRLIALEATGGYELQLMHALLDARLPVVRINPLRIRRFAQSCGLHAKTDAIDARVISDFARMNAETLSVLQPISETARMLRELTARRRQLVEQTVMSKGQLEHVTLKTIRQSIDRTIKHLCQEIARIETSIQDLIDNDPALKTRQQKLLMVKGIGPRVARVLVSELPELGQIDRRKIAALVGVAPFNDDSGKHVGVRRIQGGRATVRAALYMATLVATRHDPIIKARYEHLKKRGKPKKVALVACMRSMLNYLTSILANQENS

SEQ ID NO: 240664 - protein, 338 aa, unidentified
MKTYAGIDLHSSNNFIGVINHKNERLHSRRYDNNLKTVLKALRKYKRSLQGVVVESTYNWYWLVDGLMENDYKVHLANPAAIQQYKGLKHRDDKKDAFWLAHLLQLGILAQGYIYPKKLRSVRDMFRRRMMFVKQRTTQTLSLQSMIARNRGVEQSASAIVRFRDDFIKQMFDCPHLVSTALHQMETIRFLGKQIEAIESEVETMVELDSAYRGLLTIPGIGRILAMTIMLEVGDIRRFEKVGHYSSYCRCVKAQSLSNGKKKGNNNRKNGNRYLAWAYVEAANHNKRSCSQARKFIERKIAEKNYTVAIKALANKLSKASYFIMRDQTTYDPALLFR

SEQ ID NO: 240665 - protein, 418 aa, unidentified
MEDENNWFVGVDWASQTHHVRLSDGKGAKMGERIFAHGGEGLKEMADWILKSTGAPPEAVMVAIEVPHGPVVESLMERGFHVYAINPKQLDRFRDRFSPAGAKDDSRDAEALADALRTDRRCFRLLAPFDPVVVELREWSRVADDLRVERNRLSNRVRELLWRYYPQFLELSDDVAADWFLDLWRLVPTPDKAKRVRETTVERLLKRHRIRRITAAEALERLRAPSISVAAGTVSAATGHLEAVARRLALVNRQIGEANSKIDRLTERLGSGAENAEGQRQEQRDVTILRSLPGVGRIVLATLLAEAQDALQRRDYHALRCLSGVAPITKRSGKSKIVLMRQAAHVRLRNAVYHWARTAVQHDPRSRAKYAALRARGHGHGRALRSVADRLLAVACAMLESRALFNPSLPAKISYPRP

SEQ ID NO: 240666 - protein, 350 aa, unidentified
MIIGVDYHPSFQTIAFLMEETGECGEQELKHSDGQAEKFYRDLKQRGISVRVGMEATGYSRWFERLLAELGFEVWMGDPAEIKAKRVKKQKFDREDARLLLRLMRENNFPQIWVPGPENRDLRQLLWHRHRLVQMRTRIMNQLQALAMNEGYRWKKKLFSEQGRVQLEKLALAPWASRRRQELLELLDRMNPTIAELTAAVEREARKRPEAVRLMTHPGVGPLTALAYVLIIGTPTRFQRGKQIGTYVGMIPSEDSSAHKQRLGHISKQGNSLLRFLLVEAAQAAARIHPDWRRRYIHLAMRRHKSIAKVAMGRRLAIRLYWMWRNGCEYSKSVEFGSYAGQLGTGHGGK

SEQ ID NO: 240667 - protein, 322 aa, unidentified
MEAVYAGIDISKQWLEVGLWPGAETFRLSNDASGVAELAERLRALGSRAVVLESTGGWEVLAASELHAAGLTVAVVNPRQVREFARSLGTLGKTDRLDAVVLAQFAQSSHSNGRLVARRLADEAERELKALVVRRRQLVGMLVAETNRRERAPKVVRQSIVQTIKGLKRAVAEVEQQLKQVLAGSPPQQRKATLLTAVPGVGPQLTFTLIAELPELGQLGRRQIASLVGVAPHPYESGKFKGRRMIWGGRASVRTMLYMAALSAVRHNPLLRTSYQALLARGKSKKLALVACMRKLLTILNAIARDSSPWNPSHHLDFLHSR

SEQ ID NO: 240668 - protein, 304 aa, unidentified
MNGIGIDVSKRRLDVGTTDGKTLQVSNSRSGFAELDLWLQGHPAVQIVLEATGGYEQPVLDFLHNAGHPVVRANALRARRLAQGMGQMAKTDRLDAYALAQMAALVKLPSYQPLEPWQRKMREFVRARRQAMHALTVARQQQQMVTDRALRRLLQANITHLQTMVECLGKQIAEQVAQQPQLAVLKSMKGVGPGLQAVLASYLPELGKISGKAVASLVGVAPMSHDSGTLRGKRSIHGGRAEIRQVLYMASMSAMRHEPRLRDFYQSLRARGKEGKVAIVAVMRKMLVILNARMRDAQGGPIPA

SEQ ID NO: 240669 - protein, 337 aa, unidentified
MKYCGIDLHSNNSVVVISDEGDRMVCQRRVPNELAKILALLSPYRAELAGVVVESTYNWYFLVDGLADAGYRVHLAHPSAIKKYEGLKYSGDYANASYLAHLLRLGLLPEGYIYPRQQRAARDLARKRMQLVRYRTAQILSIESAVIRQTGGRMKGDVVKRLTPEQVEGLGLEPDVRLGVESNRAVSEVLRERIEILEKRLKERVRLRPEYRLLKTVPGIGEILATTIMLETGEVERFAKVGNFSSYCRCVNSLRESNGRKKGEGNAKNGNKYLSWAFVEAANFALRHCPQAKGFYERKKRQTNRVVALKALAHKLARACYHILREQKPFEVNRCFA

SEQ ID NO: 240670 - protein, 351 aa, unidentified
MFYAGVDTHKKYSRIVVTDSNGAKVAQGTLPNTQDSFKEFFHQFEEPTRAVLEAGNNWGIIYDILEDIGAAPVLANPLKTRAIAEAKIKTDTIDAQTLAALLRADLIPKVHVPSQKVRTYKNLLRQRFWLVQLRTRVKNRTHNILDRNHVTLPQCSDLFGKAGRQLLDQIPIPEPDSRLLKANLQLLDYINEQIRAAEKWTKEALEGHPGLAVLRTIPGLGKILAALVAVEIDDISRFSSPEKLCAYAGLVPTTYSSGGKVRHGNLLPTCNRWLRWAYVEAAWVAQRTSPYCYAYFERIKRRKGANCANTAMARRLCEITWHCLTEERSYEERTPVRRESNQPAAFIGSWS

SEQ ID NO: 240671 - protein, 433 aa, unidentified
MSGRETVQSEVKFVAFVGIDWADQKHVWCLQKASSREREFGELEQKPETVEAWVGELCRRVGPGPIAVAVEQVKGALVCMLRKYECLHLFPVPSTMSAAMRKALYPSGAKDDPRDAGLLLDLLLQHRDRLRHLQPDNEATRRVQNLVEERRKLVEEKTAQLNRLIGYLKIYFPQMLDWFGRLDRKLVCEFLERWPSLEELKKVPLAELRKFFGQRQGRHHELTEERIHGIVHAMPAIQDGAVIEAKGVVVQVIAQLLRSLLEGIANLDRKIAEAAGAHPDFFIFESLPGAGAALAPRLLAALGSQRDRYGSADEVQKHSGIAPVTETSGKRKWVHFRWACAKFLRQSFHEWAGHSIAHSVWARAYYQQQRQRGQDHHAAVRALAFKWIRIVFRCWQDRVAYDENKYLAALARRGSPLSSVLTTATPLCNPCGS

SEQ ID NO: 240672 - protein, 403 aa, unidentified
MAAKMGGIDWASEIHALCVVDEHGACVREWMVDHSEAGISALCRELVALGVARVAIERPDGILVDRLLKAGLTVIAVHPNQAKAARERYSVARGKSDRFDAFVLAELARTDAHRLRAIRPDGDETKALKVLTRTREDLVGVRVELANQLRAQLEAFWPGALIFADVDSPISLAFLARYPSPADARGLGPKRLAGFLARQSYCGRRSAEELLERMRSAPAGRAGGLEAEARRAAVVGLVVALRPIVAEIAELTSQIRGALASHPDGAIFAPLFRDAKTAICPATLIAELGDARERYPTDASLAADAGMSPVALESGKRRAATFRRACDKRLRVAVATLADSTRHWHPWAREVYRRARDRGQDHPHAIRTLGRAWLRVLWRCWQDEVPYDPARHGNFSRLQTAGG

SEQ ID NO: 240673 - protein, 369 aa, unidentified
MPHVTSIGLDVHARSVAAAAFNPFTGEVVHRDFGTDAAEIAEWALGFEGPRACYESGPTGFHMARELRALGLDCAVAAVSKMQRPAADARRKNDRRDAEFIARMLATHNIVEVPLPDAAVEAARDLDCALDDATVEYRRARQRLNMFLIRLGHVWDERNADGTRKGSWTRAHWRWISGIRLEGPQRDVLEYYVTAARCAESDRRQLEKKVLALARTDRWRPAVEALSCIKGIDTLTAFRLAAEAGSFTRFRTAPAFASWCGLVPSERSSGETERRGGITKTGNRLARTALVESAWHYLTCTPRPKAPTPGADVPAAIRARADDCTARLCRRREALAAAGKSSCKANAAVARELACWVWEIGRRAEGTLG

SEQ ID NO: 240674 - protein, 339 aa, unidentified
MKVTTFGLDLAKRVFQLHWVDVETGEIGRRQLKRAQVLEWFANRAPAVIAMEACGSAHYWARKLTGLAHEVRLIGAQFVRPFVKSNKTDAADAQAIWEAVQRPGMKFVAVKSEAQQSVLMMHRMREQLVKMRTMQINQLRGLLYEFGVELPQGRANGVARIPAELVKLDGVLPAMVVETIRGQLQRIAALDQDIGQIEKKLKLWRKDDAASKKLMDIPGVGLLTATAAVATIGDAKAFKSGREFAAFVGLVPRQSGTGGRVKLLGISKRGDVYLRTLLIHGARAVITHGKEREPWLEQLLARRPLNAVVVALANKMARTIWALLAHERTYQKGYVASVA

SEQ ID NO: 240675 - protein, 345 aa, unidentified
MEQYVGLDVSLKMAAICVVDRTGKIDREGMVAADPAAIAAFVRLHAPHVARIGLETGATSTWLWTELNKMGLPVICIDARHAKAALKMQINKSDRNDAVGIARIMQCGWYKEVRVKGLDSHAIKALLVSRALLVKIKRDLENQIRGLLKNLGLVIGRAKMNVFVMRAAELIEDRPELAAAVEPLLKAREAVEKQIASLDRKVMQLAGNDVQVRRFTTAPGIGPITALCYLATIDDPTRFKRSRSVGAYVGLTSRRYASGEVDWTGRISRCGDPMLRSYLYEAAGVLLTRVAKWSVLKAWGMRIAKRSGLRKAKVAVARKLAVILHRMWVDGTEFKWSKEVATQPA

SEQ ID NO: 240676 - protein, 343 aa, unidentified
MDHFAGLDVSVKETSVCIVDETGKIVREVKVASEPDALVEVLTSPSYHFKRIGIEAGPLSQWLYNALAEAGLPVICVETRHMRAVLKAQINKTDRNDARGMAQMMRVGLYRPVHVKTLRSQKLRMLLTHRKLLQSKAIAIDNDLRGTLRNFGLKVGMVGTAKFEARINELVENLPDLAMLVEPLLVVRRVLREQIGVLHRSLLAIVRDDDVCRRLMTVPGVGPVVALTYRATVDVPARFKNSKAVGAVFGLTPSRHQSGESDRPGSVSRCGDEMMRMMLYEAAQTMLVVSTKWSWLKAWAMKIARHRGMKKAIVALARRLAVIMHRIWVDGTEFQWTREVTAA

SEQ ID NO: 240677 - protein, 401 aa, unidentified
MNAVGIDVSKGKSMVSIMRPFGEIVSEPFEVKHTSSEIKALIALINSVDGESRIVMEHTGRYYEVLAHQLAEANLFVSTINAKLIKDFDNDSLRKVKSDKADSIKIARYALDKWTGLKQYSLMDEIRNQLKIMNRQFGFYVKQKTAMKNNLIGILDQTFPGANTYFDSPARNDGSQKWVDFIDTYWHVDCIRNMSLNAFAEHYKKWCKRKKYNYSQSKAVEIYEKAKEVVPVLPKDEITKLIIKQAISQLNNASATVESLRQLMNETASKLPEYPVVMSMKGVGPSLGPQLMAEIGDVTRFSHKAAITAFAGVDPGVNESGTYAQKSVPTTKRGSSELRRTLFLVMDALIKSMPQDDPVYQFLDKKRLQGKPYYVYMTAGANKFLRIYYGRVKEYLSKLEK

SEQ ID NO: 240678 - protein, 350 aa, unidentified
MQIKRVGLDLAKASIQVHAVDRHDAVVMKRSIKRSELLKLFVDRPACLIGMEACAGAHYWARELSRLGHTVRLMAPKHVKPYLQGQKNDANDAAAICEAVSRPKMRFVAVKSVAQQDVQALHRIRSQCVEQRTAKVNLIRGLLAEYGIVIAQQVNNLRRALVDLLEDAENGLTMSFRDLLAGLREDLAYLDHRIAELTQRIERHVAAHEPARRLLALPGVGPMTASALCATVGDATAFANGRQLAAFLGLTPRQHSTGGKPKLLGIHKQGDSYLRGLLVHGARAEQRMAAKKTDHRSTWLNDLSKRRHKNIATVAQANKTARIAWVILAKGETYRTDFVRRLTPDAPALG

SEQ ID NO: 240679 - protein, 304 aa, unidentified
MFGIGIDVSKATLDVAVHEQQFRQFSNDKRGVQRLIQWLKQWPTKQVVLEASGGYEVAALDALHAAGLPMVRINPARARRFAQGTGRAAKTDRLDAEVLAQMAHLLSLTRYTPPAPWQRRLAEFAQCRRQLVQMRVSEIQRLRQLGEPTLIAMKQRHIDELSKDIKELDSAINEQLSAQPAWKNIGTLKGVGPVLATTLACELPELGTLNGKAIAALVGIAPMNRESGTWKGQRRISGGRAVVREALYMAALTAIRYEPRLRDFYATLKSKGKASKVALVAVMRKMLVILNARKRDAEAMMASD

SEQ ID NO: 240680 - protein, 446 aa, unidentified
MPIIDPLAAFVDVGSEQMYVSIAGGPPEVFGTVTSQLHALRDWLKARGAKSVAMEATGVYWLPLYSVLEGAGLEVLMVNGKHTRNLPGRKTDMKDCQWGATLHAHGLLRAGFVPPAEVRRLQDYLRLRTDHVSMGAAHIQHLQKALERMNIKLHDVISSLVGVSGLAVIEAILKGERDPERLLGLCDVQIQKKKAERVKESLRGTWAQEHLFALRQALESWRHYQRQMAECDRQIEAVLRQMSAVSESDETPPPSATGTAPVKRTGFNAPQIQGLHGLLVKLCGGKDLTALPAHTDYGLLQLVGEVGTDLTKWATEKHFTAWLGLAPGSHQSGKRHAAVGRKRNRAGRIFCVMGRSLARSKNIALGGYYRRMAGRRGGLVANVALGRKLAVLFWRVMVKGLAYVEEGLRRYEEKVLETKRRVLTKLAKELGHVVLPSLAQLAGTQS

SEQ ID NO: 240681 - protein, 335 aa, unidentified
MHYLYYVGLDVSKETFDASLVAFEDANEMAHRKFANSRKGICSCLHWVEKRHGIRLDDVIFCAEDMGSYICEMAVCASDRTLNFNFSLISPLVIKYSMGIARGKTDRVDARRIAEYAITHYRKIALYLPAEKELCQLRTWLILRAHLAKQRVAKLVLLEKLDYKEKFADVSIQRSMLQEEIAYAETHMKTIEREMKELIAADSNICRNYKLLNSIKGVGPITAIVMLCSTLNFTKITDHRKFACYCGLAPFEHSSGTSVRGGCHTSSMANRDIKVQLNRSALIAIRCDPQLKAYYERKVAEGKHKFSVLNAVRAKIAARCFAVVRRGTPYVALQI

SEQ ID NO: 240682 - protein, 410 aa, unidentified
MAGKKLWVGIDVGKQFHHACAVDADGKTVFSRKIKNRQVAIEELITRTTSKAGAEANDGELVWALDMTSGSAALLVTLLIATGQPVRSVPGRLVNRMSGAFTGEAKTDAKDAHTIAETARLRSDLTPVTMPDQVVGDLQVLTARREDLMADWVRGVNRLRELLGSIFPSLEQAFDYSTRSALILLTGYQTPTGLRAAGEAGVAEYLRTQRAWAPGIPAMAATAVTVAAEQDLALPGETVTAPLIARLARQLLDLDREIKDLDKQLTTRFGEHPHAEIITSVDGFGPILGAELLADTGGDLATAFGTPDRLAAYTGLAPVPRDSGRIRGNLHRPQRYHRGLRRVFYLAALSAIKRPDGPSRAFYQRKRDEGKRHVQALIALARRLINLVWALIRDNRTFTTEAPTPTATAA

SEQ ID NO: 240683 - protein, 353 aa, unidentified
MDKITRVGVDLAKNVMQIHAVDGAEHIVVRKAITREQFVNWFANLKPCLVAMESCSAAHYWARKLRALGHEVRLIPPQFAAPYRKGGARVKNDALDAEAICEAASRPHMRFVPVKSPAQQSVLVLHRMRTGFVEERTALANRLRGLLVEFGVFLPQGMHQLHKHFIDRVEDGNNELTGPARQALMRGWAQLQTLDEEIAWFDRQIAEHANHDPQAQRCMDVCGVGRLTASAAVATVVDARQFKNGRQMAAWLGLVPKQNSSGGKQRLGRITKQGDGYLRTLLFQGARSAVLTAHQRNDRLARWIVQLQARVGYYKTLVAVANKHARILWAVLAKGERFDPSHAPARTRMAAGA

SEQ ID NO: 240684 - protein, 367 aa, unidentified
MSHIIYCGVDFHARQQTICCLKTETGELTSHELKHDDKEALRQFYAALGGPVIVGLEASGYTPWFEQLLEELGHQVWLGDATEIRRRARRRQKNDRRDAELILELLCHGEFPRIHRPSPESREILRMLRYRHKLVKVRTLIKNSLQSLSIQAGLSLQARLFTRQGTQQLDALTLSPVMGHQRQQWLELLQELNQRITATEGWLKQQALSDPRISLLRTHPGLGLLSSLGIVHTLIPVSRFPNTRKVAAYGGFEPMERSSADKKRYLGISKAGSRLLRFLLIEATQTAVRTDPDLQRFYRRLVPRRGKPKAKVAVARKLLIRSFIMLRDEINYAEFQQRAIAARLAREFARPNVPVPLIGQPASPAKD

SEQ ID NO: 240685 - protein, 377 aa, unidentified
MKEAYIGIDAHKDQNVVALAFAGRGEPELYGKAPADLDAFERVLRRILAKYGLDKEDVAICYEAGPTGFVLCRRLRALGFECEVVAPSLIPVRASDRVKTDRRDARKLAGLHRAGELVSVHVPDVADEVIRDVCRARADAVDVQAQARQQLGALLLRNGHRYAGPSTWGEPHVRYLRELVLPDPAQKVVLEEYLQRVDAAGAQVARFEAEMAARLAGWQRRKFVEALQGFRGFQMVSAMVIASELGDLSRFAHPRQLMAYLGLVPDEDSSGGRRRQGGITKCGNGHARWMLVEAAHHYRYPPKVSKELSVRQEGLDREVRAVSWRAQNRLHRRYGRLALRGLHRNKVVVAVARELAAFIWELARIVEKGAAPARQAS

SEQ ID NO: 240686 - protein, 370 aa, unidentified
MHQSSTLYIGLDVHKESIAVAYVAQEHHAEVVSLGNIGTRQCDIDQLIRKMQSKSKHLIFVYEAGPCGYWLYRYLTKKGHVCWVVAPSLIPKKPGDRVKTNRRDAIKLARLMRSGDLTPVYVPQVEDEAIRDLCRAREETIRALKAVKFQLKAFLLRHDIRYTGRATWSPAHLRWLSEVVCPTPAQQIVFQEYVRAVTDHTERLARLEQALTDQVQTWRLAPVVDALQALRGVQFTVAVTTVAELGDLTRFDNPRQLMNYLGLTPSEYSTGERRQQGGITKTGNSHARRALVEGAWAYRYPAKISRHLQLRLEKVPKAIQDLSWKAQVRLCKRYRQLSARGKNPNQVVVAIARELSAFMWAIAQEVPLTP

SEQ ID NO: 240687 - protein, 358 aa, unidentified
MAGKVTETAVVGGVDTHKDLHVAAVVDQNNKVLGTQFFSTTRQGYRQMLAWMTSFGALKRIGVECTGTYGSGLLRYLQNAGLDVLEVTAPDRMERRKQGKSDTIDAECAAHAAFSGIRTVTPKTRNGMIESLRVLKTCRKTAISARRVALQIIHSNIISAPDELREQLRNMTRMQLIRTLGSWRPDASEYRNVTNVYRISLKSLARRYLELHDEIADLDVMIAAIVDELAPELIKRNAIGYESASQLLITAGDNPQRLRSESGFAALCGVSPVPVSSGKTNRYRLNRGGDRAANSALHIIAIGRLRTDDKTKEYVARRVAEGHTKMEAIRCLKRYISREVYTLLRNQNRQINSIPITA

SEQ ID NO: 240688 - protein, 344 aa, unidentified
MSIKVVGIDLAKHYFQVCVLSNENKVTSNKKVTRARLLDVVRQFPENTLIAMEACGSSNYWARTIEKMGFSIRLIPPQHVKPFVGHQKNDANDARAICEAASRPNLHGVPIKTIELQDIKSLRCVRQRLVVQRIAISNQLRGLASEYGVIIAKSFKSLREQVPEILEDPDNELSDVMRKLIYSLFLEVNGLTEDIKSISSELEALCKQQPRYQALLAIPGFGPIVTAAFLSQVGTGKQFSNGRQLSAWCGLVPRQASSGGKAKLGRITKNGNNELRALLIHGARSVSKYTPDRTDALSRWFNALVIRSGKAKAIVALANKLTRIAWVIVTSNDEFKATCAFKAA

SEQ ID NO: 240689 - protein, 324 aa, unidentified
MSDAIVGIDVSKKTLDAYCARGQRKQGRTFANTPDGWQLVRAWLKAMGSKQAHVCMEATGRHSLGVALALHDAGHVVSVVNPAQIRDFGRTKLGRNKTNKVDAALIREYAELFKPEPWTPPSPAMRRLCELQTMRTGIIRSRTEWKNRVGSGLGDSTATKLAAATITHFTRQLEAIDRAIGETIDQDAELRGRRELLLSVIGVGETLAASLMAEMPEPGVLRRSGEMVAYAGLNPSHHRSGSSIDRPTRISKIGNATLRSSLYMPALSAMRFNPAVSALVGRLRSAGRLKPKQIVVAAMCKLLVLCFGVLKTGKRFNPAIAMPA

SEQ ID NO: 240690 - protein, 328 aa, unidentified
MTMNPAPRLFNHIVAFDVAKESLTIHVLPGDERQAIANKPKAIRKLLIAQSRRNAKLGLGPLLVICEATGGYERHLLEICAELGVAAHKAHGSRVRNFARYLGLIAKTDPIDARVLALFGLKTENLRLHTPLTPALTALIDLRARRDQVQAMLLAETSRLEHVRYAGVTRSLKEHIASLRKSLAALEAQIAAHIQASEALARKAALMRTLKCIGPGAVAALLAYMPELGALSRAQAASLAGVAPFDDRSGKLSLPSHIEAGRGAVRRALYMAALTATRHNRIMKSFAERLRRNGKCAKAVITAVMRKLIVTLNAMLRSEEPWRHAQTA

SEQ ID NO: 240691 - protein, 449 aa, unidentified
MGKAKPQVIDDDEQQRVFDRVAAVDVAKATGMVCVRLPRQDGSRYSKVWEVTATMGAVTELGRQLMKDRIEMVTLEATSDYWRIFYYVLEMCGLAVQLVSPSQAKNLKGRPKTDKLDSMWLARLTEWGMLRPCFVPPAPVRALRDYTRARADLVRERTRCWQRLEKLLEGALIKLSSVASKLTTQSAQDMITAMIAGERDPRVLANMAQTRMRAKHDALVEALTGMFDSHHGELAEMELDQIAFLNKRIGKLEASIRETLAQIPAAQGVNADGTTGPDAGRGPDAAVLPAALRLAEIPGVSEQMAAAIIAETGLDMTRFPTAAHLVSWAGLCRVASQSGPRSRGGKKGHGNTYLRSSLGQAAIGSARTATFLGERYGRIARRRGKAKAQVAVARSILVVIWHLLADPAARYTDLGPDYVARRTDRDKKIRNHVRGLRAMGLEVTLTPAA

SEQ ID NO: 240692 - protein, 413 aa, unidentified
MEVVHPRCAGIDISKKDAKVCVRIQGRGRTRTAVTVTTWGAMSNQILALRDHLLDEKVTCVVIEATSDYWKPFYYLLEDKLDVILVNARAVKNMPGRKSDVSDAAWLADLGAHGLVRASLVPPPPIRQLRDLTRARTVITRERSREAQRLEKLLEDAGVKLTSVVSNIAGVSARAMLEALIDGEQDPAAIAELVQPRMRPKIPALTEALTGRFGDHHRFMTRLFLDRIDAHNADIARLDARIEAAMEPFRSARELLMSIPGISRIVAEVFIAETGADMSVFPTAQHLASWCGVCPGSNESAGKVKSTSTRPGDRYLKGALGIAALSVVKRKNTYFWAKYHRITARRGPMRALVPVEHAMVVAAWHMLTNGEFYREPGLDYYTRRVPAKTKARALKQLESLGYKVTLEPLADTA

SEQ ID NO: 240693 - protein, 462 aa, unidentified
MSNRSSRRLSRGDRRRNEKLARLRAVVTRDSAVLAFDLAADKQVCALTDQDSQVLARRTIKAKAWQLAEAVAWGLARAAEAGFTSVVVACEPTGHRWRVLDQIAAEHGVRLVCVQPLLVHRAREAEDFTRNKNDDSDAMIIARLVTELRCYLPERADPDWARLRHLGARRTGLVTDVGAARQQVRDLLECAWPAALSAAADPLESKSWLAALTVALDLVGDSGDLAVIGRQGWEEFATAVRRELPNHGASRWYSAIVRAVFDAVTEPDSAAVGVLGQRAGALERVRFALADLAHARAEMAVVEERMVAVLDQLGLTDLLASIPGLSPVGAATILAESGDPARFSSARALVKHAGLCPRDNASGTYQGRTGISGRGRPELRLAAWRAVWGALHHNPVLAARHAHLVGRAERRLTTTQARVAVAGSLLRQLHAVITTGVPWDPAIAAGLDRTAAHAEQEAAIAA

SEQ ID NO: 240694 - protein, 355 aa, unidentified
MNGLRYIGLDVHQDTVSAAVLDGAGKLLMQSVFATRAVAILDFLHGIKGTLHVTFEEGVHSAWLYDLLQRRVARVVVCDPRKNKLLKSGNKGDLIDARKLAELLRNNSLSPVYHGGMSALEVQHRTRSYTMLTEDTTRVMNRLRAVFRSQAIRVHGRKLFRSDLRESHLAQLATPGLRQRAESLYRELDALHPLRLQAKREMLVECRKHPAMKWLRSVPFLGKVRTAVLIGRVQTPHRFRTKRQFWSYCGLALETHDSAEYRVVHGQVQRKSRPAQVRGLNWNHNHELKGLFKSAATMAAFRKGIFREFYSGLLAKGIRPEMARLTLARKIAAITLKIWKEGETFNAEHIKPQAA

SEQ ID NO: 240695 - protein, 371 aa, unidentified
MRNNHRTKFVGMDVHQRTIAIALANDGSDGEVRLYGTISNTREAIDKVIRKLVSTGAELHFVYEAGPCGFGLYRHLTGNGFKCIVAAPSMIPKKVGVRIKNDNRDAISLARLLRAGELTSIYVPDTEDEAIRDLTRARNDAKNAERKAKQRLHSFLLRHEFIYPGKTKWIKSHFIWLAQLKMKHPAQQIAFQEYIDAVKECTERITRLDEEILKAANEWRWGPTVKALQALRGVSLLTAVNIVAEIGDFNRFQNPKELMAYLGLVPSEHSSGDRIRRGGITKTGNSHARRICVESAWAYRYQARVTQLLLKRHEGLPRDILQIAWKAQLRLCTRFRRLRARGKVTQVVVVAIARELVGFMWDIARRIPAVA

SEQ ID NO: 240696 - protein, 341 aa, unidentified
MGEVTTIGLDLAKSIFQAHGADAAGEVVFRKKLRRDQVLSFFASQPMCVVAMEACSGAHHWAREFMALGHEVRLIQPRYVKPFVKRQKNDVADAEAIAEAAQRPTMRFVAPKTAEAQGAAIIFRTRDLLVRQRTQLSNALRGHLAEFGFVVPQGVGQVGRLIELAVDPETDVPAQARPILAIIAESVQALQAKIATLDREIKARAKADPVARRLMTIPGVGPVVATAIVALAPQASTFRRGRDFAAWVGLTPRQNSSGGKERLGRISKMGDRNLRRLLILGASSAAKVAAKDPAQASPWLAGMLSRKPRMLVTVALANKIARTVWALMAHGGSYRAPAAAA

SEQ ID NO: 240697 - protein, 410 aa, unidentified
METIVKRAAALDVHKARLTGCVRLPGRGRERRQEVAEFETTVRGLLLLRDWLQAHAVTQVAMEATGVYWKPVWAVLEDEFDCLLVNARHVKQVPGRKTDVSDAAWLCQLLEAGLLRRSFVPPKPIRALRNLTRYRKAQIGERQREANRLHKILEDSGIKLGCVATDILGVSGRLMLDALVAGTTDPELLAELAKGKLRAKIPALREALVGRFDRQHALIVSAILAHLDFLDAQIELLSAEIEAQLAPFQAAVELLCTIPGVQQRTAEVIVAEIGTDMSRFPSERHLASWAGQCPGNDQSAGKRRSGTTRHGSKWLDTALTEAALAATRSNDVYLAAQYQRLRPRRGHGRAIGAVKHSILTSCWHMLQTGELYHDPGGDYFSRQNPERATRRLIAQLERLGHHVTIQEAAA

SEQ ID NO: 240698 - protein, 341 aa, unidentified
MKAYVGLDVSQNKTAICVIDEQGERLCQSNVETHPVLIHGFLVAKGYAGAKVGMETGPLSVWLYHSLRSLGLDVDCIHARHVHAALSMQLNKTDSNDAFGIAHLVRSGWYRPNHVKSLDCHQLRLMITAREKLVHIRVTLTNQIRGLLKTFGVVLPPGRNSVFERSVIECEPSLDAIKPTIFLLLDAWNNVSLQIREMNKLLVKHAKSDPVCRVLTSIPGVGTLTAISFKTAIDDPQRFQSVADVGAFLGLTPKKYQSGEVDRNGGISKHGNRQTRSLLYEAASCLLSRYGTNTGLARWANSLRQRMGYKKAVVALARKLATVMLSMWKSGELYREQLKPA

SEQ ID NO: 240699 - protein, 387 aa, unidentified
MPTNHHLVQIDTANRSDVASIFVSLELSRSRWLVTSLSPGSEKMSKHSVAGGDGAGLLDLLTRLRDKAEQRAGTPVRIVVIQEAGLDGFWIHRLLAAHGIESHVVESASIAVPRRHRRAKTDAIDGAMLLRTLMAFKRGEPRVCSMVVPPSPAEEDRRRIARERRTLIKERIEHINRVKGLLASQGITGYQPMRRGCRERLEELQTGDGRPLLPRLKAELGRELDRIELVRRQIAVVEAERDALVQADDVRARSPAVLLMQLRGIGPEFATVLWMEGLFRNFTNRRQLAAYAGLAPSPWKSGCVDREQGIAKSGNPRLRTTMVELAWLWLRYQPGSALSRWFRERVGSERGRIRRIAIVALARKLLVALWRYTTLGDLPVGAALKTA

SEQ ID NO: 240700 - protein, 413 aa, unidentified
MQKMVERCAGLDVHKATVTACVRVPDEAGGRGQDIRTFPTTTAGLLTRRDWLASYGVTLVGMESTGIYWRAVYYLLEEDFTCWLLNARHLHNVPGRKTDVADAAWIAQLLEHGLVRPSFVPPREIRELRDLTRYRKALIQERTREAQRLEKTLQDAGIKLSSVASDILGASGRAMVTALVEGTHDPEVLASLARGALRRKLPQLAEALQAHFRTHHALIASEILAHIDYLDEATQRLSAEIERVISPFGEQVALLDTIPGVNRRTAETLIAEIGADMGRFPTHRHLASWAGMCPGNNESAGKHRSGKTRKGSKWLRHALVESAGAAARTKGSYFSAQYARLKGRRGHKRAVIAVGHSILVVAYHVLDRGQPYSELGEDYLLLRHSTAAYTTRLVRQLERLGHRVSLEPLPASA

SEQ ID NO: 240701 - protein, 424 aa, unidentified
MKNTAARKRKQVPEGYLVVGVDPHKKRHAAVAITQDFTTQAKFKFDNTREGLEMMLNRARLEMLKSSCRGVMFAIETGGHYWRNIAYYLDERGIPFRFINQYTLKRRREGKDLNRRKNDYRDSEVAAQLLCTGEFVESVIPQGVDAELRTSHNAYQRLVKERTRIINLLKGLLDALFPEFTQIFKDPGGLTALSVLSTCPIPRVIASMTEDEFVATIEAHHKGRRLMRKKLRALHYSARRSIGIHAGAGSVSSEIGFMVDKLELIRQQIRIMEGTLVKLVDEAEEGKYLLSIRGLNYIAVAGLLAELGCFKLYRSAKQMIKMAGSNPTESESAGKRRSKTPMSKQGRPLLRYCAWTAVIPMLRFNTDFRAWAKQRRERPAHANPLNGREIVGAALNRLLRLAFALVKNQTYYQELKLSMMPLAV

SEQ ID NO: 240702 - protein, 339 aa, unidentified
MKLYSGIDLHSTNSYLAIIDETGKRVFREKLPNDIATITEKLSFYSGTLEGIVVESTYNWYWLVDGLMAEGFTVHLANPSAIQKYTGLKHADDKHDAFWLAEMLRLDILPTGYIYPKEERPIRDLLRKRSHLVRLRTSLLISLQNIISRNCGGKLKSSDIQCLSEDRVHPLLSGNDDLALAGQVSKNSIDYLTRQIRVIESFIEKRLKLTGGYKNLVTIPGIGRILGLTIMLETGPVERFEKVGNYASYCRAVASKWTSNGKAKGKGNKKNGNKYLSWAFSEAAELARRYDEQARTYYNRKLRKSNFMIAHSALAHKLARAAYFIMRDEVPFLPEKIFG

SEQ ID NO: 240703 - protein, 371 aa, unidentified
MSEGISHIGIDASKSVLAVAVLAGDGRLAEFSMPNEVGAIKRMVKRVKREASGEAVFCYEAGATGYVLQRRIEALGCRCLVVAPSLIPVKPGHRIKTDRRDARKLVELLRAGLLTAVRPPSEKEESARDLVRCREDVLEDLSRCRHRLVKMLLRRGLVYRDGQAWTLRHRTWLRALRFEEPTDQVVLEDYKLALEQMEQRLKALDQELEALSQSEPYRPWMGVLGCYRGVSTVTAMTILTELHGIERFTSARQLMAYLGLVPSEYSSGDKVARGHITKAGNAHVRRVLVEAAHHYRHAPSVGRTLASRRQGQPSWAIAQADKAQHRLHLRYRRLLLRGKPYGKIIVAIARELVGFLWATLQQQSTSQRKAA

SEQ ID NO: 240704 - protein, 317 aa, unidentified
MTFVGIDVSKARLDVAALAPTGEIQREAFENTVQGHADLVAWLASFPSCRVALEATGTYHHCLTSVLQDKGVYVSVLNPAQVSYFVKSQHRRNKTDKADALWLAVYAKERQPDATLELNLSRQGLAREIGTLSKDITRLKNRLEAAEAGHTHAKVVASLKRRVAALEEEKKDLEAELEQETKNTNEQELSLLRSIPGVGVRTACLLLAELGDVRRFADARKLVAFAGLTPTQFESGTSVLRRSSISRLGSSHLRRILYMPCLSAVRFNPIIKGFFERLVERGKHKKAALVACMAKLLKIVYGVLSHQMPFDPARMTP

SEQ ID NO: 240705 - protein, 344 aa, unidentified
MDYFAGLDVSVKETSVCIVDDMGKIVRELKVASEPEALLAVLTNPAYRFKRIGLEAGPLSQWLYSALAEADLPVVCVETRHMQAILKAQINKTDRNDARGIAQMMRVGVYRPVHVKTLRSQKLRMLLTHRKLLQSKAIAIENDLRGTLRNFGLKVGIVGTAKFEVRIKELVENLPDLAILVEPLLIVRRVLREQIVVLHRRLLTIVRDDGVCRRLMTTPGVGPVVALTYRATVDVPARFRKSKSVGAVFGLTCSKYQSGEIDRSGRISRCGDEMMRVMLYEAAQSMLRSKKWSWLKAWAMQIARRRGMKKAIVALARRLAVIMHRIWVDGTEFRWTQEQAAAAA

SEQ ID NO: 240706 - protein, 422 aa, unidentified
MENTLAKKLKQVPEEYMIVGIDPHKKRHAAVAITQDFTTRDKFKFDNTREGLEFLLRRVRTEMVKSDCRGAMFAIETGGHYWRNVAYFLDERGIPFRFINQYTLKRRREGKDLNRRKNDYRDSEVAAQLLCTGEFVESSLPHGIYAELRTAHNAYRRLVRERTRTMNLIKGLLDSLFPEFTLVFKDPCALTALSVLSTCSIPNVIARMTDDEFIAAIEANHHGQRLMRRKLRTLHAAATTSIGVAAGATSVASEIAFLIEKQKLIRGQIRIIESNMVNLVDQTEEGKFLLSIKGLNYIAVAGLLAELGCFRLYRSAKQMIKMAGSNPTESESGGKRGSHTPMSKQGRPVLRYCAWTSVIPMLRFNPDFRAWAKERRERPAHANPLNGREIVGAALNRLLRLAFALVKNRTLYQSPQLTVVAG

SEQ ID NO: 240707 - protein, 412 aa, unidentified
MLKIVYPVCCGMDVHKSFVVACVASTNDHGVTTYRSGRFSTFTGDLRRLAAWLHAHSCTDVCMESTGKYWIPIYNILESSCRITLAHSKYVKAIRGKKIDKKDAKWIADIFKHGLVCGSFIPPADIRQLRDLMRYRAKLTGFSTGEKNRVQNCLTVSNIKLDDVFSDVFGKTASAITQRLLENDAPFDVTPFLNKKLKASADRIQAAVDGHICAHQAGKLRVIRSHMENLAACKKSLEVLIFGLAEKYLPTLDLILTVPGIQVFAAIGILSEIGADMSVFQSSKHLCSWAGLTPQNNESAGKKKTTRISRAGAYIKPLLVQCALCAIRKKSNPEIRSRYLNLKKRRGHKKAIIAIARMLLTAIYNIIKRNEKYNPALYRKADTPPRNREVSVNEAIYILQRQGYLVTAPQSA

SEQ ID NO: 240708 - protein, 459 aa, unidentified
MKVSIGIDIACRTAHQASCADWAGNLLWTGHRFTTCVPDLEHLWARIPADCVDVTVVLEPTRNAWVPLASWFRRKGAKVVVVPSEQSADLRAYYSKHAKTDHLDSRVLARVPLLHPEGLHEESGLGPGDAFKRAVKLRSGLVMRRSTSMHRLDALLEIMGPWWVKALRTDMNKTALRFLSQYADPFEVKRLGRSRLTRFLHRHSRGRWGEREADLLREAAEETLALWGEDGIDFVALSEDIAIEARLALRLTDEIKEITERIAVMYQSIDPGGIVRSAPGVGPILAAQILGRLGDAKRFSSLAGVRSFAGLVPRQNLSGSGGSIGGLTKSGDACLREALYQAADHARKVDPQLAAKYRRLMVEGGKHHHSALCTIATILLTRIATCLRAGIAYELRDLDGRRIDEAEGRLIVAERYVVSAATRAARRSVPRSQTIKERDGRAKTGVAKRPEAPPVPVPA

SEQ ID NO: 240709 - protein, 442 aa, unidentified
MKQKQHPYDLVIGLDRSDRKADLHLIDNTSSQTRCETLNSSPEQFHQWLLNLRQAHPKASVAVCLEQPAGHLIPFLETYNWITLYPINPISLQKYRETFVTSRAKDDAKDAQYLAELLLDYCDKLKAWAPQDSQTRLLQQLVVHRRAVIDERTAQTNRLQALLKAYFPQALELCGEELWRPLATTFLLKWPTLMAVQKAKPATLKAFYYLNGSRSQKLIEQRLKLVEQAVAVSDEPALNQSFALRVQLVCRQLQDIVQTIKEFERQIAEVFANHPDREIFASLPGAGPVLAPRLLAALGADRERFESASSLHRYSGIAPVTKQSGNKRHVHRRYLCPKFERQSFHEYAKESVLWCRWAAAYYLDQRSKGKPHHTAVRALAFKWQRIIWRCWQSRTPYSDQQYEKALRKSGSKLVGIFGRIEVGKNPVKNPVTKPSKKAVKKT

SEQ ID NO: 240710 - protein, 430 aa, unidentified
MHNKNYISVGIDVGSAFSFMTILAPDETVILKPFKITHNNKDSLERAVSEIKKAEELYSLESRTFLESTGIYHFPLFCYLVDCGFNASIINPIITHSTKNGNIRKVKNDKIDSKGIAKLGLSKDIPVSQFPAKLVLELRSLTRKYYDLTDERSAHINKLKGDLHTVFPQYLDVFCDVTGKTSTMILRQYGTPDKILRGHKKTMIEKISKASRKGLAKASERYEKLCAAANAAKTFGCQIDSIYFNIFLTLDLVEKLDSALDSILNRIRQLITFNKKEKFIQQIKLLNTIPGVGFLTAVTIMCEIGDFSAFRNPKQLFAYFGLDPEVNESGKFVGTQLHMSKRGSRIARRAIFAVALASIRTKRNGEGINPYLRKYYELKSGQKPKMVAIGAVMHKVCNIVFAVLRDEKAFELRSPEEHCKQYQRPALAAA

SEQ ID NO: 240711 - protein, 370 aa, unidentified
MEKDTTYVALDDSKRKIVAGILRPGDAQPELRESANDPRLIRRLFERLKREGRAVAACYEAGVSGYDLYRQITALGVECVVIAPALTPRRPGQRIKTDRRDAAKLVRLFRAGELTAIHVPAEAEEAVRDLVRCRDDLRRDVLRWRHRVLKLLARHGRAYLAGKNWSQAHWRWIREQRFDQPPLQRAFEATVFTLEQALARQAELDKELEALAGTAPYREPVGWLRCFRGIDTLSAIILLAEVVDFQRFRRPRELMAYLGLVPSEYSSGETQRRGALTKAGNSHARRVLVEAAWHYRHRPTIGRALAGRSQGQPDEIVGQAWRAQQRLHRRYRHLIGHGKRTPVAVAAIARELVGFIWAAMTRHESRRQAA

SEQ ID NO: 240712 - protein, 346 aa, unidentified
MEQYVGLDVSLKMTAICIVDRTGKIEREGMVASDPAAIAAFVRLHAPRVARVGLETGATSTWLWTELNKIGLPVICIDARHAKAARKMQINKSDRNDAVGIARIMQCGWYKEVRVKGLDSHAIKAVLVSRALLVKIKRDLENQIRGLLKNLGLVIGRAKMNVFVVRAAELIEDRPELAAAVEPLLKAREAVERQIADLDRKVMRLARNDVQVRRFMTAPGIGPITALCYLATIDDPTRFKRSRSVGAYVGLTSRRYASGEVDWTGRISKCGDPMLRSYLYEAAGVLLTRVAKWSVLKAWGMRVAKRSGLRKAKVAVARKLAVILHRMWVDGTEFKWSSKEVATQPA

SEQ ID NO: 240713 - protein, 312 aa, unidentified
MPCFVGIDVAKAQLDIALRPSGERWAVPNDASGVMTLVDRVQALHPTLIVLEATGGLERAVTSALATAGLPVVVVHPRQVRACARATGQLAKTEALDARALAHFADVIRPTPRLLPDAQTQELRALLGRRQQLIGMRTAEQNRLAGTNARLTKDITAHMTWLNAAIATLDDDLETILRASPLWREHDDLLQSAKGLGPVCARTLLLELPELGTLTRQQSAALVGVAPLNCDSGTLRGRRMIWGGRAHVRTVLYMGTLVATRFNPQIKVFYERLLAAGKVKKVALTACMHKLLTILHAMLKHRTPWQPQEVQS

SEQ ID NO: 240714 - protein, 413 aa, unidentified
MKSYIGIDWSEKHHNVCILNEAGAHLNRFQVPHTEAGFQRLEEQLAKVNEFAADCLIAIETNRNTLVDFLWSRGHTLYVLPPNQVKSNRGRHRASGAKDDDNDALLLADILRTDQGRLIPWQADGDLVQQMRSLLSWIDDLTDSIKRHRNRLRANLLSYYPQPLAAFGNMMSQFSLKVVAAYPSPAHMRTLTFHQFVTFSRSQGYHQKRHLPGYYAQLREPMPAAPEAIWPALEKQTAYLARQLLTFIEQKQANIKQTGHLFEQHPDAAIFASLPGAGDLLRPKLLVMFGDDRARYPKPNILPAIAGTCPVTVQSGRSRYVRFRSACNHGYRQSAQQFAMSSIRNSVWAAGYFNRALTRGMSGSHAYRCLANRWLHIIWTLWQKREPYNEAYHMSQVARHLQPLVGPVSAVPS

SEQ ID NO: 240715 - protein, 356 aa, unidentified
MSKDITADVGLTIGLDLGDKYSEGCVVDASGEVIETFRVRTTQPALDRALSRFGKARVVMEVGTHSPWVSRRASFQGNDVIVANPRRVRLIAENDSKSDRFDAELLARLGRVDPQLLCPIVHRGEQAQRDLVLLRARDGFVRARTQLVNQVRGFAKSLGTRLPRSSTAAFPRRVRGVVTMDLFPGLETMLEMIERLTQEIRAIDREVERLCRERYPETEVLRQVKGVGPITALCFVLTLEDPNRFRKSRSVGAYLGLRPRQRDSGEQRPQLRITKAGDELLRRLLVSAAHYVLGPFGPDTELRRIGLRLAETGGPAAKKRAVVAVARRLAVLLHRLWVSGEVYEPLGYDASMTQAA

SEQ ID NO: 240716 - protein, 419 aa, unidentified
MTRKDDSKIIRIVHPICCGLDVHKESVSACVIFPGDKGEEQYEVKVFGTFTDDLTRLREWLLEHDCPVVAMESTGVYWRPVHNVLEETVHVVLVNARDMRNVSGRKTDIGDSRWIAGLLRYGLLKSSFIPPKTVRQWRDLTRLRKKYVQSAGDYRKRTHKLFESANIKIDSVVSDLFGVTGRNLMQLLVTDRKLTLSDIQTCVRGKLKGKEAELFRSIQGFFTDHHRFVLKTILKTIAMLEAQIEALDHEIHRVMKGHELLLDRMKEAPGISDVSSCDILAEIGPTLDSFPTDTALVSWSGLCPGNNESAGKRKSGRSPVRKHHLKAIMLEVAWAAVKKKGSYFKDKYYRLKARRGAKKAIVAIAHRILLGIYHVIKDGVVFRDLGEDYLTRRNKSQKVFHLRKQALALGFDLVPQTAQ

SEQ ID NO: 240717 - protein, 347 aa, unidentified
MNFYAKQHKFYCGIDLHTKKMYVCILDAGGNIRVHQNIETDPDAFLRIITPFREDIVVTVECMFTWYWIADLCVDQNIPFVLGHALYMKAIHGGKAKNDKIDSHKIATLLRGGMLPQAYVYPARMRATRDLLRRRNHFMRKRAELFAHIQNTRNQYNLPDPLGCIAKPQNREGIVERFDEPSVQKSMAVDLEIIQAYDRLLNQLEQDIIAFAKEHDLRSYALLQTIPGVGRILGLVILYEIESIERFPSVQDFVSYCRLVKCIKESNGKKYGPSGKKIGNAHLKWAFSEAAVLFLKGNEPAKKYLQRLTHKHGKAKALSILAHKLGRAVYFMLKNKEAFNQKKLLGL

SEQ ID NO: 240718 - protein, 403 aa, unidentified
MNSVGIDISKGRSTVAVMRPFGEVVISPFEVHHTDSELSALARRLKSLNGETRVVMEATGNYHAPVAKLLHDAGLYVSVVNAKLVHGYGNNDLRRVKTDKKDAVKLANYGLDRWLTLPRYVPEEDTRLLLKNCYRQYRQYSKVQTVLKNNLISLLDTVFPNVNRLFSSPIRGDGSEKWVDFVAEFWHCRCVSEKSEKVFTNKYQRWCRKHGYNFSEEKAHTIHAEASGYIGVMPKSETTKLLVEQAVAQLRATSAALTALKHEMLALAAQLPEYPVVMGMFGVGPTLGPQLIAEIGDVRRFYSKKALVAYAGLDAPPNDSGDVTGKHKSMSKVGASSLRRTLFLVMSVYLQNAPLDEPVYQFMDKKRAEGKPYRVYMMASANKFLRIYYATVKAYLESLEHTA

SEQ ID NO: 240719 - protein, 324 aa, unidentified
MIDGVLGIDVSKNTIDVSMSGCNKVRARSFANSADGWRHLLAWLISQKIQRVHACLESTGRYSIGIGSALYDAGHVVSIVNPAQIRDFARTKLGRNKTDGVDASHIREYCELFKPQPWAPASEAHRRLGELQTIRAGIIAGLTEWKNRKNSGMIDAVAQSLADVTISHFTGQLGAVDEAITQTIDNDPVLRRKRDLLLTISGVGETLAGVVLAELPGPDVLRSGAEVVAYAGLNPRLHQSGTSIDRMTRISKIGNAVLRAALYMPAMSAMQHNPAIVALVARLKSRGRLKPKQIVVAAMRKLLVLCFGVLKTGKPFDPAIAMGC

SEQ ID NO: 240720 - protein, 449 aa, unidentified
MSELTPAINGLPVINPRAAGMDIGSRFHVVAVPSALSDQPIQTFQAFTADLKRMADWLVGVGIKSVVMESTGVYWVPVFEVLENAGLDVIVANARETRSVPGRKSDINDAQWLQRLHACGLLRASFRPGRDIAALRAYLRHRERLLDYASAHIQHMQKALTFMNRQLHHVVQDITGATGMKIIRAIVAGERDAHVLAKFRDIRCKSSEETICSALVGNYQPEHVFALTQSLALYDFYQARVDECDAQIEQALAVLKADKPEPEQPIPKVRHRTKQPNSVNFDVRTALYQLIGVDLTQIHGIGPFLALRLIAECGTDLSKWRSSKHFTSWLTLSPGCKISGGKILSAHSRKSKNRLTAHLRLAAVTVGKTNTALGAFYRRLSARIGKAKAVTATARKIAVLFYNAMYFGMHYSDPGADQYEQKYRERVIKQLHRRAAEFGFELHELEGVS

SEQ ID NO: 240721 - protein, 452 aa, unidentified
MAKKGKRRCDTLPILHPDAAGIDVGASELYVAVNADRDPHPVRCFPTFTRDLHALADWLVQCGIHSVAMESTSVYWIPIYQILEARGLEVYLVNAQHVKNVPGRKTDVSDCQWLQYLHSVGLLRASFRPPGFICAIRSLWRHRSSLIQMAAEHVLHMQKALDQMNLQIHRVLNDITGVSGLKILDAILAGERDPLSLARLCHGGVKNSENTIAKSLEGDYRPEHLFALRQSLAAYHYYQNLVLEVDQEIKLQLGELQTAATAEKSTPARTKASAYQRRRYEPKTFDLRGELYRIFGVDLTNVPGISAITAQTILCEIGTDVSRFRNASAFASWLGLCPEKKVSGGKVLFTKSRRVRSRVATALRMGAQSLHHAKDYLGEFFRRITRKLGRPQAITATAHKLARIVYHLLGTKEAYNESVFHKSEADTIRRAEYRLRKQAAQLGFQVIPSQNR

SEQ ID NO: 240722 - protein, 420 aa, unidentified
MKVVYQTCCGVDVHKSFLVATIIKTSSEVQPSYQKKRFSTFNNSILEFKKWLLDNSCRDICMESTGKYWVPVFNLLEDEISVTIANPKWVKAVKGNKDDTKDSKWIGDLFRLGLVRGSYIPCKPIRILREFTRYRYKLTSARSSEKNRFQNALTVCNVALDSVVSDIFGKSATSIIDYLLEQSDNSINHEEIAQRLLCSLKKKSESVIESIEGYQMTDPQKYRMRLVHAHMDYITSTIADIDSMINSLVEPYDSAVKLLCTIPGVDRNSAVTIISEIGTDMTQFSDSKRLCCWAGLTPGNNESAGKKKSVRITRAGVYLKPALVQVAHAAVKSDKSPYYKAKYGRIMKRRGKKRAIIAIARMILTAAYHMLSTGEVWNPTDLYKIDMPEPLKNKQKEKAIKQAMKLLIAEGILKESPIAS

SEQ ID NO: 240723 - protein, 369 aa, unidentified
MGKHSEVFVAFDVAKKKHAVAIAEGGRTGEVRFLGEVENSPGPIERTIKRLAERYGRLHVCFEAGPTGYGLYRQVRALGHDCLVVAPALIPKRSGERIKTNRRDAVTLARLHRAGELTGVWAPDGDHEAVRDLVRARAAAADDLRRKRQQLLSFLLRHGRIYRGGGHWTLAHRRWLAGQKFEHAAQQIVFQEGIDAIEDALQRLRRLDKQLALIVPDWSMAPVVEAYQAMRGASFLVAVTFAAEIGDVRRFDTPRQLMSFLGLVPAESSTGDTIRRKGLTLAGNRRARRALIEAAWTYRYPARVSETLRARLEGLPKGVRDIAWKAQIRLCARYRRLSATGKKLPIVVAAIAREIAAFLWAIGREVAPA

SEQ ID NO: 240724 - protein, 336 aa, unidentified
METCIWLGIDVGKQEFHASIATQALHGREWLKLPCQGFEHSPAGMKALLKWLRDQGTAPSQLAGVCVESTGRLSQHFADLAKGRLGSVSIINPARAKFFAQSQGSHHKNDAVDARLLAHFGWQSRPRPQRPEHADALKLRELVRAYGALQADLLAQRQRLDDGPGAKEVRAAHGRLIRAIEKELENLKAAIEDLIESNPSLKEDAARISSIPGIGPRVTQLLLAEFGDLREYNRDEVVSLAGLYPREFTSGTSVHKKPKIAKGGKANVRAALYMAAMSARRCNPVMKAFADRLAANGKPPMQIIVAVMRKLLMLAHALVVTGKDFDPTHHQVKSQS

SEQ ID NO: 240725 - protein, 394 aa, unidentified
MFLIGIDIGKNKHSFCIIEKETGELIVKPNFFDNNNIGFEELISSIQNLSNQDILIGMEDTGHYHFALLKFLLDKKYQVALINPVTTNLTRKLQGGITKTDKLDTLTICDVLSSSQRVKSYRITKVDRFDMYEQKQLTREHHNLKEQLNVLKNRLQKSIDIVFPEFNSLFDSKYGTVYVNILKEFGSADAVARADIRTIRKCFDTKGKGRRIALTAEKLKEAAKNSIGFPSTAEVVQIKHLINQVKLIEEQISEIDKKIEEFSISNNSPILSIPGISHFSGTSILAELGDIHNYSKPSQIIKFAGVAPITYESSQFTAQHNAITKKGSKYLRKTLYQIITPVINNNEVFKTYYQLKLSQGKSHRCAQGHCVRKLMRVIFQLLSTNTQFDPVLLF

SEQ ID NO: 240726 - protein, 347 aa, unidentified
MRFYTHQHKHYCGIDLHARSMYVCILDQAGTIVVHKNMPATPEAFLRVIAPYRDDVVVAVECIFTWYWLADLCAQEGIAFVLGHALYMKAIHGGKAKNDKIDAHKIAVLLRGGMVPIAYVYPPEMRATRDLLRRRCHLMRKRAELLAHIQNTNSQYNLPEIGKKLAYKANREGVEDHFPEPSVRKTIEMDVSLIDHYDKLLGEGELYITRTAKGHDAQSFSRLQSVPGIGQILALVILYEIQDIARFPRVQDFLSYCRLVKCAKESAGKRHGLSGKKIGNPQLKWAFSEAAVLFLRQNKLGQAYFAKLERKHSKGKALTVLAQKLARAVYSMLTRHQAFDLTRFVSA

SEQ ID NO: 240727 - protein, 339 aa, unidentified
MQVTTIGLDLAKNVFQVHGITEDGTVAFNRSLRRAQMFAFFEKLEPCLVGMEACGSSHYWARELSKLGHAVKLIAPIYVKPYVKRGKSDAADAEAICEAVTRPTMRFVEMKSPEQQAILSLHRARDLIVRQRTQIINMMRGLLAEFGIIFAQGAGHAIQFAKRVIEGHSPELPQAASDVVTDLSEQLLMLHERVNWYSRRMTKVAKSEPRIALLQTIPGIGPITASAIVATVGSGEQFRSGRDLSAWLGLTPINKSTGGKERLGRISKMGDRYIRRLMVVGMTSRIKQIKSTPERFDPWFADILQRKPAKLAAIAMANKTARIIWAVLSRNEPYQARTV

SEQ ID NO: 240728 - protein, 320 aa, unidentified
MTKQTQNLKKIGVDVSKKTLDIELDKKHIFSIDNNEKAFFDFLKILDEPLDSIHFVLEATGGYEKKFANFLLSQFIAVSVVNPKRVRDYAKALGILAKTDKIDAGVIRQFAGVANLVLLKKKSEADERLISLTRRRKQLLKHQSTEKQYLETSTDKYVRLSIQAFLDTLAEQIESLDRMIQVLMEADATYNVRKQLIVDVKGIGERTASTILVQLPELGQLSNRQISALAGVAPFCNDSGERKGKKMIWGGRKEVRTALYMPMLCAIQHNKTIKAFYDRLIAKGKIRKVAVIACMRKLLTILNAMLKNNTPWNPDYAKNV

SEQ ID NO: 240729 - protein, 349 aa, unidentified
MLQNFSDEPYDTKTQEYRFQTIATTRPYLTAVFTHHKIDLVVMEACGPSGWISDLCQECGLKTLVCSTNEAAWIWKNVKRKTDKDDALKLARLAMLQQLTSVHVPKHQVREHRSLIKYRKKLVGRINGIRNAIRGLFVCHGIEIAKGPIAWRTGRHEIDSYRKPLAECSMKELWQGQLDAELTQLDSLGEQISVMEQRLKTIAQKDERIQRVQTIPGVGPRTAEAIVTTLDDVNRFKNGRQVSSYIGLVPRQFQSGETDRNGRITKRGSRLLRTLLLECAWISIRHNPWAKTTYERIHGGQKTRKKKAAIALARKIAVVAWAMLKNKTDWDPEKAGIGPQSEEPSKNTE

SEQ ID NO: 240730 - protein, 456 aa, unidentified
MARRSKARGIRRQPVLPTVHAHAAGIDIGSTFHVVAVPPELSPEPVRTYRSFTDDLHRLAEWLVELGVTTVAMESTGIYWIPVFEILEARGIEVLLVNARHVKNVPGRKTDVNDAQWLQQLHQHGLLRGSFHPALQWSALRAYLRHRECLLEYAAAHIQHMQKALMQMNLQLHHVVSDITGVTGMKIIRAIVAGNHDPAALARYRDVRCKASLDTVRAALDGNYRREHVFALRQALELYDNYQAKIDACDQEIEATLASFEDGAEALDALPAARYKTRQANEPKFPVREALFRVLGTDLSQVHGFSAYTALKLIGECGSDMSRWPTVKHFTSWLTLAPGNKISGGKLLSAKTRRSSNRAAKTLRLAAVNVGRTQTALGAFYRRLAARIGKAKAVTATARKLAVLFYNTLRYGMAYQDPGASYYEEQYRRRLIKGLHRRAKELGYELVAVGATEGVS

SEQ ID NO: 240731 - protein, 318 aa, unidentified
MTVPHVFVGIDVSKTQLDVALRPEGRFAVSNDETGFTQLIERLSRVAPVRVVLEATGGLEILLVGALAAAGLPVVVVNPRQVRDFAKATGKLAKTDALDAQTLAHFAEVIQPALRPLPDEQTQALAALVTRRRQLVEMLIAEKNRLRQAPKPIRPSLQAHIAWLEQALQQADTDLAEAIRHSPVWRENEALLQSAPGVGPVLSTTLLATVPELGTLAHKQIAALVGVAPLNRDSGTLRGRRTVWGGRAQARAVLYMGAIVAARFNPVIRAFYQRLRAAGKAKKVALTACMHKLLVILNAMLKHRTPWRQGTDLAQTGG

SEQ ID NO: 240732 - protein, 313 aa, unidentified
MDMARYIGIDVSKDRLDVHIRPDAKAFAVANTPAGIAELADHLAPLQIEKVILEASGGYEKQAFLLLVEAGLPVAIVNPRQVRDFAKGAGRMAKTDTIDAAVLAHFAEVFRPRDTAPLSPLESQVGEYVVYRRYLIREMIGVRNQLRRLTTPSLRQALERRLSTAKAECKLIEREMATLVRQSDKRPLFDLLTSVPGVGALFACTLIASLRELGSLSRREIASLVGVAPMNNDSGHRRGHRFVTGGRGAIRTTLYMATLTASRFNGSIKTFYGRLREAGKPPKVALTACMRKLLTILNAMARDGRAWCHGATT

SEQ ID NO: 240733 - protein, 320 aa, unidentified
MAMTVSQSIIGVDVAKAEVVVYQSETAETKIVSNKKSKLKAWLKSLPAGSAIAIEATNIYHVDTVNLAHSMGHIVYVIDGYRLSHYRKGTGGRAKTDFSDAQLLARYLKNEQADLRAWNPPPKIYTKLQSLLRRRAALVKMRVALNQSWAGEPSLKASSKSISACLDRHEGLIEKRILDAVTEAGLLHQVKRCQAVEGIGFLTAVALVMAFQRGEFESADAYIAFLGMDLRVSDSGQMSGRRSLSKKGDSEIRRLLHNAASAGIRSEAWKPLYEGYLARGLKTTQALVIIGRKLARIAFSLMKNLSEYQSKAVLGASPKP

SEQ ID NO: 240734 - protein, 391 aa, unidentified
MIYAGIDVAKDKHDCFITNSDGEVLFKAFTIPNNRDGFDEFYQKILSITDDLSNIKVGLEATGHYSYNILGYLLDKGLTTFVINPLHTNLFRKSLSLRKTKTDKVDAATIATMLMSGVNLKSYSDTSYHNEELKSLTRYRFDKVQERAQLKQSISRLVTILFPELEKLVPTLHLASVYALLSELPSVKRISDCHLTRLTNLLSKASKGRYGKDTAILFRETAKNSIGSNMPAKSLELKHTIKLISELDAEIDEIENEIKSIMDEINSPILSIPGISYRMGAMIIAEIGDFSRFDSPDKILAYAGLSPSTYQSGQVESSYSHMEKRGSRYLRYALFNATKFVCNWDESFGTYLAKKRAEGKHYNVAISHAAKKLVRVIYQLEKSGQAYTKSY

SEQ ID NO: 240735 - protein, 395 aa, unidentified
MVKSSLIGEVGDGSASGVKPRAKRSAASRAVANERREIDLSGAFKAVSERDPRRRRGINPNSRWSRRHTASSHLQTREITMSTSEHIYVGIDVGKDTLHVAACPPPINACLPNTPEGHRQLCRMLQKHTVALVVMEATGGYERPVAAELLAESLPVVVVNPRQVRDFARGMGQRAKTDAIDAQVLASFAQIVQPAPKPQFKAKTAELAELVKRRRQLNDLRTQENNRILMIHHHKVKKSIAKMIKTLDFQIAEIEQLIRDYIDADEDFKTKDGIIQSTPGVGPQTAAMLLSHLPELGQLNRQEIASMAGLAPWDHASGKAAGKAHIWGGRKEVRNVLYMAALAARRCNPTIHAMAERLTHAGKPFKVVMTACMRKLLIILNTMIRNQTLWTPKLN

SEQ ID NO: 240736 - protein, 366 aa, unidentified
MNSVALSGGPIHLGLDVSKNKIAVGILRWDEQVPDTEMLVNDEASVRRLIDRFPDRGQLRTCYEAGPTGFGLHRLLRSMGVACDVVAPALIPKAPGDRVKTDRRDCRRLARLHRAGELIAIRVPSEAEEAVRDLCRARAAVVGDRTRIRHRLSKFLLRHDRVWRDTAWTLRHERWLTGQRFDDPALRTTYAHYRAMLTAREAELTAVEADLAHWYTHGPFTDAVARLAAYRGVAYVGALTIASEVGDWQRFPAARTFMGFTGLVPSEYSSGDAVRRGHITKAGNTHLRTQLIESAWAYQHHPNLGVTLRRRQEHVDAATVARSWTAQQRLCGRFRRLNARKTSRSVVAVAIARELAGFLWAEMTAA

SEQ ID NO: 240737 - protein, 354 aa, unidentified
MIIIGCDYHPGFEQIAFVDTETGELQERRLQHREEAEKFYRDLAAQGRKVGVGMEASGHARWFERLLAELQCELWIGDAAEISAKRVRKQKTDRQDAQLILRLMMKDDFPQIWVPSWENRDLRQLLWHRHRMVQARTRIMNQLQAVALNEGLRSKKRLWREAGREQLEAIRLAPWASQRRRDLLELLDRLNPTIAKLTQAIEEEVGKCPAARRLQTHPGVGPLTALAFVLIIGKADRFQCGKQIASYLGLVPLEKSSGHQRRLGHITKQGNSLLRFLLVEAAQVTVRSLPEWRSKYVHLTMRRGRKIAKVAMARRLAVRMYWMMRKEWDYERLRKFGSHAGKPGSGDGVKSNTE

SEQ ID NO: 240738 - protein, 368 aa, unidentified
MHEGITAYVGLDVHKDSIAVAVAGNDREVPHFLGTVRPDIKQVRKALSHYGSPTSLHVVYEAGPCGYTLARQLLADGFGCQVIAASRITRSPTERIKTDRRDALTLARLARSGDLIAVRIPDERDEAVRDLSRARQDAVRACLKARQQLKAFLLRHGRPLRGSRPWSPTGELYLSKISFIHPAQNIAFADYRQAVLDTHARVERLTEALRAQCEHWRMQPLVSALACLRGVDFLTAVILVAEIGDFARFAHPKELMGYLGLVPSEYSTGERHHRGDITKTGNAHARRVLVEAAWSYRFPARLSHTITRRQEGQSKSVRDIAWKAQLRLGHRYRKLQSRKLHQNKIIVAIARELTGFLWDIARHVPLVA

SEQ ID NO: 240739 - protein, 440 aa, unidentified
MAKPKNKISVVNNNTAGIDIGSRKIFIGIADKPVVSYNTFTDDYLNAVTYLKENNITSVAMEATGVYWISLYDILDQSGFDVILCKADQAKNIPGRKTDVADCQWIQQLHSYGLLRSSFIPPQHIRSLRTYVRQRRTNLQLASDHIRRAHKALELMNIKLQNVITQINGKSGLAILSAIINGNHNPENLAALCEESILKKKKEAVIKSLKGNFSDENLFLLKQAVDAYLFYLKQVDDCDKQIENHLSLITQELPRPEKLNKPKPIRHHKPNIDDLHLKLMQLTGGKDASQITGLTDSTLLQVISEVGTDLSRFPTEKHFTSWLGLAPNSHQSGLTNKKKKFKRHTSAGQIFRLAAQAIAQSKHLALTSFYHRIKARKGSLGAIKATARKIAVIFYNVMTKGIEFVEQGIKLYEQKIKERQIKYLHKQAHRLGLTLISQVE

SEQ ID NO: 240740 - protein, 292 aa, unidentified
MKLYAAIDLHSDNNVTVVIDEQDRVVYQKRLPNDLALILKEFSVYRTELQGIVVESTYNWYWLVDGLMEQGYKVHLANTTAIQQYEGLKYTDDHSDARWLAHVLRLGVLPEGYIYPRADRPVRDLLRKRSQLVRQRTTNLLSIQNLMTRNTGSSLSANRVKGLDVQQVDELLPNGDLALAVKANLSVMCGADEQTKILERTVTQRVKLSPQFSFLKTVPGIGQILALTIMLETGDIRRFSSVGNFASYCRCVGSQDQQRQEKRPGQHQERQQVFGLGICRSGQLCDPVQCQD

SEQ ID NO: 240741 - protein, 342 aa, unidentified
MPVVGGLDIHRAQLTFDYVDLDSGEVCRGRIVPADREHLRQWLGRFADRWEVAFALEGCTGWRYVVEELQRAGIEAHLAEPAETAARRGPKRRAKTDRSDAQLLRELLLEGRVPESWIPPQPVLEARALVRLSKDLLEERTGWWQRVHAGMFHMGAPVLQVKTMSPDGRGRMSEAQLSPATRTAVAVGMSQVDRLTADMVRLREQIATISRRQPACRALQAVHYGVGPLISVAIWSEMGDTRRFHSSDDAVRHAGLDVTVYSCDGRRTGGRLARQGPVVLRWALYEAAVYAGRSSSPDHPYFLQVNNRLDGQLALLSVARKLARRCHHTLRGLGDQVLAAAA

SEQ ID NO: 240742 - protein, 431 aa, unidentified
MMTEKKKVEYAALVGIDWADRKHDICLQVAETGERELLVLEHGPEAIDEWANALRVRFANRPIAVCLEQRKGALITALLKYEHLVLFPVNPRLLAGLRRAFRPSGAKDDPSDAQIAVDILVQHRDKLKAWVPEDPRTRQLQALVQTRRRVVGQRVCTSNRLTANLKGYFPQALDCFEGLDSVMACDFLTHWPSLGEAKRARDQTLRAFFLKHNVRNQELIEERIALLHQAMALTCDAGVILPALLATATLVAQLRTLIAGIEQYDTAIAKAFKAHPDAFIFRSLPGAGPTFAPRLLAALGSERSRFDSVRAMQEYFGIAPVTERSGRSEWVHWRWSCPKFLRQSIVEWAGMSIRYSCWANAYYRQQREKGKKHHAAIRALAFKWLRIIYRCWKDRRPSSFKVFTISCNLQILLRYLEASRDHVWRRSAKVR

SEQ ID NO: 240743 - protein, 343 aa, unidentified
MGEVSTIGLDIAKSVFQIHGVNAAGAVVMRKRITRAKLLEFFAALSPCLVGIEACPTAHHWSRQLQALGHTVRLLPPSYVKAYLKRSKNDANDAAAICEAVTRPSMRFVATKSEAQQSGLMLHRSRQLLVCQRTMLSNAIRGHMAELGIISAKGRNGTAELLKIIANEQDDRIPEAARFSLDVLARQYAAVRAEIVAIERRIHAWHRSSEESRRLEEIPGVGPIVATALVAEVGDWKVFSSGRSLAAWIGLVPRQHSTGGKERLGRISKQGNRHLRWLLVAGAMAVIRYARQHGTKRPWLARLMDRRPIKVAAVALANKIARMAWAMMVRGERFKEPRLLPAA

SEQ ID NO: 240744 - protein, 320 aa, unidentified
MQTPSALLNIGADVAKHTIVVACSEGGFPVREVANQRAAVLAFLKSLPAGSRIGVESTGTYHELFAEAAHRLGFLVFVLNPKDTRHYAKAVGLRGKTDRVDAELIARMVAHEHTKLHAWTPPTAQQREIDRLIKRRATLIGLREAVEMSLHELGGFADELKALRSRFNQLIARLDLRAKALVEANPERKQNFARLCTISGVGPVVGTALVNTLERVPVKSADAFIAFTGLDPRPDDSGQHRGKRRLSKRGPAELRRLLYLAALSAVKTKPWSSLYEHYRARGLSSTAALVILARRIARTAWSIYTHKTEFDPARLTRSLT

SEQ ID NO: 240745 - protein, 418 aa, unidentified
MKEELIARLSRRYLALDIHKHYSIVAGVDFEGEVILEPVRVEHTDLSDWLERHIQSTDYVVIESTTNAWYVYDLLEPLAEKTLVANPIKVKQIAQARVKTDIRDTLILARMLAANMIPAIWVPPLEVRNLRYLLSQRRRLMGMHTQVVNRMHSVAHRHHLSHPKGKRFNEKNTAWQQDDELSDEEKFQLDLDRATEKHLSEQAGKITKKLARMSHEKPWAESMMYLMQLPGFGIITAMTVLAAIGDIHRFEDFKKLSSYSGLTLGVEQSGVKNRGKKITKEGRKDLRWAMVEVAQRAVKSDPHWGRRFQELCRRMHRNQAIVVIAHRLLELVWLVLTRRQPYRNFSHERIAYKYLTWSWQLSEEDRDGLTRQQFARYYLMRLGIGHDLERVALNPKHPRRLASEAELLALKPELTRIE

SEQ ID NO: 240746 - protein, 355 aa, unidentified
MNSVRYIGMDVHRDTISVAVLDEGGRLLMQSVLATRAGAILDFIHGVRGTLHVTFEEGTHSAWLYDVLVRRVEKLVVCNPRKNALMKSGSKSDAIDARKLAELLRAGMLSAVYHGETSGLEVQQMARSYSQLTEDTTRVMARLKAVFRGQAVSCVGKKLYGKRHRDEYLGQLGGGGLRRRAEHLYQELDALQPLRHAVRRELIVECRKHAAAQWLQSVPFLGPIRAALLIGRVQTPHRFRSKRQFWTYCGLGLETRDSGQYRVVNGQVERRRRPVLIRGLNWNHNHEMKNLFKSTATAASVREGVWREFYLGLLAKGMRPEMARLTLARKIAAITLKIWKKGETFHAEHLKLQAA

SEQ ID NO: 240747 - protein, 435 aa, unidentified
MEKPTRFIGMDVHKDTIVVAVTAAGEVGKAMPYGTFPNTAATVEKLVRRLRQAGSGPLKFCYEAGPCGYGIHRALTKMNEDCMVAAPSMIPRKSGDRQKTDKRDAASLAVLHRGGLLTAVWVPDAAHEAMRDLIRARLAAVRAVRAARQQLSAFLLRHERIYPAGRTAWTKAHRGWLAEQSFAQPAQQIVLEESIETVRLGEQRRDRVDGYLRAQIPTWSLFPLVQNLSALRGLDTIASAGLAAAIGDPSRFVSAPDFMAYLGLVPSEHSTGPKRRIGAITKAGDVHARSLLIEAAHSYRFPARVARHKLTAVDAVPDAVREIAWKAQTRLCQRYRHMMAKGKLKQVVVTAIARELAGFVWSIACITTDPPTKNSAVTTPSEKICPTGSTTCSSVPRRQPIKETARRAERPGQIRTASADGKRPDRMIAHHHSSG

SEQ ID NO: 240748 - protein, 358 aa, unidentified
MNKPKQTIPVVGGVDTHKDLHVAAVVDENDQVLGTQSFATTRQGYKLMLTWMRSFGDLQRIGVECTGSYGAGLLRYMQVAGVDILEVTAPDKLDRRRRGKNDDFDAQSAAHAAFSKRRTVTPRSRDGMVESLRVLKVCRKTAVQARRVALQIIQTTIVCAPHRLRDLLRNMTRMQLIRTLAAWRPDLSGYRDVEEAYRIALKSLARRYLELHDEIADLDDLIEAIVTDLAPDLIACSGVGFNSAAQLLLTAGDNPERLKSEASFAALCGVSPVPASSGKTTRHRLNRGGDRAANSALHIIAIGRLRLDPKTREYVARRTAEGHSKLEAIRCLKRYIAREVFNIIARRHKQINQAQIAA

SEQ ID NO: 240749 - protein, 425 aa, unidentified
MSLVQPTEPSAVLVAIDIAKLRHDVLIEAPGWKSRKRLILPNTAVEFRLFADFLHGLKHPVRIVFEATGNYHRPLAHFLQAEGFHLELIASLAVARTREAMHNSWDKNDPKDAQVLLHLLKTGVTQHYHDPLVNQIHDFQELSLTYAQISLEKTRTQHRLLTHYLPLYFPEIERYYHATRSEWLLAFLQVFPTPALIARLSMEDFVQQAWTVVGRKVSKQRLLEDIYRTAQSSIGIPVAENSEAVAMFRVVLGEMIRLCQLRDQLEERAACHMKDNADFRRLQQMPGIGPILALTILAEAGDLRRFNHHRQFLKFCGLDLSTQQSGQFRGATKLSKYGNARLRCAFWMAATVAVRLRENSFRDKFERYLRRDPASADRKRMAYVAVAAKMARVAHGIIKTGTDFRCFYEAAAPSGRAASPGPSRP

SEQ ID NO: 240750 - protein, 341 aa, unidentified
MEQYVGLDVSMEETSVCIIDKNGAVIFEGEVPSQPEAIAELLRQRAADAVRVAFEAGALSSWLWHDLKALGIPVVCLDARHAKAALSMRLNKSDRNDARGLAELVRMGWYREARVKSMESRYIRALLIARAKLVNLKRDIENQMRGLLKSLGIVLGKVAGRPFLGKIVVVLRQAPHLRPIIEPMMTAHSALVTQILSYDEHVRALAKNAPTVRRLMTVPGVGPVTALAFVSTIDDPKRFASANDVGAYLGLTPRRHQSGEVDRTGRISKHGDRLMHYYLFEAANVLLNVVRRGSPLKTWGTTLKKRIGHKKAKVAVARKLAIILHCIWTDGTEFQWERDAV

SEQ ID NO: 240751 - protein, 475 aa, unidentified
MEEIEFKFLVDYTKPAFYCGLDVHKYELAVAVYCEDDSHSEFLKTNIFTVDTAGLNQFWSFVRKYRPDGFAMEATGIYHHVIYKFLTRKREVVDWPYKIIVVNPADASGIPNRQKFDKIDAENLAKYLSKDLLRNGKPIIEVIEDLKAIFRMALRIEKDRTALKNRIKKTLDRAGIRPKGFDLNNDWVRELLYHFIEKEQSLSDYLKQLQGDSNLLRAHRYKIFKNIKKFLPYGEFCLTNAQRSMIRQDLVELGFKTARKSLLAMEIDQLILERPALRQQAFYLSTIPGISPFSAVWILAEIGNIYQFKTMRQFLSYCGCSPRVVSSAGKVYSAHVSRHSNSYLRTIFYNGAVVVCNLVKKPSVLKEYARRTISRKRSTSLKLAYCHVAAKIARISYAILVNSAPFDPNYGIAIKPINSANVNNKLSLTDRKSIRRAQNALKRMIDIEELGFLGEHVSSLAEQLDFVLQGKNFSD

SEQ ID NO: 240752 - protein, 361 aa, unidentified
MRYVGIDYHKHYSVLCATDERGQELKQRRIKGNTVAGFAQFFSELGEQNKVVMEACWNWGWLYDLLGQIDQVGEVVLAHPYKTRLIAEAQIKTDRIDAQTLAKLLRGDLIAQSHAPSAATRARKHLLRQRLFWVRLRTMLRNRMHAILDRQHGMERPQLKNFFSRRGQTWLEGVQLPCAEDQPLLKQDLEVAELLEQKIRQLDRAIGQSQSVEEKLLESIPGIGPLFSSVIATEIDGIARFNSAAKLAAYAGVVPTTHASGGRVFHGRLLWQCNKWLRWALIEASWTAIQFSGYFGAIYRNARTHGKNKHVAITMVAHRMVKIIWLLLKEKRPYTETLPDRSEDQVTVAPRRKALSLASSC

SEQ ID NO: 240753 - protein, 349 aa, unidentified
MFVGIDVHKHTHAAALIDERGGELGTLTFANSPAGYERLLGWLAERGARDAVIGVESPGSYGRCLTGALAAAGHEVLHVPAWRTHRERRRQGPGKTDPGDALAIADVVRRKRAQLGPALQPELVRAIAALELQRRRFVLDRTQAIQRLRSDWTQVDPVAEANIVHCQRPTILRKLKRLQLGDGLAERIAAACIRQLARDIEDLNARIADLETEIATLLEQHGNPVADLLGAGNQIAAALIANAGDVRRFKNAAAFARYCGAAPIPCGSGQTSGRHRLHRGGNRQLNAALYRIAIVQQRHHPAAKAFIARKITEGKTAREARRALKRHLANTVYRRLLAWANTCPSMNLS

SEQ ID NO: 240754 - protein, 366 aa, unidentified
MKKTSTVRVSGNMIFKGHKLTIGLDLGDRWSFYCVMDEAGQIIVEQKLATTPEAMKQTFGKIPRSLIALETGTHSPWVSRLLTELGHEVIVAHAQKVQLISKSNRKDDRHDARTLARLARIDPELLGPVRHRSAKAQIHLTVIRARAELVSARTALVNAARGLAKSYGERLRKCGTQQVSRELAAELSVELREVLEPLLQEVESLNERIKEYDARMEKIARESYPQVELLKQVKGVGTQIALTFVLTLEDPHRFPKSREVGCFLGLRPGRRDSGESQPQMHISKEGDPYLRTMLVQGAHYILGPFGQDSDLRRWGLKLAARGGKNAKKRAVIAVARKLAVLLHRLWVGGEVYEPLRNSHKAMRAVA

SEQ ID NO: 240755 - protein, 343 aa, unidentified
MSNDTRIAVDVAKAVFELAISDRAGHVARRERLPRTRFLAFMAQQPAATVYMEACGSAHHWAREIQKLGHRVVLLPPHHVRPYIRRNKTDRTDAKGILEASRNDDIRPVPVKTVDQQVLTSLHRLRSGWMLERTARLNALRGLLRELGVFIPVGSREVVPAAWSLIEDADSSLPEALRPIFAEACREIREIEARVKQVERQLEAIAEQLPAIEHLRTIPGVGLLTGTALVGFIGNIARFPTGRHFASYLGLTPREYSSGLKRNLGRISKRGDGYLRTLLIHGARSVLIHARKQQPDRLREWANNLAKTHVHNKAAVAVANKLARIVWAVWKHERPFALMAKAA

SEQ ID NO: 240756 - protein, 398 aa, unidentified
MEAIVQRSAGLDVHKKIIVVTILLEQPDSSVSEETREYGTTYKACEQLADWLSNHDIQLCVMESTGIYWKNIYAALEKKGLHVSVVNARHVKQVPGRKTDVKDSQWLARLARYGLLKGSFIPPKDLRELRIIARYRTKLKGTLAGEKNRLHKTLDDAGVRLGNVVSDIGGVTATEIIAGLIEGKSMDELLACTRGQLNKKKENLRAELEGELSARHLFLLKKLQEHIAYIEKELTDIDDYLFTAMQPYQKQWEILQTIPGIDAVGAALLIIEMGVDMEQFGSREQCCSWAGMCPGNNESAGKKKSGKTPKGSKQLRYLLCEAANAASKTDCQFKHKYKSLMIRRGHKKAIVAVGHKMLRVIFSRLKTGEVYQDPEINYEELVVKKNAPRWIRMLRKYS

SEQ ID NO: 240757 - protein, 354 aa, unidentified
MAEALKNSIAFVGIDIGKNSFHVVGLDGRGAIVLRQKWSRGQVEARFANMPPCLIGMEACVGAHHLSRGLQRLGHDARLMPARYVRPYSKGQKNDFRDAEAIAEAVQRPTMKFVATKTADQLDLQGLHRVRERLVSQRTGIINQIRAFLLERGVAVRQGLRFLRNELPSILAAPSDALSPRMVRIIEDLAGDWRRLDERVEGLSKEIEAIARRDAGCERLMSVPGIGPIISSAMVAAIGAGDVFSKGRDFAAWLGLVPKQISTGDRTILGKISKRGNRYLRVLFVQAAWVVLIKPKSWERHGLKSWIEAAKRRLHRNVLAIALANKLARIAWSVLAHGRSFEASKLAAAVTQPA

SEQ ID NO: 240758 - protein, 350 aa, unidentified
MKIIGCDFHTRYQQIAMLDDETGELIERRLEHENGEAHKFYRDLSKPVRVGVEATGPLHWFERLLAELGQELWIGDSAKIRASEVRKQKTDQRDAQLILELMLANRFPRIWVPTPQERDLRQLLWHRHKMVRMRTMLGNQLHFLAMSQGLCRKKKLFTEVGRSELSHLPLGPWASRRRAELLDLLDQLDPAIDELDRAVMQEAKLRQDAARLMTHPGIGPVNALAFVLTIGPVARFHRSKQIASYLGLNPSEHSSGGKRRLGAISKQGNTMVRWLLIESVHHVVRLDPEFRQDYQRLKSRRGNAVAKVAIARKLAVRMYWMLRSGADYARLVRMQASPGPTLVNASSSLG

SEQ ID NO: 240759 - protein, 330 aa, unidentified
MNALRRNRMSEAILGVDIAKRKFDVALLINGKLKHKVFSNNQEGFEELELWLKKHGANHVHVCLEASSTYGDELAIYMYDAGHTVSIVNPARIKGFAQSELIRTKNDKVDAGLIARFCLAMHPEPWTPAPPEMRQLQALVRRVDALINMRTQELHRLGTAHTTIEGSIQEHIAYLDRQIDILKQQIADRIKNDPDLKAKRDLLQSIPGIGETTIAAILAELHVFERCDHVQKVVAFIGLAPRQFISGSSIKGKPRLSKVGHARLRKALYMPALVSIQCNPIIQILYHRLKGKGKNGKVVVCAIMRKLVHLIFGILKSGRPFDPNYTTNHA

SEQ ID NO: 240760 - protein, 425 aa, unidentified
MNYKQNEKINQVKESTLVVGIDIGSTTQYARAFDWRGIELGKVFTFSNSREGFESFKVWMQHLQDKYKKLDAIVGIEPTGHYWFDLGAYLEDEGILLVMVNPYAVKQTKELDDNSQSKNDRKDPKVIAKLVTEGRYSAPYTPDGVYADLRIMVTNRKRLIREMTQIKNRFARWFAIYFPEYTDVFGDYEAQSSMLLLKKACTPEAIVELGAEKINQIWRDAKLRAVGMKRATTLCETAKRSIGLKKGSSAARYEMRLLLEDYEYKKAQLDAVMEEIEKLCRKIPESEQMLAIKGIGMITVAGFLAEVGDVRRFESPRQIQKLAGLSLRENSSGKHKGQTTISKRGRSKLRAVLFNAAIPLIAKNPEFKSLHEYYTTRANNPLKKKQSVIAISCKLIRVFYAILANGVTYDPQKMLSDIHRKPQAA

SEQ ID NO: 240761 - protein, 400 aa, unidentified
MTRRFTLFCGIDVAKASHVACLLDIDGQFLFQCQSFSNDADGLARLLTRLRQAAGNRSVLVGMEATGHYWYALHEYLVRHRFSVVVLNPVQTADHGRRQIRKTHTDKVDARRIAHLLKSGDYRRSLVPEDLGMTCRQLSRLLYALVRQRARLKQLIRCKLEWLWPEFENQLADPLGPTGQAILHAACTPTELLAVPEPTLLELIQKASRKKLGADLAQRLRGCAQASIGMRRGSQGAALAIRTLLTAMDAARPVRLELQRQIVALSARLPRYLFTLPGIDELRAVALFGETDPISALASPEQLVAFAGLDLAVFQSGQYQAPRRHISKRGSPHLRRTLWTMASLAVRQEGELRDRYLLHRRHGLHHLAAVTAVALKLARIVWRILKDARDFRPQGRPAQS

SEQ ID NO: 240762 - protein, 330 aa, unidentified
MQKNKEYVGVDVSKESLDMAVYSTGEIRSFGNDDASIAKATTWLKQVNPAIIVMEATGGMEISLYVALQEANLPLAVINPRQIRDFAKSMGILAKTDKVDAKVLARYAATIQPEARPLPDEEARQLNTLVRRRCQLVEMIIAESNRATITRDKAMKQRINAHIDWLKQELAGIDKDISQMMKENPVWHAKDKLLQSVPGVGPVLSATFIAELSELGILNRKKIAALVGVAPFNRDSGKHRGERSIWGGRCRVRQPLYMAALSAVRFNPTIRIFYERLLANGKEKKVALTACMHKLLIMLNVMLKHNSYWSCNYAIFNNTCIPDAKTVALL

SEQ ID NO: 240763 - protein, 323 aa, unidentified
MSTKATKKRRSFIGIDVSKKLLEVGVHQSDYHFRCPNDPKNFPALITELISLRPARILLEATGGLERALLQALHAAGLPVVVVNPRQVRDFAKALGLLAKTDRLDARVLAHFAAATQPAIRPVKAQQETELDALMGRRTQLSDMLAQEKNRRGSAATKDTRDDIEAHIEWLEERLQELDEKLKEQLKCSAVWQQKDQILQSVKGIGFVTSMALLADCPELGQLNRHQIAKLVGVAPLNRDSGQQRGARHIWGGRAQVRGKLYMATMAAIRFNPVLKSFYERLIAKHKPKKVAMIACMRKLLTIINVMIRENKLWNVDTQQLSA

SEQ ID NO: 240764 - protein, 350 aa, unidentified
MVSIVAKKYNYVVGVDTHARRHVLCLINNLGERLGIYECRVLTKDFSQVLSLIKRKTNDARLLFAVEGTSSYGETFTGFLIRDGQAVCEVRPPKTKVRGSIGKNDAIDAELAALSVLTLPVDRLAIPRAFGERKKLRILLASRNILIKQQTMNKNALLALVRCLDTLIDAREALSMDTVAQIASCRIVGRDLKAVGMLEARRLAKEILTLAKQLKDNEKQLKDLVAAVASSLLRLHGVGAVCGAQIICSYSHKGRIRSPEAFVALAGVAPIPASSGNTNRHRLNRFGDRALNCALDIITKTRMRTDEETKRYIKKRTKEGMAMRDIRRALKRYIARSIFKHLETLNLGID

SEQ ID NO: 240765 - protein, 341 aa, unidentified
MLKLGFDCHKAFSQVAVLDEKGAIVRECRLANKRETLARFVSELTQPAQAVIEAGYNWGLMYDLLTELGVDVRVAHPLRVKAIASAQIKTDTIDARTLGQLLHARLIPEIYVPTPDIRRQKDILRQRCWLVKMQTAIKNRIHQLLTRNHIENPGFTDLFGLGGMKFLRSLALGTSDQKILTQDLELYDMVHEQVKIITRWISEALQDNRYRTILLSLPGLGAILAALAALEIADINRFFSPGKLAAYAGLVPTTYASGGKVHHGDLLPQCNRYLRYAFVEAAWSAVKTSPYCRALFAKLRKRKGANTAIVVVARRLCGIAYQCLKENRFYEERAYAFDHSA

SEQ ID NO: 240766 - protein, 342 aa, unidentified
MEEVVTVGLDIAKSVFQVHGVDAEGRVVVRRRLTRAKVIPFFEKAPRCRIGIEACATAHHWGRRLAALGHDVKLMPPSYVKAYVKRQKNDAADAEAICEAVSRPSMRFVPVKTPDQQSVQVIHRTRMTLMRHRIELSNTIRAHMAELGLVAPIGRLGLQGLIEIVRDDSDARVPTSARTCLKMLADQLDLVNRQALENDRMVLADARSSEVGRRLMAVPGVGPVLASAMVATIADPHAFRSGRNLAAWIGLVPRQNSSGGKERLGGITKQGNRYLRQLLVVGALAVIRYAERHGTKRPWLVQLMARRTTKIAAVALANKMARMIWAIMASGEAYRDPAPRAA

SEQ ID NO: 240767 - protein, 481 aa, unidentified
MAKRKQASPRLAAKASSATKAKPRKQVAARPSESLRITHPHAAGIDVHASVHVVCVPSQDAPPPPKDQPANVPSNVRHFGTCTADLEMLADWLQACGVTTVAMESTGIYWVPLFELLERRGFEVYLVDPRQTKHVPGRPKSDVLDCQWIQRLHSYGLLAAAFRPCDQVVVLRSYLRQRQMLITYGSQHIQHMQKALEQMNVKLPEVVADVTGLTGMKIIKAILGGERDPLQLAKHRHERCWRTEAEIARALYGTWRAEHLFALQQAVELYEFYQTKLRECDDQLQAQLQTFADKSAGQTLQPRTKARVANKPRFDVRQSLLRMSGVDVTVLEGVDESTALVLLSETGTDTSKWPTEKHFTAWLGLCPQHRGSAGKIKNRRIRRGANRAARAFRMAAQGSHHAKNALGAFYRRIQARSGGGKALIATARKIACRYYRLLKYGQQYVRQDMAAYEELYRLRLIKGLARKAAELGYQLLATTNT

SEQ ID NO: 240768 - protein, 269 aa, unidentified
MKCDKYIGMDVHQAMTVVVVLDADGKVILETMVPTEAAAIIRLMQSLSGPLRVTFEETTQAAWLYEVIRAHVTEVIVCDPRRNKLLEDGSKADKIDARKLADLLRAGLLRSVYHGHEATRNLKELVRAYETLSIDTQRTMARIKAIYRARGVRTAGRGVYQPKQRERWLDLLPEAGIRQRAAWLYEQLEQLRPLRRKAKEAMLAESRRHRAVSLLRTIPQMGPIRSAFIVATVDTPHRFRTKRQFWSYVGLAVVTHMSSEYEMTAGRVV

SEQ ID NO: 240769 - protein, 414 aa, unidentified
MDVVIQRCAGIDIGKKTMAVTIRTPGQGKRRRTETRTFATMTDQVLALRDWLLGEGVEVAGMEATGDYWKPVFYLLEDALECWLLNAGHLKAVPGRKTDVKDSEWIAQLVEHGLVRPSFVPPPPIRELRDLTRYRKTVIEERTREVQRLEKILEDAGIKLSSVASSTVSVSGRAMLAALIDGERDPAALANLAKGRMRRKTPILQQALRGRFDAHHAVLVREMLARIDAADATVARLCHEIAERLRPFQEQLDLLMSIPGIARRNAEVLIAETGGDMTAFGSPHRLAAWAGLAPGNNESAGKHRPGHTRKGNKWLGSALVESAHAAARTKNTYLAAQYWRLSGRRGKNRAAVAVAHSILVIAYHLLDRHQPYRDLGGDYFTSRLPDHAHVRRLVAQLERLGQHVTLTPNNPEAA

SEQ ID NO: 240770 - protein, 344 aa, unidentified
MLHAGLDLSRRRLDVCLVDDAGVLVEHTAAPPDADGLRGLVDRVGGRPVRSVIESMTGARFVHDTLEELGWEVLVADAQKVKGLAPLACKTDKIDARVLAELSWRDLVPAIWLPDPSIRRERELARFRLHLVRHRTTLKNRIHATLMTFGHPCPVSDLFGLTGRDLLDRMAIPDPWRRNVDASLTLIDDLELQIAQLTVELKRQGADHRYIPLLVTAPGFGWINAYTVASEIGDIDRFASPAKLCGYTGLCPRVYQSGSTDRRGPISKQGSRYLRWALFEAALHACKHPIYAERYQRTKKRLGRQRGPKVAQIDLSRKLTEAIWHMLTRNQPFAPAGAGFRLAA

SEQ ID NO: 240771 - protein, 374 aa, unidentified
MGDYSDAFVGFDTSKLRNAVAIAEAGRGGEVRFFGEIENTPAATAKLVRKLSAKYRQLTFCYEAGPTGYGLHRQITGLGFECVVVAPSLIPKRPGDKVKTNRRDALMLAKLLRADELTAVWVPDGGHEAMRDLTRARETAMLDLRTKRQHVSAFLLRQGRPYPEGRKTWSKAHMNWIASQKLEHPQQRLVLEEMMLAMRQAQERLTRLEQAIAAMVPEWSLAPVVTALMAMRGIDLVSATTLLAEIGDLSRFRTPTELMAYLGLVPSENSTGDSIKRGAITKAGNRRARRMLVECSWSYQHPPRVGQAKQPKVDAAPPEVREIAWKAQCRLYRRYRTLIRKGKLKTIAIVAIARELAGFIWAVARAARVAAASA

SEQ ID NO: 240772 - protein, 344 aa, unidentified
MEPMYYIGLDVHKRKISYCVKDSGGKIYAEGLLPATRLDLDHWMKTLPHPWSVAMEATMFTGWIYDHLKPHAAALKVAHPLMLRAIAAAKKKNDRVDASKICDCLRCDFLPECYMASTAIRERRRTLRYRNLLVRQMVQMKIKSSSLLMEAGVSYNKQRLHKAGYFRELLASNPDIDEGLRSLLRLCRETVVRLQKTESAMVRSLERDSLLMDRVERLMTIPAVGPITALTWALEVGDVQRFSSIKKAISYCGLCGAERSSGNTVQRTPLSKQRNKHLQTTLIEAAKMAPRNSADLAMLYDREKQKGNANRATLAVARKLVAYLMAVDRGQRNFQVVETNCIAA

SEQ ID NO: 240773 - protein, 337 aa, unidentified
MIVIGVDVHKHSLTAVAVDELGRALAEWGGPVEGEVVGWARALGEERLWAVEDCRHVTRGLEQTLLGEGERLVRVPPRLTAPQRRRGRSRGKSDSIDALAVARAALQEPLLDGPRPGEDTLRELKLLVDHRDDLVAERRRCQQRLRWHLHELDQRLAVPLGALDRAVWIDRLGRQLARGEQTTQVRIARDLLARCRTLTRSIVELDRELQARTKTIAPGLLELAGCGALSAAKLLCEIGPIDRFRTDAQLARHAGVAPLDASSGKHQRHRLDRGGNRQLNCALHRIAVTQGRVHAPARAYLERKQNEGKTRREAIRCLKRQLARTVYTTLKNEPLLT

SEQ ID NO: 240774 - protein, 347 aa, unidentified
MTIMVETRRALTGGVDTHADVHVAAVIDPQGGLLGVESFRTDLAGYQQLSGWMCAFGEISQVGVEGTGSYGAGLARHLRRVGLVVVEVDRPNRQERARQGKSDSLDAVEAARAALSGRAFGVAKTRDGNVEAIRSLMVARRSARESRTKAMNQIRQLVYTAPDELRERFVGVPSWRLAEGVATMRVHTDPDPVRMATKTALATLGRRAVALGEEGKRLDVLIARLVNKVAPELVELVGLGPDTAALLLIAAGDNPSRLRNEATWAKLCGVAPLEASSGKVTRHRLNRGGDRQANHALWRIVLTRMSCHAPTKVYVARRTAEGKSKREIMRILKRYVAREVYHYLPRD

SEQ ID NO: 240775 - protein, 414 aa, unidentified
MEVLYPRCAGLDVHKKTVVACVMLTDGQGKCQKEPRTWGTMTADLLALSDWLQERGVTHVAIESTGGYWKPVFNLLEGSFEVLLVNPQHVKAVPGRKADVSDAEWLADLLRHGLLRASFIPPVAQRELRDLTRFRSTFIRERATLVNRVQKVLEDAHIKLASVASDVMGASGRAMMAAIVAGHTDPETLADLAKGRLREKREPLVKALGGRIKDHHRSILAELLCQIDSLEETIARFDQLIEKYCAPFEEAVALLDTIPGVGRETAEVIVAEIGTDMSRFPTAAHLAAWAGVAPGNNESGGKRRTGKTRKGSKPLGVALNQAAHATARTKNTYLAAQYHRLARRRGKKKAIMAVAHSILVIAYHLIQCKEPYRDLGADYFDKRRPEALANHLVKRLEGLGYTVSLEPQAIAVPS

SEQ ID NO: 240776 - protein, 325 aa, unidentified
MNNYAALDLHERTVQCVLKNQDGRIVKESKTVKDEGRILSFLEGTDASVVMESGRNHQHIYDVLKERGYDVTVAHPLMVKAIAYAKVKTDRVDARVLADLLRADMIPESYVPGRDIREIRDLVRRRHYMVKLRTMQKNKVHAELATRWLKYEGDPFTEDGKKYLRSLAIDAVNDYLETIEFLNRKIHQLDEKVRRVVESDRYAKLLMTVPGISYYSALLISSEIADIDRFPDHEHLCSYAKLSPGVRQSGETQHTSKSMGNSLMNWIMIQCTRVHVRKYDSAITRFYQQVSKRRGEKVAIVAAARKLMRAIYIMLKEEQAFRLDG

SEQ ID NO: 240777 - protein, 391 aa, unidentified
MVCVGIDVAKDKHDCCILDSDGTIRADCITIPNNMDGFKQLLQTIRDCTKKSDKIKVGLEATGHYSYNILGFLLDNDLAVYVMNPLHTNLYRKSLSLRKTKTDRVDAKTIATMLLSDVDLKSYTDIAYHNEELKSLTRYRFDKVQERAKLKQSVSRLVTILFPELEQLVSSIHGTSIYALLSEYPGAKQISEVHLTKLTNLLATASKGRYGKDKAIQIRDAARTSIGSVMPAKFLELKHTIKLIQELASEIDEIEDSIQKIIDELNPPILSIPGMGVNSAAVILAEIGDFSNFSSPDKILAYAGCSPSTYQSGKLTNCYAHMEKRGSRYLRHALYNATKYVCYWNPVFAEYLAKKRAEGKHYNVALSHAMKKLVRLIYALQKSGKTYLTAA

SEQ ID NO: 240778 - protein, 340 aa, unidentified
MSLYIGVDFHPHQQTVAWCDTRDGEIRFRTFKHSERTVLNSFYKGLSEPAVIGVEATGGLDWFERLIFENGHELLVGNPHEIRRRALSRHKSDRRDAETMLDLLVNREFPTLWRRCEADRSTLQMLNFRQHLVRQRTSVSNQLQALARKAGLAKFRVKTRIGRSILLSAGLKETDAYLRENLYALFDDLTVQLHRVEDHLQSLAKQNEAAQRLMTHSGVGYLTALAVAATLGDASRFNNTRQVVAFIGFDPLDKSSAQKRRIGRISKNGSRLCRHLLGQAASRSRDRQIRESYQRIKSRRGHAVAKVAAARRLLVNCYVILRDNIDYQEFSRRGEVGLHD

SEQ ID NO: 240779 - protein, 362 aa, unidentified
MAGNDRRGIRVRIDAQEARASIEGTRKVACPLFFPRILQGWATKEDMMTNTPVFVGIDVSKGQLDIALRPGGILSVPNNETGFAQILEHLKANSPTLVVLEATGGLEIPLTGTLAAAGVPVVVVNPRQMRDFAKATGKLAKTDALDAQVLAQFAEVIRPEPRPLPDDQTQRLAALLTRRRQLVEMLTAEKNRLASARQPIRKNLRAHITWLERALQQADTDMTEAIRQSPVWREKDELLRSVPGVGPVLTTTLLANLPELGTLTHKQLAALVGVAPLNRDSGTRRGTRTVWGGRAHVRTALYMAAIVAARFNPVIRSFYRRLCAAGKAKKVVLVACMRKLLTILNAMLKHHTPWHTDAIHHA

SEQ ID NO: 240780 - protein, 388 aa, unidentified
MQVVTDQPETPTAIRTDLCAIFISLELSRSNWLITSVSPGGGEKMSKHSVTAGNVAGLLEWFAQLREKARARTGRDYPIITIHEAGLDGFWIHRVLQSEGMESHIVDPASVLTSRRRRRAKTDKIDGETLVRTLLAYKRGEPRVCAMVKVPTPEQEDRRRLCRERKTLVAERVEHANRIKGLLFAQGICNYEPLKRNRRTQLEKLQTGDGRPVPPYLKAQICRELDRLEIILTQLKTVEAERDALLDPAGEKIPTPAAMLLQLKGIGEEFATVLWCEGLFRHFDNRRQLAAYAGLAPTPWQSGSVAHEQGVSKAGNPRLRTTMVQLAWLWLRHQPDSALSCWFQDRIKRNGGRLKKTTIVALARKLLIALWKYASHGVVIEGAVMKVA

SEQ ID NO: 240781 - protein, 342 aa, unidentified
MQITTIGLDIAKNVFQVHGIDAAEKVVVRKRLRRHQVLEFFKALPPCLIGIEACATSHYWARELTKLGHQVRLMPAKDVKAYVKRNKNDSADAEAICEAVRRPTMRFVQIKSTEQQGRLMLHRTRDLLMRQRTQVINAMRAHLAELGIVAAQGREGIKELLKIIASEEDARLPVDAHMSLVVLAGELQAMQTLIGSIEKRIMVQHRSSEASQRLESIPGIGVIGATAIAATVPDPKVFRSGRDFAAWIGIVPREDSTGGKQRLGPISKQGDRYLRRILVVGACAVLRYARQHPEKYPWLTQLLARKPFKVVAVALANKMARTAWALLAKGGTYRAPMLAAAA

SEQ ID NO: 240782 - protein, 418 aa, unidentified
MKSMEITAVGIDVSKRKSTVAIRRPGGVIVACPFDISHSSHDLEKLVSILKTTGGDIRVVMEHTSNYWKPIALTLKNAGFYVSVVNAMLIHDFSDNSIRKLKTDRADSLKIANYALTFWNQLPPFNDEDETRLVLKEQSRMYERLASTATSLRNGLIALADQTFPSIDQAFGHAIKNADGHEKWVDFFSIYWHRDCVLRLSIEKFTESYRKWCLRRNYKFRTNTAHKLYALAQDAVPTLPKNNGTKALVLQACKSLNAVCEAKQSTQEEMNRLASLLPEYEVVMQMEGTGPITGPALMAEIGDVRRFKNKKALVAFAGIDAPPFQSGNFESKSRHVSKRGSPHLRRTVFLVANIILTLSHKDNSVFCFMDKKRAEGKHYYVYTIAGSAKFLLIYYARVTEYLRTQEIPVAASCLNGNS

SEQ ID NO: 240783 - protein, 358 aa, unidentified
MAITTIAHAQPTRVTVGVDTHGDVHVAHAKDQLGRRLDTVSIPTTPTGYRDLLAWARGFGQVQAWGVEGTGSYGAGLARYLRKAGQVVLEVNRPDRAARRRRGKSDPVDAEAAARAVQAGEVTIVPKAADGQVEMLRSLRVARTTAMRARTQAVNALRSLLVTAPAELREQLRGRSAVRLVGVAATLDPGRLTSPTAAAMLALRTLARRYQALDAEITALDGELDRLTATAAPRLLALFGVGPDVASALLVAAGDNPRRLRSEAAFSMLCGSSPIEASSGKTTRHRLNRGGDRQANAALYRIVIVRLRWHQPTKDYMARRTAEGKSKKEIIRCLKRYVAREVFAVLREMNQADPATAA

SEQ ID NO: 240784 - protein, 474 aa, unidentified
MSRGDGIPLERLIAATYPSRRGIPLLIMEKFVAMRKRELRVMFPNAAGIDVGSASHYVAVPPERCEQSVREFQSFTEDLSVMADWLAACDIDTVVMESTGVYWIPLYELLEARGFTVYLVNARHVKNVSGKKSDVLDCQWLQQLMSFGLLAGAFRPAGEVCAVRAVVRQRDTLIDAQAQQIQRMQKALTQMNVQLANVISDIAGKTGLDIVRAIVAGERDPHKLAKLRNYRVRANEATIAKSLMGNWREEHLFCLAQSLKLFDTHQVLLEEADAKIEALLARMHRHAGELTPNKNKGRTKNAPRFDARSALYGWAGVDLTRIGGIDVSTALKILAELGTDLSKFKSAKHFASWLGLCPGTRITGGKRLSGATKRIPNRVAQALKLAAHGLHRSQCALGAYYRRMAARLGAGKAITATAHKLARLVYAILTKGEEFVQRSQDHYEDQVRTRTIRYLQKKAASLGFNLQPNPAVCA

SEQ ID NO: 240785 - protein, 388 aa, unidentified
MKNRSDLNQSYAAFEQTSTLGCVVELSSKNWLAAGVVPAVKRQPKKKLLTDPFELLAQIGRWRAEAEEAGHPIKRIVVAFEAGRDGAWLARWLRDHGIESYVIHAASIPVSREHKRPKTDRLDTEMLMRALLGWLRGEPRHCRMAQIPTLEQEDAKRPTREHKSLVSDRTSLVNKMKSTLVCLGITNFSITGYKAGQKLAALRTPNGEPIPPNTLDELYRGLERLALFKKQIKAIEQKREQQLKAKPTHGTNPLVLMLAKIFGLGLETADVLVHEVLTRNLRDHRAVGRYAGLTGSPDESGKTRREQGLAKAGNWRVRHSMLQLAWRWLKFQKGSALAQWYHQRTAGGGDIIRKKMIVALARKLLIGLWRYVTTGEVPAGVVLKPVAI

SEQ ID NO: 240786 - protein, 431 aa, unidentified
MAATSSNTPPMREDKIDTMTVTCGIDWASDHHDVALVDHEGTLLARARIPDDAVGLQQLLDLLTTHGDSEDAPIPVAIETSRGLLVACLRATKRPVYAINPMAAARYRDRHTVARKKSDHLDAMVLANILRTDRAAHRPLPDDSELAQAITVLARAQQDAVWDRTQAGNKLRSHLREYFPGFLAAFEPRREGLCSKAARVVLAAAPTPEQAAKLNRTQLRSLLKKAGRQRGIEAEAERLRQALRVPQMRQLPQVEQAMGRQAIALLRQLDAACTSADDLTAAAVESFESHPDAEIITSFPGLGSLTGARVLAEIGDDRSRFTDAKGLKAFAGAAPVTRASGRSLAVMARRVKNQRLASVGYVWAFAALTASPGARAHYDRRRADGDRHTAAQRNLFNRMLGCLHHCITKQTRYNEATAFPDSQALQLSVAA

SEQ ID NO: 240787 - protein, 387 aa, unidentified
MQSVISATAVATTAHANNITLFASLELSKSKWVVTINSPGSEKFSKHVVEGGDGACLLDLLSRSRAKAEQRYGVQVKAIVIQEAGLDGFWIHRLLLANGIESHVVDAASIAVDRRHRRAKTDAIDGETLLRTLMAWARGERRVCSMVRAPSPEDEDRRRLTRERGTLLKERIQHTNRVRGLLSGQGIGDYNPLRRDRFERLEALRTGDGRELPPMLKAEIRRELDRIALATTQLAAVERARDALIRTDAEERNNPAALLLKLKGLGPEFASLLWLESLFRSFGNRRQVAAYGGLAPSPWQSGGVERDQGISKSGNRRLRKTMIELAWFWLRHQPDSALSRWFQARVGAAKGRIRRIAIVALARKLLVALWRYATQGVVPEGAVFKAA

SEQ ID NO: 240788 - protein, 385 aa, unidentified
MTQLENISTPSAALDQNSTLICVVEMSLKSWLVAGMVPGIERQPLKKLEADEAALYRLVLRWKTEAERAGRRIARIALAFEAGRDGFWLARWLRARGIEAWVIHPTSIAVSRDHRRPKTDRLDTQMLMRAFLGWLRGEPGHCRMAAIPTLEQEDAKRPTRERETLVAERTRIINRTKSALIRLGIRGFNPGLREARERLASLRTPEGVPIPPNTLAEIHRDLARLAVLQAQIAEIAAARMERLKHATDSAHTMIRLLARVIGTGIETAEMLVTEVLSRNLRDRRAVARYAGLTGSPDESGSKRYEKGLAKTGNARVRHGMIQLAWRFLLFQKNSALARWYNARTENAKSSRKTMIVALARKLLIALWRFVTTGELPEGVALRAAV

SEQ ID NO: 240789 - protein, 395 aa, unidentified
MFYGLDVHKEFFQVCALSENGQRRRDFRMGGDADAIEAFARRLARTDQVVLEATFHSWAIVQILRRYVDRVVVADPAQLKAIAHARVKTDKVDAHILAELLRLDFLPEVELPAAETWAVRQLMAHRNQLRRQSVATKNTIHAVLNRSLLRYPGSFLFTEKGFCWLAELALPPAERMVLDHQTALLREVKARLDAVDRALVEQARLHADAKLLVTIPGVDVVVAMGFLAAIGSIDRFSSPQKLAAYFGLVPKVRQSANTTYYGHITKAGSRNARWLAIEAAHTIARSGSPLAATYLRIRRRKGHQIAVTALARKLVIVVWHLLTTQQPYRYAAPERTRIKLRKLQKDDRRPMAPTPRTLDAVYAEAGLRLAPPELGEKRAAKRSRAALTRMRNEPD

SEQ ID NO: 240790 - protein, 345 aa, unidentified
MTADPVVVHLCVGVDIAAVTFTAAWSHTDTPVSPAHTYHQTPHGFAALQTRLAATNVLPADTLVVMEATGSPWIALAVTLHTAGYQVSVINPLGAHHFAKAPLRRAKTDALDAQDLCRLAAVLRPPVWTPPPSVYPEVRQRLLVRDGLVTMRQQARNQLHALIQWPVVGVGAAEQLTAVIADMDARIAVREGEIAPVLAASDWAASLGYLTSAPGIGLLIAAWLLVTTVNFTLGETPEAVAAGCSLGRTGLAPIPRQSGTSVRASRRSGTAATNACARQRISPRAAVRYNPMLRAFSQRLRDAGKPVKVARCAAARKLLHLAWALVTKRQRFDPSRYPLRTSEQP

SEQ ID NO: 240791 - protein, 341 aa, unidentified
MTEVSTIGLDLAKNVFQAHGADASGAVLFRRKLRRDQVLSFFAAQRGCLVAMEACPGAHYWAREITNLGHEVRLIAPAYVKPFVKRQKNDAADAEAICEAAQRPTMRFVAVKSEDKQASAVVFRTRDVLVGQRTQIINAIRGHMAEYGIIARQGPSYVEQLIAQIEDSSSCIPEAARSCLAVLVETLRGLQTRIAALDAQITARAKRDDVAQRLMSIPGVGPLIATAIEALAPPVGTFRSGRDFAAWIGLTPLQRSTGGKERLGRISRMGERTLRCLLIVGASGVVRWAKRKGAPAGSWLARMLASKPPMLVIVALANKMARIAWALIAKGGIYRAPAAAA

SEQ ID NO: 240792 - protein, 392 aa, unidentified
MTIQAQVSVYPQVFVAREYDVFAGLDVDHHSIAATFTDHDRLMQSLRLPYSARQLLNYVGKHFSGQRVVFVYEAGPTGFGLYDELEAAGHACLVVAPPMVPRAPGQRVKTNRLDSRKLSTALRGGQLKSIHVPAPKYRELRHLVQLRDTHVQQLTATKCRIKALLLYEGIAFPSDEGKEKQWSQRVVNELLALPCSESVRFKLDQLIGTLHFNFNSAAAAQKQIRHFCQKDEELRQSIAWLKSLPGIGEIIATHLVARLGDPSLITNVRQIAGFLGLVSSEHSTGDKQNRGEITRAGDSRLRNKLIQSAWVSIRKDPELREFYQRVYQRHPKKVAPRKAIVAVTRKLTTRIYAVLKEQRPFVLREVSTAPLTTEETAGHKGRLDGQQNEQSR

SEQ ID NO: 240793 - protein, 417 aa, unidentified
MKCFVCLDVSSTKLDVCIMLSDTSTPVTASLSNDLSGATEIKNHILDLNHTYHFERIVIGMEATSLYSFHPAMFFHEDRQLKELHVEIMVEQPNKIKKYRDAFEENKNDTIDAFYIADYFRIERFSPSFLKEEKYMALQHLTRTRLQIIEQLTRTKQHFIENIYYKCNTLAYQFKKEELSTNLWSSTMMTLMTDEMTLDELANMPLQELDDWLQKLGKGHFKDSEKLAQTIQAAIRGSYRLSKLQQDSVNVILGLLAREIRNLEKMIKEIDKAIEDMVETIPEYQCLTSIPGVGKVYAAGIIAEIGQIERFKDHPQVAKFAGLNWREKQSGNSNSQHTSLVNRGNRYLRYYLVEAANSVRRYDDEYKDFYKKKYHEVPKHQHKRAILLTARKFVRLVDVLLRNHQLYTPPRRIMEDN

SEQ ID NO: 240794 - protein, 419 aa, unidentified
MSFKILKFNCCGLDVHKTWIYACIGITDSNNRTEYKQARFSSFTKGLNELCDWLAKYNCKDVCMESTGKYWIPVFNILEKNNIWVTLSHPKYTKPQKGNKTDRKDAKWICDLYMCGMVKPSFIPPADIRELRDLVRYRFKLTCMITGEKNRAHNCLTVSNLKLDDVFSDIFGRSSRSITEQILQHPGETFDVAPFVHGRCKTPIEEIQAAVDGAVSKEQAVKLRQCLNHIDELEMHKSEIEREIFRLSDKYEDILTLIRTVPGFDKNPMTAIQVLSEIGGDMSVFPTAKNLVSWAGCCPHNDQSNHKIKSTRISRAGSYFKPVLVQVANALIKSKKHPEFSTRYRRIKARRGHKKAIIAICRMILTAIWHILTDLKPYTPEGFLDSRPVNKEKVLTTSQALNLLKQRGYFIKDDPLSVS

SEQ ID NO: 240795 - protein, 429 aa, unidentified
MQESTSAAPAEGVAAYIGIDWADQKHDVVLRSSSEPTKVEHSRIAHEPDALMEWLGELQQRFAGKGKILVALEQSRGALIYHLMGYEFLELYPINPAQLASYRETFSPSGAKDDRPDAELICELLYCHGDRLKAWKPDSELTRKLAFLNEGRRKAVDQRTQLANEIKSQLKVYFPLALQVLDNNSSTALAADLLLQWPTLESLQKPSAHKVRKFFYGHNCRNEQKLLERLELIKTAKPLTRDPAVIEPAALRVQLLAHQLKSLLPYIARYEKQIAELFDAHPDSFLFRDLPGAGTALGPRLLTAFGTDRERFDYPIELCSLSGIAPVRKASGKKTGKKASVHFRHACPKFLRQSFHEFAECSIRYCSWAQGCYQAQRERGKGHHAAVRAVAFKWIRILFACWKQRLPYDPQRYLQTLQTRGSEYAKTTA

SEQ ID NO: 240796 - protein, 367 aa, unidentified
MSIVYVGMDVHKNSFTLCGLYRNGEITRFLRNKQTNPSVDAVVRYVNEARKEFGEDVKVLCCYEAGCLGYYLERQLQVRNIPCVIVATDTSMNKGKKNDRRDAHSLAHNLDSAEYKSVHIPTPEDEAVREYIRMRYSYKQELKRTKNEILALCLRHGFKYDGKTNWTTHHIAWMKKIDWKLPILAETFKEYLARYDWLKMRINDQDAMIESLAQKTEYREAVKKLCCFMGIKIHTALSLLVEIGDFRRFATAYAFCMYLGLTPSEDSSGSKGHYGSITKKGNSYIRRLLVEAAQCFSRTRKGFKSAALKQRQAGMPADIIRYADKANERFKAKYLRVNMRSHRNVAVVAVAREMACFIWGMMTDRIA

SEQ ID NO: 240797 - protein, 343 aa, unidentified
MDYFAGLDVSVKDTSVSVVDETGKITRELKVASEPEALLAVLRNPTYRFKRIGLEAGPLSQWLFSALAEADLPVICVETRHMRAVLKAQINKTDRNDARGIAQMMRVGLYRPVHVKTLRSQKLRMLLTHRKLLQSKAIAVENDLRATLRNFGLKVGMVGTAKFEARIKELVENLPDLTVLVEPLLVVRRVLREQIAILHRRVLAAVRDDAVCRRLMTVPGVGPVVALTYRATVDVPARFRRSKSVGAVFGLTPARDQSGERDRPGAISRCGDEMMRAMLYEAAQAMLLRSAKWSWLKAWAMQIARRRGMKRAIVALARRLAVIMHRIWADGTEFRWTKEAAVA

SEQ ID NO: 240798 - protein, 320 aa, unidentified
MNKEQKYVGVDISKEYLDMAVVEPDNKWRFGNNAYGIGKAVERLKGLSPVFVVFEATGGLELSFWEALTEAGIEAAPINPRQIRDFAKAKGKLAKTDEIDAAVIAYFGQAMQPRSQPFPTTQEIKEMMSRRSQIVEMLTAEKNRLNWARSSRIKEDIQLHIEWLEREKDEVDKNLKQVINIDPEMREKSKLLQSTPGVGPIVSASLLTQVPELGTLNRHQIAALVGVAPLNRDSGQWRGKRSVWGGRSRVRSALYMATLVATQHNPVIRVFYQRLLDENKPTKVALTACMRKLLVILNAMLKNKTSWTTSIAQVSSIACP

SEQ ID NO: 240799 - protein, 323 aa, unidentified
MTHIQDVVGIDVAKQNLDVFVLAHQQLRAVANDTAGHGELIGWLKSLGVRVAVMEASGGYEQTIAKALRQAEFDVRIVDPKRVRHFAKAAGRLAKNDRIDARIIAEFGAIFANTERCEIADDPEREQLASLVGARQGLIEHQTGLCNQIATVSEGAARRALAAILRPIARAIKKLDRSIAEVIAKHPPFAELAARLDTVPGLGPVAISALIAWLPELGRLDRRELAALVGVAPFDDDSGKRTGQRYIQGGRCKLRNILYMVAMGAATRHNPVLNAHYTRLIERGKLAKVAIIACLRKLLTILNAMVAQQKDWTTKPAASAAAA

SEQ ID NO: 240800 - protein, 337 aa, unidentified
MNEITTIGLDLAKRVFQVHGADATGRPVLQKKLRREEVLSFFAKVPPCVVGMEACASSHHWARELRALGHDARMIPASYVKPYVARQKNDAADAAAICEAVTRPAVRTAPIKSLTQQALRVLHRTHELLSRQRVSLINAIRSHMAEFGVIAPAGPQHVGSLIERISDPKTPIPDAVRAPLGILVDEYVALNARINALEAEMRKSCREEPESARLLTIPGVGPITVSAILAGVPNIRGFRSGRDFAAWLGLVPRQNSSGGKDRLGRITKMGDRTIRRLLVIGAMSTIRWSRSKQNFAQSWLGRIIARKPIKLAAVALANKMARIIWAVMTREETYRPA

SEQ ID NO: 240801 - protein, 408 aa, unidentified
MKTLHKRCAGLDVHKAEVVACVRLISKRKVEREVRRFPTTTQGLLALAEWLESAGCTHVAMEATGVYWKPVWHILEGRFALILANAAHVRNVPGRKSDVNDATWLADLLAHGLIRSSFVPPPAIQELRDLTRTRRQLTREIVQHVQRIQAVLEEANIKLCSVITDIMGASGRRMLKAMIAGETDAEKLAALGHERLGCTRAELVEVLTGRVREHHRFLLGQHLRTIEQLKDSVVAFDARIEAALSPFHDIVERLEEVPGLAATSTETVIAEIGTDMSLFPTAGHLLSWAGFAPRLDESAGKHRSTRIRKGAPWLKPVLVQAAWGAARKKNSYFQAQFLRLKARHGAKKAAIAVAASILTTVYHMLRDGTCYQDLGPEYFTRRNPAQAAARLANRIRNLGYHVEIRAAA

SEQ ID NO: 240802 - protein, 338 aa, unidentified
MDQYAGIDVSLECSSVCVVDASGMILREARVASEPEALIAWFRWSGFELERIGLEAGPLSQWLFAAMRQAGLAVELLETRHVRKAFEAMPVKSDRNDARGIAQLMRLGWFRPVHCKSMSAQETRTLLTARKLVQSKLQDVENSLRGFGLKVGKTTGLGFAGRIEELVAGHPHLQVVTRALLSVRAVLRSEFAAFEKQTRKMAQSDARTRLLMSTPAVGPIVALTYVSAIDDPARFTSSKQAGAHFGLTPKKYQSGETDYTGRISKIGDSSVRTALYEAAHIMLTKPLKGCTQLKSWAMRIARRAGMRKAKVALARRLAVIMHRMLADGTPFNPAAAAT

SEQ ID NO: 240803 - protein, 328 aa, unidentified
MHYIGIDIAKDTFTATLLTTPETLLFFGETYDNTEDGFKKFLKRVDSFHIAAESPYIMEATGVYGEHLATFLYHKERAIHVEPAVKISRAFRDDEKTDPIDSRMIAEYGFRYRDQLHPWKPKDRIVEEIRILMVNRELFVKQRTASKNVLKAMQCKTAQGLTHFHKEQVEFLTTHIKNIEGAILETFKQNAIIQQHVTNLDTIPGVGLIYIANFFDVTDGFVHINYRSLARYLGIIPRKHLSGTSIKKKPRSKKTGPARMRKQLFLSSMTSIKKDGPLKDYFYKKQATGKNGKIVLAIIANKLLKISCAVVLSGQPYDPKYKSVHLLE

SEQ ID NO: 240804 - protein, 403 aa, unidentified
MQLFAGCDWGGEAHAVSVIDEEGAVRWKGTVGHDAEGLAKMVRQLAKLGTPADLPIAIERPTGLLVDTLVEAGHPIVPLHPNVVKACRPRYRAAGGKDDLGDSYMLADILRTDGHRFARLLPQSDAIRALRALVRTRDDLVGERVAMANQLSALLESCWPGAIAIFADIDSPIALAFVRRYPTAASAERLGEKRLASFLAQHSYCGRRTAAELLQRLHAAPLPRIGELEAEAKGQLAAMLASILEQLVAKLLELTARVEHEVAELPEGRIVMSLPRSGRVNAAQILAELGDQRARFDSAEHLAAEAGVVPVTYASGKQRGVVFRWACNHRLRSAITTFADNSRHASPWAAGVYRRARARGCDHPHATRVLARAWVRVLFRMWQAGEPYDPARHPAAAALAATA

SEQ ID NO: 240805 - protein, 405 aa, unidentified
MNAVGIDVSKSKSTVTIRRPGDEVLMPPCDIPHTQSAINALIEQIKSLDGETKVCMEHTGRYYEPVANWLSDAGIFVSAVNPILIRDFGDDSLRAPKTDKADSKKIARYALDRWAKLKQYGSMDKTRNQLKTMNRQFGFYMDQKTAMKNNLISLLDQTYPGANDFFDSPARSDGSQKWVDFVYTYWHVDCVRGKSLQAFTEHYQKWCKRNGYNFSASKAEKIYQNSSDLIAVFPKDDSTKTLIRQAVTMLNTASQTVEALRIKMDQTAATLPEYPVVMAMNGVGPSLGPQLMAEIGDVTRFTHREALTAFAGVDPGKNDSGKRNQKSVRTSKKGSPSLRKTLFQIMDGLIKRSPVDDPVYTFMDKKRSEGKPYYVYMTAGANKFLRIYYGRVREYLASLEEAKES

SEQ ID NO: 240806 - protein, 391 aa, unidentified
MVCVGIDVAKDKHDCCILDSDGTIRADCITIPNNMDGFKQLLQTIRDCTKKSDKIKVGLEATGHYSYNILGFLLDNDLAVYVMNPLHTNLYRKSLSLRKTKTDRVDARTIATMLLSDVDLKSYTDIAYHNEELKSLTRYRFDKVQERAKLKQSVSRLATILFPELEGLVSSIHGTSIYALLSEYPGTKQISEVHLTKLTNLLTTASKGRYGKEKAIQIREAARASIGSVMPAKSLELKHTIKLIQELASEINEIEDSIQKIIDELNPPILSIPGMGVNSAAVILAEIGDFSNFSSPDKILAYAGCSPSTYQSGKLTNCYAHMEKRGSRYLRHALYNATKYVCYWNPVFAEYLAKKRAEGKHYNVALSHAMKKLVRLIYALQKSGKAYLAAA

SEQ ID NO: 240807 - protein, 349 aa, unidentified
MRFYTTTHNHYCGIDLHAKTMYLCVLDRDGKILLHKNMRSRPEDFLAAVEPFRDDLVVAVECIFTWYWLADLCRNEGIEFVLGHALYMKAIHGGKAKNDKIDALKIATLLRGGNLPKAYVYPPEMRATRDLLRRRLHLVRRRANLLAHIQNTHHQYNLEPPAAKIAYKANRVGVAEAFPDPDVRKSMEIDFALIEHYDTTLRDLELHLERRAKQHDPQAYHRLRSVPGIGKVLALTILYEINDIRRFERVQDFLSYSRLVKCEHSSAGKKLGTGGSKIGNAHLKWAFSEAAALFLRNNPDGQKHLRRLAGKHGKGKALSILAAKLGRAVYLLLAKERLFDIDRFLARAN

SEQ ID NO: 240808 - protein, 425 aa, unidentified
MSMTLFVGIDISLRKATCCFLHQNGKVLGKKFETDNNIPGFEKLTEQIESLIPTNDFSLVCIGLEATSMYGFHLLDYFSSTAFKYPVEVRLYQVNAKYVSKFKKAFPEKEKTDMVDSKVIAEYLRFGRLPAEYKPECLFLPLRRLVRYRYHLVKHLEQEKKIYMANLFLKFPGWVQNKPVKHLGKTSLDVTGEFTLDQLAEMSLDKLALFVAKAGKNRSPDADAIASEIQKAARESYRIRPELASSVTFVLASISKTIFALKENLKQVDKAILAEMKGFINPLISIKGIGPVYSAGILACVGDVKRFASHNQLARYAGLVWKRKQTGNTESEEKHIVRECDKYLRYYLVEAANSLRVYNETYQIFYKKKYQEVPKHQHKRAIVLTARKLVRLVFALLSNNQLYDQFRDTQSPRPVLNQNCQRANS

SEQ ID NO: 240809 - protein, 479 aa, unidentified
MTVRRLVGIDLGIASAHTVRVLDEAGGLVAKRKAWPTTESLTEVESAALAGCPEGTRLEVVMEPTGPAWLPIAVFFDARGHVVHRVSSAKAADLRRFLSRHTKTNGIDADTLARLALVDPGGLRPLVLSGVEAAALDRRVRACDRLTRQGAEHKVRIRDLVRQVMPMSPLGADLGVADLAVLERYADPNALVRAGLKRITAVIERASRNHQGAKRAGEWVAAAEAAIELYAGHPAVAFSDLAAEIATEVRLLRAVEAELAAHAAERETAYRHVDPAGLARTLPGVAAISGPALTAVMGDPARFPNAKAFRSYTGLAPRASETGDTDRKGQPMSKAGSSLLRTTLVRAADHARKQDPQLARTYYVQMVERGKDHLGALCVVAAHLAERFWVVMNRRMPYVICDTDGRPVTADEAKAIIAEHWTVTPEVRARRRSRKAGKAPQQVLKAHVRSHTKGVDKRGDLPHHESSPPQRDHVNRRTA

SEQ ID NO: 240810 - protein, 375 aa, unidentified
MEHHSEAFVALDTAKLRNAVAIADAGRAGEVRYLGEIDNTEAETRKLVAKLASKHARLTFCYEAGPTGYGLYRLIKSIGHDCIVVAPSLIPSKPGDRVKTNRRDAVNLVKLLRAGELTAVWVPDERHEAMRDLVRARYAAVKDYRIKRQNVSSLLLRLGRHYPGKKTWGRAHINWLTGLKLEHREQRIAFEEMLLAVRQVRERIERLEQAMREAVADWTLAPVIEAVQAMRGIDMVGAIAFLAELGDLSRFENPRQLMAYLGLTPSERSTGESVKRGGITKAGNTRARRLLIEAAWSYRFPPRVSKDMQARIGAAPRTAREIAWKAQMRLCGRFRALTRKGKRPTIVVTAIARELSAFIWAINREVVGSHAAANQ

SEQ ID NO: 240811 - protein, 428 aa, unidentified
MKNNWSATTHFAGFDWADDHHDIVIIDAEGAIVTDFRIAHSQAGWEQFRERIQAYPSLAFAVETRHGLVIDQLVTSGCTVYPVHPISAASYRKRKAPSGCKTDAIDAWALAAALRTEGQDWKAIAPNDPQAEQLRLLCRDEVRLIQQRTLLVNQLEATLKEYYPAAVEAFDRLTLPAAWDFILQFPTPQQLVAAGKRRWEKFLHTHRLWRPETAGPRLEVFARADQFCCRAPVTAAKSQLALSLAHLLKTLQLQIDHYHEQIQALYRQHANYPLFESLPGAGPLLAPRLLAELSLNPERFSDPAALQAIAGTAPVSYQSGQIHRTKIRRHCDKHLRCVLHLWTNNSRRKCGWASIYYQHKRAEGKSHACALRCLAQRWLKIIWKMQSTHRPYDAELHQQNQLKHGSWVLTLQTVKVTQKKVVNKSEKN

SEQ ID NO: 240812 - protein, 316 aa, unidentified
MVVVGFDVGKDSLFGARLDRSGAIKEHWEIANTPAAILPLLRKLRRSYKHLLVASEATNEYHRPLAQLCLTLNIPFRLLNPITTKQFTRATVRKRKTDKTDAEVIARVAAQGQGTLVTKDTFNDVKPMLRTAVRLIQMSRALTLMQYHLVTVLPKEDVLLQLLASAQEQLEVAAATFRSTARQQVNPNLSKLLQSVPGIGPQTAALLVAELGDITRFKDAKAVVAYIGLDPRVKQSGTMLKRNTHLTKRGSPYLRRAMYLAAAAAQRHDPELMATYDKKRAEGKRYREATIVVARRVITRVYAVWKRGTVYQKNIA

SEQ ID NO: 240813 - protein, 392 aa, unidentified
MIYVGIDVASQKHDCFLLKDTGEVFSKTSFTIKNDFEGYKKLHNSIQQFVESTKDSNVRIGLESTGHYSKNILLYLIKQGYQTTLINPILTNMDRKASTVRKTKTDKIDAEAICKFLDKNRFDFKPYTLLSYHIDALKSLTRQRFSLVKQMTQQKLIFQRLVNVIFPEFLSHFSNDYSESVLNILYSYPTPKKLAKAHKESITKLLHGRCKITSSEILELAKNSIGQSEEYFGFELKHTIDMIRFYQSQIETYNKQIEIELNETEYGKIITSIPGVGIITGAMIISEIGDITNFTTPDQLLAYAGLDPSVYESGQFESSHNKPSKRGSKYLRWAIHQASSIIWQHDNTFKDYYLKKIKEGKHHYVAIGHIDKKLIRVIFSLLKNKSMFIPQN

SEQ ID NO: 240814 - protein, 418 aa, unidentified
MTHSALDARPARPAAVVTGGVDTHKDTHTAAVLDATGRLLGHRQFPTTPAGYGLLLAWLRSHGELDKVGIEGTGAYGAGLALHLRVAGVELVEVDRPDRKARRQQGKSDPVDAEAAARAAQAGRATGIPKDRVGAVEALRALRVARRSAVAARAQAQTQMKSLIVTAPDPLRSQLRELGVRQLVAHCAARRPDRGAAAESTTATLIALRALARRHQRLSAEIDDLDALITPLVTQINPALYALRGVGPDIAGRLLVTAGDNPHRLRSEAAFAMLCGAAPLPASSGRTQRHRLNRGGDRQANCALYQIVLCRLRWDPHTRAYAQRRTAEGMGKKEIIRCLKRYVAREVYTALLSPDPSSVPATSCTAQEESTCSARSAARTNEVDTDKRCKTIKHGGSTREAHPRRPSPATLQARLDNQ

SEQ ID NO: 240815 - protein, 351 aa, unidentified
MSHKTAATVAHTIGIDTGKNTLHLIGLDDQGAIVLREKIARGRITARLANVPRCLIGIEAGMATHYVARELGALGHDVKQVPPAYSKPFRQGHKNDFRDAHAVAEAVQRPSTRCVPVKTDDQLDLQALHRVRSRLVGQRTAVINQIRGFLLEHGIAVRQGLRFLRQQLPDILAKRSDVLSPRMIRIMEDLSGDWRRLDERIEHITKEIEVLAGTDVNCGQLMTVPGIGPIVASATVAAIGNGAAFARGRDFAAWLGLVPKQMSTGDRTILGRITKRGNRYLRMLFVQGARAILLRPKSWVKHSFGPWLTTAVRRLHRNILTIALANKLARIALSVLIQGRSYETRIVPAAT

SEQ ID NO: 240816 - protein, 373 aa, unidentified
MPKYSTAFGMDIHLRSTTVCALDADTGEAVTRRFPGNPWGEIAGWMDGFPGPSLAAYESGYLGFAPQRELAGLGVECVVAAVSKIPRSAADSASKNDRNDAARMAKAILAHDISPVWVPSPEVEGIRDLAGAYDGATARLATAKQRLLAFLARRGFVYGGTTPAGNPRKYWTYDFLGWLDKVRPEDDGGVRALAALRNEVEAAAEARADLLSEYRAAVDASPIAAEVAALQSIKGCAFALAAAFSAEVGDFTRFRSGRQVTAYFGLAPSQRSSGDSVRLGGISGAGNALVRKLAVEGSWCYAAARHQPKLMPRDTGVPLEIRMHGRKGSERLLRRREEMLARGMPAAKANAATAAELVRWLWALGMMCREGAE

SEQ ID NO: 240817 - protein, 341 aa, unidentified
MGQITTIGLDIAKSIFQVHGVDATGEVILRRRLMRARVVPFFEKLAPCLVGIEACATSHHWGRELRKLGHDVRLMPPSYVKAYVKRQKNDTADAEAICEAVTRPTMRFVEVKTPEQQSILVLHGTRTMLMRQRIQLSNVIRGHMAEFGVVAPIGREGLLALIDTLHEETDRVPAEARDCLQMLAAQLRLVNAQILENDRRIRASARATDVGRRLMGIPGVGPVLASAFVATVPDPHAFRSGRSLAAWIGLVPRQNSSGGKERLGGITKQGNRYLRQLLFVGAMAVIRYAERHGTRRPWLVQLLARRTTKVAAAALANKTARMVWAIMTSGQPYREPELRAA

SEQ ID NO: 240818 - protein, 346 aa, unidentified
MIIVGCDFHPGWQQVAVFDSATGEIREQKLENGNGEAERFYRSLPSPARVGFEACGNTHWFEDLLDSLGHEVWIGDAAEIRASYVRKQKTDRRDAAHILKLLIEDRFPRLWRPSRAERDLRQLLIHRHRLVGIGTRVKNGLQHLMLNRGVQLKHKLWNEAGQKVLRELPLEGWAAQRRQDLLKLLSELNPQIAKLDQAVERTAYQHPRARLLMTQPGVGPITALAYVITMGDVTRFQRGKQVASYLGLIPSEHSSSNRRRLGSISKQGNPFLRMLLVESVQTVCRLDEGFRKQYKHRCHRMKKGVAKVAAARRLAVRLFWMLRTNTAYPEIARIESNPPHAVVGES

SEQ ID NO: 240819 - protein, 365 aa, unidentified
MKKIRDYILKDQRIYVGLEDSKKTWKVCVRSGKIVVQRTTMEAKYEVLRGYFRNKFPGCKICVMYEAGFRGFELHDDLIADGWKCVVTPPHTVTQEKCSKRKNDTIDADRLAKNLENGDYKACYAPQRVVREDRQISRLYGQLQNDISRTCNRIRRAMEYHGLERYFPSGAWGQRQYREAEERLGKLKIGESLRFSLQMLFKEVRQLRHYQTEVVRKLRDLAKSERYKKAVDILRTAPGIGNLTSVRLALEWGDVSRFKRKEEFAGFLGLIPSDYSTADNEHLGHITKQGNRQVRAWLIECAWVAIRHDPVLLEKFNRVAMDAQGKMKYKKMAIVAVARKLALRLRSILLSGESYQVGLIESQGA

SEQ ID NO: 240820 - protein, 381 aa, unidentified
MITETAQSTLPNLEQNVLYLAFELSQNQWKLWFTIGVGQDPRIRTITARDMDALQWEIHKARQRFSLSEDALVLSCYEAGRDGFWLHRYLLKQDITNLIVDSASIEVNRRMRRAKTDRLDVGKLLTMLMRYHFGERRVWRVVTVPDRESEDRRHLHRGLADLKVERTRHINRIKGLLTGQGVCIPIEADFLDRLQTVRLWDGSSLPSELIARLKREYQRMQLLNQQIHELEAYRREVIRTSQRPDIQQVRQLMSLRGIGVNSAWLFVMEFFSWRAFRNRRQVGALAGLTSTPYQSGGNSQEQGISKAGNRHIRAIAIEIAWGWLRFQPDSQLSVWYQRRFGHGSSRMRRIGIVALARKLLIELWRYLETGIPPEGAVLQPQ

SEQ ID NO: 240821 - protein, 349 aa, unidentified
MRFYSQQHKFYCGIDLHTRVMYVCITDGAGKILVHKNLRSNPDSFARVIEPYREDLVVAVECVFVWYWLADVCAQLGVKFVLGHALYMKAIHGGKVKNDRIDSEKTAQLLRSGMLPQAYAYPESMRSTRDLLRRRMYLVRRQAELQAHIQNTRHQYNLPAYEKRLDRAVNREGIADHFEDSMVAASIQVDSNLLDSLHRQILFIEQLIGEKAHEQDPVAVQLLRTIPGIGKILALTVIYEIGDITRFSQVGNFISYARLVKCAHESAGKKVVGRNNKIGNAHLKWAFSEAACLFLRESDQAKAWHQKLISKYGKGKALSIIAQRLGRTTYTMLKRRTVFDHEAFFASLN

SEQ ID NO: 240822 - protein, 411 aa, unidentified
METIVERPAALDVHKAQVTACARVPGGDGARGQHVAEFATTVRGLLALRDWLAGLGVTQVAMEATGVFWKPVWHVLEDDFQCLLVNARHVKQVPGRKTDVSDAEWLCRLLEAGLLRASFVPPKPIRQLRNLTRYRKTQIAERQREVNRLHKALEDAGIKLDCVAADILGKSGRDMLDALVAGERDPEVLANLARRQMRKKIPLLQDALDGHFDAHHRLWIGSILRHIDFLDEQIEQLSAAIEEQIRPFWPAVELIRTMTGFQQRGAECVIAEIGVDMSVFATARHLASWSGRCPGNHQSAGKRRSGKTRDGSKWLDIALEEAATAAIRVKDSYFAAQYRRLKPRCGHKKALGAVKHSMICAIWHMLNTGETYHDLGADYFTTRDPERQTRRLITQLERLGHHVTLQEAAAA

SEQ ID NO: 240823 - protein, 428 aa, unidentified
MKAKEINFIQVVKVGCGIDVHRDIIVATIRKSNDEYETREFSSYTGSLISLRDWCKAEGVTHVAMESTGVYWKPVFNILEEDFEIILVNARHVKNVPGHKTDKKDSIWISKLLLSGLLKGSFIPPKEIRELRDLVRYKRKIVAQVASEKNRIIKILEDANIKLSSVLSNVDGAVGTKIIHCLIEGQTDVNELAKFYHGKMKVSKDEFKKALDGRITKHHRFMLQLLKDSIAEKEHQIERIEAQIDEATKACQIEIDLLQTIPGVGKDSAISIISEIGTDMSRFPDEHHLSSWAGMSPGNNESGGKKKVAKTVHGNKYLQSTLVECAWGATRKKDSFLKRKYESLVGRRGKKKALVAVGHKIIVAAYHVIKNKEAYKEPELHNNPQKKNKQIRNYLNRLKELGLEIPMEPLQEIINGRFFTEQQTVSRR

SEQ ID NO: 240824 - protein, 336 aa, unidentified
MKITTVGIDLAKMCFQLHGVDARGKAALKKQLKRDQVLTFFANLGPCLIGLEACGSAHHWARKLSGLGHTVKLMAPQFVKPYVKTNKNDAADAEAICEAVSRPNMRFVPGKTAEQQAILAVHRARQGFVKARTAQANQIRGLLSEFGIVIPQGISSIAKRLPAILEDAENGLPDPMRPLMVRLAAHLKVLDREADELEAQIQVWHRQNDASRKLEKIPGIGPITASALVASIGDAKNFDNGRQLAAWLGLVPRQHSSGGKQTLLGISKRGDAYLRTLLIHGARAVVRVSERQAQTDSWLKRLLARRHKNVAAVALANKNARTVWALLAHERDYRPN

SEQ ID NO: 240825 - protein, 435 aa, unidentified
MEEVTDEPLYRDRVCGIDIGKAGMAATIRVPSDKDPSRRASETREFGTTRREVLALADWLRAWQVPAVVMEATGDYWKPVFYRLEAEGLECVLADAKQVKNLPGRPKRDPSDSRWLAACFERGAVTSCFVATPEFRLIREHTRYRRDLTAERTREKQRTEKLLESAAVKLSSVVTDLHGVTGRDIMDHLIAGERDPRVLAQLARARARRKISQLEEALEGAEFFTRHHAALLKAMLARVDRLNADIDQVSQVIEELLAPYEEQLQQAESMPGWGRRAAQDAIAETGVDMSRFPTGPHLASWAGRTPLDNQSGGRRGKAKSKKGNRYLAAITGETAIAAGKTQTREGARYRRLSRRRGKAKAQVAVGNTQLKVYHKLLSTPGTRYEDLGPDYYERQAGIRRQVAHHVGKLGALGFEVTLARVPEPGPEETGGTQTA

SEQ ID NO: 240826 - protein, 332 aa, unidentified
MRYFLGLDVAKDSFVAVLLDEAGQLIGSATFANALDGFTELLAWLPAPAQTIGVCEPTGVYNQHLKQTLASALESLHEINSQTLKQYAFSQVRTKTDQADALAIADAARTLFLSRPEKLAKTRVSWSPQRENLALWLAEYDRLRKAIASLRLQIGDLDHHAAPDAHKVQKRRQLELKRLLAQQAEVKRQVELVYQQLDDSQARLVDSIPGIGPLSTAATLVVVGDVSRFRSADALKAYLGIYPRRNQSGLREKRSHLAHHGNKLMRHVLWNAAKAAVKVKHEGNPFRALFDRLLAKGRTYSHAIGAVCRKLVQVIYGVLKSQAPFHYPASTP

SEQ ID NO: 240827 - protein, 351 aa, unidentified
MNVNHYIGFDVHKKTINYCVKMADGQIVEEGKLRATHDALRQWAGRRREPWRGAMEATLFSGWIYDTLKPFAAELQIGHPAMMKAIGASKKKNDKSDARKIADLVRCNLLPECYVAPAEMRELRRLLRYRNVVVAQAVRIKNKMSGLLMEVGAEYNKRQLHGKKYFTELLGNVEEVPESVKDLLRLSQGALEVFETTQRQLLNRLQKEPQLVERLAVLKSIRGVGEVTALTWALEICDPQRFRSIADAVSYCGLTSALDCSADKQHRGPVSKQRNGHLQTVLIEAAKLAPRWNPQLAAVHDRELERGNRNRATLAVARKLVAYLLAVDKSGQPFRIRNQAAAPTTEVETAA

SEQ ID NO: 240828 - protein, 366 aa, unidentified
MAMTTMTHPPQPTLGVLGGVDTHKDVHVAAALDDTGRLLGTATFPTTTVGYRQLWRWMRSHGEVVAVGVEGTGAWGAGLARYLTAEGADVREVMRPNRQHRRRYGKSDEADAIGAARAVLAGEALGTPKAGTGQVEAIRLLRVARRSAMKARTQAGNQIHAVVDTAPEELRRRLVSRPTATIVAEVARFHRRLPDTPLEAARFTLRSLARRWQYLDDELAALDAQLDELTATAAPTSRAMNGVGPQVATALLAAAGDNPNRLRSSSSFAALCGVSPIDASSGRQQHHRLNRYGDRQANWALHVIIISRLRWHVPTKAYMARRLAQGRTPKMIMRCLKRHVVREVHRAITLDLGHQTERTRAQPIAA

SEQ ID NO: 240829 - protein, 415 aa, unidentified
MEIIYPRVAGIDVGKREIAVAVRTPGDVPGRRRQQIRKYKTYYLVLRRMVAWLVEQGVTHVTMEATGVYWKPVFHALCEAEQIEVLLVNARHVRNVPGRKTDVKDSEWLAQLLECGLLRGSFIPPKEIAAIRELTRYRKKLIEERTRELQRLSSVLEDGGIKIDSVASSITTLSARDMIEALIGGERDPRVLAELARGVMRNKIPDLTMACDGRFGDHHALLARMHTDQIDNLASMIQVLDDRIEEVVDPFAEQLRLLLSIPGIGERAAQVIISEIGVDMARFPTAAHLASWAGLCPGNNESAGKHKSGRTRKGNAEVRSILTECAWSAGRTGTYVGAQFRRMHRRFGKTGGGKAAIAVAHTLIVIIWHVLHDGAAYRDLGSDYFTRHDNPEARKRRLVHDLQSMGYQITITPAA

SEQ ID NO: 240830 - protein, 451 aa, unidentified
MSKRGSKSAGLPIIHARAAAIDVGARFHVAAVPPELCDEPVQTFQAFTSDLERMADWFVSLGIKTVAMESTGVYWVPVYEVLEDRGLEVIVANARDARAVPGRKSDVNDSQWLQRLHACGLLRASFRPGRDIAALRAYLRLRERHLDDAAAHIQHMQKALTFMNLQLHHVVSDVTGVTGMKIIRAIVTGQRDPDVLARMRDVRCKADFKAVHAALVGNYQPEHLFALKQALALYDFYQERVGECDAEIEQALARLNIDKPCPAEPLPKARHRTQQPNQVKFDTRPMLYQLTGVDLTQIHGIGPYLALRLVSESGTDLSRWPTTKHFTSWLTLSPGCKISGGKVLSARTRKTNNRLAAHLRLAATTVGRTNTALGAFYRRLAARIGKAKAVTATARKIAVLYYNAMRYGMTYVDPGADQYERKYRERVVRQLHRRAAEFGFTLQEVTPQSVS

SEQ ID NO: 240831 - protein, 415 aa, unidentified
MAMSVLYTRCAGLDVHKETVVACLMLTASSGKITREVRTFATTTLGLQTMAQWLASQQVTHIAMESTGISWRPVFNILEGRFEVILVNAQHMKAVPGHKTDVKDSEWLADLLRHGLLSASFIPPKPIRDLRDLVRHRKTLVRQRAQAINRVQKVLETANIKLSSVASDVLGKSGRDMLDAMLAGIGDAEALAGLARGRLRAKLPALREALSGRVEATHRLLLRQLLDVIDFLQGQIDAISTDIDALLLPHKQQLSRLMQIPGIGPLAAAAILAEMGTDMTCFPSAKHLASWAGVAPGNKQSGGKRLKAHTNKGNTHLRAVLAEVVWVISHTRDNYLSAQYHRLAHRLGKKRAIVAVSHSLVTIIYHMLQENEDYHELGFHYFQTLDTTRQRDTAVRRLQALGYKVSLEEITEVRA

SEQ ID NO: 240832 - protein, 367 aa, unidentified
MKQQTSAASETLIKDKMIIDFSGNPIYVGIDVHQKDYQVAKVHNGICLGNHRMAANSDLLIKHLHSHYPGAEFKCVYESCAWGFNLQRRLTAAGMQCMVVHAADVSTSDKERKRKTDKVDALKLARTLAAGELKEIHVPDETIQKERNLIRYRTRLMRDINRSKNRIKSLLKYQGIEVPVQYAKNNWSQNFLIWIEEQASKDELLADTLLLMLDQMKLLRQLLLKTEKKLRELRKGKYASKVKLVTSVPGIGPTTAMQFLLEAGDITRFKGFDALNDFIGFCPDTDSSGETDRDRGITTRRHKQLRSALIEAAWQAIRVDPALMNSYQELTKRMKGVHAIIRIARKLLRRLRAVLLTGIEYQKGVVA

SEQ ID NO: 240833 - protein, 331 aa, unidentified
MTNAAHNIDADARPLDYLGVDMAKARFEWAVHGTRATHQASNDAAGFELLLADLRQRRVGLIVIEATGGLEQALARHLLQGGWPVAVVNPRAAREFARSMGHLAKTDAIDALALAHYAHTLAHKANQAGVRLTALPAQMEVLQAMVLRRQQLIDMRTAETNRRGGAMRVLRPSIEAVIKTLNQQIDALDQDIGTHLDQHFKDLDQRFEDIKGIGPNTCAAVIAFMPELGRVNAARAAKLAGLAPLNNDSGNARGKRRIWGGRSIVRRALYMATLSAVRFNPVIRTFYLRLLAAGKPKKVALTACAHKLLRILNAMARTGQPWKEQFHAVTP

SEQ ID NO: 240834 - protein, 370 aa, unidentified
MQQSSTLYVGLDVHKDSIAVAYVAQDHGAEVVSLGNIGTRQCDIDKLIRRLQSKSPHLVFVYEAGPCGYWLYRYLTKKGQVCWVVAPSLIPQKPGDRVKTNRRDAIKLARLMRSGDLTPVYVPQVEDEAIRDLCRAREDAIHDLKAAKFRLKAFLLRQDIRYPGRATWNSAHLRWLSEVVCPTPAQQIVFQEYVRAVTEQTERLERLEQELKDQVQTWRLVPVVEALQALRGVQFTVAVTTVAELGDLTRFENPRQLMNSLGLTPSEYSTGERRRQGGITKTGNSQARRALVEGAWAYRYPAKVSRHLQLRLEKVPEPIQDISWKAQIRLCKRYRQLSARGKNVNQVVVAIARELSAFMWAIAQEVPLTL

SEQ ID NO: 240835 - protein, 352 aa, unidentified
MIIGCDFHPSFQQIAYVDQETGEYGERRLNHREEAVLFYRSLVGRQVRVGMEATGNDRWFRKLVGELGEELLIGDASAIHASAPREQRTDKRDARHILRLLVENRFPAIWQPSAGNEAQRQLLMHRCRLVRMRTRLKNQLDSIAKSEGLTGSRSWSGKRRQQIEALPLTGWYAERRADLLLLLDGLEQRIKPLDVAVEEAARQDAEARLLMTHPGVGPVTSLAYVLVVGDWRRFPRGKQVGSYLGLIPSEASSGKRQQQMGHITKQGNTLLRWLLVEAAVTAQRHDASWHRQYVRLSMSKHHGVAKVAIAHKLAVRLYWMLRSGQDYGQMMERGLHARQSECPVGRSTRPIE

SEQ ID NO: 240836 - protein, 346 aa, unidentified
MKKFFVGIDFSKRRMDVSIVEKDFPEQTIDYKQFINNAEGAKKMCEWVEYTTNTSTKLEGEVLFCCEHTGSYCLEVCDYLSENGKYIWLGNPLDIKRSMGLVRGKDDILDSRRIATFAAEKHHKAIMYIRPEDSTRALKYLLSIRNTLIEHKKALTCQIKENFPKLHNITMLCNIEEYLKQILDSIKTEIKKIEKMMLDIILSNKEYKNTFDILTSMKGVALINAAALIVFTDNFKRFSFNSRKICTYWGVTPFRNESGDSIRRGTHTSSFHNNWLKAILSEAVLCAIRYNERLKTYFLRLLAKGKHRNIALNNTKNKLLKTLVAMVRDGKKFDENYVSTPQACAV

SEQ ID NO: 240837 - protein, 338 aa, unidentified
MSKFSGIDLHSNNSVVVVSDETDRVVYERRHANDLAGILAALEPYRAELVGVVVESTYNWYWLVDGLMKTGYAVHLANTTAIKKYEGLKYSGDAADAAYLAKLLRLGLLPEGYIYPSETRGARDLCRKRMQLVQYRTAQILSIENILATQTGARLSSTKVQQLTDEQIAALDFAPDVTLALQANAAVMRALQQQIAVLEERLAERVQLNADFALLKSVPGIGQVLATMIMLEIGTVARFRKVGNFSSYCRCVQSVRLSNGKKKGEGNAKNGNHYLSWAFVEAAHFALRNCPQAKSFYERKKRQRNAVVATKALAHKLARACYHILREHKPFEVVRCFA

SEQ ID NO: 240838 - protein, 427 aa, unidentified
MKYKQNFKIMQITDETLVIGVDIAKKTHFARAFDWRGIELDKTISFKATYTGFKEFIEWIENIAERTKKDNIVIGIEPTGHYWYSFAKAVMGEGKMLVQVNPYHVKQVKELDDNNPSKSDRKDPKTIAFLVKDGRYQIPYLPKGKFAELRKANNLREEYLKKIWSIKNKVQRWMDIYFPELPNVFSNWEGKTAILTLMEIPLPGDINELKAEEILALWRKEVKRGIGIKTAAKLLEAARLSVGMSEGLEMAKYEIELLVKEYKEVKAIMDVIEKKLEEIVLTIPGTINLLGIKGIGIKTVAGFFAEIGDITRFTHPKQIIKLAGLNLRENSSGKHKGQTTITKRGRSRLRALLFRAILPLISQNKEFNVLHKYLTTRDKNPLKKMQSLIALCNKLIRIFYTLTTKNVKYNADILLGDIHRSEEHEAA

SEQ ID NO: 240839 - protein, 357 aa, unidentified
MLALGDSAPRKGADAMTFVGCDLHTRMQQVAVLDTGTGEVSERRLDHDGMAVEEFYAALPRPVTVGIESTGYAVWFHALMQRLGHTLLVGDAAKMRAMVVRKTKTDRRDALHSLDLLRHDRFPTIWVPDPATRDLRALLTHRMRLVRIRTMVKNGLQAIALNSRLAWGSKLLRQAGLVQLQALALPPHTARRRDQSLELLAGLNTQIRELDDAVTTAALAHPDAPRLITHPGVGALTALTTIVVLGPVSRFHDSKQVVSYVGLAPALNASADKYHLGHITKQGSPLLRFALGQAAAHAARMDPDLKRTYGALVHRRGRPKAKVAVTRKLLVRLFIMLRDQIDYDEFCRRGRSAPASA

SEQ ID NO: 240840 - protein, 347 aa, unidentified
MLIIGCDFHPGFQQVAIFDNLTGEIQEKRLQHRADAEGFYRRLAGQEVLVGMEACGHYPWFEQLLEKLHIELWFGDAARVRASVVRKQKTDRRDAEHLLDLLRQDRFPRIWVPSLEVRDVRQLLVHRHKQVQTRTRTKNQLQAMALSFGVQKKRKLWSKAGREELEQLPLLPYAAQRRKRLLEALDALEVEISELDRRVAEEARERPEAVRLMTHPGVGSVTALAMVLTLGPAERFGSAKQVGSYFGLIPSEESSGGKQRLGKISKQGSSFLRFLLVEAGQTAARIDPQLKRFYRRLAVRKNRSIAKVAVARKLATRLYLMLREDWTYAQLSQAVMQVSPSHSVAGE

SEQ ID NO: 240841 - protein, 347 aa, unidentified
MRFFTDPHQHYCGIDLHARSMYLCVQNREGKVVLHRNMQARPESFLKAIEPFREDVVVGVECIFTWYWLADLCAEHNIPFILGHALYMKAIHGGKAKNDRIDSRKIVALMRGGTFPMAYVYPAKMRATRDLLRRRNHLTRKRGDLLSHIQNTNSQYNMEPFEANISYKANRTGVAEQFTDSEVRLSMEADLELIAHLDELKNRLELHITRNAKNHDAQALYRLRSVPGIGPIISLVILYEVGDINRFPTVQDFASYARLVKCSKESGGKRSGTSGGKIGNAHLKWAFSEAAVLFLKNNPEGMKFKKRLVKKHGKGKALSILAHKLGRAVYYILKRDQAFDMNKFLKN

SEQ ID NO: 240842 - protein, 382 aa, unidentified
MAGTEPHAWGTGRMDDITYVGLDVHKATVCVAVAESGRGGEVRQVGVFQNRPEILCKMAAKLGRGGRRLSFSYEAGPCGYGLHRLLTACGHSCVVVAPSLIPMKSGDRVKTDRRDAMMLAKLHRAGELTAIWIPDATHEAIRDLVRARATAGRVLSKARQHLQGFLLRHDRIYRGARAWTQAYWRWLTTVRFEHPAQQIVLQDYIHAVEDAEARRDRLTRQIEEMLPSWSMAPVVAALQAMRGVALVVAVTVVAEVGDFRRFANARQLMAYLGLVPSEHSSGSTIRRSGITKAGNTLVRRVLIEGAWTYRMTARVSRKLHDRLEPLSPVIRGIAWKAQVRLCARYRRLAASGKPKVVVTTAIAREMVGFIWAIACIAQLALA

SEQ ID NO: 240843 - protein, 463 aa, unidentified
MVRPCPRRVAGRHDCYWAGVPVRLDVSTDPLEREPFSRWLLTVIKLFRGETDVLFVGDDWAEDHHDVEIQDERGGKLAARRLPEGTAGIARLHELIGEHLGAGSDPGQVVVAIETDRGLWVQALIAAGYQVYGLNPRQVARFKERYGTSGAKSDAADAHALADMVRTERHQLRAVAGDTAQAEAIKVTARAHQTLIWERTRHLLRLRSALREFFPAALMAYADLGLSGADTLELLTRAPDPARAANLTARQITTVLKRARRHHAAAKAETIKDALSQQQLAQPAALAAAYAAAVQTTAAVLITLNEQIDHLEDQVTAHFHQHPDAEIYLSQPGIGTVNGPRVLAEFGDDPGRYACTRARKNYAGTSPITRASGRSRIVLARFVRNTRLADALHTQALSALTGSPGARAYYDKQRARGLSHNSALRQLSNRLVGILHGCLKTGTRYDEATAWPQHATQIKPATA

SEQ ID NO: 240844 - protein, 337 aa, unidentified
MEQYVGLDVSQETTSISVRQDGRRVWRGKCPTDPKALSEVIRKHAPHAVRVVFETGALATWLYHVLQAENLPVVCIDARHAKAALDMAPNKTDANDADGLAQIAEIGFYREVRVKGYGPMLTRTLVGARSQLLRISVQLSNQIRGIMKTFGLIVPKGAGRIFERNARALLETNEAVARVVLPLLETWQVVRARAAELDRQLIAAARTGPSYRLLMTIPGVGAITAVSFVAAIGVPENFKRSRAVGAWLGLTTRGYQSGETDYDGHISRRGDRYLRALVYEAAVAVLTRTRTDCALRSWGLKLKAKVGFKRAAIAVARKLSVIMHTMLKTGAAFAAAA

SEQ ID NO: 240845 - protein, 351 aa, unidentified
MIIGVDPHKSSHTATAVDPATNMPVGSLRIDASLVGYRQLLRWAAQFSDRRWAVENARGLGRHLAQWLVARDEVVWDVSATATARVRELSRGGRRKNDVIDASAAASVAALQGDASVVSGEDHTVVFALLEERRANLAAQRVRVTNQLHALIRDLIPGGAPLALKATVAAAMLRSVRPSSPAERMRKELAQDLVRDLRAADANLADIAKRMTDALDEHGTRLREVDGVGPINAVRLIGRTGPASRFRSADAFAAYAGVAPIEVASGDKARHRLSRSGDRQLNSAIHLVAVTQVRMRDSVGRHYFDAKLAEGKTRNEALRCLKRRLAAHLWRLMLADERRAPGQLEPGEIAA

SEQ ID NO: 240846 - protein, 333 aa, unidentified
MVAGTNGSLDKAGATKMTQTNTLTAGIDTSKAKLDVAVHGRVECWQVANTPQGWRRLVAALMKIGVGRVGIEATGGYERGVVIHLRAAGLTVLLLQPMQVRSYARVHLRRAKNDRLDAMLIAACAAGIEQPRIEPDTRLPELAAHLTFLEQIEEDIARSKVRLEHIKEGRLRRIVLSDIARLRKRRRVELARIVAALRAHDDLARRLDLVGSVPGIGERTAVAIVVRMPEIGRISREQAAALAGLAPFDRDSGDYKGQRRIEGGRARLRRSLFAAALPAAFRWNKALIALYARLTARGKAHNAALVACARKLLIYANTVVQRGTPWTQRPATA

SEQ ID NO: 240847 - protein, 383 aa, unidentified
MNDAKYIGLDVHQATISAAVRDSDGKLVLEAILETKAETMLQFIHGLRGSLHVTFEEGTSADWLYTLLKPHVTEVLVCDPRKNALLKVGNKGDRIDARKLSELLRANLLRPVFHDDTGLRTLREMARSYLTITKDVTRVMRRLKAIYRSWAIPCGGQQVYSPRHRAEWLGKITEAGVRRRAELYYQQLDALRVLHQQAKKELLAEGRKHKTVKLLRQIPSIGPIRSVLLVAILQTPHRFRTKRQLWSYSGLALETRNSGEYRIEGGQLKRSKKAFAVRGLNKNHNHDVKNIFKGAAIRATTVEGPFQKFYEALVAKGMKPAMARLTLARKIAAITLIVWKKGARLCAGINRHEVENARVLREGTSDSPGPEFCAAHREVHSEA

SEQ ID NO: 240848 - protein, 445 aa, unidentified
MRDHSEAFIGIDTSKLRNAIAIAEGGRGGEVRYFGEIDSADAATRKLVSKLAVKYRSLTFCYEAGPTGYGLYRLIRSLGHECVVAAPSLIPKKPGVRVKTNRRDAVELAKLSRAGELTAVWVPDERHEAMRDLSRARQAAKKHLTSKRQQILSLMLRLGRHYPGKKTWGTAHMNWLTQQKLEHREQRIALEELLEGMRQEAERVERLEQAIREAVPEWSLAEVATALQAMRGIDLVAAVTVLAEIGDLSRFQSPRELMGYLGLVPSESSTGDKVKRGGITKAGNGRARRILVEAAWSYRHPARVSREKQPKVAAAPRRVREIAWKAQMRLCGRFRSLTRKGKLPSIVATAIARELSAFIWAINHEVMAPGEGLEIRNVPTARSVTPCSPPSRRGLATADEVAGAPRRPALTAAARGVPAAARVGTKKRAPRSNKETGSEAESAGL

SEQ ID NO: 240849 - protein, 408 aa, unidentified
MNPLFVGIDVSSKNNVAYLMKPDGSKHSSFSVQNNLGGAKLLSERIVSALGSMQLERVVIGLEATSIYGDSLVYALREDGRLGRFQRKIHVLNPKQVRKFKEAYSALPKNDWVDAFVIADHLRFGRINREVYMDDYRYKALQTLTRARFDVIQNLTREKQRFANYLFLKCSGMAQDKDIQNTSATTIALMEHFETVDDLANADLEELTAFITETGRGKFADPDATAKAVRAAAKGSYRLPKTVNDTVNQAMAVSIASMRALKGQVKVLDKAIEQQFEIIPNTLTSIPGIGKVYSAGIIAEIGDIHRFDSQASVAKYAGLVWNRSQSGDFEAEHSRMIKSGNRYLRYYLLEAANSVRRCDSEFRRYYDLKFKEVNKYQHKRALALTARKLVRLVFRLLKDNRLYIPPEG

SEQ ID NO: 240850 - protein, 426 aa, unidentified
MAYRIAGVDVHKKMLAVVVADAEVEGEWRFERRLCGTSPSQLQALAEWLAERDVEEVVMESTAQYWRPVWETLERQWQPTRRARAKAPTAGALHLAQAQSNHGPRGRKKDFPDAERLVKRLVAHELTLSFVPDMTQRLWRTVTRRKYQSTCSRVQLRNRLECLLEEAHIKVSSLVSDLLGLSARRMLRAVASGETDPTAVAALGSPRLHATPDQFRDALGACTNLNPVYRRLLAMTLDELEVIDAHIRQLDEELARLLREHQDAVERLAAVPGLGVDSSQQIIAEVGPTAATFATAKHLASWVGACPGHDESAGINHSHRSPNGNRQMRRLLNQAANAAVKTKGSIFELVYRRLVVRLGHAQAIGAIAHRLCRLVWKILHDGVAYEERGPAVTNARAHRRVAKMIRELRSLGYRVEQIPAPVNALT

SEQ ID NO: 240851 - protein, 340 aa, unidentified
MLVRKVRQRTATGKSAVEYDHYVAIEWSLKTMAVAHMSRRDQIPRIFERPSNLKELKAYLGSLKGRTMITFEESGTAHWLYLELVDDADRVLICDPFQNRLLFHGPKTDKIDAGKLCELLRTGLLKEVYHSDSALYELRLLVSAYEDVVRSGVRVLNQKAALQLGHRDKGNGAVFVGEILKENIDLYRRSKEQYEQRFHGFARRNKLVRFQREIDGIGTIGAVKIVACVVDARRFPHSGRYLSYCGLVKHEKLSGGRTYGWRKPRYSRVLKSVYKTAALAALKGNNPIREYYDHLLAQGVAEHNARHAVARYIARISYGMLKSGTHYEPYRWRDAERKSA

SEQ ID NO: 240852 - protein, 413 aa, unidentified
MLKIVYPICCGMDVHKSFVVACIASTNDHGVTTYKSRRFSTFTGDLRRCAAWLVENNCKDVCMESAGKYWIPICNILEPTCNIVLAHPKYVKAIRGKKTDKRDAKWIADIFKHDLVSGSFIPPADIRQLRDLVRYRWKLTSFTTGEKNRAQNCLTVSNFKLDDVFSDVFGKAASAITTRILENPTEKITDISEFRTKGMKATNEQVLAAVDGEMCAEQAEKLRIIRSHMDSLEMCKANLESLILTTAEKYLPQLNLVMTVPGIQSFAAIGIISEIGVDMSVFPTSKHLCSWAGLTPQNNESAGRKKTTRISRAGAYIKPLLVQCALCAIRTKSNPEIRNRYLALKKRRGHKKAIIAVARMLLTAIYNILKKNEPYNAELYRCCNTPPEHRAVSVEEAIFILQRQGYLVTPSAT

SEQ ID NO: 240853 - protein, 422 aa, unidentified
MKRQTEQEQFAAYIGIDWATQTHYLSLCEADSRTVERSQLDHKPEVLGQWVNELQRRYPGRRIAVALEQSRGALVYALMSYEFLVLYPVNPKALAKFREAFYVSGAKDDPLDSDLLLELVTKHRDRLRAWQPDDELTRTITLLVEYRRELVDTQTGLTNRLSDLLKLYFPQALGWAGELATIQACDFLERWPTLAKVRQATDTELLQFYGAHGCRKAALIEQRLRQIETAQPLTTDGAVITASMAMVQSTIAQLRPLMVSIKEMDKQIAELFATHEDHELFRSFPGAGAVLAPRLLSAMGANRDRFVTAQDVQQLAGIAPVIERSGKTCFVHRRFACSKFLRQSFHEYAAQSIRWAPWARAYYDRQRQRGNGHHAAVRSLAFRWIRIIFRCWQNRVPYSEETYQQALRDRGSKLSALIVAQT

SEQ ID NO: 240854 - protein, 399 aa, unidentified
MNAVGIDVSKGKSMVTILRPFGEIVSSPFEIKHTSSDIHSLIKLIHSIEGESRVVMEHTGRYYEALAHQLSAADLFVSAVNPKLVKDFNNDSLRKIKSDKADSVKIARYALDKWQSLEPYSITDELRAQLKVMNRQFHFYVKQKTAMKNNLIGLIDQTYPNANTYFNSPTRSDGSQKWVDFVSTYWHVDCIRKMSLNAFVEHYQNWCKRKKYAFNKSKAEEIYTKTKELVPVFPKNEITKHIIRQAVDQLNSTSVTVETIRTLMNETASKLPEYSIVMQFKGIGPQLMAEIGDVTRFTHKGALTAFAGVDPGVNESGSYAQKSVPTSKRGSSNLRKTLFQVMDVLIKTMPQDDPVYQFMDRKRTQGKPYYVYMTAGANKFLRIYYGRVKEYLSVLPDPS

SEQ ID NO: 240855 - protein, 369 aa, unidentified
MPHVTSIGLDVHARSVAAAAFNPFTGEVVHRDFGTDAAEIAEWALGFEEPRACYESGPTGFHMARELRALGLDCAVAAVSKMQRPAADARRKNDRRDAEFIARMLATHNIVEVPLPDAAVEAARDLDRALDDATVEYRRARQRLNMFLIRLGHVWDERNADGTRKGSWTRAHWRWISGIRLEGPQRDVLEYYVTAARCAESDRRQLEKKVLALARTDRWRPVVEALSCIKGIDTLTAFRLAAEAGSFTRFRTAPAFASWCGLVPSERSSGETERRGGITKTGNRLARTALVESAWHYLTCTPRPKAPAPGADVPAAIRARADDCTARLCRRREALAAAGKSSCKANAAVARELACWVWEIGRRAEGTLG

SEQ ID NO: 240856 - protein, 353 aa, unidentified
MGKINKKERKFNEETLLVTVDIGKKFNYGYARTKDGQELEVFKFFNTGKGFEYFLKKVESFRAKTGLKNCLFGLESTGSYGLALIHYLHRRGYEIVQINPMHTKRLKELTDNSPNKTDKKDPKVIADIIELNKYLTVIIPEGIFAELRELVHLREKILEDLRRSYNRIEGQLFKIFPEFSQVMRDLTTKTSRYLLAHYTLPQFILDLGLTKLTELIKSVSKNRLGEEKALALYEAAKMSGGIKEGTRSIVMEIKIHLDQIDRLESYQKSLKDEIENYLKEVPYSRNILSIKGIGPIIAAILIGELGDIRRYKSYRELEKIAGLNLYEVSSGQHKGKHHISKRGRSLLRKALFI

SEQ ID NO: 240857 - protein, 320 aa, unidentified
MKVKNGDLNVKIKGQRKFDNTTSGFEALNSWLKKKVDTGLTLTVTMEATGVYYERLAYFLHGAGYKVHVLLPNRIKGYMKFLNLKSKTDKLEAKALAELGLGTKLPEWKPASPQMYTLKRLSRERNNLKEEKTALSNRLHAEESCQKPEKLAIKRLKQRIALIDKQIGQVEKQMHQLAAKDQELQSRIENICKIKGVAFITVLAVIAETNGFELVEHKSQLVSYAGYDIVERESGSSVKGKTRISKKGNRHIRHALHFPAISVVKYHEEFRSLYERVFDRTKVKMKGYVAVQRKLLVLIYTLYKKNIPYDPAYYKTLAVG

SEQ ID NO: 240858 - protein, 360 aa, unidentified
MSVYVGIDVHRKRSQVAVIGQWGEVLANRNVPNGVEPVLGVIGGLPPGTPAAFEAAFGWGWLVELLEDYGFAPHLVHPLQCKAIASARLKNDKVDAAILAQLLRADLLPEAWIAPPAVRQLRALLRHRAQLVRLRTLLRNRIHAVLADHGHDRPQGCWSGPGRAWLASLPLSAVSREVIEDNLALIDALQQPIDRLDWEIHPRARAEPAVKVLTQLPGVGPLTALVILAETGDVSRFGSARKLAAWAGLTPTVRGSDRTVRHGHISKQGSAWLRWILCEAAQTAKRHPDFAASYQAIARRRGKKIATIAIARKLLTRAYHLLTDAQITAPLAAGTTPAPAPPARLPAGRVAKPGRARESA

SEQ ID NO: 240859 - protein, 360 aa, unidentified
MRKEGSLMRKMQEYVVKGKKIFVGLEDSKRTWKACVRNEGMVVDEVSMPAKYEVLRAYFRNKFPECEIRLMYETGFQGFWLHDLLEEDRIDCIVTPSNKVTCEKDNRVKTDKRDARRLAKNLENGDYVSCHIPDRERREDRQISRTMSQIQKDITATKNRIRRFLDYHGLNYGLKDGEWTDKDYFNLRDLDISRSLKISLAASLNVLEGLLRNKKELSEELHALCEKEKYKYGVTKKMSAPGIGWLTAIRMTLEFGEMSRFKTGKHIASYTGLTSREYSTGDTIRRGRITAQSSELLRSWLIEVAWRAIRKDPVLLEKFQTVWRNSGSKKKAVVAVARKIAVRLWALETTGQPYCIGVIE

SEQ ID NO: 240860 - protein, 336 aa, unidentified
MSELVTVGIDLAKSIFQIHGVHESGRDLVRRQLRRSQLLAFFEKQPRCLIGMEACGGAHDWGRRLQGMGHDVRLMPPSYVKPYVRRGKTDAADAAAICETVTRPSMRFVAVKSESCSSVLVLHRTRDLLVRQRTQICNAIRAHMTEFGVIAAKGAQNVDRLRTQMHQLPEAARLPVSLLFEQMVDTDTRIEQLTGEIEAIHAQSETSQRLATIPGVGKLSATIIAATTPDVGNFDCARDYAAWLGLTPKPHSTGGKQRIGRISKMGNRYIRRLLYLGAISQIMVRSRCGARQDWLSDMLSRKKTKVAAIALAHRMARTIFAVLRDGSRYQPQATTA

SEQ ID NO: 240861 - protein, 316 aa, unidentified
MAKPLVFVGIDVAQATLEVAVRPTGEAWQVANDETAFSDLIERLREIKPVLIVLEATGGIHLPVVAALAAAKLPVVAVNPRQARDFAKATGKLAKTDRIDAQVLAHFAEAVRPEVRPLPDVATQELAVLVARRRQLMEMRVAEQNRSRGTPARIRAQIREHVEWLNHQIDELDHEIGQCVRCSPAWRDRDALYRSTPGVGPVLSATLLADLPELGSVSHKQIAALVGLAPFNQDSGKKRGQRVIWGGRASVRAALYMATLVATRRNPVIRTFYQRLLAMHKPKKLALTACMHKLLTILSAMVRHHTSWSAPVSASA

SEQ ID NO: 240862 - protein, 359 aa, unidentified
MANKVKRNKINFKEKMVSIGVDMHKRSWHITALADGEIVLTVSLSRPNYDAFEKLLSHFKGNYIRIVYEAGPGGFDLYDRLTADGIECIVTPPSLIPTQSGSRVKTDKKDSLKLATLLESNILKKVWVLSPEERAHRQLVRTRRQIVSHRSDVMRQIKSLLLFHSIEVPFSSRQQWTSPFIRWLHDVDLGNEYLNGSLKALVDLFDYLSAEKKRLTHEVVELSREEKYVQRVKLLKTIPGIGCLSTMEILVELQDITRFQTADELAAYLGLTPSQYSSGEHIRMGHITHAGNDSVRTTLVESSWLLIGKDPHMKCKYEDIKQRRGGKKAIVAVARNLSIRIRRMLLDQVPYEIDFQKAA

SEQ ID NO: 240863 - protein, 387 aa, unidentified
MGQVIIGMDPHKRSATIEVINDREKVLAQGRFGTDRDGYQRMLKLGRQYKDRIWAVEGCNGIGKHIAQRLVADGETVMDVPPKLSARARVFDTGQGRKTDPVDAHHVAVAALRSKGLRQVAVDDVTVALRLLVDRRDGLGHARTDLLNRIHKLLLELLPGGAKKYLSAAQARALLNTVRPRDLVGRTRRRLASELITELVQVDKKAKAADKELRELVEATGSSLQDLHGIGPSGAARLIGDVADISRFASRGHFASWNGTAPLDVSSGDQNRHRLSRAGNRRINRVLHIMAVVQLRNDTEGRAYYRRKLAAGKTPMEAMRALKRRLSDVVYRQMVNDAKNAETGPGGHVGAALKSSAVDLIPMIETSDKSLPGPAEPQPRTRLLAAS

SEQ ID NO: 240864 - protein, 400 aa, unidentified
MLSIGIDVSKGKSTVCGMKPGGGIVYAPFEVQHTREGMLELVSLLRSSGEEVRAVLESTGSYHCPVVAALLENGIFVSVVNSLRMKRFCSQSIRKVKTDRIDAMQIALYGLAYWQELQPTRLPEDTYRELQLLARQYYQMTSLLIKAKVDFNAICDQVLPGMQELMNDHAGRHKLSDFVLRYRHTTHILEMGETRFRKDYCKWAEKKGYRNRERMAAHIFATAQNGIPVLPNAPSTQIVITEAIRVLHTVEASRDAILTQMQALAKTLPEYSLVREMPCIGDTLAPRLIAEIGDVRRFHSKRALIAYAGIDAPPYQSGKFRANNRHISKRGNRYLRKTGYEVMQSYVMHKPANDPIFTFIEKKRGEGKSGKLAMVAGLNKFLRVYYGKVTELYRSLSAIE

SEQ ID NO: 240865 - protein, 343 aa, unidentified
MELYVGMDVSLKETSICVVDGKGEIVSEGTVISEPAAIAAFIKAKAKNAVRIGLETGPTTTWLWHELRALGLPVICIDVRHAKAALSMQINKSDRNDAVGLARIMQCGWYKEVQVKSLPCHEIRAVLNSRAQLVKIKRDLENQIRGLLKNLGLRIGKAGGNVFRHRVEELVVEHPLLQEAVRPLLGVREIVRREIAGLTRRLLAMARDNDESRRLMTVPGIGAINALAFCAAIDDPSRFRRSRSVGAYFGLTPRRHASGEVDWTGRISKCGDAMVRTYLFEAAGVLMTRVPHWCRLKAWGLRLAKRIGFKKARVAVARKLAVILHRMWCDGTDFIWSSKEAAA

SEQ ID NO: 240866 - protein, 375 aa, unidentified
MNTIYIGVDFHARQQTICYLKTETGELVICELKHQDKEAVRAFYAQFKGHVIVGLEASGYSPWFERLLEEMGCEVWLGHATEIRRRARWRQKNDRRDAELILDLMIHNEFPRLHRPAVQSREVLRMLRYRQKLIKLRTMSKNSLQAIALQAGLAKGSRLFTKSGQQALRTAAMSPVMQWQCEHWVQLLEPLNKQLLETMVWCKAQSKGDESLTRLRTHPGIGLLTSLCLLHTLQPVSRFRNSRKVAAYAGFDPVERSSAERKCFLGISKAGSRLLRYLLVEAAQTAVRKDEDLKRFYKRLAERRGRPKAKVAAARKLLIRAYIMLRDEIDYAEFRRRAVAARLARRGHRPEVPEVLIGQPASAERQETVTCANKQ

SEQ ID NO: 240867 - protein, 358 aa, unidentified
MIHLAIDHGKKVSHAVALSDAGEILFDQEILSTLEGFASIKDALPTDQPIQSIVEAGWNWGKVFDALEDLGLNPKLSNPTKSRFIAESFTKTDRIDATTHAIMLKAGITPLVHVPGKLTRDHKNLLRHRFWLVRINVMIKNRVHSILDRNHLQPPARSDLFGGHGRAWMNALTLREPDNKLLKAHLELFDIIRDDTRETEKWVDSALKNNKMIPILESLPGVGKILGALIALEIDTIHRFNSPSKLAAYSGLVPSTYSSSGKTYHGRLIPASNRHLRFAYIEAGWNASRVSPYFRAFYERLKERKGACKAIGAVGRRLCEISYFCLKDNRVYEERPYRYKRSLTPEQENFGRAALATQ

SEQ ID NO: 240868 - protein, 415 aa, unidentified
MVDVIVERCAGLDVHRDTVVATVRVPGSGKSRRRRLQETRTFGTTIGQLERLSDWLAECEVTRVGMESTGCYWKTVFYALEDRFDCWLVNAKHLRNVPGRKSDVIDSRWCCELVELGLVRPSFVPPPEIRRLRDLTRLRSTQVQERTRAIERLEKVLQDAGIKLTSVASGVYSVSARAMLEALLAGVTDPAVLAELAKGRMRKKIPQLQEALASRFDIGHHGVLVAGLLAHIDALDQAIGNIEARIGIATAPYAELIKLLCTIPGVGVRIAEILIAECGVDMSVFPTVAHLASWAAVCPGTNQSGRKRGSGKTRNGDTWLCTALTQAAHAAVHTKDTYLASHYWQLRGRRGDAKAIGAIRHDILTAYYHIVRDRVAYRELGPDWLTRRHSPEHRTRRLVKQLEALGHHVTLQPAA

SEQ ID NO: 240869 - protein, 341 aa, unidentified
MSESALIGIDLGKHSFHLHGQDKSGREVFRKKCSRSQMMQFFSNLMACTVVMEACAGAHHVARKLTAMGHQAKLISPQFVRPFVKGNKNDFVDAEAICEAASRPAMRFVTPKTEAQQTLSVLHRMRESLIRDRTKTVNQMHGFLLEFGISLPKGLATMKRLSAVLAEHDLPVRLAVLLQRLHDHFDYLNEQIKALDKELASQLSDDDLGSRLLSMPCVGPITASLLAVEMGDGKQYRCSRDFAASVGLVPRQYSTGGKANLLGISKRGDKHLRQLLVQCARVYMLRLDYQKGALADWVRSLLSRRHSNVVACALANKLARIAWAIAAHHSQFEAGPDVLSA

SEQ ID NO: 240870 - protein, 342 aa, unidentified
MWIIGVDYHPSMQQIAWVDTETGECGERRLAHGDGEAEQFYRELKKKQVSVRVGMEATGHSRWFERLLAELDYELWVGDPAQIRAKQVRKQKNDRRDAEHLLKLILENNFPRIWVPTAENRDLRQLVLHRHRIVGMRTRVMNQLQAIAMNEGVRRRRGLWSKEGRAQLEGLCLPAWTSRRRQELLQLLDRFDPNIEELSQAIQQEAERLPEVQRLQTHPGVGPITALTFVLVLGTPHRFGCGKQVASYLGLIPCEDSSAERWRLGHISKQGNTLIRFLLGQAALSVARCDEQWHRQYARLAIRRNHAIAKVAIARKLAVRLFWMWRREWNYEQLKKFGSHVG

SEQ ID NO: 240871 - protein, 338 aa, unidentified
MQRHIGIDLHRNRFTCCVRLENGRKYVTDWKLEDLPRFTKKLRPTDEIAVEVTGNPRLFYEAVAPHVKRVVAVDPNQFKVISHSVKKTDPNDARNLALYLEKDLLPEVRLKDKTQAQLASLTQTRDTLVKLRTALKNKVNNILSAHGANLEKEALSSEKKLQEILAMKFDPMVKRELEVIIEEIRSLNQRIAKLEKAIGEEGSKLEGHKNLTSIKGIGPLSRSILLSVIGDIDDFEDEGKLAAYFGIVPRVSNSNERERSGRITKRGSKLGRTALVQCALIAQRYSPYLKRYYEQVKARRGTGKAIIALARKLLGIIYRTLKNKWVFEDFPNFVLAEG

SEQ ID NO: 240872 - protein, 387 aa, unidentified
MTTDHLATALQTVVRVNDTKLFASLELSKSRWLVTVSAPGSEKLSKHVVSGGDGGALLNLLGRLRASAERRGGMAVQVVVIQEAGLDGFWLHRLLEANGIESHVVDPASIAVDRRHRRAKTDVIDGEMLLRTLMAWARGERRVCSMVRPPSPDEEDRRRLTRERGTLLKERTQHTNRIKGLLAGQGIADYDPLRKDRLARLDALRTGDGRPLPERLKAEIRREIERVDLVVSPMAVVERERDALVGMTSDPAPETAAAVLVRLKGIGPELGSLIWLEALYRGFSNRRQIAAYAGLAPSPWQSGGTDREQGISKSGNRRLRHALVELAWFWLRHQPASALSVWFRARVGQGRGRIRRIAIVALARKLLVALWRYATQGVVPAGATFKA

SEQ ID NO: 240873 - protein, 347 aa, unidentified
MEEITRIGMDTSKHVFQLHGVGATEEPVLRKKLRRKEMIAFFGKLPPTVVAIEACGGSHHWARLLQSFGHEVKLIPPQYVKPYVKRGKNDAADAEALCEAMSRPTMRFVPVKSAESQAALMLIGVRERLIRNRTQLANAIRGYAAEFGLSAAQGICKVEHLLERIATDETLPELARDLFALHAREYRQLQGEIAKVEARLMAWHRADECSRRLAKIPGVGPIGASLLVMKMPAPEGFRSGRHFAAWLGLTPKDHSTAGKIRLGGITRAGDETLRSVLVAGATALLRHVREGRGKNASPWLRELLKRKPPKLVAVALANKIARVAWKLMVTGGQHRADTAQPLHARAV

SEQ ID NO: 240874 - protein, 344 aa, unidentified
MDHFAGLDVSVKETSICIVDETGKIVREVKVASNPEALLAVLKNPAYHFKRIGLEAGPLSQWLFSALAEADLPAVCVETRHMQAVLKAQINKTDRNDARGIAQMMRVGLYRPVHVKTLRSQKLRMLLTHRKLLQSKAIAIENDLRGTLRNFGLKVGMVGKVKFEARIKELVENLPDLAVLVEPLLLVRRVLREQIIILHRRLLAIVRDDEVCRRLMTIPGVGPVVALTYRATVDVPARFRKSKAVGAVFGLTCSKYQSGEIDRSGRISRCGDEMMRVMLYEAAQGMLRSKKWCWLKAWAMQIARRRGMKKAIVALARRLAVIMHRIWVDGTDFRWTREQAAAAA

SEQ ID NO: 240875 - protein, 364 aa, unidentified
MRKVYYIGLDVHKDNTQMAVLEMKGKEPVAVKVIDSDPTKVAKAILPYHKGGLVYVGYEAGCMGYTLYRVLTEMKINCQIIAPNKVFRGGTNEKIKTDKRDAVAIAWMLRREEGAGIIVPEREDEAARDLLRCRGDMQDDLKRAKQRLLKYLLRHGHVYENSRYWTGKHRKWMKTLAFDMPLDKAVFEQYLSTIESIEERVGRIDLQIREIAESPRYAERVRKFRAFKGVDYIIALSLVCEIGDFKRFPTAAAFMSYLGLVPSEYSSGKKRKQGGITKTGNGHIRKLLTEAAWHYARPARVGKRLAERRVGTAEPVITYADRALNRLHGKYVKLVFKGKSKQAAVTAVARELSGFLWGVMTSAA

SEQ ID NO: 240876 - protein, 419 aa, unidentified
MKIIKNQNTKNINGQTLIVAVDIGKSVHYGYLRTPMGEEVKPFPFSNTHQGFQGFWQKLSQFQRQQGLKECVIGFESTGPYAEPLFHYLRNQPVKLVQINPMHTKRLKELTGNSPNKTDRKDPRVIADVISLGHALTLVVPEGAAAELRRLTHARERAMKRRIALLNQLHYLIAVVFPEFLEVMKKISTKTALYLIKNHPAPQQIVAMGSESLRKVLKKISWGQITEQQAQRLFEVAQKSIGIHEGQQSMLLEIQYLVSAVEKENGFIADLEKQMIVSLNQIPYSHSILSVKGIGKITAAGLIGEVGDFGKFKTIAEITKLAGLDLYEISSGKHKGQHRISKRGRSLMRKLLYFAVVNMIRSNGLMHTLWLQRVQRGMPPMKIMVALSRKLLRLIFALARDHAVYEENYAQINTYKLAA

SEQ ID NO: 240877 - protein, 354 aa, unidentified
MNRKMQDFITTDKDIFIGLEDSLKKWKLCCRSNNGIVHETSMPADYQVLFAFLKKFKNCRIKVMYEAGFKGFNLYDRLTEDNIECVVLPPHLLLEEKHSKVKTDKHDARKLARMLESGDYPGCSVPDRERREDRQICRTLNAVEKDIKSTRNRIRKLLQFHGVETGITKNTWQKGEFRSLKELALSDSLKKAIYVLLSQLDTLWEYQTELRKELKALAEKERYHKAFLIVKSAPGIGWLTAIRLVLELGEDFSRFASGRNIASFVGLTGSECSTGERVCRGRITGQGNAFVRSWLIESAWVCIRLDPAMQEFFQRIYRNSGSKKKAIVAVARKMVVRLRACAIGNVPYQIGVVE

SEQ ID NO: 240878 - protein, 428 aa, unidentified
MSAREAVEQEPEFVAFVGIDWADQKHVWCLQAAGSTQRETGELEHKPEVVEAWVSELCRRFGQGAIAVAVEQGKGALVFMLCKYECLHLYPVPSTMSSSMREALYPSGAKDDPRDADLLLDLLLQHRDKLRRLTPDNEATRRVQNLVEERRKLVEEKTAQLNRLSGYLKVYFPQMLEWFAKLDTKLACEFLEHWPSLEELQSSSPAEVRKFFRRRRGRHGELTEWRVQGIGQAMPAIRDRAVIEAKRLVVQVIARLLRTLLEGIATLDSKIAEAAEAHPDFFIFRSFPGAGAALAPRLLAALGSQRDRYASAEEVQKYSGIAPVTERSGKKKWVHFRWACPKFLRQSFHEWAGHSIAQSVWARAYYQQQRQRGKDHHAAVRALAFKWIRIVFRCWQERAAYDENRYLAALAKRGSPLTSVVAAAAISM

SEQ ID NO: 240879 - protein, 482 aa, unidentified
MKHKRHEKTKKAICGPTQGNWQQMNRKQRREMTRKIQSEDISLEVIHPDAAGIDIGNESHYVAVPPPRDSQPVQRFGCTTAELKDMADWLKQCGIRTVAMQSTGVYWIAVYDILEEAGLEVYLVNARDTKNLPGHKSDVQESQWLMKLHTYGLLRNSFRPSQEIRTMRTYWRQRNDLVQSAGRHIQRMQKTLTQMNLQLANVLSDISGVTGQAIIKAILAGERDPDKLAEFRDPRVKARKGQIARSLEGNWQEDLLFVLQQEQDGYEFCQKQMTECDQRLEHYLQQRDDRSAGASLPEEKRKERRKKRKGNKPRFDLRTGLFRMTGTDVTRIDGIDVMTATTILSEVGWDMSKWETEDHFVSWLRLCPDNRISGDKIIGKGRLPTNNRVSTALKMAANTLRTSQTYLGAQFRRLRSRLDTPVAIKAMAAKLARLVYRMLRYGMKYVDRGAEFYEAQHRQRQIKHLKSKASKLGFQIIQVPAA

SEQ ID NO: 240880 - protein, 384 aa, unidentified
MRGNFIPREYDIFTGLDVSKKSISVTFTNHQGFIRSLNMPHKAEHLLNYVRKHFPDQKIAFVYEAGPTGYGLYDGLAAQAYPCLIAAPSMIPRAPGQRVKTNRLDSKALSENLRGGQLKSIHVPSPTYRQLRHLTQLRDVLVSELAGMKQRIKSLLLFEGIEFPPAPPGSQWSFMVKDKLRKLPCSGTVRFKLDQLLDSLEFNEKQIFKTITEIRRFCRNDPELSQCMKYLMTISGIGWITASQLLARIGDWRELKNIRQLAGFLGLVPIEHSTGERIDRGSITRTGDERLRSKLIQASWSAIRQDGELREFFRSVCRNHPREVASRVAIVAVARKLSVRISVVLMKQRPYEVREKVHSAPLTQEETSPQGTTRRLREPGEKNS

SEQ ID NO: 240881 - protein, 343 aa, unidentified
MKYVGVDLHKQTIALCVMEVVEGKRTVTATKRFRCRDTEGIRGFFEKLGTFQVVVEATANYEWFLLLIEDLAQRCVLAHPKKLRIIAESTRKSDKIDARVLAEFLAIDMIPEAYRPSPRIQQYRVLVRHRRWLQGRITSVKCKLRNKAAYYNADIADLFTKKGQKHLAEIAMSASDRFECINLRELWQWCDSRLEEVDKELAKFRQSAPLAEREARAVLSTIAWVGPVTIDIVLSELGDWRRFRSAKRAVSFAGLDPGSRESAGKAQQLKISKEGSRLLRWAMVETAWRLVNTCQRWRNIFERLVKNTGSKKRAIVGVARRILCVIFAMLRDGRAYDMPARAA

SEQ ID NO: 240882 - protein, 444 aa, unidentified
MVCSGMILIREVADAPVIMGISKPAGLKSPCGEVKIVNPLFVGIDVSSRSNVAYLMKPDGSKHSSFSVQNNLGGAKMLSERIVSALSSMRLSDVVIGLEATSIYGDNLVYALREDGGLGRFRRKIHVLNPKQVKKFKEAYPDLPKNDWVDAFVIADHLRFGRIAKEVYMDDYRYQALRTLTRARFDVIQNLTREKQRFANYLFLKCSGIAQEKDIQNTSATTIALMEHFETVDDLANTDLDELTDFIAQAGRGRFVDPDATARAVRAAAKGSYRLPKTVNDTVNQAMAVSIASMRALKEQVKVLDKAIEQQFEIIPNTLTSIPGIGKVYSAGIIAEIGDIHRFASQASVAKFAGLVWTQHQSGEFEAEHSRMIKSGNRYLRYYLLEAANSVRRCDSEFRRYYDLKFKEVNKYQHKRALALTARKLVRLVFRLLKDNRLYIPPEG

SEQ ID NO: 240883 - protein, 347 aa, unidentified
MKLFFVGVDISKKKLDICVRDAKTIIQECTFPNSQKPLLKSIKSLINRLNCNLNEVLFCGEYTGMYIYPLVQSCKILGLDLWIEDPTQIKYSFGVQRGKNDKVDASRISEYAFRYQDKAKMFALNDDDLNSLKLFLSERDLLLVDKIKYSAQLSDQENYMSGKDFKDKSKRIKQLVVEFNRLLNEIDSKIESIFEQNEKLSSQRDLLCSVDGVGKRIAYEMIALTYGFKRFQNHKQFCCYAGLAPFQYTSGSSIYSKKKVSQRANKKIKSLLHLAAISVIRYDGEMRSYYLRKKDEGKNGMLILNAIRAKIVARIFAVVTRNERFHKDYLNPSFISQARVLEIFKNL

SEQ ID NO: 240884 - protein, 363 aa, unidentified
MFTERTSVGLDVHARSVAAAAIDSVTGEVFQTKLTPSFEHIRAWIADLPGSTAATYEAGPTGFGLYRSLTTAGIRCEVAAPSKLQKPAGDRVKTDARDALHLARLLRLDEITAVAIPTVEQEAARDLVRAREDCRGDLMRARHRLSKLLLRHGIVYYGGQAWSGAHDRWLRTVAAPQLTWPATRMAFDADYDHVLTMQARRRRLDAAIEEMAAASEFTPVVRRMCCLRGVSTLTGFGLAVEIGDWTRFTGNTIGSFVGLVPSEYSSGSSRVQGSITKTGNTHARRLLVEAAWHHRARYHVGAVMRSRWDRAPAAARARGDEGNRRLHERWVRFLERRKRPVVANAAIARELAGWCWSLAVMDC

SEQ ID NO: 240885 - protein, 412 aa, unidentified
MRVLYPTCAGMDVHKKDIKVCLVTRDNQEQRQEDVRSFRTMTRDILAMRAWLQAHGCTVIAMESTGVYWKPIFNLLEGDFTVLLVNPAHIKQVPGRKTDVKDCRWIAELLEHGLLRGSFIPPIEIRDLRDLTRYRRQLVNTHSAEVHRLQKVLEDANIKLASVATDVMGVSGRAILRALLAGVVSPEALAELAKGRLRKKKPDLQAALQGRFRPHHTQLLTHILAHIEFLEESIAACEAQIEARCRPVAEVITLLDTMPGVSQRTAQDLIAETGVDMAWFPSAKHLCSWAKVSPGNNESAGKRKSGRTGNGNKWLRAVLVECAHAAGHTKGTYRGTKFRRFASRKGKKRAAVMVAHRILEAAYFILRDKVPYRELGDQYLDTHHREHIIRHHVRRLESLGLHIDIRELPLTA

SEQ ID NO: 240886 - protein, 348 aa, unidentified
MQSDRPVIAVDIAKSVFEIAVSKTPGQVVQRERLPRAKFLEFFADRSVSVVVMEACGSAHHWARLIKERGHEVVLLPPQLVRPYVKRNKTDRTDAKGILEAYRNEEIRPVPVKSLAQHVITALHRLRSGWVAERTARLNALRGVLREIGIVIVVGAYNVVPALRSMIADADSGIPDALRSTLSDACNEIVEIEARIDRAEKQLKAIAKQTPLVVLLLTIPGVGLLTATALVGFIGDVQRFPSARHFAGYLGLTPREFSTGYMRRLGGITKRGDAYLRMLLIHGARAVLLGAKRVSEPDRLRTWALTLEKTHKHNVAAVALANKMARVVWAVWKHGRPFERIPALKAVA

SEQ ID NO: 240887 - protein, 364 aa, unidentified
MHSINNTELSSLEETRCQFNGGRCAIKLGIDVHQEFYVVVMQEGGANPKPPQRFQKEAFLQWAGRLKQKSGAEVYAVYEACGFGFSLQRNLSGLSIHCYVICPQKLDEQNRRVKTDGLDAKALCLKLDRFVQGNRAALAIVRVPSEAEERSRAIHRQREQLVGARKRLEAQGRSLMVNHGLEPVQNWWKPRTFAALQVSDWMKQLLQNSQPILIGLQEKIAALTGQLQRAASPDQPRGLGKMTSVIIDREIGDWHRFRNRRQIASYTGLCPGEYSSGNTRLQSCVTKHGNPRLRAALVELAWRLVRFQPNYKPVLKWRAILAKGALATGAARKKAIVAVARQLAVDLWRIKTGRLRPEELGLIN

SEQ ID NO: 240888 - protein, 474 aa, unidentified
MTSYYLGADVSKGYADFVILDSQKHPVEEGFQLDDTFEGHNLLYQRLCQFCADRSEAFIHAAVESTGGYENNWLNTLVKFQSSLNLQAARLNPFGVNANSKADLKRITTDKISAYSIAEYLIAHSEKVSYAAPDTLASLRRQWSFIKLLTKQNTQLLNHLESLLYSANPEILVYCKHHVRDWTLQVLKRYPTADHLSRARISALTRISYVSETRAQELVESARKSVASTTDKVTGQLIISIVKQILQLRRTITSESERLAAEYPVTEVELLKTFKGIKDYSAIGLMLEIQTIERFPRSKNLTSFFGLHPVYRASGDGMMGVHMSKKGRREPRRILFMVALTAIRDNPLIREIYLKHTERGMSKMAAIGVCMHKILRIIYGMLKHNQPFDPEIDRGNREKSKTKREVMLKDKSRRYQEYDSKAPISGRQNKKRKERNESQNGHLPHKNGIIVSVPSVNLTYSSISVQEVLPEIAQ

SEQ ID NO: 240889 - protein, 393 aa, unidentified
MEHPMSQPFDAHKSLTALEQHNTIIAVIEMGQSKWLVAAGVPGIKRQPLKKLDADQESLLKLLHRWRKEAEQAGHPIKRVVVAYEAGRDGFWLARWLRMRDVEVYVIHPTSVAVSREHRRDKTDRLDTELLLRALLGWLRGEKRHCSMVAIPTIEEEDAKRPNRERASLVTEQTRIVNRIKAILTRFGIATFRPKLRKAEVKLKELRTVEGSPLPDNTRAELNRHLARLRMVRDQIQAIEKERLQKLKADHGRKASPHAMVWLIARVFGIGVETADMLVTEVFSRQFRDRKAVARYAGLTGSPDESGQRRREKGLARAGNARVRTGMIQFAWRFLKFQQDSALAQWFQTRAADGRGGTRKTMIVALARKLLIALWRLVTTGEMSDDIVMRPAS

SEQ ID NO: 240890 - protein, 343 aa, unidentified
MELHTIGIDLGKTLFHLVGVDPCGNVVVRKRCSRTQLLKYTANLQVQRIGMEACSGSHFLGRALREQGHDARLMPAQYVKPYVKTNKSDYIDAEAVAEAVQRPTMRFVPIKTEEQLDLQAVHRGRERWVMRRTAVINQIRGLLLERGVTVPKGRSHLEQALPQILEDANVKLSDSSRVLLAQLKLELEQLTARVEQMDSVIQHAVKENEACQRLTTIPGVGPVTATALVAAIGNGSGFRRGRDLAAWVGMVPREYSTGGKQKLLGISKRGNNYLRRLFVQGARTVMQHRAKQSPGLSCWLAQLLARVHQNVAIVALANKLLRMAWAVLCKNEVYRSPVLAASS

SEQ ID NO: 240891 - protein, 401 aa, unidentified
MNAVGIDVSKGKSMVCVMRPFGEVVLEPFEVLHTAQSLNNLAGKLKALDGETRVVMEATGNYHKPVAFVLHDAGLFVSVVNPVLIHDYDNNSLRRVKTDRKDAVKIANYTLDKWTRLRQYLPEDDTRLALKNCYRQYQQAVAVRTMLKNNLISSLDLTFPDANKLFSSPAKSNGCEKWVDFIGDFWHSECVSSLSSDAFAKKYLKWCQKHGYNFTRSKSDTIYACAVNAASLPKSPTSKLLIQQQVAQLKAVSQSVAAFQQEMLRLSQQLPEFDTVMEMYGVGPSLGPQLMAEIGDVRRFSSKKLLIAFAGIEPQPNDSGKIVGNDSGISKVGSAVLRRTLFLIMTVILKTQPQDEPVFQFMNKKRSEGKPYKVYMMASANKFLRIYYARVKAVMDSKHSK

SEQ ID NO: 240892 - protein, 345 aa, unidentified
MEIRTIGIDLGKTVFHFVAVNARGQVVVRKKGSRTQLLRFTANLPQCLIGMEACGGAHFLGRALREQGHDVRLMPAQYVKPYVKTNKNDYIDAEACSEAVTRPTMRFVPIKTDDQLDLQSLHRVRERWVVRRTAVINQMRGMLLERGITIRKGRHYIEESLPGILEDADNKLSGALRVLLTQLRMEMQYLHGQIEETDKLIARICGELEQCKRLVAIPGIGPITATATVAAIGNGAAFKKGRGFSAWLGVVPGEHSTGGKQKLTGTSRRGNKYLRKLFVQGAHTVLLQKTKQSSGLSTWLVNLTSRKRKQVATVALANKMARMVWAVLFKGEAYRPPTAPQVIAA

SEQ ID NO: 240893 - protein, 452 aa, unidentified
MRLLNGKQGLRRSQFAKELREIPLEKVLIVPIDAAKVLQKSMILTYFGEVIEAPFAFMVNQTGMRLFLEKIEQAKQAHQAEKVFIGIEATGHYYEDIVRILTDHGYSVHIINPASTHEERKQHLTYTKTDDIDLYLIAEVLIGNKATNAKLTTGAYKQLQVLTRARRSEVNKRSRIKVEMRALHDHIWREYQGFSVLENGKVKTKKIFSDFWGKASLHLLAHFPHASQLLELGEQGLRQLSKEHNLKFRQTTIDKLLFAASESVSKPLTDLSSELFLLKQKLKDYEWHTQTIRDYEAEIERIFIQTDGVLLLTVPGIGLITAAEIYSEMGDLSHYSNAGQLIKKAGTNPTIKQSGASQGYYGRISKQGNAHLRSAVYNAGRSLCVHNERLKPFSNRLKEKGKKTGQIYIAMGNKFLRIAFSMLQKQTPFEWDEPTFNYKQEVFKKLTLPISA

SEQ ID NO: 240894 - protein, 406 aa, unidentified
MQDAIVRFGSVDWAANSHAACIVDSSGHIVDQFSVDHTAAGLATLVRQFQRQHVARVAIERPDGPVVEALLVADLEVVVVSSRAVKGLRTRYGLAGNKADRSDAYILADCLRTDGHRWASLQPDAPETLALRASVRSRKDLVATRVATANQLRAHLQLVFPAAVSLFAAIDSPIMLRFLARFPSADKAAWLSERRVQAWLQANAYSGRRTPSELLERLRTAPKGVHGATAEAQAVVTLSLVRVLRVLVAEIAELETQIREQLAQHPDGPIFRSLPRSGTVRAAALLVEIGDCRARFPSPDMLAGLAGAVPSTRASGQHRVVTFRWTCDKKLRDALVDFAQDSVRASPWADQLYRRHRQAHKTHPHTVRILTRAWIGVIWRCWQDHQPYDPARHRALQRVLVPQGLT

SEQ ID NO: 240895 - protein, 387 aa, unidentified
MYFVGIDISKFKHDCAVIDDSGEIVTPSWSFTNDAEGFSQLKLLLNSLDTETRIGLESTGHYGQNLKLFLENNGFSFMEFNPLLINRFVRSKSLRKTKTDSIDALMIAQYMMTVEYKPYPSSFYHTEKLKSLTRFRDSLIRQRSRQMVELTNILDKVFPEFKPFFKGRFSATALYILSHYASPEKISNMNSKSYEPLRRLSRGRFSMVDFVELKTLARNTVGSAHDYLLQEMEITIDIYDQLQSKVEEIELQINDCVLGLAPPMLTIPGIGVASAAVILAEFGDLSKFSSPSKLLSFAGLEPGYFQSGISESTGKMVKHGSSHLRYAIMNCAQTVINNEPTFAVYYAKKRAEGKEHRVALTHVAKKLLRVIYTLQTKDLSYNPDLVR

SEQ ID NO: 240896 - protein, 383 aa, unidentified
MVAQIENYDQVDVFVGLDVGKGEHHAVALNRTGRKLYDRALPNDEQRLRAVLADLQKHGVVLLIVDQPATIGALPIAVAQAAGALVGYLPGLAMRRIADLHPGEAKTDARDAAIIAETARTMPHTLRSIHVTDEQVAELAMLCGFDDDLAAQITQVGNRVRGLLTQIHPALERAIGPRLDHPAILDLLQRWPSPHDLRSAGEKRIAARMLKLAPRKGREWAHEIVVALGEQTVVVTGTNAAALVVPRLAAQLATLRKQRDEVAAEVERLVDAHPLQPVLTSMPGVGVRTAARLLTEVAGKHFPTPGHLAAYAGLAPVTRRSGSSIRGEYSSRRGNKILKNAMFLSAFAALRDPKSRAYYDRKITQGKRHNQALLVKSADVVYR

SEQ ID NO: 240897 - protein, 337 aa, unidentified
MNSPAPVYRLFVGVDIAARSFAAAWSAHRSPPERAHTFAQTPDGFAAFQAALASSGVEPAQTLLVLEATGSYWITLAVTLHQAGYAVSIVNPAQVHAFARSLPRRAKTDLLDAQLLAQFACERQPPCWVAPEQVYHELRQRLLVRDGLLTMRGQARNQRHALSQWPVHIASALDQLDAVIADLDTRIATLEAELTTVLRDGAWAESAALLGSITGIGLVTTAWLLVATLNFAGCASAESAAAYAGLVPLAHESGTSVRNRARIGHGGHARLRTALYMATLSAARCNPLIRAQYQRLRAAGKPKKVARCAAARKLLHLAYAVVTKREPFDPDYGKAQG

SEQ ID NO: 240898 - protein, 309 aa, unidentified
MNEELVYLGVDIAKSHLDAAIGKEKHRFSNDAVGHRELIRWVKQTKAPIQVICESSGGYERRLVQAVARAGIRISLVQANRVRQFARAAGILAKTDSIDAEVLCAYGEAMRPQTVGASELEQEHLRELESQRRHLTHLLVMEQNRGARLSDAFVRRLNRSLINQIKKQIERLDLLIKEHIEQSPRLTAKAEKLISIKGIGLRTAALLLAQMPELGQLNRREVAALVGVAPFNRDSGKLRGKRAIYGGRRFVRHGLYMAALVAARHNPILRAFYQRLRTAGKPAKVALTATMRKLLIVLNSSLKSDLNYA

SEQ ID NO: 240899 - protein, 353 aa, unidentified
MKGKTETTTASLAVVGVDIGKEVFHLVGLGTDGTIAFRRKIRRSNLKDVFEQLPPCVVGMEAWLSAHFVSRTLRTLGHEPRIIPAIYTKPFVKGQKNDYNDAEAAAEAALRPNLRVVQEKSQNQLDLQACHRVRSRLVSRRTATSNQIRAFLTEQGIAVRAGARALRKSLFAILENRKDEISPRMAKLIHGLYEDWCCLDEGIETVTREIEELSRVEPKCQRLMSVPGIGPLVSTALVAAIGTGETFDRGRDLGARLGLVPRQYSTGGRSILGRISKRGSRYLRMLLAQAARVLLMRPHTWSRFSFGAWLSTASERLHRHKLAIALANKLARIAWSVLRHDKAFDTHLEIAAI

SEQ ID NO: 240900 - protein, 322 aa, unidentified
MAMLSFGGIDVSKDRLDIMVLPDEQCSWVSNDAAGWAELVEQLRGSSITAIGVEASGGYERGVVRALLAAGMSVRQINPFKLRQFAKASGTLAKNDRLDARMIASFVAIMPTRPAQRQAPMIEQLAAMLTVRRQLSDHKVATENASRLLEGAMLQRLSRRRIAGLTADIDLLDQRLVEIVTADPALAHRFRLLTSMPGVGAVLACTLIALVPELGQMSRKQVAALVGLAPYDFDSGKLKGRRCIWGGRARVRHVLYMAALSASNWNPGLKAFHDRLEATGKKPKVVIVAVMRKMITTLNAMLRDGTTWVDRYSGRRSASTAR

SEQ ID NO: 240901 - protein, 376 aa, unidentified
MEEVSTAFVGLDVHSQSTAIAVAHAGREAPRFVGTVGARLSELIKALDKLGKPSTLLVVYEAGPCGYTLVRELRAKGYRCEVVAPSLIARKPAERVKTDRRDALKLAALARSGDLTTVNVPDEQDEAIRDLCRARVDAVKARLKARQQLKAMLLRHGRRYTGKTSWTAAHERYLATLGFEHPAQDIAFTEYRQAVSEADARVQRLTQALAQQIESWRMLAVVHALMTLRGLDLVAATTVVAELGDMRRFAHPRDLMGYLGLVPSEHSSGTSRRLGEITKTGNGHARRVLVEAAWNYRFAARISRILQVRQEDQPAAVRAIAWRAQLRLCQRYRRLSARGMQPNKVCVAIARELAGFVWDLGRQVTPQASTPATQQH

SEQ ID NO: 240902 - protein, 358 aa, unidentified
MIRLTKKQKWFKQQNLTQKDKIYVGLDVHKKSISVAIWLNGQIELTFNASADYARLIKQLRPIQKAIKLVVYEAGPTGYGLARTMEKAKIPVQVISPANTPRPSKHRSKTDRLDCCELAEFAAKGLLKPVTIPTEQEEADRQLQRLRDQLVSKRRRIRQQIKSFLLQHSIAEPDGLQGWSFAAIDKLQSLPLNIALRFTLDMYLEEMAQIRIYLERTETALQALSEHQRHRRAMKILRSHPGVGPVTAWAFRLEIFRPDRFEQGAEVAGFLGLAPRIRQSGQTTREGPIIKTGRPQLRSKLIEASWVWIRYDAQARKVYNRLCNNTGNANKAIVAMARRLAIRLWKMLCEGQLYRQTG

SEQ ID NO: 240903 - protein, 361 aa, unidentified
MVYCGMDMASVSSYVYVADKVGRKLAAGEIDTSKEGIEGRLRPFVRKGLSIAIEAGNQTAWIYDVLVEMGAIVTVVNPAKVKPIAQSRRKTDKIDAKLLCDLLRVDALPHPVHMPSDPARAMRGVLRARKQLISARTKLCNVVRGMLRQEGIQLPLRALSSYVGWQRVMAREFDRPHLPLIVSAYYESFVTLTRSIRQLERELNAQKRADARAARVETMPKVGQITALTTIGALDDARRFPSSRKAVAYSGLAPTVRSSGERTEYGSISREGRSELRAVWVQVAHLVVRERYLLSGRGESQAGNGCVSGELQDVWYGRKGYVKVETQPEVDVNGVVGSCWRQPAVRGWPSRPESENGRPSD

SEQ ID NO: 240904 - protein, 415 aa, unidentified
MHVQLPADRQVTVGVDTHADQHVGAALDPLGRLLGTQAVPSTAAGAAALLAWARRFGAVERVGIEGTGSYGAGLSRWLRARGVVVVEVARPKRPARRGRGKSDPVDAEAAARAVQAGTATARPKAGTGPIESIRALQAARRSALKARTQAANQPRALVVTAPDDLRARLRRLGLARLVATAAAFRPGAPSTPSAATKLALKSIAARHRRLSAEVAALDAHLGRLVAAAAPDLVALKGVGTDTAATLLVTAGDNPDRLRSEASFAHLCGVAPIPASSGKTVRHRLNRGGDRQANRALHLLAVRRLRWDPATVAYAARRRAEGLSKPEILRCLKRYIARQLYPLLAGHAALGPATLGQGGPRSGPPATPLSGGAAVTRQGRSVAEDPAAGGVDGRRGRSHRVPTPPAPAPRPPIHHP

SEQ ID NO: 240905 - protein, 311 aa, unidentified
MPTTPVHVGVDIAKATFAVRLLNKDLSYPNTAAGHAEFGAALEKLPAPAHVVCEATGGYERALVLALHAAKLAVSVINPRQVRDYARARGQLSKTDRVDAAILADYGATLRPEADTAPTAQQLELAALAGARQDLIELTGIENGRAEHLTLPLLKKQHAARLRLLEKQLAELDRRIDALIAADAALAAKSARMQSVPGVGPVMALTVLALMPELGRITAGQAAALAGVAPFARDSGEFRGQRHICGGRAAVRRVLYMAALSASQHNRILREHYQSLIARGKPAKLALTAIMRKLIVLLNRLLADPHFVLAQ

SEQ ID NO: 240906 - protein, 388 aa, unidentified
MLAAADRTDASTAIQTDLPAIFASLELSRSAWLITSLSPGAGEKMSKHSIRAGDVAGLLMRLAQLKEKARGRTGRDFPIIAIQEAGLDGFWIHRVLQSEGIESHVVDAASILTSRRRRRAKTDGIDGETLVRTLLAYKRGEPRVCAMVKAPTPEEEDRRRICRERKTLVGERVEHVNRIKGLLFAQGVSEYEPLKRNRRARLEELKTGDGRPLPAHLKAQISRELDRLELVLPQLKAVEAERDALLKPVSEGCPAPAAMLAQLKGMGPEFTAILWSEGLFRSFSNRRQLAAFAGLAPTPWQSGSVAHEQGVSKAGNPRLRTTMIQLAWLWLRHQPTSALSVWFQQRVQSNGSKMRKTMIVALARKLLVALWRYSTSGVVIEGAVMKTI

SEQ ID NO: 240907 - protein, 424 aa, unidentified
MKVTYQTCCGVDVHKSFLVATIVKTTGGIEPSYQKKRFSTFNNSILEFKQWLLDNHCHDVCMESTGKYWVPVFNLLEDKINVVIANPKWVKAVKGNKDDTKDSKWIGDLFRLGLVKGSYIPCKKVRILREYTRYRYKLVSCRSSEKNRYQNALTVCNVALDSIVSDIFGKSSTSIIDYLLEQSGTSINHEEIASKLLRSLKSKEDAVIESVEGYQMTDAQKYRMRLVRAHMDYITAEINDVDKMIENMISSNPDFENAVQFLCTIPGVKRDSAITIISETGTDMSQFSSSKRLCCWAGLTPGSNESAGKKKSVRITRAGVYLKPALVQFAHAAVKSDKSPYYKKKYESLVKRRGKKRAIIAIARMILTAIYQMLSTGEQWNPSDLYKIDMPVALVEKQKAKAIKQAKKLLQREGLLPPDEPLAS

SEQ ID NO: 240908 - protein, 369 aa, unidentified
MPRPAYRSRLRHLKQENPPMNVNHYIGFDVHKKTASYCVKTADGTIVEEGKLRATHDALRQWAGKRREPWHGAMEATLFSGWIYDTLRPFAAELQMGHPALMKAIAASKKKNDKLDARKIADMVRCNLLPACYVAPPEIRELRRMLRYRNLVVGQATRMKNKMSGMLMEVGAEYNKRQLHGKQYFTNLLDTLEEVPESVKDLLRLSRGAMEMFETTQQQLLARLGKDPLLAQRVMLLKSIRGVGPVTALTWALEVGDPHRFPSVAHAVSYCGLTSALVSSADKRQRGPISKQRNAHLQTVLVEAAKLAPQWNPQLAAVHAREVARGNRNRATLAVARKLVAYLLAVDKSGQRFAVYHPPAVETEAPKVA

SEQ ID NO: 240909 - protein, 362 aa, unidentified
MSTITIGVDLAKVLFSACEVDVPGHVLRRQDLRREPFALWLAQLPAGTVVAMEACSGAHHWARRCLEHGLQPRIMAAQLVKPYRKSVRSKNDRNDAEAIATAARQGNMRFVPIKDIDRQVRLSWHRVREGYKVESLAIGNRIRGLLAEFGVIVAQSDLALLRLLADLDAQVGLPAEFKELLRDLADHWKQLRLHFDACNARIEAHARQDERCIRLRAIVGIGPITADAAVATVGNAREFKHGREMAAWLGLVPTQHSSGGHARLGEISCHGDAYLRTLLIQGARSSLQRAKAVATEKATPEQLWIRTLDRRMPFGKVIVAIANKHARQIWAMLAHDVDYDPYACLNHPMHQQTREAPTAHAA

SEQ ID NO: 240910 - protein, 322 aa, unidentified
MSVTVLGIDIAKQKFDAALLVDGKTKHKACKNSAEGFEILMVWLEKQGIQKVHACLEATGNYGEDLAIYLHEAGHIVSIVNPARIKGFGQSELIRTKTDKIDAALIGRFCLAMKPGPWIPPSPEIRSLRALVRRVDSLIDMRSQEKNRIGTAHESVIFLIKEHIAYLNQEIEKIRQQIADLIGQDPNLKRKHDLLDSIPGIGKATIPHILAELDDLEKFDHVRQLVAFIGLAPKETLSGSSIKGKPRLCKIGHARLRKALYMPALVSIQCNPVMIAFYNRLKDKGKNGKVIVCAIMRKLVHVIFGVLKSGKKYDPNYKPAFA

SEQ ID NO: 240911 - protein, 309 aa, unidentified
MKEQLVYLGVDVAKSYLDAALGNEQRRLANDAQGHRQLINWINKIPASVQVICESSGGYERALVRALVGAQLKISLVPANRVRQFARASGTLAKTDRIDAKLLGAFGEAIKPGLMSASQLEQEHLRELESQRRHLTRLLVMEQNRGARLSDVYVQRLNRSLINQIKKQIRQLDLLIEKQIEHSAELSIKAQKLTAISGVGMRTAALLLAQMPELGQLNRREVAALVGVAPFNRDSGRMRGKRAIYGGRRSVRHGLYMAALVAARHNPILRGFYLRLRAAGKPAKVALTATMRKLLIVLNSALKPDLIYA

SEQ ID NO: 240912 - protein, 372 aa, unidentified
MPDVISTQPADVRLWVALDVHKLSIVAATLPPAAGQPEVHQIETTRAAIRRFVDRLGGAEGLAVCYEAGPGGFDLLRVLTELGVACDVIAPSLIPVRAGDRVKTDRRDAKKLVRLYRAGELVYVAPPSRETEGLRDLMRCRDDLRRARTSARHRVSKQLLRHGRVYRDGKSQWTKTHRAWVARQRLDDELAQSALHQMLIHLDGLDRQLDALDRDLEQIARSDRWAQTVQILTRFRGIATRTALGLIAEIGDFARFSHPRELCAWLGIVPTEYSSGDQRHRGHITKTGNHHARRLLIEAAWSYQHRPRRPDRGPEPDARAWQAQIRLHQRYRHLTTERGKRSTVATVAVARELAGFLWAAATNQPFAIEAAA

SEQ ID NO: 240913 - protein, 358 aa, unidentified
MNLKKERRPEMKIVRKKDYDKGLETYDHYLALDWSKDNATIARMRSQSKEPQVIKMAADIKEVKAYLKRLSGRKILTIEETTTSHWLYVGLKESVEKILICDAFRNKLLNEGAKTDKIDARKLCQLLRGGLLKEVYHSLNESYKIRKLVSAYEDLVKAGVRVKNQRSALYLAEGLNYKRDKIDNSNELLSFIEETQRRSIELYQNEKKRYENIFYGIKKKHPVIKKLCQISGIGLITAITIYAKVIDARRFANKYKYWSYCGLVKNEKRSGGKLYGKRNPRYSRRLKSAYKTAALAAITHKNDICEYYNYMINQGLNMEDARNGIARYIAKVSYAIMKNGTDYIPYKWRESKESKTAA

SEQ ID NO: 240914 - protein, 427 aa, unidentified
MPYPIAGIDVHKKMLAVVVADVEVDDEYRFERVKVGTSPGELRALADWLVERGVEEVVMESTAQYWRPVWEALEQHWRPQRRARDSAPPLAGTLHLAQAQSNRGPGGRKRDFPDAERLVKRLVAQELTLSFVPDAEQRLWRTVMRRKYQVTRNRVQLQNRLEALLEEAHIKVSSLVSDLLGISARRMLQALADGETDPAALATLATARLRATPEQLRDAFQACPTLHPVYRRLLKLTLEELRVIEDHLGQLDQQMADLLTAHHDAVQRLAEVPGLGVDSAQQIIAEVGATAATFPSSKHLASWMGACPGNEESAGVNYSHRCPKGNRQMRRVLNQAANAAVKAKGTIFAIVYRRLVPRLGHAQAIGAITHRLCRLIWKILHQSVRYEERGPAVSEEAKKVRARKMIRELRSLGYRVEPLRAPSTNPA

SEQ ID NO: 240915 - protein, 415 aa, unidentified
MKKHSNSVKKSESPMKRRNSRAEERRDSSEVMAELVSQLRQQLEMKSVPAAESAGEERDGVRPNLNRLNVGVDLGDQWSNYCILGLGGETLREGQFRTRRQEVGEFFQGLAISRVVIEVGTHSAWVREVIAGLGHEVVVANAQRMEGRKRRRRKNDRIDAAKLARLGRVDPKSLYPIQHRSTEVREDLLVIRVRDSLVESRTKLISTVRGMVKTMGARVQGCSSVSFSGKAAEQIPPEVRETLEPLLRLIQTLSEEIKNYEKRIEKLGNEKYMDTKLLRQVNGVGPVTSLAYVLTLETPQRFKKSRDVGPYLGLVPQQEDSGASQPQLGISKAGDRMLRKLLVGSAHYILGPFGPDTDLRRFGMKLCERGGKNAKKRASVAVARKLAVLLHRLWSSGEVYEPLGYGKTITESAAA

SEQ ID NO: 240916 - protein, 444 aa, unidentified
MSDSLPTVTTEREWAAFAAIDWADQKHFWRLVPAGSQHAEQGELENTPEAVEAWATTLQQRFGGRPIALCLEQSRGPLVYMLTKYAHLVLFPVHPTTAARYRETFCPSGAKADPSDTASLLDLLLRHPERLTPLQPDTTETRLLQFLVERRRKIVDEKTRQKNRLTDCLKLYFPQLLHWFDDVSGPLVGALLERWPNLEQLQRSHPGTLRKFFHQQNCRGEELIEERISAIYQAIPATRDAAVLEAGAITARGLVAVLTTLRSNIAELDRRIAQLVAAHPEAALFDSLPGAGPALIPRLIVAFGTRRERYDNAYQMQCYSGIAPVKAASGNTQRVHIRRACPKFLRQTFHEFASHSIGQSEWARDYYQFQRDNHKSHQAAVRALAYKWIRIIFRCWKDGKPYDEQVYLQSLRRRRSLLGPALAGVTGPGWKTVAGFQKFSENPS

SEQ ID NO: 240917 - protein, 450 aa, unidentified
MAYDFVIGMDVGKYFHHACVLDPQGRQVLSKRINQHEGSLRKLFGKFLANDAEVLVVVDQPNNIGRLTVAVAQAMGADVRYLPGLAMRQLSRIHVGNSKTDVRDAYVIAHAGLNLPDALRSVDRVEEVFLQLKVLNGIDEDLARAYTRLINQLRSALVGTYPAFEHVLRGQMIHRKWILHLLAKYGGPTKIRRVGKARLTAFARGHRARNPEPVIGAMLAAIHGQTVSIAGAEYAELGVAMSAKDALAKLEHRKEIEAQVLELIQDIPQTEILLSMPGIGPRSAAQILMTVGDMSDFPNAAHLASYAGLTPQTNQSGTSIMSNSPNRAGNKKLKNALWQSSFASIRFHERSRQFYERKRKEGKKHNAAVVALARRRLNVLFAMMRSGELYRDIPTASEASASNPSQCASCSDEAITGFMYALWRMAQASIAPRKEQPRQILASRFIPVRS

SEQ ID NO: 240918 - protein, 499 aa, unidentified
MPQRHQDSKLKHPSAPISTASVAGHSKKKSKKSDRSVPAKDPTVGLTITHPNAAGIDVGGDTHWVALPPGRVDKTVRQFGCFTSQLETLADWLIEHKIDTVVMESTGIYWVILYEILEQRGLKVYLINARLAKKLLSRKTDLQDCQWLQRLHAYGLLNNSFRAPEEIRVLRSYLRLRERATMAASQAVQHMQKALVEMNVQLSTVISDITGETGLRIIDAILTGERDPVVLAKMKDPRIKASWQTLAESLRGHWKDEHVFALEQARLSWDHFQEQSAQCQERVEAQLRRLNTDKEPTPQAAPSPSSEPEPPSTGPVDQLPSAAQKLPPPFDLRAQLKQMAGVDLCQINGIKEQTAQVVLSEVGTDMRAWATEKHFSSWLALCPEHEISGGKILKRGRKRRVHQRAAQALRMAAYGLERSDSAHGAKYRRLKGRLGAPKAVVAMAHHLARLVYRMLKHGEEYVDNGAAWYEARYLAQLRKWLEKKAADLKLKLVPIEEVA

SEQ ID NO: 240919 - protein, 383 aa, unidentified
MGEGTMRFVGLDVHAETIAVAVAEGDGGEVRSLGTIPNTAEAVAALLRRQGPAGRLRVCYEAGPCGYVLSRQLAELGIECVVVAPSLVPTKPGDKVKTDRRDALKLARLHRGGDLTAVWVPDAAHEALRDLTRARETALGEVQRGRARLRSFLLRLGLRPPAGVRPGTVRHRDWLAQLKPGQPAHRAVLAEALTALDQATARLTRLEDAIAEQAQTSPMAPLLGALQTLRGVAAVTAATVVAELGDLTRFASPRQLMAYAGLVPGEHSSGGRTRRGGITKTGNAHVRRVVVEAAWHYRHPPRVGATLRRRQAGQPAAAVAIAWTAQGRLHQRFRRLLGRGKLKQEAVVAVARELLGFLWAIARQVDAATARPAAAEQAAAVAA

SEQ ID NO: 240920 - protein, 356 aa, unidentified
MPIPFKRYKGMKKIFIGIDFSKEKFDATVIKAEGVEECAERQHEVFDNKVSGFRRLIRWVKSVVDEQDTGLWLFCGENTGGYSRALCNYLYGSGYDMWLENALSIKRSSALQRTKSDKADAGVIAEYAMRNYDQMRLYKPLDKNLERLREVFLYRHNLVKLKASMTVRKGEKKLTQEKSDISRFMAQSSRHLISEFNKKIAECDRRIQKIIAGDEDLRRNFEIITSVPGVGTQNAVCLMVYTDNFGRFDYNSRKIACYYGVAPFGRQSGTSVNTPPHVSPFANKLIKALLTQAALASVNFCPQMAVYYRRLVDAGKKKPVAVNNVKNKLLHIITAMIRKGERYNPDHDYYAALKVA

SEQ ID NO: 240921 - protein, 455 aa, unidentified
MKHEPEEIPDAEHELVIERVAAVDVAKASGKVCVRVPGKAGRRVSRVWDVAATTAAVTELAEDLVELGVERVTVESTSDYWRIWYYLLEAAGLEVQLVNARDVKNVPGRAKTDKLDAVWLAKLTEKGLLRPSFVPPTEIRRLRDYTRLRADLTHDRSRQVQRLEKLLEDALIKLSTVATDIMGVSGRAMIEALIAGQRDAKVLAGLARGRMKTKRAALIEALSGRFDDHHAELARMLLDQIDALTAQIDTLTARIEQLLAAMPEAQPVDPRRDGPASGHPVGVTADTLAECARLTTVERLDEIAGIGEHNAQVIIAEIGLDMSRFPTPAHLVSWAKLCPRTIQSGPVTRGGRTGKGNPYLKGVLGDAAAAAAKTNTFLGQRYRRIVKRRGKLKALVAVARSILVIVWNLLNDPTARFHDLGPDYHTNRIATERRMCNHIAQLTAMGYRVTLEPAA

SEQ ID NO: 240922 - protein, 417 aa, unidentified
MQIETDEPEIIERVAALDVSKAEVVCCARVPGPRGQRMQEVRTVSTMTAALLGLGDWLAGLGVTRVVMEATSDYWRAPFYLLEDRFETWLVNAHDVKHLPGRPKTDRLDAVWLCKVAERQMLRPSFVPPPAIRQLRDLTRYRVDLLAVRTAEKQRVEKLLEDALIKLSVVVSDAFGVSGRAMMAALIAGERDPVVLAALARGSMRSKTARLTEALTGRFTEHHAFLLTQMLQRVDAVTADIATVQARIDAQIGELAPAVTRLDAIPGIGPVAAQMILAEIGTDMGRFPTPGHLTSWARFAPGVSESAGRPTGNSGTGKGNRYLARVVGEAAVSAARTDTFLGERYRRIARRRGKKRAIVAVGRSILVIIWALLSDEEAQFIDLGPDFYAARTNPERKVRQHIRELQALGYAVTLNPA

SEQ ID NO: 240923 - protein, 423 aa, unidentified
MESPFQLYIGIDWAKDDYQICVIGPDATVLSKLKVPHNGTAIQDFVDKLTAMSGNCPSSAAVAIEVPRGAIVEALLDRNFAVFSINPKQMDRFRDRHSVGGAKDDPLDAFVAADSLRTDLKLFRRLGIDAPSTIRLPELSRADEQLRQESNRVLNQVCEQLHRYYPQLLALSPSFDQEWIWALWQIAPLPAKGAKLSASRIEKLLKQHRVRKYTAADVQHKLRTPPLPVAPGVADAAAEHLGILMPRVHLLSDQRKQIQKRLAGLLDELAEPDPGRPCSSADAQTIEHRDARILLSLPGIGTIIGATMLAEAGQAIRDRDYHAIRCYGGPAPITRKSGRKRSVTMRRSCNLRLRNALHQWAFASITCDERSHQHYPKLRAAGHTHGRALRGIADRWLSVLISMLKHGELFDPTRWQPTTNPVN

SEQ ID NO: 240924 - protein, 476 aa, unidentified
MAALQKADEKLNRQQRKDLVRRLWSSNPGLEVVHRNAAGIDVGNEEHYVAIAPTQDEVPVRRFNCFTAELIRMAVWLKGRGVQTVAMQSTGVYWIPLYDILEEHGIEVYLVNARDTKNLPGRKTDVQESQWLLKLHTYGLLRNSFRPASEIRVLRAYWRQRDQHVKTAGQCVQRIQKALTQMNLQLANVISDLSGKTGLQILRAVVNGERDPAKLADFRDPRIKASREDIIASLRGNWRAELLFQVKQELARYDFCQTQIEECDRELEQQLQSLPELRAGEENSGTKETQRSPKKRKRRKDGNIPRFDLHHELQRISGVDLTRIDGIDVMTGQTVISEVGLDMSRWPSENHFASWLGLCPSNELSGGRILKKRTRKVVNRAATAFRMAASTLRTSQSYLGAKFRRLRSRLGPPKAITAMARTLAILFYRMLKFGQDYLDRGTEFYEQRQRNQQLQYLQKKAAQLGLQVVALPQTPK

SEQ ID NO: 240925 - protein, 344 aa, unidentified
MENYAGIDVSLELSSVCVLDAQGKILKEAKVASEPDAFVEFFEKLGFAVKRIGLEAGPLSPWLHAGLKRAGFETVLLETRHVKAALSAMTVKTDRKDARGIAQLIRMGWFRPVHAKSIGAQEIRALLVARKQLLGRLIDVELSIRGILRGFGLKVGPVTRRNFEARIRELVAGQATLERVATAMLSARLALKAEYGRLHKAVLAIVRDDAVCRRLMTVPGAGPLVAITYKSAIDDPHRIVKSKAAGALFGLTPKKYQSGEKDVTGGITLAGDEIVRTVLYEAANVLLSRVTRFSKLKRWGMDVAKRRGSKRAKVALARKLAVILHRIWVDGTTYRWAEAGSIAA

SEQ ID NO: 240926 - protein, 345 aa, unidentified
MDKIITIGLDIAKQVFQVHGVDAAGGLVLSRQLRRGEVLKFFAKLPGCVVGLEACASAHYWAREIVALGHEVRLMPPTRVKAYGRRGRKNDRADAAACCEAVTRPSMCFVPIKTPDQQAALMLHRARQMLIEQRTRLGNAIRAHLGELGIVARKGAGGLAALLQMLETAQDERVPAAIRPILQPLVEQWRCAAAQIAGLDRQIAAWHASNEASRRLATIPQIGPIIASALLATAGDATRFKNGRQFAAWIGLVPSQNSTGGKQRLGAITKAGDRYLRQLLVVAASGMIRRVRANPLLSPWLAQLLARKPAKQAAVALANKLARIAWALLATGQTYRTPTPADAKP

SEQ ID NO: 240927 - protein, 386 aa, unidentified
MPQLNDLSRSLTPFVQGNTLVAVIELSLSSWLVAGVVPGVERQPLKKLEPDETGLLRLLQRWRDEAVKGGCMIERIVVAYEAGRDGFWLARWLQVQGIEAHVIHSSSVAVSREHRRAKTDRLDTAMLRRVFMGWLRGERGHCGMVGVPTLEEEDAKRPHRERENLVGERTRIINRMKAALIRLGIRGFKPELRRAPKKLDALRTPEDLPIPPNTLDEIRRDLARLAMVREQIDLIEQARLARIEQAPDTGPNAMVRLLASIVGMGVETADMLVQEVLSRNLRDRRAVARYAGLTGSPDESGAKRREKGLAKSGNARVRRGLVQLAWRFLLFQKDSALAQWYRARTGVQGVRKTVLIVALARKLLIALWRMVTIGEVPHGVVLRATA

SEQ ID NO: 240928 - protein, 370 aa, unidentified
MKSIIYVGMDVHSTNCTLASYTFENDRPFAVTQVEPDYKHILNYLKQVQKNYGGPCEFLCGYEAGCLGFTLYEQLKSHNVPCVILAPSKMPKVKNEIKTDKRDAMKIAKCLAYNDYSAVYVPTKEDHQVKEYIRMRDAHKAALKKVKQQILAFCLRNGFQFTAGKKYWTEKHMAWLKGLKMDEMLREVLDEYLATYQASLDKIERFDRRIEELAANSRYAEKVKMLSCFIGIRTHTALSLLVETGDFRRFAKAEQYAAFLGLVPGEHSSGCDNNHLGITKAGNSHLRRLLVESAQCLARGRVGYKSKALKAKQYGNPAQVIAYADRANERLRRKFYHLTLKLKKKRNIAIAAVARELSCFIWGMMTEHIA

SEQ ID NO: 240929 - protein, 340 aa, unidentified
MEGVAVIGLDLAKSVFQVHGIDAEGGVVLRRRLTRAKLVPFFAGLRSCLVGMESCASANYWARELAALGHEVRLMPPRYVKPYVKRSKNDASDAEAICEAVTRPTMRFVGTKSREQQGVLVLHRARLMLTRQRTQVGNAIRGHLAEFGIIAPVGREGLDRLVAVIADESDHRLPPCARTCLAMLVQQYQIVVANLLETDRAIRADSRSSELGRRLQEIPGVGPLVASALIASVPDPHVFKTGRCLSAWLGLVPRQHSSGGKERLGGITKAGDTYLRSMLFVGAMAVIRHAERYGTRKPWLIKLLSRRTPRIAAIALANRIGRTAWALMTSGERYREPAVA

SEQ ID NO: 240930 - protein, 355 aa, unidentified
MMNITTVGVDLAKEVITVCTMDTHGHVLKIRDLRAVEFSAWLVQLPAGTVLGMEACSSAHHWARKMQTMGLVPKLMAAEFVLPFRKSRSSKNDHNDAEAIAIAVKQPQMRFVTIKTEAQQTRLAWHRCREGWKEERTALINRTRGLLLEFGHPLARSSKAFTIGLQAALHHDALPTQFRTLLTHVQQQLQQLDQQLAQCDRSIALSAKHDESSQRLQAQPGIGPISADALTATVGNARDFKNGRQFAAWLGLTPRQYSSGGKTKLGRISRRGDAYLRTLLVQGAKSTLQSVLKKAPDLLSHMQQWILKLYGRVGYHKTLVAIANKHARQVWAMLAKGEAYDPEAWKSISSALSMQ

SEQ ID NO: 240931 - protein, 425 aa, unidentified
MKKTGMEKLEAITAKTLIGGIDIAKKVHWARFVDYRGIPIGKAIRFENNKAGFEHIVAETERLRKAHGMDYVLLGMEPTGPYWKALAWRLKGLGLRVVTVNSHHTKQAKSLDDNSPTKNDKKDALVIARLVKDGRYFEPYLPEDVFGELRVSSNTRIALMKRMNGVKNRVMGILDEYFPEFTDVFRKPLKGKASMQILKSCPFPVHILELGVEGLLAEVKKAVKKTVGKKKVSALLEAARDSVGVGYGLESARMQMKMLIEELEFLQKQLEEAEARMRVLLEMTGYAELLLGIDGVGVVSAASFLGEIGDPLRFDSPRQISRMAGYNLVENSSGQSKSGTSISKRGRKQLRALLYRMAMVKNSELKLLYHHLKTRRDNPLKGKQALVVVSKKIITIIYQILKTRKAYEPALVLGAVRKQQLGLAA

SEQ ID NO: 240932 - protein, 408 aa, unidentified
MIYVGIDIAKRGHVLSAVDDDGRVVVESFGFANTESGFARLRERLGEAGAGPDGSLVGMEATGHYWVAPFDFLTSLGYDVAVINPIQTDAFRDVWTVRRVKTDAVDAAMIADLVRYKRFEPSALGDEATDELRSLARYRLSLVERSTALKNRATAVLDRVFPELDGLFSGSFGPTERELLVRCATPRQVLSTDVRTLARILREASGGNCGRDKAERLKAAARTSVGVNFGSEALAFELRMLMEELEFVRGQIGEVESELARLLDGTSGRWLLTIPGVGLALAATIAGEIGDPNRFGDPHQLMAYAGMDPTRSESGETVASDGAMSKRGSAPLRWALMQAADSVRRHDPYFGDYYAKKKGEDRKHHYVALSAVARKLMGVCLAVMKEQRPYEPTPPRHHQPGHLQEAAK

SEQ ID NO: 240933 - protein, 369 aa, unidentified
MAKSITYVGLDVHKGTIMVALAEAGMRGEVREYGKIPNTPAALKALAAKLAATGRDLRFCYEAGPCGYGIHRQLTEAGHECAVVAPSLIPRKPGERIKTDRRDARNLAKLHRAGELTAVWVPDQAHEAMRDLVRARQAAVRTLRQARQQLSGFLLRHGHHYHRPAWTQLHRRWLASLKFEQAVHYIVLEDCIAAIEAATARRDRLETHIEAALPEWSLAPVVQALQALRGVGLVAAATLVAELGDITRFTNPRQLMAYLGLVPSEHSSGRTRRQGGITKAGNGAARRMLIEAAWSYRFPARISREQLLRQERLAKPIRDIAWKAQERLCRRYRTLARAGKLPTVITAAIARELSGFIWAIAKQVQPVAT

SEQ ID NO: 240934 - protein, 350 aa, unidentified
MLIIGCDYHPAFQQIAFVDSDTGELQEGRLQHREEAEKFYRDLAAQGMKVRVGIEASGHARWFERLLAELNLELWIGDAAEIRAKRVRKQKTDRQDAQHILSLLLEDRFPQIWVPSWENRDLRQLLWHRHRMVQARTRIMNQLQGVALNEGLRCKKRLWRESGREQLEAFRLARWASRRRHDLLEMLDRLTPTIAELTQAIEQEVEKCPAAQRLRTHPGVGPLTALAFVLIIGRAERFQCGKQVASYLGLVPLEKSSGNQRRLGHITKQGSSLLRFLLVEAAQVTARSLPEWRSKYYHLTMRRGRKIAKVAMARKLSVRLYWMMSKEWDYGQLTKFGSHAGKLGTGDGVK

SEQ ID NO: 240935 - protein, 368 aa, unidentified
MKNITTFVGVDAHKKDLFIAMLVGDQATPVTWQLANEPQAVRRLIRKLEREAPGPVRVCYEAGPGGYALQRQLTTPRVACQVIAPSLVPRKPGERIKTNRRDARKLAELFRAGLLTEVRPPTPEDEAVRDLARARDDAREDLQRARHRLGKLLLRRGLHYGGRNWTKPHRRWIASLAWTQPAERVVVDDYVLAIDHLEARLIELDAKLAEIAETDPYREPVGWLRCFRGIDTLTAMLILAELHDFRRFQAPAALMAYLGLVPGEHSTGEKHRRGRITRTGNALVRRLLVETAWHYQHRAGVGVALARRRKGQPGRVIAIADKAQQRLCRRFRRLAEHHKPAPKVAVAIARELAGFLWAALQPAPLPAP

SEQ ID NO: 240936 - protein, 351 aa, unidentified
MMVFGVDPHKGSHTAAGVDEMGRKAAHKKVRSGREGSRELIAWARDLAPGGRRWAVEDVRHVASGLVRELLAAGEEVVFVPTRMMAAARAGGRESGKSDPIDALANARAALREDAWLPAARLDARVLEVRRLADHRDDLVAERTRTVNRLRWLVHDLDPALAPPPRSLAAARARELLAAGLRALPASAGRRVALSQLEAVARLSAEVSALETDLRALLEDLCPALLGICGIGTVTAARILGETGDVRRFRSSAAYARHNGTAPIPASSGRSDVHRLNRGGNRQVNAAVHRAALTQARCHQPARDLLERRAGTIRETRKAALRALKRHLSDVIYRALRADAWRLDQPQHKAA

SEQ ID NO: 240937 - protein, 394 aa, unidentified
MRSVGLDLGVRHIAYCEVADGKVVDRCTVRSLSELASRIGPDSAPARVAFEACREGWHVHTKLAEWGHEPRMLDTTRIRQLGVGQHSRKNDAIDAEAIAQAVDAGRFPEAHVLSPERRALRAQLSVRGALVETRAQYVTTIRGLARAAGVLLPTCATEDFVTKLEKTMLDEPTRHLIAPLVALLRTIEPELARVEKTLADFAQKDPILNLCATVPGVGLIVAATFVSVIDEAKRFKNAHAVGAYLGLVPSESTTGGPNKRRLGSITKQGNSMARAMLVQAAWLILRSRDRDDPLKRWGEHLANTRGKRIAVVALARKLAGVLWAMWRDGTVYDRAEQAEKTAHGLKVDARKQHHRADALERAAKKLRRKEVTENASTSKRVSKARSTSSEMSTT

SEQ ID NO: 240938 - protein, 393 aa, unidentified
MVVSVGIDVSKNKHDCFIVSSEGEVLADVFTIPNNMDGFYALLEKIRACTTPQDKIKVGLEATGHYSYNILGFLLDNGLATYVLNPLRTNLYRKSLSLRKTKTDRVDARTIAAMLLSDVGLKPYTDTAYHNEELKSLTRYRFDKVKERAKLKSSISRLVCILFPELEKLVSSLHLATVYALLEEFPGSKQIAKAHLTRLKTLLGNASKGRYGRDMAVTIRSAAQNSVGSCMPAKSLELQHTIRLIRELDAEIAEIEAEIETMMDKIQSPITTIPGMGSRMAAMILAEIGDFSRFESPDKLLAYAGMSPSTYQSGQLKNCYPHMEKRGSRYLRYALYNAAKYVCHWDPTFAAYLAKKRDEGKHYNVALSHATKKLVRLLFALERSRQPYCSLAA

SEQ ID NO: 240939 - protein, 400 aa, unidentified
MHLTANISVPQKNFIAIDLHSDNAVICVRRNALNKAGELVGKNIWCGRVSIRDGLDTFIKVLLPHCQDFDHVAVVESTYNWYCLADVFEERGWLLRIADPSTVSQTNLKASDDRTDAQYLAERLRVGSLKHYLPLSYSSRALRDLCRYRMAMVQDCASLKIKLINLYRNQLSKNLRVADLLERCRSHMQPNYRFDPGILEEFKDPNIRLRVAFEISRIAMLEEMIEECNAEIQQQCKDQELVKLCKTIPGCGPVFSAVICTEIGTMQRFKSAGDFVSYCRLCSTSKLSNGKSKGLGNAKNGNAYLSWAFTEVAQYASRNPVIREILQRLLRKYGGLRVKAIRTLAAKIARVTFYVLKNKQPFNAAKCFGIELTKSIKKKSAHKPLREDAAVVLPTVAGQA

SEQ ID NO: 240940 - protein, 462 aa, unidentified
MTRHKARRSKKDAPPLPTSLPAIRPMVAGIDVGSAQHWVCGPPRPDGAPNVRVFGTTTVQLQELAAWLAEQHVESAAMESTYVYWIPIYELLESQGIEVLLVNARQLHHVPGRKTDFSDCQWLQLLHSCGLLRGSFRPGEAITRLRALQRQLANLVAEQTRCVQWMQKALDQMNVQVHRAVTDLTGVTGMAIVRAIVGGERDPTRLAEHRDPRCHKSADEIARYLTGTWRDEHLFNLASALRLFDALETEVASYDARLLTEMAALQPPERQEQPLPAHPSPAKEKALTARGQQQTRTALWRFAGVDLTRIDGLSTGAAQTILTEVGPNLSAFPSEDHFVSWLRLCPRVPISGGKPLKKRRNSLGANRIAGVLRMAATSLQRSKTALGATFRRVARHKGGAVAVFATARQLARLIYRMLRYGHDYVDIGEQAYESQFQIRRLSAITETARDLGYILVPKIALS

SEQ ID NO: 240941 - protein, 330 aa, unidentified
MQKVQHIIGADLSKKTIDLFCHLKEAYLKIDNNLQGFKKLLKWISQQQINPFELIIVMEHTGLYSFRFEEFLHRQQIFFTKVSALTIKHSIGLVRGKSDKIDASRIAAYGYEKKDKLSAEPQTSKELQRLQLLYATRERLVKQKVGLINAVKEYRNIGLLQNDPVLKCQQRLIKNYEKEIAKLEAQIDNVFKSNPSLQKNHLLLQSIKGVGKVLATATIIKTRNFTRFSNARKFACFCGTAPFEHTSGTSIKGRTRVSHLADKQMKTLLDLSAKTAIQYDKELREYYLNRTQNGKPKMSTINVVRNKILYRMFAVIKRQTPFIENYLQVA

SEQ ID NO: 240942 - protein, 374 aa, unidentified
MHVAVGQPTQEVKETPMNSVGLDVHKTRCVACVKTQEGRILEEFAFQNNPHGHMELITHLKAYPDVQVAIESTGNLWIPIYDRLEDEHIHTVLTNPKKTRMIAEAKIKTDKLDARILADLLRANLLSASYVPPPEIRMQRSIIRERARLTQLRTIIKNRIHTLLDKHAYKSPFTDLFGKHGLEWLAKLELPAGDRILLEVNLEQLNSLNHSITRLTESIAASAIENPEVKLLMGFTGIDYYSAMLLINEIRPIARFSSPKKLVSYAGLAPSTRQSGNHTTHGPITKEGNSHIRWILVEAAQHASRHDPRLSQFYMRIMKRRGHNRALVAVARKMLVTIYHVLNHHSQYRGLRSELFENKIRRLERITNSSLQTA

SEQ ID NO: 240943 - protein, 311 aa, unidentified
MDAQFIGIDVSKDRLDVHAHPSGEAFAVARNGQGLALLVERLRGLETALVAVEATGGFETVVAAGLAGAGLPVVVVNPAQVRHYAQALGQRAKTDPIDAAVIARFVAATKPALRVLPDEMTRLLADLVARRRQIVEMMAAEGQRERRADKRLKKSIARLRKALEKELNELDADIDDHVRGSPVWAEKEDLLASVPGVGPVIARTLIAELPELGTLDRRQIAALAGLAPWTRQSGQWKGRSFIGGGRKSVRSVLFIGALVAARYNPTLKAFRDKLVAAGKPKMLATIAVARKLLTILNAILRDKTPWRHENA

SEQ ID NO: 240944 - protein, 400 aa, unidentified
MDKDRIVAGLDVHKDTIYLCVMDNTEAVIFAKVYGTLTPDLELMCSEMVSHGVTEAAMESTSTYWVPVWNALCESMSLKLVNPYFIKQLPGRKSDVKDAQWIAECLLKNLIRGSFVPDKRVQDMRKYNRRIFDLNEDLTYNSNKQDAALQRCGFRLSNYVSRVNGKSYQKCVRAIITGITDPEEPVKLIHGKTLRKYGRNIIKDAVTGDFHQADICLLKQYAELIEVIERQIEECRNALIAMCQEHFPKQFKRLQSIPGVKERAASAIIAETGADMKPFEKATNLVGWCGLKPRNDISNNKVKSNRTTHGNRFLRQILIEISWVASRTRNCFFSNFSYVQCTQRHKNKMKIQVAIARKLLVAVWHMLTKDEDFIDVYLKRLEKQAEWQNDIQALESLLVG

SEQ ID NO: 240945 - protein, 480 aa, unidentified
MIKSVGIDLAGTGEHKVRCLDEGAQMCDGLSFQTTPEGLAKLEERIFGDGSNPVIVFEPTGLAWLIVAIYLKARHPDCRLVRVQARKVVALRKYLRRSSKSDKIDALTLAKMPFIDPEQLEEIYLPPAKIYAIQRLARQRKRLESEIGSRKKRIGSIVDGYFPGMRQAFSDPWSAHARAFLRSRLDPLAVVHAGEKALHAFLTKARQHGKADAVESHLVYLACQDAATLYKLSSSVGTIDEDFFSALQDEISRELRLMEMEEAESEAIAKRLEELYHELHPSDNLRTIPGVGEHTAPIFLAVVGDPARFRSQSAFANYSGVVPAAKQSSGAEAKGLRMTKAGPAIMKWALYQSSQIGRRGDPQLACVYYREMVHYGKNHKQAMGAVMSHIGARVLAVLREDKPYELRDIDGRPITREEARRLILLNYQVPEEIKRERRRRKQVTGKAVKSGRRNREMAAHRTNEAATAPQPVVATAISQN

SEQ ID NO: 240946 - protein, 414 aa, unidentified
MEVIHPRCAGIDISKKDAKVCVRIQGRGSRSTTSTVTTWGAMTGQILDLKDHLLAEHVDLVVMEATGDYWRPFYYLLEEDGLNIMLVNARDARNVPGRKTDVSDAAWLADLGAHGLVRASFVPPAPIRELRELTRARTIITRERAREIQRLEKLLEDACIKLSSVATDITGVSGRLMLQALIDGTTDPRALADLAQRRMRSKIPELTEALTGRFTAHHRYMTAMYLRRIDAHTTDINDLSGRIEAVMEPFRLARELLMSIPGFSTTIAEVFIAETGADMAVFPSAGQLASWAGTSPGSNESAGRVKSTKTRPGNRYLKGALGIAALSASRSNNTYFAAKYRRIASRRGPSKALVAVEHAMLTAAWHMLTTGELYRDPGADYFICRTPARMTARAISQLESLGYTVTIRPLQETA

SEQ ID NO: 240947 - protein, 433 aa, unidentified
MEDVHEEPLFVQRVAGLDIAKAEVEVTIRVPSDTSAGRRQQETRTFGTTRRQLLNLADWLRCWGVTKAGMEATSDYWKPVFFLLESQGLDCDLYNAAQVKALPGRPKTDRADSIWLAKITERGMIASSFVPPAPVRRLRTHTRYRRHLTQARTAEKQRAEKLLEDGHLKLSSVISDIHGVSGRDMLDALAAGQRDPRALAQLARGSMRGKIRRLEEALECAFFTEEHAAVLAMMLAVIDHYTAQISQLTTAIEELAEPWLPQIAQLDAVPGIGTVCAQDIIAEIGTDMTVFPTASHLVSWAKWSPQVRQSAGKRSGSSATGRGNPYLGAALGEAAISAGNTQSFLGARYRKLTRRMPRKKALVATGNSMLTVIHALLSDPRAIYTDLGADYYDQRLHHHHQTRGHIKSLERLGYKVTIETINPSTGELQPAAS

SEQ ID NO: 240948 - protein, 382 aa, unidentified
MSIKRILVNTIDTDLEYEVIGIDLAKNCVSAILLTTDGEIFGIDRLDYQELEKSAQELSPTIFAMEPCTEMNYMVQKLEDWGHHCIVISGKNVKDYVESHFSNQKTDLNDAQALAFLTKDTQLRTVKAKDPEQLKYASLTTLREQYVKQYRQTMVSLKGICQVWGLSISKGISGKARLKDMIENHAAFPAELRTALVGMVAHAQAVQKDLKSVTKILEELAKKDKACQLIQTVPGLGTICSCRLRATVGDIQRFKHPKDFPAYYGLVPRSMATGHNEKKGKITHRGDKTMRSLMVQGAGIVINQATKGNLHSKQLTKWILKKQKEKMPWGKLVCAVAAKLLRIVRAILISGKPYNPKIAGVAKCSLPKASLSLIHISEPTRH

SEQ ID NO: 240949 - protein, 326 aa, unidentified
MNLSIVLGVDIAKLKFDVCLIKENGKAKHKVFANKTHGFEQLVVWLNSHTVAGLHVCLEATGTYGEALAVHLFDAGLTVSVVNPAQVKAFAASRLTRTKTDKVDAELIARFCLAHAPQAWRPPAPEVRGLQALVRRLESLIEMRVSEENRLSSGVSIEAVRDSLEEHIAYLVAEIKQTELLIREHINNHPNLKQKSDLLDSIPGIGATTAARLLAEITDFTQYQSARQVAAYAGLVPRERRSGSSVRGRTCLSKIGNARLRKALYFPAMTALRSSGFFQQWASGMRERGKSKMAVIGAAMRKLIHLAYGVLKTGKPFDPEWTTKIA

SEQ ID NO: 240950 - protein, 409 aa, unidentified
MKMAGIDVHKKVLMVVVVDTSALQEKPARRRFVTLPSELQRFRIWLQEQGVEEAVMESTAQYWRSVWLELEPHMGLHLAQAFSNRAPRGRKHDFKDAERLVRRLMADELILSFVPNGEQRIWRSLTRMKVQLTRDRVRLQNQMECLLEEMRIKLSIVVSNLLGASGLRILHALAQGETDPKKLAELGDERLHCTEEQLVDALTGRVQPMHRGMLALQLQRLQLIDQQMAQLNHMIAQAMKSHQDAVIRLAEVPGLGVDSAQQIIAEVGAQASTFSSAAELAAWVGTCPGKEESAEQNQSSRSAKGNKYLRRVLNQAAHAAVAKKGCHFQVVFRRLMPRLGYKSAIWAVANRLCRVVWKILHEGVRFIEQGREVGPREKKQRAQLLARALRKLGYEVTITPINQLAPKPA

SEQ ID NO: 240951 - protein, 349 aa, unidentified
MSEAYDGPQVVGMDLHRRRSVLVRMTADGRKLETARITNSPAELRRVIARAGKRPQVVLEATYGWYWAADTLAAAGAQVHLAHPLGVKAFAYRRVKNDEKDAADLADLLRMGRLPEAWIAPAEIRELRELTRYRIKVVRLRTSCKDQVHAVLAKLGIEVTCSDIFGVAGSAWLDGLVLPQPYKGKVASLRTLAAELTAEITLLEAAIADLLAHHDGYHAIQALPGIGPVLAAVLVAEIGDITRFATPARLCSWAGLTPRHRESDTKVRRGHITKQGSPLVRWALVEAIQHVPAGHPLRRHKEDILARRGDQAKNIAKIAVARQLLTWVFYAKRDGQVRDLTPATGGKAA

SEQ ID NO: 240952 - protein, 353 aa, unidentified
MTTMTDPGTRVTGGVDTHRDVHVVAALDERGGRLGVEAFAADAAGYRKSLRWLRSFGTVERVGVEGTGTYGAGLARYLAGQGVAVIEVTCPNRQRRRSHGKSDPVDALSAARAAQGGEATAEPKTRTGNVEAIRALRVARRSATKARNDALNQMRALLVTGPDELRAAYRGTTVWRMVHAAARLRPSDPTTPTGATKFALRDLARRVQTLEAEIDTLDAVLVPLVTVTAPELIARHGVGPETAGALLVCAGDNPHRLGSEAKFAHLCGTSPIDASSGLVVRKRLNRGGDRQANEALWRIVMVRMVSDARTRHYVERRTKEGRSKREIMRCLKRYVARELYPLLAALHEPLDNR

SEQ ID NO: 240953 - protein, 452 aa, unidentified
MPARKDKTMQYQKVLKMLESIPYLSVGLDVGADFTWMSIMLPNGTLTGKPFKIVHSDPQSRELAVAKIKEAQEAYSLESRCFLESTGIYHIPLLCFLRDKGFDCSVINPIITKNSTNMNVRKLHNDKFDSKKAAKVGLDASLKTSIIPDDAVIDLRNLVRDYYYFKDLQSAVVLKLTAELKVSFPAYRNVFCKATTQTSLKLLDAYPLAQDLLAAPKGTVVEMIRSTARFGEKYALAKYDALYAAAEDAAIFGRALPSNALRIRLYIKLYREYQEHLDGILEELHKAVDRLKGTPVHNRISLLQTLPGIGFLSAVVLLAEMGSFDLFSPPKKLYAYFGMDPGVNDSGKFHGDRVHMSKRGSSLARRILHMAAINNLKVDKAAKMPVNPVIYDYYVRKCAGKKKIVAVGAVMHKICNTIFAMLRDNKPFELITPEEHCQRYAAEHQGSVSTAA

SEQ ID NO: 240954 - protein, 337 aa, unidentified
MQTYQNFIGIDVSKAHLDVALIQNAKRVSHTQIKNNIETISAYLEELKEQIDLSETLFCLESTGHYINFLVTTLVSFECSVWVENALQIKKSMGATREKNDEIDSERIGLYAFRFQDQVRLYSPVNENIAVLKTLQTLRKKHVVHRQELETYAKETKAFSKKAINEVIDQHTQTLLEYLTLQIENIEKQMLEIIQNDEELKEIYQLTTSVTGVGKVTAVHLIVMTEGFTKFDTAKQLACYAGVVPFERSSGSFKGKARVSNRANKTLKTALHMCALSASRAKGELNDYFIRKVAEGKNKMSVINAIRNKIIQRVFACVKNKIPYDKNGLNFNNFSKG

SEQ ID NO: 240955 - protein, 344 aa, unidentified
MPSIVGGLDIHRKQLTFDYLDTGTGEVKRGQIAPADREHLRRWLGRFENVEGVAFAAEACTGWRYVVEELQRAQVEPHLAEPADTAAARGRKKRAKTDKTDARLLRELLAAGRVPECWIPPAQVLECRALLEFYHDLRRDHTAWVQRVHATLFHQGAPAFHALGEAGGPQQLTALAREHLSVAGQAQIAVCLRTLDALETDLETMRRHLVSVARHVRGAKVLAESIYGVGPITGLALTCWLGGAGRFTSARKAVRFCGLDVTVYSSAGKRSPGHLSRQGPPVLRWCTYEAGKTHARAAAPDHPYYASVKDRIDGKRAALAEARKIIRRACHILTELGDNAFTAV

SEQ ID NO: 240956 - protein, 354 aa, unidentified
MPRQSKDTVANLGIDIGKNTFHLVGLNKRGAIVLRQKLSRRQLEARLANLPPCLIGMEACVGAHHLSRRLKAFGHDARLMPAKYVKAFLKGNKNDYRDAEAIAEAVQRPTMRFVATKTAEQLDLQALHRVRSRLVSERTAIANEIRAFLLDRGIAVAQGLHRLRVALPDILATRTDLLAPRLLHILNDLIGDWRRLDERIHAVSLEIQLLAQHDPACERLMTVPGIGPIISSATVAAIGTGDAFSKGRDFGAWLGLVPKQISTGDRTILGKISKRGNKYLRTLFVQAARVVLLRPATWERHGLQPWIAAAAQRLHHNVLAIALANKLARIAWSVLHHGRDFEVRKISEATSQPA

SEQ ID NO: 240957 - protein, 416 aa, unidentified
MNDESISSPIERYIAIDAHKHYVMVGGMNARQEVVLPTRRVEMENYPKWAQANLRPGDAVVIEATTNTWTLYDVTSPYVSKVVVAHPLEVKQIANARVKTDKHDVNCLARLLVADLVPEVWVPPKEVRELRTLIAHRRRLVKMRAMTYNRLHSVVHRNNLVPPEGGFFAEKNRSWWESLTLSAVEKLLVRQNLAMLDRLESLIAEVDQELARLSTSSPWGEHTPYLVQLPGFGVINAMTILSAIGDITRFPTSKKLVGYAGLGGSVHDSGQSHLTGPITKQGRKELRWCLVEAAWIAVEHHPFWKQEFHQLTHHMKSSKAIVAIARKLLVVIWHVMSERIADRKADPNMVAFKLMKWSWQLNDWQPGGLTTRQFVRYQLMQLKLGENLTRIQRAHPISLASVEEILALKPELRPAA

SEQ ID NO: 240958 - protein, 389 aa, unidentified
MIYVGIDVAKDKHDCCILDANAEKLFPTFTIQNNQTGFGELYERLNSMTGDNSEIKVGLEATGHYSLNILGSLIDKGLTTFVINPLHTNLYRKGLSLRKTKTDKVDASSIAMMLVTDKTLKPYSDTSYHNEDLKSLTRYRFDKVQERAKLKSSVARLVNILFPELERLNPTLHMASVYALLKELPGASHVAACHLTRLKNLLETASRGRYGREKAIELRNEAQASIGSVMPSKSLELRHTISLIEVLTEEIDEIEQSIREIMDKCNSPIMTIPGISYRMGAMILAEIGDFSRFEDADKILAYAGMSPSTYQSGQLQSSHSHMEKRGSRYLRYALFNATKFVCKWDERFAVYLAKKMREGKHYNVAVSHAAKKLVRTIYCMELTGEPYRK

SEQ ID NO: 240959 - protein, 347 aa, unidentified
MRFYTGQHQHYCGIDLHAATMYVCILDAAGEIRVHRNVKSSPEALLEIVAPYRDGLVVAAECTFTWYWLADLCAKENIPFVLGHALAMKAIHGGKAKNDKIDSHKIAVLLRGGMLPQAYVYPAAMRATRDLLRRRLHFVRKRGQLLAHIQNTIHQYNLDPFGKRIAYPAPREGLLEHFPDPAVRKSVEVDLALLERYDALIADLELTIVRHAKRHDADAFHRLRSVPGIGKILALTLLYEIHDVTRFERVQQFASYARLVKCAHESAGKKLGSGGAKQGNVHLKWAFSEAAVLYLRHGADGKKLLARLERKHGKGKALSILAHKIGRAVYYILARGTVFSPEKFLHA

SEQ ID NO: 240960 - protein, 411 aa, unidentified
MNNVAGIDVSKGKSMVSVLRPFGEVVAKPFSIGHTGSELKELADYLKSLDGETRVVMEHTGRYYEPVARFLHEEGVFVSAVNPKLIKDYGNNTLRKVKTDKADARKIAMSLSGRAAKSHANNWAELRQHTPMDTIRMQLKTLNRQQSLYAKTKTMMKNNLIALLDQTYPGVNALFDSPVREDGSQKWVDFATAFWHVDCVRNMSLTAFAERYRKWCKRHGYNFSQSKAVEVHTGAQDLIAMLPKDALTKTMVRQAIDALNAVSASLERLKAEMQALAAQLPEYPVVMAMHGVGDSLGPQLMAELGDVTRFTHRNAITAFAGVDPGADQSGTHEAKSTRVSKSGPPELRRALFLVMDCLLKTQPQDDPVYRFMDKKRAEGKPYLVYMTAGANKFLRIYYGRVKEYLASLEEN

SEQ ID NO: 240961 - protein, 375 aa, unidentified
MSKIKNHFELTHPNAAGIDIGASSHFVAVPPDRDEQPVREFLSFTEDLYALADWLTACGVDTVAMESTGVYWIPLFELLESRGFTVYLVNARHVKNVSGRKSDVLDCQWLQQLMSFGLLSGAFRPQGDFCALRAVARLREMLLRNQAKHIQHMQKALLLMNLLLTEVISDVVGETGQKIIRAILAGECDGQALAKYRNNHIKASEEEIAKALQGNWREEHLFALKQAVALYDAYAVQLMECDQQLEKMLKDLARNDLKAEKPKRRGGKSKNAPNFDARTLLMQMCGVDLTRVDGIDVTTAFKVLAEIGADFSRFKDAKHFASWLGLCPGTKISGGKKISAATSRTTNRAAQALKMAAVNLRARPLTFNLPVYWIS

SEQ ID NO: 240962 - protein, 359 aa, unidentified
MSTQSKPFSFKGQKIFVGLDVHLRSWSVTVLSEQAVLKKFTQDPSPAALNKFLTNTYPDAEYYSVYEAGFCGFWIHWELQNLGINNIVVNPADVPTMAGERLRKTDAVDSGKLARSLRSGELKGIYVPDSVATEIRSLIRLRDSLTKDQTRHKNRIKAHLRYLGIDIPEEFCRPGRTWTNRFVLWLKGLKLETKYGKKTLDLLIAQYEDLRGQQLKMMKELRVLSRTERFDKPLQFLMSIPGIGQLAGLTILSEVDDISRFKDAAHFASFIGMVPMCYSSGEHDGTGNITVRRHAKLRWLIVEAAWIASRKDPVLSAAYVEYCRTMKPSKAIIKIARRLVNRIYFVMKHQQPYVNCYVS

SEQ ID NO: 240963 - protein, 347 aa, unidentified
MNLYNNMHPYYCGIDLHARILYVCILDQDGKTCVHKEIPADPIKLQKLLNPYIGNIVVGVECMHCWYWVSDFCNELGVDFILGHALYMKAIHGGKAKNDRIDSFKIANLIRGGNFPLAYVYPKDMRATRDLLRRRTKIVQHGADLKAHVVNTTSQYNLPPNKLNLKNVSAREQLKSTFTDISVQKNINLDMVILDCYAEQLSKVEWFIEQQAKQHKPVHLHVLKSIAGVGRILSLTIIYEIGNIDRFASVQDFASYARLVKCKAESAGKSYGTQGNKIGNAHLKWAFSEAAVLYLRGNDKAKRYLLKLQKRMSKAKALSALAHKLGRCVYFMLKNETVFDEMKFLKR

SEQ ID NO: 240964 - protein, 421 aa, unidentified
MHVLYQRCAAVDIGKDVIAVAVRLPGDGPEHRQTIKRTFKTFYGVLKHAAGGLTAQQVTHVAMEATGIYSMPVYHALIEHGQFEKVLVCNAGHVRNVPGRKTDLSDAEWLVHLLECGLLRGSFIPPAQIKAARDVIRYRTKLTESRTSELQRLGNVLQDAGIKVDSVASTIATRSVRAMVEALIDGERRPVLLAELAKGRMRARIPDLQRALEGRFDDHHALMCRLHLDHLDHLEEMIARLDTQIQDMMQPFRAQRELLTTIAGIGPFAAAAIISEAGADIGETFPSAGHFASWIGVCPGNHESAGKRHSGKPRKGNQHLQHVLVECAWAASRTPGYLQSLYRWHVRKFGGSRNPTAKNKAIVAVAHKLAIIIWHVLATGKPYTDLGADYLDRRIDPAKETRRLIARLQALGHTVTIEPAA

SEQ ID NO: 240965 - protein, 318 aa, unidentified
MQTTPRFVGIDVSKAHLDVASRPDGPEFRLPNTAEGIATLVVRLEALSPALILLEATGGLERAAAVALAEAGLPIRIVEPGRVRHFARSIGPHSKTDALDARVLAHDAEAVRPEARDLPDERTRDLQASLDRRRQLVAIRVAAQDRLKQGPTAAVRADLEAHIAYLGAQVDRINTSIGEAIEADPDWTLRDEVLRSVPGIGPQTSRTLPGLLPELGKLTGKRVSALAGLAPRARDSGTVRGARTIFGGRAEVRTALYMASVSAMRFDPDLRVFYRRLRQAGKAAEVALTAVSRKLLTIANAMLRDMKPWTPRMTDVAA

SEQ ID NO: 240966 - protein, 363 aa, unidentified
MSEVYVGMDVHSKWSPFVIQRAEGSILSRGQVPTSVEGYAAMKAQHGLAPGTKVGLESGVMAFYAARILQDLDLEPVVIDAHEVRLKASRPRQKSDRRDAFEICDGLRRDIYRTIIHVPTCPIVQLRETLAQRRHFVRVATAEVNATKHILRSTGLGKLCRPMQGERSWQVLLEQLSEPVRSRVELHHQVWRAAGNQVEVLEKSLIKQSAHFTDDFFRLQTVPGVGPIVALTVIAAFSDVRRFASAKQASSYAGLVPTTNQSGDRDWHGHITRRGSTELRAMLVEAAHHTCRKSHPLNPYFTKLCAKRGYKMTVVAIAHRLCRVLYAMLRDQVDFDITKLAIEVGPFEQKVVKPYRLRRKPAA

SEQ ID NO: 240967 - protein, 422 aa, unidentified
MVLLMHGLKAWLRYWRSLAWWQGRSFRPPFDPVGEIPQPIVTGPNRIPFFTEESSDDGRQEVVANRKERKEWGRRLQSEDPGLEVVHPHAAGIDVGNSAHYVAVRPERDPEPVRRFECLTADLYRLADWLKSCRVKTVAMQSTGVYWIPLYEILEEHGFGVYLVNARHTKNLPGRKSDVQESQWLLKLHTYGLLNNSFQPASEIRVLRTYWRQRGEHVREAATCIQRMQKALTQMNVQLANVISDISGLTGQATVRAVVAGERDPRKLAALSHPRVQASQEEIAKSLEGNWRPELVFVLQQEVDMYDTYQRRIIECDQRTHKHLGSFPDTLSPVQPQTQKPKTKKPAAKNAPRFDLNSELQRVTGVDLTRIDGIDVMVAQTLLCEVGLDMSRWKTDSNFASWLGLKQSKNGGRSRSGRRYTA

SEQ ID NO: 240968 - protein, 416 aa, unidentified
MDSGCDSQMGGMQMNSVGIDISKGRSTIAVMRPFGEVVISPFEVRHTDSELSKLARRLKSLNGETRVVMEATGNYHAPVAKLLHDAGLYVSVVNAKLVHGYGNNDLRRVKTDRKDAVKLANYGLDRWLTLPRYIPEEDTRLLLKNCYRQYRQYSKVQTILKNNLISLLDTVFPNVNRLFSSPARADGSEKWVDFVAEFWHCRCVSEKSEKVFTNKYQRWCRKHGYNFSKEKAHTIYVEASGHIGVMPKSETTKLLVEQAVAQLRATSAALAALKHEMQSLASMLPEYPVVMDMFGVGPTLGPQLIAEIGDVRRFYSKKALVAYAGLDAPPNDSGDVTGRHKSMSKVGASSLRRTLFLVMGVYLQKSPLDEPVYLFMDRKRAEGKPYRVYMMASANKFLRIYYATVKAYLESLELTA

SEQ ID NO: 240969 - protein, 344 aa, unidentified
MTTEASEKLYAGLDLHANNTYCAVINQAGQPVFQQRLGNELPTICQALQPYQAQLQAVAVESTFNWYWLVDGLQAAHFPVQLANPAKIQQYTGLKRTGDSSDALWLAELLRLNILPTGYIYPKAQRAVRDMARRRMLVVQQATRTLLSLQSMVTRHTGQTVRGRGLEDWTLVEVGAAFPEPASQATALALLELLREQRRIQHALEKHVLAQVKLAGAWERLLTLPGVGNILGVTILLETGPIARFASAGDYASYCRAVDSRCDSNGTKKGENNRKNGNQYLAWAFVEAANFAARYNAKAHAWLARKTARTLRVVAVKALACKLAKAAYYVLRDNVAFSEQKMFG

SEQ ID NO: 240970 - protein, 337 aa, unidentified
MEYFAGLDVSMEETHLCVVTRNGAVMHEAKVPSTPASIAAALARVPACRRILFETGRMAPMLYHGLSRLGLPVVCVESRQAYQALKSLATHKTDRNDARGLAHLARTGFFKPVHVKSLPAHAVRALIIARKKLVGQRVTLENQIRGLAVVFGVRLPRALSPAFIRQALQASEGIPGLSAAMRGLVAARAAVLAAVVAIDGDIRKMARASSACRRLMSIPGVGQLTALAFTAAVDDPGRFRRSRDIGAYLGLVPRRYQSGEVDYTGGISKCGDRRVRTLLYEAAHVMLTRYKGPLKLKAWALAIAKRSTMRKARIALARRLAIIMHAMLRHGTEFRLA

SEQ ID NO: 240971 - protein, 395 aa, unidentified
MIKDARVTQIGLDCHRKFSNATARNSQGTIAWRQRLEHGDREALRKVLRDWPEATPVILEGTFGWGWLSDELAAAGLEPHLASSKKVAAWRDARGLAKSNRTDADLLSELWSQRPRWWEVWLAPAEVRSQREWLRYRMTLVRLQTGLKNRIHAILHRHGIVREESDLFGTSARQFLHRLIGSEDATLPGSGRAMLKGYLQLLDQLRRQIANITREVRGQIRRTPAGERLRTLPGIDYILGYTILAEVGRIERFHSARHLASYSLLAPRAYDSGDDDGETPKGRHVGHAGRRTLKWAWIEAAHGAVRRGGRFREIFDRRTDGGKRDRNRGYITVGHELCRVVYAMWTREIDYTETPPPRPGCEKRRRDSRRARNVTLKTSRPGTGQPEHPMVAVSM

SEQ ID NO: 240972 - protein, 339 aa, unidentified
MQVTTIGIDLAKNIFQVHGITERDEVAFNRPLRRAQVLPFFARLDPCLVGMEACSTSHYWARELTRLGHEVRLIPPMYVKPYVKRGKSDAIDAEAICEAVTRPTMRFVEIKTVEQQSLLSLHRARNLMVRQRTQLVNALRSMLAEFGVYIAKGLARAISFSQGVLAGTKLELPEIAQDVVHNLCGQLDVLHGQMRWYETRLRFEAKRDPRIRLLQTIPGVGPVTASAIAASIGSGHQFRNGREFAAWLGLTPTNRSSGGKERLGRITKMGDQYLRQLLVVGMTSLVRQTKSHPERANKWLTSLLERKPARLATVAMANKTARIVWAVLTKNEPYMPRTA

SEQ ID NO: 240973 - protein, 339 aa, unidentified
MNTLYIGVDFHPYSQVVAYVSKHDGEIKYRSFRHSDKRSLRKFYEEAEKGSVIGIEATGSTQWFEKMKTGNPRLIRRMAPSYHKSDYRDAENILDLLVNDAFPEVEPRSEESQLVLSLLRQRHSMVQQRTANTNALQSFARRKGLKRFRMKLKAAREMLLEAAENQTEEFMLRSRFKVCDLLTDEITGAETRLKKYASDDERVSLVGTHSGIGLLTSLCLVHTLGDVNRFQKAAQIASFIGFDPINKSSGEKKRIGKMSKRGSRLLRFLLVQSVHSTKDERIREFYVRVSRRRGMPIAKVAAARKLLINCYIMLRDEIDYEEFCRRGEVGLCGQPTTGA

SEQ ID NO: 240974 - protein, 376 aa, unidentified
MTMMHQQRTLRYLGLDVHTARISVAIAEESGPPTTYGRIPNEPTGIRTLMTRLGGPGIELRVAYEAGPTGYALHRQLTRLGIACLVVAPSLIPRQPGNKVKTDRRDALKLARLLRSGDLTPVWVPDEAHEALRSLVRARADAKADQLRAKHRLSKCLLRHGCWAPIGVRSWSKRYFTWLHQLEFEHLPDRIVFADYLAEVNAAGERIARLERALHECAQSSSQVALIRGLQAFRGIGFLSAVTLAAEAGDLRRFRTAPQFMAYAGIVPSESSTGEKHQRGPITKTGNRLLRHVLGEAAHHARHVPRVTSKVKQRQADVPPEMIDLAWRAQVRLHTRYRQLSARIGALKALVAIARELAGFIWAAGHLLQEEVPAAA

SEQ ID NO: 240975 - protein, 362 aa, unidentified
MDGSSEQPQMTAGLDLGDKYSYLCLIDQESGEVIEEGKLRTTPEAFRRRFGSEQPPMRIAIEAGTHSPWASRVLEECGHEILVANARKLRLIYANKQKTDEIDAENLARLARVDPKLLYPLKHRGEESQAHMAIIRSREALVGCRTQLVNHVRGAVKSFGARLPKCPARSFHNKAAEHIPEVLRPALGPILEQIGSLTERIRDYDRKLEEISKVSYPETDLLRQVEGIGPLTALTFVLTLEDPYRFERSRSVGAYLGLVPAQDQSGDRNPQKRISKEGDEMLRKLLVGSAHYILGPFGSDSDLRRHGEKIASRGGKNSKKRAAVAVARKLSVLLHSLWISGELYDPLYNTHRRQKQQQQGAA

SEQ ID NO: 240976 - protein, 348 aa, unidentified
MMADNVLLVVYGGVDTHADVHVAAAVDYAGRVLGTCSFPATPDGYAQLLGWLRGHGELARAGVEGTGSYGAGLARHLAGQGVQVLEVTRPDRQRRRRNGKSDPVDAVGAAMAALRGEDCAVPKAQDGPAEALRALRAARRGAVKARNQAGNQLAALLVTAPEGIRVRLHGLAGKKLAAACAGLAAAGHGDAAAAMVTALGSIARRWLDLDDEDSCLQAAMASLVTSTAPGLLELPGTGPLSAAALIITAGDNPARIRCEASLAALCGVSPVDCSSGKQQRHRLNQGGDRQANAALWRIVTTRMRTDPRTQAYVEKRTADGKTRKEIIRCLKRYVAREIFRAHIRSAAT

SEQ ID NO: 240977 - protein, 497 aa, unidentified
MPTKSTIYSRCNPQLLKLFETAGHPAKVLCVALDYAKAQHTALMCNGLGELLRPSFAIDNTPQGAAKLLSEVRACVKPRKIRPEHVFFGGEDYPSYAENFLRHLRQAKFLVVRVNAWEAKQQRDNFQASSDSLDLLGIARCCLNRRGESVRDLPQAYPNLRIATRDRDKLVRMRTAVSNRIHSYVDRLFPGFLSEGNSGLEPFSKASLELMADRFSPAQLSRRPRQALAQWLGRRGVTQPRDTADQLKRFARNVLAPAPEQTLLLQQTLAQLVGLYRNLEQSIARIDREVAHWLARTPGAWLTSIAGFGITLSAGWTAELGPPSQWHSVRQLCSYSGVVPKSKQTGGPQKEPLVGAVQPRCNKRLKNVVLQAVQKVIQHGPEELRRTAQELQARGAHTEFALAKRLVRLGKYLALTGTVYRPKAMMDPDTPQATLAAHYQTVWEKLLPKWRDKADLREVFAPEQPLGQWRKMVQELYALDLRLPQQKAAQKSSALAP

SEQ ID NO: 240978 - protein, 310 aa, unidentified
MTLHPDMIGIDVSKAHLDIFDAQSRHAERITNSAEAVRALAGRLANRESAFVIFEATGHYDSHLRKLFDAAGIAYARVNPSRARDFARAAGFLAKTDEVDAKMLAAMGHALAPMPSAPADIARESLGELHKRRDQLVAIRACERTRLSDKQGVRHSLQTHIAWLDAEIARIDILIATAIRASQAMAEDLRLMRSAPGVGPVTATTLIALMPELGTLTPKTAAALAGLAPFNADSGQFRGVRRINGGRRRVRKALYMAAVSAARHPRFSTFYKAMRERGKPAKLAFVALARKLIVMLNAILRDRVAYHAAP

SEQ ID NO: 240979 - protein, 413 aa, unidentified
MERLLERCAALDVHQASVSACVRVPGEQDGRRELNERFGTTTPDLLALTDWLRGHGVTHVAMEGTGVYWKPVYYALEDEFELLLVNAAHVKQVPGRKTDTKDAAWLCRLLECGLLRASFVPPKPIRELRDLTRYRKTLIRDRASEANRLHKVLEDAGVKLSSVASNVLGVSGRLMLEALCQGTNDPVALAELARGRLRSKLPALRRALESHFRDHHAFLVAQILAHLDYLDEAIGVCSARIEEQIAPFASALTLLESIPGVGRRNAEVILAEIGADMSVFPSSRHLASWAKLSPGNNESAGKRKSGSTGKGSPWLRSALVESALAATRTRGYLKARYWRVRQRRGHQRAVIAVAHAILEISYQMLTSGELYRELGEDFYERRDSERVKQRHLHALERLGYCVTVNAAPGREAA

SEQ ID NO: 240980 - protein, 431 aa, unidentified
MGHVVIGMDPHKRSATIEIIDERQKVLSGGRFGTDRDGYRAMLAAGRKFKDHVWAVEGCNGIGRHIAQRLVADGEPVVDVPAKLSARARLFATGQGRKTDPVDAHSVALAGLHSPGLRVITADDATVALRLLADRRDELGVARTQTVNRLHRLLLELLPGGAKKFLSATQAKELLAAVRPRDIAGKTRRRLAAEMITELTRIDKRIKAADAELKQLVTATGSSLLTLHGIGPSGAARLLGDVGDIARFADKGRFASWNGSAPLDASSGDQNRHRLSRAGNRRINRTLHIMAIAALRSNTEGRAYYRRRLAAGKTTMEAMRCLKRRLSDVVYQQMRADARHLATGPGGHTGTTTGSSVAGSDPCTGSSEKSLPGPATTDPTPLPLASKPARSPASSRRPSITAGPQPLSSEVCLTTARTGAHSPGGNDTPLT

SEQ ID NO: 240981 - protein, 364 aa, unidentified
MLSRVAASGLPRPEPEQLMGPHSPDRARRGESRKHEHNEEGERMDPAKICVGIDVAKDWLDVAERPGDGAWRLRNDEPGIAALVEQLRQREPQVVVIEATGGLECPLAAALAAAHLPVVVVNPRQVRDFARATGRLAKTDAIDAQVLAQFGQAVEPPPRPLPDHATQELAALVMRRRQLVEMLTAEKNRLHLAARPVRRDIQQHIRWLERRLGDLDGALGQAVQSSPLWRDRDHVLQSTPGVGPVASATLLAHLPELGRLNHKEIAALVGVAPLNRDSGTLRGRRTVWGGRAHVRAVLYMATLVASRHNPTVKVFYERLVAAGKPKKVALTACMRKLLTVLNAMVRSHATWHITNPTLAQQDSC

SEQ ID NO: 240982 - protein, 386 aa, unidentified
MQKLNDLSRSLAPLKPDGTLIAVIEMSQSSWLVAGIVPGVERQPLKKLAVDESALLKLLHRWREEAEKAGRRIERIAVAFEAGRDGFWLARWLRARSIEAHVIHASSVAVSREHRRAKTDRLDTELLKRAFLGWLRGERDHCKMVAIPTTKDEDAKRPNRERESLVGEQTRIVNRMKAALIRLGIRGFNPKLKKAAGRLEDLRTPEDEPIPPNTLAELRRDMERRRLVSDQIRQIENVRLEHLKQAPSDGPHAMVRLLARVIGVGIETADMLVQEVLSRNMRDRRAIARYAGLTGSPDESGTKRREKGLARSGNARVRRGMIQLAWRFLMFQKNSALAQWFRARTENARGTRKLMIVALARKLLIALWRLVREGVVPDGVVLRPAQ

SEQ ID NO: 240983 - protein, 416 aa, unidentified
MSFALPEALFFTGIDWGAETHAVCVTDAGGKITAEFTIEHSADGIALLARRLARYGEAGVMPVAIERPDGRLAGLLLEAGHPVVPVSPNAIKTWRDGEVLPGAKSDAGDAAVIAEYLRLRAHRLKAAAPYSDETLALRTAVRTRGDLAGMRVAATSQLPALLDAHWPGAKAVFADVGPPASPEFLTRYPTPAAAAHLGGKRMAAFLVKHGYSGRRPAAELLARLRAAPAGTGREALPEALRDVVLAAVGVLAALNAAVKSLDRPAAAHLGEHPDGKIFTSLPRSGQVNAAQVLAEWGDCRQACDGPDSVAALAGCTPVTSQSGKHRDVHFRRACNKRFRAAVTTFAGNSRHASPWAAKVYSDARARGKDHPHAVRILARAWIRVIWRCWLDSVPYDPATHGAAAALAQQSIKQIAA

SEQ ID NO: 240984 - protein, 347 aa, unidentified
MHYTGQHRFYCGVDLHARTLFTHVLDHQGKTVFEQDLPADPAAFLKAIKPYRKDVVVGCECLFAWYWLADLCEAEGLPFALGHALAMKHIHQGKAKSDRIDAGKPAAPLRGGLFPLAYAYPKAKRQTRDLLRRRSFFVRQRAQLIAHVVNTNTQFNLPPLSKKLTYAANRTPELLDRFTDPSTRLMVSADLALVDDYDTRIAELERHLVKHAKVDDAVTFGLLRTTPGIGPILGLTLLYEIDDIKRFSEAGHFLSYARLVRCEHSSGGKVKGAGPRKMGNAHLKWAFSEAACLMIRAVPAVKGWVQRQAKKRGKRKALAVLEARIGRCVYHLWRKQVPFDVKRFLKG

SEQ ID NO: 240985 - protein, 349 aa, unidentified
MPEPRLSYTGERVYVGIDVHKATYAVVCVCQQRIVKTATVPADPAQFAASVLRWFPGATLASAYEAGFSGFVLHRVLAAAGITNIVVNPASVAVAANDRVKTDRRDAKKLAVDLADGRLRGISIPTEAEELARLLPRTRAQIVEHRATIARQIKAKLYQFGLIPPASRRRISSRYLRELAACSLPAELHASLALLADQWRFATRQLLEVRRLLRDQATAQAELETVYRSAPGIGAVVARTLATELGDMSRFANERALFSYTGLTPSEYSSGASIRRGHISRQGASRLRHVLVETAWRALPRDPILQAIVDRIAATRGKQRAIVAIARRLIGRIRACFRHGTTYAVGTAG

SEQ ID NO: 240986 - protein, 313 aa, unidentified
MAFLHHQPQLCLGFDIAKDTITVADGTTTRTIANQRRAIRALLKRYKHIDLVVCEPTGGHETLLLEECLRAGIACHRADTLKVKSFIRSFGTHGKSDAIDAGMLSAYGRERWEKLCLWQAPDADETRLRALVRRRQELMAFRGAEKNRLKAPGGRGLAASFKAMIKAVDNQIKTIEADIRELIANSRTLKHRAAICTAMDNLGPIMAAKLLASLPELGSLTRRKAAALAGLAPHPNDSGQKHGYRKIRGGRPDVRTMLYMPALCAAAGKGEFAAFYKRLRANGKKPMVAIAAVMRKIVVTLNARLRDAMIPQS

SEQ ID NO: 240987 - protein, 375 aa, unidentified
MPESGLQTGTKRWKRERRLAVIELSKVEAQEVVGLDLGDRSSQICRLDRHTGVILEERRLSTTTASVQRYFAARAPQLIALESGTHSLWMTRLLKSLGHEVIVANPSKVRAISASQTKTDERDARFLAQLARVDPQLLSPVHPRSEESQQAIAVVRAREGLVKARTMLINQVRGVVKSFGFRLPAGSSASFATKFQRATTLPVLLKATLETLVRVIDELSQEIARSDKEVEALARRWTVTQRLRQIKGVGALTALVFVLTLGDPLRFVHSRSVGAYLGLVPGSRSSGQSTPQMPITKQGDRMLRRRLVQASHYLMGPFGQDSDLRRFGLRLAERGGKSGKKRAVVAVARKLAVLLHRLWVSETDYEPLRGAAAAA

SEQ ID NO: 240988 - protein, 315 aa, unidentified
MEDSQVFVGIDVSQSCLDVAARPTGEVWQVPNDADGISDLAQRLVGMSPFLVVLEATGGLEWALTAELAAAGLPVAVVNPRHVRDFARAVGILAKTDILDAQVLARFGQAMEPEPRPLPDAEAKDLQAMVSRRRQLVEMITAEKNRRRTVIARIRPQVEEHIRWLEKSLTDLDQDLDGFIRSSPMWRTKERVIRRVPGVGAVLSATLLANLPELGELSRGQIAALAGVAPFNRDSGTLKGKRTVWGGRRRVRAALYMAALVASRYNPVIKDFYQRLCSLGKPKKVALTACMRKLLVILNSMVRHGREWQPNLQTP

SEQ ID NO: 240989 - protein, 444 aa, unidentified
MALSGMILIREVADAPVIMGISKSAGLKFPCGEVRIVNPLFVGIDVSSKSNVAYLMNPDGSKHSIFSVQNNLGGAKLLSERIVSALSSMRLNDVVIGLEATSIYGNNLVYALREDGSLGRFQRKIHVLNPKQVKKFKESYPDLPKNDFVDAFVIADHLRFGRIAKEVYMDDYRYQALRTLTRARFDVIQNLTREKQRFANYLFLKCSGMAQDKNIPNTSATTIALMEHFETVDDLANADLDELTAFIAKTGRGRFADPDVVAKAIQTAAKGSYRLPKTVNDTVNQAMSVSIASMRALKEQVKVLDKAIEQQFEIIPNTLTSIPGIGKVYSAGIIAEIGDIHRFNSQASVAKFAGLVWHKNQSGGFEAEHSQMIKSGNRYLRYYLLEAANSVRRCDSEFRRYYDLKFKEVNKFQHKRALVLTARKLVRLVFRLLKDNRLYIPPEG

SEQ ID NO: 240990 - protein, 432 aa, unidentified
MDSKGDTHTVDPQRRHMSRFRFGSEVEANLARRSLLLLGQQATLQGDRHMSALPQKSDITDFMMGWTPRRRHRCAKVEVLSTTLREASVSEVSIIGLDIAKHVFHAHGADERGRVIFSKRIGRGKLLDFFAAQPSCTVALEACGGAHHWARQLTQLGHDVRLIPPAYVKAFVKRQKNDAIDAEAICEAAQRPSMRFVAVKSEEQQAAGLVFRTRDLLVRQRTQLINAIRGHLTEYGWIAPKGPSHVAMLADLIEEDEMANALPEAAHAMFRLMLDLLAGLNGKIADLDKEIARRAREDEVSRRLMTVPGIGPISATAIAALAPPVETFAKGRDFAAWLGLTPLQRSTGGKQKLGATSKMGERTLRRLLIIGSSAVVQQASKRGAPKGSWLEQMLARKPRMLVTVALANKMARIVWALLVKQENYRTPVAAKT

SEQ ID NO: 240991 - protein, 361 aa, unidentified
MIIIPVTAIRAECARFAGWEIIMTKYVGLDVSQKTTVLCIVDGEGHRLWRGECSSSPDQIVHTVLQHAGAGASIGVETGPMTPWLVHELRARGLDVICLDARHARAALRMQLNKTDRNDAEGLAQIMRTGWFRAVHVKSFDAHRARALLGARQQLVGMVTRLSNHIRGVLKTFGMLPGSVRGRSFAERVELLVAERLDVAPIVRPMLTAWSKLREQIAAFDKAIRAEVKQSRECRLLMSVPGIGPVTVLAYVSAIERPDRFRRSRLVGAHLGLTPRQYQSGDVDRSGHISKCGDTLARLCLYEAATVIMTRVKRPLGLKIWAMKIAKRSGTNKARVALARKLAVILHSIWRTGEAFCWGAH

SEQ ID NO: 240992 - protein, 394 aa, unidentified
MRFVGIDIASETHVVAVVGANSEVEVKPTAFAEDSTGYQKLFAVLGTPGEVLVAMEATGHYWKNLFAALATAGFAVALLNPLRTHRFAGEELERTKTDAIDALGIARFAAQKHPVATPLPDAATEELRELVRLRERLLQDFGDRVRQLHRLVDLGFPEFTRYVHSLDSELASAILHDYPTAAAFRGVSAKRLAGLRYDQRHRVGPELARTLIDAAQSSVGRHHSAAYRVQVRYLCEDLDLLRRRLRELNRDIDGKLREHEVGSLLTTIDGIGPTTAARLIAELGDPAHFRTPSALAAYVGVIPGLKQSGKQKRARAGLTPLGNARLRAALWMPTLTAVRKNPWLRSYYEQLRARGKLPKVALVACMHKLLFAVYTVAKHRRPFVPKPAITGVHA

SEQ ID NO: 240993 - protein, 479 aa, unidentified
MPDQSTLPRSIQHVARKIFPQSLRRPRFAQALSDRNRVDADLNQVYGPRRVALSDLDTWVEKALTSQDAVVLEMTTNTWQVYDDLLPYVHSITVVHPPHVALITRAQVMTDRIAAAHLARLHAKGLLAGIWVPPQAVRDWRALVAQRSKMVRLAVQAKNRLHSTLHRLHIDLPAEGKPFSAAQRPWWENLPVAGIEKIRIASDLDTLDFSQRQIERLEEGLIDQAAQDERIPLLIQLPGVRLVAAVTILAAVGEITRFPQAKQLVGYAGLGARVHDSGQTTRTGRITKAGRRDLRFIMVEAAQRAAITHPHWKTELTRLEPRLGRNKAIVVIARKLLIAVWHVLMQQCADRFANTEKVARKMLEQPTRWARSAVPRGNRPPSMPVGNSTDCISARNSPTYPGASRSLLYHCHLPRCRPIQADRRQACPQPSLRIYSHHPQERRTAALVLGSSFHWDCFARPIPRISALVTRSRTTRFST

SEQ ID NO: 240994 - protein, 315 aa, unidentified
MNIARIGIDLAKQVFQIHGVDRTEKVLVRRQLRRSQMLGYFSKLTPCLIGMEACGSAHYWARELGKLGHEVRLMAPQFVKPYVKSGKNDANDAEAICEAVGRPNMRFVAIKTAEQQVIQAEHRIRARLIKSRTALSNEIRGLLAEFGIVVETSIGRLRKALPELLEDSENGLPMSFRVLLAGLGEELRALDDSITAFDAGIAQRAREDGRIRRLLDVEGIGPITASALVAAVGNGTQFNSGRDMSAWLGLTPRQYSSGGKNRLGGISKRGDKYMRMLLIHGARAALNAAKNKEDGRSRWVKVWLRGATKTLQQWR

SEQ ID NO: 240995 - protein, 346 aa, unidentified
MEQYVGLDVSLKLTAICIVDRTGKIEREGVVASDPEAIAAFVKSHAPHVARIGLETGATSTWLWTELNKMELPVICIDARHAKAALKMQINKSDRNDAVGIARIMQCGWYKEVRVKDLDSHAIKALLVSRALLVKIKRDIENQIRGLLKNLGLVIGQAKMNVFAVRAAELAEARPELAAAVEPLLKAREAVGRQIADLDRKVMRLARNDAQVRRFMTAPGVGPITALCFLATVDDPTRFKRSRSVGAYVGLTTRPYASGEIDWTGRISKCGDAMLRSYLYEAANVLLTRVVKWSTLKAWGVRLAKRSGLRKAKVAVARKLAVILHRMWIEGTEFKWSSKEVANQPA

SEQ ID NO: 240996 - protein, 413 aa, unidentified
MHYVGIDIAKRVHVCAVLDERNTVVMKPFKFTNDEKGFRKLLVHLDRLACERDDLVIGMEATGLLFENLYRHLKALAYRVVLLNPYQTSKFRQMDTMKRVKNDNIDAVMIAALLKSGRFSKGYVSDEQLHSLRELYRHKESLANQIKALKRNTQTMLTVVFPELETVIKDPFSISGMALLEKYPTAKHYEYANTDRILKVFRGIQGNTFTKEKAKQLLDCAKHSIYSGTAKEARAMHIRMNLKQIRMLQEMLDETLEAMHSLFKDDAPLKAEEKEVISDIIDNLRTIPGVSDKTILALLAECGNLDRFRSSKALVGYLGLYPTLDESGERSRGGKLAKRGAKLAKKAIFLAAIASIKHNEQIRTIYLKYRSRGKAKKEALIIVARKLIAIIYAIYTRNEPYDPVRVFTAKPNA

SEQ ID NO: 240997 - protein, 386 aa, unidentified
MKGQTFIPTDYNVFAGLDVDKRSISVTFTNNEGFIRSLRMPYSVEHLLNYVRKHFSDQKIAFAYEAGPTRYGLYDGLVAQAYPCLIAAPSMIPKAPGQRVKTNRLDSRGLSENLRGGQLRSIHVPSAIYRELRHLTQLRDTFVSEMVAMKQRIKSLLLFEGIEFPPAPAGNGQWSFMVKDKLRKLPCSSTVRFKLDQLLESLEFSEKQVVKMTKEIRRFCQTDPELSQCIKYVMTVSGIGWVVASQLLARIGDWRELKNVRQLGGFLGLVPTENSTGDRTDRGSITHTGDGRLRSKLIQASWSAIRQDGELREFFRSVCQTHPRHLASRVAIVAVARKLSTRISAVLMQQRPYVVREKVHSAPLTQEETVPQETTRRQAEPGEKNS

SEQ ID NO: 240998 - protein, 338 aa, unidentified
MGLYCGIDLHSNNCVVVVSDEEDRIVLERRVRNELALIVGLLARYVADLVGVVVESTYNWYWLVDGLQAAGHRVHLANPAGNEQYKGLKYTDDRHDARWLAKLLRLGILREGYIYPKEARAVRDLLRERMRLVQMRTGVMVRMQTMLAQQAAASASAQAMKRAPAGSWARSSVDLNVGAGLESYGAVVRSLSEQIEALEETVLAQVRPAAQYGPLTSIAGVGEILGLTILLETGAIERFAKPGQFASYARCVQSQRLSNGKKKGQNNAKCGNAFLAWAFVEAANYAVRYSPRARRYFDTKKAKTNSTVAFKAVAHKLARAAWHIMRTHESFDEKRAFG

SEQ ID NO: 240999 - protein, 395 aa, unidentified
MLPSYRFPGRVRGVTSAARSRADTTASPRPVASRFFTTVAKQGPGWFLCASPEQPTEPLLVNEARSHSQERDRHMMLKKEDSLLVGIDVSKATLDVARSDVHEVRTFANDERGIAQLVKMLQPLSPTMIVIEATGGLEQPVIAALLDAACAVARVNPRQVRHLAKALGIEAKTDPIDARVLVAFARHATPRLLEKRSKTSEELEALVTCRRQLLKTRTEQTNRLGTTRTKPARRAIEAVLKMIDQQVAKLDEQIRKMIDHDDDLSRSDRILQSAPGVGAVLSATLLCELTELGSIDRRQVGALVGVAPFNRDSGRWRGKRSIRGGRASVRNTLYMATLSAIRFNPVIRRFAERLKAAGKCNKVVIIAAMRKLLTILNAMLRDQLEWSQLKLVQNT

SEQ ID NO: 241000 - protein, 340 aa, unidentified
MVHVGIDLDKHSSQIAILTEDGEVVQQRLANDVTRLEEFFGDLPPHTPVAIEASGTWWWLVDLLERLGHDPILSHPKQTKAIAAARLKNDRVDAERLALLLRGDLLPTVWIPPAALREARELVRHRIQLVWVRGVIRNRLQAMLARRNLQPTSGQSWLTQRGQRELHRLPLPAAAGRIREDCTAVLPMLDAQIRRLDAELLARWGQDPRVQRLTTIPGVGPFIAIVLILELGDITRFATAKQVASYVGLTPRVRASAGRVHAGHISKEGNRLLRWVLVLAATQASRRPGPLRTWFHAVKKRRGKKVARVALARRLAEIVFHVWKHECDYFTVVRRDVVRG

SEQ ID NO: 241001 - protein, 342 aa, unidentified
MTSEVCTIGLDLAKNVFQVHGADASGNAVFRKQLRRGQVLKFFADLPRCLVAMEACGSSHFWAREIGQLGHEVRMIPPAYVKPFIKRQKNDAADAEAICEAAQRPTMRFVGVKSEATQGAAVMLRTRDLLLRQRTQTINALRGHLAEFGHVAPQGLTHAAKLIAMIEDPQTALPEPARTALQFLTATLSQLNDQIRALDAQIVRRAREDALARRLMTIPGVGPLIANALVALAPAPEMFKRGRDFAAWLGLVPRQHSTGGKQRLGSTTKMGERSLRRLLIMGANSEIVWRARKGAPPGTWLAKMLAHKPPMLVRVALANKMARIVWAIMARGETYRAPVAAA

SEQ ID NO: 241002 - protein, 323 aa, unidentified
MTMNDYPFSQFVGVDVSKATLDFALNEESSVSIKNTTEQIVSKLIGAITDPSSTIVVMEATGGYEDRLVTLLHQYNIAVAVVNPRRVRDFARGIGIDAKTDPIDATVISRYGQVVKPAAQVAKSEEDKKLRALVERRRQLLGLVVQERNRLQQTADLEIQDYIRQSLETLQKQVKTIDKRLEKCVKANTEHARKIEIIGSVKGVGPVTVSTIVAELPELGELNRGQIAKLVGVAPMNRDSGQSSGRRRIIGGRSYVRRVLYMATLTATRHNPRIKRFYQGLLRKGKPKKVALTAAMRKLITILNTLLKKDVLWKDLEAKEMSV

SEQ ID NO: 241003 - protein, 430 aa, unidentified
MNSTQNKKIRQVTEKTMVVGIDVGSEKHYFRAFDWRGIELTKKPFPFTNSMEGFNSFSNEIYSLMERFHLSETLVGIEPTGHYWFNLGQYMSGKSIKFVMVNPHHVHKSKELDDNSPSKNDCKDPRVIAGLVREGRYYYTYMPQGIYAELRNASNRRFTLVEEQTRIKNRLYRWISVYFPEYKGIYTQINAKGGLLILKEAPMPEDIIKLGIDGIIEIWKKAKLRANGRKKAMVIYNAALKSIGYREGLVEARMEIRDLLEDHEQNEKRLKQINDLIENLALKIKNVEKLLEIKGIGIITIAGFIAEVGDIMRFDNAKELQKLAGLELVADSSGKHNGMTRISKRGRKHLRYLLIQAAISVVGKCEEFKEIHNYYTTRNSNPLKKMQSIIAVACKLIRVFYAILAKGIDYDASKMLGDIKHPGETPNLAA

SEQ ID NO: 241004 - protein, 419 aa, unidentified
MFKIFRKNCCGLDVHKTWIFACIGITDANNLTVYKQARFSSFTKGLTELSDWLGSFHCSDVCMESSGKYWIPVFNILEKSCNVTLAHPKYTKPRKGNKTDRKDAKWICDLFMCDMIRPSFIPPERIRHLRDLVRYRTKLTNMLTGEKNRAQNCLTVSNLKLDGVFSDIFGKSSRSITDYILDHPGESFDVTPFVDCHCKTPIPEIQAAVDGAISPEQAIKLRQCLTHIDELDAHKEKIEQEILKICEPFSDCLTLLRTVPGFDHNPLTAITVLSEIGYDMAVFPSAKHLASWAGCCPRNDQSGGKVKSTRISRAGSNLKPLLVQVANALVRSDKHPEFKERYRRIKARRGHKKAIIAICRMLLTAIWNILKKMVPYSPDGFLSSRPVHSSKILTTSQAINLLKSRGYIIKDEWSVAANN

SEQ ID NO: 241005 - protein, 362 aa, unidentified
MRVVFGIDVSKASSEVAILVNCEKVHNYTISNDAIGFARLLGDLRTVHKPEIIFEATGVYSRRLQAFLDEHGYAYTRLNPLEAKKQLDSLRVRKTDQIDAEKLAQSQFVLNRKPTYVQEEVYQNLRDLSRFYQNLTEDIVRAKNRLHKVLQVTFPELENILSTPSGEQYWNLVIAFPCKDCVLELSNDELSKSIRLSTSKRISDKRVAYLAEKLIALANQSYCAVKKTSPILEEVRYYAKELLRLYEQRQAVLDEMVELAQPLPEYDILLSIPGIAETTATSIIGELGDIRPFQSANQINAFIGIDLRHYESGNFLAKEHITKRGNPYARKILFKCIHNIASANHTNPCHIADFYKKRKRQS

SEQ ID NO: 241006 - protein, 392 aa, unidentified
MFIVGIDVAKRSHEVCMITSDGQTVQRPFSIRNNCTGYNLMLEKIRKHTNIKSQIVFATAHYWLALFTRLRKDGYHVILLNPIQTSAMRDMFIRKIKTDVKDSFIIAELIRFGRYAESNVAQDRLLALKELCRNRFYLVDMAGDLKRKLIALIDRVFPEYEAQFDTIFCKSSVAVLKKYPTPQKLSNAHLDKLTELLWNSSNGHFGEWKARELKELARNSFGVEDCDGAYSTLILLMLDQIQSLSGKADALEKEISRLFQSFDTTVTTIPGVGPIIGAVILSEVGDISRFSSADKLAAYIGVDPSVNQSGEFQAAHAHMSKRGSPYLRRCIWMASQVAVQRDPMFRAYYEKKAAEGLKYMTIIGHVTRKMTAVVFAILRDHKVYEPVLPTAA

SEQ ID NO: 241007 - protein, 358 aa, unidentified
MKQLKYSVGIDMAKDQFKACFSVIDQQQKVTIKATGSFKNNATGFEDFYAWKRKHAREKLPVHYLVEATGIYHENLAWFLYNKNCSVSVILPNKAKKYIQGLGLKSKNDKIDAKGLAKMCAEQSLDFWRSISKKIYLLRSLTRLHEDLTVERSSLNNRLQALEHAMFDVKESKKSLRKVIASIDKELANLEAKIKDTVDNDPELDSRSKKITGIKGVGLMTFAVVVAETNGFEIFNNIPQLTSYAGYDVLENQSGTITGKSRMSKKGNSHIRRVLHMPAFNVVKFEPEFKTFYDRVYCNTNIKMKAYVAVQRKLLSLIYTLWKKNCEYNPTIQRQESQIVFGAIPEESKKPSTSCLAL

SEQ ID NO: 241008 - protein, 449 aa, unidentified
MVVDDTGSICARRRARSTVASLAGLEAAALATAELGTQLVVVLEPTGSAWLPVAVFFGRRGHTVLRVTSAKAADLRRFLARHAKSNSIDAETLARLPLVAPTGLTAVEFGSPARASLDRRVRAVARLTAEIGRRKTRIRTLAQQLVPTIGAALSDDGLNHTDLAVLERYADPRALLAAGPARLTRLIVTTSRGQLGQAKTQALRTAAAEAVALWEGDSAIAIQDLAAEVASEVRLVRAAEAERARHEHARDAAMVCVDPAGLAASLPGLGPVGTTQLVATMGRPGRFPNGGAFKAFTGLTPRANQTGQTDPKHQPMTKAGPRALRSQLVQSANTARKLDPQLAAVYHAQMTQRGATHRKALCVVAARLAERGWLTMARGEPYVICDLQGRPVTPEQAKRLITEHFTVTAEVRRRRRSSKKAGKAPHTALKAQHKSQREAGHEATFPAPA

SEQ ID NO: 241009 - protein, 376 aa, unidentified
MEVAGNAIGLDLGKRTYEMCLITKSNKINRSGGTTDFSGLDKLCMKLSKDDVVAMEACNLAFRIERIIREKVGCRVIILNPGRLAIIFMSTRKTDKEDSMKLAKYIRSHEEDEMPIVTPPSEADWERRKLLSEYRSLKTLRTKEINRLHAIFEHCGYTQFTRRNMCDSKNRKEILPLLKGYEKEEAERLVDRLTILEKQIEVLCNKINDETEKDEKVQKLMTVPGIGPITALSYVAYIGDVNRFENAHQVSNFLGFVPKVDRSCTINRIGHITKMGNPLLRSLLVQAAWACIRSKNGAFLKDKYNYMTITRGIGKGKSIVTIARKMGELLYTLLKNNQDFEPRKFISSEEKISKLADEALFYTKKRAEDKINLASS

SEQ ID NO: 241010 - protein, 412 aa, unidentified
MDVLHPRCCGLDVHKSSISACILLREAGRVQKHQRRFGAMIQELQELAELRQFGVSQVAMESSGVYWKPVWNILEGQFTVVLANAQHIKNVPGRKTDQKDAEWIAQLLQYGLLRPSYVPCEIIRDLRDLTRMRASLSQEASRISSRIQKVLEDANVKLASVATNVLGKSGRAMLEDIISGEDDPEHLASLALGHLRVKIPQLRLALEGKVRSHHRFLLRRLVDQIQFVEHEIGLLDERLEEIAQQRPELSQAVARWDTIPGIDRVAAWALLAEIGDNMAQFPTAGHLASWAALCPGNHESAGKRLRGTTRQGSPWLCRMACQCAWAAARTKNTYLTSQFRRLAARRGKKRAIIAVAHTIIVIGYHLQKNQSNYEDLGGNYFDRIHSDGLKRYLVKRLQQLGHKVTLEPMVAA

SEQ ID NO: 241011 - protein, 345 aa, unidentified
MEHYAGIDVSLESASLCVVDATGRIVREAKVASEPEVLIGWFSRLGFPVTRIGLEAGPLSQWLYAGMRDVGFAVELLETRHVRDAFKAMPVKTDRKDARGIAQLMRLGWFRSVHCKSLPAQEMRALLTVRKLLQIKNHDVEMCVRGVLRGFGLKVGPTTPRTFAARVRHLVANHTTLSTVAEAMLAARETLFGEWQKLEKRLRSLAREDSRVRRLMTTPGVGTIVALTYVSAIDDPGRFRSSKTVGAHFGLTPKKYQSGETNVTGRISKIGDGSVRTALYEAANVILTRPVTGSALKSWGMRLAARAGMRKAKVALARKLAVVLHRMLADGTSFLADKAAAAVTR

SEQ ID NO: 241012 - protein, 459 aa, unidentified
MGRAKSQVRAWEGLQVIHPHAAGLDIGSEEIWAAVAPERSAEPVRKFGTFTPDLQALADWLIACDVDTVALESTGVYWIPVYEILEARGLQVYVVNARHVQNVPGRKSDIQDCQWLQGLHSVGLLRGSFRPEGEIVALRAYLRHRAGLIEHRAAHIQHRQKALAQMNVQLTQAVKDITGVTGLAIIRAIVAGERDPQQLATLRQPGVKKTEAEIVKALTGNYRPEHLFALQQALALYDFYTAQLAACDTEIARQFANLKPISDALPPLPPSAKRDSHSKNGPSYDARSYLYRLTGVDLVAISGLNESTVQTIISEVGTDLKAFPTEKHFCSWLGLAPHNDISGGKRLRSRTLKTNNRAGQAFRMAAQSVAKSPASAFGAFYRRMKARLGSKQAIVATAHKIARAFYHMLKHRTPFHDLGGDEYERRARERELKNLEKRAARLGCSVVKNPAAVVIAGSF

SEQ ID NO: 241013 - protein, 345 aa, unidentified
MNKIRVIGLDLAKNIFQVHGVDVDGEIVLRRQLKRSGLSKFFARLEPCVVGMEACGGAHYWSRTLGGFGHTVKIMAPAFVKPYLKSNKNDRNDAEAICEAVQRPSMRFVAAKSPEQQAVLHLHHGRQMLVRQRVGLSNHIRGILLEFGITLPQGVKVITERIPELLEDAENGLPELARTLLTELKEAHDELIVRAKRMECELKAWHKTNEASQRLESIPGIGTLTATALVAKIGEGDEFKNGRQLSAYLGLVPRQSSSGGKDRMLGISKRGDGYLRSLLIHGARSVIYHVQRRIRAGLPGGNPWIEQLLRRSHVNEVAVAQANKMARVAWVVLNRKERYRVVTPV

SEQ ID NO: 241014 - protein, 363 aa, unidentified
MTEGICLVGLDVHACMTAAAAVQLGSGEVFKAQLSGSPADALQWLATLPGPVCVVYEAGPTGFGLARAARAVGVEVMVCAPGAIPRQPGDRIKTDTRDALKLARLLAAGQLRAVVVLASELEALRDLVRAREDLRGDLMGARHRVGKLLLRGGLVWEGPGAAWSQRHLRWLGTIGFDEELVEVVLGEYLAHHEVLLARRDRLDKLLLEQSTQGWWASTVARLRCLRGVDTLTAVGLVAEIGDITAFRHPKQLASYLGLVPSERSSETKSGQGAITQGRQRARPPTVGRGRLALPTPAARLRAAQAPPGRPAAGRCRRGVRAQIGLHRRWAHLDAARAKKRTTVAVAVARELACFVCEIARQPD

SEQ ID NO: 241015 - protein, 340 aa, unidentified
MRQLYVGCDLHGNSNFFGIIDQQGKRVFKKKLPNDLVLILPMLEPFQEELVGIAVESTYNWYWMVDGLMEQGYKVHLANPSAIQQYSGLKHADDKHDAFWLAEMLRLGILPEGYIYPKDERPIRDLLRKRSHLVRLRTSLVVSLQNILSRNLGKKVNVHDVKKLREDRITSLLEMSEDLALAGRVSKEAIDHLTRQIYKIEWAVQKKITLKEGYRYLLTLPGVGKILALTIMLETGPISRFETVGDYVSYCRKVPSRWISNGKRKGSGNRKNGNKYLSWAYAEASEFARRLYPEPRAYYHRKMQKTNAAVAHSALSNKLARAGYYVIRDQVPFQSEKLFG

SEQ ID NO: 241016 - protein, 313 aa, unidentified
MKIYVGVDVSKQYLDVCIVPQGKLLRFDNDLKAIRDFIKLLTEPERTLVVLESTGGYEMDVFCALQEAGISVAKVNPRRIRDFARACGKLAKTDRIDAQVIARYAQRIEPKADSAQDLRMIALKALVARRGQLIGMRTAENNRLEHARDKSIKRSIARMLAEIERQLETVEKEIQNHIDAMPGLKSKQDILDSVRGIGKNTAAMLVTELPELGRLNRRQIAALVGVAPINRDSGRFRGKRMTGGGRRYVRSQLFMPTLAAIRHNPRIRQLYKRLIANGKKKMVAVIACMRKLLLIMNSMLAKNQCWISKTVLL

SEQ ID NO: 241017 - protein, 323 aa, unidentified
MNKDIKYFGIDISHLVFDVTDSDGNYYQFKNNPTGFKKFVKLLKVNSHCVMEATGYYHYQLAYYLLESGIKISVENPLSVKRFIQMKLSKIKTDKSDSKLICEYAKQVELKLWKGNSKHQTECLQMTRLLAVYTKQSTMLKNKLHGEAVLGNPSKSVVSSLKRSLKQVQKEIKTLEDKLIILVKEVHQDVLTRLKSIPGIGNKTALMLVVLTDGFERFTSGSELCSYAGLTPVIRKSGSSVTGRPRISKIGNQKLRSLLFMCSFNACKYNKACREIYERIVAKGKSKKLALIAVCNKLLKQAFAIAKSGLLYDDAHRSGLVKN

SEQ ID NO: 241018 - protein, 456 aa, unidentified
MKETELSMKIVHPNAAGIDIGSKTHWVAVDQEPKNVREFGVYTRDHQRLVDHLKSHQITTVAMESTGSYWQTLFHSLQKAGFEVVLVQGSQTKNVKGKKTDILDCMWIQKLHTLGLLSSSFLLSDYLQTLRTHYSHREHLVEQTAMYINKMQKALRLMNIRLDVAIRDLTGKSGRAIVEAILDGHRDPAYLASLAHFRVKKSSDEIAAALHGNWRDDLLFELRSCLKFYDAYKREILICDQEIQSVLLNYMPGVDLTALEKKSPEKLSHKQINRNSPSFNVRQLAFAHLKTDLFQIPGVSHSTVLCLLCNMGNDIKRFASAKRFASWLRLVPNNKLSGGRIISSKTPKGKHAIAIALRQAANSIGNQKEHPLTPFFKRIAYRKGRNAAVTATARKLAVIIWNMVTKTQSYFIPSTEALMEKRKNAQVKNIKLRLFRLNLTDMELAALFEKTSFPST

SEQ ID NO: 241019 - protein, 385 aa, unidentified
MKRNDLSRCLAAFDQNSTIVAVVELSLGSWLVRGLVPGLKRQPLKKLSAGAEGLLALLERWRREALEAGHAVGRVAVAFEAGRDGFWLARWLRARGIEAYVIHASSTAVSREHRRAKTDRIDTQMLMRAFLGWLRGEAEHCRMVAIPTLAQEDAKRPNREHESLVGERTRLVNRMKATLTRLGICGFAIKLRKAAQGLAALRTPEGEPLPPNTLAELCRDLERLALIRVQIKAIEQARLQRLEAGPAQATHPMILMLAKVLGLGVETADMLVHEVLARPLRDHRAVARYAGLTGSPDESGSKRREQGLAKAGNARVRRGMLQLAWRWLMFQKGSALTQWYRSRTADGRSGIRKTMIVALARKLLIALWRYVTTGELPQGVVLKAA

SEQ ID NO: 241020 - protein, 318 aa, unidentified
MTGQTSTYVGIDVSKGRLDVAIGEQGEFWNVANDEKGIAKLVERMKEEQPELIVLESTGGLELPLMAELYTSHLPVALVNPGRVREFAKSIGLLAKTDKLDARLLARFAEAVKPPVTHLPDEQEQHLIALVVRRRQLIEMLVAEQNRLNTVRHSMRANLEEHITWLRQALADLDHEIQEFIHQSPIWKDKGDLLQSVPGVGPVTACTLLAELPELGTLDRKKIAALVGVAPFNDDSGHRRGKRRVKGGRSSVRNVLYMAALSASKFNPVLSLFYKHMIQRGKEKKVALTACMRKLLTFLNAIIRDQQRWNPSLKHFAS

SEQ ID NO: 241021 - protein, 444 aa, unidentified
MKQKAFLGIDVSKGYADFLLLDEHKKVLEEGFQLEDNQKGRQRLKILIQEWFSKGITELYCGVESTGGYENNWYSHLKCLCAQMNIQVSRLNAKAVKAVSDATLKRTITDLVSAHNIACYLISFSEKVDYGRGTETETRFKEGRQHYSYIRMLGKQKVQLSNQLEKLLYQHFGEMLVYCRHGIPSWLLRMVSQYPSAESVVKAGMKKLTAIKGISADKARVLVEKSGVSVQLISRESRHIIAATSKEILHKLELIEKEKQYLAKMYEHEEAVKLITSIQCIGVDSAIALMLEIEDVNRFAVTKKITAYYGVNPTFKQSGDGTWGSHMSKKGRCEIRAILYMASLSGIRCNSILKPLYARYRAKGMKHYQAMGVVMHKLLRIIYGVLKNKTPFDPAIDEHNTIKAKEKQKEELKKEQKKYRYQAVSTDAPLSNRAVQKRKKQIAS

SEQ ID NO: 241022 - protein, 342 aa, unidentified
MQITTIGIDLAKTVFQVHAVDADGATVVRKRLRRSEVLSFVSGLEPCLIGMEACATSHYWGRELAKFGHTVKLMPPAYVKPYVKRGKNDATDAEAICEAVSRPNMRFVPVKSADQQAVLMLHRTRALLIRQQTMLANAFRAHLAEFGIVVAQGIRHVRALIEKVFGEDTVDLPALARTALRPLVAQLMELRLQIKTIEKELLAWHRTSQQSRRLETIPGVGFITATAIAATVTDPSHFRSGREFSAWLGLTPRQNSSGGKDRLGRVSKMGNGYLRSLIVVGATAMIRYAREKGPVSARWINVLLEKKPARLVSVAVANKTARIAWALLVRKENYRVSVHVAA

SEQ ID NO: 241023 - protein, 317 aa, unidentified
MQELFDIGVDVAKANVVIAVQDHPELACELVNEPGALRRWLESVPPESRLAVESTGRYHGLLVHLAQQAGLRAYVLNAWDVSMYAKALGMRGKTDRTDSQVIARYIREHHARLHPYEPGSAAQQAIDQLIRQRARVQVKQQSLMRILQDLPALDPQRQAVAQSLQAVIHTMDAQILAWMHSEPALAEPFDRLQTIPGVGVQSAALLTSLLGRIGFTNADALVAFSGLDPRPKDSGQKKGRRRLSKRGAALIRRQMYMCACSASRTPAFKPVYQALRARGLSGIEAMVILARKLLRVAFALWRHQSVFDSERFRPKMT

SEQ ID NO: 241024 - protein, 349 aa, unidentified
MDKVITETIGLDLGDRRSSYCVVDQGTGEVREEGQVATTPTELGAFFRRWPAARVVLEAGGHSPWASRLAAQRCLESLVANPRMLKFIFGNQRKSDRVDARSLAKVGWMDTSLLSPVVHRSQKAQTDLAVVRLRKTLVEARTKRVNALRCTIKSLGYRLPKHAAKSLGPATLPEVPEELRTAARPMLGAIGALTERIEAYDKQVVKLAKTRYPQTEALHQVDGVGALTALAYVLTLEDPGRLRVSRDAGAYFGLVPKRDQSGQTDKQLGITKGGDALVRTLLVQCAQRILGPFGEDSALRRHGLHLAQRGGKAAKKRAVIAVARKLAVLLHRLWVTGEAYEPLRAARTA

SEQ ID NO: 241025 - protein, 342 aa, unidentified
MEKITTIGLDIAKSVFQVHGVDAAGEVVVRKRLSRARVIPFFAKLPRCLVGIEACNTSHHWARELIALGHDVRLMPAQYVKPYVKRGKNDAADAEAICEAVTRPTMRFVAVKTPEQQSVMMLHRVRLMLNRQRTQLSNAMRAHMSEFGIVAPVGRLGLERLLTIIADRDDESLPGDARLCLEMLGAQLAVVKEQVLENDRRIRASARETEVGRRLMEIPGVGPLLASAFVASVADPHMFKTGRDLAAWIGLVPRQNSSGGKDRLGGISRAGNRYLRQMLVVGAMAVIRHAERHGSKRAWLIELMKRRAKKVAAVALANKTARMVWAMMTSGAHYREPSLVHA

SEQ ID NO: 241026 - protein, 349 aa, unidentified
MLADQVDCVVGVDTHRDEHVLAVVVAPSGVVVAQRSVRASARGYAQALRFVEQYSSGRRVWAVEGVGHYGAGLARYLSGRGETVLEIGRGPRDEQRLQGKDDQLDAIRAARTALASRTLSLPRAGQRREALRLLLLARRSAVDVRREALAQLRSVIVTCPDRLREQLRRLPAGRLVVRCSRFRRSSACTPDELASRLVLRSLARRVEAATAEAAELEREIHAHVCALAPRLLDEPGIGPIVAAQLIVTWSHPGRVRSEAAFARLAGVAPIPASSGQTTRHRLSRGGDRQLNCALHTVILHRRQHDPTTKDYIARRVAEGKTTRDAVRLLKRYLARHLYRLLQTQEPLMA

SEQ ID NO: 241027 - protein, 380 aa, unidentified
MRVVSMVKGKSISVSRRLWIEKDLRSWIKQLASLSVPQESVLVGMESTACYHVNLYSFLISLGYTVIVINPLLISNFVKLQLRKTKTDKKDAYVIAQFLLLNRDSLGRTVSSSDFSDIRDLSRQRESLVDQMTSVKIEIKRLLTMTFPELEHIACIFTKSMLRLLCQYPSAASIRQAKRSKIVKILIPGSYGKQTDASVERIVQAAETSIGTSSPAKEIILKQKVSLLMQLEQHLQELTDILTEQCQGKMKRDMDILTSMKGIGKKTAINFLIEVGRDVKEFESHKKVIAMAGLDPALYQSGKIDRKGKITKRGNRHLRRVIWLMTTKVIQFNARCKQYYLKRIQDGLPYKMAVLATAHKLIRTMFAMLTNETQFNESMN

SEQ ID NO: 241028 - protein, 379 aa, unidentified
MDVLMTRCAGLDVHAETIVACVMIGEQDDELFIETETFPTLTKDLFRLLKWLENHGITHIAMESTGVYWKPVYNILEDYFDITLANAQRIKNVPGRKTDVSDAEWIAKLLRYGLIEKSFVPPEDIRSLRDLTRLRKKWIGHLTSEKNRILKVLECSNVKLNSVISDVFGVSGRKLLSKLIQNGYVDSIDVENSIHGRMKHKKQMITDSLFGTLNDHQIFLIKQSWQHIVYLESLISQIEERIDEILKNYKEEVELLLTIPGIKKDSAAIIIAEIGVNMEQFPTSQHLASWAGVAPGNHESAGKRKSTKTTKGNPHIKTVLCEVAWAISRSRNRWLAAKYWSIAARRGKKKALVAISHRMLRIIYSMLINKEPYKEPLIN

SEQ ID NO: 241029 - protein, 351 aa, unidentified
MEPQITALPKLYIGIDIHKRSWKVHCSTELFSGKSFSMSPDPGQLNKYISKHFPDHEVSVAYEAGCCGYHAHRCFEVYGWRSLVVNPADIHRKGKERHTKTDRIDAQLISRELKDGRLEGIVIPNVEREELRSLFRRRNDLVKDFRRIKSYIKMQLLYFGIREPEEFDNDHWSHRYRKWLDDMVFRYPTAKATLESRMRSFRFVDQELRDVSTQLRRYCKVHYKKDYMLLRSIPGIGGIVACGILCELGDLRRFNSVKHLAGYVGLAPGVHQSGGTYKTMGMTMRAHRLIRSYFVEAAWQAIRADPVMQAYYRRHIRKDTKRIIIKVARKLLSRTLAVIKTEIPYEIGVVA

SEQ ID NO: 241030 - protein, 430 aa, unidentified
MKSNTQNAKIEAITEKTLVLGIDVGSETHYARAFDYRGIEYSKKPFKFSNTEAGFVTLKEWILDLKERHEKDKVVPGMEPTGHYWFNLGKFLQDNEMKPVLVNPHHVKKSKELDDNNPTKNDRKDPKVIAGLVREGRYMIPYLPEGVYADLRTASNIRFQLQAELTRIQNRISRWFNIYFPEYKTVYGKPDAKSGMLILKAAPLPEDILTLGIDGVNQIWRDAKLRAVGKARAKTLIEAAEHSVGSKEGAVSARMEIRMLLEDYESRNTRLQEVMVLIEELVRKIPMAEKLLEIKGVGIRTVSGFLAEVGDISRFNNPKELQKLAGLALVENSSGKHKGETTISRRGRKRLRYLLFEVAMSLVSKNQEFRELHNYYTTRRLNPLKKMQSLMAIAAKLIRVFYAMLTKGVDYDPKKMVSDIKRPAVYLQAA

SEQ ID NO: 241031 - protein, 354 aa, unidentified
MKRVRAELQPDERVFVGIDLHNNKWHVTVRTADLELFSGSIPGKWEALKRILCRYKGHRIHTVYEAGYFGFWLHDRLVDYGAGCIVTPPSLIPQEYGNKVKTDRRDSRKLAHFLAKGMLKRVWVPTEKERYHRQVIRRRRQLVRDRTRTQSRIKAELKLYGFDISAPNGSWTNTFLLNLGRIRFNNHWMQESFKRLLEQYYFLDEQVAKQTGLLKQLSETELYRKRVEILTSIPGIGTIAAMELLLELQDITRFQRADQLAAYVGLTPSQYTSADKVRMGRITCVGKNSLRAMLIQASWTLIRKDGVMRGKYDRLKSRSGGKRAIVAVARTLLIRMRRLLLDNNPYVVGLVATN

SEQ ID NO: 241032 - protein, 352 aa, unidentified
MNDAKYIGMDVHTATISAAVRDSSGNLVMEATFETKAEIVLEFVHGLRGSLHVSFEEGTCASWLHDLLKPHVSEVLVCDSRKNALLRVGNKNDREDARKLSELLFLNKLHPVYHGETGIRTLKEPARSYLTITRDLTRVMNRLKAIYRGWGIACAGQQVYAPRYRAEWLAKITEAGVRRRAEIYYQQFDVLVALRQEVRRELLAESRKHQATRLLRQIPSIGPIRAALLIALLQTPHRFRTKRQLWAYSGLALRTYDSGEYRFVGSQLKRSKKAVTIRGLNKNHNHDLKNIFKSAATQAAATAGPFQKFYEDRLASGMKPPSTRIEEPTLLCNHVDFQVTGTTYRDLTGTLT

SEQ ID NO: 241033 - protein, 316 aa, unidentified
MDTSTIQNINIGVDTGKSQLDIYIRPLDTFFSVSNDDKGIKQAIKTINQYSPQRVVIEATGRLEMPFILACADANIPYVIANPVHVKRFAGAIGQRAKTDKLDAKLIAHYAEAIQPALTKLKPDSMRLMADLVVRRNQLLSMQTMEKNRLQIMPKQLAMTIKPILTAFKKQIEKIEKKIVDLIESCPEYQAKNVILQSIPGIGKIAAASIISNLPELGYITNKQAAALVGVAPMSRESGRYKGHRKIQGGRAQVRTVLYMAMMSAMQCNPIFKTTYQRLLAEGKPKKVAIIACVRKMVIILNSMLRDGDLWDAKTA

SEQ ID NO: 241034 - protein, 422 aa, unidentified
MSYCPVAGIDVSKQFSDMCILSPDNKIFAQEKIYHDETSINRANALLQKAERLFFSKPVIVMESTSHYHLILFQFFSEHGYDVIVVNPLQSNSMKDFSIRKKKTDRVDAFKLAMMYRTKTLRPSQIPQTATRALRQLCRHRAELLNDVSSYKNRLTALLDQTFPGYDNVFSDVGGVTSCAVLVRFPTPTILLVEEESELVEVIAAACKSGYSFAKKKARLLISAAQKAQTLGIHSCADETLIVCTIQMLRTLSESVLQIETAIDDLLAQIKEMRNNVSLLQSIPGIGSHSAALLLGEIGDISLFKKPKQLAAYFGLDPTERQSGSFRGTKNKLSKRGSPYARAALHMGVVNSICKRGKDSAANPVLLSYYEKKCKNKPAKVAQAASMHKLVFIVFAVLRDQKPFELKTPEQHAVEQGFVKAA

SEQ ID NO: 241035 - protein, 350 aa, unidentified
MTVNYVIGVDVHKHNHTFVAVDCTGRKLATKSVQATTAGHQMALRWARTTCPGSRLWGVEDLRGLSCRLEAELLDAGESVVRVPPKLTARQRASARTVGKSDPIDALAVARAVLREPDLPTARHDAYSRDMKLLVDYRDTLLTTRTAITNRVLGRLHELAPDHSSTRLVLCYANHRRVAQALLQSHTGLLAELIHADLTQIATASDHINSLEKRIKDAVQCGASALVGIDGCGPLMAAKIIGETADVSRFTNEAKYACYAGVAPIPHWSGGTPVHIRATRSGNRQLNRALHTIAMIQIRHGGRGEHYYRRRIADGDTHRQALRCLKRQLSRTVYRALITDTKARATAASN

SEQ ID NO: 241036 - protein, 336 aa, unidentified
MVQIYGIDLGMSSFDVSFLSESGSVRHLSGVKNTVHGISKFLLSLPSSAVLCAEHTGVYGDLLLRLCTLNRTCLCFVPGYQIKHSLGLQRGKSDPLDACRIREYAERFYDLLRPCFYPGEEMSELQELYRTRSLLVESRKRLDTLNIGDNCKSSVSLAADHARRAVLAELNTQISGLDHEIEALIQNSSEFSRNYQILTSIVGVGPVTSCELIIKTENFRKLDTAKKCAAYAGIAPYPKESGKMKCGHKISPMGDKQLKTLLFLCARSAKEHNKEIRLYFLKKHKVEKKHFFVAMNNIANKLLRLIYSLIHKQQTYDRDYIQRDPRCVVISDTNKC

SEQ ID NO: 241037 - protein, 420 aa, unidentified
MSKHRYRTTECKQVDWAKLGETVMGQRVVLSVDVAKEDFVSALMVEDKVAIRIKWRHPNETLDWLSGVKQVAAISTLEAVMEPSGTYGDAVRHQLTARGIEVYLVSPKRVHDGAEVYDGVPSLHDAKAVEIIGYLHREGFSRPWPDMSADRRAVEAQLSQLRICKQRFQANLNRLEAQLSRYWPESLGILGQKSLTLQHVLASYGGPGSINAHEEEAQALMRRVGGPGLSQDKIKQLLRSTGETLGVPCLREENELLQWLAKDLLATHEQVRCFERKIEQQVSDNDLLLGMAAVVGKVTSAILLTTLGDPRSYPDAASYCKGMGLNLKERSSGKHKGQLKLTKRGPSVARFYLYFAALRLIGKDPLVKRWFEAKTKRPGAIKTKTVIELMRKLAKGLWHSARGESFEVDKLFNLKLVENA

SEQ ID NO: 241038 - protein, 450 aa, unidentified
MAKPKRRKHRKLDRSLPEMRPNAGGIDLGATEIFVGVPADRDSDSVRSFPTFTEDLHQLADWLQRCRVDTVAMESTGVYWIPLFQILQARGIEVHLVNAQHVHHVPGRKSDVLDCQWLQYLHSVGLLRASFRPEQAVCEIRSLMRHRENLVEMSCVHVLHMHKSLDQMNLQIHHVISDITGVTGLAIVDAIVAGKTNPKELAKLRDHRIKASIETVTKSLVGDYRPEHIFTLKQSLTAYRYYQQFIADCDHEIQQRIEAFDSKDQGPTAPADATSTETSKESGFNLHSHLERIFGVDLTLMPGFECLRIQTILSELGADLSKSPTDDRFCSWLNLCPKDGSSAGRRIRAPRIKTKNRVAQTFRLAAQSLHNNQSYLGDYYRSQRARYGAPKAIKNTAHKLARIFYRLVTTRQPYDETVFAKLEMHNQKRRLHKLQSLAKQMGYSLVEAHA

SEQ ID NO: 241039 - protein, 416 aa, unidentified
MTRRGDPGSTSAFHRFSRCLLASRVIVSRLIASSLLSDVMKRRLRAVNGVQSRRAKDCITEAPMIETVYCGVDFHARVQTLAYCSTNDGEIHLCELHHQKDDLRAFYAGFSGEVIVGLEASGYSGWFERMLEELGHTVLLGHAVDIRRAANRRQKNDRRDAELILDLLIRGDFPRIHRPSAHSLEILRMLRYRHRLVKMRTMIKNHLQALAIGSGVAIKARLLTRTGRARLLAAQMSPVMSRQREEWLSLLDNLDARIAAVVKWLEQQAKDDAKAQLLRTHPGLGLLTSLGLVHTLEPVSRFSNQRKVVAYVGMEPMERSSAEKKRYIGISKAGSRLVRFLLGEAAQTAARDDQQLKRFYLRLAAKRGKPKALVAVGRKLAIRSYIMLRDNIDYAEFLRRGVEARPARGTRKHVDA

SEQ ID NO: 241040 - protein, 347 aa, unidentified
MNITRIGLDLAKNVLQVHGVDERGKALLRKRLKRGEVVAFFARLSPCLIGMEACGSAHHWARELAALGHTVRLMAPQFVKPYVKANKSDARDAEAICEAVGRPSMRFVPVKTLEQQSVLSLHRARQGFVAARTAQANQIRGLLSEFGIVIAKGIRQIEGRVPEILEEAENGLCGMNRALFQRLFEHFRQLDRQVKQLEEQIHAWHREQVDSRRLAGIPGIGPLTASALTAAIGNAREFAHARQLAAWLGLVPRQASSGGKDRLLGISKRGDVYLRTLLIHGARSVLRRTRACPDPAQGWLAQLVHRRNPNVAAVALANKNARIVWALLAHGREYQPGYVGAPLPTAA

SEQ ID NO: 241041 - protein, 361 aa, unidentified
MKHSNVITVSQPAVTIGLDLGDRRSHFCVLNDRGDCPHRGEVPTTADALRAFFLQHVGEMLVMEVGGHSPWVSRLAEQTGLDVVVANPRKVALITKNERKNDRADAELLARLGRVDRRLLSPVHHRSSESQAHMMMLRTRMAIVRARVALINHVRGAVKSVGGRVKGCSTCTFHKQITQQIPLELSPALLPLVHLIEELSSQVKDFDKKIERLALERYPQTQTMRQVTGVGSLISTSFVLTIADPTRFKHDRDVGPYLGITPETKTSGDSDPQMRITKCGDREMRRLLVLGANYILGHFGPDCDLKRFGLKIAARGGKNARKRAKVAVARKLAVLMLRLWRTGEVYDPFYLAKRRGEPIPA

SEQ ID NO: 241042 - protein, 400 aa, unidentified
MLSIGIDVSKGKSTVCGMKPEGEIVYAPFEVQHTREGMSELVSLLRSSGEEVRAVLESTGSYHCPVVAALLENGIFVSVVNSLRMKRFCSQSIRKVKTDRIDAMQIALYGLAYWQELQPTRLPEDTYRELQLLARQYYQMTSMLIKAKVDFNAICDQVLPGMQELMNDHAGRHKLSDFVLRYRHTTHILEMGETRFRKDYCKWAEKKGYRNCERMAALIFATAQNGIPVLPNAPSTQIVITEAIRVLHTVEASRDAILTQMQALAKTLPEYSLVREMPCIGDTLAPRLIAEIGDVRRFHSKRALIAYAGIDAPPYQSGKFCANNRHISKRGNRYLRKTGYEVMQSYAMHKPANDPIFTFIEKKRSEGKCGKLAMVAGLNKFLRVYYGKVTELYRSLPAIE

SEQ ID NO: 241043 - protein, 355 aa, unidentified
MEVTTIGIDVAKDVFGLHGVDAQGRVKVRKRLVRKHLLEFLSKLPACLVGMEACASAHYWAREIERLGHRVKLMSPRFVKPYRKSDKSDANDAEAICEAVGQPSMRFVPSKSEAQQDLQALHRVREQLLKSRTALVNQARALLAEHGLIAPRGIAHARRLLTELLAQPERYPLSGLLRETLLEISERLRFFDQRIAAYDLRIEQVFRHDERCQRLAKIAGVGPLVATAVVAAIGNAQEFKSGRQLSAWLGLVPRQYSSGNRNLLLGISKRGDCYLRTILIHGARAALCRAVRKRDQRVTWASRLRLRRGTNVAAVALASKNARIIWALLTRGENYRPLLAPTPSHAAGGLQLKCS

SEQ ID NO: 241044 - protein, 338 aa, unidentified
MPLYGGIDLHANNSVVVLLNEQDQVIYQRRLSNHLPTILEQLAPYHSDIKGVVVESTYNWYWLVDGLMEADYRVHLANPAAMQQYSGLKYTDDHSDARWLAQVLRLGVLPEGYIYPKAARAVRDVLRKRAHLVRQHTANVLSVQNILARNTGSRFSAKRIHEFTKADLEGLLPEANQVLAVTSSLALLDCLSQQIKTLEKAVTKSLKHTPAYEQLLTVDGIGTILAQTIGLETGDIGRFPTVGNYASYCRCVTSTKISNGKRKGQGNVKNGNPYLEWAYMEAAQFAIRFNPTVQRFYQRKHAKSHLMVARKAVAHKLSRACYYIMRDLVPFDVHKALG

SEQ ID NO: 241045 - protein, 338 aa, unidentified
MDKFCGIDLHSNNCVVVISDEADRIVYQRRLPNDLTQIRAALAPYREELVGVVIEATFNWYWLVDDLMKDGYQVHLANPAAITQYEGLKYSGDFTDAAHLAQLLRLGLLPEGYIYPAEERPVRDLARKRMQLVRCRTAQILAIENLMARQTGSRMTSEMIKRLDEGQVDGLGFSPDVALAMKANLAVMQTLQSEIGILEKRLAERVTLRPEYSLLKSVPGIGPILATTIMLETGTITRFADVGNFSSYCRCVQSRRESNSKKKGEGNTKNGNKYLAWAFVEAANFAIRSCPEAKRFYERKKRRRNVIVAIKALAHKLARACYHMLREQKPFDVARCFA

SEQ ID NO: 241046 - protein, 368 aa, unidentified
MNTVKFIGMDVHKNSITIAICDADRHDQPRIYGAINNDLDAIDKFCRKMVSTANQLHFVYEAGPCGYGIYRHLTQKGFDCMVAAPSMIPKKSGDRIKNDRRDAKMLARLHRAGELTAVYVPDERDEAMRDLTRAREDAVLATRKAKQRLSAFLLRNRVIYTGRTRWSKDFFNWLSDIAMPFPVQQVVLQEYIDTVNDNLKRVERLTEQIRLQVPSWRLAPIVSALQAARGVSLIVATTLLAELGDLSRFDNPSQLMAHLGLVPSEYSSGESIKRGGITKTGNGHARKVLVEAAWAYRLQARVSRPLLKRQQKLPDRVCQIAWKAQLRLCARFKRLTAQGKAKQLVVTAIARELSAFLWAMAKQVQPVA

SEQ ID NO: 241047 - protein, 389 aa, unidentified
MIYVGIDVAKDKHDCCILGSEADKLFPVFTIPNNKAGFDELYEKMFSVTDDKTKIKVGLEATGHYSLNLLGSLIDKGLPTCVINPLHTNLYRKGLSLRKTKTDKVDARSIAMMLMTNKTLKPYSDISYHNEELKSLTRYRFDKVQERAKLKSSVARLVNILFPELEKLVPSLHMTSVYSLLSKLPGASYITECHLTHLKNLLETASKGHYGRDMAITLRNTARDSIGSVIPAKSMELKHTIHLIKVMTEEIDEIEDSIKSIMDTCNSPIMTIPGISYRMGAMILAEIGDFTRFNYADQILAFAGLSPSTYQSGQLDSSYSHMEKRGSRYLRYALFNAAKFVCKWDENFGAYLSKKIGEGKHYNVAIGHATKKLVRTIYRMELTGEAYRR

SEQ ID NO: 241048 - protein, 322 aa, unidentified
MKMANTTTITAGIDTSKDKLDIAIHGQSGGFIVENEAGGWEKLAARLRGAGVGRIGIEATGGYERGAMRYLQKARFDVVLLQPLQVKAFARMRLRRAKSDKLDAALIADCTHTMDAYNKMPPDPRFDALADLLTYIEQIEEDIVRFKTRLEQTRDGRLRKNIKDQIEHFKKQRVAELRRLRDQIFAHGDLAGRYKLLLSIPTIGARTALSLVVRMPELGLVSREQAAALAGLAPFVHQSGKHKGETHIGGGRARLRRSLYMAAFTGAFHWNPALMALYKRLTARGKSHKCAVIACARKLLIFANTVLARGTPWEEARPIAAA

SEQ ID NO: 241049 - protein, 360 aa, unidentified
MHATTVAVDLAKSVFQLVVADEHWRVTETQRLTRTQFERWFVNREVGLVVMESCGSAHHWARWLNALGIEVRLLPAQYIRAYVRRNKTDATDAAALLEAARAADIRPVRVKSLEQQALQGLHRIRSLWMGTRTSRINALRGFLREFGIAIPVGARTGVEAISRVLADPNTAVPDLIRGSAKLLVEEIRLLEARIAQVERELAAAARLSPACTTLLSIPGIGLLTATALVAATSGEVSHFQDARHFASWFGLTPREFSSGNSRYLGRISKKGDRYLRMLLTHGARSVLRAAKVADGAGKEVCGVRRWALEVQGRTNHNKAACALANKLARICYATLRDKTAFDENSRLGRKMNRQAFAMPA

SEQ ID NO: 241050 - protein, 338 aa, unidentified
MGEQYVGIDLHRRRSVIVRMTPEGEMLETVRVDNDPVALSLALAKAGPDPEVVLEATYGWYWAADLLQACGARVHLAHPLGVKMFGYQRVKTDARDSRNLAELLRMGRLPEAWLAPPQVRELRELVRYRAKLVALRSGLKAQVHAVLAKEGVRVPMSDLFGVGGTRLLDQLQLGRAYELRVASLRSLITAYDQEIAMLGREISTALAGDIGYLAIQAIPGVGPVLAAVFVAEIGDIHRFAGAPQLCSWAGLTPRHRESDTTVRRGPITKQGPRLVRWAAVEATQRLPGGSKQAADFHRIADRRGTGIGRVAAARKLLTLVFYGMRDGQVRCLASREAM

SEQ ID NO: 241051 - protein, 428 aa, unidentified
MNYNTQNAKIASITEKTLIVGIDVGSETHYARAFDWRNYEYSKKPLEFSNTEAGFLTLKAWVEDIAEKHGKTAVIPGMEPTGHYWFALGKFLQDSGMKPVHVNPRHVKKSKELDDNNPNKNDRKDPKTIAALANEGRFSYPYIPAGIYAEIRSLSNLRFQTQEELTRIKNRTARWFSICFPEYKNVYKDLKAVSGRMVLKAAPLPEDIIKLGAEGVNRIWRDAKLRGAGMKRAKTLVSAAEHSIGSKEASEAARIELKNLLNDMDVYTARLEELIRSIEEKLKEIPYIDKLMAIQGIGLVTVSGFIAEVGDIGRFDNPKQLQKLAGYAIVANESGKHNGESRISCRGRKRLRYVLYEAAISLIGKNAEFREIHEYYRSRKENPLKKMQSVAAIACKVIRVFYAILTKGVDYDAKKLMGDIRRPQIQAG

SEQ ID NO: 241052 - protein, 343 aa, unidentified
MNHYAGIDVSLERSNVCVVNASGKVVWEAKIESEPQALIAWFRSLGVTLERIGLEAGPLSQWLYAAMKEAGLAVELLETRHVRNAFKTMPVKTDRKDARGIAQLVRVGWFRPVHCKSMEAQEMRAMLTVRKLLQTKLHDVEMSLRGILRGFGLKVGRVTPRRFEARIKELVSSHPSLQTVAEALLAARAVLLCEFNKFEKQVRSIARVDANARLLMSAPGVGPVVSLSYISGIDDPTRFKSSKAVGPHFGMTPKKYQSGETDVTGRISKIGDASVRTALYQAAHIILTKPVKGGPLKSWAARLAKRAGMQKAKVALARKLAVILHRMLVDGKPFDSAAAAARQ

SEQ ID NO: 241053 - protein, 349 aa, unidentified
MTTYIGIDLHKRTQTWVALAENGKDILFTKEFPVTPEGVRSGIKLSQKCGDTMVVAIEPTCGWMWVVPLLRSCGMDVHISNPRKVKAIADSLQKTDENDATILAQLVRTGIMHESREVTPEIQKLRALIRERVFLVRVRASMKTRLEGIVTRNGRHRIAGSLSTKKGKVAIIESGEQEWRRSLGTIADVGKYITQLDLEIATYAKEKIPTLLMTLPGVGPVTAVSMWAEVGDYTKFPSPEKLCAFAGLVPTERSSGGVQRLGHITRAGSTILRYVLVEAAMRVRDTDTTSVLYEFYKTIKTKRSAMRARVALARKILTISWYMVKKGEAYQQRFTVSKVEPFPVENKIA

SEQ ID NO: 241054 - protein, 450 aa, unidentified
MPRKPKNSRSGGASSAHAIDPNAAGVDIGATEIYIAVPVDRDPRPVRRFATFTEDLMAAAHWLKECGIKTVAMESTGVYWIPLFQILEARGLKVCLVNARHVKNVPGRKSDVCDCQWLQHLHSAGLLRPSFRPEQQVCAVRSLVRYRDSLVQLSAVHLQHMQKALDQMNLQLHHVISDLGGKTGMAIIDSILAGERDPHQLARLRDPRTHASEETIAKSLVGDYRREHLFTLRQSLTGFRQNGQLIADCDVEIELLLKEFPSGDGPGAGSVPEPQSQLKRKPRRNEMNFDLRTQLHRIFAVDLTEIPGINTLTAHALFTEVGRDLSAFRNVAAFTSWMGLCPDNRVSGGKILRAQTRRVNNRVARALRMAAQALSRSHGWLGQYYRRMRAKLGGPKAVTATAHKLARIVYHLITTGQAYDETVFAQQEAQNKQRNEIRLRPTKPENLASS

SEQ ID NO: 241055 - protein, 391 aa, unidentified
MYVGIDIGKTIHQAAFLDDHGHDLCSSLTFHNDDEGYQLFFDTLDKNHDGSHVIIGMEATGHYWLNICSALLSRDFETHVINPIQTDAMRRMNIRKTKTDSVDCYYIARVLMIGEYSDVAIQDENIAELKQLCRYRYSLVDSVTAVKNQITGIMDRIFPEYHTLFSDIFSVTSIELLKRYTTPAEISKVTPKRLTALLAKYSRGSFGEEKAQQILSIARTSVGNANVNPAFILQLRQQIAQIEFMREQINIVEKRIELCYSRFPCFLHTIKGVGLISAATIFAEIGDIARFDSPKKLVAFAGIDPSIYQSGNYSSSHASMSKRGSPYLRRALWNTAEITSRMNPVFAEFYQRKRSEGKNHMTAIGAVARKMTYSIFAILRDQVPFNHDFGA

SEQ ID NO: 241056 - protein, 497 aa, unidentified
MTTKSSIYANGNPQLTKLFETAGHPAKVMCVALDYAKAQHTALICNGLGDLLKGSFALDNTPAGAAQLLSQVRECAKRRKIRSENVFFGGEDYPSYAENFLRRLRQEKFLVVRVNAWEAKQQRSNFQASSDSLDLLGIARCCLHRRGETVHDLPVAYTNLRIATRDRDQLVRNRTAVSNRIHSYVDRLFPSFLDVKKSGVCPFSQASLELMADRFSPAQISRRPRQALAEWLARRGVEQPKEVADQLKQLAKEVLGPAPEHTPMLQGTLVKLVELFRGLEGNIALLDREVAFWLARTPGALLTSIGGFGITLAAGWTAELGPPNQWCAVRRLCSYAGVVPRSKQTGGPDKDPVVGPVQQRCNKRLKNVVLQAVEKVRQYGPDDLLQAAQQLEAQGSHVEFALAKRLIRLGKYLAVTGTIYRPKALLAPDTPKATLVTYYQSLWDKLLKKWKDKADLKVVFAPEHPLGQWRNMARELYALELRLPQQRTAPSPSALTP

SEQ ID NO: 241057 - protein, 298 aa, unidentified
MSQNDFKTSETMQPQEASPVKHQMSVLGIAIAKRLFHIVGMHERGQLVLRKRLARNALMPFIAALPPVLIGLEACGGAHYWARRFREHHHDVKLMAPQFVKPSSKSNKNDMRDAEGIGEAVTRPTRRFVPTKEVAQHDIQALHRVRERLRGARTALVHERHGLLYAYGMVVPTGVSKFRQTVVGKLETDKATRTPLSQEMFGKLMDEFAAVEKQLAYDQEQLDALATMHPACQRLLTMPGIGPFTATALVAAVSDARAFKNGRQCAAWLGLVPRQHSTGGRNAYSASANAGRSISHTL

SEQ ID NO: 241058 - protein, 462 aa, unidentified
MTVPKTKGSRTKATPLPTSLPAIRPLVAGLDVGSSEHWICGPARADGQPNVRGFGTTTDQLQALADWLAEQGVESVAMESTSVYWIPIYELLESRGIEALLVNARQLHNVPGRKTDVTDCQWLQLLHSCGLLRGSFRPSEAITRLRALQRQLANLVAERTRCVQWMQKALDQMNVQVHRAVTDLTGTTGLAIVRAIVGGERDPARLALHRDYRCRKSAAEIARYLTGTWRDEHLFNLTSALRLFDALEAEIAAYDAQLLTAVESLQPPDRQADPVPPPPHPAKEKAIKARGEQQARTTLWRFAGVDLTRIDGISAGAAQVVLTEVGPDLAAFPSEDQFVSWLRLCPRTPISGGKPLKKRRNGLGANRIAGVLRMAATSLQRSKTALGAAFRRIARHKGGAVAVFATARQLAQLIYRMLRYGHDYVDIGEQAYDQRFLVRRFAALTESARSLGYTLVPTAATE

SEQ ID NO: 241059 - protein, 321 aa, unidentified
MSVESFVGIDVAKDHLDLAVRPTREQWHAPTSAAGLADVVNRLQAIGPALIVLEATGGLERPLVRALTAAALPVVVSNPRQVRDFAKAAGRLAKTDALDAHVLAHFAEAMRPAVRPLPDAHAQELSATLARRSQLREMLTAEQHRQGTAVPSVQAQIQRHCEWLSEEITALDAEIAAQVQADPTWAETEKRLRSVPGVGRILATTMLADLPELGHLDRRQIASLVGVAPLNRDSGRQRGKRTIWGGRARLRAVLYMGTLVATRFNPIIRAFYQRLCTAGKAKKLALTACMRKLLTILNAMVRHQTSWHPPGEALGVAPSSA

SEQ ID NO: 241060 - protein, 336 aa, unidentified
MTIIRIGLDTSKHVFQIHGVDENEKAVLRRQLRRSEVEKFFAKLAPTRIGIEACGASHHWARVLRGLGHEVLLIPPQYIKAYVKRGKNDAIDAEAICEAMSRPTMRFVPVKTAEQQAALTMLGVRDLLVKQRTMLINAIRGHAAEFGITVAKGPQQVVELLQRLATGEGVPALAREMLGLLAGQLDAVNAKLKAIEARLMAWHRQDQTSQCLATIPGIGPIGGVSFALKVPDPKGFRSGRHFAAWIGITPRENSTAGKHRPGKISRQGDESLRRVLVLGATAVIQQAKRGRAAPWLLELLARKPKKLAAVALANKMARIIWAMMVSGETYRRPQEA

SEQ ID NO: 241061 - protein, 340 aa, unidentified
MKIIGCDLHAAQQTIAMLDAETGEIVEQTLKHEAGTVREFYAALPAPVVVGLEATGSMGWFLQLLDELGITYRVGHPATIRKAETRRQKHDRRDAALLLQLLTENRFPAIWIPSTDLRDLRALLLHRHQWVRLRTRVQNALHAIVLGYGVQRGHALWNRDGQAMLAALPLSPHAAHRRNELQALYQQLDEQVDRLDERVKVAATQRPRATELMTHPGVGHVTALATEVFLGDPSRFADGKALASYVGMIPSEYSSGPRQRLGGLSKQGNPLLRFLWGEAAMHAVRRDLELQRFYRRKLHQKGLGKARMAAARKLGIRLWIMLRDQIDYLEFCRRSPRRQS

SEQ ID NO: 241062 - protein, 345 aa, unidentified
MNQIIRIGMDTSKHIFQLHGVDAGEQPVLRKRLGRHAMLAFFGKLAPTVVVIEACGAAHHLARELGGLGHTVKLIAPQLVKPYVSRNKNDGRDAEGLCEAGSRPRMRYVPVKTAEQQAALMLLGVRDQLVARRTQLGNTIRGHAAEFGLIEAKGLDKLAALLAAIEQDQSVPVLARDLFAVLARQYAQLQVELKTIEARLLAWHRANAVSRRLAQIPGVGPVTAAALVMKAPDPHAFRSGRLFAAWLGLTPKDHSSAGKTRLGKITRAGDERLRQLLVVGATSVVKQAKGRGRGPSWLLALLTRKTPKLAAVALANKMARIAWKLMTTGESYDSARIDAQMAAVA

SEQ ID NO: 241063 - protein, 342 aa, unidentified
MKIIGCDFHPSFQQIAMVDIETGVYTERRLTPEEARQFYAGLKGPVLVGMEACGNTLWFERLLASLGIELRLGDAAKIRALEVRKQKTDRRDAQLLLQLLLENRFPEVWVPSVQQRDTRQLLLHRHKLVCMRRQVKNELQHLALNQGVQQKRKLWSVAGRQRLQELPLEGWTARRREDSLQLLDELDRRIAKLDVAAQQEADKDAIARLLQTHPGVGPITALAFSLTLGTIERFGRSRQVVSYLGLNPAEYSSGGRQQLGGISKQGNPMLRSLLVEAGQSAARYVPELKRAYQRLKHRKHSGVGKVMVARKLAVRLFWIWKTQQPYTAARTQGSPSHPLVAD

SEQ ID NO: 241064 - protein, 349 aa, unidentified
MRIIGCDLHAAQQSIAMVDCDTGEVTRSTLPHDADAVRDFYGRVAAPAVVGIEATGSMTWFLDLMEELGIECCVGHPAAVRKAETRRQKHDRRDADLLMRLLLEKRFPAIWMPSAELRDLRALLLHRHQCVTLRTRVQNGLQAIALSYGLRRKSGLWTDTGQAALAALPLSPHRAARRTTLQRLYRALDDDVRQLDRRVRTCVHSRPSAMRLMTHPGVGPITALATDVFLGDPRRFRDGKALASYVGMIPSEHSSGPRQRLGRLTKQGNPFLRFLWCEAAVQAAQVEPALRRFFRRKVAQTGVGKARVATARKLGIRLWIMLRDEIDYDEFCRRAVARCAETVSSCGNA

SEQ ID NO: 241065 - protein, 482 aa, unidentified
MKKRNIYRNQSQEILSLFESAGDRDKIMCIPMDYAKKDHVVMFCNGNGDILRKPFSVKNSLEGKKYLLDQLKKSCRHRGISRQHVFFGGEDCGAYADNFIAALRSDNWVVAGVNACDAKKHRDNKQASTDILDLMGICKMLLSCKGNCSPAQTGIYWNLRMLVRQRRKLVQMMTGVKRRIHFIVDQIFPGFLDEKKSGIFPFSRGSLALMGNRFSVHQIRRRNRSTLSRFLARNLVHHADHCAEHLQKYTSQVLQPPAKYIATLQLALQQQVKLFVCLEENIQQMEKEIAEHLAQTPGAFLTSIRGIGIVLAAGVCAEIGDPDRQKSLSQLVSYAGIVPRIKQTGGVQGKTQVKKVAKRCNRILKDYVVRSGYHIGVNGPDELKLDHKRRGAQGQHADFGMSRRYLRMAMCLMRTSQTYLPKSLRDTRSPKKERAQYYISTWSTLREKWKRKDALEFAFDKERPLGQWRNVVQTLYGIELEL

SEQ ID NO: 241066 - protein, 395 aa, unidentified
MFIVGIDIAKRSHEAIIIAEDGQVVRKAFSFRNNCTGYNLLLEQVRRLTLVKSQIVFAMESTAHYWLALYARLLKDGYAVMVLNPIQSHSLRELYIRKAKTDARDSLIIADLVRFGRCKASNVPQDKILALRELCRSRAYLVDMAADLKRKLIALLDRIFPEYESLFDSVFSKASIAVLSKYSTPQKVKNANLRKLTDILMESSNGHFGEWKAHQLKEAACSSFGIDDSGGVYSTLLGMFLEQILSLTAQADSLEKQISVFFQEFNNPLTSIPGVGTVLAATILSEIGDITRFSSADKLLAYAGLDPSVKQSGEFKSNQNRMSKRGSPYLRRAIWLASTVAVHRDPMFQTYYEKKISEGLHYMNVIGHVSRKMAAVIFAVLRDGQPYQPILQSAG

SEQ ID NO: 241067 - protein, 334 aa, unidentified
MNNVSLIGIDLGKNSFHVHCQDATGRALNRKKFSRTKLFEFLANSPSTTVVMEACAGAHYMVRKISELGHTPKLISPQFVRPFVKSNKNDFVDAEAICEAASRPSMRFVAPRTESQQEILALHRVRESLVRDKVKTTNQMHAFLLEFGISMPKGLAMLRRLSVVLAENNLPPYLEKLLMKLQSHYLYLVEQIHDIEHELELAAKQDDTTQRLMSIPSVGPITASILMANLGNGQQYKRSRDFAAATGLVPKQFSTGGRPTLLGISKRGNKNLRRLLVQCARVFILHLEHQSGYLAEWVKNQLSKKHSCVVACALANKLARIAWAITTKQSTYMA

SEQ ID NO: 241068 - protein, 383 aa, unidentified
MKKTQETLRIKDSIKEAILYIAFELSSSKWKLAFSDGSKIRHKTITAGNLAQLQVEMELAKQKFKITEDIRVVSCYEAGRDGFWIHRYLESQGIENLVVDSASLEVNRRKRRAKTDRIDAGKLLRMLLRYWGGEKQVWSVVRVPSEQDEDARHLHRSLENLKSERTRHRNRIKGLLVQQGIKVSNPSQKKFLEVLEKVRTWNGQAVAPGLKSQVVREYERLQVVEDQIKAWEKEKKERLKNPDTVSLQKVAKLASLYGIGSVSSWTFVMEFFGWRQFQNRREVGALAGLTPTPYDSGKSLREQGISKAGNQRVRALAVEIAWAWLRFQPQSKLSQWYMKRFGGGGKRMRRIGIVAVARRLLIDLWRYLEYDKIPEGARLKSSA

SEQ ID NO: 241069 - protein, 363 aa, unidentified
MQTIYIGVDFHARQQTICYLTTETGELVTCELKHQDKEAVRAFYAAFRGQVIVGLEASGYSPWFERLLEELGYEVWLGHATEIRRRARWRQKNDRRDAELILDLMLHNEFPRLHRPAIQSREVMRMLRYRHKLIKIRTMSKNSLQALALQSGVARRSGLFTREGKQELDAALMSPAMQWQREHWLQLLQPLDQQVLEAMAWLKAQSKDDVCIARLRTHPGIGLLSALCLVHTLQPVARFRNTRKVAAYAGFDPVERSSAEHKRFLGISKAGSRLLRHLMVEAANIAVRKDEELKCFYQRVAARRGRPKAKVAVARKLLIRAYIMLRDEIDYAEFRRRAVAARLARLRHRPNVPAVVIGQPVST

SEQ ID NO: 241070 - protein, 366 aa, unidentified
MNNGSKGAAKMTAGLDLGDKYGHLCLIETESGEVIEEGRLRTTPEAIRRRFDSEQPLRIAIEVGTHSPWVSRLLEECGHQVLVANARKLHLIYANKRKSDKLDAENLARLARVDPKLLYPLEHRSEQSQAHLALLHSREVLVRSRTQLINHVRGTVKSFGHRLPKCSACSFHDKVADGIPELLREALEPILKTIASLSARIRDYERKLETLAQEHYPETELLRQVQGVGALSALAFVLTLEDPDRFEQSRTVGAYLGLVPSKDQSGEHDPQRHISGEGDEMLRRLLVGSAHYILGPFARDSDLRRHGMKIAERGGKNAKKRAVVAVARKLSVVLHHLWVSEEVYDPLYNARRQLEGVSYPFVKAVA

SEQ ID NO: 241071 - protein, 443 aa, unidentified
MSRKKRTHLRGRRGQAFANKIRGIPLDQILCVSLDISKYFHVVMMHNGLGEIVKPAFEIDFYQSGFDQLCQAIDQAKAETQAQVVLVGMEPTSHYFENLARHLLKRCQAVTLLNSFTVKQNRDQQMMHHEKSDEIDTAAIGDLLRRGEGTPFKPVKGVYLQLQHLDRVRFSKVKFRTALQNQVIGHLDRIFPGLVIIADEAKERYKPLFGTDFWSCKTMQHLIRVCPDPRQLVAMSCQELVDAFHAQHYAMGRITAAKIIAYAEKVLLPDPELAAIRCQLLPHDIALLEDVERHIAQLERDLYTLLAETPYLVWTKLKGLSNAQVASLAGAIGDPANYKYAAQVFRRSGLVPGRNDSGTRQRKGKGKKVVKVGDVYLRRALMNGLATLILHQPVLRDYCNKLKVSKHAGVARVATARRAMGILWAVLRDRCSETLILKKGAKM

SEQ ID NO: 241072 - protein, 342 aa, unidentified
MDHFAGLDVSVKETSVCIVNDTGRIVREVKVASEPEALLAVLKNPAYHFERIGLEAGPLSQWLFSALAEAELPVVCVETRHMQAVLKAQLNKTDRNDARGIAQMIRVGLYRPVHVKTLRSQKLRMLLTHRKLLQSKAIAIENDLRGTLRNFGLKVGMVGKVRFEARIQELVENLPDLAELVEPLLIVRRTLRAQIVILHRRLLAIVRDDEVCRRLMTTPGVGPVVALTYRATVDVPARFRKSKSVGAVFGLTCSKYQSGEIDRSGSISRCGDEMMRVMLYEAAQSMLRSKKWSWLKAWAMQIARRRGMKKAIVALARRLAVIMHRIWVDGTEFRWTREAAAA

SEQ ID NO: 241073 - protein, 344 aa, unidentified
MIWIGLDVHKRFSRMGMFDPATGDLQDLGEVSNDREELQVRLEQVGSPKTVVLEAGRSSYHMAGLLEPLADEVWIVNPTELRRLQHRVAKTDRRDAAALAWWAAKGALKPLWRPDRPVLELRELTRGRTTLTRLATQLRNLIRSLLARHGYECPHRDLLCARGRAWLDTVTLEGYAGEMLTTFRELLSLIQEKADGFEQEVEAAAADCPAAQRLRTIPGIGPVLGLSLAVEIGDISRFPSPGHLRGYSRLTPAVFQSGEKEARGPITKRGNKWLRHTAVLAAQRMSQMHNPDPSIKRTFLSVAFRHGRNPGKVAAARRLLDLSYHLLKKQADYQAPRARTASAT

SEQ ID NO: 241074 - protein, 313 aa, unidentified
MAWSSVGIDVSKRELVIAVVPSGERWTSLTTPEALTTLVARVKALAPSVVVMEATAGYDVPVAVACAAAALPVAVVNPRQIRAFAQAIGRTAKTDPIDAEVIALFGERVRPEPHALPDVDTRALAALVARRRQLLEMLQAERQRLEQATTPAVRRDLRQHVTWLERRVADVDDDLQTRIQKSPAWRDKDDLLRSVPGIGPAVSRTLLAELPELGQLDRRTIAALVGVAPFNRDSGRFRGRRMIWGGRATVRQALYMAALVASRYNAPLRTFYQRLLAAGKPKKLALVAVMRKLLTILNAMVKHNTAWQHQAAD

SEQ ID NO: 241075 - protein, 489 aa, unidentified
MKSQPAKKAPKDKQESKKTSGKPTPGKWEEMNRKQRREIMRQMQSEDLHLEVVHPHAAGIDIGNASHYVAVPPSRDPQPVRCFGCTTAELKMMAEWLKQSGIRTVAMQSTGVYWIAVYEILEEAGLEVYLVNARETKNLPGRKTDVQESQWLMKLHTYGLLRNSFRPSREIRTLRTYWRQRQDLVRSTGRHIQRMQKALTQMNIQLANVISDISGVTGQAILKAILDGERDPRELAGYRDCRVEAGEEEIAQALEGNWQEDQLFVLRQEQAGYEFCQKQITECDQQLAQYLARLQDRTQGATLPEETRKGRRKKKKGNPQFNLREELFRMTGTDLTQIDGIDVMTAMTVVSEVGWDMSKWKTENHFVSWLKLSPDNKISGGKVIGKGRMPTNNRATTVLRMAATTLRESDSYLGAQFRRFRTRLGPPVATKAMAAKLARLLYRMLRYGMKYVNQGAEFYEAQHRKQQVIHLKRKAAQLGLEIIDLAAAA

SEQ ID NO: 241076 - protein, 347 aa, unidentified
MRFYTQQHPFYCGIDLHARTMYLCILDQAGETLLHRNMTATPEALLKAIAPYRDQIVLAAECMFTWYWLADLCAEHGIPFVLGHALYMKAIHGGKAKNDKIDAQKIAVLLRGGMLPQAYVYPAEMRATRDLLRRRMHLARKRGELLAHVHNTNSQYNLPAIGKKIAYKANRDGVAERFADPAVQKSIEVDLALITYYDELLRDVELTIVKTAKHHDANTLYLLQTVPGIGKILSLVLLYEIHQIDRFPRVQDFASYCRLVKCAKESAGKRSGTSGTKIGNAHLKWAFSEAAVLFLRENPVGQKFLTRLEKKHSKGKALTILAHKLARAVYYMLKRQTAFDLPTFLQG

SEQ ID NO: 241077 - protein, 342 aa, unidentified
MEKIATIGLDIAKSVFQVHGIDAAGEVVVRKRLSRARVIPFFAKLPRCLVGIEACSTSHHWARELIALGHDVRLMPAQYVKPYVKRGKNDAADAEAICEAVTRPTMRFVAVKTPEQQSVMMLHRVRLMLNRQRTQLSNAMRAHMSEFGIVAPVGRLGLERLLAIIADGDDASIPGDARLCLEMLGAQLAVVKEQVLENDRRIRVSARETEVGRRLMEIPGVGPLLASAFVARVADPHIFKTGRDLAAWIGLVPRQNSSGGKERLGGISRAGNRYLRQMLVVGAMAVIRHAERHGSKRAWLIELMKRRAKKVAAVALANKTARMVWAMMTSGAHYREPSLAHA

SEQ ID NO: 241078 - protein, 327 aa, unidentified
MSKVIGIDISKQTFDVSFFNKKQKWQFEKFSNDKKGFKKLEKLLDKDSIVVMEASGPYYLSLAGYLHKKSYKVSVVNPLIIKRFSQMRMNRAKTDKKDAQTIAQYGNQMNMQEELHLWEPQSDAIYQMHQMQTLVDGYTKQLTMLKNQLGAFKSSGILDPVVKASIEQTIHKLNKEVKKLNQNMKELADENYKQTMELLQSIPGIGHKTAIALIVLTNNFEHFESYKQLIAYVGLSPRIYQSGTSVKGKGHIAKMGNGKVRKLLYMCSWSAKRYNKPIVAMYERLNKKGKTERVIKVALANKLIKQAFAIVKSGRAFEQDYVSSRVS

SEQ ID NO: 241079 - protein, 393 aa, unidentified
MICVGIDVAKDKHDCFILSSEGEVLADVFTIPNNAEGFDTLLQTIRRCARPEDKIKVGLEATGHYSYNILGFLLNEGLPTYLINLLHTNLYRKSLSLRKTKTDRVDARTIAAMLMSDVDLKPYTDTAYHNEELKSLTRYRFDKVRERAKLKQSVSRLVTILFPELEKLVPSLHLASVYALLIEFPGAKQVAGAHLTHLKAILSDASKGRYGRDMAVTLRDAARCSVGSVMPAKSLELQHTIRLIRELDAEIEDIETAIQSMMDEMQSPITTIPGIGVRMGAMILAEIGDFSRFDSPDKILAYAGMSPSTYQSGQLSLSGPYSHMEKRGSRYLRYALYNATKYVCLWDPAFAAYLAKKRGEGKHYNVALSHAAKKLVRLICALEKSQQSYRNAA

SEQ ID NO: 241080 - protein, 340 aa, unidentified
MVHVGVDLDKRSSQIAVLTEEGEIAQQRLPNDPVQLEKFFAELPPFTPVAIEASGTWWWLVDLLERLGHHPVLSHPKQTKAIAAARLKNDRVDAERLALLLRGDLLPTVWIPSAALREARELVRHRIQLVWVRGVIRNRLQAMLARRNLQPTSGQSWLTQRGQRELQRLPLTETPHRIREDCATLLPTLDAQIRRLDAELVARWGRDGRVQRLMTIPGIGPFIAIVLVLELGDIQRFADAKRLASYVGLTPRVRSSAGRVRSGHITKDGHRLLRWVLVLAATQAIRRPGPLRAWFHAVKKRRGKKVARVALARRLAEIVFHVWKHECDYFTVVRHGVVRG

SEQ ID NO: 241081 - protein, 415 aa, unidentified
MHVYVGVDIAKELHYAAIMDSDGVVSKPFSFENNDKGFNLLLSHLAPYNKESILIGYESTAHYQENLAFFLKSLGYRTAEINPLQTAALRKANIRNTKTDSVDARLICLALMNHHIQGDQRDSVRLDDLYQLCKMRMDTMKKRTTCKIQLVATMDRIFPELASFFDNNLHTNTIYRLIESFPLPSQIKKTRIDILTKLLHKASKGHFKKEKAQKLKDLADISVGIPSDIFAFQAQQLVHQIEFYTDQIQTIEERINTNPDVMSSPLMTIPGIGTFCVACILSAIKNINDFGAPCKILAYAGLDPVIRQSGKFNASHTRMSKRGNSLLRYALVWSAGNVVKNNHTFAEYYRHKTEDQGKSHYQALGHCAKNWSNPSITCSNVTNHSILTKLFLNFSSLGVVFVMLCQFNIFFIDSS

SEQ ID NO: 241082 - protein, 347 aa, unidentified
MLIIGCDFHPSFQQVAIFDNQSGEVQEKRLQHREEAEQFYRSLIGQKVRVGMEACGHYPWFERLLAECGHELWLGDAGAIRASVVRKQKTDRRDAEQVLDLLRQERFPRIWVPSLEERDVRQLLVHRHKQVQARTRIKNQLQAMALSQGVQKKRKLWAQAGRAELEQLELLPYAAQRRQQLLHELDQSESEIAQLNQQVEAEVRQRPAAMRLMTHPGVGPVTPLAMVLTLGPAERFRGGKEVASYFGLIPREHSSGGGQRLGHISKQGSSFLRFLLVEAGQSAARQDPQLGRFYRRLAVRKHRALAKVAVARKLAVRLYLMLREDWTYAQLCKAVVQVSPSHSVVES

SEQ ID NO: 241083 - protein, 412 aa, unidentified
MNQDKLYVGIDVSSKNNVCYLMHSDGSKHSSFSVPNNRNGAKLIVDRVTSVLLLQEIPQVVIGMEATSVYGDNLMRFLRESGSLGRFERSLHMLNPKQVKKFRDAYSDLPKNDFVDSFIIADHLRFGRINKEVYMDDYKYQALKMYTRARHQLVQELTREKQRFLNIVFICFSGLTQEKIFSDKFGATSMALIEEFSSLDELAYMNIDELADFIRKHGKNHFENPEEIAEAVQRAAKNSYRPPQVIAEAAKQMIAISMNTIRLLQKQIKEYDKAIEKMLETIPQTLTSVKGIGNVYAAGIIAEIGDINRFPSQASLAKYAGLVWTQHQSSDFEAEDKRMIQGGNHHLKYYLCEAANALRRCDPEVKRFYALKYKETNKHNHKRALALTARKLVRLVYTLLKTNRLYIPPEEY

SEQ ID NO: 241084 - protein, 415 aa, unidentified
MDVLYPRCCGVDVHKKQVVACLLTPGPAGAPRKAIRTFGTTTAELLRLVEWLQAAECTHVAMESTGVYWKPLYNVCEGLFTVLVANAQHIKAVPGRKTDVRDAEWIADLLQHGLLRPSYIPPQPQQELRELTRYRTTLLRERAAEVNRIQKVLEGANIKRASVASDVLGMSGRAMLEAIVAGTTDPAVLANLARGRLRDKRPALEQALSGRVHPHHRFLLAEQLCHIDALEESIQRVSAEIAERVRPFETEIALLDTIPGVARQGAEALLAEIGPDMSRFPSAHHLASWAGICPGNHESAGKRKSGKTRKGSPWLRSLLVEAAWGASHTKDTYLSAQYRRLAARRGRKKATFALGHSILVSAYHILATRTPYADLGGTYFDERARTSIEHRLIRRLERLGLRVSVEPLLPATGVA

SEQ ID NO: 241085 - protein, 402 aa, unidentified
MRFSVGIDWASAAHAVCILDQTGRVHWQGAVPHTADGLADLLARLRRFRRRGSLRVALERPSGLLVDTLLDAGLEVVPIHPNALKASRPRYSAAGAKSDPGDAFILADLLRTDGHRFRPLHPPSDDTRALRALVRGRDDLVAQRIALANQLRALLERFWPGAAAIFADVDSPIALAFLARYPTPDSAARLGEQRLAQFLGQHAYCGRRPVAELLARLRRAPTSQVGAAEADASGDVVRALVAVLSPLVAHLQQLSAAIAAALAQHPDGPLVQSLPRSGAVNAAQILAELGDDRARFPTDEQFAAEAGLAPVTHASGQHRAVVFRWACNKRLRRAVTTFADNSRHASRWAALVYQRARARGCRHQHAIRILARAWARILWRCWQDRTPYHVGRHRAAQALAAA

SEQ ID NO: 241086 - protein, 389 aa, unidentified
MKIYVGIDIAKLNHFAAAISSDGEIIIEPFKFTNDADGFQLLVSKLESFDKNSIIIGLESTAHYGDNLVRYLVAEFYQVCVLNPIKTCQMRKNNIRKTKTDKVDTFVIAKTLMMQDDLRFVSFYDLDMMDLKALGRFRQKTIKQRTRLKIQLTTYVDQVFPEIQYFFKSGLHQHAVYALLKEAPSPKEIASMHMTHLANLLKVNSHGHFTKEQAKELRVLAQKSVGANDSAISIQITQTIQQIELLDSQLEKIEAEMTDIMKFNDSVIMTIPGIGYINGGMILGEIGDIHRFSNPNKLLAFAGLDPSVYQSGNFQAKTTRMSKRGSRVLRYALVNAAWNVVRNNATFKAYYDAKRAEGRSHYNALGHCAGKLVRVIWKMLTDEVEFNLE

SEQ ID NO: 241087 - protein, 690 aa, unidentified
MLHLVNETIDARRAHYRARAGTLTRLVRGVYVESDSDRDTVILGHAVRIARYLYPNAYLSSASSLLLGPTADGRLFISGRRNQRTRLRTLEIVQNTAPENPSTVPAVIGDELGELHVDISSPRQRFLEAFRLRSEHASAVTPEMRDQMAVRLIEECGSPEAAAETVWALARGNGWYREGEHAERFLLQRPTATRVPPNKAALDLLVAWHGELLGNLTHDGFEWRWKPRKRATPALICESAPGKIACAVLDFACGHVGPGKESSINIWWQGAGSGPPLADERSSTMPKELNDVTPSMGEGSTVYVAVEISDKSWVVGIGAPSDPGKVGMHTLAPADTDGLVARIEKARARVGDPSRVLLTYEAGYEGFWLARWLGLQAPQIDVLVCDPASLEVVRKAKRAKTDRIDAKRMVRALRAWDRGEEEALSVVRIPTEAEEDAKRLLRNRERLVKERTRLGNTIKGLLKLQGVRDLEPRRPSFLADFAEVRTAYGAPLPPGLRDEIEATHERLVMVMAQLKEIEEKKAALIAEAAGMSEQASTHDQGTRTGTGDEEHRAVPGPAAVLVQLKGIGANDAVLLQHEVLYRDFRNRREIAAWAGLAPVPWASGGVENDQGISKAGHPVIRRHLVQMAWRWVRYQPASAITVWFHEYCARRRDRLMRKRAIIAVARKLLVALWRYATTGLVPTGAVLGPS

SEQ ID NO: 241088 - protein, 407 aa, unidentified
MISVGIDISKEKITVCALEQGNKIIWKPFDVSLKKTKVEELIEKLEKLKEEVKITMEATGKYHLPILYELKDRGYFVTVINPLKMKQYCRALNFRKAKNDKMDAKQIAEYGLMYWKELEEYKVDEENYIVLKELNRNYQHYMELRIDQMNYIDQTMHQTFPGIKKLILHNSGDFSKDKLLDFLEKWWHKDLVLEKTEEEFIEEYKRWAKEKRYHPNANKAKAIYQLAEDSISTQPSHNTKIETNIREGINLIKQINQILNRILSQMIEISEPLEEYQEAKKFSGISEKLAVQIVAEFGDLSKFKNKKSLISFIGIDAPPYESGNFKADQRKISKSGNAILRKVGYQAMKCMMSAKKAENEIYKYMIKKEKEGKAKKVCKFAGLNKFLRIYYARVMESKAQKQELKVA

SEQ ID NO: 241089 - protein, 429 aa, unidentified
MINVNELVTLRVCIYKVTLLLVCEFITFDTTNKEVFILIYIGIDIAKDHHDIVIIDDYGEIIKEHFQINNDKEGFEKLHTEIKSCMKSLNDIHIGMEETGIYHENIRDFLISKGFTVYTINPLLTSYSRKASSPRLTKTDKIDATAICRYIMNNFRFLHSYTPSLYYIDELKQLSRTYHHKKQLLSKTKIELKRLLQIGFPEFTKHFDPYAKWSLDILGEYPLPTFFKGLHTETLAARIKTKSDRLAKAILLKQLAKDSIGKCDNLRAFLVRSIISDFKHYKLQIKELKKIITVKMSIFPKIMSVPGIGPINGATILGETGDIHRFSNKHEYYAFYGCDPIIHESGNYKLKKSRLSKRGDKYLRTAIYSASRVACVGKFTRNNKFQRKYLKMTERDNKHHNIIIFAVAKNMVHSIFKILKENEAYEDSK

SEQ ID NO: 241090 - protein, 340 aa, unidentified
MAYAAIDLHVRRSEVLIVDDAGELLLARRIDTQREQLGRIFADRPPMRILLESCTHSEWVAQCLEGYGHEVIVADPNYAPMYEQRVRKIKTDRRDVAALERACRLGIYRRAHRVSAEQRHRRRTLRVRRHLVQMRGRAVQLIGAYLRQEGLRLPRGGAETALVRLARVSMPGSLRTVLQPLREVLATLADTIARADAAIAVVAHEDAVIKRLMTAPGVGPIVAATFSAVLDSADRFDGDVRRATAFVGLVPREYSSGERRYQGRITKGGPSELRSLLIQSSWTIWRSRSAQAGRLRAWAHALAARRGRQVAVVALARRLTRILVAMWRDGTDFQWTPHVA

SEQ ID NO: 241091 - protein, 339 aa, unidentified
MKPKLYCGIDLHSNNHYVSIIDQDNNRLKEKRLGNDLSKTLLFLEPYKNNLQGIAVESTFNWYWLVDGLVDAGYSVSLVNTCAVKQYEGLKHTDDRYDAYWLAHLMRLGILPTGYIYPKEQRGLRDLLRKRMQLVQCRTSHVISAQAQYWRSMGLRLRSQDIKKCPGDLLSKITDHNLFLSIQSNLNVIQLLNTQIKTIEDTVITQCQNMPAYKQLKTVFGVGEILSQTITLETGDIHRFNKVGNYTSYCRCVDSQKTSNGKKKGSGNKKSGNKYLAWAFMEAANFAIRFYEPANRFYQRKSEKSNVIVARKALAHKLARASYYVMRDNVPFRPDQLFS

SEQ ID NO: 241092 - protein, 313 aa, unidentified
MAHFNYFVGIDVGKYECLVAFSHSSKILSIPNTAIGLQELIDGLEEIKSNTLIAMEATGGYEVAFWKVLHKAGFHVRQVPPAQVRSFARSKAQIAKTDRIDAKIICRFIQENPNSGRSLPSDNVLRLNRLMAKRYQLIKVRAALKCQSRQQQEEDLEELDKAHIQFLNNQISNLNAMITTLIHENHDLEEKDRILQSIPGVGPVLSASFLAFLPELGTASDKQIACLCGIAPIARDSGKYKGKRFMSGGRKQVRDVLYQAALVASWHNPKIKTFFARLKSAGKPHKVCVIAAARKLATIANAMVLQKSEWQTD

SEQ ID NO: 241093 - protein, 461 aa, unidentified
MARHNMKSNRKRVKSEGLQVMNAHAAGIDLGSKSHWVCLPGGGSVDERVREFKTDTPSLNELADWLADAAVTTVAMESTGVYWVPLYEVLDARGFEVVLADTRTISGVPGRKTDVLDCQWIQQLHACGLLKGAFRPSDCIVKFRALARMHRTLTDQAADWLRRIQKELDQMNIRVHRAVSDISGATGMRILHAIVDGERDPAKLAELRDSRCQRSKKEIERELTGNWRDDHLFNLETNLETYEYMQERIAKHERKILELLEGMQTTTEPAPPPASESKAKQINKRGQEPLRQALYSMSGVDLTRIDSIGVGTAQTILSEIGPDVAMFPTEKHFISYLRLAPGMAVSGGKAIRGKKKKPKPGCSRTRQALTMAALSAGKNQTALGAYYRGIAIRRGPGVAVFATARKLAAYIYRLLRFGTEYVDIGVEEYEQRNHQRRMKALKARARHMGYRLVPAEEPATA

SEQ ID NO: 241094 - protein, 371 aa, unidentified
MNTVINIGIDVHKDSYSLCSYSFATKQAFGQTRIASNSNLVIKYVRKLQESQPNVEVLCGYEAGPTGYGLYRDLEKAGIGCVIMAPTTLPKASGNRVKNDKLDAMELSKHLAFGTYSAVHVPTSEDEAVKNYTRLRNTRVDALKKAKQNLLSFLLRSGRVFSEGRNYWTNIHYAWLKRQQFTDPVDQETFNEYLQEVYDQQDKVDRYNQRIEQLSQLEAYREKVARLRCFRGIETHTALSLVSEIGDFSRFANAQQFSAYLGLVPGEDSSGQREKRGGITKAGNTRLRLLLIEGANATLRSSLYGQKSKRLKARQEGNEADVIAYADKANRRLHRVYNNLTNRGVIKNKATVAVARELSCFIWGMMNNKID

SEQ ID NO: 241095 - protein, 347 aa, unidentified
MSESMALVGLDVHQSQTVAAVLDPVSGELLVERLRGAPSAVVLEFLERLERPVRAIYEAGPTGFGLARAASERGLDLRVIAPGSIPRAPGDRVKTDRRDAKRLVRLFAAGELSFAFVPSEADEQFRDLVRCVDDVRKDLMRARHRLSKFLLRRGLRFAGRQWTQPHERWLHAQRFDDAPSRAAFVDYLCAVEALVQRRRALIAALEQAAPESAHADAIARLRCFRGIDTLSAAGLCAEVGSFERFSKPQLLSGFLGVVPCEYSSDTKRVQGSITKAGPTHARRLLVEAAHHYRRRPAIGQGLAARQVGQDPRVVAVAWRAQRRLNARWTHLSERRRPRRLPGRTRAP

SEQ ID NO: 241096 - protein, 334 aa, unidentified
MLYAAIDIHKRMFQAAVLDVETGETLERRFGATREELNDWAMPLQGRLAAVAIEATNGWRWVWRELSARGFDVRLVDPAQAKALRGRIKRAKTDRLDARWLCVLLAKEMLPESWLPPAEIQTLRDQTRLRKALAEDRTRWAQRLHALLTHEGWPCQRARLLTVEGRRWVASLSLSPAARAQVERLLRLIEAVETELRSLETELRRFARSDRRCIALQTIYGVGPILACHLLAELGEAARFRRARQAVRAAGLDPVVDESGDTRRRGHLAKHGAPVLRWALVEAAQHAQRANSPDRALYTQAATRVGSKRAVLTVARKIGRRAYHVLHELEAQAA

SEQ ID NO: 241097 - protein, 342 aa, unidentified
MGQITTIGLDIAKSIFQVHGVDATGDIVVRRRLTRARVAPFFEKLAPCLVGIEACATSHHWARELRKLGHDVRLMPPSYVKAYVKRQKNDTADAEAICEAVTRPTMRFVEVKTREQQSVMVVHGTRTMLMRQRIQLSNVIRGHMAEFGVVAPVGREGLLTLIDTLHEETDDRVPAEARHCLRMLAAQLRLVNVQILENDRWIRASARATDVGRRLMGIPGVGPVLASAFVATVPDPHAFRSGRSLAAWIGLVPRQNSSGGKERLGGITKQGNRYLRQLLFVGAMAVIRYAERHGTRRPWLVQLLARRTTKVAAAALANKTARMVWAIMTSGQPYREPKLRAA

SEQ ID NO: 241098 - protein, 326 aa, unidentified
MEHELHYIGIDTAKEKLDVDVLRPDGRHRTKKFANTTKGHDELVSWLKGHKIDHAHICIEATGTYMEPIAECLYDAGYIVSVINPALGKAFAQSEGLRNKTDTVDARMLAEFCRQKRPAAWEAPHPLERALRALVVRHQALTDMHTQELNRTETAREVQRPSIDAHLLWLEAELKRLEKQIKDLTDDDPDMKHRRKLLESIPGIGEKTSAVLLAYIGLKDRFAHARQFAAFAGLTPRRYESGSSVRGASRMSKAGHVSLRRALYMPAMVATSKTEWGRAFRDRLAANGKKGKVILGAMMRKLAQVAYGVLKSGVPFDASRHNPVAA

SEQ ID NO: 241099 - protein, 487 aa, unidentified
MQSIFRKRNADVEQLFESAGRAEKVMCVAFDYAKKTHTCVIGDGNGRQIKGTFNVQNNRAGVDYLLSIIAGLCRKHHIRAEHVFFGGEDGGSYAFNFIHALVSRGYLVVGFNARQAKHERENTLASSDLIDVVGVIGMMIKMRGRTIGEASGQVHAIKRLRRQRISMLRSHSASKHRLYRIVDELLPGFLNADLSGIIPFTNASLWLMDDDFCAASILSRRRPALTKRLREMRLQDPEGAVEKLKALAGNALLPAPALVPALQRSLHEETALYRHLESALHGLDTDIAKLLARTPGAMLTTIPGISLRWAPGLFAELGDPLRRRNVNSMAALGGIVPSSKQTGGPEKAPVSGHRSRNCASILKHHLMSATTSLAECGHPEIRQAYQNDQAMGRDARGRLAQSLLRTCLCLIDTQGFYLPPSLHRGSSPEQIRQYYVKTWPKVLIKWRDYGAITEALAEGSPLRIWRDMAQELYDIKLDLKSPQTGRK

SEQ ID NO: 241100 - protein, 378 aa, unidentified
MPDVTASIAPADVRLWVSLDVHKFSIVAATLPPDGGKPELSRIETTERAIRRFIDRLGGPDGLAVCYEAGPGGFALWRLLTSMKVACDVVAPSLVPVRTGDRVKTDRRDAKKLVTLQRAGLLRFVAPPTIETEGLRDLLRCRDDLRCARTAARHRVAKQLLRHGRIYREGKSHWTQMHRRWVNAQRLDDPLAREALTQMLIHLDGLERQLATLDAQLEEIARSERWAGKVQALTRFRGISTLTALGLIAEIGDFARFGHPRELASWLGITPSEYSSGDQQHRGHITRAGNRHARRLLVEAAWHYRHAPRRPAGGVEPDQRAWQAQVRLHHRYRHLTEHGKRATVVNVAIARELVAFLWAALTDQPMTTRDPQPQEAAV

SEQ ID NO: 241101 - protein, 304 aa, unidentified
MLDCWNQKLGEITFENKPSEFHKLTRKVSRFVTEEKTAVYGLENAYGYGRALAVWLLEKGYTVKDVNTALSYAQRKSVPMYQKNDSYDAEAVSLVLINMLDKLPDAVPADAYWTLSQLVNRRNNICSHQQRLKNQLHEQLCVAYPSYKQFLGDISRRTALYFWLRYPSQVHLKGKTAEELAAELRPVSHNNCSIKRAGKILELVRMDGQTTREHQESRDAITRNIAGDLEHYREQLEIVETAIETMLPSFNCTLMTMPGVDVTTAANMLSEIGDINRFPNANKLAKFAGICPINFSSAGKGKDM

SEQ ID NO: 241102 - protein, 434 aa, unidentified
MTDSHSTATARILVAIDVSKARHDVLVELPGGGRKKMIVRSCRDEFQQLAAYLKSLDGICQIALEPTADYHRCLAYFLGSRGFEVRLVSSIAVARTREALHNSWDKNDPKDAQVILHLLRNHTTQRFYDPVLEQTNDLQELSKTHHQVSLRKTRLQHSLLNHYLPLYFPEAERFLCTTRAGWFARLLIAFPTPEAVTKLSEEKFITRAAKLLRTKHSKERVLRSFYDKAQESIGIPVSLDSQAVATFRLLLNEHLDLCRKRAELEKTAHELLKERIDYQILRSVPGIGPIIALTVLAEAGDLSRFHHERQFLKFCGLDLSTAQSGAFRGRSQLSKRGNARLRAALWMAATVASRMSENSIRRKFDRYIKVNPTDADLRRKADTACTAKMARTIYGLVKHQQHYRAYHEEAVPVPDGRTRSHGPLRPAATAAVTS

SEQ ID NO: 241103 - protein, 345 aa, unidentified
MKHPKYFVGIDISSESFTVCASSKPGAILHQPEDYDNDLNGFKQLTAWFKSLKMMPADMIICMEATGVYGELLCHYLFDHGYEVAVDPPLKVKRAFSVAGHKTDAVDSIQIAEYAFRFYDTLNIWEPREAIVEKVKAMLSIRELLVRHRTAQKNARTALKRKKIVPESAIVVLEREIESLTGSIKSLENDMSDLISSHPQMRQLVDILKTIPGVQELLASNILVLTNGFKQEKTGKELAAYIRIAPYKFESGKSVKKRAKSPKHGPPIPRKLLHLAARSITTHNPRFRKYYLQKQLEGKDNYLIYNNVANKLLKIMCAMIKERKPFTDKHISINPSYLNIGLQRS

SEQ ID NO: 241104 - protein, 338 aa, unidentified
MQTYAGIDLHSSNNFIGVINEKDKILYGKRHANRLDDVLRALDPFKDSLQGVVVESTFNWYWLVDGLQEHGYSLHLANPSAIQQYEGLKYTDDQWDSFWLAHMYRLGILPEGYIYPKEHRAVRDLLRRRLLFVRHSTAHILSLQSMISRNLGFKMSNNEIKKLKPADVESLFDCSNLVFMANNSLAAIEFLKKITKGIEKKVKSQVKMRKEFEMLLTIPGIGNILGLTINLEVGDIGRFPKAGNYSSYCRCVESKRLSNGKKKGENNKKNGNKYLAWAYVEAAQFARRYCVKAQSFYQSKEAKTKPVVAIKALSNKLSKASYYIMRDQVAFDEEKLFG

SEQ ID NO: 241105 - protein, 425 aa, unidentified
MRFFGIDVHLEFCEVAVAEGGKVSQVGRIASTPEAIREFARGLGGEDQVVLDASGSVMAIARILRESNVGRVIVSNAAQTRAISHARVKSDRFDAAMLARLLSAGMLSEVWVPDEATLALRRRVARRSALVRARTRIKNEVHAVVMRCLLGRPPVSDLFGRKGRVWLAEQTLPEEEAETVAGCLRQIDFLDGEIALLDQKIAEQALAWPGLCRLLTIPGVDIGTAAAVIAAVGDISRFQTPGQLVAYLGLDPKVRQSGSEPARYGHISKRGNAQARSMLVEAAWIAIRSPGPLKAFGERVRARRGAQVAAVAVARKLVVLCWHLLTKDQDYAFARPSLTRQKTRRLELTAGASRRPRRHDGATVSPTTAQRAAERELQTQAELAYRRLVDDWRSTASPKGGAGATPGRASQKPVKGKAARQATSP

SEQ ID NO: 241106 - protein, 484 aa, unidentified
MAKGTSVYERLAGGTRKQRKDLQRRLHAENPGLELVHPNAAGIDIGNESHFVAVPPARDAEPVREFGSWTADLNRMAEWLIARGIDTVAMQSTGVYWFAVYDVLESRGLKVFLVNASHTKNLPGRKTDVQESQWLMKLHTYGLLRNSFRPPEEIRPIRAIWRLRDRHVQDAGRSIQHMQKALTSMNVQLANAISDIGGVSGQAMIRAMLAGERDPWKLAALRDPGVKAKAEEVARSLEGNWQDDQLFELQQAMDEYDFRQEQLVECDRKLQAYLAKLPTRPTPVTETGGTAPPQASGKKKKAKNTKAGNAPKSFDLAAEMRRVTGVDAFRIDGVSVMTIQTVVAELGTELQISWPTEQHFTSWLGLTPKRDVSGGKVIRHARDKSRNRVAGILRLAATSLLRSDSYLGARYRGLRTRLGSPKAIKAMARYLACIVYRLFTKGQEWVDRGAEQFEQNRQARDLARLQAQAGARGFRLVSATEAVA

SEQ ID NO: 241107 - protein, 348 aa, unidentified
MEQFVGLDVSQKLTHVCVVDQKGSVIWRGTCLSTPEDIAAMVRAKAPDAERVGLETGPLSTWHWHALKAMGLPVICIDARHAKAALSMQINKTDRNDAEGLAQIMRTGWYREVGVKSLDNHQIRAVLGARAQLVGMQTDLKNQIRGLLKVFGTVLQRGHSQSFEQQVTAASQGNELLDASVRGLLAALKTVGEQVAKLDRLVIKQAKENAMCRHLMSIPGVGVLTALAFMTAIEDPARFQKSRSVGAFLGLTPKRYQSGETDWDGRISKRGDALARAYLYEAANALLTNCRKWSALKAWGMQLAKRRGLAKAKVAVARKLAVIMHQMWTTGEAFRWSSEAATGKPTAA

SEQ ID NO: 241108 - protein, 341 aa, unidentified
MTVIIGVDPHKATHTAVAIDGDERPIARLQVVADRCQTQRLLAWAAPFGEDRRWAIESADGLGKFLAQQLLAAGEYVVDVPPLLSARVRLLGATKASKNDPNDALATAVAGLRHGGLRSARLDDHVAVIRLLVGRYDDVVSLRTQAACRLHVMLRELVAGGAPRRLSADRAAKVLRSVRPAGPAEIERKRLAGELLADVRRLDREIAAARARVTDAVANSGTSLLELHGVGPIVAAFILGHVGDPARFATPERFAAYNGTAPIEASSGPVKRHRLNPRGNRKLNHAIHMAAVTQVRHDTPGRAYYKRKLAEGKSRKEALRALKRRISDVVWRQLQIDLGRR

SEQ ID NO: 241109 - protein, 346 aa, unidentified
MMIVGCDFHPSWEQVTWLDMETGETGEQKLVHSEGDAERFYRQLSAPALVGLEATGNCHWLTDLLDELGHEVWVGDAAQIRASYVRQQKTDKRDAAHILKLLVEGRFPRLWVPDREQRDLRQLLVHRHKLVEIRARVKNGLQHLAMNQGVQRKARLGSAAGQQVLRALPLQRWAGRRREDLVGLLEVLNGQIRPLDEAVQQAAEENAEARLLMQQRGVGPITALAFVLTIGDVTRFRRSKQVASYLGLIPREHSSAGRQKLGAISKQGNRMMRMLLVEAAHSAVRYDAEFRQEYRRRCHSRPRQVAQVAAARKLAVKLYWMLRSASARPQSVAIESSPRVPLVGAS

SEQ ID NO: 241110 - protein, 327 aa, unidentified
MKSIFVGVDVSKCTLDFCVIEPEKTTYHKIKNKEDAISKLFKRIGEIGLEVFICMENTGYYNFNLYEVLKGIDFKTYVVDPKHIKRSIGLVRGKNDKVDAKRIAVFIERNYQDFECWQPVSESVKALKILLSQRRSKIKQRRGLKQQLSDLKNVAFNKSTKRLIKISEKGIKEINGHIREIETLIKEEIKADFKLHKEIERIKTIPGIGDITAWMIAIKTDGFSRLTDPRKLACFAGVVPFEQQSGSSLKTKPRVSKMADMQLKTVLQMAAMRAVRMENELQYYYLRKVDEGKNKMSVLNAVRNKLLHIAMALIKNKTYYKNRLELS

SEQ ID NO: 241111 - protein, 345 aa, unidentified
MPIVGGLDIHRKQITFDYLDTVTGEVKRGQIAPADRAHLRAWLARFAGCGDVAFAVEGCAGWRYVAEELAAAGIAAHLGEPADTAALRGRKRHAKTDKTDARHLRSLLAEGRLPECWIPPAQVLEYRALLETYHDLRREHTAWVQRIHAVFFHQGAPPLGEGALRTEPGLEALRAAAAAHLSAAGQQQVATTLDLLAATEAQLGPLRHQLREAARHLTGAKVLAERLYGVGPVTGLALTCWLAGKDRFSSSRKAVRFTGLDITVHSSDRKGPPGRLSRQGPPVLRWAVYEAGKTHARAAAPDHPYYAAVADRKNTKRAALSEARKIVRQACHILAELGDDALTAA

SEQ ID NO: 241112 - protein, 338 aa, unidentified
MKNFIGIDYHKRFSYGTIMTEAGQIVKQSRFNNHPEAVVAFLGDCCNHDSSAVLEAGYNSLVMHDWLDDLVGSVTLADPLKVKAIAEAKIKTDKIDSTTLAHLLRCDLIPSAHVSSPAARIGKKLLRHRMFLVRLSTMVKNRIHSLMDGFPLIRDTRSMKDLFSKKGVGWLKQIELPGYARRILDSEISLLEYLGLQIKHIDSGISGFGSKDQRVKNVMTIPGLGKFFSLLVVSEIDDINRFSSPAKLHAYAGLVPSTYSSGGRTYHGRIIKQGNKYLRYAMIEAVWPSLSKCADLEKVYNRIYSRRGGNSAKVAAARRLLTIVYRVLKENREYRYRY

SEQ ID NO: 241113 - protein, 342 aa, unidentified
MEITTVGLDLAKSWLQVHGADAQGRPLLRKKLARGKLLAFFAGLPPCLIGMEACGSAHHWARKLIKLGHEVRLIPPQYVKPYVKGNKHDAADAEAICEAVTRPTMRFVPVKTIEQQTICQLHRIRQLLVKQKTMHVNALRGHLAELGIIRARGLNKVSELMRLIEDAADDGLPAKIRGQLRHLVEPLRDLHHRLAEIDRELGELAREHPAARRLATIPGVGPVTATALAALIGDIGRFRSGRHLAAYLGLVPLQHSSGGKERLGAISRRGDAYLRMLLMHGARAVVRIMKARPASADDWIGRLLQRRPVNVAVAAQANRTARIAWAVLAKAEDYRRPATAAV

SEQ ID NO: 241114 - protein, 449 aa, unidentified
MSERTIAHEAPCIRSTQDRGAAALPKKHLLRRMKTWQQLTHYAGFDWARDHHDIVVVDLQGRIVAQFRISHNAEGWQEFRQKMAAFPAVGVVIETSQGAAVDQLLQMEGLTVYPIHPVAAQHYRQRKAPTGNKTDLLDAWSLADALRLDGSQWKALQPMDPLTQQLRLLCRDEMSLIEQRTALINQLQQALNEYYPAAVAAFDDWTRPGTWAFVIEFPTPVILLQRKRSRWEKFLHKHKLWRPQTADKRLEIFAGAGAFCASPAVTAAKSLLAVSLARLLRALQNQLDQYRSQIETLFAQHPDSGLFGSLPGAARYLAPRLLGEVTADMQRFDEPQALQCLAGTSPVSYQSGQIHKVHVRHQCSKVLRQIIHLWADCARHAAPWIQTYYQKKRDEGKSHACALRCVGQRLLKILWKMIQTRTPYNADLHTKSQLAHGSWVLQLMRQKPA

SEQ ID NO: 241115 - protein, 354 aa, unidentified
MIIIGCDYHPSFQQIAFVDSETGELQERRLQHREEAEKFYRDLAAQGMKVRVGMEASGHARWFERLLAELQLELWIGDATEIARKRERKQKTDRQDAQHILQLLMENRFPKIWVPSGENRDLRQLLWHRHRMVQARTRMMNQLQAVALNEGLCCKKKLWREAGREQLESFRLAPWASQRRHDLLELLDRMNPTIAKLTQAIDREVEKCPEARRLQTHPGVGPLTALAFVLIIGRADRFQCGKQIAAYLGLVPLEDSSGERRRLGHITKQGNSLLRFLLVEAAQVTARSLPEWRSKYVHLTMRRGRKIAKVAMARKLAVRMYWMLRKGWDYGQLTKFGSHAGKPGHRDGVKSNTE

SEQ ID NO: 241116 - protein, 317 aa, unidentified
MQTPLDIGVDVASRHVVAACAARSFPPRKVANELGALRAWLSGVPRASRIGLEATGACHQLLADAAHAAGMTVYVLNPRDVKKYGEGVGRRGKTDRLDAEVIARYVAREHDQLHAYVPRSAAARRLEQLLKRRGKLINARVGLTATWRDIPGVGKEVAALKTAYARLLKRVDSLLGEAAAQVPEVKAASTRLRTVPGYGELGGLAVAHALQRLPFSDVDAFIAHTGLDPRPRDSGDMHGRRRLSKRGPPALRATMHMCAMSASRTPAWHPYYARQLAKGLSGTEALVILARKMARTAWAICKRETVFDPTKLLASPA

SEQ ID NO: 241117 - protein, 439 aa, unidentified
MAMRKREEVFPNAAAVDVGASSHWVAVPSGCTDQPVREFGVMTGNLHALADWLIECGVDTVALESTGVYWIPVYEVLEQRGLKVWLVDARQMKYVPGRKSDVQDCQWLQKLMSLGLLRGAFRPDGEVCVVRAVARQREVLITEQGHWVQRMQKALVEMNIQLTEVLSDVMGVTGQAIIRAIVAGERDPKVLARYRDGRVKASAAEIAEALRGNWREEHLFVLTQALAMYDDIGRHLHECDAKLQRLLGERAEHAVDLGKAPRQGSKQRIAFDARQALANWAGVDLTRIPGLGATVVMTLLTEIGPNLSRFETVKHFCSWLGLCPGTKISGGKVLYSATKRSANRARQALKMAAQSLSHSDSALGAFYRRLCARMDKLRANTATAHKLARMVYFMLTRGEAFVEQGQQRYEEQQRQRSVAALKRRAAALGFQINPIAQPA

SEQ ID NO: 241118 - protein, 311 aa, unidentified
MTICAAGVDVGRDFLDIGLAPLGRVFRTPNSPQGVETAVRRLARAGVSRVVLESIGSYGARLVRALAEAGFEVGVVDPKRIAALRLAEGRRAKTDRLDAALIARFALLMSDAARPVPGPKAMEIRALSTRRRQLVEMIAMEKTRLKQALDAVIADSCRRAIAQLAEERARIESRLRDELLVMPDNRDRARLLQTIPGIGPVISMTLLADLPEIGSLDRKAVASLAGLAPHPNQSGTRTGSAHIHGGRPCVRAALYMAAVTAVRSDKGFKAEYLAMRHAGKPAKVALIAIARRIVVAANVIAKTGQSWTKNP

SEQ ID NO: 241119 - protein, 417 aa, unidentified
MTTKMQRWFAGVDWASAKDDVALTDADGKSIARRTFEHSGTGLAHMSDWLVRESRSEPHDVFVAIETPHGAVVEVLIERGFRVHAINPKQLDRFRDRFTVAGAKDDRRDADVLASALRTDAKAFRVIEPADPAIVELREWLRMAEDHTCDVRRYVSRLREQLLRYFPAFLTLGGDEDAPWKLALLELAPTPAAARRLSKTKVARLLKEQRVRCHDANQVLGILQSPSVAVTDATIAAASAHVLSLLKSIRLAAEQLKQANRMVDRLTDSLAEADAKTSGSVVPRDVAILRSSPGLGRTVLATLMTEAPQAVRERDYHALRCHAGVAPVTKQSGKSRRVVRRYACNRRLQNAVYHWARVAIQHDPTSRAKYDALRARGHSWARALRGVADRLLYVVCVMLTAGTLYEVNHVSPSIRST

SEQ ID NO: 241120 - protein, 355 aa, unidentified
MNSVKYIGMDVHTATISVAVLDVAGKLIMESVIETKASTILQLIQGLRGDLHVTYEEGTWAAWLYDLLKLYVTKIVVCDPRRNPLLKEGNKSDRIDARKLAELLRANLLRSVYHGEKSLRTVKELVRSYLTFGKDLTRVMNRVKAIFRSWGIPCGGKSVYNPRHRDEWLSKIAEVGVRRRAELYYAQLDALASLRQQARRKLLAESRKHRAWKLLRSIPALGPIRVALLMGIVQTPHRFRSKRPLWRYSGFGVVTHTSADHRYVDGQLERSKKPVSVRGLDPNHNHHLKDLFKGAAIQAATREGPLWEFYEALVAKGMRPEMARLTLARKIAAITLTVWRKGVAFDAKYLKPQTA

SEQ ID NO: 241121 - protein, 397 aa, unidentified
MIAVGIDISKAKSTVAVIDSDGTVLASPFTMAHTQPEMESFVTYLKGLGEPTTILMEYTGHYHYPVLKKLQGEGFPVCIVNPYQMKKYGDVEIHKAKTDKKDALRIAAYALEKSYKLVPYSSMEQKYEDLKFLSRQYSQRITYVAKLKVQLIALLDQTMPGITRILPLNSRNPEKCALLLFIRRFKSFDEIHRIGKARFLASYDVLAKKTSERSASSKGLSIYELAVDSITTRGEDPYIWLSQNQCVDLLSTTQNAADEIISQMRNIAETIPEYKVLRAMRGVGDRLGPIILAEIGDIRRFHSGKALNSYAGNDAPPYQSGQFESRNRHISKRGSSALRKACYEVMQALKLTKPQDDPVYLFMLKKEQEGKPFNVAKMAGVNKFLRIYYARAMELYK

SEQ ID NO: 241122 - protein, 334 aa, unidentified
MGNVTTIGIDLAKNSFSVHGVDAAGAVVLRKTVSRARLMGLLIEQPPCLIGLEACSGAHEWARRLEAFGHTVRLMAPRFVAPYRKNGKNDGNDAEAICEAVTRPHMRFIPIKTPEQQAVLCLHRVRQGFVAERTATINRLRGLLAEFGFVLPQSSAQVRRGTSELLEQVPSQAARALRDLLDHVRVLDARVREYEHSIEAHAREDRGARLAQQRQGIGPITASAIVASVGNLREFKNGRQFSAWLGLVPRQHSTGGKQRLGHITGRGDPYLRTLLVMGARSVLQRAARQNDPLSRWALAVRARRGYHRACVAVAAKNARVVWAMLSQQPLDVAA

SEQ ID NO: 241123 - protein, 378 aa, unidentified
MRIVCGLDVHKDSVYLCILSSTGEIVEKVFGVLTFQLAKMRDLMLKHHVQEVGMESTSVYWIPIWRILEPHFKLKLVNPYFIKQLPGHKSDVKDAQWIAECMLKELVRGSFVPPERIQQLRQYDRRIFDLDDEINRKLSKLDAALQRCNIRLSNYVSNTDSKSYKEVVARISEGITDPKVLVEEIHGRIINRHGRKTIIAALTGVITQADSDMMRQIREEIDIAERHKQECTDKMQEICEKEYSDQLRNLQTIPGVKLRAATSLIAEIGIDMSHFETANHLASWSGLKPRNDESNKVIKSKRITHGNRYLRRTIIECSWAASRTQGCFFSRFSYHQTQVRKKTKMKVQVAISRKLLICAWHILSKNVPYQDFYERGIS

SEQ ID NO: 241124 - protein, 372 aa, unidentified
MNYNTVYVGMDVHKESFTLCSCKYEDEKASHYQRTPASYKNVLRYLAFLRTIYGEDTRFVCGYEAGCLGYSLYHQLENFNVECVILAPTTMLEQRSKRRIKTDKRDAEIIAKSLAQHNYSPVHIPTKMDNQTKEFIRMRDDHKAELKKIKQQILSFCLRQGYQYDGSGNWTAKHVKWLRSLKTEGLYKEILDEYLLTYTILTDKLNRLDQRIEELASKEEYKESVSKLTCFLGIKIHTALSVIVEVGDFQRFVSARKFAGYLGLVPGQHSSGDDRNGLGITKAGNTHVRRLLVESAQSYTRGKIGYKSRVLRSRQAGNSPQVINYADRANERLRRRYYKMVLKDGKKYNIAKTAIARELACFIWGMMTDNIY

SEQ ID NO: 241125 - protein, 408 aa, unidentified
MEPAPLQPEMVDSPTVVSDKSGHTKNNTRSGRKPAAKGEPTMRRYHPDADAVATDVTVYIGIDVAAEELAVCVLGSDLEVLARVKLPYAEEAVSWLMDRLPGCSVHAVYEAGPTGYVLLRWLRRYGCRTAFMVAPSLVPVASGDRVKTDKRDALKLATLLATHNLKDAFVRDLTDEQYADRQVVRCRTQARQKRTTIQIQVKSLLLMHNIRLPREMKNWSKRTRAWLNQVETGHCSVGLALREQLRWWEEAHAAVKRLDQLCKGLAEEERFAADVKRLRTIPGIGLTTAMLLLTELPDLPARFENGEALARYTGLVPTEYSTGKTQGRRGHLPGDGNAEVRSALVQAAWRLIAKDAFQRERYERLRPRCGGKKAIVAVARHLAMTVYAMMRDQQNYGRQAKEELQAAA

SEQ ID NO: 241126 - protein, 346 aa, unidentified
MEHYAGIDVSLELSSVCVVDAQGKIVREAKVTSEPEALLAFFASLGFEVKRIGLEAGPLSQWLHAGLKRTGFDAVLLETRHVKAALSAMMVKTDRKDARGLAQLIRMGWFRPVHAKSMGSQEVRALLVARKQLLGRLIDVELSIRGILRGFGLKVGVVTRKGFEARIRELVTGHITLERIAGAMLSARATLKVEYEKLHKIVLTIVREDAVCRRLMTVPSVGPLVAITYKSAMDDPNRIAKSKAAGALFGLTPKKYQSGEKDVTGGITRAGDEMARTALYEAANVLLARITRFSKLKRWGIDVAKRRGSKRAKVALARKIAVILHRMWVDGTTYRWTDAQPIAVQV

SEQ ID NO: 241127 - protein, 455 aa, unidentified
MGQRTIGIDLAIRGDHVARILDDGHPHGKPIRFRLTSHSLASLVTRLRDGALPDSAITAVMEPTGMSWFPVARWLDQAGIKVIRVKGQRVRALRRYLSEHTKTDAADAYVLAAIPMFGGSPAEPVYVPNAERHALQRLTRQRERLEDEASAIKRRLLDLIRWACPAVEAVLPDLRTNLSLAVLHDLFDPAVVTKARRSTLLRFVAKHASGNHPHTGPFAEALVDGLKLAATETQMLHEAAVDFRLVQMEVALEVDRLRLIETQLARLGREIELLYAKLHPTDALRTIPGIGATLGPLVLGVLHEAQRFAGLHQLRGFCGMFPRVNASGGSDKPGQAITQSGNNRIKRALYLAADAARRIDPGLAEVYWRLMVRKGHHHKQALCAVATRLVNRIGKVLRSGETYELRDTDGTPITVAQGRAIVAERFSIPTEIRNARRQNRTEAVPALAGATSSTA

SEQ ID NO: 241128 - protein, 367 aa, unidentified
MRRKGSAEVTSIAEATSVRRVAIGIDTHKYIHVAVALDELGTFLGDIAIPVDRGGYERLLEWATSKGRVTAFGIEGTGSYGAALTSHLRRHGHKVIEVARMDRRDRRLRGKSDVLDAENAARAVLAGSATAIPKSADGVVEMLRQIKVAKDTAVKARTSAIITLKALVVTAPPELGEELRELSKMVLIDRCLALRPGKMDTPLAAAKHVLRSLARRWRDLSAEIKEHELLLAQLTRKIAPQLVEAFGIGADTAAEVLIVAGDNPRRIRTEAAWARLCGVAPIPASSGTTTRHRLNRGGHRQANAALYRTIIVRMRHHEPTRTYVARRTEEGRTKKEIIRCLKRFLAREIWALMRPLRERPNLPLEAT

SEQ ID NO: 241129 - protein, 339 aa, unidentified
MSEHNLISVDLAKNVFQLCAMTDRMKIVFNRQLKRNDLARFMATQKPVDVVMEACYSSHYWGRCFAAMGHRVKLLPAQHVAPFVRGNKSDHNDAVAIAEAAHRPNILPVPIKTLEQSDIQSLHRMRERYVKHRTGLINQTRGLLSEYGIVAPQGHRAFTRLLREASQPEYEDLSVCLKEQLNSIADEYHYHSQRIDEITRTLSDIAHHHPLCRILLSIPGIGPINATAIYSAIGNGSQFKNGREFAVWLGLTPKQSSSGDKMSSAGITKRGNRYLRKQLVHGARAVLSRSKNKSDRLSRWTQQLVARRGVAKASVALAARIARLSWVLLQKQEPYQPKD

SEQ ID NO: 241130 - protein, 340 aa, unidentified
MYYLGIDHHKRYSQVAVVDEKGTVRSNGKIANEKKAFALLKEYYKEPCRAVIEAGRNWGMMYDLLEELDIKTVVGHPLKIRAIADAKIKSDSIDAKTLAHLLRADLIPRVHVPSKEIREQKNLLRHRLWLVRLQTMTKNRIHQLIDRNHVKRPKVKNIFGVAGRTFLKGLNLSPIDQKLLKDHLELLDNLHQHIRKTEVWIGKELKNNHLMDILITLPGFGKVLSALAALEIDNINRFRTQAKFASYSALIPSTFASGGKVYHGDLIPGGNRWLKYVFIEAAWVSIRTSTYCRFYFERMKDRKNSNVAIVALARRLSEIAYRCLKEKRAYEERPYMPYTR

SEQ ID NO: 241131 - protein, 489 aa, unidentified
MSKASQQQQGKKDATLNAKAPQRKAKGRHRPQGEGIQRRSQLTITNPDAAGIDIGSQVHYVAVPEERTERAVRSFGAYTAQLEELANWLKECAVKTVAMESTGVYWIALYQKLEEAGFEVLLVDARQAKHVPGRKSDVQDCQWLQQLHTYGLLRAAFRPEDSICRLRTLQRHRKSLVECAGMWVQHMQKALNEMNLHLHHVLSDISGYSGLAILEAILAGERDPRKLASLADYRVKKSQAQIEAALTGDYRPELLFVLNQSLQGYRQIQQQLAQCELRIEQQLAQIADCTNPSQDCGPRQQGPESAGGKRGKIKPKEALEASLAAHLKRILGVDLTTIPGLNVLAILTLISEIGTNMSKWRNEKAFVSWLGLSPNNKISGQRLLSSRTRKVVNRAATTLRLAAMVLGHTNTPLGSFYRRKRAQLGAPKAITATARKLGCLIYRLIKNGEGYQEPDLHVYELKYKDQILNSLRKRANSFGFDLVEVPKAA

SEQ ID NO: 241132 - protein, 437 aa, unidentified
MRRVIGIDIHRTFGEVVIWENGLTRHEGRVEMTRTALEGLGRQLKKTDEVVIEATGNCMAVSRVLSPHVKRVVIANPLQVKAIAHAHVKTDKVDAATLASLHAAGYLPEIWTPDAATERMRRLVARRYQVVRHRTRIKNEVHAILHAHLIPKCPHADLFNKRGRDWLSRQPVPEDERAAIARHVRELDRLGEDLAVLDRDIAKDAIDDEAIQRLLTITGVNLTVAAGLMAAIGSIDRFNSPQKLVSYFGLNPRVRQSGLGPAHHGRISKAGRSHARAMLVEAAWAAAKAPGPLRAFFIRIRARRGHQIAAVAVARKLASLCWHMLTKGEDYHWARPSLVAHKRRAMELVAGQPQKKGSKRGASYAYNVKELRQQEARIAEHAEKSYEQFVAAWRPHAPGKGSGCAIASNRQGLNGLPGDASCRHATLRHEVERTGEK

SEQ ID NO: 241133 - protein, 391 aa, unidentified
MVCVGIDVAKDKHDCCILDSDGMVRADCFTIPNNMDGFKQLLQTIQNCTKKSDKIKVGLEATGHYSYNILGFLLDNGLPTYVINPLHTNLYRKSLSLRKTKTDRVDARTIATMLLSDVDLKSYTDTAYHNEELKSLTRYRFDKVRERAKLKQSVSRLVTILFPELEKLVPSLHIASVYALLSEYPGAKQISEIHLTKLTNLLATASKGRYGKDKAIQIRDAARTSIGSVMPAKFLELKHTIKLIRELTSEIDEIEVSIQKIMDELNPPILSIPGVGIQSAAMILAEIGDFSNFESPDKILAYAGCSPSTYQSGKLTNCYAHMEKRGSRYLRYALYNATKYVCHWNPVFAEYLAKKRAEGKHYNVALSHATKKLVRLIYALQKSGKAYLVAA

SEQ ID NO: 241134 - protein, 349 aa, unidentified
MPILAEQFVHVIGVDTHKLRLTAAALNASGGCLELLEVGADARGYGRLLELGSRFSGPLLWAVEGTGSYGAALTEHLLANGQTVTEVDRPKRPPRRRGKSDEIDAIRAGRDALAMTRLNPPRRRQEREQLRILFTTRQELVSNRTRLANHLMQLVVTASEKLRSRFLDFGSHGAERLVRQCLASRCHPGMSAEDRTRLTTMRELAHMIRSLSADADRYEQEIAVRVEQMAPGLCAQPGVGALTAAQILLSWSHAGRMPNEATFAALAGVCPIPASSGQTVRHRLNRGGDRQLNAALHRVVLTRCRYHQSTRDYLARRTAQGKTLAEVRRCLKRYAARQLFKFLNRLDKA

SEQ ID NO: 241135 - protein, 366 aa, unidentified
MTNNNITWVGMDTDADKAEVAIYRGWESEASARFPIGMDNKGIKKLIERLKRETNEVRCVYEAGPCGYPLARRLREAGIQCDVIAPSLIPQKPGDRVKTNRRDAQNLARLYRAGELTVIHIPQESDEAVRDVTRAREDVREDLTRRQHRLSRFLLRHGYRYRDGDAWTQKHWDWIGKIQFDDRNLQMVFDESIRAIEQSREQLKTYDERVEELAQQPAYAQKVERYKVLRGVRTITAMTIVAEGADLRRYATAPQFMGSTGLVPSERSTGEHERRGRITRTGNAHLRRVLVEAAWHYRHRPMSGPQVKRRRKGQPAALVTIAERADQRLTRKFRKLVDRYNKKPAIAAVAVARELAGFIWAIGQLD

SEQ ID NO: 241136 - protein, 482 aa, unidentified
MHRLATNKCAITHDVYRFTFEPAGALEITNEYSGLAVAPAHLYCFRRSQAGMSHTLNLAQWSVVMEKQDQLPFAAYVGIDWADKKHDFCIEIPAEGTQEFEVIPHRINLIDQWVRTLYARVKGPIAVAIELTRGPLISALQMYDFIVIYPVNPGSLAKYRQAFVPSRAKDDPTDAALAVDMLRRHPERFKPLRPQSADMRALITLVEQRRQLVGERVRLTNRLRAALKQYYPNALEWFDHVDTIVFCDFIVKWPTLVQAKRARVATLKRFFHEHNVRFPSVVEARITAIKEAVPLTKDDAIIVPYRMKAQAVVEQLKLLLGSIKAFDVEIDLVATRHADYSLFRVLPGAGPSLAPRLLVAFGEDRDRFASASEVQMYSGIAPVTERSGKKHWVHWRLQCPRFLRQTFVEWAAQTINKSYWAGEFYQQQRDKGCTYQAAVRALAFKWIRIVYRCWQTGIPYDEAKYLKTLERRGSPLMVKKTA

SEQ ID NO: 241137 - protein, 316 aa, unidentified
MERYVGIDVSKAALDAHVLPEGEALRVSRNAAGIDELVRWLRARQPQVIALEATGGFERVVAAELDAAGLPVAVVNPARIRHFAFAVGQHAKTDTIDAAVIAHFAEATRPAVRPLPDKQTRELADLVTRRRQIVEMLGAERAREQRAANRRLARSCQRLIKALERELADADDDIGRAVQASAEWRTKQELLQSVPGIGPTISAQLIGELPELGTLDRRGIAALCGLAPWTRQSGRWRGKSFIGGGRSSVRSSLFMAAMVAARRNRVFAGFYQRLLASGKPKIVALIAVARKLLVVLNAVLRTGEPWNEAKHVQPSI

SEQ ID NO: 241138 - protein, 319 aa, unidentified
MHCIGVDVSKQELVTFDGTKERVFPNTRGLAEFGRFVKRSKDALVVFEPTSTYSRRLEALCRTQRIPCCQLNPRVVPHLRLVGKGRSKTDSTDAELLYRYGIERGYSEVALLENDALAESIRARLACYRVAQKARVAYQNVLEALSQDPATSRDLLTELEAEISELKKKEKQYLDAAQRLAEGEGEPSQRLNALLSILGVGPITALTLLALFRKYPDANRSQLVALAGFDPIQVQSGTSVHGKSRISKRGNREVRKRLFEATLSAARYNPTIRSIYQRLKEAGKPEKVARIAAARKLLLIAHAVYRSGDTYRDPNQKEG

SEQ ID NO: 241139 - protein, 484 aa, unidentified
MAKREQSTFERLKGKNLNRKERRELQRRLFSDDPGLEILHPDAAGIDIGNESHFVSVPPGLDPEPVREFGSWTADLERMAEWLKSCGVKTVAMQSTGVYWIAAYDVLEKHGLEVFLVNARDTRNLPGRKTDVQESQWLRKLHTCGLLRNSFRPPDEIRAVRTTWRVRDRLVQDASRHVQHMQKALTTMNVQLANVVSDITGLTGQAIVRTILQGERDIYVLADLRDARVRASREEIARSLEGNWREDVLFELKQAVDAYDFVQKQIGECDRELEKYMAALPSRSLPGSDAERADDSGKSGKNKQKSKKPKGNAPQFDLKAELNRVNGVDLTTIDGIEVMTAETILSEVGTDMSRFKTEGHFVSWAGLTPCHDVSGGKVIRQRSRRVNNRVGNALRLAARSLFRSESYLGAKFRKLRARRGAPKAIKGMARYIGCLVYRILTHGQAWVDRGTKHFEEKNRQREITDLQRKATALGLHLLPVTANA

SEQ ID NO: 241140 - protein, 369 aa, unidentified
MTTMTYVGLDVHARTLVAAVARPGREPARVVGRIATTLKAVDGLLERLRREYGEELRFAQEAGPTGYWLHRHLETRGVESVVVAPSRTARAPGDRVKTDDRDACRLAEQDRAGGLTEVWVGDAAHEAMRDLVRQRSVAVRALRRERQQVMSFLLRQGRHWPGKQWTKKYRAWVAAQKFTAAEQAWLWEEMLAQVALGEARLARVASAIEQHVANWAQAPVVAALQSLRGIALINAVVLAAELGDLRRFASARALMAYLGLVPSEHSSGEQIRRGPLTKTGNRRARTALIEAAWQYRWRAAGVGAALRRRRASQPPSVIAIAVKADQRLCQRFARLARRKLVVVAVTAVARELAGFVWAIGQVVAPMPPR

SEQ ID NO: 241141 - protein, 373 aa, unidentified
MKKRSSCQQIQKRTVKTRRTHESVTIGMDLGDRTSRYCMLSSEGEILREDQVPTTKAGMIETFGALGRSRIAIEVGTHSPWVSRLLGSLGHEIIVANPRQVKLITESSRKDDRLDAQTLARLARIDPQLLRPIQHRSEKAQTALMVIRVRAALIAVRTSLVNTARGLAKAMGERLPKCDADQMGVSQADSVPPKLRQLLEPLLKEVESLTEKIKDSDREIEQIARKEYPETTLLQQVGGVGPLIALTFMLTVDDKNRFQKSRDIGCYVGLRPRRSDSGQRQPQLRITKEGDPYLRTMLVQGAHYILSRRGPDTDLKRWGLRLAERGGKRGKKKAVVAVARKLGILLHRLWVTGEVYEPLRNQNLRQLRKKAAA

SEQ ID NO: 241142 - protein, 275 aa, unidentified
MKLTPVGIDIAKSVFQLHYIDAETGEIVNKPIKRARFLEHFANREPSLIGMEACGGAQHWARELTKMGHQVKLMPAEFVKAFNIRNKNDAADARAIWLAVQQPGKAVAIKTETQQAVLALHRMRQQLVKFRTMQMNSLRGLLTEYGEVMARSRTALDRAIPAVLARVADRLPAVLIDTLREQWTGLTKLDEQIAVIERRLRQWMQEDKAVKAIAEIPGVGVLTATAVVATMGDAKSFRSAREFAAWIGLVPKQLGSGGKVTLLGINAATPTCARC

SEQ ID NO: 241143 - protein, 322 aa, unidentified
MGTTKAIKEGGDMDVIIDKGCGLDVHKETVVACVMGEGIKKEIRTFSTMTEDLFRLKSWLSEKGITHVAMESTGPYWKPVFNVLEDSFEVILANARHIKNVPGRKTDVKDSEWICKLLRSGLLAASFVPPQAIRELRDLTRYRRKLTQAISSEKNRVQKVLEDANVKISSVVSDTFGVSASRMIEAILAGNLNPEAISDLAVGKLKGKKEELKKALVGNFQEHHRFMIQASLDHIESLEKIIAGLDQEINRKLKDYHREFELLQTIPGVKEQGAASIIAEIGADMGIFPSEGHLSSWAGMSPGNNESAGKKKVERRPTAIRI

SEQ ID NO: 241144 - protein, 269 aa, unidentified
MAPRELFVGIDVAKAHLDWAIRPSGETGQVSHDEPGMGQLIARLQEVRPTLVVLEATGGLEWPLVAALGIAGVPVAVVNPRQGRDFAKATGQLAKTDRLDARVLAHFADALRPKPRPLPDAQTQEWAALLSRRPQLIEMLTAEKNRLGSALPPVRPRLHAHIQWLEQELGDLEQGLGQRLQHSPLWRAKDDLLQSAPGIGKVVSLTLLAEVPELGTLSRQQISTLVGVAPLNRDSGRHRGQRGIWGGRARVRGVLYMATLAALRCNPAI

SEQ ID NO: 241145 - protein, 394 aa, unidentified
MIYAGVDIAKADHVIGAVDERGAEMCPPMPFKNTEAGLERAVAWLEGLAGSPSDVVVGMEATGHYWMACYSFLVARGYSVAVINPMQVKAVRKLKGLDKVKNDRVDAGLIAEALRIGQYDETRLATDEMASLRSLSRYLQSLRGMVAELKTQCICLMDAHFPEYAGIFSDMFGSGSRAVLSKSPLPFELARRRADSLARDIAEASRRGGKSAGYAAKIKAAARSSIGVRLGQEAASFQVKSLIRQIEFADSECAKVEARVRALLDEVEPLVLTIPGVSYATGAQIVSEIGDVSRFRNAPALVSYAGLNSSVSQSGQFDSGGGPITKHGSPYLRRALWLAANRARQYDPGLRAFYDKKRAEGKPHRVAVTAVARKLCHIVFAVMRDQVPYDPGRE

SEQ ID NO: 241146 - protein, 398 aa, unidentified
MLYLAIDQHKNHLTINVRNEQGEVMQKGQVRTNHADIDEFFVAFTKKVRKHRGYMAILEVCGFNDWLLEKLKKTGCSEIVVIQPEGSALNKTDKRDADALGALLWNNRKLLQGGKRPNGIRRIFPADPADAQVRQLANFRQHLVRHRTMVINKIKGIVNKHNMAQDAPSQLYHTQTFRQWIKTVQLPVVDRLEVNMHIEAWELYDKQINEVEAELVKRSEATKAKMADVYRLKAIPGISAMGAITLLSRIGNVKRFKNPDSLANYFGLTPGCHNTAGKHRIGGITKRGNAMARQVLNFAVLHVVRKDPAMKAWYKKIKSRKGAKTARVAVMRRLATIIWHILRWGKPYQFRYDPPTPVPKQGDLRSPREVLGGIGNNHHSRKREKPPLKCRGKTRARR

SEQ ID NO: 241147 - protein, 403 aa, unidentified
MNNVAGIDVSKGKSMVSVLRPFGEVVAKPFSVGHTGSELKELADYLKSLDGETRVVMEHTGRYYEPVARFLHEEGVFVSAVNPKLIKDYGNNTLRKVKTDKADSRKIARYGIDNWAELRQHTPMDTIRMQLKTLNRQQSLYTKTKTMMKNNLIALLDQTYPGVNALFDSPVREDGSQKWVDFATTFWHVDCVRNMSLTAFAERYRKWCKRHGYNFSQSKAVEIHAGAQDLIAMLPKDALTKTMVRQAIDALNAVSASLERLKAEMQALAAQLPEYPVVMAMHGVGDSLGPQLMAELGDVARFTHRNAITAFAGVDPGADQSGTHEAKSTRVSKSGPPELRRALFLVMDCLLKTQPQDDPVYRFMDKKRAEGKPYLVYMTAGANKFLRIYYGRVKEYLASLEEN

SEQ ID NO: 241148 - protein, 398 aa, unidentified
MKTNHPYLLAIDLGKESSVALLGERTGQIIKSPWRFSHCFEDYQQLIRGLNSQQTLVGFEATGHYWLSLYDFLVKRGFAIVVLNPLQVKSFRNSGIRGQKTDKIDAKLILDILLFSDKPLISERDPVKVIELRNLCRLRASLSQEKINLSNKLISILDIVFPEYQRILSPKRAASLALLKKYPLPEEIASLSLPQLTKVLKEASKRNKAAEWAKEIQERAKQTIGAKLGLNSFGLEIKIVIQRINQVAKQIKRLDQEIKKIFSQFPEHKNLLTIPGISQVTGAAILAEIGNIGKFRSKDGADKLVAFAGLDPKVKQSGKYTGIPKMSKRGSSFLRSALWQAAISAERSDPGFKKIYLQHKQKGKHHQVCLSYVAKKLTRVVYSVLANNKPYHPLPTSH

SEQ ID NO: 241149 - protein, 388 aa, unidentified
MDVLYQSCAGIDVHQATVVVCILHGPLTSTRPKREMTQFDTTTKGLKACHDFLTQFHVEAVGMESTGVYWRPVWHELCDDFELILAQPAHMKAIPGQKTDKKDAHWIAQLTRIGLLPRSFVPDETIQELRELTRQRKHYVESRNRETNRIHKILQSGGIKLTTYIEDIMGTSGRNLLQLLIDETPLTPRMIHQSVYTSLKRKVPQLLEALDGYFSAHHRFMLGQSLEIYDFYQKQIDCLEERINGYLNLYERPVEILDSIPGMDLITASVIIAEIGVDMSQFPTAGHLASWAGLCPGNNESAGKKRSTKIRHGNSYLKRCLCQAVFAAKRQKGSPLAERYYQIQSRRGSQKATIALAHQLLKIAYILLKENLTYQEFVLQKRLLETSQ

SEQ ID NO: 241150 - protein, 347 aa, unidentified
MKKVVKQVLGIDVAQDELVCCFGKMHDDFTPELISHKTFLNSLKGFESLLEWVGKLSEASVAVRYVMEATGIYHESFAYFLHDQGLDVSIILPNKISNYARTLNVKTVTDKTASEAIALFGLERKLDNWDPPQGIYKKLQQLSRERGQLMDEQTVIKNQLHAEKAEARPYKNSIERANKRLALIKKQVQDIKEELEELLKSNDEVKEIAILLCSIPGIGMITAATVLGETNGFNLIRNKRQLTSYAGLDVKEKQSGTSVRGKATISKKGNKQLRKAMHLPALAAIRYDERFKSIFVRLVSKHGVKMKAVVAVQRKLLEMTFTMFKSKTKFDKNYFKGAEEIVEQGAE

SEQ ID NO: 241151 - protein, 374 aa, unidentified
MEHDSEAFVAFDTCKLRNTVAVAEAGRAGEVRFVGDVENSAAATAKLVRKLAGKYARLTFCYEAGPTGYGLYRQIKGLGQDCLVVAPSLIPKRPGDRVKTDRRDAMSLVKLLRAGELTAVWVPDERHEAMRELARAREAAVADLRSKRQQVAAFLLRHALRYGGKRTWTKAHMSWLAGLKLAHLEQRIAFEEMLLAVRQAGERLERLEQAIRAAVEDWSLREVVTALMAMRGIDLISATAFLAEVGDLSRFRTPRQLMAYLGLVPSEHSTGATIKRGPITKAGNRRARRVLVECAWSYRHPPRVGNDKQAKVAAAPAAVGAIAWKAQSRLCARYRSLIRRGKLKTVVVTAVARELAAFIWAINRELTTPRAAVT

SEQ ID NO: 241152 - protein, 342 aa, unidentified
MTQPAPARITVGVDTHAEVHVAVAKDNFGRRLDAISVPTTPAGYGELLGWARRLGQIEGWGIEGTGSFGAGLTRFLHRHGQVVVEVNRPDRQTRRRRGKSDPLDAEAAARAVQAREGVIPKAGDGQVEMIRSLRVARATAMKARTQAINALKGLLVTAPDELREQLRALSAVRLVQTAAELEPGPVTTPAAAARLGLRSLARRYQALSAELTILDTELDRLTVTAAPKLLALFGVGSDSAGALLVAAGDNPDRLRSNACFSMLCGASPIPASSGKTQRHRLNRGGDRQANAALHRIVIARLRHDQQTKDYLDRRIREGKSKKEAIRCLKRYVAREVFAALQP

SEQ ID NO: 241153 - protein, 498 aa, unidentified
MSSKTNIYPRSNPQVNALFDQAGHPAKVMCVAMDYAKAKHTILFCNGLGDRLKPNLVVDNSAAGATKLLEELRACAKKKKIGCQHVFFGGEDLPSYAENFVYKLVREKFLVIGVNAWEAKKQRENFQASSDSLDLLGIARCCLNRRGRTIEELPEAYPNLKITTRDRDKTVRLRTGVSNRIHSYVDRLFPCFLSLSKSGLEPLSKASLELMEQDWFSPAQVGRRSRQTLAAWLERRGVEQPQEKANQLKQLAGEVLGPAPKQTVMLQRTLAGLVGVYCGLETSIGMQDREVASWLAKTPGAWLTSISGIGITLAAGWMSELGQPSQWRPVRQLCSYGGVVPRTKQTGGPDKQAVVIGVHPRANKRFKNVVLLAVEKVRQWGPEELRQAAQELEARGAHTDFAMAKRLVRLAKYLVTTGNVYRPKALMDPQTPKATLAAYYQGLWEKLVAKWKDKADLAEVFAPENPLGKWRKMVQELYALELRLPKQKAAGKASALTP

SEQ ID NO: 241154 - protein, 429 aa, unidentified
MSKIPFEDLSVWRALVLLARPGGVVVSVHAAPVTVSTIVVAVDVGKTSVMASVTDDARRRLMGPVEFAMTRSGLAAAAQRVSAVAPSCLQVKVGVEAAGHYHRPVVDYRWPAGWEVLELNPAHVAEQRRVMGRRRVKTDGIDLEAITELVLAGRGRVITERDVLIGELAAWAQHRSRRVATRTATKNQLLSQLDRAFPGLTLALPDVLGTKIGCLVAAEFTDPARLAALGVNRLIRFAAARDVQLRRPVAERLIKAAKDALPTRDAMVARRVLTADVCLLTELDSRIVDAEAELARLLPLSPFSPLTSVPGWGVIRVSNYAAALGDPTRWPGPKQIYRASGLSPMQYESAGKRRDGSISREGSVALRRALIDLGMGLWLTEPAAKTYAHGLKDRGKRGGVIACALAHRATRIAHALVRDHAVYDPHRWS

SEQ ID NO: 241155 - protein, 322 aa, unidentified
MQTQNAVVYAGVDVAKTTLQLHLQGQQREFSNTPTGLLQLVAQLQTVPSVQVVCEATGGYERALVKVLHQEQIPVSVTNPARVRAAAQAQGQRAKTDRIDAQVLTDYGQRYQPKPTPPVSAAQDQLVALTQWLKQLIHGQALAKTQAEHHQDPFVRRQHAKLMTHLEAQVEAVEKQIEALLEQDAALQQRVTCLDKIQGVGPRTAWMVLAHMPELGRLNRHEVAALAGLAPWTRESGTMKGMRCIGGGRPEVRLALYMAALSAARCNPVLCILYKRLRAKGKLPKVALTAVMRRLLIYMNHCIKALPSETAGARTEEELKAA

SEQ ID NO: 241156 - protein, 345 aa, unidentified
MATIAVLGIDLGKNVYSLVGLDEAGKAILRRRMKREGLSTFAERLSPCVVAMEAYCGAHWLGRIFAARGHEVRLTSPEYVRPYVKAQKNDDRDAEAIAEAATRPTKRFVERKCQEQLDLQTLHRARDRLVAERTALINQLRAILLERGIIVAQGRRKLEQELVALFDEGEGVGLSARLIKLVEDMRAQWTEFDRRIGEFEAEFATFAKTNQEASLLLSIPGVGVLIASALIAAIGRGETFDHARDLAAWLGLVPRQSTTGGNPKLLGISKRGNKYLRKMLTHGARAALPHLAQKDTPLGRWAKGLLARAHKNVVVVALANKLARIAWAVLRRREKFAMSALPVAA

SEQ ID NO: 241157 - protein, 347 aa, unidentified
MLALHPDPGVVIGVDTHNDTHTAAAVGATGAVLEHLTVPADPAGYRQLIDFGRRHDARLWAIEGTGSFGAGLTTALLARCERVVEVDRPQRPARRGGVKSDDIDAVRAARQALAGVGLSEPRRRGDREAIRVLLATRGQAITFRTRAISALHALVTSAPDGLRERLRRLPLGELLHSCAGLRDSSRRSVEESATVLAMRSTARRALACEREAAELEVQLDRLVRRLAPELLDQLGIGPVVAGQVITSWSHHRRIRSEAAFAKLGGAAPIEASSGTITRHRLNRSGDRQLNRALHTIVLVRLRQDSATKDYVQRRLAQGKTIRDIKRCLKRYIARQLFRQLEALSSTP

SEQ ID NO: 241158 - protein, 439 aa, unidentified
MPTPCLTVLDPTAAAIDVGSEQLHLSIAGGPPKVFGTTTGELYALRDHLLTQGVRSVAMEATGIYWLCPYEVLEKAGLEVVVVNGKYVKNLPGRKTDMSDCQWAATLHAHGLLKPGFVPPEHIRRLQDYLRLRTDHIVMAGSHEQHMQKALERMNLKIHDVISDLTGFSGLKMVEAILAGERNPVALVALCDPQIQKHKTQQLRAALEGTWKEEHLFALRQAYELWQVYQHKIAECDQAVEALLQQMVGPEDPNKPSPPATKRGGVNTPQIAGLHGLLCRLCGGKDPTQLPGVADYVLLQLLSEVGTDLGKNWKTEKHFTAWLGLAPGSRQSGKRRGSQRRSRNRAGRLFCVIARSVGRSVDKALGGFYRRLKGRRGGLVANLALARKLAELFWRLMVHGVNYVEQGLKKYQERVAQTEQSLLQKLARKYNMVLQPKPA

SEQ ID NO: 241159 - protein, 291 aa, unidentified
MKDLLEISCGLDVHKDKIVACILTGPLGKPTNSEIREFTTLIPDMIALRDWIVSQSCHHVAMESAGIYWLPIYEILEEAFGGDITLLVVNARHMKNVPGKKTDMRDSEWISTLLRAGLLNGSFIPEKRIREFRDLNRYRKSVIRDITSQKNRVEKSLQSSGFRLSSFISDIFGASGRNIIRHLTEHGQIDRPALDSCLKTTTRNRIDEILMSVNGISTTASCAIIAEIGIDMKPFKTAEHICSWAGLCPGNNESAGKRKSTSVTKGNPYIKSILCEIAWVITGKRNTYLSA

SEQ ID NO: 241160 - protein, 364 aa, unidentified
MKNCITWVGMDDSVKKINVAVFVGHADTPHAEFVVENNQSGHGRLIKKLKSLPGEVRCVYEAGINGYHLQRVLSKNKIACDVAAPSLTPRRSGNRVKTDPRDAKDLARLYRSGELTSIAIPGIKQESVRDLLRAREDAMEDQQRARHRLNRFLTRHGLRYWSGKAWTQGHLKWIKEIRFAEPEAQAVLESYRLALDEETERMKHFDELVQQASKAPEYQKLVSYLVGLRGIQVLTAMTIIAEGIDLKRFHSARALMKGAGIFNWQYTSGETDRRGGITKAGNVHIRRVVVESAWHYRHTPTVGRVLRKRRAGLPAEVLEIVRKADRRLNKRYWHLVNRGKSTQSAAVAVARELLGFIWAVGQVA

SEQ ID NO: 241161 - protein, 338 aa, unidentified
MKIKALGIDLAKSVFHLYGVDAHGKAHMKKQLSRKKLLEFMVNLPPCLVGMEACGGAHYWARTFRDLGHEVKLLPPQYVKPYVKTNKNDYNDAEAICEAMSRPNMRFVGIKSVDQQDVQGLHRIRSGFMQARTRVVNQARGLLAEYGIVVGRQVGQLRRRLPEILEDSENGLTAFGRELFSGLYQELVHLDERIQVCNKRIDRVLKENEACQRLAEVEGIGPITATALVASVGDPGVFRKGRQMSAWLGLVPRQHSTGGKPVLLGISKRGDRYLRTLLIHGARSVVSRAQGKSDARSRWITQLRQRVGMNKACVALANKNARVAWALMATGDRYQVAA

SEQ ID NO: 241162 - protein, 337 aa, unidentified
MKRQYVGIDLHRRSTTLYRMAEDGEMLGTERIVSQPFELARAMEAAGPEPEVVLESTYGWYWAADVLQDLGAHVHLAHALGNNWGDRRVKNDERDARDLAAMLRIGRLAEGWIAPHEVRELRELVRYRYSLIRHRTSAKAQIHGVMAKNGILPVVGELWGPTGQAQLDRLELPEAYATRLDSLRNLLDVYDRAIAELDAHIHAELKGDAGYRALMTLPGVGKVLAAIFVAEIGDISRFDSAKKLSSWAGLTPKHRESDEVVHRGNITKQGSPLVRWACIEAVGNYRAKGNEKLRADYKRIAERRGKYKARVAVARKLLTLVFYAMRDGEVRCLETAA

SEQ ID NO: 241163 - protein, 344 aa, unidentified
MDHFGGLDVSVKETSICIVDDTGRIVKEVKVASEPEALLKVLWNPAYRFKRIGLEAGPLSQWLFSGLAEASLPVVCVETRHMQAVLKAQINKTDRNDARGIAQMIRVGLYRPVHVKTLRSQKLRMLLTHRKLLQSKAIAIENDLRGTLRNFGLKVGMVGKVRFEARIQELVENFPDLSVLVEPLLIVRRALREQVVILHRRLLAIVREDEVCRRLMTTPGVGPVVALTYRATVDVPARFRKSKSVGAVFGLTCSRYQSGEIDWSGKISRCGDEMMRTMLYEAAQSMMHSKKWSWLKAWAMQIARRRGMKKAIVALARRLAVIMHRIWVDGTEFRWAREQAAAAA

SEQ ID NO: 241164 - protein, 428 aa, unidentified
MSHDAKDVPFPQQFKLFAGFDWASDHHDVVAVDPDGQVVLELTIEHTAEGWATLREKFAKLVGQDASVVAVAVETCNGPAVERLLEMGCGVYPLNPKAAQRYRDRKSPMGAKCDRMDAWSFGDALRTDGHGWRRLQADDPLTQELRILCRDEVRLIQQRTALVCQLRQALHEYYPAALEAFDNWIVPSSWAFVEKFPTPHVLVKAGRRKWEKFLHTHRLARPERYNQRLEIFAQADRFCGKQAVTNAKSRLAVALVAQLRVLGKQLENYRKAIEALFGRHPDNDIFGSLPGAAAKLAPRLLSEFGQHRDRFPKAESIQCYAGTAPVTKQSGKSRWVHCRRGCNKSLRAAVHLWADQSRHRCAWAQAYYQTKRQQGQSHACALRCLGQRWLKILWKMWQTGTRYDEALHMRNQVHHGSWVIQLGPGEAC

SEQ ID NO: 241165 - protein, 373 aa, unidentified
MAWARTAIMGVPTMAQAKTSVAFDVHVSGTVAAVLDHESGELRRRRLSGRGEDVVAFAAGLAGPVRATYGAGPTGFALARRLEGVGVDCLVCAPGLIPRGPSDRVKTDQRDAERLVRLLVAGELHRVAVPSVEEESMRDLVRAREDLRGDLMRARHRLAKLLLRHDVRFDGPERNWTQAHLRWLSTVRFEHAGSQHAFEDYLGAVEALVVRRGQLEADIARLLPESPFAETARRLMCMRGIDTLTAAGLCAEIGDFNRFRHPGQVMSYLGVTPSEHSSGSQRRLGPITKSGSQHARRLLVEAAWHYRRPPGLSTNLRRRQRDADPQIVALAWKCQRRLHHVWQQMEQRNKRRTIIAVAAARELAGFCWAIATE

SEQ ID NO: 241166 - protein, 350 aa, unidentified
MELHTIGIDLGKTVFHLVGLNQRGEVVVRKKFSRKQLLHFTVNLQVKLIGMEACGGSHFLGRALREQGHEVRLMPAQYVKPYVKTNKSDYIDAEAIAEAVERPKMRFVPIKSDDQLDLQSLHRVRERWVMRRTAVINQIRGVLLERGITLRQGRRHIDAALPGILEDASAQLSGVLRLLLAQLRQELDHLQMRIDEADAVINKIAGDNEACRRLVAIPGIGPVTATAIIAAIGNGAAFKKGRGFSAWLGIVPGEYTTGGKQKLLGISKRGNSYLRRLFVQGARAVLQQSAKQSSGLSAWLAQLTTRTHSNVAAVALANKLARMAWAVLAKNEPYRPPMLAGAATECLTCR

SEQ ID NO: 241167 - protein, 401 aa, unidentified
MTAVGSKAWIGVDIGKTHHWVCAVDESGQKLLSLKVLNDEAQIIEVIAAVNEVAPDRVWAIDILGTPSALLVALLAKADEQVRYASGRVVAAMSTAYSGEGKTDAKDAYIIAETVRIRSDLSVIDADADLVRTLGVLTGYRADLVADRVRMINRMRDLLTSVFPALEREFDFASCKGALVLLSGYATPEAMRRMGEARLSRWLRQRRVRGYADVAARAVAAAQTQQTVLPGQDVAASIVAELANSVLVQHERLKVLELQIQDAFAQHPQADVIESIPGFGPVLGASLLVAAGDLAAYPTAGHLAAAAGLVPVPNDSGRRAGNLHKPRRYSRPLRHALYLSAQTSMMRAGPNRDYYLKKRDQGRTHSQAVIALARRRIDVLWALLRDNRTWTPAPPARAQAA

SEQ ID NO: 241168 - protein, 369 aa, unidentified
MDHYAGIDVSLEYSSICVVDATGQIVREDKIASEPEVLIAWFGSLGYALTRIGLEAGPLSQWLYAAMKKAGLAVELLETRHVRDAFKAMPVKSDRNDARGIAQLMRLGWFRPVHCKSIGAQEIRAELTARKLVESKLRDISNSLRGILRGFGLKVGATTERSFPGRVRELVKGHPVLEAIAESLLSVHEVLLREFNGFQKRVQSAACSNVKARLLMTTPGVGPVISLTYAAAVDDPARFKSSKKAGSHFGLTPKKYQSGETDRSGRISKIGDVSVRAALYQAAHVILTKPVKGCPELKSWGMRLAKRAGQEKAKVALARKLAVIMHRMLADGTPFNPNAKAERMAATAAKAARKVLALPANGATVAEAV

SEQ ID NO: 241169 - protein, 343 aa, unidentified
MQTITTIGLDIAKSVFQVHGVDAGGQAVIRRQLKRRYVLAFFQKLTPCLVGIEACASAHHWSRELQALGHTVRLMPPAYVKPYVKRQKNDATDAEAICEAVTRANMRFVPTKTPEQQSGLVLHRTRHLFIRQQTAVINSIRAHLAEFGIVAPVGRHGVEELLNVVADPADKRVPEIARACLSALGAQLRRIKEQILEFDRLIRAWHRSNEMSMRLDEAPGVGPVLATALVATVADPKSFRSGRNFSAWIGIVPKQHSSGGKNRLGNISKQGDRYLRGLFVAGALAVIRYAKIHGTKHRPWLTALLARRPTKVAAIALANKIARMVWAMMTRGERYKEPVALAR

SEQ ID NO: 241170 - protein, 380 aa, unidentified
MVEAWVSELCQRFGHGPIAVAVEQVKGALVYMLRKYECLHLYPVPSTMTAKMREALYPSGAKDDPRDADLLLDLLLQHRDKLRRLTPDNEATRRVQNLVEERRKLVEEKTAQLNRLIGYLKVYFPQMLEWFAKLDTKLVCDLLERWPSLEELQAVPPGEVKKFFRHRRGRHGELTEWRMQGISQAMPAIRDRAVIEAKRTVVQVIAQLLRTLLEGIATLDRKIAEAAEVHPDYFIFQSLPGAGAALAPRLLAALGSQRDRYASAEEVQKYSGIAPVTERSGKKKWVHFRWACPKFLRQSFHEWAGHSIAQSVWARAYYQQQRQRGKDHHAVVRALAFKWIRIVFRCWQDRVAYDETRYLRTLATRGSPLTSAFADTAASM

SEQ ID NO: 241171 - protein, 376 aa, unidentified
MSDHSEAFVGLDTSKLRHAVAIADGGRGGEIRFYGEIENTPAATAKLVRKLAAKYERLTFCYEAGPTGYGTYRQITSLGFDCVVAAPSLIPKRPGDRVKTNRRDAVSLAKLLRADELTAVWVPDERHEAMRDLTRARETAMLDLRTKRQHVSAFLLRLERPYPERKKTWTKAHMGWIASQKLDHPEHRIVLEEMMLAVRQAQERLERLEQAIAAAVPDWSLAPVVTALMAMRGIDRVAATTVLAEIGDLSRFQTPLELMAYLGLVPSEHSTGDEIRRGPITKAGNRRARRMLVECSWSYQYPPRVGRAKQPKVDAAPPAVREIAWKAQHRLYRRYRALIRKGKRKTVAIVAVARELAGFIWAVARATTTARAAVAS

SEQ ID NO: 241172 - protein, 344 aa, unidentified
MQIHSVGIDLGKTTFHLVALGAAGKVLVRKKFTQRQLLTYTANMQTSLIGLEACSGAHFLGRVLRKQGHDVRLIAAQFVKPFVKSNKNDFVDAEAIAEAVERKNMRFVPIKTDDQLDLQAIHRVRDRLISRRTAVINQLRAFLLERGLVFARTPAKLRAAMSDILENAEADLTPQMRNLIDLLWGEWKTVEQQIEVLRLELERISAADAGCTRIRQIPGIGPIVATAIVAAIGNGAAFHKGREFSAWLGLVPRQYSTGGKAKLLGISKRGNVYLRKILIHGARAAVLRIKRDRSSIGAWMDALDARAPKNVVVVATANKLARIAWAVLSSGEDYRPIANASPVT

SEQ ID NO: 241173 - protein, 369 aa, unidentified
MKKYIYFIGIDISKETLDMSVISNGDVLTHSLIPNEQKAIKSHIIQLRRSLGFTKRNAIFGMENTGIYSNHLINTLESLKLDTVVEQPLHIKNSLGVVRGKTDKLDSKRIAMYLYKSRDVLRLRDPKRPILEQLANLTSLRKRLQSLHIAMKTPLKESAGFVKKGLIEQSNRLCSRSIDALTLDIKDVEDSIEATWKSDEDLNRLMTLVQSVPCIGPSIALEMIICTNEFKNIPTIKQFASYAGIAPFPYKSGTSIQKKTRVSRIANKKMKALLHTSAVLARRFVPDIKDYYHRKTVIEGKHKMLVLNAIRFKMASRVYACLKNNKPYQKDFKFNPPLKYRLIEIEDKRFVTSQWSNRLADLKYLVKKV

SEQ ID NO: 241174 - protein, 410 aa, unidentified
MEVIVERAAALDVHKAQVTACVRMPADTGGRTQEVAEFATTVRGLLTLHDWLSAHHVTEVAMEATGVYWKPVWAILEEDFELLLVNARHVKQVPGRKTDVSDAAWLCQLLEAGLLKASFVPPKPIRALRNLTRYRKAQIRERQREANRLHKVLEDTGIKLDCVASDILGVSGRAMLEALVAGTTDPEVLADLARGRLRAKLPALREALEGRFNAQHALLVGAILAHLDFLDEQIERLSEAIREALAPFAAAVELLCSIPGVQQRTAENVLAEIGLDMSRFPFAGHLASWAGQCPGNHESAGKRRSGRTRKGSKWLNEALTEAAIAAVRTNGSYLQALYKRLRPRIGHSRALGAVKHSMICACWHMLSSGELYRDPGGDYFLSRDPERQTKRLVRQLEALGHAVMLQEPAA

SEQ ID NO: 241175 - protein, 404 aa, unidentified
MYNAVGIDVSKGKSTIAVLQPGGVIVRKPFDVFHTSQSLKELSNYLASLEGDTRIVMECTGRYHESMANSLSNAGFFVTVVNPHLIKNFGNNTLRKVKSDPADAKKIARYTLDNWAELRQYSCMDNTRNQLKTLNSQFSFFMKQKVSAKANLIALLDNTYPGVNKLFDSPTREDGSEKWVDYAYSFWHADCVRKIGLKAFTERYMSFCKKHHYIFQQDKPEKLFNASKELVAVFPKEKTYKLLIQQSIQQLNLASEHVERLRREMNELASTLPEYSTVMGIYGVGKTYGPQLIAEIGDVSRFTHREALTAFAGVDPGVDESGQHKSKSNRASKVGSARLRKTLFQIMTTLLQNAPEADPVYRFLDKKRSQGKPYYVYMTAGANKFLRIYYGKVKECLRNLEQTE

SEQ ID NO: 241176 - protein, 402 aa, unidentified
MNSVGIDISKGRSTVAVMRPFGEVVISPFEVRHTDSELSELARQLKSLNGETRVVMEATGNYHAPVAKLLHDAGLYVSVVNAKLVHGYGNNELRRVKTDRKDAVKLANYGLDRWLTLPRYVPEENTRLLLKNCYRQYRQYSKVQTVLKNNLISLLDTVFPNVNRLFSSPVRGDGSEKWVDFVAEFWHCRCVTEKSEKAFTNKYQRWCKTHGYNFSEAKAHTIHAKASGHIGIMPKSETTKLLVEQAVVQLRTTSTTLTALKREMLTLAAQLPEYPAVMGMFGVGPTLGPQLIAEIGDVRRFYSKKALVAYAGLDAPPNDSGDVTGKHKSMSKIGASSLRRTLFLVMSVYLQNAPLDEPIYQFMDRKRAEGKPYRVYMMASANKFLRIYYATVKAYLESLEQV

SEQ ID NO: 241177 - protein, 454 aa, unidentified
MAKKAKKIKTSKGLKLQIVNSDAAGVDVSSTEMQVCVPEDRDSENNRRFGTFTEDLHDISSWLQACGITTVAMESTGVYWVQLYMILEEAGFDVLLVNAKAIKNIGEKKTDEVDAEWIMLLHSYGLLKASFQPDNRARRIRNLSRHRDNLLKASSREVLHMQKSMELMNIKLVNVISDILGKSGQDIIRAILAGERDASHLAALADPRCKASKETIEKSLVANWDDDLLFMLGQSYQLYQYYQTQMQACDKQIESIAQAYLEQITITDSEHEWLRAQKKKAQKNTVTIDVEKYAFQMWGVNLMRMPGISEGTLLRLIGELGHDFTEKFETYKEFCCWCNLTPNNKISGGKLLSSKIPKRKNAVGLILRAAANSLNTSKTPLGYYFRRIQSKKGYLAAIVATANKLARIIYVMVKTKTEFDESKAKCTEEEILKRKLRYAKKALERIQKQLEKAA

SEQ ID NO: 241178 - protein, 360 aa, unidentified
MRIIGCDLHARQQTLAMLDTVTGEVVNRTLMHEGNQVREFYSQLPQPVLVGIEAIGPMQWFLNLLEELGIECQVGDATKIRAAEPRKQKHDRRDAELILKLLVEKRFPKIWMPSKELLDLRALLLHRHQWVRLRTRIQNALQAIALANGLRRGPSLWSYDGQAKIAFLPLPPHASFRRSALQAMYRDMEGEIEKLTAQVAEQAGHRSVARLLMTHPGVGPVTALATDVFLGDPRRFADGKALASYVGLIPGERSSGRRQRLGKITKQGNPLLRFLWTEAGVHAVRRDPELKRFYRRKLMQKGLGKARVAVARKLGIRLWIMLRDEIDYEEFCRRGQKQSGAALCGDAWNALGVNRRRPVD

SEQ ID NO: 241179 - protein, 346 aa, unidentified
MRIIGCDLHARQQTISMVDVETGEVTEKTLLHEGEEVRAFYGALPKPVLVGLEATGSMFWFLRLLEELGIEYRVGHPAAIRKAETRKQKHDRRDAELIRRLLEEKRFPQIWLPTAEQRDLRTLLQHRHQLVRMRVMTQNGLQGLALSQGLRRGSKLWSQAGQQELKGLRLTGFAATRREQLQELRQELDQRLRHLDQAVSEQAEQRAGTRLLLSHPGVGPITALATEVFLGDARRFPNAKAVASYVGMIPSEHSSGGKQRNGSLSKQGNPLLRLLWVEAARAAARKDARLKQFYRKKLVQKGLGKAMVATARKLGIRLWIMMRDQIDYTEFCRRAEQRCPHAGMPE

SEQ ID NO: 241180 - protein, 340 aa, unidentified
MRLYTAFDLHANNSYGAIIGEQGQRVKRQRLANDPELIFQFLLPYKAEIVGVVVESTYNWYWLVDALMSEGYKVHLANTAGIQKYKGLKHSDDQDDAFWLAEMLRLNILPEGHIYPKEERPIRDLLRKRGHLVKLRTSLIISLQNIIDRNCGTRIKANDVKRLKEDMVAPFVAGNEDLALAGLVSKESIDFLTVKIRAIESSVESRVKLKEPYKNLLTIPGIGKILSLTIMLETGDMDRFEKVGNYASYCRKVSTRWTSNDKKKGKGNKKNGNKYLAWAFSEAAEFARRYDPQARAFYNRKLQKTNFMVAHSALAHKLVRATYHVLKEQTPFMPEKLFAS

SEQ ID NO: 241181 - protein, 445 aa, unidentified
MVQGSGLSRGDKRRNERLARLRELVPVGNAIVGLDLADDKQVLVVTDHDSQVLARRRVRCKAWQLGKVLQWARQIAHERGFADVTVGCEPTGHRWRVLDQLAADHGMALVCVQPLLVGRARESEDYTRDKSDDKDAVLIARLVAQLRCYVPERADATWARLRQLGARRERLIVEASCCVHQLRDLLECAWPAVLSASVSQFRSMTWCAALDVVLQRCNGHPERVARVGIKRFETAVRRQAARWGAQQIHRPIMAAVFAALGDPTGVTAQRPGALERAGWVLADWHAIKSRLAEVETRMVAILDSLQLTELVTSIPGVSAVGAAAILAETGDLSRFDSPRAVVKHAGLCPRDNSSGTLSGRSRISGRGRPRLRLAAWRAIWAALPNNPVMVARYRHLTTRTHNPLRGGQARAALAAALLRWLYIITTRRVTWDAALAGSGEQPTAA

SEQ ID NO: 241182 - protein, 385 aa, unidentified
MARVVIGVDPHKRINALCVVDGRGRVLARQQFDNTAGGFRQLKAFWRQWRQRAWAVEGCNGVGKYLSQRLVAEGETVFDVSTRRAALARVHAGGNGRKTDDTDAESIALVGLRSPGLAQVRPDELTVELKLLANRRDELVAARIQAACRIHRDLMALLPGGVSKRVTAKYAKQVLARIRPRDDVGRLRRQLLAEQIAELVSVDQRILAVNRQIKARVAAAHTTLPRLFGLGPINTGRILGEVSDVARFGSRHHFASYNGTAPRVWGSGGPAKPGVNTKGNRKLNHAIHIAAVTQVRHTRTAGHAYYARKIAEGKTHNEAMRALKRRISDTIYRHLVADAAANQQGPGGQVGTSPTASVTGPTPTAGSSVQPQPGPRRKPTRKPAA

SEQ ID NO: 241183 - protein, 322 aa, unidentified
MFSGGPTNIGIDVSQDKLDIAVHETNEFFVVPYELAECNEMIDRIKRLNPERIIIEASGGVECFIVSLLAAADLPVMVVNPRQIRDFARATGKLAKTDRLDAFAQARFAAVVQPEVRPLKPKETQALEALLARRQQLVEINVAERQRFSQAQQQRRKEVARDIKVHLDWLKKRLAKCDAQLATAIRNSPVWREREQLLRSAPGVGRITALTLIAELPELGQLEHKQIAALCGLAPHANDSGRSHGRRATHGGRSRVRATLYMAVLTAIRNNEIIKGFYQRLLAAGKTKKVALTACMRKLLVILNAMVKSNSPWRAENTQEIS

SEQ ID NO: 241184 - protein, 358 aa, unidentified
MNAIHYIGLDVHKKTISYCIKTAAGQIVKEGTLVADRTVLRSWAGSLQAPWHGAMEATIFSAWIYDTLKPYAERLDMGHPAKMKAITAGKKKSDSIDARTIADLVRCDLLPGCYVFSPELRDLRRLLRYRHMIVQQAVRMHNKTAGLLMESGVSFHKTKLHGKKYFAELIKSLEEVPESVKDLLRMSRATREMFESVEKQLVRRLLSDAALKQRVERLSSIDGVGPITALTWALEVGDPHRFASIADAVSYCGLTAALRSSAGKQQRGPLSKQRNAYLQTTLIEAAKLAPRWNPQLAQMHAQQLERGHANRATLQVARKLVAYLLAVDKSGQPFLVRTPPPKNLPTKKKARRSLASAA

SEQ ID NO: 241185 - protein, 464 aa, unidentified
MTEKKLWRNRKERKEWGRRLQSEDPGLEVVHSHAAGIDVGNGMHYVAVRPDRDPQPVRRFECFTADLHCLAEWLQRCGVKTVAMQSTGVYWIPIYEILEERGIQVYLVNARHTKNLPGRKSDVQESQWLLKLHTYGLLNNSFQPPSEIRVLRTYWRQRAEHVHGAATCVQRMQKALTQMNVQLANVISDVSGLTGQAIIRSIIAGEHDPRKLAELSDPRIHASREEVAKSLEGHWRPELLFVLQQEVVMYDTYQQRIAECDQQLQKHLASFADTIPLLPTAEEPKRKKSKPAKNAPRFELRSELQRIAGVDLTRIDGIDVMVAQTLISEVGLEMSRWKTEAHFSSWLGLCPDNRTSGDKVLARGTRRVVNRAATALRMAAVTLMRSRTYLGAQYRRLRTKLGAPKAITAMAHRLARLVYRMLKYGQHYVDKGAEYYEHRYRRQQIEFLRKKATKLGLQITLAQT

SEQ ID NO: 241186 - protein, 428 aa, unidentified
MADHLNNKPYGAWIAIDIAKNFNAVLSETNEGKRQHFRMANSAEDHDRFIVFLKSLPSPCIIGFEATGNYHRALGHRLISEGFEVCFISSLASARYREVMFNSWDKNDPKDAAVLLELLKQEITQRYVDPLIAGHHDLQELSKTYYQVTLSRTRLQHSILTHYLPLYFPEMGKWWNSTRSAWWINYLLHFPIPSAVTKHSQETFCEIASPIVGRKVNKAAKLIELYETAQHSIGLPITEDSLACKTFQIQLRRYQEINDCRTELEKTAQAVLANNPDSVVLQSVPGIGPINALTILAEGGDLRRFNHHRQFLKYCGFDLAKNQSGNYRGQEHISKRGNARLRLALWMAVNTAITQPENSFQQKYNRYIKDAPQNKDLQRKARTAVAAKMARVVYGLVKSKQMYQGYYEKALPSGSIPLCGAVEAVRTS

SEQ ID NO: 241187 - protein, 329 aa, unidentified
MIVLGIDVSKLKLDAALWLPETRKWYALRAGNDAAGAAKLLHWACAKSGAVVSQCRVVLEATGVYHELAAEALHEAGAEVVLANPKRVRDFAKGHGILNKTDGVDARTLARYGAEAEVIAWQPPPLEVRTLRALLSRLAAVEEDLQRENNRREKAQATSTPTLVLESLERTLQGLIAERKRLEQAINDHYDQHPDLKHQRDLLRTIPAVGEKSANQLLCLLRSKTFDSARQAAACSGLVPLAHQSGTSVRQPPRLSKQGNPKLRAVLYMAAVSALKHNRELRAVYDRFVGGGKAKMAALGILMRKLIHIAYGVLKHQQPYNPALVSKIA

SEQ ID NO: 241188 - protein, 350 aa, unidentified
MMIIGADYHPSFQQIAFVDTETGELQERRLDHPAAAEKFYGDLAAQGKKVRVGMEASGHARWFERLLAELNFELWIGDATEIARKRERKQKTDRQDAQHILQLLMEHRFPKIWVPSWENRDLRQLLWHRHRMVQMRTRIMNQLQAVALNEGLRCKKRLWRQHGREQLESFRLAPWASRRREDLLELLDRLNPTIAELSQSIDQEAEKFPEVRWLMTHPGVGPLTALAFVLIIGRADRFQCGKQIAAYLGLVPLEDSSGNRRRLGHITKQGSSMLRFLLVEAAQVTVRSLPEWRSKYFHLMMRRGRKIAKVAMARRLAIRLYWMWRKGWDYEQVKKFGSHAGTLGTGRGVQ

SEQ ID NO: 241189 - protein, 404 aa, unidentified
MITCGIDIGKGKHAAALLDESGREIGQAKFYDNTRQGAEKLLERLRAHSDLASIHIGMESTGNYWRAFYDHLTKAGCKVDVINPLVTKASSAGDIRGRKTDKRDALVIADVVFRGNYVAKPAENGPERGLKVLTRQRGFLVGGCTALKLHLLDSLSETFPEFESLFEERFGNFALAVLEKYPGANALAHAHLPSVMKIVKEHTRGRDVEAEAKRLIAAAKDSICIDCAIHEEIGECIRSSVKTIRDLRKRITEIEKMIEACNPPKVAELIMPIKGSGKLLPKIIAAEIGDIGRFLHDPKTGATKDMHKRLLAYAGSEPRRQESGKWRGRDFISKRGSGQLRTAGYLIGNSIRQWDPNFKEVYDRKIAEKKHHNEAVICVFAKLLEILCSLYKTGRTYTVEKPSS

SEQ ID NO: 241190 - protein, 346 aa, unidentified
MKFYTGRHKFYCGVDLHARTMFVCILDERGYPLLEKNIKTDPELFLKTIAPYREDLVVAVECMFTWYWLSDLCSREGIPFILGHALYMKAIHGGKAKNDRIDASKIASLLRGSLFPVAYVYPPKMRSTRDLLRRRMFLNRKRSALITHIKCTFAQYNLPDPEQNVSRVSQRAGVAELIPDPGASRNVQLDLDVLDFYDQTLTKLEQELTVIAKDHDPDSYFRLRTVPGIGRILSLVILYEIHDINRFPSVQDFASYCRLVKPAKESGGKRLGSGGAKIGNVHLKWAFSEAAVLFLRKNETAKLYRARLVKRHGKAKSLTILAHKIARAVFFILKRKTVYQPETFFA

SEQ ID NO: 241191 - protein, 411 aa, unidentified
MHNRQNYLYVGVDLHKEHHTAVIINCWQEKLGEIQFENKPSAFSKFLLEVETYVCDGITVVFGLEDVGGYGRALAKYLVDHEQVVKEVNPALSFLERKSEVMIKKNDSWDAECVARILVNKFNQLPDAKPNDLFWSIQQLVSRRNALVKAQSALKNQLHIQLNHHYPSYKKFFSELDGKTALAFWQQYPSPSCLEGTNIKRLTAFLLDVSNNTCSVKKASDILKLVKEDGHTMKEYQETRDFLVRSIVRDIEFKKKEMKYIERELKQLVNLLDYQLETMPGIELVTASALIAEIGDVRRFPNANKLARFAGIAPVYFGSGGKGKTHKSKQGNRALHALFYNLAVQQVQVAKGSKLPRNPVFHAYYQKKLKEGKTKGQALVCIMRRLVNIIYGMMKYKTAYELPIVEEKEVV

SEQ ID NO: 241192 - protein, 371 aa, unidentified
MTESSKTIYVGLDVHKESIAVAYAPEERGTEVVSLGAIGPRQCDIDKLIRKLQSKGATLVFVYEAGPCGYGLYRYFTRKGLACHVVAPSLIPRKPGDRVKTDRRDAIALARLMRSGDLTSIYVPQVEDEALRDLSRGREDAMQDLMRSKRRLKSFLLRQDIRYAGRANWTAAHLRWLSEVVCATPPQQIVFQEYVRAVTEQQERLQRLERELHEAVKGWRLYPVVQAIQALRGVELTGAIILIAELGDLTRFDSPRQLMSYLGLTPSEYSSGPHRRQGGITKAGNTHARRALVEGAWAYRYPAKVSRHLQLRLEKVPAEVQAISWKAQVRLCKRYRQLSARGKHVNQVVVAIAREMAAFAWAIARLVPLAA

SEQ ID NO: 241193 - protein, 366 aa, unidentified
MKKTSTVRVNRNLIFKGHKLTIGVDLGDHWSCYCVLDEAGKIILEQKVATTPEAMKQTFSKIPQGLIAMETGTHSPWVSRLLTELGHKVIVAHAQKVQLITKSNRKDDRHDARTLARLARIDAELLGPVRHRSAQAQIHLTVIRARAELVRARTALVNAARGLVKSYGQRLPKCGTRQVSRELGVGLHTELREVLEPLFKEIESLNERIQEYDARMEKIAKASYPQVELLKQVKGVGTQIALTYVLTLDDPHRFPKSREVGSFLGLRPGRRDSGESQPQMRISKEGDRYLRTMLVQGAHYILGPFGADSDLRRWGLKLAARGGKNAKKRAVVAVARKLAVLLHRLWVSGEVYEPLRNSQKAMRVAA

SEQ ID NO: 241194 - protein, 391 aa, unidentified
MIFVGIDVAKDKHDCFILNSEGTVLADVFTIANNRIGFKTLLSRIQSCSQGESKIKVGLEATGHYSYNLLGFLLDSGLATYVINPLHTNLYRKSLSLRRTKTDRIDARTIAMMLMSDVDLKSYSNTAYHNEELKSLTRYRFDKVKERAKLKSSVARLVNILFPELEKLVSSLHIAVVYALLSNYPGASYIANANTEELAEILCTASKGRYTKSKTAEIQVAAGVSIGSKMPAKSMELKHTIALIRELDKEISEVESAIDKITSQMDSPIFTIPGIGRHMGAMILAEVGDFSNFASADKLLAYAGLSPSTYQSGQLQNCYAHMEKRGSRYLRYALFNAAKYVCLWCPTFSAYLEKKRSEGKHYNVAISHAAKKLVRLIFAMQRSGKAFLADY

SEQ ID NO: 241195 - protein, 430 aa, unidentified
MNYNTQNAKIASITEKTLVLGIDVGSETHYARAFDWRNYEYSKTPLAFSNDEVGFLTFKAWVEDLKEKHGKTAVIPGMEPTGHYWFNLGKFLQDSGMRPVHVNPHHVKKSKEMDDNNPNKNDRKDPKTIAALVNEGRFSYPYIPTGIYAEIRSLSNLRFQTQEEITRIRNRIARWISIYFPEYKDVYGKMDAVSGLMVLKEAPLPAKIRELGAEGINQIWRNAKLRGAGMKRAKTLLSAAEHSIGSQEAPEAAALEIESLLEDYEKYKGRMAELMGRMEEKIKEVPYVEKLLAIHGIGLKTVCGFLAEVGDLSRFDNPKQVQKLAGYAIVKNDSGKHAGESHISYRGRKRLRYVLYEAAISVIGKNAEFREIHQYYQTRDRNPLKKMQSVIAVACKVLRVFYTILKKGVDYNGEKMLQDIRRPGRNIKAA

SEQ ID NO: 241196 - protein, 338 aa, unidentified
METYAGIDLHSSNSFVGVINGKDQRLYGKRHSNRLDDILRALDPFQDSLKGVVVESTFNWYWLVDGLQDHGYEVHLANPSAMKQYEGLKYTDDKWDSFWLAHMYRLGILPEGYIYPKEHRAVRDLLRRRLLFVKHSTSHILSLESMISRNLGLKMSGREIKKLKPEDIDGLFDCPNLVFMANNSLAAIKFLKNIILDIEKNVKSQVQMREEFLMLLTIPGIGNILGLTIMLEVGDIGRFVKVGEYSSYCRCVGSARISNGKKKGENNKKNGNRYLAWAYVEAAQFSRRYCVKAQSFYQSKAAKTKPVVAIKALSNKLSRASYYIMRDQVAFDEDKLFC

SEQ ID NO: 241197 - protein, 369 aa, unidentified
MDKDTTYVALDDSKRKIVAGILRPSDTQPELREIANDARQIRRLFERLKREGPVAACYEAGVSGYDLHRQITGLGVACAVIAPALTPRRPGQRIKTDRRDAAKLVRLFRAGELTAIHVLDESEEAVRDLVRCRDDIRRDVLRWRHRVLKLLARHGRAYLTGKNWSHAHWRWIREQRFELPPLQRAFEATVFALEQALARQAELDKELEALAATAPYREPVGWLRCFRGIDTLSAIILLAEVVDFQRFRRPRELMAYLGLVPSEYSSGETQRRGALTKAGNSHARRVLVEAAWPYRHRPTIGRALANRSQGQPDEIVSHAWRAQQRLHRRYRHLLGHGKRTPVAVAAVARELVGFIWAAMTRHESRRQAA

SEQ ID NO: 241198 - protein, 414 aa, unidentified
MTQPLQVGVDVHRKRNVVCMMDRQGQPVGSQFSVDNNRPGTQEFVQRVKAAAADGDFDAIHIAAEATGLYWWHFFQSLEQDPQLKGNSLQLFSFNPRLTANFKKSYVDLDKTDPIDARVIADRLAWGRDLPTPFHYDERYFPLRCLTRYRYHLVHTLAREKAYCLAMLYLKFSEYTRADKCPFSDVFGAASRAVIHEFASIEDIAAIPFEELTEFIDAKGKRRFADPEVNARKLQQVAQDSYLVPESLQQPLNWVLGWCLQHITTLQRLQTRVNAAIAERLNRIPNTLRTVPGIGPVFCAGIIAEIGDVARFEYKHAKVAKYAGFKWRQTQSADFQAEETRLTRTGNRFLRYYFCEAANLTRRHDAEYRTFYHRKFNEVRRHQHKRALVLTARKLVRLVVRLLTTNQPYRPRRL

SEQ ID NO: 241199 - protein, 357 aa, unidentified
MRYYIGVDFHKQFSFVSVMDTNGNILEQQQLNHLDVSSIREFFSRFAPDASVSVEATRSWYWFVDLLQDLGLTVNLVHPKKTRIIAESTIKTDKIDATILAHLDRCNFLPKAFIPDLQSRSLRELLRYHLSLVKFRTATKNKIHALLAKLNIHHQHSDLFGKAGQKFLSDLSLPDIFRLELNGYINLLSHLKDSIDAVALVIKNSCQLSPMAHRLFNVPGLGHFSALLLTAEIADIHRFSCFKKFCSYAGLAPSTHQSASKIYHGHIIKDSNSYIRYTLIEAVPHAIKKDNSLYFFYNRIAKKRGANKARIATARKLAKIIYFMLSKNQDYYLNKTITHSRVSPYTKLGTAAFPLAR

SEQ ID NO: 241200 - protein, 408 aa, unidentified
MNAVGIDVSKGKSMVAALRPMGEVALLPQEFLHTEVGLEQMAYAIIALGEDTRVIMEATGRYHKPVAAALHEYGIYVCVLNPLFIKQSGGGSIRKVKTDKADAMKIAKYGLDNWVDLREYTPMDTVRQQLKLCSRQYNLYMKTVVSLQNNLISLTDKTFPGVNELFSSPERADGHQKWVDFVMTFYHCDCICRVSENAFAERYQKWCKRKGYHFSAEKAQDVYLGSCGHFTTLPKNDNTKLLITTAAQQLLAGKMTLAALRTEMTRLAKQLPEYDIVRAMYGVGETTAVQLMAEIGDVRRFPRRSSIVGFAGVDPAVDQSGKHSAKSVPTTKRGSPHLRKTLYQIVCTYLKKSPVDEPVYQFLDKKRSEGKPYFVYMTAAQNKFLRIYYARVKECLEAFDAQQDTSQR

SEQ ID NO: 241201 - protein, 313 aa, unidentified
MSEHYVGIDVSKDHLDVALSDGTSLRVGNDEAGHQELVARFSAAVPRLVLMEATGGLERALAAQLSAAGVPLRIVNARHVRHFAKATGLLAKTDRLDAQALVRFAQTLKPEPRAIASEQTLALQALIVRRRQLVEMLGMERNRLRTAHSGVRKSLQASIRWLEKRLAEVDEDIDGALRECGVWREKVELLESVPGIARVISVNLVACLPELGELNRRQISALAGVAPFNRDSGRWQGRRSIYGGRPQVRSALYMAALVGARHNPVLRAFYQRLRSAGKPAKVALTACMRKLLVILNTMLKTGQPWAANLGVQT

SEQ ID NO: 241202 - protein, 337 aa, unidentified
MEREYVGIDLHRRRSVIVRKNAGGEVLSKTRIMNDPMEMARAVGEAGPEPEVVLEATFGWYWAADLLQEMGGHVHLAHPLGNDWGNRRVKNDVGDANDLVDLLRLGRLAEAWVSPHEVRELRELVRYRAKLVRLRSGLKAQVHAVMGKHGVLPTRVDMFGPGGTAQLDALELPDAYAWRLKSLRQLVRTYDAEVDRLDRTIAKQMAHHPGFKAIQVIDGVAPVLGAVMVAEIGDVTRFPTAAHLCSWAGLTPKHRESDDKVRRGSISKQGSRLLRWAAVEAASKNHAGGNFKAAYRRIAERRGRNIAKIAAARRLLTLVYYGLRDGEVRCLASPARG

SEQ ID NO: 241203 - protein, 415 aa, unidentified
MTNRPYIIGVDVASQKADVHVHGPEDEELGHFVMKATNSHMRQTLSRLQSLVDKRNTVVVLEATAIYHRIYYYAFVNCGFEVVVVNPYQSHAFQSGLSLRKTRTDKVSAHTLAVLYRTVRNLPPTKGDTYLELRKLVRAYYRLMDEQSDYRRRILTVLAELFPLLAQRFKNLFSLTGLAIVRHFPTPQAILEANPKDLFYFIRKVSRQRPEWAIQKLDQLLSIARESPSVPVAVGANIQLLHLYLDCLEHSKRQADRLRAQLEAMAQRCRPAKLLLTIPGIGTILATTIVAEIENIENFKKPAHLAAFAGIDPTVKESGNFKGTRNHMSKRGSKLLRRALYLATVAAIRRDKRTGLSKNPYLREYYDKKVRQGKPKKVALGACMQKTLCYVFTTLKHDRPFRLIDPQQAAWRKVA

SEQ ID NO: 241204 - protein, 477 aa, unidentified
METERRLVGIDLGIASSHTVRVLTGDGSEVCRRRCEPTAASLAMVAAAALAGAPAGTGLEVIMEPTGPAWLPVAVYFLQRGHRVYRVSSAKASALRRFLSRHAKSNGIDADTLARLPLMDPAGLQPLELPEAARAELERRVRATDRLTQEAATHKVRLKDFVRQLLPMTPLRGDLCRADLAVLERTGGHPDRILGLGRRRLTAIIVGASNDHLGAERADDWLESATRSSELYAKHAAFAADALADDVLTELRLLTAIEGELARHAAARERAYCAVDSKQLARSLPGVSTIGAPALVALMGRPGRFEHGDQFRSYSGLAPRASETGDTDRKGQVMSKAGPGLLRTTLVRAADTARKQDPQLARVYHAQMTERGAPHIKALCVVAAHLAERSLLVMKRGTAYVVRDVDGTQVSPEEAKVIIATRYTVTEEQRARRRSKKTRKAPQKVLEAHVEARRPSSPVMVTDRGAIASAVGTARAS

SEQ ID NO: 241205 - protein, 357 aa, unidentified
MNFIGVDLHKQSISFCVVNQNRKVLGRKRLSCRDTDGIVAFLEQWNEFEMVVEATASYEWFVKLTEPLARRVVLAHPQKMRVIAESTRKSDKLDAQILAEFLALDIIPASYRPTQRERDHRRLVRHRDAIQRRITSIKNRMRRIMSDYNADRSDLFSVQGQQSLVEFPFSEADRFAIDQLSQELTFKRGQLKQADRQLEEFAKKSPLRQQQQRELLRSIPGVGFVTSEVVLAELADVDRFDSQKQVVSYAGLAPGQRESDGKSKQLHIEKKGSKHLRWILVEAAWQLVRYSPRWKNIYEKLKQRTGAKKAIIAVARRLLCLMIAVLKSGEPYSAVHTGLSSGSANGSRSAPLAAPST

SEQ ID NO: 241206 - protein, 336 aa, unidentified
MSDVFALDVSKGHSVGVWYRGNHCLREFECTHDQISFSPLLKLTEQAINPIIYFEATGVYSTPLERFCRDHQLQYSCLNRLELYLQSESLRRVKIDRKDAHRIAQSVAQHYYRLTTPWTRKYERLGQLNHFYGQVISYIKLKRLRLHTTLQQTFPEEEQLFSSRISRLALNVILLHPHPDFVRGISRTRLKNKLMSETDKSLSKMKCLKYAERLMKLAKNSYPAADKDSIQVRKAQYDCRQLIELVKQQDSLSKEMTTAPAAIPEDALYASAPGIGLQSVAQLIGELGDIRQFDNANQLNAYVGIDLNRYHSGQYTRQDHINKRGNPHLLDCQKHD

SEQ ID NO: 241207 - protein, 350 aa, unidentified
MNATTYGLDIAKSVFQVYWVDPGSGEVFNRRFSRDQLIRFLSNREPGRVALEACSGAHWWARKIVSLGHQAILLHAKYVRPFVQTNKTDAADARAIWTAAQQPGMRTVAIKSEAQQAILSLHRIRSALVDTRTRQVNQIRGLLGEYGLHFRRGRKALTNELRARIAEIEQTVPPLIWRALQRQMAHLRQLETDIAEAERENLNRMKADPDAQTLATINGIGPLTATATVGVMSSPDTFRSGRTFAASLGLVPAQTGSGGKIRLGHISKRGDPYLRKLFIHGARIVVTRSKQRPEWVEALLKRRPVNVVIVALANKMARTAWALLAHGQTYDRQHVSVRPRASGPHAVESI

SEQ ID NO: 241208 - protein, 314 aa, unidentified
MDKTEQFVGIDVSKAALDVHVLPAGTSRRFTNDRGGHTALGEWLSPHPVERVILEATGGYERKVTQALQRLGYHVCVVNPARPREFAKAGSRLAKTDRLDAAVLAHYAQVFDPPPAPRPGDVEAKLARYASTRDTFVAEKTRLRNQLDLNDDADLERMHRDILETIEAKLAELDRMIQSCIREKAELSQRYDQLRAVPGIGPVAAVSLLAFLPELGQVSRRAIAALVGVAPFARDSGMMRGQRRIAGGRANVRRTLFMASLSAVRHNPIIKAFYERLIKGGTAKKQAIIACIRKLLTILNAMVRDNKEWKPMIT

SEQ ID NO: 241209 - protein, 287 aa, unidentified
MIGEKYIGLDVHQATISVAVMDSKGKVVMESILETQAATILEFFAGLRGTLWVTFEEGTWAAWLYDLLKPHVAKLVVCNPRKNALLKHGNKSDKIDARKLADLLRLNDLEPVYHGETGVRMLRELARSYLTIVKDLSRVMNRLKALYRSWAIPCAGRDVYYTRHRSEWLGKIPEAGTRRRAEQLYQQLDMLQHLRQQARRELLAESRKHTITAKLRQIPSLGPIRSALAVALIQTPHRFRTKRQLWTYSGLGWKPATAGNTTTSKANCGAAKSRCPFAASTKITTMI

SEQ ID NO: 241210 - protein, 343 aa, unidentified
MQIRSVGIDLGKTTFHLVALGASGKVLVKKKFTQKQLLVFTANMETSLIGLEACSGAHFLGRALRQQGHDVRLIAAQFVKPFVKSNKNDFVDAEAIAEAVERKNMRFVPIKTDDQLDLQAMHRIRDRLVSRRTAVINQIRAFLLERGMVFAQKPAKLKAAMADVLENADNALTPMMRNLIGLLWDEWKTVEQQIDELTDRLEQIASTDAGCCRIRQIPGIGPIVATAIVAAIGNGAAFRKGRDFAAWLGLVPRQYSTGGKARLLGISKRGNIYLRKILIHGARAAAMRIKRDRFAIGGWMNALEARAPRNVLVVAMANKLARIAWAVLSTGEDYRPGVILAAA

SEQ ID NO: 241211 - protein, 345 aa, unidentified
MQNMYYIGLDVHKRTISYCVKDASGAIHAEGTIPATCFDLDRWMKTLPQPWTAAMEATVFTGWIYDHSPPHAAALKVAHPLLLRAIAAAKKKNDRIDASKICDCLRCDFLPECYMASTAIRERRRTLRYRNLLVRQMVQMKNKIGMLLMEAGVSYNKQRLHKAGYFRGLLATNPDIDEGLGSLLRLCRETVVRLQKTESALVRSLERDSLLMDRVERLMTIPAVGPITALTWALEVGEVQRFSSIKKAISYCGLCGEEKSSADTVQRTPLSKQRNKHLQTTLIEAAKMAPRNSPELAMLYNKEKQKGNANRATLAVARKLVAYLMAVDRGQRNFQVMETNNCIAA

SEQ ID NO: 241212 - protein, 499 aa, unidentified
MEWDWRASEVGARRKTKQKPAMVEPVEIPDAEHELVVDRGAAIDVAKAAGKVCVRLPGKSGRRFSRVWDVPARTGAITELAEQLVELGIEKVTVESTSDYWRIWYYLLEDAGLDVQLVNSRDVRNVPGRPKTDKLDAVWLAKLTEKGLLRPSFVPPAPIRVLRDYTRLREDLIRERTRYWQRLEKLLEDAAIKVSTVASKLDTLSTRDMVEALIAGERDPRRLADLARGRMKTKRSELITALDGRFDDHHAELARLLLGQIDALTAQIGALSARIERLIDAMDESDHPTGDRGRSGGGGPQVTGAPSTGGQATAPARRTTTAIGVDSDTATVVEPQRLTAVERLDEITGVGQCAAQTIIAEIGLDMARFPTPEHLVSWAKLCPRTIQSGPVIRGGKTGKGNPYLKGALGEAAAAAARTDTFLGERYRRLVKRRGRLKALVAVARSILVIVWQLLSDPTARFHDLGPDYHTSRVVTERKIRNHIAHLTAMGFHVTLQPAA

SEQ ID NO: 241213 - protein, 337 aa, unidentified
MEISTIGFDLAKQVFQVHGIDRDGRVVVRRRLRRCDVIAFFRGLAPALVGLEACSTSHYWARQLRALGHEVRLIPAQYVKPYVKRQKNDAADAEAICEAVTRPSMRFVPVKTADQQSAVMLQRTRDLLVSQRTMLVNALRGHLAELGIVVARGRKNVPALMAELEQSGSEVPDLACQALRPLADQLAAVEKQIEAIEATIVACHKNNETSCRLATIPGIGPIIASALAAAVPDPGVFASGRHFAAWLGLVPRQNSTGGKSRLGRVSKQGDANLRRLLVVGAQSVLRWIKPGKGNPWLVTLLARRPRKLVGVALANKMARIAWALMTRGETYSPPAVA

SEQ ID NO: 241214 - protein, 358 aa, unidentified
MLGVLTVNTTKEAPVSAHYDGPQYVGIDLHRRRSVIVRMTEAGRQLEAVRIDNDPVALGLEIAKAGPDPEVVLEATYGWYWAADVLQDAGARVHLAHPLGVKGFAYRRVKNDVRDAADLADLLRMGRLPEAYLAPPAVRELRELVRHRTKLVALRSGLKAQVHAVLAKQGVQVRVSDLFGVAGRSLLDDAPLDPPYRARVNALLRLIDGYDFEVELVSSQLRGRLATDPGYRALLTLPGVGPALAAVFRAEIGDVSRFPTARHLTSWAGLTPRHRESDTKVHRGSITKQGSTLVRWAAIEAVQKLPADAGWLVASRARLTAHKGRNIATVAVARKLLTLVYYALRDGQVRALHRSQAT

SEQ ID NO: 241215 - protein, 349 aa, unidentified
MLIIGCDFHSRFQQIAMVDTETGELIERRLEHGNGEAKKFYAELQQPGRVGMEATGYAQWFEGMLAKLGHELWVGDAAEIRAAMVRKQKTDSRDALHILDLLLTNRFPRIWIASPEERDVRQLLRHRHKLVCLRTSLRNQLQALAMGQGVCRKKKLWASRGRAELEALGLDPWARRRRQELLEILDRVDPSLAELDRAVAQEAEHRPAARYLMQQPGVGPVTALMFVLTIGPIERFQRSKQVVSYLGLNPRESSSGGRQRLGAISKQGNSLARFLLVEAAQTASHYDEDLRRDYQRLKFRRGSAVAKVAIARKLAVRLYWKLREYSSPAPSTRTQGSPETPVVGASLSS

SEQ ID NO: 241216 - protein, 419 aa, unidentified
MAFKIFRFNCCGLDVHKTWIFACIGITDSNGLTEYKQKRFSSFSRGLRELAAWLASFNCADVCMESTGKYWIPVFNILEKTCNVILAHPKYTKPQKGNKTDRKDAKWICDLFMCDMIKPSFIPPARIRHLRDLVRYRLKLVNMLTGEKNRAQNCLTVSNLKLDDVFSDAFGKSSRSITEYILAHPGETFDVSPFVDSRCKSPIEEIQAAVDGAISSEQAVKLRQCLNHIDELENHKEKMEREILRFSDPYLDTLNLIRTVPGLGKNPFTAIQILSEIGDDMSVFPTDQHLVSWAGCCPRNDQSSFKIKSTRISRSGSYLKPVLVQVANALIKSKKHPEITERYRRIKSRRGHKKAIIAICRMLLTAIWHILTDSKPYTAEGYLSPRPVKIEKILTASQALNLLKLRGYVIKDDLPVTAS

SEQ ID NO: 241217 - protein, 355 aa, unidentified
MTIVAHSRPFVVGVDTHAKTHTYAVIDPTGQLLGCEQFPTTAQGVARAIAWVGRRTTGQAEALWVIESVATYGARLAHAAAGAGYEVAEAPRMSAKTHHGVGKSDALDAQAIATAALALDQARLRRPRADQGVRQALRVLVASRDQMTQEKTMNVNALNALLRVHDLGIDARKPLTAAQIGEASRWRGRDESLAQAVARDEAVRLARRVLTLEEALTANHARMAELITDSPAAPLLEQKGIGAYTAAVVITAWSHPGRIRDEAAFASLAGVNPIPASSGNTIRHRLNRGGDRRLNKALHIITVTRMTHDPNTKAYVEKRLAQGRTRREIRRCLKRYIARYLYRTLNALHDTPATT

SEQ ID NO: 241218 - protein, 397 aa, unidentified
MYIVGIDIAKRKHEAAVIDGEGAVIIKPFSFTNNCSGYNRLLAMLAKAKLPLDEVSFAMEATGHYWLALFTRLQKEGFRVQVINPVQTNSIRSFYIRQAKTDPRDALLIAEVIRFGHFSESTLHPENIYELRELCRGRHAIVSMQADVKRKVVALLDQVFPEYETAFTNLFGDTSMAILQTCPTPKELSEMPLEELCHLIEVSSHKRFRMAKAQELQELARNSFGFAMAGDVFSTMIRLYAKHLDFLKQQVREMDRKIAEIMETLDTPITTITGIGPTLGAYILSEIGDISRFSSAAKLAAYAGIDPTMRQSGEYNGVRNRMSKRGSPYLRHAIWLAASSAVLHDPALKLYFQKKRDEGKPYMASVGHACRKMVSIIYAVMRDNKAYTPCIPNEISA

SEQ ID NO: 241219 - protein, 350 aa, unidentified
MMIIGCDYHPGFQQIAWLDTQTGEVVERRLGHRGEAEEFYRDLKGRGMTVRVGMEASGHARWFERLLTDLQFELWIGDAAAVRTKRVRKQKTDRQDAQLLLQLLMEKRFPRIWVPDAENRDLRQLLWHRHRLVQMRTRIMNQLHGVALNEGVRRKKALWRPAGRRQLESLVLAPWASRRRQDPLDLLDQLTPKIHELTRALEEIMEKRAVARRLRTHPGVGPLTALAFELVIGTPERFPCAKQIASYVGLVPAEESSGDRRRLGHISKQGNSLLRFLLVEAAQVTVRSHPQWRSQFFHLAMRRGRKIAKVAMARKLAVQLYWMWRRGWSHEEMQKLGSHAGEPGHRHGVL

SEQ ID NO: 241220 - protein, 406 aa, unidentified
MSGAGLEQDSAVGAGVDAGKEHHHVTVVDPAGEVVLSRRVANDEPALRAVVTEVTGLAGRVRWATGLRDGAAALLLALLAAAGAEIVYVPGRVVNRMTGAYRSEGKTDAKDARVIADQARMRAGLAPLAPGEELVTELRMLTARRADLVTDRTRAINRLRVTLLEISPALERVLDFTRTGPLILIRGYPTPEAIGQAGEEQLTAWLGSQRARNPAKLAATAAAAAASQTVRLPAEDIAAQLVTGPAEEVITLGTRIRQTGLRIQDRFRGHRAAAVITSLPGIGTLPGAEFLVATGGDMAAFASADHLAGYAGLAPAPRDSGRRTGSLHRPRRYNRQLNRVFCTSALVSITCNPESRAFYDRKRIEGKKHTQAVLALARRRVNVLWALLRDNRSYTPRQPVTAAEAA

SEQ ID NO: 241221 - protein, 422 aa, unidentified
MLAVGIDWAEEFHLVALGSPGEGVTEVLRVEHTPTAVGALVARIAGLEPDPAEVRVVIETRHGLLVERLVDAGFTVLPVNPDLIARRRGPARKKDDAEDARLACLLALDRHAGLRPLIPHGELAGELRAIARDDERAARDERRLLNRLRADLVATFPAALQLAGDRLGGPTMLRLLQRWPTTKELQGASRQELVTFALASKHGWPERLADQVAAALAADHFTPRDYLVRAKADTIRLAATQLLAIGTQRRVWERRMGELLLGAPRYGRAKQPRQDQPGRSVPGGKVYLSFPGLGDRLAARVAGEIGDHPGQFSSPNALQCYAGKAPVTRRSGKRELVVATRQACNRYLADAVQRWAFCSLSRSGWAREFYDQQRRRGKGHHAALRALGNRWLEVLWHCLRNHTLYDEATHVANRNRALGRAA

SEQ ID NO: 241222 - protein, 405 aa, unidentified
MAAVMIGVDPHKGSHTAMAIGADEGPLGQVRVRACAAQAQQLLAWAAAWPERTWAVEGAGGLGHLLAQQLVSAGERVLDVQPKLAARVRLLAAGAVNKNDPNDARSVAIVALRSAACLPVRPDDHAAVLKIWAKRHRDLSRARTQVACRLHAVLCELVPGGVSKEIYAAHAAKIVEETEPGGAVQQARLELAAEFVADLRRIDAQLLETRKKLAVAVRASGTTLTEVFGIGPVIAAMVIGDVRGVSRFAGRDRFAAYNGTAPIEVSSGNRIIYRLSLRGNRRLNHAIHMAAITQIRYKHSEGRVYYDKKLAEGKTPKEALRALKRQISDAIYKHLKADAARAAAAGAQGPGGQPGNDSVASAAGSHPEHQLFGQATPGPATTLRHPADQQKRASSRARKKTARTT

SEQ ID NO: 241223 - protein, 320 aa, unidentified
MKTSDNVSVTVGIDVSKLHLDLHVSSGLYDSFRNDGSGFSDIKKLLSKFTVSLILLESTGGYENGIVCYLQRLGYDVVVVNPRFARDFARSLGRLAKTDKVDAELLSQFASVINSRGDRARFVRPLTDETRRHLADMVSRRRQLVDLITVERQRKSVSSQYASESIDAVISYLRSQLERVDADISAHVSLYYPDLSDLLTSFKGVGSATVGVLLGEVPELGKLNRRQISALIGVAPFNRDSGQMRGRRRISGGRSLVRNSLYMPTLSAIRFNPVIRDFYERLLKSGKSRKVAQVACMRRMVCILNAMLRDGSRFEPVMGN

SEQ ID NO: 241224 - protein, 350 aa, unidentified
MIIIGVDFHPAYQEIASVNTDTGEYQEKRLAHPQEAEEFYRSLAAVGQAVRVGMEASGQAQWFERLLEGLRLELWRGDAEVIRAKRGRKQKTDREDARHILKLLLKDDFPRIWVPSWENRDLRQLLWHRHRMVQARTRVMNQLQAVALKEGLRCKKRLWRATGRQQLESLQLAPWSSRRRGELLELLDRLNPTIAELSQAIEREAEKCPEAQRLMTHPGVGALTALAFVLIIGNAERFGCGKQVASYLGLVPLEKSSGNRRRLGHITKQGSSLVRFLLVEAAQVTVRSLPEWRSKYVHLMMRRGRKTAKVAMARKLAVRLYWMWRKGWDYEQWKKFGSYVGQPVHRYGAQ

SEQ ID NO: 241225 - protein, 367 aa, unidentified
MKKDNTIKKSARNRKGVNRKRTVGIDLGDRSSRYCILDEQGEVLAEGSVATTPKGFAQVFGSKLRSRNALVVAPLSPWVSRPLAEWGHEVIVANPRRVRLITDSSRKDDRLDAKTLARLARIDPELLSPIRHRSEQAQADLMVIRARAALVEVRTMLVNCARGLAKSYGERLRSCGTGQVREELAESLSEPLQNALDPLLAEVESVSERIREYDEQIENLGKSRYPEIELLQQVHGVGTLTALTYVLTVDDPHRFRRSRDAGAYFGLRPRRRESGNSRPQLRITKEGDAYVRKLLVQCAHHVLGPFGPDCDLRRWGLKLAERGGKNAKKRALVAVARKLAVLLHKLWVTGEVYEPLHVRRDGKAVAA

SEQ ID NO: 241226 - protein, 369 aa, unidentified
MHKTIKNIGLDVHKNSISIGIADDGRDGDVRYYGRIDNDMNQLDKVIRKFISKGAVLRFVYEAGPCGYAIYRYLTNNNMDCTVIAPSKIPQQSGNRLKNDKRDCLSLARLHRAGELTAVYVPTEEDEALRDLVRGREDAVRALRTAKQQLGAFLLRHDTVYSGKTKWTKAHFNWLADIAMPHAAQQIVFQEYIDTVTDCSNRVQRLTEQIRQQSRQSRLHELIKSLQSMRGISLIVAVTIAAELGDLTRFESPGKLMAFLGLIPSEHSSGERVKKGSITKTGNRHVRKALVEAAHAYRFPARKSRAIRKRQDELPKEVIDISWKAQCRLCTRYQYLTAKGKKTNIAKTAIAREIAGFSWAIAKELSRAA

SEQ ID NO: 241227 - protein, 407 aa, unidentified
MKTSYFLGIDAAKHKIRAALSDKENRLLWQSDLAVSAGALRQLLAKIKTHVVHKEQLLILIKATGMLHLNWSAALTRAGYAVAVINPLMARRLYRVENSIRDNKTDAIDARGLCTIGALHGEKLLALYRFGLKPEQFALQRLQGVRKALRSSLTNLKKTYQSLVELSFPELGQLLELDGVGIRALLSRAPTPAAITRMRRSSLEKNWMLRPKAAALKLLASDSIADPQLAAASAPALQLLLWSLASLEAQLHKLDQQIQSASLNLDRKSKALIESLPGIGAINSAKLLAWLPNHILHSGNNRKVAARLQAFMGNDPRLRQSGQWKGHTKMSKRGVEILRTAFFQCAFSAAQNDPELRAYYHRKRNQGKTHEVAVSHLMRILTRRLVAVLRSGKPYSSNYNLVLQSVV

SEQ ID NO: 241228 - protein, 360 aa, unidentified
MIEENVKRNSVGIDTGKHFLDVCRITSENKKERNKFKTDAPGLKDLICWLKKKDLIVLETGNQAFRLAKMLIKEGFEETYVLNAGELANIYNSLKKTDKEDALKLARLAARIPIEELPTVSIPSDNEEDARNLLKEQEFWAQQISLYKNKLHSIFVHSGITCIKKKDLSNKKNRGECLQYLEEKHVEQAKRICKFIDQHEDEMEIIDAKIVEMLKIEPAITSIAMSMTGIGPINALALFAYLGDCSRFSSGKQVGYYAGVVPRVDISGDTVRYGKITKKGVHQLRRTMIQGAWSCVRSKNGGSVKLFYENLAPRIGKKKAIVAAARKMLEIYYAMVKSGEYYRGTCEGFLEKKLRHYKVA

SEQ ID NO: 241229 - protein, 347 aa, unidentified
MVTLGADAHKRSHSLVAVDDIGRKLGAHTVAATSTGHLEALRWARRWRPRRWAVEDCRHVTRSLEKDLLRAGEVVVRVPPHVAAEGRRSLRERGKSDPIDALAVARTALREGDMPEAHLDDHCREVKLLLDHREDLVGERTRIQNRLQWLLHELEPEFQVASGALSRRPAIKRVEALLEGRHGVVAELARELTVRTAQLSSRIDELEQQLAAMMPALAPSLLALPGCGVLTAAKLLGETAGVRRFRSRAAFAMHNGTAPIPASSGKQQRHRLNRGGNRQLNAALHRIAVSQIRRAGRSHDYFQRRLAAGNTKREAYRALRRRLSDEVFRLMLTDQQTDASGVQAPAA

SEQ ID NO: 241230 - protein, 345 aa, unidentified
MEYFAAIDVSLELSSVCVVDETGKIICEKKVASEPEALVAWFNDTGLEFTRIGLEAGPLSQWLHAGLTAAGLSAILIETRHVKAALKAMTVKTDRNDARGMAQLMRMGWFRPVHVKTVPAQEIRALLTGRKLLLGKLRDIELGIRGLLRGFGLKVGRVSKGRYEARIHELTAGHPMLEPVAAAMLQARVSLRAEYGKLHRMLLGIVRADATCRRLMTVPGVGPLVAVSYKTAVDDPARFRKSKELGPYFGLTPSKYQSGEVDWTGRISKVGDAMVRTALFEAANVMLSRVTRFSTLKAWALRVAKLRGMKRAKVALARKLAVVLHRMWVDGTDFRWRKMPAAVAA

SEQ ID NO: 241231 - protein, 335 aa, unidentified
MKKYVCFAGIDVSKSKLDVTFLTEPSEKKQLHFVVRNDSKGIQQILLLLKKRNIDLKSTLFSFEDTGVYSLPLCFFLSQKQLSYWMIPAIEIKRSKGIARGKTDKSDSKDIAFYSCTHLHKLRLGSIAEKEIMQLKLLFTEREKAIKALHLLESTMEASGFIPKEILQAVKKINAGGIRSLEKMILQLDQKIKEIIASCETIKKQEELICSIPGVGPQTALYLIIATKGFKTFENYRKLACYAGVAPFEYSSGSSIKGRTKVNNLADKKMKSLLYMCAMNAKKCDKELSEYYNRKVEEGKSKMLVLNNISSKLLGRVFAVINRETPFVNTNKFAA

SEQ ID NO: 241232 - protein, 408 aa, unidentified
MQVLYTRCAGLDVHKDTIVACVRCVSPPMHQEVRSFGTTTTQLLELADWLGEHGCTHVAMEATGVYWKPVWHVLEDEFELVLANAAHIRNVPGRKTDVNDAMWIADLLAHGLIRSSFVPPHAIQQLRDLTRTRKQLVREVSQHSLRIQKVLEDANLKLGSVLSDVLGKSGRAMLDAIVAGETDPARLAALAQGTARNKTAELREALRGRITEHHRTMLRLHLQVIDALHRTLGELDTAVGKALAPIQQRTRLLTTMPGVSDLTASVMVAEIGVDMSRFPNAGHLISWAGLCPRSDESAGKRRSTRVRKSGTWIKTTLITAAWAAVRVKTSYLRAQFLRIKARRGAKKAILAVAASMLTAAFHMLRDGTEYNDLGSEHLDRQDRSKTIRRLLKRLQDLGCEVPQMAHET

SEQ ID NO: 241233 - protein, 323 aa, unidentified
MMKDQYSFSQFLGVDVSKAKLDFALADGKQTWSIKNTEEEIVRELIGRMENPQTTIVVMEATGGYEDLLVTLLHQHNIALAVVNPRRIRDFAAGIGRDAKTDPIDAGVIAFYGQVVKPAAQLAKSDDDKKLQSLVERRRQLLDLINQEDNRLQQTADREIREYIQQSLETLKKQVKTIDQRLSQCVQENTTNARKVEILESVKGLGPVAISTFLAELPELGQLNRGEIAKLVGVAPMNNDSGQASGRRRIFGGRSYVRRVLYMATLVATRFNPSIKTFYQRLLGKGKPKKVALTAAMRKLLTIVNTLIKNDETWSDEVKKASA

SEQ ID NO: 241234 - protein, 327 aa, unidentified
MVDAAGQIVREAKVRSEREALAAFFTESGLAFARIGLEAGPLSQWLHAGLVEAGLPAILIETRHVKAALKAMTVKTDRNDARGMAQLMRMGWFRPVHAKAPMVQEIRALLTARKLLVAKLRDVESSIRGILRGFGLKVGAVSKGKFEARIRELVTGQVMLERVAEPLLRARAALRTEYTTLHRDLLRTVREDAVCGRLMTVPGVGAVVAMTFRSAIDQPERFAKSKAVGAHFGLTPKKYQSGEIDRTGRISKVGDAMVRTALFEAANVMLTRAVRFSTLKAWALRVAGRHGMKKAKVALARKLAVVMHRMWVDGTSFCWGEASVSAA

SEQ ID NO: 241235 - protein, 341 aa, unidentified
METATIQKNFYCGGDLHAKTMFLSIMDAKGEILFHRNIPNNPPYFLSVIQPYRHSIAVGVESTFNWYWLADTCQKENIPFFLGNALYMKAIHGGKNKNDRIDATTIANLLRCNMFPPAYPYPKEMRGTRDLLRRRYRYVTLRAESYTHIQGTFNQQAIDGVSSSDVKRKSSRADLPNHFDHPDIAMSVNCDIELSHALDPIINKIEKQVYTRAKYHDHNALSILMTTPGIGKILAFTILYEIYTINRFPSVQNFSSYCRLVKCERTSNGKYTGDGNNKIGNPYLKWAFSEIIIHAQTHSPNIKKYYERLISKHGEGIAKSIMAHKFAVAVYFMLKKQGGIQ

SEQ ID NO: 241236 - protein, 361 aa, unidentified
MELHVGLDVSLESTSVCIVDETGKKVLETSVASDPEAICITLRPHVSAIARIGIEACSTGIWLARELRNEGLPVTVVEARHMRSALSAMRNKTDRNDAHGIAQMMRMGWFRAVHVKPLETQRLKTFLANRRLLKRKLVDLQNHLRGALRTYGLKVGQVGAGRFDGRVRELLEGNGDYMFTTMIESMLDVRAVLFESFRKLHRILLLIVKHDPICRRFMTVPGVGPVSALSYKVTIDDPTRFTRSRTVGAHLGLTPRKYQSGTSVDWGGRISKMGDVDTRGALCEAAASMLLRVQSYSALKAWGMRIAKRSSMMCAIVAVARKMAMILHRMWIDGTDFEAKSGAKITEKRKRDPQTGRLLSC

SEQ ID NO: 241237 - protein, 410 aa, unidentified
MRYYLGVDWADQTHAVWVVAADGTKITARTVPHTAEGLSDWGRDLDQWRAQGIELWAAIERREGRVVDFLLDHGVVVYPVNPKALDRARDRFRQSGAKDDPFDARVLADFLRTDHSHLQALQPSSDAAQELKLLTEDYQRQIRQQTRLVNQLTTTLKAYYPRALEIAELTTTLAQEFLRAYPTPESLTGLTERKWQRWARAHRLSDARTRDLWGVLQQPQLPVPTHVVRAKARLLRSLVEQLTLVVTAVAEYRKAIEDFFARIPTAQWAPTLPIGEHGITAPTLWARLGDAPGRWESFRHLQAQAGAVPVTKRSGKQQRVVQFRYACDKALRYVVDHVAFLSLLSSEWARAYYDQQRERGHPHRQALRALGAKWLKIIFVMWERQVPYDEQYHLATMTRQQLQQRQGKIA

SEQ ID NO: 241238 - protein, 449 aa, unidentified
MAAVMIGVDPHKASHTAVVIGAAEEPLGELRVRACAAQAERLLAWAAAWPERTWAVEGAGGTGHLLAQQLLAAGERVLDVQPKLGARVRLLDAGDTNKNDPNDARSAAVAALRSAGVREVRPDDHAVVLKTWSKRYRDLGRTRTQVVCRLHAVLCDLVPGGLGRPIYASHAARILEQITPPDAVAAARCELAADFLEDLRRIDAQLRETRKKLATAVQAAGTCLTGLFGVGPVIAAAVIGDVRDVSRFPGRDHFAAYNGTAPIEVSSGPHKIYRLSRRGNRRLNHAIHMAAITQIHHRHRRGRAYYDKKLAEGKTPKEALRALKRQISNAIFACLQADARRAAARAQGPGGQQGNDSVASAAGLHPRHRLFGQATPGPGHHPTTAAGGPAPGPAHARGRAGHSPVVATLPPAPPQVQVERPQRSEDERPGGAARRRPHSAARKDRAKDP

SEQ ID NO: 241239 - protein, 453 aa, unidentified
MKKDKNKEQKVVELDAFEQINHNAAGIDVGAKEFYVAVPKGRDTQSVRVFLTFTADIHHLADWLAQCGVKTVALESTGVDWIPLYEILEQRGFEVYLVNARHLKNVTGRKTDVLDCQWLQQLHTYGLLRASFRPSEQICAIRSLVRHRDMLVSYRSAHIQHMQKALTLMNVRLTNVLSDITGVTGMKIIRAILSGERNRKTLASYRDAKCAKTEEEIEKSLEGNYKLEHLFVLKQALELYDFYDQQIKQCDQELETLYNEFEEPDQPGTSAPEKRKRKRRKNQPNFDLSESLYRMTGGIDLTKIEGLDALTVQEILSETGTDVSKWPTVKHFCSWLCLAPNNKITGGKVKSSHTPHTQNRAANAFRIGAQSLMKSKSALGAYCRRIAALHDAPTAITATAHKLATIFYFMLKRREAYRPLAADYYEKEHREKVVRSLQRRAATLGFRLEPTVS

SEQ ID NO: 241240 - protein, 346 aa, unidentified
MKTLGLDVHKDWCQLTAVDDETDEVCLEMKVRTDPEELQRVVAGIPGPKRLVMEEGAPSARLVDALRGLVEEIISCDPTVNALIAGAEDHNDENDARRLITLRRAGALRPVYTPPEPYRTLRSLLGYDHRLGREMTRVRNQIKGLCRRTGFRYRGVAVYPAKNRPAVLDGMPNAALRWEMESLFRRLEALKEERRSAHRVLSGFDAELAEIERLQSIPGVGPTVARTLVAWIVDPARFRSRPALSSYAGLGISQKVTHWKATGKAVASRRGQPELKRVLYLAATAAVNGRNAWARRFRVRMDAGWERRKAIRDVARRLLFTGVAVWRNGTEYQDAKVAMPSLPGTA

SEQ ID NO: 241241 - protein, 377 aa, unidentified
MKATSTRPAAVLGLDVGKSSHWACLVDRDGEVLASAPVRNREAELDALFASAPAGTLVVVDQFRNIGSLAVRRARAAGLGVAHLPGLAASRAAGLFAGEAKTDERDAAVIARTALGVPDSLSGVPGRGEALEAARALSSQRDHVVACATRDKNRLRAVLLESCPALEAAVDLSDRRWLELLAGFGGAWGIARSGAGGPRAEAAGEAAAASTAPPPALVEAENRQVRFLAARISEALDEAGALEAETAALLEGDETYACLLTVPGIGPRTAAQLAVSVDIGRFPDHDHLASYCGIAPRVRSSGTSVRSVRASRRGDARLKSLLIFSCNSLVRSSGRYGEYYRACRARGMGHGRALKAVARKRLRAIYAVMRDRVPYRE

SEQ ID NO: 241242 - protein, 351 aa, unidentified
MANYKLGCDVHKRYSQIAVLDEAGRVCQRDRLVHTPEILQGYFSQFPVGTPVAFETVGNWYWIAEAIEAAGCEPLLTHAAKAKVMMGNVNKTDKLDAEGLATLLHLGKLPTVWIPDAALRDERELLRTRMFLSKIRTGLKNRIHAALSKYALVIEDSDIFVGQGYEHLKRKLLELPTQTYACVAQELDLLDQVQKQIDLLEKRIHQCVQDTPATTLLKTLPGFGKVFSALVAKEMGRVDRFPDAEHFASYAGCVPKVSSSGGKTHYGHLRKEANHYLKWAFIEAANVIVTHRNRPSWRNKHVVRLYERTRQRKGHAVAVGAVARHLAEAAYWMLKKNQPYREPTSDLPRQA

SEQ ID NO: 241243 - protein, 430 aa, unidentified
MNESVSEQPLSPKVAAFVGIDWADQKHDVVLRSAGDPAKAEHQVIKSEINALNDWIAQIQERFGTKGKVLVCLEQSRGALIYQLMAYELFELYPINPSQLANYRKTFFSSGAKDDRPDADLLSELVMCHRDRLKAWKPDDQLTRELASLNEGRRNAVNRRTELTNEIKSQLKLYFPVALQILENDITTALAADLLVQWQTLAELQKVSPGKLRKFFYGHNSRQEKKILERLALIKEAKPLTTDVAIIRPNALRVKLLAQQLKSLLPFIAEYERRIAELFGSHPDRFLFDNLPGAGPALAPRLLTAFGTDRDRFEVAGDLLNLSGIAPVRIASGKKTGKSASVHCRRACPKFLRQSFHEFGECSIRYCPWAQACYQAQRGRGKGHHAAVRAVTFKWIRILFACWKQRTPYDPQRYFQALQTRGSDYAQTTA

SEQ ID NO: 241244 - protein, 355 aa, unidentified
MDHIGIDVHKRESQICILAEGGELIEQRIRTEPDRFAAVLGKRPRARILIEASTDSEWVARCLEGLGHEVIIADPNFAPMYATRTRKVKTDRRDARTLADANLLGAYRPAHRLSDPQRHVRGRLGVREALVRTRTRYISLIRALLRQHGYRVPSGSAEGFVHRVGAMALPGQVRSMIAPLLAVMLPLNRQLAYSDQVIEHLAVQDPRVQRLRTVPSIGPVTAAAFVATIDDAQRFHHAHEVEAYLGLVPREFSSGDSQRRGPITKAGPGRPRWLLIQAAISILRRRPPEAEALWTWALRIAARRGKHVAVVALARRLAGILYALLRDGTVFQPHRAVGAPGAAVGARNRRAARAR

SEQ ID NO: 241245 - protein, 339 aa, unidentified
MELCCGMDLHSTNTVVGIIDEKRKHLIDRKLPNDPELIRNFLKPYKTDLKGIVVESTYNWYWLADLLQEEGYRVHLSHPVANEQYNGLKHSNDKHEAFWLAELLNLGILKEGYIYPRQARSLRDVLRKRAHLVRVRTALLVSLQHMISRNYAVKVKTGDIKRLKEDVVSPVLKNEEALLLAGTSSKEVIDCLTRQIDKIERWALKRRCREGGLTQLITLPGVGDILGMTILLETGPISRFREVGNYASYCRKVSSRWTSNDKVKGRGNIRNGNRYLAWAFSEAAEHARQTNEACRRFYDRKLRQTNTKVAHNALAHKLARAAYYIMKDHVSYQEEKMFS

SEQ ID NO: 241246 - protein, 338 aa, unidentified
MYYTGIDLHKKTSFLTTVNEEGKVVKRANLINDEALILDYFAALDEPTKVVMESTGSWYWLYDLLDGNGFEVVLSNPTKTKAIASAKIKNDKLDSHMLAQLLRTDLISTVYVPSIDTRKLKELLRHRARLVRDTVRMKNRIHALLTKNNCSIPFRDIFCQKGLAHLNNLGLPHYHQEQLQVYLLLYHQLMDQVAPLTESIQKMAQNHPIAKLLITIPGIGPITAMVMVAEIEDIARFPSYRNLSSYAGLVPSLDASAGKQRIGRITKQGSPYLRTALIEAAQSIPRMKTCRLNLFFRKRIVRSGYKKAIVATAHKILQIVFYVWKNQTPYQEVYPACA

SEQ ID NO: 241247 - protein, 362 aa, unidentified
MKHGSRLVLEAGAGVGETIGLDLSDTSGTYVVVNAQGEVSGEGKLALSPTGLSKIFARRKPTRIAIEAGTHSPWVSRLLNELGHEVIVANPRQVKLISQSYSKSDREDAELLGRLARLDPHLLRPIQHRGPDAQADLALLRSRDCVVRTRTNLNHVRGAVKSMGGRVADCSTDSFAKQAASHIPALLRAALLPLLKTIEELTRQIKAHDKQLEKAAQRYPEVALLRQIKGVGPLTSLAFVLVIEEVQRFGKSRSVGAFVGLTTRQAQSGEHQPQLRITKAGDELLRRLLLQSAHYVLGPFGPDCDLRRWGLMLAGPGQNKIRQRKAAVAVARKLAVLLHKLWLEGLVYEPLRLGAMAKATAA

SEQ ID NO: 241248 - protein, 430 aa, unidentified
MAYRIAGIDVHKKMLAVVVSDVEIESEFQFERRWFGSNPEQLRSLAAWLLEQKVEEVVMESTAQYWKPVWEALERYWKPIREKREGARRRSGTLHLAQALSNRGRRGRKRDFPDAERLVKRLVSRELTLSFVPDPEQRLWRTVTRKKYQLTRDKVRLQNQLEALLEEAHIKLSSLVSDLLGASARRMLQALAEGETNPAALATLADQHLRATPEQLCDALGACTDLKPVYRRLLKMALEQLQFLEQQMGQLDQEMANLLSQHQDAVQRLAEVPGLGVDSAHQIIAEVGPSAATFPSEECLSSWVGVCSGQEESAGVNYSHRSPKGNRNMRRLLNQTANAAVKAKGSIFEIVYRRSVPRLGHNRAIGAIAHRMCRLIWLILYRKVRYEERGPAVSQKSKQVRTSRMIRQLRRLGYRIESPNTQYASSAQVQ

SEQ ID NO: 241249 - protein, 343 aa, unidentified
MEHYAGIDVSLELSSVCVVDAAGRIAREAKVPSEPDALIGWFRGLGLQVSRVGLEAGPLSQWLYAAMRGAGLAVELLETRHVRGAFKAMPVKTDRKDARGIAQLMRLGWFRPVHCKSVPAQETRALLTTRKLLQAKHHDVEMSLRGVLRGFGLKVGPTTPRTFPGRIRELVEGHPTLAVVAGALLAAREALGEQLRGLEKRLRDQAREDERARLLMTAPGVGVIVALTFAAAVDDPARFRSSKAVGAHFGLTPRKYQSGETDVTGRISKTGDGGVRTALYEAANVILTRPVKGSALKSWAARLANRAGMRKAKVALARKLAVVLHRMLTDGKPFAAERAAATA

SEQ ID NO: 241250 - protein, 343 aa, unidentified
MQVSTIGVDLAKNVFQVHGVDSAGKVVITRQLRRKQVIDFFSKIPACLVGMEACGTAHHWAREVSKLGHIVRLMPPSYVKGYVKRSKNDAADAAAICEAVTRPSMRFVPIKSADQQALLMLHRTRDLLIRQRTQLINALRTHLAEFGLVASTGREGLAQLAAIITDESNREALPSAMKQALQAIVDQLAALELQIGTLDRAIHAHHRANDMSCRLETVPGIGVIGATAIASTVTDPNDFKSGRDFAAWIGLVPRQHSTGGKERLGGISKQGDRYLRRLLVIGATAVVRHARQHPQKHPWIMRLLAKKPAKLVAVAVANKMARIAWAIMAKGGCYRAPELAAAA

SEQ ID NO: 241251 - protein, 406 aa, unidentified
MSDIFALDVSMGKSYCVWYRGKHCLKEFSLVHTRAGFNALRDMIKKAQKPIIYFEATGIYSRVIEHFCETNGLRFCRLNPLELHLKSESLRRVKTDQKDAHRIALTVQENTFRLTVPWKKDYLQLHELSRFYNQLNADWNYRLNHLHTALEQVFPELKQLFVNRTSKLALNIVELFPHPALVRPYSRVKLKNILMASTDKRISKMKAYKYADRLIDLAQKSYPAVSGDTIQVDEVRYYARQLIALTRKKEEVIKRMESIAQRLPEYILYCSFPGIGKQTAAQLMGELGDISRFDNANQLNAFVGIDIRRYQSGTYLGQDHINKRGNPIARKLLYFTVGNMIRQQHANSNHIVDYYYRLKEKRPHPKLNKVAMVACMNKTLKCLLSMIKHHEKYHYRYTDSIVPVKA

SEQ ID NO: 241252 - protein, 412 aa, unidentified
MKRIRDRVGGLDVHRDTVVACARIVDPDGSVQVTKQSFSTTSKGLGELATFLSDAAVDTVAMEATGVYWKAPYYALEGLFEELWLCNAQHVKNVPGRKSDLSDAEWLADVAAHGMVRPSFVPPPEIRELRELTRYRKTQVDARAREIQRLEKVLQDAGIMLTSVASPVWSMSSRAMIEALITGERDPKVLAEMAKSRLRAKIPQLEEAFSGHFGAHHAIVCRQIIDHIDFLDRSIGALTNEITTRLVPFEGAVAIVTSMPGISVTTAQVIVAETGADMSRFPTPEQLCAWAGVAPASHESAGKRQPAGTRHGAPWLRRALIEAARAAARTKGSYYHALYARIAKRRGPNKAAVAVANSMLFTIWHLLTNGALYEDLGADYFERRHDPAVEAKRLARRIEALGFNVDLSQKAA

SEQ ID NO: 241253 - protein, 370 aa, unidentified
MGKSVLYVGLDIHKMSVDVAIAETGPAGEVRFYGRIGGDLEALDKVTRKLQAKGAELRFAYEAGPCGYQVYRHLTAQGHSCLVAAPALIPRRPGDRLKNDRRDALALARLLRAGELTPVKVPDADDEAMRDLTRAREDAICVERRARQRTVAFLLRHGRVYPGKTTWGRGHWAWLLQQVMDHPAQQIVLQEYLDAVREASARVLRLTGQIRDLVPQWHQAPFVAAYQALRGVSFIVAATVVAEVGDLDRFNNPKELMAYLGLVPSEHSSGASVRRGRITKTGNSHARRVLVEAAWAYRLQARVSRTLLKRQEGLPERVRQLAWKAQLRLCTRYRRLLARGKARQTIVIALARELAAFLWAIGRAVAPATA

SEQ ID NO: 241254 - protein, 490 aa, unidentified
MNNIGSNRVIGLDLGVTSAHSAVVLDVTGQVLLRRRVVSTVKSLAELEQAALRGAPEQTHLTVVIEPTGPMWLPIAVYFGRGGHTVLRVSSAKAADLRRFLSRHAKSNGIDAETLARLPMVAPAGLHPVELSGTDRASLDRRVRTVARLTREIGQRKVRIRALAQTLIPTIGQALGDGLNRTDLAVLERYGDPRALLGAGRARLLRLVRTESRGKLGDDKVRVLRTAAEQALQLWGDDPAIALSDLAEEITTEIRLLRLAETERARHEATRDDALTRVDPDGLATSLPGLGPVGATQLLAAMGRPGRFRNAAAFKSFTGLAPKASETGNTDRKSQPMSKAGNSALRSQLIQSANTARQLDPQLAAIYYAQMTQQGAPHLKALCVVAARLAERAWLTLSKAEPYIIRDLQGRPISPQRARELIAEQFTVPADVRRRRRSNKLAGRAPQQCSGHAKSRHTAGHEATLPSNTITPPNPAVNPTQHTALTPTPA

SEQ ID NO: 241255 - protein, 461 aa, unidentified
MAKQPGKRKKDGAGADATAGLPPLNLHAAGIDVGGAEHYVAVPADRDDEPVRRFGSFTADLHRMARWLKDCRIKTVVMQSTGVYWMALYDVLESHGLEVNVANARHTKTLPGRKTDVQECQWLQKLHTFGLLNNSFRPPEEIRVLRGYLRQRENLVAAAATCIQHMQKALTEMNIQLANVISDISGTTGLAILRDIVRGERDPHRLAMHKNSRIRASRQEIARSLEGTWRQELLFVLEQSLDLYQTYQEKIQTCDQRIDKQLRSMEPKIDPLSEPIPEPRRGKDARGHQSGFDLRGQLYRITGVDLTRIDGIEVQTAQTIISEVGVDMSRWKTEKHFASWLGLCPDNRISGGKVLKRGTRHVVNRASTALRLAASALLRSQSALGAKFRRLRSKLGAPKAITAMAHMLARLTYRMLKFGHDYVDRGIQFYEAKYQQQQLQRLTKQAAALHLQLVPVTSHVS

SEQ ID NO: 241256 - protein, 322 aa, unidentified
MNKYNETFGVDISKDVFDVHGSKSGHSQFKNDEKGFKAFLKSLPSQALVVMEATGYYHYRLAQFLYKNEVAVSVVNPLSVKRFIQMGLAKVKTDKSDAKAICNYALINDVPLYTALTDIQSECLQLFRLLDSFIKHRTATKNKIHGEETLGVPSKAVYRSLKRNKKHLDKELTAIEERILSLVKKDQQQQLTLLTSIPGIGIKTALFLIVVTDGFSKFENASQLCSYVGITPVIRESGSSVRGRSKISKVGNKKLRNLLFLCSFNACKHNKACKGIYERLVNKGKSKKLALIAVSNKLLRQAFAIAKSGRPYNEGFVSVLKK

SEQ ID NO: 241257 - protein, 345 aa, unidentified
MPIVGGLDIHRKQITFDYLDTETGQVQRGQISPADRLHLRAWLARFAGREDVAFAVEGCAGWRYVAEELAAAGIAAHLAEPADTAFARGRKRHAKTDRTDARHLRVLLAEGRLPECWIPPARILECRALLETYNDLRRERTAWAQRIHAVLFHQGAPALGEGALRTEKGVTALREVAAAHLSPAGQLQVATALEVIDALEARLHVVRHQLTDAARHLAGARALAARLYGVGPVTALAITCWLGGAGRFSSSRQAVRFAGLDITVSSSDRKGPPGKLSRQGPPVLRWAVYEAGKAHARTSAPDHRYYATVKDRKNSKRACLSEARKILRQAHHILAELGDDALAAA

SEQ ID NO: 241258 - protein, 361 aa, unidentified
MHATTVAVDLAKSVFQIAVADDNWKVVEQHRLTRSQFERWFGNREVALVIMEACGSAHHWGRRLRERGIEVKLLPAAYIRAYVKRNKTDRADACALLEAARCADIVPVRVKSVEQQALQGLHRIRSLWMTTRTSRINALRGFCREFGEEIPQGARTGVEAISRVLADPHSPVPSLIRETMRLLVEEIRLLEQRIAQLERELTEVARHSPACTHLMSVPGIGLLTATAMVAATGGNVTHFKDARHFASWFGITPKEYSSGNNRKLGRISKRGDRYLRMLLTHGARAVLRAAALARSAGRNLDGLRLWATEIQARANHNKAACALANKLARICFAVLRDHAPYGNPQPCPMKKLERTAFAIAA

SEQ ID NO: 241259 - protein, 352 aa, unidentified
MTTMTATPLLVTGGVDTHADVHVTAALNHLGGVLGTASFPTTPAGYRRLLAWLRSHGDLGIVGVEGTGSYGASLARHLKGAGVQVVEASRPTRQVRRRHGKTDIVDPIAAARAVLSGEADATPKTHDGSVEALRSLKMLQRSATKARTQAINQLRSLLVTAPAELRERLRDMDNKTLFATCAAFRIADDDDSVPAITRFALGDLAQRIGHLDARRAQIRTRLERIVKAIAPQLLEISGVGPDVATTLLLTAGDNPERLKSESSFAALCGVNPIQASSGKTNRHRLNRGGDRQANAALWRMAIVRMNSDQATKDYIAKRVSEGKSKLEAIRCLKRYIAREVYAALPQPTPVGQ

SEQ ID NO: 241260 - protein, 412 aa, unidentified
MEHQHHVFIGVDTHKDQHTAVVCNCWHKNLGVIETPNNPVAFPTFLEQVLASTPNGLIPVFGLEDTGGLGHTLAVFLLKAGYVVKEVNSIRSDRQRNRSPHPDKSDPDDAKAVAKVLINDFDELPDARADELPLAIAQLVHHREHLVNEQTRVKNRFHAAIHQQYADYREFFKDPFGHAALAFWHRFPSSEHLKNIGVTSLASFLRKHSNNRVSTRKAERILSLINRDKNPSLPQQTRDFIIRSLVERLWLLEKESLTVEERLALLIKQTGLQLETMDGINTITAAALIADIRDISRFASSAKLARYAGVAPLKKSSGQKKRFKKSKGGRRSLNTVIYQIALNQICLDRKGQPRNHVARNYFLKKVAEGKTKKEALTCLMRRLCDIIFVLMRDKCAYSYPQKPDVDKASPAA

SEQ ID NO: 241261 - protein, 388 aa, unidentified
MMADPSATPIEATTRPDAGRLFAALELGKSRWLVTVDAPGSDKLSRHAVAGGDGAALLDLLARLRTTAERRTGRPVEVLVIREAGLDGFWLHRLLERNGISSHVVDPASIAVNRRHRRAKTDTIDGEMLLRSLMAWARGERRVCSMVRPPSPEEEDRRRLTRERATLLKERIQHTNRIKGLLYGQGIIDYDPLRKDRLARLDALETGDGRPLPERLKAEIRRELERVELVASQIAAVERERDALIEAPSEAAGPGTPAAALARLKGIGGELGALLWLEALFRRFDNRRQIAAYAGLAPSPWQSGGTEREQGISKSGDRRLRHAMVELAWFWLRHQPDSALSAWFRERVGPGRGRVRRIAIVALARKLLVALWRYTTRGVVPQGAAFKA

SEQ ID NO: 241262 - protein, 355 aa, unidentified
MSQTPNTAIAVIGIDIGKNSFHVVGHDARGAIVLRQKWSRGQVEARLANIPPCLIGMEACVGAHHLSRKLASLGHDARLMPAKYVRPYSKGQKNDFNDAEAIAEAVQRPTMKFVATKTAEQLDLQALHRVRERLVSQRTGFINQIRAFMLERGIAVRQGIGFLRTELPTILATRTDALSPRMLRIIEELAGDWRRLDQRIDGLSGEIEALARQDQACSRLMTVPGIGPIISSAMVAAIGTGDVFSKGRDFGAWLGLVPKQISTGDRTILGKISRRGNRYLRVLFVQAAWVVLVRIKNWERYGLKSWIEAAKRRLHHNVLAIALANKLARIAWAVLAKGRAFELTRTDDASVVRHA

SEQ ID NO: 241263 - protein, 400 aa, unidentified
MIRLFVGLDVSKDNLTCVVKDDRNNLIMPARTYNHDRRDLEALNRCIGDLEKQFDCLSIIGMEATGIYHLGAYQHLLKADRYVKVFNALELKRFKSRIRKTKTDKLDAEVIAEALLLERDPGYHQIVEAELMRIRELCRMRERLVKRITLCKNQTIRDMDVLCRGYSNLFTNILSPSSIEIMKAAFRKTRLFRIETDTMIRILNRYMSITAAEKKAKQLSDLFKNAVVPEYMRDPCIMELHMLIQQYIILNQHKNRIEKVIEKHVLSTDTHLLSIPGVGALTAGVILGELGDLKRFKSHNQLTAFAGLDPSVMMSGRTHRTGHISKRGSPLLREALYQAALVASHKNPVCQQFYQRLKSNGKHHKVCLVAVARKLLHIAYSVETKQKDFYIPNYITENQV

SEQ ID NO: 241264 - protein, 469 aa, unidentified
MKRKSRRAKGQKVFPLSGDLKLIEPDAAAVDVGSRSHWVAVNPERDPNPVREFGTFSADLMSLADWFAPCEVKSVVMEATGVYWVNLYDLLEERGFKVYVVDAHTVRHLPGRSKSDVKDCQWLRRLHSYGLLRSSFRPPAQIRQLRNYHRSRSNIVDAAAQQQLRMQKALTLMNIHLHHVNSDISGLTGLSIVRAIVGGERDPKQLARLRDPRIRASKETIQKSLEGNWQEELLFDLKIALESYDHFQGQISAYDEQIRQALKEVPSKVDLLQEALPPGRLRVCRKRPGMSHQDQINLREELYRISGVDLTRIDGISLQTAQKVFFEIGTDVGAWDEEKRFTSWLGLSPNHCISGGKVLKRSSRKVVNPLSVALRLAARTLNNSHSALGANFRRLTAKIGMPKAITAMARKLAVLVYRMLKYGTQYVDKGMQHYESKYQATKVHYLRAQAAKLGMILLPKQPAGAGAAA

SEQ ID NO: 241265 - protein, 358 aa, unidentified
MRIIGCDFHPGSQQVAIFDPETGEIAERRLRHDNGEAERFYRQLEAPALIGMEAIGNSLWFERLVEELGHRLWIGDAAKIRASYVRKQKTDRRDAEHILRLLLEERFPRIWVPSAAERDQRQLLLHRSKLVRMRTRVKTELQHLALNQGMQSKRHLWSARGRADFEKLPLEGWTRQRRADLLATLVLLEQQIEPLDQAVAEAAGRHAQARLLMTQPGVGPNTALAFVLTVGDVGRFAGSRQLSSYLGLIPSESSSGSRRKLGSISKQGNQFLRTLLVEAAQSAVQHDPGMRREYQHRCHAKAKGVAKVAAARKLAVRMYWMLRTSVPYPAILGSELHGGVHIEGSPSHPVAAVRRPVA

SEQ ID NO: 241266 - protein, 356 aa, unidentified
MVIVAIESHQGALHMQISTIGLDIAKNVFQVHGIDAAEKVVVRKRLRRRQVLEFFKALPPCLIGMEACATAHYWARELTKLGHEVRLMPAKDVKAYVKRNKNDAADAEAICEAVRRPTMRFVRIKSAEQQGQLMQHRTRDVLIRQRTQIINALRAHLAELGLVAAQGNAGVNELRAIVTDEQDTRLPIDARASAIVLAAQLEALESVIGAIEKRIKMQHRSSEASQRVEAIPGIGVIGATAIVATVADPTIFRSGRDFAAWIGLVPRQDSTGGKQKLGPISKQGDRYLRRILVVGAIAVLRRAKENPGKYPWLTQLLARRPFKVVAVALANKMARMAWALLAHGGTYRAPELAETA

SEQ ID NO: 241267 - protein, 377 aa, unidentified
MKKATQFVGLDVHSESIAVAVADSDGSVRSLGQLPATEDAVRRLIKKLGPARDLRVCYEAGPCGYALYWQLAAMGVACDVIAPTLVPVRSGDRVKTDRRDAVKLARAHRSGDLTAVWVPDKQTEALRDIVRAREAAKKDQLRCRHRLSKFLLRQGRRSPETKKWTGKFMDWAKAQRFESGAQQAVLADYVGEVERVAERIARLEQAIDDAVEQMPSTPKAVIAALQALRGVAKTTAATIVAEAGLLSRFARPKQLMGYSGVVPREYSSGNRIQRGGITKTGNAHLRRVLVEAAWAYQHRPSISLKLRQRHQGLSEEIKAIAWKAQHRLHRRYCRLLAKGKPRPHVVTAVGRELLGFIWAVGTEAERQAKPAAVRAAA

SEQ ID NO: 241268 - protein, 348 aa, unidentified
MKITTSGIDVAKSVFQAHGVDEHGKVVLRRQIRRSQLLLFFSKLEPCLIGMEACASSHYWARKLTALGHTVRLMAPQFVKPYRKNDKNDGNDAEAICEAVQRPSMRFVPVKSPQQQAELAVHRVRRRLMGQRTALINQLRGLLAEYGLVLPQGANQVRSKLPALLEDGGESLPALAVELFRDLYEELVALEQRIAVCDRAIERLYRANPVCQRLGQQQGIGALTATAFVATVAHAAQFKNGRQCAAWLGLVPKQDSSGGKNRLLGISKRGDVYLRTLLVHGARSAMRHTPKRNDPKSRWVEQLRKRRGDNIAAVALAAKHARILWALMVRGQSTAQPPELDRLEQPTV

SEQ ID NO: 241269 - protein, 378 aa, unidentified
MQPTQRTDRKAGLDISLELAGSSWKFALTDGIRPNPAVARLDDEHRWERLQHFLQQVRYWRGKWHLPADCAVRVIYEAGQDGFWIARALQAEGIEVFVVDPASIPVARHARRAKTDRLDALRLLEILRRWLRGERSEVRMVQIPSEAAEAQRLLSRERGLLQKEIGQHRDRMRKRLLLYGCSEQLDGHFVNRLAGGEVRCANGGRLPEELWHWLMREAERLALAQKQLRGLEKTLLQQLPEAVQRRVSDLARLGAVGWVGAMRLVLELFWRDFANRRQVGACVGLVPQPYDSGNSHTDQGISKQGNRRVRALLIEMAWFWVRYQPRSELAQWFAKRTAAGSGRGKRIAIVAVARRLAIALWRYLRDGVVPAGAQLKAA

SEQ ID NO: 241270 - protein, 346 aa, unidentified
MMIIGCDFHPSWQQVSWLDTETGETGEQKLVQASGDAERFYRQVAAPALIGMEATGNCHWLVDLLSELGHELWVGDAAQIRASYVRQQKTDKRDAAHILKLLVEGRFPRIWMPSSEVRDLRQLLLHRYKLVIMRARVKNELQHLCLNKGVQRKHKLWSQAGQQILRELPLQPWAGRRRDDLLKLMAMLDQQIEPLDQAVKAEAQRDKMALLLQTQPGVGPITALAYVLTLGDVSRFPRGKQVASYLGLIPREHSSGGRQKLGAITKQGNRMLRMLLVEAAQAAVRYDPGFRREYLHRCHQKPKAVAKVAAARKLAVRLYWMLRTQQPYPAVVRIESSPRVPLVGAS

SEQ ID NO: 241271 - protein, 342 aa, unidentified
MNYYAGIDVSLECSSVAAVDASGKIVREGKVASEPAALIEWFAGVELRMERIGLEAGPQSQWLYGELREAGLAVELIETRHVRNAFKTMAVKTDRKDARGIAELMRVGWFRPVHCKSIAAQEVRVMLTARSLVQSKLQDVEASLRGMLRGFGLKVGRTTPNRFAERIRQLVCGHPNLEVIAQSLLAVHEVLLREFKGLEKRVRGAARSDARARLLTTIPSVGAIVSLTYACAIDDPGRFKSSKRVGAHFGITPRRYQSGEIDYSGRISKTGDKSVRTALYQAAHIMLTKPVKASALKSWAMRLARRVGMQKAKVALARKLAVVMHRMLVDGKPFDFAAGAAA

SEQ ID NO: 241272 - protein, 479 aa, unidentified
MNAKTTRQKNQEEKGFSVINTLSAEERQSRIDELLNTMQAKTWHDLETSGKFDKNAKLSFISEDMLIVGCDIGSETHYLRAIDIRGRELSKKPFSFTNNEEGFENAKAWMVELAAVNDKKQIVLGLEPTGHYWFCIATWLISNGISVVQVNPYAVKQTKEVEDNSQLKDDRKDPKVIANLVMNGNYGMPYLPEGVYADLRSLSLLRSQQNENRIRCINRLHRLMKIHFPEYKDAFGKTDGSFALEMLKVAPFPEDIVKLGEDGIREIWHNAKLRGRGYSRASEIFRYASASVGRKEGIEADRYAVKCYVEEMISLDEKISTIEADIKEKCMEIPHAEKILDITGLGQNIVAGIISSMGDIDRFDDAKEIQKLSGLNLVACSSGKHNGETKISHRGRKELRTWLFQGAKSVVAHAEEFQLLHEYYTTRNKNPLKKMQSLIVIACKLLRIIFAILKKGVTYDPQKMLDDIKRFEESEIVAA

SEQ ID NO: 241273 - protein, 339 aa, unidentified
MAILFVGIDLAKNVFAIHGVDEHGQAVLVRPSVQRARLHQLVAALPPCTIGMEACSGAHHWARLFVQHGHTVRLMAPKFVSPYRMSGKRGKTDAADAQAICEAVQRANMRFVPIKSQDEQARLCIHRVRQGFVEQRTATINRLRGLLSEFGIVLAQKAATVRREAAAHLEDLPGWANTAVGDCLSEVHRLDERLAEYDRHIGKMAGEDERSSRLMRLQGVGCTTASALVSTIGDARDFKNGRQLAAWLGLVPGQYSSGGKTRLGGITKAGDGYLRTLLVLGAKSVLAAARSKHDRLSRWALALEVRRGYWKAVIAIAAKNARMAWAVLAKGEDFKLIEA

SEQ ID NO: 241274 - protein, 311 aa, unidentified
MSIACAAGIDIGKTSLDLVVAPSGGSLRASNDAAGIARIVNRLKRAGVRRVIVESIGIYALGLLRALRAEDFEVGVVDPRRIKAFRVAEGGRAKNDRLDAGLIARFAFTMSQAPRPAPTAEALEIRALSSRRRQLVKLITAEKTRLRHAPDDAVAHSCRHVIALLEAERTRIESELEAKLLSSEDARRVYQILTSIPGIGPRIAVTLMADMPELGSLDRRAVASLAGIAPFDDDSGLRRGSRHIAGGRACVRVALYLAAHAASRAEHGFRDERAALIAKGKPPKVATIAIARKILVAANAMIRKDQFWQQH

SEQ ID NO: 241275 - protein, 516 aa, unidentified
MIPKVIQRRGRGCVKKPSPELVNNFAAAHNLGGEQVATPEPRLGCPHPARVRQRSPTPVAAPGPSAERTLPQEGSYIRSHPFRVPEPLGIAANMKTDWTEQTYFAALDWAKAHHDVVVVDRFGGIAAGFQFPHTAEGWKEFDQQMQPFGKCPMAIETSSGPAVDQLLQRDYPVYPINPKAAQRYRERKYPSGTKTDRHDAWSMADALRTDGHGWVQLIAQDEATTTLRLICRDENVLIEQRTALVNQLQAALAEYYPLALESFDDWTRPFAWAFLRSFPTPQALTKAGKRRREKFLHLQKLWRPGTASIRLEAWQKGQQLNASAAVAGAKALLALSLVNVLQSLQKQLDEYRQRIRAAFEQHPDHDIFGSLPGAKDKLAPRLLGEMGSQRQAFPDAQSLSCRAGTSPVSFQSGQLRKARIRWACNDFLRHTVHLWADLSRRTCLWAQIYYAAKRENGHSHASALRCLGKRWLKVLWRMWQDRTSYDESIHLKSLQEHGSFVAKLLTPPPSQSGSSL

SEQ ID NO: 241276 - protein, 416 aa, unidentified
MKAVVERCAGIDVAKKTLNVCVLTGAADLEPEAELGLFGTFNADLDRLRNWLLEKGCQEVVMESTGSYWKPVYAALEGSGIEVKLANGEDVKARRGHKTDWDDCQFLANLLRHGMIRASFIPPQAIRDLRDLTRRRRQLCGAAVSERNRVQKVLEEANVKLGSVLSDVFGVSGQLMLEKLLDGEPDVGAIAELAQRKARQKIPEIRQALEGHRLRDHHRRMLRLSLEHIAFLEGQIGVIDEEVGKLIEREGYQGSFDLVRSVPGVQEITAAALLAETGVDMNVFPSEGQLSSWIGVAPGNRISAGKNKSGATTRGNRWARTTLVECAWAAAAQKNSVLQERFRRLSVKGRKVALIAVAHQLAIILHRTLSSKLPYQESAQPLPDERKRQRLIRHYVRRLGKLDVTVHSLRPDSESH

SEQ ID NO: 241277 - protein, 489 aa, unidentified
MKRTKKTSTTNTRSSSRKRSKAWRIVHRNAAGIDVGASSHYVAVSPDAVPDGKPAVRSFESFTVDLDALVEWLKACGVETVAMEATGVYWKVLFQKIEAAGIEVLLVNARHVKHVPGRKTDVKDCQWLQQLHSYGLWEGSFVPPDEICRLRTLVRHRATLVSDAAQAVLHMQKALTEMNIQLHHVVNDLCGETGMRILRAILKGERDPEELVKLRDSQITRSTPEQMKQALKGTGRQELLFVLQQSLKAFDFYHQQMDECDRQLEEVLKALPAAPALPKPSPGQANDPLAAQNPKPKGYQSRKRNEPERDLGPELARICGIDLTKAHGLRVLSVLVIVSEIGTDMRRWRNAKAFSSWLGLCPNNKISGGRVLSSRTRQVVNRAATALRMAASGVAQTETWLGSFYRRMRARVGPAAANTATAHKIATVVYHLMKHQRPFVDRDLALYEKRVYPTKLARLRKQAATLGYKLVEIPEDQDVKSPDQRTLSE

SEQ ID NO: 241278 - protein, 342 aa, unidentified
MVHVGLDLSRTRLDVHVMDEAGAALAVTTAVPDNGGLAVLAERIGGLGDGPVYAAIESMNGARFVHDQLELAGWQVEIADAQKVKGLAPLACKTDKIDAWVLAELSRRDLVPAIWLPTPTVRAERERARWRLHLVRHRTALKNRIHATLLAFGHPCPVSDLFGVGGRELLHRLELPEPWAADTTAALQLIDQLDTEITAGERALRRLGADHRYVPLLMTTPGVGWVLGYTIAAEIGDITRFATPTKLAGYTGLCPRVYQSGGKDHRGPLSKNGPKYLRWALIEAATHACRHPIYAERYRRTKTRLGRQRGPKIAQVDLARRLSEAIWHMLSTNRPFAPAGAA

SEQ ID NO: 241279 - protein, 348 aa, unidentified
MTHFVGLDVSVKETSVCVVDDAGKVLCERKVQTEPDDIAVLLTSIGGDYVRVGIEAGPLSQWLVNGLAQAGLPVVCVETRHMKALLQAQQVNKSDRNDARGIAQMMRVGLFKPVHVKTLAAQEQRMLLTSRKLVQRKLIDIESDMRGTLRNFGLKVGVVSAIGYEARIRHLVEGFPRLAAIVEPLLTVRRVMRQQLGALHKMLLDTVRRDPVCRRLMTAPGVGPVVALTYRASIDQPQRFLHSRAVGAHVGLTPRRHQSAELDYDGGVSKSGDTMLRTMLYEAAQVLMTQSRHWSWLKAWGMRVAQRRGMRRAIVAVARRLAVVLHRMWTDGADFRWGSEPATPAAVA

SEQ ID NO: 241280 - protein, 344 aa, unidentified
MSGYAGRQFVGIDLHRRRSVIVRMTEAGEPLEAVRILNDVESLDRVIAPAGVAPEVVLEATYGWYWAVDALQAAGANVHLAHPLGVKAFEYRRVKNDVRDAADLADLLRMGRLPEAWIAPPATRELRELVRHRAKLVALRSGCKAEVHAVLAKCGIQVLMSDLFGLEGTRLLDRLDLPAPYAARIGSLRRIMDGLDFEIEVFENLTRGRLRTDPGYAAVQQIPGIGPILGAVFVAEIGDVGRFDTAAQLACWAGLTPKHHESDTHVRRGRITKQGSRLVRWAAVESIKRIGAHTRVGALRERVAARRGGNIAAVAAARQQVEYVFYALRDGHVRALQHHSQEAA

SEQ ID NO: 241281 - protein, 420 aa, unidentified
MKLSNIEFTAFVGLDWADAKHDICVQAAACEVREFDRFPHKVAAIDEWAHSMHQRFGGQIAVALELTKGPIVYALQKYDFFVLFPINPSMLAKYRQAFKPSRAKDDPTDAELALDLLVRHRERFQPLKPQSVPMRKLCMLVEQRRRLVGDKTRYTNRLGNALKQYYPQALQWFEQRDTVVFFDFLTRWPTLTQAKRARKATLTTFFKVHNVRVERVIEARLCAIKSASPLTHDKAVITAYQLQVEVLVEQLRVTLKAIARFDVEIETTATKLPDYALLFKPLPGAGLALAPRLLAGFGEDRQRYTGAAQIQQYTGIAPVTERSGNKTWVHWRWQCPTFLRQSIIEWAGQTINKSFWAGAYYRQQRDKGASHQTAVRALAFKWLRILYRCWQSRTPYDESKYLDALRRRGSPLLKHLGETM

SEQ ID NO: 241282 - protein, 343 aa, unidentified
MAIIGGLDLHRRQLTYDYLDVVTGQVDRGRVVPADRGHLRSFLARFDGQGEVAFAVEGCTGWRYVVEELERVGIGAHLAEPAETAAKRGRKRRAKTDRSDARHLRELLVKGDLPCSWIPPAQVLEARARVRLYKDLEEERTAWLQRVQATLYHQGVPVIAALTSVAGQARLAAAELSPAGRQAVEVGLRQLDRLTGELDPLRAELARFSRRQPGCRALRTTHFGIGPITSVAIWAEMGDTRRFSSSDDAVRHSGLDITVYASDTKRARGHLARQGPATLRWALYEAAVCATRPNSPDHASFLAVKRRADGHLGVISVARKLARRVHHTLRALGDQAWEPVAAV

SEQ ID NO: 241283 - protein, 371 aa, unidentified
MKQFSKYVGLDVHKETIAVAVAESGGGEVRYFGEIANTPEAVQKVVSQLRKGGAQLSFCYEAGPCGYVIHRQLSDLGWDCQVVAPSLIPKKAGDRVKTDRRDALSLARLHRAGELTAVWVPDGAQEALRDLTRAREDLKHLQRQAKQRLLAFLLRHGKRYDGKSKWTQAHDRWLEGVKFEQATQQIVFQEYVDTVAVLSKRLDALDGHLQSAASACIFWPVIESLMALRGVNLLTATTIVAEIGDLKRFANAPQLMAYLGVVPSEHSSGSKKTRGGITKTGNGHVRRVLVEAAWTYRHPARKTAVLQRRAERAPEVVQEIAWKAQKRLCARYRTLEARGKLKVQACTAIARELAGFIWAIGQVMPQPAAKA

SEQ ID NO: 241284 - protein, 489 aa, unidentified
MSKASQQQQGKKDATLKAQAPKRQARGSHRPQGEGNQRRSQLRITNPDAAGIDIGSQVHYVAVPEERAERTVRSFGAYTTQLEELAHWLKECAVKTVAMESTGIYWIPLYQKLEEAGFEVLLVDARQAKEVPGRKSDVQDCQWLQQLHTYGLLRAAFRPEDSVCRLRTLQRHRKNLVECGGMFVQHMQKALNEMNLHLHHVLSDISGYSGLAIVDAILAGERDPRKLASLADYRVKKSQAQIEAALTGDYRPELLFVLNQSLQDYRQIQQQLAQCDLRIEKQLRQIADCTNPSQDCGPRQQGPESATGKRAKIKPKDALEVSLAGHLKRILGVDLTTIPGLNVLAILTLISEIGTNMAKWRNEKAFVSWLGLSPNNKISGQRVLSSRTRKVVNRAATTLRLAAMVLGHTNTPLGSFYRRKRAQLGAPKAITATARKLGCLIYRLIKNGQAYQAPDLHVYELKYKDQILNSLRKRANSFGFDLVEVPKAA

SEQ ID NO: 241285 - protein, 353 aa, unidentified
MKPKIDPNAAPLTSIGIDIGKEIFHVVGLGTDGTIAFRRKIKRLALKEAFEKLPPCIVGMEACLSAHFVSRMLKALGHEPRIIPAIYVKPFLKGQKNDYNDAEAICEAALRPNLRTVQEKSQDQLDLQACHRVRSRLVSRRTAAINQIRAFLIEQGIAVRAGTSALRKSLFEILKNRKDEVSPRMANLIVGLYEDWLWLDKRIETITSEIKQLSQSEPNCRRLMSVPGIGPLISTGLVAAIGTGEAFERGRDFGAWLGLVPRQYSTGGRSILGRISKRGSKYLRTLFIQAAKVLLIRPQNWPRYSFGAWLKTAAERLHRNKLAVALANKLARIAWSVLRHHRAFDTHIEAGAI

SEQ ID NO: 241286 - protein, 306 aa, unidentified
MNEVITIGLDLAKNVFQVHGVDAEGNVVIRKQLRRRQVMAFFKKLPPCLIGIEACATCHHWARQLMALGHEVKLMPPHYVKPYVKRNKNDAADAAAICEAVTRPSMRFVAVKDIEQQSILMVHRTRELLVRQRTMVINAMRAHMAELGIVAPAGVPQVKKLLDIIADRDDDRLGSVARTCLESLVRQFVSLHEEINAAERRIHAWHRSNETSRRLETIPGIGVITASALAASVSDPSVFRSGRELAAWIGLVPRQNSTGGKQRLGRISKQGDQYLRWLLVAGAMSVIRHAKRRGTSHLPWLSRYIN

SEQ ID NO: 241287 - protein, 329 aa, unidentified
MSKANFVCVGMDVAAKTLAVACHANDAWREEEFPNTPEGHKTLWRFLRKQARRVRICMEATGIYHLEAAITLAEQKGCEVMVVNPRVSKDFARAMNARAKTDRVDARMLAMFCERMPFVRWQPPAKEVLELRAIGRRMDDLARQAAAEKNRLHATTIRSIARDIQVNIRHLERRIQYLGEQARRLIERHDTLLRGFTLLTSVKGVAETSAIRILGEVMLMPEGMSGKQWVAHAGLDPRSFESGASVRKKARISKTGNAHLRRALFLPAMSAARFDPGARNLRNILIKRGLKPIQAIIAIMRRLLLAIRAMLRDGQPFQSDRFLQASTHA

SEQ ID NO: 241288 - protein, 368 aa, unidentified
MFGSTAPERNTPFMTSTKYIGMDVHKESISIAVMNVAGKIVMECVIETKASMILQFFDGLRGDLQVTFEEGTSAAWLYDLLKPHVTKLVVCDPRKNASMREGNQSDKIDARRLAELLRLNHLSPVYHGEHGLRSLKELVRSYLTITKDLGRVMTRVKAIYRSWAIPCTGKQVYAPRHRAEWLGKIGEPGVRRRAEFYYQQLDALRTVRQQVRRELLAEGKKHSAWKRLCQIPSIGPIRSAVLLGILQTPHRFRTNRQLWSYSGFGIETHSSADHRRVNGQLQRAKKQSGIRGLNRNCNHDLKNLFKGAAIVASSKPGPFQEFYSALLTTGLRPEMARLTLARKIATIVLIVWKRGVCFDAQHLKPQTV

SEQ ID NO: 241289 - protein, 352 aa, unidentified
MKRYKESDDKRKRIFVGIDLHRLQWFVTVRTEDVELFSGSIPGNWQSLRTLLERYGDCEMQVVYEAGYFGFWLHDHLVEYGAQCIVTPPSLVPQQYGNHVKTDRRDSRKLALLLAKGLLKRVWVPSLEERYQRQVLRRRRQLIGDRVRIQNRIKAELRFYGVDVPAPTGQWTNVYVENLHRHRFDNRWIGESFERLLEEYQFLSSQVLRQTKILRELAESADYRERVKILRSVPGIGLIAAMEILLELQDVGRFPRADQLAAYVGLTPSQYSSADKVRMGRITCIGKSSLRATMVEVAWRLIAKDPAMRQKYERIKARAGSKRAIIAIARMTLLRTRRMLLDNTTYAVGLAA

SEQ ID NO: 241290 - protein, 376 aa, unidentified
MNRIIYVGMDVHKDTYSLCSFDSKQSYVFSELTVKAETSSVLSYLKNVEKHFVNDDVLFVCGYEAGPTGFSLCRDLQKKDISCVVMAPSSLATSPDAKKRKTDKIDARQLALHLAHNSYKAVHVITPEMEAIKELTRTRASALKAQKRAKQNLLSFLLRKGMVYPFGGRARYWTQQFFSWLKTLEFSNPVERYSFEEYLSEVNHQISRIKRLDDKIAELAEDPLIKDDVKKLCCFSGISTLTAVSFISEIGDFNRFQKAVYFSNYLGLCPGIHKSGLSSQSLGITKTGNKNLRRLLIESAQSMSHSQICGKKSLRLLARQKNMDPLIVAYADKAVERIKRKRSSMIFRGVHINKATTAAAREMACFIWGMMTNNIT

SEQ ID NO: 241291 - protein, 337 aa, unidentified
MDVHKKTISYCIKAASGQVHGEGKIAATRAELDRWIKILPQPRTRGMEATIFSGWIYDHLRPHAEQVKVAHPLMLRAIAAAKKKNDRIDAGKIADCLRCDFLPECHMAPTEIRDRRRTLRYRHLLVRQMVQMKNRISGLLMETGVSHNKQRLHKVGYFRELLATSEEVNDSIRPLLRLSRETIVRLQKTEYALVSSLQRDPVLAGRIKRLRTVPGVGPITALTWALEMGDVSRFRSIRQAISYCGLCGDEKSSADKVMRTPLSQQRNKHIQRGLVEAAKLAPRQDHELARVYETEKQKGNPNRATLAVARKMVAYLLAVDREAREFVPAEEYRSAAA

SEQ ID NO: 241292 - protein, 364 aa, unidentified
MKAEKKTATRYVGIDLGKRTYEVTIVGKRGVTKSNGKTCVAGRQALYKKLRCEDKVALEAGNLAFIMAKELQVAVGCRVYVLNPSHLPLIYASMKKTDKEDSLKLAHILQDFQEDRLPEVPVPSEKEMGRRKLLASYRRAQQSRTRDINRLHGLFLAQGIPTMTKEDLASGDSRREAVRTLTGIECEEANYLVACLDLHERQIQVLNREIKKETAGDEVIQRLQSVPGVGPMVAFAFVSHVAAERFENASQVSNYLGLVPRVYMSGDTVRYGRITKRGNGYLRALLVQGAWALTRTRNGGKLKERFEYMTVEKSISRKKAIVAIARRIGELLYTLMRDGTRYEHRPFYHDREIVEKLVQASMSA

SEQ ID NO: 241293 - protein, 312 aa, unidentified
MDLMSLPSCVIGIDISKSFLDCFLHPAGMVRRFGNDSQGHQALIGFVAEHQAFGVLEATGPYDRALCRQLHQAGLAFHRANPRKARQFARAAGFLAKTDRVDARMLALYGATMSLAPEAKPDAARQVLRTLVERRAQLVAMRKSERIRLAQPHCGDIDESLRQMMEVLDRQIAAINVRIDILVTQVEALAEDQAILRSAPGVGPQTASVLLAYMPELGRRDRHSVAALAGLAPIACDSGAMRGKRCIWGGRKRVRDALYMAALAACRSGPFKRIFQAMRNAGKPPKLVLIAIARRLLVALNAAMRDRKPFQA

SEQ ID NO: 241294 - protein, 452 aa, unidentified
MKKETVKKSVVKMATGLPVFNPHAAGIDIGDTLHCVAINDGNGGHEVKTTSAFTCDLHEIVEYCISHEVTTAAMESTGVYWLALYILLEEAGIDVYLVNARHVKNVTGRKKDDTDAIWIQKLHTCGLLQKSFQPDNEIRQLRNYTRQRKNLILLASDAVRRMQKALELMNIKIHTVISDILGKTGMKMVKAIIAGETDPQILAKLCDPRIKAPQEEIIKSLQGIWKEEYLFMLEQAVENYEFHQKQIKSCEEKIKQQLLKQVAIIKEGDITCLEETKKKSKAKPKKNQFDFSLSLYLIAIAGVDLCKIPGISEVTALEFLAEVGIDMSKWKSAKHFAAWLNLTPNTKISGGKIISSKMMKKKNKAGQYLRQAASSLSTNKTPLGDYYRRMRARLGGRGAALATAHKLSRIIYTMLLKQTEYNAVMILDNQEKFREEKIKKLEKQLTRLKQAA

SEQ ID NO: 241295 - protein, 379 aa, unidentified
MLTAPTPSFDLSSALVVAVEISRPTWVIAAHVPGLGHVKVRRRIEARAEALLLAIEQLKRRAATGIDHVIVTYEAGYTGFWLARLVRRHAIEVYVIQPVSVPVDRRRRRAKTDAIDADLLLRTCLAFLRGEPRVCSMVPIPDQKDEDARHLVREREDLIAERIGLTNRIGAILATLGVEEFDPLRRDRRVRVAEVRTALGEPIPENAKARILRLIERLELVLDQIRTVESQRDALAVAASAGAPETMTKRLTGLRGVGVQTATVLVREGFVRHFRSAKALGSYAGLVGTPFASGGSSHEQGITKSGNRRLRTAVVELAWLWLRYQPGSALARWFAERLGQTGGRMRKVLIVALARKLLVALWRLATQGLVPEGSALKPV

SEQ ID NO: 241296 - protein, 341 aa, unidentified
METTRHIGVDLHRNKFTCCMQLANGRNYLSEWKLENLPVFVKKLRLTDAVAVEVTGNTRLFYDAVAPHVARVVAVDPNQFRVISHSVKKTDPNDARSLALYLSKGLLPEVRMKEKTQAQIASLTQTRDTLVKLRTALKNKVNNILSAHGINLDKEALSSEKKLTEVLAMKFDPMIRIELKVIVEQIRSLNQSIAELEKIITEEGQKLKGHKNLTSIKGIGPLTGSILLSVIGDIHDFADEGKLAAYFGIVPRVNNSNETERSGRITKRGSKLGRTALVQCALIAQRYSPYLKKFYEKTKARRGTGKAIIALARKLLGIVYRTLKNNWVFKDFPNFVLAEES

SEQ ID NO: 241297 - protein, 367 aa, unidentified
MRKHNTVRESAVPKKRANRKLTVGIDLGDRSSRYCILDEQGEVLAEGSVATTKKGFAQILGSKPRSRVVLEVGTHSPWVSRYLADLGHEVIVANPRRVRLITDSTRKDDRLDAKTLARLARIDPELLSPIRHRSERAQADLMVIRARALLVEARTMLVNAARGLTKSYGERLGNCGTGQVGEELAQSLSEPLQNALQPLLAEVESVSQHIREYDEQIENLGKNRYPEIALLRQVHGVGTLTALTYVLTVEDPHRFRRSRDAGAYFGLRPRRRESGNSRPQLRITKEGDAYVRKLLVQCAHHILGPFGPDSDLRRWGLELAARGGKNAKKRALVAVARKLAVLLHKLWVSGEVYEPLHVHRDGKAAAA

SEQ ID NO: 241298 - protein, 376 aa, unidentified
MTQTDVQYPTIHLAIELSRSAWLVAARLPGVEKPSLHRIEGGDTAALLALVETLRARAAARLGATVEVACCFEAGRDGFWLHRLLTAEGIAAYVLEPTSILVSRRARRAKTDRLDALGMLRVLAAYLGGDRQACSMVRVPTPEEEDAKRPHREREELVRERVRLENRIAALLATQGVRERPSLRSWERDLAALRTGDGRPLPPHLRAELDRLRRRLVLTLGLIREVEAERDAALAAGPRDAAGRKIAALCRLRGVGANFAAVLTREVFYRAFDNRRQLAGYVGLAPVPHQSGEADRDRRISRAGNARARTTLIQLAWLWLRYQPDSAPARWFRDRVGALRGRTRRIAIVAMARKLLVALWRYVETGLVPEGVEVAA

SEQ ID NO: 241299 - protein, 404 aa, unidentified
MYNAVGIDVSKGKSTVAVLQPGGTVIRKPFDVSHTSQSLIELAHYLGSLEGSTKIVMECTGRYHEPMLKALYEAGLFVSVVNPHLIKNFGNNSLRKVKSDPADARRIARYTLDNWAELRQYSGMDNTRTQLKTLNSQFSFFMKQKVAAKANLIALLDNTYPGVNKLFDSPPREDGSEKWVDYAYSFWHVDCVRRIGLKTFTERYKAFCKKHHYIFQQDKPEKLFNASKELVAVFPKEKTYKLLIQQSIRQLNLASEHVERLRQEMNALASTLPEYSTVMGIYGVGKTYGPQLIAEIGDVSRFTHREALTAFAGVDPGVDESGQHKSKSNRASKVGSARLRKTLFQIMTTLLQNAPEDDPVYRFLDKKRAQGKPYYVYMTAGANKFLRIYYGKVKECLRNLEQAE

SEQ ID NO: 241300 - protein, 344 aa, unidentified
MNSMNYVGLDVHKKSISYCVRQADGTILREGSIVATRQALDAWMGELPQPWMAGMEATMFTGWIYDHLVSRGVTVKVAHSAMLKAIAAGKKKNDRLDARKIADLLRCDYFPECHMAPREIRDRRRVLRYRNLLVRQAVRMKNKVSGLLMEAGVPYNQQKVHGKKYFAELMKEQSKQMPPSLPQLLQLSRSTIETLTGMERQLMTALERDALLASRVERLETIPGVGRVLALTWALEIGEISRFSSVKKAVSYCGLCGGEKSSGGKMERTPISKQRNKHLQTMLIEAANLAPRWNAELAVVYEREKQKGNRNRATLAVARKLVAYLMAVDRKEKAFGPPRAEVAA

SEQ ID NO: 241301 - protein, 315 aa, unidentified
MLYNSQKKHSDETNYRKFSNNEEGYKDLLSWCRSKHISCSQLVVGMENTGVYGFDLRLFLEGKKIDYCAFMPLDLKHSMGLIRGKNDKVDAERIAYYTYLHREELSYSKLSGSSILRLQELSVERKRFVKQRAEYEGLITEYQEKKTTATYTRAKQMKEVLDEEIAAVESEMKEVVAHDPALLHNYQLLLSIKGIGEVNAISTLIHTNNFKAFETARQYACYLGIAPFDHTSGTSIKGRPQVSHVGAKLLKADLSQAAKSAVVWDKELKSYYERKRKEGKEYGVVLNAVKFKLVCRMFAVVRRGTPFVDLMTYKN

SEQ ID NO: 241302 - protein, 364 aa, unidentified
MTAAQAGRQAASSTVEVVGGVDTHKDTHTAAAVDTAGRVLGSAQFPTDAAGYRALLRWLRGFGTLLLVGVEGTGVYGAGLARLLAAQGVAMVEVDRPDRKARRWQGKSDPVDAEAAARAALARVRTGVPKQRDGRVEALRALRVARRSAVGQRADVQRQIKALIVTAPESLRAQLRKLPDRELIEVCADLRPDRADADDPGTATKIALRSLARRHRRLSVEVADLDELLGPLVAQINPGLLALKGVGAEVAGQLLVTAGENADRLTNEAAFAMLCGAAPLPASSGKTTRHRLNRGGDRAANCALWRIVITRMGTDQRTKKYVARRTTEGLAKPEIIRCLKRYVAREVFLALQSASTEKRPANAA

SEQ ID NO: 241303 - protein, 461 aa, unidentified
MSRNKPTGKQKGSVQKKVDWKALEIVHPDAAGIDVGGSEHWVAVSPDRDPEPVRRFGCFTADLREMGQWLVQKGVRSVAMQSTGVYWMPVFEVLEQHGLAVYLVNARHTKNVPGRKSDVQECQWLLKLHAFGLLNNSFQPTDEIRIARTLWRQRGNLVAEAGSVIQRMQKVLTEMNVQLSNVLSDLSGVSGMKIIGAILEGERDPWKLASLVQSGVKATLEDIAKSLEGNWREELLFVLRQQVELYRIYQEKINDCDLPLRKHLESFGSKRDLKAQPIGPKPKGKKGSRNAPQFDLRTELYRITGIDWAQINGVDVLTAQTVIAEAGADLSAFRSEKQFASWLGLCPTNEQSGGKILNRRTRKVVNRATVAFRNAASTLIRSQSYLGAQYRRLRTRLGAPKAITAMARKLACLFYRLIKHGHPYVDKGTEYYEARYREQQIRSLSKRAQKLGLQLVIPTTA

SEQ ID NO: 241304 - protein, 340 aa, unidentified
MTITTIGLDLAKSVFQAHGIDESGATVLVKKLHRKQMLPFFSKLPPCLIAMEACGTAHYWGRTLAAMGHEVRLIPPAYVKAYVKRGKSDALDAEAICEAVQRPAMRFVPVKTIEQQGILMTHRARSLLVRQRTMLANALRAHLAELGHVANPGIANLAKLAEQVLADKNALPAYARTALEIMIRQIMAVSAEIAALDQQLIAWHTESEASRRLAAIPGLGIVTATAIAATVTDPDQFCSGRQFAAWLGLTPQQHSTGGKTRLGGISKQGDRYLRRLLVVGATAVMRHVKDKPTPMADWIRKLSEKKPFRLVSVALANKLARIAWVVLTRKEAYHPYAHLT

SEQ ID NO: 241305 - protein, 404 aa, unidentified
MEGPVITVDVSKGNCHYQPFIENGHPMRKPKVLDDTIDGFSRISRLMEDLEKKTGATELPVVFEATGVYHRPLQKYLQDKKIPYYIISPMLSAAYRKTTLNGNKTDSLDCTHIAKAYYSEELRPYYEQSPEYLRLMRLNRYYEGELVHLRKRKVALRSCLDIIYPRIDKKFSGNQNIYDPLPMEVLKQYPHPSLFLKHREDVIVKRISGPSGHKQGYAEKIVHKIYETAKECYSGCDPDGIEVIKLPEMIRKMQEQEQLCKHILSDITALAKEAPYYACVASIPGIGDNLASRIIAELGDINRFHNRSALVAYAGLNPKILQSGDIDGTHLKISKKGNKHLRCLLYIAASCNYRLKKYDSFYEFNKKKRQQFGSHKSKAATVATAHKLLVVIYAMCKNGSLYSF

SEQ ID NO: 241306 - protein, 359 aa, unidentified
MSEVTRGFIARVGVDLAKRVIQVHAVDATGQVVVAKALPRDGFMPWCAQLPPGTLIAMEACSGAHHWTCKLRALGLDARMMAAHFVTPYRMQGKGGKNDANDAAAVCEAASRPSMRFVPLKTPAQQAMLAIHRLREGYKEERTACINRIRGLLTEFGLVFAQRPEVLRRDLSDVLEDATNELPALLRMALRQAHLHWLELECHMAWCDERIEAHVRTDEQAKAAAQLCGVGPVTASALVAMVGDFKQFRSGNQFGAWLGLVPRQNSSGGKATLGQITKRGDDYLRTLLIQGAKAAMVHAKKRSDRISLWLVSLIDRIGRQKAVVAMANKNARILWAVLTKGTAYDPNHVSINPGLPTTV

SEQ ID NO: 241307 - protein, 359 aa, unidentified
MRIIGCDLHSRQQTLAMLDTATGEIEKTTLKHEENIVREFYSKLPRPVRVGIEATGSMQWFLNLMEELGIECLVGHPAEIRAAEPRKQKHDRRDADLLLSLLVEERFPSIWLPTKELLDIRALLRHRHQWVGLRVKIQNALQAIALANGLRRGPSLWTQAGQRAIAALPLSPHAAYRRNELQAMYVKFETEIEKLNQRVEEQACGRAGARLLMTHPGVGPITALATDVFLGDPARFADSKALASYVGIIPRENSSGGRQRLGGLTKQGNPLLRFLWSEAVIHAVRRDPELKHFYRRKLIQKGLGKARAAVARKLGIRMWIMLRDRIEYKEFCRRGQMQQTSGDARAGMPEQRYGAKVTG

SEQ ID NO: 241308 - protein, 402 aa, unidentified
MRFFVGIDWATQAHAVCILDQTGRVQWQGSVPHAADGLAALLARLRRVRRRGPLRVALERPSGLLVDTLVEAGFEVVPIHPNALKASRPRYSAAGGKSDPGDAFILADLLRTDGHRFPALRPPSDDTRALRALVRGRDALVAQRVALANQLRALLERFWPGAAGIFADVDSPIALAFLTRYPTPHAAARLGAKRLAQFLGQHSYCGRRPVPELLARLRSVPVSQVGEADAEASGDVVRALVAVLSPLVTHIQQLSAGIEAALSQHPDGPLLQSLPRSGAVNAAQILAELGDDRARFPTDEQFAAEAGLAPVTHASGQHHAVVFRWACNKRLRRALTTFADNSRHASRWAALVYQRARARGCRHQHAIRILARAWARILWRCWQDRAPYDVSRHRAAQALLAA

SEQ ID NO: 241309 - protein, 370 aa, unidentified
MLNTTTFVGLDVHARSIKAVALDAMTGEVRSATFAYDAAAVAEWVGSLDPSAKCVYESGVTGFDLQKKLTALGVNCVVGAVSKMIKPSADRKRKNDRNDAEFLARMLSVGNVVEVCVPDDECEAARDLVRALDDAREDLKRCKQRLSKFLMRHGYVFNEATPTGRRKGNWTAAHWAWIRSIEFPERADNDVLAYYVDAVRQAMEDKKRLERLVEAEASKPRWKKRVDSLRCLKGVDAMTAADIVFEAGEFSRFKNARSFAAWLGLTPSEHSSGESARQGGITKAGNKHLRRVLVEAAWHYISASPHPKDLAKGQVPDPAARRHAAKGIRRLVKRREEMLGRGVHKNKANVATARELACWCWAVGRMVENG

SEQ ID NO: 241310 - protein, 321 aa, unidentified
MDNFSHVGIDVSKATLEIALTPDAKTFQVSNDQVGLAALLEKLPPPDQCAVVLEATGGYECVAVAELLQAGYRVARANPREVRYFATGMGLKAKTDPLDAGVLAKFGSVRPLRYLTIPKGPLGELQQLVQRRRQLIEMRTQETNRLEHTLSKPMKKSIAAVLKTLEIQIQTIDDQIARMITDHDDWKQKAELLQSVPGVGVQTAATLIAELPELGQLNRQEIAALVGVAPFNRDSGPRERARGIYGGRSSVRTMLYMAAMSAKRANHVVQRFAKRLANGGEGRPAKPTKVVTVACIRKLVVILNTMVKTNTKWNPSLAPTG

SEQ ID NO: 241311 - protein, 375 aa, unidentified
MKDYTKFVGLDVSKDSISVAVADTGRGEPRFLGNITHTPEAIRKLLKKIGNPEQLHVCYEAGPTGYGLFRFLISMGIDCVVVAPTLIPRRAGDRIKTDRRDALRLAQLLRAGELTPVWTPDEDHEALRDLVRARHDAKEDLQRARLRLVQFLLRHDLRSEKGTRNWSVRHREWLDSLRFEKSSLRIVFQEYLHAIDEVTDRMKRIEAEIHQQAMSSVHAPVIQALQTMRGVAEVTATTLVAEIGQFSRFTSPRQLMSYAGLVPKEYSSGATRWQGSITKVGNSHIRHVIVESAWAYRHAPSLKGQLRARQEGQDPEAKRIAWKAQHRLHQKYHLITSRGKAGKQAAVAVARELIGFIWAIGCEIEKMQSETNLVA

SEQ ID NO: 241312 - protein, 315 aa, unidentified
MTFLKTIPSCVIGIDVSKDTLALCEHGKQTVQVIANASRSIRQLLAQLRPDTLVVLEPTGGYEALLVSELCAAQIACHRADTLKVKAFARSFVRLGKTDGIDAKALAAYGADRWRGLPLYELSDKHQSDLAALVARRQDLMDIQVAEKNRVQAPGCASVKHSCKIVLACIRRQLERLDQLIESLIQNNTDLSERMVVYQSLPGVGPRTAIALLATMPELGSLTRRQAASLAGLAPHPNDSGTLRGYRKMRGGRPEVRKNLFMAALCASRLSGLLRDFYQRLTANGKKPIVAISALMRKIIVILNARMRDKITAMS

SEQ ID NO: 241313 - protein, 368 aa, unidentified
MSKIRKYVGLDVHKDSISIAVAEEGREAPRFLKRIPNDTTRLMRVLRSLGDAGEIHCAYEAGPTGYGLQRALSSKGVKCDVIAPSEIPRKNGKRVKTDRLDAIGIAHHLRSGNLTPICIPDEEVEAMRDLTRGREDAKLAEKGAKHRLSKFLLRQGRRYPGKTYWTNMHLDWVRKQSFGHEAQDLVLREYLTSLERARSQVARMTDAIERFAKETKLAPLIAAFRAFRGIDTVTATALAFELIDLKRFLTAPKLMGYLGIVPSEHSSGETCSKGGITKSGNTRVRCLLIEAAHNNLFPPKVTQRLRKRQEGVSPEVIEIAWRAQERLYHRFQTLSRRGKNKKCIVTAMARELVGFIWSVGQQEHLLAN

SEQ ID NO: 241314 - protein, 408 aa, unidentified
MNTLYVGIDVSSKSNVVYLMLPNGDKHSNFSVANSHEGSTLLVKKIYSALTSHSLDTVLIGLEATSVYGDNLVYFLREDATLAPFNRKIHVLNPKQVKKFHDTYNDLPKNDYVDSFVIADCLRFGRINKEVYMGDYRYKALQNLTRARFFAVQNLVKEKQRFMNVLFKKYSTMTQEKVFSDAFSTTALAVYDEFESAEALANMDLHELTDFIIEKGKNRFPDPDAVAKAIQKAARSSYRLPKTVNDSVNQVLSISITSMKALESQIKEFDKAIKALMELLPNVLISIPGIGPVYSAGIMAEIGDINRFDNQASLAKYAGLAWKQHQSGGFEAEVTRLIPSGNRFLKYYLCEAAFSLVRCDKEYSDFYHLKYKEVNRCQHKRALALTARKFVRLVFRLLKDNRLYYPAK

SEQ ID NO: 241315 - protein, 339 aa, unidentified
MRREDFECIGVDVSKDTLDVALFRGKVDWNEGHVKVSNNESGYKELKKWLRSKQVEKQRMCVCMEYTGLYAHDFRIWLEKESVTYYMVDPKRMHNFAPPLSIKGIRQTKTDKADAFRIAIYCSLFHDSMEPSRLPSPAFFKLKRLLAERKQYQKQVVLYKQQLHDISVYDTVSSRMRKQEELTNLGRCVRQTEKEIGEIIESDAAIKKNYDLLLSVVGIGLVVAVTTIVLTENFTVFANPRKYASYIAIAPFPHESGTSVRGATRVSKQGFRQAKADLSVCVLTAIRFDPDIKEYWQRKKAEGKHTGVVFNAIKFKLVLRMFAVVKRGKPYVNTKGYKG

SEQ ID NO: 241316 - protein, 403 aa, unidentified
MSEVFAGLDWASRLHAVCVIDERGVVRLQCEATHDAAGLVDLSRRLHAAGAERIAIERPAGLIVDALVEAGFAVVPIHPNIVKATRPRYRSHGGKSDASDAYLLADLLRTDGHRFKSLTEQCDDIRALRALVRGRDELVDARIQLANQLRDLLESFWPGAASVFADVDSPIALDFIQRYPTPGSARSLGPKRMAAFCAQHAYSGRRSPDELLERLHAAAQIALGDMETRVKGELALALARILARLVEQIRLITSRIEHEVAALDDGRILMSFPRAGRVCAAQILAELGSVRERFDSEEHLAAEAGVTPVTYASGKSKSVAFRWACNHRLRRAITCLADNSRHASAWAAATYANARARGCRHPHAIRILARAWLRVIWRAWLDRKPYDPASHGGLQAMLKTAEG

SEQ ID NO: 241317 - protein, 366 aa, unidentified
MFSERTSVGLDVHARSIVGCGLDTVTGAVTRRRLTPTVEGVSAWLAELPAPVAVAYEAGPTGFGLARQLTAAGVRCVVAAPSKLQRPPGDRVKTDSRDARHLANLLRMDQIVEVRVPTVEQEAARDLVRAREDVRGDLMRSRHRVSKLLLRQGIVYYGGRPWTGPHEVWLRGQRFTAPGLQLAYDTAVETVLLTVARRDRLDRAITEMAFSSEFTPVVRRLCCLRGVSTLTGFGLAVEIGDWHRFTGGSIGAYLGLVPTESSSGAKRSQGSITKTGNTHARRLLVEAAWHHRKAYRPGLTLRARWDQAPAAARARGHEGNHRLHHRWEIFTARKKRPVIANVAIARELAGWCWSLAVLDDCSCPAP

SEQ ID NO: 241318 - protein, 347 aa, unidentified
MKEVSTIGLDLAKNVFQVHGVDGVGGVVIRRALRRSQVLVWFAKLPRCLVGMEACATAHYWARELEKLGHEVRLIAPAYAKAYVRRNKNDPADAAAICEAVGRPSMRFVAIKSTAQQAAAGIHRVRDLLMKQHTMLRNQLRGLMAEFGLVAAKGQRGLSELIAILVDPEDRRLPSPLREGLVAIVETLRGIDRKLEAIDRQLVQAGRENATYRHLITAPGYGPILASAMVAMVVDPGAFRRGDDFAAALGPCSSQGQALVPRQEGTGGKTWLGPITKRGNGYLRRLLVNGATAVLKSKRAKEDPWLAKLLASKPRKLVAVALANKMARIGWALMTRQEDFRGSLAVA

SEQ ID NO: 241319 - protein, 405 aa, unidentified
MMNAVGIDVSKGKSTVTVLQPGGVFIHKPYDVSHKSSDLRRFTQYIGSLEGDTRAVLECTGRYHEPILHALSDAGIFVSAVNPHLIKNYGNNSLRKVKTDPADSTKIARYTLDNWTELREYTGMDNTRTQLKTLNSQFDFFMKQRVAAKNNLIALLDQTYPGVDKLFSSPVKLDGTEKWVNYAYSFWHVDCVRKAGIKAFTERYKAFCKRYGYNFQKDKPQELFDGSKELIAVLPKEPVYKELIQDSIQQLNLASKHVEELRAEMNRLASTLPEYETVMGMYGVGPTYGPQLIAEIGDVSRFPRRESLTAYAGVDPGKNDSGKRVSKSVHASKCGPSRLRKTLFQIMSTILQLGDNDDPVYQFLDKKRSEGKDYLVYMTAGANKFLRIYYGKVKECLREQQQTTE

SEQ ID NO: 241320 - protein, 338 aa, unidentified
MKLKRIGVDLAKQVFQVHGVDSHEQVKCRKQLKRHQMLDFFRQLEPCLVAMEACGSAHYWARELGKLGHEVRLIAPQFVKPYVKGGKNDANDAQAICEAASRPTMRYVEVKTVEQQASQSVHRIRGRLIKARTALVNEVRGLLAEFGLIESRKGVAATRELLCRAIDDSDSSMPGSMRELLRGLSEELQGYDERLKKLEQLIQREAREDERVRRLMKIEGLGPISATAIVSAVGDARQFASGRQFAAWLGLVPSQYSTGGKERLGGISKRGDKYLRTLLIHGSRSVLKHCQSKTDKRSDWLSQLMCRRNKNIATVALANKNARIIWAILSKGEQYQPC

SEQ ID NO: 241321 - protein, 362 aa, unidentified
MTHATTTLTTLTIGIDLGDRFSHFCVLDSNGEVVEEGRLRTTQDAFRQRFVGITAARIALEAGTHSPWVSELLKEASHDVLVANPGKLRLIYKSDNKTDRFDAEQLARVARMDPRLLSPIQHRCHQVRADLAVLRARNSLVVSRTMLVNHVRGALKSFGTRLPRCSTPSFASKMLERIPDELRPALVPVLETIRSLTSQIRGYERELNTLADQVYPITNVLRQVNGVGPITSLAFVLTLQDWRRFRSSRSVGAYLGLRPKSDQSGERNPELRITRAGDRDLRCLLVQSAQYILGPFGTDSDLRRLGLAIAARGSKVAKRKAVIAVARRLAVLLHSLWRSREEYEPLRNSNRRAAVQTAVAAG

SEQ ID NO: 241322 - protein, 316 aa, unidentified
MNAVGVDMSKDTFHACFDADNIEIFENTKRGINKFIRRIGSFGFGLSDTTIGVEATGAYHLLFAEMLRKNGWNIVVINPLLTSRLNKTSLRNVKTDRADARSIRQAVILGYGYRYTDTPDILRLKTLVQERLGLKRMHAECLQRRHAHAYKERAIDIPVPDCFQSVEANLCKEIKALERQITAIMPETQRLLRSIPGVGAVSAACLVAYVGDVNRFASPEKLTAYLGLDCRVHESGTSIHGKGYLTKRGNKYLRATLFNAAFIAQRHNPDMKTFYEKKISEGKHHFVALCAVERKLVHLIFAVWKRGTPFEIRPPT

SEQ ID NO: 241323 - protein, 364 aa, unidentified
MKIIGCDFHPSFQQIAMVDTETGETTERRLLHADGEAQRFYESLNDQVLVGIETSGNTLWFERLLEKQGHKLLVGDATAIRAASPRNQRCDPRDARNVLQLLLEKRFPKIWVPTMAERDLRQLLKHRHTLVQMRTRAKNQLQHIALNQGLQKKSKLWTKAGMEQLKSLELEPWTQRRRDDLLKILEQMDSHIAELTKAVEKEAQCWPKAVLLMSHPGVGPIVALATVVTLGDVSRFPRGKHVASYLGLIPREDSSGEHRRLGSITKQGNSFMRFLLVQAGMSAARGDAELGRVYKRLAQRKHHGVAKVAIARKLVLRLYWMLRTNRPYPEVVRMRGSSSHPVAEVMADRLSERPASRCSTNPGQ

SEQ ID NO: 241324 - protein, 307 aa, unidentified
MSVYVGIDVHRKRSQVAVVAGDGKVQLNRDVVNGSEPILKLIGDLPARTPVAFEAAFGWGWLVELLEDCGFDSHLVHPLRCKAIASARLKNDKVDAAILAQLRADLLPEAWIAPPRVRQLRALLRHRASLVRLGTRLRNRIHAVAADHGYDRSSSYWTGPGRGWLAELHLPAASREIVTDCLAATGHLAPVIDRPGAEVHQHAKAGPRVKVLATLPGAGEFTALVILAEIGDITRFGSARKLAPTVRGSDLKVRHGHISKQGPAHLRWAPARRRRPPSAPCSSPPPTRRSPSGAGRRSPPSRSPASC

SEQ ID NO: 241325 - protein, 418 aa, unidentified
MKPAYKLYVGIDWASQLHEVCVLDGAGEVLARRTIAHRAEGIAELQQWVCELADGQVSEVAVAIEVPRGALVEALEEMGAHVYHVNPKQLDRMRDRYSSSGAKDDRRDALVLADSLRLNERFFRRVHIDDPRIVELREIGRLEAQLTEERTRLSSRLRELLNRFWPALLALSDGDNDCWLWSLLELAPTPEKARRLRLPQLADLLCKHRIRRFDSVKLHATLQQPPLPVSAGTIEAASLHLRLVVEQLRLVERHKRECCRRLDAILEKLCPQTDEEGKPPKHRDVEILCSMPGVGRFVAAAVLGEAGQLIANRDYYQLRSQAGIAPVTRRSGKSTRVSMRRACNHRLRNALHHWSQCSLSLDPRSRALYDRLRQRGHGNARALRSLADRHLRVLMAMLRDQRVYDPQRATPVTAADGA

SEQ ID NO: 241326 - protein, 330 aa, unidentified
MNTVGIDVSSKTRDIVIRKKGKNVVEKSLENTPDGHKTIISLCRKRKAFKVCLEATGIYHLDLAIALENAPDIDVMVVNPSASKSFSDAMMSRHKTDRSDAMMLAEFAERMDFIPWVAPSHEVLLVRGCSRRLAILTQQKVSAKNQLHALGATQSTPEFILEDARLTISQIDNQIEGLKEKTLSIIAQDEALKLVLELLISVKGIAATSAIQLIGELLVLPKDMKAKQWVAFAGLDVRQHQSGISVNKKSTISKKGNRYLRAALYMPAMSAAQHDANIKAYYEHLQQDNGLTKRQALCAVMRKLLHAIHGMLKTQMPFDSARFYQPNITK

SEQ ID NO: 241327 - protein, 350 aa, unidentified
MTVTIVDAPRPVTGGVDTHLDLNVAAALDPVGGLLQVAEFPATSGGHRRLLGWLAGFGPVARVGVEGTGSYGAGLARYLRAAGVEVVEVDRPNRQARRRAGKSDPLDAIEAARAALSGRACGVAKTRDGNVEAIRALVVAKRSARSAKIATLNQIRHLSFTAPEQLRERLKGVSRQQLAARAAALRPSQREGADPVMAATKTAIRLLGRRVLALDEEKARIDALLSELVTQTAPELLRLHGVGVDTAATLLVTAGDNPGRLRSEAAWAHLCGTAPIPASSGKVTRYRLNRGGDRQANCALWGIVITRLRSDPRTRAYMTRRLAEGRSKPEVIRILKRYVAREVYHHLPRP

SEQ ID NO: 241328 - protein, 338 aa, unidentified
MYYTGIDLHKFTSYLTTVDSSGVIVKQNDIKNINHNFVQYFASIPGQHLATVESTMTWYWLNDLLTSINIPLVLAHAKYVKAIAYAKVKTDKVDSHTLAQLLRMDYIPAAHKISNDNRTLRDALRARIKIVQRHTSVTNSMHLLLAKYNFDSPAQLTGIPEFQYQQLSEVEALLDEQMLALEKQLYPFLIPNDDIQRLLWIPGIGKMNAFTILLEVDDINRFPDVKNFFSYSRLTPSARNSGGKSKQRSSKDGNKYLKVAFSDASIHAVQYYPVIRKYHNSLLRKKNKQVAKTIIAKEIAEIVYHVLKNKSNFNNKFRGQELQHKKSLQWPRVVNPYA

SEQ ID NO: 241329 - protein, 376 aa, unidentified
MEHDSTLYVGLDVHKDSITVAYALGAGEVELPGKTGTTKTDIDRLCKRLQSKARHIRVVYEAGPCGYGLYRQLVQKGFECMVCAPSLIPRKPGERVKTDRRDAVKLVRSLRAGDLSAVYVPSVEDEAFRDLARAWVSAKDDLKRARQRLKAFLLSHGVRYTGRADWGPAHRRWLSTYAFDSPWQQLAFEELRRTIEDRLAQCERLEAALREAVLNWRFYPAVLGLQTMRGVQFTTAVGMLAELGDLSRFTHPRQLMAWLGVTPSEHSSGDKRRQGSITKNGNSYARKLLVEAAWSYQYPARVSPEIQRRHEGIPKPIVERAWDAQLRLCRRYRKLVARGKQKNIAVVAIARELAGFIWDISRQSMSLATRREGLTA

SEQ ID NO: 241330 - protein, 470 aa, unidentified
MAAVMIGVDPHKASHTAVAISAAEEPLGELRVRACVAQAGRLLAWASAWPQRTWAVEGAGGTGHLLAQQLVSAGERVLDVQPKLGARVRLLAAGDVNKNDPDDARSVAVAALRSAGVQEVRADDHAAVLKIWSKRYRDLGRSRTQVVCRLHAVLGELIPGGVPKAITAARAARVLRAIRPEGAVQAARWELAAAFLEDLRRIDAGIRETRKKLAVAVAAAGTSLTGLFGVGPVIAAAVIGDVRDVSRFPGRDHFAAYDGTAPIEVSSGQRKVYRLSRRGNRRLNHAIHMAAITQIRNRHSQGRAYYDKKLTEGKTPKEALRALKRQVSNAIFACLQADARRAAARAKGPGGQQGNDSVASAAGSHPRHRLFGQATPGPDHHPTTVTGGPPPGPARSRDRAGHSSIAATLPPATPKVQVERPQRSKDERPGGAARRRPHSAARKATGQTAQVKTQRPKGTSQAAERTDGTS

SEQ ID NO: 241331 - protein, 481 aa, unidentified
MAATKKAKTGTDQDGAAAAAEHGGDGAEVAEDRVQVVERAAAIDVAKGSGMVCTRVPGSRPDRRRQKVWRVGATYAQVIGLMDQLRCEGIQRLVLESTSDYWRVWYYLAEAAGLEVWLVNARDVKHLPGRGKSDRLDCVWHCKLNERGMLRRSFVPPQPVRDLRALTRTRARLAQDQARHQARVEKILEDALLKISVVISDLFGTSGRRFLDALVAGERSPQALAALGDTRLRATRRELEDALTGRFRDIHALEISTHLRLIDAINAEIARLDEAIGQQLAQVPRTAPCCTACGLAGGGHAPGCADDGTTPLSLAGRLDEITGIGECNARVVIAELGTDPSTFPTPGHAAAWARLTPRSRQSGETAKPGRTGKGNRYLRGALGQAAMTAARTDTRLGARYRRIARKRGKQKAIVAVSRVICEIAWILICDPGARYEELGPDYYSPRSPARQTRDKIREIERLNPGKKVILADAGPAAPGAA

SEQ ID NO: 241332 - protein, 352 aa, unidentified
MRTSQKTAGIITTIGIDLGKNTFHLIGFDQRGAIILQQKVSRGQLERRLANIPRCLIGMEACSGSHHIGRQLQAAGHDVRLIPAQYVKPFLKGHKNDYRDAEAIAEAVQRPTMHFVAIKTPEQMDLLALHRVRSRLVSQRTGVINQIRGFLIERGIIVRQGVVPLRKALPEILSSQTGPLSPRMIGVIADLTQDWRRLDERIGGVSAEIEALAEQDDGCQRLMTVPGVGPIISSAVVAAIGNGAGFKQGRDFGAWLGLVPKQESTGDRTILGKISKHGNKYLRTLFVQAAHVVLVRRPRAAMWGLWPWIEQASKRLHRNMLAIALANKLARIAWAVLARGRAYQPRTAADAA

SEQ ID NO: 241333 - protein, 338 aa, unidentified
MSAQAVGIDLGKTTFHLVALDSTGQVVEKKKCSRPQLLRRMSNLSAHVVGMEACAGAHWLAQALTQQGHHVRLLPPQYVRPYVKTNKNDFVDAEAIAEAVQRPTMRFVPIKTEAQLDLQALHRTRQRWMGRRTALINQIRSFLLERGIAVRVGPAWLRKQMPALLANENGTLSGCLLNLLAELWQEWLQLEERIERANQSLRATAEQDPGCQRLLSIPGIGLLTATALVAAIGNGGTFRKGRDLAAWLGLVPRQHSTGGKTKLLGISKRGNAYLRQLFVHGARAVFFHLKREPHRMGHWLNQLSARKRTSTVIVAMANKLARIAWAVLVRGQPYQATA

SEQ ID NO: 241334 - protein, 351 aa, unidentified
MHYIGVDYHKKYSYVVVKDKEGKVERRGKVDNTKEEFRQLLKPYHSGKAVLEATRNWGLVYDWLEEILDDVALAHPLKVRAIAEARIKTDKISADILCDLLRSNLLPEAYVPNKETREAKNTLRQRMFFVRVQTMVKNRIYTILDRHPEMVSQSPDVSDLFGDSGMEWLRKTVLPGQDNQLLASELELLEVLKQKISESNGIVKELARGDKRVKLLRSIPGLGPFLSVLVAKEIDDISRFRDEKKLCAYAGLVPSTYASGGKVFHGRITKLGNKWLRWAFIEAVQPAINSDADLFAYHERLRMRKDANAAKVATARRLLTIVYRVLRQERLYERRNRRARRNLAPAALCSS

SEQ ID NO: 241335 - protein, 410 aa, unidentified
MKIIALDVHRTFAQVAILENGKIRDAGRLELEREHILKFAKRLNVEDEIVLEATVNTKAIVRLLSPHVNRVVISNPLLVRAIAWAKVKTDKIDASVLAKLHASGFLPEVWMPDEETERLRRVVAERVQLVSQMTRLKNRIHSVLHANLIPPFSGSLFSKRGRAWLEALPVAEDQQRVILRHASELDRLGHDLKQIDEDLAQAALQEPRVKQLMTITGVNMIVALSVLAAVGDIGRFSSPEKLVSYFGLNPRVRQSGDKPAYHGRITKQGRSHARAMLVEAAWSVSRTPGPLRAFFQRIKEKRGNQVAAVATARKLTVVIWHMLSKGEEYIWSRPALLDWKLRKLELAAGYPSKRGGRTKGSAADYSLKSVRDREREAVGHAEEVYRRFVTKWKQRSPMADLPRDFSSTID

SEQ ID NO: 241336 - protein, 353 aa, unidentified
MMTIGVDPHKSTHTAAAVDPVTHTDLGSLRIEVTLAGYRRMLAWARQWPHRQWAIENAEGLGHHLAQWLLARGEVVLDVPCTATARVRELSRGGRRKNDRIDAAAAACVAAAQGDARPVLAEDHVDALGLLDERRNNLTQNRTRLVNQLHGLLRELLAGGAPTDLSADKAAAAVRGFRPRSTPERVRLQLCRDLIADIRRLDGQLADNQAEATRLLDEHGTRLREVDGIGPVLAARILGRTGHATRFAAPGAYATYNGTAPIEIASAEHQCHRLNRYGDRQLNSAIHTIAMVQIRMPNSEGRAYYDRKIAEGKTPRAARRCLKRHISNRLWRIMTTDEKRHHNPPIDQPAMAS

SEQ ID NO: 241337 - protein, 341 aa, unidentified
MQISTIGLDIAKNVFQVHAIDTAEKVVARKPLRRNQMIPYFKALPPCLVGMEACASAHYWARELTKLGHEVRLMPAKDVKAYVKRNKNDAADAEAICEAVRRPTMRFVRVKSAEQQGQLMQHRTRDLLMRQRTQLINALRSHLAELGIIAAQGREGLKELLEVIADPNDERLVTDARASLMVLAAQLQALQTLIGTIEKRIMAQHRSNETSMRLETIPGIGRIGASTIAAVVTDPKAFRTGRDFAAWIGLVPRQDSTGGKQKLGPISKQGDRYLRRILVVGAHAVLRCAKHQPEKYLWLTQLLARRPFKVVAVALANKMARIAWALLAKGGTYQAPRLTAA

SEQ ID NO: 241338 - protein, 359 aa, unidentified
MEAQVKKIDFTGQNIYVGFDAHLKSWKVTVMVENMIYKTFTQPPNPESLYNYLKRNFPGGDYYSAYEAGFCGYWIHDKLVSYGIKSIVVNPADIPTTDKERVQKEDKRDSRKIARSLSNGTLMPIYIPSVQTQRDRSLLRTRAMLVKDLARYKNRIKSFLYFYGIEIDESFSNPESHWSNRFMLWLSSLEIDGGSGKEALQVLISECKNLRKSILDVTKLIRQLSRTTAYQENVILLKSIPGIGLLTAMIILTELESIDRFNNLDKMCGYIGLIPSTKSSGEKEKTGEITPRGHNVLRTAIIESSWTAIRNDPSLMKSYLLYCKRMESNKAIIKIARKLLSRVRFVLSNKKQYVSLIEK

SEQ ID NO: 241339 - protein, 430 aa, unidentified
MSYRISGIDVHKKVLAVVVSDVEVDGEFRFERRMFGSNPEQLRTLAAWLVEQEAEEVVMESTAQYWKPVWEALERYWKPIREKREGARRKSGTLHLALAQSNRGRQGRKRDFPDAERLVKRLVARELTLSFVPDAEQRLWRTVTRRKYQLTRDHVRQQNQLESLLEEAHIKLSSLVSDLLGASARRMLKALAEGETNPTALATLADERLRATPEQLCDALGACTDLKPVYRRLLKMALEQLQFLEQQIGQLDQEMASLLSQHQDAVERLAEVPGLGVDSAQQIIAEVGPTAATFPSEKCLSSWVGACPGDDESAGVNYSHRSPKGNRHMRRVLNQTANAATRTKGSIFEIVYRRSVPRLGHNQAIGAIAHRQCRLIWLILHQGVRYEERGPAVTKQSKQRRTARMLRQLRSLGYRIEPPNPQHPSPAQVR

SEQ ID NO: 241340 - protein, 347 aa, unidentified
MTIVEDARAITGGVDTHADMHVAAALDPVGGLLGVQEFPATAGGYARLLGWPGGFGTVCLVGIEGTGSYGAGLARRITAAGIRVVEVDRSDRQDRRRQGKSDPLDAVSAARAAQSGRARGAPKGRDGAVEAIRALMVAKRSAAGERTRTINQARALILTGPDDLRARFAKHTAAGLVTAIASLRPRPGDAAGYATRIALRELGRRAVFLDGQLERLDELIVPLVTARAPGLLALYGIGSSTAALLLIAAGDHPGRLRSEAAWAHLCAAAPIPASSGKVTRHRLNPGGDRQANHALWRIVFTRMGSDPATRAYVERRTKEGKSKAEIIRCLKRYVAREVYPHLRPVAG

SEQ ID NO: 241341 - protein, 344 aa, unidentified
MDHFAGLDVSVKETSVCIVDDTGKIVREVKVASEPEALLSVLKKPAYHFKRIGLEAGPLSQWLFSALAEAGLPVICVETRHMRAVLKAQINKTDRNDARGMAQMMRVGLYRPVHVKTLRSQKLRMLLTHRQLLLSKAIALENDLRGTLRNFGLKVGMVRKVKFEARIRELVESLPDLAVLVEPMLIVRRVLREQIVILHRRLLAIVRDDEVCRRLMTTPGVGPVVSLTYRAPVDIPARFRKSKSVGAVFGLTCAKYQSGEVDWDGRISRCGDEMMRTMLYEAAQAMMRSKKWSWLKAWAMQIARRRGMKKAIVALARRLAVIMHRIWVDGTEFRWTREQAAVAA

SEQ ID NO: 241342 - protein, 401 aa, unidentified
MEGPIVSIDVSNGNSHYMCFIKNNKRFGKVKKIDHDIEGFKRLLEDIQKLEAETNEKVCAVFEATGVYTKPLERFLSKNSIKTYIINPLESARKRKEEIHNKKTDKLDPISISKVYYDKEEMMELKKKDKTYNWLRKKNRLYEDQLNHLRKYKVTFQNQLSICFPGYLDLFRDGYSDIPMTILKKYPHPDLLKNKKAETVARYLEKNTCHTHKVSLEYALKTIEFAKKTYPGCEKDDVEVEIFKILLDKVIETQRECEKTLNEMITVASTLEEYRYISSIDGIGPNLAARIIAEIGDIEEFKSREALVAYAGLDPHIYQSGDQDGKHLKISKKGNKYLRCLLFLAVGCSIRGAKDNPVNRFYQKKKQQSNPLNSKAAKTACTAKLLKIIYGICKNKTTYER

SEQ ID NO: 241343 - protein, 405 aa, unidentified
MMYNAVGIDISKGKSTIAVLQPGGTVVRKPFDVKHSSSDLKSLVDYISSLEGDTKAVLECTGRYHEPVVRVLSAAGIFVSAVNPHLIRNFGNNTIRKVKSDPADSRKIARYTLDNWASLRQYSGMDTTREQLKTLNAQMDFFTKQKISAQTNLISLLDMTYPGVNDLFDCPTRSDGSQKWVDYAASFWHVDCVRRIGLTAFTERYQAFCRRHGYNYQPAKPKELFDAAKELVPVFPKEKEYKNLVLMGIRQLNATAASVEQIRHEMDRLASTLPEYGTVMSMRGVGSTLGPQLIAEIGDITRFTHREALTAFAGVDPGVNQSGQFNARSNRASKCGPPRLRKALFLVMDCLLKTKPVDDPVYQFLDKKRSEGKPYHVFMTAGANKFLRIYYGKVKAYLASQAKSE

SEQ ID NO: 241344 - protein, 387 aa, unidentified
MYYVGIDIAKLHHFASILSQEGEVLIEPFEFTNDYDGFQKLISTLNSFEKNSLIIGLESTAHYGDNLVTYLFSNNFKVCVINPIQTATLRKNNIRKTKTDKVDTYLIAKELMLNPHRFVTESDIQIMKLKQLCRFRQKLLKARTRAKIQLTSYVDQLFPELQYFFKSGIHQKSCYALLKECSAPDDIASMHLTHLASLLSKASHGHFKKDVAENLRVLARKSVGTGNKSISIQITQSIEQIELYDRQIGEILAEVKSIMISLNSVIMTIPGIGYLNGAMILGEIGDINRFSHPSKLLAFAGLDPSVYQSGNFKASRTRMSKRGSKVLRYALINAAHNVVLNNKTFKAYYDLKVAEGRSHYNALGHCAGKLVRIIHKMLRCQLAFNLE

SEQ ID NO: 241345 - protein, 426 aa, unidentified
MIPAVVERCAGIDVHKRFVTVCVLIGPAHLEPEPQRRRFGTCNAELWQLRDWLLEEKCQQVVMESTGPYWRPVFNVLEEAGLEVVLANPQQVKNLRGHKTDMKDCWWLAHLLRHGMIRPSYIPSRAIRELRDLTRRRKQLIRNGAMERNRVQKVLEEANLKIGSVLSDVFGASGQDMLLALVEGKATAKEIAQLAKRQARKKIPQLQASIEGHRMTETQRQLIRQCMSHMAFLEQQIEEVDQQIQEKIGAFQFSESYGLLQTVTGIKAEAAATVLAEVGDTVAAFPSAGKLSSWSGVCPGNNESAGKRKSTRTTKGNPYLRDALLECAWAASRKKNSPMQHLYRRLEHRLGHKRAIVAVAHALAQAIYQVLSTRRPYVDTAEPPRSATKVNRLIRHHTRRLRKLGCWLQQTTQQPQRSTEQHQRLT

SEQ ID NO: 241346 - protein, 368 aa, unidentified
MTYLGIDLHTRNMTICAVSSNGKKIGEWKLSNDTDQLDKLIREIGAPLKAVVEATSSWYWLADWAEAREIDLILAHAKMLKAIAYAKVKTDSVDAHTMAQLLAADLIPRAHMVMGRQRELRELLRARLRMVWRRCKVQDSLYNLFFKYNVPIPKYPFRDLNRLEEHFQVHLPPASGLEASLHIDQFRLLEGQVHRIEKQIDTYGPEFPDYERISQVPGIGKVSSWSILAEIGDISRFKSDKNFVSYCRLVPGAADSGGKRRHKSRNKDGNKYLKIAFSQAAIGAVSFYPPVRAFYNKIRRRSGKHVARTVVAKELARIVYFMLSRNEPYKGFKGKPTPKDTYLNWPHSVSPQSIRGRDRADPSQPDAI

SEQ ID NO: 241347 - protein, 429 aa, unidentified
MQNESTPGARGPVFCGVDTHADSHWLCVLDWRGRKVLSRQFPADAAGYEALAGAIAAAGEPACVAMEGTSSYGAGLTRHLASLGMPVREALSPARMQRRRPGQGKCDEADAERAARAAMSGSKLGTPKSQDGWVDGVRCMLAARSGAVKARTSAINTARSLLTTAPEGLRSRFRGMAGPRLMEELPSVRAEGALGAALGALADLWAAARDAALDMERAIEASLEENCPALLAMYGCGPVSAAKLAVAAGDNPGRLRSEASFAAICGACPIPASSGKTVRHRLNRGGDRQANSALHEIARQRVMRDPETAEYAERARGRGKSDREVMRCLKRYVAREAYRALMRPHEIRRPEDASELVAARRAAKVSQVRAASILGTSEKYISMLERGQRELKPIRRAYEAWVEAGLPLDWDRQAFEAERKMDSKKHLAK

SEQ ID NO: 241348 - protein, 317 aa, unidentified
MLCAGIDVSKPHLDLALASGTAKPTRLRFPNTPEGRQALLAALAHHRPVWVALEPTGTYHLPLLKLLAERGFQVALVNPYHLAAFRKATGARNKTDRQDALLLTRYALVYRESLRAYTLPPEALRELKALVGYREDLAERERTILNQLEAARWAGSAEVIPLLQQELACVEGLLREVEGRIQARLTALPEAELLLGLPGVGPQVTAAVLALLPPHLWGQAKPAASYAGLIPEQEVSGKSVERSRLSRTGPPLLRKKLFMGALVAVRHDPEMRALYHRLLSRGKRKKQALVAVAHKLLRRMMGRLKEYYAGQLAQQVA

SEQ ID NO: 241349 - protein, 344 aa, unidentified
MTHASSLYRLFVGIDVAATTCAVAWMHATTTPSRAITIDQTATGFAALQRKLLSIEPEPQAVLIVMEATGTYWMRLASNLVAAGFAVAVVNPAQAHDFAKALLKRSKTDAIDAQTLAELGARLQPERWTPPPQVYTELQQRLVHRDGLVAARTQFRNQLHALVQQPVVITSVRTRLERLIASLDEEIATVEQEITVALQQDEAWAAAAARLATINGLGTLTIAWILTTTINFTLTVTPEAAANYAGLAPQLRQSGSSVRGRPRVGHGGNARLRRALYMATLSALQHNPVIKAFYSRLCAAGKPRKVAVCAAARKLLRIAWAVANKNQDFDPAYATHSRQEVAVR

SEQ ID NO: 241350 - protein, 410 aa, unidentified
MSESPYAFYVGVDWASETHQFTVLTPERHLEAERRIEHTGRALSEMADWLTALADGEPARIAVAIEVPRGPVVETLLERGFHVFAINPKQLDRFRDRHSPAGAKDDRRDGFVLADSLRTDRPAFRQVHVDDPLLIQLRELSRAEEELQTELRRLSNRLWEQLQRFYPQVLRLSPAVDEPWIWALLQLAPTPVAARALRRATLARLLARHRIRRVTAEMVLAELHSPALRVAPGTTEAAREPIALLLPRLQLLHEQRGRCARRIEQLLDALEGSDAEHRDVTVLRSLPGVGRVIAATMLAEAARPLAERDYHAVRTQGGVAPITRQSGKSVLVSMRYACNHRLRNALYHWGRVSAQHDPSTRRHYRALRQRGHGHARAIRGVIDRLLVVLMAMLRTGTTYDPARRRVPAAA

SEQ ID NO: 241351 - protein, 363 aa, unidentified
MDSSHSTASQCAKLKILAIKEGEEIMNIARIGIDLAKQVFQIHGVDRTEKVLVRRQLRRSQMLGYFSKLTPCLIGMEACGSAHYWARELGKLGHEVRLMAPQFVKPYVKSGKNDANDAEAICEAVGRPNMRFVAIKTAEQQVIQAEHRIRARLIKSRTALSNEIRGLLAEFGIVVETSIGRLRKALPELLEDSENGLPMSFRVLLAGLGEELRALDDSITAFDAGIAQRAREDGRIRRLLDVEGIGPITASALVAAVGNGTQFNSGRDMSAWLGLTPRQYSSGGKNRLGGISKRGDKYMRMLLIHGARAALNAAKNKEDGRSRWVKSLATRRNKNIATVALANKNARIAWSILSRGESYRKAA

SEQ ID NO: 241352 - protein, 404 aa, unidentified
MKASLARNDARFCGIDVAKNKHVACIIDREGQLIVRSLSFTNDAEGFQRIRDRLKEIGGPSKVAIAMEATGHYWYSLHDFLARHRYTVVVLNPIQTAKQVTKGIRKSQTDKIDAHHIAVLLKNGEHRPALIPGELGMTCRQLTRLHHTMVRQASRIKQLLWSKLHPVWPEYEALFATPFCKTGRVLLNTTPTPRDVLAMPREDLLNLIHKTSRGKYSTAQADKVRQAAENSVGMHRGIDAARASIRLLLAQLDALKPIREQLESQIQALMGRLPDYLATLPGASPLSVVSLFGETDPFEAFTSPSKLIAFAGLDLVVRQSGEYEASRRHISKRGSPFLRHTLWAMAHRACYQEGDLRDYWLRRKGQGLKHLAAVTAVAIKLCPIVWRIMTDRRNYLPQPPVTKP

SEQ ID NO: 241353 - protein, 370 aa, unidentified
MKDVTTYVGIDAHKKDLFVSMLVGDQRTPPVSWKVANEPQAVRRLVRKLEREAPGDVRVFYEAGPCGYALQRQLTTPRVSCEVIAPALMPRKPGERVKTNRRDGCKLVELGRAGLLTAVQPPTPEDEAVRDLARARDDAREDLQRCRHRLGKLLLRRGLHYSGRNWTRAHRQWIDTLEWAHAAERAVVDDYLLAIDHTEARLQELDARLAETAETEPYREPVGWLRCFRGIDTLTAMLILAELHDFRRFASAPALMAYLGLVPGEDSSGEKHRRGRITRTGNALVRRLLVETAWHYQHRPSVGVALARRRKGQPGRVIAIADKAQQRLCRRFRRLAAEHKPAPKIAVAIARELAGFLWAALHPVPAPVTA

SEQ ID NO: 241354 - protein, 412 aa, unidentified
METLVERGCGLDVHQATVVACLLIVRKDGKVQKQVRTFGTTTRELLSMREWLLSQGCTHVAMESTGVYWKPVYAILEGAFQIVVANAQHVKKVPGRKTDVKDAEWIADLLCHGLLRQSFVPPKPIRELRDLTRYRRKLVESQSAERNRLLKVLETANIKLASVATDVFGTSGRLMLRALIEGKTTPEEMAELAKRKLRSKIPQLELALEGKIEDHHRFLLKLQWDRLERAEGDLAVLEEHIQEKLEPYAAQLALLDEIPGVDWTLAAVIIAELGVDMSVFQSVSQLASWAGVCPGNNESAGKRKSSRIPKGNVYLKTALVEAAHAAARTKGTYLRDKFHRLKARRGYKRAVVAIGHKILVSIYHMVSQNVSYNDLGDLYLDKLNKNHLTRNLVHRLERLGYTVTLTLEQKAA

SEQ ID NO: 241355 - protein, 307 aa, unidentified
MDLGDRWSFYCVLDEAGKIILEQKVSTTPEAIKQTFGKIPQSLIAMETGTHSPWVSRLLTELGREVIVAHAQKVELITKSNRKDDRHDARTLARLARIDPELLGPVRHRSAKAQIHLTVIRARAELVSARTALVNAARGLAKSFGERLPKCGTQQVSGKLAEGLSAELREVLEPLLREVESLNERIQEYDQRMEKIAKEVYPEVSLLKQVKGVGTQIALTYVLTIEDPYRFPKSRAVGCFLGLRPGRRNSGESEPQKKISKEGDRYLRTMMVQGAHYILGPFGEDSDLRRWGLKLAERGGKMPRNER

SEQ ID NO: 241356 - protein, 336 aa, unidentified
MAPTVPLFVGLDYSQHAVQVCVLDRAGKVLCNARCPDDAGRIQQLVQRFGAVRGAALEACTGAADLAEELADRFAWPMHLGHPGFVSRMKQSPDKSDFSDARVLADLERVGYLPRVWIAPRPLRELRTLVRDRQQLVAQRRNLKLAITALLREHRQRCGHKRWTAAWRLWVEHQAQLPEQARWVMTQRLRRLEWVAAEVRAVERRLEEVTKGDGTVRWLRTIKGLGPVTAWTVRAEVGRFDRFRSGKQLARFCGLSPCNRSSGDREADAGLIRAADPELRRVFIEAAWVLIRCQPRWRQLAERLKAQGKPSTVVTAAVANRFVRWLYHEGLRQQAA

SEQ ID NO: 241357 - protein, 341 aa, unidentified
MQHELSLVAIDLAKKIFHLVGADTTGKILWRKRLTRHTLLPFITPLPPVTIGLEACGGAHYWARKFHQPGHTVKLMAPQFVKPYVKSNKNDMRDAEAIAEAVTRPTLRFVPTKDVDQQDIQALHRVRERLIGERTALVNEVHGLMHEDGLGLPKGVAQFRQAVVDKLGSEQEQLTALSQEMFWKLVEEFVALEQQRAYYQEQLEALATTHPECQRLMTIPGIGPITATALVAAVGDMGVCKNGRQLAAWLGLVPRQHSTGGQTRLWGISKRGDSYVRKLLIHGARATLRWVQLKTDDRSRWMRRLLERCGWNRTAVAVANKNARIVWALLCRGGVYSDNGS

SEQ ID NO: 241358 - protein, 264 aa, unidentified
MDFIGFDLGKVSSQLCIITADGELLEQRVNTDREHLTKWLGSRPPARILIEAGTESEWVARHLETFGHEVVVADPNFAPMYATSSSRVKIDKRDARTLAEACRLGAYRPAHRTSDAQRHIRAKLAVREAIVRTRSKYISLCRALVRRDGLRVTAGTARSFASRLDGLPMSVVLQVEIAPLITLLESVNAQIKRADDELAQLVKDDPVVKRLTTVPGVGPVTAACFVSTLDDVARFPDAKQARAYLGLVPSEYSSGERAASWAHR

SEQ ID NO: 241359 - protein, 422 aa, unidentified
MLEQAEDEEEIITHVAGVDIGKASLVCCARVPDEARPGRRLQEVRTYATMTRSLVGLAERLAVLGVTRVVMEATSDYWKPVFYLLEAHGFEVWLVNARDVKHLPGRPKTDKLDAVWLCKVAERQMIRPSFVPPSPIRMLRDLTRYRVDLIAEAGAERNRAEKLLEDAQIKLSVVVSDLFGMSGRAMMAALIGGQRDPYTLAELARSSLRRKIPALQEALTGHFTDHHAFLLGKMIARVEAIEADIREVDARIEDQLGPFASAAARLLEIPGIGAAAAATIIAEIGVDMTRFPTPAHLAGWAKFAPGVKESAGRRKGNGSTGHGNRYLARVLGQIAVTAARTDTFLGERYRRIARRRGAKRAIVAVGRSTLTIIWHLLSEPGARFHDLGADFYLSRTDTERRKRNHIRQLEALGYRVSLDLAA

SEQ ID NO: 241360 - protein, 343 aa, unidentified
MKLSRVGIDLAKNVYQLHGVDRTGKTMLKRRLKRHQWFKVLLEKTEPGCVIGMEACASSHHWGRQLQARGYTVKLIPPQFVKPYVKSNKSDAKDAEAICEAMSRPNMRFVTVKTVEQQDIQATHRIRAELITQRTAKANQIRGLVAEYGLVAPKHMSSLRAAIPCWLEDAENGLTGDFRNLLHGVWNDLLGLDDRVCEMDKLIKRLAENHEECVRLQQLRGVGPMISTAMIATMGDARQYRSSRQMAAAIGITPKQHSSGDKHRLLGISKRGDVYLRTLMIHGARSVVASAKHKDDRLSRWVTGIATKRHPNVAAVALANKTARMAWAMLRNETDYDPDFAIR

SEQ ID NO: 241361 - protein, 343 aa, unidentified
MTEVSTIGLDLAKNVFQVHGVDVSGETVICRQLRRRQVLPFFRKQPACLVGIEACATSHYWAREIGALGHEVRIMPANYVKPYVKRNKNDAADAEAICEAVTRPSMRFVAVKTAEQQSVLMDHRTRELLVRQRTMLVNAIRAHMAEFGVVARVGLPQVKELLAVIAEPGDERIPPLARTCLEGLARQLLSLEREITTTEQRIHAWHRANEVSQRLATIPGIGPITASALAASIADPSVFRSGRELAAWIGLVPRQTSTGGKQRLGRISKAGDHYLRWLLVAGAMTVIRHGRRTNFEKNPWLGDLVARKPTKLAAVALANKNARTAWALLANGGTCRQPAVTTA

SEQ ID NO: 241362 - protein, 346 aa, unidentified
MKILALDLGKYKTVGCVYESESGAHQFQRTFTAPAYLQRLVQEIKPDRVVIEVCSIAGWVCDLMGQLGIEVQVANTSDDAWRWRKVKQKDDRRDALKAARLSAVNQLREVYIPQTEVRQWRALITYRQHLVGRRTKIKNHIRELLVREGQLLPRGSRCWNKLGQEQLNRMARPWAEVAAAELWRGELWEELQQLQMIQARVASVEEKLNAIGQADKRVQLLRTIPGVGPRLSEAIVALLDQPQRFRKASQVSGYIGMVPKAFDSGESERRGRITRQGNGLVRSLLIEVAWVGLRHNSWLRQTYQRLSGGKKARKKIAIVAVGRKLLVRCWAMLRDNRAWSWQPQIT

SEQ ID NO: 241363 - protein, 352 aa, unidentified
MIIGCDFHPSFQQIAYVDQETGEYGERRLSHRGEAVAFYRSLAGKAVRIGVEATGNDRWFHKLMSELGHELLVGDAGEIHASAPREQRTDKRDARHILRLLVENRFPAVWQPSVANEEQRQLLLHRCRLVRMRARIKNQLDSIAKNEGLTSSRKWSGKRRQQIEALPLTGWYAERRADLLGLLDTLEARIRPLDEAVQATAEQNAEAQLLMTHPGVGPVVSLAYVLILGDWRRFPRGKQVGSYLGLIPAEASSGKRQQRMGHITKQGNRLLRWLLVEAAIKAQSKDPSWHRQYVRLSMNKHHGVAKVAIAHKLAVRLYWMLRSGQNYTQIVERGSHAGQSVIRSGCNLGPRF

SEQ ID NO: 241364 - protein, 309 aa, unidentified
MDIIAVGIDVSKDRLDVALRPSGETFAVERNAAGLDRLIERLRQCSPHIVALEATGGFETVAAAALAAASLPVVVVNPAQIRAFAKALGQRAKTDPIDAAVIARFVLATQPEVRPLPDAETRMLSDLVTRRRQIIHMMVAERQREKRAPARMKKSIMRLTKALQKELTAIDEDLDDAVRGSPAWREKEDLLSSVPGVGTIISRTLIADLPELGSLDRRQIAALVGLAPFTRQSGQWRGRSFIGGGRATVRAAIFMGAMAAVRWNKHLRAFHHRLVAAGKPKMVAVIAVARKLLTILNAILRDNRPWQSA

SEQ ID NO: 241365 - protein, 319 aa, unidentified
MAQNGLVVVGIDVAKDKVDACIRELALRQTYPSTAQGHRKLVAWLRKHKVNRAVMEASGGYERDWGKVLRLAGIAVRIVDPKRVRSFAQSAGRLAKNDTIDAEMIAWFAETFSEAPGQVHDAAREELQALVKARLNLVDLKIRLEAQNEHAAPGQARKARTRILKSLLGEIAKLEVAISAQVRATPHLAERAEIVESVPGFAETSSANLIAGMPELGQVSDEIAAALLGVAPYDDDSGKRRGERHIKGGRRWVRNALYMPCLGAATQNNPVFKAYYQRLLAKGKEPKVALVACMRKLIIILNTMIARRQKWDPSRYALN

SEQ ID NO: 241366 - protein, 394 aa, unidentified
MTIYIGIDVAKRFHIAALVDEDGQPITQLRFDNNASGYQHFFACIDRYRDGGEPVIGMESTGHYGAALRDRLVEHGYTVQVLNPLKPNRFRDFYLQPVKNDARDAFVIAQMLRFGERQPYVPAPPPLRALKHLVRYRAALTQARARMKNQLRAILDEVFPEYQQESLFANLFGASSLAVLRRFPTPACLLAAPEAELVSLLKQSSRGRLGEERARQLRQAASRSVGSTLAGQAYATVLPDLIAGYQALEERIATFTARIEAELNTTEQTLTTIPGVGLVLAATILAEIGDVTRFPSSDHLVAYAGLAVGESQSGQGATRRFLSRRGLPQLRGAFFQAALAAVRFDPHLGAYYQRRVKSGLPRRQAIIAVARKLVRITYALLKSGAPYQPPEPEP

SEQ ID NO: 241367 - protein, 360 aa, unidentified
MKKDIKTESGLTVGVDLGDRWSKYCVLDEHGQILEEDTVATTGRAFRKLFSDRTAARVVIEVGTHSPWIQRLLQELGHETITANPRYVRLIYSSRNKNDKLDAERLARLARVDTKLLHPIQHRGGTAQADRALLRSRNALVECRTKLVNHARGIVKSIGGRLPSCSTTCFHKRVRQDLPDELKPALTPVLDTLAALTKKIQCLEARIERLAAKRYPETGLLRQVSGVGPLTSFSFVLTLEDPERFKNSRAVGSYLGLRPRQSQSGEQNPELRITKAGDMDLRRLLVGSAHYILGPFGPDTDLRRWGLALAARGKKNAKKRAVVAVARKLAVLLHRLWVTAEVYEPLRNNKSLIVPEAVSA

SEQ ID NO: 241368 - protein, 470 aa, unidentified
MNDRRLVGIDLGIATAHTVRVLDGEGTTVAKRKAWPTAESLTAVEAAALAGCPDGTLLEVVIEPTGPAWLPIAVFFTARGHRVFRVSSQKAADLRRFLSRHAKSNGIDADTLARLPLFDPAGLRPLVLPGAERAALDRRVRATDRLTRQAAERKVRIKDLARQLLPRSPLTGDLGAADLAILERYADPRDLARAGQARLTALIAKASHNHQGAERARQWLDAAQASLELYAGHPAADFTGLAAEAATEIRLLRAIQAELAAHATERETCYQAVDPAGLARSLPGLADVGGPALTACMGDPARFGRGKQFRCYTGLVPKASETGETDRKGQPMSKAGSSLLRTTLVRAADTARKQDPQLAAIYHQQMTQRGKDHLGALCVTAASLAERAWTVMRRGTPYVICDTDGRPLTPTQAKAIIAANWTVPPETRARRRSKKTGKAPQKVPEGQYARGDLPRGTTPPRHERHVKQTT

SEQ ID NO: 241369 - protein, 308 aa, unidentified
MKEQIVYLGVDVAKAYLDAAIGKEKRRLPNEGTGHRELIKWIKQMEGPVRVICEPSGGYERRFIQALIGGQIRVSLVQANRVRQFARAAGILAKTDTIDARVLCAFGEAMRPQTLTASKLEQELLRELESQRRHLSRLLVMEQNRGARLSDSLVRSLNRALIKQIQKQIERIDLLIKEHIEHSQELSAKAHKLTAISGVGARTAALLLAQMPELGQLNRREVAALVGVAPFNRDSGKSRGKRTIYGGRYVRHGLYMAALVAARHNPILRTFYRRLRAAGKPAKLALTATMRKLLIVLNSALKTNPITT

SEQ ID NO: 241370 - protein, 385 aa, unidentified
MHQVESERSVLDGAAVFVAIELSKSAWLLAAQASPSGKTSSHRLESGDITGLLALLRRLQARERQTYGGGAVQIVVGYEAGYDGFWLQRRLAAEGIICWVMDPGSLQVNRRARRAKTDRLDAAMLLRALIAWCRGDRVACHMVQVPSVAREDARRTHRERQRLVAERVQHVNRIKGLLATQGITDYQPLRRDRSARLGEVRTKDGHALPPRLRREIERELQRLELVLEQLEAVEAERDAAVAAPTVDDADAAKVALLVRLGGIGNELATVLVREGLYRSFTNRKEVAAYAGLTPMPFASGERHREQGISKAGNPLLRKAMVELAWLWLRYQPGSALARWFTDRVGSVRGRIRKITAVALARKLLVALWRYVTAGLMPEGARVKAA

SEQ ID NO: 241371 - protein, 342 aa, unidentified
MDRLSPVTRICKVGFTMENELHFIGIDVAKAKLDVDILRPDGRHRSKKFDNTLSGHEALVRWLRGHDVNRAHVCMESTSTYMEDAAAHLSDAGYTVSIINPALSKAFAQSEGLRSKTDKVDARMLAHFCREKRPSAWEAPHPTERALKALVLRHQALTEMQTQEKNRRETAPEVQLASIDILLGCLSAELARIEKQIKDLTDNDPDMKRRRKLLNSIPGIGEKTAAVLLAYTGLRLKFGTARQFAAYAGLTPVQHESGSSVMRASRMSKAGPVQLRKALYMPALSALYHTAWGKAFRKRLEESGKRAKVIIGAMMRKLAQVAYGVLKSGKAFDASQHELLIA

SEQ ID NO: 241372 - protein, 339 aa, unidentified
MDAMGTIVSEGKVSARREALDQWVLTLPKPWCGAMEATLFSHWIFHHLAPHAAELKMGDPGRMKAISSGKKKSDQLDARMIANLLRSNLLPECFVMEPELAALRRQLRFRRTVVEQQVRSKNLIAGMLMQAGVEYEKKRLHGKKYFANLAEHNQWIDAHLQPLLRFSRAQIETMGTMDRQILRLLENHPRLRARIEALQQIEGVGPVTALTWALEVGSPKRFASIGNAVSYCGLTSALRESAGHQKRGPLSKKRNAHLQSALIECAKLAPQFNAKLAEVRQKEIDHGADANRATLEVARKLVAYLLAVDRCFFASLIGSQPEQRCSAQGHPARVVGSRK

SEQ ID NO: 241373 - protein, 408 aa, unidentified
MEGRNIGLDVHRDFCEVAAVTAGKVQHWPRVSARPEPLREFAEQLRPDDRVALEATGNALAIARIIRPHVKEVLIVNTNQLQAIADSKHKTDRHDARTLAQLLAAGMLEHSWLPDDLTRQARRRTGRRANLVVARVKCKNEVLAVLHRNLKNRPPMSDAFGVAGREWLAGQVLPADERDTIDAALRQIDFLTEEITIIERDLAEFVLASTEARRLLTVPGVGMITAAVFLAQIGTATGDINRFATPRKLIGYLGLDPKVRQSGNGPANTGRISKEGAAQVRHVLVESAHTAVRSPGPLRAFYQRVRARRGHPIAIVATARKMAKLFWHLLVNEQDYAYTLPTPLAKKIRTIELKAGRERRAPAGRPAVNRQQRRIIERQLAHQAQLAYQRMITDWQQAAKTTTTPTRA

SEQ ID NO: 241374 - protein, 409 aa, unidentified
MEEILNKCCGLDVHRDTITACVMIGNGRQKQKHIKTFPTFTSDIQELANWLKELNVYHVAVESTGIYWKPIFNVFEGDFDVILVNAQHVKNVPGRKSDVKDSEWLCRLLKCGLLTKSFIPPIDIVRLRELVRYRQTLTKDLTSAKNRIIKMLENANIKLSTVFSDVFGVTAWGMICKLIAGETRMEVLMDYIHRSCKSSRTDIKKALEGTLKEEDRHILKMMMDHIHAIERIIEDVDRHIQNHLKPYQAQLELLKTIPGIKDLAAASIVAELGVDMNQFNDASHLSAWAGLCPGNYESAGKKKSSRIRKGNKHLKITMTQVAWAASRTKNTYLGAKYRALIPKKGKKRAIIAIGRKMLVICYHMLKKRVPFNELGIDFLDKLEPERKAKYHEKRLEELGYHVVLNKKIS

SEQ ID NO: 241375 - protein, 330 aa, unidentified
MKNYVDVIGIDVSKQTIDAHIHHKAKHRKFSNTSKGFKALLLWVEKYLEGQSYFLCFENTGHYSTKLSVYLSERDIDYVEESPLAIKRSAGIVRGKTDRLDAAMIARYAWLHKEELALSTPKQQDIQELGRLLATREQLVRDRTGKMSSLNEMQSLLSSPSTDDCCKILTKSIHYLTKQIDALEQCIRGLMERDESFDRNFKLLNTLKGVGLILASQIIYHTGNFKRFDSWRQFSSYCGVAPFEHSSGTSIRRRNRIHHIGDRKMKTLLTMASVSAIQCDKELKHYYKKKLAEGKPKMVALNNIRNKILSRAFAVVKRGTPYVELQQYAA

SEQ ID NO: 241376 - protein, 429 aa, unidentified
MSEEKPLELRVSVDVGYRRHSVAMGLSSGEVLEEFEIEHRPEGFQEFFSRIEKHHKKKNCSVAVAMEGYNGYARPLDSMVRQRGYRLYNLNNLKFARFKEIFPGAAKSDRIDARKGLELFQLSDHLPLAKEVLQEVSGTPPENEVLKRLTRRRRRLVNERVRVVNNLQADLQAVCPGLLEITGEASNQWFLNFLLSADTLPQLARLKRSTLLKIPAVGVKSAAIIEDWQKRAHFSQEVNWVGEMIQEDARRCVELDEKIKRLETKVAEVAKDSKIAKTLRSIPGFGAVCTSELAGEIGTIERFASEGSLSLYLGMSTLDNRSGKYQGTKTPKHVNTRAKAAMMIGVDRHRKYVPESQRYYEKKRSEGKKHNQAIRALGRHLSRIIYKMLTEERQYQIRPEKGNAKTKVSPRSLLKTQIRRPKILVKEKN

SEQ ID NO: 241377 - protein, 345 aa, unidentified
MKITTIGLDLAKNVFQVHGIDEAGEVVVGKALRRRQMLPFFSKLEPCLVGMEACATSHHWARQLSRLGHRVKLMPPIYVKPYVKRGKTDAGDAEAIAEAVTRPTMRFVAVKSLDQQSMLALHRTRDLLIRQRTQLVNMIRGQLAEFGIVLAKGIQHVLKFTGQLLDGEAPDIPPLAASVIVTLAEQLRDLQARIGGLDKDIRTWSRGNAVVQRLLTIPGIGIVTASALAATVTDPHQFTSGRQFAAWLGLTPRANSSGGKERMGHISKMGDQYLRRLLVNGMTSLSQSVRRNPDAHPWAASLMRRKPDKLVAVAMANKTARIVWAVMTRDEIYRPPQTSTMKEAA

SEQ ID NO: 241378 - protein, 347 aa, unidentified
MGKFSKKKHFVGVDISKDTLDLSLISQESYGSFKDKQISNTLTSYEEIKEWLKKEGIGKEEVMFCMEHTGTYGLLFFAWLSQEGYDYCVEPGLQIKRSLGMVRGKNDRIDARRISDYAYTHKDQLKSFVLPSTLMLQVKQLLTYRDQLVRVRTSLKNSVQSHEQYEVLTGLNEITRGIKREIEKYGEKIKEIESRIVSILEEDSEVKKNFDLSRSVKGVGLVLAAYMLVTTMNYTAFDNGRKYASYAGIAPFDERSGTSIKVKARTSYLGNKKIKTLLSNGANSAIQWDPEQRAYYKRKKEEGKDHKVIINAVSCKLVNRVFAVIKRQTPYVITYGHNFSKKDLDIS

SEQ ID NO: 241379 - protein, 335 aa, unidentified
MSKYQIFVGIDVSKDHLDLAVCANGKAAPATRIANTISAIEEYLSTFSEKNTLSTTLFCLEDTGIYISFLLSAFITQKVDFWVENAVQIKRSLGLQRGKNDAVDAQRIAEYASRFKDKVCLYEAKNEVIEQLSHLTALRSRLVQSRKQIQVPLKETKTFAKKAIGDLVEKHSKNTLESIEKDIKEIETAIKELINSQEDIKAMYELTTSVAGVGEVTAVEILVSTQGFTKFTDAKKFACYCGVVPFEHSSGKFRGRNRVSKMANLKLKSLLHMCTLAATKKAGELKDYYERKLAEGKAKMSVLNALRNKIIQRIFACVQSGKKYEKNYQKDLVLS

SEQ ID NO: 241380 - protein, 344 aa, unidentified
MKVTTVGVDLAKNVFQLHGVNEFGKVVIKKQLRRDQMAEFLVNLPPCLIGMEACGSAHHWARKLQGFGHTVKLMAPQFVKPYVKTNKNDAADAEAICEAVARPNMRFVPIKNVEQQSVLALHRVRQGFVKARTAQANQIRGLLGEFGLVIPQGLGHIAHRVPELIEDASNELPGAFRLLVQRLLDHLKALGAQIDELEAQIVKWHRQSEASRKLEQVPGVGPITASALVASLGDAKNFESGRQVAAWLGLVPRQHSSGGKQNLLGISKRGDTYLRTLLIHGARSVIYRAQQKPESCSWLDSMVSRRNKNIAAVALANKNARIVWALLAHDRQFRLDYTAVKAAT

SEQ ID NO: 241381 - protein, 392 aa, unidentified
MICVGIDVAKDKHDCFILSSEGEVLADVFTIPNNAEGFDTLFQIICRCTRPADKIKVGLEATGHYSYNILGFLLNKGLHTFVINPLHTNLYRKSLSLRKTKTDRVDARTIATMLMSDVDLKSYTDTSYHNEELKSLTRYRFDKVRERAKLKTSISRLVCILFPELEKLVPNLHMASVYALLSEFPGAKQIASAHLTRLTNLLYEASKGHYGREKAVEIRDAARNSIGSAMPAKSLELKHTIHLIGELDAEIEEIEEEINSIMDAVHSPITTIPGIGSRMGAMILAEVGDFSNFDSPDKILAYAGLSPSTYQSGQLTNCYSHMEKRGSRYLRYAIFNATKYVCIHDPTFAAYLAKKRAEGKHYNVAISHAAKKLVRLIYAMEKTQQPYRPAST

SEQ ID NO: 241382 - protein, 406 aa, unidentified
MKVLYERCCGVDVHKKSITACTITPEGKEIRTFGTMTDELLEFVNWLKEKGVTHVAMESTSVYWKPLYNLLELEQIETLVVNAQHIKAVPGRKTDMKDAEWIANLLRHGLLKGSYIPDRAQRELRELVRYRRSLIEERARELNRIQKVLEGANIKLSSVVSDINGASARKMIRALIEGKNDPMVIAQLAKGKLKQKVEELQRALHGVIGPHQRMMLAEQWRHVEYLDEAIARLDQEIEERTRPFEEALELLDTIPGVGRQSAEQILAEIGTDMSRFASASHLASWAGMAPGNYESAGKRLSSRTRKGNKKLRACLVECARAAARKKDTYLSAKYHRIAARRGANRASMAVGRTILEIIYYLLTRKEPYKELGADYWDRQREAKIVRQTVKKLEGLGYEVKLEKVGA

SEQ ID NO: 241383 - protein, 353 aa, unidentified
MTSTKYIGMDVHKESISIAVRNEAGKIVMECVIETKANIILDFIHGLRGELHVTFEEGTWATWLYDLLKPHVTKLVVCDPRKNSRQGNKNDQIDARELADRLYMNKLSSVYHGGAGVRTLKELARSYLTISKDLARVMSRVKAIYRSWGIPCAGKQVYAPRHRAEWLAKITEVGVLRRAEFYYQQLDALRPLRHEVRRELLAESKKHPATKLLCQIPSIGPIRAALLIALIQTPHRFRTKRPFWKYSGFAIEMHSSADYRAVKGQLQKSKKQVSVRGLNRDCNHDLKNLFKSAATIASVKPGPFQEFYAALVAKGMRPEMARLTLARKIATIVLIVWKRGVSFDAQHLKPQTV

SEQ ID NO: 241384 - protein, 351 aa, unidentified
MLIIGCDFHPGFQQVAIFDNRTGEIEEKRLQHRQEAERFYRSLSSPVRVGMEACGHYPWFERLLEELGFELWMGDAAVIRSSVVRRQKTDRRDAEHILRLLTEERFPRIWVPSLEVRDVRQLLVHRHKQVQTRTRTKNQLQAMALSQGVQKKWKLWTKAGRTELEQLPLLPYAADRRQQLLQALDGLEAGIAELNRRVDEEVRKRPEAVRLTTHPGVGPVTALAMVLTLGPAERFASGKEVGSYFGLIPQEDSSGGKQRLGRISKQGSSFLRFLLVEAGQSAARYDPQLKRFYRRLAARKNHGVAKVAVARKLATRLYLMLREQWTYAQLWQAVMLVSPSHSVVEHQKPTA

SEQ ID NO: 241385 - protein, 401 aa, unidentified
MLKIVYPNCCGIDVHKTFVVAVIAITNNQGITEYHRKRFSTFTNGLTQLRDWLEYYSCFDVCMESTGKYWIPVFNILEEQTNVCLAHPKYVKAIRGKKTDKKDAQWIADLFKHDLVASSFIPPLKIRQLRDLFRYRMKLTQLQVGEKNRYQNCLTWSNLQIASVVSDVFGKSAQAIIKSILDNPQDKPNIEQLVHKRMKNKVQDLEIAMEGALTPEQAEKIRVIKAHYDALAICKEDLEQMIREMGQDYQHQVKPIQTVPGFKEDLSALRIISEIGCDMTVFDSAAKLCSWAGLVPANNESAGKKFSTRISKGGKYLKPFLVQVANAVVKSDKHPELRNKYLKLKKRRGHRKAISAICRRLLVSVYQVLRKQEDYNPVLQGLTEIRNPDKTMSVQDAVRFA

SEQ ID NO: 241386 - protein, 338 aa, unidentified
METYAGIDLHSSNNFIGVINDKDKILYGKRHANRLDDVLRALDPFKDSLQGVVVESTFNWYWLVDGLQEHGYSLHLANPSAIQQYEGLKHTDDPWDSFWLAHMYRLGILPEGYIYPKEHRAVRDLLRRRLLFVRHSTAHILSLQSMISRNLGFKMSNNELKKLKPADIESLFDCSNLVFMANNSLAAIEFLKKITKGIEKKVKSQVKLRKEFEMLLTIPGIGNILGLTINLEVGNIGRFPKVGDYSSYCRCVGSKRLSNGKKKGENNKKNGNKYLAWAYVEAAQFARRYCVKAQSFYQSKEAKTKPVVAIKALSNKLSKASYYIMRDQVAFDEEKLFG

SEQ ID NO: 241387 - protein, 473 aa, unidentified
MAAREKNAEDGAGPGEGGDGAEVAEERTEVVVYAAAIDVAKGFGMVCTRVPGSRPDRKRQAVWRVEATYHAVVALMDHLRCEGIQRLVLESTSDYWRIWYYLAEAAGLEAWLVNAKDVKHLPGRGKSDRQDCVWLCKLNERGMLRRSFVPPQATRDLRALTRTRSRLAQDQARHQSRVEKILEDALLKISVVISDLFGASGRRFLDALVAGERSPRALAALGDARLKATPEQLADALTGRFRDIHAFEIGMHLRLIDTINGEIASLDDQIQQQLACIPRVAPACCGCGLIGGGHAPGCASQGTPVPGLVERLDEITGVGVCNAQVLIAELGTDTTVFPTPGHAAAWSRLTPRTRQSGTSARPGRTGKGNPYLRAALGQCVMAAAKTDTRLGEQYRRIARRRGKQKAIVAVSRVICEIAWILITDPGARFTDPGPGYYRPRSPARQTRSKIREIERLNPGMKVTLTPIEPATAA

SEQ ID NO: 241388 - protein, 389 aa, unidentified
MIYVGIDVAKDKHDCCILGSEADKLFPVFTIPNNKAGFDELYEKMFSVTDDKTKIKVGLEATGHYSLNLLGSLIDKGLPTCVINPLHTNLYRKGLSLRKTKTDKVDARSIAMMLMTNKTLKPYSDISYHNEELKSLTRYRFDKVQERAKLKSSVARLVNILFPELEKLVPSLHMASVYSLLSKLPGASYITECHLTHLKNLLETASKGHYGRDMAITLRNTARDSIGSVIPAKSMELKHTIHLIKVMTEEIDEIEDSIKSIMDTCNSPIMTIPGISYRMGAMILAEIGDFTRFNYADQILAFAGLSPSTYQSGQLDSSYSHMEKRGSRYLRYALFNAAKFVCKWDENFGAYLSKKIGEGKHYNVAIGHATKKLVRTIYRMELTGEAYRR

SEQ ID NO: 241389 - protein, 335 aa, unidentified
MKHYAGLHLSMETTHVCVVDADGRKIGAQCVESTPEAIATALEQYGPVERAVIETGRMTPSIALGLRELGVAIICINARQAHQSLKAMKANKTDPHDAAGLAQLARTGFYKEVHVKSPVAHGVRSVITARGHLVEARVRLDNTIRGLCATFGIRLGIGQGERFLARMQAAAAVPGLGEAVASLLRAREGLVAEIGQLDRQLKAISTASPVSQALMSIPGVGVQTSAAFAAAVDDASWFKRSRTAGAYFGLVPRRHQSGELDWTGRITKQGDSTVRKLLYEAANSILTRTKQSFALKTWALKIAKRRGLRKARVALARRLAVIMHAMLRDGTLFEA

SEQ ID NO: 241390 - protein, 390 aa, unidentified
MIYVGIDIAKLNHFASAISSDGEVLIEPFKFTNDGDGFQMLVSKLDSLDAEPDSIIIGLESTAHYGDNLVRYLVAENFQVCVLNPIKTSTMRKNNIRKTKTDKVDTYIIAKTLMMQDSYRFITFYDLDLMDLKAMGRFYQKTIKQRTRLKIQLTAYVDEVFPELQYFFKSGLHQKSVYALLKEAPTPEAIASMHMTHLASLLVKTSHGHFTKEKAKELRVLARKSVGASDSALSIQITHTIAQIELLDSQLNKIEEEMTEIMKFNDSVIMTIPGIGYINGGMILGEIGDIHRFSSPGKLLAFAGLDPSVYQSGNFQARRTKMSKRGSKVLRYALINAAHNVVKNNATFKAYYDAKMAEGRTHYNALGHCAGKLVRVIWKMMTYDLEFNLD

SEQ ID NO: 241391 - protein, 402 aa, unidentified
MISVGVDVSKGKSTVAALKADGEVAHAPFDVEHTSSSLMNLCNWILTREDEVHVIMEATGRYYLPILMALAESGIWVSVINPLKMKEFTTGINFRKVKTDKADAWKIAQYGIIHWAELAEYRVDAPVYQALRTLNRQYQHYMGIHVSQILFLDKLLDDAFPGITGLLKHDSAAFGKDKLSDFVKVFWHTDCVRKHREEAFVRRYNSWAKKKGYHQSECKARKIFALAQNGIPVVSSTSPYMRAGVMDAVRILRETDHTLETILARMAELAQDTEEYKVAVEFSGIANKLAVQMVAEIGDMSKFRNKKCLVAFAGIDSPPHESGQYRGTKRHISKRGSIILRKVGYQAMKCMKSTKNDDCAVYKYMLKKEQEGKPKKVARIAGLNKFLRIYYARVMELKQQSM

SEQ ID NO: 241392 - protein, 414 aa, unidentified
MESLYTCCAGLDVHKQTVVACLLRPDGDGERTEIQTFGTATASLEDLRDWLRAAGCTHVAMEATGSFWKPVHNILDGHVEILVVNASHMHALPGRKTDVRDAEWIATLLKHGLLRASFIPSREQRALRDLTRTRTSLTDERSAAINRIQQVLEDANIKVAGVATDIMGKSGRDILAALLEGAMSPTEMAELARGRMRSKREALEKALRGRMSDHHRMLIALHLEHIDLLDEQIERLSAEIAGRLRPHEAALLRLETIPGVGRRTAEILAAEMGLDMSRFPTAGHLASWAGMCPGVHESAGKRKSGKRRAGNKALRRALTEAAQAAARTKKADRTYLRGQYRRLVVRCGKKKAAVAVGHTILRIAHHLLREEETYQEGVLVQLDEHRRARVQRRALDQLTALGYDVTITPKAPAA

SEQ ID NO: 241393 - protein, 491 aa, unidentified
MRPVNELGLIAIRGYFTDRPQRRMMDPFPRGILAKHSPAVGRHRERPCILSYRRRRRLTRYDLQPGPAKPKTTMKNDDYAALVALDWGDKTHAFARQIAGAEDMERGSMEATPEALHAWLEQLRESCGGRPVALAVEAGRNALLHALLEHPWLTVYPVHPATSARFRKAFTPSGAKDDGPDAVVILIRLRLHRAQLEPLVLDTPATRELAALVAARRRLVDQRTRTANQLGSVLKSYFPQALTLAGDDLTKPLARAFLRRFPELAVLQKARPATLSAFYREHHGRSAERIAERLDLAARARPLIQDRAVIAPALLEVALLVDLLEVYAGHMVLLEARIAEVFAAHPRAELFATLPGAGPALAPRLLVAFGDLSARYPSAASLQKYAGVAPVREKSGRQTWIHWRWAAPKFLRQSFVEWAGQTVPRCAWAQAYYHQQEQAGKAHHAILRALAFKWIRILWRCWHDQKPYDEQHYLAALHRHGSPLATALQIT

SEQ ID NO: 241394 - protein, 430 aa, unidentified
MKSNTQNAKIEAITEKTLVLGIDVGSETHYARAFDYRGVEYSKKPFKFSNTEAGFVTFKAWVLDIKEKHGKDKVIPGMEPTGHYWFNLGKFLQDNEMKPVLVNPHHVKKSKELDDNHPTKNDRKDPKVIAGLVREGRYMIPYLPDGVYADLRTASNIRFQLQAELTRIQNRINRWFNIYFPEYKTVYGKPDAKSGILILKEAPLPEDILTLSIDGVNQIWRDAKLRAVGKARAKTLIEAAEHSVGSKEGAVSARMEIRMLLEDYESRNTRLQEVMVLIEELVKQIPMAEKLLGIKGVGIRTVSGFLAEVGDISRFSNPKELQKLAGLALVENSSGKHKGETTISRRGRKRLRYLLFEVAMSLVAKNPEFRELHNYYTTRRLNPLKKMQSLMAIAAKLLRVFYAILTKGVGYDPKKMVNDIRRPAAYAQAA

SEQ ID NO: 241395 - protein, 346 aa, unidentified
MMLIGCDYHPSWQQISWLDTATGETGEKKLEHASGEAEKFYRGLPGPALIGMESTGNCQWFVEMATTAGHDVWIGDAAKIRASDVRQQKHDRRDAALILKLLMEGRFPRIWTPSGEQKDLRQLLIHRYKLVRIRAQVKNELQHLAMNQGVTKKRKLWSKAGEKVLRELPLKPWASRRREDLFKVREMLNGQVDLLDQAVVEAAEKNEKARLLMTQPGVGPITSMAFVLTMGDVNRFQRGKQVASYLGLIPREYSSGGHRRYGPISKQGSRFMRMLLVEAAQNAVRYDPGFRNEYLHRCHTKAKGVAKVAAARKLAIRLYWMLCTKTGYPEVVRVESSSRVPLVSAS

SEQ ID NO: 241396 - protein, 320 aa, unidentified
MTQTIEAYIIGVDVSKNTLDIYVSATDQSCSIANDSESIEHWLARQVGPIRLAIEPTNTYHLAIATAAHVRGHQVYLIDPYRLAHYREGVGQRVKADHQDAQLLARYLQREIGELRVWTPPKQGPQRFWHLLKRRASLVQTVVRMKQSLTDLGALQADVDALIKQAQQTIRKIDQALRAQAKALGWATQVRRCQSIPGVGPLTALAMVATYHRGQFRNDDAFIAFMGMDVRVRESGLYRGRRKLSKKGDPELRRLLFNAAMQGRRNAHWEPYYLALRERGLSSTAAFVALGRKLARLCFVLLRKEADFDPNFCSRGCMAS

SEQ ID NO: 241397 - protein, 327 aa, unidentified
MMFIGIDISKEKIDLSWLRDQLTNKIKTKVFKNKHQDFVTIEKWLLNTTKSAANELVITLEPTGVYHEALMYFLHEQGFNIILANPGKAKKYADALNIIHKTDKSDATMLAHYGCAKHAVVSYWQPDALEVRELKALIRRLDALESNRQREANRLEASEFSNVSARVCQSIKVTIAFLDDEIKQLKSDIDNHIDNEPDLKRNRKLLESIPGIGPVLSRELTYLFAAKKFNKAKEAAAYCGLIPRHNESGKLKGRTSISKLGPARIRCKLYMAAIVAGQWNKTIKRHKLTLINNGKTPMQAVCANMRKLIHICFGVIKNQEAFKLQES

SEQ ID NO: 241398 - protein, 381 aa, unidentified
MYSSAYLLFSHTSQSLIELAHYLGSLEGSTKIVMECTGRYHEPMLKALYEAGLFVSVVNPHLIKNFGNNSLRRVKSDPADARRIARYTLDNWAELRQYSGMDNTRTQLKTLNSQFSFFMKQKVAAKANLIALLDNTYPGVNKLFDSPPREDGSEKWVDYAYSFWHVDCVRRIGLKTFTERYRAFCRKHHYIFQPDKPEKLFHASKELVAVFTKEKTYKLLIQQSIQQLNLASGHVERLRQEMNALASTLPEYSTVMGIYGVGKTYGPQLIAEIGDVSRFTHREALTAFAGVDPGVDESGQHKSKSNRASKVGSARLRKTLFQIMTTLLQNAPEDDPVYRFLDKKRAQGKPYYVYMTAGANKFLRIYYGKVKECLRNLEQAE

SEQ ID NO: 241399 - protein, 366 aa, unidentified
MDEITYVGLDAHAETTAIAVAESGGAAPRFIGTAGAKLAELAKVLGKLGKPSQLKVVYEAGPCGFAMVRRLRQAGYHCEVVAPSKIPRKRGDRVKTDRRDALSLAGLARAAQLTYVTVPDERDEAMRDLSRARIDAVRARLKARQQLKALLLRHDRRYTGKSSWTAAHERYLAHVSFAHRAQEIAFVEYRRGIAEAQARVELLTQALSQELVGWRMRPLVQALMTLRGVDELSATSLVAELGEMKRFPHPRELMGYLGLVPSEYSSGQKRALGAITKTGNTHARRLLIEAAWNYRFPARISLPLQKRQEGQSAAIRDIAWRAQLRLTQRYRRLTARGLQHNKVCVAIARELAGFVWSIGQQVTVGC

SEQ ID NO: 241400 - protein, 411 aa, unidentified
MEEILCGIDWASDHHDVALIDVEGIKLGRRRISDDAVGLGELTGMFAGHGAGPGTVKIAIETERGLLVASLRAAGYDIYPVNPKAVDRYRDRHHLARGKSDAADAMVLAHILRTDAHLHRPLPADSPAARAIEVLARAHQDLVWSRQHEVNRLRSLLAGYYPAALAAFGDLTTRTAMTVLAAAPTPAAAAQLTTSDLLDLLAAAGRGRRRADARRLAEVFAAPQMRQPAAVEQAMGDAATAVITTITAMNTAVTALAQRIDASFEQHPDAAIYHSMPALGPILSARVLGEFGDDRTRWPDPASRRAYAGSAPITRASGKKRVVLARSIRNRRLYDAAHWWAFAALSVSPGARAYYDQRRAAGDGHQAALRRLASKLIGQLHHCLQHRVPYDEATAWTRHQEQSQPAPPAAA

SEQ ID NO: 241401 - protein, 381 aa, unidentified
MKKNSIAKLQVTKSQLRRKAAKQRLTVGLDLGDRTSRYCILDEAGEKAGENQLPTSRAGMDAVFAKMAASRVALEVGTHSPWVSRQLAGMGHEVMVANPRKVRLISQSVKKNDRMDAEQLARLARVDPKLLSPIRHRGAEVQADLAVIRARAGLVECRTGLINTARGLVKPMGERLKKCDADQVREALGEGLSEEAQNVIGPLLKSVEEITKQIQVYEQKIEEIEKRYPETKVLKQVSGVGRLVALTFVLTVEDPERFEHSRDIGPYLGLTRKQRDSGESQPELGISKAGDELLRWLLVQAAHCILRRGAPESDLREWGLRKVQAVGGKKGGKTRKKKAAVGVARKLAVLLHRLWVTGEVYDPQYNRKARETAKGKRKAAA

SEQ ID NO: 241402 - protein, 406 aa, unidentified
MKQIVSVGIDVSKGKSTVCAMIHPNTIIKESFEVLHTAEEMSMLADYIGSLDGEIRIVMESTGHYHLPVAQFLYQKGFFVCVENAYIIRQFSRIMLHGAKTDPLDAKKLAKYGLAYWSELKPYKFHPSCYTELSLLSKQYQTYIKLLIAAKQNVIHLMDEMLPGFKEALDTASSVQFSKVKYVDFAKEFYHVDMIKSMGKEIFRENYKQWCKEKGYRFQSEKADELFHLAEDGIPTLPTEFPSTRLCMEAATEQVSQLGYALEQILSQMQNLAKTLPEYQTIRQMGGMGEKLCVRFIADIGDVRRFHNGKALVAYAGIDAPPYQSGQYTGTKRRISKRGNSALRKTGYEVMKSLKSHPPKTDTCVYDFIIKKENEGKSKKQAKIAGLNKFLQIYYARVMEIYKNIA

SEQ ID NO: 241403 - protein, 346 aa, unidentified
MMIIGCDFHPSWQQVNWVDSESGETGEQKLVHAEEQAKTFYQQLTGPALIGMEATGNSQWFIELVQELGHVILIGDAAQIRASYVRKQKTDKRDAAHMLKLLLENRFPTLWTPDREQRDLRQLVLHRHKLVEIRSRVKNELQHLAMNKGMQKKRTLWSQAGQKMLRELPLKPWAACRREDLLGLLGMLNQQVGTLDAAVQKAAEENPQAKLLMTQPGVGPNTALAFVLTIGDVSRFARGKQVASYLGLIPREESSGGRQKLGAISKQGNRLVRSLLVEAAQIAVRFDPGYRKQYLHRCHQKPKGVAKVAAARKLAVRLYWMLRTQVAYPEIVRIESSSRVALVGAS

SEQ ID NO: 241404 - protein, 370 aa, unidentified
MGSIAFIGMDVHKATIAVAVAEGVRGGEVRQLGIFPNRAEVVTKLAGRLAGDGRELSFCYEAGPCGYGLQRQLEGLGHACVVVAPSLIPSKPGDRVKTDRRDALSLAKLHRAGELTAVWVPDAAHEAMRDLVRARATAVRVLGKARQHLQGLLLRHGRIYAGRTTWTLAYRRWLTTLRFAHPAQQIVLQDYIHAVQDAERRVARLAEQITDLLPSWSLAPVVRALQAMRGVGQIVAVTVAAEVGDFSRFANPRQLMAYLGLVPSERSSGGTVRRGGITKAGNALARRVLIEGAWTYRMQARVSRKLHDRIEQLPSVIRDIAWKAQLRLCWRYRRLVAAGKAKVVVTTAIAREMVGFIWAIARQVQLQPTG

SEQ ID NO: 241405 - protein, 338 aa, unidentified
MKVTTVGLDIAKDVFQVYGVDANGQVVAKNRLARNKLLDWFGKVGSALVGMEACGSAHHWARELSKQGHEVRLISPQFVRPFRKGCKNDPNDAEAIYEALSRPSMRFVSIKTIDEQAVLAVHRVRERLVAKRTALINQIRSLLAEFGVLLPNGAAQVRRTVSEALEVNATRLPALLREIVADLREELEATEDRLREYEGRIDRIFQGTAMCKKLAALEGVGPVTATALVASVGRPDDFKNGRQFAAWLGLTPRQHSSGGRQCLMGITKRGDRYLRTLLIHGARSALNAGRRKTDSKSLWAERLRLRRGNNIAATALAAKNARILWALMTRADEYRLST

SEQ ID NO: 241406 - protein, 400 aa, unidentified
MLSIGIDVSKGKSTVCGMKPGGEIVYTPFEIQHTREGMSELVSLLHNSGEEVRAVLESTGSYHCPVVAALLENGIFVSVVNSLRMKRFCSQSIRKVKTDRIDAMQIALYGLAYWQELQPTRLPEDTYRELQLLARQYYQMTSILIKAKVDFNALCDQVLPGMQELMNDHAGRHKLSDFVLRYRHTAHILEMGETRFRKDYCKWAEKKGYRNRERMAALIFATAQNGIPVLPNAPSTQIVITEAIRVLHTVEASRDAILTQMQALAKTLPEYSLVREMPCIGNTLAPRLIAEIGDVRRFHSKRALIAYAGIDAPPYQSGKFCANNRHISKRGNRYLRKTGYEVMQSYVMHKPANDPIFTFIEKKRGEGKSGKLAMVAGLNKFLRIYYGKVTELYRSLPAIE

SEQ ID NO: 241407 - protein, 347 aa, unidentified
MYQDNVIALDLAKNVIQVCILDKQNEVKTNRELRRQQVLNWLAKQAPSIVAMEACGSAHYWAKQARALGHQPILLSARFVKKFVEGHKTDKNDALAIGISALQPNLKPVSIKSDDQLALQAMEKIRKHYQDTAIATSNLVRAIAFEFGIVIPKGEKAFRERLPDILEDAENGLPMMIREPLHQQYQFWISLKQQVRQAEKQLRVQLNTHEQCNELQKLDGVGPVNALNLYLALGTRGEAFKNGREAAACIGLTPKQHSSGGKVVMLGISRRIAKKQLRANLIQGALAKIKIVAKRAPRNTREVWMKQLIERRGLRRAAVALANKTVRMAWAMVHYQQPYQAPESVTI

SEQ ID NO: 241408 - protein, 412 aa, unidentified
METIVERAGALDVHKESVTACVRVFDASGERVEQVESFSTTVRGLLTLHDWLAAHAVTQVAMEATGVYWRPVWAILEDDFDCLLVNARHVKQVPGRKTDVQDAAWLCRLLEAGLLKRSFVPPKPIRTLRNLTRYRKAQIGERQREANRLHKILEDTGIKLDCVATDILGASGRAMLDALCRGTTDPAVLADLAKGRLRKKIPALQEALEGRFSSEHALVVSAILAHIDFLDEQIERLSDAVEEQIAPFAAAARLLCTIPGVKQRTAEVIIAEIGTDMTVFPTAGHLVSWAGLCPGHDESAGKRRSAHTRKGSKWLRTALLEAALAATHSNDTYLAAQYRRLKTRRGHRRASIAVCHSILAAAWHMLQTGETYNDAGGDYFTRLNPELQTRRLIKQLEALGHHVTLETQPEAA

SEQ ID NO: 241409 - protein, 412 aa, unidentified
MRVVHERCCGLDIHKKFVVACLLATESDGTVHKEVRTYSAMTNDLLALADWLRGEDCGPVVMESTGSYWRPVFNLLEEQCEVLVVNAYHAKAVPGRKTDVKDAEWLADLLRHGLLRASFIPAPAQRQLRDLTRYRIHLVDERARLINRLQTVLEDANSKLASVVSDVRGLSAREILQRLLEGETDAQALAELARGKLRAKRDALAQAVVGRLQEHHVFLLREQLAHLDYLDAAIARLDAELAARLAAEQEALALVQTIPGVARRTAEVLVAEIGTDLTRFPSAEHLASWAGMCPGNAESGGRRLSGRTRRGNAWVRRTLAEVANVVSRMKGTYLAAQYRRIAARRGKGRAVLAVGHSVLVAFYHMLTRHQAYRELGADYFDDRQRDQVQRRLVHRLERLGYAVTLEALTTSS

SEQ ID NO: 241410 - protein, 318 aa, unidentified
MLIHYIDIAKRNFVIAVSSLSKTKTETNNPKGIAHTIEYLKKHKVALVVTESTVGLEIPAAKAIRRAGIAVIIANPRQTHQFAQSQPLTKTDAKDAKMPAFFAQMKAQKEDSQTMPYQPPTEAEEVLEALVNRRNQLVDMRTAEKNRLHQVHETQVESVKQLIAHFDRLIDELDKQIDNHTHTHFDGKAQVAEQIKGIGSITTATLMAMLPELGRLSHKRIASLVGIAPHPRESGETKFKSRCFGGRSAVRKALHMATVAATRFEPLIRDFYQRLLSEGKPYKAAVTACMRKLLTISNARMRDYFAENDTAENGIRTA

SEQ ID NO: 241411 - protein, 416 aa, unidentified
MKKRTYKTKKVNQINWGQLKERIAGEAVALAIDIAKVKQYAKLCNENNDVSELFRWKHPEETPAVLEAIKSLSCPVVVIVESTSTYGDAIRYQFSQLGFDIHQASAKRVHDAKEVYDGVPSLHDAKAATIIARFYQDGLTTPWRELSESERRLNALRREFDMHQGQYQRNQGRLEAFLSRHWPEVTYLLDLNSVALEHLLIKYGSVRQIASHAKEAALEMKKSSRSLLNTQKINQVIESAKTTLGVPCIEAERLNFQALAREMSHSRVQGKKAKKALEAEIDSDSELFEMGRLIGRVTTAVLLSFHLDPRNFSCAQAFQKAMGLNLKEKSSGRYVGQLKLTKRGSAKARQYFYFAALRLLQKDPVVKEWYLKKMNPKAKNKTVIALMRKLSKALWHIARGQAFDPTKLLSVPKKAA

SEQ ID NO: 241412 - protein, 421 aa, unidentified
MDNRWYHVNLSDWRSLIMFNAVGIDVSKGKSTVSVLQPGGTVVKKPFNVVHSSSSLNELSRFILHLDGQTRVVMECTGRYHEPILHALHDAGIFVSAVNPHLIKNFGSNSIRKVKSDPADSRKIARYALDNWASLRQYSDMDTTRTQLKTLNSQMDFFTKQKVAARTNLISLMDMTYPGVNSLFSSPARDDGSEKWLDYAESFWHVDCVRKIGLKAFTKRYQAFCKRNGYNFQPGKPEELYLASKELVAVYPKDKVYKDLIMTGIEQLKSTTQHVEHIRHEMDALASTLPEYETVLSMRGVGKTLGPQLMAEIGDITNYTHREALTAFAGVDPGVNESGSFRSKSNPASKCGSSRLRKTLFLIMTSLLQTSLADDRVYQFLDRKRSEGKPYLVYISAGANTFLRIYYGKVKACIAAQSKSE

SEQ ID NO: 241413 - protein, 461 aa, unidentified
MKNKYSNPKKKKLKKIALDEQWEKINPNAAGIDIGAREIFCCVPADRAKQSVRRFGTKTPDLEEMAQWLKDCRIETVAMEATGIYWIPSFQLLEKKAIKVVLVNPRQIKNVTGKKSDVMDCQWIQKLHTFGLLGGSFRPADPYCVARTYMRLRDDLVRGSSSQIQLMQKALHQMNVQLAHVLSDITGTSGLAIIEAIIAGQRDPIGLAELASKRVKSSKDEIAKALIGDWRQEHLYCLAQAHQMYLRYQIDIAQCEAKLAEELAKLPSKADPQCKPMPAKIDAKKQINEELRLQLYCKFGVDITAIEGIGPTVALTFLTEVGADLSAFPSEKHFCSWLGLCPDNRISGGRILSSRTRRVVNRMADVLRMAATTLKSSQTALGSFYRRMVARLGQAEGITAVAHKLARLLYSLIKYGHDYVRIGLAAYEMKNADRKFKTLTKMAQSMGFQLLQIKPLTPGVS

SEQ ID NO: 241414 - protein, 345 aa, unidentified
MDKIITIGMDIAKNVFQIHGVDVAGTVSLRRQLKRGEVLKFFSKQPPCLIGIEACGTSHHWARQITNLGHEVRLLQPAQVKAYVKPGKKNDAVDAEAICEAVSRPRLRTVPIKSEEQQGILILHRTRDLLVRQRTMLINALRGHMAEFGLVSGQGRGNFVKLLECLNGEEGAVIPQAAGTALRQIAGQINDADGRIVVLEKEIVARHRACEASRNLATIPGIGPIIASAIAAAVPDPSVFKTGRDFAAWLGLVPRQNSTGGKTSLGPITKTGDRYIRRLLVIGATGLIRYKRENVPGGLEWVTKLLAKKPVRLVTVALANKMARVAWAVLSSQEVYREKLGALPA

SEQ ID NO: 241415 - protein, 352 aa, unidentified
MQCIAFDSHKHYTWALVQDEAGKVLREQRINHTRGALQSFLEAFDPGTPVAVETIGNWYWISDEIEAAGMVPLLVNARRAKVMSGSINKTDKLDARGLNRLQRSGTLPTVWIPPRDLRDARELPRTRMVLVRQRTKLKNRIHANLAKYGLRTDGATDLFGVRGRQILSQCLEELPVQTRFATESLLDELDHLNAKIGELEERMHELFGEIEALEHIKTLPGVGFILGVVILTEVGDVARFPSASHLASYAGMTPRVHASGGRVRYGRTRPDVNHYLKWAYAEAANVSMMHRRRHPQRDVSRLYTRVKSRRGHQKAIGAVGRHLAEATYWMLTKHEPYRDPAVEQAEESKREA

SEQ ID NO: 241416 - protein, 304 aa, unidentified
MNGIGIDVSKRQLDIGTTDGETLQVSNNRSGFSELDVWLKKRPTRQIVLEATGGYEQPVLDFLHKAGHPVARANALRARKLAQGLGQIAKTDRLDAYALAQMAALVKLPPYQPLQSWQQKMREFVRARRQAIDALTIARQQQEMVLDRELRRLLQGNITRLQTLVERLGKQIVEQVGQQPQLKMLKSMKGVGPVLQAVLASYLPELGRITGKRIASLVGVAPMSHDSGTMRGKRSIHGGRAEIRQVLYMAAMSAMRHEPRLRDFYQSLRARGKEGKVAIVAVMRKMLVILNARVRDAESGLVPA

SEQ ID NO: 241417 - protein, 386 aa, unidentified
MGSKPDCPPVLRVLSRRSGRTAALPYPPPESGHYTTEEQSAEKGQDLVYYCGIDLHSNNNVLGVIDSSGNRLSIKKNPNDLETVKKVLRPFAANLEGVVVESTYNWYWLVDGLQEAGFKVHLANPAAIGQYSGLKHGDDETDTWWLAELLRLKLLKEGYVYPRSERAVRDLLRKRGQLVRMRTQNILSIQNLTCRNTGGRLSGSQVKQLTVEEVKELYKEETERGLAVICSVNVIKALEKQIETIEKKVKSKIKVSQPFQLLKTISGIGEILAMVIMLEAGDMSRFASVGNFSSYCRCVKSVRLSNNKKKGNGNRKNGNKYLAWAFMEAANYAIRYEPIIEKFYQRKSSKKGSVVARKAVAHKLARATYYVLRDQTPFDVERCFGC

SEQ ID NO: 241418 - protein, 369 aa, unidentified
MTFFIGVDLHKTQFTVHVRTEEESESLDQIRQYPTTPDGYAEFLARISRYKATGADVKIGVESTGNTRFFKNQVEKTGAEVTVINTLKFKVINESAKKTDKHDASTISEFLSKDMLPESYLCGKETENIRRLLKSRERLVRSTVGQKNEIHALLVSLGLSDELRCLQSKKGRQRILDTLESNNDYVLEAQSVKLMFEIIERIEESVKIIEKQLVELTKEDEMVNRLLTIRGCGKITAWTIRAYTEDISRFATAKKYAAFCGLVPWVQDSNETIHHGKITKRGPQELRTCFVQLVLGIRRCKDTSNWRMMQRYEYMKTNKGSGKSIVAAARKMAEIVWAMLSDKKDFDAQKMIGKYKPMSLAEEALTAMN

SEQ ID NO: 241419 - protein, 350 aa, unidentified
MDKVTTVGLDLAKQVMSVHAVDARGMLVMRKALRRDALLAWSATLPPCVMAMEACGGAHHWARELTRQGHTVRIIAAEFVKPFRKSGKNDANDAEAICTAVRQANMRFVAMKSVPQQAALCVHRLRQGLVEERTALINRLRGLLTEFGVVAPLSPEKLRRELRHCLDEEKSCLPPTVRQLVRDELAALDPLEQRITSYAEQIAAQVHDHPQARRLQGIAGVGPLTAAAVVATVGQPQEFRNGRQFAAWLGLVPKQHSTGGKTRLGRITRRGDAYLRTLLILGAKSALQAALRKPPALRHRLQRWIVDVFGRIGYHKTLAAIANKHARIIWALLVKGEDFDVQHLTAAVAA

SEQ ID NO: 241420 - protein, 327 aa, unidentified
MMFIGIDISKEKIDLSWLRDQLTNKIKTKVFKNKHQDFLEIEKWLLNTTKSVASELVITLEPTGVYHEALMYFLHEQGFNIILANTGKAKKYADALNIIHKTDKSDATMLAHYGCAKHAVVDYWQPEALEVRELKALIRRLDALESNRQREANRLEASEFSNVSARVRQSIKVTIAFLDDEIKQLKSDIDDHIDNEPGLKRNRKLLESIPGIGHVLSRELTYLFAAKKFNKAKEAAAYCGLIPRHNESGKLKGRTTISKLGPARIRCKLYMAAIVAGQWNKRIKRHKLTLINNGKTPMQTVCANMRKLIHICFGVIKNQEAFKLQVS

SEQ ID NO: 241421 - protein, 356 aa, unidentified
MLQGKTLDFSEQSIFCGIDMHKKSWSVCIRNDERELMKFSQDPSPQLLSERLKKYYPGARVMMAYEAGFGGYWAQQRLSEQGFNCRIVHAADIPQTDKDRRYKTDVVDCRKLALELTRGKLNFIHIPQQSTIALRSLVRSRGQLIKDQTRYKNRIISLLDFYGIKIPEGYKQTTHFSKRFMNWLELLALPHAIKVALNVKLQMLTHIRAQLLAVNKELKAVAKQEEYRSTIDLLMSIPSIGWLSALVIVSELEDIHRFKHFDNLSGYVGFKPDIYSSAEKKVVKGITGQCNHILRETLVECSWMAIGKDPALTQAYYAYKKRMHYNKAIIRIAKKLLNRIRYVLINRTPYVMGVVG

SEQ ID NO: 241422 - protein, 485 aa, unidentified
MKSKYKSEKNTNDKRNSRLSHPRVSSDLPKLNLNAAGIDVGSHSHYVAVPPGRDDGGCVREFKCYTSDLYAMGSWLKDCGIESVAMESTGVYWIPVFQVLESLGFEVTLVNPKYVKNVAGRKTDVSDCQWIQQLHTYGLLSASFRPDDEICVLRCYWRHRDMLVKYASSHIQHMQKALDLMNIHIHKAISDITGVTGMSIIRAILCGERNPVVLAEMRDPRIKCTEDELVEALQGDYRPEHLFTLGQALSLYDFYRQQIAECDRQIEACLTQMGTKWEAPQESSQANDANADDNSIAGKPKKKRIGGNAPTFDLHTHLITLCGGLDVTQIDGMNVVTGLTAISETGLDMSKWPSEKHFCSWLALSPNNRISGGKVLSASTRKVTSRAAYTFRMAAQSLHRSPTALGAFYRRIKGRLGAKAAITATAHKIARLYYNMLKYGKDYVDQGQDYYNKRYQDKLIKGLQRKAAAMGYQLVPDTRGAYGVT

SEQ ID NO: 241423 - protein, 408 aa, unidentified
MNAVGIDVSKGKSMVAALRPMGEVALLPQEFLHTEVGLEQMAYAIVALGEDTRVIMEATGRYHEPIAAALHEYGIYVCVLNPLFIKQSGGGSIRKVKTDKADAMKIAKYGLDNWVELREYTPMDTVRQQLKLCSRQYNLYMKTVVSLQNNLISLTDKTFPGVNELFSSPERADGHQKWVDFVMTFWHCDCICRVSEKAFTDRYQKWCKRKGYHFSTEKALDLYAGSCGHFTTLPKNDNTKLLITTAAQQLLAGKTTLAALRTEMTRLAKQLPEYDTVRAMYGVGETTAAQLMAEIGDVRRFPRRSSIVGFAGVDPAVDQSGKHSAKSVPTTKRGSPHLRKTLYQIVCTYLKRSPADEPVYQFLDKKRAEGKPYFVYMTAAQNKFLRIYYARVKECLEAFDARQAIPQD

SEQ ID NO: 241424 - protein, 342 aa, unidentified
MKDTIIGVDLAKRVFQVHGASIAGEVKFRKKLTREQFRLFIAQQPACIVVFEACGSANYWAREVEKLGHEPKLIAPQYVRPFVKRQKNDATDAEAIVIAARQPEMRFVLPKTAEQQAKSVLFRNRERLVRQRTELVSALRSALYEYGHVFPIGLAHLKRMDALVRGPDCDLPYLIVTECQELLSQIAETTEKITTKTKRLKALADETDTARRLQTMPGVGPLTALAVEAFAPQMGQFRCGRDFSAWLGLVPRRHSSGGKERLGRVSKAGQTDIRRLLIIGAMTRILAHARYKGPAESWLGRMLAKKPKMLVGIALANKMARQLWAMLTRNEDYRDPAMAAAM

SEQ ID NO: 241425 - protein, 384 aa, unidentified
MTTEPAYNFMLRFVGVDLHKNNFTACFYRQGKCTFQTLPVSETGLNNFRKKLSSKDHVAVEATGNSRFFRKAIEPYVASVSLVPTSGFAVIKKSTKKTDKNDAALLAFFLSKNMLPTVRPRRDEYQHLLSLIKLRQHFLIMDRTLLNVLNGFLNSEGVIVPKNKLKTISGFKKYTEAREWPQIAKEGVSSIKIGHEFFKKIIKNVESEINMYSQLLPGYQDLRNILGIGEMSAPIFLCTIDDISNFLAPPKLASYFGMVPSVRISNGKRESGRMTKRGSKIARSAIIQCAWVRVRTDKNYKKYYERHRKNKGSKRAIVVCARKLLNEVYFTLMNRYFAEKATRRRTVKKQIATSKRLPLIKKNVKGLKRTKTAAKKIKKALKKA

SEQ ID NO: 241426 - protein, 355 aa, unidentified
MKRTTKYVGLDVHQSATVATVRQEDGRVIARSVIPTEELAVVEFFRGMRGSIHVTFEEGTQAQWLHDLLLPRVDRVVVCNRRKKDRLSNKGDQVDADELSELLRRGGLRPVYHGSPHYATLRELTRTYQNVVDDATRVMQRLKALFRARAIKAPGKRVYSPAYRQEWLAKLPNPGVRFRAETLYAEFDVLRQIRPKVKDAMIAEARRDPAWSLLHTIPFFGPVRVSLLLATLRTPWRFRTKRNLWSYCGLAVVTHSSSDYTFVDGRPARRRRGPMTRGLNRHHNRTLKSVFKGAATAATGRPGPLQDFYLELLGRGMREELARVTLARKLAALTLHIWKTGEPFDPTKLTLQAHE

SEQ ID NO: 241427 - protein, 370 aa, unidentified
MRRQEAALARRDTLAADMKNKIPAITIGLDLGDKKHAICVLNQAGEIVEERSITNHRESLRRLSQKYPGSRIAMEVGQHSPWISRFFEALGHEVLVANPRKLSVIYTSTRKSDQSDAYMIARLARVDPTLLHPIQHSTEEAQRDLLQVKLRDNLVRQRVDIISSVRFTLKSMGVRVASPNTDCFAKRCRKTLQTQDAVLLAMCEPSLRVVDELTKSIRELERRIEELCVESYPETEYLLQIAGVGPITALTFVLTIGDPMRFESMRDVAPYLGLVPKRDQSGETDKQLGISKAGDAYLRRLLVSAAQYILGPFGPDCDLKRHGLHLAARGGRGAKKKAVVAVARKLAVLMLTLWYNEDIYEPLRNDSLAA

SEQ ID NO: 241428 - protein, 330 aa, unidentified
MKVRYIAGRESSSVDVLGIDISKADFHGCLIQGSAFAKHSFPNTPAGYQQVRKWLGNRGCTAVHVCMEATGAYWEGLATALFEAGLQVSVVNPSRTVHFARSQLRRTKTDSVDAEMIAQFCQTQRPAHWSPPTEEIRELRALLTYRDQLVDDRLRLKQMANQIHLNQALQEVHDRQIDALNESVKAVEQQLRAVVKAHQRLNEQVRRLSAVDGIGFLTATTLIAKLPVERLRDGKAAAAYVGLTPREHQSGTSINGKPRICKTGNASLRSNLYMPAVVASGRNAILKEFSERLIARGKHKKVAIVAVMRKLVVLAFSILKETPTATLAHA

SEQ ID NO: 241429 - protein, 409 aa, unidentified
MERVSERVAGLDVHKKSVTGCVRVPGPAGDRRQEVQTFGTTAAALLALRDWLSAHGVTHVAMESTGVYWKPVYYVLEELFTCLLVNAAHVSKVPGRKTDVRDCEWLAQLLEHGLLRGSFVPPVAIRELRDLTRYRAVLVQDRTREANRLHKVLTDAGIQLASVASNVLGASGRAMLTALVEGTTDPTVLADLALGKLRRKLPALREALVGRFRKHHALLVSQLLAHLDYLDEALEVLTAQIEEALGPFANEAARLDAIPGVGPRTAQILIAELGVDMRQFPTARHLASWAGLCPGTHESAGKRRAVRTGKGNRWLRAALIEAALAAINVRESALAGRYRRLVRRCGHKKAIVAVAHKMLTTAFLLLADGRAYQEPGAGYFDAQRKDREVRRALHVLAHHGYRISLEPAA

SEQ ID NO: 241430 - protein, 317 aa, unidentified
MTESVRVNVGIDVSKDFLDVHVGDVALRRVPNRSSGLSVLKRILSRYTVSLVLLESTGGYENLAVTYLQSLGYDVCVINPRQARDFARSMGRLAKTDKIDAQILCRLADVIDTSPERARFVKPLTDERRQRLVSMVRRRRQLCDLMIAERNRRAKTDAYGSESISTVLDFLTDEVARIDRDIAAHVGSCFSDISSLLQTFTGIGPVTASTLLGELPELGKLNRRQITALVGVAPFNRDSGYMRGRRRISGGRSGVRNVLFMAALSAVRFNPVLKAFFSRLVAAGKPKKVALVACMRRMVCILNAMLRDGSRFEVALG

SEQ ID NO: 241431 - protein, 342 aa, unidentified
MNVTTIGLDIAKSVFHLVGAEASGKQVLRKRLRRSKVLEYFGNLPPRVVGIEACGGAQYWARELTRLGHDARLINPKFVKRFLYGNKNDYNDAAALCEAVVHPETRLVPVKTPAQQDVQAVHRLRSGALKDRVALVNRARGLLGEHGIVMPKSVGVFRRRVPELLEDAENGLSELFRGLLAPLYEQVQALDALIAGYDKRLAQLTQADESCQRLDEVPGFGAIVCTALVASVGDGRAFKNGRHLSASLGLVPRQHTTGGKPRLLGISKRGDKYVRALVIHGARSVVHHAKNKDDALSRWINRIRSESGTNVAAVALANKLVRIAWVILRRGERYRPALAARA

SEQ ID NO: 241432 - protein, 336 aa, unidentified
MTLYCGIDLHSTNHLVVVIDDEDRRVLEKRLVNDVSITVNTLAPYRDQLAGIAVESTFNWYWLIDGLEDAGFVPCLANPAAIKQYEGLKYTDDPYDAFFLAHLMRLGILPTGHIYPREQRGVRDVLRRRLSMVQMASRLLLAVQSQIWRSTGTNISNNLIRRPDFELPLPSGPVLEGAVAQWRLFQQTQVEIHGLEKLALDRYQGEENYQLLQTVRGIGVILGLTIGLETGSIKRFKKAGNYASYCRVVKSERISNGKKKGQNNRKAGNKYLSWAFHEAAHFAVRFEPKVQRFYESKRQKKGNNIVAIRAVAHKLARAVFHMLKKHEPFDVDRAFG

SEQ ID NO: 241433 - protein, 344 aa, unidentified
MGEVSTIGLDIAKAVFQVHGVDGAGAVVIRKRISRSKMLEFFADLPPCLVGIEACPSAHHWGRELQGLGHTVKLMPPSYVKAYLKRSKNDANDAAAICEAVTRPSMRFVPIKTKEQQTALMLHRTRQLLVRQRTMLSNALRGHLAELGIVSAKGRNGTGELLRIIADGADNQVSPAVRGILDVLARQYSAIGTEIGSIDKSILVLHRSCEASRRLAEIPGIGPIVATALVAEIGDWKNFSSGRNLAAWIGLVPKQHTTGGKDRLGSITKQGNRYLRWLLVVGAMAVIRYARKHGTHKRPWLGRLMERRPTKVAAVALANKIARMAWAIMVHGDRYKEPKLLLAA

SEQ ID NO: 241434 - protein, 413 aa, unidentified
MEVLYPRCCGLDVHKSSITACALLREQGRIRTERRRFTTMTQDLGNLVAWLLELQVTHVAIESTGVYWKPVWNILEGHFTIILANAQHVKNVPGRKTDAKDSEWIAELLQHGLLRNSYVPPEAIRDLRDLTRGRATLSQEASRIANRIQKVLEDANIKLSGVASNVLGKSGRAMLDAIVVGQLDPEQLADLALGHLRAKIPQLRLALSGKVREHHRFLLNRLLLQLRFIENEIDVLDQHLEQLGRQDPVLAAAVARWTTIPGVDRVAAWSLAAEIGVAMEQFPTAAHLASWAGLCPGNCESAGKHLSGKRRKGSPWLGRMACQCAWAAARTKNTYLSVQFRRLAAKRGKKPAIVAVAHSILVIAYYLQKKESEYHDLGSNYFDRLNADGLRRYLVRRLEALGNKVTLEAASAA

SEQ ID NO: 241435 - protein, 342 aa, unidentified
MKITTVGIDLAKNVMQVHGVDERSKTVLKKQLKRAQVVAFFANLAPCRIGMEACGSAHHWARKLESYGHTVKLMAPQYVKPYVKTNKNDAADAEAICEAVGRQNMRFVPMKNAEQQAVLSLHRARQGFVKARTAQANQIRGLLTEYGIVIPQGIGHIAKRLPEIMEDGENDLPGAFRLLLQRLGDHLKELDRQVGELEVQIQTWHRESAASRKLERIPGIGPITASALVASIGDAKSFKNGRQLAAWLGLVPRQHSTGGKPTLLGISKRGDTYLRTLLIHGARAVIRVAERKPNHAESWLARLMGRRNKNVAAVALANKNARTVWALLAHEWNYEADYGRAN

SEQ ID NO: 241436 - protein, 320 aa, unidentified
MEQEPTYIGIDVAKAHADVAVHPTGLRWQAPYTEGGVQELISRVEALQPTLVLLEASGGLEIPLVAALANAHLPVVVVNPRQVRDFAKATGRLAKTDSLDAQVLAHFAEAVRPEPRPIPDAEARALASLLARRRQLVAMLVAEKNRLGKALPSVRSRIQTHIRWLERELEDTDDDLQTMLRQSPLWCEKENLLRSVPGVGPQLALSLLAYLPELGTLDRKRIAALVGVAPFNRDSGPFRGRRKVWGGRVRVRTALYMATLVASRHNPVIRAFYQRLLAAEKPKKVALTACMRKLLTILNAILKNSTPWQAAIPQITGPCS

SEQ ID NO: 241437 - protein, 416 aa, unidentified
MTEQWAWFVGVDWGSEEHAICVVDAAGTVRGERRVVHSAVAVADAIAWLRTLTGVAPPALAVAIETPRGVLVDTFLEQGFPVFAINPKQLDRLRDRLTPAGAKDDRRDAHVLGDGLRTDARAFRPVTPDDPQIIHLRELCRIEEELQAQHRRLANRLREQLVRIDAPWLTLSPGADDPWLWTVLRDAPDPAAWARLKRRALVAVLRQHRIRRWTADDVIAALQQPRLAGAAGVADAVALRIASLVPQLLLVHEQHTATHRRLERALEGLAEGADDEPREHRDVEILRSLPGAGRMVTATMLTEAAAAIGTRDYSMLRTQSGTAPVTKRSGKRLYTVQMRYACKPRLRNALYYWALASLTLDAAARVYYDGLRRRGATHARALRSVADRWLRILVAMLKSGRVYNPLQPRAAQAATA

SEQ ID NO: 241438 - protein, 443 aa, unidentified
MEVLHSHCAGLDVHKGSVVACARHMVDGAVKREVRSFKTTTKDLMALSEWLSVEGCTHIVMEATGVYWKPVWHILSDGEFKLVLANAAHVKNVPGRKTDVNDATWLADLMAHGLVRGSFVPDEPTQEMRNLLRTRKQFVRERSSHVQRIQKTLEDANIKLDSVIADIVGLSGRRMIEALIAGETDPTALAALAHRRIKATPADLEAALRGRVTDHHRFMLRLLLQHIDAIDAAIAQIDQEVDGKVEPFRTAIQIVSTIPGVRELSAEVIVAEIGIDMARFPTQAHLIAWSGLCPRNDESAGKRRSTRMRKGAPWLKTTLIQCAWAAARTKESYLQAQFHRLRARRGAKKAIGAVAASILTAAYHMLKTGTLYHDLGPNHFDKRAKEKHVHRLINRLQNLGFAVETAVTALAPESSAAGRRPGRRGPAGRFRSSPPPALPTRRR

SEQ ID NO: 241439 - protein, 356 aa, unidentified
MRYIGVDLHKNRFTVYNATTGRYRDYGTNKVGIASFIEECKRTEGTGAIVVGVESTGNTRYFKRQLEEEGIQVKVINTMKFKVITESVKKTDKHDAQTIAEFLEKDMLPEAWICSDYSEMLRRLLHIRRQLVKAIVTTKNQVHSILTAYGYEDARATLQSKRGRHAVLDTLGSTEIGLVVHLLMEMIDSLHEKVKQIEGKIEELVKGDKAIELLQTMPGCGRITAWMIRAYTDDIRRFRSAKHYAAFVGVVPYVHNSNENIRHGKITKHGPELLRTAFVQLVMGMRRIKQVQDYRLMKRYKALQRTKGSGKAIVATARKLTHIVWHILTYNEPFDASLQMVSGYENNRSMQEKQLA

SEQ ID NO: 241440 - protein, 409 aa, unidentified
MLVVGDDWAEDHHDVELMDSLGRVLARARLPEGAAGMARLHAMIGEHLGEDAEVAEVRIGIETDRGLWVMALAAAGYAVFGINPLQVARYRERHGVSGAKSDAGDAHTLADMVRTDAHQLRPVAADSPAAQAVKVVARAHKTLIWERTRQVQRLRHQLRDYFPAALEAFPELNAPDALELLAKAPDPVSAARLATAQVSAALKRARRRDITARTAAIRAALRGEQLAQPPVVTAACAAVVRALTAVITALNTQIKVMEGQVEAHFLPHPDAEIIMSQPGLGPILGARVLGEFGDDPYHYASGKARKNYAATSPITRTSGKRKTVMARYVHNDRLRDALGRQAYSALTASAGARAYYNQLRARNIAHEAALRQLANRLVGILHGCLKTRTLYDETTAWPQHGNEQFPTAA

SEQ ID NO: 241441 - protein, 369 aa, unidentified
MPHVTSIGLDVHARSVAAAAFNPFTGEVVRRSFGTDASEIAEWALGFEDPRACYESGPTGFHMARELRALGLDCAVAAVSKMQRPAADARRKNDRRDAEFIARMLATHNIVEVPLPDMAVEAARDLDRALDDATRELRRSRQRLNMFLIRLGHVWDERNADGARKKAWTRAHWRWVSEIRLEGPQRDALEYYVTAARCAESDGRQLERRVVALAGTDRWRATVEALSCIKGVDTLTAFRLAAEAGSFSRFRSAPAFASWCGLTPSEHSSGESERRGGITKAGNALARTALIESAWHYSTCSPRPKAPAPGTDVPPAIRSRADDCTARLHRRREALAAAGKSACKANAAVARELACWVWEIGCRSEGTVL

SEQ ID NO: 241442 - protein, 282 aa, unidentified
MQIIGVDLHTRQQTVAMLNVETGEIVEKTLQHEGGSVREFYSTLAGPSRVGIEATGSMQWFLELMEELGIDCQVGHPAKIRAAEPRKQKHDRRDAALVLQLLVENRFPSIWMPSREQRDVRSLILYRHQWVRIRTRVQNALQAIALSHGLRRGSSLWSKAGQQAIASLSLSRYTAERRTALQSLYRHLEEQIDDLNRKVEELAWQRPQARRLMTHPGVGPITALATETFLGEPKRFLDGKAVASYVGVFCGVKRWGMRFARMWSCSVFISTSWCRRVWGKQK

SEQ ID NO: 241443 - protein, 394 aa, unidentified
MLEDGQEPNKHLKFSNDSLGVATLVDRLNNLISLYKPTTLKIGVESTNLYWWHLFELLSSNNSGLTLKPELYLINPNRISSYRKSFSNLPKTDPTDSWFIAEVVRIGRLKPNHPYDLRYAPLQRLTRFRFQLVESLIKEKNRALNLIFLKFSSYADKSNNPFSDIFGKTSSALIEHFTPDEIANTNIEDLVRFISKSSKNHISEEDILKCIEILNDLSKKAYRLNPKLLDTVNVTLTMTLENIRYFESQIKKIDKVIEREFSAFPEKQILSLVKGLGPVLAAGITAEIGDISKFKSDKKLASYAGLVWKKHQSGNYESEDTPLTRSGNEYLRYYLVESANCLRMHNAEYSEYYNRKYHEVRTHQHKRAMVLTARKLVRLVFALLSRSQNLLGRS

SEQ ID NO: 241444 - protein, 371 aa, unidentified
MKKNIIFVGLDVHKNSIDVALADAGRDGEVRFYGSIGGDLESLHKVIRKLHSTGAALRFVYEAGPCGYDIYRSLTKQGLDCTVVAPSKIPRKSGDRIKNDRRDALNLARLHRAGELTSVYVPSAEDEAMRDLTRGREDAVKALRVARQVLLGFLLRHGYRYSGLSHWSKAHWNWIADIKMPHRAQQITLQEYVHAVHEQLERVQRLTRLIQELVAQWHLAPLVNSLQALRGVSLIVAATTVAELGDLTRFESAKQLMAYLGLVPSEHSSGGTVKRGGITKTGNGHVRRALIEASHAYSHPARESRVLLTRLEGLPQEIRDIAWKAQVRLCGRFRRLMARGKSKNTVIAATARELAAFMWAIARTLLPAQEV

SEQ ID NO: 241445 - protein, 349 aa, unidentified
MELDTIGIDLGKTVFHLVGLNRAGEVVVRRKFSRLQLLRFTANLRVRLVGMEACGGSHFLGRSLREQGHEVRLMPAQYVKPYVKTNKNDYIDAEAIAEAVGRANMRFVPIKSDEQLDMQSLHRVRDRWVARRTSVINQMRGLLLERGITFRKGRRHAEVSLPAILEDADNRLSGLLRMLLAQLHGELRQLQSQIDEADALIAKAAHEQEACQRLMAIPGIGPLTATAVVASIGNGAEFRKGRSFAAWLGLVPKQESTGGKQKLLSISKRGNHYLRRLLVSGAHAVLQCRDKQSAGLSAWLGQLASRVHTNVAAVALANKMARVAWAVLAKSEAYRPPLLLISTEALACN

SEQ ID NO: 241446 - protein, 359 aa, unidentified
MQSEHQVLDFNGQDIYAGIDAHLKSWRVSILTNGIICKTFSQNAKAEDLKKYLENNYPNGTYYSAYEAGFCGFGPHRKLREMGITNIVVNPADIPTTDKEKKQKEDSRDSKKIVRSLYNRELEAIYVPNMEMEGLRSLVRYRRTLVKEISRYKNRTKSFLYYHNIEIPTELATGSTHWSKRYSNWLDSLELGTIHGRETLTHIKHTVEHLRAKLLEINRSLRGLEQDSEYSAMIALLRTVPGIGLITAMTILTELDNIGRFKSIDGLCSYVGLVPRTNSSGENEKIGRITPRSNRQLRSMLIESAWIAIRHDPALMMKYGELVKRMDAPKAIVNIAKKLLSRIKHVLVNKTPYVKGVVK

SEQ ID NO: 241447 - protein, 323 aa, unidentified
MEVVYPCCCGLDVHKRTVVACLIQTGPDGRRHKESRTFETMTDSLLALADWLHTVGCTHVAMESTGVYWKPVYNILEDQLTVLVVNAAHIKAVPGRKTDVHDAEWIAGCPLGSMLQHGLLRPSFIPDRAQRELRDLTRTRTSLIDERSGAVNRLQKVLEDANLKVAGVATDVMGVSGRAMIAAILQGETDPTLLAELAKGRLRRKRGELARALSGRVSAHHRLLLTIHLAHVDFLDEEIDRLSAEIATRLHACEAELIRLDTIPGVDRRTAEVLVAEIGTAMEQFPSAAHLASWAGMCPGNHESAGKRMSGKTRRGASGCGVR

SEQ ID NO: 241448 - protein, 358 aa, unidentified
MWYVGIDWANDHHDALVIDEKGRQVGSLRVDHSPQGLSKLNTFLEQIIGDLSSKEQMACIIETTHGLLIAHLLEARWPVYPVNPRTVDRRRSASGAKTDTIDAYLLAKTGRADLADLHRLTPDSEKITELKLLTRDQDALIRMQTRLVNQLTACLKAYYPVALELFTKLHQKSTLLFLQTYPTPQEAMAASLEQIKEVLRQAKHSNPKMVAVTIFEQVHQPHLQADAVTTRTKARLMLALVSQLLPLIEQIAQYNKEIDTLFLTHEDHEIFESLPRAGQRLAPRLLAEIGDDRKRYQDASSLQALGGTSPVLYQSGMYSKAHRRLGCIKPLRNALHQFAWQTTQSEPWALDYYHRKRA

SEQ ID NO: 241449 - protein, 397 aa, unidentified
MIAVGIDVSKSKSTVAILNGDGSIRAKPFDVHHVADELQALVDYIKRTSEPPTILMEPTSHYHYPLLKAFTEAELPVCLINPYQMKKYGDTELKKAKTDKRDSLRIAQYALEKSYSLIPYTPQDQKYEDLRFLSRQYSQRISTLTVAKVQLLSLLDETMPGITTILPLKSRDPDNCVLLRFIKRFKSFDVIRKMGKTRFLDSYQVLVKKTKDRFAGSKGLAIYELVLSSVTTRGENPLSAMTQDQCVDLVSTSQKAADEINLQMRIIAETMPEYKVLRSMAGVGDRLGPIILGEIGDIRRFHSGKALNAYAGNDAPPYQSGQFESRNRHISKRGNPALRKACFEVMQALKLTKPQDDPVYLFLLKKEQEGKPYNVAKMAAVNKFLRIYYARAMELYK

SEQ ID NO: 241450 - protein, 344 aa, unidentified
MEHFAGLDVSVKDTSVCIVDDTGRIVREVKVASEPEALLAVLENPAYHFKRIGLEAGPLSQWLFSALVEAGLPVICVETRHMRAVLKAQINKTDRNDARGMAQMMRVGLYRPVHVKTLRSQKLRMLLTHRKLLQSKAIAIDNDLRGTLRNFGLKVGMVGKVKFEARIRELVENLPDLAVLVEPLLIVRRTLREQFCILHRRLLAIVRDDEVCQRLMTTPGVGPVVSLTYRATVDVPARFRKSKSVGAVFGLTCAKYQSGEVDWDGRISRCGDEMMRTMLYEAAQAMMRSKKWSWLKAWAMQIARRRGMKKAIVALARRLAVIMHRIWVDGTEFRWTREQAAAAV

SEQ ID NO: 241451 - protein, 405 aa, unidentified
MGKVFVGHDWAETHHDVYVEDGAGQRLGKARLDEGVSGVARFHELVSSFVDDPGEVTVATETDRGLFVGALVAAGYRVLAVNPMSAARYRERHSTSGAKSDPGDAFVLAELARTDGHHHRPVAADSELAEAVKVLARAHQSMIWTRQRQVNQLRSTLREFYPAALAAFDDLASSDALAVLALASTPSLGRGLSRSKIASALRRGGRQRRIDERAAEIQTILRADTLQAPGLIAEAMGASVRALVAVISEQVAQTARLEAELADHFELHPDAKIIRSLPGLGTILGARALGEFGDDPNRYTDAKSRKNYAGTSPITRASGKHHVVLARHARNRRLADVCYQWAFAALTASAGARAFYDQHRAAGDTHHQALRALANRLVGILHGCLRHRTPYDEHTAWGHRTAAAA

SEQ ID NO: 241452 - protein, 344 aa, unidentified
MKIAVLGIDLGKNVCSVVGLDASGAVVLRRRVRRDTLIDLVANLPACIVGMEACCGAHHLGRLFAAQGHDVRLMSPEYVRPYVKAQKNDDRDAEGIAEAATRPTMRFVEVKTEDQLDMQTLHRSRERLVGERTALINQLRAVLLERGIVVPQGKRKLEQYLVIMMNEHDGEGLSARMRMLVADIRAQWQDLDRRIGAFDAEFGRWAKENEDARRLATIPGVGVTISTALIAAIGKAETFEHGRDLAAWLGLVPRQSTTGGKPRLMGISKRGNKYLRKLLIHGARAALPHIAEKDTALGRWAKSLLSRVHQNVAVVALANKLARICWAVLRSGQKFAAKGAPLVV

SEQ ID NO: 241453 - protein, 417 aa, unidentified
MPREIESKEVRDELYYERCCGIDVHKAMIMACFRDGRKQTIKEFGTQSKELRELAKWLLEGNCEMAAMESTGSYWKPVYNILEVLGVEVMVVNAQHLKHVPGRKTDIKDAEWIAKQLSAGNLRGSYVPDREQRELREVTRYRKSLTEERAREINRLSKMLEGANIKLTSVVSDVLGKSARKLLSTYVGGEDITGETIGSLIDKQLIGKAGMLVEAMDGVMSAVQRKLVKAVLEHIDDMARRIAELSKMIDDEMSKYDECIKRLDEIGGIGEQSAQTILAEIGMDMSRFPTASHLAKWAGLCPGNNESAGKKKSGRVSKGNATLKTTMIQCAQSAVLMKGTFFRAQYDRLVVRRGKNRAKVAVAHSMIIAIWHMLKYGTAYKDLGGDYYNRFNKEKKIAMHLKKLAELGYSLPIQATA

SEQ ID NO: 241454 - protein, 370 aa, unidentified
MLDTTTFIGLDVHARSIKAVSLDVMTGEVRAATFGYDAGAVAEWVRSVDPRARCVYESGVTGFDLQKRLSGLGVDCVVGAVSKMIKPSADRRRKNDRNDAEFLARMLSVGNVVEVWVPDDECEAARDLTRALEDARDDLSRSKQRLSKFLLRHGLAFDERTPTGRRKGNWTRAHWSWIESIRFAEGADNDVLAYYVDAVRRAAEEKARLEGLVEAEARKPRWRKRVDSLRCLKGVDTASAADLVFEAGEFSRFGNARSFAAWVGLTPSEHSSGESDRRGAITKAGNKHLRKTLVEAAWHYLTCSGRPKGLAKGQAPDPGARRHAAKGVRRLVERREALLARGVHGNKANVATARELACWVWAVGLMAEEA

SEQ ID NO: 241455 - protein, 406 aa, unidentified
MEITPIYKRVIGLDVHPNKLSACALIEQSDGTVTVELREFGGFKRDRRALAEWVREKAPDVVVMESTGIYWKSPYAALETVGIAAWVVNARHVKTVPGRKTDVADAQWLATLARAGLVRASFIPPADIRHLRLIARQRQKLGGMLASEKNRLHKLLADAGIRLNVLVSDIHGQAGRAMVKALIAGKPMADILDLAGRLRAPRAELFEALQPEELSAKHLFVLTEVMAHIEYLETTMSRFEQTLLEGLEAWQPQLVLLQTIPGIDRMGAAMLLVEIGTEMASFGSAERLASWVGICPGNNESAGKRKSGRTRKGNAWVRRLLCEFAQAAARSRCALKDKFAALSIRKGHKKSIVALAHKMLRIIHAMLTNGTPYQDRTVDYEALVVQRNAPRWIKMLAKHGYIPAAA

SEQ ID NO: 241456 - protein, 404 aa, unidentified
MFDTEGVGVFLGMDVGKTAHHGHGVTPAGKKVFDKPMPNSEPKLRAVFDKLKAKFGTVLVIVDQPAYIGALPLTVARDAGCEVAYLPGLAMRRIADLYPGEAKTDAKDAAVIADAARTMPHTLRSLELTDEITAELTVLTGFDQDLAAEATRTSNRIRGLLTQFHPSLERVLDPRLDHPAVTWLLERYGSPAALRKAGRRRLVEVIRPKAPRMAARLIDDVFEALDEQTVIVPGKGTLDIVIPSLAASLTAVHDQRRALEAQISTLLEAHPLHPVLTSMPGVGVRTAAVLLVTIGDGTGFPTAAHLASYAGLAPTTRSSGTSIHGEHAPRGGNRQLKRAMFLSAFACMNADPASRTYYDRQRARGKTHTQALLRLARQRISVLFAMLRDGTFYESRTPTITLAA

SEQ ID NO: 241457 - protein, 417 aa, unidentified
MTKRIRLNPEDIIVGLDLAGEEHQAVIMRMEGDRLTRFRVPHSLRGFEDLLQRSRPGAWQSPGRRVFAFEATGHVWRALAFFLEERGEEYVLVNPLATFRLREAREMNRHKTDLSDAEQVCELVRNGLVTETKLEGGVYLELRWAWGEYARLREERARLKTLLSHQLYGLFPEIRSVWKDLLRPGCLAVLRLGLTPHEIAALPLAEFVERTKAASRGRRLWRFKLLAVHERAQKTVVPASDLGPLAREVQRLVARVDLLCEQMEALSSEIQGLLAEVEEAGYLLTIPGLSWVSAAGLIAHVGRIDKYQHGRQLIKLAGTNPSRRDTGQKVGGYQGMTHRGRAGLRQVLYMATLSCLQHNPCIRAHFDRLIGRPDRPLSRMQAYGACMNKLLLYAFAVMKRREAFDVNHLWREVSLVS

SEQ ID NO: 241458 - protein, 366 aa, unidentified
MKKISTVQIFESEIFKEQRLTIGMDLGDRSSCYCVLDEAGRILLEQKVAMIPEAMKQTFSKIPRSLIALETGTHSLWVSRLLTELGHEVIVAHAQKVQLITKSNRKDDRHDARTLARLARIDPELLGPVRHRSAQAQIHLTVIRARAELVRARTAMVNAARGLVKSYGQRLPKCGTRKVSRELGAGLPAELGEVLEPLLKEIESLNERIKEYDERMEKIARESYPHVELLKQVKGVGTQIALTYVLTLDDPQRFAKSREVGCFLGLKPGRRDSGESQPQLHISKEGDRYLRTMLVQGAHYILGPFGEDSDLRRWGLRLAGRGGKSAKKRAVVAVARKLAVLLHRLWVSGEVYEPLRNSQKAMRAVA

SEQ ID NO: 241459 - protein, 340 aa, unidentified
MTITTVGIALAKNVFAVHCVDQHGKTVLVKPKVSRAALPELIASLPPCVIGMEACSGAHYWARLFRQYGHEPRLMAAKFVSPYRMAGKSGKNDAADAQAICEAVRRPHMRFVPVKDESQQAMQCLHRIRQGFIEEKTATYNRLRGLISEFGVIAPQSTDALRHMVSEQKSSLPLQVQQCVNDLLEHIDRIEDNITEYDRILSRMAKTDHRSQRLMELKGIGPTTACALVASIGNAHDFKNGRQLAAWLGLTPSQYSSGGKSKLGRITKAGDSYLRTLLVQGARSVLIGAEKRTDLFSRWVCSLVDRRGYWRAVVAIAAKNARLCWASLHYGDDFRLYSAS

SEQ ID NO: 241460 - protein, 411 aa, unidentified
MRRVIGMDIHRTFAEVVFWEDGNLRPAGRVSMTRIGLEAFGRSLTKEDEVVIEATGNAMAAVRVLAPHVARVIVANPLQVKAIAHAHVKTDKIDAGVLASLRAADFLPEIWLPDADTERLRRLVARRNQVVRHRTRIKNEVHAILHAHLIPPCPHADLFGRLGRIWLARQVIPDDERAAIDRHLRELDRLSEDLESLDREIAQAAIGDPAVKRLLTITGVNLIVAAGLAAAIGDVRRFPDPQKLVSYVGLNPRVRQSGLGLAQHGRISKRGRSHARAMLVEAAWAASKAPGPLRAFFLRIRARRGHQIAAVAVARKLAVLCWHLLTKGADYQWARPALVANKLRAMELQAGQPTRKGNKRGAAYAYNVKELRDREIELARHAEQAYVRFVSQWQRRGSARQRTGAAREERR

SEQ ID NO: 241461 - protein, 396 aa, unidentified
MKNVYASVAGAGVDVHYEFSKAALVDARGRVVRRERLEHRDRAGLREWLSRWPAGMTVVMEASFGWGWLSDVMAELGLNVRLSNCYKVEKMRQARGQVKTNDKDAALLAPLPMEATDWWEVWRAPKEVRDRREWMRHRMDLVSVQTATKGRIHAVFHRHGIFHEFSDLFGGGGRKFLLALCEGKDPQSRYLMGGALEALRADMVLLLHLRQELLRIAVRLRKELERSEEARWLMSVPGFGLILAHVVLAEVGDLRRFGSPKALASYSLLAPRARDTGEAPPADRTPLGRHLGQRGNRTLKWAFIEAAHGAVRRGGMWRELFDRATDGGRKDRGRGYIKVARGLVDVVYAVWRDRRRYQEKRPLPQDAGRNQQMVCSMRRTRPGTGRPYHPMVAARQ

SEQ ID NO: 241462 - protein, 335 aa, unidentified
MSKVSVFVGLDYHQSSVQVCVLDAQGNPLINATRGNHWQEIAEVVPRESRVFAAVEACCGAADLAEELIHKAGWSVDLAHAGYVARIKQSPDKTDFSDARLLADLERVGYLPKVWLAPENIRELRRLVRYRQQLSQQHRSVKLRVRALLRDQRVRPPAGVNPWTRAWLAWVISCQELGETSRWILQRHLEELKSLKTQLREVEQRLAAQTRDDPVVQALLAEEGVGLITAVTLRAEIGRFDRFRTGKQLARFCSVTPRNASSGTRQADAGLIRAGNPELRRVLIETAHRLAWRSETWSRFAGRMKERGKSPCVIAAAIANRWIRGLYYDIKAMAA

SEQ ID NO: 241463 - protein, 318 aa, unidentified
MQTSGCFIGVDVGKFELQVAGHEGGIVAGVLPNNRSSIVGWLKRLPVGSVIAMEATGGYQELLARTAHDQGFEVYVLNPTHVHHYAISLGNRGKTDRLDAEVIAQYIAQRRTKLHRYQPISPELQQAKSLQALRSTVVRVGTSLRLSAQRHGCASSHQKKALASLNLWAKQLERELIATIKADSEWAKTYGLLTSICGIGPINGAALTTLFNRVHFASSDAAVAFCGLDPRPNESGRKTGRRRLSKQGDKAARTLLYNAASSAARSIYFKDYYAMLRARGLASTAALVVIARKLLRIAYGVWRTGQSFDPGKLRPVMG

SEQ ID NO: 241464 - protein, 311 aa, unidentified
MTKIICGVDISKRQLDAHIEPLGAFKSFVNDAAGIAELAAFCHRQGVELVVMEATGGYERAAFLLLWEAGIACGLTNPRSVRRYAEAMGVLEKTDRLDARVIARFAIAKDLRPTEPPTAGQQRLTAPVARLRQVTGDLVVQKQRRSSAINPEMVASIDEVIALLKRQTRTLEAQVAGLIDDDPLWSCLDAALRTKGLANRAVARLLAELPEIGIYSNKAVAKLAGLAPLAHDSGAKAGKRHIRGGRAGIRSILFLIADIVRRFDESLGAFHRKLTAAGKPKMVVRIALARKLLVRLPARARQAREQYALAT

SEQ ID NO: 241465 - protein, 459 aa, unidentified
MKRDKRKAKRLPSQLAAVNLHAAGIDIGAQEHWVAVPADRDLQPVRRFGACTADLEAIADWLQQCGVTTVAMESTCVYWIALFELLEARGFAVVLTDAREVQRAPGRPKSDVQDCQWLQRLHTYGLLAAAFRPTEQVCVLRSYLRQRAMLVTYASQHIQHMQKALTQMNIKLQHVISDVTGVTGMTILKAILAGERDPQKLAHFRDRHCQHSEAEIARALQGNWRTEHLFALQQAVELYEFYHQQITTCDHQIEAHLQTFVDKSEGKELPHRPRKRKRRATEPRFEARTPLFRLSGVDLTAIEGIDENTALVLLSEIGTDMSRWPTEKHFASWLGLCPHHKISGGKVLSRKVRPSANRAATALRLAAQCLHHSHSALGAFFRRLKARLGAPKAITATAHKLARLVYRLLKYGEDYVAQGMEEYEQAYRARTLQNLVRKAKALGYKLLPTSDAASQGAPA

SEQ ID NO: 241466 - protein, 366 aa, unidentified
MAASQDDGGTRSERVGLKHQRKTAVEHFIGIDVSLEQSSVCVLNANGHIVREVKIASEPEALVAFCRELKLPVTRIGLEAGPLSQWLHTGLTSAGFDTVLLETRQVKAALSAMVVKTDRKDARGIAHLLRMGWYRPVHCKSVPAQEVRALLAGRKLLLCKLRDVELSMRGLLRGFGLKIGQISKGRLEARIRELIAGHSMLEQVIQPLLQAREVLNRQFHALHRAMLALVRHDAVCRRLMTVPGVGALVAITFTSAVDDPARFPRARALGAHFGLTPKRYQSGETDVVGGISKVGDEAARTALYQAAHTILTRPGRYSSLKRWGMEVAKRRGLRRATVALARKLSVVLLRIWTRETVFRFGRPAAA

SEQ ID NO: 241467 - protein, 358 aa, unidentified
MPPITPEDAAIIEVTGGVDTHQDTHTAAVIDPVGRVLGTEQFPTTPAGYAALLAWMRGYGRVRRVGVEGTGAYGAGLAHRLRGEGVEVIEVDRPNRKTRRFQGKSDPIDAIAAAKAALAGERTGTPKQRDGRVEALRNLRVARRSAVEQRADTQRQIKTLIVTAPDDQRTRLRGLTTQQLITTCASRRPDRGDAATPSTAVTIALRSLARRHQQLSTEIAELDELLEPLVNAINPDLTAVHGVGVDTAGQMLVTAGENHDRLTCEAAFAMLCGVAPIPASSGKTTRHRLNRGGDRQANAALYRVVLSRLRWDQRTRAYVERRTKQGLTKKEIMRCLKRYIVREVYEALLADFAALTTP

SEQ ID NO: 241468 - protein, 319 aa, unidentified
METSQVSFDQVVSRGCGLDVHKKVVTATIDGEGIKKQTREYPTITSSLKELRDWLLENGITHVAMESTGVFWKPVYNILEPAGLTVWIVNAAHIKYVPGHKTDKKDSVWICKLLLAGLLKPSYIPPKEQRELRDLTRYRTKLIQGNAANKNRIMRQLEDANIKLSSVLSSTNGVVATKLINKLCDGKEITMQDVEEVYHKKLGASKEDIYEACQGFITEHHIYMISILRQEIAHSEQAIEKLNQRIKQILQPYDNVLELLKRVPGISSKSVEDLVAEIGLDMSAFPSEKNLASWAGMCPGNNESAGKKKAEGPLREINR

SEQ ID NO: 241469 - protein, 419 aa, unidentified
MKPKPQEKTKKATDHPRQQHWREMNRQQRREMMRNIQSEDISLEVVHPDAAGIDIGNESHYVAVPPSRNSQPVRRFGCTTAELKAMADWLEQCGIRTVAMQSTGVYWIAVYDVLEQAGLEVYLVNARETKNLPGRKTDVQESQWLMKLHTYGLLRNSFRPSQEIRMMRTYWRQRNDLVQSAGRHIQRMQKALTQMNIQLANVLSDVSGVTGQAIIKAILGGERDPHKLAAFRNPRVKASEEQIARSLEGNWQEDLLFVLKQEQDGYEFCEKQMAECDRQLNHYLKQRADRSHGAPLPEEKRKGRLKKKSGNKPQFDLRTGLFRMSGTDLTRVDGIDVITATTILSEAGWDMSKWVTEDHFVSWLRLCPDNRISGNKVIGKGRLPTNNRVTIALKMAASTLRLSDTYLGAQFRRFRTRLG

SEQ ID NO: 241470 - protein, 339 aa, unidentified
MQVSTVGLDIAKNVFQVHGVDSQGRTVLRRKVRRDQLLKLFDSLEPCLVGMEACATAHHWARELGALGHEVRLMPPAYVKAYVKRNKNDAADAEAICEAVTRPTMRFVPIKSTEAQSVLMLHRARHLLVRQRTAQVSAMRGHLAEYGIVAAKGISRLRDLLPVLDADAGILPELARQTLLLIAQLIEALTTQIRKIETELLAWHRSNPASQRLETIPGVGFITATALAATVPDARAFRSGRQFAAWLGLVPRQNSSGGKDRLGGISKMGDRYLRHLLVVGATAVVRYTRRKTTTISLWANRLLDRKPARLVTVAVANKMARIAWAVMARNENYRATTAA

SEQ ID NO: 241471 - protein, 460 aa, unidentified
MRKPKKSKKQNLDANFSLINPNAGGIDIGADCHWVSIPVGRAQENVRSFACFTADLYAMADWLKQCGVETVAMESTGVYWIPVFQVLESRGFEVKLVNAHYVKTVPGRKTDVLDCQWLQQLHTYGLLSGSFRPEDQICMLRSYMRQRDNLIKSACAHVQRMQKALTQMNIQLHRVISDITGTTGLSIIRAIISGERNPIKLANFKDGRIKASVEEIAASLTGDYRPELVFILEQELQLYEFYQTQIQKCDTQIEQCLASFVDKVDVTKKPLVKPKRRGKKQPGNAPQFDLRTHLYRISGVDFTQVDGFGALTVLILLSEVGLDPSRFPTVKHFTSWLGLCPGSRVTGGKVKSSKTRPVINRAANAFRMAAQTLCRSHSALGAYYRRMQARMGTPKAITATAHKLARIFYRLWTSGDTYNDPGIDAYEQQYRERMLQNLKKKAQVFGLELIPISYPPECVS

SEQ ID NO: 241472 - protein, 362 aa, unidentified
MNTTTTVAVDLAKSVFQLAVADTSWRVIEQHRLTRSQFERWFLNRNVSLVIMEACGSAHHWARWLNSLGIDVRLLPAAYIRAYVRRNKTDAADACALLEAARCADIAPVKVKSIEQQALQGLHRTRSLWMGTRTSRINALRGFCREFGISVAAGSRNGLEQISRVLADPHSAVPNLIRGTMKLLVEEIRLLEARIAQLERELTTLAKQSAACTTLLSIPGIGLLTATAMVAATSGNVQHFRDARHFASWFGLTPKEYLSGSTRCLGRISKRGDRYLRMLLTHGARSVLRAASVAQAAGRQLDGLRQWALAVQARSNHNKAACALANKLARICYAALRDAEPYTGMVTRMKKKMERTAYAMPA

SEQ ID NO: 241473 - protein, 370 aa, unidentified
MTTTLRYVGLDVHKESITIAVAEANRAPAQKYATLPNDWPQLRKALKRLSPTLTRLRCCYEAGLTGFELYRRMSEAGIDCIVVAPALVPKQPGNRIKTDRRDAVKLAHFLRSGDLVPVYVPDEECEALRDLERAREDAVRAERVARQHVQGFLLRHGRIYHRTQWTWNHIDWIRKQEFDNPMQRRVLCDYVKVTEDSGARIKQITADLKELAEKTKLWPLIKALQAFRGIQLVTAASIAAEIGDFRRFGSARRFMAYLGLVPSEYSSGESSRRGRITRCGNRWVRTLLVESAWHYRFPPKMSRQLRTRNQGVAPGVQRIAWKAQHRLHKRLYRLTARGKRPQQAIVAIARELAGFLWAVGQEEELLAETT

SEQ ID NO: 241474 - protein, 332 aa, unidentified
MVERVHARTQSEAARELVIYTHFIGIDIAKESFDAALHGSAAKPLRFQNCGEGFAAFVKAFKSQLTSALVVMEATGGYEAALLAFLLAKGIAVHRADPLTAKHFIRSLRKHAKTDKLDAAALARYGAERHATLALFTLKDEAQEQLGALLSRRQDLILMRNAESTRLAHPRYAKLKASLTAVIKALDGQLKAIEEEIGKIIKQSRALAAKVAVMTSVIGIGPKTAALLAGFMPELGTLNRRKAASLAGCAPHPKDSGAFKGYRATTGGRAIVKRALFMAALSARKSNPALRAFYERLVQNGKKPMVAMTAVMRKLIVILNAMLRDAAHQTTW

SEQ ID NO: 241475 - protein, 412 aa, unidentified
MGSLLQRSLPTATLVVAIDPGKARNRVWLSTDAAGLVVEPLSVPVLRSGLDELDALVRRHSPDGGPIFAVEATGALHRAWVAELNRRFPQAVRVFAPSETAAARAQLGSRRFKTDDRDCAALTYLARQGHGRSVPADDHEALLAAVRHRRGLVAERKAAQQRLHDQVNALCPGLSAPTGQGRSLDLAGVTGQAFLQCLIDFGGRPVGARSLRARAPGRLSAANAEFWAARWKDCLPPPAHVAAGVDRLARSVRRWRNLNDDITAVETDLETLLAGTDGQILTSLPGVKTVRAASFAAFSLPVTRFPDAEHLYSATGLAPASYQSSSIDRRGRISRQGLPEHRDALMNMAWGLAQHCPPFTDREEQLRIRGMKPMQVRVALARHTCRLAYRMLTTQDAFDEQRYRRNRHQVRR

SEQ ID NO: 241476 - protein, 318 aa, unidentified
MTQLPVPIEAVLGFDVAQDSVTLHDLLGGRTLTVVNTHAALTAALRPFRNHRLAVCEATGGHEAVLLGVLFELAIPAHRADGGKISAFARSLRLAKTDRLDARMLAVYGRERGATLPRWVPPPAFQQELTALVRRRADLVAARKSERTRAKAPGAKAVAASLARALAFLDAEITDIEAAIGNLIAATPQLARRNKVLLCLPGVGPIVAASLLALLPEMGRLPRRKIAALAGVAPHPDQTGTTRNKARTKAGRRTLRPLLFIAALTAVRGDNRFAEFYNHLRAAGKAKRLALLAVMRKIVIVANARLAQLNTATRTQLT

SEQ ID NO: 241477 - protein, 321 aa, unidentified
METVSFEQVVRRGCGLDVHKETVVATIDGGGLERSTREFGTFTSSLTELKDWLVENKITHVAMESTGVYWKPVYNILEPTGITVWIVNARHVKNVPGHKTDKKDSRWICKLLLAGLLKPSFIPPREQRELRDLTRYRKKLIQDMASNKNRIIRILEDCNVKLSSVLSDTSGITATRLIDKLCDGKKVTLEDIDEVYHGKIRATKEEILEACNGNITDHHIYLLGTIRSNNRHIESLIEELNQKIRQMLSSYENVLELLREIPGLSHKTVEDLIAEIGLDMEVFPSEKHLASWVGVSPGNNESAGKKKVVERPMATNRQKQR

SEQ ID NO: 241478 - protein, 343 aa, unidentified
MDYFAGLDVSVKDTSVCIVDGTGKIAREVKVASEPAALLAVLTGSSYRFKRIGLEAGPLSQWLFSALAEAGLPVICVETRHMRAVLKAQINKTDRNDARGIAQMMRVGLYRPVHVKTLRSQKLRMLLTHRKLLQAKVIAVENDLRATLRNFGLKVGVVGTVKFEARIKELVESFPDLVALVEPLLVVCRVLREQIAILHRRVLATVRDDEVCRRLMTVPGVGPVVALTYRATVDVPARFRKSKSVGAVFGLTPARDQSGERDRPGAISRCGDEMMRTTLYEAAQVMLLRSAKWSWLKAWAMKIARHRGMKRAIVALARRLAVIMHRIWTDGTEFRWTREAAAA

SEQ ID NO: 241479 - protein, 458 aa, unidentified
MEEPQEVPADEEHERVWERVAAVDIAKASGVVCTRVPDEDRPGRRKTHVWTVQATSKAVIELGDYLRARQIQVVTLESTSDYWRIWFVILEAAGLRVQLVNARAVKNAPGRAKTDKKDAVWLAKLTEKGLLQPSFVPPYEIRRLRELTRLRAALVQDKSRYWARLEKLLDRALIKISAVLSTLDTDTARAMIEALIAGERNPRVLADLAIGKARAKRAELTAALDGRWEDHHSVQARILLDNISSLNRQADQLTAQVGELISQIPAAWGIDADGTTGPHAGTGPDSPVLPAVAQLDAITGCGIIAAQAVIAEIGLDMTVFGTPGRLVSWAKRCPQTRQSGKKTTGGKAGKGNPWLNGILGEIAASASRTDTFLGERYRRLARRRGKRKAMVAISRSILVIIFCLLSDRSARFCDLGPDFYDTQLNRDRKIRSHIRQLHALGVDPDDLAALLTKNPPAA

SEQ ID NO: 241480 - protein, 327 aa, unidentified
MNFASTPVLSDSQILGIDVSKAWFDVFLHPAAVKARFDNNIAGFRKLVRWLNSVEVEIIVMEATGGLEAQLFNALQDAEYPVARVNPRWIRDFAKATGRSAKTDQQDARLIALYGTMMKPQPSRVGDRKTDTFKALCARRRQIIHMRNQELNRRQQAREDQISRMIEQTLAFLDAQLAEIETEIDAMIRQNADWRRRREIIESIPGFAATTARTLIADLPELGTMTDKQAAALVGVAPINRDSGKQQGYRAIGGGRPGVRRILYMATMGAATRNNPRLKSIYQRLLAAGKKPKVAIVAIMRKIIVILNAMIKANQTWRPDQPATPLT

SEQ ID NO: 241481 - protein, 406 aa, unidentified
MGYHTEAFIGVDTAKLRNAVAVAESGLNGQVYFYGEIDNTEAAMRKLIRKLESKYKKLTFCYEAGPTGYGLFRLIKELGHNCSVVAPSLVPRKPGDRVKTNRRDALNLAKLLRAGQLIAVWVPDGRHEAMRDLVRAREAAHIDYTRNRQQVSAFLLRLGRYYPGKKTWGKAHLKWLAAQKLDNYEQRIAFEELLLAVRQSRERIERLEQAIRDSLPEWSLAPVVEALQALRGIDLISAVVFMSEIGDLSRFASPRQLMAFLGLVPSEWSTGESVIRGPITKAGNRRARRILVEAGWSYRHPPRVGKEKQKKVEAVPRTVREIAWKAQTRLCGRFRKLTRKGKRSTTVTTAVARELSAFIWAINRELARKPCSEQKSQPRPHQACRRAQLSQAQALRVAAERAASLE

SEQ ID NO: 241482 - protein, 430 aa, unidentified
MKFKRSNHINQRIERISTSHLVVGIDIAKEIHVAGAVNYRGIELGCPISFSNDREGFERLLRWVSQLQKSNGLSRVIFGLESTGHYNVPLAKWLLNNSHEVVQVNPLTTKRNKENRDNKPSKNDPKDAITIADSISRGFYSEWVWSEGVYRQLRCAVNEQEAIADDLVSVGNRLQMLLDQVFPEFTKVIKEWNCPRGIATIKAFPLPKDLVHLSAEQIIAGWYEAGMKRAGGARGRECAARLLAAARASVGITESTEELARDIQRTLRRYEMIAADKEAVGEEIEKLLGQVPETDLKPLTELGLGSTSKAVILANTGPLRNYKHGNQLLALAGLNLCECRSGKRKGQIVLSKRGRRQLRKYLYWAVVGLVANHETFKAWHEHNVQKLRMKKQRSIFKLIGKLTRILISLAHSGETFDANKANPQRQLVAA

SEQ ID NO: 241483 - protein, 433 aa, unidentified
MYEAEDEPLFAGRAAGIDIAQAGIEVTIGVPSDTRRGGRQQETRAFRTTREDLLALADWLRCRGVARIGMESTGDCWKPVYFLLEAAGLDCVLSHAAQVKALPGRPKTGQLDSVWLAKITERGALPGSFVPPEEIRRLRTHTRYRRHLTQARTAEKQRAEKLLEDAHLKLSSVISDIHGVSGRAMLEAIAAGERNPTTLAQLARGTMRGKIRQLEEALDCSFLTGEHAAVLAMMLAAIDYYTARIEELTAKIGVLCQPYEHQIAQLDAVPGTGVITAQDVIAEIGTDMAVFPTAAHLVSWAKWCPQVAQSGGKRKGASASGRGNRYIGAALGEAAISAGRTQSFPGAKYRRLVKRMPKKKALVATGNSLLTIYHALLSDPQAAYTDLGTDYYERRANIRRQARNHVRGLERLGYKVTIEPIDPATGELQAADS

SEQ ID NO: 241484 - protein, 338 aa, unidentified
MNRVEYFIGIDIASATFTASGLTLPGEIVMVRENLPNTPEGFARFVSELAGAQITAKNSVLVMEATGVYSEGLCYFLHAKGYQVAVEPPNEVKKAFKSKRKNDRVDSQQIAEYGYRFFDKLHFWEPKADLLEQIRTLLTTREQFTKQRIANQNTLQALKRKVVQTPLATQMVQENIKRLGKDIKAIDKAIKDLVDQDPTLKEKGQLADKVPGVGLLLTANLMVITSGFSNHVDPKSLAAYIGICPYEHESGTSVKKRPTSDRHGTGRLRKLLYLASLSVRAHNTQFKQYFYRKVAEGKPERLVLNNIANRLLRIICATVKSGIPFNENYRSINPALLK

SEQ ID NO: 241485 - protein, 318 aa, unidentified
MNTQSALHFIGVDVASREVVIACQGEAAVRTLANEEAALRCWLATLPANTHLGLESTGGYHLALARLAHARGLTVYVLNPRDVRHYARALGRRAKTDRVDAQLIARYIAQEHAALHPWTPPTPAQARLTQLLKRRAKLVVVKGILRASLAGLDVLRTESTAAIAQLDRLLEAMDAELKGALRALPEGAARCAQLRSIPGIGLLSGAALTELFSRIRFARIEAAIAYTGFDPRPCDSGQHRGKRRLSKRGPAELRRLLYNAAMSAARTKTWKPFYQRQRAKGLPSTAALVVLARKLLRVAYALYHHDAQFDPRRIEVLT

SEQ ID NO: 241486 - protein, 374 aa, unidentified
MKVTRIGLDIAKQTFELHGVDQRGRAVLRKTLRRERMLEFFTQLEPCEVALEACGGAHYWHRELSKLGHTVRLVPANKVKPYVDGNKNNAHDAAAICEASSRPSMRFVELPKTVAQQDLQALHRVREVAVHHCTLLANHMRGLLLEYGVTVGRGYPALHRALPELLGDDEQRLSRLLKQLLAQQWRMLKLHQKQVQTYDRRINCIARGETSCSALLKIEGIGPITATALVAAAGKGHQFKNGRHFSAYLGLVPGHSNTGNKTVMLPITRRGNRYLRTLLIHGARSALYAARNKENPRSLWLQRLKARRGYNVAAVALANKNARIAWAVLRFGEAYQRAKAHRPERCATPSPRLQRLCSARRTCAVPEGLCFVLQ

SEQ ID NO: 241487 - protein, 317 aa, unidentified
MTPTAIFVGIDIAKADFVVACRPDGTTWTATNDPKGIAVTVDRLGALAPNLIVLEATGGYETPLVAALAAAGLPVVVANPRQVRDFAKATGQLAKTDRLDAHLLALFAERVHPTPRPLPDAALQQLEALMTRRRQLLDMLTAEGNRLEHAAAPIRREITRHIRWLERRVAAVDRDLDDTIQKSPVWQAKENLLRTVPGIGPVVSRTLLADLPELGRLNRKQIAALVGVAPLARDSGTLRGKRVVWGGRAPVRAVLYMGALVATRRNTVIRAFYLRLVAAGKPKKVALIACMRKLLTILNAMMRTNTQWQQISQPETA

SEQ ID NO: 241488 - protein, 337 aa, unidentified
MSHIMIGIDIAKANFAIGRWEERGRYLGELTNNQEGFLQLARLVKTEQEQAGADTVWLVMEPTGGYEQALAHFALEQGWRVSMPNPRRVREWARGMGRRAKTDKQDAILLAHYGMERKPPAWAPMATEASELSSLLQRKGDLEQMLRQEAQRQQGWSERPGVAADVLTNVASVIGALKQALQDVEQAIREHLGKHAEMAEQARQLESVPGIGAKSVLPVLVLLHRWDALTQGVGTAKKLGAYAGLDAQTEESGTSVRGRETISRMGDRQMRARLYMCALGGIKGENALRQYYERLVGRGKAKKVALVAASRKILMWAWAVFRDHVSFQAEKTVPRAA

SEQ ID NO: 241489 - protein, 319 aa, unidentified
MDILGLDIGKSRFDACLISQKAKQTISLPNSQAGFEQLAAWLAKHRPDATQPLHACMEATGNYGLDLAAFLFAEGATVSIVNPRQIHAFGQAELARNKTDQLDCALIARFCAAFQPPAWTPPLAYMRHLRELTRRCAALKATRTQELNRQKAGAACPAVQASIQRHLAMLTSEIELIASEIRAILATDSQLQGHFDLLRTIPGIGEVTSALLLAELPNITEFKPKALAAFAGLSPAEHSSGQRQHSGGISRIGNAMLRSALYLSALAAARHNPRLKDFVARMNEAKKPKKVILVAVARKLLVMAQAVLKTQTPFSAQPG

SEQ ID NO: 241490 - protein, 327 aa, unidentified
MDDTGKIVREVKVASEPEALLAVLKNPAYHFKRIGLEAGPLSQWLFSALAEAGLPVICVETRHMRAVPKAQINKTDRNDARGMAQMMRVGLYRPVHVKTLHSQKLRMLLTHRKLLQSKAIAIDNDLRGTLRNFGLKVGVVGTVKFEARIKELVENIPDLTTLVEPLLIVRRVLREQIASLHRRLLAIVRDDEVCRRLMTIPGVGPVVALTYRATVDVPARFRKSKSVGAVFGLTCSKYQSGEIDRSGAISRCGDEMMRAMLYEAAHILLVRSTKWSWLKAWAMKIARHRGMKKAIVALARRLAVIMHRIWVDGTEFRWTREQPAAAA

SEQ ID NO: 241491 - protein, 402 aa, unidentified
MNQPVLSIDIAKGKSVAVAFTSYGMQVKKPFSFLHSPDHISSLLPILVQLEEATMQQPTVVMEATGNYSKPVASFFFSHGYPVFMLNPLTTHELKKRSTRKVKTDPIDAIRIANAFYLGEGTPLIPVNEKVTELRFLCRQHAQWKALLGEVQLQFCSILDLAFPGYDKAFQNIFNPSSIQLLTKFPSPSALLDADKEDVLTILMLNRRGRTWNEEKYSQLIEIARHSLPDLYGSKAHVFAMQNSMMLLKTYQEGITSLENQMDSLAQESSAYHLLRSIPGVGPITAAMIHAEIGDIKRFPSVKQLTAFAGLDSSVYESGTFKANQNRISKRGSAYLRTALYQASVSGISKQIHGPRNPILWRYYQQKRLEGKPAKVAIVAASSKLLRMIYGILSSGTPFQVN

SEQ ID NO: 241492 - protein, 351 aa, unidentified
MPRTTTVHAVTTIGMDMGKNTLHMIGLDLRGAIVLREKVSRGRITSRLANVPSCLIGIEAGMATHYVARELAGLGHDVKQVPPMYAKPFRQGHKNDFRDAHAVAEAVQRPTTRFVPAKTDEQLDLQALHRVRSRLVGERTAVINQIRGFLLERGVIVRQGLRFLRQALPDILAKRTDVLSPRMVRIVADLASDWRQLDERIEAVTDEMEMLAKSDDSCRRVMTVPGIGPIISSAMVAAIGSGGAFARGRDFSAWIGLVPKQMSTGDRTILGRITKRGNGYLRMLFMQAARVILLRPASWPKHGFGGWLARAAQRLHPNVLAAALANKLARIAWTVLAQERSYEARVTKAAA

SEQ ID NO: 241493 - protein, 412 aa, unidentified
MQAIIERCCGLDVHQETVVGCLLVGEPGAHPTKEVRTFRTVTRDLEALRDWLREAGATHVGMESTGVYWRPIYAVLEGCFELIVGNAKHIRNVPGRKTDVKDSEWIADLVRHGLIAKSFVPPRPLRELRELLRYRRKLTESQTAERNRLLKLLETANIKLASVASDVFGVSGRAMLRALIAGEASPEAMADLARGQLRRKRADLILALDGRLEEHHRYLLAVQLRRLEAIEADIAGLDQRIGERLEPYSAPHALLMQIPGVDWVVAAVLIAEIGVDMSVFLSVYHLSAWAGVCPGSYESAGRQKSGRARKGNVHLRTMLVGAAISAAKTKGSYLKDKYHRLKARRGALRAALAIAHKILVSAYHMLAKNLPYRDLGEAYLDQIGQTRTVANLKRRLERLGYRVTLEPKAQPA

SEQ ID NO: 241494 - protein, 400 aa, unidentified
MRSIGMDVHRSFAQVAVLDRGKVTEEFRVELDYDAVLGFGQKLRKDDEVILEATGNTSAIVRLLTPFVAKVVIANPLQVKAIAHARVKTDKVDARILAQLHAAGFLPEVWAADDDTLNLRRLVSERAALVRSVRRVKSRVQAVLHANLVPKYSGHLFGKDGRDWLLTAPLPKAERDLLARHLDELDWLKGKLEKLDGAMARIALDDTRTRKLMTIAGINSVVATAVIAAIGDISRFPTPDRLASYFGLTPRVRQSGDRGAIHGRISKQGNATARTMLIEAAWSAASVPGPLRAFFLRIKDRKGLNVAAVATARKIANLIWQLLTKEAPYRWARPAFVAMKMRKLELRAGAPKAHGPAGPARDYWIKEIRHREMELVAQAEAAYAAMVEAWRDRPPKPQKS

SEQ ID NO: 241495 - protein, 349 aa, unidentified
MANLTIGVDLGDRYSELYVVDAAGACVETGRIRTTVAGLEQWFGGRVPARVVLEAGTHSPWASRVLQRLGHEVLVANPRKLRALYENDSKDDRVDAEYLARVGRLDPALLKPITHRGEAAQADLAVLSSRDVLVRTRTLLINHTRGVVKAMGGRLPRCSAESFARRVGPHVPPALRPALAPVLAQLQQLTAAIRGVDREVERRCAEQYPATAQLRQVSGVGPVTALAYVLVLEDPRRFPRSRAVGAYLGLRPRRSQSGEQDPQLRITKAGHPFLRRLVVQAAHYILGPHGPDCDLRRHGERIAARGGKNAKKRAVIAVARKLAVLLHVLWIRGEVYEPLRQRLVLAQAS

SEQ ID NO: 241496 - protein, 411 aa, unidentified
MRYYLGVDWADQMHAVWVVDERGTKVAMRTVSHTAEGLSEWGRELDEWRAQGIERWAAIERPDGRVVDFLLDHGVVVYPVNPKALDRARDRFRQSGAKSDPFDARVLADFLRTDHAHLRALQPSSEAAQELKLLTEDYQRQVRQQTRLVNQLTATLKAYYPRALEGAELTTVLAREFLQAYPTPDAVAALTARQWQRWARAHRLSEARTQELWAILQPPQLPVPAHVVRAKARLMRTLVIQLGPVVAAVEDYRKAVEDFFASLPAAQWARTLPIGDHGITAPTLWARLGDAPERWASFQHLQAHAGAVPVTKRSGKQQRVVHFRFACDTAFRYVVDQVAFLSLRSSEWARAYYDQQRARGNSHHQALRALGAKWLKIIFVLWERQVPYDEQYHLATMTRQQLRQQRQNKIA

SEQ ID NO: 241497 - protein, 337 aa, unidentified
MEYFAGLDVSMEETHICVLDRDGTLIREGKARSSPDAISDFLAAGPTCAGVVFETGRMAPMLYHGLTERGIPVQCIESRQAYQALKSLAGHKSDRNDARGLAHLARTGFYKPTHVKSLSAHAIRSLIAARKKLVGQRVTIDNQIRGLVVVFGVRLPRALSPAFKDAALKVSTGVPGLHAALNGLFAAREAILAAVAAIDADVKKMARKSKTCSRLMTVPGVGPITALAFAAAVDDPSRFRRSRDVGPYLGLVPRRHQSGEVDYVGSISKRGDTRVRTLLYEAANVMLTRYAGPLKLKEWALAIGARSTMRKARVALARRLAIVLHAMMRDQTEFQFA

SEQ ID NO: 241498 - protein, 344 aa, unidentified
MEHFAGLDVSVNETSVCIVDDTGRIVREVKVKSEPGALLQVLKNATYRFKRIGLEAGPLSQWLYSALAEAGLPVICVETRHMRAVLKAQINKTDRNDARGIAQMMRAGLYRSVHVKTLRSQKLRTLLTHRKLLQSKAIAIENDLRGTLRNFGLKVGIVGKLKFEARIKELVENHPDLAMLVEPLLVVRRVLREQTAVLHRRVLAIVRDDEVCRRLMTVPSVGPVVALTYRATVDVPARFRNSKAVGAVFGLTPCKDQSGERDHTGAISKCGDEMMRVMLYEAAQILLTRTVKWSWLKAWAMQIARRRGMKRAIVALARRLAVILHRIWVDGTEFRWTRQEAAAA

SEQ ID NO: 241499 - protein, 344 aa, unidentified
MRIVDITGGVDTHADNHVAAAIDHNGGLLGVESFPASETGYEDLLVWLVGFGELVRVGVEGTGSWGVGLSRFLADHDVTVVEVDRPNRQTRRKQGKSDPTDAISAARAVLSGTATVTPKSRNGPVEQIRVLLVARRSAREQRIQTLNQLRHLVFTAPEEIRVRFKDRPKTGLITEAANMRPRKGSDPIMYRTNLVIKSLARRIKSLDAEMRTIDQTLRSLIEETAPTMLELYGVGVDTAATLLATAGDNPDRLKSERSWAHLCGVTPLPANSGKTTTKFRLNRGGDRQANAALYRIVLTRMSSDEETRRYVAKRRTEGLSTPEIMRCLKRYVARQTFKQLPHMI

SEQ ID NO: 241500 - protein, 345 aa, unidentified
MPIVGGLDIHRKQITFDYLDTGTGQVQRGQISPADREHLRGWLARFTGSDDVAFAVEGCTGWRYVVEELAAAGVAAHLAEPADTAFARGRKRHAKTDKTDSRHLRQLLADGRLPECWIPPGHILECRALLELYHDLRAEHTAWVQRIHAVLFHHGAPALGAGTLRTGQGVAALQAVTASCLSPAGQLQISTALEVIEALEARMHAVRHQLLAAARHLTGAKVLAARLYGVGPVTALAMTCWLAGEGRFSSSRQAVRFAGLDVTVWSSDRKGPPGRLSRQGPPVLRWAVYEAGKTHARSSAPDHRYYAQVKDRCNGKRAALSEARKILRQAHHILAELGDDALYAA

SEQ ID NO: 241501 - protein, 342 aa, unidentified
MTIAVLGIDLGKNSCSLVGLDAAGRVVLRRRMQREGVIAFGAKLPGCVVAMEACCGAHHMGRALAKQGHTIRLMSPEYVRPYVKAQKNDDRDAEAIAEAATRPTMRFVALKSESQLDVQTLHRVRDQLVGERTALTNQIRSVLLERGHVVAQGRAKLTACLAALLDTDAGASLTPRMRTLMAEVRERWQDLDRRIAALDAEFAEQARINEDARRLTTIPGIGALNATALVAAIGDVASFARGRDLAAWLGLVPRQVTTGGKPRLVGITKRGSKYLRKTLVQGARAALPSLRQSDTHLGQWLRGLLARSHVNTAVVALAAKMARIVWALLRHGRVYEPAAVTA

SEQ ID NO: 241502 - protein, 323 aa, unidentified
MDTLDFLGIDIAKKTFNVALERNDKLKHKKFENNPEGFKQLDSWLVKQGVIEIHVCLEATGSYSEALAMHLHQAGHKVSLVNPARIKAFGQAELRRNKTDRADATLIARFCSMHRPSAWVPPPAEIRELQALVRHLDDLIGTRTQLANRFTDGPKVKSVLESLQSLIEAVDAEIKLTRKKIREHINGHPRLKEDCALLETIPGIATQTATTLLAEIEHLRYYKHARQAAAYAGLSPRLRESGTSGKRSRLSKTGNSRVRKALFMPAISAKQHNPVLRQFSERLARRGKPKMAIIGAVMRKLLHLAFGVLKTRKPFDPNHPVAA

SEQ ID NO: 241503 - protein, 288 aa, unidentified
MEDRIRYVGLDVHKEGIVVAVAESGARGEIREYGRIANRPSALDGLARKLGREGVKLRFCYEAGPCGYGIQRQLSAGGYDCVVVAPSLIPKRAGERVKTDQRDAVSLARLDRAGELTAVWVPDPGHEAMRDLVRARLDAVHALRRARQQLSGFLLRHGCHYRRPAWTQLHRRWLAGLKFEQAMHHLVLEDYIAAVEAAEARRDRLTAQITAMLPDWMLAPVAAALQAMRGMALVNAATLIAELGDLSRFANPRQLMAYLGLVPSEHSSGGSVKRGGLTKAGNSAARGC

SEQ ID NO: 241504 - protein, 367 aa, unidentified
MSSIAHRDFVHLGMDVSKNAIAVAVLPPDRDRAEVDKIFHDADSVRRLIKRLGPPKRIWACYEAGPTGYDLQRLLNSMGVRCDVVAPSLIPKGSGDRVKTDRRDARRLTGLHRAGELTPVAIPTPAQEGVRDLCRTRGDMVQDLTRARNRLSGFLLRHSVVWRSGSPWTERHRRWLGTLSFDDPAVAITYAHYLATVQLRDTALESVETDLLPWCEKDPFGDQVARLAAYRGVTRIGALCLSAEVFDWRRFPKARPFMSFTGLVPGENSTGLTQRRGSITRAGNAHLRGQLTEAAWSYQHGPNVGVGIKERQAGVPPETVARSWAAQVRLCRRFRQLATHKNVRSVVAAAIARELAGFLWAEMVAQV

SEQ ID NO: 241505 - protein, 338 aa, unidentified
MTTRISMLAIDLAKGSFQVCAIGADGAVLYNRVLSRPRLMTLLAEQPACVVAMEACATSHHWGRVAQSNGHEVRLVPAAYIKPFVKRQKNDKVDAEAIAEAASRPTMRFVAVKSAETQGRAVAFRTHQCLVRQRTQLINALRGRLAEFGLVAPKGPASLKVLETALADETSALPAAVREMGTIYLEQIERLTDVIEQLAGELEAASKTDVQLRRLCTIPGIGPVTAGAVAAFAPDLDTFDSGRNFAAWLGLVPRQRSTGGKSRLGSVSKMGQTDIRRLLIVGAMSVIRWVVRKGGSSNRWLAALVARKPRMVAAVALANKMARMIWAMTTKQEDYRMA

SEQ ID NO: 241506 - protein, 344 aa, unidentified
MTYYTALDVSLRSVSVCIVDDQGEVRHEAKVGAEVDKIAACLRAFSPEVSVIGFEAGALTQYLTYGLQAEGFDVICLEARQVSAALSAMRNKTDRNDARGIAQILRTGWYSRVHVKSLQSHQLRVLLSSRKAILSKCVDLENELRGLLKIFGVRLASKVAHGGYDSTVRPLIAVDPLLARSLLPLLEARLVLYKTYLKLDNEVKAITRTDPICKRLMTVPGVGAITALTFKAAVDDPTRFKSSRTVAAHFGLTPRRYQSGVTDNPGRISKAGDPDVRCALYTAAHALMTRTAAWSSLKVWGIRLAKTRGHRRAVIAVARKLAVILHKMWINGADFRWASVEATA

SEQ ID NO: 241507 - protein, 445 aa, unidentified
MSRVIVGVDPHKKSVTIEAIDEQGKKLATGRFGTATRDYKAMLRYVREQWPHHRWAIEGANGVGRPLAQRLLADGESVVDVPAKLAARVRVFDTGNARKTDAVDAHAVAAVALRTPNLRVLAFDEELVALRLLADRRDELSARRVQTVNRLHRLLTELIDGGAGKDLTATKAKRLLATVKPRSLVGRTTRRMAAEEVADLVATDAKLKTLTKELVVAVKARGSHLMDLRGIGPAGAARILADVGDVARFPDRNHFASWTGTAPLDASSGEQIRHRHSRAGNRRLNHVLHIAALAQIRLPSEGRTYYLRKIGEAKTRKEARRCLKRRLSDMVYRQLVADAELADHAKDEAPAETVEAGPGGHSGASMTSSAADLHTPVIGSSDQPQPGPAATTLPPRRTRANPHTVPAQQPPRRRARAVKVERPTGRTTLTATSAGAHSKAPKPRP

SEQ ID NO: 241508 - protein, 341 aa, unidentified
MNAIYYIGLDIHKKTIAYCIKRIDGVLVQQGTVAAERNALSKWLVELPGPWYGAMEATIFTGWVYDFLKPHAVELKVAHPAMLKAITAAKKKNDQADAEKIADLLRVNLLPECHMMPEELRELRRILRYRNMIVRTAVKMKNKMSGLLMEVGAQYSKKRLYGRKYFSALLERVEDVPDSVKGLLRLSRNGFEMFDDIQKKLIAALRKNKLIQDRVLRLMSIPGIGEVTALTWVLETGDSSRFSSSRHAISYCGLCSAQHESAGKEQRGPISKQRNKHLQTMLIEAAKLAPHWNEQLALLHEKELARGNRNRATLAVARKLVEFMFAVDRRETNFESIKEAA

SEQ ID NO: 241509 - protein, 383 aa, unidentified
MKEATRIGIDLAKNIFHLVGMDAGGAVVWRKALARRKLLEFLAQQKAAEVGMEACATAHYWGREIQNLGHRVKLIHPRFVTPYRKSDKNDFNDAEAVTEAMSRPTMRFVELKSLAQQDMQSLHQARRLLIKQRTQSANQLRGLLAEYGVVAPRGLSALRRAVAELSGEPQRATPLMATLAAASVELLAALESQRQEFDRRIQQACRSDERCRRLTAIPGVGPLTATAAVAKVGNARQFPNARALGAFLGLVPRQHSSGGKTVLGGISKRGDRYLRTLLVHGARAALRTAAQHDDRLSRWATALKQKRGANTTAAALANKNARIIWKLLSTGAAFDPQHPATAAERAPAAQAGASEKSAGPRLALRLEHGQRSRGFFSPSSKRQ

SEQ ID NO: 241510 - protein, 350 aa, unidentified
MMIGVDYHPSFQQIAFLMEETGEYSERRLNHSDGEAEQFYRALQLRGVHVRVGMEATGYSRWFERLLAELGFEVWIGDAAEIKAKRVKKQKTDRKDAQLLLKLMMEDRFPRIWVPSPENRDVRQLLWHRHRLVQMRTRIMNQLQALAMNEGRRWKSKLWSEQGRAELEKLALAPWASRRRHELLELLDRMNPTIEELTAAAEQEARKRPEALRLMTHPGVGPLTALAYVLIIGTPSRFHRGKQIGNYVGMIPSEDSSGGKQRLGHISKQGNSLLRFLLVEAAQAAARNNPDWRRRYIHLAMRRHKSIAKVAMGRRLGVRLYWMWRNGCEYSPSMEFGSYAGQLGTGHGVK

SEQ ID NO: 241511 - protein, 371 aa, unidentified
MKSIIYIGMDVHKKTYSLCALLKETGEIIGETKIPADVSLIIKFIENAKKSVDSDDVQIKTGYEAGCLGYSLYWQLAAKGIECDILAPSTMHRSAKNKVVKNDRRDAKNIAANLANGTYKSVYVPTDEDVEIKEYIRMMHDFKIELKKVKQHINAFLLRFGHHYPGKSKWIPAHIKWLKELELSDMYREILDEYLSQLEILSEKIERFKHRLEELSQKETYNEKIGQLRCIKGIDTTAAMTMHAETSDFDRFPTANAFASYCGLTPGEDSSGESYHRLGITKQGNSMIRTTMVEAAQVIVRGTIGKKGRKVKSKQKDQDIKVIDYADKAVVRLQKKYHRMIFRGVKRNIAITAVARELACFVWGIETGHIS

SEQ ID NO: 241512 - protein, 340 aa, unidentified
MWLSRWTKQVGRSVSGRAKIAALVGTTFSAGRCLSGLPASGASRTAWGYGRGLAQHLVASGEAVYDVNPRWTALRRRSARRPEKTDRLDARAVALFVRQESPSLPQVQADDETAVLDLLTAERNSALIEATRLRNQIHALLLQLDPQYKARVPTLKSRAGLAVLESYTCPDNTSLSIARAAAVRRLAQRLRLALGQAAELAVQIKEAAARFSSLTELCGINLLTAGAIAGILGPGRRFETDAQLAYYAGAAPLEASSAGIVRHRLNRGGNRRLNAILYRIALTQAHHSEEARTYLDRKTSEGKSKREAMRALKRYIARAIWRLWQGCCTVGFTRQDALVA

SEQ ID NO: 241513 - protein, 367 aa, unidentified
MSKAETNRLCVGIDLHKTQFTVCALNEDAEYLLEKMYRTKADGYNDFIKEMHSQEEQGYSIELAVETTGNARFFKNQMEKEGFVVKVVNTNKFKVITTSTKKTDANDAATLAYYLMKEMLPEAHLCSQTSEEIRRLLKTRSILVQSMVKIKNQIHGMMLGYGIETTAAQFQSKRKRQELINDLADHNYSDFTASSLKVMLKILDDLSAEIKDIEKHLEEMVEHNEDVELLMTVPGIGINTATTIAAYTEDLERFEGNYKKFAAYVGIIPKVHNSNESIHYGRITKHGPQELRTAFVQAAMGMIRLTRVTSEWRIIKEYQRRKDDKGSGRAIIALARKITRIVFVMLSKRERFNPDLMCCETETQQTA

SEQ ID NO: 241514 - protein, 375 aa, unidentified
MRGLEPTPGNMHNCKQSELSSPEGTRGQFKVRPSAIKLGIDVHQGFYVVVCQEGGSHPRPPQRFTKEAFLCWAAKLRAQHPAARLYAVYEACGFGFGLQRELSALGIECLVVCPQKLDERGQRVKTDGRDARTLCLKLSRYVEGNKAELAVVRVPSEREEQLRAVHRQREQLVRTRKQLEAHGRSLLVNYGCEPVNKWWKRRTFTTLVVPAGTKELLANTQPLLLALEEKIRALTVQLQAAASPDQPRGLGALTSVVLDREVCAWERFQNRRQIGSYTGLCPGEHSSGNTRLQTCVTKHGNPRLRAALVELAWRMVRFQPDYRPVVKWRSILAKGALATGAARKKAIVAVARQLAVDLWRIRTGRVRAETLGLKL

SEQ ID NO: 241515 - protein, 409 aa, unidentified
MEILYPRCGGLDVHKEQVTACRRVATDGGKAKQEVRSFSTTTSGLLALGEWLSEVECTHVAMEATGVYWKPVWHILEGSFELVLANAQHVRNVPGRKSDVNDAMWLADLLAHGLIRGSFVPPTPVQEMRDLTRTRKQIVREVAQHAQRIQKTLEDANIKLASFISNVVGVSGRAFLAALIAGETDPEKLADLADCRLKAGRKDLVEALRGRVTPHHRFLLKLHLDQIDSLESAVRELEARMGDALAPFREQVEHLKTIPGVSDTVAQVIAAEVGLDMSRFPTAGHLISWAGLCPKMDESAGKRRSTRVRKGAPWLKTTLVTAAWSAARKKTGYLRTQFLRIKSRRGAKKAIMAVAASMLTAIYHMLRNNAPYRDLGTDHLEQRDKRQVANRLIKRLGTLGFTVEVKAAA

SEQ ID NO: 241516 - protein, 420 aa, unidentified
METKQVQFEQVVSRGCGIDVHKKMLVATIDGEGLKQETREFATFTSSLTELKEWLLEREITHVAMESTGVYWKPVYHILEPSGIKVWIVNARHIKYVPGHKTDKKDSKWICKLLLAGLLKPSYIPPKEQRELRDLTRYRKKMIQQVASEKNRIIRILEDSNVKLSSVLSDTNGVVATKLINILCQGKNVTMQDIDQVYHKKLQCTKEELYEACNGCMTKHTITMLQMIQKNIANTQASIETFNQLIKEALSKYDNVLEVLKEVPGLNTKTVEDLVAEIGLDMNAFPSEKHLASWAGMAPGNNESAGKKKSGRITHGNKQVKATITEAAWAATRTKNTFYSARYHRLAARRGKKRALIAIGHSILKSVYHILNDNVKYKELGADYLNEKIEAKRKKYLQSELKKLGYEVHLSVVQLKSTGT

SEQ ID NO: 241517 - protein, 407 aa, unidentified
MAKVIIGVDPHKLSATIEVVDRRERLLGSGRFSTDQAGYTAMRTYTKAWPERVWAVEGSNGAGRPLAQRLLEAGEHVVDVPAKLAARVRLFDTGHNRKTDARDAHSIAVVAVRTRTLRVLAADGELEGLRMLCDRREELTRLRVQTVNRLQRLLAELIPGQGHKDLTALQAKAILATVRPRDIAGRTRRRIAAEELADLVAVEAKMKKATAELKTIVLARGSRLMDIHGVGPVVAARILADVGDITRFADRNRFASWTGTAPLDASSGEQNRHRLSRAGNRRMNHVIHIATVTQIRLDTEGRAYYRRKRTAGKKPLEAMRCLKRRLSDVVYRQLVADAERAAMTASSGEAGTGPGGHCGATQESSAVDLPPHIDTSDQPLPGPADPTLQPSRTVRKSPSRKTPQTTP

SEQ ID NO: 241518 - protein, 348 aa, unidentified
MEHICRIGMDTSKHFFQLYGVNAAEEPVLRKKLRRKDMVAFFEKLAPTVVAIEACGGSHHWARLLSSFGHQVKLIAPQLVKPYVKRGKNDAADAEALCEAMSRPTMRFVPVKTVEQQAAVMLVGVRDRLIRNRTQLANSIRGYASEFGLTAAKGMAHLDPLIERIQADESLPDLARELFAAQAKEYEQLQAQIDEVDVKLKAWHHADECGRRLAQIPGVGPIGAALLMMKTPAPEMFRSGRQFAAWIGLTPKDHSTGGKVRLGVITRAGDEALRSVLVVGATALLRFVANGKSKSALSPWLGQLLKRKPAKLVAVALANKLARIAWKLMVTGQSYVRKSTPTTVAGAA

SEQ ID NO: 241519 - protein, 314 aa, unidentified
MTNSTIGVDVSKDRLDAHRLPDGAVKQFPNDAAGHKALIRWIKTTDVERIVFEATGYYSRAMELALVGAGLPVVKVNPRQARRFAEAIGKQVKTDAVDAAMLARMGKALDLAPPPPPNPNIIPLKELLLIRRSLIKDQTAARNRLPIISSPVAKQMIERRLQQIKDDIATIDAEIARQIDADAGLAKRIAIIASIPGIGKVTAAFLVIEMPELGSIDHKAVASLAGLAPVTKQSGTWKGKARISGGRRFLRQALYMPAVVAICHNAPLKLLYRRLVDAGKPPKAAITAVMRKLLTFANARLAEGKPWAEKSACA

SEQ ID NO: 241520 - protein, 382 aa, unidentified
MPAYADPTPTPISADTIFLAFELSGTSWLVALHAPDADKVERHRLPAGVAAEVLGLIARTKARVTRRLGTTPRVACCYEAGRDGFWLHRVLEAEGIASHVMDPSSLQVDRRARRAKTDRLDAQALLRALMAWSRGERQVCSMVRPPSPEHEDERRLSRERGTLLKERLRLSNRIKGLCAAQGIYDYEPLGADRRERLARLVTGDGRALPGRLAAEIGRQLDCFELVLRHLAEVEAVRDARAAQAREEGGSKLAALLRLKGIGPEVATVLELEVFHRHFANRRDVAAYAGLAPSPYASGGTSREQGISKAGNRRARKALIELAWLWLRHQPESALARWYRDRVGTATGRVKRIAIVALARKLLVAIWRYVETGLVPAEATVRT

SEQ ID NO: 241521 - protein, 403 aa, unidentified
MDAQFLISLKGCEFMLLLGIDIAKLNHVASLVDSESGELVFSNFKFQNNMPGFFSLYEKIVDFSIKDIIIGLESTAHYGENFINFFFQKGFKIAVINPLQTSHLRKANIRDTKNDHLDSITVAKALLFDNFKFISQNNVSNFALKKLTRFRKSLVKQRSRSKIQLVSLLDIIFPELQYVFKAGIHTKALYALLKKYPSTEKIAALREKSLFSILSKASKGHYDLDSALLLKSHARSSVGVKDTSISIHIPQLIELIELLDKQIKSIEEEIEDSLDNESPVLTIPGISNVAAASIIGEINDISNFDSPSKLLAYAGLDPKVRQSGNFNASSCRMSKKGSPYLRYALIFTAWNLVRNSKRFKEYYLIKRAHGKSHYNALGHVAHKLVRTIYTLLKKNISYQELII

SEQ ID NO: 241522 - protein, 344 aa, unidentified
MKNTTIAIDLAKSVFEVGVSDRPGHVAANHRLSRAEIALFMANQPATTVIMEACSSAHYWGRTFQGFGHDVKLLPPLYVRPYVQRGKTDRADVKGMLEAWRNSDIRPVPVKSESQQQLTSLHRIRAGWMTTRTMRINSARGLLREFGIIFPLGASALADRVGEVIADDNTDLTMPVRELLHQLVLEIRELEERIEMVEKQLEALAAQTPVVALLRTIPGVGLLTATALVGFVGDVQRFRSGRHFASYLGLTPREYSSGLRHRLGRISKLGDVYLRTLLIHGARAVLVGAQTQSSPDRFRAWALQLQRRCGNNKTAVALANRLARIVWAVWKSGKPFDCRPQVTA

SEQ ID NO: 241523 - protein, 359 aa, unidentified
MNTAKYVGLDVHKDTTVVAVAEGDRSGEVRLFGTISSDLRALEKLLKRLGGEGIKLLVVYEAGPTGFVIYRRLLQLGIDCTVVAPSRIPQPNAARQKNDRRDAVMLARLHRAGELTAINVPDASDEAIRDLTRAKQRLKSFMLRQGFHYPGKANWSEEHQRYLRALKFPIPSVRCVLEEYLLAIDQAVQRVQRIDELMEVHVPQWRMYPAVEALMCMRGFRLTAASTLVAELGDIRRFSHPRHVMAFLGLVPKQNSTGETRRMGSITKAGNTHARWILVEVVQHALMTPKISRPLSLRQEGQPEAYRTLAWKAQVRLHHRGWHLMRRGVMKAKVNIALAREMVGFVWDILQHVPAPQPK

SEQ ID NO: 241524 - protein, 335 aa, unidentified
MNMKLEQEIYVGLDTHRNTIHGTAMNKKGEVIRSDNFSNDKETLQDFMKDFPTWNTVIAIEACNFWRGCYKILTEKGFKVKLANPVTCHKIAHEKKTDKVDSKILADLSRVNYLPEVYIPSDEICELRDLTRHKMNFTRFKVRIQNKIKSCLSRNGISYKDELWTKDGICWLNEQKSDEINSLLKLYETIKTEEEAIKQKIEKVSSAKKETSLLETIPGIGYFGATLIYAEIGNIERFPTVKHLHAYAGAAPGIYQSGTKTRMPTRKSVNYWLKWITMQCAGRLTLKNTKPNKLRNYYFKVRDKKGWKTARKATARKLLTVIWYVLHEKIPYRES

SEQ ID NO: 241525 - protein, 355 aa, unidentified
MSEVTTIGLDIAKHVFHAHGVDERGRAIFSKRISRAKLLDFFAAQPSCKVALEACGGAHHWARQLTQLGHEVRLIPPAYVKPFVKRQKNDAIDAEAICEAAQRPSMRFVAVKSEEQQAAGLVFRTRDLLVRQRTQLINAIRGHLTEYGWIAPKGPSHVTMLADLIEEEEMANSLPEAALAMFRLMLDLLAGLNGKIADLDKEIARRAREDDVSRRLMTTPGIGPISATVIAALAPPAETFAKGRDFAAWLGLTPLQRSTGGKPKLGATSKMGERTLRRRLIIGSSAVVLQASKRGAPRGSWLEQMLARKPRMLVTVALANKMARIVWAATCEAGELQGSGRSQGVILADQRSSEM

SEQ ID NO: 241526 - protein, 483 aa, unidentified
MKPKQKEKNKGATNHSTQHHWYEMNRKQRREMMRKMQSEDLSLEVIHPDAAGIDIGNESHYVAVPPGRDSQSVRRFGCTTADLKAMAAWLKQCRIRTIAMQSTGVYWVAVYDILEQAGLEVYLVNARDTKNLPGRKSDVQESQWLMKLHTYGLLRNSFRPSQEIRVMRTYWRQRNDLVQSASRHILRMQKALTQMNLQLANVLTDISGATGQAIIKAILAGERDPHKLAEFRDPRVKASEEQIAQSLEGNWQGDLLFVLKQEHEGYEFCQKQMAECDRQLQQYLQQRDDRSHGAPLPEENRKGRRKKKRANRPQFDLREGLFRMTGTDLTRIDGIDVMTATTVISEAGYDMTKWETENHFVSWLRLCPDNRISGNKVIGKGRLPTNNPITIALKMAASTLRETKTYLGAQFRRLRTRLGAPVAIKAMAAKLARLVYRMLRYGMKYVDQGAAFYELRHRELQIKRLKSKAEKLGYRITPIPAAA

SEQ ID NO: 241527 - protein, 468 aa, unidentified
MEDVEFKFLVDWTKPVFYCGLDVHKYELAVAVYCKDDSETELLKTNIFSVDSAGLNRFWSFVAKFRPKGFVMEATGIYHHVIYRFLVKKRAHSEWAFNILVVNPADASGIPNRQKNDKIDAENLARYLAMGLLKSGKPVIEVIEDLKAIFRMALKLEKDRTALKNRIKKTLDRAGIRPKGMDLNHEWVREFLYYFIERETTLGQAISQLQVDLEILKAHRNKIFKNVKKFIPYFDFLLSPAQRSMIRQDLVELDFKTARKRLLAVEIDHLILERPALRQHAFNLSTIPGISPFSAVWILAEIGNIHQFHAVRPFLAYCGCSPRIISSAGKVYSAHISRHSNSYLRTIFYNAAVVLCNFEKKESALKEYATRVINHKRSVSMTLVYCIIAAKIAKITYALLKYSVPFNPKHGCDLDKRDFKVQGSKFSLTSKNLIRKARNLLRRVEMGQELGLLGEHVSILAEQLDLLL

SEQ ID NO: 241528 - protein, 317 aa, unidentified
MNAKNSQKEINVGVDTGKHQLDIFIRPLDIYFSVPTDDKGIKEAIKTLNKYSPKRIVIEATGRLEHEFIMACSKASLPFVIANPLHIKRFAGAIGRLAKTDKLDASLIAHYGESIQPALSQLKPENMRAMSDLLSRRRQLLVMQTMEKNRFKIMPKPVASSIKTILTAIKNQIEKMDLKLQKLIEDCPEYQIKNEILQSMPGVGKVVAFSLISNMPELGYITNKEAAALVGVAPVNRESGAFQGKRRIRGGRHQVRTVMFMAMMSAMQCNPVFKSTYQRLVAAGKPKKVAIIACVRKMIVILNSMVRDGVMWESKMN

SEQ ID NO: 241529 - protein, 362 aa, unidentified
MAKVRSWVGLDVHARSVLAVTIDGESGELRSRRLSGTTSEVVEYCCSLPGPTRAAYEAGPTGYGLARALHATGVGCEVAAPGKIERPAGDKVKTDQRDAERVLRLLMIDALHRVRVPTCEEEALRDVVRAREAVRGDLMRARQRLGKLLLRHDVRYEDTASAWTVAHRGWLSALDLGERGAQVTLLEYLGAIDAIVIRRDALETTIAELIPGSPWEQTVGRLRCLRGIDTLTAVGLCAEVGEFERFGKARQLMSYLGLTPSEDTSGEKRRQGAITTTGSRHARRLLVEAAWHYRRPPAKGQALRRRQVGQPAHIVEISWQAQRRLHRVWQRLDTQRGKRRTIVAVAVARELTGFCWALANAD

SEQ ID NO: 241530 - protein, 349 aa, unidentified
MCEMYFDPKETDMKYCGIDLHSNNSVVIVSDEEDRIVFSKRLPNDLGQIGAALEPHREDLAGVVIESTYNWYWLVDGLMATGYQVHLAHPSAIKKYEGLKHSGDFADAAYLAQLLRLGLLAEGYIYPREERGARDLARKRMQLVRYRTAQILSIEGILMRQTGARMKGEAVKRLTAEQVDAFAFAPDVSLAVEANRAVSQTLSQQIETLEKRLKQRVILRPEYHLLKTVPGIGDVLATTIMLETGTINRFTQVGNFSSYCRCVDSLKESNGKRKGEGNTKNGNKYLAWAFVEAANFALRCCPQAKRFYDRKKSKTNRVLALKALAHKLARACYHMLRDQKPFDVHLCFG

SEQ ID NO: 241531 - protein, 349 aa, unidentified
MILVGCDLHTRKQQVALLNTDTGELWDQELSHDGDAIERFYATLPPPVTVGIESTGYSLWFHALLQRLGHTLLVGEAAKIRAMVVRKIKTDRRDARHLRDLLKDDRFPVVWIPDPATRDLRALIKHRLRLVRIRTMVKNGLHAIALNQRLALGPSLWSRAGLAQLHALVLPPHTRRRRDDSLELLQWLNGHIHELDLHVATAAAADPDARRLMTHPGVGPLTALATVLVLGPVGRFPNSKHVVSYIGLAPAVSASADKYRLGHISKQGSALLRWVLGQAAPLATRGDAALKRIYFAVLRRRGRPKAKVALARRLLIRLYVMLRDQIDYDEFCRRGRTQRPGLEPARIPV

SEQ ID NO: 241532 - protein, 309 aa, unidentified
MEHFVGIDVAKDRLEVWLRPSGESFTLGRDGEGLAALVERLQALAPVLVVLEATGGYETVVASALGAARLPLAVVNPRWIRDFARATGKLAKTDRIDAAAIAHFAEAVRPPVRPIADAEAQALGELVARRRQVIEMIVAEGNRRRMASQRRVIRAIERHLAVLQAELSELDGDIDDAIRNSPLWQADADLLASVPGVGPATLRTLIAELPELGRLTRRKIAALVGVAPINRDSGTLRGRRTIAGGRPAVRSALYMAALVASRKNPVIAPHYDKLRAAGKTGKQALTACMRKLIVILNAILRDRKPWQSA

SEQ ID NO: 241533 - protein, 346 aa, unidentified
MSHKTAATVAHTIGIDTGKNTLHLIGLDDQGAIVLREKIARGRIAARLANVPRCLIGIEAGMATHYVARELSALGHDVKQVPPAYSKLFRQGHKNDFRDAYAVAEAVQRPSTRCVPVKTDDQLDLQALHRVRSRLVGQRTAVINQIRSFLLEHGIAVRQGLRFLRQQLPDILAKRSDVLSLRMIRIMEDLSGDWRRLEERIEHVTKEIEVLAHGSESCRQLMTVPGIGPLIASAMVAAIGNGAAFAKGRDFAAWLGLVPKQMSTGDRTILGRISKRGNRYLRTLLMQGARVILLRPANWAKHSFGPWLTAAANRLHHNVLATALANKLARIAWTVLMQARSYEARV

SEQ ID NO: 241534 - protein, 366 aa, unidentified
MDYRVYCGVDFHARQQTICSLTTEDGVVSTHELKHQDKAELRAFYSQFSGPVLVGLEASGYSPWFEQLLEELGHEVWLGDAIEISRRARRRQKNDRRDAELILDLLVHDEFPRIHRPKPESREILRMLRYRQKLVKMRTMIKNSLQALALQSGLSRRSQLFTKAGLEQLGTTTMSPVMQYQRDQWLAALEPLNQRLAETVNWLKQQTKDDQRIRRLRSHPGIGLLTALTIVHTLEPVGRFRNQRQVAAYGGFDPREHSSGEKKRYLGISKAGSRLLRFFMVEAAHTAVRYDDDLKRFYQRLHLRRGKPTAKVAVARKLLIRSYILLRDEIDYAEFLRRAVAAGLARAVTRPNVPEVLIGRPASTAH

SEQ ID NO: 241535 - protein, 322 aa, unidentified
MDAQPHASPSAIGIDVAKGHCDVKFPDQTRTVAFQFNDAGFKGLLEQLVRFPNAMIVLESTGGYERRLVAELVAAGHRVAVVNPRRVRDFAKALGQLAKTDSIDAHVLALFGDRMQPRESEKSSEKQQELQQLVVRRRQLVVLRTAESNRFEQTTSKFALKGIRQVLALLDKQRAKLDAEIARLIEADDDWKAKDEILQSVPGIGPGTSATLLAELPELGRINRQRVAALVGLAPFNSESSTIKGRRTIKGGRRSVRCALYMAAITARRCNPVFQTFAKRLEQSGKRFKVVITACMRKLLVTLNTMIQKKTTWHQEIIPSSP

SEQ ID NO: 241536 - protein, 475 aa, unidentified
MMDENVVALFGERSSFIFGAESPLANLNRRPCRHRRLSPRQKARARGANFFAHLGRPPAAAQDEEESMEVIYPRCAALDVHKKSVVAHAITPGQRETLTFGTMTKDLLELKKWLLDHKVTHVAMESAGVYWKPVYNLLEDTFTLLVVNAWHIKAVPGRKTDVKDAEWIADLLRHGLLRGSYIPDRPQRELKEIVRYRRILIRERSRIICRIQKVLEGANVKLSSVASDIVGISGRLILQAMINGIEDPKELAAMAKGKLRKKTQSLEEALLGLMGSHQRRMLECELEHLDFLDLKIAALDTDIAERMRPNDPIIERIDTVHGVGRRGAEELLAEIGPDVVSRFPDAHHLASWAKICPGNNESAGKRKSGKTGHGNPWLRSVLVEMAWAAIRVKGGYYSSLYHRLAGRRGKKRAIVAVAHSILVTIYSMLKNNTVYQDLGERFHDLLNPEQVLHRAVKRIERLGYKVSVETPALVT

SEQ ID NO: 241537 - protein, 341 aa, unidentified
MSIITVGIDLAKNVFAVHGVDDNGKPALVKPKVPRDKLLEMIAQLPPCVIGMEACSGAHHWARQFRQYGHTVKLMAPKFVSPYRMSGKRGKNDAADAAAICEAVTRPHMRFVPVKEEHQQVILSLHRTRNGFVEERTATYNRLRGLISEFGIVCPQKIANLRRALMDHLEDLPGYVNQCVGDLLTHADSLDLRIAEYDRIIARAARDDARSKRLMTLPGIGPNTASAMLASIGGGHDFQNGRQVAAWIGLTPGQYSSGGTARLGRITKAGDKYLRSLLVMGAKAVLSGLGDKQDRFSRWARSLVERRGYWKAVVAIAAKNARLAWAVLKFGEDFRLQPAAT

SEQ ID NO: 241538 - protein, 444 aa, unidentified
MAVRKRELTVMYPNAAGIDIGSAKHYVAVPPERCDRPVREFESFTEDLMAMADWLAECGIDTVVMESTGVYWIAPYELLESRGFTVYLVNARHVKNVSGKKSDVLDCQWLQQLMSFGLLAGAFRPDGEACALRAVVRQRETLIQEQARQIQRMQKALTQMNVQLANVITDIAGKTGQDIIRAIVAGQRDALKLAQLRNYRVHASEQDIAKSLLGNWREEHLFCLTQTLKLFDTHQELIGEADLQIEAMLARMQRHACHELKPDKNKGRAKHAPRFDVRAALFRWAGVDLTRIGGIDVSTALKVLAELGADMSKFNTAKHFASWLGLCPGTRITGGKRISGVTKRIANRVAQALKLAAQGLHHSQCALGAYYRRMAARLGAGKAITATAHKLARLVYAILTKGEEFIQRTQDHYEDQLRARTVRYLHKKAASLGFSLQPTAAVCA

SEQ ID NO: 241539 - protein, 375 aa, unidentified
MSKIRFIGLDVHADTIAAAVAEPDGEVRSLGIIPNRLELVRKMVAKLGPVNQLKACYEAGPTGYVLYWQLNSLGVACEVVAPSLVPVRAGDRVKTDRRDAAKLARSYRAGDLTPVWVPDAAHEALRDLVRTREDARQDQHRARHRLSKFLLRHGRRPSQDVKKSWTQKYLTWIKEQVHFDQPALEATLLDYVHEVDHMAERIERLEKAIDVAIEKAPAEMRAVIEALQALRGVAKITAVSIVAEVGQLSRFAKPRQLMGYSGLVSSEFSSGNRIRRGGITKTGNAHLRRVIVEAAWAYQRRPWVGGALLKRQQGLDQELKDLGWKAQWRLYHRYCKLTARGKNKNQTVTAVGRELLGFIWAIGVRTEARFAARAA

SEQ ID NO: 241540 - protein, 341 aa, unidentified
MKVTTIGMDLAKNVIQVHGADDKGKALLKKQLKRNQVLPFFANLTPCLIGMEACGGAHYWARKLELLGHTVKMMAPQYVKAFVKRNKNDAADAEAICEAAVRPSIPSVPIKNIEQQAILSVHRARQGFVKARTAQANQIRGLLAEYGIAIPKGIAHITTRVPEILEDGANELPGSFRMLIQRLVDYVKDLNRHEAELELEIKRWHRENNNSRKLAEIPGIGPMTASAVVATVGDARNFKNGRQMSAWLGIVPRQHSTGGKSTLLGISKRGDTYLRTLLIHGARALIRVAEIKPDADPWIKKLLARRNKNIAAVALANKNARTIWALLAHGREYESKYRMAA

SEQ ID NO: 241541 - protein, 412 aa, unidentified
MVTCGIDWAQDHHDIALVDADGRLIAKRRIPESVAGFTELTAMLADAGDDPENPIPVAIETPRGLLVAVLRATGRSIYPINPMSVARYRERTSVSGKKSDHADAVTLANILRTDADQHRRLPADTELAQSITVLARAHQDATWRRTRAGNELRSLLREYFPGFLHAFAERPGGISAPEARAVLAIAPTPAKAARLSKPQIAAALRRAGRQRGLTALADTIHQQLRLPQLRHPTLVEDAFGIQAVAVLATLDAECASVDRLGEATVAAFTQHPDHRIITSFVGLADLTGARLLAEIGDDRTRFVDARALKAFAGSAPITKASGRSIRITHRHVKNNRLAAVGFVWAFIAAGCQGPTRAHYLARRDHGDRHPAALRHLYNRMLGQLYHCLQTDQTYDPIKAYRPTPTHPTRAAA

SEQ ID NO: 241542 - protein, 337 aa, unidentified
MKITTIGLDLAKSVFHVVCFDEKHREVSKRMLRRNQVREYFAQIEPCRVAMEACAGAHYWGRELEKLGYTVKLIPPQFVKPYVKGNKNDYNDARAIAEAATRPGMRFVGIKTVEQQDIQALHRLRQQRVKERTALCNQLRALVAEYGIVMNKGVATVRRGIPLLLEDAENGLSDLFRAWLSRGYEQLVEIEEHIDHYTRQVEAHSRQNAHVRRLQTLPGYGPIVASVFASVVGDGNAFKCGRDVSASLGLVPRQHSSGGKEVLLGISKRGDKYLRSLLIHGARSVVLHAKNKEDALSRWVNRIRERRGTNKAAVALANKLARMGWALLRNETVYCPA

SEQ ID NO: 241543 - protein, 457 aa, unidentified
MRKKNKRTKGIEEAHPFSGMSRIHPHAAGVDIGAIEIVACVPGDENTQIVKAFGNYTVDLQELAQWMKSYHIKTVAMESTGVYWIPLFEELERQGFECLLISSRSLRRVAGRKSDISDAQWIQTLHTYGLLEGSFRPQGDLVALRTLLRHRSQLVEHRSPHIQHMQKALLQMNVQLSQAVTDITGMTGQKIIRAILVGERDPQTLAAMREPGCKKSAEEIGKALTGTWREEHLFILTQSMMLYDFYTEQIQACDLEIERLYGLTRPDWESGEVQPLTKRKKNSHSKNLPHNAEEVRKHLKRISGVDLSSVDGFGVSLAQTVIMEVGTDMTKFPDEKHFCSWLGLAPKHEISGGKVLKNNTLKTKNRAGQAFRMAAQSVKQAECVFGVFYRRLKARLGPSQATVATAHAIARVVYRMLKYQVEYEPLNVNEYQKHYEEQQIKYLKKRATKFGFQLLPT

SEQ ID NO: 241544 - protein, 424 aa, unidentified
MEHAAMVLKKEIPIVEVIHPICCGMDVHKESISACLISVDSDGKEGLQIREFGTFFSDLIALRNWLVANQCPIVAMESTGVYWRPIYNVLEGSIELVLANARHIKNVPGRKTDISDCKWLAGLLRHGLIKASFIPEKIVRQWRDLTTLRKSHVQTVGDYKRRVHKLFETANVKIDSVVSDLFGATGRNLINLLCSEKTRFSVEDIAKCAKGSLRSKVQELQTSLEGFFEEHHRFQLKGILVIIESLEREIQSITARLTQLMEPHEEVLNRLDALPGINMVAAQAVLSRIGITLEEFPTEAAFCSWSGLCPGNNESAGKRKSGRHFVHSHPFKTLIIEIAWAAIKKKGSYYKEKYYRLKARLGPKKAITAIGHRIAKAIYHIIKDGQSFKELGEDYLNKNDKVRKLSNLRKHARKLGFELVAVEA

SEQ ID NO: 241545 - protein, 405 aa, unidentified
MEIIIERGCGLDVHKETVVACIMGTGIRKEVRTFTTMTNDLLRLKGWLQETGITHVAMESTGVYWKPVFNILEDSLEVILVNARHVKNVPGRKTDVQDSEWLCRLLRSGLLKGSFIPPRGIRELRDLTRYKRKLIQTIVAEKQRVEKVLEDANIKLSSIASDTFGASGKRIIGELIEGKLEAEEMAELSKGRLRQKREDLKEALVGEVREHHKFMIRASLKHIRATEKILLGIERKIREKIERDYKEEDELLQTIPGVKENASTVIAEIGVDMDIFPNEMHLSSWAGMSPGNNESAGKKKPGSTTYGNKCLKAILIEFAWVASRMKDTYLRSKYHSLVGRRGKKRALVALGHKILIMCYHILKYRCAYKELGGDYLDKRRKDRITRSYIKRLNHLGYEVILQESA

SEQ ID NO: 241546 - protein, 428 aa, unidentified
MNYSQNDKINQITTDTMVVGVDIAKFTHVARAVDYRGIEISRKISFKNNRESFLVFERWMDEIKTRMHKTKVMIGMEPTGQYWENLANYLLKKGYKVVVVNPMHVNRSKELEDNNQTKTDSKDAMLIASLVKDGRFFNPNILEGIYADLREAMDVRDRNLKNLQQTKNRIHRWFDRYFPEFYQVFKGCFSMTLLHLIKENGLPAEIAEQNPDEIYENLPRNLRIACGRAKIDKLCEVCKNSVGIKNRGFAKVEFENLLRTYDFFQTQISILEEHLEKISADIVEIQRIMKMKGMGLISACGIVSELGDIRGYMDPRQLYKMAGLSLRENSSGERKGKTRITKRGRSDLRRILYQIVFSLIKNNKAFKEMHHYFKNRAKNQLSAKASIIALCRKLLRILFAIIHKDIEYDEEKMMKDIKYPKEFLVHAA

SEQ ID NO: 241547 - protein, 348 aa, unidentified
MRFYTGQHQHYCGIDLHARTMYLCIQDKEGKVLLHRNLPCDRARFVEAIEPFRDDLVVASECIFDWYWLADLCAEHEIPFVLGHALYMKAIHGAKAKNDPIDSLKTASLLRGGLLPQAYAYPAAMLPTRDLLRRRTHFVRKRGQLLAHIQNTFHRYKLPRPQGVLIYRGNRASVPETFTDPIVRKSIEADLALCDTYDALIRDLEKTVLAQARIQEPNTLLCLNTIPGIGKILALTFLYEIHDIGRFESVQRFASYARLVKCEKSSAGKRSGSSGSKIGKGHLKWAFSEAAATVLSHFPESKKLHGRLKRKFGKGKAMSILAHKIGRTVYFMLKRNQAFDPARFLANT

SEQ ID NO: 241548 - protein, 334 aa, unidentified
MENIALIGIDLGKNSFHIHSQDRRGKAVYRKKFTRPKLIEFLATCPATTIAMEACGGSHFMARKLEELGHSPKLISPQFVRPFVKSNKNDFVDAEAICEAASRPSMRFVQPRTESQQAMRALHRVRESLVQDKVKTTNQMHAFLLEFGISVPRGAAVISRLSTILEDNSLPLYLSQLLLKLQQHYHYLVEQIKDLESQLKRKLDEDEVGQRLLSIPCVGTLTASTISTEIGDGKQYASSRDFAAATGLVPRQYSTGGRTTLLGISKRGNKKIRTLLVQCARVFIQKLEHQSGKLADWVRELLCRKSNFVVTCALANKLARIAWALTARQQTYEA

SEQ ID NO: 241549 - protein, 316 aa, unidentified
MVGIDVASTHVDVAALGAELPANLRQVSNDADGHSALAEGLARLKPNLVLMEATGGYEAALACALQAAGLRVAVVNPRMARDFARAMQRLAKTDRIDAATLAEFAGVLARRPDAERFIRPLTDPEQQDLAALVTRRRQLVSMQLSERQRLRLARPVARPSIEALLEAIGRQLDDVEAEMSQHVEQHHAQMARLLQSVAGIGRVAAATLIAELPELGRLNRRQICALVGVAPYANDSGASKGRRRIVGGRFEVRRALYMATLTATRHNDAIRGFYERLVAAGKLKKVALIACMRKLITHLNAIVRDHLNAQHHPSTA

SEQ ID NO: 241550 - protein, 411 aa, unidentified
MERIVERPGALDVHKASVTACVRIWKGRELEEQVAEFATTVYGLLALRDWLEALGVKQVAMEATGVYWKPVWAVLEDRFELLLVNARHVKQCPGRKTDMKDAQWLCQLLEAGLLRGSFVPPKPIRTLRNLTRYRKTQIQDRQREANRLHKILEDTGIKLDCVASDILGVSGRSMLDALISGTTDPEVLAELAKGKLRKKIPALREALVGRFEDEHALIVGQILAHIDFLEEAIDRLSAEIEEQIAPFAAQRDLLMSIPGVKQRAAEVLISELGVDMSVFPTPKHLGSWAKVSPGNDESAGKRRSGKTGKGNKWLRATLNESANAAARTKDSYLAAQYQRLRGRRGHAKAVTAVGHSILTAAWHMLQTGELYRDLGGDYFIRQNPDRLAKHLVRQLEALGHAVTLQPREVTA

SEQ ID NO: 241551 - protein, 309 aa, unidentified
MSEKNFIGIDVSKDRLDVAIAHSEEFMTFVNTAEGHKDLKDFISSRKPALIVLEATGGFEKGVLRELASARLPVVSVNPRQVRDFAKAMGILAKTDKIDARVIARFAEAVKPEARPLRTEEEGRLDSLNARRFQIIEMLTAERNRLTHATKWTKKGIEGHIKMLERLLVEIDGEMDDLIKNSPIWRQKDKILQSIPGIGKVMVRTVLADVPEIGTMNRKQISALIGVAPLNRDSGKYKGRRSIWGGRSKVRTVLYMCAVTAIRCNSKIKVFYERLREAGKCFKVAITACMRKLLVIINSMIKTETCWIS

SEQ ID NO: 241552 - protein, 398 aa, unidentified
MAQESVSITHPMALDYDSTLVLAIELSNTSWVLAAQVPGLPRVKAKQSIAPTAEALLAAIEAYRDRARTAGKAVERVVATYEASWSGFWLARWLLRRGVETHIVQPSSVPVDRRARRAKSEGIDAELLLRTLLAWLRGEPHVCSMVPIPDETDEDERRRVGEREDLVAERVSLVNRIGAVLATLGVGDYNPLRRDRRERLDALRTALGDPLPPHARARILRMLGRLELVCAQIVELERERDAVLEAEAPDKAEEMIQQLAGLRGIGVQSATVLVREAFVREFANGKALGAYAGLAATPFSSGGTEREQGIDKAGNRRLRTAMIELAWLWQRYQPGSAQVIWFRERVGGTGKRMRKVMVVAMARRLLIALWRFATQGVVPEGVVPEGVVPEGAVLKPVS

SEQ ID NO: 241553 - protein, 422 aa, unidentified
MQNTVASKLKQVPEGFLILGVDPHKKRHAAVAITQDFTAQAKFKFDNTREGFEFMLSRAKMEMVNSGCRGVIFAIETGGHYWRNLAYFLDEQGIPYRFINQFTLKRRREGKDLNRRKNDYRDSEVAAQLLCTGEFVESRLPQGVYAELRAAHNAYRRLVKERTRITNLIKGLLDAGFPEFTHVFKDPCGLTALSVLSTCTIPSMIAGMTEDEFVATIEAHHQGRRLMRRKLGVLHSIARASIGIVAGARSVSTEISFLVEKLELIRRHIRIIGGTLVRLVDETEEGKYLLSIRGLNYIAVAGLLAELGCFKSYRSAKQMIKMAGSNPTESESGGKRRSRSPMSKQGRPVLRYCAWTSVIPMLRLNPDFRAWAKNMRERPVHANPLNGREIVGAAINRLFRLAFALVKRQTFYRSPQLVKLAC

SEQ ID NO: 241554 - protein, 349 aa, unidentified
MSHKSAPPAVSTIGIDLGKNSFHLVGLDQRGAIVWQLKCSRAQLERRLANIPSCLIGMEACSGAHYIARQLAALGHDVRLMPAQYVKPFLKGHKNDYRDAEAIAEAVQRPTMHFVAIKTPEQMDLLALHRVRSRLVGQRTGVINQIRGFLIERGITVRQGVVPLRRALPDILSSNTGALSPRMVNLIAELVQDWRRLDERIAAVSADIESLVEQDEACQRVMTVPGVGPIISSAVVAAIGNGAGFTQGRDFGAWLGLVPKQESTGDRTILGKISKRGNKYLRTLFVQAAHVVLARRPNAAMRSLWPWIEQASRRLHRNMLAIALANKLARIAWAVLARGRSYQPRIVAI

SEQ ID NO: 241555 - protein, 440 aa, unidentified
MNQEDRSRLEDFRQFRKEVRGSSEYLLVGIDVAKDKHHAFFGTATGKTVFRRLVFENNLEGFRKLLGQAEAMKVREGLKRVVFGMEPTGNYHKPLGEHLIRCGHGVVLVSGVAAHENRKTLDGRWDTNDTRDAANVADLISQGKCLFYEFPVGALQDLRNLLSLKRRLKKQEHGYRIRIRNHLLAKYFPELDRYYEQSETTALAIVRWCLDPSEIAGLEYKRFFQMVSSARGRCSQEKRLQAIWKMAVDSVGCEAGPTVEFEAQVMVEGLKQIRESIRQIDEKIQEICSQFPEYEFLLSIPGFGPDVSSKVLGAIGDPFRFQNGRQVLKMAGLDLSAERSGKSSERVVPVISKRGKADLRYALYQAALIASVRNPDFIVYYTDKLRGREREPGIKIKMRVKLAAKLLLIAWTLMKKKEPFHSSYVRSAGQSFSAGGGRER

SEQ ID NO: 241556 - protein, 342 aa, unidentified
MGLDTGFSATAVCLIDEHGEILFEGMRDTNAGQVKDILRRFGVESVELITIEAGVGTHMVRELREYGLPVQVVEVRKASKFLAIRRQKTDANDARGLAELGRLGRSLGAGVFVKTLDCQNIRSQLNVRKNLVQQRIKIDALVQSIVRLHGGTLSTRVGIGKLASGIEDQLPRLQGDGLDVDAEVRPLVEIAESLRFHIAGMDKRFKELTNDHPVCSVLMTVPGVGPITALSFFSAIGDPFRFDRNRDVGPYLGLTPSVHQSGVLSRPGRISRFGNKLTRTHLVSAATVLLCSTKRESALQIWGLELSRKVGLSKARVAVARKMAVIMLGMWKSGSTFDPGHT

SEQ ID NO: 241557 - protein, 355 aa, unidentified
MLTIDTSSRQSTIVVAGVDTHKHTHYAAVLDLTGRVLGSMEFPAIGAGYQALLDWVAGFGVIDRVGVELTGSYGAGLTRHLSAAGVQVVEVNTTDKVTRARRGKDDAIDAVAAAQKVLSGMATATPKSTTGASEAIRQLTASRDLAVRQRTQTMNQIHALIVTADETLRAQLRTLTRAKLLATLRAFRPDRTRLAEPAQAAKLTLRRLAERIRHLDEEIAAADTDLALLVEATAPTLLQRPGIGVHSAARFIITAADNAHRIRSSAAFARLCGTAPIPASSRQTHRMRLHRGGNRQANRALHMVIVGRLRHHPETRAYLNKKLTEGKSKKDAIRALKRYLAREIFHALKTDLVLT

SEQ ID NO: 241558 - protein, 368 aa, unidentified
MENDGNIIIQRNMENNMEQVNKFLSVYKDHDIVIESSTSGKYLCKELLKLNYTIHLINPAKVPEISNNYKKTDREDSFQLADVYRKGGMKEIYIPSGEIENIRSLVRYRHSLGEELTLKKNKIHALLTSYGIIIKATDPFGRKGLREIESNYSNLNYSDRIVLRSLLSDISYIKDREREIETEISSISDNNNNIKLLMTIPGINFYTAAGILSEIGTINRFDNKLKFASYTGLIPSEYSSGTKTVKGHITKHGPSILRFFLVETVHSLIKFTKKFKSKYLSIVRRLGKKRSIIAIARILAETIYSMLKNNVKFVDQERKETINPNELYFRRLEELSMKKINNMRRIANNGNVQGDSANLIYRGGIKDC

SEQ ID NO: 241559 - protein, 401 aa, unidentified
MKRLSGGIDVGSEFHHITILDEEDKVLYHQKVAHKLNEFAESIKLFKQIEKKEGGKISFALEGKNGYSAPLDRILLDQGFTLYNVDNLKLKRFRQAFAGEWRDDQRDSLMLSKMLKLKDHINSEREKVFIKIEKPSPVTESLKLLSRHQQTLIEEKVRLINRLGKKLLEVCPQILRLGKLKNKKITAILAQYPDFSKYKRITLKSLLKIKGIGKRQAPFLLKRLNHLEYMPGQTDIYQTIISSYAKRILELQKEIKDIDRKLDEIGNQSKEVKHLKTLPGVATKLASRLIGEIGDINRFPSEKQVAIYCGIACVDNNSGKVTKARVVYKANKICKQTLITMAGGSIRLSLQCKAYYLKKRAEGKSHNHTLRCLARQLIKVIYKMLTEDRDYMVRKELKKVA

SEQ ID NO: 241560 - protein, 333 aa, unidentified
MKKMKRGDMMKKSYVGLDIHEESITGIALNEKGVTEFYDDFPNTKEAIQGFLSGVPSPQITIAIEACELWRGVYYILSELEYQVVLANPAKTRQIAGVKKTDKVDATTLAELLRIGYLPWVHIPGKGILLIRDVTRHRKRLVEDLTRLKCRAKSYLRREGIKFPKTWNKETYEFFRNASLHTGQLVNVMDTINLQIKEVDKEIRVLAKNTPLSGVLRTAPGIGNFGSLMIIGEVSEVTRFPRPKNLVSYAGLCPGIYQSGPKSHPVRNKACNKYLKWIMYECSGKAITMDTKYKTHYWKLFKRKGEHTARRSTARKMLTDVWYMLTYEEPYRP

SEQ ID NO: 241561 - protein, 385 aa, unidentified
MRSQTFIPRDYDVFSGLDVDKRSISVTFTDHNGFLKSLRMPYSVEHLLNHVRKHFPNQKVAFVYEAGPTGYGLYDGIVAQSYPCLIAAPSMIPKAPGQRVKTNRLDSRSLSESLRGGQLKSIHVPTAVYRELRHLTQLRDVLMSELVGMKQRIKSLLLFEGIEFPPAPPGSQWSSIVKNKLRKLPCSGTVRFKLDQLLDSLEFNEKQILKTIREIRRYCQNDPELSQCMKYLMSLPGIGWIVASQLLARIGDWRELHNIRQLGGFLGLAPTEHSTGERIDRGSITRTGDERLRSKVIQASWSAIRQDNELREFFRAVCRKHPREVASRVAIVAVARKLSVRIAVVLMKQRPYEVREKVHLAPLTQEETSPQGTTRREPEAGEKNS

SEQ ID NO: 241562 - protein, 344 aa, unidentified
MVTFAALDVSQESTAICVVDEAGRIVAEKKIPTCPDRIESWLTENAPDLDRVGMETGPLAVWLWNELREKGLPIVCMDARHASAALKVRANKTDRNDAVGLAQIVRTGWFKQVTIKSRISYELRSLLAAREVLVRSRVKIENEIRGLLRTFGVLFGKAEGGFARRANQILTGELDASPMMREVIDSLAKARCALLDRIKDLDRQVLAAAKSDATVRLFMTAPGIGPITALSVASAFDDVGRFKRSSSAGAYLGLTPRRYESGEVSRNGRISKHGNKMTRKHLYEAATTLLTRTTAFSTLKAWGLKLAKAVGFKKARVAVARKLAVILHAMWKTNTPFRWNAAAA

SEQ ID NO: 241563 - protein, 343 aa, unidentified
MQAVTTIGLDIAKSVFQVHGVDCNGQVVIRRQLKRRYVLAFFEKLAPCLIGIEACASSHHWSRQLQTLGHTVRLMPPSYVKPYVKRQKNDATDAEAICEAVSRANMRFVPTKTPEQQSGLVLHRTRHLCIRQQTSVINAIRAHCAEFGIVAPVGRRGIEELLNVIANANDEQVPEIARACLSALGDQLHRIKAQILAFDRMIGAWHRSCAASKRLDEIPGVGPALATALVASIADPRTFRSGRDFAAWIGLVPKQSSSGGKPRLGSISKQGDRYLRGLFTAGALAVIRYAKIHRIGHRPWLTALLARRPTKVAAIALANKIARMAWAMMARGERYREPAALAA

SEQ ID NO: 241564 - protein, 385 aa, unidentified
MSSHRQRVRPGPGRSSTLLTPDRAGNVVGVDPHKRTLTATLVDPRGGVVASEHFRVSGDGHRALEAWARQFGPIVRWGIEGASAFGRHTAIFLAGRGYDVRDVCPNRTGRQDRARQRGKSDVLDSERVARETLAHPMLPKAFKRAGQDAGPDQQAELLAIWWQARCSLRQRRQHLLSEADALLGGLPLELIERLPETQKVRPRLAALCHVTGRRRFDPPTALRVRTLGGYRAEIAKLDTEDKQVTRELATLVQASGTTLHELCGLSTLSIAELLVEVGDPRRFTAGGFARFNGTAPLAASTAEGPGGPVRHRYNPGGNRRVNAILYRMAVTQLRCEPRAKKLYAEARANNHTKKEARRILKRHLSDVVYRRMTRDQAVPRPLIAA

SEQ ID NO: 241565 - protein, 355 aa, unidentified
MSQEKYIGMDVHQATVSAAVRDRNGNLLMECVLETKADTLLEFVQGLHGTLSLAFEEGTLAAWLHDLLKPHVNQVVVCDPRKAALLRNGNKNDRIDARNLSELLRTNQLKPVYHGEHGLRTLKELGRSYLTVSKEMTRTMNRIKSLYRSWAIPCAGTTVYAPRHRREWLAKIAEPGARVRAEHLYEQLDHLQPIRVRARRELLQESHKHDVVKRLRQIPSIGQIRAALLVALLQTPHRFRSKRQIWAYSGFAIETHDSGEYRYVRGKIQRNRERITVRGLNRNHNPDLKNIFKGAAISASSRPGPLQDFYETRVAMGMRPTMARLTLARKIAAITLTLWKKGANFDPQQLRRQAA

SEQ ID NO: 241566 - protein, 340 aa, unidentified
MSEVITIGLDLAKNVFQVHGIDAAGKVVICRQLRRSQVLPFFKKLGPCLIGMEACATAHHWARQLTGLGFEVKLMPPHYVKPYVKRGKNDAADAAAICEAVTRPSMRFVAIKSVEQQGILMVHRTRELLVRQRTMAVNAMRAHMAELGLVAPVGVPQVKKLLAIIADGDDGRLPPVARSCLEALARQFLSLDTEINAAEKRIHAWHRSNETSQRLEAIPGIGRITASALAASVSDPEVFRSGRELAAWIGLVPRQNSTGGKQRLGRICKQGDPYLRWLLVAGALSVVRHAKGKDPAKMPWLAEIIARKPTKVAAVALANKNARRVWAILMRGDGYCPATS

SEQ ID NO: 241567 - protein, 342 aa, unidentified
MQITTLGIDIGKSWFHVIGLDEAGKPVIREKLNRARLMQFMSTRHICVVGMEACAGSQYLARCFSAIGHDVKLIAPRFVKAYLKSNKNDFNDAAAIAEAVQRPTMRFVAVRSIDQADLQAVHRVRDQLISERTSVVNQIRAFLLEYGIAVPVGRCRLHKQLPQILEAANNGLSPVMRALVHQLQTRLRRIQEEAEALEAQIERVASQDDRCRNLRTIPGIGPLTATALVAAVGNGANFRCSRDMAAWIGLVPRQYSTGGRSRLLGISKRGNGYLRRLLIHGARSVIQNTDRAVHRFGAWLTQLETRAHSNVVAVGLANKLARMAWAVLRNAEPYRRIGAAAA

SEQ ID NO: 241568 - protein, 379 aa, unidentified
MRKDIRHVGFDVDSDKIAVAVAEPEGEVRSLGTIPHTGESVRRLVKKLGPASRLRVCYEAGPHGYGLYWLLSSLGVHCDVIAPTLVPVKSGDRVKTNRRDAMKLARSYRSGDLTAVWVPDAEHEALRDLVRAREVAKKDQLRARHRLGKFLLRRGLRAAAGMKSWTKKHLLWVKTLRFEHPAQEATYLDYLHEVEHAAERLARLERAIDQAIEALPAEMRALIAGLQALRGIKQVSAATIVAEVGPLSRFPRPKQLMGYSGMVSSEDSTGDSVRRGAITKTGNAHLRRIVGEAAWAYQYRPAMSPEMKKRQEDLSEEVKEIAWKAQHRLCTRFKRLSAKGKLRQKVTTAIGRELLGFIWAIGVQVEKEQRLSKTRARAA

SEQ ID NO: 241569 - protein, 355 aa, unidentified
MKRNTKYVGLDVHQATTVASVRGTSGRMIARSVLETEARTISEFFRGMRGTIHVALEEGTQAQWLYDLLTPQVDRVVVCDRRGEKRSGNKGDRVDADELSHQLRLGALRPVYHGDRHHADLKELTRAYRNLVGDSTRVMLRIKALLRARAIRARGTSVYQAGDRAQWIDQLPERGARFRAEGLYAQFDLLDALRKKAKSAMVAEARKDPAWPVLDSVPFYGPVRISLLLATIGTPWRFRTKRNLWAYAGLAVITFSSADYEIVDGRPRRRRRRPLTRGLNRNYNRVLKSVFKGAANAATGRPGPLLDFYQELLERGMREELARVTLARKIAALTLRIWKTGEPFDPTQLTQQQRR

SEQ ID NO: 241570 - protein, 407 aa, unidentified
MIFAGVDWAEAHHDVHIQDEEGRRLGGGRLPDGIEGIARFHELVAARADDPGEVVIGIETDRGLFAAALVAAEYQVFAVNPMSVSRYRDRHKVSGAKSDPGDAKVLADLVRTDRHNHRRVIPDTELAEAVKVLARAHQSMIWNRRRQLNQLRSALREFYPAALAAFDDLASGDAIEVLKVAPEPALGAALSKTQIAAALRRGGRTRRIDERAAAIQAALRGPQLQPPPVIAAAMGTSVAALVPVIGEMTRQITGLEQQLAADFEQHPDAEVVRSLPGLGTILGARVLGEFGDVPDRYADAKSRRNYAGTAPITRASGTRRVVLARHARNKRLADAIYLWAFAALTASPGARTLYDRRRAAGDTHHQALRALGNRLVGFLHGCLATRTLHDEDIAWARYTVSTHTKAA

SEQ ID NO: 241571 - protein, 341 aa, unidentified
MKSVGVDLHKQSISVCVMVKDGQKRKVEQRRSLRCADPEGIRRFFEQLGSFQVVVEATSSYEWFFLLIEDLADRCVLAHPKKLRVIAESKHKSDKIDAQVLAEFLLLDMIPESYRPTPRVRQHRVLVRHRNAVQKQITAVKCKLRYKASFYNADIAALFTARGLLHLAKIAMSSADRFECRSLQDQLAFLKEQLKAANKELESFARTAPVAEREARAVLATMPEVGPVTTDVILSETGDVRRFRGAKRIVAYAGLDPGFRESAGKGKQLSITKEGSRLLRWALIETAWRLVRKTARWRGLFDRLRATTGHKKKAIVGVARRLLCVLYAMLRDGKAYRLAIS

SEQ ID NO: 241572 - protein, 398 aa, unidentified
MTSGFGVFLGLDVGKGEHHAVGLNPTGKRLHDGPLPNSEPKLRALFDKLAVHGPLLVVVDQPATIGALPVAVARGSGHQVAYLPGLAMRRIADLYPGRAKTDARDAFIIADAARTLPHTLRPVDVGDDALAELDVLVGFDDDLAGEATRIANRIRGLLTGIHPALERAIGPKISHPAVLEILSRCGGPTGIAKAGRRKLTAIASAHAPRMGDKLIAAIMAALAEQTVTVPGATAADSVLPRLADSLKTVLQQRKQVAAEVEEILDAHPLAGVLTSMPGIGIRTAARILLEIGDATGFKSSGHLAAYAGIAPVTRSSGSSIKGEHPARTGNRKLKRAFFLAAFAALSDPTSRTYYDHKRAEGKKHNAALICLARRRCDVLFAMLRTKTFYRAPETTAAA

SEQ ID NO: 241573 - protein, 426 aa, unidentified
MWDARRRVLKIKSLKHGIIQDKRGNVMRAVFGIDVSKTSSEVAILVNGEKIHGYTMLNDAIGFNRLLNDLKTVHNPEIIFEATGVYSRRLQAFLEEYGYAYTRLNPLEAKKQLDSLRVRKTDKIDAEKLAKSQLVHNRKPTYVQEEVYQHLRDLSRFYQNMTEDLVRAKNRLHKVLQVTFPELENLLSTPTGEQYWNLVMAFPCKEFVLSLSQSNLCEIIRQSTSKRISEKRIAYLTDKLIKLAKQSFCAVKKTSPMLEEVRYYAQELLRLSERRQVVLNDMVALAQPLPEYDILRSIPGIAETTATSIIGELGDIRRFQSTNQINAFIGIDLRHYESGNFLAKEHITKRGNPYARKILFKCIHNIASASHTNPCHISDFYEKRKRQSQTTSTKPHTIASIHRLIRTMYYLIMHNKLYDYTLAPSH

SEQ ID NO: 241574 - protein, 400 aa, unidentified
MRVVFGIDVSKASSEVAILVNGEKVHNYTMSNDAIGFSRLLGDLKTVHKPEIIFEATGVYSRRLQAFLDEHGYAYTRLNPLEAKKQLDSLRVRKTNQIDAEKLAQSQFVLNRKPTYVQEEVYQNLRDLSRFYQNLTEDIVRAKNRLHRVLQVTFPELENILSTPSGEQYWNLVIAFPCKDCVLELSNDELSKSIRLSTSKRISDKRVAYLAEKLIALANQSYCAVKKTSPILEEVRYYTKELLRLSEQRQAVLDEMVELAQPLPEYDILLSIPGIAETTATSIIGELGDIRRFQSANQINAFIGIDLRHYESGNFLAKEHITKRGNPYARKILFKCIHNIASASHTNPCHIADFYEKRKRQSQTTSTKPHTIASIHRLIRTMYYLIMHNKLYDYASTQNR

SEQ ID NO: 241575 - protein, 338 aa, unidentified
MNKFSGIDLHSNNSVVVVSDEADRMVYQRRLPNDPVQIQAALAPHREDLVGVVIEATFNWYWLVDDLMKEGYVVHLANPAAIRQYDGLKYSGDFADAAYLAQLLRLGLLPEGYIYPPQGRQVRDLSRKRMQLVQCRTAQILAIENLFSRQTGGQMQGERVKRLDEAQVSGFGFAPDVTLAMQANLAVMQTLQEEIEIIEKRLMERVKLHPDYALLNSVPGIGPVLATTIMLETGTISRFAEVGNFSSYCRCVDSRRESNRRKKGEGNTKNGNKYLAWAFVEAANFAIRSCPEARRFYERKKRARNRIVAIKALAHKLARACYHMLREHKPFEIARCFG

SEQ ID NO: 241576 - protein, 391 aa, unidentified
MYLVGIDVSKFKHDCFIMTETGEVIKNSFSFDNNDSGFTLLLDVIKSLNQSQKIKIGLEATGHYGNNLKLFLAENNYSFMELNPYLVKKFAESFTLRRTKTDKLDAMTIASVLGSPNLTYEPYQISSYHISSLKSLTRYREAFVKERSLHLVQLTNIMDQIFPEFKPFFKGKFGATAIYILKKYKTPERISKLTDEDILKIKKISRKISVAKLVNLRELAKNTVGHSSISNQILLKSILNLYTNVDDEVTEIEKQIDSIMSEYKNHIVSIPGISKYSVAQIIGEVGDFKRFSSASKLLAFAGMEPSTVQSGTMDFKGKMVKHGSGHLRYVLMNVAMTIIANNPTFYSYYSKKHKQEGKNHRVALSHVVRKLVRIIYHLEVTNQDFNSNLLK

SEQ ID NO: 241577 - protein, 475 aa, unidentified
MNVKGTKKKNQVVKANIFEQQELLKKAEVIKENLTASTWHELETNGKFDKNAKLSFISDDMLILGCDVGSETHYLRAIDTRGRELSKSAFSFSNDSEGFQSAKEWAVKIAAEQDKSQIVLGLEPTGHYWFCLATWMISNGISVVQVNPYAVKQTKEVEDNSQLKDDTKDPKLIANLVKDGNFGMPYLPEKLYAELRRLSMFRDQLNEDRIRTINRMHREMKIYFPEYKDAFGKVDGAFSLELLKQAPFPDDLIALGEDGIRQIWHDAKLRGRGYSRAGEILQYAKASVGMKDGATAGKTAVKWFVQKIMELDAELAVIENQINQKCQKIPHAGNILEIAGIGENTLSGILAEMGDISRFDDVKEIQKLSGLGLVACSSGKHKGETKISHRGRKRLRYWLFQAAKSAVAHAEEFKELHVYYTTRPDNPLKKMQSLIVIACKLLRIIYTILKNGTVYDPKKMLADIRRQEKKEAIAA

SEQ ID NO: 241578 - protein, 410 aa, unidentified
MAERFVGIDVGLREHRIAVLDRDGEAVGQSFTIAASKDGVATLLRALDARDATPAQTLIGLEASGHLWENLEAALVGAGYRVIVLNPLQTRRYRDVVRRKAKTDDIDAHVIAGLLRSGVAQASYVPDEQVQSLRELARLRARLMADRQDYQRQLIAQLDVVLPEHHAVLGDLLTARARGILAQFPTAQHLAQANPRAIRRAAEDAGARGFSLNDATVVRDSARRSLYSGKAAVARAHVVRTLVNQLERLINAIDEVDRAATALLPPSEPGTGPSDAELLQTIPGIGPQTAATLLGELGALTRFTDARALVAYVGFYPVIHESGDRAATPRLSRVGSRIARRSLYLAAVNAVRRSGEWRTIYLRKKAQGKTAKQALVVVAVKLIHALYAMLKHRQPYNPSRLLVAPATIGT

SEQ ID NO: 241579 - protein, 368 aa, unidentified
MSDDITAYVGLDVHKGSIAIGVAEPGRAAPHFVGTTGPDLAELTKALSRLGRPEQMLLAYEAGPCGYPLARQLAARGYRCEVIAVAKMPRKPGERIKTDRRDALALARYLRGGELTPVCVPDERDEAMRDLSRAREDAVRARLKARQQLKAMLLRHGRPYTGKGAWTQAHERYLARVAFEHTAQAIAFAEYRSAVREADERVERLTTALRQQLADWRWAAVVQALMSLRGIDFVAAVTLVAELGDLSRFAHPKELMSYLGLVPSEYSTGESRVQGAITKTGNGHVRRVLIESAWAYRHPARMGEEITVRNQGQPKAVRDIAWRAQLRLCGRFRRFAARGLPHNKICVAIARELAAFIWDVARHAPGLT

SEQ ID NO: 241580 - protein, 423 aa, unidentified
MDRNDDNRLQTFRQMKQEIRGSEEYLLVGIDVAKDHHDAFFGSARGKTLLKKLVFDTTREGFEKLCLHAESLRVQHGLQKIAFGLEPTADYHKPLGEYLIRQGHRVVLVAGSAVKKNRELLDGRWDKHDAKDAANVADLIGQGKCLFYEFPSPDLTELRSLLSLKRKLKKTEQSSRVRIRNHLIAQYFPELDSYFTCGEGPAIVKWCLDPKELSTLPFEEFARMVSSRNGGEKQRIRLREIHEKAASSIGCEVHPSVPFEAQTLLEAGHQLRTAIGETDKRIAEVCRRFEEYRYLLSIPGFGPDISAKVLGAIGNPHRFRNHRQVLKTAGLDLSADRSGKRTDTTPVISKRGKADLRYGLYQAALIAPQKNPYFMRYFASKVEGRQREKGIGTKMRVKLAAKMLVIAWTLMKKKEVFDPGRMK

SEQ ID NO: 241581 - protein, 312 aa, unidentified
MAVICGIDVSSSSLEARIGAAGAVGSFANTEAGVKLLAAFCMEHGVTLAVMEATGGYERMPYQMLWLEGIAAALVHPHAVRCFAQAMGMLEKTDRLDAGLIAAYAAARGVVAVRPPSAEQQQLRALVTRLRQLTELRTSQQNQKRLVTVPEVLEGFDQMLALFKQQIRDLEQAIAGLLAADPLWSELDRSFRQIKGVAGRTVARLMAELPEIGTLSHKAVAKLVGLAPLAADSGKQRGPRRVRGGRSTVRSILFVITVGVKKYQPQYAEFAQRLAQKGKPPKVIRVALAHKLLTQLNAKARDTRQQLTAIPA

SEQ ID NO: 241582 - protein, 368 aa, unidentified
MIVRIMTYERSTLVNSEKYIGLDVHQATISVAVMDSKGKIVMESILETKAVTILEFFAGLRGTLSVTFEEGTWAAWLYDLLKPHVAKLVVCNPRKNALLKHGNKSDRIDARKLADLLRLNDLEPVYHGETGVRMLRELARSYLTIVKDLSRVMNRLKALYRSWAIPCAGRDVYYTRHRSEWLGKIPEAGTRRRAEQLYLQLDMLQHLRQQARRELLAESRKHAITAKLRKIPSLGPIRSALAVALIQTPHRFRTKRQLWAYSGLALETRTSGEHRYVRGQLQRSKKQISIRGLNKDHNHDLKGLFKAAATRASVQPGPFQDFYQRSLAKGIKPTMVRLTLARKIAAITLTLWKKGENFDVEKLKSQAA

SEQ ID NO: 241583 - protein, 306 aa, unidentified
MTLPRHVFGVDVAGGWIDVFDTANGRSDRIFNDDIGSFVSRLPGDAFVVFEATGGHERLLMETLAAADIAHARVNPRQAREFARATGRLAKTDRVDARALAEMGAALAPRPAARPDPARTRLGELVGRRDAIVAAITAETHRLAMARDGFVRRDIGRMLAVLKARRARLEKEIAAHVRAEETLAREAARLRTAPGVGPTIAAILLARLPELGQLDRRAIASLAGLAPHACDSGLRRGRRHVWGGRPDVRRALYLAAFVATRRHPALKAARERLEAAGKPAKVAILAIARKLLTILNAMIRDQRDFA

SEQ ID NO: 241584 - protein, 381 aa, unidentified
MNEIIIGLDPHKLSNTIAVLDRDENVLARRRCDNDADGLTELLEAVGDYPERVWAVEGANGIGRSIAQRLVAINERVVDVPAKLATRVRVYSTGHGNKTDDTDAVAIARAAIHSKHLRFVQPDDANVALKLLSDRRHEVVASRTQSVCRLHRLIRELIPGGTRRDLTAQRAYDLVTALEVDDPANEMRVELALDHIDDIRRFDLRLDALTKRINTTVKESKTTLTRIYGVGPLNAGLILGEVGDVSRFPSRDHFASYTGTSPLAVSSGDHQRHRLNRSGNRQLNRAIHIAAVVQIRHDTPGRQLFLRKVDEGKTKKEALRVVKRRISDAVWRQLQVDRSDQRAQDNQWPRWPSTRQGNPTYRSPDTPRVNGRPKQPKPVRA

SEQ ID NO: 241585 - protein, 346 aa, unidentified
MNNHNSKNSITVLGIDLAKSSFQLHGVDEKGNRVLKKKLNRSHLTSFIAKLPPCLIGLEACGGAHHWVRVFREFGHTVKMIAPQFVKPYVKSNKNDAVDAEAICEAVQRPNMRFVPSKSIEQQDIQCVHRVRSLLVGRRTAQANQIRGLLMEYGIIIPQGINQLRKAIPEILEDAENTLSPYFRELLRELYEEVVHFDERIATVELKLKVISEQNEDCKRLLTIPGVGLLTATALIAAIGDITVFKSGRELAAWLGLVPRQHSTGGKQTLLGISKRGDTYLRTLLIHGGRAVVRVAHKHQDKRNQWIGEIKQRRGENISNVAVANKNARIAWALLTKKQNYCAIGA

SEQ ID NO: 241586 - protein, 403 aa, unidentified
MITFFAGLDWASQTHAVCIIDAHGAVFERFDIDHTAAGLAELRRHLVAAGSPPVAIERPSGLVVDTLMEAGFTVIPIHPNAVKATRPRYRSHGAKSDASDAYLLADLLRTDGHRFKPLAPQGEEIRALRALVRGRDDLVATRVQLANQLRSLLDSFWPGAVAIFADVDSPIALAFVERYPTPESASRLGPKRMAAFCAQHAYCGRRTAEELLARLHHAPITGTGELEADAKGELARSLARTLTRLVEQIRLLTSRIEHHVASLDDGQIVMSFPRAGRICAAQILAELGSVRERFDSDAQLAAEAGVAPVTYQSGKSKSVTFRWACNHRLRAALTCLADNSRHASAWANRVYTAARSRGCDHPHAIRILARAWVRILWRAWTDRKPYDPAQHQGARLAFESTQG

SEQ ID NO: 241587 - protein, 354 aa, unidentified
MLIIGCDYHPSFQQIAYVDTETGELQELRLEHPEAAQKFYRELGVQGKRVRVGMEASGHARWFERLLAELNFELWIGDAAEIHRKRERKQKTDRQDAQHILRLLLKDDFPRIWVPSWENRDLRQLLWHRHRMVQARTRMMNQLQAVALNEGLRCRKKLWREGGRKQLEAFRLAPWASRRRHDLLELLDRLNPTIAELSQAIEQEVEKCPEARRLMTHPGVGPLTALAFMLIIERADRFQCGKQIASYLGLVPLEDSSGNRRRLGHITKQGNSLLRFLLVEAAQVTVRSLPEWRSKYVHLTMRRGRKIAKVAMARKLAVRLYWMMRKEWDYKQLKKFGSHTGQPGHRDGVKSNIE

SEQ ID NO: 241588 - protein, 374 aa, unidentified
METIYIGVDFHARQQTICYLKTETGELVTCELKHQDKDQVRAFYEQFAGPVIVGLEASGYSPWFERMLEELGCEVWLGHATEIRRRARWRQKNDRRDAELILELMLHDEFPRLHRPAMPSREVMRMLRYRQNLIKMRTMSKNSLQALALQAGVARRSHLFTREGKQELAAALMSPAMQWQQEHWLQLLEPLNQQVLESMVWLKAQSKGDPVVARLRTHPGIGLLTSLCLAHTLQPVDRFRNTRKVAAYAGFDPVERSSAERKRFLGISKAGPRLLRHLLVEAAHIAIRKDEDLKRFYQRLADRRGRPKAKVAAARKLLIRAYIMLRDEIDYAEFRRRAVAARLARLGHGPKVPEVVIGQPASTECQEQLPRVRK

SEQ ID NO: 241589 - protein, 354 aa, unidentified
MTSTKYIGMDVHKESISIAVMNAAGKIVMECVIETKANMILQCIDGLRGDLHVTFEEGTSAAWLYDLLKPHVTELIVCDPRKNASMREDSQNDKIDARRLAELLRIDHLSPVYHGEHGLRTLKELVRSYLTVTKDLVRVKTRVKAIYRSWAIPCNGKEVYAACHRAEWLEKIKELGVRRRAEFYYQQLDALRVLRQGVRRELLAESKKQRAWKQLCQIPAIGPIRAAVLLGILQTPHRFRTKRPLWKYSGLAIETCSSADHRSIHGQLQRSKKNSVRGLNQNCNHDLKNLFKGAAVVASSKPGPFQEFYAALLAKGMRPEMARLTLARKIATIVLIVWKKGVSFDAQHLKPQTA

SEQ ID NO: 241590 - protein, 452 aa, unidentified
MAKKGKRRSDQLPVLHPDAAGIDVGASELFAAVSADRDPQPVRSFPTFTRDLNALADWLQQCGIHSVAMESTSVYWIPVYQILESRGLEVYLVNAQHVKNVPVRKTDVSDCQWLQYLHSVGLLRASFRPPGVICAIRSVWRHRSSLIEMAAEHVMHMQKALDQMNLQIHRVLSDITGLSGLRILDSILAGERDPVTLARLCHSRVKSSEGTVAKSLEGDYRPEHVFALRQSLAAFRYYQELIIASDVEIQRQLGDLETAETAEKTTPKRTKASPYQRRRYEPKAFDLRSELYRIFGVDLTNVPGISAITAQTILCEIGTDVSRFRNASSFASWLGLCPEKKISGGKVLYTKSRRVRSRVASALRMGAHSLHHAKDYLGEFFRRITRKLGKAQATTATAHKLARIVYHLLSTKQAYDESVFHRCEEDTLRRAELRLRKHAAALGFQVIPAANG

SEQ ID NO: 241591 - protein, 348 aa, unidentified
MRFYTNSHKHSCGIDLHTKMMYICILDSDANILIHKNIPTNTKAFLKLIEPYKEDIVIGVECMFAWYWLADLCAKENLEFILGHALYMRCIHGGKTKNDKIDSEKIARIIQGKNFPLAYAYPAELRPIRDLMRRRSHLVRVKSEIQSHIKITNYQYNLKPFEKNIVHKGNREGIADHFQDPSVRLNVETDIAVMDALHDQINHLENYIIRMTKNYDGRMLYRLKTVPGIGDVLALTMMYEILSIERFPTVQKFCSYSRLVKCTKESAGKKSGSSGSKIGNAHLKWAFSEAAILFMRNNQQAIKYVAKLTKKFGKGKAISILAHKLGRAIYFMMKRKDVFDVKYFFRTC

SEQ ID NO: 241592 - protein, 344 aa, unidentified
MIYVGVDLHLRFCYMTALDASGRVLQHGPVMNQGERLRGYFTGLQSSLKKEEEPVAVAVEACGFWAPFVEVVEPLVERVVLVHPARVKAIASAKLKNDRIDSATLAHLLRADLLPEAWKADRATRDLREVLRLRVALGQQRTRWKNQVHATLHRHGLRPPVTDLFGLAGRAWLATAELRATAAQVRDTCLRLIDELDQEVYALDQQLRAQAHADPDARHLMSIPGIGPFSALALKAEIGDIHRFGSKRSLYNYAGLVPVLRQSANRKHTGAITHAGPGTLRWVLNEAALTAVRCSAGARAYFERLCRRRHPHVARTALARKLLGAVYFLWKHGVCFDEQVFAAM

SEQ ID NO: 241593 - protein, 344 aa, unidentified
MSITTIGLDLAKSIFQVHGVDAQGRAVLKRRIRRRDLLAFFEELPSCLVGMEACSSAHHWARELVALGHDVRLIPPQYAKPYVKRNKTDAADAEAICEAVGRPNMRFVPIKSKESQGLLTLHRVRSLLVRQRTAAVNSARGLLSEFGIVAAKGICRVAVLRREMEAADEQVLPREARAALDALFEHLDALTLKLEAVDREILAWHKASEASQRLATAPGVGPLTATALIAAVGDASQFPSARHFAAWLGLTPRMSASGNRAHIGRISKGGDRYLRTLLIHGARAMVGTSFRRGVKPRPWLQALIARRPVNVASVAVAHKTARALWAMIRREEAYRAPTVFEAAA

SEQ ID NO: 241594 - protein, 308 aa, unidentified
MPQPVIGCDLSRAFLDLCRLPSGMTQRVANTPDAIATWVDTLERDVLVVFEATSGCDGDLIAALAERGQPFSRVNPRQAREFARAVGVLAKTDRVDARVLAQMGAALPLPITVPVSASRSRLSDFLRRRRQLVEMRKAEKLHLYSAGQDEIAAGVKAMIELLGRQIADFDRKIAGLIAEDQTLAAQARLLSAVPGVGPTVLATLLGELPELGTLCRRRIASLAGLAPHARESGTWRGARRIWGGRRKVREALYIAALTASRRVPALTAMRDRMRQKGKAPKTILIAVARQLLVILNAMLRTGTPMKEA

SEQ ID NO: 241595 - protein, 420 aa, unidentified
MNASYFVAGIDVHKSMLAVVIIDAAREGKFAFQQRKFGTTASQLRDLRQWLIEQQVREAVMESTAQYWKPVWHELEGHCQLQLAQAHSNRAPKGRKRDLAAAERLVRRHIAGELIVSFVPAAEQRLWRTMRRAKHQLTRDRIRMHNQIESLLEESRLKLSGWVSDLLGVSSRRILRALAAGEADPAKLAALADRSLRASQEQLQDALSAASTMGVLHRQILALFLARLDLIEQQMQTLEHNVAQAMQQHHEAVHRLAEVPGFGIDSAQQVIAEIGPAAASFPSPEQLSSWVGTCPGREESAEVSKSNRSPKGNRMMRRVLAQVANAAVKSKGSVFQILYRKMVVRLGHNKTIWAIAHRLCRLTWKILHQKVRYVEYGSRPNPQAVQKRANKLMRELRSLGYQVQIQPVTAQAVDPQAVSS

SEQ ID NO: 241596 - protein, 374 aa, unidentified
MKNVCGLDVHKDSIFMCIIKKNGDKVEEKFGVLTPELDRLRDLLVYHSVGDIAMESTSIYWVPIWRVLYSDFNIKIVNPYFIKQLPGRKTDVKDAQWIATVLQKELIKGSFIPDPIIQELRLYDRRIFYLNRNLQHAEQNIDLILQRCNIRLSNYVSDIGGKSMQKVIDSIIEGKTDPDILLLLVHKRTRNKHGDEAIKAALTGVISKTDRMMLKLSREETCMYERQIEECYVEMNSICQTYFSQEIELLQTIPGIKKDSAMRIVAEIGVDMKAFITASAIVGWAGLKPRNDESAGKIKGRKTLHGNKFLRVLLVQCAWAACRTKGSRFFYKYQTLTKRMNHNKALLANARKILVIIWNILSKKQPFTTTYIAA

SEQ ID NO: 241597 - protein, 468 aa, unidentified
MPSASTHRKRQLDELACVHPNAAGLDIGSEEIVVAVPPDRDPQPVRVFQTFTADLHALVAWLGACGIDTVALESTGVFWIPIYELLEAAGIVPYLVNARHVKTVPGRKTDWNDAQWLQKLHALGLLHASFRPDAEIRTLRTLARYRSELVERRAPHINHMIQALKHMNIQLNLVLSDITGVSGLAMLRAIIAGERDAERLAEFRQPGCKHSFAEIVKALTGTWDDAQIFILTQSVELFDYYSTKLEACDGQLEQQYQAMESRWEKDAPLPDLPPAKGESKSKNAMSFNARAQIARVIGVDLVAVMGLSAITVQTIISEIGTDMERFPTVKHFRSWLGLAPHNDISGGKVLRSRTMNVHSRANQAFRQAAHSVTRAHSSIGAYYRAMRARLGPKQAIVATAHKIARIVYHLLKTGEPYREESDAEYERKRQERELKHLARRAQKLGYTLTAVPATAPETHPEPGGEGSC

SEQ ID NO: 241598 - protein, 319 aa, unidentified
MSAETIIGIDVSRDWLDGFCLPGKQRFRLQNSPDGYARLLETLQSMPDDLKVGFEATGGQEWALWRVLISMGINAVQLPPAQIKAFAFSMGKRAKTDQIDAELIARFMVVRPEAGRALPDEKLQLLRALTVRRAQMVDARKRLSAQISARRKQGVSAELEDMDSSLKAFLESQISELEQRIEGVIAQGKELSAKAELLRSIPGIGPVSVAMLLAEMPELGRMTATEAAAMTGLAPMSHDSGAMRGKRVISGGRRSLRHVLFQAGLAASCHNPVLKAVAKRMKQRGKPHKLVIIAIARRLVTIANAVLKTGLPWRISPVV

SEQ ID NO: 241599 - protein, 327 aa, unidentified
MKDKPESKPDAGAFYVGIDVSKDKLAVCAGDLFEGEIENNRAAMGRLVRDLRRKASRGTAFRFALEETGYYSLDVHLTLDRLGQEVCVLDPASVRHYAIACKVMAKTDRIDARVIRRYAEETACEPTPVPSPTRLALREAIRTRSLLVKVRIMVQTLAKIVSGTVCRTVLRDVDRFLAARILKVEQEMLERVRDDARLNDVVECLSQLPGVGTLTATTVAALAPELGSLGKRRSAALVGLAPYPRESGRYKGQRKIGGGRADLRRALYMPALVAIQHDETLKAFYKRLVFDRKKKPMVALTAVMRKLFAHMDRVVAQRNEAAPETAS

SEQ ID NO: 241600 - protein, 403 aa, unidentified
MNAVGIDVSKGKSTVVALAPGGKFLSRPFDVLHTKSGIKELVSFVRTLDGDTRIVMEHTGRYYEPLLQWLVASDLFVTAVNPKLIKDFGNNTLRKVKTDKADAKKIARYALDNWCDLRQHTGMDTTRTQLKTMNRQFAFCMKQKTACKNNLIALIDQVYPGANTYFESPARADGSQKWVDYVLTFWHVDYVCSMTLSTFTERYRKWCHRHGYNFQPDKPGLLMEKAKDLIAMLPMDKTTKMLVQTSIAQLNVLSKTVEALRTQMIALAEQLPEYPVVIDMNGVGPTLASQLIAEIGDITRFPRRGSLTAFAGVDPGAKQSGTMQVKSNKTSKAGSPHLRRALFQIVSGLLMRSPDDAVYNFMDKKRSEGKPYYVYMTAGANKFLRIYYGRVNEYLASCPKDHE

SEQ ID NO: 241601 - protein, 414 aa, unidentified
MFAVGVDVSNGRSMVAVLGARRSVVVQPHEVPHTADGFAELAARLHALDGEVRIVMEHTGRYYESFAMSMYRAGFFVSAVNPLAIKGYQEGISVRKVKTDEADALKIAQFAIDKWEILPHYTPMDTIRYDLKTLHRQFQLSSKTKTALNNNLIALLEQSYPGANRYFDSPVRPDGSQKWVDFVDTFWHVDCVARVSRKAFVERYQKWCKRHGYNFSGAKAVEIHEDARQRFPLVPKSDTCKLMVREAVAQLNAVSRTVETYRAEMDRLASQLPEYETVMAMTGVGKSMGPQLIAEIGDLRRFAHQKSLVGFAGTDPIKDDSGDKVSDSKPSSKRGSPYLRRTLFVIMTILLQLQPPDDPVYQFLDKKRSEGKPYYVYMTAGMTKFLRIYYGKVRDCLKEKGLWEQPNVDEVNPV

SEQ ID NO: 241602 - protein, 345 aa, unidentified
MNQIIRIGMDTSKHFFQLHGVDAAEQPVLRRKLRRKEVVAFFAKLPPTVIGMEACGASHYWARVLCEFGHEVKLIAPQHVKPYIKRNKNDGRDAEGLCEAMSRPTMQFVPAKTAEQQAALMLVGMRERLVVRRTQLSNAIRGYAAEFGLIAAKGLDKIEPLLADIASDQALPVLARELFAMHGREYAQLQAELKDIEARLMAWHRANADSRRLAQIPGIGPIGATALVMKAPDPRLFRSGRHFAAWIGLTPKDHSTAGKTRLGKITRAGDEMLRSVLVAGATAVIQQARRGRGRASPWLLALLARKSSSKLAAVALANKIARIAWKLLVTGESYDGARMPGALPA

SEQ ID NO: 241603 - protein, 410 aa, unidentified
MVKENFIYVGIDLHKETHTAVMIDCYNQKLGEITFPNRPAAFPKLVTKVKKCNTDGKEVVYGLENAYGYGRALAVWLIDKGYLVKDVNTAISHRQAKHRGAMYRKSDSDDAEAIALATLNMLDKLPDACPNDAYWSLGQLVHRRDNIMKQRTRLVNQLHEQLCIAYPSYKSFFNDISRPTALYFWEHYPSRKYLRGKSVEDLRKELVPVSHNKCSTKTCEKILDAVASDKVKNIDYQDARDMVTLSIVSDLQHYDSQLAEVDKMLEQMYKMLGCTLTTIPGVNVITAVKILAEIGDIKRFSNANKLAQFAGIAPLHLSSSGKGKDVATKQGNRRLQATIYFLAIQMVQVSSKGTPRNSVVRAYYEKRKAEGKTSQQALICISRRLISIIYGMLKHGTEYRMPVVESAGEK

SEQ ID NO: 241604 - protein, 356 aa, unidentified
MQTQVTKKIDFTGQSLFIGLDVHKKSWSVTVVVDGIEHRTFTQPPDPKALNNYLQRMFPGGAYNSAYEAGFCGYGIHRELNSLGIRNIVINAADIPTSQKDKLQKRDPVDSRKIARSLEKGSLHGIHIFDRELEELRSLNRTRFYLMRDLRRSKTRIKSFLQYYGEPIPPEFDNNQWTLKFVSWLKQVKMQTLSGQDAFSNLISSYEYHRSQLLTLSRQIRERIREYDRELYTLLKSISGIGPLTASALITELGDINRFSNIDQLGSYVGLIPRIRESGETTHTGGITFRCNSFLRTLLIESSWQAIRMDPALMQYYHSHLINNKGHKVVIKVARKLVNRIRYVMKNRQPYVTGVV

SEQ ID NO: 241605 - protein, 336 aa, unidentified
MEHLAIDLGGKESQICVRSSDGQIVAERRCRTAALPAYLASRPRSRVVVETCSEAFGMADAALLAGHEVRVVPSTLARSLGVGARRLKSDLRDARVLSEVSCRIDLPSVHVPSREARQRKTMCGMREALVGARTKLLNTVRGWLRAEGRRPRGGDVTTFSARVRVLYAETTLPTYVERQLGTIESLTKEIADADRELAATAKADPIARRLMTVPGVGPSTSVRFVAALDEISRFNGAHAVESYLGLVPGEDSSSERRRRTSITKAGPTALRWCLVQAAWAARRTRRKDPMQRWADDVEKRRGTRVAVLALARKLAGILYAIWRDGTVYEPRRSGSV

SEQ ID NO: 241606 - protein, 345 aa, unidentified
MKIIGCDFHPSFQQIAICDLETGELQERKLSHGDGQAERFYRELSKPALIGIEATGNSQWFLDLVQRLGHEIRVGDAAKIRASYVRKQSTDKRDAGHIFTLLLEKRFPQLWRPSAAMRDQRQLLRHRDKLVEIRTKVKNSLQHLAMNRGMQKKSRLWTRLGMEQFQQLAMPGWAGVRREDLLLLLKQLNHQIEQLDQAVKQAAEQHPQAQLLMTQPGVGPVTALAFVLTIGEVTRFAGSKQLTSYLGLVPSEHSSGSKRRLGAITKQGNCFLRKLLVEAAQTAVRKDEGFRKEYQHRCHHRPKAVAKVAAARKLAVRLYWMLRSQVGYPEIAHIESHPRVPLGDV

SEQ ID NO: 241607 - protein, 340 aa, unidentified
MTITTIGIDLAKNVFAVHGVDQNGKTVLVKSRVTRAALPGLIASLPPCVIGMEACSGAYYWARLFLQYGHEPRLMAAKFVSPYRMAGKSGKNDAADAQAICEAVRRPHMRFVPVKDESQQAMQCLHRNRQGFIEEKTATYNRLRGLISEFGVIAPQSTDALRHMVSAQKSSLPLQFQQCVDDLLEHVDRIEANITEYDRILSRIAKTDHRSQRLMKLKGVGPTTACALVACIGNAHDFKNGRQLAAWLGLTPSQYSSGGKSKLGRITKAGDSYLRTLLVQGARSVLIGAEKRTDLFSRWVCSLVERRGYWRAVVAIAAKNARLCWASLHYGDDFRLYSAS

SEQ ID NO: 241608 - protein, 391 aa, unidentified
MDPEGKTLGSQTFSNTLSGAEAIESWLLKIMKENDFSDLKIATESTSFLDLHLVDFLAQSTKLAPFHPSIYQLNPKLVRNFKRVYPDKEKTDKVDAFVIADRLRFGRLPEPYENHQPYLPLRRLTRYRYHIVQSISKEKAYFLTHLYLKFSGFSVEKPFTSLFGATSLTLITEFSPDELVNLPIEELTQLIIKTGKNRFEDPEGVVEAVRRAARESYRLRPALAPSIDLILGSILQTIRALQDSLKKVEQAIEKEFQAFPNTLQSIKGIGPVYSAGIFSEIGDIRRFPKEDALAKFSGLYWKRYQSGNFEAEETKMSKGGNEYLRYYLIEAANALRVHNAEYRAYYETKFKEVTKHQHKRALVLTARKLVRLVYALLKKGQLYKANYQQEA

SEQ ID NO: 241609 - protein, 331 aa, unidentified
MTEHCYCGIDVAKDRLDVQVLPHRQRFSMDNNATGWDELVERLHALPIAAVGIEPSGGYERGIIRALLAAGLSVRRINPSKLRQFARARGILAKNDRLDAQLIAEYVSIIPTRAVQRAATAERLAEVVTMRRQLCDEHVTIENQAAHVEDAILRRLNKRRLARLKADIHLLDKRMAEIVAADAILAQRYELLTSMRGVGPTLAFTLIALLPELGQMSRKQIAALVGVAPYDFDSGKLKGHRCIYGGRMPVRNILYMAALSAARYNPALKVFHNRLAAANKKPKVIIVAVMRKMITPLNAMVCDNAAWQPAAARANNTVAHSITSSAVASNA

SEQ ID NO: 241610 - protein, 348 aa, unidentified
MNIRVVGIDVGKTVFHIIGMDGHGKVLLRNRLSRPQQLKRLVNLPRCLIGMEASCGAHYLARSLSGFGHDVRLIPAQFVRPFVKSQKNDYVDAEAIAEAVQRPTMRFVPVKTEDQLDLQALHRVRDRLMERRTSVINQIRAFLLERGLTLRAGSNHLRNNLPAVLAAAEQSMSPRIYQLLCLVAEEWRSIEQQIERLDREIETIATSDEACRRLLTVPGIGPLIATAMVAAVGNGSAFGKGREFAAWLGLVPKQHSTGGKAGLLGISKQGNEYLRRLFIHGGRSVQHRVSREKHRFGPWLAQLELRANSNVVGVAMANKLSRIAWVVLNRQEEYRPHENQVPSSGLCA

SEQ ID NO: 241611 - protein, 415 aa, unidentified
MTATPQNQCITRPNCLYIGLELSERTWVVAFSDSLGRKPSVKSMLSGNFEKLEAEILRAKQRFGLDEDCPVACCYESGRDGFWVHRCLVANGVENSIVDAASIQVNRRKKRAKTDRIDASKIVAALIRKLSGDMFACQMIHIPSHIDEDERMLNREMRILKKERTAHICRIKSYLNGQGIKSVTITADFEANLAKFRTADNRPLMPRLQASLTREFKRIQLVNEQIRDLQAEQANLIRAAIKADAAQENENLDKQPESPSRTATLAAKLIQLCGVGPVLSWTLASELFSWRNIKNNKQLAALVGLVPTPHDSGDSSKEQGISKAGRGELRVLMIEAAWGWLQFQPQSELSKWYHAKFNDGTSRNKKRGIVALARKLLIALRKFLIDEEIPAGAKLSGQLSFARSPSLIPRPLPSA

SEQ ID NO: 241612 - protein, 351 aa, unidentified
MNTQQTACPKLYIGIDIHKRSWKVHCATDLFAGKSFSMSPDPKQIHSYVSKHFKEYEVTVAYEAGCCGYHAHRCFEIYGWRSLVVNPADIHRKGKEKHTKTDKIDAQLIARELKDNRLQSIIVPDRKREELRSLFRRRNDLVKDFRRVKSYIKMQLLYFGIREPEEFDNDHWSHKYRNWLDDIMFEYPTAKATLESRMRFFRFVDQELRDVSTQLRRYCKVNYKKDYLLLRSIPGIGGIVACGILCELGDLRRFNNIKHLAGYVGLAPSMYQSGNSQRTMGMTPRANRLLRSYFVEASWQAIRADPVMQAYYRKHQGKNVKSIIVKVARKLLSRTLAVIKTEVPYTIGVIE

SEQ ID NO: 241613 - protein, 366 aa, unidentified
MKKISTVQVFRNEIFKEQKLTIGVDLGDRWSFYCVLDEAGKILLEQKLATTPEAMKQTFGKIPRSLIAMETGTHSPWVSRLLAELGHKLIVAHAQKVELITKSNRKDDRHDARTLARLARIDPELLGPVRHRSAKAQIHLTVIRARAELVNARTALVNAVRGLVKSYGQRLPKCGTQQVNRELAAELNAELREVLEPLLKEIESLNERVKEYDERMEKIAKEVYPQVSLLKQVKGVGTQIALTYVLTIEDPHRFLKSREVGCFLGLKPGRGNSGESEPQKGISKEGDRYLRTMMVRGAHYILGPFGEDSDLRRWGLKLAERGGKNAKKRAVVAVARKLAVLLHRLWVSGEVYEPLRNSQKAMRAVA

SEQ ID NO: 241614 - protein, 377 aa, unidentified
MDQSTTVYVGLDVHKDSIDIALADAARDSEVRHLGTVAGGTDAVSKAMRRLVSAGHRLYIVYEAGPCGYALQRHFAGLGWRCEVVAPSSIPRPPGERVKTDRRDAMKLARLARVGELTPVRVPDEADEALRDLVRARDDAVREQRNARHRLKALLLRNAIAYAGRSAWTAAHLRWLAGVKMEHAAQQIAFQEYLHAVSESGARITRLEHALRDALPTWTLAPVVAALQALRGVQLIAAVTLVAEIQDFWRFTNPRQLMAYLGLVPGENSSGARRRLGAITKAGNAPARRMLVEIAHLYRHPARVSPVIARRQVNLPKTVTDIAWSAQTRLCARFRRLAARRVPHNKIVVAIARELAGFVWAIAREVTPAPSTPQRQQ

SEQ ID NO: 241615 - protein, 451 aa, unidentified
MSKQRNKVVSLPVIEPNAAGIDIGATEIFVAVPAGRDPEPIRSFPTFTVDLERLADWLQQCQIRNVAMESTGVYWIPLFQILEKRKIDVRLVNAHHVKNVPGRKTDVSDCQWIQHLHAVGLLRGSFRPDDEICAIRSLWRHRDNLIQLATLHLQHMQKALDQMNLQIHHVISDLDGTTGLAIMDAILAGERDPLKLARLRHPRIRASEETVMKSLVGDYREEHLFTLRQSLKAYRYYQELIQEVDAQVKQMMQRLPSKVAEGEEPPQGTKRRARKTPWRNEPAQLREDLYRAFGVDLTEIPGVNSLTAQMLLTEIGPNLDRFPTAAAFCSWLRLCPDPRISGGQVLSSRTRPTKNRAALALRIAAQALHRSDSFLGDYFRRMKARMGVPKAMTATAHKLARIIYHMVTTQQEYDATIFQKQEQRRRQLKSARLHTQAAELGFQLVPINCVP

SEQ ID NO: 241616 - protein, 383 aa, unidentified
MTEEAVIIGMDPHKSSNTIAVLARDETMLTRRRFVNSDDGLVEMLDAVAGYRDRVWAVEGANGVGRSVAQRLVAVGEVVVDVPAKLATRVRVYSTGHGTKTDNADAVAIARAAIHSKHLRRVLPDDATVAMKLLSDRRHELVGLRTQAMCRLHRLLRELIAGGAPRQLSAEKAFDLLNDLSPDDPANEMRLEIAFDHIEDVMRLDRKIDDYNRRIVTEIKSSATTLTRLYGIGPINAAVILGEVGDVSRFPNRDHFASYTGTSPISTSSGDHQRHRLNRAGNRRLNHALHIAAITQIRQDTPGRVLYRRKMAEGKTHKEALRCLKRRISDAVWRQLQADRSDDRTQDTRWPRWPAKDTLLVAYRSPDTPRANGRPKQFKPAVV

SEQ ID NO: 241617 - protein, 428 aa, unidentified
MADQMQDIVPKTWVAIDIAKRSHVVLVEFSDGTRRHYRVQRGLADIDRFVAFLHAQDAPIRVGFEPTSNYHRTLAYRLNREGFELRMISSVASARYRDAMFNSWDKNDPKDAAVILALMKQGLTQYYYDPLEAGVHDIQEISKTHHQIVLSRMRIQHSLLTHYLPLYFPEMDRYWHSTRADWFVRFLLRFPVPGSICALTEKAFVKQAWGVVGRKVGKQAILEELYQLAHRSVALPIAEGTPAVEMFRVQLRRYLDLSEERSRMEQLAHALLGDDADYVRLRTVPGIGPILALTILAEAGDLRRFAHHRQFLKYCGLDLAKSQSGATRGLNRLSKRGNARLRCGFWFAGRVAVRMRENSFRAKYERYIRTDPKNPDRKRKALTAVAAKMARVAYAVVKHGQTYRPYHEHDFPGGVIPFNRALEAVGTS

SEQ ID NO: 241618 - protein, 425 aa, unidentified
MWGVILLKIAHPVCCGVDVHKNIIVATIAITDKSNITQYVAKSFATLNADLVRFRTWLLDHQCFNVCMESTGKYWIPVFNILEEANINVLLTHPKYVRAIKGKKTDKKDSKWIADLFKFDMVRSSFIPPKDIRALRELGRYRFKLVCMRSSERNRYQNCMTVSNIGLASVLSDPFGKSATDIMKYVLSSSVFDEEHCKTLIHKSAKKKTETILESIRGCRIESDQHFKMSEASAHIDYLDKAIFRTEAELYVRVQPHYHSVEHLSAQLPGITQLSAALIISEIGADMSVFESSKHLTSWAGLAPANNESAGKKKSVRISKAGQFLKPLLVQCALAAVKSKKETYFADKYNRIVKRRGHKKAIIAIARMMLTCIYHMLSTGEVFNPSDYGELSSPTPKKHILTDESAIAFLAAQGYDVSALSKIAV

SEQ ID NO: 241619 - protein, 350 aa, unidentified
MLAELVNHVVGVDPDRDWITLAVLDARSAGVVAEGRFPATKDGYDDAVAFVDVHSVDSERAWVIEGSAGYGRGLAVALSRRGEWVIEFDRPTRKTKDGAKSDALDAVRAAREMLGRKRLSVPRAHDGVREAIRVHAVTRAGAVRVRTGAINELKAMIVTADDSLRSELRGLRTPAQVAACAKFRNRPRSAVHEKATRAAMRSLAQRIQFLDDEIDAHDRALRELLDQTAPQLIAERGIGYVTAAQFYLAWSHPGRCHSEAAFARLAGTAPVPATSGQNQTRHRLNRGGDRQLNRALYHVAITKQRCDPATRAYIARRVADGKTEREAIRCIKRFLARRVWRLLEHPKITA

SEQ ID NO: 241620 - protein, 356 aa, unidentified
MSYDVKYIGMDVHKEAIVIAVQNGSGKLVMESVIETKASSILQFLHGLRGELHVTWEEGTWAAWLYDLLQPQVQHIVVCNPRRNALLKEGSKSDKVDAQKLADLLRTGMLRPVYHGENGLRTLRELGRSYQTISKDLTRVMNRLKALYRGWGIPCAGTQVYAARAREEWLSKIPQAGVRRRAELLYQQLDGLQALRREVRPEFLAESRKHKAAKLLRQIPCIGPIRAARLIALMQTPYRFRSKRQLWTYSGLGIETHDSAQYHFVSGQVQRSKKPQQVRGLNRNHNHEMKEIFKSAATRASCGRGPFHDFYAALLAKGMKPEMARLTLARKIAAITLTLWKKEEGFDVEQLKTQAA

SEQ ID NO: 241621 - protein, 335 aa, unidentified
MDHTHRPAPAAWVGIDVSQHTLDACYLPASDARPRSASFANDAAGHAALLAWASALAPDTLPGFCLESTGAYGEALALALSDAGRHVAVVNPARVKYAGLMRGQGNKTDKADARLIAEYATRERPPAWAPPRPEVRELQALTRRRDDLRALAAREKTRLAGPGLTAAERKSIRRTAAFLGREADRLQRQADELIAASAALRADRELLESIPGVGATTAQAILAELPEPARFASAQQAAAYAGLAPREYSSGSSVRKRTRLSKAGNARLRKALYLPALTAIRFNPLLKAFFERLVAAGKAKMAAVGACMRKLLMIAYGVLKSRVPFDPSWGTKQTS

SEQ ID NO: 241622 - protein, 354 aa, unidentified
MIIIGADYHPAFQQIAFVDTETGELQERRLEQPEGAEKFYRELAAQGKRVRVGMEASGHARWFERLLAELNIELWIGDAGEIRRKRERKQKTDRQDAQHILRLLLKDDFPRIWVPSWENRDLRQLLWHRHRMVQARTRMMNQLQAVALNEGLRCKKKLWREAGRKQLEAFRLAPWASRRRQDLLELLDRLNPTIAALSQAMEQEVEKCPEAQRLMTHPGVGPLTALAFVLIIERADRFQCGKQIASYLGLVPLEDSSGNRRRLGHITKQGNSLLRFLLVEAGQVTVRSLPEWRSKYVHLTMRRGRKIAKVAMARKLAVRLYWMMRQGWDYEQLKKFGSHSGQPGHRHGVKSNIE

SEQ ID NO: 241623 - protein, 334 aa, unidentified
MKWKYFIGMDVSKATLDVAVVVEREVVYQQQISNTLTALKQLLKTLKKEVMGFELCQAVFCMEHTGIYNYHALRFLHQIGGQVSLQSAVHIKWSLGLQRGKNDRVDALRIARYAYKSREELKLWKPKREVVEKLSRLTTLRERLIHAKNQLEVAYRETAEFDKSAGAMLKSLSNASVKAILRDIEKTEKAIDELIMQDEELKRLFKIITSVQGVGKVTAAAMIVTTNEFKDISEAKQYACYAGVAPFEHSSGSIKGKSRVSDKANKQVKSLLHMAALCAITYNDDLKQYYERKLQEKNNKMLIINAVRNKLIHRIFACVKQNRLYQKNYQPTLV

SEQ ID NO: 241624 - protein, 326 aa, unidentified
MTDSSSQTVVPLFIGIDVSRDKLDVARSDSDSLLTVANDAGGILDLVDRLRRLATLPACIVVEATGGLERAVVDALLDAGLPVAVVNPGHVRHFAKGIRIQAKTDRIDAFVLVEYARRASPRLSEKRSANQVELDALVTCRRQLLLVRTEQSNRRSRTSSRAALRAIDAVLKALDKQVADLDRQIRKLIESDDDFNSIDKLLQSVPGVGAVLSSTLLAELIELGAVGRRQISALVGVAPFNHDSGRLKGKRCIRGGRASVRSVLYMAAVASMRFNPIIKTFAQRLKQAGKLNKVVIVACMRKLLSILNVMIRENLQWQELKIVKNA

SEQ ID NO: 241625 - protein, 335 aa, unidentified
MNSVGKVVMECVIETKASTILQFIDGLRGDVRVTLEEGTWTAWLYELLKPRVTEIVVCNPRKAALLKDGSKGDRIDAHKLAELLYMNKIKSVYHGEHGLRTMKELARSYLTISKDLTRVMNRLKSLYRSWGIPCADKEVYAPRYRAEWLGKIREAGVRRRAEHYYQQLDVMRLLRQEARRDLLVEAKKHKAWKLLRDIPGIGPIRAAVLIAVMQTPHRFRTKRQLWAYSGLALETHDSAQYHAVKGELRRSKRSATVRGLNKDHNHDLKDIFKGAAMRASTAAGPLHDFYENLLAKGRKPTMARLTLARKIAAITLIVWKKEVRFDANYLKPQAA

SEQ ID NO: 241626 - protein, 325 aa, unidentified
MQGKEASEQETLHCTVGIDVGKSWLDVHVLPAGEALRVPNSAEGIRRLKRWLLGRHPKLVAVEATGKWHRALCRSLHASQLAVALTDPYRVRQFAKAQGIFAKTDRLDARVLARFAAVMAPVARPPAPQALEALKEMIGAQDSAVAERTALKNQLAAATNTFLKRQFASRIKQLSVHIAAIRRETLKRIKADDGLAKRYAILTSIPSFGPIVAETLIACLAELGTISDKQAGSLAGLAPVADDSGQRHGVRSIWGGRAIVRKILYLAAVSASRCNADMKIFYQRLIANGKPPKLALIAVARKLLVLANTLLTQNRTWLPSAPKHA

SEQ ID NO: 241627 - protein, 482 aa, unidentified
MKPSQQKQIQKTSCHRAQVGWQGMNRKQRREMTRKIQAADLSLEVVHPDAAGIDIGNEAHYVAVPPTRDDEPVRRFGCTTAELRDMASWLKQCRIRTVAMQSTGVYWIAVYDILEAAGLEVYLVNARETKNLPGRKSDVQESQWLMKLHTYGLLRNSFRPPQEIRTMRTYWRQRNDWIRSAGRHIQRVQKALTQMNIQLANVLSEVSGVTGQAIIKAILAGERDPHELARFRDRRVKASADEIARSLEGNWQEDLLFLLQQEQDSYEFCQKQMSECDERLQHFLQRREDRSAGASLPEEKRKERLKKKKTNKPRFDLRAELFRMTGTDLTQIDGIDVRTAATVISEAGWDMSKWRTEDHFVSWLRLCPDNRVSGDKIIGKGRLPTTNRLTVALRIAATTLRPSRTYLGAQFRRLKARLGAPIAIKAMAAKLARLVYRMLRYGMQFVDQGAEFYEARHRQREINSLKRKATNLGFQIMEAPAA

SEQ ID NO: 241628 - protein, 336 aa, unidentified
MDSLIRYWLGIDVSKRKLDVALLNERGKLKSHSFVNEPAGFSQLRQWLGERGATPEDTRVCMEATGPYSEASATALFDAGWVVSVVNPVRVKGFAQGEMVRNKTDQADAGLLARFCAKLSPEPWQPAPVEVRQLRGMVDRLQVLKDMQQQEVGRQEAHANEPALLASIQEHITWLDARMHELQQQIDDHIDGHPQLKQDAELLRSIPGLGQVTTPKVLAFLGDVRRFKNAKALAAFIGVTPRLKESGSSVRGRSIMSRTGHAQMRKALYMPALVALRHNPAVKLFGERLKAKGLAPKAVIGACMHKMAMLIFGVLRSGVPFDIKMALPNLDFQDGI

SEQ ID NO: 241629 - protein, 338 aa, unidentified
MKNAKYFIGLDVHKEKTTYVVRGRIGNILLKGETATLYSELSERLKSCLGSSIIGLEASTSYYTLYKQFLKNGYNIKVANTIQMRQLIAKNDKLDAKRLSEMLRLGTFPCSYIPDENIQHLRSLVQLRHSLMEEKVRCNNRIQAFLDKNGVVMPSQEAFGKKWRQALIRHIGSGDVSLEMRYEYDHFEFLEKKNKQLDLEIQGYTNKHWPFEYEIIQSITGFGPVLSCYIIAHIHPITRFISNRKLRRYAGVVPTYKESGNKKSKGHIPKTSSRKLLRWALIQAANAAGRTNTKLGEHYRMKKKQKKNASIAKVAVASSMIDIIYKVLTTKKPYNAKC

SEQ ID NO: 241630 - protein, 480 aa, unidentified
MKDQQLVGRPRKTGKRKRLSPALLERIEPNAAGIDCGASSHYVAVPSDRDPQPVRQFRTFTADLRRLADWLVKCGIKTVAMESTGVYWIPIYEILEERGLQVVLVNARHLRNVRGRKSDVTDCEWLRDLHSVGLLHPSFRPAAEIVELRAYVRHRHKLVEAAATAIQRMQKAMTQMNLQLHHVLSDLTGLTGLAIVRDILAGVRDPQALAAHRDRRCHASKGEIAAALTGNYRAEQLFVLRQNFEAYEFNLRQIAQCDAAIEALLATLAARCQPPASALPAARPRKKPSKNEPRLELRSPLHRITGGADLSQIDGIGPYGALQLIAEIGTDMSRWATAKHFTSWLTLAPNNKISGGRLLSSKTQPSANRAAAILRRAAMSLSRSASALGAYYRRLAYRVGKAKAITATARKLALLVYRVLHGDITYHDPGAAAYQQHNRTRVVRNLRQRAQQLGFALMNIQTGEVLGQTPSKRVAPSPVS

SEQ ID NO: 241631 - protein, 398 aa, unidentified
MKKNSKRQNVKKQNDVTAQKKHDYSADVQRLLLKLGHKSMAVEGVAYFIGIDLGDRKSNYCFMGRGEGFLAEGQMPTTLEGFAAYFKAIPRSRIALEVGTHSPWVSNLLEGLGHEVYVANPRKMESIRKSKRKNDKSDARTLTRLVRADPQLLHPIRHRGIQAREDLILLRARDALVGARTKLINCARGLVKSVGGRIPRCSSESFARQAEAAIPQSILETLLPIVEQIAAMTAQIRKLDGQVKKMGDEKYPETALLKQVAGVGDLTALALILTLENPERFAKSREVGPYLGLVPRQDDSGESSRQLRITKAGDMMVRKLLTGSSQYILGPFGPDTDLRRFGLKLAARGGKNAKKRAVTAVTRKLAVLLHRLWVTAEQYEPLRNTRLEDAALAAVANA

SEQ ID NO: 241632 - protein, 354 aa, unidentified
MPRHSKDTVAVLGIDIGKNTFHLVGLNRRGAIILRLKLSRTQLEAKLANLPACLVGMEACVGAHHLSRRLKALGHDPRLMPAKSAKAFLKGNKNDFRDAEAIAEAVQRPTMRFVATKTAEQLDLQALHRARSRLVSERTATVNEVRAFLLDRGIAVAQGLHRLRAALPGILATRTDVLSPRLQHIIEDLVADWRRLDERIDAVSLEIETLANQDAGCERLITVPGIGPIISSATVAAIGTGDVFSKGRDFGAWLGLVPKQISTGDRTILGKISKRGNKYLRTLFVQAARVVLLRPANWERHGLKPWIEAAAKRLHHNVLAIALANKLARIAWSVLHHGRNFEVRKMPEPTSQPA

SEQ ID NO: 241633 - protein, 356 aa, unidentified
MGIFLGVDLHTRNQSICWIDTAQGEIHEARLDHQRDDIRGFYEGLPAPAVIGVESTGYALWFHKLVEELGHTLLVGDALAIPQLARRRQKNDRRDASLVLDLLIRGDFPAVHVPSAASRQVITLLRYRRRLVRIRTTLKNGLQAVALNHQLRLGARLFSAQGKLQLSSLPLTGASAIEREHSLQLIMVLDQRLGKVDQELEACAQKDARVQRLRTHPGVGVQTALAVVHFLEPVSRFRRPRQLSSYSGLDPVEHSSGDHQRYGHISKQGNRLLRFLLIEAAHQLVRRGQDPDLRRFYYRLWARKNSSVAIVAVARKLLLRLYRMLCEQIDYEEFRRRGRDAGSARSVPSPAFAVTD

SEQ ID NO: 241634 - protein, 344 aa, unidentified
MEKRHIGIDLHRNQFTCCVRLANGRNYLSTWKLEALPEFVKKLRPSDEVAVEVTDNTRLFYDAVAPQVARVVAVDPNQFRVISHSVKKTDPNDARSLALYLAKGLLPEVRMKEKTQAQIASLTQTRDTLVKLRTALQNKVNNILSAHGINLEKEALSSEKKLGEVLAMPFDPMVQIELKVIVEQIRSLNQSIAELEKTITDEGRKLPGHKNLTSIKGIGPLSGSILLSVIGNIHDFPEEGKLAAYFGIVPRVSNSNATERSGRITKRGSKLGRTALVQCALIAQRYSPYRKRFYEKTTARRGTGKAIIALARKLLGIIYRTLKNNWVFEDFPHFVLAEPAEVTS

SEQ ID NO: 241635 - protein, 381 aa, unidentified
MKKNNIGKLQVTKSQLRRKAAKQRLTVGLDLGDRTSRYCILDEAGEKAGENQLPTTRAGMDAAFAKMAPSRIALEVGTHSPWVSRQLVGMGHEVIVANPRKVRLISQSVKKNDRMDAEQLARLARVDPKLLSPIRHRGAEVQADLAVIRARAGLVESRTGLINTARGLVKPMGERLKKCDADQVREALGEGLSEEAQNVIGPLLKSVEEISKQIQVYEQKIEEIEKRYPETKVLKQVSGVGRLVALTFVLTVEDPERFEHSRDIGPYLGLTRKQRDSGEREPELGISKAGDELLRWLLVQAAHCILRRGAPDSDLREWGLKKVQAVGGKKGGKTRKKKAAVGVARKLAVLLHRLWVTGEVYDPQYNRKARETAKGKRKAAA

SEQ ID NO: 241636 - protein, 389 aa, unidentified
MKIYVGIDIAKLNHFAAAISSDGEIILEPFKFTNDADGFQLLISKLDSFDKNSLIIGLESTAHYGDNLVRYLVTELYQVCVLNPIKTCQMRKNNVRKTKTDKVDTYVIAKTLMIQDNLRFVSFFDLDMMDLKALGRFRQKTIKQRTRLKIQLTTYVDQVFPEIQYFFKSGLHQHAVYALLKEAPSPKEIASMHMTHLANLLKVNSHGHFTKEQAKELRVLAQKSVGANDSAISIQITQTIQQIELLDSQLEKIEAEMTDIMKFNDSVIMTIPGIGYINGGMILGEIGDIHRFSNPNKLLAFAGLDPSVYQSGNFQAKTTRMSKRGSRILRYALVNAAWNVVRNNATFKAYYDAKRAEGRSHYNALGHCSGKLVRVIWKMLTDNVEFNLK

SEQ ID NO: 241637 - protein, 427 aa, unidentified
MKNKLRMITEATLIVGVDIAKKIHWSQVTDYRGNALCKPIKVENTFEGFQESLHVIKEICGQIGCKQILLGFEPSGHYWKNLAYFLESEENIILLGVNPFHVKQMKELDDNTQTKSDKKDALVIARLIRDGRFFEIYLPEEKYAQLRILRRYREQASIARKRLICNIKVLMDEYFPEYEKVGYEVSSISARAILRTTPFPKDLIEMEAEEIWNKWRMALGKTMRIGRQKVYQLKEEAMNSIGIKVGIEAARVGLNTMLDQMDILDASIEKYDAEMEMIMNELDISIYLTSVPGVGKVTAAAFVAETGDLSRFDDWKQVRKMAGLNLVEQSSGMHKGKTSISKRGRPGLRKIIYIIGDKGMLVSPEMMMYYQYLRHRPSNQLAHQQAVLAVGLKLMRVMFHVAKTHESYDAQKVLGEIRINQINSLSA

SEQ ID NO: 241638 - protein, 338 aa, unidentified
MKTHIGVDLHQRFCYLTAVDANGKLYKQEQVINEGAALRAWLRELPKPRQVVVEACGFWPSFQRAVAPEAERIVMVHPLRVKAIASARLKNDRVDSKMLAHLSRTDLLPEAWMADEQTQQARKLTRLRIALGRQRAAAKNQVQAVLHQEGFLSPVTDVFGKGGRIWLAKLELSVAGRMVVDTWLQVVNHLDELIAQQTRALEQMAEQDARARWLQTVPGIGAYSAMVILAEVGNITRFDNKRALASYAGLTPSLRESAGKRKRGGIGHHGSATLRWIMLQVAQVAARSSPSAKAWIATLRKKKPAQVAKIALARKLLTAVWAMLRHGVCFEESVFAGS

SEQ ID NO: 241639 - protein, 276 aa, unidentified
MEYFAGLDVSLRSCAICVVDAKGKVMLERELRCEVGDIADYLNSLGHPIERIGFEAGTLSQHLFYGLTSEGFDVVCMEARQVNAALSAMRNKTDKNDARGIAHVMRTGWFSPVHMKSREAHGVRALLSTRKALLNKTIDLANEVRGLLKIFGLRLPKTVQHGSFDGLVRPMIEMDEVLAHAIIPLLDARLVLYQHFLELDRRVKRAAARDEVCLRIMTVPGVGPIAALTFKAAVDDPARFKRSRTVATHFGLTPRRYQSGEHDNPGRISKAGDRDV

SEQ ID NO: 241640 - protein, 340 aa, unidentified
MAKNIFFIGLDIAAYDFAASIYQAPEKPIMTKESIKNSPEGFSMLVSWLKEYDIDKTNSLVCMEATGVYSEAVAYYLTSCGFKVSIEPPLKVKRAFDPVGHKTDALDSRQIAEYAYRYNDELKFWQPKEEIIEKIRQLLTAREQFTKQKVALKNAMHAYSRQMVQVMLIKKAHQETLTQIKKQIARIDQELSKMMKQDPAISQKMNNLKSIPGCGMLLAANLIAITNNFKQISNYKKLAAFIGIVPYQHQSGTSIAKRPRIRHFGPRYIRKLLRLAAQSVATHDITFRRYYLRKVAEGKAKALVLNNIANKLLKVACATIRNNTCYIKEYKSIHPMYLKI

SEQ ID NO: 241641 - protein, 374 aa, unidentified
MSSDGITWVGLDAHKKSIHVAMLVPGREEPVSWQEAHEESAVRRRARRLNREGPGEVRACYEAGPLGYTLQRELEAQGVICEVVAPSLIPIKPGERIKTDWRDARKLAEMLRSGMLTAVQPPNEADESLRDLCRGRDSVRQDLARSRHRMSKFLLRRGYRYHDTQRHWGVRHMKWLRPLRFEHAAAQAIFDHYLRTIDHLDERQRQVDAQLGLFGSQEPYCQPVAWLRCFRGIDTVTAVSLVAELHDFRRFRSARSLRAYLGLVPSERSSGEQRRQGSITRAGNHHVRRLLVEAAWHHRHRPVLSQPLRKRREGQPAHVIAIADRAQERLHGRFIRMTRRGIHYNKTVVAMARELVGYLWATLYPRETEAPPSA

SEQ ID NO: 241642 - protein, 302 aa, unidentified
MNITQIISFANTHFFIGIDARLKNWKGTIRMGGIELKTFSMNPSPLELLAFLHNHYPDGIYHIVYEAGFCGFWALRIFRQHNIDCIIVNPADVPTTNKEKVNKSDPIDSRKLARTHENNELHSIYIPDTFHEELRALMRLRYHIIQSQTRIKNRIKGLLYLKQLRKEVQHPDIAPIMKALQGVPGVAFITAMYLYTEIMDMNRFANDNHLVSFVGLVPSTQTSDENVYVNGISVRQNPFLRTMMIEAAWTAVREDPAMTLRFKELSKRMKSQDAIIRIAKKLLKRIRQLWLKQEEYVYALVA

SEQ ID NO: 241643 - protein, 351 aa, unidentified
MSHYAGLDVSMKETVIAIVDQKGKLVHRGRTKSDPESIIQHLNMTGFKLERIGLESGSLSNWLVDQMNQRGLATICIDARKMAAVLSIRVNKTDDNDAYGIAEAMRCGMYKEVVLKSKASTQAATLMNCRKTLVHQKVQLINSVRGFLKTYGIRLGSSGEREFSLKVRNRLSEVLDLARIGIEGLLNCYEKLLLEIKTIEREIEEMARKDEDVQRLMTIPGVGLITAMTYKSEIDDPKRFEKSRDVGAYFGMTPRQYSSGETKKQGRISKCGSSEMRTLLTEAGMVCITRSKRWSRLKAWGLKVMRRHGAKKASVAVGRKLAVIMHRMLIEKADFAYGEEKPTLKKELSPA

SEQ ID NO: 241644 - protein, 464 aa, unidentified
MQYAPVRLADLPVSGVMCGIDWARDDHAVAIIDRDAQVRYRGVAEHSARGLKDLIAVLARHGVAEVAIERADGPLVEALLAAGLTVVVIHPHRIKSLRCRYGSAGNKDDRFDAFVLADTLRTDRARLRPLAPESPQTTALRTLCRARRDLVAHRVAVANQLRAHLDRVYPGPVGLFDALDSPISLTFLTRFDCQDRADWLSPTRLGAWLASVGYKGHTDPAVLYRRLTARPRGLSAAQGAAYTPITAALVATLKTLVLQIAELSSQISRALAAHPDAPIFTSLPRSGTVRAARLLAEIGDCRGRFPTADALACLAGVAPSTRQSGKMRSVGFRWACNRELRDALCDFANDSRHANPWAADLYNRARARGHDHPHATRILARAWIHVIWQCWQGYSEPGTPCRPRGASIRRSPLGGRQLVGADVNGSQPSALATICAVMRVASSLIWSLQAVASNTALENAVRAC

SEQ ID NO: 241645 - protein, 342 aa, unidentified
MSEISTIGLDLAKNVFQVHGVDRSGAVVLRRQLRRGAVEKFFAQLSPCTVGVEACGTAHHWARVIGRYGHQVRLMPPAYVKPYLKRNKNDGRDAEAICEAVSRPTMRFVAVKSIEQQATLAVHTTRALLVRQRTMIANSLRAALGELGIVAAPGFEGLRQLMTGLEAPNEEVPEIMRGALLLLAKHWQALDADERVIERQITKAARADGEARRLMQVPCVGPIIASTVLAKVPDARVFRSGRNFAAWIGLTGRDHGTGGKHRPGRISKQGDRMLRALLITGASAYLRQQRMRGVSDPWLRDLLARRPYKVVMVALAAKTARIIWAMLKGEPYRGRASALAAA

SEQ ID NO: 241646 - protein, 321 aa, unidentified
MKNSTNLVAVGIDVAKASLEVSFGTDGATQSFPNELEGHDALLTQLGGLTISLIVLEATGGYEAAVAGALQAAGLPVAVINPRQARDFAKAMGVLAKTDSIDARVLARFAQVLHQRDDLQRLIKPLADEPLKALQAQLLRRRQLCSMLIAERQRLGTSHSSTRPDIEASIRFLKERLKKADAELARLIQRDHAPLNNLLKGVKGVGPNTLATLIAELPELGHLTRREIGALVGVVPLNRDSGQFRGRQCTWGGRATVRRALYMAALVASRHNPVIRRFYAHLIDQGKAPKLALVACMRKLLTILNAVARDHVPFNCALHQT

SEQ ID NO: 241647 - protein, 344 aa, unidentified
MSSIDYIGFDIHKKTISFCAKAQDGTILDEGTILARRNTLLAWAKARPRPWIGAMEATLFTGWIYDFLKPLAQELKVAHPAMLKAIAASKKKNDKVDARTIADLLRCNLLPECYMAPCPIRDLRRVLRYRNLVVRQATRMKNRIAGLLMETGTPYNKQRLHGKAYFSELLGSLRDVPRSVVELLQLSRGQLEFFATIQRQLLKGLSEHPELSERVMRLQSIPGVGEIMSLSWALEVGGVDRFASIAQAASYCGLTSAQHSSAGKEQRGPISKQRNKHLQTMLIEAAKLAPRHNPQLAVVHERELRRGDRNQATLAVARKLVAYLMAVDKSGKPFQMRASSEEAA

SEQ ID NO: 241648 - protein, 359 aa, unidentified
MTSMQDLPRRRRVVVGVDTHKHLHVAVALDELGGRIEARSFAADRSGHEQLIDWANSLGHQVIFGVEGTGSYGAGLASAIRRRNIGVLEVLRTDRRDRRLRGKSDTIDAENAARAVLNGQANAVPKSADGTVEMIRLVKVAKDVAVKARTSAMISLKAVLVNAPGELREQLEPLTKMALIRRCAALRPGAVVDPTTAAKHTLRAIARRWLALDAEIKIHEKVLAKLTGELVPELVAAFGIGPDVAAEMLIVAGDNPDRVRSEPAFARLCGVAPIPASSGMTTRHRLNRGGHRQANSALYRTVIVRLQHHQPTQAYYQRRTAEGRTKAEIIRCLKRLLAREIWSYLRPLRQARQPLVLAA

SEQ ID NO: 241649 - protein, 368 aa, unidentified
MVPSLLTGIECQTGIGVPVKRQEGTELKITRVGLDLAKDVFQVHGVDAEECVMVRRQLKRRQVLAFFARLDRVEGCVVGMESCCGSDYWARELIKLGYDARIMNPAFVKPYVKANKNDARDAEAICEAVGRPTMRFVAVKSLEQHDLMLLHRQREQYVKRRTALANQIRGTLGQYGIVVSKGLGLLRRALPRLLEDAGNSLSATAREAYAESYQELCELDEKVARLDGKLEHLAHQDPRCVRLMSIPGIGPLTATAWVALLGDGAQFEKGRQCAAFLGLVPRQHSSGGKERLLGISKRGDRYLRTLLVHGARAALRTAGTKEDRRSRWVREVAATHHANVAAVALANRNVRTAWALLRSGETYQMVAA

SEQ ID NO: 241650 - protein, 344 aa, unidentified
MEVSVLGIDLGKNICSVVGLDATGAVVLRRRAKRETLIALAARLRPCVVAMEACCGAHYLGRVFADHGHDVRLMSPEYVRPYIKAQKNDDRDAEGIAEAATRPTMRFVELKSQEQLDMQTLHRSRDRLVGERTALINQLRAILLERGIIAPQGKRKLEQFLVGLMDEQGGAGLSPRMIMLVADARAQWTELDRRIAAFDAEFIRWVKENEDARRLTTIPGVGPTIASALIAAIGKAETFEHGRDLAAWLGLVPRQRTTGGKPRLMGISKRGNKYLRKLLIHGARAALPHVAERDTSLGRWAKGLLARVHPNVAVVALADKLARICWAVLRSRQGFSAKGAPVTA

SEQ ID NO: 241651 - protein, 361 aa, unidentified
MNATTAAIDLAKNVFQVVLADANYRVLEQHRLTRAQFERFFDNRKVSRIVMEACGSAHHWARVFGARGIEVILLPAMYVRAYVRRSKTDAADALALLEALRCADIVAVKVKSVEQQSLQALHRTRSLWMGTRTSRINALRGFCRELGLHVPIGARTGLEAMGRAVADEQSPITPLLRPIMLQLLDEIRLLETRVAQLERQLAQLARESHACKLLMSIPGIGLLTATAILAATAGSVAHFKSARHFASWFGLTPKENSSGTMRRMGRISKMGDRYLRMLLTHGARSVLRAAKVAQMKGLELIGLRQWALELQARSNHNKSACALANKMARICYAVLRDQTPFGQPAARLAKKMQRQSFELAY

SEQ ID NO: 241652 - protein, 360 aa, unidentified
MRKRLSKKESWFKKNSFTEEDEIYVGVDVHKLNYHVAIWHNGRIGCAYSMTSDNNKLLRDIQKVRSSLKNIVYEAGPTGYSLVRLLRSANLPAEVVAVSKTPRMADSSAKTDRLDCQQLAEYAAKGLLTFVAIPTEQQEADRQVVRLRDQLTSKRKRIMHQVKSFLLQHSISWPGGNWSKILIERLRQLDISSELRFTLAQYLDEYEFFCSKIAETETRLRQIFSSERHSAAIEIFKSHPGVGNIVAWEYRAEMFHITRFSEPKQISKYTGLCPRISRSGQTCHQGPITKTGRRQLRAMLVQAAWAWYRRDPHARQIYNRLLHNTGNGKKAIVGLAKRIAIHLWRMLCDGCLYDANAVKA

SEQ ID NO: 241653 - protein, 369 aa, unidentified
MKQRLLYVGLDVHKNTTDVAIANGRSNGKVRSYGKIDSTLDALNKLIKKLQDGDKELRFVYEAGPCGYQIYRYLDAKGIHCSVVAPSMIPQRSGNRIKTDRRDAINLARLFRAGELTSIYVPTPEDEAIRDLLRCRDDMKRFERKARQRLLSFLLRHGHQYSGKKNWTKGFYTWLATVRFSYSAQQVTLQEYIDVTNECSERIQRITQQIQVHVEEWNRAPFVKAYQALRGVSIIVATTVVAEIGDMNRFQSPKQLMAYLGLIPSEHSSGKTVRRGPITKTGNSHVRRVLIEAAWTYKMQARVSNILFKRQKGLPKSVCDISWKAQTRLCARYRRLYARGKSRQTVVTAIARELSAFIWAIDKEIQLAI

SEQ ID NO: 241654 - protein, 531 aa, unidentified
MVKTGKTRTKKPRSRSQKFKKAVLGRPQGAIQKRVQSVGPEKFGIVAVDCAKARSKWMLTDFYGNILNSPTNVEHDRSSFQLAMPTLKQAIEKHDLKDLIVAVEMTGTYHKPPMRAFRKAGYETRLVHPFASSFYRQPEHGDDKTDDNDLDAIFRAAVNGFGLMEKPVDAIHHQLQILARHRRDLVKKRSKLQCQIRHHLEQGLPGFGALFGSDDLWKQVTPIPLLQAIAKHGGTVDVVKQAGQKGVTKWLDDAKIRFHKATIERVIVWAANATEPDPMAIFHTRVWTSQLDDRTQKTQQIAAIERDLAGVLVNTPYVLLLSHPGINVVTAAELAGEMGPIENYASARAVCGRAGLFPSRYQSDEVDRTGRLTRFRNAKLRAAWMMIADNMCKCNRYWMVKAEKWKSEGHKSQDIRCRIANRMTRIVFKMVSGRQLYKHPSRLDRGYVMDKLLVFLREHNTSPAIIVRDLKHAADQLPKSGLIDEGTKLQEAALKAQRSRRKEPQELGTLLVAVLARLGIAAKDDDALEST

SEQ ID NO: 241655 - protein, 434 aa, unidentified
MAKRRAYRAVDVQSVSVESWLAQRPEGRVWVGVDVGKDECMMVVRWQDGQFERPIRWANPGQIPLAVGCLDGLARPGGWQVTVVMESSGTYGDAFRQALADAGLEAHRVAGKATRDYAEVFDGVPSQHDGKDAAILAELASIGKSVPWPWRTPGSGDQSLEHHVAMMDVYQQHWLEWSNRIEAWLARHWPELGAFLGLGTATMLQLLCAYGSPQALAADPRAAERLADWGGGLLAPSKIARVIESARTTVGVRPTEVDSRRVHLYAQEALTALRKVQAHHKQMARHGRTCPDVQLLAPALGLATACVLHVEAGDASEYRCGQAYQKALGLNLKERSSGRYKGQLKITKRGSARARRWLYLAALRLVRGDGPVARWYARKVARDGGGRGRALVAIMRKMALGIHRCRRDGVPFDPERLFGRSCDRTDKQAGLSRR

SEQ ID NO: 241656 - protein, 347 aa, unidentified
MEFFVGIDVSLDSSSICIVDERGVIIKEGKCPSEPEAIARFIRHKGRRVEHVGLETGGLSQWLHAGLTREGFRVTVMEARHVRASLATMRVKTDRNDARGIAQLVRLGWFKAVHVKTPTAQETRALLGARQFLVDKVTAVENSMRAALRNFGLKMGPVTRSKWAARARELAAGNQALEIVVEALLRVRDALLEELRALDRKLLETARADPVVRTLMTAPGVGAIVALTFRSAVDDPGRFPRARDVGPWLGLTPSRYQSGQIDRMGRTTQAGDAGLRAALYEAAATLLGRVTRWSALKAWGVRLARRSGTKKARVAVARKLAVVLLSMWKADEPFRWSTQTGEEAAMA

SEQ ID NO: 241657 - protein, 372 aa, unidentified
MNHHSGAYVGIDTSKLRNAVAVAEEGRGGEVRYLGEIDTTEAATRKLVTKLAAKYRQPTFCYEAGPTGYGLYRLIRKLGHDCIVAAPSLIPKKPGDRVKTNRRDAVGLAKLSRAGELTAVWVPDERHEAMRDLSRAREAARKDLKGKRQQVSSFMLRLGRHFPGKKTWGPAHMNWLMLQKLEHREQRIVLEELLGAVRQESERVERVEQAIRDAVPEWSLAEVVAALQAMRGIDLVSAVTVMAEIGDLSRFQNPRELMGYLGLVPSESSTGDTVNRGGITKAGNGRARRILVEAAWSYRHPPRVSREKQTKVAAAPGAVREIAWKAQMRLCGRVALIPVARLDNIEEAEDDRQAERNQRNDQAPDQAIHRQQ

SEQ ID NO: 241658 - protein, 362 aa, unidentified
MAKVRSWAGLDVHAAKVVAVTVDGESGEMRSRRLSGKTSEVVKFCAALPGPTRVAYEAGPTGFTLARELERTGVGCVIAAPGKIERPAQDRVKTDRRDAERLVRLLMVDALHPVRVPSTEEEALRDLVRAREDVRGDLMRARHRMGKLLLRHDVIFDGPGGNWSARHREWLGQVQFADRAVQVTLLDYLGAIDALTVRRESLESAIGELVPCSPWAQTIARLRCMRGIDTLSAVGLCAEIGDWERFARAGQLMSFLGVVPSENSSGDRRRQGAITKSGSRHARRLLVEASWHYRRAPAKGVTLRRRQEGQPPHVIALSWKAQQRLHRTWRRLDDERGKRKTIVAVAVARELAGFCWAIANAD

SEQ ID NO: 241659 - protein, 362 aa, unidentified
MNDTTNTNDVKNVVTIGIDIAKSIFQIHGSDKNGKKVFSIKVKRNELLKVIAKMPKCLIGMEACGGANYWAREIMSLGHEVKLMSPQYVKPYVKTNKSDRNDAAAIAEAVTRGSMRFVAIRTIAQQEIAAIHRVRSRLVKTSTMLQNQIRGIMAECGVISGQGISALRKRLAEVLDEEAASLPSIIKGLIKELNEELLNLVGRIKEITAQLKARSQNEESCQRLESIPGIGPVTATALVASVGDAKQFKNGRGLAAFCGLVPRQSSSGGKERLLGISKRGNRYIRAMLVHGARAVVNASAGKEDGYSVWIQVLIERRGFNRAVVAVANKNARIAWALLSRGENYKATDCAPQQNEERLATVA

SEQ ID NO: 241660 - protein, 337 aa, unidentified
MKYCGIDLHSNNSVVVVADEGDRSVFEKRLPNDMGQIRAALEPYREELVGVVVESTYNWYFLVDGLMDAGYRVHLAHPSAIKKYEGLKYSGDFADAAYLAHLLRLGLLAEGYIYPREERAARDLARKRMQLVRCRTAQILAIESIVTRQTGGHMKSEAIKRLTATQVTELGFGPDVTLAVESNRAVSQVLQERIVRLEQRLQARVGLRPEYRLLKSVPGIGEILATTIMLETGTVARFAKVGNFSSYCRCVNSLRESNHKKKGEGNAKNGNKYLSWAFVEAANFALRYCPEAKSFYERKKRQTNRVVALKAVAHKLARACYHMLREQKPFEVNRCFV

SEQ ID NO: 241661 - protein, 344 aa, unidentified
MSLKDKIKDDIKQAMRDKNESRLGTLRMLSAAIQRREVDERISLDDTQVLAVIESMNGARYVHDRLEREGWDVRIADAVKAKGLAPLACKTDKIDAWVLAELARLDLVPEIWLPDPEVRAERERARFRLHLVKHRSALKNRVHSILIAHGVPNPSSDLFGVGGRRLLERLLLPEPWRSTTTASLALIDTLDEEIDRCERELRRLGADHRYVPLLMTCPGIAWILAFTIASEIGDIGRFATPVKLVGYSGLTPKVNQSGENDRRGPLRKNGPNHLRWALVEAAHTAARHPSFQPILERKRAQLGHKRGTKIAAIEIARRLLRAIWHMLTRGQPFAPAGATRPLAA

SEQ ID NO: 241662 - protein, 354 aa, unidentified
MQLTIDPTQFDIFVGIDVDRKSYAATYLDHQFQGRSLKMPSDSKALLQYFRKHFPDKRLVFAYEAGPTGFELHDYLTSLGYVCLVIHPASLKSAPNECAKTNRIDSRKIVEQLKAGQLKGIHVPYGPYRTLRHLTQLREQYARLSTRSKQRIKAFLLFEHIDVPDNTGQQVYTAKFRPILKSLPLDPGLRFKLDMLLDDLDHVRQRLLSVLKELRAFCEKEPAIQQNLKYLQSIPGIGFIVSSFVLARIGDPAHLSNIRELAAFCGIVPREHSTGDTVSRGSITHMGNRTFRQLLVEAAWVAIRKDSELGNFYWRIRTRIQKSYGVRVAIVAVARKLSQRVYRVLKDQREYFVH

SEQ ID NO: 241663 - protein, 452 aa, unidentified
MSKTKPKSLEVALPIIHPQAAGLDIGATEIWACAPTDRATLSVRSFGTFTPDLCGLADWLKRAGVQTVAMESSGVYWIPVFEILEACGLEVYLVNARHIQNGPGRKSDGQDCQWIQRLHSHGLLRASFRPEAEMRALRAYLRHRTMLLEYRAAHIQHMQKALQQMTVQLTQVLSDLPGVTGLEIIRAIVAGERDPVTLSRFRNSRCKSSSDDIAQALTGHYRAEHVFALRQALALYDFYSQQLQACDQQIEHQYSAIKPTVSDDRPPRPPDPKLNSHSKNAPTFAVRQQLYRLTGVDLTVVDGLDDSRAQTVLAEIGADMSKWPTVKHFCSWLGLAPHNDITGGKVVKSRTMPVHNRAAQALRMAAQSLNRSQSALGAFYRRMRPRLGGEQAVVATAHKLARIIYYLLKHHVPYRPVTAEVYDQRQHDRDLKSLQRKASLLGYSLVQLQLQS

SEQ ID NO: 241664 - protein, 318 aa, unidentified
MKKAFFCGVDVSKDKIDVCFLTSITSEKAKFETLPNNYELIKVYFNSFKNDEILVAFEATSNYHLALQRALSDLGIRYCVTNPYKSSLFLKHLSTIKTDTSDSYGLAVYARTFKSEIAPDKYNAEYLEIKSYNSTLNLLQKINTQLKNFKSSQKNLNNKVIDDVIANLIKEIAKLQTMLQKLAFDLVKKAIPETEEIIKENKGFGVDLALNLFPQLHFNRDKSEKQFISFIGLSPRIFQSGSSVHKSQKINKMGNSNIRRILFMTALCAIRFNAKFKSRYERLLANGKKKMVAVVAVMCAIVRYLKSLFPFNPEIKAI

SEQ ID NO: 241665 - protein, 320 aa, unidentified
MMTQNDLVVVGIDVAKDKVDACIRTVTERRTFPTTASGRRSLIAWLRKHQVGKAVMEASGGYERVWAKALRQTALEVRIVDPKRVRSFAESAGRLAKNDKIDAEMIAWFAETFSEAPSQVEDPAHEEIKALVKGRKSLIDLRARLEMQKEHEVPALVGKAHARLLKKLASEIAAIETAIGAKIKATPAFAVRAEIIQSVPGFAEATALTLLAGLPELGQVSNEVAAALVGVAPYDDDSGKRHGQRCIKGGRRWVRNALYMPCVGAATLNNLVFKAFYQRLIAKGKKPKAALIACMRKLIVILNTMIARGEKWDPKRYQVA

SEQ ID NO: 241666 - protein, 409 aa, unidentified
MQVLYPRCCGLDIHKKTVVACVLLSELDGTIQRFVRTFGTMTADLLALGDWLSVHQVTHVAMESTGVLWRPIFNVLEEGRTLILVNAQHIKALPGRKTDVKDSEWIADLLRHGLLRPSFIPPPPIRILRDLTRYRKSLVEVRTQEINRVHKVLETANIKLGTVASNVVGVSGRRMLKAIEEGESDSQVLAELAKGRLREKLPALRLALAGRVQAHHRQLIGELLDHIDYLEQAMHRVEVSIAALVSKEEKAVQLLLTLPATGPVTAATIIAEIGTDMSRFPSAGHLASWAGVCPGNKRSAGKQLSGAITKGNKQLKTILCEIAATIARTPGTYLHALYQRIARRRGKPRAMMAVAHSLLVSIYYMLRDQVSYQELGPDYFDQLHTQQLERHYVRRLEALGFQVTLTSAS

SEQ ID NO: 241667 - protein, 414 aa, unidentified
MALVRWVGRAIGLDVHRDFCVVAICEDGKVRSAGRVPSTPEGLRVLAESLLSTDRVALEVTASCWEVARVLEPFVDRVIVVSPEDTGISSARAKTDKLDARTLASLCWKGELDPVWMPDERCRILRRRLARREQLVHARSRAKNEISAVLARRLIERPGFADLFGVTGRRWLADVELPVEERESVDAGLRQIAFLDAEIKAVEKVIAQQALGWPEIRRLMTVPGVNLICAATFIAAIGRPDRFFTSRKLVAYLGLDPKVRQSGEAPARSGRISKRGSASARWALVEAAWSVVKQPGPLRAFYERVRARRGHGKAIVATARKLAVLFWCMLSRGQDYAHQRPALTKKKLRELELTAGAKPRTRAAAGIWSTNRAIRDAERALTLQAEISYQRMVTDQQAGAPARKVGASATPERA

SEQ ID NO: 241668 - protein, 336 aa, unidentified
MTNVNNFVGIDVSKGFFDAAIIVVVMGRWEFIHQKFDCTEEGFKAFYKWIQLHIKVQESETVICMEYTGIYNWPIAEFLSGTKYVLCLEMAMQIKLSLGIQRGKNDKLDARRIAEYAYVQREKLKQWHPSGKVIEQLQHLMAARERIVKATKMLEVPVNEFTQTGNVKMSAMLIKIHKPLMEAFKKSLAVIEKQLEKTLQEDETIQALYERITSVKGIGKVIGIYLIIYTKGFTILADKKKLGSYAGVVPFEHTSGKTVKKRSKTNHMSNAVLRCNLSMGAKSAMQWDPELKLYAEKKIKEGKTYAWCITAVSNKLLARVVACVNNQKDYVVKVAA

SEQ ID NO: 241669 - protein, 351 aa, unidentified
MKTKDTTESKLFIGIDVHKRSWKIRTATDLFDGTSLTIPPTGYALKKYVDRHYSGFEVYCCYESGCCGFSHDRLFKSFGWHSKVVNPADVHRPSKAQFQKTDKIDARSLCKELKDGRLSGIHVPDVEREQLRCLFRRRNELVKQMRKVKTRLLMQLLYLGIEIPKEFDNSHWSHNFRNWIRNLSFDYTTMDYCLSTRLSSFEFVDKQIREVSTALRAYCRKHYKKDYYLLRSVPGVGGIVACGIICELGDLRRFKNFKQLASYVGLIPCMRQSGDTHTTTGLTPRANRLMRSYLVEATWQSLRYDPVMQAYYRSHSGKDVKRILVKVARKLLSRIHAVIRTEIPYQVGVVS

SEQ ID NO: 241670 - protein, 411 aa, unidentified
MHEKQKHIYVGVDLHKQHHVAVVINCWQEKLKEIKFENKPSAFPTFLLDIDKLIEEGITPVFGLEDVGGYGRSLAQFLTDHGQVVKEVNPALSYAERKSHMTTQKSDSWDAECVARILLNQLNHLPDAKPNDLFWSIQQLVTRRNALVKAQGALKNQLHIQLSHHYPSYKKFFSEVDGKTALAFWERYPSPSCLEGVSIKQLTTFLLEVSHNTCSVKKANEILKLVIEDGNTTKEHQETRDFLVRSIVRDITFKKKEMNYVEGELKELMSLLDFQLDSMPGIDLVTASALIAEIGDVRRFPNANKLARFAGIAPVYFGSGGKGKEQKSKQGNRALHALFYNLAVQQVQVAKGSKLPRNPVFYAYYQRKLKEGKTKGQALVCIMRRLVNIIYGMMKHKTAYKLPIVSEKEIV

SEQ ID NO: 241671 - protein, 409 aa, unidentified
MRGPGRRNALRLPDHHDVELMDAAGKVLARRRLPEGVAGMARLHELIGQQLGEDAEDAEVVIGIETDRGPWVAALVAAGYVVYAVNPLQASRYRERHGVSGAKSDRGDAHMLTDMVRTDSHQLRVVAGDSPGAGAVKAVARTHKTLIWDRTRQVQRLRHQLREYFPAALAAFEDLDAADALELLAKAPDPARAAKLTRAQVSAALKRARRRDIPGKATAIMAALRGPQLGQPPAVTAAYAATVRSLIAVITVLNEQVKTLEEEVEAVFGRHPDAEIYLSQPGLGPVLGARVLGEFGDDPDRYDSGKARKNYAGTSPLTRASGKKKTVAARFIRNDRLIDALMAQALAALGASPGARALYDAERARGMEHNPALRKLASRLVGILHGCLKTRTLYDEATAWPHQENKLAA

SEQ ID NO: 241672 - protein, 344 aa, unidentified
MKIVGCDLHTRYQQIAMLDKETGELIERRLEHANGEARAFYSELAGPVLVGVEATGYTRWFERMLAELGHELWIGDAAQIRAAMVRKPKTDARDAAHVLQLLVQERFPRIWRPSLEERDLRQLVWHRQKLVWMRNAVGNQLHALAMGEGVCRKKQLFTKKGRVELEGLRLGLWASHRRQELLTMLDQLDRSLRELDQAVAEQAEQNAAAQRLMTHPGVGPVTSLAFVLTLGPVARFARSKQVVSYLGLNPREHSSGGRQRLGAISKQGNPMMRSLLVEAGHTAARLDAELKQDYQRLKLRRGSGVAKVAIARKLAVRMYWMLRRQASYAQLVRMQGSSRGTLVQ

SEQ ID NO: 241673 - protein, 325 aa, unidentified
MNASELSFIGIDVSKDSLELAMDDKGKTLYLNNDEAGIAKLLAAINSAGGNVGAVVLEATGGFERLAALALCRAGLPVMVVNPRQARDFAKAMGYLAKTDAIDARVLSHFARTLYQSDRREQLLMKLPDAAQEALQALVTRRQQLIQMRVAEDNRLALSNKSQRKSIEAVRKVLNKELARVDHDIDGQLKEHFAEKVALFQGFKGIGAGTQASMMAALPELGSLSHEQIGKLVGVAPLNCDSGKQKGKRITWGGRADVRSMLYMATLSAMRFNAVIKPFYDRLLAKGKPKKVAIVACMHKILTILNAIMKSNKPWDEHHFVPKTA

SEQ ID NO: 241674 - protein, 310 aa, unidentified
MDVMIDKGCGLDVHKESVVACVMGTGIKKEIRTFDTMTGSLLRLKSWLIDLGITHVAMESTGPYWKPVFNILENGFEVILANARHIKNVPGRKTDVKDSEWICKLLRSGLLTASFVPPQAIRDLRDLTRYRQKLIQAASAEKNRIQKILEDANVKLSSVASDTFGVSAGKMIRAIISGNVDPVSLADLAVGRLKSKKDLLRDALQWHFRNHHGFMIQASLDHIEYMEKVVASLDQQINEKLKDYNRERELLESIPAVKEQGSASILAEIGADMSVFPSADHISAWAGMSPGNNENAGKKKAAKQPTAIKI

SEQ ID NO: 241675 - protein, 338 aa, unidentified
MNIVFLGIDLAKNVFQLCGLNQAGKPVYTKRTGRKELLQTLANIPACLIGIEASTGAFYWQREFEKLGHKVKVISPQYVKPFVRGQKNDGNDAQAIAVALMQPTMQFVPPKSPEQQDIQALHRARQRIVNHRTATVCQIRGLLLDRGIPIGSAVSRARRAIPLILEDAENGLSSRMRRTIAELYDIFNDLERRIHFFDKEIETVFRQSEACQRIAKVKGIGPKTATAVVAAIGKGTEFKNGRHFAAWLGLVPRQHSSGDRQVLMNMTKKGDKHLRTLFIHGARAVVRVATNNNDGHMNQWVNQLKERRGFNKTTVAVANKNARIIWSMLRNETEYQVV

SEQ ID NO: 241676 - protein, 320 aa, unidentified
MQTPTVVLNIGADVAKDEIVAACSEGSFPVRQVANQRPALLAFLKGLPAGSRIGVESTGRYHELFAGLAHQLGFLVFLLNPKDTRHYAKAVGLRGKTDRVDAELIARMIAHEHTKLHAWIPPTPQQRELDQLIKRRATLVSLREALEMSLHELDGFGADLKALRTRFNQLIARVDLRVKALVEASPERKQNFTRLCTITGVGPVIGTALVNALERVPLKSADAFVAFTGLDPRPDDSGQHRGKRRLSKRGPGELRRLLYLAALSAIKTKTWRPLYEHYRAKGLSSTATLVILARRIARTAWSIYTHKTEFDPGRLTKGLT

SEQ ID NO: 241677 - protein, 352 aa, unidentified
MMIIGCDFHPRFQQISFLLEETGECGQRRLMHTAEAEQYYRTLSGAKVRVGIETTGSYGWFRRLLSELGHELLVGDATQIRASNPRRQKTDKRDAEHILGLLVEHRFPAIWQPPTENEQLRQLLLHRSRLVRLRTRVTNQLDGMAKNEGLLVPGGWSGKRRRTIEALPLPGWYGERRTDLLALLDRLEERIAPLNKAVSQAAANNAEACLLMTHPGVGPVVSLAYVLMIGNWQRFARGKQVGSYLGLIPSEDSSSDKRRLGHISKQGNTLLRWLLVEAASTAQRYDPSWHRQYLRLSMSKHHGVAKVAIAHKLAVRLYWMLRSGQDYQHVRERGSHARQSECPVGRSTRPIE

SEQ ID NO: 241678 - protein, 401 aa, unidentified
MKTKQQTSALKENPAIKVQNLRDFSGRHLFIGIDVHKVRWQIAVYYEGLILSNTSIAACSDALVQHLRKYYGDAHFSCVYESGPFGFTLCRSLWAAGMECIVVNPADIPGTDKDRRSKTDKVDARKLAMHLAAGLLHPIHVPSEKLQKQRSLIRFRKKLWGDLGRAKNRLKSELQFQGIVIPRQYDNAHWSHNFLQWIEAQANKEQDLRDTLLLMLEEVRLLRMLLLKTERNLKELMWREEFKEKSELLRSIPGVGPLTAMLFLLEVGDVSRFKSFDALNRFVGFCPDSHSSGESQRHTGVSVRKHNQLRSMLVEAAWQLVRRDAAMLDHYKELQKRMKGQDAIIRIARKLLRRIRAVLLSERIYVLGVDGRVTSGDIEVPVLPEPKKKGRSRKINTITTV

SEQ ID NO: 241679 - protein, 339 aa, unidentified
MSKPTRSQQEIVFCGIDVSAATLAVAVRQEDQRFEERIFDNTAGGHKALIGWLRKGKVLARVSLEATGIYSLDLALALDQAEGIEVAVLNPKLIHRFAQTLRRSKTDSADAQVLAEYSRRMPFAPWSAPGLSGLQLRTISRHIQGLVVEHTRQSNRLHAAEKSASTPRCVVRDLKRSMASLKLRIARLRREALQLVRCDEALQRRFELLIRIPGIAAISALELLGELSPLSPEMSVRQWVAHSGLDPSHQVSGTSVHKPSRISRAGNRHLRRALYMPALVAARRDPHLKAFYETLLSRHKAKLQALIAVARKLLHAIYGILRTQTPYDGSKLFPQLGIA

SEQ ID NO: 241680 - protein, 330 aa, unidentified
MAHQNMVGVDISASTLSVAIYQGSSMETSNNPDGFETLLRWLTTHQIHPASSIICMEATGVYGEALCYYLHHAGFSLAVEPPQQVAQAFAHQLRKNDRRDAEKIAEYAHRFHDRLHLWKAPEEIVEYITVLLSTREQLVKQLTAQQNALKAIERKHYRNQVAETAYASLMQHFKEQIKRIDQTMKDLIKRHPGMHHTMTLLMSIPGVGWVFSSYLLVHTQGFTKTLNPKQLAAYVGICPYERQSGSSLNRKPRSAGFGHSAFRKLLYLASMSVRQHRKAFTLYFERKVAQGKSKRLVLNNIANKLIKIIAAVLRTQKPFIENYISIRTHA

SEQ ID NO: 241681 - protein, 396 aa, unidentified
MNQSNANSAADVKQAVAQATDVHGAYIGLDVHKDSLSVSVAEAGRQQPVFEGEIPNEPAAIDQLVRRLSQRFDGQALLFSYEAGPCGYGLYHQVRASGHDCEVVAPALIPTRSGDRIKTDRRDAQMLARLSRSGELTPVWVPTPEQEAIRDLTRAREDLKAIELKARQRLGAFLLRHGKRYTGKSKWTQAHWRWLEQVSFDSPVQQIVMEEYVEAVKHAQRRVAALEQQMEQALEQWSLAPVVTALMALRGVGLISAMTVLAELGDLSRFDSPRQLMAHLGLVPSEHSSGGSRRQGGITKTGNGHVRRVLVETAWSYRFPARRTRQIQRRAEQSSPRVQTMAWEAQKRLCSRYRRLAATGKAKQQVTTAVARELAGFIWAIACEVMGKAHSSRAVV

SEQ ID NO: 241682 - protein, 313 aa, unidentified
MSKDTYVGIDVSKDEMDVHIVPQNRAFRCKRDDKGITSLVKSLKKHSPKLIVMEATGGYEKVITIKLWAAGLPVSIINPFRIRSYAKAEGKFAKTDKIDAYVIAKFAQAIKPEPSALPSEQQRVIQELLTRRNQLVKIRTAEKNHLSRACTESVRASIEMIILTLEKQILQIDDDFGNYIDLDPEYKEKDHLLRSVPGVGQVISRTLLGHLPELGVLNRQQIAALVGVAPMNFDSGHKQGKRIIMGGRASVRSMLYMATLTAMQFNPAIKTFYDRLLLAGKAKKVALTACMRKLLTILNAIVKSKTPFKVVFS

SEQ ID NO: 241683 - protein, 410 aa, unidentified
MEVLYPHCAGLDVHKDTVVACVRHMVNGSVRREVRSFKTTTKELLALSDWLAGEGCTHVAMEATGVYWKPVWHVLSDGDFTLVLANAAHVKNVPGRKTDVNDATWLADLLAHGLIRSSFVPDGQTQEMRTLLRTRKQLVRECSRHVQRLQKTLEDANIKLDSVISDIVGLSGRRMIEALIAGETEPGALAAMAHRRIKATPDELEAALRGRVTRHHRFLLQLHLQQIDAVNAAIDQIDQEVDAYVEPFRATVRLLTTIPGIDELSACVILAEIGRDMSRFPTAGHLISWAGLCPKNDESAGKRRSTRMRKGAPWLKSTLVQCAAAAARKKASYLQAQFHRLRARRGAKKALGALAASILTSVYHMLISGELYRDLGPHHFDQRAKAVNTRRLVVRLQNLGYAVQITPLAA

SEQ ID NO: 241684 - protein, 347 aa, unidentified
MTEAYDGRQVVGMDLHRRRSVIVRMTEDGRKLETARITNSPAALRAVIAKAGKNPKVVIEATYGWYWAVDVLEAAGAEVHLAHPLGVRAFSYRRVKNDERDAADLADLLRMGRLPEAWIAPPEIRELREISRYRHKLVKARTSLKDQVHGVLAKLGIPVTHSDIFGVHGQAWLDELKLPQPYAGKVASLRQLAGGLTAEIGLLEQVLGDLLAGHEGYAAIQQLPGIGPVLAAVIVAEIGDIRRFPGPGQLASWAGLTPRHYESDTKVIRGHVTKQGSRMLRWAVVEAIQRQPAGTRPRQVKEGIIARRGKEAKNIAKVAAARELLTLVFYGMRDGHVRRALQRGQAA

SEQ ID NO: 241685 - protein, 399 aa, unidentified
MLNPVSLQLRVGVDVGSRCHTVAIGLSDGSLLEEFEIPHTAEGFQEFFARIEACGRCYRVPVAVAMEGYNGHIRPLDSLVRARGWRLFNVNNLKLARFKEIFPAAAKNDRIDTRKTLELFQLGDHLPMAGDVLQEVMATPAENDILKRLSRRRRRLVNERTRVLNSMQADLQAVCPGLLEITRDVGNLWFLNFVTCRKGLLKLAGVRRASLLKVHGIGANYAGAIQAWQGRAYFAPDASLVGDMIQQDAARILELRKQIKALEEQMAQVAEKSFIAGQLASIPGYGSICTAELAGEIGTIERFRKEASLALYLGMATLDRSSGKSRGSKPPKHVNARAKAAMMIAIDRHRKLVPQSQRYYERKRAEGKKHNQAIRALGRHLCRVIFKMLTQNRPYRINP

SEQ ID NO: 241686 - protein, 364 aa, unidentified
MVTIGVDPHKQTHTAAAVDGLGVEVAHRTVPARPAGNGQLLEWARAVDEQRVWVIEDVRNVSGSLERFLIDRGETVVRLAAHLMAGARRGARTRGKSDPIDALAIARAALREGVENLPTARLASPEREIRQLALYRERLLDMRTRLSNELRWQLHDLWSDWEIPAKAFAQPGWQTKITNRLARAEQSTQILLARDMIRRIRELTRATKDLYDKITVLVKQVAPQLLAEPGIGVLLAAKFIGEIAGIDRFTSDAQLARLAGCAPIPVSSGRSDRYRLDPGGNRRLNSAFYMLAIIRISHDPRTAVYLAKQRQNGKTKKEAIRSLKRHLVRRVYHLLHDPQQRPNHHLLDIDGMCGGRCGSVRAWV

SEQ ID NO: 241687 - protein, 455 aa, unidentified
MAKKQKICVTTKSQGLRVTHPSTAGIDIGKDLMQVSVPEDRSEKSNRSFGSFTKDLKEIISWLRECRIERVVMESTGIYWIPLFLQLQEAGFEAILVNAKEVKNMSGRKTDVNDADWLRFLGSCNLIRPCFQIAAVSRRLREYHRIHASKVRDMARELQHMQKAMGSMNIKLDSVISDIAGKSGMSIMRAMLNGERNPATLASLTDPHCKNDKATIEAALQGTWDIEHMLALRMAMETYDHLQTQIVRIEKEMEIFLDSYELTPVPSVKASDINDNRSGKRKQSKNPIHFDVELYSFLMYGVNLMRIPGVSDSTLITLMCELGPDFTSKFKTPGKFCRWCNLTPVDNVTGGMVTSSKVPKKPNPVGQALRQAASTLRKSDTPLGQYRRRMAARLGPAQAVVATAHKIAEIIYLMVERKVEYDESKTSQSESELTQKRIRFLEKKLSKLKSAQNTL

SEQ ID NO: 241688 - protein, 338 aa, unidentified
MTVVTVGIDLAKNVFAVHGVNAAGKAILVKPLVRRAKLLELIATLPSCLIGMEACTGAHYWAREFQKMGHTVRIMAPQLVSPYRMGGRHGKNDAADAAAICEAVARPNMRFVPVKSIEQQGQLFVHRAHQGYVSERTALINRIRGLLCELGIVLPQAFKAFLSGVAQVLEDLPGYCNQVIGDLLNELFHIEEKIKNSEKLIQQLARDNSAAQMLMQFRGIGPMTATAIVASIGNGHDFRNGRQFSAWLGLTPRQKSSGGKARLGRITKAGDSYLRTLLVLGAKSVLSGAAKNDDPVSKWALQLKERRGYGRALVAIAAKNARMCWAMLHLKDEFRFPA

SEQ ID NO: 241689 - protein, 369 aa, unidentified
MGKSIMYVGLDVHKNSIEVALADGGADGEVRFYGRISGDTGSLDRVVRKLVSTGSDLRFVYEAGPCGYEVYRHLRGRGYECDVVAPSMIPKRPGDRIKTDRRDALSLARLHRAGDLTSVYVPRSEDEAIRDLVRGRGDAKANERRAKQRLGAFLLRHGYRYSGRTNWSVAHMRWLSDIRMPHPAQQVVLQEYISAIGECGDRVSRLTSQIEELVSSWRMLPVVQAYQALRGVSLIVSVTTVAELGDLGRFDNPSELMGYLGLVPSEHSSGGRRRQGSITKTGNGHARRALIEAAWSYRFPPKVSRALLKRQEGLSRRICDISWEAQLRLCSRYRAMVGRGKLSQVAVTAVARELAGFMWAIAREVTVED

SEQ ID NO: 241690 - protein, 355 aa, unidentified
MSTITFGVDLAKNLFSVCAVDGAGRVCQRRELRREALLPWLAQLPPGSVVAMEACGGTHYWARRCIAHGLEPRIIAAQFVAPFRKSRAIKNDRNDAEAIATAARQGNMRFVPVKTVDQQARLSVHRVREGYKVEALALGNRIRGLLAEFGVVVAKSEIALRRRLADLDALTELPGEVKAVLEELRAHGARLHAAIDACDARIAGHVREDVRCQRLRQITGIGPLTADAAVATVADARLFRNGRQLAAWLGLVPTQHSSGGHARLGGISCRGDAYLRTLLIQGARSSLQRAKAVAPGNATPEQRWIRTLDGRLPFGKVLVAIANKHARQIWVMLAHDVDYDPHACLAHPLHRQAAI

SEQ ID NO: 241691 - protein, 412 aa, unidentified
MEVLYACCCGLDVHKKSITACVLWAEGKGKTRKEKRRFGTFTRELLQLADWLRACGVTHVAMESTGVYWKPVWNILEGQFEVLLVNAQHIKAVPGRKSDQKDCEWIADLLQHGLLHGSFVPPKERRELRDLTRYRVSLAQEENRIANRVQKVLEDANLKLASVASDPLGVSGRAILKAILAGEEDTERLAEMSKGILRKKIPDLRLALEGRVTEHHRFLLQELLDHQEFLEKKMAEVEAEIGKRMRPFEAEVERLDTIPGVDRVTAWSLVAEVGVRMEQFPSAGHLASWAGLCPGSFESAGKRLSGRTRKGSASLRRCLCQVGSVVSHLRDNYLSAQYRRLAARRGGKRAVLAVAHTVLVMAYHILKRKQNYQELGADYFDRLNADAIRRSLVRRLEKLGHRVTLEPIPQSA

SEQ ID NO: 241692 - protein, 352 aa, unidentified
MLIIGCDFHPGFQQVAVFDNETGEYQEKRLNHREEAEQFYRSLAGQNVRVGMEACGHYPWFERLLAEMGVELWLGDAGKIRASVVRKQKTDRRDAEHLQVLLREDRFPRIWVPTLEERDTRQLLVHRHKQVQARTRTKNQLHALALSQGVQRKRKLWTEGGRAELEKLELLPYAAIRRERLLETLDRLETEITALNRQVEAEVKQRPAAMRLMTHPGVGPVTALAMVLTLGPAERFASGRKVGSYFGLIPSEHSSGGRQQLGHISKQGSSFLRFLLVEAGQSAARYDAELGRFYRRLAVRKHRALAKVAVARKLATRLYLMLRENWNYAQLCKAVVQVSPSHSVDRRQKPAA

SEQ ID NO: 241693 - protein, 351 aa, unidentified
MKYYTSTTEFNCGIDLHAQQMYVCVMDRQGNKLVHTNIKGNDFSYFLKRIEPYRHDLTVVCECTFNWYWLADACFDAGIEFVLAHALYLKHIHGGKNKNDRIDSEKLAHLLRANLIPPSYVYPSERRPIRALLRQRMSYMWERATLQTHLSMNQTAEGLVPARKGGHNRDEWEGRILEQYTNPLHQFAVSCDMTMIRAYDDQIEKLEAEIIRQAKAGLGRNYQLLLSVTGIGRILSMTILFETDAIERFPTVKDYVSYCRLVKGSVASAGQVKGLTGGKMGNAYLRWAFGQAALIAKRNHPLLTPYAEQLISKRGKFKGNAILANKLARAVYYMLQTGSSFDAERLIATSI

SEQ ID NO: 241694 - protein, 337 aa, unidentified
MTPFCAIDLHSNNSVVVILDEDDTVLYQERLPNDLPAIERALSPFQNELYGVAVESTFNWYWLVDGLQAAGYHVMLVNTHAVQQYKGLKHTNDVSDARWLAHLMRLGILPTGYIYPYEQRTLRDLLRKRLFLNRERVMHLLSAQCQIRRCTGVQVNCTELKRASPQLLQVHHHPNLRFALRCHLVMVQALNEQIELIERHVAKQTQDNPYLQSLLTVDGVGPILGQTIALETGDIDRFSTVGQFASYCRCVNSQRLSNGKAKGRNNTRNGNKYLSWAFVEAAHSIIRHNKVAHRFYQRKRAQKNGALATKALAHKLARACYYVMRDGVVFDETRLFA

SEQ ID NO: 241695 - protein, 388 aa, unidentified
MKSFEGPYDAYVGFDVGKLAHRACCVLTGGSVAFNVGVANDEAAIDRVLAEAAAHGRALAVVDQRRNIGTTVVRRARAAGVEVAYLPGIAASRASSLFPGDAKTDERDAEVIARTAMGVPQALRPVPEEGALEGARRLEAQRCDLLRDRTHCVNRLRALLLESNPAFERELDCEAAWALSLMSCVGGPWQVLDAGRRRYAALTRDAPRGAADRLWAALKAASRPTEAQVRAEATLVRMLASRIAEDTALIAELAALVEAEVGGDETYRCLLTVPGVGPRTAAQLVLSVDISDFEDHDHLASYCGLVPRNRQSGTSLNSVSSSRQGNKQLKNLLIFSCSCLARGSGYYREYYERCRDRGMPHKAAIKAVARKRLKVIYAVMRDVRPYVA

SEQ ID NO: 241696 - protein, 438 aa, unidentified
MTHPRMKFTYVGVDSHKETHTAVFLDCFFERLGEVSFGNLPKDFSAFLDGARKLRQDGTAFQFGMEDPTKYGRALARFLIAGGHPVKHVNAYLVARERRSLNYEKSDSADAECAARLLISRFGGLPDAEEDGRYHILRTLVVRRDSLTKSNVSLKGYLHSLLTLDFPGYQRFFRELDGKTALAFFTRYPSPNLLTDTTADELARFLWEHSGGLLKKERAKEILDAVGEAAGTAPIHPIRNKTVLSTIRQLQYNLRELESVEADLFVVYSGFDTTLTSMAGLDLVSASQLLSCIGDVRKFPTPAKLAKYAGVAPVTHASGKRGVQFANTRGDRELNSLFYRLALRLILTVEPGCRALNPFFHEYYRRKLTQGKTKGQALKCVQRRLVNIVWTMLTNHEDYVNPPIVGVERPETADGGKPEDKRRKKMNTGKRQEKSKQG

SEQ ID NO: 241697 - protein, 406 aa, unidentified
MDVVYTHVCGLDVHKKNVVACVITPETKEIRTFSTMTDDLILLVDWIKSNGCTHVAMESTASFWKPIYNLLELEDIQTLVVNAKNIKNVPGRKTDVKDAEWIANLLRHGLLQGSFIPNRDQRELRELIRYRRSLIDERAREVNRIQKVLEGANIKLSSVASDVLGKSGRAMIEAMIAGEENPELLSELAQRRLRNKKADLQRALKGLMGNHQKLMLAAQLRHIDYLDEEIGRLDEEIKRRMLPFEEDLELLDTIPGVARRTAETIVAEIGTNMDQFPSAAHLCSWAGLCPGQNESTGKRKSGTTRKGNKKLRNALVEAARAAGRTKNTYLSSQYHRIAARRGASRAAVAVAHSILMIAYYILKRRQPYIELGPTYYGERKRDTIIRQSIKKLESLGLKVTVESVAS

SEQ ID NO: 241698 - protein, 418 aa, unidentified
MESTAETTLPEGPPNGVTGGIDWARDDHAVSIVDARGCEIRRATIEHNAAGMRELLELLSRTGACEVAIERPDGPVVDTLLGAGITVVVISPNQLKNLRGRYGSAGNKDDRFDAFVLADTLRTDRSRLRPLLPDTPATTTLRRTCRARKDLVGHRVALANQLRAHLRVVFPGAVGLFAVIDSPISLAFLTRFDCQDRADWLSVKRLAAWLASTGYCGRVDPAELYDRLTRAPRGATGDDGAANAHVTRAFVGALTSMVSQIRTLDAQIAEQLALHADAHIFTSLPRSGTVRAARLLAEIGDCRARFPTPESLACLAGVAPSTRQSGKVTYVGFRWAADKQLRDAVCDFAGDSRRANPWAADLYNRARARGHDHPHAVRILARAWLYIIWHCWQHGVAYDPTQHRALQAIVNQDQSAAA

SEQ ID NO: 241699 - protein, 414 aa, unidentified
MVCLREGAKPCSFAGSIGQTITMMRLRIDEQGHQLGSIRVAHSPQGLSQLDSYLERIAGPGGKGQLACIVETTHGLLIAHLLEQGWAVYPVNPRTVERRRAPSGAKTDTIDAYLLAKTGRADFQDLRRLNPDSEQIQELKTRTGDQDALVHMQTRLAKGLTACLKAYYPVVLELFSKLHQPSTLSFLRAYPTLQAARSASVEDLTALLKQARYPGAGIAAQHMAGQLQQPCLQANAVTTRTKARLMLALVDQLEPLLKQIADYDKEIERLFLSHADSEFFQALPGAGKRLAPRLLAESGDDRSRYESASSWQALAGTSPVLFQSGTYQKAHRRLGCIKPWRNALQQFGGPSTHQEAWAKEYYQRKRAEGKSHTVAVRALANVWARILYAIWKKKEPYQTTTFEQARQAHAPRVA

SEQ ID NO: 241700 - protein, 385 aa, unidentified
MTIEIQAPRFIPRDYDVFGGLDVDKKSMSVVFTDHAGSQRALRMAHQVTPLVNYVRKHFAGQRVAFAYEAGPTGFGLHDELVRRAYTCVVVAPSKVPRAPGERVKTNRLDSRKLAESLRGGQLHSIHVPSGVYRNLRHLVQMRDTHVRQLTSSKLRIKSLLLYEGIAFPEEHEKWTGRAMRELQTLPCSETVRFKLDDLLDTLHFHFQAAARTTKQIRQHCLQEPELQQSIEVLLSLPGIGWIVASHLVARLGNPREIKNGRQIAGFLGIVSSEHSTGDKQNRGEITRSGDSRLRNKLIQSAWTAIKRDPELRAFYRRIYQRHPKKVAARKAIVAVARKLTNRIYVVLNEQRPYVIRPDSSIAPLTVAETVGPRERLDAAQNDQS

SEQ ID NO: 241701 - protein, 390 aa, unidentified
MSKNKKVSKRVIGIDIHPRCFAAAALTVNKKRLWLHARVEMIDLEKWLEKNILPGDILILESGCNSFSFAQKVIAYNAECIILDSVKVGKVSSAYLKNDKVDAVKIAKVYLSELAGEVWKPDTKTVLRRQVLSKYNQTNRNVNKTKNMIKSFLVENGINFPKGKKIYSEKSKQWLLIHKELEMTQKLLVGLLYDDLAHALKTKKALAKIMAQDLLNDDHAMGLIKLCGIRTICAFALVAAAGDIKRFPTPKKFAAYLGLVPSVSQSGDNTRYGGVGKGGRKETRTYLVQGAQAVLKSGDDYGGGFKQWGLKTAARKGRNVAICGLARKMAIAAWYQLNGHRTNIHIPERNLNVKIQKISVEIGKEVLKEIGYESPMYFRAKMKEKLVEVA

SEQ ID NO: 241702 - protein, 412 aa, unidentified
MSVVQFTQVLSRGCGMDIHKKVVVATVQGEGICKETRSFDTFTRSLTQLRERLVSLGITHVAMESTGVYWKPIYNVFEGFIPHIWIVNARHIKNVPGHKTDKNDSEWICQLLMAGLLKPSFIPPKAQRELRDLTRYRRKLIQSVSANKNRIIRILEDGNIKLSSVLSDTSGATAVKLIDMLCDGKQITLSDIESVRHGRCQHTKEEMLEACTGCLYEHKVYMLGKIRECNASLKEYILDFDKRIKDVLSSYHDAIERMCEIPGIQNRVCEDLVAEIGLDMSNFPTSAHLCSWAGMCPENNESAGKKKSGRTNHGDKQVKETLVEAAWAASSAKGTFFMERFNRLAPRKGSKKALIAVGHSLLKCIHYVLSTGGRYKELGDNYVPNKKEQKRKEYLKKELQKLGYSVKLSKED

SEQ ID NO: 241703 - protein, 340 aa, unidentified
MKLYGAIDLHSTNNVTVVIDEQDRVVYQKRLPNDLALIVKELSVYQSELEGIVVESTYNWYWLVDGLMEQGYKLHLANTAAIQQYEGLKYTDDHSDARWLAHLLRLEVLPEGHIYSKADRPVRDLLRKRSQMVRHRTIHLLSIQNLLTRNTGSSLSANRVKGLDVQQIDELLADPDLALAVKANLSVMSSADEQVQLLEQTVTQRVKLRPQFSFLKTAPGIGEILALTIMLETGDIGRFASVGNYASYCRCVGSQKISNGKKKGQGNTKNGNKYLAWAFVEAAHFAIRYNSKIKSFYQRKKAKTKIVVALKAVAHKLCRACYYIMRYRVAFDITKAFGPK

SEQ ID NO: 241704 - protein, 434 aa, unidentified
MQVTRGMRRRTDKLARHRERLPADALIAGVDLGKKRSVVVFVRATDRARLGRLDISSDPAGRAQLIARGRELVAAHGTGPLVVAMEPTSHFWKPLARAVDAEDVPYVLVQGFVVSHARELDDLTRDKTDTRDATLIADLAAGLRFTETRLPEGPWAESALLVDARDARRIERSAALQEVRALLELAWPSLLAACPALRGSHLGAMLRSGSTPQQLAALPARRFGALLRRHHEGRFMDWMARRLQAAARDVVALPETPAAALRWRLAMERVALADAAIVELDRRLVELLELSGYGWLRGQIRGLGDPTLAALLALTGDPARYDDARCLVKLAGTNPTARSSGEHEAAGGIHRRGRPLLRFLSFQAAVTLVRHEPDYRHRYDELTAPDRRNRLAPKQAYVALGNKLLRTLWSMAVSGADYEPAIARGEVRPLPRAA

SEQ ID NO: 241705 - protein, 330 aa, unidentified
MKNWDFTLGVDVSKNTLDISCAELKEHIQIKNGSEGFLQLCKWCRQLKIDLKKSFFVMEYTGGYEYRLLQFCESRNLAFTRIPGLAIKNSLGISRGKNDKVDSSRIAQYGEEKHKLLRASKPPNAAIISLKQLLNFRKRLVRENAGYESSLQEREHMYCPGKRDIVIRTLEQKIKANEKYIAAVENEMMKIVTADEKISTNYKLITSIKGIGKVNGLMTIAYTENFTCFDNPRNYAVYVGVVPFDHSSGTSIKGRKRISHIANKELKQELNQAARSALQWDKEIRTYAENKLKTKCYKIVLNNIKFKLILRMFAVVKRGEMYVENYKRAA

SEQ ID NO: 241706 - protein, 338 aa, unidentified
MCNSIIGLDIAKNVFHLFTLQSNGKTMKKKLKRAELLTFFATYPASVIGMEACGGAHHWARELTRLGHEVVLLNARYVKGFIVGNKNDFNDAEAIFTAVTQPNKRVVAPKTIEQQDIQMVHSVRSELIGRRTALVNQIRGLLSERGIVINQGIRHVRSHLPLILEDAENNLSALSREMFAEQYEKLKALDREIKEQDQRIGRLCSANKLSQRLLEVPGIGPLAATIIAADIGGNSKGYKSSRDYAASLGVVPKQHSSGGKQILLGISKRGNRYIRTLLVHGARSVLRHCTDKTDKLSLWLQALISRRGFNKAAVALANKNARILWAMANSDKDYKSFA

SEQ ID NO: 241707 - protein, 340 aa, unidentified
MSEITTIGLDLAKHVFQVHGIDAQGTTVLRKRLRRGQVLAFFSRIPRCVVGLEACATAHYWARELGALGHEVRLMPAQYVKAYIKRNKHDAADAEAICEAVQRPTMRFVLVKTAEQQATALLHRGREQLVRQRTMLVNALRAHLAEFGIVAAQGLRNVGELIAIVRDDGDTRLPDMARQVLQVLANQIEQIETAVAALERQLLAWHKTNPVSQRLASIPGIGPIIATAIATTVADPKVFRSGREFAAWLGLVPRQNSTGGKIRLGGITKRGNRYLRRLLINGASANLLRSKATKADPWVIGLRRRRPPLVVAVALANKTARIAWAVMLREKEYQPRAMAA

SEQ ID NO: 241708 - protein, 400 aa, unidentified
MNAVGIDVSKGKSTVAIMRPFGEVVAEPFEVLHTDTELRKLACFLEKLPGETKIVMEYTGNYWQPIANVLYDAGIFVSIVNALLIYKYGNNSIRKGKTDKLDAVKIANYCLDRWTVLERYTPVDQIRQTLKTCRRQYDQYIRLKVNLKNNLIALMDGTFPGLNILFKSAPRDMDGHEKWVDFAEKFWHRECICRNSEKAFTSQYKKWCAKAGYRFKEEKASSIYAHAVSQVNTLPMTDSIKCLVTLAVSQLNTIIETISVIQHEMLTLAAQLPEYPVVMRMFGVGPVLGPQLMAEIGDVRRFDRKQSLVAFAGVDAPPCQSGTFESKNRHISKRGSPRLRKTLFQVMSTIIQHAPTDDPVFQFLDRKRREGKHYYVYMTAAANKFLRIYYGTVMAYLKKL

SEQ ID NO: 241709 - protein, 343 aa, unidentified
MQAITTVGLDIAKSVFQVHGVDAAGNVIIRRQLKRRHVVPFFQRLPACVVGIEACATSHHWSRELTAVGHRVRLMPPAYVKPYVKRQKNDAADAEAICEAVTRANMRFVETKTPEQQACLMLHRTRHLFIRQQTSVINAIRAHMAEFGIVARVGRNGVAELLRVVADPTDRRLPDVARACVAALGAQLRMLKAQILEFDRRIMAWHRSNEVSKRLDHVPGIGPALATALVASVPDPKAFRSGRNFSAWVGLVPKQHSSGGKERLGGISKQGDRYLRGLFTAGALAVIRYAKIYGTQHRPWLTALLARRPTKVAAIALANKLARMAWAIMAKGERYKEPAALAA

SEQ ID NO: 241710 - protein, 341 aa, unidentified
MWIIGCDFHPRFQQIAFVNTEGGEWGQRRLEHRGEAEEFYRSLAGQAVRVGMETGGSSRWFERLLEELGQELWIGDAAKIRAAETRKQKTDARDAEHLRELLCSGQFEKMRIWMPPAENRDLRQLLWHRHRLVQMRTRVKNQLRSLATSEGMERKPGLWSRRGQQQFQALELAPWAGRRRQDNLELLAELLRRSDPLDQEVAQQAAQQPAAVRLMTHPGVGPITALAFVLVIGDPARFANSKKLTSYLGLIPSEDSSGGKQRLGHISKQGNAMLRGLLVEAAHVAVRHDAQWKRDYRRLAMRKNRSIAVVAMARKLAVRLWWMWRRGVDYAPWSASGSHAG

SEQ ID NO: 241711 - protein, 371 aa, unidentified
MEKNTIFVGLDVHKNTIDVGLADAGRDSEVRFYGSIGGDLDSLHKVIRKIQSTGAMLRVVYEAGPCGYDIYRSLTRRGVECMVVAPSKIPRKSGDRIKNDRRDALNLARLHRAGELTPVYVPTVEDEAMRDLTRGREDAVKAHRTSRQVLLAFLLRHGYRYSGVSYWSKAHWNWIGDIKMPHPAQQITLQEYVHAVQEQSARVQRLTQQIQELVAQWDLALLVQGVQGLRGISLIVAATTVAELGDLTRFASAKQIMAYLGLVPSEHSSGDSIKRGGITKTGNSHVRRALTEAAQAYSHPARESRVLLARLAGLPEEVRKIAWKAQVRLCDRFRRLTARGKNRNTVITAIARELAAFMWAIANELRPMRKA

SEQ ID NO: 241712 - protein, 334 aa, unidentified
MHESCTMTIDATVGIDVSKDRLDVVLRREEREQPRVSANSAAGFRDLHCWLQGQGVQPQHTRVALEATGSYSDAVVLFLYEQNYLVSVLNPAVLVDYRNSVNVRSKTDALDARLLARYAQERRPRGWKPLPEDVQTLRFLLARREDVQHMLQQERNRLHAGRMESWIRTRVQQHVMQLDKELQAVWKRTMDHLKAHPSLKSMWRRLQTIKGIGPIGAAYLLAEVGEIERFDDPRALVSLAGLAVKRHDSGRSVHGKPKIDRHGRTGLRRILYLCAVSALRWDAHMQRFAARLEARGKALKVVQVAAMRNLLHIVYGVWKHEADYDPTLAFPEVA

SEQ ID NO: 241713 - protein, 360 aa, unidentified
MHATPKSASVTTVAVDLAKDVFELAFADANAHILERRRLTRTAFARAFANHPPLRIVMEACGSAHDWARRFARLGHAIELLPAHDVRPYVRRNKTDRTDAAGLLEAARCESIRRVPVKTPEQQGIQGLHRVREFHKAQRTAAINLLRGLLREFGVVIAPGSAKVRPAVLAALEDADNELPMTLRHTLKTVLDAISADERAMAAIEERLQVFAEGDLRSQRLQRAGGVGLITATALSASVGDFDRFPSSRHFASSLGLTPREHSSGNTRRLGRVTKRGDLYLRMLLIHGARAMLRSAKVAKKKQQPLDRTRAWALALSERVGHNKAAVALANKQARRLWAAEHHRSRFDPDHVSVHHTLTP

SEQ ID NO: 241714 - protein, 407 aa, unidentified
MEVLYPRCAGLDVHAGSVTACARIAAGPHVTYEHRTVATTSRGLLDLAEWLTAHGCTHIAMEATGVYWKPVWHVLEEHVTLVLANAMHIRNVPGRKSDMIDAMWIADLLAHGLIRSSFVPPAPIQELRDLTRTRRQLVHEVARHVLRIQKTLEDANLKLTQVMSDIVGVSGRAILNALIAGETDPDRLADLTRGRLKAPRTDLRDALHGRITDHHRFMIKLHLAQIDALDAAVATIEARIGDALGPFRAAVSLLTTMPGLSETTARVVIAEIGTDMSRFPTVGHLISWAGFCPRLDESAGKRRSTRTRQTTPWLKPTLINAAWAATRKKDSYLRAQFLRIKSRRGAKKAILAVASSMLTAAYFMLRDGVEYHDLGSHHFEQRDKEQLAKRLIQRLRDLGVAVEVKAA

SEQ ID NO: 241715 - protein, 369 aa, unidentified
MGDHITYVGLDVHKQGIVVAVAEDGLRGEVREYGRIANTPAALDRLARKLSREGVKLRFCYEAGPCGYGIQRHLSARGHECVVVAPSLIPKRAGDRVKTDRRDAASLARLHRAGELTAVWVPDAGHEAMRDLVRARLDAVHALRRARQQLSGFLLRQGCHYGRPAWTKLHRRWLAGLKFEHAVHHIVLEDYIAAVEAAQARRDRLTAQIEAMLADWTLAPVVAALQRMRGMALVNAATLIAELGDLSRFTNPRQLMAYLGLVPSEHSSGASVKRGGLTKAGNSAARRLLIEAAWCYRFPARVSRELLLRQEEQPKPIREIAWKAQLRLCARYRKLARTGKPANVVTAAIARELAGFIWAIARRVPPTAG

SEQ ID NO: 241716 - protein, 427 aa, unidentified
MNCNTQNARIAEVNEKTLVVGIDVGSEYHYARAFDNRGVEYSKKAFKFGNTEDGFEAFKAWILSICKEQNKNKVIPGMEPTGHYWFNLGKYLQDNGMRPVLVNPFHVKTSKELDDNNPTKNDRKDPKVIAGLVKDGRYTYPYLPAGIYAELRTASNLRYRLQGELTGIENRLARWFSIYFPEYKTVYGNLDAISGLMVLKAAPLPEDIVALGVDGVNQIWRDAKMRAVGKKRAQTLVAAAEHSIGTTEGLTAARYEIRLLLEDYESRSEKLKEVMDLIEELVHQIPMADKLLEIKGIGIRTVSGFLAEIGDLGRFSDPKQLQKLAGYALKENSSGKHKGQSKINRRGRKRLRHLLFEAAISLVGKNQEFKAIHHYYTTRKDNPLKKMQSLIAVACKLIRVFYAILVKGVEYDPKKMVSDIRRPALAA

SEQ ID NO: 241717 - protein, 311 aa, unidentified
MDEIIIDKGCGLDVHKETVVACIMGSGIKKEIRTFSTMTEDLIRLKSWLSDNGITHVAMESTGPYWKPVFNILEDSFEVILANARHIKNVPGRKTDVKDSEWICKLLRSGLLAASFVPPRAIRELRDLTRYRRKLTQAISSEKNRVQKVLEDANVKLSSVVSDTFGVSASRMIEAILSGNLDADSISDLAVGKLRGKKEELKKALVGNFQDHHRFMIQASLDHIQSVEKIIIGLDQEINRKLKDYQKEYELLQTIPGVKEQGAASIIAEIGVDMDRFPSEGHLSTWAGMSPGNNESAGKKKAERRPTAIRT

SEQ ID NO: 241718 - protein, 362 aa, unidentified
MFRPHTLYIRIRIVRKVHEPVFAMRDQDVSDVIKTKNRTAMQYIGIDVSKATFVVAYSSDKGGEIRTFNNTTAGIKQFIGTLPKDGSIHCVMEATGNYSALLLYMLNVAGITVSMENPLKVKNFARAMLSTVKTDKIDARLIALYGEKMNPQPFKVQGEAILRLRQKRTVIRQLTKQITAMSNLRGSLACLPVPDKGATHTVDETIKFLEKRRDRLQSELTDLVEVEFSRQLALLTTIKGIGITLATALILTTGGFTYFQNAKQVSRYLGICPTYEQSGTSVNIKGHINRNGDAYTRGLLYIAAWPASRFNAQCKETYTRLRQNGKSGKLAMIAVANKLVRQAFAVVAHDKEYVDGFVSNRP

SEQ ID NO: 241719 - protein, 344 aa, unidentified
MQHYVGLDVSVKETSVCIVDKTGKVIREVKVATEPVAILAVLTEEALAIERIGLEAGPLSQWVYSALAEAGLPVICVETRHMKAALSAQINKSDRNDARGIAQMMRVGLYRPVHVKTLASQKRRMLLTSRQLLQAKALDIENDLRGTLRNFGLKVGMVGTVKFEARIRELVADHPDLAAIVEPLLIARRVLREQLDVLHHQLLEIVRHDEVCRRLMTTPGVGPVVALTFRATVDVPSRFSNSKAVGAAFGLTPCRQQSGEIDRMGGISKCGDPRMRETLFEAALVLMTHSRRWSWLKAWGMKIARHRGMKRAIVAVARRLAVIMHRMWMDGTEFRWTREEAAAA

SEQ ID NO: 241720 - protein, 392 aa, unidentified
MVCVGIDVAKDKHDCFILSSEGDVLADVFTIDNNLDGFETLLQRIHSCTRPTDSIKVGLEATGHYSYNILGFLLDKGLATYVINPLHTNLYRKSLSLRQTKTDRIDARTIAYMLMSDVDLKSYTDTAYHNEELKSLTRYRFDKVRERAQLKQSVSRLVNILFPELETLVPTLHMASVYAMLSEFPGAKQIACVHLTHFKTVLSDASRGRYDRDKAVEIREAARRSIGSSMPAKSLELQHTIRLIYELDKEIDEIEAAIKKIVDEMAPPILTIPGISYRMGAMILAEIGDFSRFDSPDKLLAYAGLSPSTYESGKLKATGSYAHMEKRGSRYLRYALFNATKYVCYWEPSFAAYLAKKRAEGKHYNVAISHAAKKLVRLIFALQKSGKAFLPA

SEQ ID NO: 241721 - protein, 340 aa, unidentified
MKKLYGAFDLHSSNNYLGISDEKDRRIYKRRLPNQPDVILAELEPYRTELIGLVVESTFNWYWLVDLLMEEGYRVHLANPAGIQKYKGLKHSDDQDDTFWLAHLLRLGILPEGYIYPKEERPVRDLLRKRGHLVKLRTSLINSLQGIIHRNCGVKLNARKIKALKENNVAPLLNGQEDLALSGMVSKETIDYLGQQIRKVENVVLDKIKLKNEYLYLLTIPGIGKILAFTIMLEVGPIERFSNVGNLASYCRKVPTQWTSNNKKKGKGNKKNGNKYLAWAFSEAAEFARRYDPNARAFYNRKASKKNFMVAHSALAHKLTRAAYYVMRDQVEFDSQKLFA

SEQ ID NO: 241722 - protein, 474 aa, unidentified
MTRADLFRQIPIEEYVMPRKRKMHSQSGAALTVMQPDAAGIDVGATEMYVAVPEDRDPQPVRCFATFTPDLQALADWLQHCRIRTVAMESTGVYWIPLFQILKDRGLEVCLVNARHVQNVAGRRTDVSDCRWLQYLHAVGLLRASFRPPQEVCALRSLLRHRDNLIKQASVHILHMQKALDQMNLRLHHVIDDITGMTGLAIVDAILAGQRDPAELAKLRHPGIKASEETIIKSLIGDYRNEHLLVLRQSLAAYRYFQRLIRQCDLEIQRTLKGFDSRVDLKLNPIPKDRSGKTKPRRNEPQFNLREHLYRILGVDLTQVPGLQATTVHTLLAEIGPSASKFRSASAFASWMGLCPHNDISGGKILMARTRKVNNRAATALRMAAQSLHGSQSYLGEFYRRMRARLGAPKANVAAAHKLARIIFHLLTTRQPYDESVFARQEIQFRKRAEGRLKKQAQALGFHLVAADPRTEVP

SEQ ID NO: 241723 - protein, 391 aa, unidentified
MKRVCGLDVHKDNAFVCILGENGEKIEFKTGVLTVELDSFRNRLVELGVGEVAMESTAVYWMPIWRILESDFKLYLVNPLSIKQLPGRKSDVKDAEWIATCLQKGLIRGSFVPPLAVQQLRQYNRRLFDLNKQAVYVQNKMDAALQRCNIRISNYVSNVDTKGYREVVELLSEGTTDPELLTGKIHRRTVNKHGRDTIKAALTGVVTDVDSDLLRQYREELDLLRRHKLECLSKMREMCEELYPEELKRIEEIPGISAQSATQIIAEIGADMKMFLTARTLVAWAGLKPRNDGSNGKSSHAGSPTEISISGSCSLNAHGRQAARRTASSAASATGWSPSGRKDASRCRLPLQENCSSSSGIYWPKGCSTPTGWHRQTTPKMNHRIPHKGRP

SEQ ID NO: 241724 - protein, 346 aa, unidentified
MTYYAGLDVSLREISICVIDAEGTIITRDTIPADVMAVDGWFKNRKLSPKVIVHESGQLSIWLQRGFQELGLPAVCIDARRAHKSLSARINKSDASDAEGLAQLARTGWFTPVYVRSVEADRVRALVGARERLIRLRKDLEGHVRGVLKTFGIRMTGITKGKLRQSFRDQLAAAGETDPVLRTLADSFSDIHTRLCKEAADLEKALKVKAETHPAVRRLMTIPGVGPLVSLSFVALIENPDRFAKSSDVGAFLGLTPKRFQSGDVDWSGRISKQGDKAMRALLVDAAATLIQNVKRFSALKSWAIRLAGRKGFRKAAIATARKIAVLMLTLWKNGTDFTPKMEASA

SEQ ID NO: 241725 - protein, 331 aa, unidentified
MNYSHFVGLDVGKKTFDASLMSADEKELSHKSFDNTPTGIQSLLDWIAGYHLSLSKLLFCAENMGSYVTELSVSSVSMGFSLALVCPLTIKKSIGLQQGKNDRIDAKRIANYAVLHYRKLELYKLPDKDLVRLRGWIIIRDNLVKQKVSSIKLLETFSRMAKLADVTESISFLEEQLKSIKERILEVEEDMEQLIAASTSLYTNYLLLRSIKGIGIINAIVLLCVTDNFQRFDNPRKFACYCGVAPFEHTSGIYIRGKTQTSSLANKEVKVYLTRAAITAISWDPQMKAYYKRKIAEGKHKAAVINAVRAKIIARSFAVIRRQTPFVTLAV

SEQ ID NO: 241726 - protein, 305 aa, unidentified
MNEISTIGLDLAKNIFQVHGIDAARQDVIRKPLRRGEVLKFFASLHPCLIGIEACATAHHWGRELGKLGHTVRLVPPAYVKAYVKRDKTDAADAEAICEAVTRPTMRFVAVKSMEQQGVLMLHKTRDLLIRQRTMLINAYRGHLAELGIIAAQGSAGVKTAIEAFHMAQDNLPALACNALHGLIDQMRVLAREIEKIEKTILTWYRQNAASRRLAAILGIGPITVSAITAAVPDATLFSSGRSFTAWLGLTPRSYSSGGKEKLVGISKRGDSYIRRLLVIGATRGDPSSATGQCQQELGRQATYA

SEQ ID NO: 241727 - protein, 352 aa, unidentified
MQQFIGCDAHKRYSIFSSVTEKGRIGRAVRVSHDREAFRGYLEQLPTGSPIAVESSGHWYWLVDEIERAGHEPHLVNAGEAKRRMGKPNKTDKLDAEGLAILLRNGTLPEVWIPPIALRDQRELLRLRMFLVALRTDIKNRIHGALGRYNVQIGVTDLFGIEGRQKLEQRTCELLVETRESVRQQLITHDFLESQVEQIEKRLHKMMGDAPGADLLKTLPTVGPILSAVLALEIGDVSRFPSAEHLASYAGLVPRVSSSGGRTRMGQVGGNVNRMLKWAFVEAANLVVLHQRRMGHTHALRLYQRIRSRKNHQKAVVAVGRHFAEAAYWVLRKQEAYREPTTRSLAVSSTHG

SEQ ID NO: 241728 - protein, 339 aa, unidentified
MYYGAIDLHMNNSVLGIIDVDGQRLYMRRIPNDLDLIKKALGPFAENLEGIVVESTYNWYWLVDGLQDAGYRMHLANPTAIQQYSGIKHTDDVTDAWWLAELLRTDQLKEGFVYPRAERAVRDLLRKRAHLVKQRTQNILSIQNLTSRNTGGHLNANQAKQLTEEAVEQFYDKEEERALAIKCSVRVIQALKREITIIEKHVKSKLKLSQPYQILQSVPGIGELLAMVIMLEAGDMSRFPSVGDFSSYCRCVNSVRLSNGKKKGSGNRKNGNKYLSWAFMEAAHYAIRYYPVIRKFYQRKSAQKGIMVACMAVAHKLARASYYVLRDQVAFEETKCFVQ

SEQ ID NO: 241729 - protein, 351 aa, unidentified
MDIKYIGMDVHKETISIAVMKGDGKLVMESIIETKASTILQFIEGVRGDLHVTFEEGTWAAWLYDLLKPHVTELVVCDPRKNALMKEGNKSDKIDARKLADLLRGGYLRSVYHGENGLRTVKELARSYLTISKDLTRVMNRVKALYRSWGICCAGQQVYAPQHRSEWLNKIGETGVRRRAEFFYQQLDALRVLHKAVRRDLLAESRKHGATKLLREIPSIGAIRAALLLALIQTPHRFRTKRQLWTYSGLAIDTRDSAQHRFVDGQLQRSKKPQQLRGLNQNHNHDMKAVFKSVLSNDFKLRTLFNHISKPLLSYNIKTVTYTCRGRINASGILKFLDSIIHLTIFGIKTG

SEQ ID NO: 241730 - protein, 323 aa, unidentified
MENKKGQIAFEQLIERGCGIDIHKSILVATIRGTGIREETRSFNGFTESIEALRDWLKENGITHVAMESTGVYWKPVYNILESDFEILLVNARHIKNVPGQKTDKKDSKWITKLLLSGLLKGSFIPPRPIRELRDLTRYKRKVIEQISSEKNRIHKLLEDANIKLSSVVSNLSGASAAKIIDAMIAGEEDIDKLVKFRHGNIQTTVADLAASLKGNLTNHHRFMLQTVKESIKSKEQIIARLDKQIEKQLKENELVVDAQLLTTIPGVGEEGAACLLAEIGSNMDQFPDEQHLASWAGMSPGSNESAGKKKVPGLPMETYILK

SEQ ID NO: 241731 - protein, 375 aa, unidentified
MSKHTELFVAFDTSKLRNAVAVADGGRASEVRFLGEIENTAAATTKLVHKLEAKYQRITFCYEAGPTGYELQRHIQGLGHECIIAAPSMIPKKPGDRVKTNRRDAVSLVKLLRAGDLTAVWVPDRRHEAMRDLTRARETAVIDLCAKRQRVSAFLLRQGRWYSGGKKTWTKAHMNWLASQQFEQPERRIVFEEMMFAIRQAQERVERLEQAIRAAVPEWSLAEMVTTFMAFRGIDLVSSAGLLAELGELSRFPTAPELMGYVGLGCSESSTGDSIKRGPITKAGNRRARRTLVECAWSYQHPPRVGVAKQAKVAAAPPKVREIAWKAQCRLNRRYRALLRRGKLKTVAITAVARELVGFLWAAAREVASAEHVAK

SEQ ID NO: 241732 - protein, 357 aa, unidentified
MNTKTAVGWDIHRKFSQLSVVAQSEQGEIRVVKRMRLEHVDRAAMREELAKLPPATPVAMEGAFGWPWIADLLDELGLDPHLGHPPAIRVLAKNEAKADRMDADRLGRFWLRGIFPESYLSTPEVRQLRERMRYRTALGQLRTGIKSRIQAILHRQGVSHDYSDLFGKGGRAFLTTLALPEACRAALDGWLAQIDLLDEQLAEVEAWMQQHLEEDDITRLLKTIPGIGLILAHVIRAEVGQLTERFPSRRHLTSYSGLAPLADDSADRHGHRHIAAACNHTLRWAFIEAAHCVVKSKSCPANLRHLYNRLTHGGRANKNQAKVAVARELCELVYVIWKKGEPYRETTSPVRPQRSKH

SEQ ID NO: 241733 - protein, 337 aa, unidentified
MEFEFFIGIDVSKNELDFSVQQGRQLLFHREIFNDTGSIGGLLKELLKLPGFALSKTVFCMEHTGIYSNHLLAYLYKKKASVCLEAASQIRNSLGNIRSKNDKIDSIRIAEYAYKNREELRLWEPKRDVVQQLACLSATRSRLIKAKKMLKTPLKEYSAFMGKKIAKQDVLLCDKTLKGIEADLSRVEKAISGIIAVDAELSRLFSLVTSVSGVGKVTAVQILITTNEFKDIHNPKQYACYAGVAPFIKESGIFKGKGRVSHMANKKVKTLLHFAAIVAIQYNPDLKLFYERKVKVEKKNKMSVINAVRNKLILRIFACVNQNRPYENIYHKLVAES

SEQ ID NO: 241734 - protein, 350 aa, unidentified
MLAELVDHVVGVDPDRGWITLAVLDARSAGVVAEGRYPATRDGYCEAIAFVDEHSVEGERAWVIEGSAGYGRGLTVALERHGEWVIEFDRPTRKTKDGAKSDALDAVRAAREMLGRKRLSVPRAHDGIREAIRVHAMTRAAAVRVRTGAVNELKALIVTADESMRAELRGLRTTSQIAACAAFRDRPSAEVHERATRSAMRSLARRIQLLDTEIDEHDHALKALLDRAAPQLVAERGVGYVTAAQFYIAWSHPGRCHSEAAFARLGGTSPVPATSGQNQTRHRLNKGGDRQLNWAFHMVAVTKRRCDPNTKAYIARRVAEGKTEREATRCIKRYLARRIWRLLEHPQITT

SEQ ID NO: 241735 - protein, 386 aa, unidentified
MGNQITPLPTAARGESARIFVAIELSLKSWLVALRGPLGNKVSLHKLAPGDVPGLLGLIARHCARVERAWDGPVSVISCYEAGYEGFWLDRRLKAAGIENRVIDPSSLLVDRRARRAKTDRIDARGLLRAVIAWHGGDRDVCRMVQVPSPEQEDAKRLHRERQRLIKERTSHTNRIKALLVCQGIYGAQPRRRGFAGRLAQLATGDGRPLEPRLLGEIERQLERLALVEGQIAVLEAERDQALKEAATAGTTAAKKQQLAKLKAIGPEMSTVLVGEVFYRDFDNRRQLGSYVGLTGCPFNSGPRRREQGLNKAGNPRARTAMIELAWLWLQHQPGSALSRWFEQRVNGAKGRLKKIMIVALARKLLVALWRYLEMGLVPEGARFKA

SEQ ID NO: 241736 - protein, 319 aa, unidentified
MMPQNSRLVGLDVAKKQVEACIRSATLRMSQPSTPEGHAGLIAWLRANRVGQAVMEASGGYERSWAQALRAAGVGVRIVDPKRIRHFAKAAGRLAKNDPIDAETIAWFAETFPIEDPQQHDLAREEIDRLVQARTSLKEVEERIKQQREHGPLPVVAKALAAVLKSVRAELRRLDATIAGKIKAIPSLARRAEIVDSVPGLGAQVVAGVTAWLPELGKITDEAAAALLGVAPYDDDSGERKGARCIKGGRRKLRNLLYMPVMGAATLHNPVLKAYYQRLIARGKEPKVAIIACMRKLIVILNTMLARDQTWNPPAGAPA

SEQ ID NO: 241737 - protein, 342 aa, unidentified
MKEVYYIGLDIHKKIIVYCIKTASGLTVSRGTVTATRSALLKWVESLPQPWMAAMEATLFTGWVYDFLKPYAKDLIVAHPQMLKAITAAKKKNDRADAEKICDLLRVDLIPQCYMAPEEMRELRRVLRYRSHIVHLATNIKNKMSGLLMEVGAEYSKKRLHGRSYFNNLLETVEDVPQSVKELLKLSRAGLEMFAAVQKKLLAALRENELIRERVRRLMTITGVGEVTALTWVLEIGDFNRFSARQAISYCGLCSAQRESAGKESRGPISKKRNKHLQTVLIEAAKIAPHWNPQLAKVHTRELTKGNRNRATLAVARKLVIYMLAVDKTGVDFVPAHEEAAA

SEQ ID NO: 241738 - protein, 346 aa, unidentified
MENIALDVHKHYTWARVENPQGQALYASRLVHSRGSIKNFIQRWSPGSPVAVETVGNWYWVVDEIEAGGGKPQLVNARLAKLMIGNVNKSDKLDAKGLNMLQRTGTLPTVWIPPSGVRDARELPRTRMVFSRQRTQLKNRVHATLSKYGYSVDEVSDAFGKRGRQIIEELSSKLPPHTQQALDHVLDQLDEIIENLKAIEANMIKVFAPCPQTIWLQSLPGVGQILAVVIWTEIGSIERFNRAEQLASYSGLVAREHSSGGKFRYGAVRRDVNVYLKWAFVEAANSAILNRERCDYQHISRLYQRIKPRRGHNRAKVAVARHLAEASFWMLKKGESYREPVLSTQR

SEQ ID NO: 241739 - protein, 363 aa, unidentified
MSESMTVAVGLDVHARSVRLAAVRADELLEERTLPYDEEAVERLLRRWPGARCCYEAGPTGFGLYRHLVERGIDCVVVAPGLVPQRPGDRVKTDPRDARKLARLLAGGLLEPIHVPSPELEAARDLVRAREDGRLDRMRDRHRLSKFCLRHGRLLPTSAWTVTRRTWLSEQRFEYAAEQITFDSYLHAVDLVDRRIEALERAIRETAEQEPWRALVARLRCLRGIDTLTALALVAEIGDFDRFRSAEELMAFVGLVPSEHSSGERRRQGSITKVGNSHVRRLLVEAAWHARRRPKVGYELARRQRGQDAVVVERAWRCQQRLHQRWQRMAGRGKPQQKIVVACARELAGFVWAIATEQPLRTS

SEQ ID NO: 241740 - protein, 323 aa, unidentified
MLPTLGIDISKDSFHLELSINDKLRHRKFANRKEGFGELCVWLAKHKATQVHACLEATGPYSEALALYLHQQGHTVSIVNPVQIKAFGQSELLRNKDDRPDAGLIRRFCEKQRPAPWTPPPVHLRELQALTRHLENLIETRQQQVNRLETTNTKQVAKSLRKLVTHLDAEIERTEQQIDDLVDRHPDLKQQSELLDSIPGVGKRTAAKLLAEIPNITQYKSARQVAAYAGLTPRNNRSGTIRGKTRLSKTGNARVRKALFFPAIVAKRHNPIVRAFCERLSRNGKNKMQVVGAAMRKLIHIAFGVLKSGRMFDPNHERPNAVA

SEQ ID NO: 241741 - protein, 463 aa, unidentified
MQKSPRKTSAAGSPAEVEGLPVLRANVAGIDLASEVHWVCAPNVDRTGRDVEKFGATTPELERMAEWLKERKVESVAMESTGVYWIAPFEVLERYGLEILLVNTRELARVPGRKKSDHVDCKWIQRLHSCGLLMGSFRPSEQVCMLRTLVRDRGTLVAAAADWLRRMQKSLDQMNVRVHRAVKDIDGVTGMAIMRAIVKGERDAGKLAKLRHSRCKKSEEEIAEQLSGHWREDHLFSLQEALKMYDAVQAGIADYDKEILRKLAEMEREECQGQEAPKLKNKNKASAIKSRGEETMRQALYRMSGVDATSIDAIGVGTVQVVLSEYGPDLSRFPTEKQFVQHATLAPHKPTSGGKVVKKKKRGSASTRVAAALRMSATSLEHSQTALGAYYRQTARRKGGSVAVFATARKLATLIYRLLRWGQPYVDEGAEAYEKRYQEGRIKSLTATAKALGYQLTPKPCEA

SEQ ID NO: 241742 - protein, 412 aa, unidentified
MEALYSRCCGLDVHKSSITACVLLEQSQKRGKHIRRFGCTTRELRELVTWLRELGVEHVAMESTGVYWKPVWNTLESNFHVVLANAQHIKAVPGRKTDTKDCQWIAELLQHGLLRSSYIPSVIIRDLRDLTRARTTLSQEHSRIASRIQKVLEDANIKLASVASNTLGKSGRAILQAIVEGEESAERLADLALGHLRIKIPQLQAALEGRVRDHHRFLLQSLLRQLHFIETEITLLDTRLEQLEKEHVELGEALSRWITIPGVDRVAAWSFIAEMGTDMTQFPTAAHLASWAGVCPGNNESAGKRISSKVRKGSPWLRRMACQSAWAAARTKNTYLSAQFKRLAARRGRKCAIIAVAHSVLVIGYHLQRRCCTYADLGSNYFDRLHAEGLKRYLVKRLESLGHSVILEPRTA

SEQ ID NO: 241743 - protein, 475 aa, unidentified
MKKSIFKNTGTDLKRLLNKYKPDEILYVSIDVAKYNHSFMVANFFGEVIIPKSDFPYDKNGIDSLRKKVDLALQQTNAKKVFFGLESTGHYHENLTAALLKLGYDIAVINPTDSKNERDNIHAKTDNIDLAAIARVIMTNKGKRSYIPNTIYYNLRRASRTHRQLTGQETSIKNVITMLVDKTFNGLWNPENNIFSEKWSKGSLLFVENYPTPQQAMRLGVKRLTDFFRKHNTKLTVETAQKIIQLARIAPAREIEMMESDMKALRNNLQVLKALSFAIIEQRKQMVKYLVCTPGIYLLSIPGIGIIYASDFTGEVGDIHRFDYAGQVISLAGTAPKKHQSGQLDKDNLSTSRKGRNLLRMTVNQIALSLDNHCPEYHSYYFTKLSQYQDTPGKAKTATANRFIKLAFSIMRKETLYCPRAYKSLFSQKEHQDYYQTIWNKMKETLAPYLCDDIPPDNYLVKIQNQLEETYGINP

SEQ ID NO: 241744 - protein, 344 aa, unidentified
MEHYAAIDVSLEWSSVCVVDATGEIVREVRVPSEPEALVAFFAAAGLCIARIGLEAGPLSQWLHAGLIEAGLPAILIETRHVKAALNAMTVKTDRNDARGMAQLMRMGWFRPVHVKTLQAQEIRALLTARKLLVAKLRDVQSSIRGILRGFGLKVGAISKGKFEARIRELVAGQAMLERVAEPLLRVRAALGAEYRALHRHLLAAVRQDQVCGRLMTVPGVGAVVAMTFRSAIDQPGRFAKSKAVGAHFGLTPKKYQSGEIDRIGRISKVGDAMARTALFEAANVMLTRTGRFSTLKAWALRVAGRHGAKKAKVALARKLAVVMHRMWVDGTTFRWGEASVSAA

SEQ ID NO: 241745 - protein, 355 aa, unidentified
MSDVKFIGLDVHKTSISAAVLNESGQQVMKAVFMTNAAAVLAFVRGVSGTLRVTFEEGTHAAWLHSLLQSQVGEVLVCNPRKNALLKSGNKSDQIDARKLADLLRSNLLTPVFHDDSRTLTLKELGRTYRAVTDDTTRVMRRLKALYRSQAIDCNGKKLYTRGRREQWLNQLLQAGQRYRAQRMFEQFDSLQTMRRQIRSDLIQEGHKHAATAILSSIPFVGPIRSALLIARVQTPFRFRSKRQFWAYCGLALETRSSADHQMIDGELRRKSKPVFIRGLNLNHNPDLKNIFKSAATTASACPGPFRDFYENLLGKGMKPEMARLTLARKIAAISLSVWKKGERFDPEQLKTQAA

SEQ ID NO: 241746 - protein, 366 aa, unidentified
MKKISTVAIEGIQIFKDNQLTIGLDLGDRTSHYCILNEVGEVILEQALPTTAKGIEQVFSKIPRSRIALETGTHSPWVSRQLTELGHEVIVAHARNVRLISESSRKDDRLDARALARLARIDPALLGPVRHRSAKAQIHLTVIRARAALVSARTALVNAARGLTKSYGARLRKCGTEQMNREIAKELKPELREALNPLLAEVESLNERIAQYDTRIEQIAKEVYPEVARLKQVKGVGPLIALTYVLTLDDPHRFRRSRDVGCFVGLRPGRRNSGMSEPQLHISKEGDRYLRTLLVQGAHYILGPFGQDSDLRRWGLKLSERGGRNAKKRAVVAVARKLAVLLHKLWVSKEVYEPLRNNRKQMAQVA

SEQ ID NO: 241747 - protein, 346 aa, unidentified
MKINRVGIDLAKNVFQLHGADHRGKAVWKRRLSRGKWLAVLCDTVEPGTEIGMEACAGAHHWARQLMQRGYPVKIIPPQFVKPFIKSNKNDANDAAAICEAMGRPDMYPVKVKTVEQQDLQAMHRIRDEIKSHRIAKANQIRGLVTEYGLVAPQQLPALRKAIPEWLEDADNGLTFLFRQLLQGLWGDLYALDQRMTELDKQITEIAQEDPVARRLLQLRGVGPLIATALVATIGDGRQYRKGRDMAAALGLTPRQHSSGGKDRLLGISKRGDAYLRCLLVHGARSAVRTAKDKEDRLSRWIIDLQSRRHANVVAVAMANKMARMAWVMMTRGVDYDPDLAAASVS

SEQ ID NO: 241748 - protein, 337 aa, unidentified
MNYSGIDLHSNNSVVTVTDERDRVVAEKRLPNELSKIVAFLLPWRDELAGVVVESTYNWYWLVDGLQEAGFEVKLANTGAIKKYDGLKHSGDEADARQLAHLLRLGILPTGTILPPEHRATRDLARKRMQLVRSRTSHILAIENILARERAVKITSNQIKRLTAVDVDQMGLSADVALAVQSNLAVVTTLGAQIELLEKRLQEKLGERPEYALLTSVPGIGRILAAIILLETGPIERFDAVGNYASYARCVDSQRLSNGKKKGEGNAKNGNKYLVWAFVEAANFALRFNAEAKRFYERKKARTNNVVATKALAHKLARACFHILKERAPFDTRRCFA

SEQ ID NO: 241749 - protein, 343 aa, unidentified
MQIHSVGIDLGKTTFHLVALGEAGKVLVRKKFSQRQLLAYTANLQTCLIGLESCSGAHFLGRALRKQGHDVRLIAAQFVKPFVKSNKNDFVDAEAIGEAVERNNMRFVPIKTDDQLDLQAIHRVRDRLISRRTAVINQLRAFLLERGMTFAKTPAKLRSAMADILENAEGELTPRMRNLIDMLWQEWKTVERQIEELSDELERICAADAGCMRIRQIPGIGPIVATAIVAAIGNGAAFRKGRDFAAWLGVVPRQYSTGGKAKLLGISKRGNIYLRKILIHGARAAVLRIKRDRAPIGAWLNGLDSRAPKNVVVVAMANKLARVAWAVLSSGEEYRPTAQVAVA

SEQ ID NO: 241750 - protein, 332 aa, unidentified
MNCLSSSEKMKRGAVLGLDVAKASVQAELRLPWSNGKVRFAFANEPSGFTKLEQVLAQHHCAKVHAGLEATGPYSQQLALWLYEQDHRVSLLNPRRVKDYARSAGARNKSDVIDAGLIADFVIAHRARCKEWQPPKAEVAQLQGLVRRREEVCVMLLAEKNRLKASSGQVRCSLQRLITALNEEKTCLDKLIAHQIRSHPELARNEQLLCTIKGIGSLTAAILLAEMVGPDQVRRARQAAAHAGLSPRREQSGTTVRRNKGIGKQGNRHLRKALYMPALVAIKYNEPLQHFARRLSAAGKPKMAVVCAVMRKLIHIAFGVLKHQQPFNPSLV

SEQ ID NO: 241751 - protein, 351 aa, unidentified
MRTSQKITGIVTTIGIDIGKNTFHLVGFDQRGAIILQQKVSRGQLERRVANIPRCLIGMEACSGSHHIGRQLAEIGHDVRLIPAQYVKPFLKGHKNDYRDAEAIAEAVQRPTMHFVTIKTPEQMDLLALHRVRSRLVGRRTGVINQIRGFLIERGITVRQGPMPLRKALSEILSSDTGALSPRMVGLIAELAQDWRRLDERIAAVSAEIEALAEQDDSCQRLMTVPGVGPIISSAVVAAIGNGTGFKQGRDFGAWLGLVPKQESTGDRTILGKISKRGNKYLRTLFVQAAHVVLERRPSAAMRGLWPWVEQASKRLHRNMLAIALANKLARIAWAVLARGGTYQPRITHAA

SEQ ID NO: 241752 - protein, 383 aa, unidentified
MTNQVSRFIPRDYDVFAGLDVDKKSMAVIFTNHDGPMRALRMAHSAKPLLNYVRKHFPGQRVAFAYEAGPTGFGLHDELVTEDYTCLVVAPSKVPRASDERVKTNRLDGRKLSESLRGGQLHSIHVPTRAYRDLRHLVQLRDAHVRQLSASKLRIKSLLLYEAIPFPDPQEKWTARAMRELQTLPCSETVRFKLDDLLNTLHFHFQAAAAATKQIRRYCLHDAELQQSIDLLLSLPGIGWIVGSHLVARLGDPQQIKNGKQIAGFLGIVSSEHSTGEKQNRGEITRTGDSRLRNKLIQSAWTAIKKDPELRAFYRRIYQRHPKKVAARKAIVAVARKLTNRIYVVLKEQRPYVVRPDSSIAPLTAEETVGPRDRLDGAQNDQS

SEQ ID NO: 241753 - protein, 386 aa, unidentified
MPQLSDLSRSLVILEQDATLIAVIEMGQSSWLVAGIVPGVERSPLKKLAVDESALLKLLDRWREEAEKVGHRIERIAIAFEAGRDGFWLARWLRARDIEAHVIHASSVAVSREHRRAKTDRLDTELLKRAFLGWLRGERDHCKMVAIPTLAQEDAKRPNRERESLVGEQSRIVNRMKAALARLGIRGFNPKLKKAVERLDGLRTPEGEPIPPNTLAELKHDMERRRLVRSQIRDIEGTRLERLAQAPGDGPHVMVRLLARVIGVGVETADMLVQEVLSRNLRDRRAVARYGGLTGSPDESGKKRREKGLARSGNARVRRGMIQLAWRFLMFQKDSALARWFYVRTKSAPQTRKTMIVALARKLLIALWRLVREGVIPEGIVLRPAL

SEQ ID NO: 241754 - protein, 428 aa, unidentified
MEAVVERACGLDVHQATVVACLLVGEAGKKPRREVRTYRTLTRELMEMCRWLEEQQCTHIAMESTGVFWKPVYAVLERAPTPFELIVGNAHHIKNVPGRKTDVKDSEWIATLVRHGLIRPSFVPPKDLRRLRDLMRYRRKLVEGRTAERNRVLKLLESANIKLASVASDVFGTSGRAMLDAILANSKTPREMAELARGRLRSKLLDLELALEGSVDEHHRLLLRLQLERVDELDVDVDRLDAVIRKHLAPYKQQITLLQGIPGVDWVTSATLIAEIGADMNVFANDRALAAWAGLAPGNYESAGKQTRGRTRRGNVHLRTALIQAAICAARTKGTYLKDKFHRLKARRGSMRAAVAIGHKILLAAYHILSTGDSYKDLGEGYLDAIDRHRTARHLVHRLHALGFDVTVQATSTTSLPPDLDDAVLAPG

SEQ ID NO: 241755 - protein, 333 aa, unidentified
MNKITLIGIDTAKAVFHLVGVDSHGHYTWRKQLRRSRLLSTLAQIERCEVVLEACGASHHWARSIQALGHTVRLIAPQHVKPYRRGQKNDYRDAEAIISAALAPGMHFVGVKRVDQQAEQALHRVRSRLMSHRNAAANALRGLLGEYGVVFGHGFKPLREGARRFAETAEAEALGLVELVSDVLEEISDLQRRMDHYERLIEQRVQADEISRRLREELNGVGKLGASALRVKVADVRDFGGGRQFAAYLGLAPGHSGTGGKVHIGHIKRGHDRYLRQLLIHGARSALCHLGDKQDAQSRWLRGLLERRGFNIASVALAHKNARQAWAIMAREQ

SEQ ID NO: 241756 - protein, 376 aa, unidentified
MTRETRLENGPRRHRLCQNEVVADLRQWRPPVEQISRIGMDTSKHFFQLHGVNAAEKVVLRKKLRRKEMVAFFKALAPTVIGIEACGAAHYLARLLGSFGHEVKLIAPQLVKPYVKRGKNDGADAEALCEAMSRPSMRFVPVKTAEQQAALMMVGLRDRLIRNCTQLSNAIRGYAAEFGFSAAKGKAHLVPLLERIQADESVPVLARELFAAQAEEYARLQAQIDAVDAKLLAWHKADESSRRLVKIPGVGPIGAVLLMLKTPAPELFRSGRQFAAWIGLTPKDHSTAGKVRLGGITRAGDEALRSVLVVGATSVIQHVRRGGRGSPWIVNLLKRKPPKLAAVALANKMARVAWKLMVTGERYAAKSVPAALANAT

SEQ ID NO: 241757 - protein, 339 aa, unidentified
MEQITTVGVDLAKSIFQVHCNDSNGRMVLNKKVRRRDLLMFMSTIRPCLVGMESCCGSHYWARKFTECGHTVKLIPAQYVKPYVKTNKNDAADAEAIAEAVTKPNMRFVPIKEPYQQNIQMLHRIRSRLVGNRTALCNSARGFLMERGIIMSKGIQKLRKDLPNIISDAENELTDMAREEMHNLYSELCSIDVLVTEYDRKIQLIYDNDEACKRIGKINGVGIITATYVRAVMGDPRTFKNGRQFAAWLGLVPRQHSSGGRNNLLGLSKRGDIYLRMLLIHGARTVVMYSEGKKDRLNRWAQDKIATRGFNKACVAVANKNARIIWAMLAHGEEYKMAA

SEQ ID NO: 241758 - protein, 417 aa, unidentified
MAEEIAWFVGIDWASQSHQVCLVDARGECLGERAVAHGGAGIEELCDWLIARTGATPEVIGVAIEMTHGPVVEALLERGFCVYGINPKQLDRFRDRFTVAGAKDDRRDAHVLADSLRTDRHAFRRLSNDEPVIVLLREWSRMADELQQERARLASRMREQLWRYYPQMLELADDFAADWFLDLWNQAPTPAKAVRLRQTTIERFVKAHRLRRWPAPEVLRILKQKPLSVAPGVVEAASDHIRTLTIRIRLVNQQLKAAHRKLDELCAQLIPSEENEPGQQCEQRDVVILRSMPGLGRIILAVLLAEVWQPLRRRDYHALRSLSGVAPVTRRSGKTCVVVRRYACNKRLANALYHWARLATQHDALSRRRYAALRQRGHSHGRALRTVADRLLAVACTLLEQQTLFDPSYEVRDAAGA

SEQ ID NO: 241759 - protein, 313 aa, unidentified
MPQFSPKAGVDCSSDRLDVHIHPLDTAFSVANDAEGWKDLDRRLAAAQVEVVAIEASGGCELQACRFLIERGYSVRLLNPYRVRLFAKAIGRLAKTDPIDAAVIAHFVAVVPTRPMVRHTAVEALAELVGARAQLLDQHTALSNQARWHHDATLRRISRRRETALKADINTLDRLIAARVEANPDLAAKNAILRSMKGVGPVLAHTLLALLPELGLLSRCQIAALVGVAPFDDNSGKRQGVRFIQGGRPSVRAPLFMAAMVAAKHNPVLKACCDRLRSAGKKPKVAIVAVMRRMLTILNAMLRDNAPWQNHAA

SEQ ID NO: 241760 - protein, 400 aa, unidentified
MGRTSASCIGRRVVRKTITHVGLDVHKDTIVLSLADAGLRGNLGEVREFGKIANTPAALEKLARKLAVKGSELRFCYEAGPCGYGIQRQLSGMGYQCDVVAPSLIPRKPGERIKTDRRDATKLAKLHRAGELTAVWVPDQTHEAIRDLVRARLAATRQLRRARQQLSNFLLRNGHAYHRTPWTASHRHWLAGLKFDQPMHYLVLEDAIAAVEAAQERRQRLEGQIEAALPVWSLAPVVGALQALRGIALVGAATLAAELGDVTRFDNPRQLMAYLGLVPSEHSSGRTRRQGGITKAGNSTARRMLIEAAWSYRFPARISRWQLLQQEALAKPIRDIAWKAQDRLCRRYRTLARSGKLTTVICTAIARELAGFVWAIAREVGRSASGKSASNLAVRRVAVP

SEQ ID NO: 241761 - protein, 371 aa, unidentified
MNHVTSIGLDVHARSITAVALDSTTGEVRSQRFGYSPAELASWILGFESPKAVYESGVTGFHLVRTLRALGVDCVVGAVSKMHKPAGDKRRKNDRNDAEFLARQLLAHNVVEVFVPDEETEAARGLSRALEDIREDLTRAKHRLTHLLIRWGHVWDERTPEGKRRGTWTKAHWQWIRRVELPEPAANETLDFYISEVRHMEAQKRAIEKRIAQHASRPRWAGRVEALRCMKGIETMTAFAITVEAGVFSRFDTARSFAAWLGLVPSEHSSGERVARGGITKAGNSHLRKLLVEASWHYTRATEERKRALNDPGVPFAISSHAAAGIKRLVKRRRHFTRDLRKRPVVANVATARELACWVWALGRMSEGTLA

SEQ ID NO: 241762 - protein, 384 aa, unidentified
MNTAATRTGKYGVEGPVLYLAFELGNMEWKLGFSVGFGQRPRVRTIPARDVEGLQREIDLAKTRFGLPATARVMSCYEAGRDGFWLHRYLVEAGVENLVVDSSSIEVNRRFRRAKTDRMDVAKLVDQLMRFERGEKKVWHVVRVPGAEAEDRRHLHRELEDLKAERTQHINRMKGLLAGQGVRLEEIGSGFPDQLNAIRLWDGRPIPEGLKARLEKEYERLQFIQGQIRELEAQRVEAIRRSADPEVEMVRQLLRLKGIGLNSAWVDTMEFFAWRDFHNGKEVGGLAGLTPTPYQSGDSSRERGMSKAGNRHVRALAIEIAWGWLRYQPESELSQWYQRRFGDGSSRVRRIGIVALARKLLVALWRYLETGLIPQGAVLKARLI

SEQ ID NO: 241763 - protein, 415 aa, unidentified
MALKIVYKICCGIDVHKTFVVACIASTNDKGITSYESHRFSTYTSGLKTLLQWLLDRDCKDVCMESTGKYWIPVYNILESDCSIILAHPKYVKAIRGKKTDKKDAKWIADLFKHDLVAGSFMPPADIRQLRDLMRYRFKLTCFKSSEKNRLQNCLTVSNIQLGNVVSDTFGKSAQAILDKLLENPADTSFDLEPLVYKSLKKKLPELRDAIDGYITPEQAGKLKVIKAHYENLESRKAELEELILALAAPYQQELTILQTAPGISSPFTAIGIISEIGTNMEAFPSAKHLCSWAGLTPTNNESAGKKKSVQVSKAGCYIKPLLVQCANSVVKSEKHPEIRNRYLRLRKRRGHKKAIIAIARMLLTALYNMLKNKEPYNAELYRKSEILPVNREITIEQAILMAQFQGYKIKSAAE

SEQ ID NO: 241764 - protein, 360 aa, unidentified
MTDSIALVDLTAKVVVGVDTHKHVHVAVAINMVGARVGSKSVDADRGGYAELVDWARSLGAVEAFGIEGTGSYGVGLASFVRRQAVRVVEVNHCDRRKRRNNGKSDTIDAETAARSVLSGIATAVPKTADGAAEMVRQIKIARDTAVKARSSAIITLKTLIVNAPGELREVLEPLTDRKLIDRCATLIAGELIDPTASVKHSLRALATRWLALSDEIGSHDAALDGITMTAVPTLREAFGIGPDSAAEMMIVAGDNPQRIRSEAAFAKLCGVCPIPASSGVTNRHRLFRGGHRQANAALYRIVIVRMRWHQPTIDYVERRTAQGLSKKDIIRCLKRFVAREIYTGLIADHKARTPRDLAA

SEQ ID NO: 241765 - protein, 438 aa, unidentified
MPMTFARLLDPSFEDDNHPFRHYDARGEPLEDRLYLPCGIDPHKKVCHVAFVHPLPHRQEILSQRSIPNRDLQSALWLVQEGERLANQFDATPIYVFETSGPYWQPYRLFLHQLGLPTATVSGRQTKRARGTGTRKTHNDLQAAYLIAKVFKQGESHASRIPPEPIASLREYTRLHLFFVEYSVAIQNRMFDIRYRTHPGFDDLLSKPTIPTALALAKEELVHPARLLQADDDQLVQVIRRASRGKLGDQLATALHHSALTAFYTPYAADAFSFNLRMLADAYDHIHLHILPPLRTRIEDSLNQLPFEQHLPEIPYYGPVVTGTFLGELGLPSWFKTVDSVVAWFGFDPSLSESADHPTGTSHLTKRGTKCGRRIKWLVARNWSRFVPQGRRMFQKEFYVNQLSYDGAICVIAAKLVRIAFAMVRDGTHFNMAKAFPG

SEQ ID NO: 241766 - protein, 420 aa, unidentified
MTSQNSIPADAVLVAIDIAKVRNEVLIEAPGHKRRRRLSVLNTRAEHDHLIAILQSYDRPVVCAFEATGNYHRPIAWRLVEAGFETRLVSSLALARTREALHNSWDKNDPKDAQVILHMLRIHSTQVYHDPLRAGINDVQELSKTHEAIANAKTEIQHRILTHYLPLYFPEIERFRGNSRSDWFFAFLDAFPTPSSITTLTKEKFVEAAWDVVGRKVSKSQILMDIYETTRTSIGLPLPLDAPAIRMFRMVVAEARSLIRQRNEIEAQADDLLRNSRDYQILRQIPGIGPINALTIIAEAGDLRRFHHHRQFLKFWGLDLSTQQSGQYRGQTRLSKFGNARLRRTLWIAGQVAIRQRENGFRHKFERYIARDRDNPDLRRKAMTAITAKMARVVHAVVKSGSDYRPFVEGRVPGGRTSVS

SEQ ID NO: 241767 - protein, 462 aa, unidentified
MCTLWLTFVKPQRTKGCIASSRICFSFLYLIYVVIIFETTETLCFNQRKVPADKVSKFELQTNFSITLKTGTMETQSNIVNFDGQNIYVGIDVHKKNWSICLRNDEFELKKFSQAPQPDLLVQHLKRNYPGAKYKCVYEAGFCGFWIEQQLKAQGVDCIVVNAADVPTSDKEKKHKSDKVDCRKLSRELSSGNLKGIYVPDQAQLDDRKLVRTRDRFVVDQTRLKNRIKSLLDFYGIKIPEAFAQSSAWSKKFINWLEKLDFENGTAKMSLMLLLEEYNMIRKLVVGATKAIKILAATPAYQQRTELLRSIPGIGLTNSMVILTELGDIKRFKDMDHLCSYAGFVPNVYASGDTERTGQMTRRGNHHLCDAIIESSWMIIRMDPVMLSCYTRYCKRMDSNKAIIKIARKLLSRIRYVLVTNKRYELSTTETKKSAEFFKASAARIDTKKPKQQASASAIPAG

SEQ ID NO: 241768 - protein, 351 aa, unidentified
MLIVGCDYHPSFQQIAWVETNSGEVGEGPLMHSTGEAERFYRKLKEQGVEVRVGIEATGHARWFERLLAELGFELWVGDAAEIKAKRVRKQKNDREDARLLRTLLIENRFPRVWLPDVSNRDLRQLLWHRHRLVQMRTRVMNQLQALALNEGVRRKRGLWSQAGRAQLESFQLLPWATRRRKDLLELLDGLTPRIAALTAEVEKQAEQHPEAQRLMTHPGVGPLTALAYVLIIGSPERFRCGKQIGSYLGLIPSEESSARRQRLGHISKQGNALLRFLLIEAAQAASRSNPAWLREFLHLTMRRGRQIATVALARKLAVRMYWMWRNGWDYEKSLQFGSHVGQPGTGYGVK

SEQ ID NO: 241769 - protein, 352 aa, unidentified
MSIIAFDSHKRYTFVRVENNNGEHPEESRIEHQRGNIAGFLSRQQPGSPVAVETIGNWYWIIDEIEQAGMVPKLVHARKAKMMFGCINKTDKLDAKGLNILQRAGTLPTVWIPPAEVRDKRELPRTRMVFAGERTKLKNRIHSVLDKYGLQDVFEDISDIFGNKGRQVIGGVLGQLPSHTRYTTELLMEQLDQTEQKIRAIEARMTKLFKESEQHTLLKTMPGIGFILAVVILQEVGDIRRFGSAERLASYSGVTPRVHASGGKVRYGRLRPDTNHYLKWAFSEAGNSVAVNRKRFPARHVSQLYNRIRGRKGHAKAVGAVARHLAEATYWILTKNEVYQDRGLSEVSPTGA

SEQ ID NO: 241770 - protein, 349 aa, unidentified
MKVIKKARKNKLNTFTEVEGYDHYLGLDYSQDGYSLGRVTAKMRSPKYISGSSKGEEIQEQLTKLRGRKILTIEETTSTHWLYVELKDYVDKIVVCDPYRNSLLSEGAKNDDIDAGKLSLLLRGGFLKEVYHSMEESYEIRKLISAYEDLIKSGVRIKNQQSSLYRSLGLSYKKREELPDSSIVKFIERQQNRAIKTYNEEKERYLKYFEKLQREIPVIDNMCKISGIETISSVKIYGTVIDGKRFANKNKYWGYCGLVNHQKMSGNRNYGKRKTRYSRVLKSVYKTAALAAIRGNNDIREYYEYLLSKGLPAHKARNAVSRYIAKVTYAMMKNNTEYIQYTWSKTEAA

SEQ ID NO: 241771 - protein, 537 aa, unidentified
MRVVQEVRKPGYNPGGLSTAAKTVTRLVRMSPSLSVVPVSCDVSSGGVVTSGCADPVEQRTDVTSDRAWAVPICFLEDCLMAKRRTQVKSEPALPVLQPAAAGLDIGSAEIWVCVPTERDATPVRRFATYTPDLHQLADWLVACRIASVAMEATGVYWLPVFEILEARGLQVYLVNPHQLKHVPGRKSDIQDCQWIQRLHSYGLLNNSFQPEAEMRALRSYLRQRSTLLEHRAAHIQHMQKALLQMNLQLTQAVDDITGQTGLLIIRAIVAGERDPQQLATHRQRNCAKSAADIAKALTGNYRAEHVFALKQALALYDTYTLQVQECDREIERQLQALTPQTADALPPSSQRDKQHSHSKNAPSYDARGLLYKATGVDLCAIPGLGATTVQQILFEIGGSVAAFPTVKQFCSWLTLAPRHEISGGKILRKHVGKTGNRAGQAFRMAAQTLARSQDSALGNYYRRMRARHGPEHAIVATAHKLARIFYHMLKHRVPFDACSAEAEEQRIRERKLKYLEREAAKYGMTITASTPVPSPA

SEQ ID NO: 241772 - protein, 343 aa, unidentified
MPIVGGMDIHRKQITFDYLDTATGEVMCGQIAPADRAHLRAWLQRFAGIPDVAFAFEACTGWRYVAEELAAAGVAAHLAEPADTAAARGRKKRAKTDRADARLQRTLLADGRLPECWIPPAQVLECRALLETYHALRREHTAWVQRAHAVLFHQGAPVFHALGEADGPQQLAGLARARLSPAGQQQIGLYLRMLEVTEAELGALRGQLTATARRLAGAKALQDKLYGVGPVTGLALTCWLGGKDRFSSARKAVRFTGLDITVYSSDGKRSPGHLSRQGPPVLRWCAYEAGKAHARGSAPDHRYYEQVKDRKDGKRAALSEARKIIRQACHLLAGLGDDAFTTV

SEQ ID NO: 241773 - protein, 341 aa, unidentified
MRYIGLDVHKDNITACVLTSTGKPKFEKDYLKESGNWILDELLDFGDKEGFCVMMESGTYAYAPFRFFSDRGIEVHVVHAKALKVITDSDKKTDRKDALTIAKMLRLWKKGDIDLQMAYMPTREQCELKDICRYREEISKKIGDETRRIKSHMSRNCEYLPEEFDNFQTEKAREFVKKTYPEDRTLMRRMDCLIDLLRERDLIKEDVGSRLPGSRDVELLCGIPGIGRQTAVQIMSMIVDVNRFADAEKLCAYFGMVPRVRDSGGKEHHGRMTKNGDRMMRMIMERVTESHVRNCNSSLTQYYKRKREEMGTKKALITASRKMLSVIYAVLKSGRDFRPAA

SEQ ID NO: 241774 - protein, 354 aa, unidentified
MIIIGADYHPGFQQIAVMDTETGELNELRLEHREEAEQFYHALAAQGLKVRVGMEASGHARWFERLLAELHFELWIGDAAEIRTKRVRKQKTDRQDAQLLLRLLLEDRFPRVWVASYENRDLRQLLWHRHRMVQTRTRIMNQLQAVALNEGLRRKKALWREAGRKQLESFRLAPWASRRRRDLLELLDRLNPTIAELTQAVEQEVEKCPEAKRLMTHPGVGALTALALVLIIGTPERFGSGKSIASYLGLVPSEESSGDRRRLGHITKQGNSLLRFLLVEAAQVTVRSDPEWRGKFFHLAMRRGRKIAKVAMARRLAVRLYWMWRKGWDYEQLKKIGSHTGQPGHRQGVQLNTE

SEQ ID NO: 241775 - protein, 419 aa, unidentified
MNKLYVGLDLSLKDFKVSIIDQDGTVVSKPFAATNDLYGAQALIDTIEDCCKRLSASTVFIGYESTSVYGWHIQHILADSPLLKPYHPNIICFNPKIIERFKESLGNLPKNDYVDANTIAERLRFGRLPKSCPVDFRYLALQRLTRHRFHIVNNLVREKSYFLSNLFLKFSGLCQDKVFSNNFGAVATNLFQEYLTVEDIATRSLDDLIDFIMEHGKKHFDNPKATASALKEAARKSYRLNPSVDNSLNFVLRSCLENMKALEKQKKAVEKAIENELPFFNNEYLCLTSVKGIGPVIAAGLISEIGGISRFDNDNALAKFSGLYWSEYQSADFVADDTYIKKTGNVYLRYYFVQAAEQLRKYLPEYTAFYSRKFKESKTHHHKRALVLTARKAVRLIFALLHEEKLYNPSVRKGEVDII

SEQ ID NO: 241776 - protein, 429 aa, unidentified
MQHKEDSETRYCLGIDVSMDKLSVCLMTTKGTNRIIKGTTNFTNDASGHQKLLQWTKKHVEIKNNKENSCLFLMESTGSYHEDIAWFLHLKGENVSIILANKTKHHAKSLNTKTKNDKSDSKVIADYGLVHTCPLWRPISAKIYQLRLCTRQLQDLNKMKNQIGNKIHAFQHGGYNNDSAISNYEKILTEIKASIHNLEKELLTIIENDVILKAKYDKINKIHGVNIKVFSVIIAETNGFAGFNSIKQLISYAGYDVREHQSGKFIGQRRISKRGNSRIRRILYMPAFVAVGGENNALKDLKDRIFERTKMKMKGYVAVQKKLLCLIFTLWKKDVEYDVNYQHPQSIKKEAKEVQQKISTGVGIMAGLRTNPVPMQQITSQVRTAQQRGLGVVFFYYESLWNNSQESFKKRLAGFKNLFPYPAVRLASE

SEQ ID NO: 241777 - protein, 338 aa, unidentified
MVYGAIDLHMRYSQIRIIDAEGAVMRDQRVVTSRDRLVKAFEGYGALRILLETGTESEWVAQALEAAGHAVIVADPNYAPMYGERHRRVKTDRRDVAALAEANRRGWYRAAHRTSPAQQETKQILRSRRLLVQMRSSAVSLVRALLRQSGYRLARGSSEAVATRLGELALPAELAATLAPLRRQLETLTTEIHAVDARLRARVARDTVITRLQTVPGVGLIVATTFRVFVDRCERFTDAGQVSAAIGVVPREDSSADRRHRGHITKAGPRELRSLLVQAAWVCWRHPGSATLRVWADRLAARRGKRIAVVALARRLTRILFAVWRDRSTFDAGRLVTA

SEQ ID NO: 241778 - protein, 564 aa, unidentified
MAQRIGIGIDTARYGHRVAFLDENKNPAAPSLTVMESRHGYEQLQGRLKQLHAKHPDASLHVHIDAAGKYATNLETFLHQVDLPLNVSVGQPKKNKDYQQVHFPKRKSDDTESQAMARFAVVECPNETSAVSPEFLMLREVVSRLHSQTRQTTRLVNQLHNLLSRTFPELATIIKNIASVGILKLLAKYPTPHRIAAARTNSLEKIPYVTNETAKSVQQAAGQTIASLRGDLAETLVKELVQQVSEAQKAEKRMEKLVEQAFDDLPDETVKIILTIPGIGKRTAAILAAKIISIDRFSSPEKLVSYFGFFPEESSSGVDRLGRPLAPGSSRMSAKGNDLARGYLWMATKSAIVHNPAVRPLYARLRANGKRGDVSLGHCARKLLHLVFAIWKTNRPFDPNHYPWAGLEVPSTEEPQPRKETAAGHKQEQAQANKEVTAATKKIESNRDCVNCSAPNQSVDYAFLREQISIERVLSHLGHWEHFRSNGKEMRGSCPFHSELGSKSRSFSVNPEKNVYHCFRNDCNRSGNVLDFWASYHKLTLHQAALHLAETFNLPIKRTEMRSP

SEQ ID NO: 241779 - protein, 341 aa, unidentified
MEQYVGLDVSLDETSICVLDQSGAVAFEGSVASNPQAIAKLLRRRAPRAIRIAFETGSLSNWLWHELKTLEFPVLCLDARHAKAALSMRMNKSDRNDARGLAEMARMGWYREAKVKSIESRHVRATLAARAKLVDLRRDLENQMRGLLKSLGIILGKAGSKALPRKILEALRDAPHLRPLIEPLMLAHSALISQVIKYDDQLKAMARSNQTVRRMMTVPGVGPVTALAFASTVDDPQRFRRASDVGAYLGLTPRRYQSGELDRTGRISKRGDRLTRYYLFEAANVLLRVVRRGSPLKSWGLKLIKRIGPKKAKVAVARKLATILHCLWTDGTQFDWGKAAA

SEQ ID NO: 241780 - protein, 316 aa, unidentified
MKTYIGIDISKDTFDAATSSQKQSVTFKNSPAGFKKLIKWLSVFESPHIAMEATGKYYLALALHLYEQGHPVYVINPYKIKHHAQSQLKRVKTDSEDAKLIAEFCELHTLKPWQPDSPIIAKLQEFSALQDLLIRTKTCFKNQMQSTLEPEVQKSQKMQIKQLEEQIEQVQLQMKACVEQDIDLNKQVELLTTIKGLGEKTAIELITHIKDIYRFDNAKSLASYSGLVPQIQQSGSSLNRSSLSKMGNVNLRKCLYMPAINSMAYNPVLKAFADNLRNRGVAGKKIVAAVMRKLIHLVYAILKSGKPFDPEYKIRA

SEQ ID NO: 241781 - protein, 405 aa, unidentified
MRVIGLDVHRSRAVVAVLEKERLTSGGGIDLTRDTVIAFGRKLRPDDEVVIEATVNTAAIVHLLRPFVRRVVIANPLQVRAIAHAKIKTDKIDAAVLAKLHASGFLPEVWMPDETTETLRRLVAQRAQVIQQMTRAKNRIHSILHANLIPPYQGELFSVAGRSWLKTQSLALDEALAHLADLDCRASDLSVLDQALAQQALQDERVERLMTISGIHVTVALGLLAAIGDISRFASSEKLVSYLGLNPSVRQSGDGPAHHGHISKHGRAHARAMLVEAAWAAARAPGPLRAFFIRIQSRRGKQVAAVATARKIAVLAWHLLTKNQNYVSARPALLENKLRKVELLAGQPAAKGRRPGRAHAYNDRAIRQRERSWLEQAEGAYTRFVVNWQTKPGQRTGAANRKRPS

SEQ ID NO: 241782 - protein, 402 aa, unidentified
MNAVGIDVSKGKSMVAIMRPFGEIVSTPFEIKHTSSDINSLVKLIKSIEGESRIVMEHTGRYYEVLAHQLSEANLFVSAINPKLIKDFDNDSLRKVKTDKADSVKIARYALDKWQNLKQYSVMDELRNQLKTMNRQFGFYMKHKTAMKNNLIGIIDQTYPDVNTYFDSPARSDGSQKWVDFASTYWHVDCVRKMSINAFIDHYENWCKRKKYNFSKSKAEEIYGKAKELVPVLPKDDITKLIIKQAVDQLNSASITVESLRTLMNETASKLPEYPVVMAMKGVGTSLGPQLMAEIGDVSRFTHKGAITAFAGVDPGVNESGSYEQKSVPTSKRGSSDLRKTLFQVMDVLIKTHPQDDPVYQFLDKKRAQKKPYYVYMTAGANKFLRIYYGRVKEYLASLPES

SEQ ID NO: 241783 - protein, 386 aa, unidentified
MIYIGFDISKYKHDCFIATETTNQSFSFENNQTGFKELLIRLKPYPKQEMIIGLEATGHYGENLKSFLTSHGYKFMEINPFLVKKFGEAHSLRKTKTDKKDAEMISTYMMTVDYKAYHHQSYHISALKSLTRLRFKLISMRTKHYNMITKVLDIIFPEFNSLIKEQGYSETSLHILKQFSSPERISKMNDDHYDKIRKMSMGKFSYPKFVKLKSLATNTIGVTQDHQLLKLKLSISHVEKLTQDIELTEEKIHLLMAQYPTKIQTIKGIGIISAAVIISEYGDISLFSNPAEMLSYAGLDSTIKQSGTMSSTGKLVKRGSKYLRATLINICMSIMIHNPVFYDYYLKKKQEGKHHRVALVHLTKKLVRVIHHLETNQLDYDLNKLQ

SEQ ID NO: 241784 - protein, 413 aa, unidentified
MNPHQQLARFAGFDWAKDHHDVVVIDAQGKIIDEFRFEHSIEGWNFWKQKVAEHPGLGVAVETSFGAAVEQLLASGVTVYPVNPMNAKRYRERKCSSGNKMDRHDAWALADAQRVDGHAWRALAVQDPLVAELRILCRDEVALIGERTALVNQLQQALHEYYPTALEAFDDWTAGGAWAFVEAFPTAGDLVKAGKRKWDKFLHSHKLYRSQTYQDRIAAFGRAGQWQASSPTVAAKSLYAVARCKQLRVLQSQLEAYRQRIEALFARHPDSGMFGSLPGAGPKIAPRLLGEIGSDRALYQDPQGLQCMAGTAPVSFQSGQVHKVRIRRSCNKHLRHAMHLFADQSRTKCVWAATYYAARRQRGNTHAQALRCLGQRWLKIIWKMWQTRAPYDPELHSRNQTAHGSWVLSFQPQ

SEQ ID NO: 241785 - protein, 413 aa, unidentified
MKPWNELTHFAALDWADDHHDLVVVDAGGQVVVELTFKHTAEGWQQAQQALAKWPDVPVAVETSAGPAVDQLLQRGFSVFPVMPKAAARYRERKRPSGAKDDLHDAWSLADALRTDGQAWCVLSPLDPLTSELRALCRDEITLIEQRTALVNQILAALKEYYPAALEAFDDWTAPYTWAFVLAFPTPTALKGAGKRKWEKFLHTHKLWRPQTATDRLEIFARADQFKGTAGITAAKSMLAQSLARLLQTLEQQLAAYRARIQVLFDQHPDHELFGSLPGAGSKLAPRLLVELAGVNWMQLSQVQARAGTAPITYESGQTKRVKIRRACVLPLRATLHLWADLSRHYSAWAAAFYQAHRDKGQSHACALRCLAHRWLKIIGAMVQTRTIYNADKHLVQIQKHGSYVFKLLSPQL

SEQ ID NO: 241786 - protein, 354 aa, unidentified
MENQRSLTFADTAIYVGIDVHKKSWTVSIYLEEFEYKTFTQPPEPGILKRYLNRHFPQGNYYAAYEAGFSGFWIYDGLNATGIKCIVVHSADIPTTDLERRRKNDPRDARKIARSLRAGELKPIYVPPKWAREDRGLIRLRESIVKDGTRIKNRIKALLHFHGIKSEHIQDRRWSGVFIRWLESLKLSNDQGTETLKSNIRQLSDNRTELTRITKEIRRLSTTERYKKPVSLLISIPGIGLLSSMTWLTELVDIDRFKSIDYLSSYVGLVPSTHSSGETDQVGCLEKRGNKKLRTLLVENSWVVIRKDPGMFRAYTTYCNRMHGNKAIIRIARKLLKRIRFVLIHETQYEVGLT

SEQ ID NO: 241787 - protein, 264 aa, unidentified
MIVLLNEQDEVIYQKRLPNDLPTILEQLAPYHTEMKGLVVESTYNWYWLVDGLMEADYRVHLANPAAIQQYNGLKYTDDRSDARWLAHLLRLGVVPEGYIYPKAERAVRDLLRKRAHLVRQHTANVLSVQNIMARNTGARFSVKRIQELTKEDLSTLLAEASQVLAVTSSLVVLDCLRQQIKTLEKTIHKCLKRTPAYEQLLTVQGIGTILAQTIALETGAISRFPTVGNYASYCRCVGSTKISNGKRKGTGNVKNGNPYLAWA

SEQ ID NO: 241788 - protein, 313 aa, unidentified
MSDLTIPARFIGCDVGKAEIVVFDSLGGQTTSLPNQPPALAAFAATLDDASLVVCEATGGHELPLLDALATAGRAVHRADARKVKAFIRSFGTLGKSDAIDARALARYGSERHDRLARWTPRERSRERLHLLVATRRDLVGQRVACSNRLQAPGSAPVADRLTRLLALLEQEIAGIEADIQLLIQAHEPLARADAILRAIPGIGPVTAMQIVALMPELGTISRRQAAALAGLAPHPRQSGNREGYRRTRGGRPEIKQALFMAGLAAARHNPTLRAFYQRLRGNGKKPLVALTAVMRKMIVIANARMRDAICSN

SEQ ID NO: 241789 - protein, 414 aa, unidentified
MGSFKVAGIDVHKKMLAVVITDAAVEGAFHFERRKFGTMDSDLRELSKWLAGHGVQEAVMESTAQYWKPVWRQLEPQCKLYLAQAQSNRAPRGRKRDFADAERLVRRQVAGELILSFVPDPEQRLWRTVTRTKYQLTGERVRLHSQLEALLEDARIKLSSCVSDLLGVSSRRMMKALAEGETDPTALAKLADPSLRATPEELADALAAAMTLSSLHRKILGLFLSRLELIERQIETLDQSIATALQKHNDAVVRLAEVPGYGPDSAQQIIAEVGPEAATFPSAAELASWVGCCPGREESAEVSKTNRSPKGNRQMRRVLAQVAHAAVQTQGSTFQALFRRLVGRLGYNKAMWAVVHRLCRLTWKILHQGVRYEERGALPDPKLVKQRKKKLVRQLQDLGYEVQLIVRGEAPATA

SEQ ID NO: 241790 - protein, 376 aa, unidentified
MQNDITLFVGLDVHKDSITVAYALGNGEVEVLGKIGTSARDIDRLCKQLQSKARHVKFVYEAGPLGYDLQRRLAAKGFECMVCAPSLIPRRAGDRVKTDRRDAVKLVRSLRAGDLSAVHVPTVEDEAFRDLARVWAAARDALKRARQALKSFLLAHAVRYAGTANWGPAHRRWISSFSFGNVWQEFAFNELRRTIEDRFAQCGRLESAMREAVPQWRFYPAVLALQTMRGIQFTTAVGLLSEIVDVTRFAHPRQLMAWLGVTPSEHSSGGSRRQGSITKTGNSLARKLLIEAAWSYRHPAKISPEIQQRHEDMPKVIVDRAWDAQVRLCGRFRRMVAKGKNKNVAIVAIARELAGFIWDIGRLGMEQAIKTSRAAV

SEQ ID NO: 241791 - protein, 408 aa, unidentified
MNTLYVGIDVSSKSNVVYLMLPNGDKHSNFSVANSHVGSTQLVKRILSALTSYSLDTVLIGLEATNVYGDNLVYFLREDATLASFNRKIHVLNPKQVKKFHDAYNDLPKNDYVDSFVIADCLRFGRINKEVYMGDYRYKALQNLTRARFYAVQNLTKEKQRFINVLFKKYSTMTQEKVFCDTFSATALAVYDEFDSAEALANMDLHELTDFIIKKGKNRFTDPDAVAKAIQKAARSSYRLPKTINDSVNQVLSISITSMKALESQIKEFDKAIKAQMELLPNVLISIPGIGPVYSAGIMAEIGDINRFNNQAALAKYAGLAWKQHQSGGFESEVTRLIPSGNRFLRYYLCEAAFSLVRCDKEYSDFYHLKYKEVNRYQHKRALALTARKFVRLVFRLLKDNRLYCPAK

SEQ ID NO: 241792 - protein, 344 aa, unidentified
MKEVITIGLDLAKNVFQVHGVDGSGDTVMRRQLRRSQLLPFFKKQRPCLVGMEACATSHHWARQLIELGHGVKLMPARHVRPYVKRNKNDAVDAAAICEAVTRPTMRFVAVKSAQQQSVLMLHRTRELLVRQRTMLVNAIRSHMAEFGIVAPVGVPRVKELFAVIADADDDRLPAIARACLEGLANQFLSLHEEIATAERRIHAWHRSNEASRRLETIPGIGPITATALAATITDPSVFTSGRELAAWIGLVPRQSSTGGKERLGRISKQGDQYLRWLLVAGAMSVIRHAKRRGTTSLPWLANLITSKPTKVAAVALANKIARIAWAVLRQGGTYQKPATAAAA

SEQ ID NO: 241793 - protein, 321 aa, unidentified
MTYVGIDVSKVTFVVAYSSVKTNKTRTFKNTVNGVHEFVQTISASEHNCVLEATGNYSALLVYLLSEAGITISLENPLKIKNFARVMLTVTKTDEIDARLIALYGEKMQPAPYKLRSDAILVLKQKRTVLRQLKKQLVATRNLKGSMEVLPFFDPKCKKTIEKTITFLEKQIKEMEEELASLAQGEYKKQMDLLTSIKGIGVTLAAALIVATGRFSYFDNAKQLTRYLGLSPTYQQSGTSVNVKGHINRNGDSSLRSQLYVAAFSSLRCNTECKACFDRLRSNGKPGKVVVIAVANKLVRQAFAVVTQGKPYVDGFKSEKP

SEQ ID NO: 241794 - protein, 354 aa, unidentified
MSGEKYIGLDVHQATISVAVVDSQGKLIMESILETKASTILEFLAGLRGTLWVTFEEGTWAAWLYDLLKPHVAKLVVCNPRKNAALRQGSKSDQIDARKLAERLRLNDLKPVYHGETGVRMLRELARSYLTIVKDLSRVMNRLKALYRSWAIPCAGRDVYYTRHRREWLDKIPEAGTRRRAEQLYQQLDMLQHLRQQARREFLAESRKHTITAKLRQIPSLGPIRSALAVALIQTPHRFRSKRQLWTYSGLGLETRDSGEYQFVKGQVRRKKQVWIRGLNKDYNHDLKGLFKAAAVRASVQPGPLREFYQCSLAKGIKPTMVRLTLARKIAAITLTLWKKGENFDAEKLKSQAA

SEQ ID NO: 241795 - protein, 390 aa, unidentified
MDVLYQSCAGIDVHQANIVVCILHGPLTSTRPKREMATFDTTTKGLRACHDFLSQFHVEAVGMESTGVYWRPVWHALCDDFELILAQPAHMKAIPGQKTDKKDAHWIAKLTRIGLLPRSFVPDETIQELRELTRQRKHYVESRNRETNRIHKILQSGGIKLTTYIEDIMGLSGRNLLQLLVDGTPITPRIVHQSVYTSLKKKVPQLLEALDGYFSDHHRFMLKQSLEIYDFYQKQIELLEERMNVYLSQYENHVEILDSIPGIDVITASVIISEVGVDMSQFPTSGHLASWAGLCPGNNESAGKKRSTKIRHGNSYLKKCLCQAAFAVKKQKGSPLADRFYQIQSRRGSQKATIALAHQLLKIAYILLQEQITYPEFLAQKKTTRDELVA

SEQ ID NO: 241796 - protein, 391 aa, unidentified
MVCVGIDVAKDKHDCCILDSEGTTLVDCFTIPNNMDGFKSLLQTIQDCSQKSDKIKVGLEATGHYSYNILGFLLDNDLPVYVMNPLHTNLYRKSLSLRKTKTDRVDAKTIATMLLSDVDLKSYTDTAYHNEELKSLTRYRFDKVQERAKLKQSVSRLVTILFPELEQLVSSIHGTSIYALLSEYPGAKQISEAHLTRLANILVTTSRGHYRKDKATHIRDAARTSIGSVMPAKSLELKHTIKLIQELTSEINEIEDAIRKIMDELKPPILSIPGMGFHSAAMILAEVGDFSNFNSPDKVLAYAGCSPSTYQSGKLTNCYAHMEKRGSRYLRYALYTATKYVCYWNPVFTEYLTKKQAEGKHYNVALSHATKKLVRLIYALQKSGKAYLAVT

SEQ ID NO: 241797 - protein, 335 aa, unidentified
MEKKIIVGIDVSKSWLDAHMLSNEGLEGYALRVNNKTEGFVKLIKWIRKQTAVESDQWLFCMEHTGVYSYGLNAFLQDHSIAQSMVNALAIKRSMGVIRGKNDKADARVIAQYAFRFQDKLKEFHLPTESLQKLKIQLSQRERMIDMKRQLDLSMESMETLPLNFTKEARAQNRKLRKQLQKNIIEMDSVIRATIQSDADLKNQSQLIESVPGIGPQTCAHILVTTQGMKQFSDSRKYATYCGVAPFEYSSGSSYRGKTKVHYLANHKMKSLLHMAALNASVYDPDIKSYYERKKAEGKNPMSILNAIRFKLIDRVFAVVKRNEQYDKNYLRKAA

SEQ ID NO: 241798 - protein, 365 aa, unidentified
MIIVGCDYHPSFQQIAYVDTETGEWKEQRLEHREPAEAFYRELASRGEKVRVGMEASGHARWFERLLAELEIELWLGDATVIRAKRGRRKPKTDGLDAQHILHLMLKDDFPKIWVPSWENRDLRQLLWHRHRMVQARTRIMNQLQAVALNEGLRCKKRLWREKGRKQLEALHLAPWASRRREDLLQLLDELNPTIAELTQALDQEVEKSAEARRLMTHPGVGPLTALAFVLIIGKAERFQCGKQIAAYLGLVPLEDSSGERRRLGHITKQGSSMLRFLLVEAAQVAARSIPQWRNQYFHLAMRRGRKIAKVALARKLAIRLFWMMRQSRDYEQMTKFGSHAGQPEPGHGVQQNTEKLIGRPAPPY

SEQ ID NO: 241799 - protein, 333 aa, unidentified
MVEGTKGSHHKEGSTKMSKHSMICAGIDTGKRKLDVALDERAEQLQVDNTADGHVALLAWLRKYRVERVGIEASGGYEQVVVSHLRRNGLVVIVFQPAQVRAYAKFHLQRAKNDKIDAALIAVCTAAAPKIHAPPDPRLAPFAEHLTLIEQTTEDIACFKTRRESCRDQRIRGVWKQEIGRLKGLLRSELKQLVAAIRQYPDLAERLELIASVDGVGLRTAVAILVRMPEIGRVTREQAAALVGLAPYDDDSGDQVGVRHIAGGRERLRKSLYSATLAAAFHWNAQLIAIYERLIAAGKSHKVALVACARKLLIFVNTVVARGTPWTPKPATI

SEQ ID NO: 241800 - protein, 342 aa, unidentified
MKIIGCDFHPSFQQIAMVDTETGEQTERKLNRSEAAAFYRGLEGKAIVGMEACGNTLWMERLLAELGHELRMGDATRIRSMEVRRQKTDRRDAELLLRLLLEQRFPQVWVPSLEQRDTRQLLLHRDKLVSVRRQIKNQLQHLALNQGVQQKWKLWTEKGQTLLQELPLTGWTARRREDDLKLLDELNRSIAELDAAVEQEAKKNPIARLLQSHPGVGPITSLAFVLTLGRIDRFAHSRNVISYLGLNPAEHSSGGRQRLGAISKQGNPMLRSLLVEAGQSAARGDTDLKRAYQRLRHRKHSAVAKVMVARKLAVRLYWMWRTQQPWAATRMQDSPSHLVGAR

SEQ ID NO: 241801 - protein, 330 aa, unidentified
MTREYIGIDLHKAFFQACAVACGGERLWEGRFARSIDGIAAFRQRGIGSAHAIAVEASGPTWSFVDALTPTGARICVVDPRKTQLKAGVAAKTDRLDARRLADALRRDSVVSIYVPPPTIRELREVCRGRHQLVRLRTRLAQMIRALLLRCDAGEPPGTRLYAPRALAWLDHVALRPDAQATLRRLVTTYRAVHTEAQAADTAARTRAATDPIATTLDAMVGVGPVLALTLRAEIGDIVRFHGGPALASYAGVVPHVEQSAGHVFHGRITRHGSPWLRWALVEAARHAIRRQDATGRWARRLTSRKGIAKARVALARKLCDEIVATWPRP

SEQ ID NO: 241802 - protein, 418 aa, unidentified
MKSNKTEKIKTINQKTLIVALDIGKKVHYGYFRTPKNKDIKPFPIYNTGQSFKKFWKKLCRFKEEHMLEEVVIGFESTGPYAEPITNYLRKRPVNLVQVNPMHTKRVKDLTGNSPNKTDKKDPRVIADVISLGHSLTVIMPEGAAAQLRRLTHARERSIERRTAMNNQLQHLVFVIFPELVSIIKPSTKTGMYLIENFPDPESIVSIGIGVLCNIVRKISRGRFGIERAEKLYNAAKQSVGITEGKEGVILETSHLVSNIENENRYIKRLEEQMVEQLEQIPYSHSILSIKGIGHVTTAGLIGEVGDFNKFNTISEITKLAGLDLYEISSGRHKGQRRISKRGRPMMRKLLFFTAINMVKTNGIMYEKYKQMLDRGMLKMKALIAISRKILGLILAIVRDNTTYIENYIKQNHYKLAA

SEQ ID NO: 241803 - protein, 400 aa, unidentified
MIDTSDIDVYLGLDVGKGEHHATALTPAGKKTFDKRLPNSEPRLREVFARLQAKHGTVLVIVDQVASIGALPLTIARDLGCHVAYLPGLTMRRIADLYPGEAKTDAKDAFIIADAARAMPHTLRSVDLDDETIAELSMIVGFDDDLAAEATRLSNRLRGLFTQIHPHLERVLGPRMQHPAVLRLLDQFGSPAQIRKAGRRRLVTLIRPKAPRMAERLINDVFTALDEQTVVVPGTDAAALIVPSLASSLQAVLDQRKLLAHRIEELLEAHPLSKVLMSMPGIGIRTGARILIDVGDGTSFPSAAHLAAYAGLAPATRSSGSSIRGEQPSRRGNKQLKRAFFLSAFAALADPASRTYYDKKIAQGKHHTQAILCLARRRADVLFAMLRDGTLYQPPTPTTP

SEQ ID NO: 241804 - protein, 339 aa, unidentified
MARYFGVDLHRNQFTVCVIAENGREYLSVYRLEQLARFTAKLRKTDEVAVEVTSNTRLFYDAVAPHVAKVVVVNPTQFRVIRDSVKKTDKHDAKLLALYLSKEMLPEVRMKDKLHAQLASLTQTRDTLVKQRTALKNKVNNILSAHGINLKKEALSSEKRLDEILAMSFDVIVKTELRVIVGQIRACNASIAELEKTIKAEGANLPGHKNLRSIKGIGDLGATVLLSVIGNIEDFAHPGKLAAYFGIVPRVRNSNETECSGRITKRGAKLARTALVQCSMIAMRYSPYLAKFYHRIQVRRGTGKAIIALAKKFLGVIYNTLKNNWIFTDFPNFKLAEAS

SEQ ID NO: 241805 - protein, 427 aa, unidentified
MKVTYQTCCGVDVHKSFLVATIVKTTGGIEPSYQKKRFSTFNNSILEFKQWLINNNCHDVCMESTGKYWIPVFNLLEDQINVTIANPKWVKAVKGNKDDTKDSKWIGDLFRLGLVKGSYIPCKAIRILREYTRYRYKLVSCRSSEKNRYQNALTVCNVALDSVVSDIFGKSSTSIIDYLLEQSGTTINHEEIASKLLRRLKSKEDAVIESVEGYQMTDAQKYRMRLVRAHMDYITAEINDVDKMIENMISSNPDFENAIQFLCTIPGVKRDSAITIISEIGTDMSQFSSSKRLCCWAGLTPGSNESAGKKKSVRITRAGVYLKPALVQCAHAAVKSDKSPYYKKKYESLVKRRGKKRSIIAIARMILTAIYQMLSTGEQWNPSDLYKIDMPVALVEKQKAKAIKQAKKLLQREGYFRPEGSSGKALH

SEQ ID NO: 241806 - protein, 420 aa, unidentified
MERMVERCAGLDVHQATVVACVLINERGRRPRKELRTFGTMTHELEALRDWLVAERVTHVAMESTGVYWRPIHAVLEEHFTVIVGNARHIRNVPGRKTDVKDAEWIAELVCCGLIRPSFVPAKPLRELRELLRYRRKLTEAQAAERNRLQKQLEIANIKLGSVATDVFGVSGRAILRALIEGASSPVEMAGLARGRLRRKRDELAHALKGRLDDTQRFLLSMQLRRVEDIEILIKELDQHITGKLGPYQTELALLMQIPGVDWVVAAALIAEIGVDMSVFVSVHHLTAWAGLCPGSHESAGKRKNTTARKGNVHLRTMLVGAARPAARTKGSYFKDKYYRLKARRGSMRAALAIAHKILVAAYHMLARRVDYRELGEAYLDRIDQTRTAINLKRRLERLGYVVSILPQTTPSDAQATRPA

SEQ ID NO: 241807 - protein, 359 aa, unidentified
MRIIGCDLHARQQTLAMLDTETGEMVNLTLMHEGNEVQEFYSQLPRPVLVGIEATGSMHWFLKLMEEMGIECRVGHPATIRAAEPRKQKHDRRDAELILKLLAENRFPAIWLPTKELLDLRALVLHRHQWVRIRTRIQNALQAIALANGLRRGPGLWSYDGQAKIAFLPLLPHASYRRSMLQEMYRKMEEEIENLTQQVAEQAEQRCGARLLLTHPGVGPVTALATDVFLGDPKRFADGKALASYVGLIPREYSSGARQRLGGVSKQGSPLLRFLWCEAGAHAVRRDPELKRFCRRKLAQKGLGKARVAVARKLGIRLWIMLRDQIDYQEFCRRGQKLQSGAACAGMPEVANGAKSPAD

SEQ ID NO: 241808 - protein, 343 aa, unidentified
MKIYALGIDLGKTVFHLVGLDASGQVVIRKRCSRTQLLAFTANVQAQLIGMEACSGAHFLGRALRAQGHDVRLMPAQYVKPYVQTNKSDYIDAEAIAEAVQRPRMRFVPIKTEEQLDLQALHRVRERWVMRRTAVVNQVRSLLLERGLTVPKGRRHLNQALPRILEDAELPLSGSFRVLLAQLKLELEQLAARIEQMDAVIEQEARENEACQRLTTIPGVGPVTATALIAAIGNGSAFGKGRDLSTWMGIVPGEYTTGGKQKLLGISKRGNKYLRRLFVQGARSVLQQRDKQAPGLSLWLAQLLACKHQNVVVVALANKMVRIAWAVLCKNESYRAPVLAVST

SEQ ID NO: 241809 - protein, 417 aa, unidentified
MYYLGIDVSKKKADYLILDEKGGRFQRPFSLENTREGFETLIKKLEAFSLTPENLLCGLEATGNLWENLYSFLTAKGYKVILLNPYQTRKFHQALGQKATTDTISALVIADLLRSRRYLSSIVPEEEIESLRELVKLQFHLEEEKKVLSRRLVSLLSLVFPEYEKTALKNVLGIAARKILEKYPTAFDLAQAKVHQIERQVRSIKGNNFNISEIENLIETAKNSVYSGRARDVRAFTIRVLLSQLETVLSSLNSTKEKIEKILSPGEEGGCFPGSNLLSIPAIGKNTLAAFLSVAGGDGSVFPSGKKLVGYIGFFPQIFESGETRKDNTISHRGPNYVRKGLYMAAVSAIRHNPEMRTLYNKKISQGKTRQQALIYVAKKLAQMMLAMLKSGQEYKPERVFVPPTALPRFQKVVPAS

SEQ ID NO: 241810 - protein, 360 aa, unidentified
MKKLSKQTQEMEATLGKPTMTLGLDMGDRFSQYCLLNEEGDVVEEGRMQSTESAFRRHFENEPRMRIALECGTHSPWASRLLKQLGHQVIVANPRLIPAITGSASKNDRNDAEKLARFAAHDPRLLSPLEHRSQERQLDLNLIHARATLVRARTMIVNALRGLVKSAGGRLPACSTESLPARAPSAIPSALATVATPLLEQIGLLTTQIGGMDKQIEKLATKYPEIVLLRTAPGVGPIVAAAYVLTLDRPDAASNRSAGAFLGLRPGQSQSGDSDPQRRISKTGDSCLRSLLVQSAQYILGRFGPDSELRRWGLKLAATGGKRGKKRAIVAVARKLAVLLHSMWRNGQRFQPFPQAAIAA

SEQ ID NO: 241811 - protein, 409 aa, unidentified
MQIVYERCAGLDVHKKTVVGCVRVLGGGRETRTFGTMTTDLLALSDWLLAHGCTHVAMESSGDYWKPVFNLLEGAFEVLLVNPQHVKAVPGRKTDVKDAEWLAELLQHGLLRASFIPPVAQRELRDLTRYRNTFVRERATLVNRVQKVLEDANIKLASVATDVLGVSGRAMLQALISGQTDPSVLADLAKGRLREKREQLVKALEGRVKPHHRFVLTELLCQIDSLDETIARFDEQIQQVGVPFEEAVLLLDTIPGVARRTAEVIVAEIGTDMSRFPSAEDLSAWAGVAPGNHESAGKRYSGKTRKGNQTLRTALTQAAHAATRTHTYLAAQYRRLAGRRGKKRAILAVAHSILVMAYHMLTRKEPYREAGADYFDQRKPETTVKYLQKRLEALGYQVLLQRQVSGALA

SEQ ID NO: 241812 - protein, 414 aa, unidentified
MAKRFEAGAEEDRAVAQAIKLGCRLAPPSHLRLVKPNRIQRKIYPRKSAHTSMSPMPGVLEKPTALASSRRANKPKSRNRKETKMNSICLSTDHTVAALPVLGLDVAKASVQAELRTSGNKVRFGFDNNAKGFAQLARILKEHNVPKVWAGLEATGPYSHALALWVHGQGHRVSLLNPRRVKQYARSAGNRNKTDLLDAAIIADFVCAHQPAPWQPPLLEVAQLQALVRRREELSVMLQAEKNRLEGVAPNVRSSLGRIIATLSAEKARLEKLITQQIRSHPQLSRDHQLLCTIKGIGSLTAAILLAEMARPGQVERARQAAAHAGLAPRREQSGTSVRRNRGLGKEGNRHLRKALYMPALVAIKYNAPLRYFASRLRTAGKPKMTIVCAVMRKLIHIAFGVLKHQQPFNPSLA

SEQ ID NO: 241813 - protein, 390 aa, unidentified
MEQGTDRMARTSNGETASSKLEGPRGSSRRREPSVQGTIGVTKPTRRRRKEIPVEQAKEYVGIDLHRRRSVIVRRTEAGETLETVHIDNDAQALAAEVAKAGPYPDVIVEATYGWYWAADVLEECGAKVHLAHPLGNNWGNRRVKNDERDATDLADLLRMGRLAEAWVAPPVVREFRELVRYRIKLVHLRTGLKAQIHAVLAKEGVTVPVSDLFGNAGQAFLDEIDLAHAYRVRVKSLGDLIKLIDQEMAMVEKEIRLYVADDVGYRAVQAIPGVGPVLAAVFVAEIGDVSRFPSPRHLCSWAGLTPTHRESDTTVHRGHITKQGSRLVRWAAVEATIRQGGPTPISACRERIGERRGRNIGRVAAARTLLTLVYYGLRDGEIRCLAEAG

SEQ ID NO: 241814 - protein, 427 aa, unidentified
MNNALTTTLFIGIDVSSRTNYVFALDFFGKKLLSFQVNNNLPGSEQIVSNICSCLKENNLTHLTIAMESTSFYSWHLDNTLATHEALVWFKPKVHCMNPRVIAGYKKSFIDMDKTDPKDAFVIADFARVGKITTAPWSGAQYIAIQRLTRCRLHLMENISREKSYILSNIFLKFSELAVLDKKESPFSNTFGATSLAVLTEFMSIEELANAKLEDLVTFLVEKSKNRFSNPEATAKLLQKAARDSYRLDKALYDPLNVAIAASLNCIKALEKEVKGLDNAIKKAIKGIDNHQFQCLLSIPGIGPVFAAGIISELGDITKFNNQGCVAKYAGLTWRKRQSGNFTADHTFLTKTGNKYLRYYLLEAAFSVTRYSDEYHDYYQKKSDEALIHKHKRALALTGRKLVRLIFALLRNNQLYTSNEVVEKATI

SEQ ID NO: 241815 - protein, 319 aa, unidentified
MLIGIDVAKAELVVAARPSGERWTVANDERGVRTLVERLRSEAPELIVLEATGGYELLSVAALVTAMLPVVVVNPRQVRDFAKSTGQLAKTDRIDADILALFAERVRPAVREIPDADAQELDALLARRRQLLEMLGAERNRLGQVFGRGKQKVKKSLKGHIAFLERALRIADTDLGDMVRRSPAWREKDDLLQSVPGVGRIVSFTLLADLPELGRLSRREIAKLVGVAPLSRDSGTLRGRRFVQGGRASVRAVLYMGALVATKRNAVIRTFYQRLLTAGKPKKLALVACMRKLLTILNTMIRTGQRWSIDQSSPALISA

SEQ ID NO: 241816 - protein, 385 aa, unidentified
MSQFSGSPQTALDYNSTIIGALELSEKKWILAVQLPGAHRHSRHVLDACGDGLASFVERLKARCAAAGREIARVILTHEAGRDGFWLARFLARRCIEVHVIQPSSLAVDRRARRAKTDIIDVEMLLRTLMAWLRGEPRVCSMVPVPSEADEEARRAYREREDLTGERRSIVNKIDGVLATLGIKGYKALRRDRREQLTAVRQPDGDPIPQKAKARIERLLDRLELVLKLIEQVESARDAVLKKDAPADEAERMIRSLTDLRSIGADFATLLVREAFVRQFRNRRALGGYVGLGGTPFSSGGSEREQGIGKDGNRRVRAAMVELAWMWLRWQPDSALSVWFRARVGAMGGRIRKIMIVALARKLLVALWRYVKDGVIPDGAKMKAA

SEQ ID NO: 241817 - protein, 311 aa, unidentified
MNQQGPFIGIDVSKDKFDAAVRPSGESKMFANTHEDLRHLTQYILSLKPVLVVLEATGGLHRAVLSTLAAEGLPVVAVNPRQVRNFAKATGTIAKTDRIDAQLIARFAEALRPEVRPLKDEQAERLQALVTRRRQLVDMLTAEKNRLSSAPKWVQKDIRAHIQILERRLKHIEDELDKLIKKSPLWRHKEEILQSMPGIGPVLTRTIIADLPELGTLNRHQIAALVGVAPFNRDSGCFKGRRTIWGGRAHVRSVLYMNAVAAVRHNPVIKAFYQRLRQAGKRFKVAITACMRKILIILNTMIKNDACWNLT

SEQ ID NO: 241818 - protein, 359 aa, unidentified
MASNVKVNRINFNGKMVNIGVDMHKQSWRITALVEGEVAFTGTLAKPNYDSFRKLLARFEGNCVRIAYEAGPGGFGLYDILTADGIECMVTPPSLIPTESGSRVKTDKKDSLKLAKLLESNMLKRVWVLSPEERAHRQLVRTRRQIVDHRSDVMRQIKSLLFFHSMDIPFSSRQQWTVPFIKWLHELDLDDQCLNQSLKTLVHLFDYLSVEKKRLTHEVIELAKEEKYTHRVKLLNTIPGIGTLSGMEILVELQEITRFKTADELAAYLGLTPSQYSSGEHVRMGHITHAGNDRVRTTLVESSWILIGKDPSMRRKYENIKHRRGGKRAIIAIARILSARLRRMLLDQVPYEIGFQKAA

SEQ ID NO: 241819 - protein, 352 aa, unidentified
MERYVGVDTHAVSCTLGVMSASGQRLQSLVVETNGSALIEAVRRIPGRLHLCLEEGTQSAWLYELLKPHVAEIVVTVAPERKGPKDDRRDAWARANELRTGAIETRVYKAPEHLAGLRNAVRAYGFAVTDVVRAKNRLKAVFLSRGISADTGVYDPKKRLAWLKQLSSPHRELAEWLGRQLDQVEPLRDESERWLLLESKSHPIIRKLSTVPGMGRIRTAQVVAIVATPDRFRTRRQFWSYCGLGIVTRSSADWTQDESRKWVRRQMAQTRGLTRKRHPRLKAVFKGAATTVIAQLPEDPLHGDYERMLRSGIKPSLAKLTLARKIAATVLSMWKHQEVYDPKRHHSSSNQV

SEQ ID NO: 241820 - protein, 349 aa, unidentified
MDYRVYCGVDFHARQQTICSLTTESGVMSTHELKHQNKAELKAFYAQFSGPVLVGLEASGYSPWFEQLLESLGHEVWLGDATEIRRRARRRQKNDRRDAELILDLLIHNEFPRIHRPPTTSREILRMLRYRHKLIKIRTIIKNSLQSLSIQSGLSLRARLFTHAGLAQVRAAAMSPVMQYQRDQWLQSLEPLNQRILEAANWLQQQAAGDERIERLRTHPGIGLLTGLGLVHTLAPVGRFSNQRKVAAYVGFDPKERSSGEKKRYSGISKAGSRVLRFLLVEAAQTACQGDPELKRFYLRLLHRHGKPKAKVAVARKLLVRSYILLRDGIDYAEFNRRAVAARLAREAT

SEQ ID NO: 241821 - protein, 427 aa, unidentified
MEQIPQPIVKPEPEFAALIAIDWADQKHYWSLRAAGQDGLQRGTLDNTPEAVEVWIMALHVRFGGRPLAVALEQRRGALAVMLSKYAHVHLYPVHPTTLAKFREAWYPSRSKSDPSDADLLLEILTTHRSRLRRLDPDTVEMRFLQSLVENRRKLVDERTALSNRLTDLLKLYFPQILGWFNDVASPVVGDLLQQWPSLQDLQQVQPAKLEKFLRDHHCSEIPERLTQIRQAIAATHDRALLDSAPYLVAAWVRQMAVLRESIRQLEKRIAELAAQQEDWPIFQSLPGAGAALAPRLMVALGTQRDRYSSAGDLQSFSGIAPVKEASGNTQWVHFRWACPKFLRQTFHEWAACSIAQCEWAKAYYEQQKTRGKQHHVAVRALAFKWMRILYRCWKDRQPYREEIYLASLTKRRTALVAALAQAVKMP

SEQ ID NO: 241822 - protein, 339 aa, unidentified
MKLYAAFDLHSSNSYLGIVDENGKRTFKRRLRNEPEMIKEILRPFKPDIVGITVESTYNWYWLVDLLMDEGYRVHLANPCKIQQYSGLKHGDDEDDAFWLAEMLRLEILPEGYIYPKEQRPLRDLLRKRGHLVRLRTSLIVSLQNILARNVGAKMKTSAIKALKEDRVTPLLAGNDDISLAGKVSKDAIDSLTKQITAIEVAVEKKIKLRKPYDLLLSMPGVGRVLALTIMMETGPIERFIKVGNYVSYCRKVPAGRFSNDKKKGNGNRKNGNKYLSWAYAEAAELARRFDSEARAYYDRKRKRTNAPIAYSALAHKLSRAAYHIMRDKVPFMPEKTFA

SEQ ID NO: 241823 - protein, 394 aa, unidentified
MIYVGIDVAKDKHDCFIVSSDGEVLFDVFTIQNNMDGFEDLLFKIKSAEKDSGNVKVGLEATGHYSCNILGFLKNKGLPTIVINPLYTSLSRKSISLRKTKTDKVDARTIASMIMSDVSLKPYSDKLYHNEDLKSLTRYRFDKVMQRAKLKQSVSRLVNILFPELETLVSTLHGKAVYELLLEFPSAQHIASANLKHLTHLLNTSSKGRFKRVTADEIREAARKSISSYLPAKSLELKHTIKLIREITLEITEIEAEIKKIMDAIDSPILGVPGIGQNLGAMIIAEIGDFSRFDSADKILAFAGCSPSTYQSGQLYSSHAKMEKRGSRYLRWALLNAAAYVCNWEPTFAAYLQKKRSEGKHYYVALSHAAKKLVRVLYHLETTGETYSPTAILS

SEQ ID NO: 241824 - protein, 453 aa, unidentified
MARRNRSIDLKSAKSRTALTITHPNAAGIDIGSAAHYVAVPPDRDDEPVREFASFTADLNALADWLDGCGVDTVAMESTGVYWIPLFELLESRGFTVLLVNARHVKNVSGRKSDVLDCPWLQQLMTYGLLSGAFRPTEQVCVLRALWRQRGMLLRSQGRHVQHLQKALTQMNIQLTNVLADIVGESGQKILRAIVAGERDGQVLGAMKNVRVRASVEEIAKSLRGNWRAEHLFALKQALGAFDFVGTQLAECDTEIEQQLLRLKVHHGDPAKGKKRGRARNAPKFDLRTQLFQMCGVDLTRIDGVDVTTALAVVSEVGADMAKFPTVKHFTSWLGLCPGTKITGGKVMSGKTKRVVNRAAQALRLAAAALRSSKSALGAYFRRLCSRMDKPKAVTAAAHKLARLIYTMLTQGEEYTDQGQDYYEQRYRERVLRALSQRAAKLGLKMVPIEQPA

SEQ ID NO: 241825 - protein, 340 aa, unidentified
MEKASMIGLDIAKNVFEVHGRNAAGEVVLRRRLKRGQVEKFFAQLPKAVIGLEACGSAHHWGRVLSRLGHEARLMPPGYVKPYIKRNKSDAIDAAACWEAVGRPDMRFVQIKTVEQQAALSLHRSRELLVRQRTQLGNALRSLLSEFGIVAAKGREGLARLVEELRGGTLALPQEATFAALTLADQRAALDLAAGDLGRRIVAQAKADERTSLLQTAPGVGPLSAHAVLATMPDPALFKSGRDFAAWLGLTPRLDGTGGKTRTGHITKQGDQTVRRLLVLGATAWLRQVQARPEKASPWLRGMMARRPRKVVAVAQAARTARILWAMLTHNQPYRAPAIG

SEQ ID NO: 241826 - protein, 420 aa, unidentified
MGRLKIVYPVCCGMDVHRDFLIACIAATNAQGVTEYQSRRFSTYTGSLRELRDWLLANDCKDVCMESTGKYWFPVHNILEESCHVVVSHPKFVKAIKGKKTDKKDAQWIADLFKHDLVRGSFIPPKDIRQLRDLCRYWVKLSSYMTGEKNRARNCLTVSNFKLDDVFSNVFGKSASAITTQLLEHPGEQFDVAPFVDGRCKTPIAQIQEAVDGIFTYEQAEKLKIIRGHMDSLERHKAELESLILEIAQNYLPQIELLLTVPGIHDAFTAIRILAEIGADMTVFDTSKHLCSWAGLTPQNAESAGKKKTTRIGKSGAYLKPLLIQVALAASRGEKHPEIYGKKQALQKRRGKKKAIVAIARRLLTAIYHILSKNEPYNPAAYIQEDKNPMARQISQEKAFEMLARMGFIVSNPSPLSSSG

SEQ ID NO: 241827 - protein, 465 aa, unidentified
MKKKTSAPAKGKKKIVLQEDWQLIHPHAAGLDIGSREHWACVPASCGPKNVRPFGTFTADLHALSAWLKECGIQTVAMEATGVYWIPVFQILERAGFQVLLVNSRQTKNVAGRKSDLLDCQWIQRLHTYGLFQGSFRPADAYCVLRAFLRYRDELVSARSGQVQHMQKALQQMNLQLTQVLTNIAGASGLAILGAILEGERDPAKLLRLVDKRVKASHLQIEKALRGDYRPEHLFVLRCAFDLYHTYEAKIALCDEQIVAASAQLPARPAAAAQALPPRKEGRPACLDKMAGVDLREELYLKMGVDLTAIEGIGVATALVVFTEVGPDVSRFPSEKHFASWLGLCPDTRISGGKVLSSRTRKVINRLSDALRVAATSLERSQSALGAYYRKKKARLGAAEGVTATAHKLARIIYRLIQHGETYTRQGMEDYEQQFRDRKLQALKKTAAHMGFNLLPAQTLPEGVS

SEQ ID NO: 241828 - protein, 353 aa, unidentified
MSDIKPKRYTYFIGIDVSKNELDYAVMHGKNFLFHKEDKNESISIVAFIEELKKLPSFVMTKAVFCMENTGIYGNHLLNSLKKFKANIVCENALKIKNSLGLIRNKNDKIDSMRIAQYAYMHREGLNLFIPKRTLIIQLASLSTLRSRLLGVQVALKTPLKEQTEFTKKGLHAQNIRLSKSTTDALINDIKEIDIAIDKLIDDDESLKRLMQLITSVQNIGRITAIQIIISTNEFRDINNPKKFACYAGVAPFKNESGKILSRAKVSNIANKKMKALLHTCAMGAISRKGELQDYYFRKTKIEGKPKMAAINAVRNKLILRVFACVNQNRPYEKDYVKPFKEQMESAEVSFTK

SEQ ID NO: 241829 - protein, 423 aa, unidentified
MMKLKYSICCGLDVHKNVIVATIVTTNKDGISEYKQKSFSTINSDIQKFHNWLIENNCYHVCMESTGKYWIPIFNYLENDIDICLTHPKYVKAIKGKKTDKKDSKWIADLYKFDLVRCSFIPPKDFRQLRELARYRFKLVCMKSSEKNRIQNCMTISNVGIASVLSDPFGKTATEIMSYLLEHTADSMDEKAVRKLIKKGAKAKSDEIIEAIKGYNIETDQAKKLELAQGHLEYLDDMITQTEVELYVRIKPYYEFVEFVSTMPGMTELSSTIVLAETGVDMDIFDDAKHLCSWCGLSPANNESAGKKKSVRIAKAGDYLKPMMVQCALAAIKSKKQPYFAIKYGRIKKRRGHKKAIIAIARMMMVCIYHMVSEKKPFTPTDYEELMNPQNHVERVVLNENNVFAYLESLGYDSSKLVKRNDN

SEQ ID NO: 241830 - protein, 367 aa, unidentified
MKKVSTAAANASKNCSQQKLTIGLDLGDRSSCYCVLDEGGRIVLEQRVSTTAKALREVFGKMPRSRVALETGLHSPWVSRLLGEFGHEVIVAHARNVRLIGESRKKDDRLDAQTLARLARIDPQLLSPVKHRSAKAQADLTVIRARAGLVRARTALTNTARGLAKSYGEPLRGCNVRNLNPEKAEKLSRELQKALEPLLTASAALSEQIAEYNERIEQMAKESYPQTALLKQVKGVGTLIALTFLLTLEDKHRFQKSRDVGCYLGLQPGRRNSGQSEPQMHISKEGDPYLRTLLVQGAQHILGPFGVDCDLRRWGLKLAERGGRSGKKRAIIAVARKVAVLLHHLWVSGEVYEPLHNRPQSAVAIAA

SEQ ID NO: 241831 - protein, 343 aa, unidentified
MKHYAGLDVSVKETCVCIVDGMGTVCREIKVPSHPQDLLRILQDPAWRLERIGLEAGPLSQWLCEGLASAGLPVVCIETRHTQAFLKAQVNKTDRNDARGIAQMMRVHLYRPVHVKTLASQKRRALLTARKLLQDKAIAIENDIRGLLRNFGLKVGIIGAVKFQDRIRELIADRPDLTEIIEPLLAARRALREHFVALHQKLLAVVRDDEVCRRLMTVPGVGPVVALAFVATLDSPARFRTSKAVGPALGLTPVQHQSGESHRVGRISLCGDAMLRTLLVEAAQSMLTRVIKWSWLKAWAMNVARRRGGRRAVIALARRLAVVLHRIWTDGTEFRWTREAQAT

SEQ ID NO: 241832 - protein, 392 aa, unidentified
MLYLGIDIGKRNHVASLIDEKAKVLFKAFSFSNTIAGANSLFGKLAVHTDETNVEIGMEATGHYWLSIYSFFIEKGFTVHVVNPIQTDGWRKGTEIRKRKTDIIDSVLIADLIRYGDFDETSLSDEEMLSLRNLSRFRNYLISSIGDLKRKVICVLDQVFPEYQSVFSDIFGETSKELLSHFQTTDDFENISSEQLADVLEKVAFKGFAKNKITQISELAANSFGLKFCRDSFSLQLKLLIEQIRFIEAQVSDVEMEIKTILHKIDSPITTVPGIGDINGAVILGEIGDISRFSNASKLAAYAGIDSSVSQSGDFQSSNNKMSKRGSPYLRKALFQAALVAAFHDPVFSAFYQKKRSEGKHHLTAIGAVARKLCNTIFAVLKNNTSYIPQIK

SEQ ID NO: 241833 - protein, 311 aa, unidentified
MDNVFIGIDVSKGYCDVAVIPDGTRGRFTNDEEGQEAVAAFILPLKPGRIVIEATGGYEMGVVRVLADNQLPVVAVNPRQVRDFAKATGRLAKTDSIDAEVLAQFAGAVKPEVRPLPTKEAEMLRALVARRRQLVQMITMEKNRLEKSPHFGSKDIRNHIYYLTEALKKVDRDISRTIRKSPLWKEKETILTSTPGIGPVISCTLVAALPELGTLNRKEIAALVGVAPFNRDSGKYRGRRTIWGGRSHIRSVLYMGMLSAIRFNPVIRAFYQRLLKAGKARKLAITACMRKLLTILNTMMKNKTTWAEARS

SEQ ID NO: 241834 - protein, 371 aa, unidentified
MVWTAPYGISCARMRLLRSQTREPSVEQIIRIGMDTSKHFFQLHGIDAAERPVLRKKLRRNEVLGFFAKQPSTAIGMEACAAGHYWARELGKLGHEVKLIAPQHVKAYIKRNKNDGRDAEGLCEAMSRPTMQFVPVKTEEQQAALMLMGVRQQLMTRRTQLSNAIRGCAAEFGLITAKGLDKIEPLLAQIAQDESLPALAREMFTLQGRDYARLQVELKAIEAKLMAWHRANADSRRLVKIPGIGPIGSTALVMKAPDPRLFPSGRHFAAWIGLTPKDHSTAGKTRIGKITRAGDEMLRSVLVAGATAVIQQAKCGRGRPSPWLLDLLKRKPPKLAAIALANKTARIAWKLLTTGENYDGARMPGASALAA

SEQ ID NO: 241835 - protein, 429 aa, unidentified
MTRISAGVDVSKNRSTVCIIDQDGKFIMRPFLVWHSTEELDFLADTLKRLNGEVRVIMESTSVYQYPIALQLKERGLFISIVNAYEMKQFANTDFRGGKTDKKDSRTIASYGISYWYKLVEWQIPKDTYFNLDLLNRTYMNAKKHRQIILQELQHYIDCAMPGMDKELHSLNLSTKKDFMLDFVEKFWHRDEIVNMTEAEFTEVFTAWAKKKGYRPVEGKAAKIYAIAKSCIPYYPANPTVKTILQCIVDKLSGVNRTLVTIVTQMIEEAKKLPEYQIVREMPGVGDPLAARFFGSAGDIRRFKNSKALVAYAGIDSPPDESGDFSSTHRHITKKGSKVFRDTGYEIMMALRAQKRTWEKVRKNPEVYDYMLKKEAEGKPRKVAKIAALNKFLRIVYARIKELYDNMALAERAKTKTRSKTRAKTKVTA

SEQ ID NO: 241836 - protein, 313 aa, unidentified
MIIPLRCVGIDVSKHFLDIFDEAIGASERIANATQAITQLVARWRCDALVVFEATGVYDLELREALRQAGVRFARINPARARDFARASGQLAKTDPIDARMLAAFARAMQPATEQVATPARDALARLAKRRDQLVLMRAQEKNRRSEADDRAMAERIGRFIEVLDGEVEEIEADIRALIKAEQEISDDAQLMRSLPGIGPVACMQLIAQMPELGQVGPKQIAALAGLAPFNVDSGTYRGKRKIGGGRKRVRDALYMAALNAVRRADPFKAFYTRLRQAGKPAKLALIAVARKLLTVLNAMMRDRKPYKLAPAT

SEQ ID NO: 241837 - protein, 381 aa, unidentified
MRRILKIGMDVHTQNYTLCAVEPILGQEENILAQLQVAPSHTFVLDFIKKLKQQLGVSDKECDIVCGYEAGCIGYTLYHQLTKAGAKCIILAPTTMLTPQGQRIKTDKRDALLIAKCLCYGGYHAVHIPTDEDDAIKEYLRMRDDHMIATKKEKQQIGAFCTRHGLFYEGTKWTGKHRAWLKAQELSPMIKETLNEYIISLEETEAKIARFDKRIEELAAQTRYVEPVKQLRCFLGIETHTALSLVAETGDFKRFAKGNIYAAYLGLAPGEHSSSDNQNRLGITKAGNSHLRKLLIEAAGGICKGVIGHKSKVLRARQNGNKPEVIAYADFANVRLRSRYYRFIRHGKKRNVAVAAVARELACFIWGMMTGNISLVRAGSI

SEQ ID NO: 241838 - protein, 347 aa, unidentified
MVTFGGDCHKKTHTVVAVDENGRQLGERTVAATPSGHMEALSWARQWSQRQWALENCRHLSRVLERNLLNAGEAVVQVSPKLMGGARRSGRELGKSDPIDALAVARAALREPRLPVAQLEGKEREVKLLVDNREDLVGERTRIQNRLLWHLHEVEPGYQVVASGLLRAVVLAEVRTRLENHSGVVAEIALELVDRLAELTRSIKRLQRRIEVLMHELAPSLLSLAGCAGLSAAKLVAETADVSRFRSSAAFAMHNGTAPIPVWSGNHERHRLNRGGNRQLNVVLHRIAITQMRVGGQASDYIARRLSMGNSKTEAIRALRRQISDEVYRRLRQDHSRRSTALMAVAA

SEQ ID NO: 241839 - protein, 342 aa, unidentified
MNGDYDGRQYVGIDLHRRRSVIVRTTEQGEQLGWVRIDNDPVALGLELAKAGPDPEVVLEATYGWYWAVDALQTAGAHVHLAHPLGVKGFAYRRVKNDVRDAADLADLLRMHRLPEAYIATPQERELRELVRHRAKLVALRSGLKAQVHATLAKQGQLPAASDVFGRAGTAWLRSAPLELVYRQRIDSLLELIDAYDGEIETFRTMIANRFTGHRGYRAIQQISGIGPTFAAVFIAEIGDINRFSRPEKLCCWAGLTPRHRESDTTVHRGPITKQGSKLVRWAAIEACQHTRAGTKLSADRSRIIAARGRNIGIVAAARRLLTLVFYGLRDGEIRALAARAG

SEQ ID NO: 241840 - protein, 346 aa, unidentified
MPGLASEVDFVVGVDTHRHTHTAAAVDRLGGVVEEITVSADRDGSRELLRFAREKAPGRRCWAIEGTGLYGAGLTRFLLDRDERVVEVERPNRPARRRGKSDELDALSAAREALVMNHVAEPRSPGEREALQSLLVVRRHLVKSKTQAIGLLKAMIVKAPESLRESLGPLSTAEQVRRAARLRKRREASEDASVLVLRSLARRILALDTEARELKKRIEDLVGLLAPQLLAQPGVGPLVAAQVFVVWSHPGRLRSEAAFASLAGVAPIPASSGNTTRHRLNRGGDRQLNAALHVVVLSRLHGHPATRDYAARRTAEGKTPREIKRCLKRYVARDLFKLLESSAKMT

SEQ ID NO: 241841 - protein, 311 aa, unidentified
MPNRRIIGIDIAKNKADIYDTQTRKHQAIEADNYHEWISTLVVDKPDLVVMEATGGYERILAGLLSAAGIPLAIVNPRQVRDYAKSINQLAKTDAIDARVIAMFAQAVHIQAKELADSATQTMRDLMERRRQLVTMRVAEKNREAQAIHPRVKKDIADMLVFLDNQLARLDDDLDDHIKNSSVWREAENLLESVPGIGKVTARTLLADMPELGRLNRQAIAALAGLAPFNDDSAGHRGHRHIRGGREQIRRVLYMACVSAIRCNPFISEFYRRLRDAGKSAKCALTACMRKMLLLLNSIMKNKTPFSLKIT

SEQ ID NO: 241842 - protein, 338 aa, unidentified
MNIVFLGIDLAKNVFQLCGLNQAGKPVYTKRTGRKELLQTLANIPACLIGIEASTGAFYWQREFEKLRHKVKVISPQYVKTFVRRQKNDGNDAQAIAVALMQPTMQFVPPKSPEQQDIQALHRARQRIVNRRTATVCQIRGLLLDRGSPIGSAVSRARRAIPLILEDAENGLSSRMRRTIAELYELFNDLGRRIHFFDKEIETVFRQSETCQRIARVKGIGPKTATAIVAAIGKGTEFKNGRHFAAWLGLVPRQHSSGDRQALMNMMKKGDKHLRTLFIHGARAVVRVATNNNDGHMNQWVNQLKERRGFNKTTVAVANKNARIIWSMLRNETEYQVV

SEQ ID NO: 241843 - protein, 305 aa, unidentified
MKTYIGIDIAKLNLDIHQDGKASRIPNNEKSITAFLKSLSDHSIIVCESSGGFEALLISLAHIHLRSIARINARQVRDFAKAKGRLAKSDAIDAQILAEFGQAFHPSPLSIPDRLQQEIAALVKLRAHFLTQITQNNNLTETISDKSLLAIIKKTVSSLKMQADKIQKLIAEKIKSSPSLQSKVSRLQEVQGIGEITASSLLGLMPELGSLSDTQAASLAGVAPFNHDSGQFRGQRHIRGGRSQVRSVLYMSALVASRHNPILKTLYQRLLVAGKPKKLALTALMRKLIILANRLLKNPNFSLAN

SEQ ID NO: 241844 - protein, 397 aa, unidentified
MYIVGIDIAKRKHEAAVIDGEGTVIIKPFSFTNNCSGYNRLLAMLTKAKLPLDEVSFAMEATGHYWLALFTRLQKEGFRVQVINPVQTNSIRSFYIRQAKTDPRDALLIAEVIRFGHFSESTLHPENIYELRELCRGRHAIVSMQADIKRKVVALLDQVFPEYETAFTNLFGDTSMAILQACPTPKELSEMPLEEFCHLIEVPSRKRFRTEKAQELQALARNSFGFAMAGDVFSTMIRLYAKHLDFLKQQVREMDRKIAEIMETLDTPITTITGIGPTLGAYILSEIGDISRFSSAAKLAAYAGIDPTMRQSGEYNGVRNRMSKRGSPYLRHAIWLAASSAVLHDPALKLYFQKKRDEGKPYMASVGHACRKMVSIIYAVMRDNKAYTPYIPNEISA

SEQ ID NO: 241845 - protein, 344 aa, unidentified
MIWIGLDVHQRFSRMGCFDPATGELHDLGSVSNDPTALEETLQELPSPKTVVVEAGRSSYYMAGLLESLAEEVWIVDPGEVRRLQHTISKTDRRDAAALAWWAAKGVLTPQWRPGAELLDLRELTRGKTALTRLSTQVRTMIRMLLARHGHECPHRDLMSERGQLWLEEVELEGHAGQMLAGLREILVVVQAKVDDFERMVEQTSGKHPMARRLRTIPGIGPFLSLALAVEIGDINRFPGPAQLRGYSGLVPAVYQSGDKDARGPLTKAGNKWLRYAAVLAAQRIGQMKEPDPRLKRIFLSVAFRHGRNPGKIAVARRLLDLIYHLLKKGQDYRAPKPRVAIAA

SEQ ID NO: 241846 - protein, 416 aa, unidentified
MEVIHQRCCGLDVHKKTVVACVKTPEGKQIRTFGTMTVELEDLATWLGELEIRLVAMESTGVYWIPVYNVLEEGRRREELLVVNAQHIKAVPGRKTDVKDAEWIANLLSYGLLRGSLILDREQRELRELSRHRTILVREQADLMNRFHKLLEGANIKLGSVVTDIGGMSSMEMIEQLVAGNEDAVAMAGLARGRLKSKRQELEKALSGKVRSHHRFMLGSLLRQLQFLCQEIAVLDREVEERMRPNRRQLVAIEVMDRVPGIGLRTAESMIAELGTDMSPWPSHRHCASWAKICPGNNQSGGKRRSAGTGHGNPWLRHTLIEAARAAVRTKDSYMGAQYRRLKGRSRSKGGDNRAIVAVAHTILVIIYHLLKDGTVYQDLGKDYFEKRDREETAKRAVRKLERLGFKVTLEEAVAA

SEQ ID NO: 241847 - protein, 389 aa, unidentified
MLEPFNPSRSLAALEQDSTVIAVIEMSQSRWLVAAVIPGIERQPLKKIDPDEELLLKLLHRWQNDAGRAGREIKRIVAAYEAGRDGFWLARWLRARGIEAYVIHPTSVAVSREHRRAKTDRLDTELLKRAFLGWLRGEKRHCSMAAIPTLEEEDTRRPNRERENLVTERTRLINQMKAILVRFGIRTFKPTLRKAEEKLEGLRTAEGTPLPQNTRAEMRRQLARLRVVREQISAIERERLRKLAAAPAEERGPHAMVRLLARVLGVGVETADMLVNEILLRHLRDRKAVARYAGLTGSPDESGRRRRERGLARAGSARVRCGMIQLAWRFLRFQKDSALAQWFRARTTDGRSATRKIMIVALARKLLIALWRLVTMGEVPRGIILRAAS

SEQ ID NO: 241848 - protein, 315 aa, unidentified
MHTVEQPNQPVHIGIDVAKATLQIDLLGKSRKLPNTKAGHQTLLGLLPEHAFIIMESTGSYHIAPLECFQAAGIPVAIVNPVRVKQFGKARGTLAKTDPVDAALLTAFGRAFLPHPTPPRDPERVMLGELVNLRETLSAQITMWNNLVEHQQSAVARKLSEAQARAATKAMADVEVRIAKLIKESQTMAPVADVLRENKGVGAVTVAVLLAEMPELGHLNRREAAALAGVAPCANDSGKHEGKRHIRGGRPRVKRALYLASLSAVRHHATLSPAYKALRAAGKPAKVALIAIARKLIVILNAKLKEYYATLALPA

SEQ ID NO: 241849 - protein, 347 aa, unidentified
MKKIIIGIDISKEKIDASAIDVRNSQLGVLKLDYQVFENRPMGFRRMLVWAKHLIKGVTLEEVMFCCETTGGYDCCLCDYLFAKGLDIWRESSLQIKKSCGLRKGKDDKADSLTIAEYAMRHMDKAVYYVSPSETVRELKALLLYRRKLEQEKTSKKVRVAELKATAAKSKSVSFILRDAQKSIRALEKSIKECEKQILALYDRDEELKRSYDHLTSIKGISIVNATAMIAYTNNFKNITTSRKLASYYGIAPFRERSGTSVDKKAQVKCYSNSMLRAYLTQAAQWTIKEHGIYRDYYLRMSARGKCHGIIINNIKNKLLHLSVSLIANDMDYEENHEFLRVQRMAQ

SEQ ID NO: 241850 - protein, 321 aa, unidentified
MIDVASVVGIDVSKATLDVAFGIDSPIRQFPNEPKGHRALAKILIKRKVSRIVLEATGGCEHAVVRHLADQRLPAIRVNPRQVRDFARATGILAKTDALDARVLARFGAAVEPEVRPLPSPAQEKVARLHARRSQLVALHTAEINRLQQATDPLIKRTIKAVIKTLDKQIELIEAESAEVIREYKELERIYTIVDSAPGVGPVTAAMLIGCMPELGTLSRQEVAALAGLAPFNRDSGTQRGQRHIRGGRAQVRTVLYMATLSAVRSNPVIREDFERFTKAGKEGKVALTACMRKLLTILNAMVRDDMLWGEKKALKALPKG

SEQ ID NO: 241851 - protein, 418 aa, unidentified
MSVTVEGTSARVCAGVDWAKDDHAVCVVDADGEILDRFTIEHTAAGLRRLIARLLKADASEVGIERGDGPVVDALLAAGLTVLVIAPNQLKNLRSRYGSAGNKDDRYDAYVLADVVRTDRRRLTPLTRSTPATIALRGSVRARRDLVEHRVAAANQLRAHLQIVLPGIVGLFTDLDSQVSLAFLERFTTQAKADWLTPARLGAWLAKVGYSGKVAPEVLHQRLLAAPRGTTDTDADAHAITTLAFVAVLRTLNTQIGTLADSIAEQFAAHPDAHIIKSLPRAGTLRAARLLAEIGDARGRFPTADALACLAGVAPSTRQSGKVKAVTFRWSADKQLRDALCDFAGDCRRASPWAEDLYQRARARGHDHPHAVRILGRAWANVIWRCWQDGVPYDPARHNALQRVLNQHATKAARNSRP

SEQ ID NO: 241852 - protein, 473 aa, unidentified
MSKEKAKKAKKKKVGDIISMQVVNPYSAGIDVGDKEMVVALPEGLSDPRVRTFGTMTCDLEEIVAYLKTFEIDSVGMESTGVYWKPLFRKLIHEGIEVFLVNAAHVKNVSGRKDDENDAMWIQKLHSCGLLKSSYLPDEDQEALRTLVRHRKTLVRDSSRFVNRMQKSLELMNVKFHTVISDIVGQTGKAVVEAIIGGERNAANFLPLFSKRIKADLPTIEKSLQGNWLEEHLFTLKQNYEMYQLYWVKIVVCDQKIEEQLQQYEAKYNEGVIETAKTVKEEPAATPGGKKKKVAKKYGDKNRPRFNVHGHLERIYQVDVTAIYGINSTSALDIFAEVGTDLSKWKNEKHFVSWLNLCPNNKISGGKLISSKLFHKKPNPASLAFRAAANGVQKSDNWLGDYFRRKKAKGGNKYAIIATANKIAAIFYKMVRYKEEFKPVELEQYQQKYKQVKIAYLERKLMQLKRETEKIAA

SEQ ID NO: 241853 - protein, 342 aa, unidentified
MQITTIGLDIAKNVFQVHGIDAAEKVVVRKRLRRSQVLAFFKALPPCLVGMEACATAHYWARELTKLGHTVRLMPAKDVKAYVKRNKNDAADAEAICEAVRRPTMRFVQIKSPEQQSRLMQHRARDLLMRQRTQVINALRAHLAELGITAAQGNAGLKELLAIIAGDEDERLPADAHAILIVLAAELQAMQTLIGSIEKRIMAQHRVCEESQRVETIPGIGVVGATAITATVTDPKVFRSGRDFAAWIGLVPRQDSTGGKQKLGPISKQGDRYLRRILVVGAIAVLQRARQQPEKYPWLTQLLARKPFKVVAVALANKMARMAWALLAKGGTYRAPELAAAA

SEQ ID NO: 241854 - protein, 389 aa, unidentified
MYLIGIDISKYKHDCFIATETGEIIKDTFSFTNNQQGFTEFHNVLQSLDPSQTKRIGLEATGHYGRNLKMFCDKHGYTYMEFNPFLVKKFSTSLTLRKTKTDKVDSRLLSMILLSVEYKVYPVKSYHIEDIKSLTRYYKTLTKKRSKEIVNLTNILDYIFPEFKPFFSNKFSKTALFILKAYQTTEKISNMNSKSHQKLNNLSRGKFSYARFIKLKLLAKETIGSSSSVLNTQLQSCLRVYSVLEHEIKNTTDTLLELSKTIDSPVFSIRGIGPVSALSIISEYGNFTSFNSPAAMLSFAGLEPSVIQSGTIEKTGKMVKRGSGYLRETIMNAAPFFYMYNPTIYDYYHKKRSEGKSHRVALTHVAKKMIRIIFHLVRNNESFDEEKLK

SEQ ID NO: 241855 - protein, 355 aa, unidentified
MSQEKYIGMDVHQATISVAVLDSRGKLIMESILETKAATILEFLQALHGSLSVTFEEGTSAAWLHDLLKPHVTRLVVCDPRKNALLKDGSKSDRIDARKLAELLRGNQLTSVYHGEHGMRTLKELGRSYVTITKDLTRVMSRIKALYRSWAIPCSGTSVYAPRHRAEWLGKIPEPGVRLRAERFYQQLDLLQPVRQQARHDLLTESRKHHAVKLLRQIPSIGPIRAALLVAQLQTPHRFRTKRQLWAYSGFALETHDSGEYRYVRGKLQRNRERMTVRGLSDNHNPEVKNLFKGAAISASTRPGPLYDFYGALLEKGMRPTMARLTLARKIASITLTIWKKGADFDATQLHRQEA

SEQ ID NO: 241856 - protein, 388 aa, unidentified
MNRIIKIAMDVHSTNYTLCAMEPTIGVEDRILGEAQVAPDYKEVIFFIESLKVKLGLYHNYSIECGYEAGCLGYTLYHQLTDAGIKCVILAPTTMLTQQGKRVKTDKRDARLIAQCLCYGGYHPVYIPTGEDDAVKEYLRMRDDHKLALKKLKQQINAFVLRHGHQYVGTKWTIKHGIWLSKLELNPLYRETLNEYMASYEEQTAKIERYDKRIEDIAAESRYQENAKKLGCFLGIRTHTALSLIVETGDFKRFGKGNTYAAFLGLAPGERSSSTNVNRLGISKAGNTHMRRLLIEAAKGICKGAIGHKSKELRSRQSGQSAEVIAYADKANTRLRSKYYKMIRHGKKKNVAVTAVARELACFVWGMMTGNISAAGSTGTSVPAVSQG

SEQ ID NO: 241857 - protein, 311 aa, unidentified
MEHSRFVGIDISKDHLDVHVRPTGDSFRVRDDDAGLVTLVAHLRPLAPVVLVLEATAGYEVTVAATLASAALLVAVVNPRQVRDFARATGQLAKTDTLDARVLALFAEAVRPAARPVPDAQAAALGELIARRRQLVDMLGAEHNRRRLLRDRRLQRHLEAHIAWLEEALRRLDHDLTTLIRSTPVWRETDDLLRSVPGIGPVTAGTLIADLPERGRLDRRRTAALAGLAPIARDSGAFRGRRMIMGGRAHIRRVLYMATLTAITHNPVIRAFHQRRVAAGRPGKVALTAAMRKLLTILNAMLRDRRPWHPA

SEQ ID NO: 241858 - protein, 287 aa, unidentified
MTSIIYIGMDVHTTNYTLCCYTVDSDDAFAVVNVKPDYHEILKYMERVRSTRGGNCDFICGYEAGCLGYSLYHQLAKHGVACIILAPSTMPQQKGKSIKTDKRDAKNIAKCLAFNLYSPVYVPTAEDDAIKEYIRMRDDVKADLKRTKQQIISFCTRHGFHYEGKSRWTQAYFKWLDSLVFENALYKETLQEYLALYYTLDEKIAVYDARIEELAHQKRYEENVRKLCCFKGVSTHTALPLLVEVGDFHRFRTAQHFSAYLGLVPGESSSGEKVIHTNITKSGGILI

SEQ ID NO: 241859 - protein, 396 aa, unidentified
MTESSDYESVQVFIGVDVGKDTHHAVAINRSGKRLFDKALPNDENKLRSLISDLKQHGQILLVVDQPATIGALPVAVARSEGVLVGYLPGLAMRRIADLHAGEAKTDARDAAIIAEAARTLPHALRTLKLADEQIAELSMLCGFDDDLAAQTTQASNRIRGLLTQIHPALERVLGPRLDHPAVLDLLQRYPSPEKLASLGEKKLAAQLCKLAPRLGKRLAADIAQALAEQTVVVPGTNAAAVVLPRLALQLITLRKQRDEVALAVEQRVLALYPVLTSMPGVGVRTAARLLTEVACRAFASVAHLAAYAGLAPVTRRSGSSIRGEHPSRRGNKALKRALFLSAFAALRDPLSRAYYTRKMSQGKRHNQALIALARRRCDVLFAMMRDGTFYTPQAS

SEQ ID NO: 241860 - protein, 430 aa, unidentified
MNSTQNKKIRQVTEKTMVVGIDVGSEKHYFRAFDWRGIELTKKPFPFTNSMEGFNSFSNEIYSLMERFHLSETLVGIEPTGHYWFNLGQYMSGKSIKFVMVNPHHVHKSKELDDNSPSKNDCKDPRVIAGLVREGRYYYTYMPQGIYAELRNASNRRFTLVEEQTRIKNRLYRWISVYFPEYKGIYTQINAKGGLLILKEAPMPEDIIKLGIDGIVEIWKKAKLRANGRKKAMVIYNAALKSIGYREGLVEARMEIRDLLEDHEQNEKRLKQINDLIENLALKIKNVEKLLEIKGIGIITIAGFIAEVGDIMRFDNAKELQKLAGLELVADSSGKRNGMTRISKRGRKHLRYLLIQAAISVVGKCEEFKEIHNYYTTRNSNPLKKMQSIIAVACKLIRVFYAILAKGIDYDASKMLEDIKHPGETPNLAA

SEQ ID NO: 241861 - protein, 348 aa, unidentified
MSKHAVPAGEVSGLLRRFAELRRKAAARTGRDLPIIVIQEAGLDGFWIHRVLQSEGIESHVVDAASILTSRRRRRAKTDRIDGETLVRTLMAYKRGEPRVCSMARAPTPQEEDRRRVCRERRTLMGERVSHVNRIKGLLSAQGVFGYEPLRKGRRERLEDLRTGDGRPLPVRLKAQIIRELDRLEVLLEQLKTVEAERDALLKPASDEAASPAAMLARLKGIGPETAAVLWSEGLFRQFDNRRQVAAYAGLAQTPWQSGSIDHEQGVSKAGNPRLRTAMVELAWLWLQNQPTSALSLWFHERVQRLGRRVRKTIIVALARKLLIALWRYTTAGVVIEGAVMKAAAVTN

SEQ ID NO: 241862 - protein, 361 aa, unidentified
MSETGGCFIGVDLHKCTVTLAAVSREGEKFAHLKISTKSVGKIEEWLLQLPRPSRMAVEACPFIEWFIERFTSAVDRIDIADATELANRRGKRRKTDRNDALDIAQRLARGECPLGFIAPPELMQLRKLGRHWRCLSRLSSRTKHSMKSMLNQANIRGPQFDGAAAQRWFLAHRDLLGAVQQDAFADFIDILNLVERQRERLRREMIFASRGPTYGQTISRLMTVPGIAEIWATIIAAEIGPFDRFPNADALEFWAGLTADMKESAGRTQSGHITKAGSATLRWALGKAAVTLCQSDARQEAIRQRLVTRLGRPKATVAMARRLLRVLYAMMRDGKAYQGGPTRDRTAAANRARLGKKKVA

SEQ ID NO: 241863 - protein, 430 aa, unidentified
MFKINPLSTLYVGIDVSSKSNYVCALDFYKNKYINSSFANNQPGAEELARKILECLKKHPDLNTVIAALESTSVYSIHIANYLSSCEELMPCKPYIFVVNPKCTANHKKSFIGLGKSDPIDAFIIADYARGGNIETEPWRGSQFLALKRLTRHRLHLVECMTREKAYLVSNLYLKFSELQMLDKEDQPFCDIYGAASSGVLTEYLSPEEIIATSEEDLVAFLAEKSRNRIKDISKTADLLKKAARDSYRLDKALYEPLNVAIASSFNCIEMFKKEIKAIDTAIEREINGLNPNAFIILQSIDGIGPVFAGGIVAEIGDISAFKSSDALAKYAGLCWKSNDSGDFSGEDTPMSKAGNRYLRYYLGEAANSMRKHNATYGAYYRKKYNEVPKHQHKRALALTSRKFVRLVYGLLAKNQLYSGVSLDTSTEQK

SEQ ID NO: 241864 - protein, 341 aa, unidentified
MAIAVLGVDLGKNSCSVVGLDPAGKVVLRRRMRRETVIGFASSLPSCIVGMEACCGAHHMGRALAAQGHTIRLMSPEYVRPYVKAQKNDDRDAEAIAEAATRPTMRFVALKSKAQLDVQTLHRVRDQLVGERTSLMNQIRSVLLERGHVIPQGRAKLALGLRELLDNPAASLTARMSSLIEDVIRRWEALDLRIAALDAEFVEMARTDESARRLTTIPGVGALNATALVAAIGDVGSFARGRDLAAWLGLVPRQVTTGGRPRLVGITKRGSKYLRKMLIQGARSALPTLRRSSTRLGAWLRGLLARAHANTAVVALAAKMARTVWALLRHGRVYEADAIAA

SEQ ID NO: 241865 - protein, 369 aa, unidentified
MQRKEISFKGQKVFIGIDVHKDSWRVAIAPEVGVVKGHSQKPSARELLDFLKKYYPDGEYHAVYESGFSGFSTYYALQDVGIDCIVIHAADVPTTQYEETMKTDKVDAAKLVRSLKSGLLTGIYIHKRDDIDARSVVRLRKTIQKQLGSYKSRVKHLLHSNGVTFPERFSTPGSHWSKVFIRWLKEEVVLLSATRISLDLLIVQVEAIRKTLLMATRNVRELSRSERYRHGCELLTSIPGVGINVAMTLLTEIGDINRFHNEKEFASYLGLVPTSHSSGGKVAHGEKTFRGNKYLGPQIVEASWVSIYSDRGLGCAYFNYKKRMKPQEAIVRVARKLSNIIFSVLKTGKKYKPYEWNEKQKHTDLQATS

SEQ ID NO: 241866 - protein, 350 aa, unidentified
MKTNPIRQCVGIDISKDQFMASLATLNEAFQVTIKSTKSFANSAEGFEKMARWVGQLAHTPVAMHYVMEATGVYYESLAYWLHEQGQSVSVILPKQFKAYANSLNAKSKTDRIDARILAQMGLERSLATWQPASPVMRQLKQLCREKNTLKEEKKALKNQLHALNCSYQPNETTRKRLGRRLATVDELIREVEIELVATMQTDSLLTQRIENVCTIKGIGLMTALALVAETNGFALFVNKAQLVCYAGYDVVKNESGTSVKNPTKISKRGNNHLRKALHFPALIAIRYEPQFQLMSQRIVERTSLKMKGVVAVQRKLLVLAYTLFKNNTPFDGHHRSHQNSRQSPMLNPA

SEQ ID NO: 241867 - protein, 377 aa, unidentified
MKKVRFIGLDVHADTIAVAVAEPGGEVRSLGSIPNRPESIRRLMKKVGPSKELRVCYEAGPTGYVVYWQLTALGVTCEVVAPTLVPVKAGDRVKTDRRDAEKLARSYRAGDLTPVWVPDAAHEALRDLVRAREAAKKDQLRARHRLGKFLLRHGRRPPTAMTSWTQRHLLWVKQAVHFEQPAQEATLLDYLHEVEHVAGRIERLDRAIDDTVKTAPVRMRAVIDALQALRGIALVSAVTIVAEVGELSRFARATQLMGYSGLGASEDSSGARTRRGRITKTGNAHLRRIVVEAGWAYRHRPSVSGALRKRQATLSDTVKGIAWKAQHRVHGRYRRLLGRGKCQQQVVTAVGRELLGFIWAIGVAVETERQNKHSVAA

SEQ ID NO: 241868 - protein, 403 aa, unidentified
MFYLGIDVSQKTSSCLLLNAEGRKGKAFTFENSPEAFQSLVQWLEEQSIPKHDLLIGFEATGNFWENLYVYLKEKGFAVVLLNPFHVKRYREALAKKAKTDHIDALVIAQFLRTGEYVQSQVAEETIQSLREMTRLRYELLKEKKNYQRQVCSLLTVVFPEYDQTILKNPFTISALAVLQKFPTAKDLAQAKPKQIEKIIRSIPGNSFGAQEIDTLISVAQHSMYSGRAKEARAISLRILLTHIAHLVHSIQELEEETQKVLSPQRPDDPFPGENLLTIPGVGQNTVAAVLSYLGEDGANFSSSTRAVGYVGYYPKIYQSGQSKRDNTISKRGPKMLRWALYMAAVASLRHNPEMKTLYHRKRSQGKTKKQALICVAKKLLQIMLAMLKSGEPYKPQMVFVQS

SEQ ID NO: 241869 - protein, 411 aa, unidentified
MSDSIFVGIDVSTKSNKVCILDQQGNRLSKLSVENNSHGSAKIVERVIEATEKSNSSDVSFGLEATSVYGDGLIFFLKQEPSLKLYNTKVFLLNPKQVHNFKKAYSDLPKTDDVDAWVIADCLRFGRINLREVYFDEQHKALQRLTRARYFVAQNIVREKNRYLTNLFLKFSGMCQEKLFSNNLGATATELAGSEFSLDEIVHIPLDELAIFINTTGKGKFADPEALAAGIQKAARSSYRLPKTVEDSVNQVLAVSVISIKSYLQQLKTLDQSISTLMEAIPNTLTSIKGVGPVYSAGILSEIGSINRFKDQASLAKYAGLSWSRYQSGNFDADNTHLINSGNRYLRYYLIEATNLVRRHDPEFKRFYELKYHEAPKSPHKRALALTARKFVRLVYALLRDQRLYLPPRVR

SEQ ID NO: 241870 - protein, 345 aa, unidentified
MPIVGGLDIHRKQITFDYPGTVTGEVRRGQVSPADRAHLRAWLVRFAGRDDVAFAMEGCTGWRYVAEELAAAGIAAHVGEPADTAFARGRKRHAKTDKTDSRHLRQLLAEGRLPECWIPPAQVLECRALLETYHDLRREHTAWIQRIHAVFFHQGAPALGEGALRTEAALAALREAAAVHLSPAGQLQIATDLDMLAAVEARMDTLRQQLREAARHLAGAKALADRLYGVGPVAGLALTCWLGGAGRFSSSRKAVRFAGLDVTVYSSDGKRSPGHLSRQGPEILRWVVYEAGKTHARAAAPGHDYYAAVKDRTDGKIAALSQARKIVRQACHILAELGDDALTVT

SEQ ID NO: 241871 - protein, 401 aa, unidentified
MLPKLWAGIDAGKTHHHCVVIDDQGNRVLSQRIANDESDLLELICTVAALGDGGEVVWAVDLNHGGAALLIALLAAHDQHLLYIPGRTVHHASRTYRGDGKTDAKDAAVIADQARMRRDLQPVRTGDDISVDLRILTARRTDKACDRTRAINRLRAQLLEYFPALEQAFDYSRSKAGLLLLTRYQTPDALRRLGQKRLHSWLRSQGTRSSADVAERAINAAKSQYTTVPAQRVGAPMVAELAQEVLELQSQIDALDIQIAERFREHHQAEIMLSMPGFGPLLGAEFLGATGGDLTIFESVNRLAGVAGLAPAPKDSGRIRGNHHRPQRYDRRLLRACYMAAMSSLKSSTASRAYYDRKRAEGKTHTQSLLSLARRRLNVLWAMLRDGTTYELKPAPPARVA

SEQ ID NO: 241872 - protein, 412 aa, unidentified
MDVFCGIDWAEDHHDIALVGADGQLLARRRISDDASGLAALLSLLADHGDSAEHPVPVAIETPRGLLVACLRATGRDVYPINPMAVARYRDRHSVAGRKSDHGDSVVLANVLRTDAHAHRPLPADSELAQAIAVLARAQQDAVWSRTGAHNKLRSHLREYYPAFLAAFADLRGGIMRPEARVILAAAPDPAAAARLTLSQLRALLRKAGRSRGIDAEAARLREAFRAPQMHQLPLVEQAMGRQALALLGQLDAACAAADDLEQAVTESFNQHPDAGIITSFPGLGPLTGARVLAEIGDDRSRFADAKGLKGYAGAAPITRASGKTRAVLHRRVKNQRLAAAGYVWAFSAITASPGARNHYDRRRQAGDRHAAAQRNLFGRLLGCLHHCLSTRTQYDEATAFPAVGEKVPQAA

SEQ ID NO: 241873 - protein, 344 aa, unidentified
MKITTIGIDLAKNVFQAHGVNEHGKTEKKKQLKRGQVAEFFANLPPCLIGMEACGSAHYWARKLEGFGHTVKLIAPQFVKPYVKTNKNDAADAEAICEAVARPNMRFVPIKNVEQQAVLSLHRVRQGFVKARTAQANQIRGLLGEFGIIIPQGITNIAKRVPELIEDASNDLPGSFRLLVQRLMDHLNELDKQLDELEAQIKAWHRESAASCKLEKIPGIGPITASALVASIGNAKNFDDGRQLAAWLGLVPKQHSTGGKSKLLGISKRGDSYLRTLLIHGARSVILSASKKVDKSRWLRKLMERRNPNVAAVALANKNARIVWALLANEREFRSDYTPALAVA

SEQ ID NO: 241874 - protein, 460 aa, unidentified
MSKKRPKGKRAEPAPKVDWKALEIVHPDAAGIDVGGSEHWVAISPDRDPKPVRSFGCFTADLREMAAWLVEKGVRSVAMQSTGVYWMPVFEVLEQHGLEVYLVNAQHTKNVPGRKSDIQECPWLLKLHAFGLLNNSFQPTDEIRVARTLWRHRGNLVAEASSTIQRMQKALIEMNVQLSNVLSDLSGVSGMRIIGAILKGQRDPAQLAALVEPEVKATPEDIAKSLEGNWRDELLFVLKQQVELYRLYQEKIGDCDVQLRRHLESLGSRVDPRTQPLGPKPKGKRGSRNAPEFDLRTELYRITGIDWAQINGIDVLTAQTVMAEAGDDLEDFDSEKHFTSWLGLCPTNETSGGKILKRRTRKVVNRAAVAFRNAASTLLRSDSYLGAQYRRLRTRLGAPKAITAMARKLACLYYRLIKHGQQYVDKGTAYYESRYREQQIRVLTKKAKKLGFQLVIQQTA

SEQ ID NO: 241875 - protein, 305 aa, unidentified
MSKKTLDCWKSGRKNKGGSHKSFANDGKGIAALLRWLPKGGHAVLESTGSYGELLVVMCHNLGVPVSVVNPESVRNLAKAHGQRAKTDRIDAELIARFADAVQPEPAPAPTRTQMTLRSHVDLREALVEERTGRLCRLAQETNPAIRAHLESLAAHHNKTIAALEKQIDSLIASCPRMTAMRKALRTIPGIGPVISATLAAFLPELGTLSRKQMAALCGLAPYARDSGAKKGKRYIFGGRAKLRRRLYMGAVSAVKTRTPLASQHKAMVARGKPKKVSLIAVARKLAIRANTLCKPLASIPYANH

SEQ ID NO: 241876 - protein, 345 aa, unidentified
MENMYYIGLDVHKKTIGYCVKDGSGRIYAEAEIPATRLDLDMWMKTLPQPWTVAMEATIFTAWIYDHLKPHAAAVKVAHPLMLRAIAAAKKKNDRIDAHKIADCLRCNFLPECYMASTEIRERRRTLRYRNLLVRQAVQMKNKIAVLLMEAGVSYNKQKLHKVGYFRELLATNQDIDEGLKPLLRLCRETVVRLGKTESALVRSLQRDSLLMERVERLMTIPAVGPITALTWALEVGDVQRFSSIKKAISYCGLCGAENSSANLIKRTPLSKQRNKHLQTTLIEAAKMAPRNSVDLAMLYDREKQKDNANRATLAVARKLVAYLVAVDRRQKDFLVVASENRTAA

SEQ ID NO: 241877 - protein, 405 aa, unidentified
MVKVFVGHDWAEAHHDVLVLDEGGGRLGGGRLPEGVEGVAQFHALVADHVEDPAEVVVATETDRGLFVGSLVAAGYTVLAINPLSTSRYRERHSTSGAKSDPGDARVLAELARTDAHNHRPVAGDSDLADAIKVLARAHQGLIWTRQRQVNQLRSTLREFYPAALVAFPQLGHPDALAVLAVAPTPAQGRRLSRSKIAAALRRGGRQRRIDERAVEIQAALRAEQLAAPDVISDAMGAAARALVAVVGELTDQIAILESQLADHFDQHPDAEIIRSLPGLGMTLGARVLAEFGDDPNRYHDAKSRKNYAGTSPITRASGTRQVVLARHARNRRLADACYLWAFAALGSSPGARAFYDARRTAGDTHHRALRALANRLVGILHGCLRHHSTYDEHTAWGHRHDIAA

SEQ ID NO: 241878 - protein, 448 aa, unidentified
MQQPIEVDVDESQQLVGRVAAIDVAKATGMVCTRVPHDSIEGKRVTKVWEVKATTKGLLELADHLVATGIQRTVLESTSDYWRPFFYILEGAGLEVWLVNARQAKNVPGRPKTDKIDAVWLAKLAERSMVTPSFVPAEAMRHVRDLARARSDLVGDRRRVKQRLEKLLEDSLVKISSVLTDIHGVSGRAMIEALIAGERDPKVLAGLAKGRARARLSTLAEAADGRFNDHHARLARMLLDQSDDLARHIAEVTALLDDAIAAATKPGTVPIVDVATGEVTTAQAGFATAVERISALPGGGPDVARAVIGEIGLDMAVFATAPRLCSWAKISPRTVQSGRKTGKATTGKGNPYLKAALGQMAMGAAKTDTFLGARYRRLAKRMPKAKALAALERSILVAIFHLLANPTTTFQDLGPDYYEKRVDKQRHTTNLVRQLEALGHHVTLTTAA

SEQ ID NO: 241879 - protein, 351 aa, unidentified
MSEITTVGVDLAKELIVVCAGDAVGRTLFFRQFGCAGFAGWMANLPPCTVGMEACSSAHHWARVLAGHGHRPKLMAAEFVKPFRKSQGAKNDRNDAQAILSAVREPNMRFVSVKSLEQQSILACHRMREGWHAERTALLNRTRGLLAEFGIWLARSSAALYRALPRLSQEETVPARVRALLGQAHEHLRQIDAQISHCEAQIRLHAKQSECAQRLTAITGIGPITASAVVATVANARDFRNGRQMAAWTGLVPRQSSSGGKERLGSITRRGDTYLRALLTQGARSALQAALMRAPERRSRLEHWMVELRQRVGYHKTLVAIANKHARICWAILAKGEEYDPQAWQRHALAA

SEQ ID NO: 241880 - protein, 367 aa, unidentified
MMEWMAPLRHLSAKLLSDRTSSKWEPSMGEVTTIGLDLAKHVFQVHGVDAEGATVLRKQLRRAQVLAFFSRLPSCLVGLEACATAHYWARELRALGHEVRLMPAQYVKAYIKRNKHDAADAEAICEAVGRPTMRFAPVKTADQQAAVLLHRGRERLVRQRTGLVNALRGHLAEFGVIAPQGLRNVGKLIAIVRDEGDARLPDLARQVLQVLAAQIEQLEAAVAAIEKQLMAWHKSNPVSQRLASVPGIGPIIATALAATVVEPSGFRSGREFAAWLGLVPRQNSTGGKHRLGGISKRGNPYLRRLLINGASASLLRSKATNADPWVIGLRQRRPSLVVAVALANKTARIAWAVMHRHENYQRVAAAA

SEQ ID NO: 241881 - protein, 337 aa, unidentified
MGRYLGVDLHRNCFTVCTIEEGGRSYLREWRLKDLGRFVAQLRGRDEVAVEVTGNTRLFYDAVVGKVSRVVVVNPSEFKVISQSVNKTDSNDARRLALFLSKGLLPEVRMKDKAHGQLASITQTRDKLVKLRTALKNKINNIVSAHGINLKKEELSSEKGLEKVLGMMFDPLVDLEVEVLVKQIRSLNKSISELDKAIKEEGSKLKGHKNLKSIKGIGDLGAGILLSVIGDVNDFANEGKLASYFGIVPRVSNSNETQRSGRITKRGSKLGRTTLVQCCLIAKRYSSYLNTYYERIKARRGGGKAIIALARKFLSIIYKTLKNDWVWADFPNGVLAK

SEQ ID NO: 241882 - protein, 400 aa, unidentified
MFAGIDWGGSFHQVCLINAHGEVIVQQRVQHDLAGLAELDRLLLVHRNAAGRLRVAIERADGLLVEHLHTIEVEVFCVSPKISARARERYRLAATKSDAFDAFVLADTLRHEHRHWRALSPASPALAELRAISRDRDRVVIAQQATENRLRAVLEAYHPAPLHLFSSLDRDITLDFVTDYPTPEQAARVGEARMQQFCRRHGYSGRTDPTVLVERLRPHLLSAAEGTEAGKAFSATMFTEELRLLNAHLRAYDKRLVELLDQHPDTPIFTSFPGIGPVVAAALISEMGEDRGRFPAPEALLAEAGLSPVTRASGRTRQVRFRYAANRRMRHMIDWWAFVAAREDAWSRRIYDDARARRQGKYRALRGLGSRWTRILWRCWTDHTTYDPAIHHKQQEPAQA

SEQ ID NO: 241883 - protein, 351 aa, unidentified
MKRMTYVGLDVHKRTIAYCVKTRGGQLVKEGEIPATRRDLDRWTATLRRPWTGALEATLFTGWIYDHLKPRAAALKVAHPAMLKAIAASKKKNDRIDATKIADLLRCDLLPECYMAPSPVREQRRVLRYRNLIVRESVRMKNKISGLLMEVGESYDKKKLHGKRYFAQLLPGLHQTPESVKELLRLSRSNLELFTGLQRGLLLKLAEDEVLAARVERLKMIRGVGDVLALTWALEVGEPARFTSIRQAVSYCGLCAAQASSAGIDHRGPLSKMRNKHLQSMLIEAAKLAPRYNPQLAAVHAREAARGNKNRATLAVARKLVAYLLAADKNVEPFEPRAARAKPQAAGMTKP

SEQ ID NO: 241884 - protein, 383 aa, unidentified
MPAEEMSVAYLGIDVGKSSHSACALDVGGRVAFRAELANRPDDIDRLLERAGSGALVVVDQKRNIGALVLARAHAHGNPCAYLPGYAEKQARGMFPGIAKTDAIDAEVIARTALGVPRALRPAPEEPEGTASLRILSSQREFASSARTRAKNRLRATLLEADPALEGAVDPSSRWQVSMLAEFGVAAGWRRFSSAARRAGAPVAGARRLWEALLASSRSGRRLPAGEDVAVRILAREIASLDADIEELDSLVADSLAGDEVYECLLTVPGIGPKTAAALVTSIDISAFRGHDELASYCGVAPRDRRSGSSIRSTSPQHGGNRQLKNLLIFSCNSLIGTDNRFGRYYGECRARGMRHSKALKAVARKRLKVIYAIMRDAVPYAA

SEQ ID NO: 241885 - protein, 414 aa, unidentified
MEKNGRIAGIDVHKKMLAVVAAEGSSEGPLRFERAKFGTMESELRRMANWLKERNVGEVVMESTAQYWKPVWQQLEGQCQLYLAQAQSNRGPRGRKRDFVDAERLVRRQMAGELILSFVPDGEQRLWRIMSRTKYQLRRDRVRLHNQLEAFLEEARIKLSGCVSDLLGISSRRILEALSQGESDLQKLAAMVEANLRATPEQLQDALQGAKHLSEPHRQVLGLFLARLKLIDEQIEALNSNLGQSLRQYNDAVVRLAEMPGLGVDSAQQVIAEVGPTAATFPSPQELCSWVGTCPGKEESAEVSKSNRSPKGNRMMRRLLNQAANAAFKTKGSIFQNLYRRWVPRLGHNKAIWAVANRLCRLVWKILHQGDRYIEYGDRPNPKTVKERAKRMIRELQALGYQVQTAPPAEPLLS

SEQ ID NO: 241886 - protein, 344 aa, unidentified
MKINLLGIDLAKNVFQLCALNQANKILFNRSIRRAHLRSSIARLEPTTIAMEACSSAHYWGRAFEGMGHQVVLLPAHHVTPFVRGGKNDARDALAICEAAQRPGLHPVPIKSIEQQDIQLLHRLRQRQVQHSTALANQMRSLGREYGVIFPAGIHSLIARLPEVLEDGSNELSPVARYALADQHRCLLDVRAAMVTFMHQIEQLAAQHPAYIKLLPLPGIGPMIASAYIAAIGDGRQFKCGRQVSAWLGLVPRQYGTGGKIQLKNMTKNGDRYLRTLMIHGARSVITRGLKNRPELAQWVQPIIDRRGFNRAVVALANKLARISWVIVTTEEPFDMQQAFKPAV

SEQ ID NO: 241887 - protein, 384 aa, unidentified
MFAGIDIASERHVLARLDDAGAAIGKPITISEDREGYDALLAALGRAPVLIVMEATGHYWKNLFVVLTTAGHDVALLNPLIARRFQETNLERTKTDALDATGLARLAFEKRPAPTHLHDEIAETLRELVRHRDRLRQDFDDRVRQLHRLVDLGFPEFTRYVRSLDSMLATCLLAEYPTAHAFARATPRRLARLRYDGRHFVGPELAHSLVEAAKHSVGQHHGPAYKLQARHICQDLDTWRKRLAEIEHDIENLLNTHVTGKLITSIDGIGPQTAARIIAATGDPAHFKSAGAFAAFVGVVPALRQSGKQKGARAGIGNLGHARLRRALWMPVLSAVRLNPWLRAFYLRLRAAGKPPKLALIAAMRKLLHAVYSVAKNRRPFVTT

SEQ ID NO: 241888 - protein, 313 aa, unidentified
MTEHNIGIDISKSHLDAFHLEADDARRFENSARGLRALQKWLAALEVTRIVFEATGPYHRWLETALSGKQPLVKVNPLQARRFAQALGTHAKTDAVDAQCLARMGAALGLEPDDPVSENLRDLRDLQTARVALIKERGRLRNRRLILTDTLLKRHSKARLALLERQLAELDAEIARRIAKDERTARKRDILGSIPGIGPIAAAAILTFMPEIGTLDRKQAGCLAGLVPHTRESGQWKGKAYISSGRKPLRDALYMPALVAMRFNPDLKAKYQQLREAGKPAKVALVALMRKLIETANALIKANRLWAERPACE

SEQ ID NO: 241889 - protein, 252 aa, unidentified
MDKAAQVLKKTGVDVSRTKLDIALDKQTFFSIDNTEKAFIIFLESLDRPLQGLHFVLEATGGYEKKFARFLLSQSIAVSIVNPKRVRDFAKALGRLAKNDKIDAQLIRAYADVADLFLLERKSQADERLKSLILRRKQLLKHQAVEKQYLETSTDKDVILSIQDFLGTLPEQIASLDKTIQTLMEADDRCRARKQLVVAVDGIGERTASTLLVHLPELGQLSHKQISALVGVAPFCNDSGERKGKKMIWGGP

SEQ ID NO: 241890 - protein, 336 aa, unidentified
MSLYSAIDLHSDNNFIVIIDNNDSILFQRRLPNDLGTVLSVLEPYKGGLQGVAVESTFNWYWLVDGLIEAGYTTRLVNTAKVKQYSGLKHTEDRYDAYWLAHLMRLGILPTGYIYPREQRAVRDLLRKRRQLVNHRTIHVLSIQNQYWRNTGIKLKGDYIKRSNDYLGEFEDSNIQLALVSNYEIMQALDEQIGRIETSVKQQIKLRPEYELLLSVDGIGYILALTIMLETGEISRFKEVGNYASYCRCVESKHTSNTKKKGEGNAKNGNKYLAWAYIEAANFAKRFSAKAKRFHQRKKAKTSNVVATKALAHKLARACYYIIRDQVPFDENKTFG

SEQ ID NO: 241891 - protein, 405 aa, unidentified
MFKAASIGSTDVCRIRGTTSGARSHADATAGPQPIVPRLATPVTKHGSSRRRVLTPEQPTEPSLRSKRSHSQERVHAVTDTPPTPDLPVTPKPFAGIDVSKDFLDSACSDSPNTWRVANDPAGIASLVRQFQSLGPACIVIESTGGLERPLLSALLEADLPVALVNPAKVRHLAKGLSIMAKTDAIDARVLALFAQKATPRLLEKRPQIQAELDALVTCRRQLVKTRTEQANRQLTTFSKSAKKALQAVLNILDKQIAKLDKQIRDHIDSNDQWKHLDALIQSAPGAGNVLASTLVANLPELGHTESRQLTALVGVAPFNHDSGRFKGQRTIQGGRVDVRSVLYMATLAAMRCNPVIKNFGDRLIQAGKKRKVAIVACMRKFLILLNTMVRENLTWPQLNVVKNT

SEQ ID NO: 241892 - protein, 339 aa, unidentified
MSSVTVFVGLDYHQSGVQVCIMNVEGRVLLNKKVRNRVSVIARVIQGVGRPAGVAIESCCGAADLGEKLHRSAGWSISLAHPGFVARMKQNPDKTDYADALLLADLLRVGYLPKVWLAPEEIRRLRRTVRYRQQLVDTRRNVKLRIRALLRENRLRCPGKVSAWTKAWLAWVQKSDGLHNEDRWLMNQHLQDVQHLSERIAEVEQRLKKQADGDAVIKKLMSFDSIGLVTAVTMRAEIGRFDRFGSGKQLARFCGLSPRNASSGERQADAGMIRAGNPQLRAVLIQLAHRLVWRHGGRWERLIHNMFRRGKPKNVVIAAVANRYMRWLYHQMQPEQLAT

SEQ ID NO: 241893 - protein, 415 aa, unidentified
MHVQLPADRQVTVGVDTHADQHVGAALDPLGRLLGTQAVPSTAAGAAALLAWARRFGAVERVGIEGTGSYGAGLSRWLRARGVVVVEVARPKRPARRGRGKSDPVDAEAAARAVQAGTATARPKAGTGPIESIRALQAARRSALKARTQAANQLRALVVTAPDDLRARLRRLGLARLVATAAAFRPGAPSTPSAATKLALKSIAARHRRLSAEVAALDAHLGRLVAAAAPDLVALKGVGTDTAATLLVTAGDNPDRLRSEASFAHLCGVAPIPASSGKTVRHRLNRGGDRQANRALHLLAVRRLRWDPATVAYAARRRAEGLSKPEILRCLKRYIARQLYPLLAGHAALGPATLGQGGPRSGPPATPLSGGAAVTRQGRSVAEDPAAGGVDGRRGRSHRVPTPPAPAPRPPIHHP

SEQ ID NO: 241894 - protein, 338 aa, unidentified
MVYGAIDLHMRASQIRIIDHAGVVQRDQRVPTSRARLTQAFAGHGPMRILLETGTESEWVAQALEAAGHEVVVADPNYAPMYGELTRKVKTDRRDVTALAEANRRGWYRAAHRTSAAQRETKQILRSRRLLVQMRTAAVSLVRALLRQDGYRLPSGSCETVPQRVERLAVSGELRGTLAPLCRQIATLTTELRALDGRLQTRVADDRVVTRLQSVPGVGVIVATTYRAFIDRHERFGHAGQVSAAIGLVPREDSSAERRHRGHITKAGPRELRSLLIQAAWVCWRTPRSAALRAWVDRLAARRGKRIAVVALARRLSRILFAIWRDGSTFEAGTLATA

SEQ ID NO: 241895 - protein, 331 aa, unidentified
MDHCAIDLGGRKSQVCVRSPDGRFLFEGPYDTRSLPEFLRLLPQSRVIVETAAEAFRVADAAKEAGHEVRVVPATLVRSLGVGARKTKTDRRDARTLSEVSCRIDLPSVHIPSARSREWKAICGMHDALITARTKLINNLRGWMRGQGLRIGKGKAETFAERVAQIESLPDYVTSQVQALAALTEKIRGSDKRIEALAKDELCQRLMTVPGIGPSSAVRFVAAIDEIARFDSAHKVESYLGLVPGESSSSERQQRLSITKAGPSSVRWVLGQAAWSLQGRCQDPAARPLQLWAAEIARKRGARIATIALARKLAGILYALWRDGTKYEQRP

SEQ ID NO: 241896 - protein, 403 aa, unidentified
MISVGVDVSKGKSTICILKPYGEVIMSPRDYEHTQSDLKKLADQLDGFEEEVHVIMEATGNYHFPIATYLKKKDYDVRIINPLEMKRYRCQGIRNPKTDSIDATMIAQYGIDSWFRPFHDCVENNERIELKALGMQYFKTMKTRQDRCLVLESVIDRTLPGIGGILNDYDKHTGKDKKSDFVYDFYHADKITVYSENRFCDRYASWSKKKGYRYREKEARQLYFIAKDSIPTLPPSENTKLIVQDAVKILREVDASLYDILTRMNEIAKGLPEYATVMEMKGVGISIGPRLIAEIGDPRRFHNAKALIAFAGIDAPPYQSGKFMGTERHMSKRGSRVMRKIGYELIDTINKHQKLYAGDPVCDYFLTKRAEGKKYRVAMFAAYNKFLRIYHSKVSSVLNERDI

SEQ ID NO: 241897 - protein, 392 aa, unidentified
MEPSYQKKRFSTFNNSILHFKEWLVKNQCRDVCMESTGKYWVPVFNLLENEINVTIANPKWVKAVKGNKDDTKDSKWIGDLFRLGLVPGSYIPCKPIRILREFTRYRYKLTSCRTSEKNRYQNALTVCNVALDSVVSDIFGKLATSVIDYLIEQSDNSINHEEIASRLLRSLKKKSDSVIESIEGYQMTDSQKYRMRLVRAHMDYITSTINDIDTMLDSLIAPYENAVQLLCTIPGVDRNSAITVISEIGTDMAPFSNSKRLCCWAGLTPGNNESAGKKKSVRIARAGVYLKPALVQVAHAAVKSDKSPYYKQKYERIMKRRGKKRAIIAIARMILTAIYQMLSTGETWNPTDLFKIDMPEPMKEKQKEKAIKQAMKLLIREGKISKSQLAS

SEQ ID NO: 241898 - protein, 341 aa, unidentified
MYSIKAIGIDLAKLVFSIHGVDKYDKCKLRKTVKRNNLLAEIAKYPPCIIGMEACSGAHYWAREFTKLGHDVRIMASKFVIPYRQNEKNDANDAEAICEAVTRPKTRFVSIKSEEQQAVLCLHRIRQGAIKDRTALINRLRGLLAEFGIIMPKGRYPAQKAITGILEDAENNLPFLARELLHDLWQSIQHLNQEILKHDRKLYQLTNQMKDAKRLMTIPGIGEITATAVVATVNDAKHFDTSRSFAAWIGLVPRQYTTGGQVKLGRISKRGEKHIRTSLIHGARAVIANCKHKTDKTSLWVKELVERRGFKRATVALAAKNARLIWALLHSDKEYQIDYVK

SEQ ID NO: 241899 - protein, 310 aa, unidentified
MRYVGIDVSKDRLDVHVLPEGTALAVARDGKGLAELVERLSALEPERIAIEATGGFETMAAAALAGARLPLVIVNPAQVRHFAQAVGQRAKTDPIDAAMIARFVEATKPKLRPLADEAAQLLADLVARRRQIIEMIVAERNREKRAQVKRIKKSIARLIGALEKELAEIDAEIDESVRGSPAWREKEDLLVSVPGVGPTTARTLIADMPELGTLDNKRIGSLGGLAPFTRQSGQWKGKAMIGGGRASVRAALFVCAMAAVRHNPVLKAFRDRKVAEGKPKKLVLIAVARKLLTILNAILRDKQPWRPQIA

SEQ ID NO: 241900 - protein, 411 aa, unidentified
METIVERPGALDVHKAQVTACVRTPGEGGKREAHFAEFATTVAGLLTLHDWLEAHGVTQVTMEATGVYWKPVWAILEDDFELLLVNARHVKQVPGRKTDMSDAAWLCQLAEAGLLRASFVPPKPIRALRNLTRYRKTQIQERAREANRLHKALEDTGIKLDCVATDILGKSGRAMLDALVNGTTDPEVLADLARGRLRAKIPALKEALEGRFDRMHALWIGAILSHIDFLDEQIASLTEAIAEQIAPFEKAVELLCTITGVQRRTAECIIAEIGVDMSIFPSAKELASWAGQCPGNHQSAGKRRSGKTRNGSKWLDWALEEAALAATRSKDTYLAAQYARLRPRRGHKKALSAVKHSIIVAVWHMLSTGELYNDLGGDYFARRDPEKTTKRLVAQLERLGHSVTLTDAIAA

SEQ ID NO: 241901 - protein, 335 aa, unidentified
MQVYGIDLSKEKFDVNFINEKGKEKNQEVKNAVASISKFLSSVSGDSILCAEYTGAYGDLLVYLCNQMNIPIALVSGYTIKHSLGLLKGKSDPLDSKRIREYGERFRDKLEYAEYSEEIITELKQLYTLRHQLVKQRKSLRTLDKGRGHLPMQSISVHNHISTVLDELDKEIAAIEQEIEMLIRSDQEMNENYELVTGIKGIGPVITTDLIIKTGNFKTIDTHRKAASYAGVCPFPNTSGKMVGKSKTSSFADKKLKSLLYMGAKAAVKHNKEYKLYYQKKELEGKPHFLIMNNVANKLLRTVYSVVKTKIPYDQDHVCLDPRERKINSSTKKVA

SEQ ID NO: 241902 - protein, 457 aa, unidentified
MRKKNKRTAGVEEAHPFRGMSRIHPHAAGVDIGAIEIIGCVAGDENTQIVKAFGNYTVDLQALAQWMKSYHIKTVAMESTGVYWIPLFEELERQGFECLLISSRSLRRVAGRKSDISDAQWIQTLHTYGLLEGSFRPQGDLVALRTLLRHRSQLVEHRSPHIQHMQKALLQMNVQLSQAVTDITGMTGQKIIRAILAGVRDPQTLAAMREPGCKKSAEEIGKALTGTWREEHLFVLKQAVLLYDFYTQQIQSCDEEIERLYGLTRPDWATGDVAPLTKRKKNSHSKNLPHHPEEIRKHLKRISGVDLSVVDGFGVSLAQTVIMEVGTDMTKFPDEKHFCSWLGLAPKHEISGGKVLKNNTLKTKNRAGQAFRMAAQSVKQAECVFGVFYRRLRARLGPAQATVATAHAIARVVYRMLKYQVEYEPLNVNEYQRQYEAQQIKYIKKRAAKFGFQLVPT

SEQ ID NO: 241903 - protein, 350 aa, unidentified
MTEAYDGRQIVGVDLHRRRSVLVRMTEDGRRLETARITNSAAELRREIAKAGECPKVVLEATYGWYWAADALTAAGAQVHLAHPLGVKAFSYRRVKNDEKDAGDLADLLRMGRLPEAWIAPPEVRELRELTRYRIKLVRLRASGKDQVHAVLAKLGIPVTCTDVFGAWGSTWLDELRLPQPYAGKMASLRQLIGWLSAEISLLDTVIADLLEHHQAYHALQRLPGIGPVLAAVIAAEIGDITRFPSPARLCSWAGLTPRHRESDLKVARGHITKQGSPILRWAMVEAIQHQPAGSPVRETKDRIIARRGSQAKNIAKTAAARKLLTCVFYAMRDGQARSLAARTAAPDAA

SEQ ID NO: 241904 - protein, 377 aa, unidentified
MKRIKFVGLDVHAETISVAVAEQDGEIRPLGMIANREESIRKLVKKLGPVEELWFCYEAGPTGYVLYWQLTRMGAKCEVVAPTLVPVKAGDRVKTDRRDALKLARNYRAGELTAVWVPDAAHEALRDLVRAREAAKQDELRARHRLSKFLLRHGRRAPMGVKAWTMKYLEWVKREVHFEQMAQEATLLDYLHEVEHGAARIARLDNAITEAVKSAPPQMRAVIEALQALRGIAHVSAVTVVAEVGELSRFARATQLMAYGGIVPSEDSSGERPRRGNITKTGNAHLRRVVVEAAWAYRHRPSVGAKLRKRQAHVSEEIKEISWKAQQRLHQRYRKLLAKGKSKGVVMTAVGRELLGFIWAIGIQAETAQKDPLRRAA

SEQ ID NO: 241905 - protein, 331 aa, unidentified
MNYSHFVGLDVGKKTFDASLMSAAEKELSHKSFDNTPEGIQSLLDWIAGYHLSLSKLLFCAENMGSYVTELSVSSVSMGFSLALVCPLTIKKSIGLQRGKNDRIDAKRIANYAVLHYRKLELYKLPNKDLVRLRGWIIIRDNLVKQKVSNIKLLETFSQMAKLADVTEFISFLEEQLKSIKEKILEVEEDMEQLIAASTSLYTNYLLLRSIKGIGIINAIVLLCVTDNFQRFDNPRKFACYCGVAPFEHTSGISIRGKTQTSPLANKEVKVYLTRAAITAISWDPQMKAYYKRKIAEGKHKASVINAVRAKIIARSFAVIRRQTPFVTLAV

SEQ ID NO: 241906 - protein, 357 aa, unidentified
MSEGSWVGLDVHARSVVAGVLDAGSGELRTVRVPPGYEGTVGWLQSLPCPVRVAYEAGPTGYGLARVCAEAGIACMVAAPSRIRRAAADRVKTDRRDAERLARLLRMGELVAVRVPERHEEAARDLVRAREDARGDLMRARHRLSKLLLRHGLVYDASAWTVAHDAWLRRQRFDSGPLRLAFDECYGTMLHTKTRRDALDQAIVELAATPPFVEIVGRLCCLRGVSTLTAFALTVELGDWTRFRPQSLGPFLGLTPSEDSTGERRRLGAITKTGNTHARRLLVEAAWHQRRPLRPSLTLERRRQGQPAAAQAQADRSARRLHARWQALEGRGKRRTVVAVAVARELAGHCWALATME

SEQ ID NO: 241907 - protein, 326 aa, unidentified
MEKLYAGVDIHKDKYVGCIVDTTGKVIREHTFSPTKEGAESFLSGMPIEEIAIEACGMWRAAFNLFRSLGQNVKLSSAKKTHDIACRKKTDKIDAKILANLLRTGFLPEVYVPSDDMLHLRDLCRHKSNLTRSRVSYQNKIKGRLLTLGKVCPEKLWNKKRIEKLRVLEDHIINTLLSVRESIEKEEKDTLSKIKKISRKKKLTSLLITVPGIAEFGALMILSEIANIKRFKTPKELVMYAGLCPGTFQTGDTEKDVTNNAVNKWLKWILTECSGRASILGGTKFQCHYTKIKKRKNSKVARRSTARKMLTIIWHMLNDEVPYHTS

SEQ ID NO: 241908 - protein, 366 aa, unidentified
MRKPSTPALRRRGKLQGEQLTIGLDLGDRSSFYCVLNGAGEVVLEAKVATNPAAMRQTFEKMPLSRIALETGTHSPWLSRLLTELGHETIVAHARNVRLISESRRKDDRLDAQALARLARIDPKLLSPIQHRSAQSQADLSVIRARYALVRARTALVCAARGLTKSFGERIRGRNPKGFSPATSKALSPPLQVALAPLLSALEAITARIREYDAQIEKLAEESYPETALLKQVKGVGTLIALTYVLTLEDPRRFRKSRDAGCFVGLQPGRRNSGQSEPQMHITREGDSYLRMVLVQGAQHIIGPFGEDSDLRRWGLKLAERGGKRGKRRAIIAVARKLAVLLHHLWISCEAYEPLHNTRKRRLAAA

SEQ ID NO: 241909 - protein, 342 aa, unidentified
MEYFAGIDVSLEQSSICVVDGKGKIVREAKVLSEPEAFVQFFLELDLPLSQIGLEAGPLSQWLHAGMAKAGLPVVLLETRHVKAALSAMIVKTDRRDARGIAQLLRMGWYRPVHCKSLPAQEVRALLAGRKLLQSKLLDVELSIRGLLRGFGLKIGQVSKGRFTARVEELIAGHAMLEQVIGAMLTAREALRAEFNRLHRALLAIARKDVVCQRLMTAQGVGVVTAITYKSAVDDPKRFAKSKAVGAHFGMTQKRYQSGETDINGSISKVGDATVRTALFEAANVLLTRSQRFSSLKRWGLNVAKHRGMKRAKVAVARKLAVILHRMWVDETDFRWGQEQAA

SEQ ID NO: 241910 - protein, 409 aa, unidentified
MELVYRCCAGIDVHKQMLAVCVSTWESGRSRWEKWTTGTTTGELRELARLLQDKGVERVAMESTGVYWMPVWNVLESGGCKLQLVNPEHCKPLRGKKTDLKDGERITELLQHGLLEGSFVPREQIRALRELTRYRTRLAQRQATISNRIQKVLEEANIKLASVASDVLGVSGRAMLRGLLRGDQTPESLAALAKGRLREKTVELAAALDGHPLEHHRFLLERMLEDLEHTEASILAVEQELERHALPFEEELRRLDGIPGVNRTAALSILAEVGDDMGQFPTFKHLVSWAGICPGNHQTGGKRLKGTTRKGNRWLRRCLCEAAWAAKNKKDSYFRAQYARLSARRGHKRAILAVANSLLTAAYFMLSQKTEYRELGAQYFDLRQKESLVKRSIKRLEKLGYKVTLSHAA

SEQ ID NO: 241911 - protein, 315 aa, unidentified
MTSDTYVGIDVAKDTMFVAILPSGENWEDRITEDGLKRLIAKLRPVAPKLVVMEATGGYEAPILEALWKHNIPVAVVNPRMVRSFAKALGRLAKTDKIDATVIAQFAEAIKPRSKLPNYRQEKVLGDLVARRKHILQMIVAEGNRKRRASGEVQKLIEKHIKWLRKAQEEIEKKLETYISKTVEWREKSEILQSVPGIGKIVAYSLMADLPELGNLNRKQIAALVGVAPLNRDSGNMKGKRGCWGGRASIRTALYMATVVAMRFNKTIKTFYERLCQNGKHKKVAINACIRKLLCVLNAMMKNHVRWGEFKPAET

SEQ ID NO: 241912 - protein, 320 aa, unidentified
MMAQNDLVVVGIDVAKDKVDACIRALALRQTFPNTAQGHRKLVGWLRKHDVNKAVMEASGGYERVWAKLLRQAGIEVRIVDPKRVRSFALSAGRLAKNDAIDAEMIAWFAETFSEAPSQTHDAAHEELQTLVKARLGLIDFRMRLESQSEHAALGLVQKAHVHVLKSLANEIAKLEAAISAKIKSTPDFAERAEIIESVPGLAETSSANLVAGMPELGQVSDEIAAALIGVAPYDDDSGKRRGERHIKGGRRWVRNAVYMPCVGAATQNNPVLKAYYQRLIAKGKEPKVALIACMRKLIIILNTMIARRQKWDPSRYVLS

SEQ ID NO: 241913 - protein, 343 aa, unidentified
METFVGLDVSLGETSVCILDKDGTRIFEGKVASEPAPIVRLIRKRAPGVVRVGLESGPTSVWLTHALTAEGLPVVCLDARHAQAVLSVQINKSDRGDARGLAEMIRVGWFKAVQVKSLNAHERKALLIARRQLVDMRVRIDNQLRGILKTFGLVIGKCGRGQIGQRAQELSKGQPGIDGVVASMVAVRDSLLEQIIVCDRAIRRLAKKDDTARRLMTVPGVGPVVALAYISVIDDPKRFNHARDVGAYLGLTPKRYQSGEVDLAGRISKCGDGFARTCLYEAAGVLLTRVERWSPLKAWGVRLMKRIGATKAKVAVARKLAVILHCIWTDGTEFWWTKEAATA

SEQ ID NO: 241914 - protein, 309 aa, unidentified
MTIHHNYIGCDIAKAALDVFDPRSGRLLRIANEEAALGAFLAGLDPAADFVVFEATGPHDRLLRHGLAAAGIAHARLNPLRVRRFAEARGRPAKTDRIDARSLSQMGTALRPAPDQPPCPAQERLAMLARRRDQLVEARARETRQRAAAGDAFVIADIEAAIAHLSARIEALETEIDRQMKSHGDLAHKASLLASAPGIGAVTALTLIAHMPELGTLSPKAAASLAGLAPCNDDSGKRHGRRRIKGGRPRVRRALYMAALGAIRATARFRAFYTALAQRSGSKKAAIIAVARKLIITLNAMMRDKTSFA

SEQ ID NO: 241915 - protein, 357 aa, unidentified
MEKASSQVGKINTQGARFTMTQFSFFVGVDIASASFMACIGIAPWKVTVKPTKFDNNEDGYISFLDWLKANRLLPEQTVVCMEATGVYSEGLSYFLYASGYTVAVEPPLNIQRKFPVNASKTDELDCQYIAEYACRYEDKLSFWKPRAEILEQVKVLLTTRQHFSVQLTGHKNALHAVNRKQVSSDLAKRVHQNMIEQLAKHIKAIDQEIRRLIDSDPTFKQTLLLLLSVPGIGLQLAAHLLIAMQETLDPKVLSAFIGICPIQHESGTSVFSAPTSRHYGPSVLRKLLYLAACSVRTHKKQFQQYFFRKAAEGKHNKLILNNIQNKILKIACAVVRSKQPYIPNYVSVNPLVLKNA

SEQ ID NO: 241916 - protein, 366 aa, unidentified
MKKTSTVRVSGNMIFKGHKLTIGLDLGDRWSFYCVMDEAGQIIVEQKLATTPEAMKQTCGKIPRSLIALETGTHSPWVSRLLTELGHEVIVAHAQKVQLISKSNRKDDRHDARTLARLARIDPELLGPVRHRSAKAQIHLTVIRARAELVSARTALVNAARGLAKSYGERLRKCGTQQVSRELAAELSVELREVLEPLLQEVESLNERIKEYDARMEKIAKESYPQVELLKQVKGVGTQIALTFVLTLEDPHRFPKSREVGCFLGLRPGRRDSGESQPQMHISKEGDPYLRTMLVQGAHYILGPFGQDSDLRRGGLKLAARGGKNAKKRAVIAVARKLAVLLHRLWVGGEVYEPLRNSQKAMRAVA

SEQ ID NO: 241917 - protein, 373 aa, unidentified
MAYQHYWVGLDAGHLETAVCLIDAEGGILFEAICETKSGPIRDMLRRFGVEAAQCLTIEAGNGTQMVRELRSYGFPVQVVDVRKSSKFLAIRRQKTDVHDARGLAELGRLARSMGSQVFVKPMEHQNIRTLINVRRTMLKNRARTDALIQSIFRLYGGNVKLLNGRGALAAEVNDQVRKMRQRGLEIGVNLQPLVDISEALREQISALDRQMRDIASQNPTCRNFQTIPGVGAVIALSFYSAIGDPHRFERSRDVGAYLGLTPTLYQSGATSRRGRISRHGNKLTRMHLITAATVLLCRIEIESRLRTWGLELAQRVGFLKARVAVARKLAVIMLGMWKSGSPFHADGEPSLFLQQEEAGLDPVLISGTQISL

SEQ ID NO: 241918 - protein, 387 aa, unidentified
MHTAAPDVTVTIGVDTHKDLHVAVALDALGRRLGELVVPATAAGYQQLHRWATDQGQVDAFGVEGTGSYGAGLARHLRRTGSRVIEVNRPDRASRHRKGKSDPLDAEAAARAVLAGTATATPKDGDDQVEVIRILKLTRDSAVKAQTQAVNQLKAVLVTAPTELRESLAGLGLVALLERCTALRPGEPTTPLSAAKYALRLLARRVLALRAEAKHLREVLTGLTAAAAPALVELTGVGPDTAAALLLAAGDNPHRLHSEAAFAALCGTSPIPASSGKVTRFRLNRGGNRQANAALHRAVITRMHWHEPTKIYVARRTAEGKTKPEIMRCLERYLARQVYRCLVRQRACQPRRRAISRPPRRSCWCRLTNIGASTPSPSSGPNPPTRS

SEQ ID NO: 241919 - protein, 405 aa, unidentified
MFDTEDVGVFLGLDVGKSTHHGHGLTPAGKKVFDKQLPNSEPKLRAVFDKLTAKFGTVLVIVDQPASIGALPLTVARDAGCQVAYLPGLAMRRIADLYPGEAKTDAKDAAVIADAARTMPHTLRSLEVTDEITAELTVLVGFDQDLAAEATRTSNRIRGLLTQFHPSLERVLGPRLDHQAVTWLLERHGSPAALRKAGRRRLVDLIRPKAPRMAQRLIDEVFDALDEQNVVVPGTGTLDIVIPSLAASLAVVHSQRRALEAQINALLEAHPLSPVLTSMPGVGVRTAAVLLVTVGDGTSFPTAAHLASYAGLAPATKSSGTSIHGEHAPRGGNRQLKRAMFLSAFACMNADPASRAYYDKQRARGKTHTQALLRLARQRISVLFAMLRDGTVYESRTPKDVELAA

SEQ ID NO: 241920 - protein, 366 aa, unidentified
MLQEAELSGQADSENNLGGSSETMYYIGLDVHKKTISYCVKDAAGCVLSEGKINASRRDLDVWVRTLPYPRMIAMEATIFTGWIYDHLLPHAEKVKVAHPLMLRAIAAAKRKNDKIDAAKIADCLRCDFLPECHMASTAIRDRRRILRYRNLVVKQSVQMKNRVSGLLMETGVTYTKSRLHKVGYFADLMANNEEIDDCIRPLLRLSREHIQRAQRLDYALVSSLERDPLLKERLRRLRTVPGVGPITALTWALEIGDYTRFRSIKEVISYCGLCGDENSSADKVMRMPLSKQRNKHIQRVLVEAAKLAPRDSHELAAVRERELERGNANRATLAVARKMVSYLLAVERGQRDFIAAEKFSRTAAA

SEQ ID NO: 241921 - protein, 391 aa, unidentified
MRFAGIDIGAERHVVAVVDEAGGELVKATSFGEEATGYDKLLKLIGPPDQALIAMEATGHYWQNLFAVLAAQGYTIALLNPLRTHRFAGEDLQRAKTDSIDALSIARFAQQKRPAATPLPDPVARELRELVRFRDRLVQDHRDRLRQLHRLVDLVFPELTRHIDLGSERATAILREYPTAAALRSAKVRKLARILTDGRHRVGDELAKELVAAAMTSVGQHQGHAYELQVRCHCEDLDVLRRRIHALDEEIGNLLDKHEVGKLLTTIDGIGPNTAARLIAELDDPARFKSAAALAAYVGVVPATSQSGKRERRHAPLAPTGNGRLRMALWMPTLSAVKHNPWLRQHYQRLVAAGKLRKVALVASMRKLLIAVYTVAKHRKAFVPILSEAAV

SEQ ID NO: 241922 - protein, 344 aa, unidentified
MDYYAGIDVSLEQSSVCVVDEFGKIVRETKVASDPAALAGLLGSLGVRLKRIGLEAGPLSQWLHEGLVAAGFDVALLETRHVKAALSAMVVKTDRKDARGIAQLLRMGWFRQVHCKGSEAQEMRALLVGRKLLQSKMLDVESGIRGLLRGFGLKMGTVSKGRFAARARELVSGHAMLESVVGPMLAAREALGVEFAKLHRAVLAIVRADAVCRRLMTASGVGAVVALTFKSGVDDPERFKSSKLVGAHFGLTPRRYQSGETDIVGGISRAGDAMVRTALYEAAQIILSRAVRFSTLKRWGLDVAKRRGLKRATVALARKLATVLHRMWVDGTEFRWSKDATAAA

SEQ ID NO: 241923 - protein, 337 aa, unidentified
MNRNHEFVLGIDVSKRKLDVALLREGKTRSKVVENTTAGHEQLEAWLHVQGADARNTHVCMESTGPYGELIALRLSDGGWWVSVLNPAQVKGYAQGELLRNKTDRGDAALLARFCERMRPPRWIAPSAQWRQLRVKVDRIEALKQMRQQERNRLEAHQAGRSEELAKSVQEHLDWLDRKIAELQADIDEHIDRHPDLRNDAELMNSITGVGTVTTMKLLGHLGDIRRFHSAKALAAFVGVSPQRRESGTSIRGRSTISRSGNPTIRHALYMPGLVARHHNPILKEFGDRLAARGMAPKAVIGAVMRKLVHLIYAIVKSGHPFEPEFRRGGLAIQDGI

SEQ ID NO: 241924 - protein, 345 aa, unidentified
MHTIIAGIDLAKDEIQVCVSKRNKVQSNQAMTPIEFSSWLATSKLMTVVFEACSTSNYWKQEALKCGHDARLISAKLVSNIRQNQKTDKNDALAVIQAAQLTNISFINGKSREQQELQTLARLRELAVKHKVAMHNQLTALLLEFNIRVSSRNGGLSGVIQDVLEDAENGFSMIFREALQTGWQQLLLSIESIHQYDVYLEKTANQQIECKRLQALEGVGPMNAVNLYISLGCGEMGVFKKGRDASACIGLTPIQHSSGGKVKLGSVGKYIKNNAVRSCLVSGAMAAVNQATRRTAKTKKDLWIQQLAERRGKRCAAVALANKTVRTAFAMLTNGTEYKAELLAA

SEQ ID NO: 241925 - protein, 333 aa, unidentified
MNTESLRLPPLGLDMAKASFTARLVGPTKLHSACFTNEFTGWAQLDGWLAKHHCQQVLAGLEPTGPYAAGLLWHLHCKGHTVCLINARHLKNYGRSLGRKVKTDPTDAALIADYLRANAQHLRPWQPPTQEILMLQGLVRRRQQVLGLLQAERNRTEGVTQPLIKASLQRQIGHLKTEVARLERAIEEHVLGHPKLQHSVRLLCTIPGIGPVVAVAILAEVPALSAFTRARDLAAFAGLTPTVIKSGTSVHRRGRLTKEGSALLRKMLYMAALQAVKRPTNALHRCYQHFIERGKSKMCAIGALMHKLIRIAFGVLKHDQPFVANFAKLQPLT

SEQ ID NO: 241926 - protein, 422 aa, unidentified
MKKIEAKKLKAVNSKTLVVTIDIGKTTPMGYCRCPDRSEVKPFEFSNNRAGFNKLWDCIVKTKQAKGLEEVVVGYESTGSYAEPLIHFLKDKPVRLVQVNPLHTKRLKELQGNSPNKTDKKDPKIIADIIELGHALTVVIPEGAAAELRRLFQARERSMKRRTALFNQLQDLVFISFPEFLQVVKNVKTKSARHLLQHYPTPQDIVGQGVEPLAFTLKRISKGKLGAARAKALYDAAEQSVGIKEGRISVTLEIRAMLAEIAACDSLIKQLEQAMTRHLEEIPYSRLILSMKGIGMVTTAGLIGEVGDFTKFHTQKELLKHAGLDLFEISSGKHIGNKRISKRGRSLLRKLLFFAAINTVRKGGIMHKQYQRHLQKGMKKIKALIAIARKLLGIIFALVRTQNEYQENYQAIMAEQQLKKAA

SEQ ID NO: 241927 - protein, 407 aa, unidentified
MYYLGIDISKKSFTVSVLDQEGEAITKVITFPCTGKGFEKLVDKISSLKLKKSQVVIGIEATGNLWENLYSFLQGYRVIILNPYQTRKYHQVLSKKAKTDKVDSLVIAGLLRSKEALASYVPEEEVQVLRELVRLRHYLQKDKKNYLRKAYNLLNLVFPEYTDLIKSPFKKVSSMILKKYPTAIHMARARRTDLVKMARRIQGNNYSSELAEKLIQIAKESIYSGKASEVRGMALRILIDEIESLRNKIKEIEDKIEEILSSNEPSSPQKRLLGIPGVGPKTVAAFLGEVGGDVSRFSSANKLIGFIGWHPKISESGESKNLHPKMSKRGPSALRASLYMAAVASLKHNPYLRSLYHRKISEGKESKQALICVGKKILSIMYSMLKYEEDYDPQRIFFQLEKERILI

SEQ ID NO: 241928 - protein, 350 aa, unidentified
MMHAGLDLSRKKIDVCLLSDEGEVAGEFAVPADADGLRGLNRRVMSLGLPVRAVIESMTGARFVHDQLEQLGWDVLIADAQKVKGLAPLACKTDKIDARVLAVLSQRDLIPEIWLPDPRVRQEREQARFRMHLVKHKSMLKARIHSTLMTFGRPCTVTDLFGVAGRNMLAGLDIPQPWRGTVDASVLLIDDLEQQIALINTQLRASGADHPYVPLLMSAPGIGWVLAFTIAAEIGEIERFSSPTKLVGYTGLCPRVYQSGEKDRRGPLTKAGPRYLRWAMLEATMHALRHPAYAERYQRTKRRLGRQRGAKVAQIDIARKLTEALWHMLTKQQPFNPTPAAGGAAFRLAA

SEQ ID NO: 241929 - protein, 382 aa, unidentified
MEITTVGIDLAKNVFQVHAISGTGEVLARRALRRAQVIPFFRRLSPCLVGMEACGTSHHWARELTSLGHTVRLMPPAYVKPYVKRGKTDAADAEAICEALTRRTMRFVPVKSVEQQAALALHRTRDLLVRQRTQLINMIRGLLAEFGIDIPKGITHALAFVRRAVAGGAHEVLDLAAKVISALAEQAIEVQNRIRQLERDLLVWYRSNDLARRIATVPGVGLLGASALAATVTDPTQFRSGRQFAAWLGLTPLNNSSGGKERLGRISKMGDQYLRRLLVTGMTSLVRRNKHHPDAADPRVNALLTRKPIRLVTVALANRAARAIWAIMVRGEIYRMPAPSVAAAEDQWQISALHARRRLRGPCDDGAPVRLGMRTTRLTSRA

SEQ ID NO: 241930 - protein, 367 aa, unidentified
MLGLDVGKSSHWACLIDRGGKVLASAPVRNREGALDALFSSAPAGTLVVVDQFRNIGSLAVRRARAAGLEVAYLPGLAASRAAGLFAGEAKTDERDAEVIARTALGVPDSLSGVPGRGEALEAARALSSQRDHVVACATRDKNRLRAVLLESCPALEAAVDLSDRRWLELLAGFGGAWGIARSGAGGPRAEAAGEAAAASTAPPPALIEAENRQVRFLAARISEALDEAGALEAETAGLLEGDETYACLLTVPGIGPRTAAQLAVSVDIARFPDHDHLASYCGIAPRVRSSGTSVRSVRASRRGDARLKSLLIFSCNSLVRSSGRYGEYYRACRARGMGHGRALKAVARKRLRAIYAVMRDRVPYRE

SEQ ID NO: 241931 - protein, 349 aa, unidentified
MNSTASVIGLDIAKNVFVAVGRDMRGKVVWKKTLARDEVLPSFANLPPTAVGIEACSGSHYWARQLKALGHEAKLIAAQHTRAYVTGNKNDHNDAAAIAEARSRAATKYVAINTQAQQDLQMLHRARQALVDEKKAMICRIRSFAHEYGKIFPRGVAKFRAGLTAWLADEGNGLSVMALETLRDLVAQLDDKERRLQSYDRRVAEAAQADTGSKRLLAAPGIGKVIATAIVATVAEPRDFNNGRDFSANLGLVPREHSSGGKQRLYGITKRGDRYLRTLLIHGARSALRCADGKDDRILRWALKLSERRGLNVAAVALANKLARIAWAMLAHGRDYQPNYVAAGRRAAR

SEQ ID NO: 241932 - protein, 367 aa, unidentified
MKKVSTVATKQRKKFSQPRLTIGLDLGDRNSCYCVLDEAGQIQLEQRVRTTAKALLEVFGAMPRSRIALETGTHSPWISRLLTELGHEVIVANARKVRLIGESRKKDDRLDAQTLARLARIDPALLSPVKHRSAQAQADLTVIRARAGLVRARTGLVNTARGVAKSYGERLRGCNVRNMNPEKADGLSPELQRALEPLLSAIEELSERIAEYNDRIEVLAQESYPQVALLKQIKGVGTLIALTFLLTLEDPHRFRKSRDVGCYLGLQPGRRNSGQSEPQMHISKEGDPYLRTLLVQGAQHILGPFGIDCDLRRWGLKLAERGGRTAKKRAIVATARKLAVLLHHLWVSGEVYEPLHNSSRIPVADAA

SEQ ID NO: 241933 - protein, 401 aa, unidentified
MKRLSGGIDVGSESHHITILDEEDNVLYNKKISHKINEFAENINLFKQMEKRERGKISFALEGKNGYSAPFDQLLIDQGFTLYNVDNFKLKRFREAFAGEWRDDQRDSLMLSKMLKLKEYINSPREKVFIEIEKPSPLTESLKLLSRHQQTLIDEKIRMMNRLRKKLLEVCPQILELAKLKNKKTIAILAKYPDFSKYKRITLKSLMKIKGIGKRQAPFLLKRLNHTEYMPGLTDIYKTIILSYAQRILKLQKEISDIDKSLDEIGEKNKEVNHLKTIPGVATKLASRLIGEIGDINRFPSEKQLAIYCGVACVNNDSGKITKAKAVYKANKICKQTLITMAGCSIRFSPQCKAYYLKKRAEGKTHNHTLRCLARQLIKVIYKMLTEDRDYIIKKELKKVA

SEQ ID NO: 241934 - protein, 409 aa, unidentified
MDVIVERPAALDVHKEQVTACVRVPGPDGTRAQEVAAFSTTVRGLLTLRDWLAAHGVTQVAMEATGVYWKPVWAVLEDDFELVLVNARHVKQVPGRKTDVSDAAWLCQLLEAGLLRASFVPPKPIRALRSFTRYRKAQIAERQREANRLHKALEDTGIKLDCVASDILGVSGRAMLDALVAGTTDPELLAELARGRLRTKIPALREALEGRFDQLHAVLIGAILAHLDFLDEQIERLSEAIEEQLGPFAPAVELLRSIPGVDTRTAQTIIAEIGTDMRIFPSDRQLASWAGQCPGNDQSAGKRRSGRTRKGSKWLDQALKEAATAAIRTRDSYLQAQYQRLRPRIGHGRALGAVKHTILCACWHMLSTGELYRDLGGDYFRRRDPERQTRRLVAQLEALGHTVSLQEAA

SEQ ID NO: 241935 - protein, 458 aa, unidentified
MSKRNGLSRGDARRNARLIRMRGIVRHDRAILAIDLADTKQVLALCDHDSRVLARRTVRGRAWQLEEALRWGRATAIEHGFAGIVVGCEPTGHRWRIVAELCDRLGIDLVCVQPLLVGRAREQEDLTRDKSDPKDAVLIGRLVGQLRCYLPERTDQVWARLRQLGARRQALTTSASASRQQLRDLLECVWPAVLEAAAEPLDSATWRAAVQVALDRTGATGELAALGQVGYARFARQVARALARWGARRRCLRIVRAVWIAATSPTALATGVDTQRPGALERARLTLEDWHHTLGQLADVEQRMTGVLDQLDLTSLVCSIPGLSAVGAAAILAETGDLARFDSPRALVKHAGLCPRANESGAFAGTTRISGRGRPALRLAAWRATWGALAHNPVLAARHAHLTTRDHNQLTTAQARTALAAALLRWLWVVVTTRTPWQATIAAGQAAPAKKGVTAPAA

SEQ ID NO: 241936 - protein, 394 aa, unidentified
MKLVGIDVGKNSHHFCVMDKETGEFNVTPSSFSNNKEGFDFLINSLKPYSKKSILLGMEDTGHYHVALLKFLLSNGYTVALINPKTTDLTRKMEGAITKNDKLDTITICDVLDTPERKKQYRITKVDRFDLYEQRQLTRHHHNLKEELNIYCNRLQKSINLVFPEFNTLFGSKYGVVYMNLLKTFGSAEAIASTDIRTIRKCFEIKGRGGRISLTAEKLKECAKNSIGISSEVETIQIKHLVSQIMLIKEQIAEIDKKIEEFSIKNNSPILSIPGISHFSGTSILAELGDIGNYSKPSRIIKFAGVAPYHYESSQYNAQHTAITKKGSKYLRKTLYQVILPVINNNPVFKKYYRLKISQGKGHRCAQGHCIRKLLRVIYHLLETGQSFDPALLR

SEQ ID NO: 241937 - protein, 386 aa, unidentified
MMTMTRTEESTAVAAATAPTLLLAFELGERSWKLGFTTGLGQQPRIRQISARATDRVEEEIARAKARFRLPADAPVLSCYEAGREGFWLHRWLGAHGVSNHVIESSSIEVNRRARRAKTDRLDLGGLLNLLARHHQGDGRVWRIVRVPSVAEEDARQLHRTRETVQQDRNRLINRLKGLLTTQGLKLPVDATFPTQLETAQLWDGTPIPAGLNARLQRGWAQLEFLTRALTELDAERDALTADPQTAMGRYVEALPTLRGIGPIGTWTLATEIFGWRDIKNRRELAGLVGLVPAPYQSGESHHDQGITRAGNKHVRRLMVQLAWSWVRYQPDSALTKWYEGKFGHGSRRLRRIGIVALARKLLIALWHYVEHGEVPEGAIVKGQAA

SEQ ID NO: 241938 - protein, 364 aa, unidentified
MISVGVDVHKKRCRACLKDEKGRLIEELSFQRDAEGIVDFRNLLQSYGEAKIVLESTGNLWIPVYDNLTENPENRVILANPRKTRIIAEAKIKNDKLDARILADLVRADLVAASYVPEEPIRQQRALLRQRRTLVQGTVAIKNRIHNQLDRHNLSHEYSDLFGKQGREWLRSLQLPSIEQTILNVEMKQLESLEDGIGELTEKIAIEASMEPRAKLLMGFTGIDYYSAMLLLAEIGDIKRFPSPKKLVAYAGLAPGIRSSADKTIRGHITKEGNKYLRWILIEAAQHASRFDPKLQSFYLRVSARRGRQKAIVAVARKLLVSIYHVLNRNETYHGQRPELLERKIRNLQRTVESSLQDARDNQT

SEQ ID NO: 241939 - protein, 355 aa, unidentified
MKKTKQELKPGEAVFVGIDLHKIKWHVTARTAEIELFCGSIPGNWEALRRILERYRGHQIQAVYEAGYFGFWLHDHFEDYGAECIVTPPSLIPQEYGNRVKTDRRDSRKLAYFLAKGMLKRVWVPTQEERYHRQVIRRRRQFVGDRIRTQSRIKAELRLYGIDLPEPTGRWTQIYLGNLGRIRFKNRWMQESFKRLLELYHFLDKQIVKQTKLLRELSETELYRERVQILLTTPGIGMLGAMELLLELQDVTRFRRADQLAAYVGLTPSQYSSADKIRMGRITCVGKNTLRAMLVQASWALIRKDGVMREKYEKLKARSGAKRAIVAIARTLLIRMRRLLLDKNPYVIGVIASTN

SEQ ID NO: 241940 - protein, 355 aa, unidentified
MSSTKYIGMDVHKESISIAVRNGTGKIVMECLLETKASTILQFFDGLRGDVHVTFEEGTWAAWLYDLLKPRVAKLVVCDPRRNALLQEGNQNDRVDARKLAELLHNNQLRSVYHGDHGLRTLKELVRSYLTITQDLSRVMTRVKAIYRSWAIPCSGKQVYASRHRAEWMAKISEPGVRRRAEFYYQQLDALRLLRQEIRRELLAESKKHKAWKLVCQIPSIGPIRAAILLGILQTPYRFRTKRPLWTYGGVGIETHSSADHGVVDGQLERKKKQVEIRGLNRNYNHDLKNLFKGAAIIATTKPGPFEEFYTTLLAKGMRPEMARLTLARKIATIVLIVWKRGVCFDAQHLKPQAA

SEQ ID NO: 241941 - protein, 336 aa, unidentified
MTLYCGIDLHSNNHVVCVIDDKDQRVLEKKLDNDPELALRTLSRYKKQLKAIAIESTFNWYWLADALMEAGYQVELVNTARVVQYSGLKRTNDRYDAFHLAHLMRLGILPTGYIYPKAERGLRDLLRKRIQLVQDRSSHLIRFKFQVQMHTGQSIRSDRIKAQKFQLPVIGDSNVQMALQSHLAMIRALTGQIKILEKSILSQIEPVTCFNWLKTAPGIGDILAEVILLETGDITRFKAPGNFASYCRCVDSRRESNGKKKGENNRKNGNRYLAWAFIEAANFAIRHSEKAKRFYLKKEKATNAIVARKALAHKLARGCYWVMRKQQAFNQDRVFG

SEQ ID NO: 241942 - protein, 430 aa, unidentified
MNTIRPVAGVDVAKAFSEFCLLAPDNSVLDTLHIRHDVREDIEKAVNLLQKSEKDFGCSPIVIMESTGHYHKILFHALAQREIDVIIVNPIQSDSIKNLDVRKVKNDKWDAKRLALLYRIKGESLRTAVLASVNVAALKDLVRQYYDIQDDLTAHKLRLTGLVDRVLLGFEKDFFEITSMTGLAVLKAYPSAKAILRARPATIINLIAKTSRKGQKRAEAKYAFLRQIAQTMLDLGDSAEHLTLIIRAEISLIESLQAVLATIMQSMQSIVEQDRQTEHKSLAKAIDLLISIPGIGFQTAVTMLAEFGDVTAFQSAQSLTAYCGLDPSVKQSGSFKGTRNKISKRGPRLLRRALFHVASANVRNSRNDKAVNPHMQAFYKSKCQSKPKMVALVAVMHKMLFIIFAVLRDQKPFEFRDPIEHAARLAAKVA

SEQ ID NO: 241943 - protein, 315 aa, unidentified
MAMPVSVTKPIVGVDVAKNELVIYQAEFDLLESIPNTKAAIKQWLKALPETVAIAIESTNIYHLEFADLAYEAGCTIYMVGGYELSHYRKGVSVRAKTDALDARLLARYLKNEGDDLHPWTPPSPLYRQLLSLFRRRAALVQARVGLVQSWANEPLLKAAFAEQVKSMQQLEALVEKTIKDHLKEAGLLGQLKRCVKVEGIGFLTGARLIAAFQRGDFRNADAFIAFLGMDLRVSKSGQKDGRRSLTKRGDPEARRLLHNAAMSASRTPAWKGFYEAQRARGFSTTQALVILARKLARVVFALLKGQNEYQPKAG

SEQ ID NO: 241944 - protein, 431 aa, unidentified
MEQKRHPYLSVGIDIGADFSLMAIALPTQEIIGKPYKILHSNNRSVQGAVERILSMEQAYELPARVYMESTGIYHLPLYHRLKNAGLDVYVLNPLVTHANQNINIRNIHNDKLDARRIALLGLRPDLKTSIVPADDVAAVKALLREYHAMKKETSMYICRLKNQLRQIFPQYLPLFSKVNGKASLEVLSHCPSPSAVLSAGADALAKLIQEASGKGSAMAEKKAEAILSAARESLSFGHGNSGITFLIGHYVEMIRILDEKTAAILKQIKRCVQEQPDTLLARQTRLLESIPGAGFLTAVTIVCEIGDFRAFHRPKQLYSYFGLDPVVRQSGNSAGANLRISKRGSPYARRCFYILALQSVSLRKNGEPKNHVLRTYYLEKCKSKAKMTALGAIMHKLCNIVFAVLRDERPFVLISPQEHRQNYLSLPKAA

SEQ ID NO: 241945 - protein, 386 aa, unidentified
MICVGIDVGKSIHYACVSNDRQTVLRQPFAVQNDEAGFAKLYAAIRKHPKEKVVVGLEATSFYGENLITFLAGHGYKVALINPIQTSAMRKGSIRNAKNDKIDSRGLCKFLATEEYRLLQPGELQMLELRGLCRFRQTLRKSCTRLKTQLTSYLDLSFPEFHQAFSNIHGKGAYAALMEYPTAKSMTKANVVKLSGVLQKASRGRLGRARADDLKLLAKRSVASDSRDMSLQIQMTIPQIRMIEQQVKEVEKQIEVIYCELDSVIRTVPGIGTITGSIILSEIGDINRFSNPGQLIAFAGLDPTVRQSGKFRATSTRMSKRGSSLLRYALVNAAWHVSEHSDTFRAYYQEKRTQKGGHYKTLGHVAGKLCRILFKMLKDDMAFNLP

SEQ ID NO: 241946 - protein, 407 aa, unidentified
MEILYPRCAGLDVHKDSVVACVRCVSSPVHQEVRSFHTTTSGLLSLADWLNSHACTHVAMEATGVYWKPVWHILEGDFELVLANAAHIKNVPGRKTDVNDATWIADLLAHGLIRSSFVPPAAIQELRDLTRTRKQLVREVSQHSLRIQKILEDANLKLGSVLSDVLGRSGLAMLEAIIKGEADPEKLADLARGTARKKRAELIEALRGRVTQHHRTMLKFHLDVIQAIQKTLQELDAAVGKALTPICERAQLLTTMPGISDIAAQVLVAEIGVDMTRFPDQGHLISWAGLCPRNDESAGKRRSTRVRKGAPWLKTTLVTAAWAAVRTKNSYLQAQFLRIKSRRGAKKAILAVAASMLTAVFFMLRDGVAYKDLGADHFSRHDKTKTIQRLLRRLSDLGCNVATAQPA

SEQ ID NO: 241947 - protein, 342 aa, unidentified
MEAKRYIGIDLHRDCFTACLRLENGREYLKEWKLEDMAKFTAKLRPTDQVAVEVTGNTRLFHDAVAPHVERVVAVNPSQFKVITHSVKKTDPNDARNLALYLAKDLLPEVRMKDKTQAQIASLTQTRDTMVKLRTALKNKVNNVCSAHGVNLNKESLASEKGLRAVLEMQFDPLVNLELKIIVEQIRSLNQSIAELEQTIGQEGQKLEGHKNLTSIKGIGGLSAGILLSIIGDIGDFSDEGKLAAYFGIVPRISNSNETEHSGRITKRGTKLGRTTLVQCALIAQRYSPYLKAYYEKKKSRGTGKAIIALARKFLGIIYRTLKNKWLFEDFPNFVLAEAATA

SEQ ID NO: 241948 - protein, 462 aa, unidentified
MSRLSNRRASSEVIIRPFDGLARIHSDAAGMDIGAHEIMVCVPGPDNTQMVRAFGTYTVDLYAIANWLQQSGVRTVAMESTGVYWIPLFETLEVRGLQCCLISATAIKRFPGRKSDVLDCQWIQTLHSYGLLADSFRTEADLVALRTLLRHRDKLIAHRSPHILHMQKSLLQMNIQLSQVLSDVTGVTGQLIIRAIVAGERDPYTLAALRNYRCKKGEDEIAKALTGTWRVEHLFVLQQSLEFFDFYTQQIEACDAEIEKTYAAIRPDWGDPDDLTPLPPKKAKSHSSNAPKGVQVRLHLKRIAGVDIIAVHGISVSLAQTIIAEIGTDMSKFPTEKNFCSWLGLAPHNEITGGKVIRSYTLKTHNRAGQAFRQAAASVIRADCAFGAFYRRLKSRLGPAQAVVATAHKIARTVYHMLKFQLEYQTISAGEYENQFREREIRYLHRKAAKLGFSLLPSTVNV

SEQ ID NO: 241949 - protein, 432 aa, unidentified
MATTKKSNVVDIVYPVCCGMDIHKSFLVACVAVTDERSHTEHFIKRFSTFTKGLRELVAWLGKFGCQDVCMESAGKYWVPIFNILESAGLRVCLTHPKYVKAIKGKKTDKKDAKWIAELFKCDLVRSSFIPPADIRQLRDLCRYYVKLTCINISEKNRAQNCLTMCNFKLDDVFSDVFGLSSTRIIDALLRHGNADFDIAPLLDGRCHATVEDVADALDGELIPAQAEKLKLIRQHMDAIEFSKHLLESHILGLAEKYMPQIELLLTVPGISDIMTAIRILAEIGADMSVFETSKQLCSWAGLTPQNQESAGKKKTTRIGRAGQYLKPLLVQIALAVSKSDKHVEIKSKFQSLKKRRGGKKATIAIARRLLTAIFHMLSKDEAYNADLYHKADKPPKERVLTSEQALDFARRHGYMIEGDAPLCPDDPVAAA

SEQ ID NO: 241950 - protein, 371 aa, unidentified
MKSIAYVGLDVHPETSTICILGEKSPLPIELVRVDTDRSKVIAALRPYAAKYDLHCCYEASSVGYVIHRWLKDVKIECAVIAPSLIPRRAGRRVKTDRIDALKLASLYRAGELTSVRVPTQEEESDRRLVRMRDQISKDVTETKVHINQFLKELGLVYRDGTRWTQRHWAWLGQQSFTGSDKMVWDEYMAMLAYKMARLAEMDKAIAKLASTPKYAKDVRVLCCLRGVGILTAMVLLTEVVDFSRFPSAAKLMAYFGVVPSESSSGGTQRQGAITKTGNTHCRRVLIEAAHKYTRKPCLSKELRGRQEGQTAEVVAHCILAQHRLHKKYWSIASRKAPQKATVAVARELAGFIWAIMTGHCSPRESQAVAA

SEQ ID NO: 241951 - protein, 373 aa, unidentified
MGGDSMSGLKGSFDGFVGIDVSKDKFDACGITGDETKLFQFSTTMDRKGFEKLKGHLAAVSISSVLIGMESTASYHVNLFSYLVSEGYRVILINPLLISNYVKMQLRKTKTDKKDAVVIAQFLLTNGDTLIQRATPSLISDLRDLSRQRESLVDEMTSLKIEIKQLLNITFPELEHMAGIFTKSILKLLQQYPSAFALRDADLGQLSQMLIADSYGHKREAFAAALIKAARSSIGSKSFAKEMILKQKIALLLHIEDALQEITGMFIEMSRKLMDEEIDLMTSLKGIGEKAAANFLIEMGGDINQFERSGKIIAMAGLDPAVYQSGKHEGKGRITKRGNRHLRKIIWLMTTKVIQYTDTFSVYYLKRRKEGLP

SEQ ID NO: 241952 - protein, 411 aa, unidentified
MKRVYDNCCGIDVHKKLIVACFKQGSEQEVREFGATTRELLELCRWLKDGDCEMVAMESTASFWKPLYNILEASELDAIIVNARHMKNVPGRKTDVNDAEWIADLLQHGLLQASYIPDKDQRELRELVRYRKSLVGERTRELNRLQKMLEGANIKLSGTVSNINGKSARAILEHVLTGESFDDAKYDEMYENNVISHRLKASKEEIIDDLNGVMSALQRRMMKELLIHLDELNIHIRNLDDEINNFMKPEAKTASVALQEMPGIGETSAQAILAVIGTDMSRFPTAGHLASWAGLCPGNNESAGKRKTGRTTKGNCLLRETLITCAHAAILKKDTYFYAQFQRISAHRGKKRAYVAVAHSMLTAIYHMLKDGVVFKDLGADYYNQLNRERKINACLRKLERLGYRAEIAAT

SEQ ID NO: 241953 - protein, 344 aa, unidentified
MEDTTIAVDLAKCVFEIAVSRRPGKVAERHRLSRDAFLPFFATRPSSTVLMEACGSAHHWGRQLQDLGHRVLLLPPHQTRPYVTGNKTDRTNAKGLLEAERNEEIRPVPVKSVDQQALCALHRLRSAWLAARTARINTVRGLLREFGVTIPLGAGRVASILRQLLEEADSGIPDAIRPALDEARTEILELERRMRSVELQLRALARQIPEIRKLLTIPGIGLITATALVPFIGDVRRFPSARHFASYLGLTPRERSSGLRRRLGAISKKGDAYLRTLLTHGARSVLWRARSLETPDALRAWALRLERLRGHNKATIALANKLARIVWAVWRRDATFTEKRPIEA

SEQ ID NO: 241954 - protein, 343 aa, unidentified
MIYVGVDLHLRFCYMTVLDAKGKVLRQGRVQNTDSQLQQFFADVKNSLSENEGIAVAVEACGFWCAFVDCVEPLVERVVLVHPAKVKAIAHAKLKNDRVDSATLAQLLRANLLPEAWKADRTTRDLREVLRMRVALGQDRTRYKNQIHAVLHLHGQQTAVSDLFGRQGRAWLKALVVRPAARQAIDTSLRMIDQLNGELRVLDRQLQKSAQQDADARCLLSIPGIGAFSAMVLKAEIGDIRRFRDKKSLYNYAGLVPVIRQSADHLRRGGITRSGSPLLRWVMSEAAVTATRHCPAARAWFTRLAQRKHPHVARTALARKLLGAVWALWTQGVCFDERIFAAM

SEQ ID NO: 241955 - protein, 366 aa, unidentified
MQKSSTMRATGKSIFNGRQLTIGLDLGDRWSFYCVVDEAGEIILEQKLLTTPEAMRRALGKMPRSRIALETGAHSPWVSRLLTQLGHEVIVAHARNVRLIGESRRKDDRIDARTLARLARIDPQLLSPVQHRSAQAQIHLTVIRARVGLVSTRTALVNTARGLAKSYGERLRKCGTQQVRRQMATGLSVELREALEPLLREVESLNERIREYDRRIAQMAKKDYPEVELLQQVKGVGELIALTYVLTIEDPHRFRKSRDVGCFLGLRPGRRNSGQSEPQMHISKEGDRYLRTMLVQGAHYILGPFGEDRDLRRWRLKLAERGGKNAKKRAVVAVARKLAVLLHRLWVSGEVYEPLRNSQRVAQAVA

SEQ ID NO: 241956 - protein, 376 aa, unidentified
MSKIRFVGLDVHADTIAVAVAEPGGEVRSHGVIPNRIESVRKLIGKLAPAGQLKACYEAGPTGYVLYWQLTQLGVACEVIAPSLVPTKAGDRVKTDRRDAEKLARCYRAGELTAVWVPDAAHEALRDLVRAREAAKKDQLKARHRLGKFLLRHGRRPEGMKAWTKQHLEWIKTHVRFDQPALEATLLDYLHEVEHVAMRIVKLEKAIDEAVQTAPMEIRTVIEALQALRGVAQTTAATIVSELGSLSRFQSPRQLMGYSGLVAREHSSGNRVQRGSITKTGNAHLRRVLVEAAWAYQHRPNVTGFLLRRQKSLSLSDEVKQIAWKAQHRLHKRYKTFAARGKNKNQIVTALGRELLGFIWAIALHTEQKHKLAIAA

SEQ ID NO: 241957 - protein, 398 aa, unidentified
MICVGIDIAKGKSTVCFLKPGGEVLKTPYDIEHTAEEIAKLIRDIRSYDEEVRVVLEATGHYHLPVVTQLLEANIFVCVVNALRMKKFCSQDIRKAKTDKIDSMKIAAFGLTYWQDLKRTEPTDEVYRELRLLSRQYFQLTSMLTKAKITLDNLLDNVMPGITKLLYDRAPNHKLTDFVLRYLHFDKISAMGERKFITDYCKLAKKQGYRMYERQAEEILALVQNSIPALPMTASTTIVIKEAIKVVRELENSRTSILAQMLTFAKSLPEYSLVREMASIGDALAPLVIAEIGDVRRFHSKRALVAYAGIDAPPYQSGNFSGSERHISKRGNGYLRNVGFKIMFCKIRYKPEGDVVYDFIQKKRSEGKCGKEAMVASINKFLRIYYGKVTELYRNLEA

SEQ ID NO: 241958 - protein, 326 aa, unidentified
MKMSAILGIDIAKDSFDVCLLLDERVQRAQFSNDRNGFKTLRSWLHKRKAKPLHACLEATGQYGDDLAEYLHAEQYTVSVVNPLAIKAYGQSRLQRNKSDKLDAELIARFCQSEQPAAWTPPAPEIKALRELVHQYDNLQVARQQLRNRLQSGLHSDLVRAQLTAQLSLIDQQVAELKAHIHDHIDQYPDLKQQAALLDSIPGIGALTSAKLLAVDPRRFQSARAFAAYAGLTPMNRTSGSSVRKRVRISKLGDADLRRACYMPAIAAMKHNPLTRALYQRLVASGHAKLAALAAVMHKLLRLAYGVLKSGVPFDANFANQLVQTA

SEQ ID NO: 241959 - protein, 319 aa, unidentified
MTNSPAQAVVGLDISKKQLDIAVRPQGLSFTAPNTEAGIARLLRRLQKLNPQLIVLEATGGYEFLLVAALAKEDLPVAVVNPHQVREFARAAGRQAKTDKLDAQVLAHFGEAMRPEPRPLPTPEQQQLTALMRRRGQILGMILREKNRLEQTHIDAVRRDIRENLSWLEQRLKQIEQDIQALIHQSPLWREKDCLLQSVPGIGPVIARSLITYVPELGLLSGREVASLIGVAPFNRDSGRFKGKRMIRGGRGHVRRVLYMGALVASRFNEIIRDFYQRLLAAGKPKKLALTACIRKLLLMLNAMLKKQQPWQPFATQKA

SEQ ID NO: 241960 - protein, 367 aa, unidentified
MECYVGLDVHSKASVFVMQDAHGEVLAQGEMPTTPEGFRRWHDAQRLPAGTPVALETGTVAFFVARELTVLGCAPLVVDAREVRLKAHRPTQKSDRRDAFELCDGLRRGIYRAIVHVPPRPVARLRETLARRRHVVRLETALVNAVKRLLRGAGLGRFSRSLGTEVGWAKLLATVAGHSELRDYIAPHRALWRCARAQRVALESALSAQLAVPAFAPALRQLQTIPGVGPIVAATVLAVFSDVRRFADAKHAASYAGLVPATYHSGDREAYGRITKRGSKELRAMLCEAAHHASRPTHPLHPYFALLCAKRGYKMATMAVAHRLARITFAMLRDGTDFDVAQLNIEEGPFERTTIRRYRLKRSAPRA

SEQ ID NO: 241961 - protein, 416 aa, unidentified
MQVVYSRCCGLDVHKASVTACVLTFDDKGKRTVRKKEFRTFDQQLSGLMLWLMACKVTHVAMESTGVYWKPVWRKLEGKFELILTNPQHMKAIPGRKTDQQDAEWIAELLAHGLLRASFVPSPEIRQLRELTRLRVHFMGEYNRVHNRIHKVLEDTGLKLSSVISDIAGASGRTILKAIVKGERSPVWLAYQAKSTLRTAARQQELQKALRGHVEEHHRFLLRLLLEDLEHVESTVARLEEEITLRLAPYEAVIQRLCTIPGVDRVTAWTLIAELGLDMGVFDTAAHAASWAGLCPGNRESAGKRLSNRTRKGNRWLRRGLCQSAWAVTHKKDCYLTAFFYRRAGRQGVRKAIVSTAHQILVIAYCVLRDGVGYRERGGAFFDLRHPERTMRRLQNRLARLEQAERSLLGNDGQLT

SEQ ID NO: 241962 - protein, 452 aa, unidentified
MAQGSGLTRGDRNRNDRIAALRAVVRRDRAVLAIDLGEDKQAAVLVDHEGRVLARRIIKAKTYQLGGLLEWAAGQAARAGFAGLTVACEPTGHRWKALMGLADAAGHGFVCVQSLAVARAREGDDYTRDKTDHRDAYLIGKLVIRLECYLPERADATWARLRHLGARRFALVTDVISCMQQVGDLLACAWPAALGVAARPLEATTWLAAMGMVTDRCAGNPARLRKMGYDKFVAAIRRELPRWGAKKIYHKIARGLWEALTDTGGVAAQRRGALERVHLLMGDWRSLLARLADTEGRMTAVLDELGLTELVTSIDGLSAVGAAVILAETGELSRFSSGRAVVKHAGLNPSEHTSATLAGKTRISHRGRPGLRAAAWRAVWGGMRHNRVLHARHAHLTGRQDNRLSDGQARSACAATLLRWLYAVITRRQMWDPRIAAGAIPARPGAVTAAAA

SEQ ID NO: 241963 - protein, 364 aa, unidentified
MKKGSKSQQSGTVAESKPAQVVGLDLGDRYSRYCMLSSTGEMMEEGRIQTTAAAMEKHFGSDPRMRIALEAGTHSPWVSRLLKSYGHQVIVANPRKIPTLTKSESKNDRNDAEQLARMAAFDPKLLHPIEHRSPERQQDLNLIHTRSVLVRARTMLINSARGLVKSAGQRLPACSSEAFPEKVPAAVPPALKAACTPLLEQVTQMNRTIATMDKQIDKLDKKYPEITVLRTVPGVGPVVAACYVLTLDSPQAMKTNRQAGAYLGLRPRQQQSGDSDPQCGITRMGNTYLRSLLLQSAQYILGRFCPDSELRRWGLKLAASGGKRGKKRALVALARKLAVVLLSMWRNRKNFVPFPQPAAQLATA

SEQ ID NO: 241964 - protein, 364 aa, unidentified
MLYVGIDQHRKQLTVSVREESGSVVLRRQVSTEWERAGEFFDDLRVRSSEHGGYLSVVEVCGFNHWLLKFLTERGCAGTIVVQPGEQAAHKTDRRDASALSEILWINRDRIRQGQPVRGLRRIQIPDAEQQADRRLTSLRHNVGRELTRCVNRIKAVLRRHNLEQECPTKKLQTKRARQWLDGLSLSVVERYELDHQLTRYDLLQKQMLELQLQIQRRYEQHPAARLLSTMPGAAAYSALGLASRVGDIQRFRHPRSLANYWGLTPGSRNSGEATQRLGSITKQGSSLARFLLGQLVLHVLRKDTGMRTWFRAIKRRRGSKIARVAVMRRLTTIIWHMLSRNEPYALGGAPRRRLQRQPQTVQS

SEQ ID NO: 241965 - protein, 394 aa, unidentified
MMSTIIGIDVSQKSSSFCILSDGETQVIHGSFSMDRNGFDSLLKTTSHFESPRFFMESTGRYHIPLAHHLLQNGHTTTIVNPVLVKQFSNANTLRKTKTDKIDAQLVARYGQQVPKERKVNQRAMDDQRLSIARRREQVAEDVAKVKTQLKADLTVAWPELLAYNVFTQTMLRLLTQFPCAQDAQEATDERLALALKSPKGRGRTIGLSVEKLRQLANESIGIASYGPLVANSAHNLLFLEQSLSQLTETLVALVRETQDEEMEIITSIPGIGEITAAHFLAEIGSIDRFERYQNLIAFCGTDPSIYESGNILKRGRITKRGNTSLRKYLYLMATGVIRCNAHLKAYYDKKREEGFPHRKAMVALMNKIIKTLFAMLKKKEMYIVPSWFFNHSL

SEQ ID NO: 241966 - protein, 338 aa, unidentified
MTIEILGVDIAKNVFQLHGVNRGGHVVLKRRVMRDQLIEVLAQIDRCTVVLEACTGAFYWARKFEALGHKVKLISPQYVKPFVRRQKNDGNDAEAICTAARQPHIPFVPNKTVEQQDIQALHRARQRMVNHRTAVVSQIRGLLLDRGFAFAKSITRARRAIPEILADQDNELTAMARNAIAELYDLFRDLDRRISSFDKKIEQVFRNSDACLRIAKIKGVGPKTATAVVAAIGDGSEFKNGRHLAAWVGLVPRQFSSGDRKVLMGVSKRGNQHLRSLLVHGARAVVRTAPNKTDPNNLWVNQLRERRGFNRATVAVANKNARIIWAVLRTGEPYRAPS

SEQ ID NO: 241967 - protein, 361 aa, unidentified
MAKSLKTRSRRSLSRELLKEKKFFVGVDVHKRSYHVSLWNEEHGLLGSWVQPASPRLLILKLEPFAANVGRIVYEAGPTGFTLVRALRSKGFSADVIAPSKMLVVPGPDAKSDRIDSHRLAMYAAKNLLTAVHIPTEEQEGDRQLVRLREQMTRKSRSIQQQIKSFLLMHGIDEPAGLANWTKAGIASLRQLHLSAQLRFCLDVMLDEFDHVKVQLVCILKQIRQLASEERHRKTIDLLQTVPGVGLLTAIVFRTELVNPQRFSDGGQISRMIGLAPGIRESGDTRREGSILRSGNARLRWVLVEAAWRWVAGDLAAAKTYHRLVANTGSAKKAIVAVARRLGIVLWKISIQQREYTPQPT

SEQ ID NO: 241968 - protein, 423 aa, unidentified
MEMMHERVAGLDVHKATIVACVRVGTGRKVTRECRTFDTTTDGLLALLAWLVECRCSHVAMEATGVYWMPVWKILSEGDFVLIVANAAHIKNVPGRKSDLNDAMWIADLLACGLIKSSFVPEEDVQELRSLLRTRKQLGREQTRHVQRIQKTLAEANIKLDSVLSDIMGASGRRIIEAMIAGVRNPRQLVALASAQIKATPKQLYDALHGRLTDHHRFLLKLHLRQWDGLDATIREIDLEVEARIARMDKEVSAGAAPFRDLIRLLCTIPGVSTLSARTILSEIGRDMSRFPTAGHMVAWAGLCPGQNESAGKRKPARLRKGAPWLKTMLVQCAWAAKRKKDSYYKAQFFRLQSRRGPQKAICAVAASILTAIYHILKDGTEHQDLGANHFDRRSTEGKARRLVAQLTSLGFEVQLQRTAEAA

SEQ ID NO: 241969 - protein, 349 aa, unidentified
MQILAIDLGKFKSVACLFDTDRQEAQYKTISTTAAAIEQLLHQTQPNKVVIETCTISGWVYDLCQGQGYAVVVANPSNEAWQWRNVKRKTDKDDGLKLAKLEALGQIDPVHMPTQQMREYRRLVKYRKVLVGRVNQIKNSIRALLDAHGKSLSSGNKAWTQAGMEQLESYRKSYAECSLEELWRGELDVELTLLDSLWQQRARVDQQLEAMAKQDERVQRLMTIPGVGRRTAEVIATMIDDPHRFEHGRQVSAYAGLVPEQRQSGQTNRLGAITKRGSRLLRGALVEIAWMLLRYNPWALTVYQRIYAGQKTRKKTAIVAVARKLLVCCWAMLKHKQDWNPPLVAATST

SEQ ID NO: 241970 - protein, 455 aa, unidentified
MLKRTTGDRPELKLVNVGAAAIDIGSKMHMAAVDPACTDVPVRSFGTFTQDLHELANWFRACGVTSVAMESTGVYWIPVYEILEQRGFEVILVNARYAKNVPGRKTDVSDAAWLRQLHSYGLLRGSFRPDAEIATLRAYLRQRERLVEYAAAHIQHMQKALMEMNLQLLHVVSDITGATGMRIIRAIVAGERNPDVLATYRDVRCHSSIATIRAALVGNDRHEHVFALTQSLELYDVYQAKMLDCDRKLEVLIAALNNKGAKPVGKLSKPRIKTKQVNAPTFDVRTALYGVLGVDLTEIHGLGPSLALKLIGECGTDLRAWPSDKHFTSWLCLAPGNKISGGKVLSSRSRRSSSRAAALLRLAATTVGRSDTALGAFYRRLASRAGKSKAVTATARKIAVLFYNTLRHGMSYKDPGAAHYEQQYRSRVLANLQRRAKSLGFVLQAIPEDANPAVS

SEQ ID NO: 241971 - protein, 320 aa, unidentified
MTYIGIDVSKDSFVAAYPAKSGYTTKTFKNTSSGVHQFIQSLPAECHCVMEATGNYSMLLLYLLQQANIIVSMENPQKIKHFARAMLSTTKTDDIDAKLIAMYGEKMEPAPYKIPSESIMLLKQKRTVLRQLKKQLTMLLNLQHSLAVLPKQDPTAKVATEKTIKFLRKQISKLEDEITHLSNKEFKRQMDLLTSIRGIGKTLASALIVATGGFAYFSNAKQISRFLGLCPTYQQSGTSVHFKGHINRNGDTYLRSQLYIAAVSSIKFNAACKETFKRLKDKGKSGKVAVIAVANKLIRQAFAVVTNNRPYVDGYVSALP

SEQ ID NO: 241972 - protein, 366 aa, unidentified
MTSMLHPAQSSQADADDTEVILGVDTHKDTHVAAVLNSVGALLDSRCFAATAAGYQQLLGWAQAFGTPRRAGVECTGSYGAALSRHLQAAGVQVLDVNQPDKATRRRRGKTDAIDAEAAARAVLAGRATATAKTGAGPVEMARLFKLAKDSAIKSRTQAINQLKAVLVAADPALRESLSGLSSRVLIRRCAQLDPAAPTDATSAAAWTLRLLAHRILCLTQEIDDLNAKITAAVTAHTPQLLECNGVGPDIAVTLLITAGDNPERLGSEAGFAALCGVSPVEASSGKTQRRRLNRGGDRQANAALYRIALSRLRWDHRTRDYRNRRIAEGKTPREVIRCLKRYIARELYQLITKPQPTPIADPSAA

SEQ ID NO: 241973 - protein, 420 aa, unidentified
MELVVERCAGLDVHKDLVVACVRYPGPDGVRRTEIASFSAFTADLLALRDWLCSYNVTRVAMEATGVYWKPIFYVLEDAMECWLLNARHMRNVPGRKTDIGDAEWICQLTEHGLVRPSFVAPKEIRDLREFTRYRRTLAEERTREAQRLDKVLQDAGVKLSSVASDVLGASSRAMLAALVEGTRDPAALADLAKGKLRSKLPALRTALEGRFGPRHAVLVSEILSHLDYLDEAIGRMTSAIEEAIAPFAEARDRLCSIPGIDRRIAEAVIGEIGVDMGRFPTAAHLASWAGMCPGQHESAGKHKRGTARHGDSWLQRHLAVAAMAAVCSKDTYLRAQYRRLSPRRGKQRARKAVGHSILVACWHVLASDDATYLDLGPDWFDRRNAPAVRARRKLSELRALGCQLYVNDDGTTTVVLPAA

SEQ ID NO: 241974 - protein, 341 aa, unidentified
MKKKKLFIGIDFSKLTFDVTYFEAIEPDKKHYKKFDNTEEGFCDMIKWIKKTSKDTSKWLVCGEFTGIYAMTAAIVFNKQNIDLWLENPSQIKLSSGINREKNDKVDSGQIALYALRFLDRAKLYKPQNDTLLKIRELVGYKDRLTKNKSQLIVPAKELKRVRNKWDEVDYIYDSSKEMVEIFDAKIKEIEHKMLSLLKSDPDLLRLYKLINSVVGVGMQTAIYLLVHTWGFTSFENSRQLACYCGVAPFSKQSGTSIHGKSQVSHIANKKLKSLLHMCALNAKKYDPKIKEYYEQRLSDGKHKMAVLNIVRNKLLHRIWAVVQSGEMYDKNYIHSMAVAA

SEQ ID NO: 241975 - protein, 346 aa, unidentified
MKQVYNKKKLFGAFDLHSNNNHLAIIDGEDHRIYKRRLPNQPDLILTELKPYKDHLVGIVVESTFNWYWLVDLLMDEGYRMHLANPAGIQKYKGLKHADDDHDAFWLAHLLRLGILPEGYIYPKKERPVRDLLRKRGHLVKLRTSLINSLQDIIYRNCGTKIGVNNIKAIKEDKVAPLLSGQDELSLSGEVSKETIDYLGRQIRKVENSILSKVKLKKEYTKLLTITGVGKILALTIMLEAGTIKRFQKVGDFASYCRKVPSHWTSNGKKKGKGNDKNGNKYLAWAFSEAAEMSRRYDDHARRFYNKKAARTNRMVAHKALAHKLSRATYYIIRDQVDYDPVKLFA

SEQ ID NO: 241976 - protein, 339 aa, unidentified
MSGVSTVGVDLAKNVIQIHGVDADGEAVVRRQLRRSQFLAFFEGCSACLIGIEACSGAHHWGRQLRSMGHEVRLMPPSYVKPYVKRGKTDAADAEAICEAVTRPSMRFVPIKSEAESAALVLHRARDFPVGQVTQVGNAIRAHMAEFGIVTAKGSKRVASLEEELESLPEAARLPLRALFDQLAETQGRIDLLTKEIEEVHRQNEVSRRLASIPGVGVLTATAIAATTPDVGNFSSARDYAAWLGLTPKQHSTGGKPWSGGISKMGNRYIRRLLYLGAMARIMVRRRSRHAGADWLSRKLATKETRVVAIALANRMARTIYALLRDGTSYRPRIGMMPG

SEQ ID NO: 241977 - protein, 407 aa, unidentified
MEVIIDRACGMDVHKDSITACIITPKGKEIQTFSTKTVFLLQLIDWIKEHECTHVAMESTGVFWKPIVNLLEAESIEFLVVNAQHMKAVPGRKTDVKDAEWIAKLLRHGLLKASYIPDRNQRELRELVRYRRSIIEERARQHNRIQKVLEGANIKLGSVVSDIMGVSSLDMLRAIADGENDPEKLASFARRTMKKKKDELELALRGYINPHQRLMLKTILTHIEFLTEQIDLLNQEVATRLSSHQEDIERLDSIPGIATRMAEQILAEVGTDVEKQFPSSAHLCSWAGLVPGHNESAGKRKSTNMRKGNKYLKSALIEAAHSVRGSKTYLGALYRRTASRKGKKRAGISVAHAILRISYYLLTRKEMYVDLGEDYFDKQKEQSIVRYSVRRLENLGYNVTITEPTAS

SEQ ID NO: 241978 - protein, 376 aa, unidentified
MTTLETEYSTNSALYLALDLSETKWKLGFTNGLGPRPWIRTIDAGEVLLLEREIQQAKKHFELTADSRVLSCYEAGRDGFWLHRCLVASGIENVVVDAASIEINRRAKRTKTDRLDAGKLVRMLVRYASGEQKVWSVVHVPSLEAEDQRQIHREIATLKVDHTRHINRIHGLLAGQGIRMSIQADFVAHLDELRLWDGAPLPAGLRARLEQEYACLQFVNEQIAAQEAKRRDLLRTSTESYVEQVRQLMRLKGIGEQSAWRYVTEFFAWRAFRNRREVGALAGLAPTPYRSGDEQHELGISKAGNRLVRAMAIEIAWAWLQFQPESELSQWYWRRFGEGSKRIHKMGIVALARKLLIALWRYLELGQLPAGAQLKA

SEQ ID NO: 241979 - protein, 493 aa, unidentified
MKTAPSSLPAKRRARNTRKLKQQAKTATIATPVGSLDELRPVHRRAAGIDVGSAENYAAIPAEGLAAGESPVRVFGVFSQEQDALVEWLRAHQITTVAMEATGIYWLTLYDKLEAAGIEVYLVDPHGVKAVPGRKSDWLDCQWLQKLHTYGLLQRAFRPDPPIRRLRTLTRQRAELVICGGVHLQHMGKVLIAMNLHLHLVVSDLHGETALRIIEAILAGERDPKTLVKLRDPRCHKSTLAEMEAGLKGTYDDENLFVLEQSYQGWKFYQEQLTHCDERIEKVLAVLPTAKAVTREAPPKPVATPSAPKRGRKKQINRGPNAAAVDFSQALKRICGVDLIQVCGLNLLTVLMLLGEIGTDMSRWRNARAFASWLGLCPGAKISGGKVLSRRTRKVNNRASTLLRLAAWGAGKTDTWLGHFYRRIRARRGAPKAVTATARKLACVIYHMMKYGDEFVFLDTTQYEARARDHRLHRLRKEAQKLGFELTELQQVA

SEQ ID NO: 241980 - protein, 320 aa, unidentified
MDQTEYVGVDVAKDKFDVATFINNRYKHSVYPNDAKGHAEFAAWLTKNSTSPWVCMEATGHYSEGIADFLLKKSIKVSVVNPYQIKNFAKASLARNKNDIIDGRVIREFCKCMQPRVYVTTSEAQKQLKGLMKLLDMLKGQLVQLNNQLHSLHEGMATDLLIKWIKNLEKEVSLVEQKMTALINEEPMLNRNMRLITSIKGIGKLTAFRVLALMPDVSSFQTAKQFAAYIGITPKQHQSGKLFGKTTISRLGDSRLRKALYMAALVAKRHNKGLSAFVTRLQNNGKTPKTIVCAVMRKLAHIIFGVLKSKLPFNENLSCV

SEQ ID NO: 241981 - protein, 391 aa, unidentified
MIFVGIDVAKDKHDCFILNSEGTVLADVFTIANNRIGFETLLSRIQSCSQGESKIKVGLEATGHYSYNLLGFLLDSGLATYVINPLHTNLYRKSLSLRRTKTDRIDARTIAMMLMSDVDLKSYSNIAYHNEELKSLTRYRFDKVKERAKLKSSVARLVNILFPELEKLVSSLHIAVVYALLSNYPGASYIANANTEELAETLCTASKGRYTKSKTAEIQVAAGVSIGSKMPAKSMELKHTIALIRELDKEISEVESAIDKITSQMDSPIFTIPGIGRHMGAMILAEVGDFSNFASADKLLAYAGLSPSTYQSGQLQNCYAHMEKRGSRYLRYALFNAAKYVCLWCPTFSAYLEKKRSEGKHYNVAISHAAKKLVRLIFAMQRSGKAFLADY

SEQ ID NO: 241982 - protein, 356 aa, unidentified
MKTNNEELKSERAAVETAVIIKLGLDVHAADIVVCRQNDGQQPKPAQRRSWAQLLEWVRELAAGGAKVHSCYEAGPCGYGLHRQLEALGVKNVVVVPQRWDEQRQRVKTDRRDAHELCDRLDRYLRGNPQAFSVVRVPTPEQEQQRATGRQRGRLVKERQRCVVRGHGLMLAQGVQAAPEWWRPPRWAELQATLPAWLREQVGAWQQLAQHLDQAVARWTPRVEACSTGQVVPKGVGRLTTALIATEILDWQRFHNRRQVASYTGLCPSEDSSGGRRRQGGVTKHGNPRVRHALVEAVWRLQLWQPQYPPLRRLQTALGSRARKRAAVAVARRLAIDLWRLNTGQCPAEKLGLKLR

SEQ ID NO: 241983 - protein, 421 aa, unidentified
MTYSIAGIDVHKKLLVVVVAEVTEQAEWSYERGKFGATASELQRLADWFQQRGVQEVVMESTAQYWRPVWGALEQYWTPVMRQREGAGRMAGKLHLAQAQSNRGPRGRKNDYRDAERLVHRLVAHELVLSFVPDPEQRLWRTLTHRKQQFAEDRTRCQNRLEALLEQMHLKLSSFVSDLLGVSGRRMLEAVAEGATDPLAVAALAHAKLRATPEQLRDALAACAHLSPVYRRLLKMELKQLQFLEQQSQELEQEIIQALRPHAGAVERLAEVPGLGVESAHQIIAEIGPTAEVFPSQKALSSWVGVCPGEEVTAGETRSSRSPKGNRALRRLLNQAAHAAVKMKGSIFEVVFKRLQPRLKYNEAIWAIAHRLCRLIWKILHQGVRYEERGPAVSAKSQRARFAKMVRELKKAGYQVMTPTI

SEQ ID NO: 241984 - protein, 428 aa, unidentified
MKYNKQNEKIKMITEDFLIVAIDVGSTTHYARAFDYRGVEFSKKAFSFKNTDQGFKAFKSWACAIAVQYGKKMFLVGMEPTGHYWFNLGKFVQNSGMILAHVNPAAVKKSKELDDNDPSKNDRKDPKVIAGLLKDGRYSFPYMPEGVYAKIRDISYLRDDAQKSLIRIKNRLARWLSIYFPEYKEVYGQIDAKTGMLILEEYPLPKDIVTLGVEGVIKIWKSHKARGAGQRRAEKLVNAAKRSVGRTESDEIARIELKVLLKDLKEYQQRVQVYEDLAFEALLEVPNAEKLLNICGVGVVSVMRFVAEVGDISRFNNAKEIQKLAGLSIKTNSSGKHEGVGKITYRGRKRLRYGMYELAISLVSRNKVFKSIHQYFMTRQNNPLKGMQSMVAVSCKVIRIFFGILVNGYEFDENKMLQDIVRPEATIA

SEQ ID NO: 241985 - protein, 388 aa, unidentified
MSSTTAPGFSTETVIEPDNATVFVSLELSRSKWLITALLPCSDKMSKYSVDSGDGTALLHRLTYLRSKAERRIGIAIKIVVIQEAGLDGFWIHRLLESNGIESHVVEPASIAVPRRHRRAKTDGIDGEMLVRTLMAFKRGERRVCSMVVAPSPEEEDRRRVSRERRTLIRERIEHINRIKGLLATQGIFGYEPTRKDFRNRVDGLLTGGGQPLPPRLKAEIVRELDRIDLVLHQVATVEAERDALVMSDSIDPAAPAALLIKLKGIGPEFAAVLWLEGLFRNFGNRRQLAAYAGLAPSPWQSGGVNREQGISKSGNPRLRTTMIELAWLWLRYQPDSALSCWFRERGGSERGRIRRIMIVALARKLLVALWRYTTLGELPKGAALKTA

SEQ ID NO: 241986 - protein, 402 aa, unidentified
MIYAGIDIAKSSHVIGAVDERGKDAAKPMQFANSAEGFGKCAAYLEGLGAPAEEMLVGMEATGHYWLPLFSFLHAQGYDVVVINPIRTDAMRRFKGSSRVKTDLVDCTLIADTLRLGEFRPSKLGDESMVELRQLTRLHQGLKESVADLKRQVIVALDQVFPEYDSIFSDTFGESSKAFLRKCPTPEECRGVRVDALGNTLSRASRGKLGREKAEEIKGIAKESCGIDRGTRTLSFQIKLLVEQIDFIEGQIEEVEARIEEGIETTEPLILTIPGIGHVLGAQIASEIGDIHRFRNASAVVSYAGINPSVSQSGKFSSSENHITKQGSPYLRRALYLAATAQLRLSTPFRDYYDKKRADGKSHREALIAVARKLVHVIYAVLSKQEPYRSDAVNANPVSRSE

SEQ ID NO: 241987 - protein, 349 aa, unidentified
MFAGIDSHKDTLAVAVIDAAGRTVTVRQIVNEADGFTVLADLVTAHEVVRVGIEGSTNFGWAAAMHLVAAGATVVEVPPLMTSRERQSRPGQGKTDPVDAVAIARITARETFLPPVRPMDGLPAELRVLMDYREQLIDERTALANRIHADLGWLRPGYQRALPKLTQPAHLRAALALLAGDESVRASVTRRRLQRMIAINAELAGLRTQIAELVQQSGTTLTGIYGVGVFVAARILAEVVDVRRYPSRHTFAAANGSAPIPASSGRTTRHRLNRGGNRQLNRALYTIAITEIRAETEGRAYYQRKRAEGKTSREALRCLKRRLSDVVYRTLRADQAAAAPQPAPLAAVA

SEQ ID NO: 241988 - protein, 400 aa, unidentified
MISVGIDVAKGKSTVCMLKPYGEIVCKPFDIEHQNKDLSELASMILKFDDEVKVVMEATGIYHLPVLTYLQEKGIFVTVINPYLMKVYRSESLRKAKTDKIDSRIIANYGIEHWLTMEEFKVSEDIYGELRLLGQQYRHYMKLHVTSLHELTHLLDYTMPGIKTMLASWNEGNRKDKLSDFVEQFWHFDEITKYSEAEFIDAYAAWAKDKKYHQSQTKAKAIYELAHEGIPTLSSETPSVKMLVTEAVRVLKEIDATLGVILSRMQELAKSLPEYSVVREMGGVGDVLAPKLIAEIGDVRRFHSGKALIAYAGIDTPPYESGQFIGSNRTITKRGSAALRKVGYETMRCIKTCPRPDDPVYQYVIKKEAEGKAKKSAKIAGLNKFLRIYYARVKEIYNNS

SEQ ID NO: 241989 - protein, 433 aa, unidentified
MDEVMDEPLYRDRVCGIDIGKAGMVATIRVPSDKDPARRAQETRTFGTTRREVLALADWLRCWQVPAVVMEATGDYWKGPFYRLEAEGFECVLADAKQVRHLPGRPKRDPADSRWLAACFERGTITACFVAAPEFRIIREHTRYRRDLTEERTREKQRAEKLLESAAIKLSSVVADLHGVTGRDIMDHLIAGERNPKVLAQLARAAARRKIAQLEEALEGAEFFTPEHAALLAVMLERIDRVNTETALLSEVIERLLAPYEEQLQQAESMPGWRRRAAQDALAETGTDMSRFPTGAHLASWAGRTPVDNSSGKRAGQARSKKGNRYLAGITGETAVAAGRTQTREGARYRRLARRRGKAKAQVAVGNTQLKVLHKLLSNPGMRYQDLGADYYERQAGVRRQVAHHVGKLGALGFEVTLCRIPDPDPPGQPQAA

SEQ ID NO: 241990 - protein, 350 aa, unidentified
MEQYVGLDVSLKMTAICIVDRTGKIAREGMVTSDPDAIAAFVRLHAPRVARIGLETGATSTWLWTELNRRGLPIICIDARHAKAALKMQINKSDRNDAVGIARIMQCGWYKEVHVKALDSHAIKALLVSRALLVKIKRDLENQIRGLLKNFGLIIGRAKMNMFVVRATELIEDEPELAAAVEPLLKAREAVERQIADLNRKVMKLARHNVQVRRFMTVPGIGPITALCYLATIDDPTRFKRSRSVGAYVGLTSRRHASGEIDWTGRISRCGDQMLRSYLFEAAGVLLTRVEKWSVLKAWGTRVAKRSGLGKAKVAVARKLAVILHRMWMDGSEFKWTSKEANQSTYMTAA

SEQ ID NO: 241991 - protein, 310 aa, unidentified
MDIIAVGIDVSKDRLDVAVRPGGEAFAVERNACGLDRLIERLRQLSPHIVALEATGGFETVVAAALASASLPVVVVNPAQIRAFARALGQRAKTDPIDAAVIAHFAEATKPQVRPLPDEATRLLADLVARRRQIIEMIGAESQRQKRITMPRLRKSIRRVIDMLNKELAELDGDIDDAVRGSPTWREKENLLASVPGVGSIISRTLIADLPELGTLNRKQIAALAGLAPFTRQSGQWRGKSFIGGGRASVRTALFMGALVAKRHNPVLKAFFDRLVAAGKPKMVALIAVARKLLTILNAILRDNRSWQNA

SEQ ID NO: 241992 - protein, 405 aa, unidentified
MTTETLFAGTSTLRQDVTLCASVELGSTGWLVTSRASDQDKMQRTRIGTNDWQGLIALLRRQQKARQAGRVVCGYEAGREGFWPYRALHEAGIEACVLDPASIAVNQRGRRTKTDRTDGIIELEAIEALELGRRTAARRVVTLTEDQEDARQPSRTRGRLVKDRTALIAYIKSALARVGTDLPAADRPGWLEHLTAARQWNGRPLPRNLVRDIELAHERLTLVCRQIDALEADQRAALLSRDRSGKRRQLKSRQAAQAWEAQANPAERAVAGLAEQLYRLNGIGQVIAFVLAGEVYWRDFVNRRQVGGYLGLGGAEHSSGAQRRELGISKAGNRRARFVLVEAAWLWVEHQPDSALTQWFKCRAPKGASPRQRRIAIVALARKLAVALWRYLNDGIVPEGARMKA

SEQ ID NO: 241993 - protein, 269 aa, unidentified
MSAVVCGLDVHKDSTYATILNSEGKIINQMRMTNEKVLSYLSHFKVSKVAMEASTSVASLYRQLAGEGFDVVVSHPKKTRYIAEARIKSDRVDSKVIAELARLDALPLAYVPSKETSDLREKVRRRAFLVRERVKLRVKIKSFLTYEGIKWPSEHGLFSMKGVEWLGSLKFESVDSYLRIMEIFDEEIKVLSRQLEGLAREDEDVKLLMTVPGIGYYSALLVKSEIGDVSGFPFGERLCGYAGLVPSTYASGAMVRHGHITKEGSRWLR

SEQ ID NO: 241994 - protein, 341 aa, unidentified
MQRWIGVDLHKTQFTVCYLHKNSEHKIQVFKVGAKDIEAFKKTLSKSDEVAVESTGNTGYFAREIKSQVKAVRIINPIQFKIISASVKKTDEHDAVTIARYLSKGLIPEVRMRTKEESQISSLIGTRDKFVKLRSCLKNKIHNILNANGIVTKREVFGSEKGLDKVLTLDIEPSYQFELKIIVEQIRSLNKSIDEISNELVEKGKKLDGHKSLTSLTGIGDISATILLNTIGDVNDFADDKKIAAYIGIVPRVAVSNETSHYGKITKMGNKIARTALVQSTLIAIRYNPYLRKFYFRLKAKKGSGKAIIATARKFLTIIYRTLKNKWVFEDFNKFKLAVSI

SEQ ID NO: 241995 - protein, 331 aa, unidentified
MGDQKRFVGIDVAKAQLEVFIRPDGETFSVANDEVGIGELLRQLEPADFVILEATGGLEMPVASALAAAGIAVAIVNPRQVRDFARATGRLAKTDRLDAEVLARFGEAVRPEARPLANEQAQALEALVTRRRQLVEMLTAEKNRRANAPKVLHRSIDEHIRWLEKRLSGLDDELAELIRDTPLWRERDELLRSVPGVGKVLSSTLLAHLPELGMLNRKQIAALAGLAPFNRDSGNLRGSRCIWGGRAQVRRVLYMATVSGVRSNPAIRTFYLRLRASGKHAKPPLIACMRKFLVILNAMLHNKTPWHTPALTSSTATLSPLPGADIQHGCC

SEQ ID NO: 241996 - protein, 352 aa, unidentified
MSQKRNTAIAVIGIDIGKNSFHVVGLDQRGAIVLRQKWSRGQVATRLANIPPCLIGMELGAHHLSRKLRMLGHDARLMPAKYVRPYSKGQKNDFRDAEAIAEAVQRPTMKFVATKTADQLDLQALHRVRERLVSQRTGIINQIRAFLLERGIAVRQGQRFLRAELPRILAAPPDVLSPRMVHVIEDLAGDWRRLDERIEGLSGEIEAIARRDAGCERLMSVPGIGPIISSAMVAAIGNGDAFAKGRDFAAWLGLVPKQISTGDRTILGKISKRGNRYLRVLFVQAAWVVLIKPKSWERHGLKPWLEAAKKRLHHNVLAIALANKLARIAWSVLARGRSFEARMTNEANAQPV

SEQ ID NO: 241997 - protein, 354 aa, unidentified
MPCLPVEVILGVDTHRDTHAVVLIDLLGRLVATATFPTTRPGLRALIKWAQQRGNICRAGVEGTGSFGAGLTRALRHERIEVIEVTRATRVGGRHRGTNDTRDAEAAARSVLSGQATAEPKARDGIVESIRVLRNTRASAIKARTQAILHIKNLIVTAPDELRETLSPLTNRQLVKRCARMHRSARRDSLAATRHALRSLARRHQDLDSEIAELDQLLGELIAQAAPRLLKQPGIGPEIAARMLLVAGDNPTRLRNDAALAALCGASPIEASSGKTTRHRLNRGGDRQGNSALWLIANNRMIHHPQTRDYVKRRTTDGKSTKEIRRCLMRHIARGIYPLLIADLHDAHQQSALT

SEQ ID NO: 241998 - protein, 343 aa, unidentified
MEYFAGIDVSLEQSSVCVVDGAGKIVREAKVASEPEALVGFFRGLETGVTRIGLEAGPLSQWLYAGLVAAGFEVVLLETRHVKAALSAMVIKTDRKDARGIAQLLRMGWFRPVHAKSPAAQEVRALLVARKLLQTKLLDVEFSIRGILRGFGLKMGEVSKGRFVARVRELAAGHAMLEQITEPMLRAREALRTEYARLHGEMLAIARPDPVCRRLMTVPGVGALVAITFKSAVDDPGRFARSRVLGAHFGLTPRKYQSGETDVTGAISRVGDAMVRMALYEAANVMLSRVTRFSSLKRWALDVAKRRGLKRAKVALARKLATVLHRMWVDGANFHWGKQAAAV

SEQ ID NO: 241999 - protein, 367 aa, unidentified
MKKDNTVGKSSGEKTRASGRLTIGLDLGDRSSRYCILDEQGEVISEGSVATTKKGLAQVFGSRPRSRIALEVGTHSPWVSRYLADLGHEVIVANARRVRLITDSSRKDDRLDAKTLGRLARIDPELLSPIRHRSEQAQADLMVIRARAALVEARTMLVNSARGLTKSYGERLPSCGTGQVSENLAEPLSAPLQGALKPLLAVVESLSERIREYDGQIEQIGKQRYPETELLKQVHGVGTLTALTYVLTVEDPHRFRRSRDAGAYFGLRPRRRESGASRPQLRITKEGDAYLRKLLVQCAHHILGPFGQDSDLRRWGLELALRGGKNAKKRALVAVARKLAVILHKLWVSGEVYEPLHVRKGGKAVAA

SEQ ID NO: 242000 - protein, 319 aa, unidentified
MNMKKYNRKAAGIDTGKDKLDIAIHGSNDLLEVANDGAGHEQLIEWLGGRKVKRIGIEASGGYERAATAALRLANVQVIVFQPKQVRCFAGFKLQRAKNDRIDAALIAKCAAFCEAIREAPDPRLQDLAEALTLIDQLTEDMARWKIRLESVQRAEQRGVIEDEIKRLTGIITTERARLLRAVKSHKDLARRYSLIESVQGIGLPTALTLLIRMPELGCLTREQVAALAGLAPYDHDTGRFKGQRRIAGGRGRVRKALYAAAFPAAYRWNPHLIALYQRLIESKKTHKQALIACARKLLVMVNAVVARGTPWVKTETAI

SEQ ID NO: 242001 - protein, 344 aa, unidentified
MFAEYDGRQVVGIDLHRHRSVIVRMTETGERLGSVRIDNDPFALAAEIAKAGESPQVVLEATYGWYWAVDVLREAGAEVHLAHPLGVKGFAYRRVKNDARDAADLADLLRMGRLPEGWIAPPPVRELRELVRHRAKLVTWRSALKASVHAVLAKQGLRLDASDLFGVGGRRQLARAPLDPAYRLRVNALLRLIDAMDFEIGAVAGPLRVGLAGHAGFQAVQAVPGVGPVLAAVFVAEIGEVTRFAGPTQLASWAGLTPKHRESDTVVHRGPITKQGSALVRWAAVEAAQGARNAGWLDEARTRIAERRGRNIATVAVARKLLTLVYYGLRDGHIRALDQAQAVA

SEQ ID NO: 242002 - protein, 330 aa, unidentified
MKNWNVILGVDVSKLTLDICWAEGNLHLKIDNCTKGFNTFRKWCKIHEIDLKETLIVMEYTGGYEYRFIQFCQSLSIPFCRVPGLEIKQSMGMVRGKSDQVDSFRISQYGQEKSKRLVPSKPLNDTILALRQLLSFRKRLVRENAGWISTVKERKHMYPLKKVDTITHTAVAKIKANNKYISQAEQEITEIIKSDDSWLLSYRIISSIKGIGKVNAWMTLAFTENFTSFTDPRKYAVYVGVIPFEHTSGTSVKGRKRVSHLAHKELKQELNQAAKTAMVHDPEIRAYADRKLKDKSYSLVLNNIKFKLILRMFALIKRGESYVENYERAA

SEQ ID NO: 242003 - protein, 417 aa, unidentified
MKKRTYRAKEINKINWHELKENLSGEKIAVAIDVAKQKQYAVLMNMDSSVSRLFYWRHPEQTALLFEVIGALDCPITVIVESTSTYGDIFRYQSLLQGFDVHQASAKRVHDAREVYDGVPSLHDAKAATIIARFYLDGLTKPWRELNDNERQLNALRREYEIHQSQYQRNQNRLEAYLSRHWPEVTYLLSSDSVALEQLLMKYGSPEEVAIHAKEAQQVIKKASRSKLKPEKIAAIVHSAKKTLGVPCIEAEKQYLQALAAEMNHSRLQRRTARHALEAEIDSDEQLTEMAKLIGKVTTAVLLSFHVDPRNFECARSLQKAMGLNLKEKSSGHYIGQLKLTKRGSSKVRMYLYFAALRLIQKDPIIKEWYQRKVNPKAKNKTVIAVMRKLSKALWHVAQGQVFDANELFSMPTKKAA

SEQ ID NO: 242004 - protein, 354 aa, unidentified
MTSVKYIGMDVHTESTSIAVRNSLGKIVMEGVIETKANTILQFLDGLRGDLRVVFEEGTWATWLYDLLKSHVTEVLVCNTRKNAVRKGSKSDRIDARKLAEQLYMNNVKSVYHGEHGLRMMKELARSYLTITKDLVRVMNRLKALYRSWGIPCAGTEVYAPRYRAEWLAKISEAGVRCRAERYYQQLDALWPLRQEARRDLLVESRKHKIWKLLRRIPAIGPIRAAILIAVMQTPHRFRTKRHLWTYSGLGLETYDSAEYRAVQGQLERSRKQATVRGLNKDYNHDLKDIFKGAAMRASTAAGPLRDFYDNLLAKGRKPTMARLTLARKIAAITLIVWKKEVRFDANYLKQQAA

SEQ ID NO: 242005 - protein, 371 aa, unidentified
MSEFIKYVGMDVHKETIAVAVAPSDGGEVRYVGEIANTPQAIEKLVKQLRKDKADLRFCYEAGPCGYGIHRQLTDFGWDCHVVAPSLIPKKAGDRVKTDRRDSLSLARLHRAGELTAVWVPDDAQEALRDLTRAREDMKHLQRQAKQRLLAFLLRHGRRYAGKSNWTQAHYRWFEEVKFEQPVQQIVFQEYVDMVKAMDKRIDALDKQISTAASESVFWETIQALMALRGVSLLTATTIVAEIGDLKRFASAPQLMAYLGVVPSEHSSGGKKSRGGITKTGNGHVRRVLVEAAWTYRHPARKTATLQRRAQNATEAVQEIAWNGQKRMCARYKLLEGRGKLKVQVCTAIARELTGFIWAIGQTMAQPAAKT

SEQ ID NO: 242006 - protein, 356 aa, unidentified
MRRNIWAGLDVGVETTSVCVIDDAGEILQQDSCGSDVSSVHQQLRWLRRRRMATVGVEAGALTLARGLRSRGYCVEMYETRQLSKFLRVRRNKTDAGDALGIAEAGRIGASLVSKVHLKSLECQSLQSRLTMRRHLIRQRVAAVNLLCRQIELYGGRIRRSNRQKPLRDQVEVQLKRLFGKHPNGLTLELRHLLAYCEQLFGYQKAIDGEFKRLASDNEVCRRLMTIPGVGPICALTFYAIVSDPHRFRRSQSIGSYLGLTPRVHQSGLSNRAGRISRMGNAAMRTLLVQAALAFMRSRRADPALRSWALSIEQRSGRGQSRIALARKLAVIMVAMWKRGEAYCPSSQLPAGLPAG

SEQ ID NO: 242007 - protein, 373 aa, unidentified
MKKHGEAFVGIDTAKTRNAVAIAEIGRRGEIRYLGEYDTTPDAVAKLVRRLADRYEVLHFCYEAGPTGYGLYRQILALGDNCTVVAPSMIPRKPGERVKTNRRDAQSLARMHRAGELTAVWVPDATHEAVRDLVRARSAAVEDYRRKRQQVSSFLLRHGRSFARSTTWKGQHLRWLNAQNFTHPAQRLAYQESLNAAFTAAERVIHLEAMLEEIIPAWTMAPVVAAFQALRGVAFTTAATVVAEAGDLRRFDHPRQLMAFLGLVPSERSTGETRRQGGITKTGNIRARRTLIEAAWTYRYPAGIGDTHQRRQSELPQDVRDIAWKAQVRLCARYRRLMAKGKRKAVATTAIARELAAFMWGIAAHVDPTAIAE

SEQ ID NO: 242008 - protein, 369 aa, unidentified
MNKIVKYIGLDVHKNSISIAIAEEGRQREVNFYGVINNDMNQLHKFLRKQISQGTEPRCVYEAGPCGYNIYRSLSEKGIDCVVVAPSLIPRKSGDRIKTDRRDSETLAKLHRAGELTSVYVPSLEDEALRDLVRAREDSVNALKRAKQQLGAFLLRHHIDSPVKSKWCKSYFNWLADIAMPHPAQQITLQEYIETVYDCKQRIERISEQMRQLSKQTRLYGLNKSLQALRGVSEIVSAVVVSELGDLTRFDSPVKLMAYLGLVPSQHNSGDKKRTGSITKTGNGHVRRILVEAAQAYRLPARKSRCIVKRNEGLPQEIRNIAWQAQVRLCSRYKRLVYRGKNSNLVKTAIARELAGFMWAIAHKVPNAV

SEQ ID NO: 242009 - protein, 376 aa, unidentified
MKKGTRFVGLDVHKDTIAVAVAEAERGGEVRSLGTIPNEGDAIRRLIRKLEGPEGLHVCYEAGPCGYVLYWQLAKLGVRCDVVAPTLIPVKAGDRVKTDRRDAEKLARSLRAGDLTPVWVPDAEHEALRDLVRAREAAKADQRRARQRLLKFLLRRGCTAPAKMRSWTDKHREWVMQLKFEQRALEETLTDYAAEVDHQRERVARLERSIDEAVDKVPAPMRAVIDALQSLRGVSKLTATTIVAEVGELSRFDRAAQLMGYSGAVPSEHSSGGKTRRGGITKTGNSHLRRVLIEAAWTYRHRPRIYGALRARQENIEEPVKAIAWKAQHRLHRRYRRLAERGLPHQKVVTAVGRELLGFIWAIGVRVERQLRAASS

SEQ ID NO: 242010 - protein, 392 aa, unidentified
MYIVGIDIGKNHHEASIVSPEGKQIGRSLRFATTHKGADSLMSFIFKNIGNSPCVFGMEATGHYWYPIYSFLKAKGYTIYVINPIQSDSLRKMYIRQTKNDSIDSFLIAEVIRFGQFGTTSMADENILAMRQLYRYRDSVISSRTDIKLRIGTIMEQIFPEYEKQFSSLWVSTSMGILEKYLTPENIENAPIDELFEIIKDKSHNRLTKAKAISIKEAAADTFGIKIAQDAFSFQLKQLIDRMNFLDKQIEALDCQILEYYEKFDCYLHTIPGIGMIAAATILAEIGDINRFKSSSALVAFAGIDPTVRQSGEFSSTHNHMSKRGSPYLRHAIFLAATTCSFHNSPLNAYYKKKRDQGKHHLTATGAVARKLTTVIYAVLRDSKPYEPKKFC

SEQ ID NO: 242011 - protein, 361 aa, unidentified
MKTLRNSEAKTMPPSHTTVGLDVGDRHSWFCILDESGEVVAEGRVRTTTEELDEHFTRWASSRVVLEAGTSSAWISRLARAAGHEVIVANPRELRKIHQSDRKNDRTDAQVLARMARFDPQLLAPITHRSAAMQNDLAVVRARDVLVRARTQCVNAVRGLVKTAGGRLTVCSTESFARKAAVQLPSGLESALEPMLKTIEALTEQIRAYDRVIDQLASRYPATEVLSQVTGVGALTAVAFALTLGDPSRFGSSRDIGAYLGLVPRQHDSGNHVSQLSITKAGNTLLRRLLVGSAHYILGAHGPDCDLRRYGERLMARGGRNAKKRALVAVARKLAVLLHRLWVNGEVYDPLHTEREDRQAA

SEQ ID NO: 242012 - protein, 347 aa, unidentified
MRFYTHQHKHYCGIDLHAKARYVCILAQHGTKLGHKNLPTTPDAVLRRIAPYRDALVVGGECMFTWYWLADLCANAGIAFVLGPALYMKAIHGGKAKNDRIDAPQSAVLLRGGMFPLAYVYPAEMRATRDLLRRRCHLVRNRAELLAHIQNTNSQYNLPEIEKKLAYKANREGGEEHFPDPSVRKAIEVDVALINHSDPLLGEVELYITRSAKVHDVQPFARLQSVPGIGQMLALVILYEIQDIARFPRVQDFVSDCRLVKCAKESNHTRLGTSGKKIGNVHLRWAFAEAAVLFLRHNQPGKEYFAKLERNPGKATALTVLAHKLGRAVYYLLTREQAVDLHRFVAA

SEQ ID NO: 242013 - protein, 343 aa, unidentified
MTKITTVGLDLAKSVFQVHGADQDGRPIVRKKLRRAQVILFFADLPPCLIGMEACASGHYWARELQSLGHEVRLIPPQYVKPFVKTNKNDAVDAEAICEALLRPTMRFAAVKSAEQQSVLMLHRARELLVRQRTMLINALRGHCGEFGLVAAQGASKVAELIEVIENPEDERLPALAREALGSLVEQLRVVQAQILGLEKKLLVWHRANEASRRLETIPGVGVITATALVATIGDASQFHSGRQLAAWLGLVPRQHSSGGKERLGRISKRGDGYIRRLLVHGARADLRWSRHRKEQRSLWQESLLARRPTNVVLVAMANKTARVVWAMLSRGEAFRTEPLASV

SEQ ID NO: 242014 - protein, 330 aa, unidentified
MQRKLESQGRVNAMNSPHHHTIVGIDVAMNSFDVATNRSNHVRHFAYDDAGLRDLVKHLRSITPHQVVMEATGGLQRRLVHHLLHAGFSVAVVNPRQVRDFARAFNQLAKTDVIDARMIASFAQTLQPRSCELPPVYEDKLRALVVRRRQAIDSQIRERNRLSRAYDTEVRKMTRQIIEVYTRQIEKIERQIAKIIKENQELQARAAILQSTPGIGPATTGTLIAELPELGRLNRQQIAKLVGIAPFNRDSGLMRGTRMTGGGRVSVRNSLYMATLVATQHNPRIRAFYQHLLAQGKAKMIALVACMRKLIIILNVMIRDQQPWINPQNA

SEQ ID NO: 242015 - protein, 336 aa, unidentified
MYYVGLDVHWKQSTFCVLDENGRKMSSRTVHGSWDKVLVALSCVKKPFAICFEASTGYGYLYEKLRELAVRVVVAHPGKLRWIFRSKRKNDRIDAEKLAKLLFLGEVPPVYVPAAEVRAWRGMIEHRSGLLADRTRAKNEMRALLRGQGIVAPKGLWALKGLAWLRGLKFLSGFDAVRRDTLLERIVSLNKMIELVEAELAKVAATHPGVQLLLTVPGVGIRTAEAVMAYIDKPERFRSNKSIGEYFGIVPCQDSSAGQNRLGHITKQGPTTVRRLVTEAAWQAVRRNAQVRAKFERIMAGDNDRKKIAVVAVAHYLLRVMLAMLKSGEAWREQAA

SEQ ID NO: 242016 - protein, 315 aa, unidentified
MAMRVTLEKPIIGVDVAKNELVIYHDQYDRLEAIPNTKVAITQWLKALASSCAIAIEATNVYHVLFADAAHEAGCDVYMVDGYQLSHYRKGVNIRAKTDAQDARLLARYLKNELDELRPWIPASPLYRQLLSLFRRRAALVQARTGLVQSWTNEPFLRTAFANQVNSMKRFEALVEKKIRDVLQEAGLMRQVNRCMKVEGIGFLTAARLVTSFQRGEFSGANAFIAFLGLDLRVSKSGQSDGPRRLTKRGDPEARRLLHNAAMSGSRTPAWKPFYEEQRKRGFSTTQALVMLSRKLARVVFALLKNQSEYQTKVA

SEQ ID NO: 242017 - protein, 311 aa, unidentified
MASEKVYVGVDIAKATLAVRFLDQQFECPNTDAGHGALIDRLRASAKPVHLVCEATGGYERALVRAANQANLPVSVVNPRQVRDYARARNRLAKTDRIDAAILADYGATIQPAATPAPTGQQLALAELMSARQDLLVRQKAESNRLEHLTLPALIRDTKTELRRLEKRLKNLEAMIEAQVEADSVMVEKAARMETVVGVGRITVLTLLAWMPELGQLHPAQAAALAGVAPYARDSGQYRGQRHIRGGRPAVRRVLYMAAVAASQHNQILQTHYQQLVARGKPAKVALTAIMRKLIVLLNRLLQDPNFVLVG

SEQ ID NO: 242018 - protein, 385 aa, unidentified
MRNIALDLAARKIVLCEVAEGKVIQRRTVGSLDALSDLLGPGTAPSRVAIEACREAWHVHDVLTGWGHEVLLVDTTRVKQLGIGQHGRKTDRIDAETLARAVERGAIPLAHTLSKPRQELRLELSVRRALVESRAQLIVLVRGLVRAAGGRLPSCDSGSFLDQVARATLEAPTRARIAPLLGVLAQVQKELVFVEERLERLCATEPIILQLSTVPGVGLIVAASFVSVIDEAGRFRNAHQVSAYLGLVPREDSSGDRRRLGSITKSGNGYVRSMLVQAAWTILRLKNSSDPLRRWADAVAKRRGKRVAVVALSRRLAGVLWAMWRDDTVYDAAVLAQESARGHRRHAQDLETRAAALELAAGKARRRTRRITSTRQPATEAAVAR

SEQ ID NO: 242019 - protein, 397 aa, unidentified
MYIVGIDIAKRKHEAAVIDGEGAVIIKPFSFTNNCSGYNRLLAMLTKAKLPLDEVSFAMEATGHYWLALFTRLQKEGFRVQVINPVQTNSIRNFYIRQAKTDPRDALLIAEVIRFGHFSESTLHPENIYELRELCRGRHAIVSMQADVKRKVVALLDQVFPEYETAFTNMFGDTSMAILQTCPTPKELSEMPLEELCHLIEVSSHKRFRMAKAQELQELARSSFGFAMAGDVFSTMIRLYAKHLDFLKQQVREMDRKIAEIMDSLDTPITTITGIGPTLGAYILSEIGDISRFSSAAKLAAYAGIDPTMRQSGEYNGVRNRMSKRGSPYLRHAIWLAASSAVLHDPALKLYFQKKRDEGKPYMASVGHACRKMVSIIYAVMRDNKVYTPCIPNEISA

SEQ ID NO: 242020 - protein, 349 aa, unidentified
MKFNTQNAKKLKQLQKLLWYSESMSEVKRIMQELFDYRGIEYSKKPLKFSNDEAGFVTFKAWILDIKEKHGKDKVVPGMEPTGHYWFNLGKFLQDNEMKLVLVNPHHVKKSKELDDNNPTKNDRKDPKVIAGLVREGRYMIPYLPEGVYADLRTASNMRFQLQAELTRIQNRISRWFNIYFPEYKTVYGQPDAKSGMLILKVAPLPEDIMMLGIDGVNQIWRDAKVRAVGKARAKTLIEAAEHSAGSKEGERSARMEIRMLLEDYESRNTRLQEVVALIEELVKKIPMAEKLLEIKGVGIKTVSGFLAEVGDISRFNNPKELQKLAGLALVENSSGKHKGRLAVSDNIE

SEQ ID NO: 242021 - protein, 340 aa, unidentified
MSRIKDIRKSVDITHMYVGLDLHKATINATVMDENGTVLNEVKIKSEPDSLRNFSDSIPLGSDIVIESSSTWYWAYRILSERHNVTLSNPLKTKAIAESKVKTDKVDSLTLANLLRGGYIAESYIPPMELMQLREMVRYRASLVRVRSIIKNRIHAHLLMYNIKINASPFTKEFIKTLRELNDYKINGYLNVLEVLNKEIDDISNKIKDIAEDNEDAKLLMSIPGISFYSALFIISEIGDINRFPDSGHLVSYAGLAPSTRSSGNKVYHGPITKQGSSYLRWILTQVTWANIRKEPNGTVGNFYSKLKKKKGSSKAIVAASAKMLRIIYWVLKEHRPYQS

SEQ ID NO: 242022 - protein, 425 aa, unidentified
MRNKQYSRQVEKRKRIGDRTLVVGMDIGKEFNAACLMDKEGKVLGRYARVYNSRKGFDYFQAMVEQATKKRKFTKVLIGMEPTGHYWRKIAFFAKEKGYEVRFIRTTALRHQRELDESSPAKSDIKDAFTIANIVREGKYIDTVIEHGIFRELRTLAHVRERTLRQNIGSKHVLEAVLDDYFPELRQLFWSMNAKSLWALLEIHPFPEDVRRAGCAAITTLLTRTMRRKRQAREKAQKIFQAAAESVGLTTIGQADRVRLRIAIEEVRRSGVKLNELEREIKGLVKQISLARYILSLPGTGPLSCGIFLGELGNPDYFKNPRQIIKYAGYDPKEDDSGSRVGRKVISKKGRWLLRKVLFYMALGIVQRSSFFKGYYEHKWKGCDRSLKKKEALCAVILKLIRVLFALIRDRRMFTEELNRCEQAA

SEQ ID NO: 242023 - protein, 440 aa, unidentified
MTTLQVLNERAGGLDVGSEKIHVSVAGDRPRVFGTMTPDLHKLRDWLLEQKVETVALEATGIYWLPVYEVLERTKIKPIVVNGRHVKNLPGRKTDMSDCQWLATLHVHGLLRGGFVPESSIRELQDYMRLRSDHISMAAAHIQHVQKALERMNVKVHDVISRITGVSGLAIVRAILAGERDPARLAGLADPSVLARKGARLVDALQGQWRAEHLFALRHAFELWEFYQTKIAECDQAVAALLQKMNENRPPAPPTSGPRKPLRGPNVPQIEKLNESLRQLCGGVDVTQLPGIADYSALLLVSEVGTDLSRWPTAKHFTAWLGLAPGSHQSGKRRGRVSTQRNRAGRVFCTIARSLAKCTDKALGGFYRRLKGRRGGLIANQALARKIAELYWRTFVKGLQHVESGLAAYQEKLHQQEKRVAEKLAAKMGCRLVPITTVHG

SEQ ID NO: 242024 - protein, 395 aa, unidentified
MKENSTEITYIGIDAHKKDHKVCILYPGDEKGKEVTINNHRSEIKRLMKKIKKQAPGEVRVCYEAGPCGFILQRQIEEEGVSCVMIAPSLIPVKPGERIKTDRRDARKLADYFKAGLLTEITPPTRREESVRDLCRCREAAKKSQTRSRHQLSKFLLRRGYVYREGRAWTQRHHRWLNGLKFEDEIERQVFEEYLAEVEHSTDRVKSLEAKVEQVSKEVPYAEPVGWLRCFRGIDTITAMTILSELYGIGRFPSARHLMAYLGLVASEDSSGEKQRRGRITKTGNQRVRRVLVESAWHQRNRLTTSPVLKKRREGQPKWVIDVAEKAKKRLHHRYWWLVNQGKTTNVAVVAVAREMVGFIWSVLYTQVDVISDAVDRPVDRGGVVDNKKPLPTAP

SEQ ID NO: 242025 - protein, 339 aa, unidentified
MSVLFVGVDVAKATLVAALWIEGKAQNLQDCPNNDDGFLSLAEQLHKACHTFARSSVHLVLEPTGGYELALAGFALQQGWSISRPNPAQVREWARGRGYRAKTDRVDGRMLAHYGAEAHPPCWQPLPTEVNELELLLRRKEDLEQLLRQELNRQQALKGRPGVPASVTTSLERVVDALEQELQELEQAIKQHLSAHAELKVAAKRLRSVPGIGAKNVLWVLVLLYRWHTLTQGQGEAKGLVAYAGLDPQAYESGTSVRKRASISRKGNRGLRRRLFLGALGGIRGKNVLRAFYQRLVGRGKAKKVALIAGARKILVWAWAVFRDHTTFDPAKVSRELAV

SEQ ID NO: 242026 - protein, 414 aa, unidentified
MDDEFRWFVGFDWAIAQHRVCLLDGEGKRVAERDVAHDGTGLSQLCAWLIETTAAPPGAIAVAIETPRGPVVEALLERGFAVFAINPKQLDRFRDRFSVAGAKDDSRDAFVLGHSLRTDRHSFRRLTVDDPLVIELREWSRIDAELKDERTRLTNRLRDQLWRYYPQAGELTDDLAAAWFLDLWHKVPDPAAAARVSEKTIARILATHRIRRFDAAELLRRLRQPPLAVAPGTVAAATAHIRTLAARLRLINQQIRQAEHRLDELCAAIETTPGQICEQRDVAILRSCPGLGRITLATLLAEACEPLRRRDYHGLRLLSGVAPVTRRSGKSLLVLRRTACNNRLAQAVYHWARVAVQRDPISKQRYAALRQRGHSHGRALRSVSDRLLYVLCTLLQRQALFDANRSTAQPAPAA

SEQ ID NO: 242027 - protein, 430 aa, unidentified
MKKKSQLNQKIEAVTLRTLVVGIDIAKEKQWARFVDCRGVECGKAMYFRNDRTGFEAILARMRQISKENSFAEVIVGMEPTGHYWKALANYLMKQEGIHVVLVNPYHTKKAKELDDNSQTKSDKKDALTIARLVKDGRYSEVYLPHDVYADLRVLTTARNSVNRQKNALENTILAVMDEYFPEFTKVFKHPFKGKAAMQVLKSCPFPKYILQLGIAGVLTEIKKAVKKSVGMKRAQLLVDTAQASVGVDYGIDSARCKLRLLLESLELANRQLAQIEAEMAVALQKTGMAEYLLSIKGVGVVSLAVCLGELGDPLRFDDPRQLSRLAGYNLVEDSSGKNKSGTCISKRGRKGLRRVLYQMALTCVAVNPELKELYHYLKTRAVNPLKKMQALVVISKKLLTLIYTLAKKKQYYNPAKVFGEVCKNQLMAA

SEQ ID NO: 242028 - protein, 338 aa, unidentified
MTLYCGIDLHSRDSWLAILDDGLEVIGETKVGNDLETILRVLEPHREALAGVAVESTFNWYWLVDGLMDAGHRVHLTNTWAVKQYEGLKYTDDRHDARWLAHLLALGILPEGYIYPKEERSARDLMRRRSFLVRKRTSFILAMRGAFECRTGMRVNSNDLKKWKAEDVMAYVEDPMAAFGITCLLEPMHALSAQIKKIEKAALSRGKLRPEFVPLETVWGIGKILALTIMYEVGDVARFRKVGNFTSYCRLVNTARLSAGKRKGSGNRKNGNPYLSWAFSEAAHHAVRHYPEAQKYFQRKRAKTNGIIAIRALAHKLARASYHVMRDHVDFDPEKTFG

SEQ ID NO: 242029 - protein, 392 aa, unidentified
MVISVGIDVSKDKHDCFIVNSEGEVLADVFTIHNTMDGFNFLLQRIRECTMPQDKIKVGLEATGHYSYNLLGFLLDSGLATYVINPLHTNLYRKSLSLRRTKTDRIDARTIAMMLMSDVDLKSYSNTAYHNEELKSLTRYRFDKVKERAKLKSSVARLVNILFPELEKLVSSLHIAVVYALLSNYPGASYIANANTEELAETLCTASKGRYTKSKTAEIQVAAGVSIGSKMPAKSMELKHTIALIRELDKEISEVESAIDKITSQMDSPIFTIPGIGRHMGAMILAEVGDFSNFASADKLLAYAGLSPSTYQSGQLQNCYAHMEKRGSRYLRYALFNAAKYVCLWCPTFSAYLEKKRSEGKHYNVAISHAAKKLVRLIFAMQRSGKAFLADY

SEQ ID NO: 242030 - protein, 354 aa, unidentified
MSQTSNTAIAVIGIDIGKNSFHVVGHDARGAIVLRQKWSRGQVEARLANIPPCLIGMEACVGAHHLSRKLASLGHDARLMPAKYVRPYSKGQKNDFNDAEAIAEAVQRPTMKFVATKTAEQLDLQALHRVRERLVSQRTGIINQIRAFMLERGIAVRQGIGFLRMELPTILATRTDALSPRMLRVIEELAGDWRWLDQRIDGLSGEIEALARLDQACLRLMTVPGIGPIISSAMVAAIGTGDVFSKGRDFGAWLGLVPRQISTGDRTILGKISRRGNRYLRVLFVQAAWVVLVRIKNWERYGLKSWIEAAKRRLHHNVLAIALANKLARIAWAVLAKGRGFELTRTDDAGVRPA

SEQ ID NO: 242031 - protein, 416 aa, unidentified
MKEWKDITHYAGFDWARNHHVVVIVNQQGQIVADFEFEHSVEGWKSFGEKTAGFTHLAVAIETSQGAAVDQMLQRDYTVYPVNPAAAASYRQRKAPSGTKTDHIDGWSLADALRVDGHGWRALQPADELSTQLRLLCRDEVALIAQRTLLVNQLQQALVEYYPAALEVFEDWVSPATWDFVLEFPTPEALTKAGKRRWEKFLHTHRLWRPETVEKRLAVFAKADQFKASAPVTKAKSQLALSLCKLLRTLQQQLDQYREQIEALFKNHPDHDLFGSLPGAKKMLAPRLLAAIGSEPNRYGTFQVLQSYAGTAPISFESGKIHKARIRWNCDKFMRHTVHLWADCFHRVSPWGQAYYRKKRQTGMTHACALRCLGQRLLKIVFRMITDKKPYDADLHTRNQQKHGSWVPALIQKPAA

SEQ ID NO: 242032 - protein, 418 aa, unidentified
MSNDVRFFAGVDWATETHQVCIVEAQGGKIIGERAFPHGGEGLAELCDWLVSTSGAEPPMIAVAIEAPHGPVVEILLERRFQVDAVNPKQLDRFRDRHTVAGAKDDRRDAYVLADALRTDRHCFRPLAAEDPVVIELREWSRMAEDLQQERNRLANRVREQLWRYYPQALELGDDLAADWFLDLWALAPTPAKAARLRESRVAGLLKAHRIRRIDATEVLRILRQKPLVVAGGTVEAATAHITAVAARLKLVNQQIKQAHRRLDELSDKLAESREEDASGQKSEQRDVTILRSLPGVGRIVLATLLGEAAEPLRKRDYHALRTLSGVAPVTRRSGKRCVVLMRQACHLRLRTAVYHWARVAIQHDARSRARYAELRKRGHSHGRALRSVADRLLAVACAMLKAQTPFNPKYALEAAAA

SEQ ID NO: 242033 - protein, 357 aa, unidentified
MKVTTIGIDLAKDVFGLHGVDGKGRVAFKKRLVRSRLLEFMSQLPPCLVGLEACSSAHWWARKIERLGHRVKLMSPRFVKAYRKSDKNDANDAEAICEAVTRASMRFVPIKSEAQHEVQALHRVREQLLKSRTALVNQARGLLAEHGIVAPLGIARARRLLLEILADPERHGLSGLFRETLQEMAERLRFFDERVGAYDDRIERRFKEDERCRRLAKIEGVGPLVATAVVAAVGNASEFKSGRELSAWLGLVPRQHSSGNRSQLLGISKRGDRYLRTILIHGARAALRRADHKRDQRSRWAMRIKQARGYNKAAVALANKNARIIWALLTRGENYRPPAISVASPTADRISPTQVQA

SEQ ID NO: 242034 - protein, 342 aa, unidentified
MSVYVGIDVHRKRSQVAVIDAEGQVLVNRNVPNGAEPILKVIGGLPPGTPAALEACYGTSWLVGLLEDYGFDPHLVHPSRCKAIASARLKNDKVDAAILGQLLRADLLPEAWIAPPVIRQLRALLRHRVALVRLRTRLRNRIHAIVADYGYDRPGGGYWTGPGRAWLAALELPVVSRELVEDYLGLIDAVQARIDRLDWEIRQRARADPRVKVLTQLPGVGPFTALVILAEVGDISRFASARHLASWAGLTPTVRGSDRVAHYGHISKQGSAWLRWVLCEAAQTAKRSPEFADAFQRIAKRRGKKIATTAVARKLATRAWHLLADAEHAAAFQPAAPAAAAR

SEQ ID NO: 242035 - protein, 389 aa, unidentified
MKIFVGIDMAKLNHFAAAISSDGEIILEPFKFTNDADGFQLLVSKLESFDKNSLIIGLESTAHYGDNLVRYLVTELYQVCVLNPIKTCQMRKNNVRKTKTDKVDTYVIAKTLMMQDNLRFVSFFDLDMMDLKALGRFRQKTIKQRTRLKIQLTTYVDQVFPEIQYFFKSGLHQNAVYALLKEAPSPKEIASMHMTHLANLLKVNSHGHFTKEQAKELRVLAQKSVGANDSAISIQITQTIQQIELLDSQLEKIEAEMTDIMKFNDSVIMTIPGIGYINGGMILGEIGDIHRFSNPNKLLAFAGLDPSVYQSGNFQAKTTRMSKRGSRVLRYALVNAAWNVVRNNATFKAYYDAKRAEGRSHYNALGHCAGKLVRVIWKMLTDEVEFNLE

SEQ ID NO: 242036 - protein, 378 aa, unidentified
MNNNQTKSNKNQGQTQADASTPEPKAQTIKLGIDVHLDRYVVVRIIDGGTPQPPQRFEPVAFMLWVAKQLTLAEKVFTCYEAGPFGYSLHRKLEQMGATNYVVRPRDWDEYGKKVKTDKRDAQQLALHLERYVHGNHDAFCVVRVPTSEQEQARSLSRQRESLQHEKQRLAAQGRSHALYYGEHLQGEWWREEVWKTSSSQLPAIVVNLLEPLRRLLAAVEVELQARTREVQAAAPEGLPLGLGKLTSEILEREVGDWNRFQNRRQVGSYTGLCPSEDSSSQRRFQGSINKHGNRRLRPVLVESLWRLSVFQPEYRVVKKWRAELVNPKTSKPRRKKIVVAMARAFAVDWWRVRTGRCKAQDLGFVLQRSVSAKAEAK

SEQ ID NO: 242037 - protein, 351 aa, unidentified
MNSMIIGGVDTHAATHCAAAIDTTGRLHGVAEFPATDAGYKRLVAWLRSHGELQAVGVEGTGAYGAGLARHLRVEHVTVIEAPRPDRRLRRNHGKSDSIDAEAAARAVLAGTATVIPKRADGPVEAIRALRVARLGAVKAKTAATNTLRGVLITAPEPLRAQLPSSGLPNKVIEACARLRPDTDHLADPTQATKAALRSIAQRARALREEIKTLDAQIQALLAVTAPATLEVFAIGPDTAAALLITVGDNPDRLRSERAFAHLCGVAPIPASSGKTNRHRLHRGGDRSANRALHIAVIVRMRYCPKTRAYVARRTTEGLSKPEIIRCLKRYLAREIYRALRADYTALTAVT

SEQ ID NO: 242038 - protein, 416 aa, unidentified
MLFIGDDWAEDHHDLEIEDQDGHRLARARLPEGLVGITRLHALVAGHAPAVWADPPPEQVAGQVIVGIETDRGPWVTALRAAGYQVFAINPLSAARYRQRHSTSGAKSDAGDAHVLGEIVRLDRDHHRAVAGDSDLADAIKLLARAHQSAVWERTRQVLRMRSTLLEYFPAAVQAFEDLAAPDALALLGRAPDPDRAAKLIRSQLVSALRTGRRHHVEVKADMLLAVLRAPALRQPGTLQGAYAAVVTGQVGIIAALNEQLAGLHEVMAAHFGRHPDADIYLSQPGFAVVLAARTLGEFGDDEDRFASSRARKNYSGQSPITRASGKKSVVLARYATNRRLGAALHLQAFAALGASPGARAYYDALRARDIAHHAALRQLANRLVGILHGCLKTGTVYDENIAWQHHQITTRTVAA

SEQ ID NO: 242039 - protein, 434 aa, unidentified
MPPVGHHFGAKGGRAMLVIGVDPHKDSHTLVAVDAAGCKRGQLTVPARQDGHLRAVGWARRLGEPVRWAVEDCRHVSGGLLRDLLAGGESVVAVPPKLMARTRASVRQRGKSDPIDALAVARAAQREPELPAARLDEQALDLRLLVDHRRALIAERTRIINRLRWHCHALDPDLAPGPRELSRKVAQAKLLGRLAARPVSVRCELALELVEAVRALTEKITGLDRRLTHLVSPLAPSLMAMPGVGVLTAAVLVGETAGVDRFTSKAAFALHAGAAPIPVWSGNNVRVRLNRGGNRQLNAALHVIALTQLRPGVHPPARALYDRLRAAGKTRPEALRVLKRRLADVVYRNLHYDQQPQVQLARSSGPYRNGTVPDSPDSQPAPGSRRAVKGGRSPSHSDAAGALDREERSELSTGGRIRPPRPQRPTPASIRSLT

SEQ ID NO: 242040 - protein, 422 aa, unidentified
MLAESRDEEQIIARVAALDIGKAELVCCVRVPAEPGGRKRLQEVSTHSTMTRSLTGLANHLVELGVERVVMEATSDYWKPVFYLLEAHGLDPWLVNARDVKHLPGRPKTDVLDSVWLCKVAERQMLRPSFVPPRPIRRLRDLTRYRIDLVGVRTAEKNRVEKLLEDACIKLSVVASDIFGVSGREMMAALIAGERDPKVLAQMARSRMRAKISQLEEAFNGHFDDHHRFLLSRMLSRVDGIDADIAAVDAQIEVVLAPFVAAAAVLDEIPGIGRVAAAIVVAEVGVDMSRFPTAGHLCSWAKFSPGISASAGKTKGNGSTGHGNRYLARVLGEAAVVAGKTDTFLGARYRRIAKRRGKKRAIVAIGRSILVIVWHLLANPGTHFHDLGADHFTRHVNPDTQKRSHVRQLEALGYTVSLTPAA

SEQ ID NO: 242041 - protein, 405 aa, unidentified
MLFVGDDWAEDHHDVEIQDETGRRLAKARLPEGISGIAKLHDLVGRFLTEDDDAAQVKIGIETDRGPWVAALVASGYQVYAINPLQSARAREGNGVSGAKSDAGDAHVLADLVRTHSHQLRTVAGDSEQASAVKVLARMHQTLIWDRTRQVLRLRSSLREFFPAALEAYEDLAHPDVLELLTKAPEPDIAARLTRAQIIAALTRARRRDREAKTTAIMGALRTEHLRQPPLTAAAYAATVRALAALITTANEQITALEGQVEAYFGQHPDAEIYLSQPGLGPVLGARVLAEFGDDPSRYAGARARKNYSGTSPITRASGKKKVVLARYVRNKRLADALHQQAFSALNASPGARTYYDALRERDISYNAALRQLGNRLVGILHGCLKTNTLYDEATAWNQPQQAAA

SEQ ID NO: 242042 - protein, 353 aa, unidentified
MIIIGVDYHPEFQQIALLDTDSGEFREKRLSHPEEAEQFYRAWAAAGEKVRVGMEASGHARWFERLVAELGFELWLGDAADIQSKRARKQKTDRQDAQLILKLMLKDDFPRIWVPSWENRDLRQLFWHRHRMVQARTRLMNQRQAVAINEGLRCKKRLWRAKGRQQLESFRLAPWASRRRRDLLELLDRLNPTIAELSQAIGQEAEKCPEARRLMTHPGVGALTALAFALIIGDAKRFPCGKQVASYLGLVPLEKSSGNRRRLGHITKQGSSLLRFLLVEAAQVTVRSLPEWRSQYFRMVMRRGRKTAKVAMARRLAIHLYWMWREERDYTWRGIGSHAGKPGTGDGVQSNTE

SEQ ID NO: 242043 - protein, 543 aa, unidentified
MVTATARKRWRSIPFRRVHPVSPEGRTGTSDYLKRGSQLQRPEMKTNHSKQTAKAASNDKAAVSAQRRPRRKKARNLRGAVLDGLEQINLHAAGIDVGAGENFVCVPRSSVKAGESPVRSFGVFTQDQDALVEWLKACQVSTVAMEATGIYWVSLFDKIEAAGIEVVLVDPHSVRQVPGRKSDVMDCQWLQQLHTYGLLRGAFRPEASVRRLRVLCRHRADLVCEGASHLQQAQKALVQMNVQLHLVVSDINGETGLRIIDAILAGERDPSALAKLRDPRIKKSTVPQMEAALTGHYPEEHLFALRQNIEAWRFFQSQLAGCDLQIEAALKAMASAERTGVPLVPPKAVPAAVPGTEGAKPKRSRPLHGNNALTLDFSQQMRRICGVDLMKVCGLNLLSVLMIVAEIGVDMSRWRSAKAFSSWLGLCPGTKISGGKTLSRRTRHVVNRASILLRLAALAAGQTDTWLGRFYRRKRSHLGAPKAITATAHKLACVIYHMLKYQEEFLPLDVAIYDIKAQEHRMRYLRKQAEELGFELVERKEAA

SEQ ID NO: 242044 - protein, 369 aa, unidentified
MKKIVKYVGLDVHKDSITIAIADQGRDGDVRIYGKIINDFDQIDKVMRKLISKNAKLRCAYEAGPCGYPLYRHLKHKEIDCIVVAPALIPKKSGERVKNDRRDAKKLATLHRSGELTAVYVPDQEDEAIRDLVRTRADIQKALRKVKQQINAFLLRHGISYSGKTKWSKAHLAWLTTIKMAHPAQQIAFTEYLDAMQNHDARVTRINKQLEAFCVTWRLRAVVQALQSMRGISLINAVTVVAELGDLNRFDKPSQLMAYLGLVPSEHSSGNSIKKGAITKTGNTHARRALIESAQAYRLPARKSATIRKRQRGVSEKVIAVAWDAQLRLCHRYRYLKARGKNHNVAITAIARELAGFIWAIVRLVPLSA

SEQ ID NO: 242045 - protein, 456 aa, unidentified
MEHYYLGIDVSKGYADFVMLDDKKQPIEENFQLDDTFDGHCRLYEILCTFCENHPKCTIYAAVESTGGYENNWFNALVKFQGTLNLRTARLNPLGVNANSKADLKRNVTDKISAQNVAEYMIAHPEKVSYQHHDQLASLRKQWGFINMLTKQSTQLFNQLEPLLYTANPEVLTYCKNGMPGWVLKLLMRYPTASDLSKAKVVSVARIPYISSARAQDLIIIAKRSVASATDKITAQLIMETVKQILHLKKIITSQIDLMVQQSSVPEVDLLKSFIGIKDYSAIGLILQIQAAERFPSVKKLASFFGLHPVYKISGDGVGRFRMSKKGRKEPRKILFMVALTAIRSNPLIRGIYLEHTQKGMEKMAAIGLCMHKILRVIYGMLKHNMAFDPEIDWKNREKSYQFKRKVHQDKNRRYQDFDAKAPISRRQNSKRKEQKQSHSDNNTNNGIIASAPLSP

SEQ ID NO: 242046 - protein, 353 aa, unidentified
MLRRRRPLVSEVYADRQFVGMDLHRRRSVLVRMSETGEHLETVRILNDRDVLAEVMSRAGASPEVVLEATYGWYWAVDALAELGATVHLAHPLGVRAFSYRRVKDDQRDAFDLADLLRMGRLPHAWIAPPATRELRELVRHRAKLVAMRSQCKAHVHAVLAKGGIWVPMTDLFGVEGNLLLDKVTMPAPYRERIASLRRFIEAFDAEIDLFTALAQRRLTHDAGYTAIQQIPGIGPVLAAVFVAEIGDVHRFAGPAQLTCWAGLTPSHYESDTTVRRGRITKQGSRLVRWAAIESVKILPETSRIGAIREQVAHRRGNRNIGAVAAARRQLELVFYALRDHHVRALHRSPHAA

SEQ ID NO: 242047 - protein, 369 aa, unidentified
MADHTLFVGLDVHKRTIAVATAPDTAGTPCVYYGTIANTPDALRRLCKKLAADGAELHFCYEAGPCGYVVQRRLSRLGHRCDVVAPTLIPRKAGDRMKNDRRDAMTLAQNLRAGHLVEVWVPDEAHEAMRDLVRMRALAKRDLRRARQQLQSFLLRHGRSYSGTSWSKAHRGWLADLSFGQPAQHLVLQEHVQRIERAEELGERVQQAIVDLLPAWTLAPVVEALQALRGVSVVNAATLVAEIGCFGRFDHPRQLMAYLGLVPSEHSSGQTIRRGPITKSGNTLARTCLVEAAWTYRFPARVSRIIQNRSAHLPAPIRATAWKAQVRLSRRYRRLMAAGKVAPKVVTAIARELVGFIWAIARMVEPKTA

SEQ ID NO: 242048 - protein, 316 aa, unidentified
MEAPVAGIDVSKDKLVVYFQGKYYEFPNDRQGYEEIIKILPKGCKVGIESTGIYHINLAKYLMGEYDVRIINPFILKKFKDFRGKKSDKNDAKKLAEIVVSMGSEFTTSDARELTSQWDFVTRSIARVKNRLRRDLTLLGYKDSLSKKNLEEVLRGGDSIVLAEVRFLLEELERLEVRKREIEEKLEDLVPKDSLIFTIPGIGKTLGCIILARVGDIRRFSDKKRFVAYCGLDPVIESSGKSVVSKGISKRGDAVLRRAFYLAALTAIRVNPVIKRFYEEHKGKLKGKKLIIACARKLAVITWAVLYYNKPFDASE

SEQ ID NO: 242049 - protein, 407 aa, unidentified
MEVLHPRCAGLDVHATNVVACVRITSGRSVTYEHRTVSTTTRGLLDLADWLTAQGVTHVAMEATGVYWKPVWHVLEDEFTLVLANAMHIRNIPGRKNDKNDATWIADLLALGLIRSSFVPPAPIQELRDLTRTRKQLVREITRHTQRIQKTLEDANVKLTEIISDILGTSGRAVLQALVAGETDPERLADLTAGRLKATRAQLVEALHGRVTDHHRFMLRLHLTHIGALDTAIAEVEARIREALTPFRAAVSLLTTMPGVSETAAAVILGEIGDDMSKFPSAGHLLSWAGLCPRLDESNGKRRSTRTRQGAPWLKTTLVQIAWPAARKKNSYFHAQFLRLKSRRGPKKAIVAVAASMLTDVYYMLRDGVEFHDLGDQYFVQHDKTRLANRLLQRLRDLGVEVEVKAA

SEQ ID NO: 242050 - protein, 346 aa, unidentified
MDHYAGIDVSLEASSVCVVDGAGRIVREAKISSEPAALIGWLASLGLDLARIGLEAGPLSQWLYAAMHEAGLAVELLETRHVRTALQTMPVKTDRNDARGIAQLMRLGWFRPVHCKSSAAQETRALLTARKLVQSKLYDIEMSLRGILRGFGLKVGPTTPKRFARRIQELVGGYRTLEIVAKALLSAHAVLLREFDMFEKLVRAMARKDKRARLMMSAPGVGAIVALTYVSAIDDPLRFSSSKRVGPHFGLTPRKYQSGETDVSGRITKIGDAGVRTALYEAANVILTRPVKGSGLKSWAMKLARRAGMKKAKVALARKLAVVLHRMWIDGTPFDARKATSTVVAA

SEQ ID NO: 242051 - protein, 309 aa, unidentified
MFVGIDVSKARLDVAFRPEGASFQVSNDEAGIGDCVRRLQALRPELIVVEATGGFETALVAGAAVVGLPIVVVNPKQVRHFAKAIGRLAKTDSIDAGVIARFAEAVRPEVRPIQNEAGELLTALLSRRRQVLEMMVAEKNRLVTMRERHVRQRITHHLHFLKQELRELDKDLDKEVRSTPAWREKEDLLKSVPGVGPVLARTLLAELPELGQLDRKRIASLVGVAPMNNDSGSLRGQRRIQGGRAQVRTVLYMAALVASRFNPRLKRFYDSLRASGKTGKVALVACMRKLLVILNALVRTGERWNAEAT

SEQ ID NO: 242052 - protein, 428 aa, unidentified
MASTTDPISPTTWVAIDVAKGVNVALIEHSDGKQQRLRFAHCREDYDRLVDLLGRLPAPCRVAIEPTADYHRTLAFCLLQNGFGVVFVSSVACARMREAAFNSWDKNDPKDAQVILRLLKLGMTQHYCDPLITQIHDLQELSKTYHHIAVARTRLQHILITHYLTLYFPEFERFWATQRNEWFIRFLIRFPTPASIRAVDFPSFREVVSDLMGRRVHKQAKIAEIYALAEHSIGLPVPEQSAAAATFRMQLERYLELCRARSELEQRAEQLLHDKTDYQQIRSIPGIGALTALVILAEAGDLRRFGHHRQFLKFCGLDLAKCQSGVYRSRERLSKRGNARLRCALWQAAMTAARMRENPFGEKYRRYVASAPNDADLKRKARTAVAAKMARVIHALVKSNCVYQPRFEFGLPSGSTPLNRAVEAFGTS

SEQ ID NO: 242053 - protein, 422 aa, unidentified
MKIVYPICCGIDVHKTFLVATIITSNGITPHYSKKRFSTFNNSILQFKQWLIDNNCFDVCMESTGKYWVPVHNLLEDTIRITIANPKWVKAVKGNKDDTKDSKWIGDLFRLGLVPGSYIPNKPIRILREYTRYRSKLVSCKSSEKNRFQNAFTVCNVALDAVVSDMFGKSATSITDYLLSSDAFDPEYCISLLQKSLKKKASSVIESIEGYQITQAQKERIVMVRSHLNYINNSINKLDQILDKMIEPYESTIELLCTIPGVDRQSAITIISEIGTDMSQFSSSKRLCCWAGLTPGNNESAGKKKSVRITRAGVYLKPALVQIAHAAVKSDNFPYYKIKYERIYKRRGKKRAIIAIARMILTAVYYMFTTGEEFNPCDLYKIDMPQEMQDKQKEKAIKEAVKFLIAQGVIKDSNISIQESNH

SEQ ID NO: 242054 - protein, 412 aa, unidentified
MTVTNQFAVHVGLDWADKKHDVCVQFKNGERVFHVIKHTAEALDIWLTELHQKVKGRIAIAVELKKGPVVYALKKYPFITVFPVHALSLARYRQAFSPSGAKDDPQDAELALELMLRYPQKIKAIEPDNADIRLLQQLVEQRRQLVEDKRRFVNRLINTLKQYYPQPLEWFSHRGSLLLCELIMQWPSLQQLKRARRDTIRNFLNAKGGRAMALTEQRVASIDNSIPLTTDPSVIEANALMATALARQIKVVSEIIKTYDERIETLFDTLPDAGLFKSLPGMGPCMGPRMLATLGDNRDRFNSAEEIQNYAGIAPVTERSGQKSWVHWRWQCAKFVRQTFVEWAAKTVNSSYWARLYYQGQREKGKSHQSALRALAFKWIRIIYRCWKTKTRYDEAKYLLALEARKSPLLKS

SEQ ID NO: 242055 - protein, 458 aa, unidentified
MLFAGIDWADRWLDIAVLDKAGQPLLEQRIVYATTPDPVAAYLALLQPLARRWRSTVTGIEEIGLPFARSLSAADMKVVHVDPTRAARHRTALGIPKNDRADARMIADLARQGIARPVVESSPPSQALRVITHAYRAAVRDRMAAAHALRATLSRAWPNAITAWPATRGGLGNPQALAILLAAPGPRAASRLTRTQLADLLRGAGRTRGTDREAERLHLHFHRPAMLLHPLVEEAEAVRIADLTATLAAAADRAARLEAQTADHYARQQHHHITACISGIGTILGAQLLSEIGDRPHERFGSGRALAAYAGVAPVTWASGTTARVSLRRASSTLLRSTLHLAAFSWAMHSPGASAYYRKRRDAGDAHATALRKLGRRLVLCLYHCMTTQIPYDDAAAFGYAPGEAPVLGRKPPLGDAEIAHARELLLLPGSSLAEVGRALGVSAQTIRRYVLGEPRSR

SEQ ID NO: 242056 - protein, 334 aa, unidentified
MKKVKEITESIGIDVSKVTLDVFIHTKQLHKQFLNNKKGFAELLKWVSKEKVNIEETIWCFEHTGWYCILLSHFMYTNKFHYCCVNPMEIKRSMGLRRSKTDKQDAKEIARYAWLRRNELESSIPMPLNLVDLQRLMSLREQLVKQSTALKNLSKGFKVTVEKESIDFGMKTIKQTLKQLESQIKKVEKEMTQLIKQDGEMYHNFKMSKSVKGVGDVMAIQMLLHTHNYSRFGTWREFSSYCGLVPYPYQSGTSIYRKPTTHSISDQKMKSLLTMSAISAIQSDKELKQYFKKRVEEGKPKMVVLNIIRNKIVSRIFATVKRGTPYVEMYKFAA

SEQ ID NO: 242057 - protein, 388 aa, unidentified
MHVYVGVDIAKELHYAAIMDSDGVVSKPFSFENNDKGFNLLLSHLAPYNKESILIGYESTAHYQENLAYFLKSLGYRTAEINPLQTAALRKANIRNTKTDSVDARLICLALMNHHIQGDQRDSARLDDLYQLCKMRMDTMKKRTTCKIQFVAIIDRIFPELASFFDNNLHTNTIYRLIESFPLPSQIKKTRIDILTKLLHKASRGHFKKEKAQKLKDLADISVGIPSDIFAFQAQQLVHQIEFYTDQIQTIEERINTNPDVMSSPLMTIPGIGTFCVACILSAIKNINDFGAPCKILAYAGLDPVIRQSGKFTASHTRMSKRGNSLLRYALVWSAGNVVKNNRTFAEYYRHKTEDQGKSHYQALGHCAKKLVKSIYHMLKYNESFNLD

SEQ ID NO: 242058 - protein, 410 aa, unidentified
MHHKLKYLYIGVDLHKRHHTAVMMTCFHEKRDEIQFENKPSAFPKFLQQVEKLAKKEGLTPMFGLEDVGGYGRGLAMFLIENKYEVKAVNPALTVSMRRSSPNNKKTDAWDAECVARILISNLDTLPTANPHDLYYAISQLVTRRENIVSVVTGIKLQLHQLLGYHYPSYKKFFSQVDGKTALAFWLKYPSPSCLRRVSVDELATFLYKKSNRYMSTKKAKDILSFVQQDGDTSKDYQGVNDFLVKNVVRDLIARDYQLEQIDSELAKHLALLDYKLETMHGISTVTAAELIAEIGDISRFSSADKLANFAGIAPVQHSSGNKQKSKKSKLGNRSLYDIFYNLAIRQLGVSRAKKPNHPVYHAYYERKLAEGKTKWQAIICVMRKLVNVIYSMMKYKTEYKMPVLTEQAA

SEQ ID NO: 242059 - protein, 322 aa, unidentified
MFLGIDVSKSTLDAALLKADTKVRHKVFANDAAGHAALIAWLGEHADDAVHACLEATGTWAQQAALALHQAGHIVSLVNPARTHAFGKSQLKRTKTDKADAILIAEFCRMHNPPVWTPQSPQVQQLQGLVRRLEHLEEMHKMEKNRLSSGGLSPQVEASLQEHISYLAHQIEKTRRQIKDHIDGNPDLKQQAGLLQSIPGIGATTAALLLAELGDISHFDNARQVAAFAGLVPRIRESGTSVRGRSRLSKVGSSRLRKSLYFPAITALRFNPLIKAFGLRLSVQGKPKMLIIGAAMRKLLHLAYGVLKSGRPFDPDFVPQAP

SEQ ID NO: 242060 - protein, 342 aa, unidentified
MDHFAGLDVSVKETSVCIVDDMGRIIREVKVASEPEALLAVLKNPAYRFKRIGLEAGPLSQWLYSALAEAGLPGICAETRHMRAVLKAQINKTDRNDARGIAQMMRVGLYRPVHVKTLRSQKLRMLLTHRKLLQSKAIAIDNDLRGTLRNFGLKVGVVGKVRFEARIRELVENVPDLAELVEPLLVVRRALREQFVILHRRLLAIVRDDEVCRRLITTPGVGPVVALTYRATVDVPARFRKSKAVGAVFGLTCAKYQSGESERSGRISRCGDEMMRVMLYEAAQSMLRSTRWSWLKAWAMQIARRRGMKKAIVALARRLAVIMHRIWIDGTEFRWTREAAVA

SEQ ID NO: 242061 - protein, 392 aa, unidentified
MYIVGIDIGKNHHEASIVSPEGKQIGRSLRFATTHKGADSLMSFIFKNIGNSPCVFGMEATGHYWYPIYSFLKAKGYTIYVTNPIQSDSLRKMYIRQTKNDSIDSFLIAEVIRFGQFGTTSMADENILAMRQLCRYRDSVISSRTEIKLRIGTIMEQIFPEYEKQFSSLWMSTSMGILEKYLTPENIENAPIDELFEIIKDKSHNRLTKAKAISIKEAAADTFGIKIAQDAFSFQLKQLIDRMNFLDKQIEALDIEIMKYYEQFDCYLHTIPGIGMIAAAAILAEIGDISRFKNSSALVAFAGIDPTVRQSGEFNSTHNHMSKRGSPYLRHAIFLAATTCSFHNSPLNAYYKKKRDQGKHHLTATGAVARKLTTVIYAVLRDSKPYEPKKFC

SEQ ID NO: 242062 - protein, 349 aa, unidentified
MPKSNTAVVTIGIDPGKNTLHLVGLDARGAIVLRERVARARIVSRLANVPPCLIGIEVGMGTHYVTRELLALGHDVRQVPPVYAKPFRQTHKNDFRDAHAIAEAVQRPTTRCVPPKTDEQLDLQALHRVRYRLVGQRTAIINQIRCFLLEHGIAVRQRLHWLRQALPDILAQRADVLSPRMVRILEDLAQDWRRLDDRIQAVSGEIEALSKTTEPCRHLMTIPGIGPIISSAVVAAIGDGTAFTRGRDFAAWLGLVPKQISTGDRTILGRITKRGNRYLRMLFMQAARVVLLRPRNWMKHGFGPWLAAAAQRLHYNVLATALANKLARIAWSVLAQHRVYEARLSLAAV

SEQ ID NO: 242063 - protein, 356 aa, unidentified
MIANKISGKSKKDNSSLTVTDSYEHYIALDWSERNMAIARMCKKDFEPKIIDVPSDLKELKLYLSHLKGNKILTIEETTTSQWLYVELYNYAEKIFICDPYRNRLLSDGPKTDKIDAGKLCKLLRNGMMKEVYHSTNELYELRKLVSYYDDEVRAGVRLLNQKSALYRAEHKSWKKKEEIENNRINNFIVAQLDEKISSYVEKKKKYENEFARVSKKNKVIKSLQSIPGLGPISSVTILSIVIDGKRFKSSNHYLSYCGLVKHEKFSGGRSYGKRIPRYSRRLKGVYKSAAVRVLITDNPLKEYYDYLIRDKKLAEHNARNAVARYIAKISLGIIKSGEKYKPYKWRNNQKEKEAA

SEQ ID NO: 242064 - protein, 318 aa, unidentified
MKKAFFCGVDVSKDKIDVCFLTSITSEKAKFETLPNNHELIKVYFDSFKNDEILVVFEATSNYHLALQKALSDLGIRYCVTNPYKSSLFLKHLSTIKTDTSDSYGLAVYARTFKSEIAPDKYNAEYLEIKSYNSTLNLLQKINTQLKNFKSSQKTLNNKVIDDVIANLIKEIAKLQAMLQKLAFDLVKKAIPETEEIIKNNKGFGIDLALNLFPQLHFNRDKSEKQFISFIGLSPRIFQSGSSVHKSQKINKMGNSNIRRILFMTALCAIRFNAKFKLRYERLLANGKKKMTAIVAVMCAIVRYLKSLFPFNPEIKAI

SEQ ID NO: 242065 - protein, 340 aa, unidentified
MDITTLGIDLAKSVFQLHGIDANGVVVLQKKLRRGAVLNFLSKLEPCLIGIEACATSHHWAREIAALGHDVRLIPPAYVKPYVKRQKNDAADAEAICEAVTRPNMRFVPVKTEEQQGVLVLHRSRDLLMRQRTMILNAIRGHFAEFGIIAAQGPRKVAELVGGLADEGDLGLPGTARSALQALAAQVNGLEQEVRKIERQLLAWHRQNAASQRLKTIPGVGLITATALAASVPDPTAFKSGRQFAAYLGLVPRQNSSGGKDRLGHISKMGNRYLRRLLVVGATSVTRRAPTTDTRTGAWVRSLLERKPTRVATVAIANKTARTAWALLAKGESYKAAPAI

SEQ ID NO: 242066 - protein, 349 aa, unidentified
MAQLREFILKNTVIVGLDLAKNVFQVHGMDADGAKTFNKKLRREEVKAFFRDLPACVVAMEAGSACHFWAREISALGHQTLIIPGQHVKPFVKRDKTDAADAQAIAIAAMQPDMQSVPAKSAEQQAMTVLIKTRALFIRQRTKAFQALRGHLAEFGIVTGVGTARLHRLVNELRAGAIGGIPSVVRDAILAISEDIEALDTKIAHFEKDLALLSKQEDDTRRLLTIPGIGPITASTIKAYVPDATMFKSSRQFASWLGLAPRVHNSGGKSRSGRISKRGNPIIRALLFVSGMTLVRQAKTKAPGAETWLTKLVGRRPYKVAAVAAANKIARVVWALLNSGDIFRAPTLA

SEQ ID NO: 242067 - protein, 312 aa, unidentified
MNDKQTSVYAGLDIAKASLQLHLQSKFFDLPNTATGHAQLIKRLAAIPGIHVICEATGGYERVVVATLHAATLPLSVINPARVRQFARASGELAKTDPIDAAVLTAFGQAFTPEPTPARTATELKLAALVTRRVQLLELRVAEVQRADTCADPDLRKLFSPWLAQMEKQIAKVEALIEALLKAQAPLADQVQRLDGIMGVGRLTAVMVLATMPELGQLNRRQAAALAGLCPYNRDSGQWAGKRCISGGRAEVRRALYMAALSASRSNHLLKPFYDRLIAAGKPAKVALTAVMRKLIVLMNHLLKNPNFSLAH

SEQ ID NO: 242068 - protein, 438 aa, unidentified
MARDIAIDVHKRTLFVVAADAAGVELWQRRFPTTAEGEAQLLRELTPEDRVVLEATCGAHRLANRLESTGAKVIVADAQHCRLLGMRGKKSDYRDCRALLSHLRAGEIVAVWRADPTTRWIRQLTRERAAYNQGIVRLKNRIQALLWEEGLVAPGRLFGAEGAAWLAAQALPETTRRIVAREWQALASLLPLKARQEQELAELALTLPLAQQLMQVEGFGAPTAVMWLGEVGDVTRFGSARQLVSYAGLNPLVDQSGERVRTGSITKAGRRSLRWIMIEVAWRHVGSGGSLAEYFQRLTRRGKKPQVAIVAVARKLLVLAYVLLTRSETYRHLNARRYERKLTDLAACRPVDLEPEQSHVDWAAARLKQTTGLDSPYREAHPVACPGRSRCRRRRPGRSSTAGSGFAEFPALEESDPSANPLNAGLVWEPEAVTAPVG

SEQ ID NO: 242069 - protein, 359 aa, unidentified
MKYVGIDYHKRYSVVCATDEGGSELKQRRINGNSAAGFAKFFAELGEPAKVVMEACWNWGWLYDLLGEIEGIGEVVLAHPYKTRLIAEAQIKTDHLDAQILAKLLRGGLIAQSHAPNCATRARKHLLRQRLFFVRLRTMLRNRMHAILDRQHGLERPQLKNFFSRRGQTWIENVELPCADDQPLLKQDLEVARLLEDKVKELDRVIGKSQSAEEKLLESIPGIGPLFSSVIATEIDGIGRFNSSAKLAAYAGVVPTTHASGGRVFNGRLLWQCNKWLRWALVEASWSAIQFSGYFGTIYRSARARGKNKNIAITMVAHRMAKIIWLLLKEQRPYIETLPDRSEEQVMVAPCRKALCFAS

SEQ ID NO: 242070 - protein, 415 aa, unidentified
METRKKERIHIYQKRNTCFVGIDMHKDMHCAVVIDCWMEKLGEVSFENKPAKFPAFVEDIRKICGTKDFVFGLEDTRGFGRNLAAYLVGRKFDVKHVNPAYTSAVRLSNPIIYKDDSYDAYCVARVLRDMVDKLQDAKHEDIYWTIRQLVKRRDLVVKTNVMNKNQLHSQLSYSYPSYRKFFALIDAKSALCFWENYPSPNHISNTTPEKIYETIKPVHQALKMGRILEILALVETDGDTRKDYQEQRDFIVRNIVKEIRNNQELLKEIDGQLKGLVAQTGYKLQTMPGIELITEAHLVSEIGDINRFPDSDKLARFMGLAPVHFSSAGKGRDERCRNGNRELNAIFHFMAIQMVAISPSGKARHPVFRKYFDAKVKEGKNKPRALVCVARRLIRIIYGMMKTKTEYKPYEKQQL

SEQ ID NO: 242071 - protein, 466 aa, unidentified
MGKRSGGNGMTRGDRRRNARRERLRGLLPRGGAVIGIDLAEDKQALAVIDHDVRVLARRTVRVKAFRLGEALDWAAAQARVKGFERVTVACEPTGPRWMQVQRLCAELGLPLVCVQPLVSHIAREQQDYTTHKTDESDCVLIGRLAAELHCYVPEELDETWAHLRHLGRRRAQLITAATASVQRIRDFLSVAWPVVTEACAGPFESVTWLAALQVVTGRCGGDPARLAALGLEEFTALVRGAVPGWGGKKGWGRICGRVFAALTDTEGAVAWSRRGLLRRVADELGDLARTRAQLRAVAADMVLVLGELGLSRLGVIPGLTAVGAAAILAETGDPRRYDSSSSLVKHAGLSPSENASGAFEGQAHISRRGRPGLRLTAWRAVWPMLQFNPVMAAKYAALTQAAGAAAADAGPQQARTAAAAARARRAKARVACAASLLRWIYSMVVHGTSWDAAVASGAACQPEAA

SEQ ID NO: 242072 - protein, 325 aa, unidentified
METKKLCCGIDVSHTKLDVCYQNNLGELFHLQVGNNNAGYQKIIEHTGTHYHFVMEATGVYYIRLAFYLHQQRCKLSVVNALSIKRYIQMHLERNKSDKKDAAWICHYAIEQSPSYWEMPDSAYFESKQLYNTIRDYTEQIKRINNQLHSLRLLPAPSKDTIKSLEKIIVCMEKEIKQLEQKLQLLLEQWQPEQLKNVSSIKGIGKRAAAKLIVFTQGFKHTQNHRQLISFAGLAPTQYSSGSSIQGKPRIYKRGGKNLRDVLYMCSMNAMKTNAACKALYERLRANGKTGKQALIAVCNKLLKQVFAVVKNNTLYQPNYCSAKP

SEQ ID NO: 242073 - protein, 420 aa, unidentified
MDQGTESWSQRTTFVGFDWASEHHDVVVVAQRGKIVEDFRFDDTAEGWQLLVKKLGKYPDVAVTIETSSGATVERLLEAGYAVYPVNPKAAKRYRERKAPSGTKTDRLDAWSLADALRVDGHTWRRLTPDDPLTVELRLLCRDEVVLIEQRTALVCQLRAALGEYYPVALEAFDDWTLPSAWAFIESFPTPAALAAAGKRKWEKFLHTHKLYRPQTYQKRLELFAQARVFCGSQAATNAKSMLAVALAGQLRVLQRHLDKFRDQIEKLFAKHPDNDLFGSLPGAGGKLAPRLLAELGDHRDRFDSHEALQCYAGTAPVADQTGKRKKARFRRACHKALRHTVHLWANLSRAQCPWAQAYYAKKREEGQSHACALRCLGQRWLKILWKMWQTRKRYDAELHQRNQLKHGSWVMGLMSGQNA

SEQ ID NO: 242074 - protein, 361 aa, unidentified
MNATTVAVDLAKSVFQLAVADASWRVVETHRLSRTQFERWFANRDISLVIMEACGSAHHWGHWFKGLGIEVRLLPAQYIRAYVKRNKTDAADAAALLEAARASDLHPVRVKSVEQQALQGMHRIRSLWMGTRTSRINALRGLCREFGIAIPVGARTGIEAISRVLADPNTAAPDLIRGTARLLIEEIRLLEARIAQLEGELAALARLSPACTHLLSIPGVGLLTATAMVAATSGDVSHFKDARHFSSWFGLTPREYSSGNSRYLGRISKKGDRYLRMLLTHGARSVLRASKVADNAGREVCGVRRWALDVQARSNHNKAACALANKLARICYATLRDKAPFGEQTVRLGKKINRESFVMPA

SEQ ID NO: 242075 - protein, 361 aa, unidentified
MNATTAAIDLAKNVFQVALADTNARVLEQHRLTRAQFERFFDNRKVARVIMEACGSAHYWARVFAARGIEVMLLPAHYVRAYVRRSKTDAADALALLEAARCADIVAVKIKSVEQQSLQALHRTRSLWMGTRTSRINALRGFCGELGLHVRVGARTGLEAMARALADDQSAIPGLLHPLMQQLFDEIRVLETRIAQLERQLVQVARESPACKLLMSIPGVGLLTATAMVAATSGSVAHFKSARHFASWFGLTPKESSSGGSRRLGRISKMGDTYLRMLLTHGARSVIRAATVAKLKGHELLGVRHWVLQLQARSNHNKAACALANKMARFCYAVLRDHTPFGQPATRLGKKMQRQSFELAH

SEQ ID NO: 242076 - protein, 344 aa, unidentified
MEYYAGLDVSLKLSSVCVVDAQGQVVREAKVASDPEALIGFFRAQDLEIGRVGLEAGPLSQWLHAGLVNAGFEAVLLETRHVKAALSAMTVKTDRRDARGIAQLLRLGWYRPVHAKSASAQEVRSLLTARKLIQCKLLDIESGIRGVLRGFGLKVGTVSRGRFEARILDLIAGHVMLETVVGSMLSARAALKAEFARLHRALLILVRADPVCRQLMSVPGVGAVVAVTFRSGVDDPTRFRRSRDVGPHFGLTPRKYQSGEIDVTGSISKVGDRMVRTALYEAASVMLTRTVRMSPLKNWAMAVARRRGAKKARVALARKLGVILHRMWVDGTSFRWTNETAVMA

SEQ ID NO: 242077 - protein, 455 aa, unidentified
MPKTTTDNRPELKPVNLGAAAIDIGSKMHMAAVNPASADIPVRMFGTFTSDLYDLADWFKACGVTSVAMESTGVYWIPVYEILEQRGFDVILVNARYAKNVPGRKTDVSDAAWLRQLHSYGLLRGSFRPDAEIATLRAYLRQRERLVEYAAAHIQHMQKALMEMNLQLHHVVSDITGATGMRIIRAIVGGERNLDVLATYRDVRCHSSVETIRAALVGNDREEHVFALAQSLELYDVYQAKMLDCDRKLEVLIAALSRKGAKPVGKLSKPRIKTKQVNTPTFDVRTALYGVLGVDLTEIHGLGPSLALKLIGECGTDLKAWPSAKHFTSWLCLAPGNKISGGKVLSSRTRRSSSRAAALLRLAATTVGRSNTALGAFYRRLSSRAGKAKAVTATARKIAVLFYNTLRHGMSYKDPGADHYEQQYRSRVLANLQRRAKSLGFVLQALPGGANPAVS

SEQ ID NO: 242078 - protein, 352 aa, unidentified
MEKSNKLDFGGQHIYVGMDIHKKSWSVSIHTEQFEHKTFTQPPEVEKLTYYLERTFPGATYHTVYEAGFSGFWLHDKLREKGIDCMVVNPADVPTKDKERAGKTDRVDCRKLARGLRNGEIKGIYVPPRVKVEDRTLVRTRQSMVRKQTRCKNQITSILFFYGIVIPEESRWSRRFINWIESIRMERVSGDFALKAHLEELNHLRQIIANLNKAILSLSKTEEYRADVLLLKSVPGISTLTAMILLTELADLSRFSSLDKLASYAGLVPDIRSSGETEYATGITFRRNAALRVLLIESSWIAVRKDPALTMAFNKLSTRMKKTKAIVHIARKLLNRIRFVLKNRQDYVPAVV

SEQ ID NO: 242079 - protein, 341 aa, unidentified
MKNLFIGIDFSKEKVDVAIIFAEGLAETSVRVFNEFKNSVSGYKQLVKWVEKNANGIDSSLWLFCGENTGDYSKPLCNHLYGRGFDMWLENSKCIKDASGIRRLKSDRADAAMIAEYAMRNHDKAIIYEPLSESLTQLREYYLYRQMVIRHRCSFEVRRGEKRLLMEKSAAKTVIAQSGKHIVSELNKEIAKIDKKIASLIESSDELSEVYRIVTSVPGIGTQNAVCLMVYTDNFRRFNYDARSIACYYGIAPFGQDSGTSVHVDPHVHHMANRHIKAMLTQAALAAVRFNPSIAQYYQRLIGRGKKMPVAMNNVKNKLLHIVTSMVKNKQVYKPEYRFSA

SEQ ID NO: 242080 - protein, 347 aa, unidentified
MRFYTEQHKYYCGIDLHARTMFLCILDQSGKICFEKNIKSDPDEFLTAIEPFRSDIVVCVECLFTWYWLADLCANMNIPFVLGHALYMKAIHGGKAKNDRIDAHKIAVLLRGGMIPQSYVYPPEMRSTRDVLRRRLYLVRKRGHLLTHIQNTNHQYNLPDIAAKLTYKTNRKGFTERFEDPSVRKSMDIDLELVAHLDRMITDLELFISRQAKRHDADMFHRLRSIPGIGKVLALTIIYEIHDISRFPRVQDFASYCRLVKCSKESAGKKLGFSGKKIGNVHLKWAFSEAAVLFLRNNPSGQKLLSRLAQKHGKGKALSILAHKLGRTAYYLMSHKRSFNMRKFLAA

SEQ ID NO: 242081 - protein, 420 aa, unidentified
MKVTYQTCCGVDVHKSFLVATIIKTTSGVQPSYQKKRFPTFNNSILEFKQWLLDNSCRNVCMESTGKYWVPVFNLLEDELSVTIANPKWVKAVKGNKDDTKDSKWIGDLFRLGLVPGSYIPCRPIRILREFTRYRYKLTSCRSSEKNRFQNALTVCNVALDSVVSDIFGKSATSVIDYLLQQSDNSINHEEISSRLLRSLKKKSESVIESIEGYQMTESQKYRMRLVHAHMDYITSTISDIDSMINSLVEPYENAVQLLCTIPGVDRNSAITIISEIGTDMTQFSNSKRLCCWAGLTPSNNESAGKKKSVRITRAGVYLKPALVQVAHAAVKSNKSPYYKAKYERIMKRRGKKRAIIAVARMILTAIYHMLSTGESWNPTDLYKIDMPEPLKNKQKEKAVKQAMKLLIAEGLIKESQLTS

SEQ ID NO: 242082 - protein, 387 aa, unidentified
MSQVDDLSRSLAAFDQNTTLTVVVELSEASWLVAGLVPGVDRQPLKKQEPDPRALLRLLERWRAEATKTGRMIERIVLAFEAGRDGFWLARWLRARGIEVYVIHSTSVAVSREHRRAKTDRLDTGMLMRVFLGWLRGERGHCRMVAIPTLEEEDAKRPSRERESLVGERTRIINRMKSALARLGIRGFKPALRKAPQRLEALRTPEDTPIPPNMLDEVRRDMIRLAVVREQIDAIERARLVRLEQAPASGSHPMVRLLARVIGVGIETADMLVQEVLSRKLRDRRAVARSVGLTGSPDESGKRRREKGLAKAGNARVRRGLIQLAWRFLRFQKDSALAQWYRARTEGPKGVRKTTMIVALARKLLIALWRLVMTGEIPVGVVLRAAA

SEQ ID NO: 242083 - protein, 405 aa, unidentified
MFDTEGVGVFLGLDVGKSAHHGHGLTPAGKKVFDKQLPNSEPKLRAVLDKLTAKFGTVLVIVDQPASIGALPLTVARDAGCQVAYLPGLAMRRIADLYPGEAKTDAKDAAVIADAARTMPHTLRSLELTDEITAELTVLVGFDQDLAAEATRTSNRIRGLLTQFHPSLERVLGPRLDHQAVTWLLERHGSPAALRRAGRRRLVELIRPKAPRMAARLIDDVFDALDEQTVIVPGTGTLDIVIPTLAASLATVHTQRRALEAQINTLLEAHPLSPVLTSMPGVGVRTAAVLLVTVGDGTGFPTAAHLASYAGLAPTTKSSGTSIHGEHAPRGGNRQLKRAMFLSAFACMNADPASRTYYDRQRARGKTHTQALLRLARQRISVLFAMLRDGTLYEPRIPKDVELAA

SEQ ID NO: 242084 - protein, 361 aa, unidentified
MIVVGIDPHKKTHTAVAIDAVTAACVAEITVGSGAAGHGRLLAWVRDLDAERLFAIEDCRHVSGSLERFLLGRAERVVRVPPKLSARTRSVARTRGKSDPIDARAVAEAALREPSLPEARLSGPDHDVRLLIDHRDDLVGERTRIQARLRWHLHDLELGDIVPTGALDRFKWLDRLLAELAMLPATVQTSIAADLVERCRSLSAEVNRIERELGELMERIAAPLLAQPGCGSITAARLIGETGGVGRFKSEAAFAMHIGTAPIPVSSGQRSRHRLNRGGNRRLNSAVHMMALTQMRMHEPARAFVARKQAEGKSMRDARRCLKRYIARAIFGILKEIEAAGSGRLVEVVFRSEPALVAASA

SEQ ID NO: 242085 - protein, 305 aa, unidentified
MAQSSTLFIGMDVHKETIAVAYVAQDHGAEVTYLGTIGTRQCDIDQLVRKMQSKAKHLVFVYEAGPCGYWLYRYLSKKGYDCWVVAPSLIPKKAGDRVKTDRRDAVPLARLARSGDLTAVDVPKVEDEAIRDLSRAREDTLSDLKDAKFRLKAFLLRHDIRYVGRANWNPAHLRWLSEVVCPTPAQQIVFQAYVRAVTEHTERLQRLEQELHDHVKAWRLHPVVEALQALRGVQFTVAVTMVAEIGDLSRFDTPRELMKFLGLIPSEYSSGERRQQGSITKAGNTHARRALVEGAWAYRYPAKVS

SEQ ID NO: 242086 - protein, 440 aa, unidentified
MSALPVIDPKAAAIDIGSEQMHVSIAGGEPKVFGSTTAQLHALRDYLLGEGVSSVAMEATGVYWLCPYEVLAKAGMQVVMVNGKHVKNLPGRKTDMKDCQWQATLHAHGLLKAGFVPREHIRRLQDYQRLRADHIAVAASCEQHMQKALERMNIKFHDAISDLTGVSGLKVIRAILAGERNPMALLARCDCQIQKKKAARVCESLVGTWKEEHLFALRQALAAWEFYRGQIAECDQALERVLQELTDDQPGPPEPLPSWGRRSGPNSPEIPQLRQMLWKLCGGKDPTAIPGISDYTLLQLVAETGTDLSTTWKTEKHFTAWAGLAPGARQSGKRRGSQKRSRNRAGRIFCIIARAVGRTADRALGGFYRRIKARRGGLVANLALARKLAQLFWQVLVHAMTYVEQGLKKYQDRVQKTEQAWLQKLAKKHGMVLLPTKLST

SEQ ID NO: 242087 - protein, 372 aa, unidentified
MKVTTIAIDLAKNVFNVLGMDVHAKQLFNKRLNRIQLVEFMQLQPPCDVTFEACYSAHYWGRKFNSMGHHVKLIPPQHVTPFVRGNKNDKNDVMAIFEASLRPHIRFVPVKTEEQQEVLMLHRVRERLVRQRTACTSQIRDVLVDFGICFPQGYSAFELAMWDIMNDDHQRPLIKLMANDFWDEYQVLTKRLKQINSLIEQLAMQDPNGSILLSIPGVGPIIASAFAASIGSGQTFNSPKELAIWLGLTPKQFASGTKSVHSGITKRGDGYLRKQLIHGARTVVSHASKKQDDLSMWINQLRTRKTMCCTVVATDHRLARLMWILPQKQNPVSASVWCLSCCMLKPLSLSCTARSGQGYLTRVGDMSGEIAH

SEQ ID NO: 242088 - protein, 411 aa, unidentified
MKRVIGMDIHRTFAEVVFWETGRLCPAGRIDMTRSGLEGFGRSLSKEDEVVVEATGNAMAVVRVLSPYVARVIVANPLQVKAIAHAHVKTDKIDAGVLASLRAAGFLPEVWLPDAETELRRRLVARRNQVVRHRTRIKNEVHAILQAHLIPPCPHADLFGRLGRSWLGRQELPVDEQAAIERHLRELDRLAEDLELLDREIAEEVIEDPSVKRLLTITGVNIIVAAGLVAAIGDIRRFSSPQKLVSYVGLNPRVRQSGLGLAQHGRISKRGRSHARAMLVEAAWSASKAPGPLRSFFLRIRARRGHQVAAVAVARKLGVLCWHLLTKDTDYQWARPALVAHKIRAMQLQAGQPEKKGNKRGAAYAYNIKELRSREIDVARHAEHAYEQFVSRWQPRGPGKRRTGAANEERR

SEQ ID NO: 242089 - protein, 342 aa, unidentified
MGEVSIIGLDLAKNVFQAHGAGADGSVIFRRKLSRAQLLTFMAAQSPCVVAMEACASSHHWSRAIGSLGHEVRLIPPAYVKPFVKRQKNDMADAEAIAEAASRPTMRFVAVKSEAQQAAAMAYRTRDLLVRQRTQTINALRAHLAELGIVAPAGPAHVGRLAAIIEGKDGMLPAGVRDLARLLLDQIAGLAAKIAGLDAELRRRVPTDDTARRLTTIPGVGAVTAAAITTFAPPMETFSKGRDFAAWVCLTPRQHSSGGKERLGGISKMGQRDIRRLLIVGAVAVVRWAARKGAPEGTWLGRMMARKPKMLVAVALANRMARTAWALLRKGEDYRDPTMATT

SEQ ID NO: 242090 - protein, 344 aa, unidentified
MQITRVGLDLAKRVFQVHGVDVHGKTKLSKKLARGEMLQFFAQLPACVVGVEACGGAHYWARELGKFGHTVRLMAAQFVNPYRKSGKNDVNDAEAICEAVGRPNMRFVPPKSEEQQALLMVHRARSLVVANRTAQVNQIRGLLGEFGLVVPVGLRRLRTQLPQILEDAENGLPILARHVFAELLQELHALDEKIQKIQRYDRQLQELARQSEPARRVMALEGIGPITATAFVASVGDARVFKNGRQFAAWLGLTPRQYSSGGTTRLGRITKRGDRYLRMLLVHGARAHLRFVERKNDPKSLWIKGLRARRHVNVAAVALAAKHARIIWALLAKGTTYRLPAAAT

SEQ ID NO: 242091 - protein, 343 aa, unidentified
MECYVGLDVSLKQTSICVVSRTGSVVREGVVDSDPDAIAAFVRSKAPGAIRVGLETGPTATWLWTELKRLGLPVICIDARHAQAVLKMQINKSDRNDAAGIARIMQTGWFKEVRVKDIDSHSVRALLASRALLVKIKRDLENQIRGLLKNVGLVIGRAKFNVFTMRAEELIADRLELIAVVGPLLKARQAIEQQTDDLDRKVLNLARHDAQVRRFMTAPGVGPITALCFKATIDNPARFKRSRSVGAYVGLTTRRHASGEVDWSGRISKCGDAMLRTYLFEAANVLLTRVPKWSALKAWGMRLAKRNGLRKAKVAVARKLAVILHRMWVDGTEFNWSTKKAAA

SEQ ID NO: 242092 - protein, 345 aa, unidentified
MDSMHYIGLDIHKKTISFCVKRMDGTICMEGVVPARRSDLSRWMRTLPRLWTAAMEATIFTSWVYDHLRISGHAVKVAHPAMLKAIAASKRKNDRIDARKIADLLRADLLPECYMAPSAIRELRRSLRYRNLLVRQMTQTKNKVSSLLMESGVEYNKQKLHQKKYFRELLKTAEHMPASLPPLLELSRTTLDSFGKIERQLVKGIQLDPLLCERIERLMTIPAVGPITAITWALEIGEVDRFPSYKQAVSYCGLCGAEDSSAGKTKRTPISKQRNKHLQTVLIEAAKLAPRLHADLALVHTKELEKGNHNRATLAVARKLVAYLLAVDRRKIGFNREGITTSQAA

SEQ ID NO: 242093 - protein, 352 aa, unidentified
MNNIKFIGMDVHQATISVAVVSEKGALLLETVLEAREKCIVEFMQRWSGEVHVTFEEGTWASWLYELLQPHAERVLVCNPRKIAKRGNKSDKIDARKLAYWLRSGDLSPVYHHDCGVRHLKELSRSYMTLSKDLTRIMNRIKALYRSWGVACAGKSCYGERQRSQWLAKLPQGGVRQRADQLYQHFDAVHPLLQAARKAMLAESKKHMVCARLKKIPYIGPIRATLLIALVQTPHRFRTKRQLWSYAGLGLVTVASGEYQMVQGKPQRHKNPLIRGLNPDCNHDLKYVFKSTANRASGGQGPFHDFYQNLLAQGMRDDMARLTLARKIAAIVLVLWKKGVDFDPQQLKRQAA

SEQ ID NO: 242094 - protein, 343 aa, unidentified
MNITTTGLDLAKSVFHVVCFNNQFKEVKKRMLRRSQVLHFFTQLPSCRVAMEACASSHYWGRELRALGHDVKLIPPQHVKPYLRGNKNDYNDARAIAEASTRPGMPFVAIKSTEEQDMQAIHRMRSQCIRDRTALSNSTRGLLGEFGIALPKGLATLRKSIHGILEDADNGLSDRFRKLLARRYDQFVALDDHIAFYTNELEILSQQDDACQRLQTIPGFGPVISSAFRSVIGDGRAYDRGRDASASLGLVPRQHSSGGKNVLLGISKRGDRYLRSQLVHGARAVVIQAARKDDPLSKWINRIREERGWNKAVVATANKMARIGWAILRHNTIYQPDSEQSIH

SEQ ID NO: 242095 - protein, 389 aa, unidentified
MKIFVGIDIAKINHFAAAISSDGEIILEPFKFTNDADGFQLLISKLESFDKNSIIIGLESTAHYGDNLVRYLVTELYQVCVLNPIKTCQMRKNNIRKTKTDKVDTYVIAKTLMMQDNLRFVSFFDLDMMDLKALGRFRQKTIKQRTRLKIQLTTYVDQVFPEIQYFFKSGLHQKAVYALLKEAPSPKEVASMHMTHLANLLKVNSHGHFTKEQAKELRVLAQKSVGANDSAISIQITQTIQQIELLDSQLEKIEAEMTEIMKFNDSVIKTIPGIGYINGGMILGEIGDIHRFSNPNKLLAFAGLDPSVYQSGNFQAKTTRMSKRGSRVLRYALVNAAWNVVRNNATFKAYYDAKRAEGRSHYNALGHCAGKLVRVIWKMLTDNVAFNLE

SEQ ID NO: 242096 - protein, 450 aa, unidentified
MSPLALDVVTKTGKTPVLGRMLSKYVGRKTSSIENDITKARNHLRQRGKIMRVVFGIDVSKASSEVAILVNGEKIHGYTIPNDAIGFNRLLEDLGTVYQPEIVFEATGVYSRRLQAFFEDNSYAYIRLNPLESKKQLDSLRVRKTDKIDAEKLATSQFILNRKPSYVQEALYQELRDLSRFYQNLTEDIVCSKNRLHKVLQVTFPELENILSSPTGKQYWNLVMAFPCNSFVLELDDAALRAIIRQSTSKRISENRVTYLVDKLTKLANHSYCAVKKTSPMMEEVKYYAGELLRLSEYRQSVLEKMITLAQPLPEYEILLSIPGIAETTATSIIGELGDIRRFHSANQINAFIGIDLRHYESGDFLAKEHITKRGNPYARKILFKCIHNIASASHTNPCHIADFYEKRKRQSQVTSTKPHTIASIHRLIRTMYYLITHNKLYDYTSTQNR

SEQ ID NO: 242097 - protein, 340 aa, unidentified
MRVLKQVLGVDVAQKELVVTLSVLNEDLSIDFLLHRVFHNKETGFVALLKWLKKHTDESIKLQVVMEATGVYHQKFAYYLDDNNISLCIVLPNKISSYLRTLETKTITDKTCSEAIAHFGLSRKLDNWTRPNKTYKVLQQLTRERDQLVFERTTIKNQIHAEESESEPNSSSIKRFNARIKFINKQEKEIKKEIDKWLNSDEKIKGQVEKITTIPGIGQLTAVTILAETNGFELIRNKKQLTSYAGFDVKEKQSGTSVKGKPKISKRGNRYLRKCMHLPSLSAVKYNETYRDLYTRIITKNGIKMKALIAVQRKMLELTFVLFKNDSVFEQDYKKKECFY

SEQ ID NO: 242098 - protein, 379 aa, unidentified
METSSKTCVAVDTEQATLFVALELSQATWLVGLHSPIADKISINRIDGGDTDKLLALIEKKREQAARQLGRPVRVVSCYEAGRDGFWLHRFLIGHGIDNRVLDSASILVDRRARRAKTDRLDAAALLRVLMALVRGEEQVCRVVQVPSIAQEDERRLSRERERLLHERNSHIARIKGLLALHGVRDYRLVVGVWKERLDAIRTANGHALPARAKTEIERECRRLWLAKEMLAEVEREIEQMIERDSAAAGKLIRVRGIGPTFASVLTHEVFYRSFDNRRQVGSYLGLVSIPWQSGGVRRDQGITRSGNARARRCAIELAWLWLRHQPGSALAGWYRTRIGTMTGRMRRIALVALARKLIVALWRYLQTGTVPEGAVLKA

SEQ ID NO: 242099 - protein, 361 aa, unidentified
MHEANGWVEMGSPKIDHKEVSMGSLYYIGLDIHKKMIAYCIKALDGRLIGQGKISAERKSVREWVNGLPGPWIGAMEATIFTGWIYDFLTPHAVDLKVAHPEMLKAITAAKKKNDRADAEMIADLLRVNLLPECHMLSEKIRELRRILRYRNHVVRTAVKMQNKISGLLMEVGASYSKSRLHGKKYFAGLLERVEEIPPSVKELLKLSRASFEMFRAVQKRLITELRTNGLIHDRVQRLMTIQGVGEVTALTWALEVGDPRRFSSIRQAISYCGLCSAQKESAGKEQRGPISKKRNKHLQTMLIEAAKIAPLWNSQLAAVHERELKKGNRNRATLAVARRLVAYMMAVDKNQTDFTCVCGQ

SEQ ID NO: 242100 - protein, 387 aa, unidentified
MYFVGIDISKFKHDCFIVDNNGEVIVSSWSFANDQEGFLLLKEILDGLEGEIRIGFESTGHYTDNIRLFLERYHYSFMELNPLLISRFNTSKSLRKTKSDTIDAALIAQYLMTVEYKPNPPTLYHIEALKSLTRFRDKLVKLRSRQLVELTNILDKIFPEFKPFFSNRFSATAIYIIANYQTPESIANMNSRSFELLRKKSKGKFTMAKFIQLKELAKNTVGNSSDYLIDELNMVIDIYSQLDSRICEIEALIKEYIADINPPILSIPGIGPFSAAVILSEYGDINNFDSPAKMLSFAGLEPGYYQSGVSEHTGKMVKHGSGHLRATLMNCCLPLISHDLVFAQYYSKKRAEGKSHRVALSHVAKKLIRVIYTLETKNISYDSSLIR

SEQ ID NO: 242101 - protein, 377 aa, unidentified
MTTTDAAAEARETVYVAIELSKKTWVLGIAHPDRDRPSIHRVSGGNIAELVSRLRVAARNNRRILVCYEAGYDGFWLARALAKMGIECRVLDPASIQVNRRARRVKTDRIDVLALLRALIATDRGERHVCAIVRVPSVEEEDARRSHRERQRLVRERTGHINRIKGLLFAQGIRDIKPKLRRTRIDFAALETAEGHPLPDRLRRELEREYARLSLIAAQLREVEKERDTADAQDPVVEQKRQLLVALHGVGATSAAILAREVFARSFASRRQLGSYLGLTPSAYDSGSTTRCQGISKAGNSWARRILIEVAWFWQKYQPASPLSHWYIQRTAGQSSRIRRIMLIALARKLAISLWRYVETGLVPEGVAIAKAKLRPA

SEQ ID NO: 242102 - protein, 342 aa, unidentified
MSNVNTYIGVDLHKKTCYMTVMDRDGVVSKQTEIKNDREDIDKFFKIYDKDSKVAVESTMNWIPFYEQVEKMGFEVVLSNPLMTKAVAAARIKNDKVDSKILAELMRTNFLPTAYIQPKEIRDLKELIRQRAVYVDMQTKIKNKVHSVLFKTGAKCPFKSMFSQAGRKWLVELELAPVYRLELNRYLQTLEAFDLQLKEMEKDIELKAKADYDCKLLCTIPGVGPYTALMIKSEIGDIARFQSAGKLCNYAGLIPSTYASGEKIRTGKITKRGSKWLRKALVGAITSCSRNTNKISIFYKKLKKSKGTGKAKVAAARKLCSVIFAMLTDKQPFKEFVPVKQR

SEQ ID NO: 242103 - protein, 317 aa, unidentified
MSEEIFVGVDVSKDWLDVACSHTPSVSRYANDDAGLKQLREDLSPAKVALVVMEASGGYHRLALAGFLSAGVPAVAVNPRQVRDFARALGKLEKTDAVDARVLMRFAQRVRPETRPPVDETTRMFDELLGRRRQVIEMLVAERNRHAQAQISRIRKDIKEHIDWLKKRLNNTDKELAALVEEAPAWNAKVDLLEAVPGVGRVTVLTLLSALPELGTLNRKQIAKLAGLAPLCRDSGHQRGQRCIWGGRAEVRACLYMATMVATRHNEIIKRFYTRLVAAGKPKKVALVASMRKLLTILNAMLRDHLHSAPQITAAAN

SEQ ID NO: 242104 - protein, 335 aa, unidentified
MKKFYVGIDISKEKCNLCYRDGLEIVMEEESVNDVKALKKSLSAVLKTFSVAIDEVLVCAEYTGRYIYPLTVACQELDIFLWMDDPTRIKNSMGLTRGKNDVIDAARIAEYAYRYSDKAIRYCIPDAALVSMKSLLVDREFLLIDKKRYQSQITDQKRYMASGDFKHKCARWKKVIRAIDEQIKAIDAEIESLIAANPVLTRQKKLLTSIDGVGDRIAINMIAITGGFTRFQNARQFCSFAGLTPYKYDSGTSVRSKAKISKRANQTMKALLHLAAVGAATHMKESEYRDYFDRKIKDGKHVMCILNVVRAKIVHRMFSVIRRDTEYTKTYKPSV

SEQ ID NO: 242105 - protein, 355 aa, unidentified
MKNQAVQYLAMDVHQATIVASVRNEQGAITMKATVATEAGAILSLVRAVGARVMVAFEEGTQAQWLHDLIGPHVERVVVCNVRGKSELTNKSDRIDADALSELLRRGALKAVYHGAPSMLTLKELVRNYNTVVEDATRSTLRIKALFRARAIPTSGTSIYRVSDRPGWLNQLTIPGARVRAESLFKQLDLLRELRPKAKRAMIAEARKQSGWKPLRSIPFLGDVRTAQLMAIMATPHRFRTKRSIWPYAGLAVVTRSSADQEFVGGQLRRRNRPPQTRGLNRNHNPMLKSIFKGAATSAAAKPGSLKDIYDACVARGTKPDMARVTLARKIASIALRLWKKGELWDPAKLTMQTT

SEQ ID NO: 242106 - protein, 345 aa, unidentified
MKRGITIGMDLGDKKHQVCILDKTGKIIAEEEVTGTRAAVTNFFKQYRGAVVAMETGTHSRWVSQIAEVEGLNVLVGNARKLRMIWQSRQKSDTRDAVMLARIARFDRELLCPIRHRGEQVQMDLEIIRARDLLVGERTRMVSHVRSVVKNMGERLAPSSAASFGHKAKIPEALNETLKPMLEMIRELTKKIRAYDLMVKEAAASKYPETERLRQVVGVGPLTALAYVLTLEEPGRFTKSRMAGAYLGLVPRLDQSGQIDKQLRITKHGDGYLRRLLIGSAHYILGPFGPDCDLRTFGLKLMQRGGKNAKKRAVVAVARKLAVLLHALWRSGQQYEPKRRQQAAA

SEQ ID NO: 242107 - protein, 347 aa, unidentified
MNFYTKKHKYYCGIDLHARSMYICIIDCDSQVVYHKDVKTRPDSLMNAISPFQDDLVVAVECMFSWYWVADFCEDHNITFILGHALYMKAIHGGKAKNDRIDSHKIAALIRGGTFPVAYVYPRKMRSTRDLLRRRMHLMRKRAELLTHIHNTNTQYNYPEIGKNLRYKSNRKLVDSRFDNPSVQKNVDLDIQLINFYDEQLSGVECYILKHARIHDYQSYMLLKSVPGIGDIIGLVILYEIFDINRFPTVQDFASYARLVKCRAESAGKTYGTSGAKIGNAHLKWAFSEAAVIFLRGNPTAKAYVNKLAKRHNKGKALSILAHKLGRAVYYILKRKEPFNMERFFAS

SEQ ID NO: 242108 - protein, 338 aa, unidentified
MGKITTIGLDLAKNVFHVVCCDKHGKIMKRKMLRRSGLLTWFTNQPTCLIGMESCASAHYWARALQAQGHRVKLIPAQHVKPFVRGNKNDYNDALAITEAVTRPEMRFVSIKTPEQQDIQALHRLRERRLRDRTALCNQLRGLLGEYGIVFSRGVNVLRKHIPEILEDGENGLSDLFRSLLSRGYQQLTELDIHIDAYTEALDVHSKRDDACQRLRTIPGYGPIISSAFHSAVGNGEAYRRGRDVSASLGIVPRQNSSGGKEVLLGISKRGDRYLRSLLIHGARAVVIQAANKEDALSRWINKIRITRGFNKAVVALANKLARIGWAVLANNTVYQPR

SEQ ID NO: 242109 - protein, 419 aa, unidentified
MSFKILKNNCCGLDVHKTWIYACIGITDSLKRTEYKEARFSSFTKGLQELCDWLSKYNCTDVCMESTGKYWIPVFNVLEKNNIWVTLSHPKYTKPQKGNKTDRKDARWICDLYMCGMVKPSFIPPSDIRELRDLVRYRFKLTCMITGEKNRAHNCLTVSNLKLDDVFSDIFGKSSRSITEQILQHPGETFDVTPFVDGRCKTPIEEIQAAVDGAISEEQAVKLRQCLNHIDELETHKTEIEREIFRLSEKYERVLNLIRTIPGFDKNPMTAIQVLSEIGGDMSVFPTAKNLVSWAGCCPCNDQSNRKIKSTRISRAGSYFKPVLVQIANALIKSKKHPEFTTRYRRIKARRGHKKAIIAICRMILTAIWHILTDLKTYTPEGFLESRPVNESKILTTSQALNLMKQRGYIIKDDVVPVA

SEQ ID NO: 242110 - protein, 341 aa, unidentified
MNDLTRVAIDTSKSVFTLHGVDAAGHAVLRRNLRRGQLEAFFEKLPAIEVVLEACGGSHHWGRWLMQRGHRVRLIPPQYVKPFVKRGKNDRNDAEAICVAAAQPSIGEVPVKSAERQAAAMLLSVRELLVRQRTQLVNALRGHATELGLVAPVGNKGLARLQGEIATADDERVPPAAKQALAMLGKEIDRIEARTAEIDAKLKKQLAAEPLARKLTAIPGIGPISALNLALRIDATQFKSGRHLAAWLGLVPRERSTGGKQRLGGISRAGNERLRQLLVVGATAVIQYAKPDRPGVSPWLLELLKRRPRKLVAVAWANKMARIVWAMMTSGEDYRPAKAAA

SEQ ID NO: 242111 - protein, 339 aa, unidentified
MKYTLVGVDIAKHLIQVHFIDEHTGEVIDKQLRRQDFLMFFCNREPCLIGMEACRGSQHWVRELTKLGHKVRLLQAHFVKAFVMGNKNDVMDARAIWMAVQQPGKDIAVKTEEQQSVLVLHRSRRQLVKFRTMQINSLHGTLLEFGKTIHKGRAAMERELPEALERMKERLPPYLITVLENQYNRLNELDSLIEDIEKKLTSVARQNETCKRLLDIPGVGPLIATAAVATMGEASAFKSGREFAAYVGLVPKQTGSGGKIRLLGISKRGNTYLRALFIHSARAAALLPKEPGPWITELKKRRPTSVAIVAMANKLARTVWAIAAHGSKYDKNHVSIRSY

SEQ ID NO: 242112 - protein, 400 aa, unidentified
MLSIGIDVSKGKSTVCGMKPGGEIVYAPFEVQHTREGMLELVSLLRSSGEEVRAVLESTGSYHCPVVAALLENGIFVSVVNSLRMKRFCSQSIRKVKTDRIDAMQIALYGLAYWQELQPTRLPEDTYRELQLLARQYYQMTSLLIKAKVDFNAICDQVLPGMQELMNDHAGRHKLSDFVLRYRHTTHILEMGETRFRKDYCKWAEKKGYRNCERMAALIFATAQNGIPVLPNAPSTQIVITEAIRVLHTVEASRDAILTQMQALAKTLPEYSLVREMPCIGDTLAPRLIAEIGDVRRFHSKRALIAYAGIDAPPYQSGKFCANNRHISKRGNRYLRKTGYEVMQSYVMHKPANDPIFTFIEKKRGEGKSGKLAMVAGLNKFLRVYYGKVTELYRSLPAIE

SEQ ID NO: 242113 - protein, 321 aa, unidentified
MGKSIEKLSSVTRLGLDLAKRVFQVHAVDANGEMVVARKLARGRLVGFFSQLPRCVVAMEACSSAHHWGRQLLALGFEVRLIPPAHVKPYVRRNKNDAVDAAAICEAAGRPSQRFVPVRSIENQAELMRHRARELLAGQRTAALNALRGHLAEIGVIAPQGVQHAYDLKRLAVDGFDEYGEVVVPDCVRVALRPLVSQIDALDAAIGAIDNEIAMSVKADETAKRLMTVPGVGPVTASAIVATIQDIGDFASGREFAAFATLSHRKGHNDALRRWASGMLERKTVRYKFKLTAVALANKVARIVFVLMTRGGQYDDRPVAA

SEQ ID NO: 242114 - protein, 312 aa, unidentified
MDAIYVGIDVSKDRLDVAMRPGGESFAVVRNGAGIDDLVERLKQLSIQRVAIEATGGFETVVAAGLAGAGLPVVVVNPAQVRAFAQALGKRAKTDPIDAAVIAHFVEATKPQLRQLPDATTQLLAELVARRRQIVEMIAAESQRARHITAPRLKKGIARLRKALEKELSELDDDISDHVRGSPAWAEKEDLLASVPGIGPTIARTLIAELPELGSLDRRQIAALAGLAPWTRQSGKWRGKSFIGGGRSSVRRALFMGAMVAARHNPTLKQFRDKLVSAGKPKLVAIVAVARKLLTILNAILRDKTPWQPKSA

SEQ ID NO: 242115 - protein, 419 aa, unidentified
MSYRIAGIDVHKRMLAMVVADVTVEGEYQFERRMVGTSPDQLRALAEWFVVDEVDEVVMESTAQYWRPVWETLERYWQPIRRTREGAGALAGTLHLAQAQSNRGARGRKKDFPDAERLVKRLVAHELTLSFVPEVEQRLWRTVTRRKYQLTCNRVQLQNRLECLLEEAHIKLSSLVTDLLGLSARRMLQALADGETNPDTLVTLADRRLHATHDQLRDALGACTDLHPVYRRLLQLALEELRLIEQQIETLDQELARLLRQQQEAVQRLAGVPGLGVDSAQQIIAEVGPTAATFPSAKQLASWVGACPGNDESAGVNYSRRSPHGNRQMRRLLNQAANAAVKTKGSIFELVYRRLVVRLGHAQTIGAIAHRLCRLVWKILHHGVTYEERGPAVTKERAHRRAAKMIRELRSLGYRVEPA

SEQ ID NO: 242116 - protein, 365 aa, unidentified
MKKTSTAAKQSNKNLQGRLTIGLDLGDRWSWYCVLDEGGQVISEQKVGTTPKAIREAFAAMPRSRVALETGMHSPWVSRLLEEVDHEVIVAHARNVRLIGESRKKDDRLDARTLARLARIDPQLLSPVKHRSRQAQADLMVIRARASLVRARTSLVNAARGMTKSYGERMRGCNPRNLDSEKAEALSPELQAALGPLLQALEALSEHIAEYNRQIEKIAQQSYPQTALLKQVKGVGTLIALTYMLTLEDPHRFRKSRDAGCYAGLQPGRRNSGQSEPQMRISKEGDPYLRTMLVQAAHHILGPFGADSDLRRWGLKLAERGGKNGKKRAVIATARKLAVLLHRLWVSAEVYEPLRNSKPAMLATA

SEQ ID NO: 242117 - protein, 440 aa, unidentified
MEEVTDEPLYRDRVCGIDIGKAELYATIRVPSEKDPARRASETRSFATTRRGVLALADWLRCWQVPAVVMEATGDYWKGPFYRLEAEGLDCVLADAKQVRHLPGRPKRDSSDSSWLAACFERGSVRPCFVATPEFRIIRLHTRYRRDLTEERSREKQRAEKLLESAAIKLSSVVTDLHGVTGRDIMDHLIAGERDPRALAQLARARARRKITELEHALEGAEFFTADLAALLKAMLDRIDRVNAEIARLTEVIETLLAPHEEQLQQAESMPGWGRRSAEDALAETGPDMTRFPTGAHLASWAGRTPLDNQSGKRTGRSKHKKGNRYLGAITGETAVSAGKTATREGARYRKIARSRGKAKACVAVGNTQMRVYHKLLSNPGTRYDDLGPDYYERQAATRRKIAYHVREIQAEGFEVTLCRPVPQPEPGPGQDSPPGSQAA

SEQ ID NO: 242118 - protein, 416 aa, unidentified
MNNERMIQMVLHPKMQHVYVGIDVHKHQHTAVIVDCFSEKLGELTFPNRKQDFTKLISFVKRHTPQGITPVFGLEDVLGNGRELAIFLLEKNYKVKYVNPSLSQSERKNQANINKSDSIDSQCVANVLLNKLDSLPDAAPNDLHWALNELVTKRNTLVKNNVVLKNQIHTYLSHHYPNYKNFFFSLDSKTALEFFKEFPSPSKLKGTTLQELTAFLSQKSHHNCSEKKARQILDYLEKDGDTANEFQELRDFIVTSSIKQINDNLAIIASIEENMKKLIPQFGYKLESMKGINTVTAAGIISEIGDISRFPNADALAAYAGISPMRYSTGQTNKNFSNKLGNRNLYQIFFQIAVSVLSNPMGKPTNAYFYEYYKKKLSCGKTKKQAIKCIMRKLVTITYKMMRDKSEYRKPFIPIE

SEQ ID NO: 242119 - protein, 423 aa, unidentified
MENTAARKRKQVPEGYLIIGIDPHKKRHAAVAITQDFTTRDKFKFDNTREGLETMLRRAKTEMVKSGCRGVMFAIETGGHYWRNVAYFLDEQGIPFRFINKFTLKRRREGKDLNRRKNDYRDSEVAAQLLCTGEFTESKVPQGVYAELRTAYSAYRRLVKERTRITNLVKGLLDALFPEFTLVFKDPCALTALSVLSTCPIPKVIAGMTEDEFVATIEAQHKGRLMRKKLRVLHYSARTSIGIDAGARSVSSEISFLVEKLELIRRHIRIIEGTLIRLVDETEEGNYLLSIKGLNYIAVGGLLAELGCFKSYRSAKQMIKMAGSNPTESESAGKRGTHTPMSKQGRPVLRYCAWTSVIPMLRFNPDFRAWAKQRRERPAHANPLNGREVVGAALNRLLRLAFAMVKNQTYYQVSKPELTLVAV

SEQ ID NO: 242120 - protein, 403 aa, unidentified
MNNVAGIDVSKGKSMVSVLRPFGEVVAKPFSIGHTGSELKELADYLKSLDGETRVVMEHTGRYYEPVARFLHDEGVFVSAVNPKLIKDYGNNTLRKVKTDKADSRKIARYGIDNWAELRQHTPMDTIRMQLKTLNRQQSLYTKTKTMMKNNLIALLDQTYPGVNALFDSPVREDGSQKWVDFATTFWHVDCVRNMSLTAFAERYRKWCKRHGYNFSQSKAVEVHAGAQDLIAMLPRDALTKTMVRQAIDALNAISASMERLKAEMQALAAQLPEYPVVMAMHGVGDSLGPQLMAELGDVTRFTHRNAITAFAGVDPGADQSGTHEAKSTRVSKSGAPELRRALFLVMDCLLKTQPQEDPVYRFMDKKRAEGKPYLVYMTAGANKFLRIYYGRVKEYLASLEGN

SEQ ID NO: 242121 - protein, 415 aa, unidentified
MKAAFKVAAGIDVHRDTVVVSVRKKSAGVEDDAVETRTFETFRDTLVSMAEWLEDEQVEVVGLESTGVYWMPVVRVLHERLPKLLVWLVNPLDVKRRAGRKTDRKDSRWLSELVLYASVTPSYVPSREQSELRKLTRHRTKLVADQTRYQNRILKELEGSGVKLASVVSDCLGKTGRAIIDALLVGNPKVDVANLAMGTLRKKIPLIRRAIDGSFTPSTKLVLHQLLAMVDLTATKMHALDEEIARLMQPWSSDQSLVVTIPGLSGISSAAVLAEAGSDMSLFPSQKHLTAWAGLAPGSEESAGKAKPAPARKGNKYLRTNLVQCAWSAVRMKEGFWPNVFRRLRARLGPKKAIVAIARKMLVALYHILRERLPYRDPHTPPPSPHIRERLARRFRDKLQALGFAVQITPLPSPG

SEQ ID NO: 242122 - protein, 407 aa, unidentified
MDVLHPKCAGLDVHQQTVVACARTGAGKAVTYDVRTFGTTTAELLALSDWLSAHGCTHVAMESSGVYWKPVWHVLEGHFELVLANAMHIRNIPGRKSDVNDATWIADLLAHGLIRGSFVPPEPIQELRDLTRTRKQLVREIAQHTLRIQKTLENANIKLTAVLADVLGSSGRAILRALARGERDPERLAELASDRVKASRAELVAALHGRVPPHHRFMLTLHLTQIEALEAAVREVEARLGDALAPFRAALDRLITMPGVSETVARVIVAEIGFDMTRFPSAGHLVSWAGLCPRLHESAGKRLSNRTRSSNPWLKTTLVQAAWAAARKKDSYCRAQFLRIKSRRGPKKAVLAVAASMLTAAYYMLKHGVDYRDLGADHFDRRDKAKLAKRLIARLHDLGLTVEVRAA

SEQ ID NO: 242123 - protein, 352 aa, unidentified
MKIIGCDFHPSYQQIAMVDTETGELWEGRLEHEQGEARRFYQALQGQTVRVGIEAVGNSQWFEQMLVEMGHELWIGDAAQIRRLVVRLQKTDRRDAKHILDLLLDGRFPRLWVPSTQMRDVRQLLRHRQKLVEIRTQVKNQLQHLALNQGVRRKRRLWSVQGRAVLEQLPLQGWTARRRSDLLAMLDRLEEQVGELDRAVRTEAEQRPEVRLLMTHPGVGPVVGLAYVLTIGPTTRFPRGKQVASYLGLIPKERSSGGRQNFGPISKQGNTMMRTLLVEAAQTAARFDEELRRDYGRLKARKHSALAKVMVARKLAVRMYWMLRENKPYTQLYAQRPVARMQDSPGHSVVAG

SEQ ID NO: 242124 - protein, 367 aa, unidentified
MKKISTVGARQTRNFRDQKLTIGLDLGDRTSWYCVLDEAGEVVLEQRLSTTPKAMKEVLGRMPRSRIALETGMHSPWVSRVLSELGHEVIVAHARNVRLIGESRRKDDRFDARTLARLARIDPQLLAPVQHRSAQAQAHLMVVRARAGLVRARTSLINTARGLTKSYGERLRGCNPRNLNAEKARELSPELQAALQPLLAAIESLSERIYEYNQRIEKIATESYPQVARLKQVKGVGTLIALTYLLTLEDAQRFRKSRDAGCYVGLQPGRRNSGQSEPQLHISKEGDPYLRTLLVQGAHHILGPFGADSDLRRWGVKLAERGGKNGKKRAVIATARKLAVLLHRLWVSGEVYEPLRNSRPVLQSAAA

SEQ ID NO: 242125 - protein, 437 aa, unidentified
MSYRIAGIDVHKKMLAVVVSNVEVESEFQFERRMFGGNPEQLRLLGAWLLEQEAEEVVMESTAQYWKPVWGALERYWKPIREKREGAKRRSGTLHLAQAQSNRGQRGRKKDFVDAERLVKRLVARELTLSFVPDVEQRLWRAVTRKKYQLRRDLVRLNNQLESLLEETHIKLSSLVSDLLGVSARRMLNALADGETNPAALAALAHQRLRATPDQLCDALGACTELKPVYRRLVKMALEQLQILEQQIGQLDQELATLLHPHQDAVQRLAEVPGFGVDSAQQIIAEVGPAAATFPSEKCLSSWVGACPGDEESAGVNYSHRSPKGNRHMRRLLNQAANAAVKVKGSIFEVIYRRCVPRLGHNQAIGVIAHRQCRLIWLILHNGALYEERGPAVTTLSKYKRTWRMIRQLRSPFSCASSTSIIGSVSHPDGDRPSHPI

SEQ ID NO: 242126 - protein, 344 aa, unidentified
MSMIKVVGIDIAKSVFQVCVWMVDGSVAWNKKISRSKLLDTIRQFEPGTLVAMEACATSHFWGRTISSMGYCVRLIPAQHVKAFVRSQKNDANDALAICETALRPGIHFVAVKTTEQQDIKALRNTRQLMVEQRTALANQLRSLFAEYGVSLPAGILHLQQQLPEVIEDASNELTFTLRRLLYSLREDMQALNERVTGLDKEITALSSQQTAYRHLLTIPGVGPLIAAAFISEVDAGQFSSGRELSAWCGLVPRQHSSGGKQRLSSVTKNGNRSLRTLIIHGARSVMRCVKKRDDCMGLWLQRLEARRGFLKTTVALANKLTRIIWRVLTDQVDFNMSKAFSMI

SEQ ID NO: 242127 - protein, 371 aa, unidentified
MEPITFVGLDVHKRMTSVAIAEAGRGGEVRFMGEIPSTSEALHRLVGRLKGYHRWLSFCYEAGPCGYGIQRLLSSLGQDCIVVAPSLIPSRPAGRVKTNRRDAATLAKLHRAGELTPVWVPDAAHEAMRDLVRARSTARRVLGKARQHLQGFLLRHGRIYRVVRGWTKAYRRWLTTVRFDHPAQQIVLQDYIHAVEDAEARLERLERQIDELLPAWSMAPVVEALQAMRGVALIVAVTVVAEVGDFSRFANPRQLMAYLGLVPSERSSGASVRRGGITKAGNAHARRVLIEGGWTYRMQARVSRKLLDRLERLPQAVRDVAWKAQLRLCQRYRRLAAAGKPKVVVTTAIAREMVGFIWVIARMVQPRPAIQ

SEQ ID NO: 242128 - protein, 411 aa, unidentified
MSELEYQFFVGVDWGSETHVVCVLDRERRRIAERSVPHTGMALNDLADELMTLAPSEPGLIAVAIEVPRGAIVDTLLERGIHVFSLNPKQLDRFRDRHTVAGAKDDRRDAFVLADSLRTDRPAFRRVQPDHPRVVELRELSRVEDDLGQELRRLSNRLREQLHRFFPQILTLCPAADDPWFWALLDRVPTPAHTQRLPAKTVAAVLKVYRVRRFAVATIRETLQTPALHVAPGTVEAASAHIALLLPRLRLLHEQRTTVATRIEALLEELSTEEVPGEHRDATILRSLPGVGRVVAATVLAEAARPLAERDYQTLRAHGGIAPVTRKSGKTLSVSMRYACNPRLRNAFYHWARTSVQNDPHCRAHYDRLRSQGHGHARALRGVADRSLGVLIAMLTSRTLYDPERRREIAA

SEQ ID NO: 242129 - protein, 388 aa, unidentified
MIYVGIDIAKLNHYASAIDSDGVVLIEPFEFLNDNAGFYTLLSKLNSFELDDIIIGLESTAHYGNNLVSFLVTKGLHVCVINPIQTATLRKNNIRKTKTDKVDTLVIAKAIALMDHPRFVTLYDIALMQLKNLGRFRMNLVKQRSRTKIQLTAYLDQVFPELQYFFKSGIHQKTVYAILKEAPSAIQIASMHLTHLKNLLVSNSHGHFKNETALELRVLAQKSVGAADRSLSIQITQSIAQIELLDSQIDAVEFEMKDIVTSLDSVIMTIPGIGPINGGMILGEIGDINRFSKPRKLLAFAGLDPSVYQSGNFTAKKTKMSKRGSSALRYALMNAAHNIVKYNQTFKEYYDSKRAEGRGHYNALGHCAGKLVRIIYKMLKDDVEFNLD

SEQ ID NO: 242130 - protein, 412 aa, unidentified
MAEETFRWFAGIDWGSATHQACLLDEAGTVVGERAFAHGGAGLAALCDWLVSIAGDPGTVAVAIEVPHGPVVDALLDRGFAVHAINPKQLERLRDRVSLAGAKDDRRDARVAAGGLRTDPHLFRPVEAGDPAVIALREWSRLANELQQERVRLSNRIRQQLWRYYPQLLEVSDDVTAEWVLDLWTLAPTPTKAARLREATLARLLQRHRIRRVDAERALAILRQRAITVAEGVTEAAVLHLRSLVARLRLANREFHQAERKLNELCATLRESPPAAEGAPHDAAILSSLPGVGPVTLATLLSEAAGPISRRDYAALRTLSGVAPVTKRSGKSCLVTMRYAAQVRLRNAVFHWARVAVLNDPKCRSRYAALRARGHSYGRALRSVADRLLGMACVLLQRQVLFDPDYGSSAAA

SEQ ID NO: 242131 - protein, 395 aa, unidentified
MEVQDETGRRLGKARVPEGIVGIARLHELVARFAGEDTEPEQVLIGIETDRGPWVAALVAAGYSVFAINPRQVARYRERHATSGAKSDAGDAHVLADMVRTDRHQLRAVAGDSALVEGIKVAARAHQNLIWDRHRQLLRLRCALREYFPGALEAFDDLAAGDALELLGAAPDPERAARLSRSRIAGALKRARRRDVDAKAQRIQAVLRGEQLTQPPQLVAGYAAGVRATVAVIVTFNAEIATLAGQVEAHFGQHPDTEIYRSQPGLGEVLGARVLGEFGDDPDRYAGARARKNYAGSAPITRASGKKRAVLARFVRNHRLADALHQQAFCALNASPGARAYYDGLRARGAGHHAALRQLSNRLVGILHGCLKTRALYNETTAWGHHTQQDQQVAA

SEQ ID NO: 242132 - protein, 313 aa, unidentified
MESIYVGIDVSKDTLDFCIHSNGKEGLFRNNRVGIGRLVRMLVKVKPTLVVFEASGGIEMPIYMAMSEAGLPVAPVNPRQVRDFARSMGILAKTDKIDARIIARYASASETEPKLIADTQDLKEMLTRRDQIVQMITMETNHLRTASRELKRSIEQHIAWLKRQLADMDNMLKERIQQDPVCSDKDNILQSAPGIGPTVSAMLIGRIPELGNLNRRKIANLVGLAPLNRDSGQYRGKRTIWGGRSRVRALLYMATLVATRCNPAISSLYHRLLEAGKPTKVALVACMRKFITILNSMVKHHATWSNSPLLNSV

SEQ ID NO: 242133 - protein, 338 aa, unidentified
MKLYGAIDLHSTNNVTVVINEQDQVVYQKRLPNDLSLIAQQLSSYRASLQGIVVESTYNWYWLVDGLMEKGYRLHLANTAAIQQYNGLKYTDDHSDARWLAHLLRLGVLPEGYIYPKQERAVRDLLRKRGQLVHQRTANLLSIQSLISRTTGNSIGAKYIKALDIQHVDGVLPNPDLVLALKANLAVMNSADAQIEILEKTVQDRVKLRPQFRFLKTVPGIGPILALTIMLETGEIERFASVGNYASYCRCVGSRKISNGKRKGSGNTKNGNKYLAWAFVEAANFAIRFSSRIKSFYQKKKSKSHAIVAIKAVAHKLCRACYYIIKDQVVFDITKAFA

SEQ ID NO: 242134 - protein, 390 aa, unidentified
MVASRLSGLLCDVVPCCCFESGFTGRIQVFRPTIKDVNVNSKRGLKHYLILKRTTMVKVKNFIGMDVSKKTFDVALIKNMNRGIIIYAKFENNREGLRQFTKWLAKEGVVIDQSTVVCMEHTGIYNYSILEYLLKTSLLVWLEMALQIKQSLGIQRGKSDKLDATRIAKYAYKEREDMKIWKPVSKIIECLKLLMAQRDRMVNSLTRLTVPVEELKSVGQSEEARMLEKLQRSAILQIEKAIKKIEGQIQIKLKEDPRIYQLYQYADSVCGIGEVIATKLIVYTHGFTRLTDHKQMATYCGVAPFEHTSGTSVKKRSRTHHMANMNLKSVLSMGAKSAINYDPEIKLYAARKAAEGKTYAWIKTAVSNKLLKRVLSCVNNQKMYVKKQAA

SEQ ID NO: 242135 - protein, 319 aa, unidentified
MNAIVKTHIGIDIAKRSFDLAIRASDCSRSFPMTSVGIARAVRLIRRQNAPMVVLEATGRYQAALVDALHEAGIRLAVINPRWVRDFAKASGQLAKTDKIDAAVLAEYAERMEPHPQQPTSKALQTLRALTTRRHQLVRMQTMERNHAEAVDDPDVLASVAQIVEQLDRQAEVINTRIREHVDSEPEFQHKAQLMQTVPGIGETTACLLAAELPELGRCNRQQIAALAGVAPINRDSGGAQGKRSVRDGRKAVRTALYMAAVSASQHNPPLREFYQRLRAAGKPGMVALIAVMRKLLVIFNTMLANDQPWQNPNSSNNT

SEQ ID NO: 242136 - protein, 340 aa, unidentified
MGEYIGLDVSLKETAVSIRRGGKRVWRGKCLSDPAVIAALIRKHAPVAERVVFETGPLSVWFYHALTAEGLPAICIDARHAKAALDMAANKTDANDADGLAHLAEVGFFREVRVKGFDSMLSRTLIAARTKLVRATLDIAGQIRGLMKTFGLIVPRGIGGKFERNVSFLLADHAALARIILPLLEAWRGLRIQATGLGRQLLAEARGSQQCQLLMSIPGVGAITATAYLTAVEDPANFSRSRSVGAWLGLTTRRYQSGEVDYDGHISRRGDSHVRSLLYEAAVVILTRSHADSDLRSWGMRLREKIGFKRAAVAVARKLAVIMHAMLRSGELFTRTTATA

SEQ ID NO: 242137 - protein, 403 aa, unidentified
MHVSHTSSPLEILVGIDVGSQQHSVAVGLSDGSLLEEFDINHRPDGFAQFFNRVTEHSEKFDGCGVRVAMEGYNGHARPLDVMVQQQSWPLYSINNLKLARFKEIFPAVSKSDKMDANRALQLFQLREHVPMARGVLQEVLPSPTENAQLKRYTRRRKQIVDEKVRVSCRLQSDLQAVCPGLLDITGKVDNLWFLRLLTSVDKLSKLKRLHAKTLHSIPALGPKALVVIQGWQKDAVFSVEEPYVGEMIIEDARRLLELREIEKGLKNQCEELIQNSEIAKHIESIPGFGVICAATLAGEIGSITRFNSEASLAVYIGMANLDRSSGKKHDSKAPKHVNTHAKTAMMVGVDRHRKCVPESQKYYMKKRAEGKIHNQAIRSLGRHLSRVIFNMLKHDRDYEMRD

SEQ ID NO: 242138 - protein, 375 aa, unidentified
MGADAGGECNSSRADGAEPVEVHGRRFDERRSEAWCPPRLFAKPVRLHGPETVCKEGITKMNDTVALAGIDVSKDKLDVHVLPSNLVFTVSRDRCGLTDLVRRLRKAGVERIAVEASGDYERIVLAALEADGLQVQLLNPLRVRRFAEAEGTLAKTDPIDARLIARYAQHFPDKGLVRRPEQARKLGQFLTMRAMLLGILGEARNRLEHLDEQSLRALAESIVTQTSAQLVAVEADIARVIRQDHALAHKAELIRSFIGAGPVLTANLLARVPELGGVNRHQAARLCGVAPADRKSGKSQRRSTIEGGRHHLRPILHMVALAAIRSNPVFTAFAKRLLAAGKPKRLVLAACARKVIVVLNAMLRDQTYWKQPYAA

SEQ ID NO: 242139 - protein, 325 aa, unidentified
MTASLSSDNSFIGIDVGSRSFEAAWHRGGCAQYANRPDAIAAFLARLRAEPPTQRIAIEPTGGYEKLLVIELRRAGLPVEIVHTSRFQAYRQLIGVRAKSDGSDARLLAAYAAAPDEIRRQSNRVVLPEDGDREELAALGVRRDQLNRMLHAESCRLANVRSTFVRHSISRHLEALRKEVREIGIAMKAIVRQRQDLSRQKRLLQTVVGIGEVTAVMCLARAPELGRISNKAAAALIGVAPFVHESGGLSAPARIFGGRADVRRVFYMAAVAASQHNPVLAAFYDQLIAAGKPAKVALIAVMRRLVVFANGVLRSDEPWKRGMAA

SEQ ID NO: 242140 - protein, 403 aa, unidentified
MRQDISRDGWQDWRRPQSHQGACRHVVQDYHLCRHRTQRFIVARGSTPARHPEGAGLPLGKRRHDGLLKLIADLRSQVATKLGVTADLACCFEAGRDGFWLHRLLTANGITAYVLEPTSILVNRRARRAKTDRLDAEGMLRVLANWLDGDRQVCSMVAVPTPEEEDAKRPHREREHLVQDKQRIENRIEALLFTQGIRGRPSLRSWTRDVAELQTGDGRALQPGLLAELDRLRRRLVFVLELIRELETDRVRALEEAKADDAIAGKIVALQCIRGIGDNFAAVLTHEVFYRSFDNRRQLASYVGITPMPYQSGGMDRDRSISRAGNPRARTTMIQLAWLWLRYQPDSALAIWFRERVGTLQGRTRRISIVAMARKLLIALWRYVETGVVPEGVALRANKASVA

SEQ ID NO: 242141 - protein, 352 aa, unidentified
MSEYSTTIGIDLGDKYSSICVVDAEGEVLEESRLRTTDKALTERFEAMRPALVVLETGTHSRWVSHLLGKLGHEVVVGNARRLRMIYCNENKTDRLDAQSLARVARMDRKLLYEIQHRSHRAHLDLEQIKARDLLVNERKRIVVHIRSVVKTFGLCLPKCDTGYFCKKTQPLLPAELQEVLEPLYDVLEVLHEKIAVYDAKIKALAQQAYSECDLLREIGGVGPITALAFILTIEDPARFDTSRQVGSYFGLRPKLDKSGQRDPQLPITKCGNTMVRRLLVQAAHYILGHFGPDCDLRRFGLCIAERGGKRAKKRAVVAVARKLSVLMHRLWKNGEIYDPFFVAKMRGDSIG

SEQ ID NO: 242142 - protein, 348 aa, unidentified
MEHICRIGMDTSKHFFQLHGVNAAEEPVVRKKLRRKDMVAFFEKLAPTVVAIEACGGSHHWARLLSSFGHQVKLIAPQLVKPYVKRGKNDAADAEALCEAMSRPTMRFVPVKTVEQQAAVMLVGVRDRLIRNRTQLANSIRGYASEYGLTAAKGMAHLDPLIERIQADESLPVLARELFAAQAKEYQQLQAQIDEVDVKLKAWYHADECGRRLAQIPGVGPIGAALLMMKTPAPEMFRSGRQFAAWIGLTPKDHSTGGKVRLGVITRAGDEALRSVLVVGATALLRFVANGKSKSALSPWLGQLLKRKPAKLVAVALANKLARIAWKLMVTGQSYVRKSTPTTVAGAA

SEQ ID NO: 242143 - protein, 314 aa, unidentified
MSNAAPVFVGIDVSKEQLDVAVGSDGPEVSFANEENGIANLVAELRARNGALVVLEATGGFELPLAAALAAAHLPVAIVNPRQVREFARATGQLAKTDRIDARVLALFAERIRPEPRTLPSEATRVLDALLSRRRQLLDMITAEHNRLGFAPKALHKGITKHIRWLQRELEAVDRDIGKSIQASPLWRAQDDLLRSIPSIGPVTSRTMIGALPELGTLNRRQIAKLVGLAPFARDSGKFRGKRRIAGGRSDVRKALYMSTLVATRHNPIIRVFYQRLVAAGKPKKVALTACMRKLLTILNAVVRTGSYSHPQQA

SEQ ID NO: 242144 - protein, 329 aa, unidentified
MKKDWYVGIDVSKKWLDVAIFAENSDLKGYIHTQVDNDKYGYKELLRWLKEHDVDVSSCMYGMEHTGFYSDGLQHFLDKKGYKYTMLEPAVIKHYPIQPREKNDRLDAAKIADYLFRFKDTIKLSTLPDKTMEELRNLHRERKFYVEDRVCYMNRKQVVGKEEAKRLDKMIENLDRMVDSIEEKIRNIIQENELLMESYLYLTSITGIGFVNAVNAIVITQNFTAFKTARDYASYLGVAPHTKTSGTTIRWKPKPRKHCDLTAKADISQAAKIAVVHDIELKRFYERKCNGKNDADTIRKAMNAVKFKLVLRLFAVVKQKHTYKQLDTI

SEQ ID NO: 242145 - protein, 330 aa, unidentified
MSRILVGVDVCKDFLDAHARPTAVQKRFDNTPAGIEQLVAWVRSLAPERVIFESTGPYQKAAVGALLAADSVGALLAADLPAVVVNARQVRDFAKGTGQLAKTDVIDAGILAHFGEVVATVVRPLPPQEILEFRELCDRRGQLVRMLASEKNHRHAAQGASPKVIKNIDKHIAFLQRQIDHLEERMDRIVADSETFKAKDEILQSIVGIGPQVSRVLLVHLPELGKGTRRSIAALVGLAPFADDSGTSSRIRHIRGGRAKVRIALYQAAVAAIRYCPTMKSFYASLKARGKATKVALIAVARKLLVLANALLRAGIPYQHPTNSVCLKNA

SEQ ID NO: 242146 - protein, 433 aa, unidentified
MLKINYMSTLFVGIDVSSKSNMVYAMDFEENKYFSSSFGNNQPGADELAGMIAQCMKRHSNLASIIVALESTSVYSVHIANFLSTSEILMPFKPYVFCVNPKATSNYRKSYIGMEKTDPTDAFLIADFARVGRTKKLEPWRGGQFIALKRLTRHRMHLAECITREKTYMVSNLYLKFSELQLLEGDDKPFGNIYGTTSSAVLTEFLSPQEIIDLSEEDLLAFLAEKSRNRISDISRTSELLRKAGRDSYRLDQCMYEPLNISLASSFNCIHAYQKEIKLIEQAIEKCINGMNPNALIILQSIPGIGPVWASGILSEIGDITAFHSSDALAKYAGLYWPKGDSGDFTSEDNKMSKAGNPYLRYYLGEAANSIRKHIPEYAEFYARKYAEVTKHQHKRALALTFRKFVRLVFGLLVKNQLYTGEKLDAEYNIESN

SEQ ID NO: 242147 - protein, 364 aa, unidentified
MLIIGCDYHPGFQQIACVDTDSGELSERRLAHREQAEQFYRELKQQELWVRVGMESSGHSRWFERLLQELGFELWIGDPAEIRTRRVRKQKTDRQDAQLILQLMLENRFPRIWVPDADNRDLRQLLWHRHRLVQMRTRVMNQLHVVPLNEGLLRKKALWRPAGRKELESIALAPWASRRRQDLLDLLDQLTPKIQELTRALEEEVEKRPVTRRLMTHPGVGPLTALAYELVIGTPERFHCGKQLASYVGLVPTEESSGDRRRLGHISKQGNVLLRFLLVEAAQVTVRSQPEWRNKFFHLAMRRGRKIAKVAMARKLAVHLYWMWRQGCDYGQTPKLGSHAGEPGNPDGGQSITDVMIGHPAPSK

SEQ ID NO: 242148 - protein, 369 aa, unidentified
MADRITYVGLDVHKESIVVAAAEGGLRGEAREYGRIANTATALDRLQRKLGVDGMTLRFCYEAGPCGYGIQRRLSAQGHECVVVAPSLIPKRAGDRVKTDRRDAASLAKLHRAGELTAVWVPDARHEAMRDLVRARLDAVHSLRRARQQLSGFLLRQGCHYGRPAWTKLHRRWLAGLKFEQAVHHLVLEDYITTVDLAAARRDRLTAQIEAMLPDWTLAPVVAALQTMRGMALVNAATLIAELGDLTRFANPRQLMAYLGLVPSEHSSGASVKRGGITKAGNGAARRLLIEAAWSYRFPARLSRELLLRQENQPKPIRDIAWKGQVRLCTRYRRLARTGKPANVVTTAIARELSGFVWAIARQVMATAG

SEQ ID NO: 242149 - protein, 404 aa, unidentified
MKGPIVSIDVSKGKSDYQAFKNLNVKYTGSRSIKHTKEGFDEIVSLVREMEKKLETEVCVVYEATGVYHRVLKKVLEDNNIKQFIINPLLSAKTRKNDSLRSPKTDKLDPKSIAKTYYSHSLHNSHKPETIYHELRELSRYYEDILVHIRKDKVAFRAQLDVVFPGYDALFDDLYGPVALAVIEKYPHPEMLQKKKINTVSKVIQNKTCHRQAVSDTMADKAIEYSKTIYSGCDKDDIEVLILQRLIKKLNEDMAEAERTIGEMIKLAQELPDFSIIKSIPGIGDNLAARIIAELGDMTRFKKKNELVAFAGLDPRISESGKNDGDHMHITKKGNKRLRCLLYLAVTCSIRLKRDDNSIKDFYIKKKQQSNPMCSKAAKTACASKLVRIIYSMCKTGELYQYNK

SEQ ID NO: 242150 - protein, 343 aa, unidentified
MDYYAGIDVSLELSSVCILDASGQIVREAKVASEPEVLAAFLSGLNLPLTRVGLEAGPLSQWLHAGLQKAGFEVVLLETRHVKAALSAMIVKTDRRDARGIAQLLRMGWFRPVHCKSPPAQEVRALLMARKLLQAKMRDVELSLRGLLRGFGLKIGEISKGQFATRVRTLTAGHEMLEKIAGAMLQAREAVQTEFARLHRAMLAIARGDDVCRRLMSVPGVGALIAVTFTSAVDDPERFARSRAVGAHFGLTPKKYQSGETDITGAVSRVGDPMVRTALYEGAHILLTRAVRFSALKRWALEVAKRRGMRRAKVALARKLAVILHRMWIDGTTFRWNREGAAA

SEQ ID NO: 242151 - protein, 413 aa, unidentified
MPLDGRIYAGLDWGSQSHYVWVTDAEGTALGERVFPHSGAGLTALAAWVQTWSAHGAQAIVAVEMPRGAIVETLLASGCHVWGINPKQVDRFRDRYTVAGAKDDRRDARVLAEAARTDPQAFRVLEPADPVTAQLQECSRHDEELGDDTVRLCNRLRDLLQRTWPELLQLSPAADEPWLWVLLARAPTPAAAAALRPVWLRQLLRRHRIRRFTADDVRRVLRTPSVYVTPGTREGVTARIRDLIIQLEVVHRQRGLTHRQLVALLEQLRTPSPSDRCREHPDAEILQSLPGIGTRIAGTMLAEAADALRRRDYHALRAHTGIAPVTRQSGKSRVVQMRYACNHRLQRAVYCWAQTARCRDPYTRAHYQRLRAAGHNHARAQRGIIDRLLRILIVLLATDTLYDAARRGAPRAA

SEQ ID NO: 242152 - protein, 403 aa, unidentified
MIFVGVDWAEDHHDVCVMDLEGTVLGKRRVPDSISGVGDLHEIVSAHAQDAENVVVGIKIDRGLVVTALVAADYEVFAINPMASSRYRDRDAVSGAKSDARDAKVLADLVRTDRHNHRPVAGDSSLVDEVKILARAHQSAIWGRQRQVKAIRSALREYYPAALAAFGTDLSHSDAIAVLAVAPTPELGGQLSRSSPRRCAKAVGRATLNAAPGRSKQRFAPSISRRRRSSPRPTGRPPAPRFGSSRASRLRSVHSKRRSRSILSNTRTRRSSAPWQDWERILGDRVLGEFGDDRTRFAGPKCRKNYAGTSPITKSSGRSHVVLARFARNRRLADALNQWAFGSLKSSPGARRYYHKLRARGKTHRQAVRQLANRWVGILHTCLQQDELYDEQTAWPSEKSVAA

SEQ ID NO: 242153 - protein, 354 aa, unidentified
MKQTPKYVGLDVHQATTVATVREETGRVIARSVLPTDAPALTDYFRGMRGAISVALEEGTQAQWLHDLLVPLVDRVIVCDRRGDASRGNKGDQQDADRLSELLRRGGLRAVYHGNPQRAALKELARTYANLVEDGTRVMLRLKALFRARGIRTPGRSVYRVETRASWLAKLPEAGVRFRAEALYAELDVVVALRPKAKVAMLAEAKRDPAWAVLRTIPFLGPVRVALLLATLQTPWRFRTKRQLWAYAGLAVVTRTSAEYTLHEGRPQRRRRAPMTRGLNRNHNRAVKDVLKGAATAATVRGGPFHDFYQDMLTRGMREELARVTLTRKLAAVTLHVWKTGERYDPSKLTVQAR

SEQ ID NO: 242154 - protein, 329 aa, unidentified
MSAFVCGLDVHRDSTYATILDCNGKIVSQGRMGNDKVLPYLSNYKIDKIGVEASNQITPLYRLLSKKGYTVSVSHPKKTRYIAEAKIKSDRIDSKAIAELARLDALPLAYMPDQETAMLREKIRRRAFLVRERVRLRAKIRSILTYEGIKPPSEHDLFTEKGVEWLHRLNLEPVESYLQIIKPLDDEIKQLSKHLKELAKDDGDVKLLMTVPGVGYYTALLVKSETGHINRFSDGEKLCSYSGLVPSTYASGGVVTHGNITEEGSRWLRWVMVEAAMIHVHKYDTSITRAYHRIAQRRGRQVATVAAARRLLMCCYSVLKNKRPYYDQA

SEQ ID NO: 242155 - protein, 273 aa, unidentified
MDHFAGLEGSVKETSVCIVDNTGRIVREVKVPSEPEALLVVLKNPAYHFKRIGLEAGPLSQWLYSALAEAGLPVICVETRHMRAVLKAQINKTDRNDARGMAQMMRVGLYRPVHVKTLRSQKLRMLLTHRKLLQSKAIAIENDLRGTLRNFGLKVGMAGTVKFEARIRELVENLPDLAALVEPLLIVRRVLHEQISVLHRRLLAIVRDDAVCRRLMTIPGVGPVVALTYRATIDVPARFKNSKAVGAVFGLTPSKYQSGEINRTGAISKCGDR

SEQ ID NO: 242156 - protein, 350 aa, unidentified
MKKVAYLAIDVHASNCVLGHMDFDGTFLGTRRFPTSERHIIEALKSVKAKEKYLALEESNLAYWAAQVARPYVTEVISSDPRENALIYRSPNKRDKVDTHKLCRLLRLGELNRVYHAENDDRAIFKAAVQHYIDLRDQQVALKNKIKAMYRHWGVIDVAGQAVYGTSRDDYLQRVKHLHIRNQLHRLYCLMDETESMQKKALKAMKQLGRKYPEIKEFEKIPGIGEILSHIFDAFIQTPHRFAHKRKLWRYCRLGVTDRSSDGKPLGFKRLDRSGVSELKAVSYRAWLCALGSDNEVRRFYSRSLRQTSDHVHARLNTQRKILAVMYGMWKRGEAYRPQLFLDSPPMSVV

SEQ ID NO: 242157 - protein, 313 aa, unidentified
MSPNTTTIIYAGLDIAKSNLQLHLAGQFHDLPNSPAGHRRLIELLATQEHVHVICEATGGYERAVVAALHQAAIALSVLNPARVRHFARAQGQRAKTDRIDAAVLTTYGVSLRPKPTAARTKLEQQLAELVRRRLQLLEILVAQRQQAERLTIPALRRQAHSLIRRLERDLAQTESLLTQLREQVAELDERVQRLEAIAGVGSITALGVLAELPELGTLNRQQAAALAGLAPHPRESGQWQGRRTIGGGRAAVRRALYMAALCAARSNRHLREFYQRLRTAGKPAKVALTAVMRKLIVLMNHVLKNPNFSLAT

SEQ ID NO: 242158 - protein, 403 aa, unidentified
MFYCGIDIAKYKHEAAVIDEAGMALLDSISFANSKEGCEKLLALFQRLDIAKDALIVGMEATGHYWLSVYGYLLERGFEVKVINPIQSEAFRKMYIRQTKTDRKDSFIIAQIMRFGQFSATSLSDEVIIAMRQLSRYRLALVDNCGDCKRRVIALLDQVFPEYDTLFSDTFGVTSKEVLSQYPTPEDLLSVSTRKLANLLEKASRGRFGKEKAEQLKAAAASSFGVSFAKDAFAFQIRQLIEQLEFLEGQIAELEEQISSLLKQTGSYITTIPGIGDILGAIILSEIGDIHRFDAPNKLVAFAGLDVRVTQSGEFTGTRQKISKRGSPYLRRAIWLAASRAAFCDPILSEYYQSLRARGKHHLTAIGAVSRKLCNTIYTILKEDRPWQPIPPRDRKVSNHTGQ

SEQ ID NO: 242159 - protein, 365 aa, unidentified
MSSTGEIYEKKFGVLTTELIEMRDLMLSHHVLEVGMESTSVYWVPIWRVLEPHFKLKLINPYFIKQLPGHKSDVKDAQWIAECMLKDLVNGSFVPPERIQQLRQYDRRIYDLDDEIIRKLAKLDAAVQRCNIRLSNYVSNTDSVSYKAVIDKICEGVTAPNVLVEGIHGRIINHHGKETIIASLTGSITECDIDIMRQLKAEIDLAEQHKQECMDKMLAICENEYSTQLHNLQTIPGVKMRAATSLIAEIGTDKSHFETANHLASWSGLKPRNDQSNKTIKSRRITYGNRYLRRTIIQCSWGASRTKNCFFSRFSYHQTQVRKKNRMKVQVAIARKMLICAWHILKDGVSYKDFNNIIEASVTNG

SEQ ID NO: 242160 - protein, 410 aa, unidentified
MKLFVGIDVSSKDLVTSMISEETTKVVFQGNFINDLKGATELKNIIINTANSNHLDQVVIGMEATSIYSFHPAMFFQEDSDLKKLNTQSVVIDPKKTKRYHDVFAEDKNDQIDAFYIADFLRVGRYSTGIVRQENYIALQRLTRSRYELVQSLVRAKQHFIENLYYKLNKLVVSDELNTSVFGSTMMNLLTEDMTTDDLLNISITDLADYLNEHGRGRFANPEALAKTIQKAVRASYRLDKVIANSVDTVLSVYAEEIKAFQKMIKDLDKAIEEVMKVIGEEEQVLRSIPGIGPVYAAGILAEIGQIERFDNEAKLAKYAGLSWREKQSGGYASDNTPLKRTGNTYLRYYLVEAANRVRIQDPVFGEYYRRKYQEVKHTPSKRALVLTARKLIRVIFFLLKNHQIYQEKR

SEQ ID NO: 242161 - protein, 402 aa, unidentified
MQVDDIDVFIGIDVGKSEHWATALTTAGECLHDRPLPNDEARLREVYEHLGEHGRLLVVVDQPATIGALAVAVAQDMGITVGYLPGLSMRRIADLSPGSAKTDQRDAAVIASAARTMPHTLRSITSSDEDAAALSMLTGFDLDLARQVNQVSNRIRGLYTQIHPALEGVLGPWLEHDSVLEVIATWPTPAALRKAGRARIDAKLKANGCRRHAAWAQAIVEALSKQTVTVAGTDAAGVVLPHLARQLIALHTQRADIAAQVEALVEAHPLYPVLTSMPGVGVRTAAVFLAGTLGKTFTTGAHLASYAGLAPVTRRSGSSIRGEHVSHGGNKRLKRAMFLSAFASLRTDPVSRAYYERKRAQGKRHNQAILALAHRRILTLHAMIRNGTLYNPQPTAQEPTAA

SEQ ID NO: 242162 - protein, 350 aa, unidentified
MSEQYAGKQIVGMDLHRRRSVLVRMTETGERLETVRISNDPEYLRAVMTRAGEAPDVVLEACYGWYWAADTLAELGATVHLAHPLGVKMFSLRRVKNDERDAADLADLWRMGRLPEAWIAPPACRELRGWVRHRAKLVGLRSNLKCQVHAVLANAGVQVGMSDLFSAGGQDLLARVALTPESRARVDSALRLISGLDFEVELFGKLVANRLRSDRGYLAIQAIPGVGPVLAAVFVAEIGDIGRFARPEQLASWAGLTPKHHESDTTVHRGPITKQGSRLVRWAAVEAVQRVGGHTRLGQVRDRVGQRRGRNIGVVAAARELTELVFYGLRDGRLRCLTTPSASNTANPAA

SEQ ID NO: 242163 - protein, 421 aa, unidentified
MNKSEQDSGGWLEQRGFGGLDWASQKHSVVVVDPRGKVLEDFEIEHSALGWKKFRERMQPYGSIPFAVETSQGAAVEQLLEAGMQVYPLNPKSAQSYRQRNAPSGVKDDRLDAWSFADALRVDGHGWKPLRPEDPLIKELRLLCRDEVGLIEQRTAFINQLQHALAEYYPTALEAFEDWGAVSAWMFLQRFPTPQLLEKAGKRQWEKFLHSCRLWRTESGPRRMELFAKATEFCGSEPTAKAKSILALSLVKMLFALEDRLSEYRKRIEELFNSHPDHDLFGSLPGAGPKLAPRLLAEIGDDRERFEGDAQNLQCLAGTAPVTRRSGKHRECHQRWACNKYLRHAVHLFSEQSLTRCAWAETYYKAHRAKDHSHAKSLRCLGQRWLKIIHKMWMNRTPYNPELHHRNQVKHGSWVFRFQAA

SEQ ID NO: 242164 - protein, 413 aa, unidentified
MKLTYPICCGVDVHKTFLVATIIKTDGLVPKYHKKRFSTFSRDLLAFKQWLLDNNCKDVCMESTGKYWIPVWNILEDAVHVVVANPKWVSAVKGNKDDTKDSRWIGDLFRMGLVPGSFVPNKKIRVLREFTRYRYKLISMRSSERNRFQNAFTVCNSTLDAVLSDMFGKSATAIQNYLLDTDVVNPAYCASLLQRTAKKKSADVMAAVEGFKMSAEQKERVRIIQEHFSDINARVARLDAEINKMVSEYESQISLLCTIPGVDRNLAITIISEIGTDMSEFGSSKRLCRWAGLTPGNNESAGKKKSVRITRAGVYLKPALVQAAHAAVKSTKSVYFKSKYERISKRRGKKRAIIAIARMLLTAIYNILKKNESYNPELYRQTDRPPAHREVSVAEAIFILQRQGYLVAAPPTP

SEQ ID NO: 242165 - protein, 408 aa, unidentified
MNTLYVGIDVSSKSNVVYLMLPNGDKHSNFSVANSHEGSTQLVKRILSVLTSHSLDTVLIGLEATSVYGDNLVYFLREDATLAPFNRKIHVLNPKQVKKFHDAYNDLPKNDYVDSFVIADCLRFGRINKEVYMGDYRYKALQNLTRAGFFAVQNLVKEKQRFMNVLFKKYSTMTQEKVFSDTFSTTALAVYDEFESAEALANMDLHELTDFIMEKGKNRFPDPDAVAKAIQKAARSSYRLPKTMNDSVNQVLSISITSMKALESQIKEFDKAIKAQMELLPNVLISIPGIGPVYSAGIMAEIGEIDRFNSQAALAKYAGLAWKQHQSGGFEAEVTRLIPSGNRFLKYYLCEAAFSLVRCDKKYSDFYHLKYKEINRCQHKRALALTARKFVRLVFRLLKDNRLYCPAK

SEQ ID NO: 242166 - protein, 412 aa, unidentified
MDVIVERPAALDVHKAQVTACVRLPGENGERRSEVREFSTMVGGLLVLRDWLKAHGVTKVAMEATSVYWKPVWAVLEDDFELLLVNARHVKNLPGRKTDVKDAEWLCQLLEAGLLRASFVPPKPIRALRQLTRYRKAQIKERQREANRLHKALEDTGIKLDCVATNILGKSGRDMLDALCEGTTDPDVLADLARGKLRKKLPALRQALEGRFEPLHALLVSSILAHLDFLDEHIERLSDAIEEQLRPFAPAVELLRSVDGIETRTAQNILAEIGVDMSVFPSAGHLASWAGQCPGNDQSAGKRRSGRTRKGSKWLNDALKDAAMSATRTNDSYLQAQYQRLRPRIGHSRALGAVKHSILCACWHMLTTGELYRDLGGDYFRKRDPERQIKRLVAQLERLGHSVTLQALADAA

SEQ ID NO: 242167 - protein, 468 aa, unidentified
MKKDEISMQVINPHAAGIDVGSREHFVAVGQRSEDVKSFGVYAEDLSALCDWLLDNNINSVAMESTGAYWQNLFVELIRRGLEVVLTNGKFTKNINRKKTDVLDCCWIQKMHTMGLLPSSFLPDYTTEKLRTLTRHRTNMIQQRADSIHKMAKFLKYLNFRLDVVVRDITGLTGLKIIDDICNGNLDPISLASHRHHNCRKSEEEIAKALVSNEREDYLFGLRQEYDRYQFYTSKIEECDQQIGLFLNQVIMSKEEVVDDIPDEKYFKRQNKNSLKGLDLNIVAYQYFDGVDLLAIPGVSHSTVLTLMSEIGSEGFHKFKTAQHFSSWLKLAPNNKISGGRILSNRIPQGSNRLKIALRNAANAVGNLKDSDLGKFFKKIAFKKGRQTAINATARKIAVIIWNMVTKKQAYTPTNNYLFLDQKRRIVSRMRKQIKDLGIDPDDLGFSRANRDKIAKELTSDLQSLSLR

SEQ ID NO: 242168 - protein, 330 aa, unidentified
MHKETEAGIDVSKDVLDVAVRRHDGGLETGRFENDAAGHRTLVRWLTKRGRRVRVVLESTGTYSLDVAVALHRARGVGVMVANPRAIKQFAGALMQRSKTDLTAAAALREYAARMPFVEWRPPAGEVLALRGIARRIAALVVERTRERNRLHALQATAERVAVVLNDIEVNVRHLERRIELLTAEAVALVREHVTLHRAFERLTSVPGIATHSAVQLLPELLVLPDDMTVRQWVAHAGLDPRACQSGTSVHKPARISKVGNAHIRRALFMPALVAVQHDPHVKAFFAKLVARGKKPIQAYVAVMRKLLHAIYGMFATETTFVGEKFHAVA

SEQ ID NO: 242169 - protein, 343 aa, unidentified
MQMITTIGLDIAKSVFQVHGVDAAGEVMIRRQLKRRHVLTFFERLPPCLVGIEACASSHHWSRELQALGHTVRLMPPAYVKPYVKRQKNDMADAEAICEAVARANMRFVPTKTPEQQSCLMLHRTRHMFIRQQTALINSIRAHLAEFGIVAPIGRKGVTELLRVVADPDDKRVPEIARACLAALGTQLLALKEQILEFDRMILAWHRSNQTSKRLHYIPGVGPMLATALVASVADPRTFRSGRNFSAWIGLVPKQHSSGGKERLGSISKQGDRYLRSLFVAGALAVIRYAKIHGTGHRPWLTALLGRRPTKVAAIALANKIARMAWAMMAKGERYKQPAALAR

SEQ ID NO: 242170 - protein, 408 aa, unidentified
MTVVGIDVSKGKSMVAAMKPGGELVAAPYEVRHSDIELSHLALDVLCMEPDTRVVMEATGRYHEPVAALLHSEGIFVSILNPLLIKQSGAGSLRKVKSDPKDALKIAKYGLDNWSTLREYTPMEAIRQQLKLCARQCDLYSKNIVMLTNNLISLSDKTFPGVNELFSSPEKADGHLKWVDFYRSFWHCDCINRMSPDAFEERYKKWCKRKGYHFSADAADALYAASCGLYTTLPRDNNAKLLVTVATDQLIALRENQSKLETEMLNLCKQLPEYETVMDMYGVGKSTGPHLMAELGDIRRFPHRSSIVAFAGVDPGVVGSGKMQLSSVATSKRGSPQLRKALFQVVSAYVKRKPENEAVYQFYAKKRDEGKPYYVCTTAAANKFLRIYYARVKECLNAAESATQAEEG

SEQ ID NO: 242171 - protein, 350 aa, unidentified
MTISHYIGLDVHKKSISYCVKTADGTITEEGKLRATRQVLRQWAGKRQQPWHGAMEATLFSSWIYDALQPFAAKLEMGNPSMMKAIGAAKKKSDRLDARKIADLVRCNLLPACYVASVEMRELRRLLRYRNTVVGHAVQMKNKMSGLLMEAGAEYSKQQLHGKKYFTELMGELEEVPESVKDMLRLSRSALEMFETTQRQLLNRLGKEPALVKHLELLRSIGGVGEVTSLTWALEVCDPQRFPSIGDALSYCGLTSALQSSADKQQRGPISKQRNPHLQTVLIEAAKLAPRWNPQLAEVHQRELQRGNRNRATLAVARKLVAYLLAVDKSGKRFEVRIPPAKEMEAEKVA

SEQ ID NO: 242172 - protein, 465 aa, unidentified
MPHTSCRPRKPRTSPSVLERLNPDAAGVDCGAAAHYVAVPPDRDAHPVQAFQTFTADLHRLADWLLACRVRTVAMEATGVYWIPLFEILETRGLTVLLVNARHVKQVPGRKSDVCDCEWIRDLHSVGLLHGSFRPPAPIVPLRAYLRHREGLVQRASQSVQRMEKALTQMNLRLGLVVADPVGVTGLRILRDIVAGQHDPHTLAQHRDPRCKASASEIAAALTGHYRAEHLFALQQHLAAYDFVLTQIAACDAVIAACLQTLTAALVPPSAPLPGARGASRKARRLEPTGDLRGPLHHLTGGIDLTQIDGIAPHTALKLLAELGPDMTRWPSAAHFTSWLTLAPHNRVSGGRRLSSRTQPSANRAAAALRMVAMTLGRTSTALGAFYRRIAATRGKPHAVTATARKLAILVYRVLAGELVYQDPGAEAYHAQQRTRRLRHLRGRAAALGFDLIQRDTGEIISVSA

SEQ ID NO: 242173 - protein, 361 aa, unidentified
MASMPSQLDPVSRVVVGGVDTHKDLHVAAVVDTDAVVLGTESFSTTRAGYRAMVRWMRTFGDVRKIGVEGTGSYGAGITRHLAEAGIEVLEVDRPDRSDRRRRGKSDTLDAQAAALAALAGRRTSTPKRKDGLVESLRVLRLTRATAIRSRTKALQLLRMHVVSAPEELRDQVRNLTRMQLLRTCAAWRPDTVGFRDPVVATRIALKSLARRILELNDEIADLDELIDPLVQELAPKLLARPCIGVEIAGQILVTLGDNPTRIRTEASFAMLCGAAPLPASSGKTQRHRLNRGGDRQANRALHMAAISRMRTDDRTKAYVARKTAEGHSKLEIIRCIKRYLAREIYYLIREPTTLPRPLDS

SEQ ID NO: 242174 - protein, 386 aa, unidentified
MKKHTTAKQNQKVQKQKALTKTDKNGIRKMAAKQRLTIGLDLGDRTTRYCILNEAGEVVSESSLPTTKGGFDSLFGKMPSSRVALEVGTHSAWVSRQLATAGHEVIVANARQVELITKSGRKNDRVDARKLARLARIDPELLSPIRHRGEQAQADLAMIRARAEAVECRTGLINSARGLAKPMGERLKACDAYQVTEALGDGLSEAMQQIVRPLLKIVEAISEQIAVYDQQIEAMGKRYPEIELLTQVYGVGTLIGLTFVLTIEDAERFAHSRDVGCYLGLQPKQRESGDSQPELGISKAGDRLLRSYLVQAAHCMLRKGAPDSDLRTWGMAKAQGGKRAKRRAIVAMARKLAVLLHRLWSTGEVYDPLYNRKAQEAAQKKRKVAA

SEQ ID NO: 242175 - protein, 345 aa, unidentified
MTEAYDGRQVVGMDLHRRRSVLVRMTEDGRKLETARITNTPAALRAVIARAGQRPRVVVEATYGWYWAADVLEAAGAEVHLAHPLGVKAFSYRRVKNDERDCADLADLLRMGKLPEAWIAPPPVRELREITRYRHKLAGQRTSCKDQVHAVLAKSGIPVTRSDIFGPGGGIWLDGLPLGQPYAGKVASLRALTGVLDGEISRLEEQAAAMLAGDRGYAAIRQLPGIGPVLGAVICAETGDITRFRTPGQLCSWAGLTPRHYESDTKVIRGHVSKQGSRMLRWAVTEAIQRQPAGTKPQQVKDAIIARRGAGARNIAKTAAARQLLTQVFYSMRDGHIRRVTSQAA

SEQ ID NO: 242176 - protein, 419 aa, unidentified
MSFKIIKNNCCGLDVHKTWIYACIGITDSHQRTEYKQARFSSFTKGLNELCDWLAKYNCKDVCMESTGKYWIPVFNVLEKHDLWVTLSHPKYTKPMKGNKTDRKDAKWICDLYMCGMVKPSFIPPADIRELRDLVRYRFKLTCMITSEKNRAHNCLTVSNLKLDDVFSDIFGKSSRSITEQILQHPGETFDVAPFVDGRCKTPIEEIQAAVDGAISKEQTVKLRQCLNHIDELEQHKSEIEREIFRLSEKYAAALDLMRTVPGFNKNPLTAIQVLSEIGGDMSVFPTAKHLVSWAGCCPRNDQSNQKIKSTRISRAGSYFKPVLVQVANALIKSKKHPEFVSRYRRIKARRGHKKAIIAICRMLLTAIWHILSDLKPYTPEGFLEQRPVKEDKILTTSQALNLLKQRGYTIKDEPAAAS

SEQ ID NO: 242177 - protein, 422 aa, unidentified
MLEETQDTEEIIGRVAALDIGKAELVCCVRVPSAQGSGKRAQEVRTYQTMTRSLLVLADRLGELGVTRVVMEATSDYWKSPFYLLEAHGFDVWLVNAKDVKHLPGRPKTDKLDAVWLAKVAERQMLRPSFVPPPPIRRLRDLTRYRADLVAARTAEKNRVEKLLEDAQIKLSVVASDIFGVSGRDMLAALIAGERDPKALAQLARRRLRAKLSLLEEAFYGHFSDHHAFLLQTMLARIDQATADIATVEAHIDAEIAPFAQAADRLDEITGVGRAAAQVIIAEIGVDMGRFATPGQLVSWARFAPGVKESAGKKKGKATTGHGNPYLARVLGEAAAAAGKTNTFLGERYRRIARRRGTKKAIVAVGRSILIIIWHLLSDPDARFHDLGPGFYDTRIDAERSKRNHVRQLEALGYKVTLQPAA

SEQ ID NO: 242178 - protein, 320 aa, unidentified
MTILTSQTVVGIDIAKAEIVVYRSDLQAIDTIKNDRTALKRWLKTLPTQSALAVEATNIYHLDTVELAHAMGHQVYVVDAYRVSNYRRGIGQRAKNDPCDARLLARYLTNEQHELRLWNLPPKAYTTLKSLLHRRATLVKNHAGLMLSWADEPLLKKALIAQQKAFKEAIQAIQKLLQKVSKESGIEANIDRCKAIEGVGELVATGLATSFMRGDFADSDAFIAFLGMDLRVDDSGKKNGPRYLSKKGDPEIRRLAHIAAMTACRSPRWKPFYESYLVRGFSKTQALVVLARKLCRVAFALMKNQSEYQPKPMLQGCPAT

SEQ ID NO: 242179 - protein, 372 aa, unidentified
MIVHIMTYERSTLVNSEKYIGLDVHQATISVAAMDSRGKLVMESILETQAATILEFFAGLRGTLSVTFEEGTWAAWLYDLLKPHVAKLVVCNPRKNALLKHGNKSDRIDARKLADLLRLNDLQPVYHGETGVRMLRELARSYLTIVKDLSRVMNRLKALYRSWAIPCAGRDVYYTRHRSEWLGKIPEAGARRRAEQLYQQLDMLQHLRQQARRELLTESRKHAITAKLRKIPSLGPIRSALAVALIQTPHRFRTKRQLWAYSGLALETRTSGEHCYVRGQLRRSKKQISIRGLNKDHNHDLKGLFKAAATRASVQPGPFQDFYQRSLAKGIKPTMVRLTLARKIAAITLTLWKKGEDFDAEKLKSKPLERLG

SEQ ID NO: 242180 - protein, 414 aa, unidentified
MKKHTYRSKNVNKINWEKVTEKSSDELLLFAIDVAKEKQYALLSNVSGTVSELVWWNHPEQTHEMLGILESFSCPLDIVMESTGTYGDAMRHQFRRSGFGIYQISAKRVSDAQEIFDGVPSQHDAKAATLITQLHRHGISKLWVELTDTERSLNALRREYDMHQSQYQRNQNRLEAYLSRHWPEVHYCLELNSVTLENLLIEYGSPERITDDKEAAAIKMRVWGKSQLKDEKINRVIEGACRTLGQPCTEIERQYLQALAEEMRHSRLQQKRAKQAIELMIKSDSELQEMGKLIGLATTAVLLSCHLDPRNYDCASSYLKAFGLNLKEKSSGKHIGQLKLTKRGSSIARNYLYFAALRLIKLNPVAKAWYQSKVDPRARNKTVIAVMRKLVKSLWYVGRGEAFDASKLFTIAEA

SEQ ID NO: 242181 - protein, 337 aa, unidentified
MTLDLLAIDLGKRSFHLYGIDTDGVIVSRKVSRAKLAEVVGDLAPTAIAMEACASAHHWGRCWLAGGREVRLINPRFVKPFVKGSKNDAVDAEAIFEAAMRPTMRFVPVKSTDQQDLQSLHRARDQLVCQRTALINHARGLLAEYGIVLPQGPWRFTTQAPAAIAGADLSDLARAIFGELLDQLDDLDRRVKKLDATMVALCRTNEACRRLTKLPGVGPVVATAIVAAVNDGRQFRSGREMAAWIGLVPRQYSTGGKPRLGGIGRRANHYLRRQLIHGARAVVCRLPKSPKHDDRRSIWLNALAARRGFNRTIVALANKTARIAWVLLTRKEEYAIT

SEQ ID NO: 242182 - protein, 349 aa, unidentified
MDSAYDGRQVVGMDLHRRRSVLVRMTEDGRRLGTARIINSAAELRKAIAAAGTNPRVVLEATYGWYWAADVLAAGAEVHLAHPLGVKAFTYRRVKNDEKDAADLADLLRMGRLPEAWIAPPEIRELRELTRYRLKLVQRRSGYKDQVHAVLAKLGVPVTCSDLFGVWGSRWLDELSLPQPHAGKVASLRTLIAGLGTEITLLDAVIADLLAGHDGYRAIQALPGIGPVLAAVTVAEIGDIRRFSCPAKLCCWAGLTPRHRESDTKITRGHITKQGSPILRWAMVEAIQHQPAASPVRGVKDRIIARRGKEARNIAKTAAARQLLTAVFYAMRDGQARSLATRTAAQHAA

SEQ ID NO: 242183 - protein, 340 aa, unidentified
MSLYGGIDLHANNSVIVLINEQDEVIYQKRLPNALPTILEQLAPYHTEMKGLVVESTYNWYWLVDGLMEADYRVHLANPAAIQQYKGLKYTDDHSDARWLAHLLRLGVLPEGYIYPKAERAVRDLLRKRAHLVRQHTANVLSVQNIMARNTGARFSVKRIQELTKEDLSTLLAEASQVLAVTSSLVVLDCLRQQIKMLEKTIHKCLKHTPAYEQLLTVQGIGTILAQTIALETGAISRFPTVGNYASYCRCVDSTKISNGKRKGTGNVKNGNPYLAWAYMEAAQFAMRFQPAAQRFYQRKLAKSRNNTVLARKAVAHKLARACYYIMRDLVSYEVTKAFG

SEQ ID NO: 242184 - protein, 430 aa, unidentified
MKSNTQNAKIEAITENTLVLGIDIGSETHYARAFDYRGIEYSKKPFKFSNTEVGFMSFKAWIQDMKEMHEKDKVVPGMEPTGHYWFNLGKFLQDNEMRPVLVNPHHVKKSKELDDNHPTKNDRKDPKVIAGLVREGRYMIPYLPDGVYADLRTASNIRFQLQAELTRIQNRISRWFNIYFPEYKTVYGKPDAKSGMMILKVAPLPEDILTLGIDGVNQIWRDAKMRAVGKARAKTLMEAAEHSVGSKEGAVSARMEIRMLLEDYESRNVRLQEVMALIEELVKQIPMAEKLLEIKGVGIKTVSGFLAEVGDISRFNNPKELQKLAGLALVENSSGKHKGETRISRRGRKRLRYLLFEVAMSLVSKNAEFKELHIYYTTRRINPLKKMQSLMAVAAKALRIFYAILTKGVAYDPKKMINDIKRPKIYLQAA

SEQ ID NO: 242185 - protein, 476 aa, unidentified
MSYENGNIYRNGNQALKEALEQYKPSQILYVPLEIGKYNHKAKIVNFLGDVLIKPVEFANSNNGLKFLLEKIKDAQKIASARKIFCGCESCGHYHLNIVYHLKQSGLPVEPINPRDVRKENPNKDAKNDLIDLNAIARTMIYNKGSRQVIPEGVYYKIQRASRTRMNLVQRRTSSRNIITGLVDRIFPGLWDKDDSVFSQRFGKASLLLLEHYPHPKKISLLGEKRLSRFLRKNNTKLGEETAKKIVQKAEESLSKPEEELGMDILSLRCHIKVLRQYEEVIQTLEKEIALLLLQTPGTYLLSIPGIGAEYASQFTAEVGDIQRFAYANQIISFAGICSRVFESSEYEANGLPMTKRGSKFLRTTLNQISLSLNSHCKPFHIYYERKREEKKDRPGIARIATGNRAVKLFFALMKKEELYKPRDLVDEKKYYIQLWKKILEKLGKIDLNLLPKENYLVKIKKEIEDKYGLKLSLEI

SEQ ID NO: 242186 - protein, 468 aa, unidentified
MKNYYLGIDVSKGYSDFVLLNEKKQTVLESFQLDDTFEGHNKLFKILSEFFTQQPDTKIFAAVESTGGYENNWYHLLHKYQGQLNLSVARLNPYGVNYNSKADLKRIKTDAISAVSIAEYLISHPEKVSYQTEDPFASLRRQWTFIKMLTKQRVQLLNQLESLLYVANTEILYHCRNKVNLWTLKLLKQYPTAKHLAKARVSTISKIPYITETLAKELINKAKHSVASETDETIAEIITATVNQILSLRKTICLQVKKLQSSCNLPEVALLKSFSGIADYSAVGLIIEIGSVERFSSVKKLACFFGVHPVFSQSGDKISGYRMSKRGRKEPRQILFNVARFAIVHNPLIKEIYIDHLKKGMSKMAAIGAIMHKILRIVYGILKNNTPFNPEIDRANRLRNLSKKKDESLVVNKMLEPIDCKAPVSRRQLKKRKEQEKSQNLKPLNAEQIVSVFAGSDSRSFPFASTQT

SEQ ID NO: 242187 - protein, 338 aa, unidentified
MAIVMGLDQHRAQITAEWIDTDTGEVSRSRISPAHRAGVRKFAERFRGQELEVALEATTGWRFVAEEMRRVGAVVHLAEPAETAARRGNKKRAKSDRADARHVRELLMIGRLPESWIAPDHLLDLRSRVRLRHTLSHQRGEWQQRIQAVLYHHGCPQRRNLMTAEGLQWLKAQPLPAGAREQVTVALGMIDALDAQLAPLDKELRAYARRQLGCKALMKHFGVGELTAVTILAELGDVDRFSSSREAVRYAGLDITVHQSDQRRSPGHLSRQGPPALRWALFEAAQSAARQGSPDRDYFAQAAQRLGANRACLSVARKLLKRSYHTLRELGEEALQPA

SEQ ID NO: 242188 - protein, 308 aa, unidentified
MKKVSTAVAQQSRNCSQQNLTIGLDLGDRNSWYCVLDEAGQIRQEQRVRTNAKALGEAFGAMPRNRIALEIGTHSPWISRLLSDLGHEVIVANARKVRLIGESRKKDDRLDAQTLARLARIDPELLYPVKHRSVQAQADLSVIRARAGLVRARTGLVNTARGLAKSYGERLRGCNARNMNPEKADGLSPELQRALEPLLSAIEELSERICEYNEGIEALAQQSYPKVALLKQIKGGGTLIALTYVLTLEDPHRFGKSRDVGCYLGLQPGRRNSGQREPQMHISKEGDPYLRTLLVQGATHLGTIRHRL

SEQ ID NO: 242189 - protein, 454 aa, unidentified
MAKRKEKAVRRSALLEPNAAGIDIGVQEIYVAVPPDRDEHATRRFTSFTCDLQALADWLQGCRIRTVAMESTGVYWIPLYQILEQRGFEVYLVNAHYLKSAPGRKSDVSDCQWIQYLHSVGLLRASFRPPDAICAVRSLWRHRSSLLQMASEHTLHMQKALSQMNLQIHHVLSDITGVSGLAILDAVLVGERDPMRLAQLCHAFVKTPHEIVAKALVGDYRPEHLFTLKQSLDGYRFYKKLITELDEETARLMQAVPSAGKQLAPMPPRTKHTVYQRNGNDPRFDLRSELYRIAGVDLTDVPGVSAITAQVILTEIGPDVSRFRNASAFASWLGLCPEKRVSGGKVLSCKTRKVKSRAALALRMGANSLCRAKGYFGEFFRRMRAKLGTAQAITATAHKIARILYHVLLSKQPYTESIFRLCDEQAQFRAETRLRKQAALLGFHVVPIPAGPRM

SEQ ID NO: 242190 - protein, 342 aa, unidentified
MLIIGCDYHPGMQQIAWFDNESGECDELRLEHGTGEAEKFYRELKRRGVRVRVGIEASGHTRWFERLLAELEMELWIGNPAKIAAQRVRKQKTDRGDAQLLLQLLREDRFPRVWVPSPENRDLRQLLWHRHRLVQMRTRVKNQLHAMALNEGVQRRSRLWSKQGRAQLESFALDRWTARRRHDLLELFDQLTPQIAELSQAIEREAERRPEVQRLRTHPGVGPITALAFVLVLGTPDRFRCGKQVGSYLGLIPCEDSSAGKQRLGHLSKQGNTLLRYLLVEAAQAAVRCDAQWRRCFVHLAMRRQRNVAIAAMARKLAVSLYWLWRNAEDPPAAPQSGSHVG

SEQ ID NO: 242191 - protein, 359 aa, unidentified
MVYLGVDLHRKVSHVVALDEAGNVTLSRRLVNDPAEFRRVFGELEPEPIEVAFEATYGWGWFADLLADAGVAAHMAHPLATKAIGAGRVKNDAIDARTLAHLLRTNLLPEAPIAPPEVREARRLVRMRASLVRVRSRLKCQVHAICADLGLPIEVSDLFGVRGRELLTTLALPTVTAGRLDANLRLIDALGGEIRLADREIVRHFRADPRIRRLTPIPGIGFLTAAMIVAEVGDVGRFGTPNRLCSWAGLTPTERSSADHTQRGHISKQGSRWLRPAMVEAAVAAARGLSLQRFFGPIKERRGTKIARVALARRLLSLAFYALRDEAGCRAFPVLAHPSRSTRARSPYGMASPDGRDFD

SEQ ID NO: 242192 - protein, 402 aa, unidentified
MNSVGIDISKGRSTVAVMRPFGEVVISPFEVRHTDSELSELARQLKSLDGETRVVMEATGNYHTPVAKLLHDAGLYVSVVNAKLVHGYGNNDLRRVKTDKKDAVKLANYGLDRWLTLPRYITEEDTRLLLKNCYRQYRQYSKVQTVLKNNLISLLDTVFPNANRLFSSPIRGDGSEKWVDFVAEFWHCRCVSEKSEKAFANKYQRWCKKHGYNFSVAKAHTIHAEASGHIGVMPKSETTKLLVEQAVAQLRATSVALTALKREMLTLAAQLPEYPVVMGMFGVGPTLGPQLIAEIGDVRRFYSKKALVAYAGLDAPPNDSGDVTGKHKSMSKIGASSLRRTLFLVMSVYLRSAPLDESVYQFMDRKRAEGKPYHVYMMASANKFLRIYYATVKAYLESLEQV

SEQ ID NO: 242193 - protein, 341 aa, unidentified
MKSQFPTDRYFRQCVGIDVSKDKFTACLCMLSWGCPAQFTDSINFANNKTGFNQLVKWARKESEKTHPILFLMEPTGSYYEDLAYHLHKLSFTVYVVPSGRVHAFFKGEGIKTKTDAVDAHGLALMGCCKPHMKTWSAPDPAYRELRQLTRLSVQFKDIRTILINQKEALSHQYNPSTLAVKQLNALIKSVNLRIDKNQLLIEELVGKSSEIKEKVDYLQSIKGLGFLTSVTILAETNGFRNITNRKQLASFAGLDVVAKDSGNSTPARHISKTGNTHLRRILYLCSLSAASYNPQMRALYFRISLCKPSRVARVAVMRKLLLLAYTLCKKKEYYDPEKIK

SEQ ID NO: 242194 - protein, 376 aa, unidentified
MTTIDAERTETGVAVVLGVDTHLDFHVAVAIDHLGRRLGEAKVPTTANGYEELLIWAEGFGHVRCAGIEGTSSYGAGLTRHLRAREIEVLEMERPEHRKRSSRRNVEKSDPSDAERAARAVLAGEASGVPKSGEGRVEMVRALRVARRSAIKARTQAANQLQALRVTAPERLRHRLRGLSTKELVSVAACFRLGEDPVDVASATKFALRSVARRYEALSEEISELEAHLDRLVAQVAPELVALLGIGTDNAATLLIVAGDNPKRLGSEASFANLCGVAPIEASSGKVVRHRLNRGGNREANRALYMICLARMRRDIRTQEYVARRTAQGKSKREIIRCLKRYVAREVYRVLVSCGAHSSPTGPKEEAQIGTRNSAA

SEQ ID NO: 242195 - protein, 416 aa, unidentified
MDAIVERCAGLDVHLDTVVACVLYGKLDIKPKKEVKTFSTTTKGLLELLDFINQKECTHVAMESTGIYWKPVWNILESGAFDLIVANAKKIKNVPGRKTDVKDAEWIASLLRCGLIEKSFVPPERIRDLRDLTRLRKELLGEVNRNKNRIHKVLQDANIKISSVLSDVFGETGKSILNQIIDNQCITEEFIYSLYEGRGKSKLKSTLMEMYEALNGKIRGHHVILLGMHNSNIVFLEKQINELEKEIDILLQKERYSLELLETIPGISKISASSIIAEIGTSMDVFKTEKHISSWAGLCPKNNESAGKKKRSGIKSGNNWLRSMLCECAWSATKKKDSRFKNKYWSMVPRMGRKKALIAIANMMLRLIYHLLKTKSTYKELEIQYFIDKDKRREDRIIKELKSKGYLVEKDSLQMA

SEQ ID NO: 242196 - protein, 413 aa, unidentified
MLKIVYPICCGLDVHKNFIFACVASTDEKGITSYKNHRFYTFTKGLQELADWLKANSCSDVCMESTGKYWIPVYNILESTCKIVLAHPKYVKAIRGKKTDKKDAKWIADIFKHDLVAGSFIPPLDIRQLRDLMRYRTKLTNFNTGEKNRAQNCLTVSNIQLASVVSDVFGKSASAIIEHLLEHPNDKSFDFRPLLKKSINQKAEDIGLAIDGEFSPEQAEKMKIILSHMESIKLCKSNLDSVILNLAEKYISQINIVSTVPGIKNPLSAIAIISEIGVDMSVFMTAKHLCSWAGLTPQNNESAGKKKSVRISRAGAYLKPLLVQIANAIVKSNKHPEIKNRYLSIKKRRGHKRAIIAIARMILTAIYQMLKKNEPYNAELYKKSDVIPANRDVSVEQAIFILQRQGYTISKDT

SEQ ID NO: 242197 - protein, 429 aa, unidentified
MNHSASATPPIVAWVGLDWADQQHDICLQASGSTDLEHAVVEQQSQALQLWVAELRRRFPQGAVAIALEQSRGALFYALMHYEFLLLYPIPPKALADYRRALYPSGSKDDPIDAQLLLEFLRKHPERFRPWVADDVETRQIALLSEHRRQLVDDGTALSNHLTALLKGYFPQALEWAGDLTAPLAWDFLAQFPSLEQAQRASRVELLKLYRAHTRRTPEQLEALGVQIRTALPLTTDRAVIESSVLVVQTLVGQLRVVQAGVKGLERKLRDLFAAHPDQAIFQSFPGAGKALAPRLLAAWGSNRQRFEGADNMQCFGGPAPVTVRSGKTQWVHRRFACSTFLNQTFHEFAAQSRLHSPWAKAYYQQRREGGAGHHAAVRALAFKWIRIMFRCWKDGTPYDESRYQQALKRRGSPLAITLSRLATPPARA

SEQ ID NO: 242198 - protein, 404 aa, unidentified
MDTLYIGIDWSEAKHDVCIVNNAGAILKEFKIAPTPKGQADLEQEIKSFGIAADHCLVGLETSNNLVMDFLESRPYQSYVIAPNQVASSRGRFSSSGRRNDRSDAHLLADMLRTDHHRFTPWQADGVTVNQMKAGLRLIDDLTQSITRYNNRLRAALLRAYPLALGLFNDLTTQIGLQFLIEYPLQTAAQQLTYADFAAFCRQHGYSHPKMIPQRYAHLQRDVAQPATTTILAYQEQIPILATLLLSFVVQKQQTKRRLQQLFATHPDQHIFASLPGAGDLLAPKLLVMFGDHRQRFPQPAAIQALAGTCPVTSQSGKKKVIKFRRACNHEYRQTAQLFAIASVPQSTWAATYFSLAKARGLADSHAYRCLANRWLAIIWTLWQREQPYDETYHLEQVRRHRHP

SEQ ID NO: 242199 - protein, 364 aa, unidentified
MHSINNIELSSLEETRCQFNGGTGAIKLGIDVHQDFYVVVEQLGGSNPKPPQRFAKEAFLHWAARLKHKSSAEVYAVYEACGFGFSLQRKLSALSINCYVVCPQKLDEQNRRVKTDGLDAKALCLKLDRFVQGNRHALAIVRVPTEEHEQLRAIHRQREQLVKARKQLEAQGRSLMVNHGLEPVQNWWKPRTFAALPAPQWMKELLANSQPILVALQQKISALTVQLQSAASPDQPRGLGKMTSVLIDREIGDWNRFNNRRQIASYTGLCPGEYSSGNTRLQSCVTKHGNPRLRAALVELAWRLVRFQRDYKAVRKWRQILAKGALATGAARKKAIVAVARQLAVDLWRIKTGRLSAEELGLIN

SEQ ID NO: 242200 - protein, 342 aa, unidentified
MLDGINLPVPERTGIPGDCATLFVSLELSRSTWVATSLAPSSKKMSKYTLVGGNGRELLDLLARLKTRAEQRIAAPVKIVAIHEVGLDGFWVHRLLEANSVESHVVDPASIAVPRRHRRAKTDAIDGETLLRTLMAWQRGEPRVCAMTVPPSPSEEDRRRISRERAVLLRERIRHTNRIRGLLFGQGIANYNPLNKNRRECLEELRTGDGCPMPARLKAEILREIDRLELVLRQISQVEAERDEMLRPAEASSPAALLMRLKGIGAEFATVLYLEGLFRHFENRRQLAAYAGLAPSPWKSGSIDHEQGISKAGNPRLRTTMVELAWMWVRYQPDSALSCWFR

SEQ ID NO: 242201 - protein, 316 aa, unidentified
MSEKLQESFVGIDVSKNALDLRIEPVGESLHVAYDDTGVSEICQRLTEVSPTLIVMEATGGLETRLASELAAQGLPVAVINPRQARDFAKATGQLAKTDQVDAGVLAAFAQAIRPAVRPLKDADTRELDDLVTRRRQLVAMRVQESLRLGAANSKALHKNLKSHIAWLDKQIAKLDDDLTQRLRNSGVWKAKDDLLRSIPGVGAVTSLTMLGKCPELGQLNRREIAKLTGIAPLANDSGKHRGKRFIWGGRADVRAVLYMATISAIRCNPVIKAFAERLKQTGKPAKVVIVACMRKLLTIMNAMIKSNTPWTPKIA

SEQ ID NO: 242202 - protein, 448 aa, unidentified
MPQEGRHISAMDCRAKGRSSTTVTKAMSNTEESLDRWQQHRYFGALDWATQKHMVVIVDARGKIVEVFSIEHSALGWKKFRERLAPYGSIPFAIETSQGAAVEQLLEAQMLVYPVNPKSAQRYRERKAPSGVKDDELDAWSLADALRVDGHGWKILRPEAALIKELRLLCRDEVSLIEQRTALIQQLQQALAEYFPTMLDAFEDWTSVSSWLCLQRFPTPQALQQAGKRQWEKFLHARRLWRQDSGPRRLELFAKATNFCGTEPTIKAKSMLALSLVKMLLCLEPQLQEYRRRIQELFARHPDHDLFGSLPGAGPKIAPRLLSEIGEDRERFDGDAQNLQCFAGTAPVTRKSGKRILGRHKRRACNKHLRHAIHLLSEQSLKRCVWAQIYYQHHLAKEKSHANALRSLGQRWLKIIHKMWFDRKPYDAELHHRNQLKHGSWVFQLRPC

SEQ ID NO: 242203 - protein, 340 aa, unidentified
MTITTVGIDLAKNVFAVHGVDQNGRTVLVKPKVSRAALPELIASLPPCVIGMEACSGAHYWARLFRQYGHEPRLMAAKFVSPYRMAGKSGKNDAADAQAICEAVRRPHMRFVPVKDESQQAMQCLHRTRQGFIEEKTATYNRLRGLISEFGVIAPQSADALRHMVSVQKSSLPLQVQQCVDDLMEHVDRIEANITEYDRILSHIAKTDHRSQRLMELKGVGPTTACALVASIGNAHDFKNGRQLAAWLGLTPSQYSSGGKSKLGRITKAGDSYLRTLLVQGARSVLIGAGKRTDSFNRWVCMLVERRGYWRAVVAIAAKNARLCWASLHYGDDFRLYSVN

SEQ ID NO: 242204 - protein, 346 aa, unidentified
MKPSTIGLDIAKSVFHLHGVDASGAVVLRKRLRRRELVAYFAKLEPCLIGLEACGGGHHWARELAALGHQVRLLSPADVKPYVRRNKNDAIDAAAICEAVSRPSMRFVPVKSRAQQAALVPHRVRDLLVRQRTMLINTLRSLMAEFGVVAPRGRGHLGALAARLEEPEAASPSNPAIPAAARPLLLELVAAIAALSERIARAEKAIVAAVRKDPLGRRLMTVPGVGPITASAVLATVGDPGRFRNGRHFAAWLGLVAKQSSTGGRPKLGRISKMGDRYLRRLLVLGATARLRCVGREQSPLAAWTRALLARRPARLVTVALANKTARILWAVMARGEPYRPEAAAA

SEQ ID NO: 242205 - protein, 412 aa, unidentified
MQDLLEVCCGLDIHKENIVACLLTGSTDVKPTSEIRTFSTMTYGLQELKAWLNDSNCQHVAMESTGIYWIPVYETLESESENMHLLVVNARHMKNVPGKKTDMRDSEWIATLLRAGLLRSSFVPEKRIRELRHLTRYRKSIVHDVTAQKNRIEKFLQSAGFRLSVFLSDTFGVSGKNIMRHLITHGSIDLKDLENCLKGQTRRNANNILVSVNGTMSAHQQQFLAISLDHLEILEAHLKQIEQALEQETKKFEAAMNILTSIPGISKIAASSLVAEIGINMSCFPTAEHLSSWAGMSPGNNESAGKRRSTAVNHVNPYLKSMLCEIAWVIAGNRNAYLSKWYWKLKQRKGAKKAIVALGRKLLVIIYAMLKKGTVYDEDCFEQRRKQMENKRVSRMLSELNRLGYQVSCQAT

SEQ ID NO: 242206 - protein, 388 aa, unidentified
MQVAADRTDASTAIQTDLPAIFVSLELSRSTWLITSLSPGAGEKMSKHSIRAGDVAGLLVRLAQLKEKARGRTGRDFPIIAIQEAGLDGFWIHRVLQSEGIESHVVDAASILTSRRRRRAKTDGIDGETLVRTLLAYKRGEPRVCAMVKAPTPEEEDRRRICRERKTLVGERVEHVNRIKGLLFAQGVSNYEPLKRNRRARLEELKTGDGRPLPAHLKAQISRELDRLELVLPQLKAVEAERDALLKPVSEGCPTPAAMLAQLKGMGPEFTAILWSEGLFRSFSNRRQLAAYAGLAPTPWQSGSVAHEQGVSKAGNPRLRTTMIQLAWLWLRHQPTSALSVWFQERVQSKGGKIRKTTIVALARKLLVALWKYSTSGVVIEGAAMKTI

SEQ ID NO: 242207 - protein, 426 aa, unidentified
MNYTQNRKISQITPLTLIIGIDVAKDKHVARAQNDRGIEFGKRLIFENRIHGFQMLLDWVNRHQQENDKNHVIFGVEPTGPYWLNLAYFLTAKGYGFVLVNPMHVKKSKELDDNSPTKNDTKDARVIAQLIKDGRYSVPNLLDGIYAELREGVKIRDQLTQQLAITEGRIQNLIQRYFPEFFDVFGDWKGKAALCTLKLFPFPSQMKEMTPEEVLSKWKPFVQRAVGMKRATKLVETAKKSIGIQIGIQFAKREMEYLIDQYELYQTQLEELDQELEALVETIPGAKQMMNIPGLGVTTVALFFAEVGDLTKYSHPQQLVNLAGLSLREHSSGTFKGQTRITKRGRSRLRKAMYLAIRPLVAHNPTFKALHQYYTKRSERPLKKQQSLIALCCKLLRVLFVIGQKQCEFDGSKLLRGLPQITLQVA

SEQ ID NO: 242208 - protein, 317 aa, unidentified
MEYIGIDLSQEYVDADLPGGVVQLAQTPAGHAALLAALPAGAVCVLEATGPYGLRLLAALHQAGQPVCVVNPLQVRRFAQSQLRRSKTDRTDAQLLSQFGRVFTPALHQPSPLWLTQLQQRQALLDLLKGQRAALRNHQHALRQSPWPDPVSTKALEAELARLEQQLTALEKSLADDAQAQCGADYQRLQTIPGVGPRIALSLLLAGPGLRAFAGWRQAVAYAGLCPRHYESGSSVRGKPRLSKLGDGRLRRLLYVGAWSASRANPACAALYERLLARGKAKPQALCAVAARLLRQAWALLAHERDFDPNFHLALAS

SEQ ID NO: 242209 - protein, 413 aa, unidentified
MEVFCGIDWAEDHHDIALVDRDGQLLARRRISDDAAGLAALLDVLAAHGDSAGDPIPVAIETPRGLLTACLRATGRKVYPINPMAVARYRDRHSIAGRKSDHGDAVVLANILRTDLHAHRPLPADSELAQAIAVLARAQQDAVWARTAAHNKLRSHLREYYPGFLAAFNGARGGITRPEARAILATAPTPAGGATLTLSQLRALLRKAGRRRGIDTEATRLHAAFRAKQMHQLPLVEEAMGRQALALLRQLDAACAAADDLEQAVIESFNQHPDAGIITSFPGLGPLTGARVLAETGDDRSRFQDAKGLKAYAGAAPITRASGKAKAVLHRRVKNQRLAAAGYSWAFSAISASPGARAHYDRRKADGDRHAAAQRNLFGRLLGCLHHCLATGQHYDENTAFPSPTPATRDIAA

SEQ ID NO: 242210 - protein, 389 aa, unidentified
MFYIGIDVAKDKHDCCILGSDGEILFSPFTIPNTLYGFDELYEKITSLTNDVSEIKVGLEATGHYHLNLLRSLLDNGLPSFVINPLHTNLFRKGQSLRKTKTDKVDAASIAMMLLTDKTLKPYSETSYHNEELKSLTRYRFDKVQERSRLKVSVSRLVSILFPELEKMVPTLHMNSVYALLSEFPGASFIADAHLTRLKNLLYEASKGHYGRDMAISIRNAARSSIGTTMASKSMELRHTIYLIQVISDEINEIESAINTIMDSIDSPITTIPGIKNRMGAMIIAEIGDFTRFDSADQVLAFAGLSPSTYQSGQLTSSHSRMEKRGSKYLRYALFNATQYVCIWDPTFKTYLAKKRSEGKHYYVAISHACKKLVRLIYRMQITGEAYRA

SEQ ID NO: 242211 - protein, 412 aa, unidentified
MADIAAYIGLDWGDERHSVHLQMADGTLEHVELEQKPDVLHAWVTQLKERFAGGQVAIAIEQRKGAVVNALMLYDFLVLYPINPKALARYREAFRTSRAKDDPADSQLLLDLVVRHRDHLRAWIPDTTEARKLQLLCEQRRKLVNHRVALTNRLTSLLKQYFPQALEWVGDLASLQGCDFLAQWPNLDAVQSARPSAVRKFYQAHNCRMASVIDARLAAIKIAQPLTIDPAIVEPLSLSVQTYATQVHGLIRAIQAFDVRIAHVFADHADHDVFASFPGAGDVCAPRLAAAFGTDRSRWESAAELQSYSGIGPVTERSGKTLWVHHRLACPKFVKQTFHEFADQSIRFSRWARAYYDQQRRRGNDHHAALRALAYKWIRILFRCWKDRTPYNEGRYIDALCRRGSPLVKNFA

SEQ ID NO: 242212 - protein, 430 aa, unidentified
MKSNTQNTKIEAVTENTLVVGIDVGSEFHYARAFDWRGIEFSKKPFKFSNTEPGFTEFKAWILHIQTEHDKDAVVPGMEPTGHYWFNLGKFLQDNGMKPVLVNPHHVKKSKELDDNNPTKNDRKDPKVIAGLIKDGRYSYPYLPDGVYADLRTASNLRFQMQSELTRIQNRISRWFSIYFPEYKDVYGNPDAKSGMMILKVAPLPEDIVTLGVEGVNRIWREAKLKGVGLKRAKTLFEAAEHSIGSREGATAARPEIRMLLEDYESRAARLDEIMTLIESLIKQIPMAEKLMEIKGVGIKTVSGFLAEVGDISRFDNPKQLQKLAGLAIRENSSGKHKGETTISKRGRKRLRYLLFEVAMSLVARNEEFAQLHHYYTTRRINPLKKMQSLMAVACKLIRIFYAMLTKQVDYDPQKMISDIRRPEIYLQAA

SEQ ID NO: 242213 - protein, 327 aa, unidentified
MDSTTGEIEGRRLRHGDGEAEQFYRELEGPVLIGMESVGNSFWFEQLMKSLGHELWIGDAAQIRASYVRRQKTDRRDAGHILRLLVEQRFPRIWVPSVEQRDIRQLLLHRHKLVQVRTRVKTELQHLALNQGMQKKRHLWSVRGRADFEKLSLARWASQRREDLLALLSLLESQVEQLDRAVEQVSSSDGQARLLMTQPGVGPVTALAFVVTMGDVQRFKRGKHVASYLGLIPTERSSGDKRRLGSISKQGNVFLRTMLVEAAQSACRYDEEFRREYQHRCHQKPKGVAKVAAARKLAVRLYWMLRTQTPYRPAVHNGGSPSHSVAG

SEQ ID NO: 242214 - protein, 424 aa, unidentified
MCGGHGGNLLEPEEIHQGGFSLVKYHVGVDVGKDRHRVCIRDLAKGVYCRNFPITNDRDGFTALITVLEKLSSDKSDFLIGVEACSYALNLSYFLLAMGFTLVEVNPFRANQFRKAQGKKAKTDKIDAHTISAILSIDNHKPLSIPDPILDNLKGLTRFRVDLVNERATMIIHLQEALSVLFPEYQKVFRQLDSAGSLALLATYPGPEHMIGAGEEAVGKTLSLASPRRMSRGMARRIIEAATRTVGVAQRQPSLGIKISILAKRIASLQSTIQDLDKQITALFNSLPCKLQGFPVGRAPSLATIIAEIGDIHQYPTLKKFLSHLGWCPQSFQTGSYSLKHPRMSHAGNKYVRRIVWMLSIFAIQFVPRYREYFQRRVGEGKAKMHIIVAVGRKLLSALYAMLKTGTAYDPNWEVNGRLALARH

SEQ ID NO: 242215 - protein, 353 aa, unidentified
MIHVGIDLHSRNMTLVAINDNGKVLAEDKRANSPANLSLFFQQFNEPVQAVVECTSYWYWVSDWCTAHQVRLTLAHAKMLKAISYAKVKTDSVDARTLAELLRVGLIPQAHQCQREQRELRELTRGRLRMIERRSSLQSSLWQLASKYNVIVQDVGWRYLDKLGTFLEQQLPPVAWVEAQLLLEQLRLLQDQVGVLEHTIEQQVEFTDQLERLKVLPGFGLVCAWTVIAEIGDITRFPSSRQFTSYCRLVPGSKDSGGKHRHRSKNKDGNRYLRIAFNQAAIIAYRDYPEVKEFYKKLARRSGKHVARTVVGKELAKIVWHMLSKGEEYKGFKGRMTRITTQSYWPQPISPNA

SEQ ID NO: 242216 - protein, 339 aa, unidentified
MKYTPVGVDIAKHLIQVHFIDEHTGEVIDKQLRRQDFLTFFSNREPCLIGMEACGGSQHWARELKKLGHEVRLLQARFVKAFVMGNKNDVMDARAIWMAVQHPGKEIAVKTEEQQSVLVLHRTRRQLVKFRTAQINALHGTLLEFGETLHKGRAALNKELPEALERLKMRLPPYLISILDDQYNRLNELDSRIDGIDKLLNSVARQSETCKRLMEIPGVGPLIATAAVATMGEASAFKSGREFAAYVGLVPKQTGSGGKVRLLGISKRGDTYLRTLFIHGARAAALLTKEPGPWITELKKRRPTGVAIVAMANKLARTIWALASHDRKYDKDHVSIRPY

SEQ ID NO: 242217 - protein, 436 aa, unidentified
MESKPEHEPEPEPEPKSSSIVAWIGLDWADQEHQFCLQAVGSTQVEHGVVAQRPEALQDWVCQLRARFPQGRIAIALEQSRGALVYALMSYDFLLLYPVPGKTLADYRKAFFGSGAKGDPRDAELVLELLRCHRERLRLWAPDDALTRHLGLLNEQRRKLVDDRTALTNRLGSLLKESFPQALDWAGELSRPAASEFLTKWPSLAAVQQARPAPLRHFYRRHFRPQPEELERRLTEIRQAQPLTSDTAVLASHALIVPLLAAQLQTLLSSIGRVEAAIAQSFAQHPDHDLWEILPGAGHALAPRLLVAFGTDRKRYQNAGELQTFSGIAPVTASSGKSRWVHWRWACPKFLRQTFQEFAAQSIPRSTWAKAYYFQQLARGKHHHAAVRALAFKWIRILYRCWQDHTPYNEELYLRALARRGSPLLAYLPALQIEEV

SEQ ID NO: 242218 - protein, 400 aa, unidentified
MRVVFGIDVSKVSSEVAILVNGEKVHNYTMSNDAIGFSRLLGDLKTVHKPEIIFEATGVYSRRLQAFLDEHGYAYTRLNPLEAKKQLDSLRVRKTDQIDAEKLAQSQFVLNRKPTYVQEEVYQNLRNLSCFYQNLTEDIVRAKNRLHKVLQVTFPELENILSTPTSEQYWNLVIAFPCKDFVLELSKDKLSESIRQSTSKRISDKRVAYLADKLIALANQSYCAVKKTSPMLEEVRYYTKELLRLSEQRQAVLDEMVELAQPLPEYDILLSIPGIAETTATSIIGELGDIRRFQSANQINAFIGIDLRHYESGNFLAKEHITKRGNPYARKILFKCIHNIASASHTNPCHIADFYEKRKRQSQTTSTKPHTIASIHRLIRTMYYLITHNKLYDYTSTQNR

SEQ ID NO: 242219 - protein, 403 aa, unidentified
MIFVGIDWSETHHDACIVDVDGHVLATGRVPEGLDGVARLHEMAAAHAEDPSLVVVGIELDRGLLVGALVASGYAVHAINPLSVDRYRDRHRTSGAKSDPGDAKVLADLVRTDRHLHRQVAGDSELADAMKVLARAHQGLIWSRQRQLNQLRNALREFYPAALEAFGTDLASADALGVLEVAPTPAEGRSLSPSRIAIALRRGGRRRRVTERAEEIKQALQSPQLEAPEVLARAYGDVVRSTVRIVKEMTTQIESLAAELEASFERHPDAEILSSLPGLGVVLGARVLAEFGDDPDRYADPKARKNYAGTSPITKASGRSRVALARFARNRRLADALQMWAFCSLTSSPGARHYYDAHRARGHTHQRALRSLANRWVGILHGCLRHRQPYSEDVAWPAEGVAA

SEQ ID NO: 242220 - protein, 351 aa, unidentified
METQITARPKLFIGIDIHKRSWKIHCSTDLFGGKSFTMPPVAEKLYEYVQKHFPNYEVSTAYEAGCCGYSAHRSFEAYGWKSLVVNPADIHRKGKEKYTKTDRIDAQLISRELKDGRLESIVVPDAEREELRSLFRRRIELTKDFRRIKSKIKMQLLYFGVKVPEEFDNDHWSHAFRHWIDDLLFNYSTGSSTMSSRMRSFRFIDKELRDISSELRAYCRKHYKEDYYLLRSVPGIGGIVAVGILSELGDLRRFNNLKHLAGYIGLAPGIYESGGHSKSLGMNPRCHRLIRSYFVEASWQAIRTDPVIQEYYRKHIGKDSRKIIVKVAHKLLSRTLSVIKTGNPYEIGILS

SEQ ID NO: 242221 - protein, 341 aa, unidentified
MNVSKTVVGVDIAKRVFQLHWIDQETGEFVSMQLKRGKFLEHFANRAPCRIGMEACGGSQHWARKLVSMGHQVKLMPAKAVRPFVGGNKSDAHDAPAIWTAVQQPNVKAVAVKTEEQQAILALHRMRQQLVKFRTAQINGLRGLLTEYGEVMPLGKAAIKKGIAEALQRLSDRLPAMVIDTLREQWARVGELDTQIDEIERRLKVWHKEDRACQRIADIPGVGLLTATAAVATMGDARAFKSGREFAAFLGLVPRQTGTGGRTRLLGISKRGDTYLRTLLIHGARSVLTHAKEPGPWITELRQRRPQNIAVVALANKMARTIWALLAHERTYQKGFVSQPA

SEQ ID NO: 242222 - protein, 361 aa, unidentified
MEEVSVIGIDLAKNVFELCAQTVTGKIVWRKRLKRKAFMEFMQKKAPRCLVAFEACGGAHYWGRFLLGLGFRVKIMAPKVVKSYRQGPHKNDGRDAQAAAEAGSRDRVRGVPVKSEAAQAVQALVRLRALQIKQMVQTANQLRGILTEFGIVLPKGHKRLREAIARLRVQDSAYAALPELVRRAADKLCRQIAQQARQVKEATDDLVAATKDDESCGRLLTVPGFGPINAAGLSVALETPDAFANARAFATSVRLAPRQWQSAEKQKLLGVGRSHTTNETRRHLVLAGQSLITMVGAPQAAPDRQVPALGLSPEPAQDPQRRRRRRRRQARPYRLGPHGQGRGLPAEARHRMRSASGTAAA

SEQ ID NO: 242223 - protein, 309 aa, unidentified
MKQEIVYVGIDVAKAHLDVAWEKQFHRLPNDVAGTKQLLCLLKAIAGQVQVIWEASGGYERSVMQTLQRGGIKASVVQASRMRQFARAIGILAKTDCIDAAVLCAFGKAMQPQVTAPSNPQQERLREMESHRRHLSRLLVAEQNRRAQLTDPTVLALTERLVGQIQKQIERIDLLIKELIEGSPGLSSKAQKLMALTWVGPRTAALLLAQMPELGQLNRREAAALAGLAPFNRDSGKLRGRRTIFGGRRAVRTGLYMAALVATRHNPILAAFYRRLRAAGKPPKLALSATMRKLLLALNTSLKPQPILA

SEQ ID NO: 242224 - protein, 426 aa, unidentified
MKLEEKELERPIRAWIGIDWADEKHDVSLYDVATDKQEVLTIRQSPEALQEWLGQLRSRYEGGSIAVVLEQGRGGLLNALMGCEFLVLYIINPKSLSSFREAFYGSGATSDPVDAQLMRDMVRQNPSRFRAWQPDDVLTRSLRLLTEGRRNLVDRSTALTNQLTALLKGYYPQALQWVGALDTTWACDFLEQWPTLQSLQSRTRRQILRFYEQHPRACLDLNEQLKQIQDAHALTQDEAVLQSSALMVQALVSQLRSLLVSIAEFDRKIATIFRKHPDRPIFESFPGAGAALAPRLTAAFGTDRDRFQAATEMQQLAGIAPVTEKSGKKTFVHWRYACPKFMRQTFQEFADHSRRWCQWAKAHYELLRKRGKSHNAAVRALAYKWIRILFRCWKERQPYQDSVYTKSLFKHGSPLASLLVKSVENP

SEQ ID NO: 242225 - protein, 411 aa, unidentified
MRRVIGMDIHRTFAEVVFWEDGRLRPAGRVDMTRSGLEGFGRTLAKTDEVVVEATGNAMAVVRVLGPYVARVIVANPLQVKAIAHAQVKTDKIDAGVLASLRAAGFLPEVWVPDADTERLRRLVARRNQVVRHRTRVKNETHAILQAHLVPPCPHADLFGRLGRIWLGQQMLPDDERGAIERHLRELDRLGEDLGVLDKDIAQVAIDDPAVKRLLTITGVNLIVAAGLVAAIGDVRRFDNPEKFVSYVGLNPRVRQSGLGLAQHGRISKHGRSHARAMLVEAAWAASKAPGPLRAFFLRIRARRGHQVAAVAVARKLAVLCWHLLTKETDYLWQRPALVANKVRAMELQAGQPAKKGSRRGSAYAYNVKELRDREMEVARQAEHAYEQFVGHWQPRGPGKRRTGAANEERR

SEQ ID NO: 242226 - protein, 377 aa, unidentified
MSKVRFVGLDVHAETIAVAVAEPGGEVRSLGVIPNRLESIRKLIAKLGPVKDLKVCYEAGPTGYVLYWQLTRLGVACEVIAPSLVPKKAGDRVKTDRRDAEKLARCYRAGELTAVWVPDAAHEALRDLVRAREAAKRDQLKARHRLGKFLLRHGKRPEGLKAWTKKYLEWIETHVRFDQPALEVTLEDYLNEVKHVAERIIRLEKAIDEAVQKAPQEIRAVIEALQALRGVAQTTAATIVSELGSLSRFENPRLLMGYSGLVAREHSSGNRIQRGAITKTGNAHLRRVMVEAAWAYQHRPNVTGFLLRRQKSLAISDEVKQIAWKAQYRLNKRYKAMSARGKNKNQIVTALGRELLGFVWAIATKVEREHGDVAMAA

SEQ ID NO: 242227 - protein, 345 aa, unidentified
MSYYAGLDVSLEDTAICIVDETGAIVRELRAPSDPGSLISAFDAVGLPMERIGLEACSQSAWLHQGLTRAGLPALCIETRHAKGAMSAMPNKTDRNDARGLAQIIRTGWYRQVHVKSAPSRMARSLLVARRTVLCKLRDMENAVRAVLRESGLKVGSPGRKRFSARVRELAEADPTLTDITEPLLAIIATMYRELERLTRRVLESVRVEPICRQLMTIPGVGPLTALAFRATVDQPERFRRSRDVGAHLGLTPRRYQSGETDIQGRVSRCGDELARTLLYEAAHTLLTRCKKWSALKAWGMNIAKRRGMAKARVAVARKLAVIMHRMWSDQSEFRWGKAPASLAA

SEQ ID NO: 242228 - protein, 344 aa, unidentified
MWIIGCDYHPRFQQIAFVDTETGECGERRLEHSGGAEQFYRALAGQDQVVRVGMEASGHSRWFERLLAELRCELWIGDPAKIRAAATRKQKTDKRDAEHLLQLLLSGQFETKMRIWIPSAEQRDVRQLVLHRHRLVQMRTRVKNQLRAVALNEGMERKPGLWSKKGQEQFRALELPAWTARRRQDNLDLLAELERRTDPLDQAVEQEAARRPEVRRLQSHPGIGPVTALAFVLTIGDPTRFRCGKQVASYLGLIPAEDSSGGRQRLGHISKQGNALLRGLLVEAAHVAAQHEPELGRCYRRLAMKKNRAIAAVAVARKLAVRLWWMWSREVGYEYFAGSRSHAG

SEQ ID NO: 242229 - protein, 347 aa, unidentified
MVTLGSDSHKRTHTFVAVDENGKQLDYQTLPATTPGHLEALRWASQWPDRRWALENCRHLSRRLESDLLHAGEAVVLVQARLMATVRVTGRQLGKSDPIDALAVARAALREPNLPVARLEGKSREVKLLLDHREDLVGERTRICCRLHWNLHEIEPGMELSDSALIRWCVMDRVERVARQHSCLLAEIVLEQLESIRRLTRRIKALELQLRALMRQLTPNLLELQGCGTLCAAKIFAESADIRRFETRAAFALNNGTAPIPVWSGNNVRHRLNRGGNRQLNAAIYRIAIIQARDEGLGRTYMAKRLALGNTRREALRSLKRRLSDEVFRRLWQDLPLAVNVRFWAAA

SEQ ID NO: 242230 - protein, 407 aa, unidentified
MFCGIDWGSERHAVCVLDDAGLKATAFQITHSAEGFDQLIARLGRLSDPARLAVAIERPDGRLVDRLLEAGHPVVPVQPNQLKAWRDAEILSGAKNDPGDAALLAEYLRLRQHRLRILQPFSAQTRALRAVVRTRDDLVDQRVAASNQLAACLDAFWPGAKQVFADIQSPIALDFLTRYPTPESAAHLGERRMAAFLIKHGYCGRRPPSELLHRLRTAPAGLAGTVEVEARRDAVLALVRVLRALNQAIKDLDRSVIAHLGEHPDAEIFTSLPRSGRINAAQVLAEWGDCRPAYDGPDAVACLAGATPVTRQSGKHRSVSFRWACNKRFRQAITTFADNSRHASPWAAKLYADAIARGCDHPHAIRVLARAWIRVIWRCWIDQVPYDPANHGAARKLTEMAASAPQG

SEQ ID NO: 242231 - protein, 366 aa, unidentified
MKKISTVAKNRNEIFKQPQLTIGVDLGDRISHYCILDETGNVILEQSVPTTPKGMQQVFSKISRCRIALETGTHSPWVSRLLTQLGHDAIVAHARNVQLITESSRKDDRLDARTLARLARIDPELLGPVRHRSAKAQIHLTVIRARATLVSARTALVNAARGLTKSYGERLPKCGTEQMNREIAKGLSPELRDVLEPLLGEIESLKERIAEYDRRIEQIAKEVYPEVALLKQVKGVGTLIALTYVLTLDDPHRFRRSRDAGCFLGLRPGRRNSGMSEPQMHISKEGDAYLRTLMVQGAHYILGPFGQDSDLRRWGLKLAERGGKNAKKRAVVAVARKLAVLLHKLWVSGEVYEPLRNNHQVVSAVA

SEQ ID NO: 242232 - protein, 359 aa, unidentified
MTSLTKVKTFFNTVNLTGDDDLFVGIDVHKKSYHVALFLNNAPAVDFVMPARKEQLTDKLKTTVPALKCVVYETGPTGYGLARHLEKQNMPVSVVATSKIPRNSAIDDKTDKLDSKKLSQYAAKGLLSPVKIPTLKQEADRQLFRMRHRQARNLARVKTQIKSFLLMHDIDEPAGLNHWTINSIDQLRILPLQQTLRLSLDELLNDLDYYNLRVKEMNKTLVQHLNKGQLALRIELLKTHPGVGTVVACQFATELFHYREFTNTRYLFKYLGLSPMIRQSGERSKRGSINKVSNSRLRTNLIQAAWQWIRLDINARKTYLRILNNCGSIKQKAITAMARKLSGHLWTMLMKNQPYDPGK

SEQ ID NO: 242233 - protein, 347 aa, unidentified
MTIVEAPPGITGGVDTHLDTHVAAALDPLGRLVGTESFDADAAGYKALLSWLEGFGQVTKIGVEGTGSYGTGLARFLRRKGVEVVEVDRQNRQARRSQGKSDPLDAVEAARAAISGRASGKAKTKDGAVEAIRVLVVAKRSARQARVKAIVQMRHLGFTAPDQLHSRLKGLTVTALVAESARFHPTRSPDPVTAATKASLSSLAHRIQSLEAEIAELDEKLEPLLIATAPDLLALFGVGPDTAAALLMAAGDNPERLRSEAAWAHLCGVSPIPAGSGKTSGHLRHHQGGDRQANSALWRIVMVRIAHDPKTTHYFERRVKEGRTKRDVIRILKRYVAREVYRNLPRG

SEQ ID NO: 242234 - protein, 349 aa, unidentified
MNFYNRSHQFYCGIDLHARLLAICVLDQAGNVVCQTQIPADKQLLLDTLAPFRKDVVVCVECLFAWYWVGDLCKENGIPFVLGHALYMRAIHGGKTKDDDIDAEKIGRLLRGGNIPTAYVYPKGMRETRDLLRRRNHLVRKRAQLIAHIQITNAQYNLPPFPKKLIYAHNRAEMQVAQRFPEGPVRKSIEVNLAVVDALDVQLADLELYLERTVKVENPQSYHVLQTIPGVGKILALILLYEIHTIRRFATAGDFLSYARLVRCVHKSAGKTLGHGGKKIGNAHLKWAFSEAVCLLVRCCPTVKIWQQRHEKKHGKKKTLGILAARLGRAVYHMLRRGQAFDLQKFLGQ

SEQ ID NO: 242235 - protein, 327 aa, unidentified
MEREYIGIDLHKAFFHVCAVTTTGERHWEQRWPTTDQGIAGLLTRCGTQSRIAVEASSPTWAFVDRIVDHVGAVHVVDTRKTRIKAGYAAKTDRLDAQRLADALRRDSVVGIYYPPAAIRDLRELGRYRCHLARLQASLKQRIHALLLRQGVAAPRALFTQRGTTWLDACVLAGWAGHELRGLRHVLADVRKQLVPVLTAMRTIATTDAIAAALDQRPGFGPVFSVTLRAEVGTMSRFPDGSHLASYAGLVPRVERSGGRRWSGRITKTGSPWLRWVLIEAAIHQFRRPDDFGRWARRLALRIGGLKARVAVARALCSEVFDAWPRA

SEQ ID NO: 242236 - protein, 329 aa, unidentified
MSALVCGLDVHKDSTYATILDSSGKIVSQMRMSNERVLSYLSRFSVGKVAMESSNQVAALYRKLESNGYDVVLSHPRKTRYIAEAKIKSDRVDSRAIAELARLDALTLAYMPEKEISVLREQVRRRAFLVRQRVKLRVKIKSILTYEGVRWPSEGGLFTRRGVEWLHGLSVESIESYLRIMRIFDDEIRLLNRQLRDLAENDEDVRLLMTVPGIGYYSALLVKSEIGDINRFPFGDRLCSYAGLVPSTHASGNTVRHGGITKEGSKWLRWVMVEAAQTHVHKYDTTVTRAYHRIAERRGRRVAVVAVAHKLLMCCWAVLKYREPYHDQA

SEQ ID NO: 242237 - protein, 353 aa, unidentified
MSSDKYIALDVHQATTVTSVLNAAGREVDQSIIATKSQPIRSYLEGFSGPLHVTLEEGTYAAWLYDLLEGRVAELVVCDPRHNALLKEGSKTDRNDARKLADLLRAGMLRPVYHGRHSLRPLQELVHSYEALVEDTTRAMNRIKALYRRRGIDCAGRGVYTQKQRASWLEKLPAGASRLRGELLHEQLDHTRSLRRKARLALLKESRKHLISARLREVPGLGPLRVARLIAWIQTPHRFRTRRQFWTYCGLGLVIFDSSEYRLIQGRVVRRAQPVKIRGLNRNHQPRLKEIFKSAALSAIRQPGPFKEYYDARVSQGRDPALLRLSVARKLAALVLSLWKKGGRYRAQDVKQA

SEQ ID NO: 242238 - protein, 399 aa, unidentified
MLAVGIDVSKSKSAAAILNPDGTVHTKPFEFHHNQPEMDALIRYIKDQNQSVTILMENTGHYHYPVLKAFEKADLPVCLINAYQMKKYGDMELRKAKTDKKDALRIARYALEKGYSLIPHTSMDQKYEDLRFLARQYDQRMGTLTTNKVFLINLLDETMPGITKLLSLATRDPETSLTMLFIKRFKSYDRIKKMGKTRFLDSYDKLARKSRNRRAYGYGLAIYELAVNSITTRGENEFTLAAQDQCVDLVSESQKAADAIIRQMQTLAETLPEYAVLRSMAGVGERLGPLILAEIGDIRRFHSGKALNAYAGNDAPPYQSGTFESHNRHISKRGNAALRKYCFEVMQAIKLTRPQDDPVYLFLLKKEQEGKPYNVAKMAGVNKFLRIYYARAMEALQRQ

SEQ ID NO: 242239 - protein, 391 aa, unidentified
MVCVGIDVAKDKHDCCILDSDGTIRADCITIPNNMDGFKQLLQTIRDCTKKSDKIKVGLEATGHYSYNILGFLLDNGLPTYVINPLHTNLYRKSLSLRKTKTDRVDARTIATMLLSDVDLKSYTDIAYHNEELKSLTRYRFDKVQERAKLKQSVSRLATILFPELEGLVSSIHGTSIYALLGEYPGAKQISEVHLTKLTNLLTTASKGRYRKEKAIQIREAARASIGSVMPAKSLELKHTIKLIQELASEIDEIEDSIQKIIDELNPPILSIPGMGVNSAAVILAEIGDFSNFSSPDKILAYAGCSPSTYQSGKLTNCYAHMEKRGSRYLRYALYNATKYVCHWNPVFAEYLAKKRAEGKHYNVALSHATKKLVRLIYALQKSGKAYLVAA

SEQ ID NO: 242240 - protein, 397 aa, unidentified
MIAVGIDVSKSKSTVAILNGDGSIRAKPFDVHHVADELQALVDYIKRTSEPPTILMEPTSHYHYPLLKAFTEAELPVCLINPYQMKKYGDTELRKAKTDKRDSLRIAQYALEKSYSLIPYTPQDQKYEDLRFLSRQYSQRISTLTVAKVQLLSLLDETMPGITTILPLKSRDPDNCVLLRFIKRFKSFDVIRKMGKTRFLDSYQVLVKKTKDRFAGSKGLAIYELVLNSVTTRGENPLSAMTQDQCVDLVSTSQKAADEINLQMRIIAETMPEYKVLRSMAGVGNRLGPIILGEIGDIRRFHSGKALNAYAGNDAPPYQSGQFESRNRHISKRGNPALRKACFEVMQALKLTKPQDDPVYLFLLKKEQEGKPYNVAKMAAVNKFLRIYYARAMELYK

SEQ ID NO: 242241 - protein, 410 aa, unidentified
MQALVERGCGLDVHQATVVACLLIVRKDGKVQKQMRTFGTTTQELLSLREWLLSEGCTHMAMESTGVYWKPVYTILEGALEIVVANAQHVKKVPGRKTDVKDAEWIADLLCHGLLRSSFVPPKPIRELRDLTRYRRKLVESQAAERNRLLKLLETANIKLASVATDVFGMSGRLMLRALVEGKATPQEMAELAKGKLRKKIPELEPALEGKVEEHHRFLLRLQLDRLEAAEKDLAVLEQRIQEKLKPYEAQLTLLDEIPGVDWTLAAGFIAEMGVDMSVFGSVSQLASWAGVCPGNNESAGKRKSSRIPKGNVYLKTALVEAANSAAKAKGTYLRDKFYRLKARRGYKRAAVAVAHKILVAIYYMLSHRVCYNELGDAYLDKRNKHQLTRNLIHRLERLGYSVTLEQKAA

SEQ ID NO: 242242 - protein, 350 aa, unidentified
MNDTITIGMDLGDRNHLVVVLDVDGEQVHCETVGNTKVAIKRFFQPYEGATVAIEAGTHSPWISRLLEELGCQVYVGNPHKLRVIWDSTDKSDERDARMLAMIARLEPRLLWPIRHRNANAHNDLEVIKARDMLVQSRTKLINHVRSAVKGCGERLPKCSAASFAKRVVDLLPAALGPALMPLMEMIAQMSERIHALDKRIDTLAAERYPETRWLNQVPGVGPVTSLSYVLTIEDPERFAKSRMVGAYLGLTPRRDQSGAIDKQLRITKAGNVYLRKLLVSCAQYIIGPLGPDSDLKRYGLAIAARGGKNARKRAVVAVARKLSVLLHRLWVSEQAYVPLHARQAVKKAA

SEQ ID NO: 242243 - protein, 484 aa, unidentified
MKSKTAKQSEKPKRLTGRRRKELARRIWSNQPGLDVVHRDAAGIDIGSREHYVAVGPDRDAEAVRVFGCFTTDLRRMAEWLKQCGVKSVVMQSTGVYWIPVYDVLEQYGFEVWLVNAQDTKNLPGRKSDVQESQWLLKLHTYGLLRRSFRPTPEIRGLRTCWRERGEYVEQAGSCIQRMQKALTEMNVQLATVLSDLSGVTGMSIVRSIVAGERDGKRLAEFRDARVKASKETIAKSLEGTWLPEQLAVLQRQLGDWDHMQRQIAACDADLQAMLQQMPSAEVQPQPALARAGAPVGKRKRTGRKNGKSSKNEPNFNLTAELQRVTGVDLSRIDGIKAMTIMTVISEAGLDMSKWATEDHYVSWMGLSPRNDVSGGKVLKRKTRKVKSRLATALRTSATTLRESDSYLGAQYRRLRSRLGPPKAITAMAAKQARLVYRMLKYGQEYVDKGAVLYEQKYREQQIRFLEKKAAQNGFVLVPLHKHA

SEQ ID NO: 242244 - protein, 408 aa, unidentified
MLAHDVDFVIGGDTHKDTHALAICDATGACTHQQVVSADDAGYREALAMAKDRAPGRRLWAIEGTGTYGKGLTDHLLHDGERVVEVERPRRTRRKGGAKSDPIDALRAARETLSVPHLATPRQGDDREALRLLLATRGQAVSGASAATLQVKAFIVSAPEQLRAVLRAQTTREQLRRCEQLRPHHAQGVSCRVTGLCLRSAARRATYLRDEARALEAEIRAIVTRVAPELLSVVGVGPIVAAQLLVSFSHRERFRSEAAFASLAGVAPPLPASSGTIVRHRLSRGGDRQLNRALGVIVRARLARCLKTRAYVARRRAEGKSSREIVRCLKRFVARQLFRLLTRIVNAPEARPTDQVPTARLTRPACTARARAVTDEIDRAVPTAMRSAADILVRVLSVAGPEAPGAPA

SEQ ID NO: 242245 - protein, 408 aa, unidentified
MELTAMFKRVIALDVHQAKITACAIVEHEDGRQEMTKLDFGAFKRDRCALAQWALQIRPEVVVMESTGVYWKSPFATLEAVGIIAWVVNARHVKAVPGRKTDMADAQWLATLARAGLLRGSFIPPVDFRQLRLVARQRQKLVGMLSAEKNRLHKVLVDAGIRINVLVSDIHGQSARAMIKALIKGQPMHEILDLKGRLGASREELFEALSTEQFSARHAFVADEIMQHIEYIEQRVARMDGYLLSGLAAWQPQLNLLQTIPGVDQIGAAMLLVEIGADMSAFGSAERLATRVGICPGNTASAGKRKAGRIRKGNAWVRRLLCEFAQAAARTRCALKAKFDSLAIRKGRKKSVIAVAHKMLRTIYAMLSSGTHYEDRSVDYEAMSVARNAPRWIKMLKKHGFMGQTAAA

SEQ ID NO: 242246 - protein, 347 aa, unidentified
MNHYAGIDVSLEFSSVCVVEGSGKIVREGKVASEPEALIAWFGSLGLSLDRIGLEAGPLSQWLYAKLKQAGFAVELLETRHVRDAFKAMPVKSDRNDARGIAQLLRLGWFRPVHCKSMEAQEVRAVLTARKLVQRKLRDVENNLRGILRGFGLKVGKTTAITFAGRIRELVVGQTSLERITDAVLAVRAVLRRELSAFDRQVRSMARADTKARLLMSTPAVGPIVALTYGSAIDDPARFTSSKQAGPHFGLTPKKYQSGETDWSGRISKIGDASVREALYESAHLILTRPIKGCPELKSWAMRIAKCAGMSKAKVALARKLAVILHRMLADNVPFNPSAKAAKLATI

SEQ ID NO: 242247 - protein, 413 aa, unidentified
MKDRTITAVGIDVSKGKSTIAVRRPGGEVVLTPFQVEHDAAGLSALVKTLRSIGGDIRVVMEHTGMYWRPIALALKEAGFFVSVVNAMLIHDFSDNSLRKVKTDKADSMKIANYALSFWAELRDYSPEDETRQMLKMQNRLYLRTQKSSVTLRNGLISLLDQAFPGVNTLFDTQPKRSNGHFKWVDFVRRFWHRDCVAGVSLAAFSDAYHKWCTKSGYRFSQSDAEKLHAAARNSVATFPKSDSAKLLVAQAVDSLNAVYDALYVLRGEMLRLASLLPEFDVVMAMQGAGEVTGPQLMAEIGDVRRFTHKGALVAFAGMDAPPFQSGTFDSKSRRISKRGSPHLRKTLFMVVSTILQHSDPDNPIFQFMDKKRAEGKHFYVYTVAGAAKFLRIYYARVKAHLMALDAGTSTAA

SEQ ID NO: 242248 - protein, 407 aa, unidentified
MKLFVGIDVSMKDFKARMFDAEGEEIAKRIRCKNDDPGAESFVKYLVEICGANEVDSLRIGMESTSVYGWHLQMRLAGEPLLASFHPQVYVFNPKVIANFRKQYVDIPKDDWFDCLVIADRLRFGRLPESCQVDFRYLPLQRLTRFRYHLIQTITREKNYFLTNLFLKFNTICQDKVLSDIFGATSEAILTEFLSPEEIAARPLDELIDFLMEKGKSHFSNPEATAKALKHAAACAYRLHGSLLEPVNLILATSLQTIRTLEQQVKSIDRAIEKELSHFPNTLQSIPGMGPVCTAGIIAEIGDIHRFDNEKAVAKFAGLTWRKHQSGEFEADDTPLTKTGNVYLRYYFVMAADSVRKWDPRFAEFYARKFKESTTHHYRRALVLTARKLVRVVDALLRSNQLYVPQE

SEQ ID NO: 242249 - protein, 358 aa, unidentified
MGNDITAFVGLDVHKSSIAVAVADPGRDAPRFVGTTGPELAELLKALAHVGQAQHTLIAYEAGPCGYGLARELGKRGYRCEVIAVAKMPRKPGERVKTDRRDALTLARYLRGAELTSVVIPDARDEAIRDLSRAREDAIRARLKARQQLKAMLLRYGYRYTGKCSWTAAHERYLARVRFDHSAQDIAYAEYRSAVREAHARSERITAALREQVATWRWQSVVSALMTLRGVEFIAAVTLVAELGDLTRFAHPKQLMSYLGLVPSEYSTGESRVQGKITKTGNGHARRILIESAWTYRFPARMGPQLVRDIAWRAQLRLCSRFRRLQARGLHHNKACTAIAHELAGFIWDIARQVPAAP

SEQ ID NO: 242250 - protein, 309 aa, unidentified
MSEFIGIDVSKASLDVAVHGSGARLQAENSEHGIEKLIAELKAFNPELIVLESSGGYERLCVGMLAQAGLPVAVVNARQVRAFAVASGVLAKSDAVDARVLAHFGAAVRPAVRALPDAQQQALDELMGRRRQLMGMLVMEKNRLGQAREPRVRRDIQSLIRVLEKRVDACNGDLQRLIRESPVWRAQDDLLRSFNGIGKANAFTILAELPELGTLNRKKIAALVGVAPIARDSGRHRGRRSIAGGRAQVRSMLYMAAVTAARANPVIRALYQRLRAAGKPVKVALVACMRKILTILNAMVRTQTRWQRA

SEQ ID NO: 242251 - protein, 420 aa, unidentified
MARTVEIVYPVCCGMDVHKNFLVACIAVTDEHSHTERRIRRFSTFTGDLRRLSEWLASYNCRDVCMESCGKYWIPVFNVLEKTCNVCLTHPKYVKAIKGKKTDKKDAKWISELFKCDLVRSSFIPPPDIRQLRDLCRYYVKLTGFASGEKNRAQNCLTMCNFKLDDVFTDVFGKSATRVLDALLEHGNGNFELDGLLNGNCKSSPEKIRAALDGELDPTQVEKLNLIRQHINDIDALKGALENLICQLAAKYQPQIDLLLTVPGISTPLTAIRILAEIGADMSVFETAKQLVSWAGLTPQNQESAGKKKTTRIGRAGAYLKPLLVQIALAVGKSDKHPELKNKFLALKKRRGGKKAVIAISRKLLTAIWHMLSKNEAYNADLYRKADRPPVSREFTTAQAVAFLRNKGFFIVDEDTGEVV

SEQ ID NO: 242252 - protein, 347 aa, unidentified
MDVHKEAIVIAVLNGSGKLVMETILETKASSILQFVHGLRGELHVTWEEGTWAAWLYDLLQPQVQHIVVCNPRRNALLKEGSKSDKVDARKLAELLRTGMLRPVYHGENGVRTLRELGRSYQTISKDQTRVMNRIKALYRGWGIPCAGTQVYAPRYREEWLSKIPQTGVRRRAELLYQQLDGLQVLRREVRLDFVAESRKHKAAKLLRQIPCIGPIRAGLLIALMQTPHRFRSKRQLWTYSGLGVETHDSAQYRYVDGQVQRSKKPQQIRGLNQNHNHAMKEIFKSAATRASCGTGPFRDFYAALLTKGMKPEMARLTLARKIAAITLTLWKKEERFDAEQLKTQAA

SEQ ID NO: 242253 - protein, 387 aa, unidentified
MSPTIAARRPAAVDYERTLILSIEVSNQSWVLAAQVPGLPHTKAKRTVDPEAEALMAAIAGYRSRAAAMGRSIERVIAVYEAGWSGFWLARWLTRHKVEVYVIQPSSVPVDRRMRRAKSDGIDAELLLRTLLAWLRGEPRVCSMVPVPDEADEDARRCIRERTELISERVGLTNRIGAVLATLGVTDYNPLLRNRHHRLAELRTGLGEPLPPNAHAKIVRLLARLELVLAQIAELERERDAVVETEMPDHASKMIQQLISLRGIGVQSATVLVREAFVRRFANGKALGSYAGLTSSPYSSGGIDREQGIGKGGNRRLRTVMVELAWLWTRYQPATAQVCWFRERVGSTGRRVRKIMVVALARKLLIALWRFVIDGVVPEGAVLKPAA

SEQ ID NO: 242254 - protein, 414 aa, unidentified
MSTEKRKVCGIDVHKAFFVATVLDREGKSETRRIQQNTDSLLELRDWIQSENCESVAFESTADYWRSLYLVLEGRVPVTVANAHHIKHVPGRKTDITDSRWIAQLELNGLITPSRIFAGEMYDLRSLTRSRELLVQNRTELKNKIHHLLDSTSIRLSSVLSDLFGKSGTIILKGLIQNKPFEEIIESLPKKMRDSADAVSAALAASIPPFFLVLLQSYLKLVDDLDNEIKLLEERIREALINKSREIQILTSIPGIGFIGASTLIAEFGDVHDFEDADKLTKWNGLTPSVYQSANVTRTGSITKQGSRHIQWILVELGHVAIRFPGRIRTIFERLMPKKGYKKAIVAVARKMLRIVWHLLVHDEVFVDDFPRSKQFKFPKMPKKIQAIGITRIIELLSTASEVIFKDRNQEIFR

SEQ ID NO: 242255 - protein, 348 aa, unidentified
MPNYNQSHQFYAGIDLHARSMFVHILSAKGKSVFERDLPAEPDSFLDAVKPFRKNLVVGCECMFAWYWLADLCEDKRIPFVLGHALAMKHIHGGKSKSDKIDAGKLANMLRGGMFPLAYVYPRGKRQTRDLLRRRSFFVRQRAQLITHIVNTNSQFNLPPFSKKLSYAANRSAEIADRFADPSTRLMIHTDLNLIDAYDSQIAELERHLLKSAKVDDPVTFGFLRTIPGIGPILGLILLYEIDRIERFPEAGNFLSYSRLVRCAHASAGKVKGFGGKKIGNAHLKWAFSEAACLMLRTCIPVKAWMQRQESKRGKRKALSVLEAKIGRTVFHLWRKQQAFDVKKFLHV

SEQ ID NO: 242256 - protein, 387 aa, unidentified
MKNEKTAKLQIANLNAAGIDVRAKSYMVAIDQEKLNVREFGVYTKDHERLIHHLKCHGIKTVALESTGSYWQTLFASLQAAGLDVLLVNGSQTKNVKGRKTDVIDCMWIQKLHALGLLSGSFLLSNVLQELRTYYFHRQHLIEQTVMYANKMEKSLRLMNIRLDIVLRDVTGKSGLNIIEAILSGDRDPKKLASLADVRVKKSQEEIANALQGSWRQELLFELQASLQFYKLYEVALIECDNLIEMKLTEYVPKENVFTGNDIQGKVNYKKTRKHSPAFNVSKISYDYFGTDLFSIPGVSHTTVLCLLTNIGNDIHKFPTGKSFASWLRLIPNNKISGGRIISSRSPSGKNYLAIALRQAANSIGNQKEHPLTPFFKRIAFEKVEYQ

SEQ ID NO: 242257 - protein, 289 aa, unidentified
MPRYIGLDVHKRYVHACEFRPDRPEGQQERHFRFPNTPEAWTALVAELDREAVVALEVTGNAFEIYDTLAPHAGKVLVANAVELKRLGSGRHTDRVDAARLAKMAALGIVPTVWVPPQPLRQVRRLLKTRERLDSQRRALLNQARAALSRHGIAVPRGADPAVLLERMEGVPLPPGERLAVQVTLEAAQVLEAQVEVLTAEIARQVAEVPEVRLLLTVTGVGLLTAATVWAKLGDPGRFRGPKQVARYAGLDPSVDQSGERDRRGRISRHGDRLLRQGACGGGLERGPA

SEQ ID NO: 242258 - protein, 351 aa, unidentified
MSREVKYIGMDVHKEAIVIAVLNDGGKLAMESIIETKASTLLQFIHGLRGELHVTWEEGTWAAWLYDLLKPHVQQVLVCDPRRNALLKEGNKNDKVDARKLADLLRTGMLRPVYHGEHGLRTLRELGRSYQTISKDLNRVMNRVKALYRGWSIACAGTQVYAPRYRQEWLGKLEHAGVRRRAELLYEQLDGLQALRRTLRPELLAESRKHKASKLLRQIPCIGPIRAARLIGLMQTPHRFRSKRQLWTYSGLGIETHDSAQYCYVHGQLQRSKKPQQIRGLNRNHNHEMKEIFKGAATRASCGVGPLRDFYVALLAKGMKPEMARLTLARKIAAIALTLWKKEERFDTPNN

SEQ ID NO: 242259 - protein, 343 aa, unidentified
MKLHVLGIDLGKTVFHLVGLDSTGKVVIRKRCSRRQLLAFTANLKVQLIGMESCSGSHFLGRALRDQGHEVRLMPAQYVKPYVQTNKSDYIDAEAIAEAVQRPRMRFVPIKTEEQLDLQAVHRVRERWVMRRTAVVNQIRSLLLERGLTLPKGRRYVEEALPRILEDAELPLSGSFRLLLAQLKLELEQLSARIDQLDVAILQRAKEDEACQRLTTIPGVGPVTATAVIAAVGNGSAFGRGRDLAAWIGMVPGEHSSGGKQTLLGISKRGNSYLRRLFVQGARSVLQQRHRQAPGLSSWLAQLLARKHQNVVIVALANKLVRMAWAVLCKGERYRAPVLAVST

SEQ ID NO: 242260 - protein, 406 aa, unidentified
MQGPVITVDVSKGSCHYQPYVSNGHPMRKPKVLHDTVEGFQSLSDLIDTMKDRYECETIPVIFEATGVYHHCLQKYLDDHQIPYYIISPLMSASYRKTTPNSNKTDDLDCSHIAKAYYGECNLFPYDKPSKSFHNLRELNRYYECELNHLRMRKNTFRKYLDIVYPRLDKCFKGHSSLYDEIPMEVIKQYPHPSLLLKHKEETIVKKIEKKTSHNALFIQNIVHEMYECSMHCYSGADVTDVESMILPELVDDLQSQKERCDEILKQLVSEAQKTPYFTSIVSIVGIGDNLAARIIAELGDMSRFSCRRAITAYAGLNPKIRQSGDMDGIHLAISKKGNKHLRCLMYLAVSCNYRLKKGDVLYEFNQKKRQQSFSPLKPKAATIATAHKLLLIIYALCTKGTVYHS

SEQ ID NO: 242261 - protein, 328 aa, unidentified
MSKQVFYVGVDVGAHEVWGAVAGKRPRRYSHTTKGIRALHRWAKTEAGDARLHLCMEATGVYSRQVAMNLIGQTDTDVSIVNPKCIKSFGEAQMRRAKTDRIDAEVIRCYAESQHPAVWRPEPEGLRRLYALVAQADAIQASLHDWRNRHHAQDYTPDIPAAVRTSQRTIERALQRQLTRVEQAIDQVIAADSSLAQQVMVLQTVPGIARKSAARIAAYGGRWLTERSQKELVAHAGLAPHHHQSGTSVRGRSRIDKRGDRRLRKALYMPALVGIVHNPVLKTFYQRLVDNHKPKMVALIACMKKLLLICRSMLINKNCFNPQYQHLT

SEQ ID NO: 242262 - protein, 317 aa, unidentified
MTNSITLTAGIDTSKAKLDIAVHNRTERWQVANALPGWRSLTAHLAETGVTRVGIEATGGYERGVVAHLRAAGFTVLVLQPIQVRAYARVHLRRAKNDALDAVLIAACAATVDQPRIKPDARLADLAGHLTFVEQIEKDIARFRVRLEHIEEPRLQRMVMADIKRLEVRRSAELLRILRALRVHDDLARRFDLVLSVPGIGERTAIAIVVRMPEIGRISREEAAALAGLAPFDDDSGKYKGQRQIAGGRRRLRRSLFAAALPAVFRWNKALNVLYVRLMANGKEHNAALVACARKLLIYANTVVQRGTPWVDRPAAT

SEQ ID NO: 242263 - protein, 403 aa, unidentified
MNNVAGIDVSKGKSMVSVLRPFGEVVAKPFSVGHTGSELKELADYLKSLDGETRVVMEHTGRYYEPVARFLHDEGVFVSAVNPKLIKDYGNNTLRKVKTDKADSRKIARYGLDNWAELRQHTPMDTIRMQLKTLNRQQSLYTKTKTMMKNNLIALLDQTYPGVNALFDSPVREDGSQKWVDFATAFWHVDCVRNMSLTAFAERYRKWCKRHGYNFSQSKAVEVHAGAQDLIAMLPKDALTKTMVRQAIDALNAVSASLERLKAEMCTLAAQLPEYPVVMAMHGVGDSLGPQLMAELGDVTRFTHRNAITAFAGVDPGADQSGTHEAKSTRVSKSGPPELRRALFLVMDCLLKTQPQDDPVYRFMDKKRAEGKPYLVYMTAGANKFLRIYYGRVKEYLASLEGN

SEQ ID NO: 242264 - protein, 348 aa, unidentified
MPTMTETARCVTAGVDTHRDVHVVAVLDERGAQLGCEPFAADPAGYRKALAWVRSFGPVDRIGVEGTGSYGAGLTRYLHNERVVVVEVSCPDRQRRRSHGKSDPVDALSAARAAQSGEASAQPKSRTGNVEAIRALRIPRRTAANSRIDAINQMRALLVTGPEQLRESFRDTTVWQMVTTAARLRPGDPTTVAGATKFALRELARRIQELEEEIDRLDAIIGPLVRATAPTLVARHGLGPQTAGALLVAAGDNPERLHKESAFAHMCGSAPIDASSGVIVHKRLNRGGDRSANEALWRIVMVRMVSDPRTRHYVERRTKEGKSKREIIRCLKRYVARELYPYLVEARS

SEQ ID NO: 242265 - protein, 411 aa, unidentified
MELFVGVDWAEEHHDVCVLDADGRMQVRGRVSNDLAGIAKLHDLVASAVPDDDDDVVDDAVVTVGIETDRGLLVRALVAAGYRVLAVNPLSVDRYRDRARVSGAKSDPGDARVLADMVRTDAHQHRPVAADSDLAEAIKLVARSHQSAIWSRRRLANQVRSALREYYPAALDAFDDLTHGDAVEVLAIASTPDAGRGLSRSKIAAALRRGGRQLNIDTRAAKIQAALRTEHLTQPVTVTDAYGAIVASLTKVIAAHNRQIDELETVLSDHFGQHPDAAILRSLPGLGVVTGARVLGEFGDDPTRYDGAKARRNYAGTSPLTVASGTRKIVRARHIRNKRLADALHWWAFNAITRSPGARALYDRRRAAGDTHSGALRVVANRLVAILHGCLRTRTPYDETTAWAHRQDLAA

SEQ ID NO: 242266 - protein, 360 aa, unidentified
MKIQRTSVGLDVHARSVVGCALDGDTGEVFQRRLTPDHGEIVAWLGDLPGPVAVTYEAGPTGFGLARALTTAGISCEVAAPSKLIRPAGDRVKTDARDAAHLARLLHLGQITEVTIPTASQEAARDLVRAREDCRGDLMTARHRVSKLLLRQGIVYSGGNAWTGRHELWLRAQRFDNPALQLSYDAGFDAMLACLDRRKRLDDAITTLAADSEFTPVVHRLGCIRGVATLTAFGLAVEIGDWHRLSGRSIGAYVGLVPSEYSSGESRSQGGVTKTGNGHVRRLLVEAAWHHRTQYRPGVALRRRWDLACPAARDRGQAANRRLHTRWAGFDTRKKRPVIANVAVARELAGWCWSLAVMPD

SEQ ID NO: 242267 - protein, 444 aa, unidentified
MVRFIGCDVHKRTAVFTLLLEDGTLFATYTVPVTREALTAFAERQLVGEDRLAMEATTNTWAVAGVLRPFVKEVVIGNPLRVRAIAEAKIKTDKVDSRVLAELLRCDYLPKVWQPDPETQRLRRLTQRRAALVSDRTRLKNRLHSILHHTLVPLPEGDLFSKKGLAWLRQVPLAQEEALARDSDLRLLEQTELEIAELDERLVREAWQDEKVRLVMSIPGIDYTVAQTCLAAIGDVSRFANAKKLAAYLGLNPSTRQSGEHCYHGKITKQGNAHARWLLVQAAQHLGQYRGPLGQTMRKMIKRKNRSVAVVACARKLAVLLWHVLTSGEPFRYAPARSLETKYSRLRVRATGQRRRGGVAKGTTRSAQYGHGRTRVVPSLPQVLAQNGLPAVAPLSKGERVMLERKRLDEFYRELQTPSRIQTNTRTTQVEEREENVKSELTQS

SEQ ID NO: 242268 - protein, 363 aa, unidentified
MFTERTSVGLDVHARSVTAAAIDSVTGDVHRARLTPSYEHIRSWIADLPGPVAVAYEAGPTGFGLYRALSDAGVRCAVAAPSKLQKPAGDRVKTDARDAMHLAELLRLDEVTAVSVPSVEQEAARDLVRAREDCRGDLMRARHRLSKLLLRHGIVYYGGAAWTGAHDQWLRREAAPQLTAPATATAFDADYDHVLTMVARRDRLDKTIEDMAADSEFTPIVHRVSCLRGVSTLTGFALAVEIGDWNRFTGNSIGSFVGLVPSEYSSGKSRVQGSITKTGNTHVRRLLVEAAWHHRARYHVGAVMRGRWDLAPAAARARGDEGNRRLHQRWVRFLERRKRPVVANVAIARELAGWCWSLAVMDC

SEQ ID NO: 242269 - protein, 391 aa, unidentified
MEVMVETCCGVDVHQKSIVCCILDGPLDTNTPKKQHRTFGTTTKKLREALAWIQSQNVTHVFFESTGQYWIPIFNIFYDSNLTLILANPQHIKNLPGKKTDMNDAEWIAQLGRCGLIDPSYIPCEEVQQLRLLTRRRKAYTERITQCKNEIHNILQRANIKLTSYLSDIYGITGITLLEMFIDGEVITEQTILPKIHGKVKATAAELVEAMDGKLSFEDRFLLGQSLEHYRHSVNQVEEITVVIKQYVLERFEREYNLLIELPGVSAIVACVILSEIGPNVEAFKSQGNLASWAGVCPGSYESAGIKKSSHTTQGNKYLKSILFQAGGTAGRSKDEAFHNLYARISGRSSKMKAIIACAHKMIRVIYKILSTGEHYDAKKALGLRQQARAN

SEQ ID NO: 242270 - protein, 328 aa, unidentified
MQKNKEYVGVDVSKESLDMVVYSTGETRSFGNDDAGIAKATTWLKQVNSAIIVMEATGGMEVSLYIALQEANLPVAVINPRQIRDFAKSMGILAKTDKVDAKVLARYAATIQPEARPLPDEEARQVNTLVTRRCQLVEMITAESNRATIIRDKTMKQRIHAHIDWLKQELAGIDKDISQMIKENPVWHAKDELLQSVPGVGPVLSATLIAELSELGILNRKKIAALVGVAPFNRDSGKHRGERSIWGGRCRVRQPLYMATLSAVRFNPTIRIFYERLLANGKEKKVALTACMHKLLIILNVMLKHNSYWSCNYAIFNNTCIPDAKTVA

SEQ ID NO: 242271 - protein, 337 aa, unidentified
MTIIRIGLDTSKHVFQVHGVDDSEQPVLRRRLGRSEVAKFFAKLPPSWIGLEACGAAHHWARLLRGLGHAVVLLPPQYIKPYVKRGKNDAIDAAAICEAMSRPSMRFVPIKSAPQQAGLMLLRTRDLLVKQRTMLLNAIRGHAAEFGVIAAKGPVRVAELLQQAHAEAAGVPTLALEMLALLAGQLDTLEAGLKTLEARLMAWHKADPVSQCLATQPGIGPIGAVSFALKVPDPKGFRSARHFAAWLGLTPKEHATGGRRRPGRISRQGDQTLRRLLVLGATARIRVAKAGRASPWLINLLARRPRKLVAVALANKMARVLWAMMVSGQTYCHPQQA

SEQ ID NO: 242272 - protein, 363 aa, unidentified
MLYVGIDIAKNKHDLACIDETGEIIIINYRFANSYQGFHQLKLKLKQLSPITQDVQIALESTGHYSYNIIAFLRELGYTVFAYNPLIIKEFAKSQSLRKTKTDRKDALLIARKLRSDITPEYYQTDKLMEDLKELTRYQNRLIQSRSKCKNLYIRLLDIIFPELHGIVSNLHNQFIYDLLTNYPSPQKLARAHFSSLLKIKRLTADKAHQIQEAAKQTIGNASPVLSLELVQLIETIKHYDKQINQLQKEMNRLMTELESPITSIPGIGNRLGAIILAEIKTIHNFKNPNQLQAFAGLDPAIYQSGQMDNTGHMVKRGSSYLRYALIQAAKLISIYSPHFKAYLRLKISQGKHYNVAVTHVAK

SEQ ID NO: 242273 - protein, 348 aa, unidentified
MVHFVGLDVSVKTTSVCVVDDAGKVILEQRVPTEPADIIAVLTSLGVSFGRIGIEAGPLSQWLVNAFTVANLPVICVETRHMKALLTAQQISKTDRSDARGIAQMMRVGLFKPVHVKTLVAQEQRMLLTSRKLLQRKLLDVESDLRGTLRNFGLKVGVVGGSRYEARVRELVEGFPRLTAIVEPLLSVRRVMRQQFAILHKMLLDTVRDDLVCRRLMTAPGVGAVVALTYRATVDQPQSFVHSRAVGAHVGLTPKRYQSGEIDYDGGVSKCGDALLRTMLYEAAHSLLTHSRQWSWLKAWGVRVAQRRGMRRAIVAVARRLAVVLHRMRVDGSEFRWRKDSAAVPAVA

SEQ ID NO: 242274 - protein, 347 aa, unidentified
MEYIGFDYHKQHSFATGIDTETGLIRSTIVPNTPEALDSFIRDGVTTHAVLESSRTCMVLYDLLKERVSKVVLAHPLRVKAIASARIKTDKIDSRILAELLESDLIPESHARNEENRMIQKVLRQRVFFVSTRTRVKNRIHWIVDSQPYRIRKTVEGLSDLFGKSGMEWLYSCKEFSESDRILMNQLLLLFETLTEAIVASNKLIDEISSKDKDAQILITMPGIGKFLSVLISTEIDGINRFPSADKLASYTGLVPSTYASGGIIRHGRITKQGNKWLRWAFTEATQSAKRHNAQLNDFFFQRAKRHGKAKASVALARRIVCIVYSMLRDKRPFTVYKEPNYIKKLT

SEQ ID NO: 242275 - protein, 326 aa, unidentified
MQGKDVSEQETKGESSVGIDVCEAWLDIHILPAEQAFRVPNSHQGHRTLKRRLERYDLGLIVIEATGKWHRQLHRTLHAGGYEVRVVNPLRARLFAESMGLLGKTDRLDARMLAVFADKLGNAGRPPAPELIEALQELVQARVSAVEEQTALANQLKSAETVFLRRQLGRRLKRIAADIQAIETELRRRIKADEALMRRYAILLSIPSFGPVVAMTLVARLPELGSCDDKQIAALCGLAPWPDDSGPREGARHIRGGRHPVRIVLYLAALSATRCNRDMKAFFRRLTAGGKQSKLALIAVARKLVLLANTLIAADRLWLPEPPKYA

SEQ ID NO: 242276 - protein, 421 aa, unidentified
MLTESHDEEQIIARVAALDIGKAEVLCCVRVPGANARKRRQEVSTHSTMTRSLTELANHLVELGVQRVVMEATSDYWRPVFYLFEAHGLQPWLVNARDVKHLPGRPKTDVLDAVWLCKVAERQMLRPSFVPPKPIRQLRDLTRYRIDQVGARTAEKNRVEKLLEDACIKLSVVAADIFGVSGRAMMAALIAGERDPHVLAQLARARMRTKIGLLEEAFNGHFDEHHAFLLTRMLGRIDAINTDIAALDAQIEAQLAPFAAAAARLDEIPGVGPVAAAIILAEVGVDMSRFPTAGHLCSWAKFSPGINSSAGKSKGNGSSGHGNRYLARALGEAAVVAARTDSFLGERYRRIAKRRGKKRAIVAVGRSILVIIWHLLSDEQAVFTDLGADHFTRHVNSETKKRNHIRQLEALGYTVTLNPAA

SEQ ID NO: 242277 - protein, 328 aa, unidentified
MAQITPKVGIDCSEGRLDVHIYPLEIAFSVANDPDGWADLDRRLKEAQADIVGVESSGGCERDLSRFLMAHGYSVRQVSPYRVRQFAKALGKLAKTDRIDAQTIALFVTNVATRPKVRHKHLEALAEMVTARTQLLEQLTVARNQARRRETGILKEIDARRAKALQDDIKLLNRHIAEAIRADAALSAKSRIIGSMKGAGPVLIQTILAFLPELGQLTRKQIAALVGVAPMDDQSGKRKGLSFIQGGRLTVRNALYMAALVAGRHHPLFKAFRDKLGAAGKKPKVALVAVMRKIITTLNAMIRDGRSWVTPEAAGAEPVAASLACPVT

SEQ ID NO: 242278 - protein, 343 aa, unidentified
MGEISTIGLDIAKSVFQVHGVDVAGQVVIRRQLKRRYVLAFFQKLPPCLVGIEACASSHHWSRELKALGHTVKLMPPAYVKPYVKRQKNDAADAEAICEAVTRANMRFVATKTPEQQSGLTLHRTRHLFIRQQTAVINVIRAHLAEFGIVAPVGRKGVEELLNVVTDASDNRVPVVARMCLAALGSQLRQLKEQILEFDRMIMAWHRSHEASRRLDAIPGVGPMLATALVASIADPKIFRSGRNFSAWIGLVPKQHSSGGKDRLGSISKQGDRYLRSLFMAGALAVIRYAKIHGTKHRPWLTALLARRPTKVAAIALANKIARMAWVLMARGERYKEPVALAA

SEQ ID NO: 242279 - protein, 365 aa, unidentified
MKKIAYVGIDYHLKSLTIAVLVEGESEFYNVIKIPNTDKAICKHMKKLSKEFEIKACYEASFSGYSFQRKMASWGYHCDVIAPSLIPQKKGDRRKNDSRDAKKLAKSYSIGDLAIVHVPTEEEESVRQFIRCRLSFKDLEKRTKNQINSLLHTQGICWPNKKWNDKHLTWLSNLEMPQKYLQAILEEQLGLLNYIQSRLESLNRQIEEIARSDIYAPSVKKLRSFKGIGTLTAMILIAEITDFRRFPNARALMAFLGLIPSENSSSEKHRPGSITKAGNSRVRKHIIEAMQHCSKSPKITQQMKKDLSKVDARSANIAINCMKRLHKRYWHLVLRGKLRSVALTATAREFAGFIWAMMQPESVSA

SEQ ID NO: 242280 - protein, 324 aa, unidentified
MEAEARYVGIDVSKAGLDVAVWPGAERFRVGNDPRGIAELVEKVVALTPQAVVLEATGGLEAMAASELHAAELTVAVVNPRQVREFARSLGRMGKTDRLDALVLAQFAQSAHSNERLPKLRLRDAAEAELKALVTRRRQLVAMLTAESNRRERAPKVIRKSIVASIRALKRSIAEIEQQVREVMSDSPVQQAKAVLLAAVPGVGPQLTATLLAELPELGNLGRRKIASLVGVAPHPHESGKFYGRRRCWGGRATVRTTLYMAALSGVRFNPALRSHYRALLERGKARKLALVACMRKLLLILNAILRDSASWNPHHQLDFQHSR

SEQ ID NO: 242281 - protein, 416 aa, unidentified
MAPTAYAFYVGIDWGSERHQVCVLGHERRVHGERRVEHSSPGLAALADWLSALAPGQPERVAVALEVPRGAIVDTLLSRGLHVFAINPKQLDRFRDRHSVSGAKDDRRDAWVAAEALGTDRWAFRRLEAEHAVIVQLREVTRFDEDLQQELTRLANRLRDQLLRYYPAVLRLAPAADEPWLWALLELAPTPAAGAQLPRARVTRLLERHHLRRHTPDDVLAALRAPALLLTPGTVEAAGRPVALLLPRLRLVHAQRAECAGHMDRLLAALQAETPPGPHRKHHDLEILRSLPGVGRLVAARVLAEAAPLLAARAYHALRALAGCAPVTRQSGKCRGVRMRYGCNHHLQQAVYHWARVSPQCDLHSRAHYTALRQHGHPHPRALRGVADRLLAIFVAMLKTDTLYDAARPRRRELAA

SEQ ID NO: 242282 - protein, 385 aa, unidentified
MPQFSGSPQAAIDYNSTIIGALELSEKKWVLAVQLPGVDRHSRHVLDACGERLVSFVERLKARCASAGRKIARVILTHEAGRDGFWLARFLARRGIEVHVMQPSSLPVDRRARRAKTDMIDVEMLLRTLMAWLRGEPRVCSMVPIPSEADEEARRAHREREDLTRERRSIVNKIDGILATLGVKGYRALRRDRREQLNCARQPGGDPIPQKARARIERLLDRLDLVLKLIDQVESARDAVLKKDAPADEAERMIRSLTDLRSIGPDVATLLVREAFVRQFRNRRALAGYVGLGGTPFSSGGSEREQGIGKDGNRRVRAAMVELAWMWLRWQPDSALSVWFRARVGAMGGRIRKIMIVALARKLLVALWRYVTDGVVPDGAKLKAA

SEQ ID NO: 242283 - protein, 426 aa, unidentified
MKSNTQNAKIAAITEKTLIIGIDVGSETHFARAFSWRGYEYSRKPLEFSNTEEGFVTLLSWIDELKAKYGMEKVIPGMEPTGHYWFNLGRFLQDHGMRPVHVNPHHVKRSKELDDNNPSKNDRKDPKVIAGLVNEGRYLYPYIPDGIYAEIRVLSGLRGAAQSELTRIKNRFARWISIYFPNYKDVYGNVGAVSGLMILKEAPLPEDIVKLGVEGVNRIWRDAKLRGAGMKRAKTLIEAAEHSIGSREAHEAARIELRILLSDYERQAAREAELMGLIEEKIAEVPYIDKLLEIKGVGLKTVIGFVAEVGDIRRFDDPKQLQKLAGYAIVKNDSGKHKGESHISYRGRKRLRYVLYEAAVSVVSHSAEFKAIHQYYTTRSRNPLKKMQSMIAVACKLVRIFYLLLRTGATYDASKMMGDIRRPEAA

SEQ ID NO: 242284 - protein, 343 aa, unidentified
MQIAILGIDLGKNNCSLAGCDVTGQVILRRRMKREGLITFVSNLPACVIAMEACGGAHHLGRLFRQKGHEVRLMSPEYVRPYVKAQKNDDRDAEAIAEAASRPTMRFVELKSEDQLDMQILHRARDRLVAERTSLINQLRALLLERGIVMPQGRKKLEVGLAVLMDVEIASFSLRIRSLVEDMRIQWRDLDQRITAFDEEFRAYSRSDKACRLLTTIPGIGPLNATAFVAAIDNAQTFSRGRDLAAWLGLVPRQMTTGGKPGLLGVSNRGNGYLRKMLIHGARAALPTLSKDKTILGSWLRNLLARAHFNKVVVALAAKMARIIWSVLRSGIGFKALTIELSA

SEQ ID NO: 242285 - protein, 398 aa, unidentified
MTESSDYESVQVFIGVDVGKDTHHAVAINRSGKRLFDKALPNDENKLRSLISDLKQHGQILLVVDQPATIGALPVAVARSEGVLVGYLPGLAMRRIADLHAGEAKTDARDAAIIAEAARTLPHALRTLKLADEQIAELSMLCGFDDDLAAQTTQASNRIRGLLTQIHPAPERVLGPRLEHPAVLDLLQRYPSPEKLASLGEKKLAAQLCKLAPRLGKRLAADIAQALAEQTVVVPGTNAAAVVLPRPALQLITLRKQRDEVALEVEQRVLAHPLYPVLTSMPGVGVRTAARLLTEVACRAFASAAHLAAYAGLAPVTRRSGSSIRGEHPSRRGNKALKRALFLSAFAALRDPLSRAYYTRKMSQGKRHNQVLIALARRRCDVLFAMMRDGTFYTPQGS

SEQ ID NO: 242286 - protein, 339 aa, unidentified
MELYSAIDLHSNNSHVAIIDDHQNRVFYRKLANDPRIIVNAFAPYRERLKGIVIESTFNWYWLADLLMEEGYPVHLANPCGIQKYAGLKHADDRHDAFWLAQMLALNILPEGYIYPKEERPLRDLLRKRAHLVRIRTSLILSLQNIVMRNRGIKIRSNELKKLTQDAAAELLKDQEELALAGKASKETIDFLTRQIQRIEKAVQSKALLKEPFSKLLTLPGVGDILGMTIQLETGPIERFKQVGHYASYCRKVSSRWTSNEKLKGRGNIKNGNRYLSWAFSEAADHARQTHGPSRDFYNRKLNQTNASVAHNALAHKLARAAYFILRDHVEFEEAKMFR

SEQ ID NO: 242287 - protein, 385 aa, unidentified
MAPIRMPEAVIGLDVGKSSHWACVATRDGEVLLSTPVANREDDLDSLFGRFPDALVVVDQSRNIGALALARARAAGMSAAYLPGLAAHGAARLFAGDAKTDERDAMVIAKTALGIPDALLPVGDPGPTIAAARALAAQRNFLTCENTRNKNRLRSILLESCPAFEALVDLSDGPQLRLMASLGGAWSVADAGPRRAAALTRGAPRGKIEALVRSTTSSTRPDASVVAAEDRAVKLLARRISENSAEIEAITAEISALLEGDDTYRCLLTVPGIGPKTASELAISIDIEDFPSHDRLASHCGLAPRNRQSGTSISSVTASRQGNKRLKNLLIFSCNCLTRTEGRWGDYYTRCRERGMSHGKALKALARKRLKVIYAVMRDRVPYAA

SEQ ID NO: 242288 - protein, 387 aa, unidentified
MQAPTVSTPITERISTIFVAIELSQKTWLVTMHSPDKDKISRHKVQGGDHAGLLALIERVRDRAARTLGAVPAVASCYEAGYDGFWLHRLLMAAGITNYVFDPSSIAVDQRARRVKTDRIDGETMLRTLMAYLRGEPRVVRIVRVPTPEQEDARRDTRERHRLTKEQTAHTNRIKALLRLHGFAVGQPRRRDWLSWLAVQRDWQGQGVPPRVLSEIENEHARLLLVRKQLDALARTPAAANPAPAVAEMVRRSDLLQRLKSLGPAFATTMTQEAFYKDFGNRRQVGSYFGLAPSPWQSGGTDRDQGISKAGNPRARCAAIELSWLWLRHQPDSELSQWFRRRTLNAGKRTRRIAIVALARKLVVALWRYLTTGLVPAGAVLKPAAAQ

SEQ ID NO: 242289 - protein, 347 aa, unidentified
MRFYNRQHTYYCGIDLHVKTMYVCILDGTGQVLVHRNVPSTPTAFLEIVAPYRTELVVAAECMFTWYWLADVCAAEGITFVLGHALAMKAIHGGKAKNDKIDSHKIAVLLRGGMLPQAYVYPAAMRSTRDLIRRRLHLVRKRGQLLAHIQNTRAQYNLPAFGQKLAYKANRQGVVERFADLSVQKSIEVDLALIDHYDALVTDLELTIVREAKRHDADAFHRLRSVPGIGKVLALTILYEIHDITRFDRVQEFASYARLIKCLKESGGKKLGTSGAKMGNVHLKWAFSEAAVTFLRHNREGQRLLARLEKTHGKGKALSILAHKIGRAVYYMLARGTVFSMEKFLAA

SEQ ID NO: 242290 - protein, 342 aa, unidentified
MNIPVRIGMDTSKSVFQLHGVDENEVVVVRRQFRRAEMIRYFERLPPVLVAIESCGSSHHWGRLLQSFGHEVKLIPPQYVKAYVKRGKNDAADAEALCEAVTRPSMRFVPVKSKERQAACMLMTVRERLVSVKSQLSNAFRSYAAEFGIVGPAGRQNVAALIKRVLEDDSLPEMARDLFRLQADEYAAVQARLAKIEAKLMKWHREDDISRRIATIPGVGPIGSSMLSMKAPPPETFRSGRDFAAWLGLTPKDHSTGGRQRLGGITKAGDSILRSTLIVGATALLRHVRKGRHKPTPWLASLLERKPPKLVAVALANKFARIAWRLMMSGGEYNQPVVAMPT

SEQ ID NO: 242291 - protein, 345 aa, unidentified
MEQISRIGMDTSKHFFQLHGVNAAEKVVLRKKLRRKEMVAFFEALAPTVIGIEACGASHHWARILRSFGHEVKLIAPQLVKPYVKRGKNDTADAEALCEAMSRPTMRFVPVKTAEQQAALMMVGLRDRLIRNRTQLSNAIRGYAAEFGFTAARGMAHIDPLLDRIQADESVPVLARELFAAQAEEYAQLQAQIAEADAKLMAWHKADECSRRLANIPGIGPIGATLLLMKTPAPEMFRSGRQFAAWIGLTPKDHSTAGKVRLGVITRAGDEALRSVLVVGATAVIQHVRRGGRGSPWIVGLLKRKPPKLAAVALANKMARIAWKLMVTGNSYAAKSAPAALMGAA

SEQ ID NO: 242292 - protein, 408 aa, unidentified
MEVLYPRCAGLDVHKDSVVARIRCVSEPRHDEVRTFATTTSALMGLNEWLSAQGVTHVAMEATGVYWKPVWHLLEGDFELVLANAQHIRNVPGRKTDVNDAAWIADLLAHGLIRSSFVPPAPIQELRDLTRTRKQLVREISQHSARIQKVLEDANLKLGSVLSDVLGKSGQAILQAIIKGESNPQKLADLAQGNARKKRAELVEALHGRIRNHHRGLLKVHLELVTALQHAVAELDATVGKSLASIHESARLLSTMPGVSEVTAHVIVAEIGVDMTRFPSDAHLRSWAGFCPRNDESAGKRRSTRVRKGAPWLKTTLVSAAWAAVRARDSYLQAQFHRLRARRGAKKAILAVAASMLTAAYHMLKNGVEYQDLGAGHFARRDPSKIIQRLVRRINALGCEVQLTPLAA

SEQ ID NO: 242293 - protein, 379 aa, unidentified
MKKDTRHVGFDVDSEKIAVAVAEPGGEVRSLGAIPNREESVRRLVKKLGPASRLRVCYEAGPHGYGLYWLLSGLGVHCDVVAPTLVPVKSGDRVKTNRRDALKLARCYRSGDLTAVWVPDAEHEAVRDLVRAREVAKKDQLRARHRLGKFLLRRGLRAGAGMKSWTAKHLLWVKTLRFERAAQEATYLDYLHEVQHAAERVARLEWAIDQAIETLPVEMRAVIAGLQALRGIKKVSAATIVAEVGPLSRFPRPKQLMGYSGMVSSEDSTGDRVRRGAITKTGNAHLRRIAGEAAWAYQYRPAMSPEMKKRQEGLSEEVKEIAWKAQHRLCTRYRRLVAKGKLRQKVTTAIGRELLGFIWAIGMQIEKEQSLTRTSARAA

SEQ ID NO: 242294 - protein, 424 aa, unidentified
MEVMHERVAGLDVHKDAVVACVRIMAGGKALRECRTFETTTDGLKSLLVWLTETGCTHVAMEATGVYWKPVWNILSDGKFELILANAAHIKNVPGRKTDINDAMWIADLAACGLIKASFVPDEAIQELRSLLRARKQLVREQVSHVQRIQKTLEEANIKLDSVISDVMGASGRRMIGAMIAGVRDPRKLAALASGRIKAKPKALYDALHGRLTDHHRFMLRLHLGQYDALASSIRDVDQHVDEAIARMDKEAASSGQSPFRSLIELLSTIPGVSALGASTILAEIGRDMSRFPTAGHLIAWAGLCPGQNESAGKRKSSRLRKGAPWLKTMLVQCAWAASRKKDSYYKAQFNRLKSRRGPKKAACAVAASLLTAIYHILKDGVEHRDLGAEYLDRRSTANKTKRLLAQLAKLGYHAELKPLAEAA

SEQ ID NO: 242295 - protein, 412 aa, unidentified
MEVVYPCCCGLDVHKKSITACVLWAEAKGKSRKEKRRFGTFTHDLLQLADWLGESGVTHVAMESTGVYWKPVWNILAEQFKVLLVNAQHIKAVPGRKTDQKDSEWIADLLQHGLLRGSFVPPQPTRELRDLTRYRVSLAQEINRIANRIQKVLEDANIKLASVATDALGASGRAILEAMLAGEQDAARLAELSKGLLRNKIPELKLALEGRMTEHHRFLLRQLFDHLRFTESKLSQIEQEIDRRMRPFQDEVIRLCTIPGVDQVTAWGILSEIGLDMNQFPSAEHLSSWASLCPGNFESAGKRLSGKMRKGNVSLRRCLSQAAWAISLTKNNYRSALYRRIAARRGAKRAIMAVAHALLVIVYHMLKRKEDYRELGADHFDRIDMNRTRRSLVRRLERLGHKVTLEPLAQTA

SEQ ID NO: 242296 - protein, 343 aa, unidentified
MDEYDGRQFVGIDLHRQRSVIVRQSESGEQLSAVRIVNEPVALELQLEQAGADPEVVLEATYGWYWAVDVLQACGARVHLAHPLGVKGFRYRRVKNDVRDAADLADLLRMGRLPEAWIAPPQTRELRELVRYRAKLVAIRSGLKAQIHGVLAKAGVLIAVSDLFGVTGRQRLAKVPLGPAYAQRIRSLLELIDILDSHEARFAALIAERLDTHTGYQAIQQVPGIGPTLAAVFVAEIGDVHRFTDPAHLCSWAGLTPTHRESDTVVHRGHITKQGSKAVRWAAIEAVQRHPTTAKISADKHRIEARRGKNIAKVAAARKLLTLVYYGLRDGHIRALAHRQVAA

SEQ ID NO: 242297 - protein, 352 aa, unidentified
MAHLAPPRVTVGVDTHLDVHVAHAKDQLGRRLETISIPTTPAGYRSLLAWARGLGEVEAFGVEATGSYGAALARFLGAHGQVVVEVNRPDRQTRRRRGKSDPVDAEAAARTVQAGEATVVPKAGNGVVEMLRCLRVARVTAVKARTQAGNAIKALVVTAPAELREQLRGLPTAKLVRIAAAFTPGTPITPMAATMLALRLLAVRHQALAAEVTALDSQLERLTAKAAPRLRARFGVGAESAAALLVAAGDNPDRLHSEAAFAMLCGTSPVEASSGKTVRHRLNRGGDRQANAALHRVVIVRLRWHQPTRDYMARRGAEGKTKREIIRCLKRYVAREVFAALQQLDQELTEAA

SEQ ID NO: 242298 - protein, 355 aa, unidentified
MGMKKIEDLSELAVIGVDIGKDVFHLVGFDDDGHLVLRQKIKRFALVATFEKLPCCVVGMEACLSAHFVSRTLRALGFEPRIIPAIYVRPFIKGQKNDYNDAEAIAEAALRPNLKTVTEKSQDQLDLQALHRVRSRLVSRRTATINQIRAFLIEQGITVRKGLHALKSSFLTILEDRQDEMSPRMRAILGGLYGDWLWLDERIETVSREIEEISRTEESCANAMTVPGIGPLISTAMVAAVGRGEAFDRGRDFAAWIGLIPRQYSTGGRTVLGRISKRGSRYLRMLFVQAANVVLMRPHRWADFSFGDWLARAATRMHRNKLAVALANKLARIAWSILRHATPFDAQRDEVMVGV

SEQ ID NO: 242299 - protein, 388 aa, unidentified
MGQHSELFVGIDTSKLKNAVALAEVGRDGEVRYLGEIDTTAAATRKLVAKLAAKHSRLTFCYEAGPTGYGLYRLIKSLGHDCIVVAPSLIPKRSGDHVKTNRRDASNLARLLRAGELTAVWVPDERHEAMRTLSRAREAAVDDLKSKRQQISALLLTLGLHYPGLKTWGKAHRNWLRIQKIGQREQRVVFEELMIAERQVQDRVDRLGAAICAAVPEWSLAPIVTALQAMRGVDLVAAVVIMAEIGDLSRFASPRELMAYLGLVPSERSTGDTVKRGGITKAGNRRARRVLVESSWSYRHPPRIGKEKLAKVAAAPEVVREITWKAQTRLCGRFRALTRKNKRPTIVVTAIARELCGFIWAIDRAMRGVPAAAARGNGAPARDRAAGT

SEQ ID NO: 242300 - protein, 341 aa, unidentified
MRQYVGLDVAMDETKVHILDGDGKRVWRGKCRSHPDDIEAVLHQRAPQAERIGLETGPLTTWLWTELTGRGLPMVCLDARHAKRALDMRPNKTDANDAEGLAYIVRSGWYREVRVKGSEAMLSKALAGARGQLTTMVTDLSNQIRGIMKTFGLVVPKGSGGVFERNVRALLDGAEAIATVVTPLLDVWRLARQRAAALDRRLLAAARESSDCRLLMTMPSIGAVTAASFVAAIERPESFTRSRNVGAWLGLTPRRYQSGEIDYQGHISRRGDSRLRALLYEAAMRLLTRVRADSALRRWGLALKKRLGFKRAAVAVARKMAVALHAMWRSGVAFDPAPLPR

SEQ ID NO: 242301 - protein, 343 aa, unidentified
MKITAIGIDLAKNVLQIHGVDERGKAVLKKQLKRDQVTAFFANVPPCLIGLEACGSAHYWARKLQSFGHNVKLMAPQFVKPYVKTNKNDVADAEAICEAVSRPNMRFVPIKNGEQQSVLAMHRARQGFVKARTAQANQIRGLLAEYGIVIPQGIGYIAKRLPEILEDGGNQLPGAFRQLLQRLGDHLKQLDRQVTELEVQIRNWHRESDASKKLEQIPGIGPITASALVASIGDAKSFQSGRQLAAWLGLVPRQHSTGGKQVLLGISKRGDTYLRMLLIHGARAVIRVAERRAGYAGSWLARLLARRNQNVAAVALANKNARIVWALLAQERDYDPDFESAAA

SEQ ID NO: 242302 - protein, 343 aa, unidentified
MDVSTIGLDIAKSVFQVHGIDAAGDVVVRRRLRRRQLVGFFEKLGPCLVGIEACATAHYWGREIAALGHEVRLMPAHYVKAYVKRGKNDAADAEAICEAVQRPTMRFVSLKSPEQQSMLMLHRTRELLVRQRTMLVNAIRGHMAEFGIVARVGLPQIKELLAVIADREDHRLPPGARACLESLGRQFLSLHEEICAADKHLHAWHRSNPVSQHLATIPGIGPVTASALAASIADPSVFKSGRELAAWIGLVPRQNSTGGKQRLGKISKQGDPYLRWLLVAGAMTVIRHAKRRGATNQPWLDDLIARRPTKVAAVALANKMARMAWALLRHGGAYRQPLVTASL

SEQ ID NO: 242303 - protein, 364 aa, unidentified
MKMYTTKTKFHCGIDLHKSMSYICVMDKEGKIYVHTEIKNNDFQYMKKILSPYWDDLTIACETTYNWYKLSDFCETEPVQFALGHALYMGAIHGGKAKNDKIDSKKITDLLRTNLLPKAYACPRRFRSHRDLLRRRIKLVSIRSGISIYLNLFEDQNNLKHSSAELRRNAKSSLQFMDLQTFLPEDHAMARNYQLNADLLKMFTDQLKQIDKDLVKFTLDSQFKEDFEIVKSMKGIGDILGMTLVYETHDIQRFKTPGDYASYCRVVKCKKESAGKSYGYSGTKMGNPNLKWAFGEIAMLAKSDPVMKFFADELDQRHGKRKGRSIFMHKICRAIYFMLLRKKPFDPIDFFGREKYERLTKKVH

SEQ ID NO: 242304 - protein, 425 aa, unidentified
MSVMVQVGTTNQKKEGKKMISIGIDIAKEKFTACALEQGSKIIWKPFDIHLNKTKVEEFLQKLDSLNEEVKIIMEATGRYHLPILYELKDKGYFVTVINPLKMKQFCRVLNFRKSKNDNIDAIQIAEYGLMYWKELQEYKVDSESFRVLKELNRSYQHYMDLRINQMNFIDQTINQTFPGIKKLIPHASGDFSKDKLLDFLEIWWHKNLVLEKPEDKFIEDFKNWAKEKRYHPNAEKAKSIYKLAEESISTQPSSSSYIKMNIQEGIELIKHINQILHTILSQMIEIAEPLEEYQEAKKFSGISNKLAVQITAEFGDLSKFKNKKSLISFVGIDSPPYESGNFKADQRKITKRGNAILRKVGYQAMKCMMSAKDPENDIYQYMVKKEKDGKAKKLCKFAGLNKFLRIYYAKVMASKQEKKWLKVA

SEQ ID NO: 242305 - protein, 371 aa, unidentified
MMNVTTFAGLDVHARSIKAVALDVVTGEVRSATFGYDACAVAEWIRSIDPGARCVYESGVTGFDLQKKLSSLGVDCVIGAVSKMIKPAADRRRKNDRNDAEFLARMLSVGNIVEVWVPDDECEAARDLARALDDAREDLRRQKQRLSKFLLRHGLVFDERTPSGQRKGNWTGAYWSWISSISFAEKADNDAFAFYVDAVRQAEEDKRRLEKLVADEASRPRWKKRVDSLRCLKGIDVMTAADIVFEAGEFARFRNARSFAAWLGLTPSEHSSGEKVAQGGITKAGNKHLRRVMVEAAWHYLSASPHSKGPAPGQAPDPAARRHASKGVRRLVGRRAALLERGVHKNKANVATARELACWCWAVGSMAEGAR

SEQ ID NO: 242306 - protein, 361 aa, unidentified
MNATTVAVDLAKSVFQLAVADEHWRMVETQRLTRTQFERWFLNRDVNLVVMEACGSAHHWARWLNGLGIEVRLLPAQYIRAYVKRNKTDATDAAALLEAARCADIRPVRVKSVEQQALQGMHRIRSLWMGTRTSRINALRGFCREFGIEIPVGARTGVEAISRVLADPNTAVPDLIRGTAKLLVEEIHLLEARIAQLERELARLAKLSPACTTLLSIPGIGLLTATALVAATSGDVSHFQDARHFSSWFGLTPKEYSSGNSRYLGHISKRGDRYLRMLLTHGARSVLRSAKVAEGAGKEVCGVRRWALDVQSRSNHNKAACALANKLARICYATLRDKEPFGEQTVRLGKKVNRESFVMPA

SEQ ID NO: 242307 - protein, 432 aa, unidentified
MNRLQVGIDFSQKKADLCLLFPDGQPLEPHVSFANSCSGYSSAKQLLIDTLDTYAFDGVDVSGEATGYLWLPFFLQLSADPDLTLRDTNLFLLNPRWVKWFKKCFAEDHKCDEKDPFYIAERTRTRRPDVAWSPPDCLPLRFYTRLRFHIVQNLAREKCYFSAFLFLKASSYRCVKPFSDVFGVTSRLVLTQQPTLDELADLPVEVLASQLYELSGHHLRDSLNNARKLQRVAQESFHLDPSLTLPVQRILDLTLEHIRFLEAQLEQADHWIATELENYPVIAQLATIPGVGPVFSSGLGAEIGGIQRFLQGHKWDKKRKRYRPRNLRDAEDAVAKIAGLWWPRADSGDFEAQDRHMAKSGNRYLRYYIIQAGNLMRLHIPEYAKFYARKYKEASKHHHKRALVLTARKSVGLVVGLLHRDEPYRSKEDRRT

SEQ ID NO: 242308 - protein, 260 aa, unidentified
MSQPDLQCVGIDVAKATLDVAGTETLASFTVSNDGAGFTEITDRLSGRNISLVLMEATGGLEAPVAEYLQSEGFDVVIINPRQARDFARAMGHLAKTDRLDAAMLAQLARVINCHPDRSRYLRLMPDAARQALTALVVRRRQLNQMLVAERNRLYPSHPDGRESIGRVMTVLEAELALVTRQMNRQLRQHFREQARLLTSVKGVADITAATLLAELPELGTLSRREISALVGVAPVNRDSGKQGRRARHTLYGGDHRYPV

SEQ ID NO: 242309 - protein, 368 aa, unidentified
MKNVTTYVGIDAHKKDLFVAMLIGNEKTPVTWQLANEPQAVRRLVRKLEREAPGPVSVFYEAGPCGYALQRQVTTARVSCDVIAPALIPRKPGERVKTNRRDARKLAELGRAGLLTAVQPPTPEDEAVRDLARARDDAREDLQRCRHRLGKLLLRRGLHHAGRNWTRGHRQWIDSLTWTHAAERAVVDDYLLAIDHTEARLLELDARLAEIAARDPYREPVGWLRCFRGIDTLTAMLILAELHDFRRFASAPALMAYLGLVPGEDSSGEKHRRGRITRTGNALVRRLLVETAWHYQHRPSVGVALARRRKGQPGRVIAIADKAQQRLCRRFRKWAAEHKPAPKIAVAIARELAGFLWAALQPVPAPVK

SEQ ID NO: 242310 - protein, 429 aa, unidentified
MDVINCIRVDQFRQLKKEIRGSERHLIVGIDVAKNKHNAFFGNATGKTLLKRLVFENSAEGFEKLITFAESEKIKNCLEETVFGMEPTGNYHKPLAEYLTRRDHSVVLVAGKAVSNNREMLDGRWDKNDSKDPANIADLISQGKFMYYDHPVLPLRDLRNLLALKRRFKKQERGLKVRIRNHLLANYFPELDKHFGLWEAGSLSIVRWCLSPSIISAMEYEDFARLVVPGSRVTQGQKNRLAQIFRDADKSIGCEVGEALTFESEMMVDWLKRTRESIQAVDKKIEDVCLHFPEYACLRTIPGFGPDIASKVLGAIGNPHRFNNGKQVLKLAGWDLSAKRSGKTSETAVPVISKKGKADLRYALYQAAWVASSRNQFFVTYFANKLRGREKEKGIKTKMRVKLAAKMLIIAWTLMKKEDPFNPDYLNLE

SEQ ID NO: 242311 - protein, 411 aa, unidentified
MVRFIGLDVHRDFAQIAVLQDGEVRDAGQVACRPDALVGWARKLGPGDQVALEATGNSEAIALLIRPYAGRVVVSNPLKTRAIAEAKVKTDKVDARILAQLLAADFLPPVWLPDERTARLRRIVGQRTQLVRERTRIKNQVHAVLARNLLPRPTATDLFGKAGRAWLGLQVLPPDERDTVHALLRHLDFLGNELASYEQALATEALTDATARRLMTIPGVSTVVAMALIAAVGDFRRFPTAEKLVAYLGLHPRVRQSGGQPAHHGRITKQGNAHARGMLVEAAFTAALAPGPLRAFYSRIKARRGFQIAVVATARKLATLAWTLDTRGEEYAFARPSLVAFKQRKLELTSGAPRAVAHRGPGYAYNDKQLRREERELVETAERAYQLLISNWQPRRPAGAKKIEFTRPRQE

SEQ ID NO: 242312 - protein, 347 aa, unidentified
MEKVSQAEVQVFAGIDVSARELSVAVQCGIKEGIAITTFPNQAAGHQALLAYLLRAKGRARVCLEASGNYSLDLALTLQAHPQVEISVVNPRRARRFAESLGERSKTDPVDARVLCEYALRMPWVPWVPPSLAALRLRSITRAIEDLVAMQAQEKNRQHALLASDALPALLIRELEQHLRYLKLRITRLRREALRLIARNPELNRRFHLMLTTPGLGETSSLQILGELAVLPETLDARQWVAFSGLDPQQFSSGTSVQKKPRISRGGNRHLRRALYMPALVATRHEPFLRDFYQRLLRRGKAPLQGVVAVMRKLLHALFAMFRRDEAYDGSKLCPAEFARHTAVVCV

SEQ ID NO: 242313 - protein, 370 aa, unidentified
MLDTTTFVGLDVHARSIKAVSLDVMTGEVRCATFGYDAGAVAEWVRSVDPGARCVYESGVTGFDLQKRLSGLGVDCVVGAVSKMIKPSADRRRKNDRNDAEFLARMLSVGNVVEVWVPDDECEAARDLTRALEDARDDLSRSKQRLSKFLLRHGLVFDERTPTGRRKGNWTRAHWSWIESIRFAEGADEEVLAYYVDAVRRAAEEKARLEGLVEAEARKPRWRKRVDSLRCLKGVDTASAADLVFEAGEFSRFRNARSFAAWVGLTPSEHSSGESDRRGAITKAGNKHLRKTLVEAAWHYLTCSGRPKDLAKGQAPDRGARRHAAKGVRRLVERREALLARGVHGNKANVATARELACWVWAVGLMAEEA

SEQ ID NO: 242314 - protein, 347 aa, unidentified
MNFSTRQHNHSCGIALHARAMYVGILDQSGTKLVHKNLPTTPEAFLHVIAPYREDVVVAVECIFTWYWLADLCQKEGLAFVLGHALYMKAIHGGKAKNDKIDAHKIAVLLRGGMIPQAYVYPAEMRATRDLLRRRCHLVQKRAELLAHIQNTTSQYNLPEIGKKLAYKANREGVEEHFPDPRVRKTIEVALALLDHYDQILREMELYITRSAKVHDGQTYARLQSVPGIGQILALVILYEIQDITRFPRVQDFVSYCRLVKCAKESNGKRLGTSGKKIGNSHLRGAFAEAALLFLRQNQLGKEYFTKLEHKHGKAKALTVLGHKLARAVYYLLTREQPFDLQRFVSA

SEQ ID NO: 242315 - protein, 387 aa, unidentified
MSPTIAARRPAAVDYERTLILSIEVSNQSWVLAAQVPGLPHTKAKRTVDPEAEALMAAIAGYRSRAAAMGRSIERVIAVYEAGWSGFWLARWLTRHKVEVYVIQPSSVPVDRRMRRAKSDGIDAELLLRTLLAWLRGEPRVCSMVPVPDEADEDARRCIRERTELISERVGLTNRIGAVLATLGVTDYNPLLRNRHYRLAELRTGLGEPLPPNAHAKIARLLARLELVLAQIAELERERDAVVETETPDHASKMIQQLISLRGIGVQSATVLVREAFVRRFANGKALGSYAGLTSSPYSSGGIDREQGIGKGGNRRLRTVMVELAWLWTRYQPAAAQVCWFRERVGSTGRRVRKIMVVALARKLLIALWRFVIDGVVPEGAVLKPAA

SEQ ID NO: 242316 - protein, 408 aa, unidentified
MSIVFGIDVSSRDSSVCVLQSGVTREYKITNDTIGFKTLLIDLKEYAEHPQIILEATGIYSRRITRFLDEYDYDYVLLNPLKAKKEINQGLRRNETDRNDAYHLALAQDRNQHQPNRKEPEAYHQLQSLSRAYEELTHDIVSSKNRLHKYLQLTFPELETIFNNSRGVNYWYLVELFPHCQDVRNLDVSTIAKQIKDFKGYGINRAQKLAIKLKHLADLAYPAVDQDDPERDEVVYYANRLLRLTADRERRSEAMIKLAKTLPNRDLEILMSIPGIAEITAVRILAELGDIRRFSNPNKINAFVGIDPGRYQSGEKDSSLRISKHGNAVARKILYRAIGQIDLAAKTSPCHIADYYERKKQFSQTKGFKKIAIASIHKLLRTVYILIITDQMYDYNVANNNQKDFCRN

SEQ ID NO: 242317 - protein, 332 aa, unidentified
MSYCIGIDVSKATINVHISKNNQDLVLENNLKSFKSLFTKLKKIYRKEIEDVIFIFEPTGSYSEALRKYCSEKQIKCFIINPKQFSSYAKALGEEVKNDVNDARVLSKALHLAKENQVNVPVFNEDVEHIKELMSFYKFTKKQTTQQKNHLESLTSKDGDKFSIKELKKSIKESQEKELRIIEQIQTLIDSTDEYRNAYENITSIKGVGQIAGIVLLHLFLKYPEANQRQITSLTGLNPIYRQSGSSIQSGYKIVKSGASLYRSVLFMSVLAAVQHDKNFKAFYERLKYNGKHTTSAQIAVMRKIILTAHSLYKNNSKYDENLNSQKASKMQ

SEQ ID NO: 242318 - protein, 353 aa, unidentified
MEYIAFDAHKHYTLASVVQPDGRILREQRIAHERGAFQQFLDRCEPGSPVAVETVGNWYWIVDEIEAAGCVPKLVHARKAKLMMGEINKTDKLDVRGLNQLQRTGTLPTVWIPPGELRDQRDLPRTRMVLVRQRTRLKNRIHATLAKYGLHDLEVSDLFGARGRTLLRQRLDLLPPCTAYATGQLLEQVESLDRAVRGFEHQIQTVFKPTPAIQLLLTLPGVGLTLAVVIALEVGTSARFATAEKLAAYAGATPRVHASGGKTRFGPPRPDVNHYLKWAFVEAANAICLNRSRRPRRHVSRLYERVARRKGHQKAIGAVARHLAEATYWILTKQQPYREPNAATVSSTGDKRV

SEQ ID NO: 242319 - protein, 335 aa, unidentified
MQREPTYIGIDVAKAQVDVAVCPTGMRWQAPYTEEGVQELVSRVQALQPTLVLLEASGGLEIPWVAALADAHLPVVVVNPRQVRDFARATGKLAKTDSLDAQVLAHFAEAVRPEPRPLPDAEAKALASLLARRHQLVAMLVAEKNRLGKALPSVRSRIQTHITWLERELGDTDDDLQTMLRQSPLWCEKENLLRSVPGVGPQLALSLLAYLPELGTLDRRSIAALVGVAPFNRDSGTFRGRRKVWGGRVRVRTALYMSTLVASRHNPVIQAFYQRLLAAGKPKKVALTACMRKLLTILNAMLRHFTPWRSQVPQSMGGIALDFQDSCFHATDSLA

SEQ ID NO: 242320 - protein, 389 aa, unidentified
MSSMPQSTPSDPAEVVLGVDTHKDVHVAAVLTTLGVLLATSTFPTTAVGYRRLLAWARGFGPVGRAGVECTGSYGAALARYLLAATITVIEVNRGDRGERRRRGKTDTLDAETAARAVLSGRATAIAKSGDGQVEMLRMFKLAKASAIKSRSQAINQLKAVLVRAEPTLRESITGLGNPALFRRCAQLTVSDPCDPAGAAALTLRLLARRVLTLTSEIDELNVHITAAIKTHAPQLLQRYGVGPDTAATLLLAAGDNPERLTSEASFAALCGVSPIEASSGKTRRRRLNRGGNRQGQLRALHDHHRPPALGQTNPALHPTPRRRRKDPPRGHPLPQALHLPRDLPRHHPRQRPTRTDQLSCLTSIAASNSPSSTEAVPSYEPSHSGSSG

SEQ ID NO: 242321 - protein, 334 aa, unidentified
MDKVTTVGIDLAKRVFALHGVDASGRVVLRKTVRREQFVETVAKLPPCLIGMEACSGSHEWARRFQGFGHTVRLMAPVFVAPYRKSGKNDGNDAEAICEAVSRPSMRFVPVKSAEQQALLALHRVRQGFIEERTALINRLRAVLTEFGVVLPNRTQWVRRDAVAVAEPLPVLARQAVEDLRAHLVQLDGRIGAYDRQLEQQAGQSEAAKRLMQVRGIGPLTAVAIVATVGSARDFASGRQFAAWLGLVPRQNSSGGKSRLGHISRRGDAYLRMLLVQGARSVLNTAARHTDRLSLWALSLQARRGMHKALVGIAAKNARIAWALLSKDQTLRAG

SEQ ID NO: 242322 - protein, 432 aa, unidentified
MSERKSLELRVSVDVGSRRHSVAIGLPDGQVLEEFEIAHRPEGFQEFFSRIEKHQKAQGCGVAVAMEGYNGYARPLDTLVRQRGYRLYNINNLKLARFKEIFPGAAKKDRIDARKGLELFQLRDHLPLAKGVLQEVTGTPKENEILKRLTRRRRRLVNERVRVVNNLQSDLQAVCPGLLEITTEASNQWFLNFLLSADSLPQLARLRKSTLLKIPAVGRKYASLIEQWQKRAHFSDEIEWVNEMVREDALRCLELDDKIRTLEAKIEEIAKSSKIAKILLSIPGFGPVCTSELAGEIGTVERFSKEGSLALYLGMSTLDNSSGDYHGSKQPKHVNTRAKAAMMIALDRHRKYVPESQRYYEKKRTEGKKHNQTIRSLGRHLCRIIFRMLRDQRNYEIRPQQGNTKTKVRSRSCVKTKIRRPKISATHLKQKV

SEQ ID NO: 242323 - protein, 408 aa, unidentified
MNAVGIDVSKGKSMVAALRPMGEVALLPREFLHTEIGLEQMAYVITTLGEDTRVIIEATGRYHEPVAAALHKYGIYVCVLNPLYIKQSGGGSIRKVKTDKADAMKIAKYGLDNWVDLREYTPMDTVRQQLKLCSRQYNLYMKTVVSLQNNLISLTDKTFPGVNELFSSPERADGHQKWVDFVMTFWHCDCICRVSEKAFTERYQKWCKRKGYHFSTEKALDLYAGSCGHFTTLPKNDNTKLLITTAAQQLLAGKMTLAALRAEMTRLAMQLPEYNTVRAMYGVGETTAAQLMAEIGDVRRFPRRSSIVGFAGVDPGVDDSGKHSAKSVPTTKRGSPHLRKTLYQIVCTYLRKAPANELVYQFLEKKRAEGKPYFVYMTAAQNKFLRIYYARVKECLAAFDAQQDTTQS

SEQ ID NO: 242324 - protein, 427 aa, unidentified
MPYHIAGIDVHKKMLAVAVADVAVEGDFQFERLKVGTSPVQLRALADWLVEREVDEVVMESTAQYWRPVWEALERYWRPTRRTHPAASPVSGTLHLAQAQSNRAAGGRKRDFPDAERLVKRLVAQELTLSFVPDAEQRLWRTVMRRKYQITRNRVQLHNRLESLLEEAHIKISSVVSDLLGTSARRMLHAVGEGETDPRALAALADSRLRATSDQLRDAFGACADLHPVYRRLVKLTLDEFRLIEDQLAQLDQQMAQLLAHQQDAVHRLAEVPGLGVDSAQQIIAEVGASAAAFPSAKQLASWMGACPGNEESAGVNYSHRCPKGNRQMRRVLNQAANAAVKAKGTIFAVVYRRLVPRLGHAQAIGAIAHRLCRLIWKILHQGIRYEERGPAVSVEAKKVRTRKMIRELRALGYHVELFPAPSSNPA

SEQ ID NO: 242325 - protein, 427 aa, unidentified
MKTEDIRLEEFRNLKKEVRGSDKHLLVGIDIAKEKHNGFFGTATGKVLLKRFVFDNNREGFEKLLAETDALKQKYGLSQTVFGLEPTANYHKPLGEYLIVRDQEVVLVAGSAVRKNRELLDGRWDKHDVKDAANVADLIAQGKFQYYENPCIEVRELRGLLSLKRKLKKQGQGLQLRIRNNLLAQYFPEMDRYYDTCEKDNLAIVSTCLSPPVIGGMEYNEFFKTVVSRKNGLRQHKHLYRIWQLAKESIGCEAEEGAACEAGVLVALLKQTRQAIERVEEEIQKLCLLFSEYEFVISIPGFGPDVSAKVLAYIGDQYRFEKASQVLKMAGFDLSASRSGKSSEKAVPVISKKGKADLRYALYQAAHTASIRNEHFKKYFTAKLRGREKEKGIKTKMRVKLAAKLLIIAWTLMKNKEPFNPEHVKID

SEQ ID NO: 242326 - protein, 359 aa, unidentified
MVYLGVDLHRNISHVVALDGVGEVILERRFGNSAHEFQRVFGELEPEPIEVAFEATYGWSWFAELLADAGIEAHKAHPLATKAISSGRVKNDAVDARTLAHLLRTNLLPEAWIAPPDVREARRLVRMRVSLVRMRSRLKAQVHALCADAGVPVPVSDLFGKAGRELLGGLALRPTSAGRLAASLRLIDDLGREIVEADRELVRLYREDDRIRRLTPIPGIGFLTATTIIAEVGDVGRFSSPERLTSWAGLTPTERSSADHTRRGHISKQGSRWLRWAMVEGQRESAELRTCTASPTRSPTGGAARSPESLSRGDCSRSPSTPSATLRAAGHTRRCIAHLIRSGRARCVSWPQLDGRSLD

SEQ ID NO: 242327 - protein, 340 aa, unidentified
MKIIGCDLHAKQQTIAMLDRETGEVTEQTLTHEGAVVRDFYAALSKPVVVGIEATGSMGWFLRLMEDLDLTCRVGHPAAIRKAETRRQKHDRRDASLLLKLLVEDRFPAIWMPSTELRDLRALLLHRHQWVRMRTRVQHALQAMALSQGLRRGPTLWSRDGQATLAAWPLPPHAAHRRSELQALYQQLEAQVARLDHRVAQAAAQRASATRLMTHPGVGPVTGLATEVFLGDPSRFADGKALASYVGMIPREYSSGARQRLGALSKQGNPLLRFLWGEAAIHAVRRDPDLQRFYRRKLVQKGLGKARVAAARKLGIRLWIMLRDQIEYDEFCRRSPARQS

SEQ ID NO: 242328 - protein, 423 aa, unidentified
MKKHIYKVVKINAVDREWLANEVRGKAVVVGNDVAKENHRAAVVLAETGRTVVTLAWQAPGEQRDFVALLRSLPASSLAVVVEPTGSYGDPLRWQLGEAGIAVYRVSPKRAHDASEVYDGVPSSHDPKMAAVLARMHRDGLSQPWPADEPVQRDLKAAIETLARYTGAAQQLQNQLEARLARHWPEVEALLALDSVSLLALLARFGGPETVAAQAGPARQLLHAKGGRLLSSAKVEAVLASAAQTVGCPPTAGERRALQDLATELLRQLAHEREAKRAVEKLAQAHAGIAAMAAVVGMTTAAVVFAKVGDPGRFASAAAYEKAAGLNVKERSSGKYQGQRKITKRGPGSARKVLYLAVLRWIQKPGAFATWYERKVARDGGKTKLKAIVALMRKLIRALWHVGQGEAFDEAKLFDLRRLGLAA

SEQ ID NO: 242329 - protein, 341 aa, unidentified
MNGSKNVVGIDIAKRVFQLHSIDMETGEIVSLQLKREKFLEHFANRQTCLIGMEACGGAQHWARKFRAMGHQVKLLPGKAVKGFVTGNKNDRHDARAIWTAVQQPHVKAVAIKTEEQQAMLALHRMRSQLVKFRTAQINGLRGLLTEYGEVMPQGKAGVRKGITDALARMADRLPAMVIDTLREQWARISKMDEEIATIEQRIKLWLKNNEACKRIAEIPGVGPLTATAAVAIMGDAKTFKSGREFAAFAGLVPRQTGTGGRIKLLGISKRGDTYLRTLLIHGARAVLTTAKEPGPWASELRQRRPLNVAIVALANKMARTIWAMLAHERTYQREFVSQPV

SEQ ID NO: 242330 - protein, 368 aa, unidentified
MNNSVITNTELSSHEGTRCQFNGGRCAIKVGIDVHQDFYVVVVQEGGANPKPPQRFRKEAFLHWAVKLARSASEVHAVYEACGFGFTLQRNLTALGIDCYVVCPQKLDEQNRRVKTDGLDAKALCLKLDRFVQGNRDAMAIVRVPSEEEEQARAIHRQREQLVKARKQLEAQGRSLMVNHGLEPVQNWWKRGNFAALPAPQWMKELLLNSQPILLALQEKIAALTIQLQSAADPKQPRGLGAMTSVIIDREIGDWRRFSNRRQIASYTGLCPGEYSSGNTRLQSCVTKHGNPRLRAALVELAWRLVRFQPHYKPVVKWRQILAPQPRGALATGAARKKAIVAVARQLAVDLWRVRTGRCKPEVFGLEI

SEQ ID NO: 242331 - protein, 339 aa, unidentified
MTIVMGLDQHRAQVTTEWLDTVTGEIGRARVVPAHREGVRRFLRRFADQELEVALEATTGWRFVVEELRRVGAEALAEPAQTSALRGNKKRPKNDRADARHLRELLMIGRLPESWIPPDHLLDLRAKVRLRHTLVDQRGEWQQRIRAVLYHHGLAHRRELHLLSGEGQAWLEQVELSDAAREQVTVAIAMTDALNVQIAPLDRQLRLYARRQAGCKALMGHYGIGELTSVAILAELGDCRRFSSSRQAVRYAGMDITVYQSDQRRSPGHLSRQGPPALRWALYEAAQVARHAGSPDRGYYDQAAERLGSNRACVAVARKLLMRAYHTLRELGEEALQPA

SEQ ID NO: 242332 - protein, 352 aa, unidentified
MTSAKYVGMDVHKDITVIVVLSEAGHVESRTQVKTKAENFRDFFRGLSGRVKVAFEEGTQSAWLYQLLKPLVAEVTVCDPRHNKLIGDGNKSDDDDAETIARLLWVGSLKAVYKGSSEQQQLKEFCRAYENLVEDATRAQNRLKAIYRGRGIDCSGTKIYHPDRRAEYLAKLSDEAARFRAESLLDQIESLRGLRKQAKNRFLEQARKHPDYPILASLPGFGAVRVGELLAIAITPDRFRTKRQFWPYIGLAVVTKSTSDYKEVEGRIVKMQKVSTRGLNWNHNPRLKQVFKGAAKSALRHAEIEAYYQRLVERGRRPSLARVSVARKLAAITLTLWRRKEKYDPKKITAQS

SEQ ID NO: 242333 - protein, 412 aa, unidentified
MDNKIFIGVDVSEATLEVAFLRCDGTPIRPNQTFTNIPEGHRDIKGAVIAAARLIGRKTKIIVGMESTANFHKNLELALRNNKPQNIEVHVINPRCIKNFRKMNLKVFKTDKFDAQLIALYLAKIQPKPNVPDIEGQEELKELTRLRRSYIEESTKFKNRLRKLLRRYFPGYKQQLGTQISIKMLVAFSKFGEPDEILKKNINSIANTKTAFRHKVGTDFSSALTQLAKQAPNRKLNKGVVIAIKLTAQRILDIMTQIKLFEELIEQTLNDYFPDHKLHSVPGLGSISIASIIAEVGDINRFESVDKFIGYTGLYPVVWESGEMKVRFKMTNKGNKMLKMTFLIASAPARKFNPVIRFFYDRLRANGKSKKAAGGAVARKLAVIVFTLLYRNEEWNPKIATEYLERFLKMTG

SEQ ID NO: 242334 - protein, 382 aa, unidentified
MKGNVCGLDVHKDNVFVCILKENGEKILFRVGILTPDLDSLRDMLVSHEVGEVCMESTSFYWMPVWRVLESDFHLWLVNPFAIKQLPGRKSDVKDGEWIATCLKKDLIRGSYVPDAVIQQLRQYNRRVFDIVREMNFLHNKLDALLQRCNIRLSNYVSNVDTKAYREVSMKLAEGVTDSDELLKSVHKRTRNKWGDDVLRAALTGVVTEVDSELIAMYMEELELLRTQKVRCLTRMREISQKHFPKQLANLQTMPGVREQSATQIIAEMGVDMSTFLTAAMLVGWAGFKPRNDESNGKMKSRKTTHGNKYLRKLMVECAWGATRTKECFYSRFSYHQTQVRKKNAMKVRVAVARKQIVAIWHILSEECEYKEYCAQQETGKD

SEQ ID NO: 242335 - protein, 343 aa, unidentified
MKVTTIGVDLAKSVFQVHGVDERGYVVVRKQLRRDQVAVFFANLPACLVGMEACGSAHHWARKLQGFGHCVRLISPQFVKPYVKGNKNDAADAEAICEAVARPNMRFVPIKTVEQQAVLSVHRVRQGFVKARTAQANQIRGLLTEFGLVLPQGITNVLRRVPQLIDGAADLPASMRQLIERLLENMKVLDRQVKELEAQIKAWHQGSELSRKLEKIPGIGPLAASALVASIADARSFKNGRQVAAWLGPVPKQDSSGRKPKLLGMSKRGDTYLRTLLIHGARSAIVAAQRKDKPNVWLSGLLARRHPNIAAVALANKNARTIWALLAHEREFRPDYVPRPVIA

SEQ ID NO: 242336 - protein, 386 aa, unidentified
MHDGTNLPVPERTGIPGDCATLFVSLELSRSTWVATSLAPGSKKMSKHTLVGDDGRKLLDLLARLKTRAEQRIAAPVKVVAIHEVGLDGFWIHRLLEANGVESHVVDPASIAVPRRHRRAKTDAIDGETLLRTLMAWQRGEPRVCAMTVPPSPSEEDCRRVSRERATLLRERIQHTNRIRGLLFGQGITNYNPLHKNRRECLEELRTGDGRSLPTHVKAEILREIDRLELVLRQIGEVEAERDEILRPAEASSPAALLIRLKGIGAEFATVLYFEGLFRHFENRRQLAAYAGLAPSPWKSGSIDHEQGISKAGNPRLRTTMVELAWMWVRYQPDSALSGWFRQRVGSERGRTRRISIVALARKLLIALWRYVTHGEIPAGAVMKPV

SEQ ID NO: 242337 - protein, 402 aa, unidentified
MNAVGIDVSKGKSMVAALRPMGEVALLPQEFLHTEVGLEQMAYAIIALGEDTRVIMEATGRYHEPIAAALHEYGIYVCVLNPLFIKQSGGGSIRKVKTDKADAMKIAKYGLDNWVDLREYTPMDTVRQQLKLCSRQYNLYMKTVVSLQNNLISLTDKTFPGVNELFSSPERADGHQKWVDFVMTFYHCDCICRVSENAFAERYQKWCKRKGYHFSAEKAQDVYLGSCGHFTTLPKNDNTKLLITTAAQQLLAGKMTLAALRTEMTRLAKQLPEYDIVRAMYGVGETTAVQLMAEIGDVRRFPRRSSIVGFAGVDPAVDQSGKHSAKSVPTTKRGSPHLRKTLYQIVCTYLKKSPVDEPVYQFLDKKRSEGKPYFVYMTAAQNKFLRIYYGRVKEYLATLEEN

SEQ ID NO: 242338 - protein, 385 aa, unidentified
MSKKRNKVCGIDVHKRFLVASILDNEGNCETKRFEQDLDELISLKNWILDSGCESVAMESTAEYWRPAYGILNPEINITIGNAYHMKGIPGKKTDLLDSQWIAELELNNLITPSRVFTGDLYELRTLTRARNKMVNNSTVFKNKILHQLDVCSIRLCTVLKDVFGKSGYALLKGIVERKTQDEIIKALPAKTRKIAPVFFEQIPEYIPDSAIFLIDSMLKIYDNLQVEIKRIEERIKFYLKDKENELRILMSVPGIGIVIGSNLLAEIGDIRDFPTADKLAKWAGLTPSVYQSANTNYTGPITKQGSKYLRWALIEAAHSAIRRPGKLNDYFNGLLPRKGYKKAIVAVARKILRIVWHLLINNEIFEDGIPRVKTVKIPKFPEKN

SEQ ID NO: 242339 - protein, 319 aa, unidentified
MNTLPETVPTVHAGLDVAKATLQLHLQGRQHALPNTASGHGQLLRLLRAVPGAHLVCEATAGYEQPLVAALHAAAIPVSVVNPARVRHFARAQGRPAKNDPLDAAVLTAFGQALRPARTPVPDAGLTELRALVRWRAHLLAQRVATGNRSEHGATDFVARQQAKLGRQLAAQIEAAETELRAALKRLPRWQAALAQLTELDGVGFLTAVAVLSQLPELGRCNRQEAAALAGLAPWTRQSGPWEGQRHIGGGRAEVRQALYMAAVAVARMKPTVLGQFYQRLRDAGKPAKVALTAVMRKLLLQMNRVLQPKAESPTPKTA

SEQ ID NO: 242340 - protein, 348 aa, unidentified
MNNTPQLFISVDIGCRQHSVAIGLPNGDLLDEFDIFHRPEGFKQFFERIDHHCLQHGKEVAVAMEGYNGYARPLDSLVKVRGYQLYNINNLKLARFKKIFPAAAKNDRIDACKGLELFQLRNHLPLAKDVLQEVMPTPQENDMLKRLSRRRRSLVNEKSRLQGRLQTDLHAVCPGLLDITKNADSLWFLNFIASVDELTKLSRLRLSTLNKINGIGRKYAAIIKAWQPSASFSHEVEWVGEMIIADAQRILALKSDIKALELRCKTLMNDSRIAQLIDSVPGFAVICASELAGEIGTIDRFASERSLALYLGMANLDNSSGKFRGSKAPKHVNKRAKGAMMTAVDRRT

SEQ ID NO: 242341 - protein, 349 aa, unidentified
MKTEIAVLGIDLGKNSCSLAGLDGTGAVIKRRRMRPETVVTFTKELPPCVIAMEACCGAHHLARLLAAQGHDVRLMSPEYVRPYVKAQKNDDRDAEAIAEAATRPTMRFVSMKTEEQLDMQTLHRARDRLVGERTALINQLRAILLERGVTVPQGRSKLERSLIEMFDGDEAEPPATLTPRLRALIADMRAEWRELDRRITAFEDEFVARTREDEAARRLISIPGIGVMNATALIAAIGNGETFSRGRDLAAWLGLVPRQITTGGRPRLVGISKRGNKYLRKLLIHGARAALPSLLTSSTPLGGWLRGLTARVHKNAVVVALANKLARIAWAVLRNGGTFDARSASGMA

SEQ ID NO: 242342 - protein, 449 aa, unidentified
MSRPQVIDDEEHERVHDRVAAIDVAKDTGMVCTRTPHPSRPGAQRASVWTVRARMNAIRVLGRQLRKDGIEIVTLESTSDYWRIWFFVLEACGLAVQLVSAAQAKNLPGRPKTDKLDAMWLARLTEMGLLRASFVPPKAIRDLRDYTRARTRLIHERSRCWQRLEKLLEGALVKLSSVASKLTTLSAQDMIKAMIAGQRDPEILAGLARRTMKAKHDALVEALDGMFDDHHGELAQLLLDQIAALDAKVAQLGARAAELAAAIPGGWGIDPDGTTGPGAGTGPDAPVLNAVARLAEIPGLSPDLARTIIAETGLDMTRFPDAAHLVSWAGLCPSARQSGPRTRSGRKGRGDTWLRGALGQAAVNASRTATFLGERYGRIARRRGKAKAQVAIARSILVIIWHLLANPEARFTDLGPGYYQTRLDTDRKLRNHLRQIQALGFTVTLTKAG

SEQ ID NO: 242343 - protein, 320 aa, unidentified
MTYIGIDVSKDSFVAAYPTKSGYTTKTFPNTTTGVRKFVNSLPADCHCVMEATGNYSMLLLYLLQQANIIVSMENPQKIKHFARAMLSTTKTDEIDAKLIATYGEKMTPVPYKIPSESIIMLKQKRTVLRQLKKQLTATINLQQSLAVLPKQDPASKVAIEQTVKFLRKQISKMEEEITNLSNKEFGRQVKLLTSIKGISVTIASALILATGGFTYFSNAKQISRFLGLCPTYQQSGTSVNFKGHINRNGDTHLRSQMYVAAFASIRCNAACRETYERLRARGKSGKLAVVAVANKLIRQAFAVVTNNQPYIDGFVSSYA

SEQ ID NO: 242344 - protein, 521 aa, unidentified
MPRPRTSRPRKVRKAFVLQKPCGQLTPRVQAVGAEHFGIVAVDCAKARSRYFLADFYGRTLLEPATVAHNRGDFQAAIDRVRQAMRQHQLADLVVAIERTGEYHRPVQHAFRQADFETRLVHPFTSKQYRQPADPGNKTDDTDLAAIWRATTHGFGLLEPTWPDNYLTIQLLRRHRRDLVDKNTILQCQIREVLHAAMPGYAELFCHFWDDSPAPLVFARHTTSADAVRQQGIAGLQQIANRAGLRCRTDTFHKILAWAEQAAPASGNVLDRCRILIGLDDDRLAKTRQILELERDLAHRVVHTPYLLLMVIPGINVVTVADLAGELGPISLYVNANAITGRAGLMPSRYQSDQVDCANGPLRRRGNRRLRAVLMQTADNLVQCNHYFHARADQWTRAGKDARWVRVKVAKIFSRLAFAMVAGEQLFPHPCCQKRHYIIGKLLSFHSGHGTELQAMRHDLEVAAAQLPAKQRALEAEPLQKQLDDLANRRGPQPLAEIIPLVLARLAGRVVQSTPSESAGP

SEQ ID NO: 242345 - protein, 370 aa, unidentified
MGKYSEVFVGIDTAKRKHAVAIADAGRDGETRYLGEIDSAPATVERVIKKLASKYEKVRICYEAGPTGYGLYRQIITLGHECTVVAPSLIPKKAGDRIKTNRRDAVTLARLFRAGELTSVWVPDAVHEAVRDLVRARDTAAADVRKKRQQLLSFLLRHGRIYSGSKHWTRAHSRWLAAQAFEHPAQQIVFQDAVDAIEDCVSRLHRLEEQLYAIVPNWSMAPVVDAYQAMRGVSFIVAVTFVAEIGDVRRFENPSQLMAFIGLVPSERSTGDNVRRAGLTLAGNRRARRALVEGAWTYRYQARVSAKLQKRLEDIPKPVRDIAWKAQVRLCGRFRRLAAIGKKRPVIVAAIAREMAAFLWAIGRHVAPAS

SEQ ID NO: 242346 - protein, 403 aa, unidentified
MNAVGIDVSKGKSMVAALQPGGKLLARPFEVLHTKSGIKELISFVHTLGADTRIVMEHTGRYYEPLLQWLAASDLFVTAVNPKLIKDFGNNTLRKVKTDKADAKKIARYALDNWVDLRQHTGMDTTRTQLKTLNRQFAFCMKQKTACKNNLIALIDQVYPGANTYFESPARADGSQKWVDYVCTFWHVDYVCAMRLSAFTERYRKWCHRHGYNFQPDKPRLLMEKAKDLIAMLPMDKTTKMLVQTSIAQLNVLSKTVEALRTQMIALAEQLPEYPVVIDMNGVGPTLASQLIAEIGDITRFPRRGSLTAFAGVDPGAKQSGTMQLKSNKTSKAGSPHLRRALFQIVSGLLMRSPDDAVYNFMDKKRSEGKPYYVYMTAGANKFLRIYYGRVNEYLAGLSQEQE

SEQ ID NO: 242347 - protein, 306 aa, unidentified
MDMTTLGIDLAKQVFQLHGVDARGRVVLSRRVKRSQLVEAVASLPPCVIGMEACGSAHHWGRMFEQLGHTVKLMSPQYVKPYVKTNKNDARDAEAICEAVSRPTMRCVSIKTVEQADLQALHRTRSLLVKHRTAVINQIRGLLAEYGWVMAQSPEKVRPALVRFLEDAESGLTAFSRETFSELYEQLRDLDARIERVTHRVEGVYRAHPVCRKLVAVPGIGPLTAPALLATVGRPQAFHNGRHLAAWLGLVPRQYSSGGKARLGGLSKRGSRYVRTLLIHGARAVVQRAERRVDTQGRWLMSRRWP

SEQ ID NO: 242348 - protein, 355 aa, unidentified
MNDAKYIGMDVHQATISVAVRDSRGNLVMEAILETKAETILQFIRGLRGSLYVTFEEGTWAAWLHDLLQPHVTRVLVCDPRKNALLKVGNKDDRIDARKLSELLYLNKLHPVYHGEHGIRALKELARSYITITRDLTRVMSRLKAIYRSGGIPCAGKQVYAPRYRAEWLARISEPGVRRRAELYCQQFDALAALRQQARRELLAEARKHPAMRLLRQIPSIGPIRAALLIALMQTPPRFRTKRQLWAYCGLALRTYTSGEYRFVSGQRKRSKKVLAVRGLNIHHNHDMKNIFKGAATRAASTAGPFQDFYEACVTRGMKPHLARLTLARKIAAITLLGWKKGVRFDAEHLKQQAA

SEQ ID NO: 242349 - protein, 342 aa, unidentified
MNLPIRIGMDTSKSVFQLHGVDENEVVVVRRQFRRAEMIRYFERLPPVLVAIESCGSSHHWARLLQSFGHEVKLIPPQYVKAYVKRGKNDAADAEALCEAVTRPSMRFVPVKSKERQAACMLMTVRERLVSVKSQLSNAFRSYAAEFGIVGPAGRQNVTALIKRVLEDDNLPEMARDLFRLQAEEYAAVEARLAMIEAKLMKWHREDDVSRRIATIPGVGPIGSSMLSMKAPPPETFRSGRDFAAWLGLTPKDHSTGGRQRHGGITKAGDSVLRSTLIVGATALLRHIRKGRRKPTPWLASLLERKPPKLVAVALANKFARIAWRLMLSGGVYNQPVAAMPI

SEQ ID NO: 242350 - protein, 421 aa, unidentified
MRFYTTPHRYYCGIDLHARRMYICVLDADGQIRVHRNGPATPEHFLTTVAAYREDLVVAVECIFTWYWLADVCAREGIAFVLGHALYMKAIHGGKAKNDKIDAHKIAVLVRGGMLPMAYVYPREMRATRDLLRRRCHFTRKRAELLTHIQNTASQYLLPTLGKIAYHGNRVGVAEQFRDPEVRKSVETNLALIDEYDRLLTALELHLTETAKVHDVNAFYRLRSVPGIGKILALVLLYEIHDIHRFPRVQDFVSYCRLVKCAKQSDGKHYGYSGTKIGNAHLKWAFSEAAVLCLRKNPPAQRYVARLAHKHGKGKALTILAHKLARAVYYMLRREQAFEATKFFRLPPRGDQPARPEIEGGPRGDGHDASRSRPPRHDLEGGRYPDPPEIKRRASRRRVHDRDGVTTERAGSAVERVEAER

SEQ ID NO: 242351 - protein, 413 aa, unidentified
MDKIYDICCGIDVHKKLIVACLNHKRKKELREFGATTRELMELAEWLQKNECEIVAMESTGSYWKPLYNIMESYGLHAIVVNPAHMKAVPGRKTDVKDAEWIAELLQHGLLQPSYIPSKDQRELRELVQYRKSLVGERTRELNRLQKMLEGANIKLSGTVTNINGKSARKILEYILSGNEIDEKKYDEMYEEKLIAHNLKASKEQILDDLKGFMSPLQRRMLKELLQHLDELNVHIENLNDEIDNFMKPEEKQASQVIQDVTGIGNTSAQTIIAVIGTDMERFPSDRHISSWAGLCSGDNVSAKKRKSGKIRKGNALLKSTLVLCAHAAVRHKSSYFHAQFKRISTHRGKKRAYVAVAHSILIAIYHILKDGVKYQDLGAEYYNQFNAERKIHAYLKKLKALGWEPPKEAVPA

SEQ ID NO: 242352 - protein, 440 aa, unidentified
MKIVYPNCCGVDVHKNMIVATVAATDKNGVTRYSAETYTTLNKDLFRFRDWLNSLGCKDVCMESTGKYWIPVFNILEQSGINVLLTHPMYVRAIKGKKTDKKDSKWIADLFKHDLVYPSFIPPAEIRALREISRYRYKLVCMRSSEKNRYQNCMTVSNIGLASVLSDPFGKTAQDVMKQVLTSNVFDEAAYEKLIQKSAKKKTELILDSIRDCNIQSDQRFKMNEVINHVDYLEQSIIRTETELFTRMKPHMDIIVHLAEQVPGISMLSAALIISEIGVDMSVFPNAKHLVSWAGLVPTNNQSAGKKKSVRISKAGQFLKPLLVQCVLAAVKDKKQPYFAIKYQNIKKRRGHKKAVIAVARMMLTCIYHLISTGETFNPSDLLDVVKPSSSKRVPLNEKNAIAFLAANGYDISSLVKLPVPELLSADVLPADAAAEHNSA

SEQ ID NO: 242353 - protein, 397 aa, unidentified
MNLNIGIDIAKNVHEACLVNENGEQIGKFIQLRNSKKSIEKFTKHIEKVSKELNAEPRIGMEATGIYWYSLFSELSKKYKIHVYNPSQISGFASVNIRESKTDKIDAKTIANMLRFGESPKTNYSDTQRLELREYGRFYFKLTSIKINLKKRLRRNLHLIFPGYDEIFKNLYTATSKEIITNITTPEKVLEMGEKKLLELMKDKSKNHIDPEKAKILMEKAEDTIPSEIIKESSLFEFQMMLEMIENYEKQIASIENKMMSIWNKVREKHYIQTIGGVTELRAAMIWAEMGNVDDFKHPDQIVAFAGYDPKVRKSGNKEVIGGPNKRGSKILRWVLGWTVQEAKCSNPVLGQYFDKKIEQGKHFNNARCAAAKKLIRIIWSVDKNKKPFQIPCNLIS

SEQ ID NO: 242354 - protein, 361 aa, unidentified
MKNKPITDTHVNSTKTQTSVKAKRIKLGIDVHADSYRVVRQIDHATPQPAQKFSPQEFLRWAEKQLTLAEEVYSCYEAGPFGYVLHRQLDKLGIRNVVVRPQDWDELHKGVKTDKTDALALAQRLSRYVDGNTKELAIIRVPTPEQEMARSQSRQREQLMAHRQRLEAQGRSLLLFNGYRIKGHWWRKHEWEDLQPKLATALLELLTVLRELVVVVQEKLEAATQRLQNAASVQPLGVGAMTSQVLEREILDWNRFDNRRQVGSLTGLCPGVHASGGRSRTGPITKHGNRRIRTALIELAWRGLRFQPDYGPMKKWRPVLLNSRATGAQKKKAIVAVGRRLAIDLWRINTGRSTAAQLGLK

SEQ ID NO: 242355 - protein, 420 aa, unidentified
MKEPNIGDFACLIGIDWADRKHDFCETDDQGKTYAYGVISSKPEAIHEWVMSLKERYPNQQIAISCELKKGPLVHALLKYDHLTIFSINPSTVAKYRKAFVHSGAKDDPSDAKFQVDILRLHMDKLRVIEPDSADIRALGQLVEYRRKLVQDRVDLSNRIAGILKSYYPQVLEWFKERDTIIFCEFVSRWPDLATAKRARKSTLINFFNQHNSRYTTVNESRIASIKAAFALTHDAGIIDPNRLMITLLVPQLKLLIEAIDAMDKDIKARYKAQKDKAVFDSFPSAGPQLAPRLLVAFGSNRERYESAADMQKYAGVAPVIERSGKKSWTHWRYSCPKFIRQTFVEWAGQSVRFSFWAKAYYQQQIEKGKPHNTVIRALAFKWIRIAFSCWKTRTVYDESKYLEALKKRGSPLLQYAANS

SEQ ID NO: 242356 - protein, 370 aa, unidentified
MFEHTFIGLDVHAVSVVACALDQRSGELERAAMAAEPAVVLDWVRRFEPPVKAVYESGPTGFVLARALRDAGVDCVVAASSKLLRAPGDRVKTDRRDAQVLAEMLAVGRVTEVRIPDPEQEALRDVSRLRASAARDLAHARQHVNAFLLRHGIRYPKEHKWTLEHGAWLRRQHFHDPVLQFTYDSAVEQAELLNIRLRRIDQHLAIIASTCQYAPVINALMCLRGIQVVTGFGLAVEIGDWTRFTGSSIGSYLGLVPSEQSSGPSRRQGPITKAGNTQARKLLIEAAWQHRRPFSGPTGRLARQLDLVEPATRIRALEGNHRLHHRWHNFDARTKTPVKANTAVARELAGWCWSLAAPLQHEHAERMNAA

SEQ ID NO: 242357 - protein, 372 aa, unidentified
MLYGEALDFGNIDNPRSFTTYTTFSSVRPRPRFQVVVAQVAGSFINSVPMNKYKETFGVDISKDVFDVHGSGSGHQQFKNDEKGFASFLKTIPKGSLVVMEATGYYHYRLAQFLNKNSVVVSVVNPLSVKRFIQMKLAKVKTDKSDAKAICGYALANEVPLYNALTDVQAECLQLFRLMDSYLKKRTATKNKLHGEETLGIPSKFVYRSLKRDKKHLDKELAGIEERLLELVKQEQQRQLTLLQTVPGIGTRTALFLIVVTDGFSRFETGAQLCSYVGITPTIRESGSSVRGRSRISKVGNKKLRNLLFLCAFNACKHNKGCRELYERIVNKGKSKKLALIAVANKLLKQCFAIAKSGLPYDAGFVSVLAVK

SEQ ID NO: 242358 - protein, 424 aa, unidentified
MKVTYQTCCGVDVHKSFLVATIIKTTAGIEPSYQKKRFSTFNNSILDFKSWLLENKCHDVCMESTGKYWVPVFNLLEDQINVTIANPKWVKAVKGNKDDTKDSKWIGDLFRLGLVKSSYIPCRLIRILREYTRYRYKLVSCRSSEKNRYQNALTVCNIALDSVVSDIFGKSSSSIIDYLLEQSGTTINHEEIASKLLKSLKSKEDAVIESIEGYQMTDAQKYRMRLIRAHMDYITAEINDIDKQIESLISSDPDYDKAIRLLTTIPGGKRDSAITIISEIGIDMSQFCNSKRLCCWAGLTPSNNESAGKKKSVRITRAGVYLKPALVQCAHAAVKSDKSPYYKTKYESLVKRRGKKRAVIAIARMILIAIYRMLSTGEVWNPSDLYKIDMPAPLAEKQKAKAIKQAKKLLQKEGLLPPDEPLAS

SEQ ID NO: 242359 - protein, 431 aa, unidentified
MEILHPCCCGLDVHKETVVACVRLVTDGKLVKEVRTFSTTTASLIELSEWLTETKCTHVAMEATGVYWKPVWHILADGGFELVLANAAHIKNVPGRKSDVKDGDWISDLLAHGLIRASFVPDGPTQQMRTFLRTRKQFVHEKGSHILRIQKTLEDANIKLDSVITDIIGVSGRKMIEALIDGEKDPAKLADLADRRLKASQQTLRQALRGRVTPQHRFLLRLHLDQIDALDAAIARIDREVEASIAPFRTAVEQVMTAPGVKSLAARTIVSEIGIDMSRFPSSGHLISWACICPRSDESAGKRRSTRIRKGSPWLKTTLVQCAWAATRKKGSYLQAQYYRIRARRGPKKAIVAVAASILTAIYHMLKDGTMYQDLGPNHFDARAKQRQKNRLIKRLADLGYVVELFRTELDASAPLLCNAVVAQITRIGTE

SEQ ID NO: 242360 - protein, 368 aa, unidentified
MIMIGCDFHPGMQEVSLLDTETGRRWQQLLSHASGPGAVREFYAGLPRPVLVGLEASGYSQWYEEMLEELGIELWVGDPARIRKAAPRKQKTDRNDARLLLQLLEEDRFPRIWVPDKATRDLRQLLMHRHKLVSMRSAVSNQLQAIAINRGIQKKGRLWSERGRAELQALDLPPWASVRRNELLALRKQWDGEIAVLDKVLLETAQQHPEARYLMQHQKGVGPVTAMAVVLTVGPVERFASARKVASYVGLIPAEYSSGARQRLGHITKEGNTFLRWVLVEAATVAVRHDPAMKQMYWRLVERRGKSIAKVAMARRLLVRLYWMLRRRKQAIESRRKGLQRSAVGALGKSATASQGSSGLDMAAPQSR

SEQ ID NO: 242361 - protein, 366 aa, unidentified
MASVSHPAPIHLGLDVHRDTISVGILRPDQQVPVVDRIPHDEPSVRRLVGRLGDPRRLRACYEAGPTGFELARLLHSIGVRCEVIAPSLIPTAPGDRVKTDTRDCRRLARLHRAGELVAIRIPTVREEAVRDLCRARVDMVTDRTRARHRLSKFLLRHGRVWRGGATAWTLAHERWLLGQQFEEPALHATYAHYRAVLQSRDAQLDAIEADLAGWYDRPPFGWQVARLAAYRGVTSLGALTLAAEVGDWRRFPRASTFMGFCGLVPSEYSSGQRTWRGQLTKAGNTHLRAQLVESAWSYQHRPAVGAQIARRQQGLDPQVVARAWAAQLRLCGRFRRLAARKTSKNLVVAAIARELAGFLWAEMTL

SEQ ID NO: 242362 - protein, 376 aa, unidentified
MGTPSAQTLDDVGVRENFQGLEVVPLMTMVGGLDVHRAQITFDYVDDDGLVHWGQIRPATRKTLRGWLAEHCPDGDAEFALEGCTGWRYVSEELAGAGVGVHLGDPAEIAVLRGPKKRAKTDRADARLLRTLLLQGRFPESWIAPAHVLEIRTLGRLYCTLMDERRAWQQRIHAQLFHQGCPPVRALLSVTGRAALAGAELSAVGGQYVDTALGRIDELSTEIEPLRAQLVNFARHQTGCQALQRHYGIGWLCAAIIWAEIGDARRFSSSDQLVRFAGLDVTVYSSDGKRSPGHLSRQGSPELRWAAFEAAKCAARRGSPDYGYYRKLAAKRDGHNGKNPTLAVERKILRRCHHTLRELGDAAVALPVAEPQEVAA

SEQ ID NO: 242363 - protein, 338 aa, unidentified
MAMYCGIDLHSRDCWLAILDDELKVVREAKVGNDLEAILEVLEPYREDLGGIAVESTFNWYWLVDGLEAAGYQMHLVNTWAVKQWEGLKYSDDRHDARWLAHLLALGILPEGYIYPKEERSVRDLLRRRAFLVKKRTSFLLAMRGAFECRTGMRTTSGEVKQWTAEEIESYLDDPAEALGITCLLEPMRSLDGQIRIIEKGALTRARLRDEFAPLLTVWGIGKILALTTMYEVGEIARFKKVGNFASYCRLVKSARLSAGKRKGSGNRRNGNPYLSWAFSEAAHFAVRYHPPAKKYFQRKRSKTNGIIAIRALAHKLARASYYVMKDQVDFDSERVFG

SEQ ID NO: 242364 - protein, 318 aa, unidentified
MPQKTRFVGLDVAKSKVDACIRSEGLRLSAPSTPEGRAGLVAWVRANRVGRAVMEASGGYERGWAEALRAAGVEVRIVDPKRVRHFAKAAGRLAKNDPIDADTIAWFAEAFPDREAQPHDPARDEIDRLVAARTALKDAEDRIKQQGEHRPPAVVAKALAAIAKTIRAELRKVEGAIAAKIKANPGFARRAEIIASVPGLAAQTAAGVIAWLPELGHVTNEAAAALIGAAPYDDDSGGRKGQRHIKGGRRKLRNLLYMPVMGAATRHNPMLKAHYQRLRARGKEAKVALIACMRKLIVILNTMLARDQTWNPPVRAAR

SEQ ID NO: 242365 - protein, 349 aa, unidentified
MGIIGGLDVHRSQITYDWVDPDTGQRQRGQLAPAHREHLRVWLEQFAGRQAAFAVEGCTGWRYVVEELQRVGIQAHLAEPADTSAARGPKRRAKTDQLDARHLRELLACGRLPESWVPPAQVLEVRTQVRCYKALADEHTAWLQRVQATLFHHGVPAQRNLLAPDRRARLERGSGLSPAASQQVTVALRTLDHLDGELDRLRGELVGLARRQPGCRALDALYGIGPVTAVAIWVELGEVGRFTSSRHAVRHTGLDVTVYASDGKRTPGHLARQGPPVLCWALFEAATCAARASSPDHAYYTQVKQRLGGNRATLSVARKLTRRCYHTLGALGEQAYAPPCHPHDLEQVA

SEQ ID NO: 242366 - protein, 475 aa, unidentified
MNIEGSKKKNQVLSVNIFEQQEIIAKADAIKAELKASTWHELETKGKFDKNDKLSFVSDDMLILGCDIGSETHYVRTIDTRGRELSKSAFGFSNTAEGFERMLDWSTKLAAANDKKQIVLGLEPTGHYWFCLTTWLVAKGISVVQVNPYAVKQTKELEDNSQLKDDKKDPKLIANLVKDGNFGMPYLPEKLYADIRRLSMFRDQLNEDRIRNLNRLHREMKIYFPEYKDAFGKIDGAFSLELLKEAPFPDELAALGTEGMKQIWHEAKLRGRGYANASSILEYARKSVGIKDGSDAGRQAVKWFVSRIIELDEQLSDIENQLNQRCNEIPYAKNILAISGIGENILSGILAENGDISRFDNVKKIQKLSGLGLVACSSGKHTGETKISHRGRKRLRYWLFQAAKSAVAHSEEFKELHVYYTTRKQNPLKKMQSLIVIACKILRVIFTILTKGTAYDPKKLLGDIVRPDQSIPQAA

SEQ ID NO: 242367 - protein, 380 aa, unidentified
MSETKNRGGYQASAETLYLAFELGNTRWQLGFTIGLGQSPRRRTIEAGDLVGLRGEIRRAKKRFGLAVEARVLSCYEAGRDGFWLHRYLDSQGIENLVVDAASIEVNRRARRAKTDRLDVAKLLTMLIRYDSGERKVWSVVHVPSLAAEDSRHLHRQLSTFKADRTRHSNRIKGLLVGQGVRLSMGTDFLARLDQVRLWDGKPLPAGLRSRVAREYACFEFVDEQVKVLEAERRQLLRTSTEPSIAQVRQLLRLRGIGENSAWVFVMEFFGWRQFRTRRQVGGLAGLTPTPYQSSEQAREQGISKAGNRPIRSIAIEIAWGWLRHQPQSQLSLWFQERFGHGSKRLRKIGIVALARKLLIALWRYLTEGELPAGAQLKAT

SEQ ID NO: 242368 - protein, 349 aa, unidentified
MNRTTYGLDIAKNVMQLHWVDNETGEIGRKKLGRAKLSDFFARLQPARVVMEACGSAHHWARVLGALGHQVELLPARQVRPFVRSNKDDAADARAIWLAAQQSDIRRVPQKSVEQQAALALHRTRQHWVSVRTATINALRGALYEFGVTLPGGKRVGLKALATHRAEIDAKVPATIQRLIDGQLATLKDIGCRIDKLEAEIGMQLEQLDNAATLREVPGIGLLGATAFAATLGDGKAWKSGREFSASLGLVPAHRGTGGKARVGHLSKRGDPYLRTLLIHGARSVIAHAKNKPKWLEQLLARRPMNVAVVALANKMARTAWALVAHGRDYEREWKSTPPKGCTAQASAA

SEQ ID NO: 242369 - protein, 343 aa, unidentified
MDHFAGLDVSVKETSVCIVDDTGRISREVKVASEPDALLAVLTNPAYHLKRIGLEAGPLSQWLFSALAEAGLPVICVETRHMRAVLKAQINKTDRNDARGIAQMMRAGLYRPVHVKTLRSQKLRMLLTHRKLLQSKAIAIENDLRATLRNFGLKVGVVGTVKFEARIKELVENLPDLTVLVEPLLIVRRVLREQIGILHRRLLAIVRDDDVCRRLMTVPGVGPVVALTYRATVDVPARFKNSKAVGAVFGLTPSKYQSGESDRTGGISRCGDEMMRAMLYEAAQIVLVRSTKWSWLKAWAMKIARHRGMKKAIVALARRLAVIMHRIWVDGTEFRWTREAAAA

SEQ ID NO: 242370 - protein, 420 aa, unidentified
MYYCGIDIAKREHEACVLNDRGQEVFHQRFKNRRLDANRFVRQLQEKLGAKPEEVTVVMEATGHYWLNLYGFLTQRGFQVRVLNPIQSDAARNLYLRKTKTDARDAFILADLLRMDRVSDSRQPNDGLLRLQALERFRYELVSRIGSLKQRVLGILDRIFPEYEILFSEPFVRSSRELLMNYPTPEELAAADLSELAALLSKASRGRLGEEKALEVQNLARNSFGITLGLDSFALELKLLLAQIEFLEGQVETVEAAIDQALTEVCAQDKVEEKKTETTAEKLPRHVLETVPGVGPVVLATFLGEVPDISTFTNPRRFVAFAGIDASVKESGEFQGTRMHISKRGSPYLRRALWFCAQAAKRCDERFNAYYQRKLQEGKHPKVATVALMRKLAVVIYYIWRSGKPYDPEYVWKPTPSLSN

SEQ ID NO: 242371 - protein, 396 aa, unidentified
MKTYILLKSEPVQSQIITAPAGAKPLVLFVGLDVHNDSIAVSLAPSDSTEVRRYGIIGGEHDDVLKLVKKLEAAHPGATLKFCYEAGPRGFALSRCLRSHGRDCILVCPTKVPRKPGERVKTDRRDADHLARLHRAGELTGIYVPEPEDEAMRDLIRARFQVGKQQHRARQQLKMYLLRHNRRYGGKSSWTPAHLRYLARIKMPFPVQQIVFQEMLEVISDATARLERYDQEIERAVPGWRWEPAVRALMSLRGMALLHAATLVAELGDFNRFEHPGQLMGYLGLVPSEHTTGGDRQQGGITKMGNGPARRALVEAAWQYRAPARLSPHLKKRQEGLPKTITDIAWEAQRRLHHRYTHLTRVGKKKSQVAVTAVARELSGFVWAIARQVKPRAAKP

SEQ ID NO: 242372 - protein, 356 aa, unidentified
MTQKHLAYNTSDYNIFAGIDVDTKSFVVSFKDHHNMILTIKMPSEPKALYNYIKNRFSNKKVLCVYEAGPTGYHLYDYMKKKNQDCLIVPPISIPKAPNEKVKTNRIDSIKLAQELKSGNIKPIRVPEGPYRELRYLIESRENYVTARKIAKQRIKSLLLVTNNIHLLEPDKHWSKAYISKLTELKCSPAVKTRLGMLLTDLEYTRVQTLNILSSLRNFFKEHKELDEYLGYLRSIPGIGFITAATLLGRIGDPNNLRNPREIASFLGLVPKESSTGDNINKGSITHMGNGILRSLLIESAWIAIGKDTELCQFYHRIKNKNNPRIGSRIAITAVARKLTYIIYCVLREQRNYIVH

SEQ ID NO: 242373 - protein, 390 aa, unidentified
MSEDAPRPAQAAIRTELGAIFVSLELSRRAWLITSLSPGGGEKMSKHSVPASDVPGLLCRFAELRRKATARTGRDFPIIVIQEAGLDGFWIHRVLQSEGIESHVVDAASILTSRRRRRAKTDRIDGETLVRTLMAFKRGEPRVCSMARAPTPQEEDRRRVCRERRTLVGDRVRHVNRIKGLLFAQGVFTYEPLRKARRERLEELRTGDGRPLPVHLKAQIIRELDRLEVVLKQLKAVEAERDALLKPAPDEAASPATMLAQLKGIGPETAVVLWSEGLFRPFDNRRQVAAYAGLAPTPWQSGSIDHEQGVSKAGNPRLRTTMVELAWLWLQNQPTSALSLWFHERVRLGGRVRKTIIVALARKLLIALWRYATAGVVIEGAVMKTASATI

SEQ ID NO: 242374 - protein, 307 aa, unidentified
MNKAVVYVGVDVSKAYLDVAWAERSRRFANNKSGLSALMKWIQQSPVHLICEASGGYERGLLEAAEQNAIKLSLVQANRVRQYARAAGILAKTDQVDARVLCAFGSALQPKPRAPLSAQQKQLRELETQRRHYSRMLTAEQNRLAQLNDKELQRLTRRLLAALKKQMAAIDARIATLIAQDQALDEKAQKLTSIVGVGTRTAVLLLAQMPELGTLNRAQVAALAGLAPFNRDSGTLRGKRTIFGGRRALRSGLYMAALVAARHNRILSDFYQRLRTKGKPHKVALTAVMRKLLLALNHTLKPTACFA

SEQ ID NO: 242375 - protein, 366 aa, unidentified
MKKTSTVRVNGNMIFKGHKLTIGLDLGDRWSFYCVLDEAGQIILEQKLPTTPEAMKQTFGKIPRSLIALETGTHSPWVSRLLTQLGHEVIVAHAQKVQWITKSSRKDDRHDARTLARLARIDPELLGPVRHRSVQAQLHLTVIRARAELVSARTALVNAARGLVKSYGQRLPKCGTYQVSRELAAALSTELRDVLEPLFKEIESLNEHIKEYDERVEKIAKEVYPEVSLLKQVKGVGTQIALTYVLTIEDPYRFPKSRQVGCFLGLRPGRRNSGESEPQKGISKEGDRYLRTMMVQGAHYILGPFGEDSDLRRWGRKLAERGGKNAKKRAVVAVARKLAVLLHRLWVGGEVYEPLRNSQKAMREVA

SEQ ID NO: 242376 - protein, 411 aa, unidentified
MLEVKVEKCAGIDVGKKFLAVCILIGLAKQKPVGEVRRFGTSVKELERLRTWLLESGCTEVVMESTGSYWKPVFNILEGSLKVILANPEQVKALRGKKSDPNDSRWLASLLRHGLVQGSFIAPRDIRELRDLTRRRRRLVGDGAAEKNRVQKILEDANVKIGNVLSDVFGSSGQAMLEALLENKQGPAEIAQLGHWSLAPKIPLIVEALEGHRMSDHHRFMIRQCLGHMRHIEEMIEELDKEIGVRLKPYPQQVKLACTVPGIKPTAAASILAETGMDMSPEGPFPDCHHLASWATVCPGNNESAGKRKNGRTRPGNRWLRATLTPTGWAGAADKKSLFQFRYQRLKLRRGGQRAVMAIAHAQLIAIYWALRNGTPYPEQLQKLEQDRREAQIRYHLQKLNKLGYAPDMHG

SEQ ID NO: 242377 - protein, 366 aa, unidentified
MENIRYVGMDVHKETIYFCVLESHGSKPIFEKEILNEPWRIRKIFESLGDFKSIHSCYEAGCLGYPLHREISTLGVKNIIVAPGLIPRKASDRIKTDRRDAFTLANMLRGGLLEGIFIPTDADEVVRDFLRMREDFKCELTHARQRLSGLLLRHELRYDRGAKNWTLRHFKWLSEIKTESHVFQSVLDEHIIHVTELGLKLKEISNRLVEMALSAPYDRKVKTLMSLKGIDYLGALSLVVEIGDFRRFASAPAFMSFLGLVPKERSSGARKIQSGITKTGNTRLRTLLIEGSWSYRYKSTASAHLAKKRAGLGPSIVAYAEKATKHLEDKYKYLVIELKKDSRVAVTAIARGLAGFVWGVMTENYQ

SEQ ID NO: 242378 - protein, 415 aa, unidentified
MTTPIRLLVGIDWADAKHDFHLTTPQGAAVVGQFKQTPAAITEVVQAWRTISPGATIIVALEATKGALINALLEFEDVVIYPINPAALAHYRKSHAHGGGKNDSLDAKHLVDYLRERIDDLRPLRRDSPLTRELSALVQDRRRFVEQRVDLANQLTAMLKQYFPAILDLNPSKPYAEFFVSLLIAFPTLADAQAAGVTKLRNHLHGLGMKRKADAYAKAIVAAKPLCSDETTIRCMARRAVAIAEQLQTLTKQIKRYESALKELLPTHPDYAVVASLPGAAMKTQARIIAALGDDRGRYQDAAALQAASGIVPITSQSGRSKHVNARWAATTFMKQTSHEYASVSIAASRWAKAYYDSQRKLGKSAHMAKRALAYKWQRIIFRCWQTGQPYDEARYIERLKQTGSPIYNLITAAT

SEQ ID NO: 242379 - protein, 423 aa, unidentified
MKVVYPICCGVDVHKRFFVATLITSEGIIPHYEKKRFSTFNNSILEFKQWLLDHNCLDICMESTGKYWVPVFNLIEDSINVTVANPKWVKAVKGNKDDTKDSKWIGDLFRLGLVPGSFIPNKSIRILREYTRYRSKLVSCKSSEKNRFQNAFTVCNVALDAVVSDMFGKSASSITDYLVNSDAFDPKYCVSLLQKSLKKKADAVVESIEGYQMMPEQKYRVRLIRKHLDFVENSIHQLDDKLNILASTYESELKLLCTIPGVDRVSAITIISEIGTDMSHFSSSKRLCCWAGLTPGNNESAGKKKSVRITRAGVYLKPALVQVAHAAVKSKDNPYYRIKYERITKRRGKKRAIIAIARMILTAVYHILSTGEIFNPCDLCKVDMPLELRDKQKEKALKKAAKLLIAQGLIQKTDLPSLFLQPV

SEQ ID NO: 242380 - protein, 397 aa, unidentified
MYIVGIDIAKRKHEAAVIDGEGTVIIKPFSFTNNCSGYNRLLAMLTKAKLPLDEVSFAMEATGHYWLALFTRLQKEGFRVQVINPVQTNSIRSFYIRQAKTDPRDALLIAEVIRFGHFSESTLHPENIYELRELCRGRHAIVSMQADVKRKVVALLDQVFPEYETAFTNMFGDTSMAILQTCPTPKELSEMRLEELCHLIEVSSHKRFRMAKAQELQALARNSFGFAMAGDVFSTMIRLYAKHLDFLKQQVREMDRKIAEIMDTLDTPITTITGIGPTLGAYILSEIGDISRFSSAAKLAAYAGIDPTMRQSGEYNGVRNRMSKRGSPYLRHAIWLAASSAVLHDPALKLYFQKKRDEGKPYMASVGHACRKMVSIIYAVMRDNKAYTPCIPNEISV

SEQ ID NO: 242381 - protein, 342 aa, unidentified
MEQYVALDVSLKEISVCIIDSKGEVVFEGKTGAEPAMLVELIRSKAPQVKRVGLETGATSPWLFHTLASAGLPVVCMDTRHAHAALSTRPTKSDRSDARGLADMLRMGWYREVHAKSVTSHERRTVLGARHQLVTMRSELDAQIRGILKTFGLILGTGNKDTLIQRAEKLVAGHPVLSGLVAKLADVRRHVTSQIAAIDRDIRHLVHTEPTLKRLISVPGVGPITALAFLSAVDDPSRFKHARDVGPYLGLTPTRYQSGETDRQGRISKCGDTFTRTCLYEAAHVLLTRVHRFSPLKAWGMRLAKRIGGRKARIAVARKIAVILHCIWTDGTEFWWTREKSA

SEQ ID NO: 242382 - protein, 399 aa, unidentified
MFAVGIDISKSKSVAAILNQDGSMHTSPFEFHHTQPELDALIKYILNSKQSATILMENTGHYHYPVLKAFQEAGLPVCMVNAYQIKKFGDMDLRKAKTDKKDAVRIARYALEKSYSLVPYTSMEQKYEDLRFLARQYNQRMLTLKTNKVFLLNLLDETMPGITNILPLTTRTPETSLSVLFINRFKSYGRIKKMGKSRFLDAFEKIARKSRNRQTKTYGLAIYEAALRNITTRGENEYTLAAQDQCLELVCESQKAADSIILKMQTLAETLPEYAVLRSMAGVGDRLGPLILAEIGDIRRFHSGKALNAYAGNDAPPYQSGTFESHNCHISKRGNAALRKYCFEVMQALKLTRPQDDPVYLFLLKKEQEGKQYNVAKMAGVNKFLRIYYARAMETLKQQ

SEQ ID NO: 242383 - protein, 348 aa, unidentified
MKILALDLGKYKTVGCAYEATSGRHRFQASFTTPTGLAQLVSEVKPDRVVIEVCNIAGWVCDLLRGVGVEVQVANTSEDAWRWRKVKKKNDRCDALKAAQLSAVNQLREVHIPHIEVRQWRALIAFRQQLVRRRGKVKNHIRDLLLSEGQILPRGAKCWTQLGLEKLTALAKPFSEIGLHELWRGQLDIELRQLRELQHEIDQVEEKLDVIAKADPRVALLRTIPGVGPRLSEAVVALLDQPERFHKAREVSAYVGMVPKELDSGETQRRGRITKHGSRLVRSLLVEVAWAGLRYNPWVRATFRRISGGKKSRKKIAIVAVGRQLLVRCWAMLRDGTSWRPPALPGIV

SEQ ID NO: 242384 - protein, 350 aa, unidentified
MTIKHYIGFDVHKKTISYCVKAADGNIHEEGILRAIPMVLREWAGKRQEPWHGAMEATLFSGWVYDALKPFASALEIGNPSMMKAISAAKKKNDKLDARKIADLVRCNLLPACYVAPQEMRELRRLLRYRNVVVAQAVRMKNKMSGLLMEVGAEYSKQRLHSKKYFSELLDQLEEVPESVKDLLRLSRGSVEMFETMQRQLLNRLQKDPLLVKRVQLLRSIGGVGEVTALTWALEICDPQRFHCIADAVSYCGLSSALVSSAGKQQRGPISKQRNAHLQTVLIEAAKLAPRWNRQLAELHERERKRGNRNRATLAVARKLVAYLLAVDKSGQAFQVRNPPPAEPGVDKVA

SEQ ID NO: 242385 - protein, 348 aa, unidentified
MTNQPHIIGVDLGKHWFHVMGLDREGAIVLRKKLSRAQLRAFAATIPRSIVAMEACCGSQYWGRVFVQAGHEVRIVPAQFVKPYVKTNKNDFNDAEAIAEAASRATMRFVPLKTTEQLELQASHRIRRRLVHERTAVVNQLRALLLEYGIVTPVGRETFARRWSQTLGSAREQLSPRLLVLIQRLRAHWVTLDGQIAEATQELTAWADRSPLCQRVATVPGVGPMIATALVSAVGDARMFARGRDMAAWLGLVPRQHSTGGKSTLGRISRRGNGYLRQLFLQGAVSAYLWMKRDRSALGAWLQQLDRRRHRPVVITALANKLVRICWKVLTSDTPFRLHPARPVEHAV

SEQ ID NO: 242386 - protein, 470 aa, unidentified
MKRQPRPRARRRAPKPRQSPAALERLHPHAAGIDCGSAEHCVAVPPDRDPTPVQSFPTLTGDLHRLADWLTACRITHVAMEATGVYWIPVFEILDARGVQVILVNARHVKNLPGRKSEVSDCEWLRDLHILGLLRGSFRPADGIVALRGYLRHRATLIESAGSLVQRMQKALVQMNVQLPLVVSDITGVTGLRILRDIVAGQRDPHQLAHHRDYRCHASEAEIVAALTGNYRPEHVFVLQQNLDLFDIYQRHLATCDEAIEGHLAHLAAATTAPPATPLPAARRRQKPRENEPRFDVRTPLYQLTGADLSQIDGIGPYNALRLIAEIGTDMTRWPTDKHCTSWLTLAPQNKVSGGRLLSSRTQPSANRAAATLRLAAQTLGRTQTALGAYYRRLAYRIGKAKAVTATARKLAILVYHTLKGDLRYQDPGAEAYETQDRMRAIRRLRQRADHLGFALVDLTTGDLAEGTVS

SEQ ID NO: 242387 - protein, 334 aa, unidentified
MEQKYFIGIDISKKKIDVAIILSDYQVVFEKIVVNKDKNITSFFKGLMRKLKCSSSEILVCCETTGIYNKPLARVCIELNIDLWIEHALKIKFASSDLRGKSDRKDAMRIAEYCVRYQDRKHLYECPSVAIEELDTLCKVRETLLANKVGIENQLREAKSHDTRKFQQLKELFNRQLKSLEKDLRELELKIEEKLLENNEMRSNVELIKSVPGVGKRTAIQMVILTNNFKDFSSAKHLACYAGVVPFTNESGTIKKKPRISKKANLKLKTLLHLSAMAATRSKTELKQYFIRKVSEGKNKMSVINAIRNKLVHRIWAVIERQTPYVCQENFLTN

SEQ ID NO: 242388 - protein, 343 aa, unidentified
MGIVEVTGGVDTHADFHDGAAVDGNGGLLGVETFPATVSGFEGLLGWLSGFGTVVRVGVEGTGSYGVGLARFLTEADVEVVEVDRQNRQVRRKKGKSDPTDAVTAARAALSGAAVVVPKLRNGPVEQMRVLLVARRSARLQRVQSLNQLRHLVFCAPEPIRVRFKDRPQIGLVKEAAAMRPNPGSDPVTYTTNLMIRNLARRVRALSSETKDIDGLLVDLIDRTAPDLLDVYGMGPDGAATLLVTAGDNPERIRSERSWAYLCGVTPIPASSGKTIRHRLNRGGDRQANAALHRIVLTRMSSHPETRAYVARRRAEGLNSLEIMRCLKRYVARQVFKHLPMAI

SEQ ID NO: 242389 - protein, 346 aa, unidentified
MERITTVGIDLAKNVFQVHAIDASGAVVVSRAVRRSGLLQLLGKFPNCLIGMEACATSHYWARELVKLGHQVKLIPPAYVKAYVRRQKNDAADAAAICEAVARPSMRFVPIKSEAQQAVLMLHRTRALLVSQRTALICALRGHMAEFGIIAPVGPRNVAPLLEILADQADERVPFLARLALRPLARRMAMLRLEIERLDRRLLDWHRSNPVSQRLATIPGVGPLTATALAASIADPSMFRSGREFAAFLGLVPRQASSGGKERLGRISKMGDRYLRSLLVVGATAVLRYAKTGGSTSKAWAQGLLAKKPFKVVAVALANKTARIAWAVMARGEVFREGIEVRAAAA

SEQ ID NO: 242390 - protein, 335 aa, unidentified
MTSIAHTRQVNVTGTICGVDVASKSLEARIGQHGAAGSFPNNAEGIAELGAFCRVASGRTGRHGSHRRGYEQQAFALLSEQGLGVAILNPRAVRQFAESMGSLEKTDRIDAGMIAWYAEVKKSRPVCLAPQSQQHLRALVTRLRQLTEIRTAQLNQQRLVIDRSVQASFTKLLTFVGRQIRDLEQRITKLIEQDPLWRELNQTFRTIKGVADRTVARLMAEMPEIGTLSNKTISKLAGVAPIARDSGKHQGKRIVRGGRPAVREILFIVASVVGRYEPDFIAFQQRLRAAGKPPKVVRIALAHKLLVRLNAKAREVRQHSAALQPASSALLLEKI

SEQ ID NO: 242391 - protein, 351 aa, unidentified
MDIIAMDVHKRYSQVCIQTPQGQYLYEGRLEHRRGSIQRFLERWTPGSPVAIETVGNWYWVADEIEAAGMEPRLVHAGKARQMLGCVVKTDKLDARGINRLQRIGTLPTVWIPPGPIRDQRALLRTRMALSARRTAFKNRVIAELDKYGLGDALYEISDVFGVEGRKRVETLLDALPPHTRYGVTETLKVIDIFTHAMGRMEKRLVRYLKPTETVRHLMSLPGTGLILGSVMAVEIGDIRRFPSAQQYASYAGTTPRVHSSGGKTRYGRCRQDVNHYLKWAYVEAATNASHRNTKAYPHARALYLRIHEKKGHSIAAVAVARHLAEASWWMLQNQDDYREPRQQRVEPMKA

SEQ ID NO: 242392 - protein, 365 aa, unidentified
MSGASPSRRRPSKDNTRASQSKLNDKGGPTVERQYVGIDLHRRRSVIVRRTPAGETIETVRITNDPVALALELAKAGPDPEVVLEATYGWYWASDVLQANGANVHLAHPLGNNWGHRRVKNDERDATDLVDLLRLGRLAEAWIAPPELRELRELVRYRAKLVALRSGLKAQVHAVLAKEGVAVPMSDLFGVAGRVVLDTCELGRAYTTRVESLRDLIELFDREVGMLEGLVNRQLAGHPGYRAVQAICGVGPVLGAIFVAEIGDVHRFPAAPQLCSWAGLTPAHRESDTTVRRGHITKQGSRLVRWAAVEAVQRQRGGTFLQAHHHRVADRRGKGIGKVATARKLLTLVYYGLRDGEIRCLAKAG

SEQ ID NO: 242393 - protein, 376 aa, unidentified
MSAFDAVDGSSTRHESAKDVGAACGSHDSEELPMQTITTIGLDIAKSVFQVHCVDAEGKVILRRQLKRRYVLAFFQKLPPCLVGIEACASAHHWSRELQALGHTVRLMPPAYVKPYVKRHKNDATDAEAICEAVTRANMRFVATKTPEQQSCLTLHRTRHLFIRQQTSVINAIRAHLAEFGIVAPVGRHGVEQLLGIAADVNDKRLPEIARACVAALGAQLRMLKEQILQFDRMITAWHRSNEASRRLDDIPGVGPALATALVASIADPKAFRSGRDFSAWIGLVPKQNSSGGKDRLGNISKRGDRYLRSLFTTGALAVIRYAKIHGTRHRPWLTALLARRPTKVAAIALANKIARMAWAMMAKGERYKEPAALTA

SEQ ID NO: 242394 - protein, 414 aa, unidentified
MQHASNHTLPAAGPGHRTAGVDWARDDHAAAIVDASGQVVERFSVAHTATGIHDLVRRLSKMGAHEVAIERPDGPVVEALLEAGLTVVVISPNQLKNLRSRYGSAGNKDDRFDAFVLADTLRTDRARLRPLVPDSPATVALRAACRARKDLVAHRVALANQLRAHLQRAFPGAVGLFADIDSPISLRFLARFDCQERADWLSSRRLAAWLASVGYCGRVTPATLHARLTSAPRGATSTEGAAQAHVTRAFLAALSTVVQQIKLLSEQIDEQLALHTDAHIFTSLPRAGRVRAARLLAEIGDCRARFPTPDSLACLAGVAPSTRQSGRFRAVGFRWAADKQLRDAICDFAGDSIRANPWAADLYRRAIARGHDHPHAVRILARARLFVIWHCWQAGTPYDPAQHRALQALLKPAA

SEQ ID NO: 242395 - protein, 389 aa, unidentified
MYFVGIDISKYKHDCFIITECGEIILDGFSFKNNREGFELLRYHLDSLDNSQEIKIGFESTSHYSLNLKLFLEKHHYSFMEFQPVSISRFAKALSLRKTKTDAIDSRSIARWLMTVEYKPYPTSFYHIYSLKSLSRLRFSLIKQRSFYLIKITDILDHIFPEFKAFFNNRFGATALFILEKYLSPDKISNLKASAYDELRRISRGKFTMQKFIKLKELAQNTVGVSNHIFEFQLSSMLLLHKQLAHQIEKLEAEITSLTVALNRPIVTITGIGVLSAAVILSEYGDISAFSSPAKMLSFAGLEPAYYQSGQSEFKGHMVKHGSPHLRCAIMNCCLPLVQFNMVFAEYYNKKRSEGKPHRVALSHVAKKLIRVIFTLETKNIPFNPNNLR

SEQ ID NO: 242396 - protein, 316 aa, unidentified
MAKREVWVGIDVSKRRLDVALGVHGELLQVDNDPGGFTVLLEKLGALGPELIVLEASGGYETALVGELVDAKLPVVVVNPRQVRDFARAIGQLAKTDALDARVLALFGERVRPPLRALPDEVGRELKAVTARRRQVVEMLVAEQNRLGQAPRMLHHQLRAHIDYLRKDLARLNRDLDQTLRRSPLWRETEELLRSVPGVGPVLARTLLAELPELGRLSRREIGKLVGLAPLNRDSGMMRGRRTIWGGRASVRAALYMPTMVATHKNPVIAAFYNRLLAAGKPGKVARAAAMRKLLTILNAMLKHHTRWSPLCLPIA

SEQ ID NO: 242397 - protein, 346 aa, unidentified
MNITTIGIDLAKNVFQVHGVDERAKAGLKKQLKRAQVLPFFANLPPCLIGMEACGSAHYWARKLNELGHTVKLMAPQFVNPYEKTNKNDAADAEAICEAASRPSMRFVPVKTGEQQAVLSLHRAREGFVKARTAQANQIRGLLAEYGIVMPVGIDNIVKRLPDILEDGENNLPGVFRQLLQRLGEHLKELDRQVDELNEQIQLWHRENAASRKLADIPGIGPITASALVASIGDAKDFESGRQLAAWLGLVPRQHSTGGKQTLLGISKRGDCYLRTLLIHGARAVIRVSERNVEQADSWLTRIVDRRNKNIATVALANKNARIVWALLAHNREYQSDYVPAVATGA

SEQ ID NO: 242398 - protein, 316 aa, unidentified
MTSKISILAIDLAKGSFQVCAVGPYGVVVFNRAVSRTRLATLLADQPACIVAMEACATSHHWGRIAQSHGHEVRLVPAAYVKPFVKRQKNDRADAEAIAEAAMRPTMRFVAVKNVATQGRAVAFRTYQCMVRQRTQLINALRGHLAEFGLVVPKGPASLKLLENALAEESTDLPEPVRHMGSIYVEQIARLTEVIDRLSDELETSSKTDEQLRRLCTIPGIGPVTAGAVAAFTPDLDTSDSGRNFAAWLGLVPRQRSTRGKARLGSVSKIGQTDIRRLLIVGATSVIRRVVRKGGNANRWLAALVALKPKRLLPLP

SEQ ID NO: 242399 - protein, 342 aa, unidentified
MSESYEGQQFVGMDLHRRRSVLVRMSESGQQLETVRISNDPEYLRQVMARAGEAPEVVLEATYGWYWAADTLAELGATVHLAHPLGVKMFSYRRVKNDQRDAADLADLLRMGRLPEAWIAPPATRELRGWVRHRAKLVGLRSGLKNQVHAVFAGAGVQVTMRDLFGPGGQQLLATTRLAVESRSRVDSLLRMITALDFEIDTFARMLAGRLRADPGYTAVRQIPGVGPVLAAVFVAEIGDISRFARPQQLASWAGLTPKHHESDTTVHRGRITKQGSTLVRWAAVEAVQRVGGHTRLGQIRDRIGERRGRNIGTVAAARELTTLVFYGLRDHHIRCLSARPA

SEQ ID NO: 242400 - protein, 347 aa, unidentified
MFNNNVIAIDLAKTSFHACNLNKHNKLTTNKAFTRKKLQEWLIKQPKSTVAIEACGSAHYWARFVQAHGHTAMLLPPKLVTPFRKGHKTDKNDALAIAIAAKQPEIKTTAIKTVEQQGLQGIERMRQHHSDFITATGNMLRGLVYEFGIVIPKGKAALSREIPFILEDAENNIPDAFRHQFADMFSFYQKSEKALAKVEKKLAQLIKQQKTCQSLISLEGVGPVNALGLVLALGERGESFKNGREASACIGLTPQQYSTGGVVVLGGIGKKRGNKRLRSTLIQGALAVTKVLKNREPKNNKEAWLKTLMERCGVRKAAVALANKNIRTAWAILHYDKAYQKPSMLVA

SEQ ID NO: 242401 - protein, 421 aa, unidentified
MRGLRAKRIRTVKEGTLIATVDIGMTSNTGYCTTTDGRDIKVFKFGNTREGFDKFWSLVVASKTRFHCDEVIVGYESTGPYAEPLVHYLMDKPVKIVQVNPMHTKRLKEVNDNSPGKTDDKDPRVIADIIKLGRALSIVVPEGDAAYLRRLNNTRERHIGERTALFNRLQQLVFLIFPEFKTVIKQMRGRTVRFILNKYTTPEKIGALDKEVFGEEMRTRSMGKLRVKDAELLIGLAQRTVGIKEGVAGIALDIKHIIAQLATVDNFIVEIEAEMAVTLERIPASARLLSIKGLGVVSVAGLIGEVGDFSKFGTQSEIMKLAGLDLYEISSGKKKGQRRISKRGRSLIRKILYYAAVQMIKKNGIMHEYYERLTGRGMLRMMALVAVSRKLLRIIHAIMRDKRDYVGEHVAPKRRLIKKAA

SEQ ID NO: 242402 - protein, 343 aa, unidentified
MQTVTTIGLDIAKSVFQIHGVDAAGNVIFRRKLKRRYVLSFFQKLPPCLVGIEACASSHHWSRELQACGHTVRLMPPAYVKPYIKRQKNDAADAEAICEAVTRPNMRFVATKTREQQSCLMLHRTRHLFIRQQTSVINAIRAHLAEFGIVAPVGRNGVEQLLDVVADVSDKRLPEIARACLLALGAQLRTLKAQILNFDRQVIATHRSNEASKRLDEIPGVGPALATALVASVADPKAFRSGRDFSAWVGLVPKQHSSGGKDKLGSISKQGDRYLRSLFTAGALSVIRYAKIHGTKHRPWLAGLLARRPTKVAAIALANKMARMAWAMMVRGDRYKEPVALAA

SEQ ID NO: 242403 - protein, 414 aa, unidentified
MEPQISFNQVVSRGCGIDVHQKVVVATIGGEGLTKATREFGTFTRSLTELKDWLLENGVTHVAMESTGVYWKPVYHVLEPTTLKVWIVNARHIKYVPGHKTDKQDSAWICKLLLAGLLKPSYIPAKEQRELRDLTRFRTKMIQHISSQKNRIVRILEDCNIKLSSVVSDTQGVVATKLIDRLCETGTVTMSDIEEVYHKRLEASKEDLYEACQGLIDKHHIYLLGLIRQDIASTEAVIKNLNGRIKEVLSGYDNVLENLKAIPGLSTKTVEDLVAEIGLDMSVFPTEKHLASWAGMCPGNNESAGKKKSGRTTHGNKQVKAVITEAAWAATRTKNTFYSARYHRVAARRGKKRALIAVGHSILKSVYHVINGMEGYKELGADYVTQRVEKRRKLYLKKELEKLGYAVQLIQPVP

SEQ ID NO: 242404 - protein, 334 aa, unidentified
MLYAGLDIHKAVFQAAVLDPDSGELSESRFEPSRERLGDWAMQWQGKLAAVAIEATTGWRWVARELQAHGFEVRLVDPGRASALRGRRRQPKTDRLDARWLALLLARELLSECEAWLPPAEIQRLRDRTRLRKALAGERTGWAQRLHALLAHEGWPCSRGRLLTGEGQRWVAALELDPHVRGQVDVIVAVMAALEQQLEVVESELRRFARADRRCQALQTIFGVGPILACHLLAEIGDVTRFQRPRQLVRASGLDPSVIESADSKRRGRLAKQGSRHLRWALVEAANHSHRSTSPDHELYRNTVRRCGRGRARLTVARKIARRSYHVLLAAEAA

SEQ ID NO: 242405 - protein, 466 aa, unidentified
MTPPRRQQPKRRRTSPSLLKRIKLHVAGVDCGAAEHYVAVPPDRDATPVRAFKTFTSDLHRLADWLAACRVTSVAMESTGVYWIPLYEILEGRGFEVVLVNARHVKNVPGRKSDVTDCEWLRELHSVGLLRGSFRPTAAITVLRAYLRHRETLVESAAAHIQRMQKALGQMNLQLHVVISDITGVTGLRILRDIVAGHTNPQDLAQYRDHRCHASEAEIAAALTGHYRPEHLFALKQNLELFDTYQRQLADCDAATEAHLQTLAAEATVVLTHPLPAPRSTAKPRRNEPRFDIRSPLHQLTGVDLTQVDAIGPYSALRLLAEIGTDMSRWPTEKHFTSWLTLAPKNKISGGRLLSSRTQPSANRAAAILRLAAMSLGRTETALGAFYRRLAYRVGKAKAITATARKLAILVYRTLKDGLVYHDDGAAAYDAHHRTRLLRRLRQRATALGFTLVNLETGEQLETVVS

SEQ ID NO: 242406 - protein, 318 aa, unidentified
MNTKTNQSVNVGVDTGKFQLDIYIRPLDIYFTVSNDEKGIKEAIKKIQQHSPGRIDIEATGRLEMPFIVACANANLPFVVANPIHIKRFAGAIGQRAKTDKLDAQLIAHYGEAIKPKLSQLKPDTMQAMSDLVARRNQLLVMQTMEKNRLQILPKELAMTIKPILTVFKNQITKIENKIVALIESCPDYQAKNCILQSMKGIGKIASASIISNLPELGYMTNKQASALVGVAPMNRESGRYKGLRKIQGGRHQVRTVLYMAMMSAIQSNPVFKETYQRLVAAGKPKKVAIIACIRKMVVILNSMLRDGVMWEAPKATN

SEQ ID NO: 242407 - protein, 341 aa, unidentified
MQPELSVVGIDLAKSIFHLVGMDERGKIILRKRIARGEVMSFMAKLPRVLVGMEACGGAHYWGRQLRAQGHEVKLMAPQYVKPYVKTNKNDLRDAEAIAEAVTRPSMRFVPIKNVEQQDLQALHRVRERLMGARTALVNEIRGLLAEYGIVLPTGVNAFRNALAAKLEAEQAKLTPLSQELFGKLGAEFKKIEAEVTYYDEKLQALATTHPESQRLLTIPGIGPITATALIAAVGDVGGFTNGRQFAAWLGLVPKQYSTGGQTRLLGISKRGDSYIRKLLIHGGRATLRWARTKTDSRSRWIRGLLERRGWNRTAVAVANKNARIVWALLSRGGVYEESTN

SEQ ID NO: 242408 - protein, 340 aa, unidentified
MNITRVGIDLAKNSFSICAVDERGAIVVERTLRRGELLSCLANIPPSIVAMEAGSGAHHWARELIKLGHDARIIDPRFVAPYRTGGKARKNDRNDAHAIVEASSRPHMRFVPVKNEQQQATLLIHRRRSSLVAERTRTANQIRGFLAEFGVVAPKGPSSLKNRWHEIRQRYAQLIPILAWQELDPLYEKLIALHKQILGYDRKIAALNRENKLAQRLMEIKGVGPTTASAILATVGDASLFKNGRQFAAWLGLTPREYSTGGVSRLGRISKRGDDYLRTLLIHGARTELMYTHKREDKKSQWAENLKKNKSWNKVAVALANKHARIIWAMLVNNEEFKPA

SEQ ID NO: 242409 - protein, 372 aa, unidentified
MIKGAALQADGENEVLGDGLKHQKEKRSMDHFAGLDVSVKETSICIVDDTGRIVREVKVSSEPEALLKVLENLIYRFKRIGLEAGPLSQWLFSGLAEAGLPVVCVETRHMQAVLKAQINKTDRNDARGIAQMMRVGLYRPVHVKTLRSQKLRMLLTHRKLLQSKAIAIDNDLRGTLRNFGLKVGMVGAMRFEARIRELVENQSDLAALIEPLLIVRRTLREQIVILHRRLLAIVRDDEVCRRLMTIPGVGPVVSLTYRATVDVPARFRKSKSVGAVFGLTSARYQSGEVDWSGEISRCGDEMMRTMLYEAAQSMMHSKKWSWLKAWAMQIARRRGMKKAIVALARRLAVIMHRIWVDGTEFRWTREQAAAAA

SEQ ID NO: 242410 - protein, 371 aa, unidentified
MLLRSPKEPENGGRSAQMDNIKYIGLDVHRDTISAAVLNGSGRLIQQSVLMTRAAAILDFIDGVRGTLHVTFEEGTHSAWLYDLLSRRVEKLVVCNPRRNALLKSGNKGDAIDARKLAELLRAGLLSAVYHGETSALEVQQLARSYAMLTEDTTRVMGRLKAVFRGQAIACTGRKLYGHHRNEYLAALGVCALRRRAERLYLQLDALQLLRRQARHDLVVECRKHTAAKWLQTVPFLGPLRAAVLIARVQTPHRFRTKRQFWNYCGLALETRDSAEYRVIDGQLERKKRPALIRGLNWNYNHELKNVFKGAANAASVGQGEFRKFYLGLLKKGMRPEMARLTLARKIAAIALKIWKKGESFDAEHLKSQAA

SEQ ID NO: 242411 - protein, 413 aa, unidentified
MSYTVAGIDVHKKVLMVVVVVRLEASQPEWQPQQRRFGTTSSELHRLSVWLREQGVGEAVMESTAQYWKPVWYELEPQMGLQLAQAFSNRAPRGRKHDFKDAERLVRRLVAEELTLSFVPPPEQRAWRTLTRMKVQLARDRVRLHSQLECLLEEMRLKLSSVISDLLGVSGRRILQALAEGETDPKKLAELGDQRLHCTNEQLRDALTAKPEPMHQQLLALYLERLRLLDEQIAKLNAMTAQAMHAHQDAVVRLAEVPGFGVDSAQQVIAEVGPQASSFPSPAQLSSWVGTCPGQQESAEHNHGGRSAKGNKYMRRLLTEAAQAAVKAKGSHWQITFRRLLPRLGYKQALWAIAHRLCRLVWKILHDGVAYLERGSQRDPKARRQRAQTLLRALRKLGYQVELKPVHPTLATT

SEQ ID NO: 242412 - protein, 342 aa, unidentified
MSEKRYIGVDLHRRVFTCCMRLESGRQFLSEWRLEQLSQFVKKLRATDEVAVEITGNTRLFYDAVAPHVARVVVVDANQFRVISQSVKKTDPNDARNLALYLAKGLLPEIRMKEKQQAQVASLTQTRDRLVKLRTALKNKVNNLLSARGMELEKEALSSEKGLTRVLTMEVEELTRFELQVIVEQIRSLNHSISELEKVIEQEGKKLKGHKNITSIKGIGSLGASILLSVIGDVRDFPKEGRLASYFGIVPRVHNSNETERSGHITKRGSKLGRTALVQCALIAKRYSPYLANYYERIRGRRGTGRAIIALARKLLGIIYHTLKNNWIFQDFPNFVLQEATA

SEQ ID NO: 242413 - protein, 323 aa, unidentified
METPQVSFKQVVSRGSGLDVHKKVVVATIDGEGLKKQTREFGTVTSSLKELRDWLMENGITHVAMESTGVFWKPVYNILEPAGITVWVVNAAHVKYVPGHKTDKKDSAWLCKLLLAGLLKPSYIPAKEQRELRDLTRYRTKLIQSNASNKNRIIRILEDANIKLSSVLSSTNGAVGIKLIDKICEGKEITMQDVDEVYHKKLEASKEDIFEACQGFITSHHVYMLQIIRQEIADTQRTIESLSQRIKEVLLPYENALELLKKVPGISSKSVEDLVAEIGLDMNVFPTEKHLASWAGMSPGNNESAGKKKADGQPGEINRLKPC

SEQ ID NO: 242414 - protein, 352 aa, unidentified
MTTITTIGLDLAKKVFQVHGVNAEGKVVVARKLRRKEVLAFFAKLPPCLVGMEACGSAHYWAREITNLGHTVKLMPPKYVKAYVKRGKTDAGDATAICEAVTRPSMSFVPVKGVEQQGLSMLHSARSQLIGQRTQLVNAVRGHLSEFGIVAERGLLGLAELAAIVRDESDQRLPVTARAALMVLVRQIEMIGTEIAALDSALRKENKASELGPRLETIPSVGPVIASALRARVTDAKLFKNGRHLSAWIGIVPENDSTGGKVKQKGLSKKGDRYLRSLLVNGAMAVVRQAQRRPDQYPWVAKLLGRMSAKQAAIAIANKTSRIAWAIMVHGGVYEAGHRAPQYRAQACAAAG

SEQ ID NO: 242415 - protein, 415 aa, unidentified
MEGLQPLHRRVAGIDVHRMLHVATVVIEQPDGSIEQTSRQFGGFRRDCRALAAWLAEQRVELVVMESTGIYWKSVHAHLENAGITAWVVNAHFIKHVPGRKTDMSDSQWLAVLARFGLVRASFIPPKDLRELRLVSRYRRKLTQMHSAELNRLHKVLDDGSIKLGGVVSDINGVSATAMVKGLIEGQDIASLLGLARGALKLKREDLQAALDGDLSARHLFVLKHIHAHTQSLQRELADIDAYLLAAMQPYALAHGLLQTIPGIDQIAAALILIEIGDDMERFGCAERLASWAALCPGNNESAGKRKSGRTRHGNGVIRYILCECANAARWTKSTLAAKYRSLMVRKSHKKAIVAVAHKMIRLIYVLLTRKQGYLDQRIDYAAMSAKKKAPRWIKQLKLIGKWPAPDNAPATASA

SEQ ID NO: 242416 - protein, 360 aa, unidentified
MKKVQEYVVKNKSIYIGLEDSKKTWRLCVRSEGLVVHEVSMPTVYENLRNYLLLRYPGCRIQLIYEAGFSGFWLHDLLEGDGIDCIVTPPNKVTQEKDSRMKNDRIDARRLSKNLENRDYRSCFIPDKELREDRQISRTLAMTQKDITRTMNRIRRFFDFHGLELLRDKQNWTVSDYKKTRQMVLGDSLKFSLDRLLDELDRLCGSKKQLKKKLQELSKKTRYAKTFGHFESCPGIGWLTAIRLVLEWGEDLSRFPSGKHMASYVGLTASEYSTGETIRRGHITSQGNELVRSWLIQCAWIAIRKDPVLLEKFNAVWKNTGSKKKAIVATARKLAVRLRYLAVNDEDYELGLVEEITVAA

SEQ ID NO: 242417 - protein, 345 aa, unidentified
MQTMYYIGLDVHKRTISYCVKDVSGRVHAEGSLPATHFDLDRWMKTLPQPWTAAMEATVFTGWIYDHLQPHAAALKVAHPLMLRAIAAAKKKNDRVDASKICDCLRCDFLPECYMASTAIRERRRTLRYRNLLVRQMVQMKNKIGMLLMEAGVSYNKQRLHKAGYFRELLATNPDIDEGLCSLLKLCREAVVRLGKTESALVRSLERDSLLMDRVERLMTIPAVGPITALTWALEIGDPQRFSSIKKAISYCGLCGAEKSSANTVQRTPLSKQRNKHLQTTLIEAAKMAPRNSSELAMLYDKEKQKGNANRATLAVARKLVAYLMAVDRGQRNFQVVETRNCIAA

SEQ ID NO: 242418 - protein, 348 aa, unidentified
MMIIGCDYHPSWQQICWLDTATAETGEQKLEHASGEAEKFYRQLPGPALIGMESTGNCQWFVEMVTRLGHELWTGDAAKIRASEVRQQKHDRRDAALILKLLLEKRFPRIWVPSGPEKDLRQLLIHRYKLVRIRAQVKNELQHLAMNQGVTKKQKLWSKAGEKVLRELPLAPWAGRRREDLFKVRGMLDEQIAPLDQAVTEAAEKNEKARLLMTQPGVGPITSMAFVLTMGDVSRFQRGKQVASYLGLIPREYSSGGKQRLGSISKQGNRFLRMLLVEAAQVAVRCDPGFRNEYLHRCHTKAKGVAKVAAARKLAIRLYWMLRTNRGYPEVVRVESSSRVPVVIRHGG

SEQ ID NO: 242419 - protein, 391 aa, unidentified
MIFVGIDVAKDTHYAAVSDDSGAVLVKPFAFQNNAEGFCLLLKKLSEFDRSKLLIGLESTGIYSENLICFLYESGFRLAVINPIQTATLRKTAIRKTKTDKVDTMLIIKSLMVNSYRLYSQRDADSLKLRTLCRFRQNLKKSKARLKIQLAGYVNLVFPEFGKFFKSGIHIAASYALLKKYSSPKEIAALRTSTLCTLLSKASHGRFGKDTAEALKSLALSSVGVKNPYISIQIAQTIAQTELLEQQIKDLNSAIEEAMESLNSVLMTVPGIGAVNAACILGEIGDIKRFSKPCKLLAYAGLDPTVRQSGQFTAKSTRMSKRGSALLRFALINSAWQLTLNDTTFKAYYDLKRSQGLNHYGALGHVAHKLTRVIFKLLTSDTPFNPAKLVA

SEQ ID NO: 242420 - protein, 411 aa, unidentified
MENIFLCCAGLDIHKESVEACVRRMELGGRIHQQTRHWATMTRDILLMADWMAAQGVTHVAMESTGVFWKPIFNILEGRFQVLLVNARHLKQVPGRKSDIRDCQWIAQLLQCGLLKGSFIPPRPQRELRDLTRHRIQLVEEKTRTSNRIEKILEDANIKLGSVASEVMGVSGRAMIEALLEGKKEPAQIADLARRQLRGKIPQLEKALEGHLTEHHRFLLRLLWKEMMQQEALIAELEAKIEEVTRHLASDVERLDEVPGLDRRVAEVMLAEVGADMSPFPTHQKLAAWAGMCPGNEESAGKRRKRRITPGNRWLKRSLVQAAWAASHTKNSYLASQYRRLVGRRGKKRALIAVAHSILVIVYHLLKDRTRYRDLDVDFFDRLEPQRLTRYYLKRLEKLGHKVILESCVTA

SEQ ID NO: 242421 - protein, 383 aa, unidentified
MTKSSNLYVGMDVHKESIDIALAEGDGQQEVRHYGGIGGDLPALDLAVRKLQATGKALHFVYEAGPCGYVIYRHLASKGLDCVVVAPSMIPKRSGDRVKTDRRDAEMLARLHRAGELSAVYVPHPEDEAVRDLTRAREAAKEAQTRARHQLKAFLLRSGLPYAGKTAWTPAHVRWLASLKLAHPVQQIVFQDYVDAVAAASERLGRIEGYLRDAVAGWRLHPLAQALQALRGVQLVVAATVAAEVGQIDRFGNPRLLMAYLGLVPSEYSSGPTTRRGPITKCGNSHARRVLIEAAWAYRMPARITPIIAKRQDGLSEAIRAIAWKAQVRLCKRYRTLRARGKEQNKVITAIARELVGFVWAIAREVPAVMPQPGLSPGEALRA

SEQ ID NO: 242422 - protein, 491 aa, unidentified
MNSIFQRSNPAIEKVFAEAGSPKKVMCIPIDYAKKTHTALVCNGAGLQLRAPFNVHNNPQGIEFLMGVVQGLCRKHSIRRQHVFFGGEDCSALCFNFVHALAQQGHLVIGVNAWEAAEQRQNLVASTDKLDLLGIASVLINKKGGRTISPEYSPARVLRELTRHRDALVKTRVGCAYRMHHLVDQLLPGFLDATHSGLEPFSEASLWLMSQSFSPRQLLARKDGPLAEKLGLFMLQNPDAKVEKLKRLARSVLPPPAALCEVLQGNLSHEVALYQHLTGSLHDLDRQIARRLAATPGAMLTTVQGIGITLAAGLYAEIGDPARQRALTRLSSYAGLAARLKQTGGPDKEAQTRGRSRRACVPLKRRIMDIALKIGQFGPEELRTDYQRREDAGQDPRLTMGRRMLRICSRLLRHCDFFLPPSVLHTADAEVRCAYYLKTWDQILIKWRNAAAIQQAFAPGAPLENWRTMLNELYDLKLSKLSPQYDRLRNR

SEQ ID NO: 242423 - protein, 313 aa, unidentified
MTIVEARRAVTGGVDTHLDVHVAAALDDIGGLLGVESFSATTAGYRKLLSWMRSFGPVTRIGVEGTGAYGAGLARYLHAAGVEVMEVDRANRQARRAAGKSDPADALEAARAALSGRARGLAKTRDGNVEAIRALMVAKRSARNTRIKTLVQIRHLSFTAPDQLRDRLKDLSAVMLPREAAALRPRAGADVVSYATKVSLQILGRRVLALEEEAAHLDELLSKLVRDTAPDLLAIYGVGVDTAAALLAAAGDNPERLRSEAAWAHLCGVAPIEASSGKVVRHRLNRGGDRQANAALWTVVMVRMVSPPPAGRL

SEQ ID NO: 242424 - protein, 337 aa, unidentified
MKRYLGVDLHRTQMTVCTRLESGEESVREWAIKDLPEFAEQLRAEDEIAVEATGTTGRFYDAVVGRVARLVVVNPHKFKIISESVSKTDGKDCRELALFLSKDLLPEVRMKPKKQRELTHMTETRDLLVKQRSAVKGKINNLLAMQGINLKREARSSKVALERGMGLEVSAMVKLELRVLVEQIRALSASIGELEELIAEEGEQLAGHRNLTSIKGIGSLSATVLLTTIGSVGDFADENKLAAYLGLVPRVQNSNATERNGAITKMGNKLARTALVQCGLVAKRYSPYLNRFYQRIKERRGGGKAKIALARKMVKIVYDTLKNNWVFDDFPSFTLAA

SEQ ID NO: 242425 - protein, 437 aa, unidentified
MSQRVQSKRSKSSKHKPRKIKVQGVAGLPMARPHTAGIDIGAMESCVGVSPELDSEPVGSFGTFTQDLEEIAKWLESCGVTSVAMESTGVYWIPLYQILVDRKMAVCLVNARHFHNVPGRKTDVMDCQWLQYLHSVGLLRGSFRPEQEVCAVRTLLRHRQSLVQMAAVHTMHMQKAMEQMNVKLSHVISDITGVTGMRIIDAILAGERDPRELAKLRHATIRADEETIMRSLGGDYRAEHLLTLEQSVAGYRFYQKQMAELDQKMEGFMEAIPAKIDLREHPLPQEAKKGKRQHNAPAYDLRSHCYRAFGVDLTQVPGFDGPTIQVMLAEVGPELTKFPSGSAFANWLMLSPNNVITGGKILSSKTRKGKSRAALALRQAAQTVERSENSIGQFFRRMRGRLGRAEAITAVAHKLARIFFALVPKGRGVRRIQAHPS

SEQ ID NO: 242426 - protein, 411 aa, unidentified
MDKVYDICCGIDVHKKLIVACLRKGNKHEIREFGATTRELLEMADWLKQNGCQMAAMESTASYWKPLYNILESSDLAAIVVNARHMKAVPGRKTDVKDAEWIADLLQHGLLQPSYIPDKDQRELRELVRYRKSLVAERTRELNRLQKMLEGANIKLSGTVSDINGKSARSILGYLLTGNVIDDAKYDEMYNQKIISHNLKASKEQIIDDLKGVMTPLQRRMMKELLSHLDELNVHIKNLDNEIDNFMKPEEKRASQAIQSVTGIGNTSAQAIISVIGTDMSRFKTDAHISSWAGLCPGDHQSAGKRKSGKTRKGNSLLRTTLVTCAHSAVRQKSSYFYAQFKRISAHRGNKRAYVAVAHSMLVAIYHILKEGVVFKDLGAEYYNQFNKERKINTYLKKLKMLGWEAPVVVA

SEQ ID NO: 242427 - protein, 425 aa, unidentified
MKNTQNQKISQIKNETLVVGIDVAKETHYARAFDYRGIELAKLLKFSNTAEGFKLLDQWMQDICKQKGKTEIVAGFEPTGHYWFVLGDHLKHQGHKLAIVNPFHVNRTKELDDNSPSKNDSKDCKTIAMLVKDGRYREVYIPDDIYQELREAVAERERLQEQLTSIHNRVVRWLDIRFPEFQKVFKDWRRNAALITLRSFPTPEKIVEAGARKICETWKTEMKRPSFKRAEALVKVASNSIGRTSGKLASEASLKNLLAQYDLYCKQYEALEQLMLELLMQVPNASKLLDIKGVGLSTAATFVGEVGDISRFQDPRQIQKLAGFNLVANSSGKHKGKTTISKRGRKRLRHSLFFAMIAILAHNPEFRLLHQRNLTRENNPLNKMQSIVALCGKLIRIFYALLSKGVDYDPEKMLNDIHQPVQQAA

SEQ ID NO: 242428 - protein, 345 aa, unidentified
MKITTIGIDLAKTVFQVHGVDERGKAVLRKQLKRKDVLSFFANLEHSLIGMEACGSAHYWARKLSELGHTVRLMAPQFVKPYVKTNKSDRNDAEAICEAVGRPNMRFVAVKTAEMQAVLALHRARQGFVKARTAQANQMRGLLAEFGIVIPKGIGHIAKRLPEILEDGENALPGMMRELLQRLSENLKDMDRQVGDLECQIKLWHRDNEPSRKLEAIAGIGPLSASAMVATLGDAKSFKNARQVPAWLGMVPRHEGTGGNVKLGGISKRGDVYLRTMLIHGARAVITHIERKPDHADEWLRKLLARRNKNVAAVALAAKNARIAWALLAHERSYQHDYVAIRKTA

SEQ ID NO: 242429 - protein, 340 aa, unidentified
MPLYGGIDLHANNSVVVLLNDQDQVIYQKRLPNHLPVILEPLSLYHREIEGVVVESTYNWYWLVDGLMEAGYHVHLANPAAMQQYNGLKYTDDRSDARWLAHLLRLGVLPEGYIYPKAERAVRDVLRKRAHLVRQHTANVLSVQNILARNTGGRFSLKRIHEFTQQELEALLPEADQVLAVTSSLAVLDCLRHQIKALEQSVHQRLHHTPVYEQLLTVKGIGPILAQTIALETGDSRRFPTVGHYASYCRCVDSTKLSNGKRKGQGNVKNGHPYLAWAYMEAAQFALRFQPAAQRFYQRKLTKTNNNTILARKAVAHKLARACYYLMRDLVPFEAMKAFG

SEQ ID NO: 242430 - protein, 341 aa, unidentified
MIQSALIGIDLGKHNFHLHSQDKSGREVFRKKLSRAQMMQLFGNMPSCVVVMEACAGAHFVARQLAAMGHTAKLISPQFVKPFVKGNKNDFVDAEAICEAASRPSMRFVTPKTESQQTLSVLHRMRESLVHDRTKTANQMHGFLLEFGVSLPRGLTIMKRLTNVLAEHELPVRLTVLLQRLHDHFVYLDEQIKVLDKELASQLADDDLGSRLLSMPCVGPITASLLAVEMGDAKQYQCSRDFAASVGLVPRQYSTGGKANLLGISKRGDKHLRQLLVQCSRVYMQRLEHQKGALADWVRALLSRRHSNVVACALANKLARIAWAIATHHTQYEAGPDALNA

SEQ ID NO: 242431 - protein, 361 aa, unidentified
MTTISAERPDTEVAVILGVDTHLDFHAAVAVDHLGRRLGEASVPTTVKGYERLLCWAEGFGPVRCAGVEGTSSYGAGLARHLRAREIEVLEVERPKHRRRSSRSNVEKSDPSDAERAARAVLSGEASGVPKSGDGRVEMIRALRAARRSAIKARTQAANQLQGLRVTAPEELRNRLCGLSTKELVSVAARFRLGDGPRNVPTATKFALRSVARRYEVLSAEIAGLEAHLDRLVAQVAPELLSLPGIGTENAATLLIVAGDNPQRLRSEASFASLCGVAPIEASSGKVVRHRLNRGGNRQANRALYMICLARMRRDRRTQEYLARRTAEGKSKREIIRCLKRYVAREAYRVLIHSISGSSAA

SEQ ID NO: 242432 - protein, 427 aa, unidentified
MAYRVAAIDVHKKMLAIVVADVAGEGEYQFERRKFGATPAQLHLLAQWLVQQEVEEVVMESTAQYWKPVWGALERFWKPERQKREGATKMSGTLHLCQAKSNRGPRGRKNDFADGERMIKRLVAQELVLSFVPDPEQRLWRTVTRRKYQLTRDKVRFQNQLESLLEQAHIKLSSWVSDLLGLSARRMLKALAEGETDPAALAALADSRLRATPEQLRDALGACTQLHGVYRRLLKMALEELKMMEEQIEQLDREALGLLQQHQDTVKRVAEVPGFGVDSAVQMIAEVGAEAAKFDSEKALSSWVGVCPGDEESAGESQSTRSPKGNRNMRRLLNQAAHAAIKVKGSIFDVTFRRLLPRLGYKQAIWAIAHRLCRLLWMILHKGVRYEERGPAVSAKSKRTRTARMIRELQKLGYHVEGAPLPAGNPA

SEQ ID NO: 242433 - protein, 403 aa, unidentified
MQETTQHDAVDVFVGVDVDVGKGRHHAVALRRNGKRLYNKALPNDEVKLRALIAELKTHRRLLFVVDQPSTIGALPVAVARAEGVLVAYLPGLAMRRIADLHAGEAKTDARDAAIIAEAARSMPHTLRSLRLADEQLAELTMLRGFDDDLAAQVTQTSNRIRGLLTQIHPALERVLGPRLDHPAVLDLLERYPSPSALAAANEKTLANRLTKLAPRLGKNLAAEIVQMLNEQAVIVPGTQAATIVMPRLAQQLAALRKQRDEIAAEVERLVLAHPFWPVLTSMPGVGVRTAARRLTEAAQKAFATAAHLAAYAGLAPVTRRSGSSIRGEHPSRRGNKVLKRALFLSAFAALRDPVSRAYSSCKIQQGKRHNQALIALARRRGDVLFAMLRDGTIYPPKSAPNA

SEQ ID NO: 242434 - protein, 369 aa, unidentified
MTLSVKWKVRMTAMSIVAHAHPFVVGVDTHARNHVYAILDAANGALLDTRTFPTSAAGISRAIKWVARRTGADADSLWVIEGAASYGAILAGIVTAHGFPVAEAPRMDAKKRRGVGKSDALDAHQIAMAVLPLPVDKLRRPRLHDGVRQGVRILVTARGSMSKDRTRSVNALNALVRGNDLGIDGRQKLTSAQIAEVSKWRSREEELSLSIARAEAVRLAKHVLALDEQLAANEKQLDDLVKVSEAAPLLEETGFRAISAAKCLAAWSHEGRVRNEAAFASLAGVNPIPASSGNTVRHRLNRGGDRSLNSALHMVAVVRMTHDGETREYMEKRRAEGHTDKEIRRCIKRYLARRVYRALSSEAIAMNAA

SEQ ID NO: 242435 - protein, 319 aa, unidentified
MFIVGIDVSQKSFDSTLIDEAGQRYQKAFKNEEKGFQALQKWLVGHQVKAAHVCLEATNIYWEELAEYLHDQSYQVSVVNPIRIRGFAQSQLRRSKTDEIDSEVIATFCAQTKPTLWQPPQPHQRQLRALTRHQQALQKSLTQHQNRLHVTRDPAVRASLAIIIETLQSQYAAIEAQIQALIDQHAPLQKQMALLLSIKGIGPKVAVILLAEMYDLAHYDNARAAAADAGLTPAHYRSGSSVRKRSKLSKMGKGAVRGVLFFPAISAMRHNPIVRALADRLRARGKPNMVIIGAAMRKLLHLAYGVLKHQRPFDPNYVN

SEQ ID NO: 242436 - protein, 344 aa, unidentified
MNSTTIAVDVAKSVFEVAVSSQPGHVRDRHRLSREGFARWLSEQPPATVLMEACGSAHHWARHAQRHGHRVVLIPPHVVRPYVHGNKTDRTDAKGLLEAFRNDEVRPVPVKSETQQALAALHRLRSTWQATRTARLKPVRGLLREFGVVIPVGARQVVPHVRALLEDADASVPGLLRPALAEAVQEIGEREARLRAVEHQLEAAAAASLVVGHLRTIPGIGMLTATALVATVGDVQRFPSARHFASYLGLTPREHSSGARRHLGAISKRGDTYLRMLLIHGARAVLWHAKRPRALPLDRLRTLALELERLRGHNKAAVALANKLARIAWAVWKHGTGFTTVPAA

SEQ ID NO: 242437 - protein, 389 aa, unidentified
MIVIGTDTHKYKHALAAVDDGTGRVRGSREIDADDAGHLAAVKWARGLDDERVWAIEDCRHVSRRLEQALIAAGERVVRVAPHRMGASRKGEREPGKSDEIDSLAVARAVVKDGVEHFPAAYLDERAMEIRLLADHRNDLIAERTRIQNRLRWHLVALCPELEASLKKRSLSDTRQLDRIDRRLRRLTPESRVRVARAQVAQIRSLTRHANTLENELLGLIKTQRPQLLAETGCGPLTAAILIGRTAGAERFQTDASFALQAGIAPIKCSSGQHQQHRLNRGGDRQLNHALHIIAITRARHDPTTREYLARKQAEGKTKKGALRCLKRHLARRFWQLLAQPPLPADQAITRELAAEPAGPQALTTPERPAPRREVDRTITGPIPMVCIT

SEQ ID NO: 242438 - protein, 421 aa, unidentified
MEGKKVRIVGFDTATEEHECVLLGIDGNEDRSLSCRNRCKSIEEAFAKLILRIAPDETLVVALEAPRAHGRLVFEVALQFGFTVWQVEAIALNHYRRCEGQARKDDHWDAFLAARMVFRGMKGCRVVADPRPDERVLSRLIRLRAQMVKQRVQLSHRLRAVMLELAPIVLDSQWKGPKLGSVAMRKILEKWPGFEGLGRARTTSIQSIFRSCRYGQAKTDRCVALVHSLPKEIVIPPEERAVVAFEIEMIFKQLALLNQSILEIEKKLRVAADQHPICRKLMEMPGIGLITASVLVGELLPMARNATEPASATFSGVTPLTRKSGTSLDSAHLGRASNKRVLNALFLSAVRALAESALDRAYYDKKRVDYQGHPKPHTAATLALARQRHKVIFKLMTTEARYDKEALIASHLKRQRELEAA

SEQ ID NO: 242439 - protein, 387 aa, unidentified
MNKSNRVIGLDVHPDSFTGAVLLKGKDAASARVVSTSRRVELPELEKWVARHTGEQDVLVLEASGNAFAVAERLRVLQRQVVILDSHRAGKVGKAYCANDRVDAIKIARIYLTALSPVVWQPDAKTRERREVFSAYQAVVKEATRLKQQLRSMLNEHCVRLESGFRLSHPSAINRLLKLREWTPVRAMLLEQLHRGLVSAQARRTRLRRYMAQEVLDEPELLRLTRLCGISLITLYGLSASIGDIKRFSNSRKLSAYFGLNPSVEQTGNWEGEGALKRHGRGSFACLAGAVGQKLLRVNNPLQKWGLAVATRRGRNKAAVAVARKLCVAVWHVMQGHVIGAIERMTTLHTKLHKLATELGLNTIKSQGYETKEAFVQKKLYLLRSYA

SEQ ID NO: 242440 - protein, 343 aa, unidentified
MDHFAGLDVSVKDTSVCIVDETGKIVREVKVASEPQALLAVLRNATHCFKRIGLEAGPLSQWLHGALAEAGLPVICVETRHMRALLKAQINKTDRNDARGMAQMMRVGLYRPVHVKTLRSQRLRMLLTHRKLVQSKAIALDNDLRGTLRNFGLKVGVVGTVKFEARVRALVENLPDVVELVEPLLIVRRVLREQLGILHRRLLAIVRDDDVCRRLMTIPGVGPVVALTYRATVDVPVRFRKSKSVGAVFGLTCAKYQSGEIDRTGAISRCGDEMVRTTLYEAAQILLVRSTKWSWLKAWAMQIARRRGMKRAIVALARRLAVIMHRIWVDGTEFRWTRQAAAA

SEQ ID NO: 242441 - protein, 371 aa, unidentified
MKQYSTFIGMDVHKNSIEIAIAQRGRDGEVRHYGKIDGTLEALDKVVRKLVSKGGPLHFVYEAGPCGYEIYRHLTAKGYDCSVVAPSRIPKKSGDRIKNDHRDACMLARLDRAGELTPVYVPFAEDEAIRDLTRAREDAKIDEKRSKQRLLSYLLRSGLRYTGKKTWSKAHMRWLSDIKMSHPSQQIVLQEYIDTITERSLRVQRLTDQIRQMLPQWRMFPVVKALQALRGVALIVSATTIAEIGDLKRFENPTELMSYLGLVPSEHSTGEKIRRGSITKSGNGHVRRVLVEAAWAYRLPAKISRLLLKRQEGLSKEVCEISWKAQVRLCSRYRRLWAKGKPKQVIVTAIARELCAFMWAIANEIQISAAT

SEQ ID NO: 242442 - protein, 376 aa, unidentified
MEHDSTVYVGLDVHKESITVAYAVGMGDVELLGRIGTTKGDIDRLCKRLRSKGRRVRVVYEAGPCGYGLYRQLVAEGFECMVCAPSLIPKKPGERVKTDRRDSIKLVRALRAGDLSAVYVPGIEDEAFRDLARAWVSAKDDLKQARQRLKSFLLSHGVRYPGKADWGPSYRRWVSQHSFSNEWQQLAFEEHRRTLGDRIAQCDRLEAALRDAVVNWRFYPAVLGLQAMRGVQFTTAVGMLAEVGDLSRFEHPRQLMAWLGVTPSEHSSGDKRRQGSITKTGNSYARKLLIEAAWSYRHQARVSENIGRRHAGLPKRIIDRAWDAQVRLCRRYRKLAARGKNANTAVVAVARELAGFIWDITRLSMSLAIPRIELTA

SEQ ID NO: 242443 - protein, 349 aa, unidentified
MVVIGLDAHKRTHTVVAIDGTGRRLAERTVPTSRAGHLELLRWSRRWRQRTWALEDCRHLTRRLEVDLLAVGERVVRVPPKLMAGARRSNREPGKSDPIDALSVARAALREPDLPTARLDGVERELRLLVDHREDLVVDRTGHQERLRWFLVELGIAEPPTRSLDRRIVLDRLDAELAARTEPVARFARDLLVRIRELTQAVDALEREIRGLAERVAPSLLALVGCGHLTAAKLVGQTAGITRFRSRAAFARHNGTAPVPVWSGATVRHRLNRGGDRQLNVALHRIAITQLQREGPGRAYLAKRMAAGDTKTEAIRALRRRLSDEVFRRLTIDELDRNQALSASTAAAA

SEQ ID NO: 242444 - protein, 344 aa, unidentified
MIYIGLDVHKRFSRMGCFDPATGEAHDLGSVSNDAPSLAEALETLPSPKTVVLEAGRSSYHMAGLLESMAEEVWIVDPGEVRRLQHTISKTDRRDAAALAWWAAKGVLKPQWRPDAQTMDLRELTRGKTALTRMSTQVRTMIRMLLARHGHECPHRDLMGERGQLWLDEVELAGHAGQMLASLREILTVVQAKADDFEHMVEQTSRKHPVARRLRTIPGIGPYLGLALAVEIGDINRFPGPTQLRGYSGLVPAVYQSGDKDARGPLTKAGNKWLRYAAVLAAQRIGQMKEPDPRLKRIFLSVAFRHGRNPGKIAVARRLLDLIYYMLKKGQDYRASKPRAAATA

SEQ ID NO: 242445 - protein, 410 aa, unidentified
MEVLHAHCAGLDVHKDWVVACVRHMVDGKVTTGVKTFKTTTQELMALSDWLSAEGATHIAMEATGVYWKPVWHILSDGEFELILANAAHVKNVPGRKTDVNDAMWLTDLLAHGLIRASFVPGEPTQQMRDLLRTRKQMVRERSSHVQRIQKTLEDANIKLDSVVTDILGLSGRRIIEALIAGQTMPQALASLAHRRIHASADELEAALRGRVTRHHRFLLKLHLDQIDALDAALARIDEEVGANVEPFRTAVEMLSTIPGISTLSAEVIVAEIGIDMSHFETAGHLISWAGLCPKNDESAGKRRSNRMKKGAPWLKTTLIQCAWAASRKKNSYLQAQYLRIRSRRGAKKAIGAVAASMLTAAYHMLKDGTLYQDLGADHFDNRAKGKHVLRLVNRLQNLGFDVQITPLAA

SEQ ID NO: 242446 - protein, 261 aa, unidentified
MTFRPHALHLKAELFVKSSRVHVRDDGFTRCNFHLKFFIMVSRGIDISKSSFVAAYPSTNGNPTKTFPNTTARMRELIGTLAVAEHHCVMEATSNYGCCCTCYIRTVLPSVLPPPKKQIKHFSRMMMPVTKTDEKDAYMIAMYGEKMNPPIYKMPSQATIRILTTEGFTYFDNAKQLSRFIGICPTYQQSRTSVNIREHINRNDDERLRSLLYIAFWTALRYNSRECYIRLKANEKPFKVALIAVTNKLVRPVLTLSLIHI

SEQ ID NO: 242447 - protein, 354 aa, unidentified
MQYIALDAHKHYTFASVERANGALLQETQLMHERGVIRDFLCQYEPGSPVAVEAVGNWYWLVNEIEEAGMVPHLVHPRKAKLMLGMINKTDKLDARGLNRLQRTGTLPTVWIPPATIRDQRDLPRTRMVLTRQSTRLKNRLHATFAKYAIRLPDVSDVFSQPTALATHLVTLPSHTRFAADRLMEQLEIVGEQIDEFESRMHEVFEESDELKLLMTLPGVGFILGTVILLELGDVSRFPDAVHLASYAGVTPRISSSGGKKHYGPMRPDVNHYLKWAYIEAANVVSRHQAHWPHRHVTKTYVRIRERKNHAKAVGAVARHLAEATFWMLTKKEAYREPALRTDRVHEGVSAAVS

SEQ ID NO: 242448 - protein, 385 aa, unidentified
MNQTSSCAISTNTLHCALELSKNSWLLAIQFPDREQPSLYPIEGGNTEKLMAKLAAARDCWAKVSGSPPAITVCYEVGYDAFWLARFLMGRSIECLVIDPGSLQVNRRGRRVKTDRVDVKMLLRTLIAWCRGERHVWSLVRIPSIDEEDLRRSHRERGRLVRERTAHINRIKGLLFGQGIRGINVKSQYKTLAVDNLVTGDGHRLPPRLACEIAREIQRLAMVQEQIAKIERERDTAPTPCEATERKRHLLLQLKSIGPAISALLSREVYYRQFTNRRQVGSFLGLAPSPYNSGAEERCQGISRAGSGHVRAIMIETAWLWIRHQPKSALTRWFVERTAGQSTRVRKILIVAVARKLAIALWRYVEHGMVPQGAILNPPTTGNAR

SEQ ID NO: 242449 - protein, 346 aa, unidentified
MTIVEAARTVTGGIDTHSEVHVAAALDEVGGLLGTESFEANPDGYSALLAWLSSFGDVTTVGVEGTGSYGAGLARFLTRAGVKVVEVDRQNRQARRQSGKSDPLDAVEAARAVLSGRADGQAKSRDGSIEAIRVLVVAKRSARGARIKALTQMRQLTYSAPDQLQSRLKGLPIPKFVSVAQGLRPTRAADPVTAATKASLSSLAHRVADLEDEIARLDAMITPLLQASAPKLLAVYGVGIDTAAALLVAAGDNPERLRSEAAWAHLCGVSPLQASSGKVTRHRLNRGGDRQANRALWHIVITRLASDPETQAYMERRVKDGRSKKEAIRMLKRYVAREVYHYLPRG

SEQ ID NO: 242450 - protein, 405 aa, unidentified
MATIVALDVSKGKSFYVMYQEMTCLYEGEITHTKSGFQELHALIKNLPEVPEIVFESTGIYSRPVETFCQKNQLIYYVLNPLQAKQQMEKESLRKWKTDKRDAHRLAQTHWNNSRTKSVSAEPLYKELRDLSRFYQEIMDEIGRMRMHLHNAIQLTFPELEQVLSNRLTPYGLTMIAQYPHPSFVLKQSRTIIKNRLMASTAKKISENRARNKADELIAYAKDSYPAVSETAIPVAKTRYYAEQLQALLNQKERLANQMIETAKQLEEFSVIASFPGIGELSAAQFIGELGDLRRFSDPRKANAYIGIDIRRYQSGNYLAQDHINKRGNPKGRKILFFIVKNMIKAQHAAQNHIVDYYYKLKKQPLPKKEKVAIVACMNKLLKCLHAMIRNGTKYDYSYTVSTDH

SEQ ID NO: 242451 - protein, 340 aa, unidentified
MKFIGMDAHSKTCFFVAMNARGKVIDRRQVNTNEKAILDFVRSVKGPKSLVFEEGVLSQWLYLLLKEEVNELVVCKPQERSGAKNDEIDATELADLLRVGRLKRVFHADNEYMNLRALVSGYDDLLGVLTREKNRLKALFRHVAIPTEGSAFYKDPEIVWKLPTDSQQYVACVLFEQILAMEEQRRGYEERFGANVKRYKEIRLLKSIPGIGAIRANQLAAIIVTPHRFQNKYRFYAYANLTKHKKDSDGKMYGRKRANGQPMLNMIFRGAVMGGTKSNTAFRRKYDDMKTKGASEKAARGAVARMIAATVLGVWKSGRKYDDKYKEVTQRQNRKSQSGT

SEQ ID NO: 242452 - protein, 432 aa, unidentified
MEVVHPRVAGIDVHKKVIWVAVRLPGERPGEHAVTVRRFKAFWRSLQKMASWLAELGVSDAAMESTGVYWWPVYHALAGAGIEVCVCNAAHMRNVPGRKTDLADCQWIAELHEYGLLRPSFIPDAQVAALRQRTRYRKKLIEQRSSEGQRLAKVLEDAGIKIDSVASDMLGKSGRAMIEALIAGERDPARLAGLALGVLRRKAEELAMACDGRFTAGHGQMCRLHLDAYDHLTAKIAELDALIAEAAAPFAALIARLVTIPGIGQRTAEVIIAETGGDMARFATAARLAAWAGLAPGDNESAGKRKKAPARKGNPHLRTAMAEAAWATWRTATRPGARFRRLARRFGKGNEKKAAIAVAHTLLCIAWAVMRYDADYIDAGTDYYERRDQRNREHLARYHQNALARLGLQVTVTAPGDGAPPSPTPDNPGQAA

SEQ ID NO: 242453 - protein, 363 aa, unidentified
MEEEKRRYVGIDLGKREYTMAIIGKNGKMSIHHGKTSIQGRQALYRLLEKNDKVALEAGNLAFIMAREIMGRVGSAVRVLNSAKLPLIWDAPTKTDKEDAMKLAHLVEERRDEKLPLVPLPSEQEMGRRKVLSSNGREVQNRTKMINMFHAMFVHQGYTTVVRKDLATAERRHQAVQMLTGQEREDAEYIMKHLDLHEQRIGELKKKIQKEAKGDENMKRLQSIAGVGAIVAYAFIAHVGDGSRFSKGAQVSNYLGFVPRLDYSGTIQRHGHISKRGNGYLRGLLVQAAWAAVRSKQGGALRERYTCITAFRGASKKKTIVSIGRRLAEIMYAVLKNKTEYEPRKWEGSQNKTAILAGQAMSA

SEQ ID NO: 242454 - protein, 370 aa, unidentified
MGNRSMFVGLDVHKETIDVSIAEGRRDGEVRHYGVIASDLEPLDKVVRALRAPDRRLHFVYEAGPCGFGIYRHLTKRGEECVVVSPSMIPKRSGDRVKTDRRDSQMLARLHRAGELRAIYVPDDTDEAMRDLVRAREDAVVVGTQAKCRLKAFLLRQGRRYPGREGWTLPYRRWLADLSFPTAAQHVTLQEYRDTIDETERRIERVTEQLRQLAPTWRWAPVVAALQALRGVSFITAVALVAELGDLTRFGHPRELMAYLGLVPSEYSSGPSVRRGAITKAGNPHARRLLAEAAWAYQGIPRIGRQHAYRQEALPKVVCDIAWKAQLRLTTRFRRLVARGKAKPKVATAIARELTGFIWAIAQEVSPASS

SEQ ID NO: 242455 - protein, 351 aa, unidentified
MPRRSTVRAVSTIGIDMGKNTLHMVGLDSLGAIVLRERVSRGRIKSRLANLPPCLIGIEAGMATHYVARELAALGHDVKQVPPAYAKPFRQGHKNDFRDALAVAEAVQRPTTRFVPPKSNEQLDLQALHRVRSRLVSQRTAVINQIRGFLLERGIIVRQGLRLLRQLLPDILAKRTDVLSPRMVRIVSDLAGDWRQLDDRIETVTDEIETLAKADDNCRRVMTVPGIGPIISSAMVAAIGNGSAFAKGRDYSAWLGLVPKQMSTGDRTILGRLSKRGNSYLRMLFIQAARVILVRPANWPKHGFGVWLVRAIQRLHPNVLAAALANKLARIAWTVLAQQRSYEARVTKAEA

SEQ ID NO: 242456 - protein, 387 aa, unidentified
MTVPAQVFKIIPRHYDIFGGLDVAKKNMAVTFTDHEALMRSLRLPYSSAHLLHYVRKHFPDRRVAFVYEAGPTGFGLHDELVTAGYRCLVVAPSMVPTAPGDKVKTNRLDSRKLSVQLRGGELRSIHVPAPRYRELRHLVQLRDTQVGQLRATKCRIKSLLLCEGLAFPPAPESSQWSARVLSELLELPCSPAVRFELDQLIGTLHFHFNSAVAAQKQIRYFCQNDPELRQSIRLLASLPGIGVIVATHLVARLGDWRELSNVRQIAAFLGIVSREHSTGEKANRGRITRTGDSRLRNKLIQSAWTAIRKDAELRAFYLRIYHRHPKKIAARKAIVAVARKLTTRIYAVLKEQRPYVLRPENLPAPLTAEETVGPRGRLVGPQNEQP

SEQ ID NO: 242457 - protein, 351 aa, unidentified
MNKVSTLAANGNGENIPTVIGIDLAKNVFALHAINRYGKPVLVKPQVRRDQLLDVLAQLPPCVIGMEACSGAHHWAREMIALGHTPKLMAPKFVIPYRIQGKRGKNDANDAAAICEAVTRPNIRFVPIKTVDAQSILTLHRVRQGFVEERTATINRIRGLMSEFGIVLPQRAEVIRKQAQLAAEKMPSWAASAVYDLLAHLVTLDMRVAEYDEHLKRMANRDERCKRLMALTGIAHITATALVASIGNGHDFKNGRQLAAWLGLVPGQYSSGGKVKLGHITKAGDRYLSTLLILGARAMLANAVRKNDRISRWAVALQARAGYGKALVAIAAKNARIAWALLAKGEAFEPA

SEQ ID NO: 242458 - protein, 423 aa, unidentified
MGQWGARGVVSLTDRTSIDGNTKVDKAQTAWAGIDVGKTHHWVCVLDAEGNKLSSMKVANDQTEITATIATVGALADRIVWAVDIIGAPSAMLLALLIQAGQSVRYASGRVVAAMSAAYSGEGKTDAKDAYVIAETARIRRDLTIIDPGTDLVRNLELLTGHRADLIADRVRMINRLRDVMTSVFPSLEREFDYSSCKGALVLLTGYASPERLRRVGETRLAGWLQRRRVRNYAAVAARAIAAARAQSVTLPGQEIAAAMIAELATNTLALDQRLTELDAQIAATLDEHPQAEIIQSMPGFGPILGATLLVAAGDLAAFPNAGHLAAAAGLVPVPNDSGRRTGNLHKPRRYSRPLRHVFYLSAQTSMMRDGPNRDYYLKKRDRGRTHTQAVIALARRRIDVLWALLRDERIYTAIPPTLAQAA

SEQ ID NO: 242459 - protein, 469 aa, unidentified
MRIIGLDLAITSAHKAVVADEAGKFLTPVFSVATWPKDLAAMLRRARHGATADLGLAVVMEPTGLAWLPVAVYLLRQQVTVYLVNSQQVADLRRYYKKHAKSDRIDARVLAKLPVVSPEKLHSLVLPSADLFALQRACKQVDWLITHITALHNQIVALDRVVWLGGWEALVFGDPFSSAARWCRKHYYNPQVVLDAGTRTIRQAWRASNVDPTEAGDWAKRLVALAKQVVTLYGSPSPHVDFAALQAEVNSKQQWLTQFEADRDHWRLEVVRPLYRRLHPSRNLETLKGVGQDSAAVFLSFIGDPKRFPNGRVFRGWSGLVPRSAQSAESEAKGLHISQAGPDLPQKYAFLDGDVGRRWDPQLAKIYYDQMVHYGKHHTQAVVAVATHLLDRILVVLQEDRPYELRDVDGTPVTVEQAQRIIAEKYTVPDDVRQRNNRRARRARVEAQAERQHARREKRKGKSASFVRG

SEQ ID NO: 242460 - protein, 322 aa, unidentified
MSVSNQRCAGIDVSKGTLDIAISNIASQFTVPNGTDGFTQVLRELKRNETKLILMEATGGLESSVACYLQLEGFDVVVINPRQARDFARAMGYLAKTDRIDARVLLQMSEVINQHPERGKYIRPLPDAHRQILAAMVVRRRQLTVMLTAERNRLHPSHPLSHASIRSIISALKGELARIEGEMVIHIKEHFSELSELLNAVKGVGAATVAVLLAEVPELGSLSRREISALIGVAPVNRDSGTMRGRRTVFGGRASVRTALYMSALVGTRHNPTIKEFCTRLIAAGKPKKVALTACIRKLLTILNAMLKKNEAWDPMYHQHAS

SEQ ID NO: 242461 - protein, 402 aa, unidentified
MNAVGIDVSKGKSMVAIMRPFGEIVSAPFEIKHTASDIHSLVELINSVEGESRIVMEHTGRYYEVLAHQLSEANLFVSAINPKLIKDFDNDSLRKVKSDKADAVKIARYALDKWQNLKQYNVMDELRNQLKTMNRQFGFYMKHKTAMKNNLIGILDQTYPGVNTYFDSPARSDGSQKWVDFASTYWHVDCVRKMSLNAFIDHYQNWCKRKKYNFSQSKAEEIYGKAKELVPVLPKDAITKLMIKQAVDQLNSASTTVESLRTLMNETASKLPEYPVVMAMKGVGTSLGSQLMAEIGDVSRFTHKSAITAFAGVDPGVNESGSYEQKSVPTSKRGSSDLRKTLFQVMDVLIKTHPQDDPVYQFLDKKRAQGKPYYVYMTAGANKFLRIYYGRVKEYLSSLPES

SEQ ID NO: 242462 - protein, 481 aa, unidentified
MSRLGPDKRRTPRITHEVVDQVLSLPPRLSLDFGPAADQPPVGARRRPAKPQPFTPRNLPMKSKRFPSRKPVLAKGRAVVGIDVGKRKHAATALTPQGEVIVQLASFPNTKAGIDLLEKEVLRQAGGPGKVLVAMEATGHYWMCLYYELKRRGYEGVVLNPLQTNAHSRSQIRKNYNDRIDSAGIARLVLAGEARATRVPDEKTAELRLWVRHRQRLLRAAGNMERFAHTLVDRVFPEYAEVLSRPFLPSGQALIRQIGLAPGDLVSQEDKVREVLRAASRNKIAPETIDLLLQSAKESIGTRQAETVANRQLLLAFDYLATLRRQIAAIEDELDQRVREIDSPLFSLGITANLVAVIHAESDPIQDFPAADQYVAYAGLDPSSRRSGDTIDRHGKISKRGSPTLRRALYLAAFVVTRKHACFRHLYQRHRRQGKGHTNALVIVARHLARVVWRLLTDRREFTKRPPNHHSASHPGRRKPK

SEQ ID NO: 242463 - protein, 375 aa, unidentified
METIYIGVDFHARQQTICYLKTETGELVFHELRHQDKQKVRAFYAQFHGQVMVGLEASGYSPWFERMLEQLGCEVWLGHATEIRRRARWRQKNDRRDAELILDLMLHNEFPRLHRGAVQSREVLRMLRYRQKLIKIRTMSKNSLQAIALQAGLARGSRLFTKAGQQELGTAEMTPVMQWQREHWLQLMEPLNQQLLETMVWFKAQSKGDVWVTRLRTHPGIGLLTSLCIVHTLQPVSRFRNTRKVAAYAGFDPVERSSAERKCFLGISKAGSRLLRYLLVEAAQTAVRKDEDLKRFYQRLAERRGRPKAKVAAARKLLIRAYIMSRDEIDYAEFRRRAVAARLARRGQGPTNVPEVLIGQPASAEGQGEPTSANK

SEQ ID NO: 242464 - protein, 415 aa, unidentified
MNAPSTSEFAAFVGIDWADRKHDVCLLAAGSSQPECSVLTHRPEAIEQWAESLRQRFDGAPIAVCLEIVRGPLVYALQRYAFFVLFPVNPATLARYRKTFHVSGAKDDPLDAQLALELLLTHPEKLTRLQPQGAAMRTLQQLTEQRRALVGDAGRLINRITWALKQYYPQALEWFDDKNTFVFCDFITRWPTLKHAQRARSARLTAFFHEHNVRSARLIEQRIQAIASASALTSDRAVIEPNRLLVEALVQQLRVLLQWVQRFDGEIDVLGRTLPDFDLFASFPGAGAVFAPRLAAAFGERRERYASAEQVQKYSGIAPVTESSGNKRWVHWRLHCPRFHRQTFVEFSASSLPHCYWAKAYYDQQRSRGSSRQAALRALAFKWIRIMYRCWQNRSPYDEATYLKALKRRGSPLLN

SEQ ID NO: 242465 - protein, 316 aa, unidentified
MYLGIDVSKLTIDCCLISDGQNHEKRFSNNPKGFQLLTDWLKFHQMTSELHCCCEATGTYYEPLAHYLHQHYIVTVENPRRIKGYAIAELQRSKTDKQDARLIAQYCQDRKHKLKAWIPPSQEQKQLKELARYLDHLKQQRATETTKLHEAPDYIAPHIKTTIENLSSQIRAIKKQLLQFYKSHPDYNTQRKRLKTITGIGEQSAAVLLSAYKRHPFSNQKQFTAYLGLDPRKNQSGSSVNGKSRISKIGNADIRKSLYMPAVVAYRCNVFSSFVNRLKAKGKPIKLILIAIMRKLAVIAFNLLQNGQDFEPERYK

SEQ ID NO: 242466 - protein, 349 aa, unidentified
MRPRNRVVVIGVDTHADTHTAAAVDAFGRILDTIEVPATPAGYRQLLGWARRLGRVQRAGVEGTGAYGAGLARFLTGHGITVIEVNRVNRQHRRRHGKSDPADAEAAARAVLSGQATGIAKVTTGRVEAVRVLHVTRRSAVKAKTQTANQITNLVLTAPEPLRSQLRVMSSTKRIRAAARWHTTPVTDPTTATRTAIRSLARRWLALHDEIRDLERELTTLLTQICPRLLAQRGVGIDVAAKLVIAAGENPERLRNESSFAALCGVSPVDASSGKHTHHRLNRGGNRQANNALHTVMLVRARHCPETRAYIQRRREQGLPTRDIQRCLKRALARRFHHIIIQDLTTPLT

SEQ ID NO: 242467 - protein, 391 aa, unidentified
MLICGIDIGKNNHEACLIDETGRQLAKTLRFANTTDGGARLLDYFNGCNPAKDVIVVGMEATGHYWLSLYCFLFDHGFQVNVINPLQSDAVRNLFLRKTKNDAKDSFLIAETIRIGRFSNTELADETILSMRQLCRHRMDLVDYIADQKRKIIGVMDRVFPEYQHFFSDMFGKTSTELLSQAVTPEEILSIPTDELSDILKKASRGRFGDAKVEEIREAAKNSFGITIATTAFSMQLRQLLEMIGLLERQLDELDFEIEQYLIQLDTPITSCPGVGKVLGAVILSEIGDISRFTEPKKLVAFVGVDPSVKQSGEFVGTQNKISKRGSPNLRRAIWMAATVAAFHDPVISAFYQKKRSEGKHHSSAIGACARKLTLIIYAVLRDNKPYVPNC

SEQ ID NO: 242468 - protein, 427 aa, unidentified
MKQEDLSRIERFRQFRKQIRGSDKYLTVGIDIAKSKHYATFATTQGRIGHKGLVFENNASGFEHLLTQVQFYQDRDGFEQVVFGLEPTSVYQKPLAEFLIQQDYLVVYVTNEAIKDNRRTLDGRWDKHDKKDSANVADLVGQGKCQYYDLPNIDLRDIRNLLLLRKRLKKQLHGCRIRIRNNLVAQYFPELDRLWHQCEAENLAIVRWCLSPAKINQLRFEDFFQMVTTGKKGLRQYQRLRKIWEMAPYSIGCRPGQTLELEAQIMVGWVEYIKKQLDQVQKMIEDLCRSFVEYEYLLSIPGFGSYIAAVVLAAIGNPLRFNKASELIRLAGFDLSAKRSGKTSSSAVPVISKKGKVELRYALYQAALIASSRTPRFKAYYHRVLEGRQREKGIRTKMRVKLAVKLLVIAWTLMKKREYFDPDCITI

SEQ ID NO: 242469 - protein, 346 aa, unidentified
MEHYVGLDVSLKLTAICIVDRTGKIQREGVVHSDPEAIAAFIKSNAPHVARIGLETGATSTWLWTELNRLGLPVICIDARHAKAALKMQINKSDRNDAIGIARIMQCGWYKEVRVKDLDSHAVKALLVSRALLVKIKRDLENQVRGLLKNLGLVIGPAKMNVFALRAAELTEDRPELTVAVTPLLSARMAIAQQIADLDRKVMKLARNNAQVQQFMTAPGIGPVTALCFLATIDDPRRFRRSRSVGAYVGLTTRRYASGEIDWTGRISKCGDKMLRSYLYEAANVLLTRVAKWSALKAWGIRLAKRSGLRKAKVAVARKLAVILHRMWIDGTDFKWSSKETANQTA

SEQ ID NO: 242470 - protein, 340 aa, unidentified
MKKVFVGIDFSKLKFDAAIYIVDTKQIVSEEEFKNEPSGYADFLEWVKENACCPKSFILFCGEHTGYYSANLSTFLFESGYDMWLAPGLQIKKSQGIKRAKTDRIDACKIAEYAYRFRDKVLLFHPISKALDEIRDLLSYRERLVGKRKVLSTSAKEVKRVKDSSSCDFIYLDSLEYIKSLSKSIRNCEKRIEALMEGDQLLNTHYKLMNSVVGIGLVNSALILVATSNFSLFSNPRKFGCYCGVVPFEYSSGSSIRGKSHVSKLANKHLKTKLTLAAQNTIRYDPELRDYYLRKRSEGKCHWLVLNNVKNKLIHRIFAVVRDGKMYDKLYLHPLKKGAA

SEQ ID NO: 242471 - protein, 350 aa, unidentified
MQGNGRWIGLDLSKRTYEMCYFDQKGKVGRSGGETTKGGRAKLYAKLKAEDIVAMEANSLAFVMEKEMRAIGCTVVILNASQLSVIYASTKKTDKEDALKLARLVKIYEKEDLPTVDVPTDKEYYRRKLTKECKTLKDDRTQEINRLHALFLQCGITTMKRSNLQTDANRQKVLPQLFGYEVGQAKRVCERLTLLEAQIKELEQTITKECKTDKDIERLKTIPGVGDKTALAFSAYVGDGKRFNNGDEVANYLGLVPRVDCSGSINRYGHITKKGNRIVRALLYQAAWAIVRSKHGGALKAKYFYMTEYGKGKKISITAIARKMAKLLYVVMKNKQMVYQENPVSALQAG

SEQ ID NO: 242472 - protein, 314 aa, unidentified
MSTEYFVGIDVSKDTLDVCVYPTQDTYRVPNSPDGLDELIKRLKTIEPRLIVCEATGGYETLAVSSLAAAGLPVVVVNPRQIRNFAKSIGQLAKTDVIDAAVIARFASAVRPELRPMKDSPSQELTGLVTRRRQIVDMIVAETNRLQAATRRNRRDIQKHIGWLQKRLKQIDDEIKRDIKNGPLWRTTDQILQSTPGVGPATSAMLISCVPELGQLDRKKIACLIGVAPLNRDSGRYKGRRTIWGGRAQVRAVLYMSALSAIQYNPVIRQFYQRLREAGKCFKVAIVACMRKLLIILNAMVRNQTKWRHGEINP

SEQ ID NO: 242473 - protein, 364 aa, unidentified
MMIIGCDFHPRFQQIAYLDQATGECGERRLDHPRQAAEFYRSLPQGQVRIGMEATGNYRWFRRLLAELGQEVLLGDPAAIRASVVRKQKTDKRDAKHILNLLLEDRFPAVWQPSAENEQLRQLLLHRCRLVRLRVQVKNQLDSVAKNEGLEEKRSWSALRRRTIEALPLTGWYETRRTDLLALLDELSVRIQLLDEAVEKAAWADEAARRLMTHSGVGPVVSLAYVLTIGDWQRFPRGKHVASYIGLTPAEESSSDKRRLGHISKQGNTLLRWLLVEAASKAQSSDASWHRQYLRLSMNKHHGVAKVAIAHKLAVRLYWMWRSGQDWREIKERGSHPSNEDLSLGARGSHAGQSGYPSDCGMKL

SEQ ID NO: 242474 - protein, 349 aa, unidentified
MTEQRRSYAGECVYVGVDVHKETYAVTCVCHKQIVKTATVQAEPTGLAASLLRWFPGATLYSAYEAGFSAFVLHRALTTAGITNIVVNPASIAVAANDKVKTDRRDSKKLAVDLADGRLRGIYIPTEEEELARLLPRTRAQLVEHRATLARQIKAKLHQFGLITPSSRRLLSHRYLREIASWTLPPELRASLKMLAEQWRFVTRQLLEMRRLLRDQAQAQEDIEKVYRSVPGIGEVVARTLATELGDMTRFANERALFSYTGLTPSEYSSGASVRRGHISRQGSSRVRHLLVETAWRAMPRDGVLKEMFDRIAATRGKKRAIVAIARRLTGRIRACFRQGTTYAVGTYA

SEQ ID NO: 242475 - protein, 325 aa, unidentified
MKNTQSQFTTVIGIDISKNKIDVADNQDSTVKTVGNNNKELTQWINSIADKTVTIVVMEATGGYESLLVELLHKHEIALAVVNPRRVCNFAIGIGRDAKTDPIDAGVLVRFGEVVKPSPQLVQSEEQIKLGVLVERRRQILDLINQEQNRSQQTRDTEIRKSIDTVLETLKKQLKTLDERIAQAVAADEANARKVEILNSVKGIGPVTISTIVAELPELGKLNRQKIAKLAGVAPINNDSGQSIGKRKTAGGRSGVRRTLYMATLVATRFNPRIKEFYQRLLAKGKVKKVALTAAMRKLLTILNTLVSTDQLWIDPVAGSTKTAL

SEQ ID NO: 242476 - protein, 324 aa, unidentified
MATTRHTLGIDIAKASYQVTLKRTDGKRRQKSVRNTPAGHAALIEWLHRHADAPVHACLESTGTYAEDVATALIEAGHQVSIVNPAAVKAFAQSQLRRTKTDGVDADVLADFCATMTPALWTPWPVEVRALQGLVRRRDAVQDMLTQERNRQAAGGLTTSVAASLARMIEVLEAELADLDRQIRNHLDQHPTLRAQRDLLSTIPGIGVATAARLLTECRAITAFETARAYAAFAGLVPRERQSGQRRPRAHLSKLGSPRLRYAMYFPALTAMRVQGPVQTFGARLRAAGKPKMVVVAAVMRKLLHIVYGVLKHQRPFDPQVLGA

SEQ ID NO: 242477 - protein, 402 aa, unidentified
MLSVGIDVSKGISTVCMLRPNEKPVMPPTEIVHSEASLEVFCQKLHSFNEELRVVMEATGAYHLPILKKLKEHGFFVSVINPLLMKKYSATTIRKAKTDKIDSIKIANYGIDNWFKLIEYQPTAEIYEELRYLGRQYAHYIKIKVESKLSLTSILDRTMPGIKALLKSTNVDNPAKDKLCDFVERYWHYDNITKLSEDEFICDYCKWAKEKRYAASTTKAKAIYQMAQAGIPTLSSSASSTKMLSLEAVRVLNEINKTLSIILTEMRKLAITLPEYDTVLAMNGVGAVLSLMLIAEIGDVNRFRNGSALVAYAGLDAPPFESGKFVGTKRSISKRGSSLLRKIGYVIMKCLKSVKPKEDAAVYDFMIKKEQEGKPSKVAKIAALNKFLRIYHARVKEVYSLA

SEQ ID NO: 242478 - protein, 339 aa, unidentified
MQVTTIGVDLAKNVFQVHGITTREEVVFNKPLRRAQFLPFFAKLEPCLIGMESCSSAHHWARELTALGHEVRLIPPMYVKPYVKRGKSDAIDAEAICEAVTRPTMRFVAIKTVEQQALLSLHRARDLLVRQRTQLINSLRGLVAEFGIYIPRGLARVIGFAEDITLGEVLDLPDIANEVIRNLAEQLMALHRRVRWYEERLKQVAKEDARVRLLRTIPGIGAVTASAIIASIGDGHQFRNGREFAAWLGLTPANKSSGGKEKLGRITKMGDQYLRSLLVVGMTSLVRQTRSHPERASKWLTSLLDRKPARVATVAMANKTARIVWAVLTRNEPYNPRTA

SEQ ID NO: 242479 - protein, 402 aa, unidentified
MIFINCLGIDIGKSQSLLAHYKDEVLVKEMVIQNNQNGYRYLKNYIKHLDSLFILFESTGIYSRGMKRFCEIHKIDYLEMNPLEAKFKTSSLRSWKTDKSDAHKLALLAFRMKDSKVQRQSEEIYFELRKRARFHLEMEINQNRLKVELVETLHQTFPGLEKLFTNRYSKIALNIAQAFPHPDFVSTLTHDELVEKVLHSTDKGISVNKAHKYVQKLIEIKNNSFPNVDKSSFLLQKVQYLCDKLLIGIEEMKEFDQEMIDLAKNTTEFENIISIPGIGELTAALLIGELGNIREFKTNKQLNAFVGIDIKRYQSGTSKSRDTINKRGNKKARRLLYLIIMNIIRGRNHYQSHIVDYYYKLREQPHGKTHKTAVIASINRLLKTIHYLIVNNKLYDYQKAPH

SEQ ID NO: 242480 - protein, 485 aa, unidentified
MKTKRLEGAQEAKKASCRATQGKWHDMNRKQRREMMRKIQSEDLSLAVIHPDAAGIDIGNEFHYVAVPPIRDSQSVQRFGCTTAELKAMAAWLKQCSIHTVAMQSTSVYWIAVYDILEQAGLEVYLVNARDTKNLPGRKSDVQESQWLMKLHTYGLLRNSFRPSQEVRTMRTYWRQRNDLVRAAARHIHRIQKALTQMNIQLANVLSDVSGMTGQAIIKAVLAGERNPLKLAAFRDPRVKASEEQIARSLEGNWQQDLLFVLKQEQDGYEFCQRQMAECDRQLNQYLEQREDRSQAAPLPEEKRKERLKKKKGNKPQFDLRAGLFRMTGTDLTQIDCVDVMTATTIFSEAGWDMSKWKTEHHFVSWLRLCPDNRISGEKIIGKGRLPTNNRVTTALKISANNLRLSNTYLGAQFRRLRTKLGAPIAIKAMAAKLARLVYRILRYGIKYVDRGATFYEAQHRQIQIKHLKWKAAKLGFKIIEAPAA

SEQ ID NO: 242481 - protein, 448 aa, unidentified
MGKPQVIDDEEHERVYDRVAAVDVAKKEGVVCTRAPHSSRPGARQSVVWTVQATMPAVGQLAGQLAAGGIQIVTLESTSDYWRIWYYVLEAAGLAVQLVNAAQVKQVPGRPKTDKLDAVWLARLTEKGLLRPSFVPPAEIRALRHYTRARTHLTGDRTRCWQRLEKLLEDALIKVSAVASKLTTASARDMIAALIAGERDPAVLAGLARGRMKAKHDALTQALAGMFDDHHGQIAAMLVDQIGFCDRQIARATMLIGEQLAVIRDAWGIGPGGATGPGAGEGDDAIALPAVARLDEIPGVSAELAASIIAETGLDMTRFPDAGHLVSWAGLCPRTVQSGPRTRQAKGQGNTYLRGYLGQAATGAAGTATFLGERHARIARRRGTAKAQVAIARSILVITWHLLADPHARYTDLVPGHYENKINKNRKTRTHIRQLQALGYTVTLTPAT

SEQ ID NO: 242482 - protein, 355 aa, unidentified
MTSTLYIGLDVHKESISIAVMNSVGKVVMECVIETKASTILQFIDGLRGDVRVTLEEGTWTAWLYELLKPRVTEIVVCNPRKAALLKDGSKGDRIDAHKLAELLYMNKIKSVYHGEHGLRTMKELARSYLTISKDLTRVMNRLKSLYRSWGIPCADKEVYAPRYRAEWLGKIREAGVRRRAEHYYQQLDVMRLLRQEARRDLLVEAKKHKAWKLLRDIPGIGPIRAAVLIAVMQTPHRFRTKRQLWAYSGLALETHDSAQYHAVKGELRRSKRSATVRGLNKDHNHDLKDIFKGAAMRASTAAGPLHDFYENLLAKGRKPTMARLTLARKIAAIILIVWKKEVRFDANYLKPQAA

SEQ ID NO: 242483 - protein, 395 aa, unidentified
MKKSIKTIIWVGLDVHKKGISVCWYEGDSQAEEFRAMGNSRGEIKLLFGRLRRRGEVRACYEAGPCGYEVRRVLSEMGIHCDVIAPSLIPKMAGDRVKTDRKDARKLARLYRAGELTLVRVPTEQEEAARDLVRCREDLREDAQRARHRLLKFMLRRGRIWTQGKNWTLRHWRWLRQQKFKEMEAQRTFEEYVVQLETRLDRQGMMDQELNELAQREPWKAMVDRLKSLKGFDTLSALIVAVEVVDFRRFRSPRELAAYLGVTPTLYASGEKSVKGRITKCGNRHVRRVLTEASWSYARPVQPAERIRQRTEGQPPWVHDVAVKAQHRLHMRYRRLLGRGKRINVANVAVTRELAGFIWALMVGVPARRTGSPPDRESTRSFVLTGRVNTGKKAA

SEQ ID NO: 242484 - protein, 372 aa, unidentified
MENIIYIGMDVHKESFSLCALYGTTGEIVREARCASNVSLVKKFVEKLKTKYGEDIKIKAGYEAGCLGYSLHNFLEQNGIDCDILAPTTMYSSSKNKMMKNDRFDAKMIALNLANGTYKAVYVPEEEDVAVKEYIRMLSDFKTSLKKIKQQIKAFLLRHGYVYEGKSSWTIAYMNWVKTLEVQGLFKETLDEYLLQYDVLVDKIERFSLRLEELSHSERYEKPVAKLRCLKGIDTTAAMTVHVEIADFTRFPTAKAFMAYVGLTPSESSSGEKISRSSITKQGNSTVRSTLVECANALIKGTIGLKSKRVKARQKGQQSEVISYADRAVERLQRKYHRMMYQGEPRNVAVTAIARELGCFILGLETGQINRK

SEQ ID NO: 242485 - protein, 494 aa, unidentified
MHFSGKVEEREEQLNKQKVVAWVGIDWADEGHEVWEYTVQTDSATCYAIKHTAESLQEWVNQLRIRHGGKPVAVVLEQARGGLIYALMNTGFMEIYPVNPESLAKFRKALYPSGAKSDPTDAELLGQMVRQNPGRFRAWVPGDEQTRSLQLLAEGRRKLVEDMTALTNQLTSVLKTYYPQALNWAGDLSSEQACSFLEKWPTLADLQKSRPFRIREFYQKYGRPPREVLDERVTQIEKAQPLTADPAVVMAGKMMVNAVVAQIRPLRAAIENYDVEIERIFRQHPDRAVFESFPGAGKVLAPRLLAAFGADRDRFETALEVQQFSGIAPVTERSGKTIWVHRRLACPKFVLQTFHEFANQSRRFCVWSKLYYQQQRARGKHHNAAVRALAYKWIRILFRCWKDRRLYDDSRYQKSLIKRGASLAPLLNVLDCANGVRSCEPGLDKQPQMSTVSRFIRTYSEREAGGLKNFGRLCRIRARPFDYIVNVGKPPKDP

SEQ ID NO: 242486 - protein, 453 aa, unidentified
MSLIYRRCAGLDVHKKSISVCVRVRTGSDRSETESANFGTFTHDLKEMAEWLKTRKVRHVAMESTGVYWKPVWNVLESGKWKFDLVLVNPQQVRALPGKKTDREDSARISAYLQQGLLRGSFVPPKQTRELRELTRRRTHLQGDRNRVINRMGRLLETANVKLASVLSNLVGKSGRAILNAIQSGESNPQALAGHTFGRLKCTRQELEQALEGRYDDHLRWSLRQLLEDLDALDRHVAAVDLRIGELTVEQRDGIARLGTLPGVDITTAYTIIAEIGTDMSQFPDARHLASWAGLCPGNSESAGKRFSGRTRKGNRYLRRILVQNAWAVAHMKDCALTALFYRVAAHAGMKKAAVAVAHRILMLAYYILRDGTEYREAGGDCYDRRNPAKTAKRLARRLRIGFEVTLKPREPRNQPRGSGPLPGQTCKRCNAWRIPCIHIRPRIAPPPNELSD

SEQ ID NO: 242487 - protein, 316 aa, unidentified
MIAQGVFVGIDVSKERLDVALFSEGQSWSVGNDERGIAQLVSQLRELRPELVVMEATGGLEIAVAAELGVAGMPVAIVNPRHVRDFAKALGILAKTDRLDAHVLAKFAQAVRPEPRALADVQTRQLEALVTRRRQVVEMITAERNRLHKALPAVQPRIKQHIAWLEQELKALDGDLHDSIRNSPLWRAKEELLRSVPGVGPVLTCTLLAELPELGRLNRKQIAALVGVAPLNRDSGKLHGRRTTWGGRASVRVALYMATLAATQHNPVIKAFYERLIAAGKLRKVALVACMHKLLVILNSMLQHQTSWHPACSLAQ

SEQ ID NO: 242488 - protein, 376 aa, unidentified
MGDHSEAFVGIDTSKLRNAVAIADAGRGGEVRFLGEIENTPVATAKLVRKLAAKYKRLRFCYEAGPTGYGLHRQIKGLGFECTVVAPSLIPKRPGDKVKTNRRDALSLAKLLRADELTAVWVPDGGHEAMRDLTRARETAMLDLRTKRQHVSAFLLRLGRPYPESKKTWTSVHVRWIASQKLEHPQQRLVLEEMMLAIRQAQERLQRLEQAIAAAVPEWSLAALVTALMAMRGLDLIAATTLLAEIGDLSRFRTPTELMAYLGLVPSEDSTGDTIKRGPITKAGNRRARRMLVECSWSYQHPPRVGQAKQPKVDAAPPAVREIAWKAQCRLYRRYRTLIRNGKLKTVAIVAIARELAGFIWAVARAVTTTRFAAAA

SEQ ID NO: 242489 - protein, 316 aa, unidentified
MMMQIYCGVDVSKARLDSFVATSSKAGIFDSFENTAEGIEELRQFALVHGAQVVVMESSGVVCDLPYRLLWQSGMPCALVNPAYVRDFAKSMGRLEKTDRIDAEVITRFASAKELVANAPPSPEQQRLSAYFARMRQVTSDLVTQKQRLHGTVEDFALEGIRELIKVLEKQSRKLAAEIASMIDDDPVWQALATAFTSYKGVASRTVAVILADLPEIGTYDNRAISKLAGLAPLANDSGQRHGKRPIRGGRASVRSILFLVADIVAKYDPHFADFKARLIAKGKAKMQIRIALARKLLVRLNAKARDIRAELKNAA

SEQ ID NO: 242490 - protein, 313 aa, unidentified
MIIPLRYVGIDVSKQYLDIFDEALGVPERIANAPQAITQIAARWRCDVLVVFEATGVYDLELREVLGRAGIRFARINPARARDFARASGRLAKTDPIDARMLAAFGRVMQPATEQAVNPARNALARLAKRRDQLVLMRAQEKNRRSEADDRALAERISRLIEVLDSEIAEIEADIKELIKTEPEITDEARLMRSLPGVGPVACMQLIAKMPELGRVGAKQIAALAGLAPFNVDSGAFRGKRKIAGGRKRVRDALYMAALNAVRRADPFKAFYERLRQAGKPAKLALIAVARKLLTVLNAMMRDRKPYLQAEPT

SEQ ID NO: 242491 - protein, 281 aa, unidentified
MEKKWFIGIDISKKTLDVVIYVPTKKHADETNYERFLNKEEGYKSLLCWLKKKNMAKKRLVISMENTGIYSFDLCLFLEAASIDYCSFNPLHLKRSLGLVRGKNDRVDAERIAYFAYLHRDELSYSKLSGSSIIRLRDFAAERKRFVKQQAEYKGFLTDRKDCEMTSTIERAAHMVKILDEEIASVEEEMLQIINSDPSILRNYELLNSIKGIGTINAMNTIIHTNNFQAFETARQYACYLGIAPFEHSSGTSIKGKTRVYPTGAKLLKADLSQAANSAIV

SEQ ID NO: 242492 - protein, 315 aa, unidentified
MNKAQVVVGIDVSKAVLDVAVLPSGQMLQFANDANGIEALGKKLQSEAAELVVMEATGGYETALGAALVGSGLRVAVVNPRQIRDFAKATGRLAKSDRIDAQVIAAFGQAIEPQIVRLPDEDARELEALLVRRRQLVAMRVQEVNRLGLAQGAMRKNIKAHIDWLEKQIDRLDIDITAGLRSSPAWRAKDELLRSFKGVGPITSSTLLVALPELGQLDRRAIAALVGVAPFNCDSGVMRGRRSIYGGRSQVRTLLYMAATTAIRSNPLIRAFYERLKSRGKPHKVAMVACMRKILTILNAMLRQSTPWTPEINPL

SEQ ID NO: 242493 - protein, 402 aa, unidentified
MSINGALVPAAAVVAVDVGKNTAAVLVTDAGRRRLLGPLSFSMTALDVSGVVTKARVVVPAGVIRVGVEAAGHYHRPLATPTVWPGWEVVELNPAHVTEQRRVMGRRRVKTDAIDLEAITELLLAGRGTPVAAPVSAVGELAGWAAHRHRRVITRTATKNQLLGQLDRSFPGVTLALPDPLRTRVGRLVIAHFSDPHRLAALGVTRFVRFAAVRGVQVRTAVAERCVSAARDALPGPDAAVARQVLAADLVLLASLDAQVDQAEAQLARLLPATPFAPLMTVPGWGIVRAANYGAAVGDPARWPSPKQLYRASGLSPMQYESAGRRRDGAISREGSVQLRQALIDLGLGLWMCDPDAKRYGQTLRARGKKGGVICCAMAHRANKIAYALVRDQAGYDPARWA

SEQ ID NO: 242494 - protein, 405 aa, unidentified
MGCVRLMVRRTPTRECRTFATTTEGLLALLAWLTASRCTQVAMEATGVYWTPVWKILSAGDFTLIVANAAHIKQVPGRKTDINDAMWIADLLACGLIKASFVPEEDIQELRALMRTRKQLVREQTRHVQRLQKTLEEANINPGLNPGDIMGVSGRRMIEAMIAGERDPHRLAALAARGIKASPKALYDALYGRLREHHRFLLKLHLQQWDALDAAIRQIDRQVAGQIARMDEEAADETSPFRELILRLSAIPGVSRLSATAILAEIGRDMSRFPTAGHLVAWAGLCPGQNESAGTRKSARLRKGAPWLKTMLVQCAWAAKRAKDSYYMAQFHRLRSRRGPQKAICAVAASILTAIYHMLKSGTPHRDLGADYFDRRSPEAKAKRLVTQLTKLGFDVKLQPLAVAA

SEQ ID NO: 242495 - protein, 344 aa, unidentified
MERYLGIDPHRDSCTLALVSPRGKKIKQMVVPTEGSALVKTVRDLRGPLHVCVEEGEWGEWISETLTPWVARLVVCRPEKRRGPKSDACDARELAERLRTNRTGPPVYKPSVEWARLREAVRLESKLTQDLTRTKLRLNSLYRRRGVTCPNGDLYLPRHRGKWVVRLPPSGRPCAELWGEQIDLLGELREKAERQMHTAAAKFPIWRMLQTAPGIAEKRAAILLATVVTPHRFRTKRQFWSYCGLGIVTRSTSDWVQQSGRWVRAPVIETRGLNRASNRPLKAVFKGASQSARSMLRPNPFLDHYERMLEAGTKPNLAQLTLARKLAAIVLAMWKTESEYKLMS

SEQ ID NO: 242496 - protein, 432 aa, unidentified
MHNSKTSYLSVGIDIGADFSLMSVALPTQEIVGNAYRINHDNLLSIQGAISRIRGLESEHNLQSKVFMESTSIYHLPLYYRFKDEEFEVFVLNPLITHANRNINIRSIHNDKFDSQKIALIGLKPKLKISVIPDDYTAAVKVMMREYHSMKKECTMLACRLTSQLRQTFPQYLKLFSQINGNTSLEILYRYTTPENIMTADKDEFVALIAKASSRNLTNAECKYEQLVQAATQANSFGHSNNGNIILIRHIVEMIRFNQEQTQRLLEKIEQIIYEQPNSKLANQIRLIESIPGAGFVTAATVACEIGDFSAFRRPKHLYAYFGLDPKVRQSGHFTGTELKMSKRGSPYARRSIYILALQSISVNKNREPKNPVLREYYLKKCESKAKMTAIGAVMHKVCNIIFAVLRDEKPFALVTPQQHLEAYTAALDVAA

SEQ ID NO: 242497 - protein, 347 aa, unidentified
MEFIGIDLHKRIFTVCVLDENEKVIDEMIDVETSEKGLDLFMSRHPPDDCLIVFENLTRAHFAYHYLYKNGYAVNVAHTGHGALGEIVNSNFKTDRIDAYKLALLCKDMWSGRRFIRRTHISSDENMRMKAVVRVCNVCSNIRDEMYLRIGEYMNLHNIPPHPRFKDIMGMKYRQYLLDMHDPALTIMVNTMSNAMAQIKEANDTIREFARESEDAKLLMSIKGISALTAVTIVTGIDGIYRFETPESLVAFFGLAVPHKESAHKKTKIGVITKEGDPLIRKYLANAVVNHSVWCPSSDLARFYKKKSESMPHWKSVTAAMRKLTCIIWAMLTKREYYNPQAMNLRN

SEQ ID NO: 242498 - protein, 427 aa, unidentified
MKEQSGMIVGIDWSADSHTCYDLKADKSFKIPDSVKGYERLLNDYPEAVFVIEEANNRIGDYLLTNKREVYVLPPCRSKEARKYHFSSGAKSDSLDAKAIALTFKEHPSYCLKARYSGVGAKITKLVTMYSIVSKIHSQQCNRLYSVLLRYFPEYLHIMDKQYRSNTSLRILSICPTITEFKKVSNEELRKILNKENYRMTSILRKKLDRIRSEGISWGDTSCEGNLIMFLANQILTLREEQERLRGEMGETLENSPYRIILSIPGVKAVIGSYIVKAYLTHDFRSYQEMQKYAGTIPFLFQSGRKSIMLMRKKCDKDLRNMIHIAAFASLKTCGWARNYYKRKRKEGKTYGHALRALGNIILKIAFSMLSKMKEYNETLFLNAKGINTTQQNNTIIPEAFTNPEYSQDAHPSLAATKDVVENLNVT

SEQ ID NO: 242499 - protein, 411 aa, unidentified
MKQQFDVFVGIDWGSEQHRVCVVNPDGDIVDQKWIEHSGQSLAELVTWLRSKTSASPGKIAIAIELPRGPVVETLMEQGFAVFSINPKQLDRFRDRYSPAGAKDDSRDAFVLGDSLRTDMHCFHAVRLDEPAVIRLRELSRLDEDLRQEQNRLQNQLREQWHRYFPQLLKLSSAADEPWVWDLFQAAPLPAKAAKLPESRIQRILSKNRIRRMDAPKVHAILAATPLAVAPGAAEAASEHALLLLPRLRLLQQQRGGIAKKLDVVLEQLATPDQTSGEPVEHRDAEVLLSLPGVGRQIAATMLGEASQAIAERDYHGLRCYTGAAPITRQSGKKKIVLMRQGCNERLRNALYHWARVSVVCDPKSKAQYAEMRHKGQSHGRALRGIADRWLDVLISMLTHHTLYDPKRRAA

SEQ ID NO: 242500 - protein, 403 aa, unidentified
MWFLGVDWGERHHDLCVLDQDGMVLATRRIADGLAGVGELHTLVATHVGDPAQVAVGIETDHGLLVAALVAAGYQVFAVNPQVVSHYRGRQGSSRAKSDRGDAKVLADLVRTDRHNHRQVAGDSPLAEAVKVLARAHQNLIWARQRHVNALRSALREFYPGALAALGAQLAEREALAVLQLAPTPEQGRRLTRAAVRRALVGAGRRRNLQARVVAVHDALSASQLAVPTPIEAAYREVVGALVAVLSCLNDQVAALEQQVAARFADHRDAAIIHSQPGLGVVLGARVLGEFGDDPDRYQTAKGRKAFAGTAPVTRSSGLRTTVVARAACNQRLVDACYLWAFAALTASPGARRCYDAHRARGASHHQALRALGNRLVGILHGCLAHRVLYQEQIAWPTAQPAA

SEQ ID NO: 242501 - protein, 346 aa, unidentified
MQHFVGLDVSQEMTHLCVIDGDGKAVWQGRCLSTPEDIAAAIRPKASDVVRIGLESGPLSTWHWHALKAMGLPVVCLDSRHAQATMSGQVNKTDKGDAYGLAQIVRAAWYREVGVKSLDSHTIRSMLGARAQLVGTRVEVTNQIRGILKTFGIVLSRRTGEPFERLVAEACSNSGSMLDHTVRSLLSVYSCLKDQIRHLDRQLMARARNSAVCQQLMTIPGVGILTALAFVTGIDDPSKFAKSSSVGAYFGLTPRCYQSGEIDQNRGISKCGDGLVRTYLFKAAGTLLTRVEKWSALKAWGLRLAKRSGLKKAKIAVARKLAVLMHRMWVDGAPYRWSAAEPAAAA

SEQ ID NO: 242502 - protein, 323 aa, unidentified
MEIWVGIDISAKYFDAAWVDQDGKHHLKVDNNPEEFHKLLEAAPAQSGFVMEATGSYYLNLALFLSEEGRYVSVVNPLRIKNHCRADMARSKSDKSDAYAIARFGVEKRPRQWQPVTKDMAAIQQLRAVADMINMQTTQLSNQRHAFSQSKLASLDALHVLDMAIKVKRKLVSVTMQELEEVARRAYPRELDLATSIPGVGEETATRLMAIVGNFSRFETGRQLVSFLGVSPTLKQSGSSVHSRGHISRLGSTQVRRSLYFCAITATRFNPHCRAMWLRMKELKKPTKVILMAIANKLIRQIHALIRTNTPYDPNFFNLALAN

SEQ ID NO: 242503 - protein, 353 aa, unidentified
MFKIFRKNCCGLDVHKTWIYACIGITDTNGLTEYKQARFSSFSKGLKELAEWLAKYSCTEVCMESSGKYWIPVFNILEKICFVTLAHPKYTKPQKGNKTDRKDAKWICDLFMCDMIKPSFIPSPEIRQLRNLIRYRTKLTNMLTSEKNRAQNCLTVSNLKLDDVFSDVFGKSSRSITNYMLDHPGETFDVAPFVDLLYTLPGLDKNPMTAIAILSEINPDMSVFPSSQNLVYWAGCCPRNDQSACKVKSTRISRAGCYLKPLLVQVANALIKSKKHPEFKERYHRIKSHRGHKKAIIAVYKMLLTAIWNMLSKLEPYNPDGFLEHRPINEKKILTRSQALELFRLSGYTITDD

SEQ ID NO: 242504 - protein, 351 aa, unidentified
MKYYTSTTEFNCGIDLHAREMYVCVMDRQGNNVVHTNIVGNDFAYFLKKIEPFRHSLTVVCECTFNWYWLADACFEAKLPFVLAHALYLSHIHGGKNKNDRIDSEKLAHLLRSNLIPPSYVYPSERRPIRALLRQRMSYVWQRAALMTHVSMNQTAEGLTPAAKCGHNRDVWVERILAQYENPLHRMAVTCEMDVIRAYDIQIDKLEDEIIRQAKKHEGRDYHLLNTVPGIGRILAMTILFELDAIERFPTVKDFLSYSRLVKGSVASAGKIKGMTGGKMGNAYLRWAFGEAAVICKRNHPLLTPYADRLVAKRGKFKGNAILAAKLARAVYFMLQKGTAFDAEKLIATSL

SEQ ID NO: 242505 - protein, 424 aa, unidentified
MKVTFQTCCGVDVHKSFLVATIIKTSSSIEPSYQKRRFSTFNNSILEFKKWLLENECLYVCMESTGKYWIPVFNLLEDEINVTIANPKWVKAVKGNKDDTKDSKWIGDLFRLGLVRGSYIPCKKIRILREFTRYRYKLVSCRSSEKNRYQNALTVCNVALDSVVSDIFGKSSTSIIDYLLEQSGTSIDHEVIASKLLKRLKAKEDAVIESIEGYQMTDSQKYRMHLVRAHMDYITAAINDVDSEIESLIASDPDYENAVELLCTIPGVKYDSAITIISEIGIDMSQFCSSKRLCCWAGLTPGSNESAGKKKSVRITRAGVYLKPALVQCAHAAVKSDKSPYYKKKYESLVERRGKKRAIIAIARMILTAIFQMLTTGETWNPCDLYKIDMPEALLEKQKQKAIKQAQKLLIREGLLPPTEPIAS

SEQ ID NO: 242506 - protein, 424 aa, unidentified
MNLTQNDRLKQVTSDILIVGVDVGSQTHFCRAFDWRGFELSRRVFKFSNTGMGFLTFLRWTEELMNKTEMKKVIVGCEPTGCYWLTFQKFLQDHDIQLVTVNPFTVNRSMELDDNSPEKSDLKDPKTIALLVIDGRFSTSYLPSGVYAEIREASVCRDQIMKQNVRLSNQIQGWLQKFFPEYFECYADWDSTSGLMLLREAPLPQDILKIGAGGINQIWRDAKVRAAGIKRAQTLVEAAQNSVGLEAGEAARLEIWVLVNDYILKAEQLKRLDEYLEEKVKEVPNVEKLLAIKGVGMSTVIGFIAEVGDIGRFTDPKQIQKLAGLEIVKKSSGKKKGQPRISKRGRRKLRRTMYESARALMIWNPVFQDVFLYYRNRTKNPLGGMQAKIAVACKAIRVFYVVLQTGCDFDEEKFRKDIIRPEAA

SEQ ID NO: 242507 - protein, 420 aa, unidentified
MRNAGIHADSLLEVRRMYNAVGIDVSKGKSTVAVLQPGGTVIRKPFDVSHTSQNLNELADYLSSLDGTTKIVMECTGRYHEPMVKALSEAGLFVSIVNPHLIKNFGNNSLRKVKSDPADARKIARYTLDNWTDLRQYSGMDNTRTQLKTLNSQFSFFMKQKVAAKANLIALLDNTYPGVNKLFDSPTREDGSEKWVDYSYSFWHADCVRKIGLKAFTERYMSFCKKHHYIFQQDKPEKLFNASKELVAVFPKEKTYKLLIQQSIQQLNLASEHVERLRREMNELASTLPEYSTVMGIYGVGKTYGPQLIAEIGDVSRFTHREALTAFAGVDPGVDESGQHKSKSNRASKVGSARLRKTLFQIMTTLLQNAPEADPVYCFLNKKRSQGKPYYVYMTAGANKFLRIYYGKVKECLRNLEQTE

SEQ ID NO: 242508 - protein, 418 aa, unidentified
MKSMEITAVGIDVSKRKSTVAIRRPGGIIVACPFDISHSSHDLEKLVSILKTTGGDIRVVMEHTSNYWKPIALTLKNAGFYVSVVNAMLIHDFSDNSIRKLKTDRADSLKIANYALTFWNQLPPFNDEDETRLVLKEQSRMYERLASTATSLRNGLIALADQTFPSIDQAFGHAIKNADGHEKWVDFFSIYWHRDCVLRLSIEKFTESYRKWCLRRNYKFRTNTAHKLYALAQDAVPTLPKNNGTKALVLQACKSLNAVCEAKQSTQEEMNRLASLLPEYEVVMQMEGTGPITGPALMAEIGDVRRFKNKKALVAFAGIDAPPFQSGNFESKSRHVSKRGSPHLRRTVFLVANIILTLSHKDNSVFCFMDKKRAEGKHYYVYTIAGSAKFLRIYYARVSEYLRTQEPPAAAICLDCKD

SEQ ID NO: 242509 - protein, 391 aa, unidentified
MHKDTHCAVIIDCWMNKLGEVNFENRPSKFPAFVEDVRKICGTKEFVFGLEDTRGFGRNLAAYLVGRKFEVKHVNPAYTSAVRLANPIIYKDDAYDAYCVARVLRDMVDTLQDAKHEDIFWTIRQIVKRRDLVVKSNVMNKNQLHSQLSYSYPSYRKFFALIDAKSAMCFWENYPSPEHVKATTPEKIYETIKPVHQALKIQRIHEIISMIEKDGDTRKDYQPERDFIVKNIVKEIRHNKELIAEIDDELRKLLPLTGYKLQTMPSIDLATEAQLISEIGDINRFPDSDKLARFMGLAPVQFSSAGKGKDQRCRNGNRALNAIFHFLAIQMVAISPSGKPRHPVFREYFEHKVKEGKNKPQALVCVARRLVRIIYGMMKTKTEYRPFEKAQ

SEQ ID NO: 242510 - protein, 415 aa, unidentified
MEIIYPRVAGIDVGKREVAVAVRTPGEGPGQRRQQIRKYRTYYQVLREMVAWLVEQGVTHVTMEATGVYWKPVFHALCEAEQIEVLLVNARHVKNVPGRKTDVKDSAWLAQLLECGLLRGSFIPPKEIAAIRELTRYRKKLIEERTRELQRLSSVLEDGGIKIDSVASSITTLSARDMIEALIAGERDPRVLAELARGRMRNKIPDLTMACAGRFGDHHALLARMHTDQIDHLATMIGVLDHRIEEVTDPFAEQLKLLQSIPGIGERAAQVIISEIGADMARFPTAAHLASWAGLCPGNNESAGKHKTGRTRKGNAEVRTILTECAWSAGRTGTYVGAQFRRLHRRFGKQGGGKAAIAVAHTLIVIIWHVLHDRASYLDMGSDYFTRYHNPEARKRRLVHDLQSMGYEVTITPAA

SEQ ID NO: 242511 - protein, 389 aa, unidentified
MKIYVGIDIAKLNHFAAAISSDGEIIIEPFKFTNDADGFQLLVSKLESFDKNSIIIGLESTAHYGDNLVRYLVAEFYQVCVLNPIKTCQMRKNNVRKTKTDKVDTYVIAKTLMMQDNLRFVSFFDLDMMDLKALGRFRQKTIKQRTRLKIQLTTYVDQVFPEIQYFFKSGLHQHAVYALLKEAPSPKEIASMHMTHLANLLKVNSHGHFTKEQAKELRVLAQKSVGANDSAISIQITQTIQQIELLDSQLEKIEAEMTDIMKFNDSVIMTIPGIGYINGGMILGEIGDIHRFSNPNKLLAFAGLDPSVYQSGNFQAKTTRMSKRGSRVLRYALVNAAWNVVRNNATFKAYYDAKRAEGRSHYNALGHCAGKLVRVIWKMLTDNVEFNLK

SEQ ID NO: 242512 - protein, 357 aa, unidentified
MARNTTVRQKAKPVLNEPVFAGIDYSKAFSFVTIGDKDGKVLQQFKVMNSEGEWNDFFARFSKLKCALESCRGYEWLLDELIRQGHEVRLAEPRSVKLIAQSRCKTDKIDSRVLMELLAKDFLPVCYQPTKKERKYREILRSRAKLVNATVRFKQRVHALLDKENKSLKYPFSAKGRKELEERDLDEPRDEIMKDHLELIDFLEVQIHKHDVWIRQLAKSNADVYRLKQMPGFDVLTAMVFFAEVGNIQRFRKASQVAAFLGLVPSVYSSGTTNRHGRITKTGSKLLRRMLVESAWSAIRKSPALRNDYNNIARKRGKKVAIVAIARKLAEIGYHILKEKKGYDESKLDAGLVRAVS

SEQ ID NO: 242513 - protein, 338 aa, unidentified
MTVAFVGIDLAKNVFQIHGVSEKGEPLLKRRVRREGLLPAVGELPTCTIGIEACTGAFYWQRQFEALGHVVKVIAPQYVKPFVKHQKNDRNDAEAICTALMQPNMKFVPSKSEEQQDIQALHRARRRLVNHRTALVCQMRGLLLDRGVPIALTLGRARRSIPEVLEDQKNGLTAMTREIIGDLFAFLLQLDERIKAFDHRIDRVFRANADCKRIAQICGVGSKTATAVVAAVGGGKEFKNGRHMAAWMGLVPRQHSSGDKRLLMGISKRGDKHLRTLLIHGARSVVRVSQGRTDTFSRWVNSIRERRGMNRAIVAVANKNARIIWAMLRKNEEFRAHA

SEQ ID NO: 242514 - protein, 354 aa, unidentified
MLIIGCDFHTRYQPIAMAREETAEMLVERRLDHESGEAHAFYRGLQSSQEPVRVGIEATGPIHWFERLLTELGHELWIGDSAKIRASEVRKQKTDERDARLILDLLLSKRFPRIWVPTPAERDVRQLLWHRHKLVSMRTMLGNQLHALAMSQGLCRKQKLFTKKGRAELGSLTLGPWAGRRREELLKLLDQLEPPIAELDRAVLEEAKRREDAVLLMTHPGIGSVTSLAFVLAIGPVTRFQCSRKIASYLGLNPTEDSSGGRRRLGGISKQGNTMVRWLLIEAVYPAVRRDPALRQDYQRLKFRRGHAVAKVAIARKLAVRMYWMLRSGADYAQLVRRQGSPGGTLMNASSSLA

SEQ ID NO: 242515 - protein, 387 aa, unidentified
MPQANDLSRCLLTLEQDSTLIAVVELSQASWLVAGIVPAVERQPLKKIEADEAALLRLLGRWTDEATRAGRAITRVCVAFEAGRDGFWLARWLRARGIEAHVIHPSSVAVPREHRRAKTDRLDTELLKRAFLGWLRGERGHCTTAAIPTAEEEDAKRPNREHESLVGERTRIVNRMRSALARLGVRGFRPTLRKACERLGTLRTAEDAPLPPNTLAELRRDMARLRLVREQIAEVEAARLQRLEEEPGSRPHAMVRLLARVIGVGVETADMLVREVLSRELRDRRAVARYAGLTGSPDESGRRRREKGLAKAGNARVRHGMVQLAWRFLLFQRESALARWYRERTADARGGTRKTMIVALARKLLIALWRLVTTGAMPEGVVLRPAA

SEQ ID NO: 242516 - protein, 348 aa, unidentified
MTLTTIGLDVAKLVFQVHGVDENSRAALKRKLHRHEVVTFFEELPRCTVFLEACGASHYWARLLTALGHEVKLIAPEAVKPFAKKGKKNDAVDAAALCVAGSRPEIQFVPIKSVAQQAVLALHTARSLLVKQQTMLANAIRGLASEFGLVVPQGLHRLEELMVQVTAEASVPAVGRQALIVLHAQLQAAAERIVMLEEQIVVHARQNASARRLATIPGIGPITASLIAATMGDNITAFTSARHFAAWLGLVPRQHSTGGKPRLGRITKAGNTEIRRLLVLGATSMVRRAETWNSAAGIWLRGVLARRPVRLTTVALANKMARIAWALLTRNDVYRAQGRSKVAAGAAA

SEQ ID NO: 242517 - protein, 311 aa, unidentified
MTETTIGIDISKATLDVHRLSDGTAARFGNDKAGFRALKSWLKGHDIARVVYEPTGPYHRDFEIAFEADYPLVKVNPLQARRFTQSLGTKAKTDPVDAHMLAMMGAAFSLLPQLRTSAKQRDLKELHVTRLALIKDRARILNRQRSLTIALLKRQAKVRLKLMIAQIKQVDAEIQELLQNAPDTARATEIICSVPGLSKVSSAAILTEMPEIGTLSKKQVASLAGLAPMTRQSGQWRGKSFIQGGRKLLRDALYMPALVAMRHNPDLKAKYTALIAAGKPAKVALVALMRKLIILVNALIREDRKWEKIRA

SEQ ID NO: 242518 - protein, 421 aa, unidentified
MLKSDTDFAAFVGIDWADRKHDVCLALGDGDKLELSVLPHRPSCIEAWAQSLRERFGGRKVAVCLELTQGPIVSALLEHDIFVLFPVNPATLARYRKAFSPSGAKDDPTDAQIALELLLRHRDKLSPLEPDSTALRTLRRLVIVRRDLVEDRVRLTNRITSDLKQYFPQILGWFRDKHTAVFIDFLERWPTLQAAQRARRETLLDFFREHNVRNATTIERRLEAIESERPLTTDRAVLEPFQLAVESLLSQLRAVVDGIERFDAQIADRAKKLPDFALFAALPGAGPALAPRLLAAFGERRERFPDAAAFQKYVGIAPVTERSGNHSWVHWRFSCPTFVRQTLVEWTEQTIPTSFWAKAFYERHREKGASHNASIRALAFKWIRILWRCWVDRLPYDESRYLSALRKRGSPLLHFAALPSP

SEQ ID NO: 242519 - protein, 408 aa, unidentified
MSQVVIGMDPHKRTATIEIMAGDEAVAGRGRYATGAAGYAAMLAEARRWPRRMQAIEGCQGIGRHLASRLLADGEQVVDVPPKLPARTRMFATGQGRKTDATDAHSVALAATRMQGLRPAVDDQQLAVLRILADRRRSLGEDHTRMVCQLHRLLLELIPGGAKKALPAAQAKALLARVRPRDAAGKARRMVAAGLIGDLERIHQRKKAANKELNELLKASTTTLTALHGIGPSGAARLLAEVADVTRFPDKAHFASWNGTAPTGASSGEQVRHRLSRAGNRQINRVLHIMAVVQLRNPTEGRAYYDRKVAAGKTPMEAMRALKRRLSGIVYHQMILDARAKAAGPGGHLGAATGSSAAGLHPSAGTSEKSLPGPATSDPTPPRPARFSGHSAAPAPCRTAAAVKRPLA

SEQ ID NO: 242520 - protein, 403 aa, unidentified
MNAVGIDVSKGKSTIAVMRPFGEVVASPYDVAHTDSELSKLAKMLKSLKGETKIVMECTGNYHLPIAYTLHNAGLFVCAVNPQLVHGYGNNTIRKARNDRKDSIKIANYALSNWVDLPKYIPEEDTRHMLKTYSRQYSKYTKIKTMLTNNLIALCDQTFPGVNKLFTSPPRKRDGHEKWLDFTAYFWHRECICSLSVKAFSERYRKWCKREGYHFRQSRADEIYEFACSQVSVIPKNDVTKLLITQAVAQVTAVSQTVAVIAAEMKRLALTLPEYPVVIEFYGVGEILGPQLMAEIGDIYKYPKKSSLVCFTGLEPVENQSGKFSGNEEISKQGAPHLRKTLFQVMDCILQNAPADNPIFKFLDRKRAEGKHYYSYMCAGSAKFLRIYYARVKQYLDSLNSVE

SEQ ID NO: 242521 - protein, 340 aa, unidentified
MVHVGVDVHKRVSQIAVLSANGEVTQHRLENDRLQVHRFFAQVPAPARVAIEASGTWWWLVDLLEQLGHQPVLSHPKQTRAIAAARLKNDRVDAERLVQLLRGDLLPTVWIPPTAVREARELIRHRVSLVWERTGVTNRLLALLARRNLQPTSNQSWSTVGGQRELKALPLTPIPTTIREDCLALRRLLDEQIRRLDKELVKRWGDDLRVRRLITIPGIGPFIALRVVLELADISRFPSAKHLASYIGLTPRVRASAGSVRVGHISKEGNRLLRWALVLAATQAARRPGPLRTWYRLVQRRKGKKVARVALARRLAEICYQVWKEETDFLAVLRRGGVRG

SEQ ID NO: 242522 - protein, 343 aa, unidentified
MAIVILGIDLGKNSCSVVGQDESGAVVLRRRMRRHTILGFAAKLPACVVAMEACCGAHYLGRLLVTQGHTVRLMSPEYVRPYVKAQKNDDRDAEAIAEAASRPTMRFVELKSEEQLDIQTLHRVRSRLVAARRTLLNQLRAILLERGHIFPQGRRKLEQALDALVADPSFVVSRRMRQLIIDIRTEWQDLDRGIAALNAEFVELVRSDAAARRLTTIPGVGVLNATALMAAVGDASAFRRGRDLGAWLGLVPKQHTTGGRPKLLGISKRGNKYLRMLFIHGARAAMPTLAKSATPLGAWLRGLLARTHRNIAIVALANKLARIAWAMLRRDRAFELNHGAVAG

SEQ ID NO: 242523 - protein, 402 aa, unidentified
MNAVGIDVSKGKSMVAIMRPFGEIVSTPFEIKHTSSDINSLVKLIKSIEGESRIVMEHTGRYYEVLAHQLSEANLFVSAINPKLIKDFDNDSLRKVKTDKADSVKIARYALDKWQNLKQYSVMDELRNQLKTMNRQFGFYMKHKTAMKNNLIGILDQTYPGVNTYFDSPARSDGSQKWVDFASTYWHVDCVRKMSINAFIDHYENWCKRKKYNFSKSKAEEIYGKAKELVPVLPKDAITKLIIKQAVGQLNSASTTVESLRTLMNETASKLPEYPVVMAMKGVGISLGPQLMAEIGDVSRFTHKSAITAFAGVDPGVNESGSYEQKSVPTSKRGSSDLRKTLFQVMDVLIKTHPQDDPVYQFLDKKRAQGKPYYVYMTAGANKFLRIYYGRVKEYLSSLPES

SEQ ID NO: 242524 - protein, 343 aa, unidentified
MTKTPIAVLGIDLGKNSCSLAGLDAAGAVIIRRRMTREGTIKFVAALPACVVAMEACCGAHFLGRTFASQGHTVRLMSPEYVAPYVKAQKTDNRDAEAIAEAATRPTMRLVTLKSEAQLDLQVLHRARERLVAGRTRLINQLRAMLLERGVILPKRRAPLIKRLDELMAGELPISQRARQLLQDLRDEWMEQDRRIKAYDDELMALTREDGAARRLATIPGIGVVNATALLAAVGDASAFAKGRDLAAWLGLTPRQHSTGGKTKLLGISKRGNKYLRTQLIHGARAAIVHFAKKATPVGTWVRQLLTRAHPNVVVVALAAKLARIAWAVLRHGSNYDHRAATV

SEQ ID NO: 242525 - protein, 338 aa, unidentified
MSVATVGLDIAKQFFQVHGVDANGRVVLRKKLRRSQVAAFFANLPVCTVGLEACCGSHYWVRVLSRCGHDVRLIAPQFVKPYIKSNKNDANDAEAICEAVSRPLMRFVPGKSVEQQDIQSLHRVRSRLVSSRTGLANQIRGLLAEYGIVLPQHVSQLRRGLPLILEDATNELTSFSRRLFAHLYDELLSLEEKIGALDEQIESVFQASEPCQRVGAVEGIGPLTATALVAAMSDGKAFKNGRQFAAWLGLVPRQHSSGGKARLLGISKRGDTYLRTLLIHGARSVVSRASRKTDRRSVWITDKQRRLGTSKACVAVANKNARIVWSLIAREEVYRRAA

SEQ ID NO: 242526 - protein, 338 aa, unidentified
MNKLSIIGIDLAKNVIQLHGNDAHGHTRFTRKLKRKDVLEFMVKQPKSLVAMEACGGAHYWARTFQAQGHEVKMIHPQYVKPFVQVNKNDARDAQAIAEAAARPAMPTVAIKSIEQQDIQAIHRVRERLVKEKTAISNELRGLLGEYGIVMAQGHKSIRETVLSILENAENGMSMKGREIINDLREQWLDRELRIGEYDKALKIIAKDNAVCQRLQSIPGIGPVNATLLYSHAGDHKHFASGRHLSASLGLVPRQHASGGKENLLGISKRGNKHVRKQLVHGARAAYKVLLKADNKSRLSLWVKRMEGKHPNKIIVALANKMARIVWALMKNETEYQA

SEQ ID NO: 242527 - protein, 325 aa, unidentified
MNQSVNCTLGIDISKKKFDVALYLPSGKWKHKAFTNSSEGFQELSHWLRQLNIEQVHACMEATNIYGNALAEYLYDENHNVSVVNPARIKGFAQSEMLRTKNDKQDASLIARFCEALSPDLWKPEPISVRQLRALVRRLDMLIEMKQQEVNRLDVSDEIVQSDIRQHVKELEQRINKIRIDIEEHIDRDPDLKNKKELLLSIPGIGQKTMAIVLSYFASIRHFDSAKKLASFCGVAPREYQSGSSVNGRGAMSKIGSAHLRKSLFLPAMVALKYNPALKALKERLSEKGKPKMVIIGAAMRKLIHIIYGVLKSNLPFDENKAVKA

SEQ ID NO: 242528 - protein, 429 aa, unidentified
MEEVDEVELVVQRVAALDLGKATLEACMRVPHSSKPGRRMQEIRPYATTTAALLEMAIWLRQWGIERVVMESTSDYWKGVYYLLESEGFDCWLVNAREVKNVPGRAKTDRADAVWLAKVAERGMCRPSLVHPPPIRRLRDLTRYRRALVSDRSREMQRVEKLLEDAQIKISSVLSDIHGVSGRAMMEALIAGQRDPWSLARLAKGNARKKIDRLEEALRGFFTDHHATILQMMLDNIDRIGAQIAALDARIAEATGPFSRQVAQLTDIPGVDTVAGAELVAEIGVDMARFPTAAHLVSWAKFCPQIHQSAGKSRSKGRGKGNPWLAGAVGRIVFSASRTDTFLGARYRRLARRRGKSKAIIAVGNSVLTIVYHLLSDADLDFCELGPAHYESRINKNRRARDLATQLQALTGQRIVIRDGKAIITDDAA

SEQ ID NO: 242529 - protein, 343 aa, unidentified
MDYFAGLDVSVKDTSVCIVDDTGKIVREVKVSSEPEALLTVLRNPTYHFKRVGLEAGPLSQWLFSAMAEADLPVICVETRHMRAVLKARINKTDRNDARGIAQMIRVGLYRPVHVKTLRSQKLRMLLTHRKLLQSKAIAVDNDLRGTLRNFGLKVGMVGAVRFEARIRELVEDLPDLAVLIEPLLVVRRVLRDQVGILHRRLLAVVRDDEVCRRLMTVPGVGPVVALTYRATVDVPARFRKSKSVGAVFGLTCSRDQSGERDHPGAISRCGDEMMRTALYEAAQVMLMHSVKWSWLKAWAMKIARHRGRNKAIVALARRLAVIMHRIWVDGTEFRWTREAAAA

SEQ ID NO: 242530 - protein, 418 aa, unidentified
MKSIKAKKIKTINQKTLVVALDIGKKIHYGYFRAPNGNDIKPFPFYNTAQSFKKFWEKLCRFKEDHMLNEVVIGFESTGPYAEPISNYLRNKSVKLVQVNPMHTKRMKELTGNCPNKTDQKDPRVIADVISLGHSLTVIVPEGAAAQLRRLTQARERAIERRTAIFNQLQHLVFVIFPELVSIIKPSTKTGMYLIKNFSDPESIVSMGIERLYDIIRKTSRGRLSTDRAEKLYNAAQQSVGITEGKESIILEITYLVSRVDSENRHIETLEKQMTSHLTQIPYSHTILSVKGIGHVTVAGLIGEVGDFGKFKTISEVLKLAGLNLYEISSGKHQGSRHISKRGRSLLRKLLFFAAINTSRKNGIFHISYQRHLAKGMPKIKALVAIARKLMRTIFAMVRDHCEFDIDYSTQIELRKAA

SEQ ID NO: 242531 - protein, 351 aa, unidentified
MVVVGADVHKHKHTFVAVDEVGRKLGEKTVDATTAGHTTAIMWAHEQFGTELIWGIEDCRNMSARLERDLLGAGQQVVRVPTKLMAQVRKSGRTRGKSDPIDAEAVARAVLREPDLPVASHDEVSRECKLLTDRRDVLVAQRTSAINRLRWSVHELDPERGPAPRSLKTAKHQQALQAWLDTMSGLVAELARAELADIIRLTTEINALEKRLSERAREVAPTLLDIPGCADLSAAKLVGEAAGVARFKSEAAFACHAGVAPIPVWSGNTQGQMRLSRSGNRQLNAAIHRIAVTQIRMHASPGHAYYQRLITSGKTKTAARRCLKRRISRRVFQALLADHQTRRQDLQPAAA

SEQ ID NO: 242532 - protein, 370 aa, unidentified
MTSILYVGLDVHTTNYTICSYNGYDGNYFGEVTVKPEYQQIEKYVRRLQKQYEPGHRFLCGYEAGYLGYSLYHELASVGIECVILAPSTMCDTKTNRQIKTDPRDARNIANCLAYGLYSAVHVPTEQDDAVKEYMRMRDSAAAEFKAIKQQILAFCVRHGKRFEGKSTWTKKHLDWLDKLDFENPILQNAFLEYLRRYYHAQEMQDIYDTQIAEYAQMEEYRQKVSELRCLIGIETHTALALITEVSDFRRFGKADQFAAYLGLIPGEHSSAEKTNRLGITKTGNKHLRRLLVEAAQHYGRGAVGRKSVSLKKKQEGNRREVIEYADRCNTRLRRKFYRIASHSPRNVAKTAAARELACFVWGIMTEHIT

SEQ ID NO: 242533 - protein, 431 aa, unidentified
MNRSVGFLSVGIDVGADFSLMAFALPSQELLGKPYKIIHSSQHSLNGDVEKIKTLSQKYQLPARVFMESTGIYHYPLYHKMKDAGFNVFVLNPLVTHAGRDLNVRNIHNDKYDSQKIALLGLRPGLKTSLIPSDQVISMKVILREYYAVKKEISMYICRLKNQLRQAFPQFLPLFSKVNGVTAMAILCEYPNPESLLNAGEHAVADFMKSVSHNGPLKVQKKAAALIQAAQDARSFGHWNHGISILIRHYIEMIRLLDIRAKTLLAQAKALLAEQDSKTLAHQTELLQTIPGIGFLSALTLICELGDFSAFKRPKQLFSYFGLDPIVRQSGNYNGTNLKLSKRGSPFARRCIFVIALQSISLNIHKEPKNPVLRTFYEEKCMCKAKMTAIGAVMHKICNLIFAVLRNDAPFVLQTPEQHNAAYLSKTHSVV

SEQ ID NO: 242534 - protein, 400 aa, unidentified
MAETGRIWAGVDAGKEHHHVAALDEAGRLVLSRRVANDELALREVIAEVTALAAGPPRWAIDLRDGYAALLLALLAADAAEIVYVPGRMVNRMTGAYRGEGKTDAKDARIIADQARMRADLTPLAPGDELITELRMLVARRTDLVTDRTRVINRLRVTMVEISPALERALDFTRTGPLTLISGYATPAAIRGTGQDQLTAWLRERGVRNAAVLARRAVTAAHAQTVRLPGQDIAAELAADLAREVMALNERIGQVDERIAARFRRHPAAAVITSLPGIGMLLGAEFLVATGGDMAAFSSADHLAGYAGLAPAPRDSGRRTGSLHRPRRYNRMLNRVFYYSALISIQHCPDSRTFYDRKRAEGKKHNQAVLALARRRVNVLWALLRDQKPYTPSQPATTAA

SEQ ID NO: 242535 - protein, 358 aa, unidentified
MNSVGLDVHKTRCVACVKTHEGRILEEFAFQNNPHGHTELITHLKAYPEIQVAIESTGNLWIPIYNRLEDEHIHTVLTNPKKTRMIAQAKIKTDRLDARILADLLRANLLSASYVPPPEIRMQRSIIRERARLSRLRTIIKNRIHTLLDKHSIKTPYTDISGKHSLEWLSKLELLAGDRILLDVNLEQLNSLTRSIDRLTETIAISAVDNPEVKLLMGFTGIDYYSAMLLINEIGPIARFASPKKLVSYAGLAPSTHQSGNHTTHGHITKEGNSHIRWILVEAAQHASRHDPRLSHFYLRVMKRRGHNRAVVAVARKMLVTIYHVLNHHREYRGLRPELFENKIRRLRRITESSLQTE

SEQ ID NO: 242536 - protein, 307 aa, unidentified
MYVGIDVGKRYVDVAFGSDGKVERFPNDDEGAAQIEQKLRGVSVGRIVLEASGGYQRQLLTVLLTAGLPAVAVNARQVRDFAKAVGRLEKTDAVDARVLALFAERVRPEVRPAVAPELEELQAWLARRRQLVEMLVAEKNRAQQASGGVRRDINDHIDWLKKRLRDMEKELSGMMEKCPVWNAQVELIDAEKGLGRLTSMLLVAEVPELGTLSRRKIAKLVGVAPLNRDSGQHSGRRTTWGGRSDVRAALFMATLVAIRYNPMIKTFYKRLVARGKLKKVALVAAMRKLLTILNAIVRDGARRTSAN

SEQ ID NO: 242537 - protein, 342 aa, unidentified
MKPLYYVGLDVHKKSISYCVKTASGEIVREGRIGASRSELDRWLSTLPASCVAAMEATLFSGWIYDHLKARGVPVKVADPTMLKAISASKKKNDQIDARKIADLLRCDLIQECYMAPPEMRELRRLLRFRNLLMRQSVRMKNRIAGLLMETGTSYNAGRLHGQQYFQQLLDELEGSIPDSVLHLMKLSRAAVDQLRGMEQQIITGLCRHPLLRRRVELLTSIEGVGVITALSWALETGEPQRFRTRGQAISYCGLCSAQHSSAGRESRGPISKQRNHHLQWVLVEAAKMAPRWNAMLGMVHERELQRGNRNQATLEVARKLVGYLLAVDRSGQPFQVRMQPQ

SEQ ID NO: 242538 - protein, 339 aa, unidentified
MSLYSAIDLHSNNSHVAIIDDQQNRVFYRKLANDPKVIANAFAPYRERLKGIVIESTFNWYWLADLLIEKGYPVHLANPCGIQKYSGLKHADDKHDAFWLAQMLALDILPEGYIYPKEDRPLRDLLRKRSQLVRVRTSLVLSLQNMVMRNHGIKIRSNDLKKLTQDPVAELFKDQQELALAGKASKEIIDFLSRQIQRIETAARNKAILKESFSKLLTLPGVGDILGMTILLETGPIERFKAVGHYASYCRKVPSRWTSNEKRKGKGNTKNGNRYLSWAFSEASDHARQTHGPSRDFYNRKLNQTNASVAHNALAHKLARAGYYIMRDHVEFEEDKMFR

SEQ ID NO: 242539 - protein, 410 aa, unidentified
MYYVGIDWADRHHDISVVNSAGKEKKRFRITHNLNGFNDLVVRLRFLKAEIRDVAFCIERPQGLLIEFLLKHGYVVYPINPKSAERYRDRHSTSSKKDDGFDAFVLADALRTDINRFKPLVPDSELSRELKMLVQDREHLVHTKTKILNQLTACLKEYYPTGLEIFSKLQNDVTICFLKNYSTSGSLDKMTFKEFKKFMNSNKYPWKMLGKTPKSLFQEIQSMKPFLSADPAVVKAKSRLMLALLGQLETLVSQVKQYDGEIEKLMNQHPDNDIFTSLPGSGKKVSAKLSAYFGEDRKRFDSYESVQRLAGTAPVTKSSGNMHYVHWRWACQKNFRNALTQFAFSSLGKSIWARKYYQDKRDKGKTHSAALRALANKWVKIIYTLWKNRRMYKEEVFLASRQIHMLLNDS

SEQ ID NO: 242540 - protein, 456 aa, unidentified
MTHKRKAKASTEPIRPTINTRAAGADIGAREIYIAVSPELDATPVRSFNTFTGDLKTLVAWLKTLGITTVAMEATSVYWIPLAELLEEAKIEVCLVNARHVKNVPGRKTDVLDCQWLQYLHSVGLLRASFRPAASVRAIRSLWRHREALVRQSAWHTQHAHKALDQMNIQIHHVIADMTGKSGEAIVKAILAGERDARTLAALGDKRLKANTQTLAKALEGDWREEHLFCLRQAHAGYEFTLKQIAEVDAQLETLHQALEAAQHISEAPNAKPKAKPRCGCPVSYDAAGLLQAHLGVDLTQIPGINVNTAQTIYAEVGPDLGAFRSGKHFASWMGLNPNNKISGGKIMGAHTKKCANRLKKALRMAAQGACHGDNEIGVYGRRMKTKLGGASAVTAVAHKLARIVYAVLTTRQAYDGEQHRRYERRREQRTLEQLRKKAKKMGFELTAIQQPASCN

SEQ ID NO: 242541 - protein, 434 aa, unidentified
MNERLQAGIDFSQKRADFCLLAPNGLIIERHRRFSNSRPGYEEAKAMLLKVLTRQHFQGLDVAGEATNVYWLPFFWELARDPELAAHDVQLFLLNPRWVKYYKQCFAPDHKSDADDPFYIADRLRTRHPTVAWSAQLDTQPLRLYTRLRFHLIQNLAREKCYLAGYLFLRASAYSSYRPFSDPFGMTSRRLLREDWNLERLATLSVEELAQHLDELSEHHLPDPLANARKLCAVAHQSFRVPQTLNLPLQRLTDLILQEIAFLETQITQADSWITAEAQQHPGVHLLDTIPGIGPVFASGILAEIGSVERFLQGPKWDPKHKTYRARNLRDAEDAVAKIAGLWWPRNSSGDFDAEDRRLSKSGNRYLRYYLIEAADRMRQNIPEYQRFYASKYAEALKHQHKRALVLTARKSVGLIVGLLHRHESYRSKEVDST

SEQ ID NO: 242542 - protein, 352 aa, unidentified
MVTVGIDPHKHVHVAVAVDAAGRQVGKPLTVKNGPHLITGLLTWVRSLSDAASVTWAVEDGHGFARRLADGLLLAGQEVVWVPTRLMVAHRRLHAATGAKSDPVDAAAAARAAIASPELDRHRIDEPVRELRMLTDHRADLVRRRTMVINQLKAQLHLWLDHTPGDLVRAKTVASVGARVTESSLRPHVRQTLQDMLTDIADLNGRVHDLDATIKGLVTPLAPGLLQITGISHNSAAVLIAEIGDITRFSTSAKLARYTGCAPIPVYSSDKERHRLHRGGNRRLNSVLYTAAIVQKRWNPAAKELLARHERTKGARGARRILQRHLVDVIYRTMHADQTTWTHQISRCQHAA

SEQ ID NO: 242543 - protein, 314 aa, unidentified
MKMAMLSFCGIDVSKDRLDVVVLPEGWFFSVSNDPAGWAELVVRLRPLTVSAIGLEPSGGYERGIIRALLAAGMSVRRINPNKLRQFARARGVLAKNDRLDARLIAEYVAIMPTRVVQRDAAVERLAEIVTMRRQLCDEHVAAENQAAHLEDAMLRRLSKRRQTRLEADIRLLDKRLAEMVAANVALAQRYELLTSMPGVGPVLAFTLIALLPELGKMTRKQIAALVGLAPYDFDSGKLKGHRSIYGGRMPVRNVLYMAALSASRYSPALKAFHNRLADADKKSKVIIVAVMRKMITTLNAMLRDNAAWQPQSA

SEQ ID NO: 242544 - protein, 410 aa, unidentified
MSNSLLVGIDVSLNDNKVRILHPDGTSLSKFVVANSVPGAKILSQKVTGIMEKNNFDSIVIGLESTSVYGDPLVYFLKQDASVNRFSTKIHVLNPTQVNRFKLMYPDLPKTDDIDAWVIAEHLRFGRINKEVYMDDRYKALQKLTRARFHTVQNLAREKNWFLNNLFLKFSSLAQEKIFSDRYGATSSSIIEEFLSVDEISYMPIEELVEFINKKGKGRFKNPDEIAAAVQKAARSSYRLPKTITDSVNQVLAVSFVAIKAYKEQLKIFDKAIEEQFKLIPNTLSSVKGIGPVYSAGIVAEIGDIHRFKDQAALAKFAGIAWSKHQSGNFTAAHTHLIKFGNRYLRYYIMEATNKVRMHDHELKRFYDLKYSQTPKTPHKRALALTARKFVRLVYALLHDNRLYTPPKGR

SEQ ID NO: 242545 - protein, 331 aa, unidentified
MEEVKRFVGIDVAKAALDVFIGSGGGAFSVANDAVGIRELLRQLTPADFVILEATGGLEVPVASALATAGLAVAIVNPRQVRDFARATGRLAKTDRLDAEILARFGETVRPAARPLATEQALALEALVTRRRQLVEMLTAEKNRRTNAPKVLHRSIDEHIRWLEKRLAGFDDELAELIRNTPLWRERDELLRSVPGVGKVLSTTLLAQLPELGMLNRKQIAALAGLAPFNRDSGKLRGSRCIWGGRAQVRRVLYMATVAGVRSNPAIRTFYLRLRANGKHAKPALIACMRKFLVILNAMLHNKTHWQTPALISPTAPPFPLLGAVSEHGCC

SEQ ID NO: 242546 - protein, 345 aa, unidentified
MKKVVAGMDLHSNNVVIGVMELDGRRVAHQKVACELQAVVKFLAPYKKRLQQVAVESTYNWYWLVDGLQALKYPVVLANPAGMDQYSGIKHADDTNDAFFLADLLRLKILPTGYIYDAQLRPVRDLLRRRTKLVQQRTALLLSCKSLYTRTTGKEMGLNELKGLKVEQAQGLYEHPANQLIAGLQVQHIEQLGQSIQQIEKVVLGAAQELPYYARLGTLPGVGKILGMTITMEVGDIGRFAGAGNFASYCRAVEAQRTSNQKKKGENNSKCGNKYLGWAFVEAANFARRYDERCRKWYDRKAAKTSTIIATKALACKLAKAAWHVMSAGVDYDSARVFGQPATLK

SEQ ID NO: 242547 - protein, 338 aa, unidentified
MEQLTTIGLDIAKNVFQLHGVDAAGNVLLRKQLRRGDVLRFFSGLSPCLVGMEACATAHYWARELAKLGHTVRLMPPAYVKPYVKRGKTDAADAEAIAEAVTRPTMRFVAVKTAEQQAVLMLHKVRDLLVRQRTMLINALRGHLAEFGIIAARGPGGVTAAIVALHETQDSLPVLARVALHGLLDQLRIVRDEVVKVEKRIVAQHRADDASRRLATIPGIGPITASAIAAAVPDATLFKSGRQFAAWLGLTPRTHSSGGKERLVGITKQGDGYIRRLLVIGATAVIRLARRDNASKAWAAKLLERKSARLVSVALANKTARIAWALLARNQSYVAPAM

SEQ ID NO: 242548 - protein, 365 aa, unidentified
MLYLGIDQHKRQLTVNLRSEEGSVILQRQVSTEWEKVRAFFADLAEKARPEGGFLAILEVCGMNHWLLEMLKEYGCREIVVIQPTERSKQKTDRRDAGKLGHLLWVHRQQFLEGKHPLGLRRVQPPTPQEADDRQLTALRARLTKKRTAVLNGIHKILRKHNLEQARPTKLFQTQKVRRWLAEMELPAVDRLEMNLLLPQWELFDEQLETAEAKIAERAVADEQVKLLESVPGLGHYSAVAISSRIGNIDRFQRPDSLANFFGLTPGCRNSGEATQRLGSITKQGSRMVRFLLNQAVVKVLRFDGVMRTWFKRIKQRRGSKIARVAVMRRLTTILWHMLKKKQKYRYDSPIKKHKEFEAFEGTAV

SEQ ID NO: 242549 - protein, 346 aa, unidentified
MKYSVGLDVSVKETAICIVDEAGKVVRESKVATEPQAIIAFLNGAEFEYARIGLEAGPLSQWLVNGLAEAGLPVICVETRHMKAVLKAQQVNKSDRNDARGIAQMMRVGLYKPVHVKTLASQQKRMLLTSRQLLCDKLQDMENELRGTLRNFGLKVGVVSAGHFEARIKELVAGQPPLEMIVVPLLTVRRVVREQLAKLDKMVLDQVRDDKLCRRLMTVPGVGPIVALTFRATVDQAQRFARSKTVGAHFGLAPRRFQSGERDYDGRVSKCGDAMMRTALYEAAQVLLTRTQTWSWLKAWGMQVARRRGAKKAIVALARRLAIVMHRMWVDGTEFRWRKEADTAAT

SEQ ID NO: 242550 - protein, 347 aa, unidentified
MSITRIGLDTAKSVFQLHGVDEVGKVQIKRKLQRREMIPYFEKLEPCIIYLEACGAGHYWARILIGLGHDVKLIAPEAVRPFVKKGKKNDPADAAALCEAGGRPDIKFVPVKTEEQQAMLAVHSVRALLVKQQTMLSNAMRGLAAEFGLIVPKGIDKLVELMAQVDADENVPKQGRLAVQELFDQREFVAERIETLEAEIVAHARQNEAARRLATIPGVGPIAASLIAASVADFSVFKRGRDFAAWLGLVPRQHSTAGKTRLGKITKAGNREIRTLLVLGATSMTFRAPQWKSAAGVWADRLLQRKPFRLVTVALANKIARIAWALMTRNEVYQANGRVVTAAEAVA

SEQ ID NO: 242551 - protein, 409 aa, unidentified
MNPVVERGAGLDVHQATVVATVRIPDDTGGRTAITETFPTTTAGLLTLRDWLQAHGVTHVAMESTGVYWKPVYYILEDSFTLLLVNAHHLKQVPGRKSDVRDSEWIAQLLEWGLLRSSLVPPAPIRDLRDLTRYRKHQSRDRAREVNRLHRVLEDAGIKLSTVATDVMGVSGRAMLDALLAGTSDPEVLANLARGKLRKKLPALRQALRGRFRAHHGFLIGQILTKIDFLDEAIDQLTEAIDRLVVPFEPMLTQLDTIPGVDRKGAITIVAETGGDMTHFPTSGHLCSWAAACPGQNESTGKRRSGKTRRGNPYLRTLLIESGLAASRAKGTALQSRYYRVKRNRGHKKAVLAVGHQILEIAFYVMRDAVAYHELGADYFDSRHRERALRRHVRQLEALGYRVTLEPAA

SEQ ID NO: 242552 - protein, 420 aa, unidentified
MIAVDPHKASNTAAVLDPVTKTVIEAARFANTADGYAQLTVFAGRWSQRRWAVEGCFGAGRSLAQRLVADGERVLDVPAKLAARVRVYSRGHGRKTDRDDAVSVGLAALDGTGILPVASDDATVSLRLLCDRREELTAQRTQAACRLHRLLAELTPGGMRRELSANKAQALLARIRPADDVAAVRVHIARDHLADIRALDARIKYLGGQIAALVDASGTGLTGLFGVGPVIAGRILAEVGDVARFATKDAFASYNGTAPIDASSGEQVRHRLSRAGNRRINHALHMMAVTQIRYPATPGRLYYERKRREGKTPKEALRCLKRRLSDLVYYQLLADQRGTIGTCGSPTTPRPTRSTSTSPAIRSRQAAPPPRPAPRPAPKGSSRSTGKTASSSASRSSTPAQGSAPTSSTKPKSTVKTGAS

SEQ ID NO: 242553 - protein, 370 aa, unidentified
MEEPITSFVGLDIHKDSVAIALAKAGREAPRFLGTTPATLAGLAKVLRRNCKSQRTLIVYEAGPCGYGWARYLNTHGWPCEVIAPSRIARSPAERRIKTDRRDALLLAREARAGNLVPIVVPDARDEALRDLSRAREDASAARMKVRYQLKAMLLRHGRHYSGKCSWSAAHERHLTAVRFEHPAQQIAFDEYRAAIKDTNERLERLTLALHQQYQQWRMKPVVDALMCLRGFDLIAAITVVAELGDLNRFDHPRSLMGYLGLVPSEYSSGNSHHQGPITKTGNHHVRRILVESAWTYRFNPRVSRPIEIRQQGQPKVIRDIAWKAQLRLSYRFRKLNAGRKMTQNKCLIAVARELAGFIWDIARHVKIAA

SEQ ID NO: 242554 - protein, 348 aa, unidentified
MLADEVDYVLGVDTHRDEHVVAVVTAPAGAVVAGAAAPANAHGYRELLRVAERHAPGCRAWAIEGTGSYGAGLSRYLHARGESVLEVSRIARGERRLRGKDDALDAARTARAALGSDTLALPRRGERREALRLLLVARRSAVDVRREALTQLRAVIVTAPELLRQELCRLPKGKLLDRCSRFRRSSSSADELATRIVLRSLARRIRTATIEADELEQEILAHVRALAPALLDEAGVGPIVAAQLIVAWSHHGRLRSEACFARLAGVAPVPASSGQTTRHRLSRGGDRQLNRALHTIVLHRRQHDPATRDYIARRISEGKSPRDATRLLKRYLARHLYRLLQQQESIMA

SEQ ID NO: 242555 - protein, 338 aa, unidentified
MSIYAGLDVSDKTTHVCVVDAEGAILRREVLASDPDLLAKWLARYCPTLARVVLETGPLSAFLYHGLAARDVPVECICARHAKGVLSARVNKSDVHDAEGLAQLARTGWYKRVHMKASATHFDRAAIRIRAQLVAARTSMANQLRGLLKLFGLRLGTARTPTKRNERLAAFYAQRPDLQALFAPLITSMEAIEGQLRASDRMLAKRAASDPVCTRLMTVPGVGPITALTYTMSIEDPRRFARSEDVGAYAGLVPRRSQSGERDTQGHISKAGDPMLRKSLYEAANIILTRVKRSFPLQQWGRKLAEAKGSRRAKVAVARKLAALLHTVWLNETEFRWV

SEQ ID NO: 242556 - protein, 406 aa, unidentified
MYDELAEGNVPGIWAGVDIGKTHHHCVVIDTDGKRLLSRRVANDESELLALIGDVLEISADTLWAVDLNHGGAALLIGLLVSHGQPVAYLTGLAIHRASATYKGGEAKTDAKDAFVIADQARVRRDLGLLRPGDEIAVDLRTLTTRRLDTVFDRTRQINRLRAQLLEIFPALERALELTNRGPVMLLTGYQTPAAIRRAGASRIETWLKNRKVRGAAALAKAAVEAAQAQQTALPGEKLAAAMVVRLAKGVMALDEEIAELDALIEAKFREHPHAEVIRSLPGMGAKLGAEFLAATGGDMDAFGSPDRLAGFAGLAPRPRDSGRVSGNLRRPRRYHRGLLRTMYLSAMVSLQCCPVSKAFYDRKRSEGKGHKQALLALARRRLNVLWAMIRDGECFHTSPPVTGAA

SEQ ID NO: 242557 - protein, 468 aa, unidentified
MTRARKEVRSAARAAQGDLVITHRHAAGIDVHAAEHFVAVAPEDVPSGFVNPDRKLPVGVGKFGANTADLEAIAHWLKQCRVETVALESTGVYWIPLYDLLASRGFEVLLVDPRQTKHAPGRPKTDVVDCQWIRRLHSYGLLTGSFRPGDAIVRWRGFQRQRETLIRYAAQHVQHMQKMLEEMNVKLTEVVSDIVGVTGMKIIKDIVRGERDPLQLAKNRHESCKRTEAEIAAALYGNWREELLFGLEQALELYEFYQQQLRACEAKIEKCLRSMKDQSDGRSLPPSLRQRKPEKNEVRFGARALLFRMSGVDLTQIEGISETTALVILSELGIDLSAFPHEKNFVSWLGLCPQHRGSGGKIFKRGTRRGANRVARALRMAAQGCHRAQNALGAFYRRIQGRSGGAKAVVATARKIAERVYRMLKFGQEYVRQSQEAYEQAYQLRLMKSLAKRAAAMGYKLVPETIGT

SEQ ID NO: 242558 - protein, 339 aa, unidentified
MSKVLKNFVGIDISKTWFDAAIISPNNGSEVFHQQFTQTPEGYYKFKQWLCHHAVLINEETLLCMEYTGVYNTGLVQFLVKEKAHLWVEMPLRIKRASGLQRGSDDRSAAHKIAWYALRYADQAKLWKPCDTSIERLRHLITQRERIVNSLKHLTVPLEELKQCGCIADAKLVEQSQKPAIKGLKAAKEKIESLIAKIVQQEEQLCKKVKFAQSVNGIGIVTATALLVYTKGFTAFDNAKQMACYCGVVPFSKTSGSSVRYKPSVSPFANMKLKKLLHLCAMSAIQNDAELKLYYQRKILEGKNKMSVINAVRNKLVHRVFAVVRDERIFEDKYAANCA

SEQ ID NO: 242559 - protein, 370 aa, unidentified
MLNTTTFVGLDVHARSIKAVALDAMTGEVRSATFAYDAAAVAEWVGSLDPAAKCVYESGVTGFDLQKKLTALGVDCVVGAVSKMIKPSADRKRKNDRNDAGFLARMLSVGNVVEVWVPDDECEAARDLVRALDDARDDLRRCKQRLSKFLLRHGLVFNETTPSGQRKGNWTAAHWAWINAISFKERADNEVLAYYIDAVRQKLEDKKRLEALVKDEASKARWRKRVDSIRCLKGIDIMSAADLVFEADEFSRFKNARSFGAWLGLTPSEHSSGESVRQGGITKAGNKHLRRVLVESAWHYLNASARSKDLAKGQIPDPAARRHAAKGVRRLVKRREGMLERGVHKNKANVATARELACWCWAVGRMIENG

SEQ ID NO: 242560 - protein, 370 aa, unidentified
MSVRRILAKTINTDLEYEAIGIDLAKNCVSVALLTTDGEVVCIDRLDYSELEKSAQVLCPTTFAMEPCTEMNYLVQKLEAWGHRCLVIGGKNVQNYVENHYSGQKTDLNDAQALAFLAQDTQLRTIKAKDMEQRKYASLTTLREQYIKQYRQTIVSLKGICQAWGLNISKGISGKARLKDLIENHAAFPEELKESLVDMVTHAQTAQKALNKITKTLEELAKNDKLCQLIRTIPGLGLICSCRLRATIGDIKRFKNPKDFPAYYGLVPRSIATGHNEKKGRITHRGDKTMRSLMVQGAGSVINMATRGKLKSKQLTKWILKKQKEKMPWGKLVCAVAAKLLRIVRAVLISSKPYNPQIAGVAKCSLPKGT

SEQ ID NO: 242561 - protein, 357 aa, unidentified
MRYYTKQHRFYAGIDLHARTLHLCVLDQQGTVVYDKNLPAKPEALLRALAPFRDDLVLAAECMFAWYWVADLCAKEHIPFVIGHALYMRLIHGAKAKNDKIDAGKITRLLKGGNFPLAYVYPKGMRETRDLLRRRNYFVRQRAALMTHLQILNAQYNLPPFAKKLSFAQNRVELNIAQRFEDKSVQQSVTANLAVIDCLDEQIAHLELYLVRTAKVEDVQTYHRLQTIPGVGKVLALVLLYEVHTILRFDNAGQFLSYARLVPCRHESAGKVQGTGGKKIGNAHLRWAFGEAACLFLRASERARQWKERQTKKRGEGKALGILAARLARAVYHLWRKKEAFDEERFWSGQAKPATRS

SEQ ID NO: 242562 - protein, 466 aa, unidentified
MENNYILYVGMDVSKGKADAAILKVSDRRSVKPKFLRKKLSFKFVKSEVASFLETVRSYSDVNCTSICFALEVTGIYSTNVYDYIKANLYENESIKFLNTDFVNQWRIAHNIAKSDPLDAQTISTIIGTDSDVQFVNDNVFENKNGYQDLKALVHRHYQIKKIYSQEINRLIAQCDCLFPELQYVFEPKSAAFIAVLSSYPTTHDIINASRVEVFDVVYEATKHRCSMDKVDKLFELCQDTLVPNDISSYGKSIILDLVENIKNIKGQLKMIERYIRDVASLNPAYKLLLTITGCGPLTAATVIAETGDIKRFKNADCFVSYSGTSPRNKRSGTSVETMGKISKKGSRYLRHAIYMIAEFARRHNPVLKHQFERIKNGNKKRHKLANIAIANKIARYIYSIMKNESGFVILHEHIMRLPEETQNTFFNSISLDFPENTRKQIYQYSDIDGEVHKFVYTKLEETMII

SEQ ID NO: 242563 - protein, 389 aa, unidentified
MKIFVGIDIAKLNHFAAAISSDGEILIEPFKFTNDADGFQLLVSKLESFDKNSIIIGLESTAHYGDNLVRYLVAEFYQVCVLNPIKTCQMRKNNIRKTKTDKVDTFVIAKTLMMQDDLRFITFFDLDMMDLKALGRFRQKTIKQRTRLKIQLTTYVDQVFPEIQYFFKSGLHQNAVYALLKEAPSPKEIASMHMTHLANLLKVNSHGHFTKEQAKELRVLAQKSVGANDSAISIQITQTIQQIELLDSQLEKIEAEMTDIMKFNDSVIMTIPGIGYINGGMILGEIGDIHRFSNPNKLLAFAGLDPSVYQSGNFQAKTTRMSKRGSRVLRYALVNAAWNVVRNNATFKAYYDAKRAEGRSHYNALGHCAGKLVRVIWKMLTDEVEFNLE

SEQ ID NO: 242564 - protein, 429 aa, unidentified
MGLIVPTTIHPEREDQPLPYEWFVGIDWGSQQHQVCILDRDRRLVGERTVDHDGASLAQRAAWLWTVSAGHPQRVAVAIEVPRGAIVEGLVERGFHVFAINPKQLDRFRDRHSVAGAKDDRRDAFVLADSVRTDRPSFRRLQLDAPHLLLLRELSRVEETLLEEFRRSANRLREQLHRFYPQMLQLCSAADEPWLWDLLHLAPTPAHAMLLSEAQVQRVLKAHRLRRLKAPAVLACLQAPALPVAPGTAEAAQAHCGFLLPCLRVLAEQLQTCSQQVSALLSTLAEEPGEGESPSDVAMVLSLPGVGRKITAWLFAEAAQPLAERDYQVLRTHGGVAPVTKQSGKRRQVVMRHGCNPRLRHALYHMARVAMQRDAHFSSVYAALRAKGQRHGQALRNIGDRLLRILMAMLRHRTCYDASRIRCAPVAQM

SEQ ID NO: 242565 - protein, 401 aa, unidentified
MSVHELRVALDIGSRKHRVGIATDDGRIVEEFDITHDKAGFELFFRRVEARRNDLPVVVAMEGLNGWARPLDRMIQKRDYELLNVNNVKLARFKEIFPGPAKTDKIDTRKTLELMHMRKVLPLAKTVLHRVGDTPVENEQLKRYTRRRRQLVDDKVRVLNRLQSDVQAVSPGLLEITGEAGNLWFLHLLTCREDLSKIAGMRRPSLLKIPGVGQTYATKIEAWQGTATFSDEVEWVGPMIIADAQRVLDLIRQVQAIEKQIVTIGASSTIASRIVTIPGFGPLSAATLAGEIGNLERFEAETSLALYSGMTRLDNSSGQFTGSKNTRQVNTHAKAAMMVAVARHIDNVPESKVYYDKKKAEGKTHNQAVRALGRHLIRVIWSMLKNDRDYVPKPDRLAKIA

SEQ ID NO: 242566 - protein, 393 aa, unidentified
MPRKRILVKSIDTSISYQVIGIDLAKHLVSACLITGAGEIFGIDRLTYDDLLKSAERMSPTLFCMEPCPEVHYLAEKLQGYGHHTKVIDGAAVKEYIKTHFGGQKTDLNDAQAIAFLSLDTNLPEITPKNTSNSVLSHSFPTRRSSDLEYIQSFVSLKGICQRWGLPISKGVMNKNKVEELVSESKKIPQEVKDWLLELLQSCRELQKRLNKISKYLKEYADNDEICQKIMSVPGIGPITATRLKATIGDIQRFEKPKSIVAYYGLVPKSKATGHNEKKGGITRRGDRVARSLLIEGAGVVLNLAAKGFLRSKPLNKWIEKKRKLKMPWGKLCCALAAKMLRIVRAILIQGTSFNAKIAGVARCSLPKESRNNVMGNNKLSEIPSPNGSVYIH

SEQ ID NO: 242567 - protein, 340 aa, unidentified
MQDITIIGLDLAKSVFQVHGADDQGQAVLRKKMRRGQVLPFFSKLSPCLVGLEACGSAHYWAREITALGHKVKLIPPQYVRPFVKTNKNDASDAEAIAEALVRPTMRFATIKSAEQQSVLMLHRVREMLVKQRTMLINAIRGHCSELGFIASLGASRVNDLIAIVEDPDDARLPSIAREALSVLISQLHTIKVEINRLEKKLRAWHLSTESSQHLTTIPGVGIITATALVATIGDGSQFKSGRQMSAWLGLVPRQNSSGGKDRLGRISKRGDGYVRRLLVHGSRAVLRWHRAVPERQSPWVGELLVRRPTNVVLVAMANKTARVVWAMMRDQQDFKPMNS

SEQ ID NO: 242568 - protein, 394 aa, unidentified
MKLIGIDIGKNKHFFCVMDQQTGEIISQPVSFSNDKEGFDFLVQKIKSYPKDSILIGMEDTGHYHFALLKYLLDLQYTVALINPKTTDFNRKMQGGITKNDKLDTINICDVLDTPERKKQYRITKVNSFDLYEQKQLTRHHHNLKEEENVYKNRLQKCIDIVFPEFNKLFNSKYGTVYMNILKMFGSAENIANTDIRTIRKCFEIEGRGNRISLTPERLKECAGSSIGISSSAEVIQIKHLTAQIELIEEQLTEIDKKIEEFSIQNNSPILSIPGISHFSGTSILAELGDISNYSKPSQIIKFAGVAPLHYESSQFNAQHTSITKKGSKYLRKTLYQIILPVIRHNPVFNKYYQLKISQGKGHRCAQGHCVRKLLRIIYHLLKTNQQFDPQLLR

SEQ ID NO: 242569 - protein, 361 aa, unidentified
MSRRETAITTIAQLEPSRVTVGVDTHGEVHVACALDQLGRHLATLEVATTLRGYRELLAWAQRLGEVQGFGVEGTGCYGAGLARFLSAHGQVVLEVNRPDRQARRRRGKSDPVDAEAAARAVLAGQATAIPKAGDHLVEMVRCLRVARASAAKARTQAANALRALVVTAPAELRELLRELPAGRLASTAARLRPGPIVTTAAATKLALRQLGQRYQALEAELAAVDAELDRLTALAAPGLRRLCGIGPEIAGALLVASGDNPERLHSEAAFAMLCGASPIPASSGKTVRHRLNRGGNRQANTALYRIVVVRLRWHQPTRDYMARRTKEGLSKREIIRCLKRYVAREVFAALQAPTALTATT

SEQ ID NO: 242570 - protein, 312 aa, unidentified
MAMLSFCGIDVSKDCLDVVVLPEGWFFSVSNDTAGWAGLVARLRPLTVSAIGLEPSGGYERGIIRALLAAGLSVRRINPNKLRQFARARGVLAKNDRLDARLIAEYVAIMPTRVVQRDAAVEKLAEIVTMRRQLCDEHVAAENQAAHLEDAMLRRLSKRRQMRLEADIRLLDKRLAEMVAANGALAQRYELLTSMPGVGPVLAFTLIALLPELGKMSRKQIAALVGLAPYDFDSGKLKRHRSIYGGRMPVRNVLYMAALSASRYSPALKTFHNRLVAADKKSKVIIVAVMRKMITTLNAMLRDSAAWQPRSA

SEQ ID NO: 242571 - protein, 404 aa, unidentified
MELKPLYRCVAALDVHQAKLTVCVLREDAEGELQVELREFGGFKRDRRAMAEWVASFHPEEVVMESTGIYWKSPYAALERCGIRALVVNARHVKQVPGRKTDIGDAQWLAILARSGLLRGGFVPPANFRELRLTSRQMQKLTGILGAEKNRLHKVLTDAGIRLPVVVSDIHGQSARAMIKGLIAGESPEQVLGYASKRLKATEEELLDALDGELSDEHRFVLAELMDHIEDLEQRIARFSNHLLKGLAPQQGLLQALQTIPGLDERGAAMLLVEIGDDMDAFGSGEKLASWAGVCPGNHESAGKRKSGKKRKGNPYVRRILCEAANAAARTRSALAELFKSLLIRRGRKRAIFALAHKILKIVFVLISRGDYYRDATVDYEAMSVERNAPRWMRMLRKYGYINA

SEQ ID NO: 242572 - protein, 345 aa, unidentified
MNKLIAATPAKIFCGIDVSARSLAVALIEPEHCVSQREFANSASGHKALVGWLGKHNALVRVTLEATGIYSLDLALALDAAAQIEVAVLNPKLANRFAQTLCRSKTDKADAVVLAEYSQRMPFTAWQRPGVNQLRLRTLGRHIASLVVEQANLKNRLHNAESTATVPRAVLLDLRQAQAGLLRRLAKMRREAIKQVQAEAQLRQRFALLVSIPGIAEISALQILSELVLLAPGMTVRQWVAFSGLDPVHHVSGTSIHKPSHISRAGNRHLRHALYMPTLSAARYDPHMRAFYLALRERHKTGLQALMAVERKLLHAIYGIFKSGHPYDGKLLFPNIRLEVESIAG

SEQ ID NO: 242573 - protein, 419 aa, unidentified
MRGPLWAGLDVGVETTAICVINAAGSTVHEATCPTRLKSVHRELACLRRRKSARVGLEAATGTMLARGLRNLGYQVDLYEQRQLSKFLRLRRNKTDAGDALGIAEAGRLGAATISKVHIKNLDCQCLSSRLTIRRHLIRQRVALVNLLGRQLEVFGGRLQRRNLGSLRRNVEREISSIFGRAPNEFVAELRSLVAHCEILIDYQRKVDSELKRVASGNQICRRLMEIPGVGPLCALTFYAVVSEPERFARSADIGPYLGLTPRLNQSGLSSKTGRISKMGNRAARTLLVSSSNAFMRWATPDSDLRLWAAKVESRRGTMKARIALARKLSIVMLAIWKNGTSYRDRLMPVNDDADQRSVGLDLVQCEAEKHDLPSKTSPADRAGSGAACAFDGLSDRLGDRDESAGRRHVPELVREQLT

SEQ ID NO: 242574 - protein, 370 aa, unidentified
MAKRSMFVGMDVHKESIDVSLAEEGRDGEVRHYGVIAGDQEAVTKMVRALRARQRRLRFVYEAGPCGFGIHRYLTAQGEDCVVVNPSSMPKRSGDRIKTDRRDGNTLARLHRAGALTAIYVPTADDEALRDLVRAREDAVGLSTQAKPRLKAFLLRQGRRYPGRAGWTRPYRRWLADLSFALAPQHVALPEYRDTIDESERRVERLTEQLRQLTPGWRWTPVVEALQALRGVSFVTAVGLVTEMGDIRRFDHPRELMAFLGLVPSVYSSGPSVRRGGITKAGNPHARRLLAEAAWAYQGVPRIGRQMLYRQEALSPSVRAMAWKAQLRLTGRFRRLVARGKAKPKVATAIARELTGFIWAIAREVPPPPA

SEQ ID NO: 242575 - protein, 343 aa, unidentified
MSNDTRIGVDVAKAVFEIAMSDRPGHVVRRERLPRAQFLAFMAQQPQATVVMEACGSAHHWGRKIQALGHRIVLLPPHHVRPYIRRNKTDRTDAKGILEASRNEDIRPVPVKTVDQQVLTSLHRLRSGWMTERTARLNALRGLLRELGVFIPMGAREVVPFVWSLIEDADSDLPEALRPIFAEACLEIREIEARVKQVERQLEATAEQLPAVEHLRTIPGIGLLIATALVAFIGDIRRFPSGRHFASYLGLTPREYSSGLKRNLGRISKRGDGYLRTLLIHGARSVLVHARKQQPDRLREWANNLAKTHVHNKAAVAVANKLARIVWAVWHHQRPFALISKAA

SEQ ID NO: 242576 - protein, 463 aa, unidentified
MQENGDTNSKPDNEAGIEGLPVIRANVAGIDLGSEIHWVCAPNVDRTSVEVETFGATTPELERMAEWLKERKIESVAMESTGVYWIAPHEVLERHGLEVVLVNTRELARVPGRKKSDRVDCRWSQRLHSCGLLSGSFRPNEAVCRLRTLVRDKANLIAEAADWLRRMQKSLDQMNVRVHGAVSDLDGVTGMRIVRAIVGGERDARQLAQLRDRRCGKSEEQIAEQLTGHWREDHLFSLSQALKMYDAIQERIGDYEQEILRQLGEMERAECRGQQPPKLNNRQKAKTIQKRGQEPLREALYRISGVDLTGIDAIGVETVQVVLSEYGPDLSKFPTEDQFISHVMLAPHKPMSGGKAVKKKKRGSASTRVAAALRMAALSLRHSQTALGAYYRQIARRIDGDVAVFATARKLASHIYRLLRWGQPYVDEGATAAEKRYQEARIQRLAAQAKDAGFHLTPNVSTT

SEQ ID NO: 242577 - protein, 421 aa, unidentified
MKFKAQDKQNQLIENISSLHLVVGVDIAQEAHVARAVSYRGVALGSPLEFGSHDEGFQLFCRWTQDLLKLYKLNKIIVGMEPTGHYWLSLARWLSAKGIEAVLVNPHLVKKNKENRDNTPSKSDRKDALVIADMVKNGYYSPVRFNPEVYEELRILMANRDTVAKRLNSAVNQIHRWVDIVFPELRHVFKILTCTSAIATLRLFPLPEEISRLTTEQVIAGWKQYVKRHAGLQRAELLISLAKRSVGAKQALHAYKLHLGQLLEEYDLAKRQLEQIESELQLVLERIPYAKKMLSIRGVNATSLAGVLGEAGDLSGYAHGNALLRHAGLNLAEASSGKWRGKMVLSKRGRPRLRRFLYLMTMCMVMTNPDIRALHHHNVDVKKLKKMKSIMKLCGKVARMLISLAKSSEAYSSVKVFPQAA

SEQ ID NO: 242578 - protein, 379 aa, unidentified
MILAGGDVHDKSILVKVAVGRGESEVESWSNNARGRKSLLRSLRARARRARTAEIYFAYEASSVGFGLCDELSEAGVNCSVLAPTKIRKSVHERKRKTDEKDAERILEVLRGHVLAGNKLPAVWVPDMETRDDRELLRTRLEVSSGITSLKTRIRMLLKRNGLKTPKDAGESWTVEHWKWLKGLAGEGSELGFGARHALRSLMERLEFCEDHCGELDRAVAVLSRTERYREQVKELKVLKGVGLLTAMVFLTEMGDLGRFSNRREVGAYLGLAPAAFESGEASDRKGRITKEGPSRVRRVLCQATWARVRTHAPEKRFYERVVLRNPKHKKKAVVASMRRLAIRMWHAGLRAAPADCGSASPTSSTGDPFSTRCRSDRR

SEQ ID NO: 242579 - protein, 342 aa, unidentified
MHGVTTIGLDIAKSVFQVHGIDAIGRVVIRRQLKRRYVLAFFQKLAPCVVGIEACATSHHWSRALQALGHTVRLMPPAYVKPYVKRQKNDAADAEAICEAVSRANMRFVATKTPEQQSCLMLHRTRHLLIRQQTAVINAIRAHLAEFGVVAPVGRRGVAELLDIAAASSEERVPEVARGCVAALGVQLRLLKAQILEFDRQIMAWHRSNETSKRLDEIPGVGPALATALVASVADPKAFRSGRNFSAWIGLVPKQHSSGGKDRLGSISKQGDRYLRSLLTAGALAVIRYAKIHGSKRPWLTALLARRPTKVAAIALANKIARMAWAMMVKGERYKEPAALAA

SEQ ID NO: 242580 - protein, 362 aa, unidentified
MLILAIDLGKTKSLACWYQADDATHEFRTVPTRPGEFHTLLLDRPVDRVVIEICDAAGWIVDLCRTLGIAIQVANTNQEAWRWRNVKNKCDRGDAVKLARLSAMNQLSLVHVPQKPVREWRSLILYRHKLVDRRTAVRNAIHSILVAQGMAMPGRRSVWSDDSMSELRGLARPLIECTTMDELWRGHLHMELEQLDELCERIVELDERLDAIGTADDRVGRLRTIPGVGPRLSEMVVAMIDDPHRFKSVRQVGAYAGLVTRRYQSGAMDRSGRISKAGCRKLRKLLVEIAWGMLRHNAHGAAVFNRISKGQKTRRKQAAVALGRRVLCWCWAMLRDGTEWHVPTTLAPRVKPCRTESLSPCG

SEQ ID NO: 242581 - protein, 342 aa, unidentified
MEHTTIAVDLAKSVFQVAVSHRPGHLDEERRLSRDRLLPFFAQRPPATIVLEACGSAHYWARQLQPFGHTVRLLPPHDVRPYVRRNKTDRTDAKGLLEANRNEEIHPVPVKTIEHQAIASLHRLRSTWLATRTARLNTLRGLLREFGIFIPVGAQHVVPRVRELLVEPTPVPLLLHTTLAAACDEVEMLATNMRAVERQLGALAAEMADVTLLQTVPGVGVITATALVALVADIRRFPSGRHFASFLGLTPKEDSSGSRRRLGAISKRGDVYVRMLLTHGARSVVWHAKTAAPPTSLQQWAVHAEQRRGRNVAAVAVANKLARIVWAVWAQQRPYAADRRPA

SEQ ID NO: 242582 - protein, 426 aa, unidentified
MQYALPLVLPDVPPGGVCAGIDWATADHVACVVDMAGRVTDRFSAAHDKAGIAALITRLRKNKVSEVAIERGDGPLVDALLAAGLTVVVITSRQVKNLRSRFGAAGAKDDRFDSFVLADTLRTDRARLRPLVPDTPATISLRMAVRARRDLVRHRVAVCNQLRAHLAVAFPAGITLFHDLDSPISLAFLARFGSQDAAAGLDEQAIGAWLATIAVRGRPAPASVLHARLHAAPPGATGADGAAQAGITAALTVTLAALSAQIKALATQIAGQLAAHPDGHIFTSLPRPGTVRAARLLAEIGDCRSRFPDPESLAGLAGVAPVTRRSGTRIAHGFRWAVNRQLRDALCDFAADSRHASPWAAAIYDDARARGKDHPLAVRITARAWTYVIWRCWHDGTAYDPAKHNALQAVLARHAAQTASARQQDQ

SEQ ID NO: 242583 - protein, 327 aa, unidentified
MTASVSSHNHIFIGIDVGGKSFEAAWHRGGSTQCQNRLDAIAAFVARLSVEKQIIRIAVEPTGGHEKSLVKALRGAGLPVEMVHTSRFAAYRSLIGAKAKSDTSDARLLAAYAAAPEEVRGRKAGYVVLPQDAVREQLAELAARRDQLKHMIHAETCRLSTVRSQSVRDEITAHLQALRQADCKTHDAMMQLVRQRDELRNAKRLLQTIKGIGDKTALTSIAAVPELGRISNKAAAALVGVAPFVRESGTMNAPAHIHGGRALVRNAFYMAAVTASRHNPVLAPFYARLIAAGKPPKVALVAVMRRLVVFANAVLRSGQPWKGAQII

SEQ ID NO: 242584 - protein, 383 aa, unidentified
MKAVCGLDVHKDSIFLCILHSDGELFEQVFGVLTFQLEQMRKLLQKHHVSEVCMESTSIYWIPIWRVLSPHFTMRLVNPYFIKQLPGHKSDVKDAQWIAECTMKELVRGSFVPPEIIQQLRQYDRRIFDLNAEIVRKVSKVDGVLQRCNIRLSNYVSNIECKSYRDVVRRLSEGVTDPNELVKLVHGRIVNRHGADTILASLTGVVSQAEIDVLRQLHEEIDIAESHRDECQQRMLEICEKHFPEELERLQKIPGIKERAATSLIAEIGTDMSKFETANHLASWSGLRPRNDESNKKIKSRKITHGNVYLRNTIIQCAWAASRQKDCFFCRFSYHQTVVRRKNKMKVIVAVARKLLVAVWHVLHDRTDYVDFKPDREESANNG

SEQ ID NO: 242585 - protein, 358 aa, unidentified
MERNLTKTDFSNKEIIVGLDVHQKNWQASIIVEEVMTRKAFIPDSKKFADYLKKNYPCGNYIVGYEAGCFGFWIKEQLEQEGIKTIVINPADIPTSDKDKKNKTDNIDSKKIALSIKGGMVKAIYAPSRESQEYRSLVRRRYDLRKKSTRAKNQIKGLLKYNGIKYPEEYEITTTHWSKKFLDWLSLLEFRTQYDNYLMTSLIRELTFIKEEIKIILKHLKELSKEEQFKEKVKILKGIPGIGFISAMTLLSEIIDIKRFNKRDEFLNYLGLSPSEHSSGEVRKIGHLTKRCNHTLRAILIESSWIAIRKDPALMLYYNDSYKKMGKAKAIIKVAKKLAARLRYLLINNAEYITGVAA

SEQ ID NO: 242586 - protein, 428 aa, unidentified
MIAAVLERCAGIDVHKKFVMVCALLGPAQANPDAKIRRFGTYNAELEQLRDWLQELNCMHVVMESTGPYWKPVFNVLEEAGVQTTLANPQQVKNLRGHKTDMKDCQWLAHLLRHGMIRPSYIPPRPVRELRDLTRRRKQLVRNGAMERNRVQKLLEEANVKLGNVLSDVFGASGQEMLFALVQGEATAEQIAQLAKQRARKKIPQIQAALEGHRMNQTQRELIHQCMAHMAFLEEQIEEVDRQIQDKIRSFGLSQSYALLQTVAGMKKEAAATVLAEVGANVDAFSTPAKLSSWAGVCPGNNESAGKRKSTRTTKGNPYLRDMLLECAWASSHRKNSQMQHRYERLQPRKGHKRAIVAVAHALIQAVYYVLSTRQPFVDTAEPPRSPATVRRLIRHHTRRLRKLSCWLERGSHATQTSTLHQQQTTSG

SEQ ID NO: 242587 - protein, 390 aa, unidentified
MPVLIQVFMSSGDRLHRIAISRGGNRPIVPWCYEPVAEQWSLPPVFPQPEQLLGALEPVFARPGRRTEYMSNKKTCRNSIGIDVSKQLLEVAVHKSDYHFRCPNEAKKFPALIAELISLRPARIVLEATGGLEIPLLHALQTVGLPVVQINPRQVRDFAKALGLLAKTDRLDARVLAHFGAAVEPPLRPIKAVEDDELDALMGRRNQLSDMLGAEKNRRGSAATEAARADVEAHIEWLEQRIKALDEQLKDQLKRCVAWQQKAKILQSVKGIGFVTAVSLLADCPELGQLNRHQIAKLAGVAPLNRDSGKQRGTRHIFAGRAQVRAKLYMATLTAIRCNSVIKAFYQQLIARNKLKKVAIVACMRKLLTIINVMVRDNKTWDAKAQPVSA

SEQ ID NO: 242588 - protein, 383 aa, unidentified
MKSVCGLDVHKDSVYLCILSEFGELIEKVFGVLTYQLEEMRDLMLHHHVVEVSMESTSVYWIPIWRVLSPHFKLNLANPYFIKQLPGRKSDVKDAQWIAECTMKELIRGSFVPPEIIQQLRQYDRRIFDLNEEIVRKLSKLDAVLQRCNIRLSNYVSNVDSKSYKAVVRAISQGITDPEELVKLIHGRIINHHGIDVITASLKGVVSLAEIDMISQLRDELDMAEAHKEKCQARMLEICEREFPEELKRLQTIPGIKERAATSLIAEIGTDMNKFETANHLASWSGLKPRNDESNKKIKSRSITHGNVYLRKTIIECAWAASRTKDCFFSRFSYHQTQVRKKNKMKVLVAVARKMLIAVWHVLHDNTNYIDFTTDRKTSRTKG

SEQ ID NO: 242589 - protein, 345 aa, unidentified
MMVLGTDAHKRAHVAAGVDFRSGEVVGDVRAPVSREGFGRLVKWARGLDRERVWAIEDCRHVSGSFERFLLERGERIVRVAPRLMGQARRGGRERGKSDVIDAVAVARAALREGLQALPTARSDGPELEIRLLVDHRERLVRQRTRLGNDLLWHLHDLWPELRLPARALRSHQRLAQLARRLARAEQTARVQIARDELHRIVELTRAINRLQAQLAPMVAATAPQLLTEPGCSVLTAAKLIGEIAGPDRFRTDAQLARCAGVAPIPASSGRRDRHRLDRGGNRQLNAALHRLAINKGRLCPQTAAYLARKQAEGKTRMEALRCLKRHLARRILQLLKTPAPTPPT

SEQ ID NO: 242590 - protein, 407 aa, unidentified
MRVVHEHCAGLDVHKKTVVACVLTPQGREVRTFSTVTEELLALVDWLQERECRVVAMESTGVYWKPVYNLLEAAELEPIVVNAQHIKAVPGRKTDVRDAEWIADLLCHGLLRASFIPDRPQRELRELVRYRRSLVEERTREANRLQKVLEGANVKLSSVASDVLGRSGRDMLTAISQGQEDPVELAALARGRLKEKSEQLQRALRGVVGPHQRFLLHEQLSHIEELEARIHRLSAEIETRLTPFEAALQRLQTIPGVGRRVAEDLLAEIGTDMSRFPTHRHLASWAKICPGNHRSAGKSKPEHIGRGNRWLRSILVEAARAAGRSKNTFLAAQYHRLAGRRGNKRAAVAVAHSILVIAYHILKEGTSYQELGATFHDQRSSKAVVRRLTQRLEALGFEVTLQLQEAA

SEQ ID NO: 242591 - protein, 429 aa, unidentified
MQNESAPGARGPVFCGVDTHADSHWLCVLDWRGRKVLSRQFPADAAGYEALAGAIAAAGEPACVAMEGTSSYGAGLTRHLASLGMPVREALSPARTQRRRPGQGKCDEADAERAARAAMPGSRLGTPKSQDGWVDGVRCMLAARSGAVKARTSAINTARSLLTTAPEGLRSRFRGMGGPRLMEELPSVRAEGALGAALGALADLWAAARDAALDMERAIEASLEENCPALLAMYGCGPVSAAKLAVAAGDNPGRLRSEASFAAICGACPIPASSGKTVRHRLNRGGDRQANSALHEIARQRVMRDPETAEYAERARGRGKSDREVMRCLKRYVAREAYRALMHPHEIRRPEDASELVAARRAARVSQVRAASILGTSEKYISMLERGQRELKPIRRAYEAWVEAGLPLDWDRQAFEAERKMDSKKGLAI

SEQ ID NO: 242592 - protein, 345 aa, unidentified
MQYYFIGIDVSKEKLDATLIRYESESDSEQQLAYTTVENNPKGFRSLVSWSKKNAGRGVKTDTMLFCCETTGGYDRALCDWLYGNGLDIWRESALQIKRSMGLRKGKDDKADSEMIAHYALRFRSQATLYKPLDGNMRSLRDLFLYRQSLVAERRAKTVSAKEKRHISSKSKVDNFIYRDAQKAIDLLTKSIKECERRMLESIKEDEEMYRHYLHLISCKGVGLVTSVMLIVYTDNFKGWSAKKMASYCGIAPFYESSGSSVFHKSNTGGYSNRRLKGILTQAARSAITHNPTLRQYYLRMKAQGKPHGVILNNVNNKLLHILFSLVAHDCDFELEHEAKRALRA

SEQ ID NO: 242593 - protein, 341 aa, unidentified
MNGLYYIGLDVHKKHVSYVINTASGSEVASGQVAATRTALSGWARSIEQPWSGALEATLFSSWIYDHLRPHAEQLKLAHPAMLEAITCSKKKNDRLDADKICDLLRCDLLPECYLAPPELRELRRVLRYRNLLVREAVRMKNKISGLLMEVGEPYDARRLHGKKYFSQYMDSLEDTPESVVELLRISRSSLEMFEQLQQRLLVGLRRHELLQQRVEKLQSIRGVGQVLALTWALEIAEVERFGSLGQAVSYCGLCAAQHESAGKSRRGPLSKQRNKHLQRVLIEAAKLAPRWNARLREVRDRELERGHRNRATVAVARKLVAYLLAVDRSGQAFVEQPQAA

SEQ ID NO: 242594 - protein, 311 aa, unidentified
MQDTVGIDVSKATLDAYWLSGRQHQVFSNDQSGLKRLLRWIFKAKAALTVFEATGVYDRPLQAQLAAHGVPFARINPKQARRFAEGIGQLAKTDKVDAAVLARMGSLLDLEPEKPRAQSANDLKDLATARQALIKDRTAAKARAQTASVPLLKAQFSKRLKQVERDLVQVDAAILSVIAQDERLSESAEILTSIPGIATVTACAMLTEMPELGTISGKQAASLAGLAPMSRQSGTWQGREHIRGGRAEMRRSLYLPAVVATRFNPDMKVKYDQLVASGKCKKLAITAIMRKLLVMANSLLRDRRKWVDILP

SEQ ID NO: 242595 - protein, 341 aa, unidentified
MPNSTDFQTIVGIDIAKSVFQVYSCDTKTGIVSNEKIKRDRLLEHFTNVPACKIGMEACGSSQYWARKLTALGHTVKLMDPKLVKPFVSHNKSDRADAEGIYHALQQGTRCVPMKNDTERDIDTLLTLRTRLVKLQTGDINHVRGLLAEYGQIMPRSTERFLDEVGNCINSLEGDAAQAVIEELRLVVDGIRKRAERIKTISSNIAALAKKTKHAANLLTVPGVGIITMAYMCVLLSEPQVYSSGRQFAAFLGLVPMHTGSGGKTITTHIPMRCNQQLRALMIECAQAVARAKYKTPWLSANLGKKPKKVAIVAIANRIARQCWAVASKGEAWKDLSVTTA

SEQ ID NO: 242596 - protein, 501 aa, unidentified
MAPKARIEDLFTASRADVVEPQQLMAEYGIGIDTHSRFIQVCLLLRKDEGFLRFERDFATDWPVLNEARQWCCDLLRVHGVHADPLRYVLESTSTYHLPVVRAFGGEPRIINPMLAGASKRKTDVLDARMLAYHAITGLWPPSFVPDDAIQVLRVLLGNRRNAQRRATQLSNRLNNIVLRFGHTFGTLGKVMGSFGRAILEDLASGKLPDAPGVCPQPLPEQVRGTLLQHIAEYDAQRQRVAELTRQATRHAHNTEFVLGTGEIVSGKQLMPLLETVPGIGPLTALLWMAEIVAVHRFPSAKALAAFAGCDPSLKISAGKVAQHVRRGGNKTLHHALMQAAGQLIQKRNEPFGRWGYKLMRSHPKGGFRKACGAVARRLATSLYHVQRTGESFSYDKYNFWRVPDVPSIPIQDMGLGRFTKILSSLELHTSNQVVNAYMTTLASEKGVGEKCLASIKQWLSQHTKGFTSTGPSSDARVRKSAHRLKRASPTASSPTDASSK

SEQ ID NO: 242597 - protein, 417 aa, unidentified
MKDPQQWQEHRAFGALDWASQTHCVVVVDQTGKVIEDFQIEHSALGWKKFREKLQSYGSIPFGIETSQGAAVEQLLEAGMTVYPLNPKSAQAYRERKAPSGVKDDQLDAWSFADALRVDGHGWKALKPEEPLIKELRLLCRDEVSLIEQRSAFIQQLRHALAEYYPAALEAFEDWTSVSAWMFLERFPTAQALAQAGKRKWQNFLHSRRLWGRDQGPRRMEIFARATEFAGTAATVKAKSLLALSLVQMLFAVEKQLGLYRRRIEELFASHPDHDLFGSLPGAGSKIAPRLLAEIGDDRERFDGDAQALQCFGGTGPVTKRSGKYRRVQQRWACNKHLRHAMHLFAEHSLSRCVWAERYYQHHPQKDRSHADALRRVGHRWLKIIHRMWMDRTPYDAELHHRNQLQHGSWIFQLKAL

SEQ ID NO: 242598 - protein, 412 aa, unidentified
MQIVYERCAGLDVHKKSVAVCLLVQELNEPTRKERQTFSTMTADLLRLRDWLMAQSCTHVAMESTGVYWKPIFNVLEGHLEVLVVNAQHIKAVPGRKTDVKDAEWIAELLQHGLLRPSFIPPAWQRALRNLTRARASLTEERSRTIARLHKELEDANIKLAAVATDLMGKSAQQMLQGLLAGEADPATLAELARGRMRSKREQLAQALSGYLQPHHRVVIVEHLAHIDALEESMTRLSAEIAERLRPYEVVLQRLETIPGIKRRLAEIILAEIGPDMQRFPSAQHLASWAGICPGNHESAGKRLSGKTRKGSQWLRTALVEAAQAASRCKNSYLSAHYHHIAVRRGTKRAAVALAHTLLIIVYQLIAREQEYQEAGATFLDDRDRQAKEQRLVRQLEKLGFAVTLTPTSPAA

SEQ ID NO: 242599 - protein, 367 aa, unidentified
MKCGSPQIYGIIVPRKDAFRIQRLEEPQMNYIPVGLDIAKHVIQLHMVDFHTGEMVDKQIKRDTLLTFFANREPCLIGMEACGGSQHWARELEKLGHKVRLMPGRFVKAFVMGNKNDVMDARAIWLAVQQPGKSVAVKTEEQQAVLAMHKIRHQMVKYRTAQINGLHGLLLEFGETVRKGRSALDKAMPLVLVRLEKRLPAALVEMLREQWERLSRFDEQIEDIEKRLKAWAQHDKSCQKLLKIPGIGVLIATAAVATMGDSKAFRNGRELAAYIGLVPKQTGTGGRVKLLGISKRGDKYLRTLLIHGARSAILLANAPGPWAEKIKERRPTNVAVVAMANKLARTIWAVIAHDREWNKDYVSVRPY

SEQ ID NO: 242600 - protein, 387 aa, unidentified
MEVRVVSTPSAGADNVPVHCYVAIELSKSSWIVGFQTPLTNKTSQYQVKACDANALLELIERIRTRVARELRRPIEVMSCYEAGYDGFWLHRVLKAHGIHNHVLDPASLQVNRRARRAKTDRIDADRMVRALIRYLRGEPEACSVVRVPSVEQEDAKRLHRERRRLIAERVQHVNRIKGLCATQGIYHYAPLRKDRLARLDDLRTGDGRALPTRLKAEIARELKRLEVLLEMIATVETERDVILTSAASTHLNAGKIKMLAKLRAIGPEFATTLVGEVFYREFANRRKLGSYVGLGSSPFCSGPVDRDQGISKAGNPTARSMMIELAWTWLRYQPGSALSIWFRERVGNLKGRPRRIAIVAMARKLLVALWRYLQTGLVPTGALLKA

SEQ ID NO: 242601 - protein, 347 aa, unidentified
MRPKLLMENDYILRQCVGIDVSKETLVVTMCMFSFAEEAHYSDVKTFKNNKTGFNQLVKWSRKEAYTDKPLRYVMEATGVYHEELASHLVKIGCTVIIMMPNKAREFAIWEGMISKNDTIDSRVLALVGCVKRSMRPWQPSKEIYHELRAMTRFAQDTKKLRLALKNHLEALEHSHQAEKSVVKHYEAMVSYLDKRLKMNLKNMKEKVASDEALNKKVENIITAPSLGFTSVITVIAETNGFALIQNRKQLTSYAGFDVKDNQSGNVEGTSRISKKGNSRIRAILYMPAVQAQLRSKHLKEAYDRIVQKHPDKKMIAVTAMERRLLLLIYALWKSDKPYDEDHNKKK

SEQ ID NO: 242602 - protein, 468 aa, unidentified
MELILGIDLACRAAHQASLAGPDGTFVWTGRKFFTRPAELEKLWKQIGLGEHDTLRVVMEPTRNAWAAVASWFRRRGARISMVPTTQSADLRAYYSKHTKNDHLDSKLLARLPLLHPEGLREHTGDGPAEPLRRVVKIRSSIVKRRTAVFQRLDALLELLGPAWYDALGSNYGKAALALLARYADPHSLIRLGHARLTRFLIRHSRGAWREQHATMLLAAAQESLQLWGSGAEAAIDFAELAADIGVEAQQAQMLTEQIEDLDERCANLYAEADPTGIIASAPGVGPVTCAVIAGRIGDPHRFHSLAAIRAYSGLVPKVNQSGQAQHQHGLTKAGDPVLREALFAAADQARKTDPQLAAKYKRLMATERHHDSAICHIATTLLTRIATCWRTGEHYNLRDTDGRTITPEQGRQIVRTHHAVDKQTRIKAANTRQSQRRKGRTGREQKESPSAPVLRPDNTSINTVEVA

SEQ ID NO: 242603 - protein, 347 aa, unidentified
MVYNRPHRFYCGVDLHARTLFTHVLDAKGKTVFEEDLPADPAAFLRAVKPYRKDLVVGCECMFAWYWLADLCEDEGIPFALGHALAMKHIHQSKSKSDRIDAGKLAAMLRGGLFPLAYAYPRAKRQTRDLLRRRSFFVRQRSQLIAHIVNTNSQFNLPPLTKKLTYAGNRSEEIAKRFADRSTRLMVESDLALIDDYDAQIARLELHLTRTAKVDDPVTFGFLRTVPGIGPILGLTLLYEIDDIARFAGAGNFLSYSRLVRCAHSSAGKVKGSGPKKVGNAHLKWAFSEAACLMIRAVPAVKSWMQRQEKKRGKRKALSVLEAKIGRAVYHLWRKQQAFDLKRFLAG

SEQ ID NO: 242604 - protein, 343 aa, unidentified
MDHFAGLDVSVKETSICIVDDTGRIVREVKVASEPEALLQVLGNPIYRFKRIGLEAGPLSQWLFSALAEAGLPVICVETRHMRAVLQAQINKTDRNDARGMAQMMRAGLYRPVHVKTLRSQQLRMLLTHRKLLQSKAIAIDNDLRGTLRNFGLKVGVVGTVKFEARIKELVEDLPDLAVLVEPLLVVRRVLREQCSILHRRLLAIVRDDEVCRRLMTIPGVGPVVALTYRATVDVPARFRNSRAVGAVFGLTPARYQSGELSRPGTISRCGDELMRVMLYEAAQIMLVRTTKWSWLKAWAMKIARHRGMKKAIVALARRLAVVMHRIWVDGTEFQWTREVTAT

SEQ ID NO: 242605 - protein, 389 aa, unidentified
MKIFVGIDIAKLNHFAAAISSDGEIILEPFKFTNDADGFQLLVSKLESFDKNSIIIGLESTAHYGDNLVRYLVAEFYQVCVLNPIKTCQMRKNNVRKTKTDKVDTFVIAKTLMMQDDLRFITFFDLDMMDLKALGRFRQKTIKQRTRLKIQLTTYVDQVFPEIQYFFKSGLHQHAVYALLKEAPSPKEIASMHMTHLANLLKVNSHGHFTKELAKELRVLAQKSVGANDSAISIQITQTIQQIELLDSQLEKIEAEMTDIMKFNDSVIMTIPGIGYINGGMILGEIGDIHRFSNPNKLLAFAGLDPSVYQSGNFQAKTTRMSKRGSRVLRYALVNAAWNVVRNNATFKAYYDAKRAEGRSHYNALGHCAGKLVRVIWKMLTDEVEFNLE

SEQ ID NO: 242606 - protein, 432 aa, unidentified
MPAQQTGSTPSFLAYVAIDWADRDHVGALRAADSAAVENFPLKQAPEAIDAWVAALRTRFGAGPIALALEQSKGALIYALMKHEGFVLYPINPKQLACFRAAMSASGAKSDPHDAAFLLELLVKHREHLRAWRPDDQTTRLIGQLAEDRRGLIGLQTRLSNTLKSRLKQYFPLALDVLGELDGELACRFLLRWNSLADLQRETPEAIAAFYRERHCHHPQLIATRLEAIRQATPLVTDSALIRSGQLLVETLATELLALIPLLERYDRELAALMKQHPDAELFRSFPGAGDALAPRLLATFGTDRERLQHVAQMQSLSGVAPVTRASGQSRQVTRRWACNKFLLQTFHEFAQHSIPRSAWDRAYYQHLRKRGKKHHAAIRGLAFKWVRVLFRCWQDRTLYNEAHYLARLQKNGAPLLEHLQPSNRPIPGPKT

SEQ ID NO: 242607 - protein, 402 aa, unidentified
MNCVGIDVSKGKSMIAVMRPFGEVVVSPFEVRHTANELSELAGLLKSLDGETRVVMESTGNYHAPVAWLLHDAGLYVSVVNAMLVHDYGNNSLRRANTDKKDAIKLANYGLDHWLTLPRYVPEEDTRLMLKACYRQYQQYSKVQTMLKNNLISLLDTTFPDANRLFTSPPRDDGREKWIDFVATFWHRECVCDLSEKAFAAKYQKWCKKYGYNFSEGKALDIYAAARGHFGVMPKTDTAKLLVEQAISQLRATSSALAALKQEMQSLAASLPEYPVVMEMFGVGPTLGPQLMAEIGDVRRFHSKKALVAFAGIDAPPYQSGQMDVRSRSISKRGSASLRRTLFLVMSVILQHAPMNEPVYQFMNKKRSEGKPYRVYMMASANKFLRIYYASVESYLDSLEHD

SEQ ID NO: 242608 - protein, 410 aa, unidentified
MHPLIDRCAGLDVHQATVMATVRIPDDHGGRQVITETFGTTTEALVTLRDWLQAYGVTHVAMESTGVYWKPVYYLLEDAYTLLLVNVQQLKQVPGRKSDVRDSAWIAQLVEWGLLRGSLVPPAPIRDLRELTRYRKHQTRDRAREVNRLHRVLEDAGIKLSSVATDVMGASGRAMLTALLHGTTDPAVLADLAKGKLRKKLPALRHALAGRFRGHHGFLIGQILAKVDFLDETIATLTEEIDHLVAPFEPMVAKLDTIPGLDRKGAITVVVETGGDMSRFPTAGHLCSWGAMCPGQNESAGKRHSGKTRKGNRYLRTALIEGGLATTRATGTALQARYYRVKRNRGHKKAVVAVGHQILEIAYYIMRDGVSYQELGPDYFDRRHRNRAVRRHVRQLEALGYRVTLDIEAA

SEQ ID NO: 242609 - protein, 335 aa, unidentified
MKKIYVGIDISKEKCNLCFRSGLEIVREEECSNDVKALKKAFKAALKVLGASVNEVLVCAEYTGRYIYPLTVACQELDIFLWMDDPTRIKNSMGLTRGKNDAIDAARIAEYAFRYSDKAIRYCIPDAALVSMKNLLADREFLLIDRKRYQSQLTDQKKYMAPGDFKHKSSRWKKVIKSIDEQIAAIDTEIETLIAADPVLTRQKELLLSIDGIGERIAINMIAITGGFTRFQNARQFCSFAGLTPYKYDSGTSVRSKAKISKRANQTMKALLHLAAVGTATHMKEGEYKDYYERKTKEGKHVMCVLNVIRAKLVHRMFSVIKRDTEYTKEYKPAC

SEQ ID NO: 242610 - protein, 364 aa, unidentified
MKRKVYVGMDVHKETIQIAILPSNTKALVKEQQIKHEEGQIKKFIQKLKSEGTEIHCCYEAGVTGYPLYRYLKTLGVNCTIVAPGKIPRQSSDKIKTDKRDAIKLAKSLRSGELESIHVPSEEDEAVRDYLRSRDSLRLDLGRNRQRLMKFLLRKGIKYSTTKYWTASHYKWLNNLHFENEILQATFNDYYSRVRVQEENLKAMDQKIREIAESEPYREKVGILRCFRGVDYLTAMFLLSEVNDFKRFKTAGSFMSFLGLVPGEYSSGSKRKQTGITKTGSPRLRRILVEAAWQHRFPGTGSKVVAARRVGQSALVVSLAEKASLRLHKKFKSMQLRGKTPQVMITAVSRELSGFLWAAMNLVA

SEQ ID NO: 242611 - protein, 410 aa, unidentified
MGYETKNRRAHVMTRKNTLKSLPTDTEFRVVGLDLAKSDVSVAAIPVDDNTPSLVDRMTYADLLDWAGKISPTLFAMEPCNGYSLLCLQLENLGHEIKVISDSTVSMWINTHLSGQKTDLNDAIALARLAVSDAELTPIRHKSITEICIQTVQAVRQQLMSQRSKSIVSFKALAQQWGIPCAAGHRNLKKLRESIEAKVDLITRPVANAMLFLLDAVKSLDRQIGQLNQTLQELVMSDERGRLLQSVLGVGTQISARVITVVGNVERFNSPRSLVAYVGVAPRNFITGHKNLTKKKHGNCPDLSHKGQGKISRRGDKLLRSLFIQGAACLYMQFCKDQLPECQLKRWILKQLAMQKPYGKLMVSLAAKLIRIVWAVLTYREKFNIQKAGMTRSMWSEMALETPLNKEVPA

SEQ ID NO: 242612 - protein, 344 aa, unidentified
MEVSVLGIDLGKNICSVVGLDATGAVVLRRRAKRETLIALAARLRPCVVAMEACCGAHYLGRVFADHGHDVRLMSPEYVRPYIKAQKNDDRDAEGIAEAATRPTMRFVELKSQEQLDMQTLHRSRDRLVGERTALINQLRAILLERGIIAPQGKRKLEQFLVGLMDEQGGAGLSPRMIMLVADARAQWTELDRRIAAFDAEFIRWVKENEDARRLTTIPGVGPTIASALIAAIGKAETFEHGRDLAAWLGLVPRQRTTGGKPRLMGISKRGNKYLRKLLIHGARAALPHVAERDTSLGRWAKGLLARVHPNVAVVALADKLARICWAVLRSRQRFSAKGAPVTA

SEQ ID NO: 242613 - protein, 362 aa, unidentified
MNYVGVDIHKKYSVLCAVDERGRKLREARIEGNSGCGFAQFFASLEGPSKAVVEACWNWGLVHDELEEIEQVEEVVLAHPYKTRLIADAQIKTDRLDAHALGTLLRGNLVARAHVPRGETRVRKNLLRQRLYWARLRTMLRNRIHALLDRQRGLELPQCSDIFGVRGLSFLRRLQLPETDAALLREQLALHDLIAQQMKAQEKRIGLEFGSEAMHRQLLSVPGIGPTLAAVIACEVDSIERFSSAEKLCAYAGVVPTTHSSGGKTRHGQLLPFCNKWLRWALIEASWVAIGCSPYFGALYKQHRARGKKANSAVLIVARRMCRIIWQLLHEKRDFEKRPLRPNFNFPGCSVVRLTAATAARP

SEQ ID NO: 242614 - protein, 406 aa, unidentified
MINCGIDWAEAHHDVALVDDAGKTLTKVRVGADAAGFSRLLEVIAEQGGSPEVTPVAIETDKNLFVVALAAAGFSVYPINPRAVARYRERHVQSGGKSDPGDAIVLANILRTDRHLHRRLPQISEHALAIKALARQHQEAIWAWHQALSRLRSVLLEFYPQAIKAFPNLKHHAATAVLTAAPSPTAAASLTRRRVVALLHRCGRRNDPALVEQILIDLKAPALQQPARVEAALALTVAGLLRIVVTMRTVVEQLEAALATEFDSHDLAPVLRSAPGLGPVLAARVLAEVGDDPARFASVDGLRAFAGTAPVTRASGRSHYVKARKVRNKRLADACHWWAYATLTRSSDARAHYDRRRAAGDHHNAALRNLANKLLGRLWWCLINNQPWEENAAWPDRVRTPELTAA

SEQ ID NO: 242615 - protein, 362 aa, unidentified
MRIIGCDLHARQQTVAMLDTITGEVMKMTLTHEGNNVREFYCKLPRPVRVGIEATGSMQWFVNLMEELGMECLVGHPAEIRAAEPRKQKHDRRDADLILKLLVENRFPAIWLPSKELQDLRSLLRHRHQWVRMRTRIQNALQSIALANGLRRGTSLWSQAGQHTIASLPLAPYTAYRRSELQAMYEKFEAEIEKLNQRVEEQALGRAGARLLMTHPGVGPVTALATEVFLGDPARFADSKALASYVGMIPREYSSGERQRLGGLSKQGNPLLRFLWGEAGAHAVRRDPELQRFYRRKLVQKGLGKASVAVARKLGIRLWIMLRDQIEYNEFCRRGQKQQKSSDACAGMPETRYGAKSHRPVD

SEQ ID NO: 242616 - protein, 434 aa, unidentified
MQDTEDEPLFAERVAGLDIAKAEVEVAIRVPSDTTAGRRQQETRTFGTTRRELLDLADWLRSWGVTKAGMEATSDYWKPVFFLLESRGFDCELYNAAQVRALPGRPKTDRADSIWLARITERGMISSSFVPPEPIRTLRTHTRYRRHLTQARTAEKQRVEKLLEDGHLKLSSVISDIHGASGRDMLDALVAGQRDPRALAQLARGVMRGKIRRLEEALECSFFTDQHAAVLSMMLTTIDHYSAQIDQLTARIEVLAGPYLHQIGQLDEIDGIGLICAQDIIAEIGTDMTVFPTAAHLVSWARWSPQVRQSAGKRKGSNATGRGNPYLGAALGEGAASAGRTQSFLGARYRRLTRRMPRKKALVATGNSMLTIMHALLSDPAARYTDLGAGYYETRMHARQQARNHVRSLERLGYHVTIQAQAPDTRDHPLAPAS

SEQ ID NO: 242617 - protein, 411 aa, unidentified
MDSGYKVAGIDVHKKMLAVVVTDVAVAGEYTFVRRRFGAGSAELQALHEWLREQGVREVVMESTAQYWRPVWLALEPSFGLHLAQAQSNKAPKGRKRDFTDAERLVRRHVAGELILSFVPDEEQRLWRTLARSRQQLTRERIRLRNQMETLLEDSRIKLSSHLSDLFGVSGKKMLRALARGESDPAQIAALALGGIRATPEQLSDGLSGAAQLIPLRRQILRLFLERLDLIDRQIEELEQSLAGELRTHQEAVTRLAAVPGLGADSAHQIIAEIGPQAARFDSPGQLASWVGCCPGREESAEVSRSNRSPKGNGAMRRILCQAANAAVKAKGSVFQEVYRRMVPRLGHLKTIWAVAHKLCRIVWKVLHDGVSYEERGRKPDAQTIHRRIGKLLRQLRALGYPIPSVEAATK

SEQ ID NO: 242618 - protein, 376 aa, unidentified
MNKTEIYIGLDVHKETITAAVAEGGRTGEVRQAGTITNDLHALEKLLRRIRGEGERTLHVCYEAGPCGFVIARRLKQLGICCTVVAPSLIPVKAGDRIKTDKRDAEKLARLLRAGDLSPVYVPDSTDEAIRDLCRARTDAVDDRTRARHRLKAFLLRHGFRYTAKTTWTPAHMRYLRELVLPHPAMKVILEDYLCAIDVANERVNRCEEAMGELLVSWQLRPAVEALMGFKGFKIVAAMITVSELGDIHRFAHPRQLMAYLGLVPTEATSSDKRRQGGITKCGNPHARWLLVECSQHYDTPPKVSQELSMRQAKLDRRSKEVSWRAQNRLHARFNRLRGRRLQRNKAMTAVARELTGFIWELLRELPCYNRVANAQ

SEQ ID NO: 242619 - protein, 416 aa, unidentified
MFKIIRFNCCGLDVHKTWIYACIRITDANFRTEYFEARFSSFPKDLRRLAAWLQEHKCEEVCMESAGKYWIPVFNALETTCKVTLAHPKYTKPQKGNKTDRKDARWICDLFMCNMIKPSFIPPPDIRHLRDLIRYRTKLTNMLTSEKNRAQNCLTASSLKLDDVFTDVFGKSARSITEYILAHPGEKFDVTPFIDKRCKTPVDQIQDAVDGAICPEQAAKLRECLDHIDELNAHRDRIEQEILTLVEPYSVHLELIRTVPGMNKDPMTAILILSEIGSDMSVFPTSKNLVSWAGCCPRNDKSAKHVKSTRISQAGSCLKPRLVQVANGLVNSKDHPEIRERYRRIKSHRGHKKAIIAVCKMLLTAIWNILSTGEAYNASGYLIQTPRPTDETMVLTQKQALDLLRLRGYVIKEESA

SEQ ID NO: 242620 - protein, 429 aa, unidentified
MEEVDEVELVVQRVAALDLGKATLEACMRVPHPSKPGRRMQEIRGYATTTATLLEMAIWLRQWGIERVAMESTSDYWKGVYYLLEAEGFDCWLVNAREVKNVPGRAKTDRADAVWLAKVAERGMCRPSLVHPPPIRRLRDLTRYRRALVSDRSREMQRVEKLLEDAQIKISSVLSDIHGVSGRAMMEALIAGQRDPRSLARLAKGLARKKTDRLEEALRGFFTDHHATILQMMLDNIDRIGAQIAALDARIAEAIGPFSRQGSRLADIPGVNTVAAAELIAEIGVDMTRFPSAAHLVSWAKFCPQIHQSAGKSRSKARGKGNPWLAGTVGRIVFSASHTDTFLGARYRRLARRRGKPKAIVAVGNSVLTVVYHLLSDADLDFCELGPAHYESRINKHRRARDLATQLQALTGQHIVIRDGKAIITDNAA

SEQ ID NO: 242621 - protein, 354 aa, unidentified
MSATVIGVDPHKRSHTAVVLDDCEQVASEIRVTASGGQVDELLAWAPTGERVWAIENANGLGRLLAQQLVAKGETVVDVPAALACRARKLSGHSARKTDEFDARAVAIAATYNRGLRRVQADNVSAVLGLLVERRWQLVSQRQRAICRLHALLTDMVAAGAKGHLTSKKAAALLRTIPAGDVVTLERKLLARELIDDVRRLDRRIPPARRRLTAALTAYDTTLTDIHGIGDVGAATIIGIVDDPTRFPTSGHFAAFTGTAPLQASSGDVERHRLSRRGNRQLNKVLHTAAKTQIRRGGPGRDYYQRKLAEGKSSMEALRALKRQLSDVVYRRLLADHQQRAVRGGQMKTSPKAA

SEQ ID NO: 242622 - protein, 423 aa, unidentified
MDVIHRRVAGLDVHKAVIMACVRLMDGAKVHREVRTFDTTTAGLSALLAWLTESGVTHVAMESTGVYWKPIWNILSDGNFELMVANAAHIKNVPGRKTDVNDAMWIADLVACGLIKASFVPDEQMQGWRSLMRARKQLVREQTSHVQRIQKTLEEANIKLDSVITDILGLSGRRMIEAMIAGVRDPRKLAALAHHRIKASPKELYDALHGRLTDHHRFMLRLYLGQYDSLSAAIAEVDRQVDVLLERMDQEVAAGQAPFRDLIRLLSTIPGISTLAAQTILAEIGRDMSRFPTAGHLIAWAGLCPGQNESAGKRKSSRLRKGAPWLKTMLVQCALSAARKKDSYYKAQFNRIKSRRGPQKAVCAVAASMLTAIYHMLKDGTEYQDLGSGHFDRRPAEVKAKRLVAQLAKLGFEVQLQPMAAAA

SEQ ID NO: 242623 - protein, 421 aa, unidentified
MGKLIERCAGIDIGKRFLLCCVMTGAAHEEPRSETRRFDTTVPGLKRLRNWLNEERVTDVVMESTGSYWIPVFNLLEGHVTVVLANPEEVKNRKGHKTDRKDAGHLADLLRHNHVKSSYIPAEPVRQLRDLTRRRVQLTQDATRERNRVQKLLEQVNVKIGSVLTDVFGVSGLHMLLALLDGRAAPEEIAGLARGSAKRKTPQLIEAIEGNRMSDHVRFLIRGCLRHLACLEEEVEELDAEILRRMQLSTFQKAFTLLQTIPGVGQLSAATILAETGPDLDSFPTIEKMASWAGLCPGNRESAGIQKGPQTTHGNPYLCTALVQCAWAATRKRDSVFRSRFQRLAPRRGEKRAIIAVAHHMLIILYCMLKRGVPFLGAEHAPKQRRRERRAHHHLRCLRRLGFSVEIRLISESAPPDTISR

SEQ ID NO: 242624 - protein, 426 aa, unidentified
MKNTQNEKISQIKITTLVVGVDVAKETHYARAFDYRGIELSKLLRFSNTAEGFQRLEEWMQNISEQHKKTDIIVGFEPTGHYWFNLGDYLKDQGHKLAIVNPFHVKRTKELDDNSPTKNDRKDPKTIARLVKDGCYREVYIPEDVYQELREAISERDRLVQRMSSISNQVTRWLDIHFPEFNTIFKDWRRQAALQVLKSFPTPEKIIAAGAVKIEGTWKESMKRTAGLKRAQELVKAAGTSIGRKTGLTAAEASLQNLLKEYDLYSQQYQQLEQLMLELLQQVPNAEKMLDIKGVGLITAATFVGEVGDIRRFQDPRQIQKLAGFNLVENSSGKHKGKTRISRRGRRRLRHGLFMAMITILATNPEFRQLHQKNITRENNPLNKMQSIIALCGKLIRVFYALLRTGTDYSADKMLGDIELGMKVAA

SEQ ID NO: 242625 - protein, 424 aa, unidentified
MDEQPTFAQLKYFAGFDWAQESHHVVVVDGAGRIVLSLALADDARGWATLAEKLRDLPDLAVAVETSCGPAVERLLEMGLAIYPLNPKSAQRYRDRKSPAGVKNDELDAFSFADALRTDGHAWRRLRPQDPATAELRLLCRDEIGLIEQRSALVNQLRAALHEYYPAALEAFDDWTSRSAWDLIISFPTPALLVAAGKRRWQSFLHAHKLYRAQTAQKRLEIFARANAFASPSAAVTSAKSLLAVTRARQLLTLEHQLDEYRTRIGKLFNDHPDRDCFGSLPGAGEKLAPRLLAELGSDRQVFDSPDALRCYAGTAPVTRQSGKKRWVSLRTACNKHLRHTVHLWADLSRKFCVWAEAYYQQKKTEGLNHAAALRCLGQRWLKILWKMWQTGRPYDEALHTTNQVRHGSWVVGMIPAPASGRAR

SEQ ID NO: 242626 - protein, 351 aa, unidentified
MTIISHYIGFDVHKKSISYCVKTKDGTIVEEGRLRATREVLRQWAAKRQEPWHGAMEATLFSGWIYDALQPFAAKLQMGHPARMKAIFAGKKKNDKLDARKIADLLRVNLLPACYVGPAEMRELRRMLRYRNLVVAQAVQMKNRMSGMLMEVGAEYSKRRLHGKEYFSELLDQLEEVPESVKDLLRLSRGSLEMFETVQRQLLERLQKEPLLRQRVELLRSIRGVGEVTALSWALEVCDPRRFPSIDDAVSYCGLTSALVESAGKQQRGPISKQRNAHLQTVLIEAAKLAPRWNPQLAAIHERELERGHRNRATLEVARKLVAYLLAVDKSGRPFQPRTAPTRETEAPKVA

SEQ ID NO: 242627 - protein, 338 aa, unidentified
MVVIGIDPHKGSHTAVAIDEDERMLDEVRVRSDRRQLERLTSWASAFPERSWAIESANGLGALLSQQLVGAGEEVFDVPPTLSARVRVLGTGKSQKNDPNDAFSVAIAALRSSRLRAVEAEDHVAVLRLLWNRHKNLGSLHTQAVCRLHALLAAIVPGGAHRRLSADRAAAVLSGFRPKTAVEKARKAQAQYLVVEVRRLDAQLKASKRTIVEAVAQVPTGLGELSGVGPVATAIILAHTGDIRRFGGEDNYASYNGTAPIEASSGPRKRHRLNPRGNRQLNHAMHIIAFSQLSHAGVGRDYYERKIAEGKSQKEAVRALKRQISNAVYRQLVRDAQR

SEQ ID NO: 242628 - protein, 359 aa, unidentified
MTNKVKRNKINFKGKMVSIGVDMHKRSWHITALADGEIVLTVSLSRPNYDAFEKLLSQFKGNYVRIVYEAGPGGFDLYDRLTADGIECIVTPPSLIPTQSGSRVKTDKKDSLKLATLLESNILKKVWVLSPEERAHRQLVRTRRQIVNHRSDVMRQIKSLLLFHSIEVPFSSRQQWTGPFIRWLHEVELGNKYLNGSLKALVDLFDYLSAEKKRLTHEVIDLGREEKYAKRVKLLKTIPGIGALSAIEILVELQDITRFQTADELAAYLGLTPSQYSSGGHIRMGHITHAGNDRARTTLVESSWLLIGKDPHMRCIYEDIKQRRGGKKAIVAVARNLSIRIRRMLLDRVPYEIDFQKAA

SEQ ID NO: 242629 - protein, 395 aa, unidentified
MEVQDESGRRLGKARLPEGVAGVARLHELIAGFGGEDLEPGQVLVGIETDRGPWVAALVAAGYSVFAINPRQVARYRERHGMSGAKSDAGDAHVLADMVRTDRHQLRPVAGDSALVEGIKVVARAHQSLIWDRHRQLLRLRSALREYFPAALQAFAELAAADALELLGAAPDPERAARLSRSRIVGALKRARRRDVEVKAERIQAVLRSEQLTQPPALVAGYAAGVRATVAVLVTLNAEIATLQGQVEAHFGSHPDAEIHRSQPGLGEILGARVLGEFGDDPARYAGARARKNYASSAPITRASGKRKAVLARFVRNHRLADALHQQAFSALNASPGARAYYDELRARGTGHHGALRQLSNRLVGILHGCLKTRTCYDEDTAWGHHAHQDQQAVA

SEQ ID NO: 242630 - protein, 408 aa, unidentified
MNTLYVGIDVSSKSNVVYLMLPNGDKHSNFSIANSHEGSTQLVKRILSALTSHSLDTVLIGLEATSVYGDNLVYFLREDATLASFNRKIHVLNPKQVKKFHDAYNDLPKNDYVDSFVIADCLRFGRINKEVYMGDYRYKALQNLTRARFFAVQNLVKEKQRFMNVLFKKYSTMTQEKVFSDTFSTTALAVYDEFESAEALANMDLQELTDFIIEKGKNRFPDPDAVAKAIQKAARSSYRLPKTVNDSVNQVLSISITSMKALESQIKEFDKAIKAQMELLPNVLISIPGIGPVYSAGIMAEIGDINRFNSQAALAKYAGLTWKQHQSGGFEAEVTRLIPSGNRFLKYYLCEAAFSLVRCDKEYSDFYHLKYKEVNRCQHKRALALTARKFVRLVFRLLKDNRLYCPAK

SEQ ID NO: 242631 - protein, 408 aa, unidentified
MEVLYPRCAGLDVHQQTVVACARIASGSTVGQEVRTFGTTTADLLALADWLTAHACTHVAMESTGVYWKPVWHVLDGQFDLILANALHIRSVPGRKTDVNDAMWIADLLAHGLIRSSFVPPTPIHELRDLTRTRKQLVREVSQHTLRIQKVLEDANLKLTSVISDVMGISGRAMIEAITRGEQDPARLADLSQGRLKASRPAVIAALQGRVTPHHRFLLRLHLTQIDALEVAVRDVEARLGEALGPFQASIDRLLTIPAIGRTVARVIVAEIGVDMTRFPTAGHLVSWAGLCPRQQESAGKRLSTRTRPGNPWLKTTLVQVAWVAARTRNTYLRAQFLRLKSRRGAKKAILAVAASMLTAAYYILKDDVTYHELGADYFEHRDKAQIARRLVRRLEALGLSVEVRPAA

SEQ ID NO: 242632 - protein, 402 aa, unidentified
MNAVGIDVSKSKSVVAIMRPFGEIVSTPFEIKHTASDIHSLIELINSVEGESRIVMEHTGRYYEVLAHQLSEANLFVSAINPKLIKDFDNDSLRKVKSDKADAVKIARYALDKWQNLKQYNVMDELRNQLKTMNRQFGFYMKHKTAMKNNLIGILDQTYPGVNTYFDSPARSDGSQKWVDFASTYWHVDCVRKMSLNAFIDHYQNWCKRKKYNFSQSKAEEIYGKAKELVPVLPKDNITKLIIKQAVNQLNIASATVESLRTLMNETASQLPEYPVVMAMKGVGTSLGPQLMAEIGDVSRFTHKGAITAFAGVDPGVNESGSYEQKNVPTSKRGSSNLRKTLFQVMDALIKTHPQDDPVYQFIDKKRAQGKPYYVYMTAGANKFLRIYYGRVKEYLSSLPES

SEQ ID NO: 242633 - protein, 465 aa, unidentified
MSIRPTTLQDTARVASLPILHGQAAGIDVGDRTHWVCTGFDNEEAIREFPAHTQGLHQLIDHLRQRGVTTVAMEATGVYSHVLFLSLIEAGFDTIITPPQFARQIKGRPKTDKRDCQWIFRLHTLGLLPTVFQPDDTTQTLRDLVRQRANQVRLSSHHIQRMQKALTLMNLKLTSVVGDVTGVTGLKIIHAILAGERDAQKLAKLRDRRCKHSAAEIATALDGRYRDEHVLELRCTLMMWESYQQVIGVLDEAIEKHLRAMKKSTSLPPLPAKTRKRGRKPHDPRFDVRTALYFMVGIDLTLIEGIDEIHALTLISELGTDFSKWQTVKHFTSWLGLCPNFKKTGGKVKSSATRKGKGRAATALRLAAWGLMRSKSYLGAYLRRQRSRLGAPKAITATAHKLARILYNLMRYGIDYVQRTEAEYAEQERERVEKNLYRRAKELGYELTKVTRPPDTPMVEATPAN

SEQ ID NO: 242634 - protein, 319 aa, unidentified
MNKSTLFFGIDISKDSFDVYSDKMGYSSYSNTKDGFKAFLKVLNRTSHCVMEATGCYHHKLAMFLHEKGIIVSVVNPLVIKRFIQMKLRRLKTDKSDAFMIYSYASEQSVEEWQPEKEYIERGKELLSLIQTYLRQATALKNKLHASESKGQTKGVIISSMKRQLRNLKRERQFLEQELESLIKTHEAKLFTRLTSIPGIGKKTAVLMMVSTSNFNSFNSYKQVSSYLGLAPNERSSGSSIRGKSRISKTGDGLLRNHLFMCTFTASVHNPQCKALFDRIVAKGKSKKLALIAVCNKLIKQAFAIAKSGLPYDSNYAVK

SEQ ID NO: 242635 - protein, 337 aa, unidentified
MEPVMGFDTHLGTFDMVAVDGLDRELESAQVANTPQGWAEAVATAHKFGITLVGVEGASSYGAALARTLLGAGITVKEVPTRDTAWTRRSHGGAKNDRIDARAAARAVLAGKGNVWTDDPAQETMRIVTHHRESLVRAQTRAVNELRALLVGYDPPAAARLGRLNTLKGFNALAGLAPDSDPHRELIAQLIRDLADDCARRLTTIRKLTGQLKTLMPEAGQRLIDSIDGCGVVSAAIILGELAGTDQFATEAKFAMWAGAAPLDASSGQNLHHRLNRTGNRQVNRALHIVIATQLRHGGEAADYLTRRLREGKPPRAAVRACKRHLARRIWKILHQT

SEQ ID NO: 242636 - protein, 350 aa, unidentified
MIEVGMDQHKRFSLAASYNCETGLVQTARLEHDNPQSIRNYVRSLGQNVRASLETTGNWYWLVDLLEQEGVQVQLCNNVETRRLLKARAKNDRLDAIALAELSAQGLLPCVYVPPAQMRDARERHRYRIRLVGMRSVVKNQVHAILSKLNIRAPGTDLFGKKGRAFLDQLTLREPYGDELAGSLRIIELLSDQIKQIEKGIAKNLKDDPRSELLQSIPGIGKLTAHLILYEVGPVERFPTHKQFVSYCSLAPGTWQSAGRRKQMPVGRRGNLYLKAALSESTQTAVRYDNSLGAYYRRLRQRKGTGKAMMATARKLAVAVYYVLRRGERYRPAASIQSTSGKPVLCLGRQ

SEQ ID NO: 242637 - protein, 377 aa, unidentified
MKRILKIGMDVHSTNYTLCAMEPVIGAEDRVFANIQVTPDYKNILMFIENLKLKLGLEDTYDIECGYEAGCLGYSLYNQLTASGVKCVILAPTTMLTQQGQRIKTDARDAHMIAQCLSYGGYHPVYIPTEEDDSVKEYLRMRDDHKKALKKVKQQVNAFCLRHGYHYEGTKWTLAHLKWLKKLELSALYRETLDEYMASYDEQTAKIERFDARIEEIASQAGYADKVKKLGCFLGIRIHTALSLVVETGDFRRFAKGNVYAAYLGLAPGEHSSAEKINRLGITKAGNSHLRLLLVEAAGGICKGAIGHKSKELRHRQQGNSAEVISYADKANARMRSKYYRLIRHGKKRNIAVAAIARELACFVWGMVTENIEEKAA

SEQ ID NO: 242638 - protein, 350 aa, unidentified
MLIIGCDVHTRFQVIAMVDTTTGEMVTRRLEHENGEARKFYGGLREKARVGIEATGCTQWLERMLAELRHELWVGDPAEIRARVVRRQKTDTRDAEHILDLLLSNRFPRIWVPSVEERDVRQRLRHRDKLVQMRTSVKNQLHYLAMSQGICRKRKLWSERGRQELEGLALGPWASRRRQELLELLDRLEPRIEELDKAVKEEAERRPEAVRRMQQKGVGPVTALAFVLTLGPVERFANSRKVVSYLGLNPSEDSTGGRQRLGHISKQGNQMLRWLLVEAGQRASQHDAELRRRYQRLKFRRGANVAKVAMARRLAVLLYWKLRQAQPVPWPVRTPGSPARTLVDASPSTF

SEQ ID NO: 242639 - protein, 354 aa, unidentified
MLIIGCDYHPSFQQIAFVDTETGEVKERRLVHREEAEKFYRDLAAQGRQVRVGMEASGHARWFERLLAELQFELWMGDATEIQRKRGRKQKTDRQDAQHILGLLLKNDFPPIWVPSWENRDLRQLLWHRHRMVQARTRIMNQLQAVALNEGLLCRKRLWRERGRQQLEAFQLAPWASRRRHDLLELLDRLNPTITELSQAIEREVEKCPAAQQLMTHPGVGPLTSLAFVLIIGDASRFQCGKQVASYLGLVPLEDSSGNRRRLGHITKQGSSMLRFLLVEAAQVTVRSLPEWRRKYAHLMMRRGRKTAKVAMARRLAIRLYWMMRQGWDYQQWSKFGSHAGQPGHRDGVPSNIE

SEQ ID NO: 242640 - protein, 372 aa, unidentified
MNHNTIYVGMDVHKENFSLCAYTLEAEKASYHQRTEADYKNVLKYLEFLRSIYGNDANFICGYEAGCLGYTLYHQLSANKVNCVILAPTTMLEKRSKKRIKTDKRDAEIIAKCLTQHNYSPVHIPTAKDEETKEFLRMGDDHKLALKKIKQQILAFCLRHSYRYDGKSHWTAAHLKWLRSLTPEALYKEILEEYLLTYQNFSDKLERMDKRIEELAFLEEYREAVKELCCFIGVRTHTALSVLVEVGDFKRFASAKNFASYLGLVPGENSSGENQTRLGITKAGNRHIRLLLTEASQCYARGQIGFKSKELKSRQSGNTPEVIAYADKANERLRRRNYKMVLGKCKKHNVAKTAIARELACFMWGMMTDRIA

SEQ ID NO: 242641 - protein, 356 aa, unidentified
MGKITRVGVDLAKNLIQVHAVDASGKVIASRSLKRERFVTWCADLPHGCLVAMEACSGAHHWCRKLKAVDLDARMIAAQFVAPYRLQGSSGKNDANDAAAVCEAASRPHMKFVPPKTLAQQGMLCVHRLREGLKEERTACINRIRGLLAEFGLVLPQSPGVLRRHLDGLIEDASNDIAGIARLVLQRAQEHWKEIEVHIGWCDQRIAAHQKDDEQVQRAAELKGIGPVTASAMVVAVGDFKQFKNGAQFGAWLGLTPKQNSSGGKTSLGSISKRGSPYLRNLLIQGAKSAVLVSKHHDDPISQWAQRLRERCGWQKAVVALANKNARILWAVMTKNERYDPHHVSVHPSTIAVATT

SEQ ID NO: 242642 - protein, 389 aa, unidentified
MEARTVNNPPPAAPHDDAVRCVLAIELSKKSWIVAVNTPSSEKISRYTLEACDWKELLKLCERIRTRIARELKKDVELVSCYEAGYDGFWLHRLLEAHGIHNYVIDPASLQVDRRARRVKTDRVDVERLLRSLMAYLRGEPKVWSVVCVPSVAEEDDRRLHRERGRLINERIQHVNRIKGLLAIHGIYDYPPLRHDRMQRLERLRTADGRTLSPRLKAEILRELQRLELVIGMIKTIEAERDAIASAKIETEHSSAKRIQDLAKIKCIGPEFATTLAGEVFYRSFDNRKQLASYVGLTPAHFQSGETCRDQGISKAGNAKARRVMIELAWLWLRHQPASPLSVWFHDRVGKLKGRIRRITIVAVARKLLIALWRYLETGLAPEGAILKV

SEQ ID NO: 242643 - protein, 352 aa, unidentified
MERYIGLDVHAQSCTIAVMGPSGKRLRRLVVETNGAALVDAIQSVAGQRHVCFEEGTQSAWLHELLRPHVVEIVVMVPPKHSGPKDDLRDAWACADAIRTGATGTRVYKAPEHLAALRNAVRAYGFAVRDVVRTKNRLKSVFLSRGIVADSVVYDADRRGKWLKKLPPAHRQLAEWLGRQLDELQSLREEADGWLGKEARTHPIIRTLSTAPGLGPIRCAQLVAVVVTPERFRTSRQFWSYSGLSIVTRSSANWKPNGAGKMVRVEHQQTLGLTRKRHPLLKAVFKGAATTVIEQMPKHPLHEDYQRMLASGRKPNLAKLTLSRRIAAIVLSMWKNKEEYDPKRHAVVTVKA

SEQ ID NO: 242644 - protein, 317 aa, unidentified
MDHNNAVYGVDVSKAKLVTVRYDDMQTLVELDNRAEAIAAWLANLPKGTVVAMEATGIYHRLLAHLAHAAGMRVYVLNPQTLKHYAQAIGQRAKTDGCDARMIARYALHEQAKLQLWQPPARAADRLSQLLERRHTVVGVRQTLAQSLSGMPVLNAARQSLLASLERTVRRMDILIRHEMARLPGAAALYERLTSIVGIGPVVAAQLVALFSTLRFARTGAFIAYTGLDPRPNDSGARRGRRTLSKHGPPLLRCLLYNAGMAAANSKVFKPVYQQLRARGLHTTEAIVVLARKIARIAFALYKSGEVFDAQKHLRIA

SEQ ID NO: 242645 - protein, 395 aa, unidentified
MEQVIIGVDPHKLSATIEVVDHLEQMLGSGRFTTDRAGYFAMRNYAKSWSERVWAVEGANGVGRPLAQRLLESGEQVVDVPAKLAARVRLFDTGHNRKTDAHDAHAVAVLAVRTPNLRILRVDGELEALRMLTDRREALTRRRVQTVCRLQALLAELLPGQAKRDITALQAKRLLATVRPRDIAGKTRRRIAAEELAELIVVDTKIKRATAELKAVVLARDSRLMDIDGVGAVVAARILADVGDVARFADRNRFASWTGTAPLDASSGEQDRHRLSRAGNRRVNHMIHIAAVTQIRLDTEGRAYYRRKRAEGKKPMEAMRCLKRRISDAIYRQLVADAQRVESADPGGHCGASQKSSAVDLPPLIDTSDQPLPDPQPRRYAAPRRPRKSRPARTS

SEQ ID NO: 242646 - protein, 410 aa, unidentified
MDVIYERCCGMDVHKNTIVACVITGKKKEIKTFSTMTSSLLRLIDWLKGVDCQCVAMEATGPYWKPIYNLLEMEDIKTLVVNAQHIKAVPGRKTDVKDSEWIADLLRHGLLNGSFIPKREQRELKELVRYRRSMVQERARELNRIQKVLEGANIKLASVVSDIDGKSSRQMLEMLVAGCNDVEAMADKALMQMRKKIPVLKEALYGFMGDHQRLMLRLMLNHIDTLEEQVIALDKVIQEKMKTVNEQVSLVDSIPGIGERSAQVIIAEIGTNMNQFPSAAHLASWAGLCPGNNESAGKRKNGKTRKGSDILRATLMECAKVAGHLKKTYFCSQYSRIAARRGKNRATVAVAHSILTAVYYMLKSNSPYKELGADFFELRRKNDIVKKSVKRLESLGFNVTIEQNTEACTA

SEQ ID NO: 242647 - protein, 348 aa, unidentified
MNYCGIDLAGVSSYAFVTDAKGKMLWAGPIATEKVAFERLVKKFQRDGLSIAIEAGNQTAWVYDELVKLGAQVTVVNPTKVKLIAESRRKTDQIDAKILCELLRLDALPHPVHVPGPQARELRGLLVARRQLVTARTKLCNVVRGMLRQTGVRLPARELSTPAGWQRLFAAGFGHDYLLHIVSAYYDSFLALTKSIRELDQQLAQHEKNEPRARRLKTMPKVGRIASLTFLAAVDDVHRFPTSRKLVGYSGLAPTVRQSGERTEYGAISREGRRELRAVWVQIAHLVATDKKKTTQPLRTWFNRVAKKRGQKTALVALARRLLVIAYQLLKTEQDFDVGRLKKKRRAA

SEQ ID NO: 242648 - protein, 384 aa, unidentified
MKVVCGLDVHKDSVFCCILCANGEKIQHKFGVLTEELVTLRDLMVSEGVEECAMESTSIYWIPIWRVLEGSVKLHLVNPYFIKQLPGKKSDVNDAEWIATCLSKELIASSFVPDDKIQRLRQYDRRIFDLNASISRNLVKLDQCIQRCNIRISNYISTTDSKGYRSIVKLISQGVTDAEVLVKELHGRTINRHGRETLVKALTGVVSETDIDMINQLVEEIELQQRHKDEAQEKMTALCMEWFPQEVENLQTIPGVKERSSTSIIAEIGTDMTHFQTPKKLVSWVGLRPRNEESAGKIKARGITHGNRFVRKTMIECSWGAARMKDSFFAEFSYRQCIERRKNKMKVQVAIARKILVAVWYVLSQGTQYIKPTDHYTATDMTAV

SEQ ID NO: 242649 - protein, 347 aa, unidentified
MRFYTKQQRYYCGIDLHARTMYLCVLNQQGEILLHRNMPCSPDFFLKAIAPYREDMAVAVECIFTWYWLADLCAQENIAFVLGHALYMKAIHGGKAKNDKIDAHKIAALLRGGMLPMAYVYPALMRSTRDLLRRRMHLMHKRSELLTHIQNTNSQYCLPQFGKKIAYKKNRQGVAEHFADSSVRKSIEMDLSLIDHYDKLLTEVELYITQNAKIHDVNAFNRLRSVHGIGKILALVILYEIHEIDRFPTVQDFVSYARLVKCAKESAGKRHGSSGAKIGNVHLKWAFSEASVLFLRANPAGQRYADKLTSKHGKAKALSILAHKLGRAVYYMLKRDKAFDMNKFLNS

SEQ ID NO: 242650 - protein, 434 aa, unidentified
MRVVYERCCGLDVHQASIAACALSRDKCGHRQEETQRFGTMTADLLDLAAWLKQRGIQHVAMESTGVYWKPVWNILEGEGFDLLLANAQEVKIVPGRKTDQKDCQWIADLHQHGLLRNSFVPPRAIRELRDLTRGRATVTQDHTSIANRIQKVLEDANIKLATVVSDVFGASGRAMLRALMKGEGDATVLADLSKGSLRCKIPELRRALEGRLTAHHRFLLQRYWEQLERLEDQTRQLEAEIAQRMQPTAEETAQALEGLPDGSPLPLSPREEAIELWMELPGVGRITASSLVAELGVNMEQFPSAAHLASWAALCPGNNESAGKRKSGRTRKGNVWLRRTMCEAAWAAAHSKNTYFAAQFRRIASRRGKKRALVAVAHSVLVVAYHMLKNKRHYQELGADFFDTLNKEQVKRRLVQRLGKLGFQVTLTASAGR

SEQ ID NO: 242651 - protein, 345 aa, unidentified
MDHFAGLDVSVKETSVCIVDETGKVVREVKVASEPEALLSVLKNPAYRFKRIGLEAGPLSQWLFSALAEAELPVVCVETRHMQAVLKAQINKTDRNDARGIAQMMRVGLYRPVHVKTLRSQKLRMLLTHRKLLQSKAIAIENDLRGTLRNFGLKVGMVGTVKFEARIKELVENLPDLAVLVEPLLVVRRVLREQFVILHRRLLAIVRDDAVCQRLMTTPGVGPVVALTYRATVDVPARFRKSKAVGAVFGLTCSKYQSGEIDWSGRISRCGDEMMRVMLYEAAQGMLVRSTRWSWLKAWAMQIARRRGMKKAIVALARRLAVIMHRIWVDGTEFRWTREQAAAAA

SEQ ID NO: 242652 - protein, 343 aa, unidentified
MQTVTTIGLDIAKSVFQVHGQDDAGQVVIRRQLKRRSVLAFFQKLPPCLVGIEACASAHHWSRELQALGHKVRLIPPAYVKPYVKRQKNDAADAEAICEAVTRANMRFVPTKTPEQQSCLVLHRTRHLFIRQQTAVINAIRGHLAEFGIVAPVGRHGVEELLNVLADPNDKRVPEIARACLSAFGAQLRRIKEQVLEFDRLIRAWHRSDEMSMRLDEAPGVGPVLATAVVATVADPKSFRSGRNFSAWIGIVPKQHSSGGKNRLGNISKQGDRYLRGLFVAGALAVIRYAKIHGTKHRPWLTALLARRPTKVAAIALANKLARMVWAMMVKGERYKEPVALAA

SEQ ID NO: 242653 - protein, 349 aa, unidentified
MIVIGVDAHKSTHTFVAVDEVGRKLAELTAKATTDGHLSAIEWAKQWPQLQFALEDCRHVTRRLEADLLNRGHAVVRVKTQLMAVHRRSAREPGKSDPIDAHAVAMAALREPNLPIARLDGPAREVKLLSDHRHDMVCERTKLISRLRWHLHELDPELHVPVRGIRRYRVMDELADRLTHFTGVVAQIAGELLSRCRQMTRQINDLERQIRERVRVLAPSLLAIPGCGVLSAAVIIGETAGAHRFHSKDAYAKFNGTAPIPVWSAQERVRLNRGGNRTVNAALHAIAITQVARGGLGKAYVAKLQAAGKTRREALRLLRRRISDRVFQVLRADESELGNTAKGPFAVAA

SEQ ID NO: 242654 - protein, 349 aa, unidentified
MIVVGIDPHMQTHTAVAIDKATGEVVAELTVKARTPGFERLVGWARELDKELLFAVEDGRHVSGALERHLIARGERSVRVPPRMMGESRGSDRIAGKSDPVDATAVARAALRHPDLPEAVLAGPEREIGLLVAHRESLVRERTDKICKLRWLLHDIDPELAPVPRSLNRFVTLRRLAQVLQAMDACVEVEICLDLIARCAEITTRANELERRIGSLVRSHAAALLQIPGCAALTAAKIVAETAQVGRFPTEGHFARYAGTAPIPASSGARHRQRFNRRGNRQLNTGVHRIAVTQIRMYEPARDYMAKKQAEGKTKAEAIRALKRHITRVVFKTMTSMNQPTDRLTAVAA

SEQ ID NO: 242655 - protein, 455 aa, unidentified
MLLSAAGGLGRGILDQEHAENANPEGDESATVGVWASPTPPQLPASFLAVAFFSSLLDKMDEPATCAIIRGLRRVRAKPIHMRRSRLMNEDITIVGLDVHKATVVAAILPPTATRPTQTVTIENCPKAIERLVRRVAGEGRLVLVQEAGPCGYQVHRQMTEMGKKCVVVAPGLTPVRPGDRVKTDRRDAEKLARLYRAGELTEVHVPSCAEEAARDLVRIREDALEDRLRARHRLNKFLLRQGRVYRETKAWGVAHRAWLRGQRFEWPLLQQTFEGNLRAVEEAEARLESLNQQVLDFAQSGPYRMAVRYLRSLKGLETLGALTLAVETLDFGRFERAPAYMSLTGLVSSEHSSGGRERRGSITKAGNAHLRRILVEAAWSYRLKNTVSPQLAERRRSCPPEVIQIARKAQDRLHRKFWRLVSRGKPSQVAAVAVARELAGFVWAIAQQVPAAAT

SEQ ID NO: 242656 - protein, 411 aa, unidentified
MIFVGDDWAEAHHDVYVCDEAGGKILARRLPEGIEGVTALHQLLAEQVDDPAEVVVGIETDRGLWVQSLVEAGYQVYAINPRAASRYRDRHTVSGAKSDPGDAKLLAELVRTDRHNHRQVAGDSDLAEGVKVLARAHQNLIWDRTRATNRLRCSLREYFPAALATFNELADRDTLAVLAKAPTPAEAKALPLGKVRSALKAGGRQRNIDTRARQIVDGLRVDELAAQPAVTSAFAATTRTAIAIITELNTQIAALETELADHFEQHPDADIYLSQPGIGVILGARALGEFGDDPNRYADAKSRKNYAGTSPITRASGNRHVALARFIRDRRLADAIDQWAFCSLSTSPGARAYYDHQRDKGLSHHKALRALANRLVGILHGCLHHGTSYDEHTAWAHRPENTLTKKIPNAA

SEQ ID NO: 242657 - protein, 347 aa, unidentified
MEQYAGLDVSLDSASVCIVDAQGKIVKEAKVACEPEVLIAWFAAHGTPMARIGLEAGPLSQGLFAGLKAAGLPVELLETRHVRAAFKAMPVKTDRKDARGIAQLMRLGWFRPVHCKSLPAQEVRALLTTRKLLQAKRHDVEMSLRGVLRGFGLKVGPTTPKTFEARVRDLVAQHGTLQTIADALLKARAVLEQEFKAIEKRLSALARAHAPTRQLMTTPGVGTIVALTFASAIDDPSRFRSSRRVGAHFGLTPRKHQSGETDVTGRISRIGDHGVRVALYEAANVILTRAVRGSDLKSWALRVAQRAGMKKAKVALARKLAVVLHRMLADGTTFMASKVARSAAGAA

SEQ ID NO: 242658 - protein, 354 aa, unidentified
MQYKYHLGIDLHKRFAYWVVLDDEKKVRWRGRVETNADAVRGALARLPVVRSQTHCAIEPVTEWGWYADLLQSEGLHVRLVDTYRASITAKMRLKNDKVDALVLAELLYADYLPEAYLAPLATRDLREFMRNRIFLVRIRARAKNRIHAILARHALLCPWTDLFGKRGRIWLLSQELPEQYATERAMLLRVLDSVSAEIATLQAQVEEKAKEHRIATLLMSIPGIGAFTAMVMLAQIGDFSRFETPERLGAFAGLVPSSYSSGGKERHGGITKRGSPDLRWVMIEATNTVSAKRWGTLHDFYARIKMKKGSKVARVALARKLLTIAWTLVNKKNEPFLVRPSLIKPKLLEIVAA

SEQ ID NO: 242659 - protein, 341 aa, unidentified
MSEVRIIGLDIAKSVFQLHGVDDAGATVLQKRLTRARLLPFFEKLPRCLVGIEACATSHYWARELGKLGHEVKLMPAQYVKPYVKRQKNDMADAEAIAEAVTRPTMRFVGQKSPSEQSAMMLHKVRLMLTRQLVMITNATRAHMAEFGIIAPVGRGGVDRLLAIVDDETDEQIPAEARRCLQMLVAQLKLVKLQILDNDRQVLALARSTEIGRRLMEVPGIGPLVASALVACVPDPSMFRCGRNMAAWLGLVPKQNSSGGKEQLGSITKAGNRYLRQMLFAGAMAVIRRAMQGTRRTWLIRLLERRRPKVAAMALANKNARIAWAMMTSGEHYREPIAIAA

SEQ ID NO: 242660 - protein, 316 aa, unidentified
MKTEVFVGIDVSKQHLDVAVRPQNRHFVTPNDDRGIKQLVKRLAALKPQLIVLEASGGYEFLVTAALAEAHMPVALVNPQAVRKFAGAAGKLAKTDKIDAQVLAHFAEALRPEPRPLPDQAHQVLKAALQRRQQVVKMIGQEENRLEKTFIPTVRRDIQVHLAWLRQRLTALNRDLDDQIRQSPLWQDRDRLYQSVPGIGPVVSLTVIAQLPEIGTLPGKKAAALVGVAPYNRDSGRFRGKRMIRGGRSYLRRMLYMAAVAATRWNPVIRTFYQRLVAAGKPKKLALTACMRKLVLILNAMVKHNQPWNQFINQVP

SEQ ID NO: 242661 - protein, 418 aa, unidentified
MADRITYVGLDVHKDSIVVAVAAGGLRGEVREYGRIANTPTALDRLLRKLGGDGMTLRFCYEAGPCGYGIQRRLSTGGHECVVVAPSLIPKRAGDRVKTDRRDAASLAKLHRAGELTAVWVPDARHEAKRDLVRARLDAVRSLRRARQQLSGFLLRHGCHYGRPAWTRLHRRWLAGLKFAQAVHNIVLEDYIAAVEAAEARRNRLTAQIEAMLSDWTLAPVVAALQTMRGMALVNAASLIAELGDLSRFANPRQLMAYLGLVPSEHSSGGSVKRGGITKAGNAAARRLLIEAAWSYRFPARLSRQLLLRQERQPRLIRDIAWKGQLRLCARYRKLARTGKPANIVTTAIARELSGFVWAIARQVAVTTDGSHKTNDPSQRRRQRTTQHRTSGQGRGRGRGQENPREHYLPNDHSDAGF

SEQ ID NO: 242662 - protein, 348 aa, unidentified
MTMVGGFDVHRKQITFDYVDHDGLVWWGQIRPATRKTLRVWLGEHCPGGDAEFALEGCTGWRYVTEEVASAGVGVHLGDPAEIAVARGPKKRAKTDRADARLLRTLLLEGRFPESWIPPVHVLEIRTLGRLYCTLMDERRAWQQRIHAQLFHQGCPPIRALLSEAGRDALARVDLSAAGRQYVDTALRRIDELSTEIGPLRTQLVNFARRQVGCQALQAQYGIGWLCAAIIWAEIGDARRFTSSDQLVRFAGLDVTVYSSDGKRSPGHLSRQGSPELRWAAFEAAKCAARRSSPDYAYYHQLAAKRDGHNGKNPTLAVERKILRRCYHTLRELGDAALALPIPEEVAA

SEQ ID NO: 242663 - protein, 324 aa, unidentified
MLPTLGIDISKGSFHLELSINEKLRHRKFANRKEGFGELRAWLAKHKATQVHACLEATGPDSEALALYLHQQGHTVSVVNPVQIKAFGQSELRRNKDDRPDAGLIRRFCEKQRPAPWTPPPVHLRELQALTRHLENLIETRQQQINRLETTNTKNVVKSLRKLVAHLDAEIKRTEQQIDDQVDRHPDLKQQSELLESIPGVGKRTAAKLLAEITDISQYKSARQVAAYAGLTPRNNRSGTIRGKTRLSKTGNARVRKALFFPAIVAKRHNPIVRAFCERLSSNGKNKMQIIGAAMRKLIHIVFGVLKSGKYFDPSHELLLNSVS

SEQ ID NO: 242664 - protein, 436 aa, unidentified
MRGCRCSMIMGFTKPIEHFNLLRKKVITMNTLYVGIDVSSKSNVIYLMLPNGDKHSNFSVANSHEGSTQLVKRIHSALTSHSLDTVLIGLEATSVYGDNLVYFLREDATLAPFNRKIHVLNPKQVKKFHDTYNDLPKNDYVDSFVIADCLRFGRINKEVYMGDYRYKALQNLTRARFFAVQNLVKEKQRFMNVLFKKYSTMTQEKVFSDTFSTTALAVYDEFESAEALANMDLHELTDFIMKKGKNRFPDPDAVAKAIQKAARSSYRLPKTVNDSVNQVLSISITSMKALESQIKEFDKAIKAQMELLPNVLISIPGIGPVYSAGIMAEIGDINRFNSQAALAKYAGLAWKQHQSGGFEAEVTRLIPSGNRFLKYYLCEAAFSLVRCDKEYSDFYHLKYKEVNRCQHKRALALTARKFVRLVFRLLKDNRLYCPAK

SEQ ID NO: 242665 - protein, 408 aa, unidentified
MLFVGDDWAEEHHDVELMDAAGRRLAAARLPEGVAGITRLHEMIGAQLGEHAGEGEVAIGIETDRGPWVSALVAAGYTVYAVNPLQAARYRERHGVSGAKSDKADAHTLADMVRTDAHQLRPVAGDSPHAEAIKVVARAHKTLIWERTRHTLRLRYALREYFPAALEAFDDLAAPDTLELLAKAPDPASAAKLNRSQIRAALKHARRRDIDIKTTRIQAALRSQQLGRDAVITDAYAATTRSIAAVLATLTDQINTLRGQVETHFGRHPDAEIISSQPGTGVLLGARVLAEFGNSPGRYADAKARKNYAGTSPITRQSGKRKTAHARFVHNDRLVDALISQSQSALLASPGARAYYDKQRARGLDHHAALRQLANRLVGILHGCLKTRTLYDEATAWSHQHQDQRTAA

SEQ ID NO: 242666 - protein, 384 aa, unidentified
MPDVSSNAPGEVRMRAALDVHKRTIVCASQPEDPRAGELRLQEIPNTERALRGLVRRLGGPEGLVVCYEAGPCGYDPYRLLAAIGAACDIVAPALVPVAPGARVKTDRRDAKRLLVLHRAGALKFVAPPTVAQEGLRDLVRCREDLVCARRAARHRVAKQLLRHGRVFREGKKSWTKIHQAWVRRQRLEDALAQSALEHMLCHLDAVDAQIAAIDHQLDEIAGREPWSDPVRWLCCFRGITTLTALGLLAELGDFRRFSSARELMGFLGLTPSEYSSGEQRHRGHITLAGNTHARRLLIEAAWHYQHAPRVSQRIAAVHPHVPPDVAASAYNAQVRLHHRHRALTARGKRSTVANVAVARELAGFIWAAMTRQPIRDQEVPTAA

SEQ ID NO: 242667 - protein, 497 aa, unidentified
MSTIMYRDPNENLSHTIFMGIDVSKDQHAICCIDSSYRVQKKLVIPNRKKGFQTLESILLGFKEQGVTVLAGLESTGVYGQSIYGFLQPLVSSVSLWNPFKVEAYRKFSPHPTTKTDAEDAFLIACFTYHQWTHPTSSPINLSASFSKRLAILREYTRVRIYYTEKRSNQVRRLSTLVEKIFPEFFDVFTSRWNQTAFHLMRHYPSPEQLGSVPTQELGQQIERWSKKQMKASVAGELQDLAKNTIAHPLDGEVIAMEIGHTVELILWFQDQLKKVEQRILAMSDEFPSVKILQTIPGMSTIMAMSIVSEVEPLSRFSRVESLRSYAGMDPRIKESGKSVHGKSFISKKGSRYLRRSLYYAANSVRQKDPVFGDYYKRKRNPHHTHRYAVLSTANKLLAVVYALLKKKQSYQASYEWNTKKNVQEQEKTLKAEKTILPSTPSNGSKTKDAPPQTPSPTSIPLEILFPSLQKRMENAQKANVRTPALPVYISLEKLLQ

SEQ ID NO: 242668 - protein, 521 aa, unidentified
MESVAAIFSLVARKRFGVFEDPVCETASIFRRLSQVASLSQGNQTMKKHKKTKPNPEAAKPLHEPKPDAAGIDLGATEIWVAVAPDRCQMPVRRFGAFTQDLLAILQWLLECGIRTVAMEATGVYWIPLYQLVADAGIEVCLVNARHVKNVPGRKSDVRDCQWLQYLHSVGLLMASFRPAQIICQTRSIYRFRQNLLTQVGQHLQHMQAALDQMNIKLHHVINDLSGQTGMAIIEAILNGERDPLRLAQYRDRRIKATQETIAKSLEGDWRSEHLFVLRLAWENGKQVQEQIKKCDQELMQYTRQLEAKTMVAQPIVPVKIMSLNVEPGVPELTPAPAVRPAKPRKKTSKNEPDGPWRENLHRFFGVDLTLIPAISVLTGITLMTELGNDLSAFKTVHHFCSWLCLCPDNETSAGKVLHKSTRRSQNRVRQALRMAASSLHHDKSYLGDKYRRLRAKLGAPKAITAMAHQIARIIWYLITHQVAFDMSIFAELEKANQKRHLNRLNSAAHQMGYQLTPIAA

SEQ ID NO: 242669 - protein, 348 aa, unidentified
MTIVDARVVCGGVDTHADFHVAAALDHLGAVLGIESFETTEAGYRKLLEWLEGFGTVTRVGVEGTGSYGAGLARFLHNHRVEVVEVDRPNRQLRHRSGKSDPIDAVAAARAALSGEASGRPKWRNGPMEQMRVLLVARRSARDQRIQTLNQIRQLIFTAPEPIRARFLGRYHKGLVAELAGLRPRNGTKDPVRYVTLVTLRDLARRIVKLDEERTRIRANLHALVAETAPSMLDLYGMGPENAAVLLVAAGDNPQRIRSEAAWAHLCGVAPIEASSGKTIRYRLNRGGNRQANAALYRIVLTRMSSEPRTRSYVTRRRDEGRANKEIIRVLKRYVAREVYKHLPRHGT

SEQ ID NO: 242670 - protein, 437 aa, unidentified
MVELNSSAALTNKELPLLYGVGIDIGKANCSLSILRTDKTAVTKPMEFPNAKAGYEWLDHKLEQLGCEKAQLLIGLEATWRYWENLLHHLVAEGYPTQLLHPAQTYQFAKRRGMRAKTDRIDAELIARFVLSGDARPAYVPNELITTYRELIRLHTNLADEATRYKNELRAMLEVLFPEFTQVFADPSAPTALALLQRYGGAEAMVRAGIDEIYSTLHELSPRRYGRGAAQRLVALAQASQASPLAHSARATSLGIICDQLAHTQTNLAKLEEALGNLLQGDKEADSLASVPEFGQKVRAVLGGELGEVERFERGDQVVAYGGLDLVIKESGKWKGQPKLSKRGSGLLRRMLYMAVLHCLRMKQSAFKDYYQAMVTRGLRGRKAIMAVMRKMLLVAFHLLKSGKTYDPTKVWAAPKPETADCLPLPVSDPKLVAARA

SEQ ID NO: 242671 - protein, 356 aa, unidentified
MSRDIKYIGMDVHKEAVVIAVLHSSGKLAMESIVETKASSILQFIHGLRGELHVTWEEGTWAAWLYDLLQPQVAQVLVCDPRRNALLKEGNKSDKVDAHKLADLLRTGMLRPVYHGEHGLRTLRELGRSYQTLSQDLNRVMNRIKALYRGWSIPCAGTQVYAPRYREEWLQKIEHAGVRRRAELLYQQLDGLQALRRTLRPELLAETRKHKAAKLLRQIPCIGPIRAARLIALMQTPHRFRSKRQLWTYSGLGIETRDSAQYRYVHGQLQRTKKPQQIRGLNQNHNHEMKEIFKGAATRASCGVGPLRDFYVALLAKGMKSEMARLTLARKIAAIALTLWKKEERFDAEQLKPQAA

SEQ ID NO: 242672 - protein, 359 aa, unidentified
MQQQTYKLDFKGKDIYTGIDAHLKNWRISIMVDGIQCKTFSQGPEAKTLRNYLDANYPGGNYLSAYEAGFCGFAPHRDLLKHGINNIVVNPADIPTTDKEKKQKEDARDSRKIVRSLHNNELDAIYVPSMDIEGLRTLVRYRKTLVKEINRYKFRTKSFLYYNGFKLPIELEQGSKHWSKRYTTWLKGLELEITYSKTTLDSIIGTVGHLRSKLLEINRLLRQLEKQGEYSNSITLLRTVPGIGLIMSMTIITELENIERFGSLDKLCSYVGLVPRTNSSGDNEKIGKITPRSNRQLRSMLIESAWIAIRQDPALMMRYSELCQRMEPNKAIIKIAKKLLSRIKHVLKNNEPYEKGVVK

SEQ ID NO: 242673 - protein, 345 aa, unidentified
MDHFVGLDVSVKETSVCIVDETGKIMREVKVASEPDALLEVLANPAYCLKRIGLEAGPLSQWLFSALAEGGLPMICVETRHMRAALNAQINKTDRNDARGIAQMMRVGLYRPVHVKTQRSQKLRMLLTHRKLLQSKAIAIENDLRATLRNFGLKVGMVGAVKFEARIKELVENLPDLAVLVEPLLIVRRTLREQFGILHRRLLAVVRDDEVSRRLMTVPGVGPVVALTYRATIDVPARFRNSKAVGAVFGLTPAKYQSGELDRTGAISRCGDEMMRVMLYEAAQTMLLVTTKWSWLKAWAMQIARRRGMKKAIVALARRLAVIMHRIWVDGTEFRWTREQATAAA

SEQ ID NO: 242674 - protein, 457 aa, unidentified
MTKRNKKAKSQNFEMSKLPQHLQHINVNAAGVDIGSERHFVAVPEGRDEVSVREFGAFTTDLRALAAWLKQCGVTTVAMESTGVYWIPLFELLEREGFEVKLVDARHVKNVSGRKSDVLDCQWLQQLHTYGLLAGAFRPPDEICVLRSYLRQRQMLTEAASQHIQHMQKALQQMNLLLHNVVTDITGVTGMKIIKAILAGERDPRVLARNRDERCKNTTATIAKSLVGNYRAEHIFALGQAVDLFETYQAKIADCDEAIIKQLETQPDVSDDGPPTPEKPTQARDRLRSGVDVRELLYQKSGVDLFAIPGLAADTLLTLTSEVGFDLTPWKTEKHFASWLGVCPGTKKSGGKVLNKKTKRHPNRAAQAFRLAAASLSRSKTALGAFYRRIKSRSGGKHAVTATAHKIARIYYAMLTQGTAYVELGQQAYELRYKERRLDHLKVQAKSLGFQLVPCAT

SEQ ID NO: 242675 - protein, 411 aa, unidentified
MDKVYDKCCGIDLHKKLIVACFKQGNRQEIRDFGATTRELLEMADWLKEGGCEMVAMESTASYWKPLYNILETCELKAMVVNAQHMKAVPGRKTDVKDAEWIADLLQHGLLTASYIPDKDQRELRELVRYRKSLVGERARELNRLQKMLEGANIKISGTIRDINGKSARNILEHLLSGKQIDSAEYDILYEKKVIAHNLKATKEQIIDDLNGVMSALQKKMMRIILNHLDELNAHIRELDDDIDNFMKPEEKEAAKVIQDIPGIANTSAQAIISVIGADMSRFPTDAHIASWAGLCPGNNKSANKRKSGKTRKGNGLLRDTLIVCAHSAVKNKSSYFHAQFARISAHRGSKRAYVAVAHSMLVAIYHILKEGVVFKDLGADYYNQFNRERKINAYLKKLKALGWEVPVVAA

SEQ ID NO: 242676 - protein, 335 aa, unidentified
MTTYVGVDVHSSQSTIAVITSGQPNPSIITVRGGPEEVKKQLLRIEAPFDLCFEASCGYGKWFETLSSVARSVTVAHPGHLRLIYASKRKNDRVDASKLAKLLSVGAVPAVYVPNVQVREWRGLIRHRGRTVAKCTAVKNSIRALLREQAIKAPRGLWTKKGILWLTQLDLPETTRWRMDEHLEDLELLKQRVSRFTRQLDQIAARHPGVALLRTIPGVGTRTAEAFVAWVDDARRFARTSQIGDYFGLVPRQDASARRNHLGHITKDGPGCVRQLLVEAAWQGIRRNGVIRAKYEQFRRGDKERTKKAIVATAHWLARVMLSMLRSGEVWRQAE

SEQ ID NO: 242677 - protein, 308 aa, unidentified
MSILESKVYVGVDVASKHLDFFFPDTGKSERIKNDTEAVKDLCVRIQGQSQYMFVMEASGGYESLLCAQLGSHGILHSVVNARRVREFARSMGVDAKTDQIDARVISQFASVLKPIASEAQSDEERSHTALVTRRTQLVDLITQEKNRLKQTWDPYAKKSVQKMLKHLENELESIDKLLVKMLENDKKNQRKIEILQSAKGIGNVSTSMLIAQLPELGKLNREQIAKLVGVAPMNRDSGNTMGKRFIMGGRGNVRAILYMATLVAIRHNEKIRAYYAHLKSHKKASKVAIVVSAHHNQWFGFRRDTDL

SEQ ID NO: 242678 - protein, 408 aa, unidentified
MNAVGIDVSKGKSMVAALRPMGEVALLPQEFLHTEVGLEQMAYAIIALGEDTRVIIEATGRYHEPVAAALHKYGIYVCVLNPLYIKQSGGGSIRKVKTDKADAMKIAKYGLDNWVDLREYTPMDTVRQQLKLCSRQYNLYMKTVVSLQNNLISLTDKTFPGVNELFSSPERADGHQKWVDFVMTFWHCDCICRVSEKAFTERYQKWCKRKGYHFSTEKALDLYAGSCGHFTTLPKNDNTKLLITTAAQQLLAGKMTLAALRAEMTRLAMQLPEYNTVRAMYGVGETTAAQLMAEIGDVRRFPRRSSIVGFAGVDPGVDDSGKHSAKSVPTTKRGSPHLRKTLYQIVCTYLRKAPANELVYQFLEKKRAEGKPYFVYMTAAQNKFLRIYYARVKECLAAFDAQQDTTQS

SEQ ID NO: 242679 - protein, 389 aa, unidentified
MKIFVGIDIAKLNHFAAAISSDGEILIEPFKFTNDADGFQLLVSKLESFDKNSIIIGLESTAHYGDNLVRYLVAEFYQVCVLNPIKTCQMRKNNVRKTKTDKVDTFVIAKTLMMQDDLRFITFFDLDMMDLKVLGRFRQKTIKQRTRLKIQLTTYVDQVFPEIQYFFKSGLHQHAVYALLKEAPSPKEIASMHMTHLANLLKVNSHGHFTKEQAKELRVLAQKSVGANDSAISIQITQTIQQIELLDSQLEKIEAEMTDIMRFNDSVIMTIPGIGYINGGMILGEIGDIHRFSNPNKLLAFAGLDPSVYQSGNFQAKTTRMSKRGSRVLRYALVNAAWNVVRNNATFEAYYNAKRAEGRSHYNALGHCAGKLVRVIWKMLTDEVDFNLE

SEQ ID NO: 242680 - protein, 310 aa, unidentified
MTIHPDVIGIDVSKAFLDIFDVERGRPERFPNDAEAVHALARRLRERPHGYAVFEATAPYDKHLREVFTVQGIAFARVNPQLARHFAKAKGRKAKTDAIDAKTLAEMSRVLAPPAPTRHDPLRETLMALHRRRDQMVADRAAEQVRLREVGDLHGSCARHIAWLKEEIARFEALIAEAIAADAALTEDLRLIRSVPGIGPVGATTLLAQMPELGTLTPKTAAALVGLAPFNVDSGKRRGIRQIGGGRKRVRQALYMAAVTAVRARARFAGLYQALLARGKPAKVALIAIARKLIVILNAVMRDRVAFQTT

SEQ ID NO: 242681 - protein, 315 aa, unidentified
MRSTVAQSVGVDISKDTLDVAIHPGGESFRITNNPEGHRALIKRLKGFDIARIVFEATGAYHRLFQQAMVEVGLPWVKVNPCQARRFAQATGKLAKTDRCDALMLARMGAVLDLETRAPASKTVEALRELVNARDALIKDRVAALNRQAIAVSPLIKRQLAQRLRQIDGQIEAIDRRLKTLRNADSDLCQRFDILTSIPGIGEVTANVLVVETPELGRLEHAQAASLVGLAPVPRDSGQTHGKRSIRGGRPRARQALYMPALNAIRLNPEFKAKYEAMVKAGKPAKVAIVAIMRKLLILANALIRDRRKWAPANP

SEQ ID NO: 242682 - protein, 358 aa, unidentified
MNNHMIQGYVVKGKEIFVGLEDSKRTWRLSVRCDRMVIHQASMEARYPVLLSYLHNNFPECTINLIYEAGFKGFTLHDRLTDDGINCVVIPPHLVTEPKVNRVKTDRRDANRLAFILEGKDVPSICHVPDRERREDRQISRTLIAVGKDIIRTRNRIRKLIDFHGIEVPFAAKATWGRKEFEALKKIPLSAPLRASLDVLLSLLGHLWLYQETLRAHLKELCRKERYRKAFDIARSLPGIGWYTAIRFVLELGEDLSRFTDAKKIASFAGLTSREHSTGETQRRGRITGLGQGFIRSTLIENSWVAIRKDQALLAKFMRVWRNSGSRQKDIVAVARVLIIRLRACMVLGRPYATGIVR

SEQ ID NO: 242683 - protein, 405 aa, unidentified
MVRKPYDIYCGIDVGKSAHHAIALTADGRRVLSRDLPQDEAMLRALFSELAAHGSVLVIVDQPRNIGALPIAVARDSGLDVAYLPGLRMRRIAALYPGQAKTDARDAFIIADAARTLPDTLLPVTQDDDIVEGLRMLAGFDADLATEENRISSRIRSVLLSVHPALERAIGKHLYRPVALTLLAEFGGPVGFAAATPAALKRVAKRSAPRIGDQIADSITAALAEQTVTVPGAEKSNFVLKTLARQLSEVRRARAELEEQFESELNRHPAGPILTSMPGVGVRIAATILVEIVDVDRFDSAGNLAAYAGVAPRTHRSGTSIRGEHRQRGGNTRLKRALYLSAFASLREPPSREYYDRKRAEGKDHRSALICLARRRCTVLFTMLKTGAVYERRDAKADRLATEAA

SEQ ID NO: 242684 - protein, 450 aa, unidentified
MNLYIGVDIGKELNYASFLNEKGVEIDKRFKFKNNYLGFLKLKDNIDKPTYDYNLKYDDILVGFESTGHYWINIDWFLTEKLNIKTVMVRNDAVRHTRALNSQGKGKNDSLDSRTIAECLKNGYYFDVQGRKEDYIVLRRLTRERSELEKEIARYKNRFRAWLDVNNPIFLENFSNVFSAGALALLKVYPSPLDIIQDSYLEVREKLREVGYSRTNKTLKIYYEEVQTYKNIINGISYADRLEISEYIEALEMYIKKKENLDERIEVLMNFLEGKVYTSLSEIKGMPKAQVASLIAEIGNINNFKSARHLLSYAGLNLQGEGSGKNKGYSWISKTGNRKIRKELYVITFNLIIHNDYFRGLYCYYKSYKRPNEKSSKEMLIALMCKLLRVVYGMLKYNLEFNLNEMLKNYDFRNINKEKFIDEFLGNSEKKQKVITQEIEDIFLNNIKSN

SEQ ID NO: 242685 - protein, 428 aa, unidentified
MNCNTQNAKIASITEKTLIVGIDVGSETHYARAFDWRNYEYTKKPLEFSNTEAGFQILKAWMEELAEKHGKTAVIPGMEPTGHYWFALGKFLQDNGMRPVHVNPHHVKKSKELDDNNPNKNDRKDPKTIAALVNEGRFSYPYMPVGIYAEIRSLSNLRFQTQEELTRIKNRLARWFAIYFPEYKDVYGDLKAVSGRMVLKEAPLPEDIIRLGAEGVNQIWRDAKLRGAGMKRAKTLVSAAEHSVGSKEAPEAARMELKNLLSDMDVYASRMEELLRRIEEKLREIPYIDNLLAIKGIGMVTVSGFIAEVGDIGRFDSPKQLQKLAGYAIVANDSGKHNGESRISYRGRKRLRYVLYEAAISLVGKNAEFRQIHEYYRTRKENPLKKMQSVVAVACKVLRIFYTILTKGVQYDPGKLLGDIRRPQVQAA

SEQ ID NO: 242686 - protein, 351 aa, unidentified
MKTAPTAQPKLYIGIDIHKRSWKIHCSTDLFSGKSFTMPPKPELLREYVHKHFSGHEVATAYEAGCCGYYPHRSFEGYGWRSLVVNPADIHRKGKEKYTKTDNIDAQLISRELKDGRLAGIHVPDVEREQLRSLFRRRNDLVKDFRRVKSYIKMQLLYFGIAIPEEFDNDHWSHKFRDWVDEVTFAYPSARETLDSRMRSFRFIDQELRDVSTKMRAYCRRHYKKDYYLLRSIPGIGGIVACGVICELGDLRRFNNIKHLAGYVGLAPGIHQSGDNQRSTGITVRAHRLMRSYFIEASWQAIRTDPVMQAYYRKHLGKNVKSIIVKVARKLLSRTLAVIKTETPYAIGVIE

SEQ ID NO: 242687 - protein, 311 aa, unidentified
MEHSRFVGIDISKDHLDVHVRPTGDSFRVRDDDAGLVTLVAHLRPLAPVVLVLEATGGYEVTVAATLASAALPVAVVNPRQVRDFARATGQLAKTDTLDARVLALFAEAVRPAARPVPDAQAAALGELIARRRQLVDMLGAEHNRRRLLRDRRLQRHLEAHIAWLEEALRRLDHDLTTLIRSTPVWRETDDLLRSVPGIGPVTAGTLIADLPERGRLDRRRIAALAGLAPIARDSGAFRGRRMIMGGRAHIRRVLYMATLTAITHNPVIRAFHQRRVAAGRPGKVALTAAMRKLLTILNAMLRDRRPWHPA

SEQ ID NO: 242688 - protein, 367 aa, unidentified
MVKNSTAFVGLDLGDKRSNVFILDQEGEPIEETRMPTTEPAFRRKFASLPPCRVAMEAGTHSRWASLLLEQLGHEVLVANPRRLRLIYENSRKADEADAEHLARLARLDPQLLSPIRHRGPEAQAHLTVIRSRDSLVRARTLLINHVRGSAKSTGARLRACSADSFHHRVAPTIPMELAPALLPVLETIASLTAQIHAYNRQIEQLCQEQYAETQGLRAVGGVGPITALAYVLTLDDPDRFRKSREVAPSLGLVPKRDQSGSRDPQLRITKTGDSYLRRLLVGSAQYILGPFGPDCDLRRWGLKLAERGGKNAKKRAVVAVARKLAILLHRLWVTGEVYDPFYHSHPDQTSPTQTNLLVRQPEAVCA

SEQ ID NO: 242689 - protein, 372 aa, unidentified
MRKVIMIGCDLHEESMVLKVAEDRQTPETRLVKNTASGRAAMIADLRRLGQAAGGARVVFAYEASGQGFGLYDQLTAARIECYVLAPTKIARSARRQREKTDEKDAEDLLELLRGHILAGNRLPTVWIPDAKTRDDRELVRMRLEVGEKITALKTQVQSLLKRHQLRRLPGLGKGWTKAFRGWLRRDLADPLPGRESPLGAGGRAALGSLLRQLQFLEEEEERLDNLVAVLAWSPRYEAGMHRLTELCGVGVLTAIVFLTELGDLSRFVNRRQIAAYLGLAPSSNESGEQRDRKGHITHQGSHRVRKVLCQAAWSRVRRSEEEKAVYQRIKAKNPKKGKIAVVASMRRLAVRMWHRGCEAAAPGPLPLAATG

SEQ ID NO: 242690 - protein, 455 aa, unidentified
MPRQRRLTQKIKSLEELKIVHPHAAGLDIGSREIWACVPASSAPENVRVFGTFTVDLQALADWLVACRINTVALESTGVYWIPVFELLEARGLKVYLVNSWHLKHVPGRKSDVLDCQWIQQLHSLGLLRASFRPDAEMTALRAYLRHRAALLQHRAPHVLHMQKALQQMNVQLPLVLSDIMGETGQKILRAIVAGERDPLKLAQLRHPSCKSPEDEIAKALTGTWQSEHLFALKQSLELVDFYTHQLAECDAELERQFAAVKPRWDIPAELPLLPKTKPGSRSKNQPAYCARAELFRITGVDLVAVEGISASLAQTIISEVGTDMSRFPTEKHFCSWLGLTPHHEISGGKILRNHTLKTDNRAGQALRQAAACVIRSKSAFGAFYRRKKAQLGPMQALVATAHKIARTVYHLLKYKTTYHDMGAETYELQFREREVAHLRQKAAKLGFTLTTADA

SEQ ID NO: 242691 - protein, 310 aa, unidentified
MDPIIAGIDVSKDKLDVHLLPMAQAFAVPRTGAGIEELALRLAALEPKVVAIEATGGFETIVAAGLAGAGLPLVVVNPAQIRAYAKATKRHAKTDRIDAAVIAEFARATRPEVRPLPDAATRLLADLVARRRQIVEMMAAEGQRGRRVDHKRVAKSIARVRKTLEAELAALDQEIGNQVRGSPLWREKEDLLVSVPGVGPVVARTLLAELPELGRLDRREIAALAGLAPFTRQSGRWRGKSFIGGGRASVRTVLFLAAMTAARYNPQLKAFRDRLVQAGKPKMVALVAVARKLLTILNAIIRDNRPWQNA

SEQ ID NO: 242692 - protein, 352 aa, unidentified
MATMVTEVYGGVDTHGKTHHAAALDSVGRLLGDREFPATRTGYLQLITWLSAFGAIARVGVEGTGSYGAGLATALREQQISIVEVDRPDRRARRRQGKSDPLDAAAAARATLSGDATGTPKTRAGSVEAIRVLRVARRGAVKARTAAFNQLHGLLVSSPHELREALSALSRTALVHRCAAFRVNEGTPFDPTVATKTALRAVARRVRVLTDEIQSADRQLQKLVERTAPRTTALLGVGVEIAGQLLITAGDNPERLRSEAAFAHLCAAAPIPASSGRTDRHRLNRGGDRAANAALHMAVVTRLRYHEATRAYMSRRTAEGLSKKDIMRCLKRYLAREVYAAVLADSAAADAS

SEQ ID NO: 242693 - protein, 362 aa, unidentified
MSPMPGVLEKPTALASSRRANKPKSRNRKETKMNSICLSTDHTVAALPVLGLDVAKASVQAELRTSGNKVRFGFDNNAKGFAQLARILKEHNVPKVWAGLEATGPYSHALALWVHGQGHRVSLLNPRRVKQYARSAGNRNKTDLLDAAIIADFVCAHQPAPWQPPLLEVAQLQALVRRREELSVMLQAEKNRLEGVAPNVRSSLGRIIATLSAEKARLEKLITQQIRSHPQLSRDHQLLCTIKGIGSLTAAILLAEMARPGQVERARQAAAHAGLAPRREQSGTSVRRNRGLGKEGNRHLRKALYMPALVAIKYNAPLRYFACRLRTAGKPKMTIVCAVMRKLIHIAFGVLKHQQPFNPSLA

SEQ ID NO: 242694 - protein, 353 aa, unidentified
MKDIEPVYIGIDLHSKTSTIGYMNHQGEYLGQQRVQTTATNLINQVVAIPGHVKKLTVEQSNMAFWAADHLQHHVDELIVCDPRKNALISRGENKNDKSDTLALCTLLRLNKLAEVWRPKQLGIRRLFFHQVKEYHRLTKSMSIHKRQLQDGLRHWGIHDKATKADFEDPETLLSGIDNKGLREEFAEKLEVIGYLNQRKERQLGRLVDTGKKFWEIKEFLKIPGIGLVGAHTFSGYIQTPHRFRRASQLIKFCKLAVRKFTSDGKPVRSERLSKAGHGPLKNLSHISWKSSRSSDNEVNRYYRHVLESSGNEVHARLTTQRKILITMWALWKNNQPYDPTKFTYISCGDSTR

SEQ ID NO: 242695 - protein, 394 aa, unidentified
MSTVGIDIGAYQHVAAVCADGTSEAERKVLRIGTRRSGFNELDRWLERQNPVSLVVMESSGHYWLPLASHLRRRGVPFALVNPLEAKYFAKSRLQRSKSDPADARTLAALGMRDRPTPREVLAGAELREASRFAMKLVQQQAEICQRIRRLIDLGFPELQDEYDDPTCLSALAILDTAPTARDAARKHVATLAKARTHRGGRPVGEARAARLHAAAQTSVAPPELANQISFQMRILLDEYSMLESHIALAEKRLRDLLDSELSRRLETIPGVGPAIAATLIAEIGDITRFDDVDQLLAYAGVHPKEQSSGKKGADPETSWTMAKTGNAYLRTAAYRMAVVGLQHNPLITAHYERKRAQGKSKMNALGHCMGKALAIVWGVWRGGGQFDPSGRLH

SEQ ID NO: 242696 - protein, 343 aa, unidentified
MYFIGIDVSTKESALCILDGNGKIVRETKLPSDPEIIARFIADTGLAIERIGLESGCTAAWLFAGLQRYGWPVICIDARHAAAALQAGFRNKNDRNDARGIADLMRVNKYRPVWVKSPEAQRQGRLLTARATLQSQLVALENTIRGLLRQEGIGLTDRRTAFEAAVREVIAEDRLLHAAVHPLLETRNAVLCQRAALDRQILLIVRADPVCRLLMTAPGVGALISLAFKVAVDDPRRFSRSRNVGAHFGLTPREHSSGELRYQGRISKMGDHEVRRLLYVAASRMLRRDAALWCPLKAWAVRLAQRVGIRRARVALARKLAVVLHAMWSDGQVFQWRRTEASA

SEQ ID NO: 242697 - protein, 338 aa, unidentified
MLYVGLDIHTKHISICVLNAAGQVIHRSRVRSIAEMLQILKGLPDRFEVCYEASCGYGYFHDLLKPLAARVLVAHPGQLRLIFRSKNKNDRNDAERLAKLLYLGETPTVHVPSLEVRTWRELINCRSQVIAKRTRAKNTVRALLRSAGVVPPKQPALWTKKGLVWLRQLELPTTSQQLRRDLLVEEIETLIRQVRRIEKQLNQQAQKTPSVAQLRSIPGVGIRTAEAVAAFLDDPQRFRNAKAVGRYFGLVPSQDQSGDKNRLGHITRQGAPVVRQLLAEAAWQALRRSPTVRAYFERAQHDDPQRKKIALVATAHYLVRVMWALLKRGTVWQEKRAS

SEQ ID NO: 242698 - protein, 365 aa, unidentified
MIVIGADTHKSTHTFAAVLVATGRVVATKTVRADAEGMLGAWRWAHTLGASERVWALEDCRHVSGRLERCLVGQGERVVRVAPKMMGQTRRSERRPGKSDEIDAVAVARAAVREGVENLPAAFLDEQAFEIRLLHDHRQDLVADRTRHQNRLRWHLVELDPELEARLPARSLDREVCLDLIARRLARLEQSARVRVARDELRRIRELTRAERALERELLAAIKQLRPDLLAEQGIGPTTAAMLIGRTAGAERFPTDGHFARQAGAAPIPASSGRTTRVRLNRGGDRQLNCALHRIAITKARIDPATRAYLNRKLAEGKTNTEAYRCLKRHIARRVWHLLSQTPDNRPVPVMTIHCNTPSASMALT

SEQ ID NO: 242699 - protein, 370 aa, unidentified
MKKKVLYVGLDVHKKTTDVAIASGRSNGKVRSYGKIDSTVDALNKLIKKLEDGDKQLQFVYEAGPCGYQIYRHLDALGIACSVVAPSLIPRRSGDRIKTDRRDAVNLARLLRAGELTSIYVPTVEDEAIRDLVRCRDDIKRFERKARQRLLSFLLRHGYQYSGKRNWTKGFYNWLATVKFSHSAQQVTLQEYIEATNECSERIKRITEQIQVHVEEWSRARFVKAYQALRGVSLIVATTVVSEIGDMRRFPTPKQLMAYLGLIPSEHSSGKTVRRGPITKTGNSHVRRSLIEAAWTYKMQARVSTILLKRQQGLPKTVCDISWKAQTRLCARYRRLMARGKTKQTAITAIARELSAFIWAIDKEMQVAHE

SEQ ID NO: 242700 - protein, 360 aa, unidentified
MTRVSKKARRGKYLFCAIDLHQEKMLVGFAVDKGKAKFKEFSTTEAGFHSLVRRLNRLQAQHGCDEVWVAYEASGCGFVLADFLEEAGLRIFVLAPTHLPHTVKSRSNKTDKRDVVRIQEVLRGHVLAGNSLPTVWSPPRELRDDRELVRRRLSLKEELARAKNRVHGLLRRYGIKKPEGVKTNWTKRHRAWLASLGKVLNPGAARALGSLLRELSYYESECSLIEKDMVSLAGEDRYRSRVSKLTEIPGVGLLTAMVFLTELGDMDRFPNRKTVGSYLGLVPRTWESGEQDDRKGRISRMGPSRVRKVLNQAAWSMIRWSPYWKAWFKRRTPGGKRRKKMIVAVMRHLGIMMWRQARAA

SEQ ID NO: 242701 - protein, 430 aa, unidentified
MPKTMNNTSSSPAFAATIGLDWADKKHDLWIQAAGGGKPEHLVIQQTPESLHEWVAQLRQRFAHGRVAVAIETSRGAVISALGAYDFIVLFPINPQMLCSYREAFCVSGAKDDRTDAMLLEEYVRLHGAKLRPLEPDTELTRKLGRLVENRRGLVDERTRLVNQLHSLLKTYYPLMEVLFDDLTTPLAALFLLKWPDLAAVKKAGAATLRKFFYVHNCRSEKALKERLQAIEQAQPLTKDPALIDPAALKAQALAGMLKVLHQAIEQIEIMIEQTTDAHPDAALFRSFPSAGPAIAPRLLVAFGTNRDRFASAQEAQQFYGIAPVKRQSGQSKVIHMRHRCPKFARQTFHENASHVVRKAGWAKTCYEQQRARKKGHHAAVRSVAFKLMRIYFSCWKHRKCYDADLYEKALEKHGSPLARLLQNQAPASR

SEQ ID NO: 242702 - protein, 424 aa, unidentified
MSKKKSGLAGLQALFARVCGLDVHKKLVVACVRILNPKDGTVQSTLRKFGTMTADLLELRQWLAELKVTNVAMESTGVYWQPVFNLLEGHFRVWVVNAQHIKKVPGRKTDMKDAEWIAQLLQCGLLRPSFVPDREQRELRDLTRQQTKLVQQRNAVDNRIQKVLETANIKLGSVASDVLGVSGRKMIEALIAGEKDVTVLADLAQRQLRGKIPELQRALEGELTEHHRFLLRQLLGQYDFLEKEIASVSERLGAVAPPSFRAAVEQLDAIAGVGERGARALLAETGTDMSRFPSHKHLASWADRCPGNHESAGKRRSGKTPAANRHLDAVLTEMAHAAVRTKNSYFKAQYHRLAGRRGKKRAIGAVKHSLLVTVYFMLRDDKPYKDLGVDYFDKLNPQQRIRYHVRRLQELGQEVELSPVAAAA

SEQ ID NO: 242703 - protein, 377 aa, unidentified
MKRIKFVGLDVHAETIAVAVAEQEGEIRSLGMIPNREESVRKLVKKLGPVEQLRFCYEAGPTGYVLYWQLTKMGAACTVVAPTLVPVKAGDRVKTDRRDALKLARNYRAGELTAVWVPDAEHEALRDLVRAREAAKKDQLRARHRLSKFLLRQGQRPPVGVTSWTVKYLEWVKRDVHFAVKAQEATLLDYLHEVEHMAARIVRLDDAIEEAVKVAPAKMRAVIEGLQALRGIAKISAVTIVAELGEVTRFTRARELMGYGGIVASENSSGERQRRGGITKTGNAHLRRVVVEAAWAYRHRPAIGFTLRKRQENLSEEVKEMAWKAQHRLHARYGKLMAKGKNKGVVVTAIGRELLGFIWAIGVQVEAQQKESLRQAA

SEQ ID NO: 242704 - protein, 410 aa, unidentified
MEVLYPHSAGLDVHKQTVVACARHMVNGTVTREVRTFRTTTKDLLALSEWLAGQGCTHVAMEATGVYWKPVWHILSDGDFTLVLANAGHVKNVPGRKTDVNDATWLADLMAHGLIRGSFVPDIQTQELRGLLRTRKQFVRERSSHVQRLQKTLEDANIKLDGVISDIVGLSGRRMIEALIAGESDPEALAALAHRQIKASPAALREALRGRVTNHHRFLLQLHVQHIDALDAALNAIDREVDIHVESFREAVLLLTTIPGVSDLSAQVIRAEIGGDMSRFPTVGHLISWAGLCPRNDESAGKRRSNRMRKGAPWLKTTLIQCAWAAARKNGSYLQAQFHRLRARRGAKKAIGALAASILTAAYHMLKDGTLYHDLGPDHFDRRAKTVQTRRLLTRLQRLGYAVQITPLAA

SEQ ID NO: 242705 - protein, 346 aa, unidentified
MGMDISVLGVDLGKNVCSVVGLDASGAVVLRRRAKRETLIALAAKLPPCVVAMEACCGAHHLGRVFAGHGHDVRLMSPEYVRPYVKAQKNDDRDAEGIAEAATRPTMRFVGLKSQEQLDMQTLHRSRDRLVGERTALINQLRAILLERGIVAPQGKRKLEQFLTVLMDEQRGAGLSPRMITLVADARAQWGELDQRIAAFDTEFIRWTKENEDARRLASIPGVGPTIATALIAAIGKGETFGHGRDLAAWLGLVPRQFTTGGRPNLLGVSKRGNRYLRKLLIHGARAALPHVAERDTPLGRWAKALLERAHPNVAIVAFANKLARIAWAVLRRGEGFVVRGLPLAA

SEQ ID NO: 242706 - protein, 416 aa, unidentified
MKCFVGIDVSSEKLDSCFLDDEKNILCQTTYVNDTLGATALKKQILQLHQIYDFDKVVIGMEATSMYSYHPAMNFHQDEQLQEIQAITTIENPHRIKQYAKMFDTDKTDTIDAFMIADYLRNQHYTTSPVKEEKYMALQRLTRARYQTVCQLVEVKQHFIENLSYKCNTLKKELRDAPGSTTVFSAAIMDLFTQDLSMDDLAQLPLDDLADWLQKKGRGRFKDPQGLAKTIQKAIRTSYRLDKAVNQSVDIVLSVFVREIRGLEKAIKDFDKAIEDLVQTIPEYQCLTSIPGVGKVYAAGLLAEIGQIERFKDQAHLAKYAGLFWKKHESGSHSRENTPLTKKGNRYFRYYLVEAANSVRRYLPEYQMYYRKKYQETPKHQHKRAIVLTARKFVRLVDTLLRNHQLYTPPRSVIEK

SEQ ID NO: 242707 - protein, 483 aa, unidentified
MKYFLGGDVSKGYCDFTILDENKKVVMENFQLDDTFEGHCQLHEVIEKYFKKYSQLEMYAAVESTGGYENNWYSTLQSFQAEFDIKVARINPKGVNHNGKARLNRIVTDAISAYNIAEFMINQFNQIEFDADQQWKALRRHWNFVELQKRQRVQIINQMETLLYSAHPSLMQYRKDNFPNWLLELIILCPTNKELQKASPKKISKIPYLSEQRAEHLIKEAKESIASATDENTAELVRQMAKQIKSNDDNIKKQMSLIEKQLKIPEIELLKTFKGIDTTSAIGLMLEIGNIHRFRSSKSISCFFGLHPKFKQSGDKIIGVKMSKQGSKNMRKILFNIAKGAINYNTHIREIYLRKCEEGMKPMAAIGVCMHKILRIIYGMLKHNKPYDPQIDKQNVERSKEKEQEQKKQEIVKVEKNRRYQEFDKKAPISKRQTKKRKELDLSQCELNAQSTGSTSSNSKISLNNITFQESRAIPAFAQKSRI

SEQ ID NO: 242708 - protein, 366 aa, unidentified
MKKVSTAATKQSRNFSEQKLTIGLDLGDRSSHYCVLDEKGRILVESKVPTSPNGMKGVFGSMPRSRIALETGTHSPWVSRLLSGLGHEVIVAHARNVRLIGESRRKDDRLDAQTLARLARIDPQLLCPVKHRSARAQADLTVIRARAGLVRARTALVNTARGLAKSYGERLRGCNVRNMNAEKADALSPELQTALQPLLVGIEMLSEQIHEYNEHIEKLAEESYPQVELLKQVKGVGTLIALTFLLTLEDAHRFKKSRDVGCYLGLQPGRRNSGQSEPQMHISKEGDPYLRTLLVQGAQHILGPFGADCDLRRWGLKLAERGGRNAKKRAIIATARKLAVLLHHLWISGEDYDPLHNSQRAIAAAA

SEQ ID NO: 242709 - protein, 360 aa, unidentified
MNLYQTKTKFNCGIDLHGRNMYACLMNIEGKVLIHNNIKRNDFDYFLRIVDPYRSDLTVACESTFNWYWLADACEANDINFVLGHALYMKAIHGTKTKNDKIDSKKIAHLLRSNMLPEAYCCSPEKRAIRDLLRRRIYFVRQRAQLLGHISSSVQVYGQTPLTVKEKRKSDRKESINARFSDATIKYTMSVDADLSDYYDKIIKNVEKAILSKTKLMFSSTFNLLRTAPGIGEIIALIILYETDKISRFPTSRDFCSYSMLTPSDATSNNKKVGSQGRKIGNHYLKWAFSQATVLGKGRSIPLKKYADKLTLKYGKRKANAIYAHRLGIAIYYMLKTRTVFDIDIFLKGKINIKHLREVS

SEQ ID NO: 242710 - protein, 343 aa, unidentified
MKLSRVGIDLAKNVYQLHGVDRSGKTILKRRLKRHQWFKVLLEKTEPGCVIGMEACASAHHWGRELQSRGYTVKLIPPQFVKPYVKSNKNDARDAEAICEAMSRPNMRFVTVKTVAQQDIQATHRIREELKVRRTAKGNQIRGLVAEYGLVAPKYMSSLRAAIPCWLEDAENGLTHYFRSLLHGLWDDLLALDDRMCEMDKTIDRLAKENEDCVRLQQIRGVGPKISTAMIATVGDARQYHKSRQMAAAIGITPRQHSSGDKHRLLGISKRGDVYLRTLMIHGARSVVANAKHQDDPLSRWVTGIANRSHPNVAAVALANKNARMAWAMLRNKTDYDPDYAIR

SEQ ID NO: 242711 - protein, 345 aa, unidentified
MKLTTIGVDLAKNVFQIHGVDERGKALVRKTLKRDQVLPFFTNLGPCLIGLEACGSAHHWARKLSALGHTVKPMAAQFVKPYVKTNKNDRADAEAICEAVARPNMRFVPIKTAEQQAILSVHRVRSGFVRARTAQANQIRGLLGEFGIIIPQGIAHIAKRMPRILEDGDNDLSGGMRRLLERLSAHLRELDKQVAELEAEIQAWHRANAASRRLADIPGIGPITASALTASIGDGKAFKSGRQLAAWLGLVPRQHSSGGQSTLRGISKRGDVYLRTLLIHGARAVLRHLEHNADPADGWLRRLVQRRNKNVAAVALANKNARIVWALLAHDRRFRSDYPTAVAGA

SEQ ID NO: 242712 - protein, 411 aa, unidentified
MRLFAGDDWAEDHHDIEVMDAAGKVLAKRRLPEGAAGMSQLHELIGRFLPEDADEVEVVIGIGTDRGPWVAALVAAGYTVFPVNPLQASRYRERHGVSGAKSDQGDSHMLADMVRTDSHQLRPAAGDSPEAAGVKVVARTHKTLIWDRTRQVQRLRHQLREYFPAAIEAFEDLDAPDVLELLGKAPDPARAARLTRAQISAALKRARRRNIADKTDAILAALRGEHLTQPAALTVAYAATVRSLVAVITTLNEQAKLLEEQVKEHFGRHPDAEIYQSQPGIGAILGARVLGEFGDDPRRYVSAKSRKNHGGTSPITRASGKKKVVAARFIRNDRLIDALMSWAFASLNASPGARAFYDQQRAKGLEHNDALRRLANRLVGILHGCLKTRTLYDEATAWGHRENLPQSSVAA

SEQ ID NO: 242713 - protein, 342 aa, unidentified
MNEVSIIGLDLAKNVFQAHGARADGSVAFRTKLTRAKLLDFFSSMSKCTVAMEACASAHHWAREIGRLGHEVRLIAPIYVKPFVKRQKNDMADAEAIAEAAMRPTMRFVAVKSVEKQASAMIFKTRDLLVRQRTQTINALRGHMAEYGIVAANGPVHIQRLAETLDDPDSGLSADVIALCQMLFAHIALLNERIGSLEKELRGRSRRDDTAKRLMTIPGIGVICATAIEALAPPIESFQKGRDFSAWLGLTPKQNSSGGKTRLGSTSKMGQRDLRRLLISGAMTVVRWADRKGAPEGSWLARMLTRKPRMVVAVALANRIARIAWALIQKGGIYRVPGAVAA

SEQ ID NO: 242714 - protein, 365 aa, unidentified
MNKETLSKDIISTASVVNYVKRVLSLGLDAHYRQVTVAMQEDGGRIKAAGKMGYVDFLNWVGKKLAEGWEIHSCYEAGASGYWLHRELVKLGVKNLVVVAKAMGQGAKKQKTDKRDAGELCDCLDRYLRGQDKALSVVAVPTEDQEEKRALIRYHRQIMADRGRCEARGKGLLCAQGIQVHGRWWQGKAWLEVQSDPRLKDWMKEQLIGWRNKILSTDEEQGALRERIAALAPAILPKGVGAYSAAVLHYEMRGFERFSNRRQVGSMTGLCPGIHQSDGRGKEGSINRCGIGIVRWTLVEMVWRLVIWQPQYPPVRRLASGLVKGKRARKRLVVQAARRLAIDLWRLSTGQTTPEKLGLIMHCAK

SEQ ID NO: 242715 - protein, 402 aa, unidentified
MVSIGIDVSKGKSMVCMLKSYGEVVASPYEVVHTEQSIRELIDRIGSLEGEVRVVIEATGAYHLPILETLKNGGIFVSVINPLAMKKYASSSIRKGKTDKMDSVRIANYGIDNWFKLKDHVFSEDIRAELRILGRQYAHYITVKVSLLLALTNLLDRTMPGIKRLISGSRSDASEKDKLCDFVEEYKHFDRITGMGKKRFVTSYVRWAKKKGYHRSEAKAETIFALASEGIPTLPSGAQSTTIITLESVRVLRAVCKTIKTILSQMQALAQTLPEYEIVRAMNGVGDTLAPRLIAEIGDVRRFRCGSCLVAYAGIDSPPFQSGSFTGTRRKISKRGSSLLRKTGYEVMKCLKTSRPVKDNAVYLFMLKKEAEGKVKKAAKIAALNKFLRIYYARVMEVYAEA

SEQ ID NO: 242716 - protein, 349 aa, unidentified
MKFYTKQHQFYCGVDLHADAMYVCILDATGEIVVHQNIPTKPKSFLRLIKPYRDGIVVGCECMFTWYWLADLCADEGIDFVLGHALYMRAIHGGKANNYKIDSHKIAVLLRGGSFPLAYVYPKKMRATRDLLRRRNHLARKKAELFAHIQNTATQYNLPEPLGRIAKPSERGEVAKKFRDPIVRAMVEVDLATIDHYEELLGTLERHLEKIAVGHDPVNLALLKSIQGVGKILGMVMLYEIEDIGRFPREQDFASYCRLVKPAKQSNGKHYGHSGKKIGNAHLRWAFGEAVVLMLKGNKPAQQVLQKLASKHGKGKALAILAHRLGRAVYYMLKNQVPFDQKRFLRLDT

SEQ ID NO: 242717 - protein, 444 aa, unidentified
MVTLVRSVMERTFHVQEVIPVKKSRAYRATRVKDVRWEKVLAGRERQAVHVGLDVSKEDVLVATRWGANDFERPWRADNPLEIARLVESLGQLGRDRAMVVALEPTGTYGDPLRQALADAGVAVHRVSPKASHDYAEVFDGVPSQHDGKDAAIVAELAALGKSSPWPFRRDPWDQELAYWVDWMEVERRSLVIWCGRLEGLLARHWPEATRLLPLNGGVLLRSLAKYGCPAALAADAAAAERLRRWGRGHVSAEKADAIVAAARCSVGVRAGEMEVRRLRQFAEQALAARRELTRSQRELKRLAADHAVIQGQGAAVGVVTACVLWAHLGDPRQYDSGPAYRKAMGLNLGERSSGKWQGRLMLTKRGPSAVRRWLYFAALRLVKQAGVKEWYEAKRAKRPDDGSEVMRALVGVMRRLALALYQVGACGARFDAAQLFPGTRSLA

SEQ ID NO: 242718 - protein, 339 aa, unidentified
MKYTPVGVDIAKHLIQVHFINEHTGEVVDKQLRSRDFLTFFSNREPCLIGMEACGGSQHWARELTKLGHKVRLLQARFVKAFVMGNKNDVMDARAIWMAVQQPGKEIAVKTEEQQSVLVLHRTRRQLVKFRTAQINSLHGTLLEFGESIHKGRAAMEWEFPEALERMKERLPPYLITVLEDQYNRLSELDSLIDDIEKQLTSVARQNETCKRLLDIPGIGPLIATAAVATMGEASAFKSGREFAAYVGLVPKQTGSGGKIRLLGISKRGDTYLRTLFIHGARAAALLTREPSPWITELKKRRPASVAIVAMANKLARTVWAIAAYGRKYDKNHVSIRPY

SEQ ID NO: 242719 - protein, 331 aa, unidentified
MDEVKRFVGVDVAKMALDVFIGSSGTAFTVTNDEVGIRELLRQLTSGDFVILEATGGLEVPVASALATAGIAVAIVNPRQVRDFARATGRLAKTDRLDAEMLARFGEMVRPAARPLANEQAQALEALVTRRRQLVEMLTAEKNRRTNAPKVLHRSIDEHIRWLEKRLAGFDDELAELIRETPLWRERDELLRSVLGVVKVLSSTLLAQLPELGMLNRKQIAALAGLAPFNRDSGKLRGSRCIWGGRAQVRRVLYMATVAGVRSNPTIKAFYLRLRANGKHAKLALTACMRKFLVILNAMLHKKTHWQTPALTSPSSSLSPLLGAVSEHGCC

SEQ ID NO: 242720 - protein, 355 aa, unidentified
MNQEKYIGMDVHAATISAAVKNAEGKLLMECVLETKAATILEFIQGLRGTLALTFEEGTLAAWLHDLLKPHVSRLVVCDPRKNALMRDGNQNDRVDARNLAELLRTNQVKAVYHGKHGTRALKELGRSYLTLTQDSTRVMNRIKSVYRSWAIPCAGTSVYSRRHRAEWLAKLVEPGVRMRAEHLYQQLDSLEPVRQAARGELLRESRKHAAVKLLRQIPSIGPIRSALLVALLQTPHRFRTKRQLWAYCGFAVQTYDSGEYRFVRGKLQRNRERITVRGLNHNHNHDLKNLLKGAAISAIERPGPLQDFYAALVEKGMRPSMARLTLARKMAAITLTMWKKGASFAPQQLQRQAA

SEQ ID NO: 242721 - protein, 408 aa, unidentified
MQKRENLLYVGIDLHKESHTAVMVNCWNEKLEVVVIENKPSEFKKLAEKVNRKSNHLGLEPIYGLENAYGYGRSLAVWLIEKGYIVKDINPALAYDQRKSAPMLRKNDEHDAYCVATVLINQLHTLPDAKPKDNEWTLSQLVNRRDLLVKDGIRFKNGLHEQISMAYPSYSKFFSEIDGKCAMYFWKTYPSPVHLQGKTSEDLTIEFKTISRIAKKDKAEMILDCVQNDGNTFREYQESRDFITTSLVRDLEHQKEELAGLDQEIEKILLSFDYKLTSMPGIGTSVASKLIAEIGDIRRFPSADKLARFAGVAPVKFSSAGKGKEQSSRQGNRQLHGLFYFLAVTMVSKPKNGVPNHPVFYDYYMRKISEGKTKSQALVCIMRRLVNIVYGMMINKTEYREPIRGEDQ

SEQ ID NO: 242722 - protein, 359 aa, unidentified
MSSIALGRGDVVVGVDTHKGEHVAVALDGLGGLLGELAIAANPNGYAQLLAWADQLGVVAVFGVEGTGSYGSGLARFLRRHGHKVIEVSRPPRKGERRLSGKSDAIDAEHAAREVLAGRAKATPKLADGIVEAIRLVKIARDSAVGAHSQAMITLKATLVTAPDDLRGQLEPLTDFKLIGACAGLDTTGDIADPVVAMRHTLASLARRWLELHEEIKTHSHHLKKLTHTAAPDLVAAFGIGPDTAAEMLVTAGDNTDRISSDAALAKLCGACPIPTGSGKTGGRHRLNRGGNRQANAALYRVIVVRMRWHPPTIAYVERRTAEGLSKKETIRCLKRYLAREVYRLLPEPSSSNELASAA

SEQ ID NO: 242723 - protein, 292 aa, unidentified
MQVVAGVDCHQDTHSIVFLNSVGQLQQQLTIETTDEGYRQALEAAAGFEEVQWGLESTGCYGSAFAKHLVEEGAIVFEVPGSFTKRHRKRASQSGKSDPLDARAIAEAVLRESDRLPRFEWSAEREAIRLRYDQRDRVIRERTKHLNRLRNAALRLDLKSLPADLNRPGAVEHIRDAAQALRGQDAAVDALVDEILFTVEDILLATQRAKSIEALLRPLLRRIAPELLAIHGVSTVIAAGLVGHAGNLRNVRDAAAFAMRCGAAPLSWSSGRNSAVRINTGGNRQRGRFKFR

SEQ ID NO: 242724 - protein, 412 aa, unidentified
MQVIYDHCAGLDVHKGSVVACVMITGSDGKVQSASRTFGTVTADVLALSDWLREQKVSHVAMESTGVYWKPVHNLLEGIFELLVVNAQHVKALPGRKTDVKDAEWICDLLRHGLLRGSFIPARAQRQLRELTRHRANLVQRRAQAVNELQKCLESTNIKLASVATDITGVSATEMLSALLAGQSDTSVLAELARGRMKAKKPLLEKALQGKVESHHRLILSQLLADISWLEEQLEEVNAEIANRLKDQQELLDRLDEIPGVNRRVAEVIAAEVGPDVRAFPTAAHLTSWAGLCPGNNQSAGKRRTTHIRPGNRHLKSALVEAANAASHKRDCYLRAKYRRLAGRKGKKRALVAVARTILQSTFYMISRAEKYQDLGENYYDLRNPEQVARRLSKRIEKLGFNVIFEPLAKAA

SEQ ID NO: 242725 - protein, 347 aa, unidentified
MFPFYLGIDLHLKRSCLVLMNAEGEVIDKQRLKNTDIPDYISENVPQETYAVMEATRNWPFFYDLLEKHVDRVELAHAKGVRMIAEAAVKTDRVDASALAHLARLNYLPTAYAAPQEIRDLRQHLRCREWLIDERWRAKNRIHAVLAGYNLASPVTDLFGRAGQEWLVEVAEKEVRPTSKKVVLETLNMIDQLDDQIKELKNDIPLPEELKPKAELLMSMPGIGKLISAVILAEIGDISRFHSPKALCSWAGLTPRAHQSDRTVRHGRISKQGSRYLRSAMVCAAMTASRVSPRRYGVYEHLARKIGRRGARVAVGRRLLTVVYYMLKRNQPYDEEYEQRRTAEQGA

SEQ ID NO: 242726 - protein, 349 aa, unidentified
MITIGIDPHKRTHTAVAVSGVGQLLSEITIDADEVGQAKLFAWARQLEGTEEVRLALEDCRHVNGRLERFLLTTGMRVLRVPPKLMAGARQSARTRGKSDAIDALAIARAALREEGKLHLASHDAAARELKLLVDHREGLVRERTALASRLRWHLHDLEPGLEPTGRSLGRTATRRGLSQRLARRQQSAQVRICRDLLARIGDLTRRERRLAAEIGELAKDYAPELLEVPGVARLTAGKLIGEIAGAERFKTDAALAHFAGCAPIPASSGNTQRWRFDRHGNRQLNAAFYRIALTQARVHPGARAYLAKKRAEGKSSAEALRCLKRLLVRVIWTTLRASGEQGVALSQT

SEQ ID NO: 242727 - protein, 342 aa, unidentified
MYYIGLDVHKKTISYCVKDASGQVHQEGKVGATRWELDDWMNTLPQPWTVAMEATIFTGWIYDHLLPHAQQVKVAHPLMLRAIAAAKKKNDRIDAGKIADCLRCDFLPECHMASTAIRDRRRTLRYRHLLVRQMVQMKNRISGLLMETGVSHNKKRLHKVGYFRELLTANEEVQESIRPLLRVSRDTIVRLQKTEYALVSSLQRDPLLAERIKRLRTVPGVGPITALTWALEMGDVSRFPSIREAISYCGLCGDEKSSADKVMRTPLSKQRNKHIQRVLVEAAKLAPRQDHNLALVYEREKQKGNANRATLAVARKMVAYLLAVDRGQRDFVPFADSQSAAA

SEQ ID NO: 242728 - protein, 338 aa, unidentified
MLYSGIDLHKRTVVIATVDETGKVVCEASLPTSRFAVARYFAELPDSTRATVEATSSWYWLRDLLHQEGVPLTLAHAKFVKAIAYAKVKTDAVDALTLAQLHRVDLIPRAHMVSPELRPLRDLLRTRLQLVEKRVSAKNSVHRLLEKFNVPDPASLPDEAALSASLYEEQIELLDSQIRRIEQQLQPRLIPEPDIQRMLWIPGIGKITAFTLYLEIDGIDRFPSVRQFFSYCRVVPGAHNSGGKNRHGRRKDGNRYLKLALSHAAVRAIQYYPEIKRFYQRKARQKNPAIARTLVQKELARSVYIVLAEGVEFNHTFKGQPLERRKQSKWPRRASPGV

SEQ ID NO: 242729 - protein, 393 aa, unidentified
MFYYLGIDVGKFSHSLCLLTEAGKKTIFQINNNREGFEKLRIKLSELNCDKNILVGMEATGHYFLNLYDWLLQCGFDSEQIALLNPLQVKSFRNTNLRGAKSDNVDSERIAVLLKFGEFKRCNVATDEMMNLRELTRLRADLVANIGDLKRKIISVMDRVFPEFMTVFSNRFGKTVMSLLNSYTPEEMAELSLEKLTDVIKNLSGRGRGISQKKIQALHEASRNSIGITFGRQAFKIELDILLTRLKVFKEQVEKLENEIQLIAEKFDSKIFTIPGIGATTGAAILSEIGNIQNFSLAVKLIAFAGLDPKLKESGKYQGRTPISKRGSKYLRNAIWYSAMVACRVDDKFKKFYQDRRNKGKSHRYSVTAAANKLTKVIYHVLKNKCEYDSKLV

SEQ ID NO: 242730 - protein, 314 aa, unidentified
MRNCIGIDVAKQSFDLHCLKTGQDRRMDNSTDGIRQCVAFCNETRPELIAMEATGGYELALAGTLQAEGFAVAVVNPRRIRDFARAAGQIAKTDKLDARIIAQFAATLEPMPTEQINENTQKLKALVARRNQLVGLHTAESNRLEHADVRDIRRSIAAVLKVIETQLETIDRQIEEHIQNTPQLQQRSETIDSAPGIGPTTAHMLVTELPELGRLNRRQIAALVGVAPFNRDSGTFRGKRMTGGGRKDIRSRLFMPTLVAVRHNPVLKAYYTRLVGQGKCKMVALAATMRKLICILNTMIKNNQKWNPNLIKIA

SEQ ID NO: 242731 - protein, 332 aa, unidentified
MVAGTHGSLNKAGSTKMTQISTTAGIDTSKAKLDVAVHGRAEHWQVDNSPVGWRRLAAALTGAEVRRVGIEASGGYERGVVSYLRDRGFVVLMLQPLQVKAYARLHLRRAKNDRLDAVLIAACAAVIDQPRIEPDPRLAELAQHLTFVEQIEEDIARFKVRIEHVDDPRHRRMVVADIARLKARRLVELKRIVTALRVHDDLARRLDLVLSVPGLGERTAIALIVRMPELGRVSREQAAALAGLAPYDDDSGKHNGERHIAGGRRRLRRSLFAAALPAAFHWNKALIELYSRLTKRGKAHNEALIACARKLLIYANTVVQRGTPWTERPLSA

SEQ ID NO: 242732 - protein, 378 aa, unidentified
MKKIMRYVGMDVHADSIAIAVVEDNGTERDVGTIANRPEAIRKCLKKLGRADELHCCYEAGPTGYVLYWQLVRMGIECTVVAPTLIPTKAGDRVKTDRRDARKLARYLRSGDLTAVWVPDEAHEALRDLVRARQAAKIDEKRARHRLQKFLLRHGQRPAPGVKAWSVAYRAWLQALKFDQPTLGVVCSEYLQELLHHEQRVERLDTAIDQAIDEAPETIRAVIAALQALRGVRRVTAAGVVAEIGQFSRFAHPRQLMGYSGAVPREFSTGGPGNHRRGAITKAGNAHLRRLLGEAAWCYRFRPAVRYPLKKRQQGLPAAVTDISWKAQVRLCNRYRRMVTRGKTKQKVVIAVARELLAFMWAIGVEVETHQAPARTAA

SEQ ID NO: 242733 - protein, 297 aa, unidentified
MDAPVVGIDVARDRLDIHVHPSGANFAVDRTTEGVEQLCERLRPLKPKLVVLEATGGLEAMVARALTTWRLPAVIVNPAQVRAFAHALGQRAKTDRIDATVIAPFAAATNPPVRARADAKTQALADRVRAAASEPSSIVHSRQRPARHRGIGAGAGCNRPLDRCRGRPVAEWRRKETLLTSVPGVGPTIARTLIAELPELGSLNGKQVAALVGLAPWTRQSGRWRGRSFIADGRAPVRTALFMGALVASRHNAALKTFRDRLIAAGKPKLVALIATARKLITILNAILRDGTPWQPA

SEQ ID NO: 242734 - protein, 343 aa, unidentified
MQITTIGLDLAKNVFQVHGVDATGQAVVRKSLRRSQMLPFFAKLPPCLVGIEACGTSHHWARELTKLGHEVRLMPPAYVKPYVKRGKTDAADAEAVCEAVTRPTMRFVPVKSPEQQAALSMHRARDLLVKQRTQLINMIRGLLAEFGVDIPKGLERALLMARQIVDGKAPAVPIEAAKIVATLSQQALDTHVRLREIDRDLLVSLRGNDVARRLMTIPGIGPVGATALAASVTDPHQFRSGRQFAAWLGLTPLQKSSGGKERLGRITKMGDKYLRKLLVVGMTALVRRARQNPESDPRLADLLARKPTRVATVAMANKTARVIWAIMTRGETYRAGHRPALAA

SEQ ID NO: 242735 - protein, 343 aa, unidentified
MQIRSVGIDLGKTTFHLVALGDNGKVLLKKKFTQKQLIAFTANLRTCLIGMEACSGSHFLGRALREQGHDVKLIPAQFVKPFVKSNKNDFIDAEAIAEAVDRENMRFVPIKTDDQLDLQALHRVRDRLMARRTSLINQIRAFLLERGIVFAKSPIRLREALPEVLENVNENLTPRMRNLVAMLWSEWKDLELQIVEMNDEVERIASSDAACRRLRQIPGIGPLVATAIVASIGNGAAFRKGREFAAWMGLLPKQHSTGGKARLYGISKRGNSYLRKILIHGARAVVLRSKRDRIAMGPWMTSLETRAPRNVLIVATAHKLARIAWAVLSTGQDYRAVPEALTV

SEQ ID NO: 242736 - protein, 436 aa, unidentified
MRLKDYGRKPKLRKEFVNNPKLLIVGVDIGRSSHSACFGTNSTVSSKKFDFKNSRNGFKKFEFNIRKMRNTAKCNQILVGMEPSGLYWYGLYERLKKCGFSVCLANCMAVKNNRKTMHDGSSKTDPKDAYSIYDLLTQGKFFLPVERDPELAAAYRLMRKHMFLKKRISRLRNQIRGALHLSFPELNDVIKDLTLPTSLRFLQSNPTPESMMRNGKKRFMKKWQPRRRCGQWRPDKFNLIYEQAKLSIGLKDPQRIDEFEIKTMAKDLEDAVTKAQMWLDKAIELVCQRGDFELLMSMPRIGKPTATALLTAIGNIDEFEYGKQLVKLAGLDIRLYESGTSIKKRPRVTHIGSGYLRHWLYHYAMRLVAFEPDFQCLFERRKKNSPGKGAGQRALVAICDKILRIIYRMLKDQVKYSPEKDKIVAAYYRQQSKLAA

SEQ ID NO: 242737 - protein, 356 aa, unidentified
MSHDVKYIGMDVHKEAMVIAVLNGSGKLVMETILETKASSILQFLHGLRGELHVTWEEGTWAAWLYDLLKPHVHEILVCNPRRNALLKEGSKSDKVDARKLAELLRTGMLRPVYHGENGLRTLRELARSYQTINKDLTRVMNRLKALYRGWGIPCAGTQVYAPRYREEWLNKIVQAGVRRRAELLYQQLDGLQALRRNLRPEFLGESRKHKAAKLLRQIPCIGPIRAARLIALMQTPHRFRSKRQLWTYSGLGIETHDSAQFRFVSGQLQRSRKPQQIRGLNRNHNHEMKEIFKSAATRASCGMGPFHDFYAGLLAKGMKPELARLTLARKIAAITLTLWKKEERFDAEQLKTQAA

SEQ ID NO: 242738 - protein, 340 aa, unidentified
MKHIGMDVHNTTTDVCVRNGRGVVIRRCRIPTSKTELQKLVLGIAGPKRVALEESQSADWVTRVLLLGVDEVIRCQPQYNKLISSSEDKCDRRDAESLSELLYLDRLKRVHHPAVTYRSLREAVRAYWIASRELTRAKNRVKGWYLFNGVHKSGDRVYSARNRNGQLKELEGEGRNTELARLLYERMDHCRQLKAKHIGVMREAARPVQEPVRLLRTMPSVGPITAYTMVGFLEEGQRIPNKRKLWRYAGLSLRQHESNDKGVQGASKSGNRLLKHVVMSAAITVVSRGERNALLKLWERDIRQNVNPKRARRNLARRIVVIAQHLLRSREEYNDERIKI

SEQ ID NO: 242739 - protein, 356 aa, unidentified
MGETARADIIIGVDTHKDVHAAVAVDALGTRLGTVTVPVGETGYRTLEAWARSLGAVRAFGVEGTGSYGAGLSRFLRGQGHAVLEVNRPDRRLRHEKGKSDPLDAESAARAVLSGQAAALPKSGTGVVEMIRHLKVARDTAVKGRTQAMLTLKAIIVSAPAALREQLDRITGKMTLIRRLAALRPGPITSTAASAKASLRAIARRWLALDEEIRSHDAHLEVLTAARAPELVQAHGMGAGTAAAMLLLVGDNPERIRPEAAFAKLCGACPIPASSGKTVRHRLNRGGSRQANAALHRVVVTRMRGHRPTLDHVRRRTSEGKAKPEIIRCLKRFVAREIFGYLCATPKPENTRPGAA

SEQ ID NO: 242740 - protein, 337 aa, unidentified
MRKLIAGMDRLIDMDGKRVAHQKVECRLSEVVRFLAPYKKRLEQVAVESTYNWYWLVDGLQALRYPVVLANPAGMEQYSGIKHADDTNDAFFLAELLRLKILPTGYIYDPQLRPVRDLLRRRLTLVHQRTALMLSFKSLYTRTTGQEMTLSRLKELAIKEAQDLYDHPANQLIAGMQIKHIEQLTESIEKVEKVVLDCARELPFYSKLTTLPGVGKILGMTITMEVGEINRFAEPGRFASYCRTVEAKRTSNSKKKGENNSKCGNKYLAWAFVEGANFAGRYDPQCRRWYDRKVAKTSKVIATKALACKLAKAAWHVMAEGTDYDSQRMFGPAASTK

SEQ ID NO: 242741 - protein, 346 aa, unidentified
MTIVETRAITGGVDTHADVHVAAALDPVGGLLGVREFPASPAGYAGLLGWLGGFGTIALAGIEGTGSYGAGLARHIAAAGVRVVEVDRADRQDRRRQGKSDPLDAVSAARAAQSGRARGAPKGRDGAVEAIRALMVAKRSAAGERTRTINQARALILTGPDDLRARFAQQAPAALVAGIASLRPRPGDVAGHATRVAQREPGRRAAFLDGQLERLDELIVPLVSARAPGLLALYGIGPNTAALLLIAAGDHPGRLRSEAAWAHLCAAAPIPASPGKVTRHRLNPGADRQANHALWRIVFTRMGSDAATRAYVERRAKEGKSKAEIIRCLKRYVARQVYPYLRPGAG

SEQ ID NO: 242742 - protein, 323 aa, unidentified
MISPTPCFGFDVSSTELCLTQADPFTLNTAVKSIPNTAPQILRWLKTVPAGCRIGMEATGTFHRLLADLAHQAGHTVFVINPAHVATYLRSLRARGKSDVLDTRGIARYVLNEGASLHPYTPPTALQDTLALLIHRRHQFVKQRQSLRMSMAGLSLCKPQFDALIQSFDALLVEFDARITQTIAQDAELQAQRQRLCTICGIGPLVSASLTARLSRIPYANSDAFVAAYGMDPRPRDSGQYVGRRVLSKHGNPEDRRLIYLAAVSACNNPEWLAMRDKLVARGLSKIAAYCVIARKLLRIAFAVWTSKSSFDPQRLRGACAAP

SEQ ID NO: 242743 - protein, 459 aa, unidentified
MKVKVGIDIACRAAHRAACADETGKIIWTGHRFRTAADELEELWARLPAEVSEVTVVMEPTRNAWVPLAAWFRRRGATVVMVPTEQSSDLRAYYAKHAKTDRLDAELLARLPLLHPEGLHPEEGDGPGDPLKRAVKIRSGLVHRRTTSMQRLDALLEIMGPAWVEAIGSDMCHTAFKFLATWANPHQVRRLGRARLARWFQRETRKAWGERRANAVVSAAEATLELWGADGLDWDALAADISVEAGLALELSRQIARLDERIFDLYSEADPDHIVLSAPGVGKILAGQIRGRLGDPKRFTSLAAARSFSGLVPRQNSSGLTVSAGGPTKQGDACLREALFSAAEHARKVDPTLAARYQRLMCDTGRHHSSAVCTIAAVLLTRIVACLRNGTPYELRDVDGRVITPAEGRAIVAERYQIPDEVRIARRAVSKARSQARRDERTQRGVAERSKVAPVPIPA

SEQ ID NO: 242744 - protein, 400 aa, unidentified
MRVVFGIDVSKASSEVAILVNGEKVHNYTMSNDAIGFSRLLGDLKTVHKPEIIFEATGVYSRRLQAFLDEHGYAYTRLNPLEAKKQLDSLRVRKTNQIDAEKLAQSQFVLNRKPTYVQEEVYQNLRDLSRFYQNLTEDIVRAKNRLHKVLQVTFPELENILSTPTGEQYWNLVITFPCKDFVLDLSKNELSKSIRQSTSKRISDKRVAYLAEKLTALANQSYCAVKKTSPILEEVHYYAKELLRLSEQRQAVLDQMVELAQPLPEYDILLSIPGIAETTATSIIGELGDIRRFQSANQINAFIGIDLRHYESGNFLAKEHITKRGNPYARKILFKCIHNIASASHTNPCHIADFYEKRKRQSQTTSTKPHTIASIHRLIRTMYYLIMHNKLYDYASTQNR

SEQ ID NO: 242745 - protein, 340 aa, unidentified
MRKILNKEHFIGIDISKDVLDLSLIHRASYGTFKDKKIKNSFDGFEQMYNWLIKQGISLEECVFCMEHTGTYGLLLFAWLSQIDLDYCVEPGLKIKRSLGLTRGKNDKVDARRLADYAYTNREKLEIFEFPSTLIIQIKQFLTYREQLVKIKTSLKNSLKSHKTYQKVSGISTISNEIQDQIEDQEKRIKEVEMQITKLIDADPGMKKNFELATSVKGIGLVIATFMLVTTNNFTGFENGRKYACYSGIAPFEYSSGTSIKGRTKVSQLGNRKIKSLLSNGANSACKYDPEIRAYYKRKEAEGKDHKLIINAISCKLVNRVFATVKRQTPYVIFKHQNFV

SEQ ID NO: 242746 - protein, 447 aa, unidentified
MDGDGKHVHVDSADEEIVARVAAIDVAKDSGMVCTRVPHPSLPGRRTSTVWSVSARTRSIIELAERLAAEGVERVVLEATSDYWRPFYYLLEARGLLVWLVNARDVKNVPGRPKTDKLDAVWLAKLNERGMLRASFVPPLEIRQLRDYTRLRVDLIGERTRHIQRLEKLLEDALIKLSSVASEIMGVSGRAMIAALIDGERDPQVLAELAKGRLRVKRAALVEALTGRFDEHHAELADMLLDQIDGLSAQIERLDSRIEQLIDSIPAAQAPPAPSSGDTGTAPAYLAAIDRLNEVTGIGRHAAQTIIAEVGLSMAIFPTSGHLVSWAKLSPRAIQSGAKTRSGKTGKGNRYLKAVLGEAAAVAARTNTFLGGRYRRLARRIGKLKALVAVARSILVIVWHLLTDPTSRYRDLGADFFDNRVRPDRRKNNHIHQLEALGYKVTLEPAA

SEQ ID NO: 242747 - protein, 314 aa, unidentified
MIVGIDISKDWFDIAWQDADQLKNQRFPYTEEGMAQLLDQLPAEAVYVMEATGTYHARLAVKLFEAGRKVSVVNALIIKRYAQMKLRRVKSDPADAALIMQFAQHESPTLWAPASEEVQELQQAHGWLNDLITERTRLFNRQQAHAHRAKPSVFVIKQMNLQRQLQQRIEACEQHLETLVKKSFAELRERLLTIPSIGDKTALELIIVTNGFTRFEDVKALCAYIGVSPTTFRSGSSVRGKGGIAKMGQGRVRQLLYLCTWTARTCNLACKKLYQRLRAAGKPPKVIGIAIAHKLLRQAFAIATKNATFSPEFA

SEQ ID NO: 242748 - protein, 431 aa, unidentified
MTNRLQVGIDFSQKRADVCLLFPDGQPLERHQAFGNSCSGYSLAKQLLLDALDSYQFDGVDISGEATGYYWLPFFLQLAADPDLEPYNLNLFLLNPRWVHWYKKCFAQDDKSDQKDPYYIADRTRTHPPDVVWSPQLDTLPLRFYTRFRFHLVQTLAREKCYFSAFLFLRASAYRRLEPFSDIFGATSRLVLTQLPSLDELAELPVQALTDYLHELSGHHLPDPADNARKLQHVARESFPLHPALTLPVQRILELTLDHIRFLEGQIQQVEAWIAAELVSHPAIRQLATIPGVGPVFSSGIGAEIGDTQRFLQGSKWDKRRKRKRPRNLRDAEDAVAKLAGLWWPRSDSGGFEAEDRRMAKSGNRYLRYYFIQASDRMRHNIPDYADFYARKFRQASKHHHKRALVLTARKSVGLVVGLLHRNEPYRSKED

SEQ ID NO: 242749 - protein, 403 aa, unidentified
MNNVAGIDVSKGKSMVSVLRPFGEVVAKPFSVGHTGSELKELADYLKSLDGETRVVMEHTGRYYEPVARFLHDEGVFVSAVNPKLIKDYGNNTLRKVKTDKADSRKIARYGIDNWAELRQHTPMDTIRMQLKTLNRQQSLYTKTKTMMKNNLIALLDQTYPGVNALFDSPVREDGSQKWVDFATTFWHVDCVRNMSLTAFAERYRKWCKRHGYNFSQSKAVEVHAGAQDLIAMLPRDALTKTMVRQAIDALNAISASLERLKAEMQALAAQLPEYPVVMTMHGVGDSLGPQLMAELGDVTRFTHRNAITAFAGVDPGADQSGTHEAKSTRVSKSGAPELRRALFLVMDCLLKTQPQDDPVYRFMDKKRAEGKPYLVYMTAGANKFLRIYYGRVKEYLAQLENS

SEQ ID NO: 242750 - protein, 422 aa, unidentified
MSEIEQHESVEVFVGVDVGKGTHHAVALDRKGKRLLDSALPNDESKLRALIGRLKEHGQILLVVDQPATVGALPVAVARAEGAWVAYLPGLAMRRIADLHAGEAKTDARDAYIIAEAARSMPHTLRSMKLADNEVAELTMLCGFDEDLAGQINATSNRIRGLLTQIHPALERVVGPHLDHPAMLDLLERYPSPAQLGSLTQKQLTNRLVKLAPRMGKTWAADILQALSEQTVVVLGTQAASIVLPRLARQLTALRAQREEVAKEVERLVLAHPLHPVLTSMPGVGVRTAARLLIDVVSRAFASAGHLAAYAGLAPVTRRSGSSIRGELPSRRGNKQLKRAMFLSAFAALRDPISRAYYTRKISQGKRHNQALIALARRRCDVLFAMLRDGTFYSPPQPRKLIDNHIGAPPISPDASIHTRAL

SEQ ID NO: 242751 - protein, 418 aa, unidentified
MARKIRMTDEIEEIIYERCCGMDIHKDDIKACLNIGGKKEVRTYNTMTDALMEMAQWLKDNKVEMVAMESTASYWKPVFNILECMDVPAMLVNPQHVKSLSGAKTDVRDARWISGLLRHGMLKASFVPSRDQRELRELVKYRNSLTEESTRTLNRIEKILQGANIKLSSVISTTGTKTELLIIDALANGENNVEVLSKMAQGTLRDKEEEIKRSLNGLIGDHQRFMLKSMHNHLNSINWELDVIEAEIDKRMEKDAEIIERLDEIPGVGKTTAQAILAEIGTDMEQFPDEDHLAAWAGVSPGQNESAGKRKSGKTRKGNSNLKKTLVQCANSASRTKDSFLSARHKRIAARRGRKRANVALARTILIICYFVIKDGVLFQDLGGDYFDKRNKTGILRRSIKRIEALGYEVTVRDKKAS

SEQ ID NO: 242752 - protein, 303 aa, unidentified
MKHYIGCDAHKKYSQFAIIDETGRFGLGKRVEHEREGYRAFLRTLPPCSPIAIETTGNWYWMVDEIEKAGHVPTLVNAGKAKAMMGGINKTDKLDAQGLAVLSLNGTLPAVWIPPGELRDQRELARMRLVLVHMRTSLKNRIHATFAKYAITFEEVSDLFGVQGRRLVEKRLEGLPPETRHSVEEQLKLLDQLRSQIDQAEERIRLIVKMTPPMQLLTSLPGIGPILAVLIVFEIGDVTRFADGAHLASYAGAVPRVKSSGGKTYYGKTRPDVNHYLKWAFTEAANAIVLNQQRMSLPPDFPE

SEQ ID NO: 242753 - protein, 382 aa, unidentified
MPAYADPTPTPISADTIFLAFELSGTSWLVALHAPDADKVERHRLPAGIAAEVLGLIARTKARVTRRLGTTPRVACCYEAGRDGFWLHRVLEAEGIASHVMDPTSLQVDRRARRAKTDRLDAQALLRALMAWSRGERQVCSMVRPPSPEHEDERRLSRERGTLLKERLRLSNRIKGLCAAQGIYDYEPLGADRRERLARLVTGDGRALPGRLAAEIGRQLDCFELVLRHLAEVEAVRDARAAQAREEGGSKLATLLRLKGIGPELATVLELEVFHRHFANRRDVAAYAGLAPSPYASGGTSREQGISKAGNRRARKALIELAWLWLRHQPESALARWYRDRVGTATGRVKRIAIVALARKLLVAIWRYVETGLVPAEATVRT

SEQ ID NO: 242754 - protein, 337 aa, unidentified
MKLYSAADLHSNNHFLSIIDEQDKRILEKRLPNDLAVTPKTLEPYRAELVGVAVESTFNWYWLVDGLAEAGYSVKLVNTSKVRQYEGLKYADDRHDAFWLAQQMRLGILPTGYIYPKEQRAVRDLLRERRRLVRQRTSHVLTTQSTIWRHTAIRVPSKVILGEKEAPWPELPDRNVKLGVQAHRATIKVLTKQIETIEATLLKQVKTIPEYKILLTVPGIGPVIAWTIVLEAGDLSRFANVGHFASYCRCVDSKRISNEKKKGENNRKNGNPYLAWAFFEAAHFAIQYLPAAKGFYERKAAQRNPILAMKALSHKLARACYYVMRDQVPFDPARLFG

SEQ ID NO: 242755 - protein, 346 aa, unidentified
MNITTIGIDLAKSVFQLHGIDSYGKVLIKKQIKRAQMAEYFVNLKPCVIGMEACGSAHHWARKLEGFGHTVKLMPPQYVKPYVKTNKNDAADAEAICEAVTRPNMHFVPIKSTEQQAILSLHRIRQGYVKARTAQANQIRGLLAEFGLEIPQGIGYIAKRVPDILEDASNELPGILRIEIQSLLEHLNELDTRADNCEKKIVAWHKQSETSKKLEAIPGIGPLTATALVASIGEAKNFKNGRQVAAWLGLVPRQHSSGGKQNLLGISKRGDIYLRTLLIHGARSVIYRSGQKENPTDRQSWLNQLTQRRNKNVAAVALANKNARIVWALLNHDRDYQDNHKMLVAA

SEQ ID NO: 242756 - protein, 334 aa, unidentified
MQNITLIGIDLGKHSFHIHCQDKSGKALLRKKFTRTKLMQFLATCPPSVVVMEACAGAHFMARRISDFGHETKLISPQFVRPFVKSNKNDFVDAEAICEAASRPSMRFVQPRTEPLQAMRALHRVRESLIRDKVKTTNQIHGFLLEFGISLPTGDAVIKRLSLVLAEHEIPEYLSRLLVRLHTHYLYLVEQIAELESELSQSINADDTAQRIMTIPGVGPITASLLSSQPGDGKQFSCSRDFAASTGLVPRQYSTGEKSTLLGISKRGDKNLRRLLVQCARSFMMRLERQHGKLAEWVREQLNKKHSNVVACALANKLARIAWVITTQQKEYQA

SEQ ID NO: 242757 - protein, 373 aa, unidentified
MFHFTTLFIGMDVHKESFSLCYYDMMTNQFKHSTKVGPNVSYIVNYVNELRRLYGQDAEVLCGYEAGCLGFTLYHQLQAHGLPCIVMAPTTVMKEGSKRVKTDKKDAAQLAKALAFRSYRPVHIPTAEDEQVKEYIRMRTDHKVALKKIKQQVLAFCLRHDFRYTEGSSNWTQKHVRWLHSLNLDGLYAEILTEYLLTYEKLVDQIERYDARIEQLGQSDSYQEKVSQLFCFIGIKTLTALSIVTEIGDFNRFATAQHFASYLGLTPSENSSGDKERRGAITKDGNSHVRRLLIEAAQSLAKGTIGYKSKELKRRQSGNRVEVIAYADKANERLRRRYRTLVLGKNKKQNVAKTAIARELSGFIWGMMTGRIA

SEQ ID NO: 242758 - protein, 437 aa, unidentified
MTKKIQYQAVDVQSLELQELIHEWEPGARLVVGVDVAKQKFLAALSDSKGENRRIVRFEHPRQTLAFVELLDGLSKAGRAVEVVMEPTGTYGDALRFQLELRRIPVFRVNNKHVHDAAELFDRSASKHDAKDACVIAWLHTHQRSARWEALSQERRRIRALVAQRELFDVPARRLVAQMEPLLARHFPELEKFFDLSRRKTPYRLLEKFGSAAAIAAAGTENVRAFLQKASCRVPDQDMVRDLMLAARTTSGVELVDDELQLVQMMASEILRLFKMREQVDARLTQVGSEISAVKAMRPCLGAVTAAVVFAYLGSPNDYGSAAALEKAAGLNLIERSSGVNAGTKHLSKRGAAPVRKYLFMAAMRLIQSDPIVKAWYRARTSFRSDAKMKAVIAVQRKLCRALFHVAAGNDFDASKLFDTRRLKVEAVSPHFGGRMN

SEQ ID NO: 242759 - protein, 368 aa, unidentified
MKKNTSKKQVVNKGKKETKEGLAFYIGIDLGDKNSDVCVLDPHGEVGGEFRLRMKEEAFREYFGSIPRSRVAVEAGGQSRWVAEVIEKCGHEVYVSNTRKVPYIHQSDAKDDPGDAYKLAELVHFKPRLLHPIQHRSREAQADLSWIRAREVLVESRTQLINAVRGLSKAFAGRLKKCATESFTAKLAGQVPEAIRGAVAPLLETIDHLNEQIRYYDQMEEQIARERYPKYRLLEQVNGVGVHTALSFMLTIGDPERFAKSREVGSFLGMRPKKQDSGETKPQLGITKAGDVYLRKTLVNCAHHILGPHGKDSDLRRFGLRLCERGGKNAKKRAVIAVARKLSVLLHCLWISGEVYEPLRNSKQAVAA

SEQ ID NO: 242760 - protein, 429 aa, unidentified
MKIVYPICCGADIHKNVIVATIVSTDKAGISTYQKKSFKTINSDIQKFHDWLIQNECRHVCMESTGKYWIPVFNYLEQDIDVCITHPKYVKAIKGKKTDAKDSKWIADLYKFDMVRSSFIPPPVFRQLREISRYRYKLVCMKTGEKNRLQNCMTVSNIGIASILSDPFGKTATEIISYLLSHTAESVDDDACRKLIRKGAKAKSNEILEAIHGYHIESDQALKFNLAGDHLDYLNQMITKTEVEIYVRIKPYWNYVQFLSGLPGITNLSASLILSEIGVDMGVFDDAEHLCSWCGLSPANNESAGKKKSVRIARSGQYLKPLMVQCALCACASKKNPYFAIKYRRLKKRRGHKKAVIAIARMMMVCIYHMILDQKPFYPSDYEELMDPHFHPQKVVLNDENVFAYLKAEGFDISLLSKCNDNDVVPVTS

SEQ ID NO: 242761 - protein, 489 aa, unidentified
MKAKSKENNKAVRKVKKAIQPATQPQWHQMNRKQRRELTRTIKSEEISLEVVHPDAAGIDIGNEVHYVSVPPSRDNQSVRHFACTTAELKAMAAWLRQCGIRTVAMQSTGVYWIAVFDILEEAGFEVFLVNARDTKNLPGRKSDVQESQWLMKLHTYGLLRNSFRPGQEIRRLRTYWRQRNDLVRSASRYILRMQKALTQMNVQLANVLTDISGMTGQAIIKAILAGERDPRELAAHRDCRVKATAEEIAAHLEGNWQEDLLFVLKQEQDGYEFSQKQMIECDRQIEQYLAKMEDRSQGTDLPVETRKTRLRKAKKGNAPQFELRQELFRMTGTDLTQIDGVDVMTATTILSEVGWDMSKWRTENHFVSWLRLCPDNKISGAKIIGKGRMPTNNRATNALKMAASSLRLSNTYLGAQFRRLRTKLGAPVAIKAMAAKLARLVYRMLRFGLEFIDRGAEFYEAQMHDMQIRHLKWKAAKLGFQLSEIPAA

SEQ ID NO: 242762 - protein, 410 aa, unidentified
MARVAALDIGKATLTACLRVPHEDKPGRRRQEVRTFATVTRSLLELRDWLICQGVSLCVMEATSTYWKPPFYLLEDAIECWVVNARDVKNVPGRPKTDRLDAVWLAKLAERGMLRPSFVPPPWQRELRDLCRYRRTLVQERTREKQRAEKLLEDTQIKLSSVISDIFGKSGRDMLDALIAGQRDPHVLAELARGSMRGKKSVLQEALTGHFRDHHGYLLAMMCDRIDALTAQIEELTGRIDEAIAPFAHQVAQLDEIPGVGKTGAQELIAEIGTDMARFPTAAHLVSWAKFAPRAKQSAGKSKPAATGKGSPWIAGTLGEAGIGAARTKTFLGSRYHRLARRRGKQRALVAVGNSILTITYYLLSDPAARFTDLGPDWHDRLSPLRRKRQLIAELERLAGKKVLLQEAAA

SEQ ID NO: 242763 - protein, 375 aa, unidentified
MGDCSEAFVAFDTAKLRNAVAIADGDRGGEVRFLGEIENSEAATAKLVRKLAQQYQRLTFCYEAGPTGYGLHRQIESLGYECLVAAPSLIPKRPGDRVKTNRRDAVNLAKLLRAGELTAVWVPDGNHEAMRDLTRARETAMLDLRAKRQQITSLLLRQGRHYQEGRKPWTKIHKAWLMRQKFDHPERRLVFEEMMLAMRQAEERLARLEQAIRVAVPEWSLAEVCTGLMAFRGIDLISSAGILAEMGDLSRFPTPSELMAGLGMVPSEKSTGETIKRGPITKAGNRRARRLLVECAWAYRHPPRVGVTKLAKVAAAPRAVREIAWKAQHRLYGRYRALIRRGKLKNVATTAVARELAGFIWAASREITIAGAVAK

SEQ ID NO: 242764 - protein, 366 aa, unidentified
MGMLAEQADHVIGVDTHRDSHAAAAVAARTGAVDATTTIPADAFGYKRLLRFGRKHAPGRRVWAIESSGSFGSGLTSFLLAQGEWVVEVDRPKRPARRNGAKSDELDAVRAAHESLQREHLAQPRARGEREAIRVLLITRRGAIRARTKAINHLKALVVTAREELRHQLRNTPTDELVYRCSRLRTLPSHSTEHRATVLALRHTARRILTLEAEANDLETEIENLVKQTVPQLLDELGIGPISAAQLYCSWSHRGRLRSDAAFAMLGGAAPIPASSGQTIRYRLNRAGDRDLNCALHTIVLTRLQHDPATRAYAARRTAEGKTPREIKRCLKRYVARNLFRLLEATGPHPVTAPRPPRSRVIGHCS

SEQ ID NO: 242765 - protein, 354 aa, unidentified
MKGTAVTIVEDKPVITGGVDTHADLHVAAALDPIGGLLGVRQFPATAAGYADLLEWLGGFGDVGLVGVEGTGSYGAGLARRLAAAGVAVVEVDRADRQDRARQGKSDPLDAVSAARAAQSGRASGVPKGRDGAVEAIRALMVAKRSARHERTQAINQARALIVTGPDGLRTRFAGHGPASLAEAIAALRPRPGDVPGYATRVALRELGRRVQFLDAQLERLDELIGPLVTARAPGLLSLFGVGPDTAALLLVAAGDHPGRLRSESSWAHLCGAAPIPASSGKTSRHRLNRGGNREANHALWRIVITRMGSRPGHPATRAYVERRTREGLSKKEIIRCLKRYVAREVYQQLRDGT

SEQ ID NO: 242766 - protein, 408 aa, unidentified
MTQYYLGVDWADEFHQVWVSDPDGKKVIEKKVVENVEGLAEFGRWLDERRAQQIELWASIEKPHGRIVDFLLDHGVVVYPVNPKALDRARDRFRMSQSKSDGFDAYVLAQFLRTDHGHLRALKPNSDPAQELKLLTRDQQRLVRQKTRLLNQLTTTLKEYYPQPLEVFSDLESNIALDFLKQYPTPHDLSKLTRRQWNRFAKREHHLGEERCKELWEKLNQPQLEVPEHVVRAKARLLEVVVVQLKTLRDAVESYNERVRSFFACMPAAELVKALPGAKTGTIVATLWAELGDAKDRWESFRHLQAEAGVVPVTKASGKSRVVQFRFSCNKVMRHAAYWLAFVSLNRTEWANHYYRDQRAKGHSHHQALRALGAKWLKIIFVMWRDHKPYDENFHLANIARQQMRQAA

SEQ ID NO: 242767 - protein, 319 aa, unidentified
MMAQNNLVVVGIDVAKDKVDACIRPSSARQTFPNSSIGQRQLAAWLRRHKVGKAVMEASGGYERHWAKVLRQLGVEVRIVDPKRVRSFARSAGRLAKNDKIDAAMIAWFAETFDQAPSQAYDAAREELVQMVNARQGLLDLQTTLQNRDEHSEVSAVQKMHARLLKRVAGEVLRLEAAIALIKMTKRFAELAEIIASVPGLGDITWAGLIAVMPELGQVTNKVAAALLGVAPYDDDSGKRRGERQIKGGRRRMRNLFYMACLGAATRHNPVLKAFYRRLIANGKPPKVALVACMRKLIVILNIMIARRQKWDASLYLAS

SEQ ID NO: 242768 - protein, 337 aa, unidentified
MLHYGLDVHRKYTSICVMDDGGLILAEGKAITQELTSHPAFSLKGEKRAVLEAGGNWHYLYELLEPAVNEVLLAHPLRVRAIAAARVKTDAIDARTLAHLLRADLIPAAYIPPPAVRESRELFRFRYDLVKQRSALKNRVHALLAQEGLNSPFTDLFGRHGREWMAQLALADSKRTRLESFLRVLDGFTAEIQAADRTILERVKMDEKAKLLMTIPGVGFRTALVILAEVGEVSRFPDANHLVSYAGLAPRVRSSGGRTKLGNITKQGSSALRWALVEATHLAVRKPGYLQEMHRRLRRGKSAAVAIMACARQLLVAIYFMLLRGEAFQPTATRTMS

SEQ ID NO: 242769 - protein, 339 aa, unidentified
MATYAGIDLHSSNNYIGVINSKDKRLYGRRHDNNIDQVVGALSQFKKTLKGVVVESTYNWYWLVDGLQEAGFNVHLANPAAVQSYNGLKYTDDKWDAFWLAHILRLGLLPQGYIYPKEERSIRDMLRRRSMFVRQRTTHILSLQSMITRHRGLNYPGSSIKAFRDKFIDRLFDDKYLALLAKSQMATIRHLGQVIKDIESVVTAEISLRKEYHVLLTTPGIGRILGLTIMLEVGDINRFKKAGNYSSYCRCVESKKMSNGKKKGENNKKNGNRYLAWAYVEAAYHATRSNDQAQRFFQRKMSKSNRTLATKALANKLTKATYYIMRDQTPFDSERLFRR

SEQ ID NO: 242770 - protein, 413 aa, unidentified
MRLFVGDDWAEDHHDVEVMDAGGRRLAKARLPEGVAGIARLHAMIGGQLGEDADEDDPGQVVVGIETGRGPWVQALIAAGYTVYAINPLQASRYRERHGVSGAKSDAGDAHVLADMVRTDSHQLRPVAGDSAQAAAIKVVTRTHKTLIWERTRHTQRLRHALRDYFPAALEAFEDLDAADTLELLGRAPDPAAAARLTTAQISAALKRARRRDIAGKAERIQAVLRAAHLDQPAIVAAAYAASVRALIAVLATLNEQVKTLQRQVEAHFGQHPDAEIITSQPGLGPILGARVLAESGDAPARYASAKARKNYAGTSPITRASGKKKTVVARYVHNDRLIDALMTQAFAALQASPGARAYYDHQRARGSEHNAALRQLANRLTGILHGCLKTRTRYDEATAWPQHAAKPEKAAA

SEQ ID NO: 242771 - protein, 410 aa, unidentified
MDILYTRCAGLDIHRDTIVACVRLTEAGSVVRFVETFATTTTELERLSEWLAGHGVTCVAMEATGVYWKPVWAVLAGDFELVLANAHHVKAVPGRKTDVNDASWLADLLAHGLIRSSFVPAMPEQVLRDLTRARKQLTREKASHVQRIDKTLQAANIKLGSVLSNIMGQSGRALLEALAAGESDPEQLAGLVRTRIRASHAQVVEAVRGRLATHQCLLLRLYLAQIDTLDAAMAAIDHELGERLEPVQETVQRLTTMPGLSPLSAAVVISEIGLEMSRFPSAGHLISWAGLCPKNDESAGKRRSTRLRPGAPWLKAVLVQSAWCAVRVKASYLHALFQRLKARRGPRKAIVAVAAAMLTAIYHMLKRGAAYHDLGPDHFQRTERSRLAARLAQKLGELGFDVTLTQRAAA

SEQ ID NO: 242772 - protein, 360 aa, unidentified
MENKYAVGIDPHKELIVAGLFDLSNRLTPIKYYDLRQDKEDFQKFYTDIISYSTTTPFCMEDIDGVGKQLRKFLQSKNATIFHVPSNYTYQYKRNNPNPEKTDSLDCKYIVQAWLIESEIKQLRLNFDEEKYTELKDIAYERWEAGQAVGHLKRKLNERLYKRLGVNYKKFFTNTIYTKAMIQEAYDMFSEKKDANERIIISLLKDLVRAQEKCTELDPVLKMLSKNKTVQDEIKRLREIKGCGPLIACSLLGEIKSGYKLESGKSLKKWAGISPIEYSTGGKVIHHANTRGHRHLNCLIHQIMNTQINNTKIPSNHLSKVYYLKRRKSGDGELKAKQKVKNAICDEIFRKLHGIGNTLL

SEQ ID NO: 242773 - protein, 358 aa, unidentified
MQIIGIDVSKDTLHVALAESKDARNDKVIASHKFANNETGFKLFMDWMKKRKADAGTVCLMEATGVYHERLADWLHSHGVTVVIELPNKIKHYAKCLNVKTKNDKVDAGVIARYGLHNAWTPWHPMTENLYQMRALLRQVQSMTKERTRCKNQLHALMHSAHTPGTVVENLTDIIANYDRLIGSYHDEVVRLAKEDEAFYARVEMVCTIKGVREITVLTVLCETDGFQLCQSARQAVSYAGLDVSEYQSGTILKDKRISKKGNARIRHALYLPAVVAGTTGGPMSLMNLYKRVKQKHPTAKKVAIIAVERKLLMLIYTLWKKQEPFDPEKDGKPPLHNAYKSTQAVGSQDSEGSIPCK

SEQ ID NO: 242774 - protein, 390 aa, unidentified
MTYYVGIDIAKYKHDCFIADDSGSVIRDSFSFKNDKEGFNVLLSILKKLESKGQIKIGFESTGHYHFNLKLFLEANGFDYVELNPLLVHKFITTQTLRRTKTDKKDSKSIAKYLMTIDYKPYVNSFYHINNLKSLCRLRENMIKERTRSINQITSYLDQIFPEFKPLFTNGLNKSAIYLLTHYMTPKKMSKFDKSKYSEMKSELKNPISYQKICQIKEAASNSIGNTSKELEFALKISLNLFIYLNKQIEQLESKIKESYFSMDYRIHTIKGVGILTAAGIASELGNISKFSNPNQILAFSGLEPSKYDSGECISNGKMVKHGSSSLRCYLMNAAETFCIYNPSISDFYWNKRNEGKHHRVALSHVARKLVNTIFALEKHKVDFDPELLK

SEQ ID NO: 242775 - protein, 355 aa, unidentified
MTAAPGQPLPVVGLDLGDRNSHYCMLSNRGEWMEEGRIPTTVAALQKHFGGEPRMRIALETGTHSPWISRLLTSYGHEVIVANPRKIPTLTGSESKNDRNDAEQLARMAAFDPKLLHPIEHRSLERQQDLNLIHTRSVLVRARTMLVNSARGLVKSAGGRLPSCSSEAFPEKVSVAVPRELKAACEPLLKQIAQMNRTLAGIDQRVEGLAKKYPEIALLRTAPGIGPIVAACYVLTLGNPETMETNRQAGAYLGLRPRQQQSGGCDPQCGITKTGNSYLRSLLVQSAQYILGRFGPDSELRCWGLKLAACGGKRGKKRAIVAVARKLAVLLLSMWRNGKKFQPFPQSATQLAKAV

SEQ ID NO: 242776 - protein, 371 aa, unidentified
MNSIVYVGMDVHKEQYTICCYSYETDKVEYKQTIPSDYKLVLKYMEQVRSRYDGEVTFVCGYEAGCLGYSLYHQLKEHAVDCKILAPSTMAVTNTHHVKTDKRDAANIARCLAFHTYSEVYVPDNDDNDVKEYIRMRDDQKLYLKKVKQQILAFVLRQGKRFEGGKTYWTIAHLKWLKNLELSDLQREALDEYLLTYEYLTEKINRFDERIEELASAERYEEKVKHMSCLLGIKTHTALSMIVEVGDFERFEKAPKFASFLGLVPSEDSSDTRVNRYSITKAGNSHLRRLLVEAAQSYTRGNVGHKSVALRQRQQGNPPEVIAYADKANERLRRRFYKMTLNKGVNRNVATTAIARELACFIWGMMTEHVS

SEQ ID NO: 242777 - protein, 343 aa, unidentified
MDQHIGLDVSLKDTAISVRESGKQIWRGKCPSDPKLLAEIIRKRAPHARRVVFETGPLATWFYHALTTEGVPAICIEARHAQKVLNETLNKTDANDADGLAQLAEAGFYKAVRVKSFEAMMIRALVAARNQLLTLSTQLGNQIRGVMKTFGLIVPKGTGRVFDANVRELLDKQTSLAEIILPLLDAWRDIRKRAAILDRQLIATARQSAATKLLMTTPGIGAITAVSYVAAIEDPDNFRTSRSVGAWLGLTTRRYQSGEVDYDGHISRRGDSRLRGLLYEAATAMLTRTSARNESRLKDWGLKLRDRLGFKRATVAVARKLSVIMHAMLKTGEVFNPSAGASA

SEQ ID NO: 242778 - protein, 348 aa, unidentified
MRFYTKQHKFYCGIDLHARTMYLCILDQEGKILLHRDIKTDPDVFLKTIAPFREDIVVAVECIFTWYWLADLCDREAIPFVLGHALYMKAIHGGKAKNDKIDAYKIAALLRGGMMPMAYVYPSDMRSTRDLLRRRTHLARKRAELIAHIQNTNHQYNFPDMGRISRKCDRNKAGVSEHFTDPSVQKSIDLDVALIEHYDKLLNSLEQELSNIAKVHDADSYFRLRSIHGIGRILGLTILYEIHDINRFPSVQDFVSYCRLVKSAKESAGKIVGSSGKKIGNAHLKWAFSEAAVLFLRGNPEAIKYRAKLERKHGKAKSLTILAHKLARAVYNILKKKEVFQPKVFFAK

SEQ ID NO: 242779 - protein, 341 aa, unidentified
MKNKSFIGIDISKNVIDVSIFCEETPIKDFSHDVFNNSRKGFGEMCTWLKKNHVVLSNSLFGMEFTGSYSMELEKFLNTRNYQFCMLSTHVVKHYPMGPKDKSDKIDSAKIADFLYRYNGTECVKPYNMPDKTMQRLKALMNERKFLVEQRTCFMNRRQLCITKEDAQLYDGYIKKFSRDIENIELEEQKLLATDDSLLSTYKNLLTIPGIGFVNAINVIVITRNFTAFETARQYASYVGVAPHFRTSGTSVKWRPRPSARCDGQAKADLSMAATVVVQYDAELQSFYNRKLGGKQDSDTKRKALNAVKFKLVLRMFAIGKQNREWEPLDSKSSNEKLAIS

SEQ ID NO: 242780 - protein, 326 aa, unidentified
MEHELHYIGIDTAKEKLDVDVLRPDGRHRTKKFANTTKGHDELVSWLKGHKIDHAHICIEATGTYMEPVAECLYDAGYIVSVINPALGKAFAQSEGLRNKTDTVDARMLAEFCRQKRPAAWEAPHPLERALRALVVRHQALTDMHTQELNRTETAREVQRPSIDAHLLWLEAELKRLEKQIKDLTDDDPDMKHRRKLLESIPGIGEKTSAVLLAYIGLKDRFARARQFAAFAGLTPRRYESGSSVRGTSRLSKAGHVSLRRALYMPAMVATSKTEWGRVFRDRLAANGKKGKVILGAMMRKLAQVAYGVLKSGVPFDAARHNPVAA

SEQ ID NO: 242781 - protein, 355 aa, unidentified
MIVGIDVHKNYCEATSIDENGKPTGRWRFKNQNEAIEEFLPNLPPGTRVAMESCSYFYPLYNKLEREGFQVCVAHPLKVKLIAESRNKNDRVDANILAQLLRMNYLPTSYIPPEQTRQTRDLLRYRAALARQRTQVTNRIHHLLEKQGIKTSQLSHSDLHSKKAQENLAQLQLPPIERTVLDMELNLVQALNGAIEKANIEIAKQAKENSQVKLLMTIPGINYYSAMLLLAEIGDINRFPDAKKLCAYAGLVPSVSQSGTRTIYGHITKQGNRWIRFVLVEAAQRTTTIQQNSPLSAMYQRIKARKGSAIAKVACARKLLKIIWYMLTRNEPYRYMDQEMFAGKQKRLMRTASKA

SEQ ID NO: 242782 - protein, 355 aa, unidentified
MNSEKYIGLDVHQATISVAVMDCRGKVVMESILETKAATILEFLAGLRGTLSVTFEEGTWAAWLHDLLKPHVQKLVVCNPRKTALLKEGNKNDRIDARKLAELLRLDNLKPVYHGQTGVRMLRELARSYLTLVKDLTRVMNRLKAMYRSWAIPCAGRDVYYTRHRAEWLSKIREAGVRRRAEHLYQQLDMLQHLRQQARRELLAESRKHAITAKLRQIPSFGPIRAALAVALIQTPHRFRTKRQLWAYSGLALETRTSGEYCYVRGQLRRSKKQVSIRGLNKDHNHDLKGLFKAAATRASVQPGPFQDFYQRSLAKGIKPTMVRLTLARKIAAIALTLWKKGENFDAEKLKSQAA

SEQ ID NO: 242783 - protein, 357 aa, unidentified
MKILALDLAKNKSVSLMNDTETGEVEYETIRSTPADVERLLQQRRPDRVVLEIGASAGWVHDLAVSMVIAVQVANPNGEAWRWTNVKAKSDRKDVDKMMCLSLSNQLPLVHMPSPQVRQRRALIAYLRNIIDRRTAIKNQIHAILDRQGLSCASGKKTWNQENLKRLAALSKPLGDSEELELWRGQLALELTALDQIEEQVLTVERKLNAIGKKDPNTQLLRTIPGVGARLSEALVAVIDDPHRFRSGKQVSSYVGMVPRLYESGQVSRNGHITRAGNAMLRGLLVEVSWLALRWNPYLAEMYKRIRGSSKSRSKVAIVAVARHLLVIAWAMLRKNQPWREPKVPAMADSCAPRQTP

SEQ ID NO: 242784 - protein, 385 aa, unidentified
MKSKTKNTSQQFQAYLGVDLGDKKHFVCATDKDGTILKEFSITNDRPALRQLCQDYPGGSVALEVGTHSPWISRFLTAEGMTVTVANARKLRAIYQNDRKCDELDARMLAKLLRVDRDLLSPIEHGSEQAQKDLVAIKIRDSLVRQRVHIIATVRGVIKSLGLRIPATCTTSFHLKAESFLTEHPEYESAITPALRSIKSLTEQIRVYEKDIQQAAKDHHPQAVRLQQIPSIGPITSMAFVLSIGDPKRFKDPRDVGAYLGLVPRRDQSGGTDKQLPISKAGNRYLRCLLVQCAQYLLGHFGPECALREQGLLLAARGGKAAKKKAVIAIARKLAVMMMAMWQKGTDYKPFPEGKKSEPDAAANKPAPASGKPVRASKASSKRAA

SEQ ID NO: 242785 - protein, 363 aa, unidentified
MDIMVGIDLHSNNAVCGLMEVTGRRLGHQKLPCELAVILQHLKPYQPRISTIAIESTFNWYCLVDGLQDQGYHVVLANPAAMQPYSGMKHTDDVSDAYFLADLLRLKLLPTGHLCDRKIRPVRDLLRRRLLLVQLRTTLILSFESLNERTLGQRVALARVKAMKPAEAQARFSAPADQLLSGEQLTLMGHLSASITKMERHILAVAGKGAAYRRLQELPGIAKILGLTIALETGDARRFADAGHFASYCRCVKSVRQSNGKKKGENNRKCGNKYLGWAFVEAAHLACRHDERCRRFYDRKKQQTNPVIATKALACKLAKAAWHVMVEDVPYDAARAFGPGRHSDLGETGREPAAGSGPASQED

SEQ ID NO: 242786 - protein, 344 aa, unidentified
MEQIIRIGIDTSKSVFQLHGVNAAEQPILRKKLSRREMVKFFEKAPTTIIALEACGGSHHWARLLRSFGHEVKLIAPQLAKPYVKRGKNDAADAEALCEAMSRPTMRFVPVKTADQQAALMLVGMRERLIRNRTQLANAIRGFAMEFGIVATTGMCRIEPLLERIAADQSLPELARALFAMHGVEYRDLLAETKAIEEKLTALHRSDECSIRLAEIPGVGPLGASLLMMKTPDPRMFKSGRDFAAWIGLTPRDHSTAGKLRLGVITRAGDEMLRSILVVGATAILQYVRAGKSRHTSRWLLDLLQRKKPKLVAVALANKIARIAWKLMVSGERYRREEGQTQAT

SEQ ID NO: 242787 - protein, 347 aa, unidentified
MSITMIGLDTAKSVFQVHGVDETGKMEIRRKLRRSELILFFEKQEVCTVVMEACGAAHHWARVLSSLGHEVKLIAPEAVRPFVKKGKKNDPADAAALCEAASRPDMKFVPVKTIEQQGILALHSARSLLVKQQTMLANAMRGLATEFGLTVPQGIGRLAELFLLVDADKAFPEKARQVFTALFEHCPALAASISAFEAEIVAHARHDETARRLATIPGVGPITASLIAATVADIGLFKSARHFAAWLGLVPRQYSTGGKTRLGRITKTGNRDIRRLLVLGATSMVYRAPQWNSAAGMWTRGVLERRPVRLVTVALANKMARIAWALMTRKEVYRAKGRVAAATEAAA

SEQ ID NO: 242788 - protein, 349 aa, unidentified
MEMVGGLDLHRQQITFDIVDHGSGEVWRGRVWQPDRARVRRWLANDVARRAAGRPVRLAVEGCTGWRFVTEEITAAGFEALVAEPAQTQAARGPKRRAKTDRSDARLLRELLEQDRLPLSWIPPAFVLEWRERIRLYKSLLDQRTAWTQRVHAELYQHGVAVPEDRIASTNTQAWLANGVELSDAGRLRVRTGYQMIEATNLALLPLRAELVSFAKAQPACRALADTHYGVGALTSVAVWTELGDCARFGRSDQAVRHAGIDITVDQSDGKGPGGRLSRQGAPTLRWALFEAGKCGCRATSPDRDYYTEVKARHGGKRAALSVARKILRRCYHTLRSLDPAVVYAEPGV

SEQ ID NO: 242789 - protein, 408 aa, unidentified
MNAVGIDVSKGKSMVAALRPMGEVALLPQEFLHTEVGLEQMAYAIIALGENTRVIMEATGRYHEPIAAALHEYGIYVCVLNPLFIKQSGGGSIRKVKTDKADAMKIAKYGLDNWVDLREYTPMDTVRQQLKLCSRQYNLYMKTVVSLQNNLISLTDKTFPGVNELFSSPERADGHQKWVDFVMTFYHCDCICRVSEKAFTERYQKWCKRKGYHFSAEKALDVYAGSCGHITTLPKNDNTKLLIATAAQQLLSGKMTLAALRAEMTRLAKQLPEYDTVRAMYGVGETTAAQLMAEIGDVRRFPRRSSIVGFAGVDPAVDQSGKHSAKSVPTTKRGSPHLRKTLYQIICTYLRKAPADEPVYQFLDKKRAEGKPYFVYMTAAQNKFLRIYYARVKECLEAFDAQQDTSQR

SEQ ID NO: 242790 - protein, 389 aa, unidentified
MKIYVGIDIAKLNHFAAAISSDGEIIIEPFKFTNDADGFQLLVSKLESFDKNSLIIGLESTAHYGDNLVRYLVTELYQVCVLNPIKTCQMRKNNVRKTKTDKVDTYVIAKTLMMQDNLRFVSFFDLDMMDLKALGRFRQKTIKQRTRLKIQLTTYVDQVFPEIQYFFKSGLHQHAVYALLKEAPSPKEIASMHMTHLANLLKVNSHGHFTKEQAKELRVLAQKSVGANDSAISIQITQTIQQIELLDSQLEKIEAEMTDIMKFNDSVIMTIPGIGYINGGMILGEIGDIHRFSNPNKLLAFAGLDPSVYQSGNFQAKTTRMSKRGSRVLRYALVNAAWNVVRNNATFKAYYDAKRVEGRSHYNALGHCSGKLVRVIWKMLTDNVEFNLK

SEQ ID NO: 242791 - protein, 411 aa, unidentified
MGLLHEALPASTLVIAIDPGKVSNRVWLSTGEAGEVIPPLSLPVLRPGLEQLHRLVVDHTGARSPVFAIEATGGLHQVWMRELNHRFPGSVRLFAPSETTAARAQLGSRRFKTDDRDCAALTYLARQGQGRPVPDQGHDALAAAVRHRRGLIGEHKVTQQRLHDQLHALCPGLAAPEGHGRALQIDSVIGQAVLDCAATFAGRPPSLRSLRARAHGRIRDREAQFWIGRWRACLPPPADAAARAARLARSLARWRALSADIAAVDGEIAVLLAGSDGQVLTTLPGVGTSRAAAFAAFSLPIDRFPDAEHLYSATGLAPGSYRSSTINRRTPISRQGLPEHRDALMNLAWGLSQHCGPFIDRHHELRARGLRPIPARIALARHACRLAYTLIKTQQPFDEQRYRRARHQSER

SEQ ID NO: 242792 - protein, 344 aa, unidentified
MSTATIGLDIAKNVFQIYGVDQHGKAVLQRKLRRGEVLRFFAKLPPCLVGLEACHSSHFWGRELLRVGHNVRLIPTQYVKPFLVGGKNDANDAAAICAAVGRADLRFVQVKTAEQQSLQSLHRMRERLIHERTAKSNQIRSMFAEEGLVFATSVVQLRRGIAALIGDAASPITPILRRLGQMYLDQIEAVERWLEQLNAQLQEIFAHSEDCQLLASVPGIGPIVATALLATAPDPKQFKNGRQFAAWIGLTPRQRSSGGKSMLAGITKHGDTYLRMMFVQGARAVLRFLAKRDDRQSRWLQRLMLRRHKNVVAIALANKIARISWAVLARREAYKPSFGSSITL

SEQ ID NO: 242793 - protein, 360 aa, unidentified
MPVAVADGRPMHLWDTKPVGERGSSSAVPLNPNSRQGRLRKQSPLRQGWDQMEKIVGIDVSKDRLDVAVAPQGEVFAVGNDHAGIDDLIVRLKAIGADAIALEATGGFETLAVAGLSSAGLTVLVVNPAQVRAYAHAIGRRAKTDPIDAAVIAAFVLATKPEVRPLRDAETQALSELVARRRQIVQMIVAEENRLRMVLAKQAQKSVKRLLAALRRELESLDADLDDHIRQSPVWRVREALLTSVPGVGPTTARTLLAELPELGSLDRRQIAALAGLAPWTRQSGKWKGKSFIGGGRGKVRAVLFMAALVASRHNPGLKAFRDKLVASGKPKIVAIVATMRKLITILNAIIRDNKPWQNA

SEQ ID NO: 242794 - protein, 409 aa, unidentified
MERVIERGAALDVHKKSVTACVRVPGPDGGRRQEVQTFGTTAAALLALRDWLSVHGVTHVAMESTGVYWKPVYYVLEEWFTCLLVNAAHVSKVPGRKTDVRDCEWLAQLLEHGLLRGSFVPPVPIRELRDFTRYRQVLVQDRTREANRLHKVLTDAGIQLASVASNVLGKSGRAMLAALVEGTTDPQVLADLAQGKLRRKLPALREALAGRFRKHHALLVSQLLAHLDYLDEALEILTAQIEEALGPFATEAARLDAIPGVGPRTAEILIAELGVDMRQFPTARHVASWAGLCPGTHESAGKHRAVRTRKGNRWLRAALIEAALAAINVRDSALAARYRRLVRHRGHKKAIVAVAHKMLTTAYLLLADGRTYQEPGAGYYDAQRKDRSVRRALQTLQRCGYRVSLEPAA

SEQ ID NO: 242795 - protein, 337 aa, unidentified
MRIIRIGLDTSKHVFQVHGVDETEEAVLRTQLRRGAVAKFFTKLPPTRIGLEACGASHHWARLLRGLGHEVVLLPPQYIKAYVKRGKNDAIDAAAICEAMSRPGMRFVPIKSADSQAALMLLRVRDLLIKQRTMLINAMRGHAAEFGVIAAKGPVRVAELLQHARSDAAGVPALAQELLALLADQLETIAVKLKALEGQLLAWHKQDPVSQCLASQPGIGPIAAVSFTLKVPDPKLFRSGRHFAAWLGLTPKENSTGGRRRQGRISRQGDESLRKLLVLGATAVIQFAKPGRGSPWLVNLLARRPRKLAAVALANKMARILWAMMASGEVYRRPQPA

SEQ ID NO: 242796 - protein, 455 aa, unidentified
MTKSPIASETSVLAAAKTGQILVRTLRDPVRAESSVISGKKVGYVRCYGGGDEGVAPSLLQRQPMEHPMKRNDDLSRSLVAFDQASTLVSVVELGFRSWLVAGLVPGLSRQPLKKLSADAQALLTLLRRWQGEATKMGSTVNRIVVAFEAGRDGFWLARWLRTRGIEAYVIHPTSIPVSREHRRAKTDRLDAGLLMRALLGWLRGEPKHCSMAAIPTIAEEDARRPNREHQMLVQERTAVVNRMKATLIRFGIRNFNVKLSKAGDRLAALRGPENEPPPPNTVAELRRDMARLHLIREQIKAIEEARLEQLKQAPRTGTHPMLLMLAQIMGIGVETADMLVHEVLSRKLRDQRAVARYAGLTGAPDESGTKRREKGLARAGNARVRRGMIQLAWRWLMHQKNSELAQWYETRTMAAKPGQRKTMIVALARKLLIALWRYATTGVVPTGVVLHPAT

SEQ ID NO: 242797 - protein, 351 aa, unidentified
MFDIALDLHKENTYGVVLDDKSGQIVWEGNFASTFRAAKETLEPYFTNGTKVAIEATSCFYPMHDGLKTIKEIDVIVVNTVKLEKPAVKTDRRDALRIAHLLRRNELPVAFVPDKKLRLQRELCSLRVRMVHSCTQCKNRISSILHKEGKRVIGVKDTFSQKGLKQLEEIKNFISREEELEEELDILSIFKKKQARVEKQIDETIEQDKELKKTVELIDSIPGFAKTLSFVCATELMPIGRFNSAQSVAAYAGLYPCIDSSGGRMKHGKIRRVGRKLLRWALIEGAHATGRSKNPIGNYYHQKAKQKKSNHAAAVATANKLAKLIYHILTKKEYYNPGMGQQVQSLQPHAS

SEQ ID NO: 242798 - protein, 372 aa, unidentified
MNYNTVYVGMDVHKESFTLCSCKYEDEKASHYQRTPASYKNVLRYLAFLRTIYGEDTRFVCGYEAGCLGYSLYHQLENFNVECVILAPTTMLEQRSKRRIKTDKRDAEIIARSLAQHNYSPVHIPTETDNQTKEFIRMRDDHKAELKKIKQQILSFCLRQGYQYDGSGNWTEKHVKWLRSLKPAGLYKEILDEYLLTYTILTDKLNRLDQRIEELASKEEYTESVSKLTCFLGIKTHTALSVIVEVGDFQRFVSARKFAGYLGLVPGQHSSGDDRNGLGITKAGNTHVRRLLTESAQSYTRGKIGYKSRVLRLRQAGNSPQVINYADRANERLRRRYYKMVLKDGKKYNIAKTAIARELACFIWGMMTDNIY

SEQ ID NO: 242799 - protein, 446 aa, unidentified
MEMEIINQNAAGIDIGSRSHFVAVGQALEDVKEFGVYAEDLTAICVHLKQYGITSVAMESTGDYWQNLFTELIKHNFDVILCNGKFTKHAKGKKTDVKDSRWIQKLHSLGLLTSSFLPDETTETLRTYCRQRINLIHQASTASRKMQKYLKFLNFRLDVVVKDVCGLTGLKIIEDICKGNLDPDLLAEHRHYNCKKSKEEIAKALHGNNREDFLFGLKQEFESYEFFQKQIKACDRKIQKFVNNVLKKTPNQLKLKTSDKPYKRFNKNTVNIKNFNQVAYQYFNGVDLLAIEGVSYATILSIMSEIGPEGFRKFKTSKEFVSWLRLAPNNKISGGKVLSSRVPKGSNRLKIALRQAANAIGNLKDTDLSDFFRRIAYRKGRQAAVSATARKLGVIIWTMITKKVPYKPSKEYLFLDQKRKLGIVKRIQKQITKFELSKNNFEFVTD

SEQ ID NO: 242800 - protein, 352 aa, unidentified
MDEAVVIGVDAHKRSHTLVVADALGRKLGEKTVAATSDGHMAAIAWAARWPVRRWAVEDCRHLTRTLEGDLLRAGEQLVRVSTKLMADSRRRGREPGKSDPIDALAVARAAWREPDLPTARLDGPQRELRLLVDHRDDLVAERTRLQSRLRWHLHELDPAFHVRPRGLRSRKGVNLVAAFLADRDGLVARIARELLERVAELNDRAQDLEREITRIVTTLAPSLLQIPGCGALTAAKIVGETAGAERFRSRAAYARWNGSAPQPVWSGNRTRFRLSRTGNRQVNCALHRIALTQARTASLGRAYLQRRQEAGATKTEALRLLRRRLSDVVFRALLADECRPIQAIDTTMALT

SEQ ID NO: 242801 - protein, 372 aa, unidentified
MIQRFHGLDRHKKHSTISVLNREGQEVEFVSKYPDLRSYIKELGPDDAVVMEAATGAFFWADMVESTGATCYILHPYKFKIIRDSWNKTDKQDARNMAKALWVYLVTGEFGIPTVYKPSVAIRELRRLFGQYQLLNRQVTILKNTVQEILNDNGISLTYRQKTMLSSETTAIEMMDEFALSPASLLTIQVNLEVLWKVEEQKKKLKKEILLAGEPFATEVKLLITVRGITPLTALAFLADVADIRRFKTLRRMNAYLGLVPTVNESGGKSRTGHITRQSRRLTRTLFTQSIMHFADASPYLRLYYSNMISRRGVGRARIALIRKICGMMRRMLLEQEKFRWMQPSNFERKLKRYECQMKKIKKIKEEERKIA

SEQ ID NO: 242802 - protein, 343 aa, unidentified
MDHIAIDLGSRESQVCVRTATGEILEERRMGTLSLGKYLARRPRSRVVLETCAEAFSVADAALAAGHEAVVVPAMLVRSLGVGERGVKTDIRDARNLSEASCRMSRLPTVHVPAKVSRDRKSMCGMREALVQTRTRLISLTRGWMRPQGLGVIRSGSPTTFHLRVREHVASRGGTIPPYVEPVLRTIQALSLEILAADEELEAAAASDPTCQLLMTAPGVGPTTAVRFAAAIDDVGRFADAHKVQSYLGLTPGEKSSGQKQKRTGVTKAGSSKLRWVLVQAAWVARRYYKDHPVVAWSYEVESRRGKAIAVMALVRKLAGILYAMWRDGVPYEKNHRVAAAKV

SEQ ID NO: 242803 - protein, 411 aa, unidentified
MLYVGIDWADDHHDVCVTDDTATTLVQFQIPHNTEGFATLHTQIAQHQTDPAAVLVALETTRGLLVYDLLCHGYQVYAINPKAVNRYKDRHVLSAAKNDRLDALAMAHLLRTDRHRFKPLAPAPAHYRLLDRLCLDLRKLIDEKTRLSNQITSCLKEYYPQAVGLFRDVASPISLAFLQAFPDPDTVRQTDRSAFAAFFRAQRYTHPQRVDALYERTHAPVPEADPVVIRAARLRLAALVDQLAVVRTHQGTYEHTIQTILEEVPEAQPLATLPGIDTRLVPELVAALGPNRPEEPKRFAAASDLAKLSGCAPITRASGKRRTVLRRHACDKRLRRTFYDWAMASLSWSRWARAYYDYHKAQHQAHATILRGLGQKWAKIVYAVWSSGDAYDEARHIEQLKRHEVVWALSL

SEQ ID NO: 242804 - protein, 343 aa, unidentified
MDHFAGLDVSVKETSICIVDDTGRIVREVKVASEPEALLQILGNPICRFKRIGLEAGPLSQWLFSALAEAGLPVICVETRHMRAVLQAQINKTDRNDARGMAQMMRAGLYRPVHVKTLRSQKLRMLLTHRKLLQSKAIAIDNDLRGTLRNFGLKVGVVGTVKFEARIKELVENLPDLAVLVEPLLIVRRVVREQIGILHRRLLAIVRDDDVCRRLMTIPGVGPVVALTYRVTVDVPARFRNSKAVGAVFGLTPSRYQSGESDRIGKISRCGDEMMRMMLYEAAQSMLVRSAKWSWLKAWAMKIARHRGIKKAIVALARRLAVIMHRIWVDGSEFRWTREVAAA

SEQ ID NO: 242805 - protein, 388 aa, unidentified
MPAAETPVAYLGIDVGKSSHSACALDAGGDVAFRAELANRPDDIDRLLERAGSGALVVVDQKRNIGALVLARAHAHGNPCAYLPGYAEKQARGMFPGTAKTDAIDAEVIARTALGVPRALRPAPEEPEGAASLRILSSQREFASSARTRAKNRLRATLLEADPALEGAVDPSSRWQVSMLAEFGGAAGCSAAGWRRFSNAARRAGAPAAGARRLWEALLASSRSGRRLPAGEDVAVRMLAREIASLDADIEELDSLVADSLAGDEVYECLLTVPGIGPKTAAALVTSIDISAFRGHDELASYCGVAPSDRRSGSSIRSTSPQHGGNRQLKNLLIFSCNSLIGTDNRFGRYYGECRARGMRHGKALKAVARKRLKVIYAIMRDAVPYAS

SEQ ID NO: 242806 - protein, 411 aa, unidentified
MIKENYIYVGIDLHKETHTAVMIDCYNQKLGEITFPNRPAAFPELVTKVKKCNTDGKEVVYGLENAYGYGRALAVWLIDKGYLVKDVNTAISHRQAKHRGAMYRKSDSDDAKAIALATLNMLDKLPDACPNDAYWSLGQLVHRRDNIMKQRTRLVNQLHEQLCIAYPSYKQFFNDISRPTALYFWEHYPSRKYLKGKSVEDLRAELVPVSHNKCSTKTCEKILDAVASDKVKNNAYQDARDMVTLSIVSDLQHYDSQLAEVDKMLEQMYKMLGCTLTTISGVNVITAVKILAEIGDIKRFSNANKLAQFAGIAPLHLSSSGKGKDVATKQGNRRLQATIYFLAIQMVQVSSKGTPRNPVVRAYYEKRKAEGKTSQQALICISRRLISVIYGMLKNGTEYRMPVVENAGENR

SEQ ID NO: 242807 - protein, 403 aa, unidentified
MFAGWDWASGSHDVTVIDQAGTRTDRWALAHAETGIAGTLARLRRHGDPAGLPVAIETTRGLVVDRLLAAGHPVIPIHPNAFSAVRPRWGAARAKSDPGDSFKLADYLRTDGHQLRTLTPTLPETLELQALTRQRADHVEARVAAVNQLAALLDEHWPGGKAVFASLDSDIALAFLDRYPTPADAARLTAGRLEAFCKRHGYSGKRPGSALIERLRTAPAAASRLGRTVITRLVGVQVQLVRSLRVTIRELDAAIAEAVKTHPWAELIAGLPRIGSVNLGQVIGEIGPMLERANGCAQLAAETGAAPVTKESGKHRQVNFRHAVNRRARQALMTFADNSRHDSNWAATIYNNARSRGKRHPHAVRILARAWLRVIWACWRDRTCYDPAIHHTTTKINTVEGLT

SEQ ID NO: 242808 - protein, 389 aa, unidentified
MLLADRIADTEPTAIRTHLGAIFVSLELSRSTWLITSLSPGNGEKMSKHSVAAGDTGALLAKFAQLQRKAFARTGKSYPMITIQEAGLDGFSLHRVLQQEGIESHVVDAASVAVPRRRRRAKTDKIDGEALLRVLLAYKRGEPRVCSMVVAPCAEEEDRRRICREREILLDERIRHVNRIKGLLLAQGISGYAPLRRNRRARLEALRTADGRELPQHLKAQIGRELDRLELLLLQIRAVEAERDAMLARLSQTVDENTRVHPLAMLLGVKGIGEEFAAALWFECFYRSFANRRQIAAYAGLAATPWQSGAVAHEQGVSKAGNARLRKKLVQLAWLWLRHQPASALARWFHEQAHRKIAIVALARKLLVALWKYVTAGVVIEGAALKGAA

SEQ ID NO: 242809 - protein, 343 aa, unidentified
MQSISTIGLDIAKSVFQVHGVDAAGQVVLRRQLKRRHVLAFFQKLPPCLVGIEACASSHHWSRELQALGHTVRLMPPAYVKPYVKRQKNDATDAEAICEAVTRANMRFVPTKTAEQQSGLVLHRARHLFIRQQTSVINAIRAHLAEFGIVAPVGRHGVEELLNVVADPSDRRVPEMARVCLLAFGAQLRRIKEQILEFDRLIRAWHRCNEMSMRLDEAPGVGPVLATALVAAVADPKSFRSGRNFSAWIGIVPKQHSSGGKNRLGNISKQGDRYLRGLFVAGALSVIRYAKIHGTKHRPWLTALLARRPTKVAAIALANKIARMVWAMMARGERYKEPVALAR

SEQ ID NO: 242810 - protein, 342 aa, unidentified
MYYIGLDVHKKTISYCVKDASGQVHREGTIGANRNELDWWMKTLPQPWTVAMEATIFTGWIYDHLLPHAAQVKVAHPVMLRAIALAKKKNDRIDAGKIADCLRCDFLPECHMASTEIRDRRRSLRYRHLLVRQMVQMKNRVSGLLLETGVSHNKQRLHKVRYFQELISNQEEVPESIRPLLKLSRETIVRCQKTEYALVSSLQRDPLLAERIKRLRTVPGVGPITALTWALEIGDVSRFRSIKQAISYCGLCGDEKSSADKILRTPISKQRNKHIQSVLIEAAKLAPRHSHELALLQEREKQKGNANRATLAVARKMVAYLLAVDRRERDFVPSQERTTAAA

SEQ ID NO: 242811 - protein, 436 aa, unidentified
MRGCRCSMIMGFTKPIEHFNLLRKKVITMNTLYVGIDVSSKSNVIYLMLPNGDKHSNFSVANSHEGSTQLVKRIHSVLTSHSLDTVLIGLEATSVYGDNLVYFLREDATLAPFNRKIHVLNPKQVKKFHDTYNDLPKNDYVDSFVIADCLRFGRINKEVYMGDYRYKALQNLTRARFFAVQNLVKEKQRFMNVLFKKYSTMTQEKVFSDTFSTTALAVYDEFESAEALANMDLHELTDFIIEKGKNRFPDPDAVAKAIQKAARSSYRLPKTVNDSVNQVLSISITSMKALESQIKEFDKAIKAQMELLPNVLISIPGIGPVYSAGIMAEIGDINRFNSQAALAKYAGLAWKQHQSGGFESEVTRLIPSGNRFLKYYLCEAAFSLVRCDKEYSDFYRLKYKEVNRCQHKRALALTARKFVRLVFRLLKDNRLYCPAK

SEQ ID NO: 242812 - protein, 396 aa, unidentified
MQWSAEMSGRIGDWLGLSNRSCLAEKMKGRQAMSKVVELPRICVGVDLHKLQFTVHAMNEETGEVMLTGVYRTDSQGYRDFCNRLHSIEAEEECRIELAVEATGNARYFKNKMEAEGFGILVVNTSKFKVITMSTKKTDANDAATLSLYLSKDMLPQSHLCDQTSEEIRRMLKTRSILVSSTVKIKNQIHGMLLGYGIETTSAQFQSKKKRQELINVLAEHYFSQFTASSLEVTLNILDDIYAQVKKIEEQIKEMTKENETIELLMTMPGIGFVGATTIASYVDDISRFDGNFKKFSSYLGIIPSVHNSADTVRMGHITRRGPQELRTAFVQVAMGIIRQPQNTSEWKLMKDYRTMKTSKGSGRAIIALTRKVARIVFAMLSNKEAFNPKLMKKAI

SEQ ID NO: 242813 - protein, 415 aa, unidentified
MEGLSPLHRRVAGIDVHRMLHVVTVLIEQPDGSMTKHSREFGGFKRDCRALAAWLGELQVQLVVMESTGIYWKSVYSHLENAGLIAWVVNAHFIKHVPGRKTDMLDSEWLAVLARFGLVRGSFIPPKDLRELRLVSRYRRKLSATCASQVNRLHKMLDDGGIKLGAVVADVNGVSARAMVRGLIDGQSPALLLSHARGALKRKTEELAASLDGDLSERHLFVLRHLSDSIEQMQRQLADIDAYLMRAMQPYAWAHSLLQTIPGIDEVAAALILIEIGDDMARFASPERLACWAALSPGNHESAGKRKSGRTRHGNNVIRHILCECANAARMTKSTLAAKYKSLMVRKSHKKAIVAVAHKMIRLIYILLSRRQPYLDQAIDYAAMSARKNAPRWIKQLKAIGKWPAPRASAAAAAT

SEQ ID NO: 242814 - protein, 349 aa, unidentified
MQIAVLGIDVGKNSCSFAGMEPTGRIVLRRRLHRDSVVKLASRLPACVMAMEACCGAHHLGRTLQSIGHQVRLMSPEYVQPYVKAQKNDERDAEAIAEAATRPTMRFVELKSETQLDVQSLHRARSRLVGERTALINQLRAVLIERGLTVAQGRRRLEQYLALALDAEDAPPLLLSPRMHLLIDDMRAQWRELDRRIAAFDAEFVALARKDATARRLTTIPGIGVLNATALVAAVGDAHSFSRARDLAAWLGLVPRQATTGGRPKLLGITKRGNKYLRTLLIHGARAALPSLATTDGALGNWLRGLSARAHRNTVVVALASKLARIAWAVLRAGATYHATIGDRPTAAA

SEQ ID NO: 242815 - protein, 365 aa, unidentified
MVMRRLGMAVTGGTRRIVGGVDTHKDLHVAAVADEQDRVIGTRSFATTRQGYRQMLAWMRSFGELRRIGIESTGSYGAGLLRFMQQSGVVVLEVTTPDKQDRRRRGKNDDLDAQNAAHAAFAGQRTVTPRSRDGMIESLRVLMACRKTAVSARRVALQMIHNTIVCAPDGLRDQLRSMTRMQLVRTLASWRPDLTAYRDLDSAYRISLRSLARRYLELHDEIADLDAMIATIVDELAPNLVARNSIGHTGAAQLLLTAGDNPERLRSEASFASLCGVSPVPASSGKTVRHRLNRGGDRAANSALHIIAIGRLRTDHRTKDYVARRLAEGHSKLDAIRALKRYLAREVFTLITQRRKEINATRIAA

SEQ ID NO: 242816 - protein, 423 aa, unidentified
MMKLKYSICCGLDVHKNVIVATIVTTNKDGISEYLQKSFSTINSDIQRFHNWLIENNCYHVCMESTGKYWIPIFNYLENDIDVCLTHPKYVKAIKGKKTDKKDSKWIADLYKFDLVRCSFIPPKDFRQLRELSRYRFKLVCMKSSEKNCIQNCMTISNVGIASVLSDPFGKTATEIISYLLEHTADSMDEKAVRKLIKKGAKSKSDEIIEAIKGYTIETDQAKKLELARGHLEYLDDMITQTEVELYVRIKPYYEFVEFVSTMPGMTELSSTIVLAETGVDMDIFDDAKHLCSWCGLSPANNESAGKKKSVRIAKAGEYLKPMMVQCALAAIKSKKQPYFAIKYGRIKKRRGHKKAIIAIARMMMVCIYHMVSEKKPFTPTDYEELMDPQNHVESVVLNENNVFAYLESLGYDSSKLVKRNDN

SEQ ID NO: 242817 - protein, 387 aa, unidentified
MLFVGIDIAKSFHVATVLSQTGEVLVAPFRFDNTREGFNFLLAKVSAFEPSTLLFGFESTAHYAKPLGSFLLSQGCRVGLLNPIQTAALRKTNLRNAKTDSIDALIIAQALSIGLHSDLSDESGYDAMWSLCIARNNLMIARTRAKIQLVAYVDQLFPELAAFFKDNLHLATSYALLKAFPSPKKISKVRIDTLTILLSTASHGRYKLSQASHLKDLARSSIGIDNPVLSLQIRLAIEQIELYSKQIEVVEKQIEDLLLPMKSSLLTIPGMGTIQAAIILSSLRNIHRFAHPCKVLAYAGLDPVIRQSGNFTARDTRMSKRGNSLLRYALILSSHNLVRNDETFRTYYLKKISEGKSHYNALGHVAFKLIRVIFTLLNHPDRSFVTA

SEQ ID NO: 242818 - protein, 326 aa, unidentified
MTLSHLTDNTFVGIDVGGAGLDVAWHRGDSAHYANRPDAIATLVERLRTGPEVTRIVLEPTGGYEKALVKALRQARLPVEIIHTTRFNAYRALVGVKAKSDTSDAKLLASYAAAPDEVRGRKAGHVELPEDAVREELSELASRRDQLKHMIHAETCRLGTVRKDELRQMITTHLEALRAEDKQVHRMMQELVRQRDDLRRDQRLLKTIKGIGVKSALVLLASVPELGRIDNKAAAALIGVAPFVRKSGTMNAPARIHGGRAPVRSILYMAAVTASKHNPLLSPFYDRLIAKGKPPKVALIAVLRRLVVFANAVLRSGQPWKGASAT

SEQ ID NO: 242819 - protein, 326 aa, unidentified
MQSYLGVDVSKAKLDVALLLPNGKFKSKVFANDGPGHQALVQWLNVQLPDGLHNVHICMESTGSYHEALACAVHDQGLNVSVVNPLLVKRFAQSNGQRNKTDEADAKCLAQFCKEKQPDRWEAPTVGVRTLQALVARLETLKDMRLAESNRLELAHASVHESIAGVIAELEAAIAQVKAQIAQTIDDDPDLKRRAQLLNTIPGLGEKSIAQLLAYIGRPERFKNVKAVTAYASLTPMIQKSGTSLDKHRGTHPMGHQELKRALYFPAMVAGRHNPLVAAFWNRLKAQGKPGKVIVVACMHKLLAIAYGVLRSGQPFNASHLKPQAA

SEQ ID NO: 242820 - protein, 354 aa, unidentified
MAPTSTGRQHLMTIMIGIDPHKATHTAVAIDSNEQVLDEFTLRSSNTQVKRLRAWAEQFDDKSWAVESARGLGYLLSQQLVGAGETVFDVPPVLASRVRLLGSGRSQKNDPNDARSVAVAALRSDRLTEVVPDDHPQVLRLLVKRHRDTAQLRAKHVVRLSVMLCELQPGGTRTKTTPHKAIGLLESLDVVDEVTRTRVMIARELLEEIARLDTALKLSKARIDTAVVVSGTSLCDIVGIGPICAATILGYTGNIERFPTRAHFAMYNATAPIEMSSGGRVRHRLNLRGNRNLNFAIHIAAVVQIRTGGEGRVFYDRKISEGKTNKEAIRSLKRRISDRVYAHLIADARRVTVS

SEQ ID NO: 242821 - protein, 418 aa, unidentified
MTATHSIAPTLLVAIDISKHRHEVLIGIPGKTRRRRLTVMNTLEDFERLCAALASYDLPVRIGFEATGNYHRPLAHHLGRAGFDLKLVSSVGLARTREALHNSWDKNDPKDAQVILHMLEIGAVQFFHDPMVVGTSDIQELSKTHEIVSRSKTELWHRILTHYLPLYFPEAERFHRSSRTDWFLAFLEKYPSPHMISVMSRDDFIADAWDVVGRKVSKERLLSDIYATAGGSVGLPVHPDSDALRMFRLVLAEGRGLVRQRDQIEARAVELLSDLPDYQLLTTIPGIGPINAMTILAEAGDLRRFRHHRQFLKFCGMDLATVQSGMFRGQSRISKYGNARLRRTLWMAGQTAVLKRTNSFRDKFERYIAKDRHNAHLRRKAYTAIAAKMARTVHAVVNHGEPYRPFFEGVSPGGRTSL

SEQ ID NO: 242822 - protein, 351 aa, unidentified
MMIIGCDFHPSWQQVAWLDMETGESGERKLVHADGDAERFYRQLPAPVLIGMEATGNSHWLVDLLAELGHELWVGDAAQIRASYVRQQKTDKRDAAHILKLLVEGRFPRIWMASSEVRDLRQLLIHRYKLVIIRARVKNELQHLCLNKGVQRKRKLWSKAGQQVLRELPLKAWAGRRRDDLLQLLAMLDRQIAPLDEAVKAEAQRDKMALLLQTQPGVGAITALAYVLTIGEVSRFPRGKQVASYLGLIPREHSSGGRQHLGAISKQGNRMLRMLLVEAAQTAVRLDPGFRKEYLHRCHHKPKAVAKVAAARKLAVRLYWMLRTNVPYPEVVRIESSPRVRLVGEKLDREC

SEQ ID NO: 242823 - protein, 444 aa, unidentified
MRRCIGLDVHREFAQVAIWEDGVVRQAGQIKTTPEELRIFAESLGPDDEVALEATCNTYAVATLLERHVARVVVSNPQKTRAIAEAKVKTDKVDAEILAQLLAADYLPPVWLPDEDTHALRRQVARRAYIVRQRTRLKNQVQAILHRNLVPRCSAADLFGHKGRAWLGEQDLPPDERQAVHALLRQLDFYGEELRLVDAELGRVGLERAEVHRLMTIPGVDATVALAIVAAIGDFSRFPSPEQLVSYMGLNPRVRQSGGQPASHGRITKQGRAHARGMLVEAAWVATKIPGPLRAFYERIRARRGMQIAVVATARKLIVLCWHLVVKEQDYAFARPSLTAQKLRALELRAGMAARRGQKGKAATYSLKEVRRREREIAEQAEHAYRQLVANWRPKRPETVEATKVGVAAATGARLLRPSKGKAARQGLQPQHPALRSGVDHARN

SEQ ID NO: 242824 - protein, 389 aa, unidentified
MYFVGIDISKYKHDCCIISAADQKVVSKVTIKNNKAGFNELLTIIHSLANPADIRIGFESTAHYALNLELFLENSLLTFMEVNPVLISEYKKSKTLRRTKTDSIDCESIARWLMTVEYKPHSKGFYHAYSLKSLTRLRDKLIRQRSFYLVKITNVLDHTFPEFKPFFNERLSKTALYLLENYGSAEKMARMNSASYEKLRSLSRGKFSPQQFLRLKELAANTVGVNNSIFDVELNSLLSLYKSLVKEINTIEKEINKLIEEVHPHYMSVPGIGPLSAAVIYSEYGDISNFTNPGQMLAFAGIEPGINESGTESHGGKMVKRGSSQLRYTLINCCLPLIRFDMTFATYYAKKRGEGKPHRVAITHVAKKLIRVIYALERQDIDFNAQKLR

SEQ ID NO: 242825 - protein, 492 aa, unidentified
MGWCGLESGDAVWRSRVRKLNDSAAQPFRSATGGLVMRRTKRRSSKIRPALPMVHANAAAIDVGARMHVAAVGADRSAEPVRSFGTFTTDLHRLADWFAECGVETVVMESTSVYWIPIFELLEARGFTVFLVNARDAKHVPGRKTDVSDAQWLQRLHSHGLLRASFRPKGEIIELRAYLRQRERLLEYAASHIQHMQKALSEMNLQLHHVVADITGTTGLRIIRAILAGERDPAVLALLRDTRCHASVETITQALTGHYRAEHLFALEQALALYDAYQEKASACDARIEAVLKQLSFRRSRGVGPLPAPRRGMRRQPNGPAFDVRAALFALLGKDLTQINGLGPYLALKLIAECGADLSAWPSAKHFTSWLCLAPSNKISGGKVLSSRTRRSGSRAAALLRLAAVTIGRTDTALGAFYRRLSARIGKIKAITATARKIAVLFYNALRHGMDYIDPGASSYETRYRARVIENLHRRAKAFGFVLHPAAPQAVS

SEQ ID NO: 242826 - protein, 328 aa, unidentified
MKNYQEVIGIDVSKNKLDAYAYNRCSHHEFSNDVKGYKALLKWANGKDQKVFFCFENTGHYSLKLALYLSSKKQVYVQENPVVIKRSSGMIREKNDVVDAMLIARYGWLHREELSASELKDNELLEVGRLLALRDQLVRSRTGLKNTLSELKKLLSSSSTDTCCKTLVGSISHLTSQINKIEKQLKTVVKTSERLSQNYKLITSLKGVGLIVGAQLLYHTNNFERFDNWRQFSSYCGTAPFGHSSGSSIHKKRKCHPMGDRQMKSLLSMAACTAIQYDSELRQYYKKKREEGKLKMIALNNVRNKLLSRVFAVVKRGTPYVELQKFAA

SEQ ID NO: 242827 - protein, 317 aa, unidentified
MTQTSMTTAGIDTSKGKLDIALHGRAEQWQVANTLPGWRILTNKLTKAGVSRIGIEATGGYECGVVQHLRAAGFTVQVLQPVQVKAFGRMHLRRAKNDALDAVMIAACTAALDQVRDAPDPRLAELAEQLTFLEQIEEDIKRFKTRLEHTGEPRLRRMVLGEIARMTSRRLTQLRYIAKQLRAHRDLAARLDLVLSIPGIGERTALAILIRMPELGRISREEAAALAGLAPFDNDSGQQKGQRRIAGGRARLRRSLYAAALPAAFRWNRALIALYQRLTAAGKAHNAALIACARKLLIYANTVVQRGTPWTERPLSV

SEQ ID NO: 242828 - protein, 337 aa, unidentified
MNYSGIDLHSNNSVVSVTDEEDRVVAEKRLPNELAKILAFLLPWRAALAGVVVESTFNWYWLVDGLQAAGFKVHLANTTAIKKYDGLKHSGDEADARYLAHLLRLGILPTGGILPPAQRAVRDLARKRMQLVRSRTAHILAVENITARQLGARINSNQVKRLTAETVDQMPLPDDVAFAIKANVAVIATLSEQIDLLEQRLQEKVAPRAEYGLLTSAPGIGQVLATTILLETGPIERFAAAGNFASYARCVDSVHTSNGKKKGEGNTKNGNKYLAWAFVEAANFALRYCAEAKRFYERKKAKTNNVVAIKALAHKLARACFHILKERKPFDVTRCFA

SEQ ID NO: 242829 - protein, 423 aa, unidentified
MLEETHDDQEIIARVAALDIGKAELVCCTRLPSPSGSGHRVQEVTTYSTMTRSLQVMADRLLELGVTRVVMEATSDYWKPPFYLLEAHGLDVWLVNAKDVKHLPGRPKTDRLDAVWLAKVAERQMIRPSFVPPAPIRKLRDLTRYRVALVDDAGAEKNRVEKLLEDDQIKLSVVASDIFGVSGRDMMDQLIAGQRDPKVLAQLARARMRTKIPQLEEAFHGFFTDHHAFLLTGRLTRIDQISAHIAALDAKIEAEIAPFDHDVARLDEIPGVGLVAARVIIAEVGVDMSRFPTPAHLTSWAKFAPGVHESAGRKKGSGSTGHGNRYLASVLGEAAISASRTDTFLGERYQRIARRRGKKRALVAVGRSILVIVWHLLSDPDAQFQDLGANFYDTRLGTERAKRNHVQHLEALGYKVTLEPTAA

SEQ ID NO: 242830 - protein, 337 aa, unidentified
MSVYVGIDVHRKRSQVAVVTEDGTVQLNKNVVNGSEPFLRLIGDLPSGTPVAFEAAFGWSWLAELLEDYGFEAHLVHPLRCKAIASARLKNDKVDAAILAQLLRADLLPEAWLAPPRVRQLRALLRHRASLVRLGTQLRNRIHAVAADHGYDRSASYWTGPGRGWLAELDLPAASREIVGDCLAVIDGLAPVIDRIDGELHAHARADPRVKVLRTLPGVGEFTALVMLAEIGDITRFGSARKLASWAGLTPTVRGSDLKVRRGHISKQGSAWLRWVMNQAAQTAKRSPEFAASYAAIAKRRGKKIATIAVARKLLTRAWHLLNEMQATDTNAPLRRP

SEQ ID NO: 242831 - protein, 324 aa, unidentified
MIDGILGIDVSKNTLDASISSCNKVRARSFANSSDGWRHLLDWLITQKIRRVHACLESTGRYSLGIARALYEAGHVVSIINPAQIRDFARTKLGRNKTDGVDASHIREYCELFKPQPWTPPSEAHRRLGELQAIRAGIVAGLTEWKNRKNSGMVDAVAQSLADVTILHFTSQLGAVDEAIAQTIDNDSSLRRKRDLLLSISGVGETLAGVVLAELPGPDMLRSSAEVVAYAGLNPRQHQSGTSIDRVTRISKIGNAVLRAALYMPAMSAMRFNPAIVALVTRLKSRGRLNPKQIVVAAMRKLLVLCFGVLKTGKPFDPAIAMGC

SEQ ID NO: 242832 - protein, 319 aa, unidentified
MFVGIDVSKGELVITILPQTERWTVPNDAGGVEALVRRLSAVVPTLIVLEATGGYEALCTAALGAASLPVVVVNPRQVRDFARATGQLAKTDRPDADVLARFADVVRPVVRPLASDEVQSINTLLTRRRQLLDMLHGERNRLGQLFGAGQVPVRRSLLKTVTFLEGQLLTVDTALETLIASSSVWSARDAILQSVPGIGPVISRTLLGEVPELGALSRRALAKLVGVAPFARDSGTMRGRRGTYGGRTTVRSALFMAAMVAARRNPIIRAFYLQLLARGKPKKVALVACMRKLLTIVNVMMRTNTVWCAAAPTAVVKTA

SEQ ID NO: 242833 - protein, 346 aa, unidentified
MKILALDLGKYKTVGCDYESESGAHQFKRGFTTRAGLAKMVQEVKPDRVVIEVCSIAGWVCDLLWGMGIEVQVANTSDDAWRWRKVKQKDDRRDALKAARLSAVNQLREVYIPAQAVRQWRALITYRQHVIRRRTKIKNHIRDLLLREGQLLGRGSSCWSQAGIAALAAQARPFSECGPAELWRGELQLELEQLKEIQRQVTTVTAQLDKIGAADARVQLLRTVPGVGPRLAEAIVALLDQPQRFRKASQVSGYIGMVPKALDSGETERRGHITRQGSRLVRSLLVEVAWAGLRHNAWVRQTYQRLSGGKKARKKIAIVAVGRKLLVKCWAMLRDNRAWDWQPQIT

SEQ ID NO: 242834 - protein, 431 aa, unidentified
MELSKCNETVKVSVGIDVSKGHSTVSFFRTGDKSPSKPFTINHDIPDLKSLERKLDRYKANGTLRIYMECTGRYHLGLANGLYKDGYTVYAVNPKLLADFHDDSLRKPKTDPVDAQKIASYGIQYWNKDRRPFNQMDSKRECLKECERQYKLYTDECVTFTNNLLSLTDLTCPGVNRLFSSNTNQNGHLKWVDFVNTWWHVDCIRKMSMNAFSNRYCKWCQKHGYEFSEDKAEDIMDWAKKALVAMPKSTYIKKTIQIAVNAINDLLETIQNTKKHMNQLASQLPEYPVVMKMDGVGEVTGPIIMGELGDVTRFNKRSQITAFAGVDPKKHESGDDKPKSSRATKIGSPELRRALYLVMTSKLARKPQGDRVYDFIVKKRSEGKKYLVYMTAGANKFLRIYYGTVRDYMQNKQNPSFIQDKAPAGLSLIHI

SEQ ID NO: 242835 - protein, 371 aa, unidentified
MKKLTTFVGLDVHKDSIDIALADSGRDGNVRHYGTIGGDLESLHKVVRKLQSTGSELRFVYEAGPCGYEIYRSLTNQGFDCIVVAPSNIPRRSGDRIKNDRRDALSLARLHRSGDLTGVYVPTVEDEAMRDLTRGRGDAVKALRVTRQVLLAFLLRHGHRYSGKAYWTNAHKNWIAGIKMPHRAQQIVLQEYVHAVQEQLERVQRFTRQIQELVPQWQLAPLVTALQALRGVSLIVAVTTVAELGDLTRFDSAKQLMAYLGLVPSEHSSGGATRRGGITKSGNGHVRWALTEAAHSYSHPARESRALLARMEGLPQEIRNIAWKAQVRLCGRFKKLIARGKNKKAVITATARELAAFMWAIACATLPGATA

SEQ ID NO: 242836 - protein, 343 aa, unidentified
MGEVSTIGLDIAKSVFQVHGVDGTGAVLMRRRVGRSKVLEFFAGLSPCLVGIEACPSAHYWSRELQALGHTVKLMPPSYVKAYLKRSKNDANDAAAICEAVTRPSMRFIPIKSEQQQSGLMLHRTRQLLIRQRTMLSNAIRGHMAELGIISAKGRNGTAELLQIIANVADERIPPVARFCLELLARQYLSLVAEVSSIDKRIHAWHRSCQESRRLEEIPGIGPIVATALVAEIGDWGTFRSGRSLAAWIGLVPKQHSTGGKERLGSITKQGNRYLRWLLVAGAMAVIRYARQHGTKRAWLTRLMDRRPAKVAAVALANKIARMAWAIMVRSERYREPKLLLAA

SEQ ID NO: 242837 - protein, 390 aa, unidentified
MPLDHHSEEPTAIRTNLGAIFVSLELSRSTWLITSLSPGGGEKMSKHSVSAGDIAALLSRFSELKQKAFARMGQSFPIIVIQEAGLDGFWIHRVLQSEGIESYVVDAASIATSRRRRRAKTDRIDGEALVRALLAYKRGEPRVCAMVRAPTPEDEDRRRLCRERKTLTVERVQHVNRIKGLLFSQGVSGYEPLRRNRRQRLDELKTGDGRPLPPRLKGQIGRELDRLELLLGQIKAVEAERDALLTPATETEGMPAPQAMLIDLRGIGAEFAAVVWSEGLCRSFANRRQVAAYGGLAPTPWQSGSVAREQGVSKAGNPRLRTTMIQLAWLWLRHQPNSALAQWFKERVKRNGGRLRKTTIVALARKLLVALWKYVTAGVVVEGAVMKAVS

SEQ ID NO: 242838 - protein, 453 aa, unidentified
MARRNARVSLKPDKSRAALTITHPNAAGIDIGSASHFVAVPPDRDDQAVREFSTFTVDLNALADWLDACGVDTVAMESTGVYWIPLFELLESRGFTVLLVNARHVKNVSGRKSDVLDCQWLQQLMTYGLLSGAFRPAEQVCVLRCLYRQREMLLKSQGRHVQHMQKALTQMNIQLANVLADIVGVTGQKILRAIVAGERDGAALGALKNVRVHASADEIAKSLQGNWRAEHLFALKQALALFDFIGTQLRECDGEIEAQLQSLRTHDGDPAKGKKRSRSRNAPKFDLRVQLFQMCGVDLTRIDGVDVTTALAVVSEIGVDMARFPTVKHFTSWLGLCPGTKITGGKVMSGKTKRVVNRAAQALRLAAAALRSSKSALGAYFRRLCSRMDKPRAVTAAAHKIARLIYLMLTKGQEYTDQGQDYYEERYRERVLRALSQRAAKLGMKIIAIEQPA

SEQ ID NO: 242839 - protein, 373 aa, unidentified
MPKYSTAFGMDVHLRSTTVCALDADTGEAVTRRFPGNPWGEIAGWMDGFPGPSLAAYESGYLGFAPQRELAGLGVECVVAAVSKIPRSAADSASKNDRNDAARMAKAILAHDISPVWVPSPEVEGIRDLAGAYDGATARLATAKQRLLAFLARRGFVYGGTTPAGNPRKYWTYDFLRWLDKVRPEDDGGVRALAALRNEVEAAAEARADLLSEYRAAVDASPIAAEVAALQSIKGCAFALAAAFSAEVGDFTRFRSGRQVTAYFGLAPSQRSSGDSVRLGGISGAGNALVRKLAVEGSWCYAAARHQPKLMPRDTGVPLEIRVHGRKGSERLLRRREEMLARGTPAAKANAATAAELVRWLWALGMMCREGAE

SEQ ID NO: 242840 - protein, 386 aa, unidentified
MQTLNNLSRSLIALEPASTLIAVIEMSLSSWLVAGIVPGIERQPLKKLAVDESALLRLLHRWREEAEKAGCRIERIVVAFEAGRDGFWLARWLKARSIEAHVIHAASVAVSREHRRAKTDRLDAELLKRAFLGWLRGERDHCKVVAIPTLKDEDAKRPSRERESLVGEQSRIVNRMKAALIRLGIRGFNPKLKRAAGRLDSLRTPEGEPIPPNTLAELRRDMERRRLISNQIRQIEEARLKHFEQAPNDGPHAMVRLLARVIGVGIETADMLVHEVLSRNMHDRRAIARYAGLTGSPDESGRKRREKGLARSGNGRVRRGMVQLAWRFLTYQKESALAQWYRARTENARGARKPMIVALARKLLIALWRFVRQGVVPDGVVLRPAQ

SEQ ID NO: 242841 - protein, 320 aa, unidentified
MNQPSSTTSKNTNEIQYIGIDVCKARLDIHGIEGLDHVANSPEGHKKILQKLKPKLHQIALEATGGYEDRFIFQLHSKAIKVSRIEASRVRDYAKSIGRLAKNDIIDARSITEYAQHVKPAALVPPSAGQSQLKALCSVRQQLVDHCSNLTKQLQQTYHAVAVKHLEKTIKDLANQIGKIEKEIKDLLENEEFEAKAQRLMQIKGVGLVGASGALGYMPEMGTISETQAAALVGVAPMQNQSGTKEKQRRIKGGRAKLRRIIYMNAICCIRHNSQFKALYKRLRQAGKPVKVAVVAVMRKLVILMNRLLSDPDFKLAEEK

SEQ ID NO: 242842 - protein, 367 aa, unidentified
MKYTLKAAPSVGARELKNQKSTKATQILVGADVHLRGYQVARKVDNAAIGVVENFRSEEALLLFVEKQCERAERVALVYEAGPLGYTLYRKLKARGVECYVCAPDSTQQKRKRVKTNKIDARSLTSKLFNYLNGDQNALQLARVPSEAQEQLRLASRQHDQLVEERKRLGAKGNAMLLSQGFGSWSNWWRPKAWALLSAQVPAWLLERLKIWVDVLKILDEKICQAKVALARACSGPRPKGVGALSQIQLQGEVLDWSLYPNRRKIACLGGMVPSEWSTGVGERRGSITKVGVSAIRRIITEMVWRMILFQPQYKPVQKWKEVLAGSNPALKKKAVVAIGRQLIVDLWRLQTGRVTAQELNLVIIGA

SEQ ID NO: 242843 - protein, 402 aa, unidentified
MRFLVGIDWASLAHAVCILDETGRIHWQGSVPHTAEGLAQLLGHLRRFRRRGLVRVALERPSGVLVDTLLEAGFEVVPIHPNALKASRPRYSAAGGKSDPGDAFILADLLRTDGHRFRSLRPPSDDTRALRALVRGRDDLVAQRVALANQLRALLERFWPGAAEIFADIDSPIALAFLSRYPTPHSAARLGEKRLGQFLGQHAYCGRRPAADLLARLRSAPASVAGEAEAEASGELVRALVAVLTPLVAHLQQLSAAIAAALPQHPDGPLVQSLPRSGAVNAAQILAELGDDRARFPTGDQLAAEAGLAPVTQASGKHHAVVFRWACNKHLRRALTTFADNSRHASRWAALVYQRARARGCRHQHAIRILARAWVRILWRCWQDRAVYDVTRHHAAQALTAA

SEQ ID NO: 242844 - protein, 397 aa, unidentified
MIAVGIDISKAKSTVAVIDSDGTVLASPFTMAHTQPEMESFVTYLKGLGEPTTILMEYTGHYHYPVLKKLQDEGFPVCIVNPYQMKKYGDVEIHKAKTDKKDALRIAAYALEKSYKLVPYSSMEQKYEDLKFLSRQYSQRITYVAKLKVQLIALLDQTMPGITRILPLNSRNPEKCALLLFIKRFKSFDEIQRIGKARFLASYDVLAKKTSERSASSKGLSIYELAVDSITTRGEDPYIWLSQNQCVDLLSATQNAADEIISQMRNIAETIPEYKVLRAMHGVGDRLGPIILAEIGDVHRFHSGKALNSYAGNDAPPYQSGQFESRNRHISKRGSSVLRKACYEVMQALKLTKPQDDPVYLFMLKKEQEGKPFNVAKMAGVNKFLRIYYARAMELYK

SEQ ID NO: 242845 - protein, 417 aa, unidentified
MFDARDVLYVGVDWADTAHRVIVLNAGRQVLHDWVVPHTGEGLTTFAARLVALTDGDAGRVAVALEMPRGPLVDALLERGCHVFAINPKQSDRFRDRFSPAGAKDDRRDARVLADALVTDRGAFRALTPEDPLVIRLRELSRVDAELQQELRRLTNRLRAQLQRFYVQPLALCPAADEPWLWALLALAPTPTAAARLREPRLVRLLRTHHIRRVTAAEVRAHLQRPALPVAPGVTEAASSHVAVLLPQLHLLQQQRRACAPQIEQLLQQLAERPDAAEPQREHRDVTILRSLPGVGKTVAATMLAEASGPLAARDYHALRTQTGVAPVTQASGRRRVVQLRTACNRRLRQAVYHWARVSTQVDPLSRAHYTALRGRGHSHPRALRGVADRLLAVLIAMLRTGTLYDASYRRAATLVA

SEQ ID NO: 242846 - protein, 362 aa, unidentified
MNYVGVDIHKKYSVLCAVDERGRKLREARIEGNSGCGFAQFFASLEGPSKAVVEACWNWGLVHDELEEIEQVEEVVLAHPYKTRLIADAQIKTDRLDAHALGTLLRGNLVARAHVRRGETRVRKNLLRQRLYWARLRTMLRNRIHALLDRQRGLELPQCSDIFGVRGLSFLRRLELPETDAALLREQLALHDLIAQQMKAQEKRIGLEFGSEAMHRQLLSVPGIGPTLAAVIACEVDSIERFSSAEKLCAYAGVVPTTHSSGGKTRHGQLLPFCNKWLRWALIEASWVAIGCSPYFGALYKQHRARGKKANSAVLIVARRMCRIIWQLLHEKRDFEKRPLRPNFNFPGCSVVRLTAATAARP

SEQ ID NO: 242847 - protein, 423 aa, unidentified
MIPAVIERCAGIDVGKKFLAVCVMTGPANEEAQAEVRKFGTVRHELEALRQWLQSEGCTHVVMESTGVYWKPVLNVLEDEPGYSWKIILANPQQVKAVTGHKTDPHDARWLAHLLRHGMIRPSFIPPRAIRELRDFTRRRKQMIGIAAEERNRVQKVLEDANVKIGDVLSDVFGLSGQLMLEALVNGLGGDEPPSALDIAQLARGHAKKKLNELTAALEGHQMRDSHRTLIRHAMRHMAFLAEEIEALDRDIAALIGKADLAPAYELLQTIPGIKSQAAATILAESGPDMKQFPKAANFSSWSGLAPGNNESAGRKKRAPAMKGNPHIKTALVEAAWSATRTKQSEFQDRYQRMRTKIGHKRAIVASAHTLALRIYEVLEAGLPYHPHGGNLTPRSVKRLVRHHTRRLKCLHRWLKEEGTVDN

SEQ ID NO: 242848 - protein, 412 aa, unidentified
MTATNQFAAHVGLDWADKKHDVCVQFKNGERVFYVIEHTPEALDVWLTELHQKVKGRIAIALELKKGPVVYALQKYPFITVFPVHALSLARYRQAFSPSGAKDDPQDAELALELMLRYPQKIKAIEPDNADIRLLQQLVEQRRQLVEDKRRFVNRIINTLKQYYPQPLEWFSHRGSLLLCELIIRWPSLQQLKRARRDTIRNFLNAKGGRAVALTEQRVVSIDNAIPLTTDPSVIEANALMATALATQIKVVSEIIKTYDERIETLFDTLPDAGLFKSLPGMGPCMGPRMLAALGDNRDRFNSAEEIQNYAGIAPVTERSGQKSWVHWRWQCARFVRQTFVEWAAKTVNSSYWAKLYYQGLREKGKSHQSAIRALAFKWIRIIYRCWKTRTQYDEAKYLLALEERHSPLLKP

SEQ ID NO: 242849 - protein, 373 aa, unidentified
MEKSSRTLYYVGLDVHKDSIAVAYAPEDRGADIISLGTIGTRQCDIDKLIRKLQSKGPAQLVFVYEAGPCGYWLYRYLTRKGLACHVVAPSLIPRKPGDRVKTDRRDAITLARLMRSGDLTSIYVPQVQDEAIRDLSRAREDAVEDLKAAKHRLKAFLLRQDIRYEGRATWTAAHLRWLAEVVCPTPAQQIVFQEYLRAVTEQHERRGRLESELHEQVKSWRLYPVVEAIQALRGVERTGAVILIAELGDLTRFDHPSPLMNYLGLTPSEHTTGERRRQGGITKAGNTHARRALVEGAWAYRYPAKVSRHLQLRLEKLPAEVQAIAWKAQVRLCKRYRQMTARGKHVNQVVVAIAREMAAFAWAIARIVPLAH

SEQ ID NO: 242850 - protein, 376 aa, unidentified
MLHSIESIHRLVKLINSYDEEVRVILEDTGHYHLPVVTLLVEKDIFVCCVNALRMKKFCSQSIRRAKTDKIDAVHIAQFGLTYWDELNPVKSPEEVYQELKLLARQYYQTVSMLVKAKVNLSNLLDQTMPGIMDLINDSPSNHKLTDFVKRYYHFSHILEMGEKCFTSDYCKWSKKQGYRMHERLAEKIFAMVQNGIPVLPNSPTTKIVVLEAVRMLREIEASRDIILAQMQDFAKTLPEYSIVREMSCIGDILAPRIIAEIGDVRRFKNKHSLIAYAGIDAPPYQSGSFNAAERHISKRGNSYLRKTGYEIMQSLIKHKPTNDPVYDFIQKKRLEGKCSKEAMIAGLNKFLRIYYGRVSEVYRAIDEALDFTSNI

SEQ ID NO: 242851 - protein, 318 aa, unidentified
MNTKTNQSVNVGVDTGKFQLDIYIRPLDIFFTVSNDEKGIKEAIKIIKQHAPGRIIIEATGRLEMPFIIACANANFPFVVANPIHIKRFAGAIGQRAKTDKLDAQLIAHYGEAIQPKLSQLKPDTMQAMSDLVARRNQLLVMQTMEKNRLQILPKELVMTIKPILTVFKNQITKIENKIVALIESCPDYQAKNCILQSMKGIGKIASASIISNLPELGYMTNKQASALVGVAPMNRESGRYKGLRKIQGGRHQVRTVLYMAMMSAIQSNPVFKETYQRLVAAGKPKKVAIIACIRKMVVILNSMLRDGVMWEAPKATN

SEQ ID NO: 242852 - protein, 364 aa, unidentified
MGKTEKLPRICVGVDLHKAQFTVYAINEDTGEVLVRDVFKTDIQGYQAFCERMHGFEDSMECTIELAVEATGNARYFKNKMEVEGFGVIVVNTSKFKVITMSTSKMDKNDAYTLAFYLSKDMLPQSHLCDQTGEEIRRMLKTRSILVSSTVKIKNQIRGMLLGYGIETKSAQLQSQKKRQELLNDLADQGYSQFTASSLKVTLDILDEICEQVKRIESQIKEMTKEDETVELLMTMPGVGFIGATTIAAHTKDIERFEGNFKKIAAYLGIVPSVHNSDKKKRTGKITKHGPQDLRTAFVQVALGIIRQPQNTGNWKLVQDYRTMKVSKGSGRAIIALTRKVARIIFAMLNNRQAFNPELVAKCE

SEQ ID NO: 242853 - protein, 418 aa, unidentified
MLTAQWFVGIDWASQAHEVRILDREGRVVEEREVPHTAMALQAFVDALLERAQGDPAQVAIGIEAPRGALVDLCVERGFAVYAINPKQLDRFRDRFTAAGAKDDSRDALVIGDSLRTDPQAFRRVRLDDPLVIQLREWSRADEDLGEQLTRITNQLRDLVYRIAPGLLVMCPAADEPWFWTLLQAAPTPADQRRLSRRRLERMLRDHRIRRLDATQLREVLQQPSVYTAPGVVDAVAAHIQLVVARVELIAAQRREAERQLTRLLDALAAEAPSTGDQREHSDVAIVRSMPGIGTRVAARMLAEASQPLVDRAYHVLRTWTGVAPVTKQSGRRRTVVMRYACNMRLRAAAYHWARTGAQRDPGSRAYYATLRGRGHTHGRALRGVADRLLRILCRLLERGELFDPAHGQQLTVAVAGA

SEQ ID NO: 242854 - protein, 295 aa, unidentified
MDTIGLDLHKRESQLCVGHADGTVTEQRIVTSRERFTALFAAQPPARVLLEASTESEWVACHLESLGHTVIVADPNYAPMYATRSRRVKTDQRDARTLMEACRAGTYRPAHRLSAPRRHVRAELAVRDAVVRTRTRYVALAKALVRRDGLRVPSSAAERVGVHLQALPASPALAAELAPLVTLLPVLNATIAAADQRVAALEQTDPSVALLMTAPGIGAVTASALVATIDDITRFASAHQFEAYLGVVPGERSSGEQRRVGPITKAGNRRARWLLVAAVPSLIVARAAGWLEWLG

SEQ ID NO: 242855 - protein, 427 aa, unidentified
MTDQLQHKAYDSWVAIDIAKDYNVVMVELTDGKTRRFRMANSGKDHDRLIEVIRELPQPCHIGFEATGNYHRPLAYRLLTEGFDVSLISSLASARYREAIFNSWDKNDPKDAGILLELLKRGIVQTYVEPMRSGYHDIQELSKTYSNITLARTRLQHSILTHYLPLYFPEMAKFWCSTRSAWWINYLLHFPTPASVTQHNEQAFCQIASPIIGRKMNKQAKLLELYEAAQHSIGLPIAPDSLACQTFQLQLKRYQELTNQRQQLEQQAEATLSTHPDYCLLKTVPGIGPIVAMTILAEGGDLRRFHHHRQFLKYCGLDLAKNQSGNFRGQDKLSKRGNARLRLALYMASLHAIRQTENSFRNKFHRYTQATPKDADCKRKAMTAVMAKMARVVHALIKSGTPYQGYFEVSPSGSIPLSRAVGATRTP

SEQ ID NO: 242856 - protein, 352 aa, unidentified
MEIIGLDLHKRETQLCRQQPDGHIVDERIPTSRVRFTQTFGGVAPARILLEASTESEWVATHLEQLGHTVIVADPNFAPMYATRSRRIKTDKRDARALMQACALGAYRPAYRLSAPRVHARAALAVRDTLVRTRARMITLIKTLVRRDGLRVPTGTSRTVVQRVATLELATTAPALGAELAPLLAMLPGLNAQIATLDATLAAVAADDPVVARLATAPGVGVVTAVAVVATLDDITRFRSAHAVEAYLGLVPSEDSSADRRHLGHITKAGNARARWLLVEAGWRILRSKQPEMAALRAWGRAIAARRGARIAAVAVARRLAGVLYAMWRDAVPYDATKLQRRARRAGAPPVP

SEQ ID NO: 242857 - protein, 351 aa, unidentified
MNEITTVGVDLAKELIVVCAGDAVGRTLFFRQFGCAGFAGWMANLPPCTVGMEACSSAHHWARVLAGHGHRPKLMAAEFVKPFRKSQGAKNDRNDAQAILSAVREPNMRFVSVKSLEQQSILACHRMREGWHAERTALLNRTRGLLAEFGIWLARSSAALYRALPRLSQEETVPARVRALLGQAHEHLRQIDAQISHCEAQIRLHAKQSECAQRLTAITGIGPITASAVVATVANARDFRNGRQMAAWTGLVPRQSSSGGKERLGSITRRGDTYLRALLTQGARSALQAALMRAPERRSRLEHWMVELRQRVGYHKTLVAIANKHARICWAILAKGEEYDPQAWQRHALAA

SEQ ID NO: 242858 - protein, 429 aa, unidentified
MNNFINNFVVGVDLSSKSSVITILMPGGEIYGKKLNITNDLKGFTKLLTTLKEIEKQFSKRPEIFMESTGLYHIPLYNYFSKNHYKCYVINPIHTKNFAKQSIRKVKNDKVDSLRIAQLAQSPMFSTESVFDEKTFLLKKLCREYDSLVSNSAQYKKKVISLLNLVFPKFNEVFGDIFGSVSLAILFKYPTYVDFLSASKLDVITLITSTVHHSTEWADKRYNLLFNIAKEAELLKLDLDYLGTEVVCFINLLNSFKSAINKLKEKILEFSSNIPEFKENVELLCSHPEVGQISSISLLAEIGDIKNFSSAKKLVAFLGVDTSVSQSGDFTSTHNKLTKRGSNLARKILYNLSIASIKTLRNGVPANSVLLAYYKKLTTSKPKKIAICAIMHKLINHFFAILRDKKAFELRLPETHKKLYLERHLQIVI

SEQ ID NO: 242859 - protein, 410 aa, unidentified
MEVIVERPAALDVHKAQVTACVRSPGSGAARAQEVAEFSTTVRGLLTLRDWLKAHRVTQVAMEATGVYWKPVWAVLEDDFELLLVNARHVKQVPGRKTDVSDAAWLCQLLEAGLLKASFVPPKPIRALRNLTRYRKAQVAERQREANRLHKALEDTGIKLDCVASDILGVSGRAMLEALVKGTTDPAVLAELARGRLRAKLGALREALEGRFEPLHALLIGQILAHLDFLDEAIDHLSEAIEEQLRPFGSAVELLRSVDGIERRTAENVIAEIGVDMSCFPSAGHLASWAGQCPGNDQSAGKRRSGRTRKGSKWLDEALKQAAMAAIRTNDSYLQALYRRKKSQLGHGRALGAVKHSIICACWHILTTGELYRDLGGDYFTRRNPERQTRRLVAQLERLGHDVTLQKVAA

SEQ ID NO: 242860 - protein, 409 aa, unidentified
MRYYLGVDWADQTHAVWVVDERGTKVAMRTVAHTAEGLTEWGRELNEWRAQGIELWVAIERPEGRVVDFLLDHGVRVYAVNPKTLDRARDRFRQSAAKSDPFDARVLADFLRTDHMHLRAVQPSSEAAQELKLLTDDYQRQIRQQTRLVNQLTTTLKAYYPRALEVAELTTTLAREFLQAYPTPASLTALTARQWQRWARAHRLSEARTQELWTVLQRPQLPVPPHVVRAKARLMQSLVAQLTVVLEGVDAYREAIEDFFAQLPAAQWIRTLPIGDHGITAPTLWARLGDAPGRWESFRHLQAQAGTVPVTIRSGKQQVVRFRFACDKSLRYIIDHVAFLSLRWSEWAPAYYAGQRARGHSYRQALRALSAKWLKIIFVMWERQIPYDEQYHLAMMTRQQLRQRQEKVA

SEQ ID NO: 242861 - protein, 397 aa, unidentified
MIAVGIDISKAKSTVAVIDSDGTVLASPFTMAHTQPEMEAFVTYLKGLGEPTTILMEYTGHYHYPVLKKLQGEGFPVCIVNPYQMKKYGDVEIHKAKTDKKDALRIATYALEKSYKLVPYSSMEQKYEDLKFLSRQYSQRITYVAKLKVQLIALLDQTMPGITRILPLNSRNPEKCALLLFIKRFKSFDEIHRIGKARFLASYDVLAKKTSERSASSKGLSIYELAVDSITTRGEDPYIWLSQNQCVDLLSTTQNAADEIISQMRNIAETIPEYKVLRAMRGVGDRLGPIILAEIGDIRRFHSGKALNSYAGNDAPPYQSGQFESRNRHISKRGSSALRKACYEVMQALKLTKPQDDPVYLFMLKKEQEGKPFNVAKMAGVNKFLRIYYARAMELYK

SEQ ID NO: 242862 - protein, 336 aa, unidentified
MIHVGVDLHQRFCYVTAMKATGEVIVHESVANQAESLQRLLRSLPEPAQVVVEACGFWPAFERCIRSEAARVVMVHPQRVKAIASARLKNDKVDSATLAHLSRCDLLPEAWMADPATQQMRLQVRLRIALGRQRARSKNLLQGVLHQEGMRRPVSDVFGRQGRQWLRQIGLSPAARVAVDTHLRVIDVLDQLIAEQERALARQATEDARARWLQTVPGVGAYSAMVILAEIGDIARFRDKKSLASYAGLVPRVRESAGKRSYGGISRAGSETLRWILLQVAQVAARHSPAACAWYQRLRRRKRPQVAKVALARKLLNCMWALLHHGVCYDDQIFAA

SEQ ID NO: 242863 - protein, 417 aa, unidentified
MSPEHSIDIFLGLDVGKSEHHACALDRDGNKVFDKPLPQLESELAGVFHQLQKLGTVLVIVDQPNTIGALPIAVARDCGCEVGYLPGLAMRKAADLYPGRAKTDKRDAFIIADTARTMPHTLRAVDRNDEVLSALKMLSGFDDDIARDCTRTVNRLRSVLTQIYPSLERVFAGSTLTRTPILELLIHYKGPQGLKRAGYQRVLNWMIKRTRKDPTPLVDDIFTALKAQTVTVPGSDAAELVIPQLAANIQALKEQRNTIAEQVEEMLADFPLCEVLMSMPGVGIKTAAQILLAIGDGSDFASAGHLAAYAGIAPVTRRSGSSIRGEFPARSGNKRLKNALFYSAFAVIRSHEPSRRYYERKRAEGKRHNAAVICLARRRCNVIYAMLKNKEFFGLRVKMCVWLGVSRGLDLAFLNAD

SEQ ID NO: 242864 - protein, 491 aa, unidentified
MNSIFQRSNPAIEKLFAAAGSPKKVMCIPIDYAKRQHTALVCNGNGAQLRGPFHIHNNPAGVAFMEEVVAGLCRKHAIRRKHVFFGGEDCSAIAFNFIHALLQEGYLGIGLNARDAAAERENQVASTDKLDLLGIASLLVNKKRGRTLSAEYGDARVLRELTHHRAALVKARTASAYRLHHLVDQLLPGFLDEKQSGLTPFSKPSLWVMSQSFSPKQILARKSDVLAEKLRLFMVQNAEEKVARLKSLARSVLPPPAALCATLQINMGHEVSVYEHMEECIHDVEIAIAHTLAPTPGAMLTTVPGIGITLAAELYAELGDPNRERCLKRLSSYAGLVARLKQTGGPDKEAQTRGRSRRACVPLKRCVMDIALKVGQYGHDELKADYQRRQAQGQDVRLTMGRRMLRICSHLIRKKDFFVPPSLLRDSEYDVRRDYYARAWDKILIKWRDRSAIKQALAEGMPLEQWRLTLNEMYNLNLSRLSPQYDRLRAR

SEQ ID NO: 242865 - protein, 352 aa, unidentified
MIIIGVDFHPEFQQIASVDTDSGEFQEKRLAHRDEAENFYRALAGHKVRLGMEASGHARWFERLVAELQFELWIGDAAEIRTRRVRKQKTDRQDAQLILRLLVEDRFPKIWVPSWENRDLRQLLWHRHRMVQARTRIMNQLQAVALNEGLHCKKRLWREHGRQQLESFRLAPWASRRRRDLLELLDRLNPTIAELSQAIEQEVEKCPEAQRLRTHPGVGALTALAFVLIIGEADRFQCGKQVASYLGLVPLEDSSGNRRRLGHITKQGSSMMRFLLVEAAQVTVRSVPEWRSKYLHLMMRRGRKTAKVAMARKLAVRLYWMMRQGWDYPQWSKFGSHAGQPGHRHGVQSNTE

SEQ ID NO: 242866 - protein, 341 aa, unidentified
MEHVAIDLGTRESQICVRAEDGTILAEDRCGTGSLKKYLARRPPSRVVMETCAEAFSVAEAAKSLGHQVEVVPATLVRALGVGSRGLKTDVRDARNLSEVSCRMSRLPSVHVPGPVSRERKAMCGLRENLVETRTKLVNGVRGWLRSEGLGTPKVGHPESFPLRVKEHVARREKELPIWVARNLQVIMASNEQIGDADKELGRLARTDPICRRLMTVPGVGPVTAIRFASAVDEVSRFQQAHTLESYLGLTPGEHSSGSQKRTTGITKAGSPKLRWALIHAAWAAWRHRRTDPMVVWALKIQERRGKKIAVVALARKMAGILYAIWRDGSVYDPRHEQRTE

SEQ ID NO: 242867 - protein, 410 aa, unidentified
MNVIYDRVCGLDVHRDTVVACVRVPGEGRERKAVITTFGTKAVDLLALRDWLEQWQVSHVAMESTGEYWKPVYWILEEGFKVLLVNAAHIKNVPGRKTDAQDGSWIAQLLECGLLRGSFVPPRPIREIRDLTRYRKRLIQQRTEEVLRLHGVLQRAGIKLSSVARNIMGVSGRAMLDALVEGKQDAAAMSELARGALRGKIPLLQKALQGNFTAHHGLMVSHMLGHIDYLEETIAALSKEVEHKLEPFRTERELLKTIPGFQNRTAEMVIGEIGVNMDQFPTSGHLASLMGVCPGNNRSAGKRKPEKIRRGGRWLKPALQEAAWAAVKLNDSYLSARYHRLVPHKGKKKAIIAVCHSMLIAAYYILQKRVSYNDLGADFFLRRNQQAIQRRCLRQLSELGYEVQLNPKAA

SEQ ID NO: 242868 - protein, 551 aa, unidentified
MSPRTSSIATTPTRKRGGSSAVTPAAASGSIGRPAGNGRAGRRSGLKSDSGKEPVRRLRKKTEPAPKVGRARTSPVVKHAAVSTKVAVLPPKGLSTFETPTRSTAHKLRGVKEGTAMKKVVAPEPVVQVAKPNSEPRKPKTRWPQGQVPNLAAHADAAETPALQRCPATSSSAIAATTRNIELLSPIARFVGLDIGKRTEFCEVRQERVTTRATVSSEKQLEELLEPSTGRARVVLEACREAWYLYDLLTGWGHEVWVVDTTRVRQLGIGQHKRKNDRIDAEVLARASESGRVPRAHVLSHASQRLRMELGVRRALVDTRAHYVTSIRSMLRSEGLIVASCVTADFLRKLKAVSLPSAVAEVIKPLVVALEAIDPQIEKCDRQLEEHCSGMPVMELLSSRPGVGKVVAAAYVSVIDNPGRFRKAHQVEAYLGLVPSESTSGKRKVGAITKQGNAYLRGVLVQAAWSVMRGRRSDPLKSWGQAIAKKRGKRVAVVAVARRLAGILWAMWRDNTRYDPALLGQASARGKRKEAQQTSQTAGAIEVAADSARQA

SEQ ID NO: 242869 - protein, 363 aa, unidentified
MVVLGVDTHKRTHTTVATDELGRKQDQRTLPATDTGHQRLLVWARENYPGPAEQRLWAIEDCRHVSGRLERALLAAGERVVRVPAHLTAQARRDARTRGKSDPIDALAVARAALREPDLPVARHDQASRELKLLVDHRDQLVNRRTEIINRLRWRLHELDPELVVPDRTLHRTSTQKRLIAALATAQRVNAAAAAGLELQRQLTLDELNEVVQLTHRADELEKQISARSRDQAPELLAIPGCGALTAAKLIGETADVRRFRSEDSFAAHAGTAPIPVSSGNRQRLRLCRGGNRQLNLALHRIALTQIRLSGRGHDYYQRKQTEGHTKKEALRALKRKIARAVYTALRLDATRRSTPTSSVVLT

SEQ ID NO: 242870 - protein, 345 aa, unidentified
MTIVEARPITGGVDTHAGTHVAAALDSIGGLLGVQEFPVTPAGYARLLGWLGGFGTVALVGIEGTGSYGAGLARHITAAGIRVVEVDRSDRQDRRRQGKSDPLDAVSAARAAQSGRACGAPKGRDGAVEAIRALMVAKRSARSERTQTINQARSLIVTGPDDLRARFTGHTVTALVSELAALRPRPGAVVGYATRIALRELGRRAEFLDGQLERLDELIVPLVTARAPGLLALHGIGPDTAALLLIAAGDHPARLRSEAAWAHLCAVAPIPASSGKVTRHRLNPGGNREANHALWRIVITRMSSHPPTRAYVERRTAEGLSKKEIIRCLKRYVAREVYRHLRPAA

SEQ ID NO: 242871 - protein, 370 aa, unidentified
MKMSIGVDLHKTQFTVCCLSEDRRVQELGIYPTTDRGYGAFIMKMSRWGEDGYEVTAAVESTGNTRYFRNRLVTAGIEVKIVNTLKFKIVNESVKKTDKHDSRTLAEFLEKDMLPESILCSQESEDIRRLLKSRSVLVKALVSLKNQVHGLLLGYGIESRRGQLQSKKERQRILDGLADQRSYGNAARAVGPLLGTIDQIASQVKELEGVLSAFVSEDGDVALLQTIPGVGLITAATIRAYTDDINRYESAKKYAAHAGLAPWVQNSNTTIRHGHITKRGPVELRTAFVQMVMGMLRLQNKTDGYWLMRKYHLMKEYKGTGKSIIATARKMSTMVYAILKERQPFDPSRMHPNPKYFEMSKAARRYALAV

SEQ ID NO: 242872 - protein, 394 aa, unidentified
MPELFVGIDVAKDTSSAQGIDSNGNGRFSLTFPMDSEGFMQLWKAIAAHSKDLSDVTAAVESTACYHINLYSFLTARGIAAVVINPLLISNFTKLSLRKTKTDKKDAMSIAQFLLAHEASISQLAVSQDLQDFRDIARERESAGNMLTVHKVEIKRLLQSTFPELERIGNLSTRVIQDFIAEFPSARLVKMAKPKAIQKILQRKWVETKLTYTAEDLIRAAKQSVATISPAKELLLQGKVRTLQHLQERYEGLTKILTEYCKASMLEDFEIMTSIDGINKRTATTFLAEVGCIGNYASLKKLIAFAGIDPMVYQSGKFEGSSRISRRGNRHLRRVIWLMTTCVIQHNTTFKASYMKKRGEGQPFKKAVFATAHKLIRVIFAMLSQKTMFMEACR

SEQ ID NO: 242873 - protein, 428 aa, unidentified
MNVEESIRLKAFRQLKKEIRGSKEYLIVGIDVAKEKHHAFFGTATGKTLLRRLIFENSIDGFEKLHARMEAIKVDHALEKVVFGLEPTANYHKPLAEYLIRCGHNVVLVSGSAVAKNRELLDGRWDKHDTKDSANVADLISQGKCLYYDYPSMPLRDLRNLLSLKRRLKKQEHGTRIRIRNHLLAQYFPEFDRYFGKGCSESLPIVKWCLNPSMISGMGYEEFVQLVAPRIKTMGQEKRLKSIWRMAVDSIGCEVGQALDFEAKLMVEDLQQIKDSIRAVDEHIEDICLGFPEYSYLLTIPGFGPDVSSKVLGAIGNPSRFDNGKQVLKLAGYDLGANRSGKTSDSAVPVISKRGKAYLRYALYQAAFIASTSNRYFIIYYTNKLRGREREKGIKTKMKVKLAAKMLIIAWTLMKKKEPFDPEYLNID

SEQ ID NO: 242874 - protein, 362 aa, unidentified
MEYFTGLDVSVDETAICVVGDDGKVAFETAVETDPAAIAAALRPYADRMRRVGHEAGSLSPWLHTELLAEGVPAICLETRHVRAALSAQRNKTDAADALGIAHIMRTGWFRQAHIKTEACYRIRLLLVQRRNLKRKFLDLENAIRHSLKVFGIKLGKVSRGNMEKAVRESVAGDAMTAGLMDCMLRARAALWTEYLTLNKLVVQIAMRDELCRRFMAIPGVGPVTALSFSSAIDDPNRFRRSRNVAAYFGLTSKRWQSGSSIDVQGRISKAGDPDVRRALYEAASAMLTRFKGRDMIKAWGLKLAKTKCHAKARIAVARKLAVVMHAMWRDGTFYVGDPAAPSHDVDASNAAKLRKLCLANS

SEQ ID NO: 242875 - protein, 348 aa, unidentified
MSIVGGFDVHRHQLTFDYLDAATGEVRRGQVRPADRLALRAWLKRFAGRDDVAFALEGCTGWRFVAEELTAAGVEVHLAEPADTAAARGRKKRAKTDRADARLLRELLAEGRLPVSWIPPDHVLEIRTLGRLYCALMDQRRAWQQRIHAQLYHQGVPPVPGLLTGHGRAELETAALSAAGRQAIEVALAAIDSLSAQIQPLRAQLIAAAKAQPGCRALNRLYGVGWLCAVIIWAELGDCRRFARSDQAVRYTGLDITVYSSDVKRSPGRLARQGSPELRWALYEAAKCASRRSSPDYGYYASTAARLGGKRPTLSVARKLARRAYHILAELGDTAFAPSMPTPLETTA

SEQ ID NO: 242876 - protein, 381 aa, unidentified
MKSVSVNPKVSVNGLILGIDLGKYKSVVCAYEPAEPSWQISSFTTNREELVKVLQKYRPRVIVIEACALCGWVRDLCAERKMPCQVANTSSEAWKFKHTKRKTDKDDALRLAQLEALGQLPTTTIPPKPVREWRALIAFRQKLVGRRTAVQNRLRSILVGQGLTAPRGAKAWSEPGLKGIGQFARPLAECGPEDLWRGMLDLALTDYRQIGALVVQAEKRLDALGKVNDNVKRLQTIDGVGPRTAEVVTAYLHEPKRFQTGKQVSAYAGMVPRQYQSGETDHRGRISKRGPALLRKLLVECAWCLLRYNAWARSVWQRLTRNGKVRRKQAVVALARKLLVRCWAMLRDGTTWREDTGDAGCVSPGQPAGVSPRRKVETAPA

SEQ ID NO: 242877 - protein, 393 aa, unidentified
MDYIGIDIGKNNHVASMLDASRKTVFKAFKFANTREGAQSLLEKIQCHAADRTQVEIGMEATGHYWLALYSFLFDAGYVLHVINPIQTDGWRKGVEIRKRKTDDIDSLLIADLIRYGDFVETKRTDEGLLSLRTLTRFRSYLVDSIADLKRKVICVLDQVFPEYESVFSKVFGTTSKEVLLTYSTPAELETVSVEQLTELLASLSRQKCGAEHAQRLSQAAAHSFGVTFCRDAFTFQLRALLNQMNYIEQQVADTERQIKAIMDTLASPITSITGFGPVLGAVVLGELGDISRFDSGSKLVAYAGIDASVSQSGQYESINNRMSKRGSPYLRRALYQAAMVAAFHDPELTAFYQKKRAEGKHHNVCIGAVARKLCYIIFTILKQNRPYVKRQP

SEQ ID NO: 242878 - protein, 404 aa, unidentified
MTKNHILGLDIAQNSAVTQLDRADGTKCWRGTLPTSQAGWQQLEKILAEHGARLPDTLVLLEATGVYHLPWAERLHQAGAEVYVLNPLLAARLQSAANALREHKTDSVDVHRVCEIGRLYAAELARFRYQPEPARQGLKQLDHARRKLRATLTNLKKSVQSHLELVFPALLKAKIGPCTARASAILEKAPTAGAWRALPEAERQKLAGVKQADLDQACADTLADEALAQACAPAVHALLSAQQALAEQLRRCDAQIAPRLPRERVALITSLPGFGERTAAVMATYLPASFEGWGPRKKIVPRVQALFGLDPRLRQSGKWTGKVKISKRGIGAGRTALFQAAFCSLSHDEEMAAYYALLRTGDGRGRRSKTHKEAMVDVMRKQVRRLVAVLCANQPYGKKSHKAA

SEQ ID NO: 242879 - protein, 328 aa, unidentified
MIMLGIDVSKTKIDCCIFPQGLTGKRKNKIFTNTESGFGSLLKWLVTLKIEPDQVTAIMEATSVYHENLGYYLYDAGVKVCVANPSRVRAFAKGMSMLNKTDKADSEALSRYGYTAKLIIWQPEPENVRLLKALLGRRDVYLGSLLQEKNRLEKAQSTHTSVVVIKLLEENIEYLNQQLEHIDKLINNHIDQDPTLKQDLKLLQTIPSIGERSGLLLLGLFHSHKFEKASQAAAYVGLVPVHQLSGSSVNKQSHLSKAGDSKIRSVLYMSALTAIKYNPHIEALYQRLLSQGKNKMCALGAAMRKLIHLCYGVLKHQTAYQRDYLLVE

SEQ ID NO: 242880 - protein, 343 aa, unidentified
MDYFAGLDVSVKETSVCMVDDTGKIVREVKVASEPEALLAVLRNPAYHFKRIGLEAGPLSQWLCSALAEAELPVVCVETRHMQAVLKAQINKTDRNDARGIAQMMRVGLYRPVHVKTLRSQKLRMLLTHRKLLQSKAIAIENDLRGTLRNFGLKVGMVGTVKFEGRIKELVENLPDLAILVEPLLIVRRALREQLVILHRRLLAIVRDDAVCRRLMTTPGVGPVVALTYRATVDVPARFRKSKSVGAVFGLTCAKYQSGQIDRSGRISRCGDEMMRVMLYEAAQSMLRSKKWSWLKAWAMQIARRRGMKKAIVALARRLAVIMHRIWVDGTEFRWTREAVTAA

SEQ ID NO: 242881 - protein, 351 aa, unidentified
MLIVGCDYHPSFQQIAWVDTLSGECGERSLLHSTGEAERFYRNLKEQGVKVRVGIEATGHSRWFERLLMELEYELWVGDAAEIKAKRVRKQKNDREDARLLRTLLVENRFPRVWLADQLNRDLRQLLWHRHRLVQMRTRVMNQLQAVALNEGVQRKKGLWSQAGRAQLEAFQLLPWAARRREDLLKLLDGLTPRIQALTAEVNKQAEQYPEAQRLMTHPGVGPLTALAYVLIIGSPDRFRCGKQIGCYVGLIPSEESSANRQRLGHITKEGNSLLRFLLLEAAQAAVRSDVDWRREFLHLTMRRGRQIAVVALARKLAVGLYWMWRNGRDYQKSLKFSSHVGQPGTAYGVK

SEQ ID NO: 242882 - protein, 380 aa, unidentified
MYKCKRKSRHGVQEAELGQRLIQSQTQGGSSEQYMYYIGLDVHKKTISYCVKHGGGEVYAEGVVNASRGALDGWLKTLPQPWTGAMEATMFTGWIYDYLRPHAAALKVGHPLMLRAIACSKKKNDRVDAGKIADLLRCDLLPESYMAPSALRERRRALRYRNLLVRQTVQMKNKLAGLLMETGVTYNKEKLHQKRYFAELLSHNAEVEENAKPLLKIGRETIERLSQTERALVRTLERDPLLAARLQRLISIPGVGIVTALSWALEMGEVSRFASLKHAVSYCGLCSGENSSAGMQKRSPISKQRNKHLQTVLIEAAKLAPRWNSDLALLYEKEKQRGNHNRATLAVARKIVAYLLAVDRREQPFQGGKKEKAPLAQTAA

SEQ ID NO: 242883 - protein, 407 aa, unidentified
MDLLKTVFGIDVSSRKSNVCIMVNGQKVNDYAISNDMVGFNWLLGDLKQVTKPQIIFEATGVYSRRLQAFLDMHELRYVMMNPLEAKRKTKDDLHQNKTDKLDALYLAKLQSEHPQRLAYVQNKEYQELMANNRIYEQASHDLITNKNRLHKAVQLTFPEIEHLLANPRGKNYWSIALRFPHPDIVLETKEADIIDFLKGLSGIGKKRANDITQNLIRLAKVACPAVKKNSAHIRGLKMAINNILSAEEECQTALQEMAKLAPKRDLEILTSIPGIGENTALRIISELGDIRRFNNPSQLNAFVGVDPQVYESGNLTAHLSISKRGTAIGRKVLYLTINQIQSAKKVGNPCHIADYYEKRKRSSETASHKKAAIASIHKLLRTIFALIKNDQLYSYDVAKHNQRLLS

SEQ ID NO: 242884 - protein, 343 aa, unidentified
MEAITTIGLDIAKSVFQVHGVDADGKVALRRQLKRRYVLAFFQKLPPCLVGIEACASSHHWSRELQALGHTVRLMPPAYVKPYVKRQKNDAADAEAICEAVTRPNMRFVPTKTPEQQSCLTLHRTRHLFIRQQTAVINSIRAYLAEFGIVAPVGRNGVERLLEVVADVNDTRLPEIARACVAALGTQLLALKAQILAFDRRIMAWHRSNETSKRLDAIPGVGPALATALVASIADPKAFRSGRDFSAWIGLVPKQNSSGGKDKLGSISKQGDRYLRSLFTTGALAVIRYAKLHGTKHRPWLTALLARRPTKVAAIALANKIARMVWAMMVRGERYKEPVALAA

SEQ ID NO: 242885 - protein, 385 aa, unidentified
MKNIYSNVACGGMDVHYKFSAVTFRDEAGRVVRRERLEHPQRCQLREHLNRWPKGLPIVLEASFGWGWLSDLLSEAGLEPHLSNCYKLEQMRKARGWVKTNKKDADMLSLLPFEPSDWWKVWRAPLQVRNRREQMRFRGDLVGLQTKVKSRIHAIFHRHGMFHEFSDLFGCQGRKFLAELCLHNPTNLSPQALLALRGQVKLLDHLRQQLADVARILHKQLVKTPLIIRLKTIDGVGLILAHVLAAEIGRIERFRNHKTLASYSLLAPRADDTGQDDPGHSPLGRHLGHRGNRTLKWAFIEAAHGAVRSGGRWRVMFDRVTNGGRKDRNRGYIKVARELVKVVYAVWSKGLDYQPVPPARPGSDKKKSRSGMGQLCHPMVHALPA

SEQ ID NO: 242886 - protein, 347 aa, unidentified
MSFIGVDLHTTSFTVCRLEADGREAFETYQLAAADLERFCLTLDADDEIALEATGNSAWFRDEVISCVGRVAVVNPKQFGVIRKSVKKTDKNDARALAFFLSRDMLPETRVKTVQESELASLTHTRDLLVKQRTRLLNKIHALHVRHGIKLKKESLGSKRRLNALETERFSKREQAELGIVRDQALSLTDAIAEIDREIEAAAETMDGYDGLVSIKGIGPRAAAVFLSGIGNVDGFEDADKLAAYCGIVPRVSQSNETDNRGRITKRGNKLIRTTLVQCTLTAIRYSGYLNAFYRRIKARRGAGKAIIATARKLLKIIYDTLKNGWVFEDFPAFKITGQQNPAGQSS

SEQ ID NO: 242887 - protein, 469 aa, unidentified
MGKGSGNGTTRGDRRRNARRERLRALLPRDGAVIGIDLAEDKQALAVVDHDVRVLARKTVKVKAFRLGEALDWAVGQARAKGFTAVTVACEPTGPRWLQVQRLCAERGLPLVCIQPLISHIAREQQDYTTHKTDESDCVMIARLAIELHCYIPEELDETWAHLRHLGRRRAQLITADTASMQRIQDFLSVAWPTVSETCAQPLKSVTWLTALQVVTSRCGGQPGKLAVMGEEAFTALVRGAVAGWGGKKAWGTICRRIFAVLGDTEGVVAWSRRGLLRRVADELGDLQRTRAQLRATEADMVAVLDELGLSRLADIPALTAVGAAAILAETGDPRRYDGSSSLVKHAGMSPSDNASGAFAGQAHISRRGRPGLRLAVWRAVWPMLQYNPVMAAKYQAMTRAADAAAADAGPQHGTAAQAAARARRAKARVACAASLLRWIYCMAVHGTSWDPAVAGRCHDTPQNQAEAA

SEQ ID NO: 242888 - protein, 462 aa, unidentified
MKLYLGGDVSKGYADWVILSEKKQAVLDNFQLDDTYAGHCKLYAMLEAYFGKHRDLEVYAAVESTGGYENNWFSTLKSYQKVFNLKVARVNPAGVNFNRRAGLKRNVTDAISALSIAEYLINHPDNIKYDQDDQWKSLCRHWNFVEMQKQQRVQTINQLETILYSANPTLMRFKKDNLPNWLLELIIQYPTADTLAKARPEKLAKIPYLSLARAKTLVAEAKQSIASATDKNAEILVSQIARQIKSFDENIKSQMQLIERDLTCPEIEILKTFKGIDTISAIGLLLEIETIERFPTVKGFSCYFGLHPKFKQSGDKIIGVRMSKQGSKNMRKILFNIAKGAITYNPLITAVYEKKLSQGMAKMAAIGVCMHKILRIIYGMLKNKQAYNPLIDIQNCEKSKDKQQEKQQQENANIDKSRRYQEFDVKAPISRKQTKKRKEHDLSQCEITSQSTGSTCSSETKL

SEQ ID NO: 242889 - protein, 350 aa, unidentified
MVVVGTDVHKRSHTFVAADAVGKQLGQLTVEATTKGHHKALAWVRKSFPGEVVWAIEDCRHLSARLERDLLTAGQRVVRVPPKMMAMVRASARTRGKSDPIDALAVARAFLREPDLPVASHDAASRELKLLVDRRESLVNTRTRTINSLLWRVHELDPEHAPKPRSLDLAKHQQALRSWLLGLDGIVAELALDELDDVIALTLRIKGFHKRITKLVEKAAPTLLAMPGCGELTAAKLVGESAGITRFTDEAKFARHAGVAPIPVWSGNTAGRVRMTRSGNRQLNVVLHRIAITQIRLDGCLGKVYYEKKMAEGMSTTEALRCLKRRLARTVFNRLQADNKVAPDSQPAAA

SEQ ID NO: 242890 - protein, 346 aa, unidentified
MTTVTIGIDLGDKNHEVCVLDNAGEVIDRFMVGNTKIQLQKAFAKYAGALVAMETGTHSPWVSRVLVALGCKVLVGNARKLRAIWTSSQKSDTKDAEMLARIARLDPKLLYPIRHRSQKAQVDLEQIKARDLLVRLRTDLINHVRGVVKSLGERLSKCATPAFHKRVQKELPDDLRTALIPLLEQIGSLTGQIRAYDKQLEEVAETAYPETVCLRQIQGVGLITALAFILTLESPDRFDKSRAVGPHLGLTPRKDQSGSSDKQLRISKEGDVYLRRLLVSCAQYILGPFAQDSDLRRYGERLIARGGRAAKRKAVVAVARKLGILLHHLWSTGEVYQPLHNAKPAA

SEQ ID NO: 242891 - protein, 343 aa, unidentified
MSAYVALDVSLQSTSVHVVDEQGRCMWRGKCPTDVAALANTIRQHAPEVELVGLETGQLSTWLCHGLAGIGLPVVCMNARQAKAALSCRINKTDANDAEGLAQLLRTGFFRPVRVKSQGTMLVRTLLSARRQLVRTELDLANQIRGLLKTFGLFLPRGGGRLFEAAVRERLAGHNRLAMAIMPLLQVWRAIRTQVLELDRLAYAVAKRDPNCRRLMTAPGVGTITALAYVAAVERPEEFKNGRAVSAWVGLTPIRYQSGQIDIAGRISRQGDTHLRTYLYEAANTVLTRSRADTAIKRWGLALKARVGHKRAVVAVARKLAVVLHVMWAKAQPFRTDAITATA

SEQ ID NO: 242892 - protein, 414 aa, unidentified
MTKFSVYIGIDWANDKHDVCVQVANSSARKFEVIKHSPKSINEWITSLHKQYKGQIAVAIELSKGPIVYALQKFDFITIHPVNTSMLAQYRKAFSPSGAKDDPTDAELALDLMLRYPNKIKALKMDSESVRKLTYLVEQRRKLVDDKRRFSNRLIITLKEYYPHLLDWFSHRGSGIFCDFITRWPNLQKLKRARADTLKKFFGSYPGRTAAYSVKRIQSISEAEPLTLDNAVIESHQLLAVALANQLLVAVKVIKVFDREISELFNALPDAELYKSLPGTGPCLAPRLLVAIGENRSRFNSASEIQMYAVIAPVTVRSGQKSWIHWRYQCSKFTRQSFIEWATKSIRQSYWAEIYYQQQREKGNTHQAAVRSLAFKWIRIIYRCWKTKEPYNEAKYLKALSDRNSPLLFKEKAC

SEQ ID NO: 242893 - protein, 419 aa, unidentified
MTVVYPRCGGLDIHKRRVSACRIWQGEDGQAQVEQSSFGTYTEDLRRLAEWLAEREVYDVALEATGPYWRPVWNVLEAYGLRLTLANPAHIRAIPGHKTDRRDARWIADLHRHGLVPASFVPSQAQRRLRDLTRMRTKVTQDRSRVVNRLQGVLEDANVKLASVVSDVMGVSAQSMIRGLIGGQAEPTELADLARGSLRGKRSELALALDGNFTRHHGFLVHRLLMQERVLQQQERALEREIVRRLDQHQKQSVALWDTIPGVNETVATVLVAELGTRAEQFPDAQHAASWVAICPGNHESAGKQKSGKTRKGNCWLRAALVEAAWAAARSKGTYLSALYSRLLPRKGEKRALVAVAHSILVAAYQMLKTGEPYRDPGADYFDRLRPRHAANRLVKRLERLGYQVHLSALEQTQLSVSQ

SEQ ID NO: 242894 - protein, 345 aa, unidentified
MDEAYDGRQVVGMDLHRRRSVLVRMSMDGRKLETVRIENSPAALRRVLARCGQRPLVVLEATYGWYWAADVLAAAGAEVRLAHPLGVRAFSYRRVKNDERDAADLADLARMGRLPEAWIAPAGVRALREVIRYRHKLVGQRTSCKDQVHAVLAKLGVEVTHSDIFGRGGGLWLDQLVLPAPYAAKVASLRALIGVLDGEIARLGQQAADQLAAGKGYQAVRELDGIGPVLAAVICAEIGDVTRFGKPGQLCSWAGLTPRHYESDVKVIRGHCSKQGSRLLRWALCEAIQHQPEGTRPRRAKEAIIARRGNQARNIARTAAARVLLTQVFYALRDGYVRSAGRPAA

SEQ ID NO: 242895 - protein, 370 aa, unidentified
MQKILYIGLDVHKASISVTTAEEGRDGEVRFIGTIPNTPTDVAKLAKRLANEGRCLAFCYEAGGCGYGIYRQLIDLGHGCTVAAPTLIARKSGDRIKTDRRDSQKLALQHRFGDLTAVWVPDPVHEAIRDLVRARMDAVMQLMRARQQCLAFLLRRGRNYGPGKKNWTLRHRRWLATQAFEQTTHQIVFQDYVEAVWSAQDRRDQLEARISAMLSDWSMAPLVEALRTVRGIDLISSVIFVAAVGDLGRFESPRQLMAYLGLVPSEQSSGSRIRRGGITRAGNTEARRMLVEAAWSYRYQPRVSSGKTDVVERQPKPVRDIAWKAQVRLCGRYRKLAAAGKKPTVVVTAIARELSGFVWAIGNAVRSGVP

SEQ ID NO: 242896 - protein, 370 aa, unidentified
MGKRSMFVGMDVHKESIDISLAEEGRDGEVRHYGVIPGDLEAVAKVVRALRAPNRRLRFVYEAGPCGFGLHRYLTAQGEDCVVVNPSSMPKRSGDRIKTDRRDGDALARLHRAGELTAIYIPTPDDEALRDLVRAREDAVGLSTQAKHRLKAFLLRQGRRYSGRAGWTLPYRRWLADLSFPLAPQHIALQEYRDTIDETERRAERLTDQLRQLTPAWRWAPVVDALQALRGVSFVTAVGLVAEVGDMRRFTHPRELMAYLGLVPSEYSSGPSVRRGGITKAGNPHARRLLAEAAWAYQGTPRIGRQMLYRQEALPRSICDIAWKAQLRLTSRFRRLVARGKAKPKVATAVARELTGFIWAIAREVPAPPA

SEQ ID NO: 242897 - protein, 394 aa, unidentified
MFFIGIDVAKRSHQAAVTDISGNVIVKPFNFKNSSDGFTKFLSIVESTAIEKNDCTIGLESTGHYWYPLSFFLIENGFDVKVFNPIQTAAFREITIRKVKNDNLDSLLIADFTRFGRYSETYIPDENMLALKNLTRFRLSISDICGSLKKKVIAILDQVFPEYTGVFSDVFGKTSKQLLEQFSTPDEFMDISTTKLTNLLLKVSRGRNGREKAELIKTAAQSSIGISYALDAFSFELKQLLAQIEFMENQLSDVDAEMEKLLSQSEYAVITTISGIGPMLGSVIVSEIGDINRFENSSKLVAYAGLDASVKQSGEFNSSKNKISKRGSPYLRRALWMAAFMSLQCDPALYDYYSKLRARGKTHRCATTAVARKLCIIVWAIMKSKKPYSPVLKN

SEQ ID NO: 242898 - protein, 323 aa, unidentified
MSAEVFVGLDVSKDCLDLDVYPENAPCRFDNQERDIRQLVKYLQQLQPQLVVLEATGGYERAVVLALAEAQLPFAVVNPRQARAFALSKGLLAKTDQIDAGALAHFAEAIKPPPQQMPEAQVLELRALRARRAQLQEMMTQERNRRHLTPLPVRKQIDKHLAWLEKQVQELDDSSDELLRSSPLWLEQAALLQSVPGVGKGLTTTLLACLPELGHLNRKQIAALAGVAPFNRDSGRHKGQRCIWGGRAPIRSMLYMATLCATRHNPVIEAFYQRLLRAGKLRKVALVACMRKLLTILNCMMKNGTHWQTHITTTTTNIVTTTA

SEQ ID NO: 242899 - protein, 348 aa, unidentified
MTEIIRIGMDTSKSVFQLHGVDAAERVVLRKKLRRQDVLVFFAKLPPCRVGMEACGGSHYWARELQKLGHRVELIPPQYVKPYVLRGKHDAADAEAICEALSRPHLQRRLVPVKSAENQAALMLAGLRDRLVRQRTQLINTIRGYAAEFGLVAAKGPAKIAALLRRIEGEAAVPEPAQALFAGLAEEHARLEAQIKAIEARLMAWHRQDELSRRLAQIPSIGPIGACFLVLKAPDPQRFRSGRDFAAWIGLTPKNHTTAGKQRLGVITRAGDETLRSVLVVGATSVIRQVRRGTSRSAPPWLLALLARKPPKLAAVALANKVARIAWKLMVTGERYDPGRLAAAPATN

SEQ ID NO: 242900 - protein, 410 aa, unidentified
MEVLHRRCCGLDVHKDTAVACLRLVSDGKVTTEVRTFQTTTADLLRLSEWLAENECTHVAMEATGVYWKPVWHILDDGEFELILANAAHVKNVPGRKTDVNDAMWLAELLAHGLIRGSFVPDTQTQEMRTLLRTRKQLVRENSRHVLRVQKTLEDANIKLDSVLTDVMGKSGRAIIEALIAGETNPAKLASLADRRVKASQEELREALRGRVRKQHRFLLRLHLNQIDSLAAAIATVDAQVEENLGPFRTAVQQVVSIPGIKDLGAQAIVSEIGIDMTRFPSDAHLISWAGLCPRNDESAGKRRSNRLRKGAPWLKAMLVQCAWAAVKKKGSYLQAQFYRIKARRGPKKAIMAVAASILTAIYHMLKDGTMYQDLGSGHFNRQSKDQQKNRLVKRLADLGYAVEITPLAA

SEQ ID NO: 242901 - protein, 384 aa, unidentified
MQKPNDLNQSRTVLKQDSTLIAVIEMSLSSWLVAGIVPGVERQPLKKLAVDESALLKLLNRWREEAEKAGRRIERITVAFEAGRDGFWLARWLRARGIEAHVIHASSVAVSREHRRAKTDRLDTELLKRAFLGWLRGERDHCKMVAIPTTKDEDAKRPNRERQSLVGEQTRIVNRMKAALIRLGIRGFNPKLKKAAGRLEDLRTPEGEPIPPNTLAELHRDMERRRLVSDQIRQIEKARLERMEQAPGDGPHAMVRLIARVIGVGIETADMLVHEVLSRKLRDRRAVARYAGLTGAPDESGSKRREKGLAKAGNARVRGGMIQLAWRFLLFQKDSALAQWYRTRTEGGRNRKTIIVALARKLLIALWRLVTTGEVPAGVVLRAA

SEQ ID NO: 242902 - protein, 437 aa, unidentified
MIQAEIERCAGIDVGKKWLAVGVLVGPLDREPRAETRRYGTNVADLEQLRDWLQQQGITHVVMESTGSYWKPVFNILEETLTVYLANPQQVKPRKGHKTDNRDGHWLAHLLRHAMIQPSFIPPRPIRELRDLTRRRKKLIAAGSSEKNRIQKVLEDANVKLGNVLSDVFGVSGQRMREALLEGHAGPEEIARLAQRRARQKIPALVAALQKHRLSEHHRRMIRFRVEHMELLERQILRLDEEIATQIRQIGLARQWELLQSIPGVREDSAATILAETGADMQAFGDAAHISSWAGVCSGNNRSAGKNKSSPTNKGNPWLRGTLTECAQGAAKTKNCFLKEKFWRITAKHGGKRAAAVMAVAHNLLRLVFQVLSTGQPYQERSAGPLEPRQRERMIRHHIRRLGRLGIAVRGPEPAPRRPRRCTTITTKGIARLPASS

SEQ ID NO: 242903 - protein, 322 aa, unidentified
MSVSVLGIDIAKQKFDVALLIDGKTKHKTCKNSVEGFETLMIWLEKQGVQKVHACLEATGNYGEELAIYLHETGHMVSIVNPARIKGFGQSELIRTKTDKIDAALIARFCLAMKPGLWSPPSPKIRSLRALVRRVDSLIDMRTQEKNRISTAHESVSSLIKGHIDYLNKEIEKIRDQIADLIDQDPNLRNKKDLLVSIPAIGTATIPHILAELDDLGKFNNVRELVAFIGLAPRETLSGSSIKGKPRLCKIGHARLRKALYMPALVSIQCNPVMIAFYNRLKEKGKNGKVIVCAIMRKLVHLIFGILKSGKKYDPNYKPALA

SEQ ID NO: 242904 - protein, 387 aa, unidentified
MIYYVGVDISKYKHDFCIISNTGEVIVENLSFENNKKGFQSLLELLKPYNKSDVRIAFEATGHYSKNLELFLIDQGYSFMKMNPLVIHQFLKARSLRRTKTDKADSLAIANYLMSVPYQPNSDLLYNIFTLKSLCRSREQLIKERSKYQVLLTNELDLTFPELKPFFSNKISATLLFILEKYTNTEHISLMRDYDSLKSISHGNFSYAKFAKLKELAKNSVGHHDENTDLLISTYVSIIKTFNDKIDPIEKQISTIIKELNPRMLTIPGIGEISAATILAEYGDISNFSSPNKMLAFAGLEPSIIQSGTIESNGKMVKHGSGHLRYSIMNTAMIILRYSPTFYDYYLKKRSEGKCHRVALSHVCKKLLRVIYTLEKNNIDFNPSLLK

SEQ ID NO: 242905 - protein, 358 aa, unidentified
METQSSKLNFIGQNIYVGFDVHLKSWKVTVMTEKLIHKTFSQPPKPEILYQYLTKNFPGGIYHSAYEAGFCGYWIHNKLKLLGVNSMVVNPADIPTTDKEKVQKEDARDSRKIAKSLRSGDLTAIHVPSLKTLDDRTLMRTRSALVKDLARNKNRTKSFLYFHGIEIPASYSNQTVWSNRFIEWLTHIEISEKSGKDALHAIVGASTDLRTSVLRVTKQIHELSKTKEYQDQVTLLRSIPGIGLLTAMTILTELETINRFESFDKLCGFIGLIPSTHSSGDNEVVGDITRRGHSVLRSAIIESSWTAARLDPALTKSYHDYCKRMEPNKAIVRIAKKLLNRIRYVLKNKKIYVCAVVK

SEQ ID NO: 242906 - protein, 395 aa, unidentified
MFIVGIDVAKRSHEVCMITSDGQTVQRPFSIRNNCTGYNLMLEKIRKHTNIKSQIVFAMESTAHYWLALFTRLRKDGYHVILLNPIQTSAMRDMFIRKIKTDAKDSFIIAELIRFGRYAESNVAQDRLLALKELCRNRFYLVDMAGDLKRKLIALIDRVFPEYEAQFDTIFCKSSVALLKKYPTPQKLSNAHLDKLTELLWNSSNGHFGEWKARELRELARNSFGVEDCDGAYSTLILLMLDQIQSLSEKADALEKEIFRLFQSFDTTVTTIPGVGPIIGAVILSEVGDISRFSSADKLAAYIGVDPSVNQSGEFQAAHAHMSKRGSPYLRRCIWMASQVAVQRDPMFRAYYEKKAAEGLKYMTIIGHVTRKMTAVVFAILRDHKVYEPVLPTAA

SEQ ID NO: 242907 - protein, 272 aa, unidentified
MLDAREKVLSTGRFGTDRDGYKNLLAAGRRWPDRVWAVEGCEGVGRHIAQRLVADGEAVVDVPAKLSARARVFSTGQGRKTDATDAHSVAVVALRTPGLRDVQVDGSTVALRLLLDRRDGLGAARTLTVNRLHCLLVELIPGGAKTFLSAAQAKALLATVRPRDLVGKTRRKLAAELVSELVSIDKRIKAANTELRELVEATGSTLLELHGIGPSGAARLLGDIRDVARFQTRGHFASWNGTAPIDASSGEQNRHRLSRAGNRRINRVACRV

SEQ ID NO: 242908 - protein, 322 aa, unidentified
MHAFHLGIDVAKAKLDCALRLPDGKLRHKSLSNTPSGFAELMLFLSKHQALDVHVCMEATGIYWEAVAEFLSEQPGILVSVLNPFQIKAFAASRLTRTKTDKVDAALIALFCLERSPEPWLAPSPSERALRALVLRLDALQRMRTQESNRLLVARGTVQDGIAEHIQWLDTQSKQLMEQIRKLFDNDNDLDEKRRLLQSIPGLGERTVSVLLAFYAHPERFGNARQAAAFAGLDPRRHESGSSVCAKPRLSKIGHSFLRKALYMPAMVALYHTTWGRLFRERLAAAGKPPKLIIGAMMRKLVHVAFGVLRSAKPFDPAAHGA

SEQ ID NO: 242909 - protein, 339 aa, unidentified
MKYIGMDAHSTTCTFEVMDRGGRVLTRACVPTREGELLRFVDGVSGRKALAFEEGMLSQWLYILLKDHVDRLVPCKWEAARGPKTDRRDAHEIADLLRVGRLTPVFHGEGELMQIRALVSAYEDIVQDLTRAKNRYKALYRQLALPTKATDFYTNDENLRQLNNPMLEIIGGRLFTQVGVLEDLKLEYRKQFEQNVIRYKEIRLLTSIPGIGPVKANQIVGIVVSPYRFRRKYNFFSYAMLTKHDQQSGGKRYGRKRVHGRSILKGVFHGAVLNCLKSNNAVRRKYDALIERGLDHRKAKGAVSKKLAATVLGVWKSGKKYDDKLAERGLQQQSRQNTS

SEQ ID NO: 242910 - protein, 316 aa, unidentified
MTIFGCDISKDTVDSVLLSPHFVVLKRFCCANTVEELTKILQELKKDFSDLCVGCESTGIYHRTLVEACDVLGIPCKLLNPILTKEFNRSSIRKKKTDRDDAVVIAKLLAQGEGNIIHLEDCNDRLKAVVRSVRKIGDLSRSLLLHSRHAGKLLPDALPLYEHVQEELLTLQKALKKNAITMCDSPLRPLLESIPGIGAWSASVILAETRNFRCCRNADAFVAFAGLDPRVQQSGTTLNHNGRLTKRGSPHLRTAIFMAANVARIYDPELRAYYDKRKLQGQKFTAITCAVSRKLCYRIYAVVKRKTPYEVHKKQS

SEQ ID NO: 242911 - protein, 406 aa, unidentified
MELTTLHKRVIGLDVHQAQITACAIIEDEHGERHVEQRQFGTFKRDRKALAEWAAALKPDLVVMESTGIYWKSPYAALEAAGVRTLVVNAKHVKNVRGRKTDIGDAQWLATLARAGLLRGSFIPPAQLRELRLLSRQRQKLVGQLAAEKNRLHKVLTDGGIRLGVVVSDVHGAAARKMVKALIAGKSAPDVLELASKRFKASREELFDAVQGELTPSHRFVLDELMRHIEEIEARIARFDAKLLAEMHEQRNALALLQTLPGVDLIGAAMLLVEIGTDMDAFGSPDRLASWVGVCPGNNESAGKRKSGRAGKGNPYVRRLLCEFAHSARRTTCVFKSKFEALHIRRGHKRAIIAIAHKLLRTVFFMLKRGQCYRDSATDYEALAVKRNAPRWIKALKKFGLIDQPV

SEQ ID NO: 242912 - protein, 442 aa, unidentified
MKKAKLRLLNPNAAGIDVASEVHYVAVPPERCEQSVRSFGSFTDDIHDIAKWLIECNVDTVAMESTGIYWIQLYLILEEYGIEVFLVNARYIKNVTGRKSDVLDCQWIQELHSYGLLSASFQPDNITRELRTYMRHRKSLTESYSQQILHMQKAFEQMNIKLHNVLTDICGKSGQTIINAILNGEQDAEVLINFIDSKVKASKEDIIKSLRGIWREEHLFELKQAYELYLIFKAKIAECDHQIEKTLQKTEQGEDVKNTPEIKRQVYSKNRLLFNGTQYLYNILGIDITKVFGISELTAIEIISETGINMSKWKTKKHFTSWLNLAPNNRISGGKLLKPKKSKRKNKAGQAFLMAAFAVQRSDNWLGQYYRRMKTKNGPLVATKATARKLAIIFYEMLKNKKEFNPLPIESYLKTYNKNRIQFIEKQASMLGYRLTPVSDVS

SEQ ID NO: 242913 - protein, 453 aa, unidentified
MGKATTGDPPDLKMVNPSAAAIDIGSTMHMAAVNPGATDMPVRAFGTFTRDLHDLADWFRSCGVTSVAMESTGVYWIPAFEILEQHGFKVILVNARYAKNVPGRKTDVSDAGWLRQLHSYGLLRGSFRPEAEIATLRAYMRQRERLIEYAAAHIQHMQKALMEMNLQVHHVVSDITGATGMRIIRAIVAGERDPNVLASFRDVRCHSSVETISAALVGNDRAEHIFALTQSLELYDTYQALMADCDRKLEAAIAALSVKASGAIAPLPKARMKGKQVNAPSFDVRAALHGVVGVDLTQIHGLGPSLALKLIAECGTDLKAWPSAKHFTSWLCLAPGNKISGGKLLSSRTRRSSSRAAALLRLAAVTLGRSDTALGAFYRRLSARVGKQKAVTATARKIAVLFYNTLRFGMTYNDPGAAAYDERHRTRVLANLHRRARSLGYILSPTPDAEAVS

SEQ ID NO: 242914 - protein, 341 aa, unidentified
MKVSTLGIDLAKNVFQLHGVDHEGHTILRKKLTRAKFVQFVIQLEPCLIGMEACSSSHYFARLFTRYGHEVKLIPPQYVKPYVKTNKTDAADAEAICEAVTRPNMRFVQIKTEEQQAVLALHTERGILIRERIACANSLRATLAEFGITIAAGQSHLTRELPAILEDGENGLSPFVRTSIYRQSKHIRELEEQVKQAEEALASWYRTQEACQRMAKIPGVGMLTATYVVAAVGNARQFSTAKQFASWLGLTPKEHSSGGKQQLGGISKRGDGYFRYLLVHGARALTAWVNRNGAVEENSWLQGLLERKHYNVAVVAMAAKTARIMWSMLSHNTEYQPRQLA

SEQ ID NO: 242915 - protein, 383 aa, unidentified
MRIVCGLDVHKDSIYLCILRSTGEIFEKVFGVLTSLLEEMRDLMLTHHVQEVGMESTSIYWIPVWRILEPHFKLKLINPYFIKQLPEHKSDVKDAQWIAECMIKDLVRGSFVPPERIQQLRLYDRRISDLDDEIIRKLAKLDAAVQRCNIRLSNYVSNTDSVSYKSVIDKICDGVTDPKILVQEIHGRIINRHGKETIMASLKGCVTEADIDIMAQLKAEIDLAEAHKQKCMDKMQEICEKEYASQLANLQTIRGIKIRTATSLIAEIGTDMDHFETANHLASWAGLKPRNDQSNKTIKSRRITHGNRYLRRTIIQCTWGASRTKDCFFSRFSYHQTQIRKKNKMKVQVAIARKMLVCVWHILSKNVVYKDFNNKILTSETNG

SEQ ID NO: 242916 - protein, 385 aa, unidentified
MAPPRMPEAVIGLDVGKSSHWACVATRDGEILLSAPVANREGDLDSLFGRFPDALVVVDQSRNIGALALARAKAAGMSAAYLPGLAAHGAARLFAGDAKTDERDAMVIAETALGIPDALLPVGDPAPTVAAARALAAQRNFLTCENTRNKNRLRSILLESCPAFEALVDLSDGPQLRLMASLGGAWSVADAGPRRAAALTRGAARGKIEALVRSTASSTRPDASVVAAEDRAVRLLARRISENSAEIEAITAEISALLEGDDTYRCLLTVPGIGPKTASELAISIDIEDFPSHDRLASYCGLAPRNRQSGTSISSVTASRQGNKRLKNLLIFSCNCLTRTEGRWGDYYARCRERGMPHGKALKALARKRLKVIYAVMRDRVPYAA

SEQ ID NO: 242917 - protein, 355 aa, unidentified
MESITLLGIDLAKNVFQLHGVDELGRTKLKRTLRRKALVNFVAQLPACTIAMEACSGTHHFSRKFQQFGHEVKIISPQFVSPFVQSNKNDTADAEAICEAASRRNMRFVATKSVAQQDNQCLHRVRKRLVGNRTALTNETRSILGEFGLIFSKGRRSLEEGIKGLLNGSYPLEELSSEGLVLLQALYSELLELDNRIKDCDLKIEQIAMQPQCQRLLKIGGLGILSVTALAVALADPGQLKNGRNFAAWLGLVPKHVGTGGKNRILGISKRGNTNLRTLLIHGARAKLRGINRKFINGTKLDPLEDWAFRLCLRQGYNKATVALANKNSRIAWSISANKTQFDPKEAVALLKEAA

SEQ ID NO: 242918 - protein, 412 aa, unidentified
MRAVLKVGCGLDVHKRTVTACLLKTGARGKVTRETRTFQTTTVELLTLADWLTGNDCQHVAMESTGVYWKPVFNLLEGVCQEVLVVNAQHIKNVPGRKTDVKDAEWIADLLVHGLLSGSFVPPRPTRELRELTRYRKRLIQRRADECNRIQKLLEGGNIKLASVATDVLGTSGQAMLEALVEGETDATRMAELAKGRLRKKIPQLQQALTGVLSETQRWMLGEQLHQIRQLDQAIARLDGKIEALLRPFAKAIERLSEIPGVSRRVAEVLLAEIGTDMKRFPSARHLASWAGMCPGHRESAGKRQSGRTRQGNPWLRATLVEASWAASRTKETYLSAQYRNLARRRGTKRACMAVGHSILKIAYHLLADDETRYVDLGVHYLDLYQRDRLKHDLLRRLHSLGVKVTIEDQAA

SEQ ID NO: 242919 - protein, 424 aa, unidentified
MKVTYKTCCGVDVHKSFLVATIITTTGGIQPSYQKKRFSTFNNSILEFKHWLLENDCHDVCMESTGKYWVPVFNLLEDEINVTIANPKWVKAVKGNKDDTKDSKWIGDLFRLGLVKGSYIPCKKIRILREYTRYRYKLVSCRSSEKNRYQNALTVCNVALDSVVSDIFGKSSTSIIDYLLEQTDNSINHEEIASKLLRRLKSKEDAVIESIEGYQMTDPQKYRMRLVRAHMDYITAEINDVDREIEKLISSDPDYENAIQFLMTIPGVKRDSAITIISEIGIDMSQFCSSKRLCCWAGLVPGSNESGGKKKSVRITRAGVYLKPALVQCAHAAVKSEKSPYYKKKYESLMKRRGKKRAIVAIARMILTAIYQMLSTGEAWNPSDLYKIDMPEALLEKQKAKAIKQAMKLLQREGLYPPLEPIAS

SEQ ID NO: 242920 - protein, 411 aa, unidentified
MPFIGDDWAEGHHDVVAQDDAGKALARRRLPEGADGIARFHEMVASCLGEDAEPDPARVVVVIETDRGPWVKALAAAGYRVYPANPKQAARHKETIAVSGKKDDFFDAGALADMGRTRRHQMRELAADSDIAEAVKIAARAHQKLVWERTRHLLRMRSALREYFPAALEAYAGLSLTGPDTLELLRKAPDPASAARLTVTQVTAALRRAGRRGALDERARDIQAALRAPHLSQPAVIAEAHAASVQAGAAVIAALNEQCKVMEAKVSEFFRRHPDAGVYLSQPGIGDITGARILGEFGDAPGRYASAKARKNYAGTSPLTIQPGKKTVHARYIRNRHLIDALRAQALSALIASPGARACYDELRAHDTGHDDALRRVAGRLAGILHGCVKTSREYDETTAWSHRPEFPQAA

SEQ ID NO: 242921 - protein, 326 aa, unidentified
MEHELHYIGIDTAKEKLDVDVLRPDGRHRTKKFANTTKGHDELVSWLKGHKIDHAHICIEATGTYMEPVAECLYDAGYIVSVINPALGKAFAQSEGLRNKTDTVDARMLAEFCRQKRPVAWEAPPPLERALRALVVRHQALTDMHTQELNRTETAREVQRPSIDAHLLWLEAELKRLEKQIKDLTDDDPDMKHRRKLLESIPGIGEKTSAVLLAYIGLKDRFAHARQFAAFAGLTPRRYESGSSVRGASRMSKAGHVSLRRALYMPAMVATSKTEWGRAFRDRLAANGKKGKVILGAMMRKLAQVAYGVLKSGVPFDASRHNPVAA

SEQ ID NO: 242922 - protein, 324 aa, unidentified
MANRTMICAGIDTGKYKLDVAIDGSSEQLQVDNTPEGYKVLSDWLRQHRVKRVGIEASGAYEQAVVVELRRKRFVVVVFQPAQVWAYARFKGQRAKNDKIDAALIATCTAAVKKVHDAPDPRLLPFAQQLTMIDQIGEDIARLKNRLESCRNTRIQQVWQEDLARLEKRKRAELKALVAAIREHRDLAERLDLISSVNGAGLPTALAILVRMPEIGKITREQAAALAGLAPYDDDSGQRAGGRHIQGGRERLRRALYTAALPASMRWNPQLKELYNRLIAAGKEHKYALVACARKLLIFVNTVVARGTPWQNQTPQRNEVPATA

SEQ ID NO: 242923 - protein, 337 aa, unidentified
MHYIGLDVHSKNFAIAITDRDGRLLFEGQQPTSERNLRAVIATVSGAKVVALEETTVAAWVYRVLKPHAQRVIVCDPRRNELIAKSGHMTDAQAARQLADLARGKFIKPVHHPVDEGRQAFRELVQSYHQLSRELVRVKNQLKAKLRQQGIPCAGSDVYQPHQRAFWLAQVKHEDVRFQVAMMMDTVAHLTEQKIAYLQRLKQRAKAFPEIAAFQALAGIGLVHAATFAALVDEPQRFANKKRLWSYCGLGIAQRSSDGMSSPPHLNRNGNRLLKCVAKSAAQMAVRHDDNPFARQYQRLIANGVKSTNAQLTVARAIIATMYAMWRKGEAYIPREV

SEQ ID NO: 242924 - protein, 361 aa, unidentified
MYIAFELSNKKWKLGFSNGKKVRQITIDAGNLASLQQQIGLAKEKFSLTASGEVRSCYEAGRDGFWIHRYLLEQGINNVVIDSASIEVNRRKRQVKTDSVDVQAMLRLLMRYWGGESKVMSILRVPSVEDEDQRRLNRERGRLIKERGAHSARLKSLLVAHGVRLEINKGFLKQLSQQKSACGYELGEELKAELEREYERFRLVSEQTKLLEDTQKRRVKSADKGSLHQIQQLMRLKGVGWQSSWILVMEFFAWRDFNNRKEVGACAGLTPTPYSSGDSEREQGISKAGNRRVRSLMVELSWLWLRYQPKSALSSWFEKRYAHGGKRMRRIGIVAVARKLLIAIWRYLKDGLIPEGAIIEI

SEQ ID NO: 242925 - protein, 343 aa, unidentified
MQAVTTIGFDIAKSVFQVHGVDTVGQVIIRRQLKRRQVIGFFQKLPACLVGIEACASSHYWSRELQALGHNVRLMPPAYVRPYVKRQKNDMADAEAICEAVTRANMRFVPTKTAEQQSGLMLHRTRHLFMRQQTSVINAIRAHLAEFGIVAPVGRRGVEELLRVVADPSDKRLPEIVRACLAALGSQLLSLKKQILDFDRMIMAWHRSNQTSKRLNCIPGVGPLLSTALVASVADPKTFRSGRNFSAWIGLVPKQNSSGGRDKLGSISKQGDRYLRGLFVAGAFAVIRYAKIHGTKHRPWLTALLARRHTKVAAIALANKLARMAWAMMATGERYNYPASLKV

SEQ ID NO: 242926 - protein, 416 aa, unidentified
MSAQAPPSFERYLAVDLHKDYVVVGGVDGRQQVVLPPRRLTLDAWPAWARKYLSKTDALVVEATTNAWDFYDQVAPLVGRAVVANAGKVKLIAAAQVKTDKVDVLALARLLAAGFIPEVWVPPVPVRELRGLLAHRRRMVKVRTMLQNRLHSVLHRHHLVPPDGDPFLAGQRAWWNALPVSPTERLHVRHDLATLDQLGPQIAEVEAELERLSTREPWADEAPYLVQLPGCGLIVTMTLLAAIGDIGRFPTAKKLVGYAGLGSRVHDSGQTHRTGGITKSGRRDLRWALVEAAWRAVDSHPYWKEQYEHLTRRMEPNKAIVVIAHKLLIAVWHVLTERVADRHAAPELVAFKLMTWSWKLTDEQRGGLTTRQFIRYHLLRLKLGDELTHVVRGGARRLIAPAEEVLRLRPELRASA

SEQ ID NO: 242927 - protein, 572 aa, unidentified
MLPRSASARHAPVVDIGVGIDTSRYGHYVAFLSADLHTAAADLEVIESSAGYARLRQRLVDLVARHGQVHFHVRLDAAGLYADNLLAWLGALDLDGAAFTVSCGDTQRNKNYRVAVYGHQKSDPVEARSCARYALTERPTASPAIAAALVPLRQVAARLQAVVRQRTRLVNQLHQLLARTFPELAVLVQDITTGWVLELLTRYPTARRLSRATTTDLEAIAYLPHDRIGELLAAACDSVGSLHGAIADDLVRDQVRQVRDGTARQKRLEALLVSAYRDLPDTNHLATIKGFGAVTAAVLTAFILDIDRFATAGQLVNYFGVLPVEASSGVERDGTPRGPKRYRMSPRGNDLVRRYLWMAALSAARHNPACRALYARVRAKHPQQPSIAIGHVMRKLLHLAFAVWKTGRPFDPNHYSWQNSNAATDADASPNEVQAAGHTLDEPAESVVTATCGARVAQPGSGVWLDFAHLKAQLPMSRVLDHLGLTPRLKGAGPQRRCACPIHRGDGRGRTFSANLDSNVYQCFDARCLSQGDVIDLWSALTQRDVRSAALDLVAVFGLEPSPPSGTEKRNG

SEQ ID NO: 242928 - protein, 344 aa, unidentified
MYYIGLDVHKKTISYCVKDVGGQVHQEGKIGATRHELDGWIKTLPQPWSVAMEATIFTGWIYDHLLGRAAQIKVAHPLMLRAIAAAKKKNDRIDAGKIADCLRCDFLPECHMASTEIRDRRRTLRYRHLLVRQMTQMKNRVSGLLMETGVTYNKQRLHKVGYFRELLSTNDEVMDSIRPLLKLSRESIVRLQKTEYALVSSLQRDPLLVERIQRLRTVPGVGPITALTWALEIGDVSRFRSVKQAISYCGLCGDEKSSADKLVRTPLSKQRNKHIQRVLVEAAKLAPKEDHKLALVYETEKQRGNANRATLAVARKMVAYLLAVDRAGRDFVPTEEYRAKANGC

SEQ ID NO: 242929 - protein, 325 aa, unidentified
MIDGMLGIDVSKNTLDASMSSCNDKVRAKSFANSPDGWRHLLDWLIGQKIRRVHACLESTGRYSLGIACKLNEAGHVVSIVNPAQIRDFARTKLGRNKTDAVDASHIREYCELFKPAPWAPPSHAHRQLGELQTIRAGIVAGLTEWKNRKNSGMVDAVAQSLVDATISHFTSQLGAVEKTIAQAIDNDSDLRRKRDLLLSISGVGETLASVVLAELPGPDVLHSSAEAVAYTGLNPRRHRSGTSIDRQTRISKIGNAVLRAALYMPAMSAMRHNPAIVALVTRLKARGRLNPKQIVVAAMRKLLVLCFGVLKTGKPFDPALAMGC

SEQ ID NO: 242930 - protein, 320 aa, unidentified
MKKRPRRFVGLDVSKDQLDIACRPEPTRWRGANDSAGIAPCMAQLRQLKPVLIVLEATGGWQDALVAALALAQLPFAVVNPRQVRDFAKATGQLAKTDALDAGIIAHFAAAVRPTPRPLPDETTQQLDALRQRRRQLLEMLVAERHRVALAHPTVRDSLAQHIDDLQRLIHESDAEVATLIRSSPAWREQDAMLQSAPGIGPVLSATLQAALPELGVLTQREIAKLVGVAPLHDDSGKRAGARHIRGGRAEVRAVLSMAALTATRGNPVIQAFSQRLLARGKSQKVAMTAAMRKLLTILNAMVKTQTHWNARVNPGPIPA

SEQ ID NO: 242931 - protein, 354 aa, unidentified
MRIIGCDYHPAFQQIAFVDTDTGELQERRLEHPGEAEQFYRDLSAEVVKVRVGMEASGQARWFERLLAELNIELWVGDATEIARRRERKQKTDRQDAQHILRLLLKDDFPRIWVASWENRDLRQLLWHRHRMVQARTRIMNQLQAVALNEGLRCKKRLWREPGREQLESFRLAPWASRRRHDLLELLDRLSPTISELTQTIEQEAEKCLEARRLMTHPGVGPLTALAFVLIIGRAERFQCGKQIASYLGLVPLEESSGNRRRLGYITKQGNALLRFLLVEAAQVSARSIPEWRNKYFHLAMRRGRKIAKVAMARRLAVQLFWMWRKGWDYEQVRKFGSHAGQPGNRDGGKSNIE

SEQ ID NO: 242932 - protein, 385 aa, unidentified
MTTTGQVGTFIPRDYDVFAGLDVDKRSIAITFTDHGTMRKSLKLPYSASQLLNYTGKHFPGQRVAFVYEAGPTGFGLHDELTAASHRCLVVSPSMVPSAPRNKVKTNRLDSKKLSEGLRGGQLRGIHVPPPSYRELRHLVQLRDTQVAQLTATKLRIKSLLLYEGIPFPAANGKWSGRVLRQLESLPGNATVRFKLNQLIDTLQFHFQSAAKVQKQIRYFCQNDPELNQCISFLISLPGVGTITATHALARLGDWRQIKDVRQIAGFLGLVSSEHSTGDKENRGEITRIGDKRLRSKLIQCAWTAIRKDPELRAFYRRIYERHPKKVAARKAIVAVARKLTTRMYAVLKEQRPFVIRAESSIAPLTAEETTGLGERLDGAQNDQP

SEQ ID NO: 242933 - protein, 400 aa, unidentified
MKYYTSTTEYNCGIDLHARQMYVCLMDRQGKILVHTNVRDNDFNFFLKLVEPYKHSLTVCCECMFGWYWLADACQDVGLTFVLAHALYVKAIHGGKNKNDRVDSEKLTHLLRSNLIPPAYVYPADKRPLRALLRQRIFYVWRRSEFLARISSHQLAHNRIPVKQTRRVRDSWEEALLKAEDHPLRQIALKNDLAMIKHFDTQICQLEEELQRQTKQVASRDYALLQTVPGIGESLGLTILYEIGDISRFPTVKDFLSYCRLVKGTVASAGKIKGLRGAKLGNPYLRWAFGEAAVIAKRDHHLVGPLSQRLEAQMNGNKFKANTVVAIKLARAVYFMLRNKTVFDPERLVASMQKCFSPGRRQPGSLTGRAKKAMPPPVPEDASCAPSTALCVGQASSPAH

SEQ ID NO: 242934 - protein, 344 aa, unidentified
MDNHTQYSGFAGVDLAKKVMQIHFVTGDGEITDKQVKRAEFLDFFRNRTKCLIGMEACGASQDWARKLEAMGHEVHLMSPKAVKPFVSGQKNDYNDAIGIYKAIFNGVRRVPVKSTEIRDLQTLRRIRSQVTKDRVKEINHVRGLLAEYGIVMGKSITAFNKGISSALESLKERGDVSPLVAEELQTTVESIKTKIERQKRLDREIEQLARGCKNYENFLKTPGVGPFTAAMLCVLLCDPAIFANGRQFAAYIGLAPRSRGSGGKNFIIGIPSKFNCDSESRAVFVECAQALARYKNKSPWVDGILRRKPKKVAVIAIANKLARQVWAMANKGESFKQMTILTA

SEQ ID NO: 242935 - protein, 334 aa, unidentified
MKSGIVHIGVDVSKEKLDVFVPAQKEGMRPTTKGVDNCVAGFREIRDIARKARATVCVEPTGGYELELIAFLHKFEVPVAYADALRVRQFARAEGSLSKNDTIDAALISRFADKIGVRVLAPQEVEAVELKRKARFRQTMMDSRTAMANRLETETDPEMKALLKEQIRHMDKVIGKAERLCLDTVKKDERMNALLERFTKVGGVGDMTAMSILAGLPEIGNLTDAKLNRLVGIAPEEKQSGTKEWQRRIWGGRKDVRNALYMACLASIQWNAVLGGYYRKKRAEGHPHKWAIVPTMRKLLSLLNRIARDQDFIPSPEPESTKRNATAGRKRKAA

SEQ ID NO: 242936 - protein, 320 aa, unidentified
MLNESFVGIDVSKDWLDVGWEPAGQSERLAHDEVAMVGLCERLAQERPCLIVLEATGGLETHLASALAAAGLPVAVVNPRQVRDYARACGRLAKTDRIDALVLAAFARAIRPQVRAPKDDETLELGALLARRRQLIDMRVQEKLRLERASPVQRDSIKEHIAWLTERIARLDTDLTHRLRASSLWRDKENLHLLKAIPGVGTITRVTLIALLPELGKLNRREIAALVGLAPFNRDSGQHRGERVIWGGRAQVRRVLYMASVAAIRSNPVIRAFYQRLRAQGKPGKVALVACMRKLLTIMNAMLKHNTPWNPNALDLEHSC

SEQ ID NO: 242937 - protein, 346 aa, unidentified
MKLSRIGVDLAKNVYQLHGVDRHSKTVWKRRLRRGQWLQALLDKADPGCEIGMEACTSAHHWARELQSRGYTVRLIAPQFVKPYVKSNKNDANDAEAICEAMSRPNMRFVTVKSVEQQDIQATHRVRSEIKDQRNAKANQIRGLVAEYGLVAPQTLIALRRAIPCWLEDADNGLTDYFRSLLHGLWGDLVALDNRMTELDKQIKTLADSNEVTQRLQQLRGVGPLVATALVATVGTGEQYKKGRQMAAALGLTPRQCSSGDKQRLLGISKRGDVYLRTILIHGARAVVSQAKHRDDRLSQWVTSIAKRKHPNVAAVALANKTARMAWAMLRNDTDYNPDFAIGSVG

SEQ ID NO: 242938 - protein, 418 aa, unidentified
MKVVYPICCGVDVHKTFLVATIITTQGIAPHYSKKRFSTFNNSILQFKQWLLDNNCFDVCMESTGKYWIPVYNLLEDRINVTVANPKWVKAIKGNKDDTKDSKWIGDLFRLGLVPGSYIPKKPIRILREYTRYRYKLVSCKSSEKNRFQNAFTVCNVALDAVVSDMFGKSASSITDYLVTSDSFDPKHCASLLQRSLKKKASTVIESIDGYQMTMEQKERIIMVRSHLDFIQQSITKLDEKLDKMVVPYESAIKLHCTIPGIDRASAITVISEIGTDMSQFANSKRLCCWAGLSPGNNESAGKKKSVRISRAGAYLKPALVQIAHAAVKSDKSPYYKIKYERICKRRGKKRAIIAIARMILTAIYNMFVTGEEWNPSDLYKIDMPQEMLEKQKHKAIKQAAKLLISQGIIKASDISVA

SEQ ID NO: 242939 - protein, 338 aa, unidentified
MKNKEGLVFVGLDVHQDSIQVCIINAEGRSLFNRRMDNEVRPLIAAIRRFGDDVRIGLEACGGTAALADELIQATGWSVQLTHAGYAQRMRQNPDKSDFSDAFLLADLVRVGYLPRVWLAPASLRDLRHLVHYRQQLVDLNRNVKLRIRALLREHRVRAPKSLWSGVGRKWLVENVSLPIHARWVLERHVNELQRLSKALAETGSRMERIAEEDPVMQRLMTHRGIGLVTAVIFRAQVGDVGRFGSGKQLARFCGLSPCNASSGSRQADAGLIRGCSKLLRATLIEAAHRLTIQDAGWKAFKQRMRQNGKPGGVIAAAVANRWIRRLYHELKPGLAAA

SEQ ID NO: 242940 - protein, 410 aa, unidentified
MTKEDFIYVGIDLHKETHTAVMIDCYNQKLGEITFPNRPADFPKLVTKVKKCNTDAKEVVYGLENAYGYGRPLAVWLIDKGYFVKDVNTAISHRQAKHRGAMYRKSDSDDAEAIALATLNMLDKLPDACPNDAYWSLGQLVHRRDNIMKQRTRLVNQLHEQLCIAYPSYKQFFNDISRPTALYFWEHYPSRKYLKGKSVEDLRTELVPVSHNRCSTKNCEKILDAVASDKVKNNAYQDARDMVTLSIVSDLQHYDSQLAEVDKMLEQMYKMLGCTLTTIPDVNVITAVKILAEIGDIKRFSNANKLAQFAGIAPLHLSSSGKGKDVATKQGNRRLQATIYFLAIQMVQVSSKGTPRNSVVRAYYEKRKAEGKTSQQALICISRRLISIIYGMLKHGTEYRMPVVESAGEK

SEQ ID NO: 242941 - protein, 315 aa, unidentified
MGEAVYVGVDVAKRTLEIGVRPSGESFSESNDPPGCARLAQRLPRLNPALVVLEASGGYERALTGELGTAGLPVVVVNPRQTRDFARALGRLEKTDKVDALMLAEFAERVQPEVRQLPDQQALALAALMARRRQLVEMLVAEQNRLLQAPAVLQHELRSHIDFLRKQLHRLDQDLDQLLHQSPVWREQEDLLKGVPGVGPVTCATLLADLPELGRLSRRAIAKLAGLAPLARDSGAARGRRTVWGGRAKVRATLDMATLSAVRHNPMLKAFHLRLRAAGKPNKLALVACMRKLLIILNAMLKHNTPWRPPCPSPA

SEQ ID NO: 242942 - protein, 356 aa, unidentified
MSKITANFENQTIYVGLDVHKRSWNAGIFLGDMFVKNIHQQPSPEILYHYLTKQFPGASYQCAYESGKFGYWIQRQLSELGITCLVVNPADIPSSHKDEVYKTDSRDSRGIGQALAKGQLRGIYIPPLHQEADRTLVRQRKKIWRDLVRCKNRVKGFLDYNGINLPEKFDNPNWSRNFITWLLSLAFPFESTSRRLQYQVREVELLRKELLAISNDIRKLMRSATYKKLYYLLRSVTGIGPLTAASLLTEIGDMRRFPNFYHLNSFIGLMPMEHSSGEKQMRFNLTVRKHRQLRSDLIECAWAAKRNDPALALYYSEQISRGINGKKAIVKVARKLLSRIRYVWLTEQPYKTSIVK

SEQ ID NO: 242943 - protein, 430 aa, unidentified
MKSNTQNAKIEAITEKTLVLGIDVGSETHYARAFDYRGIEYSKKPFKFSNTEAGFVTFKEWILDIKERHEKDKVVLGMEPTGHYWFNLGKFLQDNEMKPVLVNPHHVKKSKELDDNNPTKNDRKDPKVIAGLVREGRYMIPYLPDGVYADLRTASNIRFQLQAELTRIQNRISRWFNIYFPEYKTVYGKPDAKSGILILKAAPLPEDILTLGIDGVNQIWRDAKLRAVGKARAKTLIEAAEHSVGSKEGAVAARMEIRMLLEDYESRSIRLQEVMTLIEGLVKQIPMAEKLLEIKGVGIRTVSGFLAEVGDISRFNNPKELQKLAGLALVENSSGKHKGETTISRRGRKRLRYLLFEVAMSLVAKNPEFRELHNYYTTRRLNPLKKMQSLMAIAAKLIRVFYAMLTKGVDYDPKKMVNDIKRPAVYLQTA

SEQ ID NO: 242944 - protein, 354 aa, unidentified
MFAGIDTHKDTLAVAVVDAAGRQRAGLEVVNAGAGFVAVAQLLAAQGVGRVGIEGSGAFGRAVGAYLAARTRVELREVPTLLTSGQRGARPGQGKTDEVDALAIARVTARDDDLPPVRLTVGLAADLRSLLDYRQDLVYERHTLVNQAHAELSGLVPGYQRAHPHLKTSAQVKAVLELLAGDGRIRAEVTRRRLARVLVVTAEAQAVRTQITAMVAGHADHVAAIYGAGPIIAARFLAEVVDIDRYLTRDAFASANGTAPLAASSGRTVRHRLNRGGNRRLNYALYIMAITQARAETEGRAYYARKRAEGKTAKEAIRCLKRRLSDQVFKAMRADAATARDPNDSPTRVPARAA

SEQ ID NO: 242945 - protein, 414 aa, unidentified
MKTNWTEQPYFAALDWAKDHHDVIVVDRLGAIVADFRFAHTADGWRDFEQRMQPFGKCPLAIETSSGLAVDQLLQRAYPLYPVNPKAAKRYRERKVPSGTKTDRYDAWSLADALRTDGQAWRALRAQDEATSTLRLLCGDEIGLIEQRTALVNQLQAALADYYPLALESFEDWTQPFAWAWVKQFPTPSALQAAGKRQWEKFLHGHKLWRPQTAPQRLASWAQGQALNASPAVLTAKSLLAQSLVRVLETLQHQIEEYRRRITEAFAAHPDHDIFGSLPGAKQTLGPRLLSGLGSARERFPDTQSLLCQAGVSPVSYESGQIRKAHVRWACDQFLRHTVHLWANASRKKCAWAQAYYQAKRTQGHSHASALRCLGKRWLKLLWRLWQDRVCYNEQIHLNSLECHGSFVWQKLQT

SEQ ID NO: 242946 - protein, 412 aa, unidentified
MLKITYPICCGIDVHKTFVVACIASTNEKNITSYQTKRFSTYTKNLRELAQWLNENNCKDVCMESTGKYWHPVYNILEISCNVVLAHPKYLKAIRGKKTDKKDAKWIADVFKHDLVSGSFIPPAQIRELRDLMRYRFKLTSHTTGEKNRAQNCLTTSNIQLDHAFSDVFGKSATAILNQILANPANPDFDVTPFVHKRCKTPIEEIQLSIDGSISHEQAEKLKIIRSHMDSLAKCKENLESVIFATAESLMPKVNLVSTVPGIKDFSAIAVISEIGVDMSVFPTSKHLCSWAGVAPQCNESGGKKKSSRVSRAGVYIKPLLVQCANAAVKSNKHPEIKNRYLSIKKRRSHKRAIIAIARMLLTAIYNILKRDEPYNPDVYRKPDVASFDREQQAILLLQRRGYSVFKEDIPA

SEQ ID NO: 242947 - protein, 385 aa, unidentified
MLDHACEGPTAIRTQIGAIFVSLELSRSSWLITSLSPGGGEKMSKHSVRAGDVAGLLALFAELRRKAALRTGRSYPIITVQEAGLDGFWLHRVLIREGVESHVVDPASIAAPRRRRRAKTDRLDGEALLRALLAYKRGEPRVCAMVVAPSPEEEDRRRLCRERQALICERTMHVNRIKGLLFAQGITDYAPLRRDRRGRLAALRTADGRSLPPHLTAQIGRELDRLELLVDQIKRVEAEQEAVLAAAETGGTAASEPVAMLSAVRGIGATFAAVLWSEGFYRSFANRRQLAAYAGLAATPWRSGSIAREQGVSKAGNPRLRTVMIQLAWLWLRHQPQSALARWFQARGQRDRKRAIVALARKLLVALWKYVTAGVVIEGAVLKSA

SEQ ID NO: 242948 - protein, 413 aa, unidentified
MDVLHPCCAGLDVHKKTVVACVLRSDAAGDPARSVCTFGTMLDDLGQLRDWLAAADCTHVVMEATGVYWKPVYNVLEDAFTLLVANAEHVKRVPGRKTDVSDAEWLATLLRHGLVQASFIPERPQREVRELIRFRTSLLQDRARAVNRLQKTLEGANLKLASVLTDITGVSGQRILDALRRGETDPEQLAERAHWRVLQSKRGTLERALVGRLSDTLSFVVAQQLQQIRALDDQIVACDGRVGEELRPFDAEIELLDGIPGVGRRTAEVLIAEWGADLSRFPSAGHLAAWSGMCPGNKASGGKRQPVRTRKGNPWVRRSLTEAAWAAGRVKGSYLGVQFRRFAARKGRKHAVVVVGHSILTVAYYLLTHRVSYRDLGVEYLETRDREATARQAVKRLQALGWDVRLTPCPVAA

SEQ ID NO: 242949 - protein, 423 aa, unidentified
MEVMYKRVAGLDVHKAAVVACVRIVARRKVTRECRTFDTATDGLIALREWLGECGCTHVAMEATGVYWMPVWKILSEGDFELIVANAAHLKNVPGRKTDMNDAMWIADLAACGLIKASFVPEEDFQELRSLMRTRKQLSREQTRHVQRIQKTLEEANIKLDSVLSDIMGASARRMIQAMIEGVRDPGKLAALAGKGLKATPKQLYDALHGRVTEHHRFLLKLHLDQWESLEAAIRETGRQADRHLSRMDAKLKDGQEPFRAAIARLCTIPGVSVLSATTILSEIGRDMSRFPTAGHLVAWAGLCPGQNESAGKRKSTRLRKGDVWLKTMLVQCAWAAKRKKDSYYQAQFYRLQSRRGPQKAICAVAASILTAIFHMLTSGEVHKDLGGNYFNKRPPEVQAKRLAAQLAKLGYEVSMQPIARAA

SEQ ID NO: 242950 - protein, 310 aa, unidentified
MEPVFVGIDVSKDRLDVHVRPGGEVFVVSRDGSGLEELVGRLQALDPTLVAVEATGGFETIVAAAVAGAALPLAVVNPAQVRHFAQAVGKRAKTDPIDAGVIAHFAEAVRPVPRTLPDEAARLLAELVGRRRQIIDMIVAERQREKRATNVRVRKSLARHLAMLEKELDAIDQDINTLVRGSPLWRVKEDLLASVPGIGKTLARTLLAELPELGSLDRRHIASLAGLAPYTRQSGRWRGRSMIGGGRSAVRSASFMAALVASRHNPPLKDFYLRLIGAGKPKMVALIAVARKLLTILNAILRDNRPWQSA

SEQ ID NO: 242951 - protein, 369 aa, unidentified
MTDLMLFVGLDVHKKTISVAMVEGAAGAAVRFYGTIANTPDSVRTLCRKLSRDAQQLYFCYEAGPCGYGVQRQLTRLGHRCDVVAPALIPRKVGDRVKTDRRDAMMLAQTLRAGQLTAVWVPDEAHEAMRDLIRLRAQAMRDLRKARQQLLSFLLRHGRSSPYGHWTKMHRRWLGELVFAHPAQHLALEEMLQRVERAEALCDRLKQAILELVPQWSLSPVVQAIQALRGVSLIVAAAIVAEVGCFSRFESPRALMAYLGLNPSEHSSGATIRRGAITKTGNTLARTCLVEAAWTYRFPPRVSQIIRDRLKKLPEPIRAVAWKAQVRLSARYRKLIAAGKPAPKVVVAIARELVGFIWAIARMVEPKFT

SEQ ID NO: 242952 - protein, 467 aa, unidentified
MNRSTASASRSSNRLLVGDDVSSVRNDVCILTATGEVLLNHQPFVNDLVGYVALRDTVLDVFQHAEAAGIDFAGEATGWYWFHTFYALAHDEELNDLDLHLSLFNPRLTHAFKKAMASRDHADPKDARVVAERTRFARAEHPPVLDDTWLGRRLLTRHYYHLSHALAAEKTYFSAFLFLKASAYRQLKLFTDVFGTTSSALITQYSTIQELADVPLAELEGLLKMLSHNHLPDVEEKAQRLHAVAVNSFPVPPHMLEPLNLVLRSTLEHIRFLEQQLAQTEAAIERAFANVPQLEWLMSIPGMGLILAACLLAELCPFDRFFEGTALDRKTGRPRAKNARDAEASIAKWVGLWWPRNQSGTFEGEITRMPKDGNRYARYALIQLANCLREHSAEFAAYYSRKHAESKTHAHKRALVLSARKAIGLIVALLHTGQLYRTPEPYREVLSPHQARGQAAASSPAATDPCS

SEQ ID NO: 242953 - protein, 343 aa, unidentified
MKITAIGLDLAKSVFQVHGVDDRGHAIVRKQLRRDQVVPYFAKVPPCLVGMEACGGAHHWARRLREFGHTVRLISPQFVKPYVKSNKNDAADAEAICEAVGRPNMRFVPIKTVEQQSVLSVHRVRQGFVKVRTAQANQIRGLLAEFGLILPQGISNVARRVPGLVDEAAELPVPMRQLVNRLLEHMKMLDQQAKELEAQIKAWHQGSELSRNLEAIPGIGPLTASALVASIADAKSFKNGRQVAAWLGLVLKQDYTGGKPKLLGMSKRGDTYLRTLLIHGARSAIVSAQRWHKPNAWLERLLSRRHPNVAAVALANKNARTAWALLAHEREFRPDYVPQPPIA

SEQ ID NO: 242954 - protein, 342 aa, unidentified
MDHIAIDLGGKESQICVRSSDGSIVEELRWGTRRLDAYLKKRPPGRVILETSSEAFKVADAALELGHEVRVVPATLVPALGVGAHGVKTDRRDARVLSEVSSRVDLPSVHIPSALSRSWKATCTAREALVTARTQLINSVRGWMRCNLRTSPSRSCDTFVKGLRATALTSSQGLPDFIEHQLQVIEVLTDRIARADAQLKILASEHPVCLRLMTIPGVGPVTALRFVAAVDRVERFHDAHSLQCYLGLVPGENSSSERKRRTSITKAGPPRVRWALAQAAWCFRRTQKTDPLALWANEVEKRRGKMIAMTALARRLAGIMYAIWRDGTRYEPSRLRPRTAGL

SEQ ID NO: 242955 - protein, 410 aa, unidentified
MIKENYVYVGIDLHKETHTAVMIDCYNQKLGEITLPNRPADFPKLVTKVKKCNTDGKEVVYGLENAYGYGRALAVWLIDKGYLVKDVNTAISHRQAKHQGAMYRKSDSDDAKAIALATLNMLDKLPDACPNDAYWSLGQLVHRRDNIMKQRTRLVNQLHEQLCIAYLSYKQFFNDISRPTALYFWENYPSRKYLKGKSVEDLREELVPVSHNRCSTKNCEKILDAVASDKVKNNAYQDARDMVTLSIVSDLQHYDSQLAEVDKMLEQMYKMLGCTLTTIPGVNVITAAKILAEIGDIKRFSNANKLAQFAGIAPLHLSSSGKGKDVATKQGNRRLQATIYFLAIQMVQLSSKGTPRNSVVRAYYEKRKAEGKTSQQALICISRRLISIIYGMLKHGTEYRMPVVESAGEK

SEQ ID NO: 242956 - protein, 320 aa, unidentified
MAQRSFCGIDVAKDRLDVMVLPEELCWSVVNDAAGWAELVAKLRGLGIAASGIEASGEYERGVVRALLAAGMSVRQINPFKLRQFAKACGVLAKNDRLDARMIALFVATMPTRSAQRYAPVERLAELVTARRQLSDDKVAAENASRLFEDAALRRLYGGRIARLAADIALLDKHLAQIVASDAMLARRYALLVSMPGVGPVLAVTLLALLPELGQMNRKQVAALVGVAPYDFDSGRLKGMRCIWGGRAPVRRVLYMAALIGYRCNPQLRAFHDRLAAAGKKAKVVLVAVMRKIITILNAMLRDNVPWVDRSIGRHILPAA

SEQ ID NO: 242957 - protein, 322 aa, unidentified
MSTNAVFAGIDVSKAHLDVAVRPDEIEWRSPNTDTGAREVADRLKDLDPDLVVLEATGGMEIPAASALAVLGVPVVVVNPRQVRDFAKSTGRLAKTDALDARVLAHFAEAVRPEPRPLPDEQARQLSALLSRRRQISEMLTAERNRLQSADSTVCRRLNVHIRWLERELSDIDNNLDEAIKASPLWRVKSDILKSVPGIGPVVSFTLLSELPELGQLNRKEIAALAGVAPLNRDSGTLAGRRTVWGGRARVRAALYMAALVASRYNPVIKDFYLRLCARGKPKKVALTACMRKLLLILNSMVKNKEKWNASNTRDRGVLISA

SEQ ID NO: 242958 - protein, 465 aa, unidentified
MQKTPGAQIATSFWRCLMSKLHVGLDVSQKTVATCFVLDDGTEPVKRFSFEHNPAGVDKLVAKINATAEDLGIDQVLIGMETTGLLWWHLSEALRNCDELQHLQPRIYAINAKLVAHFKKAYVEMDKTDPGDAFVIADRLRFGRLPRPAEPDERYLAIQKLTRHRFHLTHSLAAEKNRFLTHLFLKFSGFCQEEPLSDPFGTASSALLTEFLSVDEIAQMPIENLTDFLIEKSNNRFADPEAVAKAIKQAAKNSYRLSKCLTDPVNIVLAMTMENIRFFEKQIACVDKAIAKELAAFPGAQVLLSVPGLGPVFVAGIIAEVQDVNRFDTDAQLARFAAIVWKRSQSGAFEGDDTPMMHSGNEYLRYYFVEAANLLRMHNEEYAAYYQTKYREATTHHHKRACVLTARKLVRLVHTLLRKGQLYQTPDQRKESHAVLPAGMTPGELARHVVRRRQAKDRSRVHLDH

SEQ ID NO: 242959 - protein, 352 aa, unidentified
MIKGTKVSFAGQRICCGIDVHKLSWRVNIRSQEFELEDYSQQAGEEVLLSHLRKNYPDADYELVYEAGFSGFSLQRSLEGKGINCLVINAGDVPSSDKDKKRKNDCIDARKLSKALAGGSLKGIYVPQQEMEHIRTLVRQRCRLVQDQVRCKVRIKHMLLFSGCNVEDDKYWSARYIKRLQELDCGTTPLRQALDLALQEYLSVRKLILLATRQLRELSMQMPYAKVISLLRSIPGIGLINAMVLLSEIQDMSRFKTLDKLCGYAGIVPDLHSSGEQQSVRSITHRSNHYLRVAIVESSWVIIRKDPAMLMHYNEYCKRMHQNKAIIKIARHLLSRIRYVWLKEEPYQKGQN

SEQ ID NO: 242960 - protein, 344 aa, unidentified
MAIAVVGVDLAKNIFHLHAVDQRGAVVFRCARKRHDWTEIVRERVDPEAVIAMEACASSHHWGRLLQSYGYEVRLVPGQFVKPFVKSNKNDRVDAEAIAEAAMRPGMRFVAVKSQRQQDLQALHRVRDDVIQQRTAKANQIRGLAAEYGIIAPVGLNQLRKAIPEWLEDADNGLSDLFRQILAGLHHDLVALDERVEVLTRSIQQVAESDPVAKRLLGLRGVGPLCATAMAIELGDGQQFRRGRDFAASLGLVPRQHSTGGKARLLGISKRGDAYTRKLLVHGARAVIRHHKADEDPLNQWISHQMARKHPNVVSVALANKTARIAWAITRGATYQPELAAKAA

SEQ ID NO: 242961 - protein, 421 aa, unidentified
MEETGEPAELVERVAALDIGKAALTACIRVPHEDKPGRRCQEVREYATTTRALLDLADHLRCQGVTLVVMEATSAYWKPPFYLLEAEGFECWLLNARHVKNAPGRPKTDKLDAVWLAKVAERGMCAPSLVHPKPIRQLRDLTRYRRTLIRERAREKQRLEKILEDAQIKLSAVVSDLFGVSGRAMIEALIAGQRSPRALARLARGTLRNKTRILEEALTGHFGDHHGFLCQMMLDRIDGLSNQIGQLDARVEQAIAPYSHQVTQLDEIAGVGTTSAQELIAETGVDMSRFPTAGHLVSWAKFAPIENSSAGKKKGGSTGKGNPWIGGTLGEIVLGASRSHTFLAERYRRIARRRGKKRAIVATGNTVLTIAYHLLCDPAARYTDLGPGFYDSKAGRERHARNLIRQLEHLTGKKVTLNEAA

SEQ ID NO: 242962 - protein, 339 aa, unidentified
MKKVFIGIDFSKLKFDAAIYSVDTKAIMSTEVFNNEQSGYADFLQWVKENTRCQKSGILFCGEHTGYYSSSLSVFLYESGYDMWLVSGLEMKLTQGIKRNKTDRVDACKIAEHAYRYQDKVVLFQPVSKALEEIRELLSYRERLVETRKVLTTSAQEMKRVKDNASCDYIYQDSLEYIRSINTSVRDCEKRIEVLVKQDISLKTNYKLVSSVVGIGLVNAALILVATANFTLFVNPRKFGCYCGVVPFEHSSGSSVRGKTRVSKMANRHLKTKLTLAAQNAARFDPELKEYYQRKRSEGKNNWLVLNNVKNKLIHRIFAVVRNGQMYEKQYVHPLKQAA

SEQ ID NO: 242963 - protein, 348 aa, unidentified
MEIDTIGIDLGKTVFHLVGLNAAGEVVVRRKFSRTQLLRFMANLRVRLIGMEACGGSHFLGRSLREQGHEVRLMPAQYVKPYVKTNKNDYIDAEAIAEAVGRSKMRFVPIKSDDQLDMQSLHRVRDRWVGHRTSVINQIRGLLLERGITFRKGRRHAAASLPGILEDPENGLSGPLRMLLAQLQCELRQLQSQIDEADTLIAKAASNHEPCRRLMAIPGIGPLTATAIVASIGNGAEFRKGRSFAAWLGLVPEQRSTGGKQKLLGISKRGNSYLRRLLVHGARAVLQCKDKQSLSLSSWLGQLASRAHTNIVAVALANKMARIAWAVLSKGEAYRPALLAGSVGLVCN

SEQ ID NO: 242964 - protein, 354 aa, unidentified
MQRTTKYVALDVHQATTVAAVRAANGRVIARTILPTEEPAIVAFFRGMRGAVHVAVEEGTQAQWLHDALVPLVERVVVCDRRGEPQQGNKADQVDAEQLAERLRQGSLRAVYHGSPHRAVLKELTRSYANLVEDTTRVMLRLKALFRARGIPAPGKRVYHPRERAQWLAQLPDAGARSRAAVLYAELDVLRPLRPRAKAAMLAEARRDPAWGVLRTIPFYGPVRVALLLATMRTPWRFRTKRNLWAYAGLAVVTKTSAEYGWVNGRPVRRHRAPLTRGLNRNHNRVLKDVFKGAATAATTRPGPLQDWYHGVLARGVRAELARVTLARKLAALTLRVWKHGEPFDPTKLTTQAR

SEQ ID NO: 242965 - protein, 489 aa, unidentified
MVTKRKTGTTGTNRRRSRSQKFKKAVLGRPQGGIQARVQAVGPEKFGVVAIDCAKARSTWILVDFYGNVLCHPPNVEHNRSAFQMAVLTLKQAVEKHDLKDVIVAVEMTGTYHKPPMRAFREAGFETRLVHPFASSYYRQPVHGDQKTDENDLDSIFRAAVNGFGLIEKPVDAIYQQLQILARHRRDLVKKRSKLQCQIRHHLELGLPGFGALFDKDDLWSQVTPVPLLEAIAQRGGMVDVVKQAGQKGITQWLSDANVRFHKKTVERVTVWAANAAESDAMAAFHTRVWMSQLADWKQKMLQIHEIESDSASVLVKTPYVLLLSHPGINVVSAAELAGEMGPIENYATAKSICGRAGLFPSRYQSDEVDRGGKLTRFRNARLRAAWMMVADNMVKCNAYWMKKAERWRGEGHKPQDIRARIANRMTRGVFKMVSGRQIYQHASRLDRGYVMKARRSRQKGPQELGTLLVAVLARLGIAPKDEDTLEST

SEQ ID NO: 242966 - protein, 335 aa, unidentified
MIHVGVDLHQAFCYMTALDSTGRSLKAGPVANEPAALRRWLRGFSEPVAVAVEACSFWPAFKEAVEKEVSEIRLVHPQRVKAIAAAKLKNDRVDSATLAHLLRCDLLPAAWMADRQTRERRQRVRLRISLGQHRAALKNQAHAILHQHGKRCEWSDVFGKKGRAWLKKVQLPPAARGAMDTYCALIDEVGGHIREQERTIGWMAKADARAKWLATIPGIGVYSAMILLSEIGEVQRFSSAKALYSYAGLVPWVQESAGKKSRGGISRCGSPRLRWVMVEAAHTAVRCSPAGLPCQRLLARFIRPTSRQTARPASAPGQPISSTPPCIPDASRMAD

SEQ ID NO: 242967 - protein, 417 aa, unidentified
MDEEVYYERCAGIDVHKKLLVVCLRIGRKPEIREFGTLTHEIREMVAWLKENGCQMAAMESTGSYWKPLYNIFEQEGLPAMVCNAYHIKNVPGRKTDVNDAQWIARCLSQGLLNPSFVPDREQRELRDMTRFRKSQIEERARNINRLQKFLEGANIKVGSWLSDIEGKSATELLELVIGKPDFTVDDVAGRMHGNMKSTAEELFLSLEGSITPSQREFFAHVMTVIRGQTAQIEKTDAMIQRSLNDNYKAVVEALDAIPGIGKISAEQIVAETGIDMSRFRNQHSLSKWAGVCPGNNESAGKRKSSKTPPGNKTLKSTLTQCAKAAKNNKNSFFSAQYSRLVSHRGKNRATMAVAHSLLIAIYFVLNGCVFEDLGADYYMQFNREKKINSHVKQLSKLGVIIPDDILRKGIEHPPDS

SEQ ID NO: 242968 - protein, 410 aa, unidentified
MKVFIGVDPHKLSVTIEVVDDQETVVAAGRFATDKAGYAAMRKQLAGWPERVWAVEGSNGAGRPLAQRLLADGEHVVDVPAKLAARVRLFDTGHNRKTDAHDAHAVAVVAVRTAGLRVLSYDAELEALRMLADRREELTRQRVQTVNRLQRLLSELTPGQAKKDLTALQAKAILASVRPRDLVGKTRRRLAAELLAELVAVDKKMKASTTQLKAMVVARGSTLMDLTGVGPVVAARVLADVGDVARFADRNRFASWTGTAPLDASSGEQIRHRLSRAGNRRMNHMIHIAAATQIRLDTPGRAYYLRKISQGKTRKEALRCLKRRISDAVYRQLVADAQAAATATEIDQAAHEDGAGPGGHSGASQESSAVDLPPHIDTSDQPLPGPATTTLQPAKRARKTTAPESLSRAG

SEQ ID NO: 242969 - protein, 343 aa, unidentified
MANHTLVAVDLAKAVFEVAVSHHPGQVARQKRYSRQQFPLVLAQLPPATVVMEACGSAHFWARRIQSLGHEAVLLPPHAVRPYVRRNKTDRTDTKGMLEAFRNEEIRPVPVKSVAQQTLASLHRVRSGWLAERTARINTLRGLLREFGILIPLGAQHVVPSAWAQLEDAESEIPDPLRPALAEICSEIRDLERRIKMIEHQLAALAAHTPAVAQLMTIPGIGLLIATALVAFVGDIQRFPSARHFSSYLGLTPRESSSGLRRRLGSISKRGDVYLRTLLIHGARSVLLAAKRRTPDRLRAWALARESARGHNKAAAALANKLARIVWAVWKHDRPFHSLPHPA

SEQ ID NO: 242970 - protein, 449 aa, unidentified
MAKKKNKKTLLRVKHPDAAGIDIGSNEHWVAVGGDRTGQSIRSFGTFTSDLERLADWLKECGVRTVAMESTGVYWIPVYELLEERGFEVLLVNAAHARNVPGRKSDVLDCQWLQQLHTFGLVRASFRPAARMAELRTYTRQRQTLIEDQARQIQRIQKALDQMNVQLHHVVSDITGKTGMTIVREIALGNHDPKQLAKYRDERCHASEATICQALQGHYKPEHLFTLKQSLKLFDSYGEHILACDERIQALLGELAAQGPEVASSPKPPKFRAKGRQIAIDVRNPLERILGGVDVLSLVGIGPLTALNLFSETGKDMSRWPTEKHFTSWLNFAPGTHISGGRRLSSRRRPGRNRAGLVLRQAASSIGRTQTALGAFYRRVAGRRGKAIAIVATARKLACAYYRLLRFGGPYIERGAAAAEHDYHQRRLNSLKRQAKILGYQLMPTQPEA

SEQ ID NO: 242971 - protein, 431 aa, unidentified
MVLPLAAVLVPGLLRDGRVAVRLYVGDDWAEDHHDVEVMDEAGRVLARRRLPEGVAGIAQFHELAGRFVPEDGTEAEVVVGIETGRGPWVAALVAAGYRVLAVNPLQAARYRDRYQVSGAKSDRGDAHLLADVARTDSRQLREAAGDSPQAEGLQVLARTHKTLIWERTRQVQRLRYQLRDYFPAALEAFGDLDAPDALELLAKAPDPASAAKLTRAQVSAALKHARRRGIAGKTDAILAALRSDQLTRQPALTAAYAVTVRALAAVITTLNEQVRTLEGQVAEHFGRHPDAEIYLSQPGMGTILGARVLAEFGDDPHRYADGKARRNYAGTSPLTRASGKKRIVTARYFRNDRLADALMAQAFSALTASPGARACYDQQRAKGTNHNDALRRLAGRLVAILHGCLKTRTLYNEATAWSHRENLSQSRTAA

SEQ ID NO: 242972 - protein, 345 aa, unidentified
MTEAYDGRQVVGMDLHRRRSVLVRMTGDGRKLETVRIENSPQALRAVIARAGANPRVVVEATYGWYWAVDTLEAAGAEVHLAHPLGVKAFSYRRVKNDERDCADLADLLRLGRLPEAWIAPEPVRALREVTRYRHKLVGQRTSCKDQVHAVLAKAGIPVTRSDIFGPGGGIWLDGLPLPQPYAGKIASLRALIGVLDGEIARLEDQAAGMLAGDRGYAAIRQLPGIGPVLGAVIAAEIGDITRFRNPGQLASWAGLTPRHYESDTRVIRGRVSKQGSRMLRWALTEAIQRAPAGTRPRQVKDAIIARRGPEARGIAKTAAARVMLTQVFYGMRDGHIRRDTSQAA

SEQ ID NO: 242973 - protein, 334 aa, unidentified
MENIALIGIDLGKNSFHIHCQDHRGKAVYRKKFTRPKLIEFLATCPATTIAMEACGGSHFMARKLAELGHFPKLISPQFVRPFVKSNKNDFVDAEAICEAASRPSMRFVQPRTESQQAMRALHRVRESLVQDKVKTTNQMHAFLLEFGISVPRGAAVISRLSTLLEDNSLPLYLSQLLLKLQQHYHYLVEQIKDLESQLKRKLDEDEVGQRLLSIPCVGTLTASTISTEIGDGKQYASSRDFAAATGLVPRQYSTGGRTTLLGISKRGNKKIRTLLVQCARVFIQKLEHQSGKLADWVRELLCRKSNFVVTCALANKLARIAWALTARQQTYEA

SEQ ID NO: 242974 - protein, 356 aa, unidentified
MNKYIGFDMDSKKTVCCVVEAGQKERFRTIGPNIKSMIKFLKAEKQGGYRVEIVFEISGQAGFIYDSLIDYVDDIKVANPSKMTWIYRTSKKNDRIDARKMAVLLSIGEIPEVYMPSREVRQWRETILHRKKIVCKVVQVKNRIRATFKSQGYSEPADKGGWWKKANRLWMRGVCEASTGISDLWHIHVSNLLDELELLDAQLKRVTQYLDGYLDRQPGGKLLMSIPGVGPRTSEAVLAYTDNVERFGNYKQYCSYFGLTPKLDESGDCRRIGHISKRGPSVVRWVICESSWKVIRKSKSLREFYERVMAGQKGRKKIAIIAVARKLLSIMRAMMLTGELFNEELVNKADELIKTA

SEQ ID NO: 242975 - protein, 408 aa, unidentified
MLNIGLDWGSEKHAICLMSENRRSLARFEITNDLEGIHKVVSQVEALGFRPEECAVALEGRPELLILTLSSLGFTIYPLNPKAVHRYRDRHKASGATTDWEAAYLLADILVIDRHLHTPWQPSSPLAQEIAWITRDQYKLTQQQTRLSNQLTACLKQYYPVALDLFTKVAQPITLAFLEAYPTPGAAQAASYEELQEFFRSQSYPRLDLLPQIYAKLQGMALRAPPHVARARSRYMLVLARQLEVVVSAIKAYDREIQRLLDEHPDGQIFRSLPGAGDLTAARLLGLFGDQRSRFSNPDQIQPLAGTCPVTLSSGKRRAVVLRRACNKMFRDVMQQLARNSLSQSGWAAAYYGDQIRRHPGEESRCLRALANRWVGMIYKLWNDRLLYDEQTHLRNRLHQGHIPCDSP

SEQ ID NO: 242976 - protein, 497 aa, unidentified
MAPGRRLNIGEASEHSPRAGSELANLGCRIRKSEYNMTEDKNSRAATKIAEHIEGLPVVRRNVAGIDLGSERHWVCAPALDGAGREMADFEATTPELLRMAQWLKERNVESVAMESTGVYWIAPFEVLEAAGFEVALVDTRQLARVPGRKKTDPVDCQWIQRLHSCGLLAGSFRPQEDICMLRTLIRDKANLVAEAGDWLRRMQKSLDQMNVRVHRAVSDLDGVTGMAIMRAIVGGERDPRKLAQLRDPRCRKSEEKIAEELTGHWREDHLFSLRQALKMYDAIQERIRAYEKEILRRLAAMQREECRGQAAPVVQNPQKAQAMRKRGEEPMRQAFYRMSGVDLTSIDAIGVETVQVVLSEYGPDLSRFPTEGQFVSHTMLAPYRPVSGGKPVKKKKRYSASTRVAAALRMAALSLRHSETALGAYYRSISRRIGGDVAVFATARKLATIIYRLLRWGQPYVDEGAEAYEKRYQKMRIETLAAKAKQLGYQLMPTTA

SEQ ID NO: 242977 - protein, 397 aa, unidentified
MTIIVGIDVAKRNHEASFVDSSGAMLGKSYSFPNSHSGMNQLLVQLEKRNPKGLPVVFGMEATGHYWLGLYSHLLEKGYTVHVINPIQSDSLRNFYIRQTKTDVIDSFIIAEAIRFGRFAATLRAEPDLIALRQLCRYRFSLVDAVADLKRKVITIVDQVFPEYEKLFSDMFGKSSKEMLSSFSIPEEFLAIDVEQLAKQLQETSRGRFGIAKAEEIQDAARQSFGIKVATDALTFELRQLMDRLAFSEKQLADLEEQIMKYYDRFPCTLHTITGVGKIMAAVILSEIGDISRFSAPAKLVAFAGIDPSIKQSGQFHGTQSHMSKRGSAYLRRAVWLVAFPASRFDPVFAAFYQKKRSEGKAHGTALGAVARKLLYTIFALLNSGQEYVPQVLAAHS

SEQ ID NO: 242978 - protein, 366 aa, unidentified
MQVPFKQSIGVDVAKETFTACLCQQDIEGFCRLSQVEEFKNTKTGFNKLIKWFRKIAAPKVPVVFVMEATGNHYENLAHHLYGLKQQVSVLLPNTVTHYAKSLNVKSKTDAIDARVIAQLGVERKLTQWVAPRPIFKQLKALTRLYSQLQKEKTVFTNRQDSLKTGYQPQRFVLDSNKTVINTLNQQIKKCEREIEKLVKSDQWLWSKIKKIMTTKGLGITTIAVVVAETQGFEFVQNIRQLTSYAGFDVVRRESGTSVKGKTRISKKGNSRIRAALYFPALVAVQHNKDLSKAYYRIIEGKPSKMVGITALQRKLLILIYTLWKNDQEYQDNYLNTVKKKAGRDNPSLPAQDELIPDRTELSFVV

SEQ ID NO: 242979 - protein, 451 aa, unidentified
MARAKRSRPARDISPTHPNAAAIDIGAKLHVAAVPPDRDAQPVRSFGTFTGDLQRMADWFESCGVRTIAMESTGVYWIPAFEVLDQRGFEVVLVNARDAKHVPGRKTDVSDAQWLRQLHEYGLLRASFRPKGEVATLRAYLRQRERLLDYAASHIQHMQKALMQMNVQLHHIVSDITGATGMRIVRGIVAGERDPAALAAHRDRRCHASAEEISAALAGNWREEHVFALRQALELYDLYQAKVAESEARIEQVLARLRVASKSPAGQLPPARHRDNSANAPAFDARAILYSVLGVDLTQIHGLGPSLVLKLVGECGTDLSAWPDAKHFTSWLCLSPSNKISGGRILSSRTRRSGSRAAALLRLAAVTVGRTQTALGAFYRRLSTRIGKAKAVTATARKIAGLFYNAVRHGMVYADPGASYYEERYKARVLANLRRRATSLGFILQEAPSPA

SEQ ID NO: 242980 - protein, 457 aa, unidentified
MEEPREVPDEEHERVWERVAAIDVAKGSGVACTRVPDEDRPGRRRTHVWTVAARANAVIELGDHLRGLQIQVVTLESTSDYWRIWFVLLEAAGLKVQLVNARHAKNVPGRAKTDKKDAVWLAKLTERGMLRPSFVPPPQIRRLREFTRLRADLVHERTRFWARLEKLLERALIKISDVASTLDTKSCRAMIEALIAGQRNPQILAGLAKGAMRKKRADLIEALTGKFEDHHGEIARMLLDEIDCLTGKIDQLTTRIAGLLEEIPAAWGIDADGITGPGAGTGPGARVLPAVARLDEITGCGAYAAQAVIAEIGLDMTVFGTPARLVSWAKRCPQTRQSGSKTSHGKPGKGNPYLGGILGEIAASAARTDTFLGERYRRIARRRGKRKALAAIARSILVIIYHLLADPEARYHDLGPDHYDTHLNRDRKIRSLIHQLQAIDADPGEVAALLTRQPPAA

SEQ ID NO: 242981 - protein, 333 aa, unidentified
MKSNVFGIDIAKQVFQIHWVDQETGEIHSDKVKRKDFINYFANQQPSIIGMEACGGAHHWGRLFKKMGHSVKLLPANKVKPFVVGNKNDMVDARAIWTAMQQPGMKFIAVKTEEQQSILSIHRMRELLVKHRTAQINSIRGLLTEFGLVMPKGKKAFKEQLPNCLEKLESKVPSAFMHALQVQIEQLSHLDTDIKRLEMQIQIWFKHNVDCQRISKVPGVGPLTATALIASMGDASVFKSSREFAAWIGMVPRQTGTGGRVHLHGISKRGDIYLRTLLIHGARSVISRSKEKSEWLQSLQARRPKNITTVALANKTARTVWALVANQTEYQPC

SEQ ID NO: 242982 - protein, 418 aa, unidentified
MLSIKHFVCCGMDVHKKFVVATIALTDYRGVTSYVKKRFATFNSDLNSLKKWLLSFNCTEICLESTGKYWIPIFNILEDSCHVVVANPKYVRAIKGQKTDDKDSAWIADLFKFDIVPSSYIPCKEIRMLRELFRYRQKLIGHRSSEKNRLQNALTVSNIALASVLSDTFGKSATAIVDYILTCEVFDPEYCKSLLLKKAKDKADDVVTSIIGYELRRDQSVKIKVCRKHFDEINECVSTLEETISDLAKPYHKFIELATTIPGITEQSATFIIAENGVDMAVFKSSKRLCSWAGLAPENNESAGKKKSVHVSRAGVYLKPLLVQCANAAIKSKNPYFRYKYDRIKKRRGHKRAIIAIARMVLTCIYHMFQKQEVFNPADTDYSAIPEEMYRKFQEQYDRNAIKRLEKRGYVITPPAMA

SEQ ID NO: 242983 - protein, 284 aa, unidentified
MSQSYYIGLDVSARSVNLCVVDHDGNVVHERKLFSDPEEIAQHILSLQFPIVRVGLEAGMLSQHIYGSLAEANIPVVCVETRHMKAALAAQLNKTDRHDARGIAQMMRVGLFKPVHVKTPNSQRLRTILTARQLLRNKLQDVENEIRGLIRNFGYHLGKVTARDFESRVRELIADTDLHTVADALLLARRGLREQFGRLDDMLVRLARQDEVTRRFMTVPGVGPLVALTFRATVDVPARFTRSRTVCAHFGLTPRKLQSGEVDRNGRISRWGDEMMRSLLYEAA

SEQ ID NO: 242984 - protein, 359 aa, unidentified
MSKDSKVKLAVGLDVSDKWTTVHVVAMGSGEDVEQSRVRTSQDALRQRFAGVERMRIALEVGTHSSWISRLLEELGHEVIVANASKVALIHGNTRKRDQSDAENLARLSRVDPKLLHAIRHRSQSAQEDLAVIRSRDQLVRCRTQLISHVRGSVKAIGSRLSSCGAECFARRVAGEIPRGLKPALEPMLAQIAALTQAIREANRRIERLAKLYGATELLVPIHGVGALSALTYVLVLEDPTRFAKSRSVGAYLGYARRLDDSGESSPPLRITKQGDELLRRLLVQCAHYILGPFGQDCDLRRCGERIAGRGGSFAKRKAAVAVARKLAVLMHHLWVTGEVYDPFYTARRKGEAPQEHAI

SEQ ID NO: 242985 - protein, 394 aa, unidentified
MKLVGIDVGKNSHHFCVMDKETGEFNVTPSSFSNNKEGFDFLINSLKPYSKKSILLGMEDTGHYHVALLKFLLSNGYTVALINPKTTDLTRKMEGGITKNDKLDTITICDVLDTPERKKQYRITKVDRFDLYEQRQLTRHHHNLKEELNIYCNRLQKSINLVFPEFNTLFGSKYGVVYMNLLKTFGSAEAIASTDIRTIRKCFEIKGRGGRISLTAEKLKECAKNSIGISSEVETIQIKHLVSQIMLIKEQIAEIDKKIEEFSIKNNSPILSIPGISHFSGTSILAELGDIGNYSKPSRIIKFAGVAPYHYESSQYNAQHTAITKKGSKYLRKTLYQVILPVINNNPVFKKYYRLKISQGKGHRCAKGHCIRKLLRVIYHLLETGQSFDPALLR

SEQ ID NO: 242986 - protein, 358 aa, unidentified
MVRESVTEKKDLQWVGVDVAKQTFQAALARPGQRFGLTKLGELPTESFPRTREGVERFVDWLALLLPAKREALNTRVVMETTGKYSIELAALMDAVGCGLRPAIVHARQTNAFIKSMNVRGKTDALEARALAFYGIERSPVAYEPLTEEQSTLRELVRHRRTLVEQKCNADNRGGEGSTSDYVRKARVREHNFLNKEIARVDKEIRECIAKSEALKKDYALLTTIHGVAFVTASVILAELGDLRRFERARQLSAFVGLSPREVQSGTSVFKKAHMCKQGNASVRQALYLAALTAVRDGGYLQENYRRACAQGKPKMVALGMIMRKLIVLMRTMLINNQEYDRNRRPNVQQNDIQEARA

SEQ ID NO: 242987 - protein, 332 aa, unidentified
MKNYSLVIGIDISKNTLDVIGINSQSQITLQHLVIDNTHVAVKQFLKRSAVNKSSALVVFENTGVYGRNLSEGLSQADIDYAEVSALEIHRSLGISRGKSDKKDAFSIAKYAISHIFELELSHVAERDIDKLKLLHNQREKIVKTIGQFKSIKESEMFLSKDMTKELTRSNDKLVKGLKKALKEVEALISELIKSNEDFNNNYKLANTIPGIGVQLATYLIIVTHNFTRFSNSRKLACLGGVAPFPYQSGSSIHGKTKVSHLADKKLKTLLNMGALSVMKCDYQMKEYYERKVQEGKNKMLVINNLRNKLLSRVFAVINRQQPYINTHKFAV

SEQ ID NO: 242988 - protein, 314 aa, unidentified
MAKQAVVVGIDIAKGWFDVAVLETGETFRLGNDKAGWAELIKRLRRFSVKAIGLEPSGGYERGLGQTLHKAGLMVRNVNPHKLRNYARACSVLAKTDGIDALMIARYTAQLPTQPLRVDPLTRQLADLVLARRQLSDEKVRLGNQLEQLADGIVRRMFLVRLRRIKLDMLVIDKHLTELVASDPELARKDKLIQSLCGAGPVLSHTLLALAPELGSANRRQIAALAGLAPYAFDSGVFRGRRAIWGGRSEVRRVLYMAALTASRANPTLRLFAQRLTAAGKAAKVVLIAVARKILTILGAMLRTNQPWTQPIAG

SEQ ID NO: 242989 - protein, 482 aa, unidentified
MKKKNIFQNQSQEILSIFEMAGDRSKVMCVPMDYAKKDHVVMFCNGNGKIIRKPFSVKNSPEGKSYLIEQVTKSCRHHGIKPEHVFYGGEDCGSYADNFISTLRSENCLVAGVNACDAKKHRDNKQASTDILDLMGICKMLLSCKGNCSPAQTGIYWNLRMLVRQRRKLVQMMTGVRRRIHFIVDQIFPGFLDEKKSGIFPFSRGSLALMGNRFSVHQIRRRNRSTLSRFLARNLVHHADHCAQHLQKYTSQVLQPPEKYIATLQLALQQQVKLFACLQESIQQMEKEIAEHLAQTPGAFLTSIRGIGIVLAAGVCAEIGDPDKQKSLSQLVSYAGIVPRIKQTGGVQGKTQVKKVGKRCNRILKDYVVRSGCHIGINGPEELKLDHKRRGAQGQHADFGMSRRYLRMAMCLMRTSQTYLPKSLRDTRTPMKERAQYYILTWSTLREKWKRKDALEFAFDKDRPLGAWRNVVQDLYGIELGL

SEQ ID NO: 242990 - protein, 342 aa, unidentified
MEIKTIGIDVGKSWFHLVGCNRAGKPVSRHKLNRGQLAQFIANLPQCLIGMEACPGSQHLARAFQRSGHEVRLIAPKFIKPYVKGQKNDFNDAEAIAEAVSRPTMRFVTVKSNEQLDLQAVHRIRERLVSERTAVINQIRGFLIEYGLPVKEGRASLRRDLPGILEDAENGLSPRMRQLVSALREHWHALEVQIAQHTHDIELVAKRNDDCRRLITVPGIGPLGATALIAAVGNGAMFNKGRELAAWLGLVPRQQSTGGKPTLLGISKCGNRYLRMLIIHGARSCLRHLNRDNHELGLWMTQLERRSHKNVVAVALANKIACIAWAVLARQEVYRSSAAVAG

SEQ ID NO: 242991 - protein, 342 aa, unidentified
MQITTIGLDIAKNVFQVHGIDANEKVVVRKQLRRGKLMAFFEALSPCLIGIEACATAHHWARELTKLGHEVRLMPAKDVKAYVKRNKNDAADAAAICEAVRRPTMRFVRIKSPEQQGQLMQHRTRDLLMRQRTQVINALRAHLAELGIVAAKGDSGVKELLAIVADEEDTRLPIDARASVIVLAAQLGALQTLIGSIEKRIKMQHRANEASRRLETIPGIGVIGATAIAATVADPTVFRSGRDFAAWIGLVPRQDSTGGKQKLGPISKQGDRYMRRILIVGAHSVLRRALENPEKYPWLTQLLARRPFKVVAVALANKMARVAWALLAHGGTYRAPELAEAA

SEQ ID NO: 242992 - protein, 340 aa, unidentified
MDVRTLGIDLAKNLFQVHGVDGQGRTVVQRQLRRRQLMPFVAQLQPCLVAMEACGGAHHWAREIARRGHEVKLMSPRLVRPYVKSNKNDARDAEAICEAVGRPSMRFVAVKSQAQQDMLALHRVRSLLIRERTALMNQMRGLLAEYGIVVAQGATPLRRALALIMEDRENGTSELLRELLAEMSERLRLFEERLKRYDRRIAEFARADERAGRLMAVEGVGPLTATALIAAVGNARQFRSGRELSAWLGLVPRQYSSGGRSVLLGISKRGDRYLRTLLIHGARATLRFAARKRDPRSRWIGAVRERRGANIAAVALANKNARVLWALLARNEDYRVPAAA

SEQ ID NO: 242993 - protein, 414 aa, unidentified
MFAVGVDVSKGRSTVAVLQSKSTVTLKPFEVSHTPEGLGKLVERLNSLGGETKVIMEHTGRYYEPIAMFLDSSGFFVSALNPILLNRYQENPSLHNVKTDTADAVKIARFGLDNWDQLRQYEPMDTIRYQLKTMHRQFQLASKSETAFSNNLIALLEQTYPGIRKFLSSPARPDGSQKWVDYVGTFWHADCVQKLSLKAFTERYLKFCQRHKYNFSEDKAAELYRHAQNVVTLVPKSDISRLLIKEAVSQLNATSRMVETYRAEMNRLASQLPEYDTVMGMYGVGPSTGPQLIAEIGDIRRFPKKNSIIAFAGIDPGKDDSGDVTRKSNRSSKRRSPYLRKTLFVIMNVLIQLKPADDPIYQFIDKKRAEGKPYYVYMTAGGTKFLRHYYGKVRDCLREKGLWDKSVDDGQASE

SEQ ID NO: 242994 - protein, 370 aa, unidentified
MDQDTEVFVGIDVAKARHAVAVAGGGRRGEVRYLGEVGADRDSVRRLVAKLEKRHGRALHFCYEAGPTGYGLQRQLAALGHACMVVAPSLIPRKPGDRVKTNRRDAEQLARLLRAGELTAVWVPDETHEAMRDLVRARHSAVEDLRRRRQVISSMMLRSGRIFPGKSTWGALHLHWLREQRFEHPAQQAVLQEFLLALRHAAERIRRLETMIKECLPSWSLGPVVAALQALRGVKLVNAVTIMAEIGDLRRFGSPRQLMGYLGLVPGERSTGDTVRRLGITKAGNGRVRQALVESAWCYRHAPRTGRMQHYIHEQLPAAVCDIAAKAQLRLCARYRSLMAKGKKVTVTITAIARELAGFIWAIGREVQPV

SEQ ID NO: 242995 - protein, 315 aa, unidentified
MTKPVSTKISVGIDVSKSTLEIAIHETGERWSCNNKPEECAALALKLKQLQATSIVLEATGGFETLVAATLAATDLPVIVVNPRQVRDFAKATGQLAKTDLIDAQVLAYFAAAIDPQPRPAKSAEAQHLEALLARRRQVVEIIVAEKNRLANNRDRAVVKDLKIHIAWLERRLKSSDDELQRVLKASPAWCQHDSLLRSVPGVGPVLSLTLLAQLPELGQLNRREIAKLVGVAPFNRDSGRWRGARHIWGGRAAIRSPLFMATLCAIRINPAIKSFYQRLIKVGKAPKVAITACMRKLLTILNVMIKTQTSWRTA

SEQ ID NO: 242996 - protein, 500 aa, unidentified
MKTKPSSKLNSSIYRNQNALLRALFDRAADPRKVLCVALDYAKRKHVALCCNGNGGILRAPFAVDNTVEGVAFLVEQISATARRRKIPKCDIFLGGEDEPSYVANFTAALRSRQYLVLRVNAAEAKENRENQIASTDLLDLLGIAKTLLSRRARSTEPVGSKDKKLSQDLYFQIREITRCRRGLVRQQTAASNRIHAYVDQLFPGFLEQPKSGLTSFCEASIALMMERFSAPEIARRRPRTLAAFLARHGVRQPDEIAAKLIALASGALPPAPQRLAALQRTLSATVDLRQCLTRNANELRCQAAILLASTPYAMLTSIPGIGFTLAAGMAGELGHPLRLSGVDSLCAFAGIVPHTFQSGGPDQPACQGHTPARCNHILKDWTVQSAQKILLYGPPELKDRITRWNANGQHGIFAGARRYLRLLRSLVLNQVPYLDPASRSSTASNDERADAALRAWLILIRKWCTIPGGLTIISDQSTPLGFWRRTAMESRDVVLPLKP

SEQ ID NO: 242997 - protein, 399 aa, unidentified
MERTYSVCCGVDVGKSSHHFAAIIPATGELVFDGKVEQSESGIRDALLSVSLFGSPVVVVDQPGNMAALLFAVCDDMGIAKGFITPRAMSQAIEMYGGDIKTDAHDALVIAEVSSSLPKLVKPVSEKSALYLRLSALMSYDRELTLESTRATNRLHDLLLSVSPALEAHLEGKRVQSNFSLMVLSRYGGPAGLKKAGRGNVRRWLGSRKGMGEAALRRLDDLLEAIGRQSVTIAGSEYVEELIKQEASFLLTVLASRKKVAESRDELLSQMPEARLLMSLPGLGAVTCATFLAEVGDISRFPNASKLASYAGLAPKVRQSGKTIHSVTKPRGGNRRLKRVLVLSAGKSVQFCEESKAYYERKRSEGHSYGSCMMALARRRLNVMYAMLRDGTAYEKQNG

SEQ ID NO: 242998 - protein, 354 aa, unidentified
MYYVGADLHKEQTWFYIMDQNGFKIDSKSITNSPDSLKSYFATIPAPFTLAVESTYNWYFFVDIAEQFAEHVYLANSFELKAFAKRHKKTDKIDARLIADVLRKGFLPTVFIPDNSIRMLKEVLRYRMNLVRDRCRNIFRLKNTLDKLGADSNGDFTTDKRLREIPLDSFDENQRYIIAGYIGRIITLSQQIRSMKTYLRDELLGDKDIQYLITIDGLDYFSAALLKSEIADISRFASFNRLCAYAGLAPRVSQSGSKKAHHGALMVNRRKNLQWILIEVVFHFIKATPERQARYEEFKNHKGANTAKIIMARQLLKIIYHVLKEQRPYYRYEVKRPIISHQIQSVAAAALNGV

SEQ ID NO: 242999 - protein, 309 aa, unidentified
MVFDVTDSDGNYYQFKNTISGFKNLAKLLTLNSHCVMEATGYYHYQLAYYLLELGIKVSVENPLAVKRFIQMKLSKIKTDKSDSKLICEYAKQVDLKLWEGQSKHQRECLQMTRLLSVYTKQSTMLKNKIHGEAVLGNPSKVVQSSIKRSLRQVQKEIEILEDKLLVLVKEVHHDVLTRLKSIPGIGNKTALMLVVLTDGFDRFTSASELCSYAGLTPVVRKSGSSVNGRSRISKIGNQKLRNLLFMCSFNACKYNKACRDIYERIVAKGKSKKLALIAVCNKLLKQAFAIAKSGLIYDDSYRSTLVKS

SEQ ID NO: 243000 - protein, 366 aa, unidentified
MASLAHPDATHLGLDVHKDSISVGILNAGHESVDVEKIFNDEESVCRLVARFPEPRLLRACYEAGPTGYDLHRLLAWLGVRCDVVAPSLIPKAPGDKVKTDKRDCRRLARLHRAGELVAIRVPTPLEEAVRDLYRTRGDMVEDLTRARNRLTKFLLRHGCVWRGGSNWTVKHEAWLAAQTFEEAALTTTYSHYRAVVATRDAQLAAVEADLIPWFDREPFADGVHRLGAYRGVTHMGALGLQAEVCDWRRFGRAAALMGFMGLVPTEYSSGGSTHRGHLTKAGNAHVRAQLVEGAWQYQHRPYVGSVIAKRHEGVRPETVARAWAAQLRLCGRFRHLAARKNTKSVVVAAVARELVGFLWAEMNAA

SEQ ID NO: 243001 - protein, 389 aa, unidentified
MSTEANRAETPAAIQTHFAAIFISLELSRSVWLITSLTPGGGERMSKHSVRAGDVTALLARFSDLKQKAVARTGKSFPIVTIQEAGLDGFWLHRALKQEGIESHVVDPASIATSRRRRRAKTDRIDGEALLRALLAHKRGEPRVCAMVRAPTPEEEDRRRLSRERKVLIAERVEHVNRIKGLLFAQGIADYEPLRRDRRQRLEDLTTGDGRPLPAHLKTQISRELDRLELLLNQIKLTEAERDEVLAAQQTAAPPPAGRMLLDFKGIGAEFAAVLWLEGLFRHFDNRRQLASYAGLAPTPWQSGSIDREQGVSKAGNARLRTTLIQLAWLWLRHQPQSALSRWFHERVKRNGGRMKKTTIVALARKLLVALWKYVSSGVVVEGAVMKAS

SEQ ID NO: 243002 - protein, 357 aa, unidentified
MKKRSYVGMDLGDRNHEVCVLDEAGEVERRDTVVNTAEALTKYFSRQAKGTPVAIEAGTHSGWISRQLAAMGLHVLVAQPRKLRALWGRDRKNDASDAELLARMLRADPQLLHPIVHRSEQAQIDILTLRSRDALVQTRTKLINAARGMAKSLGHRLPAASTQSFATQARVAMPPPLHAALLPLLESVENLSAQIKIMDRQIEQTAKERYPQTARLREISGVGSLTSLAFVLTVNDPKRFMRSREVGPYLGLVPKQDQSGSLDKQLHITKAGDGYLRRLLVGSAQYILGPFGPACGLRCFGQRLAARGGKNAKRRAVVAVARKLAVLLHKLWVSDAVYDPTRGLDPATIADLQRQPA

SEQ ID NO: 243003 - protein, 408 aa, unidentified
MARVLVGHDWAEAHHNVFVEDETGRRLGGGRLPEGIEGVARFHALVADHVEDPAEVVVATETDRGLFVGSLVAAGYTVLAVNPLSVSRYRERHSTSGAKSDPGDARVLAELARTDHQNHRPIAGDSELAEAVKVLARTHQNLIWTRQRQVNTLRSTLREFYPAALEAFEDLAHPDALAVLAEAPTPERGAALHRAQLQALLRAGGRQRNITSRAEQIQVSLRTEQLTAAPLVAAAFGATVSALVAVIGTLIGQTTAVQARLEASFEQHPDAQILRSLPGLGLVLSARVLAEFGDDPHRYADAKARKNYAGTSPITRASGKSRVVLARYARNRRLADALYQWAFSSLTTSPGARAYYDAQRSRGATHHQALRALGNRLVGLLHGCLRHRSTYDEHKAWTKTANEQAKAA

SEQ ID NO: 243004 - protein, 325 aa, unidentified
MYFVGIDIAKDSFDVAVLGGPQTYRGQFDNDQSGFNRLRHWLKKRGAREAQVAMEATSSYWMELALFLDEQGYTISVINPKLIKRHGEATMQRNKTDREDARTIADYCAKQQPDPWTRPSEAYLALRAMTRHWQALKIDRQRERNRRQSGIANQQVAASIDAHIAFLDEQIEELTQHIHEHIDQDPDLKHNKALLLTIPGIGDTAAAVFLAEIPDVTCFAHASQVAAFAGLTPGQRHSGSSLRSRGRLVKWGNSHLRAVLFMPSLSAHCWNPIVAALKVRLEARGKNGMTINVAIMRKLVHLCYGVLKTGLPFDPNHAATVQFST

SEQ ID NO: 243005 - protein, 407 aa, unidentified
MQKRENLLYVGIDLHKETHTAVMVNCWNEKLEVVVIENKPSEFKKLAEKVNRKSSILGLNPIYGLENAYGYGRSLAVWLIENGYIVKDINPALAYDQRKSAPMYRKNDEYDAYCVATVLINQLHTLPDAKPKDNEWTLAQLVNRRDLLVKDGIRFKNGLHEQISMAYPSYSKFFSEIDGKCAMYFWKTYPSPVHLQEKTAEELTMEFKEISRITKKDKAELILDCVQNDGNTFREYQESRDFITTSLVRDLEHQKEELAGLDKEIEKILLSFDYKLTSMPGIGTSIASKLIAEIGDIRRFSNADKLARFAGVAHVKFSSAGKGKEQSSRQGNRQLHGLFYFLAVTMVSRPKNGAPNHPVFYDYYMRKIGEGKTKSQALVCIMRRLVNIVYGIMKNKTEYREPLPEKE

SEQ ID NO: 243006 - protein, 427 aa, unidentified
MSVTQNEKIRQVTETTMVIGVDIARDTHWARAFDWRGLELSKAVKFENSAEGFHYFLCWASELAAEQKKGRIMVGLEPTGHYWFTLAAYLQGGSMKLVLVNPYHVKRSKELDDGHPSKSDKKDPKTIAKLVLEGRYVLPYIPQGLYAELRVAMNCRWRVQKELTSVQNQIQRWLKIYFPKHKTVFGEFEGIGSMALLHAAPLPSNLVALGVDGINQIWRQMKLRCAGLKRAQRAFEAAQNSVGCTTGIEAARMELQILLEDYDAKLQQYERIMKVVESLCRQIPEVEELLKIKGIGLITVAGIFAEVGDLRRFSSPRQLQKLAGLAITENSSGKHKGQTEISRRGRAHLRAILFRAVMPLVARNEEFQKLHHYLTTRAENPLKKMQSIIAICCKLLRVFYAVATKGCAYSAEKMLADIRRNQPLKAA

SEQ ID NO: 243007 - protein, 338 aa, unidentified
MTIQADQIVKESKLFSGIDVGAEELILVIRKNGISCNPLKFKNNRSGYALLVQKVVKSPGIIVCLEATGAYHFDLSIALHDAGVALMVVNPKASHNFSKVLMKNSKTDAVDAETLAQYAERMDFIAWTRPSNEKMALRCFARRIDALTHQKAISKNQVHALNVTQATPKAVLRDATLAISQLEKRIARLSQEALLLIRKHTDLERVFLLLIDIKGIAETSAIALMGELLLLPPGLSHREWVKFAGLDPRAFDSGKSVHKPARLSKTGNRHIRSALYMPALSAKQHDPHVKAFFQHLVDNGKKPLQAVCAVMRKLLHAIHGMLKYDKPFDNTRFYAIPA

SEQ ID NO: 243008 - protein, 352 aa, unidentified
MKCDKYIGMDVHQATTVVAVMDAEGKIIWETIVDTQAGCIIRLMQSLSGPLHVTFEETTQADWLYEVVRHFVTEVIVCDPRRNKLLSEGSKGDKVDARKLAELLRLGMVRGVHHSDGTRQLKELVRGYETICGDTQRTMVRIKAIYRARGIRTPGRSVYQAKQREQWLQQLDEPGVRQRMGWLYEQLDHLKPLRRQAKRAMIQESRKYRGVQLLRTIPQLGAIRAALIVATVDTPHRFRTRHQLWSYIGLAVVTHMSSEYELQQGRVVRSRKPIATRGLNRNCNRRMKDVFIGAATGGSQTEPYRSYLQTLQDKGIRKEMARLTLARKIAAIALRIWKKGETFDPKKLNWTT

SEQ ID NO: 243009 - protein, 400 aa, unidentified
MYDIDDVGVFLGLDVGKTTHHGHGLTPAGKKIFDKQLPNSEPKLRAVFDKLAAKFGTVLVIVDQPASIGALPLTVARDAGCKVAYLPGLAMRRIADLYPGEAKTDAKDAAVIADAARTMPHTLRSLQPTDEITAELTVLVGFDQDLAAEATRTSNRIRGLLTQFHPSLERVLGPRLDHQAVTWLLERYGSPAALRKAGRRRLVEVIRPKAPRMAQRLIDEVFDALDDQTVVVPGTGTLDVVIPSLARSLAAVHEQRRALETQIGQLLEAHPLSPVLTSIPGVAVRTAATLLVTVGDGTSFPTAAHLASYAGLAPTTKSSGTSIHGEHAPRGGNRQLKRAMFLSAFAALHDPASRTYYDKCRARGKTHTQALLRLARHRISVLFAMLRDGTFYEPRTPRLA

SEQ ID NO: 243010 - protein, 342 aa, unidentified
MESAVTIGLDLGKSVFQIHGVDAGGAVVIQRRLTRGRLLAFFAKQPACLVGMEACAAAHHWGRELQKLGHRVRLMPPRYVKPYVKRQKNDAADAEAICEAVTRPNMRFVEIKTCEQQGILVLHRVRLMLTRQRVQLSNAIRGHMAEYGLVAPVGRNGLQRLIAVIDDPDDARVPAVARASLAPLVRQLRLVNDQVLENDRLVRASARSTELGHRLMEMPGVGPVLASAMVATVADPTAFKSGRDLAAWIGLVPRQNSSGGKEKLGGITKQGDRYLRQLLVAGALAVIRYAQRHGTRRPWLMHLLARRTPKIAAVALANKMARMIWAMMVTGERYREPKVSAA

SEQ ID NO: 243011 - protein, 309 aa, unidentified
MEHFVGIDVSKDRLDVHLRPSGESFAVARDGEALAGLVERLQALAPALVVMEATGGYETVVASALGAAHLPLAAVNPRQIRAFARATGRLAKTDRLDAAAIAHFAEAIRPPARPIAEPEALALGELVARRRQVIEMIVAETNRRRTATQRRVIRAIERHLAVLQTELSELDGDIDGAIRNSPAWQAEADLLQSVPGIGPATLRTLIAELPELGKLDRRKIAALVGVAPINRDSGTLRGRRTIAGGRAAVRTALYMPTIVASRANPVIATYYKKLRAAGKPAKQALIACMRKLIVILNAMLRDQKPWQPA

SEQ ID NO: 243012 - protein, 406 aa, unidentified
MFYGGIDVAKYRHEVCIVDEGGNVILQFFMDNNSNGFKKLIHNLKRLEIEVNKVEFCLEATGHYWLSLYCHLTELGYKIQVINPIQSDALRNFYVRKTKTDRKDAQLLADIVRFGHISETKLASETVLKLQSLSRLRFEFVRQVGGLKNRVLSILDRIFPEYPQCFSNVFISTSRELLKSFTAPEDLAAADLSELTAFLNKYSRGRLGADRAKQIQALAKGTFGINIALDAFTLELRLLIEQIEFIEEQISVIEKAIDQVMEEMRPNKDTTYRHVLETIPGIGPVLAASIIGEIGDINRFSNAKALVAYAGLDATVRASGQFEGTRNRISKRGSPVLRHSIWLAAISARRFNPEMKQFFEKKRSEGKHTQVATGAVARRLVHLIYSLWKDNRPFDPNYQWSPTNSH

SEQ ID NO: 243013 - protein, 342 aa, unidentified
MVVVSPFEVLHTDSELSELAGLLKSLDGETRVVMESTGNYHAPVAWLLHDAGLYVSVVNAMLVHDYGNNSLRRAKTDKKDAVKLANYGLDHWLTLPRYIPEEDTRLMLKICYRQYQQYSKVQTMLKNNLISLLDTTFPDANRLFTSPPRADGSEKWVDFVATFWHCECVCGRSEKAFTTQYQKWCRKHGYNFSEDKALDIYASACRHFGVIPKTDTAKLLVEQAISQLQTTSSALAALKQEMQSLAASLPEYPVVMGMFGVGPTLGPQLLAEIGDVRRFHSKKALVAFAGIDAPPYQSGQIDVRSRSISKRGSASLRRTLFLVMSVILQCAPIKSQEEISDF

SEQ ID NO: 243014 - protein, 377 aa, unidentified
MKRILKIGMDVHSTNYTLCAMEPVFGADDRIYATVQITPDYKNILMFIEKVRQKLDPYDTYDIECGYEAGCLGYSLYNQLTAAGVKCVILAPTTMLTQQGKRIKTDARDALMIAQCLSYGGYQPVYIPTEDDDSVKEYLRMRDDHKLALKKVKQQINAFCLRHGYHYPQSKWTRMHLDWLRRIKLPPLYQETLDEYMATYFEMTDKLEKYDTRIREISAQEKYSDNVKKLGCFVGIQTHIALSLIVETGDFCRFAKGNAYAAYLGLAPGEHSSSDKINRLGITKAGNSHLRMLLIEAAGGICKGNIGYKSKALKKRQQGNSVQVISYADMANTRLRSKYYRLIRHGKKRNVAVAAIARELACFIWGMMTDNIEERVA

SEQ ID NO: 243015 - protein, 437 aa, unidentified
MRVLYEHVAGIDVHKDMIKVAIRSPGEKPWTRKTEILEFRTFYGVLQEMARLLRRRGVTHVVMEASGVYTDPVYYALCEQDFAEVAVVNPAHARALRGHKTDAADCRRLAELFECGLLRGSYIPPAELREVRDLTRYRMKTVQARTSEIQRLGKALESAGIKLGSVASDITGKSATAMIDSLIDGERRGAVLADLAIGRMRTAGKLADLSMALTGRFTEHHALLCRLHRDRIAGLDAAVADLDDQIAGRAGRWQRELDLLKTVPGFGDVVAQTWLAEIGPAPHRHFASHEKLASWVTLCPGNNISARKRKHGRTGDAGTYIKPMLIQAAWNAIRPKGRLQARYSRLVRRFGGEKNPGAKKKAITAIAHTLLKIAYQVLKSEVPYQDLGADFYTRRESPDQQRAYLERRLRKLYPGCAITITISPPEAVLTSTVSNAP

SEQ ID NO: 243016 - protein, 369 aa, unidentified
MGKYSEVFVAFDVAKKKHAVAIAEGGRTGEVRFMGDVENNPAPIERTIKRLANRYDRLHVCFEAGPTGYGLYRQVQALGHDCMVVAPALIPKRAGERVKTNRRDAVTLARLHRAGELTGVWAPDPAHEAVRDLVRAREAAADDLRRKRQQLLSFLLRHSRIYSGGGHWTMAHRRWLAGQKFEHPAQQIVFQEAIDAIEDALQRLRRLEKQLAVIVPEWSMAPVVEAYQALRGASFLVAVTFAAEIGDVRRFDTPRQLASFLGLVPAESSTGDTIRRKGLTLAGNRRARRALVEAAWTYRYPARVSQTLRARLEGLPKPVRDIAWKAQVRLCARYRRLSATGKKPPVVVAAVAREIAAFLWAIGREVAPT

SEQ ID NO: 243017 - protein, 475 aa, unidentified
MKEKYRRCCGLDVHKNSVTVCVLAPAGQRHIEVKRRKFRTFTRDLKQMRAWLKNCQVTEIAMESTGQYWRPLWNLLEGEFARLLLVNPQHIKGLNGYKTDPKDAPWIADLLESGKLRGSWVPARPIREWRDLTRQRVNLLEDLNRAKNRMEQLCQAGNVKISSVATDLFGLSGRKMLRALVENRHDAGWMADYAQGALRHKRRELALALEGTFTDEQRWLLAKELRQVEWLEEQVAVLEAEIQRRVTVFEAAIRRLLTIPGVDRKTAWTIVAEVGVDWSAFADAQHLASWAGLCPGNRESGGKRMRAGTRKANRYVKRAMCQAAWAASHTKNTYLSAFYRRMSIRKGAPKAVMALAHHLIVVIYQVLSRGEEYVEFGGDYYDQRNKPRTVARLVSRLAKLGYHVDLRQVETETAPEPESYTIEEPAVTPAPEAQRPKRRRGRPCKCSERGIICRHQSGAVLNSLSQQPLEAGEFS

SEQ ID NO: 243018 - protein, 353 aa, unidentified
MTKVVAGPQAGQAVFIGLDVSRSKWAFNVRWDGQERRRFTTAAELRHLRALVEEYRGCDVHLAYEACGFGYEIAWWLIPRGVRVVVVAPSTVERAHGLHVKTDRLDAGKLAQRLEQGALKSVFIPSRADHERRQLSRTYAQAVQDRKRAQARLRALLQEQGRIGPPPTVGWKAYATWLGEQPLPPAVRMCVEELLGLRQQAQQSAGRLRAAVLRVAAEAAYAPVVRGVTKQPGMGTFSAIRLRLELGDLRRFRTGGSFVNYLGLVPSEYSSGDLVQRGHLVKCGPGYVRAWLVQCAWVSIRGAHPDAALRDVFSRLRPRLGEKRAIIAVTRRLALRLRARWLEALNAPPVQAA

SEQ ID NO: 243019 - protein, 367 aa, unidentified
MNNKNNILYVGLDVHKNSITIVVFKNNENEPFIVISKRNEKSELKKYFKKLQERGVLVCCYEAGPTGFELYRFLIEIGIQCIIVAPGLLPKKPGNRIKNDKRDATNLAKSLRNGDVVSIHVPSQSDEAVRDYIRMRGDFKEDLKRKKQQLLNFLLRHDRKFNESRYWTLKHRKWIKAQEFKEELLKESLTEYYTSIVELEEKIKRLENKIEEIADKQSYRNDVSKLKCLKGIDTLTSLSFVVEISDFNRFSKAEQFMGFLGVTPSESTSGEKRRQGGITKCGNSHLRKLLIESSWHYRNYNPESIRLIRKRKNQKSDIIAYANKAGRRLNKKYIKMIYNGKNSKLTVTAVARELSGFIWGMMTNNID

SEQ ID NO: 243020 - protein, 410 aa, unidentified
METIYERVGALDVHKAQVTACVRVADARGRREPALAEFSTTVAGLVALRDWLAAYRVTHVAMEATGVYWQPVWHILEDDFELTLCNARHVKQVPGRKTDISDAQWLCQLMEAGLLRGSFVPPKPQRQLRTLTRYRKTQIAERQREANRLHKALEDTGIKLDCVASDILGKSGRAMLDALVAGTTDPEVLAELAKGRLREKIPALREALVGRFEAHHALVIGAILAHLDFLDEQISQLSAAIEEQLGPFAVGVELAKSLTGVARRTAEVMIAEIGVDMSVFPTAGHLASWAGGCPGNDRSAGKRRSGRTRKGSKWLGIALEEAALAATRSKGTYLHAQYQRLRPRIGHGRALGAVKHSILVAYWHMFTTGETYHELGGDYFNRRDPERATKRLVAKLQQLGHAVTLEPAAA

SEQ ID NO: 243021 - protein, 321 aa, unidentified
MNKDKEIFGIDISKDVFDVYSVLKGHCQFSNDAKGFKTFLKTLSKEALVVMEATGYYHYRLAQYLFKQGILVSVVNPLSVKRFIQMKLAKIKTDKSDAKAICEYGQMNEVPLYNALTDIQSECLQLFRLSDAYLKKRTATKNKLHGEDVLGIPSKFVYRSLKRDLKHLNKEVAGIDKRLLELVKQEQQQQLTLLKSIPGMGVKTALFLIVITDGFSKFENSKQLCSYAGITPTIRVSGSSVRGRSRISKVGNRKLRNLLFLCAFSACKHNKPCREIYERIVNKGKSKKLALIAVANKLLKQAFAIAKSGRPYDENFVSKLV

SEQ ID NO: 243022 - protein, 399 aa, unidentified
MFCGWDWGSTIHGVCLLDDDGVTIKTWMVKHTDTELAALFAELAQLGEPALIPVAIERGEGLLVGLIARAGHPVLMVEPAAFKASRPRWGAAGAKSDAADAFMLADYARTDGHRLRRVESLERATRELAALVRARTSLVEARTAASNQLWAILAEHWPGAALVFQKLTSPIALAFLTDYPTPRSAARLGEGRMHQFCRRHSYRGGKSPAELVSRLRSAPASADPIAEKVLETIVRSSIAQIGLLNAEITGLERQLADTLATHPKAALLKTLPRVATVSLAALIAEIGPLLERCENPEQVAAICGAAPVTKASGKSRNVGFRYTANKPARVAITSFADNSRHSSAWAGDSYRRARARGARHPHAVRILARGWVRVIWACWTTDTAYDPSRHRGEQRLLAA

SEQ ID NO: 243023 - protein, 428 aa, unidentified
MQEEAGLLGVGLDWAEQFHDVALGAPGKGVIEEFRIEHSPAGVARLVARCLALEPDPGEVRVVVETRHGLLVEALLDAGFTVLPVNPDLVARRRGPAKKKDDAADARICCLLALDQFAELRRLIPHGELGAELRSIARDDDRAARDGRRLGNRLRADLIAVFPAAIDIADGDLGAPVFLRLLERWPSSQELASAGRDEIAAFARAARHGWPDRFADRVVAAVAAQHLPVRPELARAKAGTIRLTAAQLLLLHQQRRVWQRRIGEILVGGARYGRAKQPEDPTLGNAFPGGETYLSMPGLGDRLAARVAGEIGEHVEQFTTPNALQCYAGAAPVTRRSGRSEFVVARRLAYNRYLGNAVQQWAFCSLQQSRWAREYYDAKVAAGKTHNAAPRALGNRWLEILWHCLRIGVTYDEATHAANRARGLQRAA

SEQ ID NO: 243024 - protein, 460 aa, unidentified
MSQRKRRIRKRKKLALAQTPLNLIHHPDAAGIDVGAEELVAAVPPGRGAGPPVRTFSAFTQGLHALRDWLLACHIKTVAMESTGNYWLCACAILEEAGLEVCLVNARHVKGVPGKKTDVCDAAWLQQLHAAGLLRGSFRPQKEILPLRYLLRHRGDLVAQAGQQVQLMQKVLTEMNLHIHHVFSDVDGVSAQAIITAILAGERDAAKLAALRDRRCRAPLDKIKSALVGDYRDEYLFVLQQCQTRWQQLNESIAQCDQEVARRTAAISGVTDAPLPAAPTAQRRVQKNMITTMPVYEEAHRLLGVDLSAVPGLSGGVLCVLLSELGTAKHIRQKFRSAEAFASWLGLCPDNRISGGRVLKAGTRKVSNRIANILRMAANALSREQGRMGEFVRRFKGRLGKAEGIVVGAHKLARIIWALIVSGQPYDEAKAFAITPASTARRLRNLQNQAKALNMTLVPA

SEQ ID NO: 243025 - protein, 345 aa, unidentified
MKVSTIGVDIAKSVFQVHGEDAEGKAIVQKRLGRQGMVGFFSKLPPCLVALEACGTSHYWGRALRTMGHEVRLIPAAYVKPFVKRNKTDARDAAAICVAARRPDMRPVAIKSEEQQASRALERSRELLIKQRTQLANSLRAMLAEFGIVAAQGGRGFAELTARLRGENPGLPETLVAALRLVAAQLDNLTPAIEAMEDRIKTIAKADPTMRRLSAIPGVGFITAHAVVAAIGEGRQFGCARDFAAWAGMTPREDSSAGKRRMKGVSRQGESRLRKLFALGAATLMRNARSRDDRATQWQRGILARRPMKVAVMAQAAKTARIAWAVLTSGRGYVPPSAAAFSAQP

SEQ ID NO: 243026 - protein, 450 aa, unidentified
MYQNFYLGIDVSKGYADFIILNKDKKVVEDNFQLDDTFEGHNQLFKIVSDFIARHPEAKIFAAVESTGGYENNWLGYLTKCQGKLQLSIARVNPFGVSYNSKATLKRIVTDKESAKNIAEYLISHPEKVQYNNEDYYSSVRRQWTFIKMLTKQKVQLLNQLESLLYIANPEVLSYCSNKVNLWTLKMLKQYPTAKHLAKVKLSTLSKIPYITEPLAKDLIDNAKKSVASSVDDTTAEIIKALVEQILQLRKLIYLQNKQLESSCNLAEVELLRSFKGIGTYSAVGLMMEILSVERFSSVKKLASFFGIHPVFKQSGDGLSGFKMSKRGRKEPRQILFNVARFAVVHNPYIKEIYTMHLKKAMPKMAALGAVMYKILRIIYGVLKNNKPFDPEIDRANRAKHNSVDNQAKPDYRRRYQPMDIKAPISRRQIKKRKEQEKSQILKPLNAESL

SEQ ID NO: 243027 - protein, 417 aa, unidentified
MKKHSNSGEKCEPPIKCAQSRVSVRQDSREVMTELVAKLTKQLEGESLPVVELQDEGRSAASPNLNGLTVGVDLGDQWSNYCILGLSGETLAEGQVPTRRQEVTELFQGLAISRVVVEVGTHSAWVQEVIAGLGHEVLVANPRMMEGSKRRRPKNDRIDARKLARLGRVDPKSLYPIRHRSSQERADLLVLRARDALVASRTELINTVRALVKTMGARVSSCSSEAFWKKAEVEIPNELRETLQPLLRLIATLNDEIKSYDQKIEQLASKKYRHTQLLRQVTGVGPITALAYVLTLETPLRFARSRDVGPYLGLVPKQEDSGDSQPQLGISKAGDQMLRKLLVGSAHYILGPFGPDTDLRRFGMRLCQRGGKNAKKRAVVAVARKLAVLLHRLWAGGEVYVPLGHVSPARAAQAAAA

SEQ ID NO: 243028 - protein, 339 aa, unidentified
MRTLYAGIDLHSNNNVVVVTDEEDAVVYRKRLRNELGDVLNVLSPFEQNLAGVVVESTYNWYWLVDGLMAEGYGVHLANTGAIQQYSGLKYGDDESDARWLATLLHLGILPEGYIYPKEERPVRDLLRKRAYLVRQRTSNLLSIKNLFARNTGRHLSANGVKRLTEAEVDEMLPDADLALAVKSSVAVMQCIDAQIKTLEKVVLNRVHLREDFQRLLTVPGIGSILGLTIMLETGDISRFPTVGDFASYARCVGSAHISNGKKKGKGNTKNGNKYLGWAFIEAATFAARYDETIQRYYQRKKSKAHLMVAKKAVAHKLARACYCMLRDQTDFDVHKAFT

SEQ ID NO: 243029 - protein, 348 aa, unidentified
MTQYKRIAIDTSKSVFTIHCIDAQDRPVLRTNLRRGQLLPFFRKLAATEIAIESCSGSHHWGRELTALGHTPRLVPPQYVKPYVKRGKNDRNDAEAICEAAGRPGMHFVPVKSRTQQAQGMVLKVRDTLISQRTVLGNTIRGHAAEFGIVAGKGISTIAPLLSAIEQEATVPPEAKEMFVLLGQQIAEIGARIKEIDAKLNAAHKASEVSTRLATIPGVGRVIALTLSTEIEPSAFESGRHLAAWVGLTPKEHSTGGKQRMGKISRAGNERLRALFVSGATSIINAAMKPSSRQMTEWLRALLLRKPRKLAAVALANKNARTAWAMMTSGETYRRPTPPPGATGALAA

SEQ ID NO: 243030 - protein, 324 aa, unidentified
MSSHEIVGIDVAARKLVMIGERVALAEYENTAAGRSKLAKALSRSPRPVRVVLEATGIYFLDLACELAAAGIAVMVVNPKATHHFAEAILQRRKNDPVDAAMLREFGRRMDFVPWQPPRHELFAFRALTREAQALSKAVAAAKNRLHAITATQLAPDTLIRALERQIAQNQALVDELVAAALAETKTNRELARLVARTDSAPGFAAKAAVLVVGELAVLPPMTARQWVAQAGLDVREECSGTSLARRPRLSKRGNKRLREALFYPALTAARCCPLAGAFVERLVAAGKTRLQAIVALMRKLLHGLHAMWRNDEDFDAEKLFAPA

SEQ ID NO: 243031 - protein, 430 aa, unidentified
MKSNTQNAKIEAITEKTLVLGIDVGSETHYARAFDYRGIEYSKKPFKFSNTEAGFVTFKEWILDIKERHEKDKVVLGMEPTGHYWFNLGRFLQDNEMKPVLVNPHHVKKSKELDDNNPTKNDRKDPKVIAGLVREGRYMIPYLPDGVYADLRTASNIRFQLQAELTRIQNRISRWFNIYFPEYKTVYGKPDAKSGILILKAAPLPEDILTLGIDGVNQIWRDAKLRAVGKARAKTLIEAAEHSVGSKEGAVAARMEIRMLLEDYESRSIRLQEVMTLIEGLVKQIPMAEKLLEIKGVGIRTVSGFLAEVGDISRFNNPKELQKLAGLALVENSSGKHKGETTISRRGRKRLRYLLFEVAMSLVAKNPEFRELHNYYTTRRLNPLKKMQSLMAIAAKLIRVFYVMLTKGVNYDPKKMVNDIKRPAVYLQTA

SEQ ID NO: 243032 - protein, 357 aa, unidentified
MRHASGASTSFDIIVGVDTHKDVHVAVAIDHLGRNLGLYELNVSNCGYRALEMWAQTLGRVTAFGVEGTGAYGAGLARYLQDQGYVVVEVSRPDRAARRKRGKSDPIDAEMAARAVLAGTATGLAKAGSESIEVLRTLKLTRSSALKARTQAMNQIKALVVTAPARLRASLDGLSSDRLVRRCGRLRPARPLTATSAMKQALHLLAQRWIRLTAEMTAIEADLERVTSTVAPELVEALGVGPVVAATLLVTASDQPQRLTSEAGFAALCGVSPIPASSGKTNRHRLNRGGDRQANSALHRIVIVRLRYDQRTRAYMERRIGEGLSKLEVIRCLKRYVAREVFALLKSQMRAPAQETA

SEQ ID NO: 243033 - protein, 419 aa, unidentified
MTQQQNTTAISIMHPVCCGLDVHKMKISACLITIDSNGQEQSEIKEFGAFTDDLISLREWLTTNNCPIIAMESTGVYWRPVHNVLEHHLEIILVNARHIKNVPGRKTDISDSKWLASLLKHGLLRGSFIPEKDIRHWRELTRQRRKVTESLSDYKKRVHKVFETANIKIGSVVSDLFGKTGMNLIERLCDENVSLTEADIAECACGRLKSKSTELYRSIQGFFEDHHRFELCSLMRIISILGSEIGIISDRISWLMTSHDEVIGRLEKIPGVGTRSAQIILSEVGYDLKTFPNTASFASWAGLCPGNNESAGKRKNGKTSVQKHPFKTIMVEVAWAAVRTKECYYKDKYYRLKSRRGAKKAIIAIAHRIAKAIFYVIKHGEIYHELGEDYLKQRRQHKKLKSLRQQASAMGLQLIPVEG

SEQ ID NO: 243034 - protein, 396 aa, unidentified
MISIGIDVSKRKSTVAMMNVMGEILQLPFEVEHSQNGVKELLDLIKDYRKDQVRFIMEATGIYHVGLLNELQKQGYFVHVANPLLIKKYFDAEIRKGKTDRKDALKLSRYGTEKWWILQEHSKADRTYQDLQFLSREYNSLMATKIKLKVQLSNLIERTFPGLEKILKGHYFGLLLDVYELYPCASLVREVSEKKFSTKFIKLATKKGHHKGAQLAQKVYRLAHECVTFEPSQEVAALSVKHCVSLLRSIEQATKAIITQMDDLAKELPEYEVVKKMKGVGDKLAPRLIAEIGDVRRFKDSKSLIAYAGIDAPPYQSGQFEGTKRHISKRGSRSLRKCGYEVMMAIKSAKPTEDNAVYEYMLKKEAEGKNKKLVKIAGLNKFLRIYYARVMELYQS

SEQ ID NO: 243035 - protein, 420 aa, unidentified
MTTSDSTPAAAVLVAIDIAKVRNEVLIEAPGHKRRRRRLVLNTRVEHDHLIEVLQAYGRPVVCAFEATGNYHRPIAWRLAEAGFEVRLVSSLALARTREALHNSWDKNDPKDAQVMLHMLRIQATQVYHDPLRAGINDVQELSKTHEAIARAKTEIQHRILTHYLPLYFPEIDRFRGNSRSDWFFAFLHAFPTPASITGLTKEEFVTAAWDVVGRKVSKTQILMDIYETARSSIGLPLPLDAPAIRMFRMVIDEARSLIRQRNEIEAQADELLRHSQDYQLLRQIPGIGPINALTIIAEAGDLRRFGHHRQFLKFCGLDLSTQQSGQYRGQTRLSKFGNARLRRTLWIAGQVAIRQRENGFRHKFERYIARDRDNPDLRRKAMTAITAKMARVVHAVVKGGSDYRPFVEGRVPGGRTSVS

SEQ ID NO: 243036 - protein, 450 aa, unidentified
MARNAKMIKSPDGNKLAIVNPDAAGIDIADTEMQVCVPEDRDGDNNRRFGSFTCELTNIVSWLKECHITTVAMEATGIYYLSLFLKLQDAGIEVILVNPLDVKNLSGHKTDSADAEWLMLLHRYGLLKPCYQPGNAARQIRNLTRQRNNILRSAEKQILYIQKSLELMNIKLSTVISDVTGLSGRRIISAILAGNRVPEYLASLAMSNCKASKEEIALSLEGTWDADLLFTLKQSIEAYDFFMKQITDCDQEIEKLLKLYQAQMDTNVENLVRYKRKKNSRSKNAPVIDIELYAFSVWGVNVFDIPGLKDTAVMQLVGELGHDFTEKFETAEKFSSWCNLVPNNKISGGKLLSSRIMKKKNIVGQIFRTAASPMARDKSEMGYYYRRIRAKSGALQANVATAHKIAKIFYTMVKTKHAYDSSKVGLVEKEITEKKIAKLERALARLRNAS

SEQ ID NO: 243037 - protein, 369 aa, unidentified
MEFVGIDLHTNRFTCCYLNREGGKRVRTFELDDAGLARFYETLTINTSVLIEATINSFAFAALIEGMVKQVIVANTFKLKTISLTDKKTDKVDAEKLARVMKMQILSGEQQIEPVTIPPKLIRDLRALFSSYRLLRKQIGQTKNRIHSLLKQNLYPCTKAQLFGKKSRQHVRTVAEDAVLAFQINLHMDSLEQLEQAIEALEAQIKRSAAPLVREIDILTSMRGISVTCAIAVLADVIDVHRFATSKKFAAYLRSTPRVESSNERAIIKSTNKAGRKLAITLLSQSLNHFRDANPKLNRWYTRLSQYKKKGLVRMGLCRRVITEIYQMLKKGEYHYARDAANHRKKMREYLSYLERHQVAFERPHVDAA

SEQ ID NO: 243038 - protein, 337 aa, unidentified
MHLQGKDEGATPSESFQISTQGIHMYKYIGIDVSKATLDLYDGKKSYKVSNDTIGFKEVEKLSTKAEELCFIFEPTGIYSHAIILYCQKHKIKAIIVGSKEARDYARSIKQRSKTDKIDAKVLYRYHTQIAQEHITVPFLDTHMRKVTQRRNVYEKYQKVILQLNNLIEATDKADRVLLTSLKKQIVSLEKSSEKLLVEIEKLLLNKEEHKEAFMHLQTIPGIAKKSALVILMEFFRYPEAKSNEMVALMGLDPVLKDSGVFRGKSRISKQGGKYFREKLYMSTVVAIQYNDRLKCFYERLVQNGKPKKLALIAAMRKLLRIAYAVIKNNEPYKALV

SEQ ID NO: 243039 - protein, 429 aa, unidentified
MRSYHSVGRIGNEKSVDLSITNSVIGEIFMNAVGIDVSKGKSTVAVIQPFGVVIAEPFDVFHTDSGLKELVNFIKSLSGETKVVMEYTGTYYEPVANALHNAGLFVSVVNPLLIDDYDTNRVRKVKTDKIDALKIASYALDRWMNLRKYEPTETVRKTLKIMNRQCIKLNKILVMQKNSLIALLDCFFPNENTLFTSPRRESDGHEKWVDFVARFPHVDSVTKLSISAFATKYQSWCKKEHYNYSKSKAEQIHAYARTIVSTLPLTDAVKKLVSDAAKLLNSTLEALGTLHSEMDTLASQLPEYETVMNLYGVGKVFCSQLIAEIGDVTKLKSGKSLVALAGIDPPPNQSGKDDPKSRRISKRGSPALRKTLFLIMSIYLQRQPADEPVYQFLDKKRTEGKLYKVYMIAAARKFLRIYYARVKEVMSKE

SEQ ID NO: 243040 - protein, 374 aa, unidentified
MSDNCLFVGLDVHKATIAIAVAEQGRTGEVRYIGSFPNKPVSIISQLKRLAERYEGIECVYEAGPCAYTLYRKLMAAGIQCIVVAPTKLPMSKGRVKNDHRDAVARARLLRAGDLVPIWVPDPIHEAMRDLVRARQAASSDVRKVRQRIQSYLLLRDRHFVGKSWSYRHMRWISDQQLEHPALQITLQGYINALEQAESRRAELDMQIRDLLPNWSLAPIVTALQALRGVASMIAITLVAEIGDFRRFPSARDLMAYFGLVPGEHSSGSTVRSRGITKQGNSAMRALLYEAAWCYRQSAKVGQWMKARIPVEVPQFARDIAWKAQTRLCGRYRKLIARGKKSQIAVTAVARELLGFVWAIARAQESHQPPVVVA

SEQ ID NO: 243041 - protein, 320 aa, unidentified
MMAQDDPVVVGIDVAKDKVDSCIHALALWQTFANTAQSHRKLVGWLRKHQVNKAVMEASGGYERVWARVLREAGIEVRIVDPKRVRSFALSAGRLAKNDAIDAEMIAWFAETFSEAPSQTHDAAREDLQTLVKARLGLIDFRMRLVCQSEHAAAGLVQKAHARILKSLASEIAKLEAAISAKIKSTPDFAERAEIIESVPGLAETSSANLVAGMPELGQVSDEIAAALIGAAPYDDDSGKRRGERHIKGGRRWVRNAIYMPCVGAATQSNPVLKAYYQRLIAKGKEPKVALMACMRKLIIILNTMIARRQKWDPSRYALN

SEQ ID NO: 243042 - protein, 402 aa, unidentified
MNCVGIDVSKGKSMIAVMRPFGEVVVSPFEVRHTANELSELAGLLKSLDGETRVVMESTGNYHAPVAWLLHDAGLYVSVVNAMLVHDYGNNSLRRAKTDKKDAVKLANYGLDHWLTLPRYVPDEDTRLMLKTCYRQYQQYSKVQTMLKNNLISLLDTTFPDANRLFTSPPRADGSEKWVDFVATFWHCECVCGRSEKAFTTQYQKWCRKHGYNFSEDKALDIYASACRHFGVIPKTDTAKLLVEQAISQLQTTSSALAALKQEMQSLAASLPEYPVVMGMFGVGPTLGPQLLAEIGDVRRFHSKKALVAFAGIDAPPYQSGQIDVRSRSISKRGSASLRRTLFLVMSVILQCAPIDEPVYQFMDKKRSEGKPYRVYMMASANKFLRIYYASVKAYLESLEHD

SEQ ID NO: 243043 - protein, 391 aa, unidentified
MSPECPATVVGFRAKRPSVGFCHRRGSKEERQPSPASGLPAGGATHCTSGLEHTVITIGIDPHKGSHTATAVDASEVVVGELRVAADRRQHARLLEWAARFEPRRWAIEGATGLGALLAQQLVGAGEHVVDVPPKLCARVRLMGNGRIDKTDPNDARSAAIVAVRNATLNTVGADSEHRVVLRLLADRYHQLTAQRTRSVCRLHALLCLLIEGGTGRSLSTGRAVKLLAGVAISDPIIAERVATCRQFVSELKALDQALVDIRARTVTAVDAAKTTVIDVYGVGPIGAAIILGHSGDIRRFPTAGHYARHNGTAPIEASSGPKARHRLNPRGDRQINHAIHTAALTQIAHDHPGRVYYAPKLAEGKTKKEALRALKRRISDVIYRQLLADT

SEQ ID NO: 243044 - protein, 358 aa, unidentified
MSKRTGKVAESKSVVVTANDSVFVGLDVHKTSVHAAWRLNGREMGTWVMSADVAAVARSVSRFRVALKQVVYEAGPTGYGLARALRKAGLPTEVIAPGKTPQPANADGKSDRLDCRKLAEFAEKGLLKPVAVPTEEEEADRQVLRLRDQLTNKRRRVKQQIKSLLLQYGVPEPPGLKHWTKAGVAALAELELRPQIRLALDCLVEELGELTRLLERAKAAMRKLARREVYRKKEARLRTHPGVGETTAMAYLAEVYQPQRFRNEQALTKYLGLAPRVSRTGNTTRNGPLMKAGRGTLRALLVEASWRWIAQDAHAAAVFNRIWHNTGKKQTAIVAMARKMAINLWYMLIRDEEYRAAA

SEQ ID NO: 243045 - protein, 311 aa, unidentified
MDALVKVIGIDVSKAKLDCWALPAQEAWGIDNDDGGIAALLTQLRTRAPELVVLEATGGYETQAATALAAAGWRVAVVNPRQVRRFAQALNRLAKTDRIDAQVLAEFGRAVNPQVRPLPDAQTQELAALVARRNQLVQMRTQEKNRLPMTLPPLRPRVKEHVAFLDAAIARLEIDLTAKLRSSEVWCERRDLLLDVPGVGPILTCTLLAQLPELGQLNRQRIAALVGIAPFHDDSGKHQGRRTTWGGRREVRTVLYMATLAARIHNPVIRAFYQRLRGNGKTYKVAMVACMRKLLTILNSMIKHGHAWHYE

SEQ ID NO: 243046 - protein, 503 aa, unidentified
MKTKRCKAKNQAADKSQAAKKEVAEELAILRPDAGGVDCGAEEHYASVPPDRVPAGQAAVRCFSAFTEGLDALVDWFKECRISTVAMESTGVYWIPLYQKLEAAGIEVYLVNARHVRCVPGRKSDVQDPQWLRQLHRFGLLNASFRPEDLVCRIRSLHRDKENRVGSAAAEIQHMQQALQQMNLHLHHVVSDITGQTGLRILDAILAGQRKPEELVKLRDKRCSKSTPKEMQAALVGDYRPEHLWVLKRSLQAYRFYQSQIEECDRQIEPLLQELAQRVEAASAQLQLPNPEPKAGEPGQELAEKQQQHNATEPNTNALRTKKKRKAKANEPKIELAGLLERICGVDLTRVVGLNVASVLLIVSEIGVDMSKWRSAKAFSSWLGLCPANKISGGKVLDSRTRKVVNRVATALRLAAQSAGRTDTCLGIFYRRKKAQLGAPKATTATARKLACLLYHVLKNKEPYQDPDPVLYQKRLQIFAFTKLQRQAAALGYTLLPTAPAPV

SEQ ID NO: 243047 - protein, 332 aa, unidentified
MKKFKEFIGIDISKLKFDIRIHSNQIASVFDNNNTGFKKMVNWVLKNVDCDKEEILFALEHTGLYSLPISVFLSENKFHFILLPGLEIKRSLGIQRGKNDKIDAKRIAEYAYQKKDKIVPSQLPFKNILQIRRLLKLRERLVKYRAGFLKDKSENKIFLNAKENKLLFEIVDKSIIELNKKIDKIEKEIDIIVESDTLISKQFYLITSIKGVGKQTALFVIAYTNCFSNFENWRKFASYCGTAPFPYSSGTSIKGRNKVSPLANKKIKSLLNQCARSSIICNPEMKLYYKTRKEKGDNGMSIMNIIRNKMISRIFAVIRRGTPYVDTYKFAA

SEQ ID NO: 243048 - protein, 365 aa, unidentified
MEAINKTQTQTHSIKPDFSGQDIYIGIDVHKKSWTVSIYLREFEHKTYTTVPDAGKLYNYLKKQFPNGSYHSVYEAGYSGYWIDKQLRILGIDNKIVNPADVPTNNKEKVRKTDPVDSRKLAQTLRNQQVKGIYVPDDEILSGRLLVRERRQVVKKITRCKNQIKSRLSFLGIKIDEDEVKRHWSRLYINKLDAISQTDDMIGKPMSMLLKELEMLREINLTLTKEIRSLSKTQRYREQAENLTTIPGISNLSAMIILTEIIDIKRFSNFGKLCSYVGLIPDEHSSGERRIITGITNRRNPYLRHILTEISWVAVRKDPALGLCFTNYAKRMPKGKAIVKIARKVLNRIRYVMINKKQYVTGVLE

SEQ ID NO: 243049 - protein, 359 aa, unidentified
MAVIEERERRIVGGVDTHKDLHVAAVVDEQDRVIETRCFATTRQGYRQMLAWMRSFGELQRIGIESSGSYGAGLLRFMQQAGIAVLEVTTPDKQDRRRRGKNDDLDAQNAAHAAFAGQRTVTPRSRDGMIESLRVLMACRKTAVSARRVALQMIHNTIVCAPDGLRDQLRSLTRMQLVRTLAAWRPDLTAYRDLDSAYRIGLKSLARRYLELHDEIADLDAMVAAIVDELAPNLIARNSIGHIGAAQLLLTAGDNPERLRSEASFASLCGVSPVPASSGKTVRHRLNRGGDRAANSALHIIAIGRLRTDQRTKDYVARRIAEGHSKLDAIRALKRYLAREVFTLITQRRREINATRIAA

SEQ ID NO: 243050 - protein, 316 aa, unidentified
MPVEHVGCDADKAFLTVACHERPGHLQRIGNDADRIDQWLSGLPAHSVLAVEATGTCHQVLLERAVRHRLPIYLLNPRDVRHYAESLRRRAKTDRVDAQVIARYVARERDNLRPYVPLPAASARLLLLLRRRASIVQSLTAVKLSADDLVMPEKDALYVSFKALLKALDRQIDELIAQDQRRARQREQLRTIPGVGPLSSAALVSLFWRLPDITADGLIAFIGLDPRPRESGSFRGQRKLSKRGDPELRRLSYMAAKTFARHDLGRALYERYRQRGLSAIATYVILARKILRLAHALITRDTFFDAERFATACART

SEQ ID NO: 243051 - protein, 387 aa, unidentified
MRVAAHRAEAPSAICVDLGAIFVSLELSRSKWLITSLSPGGGEKMSKHMVAGGDVAGMLSCFAELKRKAQARTGRCLPIIVIQEAGLDGFWIHRVLQAEGIESHVVDPASIATSRRRRRAKTDKLDGEALLRALLAYKRGEPRVCAMLRAPTPEEEDRRRIVRERKALTNERIRHVNRVKGLLFGQGVSGYEPLRSDRRRRLEELKTGDGRSLSPNLKAQISRELDRIELLLTHIKDVEEARDTMLESAQAVAPAPKLLLNLKGIGPEFAAVLWSEGLSRHFDNRRQVAAYAGLAPTPWQSGIVDHEQGVSKSGNPRLRSMLIELSWLWVRHQPRSALTIWFKERVKQNGGRFKKSTIVALARKLLIAIWKYVNAGVVIEGAALKAA

SEQ ID NO: 243052 - protein, 372 aa, unidentified
MTDSNILFIGLDVHKESIEVAIAEDGLAGEVRHYGKIGGCLADIDKLLRKLASKDKTLHFCYEAGPCGYELHRHLTDKGHICIVVAPSLIPKKPGDKVKTDKRDSLMLARLFRAGELTKVYVPERDDEAIRDLSRAREDAMIIQKCARQRLKSFLLRHNIRYSGTSNWSEKHLRWLAKDIVLTNPVQKIVLQEYINTVTESAARLKRLVDEINHHVKLWRMYPVVEALMAMRGVRMVVAVTVVAELGDITRFKSPSQLMSYLGLTPSEYSSGQRQKRGGITKTGNHHARRILIEAAWAYRFHAKVSTEMQKRQENLPLPIRDIAWKAQLRLCQRYRTMADNGKIKNVIVVAIARELAGFMWDIANHVPITEK

SEQ ID NO: 243053 - protein, 436 aa, unidentified
MEKTENLPIIYPHAAGIDIGSEKIFVSVDGIEVVNFRTFTAEYRKCVEYLIQRGIQGVAMEATGVYWIALHQMIEENNIKVCLVNPKEVSQVKGRKSDVSDCQWIQKLYSSGILRESFIPAGKLKELRLIVREREDIIEMGSAYVNKMQKALELMNIKLTEVISQIHGVSGLRMIEAIIHGERNPQKLLELCDARIIKAKSKDVLSALEGNYNPTYLFMLKSSFQMWKLHQQELVNIDKKVESLLNELNINRPHIDDDAKPKAIRHHKPDVKDLHQKMLDLYGVNMCSLSGLNDYSLLRLVGETGNDLERFPTEKHFVSWCQLSPKHKQTGRTIKKIKVRTKNPAGQIFRDAARSLLNSKYTAIGAFMRKIRSKKGAAIAIKAGARKLAIAYYNIIRKGKAYVEEGIANYQKKLKEREFNLLQKLALKYNVEVILQ

SEQ ID NO: 243054 - protein, 399 aa, unidentified
MLAVGIDISKSKSVAAILNQDGSMHTSPFEFHHTQPELDAFIKYILNSKQSATILMENTGHYHYPVLKAFQEAGLPVCMVNAYQIKKFGDMDLRKAKMDKKDAVRIARYALEKSYSLVPYTSMEQKYEDLRFLARQYNQRMLTLKTNKVFLLNLLDETMPGITNILPLTTRTPETSLSVLFINRFKSYDRIKKMGKSRFLDAFEKIARKSRNRQTKTYGLAIYEAALRNITTRGENEYTLAAQDQCLELVCESQKAADSIILKMKTLAETLPEYAVLRSMAGVGNRLGPLILAEIGDIRRFHSGKALNAYAGNDAPPYQSGTFESHNRHISKRGNAALRKYCFEVMQALKLTRPQNDPVYLFLLKKEQEGKPYNVAKMAGVNKFLRIYYARAMETLKQQ

SEQ ID NO: 243055 - protein, 320 aa, unidentified
MNSTESFVGIDVSKEELEVYVRPEGTTWTLHNNEKGIAQLVERLTCVAPTLVVLEATGGLERKPAYALVEARLPVVIANPRRTRAFARSIGLLAKTDRLDAQALAHFADAVRPEVRALPDQERREISARLARRRQLRDNLTAERNRLHSAPSCTEKSLRKHITWLQDELENLEAEIDALIQANTQWQEQVERLATVQGVGRITAYTLTVELPELGKLNRKEIAALVGVAPFNSDSGKRRGKRAVWGGRAAVRATLYMAALSASRFNPVIREFYQRLIEAGKAKKVALTACMRKLLTILNAMVKNGTDWDPNYSQRTARAA

SEQ ID NO: 243056 - protein, 348 aa, unidentified
MRFYRRQHQFYCGVDLHAKTMHVCVVNQAGEVLVHRNLKTEPDGFLNAVSPYHRQDLVVGVECMFTWYWLADLCAKHHIPFVLGHALYMKAIHGGKAKNDKIDSEKIAMLLRGGMLPEAYAYPQEMRATRDLLRRRMYLMHHRAEALAHIVNTASQYNLPPITKKLTYAANRQNVAKSFPDPSVRLNVEADLELIDHFDEQLRRLELQLSRSAKIDNPQDYYLLRGIPGIGKILALVMLYEIHDVRRFPKAGNFLSYARLVKCAHESAGKRLGTGGKKIGNAHLKWAFSEATVLLMRQLPEVKEYVQQLAKKHGKGKAIAILSARLGRTVYLILKRKEPFQAKRFLNN

SEQ ID NO: 243057 - protein, 389 aa, unidentified
MKIFVGIDIAKLNHFAAAISSDGEIILEPFKFTNDADGFQLLVSKLESFDKNSIIIGLESTAHYGDNLVRYLVAEFYQVCVLNPIKTCQMRKNNIRKTKTDKVDTYVIAKTLMMQDNLRFVSFFNLDMMDLKTLGRFRQKTIKQRTRLKIQLTTYVDQVFPEIQYFFKSGLHQNAVYALLKEAPSPKEIASMHMTHLANLLKVNSHGHFTKEQAKELRVLAQKSVGANDSAISIQITQTIQQIELLDSQLEKIEAEMTDIMKYNDSVIMTIPGIGYINGGMILGEIGDIHRFSNPNKLLAFAGLDPSVYQSGNFQAKTTRMSKRGSRILRYAIVNATWNVVRNNATFKAYYDAKRAEGRSHYNALGHCAGKLVRVIWKMLTDEVEFNLE

SEQ ID NO: 243058 - protein, 380 aa, unidentified
MHSENIAAYIGLDVHKETLAVAIAAPERLGEVRYYGTINNEAQAVRRLFQKLQGLYGNILSCYEAGPCGFGLYHQLTAMNIKCQVIAPSRIPKSPTDRIKNDHRDAISLARLLRAGELTPVWIPDLTHEAMRDLIRARAAAKRDSRVARQRILSMLLRTDKRYAGKHWTGKHRTWLANQSFSQPSQQIAFQHYCQSLEQIEDRILQLDQKISRLLPEWSLCNLVCQLQALKGVGQLIAITLVAELGDFSRFSNPKQLMAFLGLVPGEYSSGNSIRPRGITKVGNSELRRLLYEAAWSYRTPAKVGAWLIYYRPDSVTQYSKDIAWKAQQRLCSRYRTLTAKGKKSQVAITAVARELTGFMWDIALAAQSSFSQQKQNYTL

SEQ ID NO: 243059 - protein, 486 aa, unidentified
MAMKSRRAKATRSSHQGRKRQHGPIRAAASLPVINPHAAAVDAGSVKHAVCVPEDAVPKGESNMREYGGYTADLDKLVEWLLACKVKTVAVEATGVYWLALAQKIEDAALELVLVNARDAKNLPGRKTDMKDCQWLQCLHSYGLLNGSFRPSQEICRVRSLMRHRENLTRSGGKAVQHMQKALQQMNVHVHHALSDLNGETGLRIVDAILAGERDPKKLVQLRDKQCSKTSEAELEKALEGDWREEHLFVLRQSLETYRHVLKQLQECEQEVEKALTQVVLPQPPEPPQPAPPNPQAKADAKTKKKFQKRKEGMGLKRDLTAELQRICGVDLTQIVGLNVLGVLIIISEIGVDMSRWRNEKAFCSWLGLCPGNKISGGKVLDSRTVHVINRVSILLRTVAPSVGRSESWLGVFHRRMKSRLGPAGANTATARKMACMIYHLLKYKEEYIDVDHVVFTAKIRKQRIARLRKQAEELGLEVTEKQQAA

SEQ ID NO: 243060 - protein, 355 aa, unidentified
MAVTIVEEARPITCRTAITGGVDTHADTHVAAALDPIGGLLGVREFPATQAGYAGLLGWLGGFGTVALAGIEGTGSYGAGLARHVAAAGIRVVEVDRSDRQDRRRQGKSDPLDAVSAARAAQSGRARGAPKGRDGAVEAIRALMVARRSAAGERTRTINQARALLLTGPDDLRARFTRHTPAALVAGLASLRPRPGDVAGYAVRVALRELGRRARFLDGQLQRLDELIVPLVTARAPGLLAVYGLGPRTAALLLITAGDHPGRLRSEAAWAHLCGVAPIPASSGKVTRHRLNPGGDRQASHALWRIVFTRLGSDPATRAYAERRTAEGKSKAEIIRCLKRYVAREVYRHLCPAAG

SEQ ID NO: 243061 - protein, 350 aa, unidentified
MVTIGADLHKRWHTAVAVDAQGRKLAERTVRATPDGHLELLRWAGERFGGRRWALEDCRHLSRRLESDLVRAGEAVVRVPPKLMAGARRSSREPGKSDPIDALAVARAALREPGLPAARLDGPERDVRLLVDHREDLVAERTRIENRLRWHLHELAPGDGPAPRSLGRRHVLAGLEERLAGLSGTVARIASELVGRIRELTAAIDRLEREIAALVAALAPTLLALEGCGPLTAAKLIGEAADIRRFRSAAAFARHDGTAPVPVWSGNVTRHRLSRGGNRQLNLALHRIAITQLQRPGRGRDYVAKRMAAGDTRTEAIRALRRRVSDEVYRRMLTDATDHTASQDILAMAA

SEQ ID NO: 243062 - protein, 341 aa, unidentified
MSNSTKKVDYSDFVGIDVAKKTIDCWLRPEGTYNQHPNSPDGFEALDRWLGRQSCDPARTLICIESTGIYSDRLLADLVGRGWNCALVKTTATQKVAPEHHRKDDRFDARMLAEYGQRYSDRISLAEAPNRVIKQLKQLYAERQRLIKARSASQNRSQQADHTLVPSDLLTGQWHQQKQLCNEQIQQLESHIQQLIDGHEGLSSYYQLLRTIPGVGQVTGWLWLILFYGQQKLNHKQVASRFGFAPHRHVSGSSVRGRTRSSGHGQSQMRSRETMVARSVSYHHERFIRYKERKTEEDKPWPIIRNNIINKMIKIMCAIWNSGEPYQQDYRSRYDRQKKVA

SEQ ID NO: 243063 - protein, 352 aa, unidentified
MQTQSKQLDFTGQKFFCGIDMHRKSWAITIETEDVSMRTFVQNADPDLLIQHMQNNFPGASIIAGYEAGYFGFWAQRKLKESGIECLVINPADIPTTNKEKNQKRDPSDSRKIARALRNKDVAAIWVPPVSVQEDRQYLRIRKALVKDLTRNKNRIKAILELNGIRYPAIFEQPGSHWSRRFIHWLEEIRLTEETGTESLQSLLRSLNFHRSELLIISRRIRKLAQGDRYKRDYEQLVTIPGIGLIVAMTILTEIGDISRFSSVDHFRSYLGLIPTAHSSGEKDHPGKITNRTNKHLRALLVEATWSAIRTDAGYLHTYRRYKQRMKENHALIRTAKKLANQIYYTLKNGNN

SEQ ID NO: 243064 - protein, 342 aa, unidentified
MSIVGAFDVHRRQITFDYLDTDTGRLLRGRIAPACRAVLYRWLAERFAGRTDVQFAVEACTGWRFVVEELERAGVEASLAETADTSAARGPKQRAKTDAADTALMRELLAGGRLPTSWIPPEQVREMRAVLELYKDLRDEHTAWVQRIHATLFHHGVPQLGVDVTSAAGRVRLQAGDGLSPAGRQAITVALRVMDALQTELDALHRQIRAFANHQPGCTALQAQYGVGPITSTAIWAMMGDTRRFSASRQAVRHTGLDVTVYSSDGKRSRGHLAKQGPPLLRWALYEAACMASHTRAPDHDYYTTLKDRIDHKRATISVARKIARRSHHILRELGDKAYAAA

SEQ ID NO: 243065 - protein, 344 aa, unidentified
MNDYNYYIALDWAQAKMAIAIAKKGSPEPRIIEQDSDVRSLKYLLKSLKGTKILTLEETTGSQWLWVELHDHVDEIIVCDPYHNFLLSSGPKNDRIDAQKLLELLRGGLLKPVFHSADIFMDYRKLVSTYDDLIKTGVRWKNRRSAIFRAVGKNKKSRTVDGETDRFNLATVDYHIRQYENFKAIYQGQFQQLIRKSKTLRTLQSIPGIGVIGAVKIAAIVVEPNRFRNKGHFWAYCGLVSHKKMSGGRSYGKRKPRYSRPLKSVFKTAAMAVTFSKSENSMKAYYEFLISEGMAQWKARHNLARKIAAIAYATMKSGRWYNADEINKYFGGEPDGIASKDSRA

SEQ ID NO: 243066 - protein, 340 aa, unidentified
MKTHIGVDLHQRFCYLTAVDASGRKSKQGQVVNQGAALRAWLRQVPGPRQVVVEASGFWPAFARAVGPEAERLVMVHPQRVKAIASARLKNDRVDSETLAHLSRADLLPEAWMADERTQQTRLLTRLRITLGQQRAKAKNQLQAVLHQEGFLKPVTDVFGKKGRAWLAGLELSPAGRVVVQVWLKVVDQMDVAILEQTRELERMAKADARARWLQTVPGIGAYSAMVILAEVGEIERFQSKRALASYAGLTPSVRESAGKQRRGGIGHHGSGTLRWIMLQVAQVAARHSPAARAWIARLKRRKPAQVALIALARKLLTAVWALLRHGVCFDENSFVQPAS

SEQ ID NO: 243067 - protein, 411 aa, unidentified
MGRVIGLDISKRTAEVAILLPGTQELRRHRFTADAPSIVAFAKHLTGADRVALESCTNAVAFHRLLCHHAGEVVVSNPLKTRVIAEAKVKTDKVDAEILARLLAADFLPPVWVPDAATDRLRHLVFHRQGLVTQRTQAKNRIHAILHRNLLAPDLSDLFGKAGRHLLAHIALPIDERALLDADLRILAFFDGEIQAMDQQLAHTALDDPDIRRLLTVPGLAVTSAVALKASIGQVARFAAAPKLVSYFGLNPSVYQSGQTAYHGHISRRGRSQARAVCVEVAHQLVKAPGPFHAFFERLRRRKPYNVAITAVARKLVVLVWHMLTRGEDYRYAPPARTRRKLNALHKLATGHAAPRAPRHSATVDDHQAGREAEHDYQARLQHRFGSAEAPGPSVPPPQKPGKRRTSTKRT

SEQ ID NO: 243068 - protein, 350 aa, unidentified
MLIIGCDFHSRFQQIAMLDTQTGEIVERRLEHESGEAERFYRSLPHPVRVGLESSGHAQWFERLLAELGHELWVGDAARIRAAVVRKQKTDTRDASHILDLLMTNRFPRVWRPSPAERDVRQLLVHRQKLVWARIKVKNQLQTLAMNQGVCIRRKLWANAGRRALESLTLGPWTSRRRKELLQMLDQLNGSVEELDRAVGKEAQKRADVGRLMTHRGVGPVTALAFVLTLGPVERFRRSKQVVSYLGLNPQEHSSGGRQRLGSISKQGNTMMRYLLVEAAQTASRFHPELRRDYQRLKSRRGSAVAKVAIARKLAVRLYWMLREKADHAQLVRMQGSPRGTLVDASPSRF

SEQ ID NO: 243069 - protein, 311 aa, unidentified
MTDDTIGIDISKATLDIHRLSDGKTMSFSNCPAGFKALSRFCAKTAVARVVYEATGAYHSGLERALGAHLPLVKVNPLQARRFAQAQGLRAKTDAVDAKMLADMGNAFALEPDEPAAEIQHDLKELRSFRSGLIKDRTGIMSRMKTQTLSIMRRQSKARLAQVDKQIAEINAEIERLINSSDTLAHSMKILRSIPGVGAICAATILIEMPEIGSMDRMQVACLTGVVPMIPQSGQWRGKSFIQVGRKVVKDALYMPALVAMRFNPDLKAKYQAMIKAGKPPKVALTALMRKLIELANTLIKADRNWVKKSA

SEQ ID NO: 243070 - protein, 341 aa, unidentified
MAIAVLGVDLGKNSCSVVGLDPAGKVVLRRRMRRETVIGFASSLPSCIVGMEACCGAHHMGRALAAQGHTIRLMSPEYVRPYVKAQKNDDRDAEAIAEAATRPTMRFVALKSEAQLDVQTLHRVRDQLVGERTSLMNQIRSVLLERGHVIPQGRAKLAAGLRELLDNPATSLTARMSSLIEDVIRRWQALDLRIAALDAEFVEMARTDESARRLTTIPGVGALNATALVAAIGDVGSFARGRDLAAWLGLVPRQVTTGGRPRLVGITKRGSKYLRKMLIQGARSALPTLRRSSTRLGAWLRGLLARAHANTAVVALAAKMARTVWALLRHGRVYEADAIAA

SEQ ID NO: 243071 - protein, 457 aa, unidentified
MACKEMVAVMEPQEIEDEGHEQILERVAAVDVAKASGMVCVRVPREDQPGRRRTRVWQVEATSGAVLELADHLVRERVQKVTLESTSDYWRIWYYLLEAAGLDVQLVRAQDVKQAPGRPKTDKLDCVWQAKCTERGMLRPSFVPPAEIRQLRDYTRLRADLTGERTRHYSRLEKLLEDALIKVSAVASKLDTLSVRDMLEALIAGERDPKVLAGLARGKMKAKHDRLVEALTGKFDDHHAELARMLLDQIDALTAQIGKLTARIEELIAAIPAAQGIDADGTTGPAAGRGEGAPVLPAVDRLDEVTGIGRGGALVILAEIGLDMTRFPSPAHLVSWAKLSPRTIQSGARSRAGRTGKGNPYLKGILGEAAAAAAKTDTFLGERYRRLVKRRGKLKALVAVARSILVIIWHLLADPTARYHDLGSGYYASRIDKQRKIGSHIRQLQALGCTVTITQAA

SEQ ID NO: 243072 - protein, 469 aa, unidentified
MKLVYRCCAGLDVHRDTVSACVRRRVRGQEEAVIEEQVFGTFTQDLQRLRRWLKKHKAKQVAMESTGVYWIPVWNVLEGGFRLTLVNPATVRALQGQKTDRIDARRIAEYLQYGLLRGSFIPPKPIRELRALTRMRAHIQQDRNRVINRMARLLETVNVKLASVASNIAGVSGMAMLRLLASGVHDPERLAECARGHLRIKIPALVLALEGRPDAHFRWLLAELLGKLDRLDEELVRLEARLGELAAPYADVLRRLATIPGVDQTTALVLLAEFGDDMSQFPTAAHLASWAGLCPGNAESAGKRFSGRTRKGDRYVRRILVQSAWAASRKNDCFLAALFFRTAQRRGRKKAAVAVAHRILVIAWHILAESGAEYVERGGDHFDRRNPQRTARRLAQRLEAIGYKVTLAPAPEPKPARPRGRPPLPKTGADPNLCPKCAAWGIACIHVRNSVRTAKQKDTSSASPSESGS

SEQ ID NO: 243073 - protein, 389 aa, unidentified
MQFVGIDIASETHVFAILDADGTVLAKPKPFTEDAAGHGALLAALAPPGEALVVMEATGHYWKNLFAVLAAKGYEVALINPLRTHRFQGESLERTKTDAIDALGLARFGREKRPSPTRLGSRASEELRELVRHRDRLRQDFDDRVRQLRRLVDLGFPEFRRYVRTLDSMLATAILAEYPTAEAVAKATPRRLAKLRYDGRHAVGSELADQIIAAAKRSVGQHHGPAYRVQVRDICQDLDLWRRRLADRDDDITRLLDEHEVGSLLTSIDGIGPSTAARLIAELGDPARFDSPAALAAYVGVIPALRHSGKRRPTRAGITPIGNARLRTALWMPTLTAVRRNPWLKAFYDRLRAQGKPPKLALVAAMRKLLVAVYAVAKARKPFVPKLAD

SEQ ID NO: 243074 - protein, 454 aa, unidentified
MQKQDSYDYYVGIDCAQNKHDFAMKNNQDKFLIKKGHFSNTLQGYEKFLNTVLSKCLDKDKILFGMEVTGIYGTNLYERLKSDGYHVVMIFPDSVKNYRDYKRLNKTDKIDSACIAELLLNGDAQIVHAEKNGYTDLKAYIRRRNALKVTCTQETNRFLAKVCLYFPDLLKVFPCGRATLKAIFSIYPTPYSIIEADFNELVSVLQKASKNKFGVDKANELIHAARNSIVVRKSISDGELYNIHSLIDSIDSLESEIRHLEKIIDSKAEEFPAYHVLLTLTGCGKITAATIVAEIGDISRFHKASQIVSLAGLYGDNSKSGSSVNKRGKISKKGSRYLRHAIYMVAEFARRNNPIFKAYFTKKKNGDRTKHILAVNAVANKLCKVIYSLMKNQSTYIIQYRDLAKLSESTQNEFFQNAETDFSAKTRRKKYLYEDEYGELHEFVFKSIKTALIE

SEQ ID NO: 243075 - protein, 413 aa, unidentified
METLVERCAGLDVHKDSVTACVRVPDDRGGRHAETRSFSTTTAGLLRLGEWLTSFGVTRVGMESTGCYWKPVWHLLEDQVECWLLNATHLRNVPGRKTDVADAAWIAQLVEHGLVRPSFVPPRPIRELRDLTRYRKTQIQERGREVQRLDKVLQDAGIKLSSVAADVLGVSGRAMLEALVAGTHDPEVLAALAKGRLRTKLPALRAALAGRFRTEHHGLLVAQILAHIDYLDDTIALLSERIEQVIAPFAAQVALLDTIPGVDKRAAEVILAEIGPNMGQFPTAAHLASWAGVCPGNNESAGKHRSGRTRKGSKWLGGCLSEVAKAASRTKGTYLNAQYHRLRGRRGPGKATMAVAHSVLVIAYHVLDQGRPYQELGADYLQQRQSAEHYQRQLVRQLERLGHKVTLEPLEAA

SEQ ID NO: 243076 - protein, 433 aa, unidentified
MLKINYMSTLFVGIDVSSKTNAVYAMDFEENKYISSSFGNNQPGADKLVIMIAECMHKHKNLDTILIVLESTSVYSVHISNFLSTSEVLMPYKPYVFCVNPKTTSNYRKSYIGMEKTDPTDAYLIADFGRVGRTKKLEPWRGGQFIALKRLTRHRMHLSECITREKTYMVSNLYLKFSELQLLEGDDKPFGSLYGATSSAVLTEFLSPQEIIDMPEEDLLTFLAQKSRNRISDISKTSELLRKAARDSYRLDKCMYEPLNISLASSFNCIHAYQKEIKLIEQAIEKCINGMNPNALIILQSIPGIGPVWASGILSEIGDITAFHSSDALAKYAGLYWPKGDSGDFTSEDNKMSKAGSPYLRYYLGEAANSVRKHSPEYADFYARKYAEVTKHQHKRALALTSRKFVRLVFGLLVKNQLYTGEKLDAEYNIESN

SEQ ID NO: 243077 - protein, 476 aa, unidentified
MNCAAQPFRWRQQEELEMNPKRSKSRHGRKMPMVHPNAAAIDVGATMHMAAVRADRTPEPVRSFGTFTADLHRLVDWFTQCGVETVVMESTSVYWIPVFELLDARGFTVCLVNARDAKHVPGRKTDVSDAQWLQRLHSYGLLRASFRPKGQIAELRSYVRQRERLLEYAASHIQHMQKALTEMNLQLHHVVADITGATGLRIIRAILAGERDPEALAALRHYSCHSSAETIAKALTGSYRAEHLFALEQALALYTAYREKASACDVRIEAVLKELSIHRGRDHGAVPPPRRRHRTDQVNALAFDVRAALFVLLGKDITAIDGLGAYLSLKLIAECGDDLSSWPSAKHFTSWLGLAPSNKISGGKMLSSRTRRSGGRAAALLRLAAVAVGRTDTALGAFYRRLSSRIGKAKAVTATARKVAVLFYNAVRHGMEYVDPGASSYETRYRTRVVNNLHRRAKAFGFVLQPLEPKAGAAVS

SEQ ID NO: 243078 - protein, 349 aa, unidentified
MTKYLGIDVGDRNCHLCLLGDDGKVAGRSTCSTEREALGAVLKELASLDEPVVAILEAGQHSHWIAELSQKAGLETIVANPRSVRLIYEGNRKSDRNDAEHLARLGRVDPQLLKPVALRSTEAQAQMTVLRSRDVLVRVRKALINSARGLAKTVGARLPACDADAFAVKVSTCVPHGLEVALTPLLATVDDLTKRIRALDGEIRRRAQERPEAKKLLEISGVGDITVLAFMLVVGDPRRFASARDIGPYLGLVPKRDQSGAKDPSLRISKAGNGFLRRLLVNCAQYIAGPRSPDSDLKRFANRIGPAGSVDRRKAIIAVTRKLAVLLLRLWQTGEPYQALRGAVGVQAI

SEQ ID NO: 243079 - protein, 430 aa, unidentified
MKSNTQNTKIEAITETTLVLGIDVGSETHYARAFDYRGIEYSKKPFKFSNDEAGFVTFKAWILDIKEKHGKDKVVPGMEPTGHYWFNLGKFLQDNEMKPVLVNPHHVKKSKELDDNNPTKNDRKDPKVIAGLVREGRYMIPYLPEGVYADLRTASNMRFQLQAELTRIQNRIIRWFNIYFPEYKTVYGQPDAKSGMLILKVAPLPEDILTLGIDGVNQIWRDAKVRAVGKARAKTLIEAAEHSVGSKEGEISARMEIRMLLEDYESRNTRLQEVVALIEELVKKIPMAEKLLEIKGVGIKTVSGFLAEVGDISRFNNPKELQKLAGLALVENSSGKHKGETTISRRGRKRLRYLLFEVAMSLVSKNPEFRELHSYYTTRKLNPLKKMQSLMAVAAKLLRVFFAMLTKGVDYDPKKLVGDIKRPAVYLQVA

SEQ ID NO: 243080 - protein, 408 aa, unidentified
MSRVVIGMDPHKRSATIEVMAGDEAILGGGRFATDAAGYAAMLARVRQWPERVWAVEGCQGIGGHLAGRLLADGEQVIDVPAKLSARMRVFATGQGRKTDATDAHSVALAATRMTGLRPVVDDQQLAVLRILAGRRRALGEDHTRMVSQLHHLLLELIPGGAKKDLSAAQAKALLARVRPRNAAGKARRRVAAELISDLERIYQRKKDADKELSALLAATGTTLTDLHGIGPSGAARLLAEVGEVTRFPDKAHFASWDGTAPIDASSGDQVRHRLSRGGNRQINRVLHIMAVVQLRNPTEGRAYYDRKVAAGKTPREAMRALKRRLSDIVYHQMITDARAKATGPGGHLGAATGSSAAGLHPSAGTSEKSLPGPATDDLTPGKPAHSPGRSRHSPSAPDRRRRQAQSA

SEQ ID NO: 243081 - protein, 361 aa, unidentified
MRIIGCDLHARQQAVAMLDTTTGEVVSMTLKHEGNNVREFYSKLPRPVRVGIEATGSMQWFVNLMEELGIECQVGHPANIRAAEPRKQKHDRRDADLILKLLVENRFPKIWLPSKEQQDLRALLRHRHQWVRIRTRIQNALQAIALANGLRRGPALWSQDGQRTIASLPLAPHAAYRRSELQAMYAKFAKEIEKLNQRVEEQACERPGARLLMTHPGVGPITALATEVFLGDAARFADSKALASYVGIIPSEYSSGERQRFGGLSKQGNPLLRFLWGEAAMHAVRRDPELQRFYRRKLVQKGLGKTRVAVARKLGIRLWIMLRDAIDYNEFCRRGQKQQKSSEACAGMPDTGHGAKQSPAD

SEQ ID NO: 243082 - protein, 320 aa, unidentified
MTKKKSKAFVGIDVAKQQLEVAVHESDYQFRCPNKASAFGELLAELINLRPALIVLEATGGLEIPVVSALHAAGLPVVVVNPRQVRDFAKALGQLAKTDRLDARVLAHFAAAIKPPLRPIKSKEERELDALTRRRGQLIEMLTDEKNRRGSAASDSVSDKIKEHIDWLEECIADLDVQLKALLQTSATWQAKDEILQSVPGIGPVTAFSMIADLPELGTLNRQQISKLVGVAPLNRDSGQQRGSRHIYGGRAHLRSVLYMAALTAVRHNEVIKEFYERLRTNQKPFKVAIIACMRKLLSITNVMLRDSTCWKIKEASVLA

SEQ ID NO: 243083 - protein, 469 aa, unidentified
MFRVQNRVEEMLMDTQASLEKTLSVGIDPHRDTLEVVAIRFPEVIVIEEEYENTPAGQTALLQRVREAASAHDLGVTIGVEDSSNYGYKLARYLAAEGCDVKEVNPVKTDRQRDFYGENKTDHLDALATAAVVLRAHDSLPVVKPIREAVEATRELSRYHEQLVKEQTATINRLHNLLAKQYPGYKSFFNPIKGVTALAFWQTYPTPNHLEDVNTEKLTDFFYEKSNHRLNHEASRQKAELIFDSCEQVLSSNQGLLIQTQANIIQDLARRLLELKQSIRDVEAQLEVTVSATGHQLESFNGIGIVLAARLIADTISTERFHNDPDRYASYNGTAPAVKGSGQHYRHVQNKRCNRRLKNTFHQVARNAALHEPLSKAYYQDLVEEKGMPSSEAIKRLMRRLSDIMFAMMRDKTPYDPDIHREKQARRGKKKEESVATARQRQEPCAFPSPRDVTISRPTERVKQKDASH

SEQ ID NO: 243084 - protein, 351 aa, unidentified
MVTLVKQPSRLIVGVDSHKETHQAAVLDLNGTLLANERFAASSTGYHELETWLNTLGEIERVGMECAGSYAAGLARFFRERHVEVIEVNFPHRAVRARRGKDDPIDAEMAARKVLSGEARAHVKDTTGTIEFIRLLKVARESAIKGRTNALLQIRDVLITAPSELREHVEAAGGRIRRVNRAAALRPDLARMDDPLQAAKLSLRTLARRVTILTEQIEEIDVHLGGLVATCAPTLLSRVGIGTQHAAQLLVTAGQNFDRLHSEAAFARLCGAAPIPVSSGKTNRMRLHRGGDRRANKTLHLIAVNRLRLDPATKVYMERRRTEGLSKKDVLRCLKRFIAREVYNALKEDLL

SEQ ID NO: 243085 - protein, 337 aa, unidentified
MDYFAGLDVSMEETHVCVVDRDGAVIHEVKVPSTAADIKTALAGAPACRRVVFETGRMAPMLHHGLTGCGVPVICIESRQARQALKSFATHKTDRNDARGLAHLARTGFFKPVHVKSLSAHAIRSLIIARKKLVGQRVTLENQIRGLAVVFGVRLPRALSSAFIAKALRASEGIDGLSAAMRGLVAARAAVLSAIAAIDADMKKLVRASDACRRLMTIPGVGHLTALAFAAAVDDPERFRRSRDLGAYLGLVPRRYQSGEVDYTGSISKCGDRRMRTLLYEAANVILTRYKQPLKLKDWALAIARRSTLRKARIALARRLAIIMHAMLRHGTEFKPA

SEQ ID NO: 243086 - protein, 410 aa, unidentified
MEQQVENVAGLDVHRDSVVACARLGRVERPKTMKKSFKTTTAGVGELARWLADLEVTRVVMESTGVYWKSVYYGLEGLFGEVWLVNAHHVKNVPGRKTDMADAEWLADVAAHGMVRPSLVPEPAARELRELTRYRKVQVSIRAQEVQRLDKLLQDAGIKISSVASSVLGKSTRAMLEALITGERDPAILADKALRRMRPKIPALTEALAGRFGAHHAAVARAILAHIDFLDSNIAALDQEVATRLGPFRAAVELLKTIPGVGQTTAEVFVAETGGDMSRFPSAAHLAAWAGLAPANDESAGKHRPVGSRKGARWLRRSFIEAAKAASHTRGTYLAAQYHHLAARRGPNKATVAVAHSIVVAAWHMLSDGTPYNDLGADWPTSRRDPEREARRLIARLEALGHKVTIASAA

SEQ ID NO: 243087 - protein, 387 aa, unidentified
MVQVNDLSRSLAAFDPASTLVVVVEMSKASWLVSGVVPGVERQPLKKLEPGATALLRLIERWRNEAVRAGRPISRIALAYEAGRDGFWLARWLIARVIEAHVIHSASVAVSRERKRAKTDRLDAAMLIRVFLGWLRGERGHCGMVAIPTIEEEDARRPNRERESLVNERSRIINRMKSALARLGIRGFKAHLRKAPERLAGLRTPEGTGLPTNMIEEFRRDMARLALVREQISSIEKTRAQRLEQAPDTGPHAMVRLLARVIGIGIETADLLVREILSRNLRDRRALARYAGLTGSPDESGLKSREKGLAKAGNARVRRGLIQLAWRFLMFQKDSALARWYRTRTEGPSGARKTTMIVALARKLLIALWRLVTTGEVPDGVELRSAA

SEQ ID NO: 243088 - protein, 357 aa, unidentified
MEEHENEIYVGIDIHRDYGVACVQDPKGEIIDEFRFGNDIKGINEVKEKLGQNKNKGHIAIESTGNMWLVLWDKLEESQLDLHLVHPLKTKAIASNKIKHDKLDAKILAKLLRGDMLVCSYVPPRDVRDKREIVHLRASLVGMRTQLINKIRSILHKYCIKYKGSLYQTAGMNFLSSLELRPVDVSAIKSYLETLKTLNAQIESVNTQIAGGDSEEIKLLMSIPGIDYYSAALIHSEIGDISRFPSHNKLASWAGLVPSMHQSGTSFYNGRITKEGSKRLRWILIQCAHTSIRANPKLNEFYGKIAKRRGENKAVVAVARKLVKIIYAVLSSRNPSFYGNPEKTENKIKRMKKIAKK

SEQ ID NO: 243089 - protein, 458 aa, unidentified
MKKQAAKIEKQKDIVEMSLVNPHAAGIDIGDTEHVVAVAEGRDKERVRKFGTMTCDLEAIILWLKTCLIETVAMESTGVYWKPLFAMLVRNGFEVYLVNSKHVKNVTGRKTDEDDAMWIQKLHSCGLLKSSYLPEDEQEALRTLVRFRKSLIEDMSRFINRMQKSFELMNIKFHTVIDDITGKTGTAVIEAIIAGERNAANFLPLIDRRVKADHETIQKSLQGNWRAEHLFTLEQNYELYKTYRKHIEVCDLQIEKQLQQYEASRNDGQIETSTAKKDESVTVKKKAKAKNQPKFDVRRYLERIHGVDVLAIFGLSDIGGLELLGETGTDLSKWENELHFTSWLNLCPNNKISGGKIISSKLMRKKAGIASQAFRHAANSVQKSDHWLGDYFRRKKAKGGNKYAVVATANKIATIYYKMIRYKEEFKPLDLEQYQQKYKQAKIAYLERKLNELKQQVA

SEQ ID NO: 243090 - protein, 310 aa, unidentified
MEPVFVGIDVSKDRLDVHVRPGGEVFVVSRDGSGLEELVGRLQALDPTLVAVEATGGFETIVAAAVAGAALPLAVVNPAQVRHFAQAVGKRAKTDPIDAGVIAHFAEAVRPVPRTLPDEAARLLAELVGRRRQIIDMIVAERQRENRATNVRVRKSLARHLAMLEKELGAIDQDINTLVRGSPLWRVKEDLLASVPGIGKTLARTLLAELPELGSLDRRHIASLAGLAPYTRQSGRWRGRSMIAGGRSAVRSASFMAALVASRHNPPLKDFYLRLICAGKPKMVALIAVARKLLTILNAILRDNQPWQSA

SEQ ID NO: 243091 - protein, 349 aa, unidentified
MRFYHHSHRFYCGIDLHARLLAICVLDNDGAIVLQTQIPARQQLLLDTLAPYRPDVVVAVECLFAWYWVADLCRAHHIPFVLGHALYMKAIHGAKSKNDDIDAEKIARLLRGGNIPVAYVYPKGLRETRDLLRRRMHLVHKRAELVTHIQIVNAQNNLPEFGKKLIYAKNRAELKIAERFENPQVRKSVEVDLALIDALDEQIGDLELYLERTAKVEDPHTYHLLKTIGGVGKILGLVLLYEIHDIRRFAEVGEFLSYARLVRCVHESAGKKLGYGGKKIGNAHLKWAFSEAVCLLVRNYPVVKIWQARHQKKHGKKKTLGILAAKLGRAVYHMLRKKEAFDVRRFLGQ

SEQ ID NO: 243092 - protein, 364 aa, unidentified
MNHLAIDLGSRESQICVRNSEGVILEEERRPTTGLGKYLAGKEKCRVVLESCAEAFAVADAARKAGHEVAVVPTSLVRALGVGSRGIKNDARDAQNLSKASCRMEDLPSVHVPGEVSRARKAMSAMREALVETRTKLVNTARSWLRTQGVGVLAGGTLPTFPARYRRHVEKRGRTLPIYVERMLQAIEELNPTIAEADKELEATAEQDPTCKLLMTAPGVGPVTAVRYVAAIDEVSRFHDAHGVESYLGLIPGESSSGDAKKKHMKGITKAGPPRVRWALTQAAWTALRCRKHDPMVEWARQIEARRGKKVAVIALVRKLAGVLFAMWRDGKAYDPKHEGKRAALAEKTDKATGCGVTAAQILP

SEQ ID NO: 243093 - protein, 319 aa, unidentified
MGTVMNQPSSSVYIGIDVSGSTLDVAIHDTTEHFSVDNETVAIDQLVQRLGALNPTLIVMEATGKLELAVLRALCQAGLPAVAVNPRQVRDFARATGTRAKTDRIDAFVIAQFAAAIKPVVRPLNDVQTEQLQALLLRRAQLMDMLVAEKARLERAHAAARGSLNDHIKWLKQQLKLADHDIDSFLRSSPAWRQKEDLLRSVPGIGPGAAATLIAFMPQLGSLNRREIAALTGVAPFNCDSGKQVGKRRIQGGRAIVRRALYMACVPALRFNPTIRAFYDRLRNAGKPFKVAMTACIRKLIVTLNAMVHNSTPWRPSAD

SEQ ID NO: 243094 - protein, 404 aa, unidentified
MWYAGIDWADDHHDVVVLDDSSRQIASRRVAHTAAGLAELTTTLSQICGTTAKDQLACIVETNRGLLITALLEAGFAVYPVNPKTVDRRRNAAGVKTDQIDAYLLAKVGRSDLADLRRLRPDSPLIQELKALTRDQDGLIQSQTRLVNQLTACLKAYYPVALTLFGKLHQKSTLAFLRAYPTPDAARSASMDDLIQTLKAAGHTRASQIAPTLWHTLQQPQLQADVVTTRTKTRLMLALLAQLQPVMEQIAAYDEEIEHLFLSHADSVLFASLPRAGKRLAPRLLAEIGEDRTRYADAAGLQALAGTAPVLFQSGNYAKAHRRIACLKPLRNAMQHFAWQSTLEEAWALTYYQRKRAEGKSHSVAVRALANSWLRIIYALWRDRTPYQVDIFTTAQQQQQRKAA

SEQ ID NO: 243095 - protein, 353 aa, unidentified
MITIGVDAHKHVHMAVALDERGRVAGHWQGENSVAGWDEATQWARALGDERRWGIEGGGGYGRGLAQHLVGGGEVVYDINPRLTATERRRSRRTDKSDAFDAQAIAQVVQREEDTLPRIAAEDETVALDLLTAEREDAQAEATRLRNRLHHLLLQLDPQYHLHLPALTSVAGVQAAAGYTTTSSSLVQQERAAVVRRLAGRLRLALEQVAELGQRIEALAQARYVPLTRLCGVSLLTAGSLAGILGPGHRFASEAQLAAYAGVAPLETSSAGRVRHRLNRGGNRRLNAIVYRIALVQARWSPEAKAYLARRMSDGKTKREAFRALKRYLVRAIWRLWHACLSPAGVEPAYHAT

SEQ ID NO: 243096 - protein, 387 aa, unidentified
MSQTIAAPIPAPVDYERTLILAIEVSNKSWVIAAQIPGLPHTKAKRTINPEAEALLAAITGYRTRSDAPGRSIERVIAVYEAGWSGFWLARWLMRHGVEVYVVQPSSVPVDRRMRRAKSDGIDSELLLRTLLAWLRGEPRVCSMVPVPDEADEDARRCIRERTELISERIGLTNRIGAVLATLGVSDYNPLLRNRCHRLAELRTGLGEPLPANAHAKIKRLLARLELVLTQIAELERERDAVVETETPDQASKMIQQLTGLRGIGVQSATVLVREAFVRRFANGKALGSYAGLASSPYSSGGIDREQGIGKAGNRRVRTVMVELAWLWTRYQPAAAQVCWFRERVGSSGPRVRKIMVVALARKLLIALWRFVIDGVLPEGAVFKPAA

SEQ ID NO: 243097 - protein, 400 aa, unidentified
MKTKQLSSVQMGNPTNKIQNLADFSGRDLYVGIDVHKQRWQVAVYYDGLILSNTSIDGGGEALLTHLRKRYGEAHFHCVYESGPFGFALCRSLWAAGLECRVVNPADIPGTDKDRRSKTDKVDARKLAQHLAAGLLQPIYIPSEKLQKQRSLIRFRKKLWGDLVRVKNRLKGELSFQGITVPSPYDNAHWSHNFLLWIEQQALGDEDLQDTLLLMVEEVKLLRVLLLKTERKLRALMYSEEYQQRSALLRSIPGVGPLTAMLFLLEVGDVRRFRGFDQLNRFVGFCPDSHSSGESQKHRGLSLRKHNQLRSLLVEAAWQLIRQDAAMLDHYRALVKRMKGQEAIIRIARKLLRRIRAVLLSERRYVCGADGRQTATQMDAPHLPAKGKRGRPGKIATAVG

SEQ ID NO: 243098 - protein, 337 aa, unidentified
MQPTVPLFVGLDYSQHKVQVCALDPQGKVLGNRAVPDSAAAIDQAVRRLGAVQGAALEACTGAADLAEELADRFGWPMHLGHPGFVSRMKQSPDKSDFSDARVLADLERVGYLPRVWIAPKQLRELRTRVRDRQQLVAQRRNLKLAITALLREHRQRCEHQRWTAAWRAWVAQQAQLPEQARWVMTQRLRRLEWVVAEVHAVERRLEEVTKDDSTVRWLRTLKGLGPVTAWTVRAEVGRFDRFRTGKQRARFCGLSPCNRSSGDKAADAGLIRAADPERRRVCVEAAWVLIRCQPRGRQRAQRLRAQGKPRTVVTAAVANRFVRWLDHEGVRQQAVA

SEQ ID NO: 243099 - protein, 405 aa, unidentified
MVVIGTVSGSAQEDGSEAAEPIRFASRRFGTTTAELLHLAGWLQQHGVQEAVMESTAQYWKPVWLALEQHFPLSLAQAWSNRAPRGKKNDYKDAQRLVRRHVAGELTLSFVPDAEQRQMRTLTRRRTQLTRTRVRIHNQLESLLEETRIKLSSVVTDLLGASGTRILTALAEGETDARKLAAMGDARLQCKPEELADALTGTVSEIHRRLLLQHLAHLALVDGQMEELSKLAAEAMRQHSDAVARLVQIPGIRVQSAQQIVAEAGPHASSFPTAAQFSSWIGTCPGQEESAGQNHSSRCAKGNAYLRRVLCQSAQAAVRTKNSFFQQKFNRLMPRIGYIKAVWAIARHLSLVIWKILHEGVTYEERGLPTTQQAAKRRMQRIAKQMRELGYAVDFKPLNPQHLPS

SEQ ID NO: 243100 - protein, 349 aa, unidentified
MNATIVGVDLAKNIFELAVAGSDWRITQRQRLARPKFLSFFVHLAPCEVVMEACGSAHFWARRISALGHTVRLLPAHYVKAYVRRNKTDQADAGALIEAARCAEIREVPVKTVEAQQIQSLHRLRSQWMGTRQRCVNTLRGILREFGFAIPLGVNVAKAQIGVALSDTDTDIPAALRETLTEMFQQIAVLEQKILTVEHQLNALTRTDLRVQQLRQIPGIGALTSTALRAIVGDIHRFPSGRHFASWLGLTPNERSSAEKRRLGRISKQGDVYLRTLLVHGARSALLAAHRALRAGRPLDRLRQWALDCERQRGHNKATVALANRIARIVWATWKFERPFDGNWSAEAN

SEQ ID NO: 243101 - protein, 339 aa, unidentified
MRKVAGLDAHSTYVVVTIVSNDGEVLAGPHRIGNENADRLEALLATHAPLEVVIEASGSWPWLYDRLESPQVHIVLAHPKKLRAIAESNYKTDAIDAELLARMRLVNLIPEVYPKPIEQRQLATLVRHRARLVRLRTGTAGRIHAELHSVGLSLRRGELLTQGGRRWVHTEAWPLFGPEQQVLIETHERLIDVLNEMIRELDRRIERIGREIPAVQLLETVPGIGPYRALLIVSETDPIERFAQPKHLVSYAGLAPRSSRSGKSVRYGSIPAGANRWLRNVFVQAALSHCRTAPDSPLTTYYEEQKERVGWRVARIAAARKLARAVHAMLRTGEVWSES

SEQ ID NO: 243102 - protein, 477 aa, unidentified
MPLLGRNHNHTNMKSKTPKSKKEKKKISIDQGWEPINPQAAGIDIGAREHFACVPAKATPKNVRGFGTCTADLNALADWFQQCGVTSVAMEATGVYWIPVFQILEERGLAVMLVNARQTKNVAGRKSDVQDCQWIQRLHTYGLLQGSFRPEDAYCVLRTYLRYRDELVSARSTQCQHMQKALQQMNVQLVQVLSDVTGVSGMAIIQAILEGERDPVKLANRVDRRVRATPIQIQKALEGDYREEHLFVLRQAFSLYGIYEEKINACDEQIVRETATLSDKVDPRHQPLPPRKEGRPASKDKMQGQDMREVLYRKFGADLTAIEGIGVTTALVVLTEVGPDVSGFKTEKHFCSWLGLCPDNRISGGKVLSSHTRRVINRASDALRMAAVTLERSQSALGGFYRRMKGRLGAAEAITATAHKLARIIYRLIKHGEAYVRQGMADYERKFRERKLHALRKTAISMGFNLIAQQQVTSPVS

SEQ ID NO: 243103 - protein, 325 aa, unidentified
MESKKLCCGIDVSHSKLDVCYQNNLGELFYLQVGNNNKGYSKILEHMGTNYHFVMEATGVYYIRLAFYLHQQGCKLSVVNALSIKRYIQMHLERNKSDKKDAAWICRYAIDQSPPYWEMPDSAYLESKQLYNTIREYTEQIKRFNNQLHSLKLLPVPSKDTIKSLEKIKHQLEKEIDCLEQKLETMLEEWQPAQLKSIRSIKGIGKRATAMLIVFTQGFKNTHSHRQLISFAGLSPTEYSSGSSIQGKPRIYKKGGKNLRDVLYMCSMNAIKTNTACKTLYERLRTNGKTGKQALIAVCNKLLKQVFAVVKNNSLYQPNYCSAKP

SEQ ID NO: 243104 - protein, 418 aa, unidentified
MAMKIVRFNCCGMDVHKDLVVATIGITDRQSNITEYFQQSFSTLNSDLYRLKDWLNSYHCCDVCMESTGKYWIPIFNILEGEINVHLTHPKYVKAIKGKKTDKKDSKWICDLFKHDLIKFSFIPPKEIRELREIARYRYKLVCMRSSERNRYQNCMTVSNIGLASVVSDPFGKTASNIMKEVMKPNVIDDDKILKLIHKNCKNKDKILDSLHGYHIEADQRFKMEKSLNHMEYLDQLINSCEAELVKRAYPLRESFQHIIQIKGISSLSAILIISEIGIDMSQFESDKQLVSWAGLSPANNESAGKKKSVRISKAGQYLKPLLVQCALSTIKDKTSYFGRKYSNIKKRRGHKKAIIAIARMMLVSIYHMILTGEVFQPTDYESFMNPRSDTKQSLTVEEALNFLKQSGIDISSIQINL

SEQ ID NO: 243105 - protein, 454 aa, unidentified
MVAEGFHGNRGLVPSSPSVRLLNLPCPPHDGHPQVSTWEGRRTVEVVHARCAGLDISKKDAKVCVRVAGAGRRKTVETVTTWSSMTSQILALREHLIAERITCAVMEATGDYWKPFYYLLEDAGFDLLLVNSRHVKNLPGRKTDVADATWLAQLGAHGLVRGSFVPPEPIRQLRDLTRARTAITRERSREVQRLDKLLEDAGVKLSVVASDIVGVSGRAMLESMITGNRDPAALADLAKRRLRCKIPALTEALTGRFSDHHAFLTRVHLDLIDQHTAAIEEITMRIEEVIAPFHGFRDLICTIPGISTLTADVIIAETGADMTRFPTAGHLASWAGTTPGNNESAGKVKSSRTRPGNPYLQGALGAAAMACAQNPVTYLGARYRRIAARRGPQKANVAIQHSMLIATWHMATNGCLYHDPGADYFNQLHPERAAKRAISQLEAMGYHVTLTRAS

SEQ ID NO: 243106 - protein, 358 aa, unidentified
MSRCIPTGDATITLGVDTHKDTHVGVALDGLGRLQGTLSVAANPAGYKRLVEWASEFGHLEHAGVEGTGSFGAGLARFLKAQEIKVFEVIRPKRRDQYRSGKSDPIDAEAAARAVLAGTATGEPKDADGEVEMIRTLRTTRRCAVKARAGAANQLQTLLVTAPEGLKSDLCGLSTARLVEKASRLRPGANPSNVEAATKFALRSVARRYQQLSEEISELDEQLDRLVTEAAPELVAVDGVGTDTAASLLIAAGDNPERLRDEAAFAHLCGAAPIPASSGQTIRHRLNRHGNRDANRALYVIAVCRMSRDERTRAYVAKRTAEGKSKKEIIRCLKRYIAREIYRILSSLPSRNSPISTP

SEQ ID NO: 243107 - protein, 345 aa, unidentified
MTITTIGLDLAKNVFQVHAIDEAGTVVVRKALRRVQVIPFFTKLAPCLIGIEACGTSHYWARELQKLGHDVRLMPPAYVKAYVKRGKTDAADAEAICEAVMRPTMRFVPVKSREQQAELSLHRVRSLIIKQRTQLINMARGHLAEFGICIPQGINNALHLLEKSLDGDMGMDLPEPAHAMLLVLARQALLAHEQIRDVDRQLHVLCRTNDVAHRLTTVPGVGPVGAAAFAAAVTDPGQFKSGRQFAAWLGLTPLQNSSGGKERSGRISKMGDKYLRKLLVVGATALVRQFKIRPDRVPPSFAALLERKPMRVATVAMANKMARIIWALLTRGDTYQANHVPAITA

SEQ ID NO: 243108 - protein, 313 aa, unidentified
MTFKGNGCYAGLDVGKQWLDLAIHDVDGTRQFSNSPAGVKKLIIHLSRLDPALVVVEATGGYEQLIVQAMFSAGIPVHVANPTRIRSYARAKGVLAKTDTIDAVIITEYGYMLNPEPQNAKSEEEIRLRSMIMRREQLVEIRAAESNRLHTVHLCMKSSVEDHLRWLSGQIEELEVQIQALIHALPAVQASVNLLKGIPGVGPITAATVQAEMPELGQVNRQQIAALAGLAPYNRDSGKKRGRRRIFGGRKSVRRVLYMACISGIRHNPVIRKMYEQKIAEGKPFKVAITACMRKLLVIMNAMVRDGTAWSYT

SEQ ID NO: 243109 - protein, 344 aa, unidentified
MIIIGCDFHPSWQMISWLDTESGETGERKLMHATGEARQFYEGLAGVVRVGLESTGNSHWFVDLLTELGHEVWIGDAARIRASQVRKQKTDRRDAEHILDLLMKDSFPRIWTPSPQERDQRQLLIHRYKLVTLRTRVKNELQHLALNQGMQKGRSLWSKEGQKQLLDLPLQLWAGTRRKNLLELLKQIDQQLLVLDQAVKKTAEENEKARLLMTQPGVGPITSLAYVLTLGDVTRFRRGKQVASYLGLIPQEYSSGGKQRLGGISKQGNRFMRMLLVEAAQTTVRYDPQFRKEYLHRCHHRPKAVAKVAAARKLAIRLFWMLRTNTAYPEIVRIESSSRVTLAG

SEQ ID NO: 243110 - protein, 339 aa, unidentified
MSATRFVYCEQTIKSVFQVHGVAADGTVALRRRLRRRDVPGFFAGLPPCLVGIEASRSAHHWARELAALGHTVRLMPPSYVKPYVKRNKNDAADAEAICEAVTRPTMRFVPVKSRERQAAILPHRARDLLIRQRTQLVSALRSHLAEFGIVGPQGLWNVKRLVDAVRDGGGLPAAARRALDLLIEQLESLGEQVAAVEKDIRAWHRQHEACRRLAAVPGIGPITASAIVATVPDLTTFSSGRDFAAWLGLTPRQNSSGGKERLGGISKRGDRYLRRLLFSGALAVIFRERRREVPSGWLGQLLRRRPVKVAAVALANKTARIVWAMLARGQTYHAAAIA

SEQ ID NO: 243111 - protein, 343 aa, unidentified
MQAITTVGLDIAKSVFQVHCIDAHGSVVVRRQLKRRYVLAFFKKVPPCLVGIEACATSHYWSRELQALGHTVRLISPAYVKPYVKRQKNDAADAEAICEAVQRPSMRFVPTKTPEQQSCLMLHRTRHLFIRQQTAVINTIRAHLAELGIVAPVGRNGVEELLYAVADTKDDRIPDVARACLEALGALLGKLKAQILEFDRQINAWHRSNETSRRLDELPGVGPALATALVASVADPKAFRSGRDFSAWIGLVPKQNSSGGREKLGSITKQGDRYLRSLFTAGALAVIRYAKIHGTKHRPWLARLLERRPTKVAAIALANKIARMAWAMMVKDECYREPIALAR

SEQ ID NO: 243112 - protein, 370 aa, unidentified
MAKRNMFVGMDVHKESIDISLAEAGRDGDVRHYGVIPGDLDALAKVVRALRAPDRSLRFVYEAGPCGFGIHRYLTGEGEDCVVVNPSSMPTRSGDRVKTDRRDGNALARLHRAGELTAIYIPTGDDEAVRDLVRAREDAVGLSTQARHRLKAFLLRQGRRYAGRAGWTQPYRRWIADLSFPLAPQHIALQEYRDTIAEAEHRVERLTTQLRALTPAWRWAPVVEALQALRGVSFVTAVGLVAEIGDLRRFAHPRELMGFLGLVPSENSSGPRVRRGGITKAGNSHARRLLAEAAWAYQGVPRVGRAQLARQEALPKAICDIAWKAQLRLTSRFRRLVARGKAKPKVATAVARELTGFIWAIAQEVPGPSA

SEQ ID NO: 243113 - protein, 419 aa, unidentified
MTASMTQHFVAYVGIDWADTKHDICVQAGDGDHREFDCIPHKVDRIDEWAKALHQRLGGPIAVAVELAKGPIVSALLKYDFLVIFPINPSTLARYRLAFKPSRAKDDPSDAELALDMLLRHPEQFTALKPQSVAMRSLLSLIEQRRDLVNDKTRFTNRLCSTLKQYYPQALEWFEQRDTLLFCDFLARWPTLLSAKRARKTTLEAFFYSHNGRRAALIQTRVASIRAASALTDDAGIIEPCHLHVLALVEQLRTVLMVIDRFDTEIERVASALPDYALFHSLPGAGQHLAPRLLAAFGEQRERFHGADELQKYSGIAPVTERSGKKSWVHWRWQCPTFLRQTFVEWAGQTINKSFWAGAYYRQQRAKGSSYQAAVRALAFKWIRILYRCWQTRTPYDETTYLNALRKRGSPLLKTLDLN

SEQ ID NO: 243114 - protein, 347 aa, unidentified
MAMVVLGIDAHKRTHTVVAVDEAGRQLGMRVTKSTSTGAHLDLVRWADQFGSARRLAVEDCRHLSRRLEADLLAAGEQITRVPPKLMAHARDSARTYGKSDPIDALAVARAALREPGLPTARLDGPERELRLLVDHREDLVAERTRVINRLRWHLHELDPGWDPAPRSLTRKNTIAAITARLAALDGLVARLAADLITRISELTAQADAVEKEIAVLVRQLAPSLLAVCGAAELTAAKIVAETAGVSRFRSKDAYARHNGTAPLPAWSANRTRHRLSRTGNRQLNCAIHRIAVTQIRCHPDAQAYLTHRIASGDTKTEALRALKRRLSDIVYKALHADGTAVLAAAA

SEQ ID NO: 243115 - protein, 316 aa, unidentified
MTQNRRSGGVDCGKRFLDVAAHPGGETARFSNEPDGRTKLVAWLKERGVTRVGLEASGGYERAIRDARCAAGFDVHVFEPARVRHFARAKGRRAKTDPIDARMIAEFTTTLADTPPVVVDRSREELAKLIRARRLLVDKRADLAKAVRDLPDEARTTVEAALAGLSLAIRDLEAMIERRAAADTALARRVELLCRAPGIGRATAVTLAALLPELGGVSGGARAALLGVAPYACDSGERRGGRHIHIAGGRADVRRILHMAVLTAATRADGVLRAFYVRLTGRGKPAKVALTACMRKLIVRLNAMLAAGQTWTEAPA

SEQ ID NO: 243116 - protein, 347 aa, unidentified
MIEAILERCAGIDVGKKFVVVCVMTGGAKDEPRTQIKKFGTIVSELRRLAEWLVAEGCTHAVMESTGSYWKPVFNLLEAHVQVVLANAADVQNRRGHKTDPNDSRWLAHLLRHGMIRPSFIPPLAIRELRDLTRRRRQLIGENSRERNRVQKVLEDANIKLGDVLSDVFCVSGKLMLAALLDGQMTAEQIADLAKKKAREKIPQITASVADHRLSDHQRLLIRHALRHLEFLDEEVEALNQEIRRHMEDPALVEAFHLLQSIPGIKEESAASILAEIGADMEQFPTAVQLSSWAGVCPANHESAGVKKSFRTNRGNVWLKAYVAIDSGGGAGRAQPISCHRGHFCCR

SEQ ID NO: 243117 - protein, 334 aa, unidentified
MRPLLLAGVDISKDWFDAATSDGTGTLRTRRFDNDAGGHRAFIGWLDQPARVVMEATGTYGLDLALALHAAPGAEVMVANPRQVKGFAQAAAQRAKTDHADARMILHFAQAMPFERWTPPAPAVVELRAMSRRIAALSAERTREKNRLHALTTSASHSRLVARDIEVNLRHLTRRIAQMEAQAVALVGEHTALSEAFSHLTSVKGIAAKTAVTLLAELLVLPEGMTAKQWVAHAGLDPREVTSGSSVRGKVRISKVGNVHLRRALYMPALVASRSEPRVQAFYEELRARGKTPKVALVAVMRKLLHAAHGMLRHGEDFDGERFRATPHKVPAEA

SEQ ID NO: 243118 - protein, 429 aa, unidentified
MNYTQNEKIEQVTDSTMVVGVDIGSQIHYARAFDNRGRELTKRIFSFHNDLEGFNSFNLWAETLKTENKKTAVLIGCEPTGHYWFAFAKYVNDHQKRLVMVNPFSVKKIKELDDNSPKKTDSKDPKTIAKLVVDGRYSIPYMPEGIYAEIRDLVYSRDRIMKQHNISANRIQRWLAIYFPEYLGLYTRFDAISGLAVLEKAPLPKDVIALGVNGIRKIWHDKKMRGRGVTEDRAKTLVEAAHNSVGLDGGIGTKSELYMLLEEHRLWTSQLEAVNKVLEEMILKVPHVEKLLAMKGVGSITIAGFIAEVGDIRRFQSPKQIQKYAGLELVENSSGKQKGKTRISKRGRRKLRKILYQVMVPLLAGNQEFRTIYDYYVTRVKNPLKRRQAMIAVSCKLIRVFYAVLTKGVDYDRFKMMSDIHHESEHIIA

SEQ ID NO: 243119 - protein, 310 aa, unidentified
MQDILECCCGLDIHKDSIVACLLKGPLNKQPSSEIRVFSTLLSDLESLKEWLVKENCMHVAMESTGIYWIPVYETLETAFDGHMSLIVANARHMKNVPGKKTDMKDAEWIATLLRAGLLNGSFIPEKDIRELRELTRYRKSVISDITSQKNRIEKFLQSCGFRLSSFISDIFGASGSAIIKHLYTYGSITIKELDTCLKTQTRNKINEIMQAINGKLDKHQRQFLKMMFEHLESLKAHLSEVESQINLSIQKYDHYIELIDGIPGIDKTAASTILAEIGTDMSKFKTSEHICSWAGLSPGNNESAGKKKE

SEQ ID NO: 243120 - protein, 321 aa, unidentified
MQAHDVFVGVDVAKATLSCCIHGRSGQQDLLNDEASIVNWLATLPASAAVAVESTGKYHQAVVRLAHGSGRAAYVLNARDVFFYAKALGVRAKTDRTDAQIIASYLAVHQGELKAWAPATPLQARVRDLLRCRAGVSAKRSSLQMVLRDVRGLESAVEALDQRFDALLSEIDSQISSQLEQDEELKRSRALLRTITGVGPQASAMFTSLLSRVPFANVDALIAFTGLDPRPNDSGTKTGKRRITKRGNPELRRQLYLCAFAASHSKAFGPVYRSIKARGFKPTEALVILGRKILRIIWAVWSSKMPFDPSRFAPPAACAKT

SEQ ID NO: 243121 - protein, 396 aa, unidentified
MEVVAESVAGIDVHQKEITVTVLIGSAESAKPKKVHARFQTVTFDLKACGAWLKQQDVKQVLMESTGQYWRPVWQILEPFGFNMILCNPRIIKNIPGKKTDQKDSEWLSELARYGLVSASYVPPRQIQELRESTRLSKSITQQMTRLKNQVHDILQRSNIKLTTYVSDIFSGSGRRILALLENSEVINLASIEQAGTGKRGYRLKATPKQILASLDGALSYNDRFLMAMNMNLLASYQRELINLESQIYEQLEAFSELYHRLQAIPGVGEGTAQIIIAEIGSDVSPFPDAHHLASWAGLCPGSYESAGKKHGAHTLHGNKYLKTAMITAAMAAKSTKQTGLRDFYWRLCSRMGKQKANVALAHKLLRIIYVMIQTGATYQEYKKSQRTEDTLTPKI

SEQ ID NO: 243122 - protein, 320 aa, unidentified
MVLKQNVGIDVSMDSFDVNITVLDDAFDKHCKGTRKFTNDLKGFTQLLVWTERHRNHDVELSFTMEFTGVYYEQLAYYLKQDNQTVYMVIPSKAKKYIESLSRASKTDRLDAQSLAWMGLERKLKAWNPLSLIFINLRTLTREREELITEKTVVKNRLHAATKKAVGQVRTIQRYKARLQMILDQIEEIEAEIKELIKEDDVIYAKFKNVTSIPGVALITAATIIAETNGFSSIFSIKQLTSYAGLDVKIKESGKYIGKSKISKQGNSHIRRVLHFPAQTAIVYNKPLSIFYERVNAKKTKPMIAGVGVQRKLLALIYTL

SEQ ID NO: 243123 - protein, 422 aa, unidentified
MNQSLSEEQFAAFIGIDWADSKHDLCLQKSGSHHRESSSLTHTPEAIEAWANALRRRFGGKPVAICLELNKGPLVYALSKYDFMVLFPVNPLTVARFREAFSTSGSKDDPSDAELQLEILLKHRHQLRELKPSSPAIRALEQLVEHRRRLVSDKVRLNNRITSVLKNYFPQVLEWFKDRDTKLFYEFLTRWPTLARVKRARRSTLERFFHTHHVRSAARINKRIEGIKAAVPLTTDEAIIAPNELLIKATIGQLQMVLSAIREFEDEITLRAQAHADFAIFDSFPAAGKAMAPRLLVAFGDQRERYTCADEVEKYSGIAPVTIRSGNQCSVVWRWRCPKYMRQTFVEWAALSIRQSFWAQAYYEQKRAQGKSHQAAVRALAFKWIRIMYRCWQDRKPYDESTYLQALQRRGSPLFKYLANST

SEQ ID NO: 243124 - protein, 350 aa, unidentified
MELATIKTKYVCGVDLHSKTMYICVMNRKGEIKLHKNMRNDFKLFKSLIKKYVKNISVGVESMHSYYWLADGCRENNIPFYLGHAYYMKSIHGGKKKNDKIDSKKIADLMRSNHFPVGYVYPKEIRSTRDLLRRRIRFMRLRAEAYAHIQTIFRQHCMNISPKEVKNKLTRRELVSRINDPFVQKSIEMNLDLIDFFDPKLNKIEREIRAEAKNYDRTTHNLLITVPGIGDMMSLVILYEIGDINRFPSPQKFSSYCRLVKCERESGGKRYHGGNQKIGNPYLKWAIGDIVIHAPRTSPLIKQYYDNLINKHGKKKAKGIINHKFGVAIYYMLKRKQGFDEKRFISTTMN

SEQ ID NO: 243125 - protein, 356 aa, unidentified
MTTQQKQNCLYVGIDVHKDTHTAVGVSPFGEKLFEVTIGNYKSDFLALESEVKKHSGILSPFFGLEDVRGYGERLAEYLYQSFPVYHVPSILVDRLRQNATHPEKSDSLDALGVAKVMIQSIDTLLPYTISEEGEKAKQLKEISIDREDLVLERTRLKNQVHTLLYRIFNNEYIKVFKDPFSLKALTHWSKSKPKCDQFLLKTMKRKVKRIRDLHYEITDLEKDMEKLLKNNYTIQTASGCGVVLASTIIGEIGDIQRFNSPGALSKYAGCSPRERSSGKKTRHVKTRSGNRRLNCAFHRMALSQISRMGNEKARVYFKRKISEGKSKSQALVCLRRQMVNIVWNMIKYKTVYRNA

SEQ ID NO: 243126 - protein, 385 aa, unidentified
MYQLSGSTQGALDYNSTIIGALELSEKKWVLAVQLPGVRRHSRHVLEACGDGLASFVERLKARCAAAGRKIARVILTHEAGRDGFWLARFLARRGIEIHVIQPSSLPVDRRARRAKTDIIDVEMLLRTLMAWLRGEPRVCSMVPIPSEADEEARRAYREREDLTGERRSIVNKIDGILATLGVKGYKALRRDRREQLTAVRQPDGDPIPQKARARIERLLDRLDLVLKLIEQVESARDAVLKKDAPADEAERMIRSLTDLRSIGPDFATLLVREAFVRQFRNRRALGGYVGLGGTPFSSGGSEREQGIGKDGNRRVRAAMVELAWTWLRWQSDSALSVWFRARVGTMGGRIKKIMIVALARKLLVALWRYVMDGVIPDGAKMKAS

SEQ ID NO: 243127 - protein, 477 aa, unidentified
MATQHEAATEAKPNRKQRREQQRKIWTDNPGLDVVHPDAAGIDVGNSEHYVAIAPDKSAEAVRRFGCFTADLRDLAQFLKAHGIVSVVMQSTGVYWIPLYDVLEEAGFEVYLVNARDTKNLPGRKSDVQESQWLLKLHTYGLLRNSFRPTSEIRVLRTYWRQRAEHIHTATECVQRMQKALTQMNLQLANVITDIMGLTGQKILRAILAGERDADKLAKMRNWRIQASHEEIVASLTGNWRPELLFTLRQEVDRYDFCQRQIGECDQEIDQHLDTLPTRPRETAPQVQPVVPPKKGKKAQANSPEFALGQELVRIAGVDFTRIDGINVMTAQTIISEVGLDMERWKTEAHFASWLGLCPYNAVSGGKVLRRGTRKVVNRAATAFRIAAFTLRRSDSYLGAQYRRFRGKLGAPKAITAMAHKLAVLFYRMLRFGQEYVDRGQQFYEEKYRQQQISLLNRKAAQLGFSVIPAANHPAPA

SEQ ID NO: 243128 - protein, 400 aa, unidentified
MGILAGRVDHVIGVDTHRDRHTAAICDPNGGVEHEASVCADAAGYRALLDVARERAAGRRVWAIEGSGMYGAGLAHYLLGEGEWVVEIDRPARPARRNGAKSDALDAARAAREALGREHLGVPRARGSREALRALVSTREGAVGARTQAMCQLRALVVGAPEPLRQRLRVRSSAELLQACCGLRVAPSQPIEQQATIVAARALARRILALEGEVAELESRLTGLVRAVAPQLVDEPGVGPVCAAWIIVAWSHRGRLRSEAAFAQLAGACPIPASSGQVVRHRLNRSGDRRLNRALHTVVLCRLALDPQTRAYAARRAAEGKSRREIKRCLKRFVARRVFRLLECGPPDAARELRSTRTSFRVSEFANSALEHGPLRPAAEIVCELIDRLQPSEERAPSLS

SEQ ID NO: 243129 - protein, 406 aa, unidentified
MVGIDWADKAHVYCLMDDAGTTLSTGTMEHTAEGLEQFMNIVRARVQTPHDVLVALETSHGPLIGALLDQGFTVYAINPKAVERHRDRFRVAGAKSDLRDAWVLATLLRTDRAQYRPLVPDSEVAQELRALTRDRAELVRTRTMLSNQLTACLKAYFPEFLTLFADPDRPVALALLQTFPTRDHLQAVSRADLEAFLRRHHCPHSRKRATAIHERMQAPGFHIAPPIVRAKARLAGTLASQLLALLEHIDAYEREIERILKLHPDGELYRSLPGAADVLAARMVGELGDNRDRYRDPNVAQCEAGTAPVTRKSGSTRTVHIRRACIHPLRETLWTFAFSSLRHCAWAQAYYNQARKRGKKHAEAIRMLGNVWLRIIIAIRRDRRPYDEAVFQKARARHASPGLCFA

SEQ ID NO: 243130 - protein, 368 aa, unidentified
MLRLVSLADRGQGVGPTRQGGRGGGPGDPRPVVSIGIDLGRSKWALAVRWGGQVQRRLATPGQLSHLEALLEQYRECRVQVAYEACGFGYEIAWYLQQRNIAVTVVAPVTLERAAGARVKTDKIDAAALATKLEQGSLKGIYIPSRREHADRQLSRTYAKALKARQRAQVQIRALMQEQGRIGPNPAQGWSAYARWLDQQSDLPEPVTVSVNELGQLRQAAAESAKRLKGALLKLSKSPQYAAVVAAVRAQPGVGPFTAIRVVVEIATIRRFASAGSFVHYLGLTPSEHSSSESIRRGHILKCGPGYIRSWLLECAWRAIGVRGEPALRECFERLAPRIGRKRAIVAVARRLALRLRARWIEALGQAA

SEQ ID NO: 243131 - protein, 347 aa, unidentified
MEQYAGIDVSLEASHVCVVDAQGKILKEAKVASEPEALIAWFVAHGTPMARIGLEAGPLSQWLFAEMKAAGLAVELIETRHVRAAFKAMPVKTDRTDARGIAQLMRLGWFRAVHCKSLPAQEVRALLTTRKLLQAKRHDVEMSLRGVLRGFGLKVGPTTPKTFAGRVRDLVAHHDTLQTIAEALLNARAVLEQEFKAIETRLSALARAHAPTRQLMTTPGVGAIVALTFAAAIDDPGRFRSSRRVGAHFGLTPRKHQSGETDVTGRISRIGDHGVRVALYEAANVILTRAVKGSDLKSWALGVAQRAGMRKAKVALARKLAVVLHRMLADGTTFMASKGAPSAAGAA

SEQ ID NO: 243132 - protein, 343 aa, unidentified
MQTITTIGLDIAKSVFQVHGVDAGGQVIVRRQLKRRSVLAFFQKLPPCLVGIEACASSHHWSRELQALGHTVRLMPPAYVKPYVKRQKNDATDAEAICEAVTRANMRFVPTKTPEQQSGLVLHRTRHLFTRQQTAVINAIRAHLAEFGIIAPVGRHGVEELLNVVADPGDRRVPEMARACLLACGAQLRRIKEQILEFDRLIRAWHRSNEMSMRLDEAPGVGPVLATAVVAAVADPKSFRSGRNFSAWIGLVPKQHSSGGKNRLGNISKQGDRYLRGLFVAGALAVIRYAKIHGTKHRPWLTALLARRPTKVAAIALANKIARMVWAMMARGERYKEPVALAR

SEQ ID NO: 243133 - protein, 463 aa, unidentified
MIMSSKRKRKRQKNQDKQVPSLDSLEQINLNAAGLDIGAAEIWVCVPEGRDETSVRAFQTFTVDLHALADWLEVCDVETVAMESTGIYWIPIYEILEARGFEVYLVNARHIKNVPGRKTDVLDCQWIQQLHTYGLLEASFRPEAEMCALRAYIRHRDNLIRYRSAHSQHMQKALHLMNIQLTNVISDITGQTGMQIIRAIVAGERAPLKLAQYRDPRCHSSQAEIAKALTGNYRDEHLFALQQALELYDFYNQQITACDAEIEQKYAAFKPVVDAETHPLPPAKKKRRRSSNEPDFDLHGYLYQITGVDLTRIDGLDALAVQKIISETGVDMSPWPTVKHFTSWLTLAPHNDISGGKVLKSRTLKSKNRAAQAFRMAAQSVSRSNSALGAFYRRMRAKHGGPKAITATAHKIARVFYHMLKHKEQYHDPGQDYYEQKYRERVIRNLQRRAKELGMDLVPQGVS

SEQ ID NO: 243134 - protein, 376 aa, unidentified
MTEITRVGIDLAKKIFHLSAMDADGNIVERKRLRRSELQSYLARLPTPCVVAMEACGGAHHWGRLAMRHGHEVRLMSAQFVVPYVKSNKSDTLDADAIAEASTRPTMRFVGVKSVEQEYVQHVHRARQLALRHRTAQTNQLHGMLLEYGVAAPKGASAMLKRLAEVLEDAENELLSATRALLWNMGQELRRLDERVQQFDLEISALARQMPAAQRLMTIPGIGEKTATALVAAVGDASVFRNGREMAAWLGLVPRQRSTGGRAVLLGISKRGDRHLRTLLIHGARSALLAATRRPDRRSRWAVDVKERREATWLRSPSPTRMRARRGRYSCVASRSTSHTWEMPCEGHSEPTPGNATAGTASSRCAAPSLRYGPDG

SEQ ID NO: 243135 - protein, 414 aa, unidentified
MFAVGVDVSSGRSTVAVLGAKRKVVLKPFEVPHTAEGFASLAEKLNGLDGEARIVMEHTGRYYESFAMSMYRAGFFVSAVNPLVIKDYREDISVRKVKTDKADALKIAQFAIDKWEILPQYTPMDTIRYNLKTLHRQFQLSSKTKTALNNNLIAMLEQSYPGANRYFDSPVRPDGTQKWVDFVDTFWHVDCVAKVSQSAFVDRYRKWCKRHGYNFSEQKAIEIHTDARQKFPLVPKTDTCKLLVKEAVSQLNAVSRTVETYRTEMNRLASQLPEYDIVMAMTGVGKSMGPQLMAEIGDLRCFAHQKSLVGFAGTDPIKDDSGDKVSGSNRSSKRGSPYLRKTLFVIMTILLQLQPQDDPVYQFLDKKRSEGKKYYVYMTAGMTKFLRIYYGKVRDYLKEKGIWDSPASQEVNPD

SEQ ID NO: 243136 - protein, 349 aa, unidentified
MTIVEDTRVVTGGVDTHAEVHVAAALDAVGGLLGVREFPATAAGYAGLLGWLRSLGTIALVGVEGTGSYGAGLARHLAAAGVRVVEVDRADRQDRHRQGKSDPLDAVSAARAAQSGRASGVPKGRDGAVEAIRALMVAKRSARAERTQAINQARALIVTGPDELRARFAGHRPAALVGAIAALRPRPGDVPGYATRVALRELGRRAQFLDAQLERLDELIVPLVTARAPGLLSLHGVGPDTAALLLIAAGDHPERLRSESSWAHLCGAAPIPASSGKVSRHRLNRGGDRQANHALWRIVITRLGSRPGHLATRAYVERRTKEGLSKKEIIRCLKRYVAREVYHQLRAGA

SEQ ID NO: 243137 - protein, 311 aa, unidentified
MDATVVVGIDVSKDRLAVHVLPSGENFAVARDEEGVSKLVARLAALGPYAIAMEATGGLESLVAASLNGANLPVIIVNPAQVRAYAQALGKRAKTDAIDAAVIARFVEATKPVIRALPDADTVLLAQLMTRRRQIVQMIVAERQRQTQLPTRHLRRSAARLIKALQRELDVLDRDIDSSVRGSPIWREKEALLRSVPGVGPIIARTLLAEMPELGTLTRREIASLAGLAPWTRQSGRWRGKSFTGGGRAPVRAVLFMAALVGARFNPILKAFHQRLIAAGKPKMVALIALARKLLTILNAILRDNSPWQSA

SEQ ID NO: 243138 - protein, 370 aa, unidentified
MTTSNILFIGMDVHKDSIEIAIADGTNHEVRRYGRIGGTHDAMRKTLRKLVSQDKTLHFCYEAGPCGYELYRYLVSEGHDCWVVAPSLIPKRPGDKVKTDKRDAAQLARLLRAGELTPVYVPNREDEAIRDLSRAREDTMLVQKSARQRLKSFLLRHDIRYQGKTSWTEAHLRWLADEVRCPSPAQQIVFQEYVNAVTESQQRLQRLDEQIKHFAQAWRLYPAVEALMSMRGVKMIVAITVVSELGDLSRFENPKQLMSFLGLIPSEYSSGPRQKRGGITKTGNGHVRRILIEAAWCYRYPAKVSREMQLRQEKLPLVIRDIAWRAQLRLTQRYKHMQSKGKPHNVTVVALARELAGFMWAIVNEVKYPR

SEQ ID NO: 243139 - protein, 432 aa, unidentified
MSEGSQEELMSQNQPEIQYAAFLAIDWADQKHVWSLQDANSGTCERGEVDHMPETVEAWVAQMSQRFAGRPIAVAVEQSRGALVFLLSKYEQLHIFPVPPAMTANLRKAFYSSGAKSDPTDADLLLDLVQRHREKLRRLSPDTEATRLIQNLVEERRRLVDEKTAQSNRLEAHLKIYFPQIPRWFGDLGSPLVCALLERWPTLEALQKARPDTLRSFFRKHHSRKEELIESRIKAIGEAMPALKDRAVVEAKVAVVKVSVQLIQDLHEGIEGLNRQIQEAAEAHPDFFIFDSLPGAGAVMAPRLLAAFGSQRERYQNATEMQTFSGIAPVTESSGKSSWVHFRFACSKFLRQSFHEWAALSIPQSKWARAYYELQCRRGKKHHAAVRALAFKWIRIIYRCWKERVAYDENVYLAALAKHNSPLVTATRAEAL

SEQ ID NO: 243140 - protein, 364 aa, unidentified
MRMLCAKKVIVMETHGITFEQVVSRGCGLDVHKETVVATIKGEGIRETTRTFQTFTSSLKDLQDWLKSAEVTHVAMESTGVYWKPVYSILEESFEILLVNARHIKNVPGHKTDKKDSAWIAKLLLSGLLKGSFIPPVEIRELRELFRYRRKLTQQRSRECNRMHKVLEECNIKLSSVVSDIQGANAGKIINSLIDGIEDWQVLSTFHHGNMKASKSDIREALTGKITEHHRFMLKQIREGMRSMERFIGEVDQRIEEKSAFCKQQIELLMTIPGINKLTAEGIVAEIGTDMDAFPNQHHLASWGGVSPGNNESAGKKKAPAQLRVTSISGLPWQRPPGRPHAQKTPICAANTIASFYEKGKNKP

SEQ ID NO: 243141 - protein, 365 aa, unidentified
MIVIGADPHKLTHTAAAVECATGELRSSETVAARDSGHAALLDWGRALGSERVWAIEDCRHVSGGLERFLVERGERVVRVPPKLMAGARRGARERGKSDPIDAVAVARAALREGIETLPAAFLDEAALAIKLLLDHREDLVAESTRAQNRLRWHLHDIDPELAPPQRSLRSQQVLRSLGARLARRQQTVRVRLARELVRRCAALRRELRELERELQARVREQAPALLELPGCGTLTAAKLIAEIAGAGRFASDGKLARHAGIAPLAASSGARHRHRLDRRGNRQLNCAFHRIAVTQARIHPPARAFLERKRSEGKSNREALRSLKRHLVRRVHRLLAPPASGSSQPISPSPTTATTAPAVMPCLT

SEQ ID NO: 243142 - protein, 345 aa, unidentified
MQSMYYIGLDVHKKKISYCVKDGSGNVHAEGAIPATRADLDRWMKTLPQPWTAAMEATIFSGWIYDHLKPHATALKVAHPLMLRAIAAAKKKNDRIDANKITDCLRCDFLPECYMASTEIRERRRTLRYRNLLVHQAVQLKNKISGLLMEAGVSYNKQKLHKVGYFKELLATNPNINEGLRPLLRLCRETLVRLQKTESALIRSLQRDSLLAERVERLMTIPAVGPITALTWALEVGDVKRFSSIKKAISYCGLCGAEKSSADTIKRTPISKQRNKHLQSVLVEAAKMAPRLSPELALIYDREKQKGNANRATLAVARKLVAYLVAIDRSQRDFLVVEKENCAAA

SEQ ID NO: 243143 - protein, 412 aa, unidentified
MNNPQDYLFVGVDTHKVQHTAVVINCFHQKIGFAQISNNTADFDSFLSKLKSLIHNDEKLVFGLEDTQGLGHSLAQWLIKKDYTVKEVNPVQTKRERKQSTSPDKSDKVDAEAIANVLLAEYDKLPTIKNDANFKAIRQLNNQRKNLVKEQTRVKNRLHNLIHQQYPEYKKFFSDPFGKTALAFWNKYPHPNELKHIGEKRLNNFLKKQAKSISNDKASHILSLVDKDKPQDISTETRKSLIPMLIKQLKLIRQNLEEINHLLKKSVEDSQYKLTTMPGIDFKLAALFISNIKNIDRFDSADQLARYAGLAPVEYSSGKSQKSTSKKYGCRDLNHAFYILALQQIGKYKNGSIKNPVAYNYYQKKLKEGKSNKTALTCLQRRLVDIIYAMMRDRSDYELPEIPSYEILNRAV

SEQ ID NO: 243144 - protein, 355 aa, unidentified
MKKRDKYMGMDVHQETTVVSVLDAEGKVIMETTVATEAASMIRLMQSISGPLHVTFEETTQAAWLYEVVRSYVTEVIVCDPRRNKLLSDGSKADKVDARKLAELLRAGLLRSVYHGHEAATRKLKELVRAHENLSQDVQRTMVRIKAVYRSRGIANRGREVYQRAQREQWLAKLTEPGARQRMGWLYEELDQLGSLRRRAKHAVLMESREHRAVALLRTIPQLGPLRSALIVATVDTPHRFRTKRQLWSYSGFAVVTHMSSEYEIKEGRVVRSRKPIATRGLNPNCNHRMKEVFMGAATGGVHREPYRTYLEKLQQRGMRAEMARLTLARKIAAIALRIWKKGETFDPKKLNWTT

SEQ ID NO: 243145 - protein, 420 aa, unidentified
MRRAKTQKLRSIPDKSLVVGVDIGMNNNSCFFTTTRDSKGKPFKFGNDRTGFDMFWSKVIAIKKDYDCTGVVIGFESTGPYGEPFIHYLLGKPVHLVQVNPMHTKRTKEICDNSPLKSDDKDPKVIADLIKIGNSLSLIVPEGEAAELRRLNNARESHVKSRTALANQLRQLMFGIFPEMRLVMKNMTCKTGMHIIRKYPTPEDIRTMTPEHLGMELKKISRGAFGIKEARTLIEYAMTSVGIKEGRDGLLMNVRQILSLIEQLNGFIGELEIKMEESLKKIPESSNLLSIKGLGVITAAGLLGEIACFRHFDKQSSIIKLAGLNLYELSSGQKKGIHRISKRGRSTLRKILFYAALNVSRKGGILHSYYKRLVEVNKMKKKKALIAVSRKLLRIIFALARDNSRFVENYHKIKVVRKAA

SEQ ID NO: 243146 - protein, 364 aa, unidentified
MERVQYVGLDVHKKAIEVSVLNGENAAPEIEKALPNQETRIKVFFERLKMQGSVIACYEAGCVGFELQRILESIEIPCIIAAPGLLPRRPGERVKTDRRDARKLARNLRNGEVTPIHIPTREDEAVRDYLRMQGDFKVERKKTKQRLLHFLLRHNLIYTDGNHWTGKHEKWLRALEFDNPVLKETFDEYFFHLKELEEKIGRMKEKIEEIALRDSYREPVSKLKCLKGIETLTALSMVVEVGDFRRFMKAEEFMAFLGLVPSENSSGDKRKQGGITKAGNSHLRRLLVEASWHYRFDRGVGKCLVARRKGQPVCVVSYANKAGKRLSRKFNRLIFRNKKSQVAVTAVARELAGFVWGMMVGQTA

SEQ ID NO: 243147 - protein, 352 aa, unidentified
MPKRTRVVIGGVDTHGRAHHAAVIDQQGRLLGDREFPADRAGYRQLLGWLRRHGNPDTVGVEGTGSYGAGLTRYLLDQHVAVVEVDRPDRRTRRQRGKSDPIDAEAAARAVLAGTASAPAKRRDGVVEAIRALRAVRSGAIKARTAAINQLKGLLVSAPAPLREDLDQLSVAALVATCARLRPDEAALADPVQASKAALRAVAWRIHQLEEEIGLADQRLAKLVGRAAPRLLQLHAIGVDHAGQLLTTAGDNPERLRGEAAFAHLCGTAPVPASSGKTHRHRLHRGGDRDANRALHLAVVVRMRWCPRTRAYAERRTRDGLSKPEIMRCVKRYLVREVYHALVADFEALNAT

SEQ ID NO: 243148 - protein, 342 aa, unidentified
MQISTIGIDIGKNSFHFVGFDARGGIVARRQCSRTQLIRALANLPPCLVGMEACCGAHHLGRILVAQGHDVRLIPPQYVKPFVKSHKNDLLDAEAIGEAVQRPTMRFVPLKTMEQLDLQAIHRLRTRLVGRRTAVINQMRGFLLERGVTCPIGREALVKRFPEVLDNPALGLSVRFCRLLQQLRDEWRLLDDDIEDVDQEILSLARDDEACDRLMQVPGIGPLTATALVAAVGNGAAFAKGRDLAAWLGLVPRQHSTGGKTVLRGISKRGNAYLRSLFIHGARAVCRHHRQKPHRLGRWLTSLEARAHPNVVVVALANKLVRTAWAVLQRNTHYDGRLLANG

SEQ ID NO: 243149 - protein, 310 aa, unidentified
MKDTIGIDISKATLDAHRLIDDEARQFANSPAGLRALRRWIGTKMPDLVIYESTGAYHAAIERSFGGVLPLVKVNPLQARRFAQARGTRAKTDAVDARVLAMMGAALDLVPDAPTDKNQPALKELQIARMALIKERTRLLNRSKTQTLAILKRQSKARLAQVKRQLGELEDALLDLARQCPKRARAFDILCSIPGLGRVTAVAILVECPEIGTMTRKQITSLAGLAPMTRQSGQWRGKAFIQGGRKFLRDALYMPALVAARYNPDLRQKYQAMISDGKPAKVALTALMRKLIELANALVRQDREWTPKTA

SEQ ID NO: 243150 - protein, 357 aa, unidentified
MLIIGCDYHPGFQQIAYVDTETGELQERALQHREEAEKFYRELAAQGMKVRIGMEASGHARWFERLLAELNFEVWIGDAAEIHRKRERQQKTDRQDAQHILRLLLKDDFPRIWVPSWENRDLRQLLWHRHRMVQARTRMMNQLQAVALNEGLRYKKRLWREAGRKQLEAFRLAPWASRRRQDLLELLDRLNPAIAELSQAIEREVEKCPAAQRLMTHPGVGPLTALAFVLIIGRADRFGCGKQIASYLGLVPLEDSSGSRRRLGHITKQGNSLLRFLLVEAAQVTVRSDPQWRSRYHHVMMRRGRKIAKVAMARRLAVRMYWMMRKEWNYEQVKKFGSQGRKLCSHTVVTKGSGSTR

SEQ ID NO: 243151 - protein, 427 aa, unidentified
MAGVVTARVNRGKKVMTEESFTWFAGVDWGSEKHHACIIDTRGTVVGERQFPHSGVGLAELGDWLLSIAGTTATVAVAIEVPHGPVVDSLIDRGFVVYAINPKQLDRLRDRFSVAGAKDDRRDAYVLGDGIRTDRRLFRRLHVADPRIVELRAWSRLTEELQEERVRLGNRVQQQLWRYYPQMQKITNDLAAPWFLALWAMAPTPGKARQLRRSTVEQILKKHRIRRIDADTVLRMLREPAIKVAEGIAEAASIHLRSLIARLHVVNRELRQAEQKLDQLCAGIGETEGAPGECLQGQDIKILKSVPGIGRINLATLVCEASGPLRSRDYPALRTLCGAAPVTKRSGKSQIVVMRYAAHARLRETVYHWARTATQHDAKSRCRYAALRQRGHSHGRALRGVADRLLGLTCVLLQRQTMFDPHFGQAG

SEQ ID NO: 243152 - protein, 315 aa, unidentified
MTSTQVFVGVDISKAQLDLALRPEGQFSVPNNEAGFAQVLEHLNAVHPTLVVLEATGGLELPLTGVLAAAGVPVVVVNPRQVRDFAKATGRLAKTDALDAQMLAHFAEVMRPEPRPLPDEQTQALAAILARRRPLVEMLPAEKNRLGTAGKPVRKSLRTHIAWLERELSHTDRGLAQTIRESPVWRETEALVRSTPGVGPVVTTTLLATLPELGTLTGKQIAALVGGAPLNRDSGTWRGKRTVWGGRAQIRAVLYMAALVAARCNPVIRACYQRLRAAGKAKKVVLTACMRKLLIVLNAMLKHRTPWRAELVQCA

SEQ ID NO: 243153 - protein, 314 aa, unidentified
MSSLVFVGIDVSQACLDIAIRPGASFSLPHEESAIATLVEQLCALGPTLIVLEATGGMEILLTSALATAGLPVVVVNPRQVRDFAKASGHLAKTDALDAQVLAQFAEVMRPQPRPLPDAEARALAALLTRRRQLVEMLTAEQNRLLSAPSPIRTRLRTHIRWLERELQSTNTALAEAIRQSPVWREKDELLQSVPGVGPVVTSTLLASLPELGTLTHKQIAALVGVAPLNRDSGTLRGRRTVWGGRAQVRAVLYMGAIVAARFNPVIRVFYQRLQRAGKAKKVALTACMRKLLTILNAMLKHRTPWREVEAHHA

SEQ ID NO: 243154 - protein, 351 aa, unidentified
MIIVGVDYHPSVQQVVFLDMETGETGERRLNHSDGEAERFYRDLQRRQVKVRVGIEATGHARWFERLLAELKFELWIGDPARIKAARVRKQKTDRQDAQLLLRLLIEDRFPQIWVPSPENRDLRQLIWHRHRLVQMRTRAMNQIQAVAMNEGVRRKKTLWSKTGRKQLEALPLAPWATRRRQDLLELVDRWNTTIVELTAAAEQEARKRPEVLRLMTHPGVGPITALAFVLVLGSPDRFGCGHQIGSYLGLIPREDSSADRQRLGHITKQGSSLLRFLLVEAAQAAVRWDPDWRRRFVHLAMRRDRRIAKVAMARKLAVSLYWMWRKGFDYQQTLQFGSHAGEPGFVHGVK

SEQ ID NO: 243155 - protein, 367 aa, unidentified
MLYLGIDQHRKQLTVNLRNEQGDIVLRRQVSTEWKRVRGFFEGLRREAEPEGGFVVILEVCGFNHWLVSMLEEYGCRETVLIQPEKRSKKKTDRRDANALCETLWINRQRLLDRKTVYGLRRVMPPTQEDAENRELTALRRRMGQLRTRTINKIQHILLKHNLQQECPTKGLQTKKARHWLKELSLDEMDRFEMDLLLSQWELWELQFEAIEKQIKVRQQSDETAAIVASVPGAGAYGSLALSSRIGSIDRFARPGSLANYWGITPGCRNSGDAKDRLGSITKQGSAMARFILGQMVLHVLRKDPYMRAWYGRIKKRRGSKIARVAVMRRLACILWHMVKYQQPYVRGGPPQVKQAREIDRALAQLV

SEQ ID NO: 243156 - protein, 407 aa, unidentified
MYYLGIDISKKSFTVSILDEEGEAITKSLTYPCTRKGFEKLVDKISSLKLKKSEVMIGIEATGNLWENLYSFLEGYKVIVLNPYQTRKYHQVLSKKAKTDKVDSLVIAGLLRSKEALASYVPEEEVQVLRELVRLRHHLQKDKKNYLRKAYTLLNLVFPEYTNLIKNPFRKVSSMILKKYPTAVDMARARRTDLVKMARKIQGNNYSSELAEKLIQVAKESIYSGKASEVRGMALRILIDEIESLKNKIKEIEDKIEEILSSNQPSSPQKRLLGIPGVGPKTIAAFLGEVGNDVTRFSSANKLIGFIGWHPRISESGESKNLHPKMSKKGPSALRASLYMAAVASLKHNPYLRSLYHRKISEGKESKQALICVGKKIISIIYSMLKYEADYDPQRIFFQFDKEQVLI

SEQ ID NO: 243157 - protein, 416 aa, unidentified
MEVVHRRCCGLDVHKKSVVACVLLSDPSGPPQREVRTFGTFTHEVLALADWLAEQQVTHIALESTGVYWKPIWNLLEDRFALLLVNPRHIKAVPGRKTDVHDAEWLAELLRHGLLTPSFVPDRAQRELRELTRYRTSLINERSAAVNRLQKTLEGANIKLASVASDVLGVSSRQMLAAVVEGTTLEASALAELAHGQLRDKVPQLEQALSGRVGPHQRFLLAEQLAHIDALDASLERLSTEIAERMRPFDELIERLDAIPGVGRTIAEVLLAEIGADMTRFPTANHLVSWAGMCPGHNESAGKKRSGKTRKGSPWLRAALVQAAHAAARAKQTYLAAQYRRLTARRGTKKAAVAVGHSILVIVYHLLTDPDCPYVDLGATYFDQRDPGAVQRRLIHRLEALGYHVQVTPLAESSAA

SEQ ID NO: 243158 - protein, 411 aa, unidentified
METVVRRCAGLDVHKLTIVAAVRIITDDGEVVVHTETFGTTSPDILRLNDWLASYQIRVVGMESTGVFWKPVYALLETEFECWLLNAAHLRNVPGRKTDVADAAWIAQLVAHGLVRPSFVPPREIRELRELTRYRKAVIQERSREAQRLHKVLQDTGLKLDNVATDVLGKSGRAILTALIEGTHDPNVLADLARGRLRKKIPALREALVGWFSPTHRVLITEILAHLDFLDQSIERLSADIATMLAPFASAIDLLDTIPGVNRRTAEVILAECGADMSRFGSAQRLASWAGICPGNNESAGKHFSGKTRRGSKWLRTALVESAEAMSRTKGNYLSAQYARIKGRHGHNKAIIAVAHSILIIAYHILDRQEPYRELGGDYFIQRQAKEAYQRKLVKQLERMGYEVSLTDRAA

SEQ ID NO: 243159 - protein, 430 aa, unidentified
MGLIVPTTIHPEREDQPLPYEWFVGIDWGSQQHQVCILDRDRRLVGERTVDHDGASLAQRAAWLWTVSAGHPQRVAVALEVPRGAIVEGLVERGFHVFAINPKQLDRFRDRHSVAGAKDDRRDAFVLADSVRTDRPSFRRLQLDAPHLLLLRELSRVEETLLEEFRRSANRLREQLHRFYPQMLQLCSAADEPWLWDLLHLAPTPAHAMLLSEEQVQRVLKAHRLRRLKAPAVLACLQAPALPVAPGTAEAAQAHCGFLLPCLRVLAEQLQACGQQVSALLSTLAEASGEGESPSDVAIVLSLPGVGRKITAWLFAEAAQPLAERDYQVLRTHGGVAPVTKQSGKRRQVVMRHGCNPRLRHALYHMARVAMQRDAHFSSVYAALRAKGQRHGQALRNIGDRLLRILMAMLRHRTCYDASRIRCEPVVQMG

SEQ ID NO: 243160 - protein, 355 aa, unidentified
MSQEKYIGMDVHQATISVAVMDAAGKLIMECLLETKAATIVEFLQGLHGTLSLTFEEGTAAAWLHDLLKPHVSRLVVCDPRKAALLKAGNKSDRIDARKLAEMLRTNQLHSVYHGEHGMRTLKELGRSYLTVTKDVTRVMNRIKALYRSWAIPCSGTAVYASRHRTEWLAKIVEPGVRVRAVHLYQQLDSLQPLRLEARRELLQESQKHAAVKRLRQIPSIGPIRAALLVALLQTPHRFRTKRQLWAYSGFAVETHDSGEYRYVRGKPQRNRERITVRGLNDNYNKDLKNLFKGAAISASTRPGPLHDFYVALVAKGMRSTMARLTLARKIAAISLTIWKKGVSFDPKQLQQQAV

SEQ ID NO: 243161 - protein, 371 aa, unidentified
MNSILYVGLDVHTKNYTICTYEPEIDRISRQVQVEPDSKLIKKYVDNLKKEKGKDRKVICGYEAGCLGYNLYRQLTEMGIDCVILAPTTMERPVSYPFKNDKRDAISIARCLATHGYRAVYVPTPEDESVKEYIRMRDDHADDLKRTKQQILALCIRHGKQFTEGKNYWTQKHLTWLRSVKFGNMQLDETLSEYLATYFWLDEKLRRLDRRIEEIAMQEEYAERVRKLRCFLGIKTHTALSLLAEVGDFRRFPNADRFAAYLGLVPGENSSSDKHRQLGITKAGNKHLRRLLTEAAQCYNRGAVGYKSKVLCERQKGNPQEVILYADKANERLRRKYYRMTFSGKKHNVTITAIARELSCFIWGMMTDRIG

SEQ ID NO: 243162 - protein, 324 aa, unidentified
MIDGILGIDVSKNTLDASMSSCNKVRAKSFANSPDGWRHLLDWLIGQKIRRVHACLESTGLYSLGIACKLNEAGHVVSIVNPAQIRDFARTKLGRNKTDAVDASHIREYCELFKPPPWSPPSHAHRQLGELQTIRAGIVAGLTEWKNRKNSGMIDVVAQSLADATISHFTSQLGAVEKAIAQAIDNDTDLRRKRDLLLSIRGVGETLASVVLAELPGPDVLRSSAEAVAYTGLNPRRHQSGTSIDRLTRISKIGNAVLRAALYMPAMSAMRYNPAIVALVTRLKARGRLNPKQIVVAAMRKLLVLCFGVLKTGKPFDPALAMGC

SEQ ID NO: 243163 - protein, 340 aa, unidentified
MDSFDIFIGIDIAKKDFAVNVYRPGKEPVKAPCKYLNSQDGVGKLLDWIQSRFNGKAVFCMEDTGSYSEIVSKTLGDQGHCVWVEHPQRIKASFGSDLGKDDELDARRIAEYAWRYRDRFRQYEPPSAESEEIRALLSVRQVVVRERVAHINELKDMKSRAFAPQKAIMHLESMIALLEAKEREIRAEIKELLPKEGEAGQACACVMSIPGVGLLMTASLAVYTNGFQKVPEGRKLAAYMGICPRTFTSGTSVRRKPRSVGYGPDALRTLFFMACCVIKRRPGFLRSYALRKEAEGKPKMLVINAMRNKLAHLICALIRTKTQFTENYRSIEPRIAMNLS

SEQ ID NO: 243164 - protein, 372 aa, unidentified
MTNIVVGVDAHTDSHDAAVLDDCGRLLATRTFRADAGGYHDLLGWVQRFGAIASVGVESTGSYAAGLVRHLRAQGLEVLEVNQPHAHSRRRRGKSDPIDAEMAARHVLAASSVVIAKDTTGIVEAIRQLRVARDGAVKARSAALNALTGLIVTAPEQLRQQLLVRKTTRGRATLCARFRPDQARLHEPVHAAKTALQSLARRVIDLDAEITALDRQLTPLVTKAAPATTARLAVSTGHAGALLVTAGQNVDRLRSEASFAALCGASPLPVSTGRTDRHRLNYGGDRDANRALHMIAVCRLRHCERSRAYAERRTTQGKTKTEIIRCLKRYIAREIYHALVTDLLPPTSRRRPAPTVSITCGAGTIGRTVKTT

SEQ ID NO: 243165 - protein, 344 aa, unidentified
MNEEYVGQQFVGIDLHRHRSVLVRMTESGERLGGVRINNDPYAFALVMAEAGVHPEVVLEATYGWYWAADLLAELGAEVHLAHPLGVKGFAYRRVKNDFRDAADLADLLRMGRLPESWIAPPAVRELRELVRHRAKLVHLCTSLRCQVHAVLAGQGITVPVSDLFGVKGSKLLRQVQLPAACRYRVDSLLQLIAAFDREITQTAQLTSDRLRDDPGYAAVRTIPGVGPILGAVFVAEIGDVHRFARPEQLTSWAGLTPKHYESDKTVHRGRITKQGSRLVRWAAVEAVQHAPAGTPMKQVRDRIVARRGKDARHIATVAAARELVEMVFYALRDHHVRRLAAAA

SEQ ID NO: 243166 - protein, 389 aa, unidentified
MSEPQAISGGSVLPLPTVCWSGRPPRHRLCQSKVVEDLRSWRPSVEQISRIGMDTSKHVFQLHGVNAAEAPVLRKKLRRKDMIAFFEKLAPTAIAIEACGASHQLARLLQSFGHSVKLIAPQLVKPYVKRGKNDAADAEALCEAMSRPTMRFVPVKTDEQQAALMLVSVRDRLIRNRTQLTNAIRGYAAEFGLIAAKGMAHVIPLLERIQTDESLPVLAREMFAIQAKEYTQIQAQIDEADAKLKAWLKADERGKRLAKIPGVGPIGAALLTMKTPAPEMFQSGRQFAAWIGLTPKDHSTAGKVRLGVITRAGDEKLRSVLVAGATSVIQQGQRNGRMLPWLAELLKRKSRKLAAVALANKIARIAWKLMSSGETYIAKSALNTLAGAV

SEQ ID NO: 243167 - protein, 428 aa, unidentified
MNSIESSRLKQFRQLRKEIRGSKDHLIVGIDVAKDNHKGFFGTARGKTLLKRLVFENTLEGFERLLIQQDALKAQHGLKKTIFGLEPTANYHKPLGEFLIKGSYEVVLVSGVAVKRNRELLDGRWDKHDTKDSANVADLISQGKCLFYDYPSLQLRELRSLVSLKRRLKKQEHGIKTRIRNHLLAHYFPELDRYYGQSESDALSIVRWCVNPSVIAGMDYGQFTQLVAPRTRGIAQQKRLTAIWEKAVHSIGCEAGEALEFEATVMVEELHRIRESIHATEEKIEEICLQFPEYRYLLTIPGFGPDVSSKLLSAIGNPFRFTTGAQVLKMAGFDLSANRSGKTTDSATPVLSKKGKAYLRYALYQAALIASIRNKHFIAYYTHTLQGREKEKGIKTKMRVKLAAKLLIIAWTLMKKKEPFNPEYLTTE

SEQ ID NO: 243168 - protein, 269 aa, unidentified
MEEHTTIAVDLSKSVFEVAVSRESGRVCERRRLSRSQLRRFFSQRPPATVLLEACGSSHYWARQIESLGHRVLLLPPHHTRRYVLRDKTDRADATALLEAHRNEQIAPVPVKTLHQQTFAALHRLRSGWLATRTARLNAIRGLLREMGITIPVGPRHVRPGLTAALSDSSRLVPEALHQTLLSAAEEIRELEERIRDVERQLESIAGSLPAVKNLRTVPGIGLLTSTALVAFVGDPARFRSGRRFASYLGLVPRERSSGLPPNAKNSNR

SEQ ID NO: 243169 - protein, 309 aa, unidentified
MKQSVVYIGVDVAKANLDVAWAAASRRFPNDRNGHAALVLWIKQSAAPVQLICEASGGYEQALLESLEQNNLAVTLVQAIRVRQYARAAGILAKTDTIDAKVLAAFGAAMQPKPTPPFSAEQKRLRQYEAQRRHLGKVLLAEQNRLAQVSCAELRSLSRSLISKIKKQIDTLDTGIANLIAQDQVLCVKAQKLTAISGVGARTAALLLAQMPELGQLNRGEAAALAGLAPFNHDSGSIRGKRAIFGGRRALRSGLYMAALSAARYNPILSSFYQRLRAKGKPHKLALTAVMRKLLLALNSSLKPEPILA

SEQ ID NO: 243170 - protein, 429 aa, unidentified
MKIIYPRVCGIDVHKKFIVAVICISESVEPVYLKKRFSTFHNDLIRFREWLIQNDCQNVCMESTGKYYIPVYNILESHISNIVVANPKWVCAVKGEKDDDKDAKWIADLFKFGIVRSSFIPQKDFRILRELTRYKYKLVNMRSSEKNRYQNALTSGNCKLDMVFTDVFGKSASNIIDLILSDNPYTDEDILSKVHKNCKASPDMILNSINGTDLTPVQKSRIELVNNHIKQLSSNIQRLDKLIDLMIEPYEDYISFLCQIPGVSRNSAITILSEIGVDMNQFTSTRRLTSWAGLTPSSNQSAGKKKSVRISRAGVYLKPCLVEVAHAAVKDKNHSYYANKFNKISKRRGKKRAYIAIARKILVAAYHMLLTGEIWNPADLAEVETPVEQRIKYVKNNLKSDIKQLLDIGLTVEELTLMIQQNANTMTAQ

SEQ ID NO: 243171 - protein, 400 aa, unidentified
MKQAPPTVSGKLTASALSDMRLKGGAMNVIYIGVDFHARQQTICYLKTETGELVTCELKHQDKEQVRAFYQQFQGHVIIGLEASGYSPWFEAIIEQLGCEVWLGHATEIRRRARWRQKNDRRDAELILDLMLHDEFPRLHRPAVQSREVLRMLRYRQKLMKIRTMSKNSLQALALQAGLARGSRLFTKAGQQELSTAEMSPVMQWQREHWLQLLEPLNQQLLETMMWCKAQSRDDVCITRLRTHPGIGLLTSLCLVHTLQPIGRFRNTRKVAAYGGFDPVERSSAERKCFLGISKAGSRLLRYLLVEAAQTAVRKDEELKRFYKRLAERRGRPKAKVAVARKLLIRAYIMLRDEIDYAEFRRRAVAARLARRGQRPEVPEVLIGQPASAERQELVHGSEK

SEQ ID NO: 243172 - protein, 405 aa, unidentified
MFEIEDVGVFLGLDVGKSAHHGHGLTPGGKKVFDKPLPNSEPRLRAVFDKLTAKFGTVLVIVDQPASIGALPLTVARDAGCQVAYLPGLAMRRIADLYPGEAKTDAKDAAVIADAARTMPHTLRSLELTDDITAELTVLTGFDQDLAAEATRTSNRIRGLLTQFHPSLEHVLGPRLDHQAVTWLLERYGSPAALRKAGRRRLVELIRPKAPRMATRLIDEVFDALDEQTVVVPGTGTLDIVIPSLAGQLAAVHTQRRAMEAQINSLLAAHPLSKVLTSMPGVGVRTAAVLLVTVGDGTSFPTAAHLASYAGLAPTTKQSGTSIHGEHAPRGGNRQLKRAMFLSAFACMNADPASRTYYDKQRARGKTPTEALPHLARQRISVLFAMLRDGTFYESRTPGNVELAA

SEQ ID NO: 243173 - protein, 422 aa, unidentified
MDAVIGVDAHKRSHTLVAVNPLGRKLAQLTVATTSEGHGEALRWARVRFGRDVVWGVEDCRNLTARLERDLLAGGQKVIRVPPHLMSRSRASSRELGKSDPIDALAVARAVLREPDLPVACHDASSMELRLLVDRREDLVQHRVALISRMLDRIHQLDPAWAEPRNWESKKPREELGAWLATQHGLLAELARDELTEIVGLIDTAHALERRIAGRVREAAPALLDIQGCGDLTAAKIVAEVAGIDRFKSEAAFARHSGVAPIPHWSGETTRPLRPIRHGNRQLNAALHRIAMVQITHPGPGRDYFQRRIDEGDSRQRALRSLKRRLSRVVYTRMKADSRNCGRGGRFPILPRVMMLPLADLTSATQPPPDSARVGRPRALDSYQAALACRMRSYGEKPASIAAQLGVSISTVKRALAGAAAG

SEQ ID NO: 243174 - protein, 363 aa, unidentified
MKQEMNVLGIDIAKRVFHAIGMDNTGKIVFRKRFSRHDLMPFLAKLPPVLIGMEACGGAHYWARRFREHGHEVKLMAPQCVKPYVKSNKNDSRDAEAIAEAVTRPTMRFVPTKDVAQQDIQALHRVRERLIGERTALVHAVHGLLHEYGMVMPKGVAKFRQAVVGKLEAEKDKLTPLSQEMFWQLGDECAALEEQLAYDQEKLDTLAQTHPECQRLMTIPGIGPFTATALVAAVSDASACKNGRQCAAWLGLVPRQHTTGGKERLLGISKRGDTYLRKLLVHGARATIRWVGRKTDRRSQWMRQLLERRGHNRTAVAVANKHARIVWALLTHHQDYQPATSSGEQTCVGVTSNRSLTRIGAAL

SEQ ID NO: 243175 - protein, 402 aa, unidentified
MHIFMMERPAPQAACSWVVHDVVNGATYGEEPAVSSVSHRGFTHLGMDVSKDSISVAVLEPDRDQASVDKIFHDEVSVRRLIGRFDDRSKLWVCYEAGPTGYDLYRLLCSLGVRCDVVAPSLVPKRRGDRVKTDRRDARRLAGLHRAGELTPIGVPSPPQEAVRDLCRTRGDMVEDLTRARNRLTKFLLRHARVWRDGSNWTFKHQRWLAAQHFDDRALAATFAHYRATLALRETSLEAVEADLVGYQDRPPFGDQVPRLGAYRGVTRMGALCLAAEVFDWRRFPQARGFMSFTGLVPSENSTGLSEHRGKITRAGNRHLRAQLVEAAWSYQHRPHVGAGIKARQQGLAPEVTARAWNAQLRLSSRFRQLGTRKNIRSVVAAAVARELAGFLWAEMTTDLAA

SEQ ID NO: 243176 - protein, 336 aa, unidentified
MKIKKIRFYIGLDVHKAFTVYVVRDINGSIVIEGRSASIGKDLYEILEPYLFSCAIGLETNTEIYPIYNYFKERSIDIRAGNTVQLRTLIGKNDHLDAKRISDMLRLNTFPCAFIPEGKIKDLRGLVKTRHNTMKEVKRFKSQIQALTRKYGLIMPTGETFTKKWCDALQEHITLNNGGIVLKHLYDMYEFINNKLEQLTAQMNIFAKTNFPEEYGAIIAQRGIGEGLTPYLISEICPISRFKSEKSLRRYAGVIPVNNETGDKVYSTYLPKESSRALLRYALVDAANCVRIHDENFKLYYKKKKKQKKLHQKAIMAVARSVSDKIYKTLKECQAS

SEQ ID NO: 243177 - protein, 384 aa, unidentified
MSKDNIVFIGLDTHKVSTEVAHIEDQRGAKTVHQGKIKTTKAAITKLARQYQSKYPNATLHFVYEAGPCGYWIYRLLTSLGHCCYVVAPSLIPKKPGDKIKTDKRDAMKLAKLLKDEELTPIYVPEPEDEAIRDLSRARETAMKDLKDAKFQLKGLFLRNNITCKVNDNWSNQHLRWLTELILPHPSQQIVLQEMIQTITERIKRVERLVNELAHQAKLWRYYPVVQALQAMRGIRFLVAVGTIAELGDLRRFDHPRKLMAYLGLVPKENSSGDNRKQGGITKCGNGRARRLLIEGAQTYKHNANVSTELQKRQEALPKVVIDVAWKAQLRLCRRYKRLIQRGKHRNIVVAAIAREMLAYIWAISREVILVPVDPSTRISRVPA

SEQ ID NO: 243178 - protein, 346 aa, unidentified
MKQVSTIGLDLAKHVFQVHGADAGGSPVFNRKLRRSEVLRFFEKLPPCLVGMEACGSAHYWAREIAALGHEVRLIPPAYVKPFVKRGKTDAADAEAISEAVIRKTMRFVPIKTAEQQAAAMVLKTRALLVRQRTQAVNALRAHLAELGIIATAGLAKIEALVAIVRDETDARLPAAARFALRAIADEIEASADQIERLERAIVVETKHDEDMRRLTTIPGVGAITAATIKALVPDPGGFKSARHFAAWLGLTPRPHSSGGKERLGGISKMGNPELRSLLVVGATAVLRVVRNDARARPWLKALLARRPFKVAAVAQANKTARIIWALLNKGGTYRRPDPLTAAAAV

SEQ ID NO: 243179 - protein, 401 aa, unidentified
MTYYLGIDIGKYHHQAILCTQEGKPLGDSLKFQTTAEGFTGLFFYLKKHVGNGDSGTIHAGLEATGAYWLTIYERLLKEGIKVSVLNPLQVKAYRNEGIRGTKNDRIDALLIVKVLRFAEYKESDIPKEDLFALRQLTRLRSDLVGIGTKVKLKIISIFDQVFPEYKDLFSDMFGTSSQALLQQAVVPDTIAIIPTKKLTRLLKQASRGRLGATEAKKIKEVAQNSIGITMGIDAFSLSLKILLAQVNHIEKQITRLDKEIAQRVKPRKETLTSIPGIGLTQEAVILAEIGNFERFRNDKDGAEKLVAIAGIDPKIKQSGKYIGKAKMSKRGSSYLRKTIRQVAFVAAVGNGKDPMFAKLYEKKISEGKPFEIALSHVENKMLHVIYSLLKSKKKYKPKIE

SEQ ID NO: 243180 - protein, 360 aa, unidentified
MNRSSTQHVIGIDLGNAKHAICVTERASGEIIDERNITNHRESLRRLSKKYPGAQMVMEVGSHSPWTSRFFEGHGHEVLVANPRKMRAIFENDRKCDLYDARMLAKIARFDPDLLHAIEHESEEAQRDLLQIKLRDSLVRRRVDLVSSVRGTLKSLGIALKSPNTHYFARYARRALAEEHEATLALIEPVLAALDAVSEQIKQLDKDIEQLAASRYPETARLMEITGVGVLTSLSFVLVVGDPERFLRPRDIGAYLGLVPKRDQSGDLDKELRISCKGDDYLRRMLVGSAQYIIGPFGPECDLRRKGLALAARGGKRAKKKAVIAIARKLAVMMLVLLKTGASYEKDRNNKDETSPAEAA

SEQ ID NO: 243181 - protein, 382 aa, unidentified
MRHGGILLEANDSEGESMKKNTTTNQYVPTDVLKCTVIAVDLAKRVFQVAGQDAAGLTVYEERINSRESFHAFLRKLPTSITVLVETGPGAQAWAQLLKTQGNPVRILPAQHVANHRSGPKNDRNDALAILRAGRDTSISSVPVKSAAALAMQALHRVRQGYVRRRTAMSNQMRGLLLEHGLAMAQGDSAFSQGIPRILEDATQPLPDMLRELIDELLGEWSQLGERINVLTGRLETAAKNDETAKRLMTVRGIGPIISTAVIAKQTEPERFANARQFAAYFGLVPKQNSSGEKVRLGKMSKHGDAYLRSLAIQGAHAVLRQVKATSEDPDDRRLQRWVSRLGRKEAAVRLANRNLRIIWVLLQNDQTYRRQVGNAQEAAMS

SEQ ID NO: 243182 - protein, 348 aa, unidentified
MTYVGIDVSKATFVVAYSSAKGSRTNFFKNTIKGIHEFIQTISVAEHHCVLEATGNYSSLLVYLLSEAGIAVSLENPLKIKNFARVMLSITKTDEIDARLIAMYGEKMQPAPYKLRSDTILVLKQKRTVIRQLKKQLVATGNLKGSMEALPFFDPKCKKTIERTIIFLEKQIKELEEELASLAQSEYKKQMDLLTSVKGIGVTLAAALIMATGGFTYFDNAKQLTRYLGLSPTYQQSGTSVNVKGHINRNGDSSLRSQLYVAAFASLRCNTECKACFDRLRSKGKPGKVALIAVANKLIRQAFAIVTQEKLYEMGSSLRSHKAPAEGTPCGKGLSRQPRRASLSAIIA

SEQ ID NO: 243183 - protein, 341 aa, unidentified
MSIITVGIDLAKNVFAVHGVNDSGKPELVKPKVSRADLLPLIANLSPCLIGMEACSGAHHWARLFRKYGHTVKLMAPKFVAPYRMTGKRGKNDAADAAAICEAVTRPAMLFVPVKEEHQQIILCLHRTRQGFVEERTASYNRLRGLTAEFGIVLPQKVTCLRREIGAHLEDLPGYANLCVSDLLAHTADLDVKIAEYDRAIAQAARDDARSKRLMKLPGIGPVTASALLASMGGGHDFDNGRQVAAWIGLVPGQYSSGGKARLGRITKAGDSYLRSLLVMGARAVLNSIGDKQDRFSRWARALQERRGYWRAVIAIAAKNARLAWAVLKYGEGFKLEPGKE

SEQ ID NO: 243184 - protein, 455 aa, unidentified
MPRKRLHKKNQSVAPPIMNPDAAGIDIGATEIYVAVPADRDPEPIRMFATFTEDLNRLADWLQQCGVRTVAMESTGVYWVPLMQILEVRGLEAYLVNAKHVKNVPGRRTDVSDCQWLQYLHSVGLLRASFRPAPEVCALRSLLRHRNSLVEMATTHVQHVQKALDQMNLQIHHVISDITGTTGLAIIDAILAGNRDPQVLATLRDPRIRASKDTMAKSLVGDYRPEHLFTLRQSVDLYREYQQRIAACEEEMQRFMKGMEASATSSASLPAAKDSVRKCKVMVPAKALALREEAYRILGVDLTTIPGISVLHVQTILAELGDGISKFRSPGAFSSWMGLCPDNDISGGRVLWTGTRKVKNRVAVTLRMAAQSLQKSESALGAFYRRMRTKLGAPKAVTAAAHKLARIIYHMLKTREPYDESVFASAEIKYRQRAENRLRAMAQNLGYTIATAQAK

SEQ ID NO: 243185 - protein, 318 aa, unidentified
MNTTTNANIKQQRNVGIDVGKSFLDIHILEVDRHWQIFNSKEDIKNLLKTLRRYKLTRIVVEATGGYERRLVEALAEVELPVIVVQPMKIRQFARAEGVLAKTDKIDAQIIALFAAKMQPVVRPFSSEKVRHVRDLLARKRQITEARTQELNRIQRAEKALERSHRRMIKCLDKELEWVNAQLTKEVAQVTEWQETYELLLTVPGIGAGVAHTLLGELPELSALSSRQVAALCGLAPYNRDSGNMRGRRRIKGGRAPIRTILYMAMFSAIQCNDVMKRFYSRLVAEGKHKKVALTECMRKMMTSLNAMVRDNKAWKEA

SEQ ID NO: 243186 - protein, 383 aa, unidentified
MERKIKPKVFAIDVGESRLVATKMEINNNTVKEADTREFKYNEEGLKELIKFLEGYEEGIMEATGVYFYHVYNVLRDKGLKVNVINPVQTVEVLGKKTDKNDSIRLAIAYAAGTVKGSYIPTGEMQELREMTRHREGLVERKTQVKNEIRKVLETAGYKLPPFEKKTKEIVRKLATDEKLTDEEIKEYSKLLGRKLTRIEAFILKQLLDLLNIIEEQIKEVENEIMKFLPEEAVELTKIPGIGPISAATIYAELGDVSRFESSKQAASYAGVSPRTKQSGKTEFHNGLIKGNKHLSRVLFLVARSAKNTAQFNGFYQALLKRTSNSKKATLALANKICRIVYHVLKDGEYKGETKKTRYRGGGGEGPQVDPNQVVPSALQAIA

SEQ ID NO: 243187 - protein, 414 aa, unidentified
MDDILDCCCGLDIHKESIVACLLTGPVKSQLKPHGEIREFSTQIKDLLALRQWLKEHQCQHVAMESTGIYWQPVYAVLEASLSDEMHLLVVNARHMKNVPGKKTDMRDAEWIATLLRAGLLKASFVPERDIRDLRQFTRYRKALIRDITAQKNRIEKLLQSNGFRLSSFLSDSFGSSGLAVMNQLVQVGFLTRESLEMSLKSKARQKANEILSNLNGILSVPQRKLLHMQLVHLADLQANLRQVEEEIHDSFSQFQGPIELLDSVPGIDQTAAYTILAEIGKEMSAFPTAQHICSWAGLAPGNHKSANKQKKQRITQGDNYLKSILCEVAWVIAAQRKLYLSAWYWRLKQHTGGKRAIVALARKLLVIIYTMLKTGQMYDEQKFLERKKTSEQRKVKRMVYELGRLGYAVSLSS

SEQ ID NO: 243188 - protein, 331 aa, unidentified
MNYSHFVGLDVGKKTFDASLMSADEKELSHKSFDNTPTGIQSLLDWIAGYHLSLSKLLFCAENMGSYVTELSVSSVSMEFSLALVCPLTIKKSIGLQQGKNDRIDAKRIANYAVLHYRKLELYKLPDKDLVRLRGWIIIRDNLVKQKVSSIKLLETFSRMAKLADVTESISFLEEQLKSIKERILEVEEDMEQLIAASTSLYTNYLLLRSIKGIGIINAIVLLCVTDNFQRFDNPRKFACYCGVAPFEHTSGIYIRGKTQTSSLANKEVKVYLTRAAITAISWDPQMKAYYKRKIAEGKHKAAVINAVRAKIIARSFAVIRRQTPFVTLAV

SEQ ID NO: 243189 - protein, 443 aa, unidentified
MKIADRPKLAKTIILEGTKMNDTQNKKIAQVTDKTLVVGVDVGSDKHFARAILARGFEVSKKPFEFANTRDGFEKFVNWSYHLAIDNQLTKIFVALEPTGHYWFNLADYLKAYDVKLVLVAPQHVKHSKEMDDNTQMKNDRKDPLVIAKLVIEGRYMFPYIPEDVYAELRAAYNRRCDLAEALTRNTNRMIRWFDIYFPEYREVYGKANALTGLMVLMRAPLPSDILALGVDGICQIWREAKVKGAGINRAKKLVAAAERSIGRKGCEAVRQELWQLMEEHDLLSKQLNDMMKIIVNLLGRIPGADRLLNVPGAGVITVAGFLSEVGDVRRFTDPKQIQKLAGLAVVENSSGKRKGLPGISRRGRKRLRWVLFQLARSMVKSNKEMKAYHQYYTTRKDNPLKKMQSLMAIAGKITRIFFGMLKNGTEYDPAIVMKDFNKASAA

SEQ ID NO: 243190 - protein, 404 aa, unidentified
MSATTGRNRVTSCGCWTRKGELSSFRLPEGIEGLAQLHGRLARFATDPYQVVVGIETDRGLWVQALVASGYLVYPINPKAVARYRDRHHVGGGKSDPGDAKVLADLVRTDRHNHRLLAGDSPEAEAIKLWARTHQRLCWDREAHVNRLRAGLREYYPAALSTFPDLDQREALAVLAIAPTPAEGKRLTTPRVRAALAKAGRQRSLEIRAKEIRAGLRVSHLEAPAPIVSALASATRAEVGIISELSRQIDALGEEMEDRFREHPDAAIYLSLPGIGAVLGARMLGELGDDPTRYPEAKSRRNYAGTSPLTIASGKRRQVVSRHVCNRWLQRAALRWAFCSLTKSPGCQSFYRHRLGQGDDHFQALRALANRLVSILHGCLANRTLYDEEKAWGHRHEEPGRNAA

SEQ ID NO: 243191 - protein, 311 aa, unidentified
MDEIIIDKGCGLDVHKGAVVACVMGEGIKKEIRTFSTMTEDLFGLKSWLLDKGITHVAMESTGPYWKPVFNVLEDSFEVILANARHIKNVPGRKTDVKDSEWICKLLRSGLLAASFVPPRAIRELRDLTRYRRKLTEAISSEKNRVQKVLEDANVKISSVVSDTFGVSASRMIEAILAGNLNPEAISDLAVGKLKGKKVELKKALVGNFQEHHRFMIQASLDHIGSLEKIIAGLDQEINRKLKDYHREFELLQTIPGVKEQGAASIIAEIGADMDIFPSEGHLSSWAGMSPGNNESAGKKKVERRPTAIRI

SEQ ID NO: 243192 - protein, 351 aa, unidentified
MPIIGCDFHTRFQQIAMMDRTTGELVERRLEHATGEAERFYAALAAPARVGIEATIATQWFERMLGRYGHELWFGDAAEIRAAMVRKQKTDTRDARHILDLLIQDRFPRIWVPSLAERDVRQLVRHRHKLVRFRTSVMNQLHALAMGQGLCLRKKLWTTVGRQKLESLTLDPWASRRRWELLELLDKINPSIEELDRAVISEAESRPAAVGLMQQPGVGPVTSLAFVLTVGPVSRFPNSKKLVSYLGLNPSEESSGGRQRLGAISKQGNTMLRCLLVEAAQTAARFDPELRRDYQRLKFRRGISGVAKVAIARKLAVRLYWKLREAAQPVPLARMQGSPATPVVGESLPSF

SEQ ID NO: 243193 - protein, 346 aa, unidentified
MLHAGLDLSRRRLDFHLLDEGGETLEVGAAPPDADGLRLLAERIGRHEQPLRAAIESMNGARFVHDQLELYGWEVEIADALRVKGLAPLACKTDRIDAWVLAELSRRDLVPTIWLPDPHVRAERERARFRLHLVRHRSSLKQRVHAVLLAHGRPCPVSDLFGVSGRSLLARLELPEPWRAHVQSSVRLIDELDREIDACEAELHRLGADHRYVALLRSVPGIAWVLAYTIAAEIGDIARFPSPAKLVGYSGLCPRVYQSGEHDRRGRLAKHGPKYLRWALVEAATHACRHPAYAERYERTKRRLGKQRGAKVAQVDLARRLAEAIWHMLTRNQPFAPAGATAPMAA

SEQ ID NO: 243194 - protein, 365 aa, unidentified
MDNAHYTTIGMDVSDRKTQVCVMAKDGKSPKIVMETVIPTTKEGLAKFLSTQDRSTPVAFETGMHCRWMNEVAEGLGFKVYVANPCRLRMITESKTKNDVNDARMLARLALSDPGLLHPVKLRGPGRRRMPNLHEMRNLLVKQRTGVIVQMRAIAKAMGFRIPKCPTGSFHRLDTSPWPREFRDIAWPMLKNLGQLAVTIKTYERQIRELAQTPTFKAQVDRLMEIHYVGLYVATGFVAVTGGDMDRFEKPRDVGPWLGLTPRQDQSGDIDRQCHITKAGSPSMRRLPVESAQMILRDGSADTDLKARGRRMCARGAKIAKRKAVTAVARALAVLMVAMLKKPDAPYVPLSGRCEKELLAMRATA

SEQ ID NO: 243195 - protein, 429 aa, unidentified
MEEVDEVELVVQRVAALDLGKATLEACMRVPHPSKPGRRMQEIRGYATTTAALLEMAIWLRQWGIERVVMESTSDYWKGVYYLLESEGFDCWLVNAREVKNVPGRAKTDRADAVWLARVAERGMCRPSLVHPPPIRRLRDLTRYRRALVSDRSREMQRVEKLLEDAQIKISSVLSDIHGVSGRAMMEALIAGQRDPWSLARLAKGNARKKTDRLEEALRGFFTDHHATILQMMLDNIDRIGAQIAALDARIAEAIGPFSRPAAQLTDIPGVNTVAAAELIAEIGVDMARFPTAAHLVSWAKFCPQTHQSAGKSRSKARGKGNPWLAGTVGRIVFSATRTDTFLGARYRRLARRRGKPKAIVAVGNSVLTIVYHLLSDADLDFCELGPAHYESRINKNRRARDLATQLQALTGQRIVIRDGKAIITDNAA

SEQ ID NO: 243196 - protein, 371 aa, unidentified
MKQQSKSSNITVGLDLGDRRHRFCALDERGEVVEEGSICNERDSLRKLAGRYHGALGVMEAGAHSPWISRFLEALGWRVVVSNPRKVRAIYQHERKSDQRDALMLARIGRMDLALLYPVGHGTAEAQQDLLRIKLRDSLVRARVAVINSVRFTLKSLGYRVRNPSSARFHKVVMEEVPESVREMITPSVQALAELTARIKMLELEINTLAQMKYPQSAQLQQIPGVGPITALYFVLKIEDPNRFAHVRDVGAYAGLCPRRDQSGESDPQLRISKRGDAYLRRLLVSAAHYILGPFGPQSALRAYGLMLAADGTARAKKRASVAVARKLAVLLLSLWKSQQPYQPFPGARLNGQQEDRRSGTIALHRMEATD

SEQ ID NO: 243197 - protein, 449 aa, unidentified
MSRPQVIDDQEHERIYERVAAIDVAKDTGMVCTRTPHPSRPGAQRASVWTVRARMNAIRVLGRQLRKDGIEIVTLESTSDYWRIWFFVLEACGLAVQLVSAAQAKNLPGRPKTDKLDAMWLARLTEMGLLRASFVPPKAIRDLRDYTRARTRLIHERSRCWQRLEKLLEGALVKLSSVASKLTTLSAQDMIKAMIAGQRDPEILAGLARRTMKAKHDALVEALDGMFDDHHGELAQLLLDQIAALDAKVAQLGARAAELAAAIPEGWGIDPDGTTGPGAGTGPDAPVLNAVARLAEIPGLSPDLARTIIAETGLDMTRFPDAAHLVSWAGLCPSARQSGPRTRSGRKGRGDTWLRGALGQAAVNASRTATFLGERYGRIARRRGKAKAQVAIARSILVIIWHLLANPEARFTDLGPGYYQTRLDTDRKLRNHLRQIQALGFTVTLTKAG

SEQ ID NO: 243198 - protein, 337 aa, unidentified
MKKNEFSNFVGIDVSKQTLDAVFIFNNELNNPIHQQFSNDESGIRKMLEVIKKHKEVSTENILFCYEHTGIYGKKLSYTLVEKRYCVWIEMPLAILRSIGLQRGKNDKVDAKRIAIYAMKNNKQAKLWESPRKEVATLRQLLTTRASLINGLKALKMPIKEYKETGNKELAELMQKSTKNAVQGIEKDIKKIEQAIDALIKNDERLSKLFTLLISIPGVGKITSTELICFTNEFKNYTEAKQLACYCGVAPFEHSSGSSIRGKTRVNNMANKSLKTKLHLCAMAAIQHDAELKAYYERKVKDGKNKMLVINAVRNKLVHRITAVVKRQTPFIYKTAA

SEQ ID NO: 243199 - protein, 350 aa, unidentified
MDTTTILAIDLGKFKSVACVYRRGGGGTPAFHTVASTREALLGLLDRVAPAVVVIEACALAGWVHDLCVARGLPCKVANTASEAWRFQHLKRKTDRDDALRLAQLEDLGQLPTVCLPPAEVRQRRSLILARQRLVGLRVRAQNRLRSLLMMQGLEAPRGAAAWAAAGLAAFEAQARPLAECPPAEAWRGLVHLALAEYRQALAWVEEVEAQLDALGRADEQVRRLRTVPGVGPRTAEVVSAYLHQPKRFRTGKEVGAYAGLVPRQSQSGESDRRGRITRRGPGVLRKLLVECAWAMLRYNRWAAALYARLSRGRARKKQAIVALARRLLVRCWAMLRDGSDWRDEAAAGA

SEQ ID NO: 243200 - protein, 456 aa, unidentified
MARRSKAKGTRQHTKLHMIYTRAAGIDVGSTFHVVAVPPELSAEPVQTFQSFTGDLYRLATWLVEIGVTTVAMESTGIYWIPVFDILEAHGLEVLLVNAQHVKTVPGRKTDVNDAQWLQQLHTYGLLRGSFHPAQDWSALRVYLRHRERLVEYAAAHIQHMQKALMQMNLQLHHVLSDITGTTGMKIMRAIVAGQHDPAVLATSRDARCKASEETIRAALTGHYRREHVFALRQALELYDSYQARIEACDQEIQSTLASLQNEEIAIDTLPAARHKKRQSHEPLFDVREALFRVLGVDLSQIDGFSAYTALKLVGECGMDMSRWPTEKHFTSWLTLAPGNKISGGKVLNTKTRRSANRAAAIFRLSAMNVGQTQTALGAFYRRLASRAGKAKAVTATARKLAVLFYNTLRYGMAYEDPGAAYYEDRYRQRVLKGLHRRAKEFGYKLTEVGALEGVS

SEQ ID NO: 243201 - protein, 312 aa, unidentified
MTQLCAAGVDVGRDYFDVGLAPSGQVFRVANAARGVEQLIARLKAAGAARVVLESIGGYGARLVRALADAGFEVGVIDPKRIRALRIAEGKKAKTDALDARLIARFALIMQDAARPVPNPKAFEIRALSTRRRQVVEMIAMEKVRLKQTLDETVAQSVRFVIATLTEERGRIEAQLQQELLAQEHGKAHAELLQTIPGVGPAVSMTLLADLPELGRIDRKAVASLAGLAPHPNASGTHIGQAHISGGRPCVRAALYMAAVSATRTDKGFKREYLALRAAGKPGKVALVAIARKIAVAANAIIKSGQPWQKPT

SEQ ID NO: 243202 - protein, 392 aa, unidentified
MYIVGIDIGKNHHEASIVSPEGKQIGRSLRFATTHKGADSLMSFIFKNIGNSPCVFGMEATGHYWYPIYSFLKAKGYTICVINPIQSDSLRKMYIRQTKNDSIDSFFIAEVIRFGQFGTTSMADENILAMRQLCRYRDSVISSRTEIKLRIGTIMEQIFPEYEKQFSSLWVSTSMGILEKYLTPENIENAPIDELFEIIKDKSHNRLTKAKAISIKEAAADTFGIKIAQDAFSFQLKQLIDRMNFHDKQIEALDIEIMKYYEQFDCYLHTIPGIGIIGAATILAEIGDISRFKNSSALVAFAGIDPTVRQSGEFNSTHNHMSKRGSPYLRHAIFLAATTCSFHNSPLNAYYKKKRDQGKHHLTATGAVARKLTTVIYAVLRDSKPYEPKKFC

SEQ ID NO: 243203 - protein, 416 aa, unidentified
MKIIRPICCGMDVHKNIIVATIGITNKKTRITEYIQETFSTLNSDLLNLKQWLINHKCFDACMESTGKYWIPIFNILEDEINIYLTHPKYVKAIKGKKTDKKDSKWICDLFKHDLIKFSFIPPKEIRALREISRYRYKLVGMRSSERNRYQNCMTVSNIGIGSVFSDPFGKSAQAIMKEVLESDIIEDEKILKCIHRSCKNKDKILDSIKHCNIETDQRFKMNESMTHMEELQVHINNCEIEIMKRAAPMLDRFMHITQLPGISTLSAILIISEIGVDMKQFESDKQLACWAGLAPANNESANKKKSVRISKAGQYLKPLLVQCALGAIKDKEGYFGIKYSRIKKRRGHKKAIIAIARMMLVSIYHMILTGETFNPSDYESFRNPKPPIKQQVLTEESAIEFLKKSGFDVSKLTKP

SEQ ID NO: 243204 - protein, 400 aa, unidentified
MLSVGIDVSKEKSTVCGMRHLGEIVFGPFEIAHTESDLSELARMIVRLDDDTRVVMEATGIYHLPVATFLREQGLFVSIINPYEMKVYRSQDIRKVKTDKRDSMVIANYGVDKWINLREFTPQEDVYAELRLLGRQYRFYMESRIEQLLNLTHLLDYTMPGLKSCFSGWSEYSGKDKLCDFVEEYWHYDNIIKFSESKFVERYQKWTKKKGYQFSETKAVQIYRLAKEGIPTVPSNAPSTKMLLLEATKALREINSALFAILTRMKELAKTLPEYPVVRAMSGVGDVLAVKLMAEIGDVRKYHSSKSLVAYAGIDPPPYESGKLIGTNRHITKRGSSTLRKIGYEVMRCVKANGRSEDDPAVYDFMLKKESEGKAKKAAKIAALNKFLRIYYARVLEVYA

SEQ ID NO: 243205 - protein, 411 aa, unidentified
MDVVHARCCGLDVHKKSVVACVLASESDGLINRQVRTFGTMTADLLALSDWLSSLNVTQVALESTGVYWRPVYNVLEDDERTLLLVNPQHMRAVPGKKTDVKDAEWIADLLQHGLLRGSFIPPVPIRVIRELTRYRKTLVQARADEVNRLQKTLEGANLKLASVATDVLGVSGRAMFAALLDGERDPDVLADLARGRLRAKLPQLRQALVGRVKPHHLVLISQILAHIDFLEQAIAEMQVEIDRCLPPFEKALELLQTIPGIREVAAAAILAEIGTDMSRFPSAGHLASWAGLCPTNKESAGKRMKGPRNRGNVWLRAIMGEVAWASIRTKASYFYAQYHRLARRRGKEKAAVAVAHSLLVVIYHVLSTGRPYQELGVDHFDRLNTAHIQRHHVRRLEQLGYTVTLTPIAA

SEQ ID NO: 243206 - protein, 354 aa, unidentified
MKTSRDYTGKRIFVGIDVHKKTYSVSVIYDHEHVKSDTIPADPERLVSYLKKYFAGARINSAYEAGFSGFRLHRHLIEHGINNIVVHAASIEIGSRDRVKTDKRDSKKIATQLAARRLKGIHIPSLEMEDRRELTRLRSTLVKDRNRIAVRLKMKANYHGLIGPEDSQKVCDQWLARLLKMNMSAGLRYVIQEFVDQWRSFNEKIKKLNEVLVEQAANDETLEKVYRSVKGIGPTVARYLANELGDMKQFSSERALFSYTGLTPCEYSSGENVRKGHISRQGKPMLRSLLVQASWIVIKYDKNLEEIYERIARRAGRKRAIVAVARRLIGRLRACFRKGVLYESSPLEEKQLVA

SEQ ID NO: 243207 - protein, 347 aa, unidentified
MRFYNNAHPYYCGIDLHARLLYVCIIDDKGEVIVHKKIKDDKEALMQILEPCIGNVIVGVECMHCWYWVADWCDDNNIDFVLGHALYMKAIHGGKTKNDKVDSLKIAKLLRGGNFPIAFHYKNEMRATRDLLRRRTKIVRHGAMLKGHVVNTNSQYNLPPTQVNLKNVSAREALKHSYDDPVVQRNIDLDMNILDFYAREISKVEHFILAQARQHNPAFLNLLKTIPGVGRILSLTILYEIGDINRFDSVQRFASYSRLVKCKAESAGKTYGTQGNKIGNAHLKWAFSEAAVLYLRGNDKARNYLNKLQKRMSKAKAISALAHKLGRCVYFMLKNKTVFDESRFLNG

SEQ ID NO: 243208 - protein, 410 aa, unidentified
MIPAVIERCAGIDIGKTFLVACIMVGAADGEPRTEQRTYGTTNSDLERLRLWLIQEGCTHVAIESTGSYWKPIFNILELSVTVILANPQDVKARKGHKTDPKDSWWLAHLLRHAMIRPSFIPPQAIRELRDLTRRRKQLLHHGTSERNRIQKVLEDANIKLGSVLSDVFGSSGQLMLNALLEGKATPEEIAQFAKGRAKKRIPELLAALDGHRMSEHHRQLIRYSIEHLVFLEDQVTKIDKEIRRKILEAGFQGAFELLQTIPGVKEDAAAGILAEIGVDMRVFPSDANLSSWAGLCPGNRRSAGKDKGGRTNRGNRWLRGMLTECAWAAAGKKDCYLKGKFWRLAAGGKKRAIVAVAHNLLRLVYHVLSQSQPYQEKGRPILDERQRQKLIRHHVRALGRLGISAGFVR

SEQ ID NO: 243209 - protein, 367 aa, unidentified
MKKHTSIDQSLSSANLSVCTTVAVYLAKHVFQVAGEDALGHVHYEQRLKSREAFYEFLQQLAPHVIVLMETGPGAQAWARQLQEQGVEARILPAKLVTAHRTGPKNDRNDALAILRAGRDEKICAVPIKSVAALAMQALHRARQGYVRRRTALSNQMRGLLLEHGVVLAQGDVAISQRIPRVLEDATQPVPAMLRELIDELLAEWRFLGERIAVLTGRLEAAANADSTAKRLMSVRGIGPVTATALVAKETQPERFPNARKFAAYFGLVPDQHSSGNKVRLGGMSKRGDSYLRSLMIQGAHAVLQQLRSDSEQPDDRRLLRWMSRLGRKQAAVRLANRNLRIVWRLLQNDQTYRRQHGSGQPAMMSH

SEQ ID NO: 243210 - protein, 349 aa, unidentified
MVAEVVDYVVGVDTHRDEHTLALVEATTGAVLAQRTVASNGRGYAQALRFAQEQAEGARLWALEGAGHYGAGLARYLSQRGETVLEAGRSPRSERRLRGKDDRLDAVRAARAALGSEPLPRPRSGERREALRLLLLTRRSAVDVRREALVQLRSVIVTAPDRLREELRGLPVGRLLERCSRLRPSTTATPDEAAVRLVLRTLARRIEAATGEADELEGEILVHVRALAPELLDEPGVGPIVAAQLLVAWSHPGRVRSEAAFARLAGVAPLPASSGQTNQHRLSRGGDRQLNRALHTVVLHRRQHDPATRDYIARRVAEGKSRREATRLLKRYLARQLYRLLQNQEPLMA

SEQ ID NO: 243211 - protein, 447 aa, unidentified
MAPATIEWVTVKAPNLKQEEPSQMENTAARKRKQVPEGYLIIGIDPHKKRHAAVAITQDFSIRDRSKFDNTREGLETMLCRVRVEMVKADCRGVMFAIETGGHYWRNIAYFLDERGLPFRFINQYTLKRRREGKDLNHKKNDYRDSEVAAQLLCTGEFTESIIPQGVYAELRTAHNAYRRLVKERTRITNLVKGLLDGVFPEFTQVFKDPCGVTALSVLSAGAIPGAIAAMTEDEFIVTIETRHHGRRLMRKKLGALHNAAMASIGIVAGARSASSEISFLVEKHELIRRHIRVIEGTLVNLVDEAEESKYLLSIRGLNYIAVAGLLAELGCFKSYRSAKQMIKMAGSNPTESESAGKRGAHTPMSKQGRPVLRYCAWTSVIPMLRFNSDFRAWAKQRRERPAHANPLSGREVVGAALNRLFRLAFAMVKNQTYYQVSKPEPTLVAV

SEQ ID NO: 243212 - protein, 348 aa, unidentified
MTVYIGVDFHPHQQTVAWCDSGTGETGTLKLVHDIQKVREYYSSISAPAIVGVEASTRAAWFENTVIEAGHKLLVGNPVSIRKTALSRHKNDRIDAEHMLWLLMRDEFPAIWRRPPQSNEILEVLRLRFSLVKQRTQVYNRLQALAHNVGMPKVSMRAAAVQQVIKRVEMNESGVLCREQLFSMLTHLIGQIAELESWLKPKVETNAQAQLLMTQKGVGYLTALTFVHTVGDVTRFEKGPKGVTRFAGYDSIEKSSADKRRFGPISKAGSSLLRFQMGQAAQSAARFDTSLKAFYKRLSKKKPKAVAKTATARRLLVKLSIMLRDQITAEEFDLRGRTVGNARKKSTA

SEQ ID NO: 243213 - protein, 437 aa, unidentified
MEEVTDEPLYRDRVCGIDIGKAGLVATIRVSSDSNPARRAAETRSFGTTKREVLALADWLRCWQVPAVVMEATGDYWKGPFYRLEAEGFECVLADARQVRHLPGRPKRDPSDSRWLAACFERGSVTSCFVATPEFRVIRLHTRYRRDLTGERTREKQRAEKLLESAAIKLSSVLSDLHGVTGRDIMDHLIAGERDPKVLAQLARGTARRKIPELQAALEGAEFFTPACAALLKTMLGRIDQLSAEITRLSQVIEELLAPWEEQLQQAESMPGWQRRSAEDALAETGPDMTRFPTPAHLASWAGRTPLDNSSGQRTGKSKAKKGNRYLGAVTGETAVSAGRTQTREGARYRRLARRRGKAKAQVALGNTQLKVYHALLSRPGTRYQDLGPDYYERQRDIRRQISHHVGKLGALGFEVTLCRLPEPDSDPDHATSTQAA

SEQ ID NO: 243214 - protein, 343 aa, unidentified
MEHYVALDVSLREISVCVIDGKGAVMFEGKTAAEPVSLVQLIRTKAPHVVRVGMETGATSPWLFHALTAAGLPVVCMDARQAHAALSLRPKKSDRGDARGLADMLRMGWYREVHTKSVIAHERRTMLGVRHQLVTMRAELDAQIRGVLKTFGLILGTGNSNALIRRAEELADGHPIISSLVAKLADVRRAVVLQVAGIDREIRYLIRSETTLKRLMTVPGVGPITAVAFLSAVDDVGRFKHARDVGPYLGLTPTRYQSGETDRQGRISKCGDAFTRTCLYEAAHVLLTKVQRFSPLKAWGMRLVKRIGMRKTCIAVARKIAIILHRIWVDGTEFWWTREAQPA

SEQ ID NO: 243215 - protein, 340 aa, unidentified
MGEITTIGLDLAKQVFQVHGIDADGTTVLRKQLRRSQVLSFFSRLAPCLVGMEACATAHYWGRELAPLGHEVRLMPAQYVKAYIKRNKNDAADAEAICEAVVRPTMRFVPAKTAEQQAALLLHRGRERLVRQRTGLVNALRGHLAEFGVIAPQGLRNVGKLIAVVRDPSDARLPDLARQVLEVLAAQIEQLEGAVAAVEKQLMAWHKSNPVSQRLATIPGIGPIIASAIAASVAEPGGFRSGREFAAWLGLVPRQNSTGGKHRLGGISKRGNQYLRRLLINGASANLLRSKATKADPWVIGLRRRRPSLVVAVALANKTARIAWAVMQRNENYQRMAAAA

SEQ ID NO: 243216 - protein, 457 aa, unidentified
MTRRKHSRPARDIAPVHPHAAAVDIGATLHVAAVRPGCDPEPVRTFGTFTTDLHRLADWFEQCGVETVAMESTGVYWIPLYEILDQRGFEVVIVNARDAKNVPGRKTDVSDAAWLQRLHEYGLLRASFRPKGEIATLRSYLRQRERLLDQAAAHIQHMQKALTEMNLQLHHVVADVTGVTGLRILRALVAGERDPDTLAAYSDPRCKAPAETLRAALVGNYREEHVFALAQALELYEIYQAKVAACDQRIEAVLERLKAANPPPAAALPPARPRRRQANEPGFAVREALHAILGADPTQIDGIGPSLALTLVGECGTDLSAWPSAKHFTSWLSLAPHNKISGGKVLSARTRRSGSRAAALLRLAAVAVGRTATALGAFYRRLAARVGKAKAVTATARKIGVLFYNMLRHGMDYADPGASAYEARYRQRVLSNLRRRAKSLGYVLQRADPASAAIAVS

SEQ ID NO: 243217 - protein, 457 aa, unidentified
MRKKRQQALKEIPKLESLKQINLNAAGIDVGETSIWVCVPEDRDEKSVDRFGVFTCDLFAIADWFKTCGVTTVAMESTSIYWVPLYEILENRGFEVFLVNPNDTKNIAGRKTDIEDCQWIQQLHTYGLLRPSFRPAGEFVELRDLVRHRDDLLHHRASHILHMQKNLHLMNLQIDNVISDITGVTGMQILQAIIAGERNPQVLAEYRDPRCKNSKAVIAKSLEGNYKTTYIFQLKQALELYDFYTQQLKTCDEEIEKVYRQLPWQVDACRDTTTQLSGRDDRRHKHHPDFDLQLYLYRLTGVDLTAVDGLGAMVVQGVLAETGVDMSKWPTEKHFASWMCASPNNRVSGGKVLSRRTRKTKNRAYHYLRLGARSLHHSDSALGAYFRRLRARIGAPKATTAAAHKLARIMYRMIKEKKEYVDLGADYYEQKYKEREIAKLVRKAAKFGLKVVPSEQA

SEQ ID NO: 243218 - protein, 301 aa, unidentified
MDLVITRCAGLDVHQATVVATVRVPDEQGGRRIVTETFDTMTADLLALRDWLQAFGVTHVALESTGVYWKPVYYALEDTCTLLLINMHELKRVPGRKTDVKDSEWLAQLLECGLLKSSFVPPPPIRELRDLTRYRVQQVRDRSQEVNRLCKVLEDAGIKLSSVASDVMGASGRAMLTALVEAAMCPGQNESAGKRRSGKTRKGNRYLRATLIQAGLGAMRKKGSALQAQYHRVKRHRGHKRAVVAVGHQILEIAFYLMRDGVTYQEFGADYFDRRHAERAVRRHVRQLEALGFHVTIEKAA

SEQ ID NO: 243219 - protein, 310 aa, unidentified
MEHRRIVGIDVSKDRLDVHVLPSQEAFAVSRDATGLVELCRRLGDTVDLVAVEATGGYETLVAATLSDHGMPVVIVNPAQVRAFAQALGQRAKTDPIDASVIARFAEATRPQIRLLPDGAARLLSDLMARRRQIVEMIASERQRLYRTEPPRVRKSIERLLKALERELGTIDHDIDGAVRGSPLWRETEDLLASVPGIGSIIARTLLAELPELGRLDHKKIAALAGLAPYTRQSGLWKGKARIGGGRAVVRTALFIGAQVAKRWNPPLKTFYERLIAAGKTKMVATIAVARKLLVILNAILRDRTPWQNA

SEQ ID NO: 243220 - protein, 344 aa, unidentified
MEPMYYIGLDVHKRKISYCVKDSSGRVFAEGLLAATRLDLDLWMKTLPQPWSAAMEATMFTGWIYDHLQPHAAALKVAHPLMLRAIAAAKKKNDRIDARKICDCLRCDFLPECYMASTAIRERRRTLRYRNLLVRQMVQMKIKISALLMEAGVSYNKQRLHKAGYFRELLASNPDINEGLRALLRLCRETVVRLQKTESALVRSLESDPLLMDRVERLMTIPAVGPITALTWALEVGDVQRFPSIKKAISYCGLCGAEKSSGSTVQRTPLSKQRNKHLQTTLIEAAKMAPRNSSALALLYDQEKQKGNANRATLAVARKLVAYLMAVDRGQRTFQVVETSNIAA

SEQ ID NO: 243221 - protein, 405 aa, unidentified
MARVFVGHDWAEDHHDVFVEDGQGRRLGGGRVPDGVEGVARFHELVGGLVEDPAEVVVATETDRGLFVGSLVAAGYTVLAVNPLSVSRYRERHSTSGAKSDPGDARVLAELARTDHHNHRPIAGDSDLVESIKVLTRAHQGLIWTRQRQLNQLRSTLREFYPAAIAAFPELGHSDALAVLALAPTPSLGRLLSISKIAAALRRGGRQRRIDERAAEIQIALRSDQLGAPDPLSESMGTVVGALVAVAGEITTQIAGLETTLADRFDQHPDAKIIRSLPGLGMILGARVLAEFGDDPNRYANAKSRKNYAGTSPITRASGRSHVVLARYARNRRLADASYRWAFAAITASPGARTFYDTRRATGDTHNRALRALANRLVGILHGCLRHRTLYDEHIAWAHRTQLAA

SEQ ID NO: 243222 - protein, 369 aa, unidentified
MDKDTTYVALDDSKRKIVAGILRPRDAEPELREIVNDPRQIRRLLERLKREGPVAACYEAGVSGYDLHRQLTALGVECAVIAPALTPRRPGQRIKTDRRDAAKLVRLFRAGELTAIHVLDESEEAVRELGRCRDDLRRDVLRWRHRVLKLLARHGRAYLSGKNWSQGHWRWIREQRFDLPPLQRAFEATVFALEQALARQAELDKELEAVAGTAPYREPVRWLRCFRGIDTLSAIILLAEIVDFQRFRRPRELMAYLGLVPSEYSSGESQRRGALTKAGNSHARRVLVEDAWHYRHRPTIGRALASRSQGQPDEIVGQAWRAQQRLHRRYRHLVGHGKRPPIAVAAIARELVGFIWAAMTRPENRRQAA

SEQ ID NO: 243223 - protein, 316 aa, unidentified
MDENGKVAVNERSFSNVISIGAFFDHLGMTEARVVMEATGFYQYLYEAIESRGYDVTLAHPLKLKAVPTGRVKTDRNDAEMLAELLRIDAVPSSYVPPKDIRALRDLTRHRSSLIAESTTLKNKMHAELARRGAKPPAEVGAAFSKRFIAWLREMRSMMTDDPLDILEIVREKIKRIDERIREEANKDEDIRLLETIPGVGHAVAMTIKAEVGDIGRFRPPDALASYAGLASAMRRSGERKAHIGGMSKQGNPRLRYMLTEAVHVHVMYCKDSRLTSFYERKKEEKGSKKATVATAKKLLEVMYQMIIRREEFHAR

SEQ ID NO: 243224 - protein, 375 aa, unidentified
MEGAPMLDTTTFIGLDVHARSIKAVSLDVMTGEVRAATFGYDAGAVAGWVRSVDPRARCVYESGVTGFDLQKRLSGLGVDCVVGAVSKMIKPSADRRRKNDRNDAEFLARMLSVGNVVEVWVPDDECEAARDLTRALEDARDDLSRSKQRLSKFLLRHGLVFDERTPTGRRKGNWTRAHWSWIESIRFAERADNDVLAYYVDAVRRAAEEKARLEGLVGAEARKPRWRKRVDSLRCLKGVDTASAADLVFEAGEFSRFRNARSFAAWVGLTPSEHSSGESDRRGAITKAGNKHLRKTLVEAAWHYLTCSGRPKDLAKGQAPDRGARRHAAKGVRRLVERREALLARGVHGNKANVATARELACWVWAVGLMAEEA

SEQ ID NO: 243225 - protein, 336 aa, unidentified
MNEAACVVGIDVAKRKLDLALLVNGKTKSNVFDNIPAGHALLRQWLAERGIPQEHTHICMEATGPYSEAVAIALVEAGWRVSVVNPARIKGFAQGELARNKTDRADAALLARFCAAMRPSLWTPPSPAWRELRAWVDRVQALKDMHQQESNRLEAHQASEQLLLVKAVHTHLDWLGQQIADLERHINAHIDRHPDLKGDAELLHSIPGIGTTTVAKVLAYAGDVRRFANAKALAAFIGVTPRQRVSGSSVKGRTMMSRTGHADLRRALYMPGLVARRHNPVLKVFGDRLRVTGLAPKAVVGAVMRKLAHRMYGVIKSGQPFDANFTRARLDFQDGI

SEQ ID NO: 243226 - protein, 313 aa, unidentified
MTQDSTPAAGVDIGKHRLDIAFSHGAPALSVPNTPEGHAALGAALVAHGVTRVGLEASGGYERAPVRFLRAAGLDVIVFQPRQVHGFRTWRQRRAKTDAGDAQMLAACAAGHGPGRPGPDPRLEALAEPLRLVGQIEADIAQAKTRREAYESEPIRAQIEAEIARLKAWRAAELKAIVAALRAHPDLARRLTLVTSVPGIAERTALTLLVRMPELGALTREQAAALAGLAPYDDSSGEREGERHIAGGRADVRTALYAAALPAAFQWNPALVSLYKRLRARGRKHKQALVACARKLLIFANTVLARGTPWVKA

SEQ ID NO: 243227 - protein, 387 aa, unidentified
MSTLPCFVWRGLVTASKGEGSVDVSDGICFAGLDVHARKTAAAAIQLGSGEIWKARLAGSATAAIEWLQTLPGPVRAVYEAGPTGFGLARAARAAGLEVMVCSPGAIPRQPGDRIKTDVRDAVKLARLHAAGQLRAVTVPSAELEALRDLVRAREDLRGDLMAARHRISKLLLRRGRIYDGPGHAWESKHHAAWLAAIDVGDPLARVVLGEYLACHEVLLARRDRLDALIAEQAHDPQWAALVGRLRCMRGIDTLTAVGLAAEVGDFTAFAHPKQLASFLGLVPAESSSGEKRRQGSITKAGSSHARRLLIEAAWHYRRRPAVSLTLRRRQDGQSPAAIETAWRAQLRLSARWAHLDARRAKRRTTVAVAVARELACFVWEIARQPD

SEQ ID NO: 243228 - protein, 341 aa, unidentified
MNHVAADLGSRQSQLCVRSPEGQIQLEGKVTNLDLGQAFAKLPKSRVVLEASAEAFAVADLALAAGHEVNIVPSGLARNLGVGQRGVKTDKKDAQNLSMASCRMETLPQVHLPSRQARELRSLLTSRSQLVTARTAMVNGVRGWLRTQLLTAPKGTRTENFPTRIRELTLARSEGLPEHIERVLKVIETLNEQVAAADKELEQMTNDHPLCQRLMTVPGVGPVTSATFWAALDDVTRFKSAHSVESYLGLTPGENSSGETVRRLGITKAGSASTRAVLVQAAWAAWRSRPDDPMVKWARQIAERRPKGVAIVALARKMVGILFALWRHQTTYDPAHGLKQQ

SEQ ID NO: 243229 - protein, 321 aa, unidentified
MQTVPVTVYAGVDVAKASLQLHLQGRQAEFTNQPAGLAQLCQKLKTIPHVHVVCEATGGYERLLVQAMHQAQIPVSVTNPAQVRAAAQAQGKRAKTDRIDAALLSDYGQRYQPKPTPPTTSSQDQLVALTQWLTQLVQAQALAKTQAEHHQAAFVCGRHAKLMAHFRSQIAAVEKQIRALLAKDAQLQQRVDCLDEIKGVGHRTAWLVLAHMPELGQLNHQEVAALAGLAPWTRESGTMKGMRCIGGGRPELRLALYMAALCAARCNPVLQPFYQRLRAKEKPAKVALTAVMRRLLVYMNYQIKALQAEQPAMQIDHAKIP

SEQ ID NO: 243230 - protein, 344 aa, unidentified
MDHFAGLDVSVKETSICIVDDTGRIMKEVKVASEPQALLKVLGNPAYRFKRIGLEAGPLSQWLFSGLAEAGLPVVCVETRHMQAVLKAQINKTDRNDARGIAQMMRAGLYRPVHVKTLRSQKLRMLLTHRKLLQSKAIAIENDLRGTLRNFGLKVGMVGKVRFEARIQELVENLPDLAELVEPLLIVRRALREQIVILHRRLLAIVRDDEVCRRLMTTPGVGPVVALTYRATVDVPARFRKSKSVGAVFGLTCSKYQSGEIDRSGSISRCGDEMMRVMLYEAAQSMLRSKKWSWLKAWAMQIARRRGMKKAIVALARRLAVIMHRIWVDGTEFRWTREQAAAAA

SEQ ID NO: 243231 - protein, 348 aa, unidentified
MTVYCGVDFHARKQTISYLTTEEGEVQQAELHHEQDNIRGFYAKLLSQGPVIVGFETSGYAAWFEEMLEELGCEIWIGMPAAIRRQARRRQKNDRRDADLILELMLRGDFPRLHRYTAASREVLQQLRYRHRLVKLRTIVVNSLQYMALSRGVSLRTKLLTGRGQKRMKELKLPDHLAKQRDEMCELLKELTAKIETAESWLDQRAESDAQVKRLRTHPGIGPLTGLCLVYTLEQVQRFANPRKVTAYVGFDPVEDSSGERQRIGSISKQGSRLLRFLLVEAGQVALRTDPDLKAAYWRVQLRRNHQKAKVAVARRLLVRAFIMLRDEIDYAEFQRRGVAARSTRRTA

SEQ ID NO: 243232 - protein, 353 aa, unidentified
MRIIGCDYHPSWQQICWVDTLTGETEEKKLDHASGEAEKFYRQLAGPAVIGMESTGNCQWFVEMATTAGHEVWIGDAAKIRASEVRQQKNDRRDAALILKLLMEGRFPRIWTPSGEEKDLRQLLIHRHKLVRIRVQVKNELQHLAMNQGVTRAGKLWSKAGEKVLSELPLKPWASRRRQDLFKIREMLNGQIALLDQAVLQAAQKNEKARLLMTQPGVGPITSMAFVLTMGDVSRFPRGKQVASYLGLIPREYSSGGHQRFGPISKQGNGFLRMLLVEAAQVAVRCDPQMRQEYLHRCHRNKAKGVAKVAAARKLAIRLYWMLRTNQGYPEVVRVESSPRVAVVVRKTDRPKD

SEQ ID NO: 243233 - protein, 423 aa, unidentified
MEVCPWLLKYLKKLLHLDVHKTWFYACIGITDSNNRTEYKQAHFSSFSKGLHELADWIAKYSCTEVCMKSSGKYCIPVFNILEKSCWVALAHPKYTKPQKGNKTDRKDAKWICNLFMCDMIKSSFIPSPNIRQLRDLLRFRMKLMYQITGMKNRALSCLTVSNLKLDDVFSDVFGKSSRSIIEQILNHPGDTFDVSPFVHKRCKHPIEEIQAAVDGAVCQEQATKLKICLDFIDEQQKRFAELDSEIFRLAEPYEIVLEYIRTVPGLSKEPLTAIRILSEIGADMSVFPTSKHLVSWAGFFPRNDSSAQKVKSTRISRAGSYLKPILVQIANALLKSKTHPEFQKRYRRIKARRGHKKAIIAVYRMLLTAIWNILSKLEPYSANGYLADKLTKHSVVISKSEGPALPKKRDYIFKDKLANVSC

SEQ ID NO: 243234 - protein, 343 aa, unidentified
MQSISTIGLDIAKSVFQVHGVDAAGQVVLRRQLRRRHVLAFFQKLPPCLVGIEACASSHHWSRELQALGHTVRLMPPAYVKPYVKRQKNDTTDAEAICEAVTRPNMRFVPTKTVEQQSCLVLHRARHLFIRQQTAVINSIRAYLAEFGIVAPVGRRGVEQLLEVVADKADRRLPEVARACLAALGSQLWALKAQILEFDRRIIAWHRSSATSKQLDAIPGVGPALATALVASIADAKAFRSGRDFSAWVGLVPKQNSSGGKDKLGSISKQGDRYLRSLFTVGALAVIRYAKIHGTGHRPWLTGLLARRPTKVAAIALANKLARMAWAMMARNERYKEPAALTA

SEQ ID NO: 243235 - protein, 409 aa, unidentified
MEVLYPRCAGIDVHKETVVVCVLTPGPSANPHKEIRQFGTTTGELRKLAEWLKQEGVTYAAMESTGVYWKPVFNILESSCELILVNARHIRQVPGRKTDKADCAWLASLLRHGLLEASFVPPLEVRELRDLCRMRTTLVRECVQVGNRIRKVLEDANVKLDSVVSNTLGVSGRLMIQSLIEGEQHPAVLAELARGRLRSKLAELTAALEGQVRPHHRFLLRQWTGLLASLEQHIVEVEQEIERHMPPFEWAAALLVPMPGLDRTAACALIGEIGVDMTRFPSARHLASWAGLCPGNNTSAGKSRSGKSHRGNPWIKGLMTEIAWAAARTKGCYPATLYKRIAVHRGKKRALVAVANSQLQVVWHILTHRQPYRDLGPDHFDRTNRLGLTQSLVRRLQKLGHTVTLNSAA

SEQ ID NO: 243236 - protein, 354 aa, unidentified
MDHIGIDVHKRESQIYLLAEDGEIIERRIRTEGERFAAVLGDRPRARMLIEASTDSEWVARCLEALGHEVIVADPNFAPMYATRSRKVKTDRRDARALAEACLLGAYRPAHRLSDPQRHVRARLGVRDALVHTRTRYISVIRALLRQHGYRVPSGSAGSVIDRVRRLPLPGRLLSVVAPLLAVMGPLNQQLAYSDATIEHLAVQDPRVPRLRSVPSIGPVTAAAFLAAIDDVGRFPHAHQLEAYLGLVPREYSSGETQRRGPITKAGHSRPRWLLIQAALSILRRRPPAAEALWTWALRIAARRGKHVAVVALARRLAGLLYALLRDGTVYAPRHPAALPGPVARAARVRHTGD

SEQ ID NO: 243237 - protein, 401 aa, unidentified
MKTVLSVDVAKNKSMIMLMNSDGEILIDTKEIKHNLEDFEKAKEEIKEISPENLTVFMESTGTYHLPVERYFKENGFNTLVINSLTTKNNYDTIRKTKTDKKDCYRLAKLFFVNEVEYHELSKKDLYANLKAMTRQYFYLLQQNVSCKNRYKRLLNICFPELEKIFKSTRIYDDTALNFIKEFPHAEIVKEKRINALYNNLYKTNGRNLNFYKRLSETIKIASANSYPGVDKEHKDVKNLSDMAKIVQNNNNVINELRDKMIETAKKSPYYEIINSFYGIGEILTAEILGELGDITRFDSPKQLIAFCGLDPTIKQSGKSINVKGAISKRGNKYARYILFNCSQMVVKLGASNYPEHPVYIYYQNKKAEGKHYYESLTACSTKILRMLYSMCKNNKQFLEN

SEQ ID NO: 243238 - protein, 314 aa, unidentified
MTPHDLFAGIDICKSRLDVAISPGNQTFNCPNTEAGIEKLVRRLQKLQPQIILLEATGGYEFLLVAALREAGLPACFINPKFVRNFAKGAGITAKTDRLDAQVLALFAERMRPQPRTLPTAQQQEIKQLLTRRRQLVEMIQMEKNRLDPTPAPRVKQSLLQNLHSLEAQLAALHREIDDFFQQHPLWVELDKTLTSVLGIGHLSALMLIAYLPELGRLNRKEIAALAGLAPFNKDSGQFRGQRHIEGGRSKLRQALYMVTLAATRFNPAIRTYYQRLLEKGKAKKVALVACMRKLLTILNAMIKKQQPWCPQHH

SEQ ID NO: 243239 - protein, 375 aa, unidentified
MSEHSEAFVGFDTSKLRNAVAIAEGGRDGEVRFFGEIDNTTEATAKLVRKLAGKYDRLTFCYEAGPTGYGLYRQITGLGQACSVAAPSLIPKKPGDRVKTNRRDAVSLAKLLRAGELTAVWVPDEGHEAMRDLTRARETAVIDVRAKRQQVSAFLLRLGRHYPQKRTTWTKAHMNWLASQKFEYPQQRFVFEEMMLAVRQAQERLARLEEAIRGAVPEWSLAAVATALMAMRGIDVIAAATLLAEIGDLSRFRTPHELMAYLGLVPSEDSTGDTVRRGSITKAGNGRARRMLVECSWSYQHPPRVGPHKQHKVDAAPPAVREIAWKAQCRLHKRYRALIRRGKLKTVAITAVARELAGFIWAINREIATACGVAR

SEQ ID NO: 243240 - protein, 417 aa, unidentified
MNTENYAALVALDWGETEHAFATQVGESPVETGTMPATPETLHGWLEELHKRVGAHRVAIALEGGKSAVIHALTSHPWLVIYPVHPATSERFRKAFTPSGAKDDVPDALVLLDILRQQRNKLRPLRLDSPETRKVAGLVAARRRAVDQRTRLACELGSTLKTYYPQALELCGREPATALELDFLTRWPELRSLKAARPATLLAFYAAHNSRRPDVLEERLAIIAQARALTEDRAVIEPAVLQVKMLVDILRPLQRNIALIEQSIAEAFAAHPEATLFQGLPGAGATTAPRLLAAFGTDRSRYPDACSLQKYAGIAPVKEKSGRQLWIHWRWNAPKFLRQTFVEWAGQSVPKCAWAKAYYQQQRAAGKHHQATLRALAFKWIRILWRCWQDRVPYDEARYLASLRQQNSPLCTRLAIT

SEQ ID NO: 243241 - protein, 313 aa, unidentified
MNAEKKYLGIDVSKNSICAFLYPTKELWNIKNEPQEISKWVKTLPEDIELATMEATGKLHNLVAAQLDKAGIPISIINPRQIRSFANSMGKLAKTDKIDAKIIAMYGKAFDPDPQKLPDEMESALKELVIRRLQIVDIIVAEKNHLSSTENELVKKDIDINIQFLKKRLKDIESQIKTMIKDSPVWRDKVELLTSVIGVGKITAFIIIATFPELGNFTGKKAASLGGVAPMTRKSGKWNGKSFTQGGRKHIRSSLYMASLSAIRFNPVIREFYQRLIANGKPFMVAITACMRKLLTILNALARDSTKWRFAKI

SEQ ID NO: 243242 - protein, 354 aa, unidentified
MPFEEIILGVDTHKDVHVAAVISTVGALLGTRDFPATVAGYRALLTWARTFGTVLRAGVEGTASYGAALNRMLNREDVTVIEVNRPDRVDRRRRGKTDATDAEAAARAVLSGRATAIAKAGDGPVEMARMFKLAKSSAVKSRTQAINQLKAVLVGADPALREQLSGLSTPLLVRACAALEVTDPTTDTSQAARHTLRLLAERITLLTKEIDDLDTRLTAVLATHAPDLLARNGVGPDTGATLLMAAGDNPDRLRSEAAFAALCGVSPVEASSGKTQRRRLNRGGNRQANPALHRITLARLRWDLTTRAYVERRVRDGKTRREAIRCLKRYIARELYSLLTTPASRPPSSALTAA

SEQ ID NO: 243243 - protein, 344 aa, unidentified
MDQYAGIDVSLECSSVCVVDANGKIVRETKVASEPEALIGWFGSLGGGLARIGLEAGPLSQWLYAAMKKAGLAVELLETRHVSDAFKAMPVKSDRNDARNIAQLMRLGWFRPVHCKSITAQEIRAMLTARKLVQSKLQDLENSLRGILRGFGLKVGKTTRTNFAGRIEELVKGHPDLQTIGEALLRVRTVLLAEFNGFEKHVRATSRLCEKARLLMSTPAVGPIVSLTFACAIDDPSRFTSSKQVGPHFGLTPKKYQSGQTDYTGRISKHGDASVREALYEAAHIMLTKPIKGCSELKSWAMRIARRAGINKAKVALARKLAVVMLRMLKDNVPFNPVAKAATA

SEQ ID NO: 243244 - protein, 349 aa, unidentified
MEQIIRIGMDTSKNVFQLHGVNANEQPVLRKKLSRREMVKFFEKTPPTTVALEACGGSHHWARLLSSFGHEVKLIAPQLAKPYVKRGKNDAADAEALCEAMSRPTMRFVPVKTADQQAALMLVGVRERLIRNRTQLANTIRGFAMEFGVTAARGICRIEPLLERIATDQSMPELARELFAMQGEEYRELLAEIKIVDEQLMALHRADECSKRLAEIPGVGPIGASLLMLKTPDPTMFKSGRDFAAWIGLTPKDHSTAGKVRLGVITRAGDEMLRSVLVAGATAVLQPIRTGRSKNASPWLLELLKRKKPKLVAVALANKIARIAWKLMVSGEAYRRQPQDIPQAAGLAA

SEQ ID NO: 243245 - protein, 392 aa, unidentified
MHISVGIDIAKEAHWVTAIDADGVVRIDRKLDNTPGAIAALVADLTELGGSVRIGLDVVGGIAGLAEAMLAEAGFALVHVPGLAVNRARQGTVGGEHKSDPRDARVIAEQVRTRQDLRPLEPATDLDLELRLLVGRRRDLVEAQTQRLARLHDLLVGIFPGLERGLDLTTKGPLVLLSKFVTPAELRAAGKKRRVRHLKAAGGLPNVGALADRALAAAAEQTIAVPAERMSARLIKELAGEALATRTRLANLDHELKDLLDRHPDAALIRSLPGMGAVLTAELIAEAGSLARFRSADALAAAAGIAPVLRQSGKVRFLRRPAGGNKGLKRVFYQSAFCSLGHPDSRAFYDRKRRQGKRHHQAVIALARRRINVLWAMLNNRQPFQQNFKLAA

SEQ ID NO: 243246 - protein, 356 aa, unidentified
MTNSTKYIGMDVHKESISIAVRNTAGKIVMESVIETKTSMILEFVEGLRGDVHVTFEEGTWSAWLHDLLKPRVTRLVVCDPRRNALLQEGNQNDRVDARKLAELLQNNQLRSVYHGDHGLRALKELVRSYLTITKDLSRVMTRVKAIYRSWAIPCSGKQVYSSRRRAEWLGKIQEPGVRRRAEFYYQQLDALRTLRQEVRRDLLAESKKHKIWKQLCQIPSIGPIRAAMLLGILQTAHRFRTKRQLWTYSGLGIEVHSSADHHTVKGQLERKKKHIEIRGLNENCNHDLKNLFKGAAVVAATKPGPFEEFYAALLAKGMRPEMARLTLARKIATIVLIVWKRGVCFDANHLKPQTA

SEQ ID NO: 243247 - protein, 389 aa, unidentified
MKIFVGIDIAKLNHFAAAISSDGEILIEPFKFTNDADGFQLLVSKLESFDKNSIIIGLESTAHYGDNLVRYLVAEFYQVCVLNPIKTCQMRKNNVRKTKTDKVDTFVIAKTLMMQDDLRFITFFDLDMMDLKALGRFRQKTIKQRTRLKIQLTTYVDQVFPEIQYFFKSGLHQHAVYALLKEAPSPKEVASMHMTHLANLLKVNSHGHFTKELAKELRVLAQKSVGANDSAISIQITQTIQQIELLDSQLEKIEAEMTDIMKFNDSVIMTIPGIGYINGGMILGEIGDIHRFSNPNKLLAFAGLDPSVYQSGNFQAKTTRMSKRGSRVLRYALVNAAWNVVRNNATFKAYYDAKRAEGRSHYNALGHCAGKLVRVIWKMLTDEVEFNLE

SEQ ID NO: 243248 - protein, 416 aa, unidentified
MPEGEGPVRYYLGVDWADQTHAVWVVDERGTKITARTVPHTAEGLSEWGRELDEWRAHGLELWAAIERPEGRVVDFLLDHGVLVYPVNPKALDRARDRFRQSAAKSDPFDARVLAAFLRTDHPRLRPLQPSSDAAQELKLLTEDCQRQIRQQTRLVNQLTATLKAYYPRGLEVAELTTALAREFLQAYPTPAAVATLTERQWQRWARAHRLSEARTQELWAVLQRPQLPVPAHVVRAKARLMQALVTELGTVVAVVGEYRQAVEDFFAAMPAAQWIRTLPIGEHGVTAPTLWARLGDAPGRWESFQHLQAQAGSVPVTVKSGKQKVVHFRFACDKALRYVVDQVAFLSLRSSEWARAYYDAQRARGHSHREALRPLGAKWLKIIFVLWERQVPYDESYHLATMARQQLRQRSKKIA

SEQ ID NO: 243249 - protein, 341 aa, unidentified
MMIIGCDFHPRFQQIAFVDQDTGECGERRLSHPEEAEQFYRSLVGKQVRIGAEATGNFRWFRQLMQELGHEFLLGDPSAIRAASPRRQKTDKRDARHILNMLVEDRFPAVWQPPVENEDLRQLLLHRCRMVRFRARIKNQLDSMAKNEGLLSKRVWCAMRRRQIEELPLSGWNVERRKDLLFLLEQLNKRIGPLDEAVLKAAEDNLEARRLMTHPGVGPVVSLFYVLTIGDWQRFPRGKQVASYLGLIPAEESSSDKRRLGHISKQGNTLVRWLLVEAASKAQRYDPSWHRQYVRLSMNKHHGVAKVAIAHKLAVRLYWMLRSGQDYKQVMERGSHAGQSV

SEQ ID NO: 243250 - protein, 401 aa, unidentified
MTAIYTPQQLEIGIDVGSLNHAIAISDGAGNIIKEFEITHSQKSFDKFFKIIEDEATKRDATVSIAMEGYNGWARPFDTQILAKGYRLYNVNNMKLARFKEIFPASAKTDSIDARKIVELFSLRKHLPVAKDVLQEIKTSDDVNEKLKKLTRRRKQLVVERVAIANRFSSDLQAVAPDLKAITKSTDNLWFLRFITLKEDIRDLKRVTTKQIEKIKYLSSKNLDIIKEWQKEATFSEATDYVASMIYDDAIRLLELQTKTKELHKEIALLNENSKIARVIQTIPGFATITAGELAGEIGTISRFKSEASLALYLGMTNLDNSSGKQTGTKRSISTNRHAKMAMITATMKHAQHTEQSKKYLEKKISEGKKYQQAIRSLGRNLVRVIWGMIQGDRIYEIREK

SEQ ID NO: 243251 - protein, 316 aa, unidentified
MNTQDHNEINIGIDTGQAMLDIYIRPIGEYQSFENNAEGIRAAIRFVRKFKPTRVLIEATGRLEMAFFCAANKADLPVCVCNPIQVRQFAQSCGRLAKTDKLDAQDIAYYGDIMKPELSRLKPEKLRLLSDLLTVRGQCLDMSTMQKNRLQRMPKTVHKPIRNVLKSIAKEIAGIDQQLDQLVAEIPHYQARVDQLTSVKGVGKVLAYTLLSDLPELGNLNRKEIAALVGVAPMNRDSGKHKGKRKIRAGRRKVRTVLFVSMLSAIQCHPTLKPMYQRLVAAGKPKKVAIIACMRKQLTILNTMVKNGTYWDENMA

SEQ ID NO: 243252 - protein, 420 aa, unidentified
MEELTEEPAELVERVAALDIGKASLVCCVRVPHESRPRARRQEVRTYGTVTPALLELRDWLVCQGVTRVVMEATSAYWKPPFYLLEDDIECWVVNARDVKNVPGRPKTDKIDAVWLCKLAERGMLRPSFIPARPQRQLRDLTRYRRTLTQERTREKQRAEKLLEDAQVKLSSVISDIFGVSGRDMLAALIAGQRDPYALADLARKRMRAKTGVLRQALTGHFTEHHAFLLGMMLDRTDALTTQIDALTARIEQAIAPFAAQVAQLDEIPGVGVITAQEILAETGTDMTRFPTPGHLVSWAKFAPKARQSAGRSKAAATGKGNPWLGGTIGEAAAGAARTSTFLAARYKRVVKRRGKKRALVAVGNSILTICWHLLSDPGAHFTDLGPDWHDRLAPQRRKRQLIAELERLSGKKVTLHDAA

SEQ ID NO: 243253 - protein, 394 aa, unidentified
MISLGIDIGKNKHVFTIVDLETGNAIGKPVTIQNNIDGFKKLEETIKSYSKDNIKIGMEDTGHYHFNLLWYLIDKGYDVYLINPVTTDADRKLTGNITKNDELDSKQIAQILGDAEWKHLYRRVDKSFFELNEMKSLTRLHSDLTEALNPVGNKIQKSIDMLFPEFNSLFSSHYGKTYMNILKIFKSAANIAKADIKEIREVMNQSGRGRRVRFSAEDLKALAQRSVAMPNIGEEYALESHLNQYMVLNEELAKVDKKIEEFSKKTNSPILTIPGISHTSCTTILAEIRSIGNFNSVSKLTKYIGVAPMHYESSQYEQKHSAITKKGNKYLRKMLYQVITPVINNNKVFKDFYDKKISEGKSHRCAQGHCVRKLIRILFHILTTGELFDSTKLV

SEQ ID NO: 243254 - protein, 344 aa, unidentified
MKITTIGLDLAKNVFQVHGIDAAGEVVVLRALRRGQVLSFFRKLEPCLVGMEACGTSHYWARELGSLGHEVKLMPPAYVKPYVKRGKTDAGDAEAICEAVTRPTMRFVAVKSADQQSVVMLHRTRELLVRQRTQLVNIIRGQLAEFGVTLAKGIQHALKFVRQLLDGQVLDIPDLGVKVVMVLAEQVRQLQIRIGELEKELKRWFRADRVAQDLATIPGIGFITASALSSTVTDPHQFTSGRQFAAWLGLTPRANSSGGKERQGRISKMGDQHIRHLLVSGMTSQLRWARRHPDAHPWVASLLARKPAKLVAVAMANKAARIAWVVMTRGEVYRARHPSTQLTA

SEQ ID NO: 243255 - protein, 335 aa, unidentified
MKKIYVGIDISKEKCNLCYRSGLEIVREEECANDVKALKNAFKAALKALGASMDEVLVCAEYTGRYIYPLTVGCQELGIFLWMDDPTRIKNSMGLTRGKNDAIDAARIAEYAYRYSDKAVRYCIPDAALVSMKSLLADREFLLIDKKRYQSQLTDQKKYMAPGDFKHKNSRWKKVIRSIDEQIAAIDAEIESLIAADPVLTRQKELLKSIDGIGDRIAINMIAITGGFTRFQNARQFCSFAGLTPYKYDSGTSVRSKAKISKRANQTMKALLHLAAVCAATHMKDGEYKDYFERKTGDGKHVMCVLNVIRAKLVHRMFSVIKRDSEYTKEYKPAC

SEQ ID NO: 243256 - protein, 355 aa, unidentified
MTAKATCLVGLDVHARQTHAALLDSRTGEINVRRLIGMPEAAVLPYLEHLGGGVLAAYEAGPTGFGLAREANKRGLDVRVVAPGSIPKGAGDRVKTDRRDAVRLVRLLAAGELRFAFVPTVEDEALRDLIRCIEDLRGDLMRARHRLSKFLLRRGRRYEEKSAWGSTHLRWLKAIGFDDGCSQATFVDYLASVQLLGGRRATLLEVLEAQVPGCSHAPTIARMRCFRGIDTLSAAGLCAEVGSFERFPKPGLLSGFLGIVPSERTSDTKRRQGAITKAGPGHAHQYRRRPAIGETLARRQQGQDPRIIEIAWRAQRRLYQRWQHLREARRKPAGVVAIAVARELAGFLWEAAVLD

SEQ ID NO: 243257 - protein, 367 aa, unidentified
MLGGRPPNGIGVPSWPVLNQGSKGTVRMNTTMIGLDIAKTVFQVYGEDAHGQPVLSKRLGRGAVEPFFAKLPPATIGIEACGSSHHWARRLQALGHAVRLIPAAYVRPFVKRNKTDARDAVAICEAMQRPDMRFVPIKSIEQQAARGIETARELLVRQRTQLMNAMRGLSAEFGIVVAQGSTGFAALCARIAAGDPALPAALLPSLRLMRQQWQALNDAVDAQQAQLVARAKADPVMRLLMGVPGIGPLTAHAIVAAIGDGRQFGSARDFAAWAGLTPREQQSANKRRLGHISRQGDPGVRRLLTLGASAVLRQVRAEPRRGTAWLRGILTRRPVKVAVVAQAAKTARIAWAMLRSGEAYRVAAPAI

SEQ ID NO: 243258 - protein, 368 aa, unidentified
MIVRTTTYERSTLVNDEKYIGLDVHQATIVVAVMDSTGKLVMESIVETEAATILQFFAGLRGTLSVTFEEGTWSVWLYDLLNPHVDKLVVCNPRKNALLKDGNKSDRIDARKLAELLRGNQLKPVYHGETGVRMLRELSRSYLTIVKDLSRVMNRLKAVYRSWAIPCAGRDVYYRRHRAQWLAKIREAGVRRRAERLYEQLDMLQHLRQQARRELLAEGRKHAITAKLRQIPYLGPIRSVLAVALMQTPHRFRSKRQLWAYSGLALETRISAEYRLVEGQVRRSKKLLSIRGLNKDHNHDLKGLFKGAATMASVRPGPFQDFYQAALAKGIKPTMARLTLARKIAAITLTLWKKGENFDAEKLKSQAA

SEQ ID NO: 243259 - protein, 338 aa, unidentified
MNIVFLGIDLAKNVFQLCGLNQAGKPVYTKRTGRKELLQTLANIPACLIGIEASTGAFYWQREFEKLGHKVKVISPQYVKPFVRGQKNDGNDAQAIAVALMQPTMQFVPPKSPEQQDIQALHRARQRIVNHRTATVCQIRGLLLDRGIPIGSAVSRARRAIPLILEDAENGLSSRMRRTIAELYDLFNDLGRRIHFFDKEIETVFRQSEACQRIAKVKGIGPETATAVVAAIGKGTEFKNGRHFAAWLGLVPRQHSSGDRQVLMNMTKKGDRHLRTLFIHGARAVVRVATNNNDGHMNQWINQLKERRGFNKTTVAVANKNARIIWSMLRNDTGYQVV

SEQ ID NO: 243260 - protein, 332 aa, unidentified
MDNFYFIGVDVSKKKLDFCVLFEGKVLREEQVSNHQQAVARLIGELKNDLEMDNEQFLICAEHTGQYTFPLVCACKSVECKLWLENPSQIKYSSGMQRGKNDKVDAKRIAIYASRFGDKVKYYDRPTEEIERLKQLERERALYVTDLAKYKGQMYDQKDFMPAALYRKKTKRMKGLIQELQAAIDAITAEMEKIIGSTEVLARQMELLMSIDGVGKVVALNVIIETEAFSRFDNPRKFCCHAGVAPFSYTSGSSQHSKNKVSHRANKNIKKRLHMAAVSVTHRKEGELKAYYMRKVEEGKNKMSVINALRAKIVARMFAVIKRNEVYTPIYS

SEQ ID NO: 243261 - protein, 343 aa, unidentified
MEVAIGIDSHKGTLAAASVDALGRVIDVREFNNDPKGHRSLLQWVNRQGRPRRIGIEGALHYGSAAASRLLGQGEDVREVSPSLTHVERCRRSKGKSDPIDAVAIARVVAAEDTLPSARRTALLVDLRLLVDHRDQLVRARTQVANRVHADLVVLHPGYEETVPNLRARQHVARAHSLVVKDRSVRAELVRHRLRDILRLEAEIAEANHRIADRIREVDTTLTQIPGVGPLIAAKILGEVGEVSRIRSKASFALLSGTAPLAASSGQTHRHRLNRRGNRQLNWALHYIALVQSRTTPEAKAYLTRQREAGKSSKEAMRCLKRHLSNVVYRHLLMDGRRLEQAA

SEQ ID NO: 243262 - protein, 429 aa, unidentified
MNYKQNDRLNQLTDETLIIGIDIAKEFHVARAQDIRGIEFGKSIKFNNSLSGYLEFESWINEIKVIEAKEQVIIGMEPTGHYWLNLARYLKAKDYTVVTVNPMHVKKIKELDDNLQTKTDKKDAKIIAQLVKDARYSTPNLLEGEYEELRNAKNLRQVVVKDLNRTKNQIHNWLDRYFPEYKEAYASWESKSFIKIIKKYIFPSVIESISPNQIYEMLPPKMRRGVGLGKIERLVTASKNSIGIKEGLSFAKVEINYLLEKYDGFLEQIEEIDKYVADICSNLAETEKITQIKGIGIVTASGIVAELGDIRNYKTPKQMIKMAGLSLTENSSGKVKGTTSISRRGRKDLRRLLYQVILGMIRTNTAFKEMYIYYTTRRKNQLTGKQAIIALCRKLLRIIHTIIIKDVDYDESKMMSQIKYPYEFLNSAA

SEQ ID NO: 243263 - protein, 357 aa, unidentified
MGKSIQKLSSVTRLGLDLAKKIFQVHAVDANGEIVVARKLARGRLVGFFSELPRCVVAMEACSSAHHWGRKLLALGFEVRLIPPAHVKPYVRRNKNDAVDATAICEAAGRPGQRFVPVRSIENQAELMRHRARELLAGQRTAALNALRGHLAEIGVIAPQGVRHAYDLKRLAVDGFDEYGEVVVPDCVRVALRPLVYQIDALDEAIGAIDEEIAMSVKGDETAKRLMTIPGVGPVTASAIVATIQDMGDFASGREFAAFLGLTPRQSSTGGKPRLGRITKMGDRYLRKLLVVGACATLRHRKGHNDALRLWASGMLERKTVKYKFKLTAVALANKVARIVFVLMTKGGQYDDRPLAA

SEQ ID NO: 243264 - protein, 345 aa, unidentified
MTEAYDGRQVVGMDLHRRRSVLVRMTEDGRKLETVRIENSPAALRAVIARAGNNPRVVVEATYGWYWAVDVLEAAGAEVHLAHPLGVKAFSYRRVKNDERDCADLADLLRLGRLPEAWIAPEPVRALREITRFRHKLVGQRTSCKDQVHAVLAKAGIPVTRSDIFGRGGGIWLDGLPLPQPYAGKIASLRALIAVLDGEIARLEEQAPAMLAGDRGYAAIRQLPGIGPVLGAVIAAEIGDITRFRNPGQLASWAGLTPRHYESDTRVIRGRVSKQGSRMLRWALVEAIQRQPAGTKPRQVKDAIIARRGPDARGIAKTAAARVMLTQVFYGMRDGYIRRAASQAA

SEQ ID NO: 243265 - protein, 421 aa, unidentified
MLGAGIDWAEEFHVAALGSPGEGVIEVVRVAHRPDAVSALVARIAGLEPDPAEVRVVIETRHGLLVEALVRAGYTVLPVNPELVSRRRGPARKKDDAEDARICCLLALDRHAGLKRLIPHGQIAGELRSIARDDERACRDERRLLNRLRADLIVTFPAALAIAGEDPGATRILRLPERWPTARALAAATREEIIEFGRAQRTGYLQRFADKIQAALAEDQFTAPEHLVRAKVDTIRLTARQLLLIDAQRRVWEKRMGELLLGAPGRPAEDQPGNAFPGGEIYLSFPGLGRRLAARIAGEVGEHIEQFTTPNSLQCYAGRAPVTRRSGKRDLVVAHRLACNRYLADAVHKWAFASLRRSAWAREFYDTQRSRGKNHHAALRALGNRWLEVLWHCLTHGVHYDEAVHVANRNQALAAITAPAA

SEQ ID NO: 243266 - protein, 370 aa, unidentified
MTKDTLYVGLDTDSKHIDVALAEPLPQGEVRYWGQIANEPTSVDRLMRRLQKNARQLVVCYEAGPCGYGLYRQLNGMAGVTCQVVAPSMTPRRPGDRVKTNRRDCLSLAKLLRAAELTAIWVPDETHEAMRDLVRARSAMRGDLNRCRQRLGGFLLRQGIRYPAGKPWTKRHRRWLGQLEFVAATHRLMFAELLDALDQTQARHDRLIDHIRELVPHWSLAWLVDAIQALRGYQLINAVTVAAEIGDPRRFSSPRPLMAFVGTVPSEHSTGDSIRRGGITKTGNGRARKAIIEAAWTYTRPIRAAAPPTHHAPAVRAIAEKARHRLSGRYRRLRARGKLQTVAVTAIARESLGFIWAIAQAAAPEATRQR

SEQ ID NO: 243267 - protein, 321 aa, unidentified
MNKEQNYIGVDISKDNLDIAVYGSKNRWRFTNNMPGIKQAIDLFKNMLPVLVIFEATGGLELSFWAALTEADIDAVLVNPRQIRDFAKAGGKLAKTDTLDAEIIAHYGQAMQPKPQPFPDTQDLKELVARRNQIVEMISAEKNRFKAARSADIKQDITVNIEWLESRLKNLDQDLKKSIKENPVLQEKDQLLRSTPGVGYALSATLLACLPELGKLNRHQVAALVGVAPLNRDSGLMKGKRAVWGGRGRVRKALYMATLVATRYNPVISSFYHRLCDGIKVKKLALIACMRKLLTILNSMLKTHSYWNRQLIQEPPILMNN

SEQ ID NO: 243268 - protein, 310 aa, unidentified
MTWIGIDVAKKKFDVFVRPSSESWTCTNDEVGIAACVQRLREANPQLVVLEATGGWEVSLAAALALAKVPVAVVNPRQVRSFARAMNRLAKTDAIDAAVLAQFAEVVKPEPRGVNDEATEALSELMTRRRQVIDMTVAEKNRLGAARNEGVRQRISHHLHVLREELKSIDEDLKQQIQQSPIWREKDALLQSVPGVGPTVSRTLLAELPELGRLNRKQIAALVGLAPFNRDSGTLKGKRTIWGGRSRVRTTLYMAAVVAMRFNPIISRFYRSLRDAGKPAKLALTACMRKLIVILNAMLRDGATWSPEVA

SEQ ID NO: 243269 - protein, 497 aa, unidentified
MPSTDVAAKATIVGAMKRKSIFKNNSQNIDAAFIEAGLPEKVLLVPLDFAKSTHYACFCDGLGRYLRQAFTVKNTKEGLDYLVERIEATRKSRAIGNKRHVIIGGEDSASYTRNFMQRLNELGYLAVRLSSCEVHRQAESVDSSTDRTALRAIAKTMLNRDARPIDGHDVYTELRGLTRQRRRIVHLSTAVKNRIHTHADRLFPGFLAKDSVLTPFSRASLELMSKPAFGAVSISQKNEKALGQLLKRAGTARSAEIAPALKQQARDSIPADKDAARLSAYILAGELQLFRSLASNLEALDQGCARLLARTPEAFIASIKGIGITLAASICAESGSLTQITRTDGLNAYAGIVPKVKQTGGPESEAKIRGRRRSFNRVLKDYTMQAGNHLYLHGPEELMQDAVRRKLAGKAVDTAMARRFIRIARALCKNHLTYLPSHLRGQNASSRERAQYILDTWPALLVKWKRLGLHEEAFAAENPLGQWRLIMQEIHDIDLPL

SEQ ID NO: 243270 - protein, 405 aa, unidentified
MAAVMIGVDPHKGSHTAMAIGADEGSLGQVRVRACAAQAQQLLAWAAAWPERTWAVEGAGGLGHLLAQQLVSAGERVLDVQPKLAARVRLLAAGAVNKNDPNDARSVAIVALRSAACLPVRPDDHAAVLKIWAKRHRDLSRARTQVACRLHAVLCELVPGGVSKEIYAAHAAKIVEETEPGGAVQQARLELAAEFVADLRRIDAQLLETRKKLAVAVRASGTTLTEVFGIGPVIAAMVIGDVRGVSRFAGRDRFAAYNGTAPIEVSSGNRIIYRLSLRGNRRLNHAIHMAAITQIRYKHSEGRVYYDKKLAEGKTPKEALRALKRQISDAIYKHLKADAARAAAAGAQGPGGQPGNDSVASAAGSHPEHQLFGQATPGPATTLRHPADQQKRASSRARKKTARTT

SEQ ID NO: 243271 - protein, 358 aa, unidentified
MDNVKSSKLDCTGQPIYVGLDVHKKSWSVSVFSRYGEYKSFTQPPQVDTLVNYLKRHFPGGEYHSVYEAGYCGFWIHDQLKERGINCTVVNPADVPTKQKEEQHKRDRVDCRKLARGLCNGEMEGIYVPAPWMREDRTLVRTRQAFVKKRTRCKNQIKGMLLFYGIHLTDEQTFAPWSGRFIKWIESIRMERDSGNTALKAHLEELAYLRQLIAQVNRAILKLARSEEYATPVTVLKSAPGVSTLTAMILLTELCDMARFASLDSLCNYVGLIPAIKSSGETEYVRGITPRRNAHLRWILIEASWVAVRKDPALMMAFAQYCKMMGKNRAIVKIARKLLNRIRYILKHQTPYVPCVTE

SEQ ID NO: 243272 - protein, 360 aa, unidentified
MSGTMSWAAMDVHARSTCATSMDVLSGELSRQRFDTGAVEPVVGWLVSLPAPVRCCYEAGPTGYGLYRAAVAAGIDCQVIAPSKTPRASGDRHKSDRRDADLLLRQLMAGALTPVVVPSATFEAARDLARAREQVRVDLMRCRHRLSKLLLRHGRVWDRSTWTKVHREWLGSQTFQHQNTELAFIDNLAACDGLTARRQVLDERLSHVATDPEFWPLVRRLRAFRGIDTLSALILVLEVANFDRFPRAVQLGSWLGLVPSREQSGESDRNGSITKTGSKYARRILVEAAWHYARPPRIGKTLYERQEGLPDHVLQIARRAQTRLYRVHRRMRERKKPGNVITVACARELACFLWAAATAP

SEQ ID NO: 243273 - protein, 424 aa, unidentified
MTMRRRAWVGIDVGKTSHHACAIDETGKVVWNQKVSNEQRAIEQLVTRACKGAEQVQWAIDLTSPMALMLITVLLCAEQSVVYVPGRTVNTMTHAFRGEGKTDAKDARVIAETARLRNDLSNVVLPDELVVELTQLTGYRADLMADWVRGINRPRALLGSIFPGLEAAFDYSTRTPLILVSGLCTPAEIRAAGIDGMTAFLVDNHAWPTGIVKSAATAAALANEQPLALPGEAGTAALIKRLARKLLELDREIKDIDKTITERFRDHPYARIIESLPGFGPGLGAEFLVVTRGDLASFATAGRLASYAGLVPVPKDSGRITGNLRRPKRYNRRLRRVFYLAALSSLRADGPSRRFYDRKRAERLIHTQALLALARRLIDVLWALLRDDRKFTPRSRSQRLQRLDLIIESHFFRRPRPIPLAPSR

SEQ ID NO: 243274 - protein, 344 aa, unidentified
MKHYAGLDVSVKETAICIVDENGRICREAKVVSHPEDLSKALTGTGFRIERIGLEAGPLSQWLFEGMARAGLPVICVETRHTKAFLKAQINKSDRNDARGIAQMMRVNLYRQVHVKTLASQKRRALLRARKLLQEKAIAIENDIRGLLRNFGLKVGIVGAAKFEARIKELIEDMPDLEEFIDVLLAARRKLRDSFSRLHGKILELVGNDAACKRLMTIPGVGPVTALAFISTIDIPARFRSSRSVGPALGLTPVLKQSGESERVGRVSLCGDGMMRGLLYEAAQSMLTRVKKWSWLKAWAMTVARRGGLKKAVVALARRIAVIMHRIWIDGSEFRWSREGAAEI

SEQ ID NO: 243275 - protein, 370 aa, unidentified
MKFELTKILITHKSRTMGKVKELSFNGETIYCGIDVHKTNWKVNCIMGKIDLVGFSQDPDPEQFKKYMDKNYPGAEIKAVYEAGFCGFGVQRSLSKSGINCIVVNAADVPTSDKEKKRKDDKRDARKLSRELQDGSLHPIYIPSIEMEHFRSLVRQRHRLAQDQTRCKNRIKSMLMFSGIKLSDIKERWSMKMIKELKEMKCETNGLRLALNYTIEEYLQIRKLLKDSTLAIRKLSKEEPFKSVQEYLQSIPGIGLITGMVIQTEIQDINRFKTLDRFCDYAGFVPDISSSNDNTVVRGITHRCNEFLREALIESSWTMIRKDPAMLMKYNEYTKRMKPSKAIVRICKHLLSRIRYVWKNQKKYELGIVK

SEQ ID NO: 243276 - protein, 341 aa, unidentified
MSVIAPVFSFDLNGYTGSGLALQDKAEKNLMQITIGIDISKETLDAYRFPDNHHIQVANGRAGHKTLVRWIGKENGSLVVFEATGAYHRNFEAALAANGTAFAKVNPRQARRFAEATGRLAKTDRVDAVMLAKMGAILGLTAHEPKTEALHILRELITARRALMKDKVAAKTRLQITRQTLLKNQINARLNQIKIQIRQIDAAIAEKVAQDETLSNKLAILISIPGIAETTAFSMLIEMPELGTLEGKQAASLAGLAPMSRQSGKWQGKERIQGGRAFLRRAIYMPALVATRYNPGLKAKYDQLIRAGKSGKVALTAIMRKLVVMANALLRDGRTWSELRP

SEQ ID NO: 243277 - protein, 340 aa, unidentified
MYYTGIDLHKKTSFITTIDAGGKIVTRANLQNVEEDILAYFANLGEETKIVIESMASWYWLYDLLTGEGFEVVISNPVKTKAIASAKIKNDKLDSHMLAQLLRADLISTVHVSSLETRKLKELLRHRSKLVRDATRMKNRIHMLLMKNNLRSPFSDLFGVKGLRYLKEIDLPDYHRQHVETYLLLYEKLQEQIEPLTKTVRALAKENHTAQLLMTIPGIGPITAMFIIAEVDDISRFRSYRNLASYAGLVPSLDASAGKEKRGRITKQGSRYLRTALVEAAQAAARMQNCRLRVFFRRRIVKAGYQKAIVATAHKIVQYAFYVWKNQTPYQETYPVCVTR

SEQ ID NO: 243278 - protein, 338 aa, unidentified
MSLTTLGIDIAKNVFHVHGRDAAGRPVFQKRFSRAALIKFMANLSRCRVGMEVCGGANYWSRTLQALGHEVRLISPQFVKPYVKSNKNDFNDAEAICEAVLRPTMRFVTPKTVAQQDLQNMHRVRRRLIGARTALVNQIRGLLAEYGVVVPKQVSPLRRALPRLIEDLTNDLTPLARTTFTALYEELRAVDARVTTVDRELKEYCAQDERCQRLTVIEGIGPLTATAMIAAVADPRVFKNGRHLAAWLGLVPRQCSSGGKSRLLGISKRGDRYVRTLLIHGARAVVVRAGAKPDARSRWIAEKRRQRGTNRACVAVANKNARIIWALLAHDTCYQKAA

SEQ ID NO: 243279 - protein, 411 aa, unidentified
MLVAGIDIGAESHHVAVVDRAEAVVVKATAFAENAAGYQELFALLARAGARGGADLPLAAASAEQERTLVVMEATGHYWQNLFAALVAQGYAVALVNPLRTHRFAGEELARTKTDSIDCLQLARFGAQKRPAVTCLPEAAVGELRELVRLRARLMQDVVDRVNQLHRLVDLGFPEFTRYLKNLNTQLATAILRQYPTAAAFRGLSYKRLARLSYDGRHRVGEELARQLIAAAAVSVGSQHTTAHQTGVRYACEDLETLRQRLKRLDGDITAGLQQHQVGKLLTTIAGIGDNTAAMLIAELGDPARFHSAASLAAYVGLCPGHRHSGKHQPKSSSLTPIGNRRIRQALWMPTLSAATCSNPWLMAFYRRLIERGKPHKARAHRRHAQTARSDLLSRQAPPPLRAGSPLSTIG

SEQ ID NO: 243280 - protein, 358 aa, unidentified
MAGKVTETAVVGGVDTHKDLHVAAVVDQNNKVLGTQFFSTTRQGYRQMLAWMTSFGALKRIGVECTGTYGSGLLRYLQNAGLDVLEVTAPDRMERRKRGKSDTIDAECAAHAAFSGIRTVTPKTRNGMIESLRVLKTCRKTAISARRVALQIIHSNIISAPDELREQLRNMTRMQLIRTLGSWRPDASEYRNVTNVYRISLKSLARRYLELHDEIADLDVMIAAIVDELAPELIKRNAIGYESASQLLITAGDNPQRLRSESGFAALCGVSPVPVSSGKTNRYRLNRGGDRAANSALHIIAIGRLRTDDKTKEYVARRVAEGHTKMEAIRCLKRYISREVYTLLRNQNRQINSIPITA

SEQ ID NO: 243281 - protein, 353 aa, unidentified
MRTYYVGMDVHRASIVIVVLNGAGKVVMQSVIETGAERVRGFLKQLRGKVYVTFEEGTQANWLHEVVRPLVTEVVVCDPRHNKLLQSGNKNDRVDAQKLAELLRNRSLKAVYHGDHGVRTLKELVRTYDCLVSDTTRVMNRLKAIFRGRAIACGGHDIYRQDRRKQWLEKLRDPGAKQRAGFLYEQLAALKPLRHKAKREMVKEVRRQTAYGWLMSVPKLGAVSVAQLIAVVGTPHRFRSKHQFWTYVGLAVVTRSTADHEVVNGVLRRSKRPVSTRGLNRNHNHLLKRVFKNAATSACHSGPFKAGYDVRVKQGMAPSLARLTIARQLAATTLAIWKRGEQFDPERKKQQVA

SEQ ID NO: 243282 - protein, 361 aa, unidentified
MKRHPQYFISKSPRRGSRVGTTIGIDLGDVWSHYCTINEEGEVIDRGRFRTNPSGVDKRFRDLEPIRIAMEAGTHSIWISEQLRDLGHEVIVANVRELRAISHSDRKSDSVDAEKLARYARLDPEILRPIAHRTVAQQETLTLIRARDVLVRLRTGAVNSVRGLAKPCGYRLPASSTLCFAKRCLAMMPPGLSVALSPLLHQIGGMTVKIKEYDSAIKKLTETEYPETQALIKVYGVGNLTALTYVLTLGTKERFRHSRDVGCYLGLRPKRSQSGDSDPQLGITKAGNGYLRQLLVECANHVIGPHGKDSSLRRWGLSLGARGGSHTRRRAVVAVARKLAVLLHRIWITQEAYVPFYAVAA

SEQ ID NO: 243283 - protein, 345 aa, unidentified
MELHTIGIDLGKTVFHLVGLNPHGEVVVRKKFSRTQLLRFTTNVHVELIGMEACGGAHFLGRALREQGHEVRLIPAQYVKPYVKTNKSDYIDAEAIAEAVARPTMRFVPIKTDDQLDLQSLHRVRERWVMRRTAVINQIRGLLLERGITLRKGRCHVGAALPGILEDADAKLSGALRMLLAQLKLELDHLDLRIDEADALIKKTACENEACQRLMAIPGIGPVTATAVIAAIGNGGAFRKGREFAAWMGVVPREHSTGGKQKLLGISKRGNSYLRRLFVQGARAVMQQRTKQSSGLSAWLAQLTSRSHRNVAGVALANKMARMAWAVLAKNEQYRPPVLADVAAA

SEQ ID NO: 243284 - protein, 325 aa, unidentified
MKSQNLVCGIDVSRNTLDVYYNDNAGKEYYLQVCNDRKGHLQLINELGVIRTYLMESSGPYYLRLAFLLKEKGADVRVENPIVIKRFIQMQMERNKSDRKDAKWIYRFGQQCEASEWKMPSDQQLQCSETLSAIDLYKRQITMIGNQLESLAQIPCREKTVIKSLKQMQSKLVTEVEKLELRVDDILKQWQGEQLKNLKTVPGLGKRAVALLIVYTDGFRKIQNHRQLTALCGLAPREYMSGTSVRGRKGICKMGNGHLRNVLYMCSMSAIKHNKACKDLYERLRAKGKRGKVALIAVCNKLLKQAFAIATRGTQYQADYRSSLS

SEQ ID NO: 243285 - protein, 338 aa, unidentified
MDTYAGIDLHSSNSFVGVINGEDQRLYGKRHSNRLDDILRALDPFQDSLKGVVVESTFNWYWLVDGLQEHGYAVHLANPSAIQQYEGLKHTDDKWDSFWLAHMYRLGILPEGYIYPKEHRAVRDLLRRRLLFVKHSTSHILSLQSMINRNLGLKMSNNEIKKLKPEDIEGLFDCPNLMFMANNSLAAIKFLKKISLDIEKKVKSQVKMREEFLKLLTIPGIGNILGLTISLEVGDIGRFVKVGDYSSYCRCVESKRLSNGKKKGENNKKNGNRYLAWAYVEAAQFCRRFCVKAQSFYQSKEAKKNSIVAIKALSNKLSKASYYIMRDQVDFDEEKLFG

SEQ ID NO: 243286 - protein, 363 aa, unidentified
MRDPRTVAVGLDVHKTSVRLAAVRADELLGEVTLPYDHDRVEREVRRWPGARVAYEAGPTGFGLYRYLVAAGVDCEVVAPGLVPVRPGDRVKTDKRDAKRLAVLHAGGLLTAIFVPSPELEAVRDLVRAREDARLDRMRARHRLGKFVLRHDRRMPTTCWGVTRRAWLGRQVFELPGQQQAFDDYLFAVDQIDRRVGALEGEIARIAAEGPHTELIARLRCVRGIDTLTAVGLVCEAGDFDRFKTAEQFMSFVGLVPSERSSGEGRRQGSITKAGSAHARRLLVEAAWNSRRRPTVGYELARRQRDQDPAVLERAWRCQQRLHHRWRRMAGRGKPHQKIVVACARELAGFVWAIATDQPLRTA

SEQ ID NO: 243287 - protein, 391 aa, unidentified
MTYFIGLDIAKHKHDCFIMNEYGEVIRDSFSFTNDAIGFNTLLDVLKTLDPAQEKRIGLEATGHYGNSLKIFLEENEYSFMEINPILIARFAKATTLRRTKTDKVDARLIALFLSACDYKPYPLKSYHVRTMKSLCRMRESLVKERSLHLVKITNVLDLTFPEFKPFFKGSLKSSTAMYLLENYGVPSKIARMNIDSYNKMSSALRKTISYAKFLELKKLARETVGKEDAILTFELESYLELFKELDSKINKVESLILKEYGETNSHIHTIPGIGMISAAGIFSEVGNFDKFNNADQLLAFAGLDPSRCQSGESDYIGHMVKNGSSYLRKYLMNCAEMQLVHNPKMYEYYLKKRNEGKAHRVALSHVARRLVRIIFSLEKNDTDFDMNKMR

SEQ ID NO: 243288 - protein, 399 aa, unidentified
MKIYDKVAQVGLDVHRKFSSASLRDASGKVIARERLDHVDRQKLRERITQWPRGTPVILEATFGWGWLSDELHLLEMQPHLASSRKVAAWRTGRGIAKSNKIDADLLSELWNEKPVFERGRMKRWWEVWLAPQEVRDPRELLRHRMTLVQTQTQVKNRIHATLHRHGIVTELTDLFGVQGRRFLSLLTEDKTLSLSGRQTLREDLILLDSLRRLIARATRRFRATMKRSEIGQRLMTVPGISTVLGYTLVAEIGQIERFTSSRCLLQYSLLAPQADDSGEDHDGKPIGRRIGHAGRTTLQWAFIQAAHSAVQKDPFFRGIFNRRTNGGKQDRGRGYITVANRMCRIVFSMWKNKQDYQEVPPPRPGNKRHKELISSGSGPALHRIGHEPQAVQAREATS

SEQ ID NO: 243289 - protein, 348 aa, unidentified
MILIGVDPHKSTHTATAVDPVSNQQRGSLKIEATLAEYRRLLTWARRWPQRTWVVENANGLGRHLAQWLIARGESVADVPPSATSRIRRLTRGGGRKNDRIDAAATATAYVHGDGREVEAEGHTTALALLDERRVNLTQARVRAVNQLHAVLRDLLPGGAPPQLSADQAATLLRTVRPAGDVEQVRRHLARDLVAEIRALDKRLAENAAHMEELVGSSGSTLTNTPGVGPVLAARLVGRVGRASRFATAAAFANYTGAAPIEIASADKARHRLSRSGDRQLNSVLHTIAVVQIRMPSSSGHAYYQRKLSEGKTPREAKRCLKRRLADHVWRVMTADERRSKQQLSQVT

SEQ ID NO: 243290 - protein, 418 aa, unidentified
MFKIFRKNCCGLDVHKTWIYACIGITDANGRTDYKQARFSSFSKGLRELADWLSKYGCKDVCMESSGKFWIPVFNILEKTCWVTLAHPKYTKPQKGNKTDRKDAKWICDLFMCDMIKPSFIPPPDIRHLRDLVRYRFKLTNCLTGEKNRAQNCLTVSNLKLDDVFSDVFGKSARSITNYILEHPGEQFDVAPFVDKRCKHPTEEIQAAVDGSIAHEQAVKLREIMQHIDEIQIHKQNIESEILRLAASYQTLLELIHTVPGFFADPMTAIAVLSEIGADMSVFPTAKHLSSWAGCCPRNDQSGGKRKSTRISRAGVYLKPLLVQVANAVVKSDKYPECKERYRRIKAHRGHKKAIIAICRMLLTAIWNILSKLEPYSAEGYLNDRKTDSRVITKTQALYLIRLRGYIIEDDLPLSASP

SEQ ID NO: 243291 - protein, 422 aa, unidentified
MLEETQDSDQIIQRVAALDIGKAELTCCVRVPGARGWGRRLQEVTTYQTMTRWLLVMADRLGELGVTRVVMEATSDYWKGVFYLLEAHGFEVWLVNARDVKHLPGRPKTDTLDAVWLCKLAERQMLRPSFVPPRPIRQLRDLTRYRADLVAARTAEKQRVEKLLEDAQIKLSVVASDIFGVSGRAMLAALLAGERDPKRLAQLARARLRAKLGPLAEAFCGFFTDQHAFLLAKMLARVDALDADLADLDAKLAELIGPLAGAVDRLDEIPGVGQLAARLLLAEIGTDMTRFPTAGQLVSWAKFAPGVKESAGKRKGRGSTGRGNPYLARVLGEAAVAASKTDTFLGERYRRIARRRGKKRAIVAVGRSILVIAWHLLSDPEAHFHDLGAGFYDTRIGPERAKRNHVRQLEALGYKVTLDPAA

SEQ ID NO: 243292 - protein, 313 aa, unidentified
MSTPCYVGIDVAKATLDVATNRVDHPRWHTPNEAAGIAAVVDRLRALAPALIVLEATGGYETAAVTALAVAGLPVAVVNPRQVRDFAKALGVLAKTDTLDADVLVAFAERVRPTPRPLPDEAHADLLALVVRRRQLVEMRTAELNRLGTARPKLRPAVREHIAWLDRRIKDTDREITRLIEASPLWRTRDQLLQSTPGVGPHTSARLLVSLPELGRLSGREIAALVGVAPLNRDSGTRHGPRTTWGGRAPVRATLYMATLVATRHNPVIRGFYQRLRAAGKPPKVALVAAMRKLLTILNAMLKHQRAWTPASA

SEQ ID NO: 243293 - protein, 344 aa, unidentified
MTTIDYIGFDIHKKTISFCAKAPDGAILEEGTIPSLRNRLLAWAKARPRPWIGAMEATLFTGWIYDFLKPLAQELKVAHPPMLKAIAVAKKKNDKVDARMIADLLRCNLLPECYMAPVAIRDLRRVLRYRNLVVRQATRIKNRIAGLLMETGTAYNKERLHGKAYFSELLGSLQEMPPSVVELLKLSRGQLELFAVIQRRLLKGLNEHPDLSERVMRLQTIPGVGEILALSWALEVGEVGRFASIGQAASYCGLTSAQHNSAGTEQRGPISKQRNKHLQTILIEAAKLAPRRNPQLAVVHERELQRGDRNRATLAVARKLVAYLMAVDKGGKRFAMRARTEVAA

SEQ ID NO: 243294 - protein, 370 aa, unidentified
MHQPTTLSVGLDVHKDSISVAYALDGSPEPAQFLGPIGTRQCDLDKMIRRLHSKASHLVFAYEAGPCGYVLYRYLTAKGFDCQVVAPSLIPKRPGDRVKNDRRDAVELARLLRSGDLTPVYVPAVEDEAIRDLCRARDATRITLRSAKLRLKSFLLRLGLHYTGRANWSAAHRRYLAKVVCPTPTQQIVFQESILAVDEQVERLNRIEQELLDLAPSWRLYPVVEALQAMRGVQWVVAITVVAELGDLTRFDNPRQLAAFVGLIPSEHSSGTKRRLGAITKTGNSRARRVLIEGAWAYRYPAKVSPHIQARIEGLPKAVQDIGWKAQVRLCKRFRRLSSRGKHSNVVVTAIAREMLAFMWAIAREVPIKV

SEQ ID NO: 243295 - protein, 372 aa, unidentified
MPDVISTAPADVRLWVALDVHKLSIVAATLPPTGGQPEVQQIETTRAAVRRFIDRLGGPEGLAVCYEAGPGGFDLLRVLTELGVACDVVAPSLIPVRAGDRVKTDRRDAKKLVRLYRGGQLSFVRPPSPETEGLRDLMRCRDDLRCARTAARHRVSKQLLRHGRIYRDGKSQWTLMHRAWIARQRLDDELAHAALAQMLIHLDGLDRQLDALERNLEQIARSERWAATVEILTRFRGISTRTALGLIAEIGDFARFGHPRELCAWLGIVPSEYSSGQQRHRGHITKTGNHHARRLLIEAAWSYRHRPRRPDRGPQPDARAWQAQVRLHRRYHHLTTERGKRSTVATVAVARELACFLWAAATDQPFALEAAA

SEQ ID NO: 243296 - protein, 359 aa, unidentified
MQRNKISFKGQKIYIGIDVHAKTWEVCVLTESGYKERHPQQASAKTLFDFLKKHFPDGEYHAVYESGFSGFSTYYALKEYGINCVVTHAADVPTTQYEEVMKTDKVDAAKLARSLRAGDIRPIYIREKENIDDRSVIRIRKTIQKQLSGYKARVKHLLHCNGVEIPERFARPGTHWSRAFIKWLKEDVVLLSSSRLSLDLLVKQVETIRQTLLDATKSIRRLAQTDRYRNNYELLMSIPGIGVSVAMCILTEIYDVKRFRNENQFASYLGLIPTCHNSGEKTASGEKTFRGNKHLGPMIIEAAWIAIYRDYGLGMAYAKYKQSMKPQEAIVKIARKMSNIIFSVLKNSRKYEPYRWDKE

SEQ ID NO: 243297 - protein, 344 aa, unidentified
MDHFAGLDVSVKETSVCIVDDTGKIVREVKVASEPEALLAVLKNPAYHFKRIGLEAGPLSQWLFSALAEAELSVICVETRHMQALLKAQINKTDRNDARGIAQMMRVGLYRSVHVKTLRSQKLRMLLTHRKLLQSKAIAIENDLRGTLRNFGLKVGMVGKVKFEDRIKELVENSPDLAGLVEPLLVVRRVLREQIVILHRRLLAIVRDDEVCRRLMTTPGVGPVVALTYRATVDVPARFRKSKAVGAVFGLTCSKYQSGEIDRSGRISRCGDEMMRVMLYEAAQSMLNSKRWSWLKAWAMQIARRRGMKKAIVALARRLAVIMHRIWVDGTEFRWTPEPAAAAA

SEQ ID NO: 243298 - protein, 460 aa, unidentified
MTPRKDHFPHPSARPRRVSLAVTNPHAAGIDVGADEHWVCVPAGQAAEPVRRFATYTADLMALADWLQACGVTTVAMESTGVYWVPLYELLEARGFVVLLVDARQVARAPGRPKSDRKDCQWIQRLHSYGLLSAAFRPQDEVVVLRGYLRQRDMLVTYGGQHIQHMQKALEQMNVKLTEVVSDITGVTGMGIIKAILRGERALQELARLRDPRCKESEATIARALQGNWREEHLFALQQAVALYEFYHQQIDACDAAIEAHLRTFADRSSGQPLPHRPRRRKREANEPRFDARARLYCLCGVDLTAIEGIDETTALVLLSEIGSQMSRWPSLKHFCSWLGLCPQHKISGGKILSRRVRRGASRAKRALRLAARSLHHSRSALGAFFRRMKSRHGTPGAITAAAHKIARLVYALLKHGKDYVAQGMAEYEAKYRERKLQAMARQARALGFQLVPAAAGAVT

SEQ ID NO: 243299 - protein, 426 aa, unidentified
MIPAVVERCAGIDVHKRFVTVCVLIGPAHLEPEPQRRRFGTCNAELWQLRDWLLEEKCQQVVMESTGPYWRPVFNVLEEAGLEVVLANPQQVKNLRGHKTDMKDCWWLAHLLRHGMIRPSYIPSRAIRELRDLTRRRKQLIRNGAMERNRVQKVLEEANIKIGSVLSDVFGASGQDMLLALVEGKATAKEIAQLAKRQARKKIPQLQASIEGHRMTETQRQLIRQCMSHMAFLEQQIEEVDQQIQEKIGAFQFSESYGLLQTVTGIKAEAAATVLAEVGDTVAAFPSAGKLSSWSGVCPGNNESAGKRKSTRTTKGNPYLRDALLECAWAASRKKNSPMQHLYRRLEHRLGHKRAIVAVAHALAQAIYQVLSTRRPYVDTAEPPRSATKVNRLIRHHTRRLRKLGCWLQQTTQQPQRSTEQHQRLT

SEQ ID NO: 243300 - protein, 397 aa, unidentified
MYIVGIDIAKRKHEAAVIDGEGAVIIKPFSFTNNCSGYNRLLAMLAKAKLPLDEVSFAMEATGHYWLALFTRLQKEGFRVQVINPVQTNSIRSFYIRQAKTDPRDALLIAEVIRFGHFSESTLHPENIYELRELCRGRHAIVSMQADVKRKVVALLDQVFPEYETAFTNLFGDTSMAILQTCPTPKELSEMPLEELCHLIEVSSHKRFRMAKARELQELARNSFGFAMAGDVFSTMIRLYAKHLDFLKQQVREMDRKIAEIMDTLDTPITTITGIGPTLGAYILSEIGDISRFSSAAKLAAYAGIDPTMRQSGEYNGVRNRMSKRGSPYLRHAIWLAASSAVLHDPALKLYFQKKRDEGKPYMASVGHACRKMVSIIYAVMRDNKAYTPHIPNEISA

SEQ ID NO: 243301 - protein, 343 aa, unidentified
MQTITTIGLDIAKSVFQVHGVDAAGEVVIRRQLKRRSVLAFFQKLPPCLVGIEACASSHHWSRELQALGHTVRLMPPAYVKPYVKRQKNDAADAEAICEAVTRANMRFVPTKTLEQQSCLMLHRTRHLFIRQQSAVINSIRAHLAEFGIVAPVGRKGVTELLHVVADPSDKRVPEVGRTCLAALGDQLLGLKRQILEFDRMIMAWHRSNQTSKRLHYIPGVGPMLATALVASVADPGAFRSGRNFSAWIGLVPKQHSSGGKDRFGSISKQGDRYLRNLFVARALAVIRYAKIHGTRHRPWLTALLGRRPTKVAAIALANKIARMARAMMAKGERYKQPAALAA

SEQ ID NO: 243302 - protein, 386 aa, unidentified
MKRNDLSQSPVAFDQATTMVAVVELSFRSWLVAGLVPRLSRQPLKKLGADAHALLTLLRRWQAEATKSGGTINRIAVAFEAGRDGFWLARWLRAHGIEAHVIHPTSIPVSREHRRAKTDRLDTGLLLRAVLGWLRGEPKHCSMAAIPTIAEEDARRPNREHQTLVQERTRVVNRMKATLIRFGIRNFKFKLRKASDRLEALRGPEDEPLPPNTVAELRRDMARLQLIGEQINAIEKARLEQLKQAPRKGTHPMLLMLAQIMGIGVETADMLVHEVLSRELRDQRAVARYGGLTGAPDESGAKRREKGLARAGNVRVRRGMIQLAWRWLMHQKNSKLAQWYQARTTGAKPGVRKTMIVALARKLLIALWRYVRTGELPAGVALHPAT

SEQ ID NO: 243303 - protein, 344 aa, unidentified
MHYVGVDLHKEQSWFYVSDQEGKRLISKSIPNTDAELKQIFDIIPKPFKLGVEATRNWYFFVDLAEQYAEEVNLANSFELKAFAKRNKKTDKIDAKLICDVLRMGYLPTVNIPPKPIREIRELIRYRMSLVYERTFNINRLKNTLGKLGRECSGDLTTYKQLDKVQTDGLPEIYETVIQGHKERIRFLTEKIKGMKMYLEETFQEDQEIMNLTTIPGLSYLSAAIVKSEIVDISNFASFNRLCSYAGLAPRVSQSANKDIHGPLSKNRRKLLQWILLEVTPHFVRASVEKKKKFDELVKRKNYNTAKVALARDMLRMIYVVLREKREYYSKIIRSTADVALHGV

SEQ ID NO: 243304 - protein, 319 aa, unidentified
MLNESFVGIDVSKDWLDVGWEPAQQSERLAHEEVAMVGLCERLTQERPCLIVLEATGGLETHLASALAAAGLPVAVVNPRQVRDYARACGRLAKTDRIDALVLAAFARAIRPQVRAPKDDETLELGALLVRRRQLIDMRVQEKLRLERASPVQRDSIKEHIAWLTERIARLDTDLTHRLRASSLWRDKEDLLKAIPGVGTITRVTLIALLPELGKLNRREIAALVGLAPFNRDSGQHRGERVIWGGRAQVRRVLYMASIAAIRSNPVIRVFYQHLRAQGKPGKVALVACMRKLLTIMNAMLKHNTPWNPSDVIPEISST

SEQ ID NO: 243305 - protein, 463 aa, unidentified
MSKSHRITKRGRRTKRRPGVEGALSVLRPNAAGIDIGSEEHYVCVPSDRDPEPVRRFGCFTSDLRRMAEWLKACQIDTVAMEATGVYWVPVFELLEEYGFEVYLVDARQTKNASGRKSDVLDCQWIRQLHSYGLLTAAFRPEQQIAAMRAYWRQRQGLVEACSRQIQLMQKALEQMNVQLHKAVSDVAGVTGMSIIRRIVAGDRDPHQLATLRQRGVKRSEAEIAEALRGNYRPEHVFALAQALESYDFLHGQMERCDYEIQQCMSGIASKTSPPTEPAQKKRRWRNDPHFNLRAELHRISGVDLTRIESIDAVTAQTVVSECGTDMTRFPSEKNFASWLCVCPNNTITGGRIRSRRTRRVSRHRAADALRRAAQALHHSKSALGAEYRRKRARLGAPKAITAMAHKLARLIYRLLKHGEAYVSEGLEQYEARHQELQLRGLRHHARSLGYQLLSQTTGELMA

SEQ ID NO: 243306 - protein, 407 aa, unidentified
MTAVMIGVDPHKGSHTAVVIGPAEEPLGELRVRASAGQVEKLVAWAADWPERTWAVEGAAGLGRLLAQQLVAAGERVLDVQPKLACRVRLLQAGDTNKNDPNDALSVAVAARRSKTARPVMAEDYPAVLKVWSKRHRDLARLRNQVACRLHAVLCDLVPGGHPKEISAAQAARILEQSSPSGAVDRARAELAAQFPGDMRRLDAQLRGTRKKLAAAVRASGTTLTEVFGVGPVIAGTITGDIADVSRFPGRDHFAAYNGTAPVEVSSGNRKIHRLPLRGNRRINHAIHMAAITQIRHRHSDGRAYYDKKVTEGKTHKEALRSLKRRISDAIFACLLADARRAGQRPARTAREGNQGTTLTPARPAHTPNAGSSDKPLPDLGTTTRPGTRAATPSPSKPASKKTRPAT

SEQ ID NO: 243307 - protein, 386 aa, unidentified
MIYVGIDIAKETHVAAAMSTDGVVLLEPFAFQNDHEGFKLLKSKLDTLNGNILIGLESTAHYAENVIFFLHSQQFKLAVINPVQTAAMRKTGIRKTKTDKVDSLLICKTLACNSFMLYSDTDVKTLQLKSLCRFRQNLKKSKARLKIQLTSYVDTLFPELQFFFKSGLHIKTCYELLKLYPSPDDIAALHLSTLSNFLSKASRGRFGKQDAKSLKSLAKSSVGVKNTYISIQITQTIAQIELIESQIDDLEHIIEKAMDELDSVIMSVPGIGKINGAMILGEIGDIKRFSHPSKLLAYAGLDPVVNQSGKFNAKHTRMSKRGSKMLRYALINAAWNVSLNNDTFKCYYDSKIAQGNSHYSALGHTAHKLVRVIFKLLTDNVAFALV

SEQ ID NO: 243308 - protein, 424 aa, unidentified
MSQNQPEIQYATFLAIDWADQKHVWSLQQANCSTRERGEISHMPEAIEAWVAQMSQRFAGRPIAVAVEQSRGALVFMLSKYEQLHIFPVPPAMTANLRKAFYSSGAKNDPADADLLLDLVQMHRDKLRRLSPDTEATRRVQNLVEERRKLVDEKTAQGNRLEAHLKIYFPQIPHWFGDVDSPLVCALLKCWPTLEALQKAGPDTLRSFFRKHHCRKEELIDSRIKSIGEAMPALKDRAVVEAKMVVVKVLVQLIQVLHEGIEGLNRQIQEAAEAHPDFFIFDSLPGAGAVMAPRLLAAFGSQRERYQNAAEVQTLSGIAPVSESSGKSQWVHFRFACSKFLRQSFHEFAAHSIPQSQWARAYYELQRRRGKKHHAAVRALAFKWIRIIYRCWKERVAYNETVYQAALAKRNSPLVAATKAAVAS

SEQ ID NO: 243309 - protein, 417 aa, unidentified
MTEDVHWLVGIDWASQKHQVCLLDLDGRVVGEREFDHEGTGLSQLCNWLIEQTKALPGQIAVAIETSHGPIVEMLLERGFQVYSINPKQLDRFRDRFTVAGAKDDSRDAHVLADALRTDRRAFRRLSVENPLLIELREWSRMLEDLKQERNRLSNRMRAQLWRYYPQALEIADDLAANWFLDLWQQVPTPAKAARVKQATIETVLKANRIRRFDAAEVLRVLRQKPLWVAPGTTEAACAHIRTMAARIRLVNQQIAEANRQLDELCDKLEAEADNAPGQKCEQRDVTILRSCPGLGRINIATLLAEAPEPLRRRDYHALRALCGAAPVTRRSGKQHIVVRRFACNKRLQNAVYHWARVATQHDPISQRRYAALRGRGHSHGRALRGVADRLLSVMCTLLQQQMQFDPHYASSQMATA

SEQ ID NO: 243310 - protein, 402 aa, unidentified
MNSVGIDISKGRSTVAVMRPFGEVVLSPFEVCHTDSKLSELARRLKSLDGETRVVMEATGNYHAPVAKLLHDAGLYVSVVNAKLVHGYGNNDLRRVKTDRKDAVKLANYGLDRWLTLPKYIPEEDTRLLLKNCYRQYRQYSKVQTVLKNNLISLLDIVFPDVNRLFSSSARADGSEKWVDFVAEFWHCECVCERSEKAFVNKYQRWCRKHGYNFSVEKAHTIYDEASGHIGVMPKSETTKLLVQQAVSQLRTTSVALAALKQEMQSLASQLPEYPVVMDMFGVGPVLGPQLIAEIGDVRRFYSKKALVAFAGIDAPPNDSGDVTGRHKSMSKVGSSSLRRTLFLIMNVYLQNSPPDEPVYQFMDKKRAEGKPYRVYMMASANKFLRIYYATVKAYLEAVKHV

SEQ ID NO: 243311 - protein, 351 aa, unidentified
MHATTVAIDLAKDVFELAFGDAAQRIVERRRLSRGAFAHVLDNRAPLHVVMEACSSAQYWGRHFQRGGHRVDLLPAHDVRPYVRRNKTDRADAAGLLEAVRCGSIRPVPVKTPEQQGIQALHRVREYHKAQRTAAINLLRGVLREFGIVIAPGAHKVRAAVLAALEDPNNELPMTLRATLARLLDSVAAAEHAMAAIQAQLQDFADSDPRSQRLQRAAGIGPITATALSASVGEFDRFPSGRHFASSLGLTPREHSSGNRRRLGRVTKRGDVYLRMLLIHGARAVLRSAKVAQKKSQPIDRTRAWALALAERVGHNKAAVALANKTARRLWAAEHHRASFDPDHVSAPVAH

SEQ ID NO: 243312 - protein, 388 aa, unidentified
MKPNSQMTLDRFFRQCVGIDISKDKFTACLYMYDRAGDAGCCTQSIDFANTKSGFNQLVRWSRKEAVKEFPLTYLMEPTGVYYEPLAYHLHRIGQTVYVVLPNKVRKFCEAEGIKTKTDAMDARCLALMGCVSRKLKPWSPPAPIYQELRQMTRFHADLCRVRTSVSNRMEALDHMESAEKSVRKNCGKLLDEIDRLIEKNDKAIMQKVAQDKDLEQKVKRIATVKGLRETTVVCVIAETQGFHLIENRKQLVGYSGLDVKAEQSGKEDPKHHISKKGNAHIRAALYMPALVAVRYNRQIRDAYGRICQKHPNEKMIGVTAAMRRLLLLIYTLWKNGEKYDGNRDKTHTQRKKEPEPEYGPDDCIGPSTEPVDRVDWNTKDGDGYPPF

SEQ ID NO: 243313 - protein, 325 aa, unidentified
MRIVGVTGGVDTHADTHVAAAVDDNGGLLGVESFPVSETGYEELLGWLVGFGPVAQVGVEGTGSWGVGLSRFLTDQDVMVVEIDRPNRQVRRKQGKSDPTDAVSAARVLRLLAKRHRDMARLRNKHCTRLHALLLELKAGGISSEITVTKANLLLEDVVVADEVTRHRVLIAGELVDDIARLDTALKASKKRVTTAAVSASGTSLCDITGIGPICAAIIIGYTGDVTRFPTKGHFATYNATAPIEASSGGHKRHRLNPRGNRKLNHAIHIAAVTQLRHDTKGRVFYDRKITEGKSSKDAIRALKRRISDVVYRHLIADTRRVRII

SEQ ID NO: 243314 - protein, 327 aa, unidentified
MNEPIIGIDVSKATLDVVLLIDEKSYYQQFSNDPGGHEKLAAWAHQKKGNGAHVCLEATGQYGDRVAEYLYEQGFKVSVVNPNRIKAYANSKLRRNKSDKADGYLIAEYCLKENPGLWSPPPASFKDLQALIRRLEDLQENRQQESNRLQSGVTTPAVVADFKAHIAYLDQQIDKVKQAIQDLIDQHPDLKHQQDLLISIKGIGKLTAAKLLGEIRDIREFDNARQLAAYSGLTPRNVSSGTSIHPKTRLSKTGNANLRKILYMPAISAKRWNPIIHAFCDRLLKSGLTPLQAIAAAMRKLLHLAFGILKSDRPFDPDFLIKIHSTS

SEQ ID NO: 243315 - protein, 422 aa, unidentified
MRSVALDVHLDFCEVAIVEDGEVRSAGRIETKPEQIELFASSLGPGDRVALEVTGNAWEIARTIQPHVAEVLVVSPSDTGIRQARAKTDRLDARTLARLLAAGSVDGVWMPDRWTWVMRRRLSRRSQLVWARSRAKNQVHAVLMRQLVGRPPVADLFGVKGRRWLSELQLAPEESETVSAAMRQIEFFEKEIAEVEQLIALAAMESAEIKRLMSVPGVNVIVAASFMAAIGNIHRFQSPRKLVGYLGLDPRVHQSGVGPASHGHISKHGSVRARHALVEACWTTVRQPGPLHAFYQRIRARRGHSVAIVAAARKLASLFWCLLTRGEDYAYQQPSLTRKKLRRLQIAAGAERYTPKASGIWSANDAVREAERELARQAEVAYARTVRDWHAAQAVKVGASVTPGRASKKPSKGEAARQTTSP

SEQ ID NO: 243316 - protein, 431 aa, unidentified
MNYNKTLKLNQITDQTLIVGIDVSKDFHVARAQDFRGIEYGKSITFNNDHMGIYSLKVWTKDIMIKHEKLNLIVGLEPTGPYWINLSRELKAAGIKVVAVNPMHVKKSKELDDNSQTKTDYKDAKIIAQLVKDARYSEPNLLTGVYEELRNAKKIRELLNSDLIACKNQIYNWLSRFFPEYQNVFKSWESDSFISVLRDYVFPCVISEVKAEIIYEALPKKLRRGAGKNKIVKLVNVAKNSIGTTEGHMFAAFEIRHLLNKYELFKHELEDLSAQIEKLCITLPEVQRLLEIKGIGLNLASGIISELGDIRNYSHPDQLIKMAGLSLIECSSGKKKGQTTISKRGRSDLRKFLYQAVFTMLSSNKGFQSLHKYYTERPKNQLKGRQSMMALARKFLRIIYTVVTQNIAYDENKMLSDIKRPDEFLRIAKAM

SEQ ID NO: 243317 - protein, 355 aa, unidentified
MVMIGIDPHKGSDTAVVIDRDEMVIDEIRVRTSTGQARELQRWASGYPDRVWAVESARGLGYLVSQQLVAAGERVIDVPAMMAPRVRQLGSGKSQKTDPNDARSVAIAAFRHSGLALVRADDHVRVLGLLAKRHRDVARMQNTAACRLHALLMELVPGGLATEMTVNKAVSLLEQVEVADQVGRQRVLIATELVEDITRLEAQMRASKKRIRLAVAASGTTLCDIRGIGPIGAAIILGSVGDITRFPTAAHFASYNATAPIETSSGDKKRHRLNPRGNRKLNHVLHSAAVSQLRYPSEGRDYYQKKIAEGKTTKEAIRAPETEDLRRRLPASSGRRQTPPRLNDRRVREDTQGRL

SEQ ID NO: 243318 - protein, 356 aa, unidentified
MRKEYQKRKVFATGRDVYIGIDVHKENWHITARANGEEVFHGNMLSDYQCLRKFLERFKGCKVKVAYEAGPCGFGLYDQLSKDGIETIVVPPSLIPVESGNKVKTDKRDSRKLAKLLESNMLKKVYVLSEEDRANRELVRTRRQLMEHRSDVMRQIKSKLLFHGIKSPFPPKQRWTKRYVKWLRELQLEHEAVKISFNALIDLYEYLGSQLTKISKEIIALSQSDKYSHKVTLLKSVPGIGLLIAMELLVELPDIERFKTADEIASYMGLTPSEYSTGQYVRQGRITRCGNTRARTCLVESSWHLIVKDLFWRGKYMKLKYRRGAKRAIIAIARNLIIRIRRILLNNEPYRVAVAA

SEQ ID NO: 243319 - protein, 337 aa, unidentified
MNPTKSNHKFCLGIDISKADYHVALLHRESGESIARSKFANNPQGHAKLLDWLAKHTGADLPLHACMEATGSYGESLADYLDGKVAILSVVNPRAIKAHGDSDLRRCKSDPADARLIAGYCRSKQPRAWQAPSPAQRKNKAISRCLANLKKDRTRESNRLDLCSDKTVVKALKAHIKWIEKQIAKLEDELLAAVKEDAASARALELIVSIKGIGEKSAAYLIAELPDLTLLKNARQLAAYAGVTPRIFQSGTSGKTRTPMSKAGNRHIRKALFFPAMSAMRFNPICKAFAERLKEKGKPSIVIIGAVMTKLLHLIYGVLKSEKTFNPDILKKAPITP

SEQ ID NO: 243320 - protein, 342 aa, unidentified
MQTITTIGLDIAKSVFQVHGIDAEGNVLIRRQLKRRYVLAFFQKLPPCLVGIEACASSHHWSRELKALGHNVRLMPPAYVKPYVKRQKNDAADAEAICEAVTRANMRFVETKTPEQQSCLMLHRTRQLFIRQQTSVINAIRAHLAEFGIVAPVGRKGVEQLLVVADGSDQRVPELAQACVAALGAQLRRLKEQILDFDRRILAWHRSNETSRRLDAIPGIGPALATALVASVADPKAFRSGRNFSAWIGLVPRQHSSGGKDRLGSISKQGDRYLRSLFTAGAIAVIRYAKLHGTKHRPWLTALLARRPTKVAAIALANKIARMAWAMMAKGECYREPVALAT

SEQ ID NO: 243321 - protein, 343 aa, unidentified
MQAITTIGLDIAKSVFQVHGVDAEGTVVVRRQLKRRYVLAFFQKLPPCLVGIEACASSHHWSRELQALGHKVRLMPPAYVKPYVKRHKNDATDAEAICEAVSRPNMRFVETKTPEQQSCLTLHRTRHLLMRQQTSVINAIRAHLAEFGIIAPVGRNGVEQLLGVVADSNDKRLPEVARACVAALGAQLQMLKAQILEFDRMIRAWYRSSEASKRLDEIPGVGPVLATALVASVADPKAFRSGRDFSAWIGLVPKQNSSGGKERLGNISKRGDRYLRSLFTIGALAVIRYAKIHGTKHRPWLTALLARRPTKVAAVALANKIARMAWALMAKGERYKEPVALAA

SEQ ID NO: 243322 - protein, 317 aa, unidentified
MLSTPVTVGIDVAKARLDVATRPSGEQWHVPNDEAGIQALIARLQPLQPRLIVLEASGGWELLVASSLAEAGLPVAVVTPRQVRDFAKAIGQLAKTDTLDAQVLARFAEVVQPSPRPLPDAAQQALSALLVRRRQVLGILTAERQRLGTARPPGRGRIQAHIRWLEQELAALDNELDGTIRGSPIWREQEALLRSVPGIGPVTAVTLLAELPELGRLDRKRIASLVGLAPLNCDSGTWRGKRIVWGGRGRVRRTLYMAALVASRHNPVIRGFYEHLLAAGKPKMVALTACMHKLLIILNAILAHRTPWQPTAAAARA

SEQ ID NO: 243323 - protein, 341 aa, unidentified
MEITTVGLDIAKRVFQLHGVDAAGKAVLRRKLQRSEVLAFFKALPPCLVGIEACGTAHYWAREIRELGHEVRLMPPSYVAPYVKRGKTDAADAAAICEAVTRPTMRFVPIKTAEQQAVLMLHRTRDLLVRQRTMLVNALRGHMAELGIIAPQGIARVADLMAVLLGEDKTNVPALARQALRGLAAELEALDRRVKEIEGAIVRWHKDNEASRRLAAIPGVGPITASAIVATITDPFQFHSARHLAAWIGLVPRQHSSGGKPRQGGISKQGDRYLRRLLVLGATAVIRYSRSKSTAEAGWLKSLLERRPARLVSVAQANKTARIVWALLVRGEAYRMPSGVA

SEQ ID NO: 243324 - protein, 366 aa, unidentified
MDAIYIGVDFHARQQTICYLKTETGELVISELKHQDKEQVRAFYAQFPGQVIIGLEASGYSPWFEAMLEQLGREVWLGDATEIRRRARWRQKSDRRDAELIWDLMVHNEFPRLHQPSAQSREVLRMLRYRQKLIKVRTMTKNSLQAIALQAGLAKGKQLFTKDGQAEFKVAAMSAALQWQRDHWLDLLKPLNQQLLETMVWFKAQSKGDAVISRLRTHPGIGLLTALCLWHTLQPVSRFRNQRKVVAYAGFDPMIRSSAERAIYLGISKAGSRMLRYLLVEAVHTAVRYDDDLKRFYRRVAERRGRPKAKVAAARKLLIRAYIMLRDEIDYAEFRRRAVAVDLPEEVKGQAKVPEVLIGKSTSPGA

SEQ ID NO: 243325 - protein, 361 aa, unidentified
MKKLKRVAVRFKGLTVGFDLHKKWIEYCVLDAAGNEMLNGRVKSRAAELAKFVDQLRQKGPLQFSIEACGCFMWVFDLLSEKFGRASVHVAQPARIKVIANSMEKNDANDAWWLAYLLYEGRLPEAFVAEGDLRDLRVASRELRWNTDNRGDLLRRLRSHCAQSGTDLPKAWHTSLVKRKATRVIVRSLPKSERRDAMLRLLKQIREAGKIVQHWRKRITELGRKFKEVELMNEMIPGLASITSGTVYAELGDPRRFYSGKAYAKSTGLTPGYRESGGRSSPTAITRAGSGQARWALTRAILACFSCRSGPGLQIKKWIQKRCAYKRKKSVIVAAARKLAEGIWRLFALGECFSLKKAFPA

SEQ ID NO: 243326 - protein, 409 aa, unidentified
MDLVITRCAGLDVHKATVVATVRVPGEAGRRQVVTETFGTMTPDLIALREWLQAYGVTQVALESTGVYWKPVYYVLEDAFDLWLINMLHLQHVPGRKTDVKDSEWLAQLLECGWLRRSVVPPAPIRELRDISRYRVQQTRDRSQEVNRLQKVLEDAGVKLTSVLTDIMGVSGRAMVEALVDGTTDPQVLADLARGKLRKKLPLLRRALVGRVRPIHALLLQEILAKIDYLDEALERLTAEIDRRVAPFEPMLTALDTIPGLDRIGAISVLVETGGAMDRFPSAAQLCSWGGMCPGHDESAGKRRSGRTRKANRYLRTTLIQAGVAASRTRASALQALYARVKTRRGHKKAVVATGHQILEIAYYVMRDGITYHELGADYFQRRDRDRTVRRHVKQLEALGYVVTVNPAA

SEQ ID NO: 243327 - protein, 482 aa, unidentified
MKHKRHEKTKKAICGPTQGNWQQMNRKQRREMTRKIQSENISLEVIHPDAAGIDIGNESHYVAVPPQRDSQPVQRFGCTTAELKDMAGWLKQCGIRTVAMQSTGVYWIAVYDILEEAGLEVYLVNARDTKNLPGHKSDVQESQWLMKLHTYGLLRNSFRPSQEIRTMRTYWRQRNDLVQSAGRHIQRMQKTLTQMNLQLANVLSDISGVTGQAIIKAILAGEHDPDKLAEFRDPRVKARKGQIARSLEGNWQEDLLFVLQQEQDGYEFCQKQMTECDQRLEHYLQQRDDRSAGASLPEEKRKERRKKRKGNKPRFDLRTGLFRMTGTDVTRIDGIDVMTATTILSEVGWDMSKWETEDHFVSWLRLCPDNRTSGDKIIGKGRLPTNNRVSTALKMAASTLRTSQTYLGAQFRRLRSRLDTPVAIKAMAAKLARLVYRMLRYGMKYVDRGAEFYEAQHRQRQIKHLKSKASKLGFQIIQVPAA

SEQ ID NO: 243328 - protein, 391 aa, unidentified
MSMYFVGIDISKYKHDCCIISAVDQQIVSKFTITNDKDGFEQLLISLNSLSNPEDIKIGFESTAHYALNLELFLENANHSFMEVNPVLIKEYKKSTTLRRTKTDSVDCESIARWLMTVEYKPHSKGFYHAYSLKSLTRLRDRLIRQRSFYLVKITNVLDHTFPEFKPFFNERLSKTAIYLLENYGSAEKMAHMNSASYDKLRCISRGKFSIQQFLHLKELAANTVGVNNSIFDIELNSLLTLYHSLCKEIKNLEAEITRLIEEVHPHYMSIPGIGPISAAVIYAEYGDISNFSNPSQMLAFAGIEPGINDSGTESHGGRMVKHGSSQLRYVLLNACLPLIRFDLTFATYYAKKRAEGKKHRVAITHVAKKLIRVIYALERQDVDFNAQKIR

SEQ ID NO: 243329 - protein, 283 aa, unidentified
MHLLGIDLSKEYFDVTLLNAQGEKSQGHFDNTPSGFSQLVKWLKAAGVVELRACMEATNIYWEALAQDLYEQGYTVHVVNPARIKGHAMSQLRRSKTDKLDSDVLADFCRSRTELRVWTPPLPEERQLRNLVRQREDLLPMTTQQKNRLTDSRDQQVRARWQRLIATFATEIEELEKQITAPIADHPALLKTYELLKSIKGFGPITVAILMAEMPDLAEYEDAAAAAADAGVTPAHYDSGDTVHRKPKMSKIGKASIRGALFFPALTAMRFNPIIRTFAERLK

SEQ ID NO: 243330 - protein, 337 aa, unidentified
MEITTIGLDLAKSVFQLHAVDATGAVVWRKKLRRSALLPELAKVARCLVGIEACATAHYWAREISALGHEVRLMPPAYVKAYLRRQKNDAADAEAICEAVRRPTMRFVAVKSAERQAVLVLHRTRELLVRQRTMLANAIRAHCAEFGLIAAQGVGRVGDLLKRALQGGPAALPDLARAAMALMAEQLESLEMQIQSLNRRLLAWHKQDATSQRLATIPGVGVISATALAASVADPGQFRSGREFSASLGLVPRQNSSGGKDRLGRISKMGDRYLRKLLVVGATSVVRRARGAKTNPWVGKLLERKPTRLVTVAMANKTARIVWAVLARGEAYRPTNA

SEQ ID NO: 243331 - protein, 415 aa, unidentified
MALKIVYKICCGIDVHKTFVVACIASTNDKGVTSYESHRFSTYTSGLKTLLQWLIDRNCKDVCMESTGKYWIPVYNILEKGCSIVLAHPKYVKAIRGKKTDKKDAKWIADLFKHNLVAGSFMPPSDIRQLRDLMRYRFKLTCFKSSEKNRLQNCLTVSNIQLGNVVSDTFGKSAQAILDKILENPADTSFDLEPLVFKSLKKKLPELRDAIDGYITPEQAGKLKVIKTHYEDLESRKAELEELILALAAPYQQELAILQTAPGISSDFTAIGIISEIGTNMEAFPSAKHLCSWAGLTPTNNESAGKKKSVRVSKAGCYIKPLLVQCANAVIKSTKHPEMRNRYLRLKKRRGHKKAIIAIARMLLTALYHMLKNGENYNAELYRKSDLPPVDREITVEQALMIARNQGYKIKSATA

SEQ ID NO: 243332 - protein, 317 aa, unidentified
MTPSPIFVGLDVAKASLDVALRPSGEQWSVPNDEAGAAALVDRLQPLAPAVIVCEATGGFERAVIARLAAAGLPVVVANPRQVRDFARATGQLAKTDQLDAGVLALFAERVRPTPRALPDAAAQLLDALLTRRRQLLEMLVAEKNRLGFAPKALHRGIQAHIRWLERQLDDVTTELAAQIEASPVWRARDDLLQSVPGVGPIVSYTLLGELPELGTLSHKQIAALVGVAPLARDSGTLRGKRMVWGGRASVRTALFLAALCGRRWNPVLKVFYDRLIAAGKPKKVALIACARKLVTILNAMMRDQAPWQAPAIQHSC

SEQ ID NO: 243333 - protein, 312 aa, unidentified
MENLSYGGIDVSKDRLDVVVLPEGWFFSVSNDTAGWAELVARLRPLAVCAIGLEPSGGYERGIIRALLAAGLSVRRINPNKLRQFARARGVLAKNDRLDARLIAEYVAIMPTRVVQRDDAVERLAEIVTMRRQLCDEHVAVENQAGHLEDVMLRRLSKRRLIRLEADIRLLDKRLTEMVATNAAFAQLYELLTSMPGVGPVLAFTLIALLPELGKMSRKQIAALVGLAPYDFDSGKLRGHRSIYGGRMPIRNVLYMAALSASRYNPALRAFSNRLADANKKSKVIIVAVMRKMITTLNAMLRDNAAWQPRSA

SEQ ID NO: 243334 - protein, 341 aa, unidentified
MNWIGLDVHLKFSRLGVYVPAEGDLHDGGEVATEREALAARLAEIPGPKTVVLEAGRNCHHLAAMLEVMADQVWIVDPSAVRQLQRQVAKTDRRDASALAYWAGKGALSPIWRPEAPTLNLRELTRGKTSLTRLATRVRNMIRSLLARHGYECPHQDLLGVKAQAWLGRVEIPGYGGIMLATLLELLPLLQSKAEALEKMVEQEAQEHVPARRLMTIPGVGPYLGLAMAVEIGEPKRFATPAQLRSYSGLCPSVSQSGERQSYGRLTKRGNRWLRYAAVLAAQRIASMRYPDPRLKRTLLAAAFRHGRNPAKVACARRLLDLVYHLLIHEEEYQPPKAWVA

SEQ ID NO: 243335 - protein, 447 aa, unidentified
MKTEPEEIPDADHELIIERVAAIDVAKASGKVCLRLPRPGRPGHRVSRVWDVEATTAAVCELADHLVAGQIERVTVESTSDYWRIWYYLLEAAGLSVQLVNARDVKNVPGRPKSDKLDSVWLAKIHREGAAAASFVPPAPIRQLRDYTRLRVDLTRERSRYWQRLEKLLEDALIKVSAVASTLDTLSVRDMLEALIAGERDPRGLADLARGRMKTKRAALIEALTGRFDDHHGELARMLLDQIDALSGQINTLTIRIDQLLATIANEVPGHDDGDSGAGGQPSADLTVVQRLTEIPGIGPTGAQVILAEIGLDMSRFPTAAHLVSWAKLCPRTIQSGAIQRSGKSGKGNPYLKGALGEAAAAAAKTNTFLGARYRRIVKRRGKLKALVAVARSILVIIWNLLSDNHARFRDLGPDYHATRINTERKLRNHIAQLAALGYHVAVEPAA

SEQ ID NO: 243336 - protein, 357 aa, unidentified
MLSSSVKYIGLDVHKEAMSIAVVNGAGKLVMESIVETKASTLLDFLHGLRGELHVTLEEGTWAAWLYDVLKPHVREIVVCNPRRNALLKEGSKSDKIDARKLAELLRAGLLGAVYHGENGLRTLRELARSYLTVSKDLKRVMNRLKALYHSWGIGCAGKQVYAPRHREQWLSKIAQLGVRRRAELFYQQLDGLLVLRQTVRGELLAESQKHKAVKILRQVPLIGPLRAALLLALMQTPHRFRSKRQLWTYSGLAVVTHNSAQHRYVDGQLQRSKKPQQIRGLNQNYNHAMKEIFKSTALGASRCAGPLQNFYAGLLAKGMKPDMARLTLARKIAAITLTLWKKGGSFDAEHLKSRAA

SEQ ID NO: 243337 - protein, 301 aa, unidentified
MKKISTAKIKSQAANKKVTIGMDLGDRSSRYCLLDEEGVVIGEGSTPTTKAGIAKVFGAMARCRVALEVGGHSPWVSLQLEEFGHEVIVANPRNVRLIGESTRKDDRLDARTLARLARIDPNLLSPVRHRGAEAQADLAVIRARRVLVRARTMLVNAARGLTKSFGERLRKCGAGQAGPTLAAELSAEIRAAVSPLLAEVEALNQRITAYDRQLEQLAKEHYPEVDRLTQVKGVGTLIALTFVLTVDDPNRFPRSREVGCYMGLRPGRRNSGKSEPQLHISKVLIRRNANQQDRRVRVTAG

SEQ ID NO: 243338 - protein, 349 aa, unidentified
MVVKYSLGVDISLETFDANFSAIDAEQKVKVIASHKFGNNLNGFKEFDKWIEKNMKQKDIRLVITMEATGVYYENCALFLFRKGYTIAVVLPNKAKKYMQSTGLKSKNDKSDAKGLARMGAEQSLKSWESMTEFFYQLRELTRQQQSLQEHRTVLVNQIHANENGMFLNTMVMSQLKALVNVVDNQLEMITDGIKKHVASNDEVAEKVKKIAKIKGVGMLTLATLIAETNGFALFSTAPQLVSYAGYDVVENQSGNHNGKTRISKKGNSRMRRALHMPALSVVRWEQTPFLNLFERTLEKHKLKMKSYVAVQKKLLVVIYALWKKNEEYDNNYLANKCTTEQEQIKKAA

SEQ ID NO: 243339 - protein, 437 aa, unidentified
MRRKKKNANKSINLQVLPLVHPNAAGIDVGAKEHVVAVPCDRDPKPVRTFQAFTPDLHELAAWLKGCGIETVALESTGIYWISLYEVLEQYGFEIRVVNARHVKHVPGRTKTDVLDCQWIQKLHSFGLLNGSFRPDQQIRKLRTYMRLRDNLVVASTQAVHHMQKALFEMNVQLSNVISDIVGETGLRIIEAIIAGQRDPMQLAALCSTRIKASREMVAKSLHGNWDEALLFALKAALETYRFSQTKIQECDGCIQQHLAQFESRAEVTNSPQDLKAQLHRVCGVDLTKIPGIKEQSAQIIISEVGLDMTQWKTEKQFCSFLGLCPNNSISGGKVLHRATRKVYNRAADTLRLCAQSLTHSKSALGAKYRRLKARLGAPKAIVAMAHHLARLAYRMLRYGQNYVEQGIHQYELKFQLQRIKWLKKEAKSLNLQLVPA

SEQ ID NO: 243340 - protein, 410 aa, unidentified
MEVMHQHCAGLDVHKKTVVACVRLASEGKVVTEVKTFATTTQGLLTLSDWLSANRCTHVAMEATGVYWKPVWHVLSDGEVELVLANAAHVKNVPGRKTDVSDATWLAELLAHGLIRASFVPDGQTQELRTLLRTRKQLVRERTRHVQRIHKTLEDANIKLDAELSDVLGKSGRAILNALVAGETDPVRLAALAYPNVKSPQAQLREALRGRLTSHHRFLLQLHLGQIDGLDAAIGTIDREVEDNLAPFRAAVDLVKTIPGVSTLGAEVIVSEIGLDMSRFPTVGHLLSWAGLCPRNDESAGKRRSSRLRKGAQWLKTTLVQCSWAAKNKKGSYLQAQFLRLKSRRGPQKAICAVAASILTAVYHMLKDGTEYQDLGPDHFNRRSKLTQTQRLVRRLEHMGFAVDIKPIVA

SEQ ID NO: 243341 - protein, 403 aa, unidentified
MFEIEDVGVFLGLDVGKSAHHGHGLTPAGKKVFDKPLPNSEPKLRAVFDKLTAKFGTVLVIVDQPASIGALPLTVARDAGCRVAYLPGLSMRRIADLYPGEAKTDAKDAAVIADAARTMPHTLRSLELTDEITAELTVLTGFDQDLAAEATRTSNRIRGLLTQFHPSLERVLGPRLDHQAVTWLLERYGSPAALRKAGRRRLVELIRPKAPRMAARLIDEVFDALDEQTVVVPGTGTLDIVVPSLAASLTAVHTQRRAMEAQINALLEAHPLSQVLTSMPGVGVRTAAVLLVTVGDGTSFPTAAHLASYAGLAPTTKSSGTSIHGEHAPRGGNRQLKRAMFLSAFACMNADPASRAYYDKQRARGKTHTQALLRLARQRISVLFAMLRDGTFYESRVPETATA

SEQ ID NO: 243342 - protein, 401 aa, unidentified
MNTTTMLYVGIDVSKDKSDICIKDHLGNDLIQRFKITNNKADLGHLYETIERLKTKTSGNSDVVFGMEATGIYSLPLYSALKRDGYKVKLYNPIQTNGFRKINIRKTKTDPIDSAIIADMLRFSEPPQVSEIQDLTLFQLRELIRIRHRLIEKQTVCKVQLVRNIDTIWPNYGNVMKRVLGTASIAILKKYSVPSSVRAKPFEQFYELVKKTSRSKISRIKAEEIYTHAGNVLTIPELDSVFTFEIKTLITQLELYDEQIQSIEIKIDQMMKLIDSKIMSIPGIGDTLGPIILGEIGSIDRFSGGKKLIAFAGLDPVISKSGRFENMSGPISKRGSPLLRQALFLAANVARQNDDNLKRFYDKKRSEGKHHYSALNAVAAKLLRIVYWVMKNNKEYQTQVN

SEQ ID NO: 243343 - protein, 361 aa, unidentified
MQSTTIIAFDQHAATTVAAVLLPGQRSAALHPLTSDTATIIRFVDRLRRRGSVQCCYEAGPCGFELRRALTARQIPCEVIAPALIPRRAGDRIKTDRRDAGQLAVLYRAGALTAIHIPTEQEEAARDLLRCREDIRADLLRARHRLSKFLLRHGRRFTGTKKAWSKRHDAWLRTQTWPLAALDQTHRAYLRAVDEVLARLRDVDTELRALLTLEPLQPRVHRLRCFRGIDDLTALTIAAELGDPRRFATAPRTMAFVGLVPSEHSSGTKRAQGGLTKTGNAHLRRVLVEAAWHYRHHPFVSAALRTRQQGAPAAVIAHAWTAQPRLHRRYQRLAARGKPKQQIVTAVARELTGFVWAALTQ

SEQ ID NO: 243344 - protein, 322 aa, unidentified
MSVSNQRCAGIDVSKSTLDIAISNIAQSFTVPNENGGFNQILKELKRNETQLILMEATGGLESGVAGYLQSEGFDVVVINPRQARDFARAMGYLAKTDQIDARVLLQMAKVINQHPEREKYIRPLPDAHRQLLAAMVVIRRQLTIMLTAERNRLHPSHPQNHESIRFIISVLKSEMARIEAEMSAYISKNFSELSALLSAVKGVGAATVAVLLAEVPELGTLSQREISALIGVAPVNRDSGTMRGRRTVFGGRASVRTALYMSALVGTRHNPVIKEFYTRLVAAGKPKKVALTACIRKLLTILNAMLKNNEAWDPLYHQHAS

SEQ ID NO: 243345 - protein, 397 aa, unidentified
MREPQEIQDEDHEQLLERVAAVDVAKASGMVCTRMPHESKLGRRVTKVWQVDATTNAIIQLGEQLVGLGVERVTVESTSDYWRPWVYLLEAAGLRVQLVNAHQVKHVPGRPKTDKLDAVWLAKLTERGMLRPSFVPPAEIRRLRDYTRLRVDLTHERTRYWQRLEKLLEDALIKVSSVASTLETASVRDMLGALIAGERDPKVLAGLARGRMRAKHAALVEALTGRFDDHHAELTRMLLDQIDALTAQIGTLTARIQQLLAAIPAAQGVDADGSTGPSAGSGPGAAVLPAAARLDEITGIGPAAAQAVIAEVGLDMGVFPSPGQLVSWARLCPRTIQSGTRPALAPPARATPTCGVSWVRPPRLPPRPTPSWASATGAWSSAAASSRPWSLSPAPSW

SEQ ID NO: 243346 - protein, 339 aa, unidentified
MQVSTMGIDLAKNLFVLHGVDHNGKTVLRKKLSRSQFVPFIIQLPACLIGMEACSSSHHFARLFSNAGHRVKLIPPQYVKPYVKTNKTDAVDAEAICEAVTRPNMRFVQIKTAEQQGVLALHTERSFLVRERNGCANSLRAMLAEFGCVMATGFSALYKAVPEILEDEENELPHFVRVSVQRQLEHLKALETRIRQTEHELSDWARTQPACQRVEKVPGVGLMTATYLVASVGNGRQFDTAKQFASWLGLTPREHSSGGKQKFGGISKRGDSYFRCLLVHGARAVLRHISKNEKTMPWLAALVRRKHRNVAAVAQACKTARILWSMLFHETEYRPLTGT

SEQ ID NO: 243347 - protein, 351 aa, unidentified
MKEFNPEQPQHQSEMPQWVFASQAVSVDLYAAHVGLDVHKETIAVAVAEPGRGEPVYFGEIANQPKRVEKLLGKLSEAYGGGVLQFCYEAGPCGYVLYRRIIASGHDCQVVAPSRIPKTPGERIKTDRRDALKLARLLRGGDLTAVWVPDQEQERMRDLSRARDDMKAQERKARQQLNGFLLRHGHHWPRGKSRWGTAHENWLAELKMADPWQQVVLQEYIDAERAARQRVTQLTDQMMRALPEWSLAPVVDSLIALRGIDKVAAIVLLAELGDISRFDSPKQLMGFLGLVPSEHSSGSRRRQGAITRTGNGHARRMLVESAWSYRFPARQTRHLQGNALGRLRGVARLAL

SEQ ID NO: 243348 - protein, 385 aa, unidentified
MKLIGIDIGKNKHFFCIMDQQTGEIISQPISFSNDKEGFDFLIQKIKSYSKDSVLIGMEDTGHYHFALLKYLLDLQYTVALINPKTTDFNRKMQGGITKNDKLDTINICDVLDTPERKKQYRISKVNSFDLYEQKQLTRHHHNLKEEENVYKNRLQKCIDIVFPEFNKLFNSKYGTVYMNILKTFGSAENVANTDIRTIRKCFEIEGRGNRISLTPERLKECARSSIGISSSAEVIQIKHLTAQIELIEEQLTEIDKKIEEFSIQNNSPILSIPGISHFSGTSILAELGDISNYSKPSQIIKFAGVAPLHYESSQFNAQHTSITKKGSKYLRKTLYQIILPVIRHNQVFYKYYQLKISQGKGHRCAQGHCVRTVSYTHLTLPTIA

SEQ ID NO: 243349 - protein, 343 aa, unidentified
MQITTIGLDLAKSIFQVHGVDASGQILVRKSLRRSQMLPFFTKLPPCLVGMEACGTSHYWARELIKLGHEVRLMPPAYVKPYVKRGKTDAADAEAVCEAVTRSTMRFVPVKSPEQQAALSIHRTRDLLVKQRTQLINMIRGLLAEFGVDIPKGLERALLMARQIVDGKAAEVPFEAAKVVGTLSQQALDTHVRVREIDRDLAILLRSNDVARRLMTIPGIGPVGATALAASVTDPHQFRSGRQFAAWLGLTPLQKSSGGKERLGRITKMGDKYLRKLLIVGMTSRVRRAKQNPTVDPRLADLLARKPTRVATVAMANKTARIIWAIMTRGETYRAGHRPALAA

SEQ ID NO: 243350 - protein, 320 aa, unidentified
MHLGIDISKKTIDCAVRLADGKFKHKKVSNDAAGFRAVSQWLKQLADVAPHVCMEATGVYFESCAEYFADEGYVVSVVNPVCIKRYGEAKFMRTKTDKADAKLIAMYCHEQSPAAWQAPAPAERVLRAYVMRLESLLSMKTQESNRLDVAREAVQSGIQEHLDWLEAEIKKLRKLIRDHIDNDPDLKNRKELLDTIPGVGEGTIATLLSYSMHHDRFDNVRKVVAFAGLDPRIRQSGTSVSDKPMISRFGHSHLRKLLYMPAIVALHKTEWGTQFRRRLEASGKRGKLIICAMMRKLIHVTFGVLKSGKPFDPSLHGATA

SEQ ID NO: 243351 - protein, 434 aa, unidentified
MSNKVIFNLDKLFISVGIDVSADFSWMSIALPNQQFVGKPYKILHNSMNSLTTAVSKIKEAEELYSLESRIFLESTGIYHYPLFCYLRDKGFNCSVINPIITKNSTNINIRKVHNDRFDSKKAALVGLKPDLKVSLMPSDLALNCRNLCREYYDLMDNRSAYVNKLQGELRMAFPQYLGIFSKVTINTSLTLLETYTSPSAFLEADKQEIIDIIKSTARFGLTYAQNKYNAIIQAATDANQFGYIIDSNIKRIRLYISFIRKYDEEINSILESLHELVDANEDTDFVKQIHLIKTFKGAGFLSAVSIMGEIGDFSAFSKPKQLFAYFGLDPAVKQSGKFEGTKVQMSKRGSAIARRLTLQSISISRNGEAKNPVLREYYLKKCDSKPKLVAMGAVSHKVCNMIFAILRDNKPFKIIAPQEHIKQYNAAKCDMTA

SEQ ID NO: 243352 - protein, 322 aa, unidentified
MSQTYVGIDVSKDKLDVAVGSEGELFQVTNDDDGHVELLKRLRDVKPALVVLEASGGYEAVAAGVLWNGGLSVAVVNPRQVRDFAKGMGKLAKTDAIDARVLALFGEKVPIEVRAPLDDQARELQAMVLRRRQLIEMLTMEKNRRALISTGRARKSLDKHIGWLEEAIRRAGSDIDQAVRQSPMWRETEDLFRSVKGIGGVTARTLLAELPELGKLNRKKIAALVGVAPFNRDSGVFKGKRTIQGGRAHIRTVLYMAALTAARCNPVIRPLYQRLIARGKEKKVALVACIRKLLTILTAMMRDRARFVPTTIHRNSTAIGHA

SEQ ID NO: 243353 - protein, 312 aa, unidentified
MANIIRGVDVSADTLDARIGQDGAYQRFANSPEGVAELVAFCRQHDVGLVVMQATGGYEERPFAWLWAAEMPSAIVNPRSVRRFAEAMGLLEKTDGIDTGVIAWYAAVKRITAQQPASQTQQKLAALVTRLRQLTDSQTREPNQRRLVDDPDALETFTAVLGVIAAQIRCLEGKIVVLIEADPLWQALDAEFRTIKGVADCTVARLLAEMPEIGTLSNKAAAKLVGYAPIAQDSGKTNAKRSMRGGREGVRSILFIVADVVRRHVPDFAEFHRRLSDAGKPKKVVRAALAHKLLTRLNAKARDVRKKLAQAA

SEQ ID NO: 243354 - protein, 309 aa, unidentified
MKQSIVYIGIDVAKAHLDVAWQEQSRRFANDKCGQAALIKWLKQSAFPVQLICEASGGYEQALVESLEHTDITASVVQANRVRQYARAAGILAKTDKVDARVLAAFGAAMQPKATPPLCPEQKRLRQYEAQRRHLSAVLVAEQNRLAQLSYAELRVLSRSLISKIKKQIATIDARINALIAQDKQLCQKAQKLTSITGVGARTAALVLTQMPELGQLNRRQAAALGGLAPFNRESGTLRGKRTIFGGRRALRSGLYMAAMVAARRNPILCSFYQRLRAKGKPHKLALTAVMRKLLLVLNQNLKPITSPA

SEQ ID NO: 243355 - protein, 362 aa, unidentified
MQSTPLVAFDQHAATTVAAVLLPGQRTPALHSLTSDSPTILRFVKRLQRNVGTVQCCYEAGPCGFELQRALTAADIPCEVIAPALIPRRAGDRIKTDRRDAAQLAILYRAGALTAIHIPTDQEEAVRDLLRCREDIRADLLRARHRLSKFLLRHGRRFTATKQAWSKRHDTWLRAQTWPLPALTQTHEAYLRAVDEAVARLRTVDAQLQALVTLEPLRGRVQRLRCFRGMDDLTALTIAAELGDARRFPTARGLMAYVGLIPSEHSSGTKRARGAITKTGNAHLRRVLVEAAWHYRHHPFIGKQLRRRHVDAPDLAKQHAWRAQQRLYRRYQRLAARGKPKQHVVTAIARELTGFVWASLTQ

SEQ ID NO: 243356 - protein, 441 aa, unidentified
MKLQNLEMKRHYISDKFIVGIDPAKNKHQAMVLDPKGLPIGNSFSFSNSYNGYHFKLWQKLKTFPFEFTPENTAFAVEISINFWQKLCHYLSEKGYTVLMVRPITTKHERPRLNNFSRTDSKDALCIASSARQGYFNFYQKYADEIQGIHRLGITYDKLKKQIVIAKQRLRSEVEMLFPEFPGILKIDTDTARYLLSKYLTAGDFSEINVFYEAIELVAISRNHHGAETLKKLKEAASKSIGLPLDKVGYMSHRMTVNMWIEQIKMLKIQQYNILREMSALAQKTPYFSILTSIKGISEITTARFIAEIPQLGNDLHFKQVEAFAGLNLRLSESGQITGYRRISHWGNNRLRAVLYKMTEETKNHIPEIRIRFLKRQMKHRSYTKNITACTSNLLKIIMALIRDNKCYVFNPEKVKEMEVLDEKYQELKQKRQSKAFVKVA

SEQ ID NO: 243357 - protein, 424 aa, unidentified
MHIRKATRMKNWKDLTHYAGFDWAKDHHSVVIVNAEGQIVADFEFAHSLEGWKSFVEKTSGWPHLGVAIETSQGAAVDQLLQREYSVYPVHPVSAQSYRERKAPSGTKSDHLDAWGLADALRVDGHGWKALQPMDPMTQQLRLLCRDEVSLIEQRTALVNQLQQALAEYYPAALEAFDDWTDAFTWEFVLAFPTPQVLVTAGKRRWEKFLHTHKLWRPETAEKRLKLFAQADQFKASEPIIRAKSQLAVSLSKLLCTLRQQLKLYRKQIEALFRDHPDRDLFGSLPGAKKILAPRLLGAVGNDPDRYGSQEVLQCIAGTSPVSYQSGRINKVRIRWSCDKFLRHTVHLWADCFRKASAWGQAYYQKKRQQGMSHACALRCLGQRLLKILFRMLKDKTPYDAELHALNQQKHGSWVLKLVNTPAT

SEQ ID NO: 243358 - protein, 409 aa, unidentified
MEVMYTRCCGLDVHKESISVCVLVVEAGRREKQMRRVGTTTGEILELGDWLRQLQVTHVAMESTGVYWKPIWNLLEGSFQLLLVNAQHIKQVPGRKTDTKDAEWIANLLQHGLLRSSYVPDQEQRDLRDLTRYRARLSDDCGRVAARVEKVLEDANIKLAAVASDVLGASGRAMLRAMIAGEQNAERLADLAKLRLRQKLPQLRTALAGRVRDHHRFLLQQLLEELEFLETRLAQVEKRIEEQMRPFESAVTLWKTIPGVSDVTAWSLVAEIGTRTEQFASAQHLASWAGMCPGNNESAGKRHSGTTRKGNRWLRRTLNQAAWAVSRCKDSYLAARYRRLATRRGKKRAIVAIGHKLLLIAYTLLQRGCTYQDLGGDYFDRMRADGLIRSLVRRIERLGHSVVLQPASA

SEQ ID NO: 243359 - protein, 428 aa, unidentified
MSYRIAGIDVHKKMLAVVVSDVEIESEYQFERRMFSSNPEQLRSLAAWLVEQKAEEIVMESTAQYWKPVWETLERYWKPLCEKREGARRRSGTLHLAQALSNRGRRGRKRDFVDAERLVKRLVARELTLSFVPDAEQRLWRTITRKKYQLRRDLVRIHNQLEALLEEAHIKLSSLVSDLLGVSARRMLKALADGETNPAALAALAHERLRATPEQLCDALGACTQLNPVYRRLLKMTLEHLQILEQQIGQLDQELATLLHPHQDAVERLAEVPGFAVDSAQQIIAEVGPAAATFPSEKCLSSWVGACPGEEESAGVNYSHRSPKGNRHMRRLLNQTANAAVKAKGSIFEIIYRRCVPRLGHNQAIGVIAHRQCRLIWLILHQGTRYEERGPAVTKRSRYQRTWRMIRQLRNLGYRIELPNPDASQAQA

SEQ ID NO: 243360 - protein, 415 aa, unidentified
MEVLFSRCCGLDVHKSSITACVRIQEVGGKPRKIVRRFGAMTADLRSLANWLIEEGVTHVAMESTGVYWKPVWNILEGQLTLVLANAQHVKKVPGRKTDTKDSEWLAELLQHGLLAGSFVPPRLIRDLRDLTRTRAVLTQESSRIASRIQKVLEDANIKLASVASDTLGKSGQAMLVALIAGEDNPEQLADLALGSLRGKIPQLRRALEGLTREHHRFLLKRLLVQWRFVESETELIDQRLEQIGKQEVPIAEAVARWDTVPGVDRIAAWGLVAEMGIDMEQFPSAKHAASWGGVCPGNHESAGKRLGGRTRKGNPWLRRILGQSAWAAARTKNTYVAVQFRRLAAKRGRKRAIVAVGHSLLVIGYHLLRKQSVYQDLGAGYFDRLNAEGLKRYLVKRLESLGQKVTLEPRESVA

SEQ ID NO: 243361 - protein, 350 aa, unidentified
MLIVGCDYHPGFQQIAFVDMETGELQERRLAHPEEAEKFYRELAASGVKVRVGMEASGHARWFERLLAELQFELWMGDAATIRAKRVRKQRTDRHDAQHMLNLLLEGRFPRIWVASWENRDLRQLLWHRHRMVTMRTRIMNQLQAVAINEGLRCKKRLWRERGRKQLEAFPLARWASRRRRDLLELLDRLNPTITELTQAIEQEVEKYPEAQRLMTHPGVGALTALAFVLIIGDVERFRCGKQVASYVGLVPTEESSGDRRRLGHISKQGSSLLRFFMVEAAQATVRSDPEWRSKFFHLAMRRGRKIAKVAMARRLAVRLYWMWRQQWDYEQWKAFGPHAGQPETGIGVQ

SEQ ID NO: 243362 - protein, 355 aa, unidentified
MSSMTENPPDVSTTIFVGVDTHKDTHHVAYTDSLGRDLDDKEFPSTAAGHADLITWITTAGTVERIGVEGTGSYGSTLVTALHNAGLDVVDVDRPDRRSRRFHGKSDPLDARSAARAALTGKATTTPKSHDGHVEAIRFLHNARRSSIKARAEAVTQLKSMIVNAPEDIRADLRALTDAALFTACARLDATPKQPSTINAAVHSALRSVAERIQDLTTEERTLARQIKALVAEHAPQLLAQFGIGTDTAAQLLITVGDNPDRITTEAAFAHLCGVAPIQASSGRTHRHRLDRGGDRQANRALYTIAITRLRSDERTQQYRDRRLAEGKTPRDIIRCLKRAIAREVFGLLRPPHHP

SEQ ID NO: 243363 - protein, 408 aa, unidentified
MELLYRRCAGLDVHQRTVVACVRVAEESKLTEEVRTFETTTTGLLTLSAWLESEGCTHVAMEATGVYWKPVWHILEAKFQLVLANAAHIKNVPGRKTDVKDATWVADLLAHGLIRGSFVPPTPIQDLRALMRTRKQLVREAARNTQRIQKALEDANIKLTGVVSDILGKSGRAVLDALVAGETDPEKLVELTGGRLKAPRSTLVEALRGNVREHHRFLIKLHLDQVDAITKAVRELEARADEHLDPFRKNVEILTTIPGIGETAATVIVSEIGHDMARFPTAAHLVSWAGMCPRSDESAGKRRSSRIRHGAPWLKTTLVQCAWAAIRTKDSYLRAQFHRLKSRVGSMKAIIAVAASMLTSAFHMLKTGSDYKDLGAAHFDRRDHAKLAKRLVRRLEDLGLKVTVAQAA

SEQ ID NO: 243364 - protein, 402 aa, unidentified
MNAVGIDISKGKSMVCIMRPFGEVVASPFEVTHTGSELSKLASSLKSLNGETKVIMECTGSYYYPVAYALHEAGLFVSAVHAKLIHDFGNNTIRKVKTDKADSIKIASYGLNHWLELPEYIPEEDVRRMLKAFCRQYTKYCKLKIMLKNNFISLTDETFPGVNELFTSPPRKSDGHEKWMDFAFKFWHCECVCGLTPKAFAERYQKWCKREGYRFSQYKSDDIYASACGHLVGMPKNETTKLLVTQAVNQINAISESIAIIAHEMKRLAKMLPEYPVVSEFYGVGDILGPQLMAEIGDIYRYRNKGSLVCYAGLEAPPYQSGKFDSANRSISKKGSPHLRKALFQVMDCYLKRSPSDEPVYQFLDRKRAEGKHYYSYMTAGSAKFLRIYYARVKEYLEKIED

SEQ ID NO: 243365 - protein, 416 aa, unidentified
MNAVGIDVSSRKSTVAVLRPLGEVVCLPFDVTHDIAGLASLAEKLKALDGETRVVMEHTGRYYEAVEKALHEAGLFVCAVNPLLIKEYGANSLRRVKTDKADAVKIARYALDNWADLRDFTPMDAIRYDLKTLNRQFQLASKQRTASANNLIALLEQSFPGIRKCFDSPVRSDGTQKWVDFAHSFWHVDCVRKQPFPAFCERYRKWCKRHAYLFKQSNAEEVYALAKRAVVLTPKSKVVKVLVQEAANQLSSISRSVEVYRAEMDRLAAMLPEYPVVMAMYGVGKSYGPQLMAEIGDVRRFERKQALVAFAGIDPMPNQSGDKNVRSNKSSKRGSPYLRKTLFNVIRTYLQCAPQDEPVFQFLNRKRAEGKPFYVYMLAAANKFLRRYYAKLRDYFASLDTLQPVDPIPTILKATL

SEQ ID NO: 243366 - protein, 386 aa, unidentified
MQASHVSTPIAGHNGTIFVAIELSQKDWLVTLHSPDKDRMSHYKVEVGDGAGLLALLERVRERAGRKLGALPGVKSCYEAGYDGYWLHRFLQANGIENYVFDPGSIAVEQRSRRTKTDRIDGEQLVRTLRSHCRGEPRVVRIVHVPSAGQEDARRATRERDRLIKERTGHTNRIKSLLRLLGMAVGNPLRRDWLTWLARQRDWQGRPVPPQILAEIEREHARLMLLREQLSKLEKSRTEVAPTPELAETARREEVLCRLRSLGPAFTGTFTYEVFYKDFTNRRQVGSYVGLAPSPWRSGGTNREQGISKAGNPRARHKAIELAWLWVRHQPESALTLWFRERTAKASKRVKRIAIVALARKLMVALWRFVTTGLVPTGARLKPATA

SEQ ID NO: 243367 - protein, 412 aa, unidentified
MQVLYPCCCGIDVHAKTAVACLIKQGKRQTRTFSTMTDDLLRLSDWLTSEDCTHVAIESTGVYWKPVFNILESVLTVILVNARDAKAVPGRKTDVRDCEWLADLMRHGLLRASYIPPLEIRELRELTRYRQTLIKEHTAVANRIQKLIESANIKLGQVATDVLGLSGRLMLRALADGEEDVERLVELARGSLKGKKPELGRALTSRLTPAQRFVLNELLLRLAELEAATGRVSEQIIKEEASSADPFVPEAVQLLQTIPGIGLRVAEVVISEIGVDMARFPTDAHLASWAGVCPGNNESAGKRRSGQTTKGSPYLRAAITQAAWAAAHTKNTYLAAQYHRFIKRMGKTKALVAVAHSLLVIVYHVLAQKADYRELGGDYFDRQYQQTQQQRLVRKLEAMGLKVTVEAVPEAA

SEQ ID NO: 243368 - protein, 345 aa, unidentified
MGPMYYIGLDVHKQKISYCVKDSSGCIHSEGWIPATRYDLDCWMKNLPQPWSAAMEATMFTGWIYDHLKPHATAIKVAHPLMLRAIAAAKKKNDRIDANKICDCLRCDFLPECYMAPTAIRERQRTLRYRNLLVRQMVQMKIKISTLLMEAGVSYNKQKLHKAGYFRELLASNPAINESLRSLLRQCRETVVRLSKMEAALIQSLQQDRLLVERVERLMSIPAIGPITALTWALEIGEVRRFSSIKKAISYCGLCGAEKSSGDTVRRTPLSKQRNKHLQTTLIEAANMAPRYSPTLALLYDREKQKGNANRATLAVARKLVAYLLAVDRGQTHFLVLDQETRTAA

SEQ ID NO: 243369 - protein, 402 aa, unidentified
MAEGPTRFFGLDIHKEYFVAVGVDAQREVVFGPQRVSNYQLDNWVSRVLTTQDAVVLEMTTNTYLFYDTLVPHVHSVIAVHPPNVSLVTNVRVQTDKKAALALAQLHAAGMLTGVWIPPHEVRDLRALIARREKMVRLSTMAKNRLHSVLHRNHLVLPEKPFAPEQHTWWESLSLSATEQFLVRSDLDTLEFAQKQIGQAEECLKKASAKDERIPLLVQLPGVAMLTAITILAAIGDVTRFPDAKNLVGYAGLGTRVHDSGMTHNSGRITKAGRRDLRRSMVNAANHAIEHHPHWKKEFERLEPHLGRSKAVVAIARKLLVAVWHVLSEKTADRFADTGGVARSFFAHAYKVGVRNLPKGQSAVAFTREQLDRLGIGRDLQEIPWGSKPHKLPRSKLLPEKE

SEQ ID NO: 243370 - protein, 365 aa, unidentified
MWEAPVKIQRTSVGLDVHARSVLGCGLDGDTGEVFQRRMTPDHGEIVAWLGDLPGPVAVTYEAGPTGFGLARALTAAGIACEVAAPSKLIRPAGDRVKTDARDAAHLARLLHLGQITAVTVPTAHQEAARDLVRARDDCRADLMTARHRVSKLLLRQGIVYSGGKAWTGKHELWLRTQRFDNPALQLSYEAAFDAMLACVDRRNRLDDAITATAADSEFTPVVHRLGCIRGVATLTAFGLAVEIGDWHRLSGRSIGAYVGLVPSEYSSGDSRIQGGVTKTGNGHVRRLLVEAAWHHRSPYRPGAQLRRRWDLASPAVRARGQAANRRLHTRWVGFDARKKRSVIANVAIARELAGWCWSLAVMPD

SEQ ID NO: 243371 - protein, 344 aa, unidentified
MTYYAALDVSLRSVHVCVIDDQGEIVAETKLDSEVTDIIAYLDELDMELASVGLEAGTLCQYLTYGLQSAGFEVVCMEARQVKAALSAMRNKTDKNDARGIAQLLRTGWYSKVHIKSMASHRVRALLSSRKAVLCKCIDLEQEIRGLFKVFGIKLPPKLGHGAFDAAVRAIIETDATLCFTLLPLLDARLVLYHCFRELDNRTRKLANDDPICQRLMSAPGVGFITALTYKAGVDDPARFKRSRTVAAHFGLTPRRFQSGEIDIDGHISRCGDQNVRCTLYTAANALMTRSSRWSSLKAWGMHKAKTRGHRRAVIAVARKLAVILHRMWVDETQFNWGTEDARS

SEQ ID NO: 243372 - protein, 379 aa, unidentified
MLSLAGSLMGWTAPDPAASQCAKMALSKDHQREGTVRMQVITIGLDIAKNVFQVHGVDNAGNAVLRRKVRRDQLIPLLRDMQPCLIGMEACATAHHWARELIALGHVVKLMPPAYVKAYVKRNKNDAADAEAICEAVTRPTMRFVAVKSADAQSILMLHRARHLLVRQRTAQISAMRAHLAEYGVVAPKGRAHVRGLIEALDKGDGPLPAMARQVLILLARTIEGLGAQIRKIEIELLAWYRTNQVCRRLSTIPGIGFITATALAATVVDAKVFRSGRQFAAWLGLVPKQHSSGGKDRMGGISKMGDRYLRHLLVVGATAVIRYTRRKATTVSTWANQLLERKPARLVTVAVANKVARIAWAVMAREENYRATPSMARR

SEQ ID NO: 243373 - protein, 433 aa, unidentified
MQDAQDEPLFCERVAGLDIAKAEVEVTIRVPSDTTPGRRQQETRTFTATRAGLLSLADWLRCWGVTKVGMEATGDYWKPVFFLLESRGFDCELYNAAQVKALPGRPKTDRADSIWLARIVERGMISASFVPPEPIRRLRTCTRYRRHLTQARTAEKQRVEKLLEDGHLKLSSVISNIHGVSGRDMLNAIAAGQRDPKALAQLARGTMRGKIRRLEEALECSFFTDEHAAVLAMMLAVIDHYTAQIEALTATIETLTEPWLHQIAQLDAIDGIGTVCAQDIIAETGTDMTVFPTAAHLVSWARWSPQVKQSAGKRKGSNATGRGNPYLSAALGEAAISAGRTQSFLGARYRRLTRRMPKKKALVATGNSMLVIIHALLSDPAARYTDLGADYYEQRMHARRQARNHVKSLERLGYKVIIQALSPDTSQPLTTAS

SEQ ID NO: 243374 - protein, 295 aa, unidentified
MNSIVYVGMDVHKKQYTLCCYSYDTDKVEYKQTIPSDYKLVLKYMEQVRSRYEGEVTFVCGYEAGCLGYSLYHQLKDHAVDCKILAPSTMAVTNTHHVKTDKRDAANIARCLAFHTYSEVYVPDNDDNDVKEYIRMRDDQKLYLKKVKQQILAFVLRQGKRFEGGKTYWTIAHLKWLKTLELSDLQRETLDEYLLTYEYLKEKISRFDERIEELASVERYEEKVKHMSCLLGIKTHTALSMIVEVGDFERFEKAPKFASFLGLVPSEDSSDTRVNRYSITKAGNSHLRRLLVEAA

SEQ ID NO: 243375 - protein, 412 aa, unidentified
MKKNINKSTAKKLEISRQDKKEQTKLLKGKVQRLVQKLEQSAPAVDCRLAKATDTNRPVTFFIGIDLGDQKSNYCMMDEGKEIRAEDKLATTTEAFKAYFSSIPRSRIALEVGTHSPWVSELLESLGHEVYVANPRKMESIKKSKRKNDKEDARKLARLVRADPELLYPIRHRGLQAREDLILLRARDAAVRSRTMLINCVRGLVKSVGGRIPKCDGKNFHQHAEGALPESIREALLPLVKQVATLTGLIREYGKKLDKMAATKYPETELLRQVKGVGGLTSLAFVLTLEKPERFGKSRDVGPYLGLVPKQYDSGESSKQLRITKTGDEMVRRLLVSCAQYILGRFGEDSDLRRFGLKLAARGGKNAKKRAVTAVARKLGVLLHRLWMTGEVYEPLRNTRLQEEALAEVANG

SEQ ID NO: 243376 - protein, 427 aa, unidentified
MAAREKVGEPEFVAFVGIDWADQKHVWCLQAANSAKREGGELEHKPEVVEAWVSELCQRFGHGPIAVAVEQVKGALVYMLGKYECLHLYPVPSTMSASMRAALYPSGAKDDPRDADLLLELLVLHRDKLRRLTPDNEATRRVQNLVEERRKLVEEKTAQLNRLTGYLKVYFPQMLEWFAKLDTKLVCDFLERWPWLEELQKVPSAEVKKFFRHRRGRQGELTEWRMQGIGQAMPAIRDGAVIEAKRAVVQVIAQLLRTLLEGIATLDRKIAEAAEAHPDFFIFQSLPGAGAALAPRLLAALGSQRDRYGSAAEVQKYSGIAPVTERSGKKKWVHFRWACSKFLRQSFHEWAGHSIAQSVWARAYYQQQRERGKEHHAAVRALAFKWIRIVFRCWQDRVAYDESRYLVALAKRGSHLTSAFAAAAVSM

SEQ ID NO: 243377 - protein, 365 aa, unidentified
MSSVASPAGLVHLGMDTSKKTIVIATLWPGEEIPVTERIANEEAAVRRFFGRLGDPLVLRSCYEAGPGGYDLYRLLTSMGVACDVVAPSLIPKGGSDKVKTDKRDACRQARLHRAGELTPVRVPTQAEEAVRDLVRVRAALVDDRKRAQQRLTAVLMRHGSVWTGSYWTAAHRAWIDAQRFGEPALAAAIAHYRGTLATREAELAAIEAELAPWARRDPLAGPVARLGCYRGIAELGGLTLTAEITDWRRFPAARAFMSCTGLVPSEYSSGERTRRGSITKAGSEPVRTTLIEAAWAYQHAPAIGATLRRRQAGADPGTLARSWKAQRRLNGRYRHLTSHGKARGEAITAVARELAGFVWAEMTA

SEQ ID NO: 243378 - protein, 331 aa, unidentified
MEEVKRFVGIDVAKLALDVFIGSAGGAFSVANDEVGIRELLRQMKPADCVIVEATGGLETPVASALAAAGIAVAIVNPRQVRDFARATGKLAKTDRLDAEVLARFGEAIRPEARPLADEQAQALEALVTRRRQLVEMLTAEKNRRARAPKVLHRSIDEHIRWLEKRLSEFDDELGELIRLTPLWRERDELLRSVPGVGTVLSSTLLAQLPELGMLNRKQIAALAGLAPFNRDSGNMRGSRCIWGGRAQVRRVLYMATVAGVRSNPTIRTFYLRLRTNGKHAKPALTACMRKFLVILNAMLHNKTRWQTPAPTFLTSSLSPLLGAVCEHGCC

SEQ ID NO: 243379 - protein, 351 aa, unidentified
MSLAELVDHVIGVDPDRDRITAAVVCARTQGEIASKSFATTARGYGQAMRWAKDHTTDGRRAWSIESTGSYGAGLASALATRGEFVIEFDHPATRPSKDGAKSDSLDAVRAAREILGRKTWATPRSRGAREGLRTLITARDSAKLARVAAINVLKALVVTAPIDLREELRGRPLMDLVGRCQRLRPDTAIDPEHAATKLSLRSTANRVRHLSDECRELELAMIPLVRAMAPALLDEPGIGVLMAAQILVSWSHPGRCRDEAAFARLGGVAPLEATSGQTQTRHRLSRGGDRQLNRALHTVILARAKHHQPTKEYIARRITEGKTKREAMRCLKRYYARHLFRLLEAAPMTA

SEQ ID NO: 243380 - protein, 313 aa, unidentified
MNYAGIDVSHKELVIVVSVQGKAHKAKTFENTASGHKAIIQLLSKLKGESRACIEVTGVYHFDLAVALSRAEGIDVMVINPKASHNFAKVLMKRSKTDAVDAEILAVYCERMPFEAWQRPTDERIALRALARRIAALTKLKTQTKNQLHALKATEETPVLVLEYTEELINVVDKQIQAHRDSARQLIQQHDELAEAFALITGIKGIAVASAVQMLGELMILPKDMSAKQWVAYAGLDPRQFESGSSVTKKPRISKAGNKFVRRALYMPALVATCHKPHINDSRQRFKEDTGCMRGHAQTFTRHPWHAESQKRI

SEQ ID NO: 243381 - protein, 345 aa, unidentified
MKYMGIDCHKQYLVTALVDEEGKLLRQDRVPTSQRAIRTYFTALSGTSGPISAVMEASINWTCLYDDIAPGVDQLVLAHPLKTRLIAEARIKTDKIDAKNLAQLLRTNLIPLAYIPGKETREIKNVLRFRVGLVRLATSVKNRIHVVLARNHFDEVEISDVFGKKGRELMETMPFTPRDRTMLDGYLEILDGIQKKIAETEKLIAAIGKNDPIIQLLKSVPGIGDVIAPLLRFEIDDIGRFNTARKLWSYAGLVPSTYSSGGKTRHGKLTKQGNVWIRWAIIEAVHAAVKKDVSLRRYHTRIAAKAGKNAATTATARKLLEIVHRVWRTGKPFYISYAAVALQSI

SEQ ID NO: 243382 - protein, 383 aa, unidentified
MRKIQETLQAQSTTDQDVMYIAFELSNSTWRLAFSDGNKKRHVTIKARDLKQLEREIEKAKRRFGLKDNVQIKSCYEAGRDGFWIHRYLLSKGIDNLVVDSSSIEVNRRKRRAKSDRLDAENLLRLLMRYHGNERQVWKVVTAPTVKEEDARHLHREIETLLRERTRYRNRIRALLVQHGLDVKNPSRKNFLKVLNTLRSWDGQALPESMKARVVREHERLKMIEDHIKLLKKEREQRVKSKETASLRQVAQLRELCGIGVNSSWIFVMEFFGWREFRNRREVAALAGLTPTPYDSGGSQREQGISKAGNKRIRTMAVEIAWCWLRFQPHSKLSRWFNERFASGGSRMRRIGIVALARKLLISLWRYLEHGVIPEGAIIKSAS

SEQ ID NO: 243383 - protein, 373 aa, unidentified
MDYSTIYVGMDVHKETFSLCCYTNEKEKAEYPQKVNAHYSKVINYIEAMRFHYGDDALFVCGYEAGCLGFTLYHELTAHNIKCVILAPTTMSKPSGKKKIKTDKRDAALIARCLAHHDYSPVHIPTKQDEQVKEYIRMRADHKLALKKVKQQILSFCLRHGFHYDGTKNNWTQAHIMWLRTLDMDEMYRETLDEYLLTFDFLTGKLDRIDRRIEELASDETYIEKVEKLECFLGIKTQTALSVIVETGDFNRFADAQHYASYLGLVPGEDSSGEDQNRLGITKAGNRHVRMLLIEAAQSYSRGQVGYKSRVLAARQQGNTPKVIAYADRANERLRRKYYRMVLKCGKKANVAKTAVARELACFIWGMMTDNIT

SEQ ID NO: 243384 - protein, 346 aa, unidentified
MEHYVGLDVSLKLTAICIVNELGKIVREGAVASNPEAIAAFVKSHAPHVARIGLETGATSTWLWTELSVMGLPVICIDARHAKAALRMQINKSDRNDAVGIARIMQCGWYKEVRVKDLDSHAVKGLLVSRALLVKIKRDLENQIRGLLKNLGLVIGRAKMNVFAVRAAELVEDRPQLAAAVEPLLKTREAVELQIADLDRKALRLARNDVQVRRFMTVPGVGAITALCFLATIDDPTRFKRSRSVGAYLGLTTRRYASGEIDWTGRISKCGDKMPRSYLYEAANVLLTRVAKWSVLKAWGIRVAKRSGLRKAKVAVARKLAVILHRMWVDGTEFNWSAKEVAAQST

SEQ ID NO: 243385 - protein, 384 aa, unidentified
MKPNSDTTPALYIGLDVHKEKTSVAIADPGANGEVRSHGEVATTQVALERLIRRIAKARKVPVSRISVCYEAGGCGMWIARLFARMQVPCTVVAPSLIPTKAGDHVKTDKKDAIKLARLLRAGELVSVFVPDETDEAVRDLCRARVDAIDDRRRAKTRLLGMLRRLGFNYTGKTTWNDAHKRYLRHLALPFAAHRVILEELIGQIDQLDARIERYEKHMEHLYADWRCKPIVDAVMGFKGFQLIAAMMIVSQVGNFVRFTHPKQLMSYLGLTPGEYSSAGKHKRSGITKCGNSHARWILVECSTHYGKEPKVGAHLSKRQEGLPGWIREKSWSAQNRLYLRFTNLRKRLMHHNKIKVAVARELCGVIWEIGYKIQSGAVKATNI

SEQ ID NO: 243386 - protein, 387 aa, unidentified
MGKTMSLASSAAAVDYDATLILAVDTSNKSWVVAAHVPGFGHIKAKQMTAPTADALAIAIEGYRRRAATSGRVIDRVIVVYEAGYGGFWLARWLKSRGIEVHVMQPSSVPVERRKRRAKSDKIDADLLLRTLLAWLRGEPRVCSMVAVPEEAEEDARRYSREREELIRERIMLSNRVGAILATLGIDDYNPLRRDRRVRLEALRTALDQPLPEHARAKIVRIIDRLELVLSQVSVLESQRDAVLEEKAPEEAERMIKALVLLRSIGAQSATVLVYEAFIRRFASGKALGCYAGLTGTPFNSGGSEREQGISKAGNRRLRAAMGELAWLWLRYQPESALATWFKERLAGAKGRLKKVLLVALARKLLIALWRYATDGVVPVGAVLKPA

SEQ ID NO: 243387 - protein, 438 aa, unidentified
MTVTVAIPFYKVVILMMKLKYPICCGLDVHKNVIVATIVITNRDGVSEYRQKSFSTINPDIQKFHNWLIENNCYHVCMESTGKYWIPIFNYLEKDIEVCLTHPKYVKAIKGKKTDKKDSKWIADLYKFDLVRCSFIPPKDFRQLRELARYRFKLVCMKSSEKNRIQNCMTVSNVGIASVLSDPFGKTATEIMSYLLEHTADSIDEKAVRKLIKKGAKAKSDEIIEAIRGCNIETDQAKKLELALGHLEYLDGMITQTEVELYVRIKPYYEFVEFVSTMPGMTELSSTIVLAETGVDMNIFDDAKHLCSWCGLSPSNNESAGKKKSVRIAKAGAYLKPMMVQCALAAIKNKKQPYFAIKYGRIKKRRGHKKAIIAIARMMMVCIYHMVSEKKPFTPADYEELMKPQNHVERVVLNENNVFAYLESLGYDSSKLVKRNDN

SEQ ID NO: 243388 - protein, 354 aa, unidentified
MPKTAKPSLENLNVIGVDIGKDNFHLVGFNVDGKIVLRKKIKRLALITTFEKFPRCIVGMEACLSAHFVSRQLRALGFEPRIIPAMYVKPFLKGQKNDYNDAEAIAEAALRPNLKLVKEKTQEQLDLQALQRVRSRLVSRRTATINQIRAFLIEQGIAVRTGVNSLRNSLFPILLNRKDEISPRMSDLITGLYEDWLWLDERIETLTAEIEKLSKQEENCQRLMSVPGIGPIISTAVVAAIGTGEAFERGRDFGAWIGLVPRQYSTGGKSILGRISKRGSKYLRTLFIQAAQVILMRPHNWEKFSFGPWLAEAAKRMHRNKLATALANKLARIAWSVLRNGKRFDIHHLEIKAI

SEQ ID NO: 243389 - protein, 354 aa, unidentified
MKRTTKYVALDVHQATTVASVREESGRVIARSVVPTDAGALTEFVRGMRGTRHVTFEEGTQAQWLYELLAPLVDRVVVCDRRGAPRQGNKGDQVDADQLSELLRRGALRAVYHGSADRATLKELTRTYRNLVEDSTRVMLRLKALFRARGIPTAGTAVYHSRHRAQWLARLLEAGARFRAEALYAELDVLRKLRPKAKAAMVTEARRDPAWPVLRTIPFLGSVRVALLLATMQTPWRFRTKRHLWAYAGLAVVTRSSADYTIVAGQAVRRRRSPMTRGLNRNHNRVLKDVFKGAATAATARPGPLQAFYRSVVARGTREELARLTLTRKLAALTLRLWKKGERYDPTKLTTPAR

SEQ ID NO: 243390 - protein, 308 aa, unidentified
MEVFAGIDVAKESLEVFVRPDNIRRSFSNDEQGRTSLACLLGKTGSSLVVLEASGGYEIPVVEVLALSALNVVVVNPRQVRDFAKATGKLAKTDAIDAEVIARFAEVIRPEVRPLKDEDTQRLQALIARRRQLVQMLTEEKNRLQIAPPWTRADIKAHIAWLTECINKVGKDLGSLIRKTPLWREKENLLRTFKGIGPVNACTLLARLPELGQLNRKKIAALVGLAPMNRDSGKYRGKRTIFGGRADVRAALYMATLSAVSHNSIIRAFYQRLLQAGKVRKVALTACMHKVLIILNAMVRTNTPWCAR

SEQ ID NO: 243391 - protein, 417 aa, unidentified
MSLTPATTAGPVPGRVCAGIDWASVDHAICILDAQGAVAERFFVVHDAAGLKTMVRRLLKASVDEVGIERSDGPVVEALLQAELTVLVIAPGQLKNLRSRYGSAGNKDDRFDAYVLADVVRTDRARLKPLVRDSAATTAMRTTVRARRDMVEHRVATANQLRAHLQNVFPAAAGLFSAIDSTISLTFLEQFTTQSRGDWLSPKRLTTWLAKLSYSGRTSPEEFHARLLAAPRGTTDPDAKVHAATTDAYVALLRVLNTQIAALEDNLTEQLATHPDTHIFASLPRVKTLRTARLLAEIGDARGRFPTAESLACLAGVAPSTRQSGKVKAVTFRWGANKQLRDALCDFAGDSRHANPWAADLYNQAIARGHDHPHAVRILGRAWAHVIWRCWHDNLSYDPTQHRALQNVLDKTATKAA

SEQ ID NO: 243392 - protein, 343 aa, unidentified
MQAITTIGFDIAKSVFQVHGVDAAGQVIVRRQLKRRQVIAFFQKLPPCLVGIEACASSHYWSRELQALGHRVRLMPPAYVKPYVKRQKNDMADAEAICEAVTRANMRFVPTKTPEQQSGLVLHRTRHLFIRQQTSVINAIRAHLAEFGVIAPVGRKGVEELLRVVADPNDKRVPEVVRACVAALGSQLLSLKKQILDFDRMIMAWHRSNQTSKRLNCIPGVGPLLATALVASVADPKTFRSGRNFSAWIGLVPKQHSSGGRDRLGSISKQGDRYLRSLFVAGALAVIRYAKIHGTKHRPWLTALLARRPTKLAAIALANKLARMAWAMMATGARYNYPTSLRV

SEQ ID NO: 243393 - protein, 409 aa, unidentified
MAGALHIGIDISGKANVAQFMDADGELVRNILLFSNDWEGLEMFLNEVATLVQKHHPDTVNIGMEATGFYWWHLQEALKDVQLGQSVVKIYTINPAMVKNFKKAYKKLPKTDAIDAWVIADKIRFGRVSPLHPGSLIYAPLARLTRLRYTIKKNIRSDKSRALDLVFLKFSTYRQAAGDKMFRKASLDMLDEFTVEEIAKTPLEELVEFVLTQGNNRFAEPEEFVKELKKAARNSYRLNPKMEDAVSIALSMTVENIRFMESQCKRLEKVIAKELQAIPQTLNTIPGIGETLAAGIIAEIGDIKRFKDEKALAQFAGLTWHIHKSGPFEAEETSLTKAGNVFLRYYLVEAANSLRLHNSEYAAFYQRKYNESKKHRHKRALVLTARKFTRLVFALLSKGQIYQKQEVSC

SEQ ID NO: 243394 - protein, 416 aa, unidentified
MNWNDQPHFAALDWARAHHDVVIMDRHGKIVEQMRFEHTESGWTQFREAVKRYPDLPVAVETSQGTVVEQLFAAGARVYPVNPKAAERYRERQAPSGVKSDQLDAWSLADALRVDGHLWQALKPQDPLVAELQLLCRDEVALIEQRSAFVTQLRQALHEYYPLALQAFEDWTIPGAWAFIEAYPTPALLQSAGRRKWVSFLHAHRLWRTQESVDKRLDLFGQATHFCGSNPSVAAKSLLAVSLVKMLQALELQLEAYRRRITERFAQHPDHDIFGSLPGCGGKLAPRLLSEIGDDRDRFPQAENLQTYSGTAPLTKQSGKSSYQLARRACNKQLRVTLHLWANQSRENCTWANTFYLAHIEKGQTHATALRCLAQRWLKILWKLWQTHSVYDEAFHTRNQVTHGSWVLSFSPHHSL

SEQ ID NO: 243395 - protein, 338 aa, unidentified
MTVRVIGIDLAKNVFQLHGVDRHGHAVLRRRVRRESLMTLIATLEPCLIGIEACTGAFYWQRQFEACGHTVKIIAPQYVKPFVRHQKNDPNDAEAICTAVRQPNMRFVPKKTLAQQDIQALHRARQRLVNHRTALISQMRGLLLDRGIAIAVSATRARRLIPEVLSQPNQEITHLMRETIASLYAFMLQIDERIRAFDKQIAVIFKASEPCQRIAKIAGVGPKTATAIIAAIGDGSDFKNGRHLSAWLGLVPRQHSSGDRRVMMGISKRGSQHLRTLLVHGARAVVRTAVRKTDPRSAWVNDLRRRRGHNRATVAVANKNARVIWAVLRTGDQYHAAA

SEQ ID NO: 243396 - protein, 342 aa, unidentified
MSEIITVGLDLAKNVFQVHGADGAGRAVLRKKIRRAQVLEFFSQLPSCVVAMEACGGAHFWGREIGKLGHDVRLIPPAYVKPFVKRQKNDMADAEAICEAAMRPTMRFVPVKSEETQGAAMVFRVRELLIRQRTQAINALRGHLAEFGQIFPQGAANTSRLIAIVEDPENDLPANAVPTLKALISALAHLEAEIRKLDAEIAHRAKENDVARRLMTIPGIGPLIATAIAVLAPPPKTFRKARDFAAWLGLVPRQHSTGGKQRLGATTRMGERSLRRLLILGANSVIIKRHVHSSARPGTWLAGMLSRKPPMLVRVALANKMARIVWALMVKGQDYRAPAAAA

SEQ ID NO: 243397 - protein, 416 aa, unidentified
MEILHPICCGLDVHTKTVVACLIVNGKKTTRTFGTMTEELLELSDWLLEAGCPIVAMESTGVYWKPIYNVLEGVCEVTLVNAHHVKQVPGRKTDVRDCEWIADLLRHGLLRASFIPPAPIRDLRELTRYRASLVRDRARCANRVQKLAESGNIKLSQVVSDALGVSGRRMLRALAQGERDVDRLVALADRQLEPKREQLRKALDGRLTQAQCYVLGELLDRYEETQAAITRVSAQISKEVESEQQDPFVAEAIRLLDEITGVGVEVAQVIVSEIGTDMSRFPSAKHLASWAGVCPGNNESAGKRRSGKTTKGNVALKTALTQAAWGASRKKGTYLAVRFARFKAHLGQKRAIVAIAHKILVIIYQMLSKQEAYREEAIAELFRRPVEQERARLIAKLEELGVTVTIEQVAASSAAA

SEQ ID NO: 243398 - protein, 345 aa, unidentified
MEKTTRRLRKAQATIGLDLGDKRHTFCVLDTRGEVVNKGSMRNERNELAKLASAYPGALVVMEAGMHSPWTSRFLDSLGMGVVVANPRKTRTISQSERKSDERDALVLARLGRVDRNLLSPIVHGSEETQHDLLQIKLRDSLVRARVALVNSVRFTLKSLGYRVSNPSSERFHKLVVEELPESVRALIVHSVASIAELTARIKALEISIARLASEKYPQTIYLQQINGVGPITSLYLVLKIENPQRFTRTRNIGAFVGLGPKRDQSGETDKELRISKCGDRYLRRLLVSAAQHILGPFGTESALRDYGLRLAQDGTAKAKKRAVVAVARKLAVLLLTLWKSRQPY

SEQ ID NO: 243399 - protein, 319 aa, unidentified
MMHDAVVMWIGIDVAKASLDVAWGNGEDARHLSADNSASGWASLIHQFPPASESRVVVEATGGYERALVTALVEGGYRVAVVNPRQVRDFAKALGILAKTDRIDALVLARFGQQVQPRILEADPTERVELAQLVARRRQLIDLRTMELNRSQQTSARAAQKSIQHVLKLLAKEIEKLEAEIARLLQSDDDWRAKIELLSTTPGVAKVTSSTLVAELPELGRLNRQAIAALVGIAPFNDDSGRYRGSRRVAGGRASVRRVLYMATLAARRCNPVIRAFSERLAAQGKKPKVIITACMRKLLVILNTMLKNNTPWKDLHAC

SEQ ID NO: 243400 - protein, 342 aa, unidentified
MDEYDGRQFVGIDLHRQRSVIVRQSESGEQLSAVRIVNEPVALELQLEQAGADPEVVLEATYGWYWAVDVLQACGARVHLAHPLGVKGFRYRRVKNDVRDAADLADLLRMGRLPEAWIAPPQTRELRELVRYRAKLVAIRSGLKAQIHGVLAKAGVLIAVSDLFGVTGRQRLAKVPLRPAYAQRIRSLLELIDILDSHEARFAALIAERLDTHTGYHAIQQVPGIGPTLAAVFVAEIGDVHRFTDPAHLCSWAGLTPTHRESDTVVHRGHITKQGSKAVRWAAIEAVQRHPTTAKIAADKHRIEARRGKNIAKVAAARKLLTLVYYGLRDGHIRALDRTRAA

SEQ ID NO: 243401 - protein, 423 aa, unidentified
MALNIDVSKMEITHKDRVMNAHYTPNELHVGIDVGSLNHSVAISDGNGKMIREFDITHTQKGFDKFFTIIAEESKQRDATASIAMEGYNGWARPLDGFILKQGYKLYNVNNVKLARFKEIFPAAAKTDAIDARKIVELFSLQKHLPIAKKVLQEIQVSDSINKQLKKLSRRRKQLVEERMIITNRMGADLQAEAPDLKGLASCVDDLWFLRFVTLRQDMRLLIKVHKSTIEKIPRIRKNHIDTITAWQQNASFTDAIDYIASMFYDDALRILELKQKIKDIEKQIDKLIPSSKIASILITIPGFATVSAGTLAGEIGTLNRFESEGSLALYLGMTNLDNSSGKTKGSKRNMATNRHAKKAMINATMQHSRNTEESSVYLKKKISQGKKYQQAIRSLGRHLVRVIWSMIQQERSYEIRNKSLVY

SEQ ID NO: 243402 - protein, 348 aa, unidentified
MNATTFGLDIAKNVMQLHWVEPATGEIKRKKLSRGKLCEFFAQREPARIALEACGGAHHWARTLGALGHRVELLPARQVRPFACGNKDDAADARAIWLAAQHGDIRRVAGKSVQQQAIQATHRMRSHWVSVRTASINALRGLLCEFGVVLPQGKQAGLKALSRERESVDAQIPPLMASLVDQQLEMLRDIEQHIDALEKKLAAVQRELPSAARLRAVPGIGLLGATALAATLGDGSGWRNGREFACCLGLVPRHDGTGGKVNIGAMSKRGDPYLRTLLISGARAVLRQSTPTPWVAQMLGRRPVNVVAVALAHKLARTAWALVAHERSYEARWCSAPPQRSGASMQIA

SEQ ID NO: 243403 - protein, 311 aa, unidentified
MVERFGGIDVSMDRLDVMVLPDQWGFSVENNAAGWTELIKRLQGSSLAAIGIEPSGGYERGIIRALLTAGLSVRRINPNKLRQFARARGVLAKNDRLDARLIAEYVAIMPTRIVQRDAGAERLAEVVTMRRQLCDERVTVENQATHVEDAVLRRLNKRRLTRLESDIRLLDKRMAELVTAELALAQRYQLLISMPGVGPVLAFTLIALLPELGQMSRKQIAALVGLAPYDFDSGKLRGHRSIYGGRMPVRNVLYMAALSACRYNPALKTFHKRLAGADKKSKVVIVAVMRKMITTLNAMLRDNAAWQIKTA

SEQ ID NO: 243404 - protein, 412 aa, unidentified
MGGSVGRAIGLDVHRDFCEVAICEAGRVRSAGRVQTTPERLEVFARSLGADDRVALEVTGAAWEIARILEPHVRRVVVVGPDDTGIRQARAKTDRLDARTLARLVWAGELDAVWMPDERCRVMRRRLARREQLVRARSRAKNEIHAVLMRRLQGRPPMSDLFGVKGRAWLRTLELPVEEAETLESVMRQIEFLDAEIAAVERLIAREVLGSPDARRLMTVPGVNVICAATFLAAIGDIRRFRSARALVAYLGLDPRVRQSGTEPARGGRISKRGSGSVRWALVEAATSVVRQPGPLRAFYQRLRARRGHGKAVVASARKLASLFWCLLSRGEDYAHQQPSLTAQKLRRLELTAGAPVRTGKPSGVWVTHQRMRQAEKQLAAQAQASYERMVRDWKAASPKKNVGASVTAERA

SEQ ID NO: 243405 - protein, 343 aa, unidentified
MKQISTIGLDIAKNVFQLHGIDENGEVVVVRQLKRRGVLPYFAKLAPCLVGLEACATSHHWAREIEKLGHEVRMMPPRYVKPYVKRNKNDAADAEAICEAVQRPTMRFVPIKTPQQQSVLMLHRTRQLFVRQRTTLINAIRAHLAEFGIVAGIGRNGVEALLDLIAKGEDERIPPAARECLMALAAQLHLVKRQILEADRRVLAWHRTSKTSKRLEAIPGVGPLIATALVASIPDPSAFRSGRDLSAWIGLVPKQNSTGGKERLGSISKAGNRYLRKLLVIGALSVIKRAKILGYTRHPWLVRLMERRSTKIAAVALANKIARMAWAMMVRDEKYRTPLPQAV

SEQ ID NO: 243406 - protein, 360 aa, unidentified
MRIIGCDFHTRQQTLAMLDTETGELVKMTLLHEGNTVREFYSVLPRPVRVGIEVTGSLQWFVNLLEELGIECQVGNPAVIRAAEPRKQKHDRRDADLILKLLMEDRFPAIWLPSKELQDLRALVRHRHQWVRMRTRIQNALQSIALANGLRRGPALWSQTGQHTIASLPLAPHAAYRRSELQAMYEKFEAEIEKLNQRVEEQACERAGARLLMTHPGVGPVTALATEVFLGDPARFAYSKALASYVGIPRECSSAGKQRLGGLSKQGNPLLRFLWGEAGAHAVRRDPALQRFYRRKLVQKGLGKARVAVARKLGIRLWIMLRDQIEYNEFCRRRQKQQNSGAACAGRPGTHNGATSHRPG

SEQ ID NO: 243407 - protein, 426 aa, unidentified
MRFIGLDVHKDFCEVAVVEGDACWSGPRVRSTPEDLEVFAQSLGPKDQVVLEATGGALAIARILEPHVGRVLMANPMAVRAIATAKAKTDRLDARTLAKLLAAGFVPGVWISDERTRLLRRLVSRHAHLVRQRTRAKNEVHAVLQRTLAGRPPVSDLFGKRGRAWLGAQDLPADERQTVEASLRHIDFLDGELRLVDRTIAEQVLGWPEVRRIMTIPGMGAVAAAGVMAAMGDVRRFPTSRHLVGYLGLDARVRQSGSGPARHGRISKQGSAEARHLLVEAAWAAMRTPGPLRAFGERIRARRGANIATVAVARKLAVLCWHLLTREEDYAFGQPSLVREKIRRLELAAGAPNRNGYRNPVRVFATPAQRRLEREVGDQAEKAYRRFVKDFRSSGKKGAGATTGARISAARKGQAARQEQAPDPAL

SEQ ID NO: 243408 - protein, 337 aa, unidentified
MADVHILAIDLAKRSFQVCATDPSGAVLFNRTVSRAKLEQLLGTQQPCIVAMEACATSHFWGRCAQSHGHDVRLIPPIYVKPFVKRQKNDAADAAAIAEAALRPNIHYVAVKSAEHQARAVSFRTHQCFVRQRTQLINALRGHLAEFGLVFPQGPAHLKAVTGTLAEAGDTVPTSVTDIARLFLEQIELLTQKIDDLTRGLRDTSRVSEDMRRLCGVPGVGPVTAGAILAFAPDLRTFSSGRNFAAWLGLVPRQRSTGGKTRLAGVCKMGQSDVRKLLIVGAMSRIRWIVRKGVFPDTWLGRVVGRKPRMVAAVALANKMARIIWAMMTREQNYRMA

SEQ ID NO: 243409 - protein, 410 aa, unidentified
MEVLHPRCCGLDVHKDTVVACVRLVIDGKTVKEVRTFSTTTADLMALSQWLAENKCTHIAMESTGVYWKPVWHILADGEFELVLANAAHIKGVPGRKSDVKDADWVSDLLAHGLIRASFVPDSPTQEMRTFIRTRKQLSREQARHILRIQKTLEDANIKLDSVISDLMGVSGRKIIEALIAGQRDPAKLARLADPRVKASQETLRQALRGRVTRQHRFLLRLHLDQIDGLDAAIAKIDREVEAAIAPFRTAVEQVSSVPGVKNLAALQIISEIGTDMSRFPSDANLVSWACICPRSDESAGKRRSTRIRKGSPWLKTVLVQSAHSAVRMKGTYFQALFHRIRSRRGVKKAIVAVAASMLTAIYHMLKDGTMFQDLGTAHFDRRTKEQQKNRLVKRLAELGYAVELAPLPI

SEQ ID NO: 243410 - protein, 329 aa, unidentified
MSVNQQGREAVAASRPCAGIDVSKAHLDAAWVGRAERVSNDAGGWDALAAKFQADAVDVVVLEATGGYENAAACALQAAGLAVVVLNPRQARDFAKALGELAKTDRIDAQVLEQFAAVIARHPQRERYIRELPEAQRSHLAALVMRRRQLLAMRTEESNRLQMAHRATHQSLHAILKAIEKQLAVVDHDIDEHMQRHFKEVASLLESTPGIGDISVSTLVALLSELGQLPRRPIAKLVGVAPLARDSGTYRGARTVWGGRSEVRAVLYMATLSAIRHNAAIGQFHQRLIAKGKPNKVAIVACMRKLLTILNAMVRDGTHWDDSKHLKTA

SEQ ID NO: 243411 - protein, 317 aa, unidentified
MDAKSETDRFIGIDVSKPRVDVHVRPDGTAFYCTTDSAGLAEVTGRLTPLRPRLVVLEASGGYESVVAAALAEAGLSVAIVNPRQVRNFAGAIGRLAKTDAIDAAVIAHFAEAVHPQPRPLPDDLLVRLQELMARRHQLVIMINAENQRLAKARDRVAQSSFKAMLKSLEAERVRIDKAIDKLIEASPVWCAKQDLLKSLPGIGNVVARTLIAALPELGQVDSHQIAALAGLAPMNRDSGRYRGKRKIQGGRVEVRAPLYMACLVAIQYNPALKRFYRRLRDAGKPARLALVAAMRKLLTILNAILRDHKPWATAHS

SEQ ID NO: 243412 - protein, 342 aa, unidentified
MQVTTMGLDIAKQVFQVHGIGPDGQILIRRQIRRGEVLTFFRRLPPCLIGMEACSTAHFWARALAALGHEVRLMPAAYVKPYVKRGKSDALDAEGICEAVTRPSMRFVAIKSPDQQAVLMLHRTRDLLVRQRTMLVNALRGHLAEYGIIAPQGLAGVPKLIALAEKARGMALPDLAWRCISLIFAQLDEAHTRIGQIEREIMAWHRTNELSQRLETIPGIGMITASALAATITDPSAFRSGRHLAAWIGLVPRQSGTGGKVRLGSISKQGDRYLRRLLVLGACTLLRHARNRASATAGWITALLARRPASIVKVAIANKLARVAWAVLQDSRGYRAPAAAAA

SEQ ID NO: 243413 - protein, 465 aa, unidentified
MSRRSKSNRSHSDRVKKRIAGHLEKINLFAAGIDIGSESHFVAVPEELDEQPVRSFGCFTADLEAMADWLVKLGITTVVMESTGIYWIPAFEILESRGLDVKLVNARHVKNVAGRKSDVLDCQWLLQLHTYGLLNGAFRPDEQVCSLRSYRRQRDTLVGYRASHIQHMQKALRQMNLLLDNVVTDITGKTGMTIIRAILNGQRNPVELARYRDKHCKKSEEEIAKSLKGHYRDEHVFALRQAVELYDTYDEKIRACDKALEQKLNTFDSKDDKDSQKPSTPDKPSKKRKSRCAPDFDVRSELNRVSGVDLTDIDGIDENTALKIVSEIGLDMSRWPSAKHFAFWLGLCPGTKISGGKVLNRKTKRLPGAAATAFRLAAYALANSKSALGAYYRRMRSKLGAPKAITATAHKLARLVYSMLKHGSQYVDEGQEYFEQRYRERVLKTLKQKAKDMGFTLTPVETAVG

SEQ ID NO: 243414 - protein, 408 aa, unidentified
MNPLYVGIDVSSKSNVVYLMLPDGSKHSNFSVANSHDGSTQLVKRILSAITSLSLDTVIIGLEATSVYGDNLVYFLREDATLAQFDKKIHVLNPKQVKNFKEAYNDLPKNDYVDSYVIADCLRFGRINKEVYQGDYRYKALQNLTRARFFAVQNLVKEKQRFINVLFKKYSTMTQEKVFKDTFSTTALAVYEEFDSAEALASMDLQELTDFIIEKGKNRFPDPDAVAKAIQKAARSSYRLPKTVNDSVNQVLSISITSIKALDAQIKEFDKAIKAQMELLPNVLSSIPGIGPVYSAGILAEIGDINRFPSQAQLGKYAGLVWTQNQSGDFEAENTKLIRSGNRFLKYYLCEGALSLVRCDTEYSNFYHSKYKEVNRHQHKRALALTARKFVRLVFRLLKDNRLYRAAE

SEQ ID NO: 243415 - protein, 405 aa, unidentified
MFYLGIDVAKNTHRLVMLDNDGERVSKGISFQNSTADFQNVLNKLKELSISSTNSISGLEATGNNWENLYCFLTDNGFKTILLNPHQTNKFREALRKKAKTDDIDAFVIAGLLRSNEYASSYIPEDKIQTLRDFTKLRYELVKDHKNYQRQAMSLLNLIFPEYTQTALKNIFSISSTAILKAFPTAKHLSMAKIKHIEKIVRSIKGNNFNIKEIENLISTAKTSVYSGRCHESRGLTLNILLSQVENFNKSIHQLDEQIDQIFSPVSNDSDNFPGSNLLTIPGVGHKTLAAILSCVGESGSTFSTGTKLIGHIGFFPQIYESGETRTANRLSKRGPAYLRHALYMASVACLKHNPQLRTLYHKKVSQGKKPKQALICVAKKLAHICLSMLHTGEEYNPVRVFSYA

SEQ ID NO: 243416 - protein, 438 aa, unidentified
MSALPLIDPKAAAIDVGSEQMHVSIAGGEPKVFGSTTAQLHALRDYLLSQGVSSVAMEATGVYWLCPYEVLEKAGLQVMMVNGKYVKNLPGRKTDMKDCQWQSTLHAHGLLKGGFVPAEHIRRIQDYQRLRADHISAAASSEQQMQKALERMNIKFHDVISDLTGVSGLKVVRAILEGERDPAALLGLCDEQIKKKKADRVLESLVGTWKTEHLFALRQGLAAWEFYRGQIRECDQALEQVLKELTADKPEPPGPLPTWGRRKKPNTPQIGQLRQMLWKLCDGKDPTTLPGVTDYTLLQLISETGTDLARNWKTDKQFTAWMGLAPGARQSGKRRGTQKRSRNRAGRILCVVARSVGKSVDRALGGFYRRLRARRGGLIANVALARKLAQMYWRVMVHGVAYVEHGLQRYQDRVAETEQRWLRKLARKHGMILQPKAA

SEQ ID NO: 243417 - protein, 370 aa, unidentified
MNNVIYAGLDVHKKSVSLGVITGNGEILLEKRLANNYPKIRKELMLIRKAGGGGELYCCYEAGPTGYGLAREINRSKIGNCQVIAPGKLPKKQRNRIKTDRRDALKLARLLALGDLSIVAIPNDFDESARELLRYRKIRKNAQKRVKQQLKALLLRQGKQCSGMGSWSKKYIKCVSNIDFGEDFLGQVRDGLLNNIEDLEKEVKGLDKRLEMLAKLPKYAEEMKKLRLFKGIGLLTGLALILEVGDFNRFSSAKSFMAWVGLVPSENSSGESIRRGKITKTGNKYLRSLLIEASWHYAYGNKLNGSRIGVDSELEQKYINYVRQADRRLTNKMYKVSNVQKKPKNVAATAVARELAGFVWGMMTGQIKCS

SEQ ID NO: 243418 - protein, 414 aa, unidentified
MESEYRLMVGIDWATEAHQVCVLNRQGRLLEQRRVEHRAEAIAAMIQRLIELAGGDPASIAVAIEVPRGAVVEALVERGLHVYAINPKQLDRFRDRHTVAGAKDDRRDAFVLADSLRTDLLAFRRVHLDDAWTIQIRELTRIEENLNTEINRLANQLRDLLLRFYPQLLRLCPAADQPWLWALLKLAPTPAKAQRLRRSSIQRLLHQYRIRKWTADQVRTELRTAPLSVAPGVTEATCAHIALLLPRMELLMAQYKLCSKAVQTALNERVSAEEQRREHRDAEIILSLPGVGRVVAATMLAEASQLLAQRNYHALRTLGGVAPVTRQSGKRWAVRRRYGCNHRLSNAFYHWAGVSSQCDPRAKHHYQSLRQLGHSHGRALRGVADRLLALLVAMLRDQTLYDTTRALAPKPIAA

SEQ ID NO: 243419 - protein, 348 aa, unidentified
MSYRIAGIDVHKKMLAVVVSDVEIESEYQFERRMFGSNPEQLRSLAAWLLEQEVEEVVMESTAQYWKPVWEALELYWKPIREKREGARRKSGTLHLAQAQSNRGQRGRKRDFPDAERLVKRLVARELTLSFVPDPEQRLWRTVTRRKYQLTRDHTSLQNQLESLLEEAHIKLSSLVSNLLGVSARRMLKALAEGETNPAALAALADERLRATPEQLCDALGACADLKPVYRRLLKMMLEQVQFLEQQITKLDQEMASLLSQHQDAVQRLAEVPGLGVDSAQQIIAEVGPTAATFPSEKCLSSWVGACPGDEESAGVNYSHRSPQGNRHMRRILNQAANAAVKAKGSIF

SEQ ID NO: 243420 - protein, 316 aa, unidentified
MNLLKGNEINVGIDVGKSQLDIYIRPTGKFFSVANDAQGVREAIKRLKAHQPKRIIVEATGRLEHRLVFACAKQGLPIVVANPVHVRRFAQAIGQLAKTDKIDARLIAHFGEAVQPKLTEVNAESVRKISDLLTRRRQLLRMQTMEKNRLGIMPQVLHASINTILKSFKAAIKKLDELLDRLIVTNEEWATKSSILQSVPGVGKMVAYTLLSDLPELGHLNNKEISALVGVAPMNRESGKYQGQRRIRGGRHQVRTIMFMSMLSAIQHNSTLKAYYDRLKLAGKRSKVAIVACMRKMIVILNTMLRNGTPWENKNV

SEQ ID NO: 243421 - protein, 312 aa, unidentified
MAHIICGVDIGAETLDARIGRGGAWQQFVPTNDSIDRLAAFCRTHQAGLVVMEATGGYERLPFHRLWAADIPVAIVNPRSVRQFAEAMGTIEKTDKIDAGMIAWYGETKRIVPTPPPSDDQRALTALVRRLRQLIELRTAQNNQRRLVDKAVALDSFTTILAMINREIRSLQARIIAMIDADPLWLALDRAFREVKGVADRTIACLMANLPEIGTLSGKAIAKLAGLAPIARDSGKKNGNRPVRGGREAVRSILYVVAEIVRRHDPDFKAFHQTLRAAGKTAKVVRVALARKLLVRLNAKARDVRRELAQPA

SEQ ID NO: 243422 - protein, 375 aa, unidentified
MIKLRFIGLDVHAETIAVAVAEANGEVRSLGTIPNRLESVRKLVGRLGPAKELRACYEAGPTGYVLYWQLTTLGVECQVVAPTLVPVKAGDRVKTDRRDAEKLARCHRAGDLTAVWVPDVAHEALRDLVRAREAAKKDQLRARHRLSKFLLRHCQRRPAGMKAWTRTYLEWIKRKVHFEEPALEAALGDYFHEVEHAAARIERLEKSLDEATARAPEQIRAVIEALQSLRGVAQLTAATIVSEIGSFSRFQPRTLMGYSGLVASEHSSGNKVKRSSLTKTGNAHLRRVIVEAAWAYQRRPWIGGYLLRRQRDLNLSEQVREIAWKAQHRLHKRYSKLTAGGKNKNQTVAAVGRELLGFIWDIAVKTERAYPPQAA

SEQ ID NO: 243423 - protein, 336 aa, unidentified
MGQYVGIDLHRRSTTIVRMAEDGEVLGTERFVSQPFELAQAMAAAGPEPEVVLESTYGWYWAADVLQDLGAHVHLAHALGNNWGNRRVKNDVRDAQDLAAMLALGRLAEGWIAPPEVRELRELVRYRYSLIRHRTSAKAQIHGVMAKNGILPVVGELWGPTGQAQLDRLELPEAYALRLDSLRNLLDVYEHAIGELDAHIHAELKADPGYQAVMTLPGVGKVIAAIFVAEIGDITRFASAKKLCSWAGLTPKHRESDEVVRRGVITKQGSPLVRWAAIEAVGNYRAKGNEKLRADYVRIAEHAGKYKARVAVARKLLTLVFYAMRDGEVRCLESAA

SEQ ID NO: 243424 - protein, 349 aa, unidentified
MVTIGIDPHKASHTAVALGADGEVLGELCVPADAAMLRRLRRWAAGWPERVWAIEGAAGLGRLLAQKLVIAGERVLDVPSKLSSRARVLARGHGRKTDGIDAQSVAVVALRHRDLLEVTADDHTAILRLLSDRRDELTGERRRTVNRLHRALRDLHPGGAARQLTADRAAQLLRSIRPANAIDQERQAIARQLIIDVRRIDRALVENRRRCQQAVAASGSSLTEILGISDVLAAKILGHSGDITRFASADHYASYTGTAPVEASSGERTRHRLSRAGNRSLNHALHMAARVQTMHPGAGRTHYQRKRAEHKTSREALRSLKRQLAKVVYRQLRNDHHRFQTISLSTDLT

SEQ ID NO: 243425 - protein, 431 aa, unidentified
MADTTDVTTQTHWLAIDVAKHWHAVLIETASGARHRFKMANTEQDYERLIHFIDGLGGRCRAALEPTGDWHRPLAYRLIVAGVDLVSVSSVAQSRYREAKFNSWDKNDPKDAAVILDMLKQGVVQRYVDPMVAGHHDLQELSKTYFQISKLKTRIQHSILNHHVPLYFPEMARYWNSSRSEWWIRFMLEFTTPAHVKQLSREDFIAAAWSLIGKKSDKAGKLGEMWDTAHQSTALPHEVGSLAVETFRITLRQLQHLNETRADLERRAETILSDNADYKQLRTLPGVGPIIALMILAEAGDLRRFNHHRQFLKYCGLDLAKHQSGAMRGREQLSKRGNARLRLAFWMAGTIAVRLRENSFSDKYERYIRTAPGDADLKRKALTAVCAKMARVAYGLIKSNRSYQQFYEQSLPSGSIPLCRAVEASAQLKTS

SEQ ID NO: 243426 - protein, 334 aa, unidentified
MSLVSTVGIDLAKSVFSVHGVDVRGAVMIRRTVSRAKLTELVAQLSPCLIGMEACSGAHEWARRFAAFGHTVKLMAPKFVTPYRKSGKNDSNDADAICEAVGRPNMRFVPVKSIEQQADLTLHRVRQGFVEERTAMLNRIRGLLAEFGHVLPLRAAEVRRRVPELLETLPTRVAGCVRDLLEHAMRLEAKALEYEREIRAHVRTNALARRAQTRLGIGPITASALVATVGNAHDFKNGRQFAAWLGLVPRQYSTGGKTRLGHITKRGDPYLRTLLVMGARAVLQGALRLNDPLSRWALALQQRRGYHRACIAIAAKNARIAWALLAKDTVIVAA

SEQ ID NO: 243427 - protein, 312 aa, unidentified
MEKLSYGGIDVSKDRLDVVVLPEGWFFSVSNDTAGWTELVARLRPLAVCAIGLEPSGGYERGIIRALLAARLSVRRINPNKLRQFARARGVLAKNDRLDARLMAEYVAIMPTRAVQRDDAVDRLAEVVTMRRQLCDEHVTVENQTAHLEDAMLRRLSKRRLVRLEADIRLLDKRLAEMVATNAAFARLYELLTSMPGVGPVLAFTLIALLPELGKMGRKQIAALVGLAPYDFDSGKLRGHRSIYGGRMPIRNVLYMAALSASRYNPALKTFSNRLAHANKKSKVIIVAVMRKMITTLNAMLRDNAAWQPQSA

SEQ ID NO: 243428 - protein, 330 aa, unidentified
MKITHIVGIDVSKCTLDYHHYSSLGASQTITNNSKGYKTLLRWLKINVSKDKKAIMIVMEHTGYYSYQLEQFLFKSQLNYCKKPALDIKRSCGMIRGKSDKADAKMISKYGWMRKEELVPAKPVSDNQLELQQLMAHRDKLVADRASYQSRLKELKAQLGDKLTMKVATSTQYLLDILSIETKETEAAIEALIRENESLNNNYLLAKSVRGIGFATAVHFLIATENFTCFDSHRKFACYCGVAPFENSSGTSVKGKTKTSSLANRKLKSLLTMAAICAIQHDPQLKEKYQQKVKEGKAKMCALNIIRAKLIERVFAVIKRQSPYILSPAA

SEQ ID NO: 243429 - protein, 419 aa, unidentified
MSKIIERCAGIDIGKRFLLCSVLRGAAHEDPISQTRRFDTNVPDLQAMCEWLRQEAVTHVVMESTGSYWIPVFNLLEGHFTIVLANPEEVKNRKGHKTDRKDAEHLADLLRHNHVRASYIPPEPVRQLRDLTRRRIQLTQDASRERNRVQKLLEQANVKIASVLSDVFGVTGQNMLLALLGGQATPEEMAQLARGTAQRKIPQLIQALEGNRMSDHLRFIIRSCLRHLACLEEEIEELDAEILRRMELPAFQNAFPLLQTIPGIGQLSAATILAETGPDLAAFPTAEKMASWAGLCPGNKESAGIQKGRASTHGNPYLRMTLVQCAWAAARKQDSVFRARFQQLSPRRGQKRAILAVAHSMLIVLYCMLTRGVPYRGAQDSPQQRRRKQRAHHHLRSLRRLGLTVHITPDPRPQSAVVQ

SEQ ID NO: 243430 - protein, 428 aa, unidentified
MDQVNRNRLEEFRQLRKEVRHSEEYLIVGIDIAKDRHYAFFGTATGKTLLKRIVFSNDHEGFRKLLDHAEALRVQHGLKKVVYGMEPTANYHKPLGEYLINLGRAVVLVSGVTVARNRESLDGRWDKHDGKDSANVADLISQGKCLYYEHPSAELRGLRGLLSLKRRLKKQEHGYKVRIRNHLLAQYFPEMDRDYERLGAEGLSIVRWCLPASEIVQLDVDPFIERVTSRRIRMEKRRRLEAVWEKAGVSIGCDGVPGVGHEAKIMVEGLKQIREMIKETEDKIEELCKEFPEYHYLLTMPGFGPDVSARVLGAVGDPDRFLNGKQVLKLAGFDLSADRSGKDSDKAIPEISKRGKADLRYALYQAALIASLQNRDVMIYYTNKILGREREKGIHVKMRVKLGAKLLVIAWTLMRKKEPFNPAYLNAK

SEQ ID NO: 243431 - protein, 405 aa, unidentified
MAFRLWFATNYYFILEVIFMVFVGIDVAKDKHDLYAVDSDGVVLCDNFTFANSAAGFASFLKQVSPWGKIKVGIEATGHYSSNLLSFLKAHDFEVVVFNPLSVSRLRSAASLRKTKTDKNDSRYIARLLLTGEANPYQSQSYNISVLKSMTRARFRLFQEIQPLKNRFRRLLHVLFPELQGFFSNLYGNTSLNLLSVLPSAKDIAECNILKLTKILSEFSRGMLKRGRAEQLKSLAQNSIATYNYGDAFELKQTVRRIQFLSSQMSEIEREIDSVMAELNSPITSIPGIGNLLGATILSEIGDIKNFDNPNKLLAFAGCEPSTYQSGKYTATNTPMVKHGSRYLRRALYCAAVMAYVNSLSFRSYIDRKRAQGKHYFVAMSHGMKKLVRIIFAVLSRNIPFSEPA

SEQ ID NO: 243432 - protein, 345 aa, unidentified
MEITTLGLDLAKNVFQVHGISSTGEVVVRRALRRAQVMPFFSKLAPCLVGMEACGTSHHWARELTGLGHEVRLMPPAYVKPYVKRGKTDASDAEAICEAVQRPTMRFVPIKTREQQAALSLHRTRDLLVRQRTQLVNMIRGVLGEFGIELPKGITYALAFVRRVVAGEAPDVPQLAAKVIGALAEQALEGQARIRKLERELLAWHRSSELSQRIATVPGVGLLGATALAATVTDPAQFRSGRQFAAWLGLTPLQNCSGGKERLGRISKMGDKYLRRLLINGMTSIIARNAYRPGVADARVTALLARKPLRVATVAMANHTARAIWAIMTRGEVYRAPTARDAVAA

SEQ ID NO: 243433 - protein, 351 aa, unidentified
MVIIGVDYHPSDQYVAFADVETGECGERRLNHSDGETEKFYRDLALRGVSVRVGMEATGYSRWFERLLAELGFEVWIGDAAKIEAKRIRKQKTDRQDAQLLLKLLLENNFPRVWVPSPENRDLRQLLWHRHRLVQMRTRIMNQLQALAMNEGQRRKKKLWSEQGRAQLEKLPLATWASRRRQDLLELLDRMNPTIEALTAAVEQEARKQPEVLRLMTHPGVGPLTALAFVVIIGTPDRFPCGKQIGSYVGLIPSEDSSAGHQRLGHISKQGNALLRFLLVEAAQAAVRCDSDWRRRYLHLAMRRERRIAKVAMARRLAVRLYWMWRNGWEYAQSVEFGSYTGQLVTGHGVH

SEQ ID NO: 243434 - protein, 328 aa, unidentified
MKALQFVYIGVDVSKGSLSIDAGDRYRGEIRNSAMDIRRLVKELKREIGRDSVPQVCFESTGPYGDTLFAECCKAGVPASVLNPSKVRHYAKAMSQTAKTDPIDARVIRLFAEARRPEPTREPGRAESTLRQLVLARDALTKSVVQLSGALDSVHEVPARRPLSQAVEGLKKKILRIDGQIALIRKEDHRLDGLVGALSEIKGVGELSASKIVALVPELGTLGRRDSASLAGLAPFARDSGRLKGKAFVCGGRAAVRRALFMPATVAIKHNPVLKSAFDNLRQRGKPYKVALTAIMRKMFFYMDRVAAQWYAEHGGVPGAATAQHAPA

SEQ ID NO: 243435 - protein, 315 aa, unidentified
MIIGIDVSKSSFDSAWAVSGKASHKVYDYSDKGIAKLLSDTPATSHYVMEATGVYHSKLALTLHEAGRVVTVVNPLVIKRFCQMQLTRVKSDKADAEKIRQYGEQSNLTVWKPSADEIDALRQAHGWLDDLIRDRTRLLNRQEAHQHQAKPNNFVTRQMRGAYTRLTNQIVLCEGQLSVIVKKCFPELYEHLVSIPSIGKKTAIELIVITEAFSKFAEVKGLTAYTGISPTTYSSGSSIKGKGAIAKMGNGRIRQLLYLCSLTAMRSNKDCKALYERMKEAGKPGKVIQVAIAHKLLRQAFAVATKGVYYTEKTA

SEQ ID NO: 243436 - protein, 406 aa, unidentified
MISVGIDVSKGKSTVCAFKPYGEVLMTPRDFKHTKDDLDSLVKQLSRFKEEIHIIMEATGNYHLPVYQYLKSKDYQISIINPLEMKRYRCQGIRNPKTDKIDSMIIAQYGIDYWYRFKPNDDMDEKRQELRLLGKQYTSYMRIRTIRCQDLCHILDRTMPGIYGLLDDFNRDNGRDKLCDFAEKYWHSDNITKYSEKVFTERYSSWLKKKGYRPNEKEARQLYSIAKNAIPTLDSKLPSTKLLVQEAVNVLREVDSSLYDILNQLKDLSKEMPEYETVLSMKGIGTTLAPRFIAEIGDPRRFHSAKALIAYAGIDAPPYQSGQFTGTKRHISKRGSSNLRKLGYELMDSVNKHKSSYIGDSVCEYFMKKRNEGKPYRVAMIAAFNKFLRIYHSRVSEVLNEYDNSH

SEQ ID NO: 243437 - protein, 338 aa, unidentified
MMKITTIGLDLAKNVFHVVCCEQHGKIIKRKMLRRSGLLTWFANLPACLIGMESCASAHHWARALQAQGHRVKLIPAQHVKPFVRGNKNDYNDALAIAEAVTRPEMRFVSIKTPQQQDIQALHRLRERRLRDRTALCNQLRGLIGEYGIVFSRGVNVLRKRIPEILEDSENGLSDLFRSLLSQGYQQLTELDAHIDAYTEALDAHSKRDDACVRLQKIPGYGPIISSAFYSAVGNGEAYRRGRDVSASLGLVPRQHSSGDKQVLLGISKRGDRYLRSLLIHGARSVVIQAANKEDALSRWINKTRAARGFNKAVVALANKLARIGWAVLANSTVYQAR

SEQ ID NO: 243438 - protein, 365 aa, unidentified
MKKTTTTATASEKNFGGKLTIGLDLGDRLSWYCVLDETGEVIAEQKLSTTPKAMKEVFAALPRSRVALETGMHSPWVSRLLADLGHEVIVAHARNVRLIGESRRKDDRLDARTLARLARIDPQLLAPVKHRSRQAQADLMVIRARASLVRARTALVNAARGLTKSYGERIRGCNPRNMDLEKIQTLSPELQTALAPLLQASEALSEQIAEYNRQIEEIAKQRYPQTALLKQVKGVGTLIALTYMLTLEDPHRFRKSRDAGCYAGLQPGRRNSGQSVPQMHISKEGDPYLRTLLVQGAQHILGPFGAESDLRRWGLKLAERGGKNGKKRAIIATARKLAVLLHRLWVSGEVYEPFHNSRSTLMATA

SEQ ID NO: 243439 - protein, 340 aa, unidentified
MKLYGAIDLHSTNSVVVVIDERDEVVYRKRLANDLTLIIEQLSAYQPSLEGIVVESTYNWYWLVDGLMAKGYQVHLANTAAIQQYNGLKYTDDDSDARWLAHLFRLGVLPQGYIYPREQRPVRDLMRKRSQLVRQRTTNLLSIQNLYTRNTGQALSANRIKELQVEDIDGMLSVSDLTLAIKANLAVLRSAQEQVQILEQAIEERVKLRPEFSFLKTVPGIGQILALTIMLETGDVQRFSTVGNFASYCRCVGSQKISNGKRKGSGNTKNGNKYLSWAFVEAANFAVRYQPRIKSFYQKKKAKSHGVLAIKAVAHKLCRACYYIMRDRVPFDVSKAFGQK

SEQ ID NO: 243440 - protein, 335 aa, unidentified
MHYLYYVGLDVSKETFDASLVAFEDANEMAHRKFANSRKGICSCLHWVEKRHGIRLDDVIFCAEDMGSYISEMAVCASDRTLNFNFSLISPLVIKYSMGIARGKTDRVDARRIAEYAITHYRKIALYLPAEKELCQLRTWLILRAHLAKQRVAKLVLLEKLDYKEKFADVSIQRSMLQEEIAYAETHMKTIEREMQELIAADGNICRNYKLLTSIKGVGPITAIVMLCSTLNFTKITDHRKFACYCGLAPFEHSSGTSVRGGCHTSSMANRDIKVQLNRSALIAIRCDPQLKAYYERKVAEGKHKFSVLNAVRAKIAARCFAVVRRGTPYVALQI

SEQ ID NO: 243441 - protein, 340 aa, unidentified
MLYVGLDLHTKQITSCVLNSDGKLHERWQVPQIDQLVERLSRFQQPFKVTYEAGCGYGRFHELLAPIAANVMVAHPGLLKIIYGSQRKNDRHDAERLAKLLYLDAVPAVYVPSADVRARRELIVFRHRLVEKTTRSKNGLRGLLRTLAIRPPRTPGLWSQEGLAWLKGLALPHSLQTLRRNLLVDERESLKQQIGQVEQELARFSSDHPAIRRLCTIPGVGLRTAEAVVAFLDDPHRFQHSKQVGAYFGLVPCQDQSGDKNRLGHITRDGSATVRQLLTEAAWQATRRSPTVRDHFERIPGGDKGRRKIALTATAHYLVRVMWSMLRHETDWQEQIPAED

SEQ ID NO: 243442 - protein, 355 aa, unidentified
MTNCKTKTLNFANQVFYIGIDTHKTNWKVSIRTNQLLLKEFSMDPVPAKLYEYMHRNYPGGSYQSTYEAGFCGFWIHRELTQLGFKNIIINPADVPTTHKEKDRKCDSIDSGKLARELENHSLEGIFIPNPQQEAVRSLAHMWEQYSQRGAQVKNRIKSLLHFTGVPLPEEYEKSDWSNNYLTMISRLRFEEKINRELLDIHIDELKSIRTKRKLLLDKIRAFSRGNLTIKMLRTVPGIGKIVAFFLYAELVDIRRFKGLDDLLSFIGLVPSTASSDDKEIVRGLSNRHNKHLRYLLIEAAWIAARKDPAMTAVYSELTKRLKKQKAILRIAKKLVNRIRFVWLHQKPYIPAVVA

SEQ ID NO: 243443 - protein, 348 aa, unidentified
MKKIVKQVLGVDVAKNELVVCLGRMYEDWSPELYGHKTFANTAKGFLALMLWVKKYTEEDLPVRFVMESTGIYHESFAYFLNDNGYEVSIVLPNKISNYIRTLEVKTITDKTASEAIARFGLERKLDQWKKPKDIFKKLRQLTRERGQIVEERTVAKNQLHAEKVEAEPNKNSIKRIQARIVMLNKQELEIKQEVIALIKTDKELSGLMLLICSLPGIGVLTAAIVLAETNGFELIRNKRQLTSYAGLDVIEKQSGISVKGKTRISKRGNKYLRKAMHLPSLAAIKHDERFKAIFARTVAKHGIKMKAAVAVQRKLLEMVYTIFKSQVQYDKDYLTKTDQENSALIIT

SEQ ID NO: 243444 - protein, 384 aa, unidentified
MEKSSTLYVGLDVHKDSIDIAVAEAGRDGEVRHVCSIGGDLAGLDKALRRLISKGHPLHVVYEAGPCGFVIWRHLRAQGIECVVVAPSSIPKRSCDRVKTDRRDAMMLARLSRWGGLTAVRVPGAGDEAVRDLARSREDAVRECRNARHRLKALLLRNGIAYAGKSAWTAAHLRWLATLKLEHAAQQIALQEYLHAVTEATTRIARLEQAMRDTLPEWGLAPVVQALQAMRGVQLVAAMTLVAELQDFLRLDNPRQLMAYVGLVPGEHSSGPKRRQGSITKAGNSAARRMLVEVAWHYQHSPRVSPIIATRQDQLPKEVTDIAWKAQLRLNAKFKRLVARRVMKNKAVVAVARELTGFVWAIGREVQSSGWQGIKTKAAGSAAD

SEQ ID NO: 243445 - protein, 320 aa, unidentified
MSALSVTVGIDAAKAHVDVCVLGTHSDVQRFANDVDGHLALAAALQSLDVGLVVMEATGGYEAALTCALQAVGLHVAVVNPRHARDFARSMGRLAKTDAVDARMLAEMAAVLVHRVDLARYLRPVADECQQWLAALVTRRRQLLAMLGSERQRLQITNRKLHPSIEAIITVIKAQLDDLETQMVGHVREHFGELDGLLQSTNGIGPVASATLIAQLPELGRLNRREIAALVGVAPMSNDSGNRKGRRRVQGGRFEIRRVLYMATLTAARYNPVIRAFYERLKAAGKLPKVALVACMRKLLTMLNAMVRTGKPWDASLHSA

SEQ ID NO: 243446 - protein, 310 aa, unidentified
MDMITVGIDVSKDRLDVAVCPSGEAFVVERDAAGLERLAARLRQIAPHIVALEATGGFETVAAAALAAAGLPIVVVNPAQIRSFARALGQRAKTDPIDAAVIAGFAEATRPETRPLPDKATRLLADLVARRRQIIEMIGAERQREKRMAVPHLRKSIARLLKALEKELASVDEDIDDAMRGSPAWRDKEDLLASVPGVGPTIARTLIAELPELGQLSRRQIAALAGLAPFTRQSGQWRGRSFIAGGRVAVRTALFMGAMVAKRHNPVLKAFFDRLVAAGKPKMVALMAVARKLLTILNAILRDCRPWQPA

SEQ ID NO: 243447 - protein, 388 aa, unidentified
MFYVGIDIAKQKHSAAVINNSGEILLDRFTFDNTKNGFRSLTKTLSSVGARPARCTVCLESTGHYGANLKAYLLEHHYKVYEVNPILTDNWRKSSSMRSAKTDAIDSLALATWIKSSKPVRPVSERNPYADLRTLSRTRSSLIATSTLLRNKVLAILDIVFPEHGRFFNKPFSKTFVAVLCLWPSAEKIAHARIDTLAKLMASTSKSHYKKQDCQRLKALAKDSVGQASDMLEFQLRMFLDHFKYVRSQISQIEARLEDLMDDSPILTVPGIGFINGAGILGELGDINRFANASKVIAYAGCDPTVYASGQTENAKAHMSCRGSVHLRRHLWYAAGVARLFDPALKACYQRKRAQGKPYQVAMTCVVHKLCRIIYAVLRDNKPYECRV

SEQ ID NO: 243448 - protein, 342 aa, unidentified
MHIASIGIDLGKTTFHLVALDDHSNIVIRKKVSRRQLLAYTANLPTSLVGMEACSGAHFIGAALRDQGHDVRLIPAQFVKPFLKSNKNDFLDAEAIAEAVARKNMRFVPIKTDDQLDLQALHRVRDRLVHRRTAVINQIRGFLLERGITFAKGPANLRRQMPSILEDAGQNLTGRMRNLLTHLWQEWKSLNSDVEGVSQEIDGIADQDAACQRLRRIPGVGPLVATATVAAIGNGAAFRKGREFAAWLGLIPRQHSTGGKARLLGISKRGNIYLRRMFIHGARAMLLRVKYDTGRLGQWARQLELRVPRNKAVVAVANKLARIAWAVLATGNEYRNRAVAAA

SEQ ID NO: 243449 - protein, 316 aa, unidentified
MVLGVESFDASPRGYKAMFEWMGTFGTVSKVGVEGTGAYGAGLGRFLRRAGIEVIEVDRPNRQARRTSGKSDPADAVEAARAVLSGRATGTPKSRDGNVEAIRALLVAKRSARDARLRALHQMRQLSYTGPDQLRSRLKDLSITDLVAETAAMRPRSSGDPVVYATKVSLAALGRRVLSLEDELVGIDELLSDLVTRSAPEMLQLFGVGIDTAATLLVTAGDNPQRLRSEATWAHLCGVAPIEASSGKVTRHRLDRGGDRNANQALWRIVMTRLAWDPRTRKYMERRTKEGRSKREVIRILKRYVAREVFKYLPSA

SEQ ID NO: 243450 - protein, 351 aa, unidentified
MPHKSTVHAVTAIGIDMGKNTLHMVGLDLRGAIVLREKVSRGRIASRLANLPPCLIGIEAGMATHYVARELAALGHDVKQVPPTYAKPFRQGHKNDFRDAHAVAEAVQRPTTRFVPAKTNEQLDLQALHRVRSRLVSERTAVINQIRGFLLERGIIVRQGLRFLRQQLPDILAKRTDVLSPRMVRIVADLAGDWRQLDERIETVTNEIETLAKSDDNCRRVMTVPGIGPIISSAMVAAIGSGAAFARGRDYSAWLGLVPKQMSTGDRTILGRISKRGNGYLRTLFMQAARVILLRPANWPKHGFGAWLIRAAQRLHPNVLAAALANKVARIAWTVLAQERSYEARVTKAAA

SEQ ID NO: 243451 - protein, 355 aa, unidentified
MTGTKYIGMDVHKESISIAVMNGFGKVVMESVIETKASTILQFIDGLRGELCVTLEEGTWAAWLYDLLKPHVSKVVVCDPRRNALLKDGNKSDRIDAGKLAELLYLDKLHPIYHGEHGLRTLKELVRSYLTLTKDLGRVMTRVKAIYRSWSIPCTGKQVYAPRHRSEWLAKISEPAVRRRAEFYFEQLDALRTLRQQARRELLAESKKQPAWRRLCQIPSLGPIRAAVLMGIVQTPHRFRTKRPLWKYIGFGIETHSSADHRSVHGQLQRSRKKISVRGLNRNCNHDLKNLFKGAAIVASSKPGPFQEFYAALLAKGIRPEMARLTLARKIATIALIVWKKGASFDAQYLKPQTA

SEQ ID NO: 243452 - protein, 355 aa, unidentified
MNQEKYIGMDVHAATISAAVMNAEGKVLMECVLETKAATILEFIEGLRGTLALTFEEGIMATWLHDLLKPHVSRLVVCDPRKNALMRDGNQNDRGDARNLAELLRTNHVHAVYHEKHGTRALKELGRSYLTLTKDSTRVMNRIKSVYRSWAIPCAGTSVYSRRHRAEWLAKLVEPGVRMRAEHLYEQLDSLQPVRQAARRELLRESRKHAAVKLLRQIPAIGPIRSALLVAILQTPHRFRTKRQLWAYSGFAVQTYDSGEYRFVRGKLQRNRERITVRGLNHNHNHDLKNLLKGAAITAIERPGPLQDFYAALVDKGIRPSMARLTLARKIAAITLTIWKKGVSFDPKQLQRQAA

SEQ ID NO: 243453 - protein, 341 aa, unidentified
MNGSKTVVGIDIAKRVFQLHWVEWETGEIVSLQLKRERFLEHFANRAPCLVGMEACGGAQHGARKLTAMGHEVKLLAAKAVKPFVTGNKNDRHDARAIWTAVQQPHVKAVAIKTEEQQAILALHRMRSQLVKFRTAQINGLRGLLTEYGEVMPQGKAGVRKGITEALARLSDRLPAMVIDTLREQWARIEKMDSEIATIEQRIKLWLKEDEACKRIAEIPGVGPLTATAAVAIMGDAKAFKSGREFAAFAGLVPRQTGTGGRIKLLGISKRGDTYLRTLLIHGARSVLTHAKEPGPWVTELRQRRPLNVAIVALANKMARTIWAMLAHERTYQKEFVSQPA

SEQ ID NO: 243454 - protein, 413 aa, unidentified
MSNNPLLVGVDVHRKTNTICLMNRDGQEIGQRLSVPNNRQGTATLARAIDTLATEEGCDAVRIAAEATGWYWWHFFQALDQDTFLNQKPLALYPFNPRLTANFRKIYSDLDKTDTIDAFVVADRLRLGHDLPYPFSYDADYMVARLLTRHRFHLIHNLVREKSYFLAHLYLKASEYTHLKPFSDTFGATSRAIVQDYPSIEAIAAIPLEQLVEIIDVKGKRRFANPEDNARKLQAVATDSYPLPDALHYPVNLILRQSSQHITHLERQIKRTETAIAQAMNSIPNTLDSIPGIGNVLSAGIVSEIGPPERFDYDQAKVANFAGLKWRKTQSAEFQAEETRMTHKGNRYLRYYLCEAADSVRKRDAEYGAYYDRKYHEVRKHQHKRAIVLTARKLVRLVVRLLTTNQSFQARRS

SEQ ID NO: 243455 - protein, 425 aa, unidentified
MLKDTEDQEEIIARVAALDIGKAELVACVRVPSDTAPGKRMQEVTTHTTMTRSLLALADHLRCLGVTRVVMEATSDYWKPPFYLLEAAGFETWLVNAKDVKHLPGRPKTDKLDAVWLCKVAERQMLRPSFVPPPEIRRLRDLTRYRVDLVNACTAEKNRAEKLLEDACIKLSSVASELFSVSGRDMMRALIAGQRDPRVLAQLARSRMRGKISQLEEAFVGHFSDHHGFLLNKMLTRVEAIEADIADVETHIEAQIAPFASAVERLDEIPGVGTATAHTIIAEIGLDMTRFPTPAHLASWASFTPIAKESAGKKKGKNSTGHGNTYLARSLGEAAVGAAKTRTFLGERYRRIARRRGAKKAIVAVGRSILVIVWHLLSDPDARYHDLGADFYDNRINPERSKRNHVQQLEALGYIVTLNPIPTAA

SEQ ID NO: 243456 - protein, 343 aa, unidentified
MTNITTIGLDLAKMIFQVHGADEDGRPVVRKKLRRGQMLGFFASLSPCLIGMEACGSAHYWARELQGLGHEVRLIPPQYVKPFVKTNKNDACDAEAICEALARPTMRFAPIKSAEQQSVLMLHRARELLVRQKTMLINALRGHCSEFGIVVAQGASRVEELITIIEDCQDDRLPTLACEALGALVAQLRMVQAQIADLERKLKVWHRASEASRRLETIPGVGVITATALVATIGDASQFRSGRQLAAWLGLVPRQHSSGGKEKLGRISKRGDGYLRKLLVHGARTVLLWSRRKKENRSAWQEALLARRPTNVVLVAMANKTARVVWVLLSRGETFRTEPCAVI

SEQ ID NO: 243457 - protein, 340 aa, unidentified
MSEITTVGIDLAKNVSSVHGVNEHGKVVLRKTVTRGKLLELMAQLPACRVGLEACSGAHELARTLTSLGHDARIMAPKFIVPYRKNQKNDSNDAAAICEAVDRPNMRFVPIKSAEQQAVLVVHRVRSALVQSRVGLINQVRSLLTEFGLVLPQGRFSFRHNVGTALDDARLPTLARQILHEVNARIRALDEDILAYDRRIEAMVRHSPLMQRIVKVCGVGPITASAIVASVGDAKLFKNGRQFAAWLGLVPRQYSTGGRSILGRITKRGDVYLRTLLIHGARSALITLSRRTDRLSRWAAALTERRGFKKACVAMAAKNARIIWALLAKGEDFRLERAAA

SEQ ID NO: 243458 - protein, 351 aa, unidentified
MSRSSFSAVIATLGIDLGKNSFHLVGQDERGAIVLRIKLSRSQLTQRLANIPPCLIGMEACAGAHHIGRLLQALGHDVRLIPAQYVKPFLKGHKNDYRDAEAIAEAVQRPTMSFVAIKMPEQMDLLALHRVRSRLVSQRTGVTNQIRGFLLERGITVRQGLAPLRQALPGILGSSADALSPRLVRLIADLAEDWRQLDERIAAVSAEIEALAAQDGHCQRLMSVPGVGPIISSAVVAAIGTGAGFKQGRDFGAWLGLVPKQESTGDRTILGKISKRGNKYLRTLFVQAAHIVLVRRPHGARLSLWPWIEAAGRRLHRNMLVIALANKLARIAWAVLARGHAYQPRSASHAM

SEQ ID NO: 243459 - protein, 318 aa, unidentified
MFIGIDVAKDTLVVAARPTGTLETVANSAAGLQPLLTTWREHPPTLIVVEATGGYEVLVVLTLSLAGLPVSVVNPRQVRDFAKGTGQLAKTDAIDAHVLAHFAELMQPPVRPLADAETRALEALVARREQLRLMLEAERQRLTQPAAHAPAVRTSLEHTITFLQQQLAHTDDEIGTAVAAHPVWAARSALLQSVPGVGPMIAQALLGWLPELGHLTRQQIGKLVGVAPFNRDSGRYRGTRRIAGGRAAVRAKLYMGALVAVRYNARIKAFYLRLLANGKPKKVALVACMHKLLTILNQIVRTAMPWDASHHMAAPQLA

SEQ ID NO: 243460 - protein, 355 aa, unidentified
MSIYAGIDVGKFFHVAYCLDERGNRLGTLKFDNDRTGFTELEKLVGKFSIPDNSHIFLGMEATGHYWFPLYELLKNKGHKVKVFNPLKVNRFRDFYIQPTKTDPKDAFVIANILRYGKVKPTVLPPENIQRLKKIVRYRRFLTEQITQVKNKIRCMLDEIFPEYQSVPFFSNLFGQTSRALLKIAPIPAKILALPIESWADYLLSHSKGCLGWERTWKKANLIYQAARSSIGSQVVASVLEECIRDLLYELEHLEDRISFFTEEIEDRLFLTPGRILTSIPGVGPVTAATIISEIGDIAQFRSADALVCYCGLIPSSHSSGTFISKRNRMAKRGQSSLAHVFYQIALSSLDVILF

SEQ ID NO: 243461 - protein, 433 aa, unidentified
MNTPHPYDLVIGLDRADKKADLCLIETRTGQRRTAVLDTAPEALCEWLAQLRQQHPHARVGLCLEQPAVHLIPFLEAYAWITLHPINPITLQKYREAFVTSRAKDDTKDAEYLADLLLTHQAKLPVWAPQDSGTRAVQQLVVHRRAVVDERTALSNRLIALLKQYFPQALTLCGEDLWRPLATAFLLKWPSLGAVQKAKSATVKQFYYLHGSRSAKLMEERLALLAKAVPVTDETAVIASFVLRVQLLARELQQVVRTIAEFDRQIAAAYAAHPDHGIFASLPGAGPVLGPRLLASLGADRDRFASAASVQCYTGVAPVTKRSGGSCHIHRRYCCPKFQRQSFHEYAKESVLWSRWAGAFYLQQRSKGCPHHTAVRALAYKWQRVIFRCWQDRSVYREEAYEAALRKNGSPLVALFDRVELGKSPWKNPAKKS

SEQ ID NO: 243462 - protein, 340 aa, unidentified
MKASYPEDQLATYFVGCDVSKKKLDLGLLLGLEPLKLRSKVVENHQPGWKTLIEWACRQANCSAGELHVVMEATGAYHEAAAYALVQAGVKVSVVNPALVRDFAKGLAVRSKTDATDRAVLARYGAITKPPRWQAPSPEVVELKGLLNRLQVIECDLARESNRLEKAQVSVTPQVVLDSLHKSLAFLEQEKADLERRINDHIEGHPQLKHDRELLESIPAIGRKTACRMLCVLHSRRFRAAGAVAAYLGLVLVQHRAGTPVYRPPRLSKAGDGAMRAALYMPAIVASRLNPDIRAHYKRLLAQGKSKMSALGAAMRKLVHICFGVLKNQQPYQPRVAQTS

SEQ ID NO: 243463 - protein, 416 aa, unidentified
MTDERRWYAGVDWASQSHHVFLTDRDGRKLGEKVFRHGGEGLADMATWLMAASGADDPGLIHVAIEVPHGPVVETLIERRFGVHAINPKQMDRFRDRFTLAGAKDDSRDAETMASALRTDPRCFRRLAAGDPIVIELREWSRITEDLGAERIRLTNRMREQLWRYFPALLGLDSDLGAPWLLDLWEAAPTPGKAARIRETTVARILKRHRIRRFDAAHVLSVLREPAVTVADGTTQAAQAHIITLLARIRLLNRQIDDAHRQLDRLTAQLAQSGETEPGQLKQHDATILASLPGVGRIVLATLLAEAWDALQRRDHAALRSLTGVAPITKRSGKSRIVIRRQACHPRLANAMYHWARVAVQRDAISRAKYTALRTRGKTHGRALRPVADRLLNVACAMLKAGASFHPSQAVGKTPC

SEQ ID NO: 243464 - protein, 422 aa, unidentified
MHADDKLAYARAFPIHVGVDTGKTFHKLVARGPDGRRTKAITVQVTRAGFDAADAHLTTLFPDVSRERMLVGIEFAGHHGQTFAADLHRRGYAVVTVLASVTKRFKEVEDNSPRKDDAKDAAQICRLVGDGLFVSYALLDRRAIALRALTTERQRLAVEETRLKNRLLSVLDVVWPEFAATFPNVKQCTPFALLRRWPTPTDLGAERPTRVRALIRKVSQNHFAPDRITAFLEAAAATIGLADDRGARHQEIRRIMARWLIVRLHIGAVEAQLTELAQEMPAVAALTTVPGISIVSAATLVAELGTPASYESPRQVLKLAGMNLAGKESGTSVRSRIRQTKRGRPALRRQLFLLAGRCCRTGALCHEQYLALVARNGGSRVSAVCAIARKLVPMLLHIMQTTEPFDAARWQVLKRQSPYRAA

SEQ ID NO: 243465 - protein, 358 aa, unidentified
MNAIHYIGLDVHKKTISYCIKTAAGQIVKEGTLAAERSVLRSWAGSLEQPWHGAMEATIFSAWIYDTLKPYAERLEMGHPAKMKAITAGKKKSDIIDARTIADLVRCDLLPGCYVFPPDLRDLRRLMRYRQMMVQQSVRMHNKTAGLLMESGVSFRKTKLQGKKYFANLIKSLEEVPESVKDLLRMSRAAKELFESVQNQLVRRLLADAVLKQRVERLSSIDGVGEITALTWALEVGDPHRFASIADAVSYCGLTAALRSSAGKQQRGPLSKQRNAYLQTTLIEAAKLAPRWNPQLAQLHAQQMQRGHANRATLQVARKLVAYLLAVDKSGQPFQERTPPEKTLPTKKKTRRSLASAA

SEQ ID NO: 243466 - protein, 275 aa, unidentified
MKSAIVTASVYRGKVRLINKIFEKIFINDNKGYISLTKWLKKQGKTFRVCLEATGVDYLNAALFLYHAGFEIMVVNPRGIKNFAKAMMKRAKTDKVDTDTILNYLQRMPFQKWAPPCEKVLQLQYIARRIRQLKKEMTREKNRHHALQFCSEAAFVKNDVEANIRHSEKRIQRLLAKAFEIIKSDASLQKIFNLLCSTKGIAELSALSIMAEILTLPIDMQADQWVAYAGLDPRAHESGTSINLPRRISKTGNYYLCAAIYIPALVAIQYDAKTK

SEQ ID NO: 243467 - protein, 355 aa, unidentified
MAVTIVEEARPVTCRTAITGGVDTHADTHVAAALDPVGGLLGVREFPATAAGYAGLLSWLGGFGTVALAGIEGTGSYGAGLARHVTAAGIRVVEVDRPDRQDRRRQGKSDPLDAVSAARAAQSGRARGAPKGRDGAVEAIRALMVARRSAAGERTRTINQARALILTGPDDLRARFTRHTPAALVTGLASLRPRPGDVAGYAVRVALRELGRRAQFPAGQLERLDELIVPLVTTHAPGLLTVYGLGPRTAALLLIAAGDHPGRLRSEAAWAHLCGVAPIPASSGKVTRHRLNPGGDRQADHALWRIVFTRLGSDPATRAYAGRRTAEGKSKAEIIRCLKRHVAREVYRHLRPAAG

SEQ ID NO: 243468 - protein, 315 aa, unidentified
MAECFVGIDVSKAHLDVAVRPERSKWRTPNTEDGITELVNRVRELEPTHVVLEATGNYERGIASALWKAGLPVSRINPRQVRGFARATGQLAKTDELDAGILARFAEAVRPEVRELPDDASEELKELVARRRQIVDMITAEKNRLRTAGRVVRPYIKQHTDWLEEEWKKLNKELDKQLQGTPGWQEKDALLQTVKGVGPVLSRTLLAELPELGKASNKELSMLVGVAPLNRDSGKMRGRRMVWGGRASVRQALYMAALVAAHRNPVIQTFYERLLASGKKKKVALVACMRKLLCILNAMIRAKQPWDDSRALQVS

SEQ ID NO: 243469 - protein, 389 aa, unidentified
MKIFVGIDIAKLNHFAAAISSDGEIILEPFKFTNDADGFQLLVSKLESFDKNSIIIGLESTAHYGDNLVRYLVAEFYQVCVLNPIKTCQMRKNNIRKTKTDKVDTFVIAKTLMMQDDLRFVSFYDLDMMDLKALGRFRQKTIKQRTRLKIQLTTYVDQVFPEIQYFFKSGLHQHAVYALLKEAPSPKEIASMHMTHLANLLKVNSHGHFTKELAKELRVLAQKSVGANDSAISIQITQTIQQIELLDSQLEKIEAEMTDIMKFNDSVIMTIPGIGYINGGMILGEIGDIHRFSNPNKLLAFAGLDPSVYQSGNFQAKTTRMSKRGSRVLRYALVNAAWNVVRNNATFKAYYDAKRAEGRSHYNALGHCAGKLVRVIWKMLTDEVEFNLE

SEQ ID NO: 243470 - protein, 338 aa, unidentified
MVYGAIDLHMRYSQIRIVDETGAVLRDQRVSTSRERLVNAFEGWGRIRILVETGTESEWVAQTLEAASHEVIVADPNYGPMYGDLQRRVKTDRRDVAALAEANRRGWYRAAHRTSAAQRGTRQVLRARRQIVQMRTGAVALIRSLVKQEGYRLPRCGAERVPAQLETLRLPAALHALLAPLTKMIETATSEIATLDAQLQARAAADPLVQRLQTVPGVGLIVALTFRAQIDDVRRFRHAGQVSAAIGLVPREDSSAERRHRGHMTKVGPRELRSLLVQAAWACWRSKHSATLRAWVEHVAARRGRRIAVVALARRLSRLLYALWRDGTSFDVRKLAAA

SEQ ID NO: 243471 - protein, 318 aa, unidentified
MLIIGVDYHPSFQQVAFFDEETGECGERRLNHSDGEAEKFYRELQPRGVRVRVGMEATGYSRWFERLLAELGIEVWMGDAAKIKTKRVRKQKTDRQDAQLLLKLLLENNFPRVWVPSPENRDLRQLLWHRHRLVQMRTRIMNQLQALAMNEGTRWKKKLWSEQGQSELEKIPLAPWASRRRQELLELLDRMNPTIEELTAAVEREARKRPEALRLMTHPGVGPLTALAYVLIIGTPTRFQRGKQIGTYVGMIPCEESSAHKQRLGHISKQGNSLLRFLLVEAAQAAARPSGLEPSLQAPGDAPAQKHCQGSDGAPDGD

SEQ ID NO: 243472 - protein, 374 aa, unidentified
MKRVYIGIDTHKESNLLGSAFDGRDDAQVIGKVSADLNRTVDALRKFQKKHDLEKKQLHICYEAGPTGFVLARRLIKLGYDCIVVAPSKIPTKPGDKVKTDRRDARKLARLHRAGELTAVHIPDVEDEVIRDVCRGRTDAVRELTRAKKQLLSFLLRNGYRYSGKAHWIQAHMRYLRELVLARPAQKLVLEEYIQRIDALVKQIERIEGQMLLLLKTWSRRPLVEAAMGFRGFQEVAAMVIISEIGDFRRFKHPKQLMAYLGLVPSEDSSGGKRRQGSITKCGNSHARWILIECAGHYRMPPKISKALSKRQEGLSKEVLAISWHAQNRLNKRWFKLSLRGVHFNKIRTAIARELSSYLWDIARIVDEEPSLPL

SEQ ID NO: 243473 - protein, 405 aa, unidentified
MEEVFVGHDWAEDHHDVHLEDLEGRKLAAARLPDGIAGVARFHELVAEHVEDPSEVVIASETDRGLFIGALVAAGYTVFAVNPMSTSRYRERHSTSGAKSDPGDAKVLADLARTDRHNHRPIAGDSEQASAVKTLARAHQSLIWTRQRQSNQLRSTLREFYPAALEPFESLHHNDAVAILSIAPDPATGRGLSASKIAAALRRGGRQRNIQQRATQIQTALRSEQLQAPPLVADAMGIVVKSLAVIIGQLNVQIDELETRLADRFEQHPDAKIIRSLPGLGMILGARVLAEFGDDPNRYVDAKSRKNYAGTSPITRASGKHRVVLARYTRNKRLADAIHQWAFAALSASPGARTFYDQRRAAGDGHHKALRALGNRLVGILHGCLRHQTLYDEHLAWGHRTPLAA

SEQ ID NO: 243474 - protein, 437 aa, unidentified
MLSIFKSIITIMINSTDFAATIGLDWADKKHDLWLRPTDGCKAEHLRLEQTPEALHEWVAKRRQRFANRKIALAIETSRGPVISALMAYDFIVLFPVNPKGLKSYRDAFALSGAKDDRTDAQLLEEFVRWHPEKLRALEPDTELTRKLAGLVQNRRRLVDERTRLVNQIHATLKTYYPMAETLLEGQMNTPMAADFLVRWPDLETVQKAKPELIRSFFYQHNSRSAKKTEERLAAVQKAKALTTDAAIIMPARQLVLALAGMLRPLHQAIGRLDQEIAQAMDQHPDAPIFRSFPGAGPALAPRLLVAFGTNRDRFESSTDVAEFYGIAPVVVQSGNSKTVHFRYRCPKFGRQTFHENAGCALKKEPWAKCYYDQQKEANKAKHHQACRALAYKLVRIYFACWKQRQRYEPKRYLLALEKHASPLHRKLQNLTAAHCE

SEQ ID NO: 243475 - protein, 344 aa, unidentified
MVYVGLDVSGKSLVAYAVNERKQRVYAGEQPASRAGLRALLRQVGVGAKLVVFEAGNQMKWIAETLKKLTEVQLHVVHPNEVKWITESRGKTDRVDAKKLAELARAGMLPRAVHVVEGPVRELRELVSARQQLQSKRVALINTIRGYVYQEGHRLPEKFFAGTTWRAKLARLSVSAPLTLIIETFMASIEALVAAEQQLTARLQAIQDPRCLLLESIPAMGPLSARVLLSALDDARRFDDQKAVANYGALAPTIYQSGEVRQLGRINRDGRSEVRRVLLQCAHTVARMKSHGAKPLQQFFARIARRRGKKIAVVALARKLLTTAYGVLKSGERYDPRKLEPAKA

SEQ ID NO: 243476 - protein, 454 aa, unidentified
MAKKAKKIKTGKGLKLEIVNPYAAGIDVSSTEMQVCVPESCDSDNNRRFGTFTEDLHYISSWLKACGITTVAMESTGVYWVQLYMILEEDGFDVLLVNAKAIKNIGEKKTDEVDAEWIMLLHSYGLLKASFQPDNRARRIRNLSRHRDNLLKTSSREVQHMQKYMELMNIKLVNVISDILGKSGQDIIQAILAGERDPKRLAALADPRCKASKETIEKSLVANWDEDLLFMLEQSYHFYLYYQKQMQACDKKIESIAQEYLSQINATEPEEEWLRSQKKKAQKNAVSIDIEKYAFQMWGVNLMRIHGISDATVLRLTGELGHDFTDKFETYKEFCCWCNLTPNNKISGGKLLSSKIPKRKNPVGQILRSAANSLKASKTPLGFYFRRIQAKNGYQAAIVATANKLARIIYVMVKTKVEFDESQAKSTEEEILKKKLLYAQRALERIQKQLNIAA

SEQ ID NO: 243477 - protein, 308 aa, unidentified
MHYLYYVGLDVSKETFDASLVAFEDANEMAHRKFANSRKGICSCLHWVEKRHGIRLVDVIFCAEDMGSYISEMAVCASDRTLNFNFSLISPLVIKYSMGIARGKTDRVDARRIAEYAITHYRKIALYLPAEKELCQLRTWLILRAHLAKQLVAKLVLLEKLDYKEKFADVSIQRSMLQEEIAYAETHMKTIEREMKELIAADSNICRNYKLLTSIKGVGPITAIVMLCSTLNFTKITDHRKFACYCGLAPFEHSSGTSVRGGCHTSSMANRDIKVQLNRSALIAIRCDPQLKAFTNAKWLKVNINSAS

SEQ ID NO: 243478 - protein, 313 aa, unidentified
MAKHVAKITLGIDVAKDECVVCGWETDEILALPNQQGPIEAYLRSFSGPVQIAIEPTSHYHMTWVEAALALGHEVYLINPRQLVHYREAVNVRNKTDPQDAWLLARFLVHEGSQLRAYQPQCRPAQQLWSSLKRRAVVVAARKQLQQSFSEVSLSAQALFTQFQRLLARIDLHLHKLIRALGWAEDYRRCLSIPGIGPLNAAALVAAYHRGAFANSDTFIAFIGMDVRLRESGRYRGKRKLTKRGEAELRRLLYCAAQPARCYQPFEDFYQRQLSKGLPKIAAKVILARKLARIAFTLMNNQQMFIKHAQGVA

SEQ ID NO: 243479 - protein, 381 aa, unidentified
MKSLIYVGMDVHKESYSLCTYLILSGEFIGETKMDAKPSLIKQYLSEMEKLLEDKGYDEIEFQTCYEAGCLGFSLYKELVKLGINCKIVAPTTLHKSADSNVKKNDRRDAKMLARNLAYGTCSFVHIPDEIDQETREYIRMRMAHKREIKRIKNMINSFCLRNGHKYEGNYWTDKHISWLKHLELNDFLKSILVEYVDTYDILMTKLDRIEGKIEEISLSERYKESVDKVSCLKGLTRQGALTIISEIGDFSRFNTTNELCSYLGLVPGEHSSDGKGPSLGITKLGNTVVRNQLVESAKSITLGIKWIKSKRLKQRQKGMPLDIISYADKASKRLFDKYHSLISRGVHCNKAVTAIARELACFVWGMMTNNILERKVGTAN

SEQ ID NO: 243480 - protein, 407 aa, unidentified
MATPAQVQIWIGLDVGKEFHHAVVLDDAGDVFADRRVANSEADLVKILDTASEHGVAGLVIDQPGSIAQLALALARQRDVPVAYIPGLVMRRAADLYPGDAKTDRRDAYVIADTARTRRDQIHWLGIDDDLLVQLRVLNGLDVDLAADATRHANRLRDALTSISPALERAVGTKLQHAGVRDLLAKYPTPTALRAAGKTRIRTLVSKRSPRMGVSITERVFKALGEQTVSVPAEATLGRVVAELAVELGRVRDRRDALEAEIEEVFLAHPLGPVLISLPGIGPRTGARILAEIGDGSGFASGSKLAAYAGLAPVTRQSGTSIRGEHRSRRGNHRLKNAMFLAAFASLNDPDSRAFYDRKRAEGKRHNAALICLARRRCDVIHAMIRTGEHYLTSDQLTERARAPKAA

SEQ ID NO: 243481 - protein, 351 aa, unidentified
MIIIGVDYHPSDQYIAFVDTETGECGERQLNHSDKEAEKFYRELAQRGVSVRVGMEATGYSRWFERLLAELGIEAWIGDAAEIKTKRVRKQKTDREDARLLLRLMRENNFPRIWVPSPENRDLRQLLWHRHRLVQMRTRIMNQLQALAMNEGQRRRKKLWNEQGRAQLEKLPLATWASRRRKDLLELLDRMNPTIEELTAAIEQEAKKWPEVLRLMTHPGVGPLTALAFVLIIGTPERFKCGKQIGSYVGLIPCEDSSAGHQRLGHITKQGSSLLRFLLGEAAQAAARWDADGRRRYIHLAMRRQRNIAKVAMARRLAVRMYWMWRNGWEYAEWVKFGSHAGQLGTRHGVN

SEQ ID NO: 243482 - protein, 418 aa, unidentified
MNEDENTRGTRRYVALDIHKHYCVIAAVDREGRVVLQAVRVEHADLEGWLKKNLRSTDHVVLESTTNAWHVYDLLEPLVERVVVANPIKVKQIANARVKTDIRDTFILARLLAANLVPDVWVPPAHVRELRQLLSQRRQLVETHTQILNRMHSVAHRHHLTHKRGKRFNEKNTAWQKDKRLSKVEQFQLELEMENRAYIEKQISRIGKEVAKMSHQQPWAQGMTYIMQLPGFGVITGMTVLAAIGEIRRFESAKHLASYSGLTPGLEQSGTKYSEKGVTKEGRKELRWALVEVAQRAVKSDPVWTRKFQELHKRLHRNQAIAAVARRLLELVWHVLTRRQPYRHFSHERIAYKYLTWAWQMDEAARDGLTRQQFTRYYLMRLGIGHDLTCIARDPKHPRKLASEAELLALRPELNHIE

SEQ ID NO: 243483 - protein, 438 aa, unidentified
MLGGSVTASFSHFCYEEVVDLKIVFPTCCGVDVHKSFLVATIIKTPQNSLQQSYQKKRFSTFNSDLNRFADWLRENDCLDVCMESTGKYWVPVFNILEKQGIRVVIANPKWVKAVKGNKDDAKDSKWIGDLFRIGLVKSSFIPNKEIRILRELTRYRYKLISMKSSEKNRFQNAFTVCNVALDSVVSDMFGKSATAITDYLTSDVEFDAQHCISLLQRSLKKKAPAVLEAVEGHEIAPEQKTRIGIVRDHLHYIDKLVERVDDCVEGMVQKYEGAITLLRTIPGVDRSSAITILSEIGIDMAQFGSSKRLCCWAGLTPGNNESAGKKKSVRISRAGVYLKPALVQAAHAAVKDKSSTYYAVKYERISKRRGKKRAIIAIARMILTAVFCMLSTGEVWNPVDLYKVDMPEHLKEKQLAKAVKQAVHFLETQGLIVLDSA

SEQ ID NO: 243484 - protein, 345 aa, unidentified
MNVTAVGIDLAKNVLQVHGVDARGKVILRRQLRRDLVTAFFAQLPPCLIGMEACASAHHWGRTLERFGHTVRLMAPQFVKPYVKANKNDVADAEAICEALTRPNMRFVPIKSIEQQAVLSLHRVRQGFVKARTAQANQIRGLLGEFGLIIPKGIWHIAQRVPELLEDASNELPLALRQLIDRLTCHLKELDRQVRELEREILVWHRNSDVSRKLEQIPGIGPLAATALVASIADARSFANGRQVSAWLGLVPRQNSSGGKPTLLGISKRGDVYLRTLLIHGARSAILAARRRNDSKNGWLANLLNRRHPNIAAVALANKNVRTVWALLAHGRDFRPDYVPLRTAA

SEQ ID NO: 243485 - protein, 479 aa, unidentified
MSRQPGKPRKHNAKRGLHRKTRKKRMGLENRPVLEPNAAGIDIGAREIFVAVPPGRNAHPVQVFDTFTEDLQQLANWLQACGVTTVAMESTGVYWIPLYDLLEERGLKPCLVNARHMRNVPGRRTDWHECQWLQYLHSVGLLRGAFRPEADVCAMRVLVRHRGELVQAASQHVQHMHKALTQMNVQIQHVISDITGRTGLAIVEAILAGQRDPAELAKLRDSRIRVSEDTIRKSLVGNWRQEHLFTLKQSLQLYRTYQEQMVECDQEIEKLLGHFESRVDPTKRPLPPDRKRNRSDRKRRKKAGHPETGFDLRTEAYRLYGVDVTQIPGVETIALPLFSEVGRDLSRFPTSAHFASWSGLCPDNDISGGRVLWKGVRKVKNRAGQMFRLAAHSLHRNLTPLGNYLRRMKAKLGPTAATTATAHKIAVIFYTMVTKQVEYDDSIWATRDADRQKRLEARLKRQAQLLGYQLVPIETGPAA

SEQ ID NO: 243486 - protein, 382 aa, unidentified
MQASRKSTPTAGDCGTIFVAIELSQKTWLITVHSPDRDQFSRHRLEGGDHAGLLALIEKVRARATQQLGSTPRVVSCYEAGYDGFWLHRLLEAAGISSLVFDAASIAVEQRSRRAKTDRIDGELLLRTLMAHLRGEPRVVRIVRVPSVEEEDARRASRERDRLITEQTAHTNRIKSLLRLLGMAVGNPRRRDWLAWLKRQRDWQGRPLPPHLLAEAQREHARLMLVREQLAALEQVQAAQASAVPAPMAERRDLLQRLKALGPAFTATLVNELFYKDFRNRREVASYCGLAPSPWQSGGIDREQGISKAGNRRARHKAIELAWLWLRHQPNSALSHWFRTRTANAGRRAKRIAIVALARKLIVALWRYLTAGLVPEGATMKA

SEQ ID NO: 243487 - protein, 423 aa, unidentified
MEHTTIAVDLAKSVFQVAISHHAGRVDEERRLSRDRFLTFFAQQPPATLVFEACGSAHYWGRQLQPFGHTVRLLPAHDVRRYVRRNKTDRTDTKGMLEANRNEEIHPVPVKTIEQQAIASLHRLRSTWLATRTARLNTLRGLLREFGVFIPVGAHHVVPRLRELLGEPTDTVPLAVRGTLAAACAELDGLEANMHDVERQLAALARQLPDVTLLQTIPGVGVLTATALVALVGDIRRFRSGRHFASFLGLTPKEDSSAGRRRLGAISKQGDVSVRMLLTHGARSVVWHAKAAAQATALQRWAVHTERRRGRNVAAVAVANKLARIVWAVWAQQRPFAADHRSGQLRIRLSLTWRTAPSASHHGAPVGPARGHADNSAGREGPCKRLAPRARISMMARSRDGSTDEAEDTTAVRLFGQPSGYGE

SEQ ID NO: 243488 - protein, 310 aa, unidentified
METYVGIDVAKDKLDVHVRPSGEAFCVARDAKGLVELVQRLQALPVPMLIVLEATGGFERTVAAALTAAKLPLAVVNPRQIRDFARAVGRLAKTDAIDAAIIAHFAEALRIEPRPIRDDEAQALDDLVSRRRQLIDMIVAETNRKKAIVNKRIVREIDRHLLYLQKLLTGLDRDIDDAIRASPVWREKEELMVTVPGIAQKTARTLIAELPELGSLDRRRIAALVGVAPMNRDSGAMRGKRRIRGGRANVRSALYMAAVAAVRWNPMMRQTYQRLRVAGKPAKLAIVAIIRKLVVTLNAILRDKTPWKTA

SEQ ID NO: 243489 - protein, 342 aa, unidentified
MDHYAGIDVSLECSSVCVVDASGKILREAKVASEPEALIAWFRSLGLGLERIGLEAGPLSQWLFAAMKAAGLAVELLETRHVRKAFEAMPVKSDRNDARGIAQLMRLGWFRPVHCKSLSAQETRATLTARKLVQSKLRDVENSLRGILRGFGLKVGKTTERKFAGRIRELVADHPHLQRIADALLAVREVLRTEFAAFQKQTRKMARSDSRTRLLMSTPAVGPIVALTYASAIDDPGRFKSSKQVGAHFGMTPKKHQSGETDYTGRISKIGDGSVRTALYEAAHIMLTKPVKGCSQLKSWAMRIARRAGMSKAKVALARRLAVIMHRMLADETPFNAAAAAT

SEQ ID NO: 243490 - protein, 345 aa, unidentified
MTTMPQPVPTRVTVGVDTHADVHVAVAKDSFGRRLDATSVPTTPAGYAELLGWAQRLGQPDAWGIEGTGSFGAGLARFLRAEGQIVVEVNRPDRQARRRRGKSDPLDAEAAARAVQAREGSIPKAGDGQVEMIRSLRVARASAIKARTQAINALKALLVTAPAELREQLRGLSTVRLVQTTAGLEPGAVTTPLAAAMLGLRTLGRRYQALSAELAALDAELDRLTRAAAPKLLALFGVGADSAGALLVAAGDNPERLCSDAAFAMLCGASPIEASSGKTRRYRLNRGGDRQANAALYRIVVARLRHDPRTQDYVARRIRQGKSKKDAIRCLKRYVAREVFAALPR

SEQ ID NO: 243491 - protein, 343 aa, unidentified
MKLTRVGVDLAKQVFQVHGVDRAERPAWCKRLKRSRWIADLERDVEPGAEIGMEACGSAHHWARVLQAKGYRIKLIALQFVKPYVKTNKTDANDAEAICEAMSRPSMRFVAVKTVEQQDLQAVHRVRSSLIRERTSKANQLRGLVYEYGLVAPQQISSLRRAVPQWLEDAENGLAVRFRSLLAGLYRDLQQIDERVRELDQEIAAIAREHEAVGRLEQLRGIGPLTASALYALVGDARQYRNGREMAVSLGLTPRQHSSGGKERRLGISKRGDKYVRTLLIHGARSALRAAPGKTDRLSRWALALAERSHPNVAATALANKMARVAWAMLRHGTNYEPERVVA

SEQ ID NO: 243492 - protein, 523 aa, unidentified
MARTVGSKKRRSARAHLIHKPGGIIHPRVQAVGPEHFGIVSVDCAKARSKWMLADFYGKVLVPPTPVEHNRNGLDAMVQSVCLAIERFDLRDVIVAIERTGRYHLPVKRAFIQARFDTRSVHPLTSKQFRQPANPGNKTDDTDLNAIHRAVVNGFGLIEQPLDPVSVRLQLLARHRRDLVEKTTALRCQIHEHLQAIMPGYAKCFDDIYECHIPLVIAKSLGSAAEILRVGLPGLTQVVRQAGIHSHRPTLEKTLAWARTAAAATAEAPIHHRIMRELDDDRVAKVQAIQVVEGELAELLVQTPYVLLLGIPGINVVSAADFGGEMGPIQFYTKARAITGRAGLFPSRYQSDEVDRPDGKLVRCANHRLRYAIMMIADNLIRCNDHFRVLATQWQLEGKDPRAIRVRVAGRFCRIAYQMVAGRTTYRHPSCRQRDYILCKLMTFCIEHDIDIIRIMKHLDAAVAQLPGAEHREEGAALAAELDQLQKKRGSGPRSLAQILPAVLAKLGVQLISSTKSGEADLT

SEQ ID NO: 243493 - protein, 352 aa, unidentified
MTVTNLARSITGGVDTHLDVHVAAALDERGTLLGVESFATTESGYKKLLGWLSDFGPVELVGVEGTGSYGAGLTRLLQAERVRVVEVDRPNRQRRRRKGKSDPQDAISAARAALSGDAAGEAKTRDGNVESMRVLRVARASARKGRTQALNQMRNLVSTAPESVRDELRGLNVYRLLERASAYRPGSKRDIVSLTKFTLRMLARRALTLEEEISEIDAILKPLVKETAPELVATLGIGTDAASALLVTAGDNPERLRNEAAFAHLCGASPLDASSGKNERHRLNRSGDRQANSALWHIVITRMVYDPRTTEYIARRRQEGLTKKEAVRCLKRYVAREVYGLLPHAKLGLDSP

SEQ ID NO: 243494 - protein, 447 aa, unidentified
MKKKSGFPILYPNAAGIDIASREHYVAINPEADEHPIRAFGCFTEDLYAIANWLLQCKVDTVAMEATGIYWVSLYLILEEAGLNVVLVNAKHVKNVSGKKSDVKDAEWIRQLHSCGLLNSSFQPDHFTRTLRTFMRHRKNLTEMAATHIRMMQKAMEQMNIKLQNVIADITGKSGQAIIRAILEGERHPEVLVQLLDGRIKANREVVIKSLKGVWKEENLFELKQSFDLYHAYRKKIEECDEQIRAHLTTKIHEFKNEVPKPREAKKTKVKTNKNNLSFDATEILKQIVGTDLTEIFGITDTNATEIISEIGLDMSKWPTKKNFTAWLDLAPNNKVSGGKLLSSKIQKKKNKAGQIFKMAAYAVQRSKNWLAIFYHRIKARRGAAKAITATARKIAVIFYTVMKEKTVFNPLSIEQYMETFKEQQIKKLKKQAGNLGLLLIPNELVT

SEQ ID NO: 243495 - protein, 349 aa, unidentified
MKITGCDFHPSYQQIAVLDSVTGEMVEKALSHERKEEVRAFYAQMQGSVRVGIEASGQSQWFERMLAELGHELWIGDAAKIRASCERKQKTDRRDAELLLRLLAEDRFPRIWVPTAAERDDRQLLLHRHKLVRMRTQVKNQLQALALNQGVQRKRKLWSEAGRKQLESLPLLPWASRRRAELLQLLDQLEASISELDRAVAEQASARPAARRLMTHPGVGPVTALAFALTMGPAERFQRGKQVASYLGLIPSEHSSGGRQQRLGHISKQGNPFLRGLLVEAAQSAVRYEPEMRRAYQRLAQRKCRGLAKVAMARKLAVRLYWMLRLQVNYAQLIQGSHAGQPGTFCGRG

SEQ ID NO: 243496 - protein, 326 aa, unidentified
MTPSHLLDNTFVGIDVGGAGLDVAWHRGDGAHYANRPDAIATLVERLQAGPKLTRIVLEPTGGYEKPLVKALRQAKLPVEIIHTTRFNAYRQLVGVKAKSDTSDARLLAAYAAAPDEIRGRKAGHVELPEDAIREELSELASRRDQLKHMIHAETCRLGTVRMAALREAIATHLETLKAEDKQVHQMMLMLVRQRLDLKRDQHLLKTIKGIGMKSALALLASVPELGRIDNKAAAALIGVAPFVRKSGTMTAPARIHGGRAGVRSILYMAAVTASRHNPVLRPFYERLIAKGKPPKLALIAVLRRLVVFANAVLRSGQPWKGAIAT

SEQ ID NO: 243497 - protein, 336 aa, unidentified
MAVVDEHDRVLGNECFPTSRQGYKQMLLWMRSFGELARVGVECTGSYGAGLLRYLQQAHVTVLEVTTPDKSDRRKRGKDDTLDAQNAAHAAFAGIRTVTPKSRDGMIESLRVLKVCRKTAIAARRVALQLIHNTIVCAPDELRESLRAMTRMQLIRTLAAWRPDLSDYRNLASAYRITLKSLGRRYLELHDEIADLDVMIAALVDELAPDLISRNSIGYESASQLLLTAGDNSSRLQSEASFAALCGVSPVPASSGKVTRHRLNRGGDRAANSALHIIAIGRLRTDARTKAYVAKRVSEGHSKLEAIRCLKRYIAREVYYLIRQRNRQIAQVQIAT

SEQ ID NO: 243498 - protein, 320 aa, unidentified
MRNTVGLDISKLTFDASAIVGNAEYSAKFDNDSKGLNQFSDRLKSLGCQNLHICMEATGNYYEEVADYFAQYYSVYVVNPLKISKYAESRFKRTKTGKQDAKLIAQYCRSAQESELVKRQKPTDEQYRLLRMTAAYAQIKSECAAMKNRHHAAKDEEAAKAYAEIIKAMNEQLEVLKEKIKEQTEKPKCKEGVKCLETIPGIGRMTAAVLFHHLTSSKFETSNKFAAFAGLSPQQKESGTSVRGKGKLTKFGNRKLRAVLFMLTMVAYRIRAFPDFIKRLEEKKKPKKVIIAALMRKLAVIAYHVHKKGGDYDPSRYKSA

SEQ ID NO: 243499 - protein, 341 aa, unidentified
MSVYVGIDVHRKRSQVAVVAEDGKVQLNRNVVNGSEPMLRLIGGLPAGTPVAFEAAYGWGWLVELLEDYGFDPHLVHPLRCRAIASARLKNDKVDAAILAQLLRADVLPEAWIAPQPVRQLRAQLRHRASLVRLGTQLRNRIHAVGADFGYDRAGSYWTGPGRGWLAELDLPPVSREIVTDCLASIDALAPVIERLDGELHQRAKADPRVKVLRTLPGVGEFTALVMLAEIGDITRFASARKLASWAGLTPTVRGSDLTVRHGHISKQGSAWLRWVLNQAAQTAKRSPEFAATYAAISRRRGKKIATIAIARKLLTRAYHLLAEQAAGTPGTTMPDTSAAT

SEQ ID NO: 243500 - protein, 381 aa, unidentified
MKKNSIARLQVTKSQIRRMAGKQKLTVGLDLGDRSSRYCILNEAGEAASEGELPTTKAGVDSLLAKMAPSRIALEVGTHSPWVSRQLRAMGHEVIMANPRKVRLITQSVKKNDRMDAEQLARLARVDPKLLAPIRHRGAEAQGDLAIIRARAEVVECRTKLINAARGLTKPMGERLKSCDADSVKESLADGHSEATQAIIRPLLKLVESITQQIQVYDQKIQEMEKRYPETKLLKQVHGVGRLIALSFILTLEDAERFAHSRDVGPYLGLTRKLRESGESQPELGISQAGDGLMRRLLVQAAHCILRKGAPDSDLKAWGMTKVQAGAGKKGSKKRKKKAAVAVARKLAVLLHRLWVTGEVYDPQYNRKAVEAAKGKKPAAA

SEQ ID NO: 243501 - protein, 404 aa, unidentified
MWYAGIDWADTHHDALVIDEKGGQVASLRVDHTPQGMSKLNTFLEQIIGTAPKEQMACIIETTHGLLIAHLLEAGWPVYPVNPRTVDRRRSASGAKTDTIDAYLLAKTGRADLADLHRLTPDSEKVRELKQLTRDQDALIQMQTRLVNQLTACLKAYYPVGLELFTKLQQKSTLVFLQTYPTPQAAMAASGEQIEHVLRAAKHSNPSLVAAQIVERLQQPHLQADVVTTRTKSRLMVALMSQLLPLIAQIAQYNKEIATLFLTHEDHEIFASLPRAGKRLAPRLLAEIGDDRTRYQDASSLQALGGTSPVLYQSGMYSKAHRRLGCIKPLRNVLHQFAWQTTQSEPWAMQYYQRKRTEGKSHTVAVRALANVWVRIIFAMWLHHRCYETATFEHAQQQHARPAA

SEQ ID NO: 243502 - protein, 318 aa, unidentified
MFVGIDISKEQVDVAIHGSKETWQFGRDERGLVGLIDHLKGFGQPIALVVLEASGGLERDVAAALAIAKIPAAVVNPRQVRDFASALGKLAKTDSIDAAVLAHFAQAVRPAVQPMADELVLALEARKTRRNKLIQMQVAEKNRRAMLIVQRTGSPAMVKSIETHIKWLEKQLAELDDDIDKQIKNSPMWREMDDLLQSVPGVGPVTSRTLLSYLPELGSLDRKKIAALVGLAPYNHDSGRASRRRAIWGGRAEVRNVLYMAVVAALRCNPVLRAFYARLKAAGKPSLVAIAATMRKLLTALNAMARDRSPWTPPLLNP

SEQ ID NO: 243503 - protein, 400 aa, unidentified
MLSIGIDVSKGKSTVCGMKPGGEIVYTPFEVQHTREGMSELLSLLRGSGEEVRAVLESTGSYHCPVVAALLENGIFVSVVNSLRMKRFCSQSIRRVKTDQIDAMQIALYGLAYWQELQPTRLPENTYRELQLLARQYYQMTSMLIKAKVDFNALCDQVLPGMQELMNDHAGRHKLSDFVLRYHHTTHILEMGETRFRKDYCKWAEKKGYRNCERMAVLIFATAQNGIPVLPNAPSTQIVITEAIRVLHTVEASRDAILTQMQALAKTLPEYSLVREMPCIGDTLAPRLIAEIGDVRRFHSKRALIAYAGIDAPPYQSGKFCANNRHISKRGNRYLRKTGYEVMQSYVMHKPANDPIFTFIEKKRGEGKSGKLAMVAGLNKFLRVYYGKVTELYRSLPTIE

SEQ ID NO: 243504 - protein, 346 aa, unidentified
MKHYSGLDVSVKETSICIVDETGRICREIKAVSHPDDLTAVLRDPAWNLDRIGLEAGPLSQWLFEGLARAGLPVICIETRHTKAFLKAQPNKSDRNDARGIAQMMRVNLFRPVHVKTLISQKRRALLTARKLLQEKAIAIENDIRGLLRNFGLKVGIVGAVKFEERIRELVDDISDIGEIMEPLLAARQKLRDEFSRLHKKVLDIARNDLECRRLMTIPGVGPVVSLAFTSTIDIPQRFRNSKVVGAVLGLTPKLNESGESKRVGRISCCGDTMMRMLLHEAAQILSVTRKWSWLKAWAMNVAKRRGRQKAITALARRLAVIMHRMWSDGTEFRWTREGLPTAVHA

SEQ ID NO: 243505 - protein, 456 aa, unidentified
MRRTKRRSSKIRPALPMVHPNAAAIDVGARMHVAAVGADRSAEPVRSFGTFTTDLHRLADWFAECGVETVVMESTSVYWIPIFELLEARGFTVFLVNARDAKHVPGRKTDVSDAQWLQRLHSHGLLRASFRPKGEIIELRAYLRQRERLLEYAASHIQHMQKALSEMNLQLHHVVADITGTTGLRIIRAILAGERDPAVLALLRDTRCHASVETITQALTGHYRAEHLFALEQALALYDAYQEKASACDARIEAVLKQLSFRRGRGVGPLPAPRRGMRRQPNGPAFDVRAALFALLGKDLTQINGLGPYLALKLIAECGADLSAWPSAKHFTSWLCLAPSNKISGGKVLSSRTRRSGSRAAALLRLAAVTIGRTDTALGAFYRRLSARIGKIKAITATARKIAVLFYNALRHGMDYIDPGASSYETRYRARVIENLHRRAKAFGFVLHPAAPQAVS

SEQ ID NO: 243506 - protein, 323 aa, unidentified
MTLYIGVDIHARQQTLSYLDSEDGTTGQVVLDHEVDDVAGFYGKFQGEVIIGIEACGYTNWFEELMERLGHKLLVGDAAEIRRLARRRQKNDRRDADLLLELLVHNEFPVLYRYCKESREVLRQLRYRHKLVKLRTIVANTLHALALSAGLSLRAKLLTKGGRKQLSALTLSAISQQQRNELLSLADELTRRIQLVEQWLAVQTASDGRVQRLQTHPGVGLLTSLCVVHTLGDVQRFSCTRKVAAYVGFDPMEDSSAERKAYGGISKAGSRLLRYLLIEAGQTAAKDDEQLKQFYRRLLPRRGKARAKVAVGGFAQKVRYHLL

SEQ ID NO: 243507 - protein, 420 aa, unidentified
MEHHEHFAALIGLDWADQKHDLCLVDTASGSRELSVIAHTPEALNEWARSLRARFNGTKVALCLEQSRGSLIYALMKYDFFVLYPVNPQTLAKFREAFTPSRAKSDPTDAEFLVELLVHHRGRLKAWVPDSEQTRTLQLLVEHRRRLVGDQTRISNRLTALLKGYFPQVLRWFPDIRTKMVCDFLLRWSSLNDLKGVRRTTLEKFMREHNSLHKEAVEKRLEAIKTAVALTTDAAVITSSVVMVKALAAQMRTTLEAVREFDQRIEELCRAHEDFDLFASLPGAGRVYASRLLTAMGSNRGRWASASELLCFSGVAPVIERSGKSSWTRWRYFCPKFVRQAFVEYAGESIRHSEWAKAFYLSQKAKGKSHQAAVRALAYKWIRIIWKCWQTRTKYDEARYIECLRKKGSQLVAEVASAEA

SEQ ID NO: 243508 - protein, 428 aa, unidentified
MKTNNNAKLEAITHKTLIVGIDIAKLTQWARFVDYRGLELGKAVKFKNDKNGFENILATIEWFCKTKSFDAVIVGLEPTGHYWKPLANYLLIHDVKVVMVNPYHTKRAKELDDNSQTKNDKKDALTIAKLVRDGRYYDVYMPQDIFAELRVLTNTRISLMRRHNSIKNTITALLDEYFPEINTVFKNVFRGKASMQILKSCPFPALILELGVEGVLTEIKKVVKRSVGRKKAEQLVETARNSIGVNYGLSSAKFKLDLMVEELDLLTRQLEQIEDAMASALSQLDYADLILGIQGIGVVTAASLLGETGDLLRFDHPRQISKLAGYNLVEDSSGKSKSGTIISKRGRKNLRSILYRIALVMVAKNNEMKELYQYLKTRKDNPLKKKPALVVVSKKIINVIYHLVKKNMEYKPELVLGEYRKNQIRQAA

SEQ ID NO: 243509 - protein, 337 aa, unidentified
MQVTTIGLDLAKNIFQVHGITKDDEVAFNRPLRRAQLLSFFSKLEPCLIGMEACSSAHHWARELTKFGHDVRLIPPIYVKPYVKRGKSDAIDAEAICEAVTRPTMRFVAIKTVEQQSLLSVHRARSLLVRQRTQLINGLRGMVAEFGVYIARGLARVISFSEDILAGEVLDLPDIANDVIHNLCEQLTALHTRLRWYEERLKQIAKEDARVRLLRTIPGVGAVTASAIIASIGDGHQFSNGREFAAWLGLTPANKSSGGKEKLGHITKMGDQYLRSLLVVGMTSLVRQTKSHPERASKWLISLLERKPARLATVAMANKRIVWTVLTRNQPYTPHKA

SEQ ID NO: 243510 - protein, 347 aa, unidentified
MPAVIGCDAHKHFSVFVAIDRKGKTAAPVRVEHDRQEYIDFLRTLPPGSEIAVESTGHWYWMVDEMEKAGHRPHLANPSEAKKRMGGSNKTDALDAKGLAILLHNGTLPESWIPPGELRDRRELLRTRMALRDLRSSLKHRIHAAIDRYGLQATGISDLFGVKGRVYLDRTLDKLPCDTAAMVRIQLTSLDQLEAQVEEIEERIAVALKPSPEVQLLRTVPGVGEILAPLVWLEIGDVDRFPRAENLASYAGLVPRIIASGGRIRHGGVCRNVNQYLKWGFVEAATCAVRLKKYRDSHIGQLYNRLAPGKGHGRATVAVARHLAEASYWVLRKQQPYKAPGPRSIVA

SEQ ID NO: 243511 - protein, 331 aa, unidentified
MKYIGLDGHSSTCDFSVSDSKGVEIDRRTIATNGRLIVDYMRSISGAKRMVFEESDLSHWLFGLLKEEADEVLVCNPIESARYKQKKTDKLDARDLAELLRGNFIKSVYHDGSEREQYRMLMSGYNDLIGEIVRGKNRYKALYRKRGKKLTGESVYPKRELLQELGTGDERFMGEKLFSRLESLDEDRVSYVERIRKTNKKFKEIKHLKTIPGIGDLQAAKIVSQVVDPKRFRNKYKLWSYCGLARHNQISGGRNYGSKKIHGNLILKSVFKSAAHMALRSDEACRSYYEKLRAQGANHEEARNAVSRRLAAASLYVWKYAEGYNGKKLHG

SEQ ID NO: 243512 - protein, 514 aa, unidentified
MQLRLGIDIACRAPHQASLADESGRFVFTGHRFRTIARELEELWSMLPTETEAGDVTVVMEPTRNAWVALAAWFRRRGARVVLVPPEQSADLRAYYSKHTKTDRVDSRLLARLPLLHPEGLHEEHGLGPGHPMRRATRLRQSLVKRRSKSLSRLDALLEILGPSWLAALGSDLANKTPLRFLAAGYACPLTVRRLGLGRLNRFIYRHSRGSWGQEKAIELWDAAEETLALWADELDFGELAEDIAVEARLALSLTEEIVALDERIAVQFHEADPQGILVSVPGVGAITGAQILGRLGDPARFRSLAGVRSFSGLVPSLDASGLMGKHGGPTKRGDACLREAIFIAADHARRIDPTLAARYHRLMVSSGKHHNSAVCHVASTLLTRIVACWREGQPYALRDVDGRQVSLAEAKRIVAERYTVPNELRRARLTNTAGRRGRTGRRSKESQSAPSASPSTGHATATARTSSPRAVRDGKASRRRSIATPGTSSTPSEIAPMPGRRNPERPCSGRAAG

SEQ ID NO: 243513 - protein, 410 aa, unidentified
MEVVYPRCCGLDVHQKNVTACLLTVTPSGERQKELRTFETMTDDLLALADWLVVAGCTHVAMESTGVYWKPIYNLLEGNFELLVVNAQHIKAVPGRKSDVRDAEWIADLLQHGLLRGSYIPDRPQRELRELTRYRTALVREQARELNRLQKVLEGANIKLGAVASTMAGRSVRAMLEALVAGTTDPTALAELAQGRMRAKRAALQRALAGRLGAHQRFMLAEQLAHLEYLEEAIAHLNAEVRTRLHPFEVELGRLDTIPGVARTIAEVSLAELGTDMARFPTDRHCASWSGLCPGQDESAGKRRSGRTRKGSPALRSALIQAAHAAARTKDTYLSAQYHRLAARRGKKRAAVAVGHTILTIIYHILRTGRSYEELGGNFFDERDREHIARRQVARLERLGYHVTLERVPA

SEQ ID NO: 243514 - protein, 415 aa, unidentified
MLKIVYPICCGLDVHRDFVYACIATTVNGVTTYKSHRFSTFTKGLRELLSWLLASNCKDVCMESTGKYWIPVYNILETDCKIVLAHPKYVKAIRGKKTDKKDAKWIADIFKHDLVSGSFIPPADIRQLRDLVRYHTKLTNFTTGEKNRVQNCLTVSNLKLDSVFSDVFGKASSNIIGHILANPSVKLSDVSAFRTKGMKATDEEILEAVDGEIYPEQAEKLRIIRDHMSSLDLCKANLQSLILSTAEKYIPEIDLVCTVPGIATFSAISVIGEIGVDMSVFPTSKHLCSWAGLTPQNDQSAGKKKTTRISRAGAYIKPLLVQCALAAVKSKNKHPEVYNRYSALKKRRGHKKATIAIARMLLTAIYNILKKHEPYNPEIYRKSDTPPEHRNVSVEEAIYILQRQGYLISSPVSIE

SEQ ID NO: 243515 - protein, 376 aa, unidentified
MESQVSFNQVVSRGCGIDVHKKMLVATISGEGLKTATREFGTVTRSLTELKDWLLENRVTHVVMESTGVYWKPVYHVLEPSGLTVWIVNARHVKNVPGHKTDKQDSRWLCKLLLAGLLKPSYIPPREQRELRDLTRYRTKLVQDISSNKNRIIRILEDCNVKLSSVLSDTSGVTATRLIDKLCQGKEVTMGDIEEVYHKKIEATKEELFEACNGYITDHHIYLLGTIREDNHHLESLIRDLNEKIKHALAPYENALERLREIPGLNRKSVEDLIAEIGLDMDVFPDENHLGSWVGVSPGNNESAGKKKRTHHPREQAGQIHPEPIGMGGVADKRHVLPRPVPSPGIPPRQEKGHCGRGTLHPQIGVSCLERRGPLR

SEQ ID NO: 243516 - protein, 344 aa, unidentified
MLYVGLDLSRKRIDFDARLADGEVFERGAVPPDGDGLAGLVGRLGDTPVVAVIESMNGARFVHDQLELLGWDVRIADAVKAKGLAPLACKTDRIDAWVLAELARRDLVPEIWLPDPATRAERERARFRLHLVRHRVSLKNRVHAILIAHGISNPTSDLFGLAGRRLLERLQLPEPWQSTTAAAIELIDVLDEQIAECEQELRRLGADHPYVPLLMTVPGIGWVLGYTIASEIGDIGRFATPAKLVGYSGLTPSVEQSGQRDRRGPLRKNGPDHLRWALVEAAHTASRHPLYQPIVESHRARLGRKKGSKTAALTIARKLTHAIWHMLTTNQPFAPAGAAHALAA

SEQ ID NO: 243517 - protein, 394 aa, unidentified
MEKLYVGIDISKDRSSANGIDEYGKSRFEISFDMDGTGFSELFKAIESNTESNEGVVAAMESTACYHINLYSFLSAKSIEAVIINPLLIANYAKLSLRKTKTDKKDARTIAQFILAHKDSITQLAISQDLQDMRDMARERESLCHQISAAKVEIQRVLQTTFPELMSMTNPFTKVMLNFIQRFPSARLVSISKPSAIEKTLKEKPCSCRLRFTPKALIEAARTSIATVSPAKELILSGKIETLLHLQKRCDELTHALTKYCESTIVDDLRIVTSIGGINNKTATTLLAEIGDIGNYPSHKNLIAFAGIDPTVYQSGKYEGASRISKRGNRHLRRVIWLMTISVIHHNPLFRNYFLKRRNEGQPFKKAVFATAHKLIRVIFAMLSHRTCFQKECI

SEQ ID NO: 243518 - protein, 341 aa, unidentified
MQITTIGLDIAKNVFQVHGIDPAEKVVVRKQLRRGQVLKFFAALPPCLIGMEACATAHYWARELTKLGHEVRLMPAKDVKAYVKRNKNDAADAEAICEAVRRPTMRFVGAKSAEQQGRLMQHRTRDLLMRQRTQVINALRAHLAELGIVAAQGREGLKQLLTIIADEKDARLPIDARGSLIVLAAQLQALQTMIGSIEKRLTMQHRANEASKRLESVPGIGTIGASAITATVTDPNAFRSGRDFAAWIGLVPRQDSTGGKQKLGPISKQGDRYLRRILVVGAHSVLRRARQNPEKYPWLTQLLARRPFKVVAIALANKMARVAWVLLARGGTYRVPALAAA

SEQ ID NO: 243519 - protein, 394 aa, unidentified
MSTVGIDIGAYQHVAAVCSEGASKAERKVLRIETRRSGFNELDRWLERQNPVSLVVMESSGHYWLSLASHLRRRGVPFAVVNPLEAKYFAKSRLQRSKSDPADARTLAALGMRDRPTPRDVLAGAELREASRFAMKLVQQQAEICQRIRRLIDLGFPELQDEYDDPTCLSALAILDTAPTARDAARKHVATLAKARTHRGGRPVGEVRAARLHAAAQTSVAPPELANQISFQMRILLDEYSMLESHIALAEKRLRDLLDSELSRRLQTIPGVGPAIAATLIAEIGEITRFDDVDQLLAYAGVHPKEQSSGKKGADPETSWTMAKTGNAYLRTAAYRMAVVGVQHNPLITAHYQRKRAQGKSKMNALGHCMGKALAIVWGVWRGGGDFDPSGRLH

SEQ ID NO: 243520 - protein, 375 aa, unidentified
MKEKVRFLGLDVHAETIAVAIAEPEGEVRSLGTIPNRSESIRKLIKKLGPAEKLRACYEAGPTGYVVYWLLAELGVHCDVVAPTLVPVKAGDRVKTDRRDAEKLARCYRSGDLTAVWVPDEGSEALRDLVRAREAAKQDELRARHRLGKFLLRSGQRPPSGVKPWTRAYLIWVAQLRFTQIAQEATRQDYLHEVEHMRERVTRLEQAITEAVKLASPALQQVINDLQALRGIAEISAVTIAAELGQVSRFDSARQLMGYCGTVPSEDSSGRRTRRGSITKTGNAHLRRIVVEAAWSYRRPPCIWYGLRRRQESIAEEAKEIAWKAQHRLHKRYMKLGAAGKDQRKIVTAVARELLGFIWAIGTRAETVASQRLAA

SEQ ID NO: 243521 - protein, 356 aa, unidentified
MQLQDALTIPKIFIGLDIHKQSWTVSIQTDLFFHKTYSMPSIAEDLYQYVQRTFPNHEINLVYEAGCCGFTAARYFLNLGWNVLVVNPADVKTGDKERYQKTDSLDSKNLSNQLKAGVLKGIHIPTEAEEQFTTLARHRTQVTKKLRQTKAHIKSMLLFHGIKIPDQYDNSNWSLDFIAWLEKLKFSTSCGDFALQGKIRMFKFIKSEYLEIANQMRSYCRKSNKKDYNLLRSIPGIGGYLASVILAECGDLRRFNNESQFASYIGLIPGIYNSGSSEKCLGITPRSRSQLRSYLVEAAWIAIRKDIEMQNYYRKHHGKNVKSIIIKVAHKMARRILSVIKTETPYQINRNLIPIE

SEQ ID NO: 243522 - protein, 307 aa, unidentified
MFVGIDVAKDRLDVHVRPAGEAFTVGRDGEGIEDLVGRLSRMAPALVVLEATGGFETIVAAGLGAAGLPVAVVNPRQIRDFARATARLAKTDALDAAVIAHFAEAVNPPARPLADEQSRLLGELMARRRQLIEMIGAESNRRRMLTVRRTLKTVDRVLATLKTQLQQIDDDIDSAVRGTPAWREAEDLLVSVPGIGPRIARTLIAELPELGRLGRREIASLTGVAPFNRDSGTLRGRRTIAGGRPVVRAALYMSILVSIRRKLPLALTYHRLRAAGKPAKVAIVACMRKLVTILNPILRDKKPWAIA

SEQ ID NO: 243523 - protein, 345 aa, unidentified
MEQHAGIDVSLEWSSVCIVDASGKIVRETKVVSEPEVLVEFFKGLSFPVTRIGLEAGPLSQWLHAGLARAGFETVLLETRHVKAALSAMSIKTDRNDARGIAQLMRMGWFRPVHAKSVGSREVRALLVARKQLLSKLMDLEASMRGILRGFGLKMGVVTRNGFEARVRELSAGQAMLERITTAMLEARAALWREFEQLHREMLRIVRDDEICRRLMSIPGVGPLVAITFKSAIDDPGRIAKSKTIGALFGLVPKKYQSGERDVSGGITRTGDESVRTALYEAANVMLTRTTRFSSLKRWALEVAKRRGLKRARVALARKLGVVLHRIWIDGTTFRWTKHNPAIAG

SEQ ID NO: 243524 - protein, 405 aa, unidentified
MVTSIDRYDEVDVFVGLDVGKGEHHAVALDRTGKRLFDKALPNDERRLRAVLDRLTGHGVVLLVVDQPATIGALPVAVAQAAGALVGYLPGLAMRRIADLHPGEAKTDARDAAIIAETARTMPHTLRSIQVADEQVAELSMLCGFDDDLAGQVTQVSNRIRGLLTQIHPALERVLGPRLDHPAILDLLQRYPSPAAMRAAGEKRLGNRLIKNAPRKGRVWAAEIIAALDEQTVVVTGTDAAALVLPRLAEQLAALRRQRDEILVEVEKIVDQHPLQPVLTSMPGVGVRTTARLLTEVTTRPFPTPGHLAAYAGLAPVTRRSGTSIRGEHPSRRGNKILKRAMFLSAFAALHDPKSRAYYDRKVAQGKKHNQALIALARRRSDVLYAMLRDGTLYQPTTGEPALAA

SEQ ID NO: 243525 - protein, 331 aa, unidentified
MYSFFIGCDISKDKIDISYYLNDKIIYLGKFTNNSIGFKKLIQQLKAISKLPMTTWFVCFENTGVYSKPLLHWLLSQGIPCREENALRISKSLGLRRGKDDKVDSRDICLYAFEKRDSIKQSKFPKPHITKLKKLLSRRDLFVRQKVALKVSLKDQQLMIDQELYEILEVQNMSLLELYNKHIKEIEVEMQKLIEKDDEMKKNNDLSQSVVGIGPIIASYMIAFTDNYSSFTDGRKFACYSGVAPFPNRSGKFIGKTRVNHMANKKIKSLLSNAVNTAVMYDKEIGAYYARKIAQGKAKGVVLNALKNKLIHRTFAIIKRQTPYVKMMNYI

SEQ ID NO: 243526 - protein, 315 aa, unidentified
MEDSQVFVGIDVSQSCLDVAARPTGEVWQVPNDADGISDLAQRLVGMSPFLVVLEATGGLEWALTAELAAAGLPVAVVNPRHVRDFARAVGILAKTDILDAQVLARFGQAMEPEPRPLPDAEAKDLQAMVSRRRQLVEMITAEKNRRRTVIARIRPQVEEHIRWLEKSLTDLDQDLDGFIRSSPMWRTKERVIRSVPGVGPVLSATLLANLPELGELSRGQIAALAGVAPFNRDSGTLKGKRTVWGGRRRVRAALYMAALVASRYNPVIKDFYQRLCSLGKPKKAALTACMRKLLVILNSMVRHGREWQPNLQAP

SEQ ID NO: 243527 - protein, 412 aa, unidentified
MLKIVYPICCGIDVHKKFLVACIASTNDKGVTTYKSSRFSTFTNGLRKLLEWLCSNSCTQVCMESTGKYWIPVYNILETTCKITLAHPKYVKAIRGKKTDKKDAKWIADLFKHDLVAASFIPPLPIRQLRDLMRYRFKLTNFKSSEKNRIQNCLTVSNIQLANVVSDTFGKSSMKIIDYLLENPHDKDFDFVPFLHASMLHKVDDIRLALDGMITPEQQQKMNIILQHYDGLEKCKSNLESLILSLSEPYTKERTLVSTVPGIKNPFSAIAIISEIGVDMSVFHTAKHLCSWAGVTPQNNESAGKKHSVRISRAGVYIKPLLVQCANAVVKSDKHPEIKSRYLSIKKRRGHKRAIIAIARMLLTAIYHILKKGEPYNPELYKKAQPIPASREITVEQAILIARRHGYSVVKD

SEQ ID NO: 243528 - protein, 383 aa, unidentified
MYTGNSAVAYIYFLTQIHMQTCEKTKTLFVGVDVHKDTHTAVGLSPFGEKLFELTIGNYPQDFAELAKKVNSTAHNENLSPRIGLEDCQGFGQRLASYLNEAGYSVNHVPPILVDHKRKKAAHPEKNDSLDARGVAEVMIQKVDTLPIHKITQDSQIAKDIQELSLDREYLVKEQTRLKNQLHLLLHRIWNTEYREKFKDPFYVKALKYWKKSVPRNTSSFLAKNMKRKVKKLENLRLEIKELETDMETLIKKSGHTIHTANGCGIVLAAMIIGETGDISRFKSPAALAKYAGCAPREHSSGKTHRHRKTRGGNRRLNCAFHRLALTQISRMGNEKARKYFLRKISEGKSKAQALVCLRRQMSNIVWMMMKHKTDYNLQKKLT

SEQ ID NO: 243529 - protein, 342 aa, unidentified
MDHSAGLDVSVKETSVCIVDDAGKIVREVKVASEPEALLAVLKNPAYHFKRIGLEAGPLSQWLFSALAEAELPVICVETRHMQAVLKAQINKTDRNDARGIAQMMRVGLYRPVHVKTLRSQKLRMLLTHRKLLQSKAIAIENDLRGTLRNFGLKVGVAGKVKFEARIKELVENLPDLAVLVEPMLIVRRVLREQIVILHRRLLAIVRDDEVCQRLMTTPGVGPVVSLTYRATVDVPARFRNSKAVGAVFGLTCSKYQSGEVDRSGRISRCGDEMMRVMLYEAAQSMLRSKKWSWLKAWAMQIAKRRGMKKAIVALARRLAVIMHRIWVDGTEFRWTREVVAA

SEQ ID NO: 243530 - protein, 408 aa, unidentified
MQIVHERCAGLDVHKEFVVACVRLIEKRQVQRQVRRFETTTRGLLELLAWLQQHGCTHVGMEATGVYWKPVWHLLEGCLELVLSNPAHMRNVPGRKSDMNDAMWIAELLAHGLLPSSFVPPVPIQELRDLTRTRRQLVREIVQHTQRIQRVLEDANVKLSSAISNILGASGRRILAAMVAGEGDSEQLAALGSDRLRCSHEQLQDALQGRITAHHRFLLGQHLVMIDHLQGTIDEFDRQIERALEPFRGQVELLITIPGISTTAAQVLVAEIGVDMAQFPTVHHLLSWAGLCPSMNQSAGRRGSTRVRKGAPWLKPVLVQCAFAAARSKASYLQSQFLRIKARRGPKKAAVAVAATLLTAAYFILRDQVPYRDLGADHFVRRDRGRVVQRLASRLRELGYEVTLKEAA

SEQ ID NO: 243531 - protein, 382 aa, unidentified
MKKTKETPKKYTKKEADLHLAFELSQKTWRLGFSDGNKMRFKNVDARNLEQIQEEVGLAKERFKLKGDIKIVSCYEAGRDGFWLHRYLLKCGIENIVVDSSSIEVSRRKKRAKTDRIDARKLLMMLMRYHGGERRLWSVVNVPNENDENERNLNRELEALNRGRTSHRNRIRGLLIQQGLEVKNPSGKRFLEELESLRTWDGKELPEDLKARVIREYERLRMVEEQMCFLRKEREKRVKSAATSSFRKVAQLRTLNGIGKTSSWDFVMEMFGWRNFRNRKQVGAFLGLTPTPYDSGGSRREQGISKSGRGRIRALSIQIAWGWLRFQPKSKLSLWFAERFAGGGSRIRRIGIVAVARKLLIDLWRYLEYGVVPEGAQLRPEI

SEQ ID NO: 243532 - protein, 345 aa, unidentified
MSEQYAGRQIVGMDLHRRRSVLVRMTETGEHLETVRISNDPEYLRQVMERAGEAPEVVLEATYGWYWAADTLAELGAHVHLAHPLGVKMFAYRRVKNDQRDAADLADLLRMGRLPEAWIAPPACRELRGWVRHRAKLVGLRSSLKCQIHAVLAAAGVQVPMSDLFGAGGRQLLTNARLAPESRARVDSLLRLIEALDFEIELFATLVARRLREHPGYRAILQIPGVGPVLAAIFVAEIGDVGRFARPQQLASWAGLTPKHHESDTTVHRGRITKQGSRLVRWAAVEAVQRMPAHTRLGQIRDQVGERRGRNIGVVAAARELTELVFFGLRDGDVRRLSTPPQPAA

SEQ ID NO: 243533 - protein, 364 aa, unidentified
MDVHKENFTVCCYDMIQDKIFYAQKLEPDYNQILKYLTFVRKAFRKDVDFVCGYEAGCLGFTLHHQLTQHGVSCVILAPTTMMKPAGKKKIKTDKRDAALIARCLASNNFSPVHVPTTQDEEVKEFLRMRDDHRLALKKVKQQILAFCLRHGYSYTATKNHWTVAHIAWLRSLKPEGLYSEILSEYLLTFQALSDKLERLDWRIEELAAMKAYSEGVKKLSCFLGIKTHTALATMVEVGDFHRLASANQFASYIGLVPGEDSSSESVNRLGITKAGNAHIRTLLVEAAQSYTKGQVGYKSAALKKRQAGNTSEVIAYADRANERLRRKYYKMILSKSKRTNVAKTAVARELACFIWGMMTDRIA

SEQ ID NO: 243534 - protein, 354 aa, unidentified
MSEQYAGRQIVGMDLHRRRSVLVRMTDMGERLETVRISNDPEYLAQVMARAGEAPEVVLEAAYGWYWAADTLAELGATVHLAHPLGVKMFSYRRVKNDQRDAADLADLLRMGRLPEAWIAPPATRELRGWVRHRAKLVGLRSSLKCQVHGVLAHAGVWVPMSDLFGVAGQQLLAELSAGDRLSIESRSRLDSALRVIGALEFEIELFAKLVNGRLRTDPGYRALQAIPGVGPVLAAVFVAEIGDIGRFHRPEQLASWAGLTPKHHESDTTVHRGRITKQGSRLVRWAAVEAIQRVSGHTRLGQHRDRVAARRGRNIGVVAAARELLTLVFYGLRDHHIRALDTPAAPVASTPAA

SEQ ID NO: 243535 - protein, 430 aa, unidentified
MEIIYQKACGVDVHKSFIVAVICDSTSIKPQYSRKRFSTFPNSLIDFRNWLLANDCQNVCMESTGKYYIPVYNALEGYISNVVVSNPKWVRCIKGEKDDNKDAKWIADLFKLGIVRHSFIPPKNIRVLRELTRYLYKLTNMRTSEKNRFTNALTVGNCKLDMVFSDIFGKSSSAIINTIISQNQYSDKDILKNVDKRCKASEEDILNSINGISWVDAQKERMLLIQNHIDYLNSTIKSLKEIIDIVVKPYEDYIKFLCTIPGVDRNSAISIISEIGTDMSQFSSHYRLVSWAGLAPGCNESAGKKKSVKISRAGVYIKPALVEVAHAAVTDKDCDYYAVKYKQISKRRGKKRAIIAIARKILVAIYHMLSTGEVFNPSDLSKVETSDKDRIKYTKNNFMQSAKQLLSLGLTSEEIILLVNSQNSNLTPIT

SEQ ID NO: 243536 - protein, 377 aa, unidentified
MTQFPVSTSDEQSIYAALELSKNSWLLAIQVPGRDNPSLYPIGGGNAEGLMAKLDAARNRLAKVSGQTPKVTLCYEAGYDGFWLTRFLEQRGIECLVMEPASLQVNRRARRVKTDRIDVENILHTLIAWCRGERHVCSMVVIPSVEEEDLRRTHRERNRLVRERTAHINRIKGLLFAQGIRGINVMKDYKTLAPAELITGNGRSLPKRLGREITREIERLALVQEQLVEIEHERDQAPTPCAATERKRHDLLRLNGIGPTISAILAREVYYRRFANRRQVASYIGLAPSPYDSGDGRRSQGISKAGNSLARYSLIQAAWLWLRHQPNSALTQWFHHRTEGQSKRVRCIMIVALARKLAIAFWRYLETGLIPEGAVVK

SEQ ID NO: 243537 - protein, 343 aa, unidentified
MGASIGVDSHKGSLAAAAVDELGRVFGIKEFSNDPGGHRALLEWARHYGKPRVIGVEGSGSYGAGLCRTLSSAGEQVREVPATLTFKERRRKGSQGKSDAVDAVAIARIMARGEDLPSPTRTQALADLKLLSDYRDQLVHTRTQVANRVHQDLVVLHPGYERRVPNLVGAKHLAKAASLVRGDTSIRAELARRRIGDLRRLSREIAETKVQITDVLTESGTTLTGLPGIGPLIAARILGEVGDVGRVRSQAAFAMMTGTAPLVASSGMTFRHRLNRGGNRKLNFALHYMALARYRTDEQTKAYIERRRAEGKTFKESMRCLKRHLSNVVYRQMIVDWKAMEAA

SEQ ID NO: 243538 - protein, 386 aa, unidentified
MTKSNDLSRSLVPLEQDACIIGVVELSQASWLVAATVPGIERQPLKKLEPDETALLRLLYRWRDEAAGKGREVRRIAVAYEAGRDGFWLARWLRRHGIDVHVIHPTSIAVSREHRRAKTDRLDTALLMRAFLGWLRGEAGHCRMVGVPTLAEEDAKRPSREHETLAGECTRTINRLKSALVRLGIRGFNPKLRSAQGRLETLRTPEGAPIPPNTLREMNNELARLAFIRAQMKATERARLERIAAGPKAATNPMVQILAKVVGIGIETADMLVHEVLARGLRDRRAVARFAGLTGAPDESGARRREKGLSKAGNVRVRRGMIELAWRFLQHQRESALAVWFRSRVEAPGVRRKTMIVALARKLLVALWRLVHTGEVPRGVVLRQRA

SEQ ID NO: 243539 - protein, 365 aa, unidentified
MTKVRTWAGLDVHAAGTVACVVDAPSGEMSVHRLAGRTSEVTAFCGRLPAPARVAYEAGPTGFELARALDAAGVACVVAAPGKIERPAQERVKTDRRDAERLVRLLMISGLHPLRVPSSEEEALRDLVRAREDIRGDLMRSRHRLSKLLLRHDVRYDDTASAWTAAHRAWLSKVDLGEPAAQATLLDYLGAIDGLLIRRDAIERMIGELVPHSPWALQIARLRCLRGIDTLSAVGLCAEIGDFSRFEHPRQLMSYLGLVPSEHSSGQTRRQGAITKSGSRHARRLLVEAAWHYRRPPRRGTTLQRRHDGQPAQALAISWKAQQRLHQLWHRLDTQRGKRKTVVAVAVARHLAGFCWAITTTNPET

SEQ ID NO: 243540 - protein, 318 aa, unidentified
MNNQESFVGIDVAKDWLDLGWQPGGQTEHIAHTEAAITGLCERLRQDAPTLIVLEATGGLETTLASMLASAGLPVAVVNPRQTRDYAKACGRLAKTDRIDALMLAAFAAAIRPQVRALPDEETRALGDLLARRRQLIDMRVQEKLRLERASTVQRISLKEHIAWLDERIARIDTDLTHTLRTSTLWREKDELLKAIPGIGPITRATLLAMLPELGRLTGKEIAALVGVAPFNRDSGKHHGERVIWGGRAQVRRLLYMAAVCAMRCNPVIKAFYLRLLARGKPAKVALTACMRKLLIIMNAMLKHHSPWCPSVDFQHSC

SEQ ID NO: 243541 - protein, 342 aa, unidentified
MRVSYVGVDLGSSKFHQVALNHSGTATLNREFTTSEANLVKAFSDMRGEIHVHLEAGELAPWASEIIRPLVTRVVCSHPQTNAWIARDRDKCDRIDAYKLASLLRLNEFKEVQYPREPLRRDFKTLVQHYDELTQQQARWKTKLKARLRMQGIIVRGEEVFSARGRKAVLEQVKSPVVRTALKQLYAVLDQSVASQTEAQMLMLRAAQALPEIRIMRTAPGVGPIGACRFSAYIHTPQRFSSTRKLWKYCRLSVSHRSSNGKPLRRPRLDRMGCGRLKDVSRKTFEAALRRRDNNGFKRAYNRALETTHDATHARLTVQRKIVSTLRAMWINQTPYCDELMR

SEQ ID NO: 243542 - protein, 356 aa, unidentified
MMNGTKYVAMDVHTASISVAVLNFDGKLIMESVIEAKRSTIVQFIQGLRGELLLTFEDGTWSAWLSALLTPYVTKVLVCDPRRNALLKKGSANDRIDARKLAELLRGNLLRSVYHGQNGLRTLKELARAYLTINKDLVRVMSRIKAVYRSWGIPCAGQSVYHPRHRDEWLGKITQASVRRRAELSYEQLDALVSLRKQARQELLAESKKHPAWKLLRSIPALGPIRAAVLMAIVQTPHRFRTNRMFWKYSGFGIVTQTSADHQVVDGQLQRSKKPPFVRGLDPAHNHQLKEVFKSAAIQASTMKGPFQEFYEALIAKGMRPEIARLTLARKIATISWIVWKKGVAFDAKYLKPQTA

SEQ ID NO: 243543 - protein, 355 aa, unidentified
MNAIKYIGMDVHVATISIAVLDANGKLIMEVTIATQAGALLDFIRGLSGTLNVTFEEGTSAHWLYTVLDPHVAKVVVCDPRQNPRRLGEKKSDRLDARKLAEWLRLGTLKPVYHGHSLGPALKELARSYRTLVSDTARVMNRLKALYRARGIGCAGTRVYSPRFRDQWLEQLREPGARARAERLYRQLDLLLPLRQEARAAMVAESRKHPAHKILCSIPALGPVRVALLLALLQTPYRFRGKRQLWTYAGLALVTRTSADYQVVGGQVTRARKPALVLGLNANHNHTLKGLFKDAAASTLAHPGPFKDFYTTRVAQGMKPELARLTLARKIAAIVLTLWKKGECFNVEHVKAQAA

SEQ ID NO: 243544 - protein, 310 aa, unidentified
MVERIAGIDVAKHKIDVHVEPDGEFQTHPNGSFQRLIRRFKRDAVALVVLEATGGYERALVQALHQAQIPVAVVNPRHVRNFARASGQLAKTDRIDARTLARFGQAMQPAPTPPDSPTTRRIKELVARRRQLVDMRVAESNHAEHADDPFIRRSIARIIRAIDREIKATNLAIRQAIDADQAWRRRAQVTVSTPGLGQTSASALLANLPELGRLSRRKVAALVGVAPINRDSGTLRGKRMTGGGRAAVRTALFMPTLVAIRHNPAIRSFYQRLLEAGKPKMTAVVACMRKLLTILNAMLRDDKEWNPECT

SEQ ID NO: 243545 - protein, 363 aa, unidentified
MDNYIFVGCDSHEKTLVNKIALNREAAETKRFAADGEGRQKLIGYLKQKSKHAGGAKVIVVYEASWRGFNFCDELKMAGLECHVLAPTRIERSTKQKRHKNDDGDADQLLDIVRSHYLAGTTIPAVGVPDKQTRDDREPVRARQDLTEKRTKVKTQVQMLLKRHGLEKPEGIGKNWTKRYGQWLLGLSQTRAVATTGMRTALRSLLRQLDFLEKEIQQLDQALEDLAETPRRKPIVEELMKEKGVGVIMASKYTTDIGDFTRFRRGRQVGAFFGLTPSSHESGEHADRKGHITREGSPSLRKILCQAAWSRVQHDKHEREFYLRLVAKNPKKKKIALVACMRRLAVRLWHVGLQAQLKMEAAG

SEQ ID NO: 243546 - protein, 347 aa, unidentified
MQFTATLPVIGMDIAKHVFQLHVVDAQTGEVTRHKLRRDRVTSFFANRQKSLVAMEACGGAHHWARTLQTLGHEVKLLPAKHVRAFVLRDKTDARDAQAIWVAAQQPHIKAVPVKNEQQQACLTLHRMRAQLMKVRIMQTNALRGLLYEFGIVLPEGHRALLKLVQDALAKAQEQRLPEVVVVSIQDQLRRIDSLQCDIDQLDKRLASMVKQNQHMLALQAIPGIGPLTATALVSTATDLSSFESGRQFAAWLGLTPRQTGTGGKTRQLGISKRGDPYVRTMLMHGARAVIARSQRSGWIERLLLRRPYSVVVAALANKLARTVWAVLVKGKAFDQVRWNPVDLAAA

SEQ ID NO: 243547 - protein, 343 aa, unidentified
MQRDLGMVVGVDTHKDSHSAALVDAMGALVAATDVGANRKGYRRLLEWARCRGPQRTWVVEGTGSYGAGLASFLAAAEEVVFEGDRPQRRKPGAAGKSDQLDAVKVAREALAREHHAVPRQRGNREAIRVLLSTREGAVSAHRQALNQLYALVVSAPDPIRERLIRLRGEHLVTACLRLRSAAGDIETRVTNRVLRQVAGRIRTLQAEAADHLALLEQLVAETAPSLLAQPGVGAITAAQLLVSWSHAGRIRNENAFAAMAGVAPVPASSGKVVRHRLNRQGDRRLNRALHVVAICRSSFHAPTKLYIARRTAEGKSTREIRRCLKRYLARRFFRLLQRLDNL

SEQ ID NO: 243548 - protein, 416 aa, unidentified
MEVLHELCAGLDVHKKTVVACVRLACEGKVTTEVRTFTTSTKGLLTLSDWLSENGCTHVAMEATGVYWKPVWHVLSDGEFELLLANAAHVKNVPGRKTDVKDAAWLAELLAHGLIRASFVPDGQTQELRTLLRTRKQLVRERSRHTQRIHKTLEDANVKIDAELSDMLGKSGRAMLDAMVAGETDPARLAALAHRSVKSSQDQLREALNGRVTQHHRFLLQIHLGQIDGLDAAIDRIDQQVEANLAPFRIAVDLVTTAPGVDRLSAQGILAEIGLDMSRFPSDAHLLSWAGWCPRNDESAGKRRSRRLRKGAPWLKTILIQCAWAARRKKNSYLQAQFLRLSSRRGPQKAICAVAASLLKAIYHMLKNATPYQDLGADHFRRRSKTTQTQLLVNRLKNLGYAVDIKPLPTPSELVS

SEQ ID NO: 243549 - protein, 319 aa, unidentified
MTEQRAAVYVGIDVSKGRLDVCEGEEGEAWAVGNDAKGIARLVERMQAVQPELIVLESTGGLEWAAMTELYSAGLAVALVNPGRVKEFAKSIGLLAKTDKLDAHLLARFAEAVKPKATRLPDEQEQHLMGLVSRRRQLLEMLVAEQNRLNSARLSSRANLEEHIAWLQKAITDLDKEIQKYVRQSELWKDKAERMQSVPGVGPVTSSTLLAELPELGQLDRKQIAALVGVAPFNNDSGPRRGKRRVKGGRSSVRQVLYMATLSGTTHNPILRAFYQQMIRRGKEKKVALTACMRKLLTFLNAMIRDSKSWSPVFKPVLA

SEQ ID NO: 243550 - protein, 352 aa, unidentified
MTGIKYVAFDVHKSTISVAALNLEGKLMTQAVIQTEASAIRDFLRGISGSVHLVFEEGCNAQWLFELARPLVAELIVCNAKHSSSVGNKSDRLDALKLAQYLRAGLLKAVFHGSLQTQTLKQLAHNYDSITSDTTRCMNRVKSLYRGRAIACSGMDVYYSRNRKDWLEKLTEEGIRLRAEFLYKQLDHLRPLRRDAKKAMLKEARRHTAFKRLCSIHGLGPIRVAQIIASVGSPNRFRTKRQFWAYCGFAVVTRSSADYEFRGSRLERRPKSTQTRGLNREFNHRLKQVFKGAALEALKEESIREIYTRLQSKGVRPEMARLTIARKLAAVTLHVWKSGEEFDEKKLTKIVA

SEQ ID NO: 243551 - protein, 376 aa, unidentified
MEHNSEAFIGIDTSKLKNAIAIAESGRDGEVRYLGEIETTDAATRKLVKKLAAKYRKVTFCYEAGPTGYGLYRLITSLGHECSVVAPSLVPKKPGDHVKTNRRDAVGLAKNLRAGELTAVWVPDTRHEAMRDLSRAREAAVDDLKSKRQQISSLLLWLGLHYPGKKTWGKSHRRWLASLKLDQREQRIVIEELFGAERQAQERVDRLASAIIDAVPEWSLAKIVTALLAVRGIDLVAAVTIMAELGDLSRFASPRELMAFLGLVPSESSTGDSVKRGGITKAGNRRARRILVESAWSYRYPPRISRDKLAKVAAAPEPVRAIAWKAQTRLSSRYRALIKRGKRPTIVATAIARELCGFIWAIQRAVTAPAGRQLVS

SEQ ID NO: 243552 - protein, 413 aa, unidentified
MKRILERCAGLDVHKKELTACRLVPGPHETMVSEVVTFGTMTKELLALVDWLKQGGCTHVAMESTGVYWKPVFNLLEGEFEVLLINPREVKQVPGRKTDTGDAEWLAGLLQCGLLKGSFIPPAPQRQLRDLTRYRTTLVQERARILNRLQKVLEDANIKLASVVSDIDGVSARMMLQTILAGETDVKFLAELAKGRLREKRAELEQALTGLMKEHHRFLIAEHLSHMDYLEEAIARVSAEIEERLRLFQLEIELLDSSPGINLRIAEIILAEIGPDPFPTFEDAQHLASWAGMCPGNQQSAGKRLSGKTRKGCAALKSALVEAAHGAAKTKNTYLSAQYHSLVRRIGKKKALVAVGHSILIAVYHILTRKEPYHELGPRYLDELRRPQRIRRHVRSLEQFGFEVVLKPLPAAA

SEQ ID NO: 243553 - protein, 388 aa, unidentified
MSRPNDLSRSLTPFVQGSTLVAVIELSLSGWLVAGVVPGVARQPLKKLDPDEAQLLRLLQRWQEEAVRSGCRVERVVVAYEAGRDGFWLARWLRAHGIEAHVIHSTSVAVSREHRRAKTDRLDTAMLLRVFMGWLRGEPGHCGMVAVPTIGEEDAKRPSRERENLVGERTRIVNRMKAALIRLGIRGFKPELRRAPKKLDGLRTPEGLPIPPNTLDEIRRDLARLAMVREQIDGIEQARLARIEQAPETGPNAMVRLLASVVGVGIETADMLVQEVLSRNLRDRRAVARYAGLTGSPDESGSKRREKGLAKSGNARVRRGLIQLAWRFLLFQKDSALAQWYRARTGGASGARKTTMVVALARKLLIALWRMVTTGEIPDGVRLRPVAA

SEQ ID NO: 243554 - protein, 346 aa, unidentified
MTTKCMAGIDLHSNNLFCAIVAMDGKRVFEKKLPCQLESVLAALKPFKKRLEKIAVESTYNWYWLVDGLQDHGYPVVLANPAAMEQYDGLKHADDKSDGFFLAEMLRLNILPTGHICDRAVRPVRDLLRRRMGLVQKRTSLILSLKSLHTRMTGRDLGTGAIKALEPTDAEKLFEHPADQLITRLDLALVEQLGQSIQAIEGAILATVKKLPDYQVLQTMPGVGKILGMTITLETVDPKRFASPGDYASYCRCVDSRRLSNGKKKGENNGKCGNKYLAWAFVEAANFAQRHDTACRKFYDRKKAQVNGIVATKALACKLAKAAWHMMSRNTDYDGGRMFPKVKMNK

SEQ ID NO: 243555 - protein, 403 aa, unidentified
MNKLKRVCGLDVHKDIIFACVKKEKYQSEVKQFSTTTQGLSELSHWIQGEQVKKVAMESTGIYWMPVWRALESDFKLLLVNPYFIKQMPGRKSDVQDAQWIATLLDKELLKGSVVPDKTIRVLRDYMRRYAQLQGQMTRCLQQIEKQLSRCNIKIASLSSTIGSKTVIDIVASICKGQYQPEQLLKLVHGRIRNKHGEKVKQALEGIIDEHDIFLLRQIYADYIHIHDQCEALVGQAQKVSDEYYQQEIALLQTIPGIKKLSAIIIFAEIGGKINLFETAQNLTGWCGLRPKNDESAGKIKSRSITKGNKYLRRILVQTGWAASRTKNCYLKTKFEQLSIRKSSKKALIAIARKQLVIIWNVLSKNESYAEPQIVLSPEQIERKQKYYQGKLETLFKTIEKAG

SEQ ID NO: 243556 - protein, 359 aa, unidentified
MVQSMSLVGLDVHASQTHAAVLDLSTGELRGVKLRMAPGQVVEFLATLPGPVRAVYEAGPTGFGLARSAVARGIDVRVVAAGKVPRASGDRVKTDKRDAERLARLLAAGELRFAFIPSVADEHFRDVIRAIEDCRGDLMRARHRLSKMLLRREIRWTGPGSTWTVTHMRWLRSLRFDDPCSQAVFVDYLSGVEMLVARRTALIVALERVIPDSRHAATIAALRCFRGIDTLSAAGLCAEVGDWQRFRPKQLSGFLGIVPSEHTSDAKRRQGSITKAGSGHARRLLVEAAHHYRHRPAVGDGLARRQHGRTPGRSRSPGARNADCTSAGRSWPASAASPPASSRSPAPASSPRSAGRPPP

SEQ ID NO: 243557 - protein, 338 aa, unidentified
MQLYCGIDLHAKNSYLAIIDEQRQRIFKRNVANDRQLILSLLAAYKAELAGIVVESTFNWYWLVDALMEEGYTVHLANPCAIQQYAGLKYIDDKHDAFWLAELLSLGILKEGYIYPRQERPVRDLLRKRGHLMKLRTSLLTSLHNTMANACGRKIPSHHVLGKEDRLSSHLSGNESLALMGQVSKASIDALTLQIKTIEAHAEKQYTIEPAYVGLLSLPGVGKILGLTILLETGPISRFPAVGNYVSYCRKAESTWKSAEKVKGKGNIKNGNRYLSWAFAEAAEHARRFDTASRNFYNRKVHERNGAVAHSALANKLARAAYYIMRDQVPYEEAKLFG

SEQ ID NO: 243558 - protein, 409 aa, unidentified
MLYCGIDWSWEQLTLFIIDDKGNPIKDFVINNDLDGFMYALSTIRHLCKEHDIIFAIETSNQRVIDFLISYDYKVYLINSNSMDKFRRRYKTSGVKSDSFDAFVIANVLRTDTSTLNTITADDQLTQELGMVLRDRESLVELKTRLSNQLRDSLRQYFPQALNLFNDISCIVSLQFLEAFPTHCDAQRATKKQIQSVLRENGYYSEKKLREITRVLRKKQFPPRANSIRAKKEFTLFLVSMIKPLIRQIKAYDEMIESLLEKHPDTELFLSLPGVGNNLAGGMISALGDDRSRFDSAKQIQSLGGTAPITKSSGNYRYTQFRFSCNKTLRKTLHQFAFSSITKSLWAKNYYNKKRSEGKTSSHAFRCLANAWVRVIFAVWKNKTVYDENRHLASVSRHMMSQNYVLALT

SEQ ID NO: 243559 - protein, 409 aa, unidentified
MRYYLGVDWADQTHAVWVVDESGTKIAARTVTHTAEGLDAWGRELDEWRAQGSELWAAIERPDGRVVDLLLDHGVVVYPVNPKALDRARDRFRQSGAKSDPFDARVLADFLRTDHTHLRALQPSSEAAQELKLLTEDCQRHIRQQTRLVNQLTATLKAYYPRALEVAELTSALAREFLLAYPTPAALTALTERQWPRWARAHRLTEARTGELWAVLRRPQLPVPAHVVRAKARLMRALLEQLMPVMAAVAQYRKAIDDFFARMPAAQWARTLPIGKHGITAPTLWARLGDAPGRWESFRHLQAHAGTVPVTKRSGKQQRVVLFRFACDKALRYVVDQVAFLSLLSSAWARAYYDQQRTRGHSHRQALRALGAKWLKIIFVMWERHVPYDEQYHLATMTRQQLRRQNQIA

SEQ ID NO: 243560 - protein, 409 aa, unidentified
MRRVKGKRSASSIVGCAPKCAEPHAETPEGVLPQTFRGGRPVSETITSFVGLDVHKDSTAIGEAEAGRENPRFIGTVGPDLGQLLKALKSLGKPETMLVVYEAGPCGYGLARQLRSRGYSCEVVAAGKIARRPGERIKTDRRDALTLARLARSGDLVKVIVPDEGDEAMRDLSRAREDGVRARLKARQQLKALLLRHGHRYGGKSSWTLAHERYLAAVSFAHPAQDIAFAEYRQAVREGHERVERLTEALRTQAEHWRLKPLVAGLATLRGIDFVAAVTLTAEIGDFGRFAHPTELMGFLGLVPSEYSTGDTRRQGDITKTGNSHARRVLVEAAWNYRFPARLSRVLQIRQEGQPKAVREIAWRAQLRLAHRYRRLSSRKLHPNKICVAIARELAGFLWDIARQVKLAT

SEQ ID NO: 243561 - protein, 408 aa, unidentified
MGRAAEVVAPSSSIRTDGGCPVAQVNDLSRSLTAFDPISTLVVVVEMSKASWLVSGVVPGVERQPLKKLEPDATALLRLIERWRNEAVRAGRPISRIALAYEAGRDGFWLARWLIARGIEAHVIHSASVAVSRERKRAKTDRLDAAMLMRVFLGWLRGERGHCGMVAIPTIEEEDARRPSRERESLVDERSRITNRMKSALARLGIRGFKPHLRKAPERLAGLRTAEGTGLPANIIEEFRRDMARLALVREQISSIEKTRAERLERAPDTGPHAMVRLLARVIGIGIETADMLVREILSRKLRDRRAVARYAGLTGSPDESGLKRREKGLAKAGNARVRRGLIQLAWRFLMFQKDSALAQWYRTRTEGPSGARKTTMIVALARKLLIALWRLVTTGEVPDGVELRPAA

SEQ ID NO: 243562 - protein, 388 aa, unidentified
MDVLYQSCAGIDVHQATVVVCILHGPLTSTRPKREMAQFDTTTKGLKACHDFLTQFHVEAVGMESTGVYWRPVWHELCDDFELILAQPAHMKAIPGQKTDKKDAHWIAQLTRIGLLPRSFVPDETIQELRELTRQRKHYVESRNRETNRIHKILQSGGIKLTTYIEDIMGASGRNLLQLLIDETPLTPRMIHQSVYTSLKRKVPQLLEALDGYFSAHHRFMLGQSLEIYDFYQKQIDCLEERINGYLNIYERPVEILDSIPGMDLITVSVIIAEIGVDMSQFPTAGHLASWAGLCPGNNESAGKKRSTKIRHGNSYLKRCLCQAVFAAKRQKGSPLAERYYQIQSRRGPQKATIALAHQLLKIAYILLKENLTYQEFVLQKRLLETSQ

SEQ ID NO: 243563 - protein, 316 aa, unidentified
MDIASKSLEARIGQQGAAGSFANDAEGINALGDFCRTHEAELVAMEATGGYEQQAFAQLSGQGLAVAILNPRSVRQFAQSMGSLEKTDRIDAGMIAWYAEVKKSQPVCLAPENQQHLRALVTRLRQLTDVRSAQLNQQRLVTDRKVQTSFKKLLTLLARQIGELEQGIAVLLEKDPLWREFDQAFRTIKGVADRTVARLMAEMPEIGTLSNKTISKLAGVAPLANDSGKHQGQRAVRGGRAAVREILFIVASVVGRHEPGFIAFRERLRAVGKPPKVVRIALAHKLLVRLNAKAREVRQRMATLQPNSVVLLAELG

SEQ ID NO: 243564 - protein, 429 aa, unidentified
MSYRIAGIDVHKRMLAVVVSDVEIESEYQFERRMFSSNPEQLRSLAVWLLEQEVEEVVMESTAQYWKPVWETLERYWKPIREKREGARRRSGTLHLAQAESNRGRRGRKRDFPDAERLVKRLVARELTLSFVPDAEQRLWRTVTRKKYQLRCDRVRLQNQLESLLEEAHIKLSSLVSDLFGLSARRMLKALAEGETDPAALAALADERLRATPEQLCDALGACTELNAVYRRLLKMALEELRLIDEQIGELDKEMASLLSEHQDAVQRLAEVPGLGVDSAQQIIAEVGPTAATFRSEKCLSSWVGACPGDDESAGVNYSRRSPKGNRHMRRLLNQAANAAARNKGSIFEIVYRRSVPRLGHNQAIGAIAHRQCRLIWLILHQGVRYEERGPAVTKRSKQLRTWKMLRQLRSLGYRIEPPNPQPSQAQAK

SEQ ID NO: 243565 - protein, 475 aa, unidentified
MECAFLNSISQMLTPAYYKEDGEKRHGKFNLLKLNWQINFLQKGEITMSAKDYNSQVVKRQRIRSTTLVIGVDVGNAFNAVGFMNKEGKVLGSYVRLYNNREGFEQFVKMTEALKTKYRLKDVLIGMEPTGHYWRKLAYFARERGYEVRFIRTTALKHHREIDESSSAKSDQRDALTIANITREGKYIDTVIEDGTMRQLRTLAKTRERLLRYSVSAKNALHAALDDYFPELHEIFCSMGTRSLWAILERCPFPDDVVLLKISFLRDLIAKSSRKKTGADQKARALYQAAQKSIGLKRVGDADRFRVKICLEEVKRTVLMLKDIDRQMKKVLKEMPSAPYLLSIPGVGPLSAAVFLGELGNPAYFHNARQIVKYAGYDPQESDSGSWVSRKFISKKGRWLMRKYLFFMSMRVVVLSKYFRDYYQRKLETKNRVGQQPKRKEILCAVAIKLIKVIFALLRDKRKFDDGVRVIAAHA

SEQ ID NO: 243566 - protein, 340 aa, unidentified
MSRLNIIGIDLAKTNFYLFSLSPEGKPGGRIKLSREKLIGWFTTQSRMIVAMEACGASHHWAREIQKTGHDVVMLPAQHVRAYQRRQKNDYNDAQAIAEACWHGTIRPVPVKTLSQQDEQTFLKMRRLVSEERTQLINHIRGLMAKYGIVLRKGATELRRKLPELLEDAENGFTPQMRELLQRQYQRLAALDDELIWYDNRQRKNAAGDSVCQRLLSIPGFGPLVSLAVKSWMGDGKQFKRGRDASAALGLVPRQFSTGGQQVLLGITKCGNSYVRSMLIHGARAVLFRSAGKTDQLSSWVNLVREKRGFNRAVVALANKLIRIVWVIITRNEVYRVSVA

SEQ ID NO: 243567 - protein, 424 aa, unidentified
MAFKIFRKNCCGLDVHKTWIYACMGITDTNGRTEYKQARFSSFTKGLQKLADWLAKYDCNDVCMESTVKYWIPIFNYLENDIDVCLTHPKYVKAIKGKKTDKKDSKWIADLYKFDLVRYSFIPPKDFRQLRELSRYRFKLVCMKSSEKNRIQNCMTISNVGIASVLSDPFGKTATEIISYLLEHTADSMDEKAVRKLIKKGAKSKSDEIIEAIKGYTIETDQAKKLELARGHLEYLDDMITQTEVELYVRIKPYYEFVEFVSTMPGMTELSSTIVLAETGVDMDIFDDAKHLCSWCGLSPANNESAGKKKSVRIAKAGDYLKPMMVQCALAAIKSKKQPYFAIKYGRIKKRRGHKKAIIAIARMMMVCIYHMVSEKKPFTPTDYEELMDPQNHVESVVLNENNVFAYLESLGYDSSKLVKRNDN

SEQ ID NO: 243568 - protein, 395 aa, unidentified
MDLPVYYELETNNGNRDYRIQIGGHYMNYNTVYVGMDVHKESFTLCSCKYEDEKASHYQRTPASYKNVLRYLAFLRTIYGEYTRFVCGYEAGCLGYSLYHQLENFNVECVILAPTTMLEQRSKRRIKTDKRDAEIIARSLAQHNYSPVHIPTETDNQTKEFIRMRDDHKAELKKIKQQILSFCLRQGYQYDGSGNWTAKHVKWLRSLKPAGLYKEILDEYLLTYTILTDKLDQRIEELASKEEYKESVSKLTCFLGIKTHTALSVIVEVGDFQRFVSARKFAGYLGLVPGQHSSGDDRNGLGITKAGNTHVRRLLVESAQSYTRGKIGYKSRVLRSRQAGNSPQVINYADRANERLRRRYYKMVLKDGKKYNIAKTAIARELACFIWGMMTDNIY

SEQ ID NO: 243569 - protein, 426 aa, unidentified
MNDNNTPEFAALVGLDWGDQSHAIALEPAAGPTETSTLTHSAESLHQWLDQLEQRFGARQVAVAIETDQGAVVYALMERPWVTIYPVHPATSTRHRTMFRPSGATDDLSDALVLLSLLQHHRERLRPLRPDDELTRTVAGLVQARRKAVDRRTLLSNQLQSTLKDYFPQALALVGENLAAPQALDFLDKWPRLIDVQAAKTTTVKNFYHRHNVRRAELIQSRLDLIGSARRLTGDPAVVEVSVRIVRLLVAELRVLVEHIAEFDDAIAQAFAQHPEKSFFRQLPGAGAVLAPRLLTAFGTARDLYPDSPSMQRYFGVAPVTEKSGRQAWVHWRWNAPKFIRQTLVEWAGQTVVYCPWAKAYYQQQRAKRTGHHAILRALAFKWLRILCRCWQKRQAYDQEKYLKQLEKRRSPIAARARQLAREMAA

SEQ ID NO: 243570 - protein, 372 aa, unidentified
MGHHTEVFVGIDTSKSRNAIAIADGGRGGEVRYLGEFPATEAAIRKLVAKLAAKCCQLTFCYEAGPTGYGLYRLLKSLGHDCLVVAPSLVPKKAGDRVKTNRRDAVSLAKLLRADELTAVWVPDERHEAMRDLSRARQAVKKDLQSKRQQISSLMLRLGRIYPGKTTWGPAHMRWLMSQKLEHREQRIVFEELLEGIRQESERMERLEDAIREVVPEWSLVEVVSALQAVRGIDLIAAVGVLAEIGDLSRFQNPRELMGYLGLVPTENSTGDQVKRGGITKAGNGRARRILVEAAWSYRYPPRVSRDKQPKVEAAPRVAREIAWKAQTRLCGRFRSLERKGKRRTVIVTAIARELSAFIWAINRELMPPRQA

SEQ ID NO: 243571 - protein, 352 aa, unidentified
MEQFIGCDAHKKFSVFVAVNEKGQAGEALRVAHDRQLYREFLARLPAHSTIAVEASGSYSWLVDEMERSGHRPKLCNPLEAKRRMGLTNKTDTLDARGLAILLRNGTLPEVWIPPSELRDQRELLRLRIFLVRLRTRVKNRIHGTLSRHNVQVPGADLFGVAARLELGTRLPELPEHSREAVEQELATLDFLEIQIESAEQRLEAIMKVSVEADLLKTLPCVGKILSMVLMLEIGRIDRFPTAAHLASYAGLVPRVRSSGGHTRMGQVCGNVNRNLKWAFVEIGNLVVINQRRLGGAHVVRLYQRIKRAKNHQKAVVAVARHLAEAAWWVLTKQEVYREPQNSRLALSSTHG

SEQ ID NO: 243572 - protein, 324 aa, unidentified
MSTYHFVGVDIAKDEFVASQMVKNKSKQRSFDNSLSGFKAFLGWIQKTAEQPWACMEATGHYGEALAEFLHQKNMHVSVVNPMQIKTFARMMLKRNKNDFIDAQTIREYAEKMKPRFFQPRPPKQKEIRELIQLLDTLKEQSAQLKNKAHAAQHPVAKKEIRMAINAVENRVTRLTQKIKEAASEEPDFKRCVALLLSVKGIGELSAYRLLALLPDIRLFQSPKQLAAFAGVSPQQRESGAWKGKTTLSKCGNASLRKALYMPALSAKRYNITLQPWVNGLQKRGLTPKAIVGAVMRKLIHIIFGILKNNQPFNHELCLNQQKG

SEQ ID NO: 243573 - protein, 310 aa, unidentified
MDAVHVGIDVSKDWLDVHVLPSGEAFRVDNDAGGFDRLKARLCGLKPERVAFEATGGLETPGVAELSAAGLAVVVINPAQVRSFAQALGKRAKTDPIDAGVIAAFAAAMQPELRPLPDSATRLLGDLVGRRRQIMTMIVAEQNRLRSATAKQTQKSIKRLLAALRRELESIGADMDGHIRKSPLWMVRQDLLTSMPGVGRTVARTLLAELPELGSLDRRQIAALAGLAPYTRQSGQWRGRSFIQGGRASVRAALFMAGLVAIRHNPTLKAFRDRLIAAGKKKIVAIVATMRKLLTILNAMIRDQKPWSQT

SEQ ID NO: 243574 - protein, 343 aa, unidentified
MQTVTTIGLDIAKSVFQVHGVDAAGQVVVRRQLKRRYVLAFFEKLPPCLIGIEACASSHHWSRELQALGHKVRLMPPAYVRPYVKRQKNDAADAEAICEAVTRANMRFVETKTPEQQSCLMLHRTRHLFIRQQTAVINAIRAHLAEFGIVAPVGRNGVEELLGVVADASDKRLPEIARACLVALGAQLRMLKAQILEFDRMINAWHRSNETSKRLDEIPGVGPALATALVASVADPRAFRSGRDFSAWIGLVPKQHSSGGKDKLGGISKQGDRYLRSLFTAGALAVIRYAKIHGAKHRPWLTALLARRPTKVAAVALANKIARMAWAMMARGERYKEPVALAA

SEQ ID NO: 243575 - protein, 435 aa, unidentified
MMIQSMSSSLNMKGGYAMKVEYPICCGVDVHKTFLVATIITTQGFTPHYSKRRFSTFNNSILQLKQWLIDNNCFDLCMESTGKYYIPVLNLLEDLIHVTVANPKWVRAIKGNKDDVKDSKWIGDLFRLGLVPGSYIPDKPIRILREYTRYRSKLVSCKSSEKNRFQNAFTVCNVALDAVVSDMFGKSASSITDYLISSDSFDPVHCTSLLKGKLKKEADTVVESIEGYQMTKEQKERMVMVRSHLDFIHQSLEKIDEKLDKMVAPCENAITLYCTIPGVARASAITIISEVGMSMSQFANSKRLCCWAGLTPSNNESAGKKKSVRITRAGVYLKPALVQVAHAAVKSNISPYYKLKYESISKRRGKKRAIIAIARMILTAIYNMSVTGEAWNPSDLYKIDMPREMLEKQKEKAIKQAIKLLTAEGIIKPSNITVA

SEQ ID NO: 243576 - protein, 367 aa, unidentified
MIRKEYYIGMDVHKEFVQMAVFEGKGDDPIYERRLENDTELLVKEAGRFARRGKTEAAYEAGCLGYVIYRAMEKAKIPCYVLPADKVAKKRDNPRIKTDKRDARLIGRELRSGSIRPISVPDSADEAARDLLRCREDVNGDLRRVKQRLLKFLLRHGHKFTEGKNHWTLIHWKWMDGIVFTHEHERAVYEEYRSQIRSLEERLTRLEKQVTETAESPRYKTGVNKLRAFKGIDYIIALSVLCEIGDFRRFANAKALMSYLGFVPSENSSGGKRKQGGITKAGNGHLRRLLVEGAWHYTKNARAGKRLEQRRQNCPANIIEIADRALHRLHKKYVRLVFGGKHKNVAVTAVARELAGFVWAVQVSNAA

SEQ ID NO: 243577 - protein, 412 aa, unidentified
MDVVYERCCGLDIHKKTVVACRIVPGPAGKPTKEIRTFGTMTEDLLALSDWLASEGVTHVAMESTGVYWKPIYNLLEGSFELLLANARHIKAVPGRKTDVRDCEWIADLLRHGLLKPSFVPDRRERELRELTRYRSSLVRERTAEVNRLQKTLEGANLKLAAVASDLMGASGREMLAALVGGSTDATALAQLARGKLRQKLPDLGRALAGRCGAHQRFLLARQLAHIDFLDEAIEQVSAEVRERVRPFEAVVQRLDTIPGVGRWTAEVILAEIGTDMGRFPGAGHLASWAGMCPGNNESAGKRKSSKTRRGSPWLRVALTEAAQAAGRTKGTYLAAQYHRLLARRGKKKATVAVGHTILVIAYHLLTDETGYRDLGGHYFDERDRGLLERRLVRRLEGLGYKVTLARVDPAA

SEQ ID NO: 243578 - protein, 342 aa, unidentified
MEQVAVIGLDLAKSVFQVHGVNAQGEAVLRRRLTRSQLLKLFEKLPPCLVGMEACASAHHWARELAALGHEVKLMPPQYVKPYVKRGKNDAADAEAICEAVTRPTMRFVGAKSPDQQATMMLHRVRKILTRQRTQISNALRAHMAEFGITAAIGRGGLDRLIAVIADQDDARLPDEARACLGVLCTQLEMVKEQILDNDRRILADARRTEAGRRLMKIPGIGPLLASAIVACVPDPSTFGGGRSLSAWIGLTPRQNSSGGKERLGSITKAGNTYLRELLVVGAMAVVRRAKQGSTKRPWVMQLLERKKPKVAAVALANKNARIIWAMLATGEPYREAELAAA

SEQ ID NO: 243579 - protein, 363 aa, unidentified
MSYRTFVGLDVHARSIVGCAVAAGGGVGEVVYRSFGNDPEAVLDWCFTLPGPVKACYEAGPTGYGLVRAFTGVGVEMLVVAPSKLLPQPGARVKTDRRDARHLACLLATGNVTAVRVPTVVEEAARNVFRCREDAQLEFGAATVRLSHFLLRHQITELAGSDWNKVRLEWLAKLDFEDANDQVVFDSYLGAVQSLRRRKLDLERQITQIAGAEPWCGVVDALCCLRGVSTLTAFGLATEIGDWHRLTARSIGPYVGLVPSEHSSGPSHRQGGITKTGNQHVRRLLAEAAWCHKRAYWPSRSPSLQRAWARVDEPVRQRADEANRRLYRQWCKFVDKKKKLVVANTAIARELAGFCHDLAVMVT

SEQ ID NO: 243580 - protein, 410 aa, unidentified
MDSEPLVFVGIDWASTEHQVCLTGKGNPVQRVFPHDAGGIGAMVDWLCKQAESPGQIAAAIETPHGPIVEALMDRGIAVFAINPKQLDRFRDRLSPAGAKDDRRDALVLASSLRTDRHCFRRVDALDPVVVELREWSRMAEELKQERGRLTNRIRQQLWRYYPQVLDLADDPGADWVLALWDKAPEPARTVQLTEKKVARVLAAHRIRRITAAEALAILKRPPLTVAPGTTEAAKAHIATIAERLRLVNRQIKDVSRRIDSLVDQLAEPETEPGQDGEQRDATILRSLPGVGKIVLATLLAEAPQAVNERNYQALRSLTGVAPVTKRSGKSCHVEMRQACFHRLRNAVYHWARVATQQDDLSRCRYAALRARGHSHGRALRTVADRLLGIACVMLKTRTLFDPSKAPAAA

SEQ ID NO: 243581 - protein, 340 aa, unidentified
MNNGLKLLGIDIGKNSFHLIGHDAGGHQVLRKCFNRNRLLQFAAQIEPCTIAMESCGGSHWLARKLASLGHRVKLIAPQHVKPYVTGNKNDFIDAEAICEAASRPRTHYVAAKTVEQQVLSVQHRLRESLVCHRTEAINRVHGFLLEFGIALPATKAAIAKVPELIDNSRSDLPLQLKRIMEHLLEDIRRLDAEIRACDVQIKQQLAQDDAGTRLMTIPGIGPITASALVADLGDASSFKTSRDLSAFLGLVPRQFSTGGRPVLLGISKRGDRRMRTLLVQGSRALMIRIDRREDALGQWVRNLLARKHPNKVACALANKLARIVWAVLRRGGTYNASMI

SEQ ID NO: 243582 - protein, 359 aa, unidentified
METAYDGRQVVGMDLHRRWSVLVRMTEDGRRLGTVRITNSPAELRAQIVRAGKNPKVVLEATYGWYWAADTLAAAGAEVHLAHPLGVKAFTYRRVKNDERDAGDLADLLRMGRLAEAWIAPAGVRELRELTRYRAKLVSLRTSCKDQVHAVLAKLGIPVTCSDIFGKAGSAWLDGLGLPQPYAGKVTSLRQLTGELTAEITMISEVIADLLAADRGYQVIQQLPGIGPVLAAVIIAEIGDVTRFRTAAQLCSWGGLTPRHPESDTKVVRGHVTKQGSRQLRWAVIEAIQQAPADSVTGAVKEAIIARRGKEARNIAKVAAARRLLTLVYYGMRDGEIRCLARPSGDVPPVTQPPPACAA

SEQ ID NO: 243583 - protein, 421 aa, unidentified
MRGIRGKKVKAMKEGTLIATVDIGMTTNTGYCTTVDGRDMKPFKFENTREGFEKFLHMIVASKNKFGCTEVMVGYESTGPYAEPLAQYLMGKPVTMVQVNPLHTKRLKEVNDNSPRKTDEKDPRVIGDVLRLGHALSVVVPEGDAAYLRRLNNARERHVGERTALLNQIQQLVFLIFPEFKKVFNDITIKTPRHILKIYTTPERIRTLDTDALGEEIRKRSWGKFGMREAEALINLARTTVGIKEGVAGIALDIQHILVQLEAVNAFIDEIETEMKKALDRIPYSARILSIKGLGVVTVAGLIGEVGDFSKFRTQSEIMKLAGLDLFEISSGKRKGQKRISKRGRSLLRKILYNAAVGTVRKNGIMCNHYERLIGRGMVRTSALIVVAKKLLRIIHAMLRDDRDYIYNYESPKRVVIQKAA

SEQ ID NO: 243584 - protein, 430 aa, unidentified
MGLIVPTAMHPQQDDQPLPYDWFVGIDWGSKQHQVCVLDRDRRRVGERAVDHDGSSLAQLVAWLWTVSAGQAQRVAVAIEVPRGAIVEGLLERGFHVFAINPKQLDRFRDRHSVSGAKDDRRDAFVLADSVRTDQPSFRRLQLDDPQFLRLRELSRAEETLLEDFRRSANRLRDELQRFYPQMLQLCSAADEPWQWDLLDLAPTPAHAMLLSEEQVQRVLKAHRIRRVTVQEVLKVLQAPALPVAPGVPEAAQAHCGFLLPCLRVLAEQRRGCAQQVQALLTTLAQEPGAAGGPSDVAIVQSLPGVGRKITAWLFAEAAQPLAGRDYQVLRTHSGVAPVTRQSGKRRQVVMRRGCNPRLRQALHHMARVAMQRDTHFSHVYAALRAKGQRHGQALRNIGDRLLRILMAMLRDRTCYDASRIRREPVVQMG

SEQ ID NO: 243585 - protein, 341 aa, unidentified
MDKELYFGVDVSKKTLDLAYYDGETIDWKNAHIQVSNDDAGFKKIGSWVAKVGKDFDTLLFSMEYTGLYNQNFRLWLESKEYIYGMVEPRKMHHFEPDLDDDQRSLDRIKTDELDAFRIAIYCEQNHKKILRNPSKLPSPVYFKLKRLLAERKQNTKQSVLYKQQLHDICAYDTDLSVERKKLLLKNMKENQKAIDKEIDSYMNEDASISKNFNLLTSIPGIGRIIALETIVLTENFTAINNPRKYACYIGIAPFKKESGTSVRKKTGVSKKGFSEAKADLSIAVLSAIRNNPSIRDYWIRKRKEKCGGIVLNAIKFKLVLRMFAVIKRGTPYVETDAYKN

SEQ ID NO: 243586 - protein, 404 aa, unidentified
MLNIMTDPNNVFIGGIDSHKETICVAIITTLGELVTTQVFPTTNTGYQQALKWLTSHGKIQTVGVEGTSSYGSGITHTLTQAGISVIEVNRTRPAERRRQGKTDPLDAYRAARSVLSGEATTPPKNQSIEPLRALNIARKTAVQTQQKILRQIEAILISAPPHLRDKYRNLGKTKLIKTLANTRPDQHQNPDEANILYALWTLTHRHQNLDQEINALTQRLEALTNKINPALLTIKGIGPIIATQIIITVGDNPHRLRSSASLAALCGVAPVPVSSGKHSRHRLSRGGDRAANAALYQIVKVRLSCDPRTKTYWKEHREKRWTPAMIFRALKRAIIKEIYRALTQKCEIPDYSDLRPTRQAKNITITTAAQHLKVHPARIGELERGKRKNPELAKQYRQWLKTA

SEQ ID NO: 243587 - protein, 370 aa, unidentified
MLDTTTFVGLDVHARSIKAVSLDVMTGEVRAATFGYDAGAVAEWVRSVDPRARCVYESGVTGFDLQKRLSGLGVDCVVGAVSKMIKPSADRRRKNDRNDAEFLARMLSVGNVVEVWVPDDECEAARDLTRALEDARDDLSRSKQRLSKFLLRHGLAFDERTPTGRRKGNWTRAHWSWIESIGFAEGADNDVLAYYVDAVRRAAEEKARLEGLVEAEARKPRWRRRVDSLRCLKGVDTASAADLVFEAGEFSRFGNARSFAAWVGLTPSEHSSGESDRRGAITKAGNKHLRKTLVEAAWHYLTCSGRPKDLAKGQAPDRGARRHAAKGVRRLVERREALLARGVHGNKANVATARELACWVWAVGLMAEEA

SEQ ID NO: 243588 - protein, 318 aa, unidentified
MEKENVGVDISKDALDVASYTGNKQWRFSNDDRGISQLIGVLKEMDIALVVMEATGGYEVPLAYALSKAAIPFAVVNPRETRDFAKATKKLAKTDTIDARVLAHFAAAIKPEPRQLSDEETRELEAIIARRRQVVEMLTAEKNRLHLARQPVKEAISAHIDYLGKELAGIDSNLNGRIKESPVRREKYDLLQSVPGVGPNLAATIVIELPELGNLNKKQIAALVGVAPLNRDSGSKRGKRVIWGGRPQVRSALYMAALVATRFNPVIKEFYVRLCALGKAKKIALVACMHKLLTIMNAMLKHHVPWRLNEPVLVSLTS

SEQ ID NO: 243589 - protein, 306 aa, unidentified
MTLASGFVGIDIGKHFLDVFADRPYRIANTDDAIATWVAGLAAPKLVLFEATGRYDGRLRGALSAAQIDYARVNPAQARAFARATGQLAKTDKVDAQMLARMACVLRPDSRPAPNAGRQKLGELTARRDQLVQMRRAELNRAQEATDADAMADIAELIELLSCRIATFELKIARLIEATPELEQAHRLLRSIPGIGPVTATTLMALLPEAGQRSPKTIAALAGLAPLNNDSGNFRGKRTIRGGRPRVRTALYMAALSTIRSSGPLAARFKAMVSAGKPKKLVLIAIARKLLVIANAVLRDQTPFRT

SEQ ID NO: 243590 - protein, 457 aa, unidentified
MDILYTHVAGIDVHKKQVTVTVRTPDPRRPVRRERTRTFRTFYADLLAMASWLAECGVTRAAMESTGPYWWPVYAALREAGGPALSIDVVNAAHVKAVPGRKTDVKDSQWLARLLEVGLLRGSFLPPDDIREIRDLTRYQTKLTEERSREKQRLLKVLESAGIKLDVVASDTFGVSGRAMLDALVAGERDPRVLAGLARGVLRNKTDDLRLALAGRFTTHHGQMIGFHLERLDHLDQMIDQVKQKIGHAGVAGTSRRRAIGPAGLVAPFTAQIQLLSSIPGISDRVATVIISEIGVDMSRFPSAKHLAAWCGLAPGNNESAGRRRRARHRKGNTHVQSILIEAALAASRTRTRLGARFHRLHRRFGGRANNTAGKKAAFAVAHTLIKVIWAVLTSGQPYTDLGHDFYTHRVNRESHTRRLIAQLEAISGKKIILTDPDDEPPRPHDGRGGHDSEAAT

SEQ ID NO: 243591 - protein, 348 aa, unidentified
MELFIGLDVSLASTAVCVLNSHGKEVKEATVASEPEALVEFMRGLSGKVAAVGLEAGPLSQWLHRHLTEAGFETVLMETRQVKGALKAMPIKTDRRDAAGIARLLQMGWFRPVHCKSVSAQEMRAVLTARKSIQQACVNLELSIRGILRNFGLKIGKVSRGNFEFRVGELVEDNPMLKAAADPILRVRAVLRSELAALDKLTRDHAKADSICQLMMTMPGVGAVVALTVKAAIDDPERFRSSKDVGPWVGLTPRRAQSGERDIIGQITRAGDTSLRTALVQAATIMLNRGRPNWLTAWALRVAQRRGKKRATVGLARRIGVVLHRMWLDSTEFRFTRKPDMPADVALA

SEQ ID NO: 243592 - protein, 354 aa, unidentified
MEKRKKLDKDETVFIGIDLHKRTWHVTMRTFDIELFSGSIEGVWDKLESLLKRYPDNKTIAVYEAGYFGFWLHDKLTDYGVSCKITSPSLIPIEYGNKVKTDRRDSRKLAHFLAKGLLKNIYIPTLQERYHRQVTRRRRQLINDRVRVQNRIKAELQLNGITLPEPTGKWTKIYFTNLSKIKFPDRWMQESFERFLEQYIFLCDQITRQTQLLKELSEKKSYKKRVEILRSIPGVGIIAAMEILLELQDMKRFCRADQLAAYVGLTPSQYSSADKIRMGRITCIGKNSVRAILVQAAWCLIRKDGVMRERYDKIKTRAGGKRAIVAIARQLLIRMRRILLDGTSYVPGVIASTG

SEQ ID NO: 243593 - protein, 411 aa, unidentified
MLEVKVERCAGIDVGKKFLAVCVLIGRGNEKPVAEVRRFGTNVKELERLRAWLMESGCTEAVMESTGSYWKPVFNVLESHLKIILANPEQVKALRGKKTDPNDSRWLASLLRHGLVQGSFIPPRDIRELRDLTRRRRRLVGDGAAERNRVQKVLEDANVKLGNVLSDVFGTSGQAMLEALLENQRSAREIAELGHWSLTPKIPQIVEALEGHRMSDHHRFLIRQSLRHMRYIEEMIEELDKEIAVRLKPYQQQVALACTVPGIKPNAAASILAETGMDMSPDGPFPDCHHLASWAAICPGNDESAGKRRGGKTRQGNRWLKATLTQTAWAGAASKSSLFQARYHRLKLRRGGQRAVIAIAHAQLRAIYWALRNGTPYPEQIQRLQQDRREAQIRHHLQRLTTLGYEPNKLG

SEQ ID NO: 243594 - protein, 421 aa, unidentified
MSEDNLSQYSAYIGLDWADTKHDVCVQSAKSGEREFSVVKHNPVALDEWVKDLRKRFGGMIAVAVELSKGPIVSVLQRYDFVVIFPINPSTLAKYREAFQPSGAKDDPTDAELALDLLVRHPHRFKPLQPQGAEIRTLATLVEHRRQQVNDKIRVTNRLRATFKEYYPQILEWFDHIDTPLFCAFFRRWPTLLQVKRARAATLRKFFHEQHMYREAVIERRITAIKSSLPLTEDEAIIVPFRLNAEVLVAQLELALEAVDRFDKEIKMVASKHPDYELFKSFPGAGSSLAPRLLVAFGEQRDRFGSAADIQMYAGIAPVTERSGRKHWVHWRWQCPTFLRQTFVEWAAQTINKSYWAGQFYYQQREKGLTYQAACRSLAFKWIRIAYRCWQTGAKYDESKYLKALERRGSPLVAQRSAKIA

SEQ ID NO: 243595 - protein, 513 aa, unidentified
MSKRQNPPASGSQKKKAPQKPRSERSSKRKSSNAAKGSKRRLEKPGQQWEIKHPHAAGIDIGSRTHFVAVGQEKADVRAFDSTTPGLRKMIQWLKERGVEHAAMESTGNYWMPVFEIIADEGLGVVLVDAHQTRHVAGRKSDQSDAQWIQQLHTYGLLSAAFRPAEEICRLRTLVRHRKSLVEESSMATLHMHKMLDEMNLHLHHTLSDLTGVSGLAILEAILRGERDPAQLAGLVDPRVKTSRAQIEAALTGNYREQSLFVLGQALESYRHKQGQLAECDRYIEEWLGHLSRQAASKRTEKADAASEVGAIDPAASSVPAAGKSKPRKSKTASRNAQKIAQTELLAARLKAIIGVDLTAVPGLGILAIFTLLSEIGTEMSRWRNAKAFVSWLGLCPNHKISGGRVLSRGSRRVVSRAATILRVAATTIGKTDTPLGCFFRRKRAQLGAPKAITATARKLACLVYQMIQTQTEYRAIDGSAYEQAYAAHRLKSLKRRAEELGYELTERPAQAA

SEQ ID NO: 243596 - protein, 338 aa, unidentified
MEQEVVTVGLDLAKNVFQVHAIGADGAVLIRRKLRRTEVIRFFAELPRCLVGMEACASAHHWARELMAIGHEVRLMPPAYIKPYVKRGKTDAADAEAICEAVTRPTMRFVAVKSVEQQAVLMLHKSRDLMVRQRTMLINALRGHLAEYGIVTGLGAAGVVASLKALHEEQDRFPAHARSALHGIAAQLRALASEIERLEAQILDWHRNDETSRRLATIPGIGPITASAIAAAVPDASLFRSGRQFAAWLGLTPRANSSGGKERLGGITKQGDGYLRRLLVVGSTAVMRMTRKSPARQPWMAGLLERKPTKIATVALANKTARIAWAVMTRKEVYAPAA

SEQ ID NO: 243597 - protein, 340 aa, unidentified
MTITTIGIDLAKNVFAVHGVDQNGKTVLVKSRVTRAALPGLIASLPPCVIGMEACSGAYYWARLFLQYGHEPRLMAAKFVSPYRMAGKSGKNDAADAQAICEAVRRPHMRFVPVKDESQQAMQTLHRNRQGFIEEKTATYNRLRGLISEFGVIAPQSTDALRHMVSAQKSSLPLQVQQCVDDLLEHVDRIEANITEYDRILSRIAKTDHRSQRLMKLKGVGPTTACALVACIGNAHDFKNGRQLAAWLGLTPSQYSSGGKSKLGRITKAGDSYLRTLLVQGARSVLIGAEKRTDLFSRWVCSLVERRGYWRAVVAIAAKNARLCWASLHYGDDFRLYSAS

SEQ ID NO: 243598 - protein, 351 aa, unidentified
MDHIGIDVHKRESQICTLAEGGELIERRIRTEPERFAAVLGGRPPARILIEASTDSEWVARCLEALGHEVIVADPNFAPMYATRTRKVKTDRWDARALADACLLGAYHRAHRLSDPQRHVRGRLLVRDALVRTRTRYISVIRALLRQQGYRVPSGSAEAFPTRVRALALPGPLLSLIGPLLAVMLHLNRQLAYSDETIERVAAHDERVQRLRSVPSIGPVTAAAFVATIDDVQRFSHAHQLEAYLGLVPRENSSGDTQRRGPITKAGSSRMRWLLIQAAVSILRRRPPEAEALRTWALRIAARRGKHVAVVALARRLAGILYALLRDGTVFMPRRPSPPVATATRPVSANV

SEQ ID NO: 243599 - protein, 365 aa, unidentified
MKKISTVATKQSRNFFQPKLTIGLDLGDRSSWYCVLDEQGEVVLEQKLGTTPKAMKEVFGGMPRSRIALETGMHSPWVSRLLGELGHEVIVAHARNVRLIGESRKKDDRLDAQTLARLARIDPQLLSPVKHRSAKAQGDLTVIRARAGLVRARTALVNTARGLAKSYGERLRGCNVRNMNPEKAEVLSPELQTALEPLLAGIESLSERIREYNEAIEQLAQESYPQVARLKQVKGVGTLIALTFLLTLEDAHRFRKSRDVGCYLGLQPGRRNSGQSEPQMHISKEGDPYLRTLLVQGAHHILGPFGVDSDLRRWGLKLAERGGKSGKKRAIIAVARKLAVLLHRLWVSGEVYEPLRNQTAMPAAA

SEQ ID NO: 243600 - protein, 412 aa, unidentified
MEVLHRRCAGIDVSKKDAKVCVRIAGAGPRGGTEQKVRTWGATTNQILALREHLIHQQVSLVVMEATGDYWKPFYYLLEDAGFELQLANPRHVRNLPGRKTDVSDAAWLADLGAHGLTRGSLVPPPPIRVLRDLTRSRALLTRDRTREYQRLEKLLEDAGIKLTSVASDITGVSVRAMIEALIAGQRDPVALASLARTRLRAKIPDLTEALVGRFSEHHAFLARMHLDLIDQHTVMIDQLTERIEELIEPYRGFRDLICTIPGIDTVVAAVVIAETGADMTRFPSPQHLASWAGTAPGSHESAGRSKSTKTRKGDSYLKGALGIAVMAISRTNNTHLGAKYRRLAKRRGESKAIVALERTLLETIWNMATTGVLYQELGAEHYTNAYPERAKRQALNQLRKLGYTVTLQPAS

SEQ ID NO: 243601 - protein, 339 aa, unidentified
MKLYAGCDLHSTNNYWGIVDQDGKKLFSKKIHNNPDKILKILAPFKQDIGLVAVESTYNWYWIVDLLKVEGYPVVLANPAAMQKYKGLKHTDDKHDAFWLAEMLRLNILPQGYIYPKEERPTRDLCRKRLHLVRLRTNIILSLQSMITRNTGQRISGQKLKSMTQEAIVQLVSSHEDLELRAATDKVALDNLGRQIKHLETVLNAKVKPRPEYKNLLTIPGAGPTLSLTIMLETGPVSRFRQVGNYASYCRKVDSKWTSNNKTKGKGNKRNGNKYLAWAFSEVAEHARRVDQMAKRFFERKKSQTNRMVAHGALAHKMSRSAYFIMRDNVPFDPQKMFS

SEQ ID NO: 243602 - protein, 386 aa, unidentified
MRRAKRRGPGPSHLLMTPDHAGNVVGVDPHKRTLTATVADARGGILASAHFRVSGEGHRELEAWARQFGQIARWGIEGSASWGRHTAVFLIGRGHDVRDVCANRTPRADRARQRGKSDTLDSERIAREVLAHSLLPKAFKRAGRQQGPDEQHQLLALWHNRRRSILTSHQHLVNEAEYLLCELPLELREQLPETKAVKPRLAALARRNRRRRYDAPTKLRLQLLDGYRAQINALELEEKQVVAQLDALVRRSGSTLGELSGLSTRSVAELLVEVGDPRRFTEGGFARFNASAPLPASTAEGPGEPVRHRYNPGGNRRVNAILHRMAVTQLRHEPRAQRIYANARAGGHTKKEARRVLKRHLSNVIYRRMIRDLHAQLTPDQPLLAA

SEQ ID NO: 243603 - protein, 420 aa, unidentified
MQVLYERCAGIDVGKDIVAVAVRAPGDGPDGRTTIKRMFKTFYGVLRECARWLTGQGVTHVAMEATGIYSMPVYHALLAHGDFEVWVCNAAHVKNVPGRKTDLSDAEWLAHLLECGLLRGSFLPPEQIKAARDVMRYRRKLVEHRSSELQRLGNVLQDAGIKADSVASSIATKSVRAMVEALIDGERRPAVLAELAKGSMRAKIPDLARALEGRFDDHHALMCRLHLTHLDQLDAMIVALDEQIEQMMQPFCARRELITSIPGIGHHAAATVISEIGTDPAAWFPSAEHLASWAGLCPGNHESAGKRRHGHRRKANQHLQPVLVECAWAAVRTHGYLHEYYRRQVRKFGGFRSPAAKKKAIIAVAHKLIVIIWHVLDTGQPYQDLGADYFTTRIDPDKERQRLVAKLEAQGFKVTLEPAA

SEQ ID NO: 243604 - protein, 361 aa, unidentified
MAQAKTWVAFDVHTSGVVAAVLQRESGELRVQRLPAGSEAVTAFALGLPGPVRATYEAGPTGFVLARRLEAAGIECLVCAPGLIPRGATDRVKTDRRDAERLVRLLVAGELHRVGVPSVEEEALRDLVRAREDLRGDLMRARHRLAKLLLRHEVRFDGPQANWTQAHLGWLAGVRLDQPASQRALEDYRGAVAALMIRREQLEAEIARALPLSPWAQTARRLMCLRGIDTLTAAGLCAEIGHFDRFRHPAQVMSYLGVTPSERSSGERRRQGPITKSGSQHARRLLVEAAWHYRRPPRVAGSLARRQRDGEPEVIAISWKAQRRLHHVWSRMEQRNKRRTIIAVAAARELAGFCWAVATTD

SEQ ID NO: 243605 - protein, 342 aa, unidentified
MTLVGCDLHARQQQVAALDTATGEIQEHQLTHHGEAVERYYAALPPPVTVAVESTGYALWFHTLIRQLGHTLVVGDATKIRAMVVRKTKTDRRDAPHLLELLRHDRLPTIWVPDPATRDRRALLGHRMRLVRVRTTMKNALHAIALSHRLVDGSKRLTQSRLAPLQDLPLGPYAARRRDESLELLKWLDERIRQLDNQVAEAAAVDPAARLLLTHPGVGGVTALTTVVVGPVGRFPGTKEVASYVGLAPALHASADKHHLGQITKQGNPMLRLVLVQAAGVAIRYDEALHRLYTTLLRRRGHAKAKVAVARKLLIRLFIMLRDGIDYDEFCRRGRARQPAPV

SEQ ID NO: 243606 - protein, 318 aa, unidentified
MPQPGRIVGIDVSKRQAEACLRSPPARLAQPSTPEGRQRMIAWLRERDVALAVMEASGGYEREWAEALRQAGVAVRIVDPKRVRYFARSAGRLAKNDPIDAAMIAWFAETFTAEAAPAEDPERAAVDRLMTARAMLVRLESQIKQLGEHRQPPLVERAQRAIAKAILAQRTKLEAAIAAKIERHAGFAARAGILRSVPGLGPRFTAGAIAWLPELGGIANRAAAALVGVAPYDDDSGARRGERHIKGGRREIRELLYMATFAATRCNPVIKAHYQQLRARGKKFKLALVACMRKLIVILNTMLARGQRWTPPAATAVA

SEQ ID NO: 243607 - protein, 465 aa, unidentified
MGAGKMNRKQRKELGRRLQSANPGLEVVHPRAAGIDVGNGAHYVAVRPEQDAEPVRRFECFTADLHRMADWLEACEVKTVAMQSTGVYWIPLYEILEQRGFEVYLVNARHTKNLPGRKSDVQESQWLLKLHTHGLLNNSFQPTAEIRVVRTYWRQRGEHVRGASTCIQRIQKVLTQMNVQLANVISDLSGLTGQAIVRAILAGERDPRKLAELSHPRIRAGREQIAKSLEGNWRSELLFVLKQEMEMYDTYQHKIAECDWELEATLKQFGVPERASTEQPKIPNAKKTKRIQRNAPGFNLTSELHRITGVDLSRIDGVNAIVAQTIISEVGLDMTRWKTEAHFASWLGLCPDNRISGDKVLARGTRHVINRAATALRMAATTLIKSQSYLGAQYRRLRTKLGAPKAITAMAHRLARLVFRMLKYGQEYVDKGTQYYEQKHREQQLHLLKKKAATLGFQVVETGVA

SEQ ID NO: 243608 - protein, 408 aa, unidentified
MNAVGIDVSKGKSMVAALRPMGEVALLPQEFLHTEVGLEQMAYAIIALGENTRVIMEATGRYHEPVAAALHAYGIYVCVLNPLFIKQSGGGSIRKVKTDKADAMKIAKYGLDNWVDLREYTPMDTVRQQLKLCSRQYNLYMKTVVSLQNNLISLTDKTFPGVNELFSSPERADGHQKWVDFVITFWHCDCICYVSAKAFTERYQKWCKRKGYHFSAEKALDIHAGSCDHFTTLPKNDNTKLLISTAAQQLLAGKVTLAALRAEMTRLSKQLPEYDTVRAMYGVGETTAAQLVAEIGDVRRFPRRSSIIGFAGVDPGIDESGKHSAKSVPTTKRGSPHLRKTLYQIVCTYLRKAPADEPVYQFLDKKRSEGKAYFVYMTAAQNKFLRIYYARVKECLEAFDTQQSSTQS

SEQ ID NO: 243609 - protein, 350 aa, unidentified
MVIVAIESHQGALHMQISTIGLDIAKNVFQVHGIDAAEKVVVRKRLRRRQVLEFFKALPPCLIGMEACATAHYWARELTKLGHEVRLMPAKDVKAYVKRNKNDAADAEAICEAVRRPTMRFVRIKSAEQQGQLMQHRTRDVLIRQRTQIINALRAHLAELGLVAAQGNAGVNELRAIVTDEQDTRLPIDARASVIVLAAQLEALESVIGAIEKRIKMQHRSSEASQRVEAIPGIGVIGATAIVATVADPTIFRSGRDFAAWIGLVPRQDSTGGKQKLGPISKQGDRYLRRILVVGAIAVLRRARENPGKYPWLTQLLGAATLQGRGGGARQQDGAHGLGAAGPWWHLSRA

SEQ ID NO: 243610 - protein, 450 aa, unidentified
MTNGNGVSRGDRNRNARLARLRTLVPLENAIVGIDLADKKQMVVVTDHDSKVLARRMFRCRAWELGLALDWAAGRAVAKGFVGVTVSCEPTGHRWRVLGQLAADRSMSFVCVQPMQTSWARRSEDLTFDKTDDKDAVLIARLTAQLRCYVPEPVEEIWGRLRHLGARREQLIVEAVSQIQQMRDLLECVWPAALETAKQPFRSRTWAAAMTVILDRDDGAFDRTRRLGPTRFTQAVRREITKRGGQKPCLRITRNLFSALADPAGVLAHRPGGLERVQLLMEDWAHNQHKLTDTEDRMVRVLDELELTALVTSITGLSAVGAAAILAETGDPNRFLTARALVKHAGLAPREKLSGTFVGRTKLTGQGRPRLRVAAWRAVWGAQRANPVYGARYAYLTTRENNRLTPTQAQTVIAAAILRHLHAVITTGRAWDPIIATHGTRRTIDTDLAA

SEQ ID NO: 243611 - protein, 339 aa, unidentified
MFMIGIDPHKGSHTAAAVDRSESVIATLRVEADRDQRQHLLDWAASFEPRTWAVEGATGMGALLAQQLVAAGERVVDVPPKLSARVRLLDNGRIDKTDPNDARSAAVVAWRTPTLNEVIGVDEHRVVLRLLADRDHQTTAQRTRTICRLHALLCLVIEGGATRSLTVDRAEKMLATVIADDPVSRARVVAAGEFLDEINTLDAVRKDVRRRTAVAVKASASTVTDVYGIGPMMAAIIIGHTGDVRRFPTAGHYARHNGTAPIEASSGPNKRHRLNQRGDRQLNHAMHMAAVTQVGHDTPGRIYFLRKRAEGKSSKEAMRALKRQISDAAYHRLLTDATR

SEQ ID NO: 243612 - protein, 369 aa, unidentified
MAKSITYIGLDVHKDTIAVALAEAGLRGEVREHGKIPNAPAALKALAMKLASAGRELRFCYEAGPCGYGIQRQLAGMGHDCAVVAPSLIPRKPGERIKTDRRDAINLAKLHRAGELTPVWVPDQAHEAIRDLVRARQAAVRTLRQARQQLSGFLLRHGYHYHRPAWTQLHRRWLASLRFEQAVHHIVLEDCIAAVEAATARRDRLEAHIEAALPEWPLAPVVQALQALRGVGLVAAATLLAELGDITRFTNARQLMAYLGLVPSEHSSGRTRRQGGITKAGNGAARRMLIEAAWSYRFPARISREQLLRQERLAKPIRDIAWKAQERLCRRYRKLARAGKLATVITAAIARELAGFIWAIARQAQSTAS

SEQ ID NO: 243613 - protein, 323 aa, unidentified
MNKDIKYFGIDISHLVFDVTDSDGNYYQFKNTISGFKKFVKLLTKHSHCVMEATGYYHYQLAYYLLESGFKVSVENPLSVKRFIQMRLSKVKTDRSDSKLICEYAKQVELKLWKGNSKHQTESLQITRLLAVYTKQSTMLKNKIHGESVLGNPSKAVVSSLKRSLKQVQKEINLLECKLLILVKEEHQDVLTRLKSIPGIGNKTAVMLVVLTDGFERFTSGSELCSYAGLTPVIRKSGSSVNGRSRISKIGNQKLRNLLFMCSFNACKYNKACREIYERIVAKGKSKKLALIAVCNKLLKQAFAIAKSGLIYDDSHRSTLVKN

SEQ ID NO: 243614 - protein, 401 aa, unidentified
MAAGNPSTRLVGGIDPHADTIHVAVVTTLGKPVGDAEFRTDPDGYQAAIAFLTSSGTIERVGVEGAAGYGAGITRALAVAGLDVVEVERPTRSDRRRAGKTDQMDAYHAARSVLAGRTSPIKGTEVDALRALNLARRSAVKARTAAGNQLKAVLVMAPDDVRSRYRGLNTDRLVDALRRVRPDLVSDPTSTAVLTALKSLARRHRDLTEEIAALTAHLDTLVTAARPALREAYGVGPDVAAQLLITAGNNPERLSSEASFAALCGVAPVPASSGKTHRHRLSRGGDRQANAALHRIVLNRGQHHAPTKAYVARQTERGRTPREIRRMLKRAVAREVYRLLVRDCPVAVFNDLRPARQAKNITLRDAARQLGTWPSVLSNLERGLRRDHDLTTHYRDWLQAA

SEQ ID NO: 243615 - protein, 404 aa, unidentified
MIFVGVDWAEDHHDVCVMDEAGRVLGKRRIADGVEGVAELHALVATHAQEPEEVAVGIEIDRGLMVVALLSAGYEVYAINPLAASRYRDRHATSGAKSDPGDAKMLADLVRTDRHNHRQISGDTELVEGVKIIARAHQNAIWGRQRQVNALRSSLREYYPGALAAFGTDLSSSDAVSVLSIAPTPVLGRQLSRSKIISALRRGGRTRNLEKRAAEIQIALRADYLEAPPAIGEAHGEVARSSLSLIEAYTKQIDTLEISLGEHFEQHPDAKVVLSLPGLGTVLGARVLGEFGDDRTRYAGPKSRKNYGGTSPVTKASGRSRVVLARYARNRRLAAALDRWAFCSLTHSDGARRYYDELRARGKTHGQANRQLANRWVGILHHCLERNELYCEDIAWRRDSELAA

SEQ ID NO: 243616 - protein, 404 aa, unidentified
MLERENKKPCVALDVSKGSSHVQAFTSSGVKVTEVCVIKHTKSGFAKLKEIIQALENTTNRSCAIVFECTGAYSQPLEQYLRSIKRSYYMIPPLLSAKVRKSDIRPTKTDKKDCETIANVYYLKRLKETPYPNNLLLRLKPLCSYYLFLQNRLVELKIKFRQILDIVYPGIDSYFNSDSPAFVEMIMKNPDPNKLKKKSRESTKKHFLKTSYCGEFKANKLVNQMELYFCDAALNIQEEDGFIDILSSLAKRLLLDMEMIASVMDQICLLGMKTEEYKYLVTIPGISKQTASRIASEIGGIKRFPTVGQFIAYIGIDPSVHSSGKMDGKHLSITKKGNQRLRCLLYLVSSGTSKSKKEGNPVRDFILQKKSDGLSPKAAIIAGCNKLARIIYAVCSKREPFAIQ

SEQ ID NO: 243617 - protein, 324 aa, unidentified
MDNEHYIGIDIAKAKFDMAFFDHNGRKIHKVFENTKKGFIAMEKFLKEKGVKQAYFTMEATNVYWQDLTDYLYKKKDFIVSVVNPLRISAYAKCQMQRGKTDKIDAFLLARYCKNEQPERWEPLSKASQQLLKLVRQCEHLKTCKQIEQMRLATADILVKSSIKAMINSLNKQIIVMQKKIKTHIKSNDELYENFKLLKSIPGIGDNTAPWLLATLDNGKRFGRGKQAACYAGLTPRPWQSGSSVNGKTRISKVGPSELRKILYMPSVVVSYGRYKHYQRFVNRLESKGKNKMEVIVAVMRKLVTIAQAVLRTKTPYDKTLHAG

SEQ ID NO: 243618 - protein, 323 aa, unidentified
MEEGRIQSTVAALEKHFGGEPRMRIALEAGTHSPWMSRWLKSYGHEVIVANPRKIPTLTGSESKNDRNDAEQLARMAAFDPKLLHPIEHRSLERQQDLNLIHTRSVLVRARTMLVNSARGLVKSAGGRLPSCSSEVFPEKVSVAVPGELKAACEPLLKQIAQMNRTLAAMDKQIEGLAKKYPEIAVLRTAPGVGSVVAACYVLTLGNPETMETNRQAGAYLGLRPRQQQSGDCDPQCGITKTGNSYLRSLLVQSAQYILGRFGPDSELRCWGLKLAACGGKRGKKRAIVAVARKLAVLLLSMWRNGKKFEPFPQSATQLAKAV

SEQ ID NO: 243619 - protein, 485 aa, unidentified
MKQTKSSPCARAILAHGGQLSRKERRELARQVQSEQVTLQIVHSNAAGIDVGKNTHYVAVPPDRDAESVRYFDSCTDGLQQMVAWLKKCGITSVALQSTGVYWIALYDLLQEADFEVYLVNARYTKSLPGRKSDVQESQWLMKLHTYGLLPNSFRPPQEIRWLRSYGRQRQNQVRSAASCIHRMDKVLTEMNVRLSSAVTDLSGATGLAIIQAIVDGERDPHELAAYRDPRVKATQEEIARQLHGNWQADLLFRLKQELQGYRFYQTLIAECDQELAQLLRAFPDRSAGVALPEETRKNRRKKKRGNSPQFDLRQLLYLMSGVDLARIDGIDVITAMTVVAEAGYDMSPWPTADHFVSWLRLAPDNRISGDKIIGKARTPTQNRLSQALKMAASSLKASKTYLGAQFRRLRARRGPAIAVKAMAAKLARLVYNMLRHGMEYVDRGTEFYEQQQRERRLHALTKNAAQLGFQLVPTELSLAGTGTI

SEQ ID NO: 243620 - protein, 342 aa, unidentified
MQITTIGLDIAKNVFQVHGIDASEKVVVRKQLRRSQVLAFFKALPRCLVGMEACATAHYWARELTMLGHRVRLMPAKDVKAYVKRNKNDAADAEAICEAVRRPTMRFVPVKSAEQQSRLMLHRTRDLLMRQRTQVINALRAHLGELGIAAAQGREGLKELLKIIASEEDARLPVDAHTSLVVLAMQLQAVQTMIGSIEKRIMVQHRSSEASKRLETIPGIGVIGATAIAAMVTDPKVFRSGRDFAAWIGIVPRQDSTGGKQKLGPISKQGDRYLRRILVVGAHAVLKQARRQPEKYPWLTQLLARKPFKVVAVALANKMARIAWALLAKGGTYRAPKLAAAA

SEQ ID NO: 243621 - protein, 310 aa, unidentified
MEKVTVGIDVSKDRLDIAVRPGGDVFVVERNAVGLDSMVERLRQLAPHLVALEATGGFETVVAAALSAAGLPLVVVNPAQIRSFARAVGKRAKTDPIDAAVIAHFAEAIAPEPRPLPDEATQLLADLVARRRQIIAMIGAERQREKRARAKSLKQSIARLIKALAKELTSVDTDINDAVRGSPVWREKEDLLASVPGIGPVIARTLIAEMPELGQLDRKQIAALAGLAPWTRQSGQWRGKSFIGGGRVGVRCALFLGAMVAARHNPTLKPFFERLVAAGKPKMVAIIAVARKLLTILNAILRDQKPWQNA

SEQ ID NO: 243622 - protein, 333 aa, unidentified
MNTIGIDVGCKELVVVIMVNGKARKAKSFDNTPSGHQTIIQSLTKLKGETKICIEATGVYHFDLAVAISRADGLEVMVINPKAAHNFAKVLMKRSKTDAIDAENLAIYAERMPYEAWERPADECISLRAIARRIAALGKQKTQTKNQLHALESTLETPELVIEQTKDLINILEEQIKVLRDSALVLIQQHEGLEQAYTLITGIKGIAQASAVQILSELMILPKDMTARQWVAHAGLDPRIFDSGSSVSKKPRISKVGNKYIRQALYMPALVASRFDPNIKGYYHHLIDDNGLKKVQAVCAVMRKLLHAIHGMLRTNKEFDGARFYTLPITTDS

SEQ ID NO: 243623 - protein, 451 aa, unidentified
MSSRSIKPAGLPVIHDHAAGIDIGARFHVVAVPPDLCDQPVQTFQAFTGDIERMADWLVSIGIKTVAMESTGVYWVPAFEVLQSRGIEAIVANAREARTVPGRKSDVNDAQWLQRLHACGLLRASFRPAPDIAALRAYLRLRERHLDYAAAHIQHMQKALTLMNLQLHHVVSDVTGVTGMKIIRAILGGQRDPQALSTMRDVRCKASTETVRAALVGNYQPEHLFCLGQALALYDFYQARVEECDAQIERTLADLNADKSSPVAPLPKPRHKAKQPNAVSFDTRPAMYQLTGVDLTQIHGIGPYMALRLVAECGTDLSRWPTVKHFTSWLTLAPGCKISGGKVLSAHTRKTTNRVSAHLRLAAVTVGRTDTALGAFYRRLAARVGKAKAVTATARKIAVLFYNAMRFGMNFQDPGADHYESRYRERVVKQLHRRAAQFGFTLQESAPQSVS

SEQ ID NO: 243624 - protein, 420 aa, unidentified
MQVAQDDQEIIARVAALDIGKAEVVCCVRVPGQGPRARRMQEVRTYTTMTRSLLAMADWLTGLGVTRVVMEATSDYWKPPFYLLENTFETWLVNARDVKHLPGRPKTDRLDAVWLCKVAERQMLRPSFVPPPAFRELRDLTRYRVDLITTRTSEKQRVEKLLEDSQIKLSVVASDIFGVSGRAMMAALVAGERDPKVLADMARGSMRGKTARLEEAFTGRFTDHHAFLLRTMLARVDGIDADVDVVQARIDEQIAPSAAAVTRLDEIPGIGVTAAQVIIAEVGLDMTRFPTPGHLASWARFAPGISESAGRKKGGSSTGKGNRYLGRVLGEAAVGAGRTKTFLGERYRRIAKRRGKKRAIVAVGRSILMIVWELLSDEEKRFIDLGPGYYDSRVNRNRSTRNHVRELQALGYKVTLEPAA

SEQ ID NO: 243625 - protein, 315 aa, unidentified
MTERAGKVVGIDVAKAQLDGAVRPGNEQGRWGNDPAGIAEAVTWLCAVGPEVIVIEATGGYEVPLVAELGLAGLPVAVVNPRQVRAFAQATGHLAKTDRLDAQVLAHFAEALRPIPRPLPDAHAQELAALVERRRQVVAMRTAEENRLGATRVERVRAHIQAHLAWLEADLADVDDELRRRVRTSPLWRAHDDLLQSVPGIGPVASLTLLAQLPELGRLSHAQIAALVGVAPLNRDSGTLRGRRSVWGGRAAVRSVLYMGTLRATRCNPVIRQFYERLLAAGKAKKVALVACMHKLLTILNAMVKHQTPWQAQAA

SEQ ID NO: 243626 - protein, 345 aa, unidentified
MNKVTPAFVRLAVDLAKQVFQVAGEDAYGRVVYEERIKSRPAFSKLLAGLGAKVEVLLETGPGAQAWARQVQEAGAKVRILPAQRVAEHRSGAKNDRNDCLAILRAGRDEAIHGVPVKTVHALEMQAEHRVRTGYIRRQTSISNQVRGILLEHGIAIAKSNSALALWVTRIQQDTSFPIPEMLREVIADLWAEWEHLGQRRKRLDRQLEQIAQNDEVARRLMTIRGFGPIMTTALLAKQTQPERFPNARQFAAYFGLVPDQHSSGSTVRLGRMTRRGDGYIRSLAVTGAQSVLHRVRADATGADDKRLQRWCRQHGKKGAAIRLANRNLRIAWILMTTQAEYQPQ

SEQ ID NO: 243627 - protein, 337 aa, unidentified
MRKTKSDQPSTYWAGLDIAKKTFQMATWGHEAFPDMEVSSLQRQKKVVQETLAKLRAKIPAGMKLGIVMEATGKYAEQVATWMREVEPGLRLAIVNPAQTASFIKSLGFRNKTDGLDAKALARYGQEREPVNWEAPSPEMAVLRDLTRTRADLVATRTAMKNRLNDHERASKTAAEALNKIIDTLYRQVEALDAAIEDHLKAHPELDHQVRLSMTIKGIGIVTSTVILAEMGDLRRFERSRKLAAFAGVSPRLKDSGTSVHGRPRMCKQGSARIRTALYMAASNAIQHNPDMKAFYEHLLKQGKVERSAIGAVMRKLLVLMRAVMKAGEDWKPRQAA

SEQ ID NO: 243628 - protein, 448 aa, unidentified
MSELLTAASPEPEWAALAAIDWADQKHFWRLLPAGSAQAEHGEIANTPEAVEVWAAGLQQRFAGRPIAVCLEQTRGALVYMLTKYPHLVLFPVHPTTAARYRETFAPSGAKSDPSDTASLLDLLARHRAQLRPLRPDTTETRLLQFLVEERRRTVDDRTRASNRLTDCLKLFYPQILHWFDKVTSPLVGDLLERWPSLEQLQGVHPGTLKKFFQQHNCRAPELIAQRITEIRQAVPATKDLAVLEAGKIITRGLVAQLATLREQIALLDKRIAELVAAHPDGAVFASLPGAGAALAPRLLVAFGTDRERYQSAYQMQCYSGIAPVKEASGNTVWVHSRFICPKFLRQTFHEFAEHSIGQSEWAKAYYDHLIQDEKKSHHAAVRALAFKWIRIVFRCWKDRKPYDEEIYTESQRRRRSLLGRTLGTLDAATGAGWNTIAGFQRFSKNNA

SEQ ID NO: 243629 - protein, 338 aa, unidentified
MTCYSGIDLHSTNSVVVVSDETDRVLYQRRLPNELAGIVGALEPYRSELAGVVVESTYNWYWLVDGLRAAGHRVYLANPAAMKQYEGIKHRGDESDAQYLAHLLRLGILPTGYICPPAERAVRDLARKRLQLVRTRNAQVVSVQSNLARQTGGRLSSNAVKRLTVADTDALGLMDDVNGAVAANAAVIQTLNAQIAKLEARLRERVRLRQEYRVLVTVPGIGEVLATLIMLETGSIGRFAAVGNFASYARCVDSVHRSNDKKKGTGNVKNGNKYLAWAFIEAANFARRYCPQAQRFYERKKAATNGILATKALAHKLARACYHMLKEGKPFDVQRCFA

SEQ ID NO: 243630 - protein, 443 aa, unidentified
MAAVMIGVDPHKASHTAVAINAAEELQGELRVRACAGQAQRLLAWAAAWPERTWAIEGADGLGHLLAQQLLAAGERVLDVQPKLGARVRLLATGAVNKNDPNDARSVAVAALRSPSRRQVTADDHAAVLKVWSKRHRDLGRTRTQVACRLHAVLCELIPGGVSKRITAGQAAQILTSITPQNAVEAARCELAADFTEDLRGIDAAMRDTKHKLTAAVQAAGTTVTEVFGVGPVIAATVIAGVRDLSRFPGRDHFAAYNGTAPVEVSSGQRKIYRLSRRGNRRLNHAIHTAAVSQVSHRRSAGRAYFDKKLAEGKTPKEALRSLKRQVSDAIFGRLQADASQAATVRVTGPGGHPGNGSVASAAGSHPEHRLFGQATPGPATTPTTPASGSPTEDHLPLHENDHQNHLTQRGVRSARRRAWDEADRRRRICGRSAHAQREAASL

SEQ ID NO: 243631 - protein, 340 aa, unidentified
MNRIGLDAHSASFTMAVVNEAGKVTRCLSRPTSASNLIELVSAVAGPKELVVEESTVAQWVKETLDPYVDRLVVCDPRRNRWIAKEEFNDDRTSAIKLAQLWRGGYIKPITHPSAEEAPLRQSFGHYADLNEQVRRFKNKLKATYRQAGVAVTGHRIWEEDSHAEWLARLDGSPALRRQAQHLFVLIDEIEQMKQECLKSLMRTARKDQGYRRLLQMPGIGPVVACGYIALIGTPHRFSRKNKLWRYAGLANTLHVSDEKVYQDRPSPSGNRLLKWVVMQHFMGAVERTKKPNVFKGRYERLCQRGLADKVARRHVCRSLLSVVRAVWMKGEPYRETPLT

SEQ ID NO: 243632 - protein, 331 aa, unidentified
MDLAKKVFQVHGVNAAGEVVIHRAVRRARVVAYFAKLPPCLIGMEACATAHYWARELGKLGHKVKLIPPAYAKAYVRRNKNDAADAEAICEAVGRPSMRFVEIKTEAQQAAAGIHKVRELLMKQRTMLINALRGLMAEFGIVVAEGTRHVGELEAILADPEEQPIPAPLHDGLARLAHSLRGIERQIEGIDKQIVDWGRGNETCRHLITAPGYGPILSSAMAAMVVNPAGFRSGRDFSASLGLVPRHDGTGGKVKLGPISKRGNGYLRRLLVNGAMSVLNSKRAKQDPWLVKLLANKERKVAAVALANKMARIGWALMTRQEDFRATPAAA

SEQ ID NO: 243633 - protein, 361 aa, unidentified
MKRVQSNTLDFSGQNIYVGIDVHLKSWSVAILSEHSVLKRFSQIPEPEALHKYLVSNYPGANYFSVYEAGFCGFWIHEKLMDLGITNIVVNPADVPTMSKEKLRKTDAVDCNKLARELRSGSLVGIYVPKADVLEMRSLIRMRNLIVKDSTRAKNRIKSLLRFHGVDIPEEFTRCSIGCWSKRFLTWLHSLELSTEYGKKTLELHLEQFVRLRKMLLQETRAIREISRNAPFERPIRLLTSVPGIGVTTAATLMVELDGIVRFRNEDHLASFIGLVPMCHSSGESNGTGDITVRRHFMLRCLLVEAAWIAIRKDPAITVAYTEYRKRMNPQKSIIKIARRLVNRIYYVLKHEKEYIPCVVK

SEQ ID NO: 243634 - protein, 359 aa, unidentified
MKTATNNFKDFSGQNIYVGMDVHNKSWKIHIYSDEFELKAFSQEPDVDQLAAFLQNNYKKASYKLAYEAGFSGFWIQRAFAAKGINCSVIHAADVPTNDKERLRKTDQVDSKKIAKGLRNGDLNIIHVPDRELELDRQLLRSRKVLTRDTTRIKNRIKAILKLQGIVIPPEYKEGKTWSKKFIEWLKKNDLGSISGNVTMQTQVKELIFMAERKRETDAVIKQLSESERYCTNAVLLQSIPAMGPMTAMLLLTEIGDIHRFKRLDELCSYCGIVPNCHSSGEMESVGKMSRRGNSLIKDALIECAWVAVRKDPALLLYYKKQLAQMSGQKAIIKITRKLLNRVRYVLMNQKEYVTGVIE

SEQ ID NO: 243635 - protein, 342 aa, unidentified
MEAKRYIGIDLHRNCFTACLRLENGREYGKEWKLEELAKFVEKLRPTDQVAVEVTGNTRLFHDAVAPHVARVVAVNPSQFQVITHSVKKTDSNDARNLALYLAKDLLPEVRMKDKPQAQIASLTQTRDSMVKLRTALKNKVNNLCSAQGVNLNKESLSSEKGLKAVLEMHFDLLVNLELKIIIDQIRSLNKSIDELEETIGKQGQKLEGHKNLISIKGIGGLSGGILLSIIGDIGDFADEGKLAAYFGIVPRVSNSNETERSGRITKRGTKLGRTTLIQCALIAQRYSPYLKTYYQKIKSRRGTGKAIVALARKFLGIIYRTLKNKWVFEDFPNFVLAEEAA

SEQ ID NO: 243636 - protein, 358 aa, unidentified
MTDHQLEVIAGVDTHADTHTAVVIDEVGRMLGHRQFPTTVAGYRSLLAWVSEHGGVRAIGIEGTGSYGVGLARYLRAQGVHVVEVDRPNRKMRRQRGKSDPIDAEAAARAVLAGTATTTPKTRDGQVEAIRVIRTARASAVKSRTAAMNALIGMVRTAPEPLRTQLLDLRKTALIMAAAALRPALDRSDPVAATKTAVRRLARRIIDLDREIRDADVDLQVLLTQAAPRLMELPGVGPDVVAQLLISAGDNPSRIRDERGFAALCGVSPIPASSGRTDRHRLNRGGDRTANRALYIVAINRMRNHEETLEYVARRREKGLSSRDISRCLKRYIARQVYPMILESLRIRPPSSTALAGA

SEQ ID NO: 243637 - protein, 415 aa, unidentified
MENAALVACVGLDWGDTRHAVQLQLVDGGPIEQLELEQKPDVLHAWVAQLRQRFRGRPVGIAVEQRKGAVMHALMAYDFLVLFPVNPKALARYREAFRTSGAKDDPTDAALLLDLLRKHRDQLRAWQPDTVEARTLQSLCEQRRKLVNHRVAVTNRMTSLLKQYFPQALDWVGDVASLQGCDFLMKWPALAAVQRARPRTLRTFYQQHNCRKALVIDERIQQIASACPLTSDAAIIGPLSLSVQTYATQLRVLIKAVQAFDTRIAHVFAHHPDQALFDSFPGAGPVCAPRLSAAFGTDRSRWESASDLQSHSGIAPVTERSGKALWVHHRLACPKFVKQTFHEFADQSIRFSTWARAYYDQQRGRGNDHHAALRALAYKWIRILFRCWKDRTPYDEATYTAALRRHGSTLVEKNA

SEQ ID NO: 243638 - protein, 414 aa, unidentified
MDVAEVRTTTKTTKCENKHMKIHKYVGCDVHKVDSDLVIAEEGREGEVRPYGKIASDLHAFERLIKKIGGPDVVLHFVYEAGPTGFVLCRHLRHLGHDCIVVAPTKIPQPKGGRQKTNRRDATQLARLLRAGELEGIYVPDVIDEALRDLTRVRSDASRDLKRAKQRLKAFLLRHGYHYAGSANWDQKYHRYLRELTLPLPTLKLALEEYLLAMEEANNRLTRIEEVVAAEAVKWRMYPAVQALMCFRGFDLPAATMLVAELCDVRRFAHPRGLMAYLGLIPQEDSTGDTRTLGSITKRGNAQARWILIEAVQHCGKAPKIGRRLAVRQDGQPEEYRKIAWKAQTRLYKRHWHLTQRGLLAAKVKVALARELCGFVWDLLRRVPPPAQPKIKAPVSRSATRRPGLSRSEHVMIG

SEQ ID NO: 243639 - protein, 429 aa, unidentified
MTKHQPIPAEIVLVAIDIAKMRNEVLLEVPGQRRRRLTVLNTRTEHDRLIGILASLGFPVVAGFEATGNYHRPLVWRLLEAGIDLRLISSVALARTRQALHNGWDKNDPKDAQVILHMLRLGVCQRYYDPLAHGINDIQELSKTHDAVAKAKTELLHRIQTHYLPLYFPEIERFQNNSRAEWFFAFLERFPTPASITALDRDAFIAAAWQVVGRKVSKSRLLADIYATAQSSIGLPVPLDAPAIAMFRLVLAEARSLVRQRAAIEAAADELLHAHPDYVLLRRVPGIGPINALTILAEAGDVRRFRHHRQFLKFCGLDLATHQSGQYRGQTRLSKFGNARLRRAFWMAAQIAIRQRDNSFRDKFERYIARDRHNADLRRKALSAISAKMARVVHALIKRGDDYRPFCEAAVPGGRTSLRRSREGADATL

SEQ ID NO: 243640 - protein, 425 aa, unidentified
MQNESTPGARGPVFCGVDTHADSHWLCVLDWRGRKVLSRQFPADAAGYGAIAAAGEPACVAMEGTSSYGAGLTRHLASLGMPVREALSPARMQRRRPGQGKCDESDAERAARAAMSGSRLGTPKSQDGWVDGVRCMLAARSGAVKARTSAINTARSLLTTAPEGLRSRFRGMAGPRLMEELPSVRAEGALGAALGALADLWAAARDAALDMERAIEASLEENCPALLAMYGCGPVSAAKLAVAAGDNPGRLRSEASFAAICGACPIPASSGKTVRHRLNRGGDRQANSALHEIARQRVMRDPETAEYAERARARGKSDREVMRCLKRYVAREAYRALMRPHEVRRPEDASGLVAARRAARVSQVRAASILGTSEKYISMLERGQRELKPIRRAYEACVEAGLPLDWDRQAFEAERKMDSKKHLAK

SEQ ID NO: 243641 - protein, 339 aa, unidentified
MTNYVGLDVAQKTTKLCIVDREGHRLWRGECASSPDQIVHAVLQHAGAGSSIGIETGPMTPWLVHELRSRGLDVICLDARHARAALRMQLNKTDRNDAEGLAQIMRTGWFRAVHVKSFDAHRARALLGARHQLVGMVTRLSNHIRGVLKIFGMLPGSVRGRSFAERVELLVAERLDVAPIIRPMLAAWSKLREQIAAFDKAIRAEVRQSPECRLLMSVPGIGPVTVLAYVSAIEHPDRFRRSRLIGAHLGLTPRQYQSGDVDHSGHISKCGDTLARLCLYEAATVIMTRVKRPLGLKIWAMKIAKRSGTNKARVALARKLAVILHSIWRTGEAFCWGTH

SEQ ID NO: 243642 - protein, 413 aa, unidentified
MVLGIDVGSETHYARAFDYRGIEYSKKPFKFSNTEAGFVTFKEWILDLQERHEKDKVVPGMEPTGHYWFNLGKFLQDNEMKPVLVNPHHVKKSKELDDNNPTKNDRKDPKVIAGLVKEGRYMIPYLPEGVYADLRTASNMRFQIQSELTRIQNRISRWVNIYFPEYKTVYGKPDAVSGMMILKQAPLPEDILTLGVEGVNQIWRDAKMRAVGKARAKTLIEAARHSVGAKEGTMAARMEIRMLLEDYESRNNHLQEVMTLIEELVKQIPMAEKLMDIKGVGIKTVSGFLAEVGDVSRFSNPKELQKLAGLALVENSSGKHKGQTTISRRGRKRLRYLLFEVAMSLVAKNPEFRELHNYYTTRRLNPLKKMQSLMAIAAKLIRVFYAMLTKGVDYDPKKMVSDIKRPAAYLQAA

SEQ ID NO: 243643 - protein, 434 aa, unidentified
MKVTRGMRRRSAKLERRAQLVTPDTLIAGVDLARRESVVVFVRARDKARLGRLRIPTTADGVRTLVRRAGELQRRHQLPRLVLGMEACSHYWKVLAKAATEIGLPYLIVQSFVLARAREFDDLTRDKTDPRDAALIADLVAELRFIDAQLETGVWAGLRLLAEERNGRCVERGAALQEQRAFLELVWPALLQQVPDLAGTHVQATLRLGLTPLEIAALPLDEFTGRLREEHRDRRFLRWMAQRIWSAAKAATDSDEMTAAILRVQFAAERVQAAGRAVAILDRRMLAAFERTGLGWLRGQIRGLGDVSLINLLALTGDLRRFDDARCLPKLAGSNPTERSSGQSHAPGGIHRRGRKALRLLAYQAAVCLVHHNPDFRQRFLALTQREHHRLEKRQAYVAVANKLLRTLWAMATSGRAYDSRIALGLIRSEVRAA

SEQ ID NO: 243644 - protein, 348 aa, unidentified
MTLTIVETRAITGGVDTHADAHVAAALDPIGGLLGVREFPATPAGYAGLLGWLGGFGTVCLVGIEGTGSYGAGLARHIAAAGVRVVEVDRSDRQDRRRAGKSDPLDAVSAARAAQSGRAAGAPKGRDGAVEAIRALMVAKRSARSERTQTINQARALIVTGPDDLRARFARHAPADLVAELASLRPRPGSMVRYHTLLSLRELGRRAQFLDGQLARLDELIVPLVTARAPGLLGLYGAGPDTAAILLVAAGDHPERLRSEAAWAHLCATAPLSASSGKVTRYRLNPGGDRQANHALYRIVITRLSSHPPTRAYADRRAKEGLSKKEIIRCLKRYVAREVYPHLRPPAG

SEQ ID NO: 243645 - protein, 354 aa, unidentified
MIIIGADYHPGFQQIAFADTDTGEFQERRLQHREEAEKFYRDLAAQGIQVRVGMEASGQARWFERLLSELHFELWIGDAAEIRTKRVRKQKTDRQDAQLILQLMLEDRFPKIWVPSWENRDLRQLLWHRHRMVQARTRIMNQLQAVALNEGLRCKKRLWREAGREQLESFALAPWASRRRRDLLALLDRLTPAIAELTQAIEQEAEKCPEARRLQTHPGVGALTGLAFVLIIGRAERFQCGKQIASYLGLVPLEDSSGQRRRLGHITKQGNSLLRFLLVEAAQVTVRSDPEWRSKYFHLAMRRGRKIAKVAMARKLAVRLYWMWRKGWDYEQMKKFGSHAGQPGNRDGVKSITE

SEQ ID NO: 243646 - protein, 482 aa, unidentified
MKKSSIYPNRSQELDALFEKAGNPLKLICVPIDYAKKDHLVMFCNGNGEVLRKPFSVKNSVGGVKYLLGQVTRSCRHRHIQSDHVFFGGEDVNSYAENFANTIRSKGWLVANVNAHDAKKQRENLQASTDRLDLMGIATMLLSRRANCCPAQTGVYRNLRTLVRHRKKLVKMKTEVRNRIHTIVDRLFPGFLNEKKSGILPFSNSSLYLMQERFSAPQIRRRQRSALIRNLEKRGTKKAEKAAARLQEYASQVLTTPDEYTATLQVSLTNHVTHYRCLFDGAQQLVNEMAQLLAQTQGAFLTSIKGIGIVLASGVAAEIGDPLVQRSTDQVASYAGIVPKVKQSGGSQGPSITSHVSKRSNHILKDFVVQSAFHIGRYGPKDLKDDYSRREAAGQHADFGIARRFVRMAMCMMRTSQIYLPPDMRSTHIKAERRADYYLAMWPYLRDKWSKAGTLNVAFAMDKPLGQWRYIVQEVYGKKLKM

SEQ ID NO: 243647 - protein, 345 aa, unidentified
MPIVGGLDIHRKQITFDYLDTMTGEVQRGQVRPADRVHLRGWLARFAGRDDVAFAVEGCAGWRYVAEELAAAGITAHLAEPADTAARRGRKRHAKTDKTDARHLRMLLAEGRLPECWIPPGHILECRALLELYSDLRRERTAWAQRIHAVLFHQGAPVLGEGALRTEQGVAGLRAAAAAHLSPAGQLQVATALEVIDALEARLHVVRHQMLDAARHLAGAKALAARLYGVGPVTALAITCWLAGAGRFSSSRQAVRFAGLDITVSSSDRKGPPGRLSRQGPPVLRWAVYEAGKAHARTSAPDHGYYAQVKDRKNSKRACLSEARKILRQAHHILAELGDDALAAA

SEQ ID NO: 243648 - protein, 432 aa, unidentified
MAETSELEWAAFAAIDWADQKHFWILVPTGSRQQETGELENTPEAVDAWAANLATRFDGRPVAVCLEQSRGSLVYMLTKHAHLVLFPVHPTTSARYRETFYPSGAKSDPSDTALLLELLVHHRDRLRPLRPDTTETRLLRLLVEHRRRMVDEKTRHSNRLTACLKLYFPQILRWFDDVDAPLVCALLERWPSLEQLRRANPSVLRKFFHEHNCRSEDLIQERIQAVYAATPATRDAAILEAESLTASQLVVILEGLRRNVAELDRRIAQVYGKHEEAFLYASLPGAGPALEPRLLVAMGTDRDRYQAAAALQCYSGIAPVTERSGHSQWVHFRWACPKYLRQTFHEYASHSIGYSEWARAYYDRQREAGKSHHAAVRSLAFKWIRVIFRCWKDHKPYDEQAYLRTLQRRASPLTGRKWEPAAGFQKLSANPS

SEQ ID NO: 243649 - protein, 319 aa, unidentified
MHCIGVDVSKQELVTFDGTRERVFPNTHGLSKFRRFLKRSEDVLVVFEPTSTYSRRLETLCRAQRVPCCSLNPRVVPHLRLVGKGRSKTDSSDAELLYRYGMERGHNEAVELKNDSLAESIQARLSCYRVAQKARVACQGVVEALSQDPATPRELLAELTEEIADLKAKEQHHLAAAEQLVGEDKQAAQRLMALLSIPGVGPITALTLLALFRKYSDANRRQIVALVGLDPIQFQSGTSVHGKSRISKRGNREVRKRLFEATLSAARYNPSIRSIYRRLKESGKPDKVARIAAARKLLLISHAIYESGESFRDPNQKEA

SEQ ID NO: 243650 - protein, 367 aa, unidentified
MKKISTAAVKQSRNISQQKLNIGLDLGDRNSWYCMVDESGQIQLEQRVGTNAKALREVFGEMPHSRIALEIGTHSPWISRLLSELGHEVIVANARKVRLIGESRKKDDRLDAQRLARLARIDPQLLYPVKHRSAQAQADLMTIRARAGLVRARTALVNTARGLAKSYGERLRGCNVRNMNPEKAESLSPELQAALEPLLNAIESLSERIVEYNDRIENLAQQSYPQVALLKQVKGVGTLIALTFLLTLEDPHRFRKSRDVGGYLGLQPGRRNSGQSEPQQHISKEGDPYLRTLLVQGAQHILGPFGVDCDLRRWGLKLAERGGKSGKKRAIVATARKLAVLLHHLWISGEVYEPLHNSSRLTVAAAA

SEQ ID NO: 243651 - protein, 354 aa, unidentified
MSQTPNTAIAVIGIDIGKNSFHVVGHDARGAIVLRQKWSRGQVEARLANIPPCLIGMEACVGAHHLSRKLASLGHDARLMPAKYVRPYSKGQKNDFNDAEAIAEAVQRPTMKFVATKTAEQLDLQALHRVRERLVSQRTGIINQIRAFMLERGIAVRQGIGFLRTELPTILATRTDTLSPRMLRVIEELAGDWRRLDQRIDGLSGEIEALARQDQACSRLMTVPGIGPIISSAMVAAIGTGDVFSKGRDFGAWLGLVPKQISTGDRTILGKISRRGNRYLRVLFVQAARVVLARIKHLERYGLKSWIEAAKKRLHPNVLAIALANKLARIAWAVLAKGRAFELTRTDDAGVRPA

SEQ ID NO: 243652 - protein, 429 aa, unidentified
MKKIRSHCAGIDIGAKRVFTNVEGEQVVSHLTFTEDFYKLRDYLLQHKVETVAMEATGVYWIILYEILEEAGIDVWLVDGRQTKQVPGRKTDVKDCQWICELHSFGLLNRCLVVDSDIKELRTYVRIREGHIESGSKHINQMQKALVVMNIRLKEVLSQIHGVSGMAIIEAILNGERNRDKLVSLCHINVLNKKKDLIYKALEGKYTEAGLFALQQAYDGYYFYQNQISECDKKISEVLNRIGNSGVGQDKKKRKPIRHNKPIIEKLDSNLLNLFDNNDATQISGITDYTWMQLLSEIGTDLTRWPSEKHFTSWLGLSPGQKNSGKKNRNARKKGKPRAGQIFKIIAQGLINSKNIAIGAFGRRLRGRKGPAIAIKAMARKLAEIYWRMMVKGVDYVEQGVKMYEKQIAANKLKILMKLANEFNLEISG

SEQ ID NO: 243653 - protein, 356 aa, unidentified
MNYNTQNAKIASITEKTLIVGIDVGSETHYARAFDWRNYEYSKKPFAFNNDEAGFASFKAWMEDIAEKHGKEVVIPGMEPTGHYWLNLGAYLQEQGMKPVHVNPHHVKKSKELDDNNPNKNDRKDPKTIAGLVNEGRFSYPYIPTGIYAEIRNLSNLRIQTQEELTRIKNRIARWFSIYFPEIKDVYKNPNAVSGMMVIKKVPLPCDIKELGVDGVNQVWRDAKLKGAGIKRARTLVSAAEHSIGNTEAPESARIEIRNLLNDYEVYKNRMDALLKEIEAKLSEIPYIDKLMEIKGIGLKTVSCFLAEVGDIRRFDHPKQLQKLAGYAIVADSSGKHNGESRISHRGRKRLRYGIA

SEQ ID NO: 243654 - protein, 412 aa, unidentified
MSYPLFIGIDVSSKENSVCCLSNDDEKHPLTRFSVSNNRPGIHQLKEKIDRITEKHAFDRLLFGLEHTGCYSTHVAMYLQQHLKFNCSNVTVYKFNPGMIKQFKKAHFLDAPKNDRVDAWYIAARLKSGLLPHPFTWNEPLLALQKLTRARYHLIQNLVRESNVLMSNLYLKCSDYNLAFNKTLSATSLAVMEEFQSAEELAETSLDKLIDFLILHGRNRISDPEIFAKQLRKAAHSSYRLPKAMADSVNLAMASNIRVIRTLQEQIKSLQKAIQDHLGTIPQTLDSIPGIGPTFASGIISEIGDINKFNSHKQLAKFAGLAWTENQSGDFTAKRTRLINSGNRFLRYYLIEAANSVKVRDPVFADYYAKKSAEPKEFAHKRSLALTARKLVRLVYTLLKTNQLYQPKGEYR

SEQ ID NO: 243655 - protein, 381 aa, unidentified
MQVVYERCCGLDIHQKTVVGCRLLTQQQGTIEKAIRTFATTTSGLIELDHWLTEGQVEQVALESTGIYWRPIFNLLEGRYKILLVNAQHMHAIPGHKTDVKDSEWIADLLRHGLLKASFIPSKPIRELRDLVRTQTHLTQERSRYINRIHKILETANIKLGSVVSDVVGKSARQMLEALIAGESDSVELAKLARGRMRPKIALLQQALQGHVEPHHRFLLKETLAHLDFLQQRVGQLEQEVTERLSPFEESIALLMTIPAISRRSATILLSELGTDMAAFPSAAHLASWVGLCPGSHLSAGKRRSGKPTKGNTYLRSVLTQIAWILTRMRDNYLSAQFHHLRPRLGSKKAVIAVAHSVLVIVYHVLAKAEPYQELGADYFR

SEQ ID NO: 243656 - protein, 367 aa, unidentified
MKKVSTAAVKRMRNFTQHKLTIGLDLGDRSSCYCALDEAGGIVMEQKLSTTVKALQSVFGAMPHSRIALETGMHSPWVSRLLSGLGHEVIVAHARNVRLIGESRRKDDRLDAQTLARLARIDPQLLCPVKHRSAKAQADLTVIRARAGVVRARTALVNTARGLAKSYGERLRGCNVRNMNPEKAEGLSPELQSALQPLLVGIESLSEQIREYNERIEKLAQSSYSQVALLKQIKGVGTLIALTFLLTLEDAHRFRKSRDVGCYLGLQPGRRNSGQSEPQMHISKEGDPYLRTLLVQGAQHILGPFGTDCDLRRWGLKLAERGGKNGKKRAIIATARKLAVLLHRLWVSGEVYEPLRNSNRMAMPAAA

SEQ ID NO: 243657 - protein, 321 aa, unidentified
MVDAGLGALIAEERVEANRGGYRRALKLASGCGRRRLWAVEGSGSYGAGLARFLQQQGERVLELERPVRGGSRGRAKSDALDALRAARAALAGEPLAELRCGGKREALRVLLVSREASVAVRRSGLNQLRALVLTAPAELRERLQGLPKRALVKRCVALRPRSGQPPPLRGTLLALRSCGRQVELASREAALLERELAVLVEQLSPQLLSHYGVGPITAAQLLVSWSHPGRLRSEAAFARLAGAAPIPCSSGKTIRHRLDRGGDRQLNRALHTIVLARRRGDQRTIAYIHRRTSEGKTEREAIRSLKRYTARSLYRLLEHA

SEQ ID NO: 243658 - protein, 408 aa, unidentified
MTVVGIDVSKGKSMVAAMKPGGELVAAPYEVRHSDIELSHLALDVLCMEPDTRVVMEATGRYHEPVAAQLHSEGIFVSILNPLLIKQSGAGSLRKVKSDPKDALKIAKYGLDNWSTLREYTPMEAIRQQLKLCARQCDLYSKNIVMLTNNLISLSDKTFPGVNELFSSPEKADGHLKWVDFYRTFWHCDCINRMSPDAFEERYKKWCKRKGYHFSTDAADALYAASCGSYTTLPRDNNAKLLVTVAADQLIALRENQSKLETEMLNLCKQLPEYETVMAMYGVGKSTGPHLMAELGDVRRFPHRSSIVAFAGVDPGVVGSGKMQLSSVATSKRGSPQLRKALFQVVSTYVKCKPENEAVYQFYTKKRDEGKPFFVCTTAAANKFLRIYYARVKECLNAAESATQVEEG

SEQ ID NO: 243659 - protein, 355 aa, unidentified
MNSEKYIGLDVHQATISVAVLDSTGKLVMESILETKAATILEFFAGLRGTLSVTFEEGTWAAWLYDLLKPHVAKLVVCNPRKNALLKDGNKSDRIDAHKLAELLYLNKLSSVYHGETGVRMLRELARSYLTIVKDLTRVMCRLKAVYRSWAIPCAGRDIYYTRHRSEWLGKIKEAGVRRRAERLYQQLDMLQYLRQQARRELLAESRKHAITVKLRQIPSLGPIRSALAVALIQTPHRFRTKRQLWAYSGLALETRTSAEYCYVKGGLRRSKKQISIRGLNKDHNHDLKGLFKGAATRASVLPGPFQDFYQRSLAKGIKPTMARLTLARKIAAITLTLWKKGENFDADKLKSQAA

SEQ ID NO: 243660 - protein, 339 aa, unidentified
MVLYGGMDLHGDNVFCTLMDQEYRPVFERRLPNDLAVVLEALEPYRERLASVAVESTYNWYWLVDGLQAHQYPARLANPARMQENIGLKSANDKSDARFLAKQLAMGVLPEGYIYPKEDRSVRDLLRRRMRLVHMRTGEWLSLEGQVARHSGKDLGIQALNGLEEGALSALLGNDALALVAAQINYRHIAFLDREVRLIEKAVEPRVKLTSGYERLLGVPGIGRILTMTIMLETGPITRFPGPGNYASYSRAVKTEHTSNERKKGEGNGKSGNRYLAWAYIEAANFAVRYSPELRAWYQRKAARTKRVVALKALANKLAKACYFILRDGVEFDVKKLVG

SEQ ID NO: 243661 - protein, 329 aa, unidentified
MEIAILGIDLGKNSCSVVGLDSNGKVSVRRRMRRETVIAFCSKLSSCVVAMEACCGAHHMGRALASQGHVVRLMSPEYVRPYVKAQKNDDRDAEAIAEAATRPTMRFVQLKSEEQLDTQTLHRVRDQLVGGRTCLINQIRSLLLERGHVIPQGRAKLTASLALLLDDEADGLSPRIRALVLDMRERWGALDKRIKEFDVEFAELARGDALAKRLLTIPGIGPLNASALVAAIGDARTFARGRNLAAWLGLVPRQATTGGKPKLLGITKRGSKYLRKMLIQGARAAMPSLSKSNTSVGAWLRGLLARSHNNVAVVALAADKEAIPGVCVW

SEQ ID NO: 243662 - protein, 385 aa, unidentified
MTATTRNFDPTALRNTLCLSFELGEGTWKLTFSPGFGETVVRRTVTSRDREAVLHTITAMKDHFGLPSEARVVSCYEAGREGFWLHRFLEAHGVENLVVDSSSIEVSRRRRRAKTDRLDGESLLDLLFRHLAGSRKKVWSVVRVPTVEQEDRRHLHRELQSARRDRTRVTNRMKGLLANHGLTLNLKKGVAEQLAALRQWDGSPLPTALRARLAREWERVEFYTGLIEHLEGERRMLLRTGKDPAIEKIRQLNALRGIGTNSAWLYVMELFAWREFRNRREVGAIVGLTPTPDESGKKEREQGMSKAGNRHVRSMAIEIAWGWLRFQPESELSKWYQRRFGGGSKRVRKIGIVALARKLLIELWRFLETGVLPEGAQLKTDVRIR

SEQ ID NO: 243663 - protein, 333 aa, unidentified
MNKIINYVGIDMAKASFMAAFNETDEPWQFENINHGINSFFNHLKQLGFNQAETILGVESTGSYHLKLSVACQSNSYQIKVINPLIVKKYNQTTLRRVKNDRKDALLIRYCLSQGYGYPFNTTQDEFILKALIRQRNSLTNTKIQIHRQDQDIQLKQSAIKTKINSIYKDIEKTIDKKIKTIEKQLKDFDQPVQALLKTIPGVGPITAASFVSEITNIQRFKQPKHLTAYIGIDPRVYQSGESIKGKGYITKRGNKILRTILFNAASVAVLHNNMFQRFFQKKRSEGKPYRVALVATMRKMAHVIHAVWSNNSPYQDNYRQYYLSTQEGLTGI

SEQ ID NO: 243664 - protein, 342 aa, unidentified
MQVTTIGLDIAKNVFQVHGIDAGEKVVVRKQLRRSQVLAFFKALSPCLIGMEACATAHYWARELRKLGHEVRLMPAKDVKAYVKRNKNDAADAEAICEAVRRPTMRFVRAKSAEQQGQLMQHRTRDLLMRQRTQLINALRSHMAELGIVAAQGREGIKQLLTIVASERDARLPVDAHASLVVLAAGLQAVQTMIGSIERRIIIQHRSNEASKRLKTIPGIGIVGATAIVATVPDPRAFRSGRDFAAWIGLVPRQDSTGGKQKLGPISKPGDQYLRRILVVGAHAVLKRARQQPEKYLWLTRLLARKPFRVVAVALANKMARIAWALLAKGGTYRPPALAAPA

SEQ ID NO: 243665 - protein, 448 aa, unidentified
MSKIKTKNETVKRISQLTVINPTVAGIDVSDKEMMVAYPIGSEQLEVRSFGCFTSDLHTIAKTLKKFQITSVAMESTGVYWIPLFLLLQEYGFEVYLVNAKHVKNVTGRKDDESDAEWIQKLHSCGLLKASFQPDNMTRTLRSMVRHRKSMVSTSSTYLNRMQKALELMNIKLHTVISDIDGKTGLLIIEAILAGERNQEVLADLRDRRIKASREDIIKSLEGHWTTEHLFELRQCYQLYCTHREMIDECDKEIEKQLIEQIASKNEGVIPDIPKAKRKVSGKHKVPFNLTSYLKEILGVDVTEVFGISELSALTIFSEVGTDMSKWKNEHHFTSWLGLAPNTKISGGKVISSRIKKKKHHAGQAFRMAANGLYNSKSPLGDFYRRIRAKAGAGKAVVATARKLAIIFYKMVANKEAFNPLALENFQEKYKQKKINQLKRKLEILEAA

SEQ ID NO: 243666 - protein, 465 aa, unidentified
MQEHSKPQMADPGQTAAFKALHTASIGIDVHSNMLVASFQRCELGSRKLEIHEARVEPTTPRNLAEFARKCAEFKPGVIVMESTGVYWLSLYLKLEEAGFASHQIRVLNARDFKPVRGKKTDQGDAERLGELGRIGVAGQSFIPSREFRELRLLERNMLRIKADAKAAVQRVHKCMASLGCRASAVFSDIRGQAARRIIHALVHDNLQGEELLDFVRRNRGGLRHTPEEICEALEADMQSPAWDAVRACMRLADCAEAERQRAYARIKELLAPWSEWLALLQTIPGIKEAAAVQILCEIGPDLKPFASVRRFASWAGVAPGNNESAGRRTSGRITKGNKYLRTTLVEVANAISLMKGKGGRLAQHFQAMKERRGHLRAIMATAHKILRIIFAMFRDMAPYRDEPDCQILRQHRVERLRAAAEGVAEVNLEIDGSGKEIRITEESGRTYSTVTVKAKRRKFADLTI

SEQ ID NO: 243667 - protein, 378 aa, unidentified
MEGLATHLPLVRTDRHPERFPVHQPTSIRNLAAPEGDRRFGRKLTLVGVHPDRSTLSLEEVSMQTIVDLGADVDSRYIVIACAARSFAPYRIDNERQAILNWLRSVPRGSRLGMESTGGYHELLAELACQAGLQVFVINPYDLRRYAQGIGRRGKTDRIDAEVIARYIAREHAELHLYIVPSKEQRALARLIKRRAKLVVIKGMLIQSLRGLPALQLPLKQVIVRLERLIVHVELLMQRAVQQLPAAHQAAQHIARIPGFGILSATCLGYSFTRLPYSSSDAVIAQTGFDPRPDDSGTRRGRRRLSKRGPAEQRRLLFNCARSAARTKLWHPYYRAQIAKGLSATAATVILARKMVRVAFAVYKHNLPFDPARLAAHA

SEQ ID NO: 243668 - protein, 422 aa, unidentified
MNFGPVVGIDVSKRFSDMCILSPDNQIFAQTKIYHDSTSMKRAEALLKKATEAFGGRPAVVMEATSHYHLILFQFFSDCGYDVLVVNPLQSSSMKDFSIRKRKTDKVDALKLAMLYRTKTLRPSQIPQSAIRALRLLCRERVELLNDVTRYKNRLTAFLDQIFPGYDKVFSDVGSITSRAVLSHFPTPAILLASDEYELVEVIATASKSGYKFAKKKAEALIKTAETAKVLGIHTCADESMILSVIPMLNTLSDRVAYLEQSIENLLAQVKTIRKNVELLQTIPGVGPHSASLIMAEIGDISLFKKPKQLATYFGLDPSERQSGTFRGTKNKLSKRGSPYARAALHMAVVNAVFKHANAPAANPVLSSYYEKKCKTKPAKVALAASMHKLIFIIFAVLRDQKPFELRTPEQHAREQGFIKAA

SEQ ID NO: 243669 - protein, 409 aa, unidentified
MSATHQTNCTTESAVLYVALEMGMVNWKVCSTVAVGQKPRCKTVPARRMDLVLAEIARAKKRFRLSEDTPVEVCYEAGRDGFWPYRWLTRQGLNTVLVDSSSIEVNRRNRRAKTDRLDGEKLVIMLVRYHQGEKRLWSVVQVPSLEVEDTRQLHRELKELCRERTEHTNRIKGLLIGMGIDVQGIGSTFPEKLAELRLWWDSQTDASGAPLPDHLRERLRREYERLALVERQIDELEEHRCAAIGQGDSVNIEKVRQLLNLHGIGPVGSWILVMEFFAWRTFRNGRAVGSLAGLAPMPYDSGSSERSQGISKAGNPLIRALMVQLAWGWLRLQPRSTLSRWYRQRFGSGSKRQRKIGIVALSRKLIVALWRYLETGVPPEGAVLTDWRNKIPKRYQKEPAAKSGTTQAA

SEQ ID NO: 243670 - protein, 378 aa, unidentified
MKRILKIGMDVHTTNYTLCAMEPIIGEDDRVFATIKVTPDYKNILMFIENLKLKLGLNDEYDIQCGYEAGCLGYSLYNQLTAAGIKCVILAPTTMLTPQGVRIKTDMRDAYMIAQCLSYGGYHAVYIPTEDDDSVKEYLRMRNDHKLALKKIKQQINAFCIRHGFCYDGTKWTLSHLKWLKKLEITNGLYRETLDEYMASYEEQEAKIERYDKRIGEIAEQTRYHDKIKKLGCFLGIKTHTALSLIVETGDFERFAKGNQYASYLGLAPGENSSSDNIHRLGITKAGNSHLRQLLIEASGGICKGAVGHKSKELRARQNGNTAEVIAYADKANTRLRSRYYKFIRHGKKRNVAVAAIARELACFVWGMMTDNIEMKAA

SEQ ID NO: 243671 - protein, 342 aa, unidentified
MEYYVGLDVSLKQTSICVVDQTGSVVREGVVDSDPEAISVYVRSKAPDAVRIGLETGPTSTWLWTELKQLGLPVICIDARHAKAVLKMQINKSDRNDAIGIARIMQTGWFKEVHVKDIESHSVRALLASRALLVKIKRDLENHVRGLLKNLGLVIGRAKFNVFAVRAEELIEGRPELVAAIRPLLEARNAVGQQVSELDRKVMKLARHDAQVRRFMTAPGIGPITALAFKATIDDPARFARSRSVGAYVGLTSRRHASGEVDWSGRISKCGDAMLRSYLFEAAGVLLTRVPKWSAVKAWGVRLAKRNGLRKAKVAVARKLAVILHRMWIDGTEFNWSKEITA

SEQ ID NO: 243672 - protein, 362 aa, unidentified
MNKMIWLGLDVHADSIAIAKYVGSEAKGEIWEMPNDPKKIRRKMTELRKEGEIRCAYEAGPCGYELYRQLTEMGIDCAVIAPALIPRKPGERIKTDRRDADKIARMHRVGELTLVTAPTLEQEAARDLLRARDDIRRDRNAARHRLSKFLLRRGRRYAAFRWGPKHWAWLRKQDFPEVDRIVFEHYCTHVRHIDDRRQEIDQAIGELAESPAFAERVARLTCLRGVSTLVAMTVLTELYDLRRFEHPRDLMAYIGLVPSEHSSGRKRRLGAITKTGNAHVRRVLIEAAWSYRYGPDVGPRVRKALRAQPPEVRRIARKALVRLSKRYKRLTARGMRTQLATVAVARELCGFLWSLEHLPDSA

SEQ ID NO: 243673 - protein, 435 aa, unidentified
MDEVTDEPLYRNRVCGIDIGKAQMVATIRVPSDRDPARRSAETRTFATTKRGVLALADWCRSWQVPAVVMEATSDYWKGPFYRLEAEGFECVLADAKQVKNLPGRPKRDPADSRWLAACFERGAVTSCFVATPEFRIIRLHTRYRRDLIEERTRDKQRAEKLLESAAIKLSSVVSDLHGVTGRDIMDHLIAGERNPKVLAQLARAAARRKIAELEEALEGAEFFTAEHAGLLAAMLERIDRVTADIARLSEVIEQLLTPYEEQLAQAESMPGWRRRSAEDAIAETGVDMTRFPTGAHLASWGSRAPLDHQSGARKGRARSKKGNRYLAGVLGETAVAAGRTQTREGARYRRLARRLGKPKAQVAVGNTQLKVLHKLLSNPGMRHEDLGPDYYERRASLRRQIHHHVTHLESLGFEVTLCRAPDPQPGPAGQAHAV

SEQ ID NO: 243674 - protein, 348 aa, unidentified
MLIIGCDYHPGFQQIALVDTETGEADERRLTHREEAEQFYRTLKTRKVRIGMEASGHARWFERLLIELQFELWIGDAAEIRTKRVRKQKTDRQDAQLLLKLLMEDRFPRIWVPDAENRDLRQLLWHRHRLVQMRTRVMNQLHVVALNEGVRRKKALWRPAGRSELESLVLAPWALRRRRDLLDIFDQLTPKIHDLTRALEEEVENRPIARRLMTHPGVGVLTALAFELVIGTPERFGCGKQIASYVGLVPTEESSGDRRRLGHISKQGNALLRFLLVEAAQVTMRSQPQWRSKFFHLAMRRGRKIAKVAMARKLAVHLYWMWRQGLDYGQFEKLGSHAGEPGNRHGVQ

SEQ ID NO: 243675 - protein, 364 aa, unidentified
MKKTIWLGLDVHARSIVIARLDGAAEKAILSELPNDPKHVRRAFEKLRKEGTLRCAYEAGPTGFELARQLHAMGIDCAVVAPSLVPQRPGDRVKTDRRDATKLARFLRAGELTAIFVPDEAQEAVRDLLRARDDLRKDRVAARHRLTKFLLRHGRRFVGGVNWTHKFWAWVRTQRFEQPAATRAFEHYVARVQEIDARMDNLEREIAALAQTPEYRQRVERLATLRGISTLSAMVLLTELGDLRRFEHPRQLMAYVGLVPSEHSTGGSAGARRQGGITKTGNAHVRRILVEAAWAYRHRPSITTRQTRAIAEQPPDVADLARRSTLRLGKRYARLVSRGKKHQVAVTAIARELCGFIWALERTA

SEQ ID NO: 243676 - protein, 391 aa, unidentified
MFLLGIDIAKLNHVASCIDSSTNEIVFSNFKFKNDFKGFSALLNKIKSFDAKNLIIGLESTSHYGENLINFLFKQHFKVALINPLQTSHLRKANIRDAKNDNLDSLNIAKSLIFAKLNFISEKNINCFSLKKLTRFRSSLIKQRSKAKIQLTSLLDLLFPELQYLFKSKIHSKAIYSLLKKYPSAEEIAALKDDEISNLLYASSKGHFKKEKSIELKSLAKTTVGIKDTSISLHVIQLIELIELYDKQIKDIVTKIADTVDKLDTKLLSVPGISIIACAIILGETNNFNNFSNSTKLLAFAGLDPKIRQSGNFNASSCRMSKKGSPYLRYALIFTAWNIVRHSEKFNKYYCLKRSQGKSHYNSLGHVAHKLVRVIFTLIKKNIVYQEENLE

SEQ ID NO: 243677 - protein, 340 aa, unidentified
MGEITTVGLDLAKHVFQVHGVDAEGATVLRKQLSRAQVLGFFGKLPRCLVGLEACATAHYWARQLRALGHEVRLMPAQYVKAYVKRNKNDAADAEAICEAVVRPTMRFVPVKTADQQAAVLLHRGRERLVRQRTMLVNALRAHLAEFGVIAPQGLRNVGKLIAIVRDEDDARLPDLARQVLAVLALQIEQVEVAVAALEKQLMAWHKANPVSQRLATIPGIGPIIATAIAAMVAEPSGFRSGREFAAWLGLVPRQNSTGGKTRLGGISKRGNQYLRRLLINGASANLLRSKATNADPWVIGLRRRRPSMVVAVALANKTARIAWAVMHRQENYQRTALAA

SEQ ID NO: 243678 - protein, 345 aa, unidentified
MTNLPPNTTAESVHRLFAGVDVGADELMLVIRKNGKPFDPQKYANTRTDRTRLVNKLIKLPGIKVCLEATGIYHFDLAIALHDAGIPVMVINPKASHNFAKVLMRNSKTDAVDANTLAEYVERMDFVAWIRPSNQVLALRGFARRINALTGQKAAAKNHLHALSATQETPKALLRDAKLAISQLEKRIDTLADEAMDLIDQHPELQRIFDLLTGIKGIAQTSAVALMGELLLLPPNLTHREWVKFAGLDPKAFESGKSVHKKMRLSKAGNRHIRSALYMPALSAKQHDPHVRAYFQHLIDNGKKPLQAVCAVMRKLLHAIHGMLKHDQPFDNTRFYAIPLPIIAE

SEQ ID NO: 243679 - protein, 439 aa, unidentified
MILIREVADAPVIMGISKPAGLKSPCGEVKIVNPLFVGIDVSSKANVAYLMKPDGNKHSSFSVQNNLGGAKLLSEKIVSALHSMQLNDVVIGLEATSIYGDSLVYALREDGSLGRFQRKIHVLNPKQVRKFKESYPDLPKNDWVDAFVIADHLRFGRIAKEVYMDDYRYQALKTLTRARFDIIQNLTREKQRFANYLFLKCSGIAQDKDIQNTSATTIALMEHFETVDDLANADLDELTVFISETGRGRFVNPDATAKAVQAAARGSYRLPKTVNDTVNQAMSVSIASMRALKEQVKVLDKAIEQQFEIIPNTLTSIPGIGKVYSAGIIAEIGDIHRFNSQASVAKFAGLVWHKNQSGDFEAEHSQMIKSGNRYLRYYLLEAANSVRRCDSEFRRYYDLKFKEVNKYQHKRALALTARKLVRLVFRLLKDNRLYIPPVG

SEQ ID NO: 243680 - protein, 326 aa, unidentified
MPSMTQQSQPCHNTADQDEQVLLGVDTHKDVHVAAVITSTGLLLDTRGFPTTREGYRQLLCWARAFGQLQRAGVECTGSYGAALTRCLHHEGVTVTEVNQPDKAARRRHGKSDSIDAAAAARAVLSGRATATAKTTDGPVETVRLFKMAKSSAVKCRSMAINQLKAVLVAAEPTLRESLAGLSNPKLIRRCSQLRPASGTGPQAASRHTLRLLARRILHFTEEINDLTARISTAIDACAPKLLELYGIGPDTAAALLTAAGDNPDRLASEASFAALCGASPVEASSGKTQRRRLNRGGDRQANSALYTIVIARLRWDTRTRSYVER

SEQ ID NO: 243681 - protein, 421 aa, unidentified
MRVLYERCAAIDVHKDQVTVAVRTPGPGPSGRVTQVRKFRAFYGVLAEMTRWLTSAGVTHVAMEATGMYTMPVFHALAEHGAFEQVLVCNAAHVKNVPGRKTDASDASWLAELLECGLLRGSFIPDRDVKAVRDIMRYRRKLVQQRSSETQRLGGVLQDAGIKLDSVASSIDTVSGMAMIRALIDGERRGPVLADLAIGRMRSKAADLALALEGRFDDHHALMCTLHLDHIASLNEMIARLDAQVQAMMIPFAAARDLLDTIPGIGPVAAAAIIAEIGAAPAEHFPDAGHLASWAGLCPGNHESAGKRKTGKPRKGSQHLQPILVEAAWSAVRADGRLKARYHRLVLRFGGYRNPVAKKKAIVAVAHTMTVIIWHVLAAGTPYADLGADFYDRRADPQREARRLIARLEALGHNVTLAPAA

SEQ ID NO: 243682 - protein, 417 aa, unidentified
MEVLYPRCAGLDVHQANVVACVRIANDARASHEVCTFETTTKGLLALGDWLREAQCTHVAMESTGVYWKPVWHVLEGEFELVLANATHIRNVPGRKTDVSDATWIADLLAHGLIRASFVPPAQVQELRDLTRTRKQLVRELARHTQRIQKTLEDANIKIVGLISDILGTSGQAFLQAIIAGEDDPHKLADLARTRLKAQREKIVEALRGRVQAHHRFMLKLHLDQIHSLEKAIAEIEQRLGERLEPFREEVRLLVTIPGISQIAAHVIASEMGLDMTRFANANSLVSWAGLCPRSDESAGKRRSTRIRDGAPWLKTTLIQAAWAAVRTKNSYLRSMFHRLKARRGAMKAIVAVAAAMLRSAYYMLTRHMPYQDLGPSYFEKKTRTRTANRLLKRLKDLGIEVLQTRITEPSVMSVSL

SEQ ID NO: 243683 - protein, 343 aa, unidentified
MDHFVGLDVSVKETSVCIVDEVGKIVREVKVASEPEALLAVLKKPAYRFKRIGLEAGPLSQWLFGALAEAELPVVCVETRHMQVVLKAQINKTDRNDARGIAQMIRAGLYRPVHVKTLRSQKLRMLLTHRKLLQSKAIAIENDLRGTLRNFGLKVGIAGTVKFEARIRELVQNLPDLAALVEPLLIVRRVLHEQISVLHRRLLAIVRDDAVCRRLMTIPGVGPVVALTYRATIDVPARFKNSKAVGAVIGLTPSKYQSGEINRTGAISKCGDEMMRVMLYEAAQVMLTRTNKWSWLKAWAMKIARQRGMKKAIVALARRLAVIMHRIWVDGTEFRWTRKVVAA

SEQ ID NO: 243684 - protein, 326 aa, unidentified
MNIIGIDVSKTKLDCLWLKDAVTGKAKSKVFPNTEKGYQALNVWIEKQIQQPIGVSHVVVEATGIYHENLAYALFKSGVQVSIINPAQINNYAKSLGTRSKTDKKDSMVIARYGATQRPRLWQPEPDEIRILKALIARLEALEQDIGREENRLEKVQIACASDEVTTSIKTVLAQLKKEKQRLESLIDQHIDQNPGLKKDRQLLESIPGVGPVISRYMMAIIRSREFVSAPQCAAYLGLVPIAHESGSSIRGRARLSKAGNAKVRAKLYMAAVVSIQYNPAIKIQYERLLKNGKVKMSALCAAMRKLVHICFGVLKHQQPYQTQTL

SEQ ID NO: 243685 - protein, 316 aa, unidentified
MLAPNPVAGVDVGKSFLDLDFDPAAKALRVRNDAPGIAALIEAMRRRGASRVALEAIGPYAWPLTAALVANGFEVGLADPRQVRAFRTAEGRIAKTDRLDAGLITRFADRMRDAFRPLPDADQIALKALSTRRRQLTEMIAMEKTRLKQALDPLVSESHKATILALAEACRRIEDEIESRIAKDEQRAKNRRILLTIPGIGARVAQVLLTELPELGRSDRKAIASLAGLAPHVSQSGQAPPRAAIAGGRPCVRTALYMSALVAARHDPNLRAHYQTMRAAGKPAKVALVAIARRILVTANALIRQQAQYKPDPNLA

SEQ ID NO: 243686 - protein, 362 aa, unidentified
MGRKKTSPISKPAGTLTVGIDLGDKYSYYSVLDQAGEIVEEGRIRTTPDAFRVHFGSCEAMRIAIETGTHSTWVNELLLSVGHEVFVANTRDIPSISESNSKSDPNDAEKLARLARLDPKLLHPIQHRSLEAQGDLTLLRARAKLVDVRTTFINTVRSTVKCLGHRLPKCDADSFHKQCKDGIPACVEQILTPLLNLIEQVSKQIFSYDKSVEDLCRTKYPQTATLRSVPGVGPITSLTFVLTIADKDRFTRSRDLGSYLGLRPKRAQSGERDPQLRITKAGDTYMRKILIQSAQYILGPFSPDSALRRWGLTLASRGGASAKRRAIVAVARKLAVLLHRIWVTGQRFRPFPELPVAADINA

SEQ ID NO: 243687 - protein, 340 aa, unidentified
MTPVCRIGLDTAKNVFQVHALDGSGREVATRRLRRTQVLEWFARLDRAPDCVVGLEATGGSHYWARELGRLGYRVRLLNPKAVKPYRQGQKTDARDAAAIAEAVAREVVSEAPIKSEEQQALLARQSYRRRLVERRTALGNQLRGLLAEFGIAVPQGFKRLKQRLAQAMEEADNGLPTDLRAVLADGADELRELDRRIDAQDREIARQAHADERCRRLMELDGIGALTALRLVAICGDGLAWRNGRGFAVSVGVTPRQHSSGEHVRLGAITKQGDVELRTLLIHGARSTLRRGEALDAWTERLRRRRPHNVAAVALAHKRARIAWAMLAHGTRYQPPMAP

SEQ ID NO: 243688 - protein, 339 aa, unidentified
MSTNSNALSPAGVGTPAYAGTPAYAGIDVSKGTLDLARSGTDAVDSFPNDAAGIARIVELLVGLAPAAVVIESTGGLERPLVQALLEAELPVALVNPKRVRYFAKGLGILAKTDRIDAGVLRRFGELAAPRLLEKRSKNQAELRDLVVCRRQLCRTRAQQYNRRGTTASKAALRSIDAVVEALDKQIGSLDRQVRRLLDADDEFKHLDGLLRSVPGVGPALSATIAAELGELGHADRQRVCALAGVAPFADDSGTLRGKRSIRGGRTAVRCVLYMATLSAMRFNPVINAFAARLKAAGKLGKVVVTACMRKLLTLINAMVRDGLRWEQLDVVKKLAPTG

SEQ ID NO: 243689 - protein, 356 aa, unidentified
MGQKWLMHYSQFKTKRMKKQTCFFLGIDVSKPWFDISMMAVVNFQKQQMITERFDNTNEGLALLKKWLKEQKVKFDNDTLLVIENTGIYHRLLWKFFSENNIPIHIGNAAHIKKSFGIARGKNDKIDSQRLCSYAYKNDDELKATPTLNSVFLTIKDLITSRTRLKAQLGANRTYLKELKNINDQATQKMMEKVYKMVITGLKKSIDEIEKQITVIIKSNPSISDNHNLLLSVPGIGPVTATYILCCTNNFAGKVSGKQLACYAGVVPFRDTSGTSLKGRNKVHKMANKELKSLLHMCALSAIQHYQEFRNYYDRKVTEGKHANCVLNAICNKIILRAAAVVTNRKDYVENYKKAA

SEQ ID NO: 243690 - protein, 312 aa, unidentified
MYHMKEELVYVGVDIAKAYLDAAIGNEKRRFANDTLGHRQLINWIKQMPASVQVICEPSGGYERALVRALVAAQLKISLVPANRVRQFARAAGILAKTDRMDAKVLCAFGEAMQPGTISASQLEQEHLRELESQRRHLTHLLVMEQNRAVRMSDLWVCKLNRRLITQIKKQIEQVDLLIQRQIKASRELSSKAEKLTAISGVGARTAALLLAQMPELGQLNRREVAALLGVAPFNRDSGRMRGKRAIYGGRRSVRHGLYMAALVAARHNPILRAFYLRLRAAGKPAKVALTATMRKLLIVLNSSLKPDLTYA

SEQ ID NO: 243691 - protein, 455 aa, unidentified
MKKKSEKNSVVKMGTGLPVFNPHAAGIDIGDTMHCVAISDGTGGHEVKTTSAFTCDLHEIVDYMKINGITTAAMESTGVYWLALYLLLEEAGIEPYLVNASHVKNVTGRKKDDTDAIWIQKLHTCGLLQKSFQPESEIRLLRDYARQRKKLISLSSDAVRRMQKALELMNLKIHTVISDILGKTGMRMVKAILAGERDPAILSELRDPRIKASREDIIKSLEGIWREEYLFMLEQAVENYEFHQGQIKSCEEKIQAQLLKQVAIVNHGDITCLEDNSKKKKKAKPKGKKNQFDFSVSPYLKAITGVDLCQIPGISDVTALEFISEVGADMSKWKSAKHFAAWLNLTPNTKITGGKVFSSKLMKKRNKAGQYLRQAASTLSTNKTPIGDYHRRMKGKLGGRGATLNTAHKLARIIYTMLLNKTEYNVMMVNENHENYKQDKIMKLEKQLERLRKAA

SEQ ID NO: 243692 - protein, 328 aa, unidentified
MVYLGIDVSKLKLDCALLIDPDKLKCKNKKVANTSEGVRSLIQWCAKQGVAVGQLHVVMEATGRYHETCAQALYDAGATVSIVNPAQVRDFAKAMAQRGKTDALDSLALARFGLAMQPEPWQAPALHARQLQALLTRRDSVAKDLQRETNRQEKALSAQTPELVLQSLEQTISFLTQELKRLERAIDEHIDRHPDLKDDERLLTSIPGVGPRTGRTMLAVMHNHRFSSAQGLAAYLGLVPVPRQSGNSILGRSRLAKNGPGSVRAMLYLAAMAAIRYNPHIQALYTRLQANGKSRMSAIGAAMRKLVHLCFGVLKTRREYQPNYALSA

SEQ ID NO: 243693 - protein, 337 aa, unidentified
MTQKQTLAASVESPPVLGIDVSKLTLDTCLLHQGKARHHRFTNTDEGIEELLEMLATCGTSQALVAMEATGSYSLAVATASAAAGHLVAVINPRRVLDYARACERRNKTDRVDAALLARFASKEPLPLWRPLPAEQSLLRDLLRRQSDLEAQLLAEERRLDAAAAAKPLRQSLERSIAWLGAELKRLEKSLQQHLQMSQSLATHIEHLQTVPGFGEKSARLLAAEIPRHFANARAVSAWLRVVPQQCQSGISVRKPSRIGHAATSLRHKLYFAAITAMRCEARFKAFAQRLRAKGHSKMSIIMAVLHKLVRTAFAILKTGLPYQPDHVVTLASGCSP

SEQ ID NO: 243694 - protein, 356 aa, unidentified
MVHIPKAKSTAIATLGVDIGKNTFHLVGLDKRGAIVLRERLSRAQIEVRLANLAPCLVGMEACVGAHHLGRRVEALGHDVRLMAAKYVRPFCRKQKNDFNDAQAIAEAVTRPTVRHVALKTPEQLDLQALHRVRQRLISQRTGVINQIRAFLLERGLAIRQGWHALRAELPRALSMTDRLTPRMLHIVEDLAGDWRRLDERIEAVSTEIAELAHADEGAVRLMSVPGIGPIISSATVAGIGKGDVFEKGRDFAAWLGLVPKQTSTGGRPILGRISKRGNRYLRQLFVQASRVVLLRPQTWERYGLKHWIDAAAQRLHYNKLAVALANKLARIAWGVLHSGRTFETRRENGHAPQPT

SEQ ID NO: 243695 - protein, 412 aa, unidentified
MRRVIGMDIHRTFGEVVFWEDGRLRHAGRVDMTRTALEGFGKKSLCVTDEIVIEATGNAMAVSRVLSPFVKRVIIANPLQVKAIAYAHVKTDKVDAGTLASLHAAGYLPEIWTPDAETERMRRLVARRYQVVRHRTRIKNEVHAILHAHLIPKCPHADLFNRRGRDWLSRQPLPEDEQDAIRRHVTELDRLGEDLALIERDIARSVLDDEAIKRLMTITGVNLTVAAGLMAAIGDICRFKSPQKLVSYFGLNPRVRQSGLGAAHHGRISKVGRSHARAMLVEAAWAAAKTPGPLHAFFVRIRARRGHQVAAVAVARKLAVLCWHMLTKEQDYLWVRPALVANKLRAMELQAGEPQKKGNKRGAAYAYNIKALRDQEMAIARQAEQGYERSVERWKTRPPRDQGARTPQSGKT

SEQ ID NO: 243696 - protein, 343 aa, unidentified
MSGAYEGKQIVGMDLHRRRSVVVRMTDTGERLETVRISNDPDYLRAVMARAGDAPEVVLEATYGWYWAADTLAELGANVHLAHPLGVKMFGLRRVKNDERDAADLADLLRMGRLPESWIAPPATRELRGWVRHRAKLVGLRSSVKNQIYAVLAAAGVAVSMSDLFGVAGRQLLATTLLAVESRSRVDSLLRIIEALDFEIDLYARLIAGRLRTDPGYHAIQTIPGVGPLLGAVFVAEIGDISRFQRPEQLASWAGLTPKHHESDTTVHRGRITKQGSRLVRWAAVEAVQRVPAHPRLGQTRDRVGQRRGRNIGAVAAARELMTLVFYGLRDHHIRCLTSTPAA

SEQ ID NO: 243697 - protein, 356 aa, unidentified
MTSTKYVGMDVHKESISIAVMNSAGKIVMECVIETKASVLLQFFNGLRGDVRVTFEEGTWAAWLYDLLKPRVSEVVVCNPRKNALLKDGSKSDRIDARKLAELLRGNHLKPVYHGEHGLRTLKELGRSYLTITKDVTRVMNRLKALYRGWGIPCAGHEVYVPRHRSEWLGRISEAGVRRRAEHCYQQLDVLRLLRQQVRRDLLLESRKHPAWRLLGLIPGIGPIRAALLIALIQTPHRFRTKRQLWTYCGLGLETHDSAQYRVVEGQLQRSKKSVTLRGLNQDHNRDLKDIFKGSATKVSSSNSGPFHDFYEHLLAQGRKPTMARLTLARKIAAITLIVWKKEVRFDASYLKSQAA

SEQ ID NO: 243698 - protein, 360 aa, unidentified
MAKARSLVGLDVHASKVVAAVLDAETGELAYFRMGGDAAGAAGFCAGLPGPVRAVYEAGPTGYGLARELGARGVQCVVAAPSKIPRASGDRVKTDRHDAEHLVRLLLAGELRAVRVPGGEEEALRDLVRAREVVRVDLMRCRHRLSKLLLRHGIQFEDGRAWTERHRRWLATLTLGWPAAQTTLTDQIGAVDVLEHRRDQLEREILALLPGSPWAREVGRLRCLRGVDTLTAVGLCSEIGDFARFPKAASLMHYLGLTPSENTTGEQRRLGSITKTGSGHARRLLIEAAWHYRKHPAVGKALTDRQTGQPPEAIAVAWSAQRRLHHVWEHLEQRHKRRTIIAIAAARELAGFCWAICQIE

SEQ ID NO: 243699 - protein, 393 aa, unidentified
MICVGIDVAKDKHDCFILSSEGEVLADVFTIPNNAEGFDTLLQTIRRCARPADKIKAGLEATGHYSYNILGFLLNEGLDTYVINPLHTNLYRKSLSLRKTKTDRVDARTIAAMLMSDVDLKSYTDTAYHNEELKSLTRYRFDNVRERAKLKQSVSRLVTILFPELEKLVSTLHTASVYALLSEFPGAKQVSEAHLTHLKAVLYDASKGRYGRDMATTFRDAARCSVGSVMPAKSLELRHTIRLIHELDAEIEDIEAAIQSMMDEIQSPITTIPGMGVRMGAMILAEIGDFSRFDSPDKILAYAGMSPSTYQSGQLSLSGAYSHMEKRGSRYLRYALYNATKYVCLWNPTFAAYLAKKRAEGKHYNVALSHAAKKLVRLIYALEKSKRPYNTAA

SEQ ID NO: 243700 - protein, 489 aa, unidentified
MSQGKRSVPRAASSKVKAEARPKAASCPGGAPAGALTVLNRNAAGIDVHSDMHMVCVPAERTSPEGEGASGDLPANVRKFGANSCDLAAIAAWLAACGVTTVAMEATGVYWIALFELLEARGFEVYLVEPGQLAHCGARPKTDVLDVQWIQRLHTYGLLRPSFRPANSIVALRGYHRQRQMQIRYAASHVQHMQKALEQMNVKLTEVLADITGLTGRRIIEAVLAGERDSRKLAALRNVQCHNDETTIAKALEGTWRPEHLFALRQAYDLYRFHHQQIAECEQMIKTELAQLPNRAGDKPFSPKPRKGGRKQNDLTFEACGPLFKALGVDLTEIEGIDVRTALVILAELGVDVSRFPTEKHFASWLGVCPRQYESNQNKKKRGPRKGKNRIAIALRMAAQGLGKTKSPLAMYYRRIKSRIGGKGAITATAHKLACLVYRMLKYGKEYVTQSMEEYESRIKQQLERSLRRKATALGYELVAKPAPEPAPA

SEQ ID NO: 243701 - protein, 338 aa, unidentified
MVYGAIDLHMRYSQIRIVDEDGAVVRDLRVVTSRERLTQAFANHGPIRILLETGTESEWVAQALETAGHEVIVADPNYAPMYGELRRKVKTDRRDAAALAEANRRGWYRRAHRSSPAQRETKQMLRSRRFLVQTRSGAVSLLRSLLRQSGHRLGTGSCETVPTRVSRLAVAPELGETLAPLCRQIATLTTEIHALDARLQTRTATDAIVARLRSVPGIGLIVATTFRAFVDRHERFGHAGQVSAAIGLVPREDSSAERRHRGHITKAGPREVRSMLIQAAWVCWRHPGSATLRGWTDRLAARRGRRIAVVALARRLSRILFALWRDETTFDGRTLAAA

SEQ ID NO: 243702 - protein, 340 aa, unidentified
MEKLLQTQACAFILGVDVSKDSLDVCLIDSQTQQASSQKFNNNKEGFRRLKAWCKLQSCGAGPETLACMEHTGLYTRQLVHYLLARDVRVWLESALQIKRSIGMARGKDDRVDAQRIARYALLHQQQAKCVNLSSVTLERLKDLQANRSRLLKALQSIKVTIKELLQIDPVSGKTLEQVNKKAVRGLEKSIEQVEERMQGFIRQDQSLKQKYDLLTSVKGVGKVLATSLLVYTHGFNRMEDGRKLACYCGVAPFEYRSGTSVRGRTGVSRLANKELKHVLHLAAMNSVRYNQELKAYFERKVAEGKSKMSVLNAVRNKLLHQIVAVVKRGTPYVIKLDKV

SEQ ID NO: 243703 - protein, 456 aa, unidentified
MKELQMCVGIDLARRSEHKAVVVHRDGSAPKKAFAFSHDLDGFRSLCDYIGRQTGTGSVEGVTVNFEPTGGVWETLGLFLKKQGADVYFTRPDVVSQMRKVHSRFAKSDRIDAYALARIAFSFPDRLIPLVEIESRVRALRSLSAQRRRIVDNTSQWKNRLTSKLEVVWATMLAKLDKDQRFCGLARAFFVKFVDPRSVTRYGRQRFYTWCGKTAHGNTDPQLFDTLWHGACKVAALWKELESSGAMHVDWETLGEMIKQDLRMIESFEKEINLLDQRIREARRQTPECDVVQQLPGFGNVVSVTVASTLMPVERFGNSKKCGAFTGYTSRQKASAGRQIDGLKITKTGNCRLKRDLALAADRAMRCDPELAAFAIRLLNAGKHYNKVRVAVGRKLAERAYSLLKRFARSETHVRYIWRDLQGHSVTKKEAADIARKLWADYNARKKQKGNPPTAA

SEQ ID NO: 243704 - protein, 403 aa, unidentified
MERTAGLDLASEEHRLAIVEADGRRLEERRIVHSEEGLAALVRRLRLLRVSRVAIEQPNGLVVDRLLDAGIAVVAVHPNQLAAARDRYRAGGGKSDGFDAYVLAELARTDMHRFRLLEPDSDETKALRALTRTREDLVEQKVALANQLRAQLEDCWPGAARIFRDIDSPIALSFLERYPSPNDARSLGEKRLAAFLARNGYCGRKSAGEPLTRLRTAPQGRPAEAEIEARRQVVLALVAALRPLVEQIRLLTSEIRGLLDQHPDGEIFRSLFRDPKSVITAAELLAEIGDHRDRHPNSSSLEAIAGQAPAAVESGKKKVACFRWACNKTLRSAVSVLADSSRKHNPWANDIYQRARARGHDHPHALRILGRAWPRIIWRLRQDSTPNDPARHGSLNRLLATEG

SEQ ID NO: 243705 - protein, 321 aa, unidentified
MQKDLLYCAIDVSKDKLDVDGAALALPAQLGNDQAGFRQLIKAAKKYPGAVQFVFEATGPYHLGLALALWEAQIPLSVLNPARVRYYAKAQGKAKTDPLDTQVIGDFARSFRPPPTPAPDPVRRELTELLQRRDGLISSRAAEQNRLGQCRHKIIKGQIRRLMVQLAEQIDQIDGLMKKLVNSSQELKAKVKALCQVKGVGHLTAVTLLITLPELGTLGRNRMVRLVGLAPLNDDSGTQKNKRYIQGGRARPRCALYMPALSASRHNPVLKEVYERLLKAGKLKKVALTALMRKLLICLNALLRKLADQHPSPQGLCLAKP

SEQ ID NO: 243706 - protein, 393 aa, unidentified
MFYIGIDIAKHNHEASIIDSNGSLLCESISFTNSQKGCEKLIALLERFSVTADNCIIGMEATGHYWLSVYSYLFELGFDLKVINPIQSDAFRKMYIRQTKNDSKDSFVIAQIMRFGQFSASSLSDENIMALRQLSRYRLFLVDDCSDWKRNVVCLLDQVFPEYSKLFSDTFGVTSKELLLKYPTPEDMLSVSTTKLSNFISKCSHGRHGRLKAEEIQNAAKNSFGVKFAANAFSFQIKQMLEQIKFIENQLKELEKEIIELLSQTNQVITTIPGIGNVLGAIIIGEISDISRFDSAPKLVAYAGLDVRVSQSGQFIAAQMKISKKGSPYLRRAIWMAATVAAFSDPVLSEYYQSLRARGKHHLTAVGAVARKLCNIIFAVLRDNKPYIPMPKS

SEQ ID NO: 243707 - protein, 356 aa, unidentified
MNGLRYIGLDVHQDTVSAAVLDGTGKLLMQSVFATRAVAILDFLHGIKGTLHVTFEEGVHSAWLYDLLQRRVARVVVCDPRKNKLLKSGNKGDLIDARKLAELLRNNSLSPVYHGGMSALEVQHRTRSYTMLTEDTTRVMNRLRAVFRSQAIRVHGRKLFRSDLRESHLAQLATPGLRQRAESLYRELDALHPLRLQAKREMLVECRKHPAMKWLRSVPFLGKVRTAVLIGRVQTPHRFRTKRQFWSYCGLALETHDSAEYRVVHGQVQRKSRPAQVRGLNWNHNHELKEGLFKSAATMAAFRKGIFREFYSGLLAKGIRPEMARLTLARKIAAITLKIWKEGETFNAEHIKPQAA

SEQ ID NO: 243708 - protein, 312 aa, unidentified
MAMLSFCGIDVSKDRLDVVVLPEGWFFSVSNDTAGWAELVARLRPLTVSAIGLEPSGGYERGIIRALLATGLSVRRINPNKLRQFARARGVLAKNDRLDARLIAEYVAIMPTRVVQRDAAVERLAEIVTMRRQLCDEHVAAENQAAHLEDAMLRRLSKRRQMRLEADIRLLDKRLAEMVAANLALAQRYELLTSMPGVGPVLAFTLIALLPELGKMSRKQIAALVGLAPYDFDSGKLKGHRSIYGGRMPVRNVLYMAALSASRYSPALKTFHKRLAAADKKSKVIIVAVMRKMITTLNAMLRDNAAWQPQSA

SEQ ID NO: 243709 - protein, 346 aa, unidentified
MNVTTIGIDLAKDVLQIHGVNQHGKAVVRKQLKRAQVELYFGNLPACLIGMEACGSAHFWARKLTALGHTVKLMAPQFVKPYVKTNKNDASDAEAICEAVSRPSMRFVSPKSAEQQALLALHRARAGFVQARTAQGNQIRGLLAEFGFVVPKGRWRIEAAIQPIVEDAENGLPGMSRELFVRLLEHLRHLDVQAKQIEQQIKDWHQNDADSRRLETIPGIGPITASALVASIADIHAFKNARQLAAWLGLVPRQHSTGGKQVLLGISKRGDAYLRTLLIHGGRSVLLAQKRKTCAEESWSSALAKRRHPNIAAVALANKNARIVWALLARGQEYQPRYHASMSSAA

SEQ ID NO: 243710 - protein, 385 aa, unidentified
MQKLNDLSRSLTPLDPDGTLIAVIEMSQSSWLVAGIVPGIGRHPLKKLEPNEGELLRLLVRWRAEATKMGCTITRIAVAYEAGRDGFWLARWLRARNIETYVIHPTSVAVSREHRRAKTDRLDTGLLKRVFIGWLRGEPDHCHMAAIPTMAEEDAKRPNREREGLVRERTRIVNRMKSCLARFGVRNFKPTLRKAPERLATLVTPEGVRLPPNMLLELRRDMARLRFVMDQIKEVEEARAQWLEQAPQEKSHAMVRLLARVIGVGIETADMLVHEILSRSLRDRRAVARYAGLTGAPDESGSKRQEKGLAKAGNARVRRGMIQLAWRFLLFQKDSALAQWYRTRTESGGKKRKTMIVAVARKLLIALWRLVTTGEVPAGVVLRAA

SEQ ID NO: 243711 - protein, 355 aa, unidentified
MSQEKYIGMDVHQATISVAVMDARGKLIMECLLETKAATILEFIQGLRGTLALTFEEGTSAAWLHDLLKPHVSRLVVCDPRKNALLKDGNKSDRVDARKLAELLRTNQVKPVYHGKHGTRALKELGRSYLTITKDVTRVMNRIKAVYRSWAIPCAGTSVYTPRHRAEWLAKLVEPGVRIRAEHLYQQLDSLEPVRLEARRELLLESRKHAAVKLLRQIPSIGPIRAALLVALLQTPHRFRTKRQLWAYSGFAVEIHDSGEYRSVRGKLQRNRERITVRGLNDNHNKDVKSLFKSAAISASTRPGPLHDFYVTRVESGMRPTMARLTLARKIAAITLTMWKKGVSFDPKQLQRQAA

SEQ ID NO: 243712 - protein, 440 aa, unidentified
MEKIRKNAAGIDIGSRNIFVSVESEPVQSFETFTESFYHARDYLLSKGIETVAMEATGVYWVILYDVLEQAGLDVWLVDGRQTKQVPGRKTDVKDCAWIRQLHSYGLLNRCFVPDDSVKEIRAYQRMREDHIRSASMHVNHMQKALTEMNIRLKEVLSQIHGASGMAIIEAILAGERNAETLLSLCYVSIREKKAEAVRKSLNGYYTPTGLFGLKQAYDAYQFYQQQIKACDQQLQQAMERLNSFHQDKQSEKEITSAKGRKPIRHNKPDVDHLGGHLLKIFSGTDATQLPGITDYSWLQLYAEVGKDLINWPTEKHFTSWLGLSPGQHQSGKKNKSRSKKYRPKAGQIFRQIAQSLIESKKIALGAFGRRLKSKRGPGIAVKATARKLAVLYWRMMVHGVAYTEKGIKAYEEQMKMQKERWLYKNAKELGYQLIYQDAS

SEQ ID NO: 243713 - protein, 347 aa, unidentified
MRFYRGVHQFYCGIDLHARTMYLCLMDQHGTILVHEGIACQPQAFLRLIQPYRDNLVVCAECIFCWYWLADLCAQHNVHFVLAHALYLKAIHGAKSKNDAVDSEKLCTLLRGGVIPQAYVYPPRLRATRDLLRRRLFFTRKRAELFCHIENTFHQYNLTRPAGAMRTPKHRARLAAAFTDPVVRATIEADLALCAVFDQRIKTLEKTVEQHARSQEPSALALLRTIPGVGPILGLTILYEIDTITRFPSVQDFSSYCRLIKPEHSSDGKRLGTGGAKIGSAHLKWAFSEAAVGFLHRNPRGQAHIKRLRKRYGKGKALSILAARLGRATYFMLKHKRVFEMDRFFDS

SEQ ID NO: 243714 - protein, 419 aa, unidentified
MTIQQSTPPQAALVAIDIAKNRHEILIEPGSGMRRRRLSVLNSRAEHDRLVATLHALGKPVVVGFEPTGNYHRVLAHRLITEGFQTRLISSMALARTREALHNGWDKNDPKDAQVILHMLQIGASTVYNDPGCDRLNDLQELSKTHDMVSRAKTELWHRLLTHYLPLYFPEIEKFHGNSRSDWFLALLEQFPTPGSVTALSKEAFATAAWDLVGRKVSKTRLLADIYETARSSTALPVQLDSPAIAMFRMVLAEGRSLLRQRDQIEAQAEVLLANDPDAARLRQLPGIGPINALTILAEAGDLRRFGHHRQFLKFCGFDLATHQSGMFRGQTKLSKFGNARLRRSFWLAAQVAIRQRDNSFRERYGRYIARDPENKNLRRKALTAVAAKMARVAHAIVRSGADYRPFFDRPVPGGRTSL

SEQ ID NO: 243715 - protein, 415 aa, unidentified
MEVVRPRCAGLDVSKADAKVCVRVQGSGSRRTLSTVSTWGSMTRQIMELREHLIAEKVTCAVLEATGDYWKPFYYLFEDAPFETVLANPTQVKAIPGRKSDVSDAAWLADLGAHGLVRGSFVPPPPIRELRDLTRARTALTQERTREWQRMEKLLEDAGIKLSMVASRLTLVSVRLMLDALVAGERDPKVLADLAKGKLRSKITELNEALFGRFSDHHAFMVRIHLGVIDQLEASIIELDQRIEVMVAPFQEFCDLITTIPGVDRLVAQVVVAEVGTDIRADFPTAGHLASWAGVVPGSNSSAGRSKSTKARPGIRHLKGALGMAAGSITRSPGTFLCAKYRRIASRGGTKRANVAVQHAILVAIWNMAGTGEVFNDLGADYHRKRNPDRSRRNAVNQLEALGYEVTLTPIQQAS

SEQ ID NO: 243716 - protein, 410 aa, unidentified
MKIAGIDVHKRVLMVVVMDASAPEEKPARRRFVTLPSELQRFRIWLQEQGVEEAVMESTAQYWRSVWLELEPHMGLHLAQAFSNRAPRGRKHDFKDAERLVRRLIADELILSFVPRGEQRIWRSLTRMKVQLTRDRVRLQNQMECLLEEMRIKLSIVVSNLLGASGLRILHALAQGESDPKKLAELGDERLHCTEEQLVDALTGRVQPMHRGMLALQLQRLQLIDQQMAQLNHMIAQAMKSHQDAVIRLAEVPGLGVDSAQQIIAEVGAQARTFSSAAELTAWVGTCPGKEVSAEQNQSSRSAKGNKYLRRVLNQAAHAAVAKKGCHFQVVFRRLLPRLGYKSAIWAVAHRLCRVVWKILHEGVRFIEQGREVGPREKKQRAQMLARALRRLGYEVTITPINQLAPKPVI

SEQ ID NO: 243717 - protein, 465 aa, unidentified
MTRKEWKRKNKKVLELAEGEGKRKDGLVMGIDVHRDVFAYCIVDEKSILKESELSNNKEGIRKLIRILLKMRVGSVAIESTAQYHLKIVYELIREDIPVLVANPQQTKNTQGKKTDKLDARRIAIAHRDGRLKPSVIPPEELFNLRKATRHKLKLIGEMTKIKQRLNQVFHNKDFYYKNLLKSKRGLEILKLVVSNRMIDEEIVKKIIGNRGANYFNDLFIKDLKKFRDKLDEVQQIDIASDLYRLELLKLTCDMQDQAVYAIAKKNKEFAKNMKILLSIPGVGPFSAAIILAEIADIGYFPSPKKLVKWAGLAPRVYQSGHKKKITGKIHKGGNKYLRRAMTLVCQNIYAKGSRNNPIKVFMLKVKKRSDSYWKAICAGARKLLSIIWYLLKRKEEWGKFNLDSEMKKQILEIINKKIRKFEGKIKKYREIQDVLSGACDEVILKLSSTIINSKSTFKMILSSV

SEQ ID NO: 243718 - protein, 428 aa, unidentified
MQAIVERCCFLDIGQASLVSCMLVGPSNRKPRKEVRTFSTMTADLLGLREWLGSEGCTQVGMESTGVYWEPIYNILEGYFDLVVGNAQHIKNVPGRKTDVKDSEWGADLLRHGLIRKSFVPARPFRELRQLTRYRRKLVEERSAERNRVQKALETANVKLASVASDVFGVSGMLMLRAIIHGESNPAVLAEHAKGVLRGKIPRLKLALDGRVREHHRFILQRQLERLDGFEGDIAEVTAEIDRRLAPYQAQIALLTSIPGVDRTLASAILAEIGVDMGAFHSANHLAAWAGVCPGNNESAGRRGRTRARMGNKALTTALVEAGHSAGRAKGSHLRAKYLSVASRAGRKCAAMAVGHQILVAIYYMLKRCEAFRDRGEAHLDQAAKARTVASLVRRLRSLGFQVNLSATEPLPGAIPLDPRPPVVPLLA

SEQ ID NO: 243719 - protein, 366 aa, unidentified
MKKISTVATNRNEIFKEHKLTIGLDLGDRSSYYCILDEAGEVILEHNFSTTPKGIHQVFNKIPRSRVALETGTHSPWVSRQLSQLGHEVIVAHARNVRLIGESSRKDDQLDARTLARLARIDPSLLGPVRHRSAKAQIHLTVIRARAVLVSARTALVNAARGLTKSYGERLQKCGTQQMNREIAKGLSQELREALDPLLEEIKSLNERIREYDRRIEQIATEVYPQVALLKQVKGVGTLIALTFVLTLDDPHRFRRSRDAGCFVGLRPGRRNSGMSQPQLHISKEGDRYLRTMLVQGAQYILGPFGQDSDLRRWGLRLAERGGKNAKKRAIVAVARKLAVLLHKLWVSGEVYEPLRNNHKVVDQVA

SEQ ID NO: 243720 - protein, 430 aa, unidentified
MKSNTQNAKIEAITEKTLVLGIDVGSETHYARAFDYRGIEYSKKPFKFSNTEAGFVTFKEWILDLKERHEKDKVVLGMEPTGHYWFNLGKFLQDNEMKPVLVNPHHVKKSKELDDNNPTKNDRKDPKVIAGLVREGRYMIPYLPDGVYADLRTASNIRFQLQAELTRIQNRISRWFNIYFPEYKTVYGKPDAKSGMLILKAAPLPEDILTLGIDGVNQIWRDAKLRAVGKARAKTLIEAAEHSVGSKEGAVSARMEIRMLLEDYESRNTRLQEVMVLIEELVRKIPMAEKLLEIKGVGIRTVSGFLAEVGDISRFNNPKELQKLAGLALVENSSGKHKGETTISRRGRKRLRYLLFEVAMSLVAKNPEFRELHNYYTTRRLNPLKKMQSLMAIAAKLIRVFYVMLTKGVNYDPKKMVSDIKRPAVYLQAA

SEQ ID NO: 243721 - protein, 417 aa, unidentified
MEIRTQKMRNINEKTLVVALDIGKSVHYGYLRAPNGKEITPFCFYNFRKSFEKFWATVVEFKKQQKLGDVVIGFESTGPYAEPLFHYLRHKSVKLVQINPMHSKRLKELTGNSPNKTDKKDPRVIADVICLGHALTVVVPEGPAAQLRRLSQARERAIDRRTAMVNQLQHLVFVIFPEFSSIMKPSTKSAMYLIKHHTTPESIFAMGLEALAAVVKKVSRGKLGHQRAKKLFEAARDSIGIYEGKESILLEIEHLVSKIENEDRFIDHLKQQMVNYLGQIPYSGSLLSIKGIAEITAAGLIGEVGDFRKFRTISEMMKLAGLDLYEVSSGKHKGQRRISKRGRSLMRKLLFFAAINAVKSNGIMHGPYHQMLDRGMPKIKALTAISRKLLGIIFALARDNTLYVENYNQQNHFQLAA

SEQ ID NO: 243722 - protein, 323 aa, unidentified
MQGKALPEPTAMTPVYAGIDVSKAFLDVYLHPCGETLRVTNDAHGMRRLKRRLASLDGVRVIMEATGKYHRAAWRSLAADGLTVTITDPLRARLFAKACGYLAKTDRLDARLLALMGEALKPAATALPGPAMEALQELVNAQAAAKAEATALANRHAAAETAFLRAELTRLQAVTERHIQRLDTEIERRIRADPELVRRQTVLLSIAGIGRVSAAALIAGLVELGACSGKQITMLAGLAPIADDSGERNGHRAIKGGRKAVRNALYMAALSARRFNPDLATFADRLQSNGKKAKVILVAVMRKLVVLANTLVAQNRLWNPIAP

SEQ ID NO: 243723 - protein, 341 aa, unidentified
MKKLFIGIDFSKEKVDVAIIFAENLSKTASRVFNEFKTTVSGYKQLVKWVEQNSYGIDSSLWLFCGENTGDYSKGLCNFLYGKGYDMWLENAKSIKDASGLRRLKSDRADASMIAEYAMRNYDKAIMYEPLSESLAQLRELFLYRQIVVRHRCSFQVRRGEKRLTMEKSSVKTMISQSGRHIVSELNKEIEKIDKRIAELIKSDEELTEVYTIVTSVPGIGTQNAVCLMIYTDNFRRFNYNSRKIACYYGIAPFGKDSGTSVHSDPRVHYMANHQIKAMLTQAALAAVNFNPIMARYYMRLVEGGKKKQVALNNVKNKLIHLVTAMVRNRQFFSPEYKISA

SEQ ID NO: 243724 - protein, 445 aa, unidentified
MSNGSGLSRGDRNRNARLARLRELVPLGNAILGIDLADDKQAAVVTDHDSRVIARRRVSARAWELGGLLDWAVVAAAGAGFASVTVACEPTGHRWRVLDQLAVERGLALVCVQPLLVYRAREGEDLTWDKSDPKDAVIIARLAAGLRCYEPERADAVWARLRHLGARRSALIADATAEVNQVRDLLECAWPAVLAAAGVPFRSATWRAALAVTLDRCAGDLARVRRLGPARFESAVRRELPRWGAQRPCLRIIRAVFAALADPAGVRVHRPGALERARLVLGDWRETRARLADVEARMVAVLDDLGLTGLVTTIAGLTPAGAAAILAETGDPARFTSPRALVKHAGLCPRDNASGGYQGKTSISGRGRPALRVAAWRAVWAALPNNPVMAARFAYLTTRDHNRLARQQARTACAAALLRWIHVVITRRIAWDPAIAGRTPPCRAA

SEQ ID NO: 243725 - protein, 338 aa, unidentified
MSIVFVGIDLAKNVFAVHGVGEAGKPALVRPAVPRARLHELIASLPPCTVAMEACTGAHHWARLFAAHGHTVRLIAPKFVAPYRMSGTRGKTDAADAAAICEAVQRPNMRFVPIKSEQQQSQLMVHRARQGYVQARTACINRIRGLLAEFGHVLALKADTVRRQAGALLEDLPGWANTVIGDLLSELHRLDERIAQYDRHVAQIAREDQRAQRLMALPGIGSTTATAVVAMIGNGHEFNCGRQFAAWLGLTPGQYSSGGKTRLGRITKAGDGYLRSLLILGARAVLARAKASSDGISSWALALQQRRGYWKAVVAVAAKNARLAWAVLRSGEAFKMPA

SEQ ID NO: 243726 - protein, 392 aa, unidentified
MSVRKRVFELTHPNAAGIDVGAASHFVAVPPDRDEQAVREYPSFTEDLNRLAEWLRACEVDTVAMESTGVYWIPLFELLESRGFTVYLVNARHVKNVSGRKSDVLDCQWLQQLMSFGLLSGAFRPQGEICALRSVARQRAMLLSYQSRHVQHMQKALTQMNIQLAQVISDVVGETGQRIIRAILAGERNGQVLAKLKHFRIRATEEEIAKALQGNWREEHLFALKQAVSLYDAYAAELAECDRQLESMLAALARHNREPGKAKRRARAKNAPRFDMRTYLFQLCGVDLTQIDGIDVTTAFKVLAEVGADLSCFKTAKHFASWLGLCPGTKISGGKVLSGASKRTANRAAQALKLAAASLRSSRSALGPITGAWLLAWTSPTRSRPAHISWQG

SEQ ID NO: 243727 - protein, 339 aa, unidentified
MQVTTIGLDLAKNVFQVHALTEDGTVAFNRSLRRAQMITFFEKLEPCLVGMEACGSSHYWARELSKLGHAVKLIAPIYVKPYVKRGKSDAADAEAICEAVTRPTMRFVEMKSPEQQAILSLHRARDLIVRQRTQTINMMRGLLAEFGIIFAQGVGHAIQFAKRVVEGHSPELPQAASDVVTDLSEQLLMLHGRVNWYGRRMTAVAKSEPRIALLQTIPGIGPITASAIVATVGSGEQFLSGRDLSAWLGLTPINKSTGGKERLGRISKMGDRYIRRLMVVGMTSRIKQIKSTPERFDPWFADILQRKPAKLAAIAMANKTARIIWAVLSRNEPYQARTV

SEQ ID NO: 243728 - protein, 411 aa, unidentified
MAEAEYHFFVGVDWGSETHVVCVLDRERRRIVERSVPHTGVALNDLVNELRTLAPSGPGLIAVAIEVPRGAVIDTLLEHGIHVFSLNPKQLDRFRDRHTVAGAKDDRRDAFVLADSLRTDRPAFRRVQPDHPCVVELRELSRVEDDLGQELRRLSNRLREQLHRFFPQALTLCPAADDPWFWALLDRIPTPAHAQRVPAKAVAAVLKVYRVRRLAVATIREALQTPALHVAPGTVEAASAHIALLLPRLRLLHEQRTKVATQIEALLEELSTEELRGEHRDATILRSLPGVGRVVAATMLAEAARPLAERDYQMLRAHGGIAPVTRQSGKTLSVGMRYGCNPRLRNAFYHWARTSVQNDPHCRAHYDRLRNRGHGHARALRGVADRSLGVLIAMLTNRTLYDPDRRQKIPA

SEQ ID NO: 243729 - protein, 336 aa, unidentified
MYCGIDLHSNNSVVAIIDDADRVVAQKRLPNDIAKIVGFLARWQGELVGVVVESTYNWYWLIDGLQDAGLRVHLANTVAIKQYDGLKHSGDETDARHLAHLLRLGILPTGTILPREHRAVRDLARKRMQLVHCCTAHVLAVENIMARQLGGRMSSNQIKRLTGDAIDEMALAADVSLAIKTNVAVIATLQAQIEILEKRLQQRVKPRAQYGFLTSVPGIGQALATVILLETGPIDRFADVGNFASYARCVDSVRTSNRKKKGEGNVKNGNKYLAWAFVEAANFARRFCPEAKRFHARKKAKTNNIVATKALAHKLARACYHILKEGKPFDVTRCFA

SEQ ID NO: 243730 - protein, 335 aa, unidentified
MNDTIYDHYIAIDWAEKNMAIARMTKKSNKITVIDVPADIAELKVYLKNLKGTKVLTFEETTTSQWLYVELKEYVDRIVVCDPYRNKLLNEGPKNDKIDAGKLVRLLKADLLKEVYHSNDDFIYLRRLVSGYDDLVKSGVRLKNQQSSLLKACGRKAGKKVTEDSNTRNDDFVLKCLSRQIKAYEKEKMGYEKEFKQLAKKYPEIKHQRSLPGIGHINAVKIIARVATPYRFADKGAYWSYVGLIKHEKISGQKSYGKRSPRYCRQLKDVYKTGVNAAIGGNNPINDYYQYLINEKGEPPFNARHQACRRLATLSLGVFKSGKIYQPYRRENIST

SEQ ID NO: 243731 - protein, 427 aa, unidentified
MHYTQNDKIRQATEGTIVVGVDIGSEKNYARAFRGNGIEITRKAYCFPNTLTGFKAFEEWITKLAVPLAEKKIIVGVEPTGHYWFNFADYCQGKQMTVVTVAPQHVKHSKEMDDNTQRKDDRKDPRVIAKLVIEGRYCIPYRPKGIYAELRVAYNRRCEIVEAETRAKNRIRRWFDLYFPEYRTVYGSVTAITGMMILKEAPLPKDIVSLGVDGILRIWRAHKLRAAGYKRAKTLYEAAQTSICPPDAGRAVRMELWQLLEEYEQIEKQLNDADIMIGIVTADIPEVNELMKIPGIGMITAAGMISEIGDIRRFDDPRQIQKLAGLAIVVNESGKHKGQSEISRRGRKRLRKILFQAAMSLVKSNKEFKTVHDYFTTREKNPLKKMQSLMAVAAKLLRVCFGMVKNGTPYDPTKVLKDIRRTEPKAA

SEQ ID NO: 243732 - protein, 389 aa, unidentified
MLSRTDNTETETETSIRTDLRAIFVSLELSRTTWLVTSLSPGTREKMSKHSVPAGDIGGLLVRLRSLQERVRARRKQLPPLVVIQEAGLEGFWIHRVLTENGIESHIVDPASVATSRRRRRAKTDKLDGDTLVRTLLAYKRGEPRVCAMVRPPTHEEEDRRRLSRERRVLLKERVQHSNRIKGLLFGQGVTDYEPLGRDRRQRLAGLLTGDGRSLPPHLKAQIDRELDRLEMVIEQIKAIENELRHAIVAADTVTPVPRMLIELKGIGNEFATVLWTECLYRRFDNRRQVAAYAGLAPTPWQSGSIDREQGVSKAGNPRLRAMLLQLAWLWLRHQPDSVLSRWFLDRVKANGGRLKKPTIVALARKLLVALWKYVTSGVVIEGATVRAA

SEQ ID NO: 243733 - protein, 349 aa, unidentified
MRQETIRYVGLDVHKEFCQACVIDPSGRVLSNERFSSTRDELERFLAGFKDAKFVLESTGIWEFIYEGIEKRGFDVELAHPLKVRAIAEARVKTDKVDAETLAQLLRANLIPRSWVPSKDVRDLRQLVRQRAYLVKQSTSLKNRIHAELLRRGVRRPEKFKEPFSKKSIDWMRSLGIPTVSSCLNCLENVQAQIEEMNIQLLDEYNRRPDAQLIATIPGIGFYGALLIHAEIDDISRFSNPEKLCAYAGLVPTVSQSASAVHYGAISKDGSSYLRWILTEAVHIHTHCEPGSRLSRFYAKVARRRGKQKATIATARKLLLIIYWMLVRHEPYHSQGLDPGFPPARLSAT

SEQ ID NO: 243734 - protein, 371 aa, unidentified
MNSLIHIGIDVHKDTYSLCSYSFRTSQAFGQTKIGSDNKLVIKYVEKLMKRHPEVEVLCGYEAGPTGFGLYRDLHKANIPCVVMAPTSLPRAVGNRVKTDRLDALELAKHLAYGTYSAVRVPTSEDEAVKDFTRLRNTRQQALKRAKQNLLSFLLRRQRRYTEGSTYWTKTHHRWLKQQKFTDPLDQETYNEYLQELYDQEEKVERYDARIEELSRLDAYRERVEKLRCFKGIDTHTALSLVCEIGDFSRFATAAQFSAYLGLVPSENSSGQRERRGGITKGGNIRLRTLLIEAANGAIRGNLYGAKSKKLKARQAGNTAQVIAYADRAQRRLHRTYSKLVLNSVPRNKAIVAVARELSCFIWGMMNDRID

SEQ ID NO: 243735 - protein, 341 aa, unidentified
MEHYAGIDVSLECSSVCVVDANGKIVREAKVASEPQALIAWVGSLGFGLERIGLEAGPLSQWLFAGMKGASLAVELLETRHVRKAFEAMPVKSDRNDARGIAQLMRLGWFRPVHCKSMSAQETRSLLTARKLVQSKLHDVENSLRGILRGFGLKVGKTTGQKFAGRIEELVAGHPHLQTIAKALLAVRAVLRTEFAAFEKQTRRMVRSDMQARLLTSVPAVGPIVALTYASAIDDPARFKSSKQAGAHFGLTPKKHQSGETNYTGRISKIGDASVRTALYEAAHVMLTKPVKGCSQLKSWAMRIKRRAGMSKAKVALARRLAVIMHRMLADGTPFNAAAAA

SEQ ID NO: 243736 - protein, 323 aa, unidentified
MSKDSIYYGIDISKEVFDVTNSEGVYIQYKNNVTGFKKFLKKLGNESHCVMEATGYYHYQLAYFLLENGIKVSVENPLSIKRFIQMKLSKIKTDKSDSRLICEYAEQVELKLWIGNSAHQIDCLQITRLLSVYTKQSTMLKNKLHGESVLGNPCKAVLQSLNRSLKQVKKELKVLEEKLLVLVKKEHQDLLTRLETISGIGRKTAIMLVVLTDGFDRFKSGSELCSYSGLTPIIRQSGSSVKGRSRISKIGNQKLRNLLFMCSFNACKYNKACREIYERIVAKGKSKKLALIAVCNKLLKQAFAIAKSGLIYDQEFRSTLVKN

SEQ ID NO: 243737 - protein, 354 aa, unidentified
MNNLGLLKFHVGIDISKSKFDAAVGFIDNMQNSKLIATHVFTNDNDGFFELIKWVSKKTKTNIPVSFSMEATGVYYEKLAYCLNENGFHVHVLVPSITKKYIQSIGIKSKTDKIDAKSLMLLGLERNLKKWEAPNKYYCHLRILTRERESMIKERTQLSNQRHAIISGYNINEDTLKRINKRIEIINEFVKEVELDINKLIKQNSELNEKIKKIITIPGVGILTVATILSETLGFNLIQNVKQLTSYAGYDVVLRDSGQIKSKGKISKKGNSHIRKAMHLPAITSRRSNSNYKAFYDKIYNKKNIKMIGCVALQRKMLCLIYTLWKKDEEFKMIVNSGNYEMEASFGSGVSKKK

SEQ ID NO: 243738 - protein, 348 aa, unidentified
MLHVGLDLSRKRLDVHVLDGTGKTIEVTAVLPDRDGLRSLARRLESRGQPVRAAVESMTGARFVHDELEMCGWEVDVADAQRVKGLAPLACKTDKIDARVLAELCWRDLVPAIWLPTPDVRGERERARWRLHLVRHRAALKCRIHSTLTLITFGHQCPVSDLFGRDGRALLDRLDLPEPWKGTVTATLQLIDDLDVQISACEQELRELGMEHRYVPLLMTAPGVGWILASTIASEIGDIIRFPSPKALCGYTGLCPRVYQSGGKDRRGSLAKNGPPYLRWALIEASIHAAQHPAFRDHYEATKKRLGKQRGAKVARIEVARKLTESIWYMLSRNQAFSPAGPPSSLAA

SEQ ID NO: 243739 - protein, 336 aa, unidentified
MSRQIVPVLVGLDYHRSSVQVCVLDEQGKVLANRRCPNDVAAVAGVITRHGQPERLALESCTGAADFAQRLVDEFQWDVRLAHPGYVNRMKNSVDKTDAGDARLLADLVRVRYLPEVWLAPTSIRDLRTVMHLRQRVARDRRVTKQQVAALLRDRRVQEPEGGRWTRSWRTWIMTTDAVTESVRYVIDDLLEHLQTVEARLARIERRLKEMTKDDRVVKALLALPGIGPITAWMLRATVGRFDRFRNAKQFARFIGVTPRNASSGERMADAGIVKAGNRELKGVVVQAAHRIKRHHERWATLFNRLVSKGKPKNVATVAVANRWMRSVYVQMKDLH

SEQ ID NO: 243740 - protein, 406 aa, unidentified
MRIIGMDIHRVAAEAVALLEGHLTKLGRIPMTRDSLEAFARKELTHDDHVVVEATGNAAAVVEVLAPYVDRVVIANPKQVRLIAHAKIKTDAIDAAVLAKLYATGFLPEVWVPDQRTMALRRQVARRTQLVRQRVRLKNLIQSILHAHLIPPCPHLNLVGISGRRWIAAQMVPADERAAIERHLAQIDLIQGSLKEVEADIAREAMSDPIIRRLMTLPGVDMTVASGVAAAVGDIRRFADPTRLVSYLGLNPSVRQSGEGSAYHGRIAKQGRGQARGMLVEAAWAVARSPGPLRAFFQRVASRRGKHIAAVATARKLAMIIWHMLTKSTDYIWTRPALLARKFRSIELRAGLPTSHAKRGSAYDYNIPTKRAEERARVESAEKEYTRFTSRWRAKPRSRHSKAFAT

SEQ ID NO: 243741 - protein, 409 aa, unidentified
MLFAGDDWAEDHHDVELMDEAGRTLARARLPEGAAGMARLHAMIGEHLAEDAGDAEVRVGIETGRGLWVTALVAAGYVVYGVNPLQAARYRERRSASGAKSDTGDAHILADMARTDSHQLRPVAGDSPGAQAVKVVARAHKTLIWERTRHVQRLRHQLRDFFPAALAAFEDLDAPDALELLARAPDPASAAKLTTAQVSAALKRARRRNISERTTAIRAALRSQQLAQPPAVTAASAAVVRSLIAVITTLSEQVKALQGQVAEHFRAHPDAEIIMSQPGPGPVLGARVLAEFGDDPHRYASAKARKNYAATSPITRQSGKRKTVMARYVHNDRLRDALDGQPFAALNASPGARACYDAHRAAGSGHRAALRKLANRLVGILHGCLKTSTPYDEATAWPGHASQEIKAAA

SEQ ID NO: 243742 - protein, 350 aa, unidentified
MVVVGADVHKRTHTFVAVDQAGRKLGEKVVAATTVGHHKALVWARAEFGNELVWGIEDCRHLSARLERDLLSAGQQVVRVPPKLMARTRASARTRGKSDPIDALAVARAVLREPDLPVASHDAVSRELKLLIDRREDLVAQRTSAINRLLWRVHELDPERAPKPRSLDLAKHRELLRAWLATQPGLVAEPARDELADISRLTEAINALAKRIAERVRVVSPALLALPGCAELTAAKLIGETAVVSRFKSESAFARHAGVAPIPVWSGNTTGRVRMTRSGNRQLNAALHRIAVTQVRLDGIGRAYYRKRRDAGASKTEALRCLKRRLARVVFHHLHTDHQTRNQPCQTAAA

SEQ ID NO: 243743 - protein, 365 aa, unidentified
MKKIAYIGIDYHLKSLTIAVLVEGESEFYNVIKIPNTDKIICKHMKKLSKEFEIKSCYEASFSGYSFQRKMKSWGYHCDVIAPSLIPQKKGDRRKNDSRDAKKLAKSHSVEDLAIVHVPTEEEESVRHLVRCRLTFKDLVKKTKNQINSLLHTQSIHWPDKKWNNRHLTWLSNLEMPQKHLQVILEEQLGLLTYIQSRLESLDRQIEEIARYDIYAPSVKKLRSFKGIGTLTAMILIAEITDFRRFPNARALMAFLGLIPSENSSAEKHRPGSITKTGNSRVRKHIIEAVQHCSKAPKITQQMKNNLSEVDAHSANIAIDCMKRLHKRYWHLAMRGKLRSVALTATAREFVGFIWAMMQPEPITT

SEQ ID NO: 243744 - protein, 365 aa, unidentified
MNCVGIDVSKGKSMIAVMRPFGEVVVSPFEVRHTASELSELARLLKNLDGETRVVMESTGNYHAPVAWLLHGAGFYVSVVNAMLVHDYGNNSLRRGKTDKKDAVKLANYGLDHWLTLPRYVPEEDTRLMLKTCYRQYQQYSKVQTMLKNNLISLLDTAFPDANRLFTSPPRADGSEKWVDFVATFWHCECVCNLSEKAFTAKYHKWCRKHGYNFSQDKALDIYASACGRFGVMPKTNTAKLLVEQAISQLQTTSAALAALKQEMQSLAASLPEYPVVMEMFGVGPTLGPQLIAEIGDVRRFHSKKALVAFAGIDAPPYQSGQIDVRSRSISKRGSASLRRTLFLVMGVLLQCAPMDEPVYQFMNK

SEQ ID NO: 243745 - protein, 342 aa, unidentified
MESAVTIGLDLGKSVFQVHGVDAGGAVVIQRRLMRSRLLAFFAKLPACLVGMEACAAAHHWGRELQKLGHLVRLMPPRYVKPYVKRQKNDAADAEAICEAVTRPNMRYVEIKTCEQQATLVLHRVRLMLTRQRVQLSNAIRGHMAEYGLVAPVGRNGLQRLIAVIDDPDDARVPAVARASLAPLVRQLGLVNDQVLENDRLVRASARSTELGHRLMEMPGVGPVLASAVVATVPDPTAFKSGRDLAAWIGLVPRQNSSGGKEKLGGITKQGDRYLRQLLVAGALAVIRYAQRHGTRRPWLMHLLARRAPKVAAVALANKMARMIWAMMVTGERYREPNVATA

SEQ ID NO: 243746 - protein, 339 aa, unidentified
MNYTTVGVDIAKSVFQLHWVDAETGEIISKQVKRSVFLEQFANRAPCLIGMEACGGAQHWARRLMEMGHQVRLMQGKYVKAFVSGNKNDVADARAIWLAVQQPGKEVAVKTEEQQAVLALHRMRQQLVKFRTMQVNCLRGLLTEYGEVMNRSRAALDKAIADVLERLTSRLPAVLIDTLREQWQRLDELDKEIAEIERRLQVWMKQDTACKAIAAIPGVGLLTATAAVATMGDAKTFKSGREFAAWLGLVPRQVGTGGKVKLLGISKRGDTYLRTLLIHGARSVLCHMKEPGAWVEQMQKRRPPNVVTVALANKMARMIWAVLAHDRQYQKGYVSVKPV

SEQ ID NO: 243747 - protein, 344 aa, unidentified
MYFIGVDHHKQVSVMTVLDEDGRELKNGRVLNLRKNLGRFLEGYHPFTAVLEAGRSSYVMADLLRELGGEVKMANPVQVKAIAHARIKTDKRDSRTLAMLLRAGLIPEIYQRGELNRRAQRVMRMRAYWTRKQTEVKNKIRALLAQQKEDVRLEVEKREKGLFRVRGLEFLAGLSLEGQDKMVLDDLLQGYKEAQAHIKKSDGLVRVLYGEIEEASRIDSVPGFATTLSVLVAVEIADVKRFSRPADLHSYAGVIPSTYSSGGRTVHGPITKQGSAWLRWAALEAVYPAIKRDFGLRALYLRLAKRKGSNIAKIAVARRLLTIIYRLLTEKRDYIPENIKQSAA

SEQ ID NO: 243748 - protein, 351 aa, unidentified
MKTQTTAVPKLFIGMDVHKKSWTVHFKTDLFDHKTVTMPAESGELVRYVERNFTGHEISCCYEAGCCGYWIARSLQQRGWEVKVVNPADVPRNNKQDWQKTDKIDSRNLCKHLSDGNLKGIYIPDEQQEQLRSLLRRRIHLARNLRSIKNHIKSQLLYFGIKLPEEYDNPNWSREMKTWIGNLKWKYSSAAESMRSRLKQLEFVWYEELHISNELRSYCRKHYRKDYYLYKSVPGIGGITAAAMIAELGDIRRFNRLDELAAIVGLVPGIYQSSENKINLGLTKRSNHQLRSLLVEASWVAVRTDMALQQYYRQHAHKEPNKAIIKVAHKLLNRIRAVINSGIPYQPGILK

SEQ ID NO: 243749 - protein, 339 aa, unidentified
MKLYGAIDLHSNNNVLMLIDRQDKIRFQKRLPNDAPYILETLHPYRSQIQGLAVESTFNWYWLVDALQEAGYTVHLVNTAAVKQYEGLKFTDDASDARWLAHLLRLGILPQGYIYPKEERAVRDLLRKRAQMVHQRTTNLLSIGNLLQRNTGGSLAGGRIKQLTEEAVDELLPQTDLGLAVKCNLRVMQCTDEQVAVLERAVLERVKLKPAFKYLRSIPGIGQILALTIMLETGDIGRFASVGKFASYCRCVDSKKLSNSKKKGEGNRKNGNRYLAWAYVEAANFSQRHDPRIRRFYQRKRAKAHPVVAIKTVAHKLARASYYIMRDQVPFDMAKAFGG

SEQ ID NO: 243750 - protein, 463 aa, unidentified
MKHKKASGKGARRSRPLLERVNPNAAGIDCGSEMHYVAVPTDRDPEPVRCFKTFTGDLHQLADWVVSCGVKTVAMEATGVYWIPVYEILEARGLEVLLVNARHVKNVPGRKSDVSDCEWLQELHSVGLLRGSFRPVAEIAALRSYVRHRETLIESAATTINRMQKALVQMNVQLHVVISDITGATGQRILRDIVNGQTDPQHLAKHRDGRCQASEAEIAAALTGNYRPEHLFVLKQNLELYDEFQRQIKACDTQIEDHLKTLAAKAAPPQAPLPAARTRRKARSNEPKFDVRTPLHQLSGVDLSQIDGIGPYNSLRLISEIGTDMSRWPTEDHFASWVTLAPHNKITGGRLISSRTQPSANRAADILRVAAMSVGYTQTALGAFYRRLASRIGKAKANTATARKLAILVYRVLKGEIVYKDPGADAYNAQHRETVLRRLRRQAAVLGFGLVNGQTGEILEGVS

SEQ ID NO: 243751 - protein, 411 aa, unidentified
MEPLVERCAGLDVHKKTVVACRIIHSEAGDWQSETRTFGTTTRDLLQLADWLQSARVTHVAMESTGVYWKPIFNILESQCQVMLVNAKHIKQVPGRKTDVRDAEWIAQLLQHGLLKASYIPEAPQRDLRDMVRYRTKLIQERSSEVNRVQKVLEDANIKLASVVSDVMGKSSREMLAQLIAGQDDPAVMAQLARGRMRNKIEELEQALIGFVQDHHRLMLRLHLEHIDYLNAQIMQLEEVIEKAIVPFDEADVVERLAEIPGVSIHTAHILMAELGIDMTRFESAGHAASWAGLTPGKNESAGRNYSSKTAKGNKYLKAALVQAAHTQRRADNYLGAQYRRLARRRGSKRAAVAVAHSILVIVYHLLRDGTRYQERGADYFDKHDRLHLERALVKRLEQLGNKVLLQPTAA

SEQ ID NO: 243752 - protein, 344 aa, unidentified
MKITRVGLDIAKQVFQVHGVDEHGKARVGKQLARARVREFFAQLPPCLIGIEACASAHYWGRELTKLGHTVKLMAAQFVIPYRKRSKNDANDAEAICEAVGRPNMHFVAIKSEEQQSVLMVHRARTLVVANRTAQVNQIRGLLGEFGLVVAKGAARLRRALPGILEDAENGLPALAREVLAGLLEQFHEFDAQVSAYDRQIRALAAASEPARRLMQVEAIGAQTATALVASMGDPHVFKSGRSYAASLGITPRQHSSGGKERLGKITRQGDRYLRTLLVHGARAYLRVVDKKTDAKSAWARALKERRHVNVAAVALAAKHARVAWAILAHGTEYRPAGPEVVAA

SEQ ID NO: 243753 - protein, 428 aa, unidentified
MLGVGIDWAEEFHLVALGRPGEGVVEVARVEPTPAAVEALVARIAGLEPDPAEVRVVIETRHGLLVEALVDAGYTVLPVNPDLVARRRGPARKKDDAEDARIACLLALDQYTELRALVPHGQLAGELRAIARDDVRAARDERRLLNRLRADLAATFPAALTIAGDDLGSPVVLKLLQRWPTAGELAAAGHDEVEALARQAKHGWPHRLADRCAQALAGDHFQARDYLVRAKADTIRLACAQLLLLREQRRAWERRMGELLLGDRRRGRAKQPGDDRGPAVPDGEIYLSFPGLGDRLAARVAGEIGDAIGQFDTPNALQCYAGKAPVTRRSGKSELVVASRLACNRYLAEAVQQWAFTSLRTSGWAREFYDTQRSRGKKHHAALRALGNRWLEVLWHCLTKGMPYDENVHVANRNRALGRVNQPTKLAA

SEQ ID NO: 243754 - protein, 488 aa, unidentified
MSTPRKRKEKKGSDAQRSASKRKARDSHCQQGDGNRRRSKLTITNPDAAGIDVGARIHYVAVPEGRAEVSVRSFGAYTAQLDELVQWLKDCRIKTVAMESTGVYWIPLFQKLEEAGFEVLLVDARQAKHVPGRKSDVQDCQWLQQLHSYGLLRAAFRPEDSICRLRTLQRHRKNLVESAAMWIQHMQKALNEMNLHLHHVLSDISGRSGLAILDAILAGERDPKKLASLADRRVEKSQAQIEAALTGDYRPELLFVLSQSLHNYRQMQEQIAQCDLSIEKQLAKMADCTNPNQASEPIQQSQDSAGSKPRKRKPKDALELSLAGHLKRILGVDLTTIPGLNILAVLNLLSEIGTNMAKWRNEKAFVSWLGLSPNNKISGQRVLSSRTRKVVNRAATTLRLAVMILGKTNTPLGSFYRRKRAQLGAPKAITATARKLGCLIYRLIKNGQGYKEPDLHTYELKYKDQILNSLRKRANSFGFDLVEVPKAA

SEQ ID NO: 243755 - protein, 489 aa, unidentified
MSTARKQQRGKKDPMLNAQLLKRKARGSHCQQGKGNQRRSKLTITNPDAAGIDVGAQVHYAAVPEGRDQVSVRSFGAYTAQLDELVQWFKDCGIKTVAMESTGVYWIPLYQKLEEAGFEVLLVDARQAKHVPGRKSDVQDCQWLQQLHTYGLLRAAFRPEDSICRLRTLQRHRKNLVECAAMWIQHMQKALNEMNLHLHHVLSDISGHSGLTILDAILAGERDPKKLASLADRRVKKSQAQIEAALTGDYRPELLFVLSQSLQNYRQIQQQIAQCDLSIEKQLAKMADCTNPSQDSESTQQSPDSSGCKPRKTKPKDALELSLAGHLKRILGVDLTTIPGLNVLAILTLVSEIGTNMAKWRNEKAFVSWLGLSPNNKISGQRVLSSRTRKVVNRAATTLRLAAMLLGKTSTPLGSFYRRKRAQFGAPKAITATARKLGCLIYRLIKNGQAYQEPDLHTYELKYKDQILNSLRKRANSFGFDLVELPKAA

SEQ ID NO: 243756 - protein, 363 aa, unidentified
MFTERTSVGLDVHARSVAAAAIDGVTGELVQTKLTPSYEHIRSWVEGLPGPVAVTYEAGPTGFGLHRHLAAAGVRCVVAAPSKLQKPSGDRVKTDAKDAIHLARLLRLDEVTAVAIPSADQEAARDLVRAREDCRGDLMRARHRLSKLLLRHGIVYYDGDAWTGKHDVWLRHAALPRLSDRATRLAFDSDYDTVLVTKARRDRLDAAIGEMAADSEFTPLVRRLGCLRGVSTLTGFALAVEIGDWHRFTGNTIGSFVGLVPSEYSSGASRVQGSITKTGNTHVRRLLVEAAWHHRSRYRVGKTMRDRWDLAPAAARARGDEGNRRLHQRWVRFIERRKKPTIANVAIARELAGWCWSLAVLEE

SEQ ID NO: 243757 - protein, 343 aa, unidentified
MQVVRIGLDLAKYVFEVHGVDGQGNVVIRKTLRRGSVSTFFANLPPCLVGMEASNGAHYWARVLTALGHKVRLISPQFVAPYVKSNKNDRNDAEAICEAVGRPTMRFVPPKSPEQLAIQALHRIRQRLVRSRTKLVNQIRGILAEQGIVIARDIWRLRRALAEITGHATDDLNPLVRVLVMEVQAELMELDRRIASCDRRIRELYRTSALCQRLGEIEGIGPVTATALVAAVGDRSCFKNGRQFAAWLGLVPKQRSSGGRNRLFGISKRGDRYLRTLMIHGARAALGKAGGKQDSRSRWLASLRQRRHPNIAAVALANKNARIVWAMLAGNASYEPAQTVQAA

SEQ ID NO: 243758 - protein, 367 aa, unidentified
MKNHSSINQSLSSSGLSACITLAVDLAKQVFQVAGEDVLGQVLYEQRIKSREAFYDFLRQLSPHVMVLMETGPGAQAWARQLQDQGNPVRILPAGLVATHRSGPKNARNDALAILRANRDEKICAVPVKSVAALAMQALHRARQGYVRRRTALSNQMRGLLLEHGVALAQGDVAISQKIPRVLEDATQPVPGLLRELIDELLAEWRHLGERISVLTGRLEVAANADMTAKRLMTVRGIGPVTATALVAKETKPERFPNARKFAAYFGMVPDQHSTGETVRLGDMTKRGDAYLRSLMIQGAHAVLQQLRPDSQQPDDRRLLHWMSRLGRKEAAIRLANRNLRIVWVLLQNDQTYRRHAGDGQPATMGH

SEQ ID NO: 243759 - protein, 336 aa, unidentified
MGQYVGIDLHRRSTTIVRMAEDGEVLGTERFVSQPFELAQAMAAAGPEPEVVLESTYGWYWAADVLQELGAHVHLAHALGNNWGNRRVKNDVRDAQDLAAMLALGRLAEGWIAPPEVRELRELVRYRYSLIRHRTSAKAQIHGVMAKNGILPVVGELWGPTGQAQLDRLELPEAYAMRLDSLRNLLDVYEAAIAELDAHIHAELKGDAGYRALMTLPGVGKVLAAIFVAEIGDISRFDSAKKLSSWAGLTPKHRESDEVVHRGNITKQGSPLVRWAAIEAVGNYRAKGNEKLRADYKRIAERRGKYKARVAVARKLLTLVFYAMRDGEVRCLETAA

SEQ ID NO: 243760 - protein, 371 aa, unidentified
MTDVAKYIGLDVHKATIAVAVAEGERGGEVRFVGTVANDDDEIRKLVKRLATPGATLSFCYEAGPCGYGLQRLLIKLGQPCIVIAPSMMPRRPGDHVKTDRRDAMTLARLLRAGELTAIWVPDEAHEAVRDLIRARRSAQDDATAAKQTVRSFLLRHDRRFGGRSAWTKMYWRWLSEQRFDYPHQQLAFEELQKRVLEAQARVIRLESALGEAVATWHFAPLVRGLQALRGIKLVSAATLVAEIGDLTRFDNPKQLMAYVGLVPSEHSSGARTHRGRITRAGNAQARTTLVEASWSYRLPAREERRYRERVADLPEEVQAIGWKAQVRLCQRFRRLSATGKPQPKVTTAIARELVGYAWDIARRMAPAKAN

SEQ ID NO: 243761 - protein, 331 aa, unidentified
MEILETLGVDISKKVIDTHLHKENLFRQFENNKKGFKQMIKWLEKSSKVPTENLLFAMEHTGIYCHSISLFLFEENFNYVILPGLEIKQSMGMTRGKNDKADAKRIALYAYEKRDRLKSNIPSSESIVKLKRLFSLRERMVKQRAGYKMSLKEQSEILSKSKNKLLLKIQKRLIKCLTKEIDILETEIETIISEDDNLKFQYDLIITIKGVGKQTALYMIVFTEGFRKFDSWRKFASYCGIAPFPNTSGSSIRGRTKVSHLANKKLKSLLDLCAKSSIQYNEEMKLYYQKRIALGKNKMSTINIIRNKILARIFAVINRKSPYVDLMKYAA

SEQ ID NO: 243762 - protein, 474 aa, unidentified
MKQRSITYKSVPVKNVSLRFLKNTTGRSTIHVGIDIGKHKLYVSVRWTLPRSKAVVHEHPWFVENTREIPELVTKLRKITSQNKLVVGIESTGSYGDPLRQALADAGIVVHQVRTKVTHDYAEVFDGVPSQHDGKDAAVIAELVSQGKSTPWPFETQSETENEMRYQVKKMIDIHEDIERQQGKLEGLLARYWPEITSILALTSMTLLKLLRYYGGPGPLHVDKESPQKIRQFSCGRIHEEKSNEIRNAAKQTCGVRQGAWDLQTCKDITVHMLELYKQSHACKKRLKALIEQSCEPLQRLSKILGIGTASVVWCRIGDPRRYHCSDAWIKAMGLNLVERSSGEYQSEYHISKRGDSETRRWLYMSALRWVQQSPVKQWYQRKKLQTGKKIPGEDNKRTGGKAVVAVMRKLMKGLWYALVHDKPFDPEKLFFKEGSRRKDVTPGKRPRQKKTKKARCLGSVKVGFLRNGQKSTK

SEQ ID NO: 243763 - protein, 387 aa, unidentified
MIYYIGIDISKYKHDFCIISNTGEVIVENSSFENNKKGFQYFLDQLKPYNKSECQIAFEATGHYSLNLELTLIDQGYSFMKMNPLVIHQFLKARSLRRTKTDKADSLTIANYIMSVQYKPNSNLLYNIYTLKSLCRSREQLIKERSKFQVLLTNELDKSFPELKPFFNNTISSTLLYILEKYKNTNHISLMKDYESLRKLSRGKFTYTKFAQLKQLAKDSIGHHDDNSDLLISTYVSIINNFNEKIDPIDKQISTIIKELNPKMLSIPGLGGISAATILSEYGDIKNFSSSGKMLAFAGLEPSIIQSGTLENNGKMVKHGSGHLRYSIMNIAMSILRYSPIFYDYYLKKRSEGKCHRVALSHVCKKLIRVIYTLEKNNIDFDPSLLK

SEQ ID NO: 243764 - protein, 419 aa, unidentified
MDSSKTEKIKRINSRTMIVAVDIGKSFHVGYCRAPNGKERKPFLFANSAKSFNEFWNHVYEFFTKEGLEEIVIGFESSGPYAEPLFHYLRKKPVKLVQVNPVHTKRVKELTGNSPNKTDHKDPRVIADVISLGHALTLVVPKGPAAHLRRLTQARERAMKRRTAALNQIQDLIFLIFPEFLKIMKGISTKTAFYLIKQYPTAESIISLGLDSLAMFIKATSRGKLGLQRAKEIFDAAQGSVGIQEGKQSIVLEIEYLVSQISADNRFIDSLEKQMGEHLEEIPYSESLLSIKGIGKVTAAGLIGEVGDFRKFGTISEITKLAGLDLFEISSGKHRGRRRISKRGRPLLRKLLYFAALNMVKAHGILHEPYQGMLSRGMPKVKALVAIARKLLRIVFALARDNTMYVENYCHDHHLRLAA

SEQ ID NO: 243765 - protein, 352 aa, unidentified
MTQSQETPLYVGVDLHERESQLAIFSQEGSLLTEKRIPTANLESFVGSLPGEKRIAIEAVGFVYPIYDRLTKVPSCRVSVADSNNVRLIAKNRLKHDRADARALGELLRTNFLPLAHMADEETREKKFLINDRVRYGLRRAQLRAMIRWLLKRRGIEVKRVFSAEGRKNLRELRLQEIDIRLDELELVESITERLDQQISSIAPTDRGARLLDTLPGVAPYTALFLSSTIGDVNRFPDSKHLCAYLGLVPSLHQSGDVLLTGHITKRGNKFLRRNMVEGARAAVRKDPHLREFYLRIRQKRGDKKALIAVARKMVVAYAYWMLKRDKTYEELLLGKKTEDASLVVVNGERAS

SEQ ID NO: 243766 - protein, 357 aa, unidentified
MSRPKHAVLPYSKDIVLAVDYHKKNLEIRWLNQATGEERTFRRPTTRADIEAVVHEARAESARAGGQVVWIMESTTGWARVKDLIGGPAKFILCNVLRMPREPKAYRKKTDRIDTGRMQREYLNGELPRAYQTPAEVRPLRRLTSAREDLVARRTALRNWITHYLSHETWESTVGLWSAKGLARLGKLAAAGGVDGLVLKIKLKELEQLEELLERVEAQIVQAHGQSIPAQRLDAIKGIGPVAAVSILARIGTADRFRNAESLVALAGLAPGVHRSDDTRRSGRIGGGGTDKWLRHYVIEATVWARKIPRYGEAYERMVRRRGKKIARIAVGRMLLRSIYKMLKEDIAFDPSARAVA

SEQ ID NO: 243767 - protein, 350 aa, unidentified
MEKYTVFREKQALFVGIDVHKRTYHVTGVWEDGREEFTKSMPAEKEVLLKYLEKWRQYRITAVYEAGYFGYTLHDYLIEYGIECIVTPPSLVPGEYGNRVKTDRRDSRKLALYCAKGFLKSVYVPTVEERSHRQVIRTRRQLVNDRIRKQNQIKSFLTQYGIPFPEVAGKWSKQYIEKLNCIRLHDRWLQKSFEKLIRAYEFVNGQIEEQTNLLKGLAKEERYSERVAILRSIPGIGIISAMELLLELQDVERFSKADQLAAYVGLTPSQFSSGDRVRMGRITRIGKQQLRALLIEAAWILVRKDAKVNEIYTSIRARAGSKRAIVAIARRLLLIGRRLLINKKRYAKTA

SEQ ID NO: 243768 - protein, 345 aa, unidentified
MIIGCDFHPSWQQVSWLDTETGETGEQKLVQSAGDAERFYRQVPAPALIGMEATGNCHWLVDLLADLGHELWVGDAAQIRASYVRQQKTDKRDAAHILKLLVEGRFPRIWMPSSEVRDLRQLLLHRYKLVIIRARVKNELQHLCLNKGVQRKHKLWSKAGQQVLRELPLKPWAGRRREDLLQLMAMLDQQIEPLDVAVKAEAQRDKMALLLQTQPGVGPITALAYVLTMGDVSRFPRGKQVASYLGLIPREHSSGGRQKLGAITKQGNRMLRMLLVEAAQTAVRLDPEFRKAYLHRCHQKPKGVAKVAAARKLAVRLYWMLRTQQPYPAVVRIESSPRVPLVGAS

SEQ ID NO: 243769 - protein, 391 aa, unidentified
MIYVGIDVAKDKHDCFITNSDGEVLFKAFTITNNLDGFNELHQKIASVMDDVTKVKVGLEATGHYSYNLLGYLIDKGLPTYVINPLHTNLYRKSLSLRQTKTDKVDARTIASMLMSDVNLKSYSDISYHNEELKSLTRYRFDKVKERAKLKTSVSRLVCILFPELEKLVPTLHITSVYALFSEFPGAKHIATAHLTRLTNLLSEASKGRYGKDTAITFRDAARASIGSNMPAKSLELKHTIKLIQELDSEIDEIEKEIKIIMDEINSPILSIPGINYRMGAMIIAEIGDFNRFDSPDKILAYAGFSPSTYQSGQLDGAYAHMEKRGSRYLRYALYNATKYVCHWDPTFAAYLAKKRAEGKHYNVAISHAVKKLVRVIYHLEKTKQQYIKAA

SEQ ID NO: 243770 - protein, 324 aa, unidentified
MYVGVDMHKATFSAAVIDEDGSIVREAKLPSDPEQLRNFSYSLPSGSEIVMESSSTWYWAYRILSERHKVVLSNPLKTKAIASAKVKTDRIDSLTLAELLRGGYIPECYIPDVYTQQVRELVRYRAKLVRLRTIVKNSIHAHLLMYNIKVEGYPFTESFKERLKGLGDPKIIGYLKILGVLDNEIHEASETIKGIANDNKDAQLLMSIPGISFYSALLISSEIGDINRFPDAAHLVSYAGLAPSTYSSGNAVYHGSITKQGSPYLRWILTQVTWANIRKDPYGRIAQFYNRLKAKKGSSKAIVAASAKMLRIIYSVLKNGSPYS

SEQ ID NO: 243771 - protein, 341 aa, unidentified
MNVKTIGIDLAKNVFQIHGVDEHGKRLFNKQLRRAQMASFFANIPPCLIGMEACASAHFWANKLISMGHNVKLMAPQFVKPYVKTNKHDAADAEAICEAVTRPNMRFVPVKTAEQQAVLALHRSRQSFIKQRTAQANQIRGLLAEFGIVVSRGIQQLQRRLPELVEDADNPLPVLFRTQLSLLQHHMAYLFDVIATLDKQIEQCYRQNALCQRIGKIPGIGPVTASALIATIGKANNFENGRQLAAWLGLVPRQHSSGGKQVLLGISKRGDTYLRTLLIHGARAVLQSAKHKQDAVSSWANQLMARRNNNIASVALANKNARTVWALLAKEREYCAPIISA

SEQ ID NO: 243772 - protein, 417 aa, unidentified
MEELPFRVFVGVDWGDELHQVCSVLGGKAQQRRFEHSGKGIAALVSWLMELCERQPATVAIAIERPHGVLIDALLEHGFAVFSINPKQLDRFRDRFSVAGAKDDSRDALVLASSLRTDPQAFRRVEPEDPLIIQLREISRAHRNLERDHRRLCNQLRDQLNRFFPQVLELSNAADEPWVWSLLERFPSPEKVRHAHQSSLERILREHRISRVTALEALEILKSPPLPVAEGVVEAATQHIALLLPRLRLVNDQRRQCGQHMDRLVKKLGETEDAQPGTKREHRDVEILLSQPGVGGIVAATVLAEAHQPLVQRNYHVLRTCGGIAPVTRQSGKTRNVTMRYACNHRLRQAFHWWGNAVCQCDPKAHALYLEHRRMNHSHARALRAVMDRRLNILMACLRSGHLYERDHAPKKGLDNT

SEQ ID NO: 243773 - protein, 342 aa, unidentified
MEKVSIIGLDLAKRSFQAHGALADGGVGFRKKLSREKVLAFFAEHPRGIVAMEACGSAHHWGRAIRDLGHEVRLIPPAYVKPFVKRQKNDAADAEAIAEAASRPTMRFVAVKTEEQQARAMLFRTRDLLVRQRTQLINALRGHLSEHGVVAAQGPANVKVLKEAVEDQPTSLPLLIVELARVFLDQIEGLSKRISELEKVTVHEAACGETTRRLQTMPGVGPITALAIETFAPPMDVFKRGRDFAAWLGLVPRQHSTGGKQVLGKISKMGQRDIRRLLIVGAMSVVRSASRKGAPEGSWLQRMLARKPKMLVAIALANKMARSVWAMLAKGEDFRVPMVAAS

SEQ ID NO: 243774 - protein, 394 aa, unidentified
MPVTQEGPDRWSRYCPVRAVGPGEADCDWPSQEDEMDTEKKIDRQIVGGVDTHKDLHVAAVVDEQDVVLATNSFATARQGYRQMLAWMNSFGIVQRIGVECTGSYGAGLLRHMKVAGIEILDVTKPDRQDRRKRGKNDDFDAQSAAHAAFAGIRTVTPKSRDGMVESLRILKVCRTTAVAARRVALQLIQGTIICAPDALRDTLRTMTRMQLIRTLAAWRPDLTGFRDVTEAYRIGLKTLARRYLELHDEIADLDVMIGALVDDLAPELVARNSIGYVGAAQLLLTAGDNPERLKSEASFAALCGVSPVPASSGKTVRHRLNRGGDRAANSALHIIAIGRLRTDDKTKEYVARRVSEGHSKLESIRILKRYIAREVYTIIMRRQKQINQTKIAA

SEQ ID NO: 243775 - protein, 393 aa, unidentified
MAMKIVRFNCCGMDVHKNLVVATIGITDRKTNVTEYFQRSFSTLNSDLYRLKDWLRSHHCSDVCMESTGKYWIPIFNILEDEINVHLTHPKYVKAIKGKKTDKKDSKWICDLFKHDLIKFSFIPPKEIRELREIARYRYKLVCMRSSERNRYQNCMTVSNVGLASVVSDPFGKTASNIMKEVMKSNVIDDDKILKLVHKNCKNKDKILDSLHGYRIESDQRFKMEKSLDHMEYLDQLIDSCEVELIKRAYPFRRSFQHITQIKGISVLSAILIISEIGIDMSQFGSDKQLVSWAGLSPANNESAGKKKSVRISKAGQYLKPLLVQCALSAIKDKTSYFGRKYSNIKKRRGHKKAIIAIARMMLVSIYHMILTGEEFQPTDYESLMNSKSNTDQ

SEQ ID NO: 243776 - protein, 492 aa, unidentified
MRTIYPKANPVIENLFERAGSPRKVMCVAFDYAKATHTAMVCNGEGMQLRGAFNVHNTPDGLDYVQKIVSGLCRKHSIAREHVFCGGEDCGAYASNFIHALAAQGFLVVGVNAKDAKNERGNMLASTDKIDLLGVAGMLVKKRGRTIPAEISHVEQLRKLTHHRLSLVQSRTASANRMHALVDQLLPGFLDVDQSGIYPFTRASLWLMSERFSPKGIHGRPMPALVNRLHEFTVHDAEGAARKLKTLCESVLPPPSAMLDCLQQCLSHEVTVYRMFNDSVRALEVETARQLAPTQGAMLTTMPGMGVGLAAGIYAEMADPSRRQALFRMASYAGLVNRLKQSGGPDKEASACGRPRHANVFLKNLLLDLVIHIGNYGDGELKADYLRRTEDGQYSRLTMARKLLRICAHLIGGDFYVPATLRQNPSTEALAQYYQSAWTRILWRWRDAAAIRQAFAKDAPLEQWRCMINELYGLKLSNVSPQAGQTRKEERI

SEQ ID NO: 243777 - protein, 317 aa, unidentified
MNNTEIQTPVNVGVDVGKANLDIALHPSGQFYTIPNTEAHIRRFVRILKNYEIERIVVEASGRHEHALVQACDKAGLPIIVVNPISVRRYAQAIGVLAKTDRIDAQVIAQYAATLKPEFKPIPDKTSQKIKDLLVRRSQLLEMSTMEKNRLQILPKFLHRSIKSLLRMLQNQIETVTRQIEQEVAKVDQWRSKMEIMTSVPGVGKVLAYTFLSELPELGSLNRKEIAALVGVAPINRDSGKLNGKRRIRGGRHRVRTVMFMAMLSSIQCNPVFKRFYERLKAQGKIPKVALIACMRKMIVVLNTMVKNQEPWRGEMA

SEQ ID NO: 243778 - protein, 343 aa, unidentified
MEHYAGLDVSLDETSICIVDAEGRIIRETKVATDPAVIAAVLTAPGIKCRRVGLEAGPLSQWLFSGLAEAGVPVICIETRHAKAVLKAQTNKNDRNDARGIAQMMRVNLYRVVHVKTLQSQQLRMLLTSRKLLLTKWLDIENDLRGTLRNFGLRVGPVSERRFEARVLELVDGHPMVAAIAGPMLAARAALREQFIVLDKMLIDQARADPVCRLLITAPGVGPVVSMSFRAGVDIPQRFAKSRAVGPHFGMTPRQYQSGQTDWTGRITKCGDEMVRTALYEAAQVILRRTDRWCSLKAWGMKIAQRRGMEKAIIAVARRLGVILHRMWVDGTEFRWGKEPVAA

SEQ ID NO: 243779 - protein, 445 aa, unidentified
MSELIPAAEPDFAAFIGIDWADREHAWALELSGGSRREKGTLEQRPEAIEEWAQQLAARFPGRPVAVALEQSRGALLYALCKYPHLVLYPVHPYTSHSYRKAIFPSGSKDDPRDAGALLDLLLWHRSQLRPLRQQEAAIRKVQILVEKRRDLVDLRTAQTNRIAAELKLCFPQVLDWFDQLNSPMVVDFLLRWPTLEQLRKEPRDMLRTFFVQHGSRSSARIDARLEQIDTAQPLLNDSAILDSCCVLIQSLLPVVAALNQAIRRLEDALEQTASAHPDFSIFRSFPGAGPALAPRLLAAFGSDRDRYRSAAELQAFSGTAPVIESSGSSRWIHFRRSCPKFLRQTFHEFAAQSIPHCQWAAEFYQRHKAKGKRHHAIIRSLAFKWIRILFRCWQSKSNYQDSLYHAAPALPTPLSSNAPSAGRNPFNSSLQKLADRFKPLPTIS

SEQ ID NO: 243780 - protein, 355 aa, unidentified
MNSGKYIGLDVHQATICVAVMDAKGKVVMESILETKATTILEFFAGLRGTLSVTFEEGTWAAWLYDLLKPHVANLVVCNPRKNALLKHGNKSDKIDARKLANLLRLNDLEPVYHGETGVRMLRELARSYLTMVKDVSRVMSRLKAIYRSWAIPCAGRDVYYTRHRGEWLGKIPEAGCRRRAEQLYQQLDMLQPLRQQARRELLAESRKHTITAKLRQIPSLGPIRSALAVALIQTPHRFRTKRQLWTYSGLGLETRDSGEYHYVEGQVRRRKKQVFIRGLNKDHNHDLKGLFKAAATRASVRPGPFQDFYQRSLAKGIQPTMARLTLARKIAAITLTLWKKGENFDVEKLKAQAA

SEQ ID NO: 243781 - protein, 312 aa, unidentified
MTSGRNVGVDVCKRWLDVAVHESGQVWRVSNDAKGFASLIARLNEIEPGMIAFEATGGYERRCVKALGEAGLKAAVVNPTRVRRFAQAMGIAAKTDKIDAKVIAHYASVAPLNPQSAQTPLEERLAACVERRRQLLTMVVAEKNRLSSSPECMLTDIEEHLAWLDERVAKLDEDIRACVEQKEEWRERSQIIDSVPVVGPVTATTMVAELPELGQLNRQKIAALVGVAPFNKDSGPKKGKRKIYGGRAGVRGTLHMATLSAVKCNPVIRAFYQSLRNRGKEKMVALTACMRKMLVMINVMVREGKRWRYLPA

SEQ ID NO: 243782 - protein, 342 aa, unidentified
MIAAIDIHKRVMQAAVLEPETGEFVEERFSGREGLNEWAVRWRSRVSEVVIEATTGWRWVARELEAAGFEVHLVDPGQAKALQGRKRKAKTDRLDARWLCLLLARELLDQCEAWLPPAEIQELRDRTRLRKALANDRSRSAQRLHALLTQEGWPCDRARLLTAAGRRWVAGLALPAASAMHAQILLATVEHFDAQLRTIENELRRFAKQDARCQRLETIFGVGPIIACHLLAEIGEASRFRRARQIVRLSGLDPVVEESADSKRRGKLAKAGPPALRWAAVQAAQHAGRANSPDRDYYRKTSRRIGSQRAKLSVARTILHRAYDELLELERQQTITEQPLAA

SEQ ID NO: 243783 - protein, 354 aa, unidentified
MLHVGLDLSRRRVDVCAIGETGELVGQFRSPVDRDGLYGLSRRLEPYGEQVRAVVESMNGARFVHDELTAYGWRVLVADAQRVKGLAPLACKTDKVDARVLAELSWRDLVPAIWLPTAGVRCERERARYRVHLVKHRTTLKNRVHSTLIAHGHQAPVSDLFGAQGRRLLASLELPDPWAGTTTATLELIDDLDRRIAGIERELQRAGAEHRYVPILMTAPGIGWILAYTIAAEIGEIERFPTAKRLVSYTGLCPRVHQSGEVDLRGRLSKHGPRYLRWALIDAAAHASRHPIYTERYQQIKRRVGRQRGSKVAQIDLARRLAEAIWHMLTKNEPFTPFTPTGATRPLAATTAPH

SEQ ID NO: 243784 - protein, 369 aa, unidentified
MGDGIRYVGLDVHKDGIVVAVAEGGLRSEVRDYGRIANTPAALRRLAHKLDREGVTLRLCYEAGPCGYGIQRQLSALGQECIVVAPSLIPKRMGDRVKTDRRDAANLARLHRAGELTAVWVPDPGHEAMRDLVRARLDAVRALRRARQQLSGFLLRQGCHYGRPAWTKLHRRWLAGLKFEQAVHHIVLEDYIAAVEAAQDRRDRLTAQIAAMLSDWTLAPVVAALQTMRGMALVNAATLIAELGDLARFANPRQLMAYLGLVPSEHSSGASVKRGSLTKAGNSAARRLLIEAAWTYRFPARISRELRLRQEAQSRAIREIAWKAQLRLCARYRKLARSGKPANVVTAAIARELAGFVWAIARRVPPAVS

SEQ ID NO: 243785 - protein, 415 aa, unidentified
MDVLYPRCCGVDVHKKQVVACLLTPGPAGAPRKAIRTFGTTTAELLRLVEWLQAAECTHVAMESTGVYWKPLYNVCEGLFTVLVANAQHIKAVPGRKTDVRDAEWIADLLQHGLLRPSYIPPQPQQELRELTRYRTTLLRERAAEVNRIQKVLEGANIKLASVASDVLGMSGRAMLEAIVAGTTDPAVLANLARGRLRDKRPALEQALSGRVHPHQRFLLAEQLCHIDALEESIQRVSAEIAERVRPFETEIALLDTIPGVARQGAEALLAEIGPDMSRFPSAHHLASWAGICPGNHESAGKRKSGKTRKGSPWLRSLLVEAAWGASHTKDTYLSAQYRRLAARRGRKKATFALGHSILVSAYHILATRTPYADLGGTYFDERARTSIEHRLIRRLERLGLRVSVEPLLPATGVA

SEQ ID NO: 243786 - protein, 354 aa, unidentified
MATYYIGADVDSKMTELAIEKNKKIVRRYRVPTSIPAIREVLSSIDGKKHLTFEEGPMAGWLYRNLKDSVHELIVCDPRRNKLIACDGDKDDSIDSGKLAELLRGGYLRAVHQNEDMDRVILKQWVSLYHDKVREAVRQINKIRGRCRMYGIRIPRRALRDQVIRCQWMTKLKERALAEQLSVLWIGFDTAAKQVQMSKRQLIRHSKAYQIVRYWSEMPGIALIRATTLLAYLDTPWRFSNEKKLWKYCGVGLQRTASGTDRRGRPNRGKLKLAWAVNRRLKAVVIGAAMSAINQKQNIFAFEYERMIRNGLTAGNARHAVARKLLSVLWAMWKTTSRFNESLVCYSPATVTAN

SEQ ID NO: 243787 - protein, 408 aa, unidentified
MNTLYVGIDVSSKSNVVYLMLPNGDKHSNFSVANSHEGSTLLVKKIYSALTSHSLDTVLIGLEATSVYGDNLVYFLREDATLAPFNRKIHVLNPKQVKKFHDAYNDLPKNDYVDSFVIADCLRFGKINKEVYMGEYRYKALQNLTRARFFAVQNLVKEKQRFMNVLFKKYSTMTQEKVFSDAFSTTALAVYDEFESAEALANMDLHELTDFIIEKGKNRFPDPDAVAKAIQKAARSSYRLPKTVNDSVNQVLSISITSMKALESQIKEFDKAIKAQMELLPNVLISIPGIGPVYSAGIMAEIGDINRFNSQAALAKYAGLAWKQHQSGGFESEVTRLIPSGNRFLKYYLCEAAFSLVRCDKEYSDFYHLKYKEVNRYQHKRALALTARKFVRLVFRLLKDNRLYTSAE

SEQ ID NO: 243788 - protein, 320 aa, unidentified
MAQQGRIVGIDVAKLKADACIRSLQLRLSQPSTAQGQQDMITWLRRNEVGLAVMEASGGYERVWAEALRAAAIAVRIVDPKRVRYFAKSAGRLAKNDPIDAEMIAWFAETFAAAAEPAHDADRDALNRLVTARSLLVRLATPIRQLGEHGQPRVVENAQRAILKTIKAQLAKLEAAIEAKIAANAQFLARRAIIASVPGFGDHFVAGALAWLPELGRISNKAAAGLVGVAPYADDSGQHRGERHIKGGRRDIRTLLYMAALGAATRHNPVVMAYYKRLRAKGKKTKVALVACMRKLVVILNTMLARGEMWNPTPRTTAVA

SEQ ID NO: 243789 - protein, 351 aa, unidentified
MKTQARTTPKLWIGIDFHKKTWRVHFRSDLFSGNPFSMEPSPEQLQKKVLKEFPDYSVETIYECGCFGYWAHREFMSFGWKSYVVNPADLPRMSKQKFQKTDSIDARALSKFLKLGLIRNVSIPNVEREQFRGLFRRRRDLVKCARSIKVRIKNLLIYYGRSVPGELDNANWSHAFRDWLRKLEWEYHTAQLIFLSSLKQEEFLHYEINEIGNQLRKYCRENHKKEYNLLMTIPGVGPLTAICFIAEVGSVSRSKNFKHLTSLVGLMPTTYQSAGTHKTQGVTPRCLSILRSYLVETAWQAVRIDPVMQEYYRKHAGKKPNDIIVKVARKLLSRIYGVLRTETAYEIGLVA

SEQ ID NO: 243790 - protein, 475 aa, unidentified
MVKYVLGIDASKKDIHVCLSVIDLRQQVKVKATSKFSNSTQGFKGLVSWLNRYTKESDVPLVSVIEATGVYYESCALFLYNAGFDVAVVLPNKAKKYLQALGLRSKNDKIDATGLARMGAEQCLELWQPMDEFFFTLRALTRHHQSLQELRTNVNNQLHAEEHSIYSIKSVIKQHKKLIATIEEQLKEIEQRIHDHLNNNAEVAEKINHITAIKGLGYMTVATILAETNGFLLFKSISQLTSYAGYDVIEDQSGSHKGKTKISKKGNKRIRRALHMPALNMIRYEVGSFKPFFERILKRHNQKMKAYVAVQKKLLGIIYTLWKKNEAFISDVQNHLSGNVETVPSFANAKLTENYFLKNLLLMTVPCTRLGVCLLAKLIRESVSKNEPEAALDRLHTFLTKFFKELCDSHGVEFRKDETVNALYGKYIKVIKGKGFLESSMAEKIVQFTFQIMDAFNDIRNNKSFAHDNPRIKLR

SEQ ID NO: 243791 - protein, 315 aa, unidentified
MVGVDVGKDNLHYTWREHPEQVLACGAVRNTPGGIGKLLRRTRGDLVIEPTGRYGEALVRAARAEGREVLLAPTRRAKAALASLYPRAKTDRVDSAGLATFGLIGYGLRPYPLPSVAVDTVRQLQRARRTYSRQLASVKQQVKSLPRAAAALEPLRLLCIAQMAQLDREIAAAAALDPRIGSAARQLIAIPGFGPVVSVAVATSLIDRQFSSPDQFVAFIGLDIQVQQSGRSKGNHGLTKTGDPELRRLLFLAARAATTSKTDTQWRQRYQQLLASGMATTAATNVLARKLARVAWSIVAHGTSYSAARVGNPGT

SEQ ID NO: 243792 - protein, 351 aa, unidentified
MPSQAPPGAEVRFYGRIGGDLEALDKVTRKLQAKGAELRFAYEAGPCGYQVYRHLTAQGHSCLVAAPALIPRRPGDRLKNDRRDALALARLLRAGELTPVKVPDADDEAMRDLTRAREDAICVERRARQRTVAFLLRHGRVYPGKTTWGRGHWAWLLQQVMDHPAQQIVLQEYLDAVREASARVLRLTGQIRDLVPQWHQAPFVAAYQALRGVSFIVAATVVAEVGDLDRFNNPKELMAYLGLVPSEHSSGASVRRGRITKTGNSHARRVLVEAAWAYRLRARVSRTLLKRQEGLPERVRQLAWKAQLRLCTRYRRLLARGKARQTIVIALARELAAFLWAIGRAVAPATA

SEQ ID NO: 243793 - protein, 431 aa, unidentified
MPISGGIMEIIKNKVCGADIHKKFLVATILSRDGTQISERFGMMLDDILKFKEWVIANNCEQVAIESTGVYWVPIYTALEDKIEVIVANPYQIKHTPGRKTDKVDSEWIAELCLKGMIEPSRIFPKEDRELRTLTRARENLVNNRTQMKNRIHQILEYSCIKISSVLTDIFGKSGRFLLEGLLEGKTLDEILIGTKSKTIRKKEKQLREAIKNSLDPAQILVIRYYLEQMEEIQKKIDNLDTEIMSRIKSKKEDLEIAMSIPGVAFTSASSILAEIGNYRDFENGSKLAAWCGLVPSIYESANKRITGSITKQGSKHVRRMLVQVAHSISRIKNSKLKSFFLRIKAKKGTKIAIVALARKVLCILHHLLVNREMYEETVELKPKSLKFDRTSSPIQITEQDMIDTLTKAGYIVKKMDKGGGSRGGYSTPLS

SEQ ID NO: 243794 - protein, 419 aa, unidentified
MNMLITTSFTAFIGIDWADTKHDVCIQSADGDEREFDVIAHQVERIDEWANAMRQRFGSPIAVAVELSKGPIVYALQKHDCFVIFPINPSTLAKYREAFQPSRAKDDPTDAELAVDLILRHPKRFKPLQPQSVEIRMLVSLVEQRRSLVADKIRITNRLRAALKQYYPQSLEWFDHIDTPLFCDFLTRWPTLLQVKRARKMTLRHFFQEHSMRFEYVLERRWNAIKTATPLTLDEAVVVPHRLQALVYVEQLRVMLNAIKQFDAEIERVAKQHEDYALFTALPGAGPNLAPRLLVAFGEQRDRYKSAADLQKYSGVAPVTERSGKKHWVHWRWQCPTFMRQTFVEWAAQTINKSYWAGEFYRQQRAKGKTYQAAVRALAFKWIRILYRCWQTRTLYDEVVYLKALERRGSPLLSEAKIT

SEQ ID NO: 243795 - protein, 370 aa, unidentified
MNATTFVGLDVHARSIKAVALDAMTGEVRSATFGYDACAVAEWARSIDPAARCVYESGVTGFDLQKKLAALGVDCVVGAVSKMIKPAADRRRKNDRNDAEFLARMLSVGNVVEVWVPDDECEAARDLVRALDDAREDLKRQKQRLSKFLLRHGLVFDEVNAAGQRKGNWTGAYWSWIKSISFGEKADNDAFAFYVDAVRRAEEDKKRLEKLVADEASRPRWKKKVDSMRCLKGVDVMTAADIVFEAGEFARFRNARSFAAWLGLTPSEHSSGEKVAQGGITKAGNKHLRRVMVEAAWHYLNASPHSKGLAPGQAPDPAARRHASKGVRRLVERRAALLERGVHKNKANVATARELACWCWAVGLMAEGAR

SEQ ID NO: 243796 - protein, 369 aa, unidentified
MDKITRIGVDLAKNIIQVHGVDSMERVVVRKAISRQKFLEWFANLEPSLVAMEACSAAHYWGRKLRALGHEVRLIAPQLAAPYRKGGKHVKNDRLDAEAICEAAGRPHMRFVAVKTADQQNVLVLHRMRDGFVEERTALVNRLRGELVEFGLFLPQGIHAFRAHFVEALEDGATELNGIARTALLRGWEHLQALDQQIAWCDVQVATHVKQDSNAQRVMAVIGIGPLTASATVATVGDARLFKNGRQFAAWLGTVPKQKSSGGKTRLGRITKQGNTYLRTLLFQGARSAVTSAHRRTDRLSRWIVQLQARVGWYRTLVAVANKHARILWAILAKGERFDPSYVSTPSTPGPTTVGQQREQVNSQRHLKA

SEQ ID NO: 243797 - protein, 315 aa, unidentified
MEHAAKEASFVGIDVSKDRLDIHVRPSGRAFAVARDGTGLDQLVDDLRHLAPALIVLEATGGFELTVAAALAGAALPLAVVNPRQIRDFARATGRLAKTDALDAQVIALFAERIRPEPRPIASADRQVLAELIARRRQVVEMIGMETNRLHQARNPRVQRMLRATLKTLKAQLAELDRDIDDTIKRSPVWQAADDLLTSVPGVGDVTSHTLIADLPELGQLDRRRIAALVGVAPINRDSGQMRGRRTIAGGRIDVRNVLFMATLTAIRWNPVISRHYQALVDRGRPKKVALVACMRRLLGILNAMIRSSTPWQCA

SEQ ID NO: 243798 - protein, 344 aa, unidentified
MQVTFGVDLAKRVFQIHGVDAGGAVIAQRQLKRGQVLSYFARQSPALIGLEACGSAHFWARELTRLGHEVRLMPASYVKAYVKRNKNDARDAEACCEAVGRPTMRFVPVKSVAQQCARSIHRARDLLVRQRTQLGNAIRGLLYEMGITAAEGRAGCKALIDKALAHDPAIAPALLTSLTPLARQWRALDDEVAGLDQAIVAAARADEATRRLMTIPGVGPVTAHAVVCAIGDGGQFASGRDFAAWVGLTRQNHDTGGKARRTGAISRAGDSALRCLLVLGASSRLRHVRAKPDAGRADPTVAWIHGLLARRPVRVAVVAQAAKTARIIWAVLRSGQSYRAGAAA

SEQ ID NO: 243799 - protein, 391 aa, unidentified
MVCVGIDVAKDKHDCCILDSDGTVRADCFTIPNNMDGFKQLLQTIRDCTKKSDKIKVGLEATGHYSYNILGFLLDNDLAVYVMNPLHTNLYRKSLSLRKTKTDRVDARTIATMLLSDVDLKSYTDTAYHNEELKSLTRYRFDKVRERAKLKQSVSRLVTILFPELEKLVPSLHIASVYALLSEYPGAKQISEIHLTKLTNLLATASKGRYGKDKAIQIRDAARTSIGSVMPAKFLELKHTIKLIRELTSEIDEIEVSIQKIMDELNPPILSIPGVGIQSAAMILAEIGDFSNFESPDKILAYAGCSPSTYQSGKLTNCYAHMEKRGSRYLRYALYNATKYVCHWNPVFAKYLAKKRAEGKHYNVALSHATKKLVRLIYALQKSGKAYLTAA

SEQ ID NO: 243800 - protein, 339 aa, unidentified
MSHNVIGLDIAKSVFHLYTIQADGKILKKMLRRQQVLEFFANYPVSLIGIEACGSSHYWARELIALGHEVKLLNARHVKAFVKGNKNDFNDAEAIFDAVSRPNVRTIAIKTMEQQDIQLIHRIRQEAVKRRTALVNQIRGLLGERGIVIGQGIHQVRKHLPELLEDAENALTTLSRAAFAEQYERLLELDKEIKRYDQKMGELCKANELSKRLAEVPGVGPMTATIAAADLGEGQHYTNARHYSASLGIVPRQSSSGGKSVLLGISKRGNCYLRSLLIHGARAVLRTCHNKEDKLSLWLQKLIKRRGFNVAAVALANKNARILWALAQKNEHYQTAVSA

SEQ ID NO: 243801 - protein, 369 aa, unidentified
MNSIAQRYVGIDIHKRFSQVAVMDGYGEVSQQRRLWHNDVEEIRAFFKGLGKDVSAAIEPTCGWTWMVDELEALGIEMHLAHPPAVALIAKSHVKTDKVDARALAKLLRLNALPEAYIAPAEVRQERMLLRFREGLKKIRIMTKCRIHAALLRYNLTGPDVTDLFGATGRKYINEVELPDNVRFIVDNQMALLEYIEVIMRRIEERINVSIKEDRRADLLQSIPGVGKLTAYLLLAEIGRIDRFRSPGAFASYCGLCPSVDHSADHLRYGRIYGGRRCLKWALVESAQVAARYEPGLKRIYEAKRAQKGAGRATVVIAHKLAKIVYRVLKEQAPYYCAQPGKGYVRTYKRRANRKMSPAGPRSTVRASM

SEQ ID NO: 243802 - protein, 416 aa, unidentified
MPAFTLYIGIDWATQTHQVCVMDAYGAILREFVVDHTGESVREFLRSLEAASVEPSKIAVGIEVPRGPIVEALLERGYAVFAINPKQLDRFRDRHSVAGAKDDRRDAFVLADSLRTDQHCFRRLSIEPATVVRLRELARAEQEAGEELRRVANQLFQLLLRYYPQVLELCRFPDEPWIWGLLEIAPTPEQAHRLTLARLRNMLTKHRIRRVTAEDVREILGRAALPVATGVAEAISERVLLMLPRLRVAYQQRKQIVERMEALFAHISGAEDESCGSLRRDVAILISIPGVGRVIAAALITEAFDALSQRDYDALRAHGGTAPVTRRSGKTTQIVMRYGCNQRFRTALYHWARTSVMHEERSKHHYARLRGVGHKHARALRGVADRLLAMLVAMLKAGQFYDAARRAVTPPVASAA

SEQ ID NO: 243803 - protein, 462 aa, unidentified
MNPLFVGIDVSSRNNVAYLMNPDGSKHSSFSVQNNPGGAKLLAERIVSALRSMQLSDVVIGLEATSIYGDSLVYALREDGSLGQFQRKIHVLNPKLVRKFKDAYPDLPKNDSVDAFVIADHLRFGRINREVYMDDYRYKALQTLTRARFDVIQNLTREKQRFANYLFLKCSGIAQAKDIQNTSATTIALMERFETVDDLANADLEELTAFITETGRGRFAYPDATAKAVQAAARASYRLPKTVNDTVNQAMAVSIASMRALEKQVKVLDKAIEQQFEIIPNTLTSIPGIGKVYSAGIIAEIGDIHRFDSQASVAKFAGLVWHKDQSGEFEAEHSRMIKSGNRYLRYYLLEAANSVRRCDSEFRRYYDLKYHEVNKYQHKRALALTARKLVRLVLSTAEGQPPVYPAGGLSAPLAALVFMPCFKIPQRQGLGWCCLFVAWIVVLAPFRLNFFRIIYLTSYHWT

SEQ ID NO: 243804 - protein, 351 aa, unidentified
MVVVGVDVHKWTHTFVAVDQVGRQVGQLTVDATAKGHAKALRWARAGFGNDLVWAIEDCRHLSARLERDLLTAGQSVVRVPPKMMALTRASARTRGKSDPIDALAVARAFLREPGLPVASHDEVSRELKLLVDRRETLVAQRTATINSLLWRVHELDPERAPKPRSLDLAKHQDLLRDWLLTQSGVVAELALDELSDIVAFTARAKELERRIAAIVEAIAPVLLAMPGCGRLTAAKLVGESAGITRFADEAKFARHAGVAPIPVWSGNTAGRVRMTRSGNRQLNAALHRIAVTQIRLDGGLGKIYYEKKKAEGMSTTEALRCLKRRLARTVFNHLIADHKTRQTACLPAAA

SEQ ID NO: 243805 - protein, 341 aa, unidentified
MDIAVLGIDLGKNSCSVAGLDASGKVILRRRMQRKTIVGLASKLSPCVIAMEACCGAHHLRRVFSAQAHTVRLMSPEYVRPYVKAQKNDDRDAEAIAEAATRPTMRFVTLKSEEQLDMQTLHRARDQAVRERTSLMNQLRAVLLERGVIVPQGRAKLRLRVTELLRHGTGELSSRIQLLIEDMLTRWQGLDERIAVFDAEFTAEAKRDEAARRLTSIPGIGALNATALVAAVGDAETFARGRNLAAWLGLVPRQATTGGKPRLLGITKRGSKYLRKMLIQGARAALPTLSRSNTRLGQWLRGLLARAHSNTVVVALAAKMARIVWALLRYGTTFEPRAIAI

SEQ ID NO: 243806 - protein, 323 aa, unidentified
MLRAAKTLVTNQEETSRRCSTTQHPFSCGIDLHARTMDVCILDQAGETLLHRNMTATPEALLKAIAPYRDQIVLAAECMFTWYWLADLCAAHGIPCVLGHALSMKAIHGGKAKNDKIDAHKIAVLLRGGLLPQAAVSPAEMRATRDLLRRRMPLARPRGALLAHVQNTNSPSHLPAIGTKIAYKANRDGVAERFAAPAGQKSLEVDRALIGFYDHRLRDVALSIVNTAKPHDATTRYRRHTVPGIGTILRLVLLDDIHALARFPRGQDVASSCRLVTWARESAGKRSGTSGTTIGNAQLTWACSEAAVLCVRDHPAAQPWLSR

SEQ ID NO: 243807 - protein, 344 aa, unidentified
MHITTLGIDVAKNVFQLHGVDARGRAVLSRRVKRGQLLQAVASLPPCVIGMEACGSAQHWGRAFEQLGHTVKLMHPKYVKPYVKTNKNDGRDAEAICEAVSRPTMRFVSIKTVEQADLQAVHRTRSLFVKHRTAVINQIRGLLAEYGLVMAPSPGKVRPALVRFLDDTASGLTAFARDTFSELYEQLTELDSRIERVTHRVERVYRAHPVCQKLAAVPGIGPLTATALVATVGRPQAFHNGRHLAAWLGLVPRQYSSGGKERLGGISKRGSRYVRTLLIHGARAVVQRAERRTDTQGRWLCALKHRKGTNVAAVALANKNARVIWALLAHDEAYRPPASAPAGS

SEQ ID NO: 243808 - protein, 351 aa, unidentified
MERYIGLDAHASSCTLAVVGPSGKRLGSQVVETNARALIEVLGGIPRNRHVCIEEGTLSGWLYEVLERHVEELVVTGVRKSRGPKSDKADAFALAEQLRIGSLETRVYKGRGQFRRLGYVARAYGFVVRDTVRVKNRLKSVLRSRGVGYGAGRSVYATLDRAHWLGELPESARPLAQLLYEEHDALAGLKAKAKKALLAEARKHREWRLLKTCPGLGPIRTAELLPVVVTPYRFRSRSQFWAYCGLGIVMRSSSDWVRTRTGEWVKAPVQQTRGLNRNFNHTLKRTFKGAATTVIRRADDDPIYLHYERLLDGGTKPNLAKLTIARQIAAVVLALWRTGEGYDPKKLEVTP

SEQ ID NO: 243809 - protein, 354 aa, unidentified
MRKIRVILDKLQRLFVGIDMHKRSWTVTVRTRDVEIATTTMPASCDGLLKFLRPYMAHPIEVVYEAGYFGYWLHDYLVDRGIECIVTPPSLIPEARGNRVKTDKKDSRKLAKCLANGELKRVYVPTPAERSAREVSRRRRQLIGDRKRVQCRIKSVLSTYGISIASPKGKWTARFRANLGLLKLYDHWLAASFQQLLIQYDQLTDLIHKQTALLEQLAATEPYRARVALLHSLPGVGIILAMEFLLELQDVARFRSAKALAAYLGLTPSQHSSGESVRLGHITRTGKPTLRGMLIECSWRAIAKDAALRQRYDHLQVHIGGKRAIVAIARRLALIARRLLLDNQLYQPELHAAH

SEQ ID NO: 243810 - protein, 414 aa, unidentified
MQVMVERCCGLDVHQETVVACVLIGAPGIRPKKEVRTFRTMTRDLEALRDWLKALGVTHVGMESTGVYWRPVYSVLEGHFELIVGNAHHVRNVPGRKTDVKDAEWIADLVRHGLIAKSFVPPPPLRELRELLRYRRKLVESQTAERNRLLRLLETANIKLASVASDVFGVSGRAMLEALIAGDAPAEAMAALAKGKLRRKRDELELALTGRVQEYHRYLLTMQLHRLEAAEQDIEALDQRIAERLEPYRMQHALLMQIPGVDWLVAAVLVAEIGVDMSVFLSAHHLAAWAGVCPGSHESAGKQETGRARKGNVHLRTILVGAAVAASHTKGTYFKDKYYRLKARRGALRAAVAIAHKILVAAYRMLSTGSAYRELGEIYLDQIDQTRTAANLKRRLERLGYVVTLQLKEATSAV

SEQ ID NO: 243811 - protein, 386 aa, unidentified
MKTQTQSTSNTATEDCATIFVSIELSRKGWLIGIHTPLADKIGLHKFEAGDSAGLLALVGRIAEKVECATGNPSRVLSCYEAGYDGFWLHRILDEAGVVNHVIDPASLQVNRRARRAKTDRIDAVGMLRALMAFHRGEDQVFSVVRVPSVEEEDARRVHRERERLITERIQHVNRIKGLLATQGIYDYQPLRQKRIDRFDALKTAMGTAIPRHLRDELMRHLQRLDLVLEMIRAAEEERDRVVEAEMAVNESARKIQTLVAMRAIGPQLATVLVGEVFQKEFANRRQLASYAGLTPSPFNSGSVVREQGISKAGNPRARTAMIEMAWLWLRYQPGSALSHWFRKRAGTGSGRIRRITIVALARKLLIALWRFLETGLVPDGAELKA

SEQ ID NO: 243812 - protein, 422 aa, unidentified
MKTLLPQRFTAYIGMDWADTKHDVCLQVAGETLRHFSVIEHTPQSIDRWAKSLFERYGAPIAIALELNKGPLVAALQKYEFFCLFPINPSTLAQHRKTFVRSGAKDDPTDAQWALELLLTYPQRFAQLMPQSPAMRILASLTEHRRALVDERVKVSNRLICTLKEYYPLALELFSNHDTLVFCDFLMRWPTLEHIKRSRQNTFLKFFNEHNARHPQLNQARWEIITKAMPLTQDPGVIRPSQLYATALASQLKGLISTIKDFDREIEETANTLADYPIFKALPGAGQHLAPRLMVAFGEQRDRFSDANAVQRYAGIAPVTERSGKKKVVYWRYQCSTFLRQTFVEWAAHSITQSTWAGAYYRQQRAKGCSYQATLRALAFKWIRIVYRCWKTSTVYDEKAYLQALTRRGSTLVEVPMEVVTG

SEQ ID NO: 243813 - protein, 361 aa, unidentified
MTESSDYESVQVFIGVDVGKDTHHAVAINRSGKRLFDKALPNDENKLRSLISDLKQHGQILLVVDQPATIGALPVAVARSEGVLVGYLPGLAMRRIADLHAGEAKTDARDAAIIAEAARTLPHALRTLKLADEQIAELSMLCGFDDDLAAQTTQASNRIRGLLTQIHPALERVLGPRLDHPAVLDLLQRYPSPEKLASLGEKKLAAQLCKLAPRLGKRLAADIAQALAEQTVVVPGTNAAAVVLPRLALQLITLRKQRDEVALAVEQRVLAHPLYPVLTSMPGVGVRTAARLLTEVACRAFASVAHLAAYAGLAPVTRRSGSSIRGEHPSRRGNKALKRALFLSAFAALRIRSPGLTTPAK

SEQ ID NO: 243814 - protein, 353 aa, unidentified
MAVAEPDGTVIEYGAIPNDPSSVRRLVEKLSRDAQLRTAYEAGPTGYPLHRQLTGLGIENLVVAPSLIPRRPGDRVKTDQRDAVQLARLLRSGDLTPVWVPDEAHEALRDLVRARDDARAEGLRAKHHLSKFLLRQGVIAPARVGRAWSARHQAWLNTLTFHDRAAQVTFDDYLACVRAATERLRRLDAALLECGASSPQVELLRALQAVRGIGFLTAVTIVAEAGDLRRFRSAPAFMAYVGLVPSEHSSGGSRRRGHLTKTGNRLLRHVLGEAAHHARLQPALSKELSHRQQGVAPGVVEISWRCQQRLHHKYRHLGGRIGRQRAISAIARELAGFVWAIGQALPPAALMPA

SEQ ID NO: 243815 - protein, 365 aa, unidentified
MLYLGIDLHRKQLTVSVRNEKGDVILRRQVSTRWERVREFLEWIKAEAEPEGGFVAIVETCGFEDWLIELLKEHGCREVVLIQPEKRSKKKTDQRDAHAMSELLWVNRQRLLAGQKVQGVRRVRLTSVEEQEDRRITAARQRAGRQRTRIINQIKYILRRHNLEWECPTKTFETKKVRKWLREMALSAVERLEMNHLLAQWDLWDQQIKELEKVIGECFYKNATAQILATAPGVSAYSGLALAARIGPIENFPRPRSLANYWGLTPGCRNSGEATDRLGSITKQGSPMARFILGQLVLHVLRKDAWMGAWYGRIKRRRGSKIARVAVMRRLATIFWHMVKHQEPYVAGGTPRLRCQRTEAVQAVA

SEQ ID NO: 243816 - protein, 342 aa, unidentified
MSISYVGVDLGSSNFHQVAVNHSGRPTRNREFTTSEANLIKAFADLHGEIHVHLEAGELAPWASEIIRPLVTRVVCSHPQTNAWIARDRDKCDRIDAYKLASLLRLNEFKEVHYPREPLRRDFKTLVQHYDELTQQQARWKTKLKARLRMQGIIVRGEEVFSARGRQAVLEQVKSPVVRTAIKQLYAVLDQSVASQTEAQMLMLRAAQALPEIRIMRTAPGVGPIGACRFSAYIHTPQRFSSTRKLWKYCRLSVSHRSSNGKPLRRPRLDRMGCGRLKDVSRKTFEAALRRRDNNGFKRAYQRALETTHDATHARLTVQRKIVSTLRAMWINQTPYCDELMR

SEQ ID NO: 243817 - protein, 314 aa, unidentified
MAQFITAAGIDVSKGWLDVALWPADAAVPHIERSEAGCFDRLAAWLREQGVSRVGLEASGGYETEVMDALQARGFEVIRYNAYRIRMFAKANGRLAKNDRADAVVLAHAAAELPVRHATARQPQLDPLVELLNYRRRLHDWIGDCTNQLEHLRDKVLRRHTTARRARLHREVTAIDKKLAAALASSGASGELVRRLRNVPGVGPVLSAALVALLPELGTLSRRKVASLVGVAPFDNDSGNRRGERHIQGGRARLRRVLYMATLSATQHNPVIAAFAKRLAGKEPKVIITACMRKLLVILNAMVRDAKDWSPKAA

SEQ ID NO: 243818 - protein, 330 aa, unidentified
MKNKEFIGIDVSKKTLDVFILSNRFHFTIDNNPSGFSKLLEVCFSKVNHKEDIFFCFENTGRYSRLLSVFLSENHLPFFMANALDLKKSMGLKRGKSDKKDASTIAAYAWKNRDSIQPTTLHAAHVGQLKQLLSLREKIIRHRTAYKNSISDLQDCFLEGETDFIRESQLRLIGHLNEELQRVEEQIDQIINSLPQWQINYKLIQSVRGIGPILAKYLVIFTENFTVFTDPRKFACYAGIAPFEYSSGTSVKGRTKVHPLANKHLKSLLNMAAMGAIQLEGEYKQYFKRRTDEGKNKMSTLNIIRNKLVFRIFAVVKRGTPYVDLYKFAA

SEQ ID NO: 243819 - protein, 373 aa, unidentified
MKYTTVYVGMDVHKESFTLACYTNEKEEAEYVQRTEAHYSKVISYLEAMRFHYGDDVTFICGYEAGCLGFTLYHQLTNHHVRCVILAPTSMPIQQGKKKVKTDKRDARKIAKCLAHHDYSAVHVPTAKDEETKEFLRMRDDHKIALKKIKQQILAFCLRHNYRYPGGTKYWTQAHLKWLRDLKPGGVYQEILEEYLLTYSNLVDKLERLDKRIEELAADEEYAQSVHKLICFLGIKTQSALSVITETGDFKRFGNAQQYASYLGLVPGEDSSGDDQNRLKITKAGNRHLRMLLVEAAQSYGRGQIGYKSKELKKRQEGNSPEVIAYADKANERLRRRYYRMVLSQNKRSNVAKVAIARELACFIWGMMTGNVA

SEQ ID NO: 243820 - protein, 350 aa, unidentified
MTTQLETITAVTGGVDTHRDVHMVAALDQRGAELGVQAFSTDPAGHNNMLAWLEDFGPVKLVGVEGTGTYGAGLTRFLQRNDIVVVEISRPDRQERRSHGKSDEVDAIAAARSAQSGKDTAQPKTRTGNVEAIRALRMVRRSATRDRTSAINQMRALVVTGPDDIRETFRGLTTKKLVSGAARLRPSDPTTVHGATKFALRQLARRVQFLNDEIKQVNDILSPIITATAPGLVARHGIGIDTAATLLVTAGDNPNRLHSESAFAHLCGSAPIDASSGLVQRKRLNPRGDRLANEALWRIVMVRMSSEPRTRAYVQRRTTEGKSKREIIRCLKRYVAREVFKDLKHPLDNQ

SEQ ID NO: 243821 - protein, 355 aa, unidentified
MHKQSIDYTNQDFFLGIDVHKKSWKVTVRTNGMQLKTFSMDPSPGQLYGYMHKRYPGGNYHSVYEAGFCGYWIDRELKRLGFNNIVINPADVPTTQKEKSTKTDKVDSRKLARELEKGELKAIYVPDEFHQQLRSLCRLRSRVGQSQTRVKNRIKGHLAFYGYVIPGQDEMSHWSRGFIEWLKTLEFSYGMGRDYLCVCLEELESHRRRLVDIIRLLRRYCREYGIMEEIKNLRRVPGVGFVTAMTLYVELMDMSRFRTIDQLASYAGLVPSVIGSGEKESNLGLSFRRNRYLRYLLIEAAWVAIREDPALGYVFSQLIRRMTKQEAIVRIAKKLLSRIRYVWKHKEAYVCGLIS

SEQ ID NO: 243822 - protein, 410 aa, unidentified
MRRCIGLDVHREFAEVAIWEDGVVRSAGQIATTPEALRLFAGSLCELDEVALEATCNTHAIARLLERHVGRVVVSNPAKTRAIAEAKVKTDKVDAQVLAELLAANYLPGVWLADDETQSLRRQVARRAHIVRQRTRLKNRVQSILHRNLIPRCPAADLFGRKGRIWLAEQELPVDERQALEALLRQLDFHGEELGLIDADLAKVALARNEVKRLMTIPGIDATVALSLVAAVGDFGRFRTPQQLVSYLGLNPRVRQSGGQPASHGRITKHGRAHARGMLVEAAWVAAKIPGPLHAFYERVRARRGMQIAVVATARKLAVLCWHLIARGEDYAFQRPSLTAKKLRALELRAGMPSRRGQKGKAAAYSLREVRRRENALAEQGEHAYRQLVADWQAKARTKVGAGAATGERL

SEQ ID NO: 243823 - protein, 349 aa, unidentified
MASLPAVAQQITVGVDSHKDVHVAAAVDQVGRVLGTIWVPTTTRGSAQLLGWATRLGAVQRFGIEGTGSFAAGLSRWLQQRGYQVVEVNRPSRQARRRRGKSDPVDAEAAARAVLAGEATTQAKTANGTVEMLRVLRVARRSAIKARGQAANQLHSLLVTAPDPLRQQLRGLPLARLVQTAAAVRPGPLTDPQAATKFALRELARRYQLLAAELERLDAQLAALAPKAAPGLLTRRGVGAQVASALLVVAGDNPGRLRSEAAFSMLCGSSPLEASSGKTIRHRLNRGGDRDANNALWTIAMTRLSCDERTQRYLARRTAEGKSKREIIRCLKRYIAREVYRDITAAVLN

SEQ ID NO: 243824 - protein, 417 aa, unidentified
MKTNWTEQPYFAALDWAKDHHDVIVVDRLGAIVVDFRFAHTADGWRDFDQRMQPLGKCPLAIETSSGLAVDQLLQRAYPLYPVNPKAAKRYRERKVPSGTKTDRHDAWSLAEALRTDGQAWRALRAQDEATSTLRLLCGDEIALIEQRTALVNQLQAALADYYPLALESFEDWTQPFAWAWVKLFPTPTALRAAGKRQWEKFLHCHKLWRPQTAPQRLASWAQGQALNASPAVLTAKSLLAQSLVRVLETLQQQIEEYRRRITEVFAAHPDHDIFGSLPGAKQTLGPRLLSGLGSARERFPDTQSLLCQAGVSPVSYESGQIRKAHVRWACDQFLRHTVHLWANATRKKCAWAQAYYQTKRAQGHSHASALRCLGKRWLKLLWRLWQDRVCYNEQIHLKSLECHGSFVWQKLQAPVT

SEQ ID NO: 243825 - protein, 320 aa, unidentified
MAKKKARSYIGIDVSKDLLEMAVHGSDYHFRSPNKISAFPNLIAELISLRPAMIVVEATGGLEKPLVNALHGIGLPVVVINPRQVRDFAKSLGQFAKTDRLDARVLAHFGAAVKPPVRPLKSQEEQELDDLRRRRGQLVDMLADEKNRRTSAPTPKIREQIEEHIDWLKESIGKLDDQLKTLLKTSAHWQVKDQILQSTPGIGAVVSTALIAELPELGKLNRQEISKLVGVAPLNYDSGKKCGTRHIYGGRAGVRRILYMAAFNAIRYNPVIKEFFTRLTAQHKPYKVALTACMRKLLVILNTMVTSNSTWIDKTAIVSA

SEQ ID NO: 243826 - protein, 529 aa, unidentified
MPFPSLLSDTVSKVIHPTARRSSQASPQPAVNNFAATKMKFGEKVLRSRHARRGRIAPGGSRSLCSHPTRIQRSLPARLAAPVTTSERTKACEAPGIRSTHDGAAMHTRKTTRMKNWKELTHYIGFDWAKDHHSVIIVNTEGQIVADFEFDHSLEGWKSFAEKTSAWPNLAVAIETSQGAAVDQLLQRDYSVYPVHPVAAQSYRQRKAPSGTKTDHLDAWGLADALRVDGHGWKPLQPMAPMTQQLRLLCRDEVSLIEQRTALVNQLQQALAEYYPAALEAFDDWTDSFTWEFVLAFPTPQALATAGKRRWEKFLHTHKLWRPQTAEKRLKLFAQADHFKASEPIIRAKSQFALSLCKLLCTLSQQLKLYRKQIEALFRDHPDHDLFGSLPGAKKVLAPRLLAAVGNDPERYGSQEVLQCIAGTAPVSYQSGRINKVHIRWSCDKFLRHTVHLWADCFRKASAWGQTYYQQKRDEGMSHACALRCLGQRLLKILFRMLTTKTPYDAELHARNQKKHGSWVIKLVNDPGA

SEQ ID NO: 243827 - protein, 354 aa, unidentified
MQNQRNLAFEDIKIYIGIDVHKKSWTVSIYLEEFEHKTFTQPPKPAVLKNYLHSHFPKGNYYVAYEAGFSGFWIYDALKEMDMKCIVVHPSDIPTTDLERRRKSDLRDARKLSRSLRAGELSPIYVPPKWAREDRGLLRLRESIVKDGTRLKNRIKGLLHFHGLSSEHMKGRRWSGAFIGWLESLTLSNNQGTETLKSYIRQLNDNRTELTRITREIRRLSKTERYRKSVSYLVSIPGIGLISTMIWLTELVDIQRFKSNDHLSSYVGLVPSTHSSGETDKVGRLDKRGNKKLRTLLIENSWVVARKDTGMLRAYTTLCKRMQGNKAIIRIARKLLNRIRFVLLNETQYEVGLT

SEQ ID NO: 243828 - protein, 337 aa, unidentified
MEPTTIAIDLAKRVFQIHFVDPDGTIHRKVLTRVQMLPFFANRPAARIVMEACGSAHHWARQLIALGHEVRLIAAQFVRPFVKSNKNDAADAAAIWEASLRPGMRFVAVKSADQQAMLALHRMRQQLVRIRVMQVNQLRGLLYEFGVVLPQGRRPSIQAAQSAIATLTEQLPGMLIDSLRDQLSRLHLLDDQIQRIEQRIIEWRRGDEACRRISEIPGVGPLTATAAVSVIGQARTFRSGREFAAYLGLVPRQNGSGGKVKLGGISKRGDVYLRTLLIHGARAVISSSKHLPAHMRDLLARRPTNVVAVALANKMARTIWALLAYGRTYQPAAALPS

SEQ ID NO: 243829 - protein, 342 aa, unidentified
MYPFYLGIDLHLKRTYVVLMDRQGQVVDERRLANEDMAAYLKKVVPRETYAVLEATRNWPFMYDLLTEHVERVELTHPKEVKAISAAAVKTDRVDGRTLAHLARMNYLPIAYAAPSTIRDLRLEVRHRDSLVRQRTQAKNRVHAVLAGYNLVSPVADLFGFSGREYLEEVMQDTLRPAAVRSIQRDLKLIDHLNQQIAENEESLKLEPEQEQQVKLLCSMPGVGRLGAITLLAEIGDIQRFHSAKALCNWAGLTPRVRSSDTHTRHGRISKQGPALVRATMTRAATIASRYSKRWYHVHEKILHRSCRKVAKVAVARRLLTVIYYMLKHQEPYQEDYSSQDR

SEQ ID NO: 243830 - protein, 390 aa, unidentified
MFYIGIDVSKDKHDCIITNHNGEVLFSPFTIPNNRDGFDELNHKILTLGDDLSKVKVGLEATGHYSYNILGYLLDKGLPTFVINPLHTNLYRKSLTLRKTKTDKVDSHTIVMMLMSNINLKPYSDTSYHNEELKSLTRYRFDKVQERAKLKTSISRLVTILFPELEKLVPTLHMASVYALLDEYTSAHAIADAHLTKLTNLLYKASKGRYGKDTALLFRDAARVSIGSSMPAKSLELKHTIRLINEISSDISEVEARIKRIMDFIQSPILTIPGISYRMGAMIIAEIGDFNRFDSPDKLLAYTGLSPSTYQSGQYDSKHSRMEKRGSKYLRYALFNATKYVCHWDPTFSVYLAKKRNEGKHYNVAISHAAKKLVRLIFAMEKTQQPYRAS

SEQ ID NO: 243831 - protein, 390 aa, unidentified
MPEDAPRPAQAAIRTDLGAIFVSLELSRRAWLITSLSPGGGEKMSKHSVRASDVSGLLRRFAELRGKAAARAGRDFPIIVIQEAGLDGFWIHRVLQSEGIESHVVDAASILTSRRRRRAKTDRIDGETLVRTLMAFKRGEPRVCSMASAPTPQEEDRRRVCRERRTLVGERVTHVNRIKGLLFAQGVFGYEPLRKGRRERLEDLRTGDGRPLPVHLKAQIIRELDRLEVLLEQLKSVEAERDAMLKPATDEAASPAAMLAQLKGIGPQTAAVLWSEGLFRQFDNRRQVAAYAGLAPTPWQSGSIDHEQGVSKAGNPRLRTTMVELAWLWLKNQPTSALSLWFHERVRLGGRMRKTIIVALARKLLIALWRYTTAGVVIEGAVMKAVPATI

SEQ ID NO: 243832 - protein, 399 aa, unidentified
MFVGIDWASRAHELCVVDREGVVVERFGFAHSERGIAGALERLAKLGEPGELPVAIERPDGLLVDRLLAAGHQVVPIHPNAFHAARPRWEGAGSKSDAGDAFRLADLLRTDRHRLRALRPLDQPTRELQALVRLRDDHVAARVAATNQLAALLALHWPGAAAIFARLDSEIALCFLDRYPTPHSTMRLGEARLAAFLRRHSYCGRRSPHELLARLREAPQPVHALDPETVAELVHAQTQLVRTLLNTIADLDRAIAASLDQHAKAQLLRPLPRIGTISLGQVVAEVGPLLDRTSNAEQAAALCGACPITKRSGQQRSVSFRYATNTKARKALMLFADNSRRASPWAERIYRDARARGCRHPHAVRILARAWLRVIWTCWNTDTPYNPERRHHREALTLT

SEQ ID NO: 243833 - protein, 334 aa, unidentified
MYQMLIVHNLKFNVMTYIGIDVSKDSFVAAYPTKSGYTTKTFPNTTTGVRKFVNSLPADCHCVMEATGNYSMLLLYLLQQANIIVSMENPQKIKHFARAMLSTTKTDEIDAKLIATYGEKMTPAPYKIPMESIILLKQKRTVLRQLKKQLTATINLQQSLAVLPKQDPASKVAIEQTVKFLRKQISKMEEEITNLSTKEFGRQVKLLTSIKGISVTIASALILATGGFTYFSNAKQISRFLGLCPTYQQSGTSVNFKGHINRNGDTHLRSQIYVAAFASIRCNAACRETYERLRARGKSGKLAVVAVANKLIRQAFAVVTNNQPYIDGFVSSYA

SEQ ID NO: 243834 - protein, 358 aa, unidentified
MVDKVTKAAVVGGVDTHKDLHVAAVVDQNNKVLGTQYFSTTRQGYRQMLAWMTSFGTLKRIGVECTGTYGSGLLRYFQNAGLEVLEVTAPDRMERRKRGKSDTIDAECAAHAAFSGIRTVTPKTRDGMIESLRVLKTCRKTAISARRVALQIIHSNIISAPDELREQLRNMTRMQLIRTLGSWRPDASEYRNVTNVYRISLKSLARRYLELHDEIADLNVMIAAIVDELAPELIKRNAIGYESASQLLITAGDNPQRLRSESGFAALCGVSPVPVSSGKTNRYRLNRGGDRAANSALHIIAIGRLRTDAKTKEYVARRVAEGHTKMEAIRCLKRYISREVYTLLRNQNRRINSIPITA

SEQ ID NO: 243835 - protein, 356 aa, unidentified
MSSKLNTAIAVAGIDIGKNSFHVIGLDKRGAIVLRQKWSRGQVEARLANTPPCLIGMEACVGAHHLSRKLQALGHDAQLTPAKYDRPYSKGQKNDFRDAEAIAEAVQRPTMRFVATKTGDQLDLQALHRVRERLVGQRTGIINQIRAFLLERGVAVRQGLRFLRIELPGILAKRTDVLSPRMLHLIEGLADDWHRLDERIEVLSSEIGALACGDPACDRLMTVPGIGPIISSATVAAIGNGAAFSKGRDFGAWLGLVPKQISTGDRTILGKISRRGNRYLRSLFVQAAWVVLVRVGPKHWDRYGLKSWIEAAKKRLHHNVLAIALANKLARIAWAVLNKERKFECIRTNKMSPRAA

SEQ ID NO: 243836 - protein, 339 aa, unidentified
MDKSDFAGIEVSQDELLVALRREEQTLPLQSFPNTGEGHRALGRYLARKGRVVRACMESTGVYGLDLALLLQKRPGVEVMVANPRAVRHFAQALMQRSKTDPLDALVLLEFAARMPFQPWQPPSAAALHLCALARRIEAITDLCAAERNRLHAASAAEALPAAVRQDIRRSIAFHECALEKLARQARQLIAGDPLWQERFEQLDSVPGIAPTSAIAILAELALLSPDRDVRQWVAAAGLDPREHSSGSSVHKKARISKAGNRHLRRALYMPALVAVRYDPHLGAFYQHLLGKGKAKMQALVAVMRKLLHAIFGMWKHHQAYDGSKLLALPAEPYIAEVA

SEQ ID NO: 243837 - protein, 347 aa, unidentified
MRFYTNQHQFDCGIDLHARSMYVCVLKHDGEMLLHRTMKAAPEPFLKAVAPYRDGLVVAVECLFTWYWLADLCADEGIPFVLGHALYMKAIHGGKAKNDKIDAQKIAALLRGGMLPKAYVYPAQRRATRDLLRRRTHLMRKRPELLSHVQNTNSQYHLPAIGKKIAYKANREGVAERFSDSAGQKTIEVDLALITYYDALRKDLELYILKTAKHDDAHTLSLLQTVPGIGKVLSLVLRYEIHRIDRFPSVQDFASSSRLVKCSKESGGQRLGTSGKKIGNAHLKWAFSEAASLFLRNNPQGQKLLARLEKKHDKGKALSILAHKLGRAVYFRLKRKVAFDMGIFLQT

SEQ ID NO: 243838 - protein, 340 aa, unidentified
MSIVCGFDVHRDQITFDLVDQLSGEVRTGRLTPATRAGLRRWLASLDAPRLRVALEATTGWRFVVEELERAGARAVLAEPAETRALRGPKRRAKTDRADARHLRELLERDAVPESWIPPAHLQELRTLVRLRHSLAEERRVWLQRIQAQLFHQGAPPVSGRLLGPGGAAASAVLSPAGRELVETGERICAALEREISQLDRQLALWGRRHPACRALQRLYGVGPTIAAAVYAEAGDVRRLSSSRKLVRLAGLDVTVRESADKRPPGRLSRQGAPILRWAAYEAALSACRRGSPDHADYRLLRERLGHGRATLTIARKLLRRAHHILVDVGDDLLAPLPDS

SEQ ID NO: 243839 - protein, 347 aa, unidentified
MDVSIIASVGIDLGKTTFHLVALDCHAKVILRRKFSRTKLLAYTANLPWSIIGMEACSGAHFFAAKLRNQGHEVKLIPGQFVKPFVKTNKNDFNDAEAIAEAVTRQNMRFVPIKTDDQLDLQALHRVRDRLVHRRTALINQIRGFLLERGIAFPKGPANLRKQMPVILEDAERNITARMRRLLDDLWQEWKQLEANITKISEEIEHISHEDQGCRRLRQIPGVGPLVSTAMVAAIGNGAAFRNGRDFAAWLGLVPRQHSTGGKPRLFGISKRGNTYLRRMFVHGARAVLLRVKYDTGGLGQWVHQLEARTARNKVIVAIAHKLARIAWAVLFNQQDYRATAAAAVAA

SEQ ID NO: 243840 - protein, 390 aa, unidentified
MEHLILPAKPEAIYQWLKTTEARFGGRTVSVAVEGTKGPVFSQLLECPWIHVYGIHPATSSRMRNAFTPSGAKDDRPDAEVLLELVENHRDKLRRVHVLDAATARVEQLTMLRRDMVNRRTQLTNQLDGLLKKYFPQALELVGASLHSEMAMDFLTRWPSLMELKGCRSATIKQFYHKHNVRSTVSVEERLKLIAEAKFVTVDTVRNEIWKLELASLVEELKVRVKHVGIVEEQIAEAMKEHPDASLFTELPGAGPVLAARLLAAFGSDRGRYESAENLQRLSGVAPVLERSGKTSRVRWRMLAPQFLRQTFVEWARCTTRVSAWAAAYHEEQLEKGKGNWAIYRSLAYKWIRILWRCWQDRKPYNETEYLKALERRNSPLARRLKTMAA

SEQ ID NO: 243841 - protein, 385 aa, unidentified
MQKRHDESKACLTAFVQDNTVIAVIEMSLASWLVAGLLPGVNREPLKKIAPDPEVLLRLLYRWRDEAIRAGKEITRIAVAYETGRDSFWLARWLQDRGIDAHVIHATSVAISREHRRAKTDRIDTAMLKRAFLGWVRGERGHCSMAVIPTIAEEDAKRPHREREALVKERTRVINRMKAILTQFGVRSFKPALRKAAEKIAEVRTPEEVPLPPNAAAALRRHIEHFRLINGQIKVIEKARLQRLRQNPTDKFNAMVFLLVRIVGLGVETAEQLVHEILSRKLRDRKAVARYAGMTGSPDESGARRREKGLSRSGNERVRKILIQLSWRMLRFQPNSGLVLWFKGRTANSRRSRKPMIVAFARKLIIALWRYVNAGLVPEGFQLAK

SEQ ID NO: 243842 - protein, 349 aa, unidentified
MSTLYAGLDVSLEMTSVCVVDADGRLLAEKQVSSDPEAITKELLVIEGTWERVGLEAGPLSQWLFFGLKDAGLPAVCIETRHAKAAITAMSRNKNDRNDARSIAQIIRSGWFKAVHVKSTDSQELRTLLTSREFLVNKVRDHENEMRGALRPFGLKVGRVGASGFAQRIRDLVSDRPRLALCMEALLASREVLRQQLASLHAALLRVVKNDELCVRFMGIPGVGPVTALAFKTTIDRPDRFRRSADVGAHLGLTPRQFQSGETDRRGRIGKGGDSLTRTALFAAANVMLSRSTQWTALKHWGVTLARRSSLKKAKVAVARKLAVIMHRMWRDGTPFRWTAQEGRRTPEP

SEQ ID NO: 243843 - protein, 423 aa, unidentified
MREAASVSEPRFAAFVAIDWADKKHVWSMQAADSKEPQRGEIDHSPEAVESWVAVLSSRFPGQPIAVAVEQSRGALVFMLSKYEQVHVYPIHPRAAAQFRAALFPSGAKDDPVDADLLLELLVHHRAHLRRLNPDNEQTRLVQHLVEGRRKLVNEKTRQSNRLTAKLKLYFPQMLDWFEEVDSPLVAALLKRWPTLEALQKARPATVRSFLTAHNCRSRELIDRRLEQIRQAIPAIRDQAVLQSAVVMTRILVELIATLRQGIATFDRQIEQAAAAHPDVAIWDSFPGAGQVLAPRLLAAFGSQRDRYGKAADLQQFSGIAPVLERSGKTAWVHFRWACPKFLRQTFHEWAGHSIAFCAWARAYYEQQRQAGKGHHAAVRALAFKWIRIAFRCWKDGVPYDDSRYVRSLRRRGSPLAQALSNL

SEQ ID NO: 243844 - protein, 366 aa, unidentified
MGWMAPLRHQCAKLVFSENHQEREPSMSEITTIGLDLAKHVFQVHGVDAQGTTVLRKRLRRGQVLAFFSRIPRCVVGLEACATGHYWARELRALGHEVRLMPAQYVKAYIKRNKHDAADAEAICEAVGRPTMRFVPVKTAEQQATALLHRGRERLVRQRTMLVNALRAHLAEFGIVAARGLRNVGQLIAIVRDDADIRLPPVAQQVLQVLASQLEQIEAAVAALERQLLTWHKTNPVSQRLASIPGIGPIIATAIATTVADANEFRSGREFAAWLGLVPRQNSTGGKIRLGGITKRGNRYLRRLLINGASANLLRSKATKADPWVIGLRRRRPPLVVAVALANKTARIAWAVMLREKEYQPRAMAA

SEQ ID NO: 243845 - protein, 470 aa, unidentified
MRIIGLDLAITSAHKAMVMDEGGRFLTPVFQVMTWPDELATMLRRAREGAADDTPLVVVMEPTGLAWLPVAIYLLLHGVTVYLVNSQQVADLRRFYKKHAKSDRIDAQVLAKLYLVAQEKLHALRLPSADLYTLQRACKQLDWVTTEITKLSNQIGSLDQVVWLGGWATLVFSDPFGPIARWCREHYYNPYAVLRTGKKHIQQEWLDSGLAGTEDDTQWIPSLVQLAEKVVGVYGDPCPYVDFDALQAETILRQDWLAQLEANRNHLKSDVILPLYRRLHPSGNLHTLYGVGEESAAVFLSYIGDPLRFPDGRHLRGWSGMVPDSKQSSDSEAKGLHISQAGPDLVKKFAFLDAETARRFDPQLARIYYDQMVNKGKHHTQAVCAVATHLLDRILVIATEDRSYELRDVDGTPVTPQRARQIIAEKYTVPEEVRKRNSRRARKARAEQRSEQDFARRQRKRESSPELVRG

SEQ ID NO: 243846 - protein, 476 aa, unidentified
MVLPYEEPKKSRKSEKPAKPNKPRERSLPVPVPASSAGLSVLNPDAAGIDVHSNMHMVCVPAGRDASPVRQFAANTVDLLEIAAWLKKCGVKTVALESTGVYWIPLFELLESEGFEVYLVEPGQLSRCGARPKTDVLDAQWIQRLHSYGLLRASFRPEDSVLALRAYWRQRQMQVRYAASHVQHMQKALEQMNVKLTQVVSDITGLTGMAIVGAILDGERDPIKLARLRDERCHHSEEEIALALQGTWRPEHVFELRQAHALYQFHHQQITECDQQVQAELAKFANRAGEKTRTAKPRKRGRKSNDVRFDAKGPLFQALGVDLTLIEGIDVGTALVILAEIGVDVSRFPTEKHFASWLKLCPQQDESNKTKKRRGRRKGTNRVAKALRMAARSAGKTMTPLGMFYRRIRSRIGGLGAAKATAHKLACLVYRMLKYGEEYVTQSMEEYEAKMKANVLKSLQRKAAAMGFQLSPLPTT

SEQ ID NO: 243847 - protein, 358 aa, unidentified
MQRNKKTFKGQNIYIGIDVHKKNWQVAVITESGYTERLSTAADAKALFKFLKSHYPDGNYRAVYESGFSGFATHYALSDLGVSCVVAHAADIPSSQYELTMKSDRIDAEKLARALRAGLVRGIYVRPKDNLDDRGVLRIRKTIQIQVGGYKTRIKHLLHSNGVELPERFSRSGTHWSRAFIAWLREDVRLLSDTRRSLDLLLLQVETLRANLLEATRRVRALSMTDRYREDCALLMGIPGIGLTVAMTILTEVCDIGRFGNERQFASYLGLVPTSHSSGERVSHGEMTFRGNKHIGPLLVEASWVLIVRDRELGRMYTEYRWRMAGQKAIIKIARKLSNIIFAVLKTRKAYEPYRRNM

SEQ ID NO: 243848 - protein, 355 aa, unidentified
MTGTKYIGMDVHKESISIAVMNASGKIVMECVIETKASMILQFFDGLRGDLQVTFEEGTSAAWLYDLLKPHVTKLVVCDPRKNASMREGNQSDTIDARRLAELLRLNHLNPVYHGEHGLRSLKELVRSYLTITKDLGRVMSRVKAIYRSWAIPCTGKQVYAPRHRAEWLGKIGEPGVRRRAEFYYQQLDALRTVRQQVRRELLVESKKHQAWKRLCQIPSIGPIRSAVLLGILQTPHRFRTKRQLWTYSGFGIETQSSADHRSVDGQLQRVKKQSSIRGLNRNCNHDLKNLFKGAAIVASSKPGPFQEFYTALLTKGIRPEMARLTLARKIATIVLIMWKRGACFDAQHLKPQTA

SEQ ID NO: 243849 - protein, 400 aa, unidentified
MGVVVGIDVAKEVHWAEIKIAEGGKVVSSHRVDNTPENVSALIGEIKDVEVEHGPALVGIDILGGIASLLQTMMLEAGLVVVHVPGLAVNRARRGTRGGENKSDPKDAKVIADQVRMRDDLRQVAATREEDVELRLLTARRAELVEDASRRANRLRALLNAIHPGLERHVEVTGKTWLHLLTRYVTPAEIRAAGRTRVLAHLRKLRWVKDTVLIRITETAVGSAQRQRVSMPGEKVTAELVKETAAEALAARDRLAALDKRIQETLDRHPDGALVASLPGMGPIMTAEFLAVTGGISRFATGDQLAAAAGLAPVLKQSGKSRHLQRARSGDRALKRVFYQSAFCAIGHDPASTDFYRRKRAEGKNHQQAVLALARRRVNVLHAILRKRHPYSTDYTPAAA

SEQ ID NO: 243850 - protein, 334 aa, unidentified
MQNVTLIGIDLGKHSFHIHCQDKSGKAILRKKFTRTKLMQFLATCPSSTVVMEACAGAHFMARRIGGLGHEAKLISPQFVRPFVKSNKNDFVDAEAICEAASRPSMRFVQPRTETQQAMRALHRVRDSLIRDKVKTTNQIQAFLLEFGISLPKGEGVIKRLSRVLAEHEIPVYLNRLLMRLHTHYLYLVEQITSLEAELHQSIEADETAQRLMTIPGIGPITASLLSSQLGDGKQFSGSRDFAAATGLVPRQYSTGGKTTLLGISKRGNKNLRRLLVQCARIFMMRLEHQQGRLAEWVREQLSKKHSNVVACALANKLARIAWAITTQQNEYRI

SEQ ID NO: 243851 - protein, 402 aa, unidentified
MPFFVGLDWASTAHAVGVLDDTGTVHWRGSVPHSAEGLAELVRRLRQLGPPASVRVAIERPSGLVVDTLMDAGFQVVPIHPNVVKASRPRYSAAQGKSDDSDGYLLADLLRTDGHRFRPLCPPSDETRALRALVRGRDDLVAQRVALANQLRALLDRFWPGAAGVFADIDSPIALAFLARYPTPQTAERLGERRLAQFLRRHAYCGRRSAAELLARLRQAPAGRAGEAECEASGDLVRSLVAVLVPLVAQIQQLTAAIAAALADHPAGSIVQSLPRSGQVNAAQLLAELGDDRARFPTPEQLAAEAGAAPVTRASGKHHAVVFRWACNKHLRQAVTTFADNSRHASPWAAAVYGRARARGCDPPHAIRILARAWLRVIWRCWLDRRPYDVTQHRAAAALTAA

SEQ ID NO: 243852 - protein, 312 aa, unidentified
MQQITIGADISKDHIDLHCLPGDQRLRVTNDRKGFAAIHAWIGDKPVERIVYEPTGAYHKAFERFMLTQGLPLSKVNPRQARRFAEAIGKLAKTDRADAEMLARFGMLLSPRLIRPDATSFGELKELHAARLALVKDRTAAKNRGKHMTQALLKRQNAARLKQIEAQIVQVEQAINDHIEMDESLKARFGILVSIPGLSNITAFSLLIEMPELGELDEKAVGKLSGLAPNDRQSGRWAGRAFIAGGRAIVRQALYMPALVAIRFNPDLKAKYDALRKAGKPPKVAITAIMRKLVVLANALLRKQQKWTPKYA

SEQ ID NO: 243853 - protein, 305 aa, unidentified
MISWVGIDISKSNLVVWIQPQKVGFEITNTLEGFVELTSRLSHYTVGRVLLEATGGYERKVVAALQEAGFNVLRINPRRARAFAVAMGKNAKTDPIDAAVLADFAEALHASREKPISPGREALRELIQLREHFVQQRDDNKRRLQQAQLPAVIEAIKDHIRYLQLQIKQFGKVINQSMRELDAEKADRLTSVKGIGTVATASLLVYLPELGELDRREIAALAGIAPYNDDSGNHSGKRQIYGGRSRVRRALYMSCWVVIRYHADFKARYEALRERGKSAKVALIACMRILLIRLNAMLRDGTEWR

SEQ ID NO: 243854 - protein, 509 aa, unidentified
MALIPLGRLQTSPIPLLARGTFLTTRIRQLEASMAVPNEDSKKPAKSKKPTNPNRARERSLAVPVPASAAPLTVVNPDAAGIDVHSDMHMVCVPADRDANPVRQFGAYTADLHEIVTWLHKCGVKTVALESTGVYWIPLFELLESEGFEVNLAEPGQLSRCGARPKTDVLDAQWIQRLHSYGLLRGSFRPPESVLALRAYFRQRQMLVRYAASHVQHMQKALEQMNVKLPEVVTDITGLTGMSIIRAILDGERNPVKLAKLRDARCHHSEEQIALALQGTWRPEHLFELRQAYELYQFHHRQISQCDQQLETELGRFPNRAGEKTRTVKPRGRGRKSNDVRFEAKGPLFQALGVDLTMIEGIDVGTVLAIAAEIGPDVSRFPSEKHFASWLRLSPPQNQSNKTNKRRDHRKSTSRVTIALRLAARSVGKTKTPLGMFYRRIRSRIGGLGAVKATAHKLACLVYRMLKYGQEYVTQSMEEYKAKMETSVLNALKRKAAAMGYQLNPLPAK

SEQ ID NO: 243855 - protein, 331 aa, unidentified
MYFNHYLGIDISKQTLDAALIIKEGEIVGQTKVTNNQQGFKELFSWAKKLGAKITGTLVCAEHTGIYGYDLQAWLDDNRISFSFIPALEIKKSLGIRRGKNDSADAVRIAEYAYLRRETIALSHKPSDSIFALKALLGERKQYVRTRAGLLARKDALDQYESQESRDRRDNIIQMLTQNVESLEKQMMQIIKADESIYNSYKLITSVKGIGLVNAVNTIVYTNNFTSFQTARQYACYCGIAPFEHKSGTSIKGRTMVSSLGCHQLKAELSMAARSAIINDPWLRKYYKRKMEEKGNVSGAHGVVLNAIKFKLVVRMFSVIKSGVPYKVMAY

SEQ ID NO: 243856 - protein, 370 aa, unidentified
MAQASTLFVGLDVHKETIAVAYGAEEREAEVVFLGTSGTRQCDIDKLIRKLQAKGKTLPFVYEAGPCGYWLYRYLTKKELKCWVVAPSQIPKKAGDRVKTDRRDAVQLARLLRSGDLAPVYIPTVEDEALRDVVRAREDALKDLKAAKVRLKAFLLRQDIRYEGRATWGPAPLRWLATVVCPTPAQQIVFQEYVRAVSDHTERLRRLAAELPALVQSWRWLPVVEAIQALRGVQFIAAVTLLAELGDLTRFENPRQLMSYLGLVPSEHTSGERRRQGSITKTGNSHARRVLVEGAWAYRYPAKVSRHLQLRLEKVPQAIQDISWKAQVRLCKRYRRLVARGKQVNQVVVAIAREMAAFVWAIVREMKGAH

SEQ ID NO: 243857 - protein, 338 aa, unidentified
MNKFNHFVGIDISKKTFDAAVIIGGDTTNIKHQVFKQNAMGFSEFSEWLDYYKIAKDEVLICMEHTGLYTYRLIDFLVAAGLNLWVEMPLRIKRSMGLQRGGDDKAAAIQIALYTYRYKDQVSLWKPEQAIVLQLRQLSAQRDRLKLALNQLMIPLQEIADCYHDAAIVKVQLRLQAPVIKAIEKSIASIETQIDNLIAAEPAIQATIARVSSIKGVGKQTAIHVFIYTKGFTTFSSGKQLASYCGVVPFTKTSDTSVRFKTQVSPFANTHLKKLLHLCAMAAIQHNDELKHYYNRKIAEGKNKMSVVNAVRNKLVQRIFAVVRDGRNYVENYQYQRA

SEQ ID NO: 243858 - protein, 417 aa, unidentified
MKKDSNSAKQCEPSAKRGQSQVSVRQDSREVMMELVAKLTKQLDGKNSPGIEIQDEERSAACPNLNGLTVGVDLGDQWSNYCILGLSGETLAEGQLGMRREDVTEFFQGLAISRVVVEVGTHSAWVQEVIAGLGHEVLVANPRMMEGAKRRRRKNDRIDAGKLARLGRVDPKSLYPIRHRSSQVRKDLLVLRARDALVASRTELINTVRALVKTMGARLSSCSSEVFWKKADMEIPTELRETLQPLLRLIATLNDEIKSYDQKIEELASKKYRHTQLLRQVTGVGPITALAYVLTLETPLRFARSRDVGPYLGLVPKQEDSGDSQPQLGISKAGDQMVRKLLVGSAQYILGPFGPDTDLRRFGMKLCERGGKNAKKRAVVAVARKLAVLLHRLWANGEVYVPLGHVSPASPAHAVAA

SEQ ID NO: 243859 - protein, 342 aa, unidentified
MDQVTIIGIDLAKRVFQVHGAANDGKVIFRKKLSRSQLLPFLAGQPRCMVAMEACATAHEWGRAIGALGHAVRLLPPVYVKPFVKRQKNDAADAEAITEAASRPTMRFVAVKTEEQQARSMIFRTRDLLVRQRTQLINALRGHLAEHGVVAPQGPAHVKRLADAIEDEQNLIQPIVRDVGRLYLQQIAIYSEKITELEQTLRREASGSETTARLQTMPGIGPITAIAIETYAPPLETFRRGRDFAAWLGLVPLQKSTGGKQKLGRTSKMAQRDIRRLLIIGAMAVVRWAARKGPPEGSWLARMLARKPPMLVAIALANKMARSAWAMMTKRENYRDPATGPA

SEQ ID NO: 243860 - protein, 394 aa, unidentified
MKLVGIDVGKNSHHFCVMDKETGEFNVTPTSFSNNKEGFDFLINSLKPYSKKSILLGMEDTGHYHVALLKFLLSNGYTVALINPKTTDLTRKMEGGITKNDKLDTITICDVLDTPERKKQYRITKVDRFDLYEQRQLTRHHHNLKEELNVYCNRLQKSIDLVFPEFNTLFSSKYSIVYMNLLKTFGSAEAIASTDIRTIRKCFEIKGRGNRISLTPEKLKECAKNSIGISSEVETIQIKHLVSQITLIKEQIAEIDKKIEEFSIPNNSPILSIPGISHFSGTSILAELGDIGNYSKPSQIIKFAGVAPYHYESSQYNAQHTAITKKGSKYLRKTLYQIILPVINNNPVFKKYYLLKISQGKGHRCAQGHCIRKLLRIIYHLLETGQSFDPALLR

SEQ ID NO: 243861 - protein, 317 aa, unidentified
MRKPTMICAGIDTGKRKLDAALADRSHRLQVSNDDQGHHALSAWLRRHRVKRVGIEASGGYERAVVAQLRREDFVVIVFQPAQVRAYARFHLQRAKNDKIDAGLIAVCAAATPTVHAAPDPRLAPFAERLTWIEQLTEDIAHVKTRRETCRDQHILRYWDGEIARLKKLLKIELQTLIAAIRQHRDLSQRLDLIASVGGIGLKTAVAILLRMPEIGRVSREQAAALAGLAPYDDDSGNQVGARHIGGGRERLRKALYTAALAAAFHWNPQLKIIYRRLIAAGKPHKLALVACARKLLIYANTVVERGTPWAEKPAVA

SEQ ID NO: 243862 - protein, 385 aa, unidentified
MGSQAFIARDYDVFAGLDVDKKSISVTFTDHQGLLKSMRMPYSVDHLVNHVRKHYGDKKVAFAYEAGPTGYGLYDGLVAQQYLCLIASPSMIPKAPGQRVKTNRLDSLGLAENLRGGQLKSIHVPTTLYRELRHLTQLRDALVSEVVAMKQRIKSLLLMEGLEFPPAPPGSQWSFLVKAKLRKLPCSSVVRFKLDQLLDNLEFGEKQVLKVTREIRRFCQNDPELSQCIDYLKSLPGIGWIVASQMLARIGDWRQIKNIRELPAFLGLVPTESSTGERTTRGSITHSGDPRLRSKLIQASWSAIRQDGELLKFFRTVAKKHPRHLGPRVAIVAVAHKLCMRAAVVLMKQRPYEIREKVQSAPLTQEETVPQGTTRRRRVPGEKIS

SEQ ID NO: 243863 - protein, 365 aa, unidentified
MEEYIALDVHKHYTLAEREPVAGGRAQQCRIPHQRGCIARYLAGTEPGTTVALEATGNWYWLVTEIEQAGCTPALVHPRKAKLMLGSINKTDRLDVHGLNRLQRVGTLPCVWIAPAATRDLRELPRTRMFLAQQRTRLKNRIHANLAKYGLGVRDCSDAFGVRGRRQIDEQLSQLPPQTRLTTLELLGQLDLVQQQMAQQERRIEELVSLTPAMQRLMSLPGVGRILAVVLALEIGEVSRFASAERLASYAGTTPRVHASGDKQRFGRLRPDVNRYLKWAYVEAANCVQLHRAHYPQRHVTQLYERIARRKGHPKAIGAVARHLAEASFHVLSRQEDYREPTLNRRSETRATQARSPHGPVRSGE

SEQ ID NO: 243864 - protein, 408 aa, unidentified
MNAVGIDVSKGKSMVAALRPMGEVALLPQEFLHTEVGLEQMAYAIIALGEDTRVIMEATGRYHEPVAAALHEYGIYVCVLNPLFIKQSGGGSIRKVKTDKADAMKIAKYGLDNWVDLREYTPMDTVRQQLKLCSRQYNLYMKTVVSLQNNLISLTDKTFPGVNELFSSPERADGHQKWVDFVMTFWHCDCICRVSEKAFTERYQKWCKRKGYHYSAEKALDIYAGSCGHFTTLPKNDNTKLLITTAAQQLLAGKMTLAALRAEMARLARQLPEYDTVHAMYGVGEITAAQLMAEIGDVRRFPRRSSIVGFAGVDPAVNQSGKHAAQSTPTTKRGSPHLRKTLYQIVCTYLRKAPEDEPVYQFLDKKRTDGKPYFVYMTAAQNKFLRIYYARVKECLEAFDAQQDTVQN

SEQ ID NO: 243865 - protein, 419 aa, unidentified
MAQFNIDRQLAQDPAGTLHAGVDLALEKNVVVVVNEKTERLDHFSFPQDRGGYDYLLRRLEGLRQTHQAAKVVVAMEPTNYFWKLLARELEEKQLSYRLVNAYTVKKHREGDQLDRSKDDRRDAGQIAELSRNGKTTQTQLQKGAYEDLRQYATLYHQLMQSIRREKTILWGLVGQVFPEMVQAFKDLEGESYQALLMTCAAAATIRQMSMDAFLTQVRAAYSGKRLCISKLKRVYQLADRSIGVTEGIQAIQLAIQVHLIQLQVFETQLEQVTGAMTARLFSLPEALYLLSCPCLNPTSAALFLAEVGDPQRYQKAAQWVKLAGTQPTPKASGKKQRSRTPMSHQGRPRLRTLLYFSCLRMVQYDTRFAQLYAYLQRRKDNPLTKMQAVGVLMNKLLHIWWALIQNQTFYNPSFGQSS

SEQ ID NO: 243866 - protein, 364 aa, unidentified
MDELTHRGLDVHKDTIAVAVLRSGTTTCDERVIPNTPEAVRKLFARYPDRSVLRTCYEAGPTGYDTQRLISSLGIACDVIAPSLIPRRSGVRVKTDRSDARNLARLHRAGELTAVRVPMPAEEALRDLVRAREDLKNDRRIARQRIRSFLLRYGKRYPSPGARWSFRFEVWMRALRFDEPASQAAFDHLVSAYSVRDAQLAAIDKQIEEAALCDPLADAVARLRAFRGIDTLTAVTLLTETCDFQRFATAASFMAFTGLVPSEHSSGTSRHQGSITKTGNAHVRRVLVEAAWAYRHRPAVRGAHAKRLEGQSPEVAAYSWAAQCRLNSTYRKLAARKGPNKAVVAVARELSGFVWGAMTERMAV

SEQ ID NO: 243867 - protein, 376 aa, unidentified
MGTPSAQTLDDVGVREIFQELEEVPLMTMVGGLDVHRAQITFDYVDDDGLVHWGQIRPATRKTLRGWLAEHCPDGDAEFALEGCTGWRYVSEELAGAGVGVHLGDPAEIAVLRGPKKRAKTDRADAWLLRTLLLQGRFPESWIAPAHVLEIRTLGRLYCTLMDERRAWQQRIHAQLFHQGCPPVRALLSVTGRAALAGAELSAVGGQYVDTALGRIDELSTEIEPLRAQLVNFARHQTGCQALQRHYGIGWLCAAIIWAEIGDARRFSSSDQLVRFAGLDVTVYSSDGKRSPGHLSRQGSPELRWAAFEAAKCAARRGSPDYGYYRKLAAKRDGHNGKNPTLAVERKILRRCHHRLRELGDAAVALPVAEPQEVAA

SEQ ID NO: 243868 - protein, 353 aa, unidentified
MPRKTDTAVVSTIGIDTGKNALHMVGLDERGAIVLREKVSRLRIAARLVNVQPCLIGIEAGMATHYLARELVALGHEVKQVPPTYAKPFRQGHKNDFRDAHAVAEAVQRPSTRCVPIKTDDQLDLQALHRVRSRLIGDRTAVINQLRGFLLEHGIAVRQGHRFLRRQLPQILATRTDVLSPRMVRIAGDLVADWDYLDERIDRVTDEIEDLAQTDVSCAQLMTVPGVGPIIASATVAAIGNGAAFANGRDFAAWLGLVPKQMSTGDRTILGRITKRGNRYLRMLFIQGARAVLLHPTSWAKHSFGSWLTAAARRLHCNVLTVALANKLARIALTVLFEGRNYETRVAPAPVPA

SEQ ID NO: 243869 - protein, 373 aa, unidentified
MIVIGADTHKTSHTVGAVAEATGRVLADRTVKAKRRSFDDLLRWGRGLGGERVWAIEDCRHVSGALERFLLARGERVVRVAPKLMAGARRSARERGKSDTIDAVAIARAAIREGLETLPVAQLAGPELDVRLLVDHRERLVAQRTALINDLRWGLHDLWPELEIPPRALTAARWQDRVAGRLTRAEQTTRVRIARDELRRIRELSRSIDALEHELAGLVASLAPRLLAERGCGVLTAAKLIGEIAGIGRFTSDAKLARLAGSAPIPASSGGTDRHRLDRGGNRQLNCALHRLAISKGRLDPDSAAYLARKQAEGKSRREALRCLKRHLARRVWRALQPAPAERARDSSTRPPTLSPPGTTIHCNMPYGRFSLT

SEQ ID NO: 243870 - protein, 399 aa, unidentified
MRTVFGIDVSKHTISLAIVVNKVKVDERKLTLDRPGLDNLLKLLKTFHQPEVVFEATGIYSRTLQHFLDYNNFEYTMLNPLAAKKQLDSLRPYKTDRADALNLAQTSFIIQRSLSYKQTPVYEQLHDLSRFYQEVSRDVVNHKNRLHRALQLTFPQLESLFSNTNNELYWTIVNHFACPSRALKLSATELRSFILHSTNKNISIDRATHIAEKLLTLAKKAYPVVNDNSYVYEQIAYLTNRVIEEVHEKEKIISEMQHEAEGLSEYNLLLTIPGFGVRTVTSLIGELGDIRRFHSSNALNAYIGIDLRHYESGNFVATDHISKRGNAIARKILFKSIQNIAVAGHFHPNHINDFYQKRKKQSSQPGTKKIAIAAIHRLLRTIYHLVKYNQPYNYQIAKV

SEQ ID NO: 243871 - protein, 425 aa, unidentified
MKKTDYLSTLFVGIDIGSRTNVVSAIDFNREYFIRMKPVPNAKEGAEILESLLVDVLSAHHEFKHVIIGMESTGFYGVHIANYLSASDMLSPFGAEVYCLNPKEVAKYKESFNSINKNDGIDSFVIADFARVGRITIKPWRGAQYLALQRLTRHRLHIAECIAREKTYVLNNIFLKFSEFAMLKSEDHPFSNKYGATAEAIIEQYVTNDDIIRASIDELVELIESKSHGRITDPEETAKLLQSAARGSYRLDKVVAKPITLSISSSFNCIRAFEKELKAIEKAIEQTVQGINPLEYQVLKSIPGIGPTYAAGILAEIGTIKAFPNNDALAKYCGIIWKENQSGNFRAEDTKMSKAGNHYLRYYIIEATGSVINHCPEYKAFYGKKFAETTTHQHKRALALTSRKFLRMLFGLLDKTQLYSLEKSR

SEQ ID NO: 243872 - protein, 314 aa, unidentified
MDATVVVGIDVSKDRLDVHVHPAGESFVVARNAEGLEALNTRLLPLGAHAIGLEATGGFESVVAASLGGAGLPVVVVNPAQVRAFATALGKRAKTDPIDAGVIARFVEATKPEIRPLLDADTELLAQLVARRRQIIQMIVAERQREPQLPRQLKKSAERLIKALEKELNVLDEGIDESVRGSPAWCEKEGLLKSVPGVGNVTARTLLAELPELGTLSRREIASLAGLAPWTRQSGKWKGRSFTGGGRTAARTSLFMAALVAARHNPALKTFHQRLIAAGKPKMVAVIAVARKLLTILNAILRDNTPWAAAKAAV

SEQ ID NO: 243873 - protein, 410 aa, unidentified
MTSFCGIDWAETHHDVAIINSEGQLVTKKRIPDDPAGFAQLVDMLSEAGDNAEAPIPVAIETPRGLLVSALRATPRPVYAINPLAVARYRERHSVARSKSDHADAMALANILRVDAHLHRPLPADSELCQAIAVLARAHQDAIWARTKAHHQLRSLLREFYPTFLAVFTSRFALGIASPEARAVLAIAPTPAVAATLSVSRVAAALRRAGRSRGIAEAAAEIKAGLRNSQLRQPVRVETAMGKHALALLAAVDTACMNVEELDRASAELFRTHPDYEVITSFPGLADSTGARVLAEIGDDRSRFADARALKAYAGSAPVTRASGRSISITHRHIKNNRLANVGWMWAFSAASTYEPARRHYRHRREHGDRHAPANRHLFNKLLGQLYHCLQTGQQFDEAKAFPTAINTSA

SEQ ID NO: 243874 - protein, 470 aa, unidentified
MAAVMIGVDPHKASHTAVAISVAEEPLGELRVRACAAQAERLLAWAAAWPQRIWAVEGAGGLGHLLAQQLLAAGERVLDVPPKLGARVRLLATGDVNKNDPNDARSVAVAALRSAGVREVRPDDHAAVLKIWSKRYRDLGRTRTQVVCRLHAVLCDLVPGGVSRPIYAARAARILEQITPPDAVAAARCELAAAFLEDLRRIDAQIRETRKKLAAVVAATGTSLTGLFGVGPVIAAAVIGDVRDVSRFPGRNHFAAYDGTAPIEVSSGPRKIYRLSRRGNRRLNHAIHMAAVTQVSHRHSDGRAYYDKKLAEGKTRKEALRSLKRQVSNAIFACLQAGARRAAAHAKGPGGQQGNDSAACAAGSHPRHRLFGQATPGPGAHPTTPAASPAPGPASARGRAGHSSIAATLPSATPQVQVERPQRSEDERPGGAARQRPYSAARKALGQKFPLKAQRPKGTSHAAKRTDGTP

SEQ ID NO: 243875 - protein, 411 aa, unidentified
MEVVYKRCSGLDVHKETVVACVLIREAGKVLKEIRTFRTMTCDLLVLHDWLKAHGVTHVAMESTGVYWKPVFNLLEGSFEVLLVNAAHIKNVPGRKTDVKDCEWIAEVLCHGLVKGSFIPPEPIRDLRDLTRYRRSLTDERTREINRLQKLLESANIKLSSVATDVMGVSGKAMLEAILSGSTNLEALADLAKGRLRKKLPLLREALQGRFRPHHRFMLGQIISHLDFLDEAIEEVSKEVENRLAPFSKEIELLATITGVKQRVAEGVISEIGMDMSRFPTHRHCASWTALCPGNNESAGKRKSGKTRKGNRWLRRTLLEAAWAASRARGTYLSALYHRLVRRRGKKKAALAVAHTILVICYHILKHKVPYHELGDNYFDRLNITHVTRHFVKRLEGLGYKVTLEPLQLAA

SEQ ID NO: 243876 - protein, 347 aa, unidentified
MLSSNVKYIGLDVHKKTISYCVKEVSGQIHSEGTVPATRPDLDTWMKTVPQPWSAAMEATIFTGWIYDHLLPHAVELKVAHPLMLRAIAVAKKKNDRIDAGKIADCLRCNFLPECYMASTAIRERRRTLRYRNLLVRQAVQLKNKISGLLLETGVSYNKQKLHKVGYFQELLRTNKEITGRLRPLLKQCRENLDRLQKTESALVRGLSKDPLLTKRVERLKTIPAVGPITALTWVLEIGDVKRFPSLKQAISYCGLCGDEKSSADITKRTPLTKQRNKHLQTVLVEAAKMAPRRSSDLAMVYEKETLKGNKNRATLAVARQMVAYLLAIDRGEREFVSLENHRNAAA

SEQ ID NO: 243877 - protein, 318 aa, unidentified
MTNITYQFNIGIDIAKQKFDVSFSDQKVVSFENNLDGFKQLLKEIKDKPQTRVVMEATGGYEKPLAQFLQGQGVAVSIVNAKRVRDYAKALGLLAKNDVIDAKVIRMFADAINPKLLSAASDTQQALDAQVHRREQLVKQRAMEKQHLETVSNKDAVRSIKRTIAFLDKEIERIEKAIKALIKTDSALTEKVDRLSGVKGIGDITALTLIADLPELGQLTNKEISALVGVAPFCHDSGTQKGKRTTWGGRTQVRSILYMAALSAVQYNPPLKAFYNRLLMKGKTKKVALVACMRKLLTVANSMLRNNTEWNPNHGKLA

SEQ ID NO: 243878 - protein, 408 aa, unidentified
MNTLYVGIDVSSKSNVVYLMLPNGDKHSNFSVANSHEGSTQLVKRILSALTSHSLDTVLIGLEATSVYGDNLVYFLREDATLAPFNRKIHVLNPKQVKKFHDAYNDLPKNDYVDSFVIADCLRFGRINKEVYLGDYRYKALQNLTRARFFAVQNLIKEKQRFMNVLFKKYSTMTQEKVFSDTFSTTALAVYDEFDSAEALANMDLHELTDFIIEKGKNRFPDPDAGAKAIQKAARSSYRLPKTVNDSVNQVLSISITSMKALESQIKEFDKAIKAQMELLPNVLISIPGIGPVYSAGIMAEIGDINRFDNQAALAKYAGLAWKQHQSGSFEAEVTRLIPSGNRFLKYYLYEAAFSLVRCDKEYSDFYHLKYKEVNRCQHKRALALTARKFVRLVFRLLKDNRLYVPAK

SEQ ID NO: 243879 - protein, 342 aa, unidentified
MNIPVRIGMDTSKSVFQLHGVDESETVVVRRQLRRTEMIRYFEKLPPVLVAIESCGSSHHWARLLQSFGHEVKLIPPQYVKPYVKRGKNDAADAEALCEAVTRPSMRYVPVKSRERQAACMLMTVRERLVSVKSQLSNAFRSYAAEFGIVGPAGRQNVTALIERVLEEESLPEMARDLFRFQAREYAAVEARLDEIEAKLMKWHREDDVSRRIASIPGVGPIGSTMLSMKAPPAETFRSGRDFAAWLGLTPRDHSTGGRMRHGGITKAGDSALRSILIVGATALLRHVRAGRQKPTAWLAALLERKPPKLVAVALANKFARIAWRLMVSGGIYVRPPVAVPA

SEQ ID NO: 243880 - protein, 338 aa, unidentified
MKLYGGMDLHSTNVVTQLIDEHDRVVYRNKQGCDLADILRGLESFQDVIEGLAVESTYNWYWLVDGLMEAGYRVHLVNTSAIQQYEGLKYTDDDTDAFWLAHLLRLGALPTGMIYPKESRAVRDLLRKRSQLVRQRTAHIVSIENLYARNTGTRLNSNAIKRLTQEQVQQHFADPNISLAVESNRVILMALSEQIEVLETAILAQAKLDPRYRYLLSISGIGQVLALTIMLETGCIERFRQVGNFASYCRCVGSEKLSNGKKKGRGNTKNGNKYLAWAFIEAANFAIRYNDRAKRFYQRKAAKCNRVVALKAVAHKLARASYYVMRDHVPFDDMKCFV

SEQ ID NO: 243881 - protein, 369 aa, unidentified
MKKNSKNNKEKTRQRALQAKSRKMKLTVGIDLGDEWSHCCFLGEEGEIVEECRVKTTREAVKSRFGELKLAVIALEVGTHSRWVSQMLSEFGHEVIVANARELRAITGSDRKSDRVDAEKLARYARVDRRILRPIKHRGEEAQVDLVVIRARGVLVKTRTQLVNSVRGVVKSFGYRMPNCSTERFVKLNNEVPEKLREHLAGLMEVLEHVQKQIEEYDQRVEKLAKEKYPETTVLRQIWGVGEITSVSYVLTIEDKGRFEKSRDVGPYLGLRPRRSQSSESDPELGITKAGDCFLRSLLVECAQRILSKKGPDTALKQFGLRIEARGKKKAKKRAIVAVARKLAVLLHKLWVTGEVYEPFPETTVRKAA

SEQ ID NO: 243882 - protein, 315 aa, unidentified
MNPNAESFVGIDIAKKHLDVCLLPQRRSFQLPHTEQGLADLITQMLQIKPTLIVVEATGGYERRLASELLAAGLTLAVVNPARVRHLAKGHGTLAKNDRIDAFNLAQFAQIVRPAPRQKTTQKQAELSDLVARRRQLVEMITMESNRLEKQPAAEVRQSIQRLMDLLQQQRQEIDNRIAQELRSDDEWNGKIQKLQSVPGVGAVTAATLVAELPELGKLNRREIAALAGLAPFDADSGSWHGRRFIRGGRKSVCVALHMATLTATRCNPLIKTYYQRLIGKGKSFRCAMVACARKLLILLNSLLKENRSWSPLPS

SEQ ID NO: 243883 - protein, 343 aa, unidentified
MELYVGMDVSLKETSICVVDDDGNIRCEGTVISEPEAIAGFIEANAAKAKRIGLETGPTTTWLWHELSTLGLPVICIDARHAKAALSMQINKSDRNDAVGLARIMQCGWYKEVQVKSLPCHEIRAVLNSRAQLVKIKRDLENQIRGLLKNLGLRIGKAGGNVFHRRAEELVGGHRLLQAAVRPLLDVREIVRREIASLTRKLLAMARANDVSRRLMTVPGIGSINALAFCAAIDEPNRFQRSRSVGAYFGLTPRRHASGELDWTGRISKCGDAMVRTYLFEAAGVLLTRVPHWCALKAWGHRLWKRIGFKKAKIAAARKLAVILHRMWCDGTDFIWSNKGAAA

SEQ ID NO: 243884 - protein, 464 aa, unidentified
MVMSTFNHIQGRNGSNWSHLMRSQKADKYCIVAIDAAKYVNTAMICTIFGDILRGPFEFDGSQTGFQVLKKEIDQTREAYQLTRVILGIETTAHYYEDLVRVCDQQGYMVRVINAATTAEERKKMLNYTKTDRVDLQAIVQSILQGRGESSKKKAHDLERLQTLTRARRRLINEQTRCMNVMSVYMDHIFREFQGKNVRKDGKNQVVKVFSEFTSNASLFLMRYYPHTTDILELGADGLRNLSIEHNLKLRDATIDRLLAYAKESISKPKEALAAELFLLRLKLDEYELLSRHTAELKEVIEELLLETDGGILLSIPGIGVTLAAELTAEMGDLNAFTHSGQLIKMAGTNPVVKQSGGKQASHFAISKQGRAAFRSVVYQAGECVATHNPEMNARYQQMKEQGKLSGQAYIALGNRILRLAYAMRKHQSLYQSTNPDYVLLTVIAGKLRNKAKQAVFFNHFVSV

SEQ ID NO: 243885 - protein, 308 aa, unidentified
MICGVDISSASLEARIGRDGATGSFPNTAEGIAALAAFCQAHQVELVAMEATGGYEQRALALLSEQGLPVAILNPRAVRRFAQSMGLEEKTDAIDAGVIAWYAQTRRSQPVCVSSPSQQQLRALVTRLRQLTEVRTAQLNQSRLVTDPAVVALIDELLAVIARQIRELETSIAQLLAQDPLWHQFDQVFRSIKGVADRTVARLMAEMPEIGTLSNKTISKLAGVAPLANDSGKHQGRRAVRGGRAAVREILFIVAGVVGRYEPDFIAFQQRLSAAGKPRKVIRIALAHKLLVRLNAKARQVRLQHATA

SEQ ID NO: 243886 - protein, 354 aa, unidentified
MTKASQQSIPILSSIGIDIGKEVFHLVGFDPSGTVVLRRKIRRLALVKEFEKLPCCVVGMEACLSAHFVSRTLRGLGFSPRIIPAKYTTPFNKGQKNDYNDAEAIAEAALRPNLKVVQEKTQDQLDLQALHRVRARLVSRRTATINQIRAFLIEQGITVRSGAHALRNSLFAILQNRADEISSRMSDIIVGLYEDWLWLDERIESTTKEIEAIAKREGHCQRLMTIPGIGPMISTAMVAAVGTGEAFNRGRDFGAWLGLVPRQYSTGGKPILGRISKRGCRYLRTLFIQAAHIVLMRPHNWKRFSFGAWLEQASQRMHKNKLAAALANKLARIAWSVLRNGQTFDTKRIAATAV

SEQ ID NO: 243887 - protein, 408 aa, unidentified
MQVVFGIDVSKATSTVCELIGESKNELTITNDLPGFTLLLKDLAAFSKQPQIIFEATGVYSRRLQAFLEDYDYDYVIINPLKAKKEMDLGLRHNKTDRTDAYHLALIQRLYHHPVNKIQANAYHQLNALSRFYDQLTADLVMAKNRLHQVLQSTFPEVEQLFCTAKGFNYWKIISHYPHCELIRQAQEREIINWLIQLKGIGIKHAQKTAAKLKKLANMTYPVVSETSVEAEQVQYYAQRLINLNEQRENLISRMVKLAKSLPNHDLENLESIPGFAQTTAVRVLAELGDIRRFSNPNKINAFIGIDPGRYQSGEMDSSLSITKHGNAIARKLLYRAIGQIDNAAKTNPCHIADYYESKKRSLQTKGFKKIAIASIHKLIRTIYALIINDQLYNYNVATHNQKDFSRN

SEQ ID NO: 243888 - protein, 413 aa, unidentified
MFYVGIDYHKDVVSVCVQTGSGRVRAEFETTADHEGMDQIVRSMGGKRFRVMGEASTYSIGLHNYLASRSVDSCLVDPRSLRLITSSDKKTDRHDANVIATFLRLMDRHEIELSLSCVVDGGRRDLRDLCRYREYIGSEKGATLRRMRSHMHLHDQALDDSYGDFSTIKGQTMLRNAFGDDVVLMEMLNDYVYLQAKARRMDCLLGSAEYSSREVDLLTSIPGIGKVTAVQMMSMIVDIDRFESADRMRSYFGMNTIVMDSGGKTCHGHVTKRGDPMMRNILGRVLNVYLVRRPEDTISVYHRAHRDSMGAKKVRMACMNKLLDLVYAILNRGTPYMPRRWHGRNEKGCEGGATGYRRDRSDWKRTRRDGHAPWRKVADCLCTRGAFRKMRRERPWRSVLMSACRSELRRENA

SEQ ID NO: 243889 - protein, 324 aa, unidentified
MAQHSKPVLGVDVSQKQLDLIFWSEQAGQRSRQFANSPAGISALQSWLQKHSSGPVHICMEATSVYWEELAETMHAAGHRVSVVNPVRIKGYAMSQLRRSKTDPLDAQVIADFCRTQRPDPWQPPTAEQKKLRALVRHLETLKKSRTQQRNRLATCRDEEVKASLDILLATIEAQIAQIEQRIRDFIAQEPDLKEKKELLQSIKGFGETTAIHILAEMYDLPNYLNAKAAAADAGVTAAHFRSGSSVRRRSKMSRMGKAAIRSALHFPAITAIRFNPVVKQLAQRLQARGKHKAVIRVAAMRKLMHLAYGVLKNKQPFDPAYAA

SEQ ID NO: 243890 - protein, 381 aa, unidentified
MRIVCGLDVHKDSVFACILNDKGDKFECKYGVLTPDLEELHQLLLTHDVKEVTMESTSIYWHPIWRILDDIEELKLVNPYFIKQLPGRKSDVRDAAWIAECTMKDLIRGSFVPSTIVQRMRQYNRRIFDLNKEIVYKLTKLDTVLQHCNIRISNYVSSTDSKSYKDVVRLLSEGITDANHLACVIHGRTVNRVGKDTIVASLTGVISDVDIDLIRQYLEEIELAQSHKQACQEKLTQMCKTEFPQEFENLQTIPGVKERSATSILSEIGADMKMFVTASALVSWCGLKPRNEESAGKIKSRRITHGNKYIRKTMIECAWGASKTQNCFFSKFSYTQTVIRKKNAMKVKVAIARKMLIAIWHVLSDSKPYIDYKKPDTTGNS

SEQ ID NO: 243891 - protein, 321 aa, unidentified
MTKEAIYVGVDVAKNSLDVAVSNSEEVRQFTNDHEGITNTVQYIAGLKPSEIIIEATGHLEMPLAAALQADCLPVAIINTRQVPDFARATGTLAKTDTIDARLLALFGIRVQPKRRPLPDDKTLEMRNIIMRRRQLIEILTAERNRLFHSSDGVRPGIETHIKWLEEALSAINDELDRRIRRSPSWLQKDNLLKSVPGVGKVVSSSLLIRPPELGMLNRRKIAALVGVAPFNRDSGTMRGRRTVWGGRAKLRAVLYMAALVASRCNPIITAFYQRLLETGKAKKVALVACMRKLLTILNAMIRTMTAWQPEIILNHISVEV

SEQ ID NO: 243892 - protein, 351 aa, unidentified
MDIIGLDLHQRESQLCLCDQDGAITERRIVTSRERFTAVLGTRARAKILLEASTESEWVARHLESLGHEVLVADPNYAPMYATRSRRTKTDRRDARTLMDACQTGAYRLAHRLSDPRRHVRAELAVRDALVRTRTRYVALAKTLVRRDGLRVASSESHVVAQRISALSLSPALAAELQPLFTVLVPLNEQIAAADGRIATLAATDPLVARLATAPAIGPVTASAVVATIDDITRFRSAHQFEAYLGLVPGERSSGEKRHVGPITKARNSRVRWLLVEAAWRLLRTKSVEAAALRAWAHRVAGRRGKKIAVVALARRLAGILYAMWRDGVPYDASRIRGPRSAAAEGTARAG

SEQ ID NO: 243893 - protein, 344 aa, unidentified
MATYYIGMDVHCNNTELAVEKGRKIVERYSVPTTIPAISEVLESLSGKKHLAMEEGPMAGWLYRNLFDKVDRLIVSDPRRNKLIASEGDSDDKIDSAKLATLLRGGYLRAVHHSLDLDQWCLKRWVGLYHDRIKDGTRAINKIRAYGRMHGIKTPRAVIRDVVKRRQWLASLDDRNAAALLEVLCIGYDAAAQQCRRAKQQLLGRSRHYPIVNWWQELAGVGPVRAATMFAYLDTPWRFKRKNQLWKYCGLGLVHNSSGKDSRGRYKTGQLRLAWHANKRLKNAVMGAAISIINGKDGVFKDYYEKLINDGLTRSNARHAVARKLLTVMWGMWKGSCRFDESLV

SEQ ID NO: 243894 - protein, 339 aa, unidentified
MHVTTIGLDLAKNVFQVHGISEDGEVAFNRALRRAQVLSFFEKLEPCIVGIEACGTSHHWARELIKLGHNVKLISPAYVKPYVKRGKSDAADAEAICEAVTRPTMRFVEVKTPEQQAILSVHRTRDLIVRQRTQTINMLRAQLAEFGIVLPQGIYHALGFAKDCLNGEQADLPEIAGEVIFELCDQLRFLHSKILRCSRQMTQIAKLEKRIALLQTIPGVGPITASAIVATVGSGKQFNNGREFAAWLGLTPLNKSSGGKERLGHISKMGDQYIRRLLVLGMISRIRSIKTKPEKFDPWFADILSRKPSRVAAVAMANKTARMIWAVLTRNEPYKVRTI

SEQ ID NO: 243895 - protein, 456 aa, unidentified
MPRFVGLDLARATVQVAILDEHGHQLRNQKLPLRREELERFIPATLDPTDEVAVEATGNTWAVVDLLTPHVTRVVVSNPLRTRAIASAKIKTDKVDARVLAELLRCRYLPEVWQPDATTRHLRGLTHHRAALVGQRTAIKNRIHAQLAHRLLHVPTSDLFGTKGLAWLHDLSLDAAGRAMVDAELRLLTAVDAEIAREDAALAGHGWKDDQIRLLMTLPGVSLVVAIGLLAAWGDLARFPSGAKAAAYLGLVPSTHQSGNVCYHGRITKQGASRTRWLLVQAAQHLDRHPGPLGHFFRRLSRKKNRNVAVVATARKLAVIAYHMLRASEPYRWAQPLATATKLAALRVAATGARRRGGSPKGKPRPTSYGSGERTRAVPSLAGVCKAEGLPAPRTLDDLPAGEIRVIKLTHSLTHARAIQNPTTRPRPTAKHLEEKTQPTKGPSQTSDSQRPAQGT

SEQ ID NO: 243896 - protein, 367 aa, unidentified
MSRMKRLAVQQLDVSMDYLVIGLDLAKTDTAVIAITTDGELYAIDRLKYSDLLNQARQLGSTVFAMEPCNGMTYLVHELEELGHECRVINGEAVKDYVKSHFAGQKNDLNDAQAIAFLAQDEMLKFIRVKAKSEMTMQTLQVVRQQLIKQRTCSVVCIKGICQNYGLVISKSIMSEAKIRPIIEETQKLPDEIKEPLKRLLRNAARFTIDIKQIDKAIEQGLKGNETAERLLEVPGLGPQCVSRLLTTIGDINRFEGPKNLAAYYGLVPRSHTTGHNEKMGKITKHGDRLMRAFLVQGAHAVLIQHTKGRLPKSALKKWIDKKLSAGMPCSKLSIALAAKLLRIAFAVLKYKKKFDIKKAGVARCSL

SEQ ID NO: 243897 - protein, 398 aa, unidentified
MTRKNTLKSLPTDTEFRVVGLDLAKSDVSVAAIPVDDNTPSLVDRMTYADLLDRAGKISPTLFAMEPCNGYSLLCLQLENLGHEIKVISGSTVSMWINTHLSGQKTDLNDAIALARLAVSDAELTPIRHKSITEIRIQTVQAVRQQLMSQRSKSIVSFKALAQQWGIPCAAGHRNLKKLRESIEAKVDLITRPVANAMLFLLDAVKSLDRQIGQLNQTLQELVMSDERGRLLQSVLGVGTQISARVITVVGNIERFNSPRSLVAYVGVAPRNFITGHKNLTKKKHGNCPDLSHKGQGKISRRGDKLLRSLFIQGAACLYMQFCKDQLPECQLKRWILKQLAMQKPYGKLIVSLAAKLIRIVWAVLTYREKFNIQKAGMTRSMWSEMALETPLNKEVPA

SEQ ID NO: 243898 - protein, 382 aa, unidentified
MNRILKIGMDVHSTSYTLCAMEPVLGGEDRIFANIQVTSDYRNVIQFIDKLKEKLGSSDSYSIECGYEAGCLGYSLYHQLTKAGVKCTILAPTTMLTQQGKRVKTDKRDAVMIAQCLSYGGYHAVHVPADKDVSVKEYLRMRDDHKVALKKIKQQINAFCLRQGYFYAGNKWTIKHLNWLKKLVLSDLYRETLNEYLTSYEEQTAKIERFDKRIEELAEDSDYQENVKKLGCLLGIKTHTALSLIVETGDFKRFRKGNTYAAFLGLAPGESSSGEKINRTGITKAGNSHLRTLLIEAARGMCRGRIGYKSKVLRSRQDGNPTEVIAYADRGNTRMRSKYYRMIRHGKKDNVAVAAVARELACFIWGLMTNNITSKGEGTKAA

SEQ ID NO: 243899 - protein, 406 aa, unidentified
MKQIVSVGIDVSKGKSTVCAMIHPNTIIKESFEVLHTVEEMSMLADYIGSLDGEIRIVMESTGHYHLPVAQFLYQKGFFVCVENAYIIRQFSRIMLHGAKTDPLDAKKLAKYGLAYWSELKPYKFHPSCYTELSLLSKQYQTYIKLLIVAKQNVIHLMDEMLPGFKEALDTASSVQFSKVKYVDFAKEFYHVDMIKSMGKEIFRENYKQWCKEKGYRFQSEKADELFHLAEDGIPTLPTEFPSTRLCMEVATEQVSQLGYALEQILSQMQNLAKTLPEYQTIRQMGGMGEKLCVRFIADIGDVRRFHNGKALVAYAGIDAPPYQSGQYTGTKRRISKRGNSALRKTGYEVMKSLKSHPPKTDTRVYDFIIKKENEGKSKKQAKIAGLNKFLQIYYARVMEIYKNIV

SEQ ID NO: 243900 - protein, 353 aa, unidentified
MAIVAHTHPFVIGVDAHAKTHTLAILAAPLGELVDAAQFPTTHAGLQRAVDWAARRTGADLDVLWVIEGIGSYGARLAQTVAQTGYQVAEAPRMNARANRGVGKSDPLDARRIAAAVLPLEVTHLRNPRDDDGERAALRVLVAARDHMTTERTSTINALTALLRTTDLGIDARRPLTSTQVTEITRWRARAEIVAAATARTEAVRLAKRVTALDDELAENRLRMEALVHATPAATLLDEPGIGVVTAAIAMTAWSHIGRLRSEAAFASLAGVNPIPASSGNTTRHRLNRGGDRRLNRALHMAVVTRMRCDPATRAYTEQRRTEGRTNKEIRRCLKRYLARRIYRQLNRAATLT

SEQ ID NO: 243901 - protein, 451 aa, unidentified
MRKPQVVPDEDHEVIYERVAAVDVAKASGVVCLRTPDPARPGRFVNRIWDNVPAMRAQIAELGAELLRCRVQMVTLESTSDYWRIWYYVLESLGLAVQLVSASQAKNLKGRPKTDKLDAMWLARLTQWGMLRPSFVPPAAIRRVRDFTRARQDLVAERTRCLQRVEKLLEDAMIKITSVARDGMKAKSVVAMVAALAAGQRDPRALADLARGPLRAKRDQLAQALDGMFDSHHGMIARSLLDQVAFLDRQITLMEDQAIAALAGVPESWGVDADGQTGPQAGTSLGSPVLAAAHRLAEIPGISLWLAIVIIAEIGLNMTCFPTPAHLVSWMGLCRSAASSGTRHGKGKPKKGNSYARAAAGQAAIGAARTATFLGERYSRIARRRGKAIAQAAVARSIMIIAWHLLNDPQARYRDLGPDFYASRINRDKKIRNHVRQLQALGLQVTLTPAA

SEQ ID NO: 243902 - protein, 389 aa, unidentified
MYFIGIDISKYKHDCCIISVANQKVVSKVIIKNNKAGFNELLTIIHSLANPADIRIGFESTAHYALNLELFLENSLLTFMEVNPVLISEYKKSKTLRRTKTDSVDCESIARWLMTVEYKPHSKGFYHAYSLKSLTRLRDKLIRQRSFYLVKITNVLDHTFPEFKPFFNERLSKTALYLLENYGSAEKMARMNSASYEKLRSVSRGKFSPQQFLLLKELAVNTVGVNNSIFDVELNSLLSLYKSLVKEIDTIKKEINQLIEEVHPHYMSVPGIGPLSAAVIYSEYGDISNFTNPGQMLAFAGIEPGINESGTESHGGKMVKRGSSQLRYTLINCCLPLIRFDMTFATYYAKKRGEGKPHRVAITHVAKKLIRVIYALESQDIDFNAQELR

SEQ ID NO: 243903 - protein, 451 aa, unidentified
MYKQRNKVVSLPVIEPNVAGIDVGATEIFVAVPADRDPEPIRCFPTFTVDLERLADWLLQCQIRTVATESTGVYWIPLFQIPEKRKIDVRLVNAHHVKNVPGRKTDVSNCQWIQHLHSVGLLRGSFRPDDEICAIRSLWRHRDSLIQLATLHLQHMQKALDQMNLQIHHVISDLDGTTGLAIMDAILAGERDPLKLAQLRHPRIRASEETIMKSLVGDYREEHLFTLRQSLKAYRYYQELIHEVDLQVKQMMQRLPSKVVQGDEPPQGSKRRARRTPWRNEPPQLREDLYRAFGVDLTEIPGVNSLTAQMLLTEIGPNLDRFPTSAAFCSWLRLCPDPKISGGQVLSSRTRPTKNRAAVALRVATQALHRSVCFLGDYFRRMKARMGTPKAMTATAHKLARIIYHMITTQQPYDTTIFQKQEERRQHQKSARLHAQARELRFQLIPINVVP

SEQ ID NO: 243904 - protein, 478 aa, unidentified
MNNDLYIGCDVSKGYADFLPVGCDGTAVEAAFRLEDTPAGHLQLKTILQGWINQGIERLHIGVESTGGYENNWVRLILDWHGELPVRIARLNPSGVSSLRKAGLIRTVTDAVSAEAIARYLLVFPKKVDWLTPRQAPGNEFAAARKFQRATATLDKQRQQLASQLEKLIYENFSPLLVYARNGIPRWLITLLSKYPSSRSLRRAGKKRLSTIKGITVEKAEAVLDKLSASEHEPGFLDRENIRQTARQILHLYGLIEQRHKLLKAEYSDDWQVGLLMSVPGIGLQTAVLLRIEIEDVERFATAKKLATYFGVCPKYVESGDKKGQIRMSKQGRPEVRKALYMSGLSAIRHDEAMKKLYHRYRRKGHNHYQAIGVVMHKLLRIVYGILAHQTPYDPAVDKANQRRAKQKQRAKEEDQKRIESQQKKRLNRYQKETVNAPRSRRSVQKLRKEQSASQSSTVEECTGSPNAPRIEIYENVT

SEQ ID NO: 243905 - protein, 345 aa, unidentified
MPIVGGLDIHRKQITFDYLDTVTGEVKRGQIAPADRAHLRAWLARFAGRDDAAFALEGCTGWRYVAEELAAAGVTAHVAEPADTAFARGRKRHAKTDKTDSRHLRVLLEQGRLPECWIPPAQILECRALLEAYHDLRREHTAWIERIHAVFFHQGAPRLGEGALRTEHGLAALRQAAAVHLSPAGQLQVATALDMLAAIEARMDTLRQQLLHAARHLAGARALQARLYGVGPLAGLAMTCWLGGAGRFSSSRKAVRFAGLDVTVYSSDGKRSPGHLSRQGPEILRWVAYEAGKTHGRASAPGHDYYAAVKDRTDGKIAALAQARKLIRQACHILAELGDDALTAA

SEQ ID NO: 243906 - protein, 334 aa, unidentified
MDKPLFYVGLDVHQNMTAYAVRAHTGEVVNSGECATRFEDIYKALEPQLFSVRIGLESCTSYYHVYQAFKKQGYDIQVANTLRIRQLVAKSDKLDAERLSDMLRLGSFPTSHVPDEKIMKLRTLVNLRHSFVEESTRFKNQIQSALMKYGFKIYERTSFSKRWCAQLRSLMALHPELIELRYAFEHYGIIDYKLEALSEEIIAYCNVHWKKQMELLDSIPGIASTLAAYFIAEIHPITRFASKKKLRRYAGVIPCSRESGGRVYGSSLPKTSSRTKLRWALVQASWASVRGKNRLAAYFNKKRKTRKKNRAIVAVASSLCDIVYNVLMTQKSYS

SEQ ID NO: 243907 - protein, 339 aa, unidentified
MQLYSGLDLHSTNTYIGVLDTDFKRVFKKRVGNNLDFILQTLQPFREQLKGIVVESTYNWYWLVDGLMDAGYNCVHLANPSAIKQYEGLKHSDDQHDAFFLAQLLILGILPQGYIYPKEDRPVRDLARKRMFLVKHKTAHILSLQSFIARCCGQRISANQIRQLSEENLRQLLKEEHLLLCAQANLDSIVFLKQQIHRLEKVINKKLKLSKQFKNLLTVPGIGQILAMIIMLEVGDIGRFAKVGNFTSYCRCAPTRRLSDGKSKGSGNRKNGNRYLSWAFSEAAHIGRRYNKAFRRYYDRKAAQTNTIVASRALSNKLARICYYIMRDQVEFQQELISH

SEQ ID NO: 243908 - protein, 337 aa, unidentified
MSEIRTIGLDLAKHIFQVHGVDAEGTTVLRKQLRRGQLLVFFSRLPRCVVGLEACATAHYWARELRALGHEVRLMPAQYVKAYVKRNKNDAADAEAICEAVLRPTMRFVPVKTAEQQAALLLHRGRERLVCQRTMMVNALRAHLAEFGVIAPQGLRNVGQLIAMIRDESDARLPDLGRRVLQVLAAQIEAAVAELERQLMAWHKSNPVSQQLATIPGIGPITATAIAATVVDPIAFRSGREFAAWLGLVPRQNSTGGKTRLGGISKRGNQYLRRLLINGASANLLRSKATNTDPWVIGLRRRRPSLVVAVALANKTARIAWAVMHRQEDYRRVAVAA

SEQ ID NO: 243909 - protein, 413 aa, unidentified
MLKIVYPICCGMDVHKSFVVACIASTNEQGVTSYKSKRFSTFTGDLRRCAVWLSENHCKDVCMESTGKYWIPIYNILERTCNIVLAHPKYVKAIRGKKTDKRDAKWIADIFKHDLVAGSFIPPADIRQLRDLFRYRWKLTNFTTGEKNRVQNCLTVSNFKLDDVFSDVFGKAASAITDRILENPAEKITDVSGFRTKGMKATNEQVLAAVDGEMCAQQAEKLRIIRSHMDSLELCKANLESLILTTAEKYLPQLTLVMTVPGIQSFAAIGIISEIGVDMSVFPTSKHLCSWAGLTPQNNESAGKKKTTRISRAGAYIKPLLVQCALCAIRKKSNPEIRSRYNNLKKRRGHKKAIIAIARMLLTAIYNILKKNEPYNAELYRCCNTPPEHRAVSVEEAIFILQRQGYLVTPSAT

SEQ ID NO: 243910 - protein, 367 aa, unidentified
MSNATATMTPPANQSSTTMTILAIDLGKFKSVACRFDPASGEHAFETIATAPARVHDLLIDANPSLLVIEACSICGWIADLAESLAIEVRVANANTEAWKWQKVKRKTDRDDALKLAKLAASDQLPLVHVPQLAVRQQRAMIKYRHALIDRRTGVKNTIRSLLDAQGLSLPGRSRGWTIASINELKKLSRPLHECDVTNLWRGQLDSELKMLEAVSALIKEADKKLDAIAAKDQRVTRLRTIPQVGARLAELVVAMIDDPQRFKNARQVSAYAGLVPKQYQSGQMNRLGRITGQGPGLLRRMLVQIAWGMQRRTDTRGHAVFERLCHGQRTRRKQAVVALARKILIWCWAMLRDGSVWDPTRDVSLS

SEQ ID NO: 243911 - protein, 342 aa, unidentified
MIYVGLDVHKQFSRVGVFDPASGELQDLGTVSNEPSALRGVLSGVPSPKTVVLEAGRSSYYMAGLVETMAEQVWIVDAREVRRLQRKTDRRDAAALAWWAAKGVLTPQWRPDAELLDLRELTRGKMALTRLSTQVRTTMRSLLARHGYECPYRDLLGKSAQQWLDEVKLEGYAAQMLAVLRGLLVVIQEKVEDFEHLVDQAAARHSVAERLRSIPGIGPFLSLSLAAEIGDIGRFPSATHLRGYSGLVPAVHQSGDKDARGPLTKTGNRWLRYAAVQGAQRMSQMRNPDPRMKRTFLSVSFRHGCNPGKIAAARRLLDMIYHLLKREEDYQAPVAATAVRQV

SEQ ID NO: 243912 - protein, 448 aa, unidentified
MAKRKLKMEIINPNAAGIDIGSRSHFVAINQDLSDVREFGVYAEDMKELLKWLLENDVKTVAMESTGSYWQNLFTELQNSAIEVILTNGKFTKNIQGKKTDVLDCMWIQKLHTLGLLRGSFLPDLQTEHLRTLVRHRGNLIDTTSKASKRMAKNMRLMNLRLDVVVKDIVGLTGLRIINAICNGQTSSEELAKLRHGNCKKSEEEIAKALQSNNRQDYLFVLKQELQKYQDAQRLILECDMEIKKLLDEFINQDDVKKSLCIDKKVHKRINKNTPKNLDLNLISYQYFDGIDLYAIEGFSHGTVLTLMSELGENGILKFQNAQHFTSWLRLAPNNKVSGGRILSSRTPKGSNRLKIALRQAANSIGNLKDTHLSNFFNRIAYRKGRSVAVSATARKVATILWNMLYKKQQYNPPTIYEYLDQKRKRKVIELQKQIANLDARMGKIKLV

SEQ ID NO: 243913 - protein, 327 aa, unidentified
MRRVIGIDIHRTFGEVVFWEDGRLRPAGRIDMTRAALEGFGKSLQAADKVVIEATGNCMAVSRVLSPFVQRVVIANPLQVKAIAHAHVKTDKVDAGTLASLYAAGYLPEIWTPDAATERMRRLVARRYQVVRHRTRLKNEAHAILHAHLIPRCPQADLFNRRGRDWLAHQPVPDDERGAIERHVRELDRLAEDLAVLDREIAQSALDDPAIKRLITNTGVNLTVAAGLMAAIGDIGRFKSPQKLVSYFGLNPRVRQSGLGAAHHGRISKVGRRHARAMLVEAAWAAAKTPGPLGVRCRPGPWPTRSGTAASPPTAWTQDWPTRLHER

SEQ ID NO: 243914 - protein, 497 aa, unidentified
MGDWFRQDEIIIGEAQALPLARLYKFFYRVVQERKDRNESMKSETTTPPTPVFNEIRRNVAGMDLAWRADHFVCGPRHDDDTHDIASFGTTTPELHQLLKWLQERKVESVAFESTSVYWIPTADLLEANGIEVVLVDSREVRMVPGRKSDVEDCQWLQQLHSCGLLRGAFRPPETVTAIRSILREKDNMTAMRTQAIQQMQKSLDQMNIRVHHAVSDIDGKTGTAIVKAIVEGERNPGKLAELRDRRCKKSEKEIADYLTGTWRDEHLFNLSQAFKTMQFIDERIAEYDTKASEMFAALAVISGNPPPPSPLSGTKLSDKERSNFEGKADIFRILGFDPTTIPGIGYNIARIIVSELGTTFDSFPTERHFASYVGLAPSLCKSAGKKVRQKRRCKNTSRVGQVLRMAAASLHSSQTELGAFFRSVARRSDKKTAIKATARRLAHTIYRGVRYGKDFIDRGAEAYEAHLRKRTVKTIKNLIKSHNINRVELESAFATI

SEQ ID NO: 243915 - protein, 339 aa, unidentified
MVAGDIASLFEYFAEFKRKAAARMERAFPIIAIQEAGLDGFWIHRVLEREGIESHVVDAASILVSRHRRRAKTDKIDGETLVRTLLAYKRGDPRVCSMLRAPTPEEEDRRRICRERKALIAERIVHSNRIKGLLFAQGVLDYEPLRRNRRARLNELLTGDGRPLPERMRAQIGRELDRLEVILAQLKAVEAERDDLLKEEGNGAPAPAALLSQLKGIGPEFATILWSEGLYRHFNNRKQVAAYAGLAPTPWQSGSIAHEQGVSRAGNPRLRTAMVELTWLWLQHQPHSALSLWFYERVKRDGGRMRKTAVVALARKLLVALWKYTSQGVVIEGAVMKAA

SEQ ID NO: 243916 - protein, 425 aa, unidentified
MRVTKVVDVIKMEQVMDVSVDVHKDELYALARTPGKEYAEQFANKTPRIRKIIKDYQEIASEHGFKQIRVVCEPTGVYDRKLLRAARQLGALTSYVNAEAVAKFRVVQNNDNNKTDTSDPGVILTMAEHGHTIKHRILPDGYLGLRKLGSLLDDEEVMIVRIRGHINHVREELFCDWKFDKDFMYGNTGKALVAKYGANPYKIVKSGFTRFSSVMKRAVPRIRKTSIERLWAQAESSVLNEQPEGYIAILEQRLCDLYEDFWRHKNRKTSIEKEMVAILQQLREDDPSIPPPTPGIISEKNFARLLGETGPLNDFQSEEKIMRYAGLNLCMRKSGQYQGKYKISKKGRPLLRKIISQIVLQLVRKGGLYGDYYHEKKERQSLPGAKMMTIVMRQYLRKFYGWYRSEQEFDKTRFFTCEHKYKMAA

SEQ ID NO: 243917 - protein, 360 aa, unidentified
MQHQYSYADFAGQDVFVGIDMARKKWQVAIYLGDAFHKSFSVDPQAKVLGHYLARTFPGARYHSVYEAGYFGYEAHHELVRLGIDNMIVNPADVPTSDKHRRTKNDRVDAKKLSDELRKGGLRSIYIPERVAIEDRALVRMRSTFVRKQTRCKNQIKAALAFFGFPLPPEDIVERYWSRAYIRWLEGLHFEHESGHQAFHTLLNELLNLRTTITELTRQIRHLAQEDCYRTRVQLLCRIPGISMMAAMIFLTEIITLDRFKNLDRLASYVGLVPGEHSTGETEIDTGLTPRRNVFLRYILVEAAWIAQREDPALLAAFKEYCTRMPKNVAIIHITRKLLSRMRYVLKHNQPYVTGVVANN

SEQ ID NO: 243918 - protein, 387 aa, unidentified
MSQVDDLSRSLAAFDQNTTLTVVVELSEASWLVAGLVPAVDRQPLKKQEPDPKALLRLLERWRAEAAKTGRMIERIVLAFEAGRDGFWLARWLRARGIEVYVIHSTSVAVSREHRRAKTDRLDTGMLMRVFLGWLRGERGHCRMVAIPTLEEEDAKRPSRERESLVGERTRIINRMKSALARLGIRGFKPALRKAPQRLEALRTPEDTPIPPNMLDEVRRDMIRLAVVREQIDAIERARLVRLEQAPARGSHPMVRLLARVIGVGIETADMLVQEVLSRKLRDRRAVARYVGLTGSPDESGKRRREKGLAKAGNARVRRGLIQLAWRFLRFQKDSALAQWYRARTEGPKGVRKTTMIVALARKLLIALWRLVMTGEIPVGVVLRAAA

SEQ ID NO: 243919 - protein, 315 aa, unidentified
MVDVPCFMGIDVAKAQLDIAVRPSGERWAVPNNTDGVATLVEQVQALHPTLIVLEATGGLERAATAALATAGLPVVVVNPRQARDFARAIGQLAKTDALDARALAHFADVIRPTPRPLPDAQTQELRALLGRRQQLIVMRTAEQNRLAGTSGRLQTDIEAHITWLNERLATLDDDIETLLRASPLWRENDDLLQSAPGIGPVCARTLLLELPELGTLNRRQIAALVGVAPLNRDSGTLRGRRTIWGGRAHVRTVLYMGTLVATRYNPRIKAFYERLLAAGKVKKVALTACMHKFLTILNAMLKPRTPWQAQEVQG

SEQ ID NO: 243920 - protein, 413 aa, unidentified
MRVMVERCCGLDVHQETVVACLLIGAPGVRPSKEVRTFRTMTRDLEALRDWLKAAGVTHVGMESTGVYWRPVYAVLEGHFELIVGNARHIRNVPGRKTDVKDAEWIADLVRHGLIAKSFVPARPLRELRELLRYRRKLVESQSAERNRLLKLLETANIKLASVASDVFGVSGRAMLKALSEGNVSAEEMAGLAKGQLRRKHDDLVLALEGRVEEHHRFLLAVQMHRLEAAEHDIEVLDSRIAERLEPYSAQHALLMQIPGVDWVVAAVLIAEIGIDMSVFLSANHLASWAGVCPGNHESAGKQKSGHARKGNVHLRTILVGAATSAGRTKGSYLKDKYHRLKARRGALRAALAIAHKILVAAYHMLAKGLAYRDLGEAYLDHLDQTRTAANLKRRLERLGYTVVLQLREAATA

SEQ ID NO: 243921 - protein, 363 aa, unidentified
MTNPYYIGFDVHKKTVSFCVKTASGEIVQEGRTLARRDVLRMWAAAQPGPWQGALEATLFSAWIYDTLKPYAQQLHMGHPARMKAICAGKKKSDRLDARTLADLLRCNLFPDCYVLSPEMRDLRRLLRYRHLVVTQSVRLQNKMAGLLMEAGAPFVKARLHGKKYFTQLVQTLEEVPESVKDLLQMSRGALEMFEATQKRLVKRLLAEPALQARAERLGTIPGVGPITALTWALEIADPYRFASIADAVSYCGLTTAFRSSADQVQRGPLSKQRNAWLQSTLIEAAKLAPRWNPPLAAVHARELERGHRNRATLQVARKLVAYLMAVDKSGQPFQVRSSARLEAELSCQEGEKAGHPVALQPA

SEQ ID NO: 243922 - protein, 344 aa, unidentified
MSEVITIGLDIAKYVFHVHGADERGRAILSKRISRGKLLDFFAARPSCTVALEACGGAHHWARQLTQLGHEVRLIPPAYVKPFVKRQKNDAIDAEAICEAAQRPSMRFVAVKSERQQAAGLVFRTRDLLVRQRTQLINAIRGHLTEYGWIAPKGPSHVAMLADLLEEEEMASSLPEAARAMFRLMLDLLAGLNGKIADLDKEIARRAREDEVSRRLMTIPGIGPISATAIAALAPPAETFAKGRDFAAWLGLTPLQRSTGGKRKLGATSKMGERTLRRLLIIGSSTVVLQASKRGAPKGSWLDQMLARKPRMLVTVALANKMARIIWALLVKQENYRAPVAAKA

SEQ ID NO: 243923 - protein, 412 aa, unidentified
MEKSYKIAGIDVHKSMLAVVVADAALEGEFRFERRKFGTMASELKALAEWLAAQQVREAVMESTAQYWKPVWRELEGQCRLQLAQAHSNRAPRGRKSDFKDAERLLRRLVAGELILSFVPNPEQRLWRTLTRTKHQLTRDRVRLHSQLESLLEDARIKLATCVSDLLGLSSRRMLQGLADGQTDAAALAGLAEPELRATPEQLADALSAAATLSPLHRQILRLFLERLELIERQIATLHQTIASALQQHQQAVLRLAAVPGFGPDSAQQVIAEVGPEAATFASAGEMASWVGVCPGREESAEESKSNRTPKGNRAMRRVLNQAANAARKAKGSVFHAMYGRLVPRLGHHKTIWAIAHRLCRLAWIILHNGVEYIEYGKQRDPKATERRTAKLIRALRGLGYQVIPPTANVVG

SEQ ID NO: 243924 - protein, 320 aa, unidentified
MLKKKSKCFIGIDISKQQLEVAAHQSDYQFRCANKVSAFGELIAELISLRPALIVLEATGGLETRVVSALHRAGLPVVVVNPRQVRDFARALGQLAKTDRLDARVLAHFAAAIKPPLRPIKVKEQQELDALTGRRGQMVEILADEKNRRASAASDTVREQIKQHIDWLQDRIAELDQQIKALLQTSPGWQVKDQILQSVPGIGPVASFSMIADLPELGTINRQQISKLVGVAPLNRDSGQQRGTRHIYGGRAGLRRVLYMAALTATRHNPVLKEFYQRLRANHKPFKVAMIACMRKLLSIINIMIRDSTTWKTKNQPVSA

SEQ ID NO: 243925 - protein, 403 aa, unidentified
MNSVGIDISKGRSTIAVMRPFGEVVISPFEVRHTGSELSKLARQLKSLDGETRVVMEATGNCHASVAKLLHNAGLYVSVVNAKLVHDYGNNELRRVKTDRKDAVKLANYGLDRWLTLPRYIPEEDPRLLLKNCYRQYRQYSKVQTVLKNNLISLLDTVCPNANRLFSSPIRGDGSEKWVDFVAEFWHCRCVSEKSERAFTSKYLRWCRKHGYNFREAKAHTIYAEASGHIGVMPKSETTKLLVEQAVAQLRATSTALAVLKHEMQSLASMLPEYPVVMDLFGVGPTLGPQLIAEIGDVRRLYSKKALVAYAGLDAPPNDSGDVTGRHKSMSKIGASSLRRTLFLVMSVYLQTAPLDEPVYQFMDRKRAEGKPYRVYMMASANKFLRIYYATVKAYLESLEHTA

SEQ ID NO: 243926 - protein, 340 aa, unidentified
MKKLYGAFDLHSSNNYLGISDEKDRRVYKKRLTNQPDVILAELEPYRNDLVGLVVESTFNWYWLVDLLMEEGYRVHLANPAGIQQYKGKKHSDDKHDAFWLAHLLRLGILPEGYIYPKEERPVRDLLRKRGHLVKLRTSLINSLQGIIHRNCGVKLNAKKIKAVRENNVAPLLSGQEDLALSGAVSKETIDFLGQQIRKVENIVQDKVKLKKEYLYLLTIPGIGKILALTIMLEAGPIARFEKVGNLSSYCRKVPTNWISNNKKKGKGNKKNGNKYLAWAFSEAAEFARRYDQQARAFYNRKASKENFMVAHSALAHKLARAAYYVMRDQVAFDPQKLFA

SEQ ID NO: 243927 - protein, 336 aa, unidentified
MPHYCGIDLHSNNHVVVVTDEEDKRVFEKRLSNDLSLTLKALCPYRETLQGIAVESTFNWYWLVDGLQAHGYNLQLVNTAAVKQYDGLKYSGDHHDAFHLAHLMRLGILPTGYIYPKEQRAVRDLLRRRLSLVRTASTQLISVQSQIWRSTGLRIKSAELRKLEFAPPRVDDYTRQAIHAGLAVYQAVQREIDALENAAHQAVKLTDAFEILQTITGIGKILGLTIWLETGDIHRFAGPGNFASYCRCVDSTRTSNGKKKGEGNAKAGNKYLSWAFCEAAHFAVRFEPLAQRFYERKKAKTNGIIAIRAVARKLARATWMMLKHHVPYDAKLMFPG

SEQ ID NO: 243928 - protein, 409 aa, unidentified
MQPILESCCGLDVHKFMIKACIAKVPLDRPPKLEIRTFFAMTSDLLKLKDWLAKNEVEAVAMESTGVYWKPIFNILEDCFDIVLANPQYLKKVPDKKSDVRDCQWIATLLRNGLIPKSFIPPRDIRELRDLNRTRRKHIEIMASEKNRLQKVLEDANIKLGSVVSKINGKSSMKMIQSLLEKDERSREKIAEMARRKLKRKVPQLIEALNGRVTEHHRFLLRFHLDNIAFQLEQIQELDEEIQRRMVPFQKEYQLIQTLPGISKTSAAAIIAEIGTDMSQFPDEAHLSSWAGMCPGNNESAGVKKSGRTRKGNGFLKGILTEVAWAASRTKGSAYSAIYNGIAKRRGKKRALIALGHHILCDIYRVLTTGETYVDEGAEAVFKRNSKAREGAMIRALERSGYTITKVAA

SEQ ID NO: 243929 - protein, 343 aa, unidentified
MGRKIGVDLHKNSFRVCYYQNDTKYDFETYQVSAKGLEHFKKGLKKTDELAVESTGNTWHFYRAVEGKINRIRVVNPIQFKVISESVKKTDDEDALKIAKFLSKDMIPEVRMKSKAESQLGSLIGTRDKFVKLRTALKNKVHNILNANGIVTKTELLTSDKSLNKVLGHKLDETCLFELEIITKEIRNLNEAIVKIDEQIKDKGSKLDGHKSITSITGIGDTSATIFLNTIGDIKYFKDDKALASYFGIVPRIRASNESVHMGRITKMGNKIARTALVQCTFVAIRYSPYLRAFYDRLKVKKGSGKAIIATARKLLGIIYNTLKKKWVFEDFASYKLAPQCAL

SEQ ID NO: 243930 - protein, 429 aa, unidentified
MRTESTPGARGPVFCGVDTHADSHWLCVLDWRGRKVLSRQFPADAAGYEALAGAIAAAGEPACVAMEGTSSYGAGLTRHLASLGMPVREALSPARTQRRRPGQGKCDEADAERAARAAMSGSKLGTPKSQDGWVDGVRCMLAARSGAVKARTSAINTARSLLTTAPEGLRSRFRGMAGPRLMEELPSVRAEGALGAALGALADLWAAARDAALDMERAIEASLEENCPALLAMYGCGPVSAAKLAVAAGDNPGRLRSEASFAAICGACPIPASSGKTVRHRLNRGGDRQANSALHEIARQRVMRDPETAEYAERARGRGKSDREVMRCLKRYVAREAYRALMRPHEIRRPEDASELVAARRAAKVSQVRAASILGTSEKYISMLERGQRELKPIRRAYEAWVEAGLPLDWDRQAFEAERKMDSKKHLAK

SEQ ID NO: 243931 - protein, 354 aa, unidentified
MSNRINSIVATIGIDIGKNAFHVVGLDRRGAIVLRQRWSRGQVEARLANMPPCLIGMEACVGAHHLSRRLQSQGHDARLMPAKYVRPYSKGQKNDFRDAEAIAEAVQRPTMKFVATKTAEQLDLQALHRVRERLVSQRTGIINQIRAFLLERGVAVRQGLRFLRAELPIILATRSDVLSPRMLRVVEELAGDWRRLDERIAGPSKEIEDLARQDPACERLMTVPGIGPIISSAMVAAIGNGAVFTKGRDFGAWLGLVPKQISTGDRTILGAISRRGNRYLRALFVQSAWVVLIRIKDWDRYGLKTWIDAAKKRLHHNVLAIALANRLARIAWAVLNKERAFECVKTHATARQPA

SEQ ID NO: 243932 - protein, 452 aa, unidentified
MKKHIYRTCDVQQVQLKELLPALVGGCIVALDVAKEKFVAAVATVTGEVLKLIRFDHPTQTRQFLQLLEALELGVGKNNLRVALEPTGTYGDAVRYQVALRDIPVLMVSPKRTHDSRALFDNVSSLHDPKSAAQVAKLCSLELATAWKAEDATRTRLRALVELRRHEGERYDTCLQRLESRLARHWPEFGQWLNTHAQVSALHLLAEFGSPARVRREPEEARELLRRASHGRLSAEVIDGLIEDTKETLGVPTSVEEHQYITVLAKEALESRRQREAIEKQMEAMCTDAAFRSLSAWMGTYTAAVLFSLCDPRQYSSAKELVKACGLNLREKSSGEHHGKLSITKRGPGLVRQVMYLFALRMIAESPTVNAWYTRRRGYTETSRVSAVVAVMRKLVMASFHIARGAVFQPGRLFDERRLQLPVTSAQRRTPPEPRRQRRTKKRRGVTAAAST

SEQ ID NO: 243933 - protein, 456 aa, unidentified
MQSYYLGIDVSKGYADFTLLDSTKQTVEPNFQLDDTFDGHCGLYDFLNQFLSAHPQATVHAAVESTGGYENNWFCSVHKLQKELNVKVAKLNPTGVNHSSRAALKRVITDSISARNIAEYMITHPEKVNYETEDYFVGLRRKWQFIKTLIKQKTRLLNQLEKLLYIANPDVLRYCKDGVPKWVLRLLQVYPTAKRLSRAKVKTVALIPYVSAQRANELIGASKMSIASAEDALTEDSILTMAKEIRHLEQLIKKQSKLLADACSMPELEILKTFNAIGDASAIGLLLEIGAVQRFRTVKKLASFFGLHPKFKTSGDGTSGIRMSKEGRKEPRAILYMVAMTAIVHNPLIREVYQNNLAKGKCKMDAMGVCMHKILRIIYGMLKNNQAFDPEIDRKNRMKVLHKKSSDPKNINRRFQQPDENAPISRRQNKKRKEQERSQSDPVTIHEIDVLALSKH

SEQ ID NO: 243934 - protein, 438 aa, unidentified
MKVMYERVAGIDVHKDMIKVAVRSPGDKPWTRKTEILTFRTFYGVLRAMARELRRRGVTHVVMEASGVYTEPVYYALCEEDFTEVAVVNPAHAKALKGHKTDAKDCARLAELFECGLLQGSYIPAAGLKEMRDLSRYRMKTVQARTSEIQRLAKALESAGIKLGSVASEITGKGPVAMIEALISGERRGAVMADLAKGRARTAGKLADLSMALEGRFTDHHALMCRLHLDRITALDAAVADLEARIAATAADWQREIDLLKTIPGFGDIVAWAWIAEIGPAPHQWFASHHKLASWVSLAPGNNVSAGKRKYGRTGDAGTYIKPMLIQAAWAAIQVRGRLQARYNRLVRRLGGPKNPAAKKKAIVAIAHTLLKIAYTVLKTGTGYQEPGADFYTRRESPGHRQAWLERQIQKLHPGCTVTITISPSPDPAPEAALPPGA

SEQ ID NO: 243935 - protein, 344 aa, unidentified
MSNLDTCGIEISAKELVVRLRRGEDLEPLRNFTNTPEGHLAILRYLRRAGRVVRVCMESTGLYGLDLALALSGQEGIEVMVANPRAVRHFAQAMMKRSKNDQIDAGVLEQFAAHMPFRSWQRPSPTALALHALARRLRELVEMQTAEKNRQHAAGLSQAIPAVVRRDLARSLRAQERAIERLTRQARKLIAQDPQLTERFELLDSVPGIGETSAVQLLGELGALAPDLDARQWVAYAGLDPREYTSGTSVHKKPRISKAGNKHLRHALFMPALVAVQHDPHLRAFYQHLLARGKVKMQALVAVMRKLLHALHAMFKTHQRYDGSKLFRLNSTPAQEVPNALVAS

SEQ ID NO: 243936 - protein, 338 aa, unidentified
MRLYCGIDLHSNNSYPVVIDDRDLVIYQRRLQNNLELILQELSPYAEQLVGIAVESTFNWYWLVDGLMDAGYRVHLANPGAMQQYKGLKHADDRSDGRWLAHMLRMGALPEGYIYPREQRALRDLLRKRGRLVQQRTANLLSLKNLVHRNTGQRLAVRALRSMDFAELEPGQADPNRTLALEATRRVIECYDGEVQRLEQEILRQLKPDPLLPLLKTVAGVGEVLAPTIRLETGDIGRFASAGKYVSYCRSVGSQHLSNGKPKGKGNRKNGNPYLAWAYVEAAHFAIRYHGPVRRFYERKQARTHHVVALKAVAHKLARAGYYVMRDQVPFRIDLAFG

SEQ ID NO: 243937 - protein, 346 aa, unidentified
MKTGITSQVVHPFIVGVDVSKESMDVCMIEMVTQRQYSICLTNTSEGYIKLKRWMKQHGNDDHEQTLFCMEHMGIYTQNLVKYLMSRGGKVWLESSLHIKRSIGLVRGKSDKIDAERIARFAMIHQRDAKLVKLTHPTLERLQRLMRLRARLLKNKQSQELAISETEHFDKKAANEMRRLSKPSLEGLAKSLKRVEDKMMEVIQMDREVRALYELITSVKCVGKVLATDLIVYTHGFTRMLDGKKLACYCGVAPFEYSSGTSIKGSPGTSSFANKVLKYHLHMAAMSAIRHCPELKEYYLRKREEGKGKMTILNAIRNKLLHRVVAVVKRGTPYQEKIVLKKVGMA

SEQ ID NO: 243938 - protein, 361 aa, unidentified
MHKNIFVGIDLGDKNSVARIAVDRGKSERLGFVNTRSGRKRLFREVKLRAQRAGGAKIIMAYEASACGFVLRDESEIEGIRCEILAPTKMEKSADQKKNKNDDRDAEDVLERLRASVLAGNRLPTIYVPTRQMRDDRELTRSRNDLVEKTTQIKTQIQMLLKRVGMEKPSDIGGNWSKSHRHWLESLSQSHYLGSGTRQVLGSLLRRLAFHEQETQLMEKPIYELAAEPRFKPIVTELTQTKGVAIIGAMTFATEVCYAGRFKRGRQCGKFAGLTPTSHESGQQNDHKGHISRQGPSRLRKMLCQASWVHIRYDDNGKEFYNKLVERNPKKKKIAIVAVMRKLDVRLWHAMRKAELSMAQN

SEQ ID NO: 243939 - protein, 338 aa, unidentified
MLHVGLDLHKRFSTVTVMDDNGTVLKQDKLYHDDRARLTEFFRPLAGKAIVTVEATRNWYWLYELLEELGVTVKLANARRVRLIAEARLKSDKVDPGSLAQLERTGFLPEAYIPPREIRDNREYLRYRLTLVRLRTGLKNKVHALLDKLGISHQFADLFGPAGRRFLSQLKLRPVYQEELTNYLALVDDIECRIVAATKEIKQQLKPDPRAVLLMTIPGIGHLTAYLLLNEIGDVQRFPTPGKLCAYGGLVPIVRQSAEHRWQGHLTSDGNHYIRWALAESACKAPSKDYQFGTFYRRLAARRGPLKARMALARKLLVIVWHVLTNGEPYKVKEVPTI

SEQ ID NO: 243940 - protein, 324 aa, unidentified
MDAGGKVLAQGKALSDPGSLFEALREHSLCPERIVLETGTLSGWLARGLRDRGLTVEVIDARQAHAVMKLQHNKTDKNDAHLLADLARTGFYRSVSVGSEAFQLQRILVKARRHLVCHRRDTENVIRGFLCALGLRFPRGSGKLAARVRDALDARPDLKPMIEPLLASVEALKTQIKRLDGEVMAEAKVSPASRLLMTVPGVGPVTAMAYAATIGDATRFARSRDVGAYVGLTSRRYQSGEMDYSGRISKYGDALLRSLLYEAANSLLTIVRRSHPLKDWARRIRKRSSHKKACVALARKLAVIMHRMLITGEAFRWPQKEEPA

SEQ ID NO: 243941 - protein, 407 aa, unidentified
MEVLYPRCAGLDVHAATVVACVRIASGRAVTYEHRTVSTNTRGLLELADWLTTQGVTHVAMEATGVYWKPVWHVLEEHVTLVLANAMHIRNIPGRKSDKNDATWIADLLALGLIRSSFVPPAPIQELRDLTRTRKQFVRERARHMQRIQKTLEDANVKLTEVITDILGTSGRAILTALIAGETHPERLADLTSGRLKATRTQLVEALHGRVTAHHRFILNLHLTHIAALDTAVADVEARIREALAPFRAAVSLLMTMPGVSETAAALILGEIGDDMSKFPSAGHLLSWAGLCPRLDESAGKRRSTRTRPGAPWLKTTLVQIAWPAARKKHSYFQAQFLRLKSRRGPKKAIVAVAASMLTDVYYMLRDGAEFHDLGDQHFAQRDKTRLANRLLQRLRDLGVEVEVKAA

SEQ ID NO: 243942 - protein, 347 aa, unidentified
MRNYVGLDVSLKTISICILDEKGKRLVEGEVDSNPEAVGDFLIKTGLEIEQIGLESGNLTHYLKKGLLKMKYQVVVMETRKMAAILATIINKTDKNDARGIAEALRVGHFRECVHRSDSAIEIRTLMHMRQTLVEERTHVTNSLRGHLKVYGIKFSKKAGKGFRKMVEKAVINMNPFIQRAVRSLLNVLDTLDKELQALNLEVEKIASEDEDVKLLQTIDGVGPVTALAFKTEIDDPKRFENSKDVAAYIGLTPSQYSSGEVQRQGGISKKGSSRTRYLLVEAASAMLTRCKIWSKVKAWGMKLKKKKGSRKATVAVARKLAVIMHRMLITRKPFERSSEKKEVVAA

SEQ ID NO: 243943 - protein, 348 aa, unidentified
MLADQLDFVVGVDPHRDSHALAIVHVVSGAVVFEANVAASSGGYADALKLAERHAAGRRAFAVEGTGSFGSGLTRFLTGQGERVLEVGRLRRERRSGGKTDALDAVRAARSVLAQERPTTPRAGGERQALQGLVAAREGAVNAKRAGLCQLRDLLITTPEPLRSELRPLTRARLLQRLAATRPGGGRDPELRGSMLALRSIARRLLQLTAEERELAHEIETITRKLAPQLLEQPGVGPHAAAQLVLSWSHQGRITSEAAFARLAGAAPIPASSGQTIRYRLDRSGDRKLNRALHMILVTRKRSHPATIAYIERRLQEGKTRREANRCLKRYLARNLYRLLEHGPPSAT

SEQ ID NO: 243944 - protein, 346 aa, unidentified
MNITQIGIDLAKLVFQLHGIDSRGKVTLRKQLKRSQVAAFFAQLAPCLIGMEACGSAHHWARKLMEFGHTVKLIAPQFVKPYVKTNKNDAADAEAICEAVGRPNMRFVPIKNTEQQALLGLHRVRQGFVTARTAQANQIRGLLTEFGLVIPIGIRSIERKLPEFLEDAENGLLGASRALFARLLEHFRALDRQVKEMEREINAWHREDTASQRLQEIPGIGPITASALVASVGDAKVFHNGRQFAAWLGLVPRQSSTGGKTNLLGISKRGDTYLRTLLIHGARSVLFGLKRNPDRAEGWLARVANRRNPNIAAVALANKNARIVWALLAHGRDYTSDYRSVKPLAA

SEQ ID NO: 243945 - protein, 397 aa, unidentified
MIAVGIDVSKSKSTVAILNSDGTPLARPFNMAHTLPEMNSFVERLRAFDAPVTILMEYTGHYHYPVLKKLQAEGFPVCLINPYQMKKYGDVEIHKAKTDRKDAVRIATYALEKAYKLTPYSAMEQKYEDLRFLSRQYGQRIADVSRLKTQLLDHLDQTMPGITSLLALKSRTPDNCVLLLFIKRFNSFDEIHRIGKPRFLSAYSSLVKKTTDRYAASKALAIYELALNSITTRGDDPYIWSVQRQCVDLLASAQNAADTIILQMQNIAETIPEYKVLRSMHGVGDRLGPIILAEIGDIRRFHSGKALNSYAGNDAPPYQSGQFESKNRHISKRGSPALRKACFEVMQALKLTKPQDDPVYLFMLKKEQDGKPHNVAKMAGINKFLRIYYARAMALYK

SEQ ID NO: 243946 - protein, 402 aa, unidentified
MNAVGIDVSKGKSMVAIMRPFGEIVSTPFEIKHTASDIHSLVELINSVEGESRIVMEHTGRYYEVLAHQLSEANLFVSAINPKLIKDFDNDSLRKVKSDKADAVKIARYALDKWQNLKQYNVMDELRNQLKTMNRQFGFYMKHKTAMKNNLIGILDQTYPGVNTYFDSPARSDGSQKWVDFASTYWHVDCVRKMSLNAFIDHYQNWCKRKKYNFSKSKAEEIYGKAKELVPVLPKDDITKLIIKQAVDQLNSASITVESLRTLMNETASKLPEYPVVMAMKGVGTSLGPQLMAEIGDVSRFTHKGAITAFAGVDPGVNESGSYEQKSVPTSKRGSSDLRKTLFQVMDVLIKTHPQDDPVYQFLDKKRAQKKPYYVYMTAGANKFLRIYYGRVKEYLASLPES

SEQ ID NO: 243947 - protein, 345 aa, unidentified
MLNQPLFAALDVSLETTTICIMSFDGTITKEAVVATEPDSIAICLGDDLTRIERIGLEAGPLSEWLVRELSVLGIVVTLLETRQVRAALSAMIIKTDRKDARGMAHLLRTGWFRPVHVKSLSAREQRAMLAARSMLVARLKDIENSVRGLLRGFGLRLPRALRGRWEAGVREAIEGHPTLVQIFEPLLMAREALREQLIILDKRVRDAARADRVCRRLMSAPGVGAIVAMTFRAAVDQPDRFRSSKQVGACFGLTPRKYQSGETDRSGSISRAGDASVRVALFEAAHVIMTRVAAWSKLKAWAMNVAKRRGAKRAKVALARKLGVVLHRMWVDESEFRFGNPAQA

SEQ ID NO: 243948 - protein, 381 aa, unidentified
MTTAAIRNEQSNTTEATLFVAFELSEKTWKLGFTTGHGQKPRERIVTARHQERVLDEIAQAKRRLGLPETAPVVSCYEAGREGFWLHRFLQAQGITNHVVDSSAIEVNRRRRRAKSDGLDVRKLLSMLMRYHHGERQVWQVVKVPSGEAEDQRHLHRDLETLKRERASTTTRIKGLLSSQGLRVTSLTQLPEHLEALRLWDGSPIPPGLRRRVLRVYAHYTFLSEQIAEVEAERRALLQTSPEASIAKVRQLMQRKGIGINGAWLLVLEFFGWRAFKNRREVGGLAGFTPTPYQSGESAREQGITKAGNRHVRWMTTELAWSWLRFQPDSALSVWFRERFGSGGKRLRRIGIVAVARKLLIALWRFLETGVLPAGAVLKEA

SEQ ID NO: 243949 - protein, 354 aa, unidentified
MNKNHDQNEIILGVDTHLDVHVGAVVNAAGKLLGVLSISVNTQGYLDLLSWASSFGDLKRAGVEGTGTYGAGLCSLLTDNGITVFEVNRPDRVARRRRGKSDPIDAENAARSVLSGLSTAIPKQHSGACEAMRIASVARRSAVKARTQAINQVRAILVSAPQEIREKLWRVKASECVKACINSRKFGDSPLMTTLQSTLKCLAKRWMMLSSELHELDKQLEKLTQNHAPKLRSRFGVGPNTAAILLSVAGDNPERLKSEAALASLCGVNPLPASSGKTVRHRLNRGGSRVANNALWTIAMVRMRSDARTRVYVERRTNEGLSIKEIQRCLKRYIVRELYPLILGDLQNTGELLT

SEQ ID NO: 243950 - protein, 355 aa, unidentified
MSQEKYIGLDVHQATISAAVMDASGKVLMECLLETKAATIVEFVQGLHGTLSLTFEEGTSAAWLHDLLQPHVDRLVVCDPRKAALLKEGNKSDRIDARKLAELLRTNQLKPVYHEEQGMRTLKELGRSYTTITKDVTRVMNRIKALYRSWAIPCSGSTVYAQRHRAEWLAKIVEPGVRIRAKHLYQQLDSLQPVRQQARCELLRESHKHPAVKLLRQIPSIGPIRAALLVALLQTPHRFRTKRQLWAYSGFAVETHDSGEYRWVRGKVQRNRERITVRGLNDNHNKDLKNLFKSAAIAASTRPGPLHDFYMARVERGMRPTMARLTLARKIASITLTMWKKGVSFDPKQLQRQTA

SEQ ID NO: 243951 - protein, 359 aa, unidentified
MDIRDQAKRHVVGGVDTHKDLHVAAVVDERDRVLGSQSFATTRQGYRQMLAWMGSFGEVQRIGIESTGSYGAGLLRFVQTVGIEVLEVTTPDRHDRRRRGKNDDLDAQNAAHAAFAGQRTVTPRSRDGMVESLRVLSACRKTAVAARRVALQLIQNTIVCAPDGLRDVLRSMTRMQLIRTLAAWRPDLTAYRDVEAAYRITFKSLARRYLELHDEIADLDIMIGAIVDELAPDLVARNSIGHVGAAQLLLAAGDNPDRLRSEASFAALCGTSPVPASSGKTIRHRLNRGGDRHANSALHIIAIGRLRTDPKTKTYVAKRIAEGHSKLEAIRALKRYIAREVFTLIMRRHKAINQTQIAA

SEQ ID NO: 243952 - protein, 412 aa, unidentified
MKDLLEISCGLDVHKEKIVACILTGPLGKPTRSEIREFSTLIPDMIALRNWIVSKNCHHVAMESTGIYWMPIYEILEDAFYGDITLLVVNARHMKNVPGKKTDMRDSEWISTLLRAGLLNGSFIPEKRIREFRDLNRYRKSVIRDITSQKNRIEKFLQSSGFRLSSFISDIFGASGRNIILHLIEHGQIDKTALDSCLKTKTRNRIDEILMSVNGTLSEHQKAFLRILMTHYDSLKKHLAKIETSLEEDMAPFALQVEQLNSIYGISTTASCAIIAEIGIDMKPFKTAEHICSWAGLCPGNNESAGKRKSTSVTKGNPYIKSMLCEIAWVIAGKRNTYLSAWYWRIKQKKGAKKAIVALARKLLVIIYTMLKQGTLFDESCFETRRKHCEQKQLSRYIRELEKHGYHVEAQS

SEQ ID NO: 243953 - protein, 422 aa, unidentified
MRSVALDVHLDFCEVAIVEDGEVRSAGRIETKPEKIELFASSLAPDDRVALEVTGNAWEIARLIEPHVAQVLVVSPSDTGIRQARAKTDRLDARTLARLLAAGSLDGVWMPDRQTWVMRRRLSRRSQLVWARSRAKNQIHAVLMRQLVGRPPVSDLFGVKGREWLSELQLAAEESETVNSAMRQVEFFDSEISEVERLIAVAAVESAEIKRLMSVPGVNVIVAASFMAAIGDIHRFQSSRKLVGYLGLDPRVRQSGVGPATHGHISKRGSVRARHALVEACWSTVRQPGPLHAFYQRIRTRRGHSVAIVAAARKLASLFWCLLTREEDYAYQQPSLTKKKLRRLEITAGAERYTAKAAGIWSANDAVREAERELARQAEVAYARTVRDWHSTQAVKVGASVTPGRASNKPSKGEAARQTTSP

SEQ ID NO: 243954 - protein, 415 aa, unidentified
MEIMYARCAGIDIHKRMVMTHARLVEAGRVVREIRESGTFTKELLELRDWLKDRGVTHVAMESTGSYWRPVYNILEGEFELLVCNARHIKNVPGRKTDVKDAEWIAELLAHGLLKPSFVPEVPQRALRDLTRGRSSLVSERARLANRVQKLLKEANIKLASVATDVLGVSGRAMLASIAAGEDDPRVLARKAKGRLRAKAQALGEALQGRVRPHQRVLLRELLKQVESLDASIAALETEIATEIRNETDIPFEAAVALLQTAPGIAQTSARAIIGEIGTDMSRFGSARRLCAWAGVAPGNHESGGKRLSGRTLHGNRSLMRTLAEVAAAAARQKGTYLSALYGRLAARRGKRRAIVAVAHSVLRSIYYMLTSGVSYQELGSAHFDNINRAAVIRRLARRAEELGYSISPVEAVAA

SEQ ID NO: 243955 - protein, 323 aa, unidentified
MSAPVCSVVGIDVSKAHLDIALLPDDTTFRVSNDAEGWAVLIDRIAAPVAPTIVLEATGSYHVGLTLALAEAGMPPAVMNPEQTHAFIRSEGQRTKTDRTDARLLARFGQQKQPIASPVLTQNARDLKELVACRDDFTKLLTMEKNRLHVATERTRDRHQSVIDHLTAERKAVDREIAQLIAADDALARRNAIVRSMPGAGPVLGPLLLAGLAELGQPDPKALASLAGVAPHTQQSGKRKGYAVIQGGRTTIRKALYQIAKTAARCDPVMRAHLAQLRLRMAYTPAVIACARRMLGILNAMVRDGITWQQTRVGQKHFLPDPA

SEQ ID NO: 243956 - protein, 317 aa, unidentified
MKKRPSRFVGIDVSKDYLDLACRPEDTRWRVAHDSAGIAQCLAQLRQLKPTLIVLEATGGWQGSLVAALAVSKLPFAVMNPRQIRDFAKATGELAKTDALDAGVMAHVAEAMRPTPRPLPDEMTPQIDALLQRRRQLLAMLVAERHRVALAHPAVRDSLARHMDALQGLINATDEEVAAIIRTSPAWREKDDLLQSAPGIGPVLSATLQAALPELGVLNQSEIAKLVGVAPLNDDSGKRSGTRHIRGGRAAVRAVLYMATLTATRCNPVIKAFYQRLLGRGKSQKVAITAAMRKLLTILNAMVKTHTPWNARLQNCA

SEQ ID NO: 243957 - protein, 332 aa, unidentified
MYLGIDVHKRYAQVAVIDEAGDLTEEVRVENANLDELAQQYAGSQAAIEATSNYYHIHDTLSEHLDVTVAHPKELTQIANTDKKTDRVDAKELARMVRLNSVPESYVPTDKIREARALVRGRQTLVETRTKYANKIHGLLADHGLTEDVKPLSVEGREFLRELSLPTPWNALLKSYLDVTETLTEEIQKIEQTIEERAGSLKETQLLMTIPGVSYFTALTIYAELGEISRFDDDKAVVSYVGLNPVIRESGDSRIEGSISKRGSGRVRWLLVQAANTAVHTCNDEYLSRFYDRIASRKNSQKAIVATARKMLVSIYHMLDRGEVYDPPGVTA

SEQ ID NO: 243958 - protein, 453 aa, unidentified
MAKRKRKPGKMDRSLPELKANAAGIDMGAREIYVAVPADRDEQSVRSFPTFTEDLHRLVDWLQQCRVDTVAMESTGVYWIPLFQILESRGFQVCLVNAQHVRHVPGRKSDVLDCQWLQYLHSVGLLKASFRPEQDVCAVRSLLRHRESLVQMTCVHIQHMHKALDQMNLQIHHVISDITGVTGLAIVEAIVAGKTNPKELARLRDHRIKASIETVTKSLVGDYRPEHIFTLKQSLTAYRSYQQLIEECDQEVQQRLQAFDTKDDGSDAADSSNSTKPAGSDFDLRHHLQGIFGTDLTLIPGFESLRVQTIFSELGADLSKFPTEDSFCSWLNLCPKDGKSAGRRIRGPQIKTQNRVANTFRLAALSLHRNKSYLGDYFRSQRARHGALKATKNAAHKLARIFYHLVTKRQAYDETVFAKFETRNQKRRLNKLQSLAREMGYTLVGANACPVVP

SEQ ID NO: 243959 - protein, 424 aa, unidentified
MNCTQNERINQVSEQTLVIGVDIASELNYARAFNWRGIEQGKVFKFFNNLEGFQAFNEWAHQVMSANKLTNLIVAAEPTGHYWFGLADYLKDEKLKLVLVNPFHVNRAKELDDNHPSKTDAKDPKTIAKLVIEGRYMEPYIPEGVYADLRIMYNCRQKVTKAMISLENQLKRWFKIYFPEYLSVFGNLSGQGSMAVLEKAVLPEDIISLGVDGINKLWRERKLRAVGMKRAESLYEAAVKSIGRREGSVGGRAEFRMLWEDYCHKMEQMEKLNIELESLLHKVPQAEEVLKMKGIGVVSVAGFFAEVGDLRRFESPKQIQKLAGLAIRENSSGKHKGQTTISKRGRARLRAVLFNAAIALVGRNGAFKSIHEYYIGRKANPLKKKQSIVAVSCKLIRIIYAICRHKEAYDEAKMLRDIRREQLA

SEQ ID NO: 243960 - protein, 384 aa, unidentified
MKNDSILFIGMDTHKEFTEVAYSLDGRNNEVIHLGRIPSTKQGLLKLARQFQSKYPKATLHFLYEAGPCGYWMYRLLSQQGHCCYLVAPSLIPKKPGKRVKTDKRDAMDLCQLLKNGDISPIYVPETEDEAMRDLSRARETAMKDLNDARYQLKALLLRNNIRYDGKANWSLKHLRWLTEMILPHRCQQIVLQEMIQTISERSNRLERLDNELTHQVKQWRYYPVVKAIQALRGVRLLVATGVIAELGDLSRFDTPRKLMSYVGLTPSEHSSGGSRRLGSITKCGNGRARRLLIEGAHSYRYAANVSTSLQVRQEGLPKEVVDIAWKAQLRLCKRYQRLMKRGKNYNVVVTAIAREMIAYIWSISREVVLPKIDPKLRAARIPA

SEQ ID NO: 243961 - protein, 420 aa, unidentified
MSFKILKFKCCGLDVHKTWIYACIGITDSNNRTEYKQARFSSFTKGLNELCDWLAKYNCTDVCMESTGKYWIPVFNILEQHNLWVTLSHPKYTKPMKGNKTDRKDAKWICDLYMCGMVKPSFIPPADIRELRDLVRYRYKLTCMITGEKNRAQNCLTVSNLKLDDVFSDVFGKSSRSITEQILQHPGEKFDVAPFVHGRCKTPIEEIQAAVDGAISKEQAVKLRQCLDHIDELNKHISELEQEILRLSDKYEAALNLIRTVPGFDKNPMTAVQILSEIGGDMSVFPTAKHLVSWAGCCPRNDQSNQKIKSTRISRAGSYFKPVLVQVANALIKSKKHLEFTNRYKRIKARRGHKKAIIAICRMILTAIWHILTDLKPYTPEGFLESRPVNEAKVLTASQALNLMRQRGYIIKDDMSPVMN

SEQ ID NO: 243962 - protein, 479 aa, unidentified
MTPSKDAFPEPCPPVPTVPEPLVLRPSSSLPLYNPHAAGIDIGEAEHWVAVPPDRSPEPVRRFGTFTADLDVLADWLLDCGVTTVAMESTGVYWIPLFELLEARGVQVFLIDPRQAKRAPGRPKTDRLDCQWLQRLHAYGLLAAAFRPADQVCVLRSYLRHRQMLLTYGAHHIQHMHKALQQMHLKLSQVVSDLTGVTGMAILRAIIAGERDPLTLAQLRHPHCQHSEDEIAKALQGPWRAEHLFALQQAIELSHFYHQQLTVCDQQLQAHLGTCADKSDGQPLPPKPRRHKKANEPRFDARTPLYRLAGVDLTTIEGIEEGTALVILSEIGTDMSRWPSVKHFCSWLGLSPQHKISGGKVLSRHVRPGAHRVAVAMRLAARTVQQARTALGAFYRRMRSRLGAPKAITATAHKLARLVYSLLKHGSAYVKQGLEAYESQYRERTVKAVARQAKALGYTLVELAVPATPGNDAVAPATP

SEQ ID NO: 243963 - protein, 374 aa, unidentified
MWIAEDLGAAPQADGEYEVRGHGLKHQKEKRSMDHFAGLDVSVKETSVCIVDDTGKIVREVKIASEPEALLAVLSNPDYHFKRIGLDAGPLSQWLYSALTEADLPVICVETRHMQAVLKAQINKTDRNDARGIAQMMRVGLYRPVHVKTLRSQKLRMLLTHRKLLQSKAIAIENDLRGTLRNFGLKVGIAGKVKFEARIKELVERFPDLAVLVEPLLVVRRVLREQLGILHRRLLVIVRDDDVCRRLMTVPGVGPVVALTYRATVDVPVRFRKSKAVGAVFGLTPSKYQSGEIDRTGAISRCGDDMMRMMLYEAAQSMFHSTKWSWLKAWAMKVARHRGMKKAIVALARRLAVIMHRIWVDGTEFRWTREVAAT

SEQ ID NO: 243964 - protein, 324 aa, unidentified
MTAVLGIDVAKGTYQATLLVEGHSYKRSFGNRESAFPELLKWLHKHHAGQLLVGMEATGRYWEALAYYLHEQGHVVSVINPSRISYFARSKLVRNKTDAIDATLIAEYCLSQQPEPWTPPPAEVRELQALVRHLEALQGLRTQQGNRLQAAPPSCDVRASLESLLSHLDDQIQAIESKIREHIDQHPTLKQESVLLQSIPGIGQITAARLLGENIQQFDSTRALTAYAGLTPRHKLSGTSVHARPHLCKTGNEHLRRDLYFPAIVAMRYNPAVNSFSQRLTERGKHKMAVVGAAMRKLLAIALGVLKSQTPFDPRYTERNLVLN

SEQ ID NO: 243965 - protein, 282 aa, unidentified
MQTMYYIGLDVHKRTISYCVKDGSGTIHAEGTIPATRFDLDRWMKTLPQPWTGAMEATGFTGWIYDHLQPHAAALKVAHPLMLRAIAAAKKKNDRIDASKICDCLRCDFLPECYMASTAIRERRRTLRYRNLLVRQIVQMKNKISGLLMEAGVSYNKQRLHKAGYFRELLATNPDIDEGLCSLLRLCRETVVRLQKTESALIRSLQSDSLLLERVERLMSIPAVGPITALTWALEVGDVRRFSSIKKAISYWGLCAEQKRVRRTPCSARRCQSNAINICRRR

SEQ ID NO: 243966 - protein, 347 aa, unidentified
MKFYNQQHNHYCGIDLHARKMYVCIINHKGKVKVHQNIKTDPELFFELIFPYLDDVAVGVECVFCWYWLADFCAEHHIPFVLGHALYMKAIHGGKTKNDKIDSYKIASLLKGGNFPVAYPYPAKWRATRDLLRRRMYISRRCSELVAHIHNTNTQYNLPAFRKKLSRKYNHEGVAERFEDPQVRKSVEVDLAIIDSLDQILKKIEWHIEKTARQHDYHTLYLLRSVPGVGQILALVILYEIHDVKRFPTVQDFSSYARLIKPVKESNGKWAGHSNKKIGNHHLKWAIKEAAILMLRDCPEAKYFVSKLERQYNKGKALGIYTHKLGRAIYFMLKNKAAFNKKRFFDQ

SEQ ID NO: 243967 - protein, 344 aa, unidentified
MNNVTTYGLDLAKQVFQAHWVDVDSGEVHRKTLSRAQVSAFFARAPRGVIAMEACGSAHHWGRLLQTLGHEVKLIAAQFVRPFVKTNKTDAADAQAIWEAAQRPEMRFVAVKSEEQQAVLALHRLRAQWVKIRTQQANQIRGLLYEFGVVVPMGWRTLLKAVPEHLTATGSPVPTLLQEPLLEQLEALRAATAHIVALEKQLASWQRSEPECQRIMAIPGVGPLTASAVVASVTDARQFRSARQFAAYLGLVPRQSGTGGRVKLLGISKRGDTYLRTLLIHGARSVLLSQSRRGRSIDPWLGALLQRRPSNVVVVALANKMARTIWALLAQGRTFDAAWVSKRP

SEQ ID NO: 243968 - protein, 335 aa, unidentified
MGVDLHRNRFTVCTLPGNGRAYFKTWSIGRLEAFAKSLRADDRIAVEMTTNTRLFVRAVEGRAERTVVVDPWKFKVISASTKKTDKNDAELLAFFLSKDMLPEIRMKDKELEKLHSLAQTRDKLVKQRTQLKNKINNVFAGYGILFKREGLSSDAQLREALEYDIDPVVNVEVKVLVDQVRSLTKSIRELEEVIKKEGEKHEAHGILRSIKGIGDLGASILLSIIGDVNDFSDEKKLAAYFGIVPRVSNSNETTRSGRITKHGSKLGRTMLVQCALIAKRYSSFLAGFHERVKRRRGGGKANIALARKLLGIVYRAMKNRWVFTDFGKFQYVQLA

SEQ ID NO: 243969 - protein, 262 aa, unidentified
MKIIRVGVDLAKNVFQVHGVDRNEKPVWRRKLNREEWLKVLLEKIEPGCEIGMEACGGAHHWARKLQSQGYRVKLIAPQFVKPYVKSNKNDANDAEAICEAMSRSNMRFISVKTVEQQDIQAVHRIRAGLMEQRIAKANQIRGLVCEYGLVAPKQISHLRAAIPCWLEDAENRLTSRFRKLLNGVWVDLLSLDQRVKELDQEITAIAAADPVAKRLQQLRGVGPMIATALLATVGDASQFANGRQMAASLGLTPKQNSSGGK

SEQ ID NO: 243970 - protein, 422 aa, unidentified
MLQETADREEIIARVAALDIGKAEVVCCVRVPHESRPGRRLQEVQAYSTMTRSLLGMADHLRSLGVTRVVMEGASDYWKPAFWVLEAAGFETWLVNARDVKHLPGRPKTDKLDAVWLCKVAERQMIRPSFVPPPQIRRLRDVTRYRIDLVGARGAEKNRVEKLLEDAGIKLSVVASDIFGVSGRAMMAALIAGERSPAALAQLARTRMRTRIPALQEAFTGHFTDHHAFLLGKMLARVDGIDADIAELDARIEEMIAPFAQAAARLDEIPGIGRIAAAIIIAEIGVDMTRFPTAGHLASWAKFAPGVKESAGKKKGSGSTRHGNSYLARVLGEAAAGAARTDTFLGERYRRIARRRGSKKAIVAVGRSILVIIWHLLSDPEARYTDLGSDFFDTRINPERRKRAHIHQLEALGYKVTLEPAA

SEQ ID NO: 243971 - protein, 366 aa, unidentified
MKKISTMAKRGNEIFKEPKLTIGLDLGDRTSHYCILDEAGNVILEHRLPTTPRGIRQVFCRIPRSRIALETGTHSPWVSRQLTQLGHEVIVAHARNVRLIGESSRKDDQLDARTLARLARIDPGLLGPVRHRSAKAQIHLTVIRARAGLVSARTALVNTARGLTKSYGERLRKCGSGQINREIAKGLSQELRDALDPLLGEIESLNERIAEYDRRIERIAKEVYPEVTLLQQVKGVGTLIALTYVLTLDDPHRFRRSRDTGCFLGLRPGRRNSGMSEPQMHISKEGDGYLRTLMVQGAHYILGPFGEDSDLRRWGLKLAERGGKNAKKRAIVAVARKLAVLLHKLWVSGEVYEPLRNNHKVVSAVA

SEQ ID NO: 243972 - protein, 357 aa, unidentified
MTESSDYESVQVFIGVDVGKDTHHAVAINRSGKRLFDKALPNDENKLRSLISDLKQHGQILLVVDQPATIGALPVAVARSEGVLVGYLPGLAMRHIADLHAGEAKTDARDAAIIAEAARTLPHALRTLKLADEQIAELSMLCGFDDDLAAQTTQASNRIRGLLTQIHPALERVLGPRLEHPAVLDLLQRYPSPEKLASLGEKKLAAQLCKLAPRLGKRLAADIAQALAEQTVVVPGTNAAAVVLPRLALQLITLRKQRDEVALEVEQRVLAHPLYPVLTSMPGVGVRTAARHLTEVACRAFASAAHLAAYAGLAPVTRRSGSSIRGEHPSRRGNKALKRALFLSAFAALRDPLSRAY

SEQ ID NO: 243973 - protein, 338 aa, unidentified
MKLYGGIDLHSNNSVIALLDEEDRVVYRRRLPNDLEVVLSELEPYGDAIAGLVVESTYNWYWLVDGLMEAGYRVHLANTAAMVRYEGLKYADDDTDACWLAKLLRLGLLAEGYIYPKEERPVRDLLRKRSQLVHQHTSQLLSVQSLLARNRGGSPGANQIKRLTYDEVDRLLPDLDLALAVKSSLAVMRTLEGVIDRLEKAAKARIRLRPAFKPLLTVSGIGEILGLTIMLETGEIARFAKVGNYASYCRCVGSERISNGKRKGRGNRKNGNKYLAWAYIEAANFAVRFNPAIKRYYQRKCARTNRIVAIKTVAHKLARACFYILRDQVAFDVNKAFA

SEQ ID NO: 243974 - protein, 381 aa, unidentified
MKLTQVNDTRGDELVMAVGLETAGGSWKLALQDGRRGKPALHTCKEQQAQARLEAAVQRIEQTKGKWGLPTGTRVVIVYEAGQEGFWIARALRALGYEVSVTDPASVAVSRQHRRAKTDRLDAIRLVNALRSWLRGERDVMRMVHLPPEEAEAQRHGTRERGQLQKEIHGHCDRIEKLLRTVGCWQKVAEGFGAERLEQLRCYDATPLPLPLRRRLERECARLALLRAQLSALEQSLFAELPAPLQARVRQLQELKAVGWVGALRLVLDLFWRDFRNRREVGSCVGLVPQPYDTGNSHRDQGISKHGNARVRALAIQLAWMWLRYQPQSELSQWFKRRTQGSGANKRQRRIAIVAVARRLMISLWRYLEDAVVPAGALRKG

SEQ ID NO: 243975 - protein, 403 aa, unidentified
MNAVGIDVSKGKSMVTILRPFGEIVSSPFEIKHTSSDIHSLIKLIHSIEGESRVVMEHTGRYYEALAHQLSAADLFVSAVNPKLVKDFNNDSLRKIKSDKADSVKIARYALDKWQSLEPYSITDELRAQLKVMNRQFHFYVKQKTAMKNNLIGLIDQTYPNANTYFNSPTRSDGSQKWVDFVSTYWHVDCIRKMSLNAFVEHYQNWCKRKKYAFNKSKTEEIYTKTKELVPVFPKNEITKHIIRQAIDQLNSTSVTVETIRTLMNETASKLPEYSIVMQFKGIGPSLGPQLMAEIGDVTRFTHKGALTAFAGVDPGVNESGSYAQKSVPTSKRGSSNLRKTLFQVMDVLIKTMPQDDPVYQFMDRKRTQGKPYYVYMTAGANKFLRIYYGRVKEYLSVLPDPS

SEQ ID NO: 243976 - protein, 363 aa, unidentified
MFIERTSVGLDVHARSVAAAAIDSVTGEVFAARLTPSYDHIRSWISGLPRPAAAVYEAGPTGFGLYRALTESGIRCEVAAPSKLQKPSGDRVKTDARDALHLARLLRLDEICAVSIPTADQEAARDLVRAREDCRGDLMRARHRLSKLLLRHGIVYYGGAAWTGAHDRWLRTEAAPQLTSAPTRMAFDADYDHVLTMQARRGRLDTAIEEMAGDSEFTPIVRRMCCLRGVSTLTSFALAVEIGDWNRFTGNTIGSFVGLVPSEYSSGLSRVQGAITKTGNTHARRLLVEAAWHHRPRYHVGAVMRSRWDQAPAAARARGDEDNRRLHHRWVGFLERRKRSTVANVAIARELAGWCWSLAVMDD

SEQ ID NO: 243977 - protein, 341 aa, unidentified
MQDVTLVGIDLGKHSFHVHGQDRTGKAVFRKKLSRKQLLEFFATFHGCTVVMEACAGAHWMARKLSDLGHAVKMISPQFVRPFVKSNKNDFVDAEAICEAASRPSMRFVTPKTESQQTLSALHRVRQALVRDRVCTTNQMHGFLLEFGISLPVGHAVVKRLSLVLAEHQLPPRLVAVLERLHAHFKYLTEQIGDIEKELQRQLSDDALGQRLLTIPGVGPVTASLLASELGDGKQYRCSRDFAAAVGLVPRQYSTGGRSTLLGISKRGDKNIRHLLVQCARAYMLRLDKQSGRVADWTRAMLARRHSCVVACALASKLARIAWAIVRHNTVFEKQGTVTVA

SEQ ID NO: 243978 - protein, 355 aa, unidentified
MDNRKYIGMDVHKEAIAIAVLNAAGKLVMESIIETKANTILEFLKGLRGELHLTFEEGTWASWLYDLLQPHVKRVVVCNPRRNALLKEGSKSDRVDARKLAELLYTKMLRPVYHRDNGMRAVKELARSYVTISKDQARVMTRVKALYRSWGIACSGKQIYTVRHRASWLGKIKEPGVRRRADFYYQQLDGLRSVRRQVRRELLVESEKHKASKLLRQIPSIGPIRAALLLALVQTPHRFRTKRQLWTYSGFGIETHDSAEYRYVAGQLERSKKPQQVRGLNRNYNHDLKNLFKSAATNAVAKSGPLQEFYLALVKRGIRPEMARLTVARKIAAITLAIWKKGVSFDAEHLKQQTA

SEQ ID NO: 243979 - protein, 366 aa, unidentified
MKKISTVQAFGNEIFKEQKLTIGLDLGDRWSFYCVVDEAGKIILEQKVPTTPEAMKQTFSRVPQSRIALETGTHSPWASRLLTELGHEVIVAHAQKVQLITKSNRKDDRHDAQTLARLARVDPELLSPVRHRSVQAQIHLTVIRARAELVSARTALVNAARGLVKSYGERLPKCGTQQVSRELATALSTELRDVLEPLLKEIESLNERIKEYDARMEKIAKEVYPEVSLLKQVKGVGTQIALTYVLTIEDPHRFLKSREVGCFLGLKPGRRNSGESEPQKRISKEGDRYLRTMMVQGAHYILGPFGADSDLRRWGLKLAERGGKNAKKRAVVAVARKLAVLLHRLWVSGEVYQPLRNSQKAMRAVA

SEQ ID NO: 243980 - protein, 315 aa, unidentified
MTKLTTAFSGFIGCDVGKAEIVIHDSRDGTTTTIANRAKPLAAFAASLNASCLVVCEATGGYETALLNAMLKAGIPAHRADARRVKAFIRSYGIRGKTDAIDARELAKYGRERVDKIRLWQMVEEAQSRLQSLVLTRDDLVRQRVANKNRLGAPGDAAVKPILKTLIDCLTKQIAKIEAQIQQLIQTHPKLARNAKILTSIHGVGPVVATALQALMPELGTLSRREVAALAGVAPHPNQSGGRDKYRKTIPGRPVRSILFMAALSASQGKTGLGDFYRRLLSHGKTKMVAMVAVMRKIIVIANAKLRDSEQIQLS

SEQ ID NO: 243981 - protein, 351 aa, unidentified
MKEFIAFDSHKRYTWVEREEVETGKTTTVRLEHAPGAIRACLRGREKGTSVAIEAIGNWYWIVDEIEQAGLEPKLVHPRKAKLMMGLINKTDKLDAHGLNRLQRNRTLPTVWIPPRELRDLREITRTRMVLTAHRTRLKNRIQANLSKYGWTGTEASDPFGKKARRELISAVKQLPSQTAYITEALLEQLDFVERQIAEIEGRMRKLVQETPEMDLLRSLPGIGWILSAVTDLELGEIGRFASADRYASYAGTTPRVHASGDKVRYGRVRPDVNRYLKWAYVEAAHSICLHRATYPSRHVSRLYERIRRRKGHPKAIGAVARHLAEATYYVLTKREPYRDPALSKGQSREV

SEQ ID NO: 243982 - protein, 352 aa, unidentified
MLYVGLDIHDKRIAICVLGESGQIIRRAQVRSIDEMMRNLEALPDRFEVCYEASCGYGHYHDLLSPIAARVTVAHPGRLRLIFRSKDKNDRKDAERLAKLLYLGEAPAVHVPSADVRTWRELITCRDRVIAKRTRAKNSLRTLLRCAGIVPPSRPALWTKKGLEWLRRLELPKESQRLRRDLLLEEVEALVRQTERIEAHLNQQAKHSPAVLRLRSIPGVGVRTAEAVAAFIDDPDRFRDAKAVGRYFGLVPSQDQSGDRNRLGHITREGPAVVRHLLAEATWQAVRRSPTVRAYFERVRRDDPQRKNVALVATAHYLVRVMWALLKRGTTWEEGVAPADEPKRVAPGIAVL

SEQ ID NO: 243983 - protein, 322 aa, unidentified
MTAILSAILGIDVAKNKFDVALLSNGKYKTKSFDNKPAGFASFAAWLEQRDVANVYACMESTGTYGDCLAKFLFDTGHTVSVVNPARIKAFGESELLRTKNDKTDAKLIARFCEKMKPTPWQPDPPEVEHLRMLGRRRDALVSMRTQEVNRLGVADASVNESIQKVVTFLEQEIERITKCIKDHINNNPELKKKRDLLRTIPGVGDVTIEAILSEANGFDGFDTVEKVVAYMGLSPKEKSSGTSVKGKSSICKIGSARLRKILYMPALSAIQHNPFVKALYNRLIAKSKHGTIIACACMKKLVHIIYGVIKSGKPFDPAYNV

SEQ ID NO: 243984 - protein, 408 aa, unidentified
MQGAHPVCCGIDVHKDTLTACLRRVDANGQVSKERREFATTYTSLLTLSDWLVEQHCPIVAMESTGVYWKPVYHVLVGTVEVYIGNAHELRSRPGKKTDKRDAAWLAELFAHGLIQPSFVPPPEICALRDVTRTRVALVQTRSQSKNRVHKLLEDTNLKLGSVVSDLFGVTGRRMLAALVAGERDPQVLASLALGALKHKRPQVELALTGQFTAHHGTLLGLLLELIELLDRQIATLDQQIGELMMPLHAQLAQLDSIPGVDIIAARDILAEIGTDMSRFGDAARLASWAGVCPGNHESAGKRYRGKTRKGNRYLRRVLGPCAWGARKTPTFLGRTFRRLEVRIGKKKAALAIAHKILVIVYHLLATGSCYEEARYDHYHPKQEARERQRAIKALERLGYTVTVERAA

SEQ ID NO: 243985 - protein, 321 aa, unidentified
MNDEIFIGIDVCKAWLDVAQVPALAAGEASAFALRVDNEDGARALLVEQLKRLRPTLVVLEATGGFETALASQLCLAGVPVAVVNPKRVRDFARAAGILAKTDRLDAQVLATFAQRMRPQVHALPDEAQQELTELVDRRAQLVAMRAQEKTRLATVKPIARKSVREHIAWLDARIKQIERDLDGRLKDSPLYRPKYELLDSVPGVGRVTITTLLGRMPELGALERKRIAALAGVAPFADDSGKRRGQRYIQGGRADVRCVLYMAALSAARCNPVIKAMYERLRAKGKPFKVAITACMRKLLVILNAMLKSEQPWRNDSIAG

SEQ ID NO: 243986 - protein, 355 aa, unidentified
MERRTAMQHYAGIDVSLELLSVCIVDTKGKIVKEAKVGSDPDTLVAFLRGLDLAIERIGLEAGPLSQWLHAGLTSAGFEAVLLETRHVKAALSAMTVKTDRKDARGIAQLIRMGWFRAVHCKSAGSQEVRALLVARKLLLSKLLDVEFSIRGILRGFGLKMGMVTRKRFEARVRELYAGHAMLEQICSAMLTARSTLQTEYAKLHKALLVIVRKDEVCRRLMTTPGVGPLVAITFKTGVDDPSRIHKSKAVGALFGLTPKKYQSGETDVTGGITCAGDEMVRTALYEAASVLLSRVTRFSALKRWGMDVAKRRGTKRAKVALARKIGVILHRMWVDMTSFRWTKGAPTTMRLARV

SEQ ID NO: 243987 - protein, 482 aa, unidentified
MSNNKKQGKTRPPKTQAQLGRRKKQKGMCLADRPCLESNAAGIDIGAREIFVAVPPDRDERPVRVFDTFTEDLQGMTRWLKACGITTVAMESTGVYWIPLYDILEAHGIRPCLTNARHMKNVPGRRTDWHECQWLQYLHSVGLLRSAFRPKADVCAVRAVIRHRGELVQMAVQHVQHMQKALTQMNLQIQHVISDLTGTTGLAIVDAILAGERDPAVLAQRRDPRIRATAETIQKSLVGNWQPEHLFVLRQSRLFYQTYQQQIAGCDQEIEKLLGAFEPRVDPGQKPLPADRKRNRNASKKRNKRGLPATGFDLRTEAYKLFGVDVTQVPGVETSVLPLFSEVGRDLANRWPTAPHFISWLNLCPDNDISGGRVLWRGTRKGQNRAGQIFRMAAYSLHRSPTPLGNYLRRMKAKLGPKAATTATAHKIAVIFYTLVTKQIEYDESIWAARDAQRQKRLENKIRHQAKQLGYQLVPTEQKPAA

SEQ ID NO: 243988 - protein, 267 aa, unidentified
MSDAQAEVFVGIDVAKAKLDVGVHPSGESWTIEHDEVGITTVVERLVAAGPTLVILEATGGLELSLAAALIAAAVPVQVVNPRQARDFAKATGQLAKTDRLDALVLARFGAALRPEPRPLPDAALSEVRALVARRRQLQAMVIAEKNRRSGASKRLHAQLDEHLAWLRRAVADLDRDLATTIKGTSAWQTAVTRWRSVPGIGPVVSATLLADLPELGTLTRQQIAALVGVAPLNHDSGAHRGIRSGWGGRAHVRTALYTAVLMRIEG

SEQ ID NO: 243989 - protein, 477 aa, unidentified
MPAGQQVEVEVDEHEEIVGRVAAIDVAKASGMVCTRVPHATKAGRRVTRVWQVPSTTNQILELAEQLAGEGIERVVVESTSDYWRPFVYVLEARGLVVWLVNARDVKHLPGRPKTDKLDAVWLCKLNERGMLRPSFVPPAQIRRLRDDTRLRADLTADRTRHKQRLEKLLEDALIKLGTVATDIFGVSGRAMLEALIAGQRDPKVLAELARGRLRVKHAALVQALTGRFDDHHAELARMLLDQIDTLGGQIDQLTARIEQMITAIPAAQPPAPATGPGGDAAATLHAGMESAESVPDHPNSDGVDPETGELLAAPLPVVDRLDEVAGIGHHAAQVIIAEVGLDMGQFPTPAHLVSWARLSPRTIQSGTRHRAGATGKGNPYLKSVLGEAATAAAKTDTFLGERYRRLVRRIGKRKALVAVARSILVIVWHLLADPTARFHDLGADYHASRIDRDRKTRNLVHQLQALGHKVTLQPAA

SEQ ID NO: 243990 - protein, 381 aa, unidentified
MHPEITRTLNDTPQSQYLYMAIELSNAKWKLGFTIGFGQAPRLREVHARDLMALIQEVTLAKRRFGLSENALVRSCYEAGRDGFWLHRFLHAQGVSNLVVDSASIEVNRRKRRAKTDRLDVGKLLTMLLRYYQGEEKVWSIVHPPSPEDEDQRQLHRELNSLKTERTHYINQIKGLLASQGVAFQVQKDFLTRLERVRIWDGSPLPAALQARLKRDHERYELVQRQIHQLAGERAEDIRTSTAPAVEQVRQLLRLKGIGDESAWLYVMEFFAWRDFHNPREIGSLAGLTPTPFASGESSREQGISKAGNRYIRAMAIEIAWAWLRYQPQSTLSLWYQERFARGNSRTRRIGIVALARRLLVALWKYLDQGTLPQGACLKSA

SEQ ID NO: 243991 - protein, 411 aa, unidentified
MRVHHTICCGIDVHKNSVTACLMWGPAGQEPEHEIRRFATMTSDLKALAEWLKQANCEVAAMESTGAYWKPVWNVLEGEIPLILANAKQVRALPGEKTDAKDGKRLASYLRHGLIRASFVPPKEIRELRDLTRYRQKLLGNGAAERNRIQKILEDANIKLGSVLSNVFGVSGQRMLHALIDKPSVPVEEMTALAHWKLQPKIEELKKALEGRVTAHHRFMIDLSLGHMEYIEKEILKLDEQITRHIAPYDKQFQLLQTIPGMGEKTSSAVLAEIGPDMSPFDEDGKLMSWSGVCPGNNESAGKKFRTNTRKGNAHLVSTLVESAWACTHVKNSHFRKRYHRIKARRGAQRAIVAVAHALLRTIYVVLKTGVPYQEPLRSPLTETQRTRKVQRLSRELRNLGFDVTLKTKNA

SEQ ID NO: 243992 - protein, 349 aa, unidentified
MEHVGMDLGKRESQIAIITEAGELIEKRLRTERERLRQFFGDRPKARILMESSTISEWVARLLEELGHEVVVADPNFAPMYAQRSRRVKTDKRDAQALAEACRLGAYRPAHRTSDEQRHVRALLAVRESLVRARVRFVTLVQAVLSREGFRVPTGTTKCFSTRVKDLDLPEHLVVEVTPLLSMFEPMNEQIQALDGRLGEIARQDARVRRVMTMPQIGPVTAVSFVATLDDAGRFRGAHQVEAYLGLVPREWSSGETQRRGRITKAGNARMRWLLVEAAWRVATNKKRPETEALRNWADRIARRRGKRVAMVALARKLSGILYAMWRDGSAYDPAKLSGVHRRAAEKAA

SEQ ID NO: 243993 - protein, 415 aa, unidentified
MGMRVLYARCAGLDVHKALIVACLLLTASSGKTSKLVRTFASTTAGLSALADWLASQGVTHVAMESTGIYWRPVFNLLEGRFQVILVNAQHMKAVPGHKTDVKDSEWIADLLRHGLLSASFIPPKAIRDLRDLVRARKTLVRQRAQAITRVQKVLETANIKLSSVASDVLGKSGRNMIEAMLAGVSDAESLAELARGRLRKKLPALREALEGRVEATHRVLLRQLLEQIDFLQGQIDRLSVDIEQLLLPYEPLLARLIQIPGIGRLAASAIVAEIGTDMSRFPSAKHLASWAGVAPGNKQSGGKRLKAHTNKGNTHLRAVLAEVVWVISHTHGNYLSAQYHRLARRIGKKKAIVAVSHSVLVIIYHLLRDEQDYHDLGPDFFERLDSTRQRDSAVRRLQALGYKVTLEELQEVRA

SEQ ID NO: 243994 - protein, 437 aa, unidentified
MTENINSSHTSDQSCEFVALIGLDWATEHHDFCLLDPTNNKTELGRFDHSPEKIGEWVIGLVERFGQGKIAICLEQSRGPLIYALLGYENLVLFPVNPKTISKLRSALYPNEPKDDRLDAKLALKMLILHREVLRPLQPLDAESNKLNLLSERRRELVDLQADQSNRLQSFLKHSYPQAIEMIGTNPTSRMATAFLQRWPTLESLQQAKPQQLRKFYYKQNCRKEECIQKRLELAKNALPLTEDSAIIETYKLMVLGVVNIIIALNDTIDQIEEVLSEVVESHQDSHIFQSLKGAGPAFVPRMIGAFGTDRDRFPQASDIQCFSGIAPVTRQTGKAPPIVVKRWQCPRFLRQTFHEFAKCSVNFNGWAKCYYDDQRAKGKKKHVAYRALAYKWLRIIWKCWHDKVPYDEAKYIRALQKKGLKIYSHLQVEQQITKCE

SEQ ID NO: 243995 - protein, 343 aa, unidentified
MEVMIGVDPHKGSHTATMLDRTERELTRIKVRAGRRQVEQLLEWANGHEERTWAVECAGGMGYLLSQQLVAAGETVLDVPATLASRVPVLGTGQSTKTDPNDARSVAVAALHAPSLTMVRAADHVTVCRLLAKRHTDAARWRTKLCCRLHALVGELVAGGIDKEVVVNQARSLLDDIEPDGVAAVERHRQAVELVAEIEHLDVVLQDSRTRITAAVAASGTTLTEVFGVGPIVACMLIGYSGDPTRFTTASRYAAYTGTAPIEFSSGGRVTHRLSRRGNRRLNHALHCAAITQIRHRHSPGRGYYDRRLAEGHTPREAIRSLKRRLSDVVWRHLVADARRVAS

SEQ ID NO: 243996 - protein, 415 aa, unidentified
MEIVHTHCVGLDVHKKTVVAAIIVPNAKGGWHKETRSFGTMTADLLALSDWLMEHGVTHAAMESTGEYWKPVFNILENNFEVILVNARHIKAVPGHKTDVKDAEWIAELLRHGLLKASFIAPQGQRELRELTRYRSTFVKERANLVNRLQKVLESANIKLASVATDVTGVSGRAMLQALLTGTSTPEEMAELAKGRMREKREALAKALQGQVKPHHRFVLTELLCQIDSLDETIARFDEQIKEYCRPFETAVELLDSIPGVARQTAEIIVAEIGTDMSRFPSANHLASWAGVAPGNNESAGKRRSGKTTKGNHALGVALNHAAHAASHTKNTYLSAQYHRLASRRGKKKAIVALEHSILIMAYHIIKDKEPYHELGGNYFDKRRPEAMTRRLVKRLEQLGFHVSLQQATPSVVAA

SEQ ID NO: 243997 - protein, 341 aa, unidentified
MGEVSTIGLDIAKSVFQVHGVDAAGAVVIRKRISRAKVLEYFGELPPCLIGIEACPSAHHWGRELQGLGHTVRLIPPSYVKAYLKRGKNDANDAAAICEAVTRPSMRFVPIKTKEQQTALMLHRARQLLVRQRTMLSNALRGHLAELGIVSAKGRNGTAELLRVIADGRVSPAACGVLKVLARQYGAIGTEIASIDKSIMALHRGCEASRRLAEIPGIGPIGATALVAEIGDWKTFSSGRSVAAWIGLVPKQNTTGGKDRLGSITKQGNRYLRWLLVVGAMAVIRYARKHGTQARPWLGRLMERRATKVAAVALANKMARMAWAIMVRGERYKEPKLLLAA

SEQ ID NO: 243998 - protein, 409 aa, unidentified
MNAVGIDISKGKSVVAALRPFGEVVYSPFEVIHTDTGIKLLIQKLSKLEGETKIIMEHTGRYHEALAYALSSAGFYVSAVNPKLIKDFGNNTLRKVKSDKADSLKIARYGLDNWSDLSPYSEVDKLRIQLKAITRQYGFYSKQKTALKNNLIGILDQTFPGINAVFTSIVRKNGSQKWVDFVTTFWHVECVTNLSLQAFTDKYYKWCCHHKYKFQPAKPKQIYDFSKNLISLLPKDSITKMLIKQAVSHLNSVAQIIEQLRKKMNEVASQLPEYKIVLEMTGVGVSLGPQLIAEIGDISRFTHRGALTAFAGIDPGVNQSGSYEQRSVRTSKRGSAQLRKTLFLIMSVLIKRAPAEDPVYCFITKKRQEGKPSFVCMTAYFPLTSSLQATTKFLKRLKKVFHLRTLFYL

SEQ ID NO: 243999 - protein, 448 aa, unidentified
MKAKAVFALRNERGLHRMSGAEPQVVGLAPQTTVMTERANTMKTYLLRRPKTVERQNARRPVSPEPGAAPVPIGNAGPVLFIGLDVHNDTIAVSLAPSEDTEVRRYGIIGGQHDDVLRLIKKLSAVHPGASLKFCYEAGPRGYPLCRFIRRHGAECIIVAPSKVPRQPGDRVKTDRRDADQLARLLRAGELTGIYVPEPQDEAVRDLIRARYQVQKQQHRARQQLKMFLLRQNIRYAGTKPWTAAHLRFLATVKLPFAEQQFVFQEMVNVISEAGQRLARYEKEIASVVEGWRWEPAVKALMSLRGVALLTGATLVAELGDLHRFATAPQLMSYLGLCPSEHTTGNDRHQGGITKLGNGIARKAIIEAAWNNSRPARISRIVLARQEGLPPAVIQVAWNAQTRLHQRYKHLVVVGRKKSQVAAAALGRELAGFIWAIGRMVKPAALQH

SEQ ID NO: 244000 - protein, 418 aa, unidentified
MTATHSIAPTLLVAIDISKHRHEVLIGIPGKTRRRRLTVMNTLEDFQRLSAALASYDLPVRIGFEAAGNYHRTLAHHLGRAGFDLKLVSSVALARTREALHNSWDKNDPKDAQVILHMLEIGAVQFFHDPLAAGTSDIQELSKTHEIVSRSKTELWHRILTHYLPLYFPEAERFHRSARTDWFLAFLEKYPSPHMISAMGRDAFIADAWDVVGRKVSKEQLLSDVYATAAGSVGLPVHPDSDAVRMFRLVLAEGRSLVRRRDEIEARAVELLSDLPDYQLLTTIPGIGPINAMTILAEAGDLRRFRHHRQFLKFCGMDLATVQSGMFRGQSRISKYGNARLRRTLWMAGQTAVLKRTNSFRDKFERYISKDRHNAHLRRKAYTAIAAKMARTVHAVVNHGEPYRPFFEGVSPGGRTSL

SEQ ID NO: 244001 - protein, 410 aa, unidentified
MEVMHQHCAGLDVHKKTVVACVRLASEGKVVTEVKTFATTTQGLLTLSDWLSENGCTHVAMEATGVYWKPVWHVLSDGEVELVLANAAHVKNVPGRKTDVSDAAWLAELLAHGLIRASFVPDGQTQELRALLRTRKQLVRERTRHVQRIHKTLEDANIKLDAELSNVLGKSGRAILNALVAGETDPVRLAALAYPNVKSPQAQLREALRGRLTSHHRFLLQLHLGQIDSLDAAIGTIDREVEDSLAPFRAAVDLVRTIPGVSTLGAEVIVSEIGLDMSRFPTVGHLLSWAGLCPRNDESAGKRRSSRLRKGAQWLKTTLVQCSWAAKNKKGSYLQAQYLRLKSRRGPQKAICAVAASILTAAYHMLKDGTVYQDLGPDHFNRRSKITQTQRLVRRLEHMGFAVDIKPIAA

SEQ ID NO: 244002 - protein, 451 aa, unidentified
MATRNRAVGRSGLQLTHPNAAGIDIGSASHFVAVPPDRDDEPVREFASFTADLNRLADWLSACGVDTVAMESTGVYWIALYELLDARGFTVLLVNARHVKNVSGRKSDVLDCQWLQQLMSYGLLRGAFRPSDEVCVLRALSRQRSMLLRNQARSVQHMQKALAQMNIQLANVISDVAGVSGQAILRAIVAGERNPYVLAGLKNSRIHASEDDIARSLNGNWRTEHLFALGQALAAFDFCGQQLAKCDTAIEAQLQRLHITDQSPAKGKRRGNARNAPKFDLRAQLFQMCGVDLTRIDGIDVTTALVVLAEIGPDMSKFPSDKHFASWLGLCPGTKITGGKVMSGKTKRCANRAAQALRLAASALRTSQSALGAYFRRLCSRMDKPKAVTAAAHKLARLIYAMLTKGQEYTDQGQDYFEERYRQRVLHNLARRAQQLGMTLVPVTAQVDQAA

SEQ ID NO: 244003 - protein, 335 aa, unidentified
MSKSEAGKRCYVGVDVSARELVVAISAGGEPRMERVSNDAAGHEQLQARLRALSAPVTICLEASGTYSLDVALALARPAAGWQLSLVNPRLARRFAESLGQRSKTDPVDARVLAQYAARMQPEPWQPPSAAALRLRTITRTITALVRQCVQHKNRQHALSASAALPALLVRELEVQVAFVDKRIRHLRRQALRVIEQQPELRRGWQHLQTIPGVGEASGLAILGELAVLPATLDERQWVAHSGLDPKQHRSGTSVEQKSRISKAGNRYLRAALYMPALVAVQHDPWLGGFYQRLVGRGKAKLQALVAVMRKLLHAAWGMLHHDQPYDGAKLCPQT

SEQ ID NO: 244004 - protein, 403 aa, unidentified
MIFVGDDWAEQHHDVYLMDGAGKRLASRRLPEGLAGIRQLHELMATHAEEPDQVVIGIETDRGLWVGALTGAGYRVFAGNPLAVARYRDRHHVSGAKSDASDAKLLADLVRTDRHNHRLIAGDSPQAEAIKVLARAHQSLIWTRNRHTNALRNALREYYPAALEAFEDLAHGDALGVLHRAPTPTLGAHLDVAAIQSALKRGGRKRNIAARAREIRATLRTEQLSAPAPVADAFGATTRATVGILTELNRQIGELETSLAAHFETHPDADIYRSLPGLGVVLGARVLGEFGDDPNRYTDTKSRKNYAGTSPLTIASGKKRAVLARHIRNRRLYDAIDHWAFTALTKSPGARALYDQHRAAGDLHHQALRALGNRLVGILHGCLRHRTLYNEHTAWAHRMPAAA

SEQ ID NO: 244005 - protein, 338 aa, unidentified
MHRAGLAFASMSQNNKTINDNKLSFYAGIDVAKATLQLSINATSWTLSNDPKGCIRILKLIAEAEATRPGYKIHVIVEATGGYEAALVETLHRANQRLSVIQPSRVRHFANAKNKRAKSDPIDAAILAQFGEASQPPPTLPPNAAQIHLVRLVARRAQLIETRITELNRAAHYRDKLLHKQSQQLLALLNRQVQQCEHAIAAQLAADQEMKTRAERVQQVPGIGPVVAAILQAQMPELGALRDTEAAALAGLAPYNRDSGPRKGTRSIWGGRASVRCALYMAALSAVRHDPILRNFYTRLRAAGKKPLVALTAVMRKLVVLLNHMLSKPTFKLAVRPN

SEQ ID NO: 244006 - protein, 440 aa, unidentified
MNQVDRIRLEEFRQIRKEIRGSAEYLIVGIDVAKDRHVAFFGTAMGKTLFRRLFFDNNLEGFEKLLVQVEALKVQHVLAKVVFGLEPTANYHKPLGEHLIRCGHKVVLVSGVAVKENRKSLDGRWDKHDVQDAANVADLISQGKCLFYEYPEMAIRDLRNLLSLKRRLKKQEHGVRVRIRNHLLAKYFPELDRYYERSEAGSLGIVRWCLDPSVIAGLEYETFAQRVSPGKRRLPQESRLQRIWKVAVDSIGCEVGTVVEFEAKVMVEGLKQIREVIRATEEKIEEICSPFPEYECLLSIPGFGPDVSSKVLGAIGDPFRFQNGQQVLKLAGLDLNAERSGKTSGAAVAVISKKGKADLRYALYQAAFIASSKNRDFMVYYTHKLRGREREPGIQTKMRVKLAAKLLIMAWTLMKKKERFDPSSIRVEFQSFSAGAGRES

SEQ ID NO: 244007 - protein, 376 aa, unidentified
MKKIRFVGLDVHAETIAVAVAEPNGEVRSLGTIANREESIRKLVNKLGPPDQLRACYEAGPTGYVLYWLLTSLGVKCDVVAPTLVPVKAGDRVKTDRRDALKLARNHRADELTAVWVPDEAHEALRDLVRAREAAKQDQLRARHRLSKFLLRHGKRFPEGGKAWTLKYMAWVKQVRFAQPAQEYTMLDYLHEVEHMNERVLRLEQAIEEAVKLAPVWMQEVIQALQALRGVAKISAATLVSELGEISRFETARQLMGYSGAVPGEDSSGERVRRGAITKTGNAHLRRVVIEAAWSYRLRPRIGPTLLQRQKGISEEIKEIAWKAQLRLHKKYQRLMAAGKDQRKIVTAVGRELLGFIWAIGTRTEGLSGQRRAMTA

SEQ ID NO: 244008 - protein, 456 aa, unidentified
MKTMNMNFKHNQLTLCFVADVHSQKHHFLISIKETRTILKEFIVENSTAGFIQFITLVKLFSAKFRTQNVIFAFEPTSVYWMNFAYAFYQDISTSFLNKQILFVSPEIVAYQRKVDDPAGNKDDHKDPLTISKLVWDNKTSKAILLPEKIFNLRELTRQRNSLVKIRSSLKTQLRNKIIIIFPELLNIFSDILTASARYVISNFTTPENITKLPIQTFTQILLKISKKKLSTHKIELLYSYAQSSLGIKGNKNGLISNIKYILEQIELYDKLISQIENEIEYYLKSIPQTLTQIKGISTILAASIIAEIFPISRFSNSSQLVKYAGIDPTHSTSGISLKKLSYIAKKGDVYLRLLIIQTAFSCINHNQYIKRYYTNLINYGHKPKRVAIVAVANKLLRIIFNLLKYNIEFDPSKIGMGPKKIVEVVPFKFKQNNFHSLEKAKTKFLLKEKAREKLF

SEQ ID NO: 244009 - protein, 360 aa, unidentified
MSFNGTSVGLDVHALSVVAHAVDEESGRVERARLCPDHGEILDWLHRLRGPVRVAYEAGPTGFGLARALAEAEIECVVAAPSKLIRPAGDRVKTDARDAAHLTRLLRLGEITPVTVPEADVEAVRDLVRAREDARADLMRVRHRLSKLLLRQGRVYSGGHAWNGVHETWLRRQRFGDSHTAAAFDHHFDAVLTATAARDRLDEQIVVIAASPRWADPVNRLGCLRGISALTGLALTVEIGDWTRFTGASIGAYVGLVPCEYSSGTSRVQGAITKAGNAHVRRLLIEAAWHHRAPYRNPGPTMRARWAKVDPALKDRGHAGNRRLHQQWCRFNERKKNHVVANVAVARQLVGWCWSLATLS

SEQ ID NO: 244010 - protein, 391 aa, unidentified
MVCVGIDVAKDKHDCCILDSDGMVRADCFTIPNNMDGFKQLLQTIRNCTKKSDKIKVGLEATGHYSYNILGFLLDNDLAVYVMNPLHTNLYRKSLSLRKTKTNRVDARTIATMLLSDVDLKSYTDTAYHNEELKSLTRYRFDKVRERAKLKQSVSRLVTILFPELEKLVPSLHGVSVYALFSEYPGARQISEAHLTKLTNLLSIASKGHYGKEKAIQIREAAKSSIGSVMPAKSLELKHTIKLIKELTSEIDEIEDSIQQIMDELHPPILSIPGVGIQSAAMILAEIGDFSNFESPDKILAYAGCSPSTYQSGKLTNCYAHMEKRGSRYLRYALYNATKYVCHWNPVFAKYLAKKRAEGKHYNVALSHATKKLVRLIYALQKSGKAYLTAA

SEQ ID NO: 244011 - protein, 459 aa, unidentified
MGKAKACKGGKNQLQVIHPRAAGIDVGSKFHVVAVSAEYDPDPVRKFNSFTTDLHRLADWLKAVGVTTIAMESTGVYWIPVFEILESRGFDVILVNAREAKRVPGRKTDIKDAQWLQQLHQYGLLSASFRPGEKIASLRSYLRHRERLTEYAAAHIQHMQKALMQMNLQLQHVVSDITGDTGMRIIRAIIEGERSATKLASYRDPHCKQSEKTISAALTGNYRPEHVFSLKQAVALYDFYQKQIKECDQEIEKALAALNSDKNPPSEPLPKARRTQKQKNEPGVPIREMLYTLTGVDSTQINGIGPYTTLRLVAECGTDMAKWPTSKHFTSWLTLSPGNKISGGKVLSSRSRRTKNRATTLLRIAAVNIGKTQTALGAFYRRLAARVGKAKAVTATARKLAVLFYTLMRYGKAYVEPGADYYERQYRERVLLALSRKAAALGYRLAQKQETSPVTGNVS

SEQ ID NO: 244012 - protein, 351 aa, unidentified
MHMLADTVELVIGVDTHKDTHTAAVVTATTGAVLAQATVSATPAGYRQLLALADQQPGHRVWAIEGTGGYGAGLTRFLQAHAEQVVELDRPKRAARRHGAKSDPLDATRAAREALGRDQLAQPRAAGHRAALQARLTTRRSAVQAATDAQRQLHALVVAAPDALRGRLRGLTTRQLVTTCGRLRQRTDGDPETAATAASLRALARRIQLLNREIAEHTRAITTLVRAWRPELLTPCGVGPIVAAIVLCAWSHPGRCPSDAAFAMLGGAAPIPASSGQTVRVRLNRSGDRHLNQALHLIVLTRMRYDPATRAYAQRRRAQGKTNREIRRCLVRYVARQLYRLLEANPSFDPT

SEQ ID NO: 244013 - protein, 352 aa, unidentified
MITIGVDPHKHLHVALAVGDSGQELADWQGPNSPEGWTELTSWSRSLGTERQWGIEGAWSYGRGLAQKLVAAGEVVFDINPRWTAERRRGARNTSKTDRRDAKAIASVVREEAPNLPRVLPADETGVLDLLTSEREAAIVEATRLRNQIHAHLMRIDSEYQAHMPSLKSRAGVNALLDYSSPVRTELEEQRALVVRRLAQRLQLALLQADELEVQINEIVEARYLPLTKLCGVSLITAGTLAAILGPGNRFKSDAQLAAYAGVAPLETSSAGQVRHRLNRGGNRRLNAALYRIVLTQAHHLPEAREYLARRVSQGKTRREAHRALRRFVVRAIWRRWQECHSREMTAENLAA

SEQ ID NO: 244014 - protein, 345 aa, unidentified
MTAKQSKDIAVYVGADISKDTIDISYHFKGKVIIVKIVNDEKAIRKFIKTMQVEKGAVLHFILEATGYYSQVLYKTLRDMKIRFTQVNPYFTRRFAQCSGVLEKTDKLDARILEDYGQRMTPTPTIPDEDIQMEMKKLYKLRIELSEERRKWNQRKHQHKLGSAKNITDRMSKSIDKEIVSLDEKIEKLVTSQGLYKKLHEELIKIVGIGSNTACALLCLLPEIGTMNANKISKLAGLAPIVHQSGTSINKKAHIKGGRPDVRTALYMPCRTACSYNSIIRAHYQRIISSKGGENIKGVKTIAHIACMRKLLKHINSIAGKVREEMQRNVAVVGCGEAAQVSPCR

SEQ ID NO: 244015 - protein, 360 aa, unidentified
MMYSTSIGLDVHAHSIKAAALVHETGVLIEKSFGYDALTLCEWIKSLEQPVRCIYESGPTGFDLLRKLQAQDIVCSVGAVSKMLRPAGDKIKNDKRDAVFLARMLAMGNTIDVYVPTPEEEAARDLCRAREDLRQDLTRAKHHLLKFLLRKGIIYEQGCAWTKTHKRWLEHLKFSYPDEQMVFEEYLIAIGDLERKRERLDTVIKQRAQDLPWCESISRFTCLRGISTITAFALCVEIGDFGRFKNASAFASYLGLVPSLNESGGSSSRGRITRTGNTHVRKLLIEAAWHHRRQYRAITLSEQITCLPPAIAGKVTDANRRLHRRAVYLTERKLPACKANVAIARELAGWIWSLACMQVS

SEQ ID NO: 244016 - protein, 394 aa, unidentified
MKLIGIDIGKNKHFFCVMDQQTGETISQPVSFSNDKEGFDFLVQKIKSYPKDSILIGMEDTGHYHFALLKYLLDLQYTVALINPKTTDFNRKMQGGITKNDKHDTINICDVLDTPERKKQYRITKVNSFDLYEQKQLTRHHHNLKEEENVYKNRLQKCIDIVFPEFNKLFNSKYGIVYMNILKMFGSAENIANTDIRTIRKCFEIDGRDNRISLTPERLKECARSSIGISSSAEVIQIKHLTAQIELIEEQLTEIDKKIEEFSIQNNSPILSIPGIYHFSGTSILAELGDISNYSKPSQIIKFAGVAPLHYESSQFNAQHTAITKKGSKYLRKTLYQIILPVIRHNPVFNKYYQLKISQGKGHRCAQGHCVRKLLRIIYHLLKTNQQFDPQLLR

SEQ ID NO: 244017 - protein, 326 aa, unidentified
MTLSHSLDNTFIGIDVGGASLDVAWHRGASAHYANRLEAIAALVERLQMGPKVTRIVVEPTGGYEKALVKALRRAQLPVEIIHTTRFKAYRELVGAKAKSDTSDARLLAAYAAAPDEVRGRKADYVELPEDAIREALAELASRRDQLKHMIHAETCRLGTVRRAELHEAITTHLEVLRAEDKQMHRMMLALVRQRADLQRDQRLLKTIKGIGMKSALAFLASVPELGRVDNKAAAALIGVAPFVRQSGTMNAPARIHGGRAAVRSILYMAAVSASRHNPVLRPLYERLLAKGKPPKLALIAVLRRLVVFANAVLKSGQPWKGAIAS

SEQ ID NO: 244018 - protein, 412 aa, unidentified
MEVFCGIDWAEDHHDISLADRDGTLLAGRRISDDAAGLAQLLELLAGHGDTAEDPVPVAIETPRGLLTACLRATGRKVYPINPMAVARYRDRHSVAGRKSDHGDAFVLANVLRTDLHAHRPLPDDSELAQAIAVLARAQQDAVWTRTAAHNKLRSHLREYFPGFLAAFADARGGIMRPGARPILAAAPTPAAAAALTLTQLRGLLKEAGRSRGIDTEATRLRDAFRVRQMRQLPLVEDAMGRQALALPGQLDAACTAADDLEQAVTGSFNQHPDAGIITSFPGLGPLTGARVLAEIGDDRSRFADAKGLKACAGAAPITRASGKTRSVTRRHIKNNRLNAAGYSWAFSALTASPGARGHYDRRRDAGDRHAAAQRNLFGRLLGCLHHCLITGQHYNENIAFPENPKKLPQAA

SEQ ID NO: 244019 - protein, 346 aa, unidentified
MLHAGLDLSRRKVDVCLMSGAGEIVDEWASPPDGDGLRGLAARAAMWAPAVRGVIESMNGARFVHDELEEHGWDVLIADATKVKGLAPLACKTDKIDARVLATLSARDLVPEIWLPDPSIRRERELARFRLHLVRHRTTLKNRIHATLIAFGHPCPVSDLFGHAGRELLDRLEIPDPWRSNIDIGLRLIDDLELQIAQLTVQLKQRGADHRYIPLLVTAPGLGWINAFTVASEIGDIGRFASPAKLCGYTGLCPRVKQSGASDARGPISKHGPKYLRWALFEAALNACKHPYYAERYQHTKRRLGRQRGPKVAQIDLARRLTEAIWHMLTNNQPFAPAGAPFRLAA

SEQ ID NO: 244020 - protein, 344 aa, unidentified
MDIAVLGVDLGKNVCSVVGLDASGAVVMRRKVRRETLIRLAEKLPPCVVGMEACCGAHHLGRLFAAHGHDVRLMSPEYVRPYVKAQKNDDRDAEGIAEAATRPTMRFVELKSQDQLDMQTLHRSRDRLVGERTALINQLRAILLERGMIAPQGKRKLEQFLSVLMDEQDGAGLSPRMVILVADVRAQWAELDRRIAAFDGEFVRWARENEDARRLVTIPGFGAIIASALVASVGRAEAFDRARDLSAWLGIVPQQFTTGGKPKLLGISKRGNKYLRRQLIHGARAALPYVAERDTPLGRWAKALLERAHRNVAVVALANKLARIAWAVLRRVERFVATGMPRAA

SEQ ID NO: 244021 - protein, 375 aa, unidentified
MTFKAWVLDIKEKHGKDKVIPGMEPTGHYWFNLGKFLQDNEMKPVLVNPHHVKKSKELDDNHPTKNDRKDPKVIAGLVREGRYMIPYLPDGVYADLRTASNIRFQLQAELTRIQNRINRWFNIYFPEYKTVYGKPDAKSGILILKEAPLPEDILTLGIDGVNQIWRDAKLRAVGKTRAKTLIEAAEHSVGSKEGVVSARMEIRMLLEDYESRNIRLQEVMALIEELVNQIPMAEKLLEIKGVGIKTVSGFLAEVGDIRRFNNPKELQKLAGLALVENSSGKHKGKTTISRRGRKRLRYLLFEVAMSLVAKNPEFRELHNYYTTRRLNPLKKMQSLMAIAAKLLRVFYAILTKNVGYDPKKMVNDIRRPATYAQAA

SEQ ID NO: 244022 - protein, 408 aa, unidentified
MNPLYVGIDVSSKSNVVYFMLPDGSKHSNFSVANSHTGSSQLVKRILSAMTSFSLDSVLIGLEATSVYGDNLVYFLREDAALARFNSKIHVLNLKQVSKFKEAYNDLPKNDFIDSFVIADCLRFGRINKEVYIGDYRYKALQNLTRARYFAVSNLIKKKQRFMNILFKKYSTMTQEKVFSDTFSTTALAVYDEFESAEALSDMDLHELTAFIMEKGKNRFPNPDAVAKAIQKAARSSYRLPKTVNDSVNQVLSISITSIKALEAQIKEFDKAIAAQMELLPNVLISIPGIGPVFSAGIMAEIGDINRFHNQAQLAKYAGLAWKQHQSGDFEAQTTRLINSGNRFLKYYLCEAAFSLVRCYKEYSDFYHLKYKEVNRYQHKRVFALTARKFVRLVFRLLKDNRLYTSAE

SEQ ID NO: 244023 - protein, 349 aa, unidentified
MRFYTKTHTHYCGIDLHAKTMYLCILDKNGQILLHQNMKSCPEDFLAATQSYRDDLVVAAECMFTWYWLADLCQQEGIEFVLGHALYMKAIHGGKAKNDKIDAFKIATLLRGGNLPKAYVYPPAMRATRDLLRRRLHLVRRRGNLLAHIQNTHHQYNLPAPRAKIAYKANREGVAEAFPDPDARKSMEVDFLLIEHYDTLIRDLELHLERRAKQHDPQAYHRLRTVPGIGKILALTILYEIHDIGRFDRVQDFLSYTRLVKCDHSSAGKKLGTGGAKIGNVHLKWAFSEAAALFLRNNPRGQKHLRRVAGRHGKAKALSILAAKLGRAVYLILSKERVFDMERFLARNH

SEQ ID NO: 244024 - protein, 419 aa, unidentified
MFKIILNNCCGLDVHKTWIYACVGITDSHNRTEYHEARFTAFSKGLRDLCGWLAKLGCTQVCMESAGKYWIPVFNILEKTCKVTLAHPKYTKPMKGNKTDRKDARWICDLFMCGMVKPSFIPPPVIRQLRDLVRYRTKLTNMITGEKNRAQNCLTVSNLKLDDVFSDVFGKSARSITEHILAHPGETFDVAPFVDRRCKTPISEIQAAVDGAVSHEQAVKLRQCLDHIDELEKHRSKIEGEISRLVSPFTTTLDLIHTVPGFDKNPLTAITVVSEIGVDMSVFPSSKNLVSWAGCCPRNDKSNKTVKSTRISTAGSCLKPTLVQVANAVIKSKNHPEFGIRYRRIKAHRGHKKAIIAICRMLLTAIWNVLTKREPYSPDGFAVPQPSFVAKPLTKSQGLALLRQMGYIIKDDNSPPVTA

SEQ ID NO: 244025 - protein, 429 aa, unidentified
MNYTQNEKIEQVTDSTIVVGVDIGSQIHYARAFDNRGRELTKRVFSFHNDLEGFNSFNLWAETLKSEKKKTAVLIGCEPTGHYWFAFAKYVKDHQKRLVMVNPFSVKKIKELDDNSPKKTDSKDPKTIAKLVVDGRYSIPYVPEGIYAEIRDLVYSRDRIMKQHNISANRIQRWLAIHFPEYLGLYTRFDAASGLAVLEKAPTPKDVIALGVNGIRKIWHDKKMRGRGVTEDRAKTLVEAAHNSVGLDGGIGTKSELYMLLEEHRLWTSQLEAVNEVLEEMILKVPHVEKLLAIKGVGSIIIAGFIAEVGDIRRFDSPKQIQKYAGLELVENSSGKHKGRTRISKRGRRKLRKILYQVMVPLLARNREFREIYDYYVTRVKNPLKRRQAMVAVSCKLIRVFYAVLTKGMEYDRFKMMSDIHRKSDIIAA

SEQ ID NO: 244026 - protein, 354 aa, unidentified
MKYVGIDWAYRSAQWCALAPGGEIAGEGRIAADRDGLARLVLELGDEVKACLEMMSGALWVRDELVACGWQVEVADARKVKTVAPLAAKTDKVDARLLAELSRRELVPALWLPSLDERALRERLRRRMHLVRLRTSAKARIAGVQTQWGVRVSLARLRRADGMTLLERAGVPEVWRRSVSECLALIEFLDARIAPLDAELRPLAHADPRAVLLDTIPGVAELLALTIAVEVGEISRFGRPENLVSYGRLASRVHQSGEGRARSGPLNKSGSRLLGWAAVEAAQQAWRDSNPWHQLYLDVGRRSGHTNAAKAAVARKILIAAWHMLSHNEPFKPAPRITMGEVNVPASSRFALAA

SEQ ID NO: 244027 - protein, 346 aa, unidentified
MDYFAGIDASLETANVCVVDGDGAVILEQKVGAEPKDIAALFKHFGKPLKRIGLEAGPTSAWLFSELRAAGYPALCLECRHVKAGLSAMRNKTDRNDARGIAQLVRLGWFRLVHVKSGEAQQIRMLLVNRTLLLGKLQDIENSVRGSLKVFGLKLGRVTKHSFEARARELIEGHSVLIAITEPMLRVRRVLMDEFFGLDRMARKLARKDPICRRLMTVPGVGVIVALTYRTGVDTPERFTRSRDVGAHFGLTPRRYSSGQVDYDGHISRCGDEMVRTALYQAAHVLLHHGRWSGLRGWAMRIAKRSGVKLAKVALARKLAVVLHRMWVDGTDFRWTTREQARALAA

SEQ ID NO: 244028 - protein, 404 aa, unidentified
MQVVCERCAGLDVHKKTVVASVITPEGQETRTFGTMTKDLLEMADWFVEKGVTHVAMESTGVYWKPVYNVLEEGFTVLVVNAHHIKAVPGRKTDVKDAEWIADLLRHGLVRGSFIPDRPQRELRELVRHRRSLIQQRAQVVNRIQKVLEGANIKLSSVATDVVGVSGRAMLERLIEGTDSPQQIAELAKGRMREKRGQLEQALQGLVGPHQRTLLGSHLRHLDFLDGEIDRADEEVAARMRPFQEALERVDGIPGVGRRVAEQVLAEIGMDMSRFPTAAHLASWARVCPGNNESAGKRLSGSTGHGNPWLRSALVEAAQAAAHTKGTYLAAQYHRLAGRRGGKRAIMAVAHTILVTIYHMLTRGTTYSDLGGNYFDERDRQATIRRAVRRIESLGYKVTLEEAA

SEQ ID NO: 244029 - protein, 336 aa, unidentified
MVFRFFIGIDVSKNTLDIGFLDAENPGSVSHEQVSNSDTGIAGLLKWLQKQNGFLIENSLFCLEHTGMYNYPLLQFFSQQNASVWVESGVQIKRSLGLQRGKNDKVDAIRIAQYAYRLKDQVKLWTPVRGVIDKLKHLSGLRERLVETKKRLLTPVEELFKVGNESIAKVLEKAMSKTMKGLDKDLQMIEDQMKDIIDNDDDLSRLYELVTSVIGIGFVTAVNLLICTNEFKLFSSHRQFACYSGVAPFEYRSGSSIRGKTKVHPMGNKKMKKYLHMASLTAIKLDEGLKSYYERKVLEGKNKMSVLNAIRNKLLARVFSVVNRGCVYQKTYLVLS

SEQ ID NO: 244030 - protein, 385 aa, unidentified
MEARTVNNPPSAASHDETVRCVLAIELSKKSWIVAVNTPLSDKVSRHTLEACDWKGLLELIARIRTRVMALNRPVEVVSCYEAGYDGFWLHRLLETHGVCNYVIDPASVQVDRRARRVKTDKVDVGRLLRSLLAYLRGEPKVWSVVRAPSIAEEDDRRLHRERDRLINERVQHVNRIKGLLFAQGICDYEPMHRHRRARLDDLTTSDGRRLPQHLKAQISRELDRLELLLEQLKAVEAERDALLAATESPAKLASAALLLDLKGIGPEFASVLWSEGLCRSFANRRQVAAYAGLAPTPWQSGAVDHEQGVSKAGNPRLRTTMIQLAWLWLRHQPGSTLSHWFHERVERRGGLRKTMIVALARKLLVALWRYVTAGVVIQGATMKA

SEQ ID NO: 244031 - protein, 429 aa, unidentified
MSSRHPIDWIGSEKKMGSGCEFCIGGMNVNCVGVDVSKGKSMIAVMRPLGELVIPPFEVGHTGIELCELSSRLRELGGETRVVMEATGNYHLPVASFLHDSGFYVSVVNAMLVHGYGNNSLRRAKTDKKDAIKLANYGLGHWLALPRYIPEDEVRLMLKTTYRQYQQCAKVQTMLKNNLIALLDTAFPDANRLFASPARADGSEKWVDFVAAFWHCECVCGLSEKAFAAKYQKWCKKHGYNFSQDKALDIYASACGHFSVMPKTDTAKLLVEQAVSQLRAASAALATLRNEMQSLAASLPEYPVVMGMFGVGPALGPQLMAEIGDVRRFHSKKALVAFAGIDAPPYQSGQMEVRSRSISKRGSSALRRTLFLVMSVILQHSPSDNPVYQFMDRKRTEGKPYRVYMMASANKFLRIYYATVKRHLDSLEA

SEQ ID NO: 244032 - protein, 389 aa, unidentified
MKNRYASVVCGGVDVHYKFSTVTFRDAAGRVVAREQLHHADREGLREQLARWPKGIPIVLEASFGWGWLSDLMEEVGLKPQLSNCYKVEKYRQTQGWVKTNKKDADLLSMLPGETREKPEPWWQVWRAPADVRDRREWMRYRADMVALTTGTKNRIHAVFHRHGIFFEEKTDLFGGLGRRFLDQLSQDGRHAGGVLPDGARQVLRGLVNLHAYLRGQLLEVAKTLHGQLERDELAKLLDGIPGIGLILSHTLRSEIGDIGRFKNHRKLAAYVCLAPRSDETGEPHPGRPPLGRHLGERGNRTLKWAFIEAAHGAVKHGGKWRAMFDRVTDGGRKDRGRGYIKVARELVQVVYIVWSRNVAYFEAPPRKPRKGRPPRRSHKDSRPGTGQP

SEQ ID NO: 244033 - protein, 382 aa, unidentified
MKSVCGLDVHKDSVYLCILSEFGELIEKVFGVLTYQLEEMRDMMLHHHVVEVSMESTSVYWIPIWRVLSPHFKLNLANPYFIKQLPGRKSDVKDAQWIAECTMKELIRGSFVPPETIQQLRQYDRRIFDLNEEIVRKLSKLDAVLQRCNIRLSNYVSNVDSKSYKAVVRAISQGITDPEELVKLIHGRIINHHGIDVITASLKGVVSLAEIDMISQLRDELDMAEAHKEKCQARMLEICEREFPEELRRLQTIPGIKERAATSLIAEIGTDMNKFETANHLASWSGLKPRNDESNKKIKSRSITHGNVYLRKTIIECAWAASRTKDCFFSRFSYHQTQVRKKNKMKVLVAVARKMLVYKLTILTDGYGSQFEYKLEEESITI

SEQ ID NO: 244034 - protein, 374 aa, unidentified
MADAITHVGLDVHQEEIAVALLRAGSRRPEEFRVRGDARGVRRLVGRLGKLEGGVECAYEAGPCGYALQRQLEGAGIACVVVAPSLIPVKPGERIKTDRRDARKLAEQLRAGMLTAVCAPSEAQEAVRDLCRCREAAREDLMRARHRLSKMLLRRSLVYRAGKNWTQKHRRWLLGLVWEHEAERVVFGDYLGAIEQLEERLRGLDAALETQSGEGPYREPVGWLRCFRGLDTVNAMTIVAELYDVVRFHSPRQLMAYLGMVPSEYSTGGKRRQGAITKSGNRHVRRALVNAAWHYRHRPAVGRTLRLRRQGQPAPIVALADRAQQRLHRRFFHLLLRRGKPPQKAVVAVARELAGFLWAALVLYPQLQSQEPTH

SEQ ID NO: 244035 - protein, 410 aa, unidentified
MEVLYPHCAGLDVHKDTVVACARHMVNGTVTREIRTFRTTTKDLLALSEWLANQRCTHVAMEATGVYWKPVWHILSDGDVTLVLANAAHVKNVPGRKTDVNDATWLADLLAHGLIRGSFVPDAQTQELRALLRTRKQFVRERSSHVQRLQKTLEDANIKLDGVISDIIGLSGRRMIEALIAGESDPEALAALAHRRIKAAPAALREALRGRVTDHHRFLLQLHLAHIDALDAALSAIDREVGIHIEPFHTEVLLLTTIPGVNDLSAYVIRAEIGGDMSRFPSVGHLISWSGFCPRNDESAGKRRSNRMRKGAPWLKTTLIQCAWAATRKNGSYLQAQFHRLRARRGAKKAIGAVAASILTAAYHMLKDGTLYHDIGPNHFDRRAKTVQTKRLLSRLERLGYAVQLTPLAA

SEQ ID NO: 244036 - protein, 417 aa, unidentified
MMRVGIDAHKKNCTTCVFKDSDVLSSAPSERFVFKTTMQGVAEFMEKIPEGSMVVIESSTTGKAISKLLSSKYEVHMIAPPERKPSIKTDKRDAERIIKEDMLGYVRRSYIPSQLIEELRLIVAKQMEIGGKIGAVKNQIHALLERNLLQSEFEDLSDIFGVEGLEKLSSLELPKHEKLTLAMHLEELRLYTSQHRQIETEVAKIAEADVDCRNLMSHPGIGSFVAAAIKARTGDASRFPSKKHFCSYAGVVPKADNSGEHVSEHGRVKHGDDVLKYALTCGVNAAVKATTYSAVKRFYLKQIGKGKSPQDAEVAAARKLACIVWKILTSKQRYIEEDRYLTAKKMRRLSQTARRSLKQATNPEDVSTLITSLKSETDVLKRYPEGIHGMPRHNGRYCKRNPSPIEHASDAGGAMTK

SEQ ID NO: 244037 - protein, 357 aa, unidentified
MKEYIAFDSHKHYTLMERENRETGRAVQLRVTHQPGAILSCSRNCEAGSEATVEATGNWYWIVSEIEQAGLKPQLVHPRKAKLMMGLINKTDKLDVHGLNRLQRNGTLPTVWIPSAELRDQRELTRTRLVLVAQRTRLKNRLHATLAKYGLVVQGCSDAFGTLARSQWPELLGRLPEQTRWVSQQLLEQLDGLEQQIKQYEKRLADLLKVTPEMQRLQSLPGVGLILGASIALEIGTVSRFGSAERLASYAGTTPRVHSSGDKLRFGRLRPDINRYLRWAFVEAANVVALHHLRRPERHVSQLYCRLKQRKGHAKAIGAVARHLAEASFHILSRREEYVDPALPKGRSKAGVSASPS

SEQ ID NO: 244038 - protein, 412 aa, unidentified
MEVLRQNVGIDIAKDSFVATFTVLLKGQLIKNKGTKKFDNNHKGFEELLDWYRKLQEDNLIVNFTMEATGVYYESLAYFLFEKEHVVHVLLPNKAKKFAESLNIKSKTDEIDSKMLGRMGVERVLEKWVLGSKIYRRLRTLSRERQQLIKERTRIKNQLHAEEHTGDPIKTTIRRMKNHITYLDKQINSIEKELETVVSKDAYLSEKVKKIITVPGLAFKTVVSVIAETQGFVNITSIRQLSSYAGYDISIKESGKWKGKARISKKGNSHIRQIMYMPSLSAIQHSETYKSFYERINEKKQNGLISGTAVQRKLLGLIYTLYTRSIPNASTLPLFRSKKQQKAQQKGVNKKQKRGQTPLLTQPYLYRCKYANRTMLLNFKKWVRHLDRIISNHAWQTKTACWLRPRQNDPRL

SEQ ID NO: 244039 - protein, 465 aa, unidentified
MSTDKKFWRNRKAKKELARRLHSENPGLEVVHPHAAGIDVGNGAHYVAVRPDRDAQPVRRFECFTADLYRLADWLRNCGVRTVALQSTGVYWIPLYDILEERGFQVYLVNARHTKNLPGRKSDVQESQWLLKLHTYGLLNNSFQPPSKIRTLRTYWRQRLQHVTGAATCVQRMQKALTQMNIQLANVISDLSGVTGQLIVRAIVAGERNPQKLAELSHPRIQASRAEIAKSLEGNWRQELIFVLQQELEMYDIYQRRVAECDQQLQKHLSAFADTVPPPSKQNLPPKKKKKQNKNNPHFHLADELQRITGVDLTRIDGVDVIVAQTVISEVGLDMSPWKTEAHFASWLGVCPDNRISGDKVLARGTRHVLNRAANALRLGASTLLKSQTYLGAQYRRLRTKLGAPKAITAMAHRLARLVYRMLKYGQQYVDKGAEYYERRNRHQQIEFVRKRAAQLGLQVTQLHA

SEQ ID NO: 244040 - protein, 317 aa, unidentified
MKKRPSRFVGIDVSKDYLDLACRPEDTRWRVANDSAGIAQCLAQLRQLKPPLIVLEATGGWQGSLVAALAVSKLPFAVMNPRQIRDFAKATGELAKTDALDAGVMAHFAEAVRPTPRPLPDEMTQQIDALLQRRRQLLEMLVAERHRVALAHPAVRDSLARHMDALQGLINATDEEVAAIIRTSPAWREKDDLLQSAPGIGPVLSATLQAALPELGVLNQREIAKLVGVAPLNDDSGKRSGTRHIRGGRAAVRAVLYMATLTATRFNPVIKAFYQRLLGRGKSQKVAITAAMRKLLTILNAMVKTHTPWNARLQNCA

SEQ ID NO: 244041 - protein, 354 aa, unidentified
MNSVRYIGMDVHRDTISVAVLDEGGRVMMQSVLATRAAAILDFIHGVRGTLQVTFEEGTHSAWLYDVLVRRVTRLVVCNPRKNALLKSGSKSDAIDARKLAELLRAGLLSAVYHGETSALEVQQMARSYTQITEDTTRVMARLKAVFRGQAVSCAGKKLYGKRHREEYLAQLGGGLRRRAEHLYQELDALQPLRHAVRRELITECRKHAAAQWLQSVPFLGPIRAALLIGRVQTPHRFRSKRQFWSYCGLGLETRDSGEYRVVNGQVERRRKPALIRGLNWNHNHEMKNLFKSTATAASMRQGVWRQFYLQLLDKGMRPEMARLTLARKIAAITLKIWKKGETFNAEHLKLQAA

SEQ ID NO: 244042 - protein, 355 aa, unidentified
MTSVKYIGLDVHKESISICVRNSVGKVVMESVIETKASTILQFIDGLRGDLRVTFEEGTWAAWLYDLLKPHVPGVEVCNPRKNALLKDGSKSDRIDAHKLSEQLYMNNIKSVYHGEHGLRTLKELARSYLTISRDLTRVMNRLKALYRSWAIPCVGKEVYAPRYRVEWLSKISEPGVRRRAEFYYQQLDGLRLLRQEVRRDLLREVKKHKAWKLLRQIPGIGPIRAAVLMAVMQTPHRFRTKRQLWNYCGLGLETHDSGEYRAVKGQLQRAKKQATVRGLNKDHNHDLKDIFKGAAMSASTAAGPLHDFYENLLAKGSKPTMARLTLARKIAAITLIVWKKEVGFDANYLKQQAA

SEQ ID NO: 244043 - protein, 522 aa, unidentified
MQRNRSKPKTQRTMPMVHANAAAIDIGATMHMAAVRADRTSEPVRSFGTFTTDLHRLVDWFTECGVETVVMESTSVYWIPIFELLDARGFTVFLVNARDAKHVPGRKTDVSDAQWLQRLHSYGLLRASFRPKGQIAELRAYMRQRERLLEYGASHIQHIQKALTEMNLQLHHVVADITGATGLRIIRAILAGERDPKVLARLRHYQCHASADTIEKALTGSYRSEHLFALEQALALYGVYQEKASACDIRIEAVLKELSIGRGPRSDPLPSPRRHRATQANGLAFDVRAALFALLGKDLTQINGLGPYLSLKLIAECGDDLSAWPSAKHFTSWLGLAPSNKISGGKVLSSRTRRCGNRASALLRLAAVTVGRTDTALGAFYRRLSARIGKAKAITATARKIAVLFYNALRHGMEYVDPGASFYETRYRARVVDNLHRRAKAFGFVLQPIEPTCDDVAPATGAKNDEPRTLCLVGVGDCRHGGGAEQHGVFRPGPGYPDARCGFRSCAVAYAPLVRPAASRAR

SEQ ID NO: 244044 - protein, 384 aa, unidentified
MQKPNDLNQSRIVLKQDSTLIAVIEMSLSSWLVAGIVPGVERQPLKKLAVDESALLNLLNRWREEAEKAGRRIERITVAFEAGRDGFWLARWLRARGIEAHVIHASSVAVSREHRRAKTDRLDTELLKRAFLGWLRGERDHCKMVAIPTTKDEDAKRPNRERQSLVGEQTRIVNRMKAALIRLGIRGFNPKLKKAAGRLEDLRTPEGEPIPPNTLAELHRDMERRRLVSDQIRQIEKARLERMEQAPGDGPHAMVRLIARVIGVGIETADMLVHEVLSRKLRDRRAVARYAGLTGAPDESGSKRREKGLAKAGNARVRGGMIQLAWRFLLFQKDSALAQWYRTRTEGGRNRKTIIVALARKLLIALWRLVTTGEVPAGVVLRAA

SEQ ID NO: 244045 - protein, 349 aa, unidentified
MSNITTIGIDLAKEVFAVCAMDMTGAVVYHKALKRDAFIIWAEQLSPSNIVMEACGSSHHWGRWFAEHGHTAKLIAAEFVQPFRKSMGAKNDKNDAEAIAIASRQATMRYVSVKSVAQQEALVWHRLREGYKEERTAHLNRIRGLLGEFGIWPPRSADKLIRLLPTYSINVNIPEGLRLAIEQSLQYLSELHTQMARCDQQIALHVKSHPAAQRLTEMTGIGTLTASATSAMVVDAKHYKNGRQFAAWLGLVPRQMSSGGKAKLGRTTRRGDTYLRSLLVQGAKSTLQVALRQAPDKASRLQQWIAQIYTRVGYHKTLVAIANKHARMMWAILAKDESYNALAWQRNDV

SEQ ID NO: 244046 - protein, 412 aa, unidentified
MKCFVGLDVSSTKLDVCIMLSDTTTPFTASLPNDLVGASEIKKQILELNDSYSFERIVIGMEATSLYSFHPAMFFHEDSDLKALKVEVMVEQPNKIKKYREAFEENKNDTLDAFYIADYFRIKRFSPAFLKEEKYMALQHLTRTRLQLIEQLTKTKQHFIENIYYKCNTLSTEIKNENLSTNLWSSTIISLMTEDYSLDELATIALEDLAEFLQKLGRGRFKASEKLAKAIQAAIRGSYRLSKLQQDSVNVILGLLAREIRNLEQMIKDIDKAIEDMVEVIPEYQCLTSVPGVGKVYAAGIITEIGQIERFRDHPQVAKYAGLNWKQYQSGNTNSQNTELVKRGNRYLRYYLVEAANSVRRHDSEYQTFYMKKYQEVPKHQHKRAVVLTARKFVRLVDQPPTLYATKKAYGR

SEQ ID NO: 244047 - protein, 424 aa, unidentified
MNIYPLNDPSNYCAFIGIDWADKKHDICIMVQGTRKMDHRVIEHNPQKIDEWLQSLKKQFNGQRIAVGIEGSKGPLINLLVHYPFLTLFQINPLSLSQYRKSFRVSSAKDDVNDSQLICEMVAKHMDRLRVIKADDEPTRELKILSEQRRKIVQQRVGIVNQLKVHLKQYYPLALEVAGKELYSKMSCEFLLKFSTHEQLSFTSDRGLKMFYQKQGCHSKTIDRKIQSIKEAKPLTVDNILTENMAMTTRLYARMLLEIAASVQEYDDKIQKKLSEHPDGHIFKSLPGAGSIFAARLASVYGSDRDKFPASADVQKFSGVAPITQKSGNTQAILFRFACPKFIRQTFVEFAESSIPYSIWAKAFYTMQKAKGKSYQMALRALAFKWIRIITKCWKDNKPYNEVTYIKSLQKRKSPLLKYLIEAT

SEQ ID NO: 244048 - protein, 389 aa, unidentified
MKIFVGIDIAKLNHFAAAISSDGEILIEPFKFTNDADGFQLLVSKLESFDKNSIIIGLESTAHYGDNLVRYLVAEFYQVCVLNPIKTCQMRKNNVRKTKTDKVDTFVIAKTLMMQDDLRFITFFDLDMMDLKALGRFRQKTIKQRTRLKIQLTTYVDQVFPEIQYFFKSGLHQNAVYALLKEAPSPKEIASMHMTHLANLLKVNSHGHFTKEQAKELRVLAQKSVGANDSAISIQITQTIQQIELLDSQLEKIEAEMTDIMKFNDSVIMTIPSIGYINGGMILGEIGDIHRFSNPNKLLAFAGLDPSVYQSGNFQAKTTRMSKRGSRVLRYALVNAAWNVVRNNATFKAYYDAKRSEGRSHYNALEHCAGKLVRVIWKMLTDEVEFNLE

SEQ ID NO: 244049 - protein, 316 aa, unidentified
MNEKLSETFVGIDVSKHSLDIQIDPAGQFLHVAYDDAGVADVCRRLLRLAPTLIVMEATGGLEVRLAGELASRGLAVAVVNPRQVRDFAKASGELAKTDRIDAGILSRFAKAIRPTARPLKDADTRDLDDLVTRRRQLVEIRLQETIRLGSTTSKSSVKSIKTHIAWLDKQIDKLEDDMNDRLRNSDVWRVKDDLLRGIPGVGTVTTTTMLAKCPELGQLNRRQIAKLIGVAPLACDSGRHKGKRFVWGGRADVRSVLYMAAVTAIRYNPVIKTFADRLKQAGKPAKVVIVACMRKLLTIMNTMLKNNEPWNPKIA

SEQ ID NO: 244050 - protein, 378 aa, unidentified
MKRILKIGMDVHTTNYTLCAMEPIIGEDDRVFATIKVTPDYKNILMFIENLKSKLGLNDEYDIQCGYEAGCLGYSLYNQLTAAGVKCVILAPTTMLTPQGVRIKTDMRDAYMIAQCLSYGGYHAVYIPTEDDDSVKEYLRMRNDHKLALKKIKQQINAFCIRHGFCYDGTKWTQAHLKWLKKLEITNGLYRETLNEYMASYEEQEAKIERYDKRIEEIAEQTKYHDKVKKLECFLGIKTHTALSLIVETGDFERFAKGNQYAAYLGLAPGENSSSDSIRRLGITKAGNSHLRQLLIEASGGICKGAVGHKSKELRARQNGNTAEVIAYADKANTRLRSRYYKFIRHGKKRNVAVAAIARELACFVWGMMTDNIEMKVA

SEQ ID NO: 244051 - protein, 410 aa, unidentified
MIFVGDDWAEAHHDVYVCDEAGTKLAARRVPEGIGGIAVLHELVAGHAEDPGEVVIGIETDRGLWVQALVETGYVVYAINPRAASRYRDRHTLSGAKSDPGDAKMLAELVRTDRHNHRQVAGDTALAEGVKVLARAHQTLIWERTRATNRLRSSLREYFPAALETFDELAHRDTLAVLAKAATPTEAAKLTPGKIRTVLRNAGRRRNIETRADAIAAGLRTEALRARGPVETAHGATTRATVAIVVELNAQIEKLAGELADHFEQHPDSDIYLSLPGIGVILGARMLGEFGDDPNRYANAKSRKNYAGTSPITRASGTRSVVLARFVRNPRLADALDQGAFCSLSWSPGARLFYDQRRANGDSHHMALRALANRWVGIMHGCVQNRCRYDEHTAWAHRSDVDTKRIEQAA

SEQ ID NO: 244052 - protein, 344 aa, unidentified
MEITTIGLDLAKSIFQVHGVDASGQVVVRRSLRRAQMLPFFAGLPPCLVGMEACGTSHHWARELVKLGHEVRLMPPAYVKPYVKRGKTDAADAEAICEAVRRPTMRFVPVKSPEQQAALSMHRTRDLLVKQRTQLVNMIRGLLAEFGINIPKGLGRALLMARRIVDGEAPDVPIEAAKIVGALSQQALDIHVRLRQIDRDLLVWQRGNDVARRLMTIPGIGPVGATALAASVTDPHQFRSGRQFAAWLGLTPLQKSSGGKERLGRISKMGDKYLRKLLIVGMTSLVRRAKYNPQTIDPRLADLLARKPVRVATVAMANKTARIIWAIMTRGETYCAGHQPALAA

SEQ ID NO: 244053 - protein, 342 aa, unidentified
MEKVSIIGLDLAKRSFQAHGALADGGVGFRKKLSREKVLAFFAEQPRCVVAMEACGSSHHWGRAIRDLGHEVRLIPPAYVKPFVKRQKNDAADAEAICEAASRPTMRFVAVKTQEQQGRAMLFRTRDLLVRQRTQLINALRGHLSEHGVVAAQGPANVKVLEEAVEDQTTSLPLLVAELARVFLSQIEGLSERISELEKVTAHEAACGETTRRLQTMPGIGPITALAIETFAPPMDVFKRGRDFAAWLGLVPRQHSTGGKQVLGKISKMGQRDIRRLLIIGAMAVVRSALRKGAPEGSWLQRMLARKPKLLVAIALANKMARSVWAMLAKGEDFRVPTVAAI

SEQ ID NO: 244054 - protein, 367 aa, unidentified
MTKVYLGIDAHKESNVLASAFEGRDEPQVVGKVSADLNRTVDALRKFQKKHNLVKEQLHICYEAGPTGFVLARRLIKLGYDCIVIAPSKTPTKPGDKVRTDRRDARKLARLHRAGELTAVHIPAVEDEVIRDVCRGRTDAVQEAKRCKQQLMAFLLRNGYRYPGKSHWTEAHMRYLRELVFAHRTQKMILEEYLQRIDITQMQVARIEDQMDLLLPTWSRRPYVEALMGFRGFQRTASMVLASEVGDFRRFDHPKKLMAFLGVIPSEDSSGQTRRQGSITKCGNTHARWMLIECAGHYRMPPKVSKALSKRQEGLSREVRALSWHAQNRLNKRWFKLSMRGIHSNKIRVAIARELSSYLWDLAHIVN

SEQ ID NO: 244055 - protein, 416 aa, unidentified
MSDENKVASIDVHKKVLMVVVGSREGDAIGPKGELERRRFGTTTIDLHGLSLWLQERGVKEAVMESTAEYWKPVWAELEPYMRLHLAQAFSNRAPKGRKHDFRDAERLLRRHVAGELILSFVPEPEQRAWRTLTRMKTRLARQRVRLHSQVECLLEEMRIKLSCVLSDLFGASGLRILRALAEGETDPKKLAALGDDRLKCTKEQLLDALTGNVQAMHLELLTLYLQQLRLVDEQMEKLHRLIAQALKPHQEAVARLAEVPGFGPDSAQQVMAEVGVQASTFPSAGHLASWVGTCPGQEESAEENYSSRSAKGNKYMRRVLTEAAQAAVKAKGSHFQVVFRRLLPRLGYKQALWAIAHRLCRMVWKILHEAVHYVEQGAYRDPRARKQRARALAQALRRLGYDVQITPKEPATVQA

SEQ ID NO: 244056 - protein, 377 aa, unidentified
MTDSTTTTAAAATAAGTILAIDLGKFRSVACRYDAAAGTHAFETIATTPAAVHDLLVADAAPPRLLVIEACGVCGWISDLAESLSIEVRVANVLGEAWRWKRVKRKTDRDDALKLAKLAASDQLPTVHVPRLAVRQHRSLIRHRHALIDRRTGIKNTIRSLLDAQGLSMPMRSRGWTVASVNELKKLARPLSECDGDTLWRGQLDLELRLLEAVSALIKEADKKLDAIAGQDERVRRLKTIPQVGTRLAELVVSTLDDAKRFKTARQVSAYAGLVPRQYQSGQMNRLGRITGQGPGLLRRVLVQVAWGLQRRRETRGHAVFERLCHGQRTRRKQAAVALARKILIWCWAILRDGSVWAGDGDGDDARDRRRRRLAVA

SEQ ID NO: 244057 - protein, 509 aa, unidentified
MKTKRSKAKKGAAKKTITVPCAEGAEELAVLRPDAGGIDCGAEAHYVSVPPDRVAAGQPSVRCFSAFTEGLDALVDWLKVCRVNTVAMESTGIYWIPLYQKLEAAAIEVYLVNARHVRHVPGRKSDVQDPQWLRQLHRFGLLNASFRPEDLVCRIRSLHRHRDNLVSASGSEIQHMQKALQQMNLHLHHVVSDITGETGLRIIDAMLAGQHDPKELVKLRDRRCSKSTPKQMQAGLVGDYRAEHLFVLKQSLEAHRFYEARIGECDCEIEPLLQELAKKVEAASARLKLDQPESREASTPEVQPPVMTKLKRELREEEKAWQEAKAAKRKRKPKANEPRIELTGLLERICGVDLTQVVGLNVATVLLIVSEIGVDMSKWRNAKAFCSWLGLCPANKISGGKVLDSRTRQVVNRVADALRLASQSVGRTDTCLGIFYRRKKAHLGAPKATTATARKLACLIYHLLKTKKAYQEPDPALYQQRLHKSALNKLQRQAAALGYTLLPTTPVAA

SEQ ID NO: 244058 - protein, 408 aa, unidentified
MTVQHPCCAGFDVHQQTIVVCVRRQQEAAVTYLEETFGTTTRDLCALGDWLIAQGCTHAVLEATGVYWKPVWYVLEARLTLRLAYAAAVRQLTGRKTDASDAHWLADLLAHGLIHPSYVPPPAIRELRDLTRTRHQLVREVAQHTQRIQKVLEDASIKLVTVVTDVLGVSGRAVIRRLIAGERHAARLADVVDPRVRAGRAALEAAFDGRCTVHHAFLLQLHMDQIEALEGTIARVEARIADQVVPFQATLERLMTIPGIKTTVARVLLAEIGPDVSRFPTAGHMVAWAHLCARRDESAGKRRSTRILPGHVWLKTTLIQAAWAAVKRRDSYLHAQFVRLRARRGAKKAIVAVAASMLVAVYHMLQREVTYQDPGADYFTRRDRDRRARYLQRELQALGYEVALHKVA

SEQ ID NO: 244059 - protein, 422 aa, unidentified
MRYVGLDVHREFCEVAIAEEGRVRSAGRIRTRRAELELFAQSLGSDDEVALESTGGAVAIARILRPRVARVVIVNTKGLRQISEAKAKTDRLDARRLAELLAAGYVAEVWCPDEQTWALRRLVARRAQLVRQRSRAKNEIAAALQRNLLDRPGVYDVAGERGRRFLRGVWLPDDERQTVEGCLRQLDFLDQEIAAVNRALAEVAVGSQQIRRLMTVPGVNLHTAATFMACVGDIGRFDDPGKLVSYLGLDPSVRQSGEEPARHGHISKEGAAEARHMLCEAAWIVVRYPSPLRAFAERIRARRGAGIATVAVARKLVVLFWQLLTTEQDYAFGRPTLTRKKLRQLELAAGAPHGTGQPGVWAANKALRQAELELARQAETAYRRLITDWQPTKGAGATPGRASQGRQSGKQRGKASVPNPAL

SEQ ID NO: 244060 - protein, 355 aa, unidentified
MSEQFVGIDWATRRARWRAVKSTGAVIDEGWTPADEDGLATLVGHLGPDAVACLEMMSGAAWVRDQLTAAGWTVQIADARKAKAVGSLAAKTDKLDARVLAELARGDLVPQVHVPTFADRELKERLGRRMHMVRLRTAPMNRAHGVLSQFGVTLAFKRLREPDREELLIQRGIPEVWRRSIAEAVAVVAMLDLRLIPLEQELRPLARADPRVQLLVTIPGVADLLGLTLASEIGDISRFASARKLIGYSGLTPRVYQSGQKARTGKLSKSGSTMLRWAAIEAAQQAWRPNNPWHQLYLDVKQRCGGKGNPAKAAVARKVLIATWHVLALHQPFNPSRPRGADAPVPASSSCVLAD

SEQ ID NO: 244061 - protein, 361 aa, unidentified
MFTERTSVGLDVHARSVVAAAIDGVTGEVFRARLTPAYEDVVGWVRRLPGPAATVYEAGPTGFGLARALAAASIRCEVAAPSKLQRPAGERVKTDARDAMHLARLLRLDEVVSVRVPTIEQEGARDLVRAREDVRGDLMRARHRVSKLLLRQGVVYSGGQAWTGAHDVWLRGQSFEQHGVQLAFDADYEAVLLAAARRDRLGVAIEAMAAGSEFTPVVRRLSCLRGVSTLTAFALAVEVGDWDRFTGSTIGSFLGLVPSEYSSGASRVQGSITKTGNTHARRLLVEAAWHHRKTYRSPGAIMRARWELASPAARARGHAGNHRLHDRWIGFIERKKKPVIANVAVARELAGWCWSLAVMDE

SEQ ID NO: 244062 - protein, 418 aa, unidentified
MAKQQKNEVSFEEVVARGCGLDVHKKEIVATVSGTDIKKETRTFQSTTRSLTQLKEWLLELGVTHVAMESTGVYWKPVMNILEPGGFTIMVVNARHIKYVPGHKTDKKDSAWICKLLRAGLLKGSFIPRRDQRDLRDLTRYRRKLVQQRAAEHNRMIRIFEDANLKLSSVFSNIRGKTCTAVIDEVIKGETDPQKLAELCTNPRLKHSQEEIAEAVEGHFTEHHKFMIRAIRKSIKNIEDEIEVLDKETDRRMKPLQGRIEQLCEVPGMQNSSVRELLAETGVDMEVFPTEEHLTSWAGLAPGNNESAGKKKSSHTNHGNKATKAIMTECAWCATRTKGTYFSERYKRLAARRGKKRALVAIAAEMLKVIYHMLKDGTVYQELGPDYMDDKRKQAQIKYYQDQIKKLTGEDSPGKESA

SEQ ID NO: 244063 - protein, 437 aa, unidentified
MNHQRLQLQREHLAGKTVIGIDPAKDKHQAAVVDAHGNQRGASFSFPVTAAGYGEILWRNIAKVLPSCNTHEVVFAIETACNLWETLACYLRARGYAVVLVSPLSTHHSRPIMSMEFSRTDPKDAYLIATIAQRGAYHSYEQFPPESNAMHQLAITYDKLRKNRAQNRARIRALLDRVFPEFPRILEPDTDTAVYLLKKYLFPDEFLAMDIRTEAKAIAHISRQQCGRDTLEALQNAACTTIGVLRQSDERLADRLTLDAFLALIETIELHRVRVLDALIARAKELPQFERINSLSGCGKTLTALFLGEVHDLSRFTHYRHLEKLAGLNLRLYDSGRYSGTRHISSIGNSRLRWIVFKMAEETAKRVPEVRCKYLRRQLKRRKHVKNVVAAVPQLLQLIIAMEKHQHTYTERPEAVATMHQLEEQYEELKTKKRVAA

SEQ ID NO: 244064 - protein, 310 aa, unidentified
MLEICCGLDVHKETVVACLLKGSVNDDKPQKTIRTFSTLLPGLEELKAWLESENCCHVAMESTGVYWQPVYNIFESALDGTMVVIVTNARHMKNVPGKKTDMKDAEWIATLLRAGLLSGSFIPPQTIRELRDLTRYRKSIIEELSSQKNRIEKHLQSCGFKLSNFLTDIFGVSGRAIINHIAEHGSITAEEVENYVKTRTRNKLQEIKLSVNGRMNRHQREFLRLLLKHLDETYEHLSEIEGNINSELEKFKRQIEQLDSIPGIDKTAAAAIIAEIGIDMSKFKTAEHICSWAGLTPGNNESAGKKSPLE

SEQ ID NO: 244065 - protein, 335 aa, unidentified
MEHQDHTNNANVYVGIDVSKDYLDACLRQSDDRTTSGKFDNVPKGHSQLLKWAKRLGKSGSIHFCMEATGAYHDACAMYLAENDQNVSVVNPHKVHHWMIATGEGNKNDKADARSISAYCRAVAPPLWRNASPEVRELTALVRHLDNLEEHAGQQKNRLSQPGLPASVTKSLQTLLKQIEVEIAAVEKLIKEHINNHPDLKRDRDLLVTIPGIADTTAAKILAELPDVEQFASAKIAAKYAGLSPSQYESGTSVRKRTRLYRAGNRNLRRALYMPAMTAMRYNEPVRRLYDRLIDSGHKGASALAAAMRKLLMIAYGVLKSQVPFRADFPVMSHH

SEQ ID NO: 244066 - protein, 418 aa, unidentified
MNESAKLLPQKYMEGDKVHVLGIDVSRGKSNCALLHDHTVVKEFQIIHNKSGLAKLKSIIASDLPVMAVFETTGIYSRVLTRFFIDEEMNYLEINPLESSIRMAGLRRQKTDRSDTVKLALLGIVDQKSLIHGRRPYSRPYEQLHLMAHRYLEITKERSQIINHLHAALDQTFPELNDIFNPIRSVLGLTFVSLFPHPDFLIGYIPGTMAKQIISSVSHKIRSDLIVRRCKGVWQAGQLSYPAQSADSFIISQIHSYCEEIQQYNQAHDLLKRQLINYAKTFPEFKLITSIPGAGEISTALLLGFTGKIARFPSYKQLNAYVGIDLRRIQSGGFKEADRINRRGQSSARYIMFEMIRSMLRNKARIDNHIVDYYYKLKKGPHPKPDMVAMIACVNRLDRTIMNLVRTNQIYNYARTSR

SEQ ID NO: 244067 - protein, 359 aa, unidentified
MATRVGINGFGRIGRQVLKAIRNYYPEELEVVAFNDIGDMKTMAHLLKYDSNYGRFDGTVEFSEGGLHIDGKDVTAFKETDPAAIPWKDLGVEIVIESTGGLEVPLMVELAAAELPFALVHPGRVRDFARSMGLLAKTDKLDARLLAQFGEAIRPPLTQLPSPEVQELNGLMVRRRQVLDLIVDEQNHLASTRLSLCPRIQVHLDWLQTELDDLDRAIEALIECIPAFKEKEAILRSAKGVGPVLSAKLLSGLPELGQLNRKKIAALVGVAPFNDDSGYRRGKRRIKGGRADIRQVLYMATVAAVRFNPAIRHFYQHLLSQGKLKMVAIVACMRKFLTILNAMIRDMRPFACASAPVKS

SEQ ID NO: 244068 - protein, 374 aa, unidentified
MKNIRFVGLDVHAESIAVAVAETGGEIRSLGTVPNQECAVRRLVRRLGKKEELRFCYEAGPTGYVVYWWLVRQGVHCDVVAPTLVPVRAGDRVKTDRRDAVKLARCYRAGDLTPVWVPDAAHEALRDLVRAREAAKKDHLRIRHRLQKYLLRRGERPPEGARAWGAAHRRWLLTVRFEHPAQNTVMLEHLGELEHVEERLRRLDQAIEDAIATAPEQMRELVAGLAALRGIARPAAAMIAVELGPASRFVRPRQLMGYAGLVSAEHSSGGSVRRGAITKTGNAHLRRILVEAAWAYRHRPGIGIELAKRQKGASPAVREIALKAQHRLHRKYVRLASRGKPHQQVVTAVARELLGFVWAVGVQIERELLPEKAA

SEQ ID NO: 244069 - protein, 408 aa, unidentified
MTVVGIDVSKSKSMVAAMKPGGKLVAAPYEVRHSDIELSHLALDVLCMEPDTRVVMEATGRYHEPVAAQLHSAGIFVSILNPLLIKQSGAGSLRKVKSDPKDALKIAKYGLDNWSTLREYTPTEAIRQQLKLCERQCDLYSKNIVMLTNNLISLSDKTFPGVNELFSSPEKADGHLKWVDFYRTFWHCDCINRMSPDTFGERYQKWCKRKGYHFSADAADALYAASCGLYTTLPRDNNARLLVTVAADQLIALRENQSKLEAEMLNFCKQLPEYETVMAMYGVGKSTGPHLMAELGDVRRFLHRSSIVAFAGVDPGVVGSGKMQLSSVATSKRGSPQLRKALFQVVSTYVKCKPENEAVYQFYTKKRDEGKPFFVCTTAAANKFLRIYYARVKECLNAAESATQVEEG

SEQ ID NO: 244070 - protein, 338 aa, unidentified
MKLYGGIDLHSNNVVIVVLDEQGVIKARKRINNELHQILLFLSSFKSNLVGLVVESTFNWYWLVDGLMEADHQVHLANTTAIQQYSGLKHVDDNSDAQWLAEMLRLGILPEGYIYPKGQRAARDLMRKRMQLVQQSTSNLLSIQGLYQRHLSYKLSNNKIKQLSHEQVARDFSVPNVVLAVNSNLAVMHCLKGHIKGIEKTLLAQVKLAPEFQRLTSMDGIGDILALTIMLETGDMKRFKKVGDYASYCRCIKGAKYSNGKKKGNTNAKNGNRYLAWAYVEAANFAIRYNQTIKRYYQRKAAKTNQIIAIKTVAHKLARACFYVLRDQVPFEVGKAFC

SEQ ID NO: 244071 - protein, 430 aa, unidentified
MGLIMPSAVHPQQDDQPMPYEWFVGIDWGSQQHQVCVLDRDRHRVGERAVDHDGASLARLAAWLWIVSAGQPQRVAVAIEVPRGAIVEGLLERGFHVFALNPKQLDRFRDRHSVAGAKDDRRDAFVLADSVRTDQPSFRRLHLEEPQLLVLRELSRAEETLLEEFRRNANRLRDQLYRFYPQMLQLCPAADEPWLWDLIDLAPSPAHAALLSEEQVQRVLKVHRIRRVKAHEVLTCLQTPALPVAPGAAEAAQAHCGFLSPCLRVLAEQHQACGQQVSALLHTLAEQPDDGEGPSDVAIVLSLPGVGRKITAWFFAEAAQPLAERDYQMLRTHGGVAPVTKQSGKRRLVVMRRGCNPRLRHALYHMARVAMQRDAHFSSVYAALRAKGQRHGQALRNIGDRLLRILMAMLRHRTCYDASRIRREPVVQRG

SEQ ID NO: 244072 - protein, 350 aa, unidentified
MERYIGLDVHAASTTFAVIGESGKRLGSHVVETNGQSLVEQLKTIPGTKHVVLEEGTQSAWLYEILSPHAEEVVVVMVPESRGQKSDEGDAFQLAEQLRTGALKKRVFKKAGEYKTLRELGRTHSMIVQDVVRVQNRIKALFRSRGVAVSGKSVYSEKGREELLEKLPDASRGAAKMLYAQYDAVEEIRREAEKDLVKEAHRHPMSRVLESCPGLGPIRVAQLIPVVVSPMRFRTKRQFWSYCGLGIVMRSSSDWTRTKDGGWTRAEVQKTRGLNMNHNHTLKNIFKGAATTVITQLSTEPLHQDYERLIAAGTKPNLAKLTIARKLAAIALSMWKSKEKYDPTKHRKQG

SEQ ID NO: 244073 - protein, 364 aa, unidentified
MKRKLYVGMDVHKETIRIAYLTSNSKEILKEQQIKHEEVQIKKFINRLKLEWDEIDCCYEAGVTGYPLYRYLKSLGVNCILVAPGKIPRQSSDKIKTDKRDAIKLARLMRSGELESIHVPSEEDEAVRDYLRSRDSLRLDLGRNRQRLMKFLLRKDIKYSTTKYWTVSHYKWLNNLHFNNEILQETFNDYYSRVRVQEENLKAMDKRIQEVAESESYREKVGILRCFRGVDYLTAMFLLCEVNDLKRFKTAGSFMSFLGLVPGEYSSGSKRKQTGITKTGSPRLRRILTEAAWQHRFPGTGSKIVTARRSGQHALVVSLAEKASLRLHKKFRNLQLRGKTPQVMITAVSRELSGFLWAAMNLVA

SEQ ID NO: 244074 - protein, 355 aa, unidentified
MLTIGIDAHKRVHVAVALDENGQEAGVWRGPNSRAGWAELLAWAPGRSEGRQFGIEGAWGYGRGLAQHLVAADEHVYEVNARWTAAGRRRARNQSKTDRLDAQAVARFVCQEGLGLAQITAEDESAVLDMLTVERNAAVGEATRTRNQLHAHLLQLDPEYHQHLPPLRSRAGVRAAKEYTVEGTDLLRRERASAVRRLAVRLELAEDQADEMANRIRALVADRFLPLTRLCGVNLLTAGAIAGMLGPGRRFSTDAELAAYAGVSPLEASSANTTRHRLNRGGNRRLNAVLYRIAITQAHHSPEARAYLSRRTSEGKTRKEAYRALKRYLARAVFRLWAECIRDMEACSAPRSTCG

SEQ ID NO: 244075 - protein, 345 aa, unidentified
MQTTQVAVDLAKSVFQVAVSHAPGRVDKQHRLSRQRFRTFFLHRAPTHVLMEACASAHHWGRELQTLGHEVSLLPPSHVARYRQGNKTDRADAKALLEAARNEDITPVPLKSLDQQAINALHRLRSGYLGTRTARINAVRGLLREFGIPVPLGARTFLAKAHLALDDDTLPAYLRVALDQALAEIKELQAKANDLKSQLEHLAPLIPAVPFLMTVPGIGILSATALVATVGDVHRFPSGRSFAAYLGLTPRESSSGASRRLGSISKRGNRYLRVLLIHGARAALLAAHRSKEPDDLQAWAVRTAEARGHNIATVALANRMARIAWRVWRDQRPFQRRFTPQEDAA

SEQ ID NO: 244076 - protein, 579 aa, unidentified
MCPTSPSLPEPLRIGVGIDTARYGHCATFLQGNLQPAAARLDFAESRHGYNQLQRRLEQLAKRYPNLQFVVRLDVAGQYATNLECFLRTLPWPIALSTGDPQRNKNYRKVIFPKEKSDPADSFACARFALLECPEPTPMVSDEIRALREVASRLESQTQQSTRLINQMHNLLSRVFPELPRIVKTLASSWVLTLLSDYPTPRKIAAVSLPSLLQIPWGKPEKLQAIYDAAQQTVASFQGAIAERLVQDMARQVRQSLKAEKRLLKLLITAYRKVADPRARQIETIQGIGAATAAVLVAKIVSIERFENAEPLVGYFGIFPEQDRSGVDASGCPKPSRGKRMSAKGNDLVRKYLWNAAKAASRFNPQVAALYRRLRGRGKRGDVALGHCMRKLLHQVVGVWKTGLPYDPRHGLPATVDPPAPPLIAKPCEAIAGRTQEQSVQKQAVTATNSTIPDTNQLVKISPTEKPAKRPPVDYPFLREQLSIDQILRHFGLRDHMQGHNGQVRGPCPIHAAHSASSRTFSVNLTKNVFQCFDSACQAQGNALDLWRTLRHLSLYEAALDAAVTFNLQTHPGTEKRNP

SEQ ID NO: 244077 - protein, 320 aa, unidentified
MQTPTEVLNIGADVAKEEIVVACSQGSFPVRKLANQRSALLAFLKDLPAGSRIGMESTGAYHELLADAAHKLGFVVFVLNPKDARHYAKAVGLRGKTDRVDAELIARMVAHEHTKLHPWIAPTAEQREMARLIKRRAKLSSLRQALAMSLKGLEGFATDLKALRARFDQVLVRIDQRVKALVEASPDRKQHVTHLRTICGVGPVVSAALVNTLERVPLKSADAFVAFTGLDPRPDDSGQHRGKRRLSKRGPAELRRLLYVAALSAKKKQAWKPLFEHYRAKGLSSTAALVIMARRIARTAWSIYTYKTDFDPARLTKSLT

SEQ ID NO: 244078 - protein, 333 aa, unidentified
MLTIGLDVHWRTSTICILNEYGKKVKELTIRGDWNKVLTVLAGLSEPFQVVYEASCGYGHLYELLVKIARRVVVAHPGAVRLIYRSQRKNDRIDAQKLALLLYLDQVPPVHVPSLDVRQWRSLVECRQNRIAQRVACKNSLKAILRSHGIRLRGAWTRKGLIVIAGVELPPASSLHRNLLLEELGNLTRQIQLVTVELDKIARRHPGVALLQTIRGIGPRTAEAVMAYVDTPQRFGRVNQIGAYLGLVPCQDSSADKNRLGHITRQGPATARKLLVEATWQVIRHSATAKARFERIAGGKKERRKIALVAMTHWLSRVMLAMLRSGEAWREAA

SEQ ID NO: 244079 - protein, 352 aa, unidentified
MAEDPSSVIAVIGIDIGKNSFHVVGLDERGAIVLRQKWSRGQVEARFANMPPCLVGMEACVGAHHLSRQLRALGHDARLMPAKYVRPYSKGQKNDFRDAEAIAEAVQRPTMKFVATKSADQLDLQALHRVRERLVRQRTGISNQIRAFLLERGVAVRQGLHVLRAELPGILARRCDVLSPRMVHLIEDLAGDWRRLDERIESLSGEINALARQDAGCERLMSVPGIGPIISSAMVAAVGAGDAFEKGRDFAAWLGLVPKQISTGDRTILGKISKRGNRYLRALFVQAAWVVLIKPKSWERYGLKPWIEAARKRLHHNVLAIALANKLARIAWSVLARGRGFEARSIATAQPV

SEQ ID NO: 244080 - protein, 405 aa, unidentified
MEIIIERGCGLDVHKGTVVACIMGAGVKKEIRTYTTMTNDLLRLKEWIQEAGITHVAMESTGVYWKPVFNILEDQFEVILVNARHVKNVPGRKTDVQDSEWLCRLLRSGLVSGSFIPPRDIRELRDLTRHKRKLIQAIVAEKQRVEKVLEDANIKLSSIASDSFGASGKRIIEELIKGKLRTEEMAELSKGRLRQKRGELKEALVGQVREHHKFMIKVSLKHIRAMEKILLDVERKIQEKMDRQYQEEYALLQTIPGVKGEASTLIAEMGVDMGRFPSEQHLSSWAGMSPGNNESAGKKKPGSTTYGNKCLKTMLTEFAWVASKTKDTYLRSKYHSLVGRRGKKKALVALGHKILIMCYHILKYRCAYKELGVDYLDRRRRDKIASSYIKRLHHLGYEVILKEAA

SEQ ID NO: 244081 - protein, 376 aa, unidentified
MKIVGCDFHPSWQQVAVFDPETGEIAELKLLNGEGGEAERFYRELEAPALIGIEACGNSQWFIELAERLGHVVWVGDAAQIRASYVRKQKTDRRDAGHILKLLMESRFPRLWTPNAEQRDLRQLLIHRHKLVEIRTRVKNGLQHLALNRGFPKQSSRLCGVRGRAYMEKLPLAGWTARRREDLLKLLAELDKHVDELDEAVERAAKEHPQARLLMTQPGVGPITSLAFVLTIGDVRRFKHSNQVASYLGLIPREHSSGGKQRLGSISKQGNRFMRQLLVESVQTVNRLDEGFRKQYAARCHHKAKGVAKVAAARKLAVRLYWMLRQNVGYPEIARIESSPRVALRGEFGVPGKRTSLAGVNESHLATVNGRSRIQQ

SEQ ID NO: 244082 - protein, 361 aa, unidentified
MHNILALDLGRHNQKTHGATFTHLGGRGPRLTCSTNEVGLTEVFQAAITAGVTAVYFEAQPSAFRVADLARAHGLKPVIANTHAEGFAARARSTKSDKLDVDRLGGMALRGDIVGIHIPDANDRDRRSLVELRASLVGDQTATKNRIRGLAEQHWWDLPDGEACWSKDGLASLRAKTKDRHCRQSLRAHLGILLDQLQAVAKQIDKADAALAQLREDTPEARRLIDELPGFGQVTTDAFMAFVGNPKKTGHSSRSAAAITGLAPTQRQSGKTMIPGPISKAGNATMRGYLVEAAHQAVIRYPEWRAMKERLTKGKDDPVTKGKAIVAVARRLAQTAAALLRSGKPYNPERIMPKHTWSPMT

SEQ ID NO: 244083 - protein, 320 aa, unidentified
MTSNADKIQFALGCDVAKHTITFFDSRTARTFTVSNTTTELRRVLKPYAGCPDMLAICEATGGYEDVLLGVLESLSIPAHRADAAKVKAFIRACGTMAKTDPIDARHIAEYGLVRAPSLPRWQAREPREARMKLLVCRRADLVAMRVQEENRMKAPRNRPIAREIAAHVAEIKRRIDAIDGQIETIVADNARMKQRQAILRTVPGIGKVIAPVLLALMPELGHIDRKQAASLAGCAPHARDSGTYRGRRFASGGRRQLRPLLFTAAMAASHSKSHLAVIYKRLLDAGKSKLTAMGALMRHIVVIANARLKEFENRDLRLT

SEQ ID NO: 244084 - protein, 347 aa, unidentified
MILVGCDLHARKQQVAVLDWETGEVQEVELCHQGEEVERFYAALPRPVTVAVESTGYALWFHALMRQLGHTLLVGDAAKIRAMVVRKTKTDRRDALHLLDLLKHDRLPAIWVPDPATRDLRALLAHRMRLVRMRTMVKNGLHAIALSYRLVGGSKQLTRSRVAELQRLALPVHTGHRRDESLELLGWLDAHIRQLDDRVAEAADGDPGARQLLTHPGVGAVTALTTVLVLGPVRRFPGSKEVASYVGLAPTLHASADKRHLGQITKQGNALLRMVLVQAASVAARYDDDLKRLYLTLLRRRGHAKARVAVARKLLVRLFIMLRDRIDYEEFRRRGRAPHGPRHPVPA

SEQ ID NO: 244085 - protein, 409 aa, unidentified
MLFVGNDWAEAHHDIEIENGDGQVLARRRLPEGIDGLAALHALVGDHLAEDEEPEQVLVGIETDRGPWVQALVAAGYTVFAVNPVQVARYRERHGVSGAKSDPGDAHVLAEIVRLDRAHHRPVAGDTVTAQQVRLAARAHQSMIWMRQRSANTLRSLLRECYPAALTAFGGDLAGRDALAVLAAAPDPAAGRRLTQARVVGLLRRAGRQRNLESRAGEIVTALRSEQLPVAAELAVVNAASVSALVAVITTMVAQTEVLEEQVRLGFGQHPDSEVYLSQPGLGTILAARVLAEMGDDPDRYADARARKNYAGMAPITRASGTKRVVLARYARNRRLADALYQQALSALSASPGARAYYDRHRARGATHHQALRALGNRLVGILHGCLRHHTNYNEDTAWPAPTAEAAAA

SEQ ID NO: 244086 - protein, 350 aa, unidentified
MIIIGCDYHPAFQQIAFVDIETGELQERRLQHREEAEKFYRELAVQGMKVRVGMEASGHARWFERLLAELNFELWIGDAAEIRTKRVRKQKTDRQDAQLILQLLLEDRFPQIWVPSWENRDLRQLLWHRHRLVQARTRMMNQLQAVALNEGLRCRKKLFREAGRKQLEGFRLARWASRRRHDLLELLDRLTPTIAELTQAIEQEVEKCPAAQRLRTHPGVGPLTALAFVLIIGKADRFQCGKQIASYLGLVPLEKSSGNQRRLGHITKQGSSLLRFLLVEAAQVTARSLPDWRSKYYHLSMRRGRKIAKVAMARKLAVRLYWMMRKEWDYGQLTKFGSYAGKPENRDGVK

SEQ ID NO: 244087 - protein, 416 aa, unidentified
MRTRDGAHWAGVDWGQRVHDVCVLDAHGEVLEERRFDNSSKGLGELSTFLSGFADVQVGIETPRGPVVEALLDRDLAVFAINPKQLDRFRDRFYPSGAKDDRRDAYVLAHSLKTDAHAFKAVSAEHPVIVELREWSRMHRELSEERVRLTNRLQAQLRRYYPQLDGFDVPLWSPWILDLFVAAPTPERARSLRRATLVRLLRRNRVRKWTLEEVREALREPGFTVAAGTVAAASAHAETLVERIRVVHDQHQRAAKRLGELTERYRATELGEVDSDEDSSEQHDVDILRSLPGVGKLVLAVLLAEALELLQRRDYHGLRALSGVAPVTRRSGRKLVVLRRHACHQRLAWAVFQWARAAMSNDPEWHARYAALRARGHTHGRALRTLGDRLLRIACAMLEQGTMYDADRLAPVQRAA

SEQ ID NO: 244088 - protein, 386 aa, unidentified
MHQATTVPAPERTCSRGDCATLFVSLELSRSTWVATALAPGSSKMSKHTLVGGDGRKLLDLLARLKTRAEQRIAAPVKVVAIQEVGLDGFWIHRLLEANGVESHVVDPASIAVPRRHRRAKTDAIDGETLLRTLMAWQRGEPRVCAMTVPPNPSEEDRRRISRERATLLQERVRHTNRIRGLLFGHGITNYNPLHKNRRKNLEQLRTGDGRSVPAHLKSAILREIDRLELVLRQIGEVETERDEMLQLAQPSSPAALLMRLKGIGAEFATVLYLEGLFRQFENRRQLAAYAGLAPSPWKSGSIDQEQGISKAGNPRLRSTMVELAWMWVRYQPASALSCWFRQRVGSERGRIRRISIVALARKLLIALSRYVSHGEIPAGAVMKAG

SEQ ID NO: 244089 - protein, 393 aa, unidentified
MPQSNDLSRSLTALDQDSTLIAVVEMSQSSWLVGAIIPGVERRPAKKLEASEGMLLALLHRWRDEAAKAGCTIDRITVAFEAGRDGFWLARWLRQRGIEAHVIHATSIAVSREHRRAKTDRLDAALLQRAFLGWLRGERGHCTMVAIASLAEEDAKRPSREREALVGERTRIGNRMKSTLARLGIRGIRPGLRKAAERLEQLRTPEGAPLPPNTLAELRRDLARLRLINDQIGEIEAARLERLRQQPDEARHPMILLLARVVGIGIETADMLVQEVLSRKLRDRRAVARYGGLTGSPEESGARRREKGLARAGNARVRRGMLQLAWRFLMFQKDSALAQWYRARTADARGATRKTMIVALARKLLVALWKLVTTGELPNGVVLRPAIQAAVRR

SEQ ID NO: 244090 - protein, 391 aa, unidentified
MICVGIDVAKDKHDCFIISSEGVVLADVFTIPNNREGFNCLLGRIQACAMPGNEIKVGLEATGHYSCNILGFLLDNGLDSFVINPLHTNLYRKSLSLRKTKTDRVDARTIAAMLMSDVGLKPYTDTAYHNEELKSLTRYRFDKVRERAQLKQSVSRLVCILFPELEKLVPTLHMASVYALLDEFPGAQQIADAHLTHLKAVLHDASKGRYGRDRAIELREAAKASIGSRMPAKSLELRHTIRLIRELDAEIDEIESAIQQIMDEIHSPITTIPGIGTRMGAMILAEVGDFSRFDSPDKILAYAGLSPSTYQSGQLTNCYAHMEKRGSRYLRFAIFNAAKYVCLWDPTFAAYLAKKRAQGKHYNVAISHAAKKLVRLIYALEKSREPYHQAA

SEQ ID NO: 244091 - protein, 425 aa, unidentified
MHSKHYSKQMEKRQRITDHTLVIGMDIGSEFNAACFMDKEGNILGRYPTIYNSRKGFDYFQTMLTKTRRKHRFTDVLIGMEPTGHYWRKIAFFAKEKGYDVRFVRTTAVKHQRELDESSSARSDIRDAYTIGNIVREGKYIDTVIEESVFRQLRTLAHARERILRYIVGSTHGLQAHLNDYFPELRQLFWSMKAKGLWSLLETYPFPEDVRDAGCAAVVTLLSKGTGKKRRIREQAAQVYQAAVESVGLKAITKADRARLAMYLEEIKRSDARRRLLEGEMKELLKEIPCAQYILSLPGTGKVGCAVFLGELGNPEYFNNPRQIIKYAGYDPKENDSGLRVGRKIISKKGRWLLRKCLFFMVLRLVQRSSFFKTYYEHKKKGFDRPLEKTEALCAVILKLIRVLFALMRDRRMFTEELPRCEQAA

SEQ ID NO: 244092 - protein, 340 aa, unidentified
MNLTTLGIDLAKTSFSLVGMDQHGKVVLRKTLSRAKLLPFIAQCPTCLIGMEACSGAHYWAREFTKLGHKVGIIASKFIAPFRKGGKNDNNDAEAICEAVGRANIWFVPIKTAEQQAQLCVHRVRQGLVSERTALINQLRGLLSEFGIVMPKGRYPAQREIPLILEDANNGLPMLARQMISNLWDRIKIANEQVLFYDRELHKQAHHHPVAKRLLTIPGVGEQVASAVVASVPDPSLFKDSRQFAAWFGLVPRQHTTGGNVRLGRITKQGDRYLRMCLVHGARSVLANLKDKQDKISCWARELIARRGYLRAVVAMAARNARLIWTLMVKQEDYKVIAAN

SEQ ID NO: 244093 - protein, 348 aa, unidentified
MTDETPQITVGVDTHTDSHTAVAIDHLGRRLDQIEIQADAAGYRCLLEWARQLGELSRIGVEGTGSYGAGLSRFLTDSGVTVVEVGRVNRQHRRRYGKSDPADAEAAARAVLSGQQNGIPKSRDGIVESIRVLHVVKRSALKARTQAANQMTGLIVTAPETTRDELRGLTALKRAQRAAKWRPGTGHDPTTVTRRAIRALARRWLELTDEINTHNRDLDEMVQLAAPNLVAEQGVSRDVAAKLLIAAGDNAERIGTEAGFAALCGVNPVSASSGKTNRHRLNRSGDRQANNALWIIAMVRLSRDPETRAYRDRRKTEGLSHREIVRCLKRYLARRLHPILLKDLAALT

SEQ ID NO: 244094 - protein, 344 aa, unidentified
MTPSAAPAYQLFVGADIAARSFTAAWGRAASPLGRPARFAQTPDGYSALQQALAATGIAPAATLVVMEATSTYWIQLASALHTAGYHVSVVNPKQAHDFAKAVLQHAKTDPLDAKMLAQLGAKLTPARWTPPPAIYHELQQRLAWRDSLVALRTQVSNQHHALLHEQVVVHAVATSQSALIADLTRQIAAVERELAAVIARDHAWATSIVRLQTIPGVGVVTAAWLVAATANFTGCPTVEAATAYVGLAPHPWQSGSSVRGRGHVGHQGHARLRQALYIAAVSAIRCNPILRSFYARLKGAGKPTKVALCAVARKLLHLAWALVTKERTFDPEYGQPPSEAVAA

SEQ ID NO: 244095 - protein, 344 aa, unidentified
MQIVRIGLDLAKYVFEIHGVDAHGKTVVRKTLRRHAVSAFFANLPPCLIGMEASNGAHFWAKALSDLGHDVRLISPQFVTPYVKSNKNDRNDAEAICEAVGRPNMRFVPVKSAEQLAVQAVHRIRSRLVADRVRLVNQVRGLLGEHGIVVAKDIGNLRRALARIVGDNEDHALHDLVRALMAELREELTELDARIAGYDRKIRELYRNSEICQRLGKVEGIGPVTATALVAAVGDRSSFKNGRQFAAWLGLVPKQRSSGGRARLFGISKRGDRYLRTLLIHGARSALGRVRDKQDPRSLWLGRMRQRRHPNVVAVALANKNARIAWSLLASDSAYDASLSVGAA

SEQ ID NO: 244096 - protein, 337 aa, unidentified
MNYVGIDLHKKTISVCVVDHNRAVLYRKRFYCDDLQAIEAFFKQLGPFRAVIEATASYEWLFQRLEPLAERVVLAHPQKLRIIAESTRKSDQLDAQVLAEFLALDMIPEAYRPTPRERAHRRLVRQRVHLQKRIKGTRCKIRAILADYNADRKDLFTIEGLKYLGRAKVSEQDRFVLDQLTTEWQFYVDQCGALDRCLREFAKSAKLKEAEARAVLDSIVGVGPVTTEVVLSELGTLTRFRSQKRVCAYAGLVPGQRESAGHRRDLGITKQGSPLLRWVLTEAAWRLVGKSQYWRTIFEALAKRRGRKRAIIAVARRLLCVMVSMLQSGRRYQAARV

SEQ ID NO: 244097 - protein, 347 aa, unidentified
MLADELDFVVGVDPHRDLHAIAVVEVRSGLVVFETRVTADSSGYVEALRVAKQHAPGRRAFAVEGTGSYGAGLTRFLADHGEQVFEVGRVRRARCSGGKTDALDAVRAARSVLEQKRPATPRSSGEREALRALLAAREGAVNAKRAALCQLRDLLVTTPEPLRSELRPLSRARLLSRLSATRPERRQDPELRGTLLALRAVARRVQQLSAEERELAREIEQLTSKLAPQLLSQPGIGPLLAAQIVLSWSHRGRLVSEAAFARLAGAAPIPASSGQTTRYRLDRGGDRQLNRALHQIVVTRRRTHRPTIDYIERRVREGKSRREATRCLKRYLARNLYRLLEHPPLTT

SEQ ID NO: 244098 - protein, 437 aa, unidentified
MAQSKPEMTLAIDVSLDQLDVALRSQSGEWLWPHQAYSNTWTGYQALKADLLAALGAESPVQLTAVGESTGPYWWHVFYHLSHEADLADYEPQLALLNPLHVKRFRQALPEADKNDLLDPQLIAGYYRAIGVKHLYQFNERYLPLRAVSRAYARLTHTLAAEKAFLLSVLYLSCSDYQRQMPFSDLFGATSSYILTEYADMAAIAELELEPLSAQLQQIAKGTLPDPAANARRLQQVAQEAYPVPQALADALHQVLKHTLAHIRFLSDTQKAYQALIRLHLDHLPEANLALEIPGLGPVLVAGFLAEIQDTQRFTSGTKFDRRRKTHRPRTYRDGQAAVAKLAGLWWPERASGRFQAQDLHLSRERNPYLRYWFVQAAHTLQRYQDDYRVYYWRKYHEAQHHHHKRALLLTARKAVRLVFALLHKGQRAALGEAASA

SEQ ID NO: 244099 - protein, 428 aa, unidentified
MADAANATPPCNLVAIDIARYWNAVLIETADGKRHRFKMANTAADFDRLVEFLHGLLGVCRVALEPTGDYHRPIAHRLLVEGFEVVGINSVAQSRYREAMFNSWDKNDPKDAAVILEMLRRGAFQRYVDPMLAGNHDLQELAKTYYQVSRARTKVQHSLINHCLPLYFPEMHRYWATTRNEWFVRFLLEFPTPAHVRALTCDQFVEAAWGVVGRKVDKRAKLQELWEMAGTTAALPHAPDSLAVETFRITLRRYQGLNVLRTELEIRAEQALAADADFAHLKTLPGIGSVLAMTILAEGGNLHRFGHHRQFLKYCGLDLAKNQSGTQRGKEQLSKRGNARLRLAFWLAAVGAVRMRENSFRAKYERYIRPAPDDADLRRKALTAVAAKMARVAYGMIKKNQPYRQFHEQSLPSGSIPLSAAVGALATP

SEQ ID NO: 244100 - protein, 366 aa, unidentified
MVSTESERVRSNHHRETTMDYYAGIDVSLKSSSVCVVDANGKIIREGVVTSEPETLIAWFASLGYPMRRIGLEAGPLSQWLYAKMKEAGLAVELLETRRVRTAFEIMPVKTDRKDAQGIAELMRLGWFRPVHCKSLGAQEVRAVLTARKLVQSKLLDIENSLRGILRGFGLKVGETTPRSFAGRIRELVAGHPNLETIGEALLSVRDVLLREFNAFEKSVRAMARSDAKTKLLMSAPGVGPIVSLTYASAIDDPARFKSSKQVGAHFGLTPKRYQSGETDRSGRITKIGDAAVREALYQAAHVMLTKPLKGCTYLKSWAMRIAKRAGMSKAKVALARKLAVIMHRMLVDGTAFNPNATVNAVAAAT

SEQ ID NO: 244101 - protein, 409 aa, unidentified
MNTGTITAVGIDVSKHKSTVSARRPGGEVVLLPFDVEHTAEGLKKLVAKLRQLDGEIRIIMEHTGMYWRPIAMTLKEAGFYVSVVNAILIHNFSDNSIRKVKTDRADAMKIANYGLTFWIDLQEYAGEDENRQLLKIQSRLYERTATTAGMLRNGLISLLDQTFPGANKLFRDESRNSRGHVKWIDFVLRFWHKECVAALSLAAFTDTFQKWCKRTGYKFSASDAERIHAIARNAVATLPKNDSTKLLITQATNSLNAIYDSLQAIRTEMDRLASMLPEYELVMGMEGIGKVTGPQLMAEVGDVRRFSHKGALVAYAGVDASPYQSGSFDSKSRHVSKRGSPHLRRVLFVIMSMTLIRANTANPVFCFMDKKRAEGKHFYVYTVAGSAKFLRIYYAKVKEYLNALEETA

SEQ ID NO: 244102 - protein, 325 aa, unidentified
MEKIIIGIDVSKLTLDICIQENGVNRFDNIPNTEKAIKVFFKQFDIKQEILIGMENTGRFNAILYSVLVHFSFTVYVINPLHLKKSMGLVRGKNDKIDSERIAQFLLKNYMDLQLWKPNSKVIEKIKLLNAERKHRVKIRAGLLAQTQDDQFLKPTMDKAVLRLNTKLIDILTKQINEIEDRIYQLICEDEQLYDHYKRIQSIPGVGKVLAFNMLIKTDGFTTINTPRQMACYAGVAPFDFQSGTSIKRRPKVSTMADKELKKLLHLAAMSAIRLENDLAIYYHRKVEQGKNKMAVLNAVRNKIIHRIYALIKNQTIYKNNLVLS

SEQ ID NO: 244103 - protein, 305 aa, unidentified
MKKIHVGIDISKEKCNLCFRSGLEIVREEECSNDVKAIKKAFKAALKVLGASVDEVLVCAEYTGRYIYPLTVACEELDIFLWLDDPTRIKNSMGLTRGKNDVIDAARIAEYAFRYSDKAVRYCIPDAALVSMKNLLADREFLLIDRKRYQSQLTDQKKYMAPGDFKHKSSRWKKVIKSIDEQIAAIDTEIETLIAADPVFTRQKELLVSIDGIGERIAINMIAITGGFTRFQNARQFCSFAGLTPYKYDSGTSVRSKAKISKRANQTMKALLHLAAVSAATHMKEGEYKDYYERKLRKENTLCAC

SEQ ID NO: 244104 - protein, 338 aa, unidentified
MSVALLSIDLAKNTFQLYGVDQSGHPVLSRRVTRNKLLEAVVCLPPCRIVMEACGGAHHWARRFSAMGHQVHIIAPRFVKPFVKSQKNDRNDAEAIVEAASRPTMRYVAINSVEQQDIQSMHRIRSLLMRDRIAQINQIRGLLAEYGVVIAQTPLKVRIQLPTIIDDERNELTALTRTMMRDMYERLALLDRQIARYDELIQQVHKASPTSQRLEKIRGVGPMIATGVIAAAGSASEFTNGRQFAAWLGLTPRQHSSGGKDRLFGITKRGNGYLRMLLVHGARSVVQQAVRHTDKLSRWILEVQARRGTNVAVVALANKIARTIWVVLARGQEYAPPV

SEQ ID NO: 244105 - protein, 351 aa, unidentified
MKRFIGLDVHAASTTFAVMSEAGKRLGSHVVETNGQALVEQLKVIPGKRHVVLEEGTQSAWLYEILSPHAEEVVVAVVSESRGQKNDERDAFGLADRLRTGAINRKVFKEVGAFHTLRELGRTYTTVMQDSVRVKNRIKALYRSRGIAVAGKSVYSEKGREEFLEKLPDATRASAKTMYAQYDAVEAIRQQAEKDLVKEAHRHAISHVLETCPGLGPIRVAQMMPIVVSPGRFRTKRQFWSYCGLGIVMRSSSDWVQKDGGGWTRAEVQQTRGLNMAHNHTLKNIFKGAAMTVVVQLGEREPLHQDYQRLTAAGTKPNLAKLTIARKIAAIALSMWKGKERYDPTKHRKKE

SEQ ID NO: 244106 - protein, 360 aa, unidentified
MNKIKPLDFTGDTIFCGLDVHKLSWRVNIRDKDMELKDFTQPPDAFTLHKHLSKNYPGAHYKVGYEAGFCGFSIQRELAALGIECLVLNAADIPKGDKDRKQKNDKRDARSISQHLSNKRDVKALYIPSTQWEHARSLVRNRQQQISDSTRCKCRIWQFLYFSGLPIPDKAETGQYWSGKFITKLQQMDCNNSAELKAALDIKLQDYLHKRKLLLESTRAIRKMYRQSSFWPLMKLILTIPGIGEINAAIILFELQDIFRFKTFDNLCSYAGLIPDTDDSGDTRRSKGLTHRRNNFLREAIIESSWVLAKKDPAMLMKYKDYCKRMHKNKAIIKIARHLMARINYVLRKQTSYVSGLIAG

SEQ ID NO: 244107 - protein, 316 aa, unidentified
MSQFNVFVGIDVSKDRLDVHLLPDDKTWQFANDEAGCAELSERLRGLSGPVLVVMEATNVFWRLAATRLASAGLSAAVVNPRQVRDFAKATGQLAKTDAIDAQVLALFAQRIEPPVRALPSEQCQVAAELLARRAQLMGMRVAEKNRLATARAAKVRKDISTTIAFLEKRIGALDEEIDQWLKSTPIDQSRVNLLKSFAGIGERTAKSLLITLPELGSLTAKQIGALGGLAPFARDSGNKRGQRQIRGGRTTVRAALYMPAITAIRCNAVIRALYQRLINAGKHHYVAITACMRKMLVILNAMLKSNQPWKNPQEG

SEQ ID NO: 244108 - protein, 355 aa, unidentified
MVVVGADVHKRTHTFVAVDEVGRKLGEKVVVATTAGHHKALRWAGKQFGAELLWGIEDCRPLSARLERDLLSAGQKVVRVAPKLMAQARASARTRGKSDPIDALAVARAVLREPDLPVASHDPVSRELKLLVDRREDLVAQRTSTINRLRMRIHELDPAHAPALGSLHRANPRRMLADWLATQPGLLAELARDELADIDRLTHAIDALAARIGEHIEVAAPTLLTLHGCGDLTAAKLVGETAGVARFKSEPAFARHAGVAPIPVWSGNTAGRVRMTRSGNRQLNTALHRIAITQIRLTGSAGHTYYRKRIDAGDSPKEALRCLKRRLARIVFCRLRADNHPDHAFHTSATTCPLT

SEQ ID NO: 244109 - protein, 371 aa, unidentified
MKNTIKYVGMDVSKEKIAVAIADEGREPSRYYGSIAHTPDAVGRLIRKLKESGVTLEVCYEAGPTGYDLYRWLTKMGVSCTVIAPSRTPQRPGDAIKTDRRDAERLAQLHRSGELTAIHVPTPELEALRDLIRAREDAREELHRVRQRLIHFLLRHQIHTPEGMKRRWTQRYRLWLSTLTFEHTAQERVFTESLQQLREVEERIKRLEEAMREEAAICPYASVIQALQGLRGIALLTAMTLVVEIGNFERFRSPAQLMSYLGLVPRENSSGATTSRGHLTKTGNSSVRRALVESAWSYRHRPAVKGDLEKRLEGQSAHVQETSWKAQERLHKKYIRMVKRGKHRNLVIAAVGRELVGFIWCIAVKAEAEIA

SEQ ID NO: 244110 - protein, 343 aa, unidentified
MTTDTMIGVDLAKSVFQLHATSMSGQPMYRKKLSRQGFAEFMAKQAPAVVVMEACGSAHYWAREISRLGHKVRLIAPHYVKPFVKRQKNDAADAEAIVIAAQRPEMRFVEPKSEEQQSRAILFRGRERLVRQRTELINALRACLYEYGHVVPQGIRWLTKIEDILTAPNCDLPELMREESRDLMKQIAEQTVRIDARTAKIKDLAAEGDTARRLQTIPGVGPMTALAVEAFAPPMESFRSGRDFAAWLGLVPRQFSSGGKERLGRISKAGQGDIRKLLIIGAMSRLNWLGRQSIPDGSWLAGLAARKPRMLVAIALANKMARTIWALLTKNENYRNSVLTAAA

SEQ ID NO: 244111 - protein, 345 aa, unidentified
MQFFVGIDVSLESSSICVIDERGVVIKEGTAPSEPEAIGRFIRHQGRKVEHVGLETGALSQWLHAGLVRQGFNVSVMEARHVHAAFGAMRVKTDRNDARGLAQLIRLGWFKFVHVKAPSAQETRALLNARQFLVDKVTGIENSMRANLRNFGLKMGVVSRKTWPTRARELARGIPALEMLVEALLKVRDVLLQELRTLDRKLLETARADPIVQTLMTAPGVGAIVALTYRNAIDDPSRFKRSKDVGPWLGLTPTRYQSGQIDRRGHVTKAGDGSVRTALYEAATTLLGRVVRWSALKNWGLRVARRSGMKKARVAVARKLAVILHSMWRTQSPFAWAADKEGVSA

SEQ ID NO: 244112 - protein, 369 aa, unidentified
MEQCSTIVGLDVHKETIAAAVLPPGAERVVETLKIPNTQSALEALVRRLQPRGSLAFVYEAGPCGYEVQRQLSVLGQPCAIIAPALTPRRPGDRVKTDRRDAEKLARWYRAGELVVIHVPSRAEEAARDLVRVREDALEDRLRARHRLSKFLLRQGRVYRATKAWGVAHRQWLKAQRFDWAALQQTFEAYVRTLEETEARLAALDEALQDLAQQAAYRPAVAALRCLKGVNTLTALTLVVETQDFRRFPTAAAFMSFTGLVPSEDSSGARVQRGSITKSGNAHLRRVLVEAAWCNRHGQVVSRELTLRRQGAPPAVLRIARKAQARLHRRYWRLLHRGKLHTVAVTAIARELAGFVWAIGQHIGVTTTG

SEQ ID NO: 244113 - protein, 339 aa, unidentified
MELYAGLDLHSRNTYIGIMDKAFNRVFKKRVPNHLELILQTLDPFRDQIKGFVVESTYNWYWLVDGLMDAGYSYAHLANPSAIKQYEGLKHSDDQHDAFFLAQLLILGILPQGYIYPKKDRPVRDLARKRMFLVQHKTAYILSLQSLLQRCCARKVRANDMRHLTVKELEMWLEEEHLVLSAQANLDSINFLKQKIKQLEKAIIQKVKLNKAFKYLLTVPGIGNILAMTIMLEVGNINRFPKVGNFTSYCRCVPSRRLSDGKSKGQGNRKNGNRYLSWAFTEAAQLGRRHNERFRRYYNRKVAQANTSLATKALGNKLARICYYIMRDQVPFREELFCH

SEQ ID NO: 244114 - protein, 402 aa, unidentified
MNSVGIDISKGRSTIAVMRPFGEVVISPFEVRHTDSELSKLARRLKSLNGETRVVMEATGNYHAPVAKLLHDAGLYVSVVNAKLVHGYGNNDLRRVKTDRKDAVKLANYGLDRWLTLPRYIPEEDTRLLLKNCYRQYRQYSKVQTILKNNLISLLDTVFPNVNRLFSSPARADGSEKWVDFVAEFWHCRCVSEKSEKVFTNKYQRWCRKHGYNFSEEKAHTIYVEASGHIGVMPKSETTKLLVEQAVAQLRATSAALAALKHEMQSLASMLPEYPVVMDMFGVGPTLGPQLIAEIGDVRRFYSKKALVAYAGLDAPPNDSGDVTGRHKSMSKVGASSLRRTLFLVMSVYLQNAPLDEPVYQFMDKKRAEGKPYRVYMMASANKFLRIYYATVKAYLESLEQV

SEQ ID NO: 244115 - protein, 319 aa, unidentified
MKRDDLSRSLVAFDQASSLVAVVELSLGSWLAAGLVPHLSRQPLKKLRADPDALLGLLWRWRDQATKAGGRIKRIVVAFEAGRDGFWLARWLRARGIEAYVIHPASIPVSREHRRAKTDRLDTGLLMRALLGWLRGEAKHCSMAAIPTVAEEDGRRPTRERETLVREQTRAVNRIKSALIRFGIRAFKVKLRQASKHLEELRSPEGEPLPPNTMAELRRDLARLQLIRGQIREIERARLERLKRAPRQGTHPMMRMLARIMGIGIETADMLVHEVLSRKLRDQRAVARYGGLTGSPDESGSKRRERGSLEPAIGGCAAA

SEQ ID NO: 244116 - protein, 368 aa, unidentified
MGQKSSKLYVGMDVHKESIDIAVAEEGGEVRHHGQIGGDMNALWRAVRKLESSGRELVFVYEAGPCGFGIYRGLTGRGHSCWVVAPSNTPRRVRDRIKTDRRDSLKLAGLARAGELTPIYVPDVRDEAMRDLVRTREDAVMMQRQARQRLAALLLRNDVRYAGKTAWTAAHRRWIAELKLPQCAQRLAFEEYVQAVEEASARVQRLSQCIEQELATWRWRSVVAALQACRGIQLIHAVRIVAELGDLSRFSHPRRLMGYLGLIPSEDSSGEHRQQGAITKAGNSSARRALVEAAWAYQFSAKVSALIARRQADVPKAVLDIAWKAQVRLCARFRRLAARRVNRNKIVVAIARELAGFVWAIAQHVKPV

SEQ ID NO: 244117 - protein, 386 aa, unidentified
MPPGTHHCLVHLARLVRAALPGRMEKDGQSTMAHTSVEVTGGVDTHKDTHTAAALDGAGRTLGTAQFPATATGYAALLAWLTGFGRVILIGVEGTGVYGAGLARYLRRHGIKLVEVDRPDRKTRRWQGKSDPVDAEAAARAALADRATGIPKQRDGRVEALRNLRVARRCAIAHRADIQRRMHALVVTAPEELRQHLRTLSAVELIRTCAALRPDPDRAGDPATAAKLALRQLGRRHAQLSRDITDLDEVITPLVTAINPALLAVYGVGPDVAGQLLVTAGDNPDRLRSEAAFAMLCGAAPLPASSGKTSRHRLNRGGDRHANSALWRIVITRLAGDPRTRAYRDRRIKQGMSKPEIIRCLKRYVAREIYELLTTPKDLAPTPCKP

SEQ ID NO: 244118 - protein, 370 aa, unidentified
MSVRRILAKTIDTDLEYEAIGIDLAKNCVSAALLTTDGEVVCIDRLDYSELEKSAQALSPTTFAMEPCTEMNYLVQKLEAWGHRCLVIGGKNVQNYVENHFSGQKTDLNDAQALAFLAQDTQLRTIKAKDVEQQKYASLTTLREQYIKQYRQTIVTLKGICQAWGLNISKGISGKARLKDLIENHAAFPEELKESLVDMVTHAQTAQKALNKITKTLEELAKSDKVCQLIQTIPGLGSICSCRLRATIGDIKRFKNPKDFPAYYGLVPRSIATGHNEKKGKITHRGDRTMRSLMVQGAGSVINMATRGKLKSKQLTKWILKKQKEKMPWGKLVCAVAAKLLRIVRAVLISSKPYNPQIAGVAKCSLPKGS

SEQ ID NO: 244119 - protein, 324 aa, unidentified
MATTRHTLGIDIAKASYQVSLKRTDGKRRQKSVRNTPAGHAALIEWLHRHADAPVHACLESTGTYAEDVATALIEAGHQVSIVNPAAVKAFAQSQLRRTKTDGVDADVLADFCAALAPALWTPWPVEVRALQGLVRRRDAVQDMLTQERNREAAGGLTTSVAASLARMIEVLEAELADLDRQIRNHLDQHPTLRAQRDLLSTIPGIGVATAARLLTECRAITAFETARAYAAFAGLVPRERQSGQRRPRAHLSKLGSPRLRYAMYFPALTAMRVQGPVQTFGARLRAAGKPKMVVVAAVMRKLLHIVYGVLKHQRPFDPQVLGA

SEQ ID NO: 244120 - protein, 344 aa, unidentified
MDIAVLGVDLGKNVCSVVGLDKSGAVVMRRKVRRETLIALAEKLPPCVIGMEACCGAHHLGRLFAAHGHAVRLMSPEYVRPYVKAQKNDDRDAEGIAEAATRPTMRFVELKSQDQLDMQTLHRSRDRLVGERTALINQLRAILLERGMVAPQGKRKLEQFLAVLMDGQGGAGLSSRMIVLVADARKQWAELDRRISAFDAEFVRWARENEDARRLTTIPGFGAIVASALVAAVGRAEAFDRSRDLSAWLGIVPRQFTTGGKPKLLGISKRGNTYLRKQLIHGARAALPFIAERDTPLGRWAKGLMSRAHRNVAVVAFANKLTRIAWAVLRRGERFAAGGLSMAA

SEQ ID NO: 244121 - protein, 361 aa, unidentified
MLYRTSIGLDVHARSIAATAFIPETGEIVQKAFPYDAGKVAEWAKGMPQPARCVYESGPTGFDLKRELDKAGVPCVVGAVSKMLRPSGDRVKTDRRDATFLARMLAVGNIVEVAMPTEAMEAARDLARAREDCRHDLMRARHLLSKFLLRKGIVYPGKTAWTKAHREWLGRLEFADPCERLVFGEYLESVRSLELRRARLDRAIEERAAGEDMAPAVSALRCVRGISTVTAFSIAAEIGDFSRFPDARSFMSFVGLVPSESSSGESVSRGRITRTGNIHVRTLLVEAAWQHARPLRPTSAAAMDDAAGVPADVAEAAARANRRLHSRAAHLRGRGKPASVVNAAIARELAGFVWALARMAG

SEQ ID NO: 244122 - protein, 370 aa, unidentified
MKEPTTSYIGLDIHKESIAIAIADSGRAAPRFIGTINPVPAELCKAMRRVCTKETTLIVYEAGPCGYGWVRYLRKQGWACDVIAPSRITRQPAEKRLKTDRRDALLLARESRAGNLTNIVVPDERDEAIRDLVRTREDVRIARHRVRLQMQAMMLRHGRHYQGKRNWTQAHDRHLSTIRFEHPAQELAFNEYRLASKEACERVERITEALRVQCEDWRMNPVVKALMCLKGFDFVAAVTFVAEMGDLTRFAHPRALMAYLGVVPSEFSSGASRRQGGITKSGNKHARRILVEAAWNNRFKAQVSRELEVRQEGHPKIIRDISWKAQLRLSKRWRSLSMGRKLAQNKICVAIAREFAGFIWDVARHVKVKA

SEQ ID NO: 244123 - protein, 346 aa, unidentified
MLYAGLDLSRKRLDFHLLDAEGVSVEVGASPPDLDGLRGLTERVGRHGAPIRAAIESMNGARFVHDRLELAGWQVEIADAQKVKGLAPLACKTDRIDAWVLAELARRDLVPAIWLPDPLVRAERERARWRLHLVRHRSSLKQRVHAVLLTHGKPCPVSDLFGVRGRQLLCRLGLPQPWQGTIEASLRLIDELDREISACERELRRLGAEHRYVPLLCTVPGISWVLAYTIAAELGDINRFPSPRKLVGYTGLCPRVYQSGERDLRGPLTKQGPRYLRWALVEAATHACTAPVYRDRYQQTKARIGKQRGAKVAQIDLARRLTEAIWHMLTRNQPFAPKGATDPLAA

SEQ ID NO: 244124 - protein, 342 aa, unidentified
MEYYVGLDVSLKQTSICMVDQTGLVVREGVVDSDPEAISVFVRSKAPGAVRIGLETGPTSTWLWTELKRLDLPVICIDARHAKAVLKMQINKNDRNDAIGIARIMQTGWFKEVHVKDIDSHSVRALLASRALLVKIKRDLENHIRGLLKNLGLVIGRATFNVFAVRAEELIEDRPDLVAAVRPLLEARNAVEQQVSELDRKVMKLARRDAQVQRFMTVPGVGPITALAFKATIDDPARFARSRSVGAYVGLTSRRHASGEIDWSGRISKCGDGMPRSYLFEAAGVLLTRVPKWSTVKAWGTRLAKRNGLRKAKVAVARKLAVILHRMWIDGTEFNWSKEVAA

SEQ ID NO: 244125 - protein, 412 aa, unidentified
MSRALSEALFFVGIDWAAEEHAVCVLDPTGKIVSQFMIKHTADGIAALISRLVKLGEPADIPVAIERPNGRLVDLLLEAGHPVVPVKPNAIKTWREGEVLSGAKSDAGDAVVIAEYLRLRQHRLHIAAPYSGQTRALRTVMRTRGDLVGMRVAATNQLAALLDAHWPGAKAVFADVESPISLAFLTRYPTPASAATLGEKRMQAFCVKHGYSGRRPAIELLRRLRDAPAGTTDEALTEALRDGVLATVGVLTALNAAIKDLDRSAVAHLGEHPDGAIFTSLPRSGQTNAAQMLAEWGDCRQAYETPDSVAALAGCTPITKQSGKHQAVHFRWACNKRFRQAMTTFADNSRHASPWAAQIYHQARAAGKTHPHAVRILARAWIRIIWRCWLTTTPYDPTKHRALQRQTKHTAA

SEQ ID NO: 244126 - protein, 410 aa, unidentified
MDTLIERCGGLDVHKDTVVACVRVPARGGGREQFIQTFGTTTVQLLALRDWLVAQGVTRVGMESTGVYWKPVYYVLEDALECWLLNARHLRNVPGRKTDVADAAWICQLVEHGLVRPSFVPPKPIRELRNLTRYRKAQIEERTREAQRLDNILQDAGIKLSSVASDVLGVSGRAMLRALIAGTRDPETLAELARGTLRRKIPALRQALHGRFGPHHALLVGTILAKLEFLDEALEHLSAEIEQVIAPFAAEAALLRTIPGVDRRTAEAVVAEIGVDMSRFGAAGRLASWAGWCPGNNESAGRHGPGKTRKGSKWLHTYLTEAAKAAARTKGTYFGAQYARLRGRRGPARATVAVGHSILVAAYHILDRHEPYRELGPDYFRRRHSREHQTRRLVRQIEALGYHVRLEEVA

SEQ ID NO: 244127 - protein, 370 aa, unidentified
MRIIGCDLHARQQTLAMLDTTTGEVMNLTLMHEGDQVREFYSELPRPVLVGIEATGSMQWFLNLMEELGIECRVGHPAQIRAAEPRKQKHDRRDADLILKLLAENRFPAIWLPTKELLDLRALLLHRHQWVRLRVRLQNVLQAIALANGLRRGPSLWSYDGQAKIAFLPLMPHTAYRRSALQAMYKTLESEIENLTQQVAEQAGNRSGARRLMTHPGVGPVTALATEVFLGDPQRFTDSKALASYVGIIPREYSSGGQQRLGGVTKQGSPLLRFLWGEAGAHAARRDPELKRFYRRKLVHKGLGKARVAVARKLGIRLWIMLRDEIDYQEFCRRGQMQQKTVRPVAGMPETGNGAKSHRPDDEATRLPES

SEQ ID NO: 244128 - protein, 352 aa, unidentified
MQYFIGCDVHTRNQMVAWIDEQTGEIKKRRLEHEGKEVREFYTQFPRGTVVGIEATFPAHWFERLMGELGHELWVGDAARIRASEVRYQKTDSRDAELLLDLLRTGRFPRVWVPTLEERDLRQLLVHRMKQVRTRTQVKNQLHALAISQGVCRKGKLWSVKGRKELESLALLPWAARRRKELLESLDRLDEQVRELDRAVEEAGRARPEVALLRTHPGVGMVVGLAFVLTVGPVERFSNSRKLVSYWGLNPRENSSGGRQRLGSISKQGNTMMRWLLVEAAQTAARLDPQLRRLYQRLKKQKTSALAKVAVARRLAVRLFWMLRTRHNYTQLVHMSGSPSSAVVPPTVEPKV

SEQ ID NO: 244129 - protein, 394 aa, unidentified
MKLVGIDVGKNSHHFCVMDKETGEFNVTPSSFPNNKEGFDFLINSLKPYSKKSILLGMEDTGHYHVALLKFLLSNGYTVALINPKTTDLTRKMEGGITKNDKLDTITICDVLDTPERKKQYRITKVDRFDLYEQRQLTRHHHNLKEELNIYCNRLQKSIDLVFPEFNTLFGSKYGVVYMNLLKTFGSAEAIASTDIRTIRKCFEIKGRGGRISLTPEKLKECAKNSIGISSEVETIQIKHLVSQIMLIKEQIAEIDKKIEEFSIKNNSPILSIPGISHFSGTSILAELGDIGNYSKPSQIIKFAGVAPYHYESSQYNAQHTAITKKGSKYLRKTLYQIILPVINNNPVFKKYYLLKISQGKGHRCAQGHCIRKLLRIIYHLLETGQSFDPALLR

SEQ ID NO: 244130 - protein, 363 aa, unidentified
MNYIGVDLHKKSITICVLNENLKVLARKTVFCDQTDQIVEFFRQYRPFKVVVEATASYLWFVELVEPLAEEVVLANPKKLRVIAESTKKTDRLDAQVLAEFLARDQIPRAYMPTPRQRQHRRLVRHRQYLRQRMTSVRCKIRHILSDYNADRKDLFSTQCGPAYFKEIALSDADRFVIKQLWSEWQDHQSRLLALTKKIKAFIVKAPNREKETRAILKTAPGVGFVTAEVIVSEVGDVSRFRNAKQICAYAGLVPVVRQTGGKKSKDLRITKEGSGLLRWALVESAWRLVKTSPKWSAFFSQLRKRSGSKRAIVAVARKLLCVLYAMLKTSTPYKIVATQTKAPRPTRRRLVRKSSAKETVTT

SEQ ID NO: 244131 - protein, 399 aa, unidentified
MKATSQPVQPERSFIGIDYHKRYSVFCVIDGAGHILERGRIEHHFPGQFAALVKRYPKCRVVFEASMNWPWLYELLELAVPAQDIILANPLKTRVIAEAQVKTDKVDAHILAQLLRADLVCTVHIPTKETRQRKEVLRQRCFFVRQRTRLRNRVHRLLGAQHGLKLPQCSDLFGKKGMSFLEKLELPAPAGLLLKQQLEMLKTLQMRIKEDEAALEQMVSPSGDHERVLSLPGMGPILAAVVVNEIDGIERFTSAQKLCGYAGLCPSTSSSGGKTYQGKLMRHCNKWLRWGFVEAAWVSIGCSSYFGDLYKLKRAAGKKANTAILAVARRMARITWQLLTQKRVYETVAPAPKVRSKPAATKVPEANAKDKARSASAQGKQSKAKHNFPSRSNCRLIGR

SEQ ID NO: 244132 - protein, 370 aa, unidentified
MSIKRILVNTIDTDLEYEVIGIDLAKNCVSAILLTTDGEIFGIDRLDYQELEKSAQELSPTIFAMEPCTEMNYMVQKLEDWGHHCIVISGKNVKDYVESHFSNQKTDLNDAQALAFLTKDTQLRTVKAKDPEQLKHASLTTLREQYVKQYRQTMVSLKGICQVWGLSISKGISGKARLKDMIENHAAFPAELRTALVGMVAHAQAVQKDLKSVTKILEELAKKDKACQLIQTVPGLGTICSCRLRATVGDIQRFKHPKDFPAYYGLVPRSMATGHNEKKGKITHRGDKTMRSLMVQGAGIVINQATKGNLHSKQLTKWILKKQKEKMPWGKLVCAVAAKLLRIVRAILISGKPYNPKIAGVAKCSLPKAS

SEQ ID NO: 244133 - protein, 347 aa, unidentified
MTQINTIGLDLAKQVFQVHGADAEGAPLFNRRLRRAEVLRFFEKQPTCLVGLEACGGAHYWAREIAAFGHDVRLIPPAYVKPFVKRGKTDAADAEAISEAVTRKTMRFVPIKSADQQAAAMVLRTRALLLRQRTQVINALRAHMSELGIIAAAGPAKVAALAAIVRDPTDARLPAVARFALTALVDQLDTLSEQVERLEREIVTEAKHDEDMRRLTTIPGVGAITAATVKALVPDPDGFRSGRHLAAWLGLTPRSHSSGGKELLGAISKMGNTELRSLLVNGATSVLRHARNNDKALPWLTALLARRPFKVVAIALANKIARIIWALLTKGGTYRKPGVMAVGAANA

SEQ ID NO: 244134 - protein, 441 aa, unidentified
MGRVIVGVDPHKKSVTIEAVDEHGQVLAVGRFATDSSGYRLMLKYARDQWPHRRWAVEGAQGVGRPLAQRLLAQGETVVDVPAKLAARVRVFDTGNARKTDATDAHAVAMVALRTPRLRELAYDEELIALRLLTDRRDELSRRRVQTVNRLQRLLAELIPGGAKRDLSALQAKRLLASVKPRSLMGKTIRRMAAEEIADLVAVDAKLKAIKKELRAEVTARGSHLMDLFGVGPAGAARILSDVGDVARFPDRNHFASWTGTAPLDASSGEQIRHRLSRAGNRRMNHVIHIAAIVQIRHDTEGRAYYRRKLAESKTPMEALRCLKRRISDAVYRQLMADAQAAASFQAADADTGPGGHSGASSQSSAADLSTPVIGSSDQPLPGPAAPTLPAATAPAYPHAGSAPRPPRRRAGAVKVQRPTGRTTLTATSADAHSKSPRTRS

SEQ ID NO: 244135 - protein, 411 aa, unidentified
MEAAVITAVGIDVSKSKSTVAVRRPGGEIVLRPFEVHHTNSDLKKLASTLKKLGGDIRIVMEHTSTYWRPITLTLKEAGFFVSIVNVMLIHDFSDNTIRKLKTDRADALKIANYALTFWDTLPPFNNEEETRLLLKMQSRANERITATATALRNGLIALADQTFPGVNIAFAPNTKNANGHEKWVDFFLRYRHKDCVCQYSMEAFTESYRGWCKRKNYKFRTDTAHKIYLLAQEGVATLPKCESTKMLITQACKSLNAVCEAKQSTQLEMQRLAAMLPEYEVVMQMEGAGPITGPALMAEIGDVRRFKNKKALVAFAGIDAPPFQSGTFESKSRHVSKRGSPHLRRTIFIVSNIILTRSNPENAVYCFMDKKRSEGKHYYVYTVAGSAKFLRVYYARVTEFLRSQPSSDAC

SEQ ID NO: 244136 - protein, 322 aa, unidentified
MAMLSFCGVDVSKDRLDVLVLPEQQSFSVSNDVAGWAEVVARLRGFAIAAIGLEASGGYERGAMRALLAAGLPACQVNPFKLRQFARASGVLAKNDPLDTRMIASFVATMPTRPAQTRPLAIERLTEMLAVRRQLNAEKVAAENASRLLEDAMLQRLSRRRIARLVADIESLDAHLVEIVDTDAALAHRYRLLTSMPGVGLVLACTLIALLPELGVMSRKQVAALVGVAPYAFESGKFKGRRCIWGGRAPVREVLYMAAMSAGNWNPVLKQFRKRLQGAGKLPKVIIVAVMRKMITMLNAMVRDDVAWADHLHGRRTVPTAC

SEQ ID NO: 244137 - protein, 381 aa, unidentified
MQSNHTVPTILVAIELSTATWLVAVRVPGSEKPHLHRVDGGDTAALLALIASVSARAAHQLNAEIGIVCCFEAGRDGFWLHRLLTTRGITNYVLEPTSVLVNRRARRAKTDRLDAEGMLRVLAAYLRGDHQVCSMVRVPTPDEEDAKRMHRARENLVQERLRIENRIEALLFTQGIRKRPSLRSWERDLAILSTGDGREIPRHLLAELDRLRRRLVMTLELIREVEAERDQATKTKPQDQACRKIAALCRIRGISDNFAAVLTREVFYRSFDNRRQIASYVGITPMPYQSGGIDRDRRISRAGNPRARTTMIQLAWLWLRYQPGSELARWFRERVGTLAGRTRRIAIVAMARKLLIALWRYTESGVIPAGAEIRAETPVAA

SEQ ID NO: 244138 - protein, 359 aa, unidentified
MQTQSKTLDFSGQNIYVGLDVHLRNWKVTIMTDEVTHKTFSQPPEPDVLHQYLRRNFPGGTYHSAYEAGFCGYWIHNRLVSLGIDSIVVNPADIPTTNKEKVQKNDKRDSQKIAKALRNGDLVPIYVPSYKTIEDRSLVRTRSLLVRDSTRTKNRIKSFLYFHGIKLSSPFENTKTHWSKRFIDWLESIEMEEDSSKLTLSVLISECKKLRTTILIVTKSIRKLSQTEAYMEQEKLMRSVPGIGAITAMTILTEIESISRFSNNDQFHSFVGIIPSTNSSGEEDKVGDISPRGHSILRSAIIESAWKAVGHDPALMKAFHDYCRRMEPNKAIIRIAKKLLDRISFVLKNKQPYTLCVVK

SEQ ID NO: 244139 - protein, 367 aa, unidentified
MKKTSTAVTKQSRNISRQTLTIGLDLGDRNSWYCMLDEAGRIQLEQRVRTTAKALQEVFGAMPRSRIALEIGTHSPWISRLLTALGHEVIVANARKVRLIGESRKKDDRLDAQTLARLARIDPELLYPVKHRSAQAQSDLMTIRARASLVRARTGLVNAARGLAKSYGERLRGCNVRNMDPEKAEGLSPELQRALEPLLAAIEELSERIVEYNDRIEALAQTSYPQVALLKQIKGVGTLIALTFLLTLEDPHRFRKSRDVGGYLGLQPGRRNSGQSEPQLHISKEGDPYLRTLLVQGAQHILGPFGVDCDLRRWGLRLAERGGRNGKKRAIVATARKLAVLLHHLWVSEEVYEPLHNRNATTVAAAA

SEQ ID NO: 244140 - protein, 407 aa, unidentified
MDVIYPRCAGLDVHKQTVVACVRIVGDGPLLQEVRTFATTTSGLLALSDWLDSFGVEHVAMEATGVYWKPVWHVLEGHFELVLANAAHVKNVPGRKTDVNDATWLADLLAHGLIRASFVPPIAVQELRTLTRTRKQFVRERASHVQRIEKVLEDANLKLSVVLSDILGKGGRAVLQALIDGHSDPEVLASCITTRVKATRTELIEALRGRVSKHHRFMLKVHLSHIDALDKAVAAIETEVGAGLAPFRQAAKLLSTMPGLSEVSANVVVAEIGLDMSRFATPGHLLSWACMCPRNDESAGKRRSTRLRRGGKWLKTTLVQAAWSAIKVKGSYLQAQFHRLRARRGAKKAIVAVAASMLTAAWHMLRDGTEWHELGAAHFDRADATKTANRLIRRLQQIGYVVQATPA

SEQ ID NO: 244141 - protein, 366 aa, unidentified
MTLPTLGIDVAKATLAVVLLLANRTYRKEFANTASGHASLLAWLAHHARGQFVHAALEAPGVYGEDVALALHQAGHTVSVVNPATIAAYAHSQGARTKTDAADAALIARYCQKEQPAAWPSPAPEVRELRALVRQRQALLEMRQQEANRLSDGAPPASVRSVLTAHGEFLDEQIAGLEQQIDQHIDDHDELKRQRDLMTSIKGVGRRAASDLLGEIGDLRSFSNARELVAYAGMNPREFRSGSSVQKHTRLSKPGNARVRALRSMPALSAIQHNPLVKALRERLVASGKAKMAAVGAAMRKLLQLMYGVVKHHRPFDPHYAGRALAERNAGCAPVPAARPGHKPGRVSGAGVERAAPKALCLETAT

SEQ ID NO: 244142 - protein, 408 aa, unidentified
MNAVGIDVSKGKSMVAALRPMGEVALLPQEFLHTEVGLEQMACAIIALGENTRVVMEATGRYHEPVAAALHEYGIYVCVLNPLFIKQSGGGSIRKVKTDKADAMKIAKYGLDNWVDLREYTPMDTVRQQLKLCSRQYNLYMKTVVSLQNNLISLTDKTFPGVNELFSSPERADGHQKWVDFVMTFWHCDCICRVSEKAFTERYRKWCKRKGYHFSAEKALDAYAGSCGHFTTLPKNDNTKLLITTAAQQLLASKTTLAALRAEMSRLAKQLPEYDTVHAMYGVGETTAAQLIAEIGDVRRFPRRSSIVGFSGVDPAVNQSGKHEAQSTPTTKRGSPHLRKTLYQIACTYLRKAPADEPVYLFLDKKRSEGKPYFVYMTAAQNKFLRIYYARVKECLEAFDARQAIPQD

SEQ ID NO: 244143 - protein, 344 aa, unidentified
MRIAVLGVDLGKNVCSLVGLNASGAVVLRRRAKRETVIALAAKLSPCIVGMEACCGAHHLARVFAAYGHDVRLMAPEYVRPYVKAQKNDDRDAEGIAEAATRPTMRFVELKSQEQLDMQTLHRSRDRLVGERTALINQLRAILLERGIVAPQGKRKLEQFLFNLMDEQGGPGLSPRMITLVTDARAQWAELDRRIAAFDAEFVRWTKENEDARRLATIPGVGATIASALIAAIGKGETFERGRDLAAWLGLVPRQFTTGGKPKLLGISKRGNSYLRKLLIHGARAALPYVAERDVPLGRWAKSLLSRAHPNVVVVAFANKLARIAWAVLRRGEPFAAKGLPVAA

SEQ ID NO: 244144 - protein, 343 aa, unidentified
MEHFAGLDVSVKETSICIVDDTCRIVREVRVASEPAALLQVLANPIYRFKRVGLEAGPLSQWLFSALAEAGLPVICVETRHMRAVLQAQINKTDRNDARGMAQMLRAGLYRPVHVKTLRSQKLRMLLTHRKLLQCKAIAIDNDLRGTLRNFGLKVGVVGTVKFEARIKELVENLPDLAELVEPLLIVRRTLREQIGILHRRLLAIVRNDDVCRRLMTIPGVGPVVALTYRATVDVPARFRNSKAVGAAFGLTPSRYQSGEINRPGAISRCGDEMMRVMLYEAAHIMLVRLAKWSWLKAWAMQIARHRGMKKAIVALARRLAVIMHRIWVDGTEFRWTREVTAA

SEQ ID NO: 244145 - protein, 434 aa, unidentified
MAAVDVAKASGVVCTRVPDEARPGRRRTKVWTVTATLSAVTELADHLRCHQIEVVTLESTSDYWRIWWVVLEAAGLTVQLVNARSVKNVPGRAKTDKKDAVWLAKLTERGMLRPSFVPPYDIRRLREFTRLRADLVHERTRYWARLEKLLERALIKISAVASSLDTDSCRAMIEALIAGQRNPRALADLAIGRMRPKRAALAEALDGRFEDHHGELARILLDQIDALTGQIDQLTARITELIAAIPAAQGIDADGATGPGAGTGPGAPVLPAVMRLDEITGCGVIAAQAIIAEIGLDMAVFGTPGRLVSWAKRCPQTRQSGTKNSTGKAGKGNPYLNGVLGEIAASAGRTDTFLGERYRRLARRRGKRKAIVAVARSILVIIFHLLADPEARFHDLGPGYYDTHIDRQRKIRNHIRQLEALGLDVTTAPRHDAA

SEQ ID NO: 244146 - protein, 422 aa, unidentified
MLAECEDKEEIIARVAALDIGKAELVCCVRVPAPRGRRKRLQEVSTHSTMTSSLTELANRLVELRVQRVVMEATSDYWKPVFYLLEAHGLEPWLVNARDVKHLPGRPKTDVIDAVWLCKLAERQMLRASFVPPTPIRRLRDLTRYRADLVAARTAEKNRVEKLLEDAGIKLSVVASDIFGASGRAMMAALIAGERDPKVLAQLARRRMRTKIAQLEEAFNGHFDEHHRFLLARMLARIDGIDADIAAVDEQIEAHLAPFAAAAARLDEIPGIGPIAAAAIIAEIGVDMSRFPTAGHLCSWAKFSPGLKASAGKTKGNASTGHGNRYLARILGEVAVTAAKTDTFLGARYRRIARRRGKKRATVAVGRSILVIIWHLLADDDASFTDLGPDYFTKHLNPDTQKRNHIRQLEALGYKVTLTPAA

SEQ ID NO: 244147 - protein, 360 aa, unidentified
MSFNGTSVGLDVHALSVVAHAVDEQTGRIERARLCPDHGEILDWLHRLRGPVRVVYEAGPTGFGLARALADAQIDCVVAAPSKLIRPGGDRVKTDARDAAHLSKLLRLGEISAVMVPEADIEAVRDLVRAREDARADLMRVRHRLSKLLLRQGRVYSGGPAWNGVHETWLRRQRFDDAHTAAAFDHHFDAVLNATAARDRLDEQIVAVAASPRWADPVDRLGCLRGISALTGLALSVEIGDWTRFTGSSIGAYVGLVPTEYSSGASRVQGPITKAGNAHVRRLLIEAAWHHRASYRNPGPTMRARWAKVDPALKARGHAGNRRLHQQWCRFNERKKPHVVANVAIARELAGWCWSLATLG

SEQ ID NO: 244148 - protein, 334 aa, unidentified
MSRYCVLDRNGVVTEEDRVRTSTAAFEQKFGKRSTTRIIVEAGTHSPWVSRLLENHGHEVVVANPRKVRLIYQSDRKNDRLDARMLARLGRVDVSLLAPIHHRGAETQADLAVLRSRDSLVAARTKLINAVRGMVKAAGGRLPKSTTAAFAEKVVPSVPPELKRALEPLLKSISALTEQIHEAEGQIAHLADEKYPETRLLRQVKGIGPLIALAYVLTLEDPYRFAKSRTVGSYLGLRQRQQESGDRAPQLGISKTGNSHLRWLLVQAANYILGPLGPDSRLRRRGLELASRGGKNSKKRAVVAVARKLAVLLHRLWVTAEVYEPLYGIESQAA

SEQ ID NO: 244149 - protein, 391 aa, unidentified
MINIGIDVGKFKHCATVLDDSTGEVLIKPFFLTNNRKGFDLLYSKTKQFIHRKHSVGMEDTGHYMINLTNYLLDKKFTVKYINPRATCLRRKGLGISAKNDRKDALLIAEMLSEKRFWRSISVRSIENSKFRDITRLYHQLQEQQNQDMNRLQRALDIVFPEVNSLSWTRYSKAYMKFLSTYPSASSIALEDIRILRKSLKTEGRGRQCKVTAEEIRELAKNSVGEDNISIDLEVTSIIAIINTREEQIRMLEKKIEEFSHKLNSPIISIPGISHISGMTILAEIGDINQFQNTGNLISFAGMDPLVYQSGKYDAAHMPISKHGSRYMRKALYQAVFTVCKYSPTFHDYYTKKRNQGKSHRCAQGHCARKLLRVIYKLLSTNSLYNQNHIQ

SEQ ID NO: 244150 - protein, 343 aa, unidentified
MPHYVGLDVSQKTTAICVVDEQGRQLWRGACVTDPAAISALVLRHAGSNAKAGIETGAMTPWLVHGLRSAGLNVECLDARRVKAALQMRLNKTDENDAEGLAQIMRTGWYRPVHVKSLDAHRARALLGARVQLVGMTTRLSNMIRGVLKTFGLLPGAGRGLRFDQSVEALLEGAPEIALIVRPLLATWRQLRQQITVFDKAVRRQVKTDPVCRLLMSVPGIGALSSLMYVSTVEDPDRFSRSRAVGAHLGLTPRRYQSGETDRTGHISRCGDGLARTLMYEAATVILYRVKRSLHLKDWAEAIERRSGAGKARVALARKLSVILHSIWRSGEPFRWASPAITA

SEQ ID NO: 244151 - protein, 367 aa, unidentified
MTTSHTAVIGGVDTHKHTHYAAAIDTNGRLLGHQQFPATDSGYERLRAWVASHGPIHAIGVESTGSYGANLTRSLTKAGLRVIEVNRPNRSARRMDGKSDRLDAEQIARSVLGLTATATPKSKSGVVEAIRALRVTRASAVRSRTQAFNTLLGIVVCAPSPLRDELVGLTKRTLVNRCLQLRPETDDLRKLAAEPERLLLASVMTALHDLAQRCKTLDAEIKALNKQIQALVNLAAPRLVDLFGVGVELAGQFLMTAGDNPERIRNEAAFAKLCGVAPQPASSGRTTGRHRLSRGGDRAANSALYIVAIVRMRHHAPTRAYVERRTAEGLSKREIIRCLKRYIAREIYAALTTPARPPARPDSCLTT

SEQ ID NO: 244152 - protein, 324 aa, unidentified
MSSTFRSVIGVDVSKDSLDAHARSANLSKRFANDPAGIAELVAWVKPLAPDRIIFESTGPYQKAAVGALLAEGLPAVVVNARQARDFAKAIGQLAKTDKIDAAVLAHFGEVVQTTVRPLESKETLEFRALLDRRAQLVRMLATEKNHLHAAQQGSAKVLKNIDRHIDYLKAQIADLEDRMDRLVESCETFRAKDEILQSITGIGPQVSRTLLVHLPELGQRTRQGIAALAGLAPYADDSGLKNAPRHIRGGRSKVRVSLYQAAVSAVRHCPRMRGFYASLKARGKASTCALVAVARKILVLANALLRTMKPYKPLTNSVCEKNA

SEQ ID NO: 244153 - protein, 416 aa, unidentified
MSFALPDALFFTGIDWAAETHAVCVMNAAGKIAAEFTIEHSADGIATLIRRLARFGSPGGMPVAIERPDGRLVDLLLEAGHPVVPVKPNAIKTWRDGEVLSGAKSDAGDAAVIAEYLRLRAHKLKAAAPYSDQTRALRTVVRTRGDLVGMRVAATNQLSALLDAHWPGAKAIFADVESPVSLEFLTRYPTPAAAAHLGEKRMAAFCVKHGYSGRRTPAELLTRLRNAPAGATGDALGEALRDAVLAAVGVLTALNASVKTLDRSIAAHLGEHPDSAIFTSLPRSGQVNAAQVLAEWGDARQAYEHPDSVAALAGCTPVTRESGKHRAVHFRWACNKRFRQAIITFADNSRHASPWAAKIYSDARASGKDHPHAVRILARAWIRVIYRCWLDRVPYDPALHGAAAALSGQATEQIAA

SEQ ID NO: 244154 - protein, 417 aa, unidentified
MAFKIFRKNCCGLDVHKTWIYACIGITDTNGRTEYHQSRFSSFTNGLRDLAKWLDKYACREVCMESTGKYWIPVFNILEQSCMVTLAHPKYTKPQKGNKTDRKDAKWICDLFMCDMVKPSFIPPPDIRQLRDLMRFRMKLTYQVTGMKNRALNCLTVSNLKLDDVFSDVFGKSSRSIIQQILDRPGETFDVAPFVDKRCKHPIGEIQAAVDGAVSREQAAKLKICLDFIDEQQKRIKEIEAEIFRLAEPYSYALELIRTTPGLNKDPLTAIRIISEIGADMSAFPTSKHLVSWAGCCPRNDKSAKNIKGTRISRAGSYLKPVLVQIANALLKSKDHPEFRERYRRIKARRGHKKAIVAICRMLLTSIWNILSKLEPYTAKGYLADKVKEHSVVITKAQGLELLRKRGYIFKEELADA

SEQ ID NO: 244155 - protein, 331 aa, unidentified
MQYAEVKLGIDISKASFDGYVINKGQGKHKVFSNDPNGFEALKVWLNKLGVAQVHACMEATGRYGEALAEYLVCHGYQVSMVNAYLIKQYREGHLHLNKTDRGDAQLIAEYCLREEANMRLWAPLDDKQKHLRALVRRLAELKEERTREANRLESIIDDVFVDRNIKAHIDYLNIQIRLLQDEIGTFIDQDSDLKAKQKLLKSIPGVGKQSAQRFMAEIGDTSQYEESGQVVAHFGVNPRIFQSGTSVRKQSRISKQGQSQMRASLYMPAVVAIRCNPVIIDLSQRMTKTGHVKMEIIVAAMRKLLTLMYGVLKSGLPFDPDFGKNFNFAP

SEQ ID NO: 244156 - protein, 369 aa, unidentified
MENDTIYVALDDSKRKLVVAILRFGAAEPEEQEIPKDAQHIQRLFRRLRREGPVQACYEAGVSGYDLYRQITACDVTCQVIAPALTPRRPGQRVKTDRRDARKLVRLFRAGELTPIHVPNEAEEAARDLVRCREAVRRDVVRWRHRLLKLLDRHGRLWGAEKNWTQRHWSWIRAQHFALAALQRAFEATVFALEQALARQAALDQEIAALAGTAPYREAVGWLRCFRGIGTLSAMVLLAEIVDFQRFRRPRELMAYLGLVPSEYSSGETQRRGGLTKAGNPHARRVLVEAAWHYRHRPTIGRALASRSQAQPEEVVGHAWRAQQRLHRRYRHLVGHGKRPPVAVAAIARELVGFLWAAMTRRETRGQVA

SEQ ID NO: 244157 - protein, 343 aa, unidentified
MDYGAIDLHVRHTLIRFVNQEGTVLLDRRVTTTVEELQHVFGGRPRARILIESGTDSEWVAQAIEACGHEVIVADPTYALMYGHRDPRIKTDRRDVAALAEACRLGIYRRAHRVSAAQRERRRALRVREQLVRTRTQLINLVRAQLRQEGYRLPAGCSTTVVRRCQALPLPPGLRAALEPVLTVLTTIGDELRACTETLAAVAAQDPIVQRLQTAPGVGVITALTYRAVVDDVARFADARGVAAYLGLVPREDSSGTRQRKGTITKAGPPGLRTLLVQASWVVWRQRRGGGALHAWVHQLAARRGRRIAVVALARRLGRILFAMWRDATDFGVAPTEPGAAVA

SEQ ID NO: 244158 - protein, 342 aa, unidentified
MKNYANFIGIDISKLKIDVAVFEVEKNKDSVKKSYVNFIFDNSPSGFQKMNRELKRIKNTAFNSFICMEHTGSYTTALCFWLEEKKWDYCLVSPLHLKRTLGLTRGKNDKVDAQRIAYFSYLYREELQPTKLASTTLLKLKSLFAFRERTVKTSTILKQTLQEAKSLNKLINNKFVVKKTEKQLQIIQKELQEIMEEIATVMEEDEAIKKNFELLKTVVGIGKINALAFLVFTQNFTSFDNARQFNCYVGIAPFEHSSGSSVRGKTKISKLANKKMKVLLGNGVSSAIQHDKELKQYYERKIKEGKNKHSVKNAIKSKLVSRAFSVIKRQTPFVKFEHPMAA

SEQ ID NO: 244159 - protein, 438 aa, unidentified
MADPNERSEPDFAAFIGIDWADQKHAWALQTTTQKAVEPGDLDSTPEAVDAWATELGRRFGGRLIAIALEQSRGALLFALTKYAHFVLYPIHPTTLVNYRRGFRPSGAKSDPSDASLLLDLLVRHREKLRRLNPDTVETRTLQFLVEGRRKFVRDKTRYSNRLTACLKMYFPQVLDWFSEVSSQIAGDFLERWPTLEKLQRARSDTLRAFFMEHHSCGSESIQRRLEEIRRAVPATHDTAVIASCVAAVTAWVRLLRELRQAIHSYEAQIETTARQHPDFAIFDSLPGAGAALVPRLIAALGTQRDRYHSASELQCYSGIAPVLASSGKQSWVHWRWACSKFLRQTFHEWAAHSIGYSAWASAYYEQQRAKGKSRNTAVRALAFKWIRILFRCWKDRRPYQEDLYRQVLARRAAGTNKAVIVQWKTCEGLSKISDFIP

SEQ ID NO: 244160 - protein, 373 aa, unidentified
MDAISFKNGYRYLKNYIKHLDSLFILFESTGIYSRGMKRFCEIHKIDYLEMNPLEAKFKTSSLRSWKTDKSDAHKLALLAFRMKDSKVQRHPEEIYFELRERARFHLEMEINQNRLKVELVETLHQTFPGLEKLFTNRYSKIALNIAQAFPHPDFVSTLTHDELVEKVLHSTDKGISVNKAHKYVQKLIEIQINSFPNVDKSSFLLQKVQYLCDKLLIGIEEMKEFDQEMIDLAKNTTEFENIISIPGIGELTAALLIGELGNIREFKTNKQLNAFVGIDIKRYQSGTSKSRDTINKRGNKKARRLLYLIIMNIIRGRNHYQSHIVDYYYKLREQPHGKPHKTAVIASINRLLKTIHYLIVNDKLYDYQKAPH

SEQ ID NO: 244161 - protein, 423 aa, unidentified
MDILYERVAGLDVHKDTVVACVRIVAEGKTARECRTFSSTTEQLIELRAWLEECRCTHVAMEATGVYWMPVFKILGEGPFELIVANAAHIKNVPGRKTDVNDATWIADLLACGLIKASFVPGEDIQELRSLTRTRKQLVREQTRHVQRIEKTLAEANIKLNSVISDIMGASGRRIIEAMIKGVRQPRQLAELAGKQIKATPKELYDALHGRLTDHHRFLLDLHLKQWDGLDETIRKIDREIDQRIGRLHTKSGNGEVSFRTMIELLSTVPGISTLSASAIVSEIGCDMNRFPTAGHLVSWSGLCPGKNESAGKRKPSRLRKGAPWLKTMLVQCAWAAKRKKDSYYRAQFFRLQSKRGPQKAICAVAASILTAVYHILKNGTEHHDLGASYFDRRPLELKAGRLVARLKKLGFNVQLQPVAEAA

SEQ ID NO: 244162 - protein, 353 aa, unidentified
MLIIGCDFHPSFQQVAIFDNQTGEYQERRLGHRAEAEQFYRSLAGEQVLVGMEACGHYPWFERLLSELGFELWLGDAAAIRATVVRQQKTDRRDAEHLLTLLRENRFPRIWVPSLEERDVRQLLVHRHKQVQARTRVKNQLQAMALSQGVQKKRKLWTAAGRPELEKLELLPYATERRKQLLQSLDGLDAEIEQLNRRVEEEVQKRPAAVKLQTHPGVGPVTALAMVLTLGPAERFPSGKQVGSYFGLIPSEHSSGGQQKLGHISKQGSSFLRFLLVEAGQTAARYDAELGRFYRRLAVRKHRALAKVAVARKLAVRLYLMLREDWTYAQLCRAVVQASPSHPVVGRQNRALE

SEQ ID NO: 244163 - protein, 397 aa, unidentified
MIAVGIDISKAKSTVAVIDSDGTVLASPFTMAHTQLEMEAFVSYLKGLGEPTTILMEYTGHYHYPVLKKLQDEGFPVCIVNPYQMKKYGDVEIHKAKTDKKDALRIAAYALEKSYKLVPYSSMEQKYEDLKFLSRQYNQRISYVAKLKVQLIALLDQTMPGITRILPLNSRNPEKCALLLFIKRFKSFDEIQRIGKARFLASYDVLAKKASERSASSKGLSIYELAVDSITTRGEDPYIWLSQNQCVDLLSATQNAADEIISQMRNIAETIPEYKVLRAMHGVGDRLGPIILAEIGDVHRFHSGKALNSYAGNDASPYQSGQFESRNRHISKRGSSTLRKACYEVMQALKLTKPQDDPVYLFMLKKEQEGKPFNVAKMAGVNKFLRIYYARAMELYK

SEQ ID NO: 244164 - protein, 340 aa, unidentified
MSNISTIGLDIAKSVFQVHGVDTAGEVVVRRKLTRGRVLAFFESLPRCLVGIEACSSSHYWARELIALGHDVRLLPAQYVKPYLKRQKNDAADAEAICEAVTRPTMRFVPVKSPEQQSVMMLHRVRLMLNRQRTQISNALRSHLSEFGVVAPIGRNGIEQLLMVVNDENDSRIPVDARLCLRMLEAQLKVVKEQILENDRRVRASARETELGRRLMEIPGVGPLLASAFVATVADPHVFKSGRCLAAWIGLVPKQNSSGGKERLGSISKAGNRYLRQLLVVGSMAVIRYAERNGTRRPWLVQLMTRRTTKVAAVALANKTARMVWALMTNGERYREPIIA

SEQ ID NO: 244165 - protein, 408 aa, unidentified
MNTLYVGIDVSSKSNVVYLMLPNGDKHSNFSVANSHTGSSQLVKRILSAMTSCSLDTVLIGLEATSVYGDNLVYFLREDAALARFNSKIHVLNPKQVSKFKEAYNDLPKNDLIDSFVIADCLRFGRINKEVYMGDYRYKALQNLTRARFFAVQNLVKEKQRFMNVLFKKYSTMTQEKVFSDTFSTTALAVYDEFESAEALANMDLHELTDFIIEKGKNRFPDPDAVAKAIQKAARSSYRLPKTVNDSVNQVLSISITSMKALESQIKEFDKAIKAQMELLPNVLISIPGIGPVYSAGIMAEIGDINRFNSQAALAKYAGLAWKQHQSGGFESEVTRLIPSGNRFLKYYLCEAAFSLVRCDKEYSDFYHLKYKEVNRYQHKRALALTARKFVRLVFRLLKDNRLYCPAK

SEQ ID NO: 244166 - protein, 383 aa, unidentified
MKAVCGLDVHKDSIFLCILHSDGELFEQVFGVLTFQLEEMRKLLQKHHVFEVCMESTSIYWIPIWRVLSPHFTLRLVNPYFIKQLPGHKSDVKDAQWIAECTMKELVRGSFVPPEIIQQLRQYDRRIFDLNAEIVRKVSKVDGVLQRCNIRLSNYVSNIECKSYRDVVRRLSEGVTNPNELMKLVHGRIVNRHGVETILASLTGVVSQAEIDVLRQLHEEIDIAESHRNECQQRMLEICEKHFPEELERLQKIPGIKERAATSLIAEIGTDMSKFETANHLASWSGLRPRNDESNKKIKSRKITHGNVYLRNTIIQCAWAASRQKDCFFSRFSYHQTIVRRKNKMKVIVAVARKLLIAVWHVLHDKTDYVDFKPDREESANNG

SEQ ID NO: 244167 - protein, 322 aa, unidentified
MSAPILGIDIAKQRVEVALLVEGKVRNRSFKNAPDGFESLAIWLSKWGIDQVHACMEATGNYGEALAIYLHEAGHTVSIVNPARIKGFAQSELIRTKTDKVDAGIIARFCLAMKPGSWTPPSQKIRSLRALVRLADSLTGMLTQEKNRLGSAHESVIPLIKGHIDYLDKEIEEVRHQIAALIEEDPNLRQKKDLLASIPGIGTVTIPVILAELDNLEKFKHVRELVAFIGLAPKERLSGSSIKGKPRLCKTGNARLRKALYMPALVSIQYNPLMIAFYNRLKEKGKNGKVIVCAIMRKLVHLIFGILKSGKKYDPNYKPAFA

SEQ ID NO: 244168 - protein, 343 aa, unidentified
MEHTTIAVDLAKSVFQVAISHHAGRVDEERRLSRDRFLAFFAQQPPATIVFEACGSAHYWGRQLQPFGHTVRLLPAHDVRRYVRRNKTDRTDTKGMLEANRNEEIHPVPVKTIEQQAIASLHRLRSTWLATRTARLNTLRGLLREFGVFIPVGAQHVVPCVRALLGEPTEAVPIVVRGTLANACAELDVLETNMRDVERQLAAMARQLPDVTLLQTVPGVGVLTATALVALVGDIRRFRSGRHFASFLGLTPKEDSSAGRRRLGAISKQGDVYVRMLLTHGARSVVWHAKAEAQATALQRWAMLTELRRGRNVAAVAVANKLARILWAVWAQQRPFAADHRPG

SEQ ID NO: 244169 - protein, 344 aa, unidentified
MKVTTVGIDLAKNVFQIHGVDAHGKAVLKKQIRRDQLMLFFTNLPACLIGMEACASAHYWARRVQECGHTVRLMAPQFVKPYVKTNKNDAADAEAICEAVARPNMRFVPIKTESQQAVLAVHRARQSFVKARTAQANQIRGLLAEFGLVIPQGIAHIAQRAPELLDSDTCALPGPFRLLVLRLMEHLKLLDQHVRELETQIQTWHRDNPASRKLAEIPGVGPITASALVASIGDAKNFENGRQLAAWLGLVPRQHSSGGKSTLLGMSKRGDSYLRTLLIHGARSAILAAQRKPDTDSWLSRLLGRRHPNIAAVALASKNARVIWALLAHNQQFRPGYATAAAVA

SEQ ID NO: 244170 - protein, 346 aa, unidentified
MTIVEAARAVTGGVDTHLDVNVAAALDDIGGLLGVKEFATDAGGDRSLLAWLQSFGTVMLVGVEGTGSYGVGVARALRAADIAVVEVDRPNRLVRRRQGKSDPVDAVEAARAALSGRASGKAKTRDGNVEAIRALTVAQRSGRATRTRTLNQLRHLGFCAPAPLRQRFQGLSAAAMALEAAGLRPRGEADPVIFATKTAMRTLGRRVAVLDQEKVDLDELLGKLVAKTAPELLALHGVGVVTAAALLVAAGDNPERLRSEAAWAHLCGVAPLEASSGKVVRRRLNRGGDRQANAALWRIAMVRMRSDPRTRTYVERRVEEGRSKPEIIRMLKRYIAREVYRHLPRG

SEQ ID NO: 244171 - protein, 444 aa, unidentified
MGGALQEVARRMKVLYERVAGIDVHKDMIKVAIRSPGEKPWTRKTEILEYRTFFGVLQQMAADLRKRGATHVVMEASGVYTEPVYYALCEQDFAQVAVINPAHAKALRGHKTDAKDCARLAELFECGLLRGSYIPAPELKEVRDLTRYRIKTVQARTSEIQRLGKALESAGIKLGSVASSITGTSSTAMIEALIDGERRGAVLADLAIGRMRTAGKLADLSMALAGRFTGHHALMCRLNLDRIKVFDDAVDGLAGQIAAKAAPWQREQGLLKSLPGFGDTVAQAWLGEIGPAPHLHFSSHEKLACWVTLCPGNNISAKKRKHGRTGDAGTYIKPMLIQAAWNAIRVRGRLQARYNRLVRRFGGQQNPAAKKKAITAIAHTLLKIAYQVLKSGTPYQDLGADFYTRRESPQQKQAYLERQLQKLHPGCTITVTISPPEAALTSGA

SEQ ID NO: 244172 - protein, 316 aa, unidentified
MHSENIAAYIGLDVHKETLAVAIAAPERLGEVRYYGTINNEAQAVRRLFQKLQGLYGNILSCYEAGPCGFGLYHQLTAMNIKCQVIAPSRIPKSPTDRIKNDHRDAISLARLLRAGELTPVWIPDLTHEAMRDLIRARAAAKRDSRVARQRILSMLLRTDKRYAGKHWTGKHRTWLANQSFSQPSQQIAFQHYCQSLEQIEDRILQLDQEISRLLPEWSLCNLVCQLQALKGVGQLIAITLVAELGDFSRFSNPERLMAFLGLVPGEYSSGNSIRPRGITKVGNSELRHLLYGYQINSDYLTVKPHLCDESHKKAK

SEQ ID NO: 244173 - protein, 410 aa, unidentified
MTKEDFIYVGIDLHKETHTAVMIDCYNQKLGEITFPNRPADFPKLVTKVKKCNTDAKEVVYGLENAYGYGRALAVWLIDKGYLVKDVNTAISHRQAKHRGAMYRKSDSDDAKAIALATLNMLDKLPDACPNDAYWSLGQLVHRRDNIMKQRTRLVNQLHEQLCIAYPSYKSFFNDISRPTALYFWENYPSRKYLKGKSVEDLREELVPVSHNKCSTKTCQAILDAVAGDKVKNIDYQDARDMVTLSIVSDLQHYDSQLTEVDKMLEQMYKMLGCTLTTIPGVNVITAVKILAEIGDIKRFSNANKLAQFAGIAPLHLSSSGKGKDLATKQGNRRLQATIYFLAIQMVQVSSKGTPRNSVVRAYYEKRKAEGKTSQQALICISRRLISIIYGMLKHGTEYRMPVVESAGEK

SEQ ID NO: 244174 - protein, 321 aa, unidentified
MNVIALDISKDTADCHLSGNGKEDTLKIDNSISGSLQLLGWIKQHKIRKCVISMEATGIYYETLANHLSQYHQVYVINPLKIKNYSKAFFNRTKTDKADARLIAEYTKRHLDKLDGYHAPEADQYRLHKLIAAKEQIMLQSRQAKNRLHAAGNDEFVKTVYQTIVRQLAEHQEHIEAEIKALVASDERLAEQCGNLATIAGIGEKSAVIILHHLNGRTFATANKFTAYAGLSPKIEQSGISVNKRQVLSNFGNRRLKAVFFLPALNAYRMNLFPQLVRNLEAAKKPKMVIIVAIMRKLAKICYYMHKSGKPFDVRRYQSAP

SEQ ID NO: 244175 - protein, 340 aa, unidentified
MNRIGLDAHSASFTMAVVNEAGKVMQCVNRPMSAENLIALVGAVPGPKELVVEESTVAQWVKETLEPYVDRLIVCDPRRNRWIAKEEFNDDRTSAIKLAQLQRGGYIKEIAHPSAEEAPLRQSFLHYTDLNQQVVRFKNKLKGTYRQAGVAVSGDGLYEADAHKEWLARLDATPALRRQAEHLFVLIDEIEQMKHETLRTMVRRARKDKAYALLLTMPGAGPVVSCGYVALIGTPHRFSRKNKLWRYAAFGNVLHISDDKVYQDRPSKTGNRALKWVVMQQFMGAVERAKKDNVFKRRYARLIAGGLGRKAARRQVCRSLLSVARAIWMKGEAYREPPLN

SEQ ID NO: 244176 - protein, 342 aa, unidentified
MEQVTTIGLDIAKSVFQVHGVDATGKIVLRRRLTRARLTQFFAKLAPCLVGIEACASSHHWARELRKLGHDVRLMPPSYVKPYVKRQKNDTADAEAICEAVTRPTMRFVEVKSPQQQGVMVLHRTRVMLMRQRVQLSNAIRGHMAEFGVVAPVGRKGLLTLTDILHDDADARVPAEARCCLQMLTGQLRLVNAQILENDRKIIASARATDVGRRLMGIPGVGPLLASAFVATVPDPHAFRCGRNLAAWVGLVPRQNSSGGKERLGGITKQGNRYLRGMLVVGAMAVIRYAERHGTRRPWLVQLMARRTTKVAAVALANKTARMIWAIMTSGQAYREPELRAA

SEQ ID NO: 244177 - protein, 344 aa, unidentified
MNITTVGIDLAKNVFQVHGVDERGKVVLRKSVKRAELTKVFANLRACLIGMEACGSAHYWARRLMELGHTVKLMAPQFVKPYVKTNKNDARDAEAICEAVSRANMRFVPVKSVEQQTVLAVHRARQGFVVERTAQANQIRGLLYELGIVIPKGIRHLEQRLPEVLEDAENGLPAASRELFARLFEHFRELGEHVRQLESQIKAWHRENEASQRLEAIPGIGALTASALVASIADARAFKNGRQLAAWLGLVPRQASSGGKEQLLGISKRGDTYLRTLLIHGARAVMFHRLRRGAEEANGWLMKLLARRNRNVAAVALANKNARIVWALLAHQREYCASPIAAAA

SEQ ID NO: 244178 - protein, 335 aa, unidentified
MKKIYVGIDISKEKCNLCFRSGLEIVREEECSNDVKTLRKAFKSAMKAIGASLEEVLACAEYTGRYIYPLTVACQELEIFLWMDDPTRIKNSMGLTRGKNDVIDAARIAEYAYRYSDKAVRYCIPDAALVSMKNLLADREFLIIDRKRYQSQLTDQKKYMAPGDFKQKNSRWKKVIKSIDEQIAAIDAEIEALIAADPVLTRQKELLVSIDGIGDRIAINMIAITGGFTRFENARQFCSFAGLTPYKYDSGTSVRSKAKISKRANQTMKALLHMSAVNVATRMKSGEYKDYYERKLKEGKHVMCILNVLRAKLVHRMFSVIKRDTEYTKEYKPAC

SEQ ID NO: 244179 - protein, 407 aa, unidentified
MEVVYPQCAGLDVHQHTVVACARVGAGSAVTRDVRTFGTTTQELLALSDWLTAHGCTHVAMESTGVYWKPVWHVLEESVELILANAMHIRHIPGRKSDVNDATWIADLLAHGLIRGSFVPPAPIQELRDLTRTRKQLVREITQHTLRIQKTLETANLKLTGVLTDILGVSGRAILQALVAGETNPDRLAELARGRLKASRADLAAALHGRVTAHHRFLLQLHLAQIDALEGAVRAVEARLGDALAPFRAAVDRLITMPGVSETVARVLVAEIGVDMTRFPTAGHLVSWAGLCPRLDESAGKRHSTRTRPSNPWLKTTLVQAAWAAARKHDSYLRAQFLRLKSRRGPKKAIIAVAASMLTAAYYMLRDGVDYRDLGAAHFDRRDKAKLATRLLARLRDLGFNVELRAA

SEQ ID NO: 244180 - protein, 361 aa, unidentified
MNNTNTEMYLGMDVSEKSIELFALSADNKKESKGKIENNPAKIKAFLADVKNTSRLTVALETGTHSPWLSKMLEEHGCKVLVGHARKLRAIWGDDHKCDQRDAEMLARIARMDPKLLHPIKHVSQEVRAEQAVIKARDVLVKNSTMLINHLRGTLRSFGISTSEIPCTSMHSKLMPLIPKDLRPALKGIVKQLKEVRTEIKEYDKKLTELCKKHKETKILQQLNGVGPVTAITFALIIADPRRFSSAGRVGSYLGLTPKRDQSGEVDKQLGITKSGNGMLRKHLVKSANYIMGPFGVDSELRRYGERIAAKGGKIARRKAKVAVARKLAVTMWRLWINEAEYDPFFKEHQKQKKKAARVAA

SEQ ID NO: 244181 - protein, 325 aa, unidentified
MCKVGQTGVRRSDVPCFVGIDVAKAQLDIALRPSGERWAVPNEASGVMTLVDRVQALHPTLIVLEATGGLERAVTSALATAGLPVVVVNPRQVRDFARATGQLAKTDALDARALAHFADVIRPTPRPLPDAQTQELRALLGRRQPLIGMRTAEQNRLAGTNARLTQDIAAHMTWLNAAIATLDDDLETILRASPLWRENDDLLQSAKGIGPVCARTLLLELPELGTLTRQQIAALVGVAPLHCDSGTLRGRRMIWGGRAHVRTVLYMGTLVATRFNPQIKVFYERLLAAGKVKKVALTACMHKLLTILNAMLKHRTPWQPQEVQS

SEQ ID NO: 244182 - protein, 408 aa, unidentified
MKLFVGIDVSSKDLQVVALDSEDQNKRLINDSFVNDLYGASELKKQILDLAQNKHYDQIIIGMEATSIYSFHPAYFFQNDEDLQKLNVETDVINPKETSRFHKVFEESKTDPLDAYYIALYLSFGHYRVSIARQDNYLALERLTRTRYELVQELTRTKQHFIEALYYRVNKLITVDKDKINTPLFGATMMSIVTDSKTLDEIADMPTEDLISYLQVKGRGRFSDPDTLAKAIKKAVRGSYRLGKVMTDSIDAVLSVHYNMIQSFNESIKDLEKAIDRIVDALPESKILESIPGIGKTYTAGIIAEIGSIDRFDKEEQLAKYAGLTWNQYQSGDHSNEHTPMARTGNRYLRYYLIEAANLARLHDPVFKKYYQKKYDEAVYSPHKRACTLTARKLVRVIFKLLLSLIHI

SEQ ID NO: 244183 - protein, 342 aa, unidentified
MLRVNVRQRSATVKVAVRYDHFVAIDWSLKIMAIAHASRRDQIPRVFERPTDLKELKTYLGSLRGRTIITFEESGPAHWLYLELLDHADRILICDPFQNRLLFHGAKTDKIDARKLCELLCARLLKEVYHSDSALYELRLLASAYDDVVRSGIRLLNQKAALTLGHRDEGKSAAFIDVILRENIELYRRSKEQYERRFHELAKHNKLVRWQREIDGIGTIGAVKIVACVVDARRFPSIGRYLSYCGLVKHEKLSGGRSYGRRKPRYSRVLKSVYKTAALAVLKGHNPIRTYYDVLLAQGVAEHNARHAVARYIARISYGMLKNGTRYDPDIIARRDTNGKRV

SEQ ID NO: 244184 - protein, 343 aa, unidentified
MQIISTIGLDIAKSVFQVHGVDAAGQVVVRRQLRRRHVLAFFAKLPPCLVGIEACASSHHWSRELRALGHTVRLMPPAYVKPYVKRQKNDSTDAEAICEAVTRPNMRFVPTKTVEQQSCLMLHRARHLFIRQQTSVINSIRAYLAEFGIVAPVGRRGVEQLLEVVADAADDRLPEVARICLTALGSQLRALKAQILQFDRRIVAWHRSNTTSKRLDAIAGVGPALATALVASIADPKAFRSGRDFSAWVGLVPKQSSSGGKDKLGSISKQGDRYLRSLFTAGALAVIRYARIHGTDHRPWLTRLLTRRPTKVAAIALANKLARMAWAMMARNECYQEPAALAA

SEQ ID NO: 244185 - protein, 309 aa, unidentified
MKEKIEFEQVIERGCGLDVHKETVTATIKGKGIKQQTRKFSTYTRSLISLRDWLLKNGITHVAMESTGVYWKPVYNVLGEHFKIILVNARHVKNVPGRKTDQLDSQWLAKLLMAGLLKASFIPCRKIRELKDMVRYKTKLTHQISSEKNRFIKILEDANIKLSSVLTDVFCVTGRNIIHEIVESDYEPEKLLHYVHGKVKKSRSEIKEAITGYVTDHHRFMMQTILESIEKIEDTIAKIESQIAEQTKEYGLEIELLETIPGVGRDGAIGIISEIGVDMSAFASEKHIAKWAGMCPGNNETGGKKKIAE

SEQ ID NO: 244186 - protein, 344 aa, unidentified
MTHYVALDVSLRSVAICIVDNNGDIQLEKSVKAEIEDIVRLLRSFDGEIISVGLEAGVLTQYLTYGLQAAGYEVVCMEARQVRAALSAMRNKTDKNDARGIAQILRTGWYSRVHVKSLGSHHVRALLSSRRAVLSKCIDLENEVRGLLRIFGIKLPAHLGHVVFDSAVRESIEADPALAHALIPMLDARGVLYQSFVELDRRVKVMARRDALCQLLMTTPGVGPITALTYKAAVDDPRRFKSSRTVAAHFGLTPRRFQSGEVDRLGHISKAGDADVRRALYAAANSLMTRTVGFSTLKAWGMQLMKTKGRRVAVIAVARKLAVILHRMWIDGTEFQWGTEGANT

SEQ ID NO: 244187 - protein, 309 aa, unidentified
MEAIAVGIDVSKDRLDVHVHPVGTVLKFSRDSVGIETLIEALDGVAPQLVAVEATGGFETVVVAALAAAALPVVVVNPAQVRAFATALGRRAKTDPIDAQVIAQFAAATKPQVRVLPDAGTQALADLVARRRQIIQMIVAEGQREKRAAPRTRRSIARLLKTLRRELSEIDADIDETVRGSPVWCEKEDLLASVPGVGPVTVRTMLAELPELGHLARRQIAALAGLAPYTRQSGRWRGQSFIGGGRASVRSALFMAAMSAMRWNPVLRAFHQRLRAAGKPKMTALIAVARKLLTILNAILRNKTKWQNA

SEQ ID NO: 244188 - protein, 394 aa, unidentified
MNKDLLIQRRTESSALDDSVRAQVAQISCLDQERVIKTVIKYGNERIELDWSVKILKLGLDLHYRQVTVAMQEDGRLVVAVGKMAHRDFLKWIKKKLAQGWQIYSCYEAGASGYWLDRKLRKLGVANLVVVPKAMGQAGKKQKTDRRDSAQLVDDLDRYLRGNEKALSVVGVPSEEQEERRALIRYQLQIMGDRKRCEARGKGLLCSQGIEVHGVWWSEESWQELTQNPALKDWMKEQLEGWRTKALRYEEGQNQLRTRIEALAPESPLPKGVGRYSWAVLEYEMKGWARFNNRRQVSSYTGLCPGVHLSNGFGKEGSINRCGNPIVRWILVEMVWRLVRWQPDYPPIRQLVKGLVRSKRAKKRLAVMAARHLAIDLWRLATGQTTAQNLGLVF

SEQ ID NO: 244189 - protein, 407 aa, unidentified
MESIHKCVAGIDVHKAVVVCTLLQSDSNKIIKKETKQFSTFRKDLIEMATWLSRYPIELSVMESTSIYWKSPYEALEEAGIPAFVVNARHIKNVPGRKTDVQDSEWLANLARCGLLRNSFIPPKDIRELRMMTRYRQKVTGMRASEKNRLMKVLEDGGIRLSCVVSDIDGVSAKEMISSLIEGTFKPEALVKMARGKLKAKRTELAHSLEGNLSDRHRFLLKQVRDHINALSLQIEEIDSQIVAAMKPYSQEWRLLQTIPGIDYIGAAMLLTEIGVDMSRFGNADRLCSWAGIAPGNYESAGKRKSGRISRANRYLKALLCEFAQSARRTNSQFKSRYEALVIRRGNKRSIIAVAHQILRVVFHVIKNKEPYRDPKIDYKQIIVDRNASRWIKVLKEYGYLEEMRGR

SEQ ID NO: 244190 - protein, 346 aa, unidentified
MEHYAGIDVSLELSSVCVVDAQGKIVKETKVSSEPEALVSFFKGLGFPMKRIGLEAGPLSQWLHAGLAQAGFETVLLETRHVKAALSAMTVKTDRKDARGIAQLLRMGWFRAVHAKSTGSQEVRALLVARKQLLGRLIDVELSIRGILRGFGLKVGPVTRKGFELRIRELVTGQATLERIAGAMLSARAALKAEYEKLHKAVLAIVREDAVCRRLMTVPSVGPLVAITFKSAMDDPSRIAKSKAAGALFGLTPKKYQSGEKDVTGGITRAGDEMVRTALYEAANVLLSRVTRFSKLKRWGMDVAKRRGSKRAKVALARKIAVILHRMWVDGTTYRWATAEPIAAQA

SEQ ID NO: 244191 - protein, 391 aa, unidentified
MNDVNGSVAYGGMDVHYKFSNVTWRDGVGEVVRRERLDHRDRAKLRAQLGRWPSGTPVVLEASFGWGWISDELEWAGLEPHLSNCYKVEQMRKARGLAKTNEKDADLLSLLPAEATRWWEVWRAPPSVRDRREWMRHRAGLVAVQTETKNRIHALFHRHGVFYEETTDLFGGRGRRFLQTLARDGRHAGGVLPPGALETLRGLMRLLVHLRAELATVAWHLHRRLVRDPLVRRLGGIPGFGPILSHTLEAEVGDIGRFRHHRRLASYACLAPWSKDTGEADPTRAPLGRHLGDRGNRTLKWAFIEAAHGAVRHGGRWRVMFDRATQGGKKNRGRGYIQVARELVKVVHLVWSRGVDYCETPPPRPGSGRPRRRRRTSRPGTGQPSRAMVPA

SEQ ID NO: 244192 - protein, 343 aa, unidentified
MTYFVGLDVSQKLTAICIVDDTGRRLWRGQCASDPEQIERVVRRHGGNEARIGIETGPMTAWLVHELRGRGLDVTCLDARHAKAALKMQINKTDQNDAEGLAQIMRTGWYRPVHVKSFDSHRARALLGARAQLVGMTTRLSNHIRGVLKTFGMLPGPMRGLPFDRRVEILLAERAEVAPIVRPMLAAWRQLREQIAAFDKAVRALVKSSPTCRHLMGVPGIGVLSVLAYVSMVEDPARFGRSRSVGAHLGLTPKQYQSGEIDRSGRISKCGDMLARTLMYEAAVVLMTRVKRASGLKDWAQAIARRSGAGKARVALARKLSVILHSMWRSGEPFRWSEQPAAA

SEQ ID NO: 244193 - protein, 342 aa, unidentified
MEYGAIDLHMRRSEIRIEDEDGRVVVARRIDTTREQFEQVFAGRPRLRILIESATESEWVAQCLERVGHEVIVVDPNYLPMYGQRNRRVKTDKRDVAALTAACRTGTYRPASRVSAAQRGRRQELRVRRHLVQIRTRTISLIRALLRQEGLRLPRGTSETVSARLDRVTLSAALQTAVAPLRELLTQLQTTLDTVEEQVEAAAIDDATAQRLMTAPGVGPIVALTYLAVLATPTRFGGDARRASAFLGLVPSEDSSSERHHKGRITKTGPPELRSLLIQASWAIWRGRTADGAALRTWAHTLAARRGRRIAIVALARRLSRIVFAMWRDGTEFQSHTRAIAA

SEQ ID NO: 244194 - protein, 411 aa, unidentified
MEPLYRCIAGIDVHKKMLAVVVRTPQGEYVQRKFGTTKTEIGHLAAWLQDHQVSEVVMESTAQYWRPVWYGLEAHFKLHLTHPLKTRAPRGRKADFRDARRLADRWHSGDLEDSFIPGAEQRSWRWLTRSRVHLKRMLGVIRNQVEGLLAQGGIKMSAVASDIFGVSGWAILERIAAGESDVDKLVDEARGVLKRKKSKLREALQGKLDPLYRLLLQQHLAQAQLLCQQVEELNQALAEALKEHVAVLCRLTKVPGINLYAAQELLAEIGPGAVAFPSPEQFASWVGVCPGSQETAGVNYSRRSAKGNRYLRRLLCQNAWGAIHTKNTFFAGLFARLKPKIKGKGAAWAVAHRIAKLVWLILHEGVEYVEKGTAPLNPRTLVRKFRRLLREFDRHGIDAKSLLEQELVATS

SEQ ID NO: 244195 - protein, 401 aa, unidentified
MEGPIVSIDVSNGNSHYMCFIKNNKRFGKVKKIDHDIEGFKRLLEDIQKLEAETNEKVCAVFEATGVYTKPLERFLSKNSIKTYMINPLESARKRKEEIHNKKTDKLDPISISKVYYDKEEMMELKKKDETHNWLRKKNRLYEDQLNHLRKYKVTFQNQLSICFPGYLDLFKDGYSDIPMTILKKYPHPDLLKNKKAETVARYLEKNTCHNHKVSLEYALKIIEFAKKTYPGCEKDDVEVEIFKILLDKVIETQRECEKTLNEMITVASTLEEYRYISSIDGIGTNLAARIIAEIGDIEEFKSREALVAYAGLDPHIYQSGDQDGKHLKISKKGNKYLRCLLFLAVGCSIRGAKDNPVNRFYQKKKQQSNPLNSKAAKTACTAKLLKIIYGICKNKTTYER

SEQ ID NO: 244196 - protein, 424 aa, unidentified
MKVTYQTCCGVDVHTSFLVATIVKTTGGIEPSYQKKRFSTFNNSILEFKQWLLDNDCHDVCMESTGKYWVPVFNLLEDDINVVIANPKWVKAVKGNKDDTKDSKWIGDLFRLGLVKGSYIPCKKVRILREYTRYRYKLVSCRSSEKNRYQNALTVCNVALDSVVSDIFGKSSTSIIDYLLEQSGSSINHEEIASKLLRSLKSKEDAVIESVEGYQMTDAQKYRMRLVRAHMDYITAEINDVDKMIENMISSNTDFENAVQFLCTIPGVKRDSAITIISEIGTDMSQFSSSKRLCCWAGLTPGSNESAGKRKSVRFTRAGVYLKPALVQCAHAAVKSDKSPYYKKKYESLVKRRGKKRAIIAIARMILTAIYQMLSTGEQWNPSDLYKIDMPVALVEKQKAKAIKQARKLLQREGLLPPDEPFAS

SEQ ID NO: 244197 - protein, 324 aa, unidentified
MPSTTYVGIDVAKATLQVHLNGHQIEFNNNSKGHAKLTKKLAQLTRPHVICEATGGYERPVVAVFHQDKILVSVLNPAHTLAAAKAQGMRAKSDCCDAEALTDYGQRYQPEPTVPVPQELREMTELALWLQQLIDQRAVAKTQAEHHDNAFVRHQHQELLAHYDEQIKTVEKEIKKRIQSQPEFQQRLDCLVQIQGVGFRTALMMLVLMPELGQMNRGGAAALAGLAPWTRDSGTMKGKRCIGGGRAQVRPVLYMSALCASRCNPVLAPFYAALKQRNKPSKLALTALMRKLVIYMNHKLKALATMPPAQETKNATKPKKVLAN

SEQ ID NO: 244198 - protein, 467 aa, unidentified
MSFKMTTGRKAADTRSKKPTDYLMKALPVLDPKAAAIDVGSEKLHVSIGGDVPKVFGTFTGDLEALREWFQQQEVHTVAMEATGVYWLYLYEVLEAAGLAVVVVNGRHVQNVPGRKTDMADCQWLATLHAHGLLRGGFVPPAEIRHLQDYQRLRADHIIGAASQVQKMQQALERMNIKLHDVISDLTGVSGLKVVRAILKGERRPGELLALCDEQIQKKKSQAVKESLRGCWKKEQLFALRQALELWEAYQQKISDCDQEIQGLLQQLADPQAPQGGGGLIGPVQLAPAKLPGKNAPAIERFQELLARLCGGRDVTQIPGLGAYSVMQLISEVGTDLSAWKTEKHFVSWLGLAGGRKQSGKRKGSIKAHRNRAGRMFCAAARSLAQTVDKALGGFYRRLRGRVGGLAANVALARKLALLFYRLLRYGADYVEKGLKAYEAKVLETEKRLLLKLAKKQGLTLIPAASN

SEQ ID NO: 244199 - protein, 331 aa, unidentified
MDGVSIGIDVSKDTLVIAVAPPTPERWTSETTPVALEAVVARLVGLRPAIIVVEASGGYERPVVAQCAAAGLPIAVVNPRQVRAFAQAVGRSAKTDSIDAAVLAEFGARVAPPAQVVPDVATRALAALVLRRRQLIEMIVMERQRLAQAPPTGKITRDLRNHIRWLERRVADVDDEIGTAIQASPLWRVHEDLLRSVPGIGPTTARTLLAELPELGRLERRTIAALVGVAPFNCDSGQHRGQRRIWGGRASVRAALYMAAMSAIRCHPVLAAFYHRLRTLGKPGKVALVATMRKLLTILNTMLKQQRPWNPKAASTPASPSGTARAAAVLA

SEQ ID NO: 244200 - protein, 390 aa, unidentified
MNNEKYIGLDVHQATIVVAVMDSTGKLVMESILETEAATILQFFAGLRGTLSVTFEEGTWSAWLYDLLNPHVDKLVVCNPRKNALLKDGNKSDRNDARKLAELLRGNQLKPVYHGETGVRMLRELSRSYLTIVKDLSRVMNRLKAVYRSWAIPCAGRDVYYTRNRVQWLAKIREAGVRRRAERLYEQLDMLQHLRQQARRELLAESRKHAITAKLRQIPYLGPIRSALAVALIQTPHRFRSKRQLWAYSGLALETRISAEYRMVEGQVRRSKKMLSIRGLNKDHNHDLKGLFKGAATMASARPGPFQEFYQAALAKGIKPTMARLTLAQDYSHHADSVEEGRRLRRRKTKIASRLSVSGEEPFHLRVVFSGGGQSVLETLGFEGEYDKRL

SEQ ID NO: 244201 - protein, 382 aa, unidentified
MDSPRRFLGIIVPAGLMWCGVSAINREGSEMNATTVAVDLAKNVFELAVADARWKIVERARLTRAQFERWFDNRSVALVVMEACGSAHHWARTLRARGIEVRLLPAQYVRAYVKRNKTDAADAQALLEAARANDIRPVAVKSIEQQALQALHRTRSGWMSTRTRRINTLRGFCREFGLVVPEGAATGLAQIARYLADERSGLPEMLRPAMRLVLEEIRLMEARIGQLEQQLSALAKASPACQVLLSVPGIELLTSTAMVAAVADPRSFDSARRYASFLGLTPREYSSGSTRYLGRISKRGDRYLRMLLTHGARSILRAAAVAKRAGRQIDRLKTWALAVQARTNHNKAACALANKLARIAWAVWVKHEKYRAEPAHTASLSA

SEQ ID NO: 244202 - protein, 326 aa, unidentified
MKKKYFGVDVGSKELVLAYFPSGASGEVRTYKNTEAGIKKLLKLVSKSKDAHIILEATGTYSKRLIYGCLQADVPMSLLTPSQGKSIGMVLGKSNKTDAEDARSLARYGEMVEPPAYEHPSEQDEHNRQLLNYISYLNKQKTRISNKLHALSFEQHPCNYVIKELEEELVKIEAKIKKAMQELEQLQEGQLEQAVAKAETVVGIGRKTALCLMLLTGGLSHFETAKQLANFIGICPALYESGSSINRRATISKKGNKMIRSLLYMCARSAKQHNPSCKALYDRLRKKGKAHKVAMVAVGHKLIRQVFAVVKNNVDFDKQYKNEKFA

SEQ ID NO: 244203 - protein, 468 aa, unidentified
MPEGLDRRPGWVGRVATASLLERVVPEQTDVLRELPTADQAHSGRDGQAPTCLIDDGECVAAVVVASKVPVGGLLTCLPSCGVGFLSNCLLTGSFTEVWLERGESTINPNQECPPRFPSPRKASTAMTITIGIDPHKGSHTAVAIDSHEHVLDEIRVRSCSTQTTRLRDWADRFGQRTWAVESAHGLGYLLAQQLVAAGETVVDVPPVRASRVRVLGSGRSQKNDPNDARSIAIAALRADDLTAVCADDHARVLKLLSKRHRDLGRLKNKASCRLHALLLEMVPGGAGFRITSVTRINAVIDDYEPADAMGRQRQEIATELAGDIDRYNELLDASKQRITTAVAASGTSLRNISGVGPITAAMIIGETGNIERFASKHHFASYNATAPVEASSGSKVRHRLNQRGNRKLNWAIHVVAISQLRHDTPGREFYDRKVAEGKTSKEAIRALKRQISNVVHRHLVADARQQH

SEQ ID NO: 244204 - protein, 336 aa, unidentified
METKFAHFAGIDVSKSKIDVCLLVSNNRTEVLHQSFEQSKKGFAALKKWLVQLTGKQTDRLLICVENTGLYDDALLYYLSDNSFYVSLENAANIKRSVRDNRGKTDKLDARNIALFALMHYDELRLWEKPRKQVVLLQQMLSERSRLVNTLKMLKQAQKEQQVFSWSGRVQSKSYQAGIKGLQKDIEQIEKDIWELVKSDKALLQMFVLITSIPSVGKITAYHFICYTNEFKEVKSGKQLASYCGVVPFERSSGSSVRHKPRLSHQANKVLKTLLHLCAVTAIKMKGSFAAYYRRKIEEGKNGLIAINGIRNKLALTIAAVIRNNQPYNDNYIYQY

SEQ ID NO: 244205 - protein, 347 aa, unidentified
MQNRTVVAVDIAKSVFQLAISESPDQPVRDRRLRRSEFFAYFEKLPPAIVAMEACGSAHYWARRIQALGHTVELIPPHLVRPYVTRNKTDRADAHAILESRRNRAIHLVPVKSEAQQALGAIHRFRSGWMAARTAQVNTVRGLLREFGFLIPVGVENVVPQVRLLVEDADSKVPDPLRSLLHAACCEIEALDQRIKQAGKQLEIEAEGSPAARLICSAPGVGLITGTALLAFVGDVGRFSSGRHFASYLGLTPRERSSGGTRRLGGISKKGDRYLRMLFIHGARSVLCHAKRAKTHDRLRAWALALQSRSRHNKAAVALANKIARIVWAILKNGRAYDSTSSLPAAA

SEQ ID NO: 244206 - protein, 422 aa, unidentified
MLGVGLDWAESFHDVALGVPGKGVIEQFRFDHGPAGTQRLIGRCLELEPDPAEVRVVIETRHGLLVEALSDAGFTVLPVNPDLVARRRGPAKKKDDAEDARICCLLALDAYLELRKLIPHGENGTELRAIARDDVRAARDERRLGNRLRADLLAVFGAAIDIADGDLNAPTFLKLIQRWPSADQLATATRADLEAFARSCRHGWPDAFAGRVLDALAQPRLNVRPELARAKAGSIGLAAAQLLLLRAQRREWERRMGELLLGGRRPRPGVAPKETDPGKAFPGGETYLSMPGLGDRLAARVAGEIGEHWDQFTTPNALQCYAGRAPVTRRSGRSEFTIARRLAYNRYLGEAVQQWAFCSLTRSTWAREFYDAKIAKGDNHHTALRKLANRWLEVLWHCLRLGVPYDEDIHAANRRRALTPAA

SEQ ID NO: 244207 - protein, 461 aa, unidentified
MGIDVSKGYADFMIINSRKKPVAQTFQLDDTFEGHRTLYNTLGAFLAKHDDATLFAGMESTGGYENNWYHSLIQFQGSLNIQTARLNPLGVMHNSKADLKKNTTDKISAQNIAEYLVSHPEKVNYQQEDNLAGLRKQWGFIRMLTKQCAQFLNELNALLYSTYPELLSDCQDGVPNWVLKLLVKYPSAANLKKAHAKTLAKIPYVSMKRAQELIEKAKRSVAATTDLTTQQLVVATVQQILHLKKTIAGQTDLMLQECSTPEIELLKTFPGISDTSAIGLIIEIQTVKRFASAKKLASFFGVHPVYKTSGDGAGGYKMSKQGRSEPRRILYMVALAAIRCNPLIKEIYEKHKRQGKQSRAAIGICMHKILRILYGMLKHNQPFNPHVDLANRLRSVPVQNDNAIDKTSRRFQGYDQFAPVSRRQRIKRLERERSHNVNDTKSGITAPAPLADIIAEILPRL

SEQ ID NO: 244208 - protein, 419 aa, unidentified
MIEDVHWFVGIDWATQSHRVCLLDAEGRRVAEREIVHGGAGLMELRDWLLEKTKATPVQIAVAIEMPHGPVVEMLLEHGFMVLAINPKQLDRFRDRFTVAGAKDDSRDALVLGDSLRTDRKAFRQLATDDPAVIELREWSRLMDELQQERTRLVNRLRQQLWRYYPQAAELTDDVADDWFLTLWQKVPTPAAAAKASEKAIARILKEHRIRRFDAATVLQTLRKPALVVAPGTTEAACLHIRSLAARMHLVNQQIKEAGAALDGLCDSLAARDEESSSGQSHEQCDVAILRSWPGIGRIVLATLLTEAAQPLRARDYHALRALTGVAPVTRQSGKQRFVIRRLACNKRLQTAVHHWSRVAIQRDAAARRRYDALRQRGHGHARALRGAADRLLSALCATLTHRTLYEADHRSAQTLAKP

SEQ ID NO: 244209 - protein, 428 aa, unidentified
MIDQQHSTAAANLVAIDIAKDWNVALVQDASGRRQRFKFANRGADHDHFVQFLRSLSGPVKIGLEPTGDYHRTIAHRLLTEGFEVVSISSLALARFREARFGTWDKNDPKDAQVMLAMMAQGLVQIYWDPLFSGSHDWQELSSTYFHITLARTRLQHTLLLHHMPLYFPEFTRYWYSTRSEWFVRFLLRFPTPVAIRALDREAFIAEAWDLVGRKVSKRAKLEEMYALASDSIGLPVALDSPAIETFRLQLTRYLELNRQREHLDHRAQELLAENADFQRLKTLPGIGAIIALTILAEAGDLRRFRHHRQFLKYCGLDLSKSQSGQSKGHEVLSKRGNKRLRLAFWLAGLVAIHQRENAFRDKYERYLSATPFDADRKRKALTAVAAKMARVAYAVVKHGTNYQCFFEHRLPSGSIPLARAVEATSTS

SEQ ID NO: 244210 - protein, 438 aa, unidentified
MTGANERSEPDFAAFIGIDWADQRHAWALQTTTQGAMERGDLDHTPEAVDAWATELGRRFGGRPIAIALEQSRGALLFMLTKYAHFVLYPIHPTTLVNYRRGFRPSGAKSDPSDAGLLLDILVRHREKLRRLNPDTAETRTLQFLVEGRRKLVNDKTRYSNRLTACLKMYFPQVLDWFGEVSSQIAGDFLERWPTLQKLQKARPDTLRAFFIQHHSCRSENVQRRLEEIRRAVPATHDMAVIASSVAAAVAVVRLLRELRQAIHSYDEQIETMARQHPDFVIFDSLPGAGAALVPRLIAALGTQRDRYNSASELQCYSGIAPVLASSGKQSWVHWRWACPKFLRQTFHEWAAHSIGSSAWASAYYNQQRAKGKSRNTAVRALAFKWIRILFRCWKDRIPYQEDLYQQALVKRTARANQTVNLQWKTCGGFSKFSGLSS

SEQ ID NO: 244211 - protein, 349 aa, unidentified
MKRYIGVDVSKKTFTVAYSSDKKSKTSDFENIPKGIKKFIGTLKPEDHCVFEATGNYGMNLLYMLNSSNIAVSMENPQKIKNFAKAMLTTTKTDSADAKMIALYGEKMQPAEYKVPSEEILTLKQKRSVLRQLKRQLVMNLNLKESLKVLPKIDTKALRTVDDMINFIQKQIEKVESDMASVAEETFNRQVKLLESVKGIGKTLAVALIVSTGGFTYFSNSKQYTKFIGLAPIYEQSGSSINYHGHINKNGDPYLRAQIYIASLSAFQHNTECKKMYERLCAAGKPKQVAVIACSHKLIRQAFAVIKNDTPYRDGYISENPMMSKTRKMANKLDEFDASANGKNQGSNC

SEQ ID NO: 244212 - protein, 344 aa, unidentified
MSEVIIIGLDIAKHVFHAHGADGRGRAMFSKRISRGKLLDFFAAQPRCMVALEACGGAHHWARQLTQLGHEVRLIPPAYVKPFVKRQKNDAIDAEAICEAALRPNMRFVAAKSEEQQAAGLVFRTRDLLVRQRTQLINAIRGHLTEYGWIAPKGPSHVAMLAELIEEEEMVNSLPGAARAMFRVMLDLLTGLSGKIADLDKEIARRAREDEVSRRLMTVPGIGPISATAIAALAPPAESFAKGRDFAAWLGLTPLQRSTGGKQKLGATSKMGERTLRRLLIIGSSAVVKQASKRGAPRGSWLEQMLARKPRMLVTVALANKIARIVWALLVKQENYRAPVAAKA

SEQ ID NO: 244213 - protein, 387 aa, unidentified
MQKPHDNSKASPAAFMQDNTLIAVIELGLSNWLVAGLIPGVSREPLKKLEPNPEDLLKLLHGWRDEAIKAGRPITRIAVAYETGRDSFWLARWLRERGIDAHVIHATSVAVSREHRRAKTDRLDTAMLKRGFLGWLRGERGHCTVAIVPTMEEEDAKRPHREREGLVHEQTRVVNRMKSALIQFGVRNFNPKLRKARVKLETVRTPGGKSLPPNTIAALRRDMERLKIIKEQIKAIEQTRLQQFEQKPEALANRMVYLLVRIYGLGWETADLLVHELLSRTLRDRKAVARYAGLTGSPDESGSKRREKGLSRSGNARVRKIMIQLAWRMVKFQPDSALVQWFKQRTENAKGSRKPMIVALARKLIIALWRYANDGVIPEGFRLHSAA

SEQ ID NO: 244214 - protein, 419 aa, unidentified
MTVITIAQNTPVLVAIDIAKARHEVLIAVPGKKRRRRLTVLNELADFTRLIAALKDYGHPVRAAFEATGNYHRALVYHLATAGFEVKLVLSVALARTREALHNSWDKNDPKDAQVILHMMEIGNEQFYHDPLVRGTNDIQELSKTHDIVSKSKTELWHRILTHYLPLYFPEADRFHRSSRSDWFFAFLERYPSPHFISAMSKDAFIADAWDVVGRKVAKERLLADIYETSKVSVGLPVGLDSDAISMFRLVLGEGRSLIAQRNQIEDRAVALLKDLPDYQLLTSIPGIGPINALTILAEAGDLRRFGHHRQFLKFCGMDLATIQSGTFRGQTKLSKYGNARLRRTLWMAGQVAILQRANSFRDKFERYIARTATTPICAARRIPQSLPRWPVLFTGSSKMANPIAPSLRGDRSQKDLSL

SEQ ID NO: 244215 - protein, 340 aa, unidentified
MFKNFIGIDVSKAKFDLALIKDCDKEHMIPAVFENNQKGVKAMVKFLDKECQVQLSDTLFCMEFTGIYCRPLTTFMTEKECNVWLEMPVNIIRSLGLQRGKNDRVDARRIALYAYKNKEDIKLWKPQRDVILKLRDLLSLRERLISSRKSLMAPIDELIAMGDKQGAARVKRGCKLTLSSIEKEIEQIDRDLDDTIKNDPQLKELYSLATSVPGVGKYTALFMICYTNEFSIYNNPKQLACYCGVAPFEHSSGSSVKGKTRVSHMANKVLKRMLHMGALSAISRDPELSDYYQRKIALGKNKMLVINAVRNKIIHRLCAVIKRGYEYQPENLFKEQLVLS

SEQ ID NO: 244216 - protein, 364 aa, unidentified
MKIVGCDLHARQQSIAMVDSETGEFTEKLLKHEGNAVQDFYDSLEGPVVVGIEATGAMQWFLELLEELGIKCRVGHPAKIRAAETRKQKHDRRDAEVILDLLEMKDRFPDIWMPSTEQRDLRTLLRDRHQWVKMRTRLQHTLQAIALNHALREGRALWTAAGQRALRGLALPHYTDQRRDELLSLYTQLDKRIQQLDKQVETEARQRPRARRLLTHPGVGPVTALATEVFLGDPNRFATANQVASYIGMIPCEHSSGKRQRLGKLTKEGNSLLRYLWIEATLHAVVKDAELKRFYRRKLIQKGMGKARVAAARKLGIRLWIMLRDDIDYEEFCRRGKLRQKGEAHAGMPDYDSGPAQAVTGSTE

SEQ ID NO: 244217 - protein, 340 aa, unidentified
MQAITVGLDIAKSVFQVHGVDCNGQVVIRRQLKRRYVLTFFEKLAPCLIGIEACASSHHWSRQLLALGHDVRLMPPSYVKPYVKRQKNDATDAEAICEAVSRANMRFVPTKTPEQQSGLVLHRTRHLFIRQQTSVINAIRAHCAEFGIVAPVGRQGVEELLNVIADAEDEQIPEIARACLSALGDQLHRIKAQILEFDRMIGAWHRSCEASRRLDEIPGVGPATALVASIADPRTFRSGRDFSAWIGLVPKQSSSGGKPRLGSISKQGDRYLRGLFTAGALAVIRYAKIHGIGHRPWLTALLARRPIKVAAIALANKIARIAWAMMARGERYREPVALAA

SEQ ID NO: 244218 - protein, 379 aa, unidentified
MGDRISYVGLDVHKDTIVVAVADGGLRGEVREYGRIANTAAALDRLARKLGGDGVMLRFCYEAGPCGYGIQRQLSARGHECVVVAPSLIPKRPGDRVKTDRRDAASLARLHRAGELTAVWVPDPGHEAMRDLVRARLDAVHALPHGTSPWAEGPRARQQLSGFLLRQGRHYGRPAWTKLHRRWLAGLKFDQAVHHLVLEDYLQAVEAAAARRDRLTAQIAAMLPDWTLAPVVAALQSMRGMALVNAATFIAELGDLSRFTNPRQLMAYLGLVPSEHSSGASVKRGGLTKAGNSAARRLLIEAAWCYRFPARISRELLLRQEELPKAIRDIAWKGQVRLCARYRKLARTGKPANVVTAAIARELSGFIWAIARRVPLAAS

SEQ ID NO: 244219 - protein, 414 aa, unidentified
MNERYQVAGIDVHKRMLAVVIVDAAAEGEFRFQRRKFGAVDSELRALGQWLAEQEAREVVMESTAQYWKPVWRQLEGQCRLHLAQAFSNRAPRGRKRDFQDAERLVRRHVAGELILSFVPDPEQRMWRTITRTKYQLTRDRVRLHSQLESLLEDARIKLATCVSDLLGVSGRSMLLALAKGETNAVALAALAQPELQATPQQLADALSAAATLSPLHRQILQLFLDRLTLIEQQLATLHHSIAAALHTHQQAVLRLAQVPGYGVDSAQQVIAEVGPEAATFGTAGQLASWVGVCPGREESAEVSKNNRTPKGNRMMRRVLNQVANAAVKTKGSVFESLYRRLLPRLGHNKAIWAVAHRLCRLTWKILHEGVEYIEYGSPRDPKMLQKRAAKLMRELRSLGYQVIPPTPQAGAHT

SEQ ID NO: 244220 - protein, 320 aa, unidentified
MNKITEISVGVDVSKNTLDVCFHQTKSFFKIENSHKGINLLLKKLANFKVDKIVFEASGGYEQRLLLALEEAEHNYWRVNPIRVKGFIASEGTLAKTDKSDAKMLALFAYKKDKKNENVKVKEEERRLQCFFRRRRGLKRMIVTEKQRLDKPMEKYCKTMIMRTIKFFEKQIKSLDKEISKLISDNKNIQRKIEIIESVPGLGKESSSALVIEMPELGKIRNKQAAALLGVAPCTKESGTYRGRAIIKAGRRVPRKVIYMAALTASRFNPDFAKFYKRLRKNGKPGKVALVAVMRKLVELVNTLLKENRLWENRVLERYV

SEQ ID NO: 244221 - protein, 344 aa, unidentified
MERKFKLIFGIDISKLTLDVTYLFNDSSHYLQVPNNAKGISQLVDKIKELDIKEKEVLICCENTGNYTEKLALVMKGLDVTFWVVHPIIMKGYRLNLQRAKTDKVDSMKIAEFALAHQHKATNFHHPDQKTKELKELYLLRKQLISLRQRTLNFIASESDKAIPGILNTVIYDQLKHFLTDLIKEVEKSIQLLIKSEKTINSYYNILLSIPGIGPVIAQHILAVTDGFKKIVDYKAFACYVGIAPFERSSGTSIRYRQRTSKKENQELKAEMHQGALCVISKGQLFHSYYKTMLDRGKHHLWILNTIMNMIAKSIFVLANKMTPFNNEIFVKNKKSWQNNLVLS

SEQ ID NO: 244222 - protein, 398 aa, unidentified
MTESSDYESVQVFIGVDVGKDTHHAVAINRSGKRLFDKALPNDENKLRSLISDLKQHGQILLVVDQPATIGALPVAVARSEGVLVGYLPGLAMRRIADLHAGEAKTDARDAAIIAEAARTLPHALRTLKLADEQIAELSMLCGFDDDLAAQTTQASNRIRGLLTQIHPALELVLGPRLELPAVLDLLQRYPSPEKLASLGEKKLAAQLCKLAPRLGKRLAADIAQALAEQTVVVPGTNAAAVVLPRLALQLITLRKQRDEVALEVEQRVLAHPLYPVLTSMPGAGVRTAARLPTEVACRAFASAAHLAAYAGLAPVTRRSGSSIRGEHPSRRGNKALKRALFLSAFAALRDPLSRAYYTRKMSQGKRHNQALIALARRRCDVLFAMMRDGTFYTPQGS

SEQ ID NO: 244223 - protein, 323 aa, unidentified
MSEHITICAGIDTGKYKLDVAIDRCVDQLQVDNTADGHAALSAWLKWRRVKRIGIEASGGYEQGVVAHLRRDGFVVVVFQPAQVRAYARFLLQRAKNDKIDAALIAACTAAIKKIHAPPDTRLAPFAARMTLIEQLTEQVACCKNYREGHRDPQIRELWQKEIARFNKQLRAELKSLAAAIRQHRDLAERLDLIESVDGVGLKTAVAILVRMPEIGRLTREQAAALAGLAPYDDDSATHLGIRHIAGGRERLRGSLYKAALAAAFHWNWQLIALYRRLTKAGKSHKVALVACARKLLIFVNTVVERGTPWVSAQPLSVTSNRV

SEQ ID NO: 244224 - protein, 402 aa, unidentified
MKHVLAFDVSMGKSTMVIYNHHKQCEHEGELTHTKSSFKALNEKIYELTTLDGQAPEIVFEATGVYSRPLEYFFQTEGHTYHRVSPLEATIQTSSMRRNKTDKSDAHELAKSHFRTERTTTYQEEIYYKQMRALTRYYNELDSEVINLFSRMHAILQLSFPELEHLFSKRSALFLNVVQLFPHPDEVLNSSKTVIRNRIKANTKKNISLTCAEEKGIELLHAARDSYPAISREDVRCDQVRDYAKRIADLKEKKEKLIKEMVTLSEEHIEYKVLLSFPGIGEATAVRLIGEFGDLRRFKNPKQLNAYVGIDIMRYQSGKTFYKDKINKRGNNKLRKILFYMIQTMIRLRTKTNNHIVEYYDKLKTQPQGKPHKVASIACVNKFLKVVFHLITHNITYDYEAV

SEQ ID NO: 244225 - protein, 324 aa, unidentified
MTYVGIDVSKATFVVAYSSAKGSKTRTFKNATKGIHEFIQTISPEEHHCVMEATGNYSSLLVYLLSEAGFTVSLENPLKVKNFARAMLSVTKTDEMDAHLIALYGEKMQPAPYKLRSDTILTLKQKRTVIRQLKKQLIATRNLKGSMEALPFFDNMSRKTIEKTIAFLGKQIRAMEEELSSLARKEYKKQMDLLTSIKGIGVTLAAALIMATGGFTYFDNTKQLTRYLGLSPTYQQSGTSVNVKGHINRNGDSSLRSQLYVAAFASLRCNKECKACFDRLRSNGKPGKVAVVAVANKLVRQAFAVVTQGKPYVDGFKSEKTSSY

SEQ ID NO: 244226 - protein, 314 aa, unidentified
MYQNFIGIDIGKFEFHVAIDDRNKVDVYSNTPEGFEKLYSTEKSILETGLIILETTGGYEMALVRFLQGKGCALHRANTRKVKNFIRSYGQLGKSDNIDAQALSQYGKERHSNLSLFIEHSDKLLLQLIRRRIELKGMLVQEKNRLKAPEQSALISSYEKIRDVIKEEIACIEEKIEEIFKQDDSLNEKREVLKTIPGVGDITATQLLMLMPELGKINRKQIASLGGVAPHPNESGKKVGYRYTRGGRHEVKPVLFMAAMSAARSKSQLGSKYNSFVDNGKKKMVAITAIMRKILVIANAKMRDYYINNHAEVA

SEQ ID NO: 244227 - protein, 337 aa, unidentified
MTLYCGIDLHANNSVVAVLDEHDQTVFEKRLPNDLATIIDVLSIYQAELDACVVESTYNWYWLVDGLMAAGFPVRLAHTSALPEYSGLKYSNDFSDARQLAHLLRLGLLPTGYIYPRQERALRDLLRRRLLLVRQRSLHHVSLQSLIARHTGRRLNTHQIKTLMQEQLADYLQGHALLSGEITHQARCWLDRAVRRIEQELQLQIKPREDYQLLQSVPGIGPVLGTTIALETGTIKRFASAGNYASYARCVKSEKISNGKRKGQGNKKNGNKYLAWAFMEAGHYGSIWSPRIKRYYQRKKARGHILVAKKAVANKLARACYHMLNRHEVFDVTRAFS

SEQ ID NO: 244228 - protein, 341 aa, unidentified
MKITTIGFDLAKHVFQIHGVDESGTPVLRKRLRRAEVLPFFAGTDPCLVGIEACATAHHWARELTKLGHTVKLIPPAYVKPYVRRGKTDAADAEAICEAVARPSMRFVPMKSADQQAVLMLHRTRALLVRQRTMLANALRAHLAEFGIIVAQGVGRVGALIDRIFGRSEEELPPLARNALKPLATQFLQPQPQIKALEADLLAWHRTNEESRRLETIPGIGVLTATAIAATVTDPSHFRSGREFSAWVGLTPRQNSSGGKDRLGHVSKMGDGYLRSLLFVGAMAVIRFARNKASLRTAWINSLLARKPARLVAVALANKMARIAWAVLARQETYRAPAITA

SEQ ID NO: 244229 - protein, 404 aa, unidentified
MKGPIVSIDVPKGKSDYQAFKDLNVKYTGSRSIKHTKEGFDEIVNLVREMEKKLETEVCVVYEATGVYHRVLKKVLEDNDIKQFIINPLLSAKTRKNDSLRCPKTDKLDPKSIAKTYYSHSLHNSHKQETIYHELRELSRYYEDILVHIRKDKVAFRAQLDIVFPGYDTLYDDLYGPVALAVIEKYPHPEMLQKKKINTVSKVIQSKTCHRQAVSDTMADKAIEYSKTIYSGCDKDDIEVLILQRLIKKLNEDMAEAERTIGEMIKLAQELPDFSIIKSIPGIGDNLAARIIAELGDMTRFKKKNELVAFAGLDPRISESGQNDGDHMHITKKGNKRLRCLLYLAVTCSIRLKRDDNSIKDFYIKKKQQSNPMCSKAAKTACASKLVRIIYSMCKTGELYQYNK

SEQ ID NO: 244230 - protein, 421 aa, unidentified
MSPDEKRAYARTFPVHVGVDTGKRFHVLVAQDAAGRRTAAHKVLVARASFEQADAQLRTWYPSVRRDQMLVGLEFAGHHGFTFARYLADRGYPVVNVLPAHTKRAKEIEDNSPLKSDPKDAAVVCSLLGHGVFVRFPFLTRPYVELRLLTTHRHRLTVEATRYKNRLQSLLDLVWPEFLEQFSTIEKATPLALLERWPLPRDILAAAPRTVRSFIHETSRGHIGADRVRDLLASAKTTIGLPDAPEERRLEIQYLLTRWRLVREQTDELERRIGALVEICPEAKALLTVPEVSAVCAATLVAELGTPADFDHPRQVLKLAGMNLVSASSGQRDQTRVPKWQSKRGRPALRRQLFLLAGRWCHERGLYRADYEALRGRGSTKTKAVCTLARKLVPMLLAVMHTGEPFDVTRWTAHRRERAAA

SEQ ID NO: 244231 - protein, 362 aa, unidentified
MAKISRQSTPKVGNRIRLMPGEKVSVGVDTHKKSYHVAVWSLDRDRLLATWVQAADPHRLVDRLRPHQEQVSWVVYEAGPTGYGLVRELRAAELHADVIAPSLTPSTPGQQAKSDRLDCRRLAEFAAKGLVRPIEVPTPQQEADRQILRLREQMAKKNRQVKSQIKSFLLLHGVKEPHGLDHWSDASVADLRTLQLAEPLRFCLDRLLEEMDHTASLVKKVTACLRAMAATKRHASGIALLQTTPGVGPLTAMTYRLELPRPERFDNSREVALMMGLAPHVRSSGMTRREGRLMRAGNPRLKAVLVEAAWRWIRKDPAAGVRYRRLVANTGNANKAIVAMARKLGIILWRMSLTGECYREAA

SEQ ID NO: 244232 - protein, 380 aa, unidentified
MFDRTYVGLDVHAQNVVACALDTATGEIVRDKMACDPVAVTAWLERFDPEHLQVVYEAGPTGFGLARHLRLHGIDCVVAAPSKLLRAPGDRVKTDKRDAMGLARILSLGQITQVRVPTLGQEGLRDLSRARMAAAKDLAHCRQRINSLLLRHGLHYPEKSRWTSPHLAWLGRQRFDSTATASTLESYLEQQVLLMQHLKRLEAEITEQAKNSEYAQVINALMCFRGIDITTAYGLAVEISDWTRFTGSSIGAYLGLVPSEHSSGASRAQGPITKAGNTYARRLLVEAAWQHDRPFRRPGTRLLRQLQLVDSATRIRALEGNRRLHRAWERFNARDKLRTKANTAIARELAGWCWSVAAPLQQAVQDKAWPVPEGAAMNAA

SEQ ID NO: 244233 - protein, 315 aa, unidentified
MYHNFIGIDISKNDFVVAIHGKKKTFKYLNNLTGFDEFLSDHPILKDKSFVVVETTGGYEKALLEYLITKNIVVHRANTRIVKHFIRSTGQLGKSDNIDAFGLAKYGYERHRDLEFYQPNDDKMQKLIKYILRKQDIKKQLAAEKNRYQAPDQKYTKDSHQRMIEFYKQEIMIIESLINELVDDCQYLAKARDLLVKEVTGLGNATATSLLALMPELGNLNRKQVASLAGVAPYPYESGKKVGYRKTYGGRADLKPILFMSALTAARSKGKLGIFYRDLVEKGKKKMVALVAVMRKIIVIANAKIRDLKRDLKIS

SEQ ID NO: 244234 - protein, 472 aa, unidentified
MKSKSSRKPNPVDPVAEEIPDAEHELVIERVAAIDVAKASGKVCVRLPGQTGRRFSRVWDVPARTGAVSELAEQLIESGVEKVTIESTSDYWRIWYYLLEAAGLDVQLVNARDVKNVPGRPKTDKLDAVWLAKLTEKGLLRPSFVPPAEIRQLRDYTRLRVDLTRERTRYWQRLEKLLEDALIKISAVASTLDTLSTRDMIEALIAGERDPGRLADLARGKMKAKRSELIAALDGRFDDHHRELARMLLDQIDTLTAQIATLTSRIEQLLAAMPDTRSRGDGGTGGDPDRPSTGHGVEPETAARFTDATLLTPVERLDEITGIGELNAQVVLAEVGLDMTRFPTPAHLVSWAKLCPRTIQSGPATRGGKTGRGNPYLKGALGEAAAAAARTDTFLGERYRRIVKRRGKLKALVAVARAILVVIWHLLANPEARFRDLGPDYHTQRIHTERKLRNHIAQLTAMGYRVTLEPAA

SEQ ID NO: 244235 - protein, 351 aa, unidentified
MPHKTAATVAHTIGIDAGKNTLHLIGLDDKGAIVLREKVARDRITVRLANVPQCLIGIEAGMATHYVARELSALGHDVKQVPPAYAKPFRQGHKNDFRDAYAIAEAVQRPSTRCVPVKTDDQLDLQALHRVRSRLVGQRTAVINQIRSFLLEHGIAIRQGLRFLRQQLPDILAKRSDVLSPRMIRIIEDLSGDWRRLDERIEHITAEIEVLAQGSESCRQLMTVPGVGPIIASAMVAAIGNGTAFAKGRDFAAWLGLIPKQMSTGDRTILGRITKRGNRYLRTLFMQGARVILLRPANWMKHSFGPWLTAAANRLHHNVLATALANKLARIAWTVLMQARSYEARVEPRTA

SEQ ID NO: 244236 - protein, 358 aa, unidentified
MNQIIRIGMDTSKYIFQLHGVDASEQVVLRKRLGRSGMLSFFTKLAPTVIVIEACGAAHCLARELGKLGHTVKLIAPQLVKPYVERNKNDGRDAEGLCEASSRPRMRYVPVKTAEQQAALMLLGVRDQLVMRRTQLSNTIRGHAAEFGLIEAKGLDKLASLLAAIEQGDSVPVLARDLFAMLARQYAQVQVELKAIEARLLAWHRGNALSRRLAEIPGVGPVTAAALVMKAPDPHAFRSGRMFAAWLGLTPKDHSTAGKTRLGKITRAGDERLRQFLVVGATSVVKQATGKHHRGPRWLLELVKRKTPKLAAVALANKTARIAWKLMTTGESYDSARIDAQRDAQRDAQGDAQGAAAA

SEQ ID NO: 244237 - protein, 417 aa, unidentified
MRVNEKIERITPETLICGIDVGKTKCCARFCDYRGLEVYHKVWFDKTENLDAIGCQITAAMYKENKTDVIIAFEPTGHYWLNIDKYFKDNGQETVLMPTYTVKQAKEMHDQNPTKSDPKDALLIARLTSEGKYVKPIERDELYQNIYSGYSIYEDIQKEVNRIRNKIHVWNDKYFPEVEKVYKIDSVGIKPIYENQLLPNEIKNMTLENFIELMTKNNSRANKKSIMKLKELCEKSNGINSDAFTKKEIKRLYERFIELLKELEEYEKELIELASQIDYVEKAIEITGIGYMSMVGIIAETGDLNNYEHAKQVLKMSGLSLKESSSGQKKGKKHISKRGRSKLRRNLKQIGICLVGKNNFFLQLHNYYTTERANPLTKLISINAIIRKFMYILMAIVKSGNSFDEERAIRESCISFS

SEQ ID NO: 244238 - protein, 344 aa, unidentified
MDHFAGLDVSVKETSVCIVDDTGKVVREVKVASEPEALLAVLKNPAYHFKRIGLEAGPLSQWLFSALAEAGLPVICVETRHMRAVMKAQINKTDRNDARGMAQMMRVGLYRPVHVKTLRSQKLRMLLTHRKLLQSKAIAIDNDLRGTLRNFGLKVGMVGTVRFEARIRKLVENLPDLAALVEPLLIVRRTLREQFCILHRRLLAIVRDDEVCRRLMTAPGVGPVVSLTYRATVDVPARFRKSKSVGAVFGLTCAKYQSGEVDWSGRISRCGDEMMRVMLYEAAQSMMRSKKWSWLKAWAMQIARRCGMKKAIVALARRLAVIMHRMWVDGTEFRWSREQAAAAA

SEQ ID NO: 244239 - protein, 417 aa, unidentified
MDPDVEVVHSRCCGLDVHKKVIEACIIVPEGKKRNQYGTMTEDLQKLVTWLQEHRVTVVAMESTGVYWKPVYNILELAGFEILVVNAQHIKAVPGRKTDVKDAEWIAALLRLGLMKGSYIPSREQRELRELLRYRTKLVEERGREVQRMQKILEGANIKLSSVATNIVGSSGRSMIEAMIDKIEDPRVLAKLAQKRLKNKREDLERALNGLMGAHQRMMLQAQLKHIDFLDEAIETLDKELAERKKDDATFHESLELLDGIPGVGVRTAQAMLVEIGADMTRFPSADHLAAWAGMAPGNNESAGKRKTGRTRPGNSHLRTVLIQAAHAAARVKNSYLNDQYHRIAVRRGAKRAAVAVGHSILVMAYHILTRREPYKELGHDYHQLRRKDLKIKHYCKELLKFGIVVNLEANAQTIAV

SEQ ID NO: 244240 - protein, 348 aa, unidentified
MLHAGLDLSRKRLDFCLLDEQGARVEVGAAPPDMDGLTALARRVHVQYAGHELRAAVESMNGARFVHDTLERLGWQVEVADAAKVKGLAPLACKTDRIDAWVLAELSRRDLVPAIWLPSFELRQERERARWRLFLVRKRVALKNRVHAQLVAFGHPCPVADLFGVRGRELLERLNFPEPWRANVLLSVAMIDDLNREIEAIEKELRALGADHRYVPLLMTVPGIAWVLGYTIAAEIGDIDRFASPKKLTGYTGLCPQVYQSGSKDHRGHLTHAGPRYLRWALVEAAVRACHHDAFRDRYEHTKRRLGKQRGPRVAQVEIARRIAESIWYMLSRNQPFAPASAVDTLAA

SEQ ID NO: 244241 - protein, 411 aa, unidentified
MYYVGIDIAKKSNVSSIINDKDVFIKKSFKFNNDEKGFKEFTNLLSSIDKNIDNFIIAMEATGLLFENLYLYLKGKGYNVILLNPYQTSKFREMNTMKKVKNDNIDAIMIASLIKSGRYSKAYVSEEVYASLRALHRHRASLEEELKKHKRQVSSLLAVVFPEFEQVVKNPFSVSGLALLEKYPTAKNYKHASAQRILNVFRKIKGNNFNIQKAEKLLELAKSSIYSGNAYDERAFVIQSHIRAIKFLQKEIESIDNEMLKLFNASPSFTKEEEQEVIDIIDNLRTIPGVSDKTLFTIMGECGNLDRFKNINAFIGYLGLYPTLEQSGNKTSYGKLAKRGSKLAKKALYQAAVAAIRHNDEMKKLYCDKVSQGKAKKEALVIVARKLAAIILAIYKNNTPYNPARVFNQNT

SEQ ID NO: 244242 - protein, 403 aa, unidentified
MNSVGIDISKGRSTVAVMRPFGEVVISPFEVRHTGSELSELARRLKSLDGETRVVMEATGNYHAPVAKLLHDAGLYVSVVNAKLVHGYGNNDLRRVKTDRKDAVKLANYGLDRWLSLPKYVPEEDTRLLLKNCYRQYRQYSKVQTLLKNNLISLLDTVFPNANRLFSSPIRGDGSEKWVDFVAEFWHCKCVCERSERAFINKYQRWCRKHGYNFSETKAQTIHAVASGHIGVMPKSETTKLLVEQAVAQLRATSAALAALKHEMQTLASQLPEYPVVMDMFGVGPTLGPQLIAEIGDVRRFYSKKALVAYAGLDAPPNDSGDMTGRHKSMSKIGASSLRRTLFLVMSVYLQNAPLAEPVYQFMDKKRAEGKPYRVYMMASANKFLRIYYATVKAYLESLEHTA

SEQ ID NO: 244243 - protein, 311 aa, unidentified
MTDHTIGVDISKSHLDVFRLEDGAAQRFDNSAAGFRALIKWLGKAPVARIVFEPTGPYHRGFETALSGRFPLVKVNPLQARRFAEASGTRAKTDAIDAHVLARMGAALALEPDRSVSETSGELRDLQVARTGLVKERTRLRNRGQTQGNRVLKRQTRTRLALVERQIKELDAEIAKHIAGNEAMARKREILRSIPGLGQVAAAAILTFLPELGTMGRKQLGSLAGLAPHTRESGQWKGKAFISGGRKPLRDALYMPALVAMRFNPDLKDKYTALRDAGKPAKVAIVALMRKLLETANALVKADRLWVEKAH

SEQ ID NO: 244244 - protein, 421 aa, unidentified
MKKTGTGKIGRVKEDTLIVTIDIGLEMNRGYCTTTDWRDIKPFRFDNTRAGLDRLWSMIVVNKNRFRCDEVIVGYESTGPYGEPIGHYLSKKPVTVVQVNPMHTKRVKEINDNSPLKTDDKDPRVLADIILLGHSLSIVIPEGDAAYLRRLNNSRERHVGERTALLNQLQQLVFLLFPEFRTVIKDIQLKTALYILNKYLTPEIIGGLKKEELGEEMRKRSRGKFRESHAEMLIRLAKDTIGIREGAAGLSMDIRHILIQLELVNRLIAEIENEMEIALGRIPYSSKLLSIKGLGTVTVAGLIGEVGDFKKFRTQSEIMKLAGLDLYEVSSGKWKGRRRISKRGRSLLRKILYYAAMQAIRKNGIMHEYYTRLTGRGMKSMMALVAVSRKLLRIIHAILRDEGEYIVDYESVKGQVIKRAA

SEQ ID NO: 244245 - protein, 399 aa, unidentified
MAVNSEHPPRGVWAGIDAGKEFHWACVLDASGEILISRRVENDEADLSGLIDEVLAISEEAIWAVDQPGGSAALLLALLWERDQKVVYLPGLAVDRARDAYPGESKTDARDAHLIADQARMRPNLGGLNPSEGELAELQLLLARRRDLVTDQTRSISRLRDALLSLFPALERTLDLNSKGALTLVTHYQTPAPIRRAGHKRLATYLRKRGVKGADALAGKALTAAKAQSVTLPAEGVAARIVAELASEVLALKEGIGALDRELEQRFFARPEARILASLPGMGPVLGAEFLVSVGELCAFESADRLAAYAGLVPAAHDSGKRIGNERRMRGGNKVLKRVFYQSAFASLRSSPESRAFYERKRREGKKHTQALIALARRRVNVVWAMLRDGTTFEARSAA

SEQ ID NO: 244246 - protein, 339 aa, unidentified
MKVSTLGIDLAKNVFQLHGVGCNGQTVLKKKLTRDKFLPFLMQLEPCLIGMEACASSHHFARVLRQYGHEVKLIPPQYVKPYVKTNKTDAADAEAICEAVARPNMRFVQIKTAEQQAILVLHTERNILIRERTACANSMRAILAEFGIIMPRTLSQLYKKIPEILEEYDNELSPFVRCSVARQLEHLQGVEDQITLIEQELSRWAKTQPACQRVMKVPGVGLMTATYLVASVGNGQQFHSAKQFAAWLGLVPREFSSGGKQRLGRISKRGDRYFRYLLVHGARAVAAVIERHKDNMPWLYRLLNKKAYNVAVVAQANKMARILWSMLVHHTEYRTLSAV

SEQ ID NO: 244247 - protein, 344 aa, unidentified
MSNQDTCGIEVSAKQLVVRLRRYEELEPGRSFANTPEGHALIVRYLQRAGRVVRVCLESTGLYGLDLALALHAAEGLEVMVANPRAVRNFAKALMQRSKNDPLDAAVLEEFAARMPFQSWQPPSSPVLALHALTRRLRDLVEMLAAEKNRQHAAGLSQTIPAAVRRDLARSVRAQERAIQRLTRQTRRLIAQDPQLVERFQLLDSVPGIGETSALQLLGELAVLSPDLGARQWVAYAGLDPRAYDSGSSVHKKPRISKAGNKHLRHSLYMPALVGVQHDPHLRAFYQHLQGLGKVKMQALVAVMRKLLHAIHAMFRTHQPYDGSKLFRPTLTPVQEVTSAPVTA

SEQ ID NO: 244248 - protein, 347 aa, unidentified
MALPIVESRAITGGVDTHADVHVAAALDPVGGLLGVREFPVTPAGYAGLLGWLGGFGTVCLAGIEGTGSYGAGLARHVTAAGVRVVEVDRSDRQDRRRQGKSDPLDAVSAARAAQSGRARGAPKGRDGTVEAVRALMVAKRSAAGERTRTINQARALVLTGPDDLRARFARHTAAALVAGTAALRPRPGDVVGYATRVALRELGRRAEFPGGQLGRLDELIVPLVTVYAPGLLALYGIGPNTAALLLIAAGDHPERLRSEAAWAHLCAAAPIPASSGKTIRHRLNPGGDRQAGHALWRIVFTRMGSHPATRAYAGRRTAEGKSKAEIIRCLKRYVAREVYPHLRAAS

SEQ ID NO: 244249 - protein, 346 aa, unidentified
MSHYVGLDVSVKSVSICVVDAGGVVLARGETTSDPDEIASFVFENAPDVERVVHESGILAIWLTRELEKRGLPILCIDARLAHKALSGRINKSDLGDAEGLAHLALTGWFTPVHIRSVASERVRVLIGTRERLIRLRKDLEAHVRGVLKVFGICMGSVGRGGMRQQFRDHLAEAGQTDLAISIMADMFIPIHKALCAATEAMDDELKAIAHESDLTRRLMTVPGVGPVVALAFAATLDDVGRFRRAKDVGAFLGLTPRRHQSGETDWSGRISKCGDRDLRRLLYSAATTLIMQVRKPSQLRTWAKRLQDRRGFKKAAVATSRKLAVVMTCIWRDGTVFEPTREARV

SEQ ID NO: 244250 - protein, 336 aa, unidentified
MEPTTIAIDLAKRVFQIHYVEPETGAIHSKVLKRAQLAPFFANRPASRVVMEACGSAHHWARVLARLGHDVRLIAAQFVRPFVKSNKNDASDAAAIWEAAQRPGMRFVAVKTEDQQAMLAMHRIRQQLVRIRVMQVNQLRGLLYEFGVVLPQGRRASIEAAKAALASLADELPAMLLDSLQDQLSRLRALDEQIARIEQRILSWRRNDDACLRISEIPGVGVLTATAAVSVIGQARTFRSGREFAAYLGLVPRQNGSGGKIKLGGISKRGDVYLRTLLIHGARSVISSSKHLPERLHQMLSRRPTNVVAVALANKMARTIWALLAHGRTYEAAPSQ

SEQ ID NO: 244251 - protein, 344 aa, unidentified
MDYYVGLDVSLRSVAVCVIDVDGKHIFERSVACEIEDILACLRDVPDGQYRVGFESGAMSQHLYYGLRNAGLNVVCMEARQVNAALSAMRNKTDKTDARGIAQVLRSGWYGKVFIKSREAHALRALLSSRKAVQKKCIDLANEVRGLFRVFGLRLPSRVDQGSFDERVRPLIEADPDLSRALLPLLDARVMLYKTYRELDRRVKQAASHDEICLRFMAIPGVGPIAALTFRAAVDNPARFTSSRTVAAHFGLTPRRYQSGEMDNPGRISKAGDSDVRATLYAAANAMMMRAVASSEIKSWGLRLMRRKGRRRAVVAVARKLAVIMHRMWADNTEFRHGKVEGTV

SEQ ID NO: 244252 - protein, 389 aa, unidentified
MLLDHPSDGLAAIRTHIGAIFVSLELSRKNWLVTSLSPGKGEKMSRHSVTAGDVAGLMKLCAELRRKAEVRTGQSYPIITIQEAGLDGFWLHRVLQQNGVESHVVDPASIAVPRRRKRAKTDKIDGETLLRALLAYKRGEPRVCAMVVAPSPEEEDRRRLCRERRTLIAERIEHVNRIKGLLFAQGISDYKPLRRDRRARLEALRTGDGRELPPHLKAQIGRELDRLELLLEQIKSVEAAQDALLAAATTPASQEAAPGPVTLLLALKGMGANFAAVLWSEAFYRQFANRRQVAAYAGLAATPWQSGGIRHEQGVSKAGNSRLRTTMIQLAWLWIRHQPQSALARWFKERSSQGRKRAIVALARKLLVALWKYVTQGVVIEGAVMKPAA

SEQ ID NO: 244253 - protein, 390 aa, unidentified
MEVRMENTPSATTNNDPAHCFVAIELSKSSWVLGFQTPLAKQTSRYQVKACDAKALLELIERVRSRMARELGRPVEVMSCYEAGFDGFWLHRVLEAHGIHNHVLDPASLQVNRRARRPKTDRIDADRMVRALIRHLRGEPEACSVIRVPSPEQEDARRLHRERDRLIAERVAHVNRVKGLCASQGIYDYEPLRSDRLKRFEKLRSGDGRALAPRLKAEIVREIKRLEVVLEMISTVEAERDAVLTEKKSTHLNADKIKMLAKLKAIGAEFSTVLVGEVFYREFANRRQLGSYVGLASSPFRSGSLDRDQGISKAGNPKARTTMIELAWIWLRYQPESALSRWFRERVGNLKGRPRRIAIVAMARKLLVALWRYLQTGVVPTGAELKAQSN

SEQ ID NO: 244254 - protein, 348 aa, unidentified
MLIIGCDYHPGFQQIAFVDTETGECGERRLSHREEAEQFYRALKGRMVRVGMEASGHARWFERLLSELQFELWIGDAAEIRTKRVRKQKTDRQDAQLLLRLMVEDRFPRIWVADAENRDLRQLLWHRHRLVQMRTRVMNQLHVVALNEGLRRKQALWRPAGRNELESLQLAPWASRRRQDLLDVLDQLTPKIQELTRALEEEVEKRPVTRRLMTHPGVGPLTALAYELVIGTAERFHNGKQIASYVGLVPTEESSGDRRRLGHISKQGNSLLRFLLVEAAQVTVRSQAQWRSKFFHLALRRGRKIAKVAMARKLAVHLYWMWRREWDYGQFEKFGSHAGAPGNLHGEQ

SEQ ID NO: 244255 - protein, 404 aa, unidentified
MPTYCVGIDVSKFKHTCCIIDENGEVIKKSFDFSNSKEGFDSLIEIFKSIDQSESLFQIVMEATGHYHECLFRYLVANNYLVQIKNPVVIARFKQSEYLDKAKTDNLDALILAQYASKHKFSPSMLKSYNIERIRRISRAKYFLYQDKERTINHLHRYLDESFPELIPFLRKRGDIKRYQGRNFFDSKTTLWFLENFPSAKKFSNARSETAEKLRRMSKGAFSLVKFNELRTIAKNSIGVSFVETEKIIVQLVHELRNIQERNEELDQLLEPLIDETAPYLLTVPGIGYRLAGLLLGEIGDASQFPTADKIVKFAGLDVRVYQSGTVEKHGVIRKRGSPLLRYALFQAAEKARIHCPEIAEFYSKKKGEGKHPICALTHTARKILRIVWALLKTGQNYSQSISD

SEQ ID NO: 244256 - protein, 383 aa, unidentified
MHHHTSGLHTDAVVIHAALELSKNSWLLAIEASEHNRPSLHHIKGGDSRTLLAKLHKACELFECRTGRLAKMVLCYEAGYDGFWLARLLESHGIDCLVVDPASLQVDRRARRVKTDRIDVEAILRTVIAWRRGERHVCSMVHVPTRDEEDLRRSHRERDRLVKERTAHTNRIKGLLFTQGIREINLRRRRKPLDIDLASRVTGDGQCIPPRLQCEVERELQRLALVDEQLAITEAERDQVATPCEDSEKKRRQLTLLRGIGETGAAILVREVFYRKFSNRRQVGSYLGLAPCPYDSGGSTRSQGISRAGNARARSTMIELAWFWLRYQPESQLTLWFEGRVKGQSKRIRRIMIVALARKLAVAFWRYVETGLVPSGAIVAHAK

SEQ ID NO: 244257 - protein, 341 aa, unidentified
MQITTIGLDIAKNMFQIHGIDAAEEVIVRKQLRRGQVMAFFEALAPCLVGMEACATSHHWARELTKLGHEVRLMPAKDVKAYVKRNKNDAADAEAICEAVRRPTMRFVRIKSAEQQGQLMLHRARDLLMRQRTQVINALRAHLAEFGITAAQGREGIRELLAIVAQEEGSRLPSDAHASLTVLATQLQAVQTMIGSLEKRIVAQHRSNEASKRLETIPGIGVLGATTITAVVPDPKAFRSGRDFAAWIGIVPRQDSTGGKQKLGPISKQGDQYLRRILIVGAHAVLRRARQQPEKYPWLTQLLARRPFKVVAVALANKMARIAWALLAKGGTYRPPQLVAA

SEQ ID NO: 244258 - protein, 350 aa, unidentified
MSKDITVGLDLGDRYSHICVLDGEGAVVEEDRVRTIPEAVRERFGAMGPVLVAMEVGTHSPWVSRVLTELGHEVVVANPAKLRMIYQNPRKSDKADAMMLARVARMDKALLSPIQHRSRETQQDLQLLQTRNALVKTRTQWINHMRGLAKALGYRFSKCAAPTFHKQAVEELPDTLRESLGPLLELMETVTARIREYDKKIDRLGQEKYPQVEVLREVPGVGPITALAFVLTLEDPKRFAKSRDVGAYLGLVPRRDQSGETDKHLRITKAGDRYLRWLLVNCAHYILGVHGPDSTLRRWGLARCAQGGKTAKKRAVVAVARKLAVLLHRLWSTGEIYEPFYEAKAKPASL

SEQ ID NO: 244259 - protein, 429 aa, unidentified
MPQAKRSRSRRDLPPVHPVAAAIDIGVTIHVAAVGPDRDKEPVRTFQTFTDDLHRLADWFARRGIKTIVMESTGVYWIPVYDILEQRGFEVLVVNARDAKHVPGRKTDVSDAQWLQRLHEYGLLRASFRPQVEMAALRAYLRQRERLLDYAAAHIQHMQKALTQMNLQLHHVVSDITGVTGMLIIRAIVAGERDPVILASYRDARCHASVETVRQALVGSDREEHIFALTQALELYDVYQTKVLACDKKIEAILTGLKKSATPPINELPLAKHNTRQPNAPAFEVREALHTILGVDLTQIHGLGPYLALKLVGECGTNLAAWPSAKHFTSWLALAPHNKISGGKVCRRKRGAPAIGPRHCYGSPPSRLGEPTPRWVHSTAGYRPVSAKPRLSLQPRAKSPFCSIIRFDTACPTPILAPRTMKTDTGSVS

SEQ ID NO: 244260 - protein, 401 aa, unidentified
MKRLSGGIDIGGDFHQMIILDEQQQVLYQKRIPQKLKEMKQIMKELTCLEKKEKAQLSFVLEGKNGYSNPLDRLLLAQGFTLYNVDNYKLKRFREAFAGERKDDNRDALMLSKMLNLKEHINTPTEKVFIEITKPSVITESLKLLSRHQQVLIEEKVRLTNRLGKKLLEVCPELLTLGKLNNQKIIAILARYPDFSRYSRITLKSLLKIRGIGEKQAPHLLAGLHDLTYMPGLTSIYKTIISSHAKRISQLQKEIKEIDKKMDQIGGQDKTIQHLKSLPAVGTKLASRFTGEIGDIGRFPSEKNLAIYCGIACVNNSSGKINKTRAVYKANKIAKQTLMMMAGGSIRVNPQCRDYYLKKRKEGKAHNHALRCLARQMIKVIYRMLTEDRDYQIKKEAMKVA

SEQ ID NO: 244261 - protein, 411 aa, unidentified
MEMLHPRCAGLDVHRDTVVACARNATAGVIALEVRTFGATTKELMALSEWLTEHGVTHVAMEATGVYWKPVWHVLEGSFELVLANAMHIKNVPGRKTDVNDAMWIADLLAHGLIRGSFVPPAPVQDLRALTRTRKQLVREHAAHVQRVDKTLQDANLKLGSVLTDIMGKSGRAILDAIVRGETDPAKLVLHIDRRVKASPEQIIEALRGKVTANHRFLLKLHLGQADGLQAAIDDLDREVGERLEPFRVSAQRVSQVPGIADRAAAAIVSEIGVDMSRFQTSAHLISWAGFCPKNDESAGKRRSTRLRKGAPWLKTVLVQCAWSATRAKNTYLQAQFLRLRARRGPKKAIMAVAASMLTAIYHMLKKGVDYHDLGPNHFSGADKTKSVNRLLRKIENLGFEVTGIREKLAA

SEQ ID NO: 244262 - protein, 413 aa, unidentified
MELVHARCAGIDISKKDAKVCVRVQGSGRRRTAASVTTWGAMTNQILALREYLLAQKVTCVVMEATGAYWKPFYYLLDDGLDVMLVNARDARNVPGRKSDVSDAAWLADLGAHGLVRGSFVPPPPIRELRDLTRARTVITRECSREAQRLEKLLEDAGIKLSSVATDITGASSRRMLEALIDGQRDPTAIADLVHWRMRPKIPALIEALTGRFSEHHRFMTRLLLDRIDANSADVARLDARIEAAMEPFAPARDLLMSIPGISRITAEVFIAETGADMSVFPTAGHLASWCGLSPGSNESAGRVKSTKTRPGNPYLKGALGVAALSVIRRKDTYFWAKYRRITVRRGPMRALVAVEHAMVIAAWHMLANGEFYREPGPDYFTRRVPAKVQSRAVAQLESLGYKVTLEPLADTA

SEQ ID NO: 244263 - protein, 361 aa, unidentified
MEELHPRCAGIDIGKRTATVCVRIPGPNPASRRAKERVSETVTTWSSMSRQVLALREHLLVQKVTCVVMEATSDYWKPFFYLLEDAGFEMMLVNARHVKNVPGRKSDVNDATWLAQLGAHGLVRSSLVPPPAIRELRDLTRTRTQIGRDQTREFQRLEKLLEGAGIKLSAVASNLGGVSSRKMLTALADGERNPYILADLAHFTMKAKRPALVEAMTGRFTEHHGFLVKAHLAMIDQQDRIIADLTERIEVVIEPFRSFRDLICSIPGISTKVADVITAETGADMTPFPTSKHLASWAGVCPGNNESAGVIKSTKTRAGNAYLKGALGIAAMSAAHTKNTYLAAKHRRIMSRRATTDPSSR

SEQ ID NO: 244264 - protein, 344 aa, unidentified
MQNMYYIGLDVHKRTISYCVKDGSGTIHAEGTIPATRFDLDRWMKALPQPWTAAMEATVFTGWIYDHLQPHAAALKVAHPLMLRAIAAAKKKNDRIDASKICDCLRCDFLPECYMASTAIRERRRTLRYRNLLVRQMVQMKNKISGLLMEAGVSYNKQRLHRAGYFRELLATNSGIDEGLCSLLRLCRETVVRLQKTESALVLSLERDSLLMDRVERLMIIPAVGPITALTWALEVGDAQRFSSIKKAISYCGLCGAEKSSANTVQRTPLSKQRNKHLQTTLIEAAKMAPRYSPNLAMLYDKEKQKGNANRATLAVARKLVAYLMAIDRGQRNFQAVETNCIAA

SEQ ID NO: 244265 - protein, 412 aa, unidentified
MEVVHARCAGMDISKTDAKVCVRIAGAGRRKTAETVTTWGAMTGQVLALRDHLAGEKVTCVVMEATGDYWKPFCYLLEDLPGVQVMLVNARHVKNLPGRKTDVADATWLAQLGAHGLVAGSFVPPAPIRALRDLTRTRTAITRERGREAQRLEKLLEDAGIKLSSVASDILGVSGRAMLEALIAGQRDPDALADMARRRLRARIPELTQALEGRFSEHHGFLARVHLDLIDQHTAAISELTRRIEQVIEPFRRFRDLICSIPGIATVTADVIVAEIGDDMSRFPTAGHLASWAGTVPGSNESAGKVKSSRTRPGNPYLQGALGTAAMSCAQHPGTYLNAKYRRIATRRGPQKANVALQHAMLIAIWNMGTNGTFYQDPGGDYFARLNPGKARTRAIRQLESLGYTVTLASTS

SEQ ID NO: 244266 - protein, 385 aa, unidentified
MATPAATHKDQATTPRPTLFLTFELGVTTWKLGFTTGTAQRPRERSMPAGVMHVLHEEIARAKQRFGLLEDTRVVSCYEAGRDGFWLHRWLVAQGVENCVVDSSSIEVKRRHRRAKTDRLDVHKLLTMLLRHVAGEQRVWSIIRVPSVQEEDRRHLHRALATAKRDRTRVINRIKGLLASQGLVMPHTGEFQQQLESLRLWDGSPLPTGLRHRLGQEWEYVKMLAQHIGQLEAERRALMQTAEDAAMARVRQLLTLKGIGTNSAWVFVMEFFGWRAFRNGKEVGALSGLTPTPYASGNTAYERGIAKAGNYHIRAMAIEIAWGWLRFQPASALTQWYQQRFGHGSSRLRRIGIVALARKLLIALWRFVETGVLPDGAALKTAVLI

SEQ ID NO: 244267 - protein, 348 aa, unidentified
MVTVGIDPHTRTHSAAAIDDRGRVLGVLTVGVSPSELDRLAHWIEDLGPERIVAVEGARGFGLPLCRRLLTQGETVIDVPSALTASERRSSRRPGKDDAIDAVAVARVALRETGLPRVSPEVLASDLKLLVDARDQLVREATRVRNRLHALLLVLAPGYRERVRDLTSAASLVVARRLALRARKDDPVRSRLACSAIARLRSLAVEVDQLGREITSALDATGPVHLLSICGVGTLVAAKILGEVRDVGRFSSAAAFASYSGTAPIPASSGTIIRHRLHRGGNRQLNRALHTVALTQARRDDRAMQFLERKRAEGKTPREARRALKRHLASVVYRALLLDAEEVRSTAA

SEQ ID NO: 244268 - protein, 343 aa, unidentified
MRVMIGIDPHKATHTAVAVDNDEAVLDEVKVRASKVQVQRLTAWAERFEERRWAVESAGGLGYLVAQQLVAAGESVVDVPAVLASRVRVLGSGRSQKNDPNDARAVAVAALRSDRMRRVVPDDHRRVLRLLVKRHRDQAQLRATHCARLHALVLELRPGGISRQISVSKANQLLAGVVAVDEVTRHRVLIATELVDDIARLDETLKASKARIATAVAASGTSLCDIVGIGPICAATLVAYTGPVARFPTSASFAAYNGTAPVEVSSGGRTRHRLNQRGNRTLNHAIHIAAVVQARCPGEGRVYFARKIAEGKTHKEAIRALKRRISDRIYRHLNTDATTAPAS

SEQ ID NO: 244269 - protein, 341 aa, unidentified
MERLYYIGLDIHKKTISYCVKQVDGKIMQQGKLAADRKTLLKWMEGLPGPWLGAMEATLFTGWVYDFLKPYAVDLKVAHPEMLKAITAAKKKNDRADAEKIADLLRVNLLPECYMLSEELRELRRILRYRNMIVRTAVKMKNKMSGLLMEVGATYSKEKLHRRKYFNNLLERIEDVPDSVKNMLQLSRSSLEMFDAVQKKLVRTLREDNLINERVQRLMSIKGIGEVMALTWVLETGDSSRFHNAYQAISYCGLCSAQRESAGKEQRGPISKKRNKHLQTMLIEAAKLAPRWNPQLAAIHGKELKNGHRNRATLAVARKLVEYMLAVERQQKDFVPSELAA

SEQ ID NO: 244270 - protein, 347 aa, unidentified
MLKNKINSKHGKINNHKYDYFIAIDWSQKNMAIATLRKDLDNPKITDVDSDVENLKAYLSSLKGRKIVTIEETTSTHWLYIELYEYVDKILICDPYRNKLLSDGAKTDKLDAGKLSLLLRGGLLKEVYHSLERTYELRQLVGDYEQLVKFGVRILNEKSAIYRAIGKSYKELEKIEDKTIKWIIGKKDERIALYLSQKVEYENKFREIVKGNKDLRNLISVTGIGIIGSVKILSSVIDARRFETGGRYLSYSGLVKHQKMSGGRNYGNRKTRYSRRLKAVYKAAAMSVISGNSPLREYYDSLLGKGISEDKARNQLARRIAIITYGMLKTGTRYEPYKWRKQNITKK

SEQ ID NO: 244271 - protein, 400 aa, unidentified
MRAVFGIDVSKASSEVAILVNGEKVHGYTISNDALGFARLLGDLKTVHKPEIIFEATGVHSRRLQAFLEDNGYAYTRLNPLEAKKQLDSLRVRKTDQIDAEKLAQSQFVLNRKPTYVQEEVYQELRDLSRFYQNLTEDIVRAKNRLHKVLQVTFPELETILSTPTGEQYGNLVVAFPCKDFVLDLSKDELSESIRQSTSKRISDKRVAYLVEKLTALANQSYCAVKKTSPIMEEVRYYAKELLRLSEQRQTVLDQMVELAQPLPEYDILLSIPGIAETTATSIIGELGDIRRFQSANQINAFIGIDLRHYESGNFLAKEHITKRGNPYARKILFKCIHNIASASHTNPCHIADFYEKRKRQSQTTSTKPHTIASIHRLIRTMYYLITHNKLYDYRSTRNQ

SEQ ID NO: 244272 - protein, 423 aa, unidentified
MEVLHECVAGLDVHKDNVVACVRTVSGDKTTREHRTFDATTDGLLALLEWLTSCRCELVAMEATGVYWMPVWRILSDGAFKLIVVNAAHIKAVPGRKTDMKDSTWLADLAAFGLLKASFVPDEEQHELRALMRTRKQLVREQTRHVQRIQKTLTEANIKLDSVISDIMGRNGRRMIEAMITGVRDPRKLAALADQRLKATPKQLYDALHGRLTDHHRFLLQLHLGQWDTLDATIKGVDREVATRVFRMDTEVTAAKANFSDLIDQLVTIPGVSRLSALTILSEIGTDMSRFATAGHLVAWAGMCPGQNESAGKRKRTRLRKGAPWLKTMLVQCAWAAKRKKDSYYKAQFFRLQSRRGPQKAICAVAASLLTAIYHMLKDGTIHQDLGSGYFDQRPPEIKVKRLVNQIAKLGFEVTLQPIAKAA

SEQ ID NO: 244273 - protein, 320 aa, unidentified
MSVTSVTVGIDVAKAHVDVCVLGAKSSAQRFDNDAEGHSALAAALQPLDVGLVVMEATGGYEAALACALQATGLPVAVINPRQARDFAKSMGRLAKTDAVDARTLAELAAVLLRRDDLQRFLRPLADERQQWLAALVTRRRQLLTMLHSERQRLQITPKKLHASIEAIEAAIKAQLDEIEEQMVTHVREHFGELDTLLQSAAGVGPVASATMIAELPELGRLNRREIAALVGVAPMANDSGGSKGRRRVQGGRFEIRRVLYMATLTATRYNPAIKAFYERLKAAGKLPKVALVACMRKLLTTLNAMVRTAKPWDKSLHCA

SEQ ID NO: 244274 - protein, 350 aa, unidentified
MEFFVGLDVSLEETHICVVDEGGRIIKEPRAPSEPKALARAIRHKGRRIEHVGLEAGSLSQWLHDGLVREGFSVSVMEARHVRAAFAAMRVKTDRHDARGIARLVRLGWFKRVHVKSLDAQETRALLTARTFLVEKVTAAENSLRAALRNFGLKMGSVTRKTWEARARELAEGNAVLEGIVDAMLRVRALLLGELASVDGQLMALAKADPVTRLLMTTPGVGVIVALTFRSAVDDPDRVPRSRDVGTWAGLTPRRWQSGKTDITGRITRAGDPRVRVMPFEAAASILGRARVMSPLKAWGLRIAKRTSIKKAIVAVSRKLATILLAMWKSGTAYWATGRPPASAQNCAAA

SEQ ID NO: 244275 - protein, 417 aa, unidentified
MQVVRPICCGADIHKDIIVATIATSNQNGIAEYTQRKFCTQNYDLINLKSWLKEHNCFEFAMESTGKYWIPIFNVLEDEIKVYVVHPKYTKSIKGKKTDKKDSKWIAELFRHGILTFSFIPPREIRELREISRYRIKLVAMRTSERNRYQNAMTVSNIGLASILSDPFGKSSKAIMEEVLKSSSLSEGKIRSLLNKSAKKKAKEVFASLEGSRIEPDQRLKMTVSSEHMNQIDSHIDTLELDLVQRCLPYANLINLLIDIPGISFISAIAVIAEIGVDMSVFKSSKQLTCWAGLAPANNESANKKKSVRISRAGTYLKPLLIQCALSAIKSTSNPYYRIKYNIIKKRRGHKKAIVAIARMILVNIYAILSTGEVYNPCDFKEVTSPKPAKKEMTIENALSFLQAQGIDTSALVLNVS

SEQ ID NO: 244276 - protein, 376 aa, unidentified
MENDSTLYVGLDVHKDSITVAYALGTGEVELLGKIGTTKTDIDRLCKRLQSKARHIVIVYEAGPCGYGLYRQLVQKGFDCMVCAPSLIPKKPGERVKTDRRDAVKLVRSLRAGDLSAVYVPSVEDEAFRDLARAWVSAKDDLKRARQRLKGFLLSHGVRYTGRADWGPAHRRWVSTYAFESSWQQLAFEEYRRTIEDRLAQCDRLEAALRDAVVNWRFYPAVLGLQTMRGVQFTTAVGMLAELGDLSRFAHPRQLMGWLGVTPSEHSSGEKRRQGSITKNGNSYARKLLVEAAWSYQHPARVSPGIQRRHDGIPKPIVDRAWDAQLRLCRRFRKLITRGKQKNIAVVAVARELVGFIWDISRLAMSLAIPCEPLTT

SEQ ID NO: 244277 - protein, 495 aa, unidentified
MSDFRIPRRNVRTRPTPAPAPAANDLSRAARHAEKTRRHAEECAKLVSMPVQHAHAAGIDAGDISHWACVESTPDDTDAVREFPAHTAGLRQLVDWLRQCGVTTVALEATGVYAHVLFLTLLEAGFVVVMTAPQFARQIKGRPKTDKRDCQWIQRLHKHGLLPAVFQPDEATQTLRDYVRQRANLVRLSGQHIQRMQKALQLMNLKLTRVLADVTGVTGLMIIRAILAGQRDPQQLAKLRDRRCRHSVADIAQALDGRYRPEHVTELRCCLTLWEKYQEVIGELDEAIDAHLRTMRRQTELPPLPPKPRLRGHKPHDPRFDVRQALYFATGVDLTAIEGIEEMHALTLVSELGTDFTKWPTVKQFTCWLGLCPNWQKTGGKVKSSQTRRVKNRAAYALRLAAWSLQRSKSYLGAYLRRQRSRLGAPKAITALAHKLARIVYHLVRYGLAYVKQTEAAYAEQVRERLERQLRRRALELGFELKKIEPPVMPTVTEA

SEQ ID NO: 244278 - protein, 334 aa, unidentified
MWHVGIDLHRVTVVIAAVNDSGEAMDPVTIRCQDTTVIIEAVKNLGPFRAVIEASGTYRWLYDLLRPYGTVLLAHPHRLHAMIQRRTKTDKLDAQLLANLLRINQIPLAYIPLEPYHQLRELTRCRTRLGRDLARTKIKLRAILARRNMEAPYQVPFGRLGLAWFAKQDFGPIENLVRDELLGRFQHFSRQITILDRRLMDVQGGFPQTEALLDIYGIGLFSALMIAAELGEVERFRSAKQVGAYTGLTSRVHQSGGHCYRGSITRQGSPWLRWVLVEAAMKAIRRDAALKNFYTRVRKRSGAKIARVAAARKLAEICWKRLRRWQREHATQAA

SEQ ID NO: 244279 - protein, 411 aa, unidentified
MHNRQNYLYVGVDLHKEHHTAVMINCWQEKLGEIQFENKPSAFSKFLLEVETYVSAGVIVVFGLEDVGGYGRVLAKYLVDHEQVVKEVNPALSFLERKSQVMIQKNDSWDAECVARILVNKFNQLPDAKPNDLFWSIQQLVSRRNALVKAQSALKNQLHIQLNHHYPSYKKFFSELDGKTALAFWQQYPSSSCLEGANIKKLTAFLLDVSNNTCSVKKASDILKLVKEDGHTMKEYQETRDFLVRSIVRDIEFKKKEMKYIERELKRLVNLLDYQLETMPGIELVTASALLAEIGDVRRFPNANKLARFAGIAPVYFGSGGKGKTHKSKQGNRALHALFYNLAVQQVQVAKGSKLPRNPVFHAYYQKKLKEGKTKGQALVCIMRRLVNIVYGMMKYKTAYELPVVEEKEVV

SEQ ID NO: 244280 - protein, 339 aa, unidentified
MIYVGLDVSLNSVAVCAVDETGKLIREGTTLADAPSIVQYLEPWAGQVERVGLEAGPTSEWLTANLIELGLPAVSLEARQVKGALSAMPVKTDRNDARGIAQVVRTGWFKPVHVKSIGSQRARTLAAARKHIVRSIAATEQVIRGLLRPLGLKVGIVSRTLFATRVRELVGDDALLEAIMNPLLAGREALMREYARLHRLVLKAVRSDPACRLLMTMPGIGPVSALTFRSTVDDPRRFLHSQSVGAYLGLTPRRYQSGEVDRVGRITKVGDGETRTALFEAANVVLRPSTRWSPMKAWAVRVAHRQGSKRAKVALARKMAVVLHRMWVDGTEFRWTAVA

SEQ ID NO: 244281 - protein, 342 aa, unidentified
MDHFAGLDVAVKETSVCIVDDTGRIIREVKVASEPEALLQVLKNPAYHFKRIGLEAGPMSQWLYSALAEAGLPVICVETRHMRAVLKAQINKTDRNDARGIAQMMRVGLYRPVHVKTLRSQKLRMLLTHRKLLQSKAIAIDNDLRGTLRNFGLKVGVVGTVKFEARIRELVENIPDLAVLVEPLLVVRRVLREQLVIQHRRLLATVRDDEVCRRLMTVPGVGPVVSLTYRATVDVPARFHKSKSVGAVFGLTCAKYQSGEVEWSGRISRCGDEMMRVMLYEAAQSMLRSKKWSWLKAWAMQIARRRGMKKAIVALARRLAVIMHRIWVDGTEFRWTREVAAA

SEQ ID NO: 244282 - protein, 339 aa, unidentified
MKVINQNVGIDISKETLAVCIVIMYEDFSVKVKGSKAFMNSKIGFKQMLTWVLSKRIPEIRLSFTMEPTGVYYENLAYFLYAKKDIIHVVLPIRAKRYAESLPGNSKTDKLDAKSLGRMGVERKLDVWQIDTPIYRNIKQLTRERDALIKERTNVKNRLHALDHSVSPYKKSLTRLKSLIKYLDKQIKVIEKDIYTLVTSDEWLRKKVEYIISIPGVGFLTAIIVIAETNGFALIKNIKQLVSYAGLDVKIRESGAWKGKSKISKKGNVHIRKALYFPAYTNMKHSNNYMGLYSRIFAKKQKSLIAATATQKKLLGLIYTLWKNETVYVENYQQQKKVA

SEQ ID NO: 244283 - protein, 370 aa, unidentified
MNESTRFVGLDVHKASIAVAVAGAFGEPEDHGQIANDPSAVRKLVDRLREPDARLSIACEAGPTGYALHRQLTAMGVECVVVAPSLIPTKPGDRIKTDRRDAAKLARLLRSGDLTPVWVPDEAHEALRDLVRGRADAKEDLLRAKHRLSKFLLRRGIQPPVGVRAWSRAHEAGLNRLTFSRRADQVVFDDYWSVVRDARDRLKRLEVALVGYAAESPHAELLAALEAIRGIAFLSAVTIVAEAGDLRRFPTARPFMAYVGLVPAEYSSGTSRHRGRITKTGNRLLRHVLGQAAHNARYRPNVSSSLRARQSNVPRAVVELDRRAQVRLHDRYRHLAGRIGVNKAVTAVARELAGFVWALGQLIESSPAAA

SEQ ID NO: 244284 - protein, 385 aa, unidentified
MTKQLQDTGFIARNYEIFGGLDVDKKSMAVTFRDHGIMRKSLRLPYSASDLLNYTRKHFPGQRVAFVYEAGPTGFGLHDELTAASHPCLVVSPSMVPTVQRKRVKTNRLDSLKLAEGLRGGQLRGIHVPPPSYRELRHLVQLRDTQVAQLRATKCRIKSLLLYEGIPFPTANGKWSGPALRELEALPCNATVRFKLDQLIDALQFHFQSAAKVQKQIRYFCQNDPELRGCISFLVSLPGVGTITATHALARLGDWRQIKDVRQIAGFLGLVSSEHSTGDKENRGEITRIGDSRLRNKLIQCAWTAIRKDPELRAFYRRIYERQPKKVAARKAIVAVARKLTTRMYAVLKEQRPFVIRADSSIAPLTAEETGGPRERLDAAQNEQP

SEQ ID NO: 244285 - protein, 430 aa, unidentified
MKSNTQNAKIEAITEKTLVLGIDVGSETHYARAFDYRGIEYSKKPFKFSNTEAGFVTFKEWILDIKERHEKDKVVLGMEPTGHYWFNLGKFLQDNEMKPVLVNPHHVKKSKELDDNNPTKNDRKDPKVIAGLVREGRYMIPYLPDGVYADLRTASNIRFQLQAELTRIQNRISRWFNIYFPEYKTVYGKPDAKSGMLILKAAPLPEDILTLGIDGVNQIWRDAKLRAVGKARAKTLIEAAEHSVGSKEGAVSARMEIRMLLEDYESRNTRLQEVMVLIEELVRKIPMAEKLLEIKGVGIRTVSGFLAEVGDISRFNNPKELQKLAGLALVENSSGKHKGETTISRRGRKRLRYLLFEVAMSLVSKNQEFRELHNYYTTRRLNPLKKMQSLMAIAAKLIRVFYAMLTKGVDYDPKKMVSDIKRPAVYLQAA

SEQ ID NO: 244286 - protein, 480 aa, unidentified
MIKSVGIDLAGNGEHKVRCLDEKAEVCDSFGFETTPVGLEKLEERIFRDGSNPVVVFEPTGLAWVAVAVYLRARHPGCCLVRTQSRNVAALRKYLRHSSKSDKIDAITLAKMPFVNAERLNEVYLPPAKIYAIQRLARQRKRLENDMASRKKRIISIIDGYLPGVHAAFSSRWSLQAKAFLRCRLNPLAIVRDGEKTLDRFLTNVRYRRQKDAVESHSVYMACQAAATIYQRSQEAGMIDDDFFAALQEEIGHELRLMETEEAESQSITQRLTELYQELHPSDNLSTIPGVGPNTAPIFLAVVGDPSRFPSQSAFANYNGVVPNSKQSSDTEAKGLNMTKAGPSVMKWALYQSGQIGRRYDPQLAHLYYREMVHNGKNHKQAMGAVMSHLGARILAVLRDDKPYELRDIKGDPITWRDARELVLSNYQVPEEIKRDRRRRGTLKNSSRKPLKKRREMVARRVHEAAETPQSAAATSSPGN

SEQ ID NO: 244287 - protein, 505 aa, unidentified
MAAPTTGHQPASSLPPTGQPAQAQAHRQAYNRRKTRAKVRSEAFRQREAAQVEALPVQHPHAAGIDIGSRSHWVCVGFTTDAASCLIREFPAHTAGLKAIAAFLREHQVTSIALESTGIYWVPLYELLQAEGFEVLLVDPSYSHQLRGRPKTDRRDCQWIYRLHSVGLLAAAFRPDEQTCQLRAYLRQRGNLVRQASRHVQHMQKALEQMNLKLTEVLSDITGKTGRAILRAILRGTRAPEKLARYRDKGCKASEAEMAQALTGTYREEHLFELKLAYEAWQFTLGQVDKVDGQVALQLGRMKGDRALPPLKPKARPKRRANSPRFDVRAALYYVVGLDLTEIEGVSELTALTVISEIGPGVSRFATVKKFCSWLGLCPNWQKTGGQIKSSRTRRGVNRAAQALRLAAQSLHHSQGALGGFLRRMKGRLGTQPALTATAHKLARIVYLALRHGLTYVRQTQEEYEAQMKEKQLKALRRKARQLGLEVVEKPSVSGAPAAAGPAQG

SEQ ID NO: 244288 - protein, 357 aa, unidentified
MLAMGDSAPRKGADAMTFVGCDLHTRMQQVAVLDTRTGEVSERQLGHDGSAIEEFYAALPQPVTIGIESTGYAVWFHTLMQRLGHTVLVGDAAKIRAMVVRKTKTDRRDALHILDLLHHDRFPTIWVPDPITRDLRALLTHRMRLVRIRTMVKNGLHAIALNYRLTRGAKLLRQAGLAQLHALALPPHTAQRRDQSLELLAGLTTQIRELDDAITTAALAHPDGPRLITHPGVGALTALATIVVLGPVARFHDSKHVVSYVGLAPALNASADKYHLGHITKQGSTLLRFALGQAASHAARMDADLKRTYGALVHRRGRPKAKVAIARKLLVRLFIMLRDQIDYDEFRRRGRTAPASA

SEQ ID NO: 244289 - protein, 342 aa, unidentified
MQVTTYGLDLAKRVMQLHWVNMETGEIHRKQLKRRALLEFFANRQPGIVAMEACGSAHYWALELRKLGHEVRLIAAQFVRPFVKTNKNDAADAAAIWEAVQRPDMRFVVAKSEEQQSVLSLHRIREQLIKIRTMQVNQIRGLLYEFGADLPQGRQKGLKEVPDALADLEKSISPILRDTLRRRLQRLRELDTDIADIEKRLTLWKKDQEAVARLMAIPGIGLLTATAIIATVGEMKSFRSGREFAAFLGLVPRQSGTGGKVRLLGISKRGDTYLRSLLTHGARAVVNRQIKNRNPWIDKLLSRRPHNVAVVALANKMARTIWALLVRDTEYDAHHAAIKAAA

SEQ ID NO: 244290 - protein, 405 aa, unidentified
METLHKRVAGIDVHRMKHVVTTLIEDDAGQLGKQIREFGGFKRDLRSLAEWLRASRVELVILESTGIYWKSVHAHLENAGLAVWVVNAHHVKHVPGRKTDVADSEWLAQLGRYGLVRGSFIPPRDLRELRLVSRYRKKVADQLAAEKNRMHKLLDDAGIKLGGLVADINGKAAKAMVDGLIDGQPPEKLILLAGRLKAPKDALLAALDGDLSPRHTLLLAELRAHVRHLEERLAKLDAYLIDAMAPYAWAYTLLQTLPGLDEIGAAMILVEIGDDLARFGSADRFASWAALCPGNHESAGKRKSGKTRKGNTTVRYLLCEAANAARRTLTVFKAKYQGLVVRRGHNKAIVAIAHKLIRTIYVMLTRRQAYRDSGFDYAAANVRKNAPRWLKALKRFGYWPETQSA

SEQ ID NO: 244291 - protein, 340 aa, unidentified
MKNKKKYFIGLDVHKEKTTYVVLDRLGNTLLEGETATIYSELFERLKPFLKSSVIGLEACTSYYTLYQTFMKNNYSIKVANTIQMRQLIAKNDHLDARRLAEMLRLGTFPCSYIPDEKIQRLRSLVQVRHSLMEEKVRCNTRIQAFLDRNGVMMPPHKAFSKKWRNALMQYMGSGQVSMELRHEYDHFVFLEKKMEQLDQELQGYARKNWTKEYQLLQSITGIGPVIACYAIAHILPIERFSSNRKLRRYAGVVPTCKQSGNKVSRGRIPKTSSRKLLRWSLTQAANTIGKTDTNLGRYYRMKKRQKKNAGIAKVAVASSLIDILYKVLTTKQPYNPNTN

SEQ ID NO: 244292 - protein, 351 aa, unidentified
MVHVGLDMHKRFSELAVLDDAGAVLDRCKLHHDNPQGMTEYFDSFGGAGTVTVEATRGWYWLTDMVESRGLAVKLAHPAKVRLIADARIKTDKIDAWVLAHLERLGFLPEAYIPPQAVRDRRELLRYRLGLVGLSTGLKNRVHALLAKLGIIPEQTDLFGKAGREFLAGLELREVYRRVLDGELAVIDFLAAEVKRITAELRAALKEDPRAELLRSIPGVGVLTAYLLLAEIGDIGRFPSAKRLCSYAGLVPRTYASGGRSWQGGITRQGNRYIRYAMVEAAQVATRKDVALGRFYQRLKREKGAGKARVAVARKLLVAVYHILQRKEPYRYGHLAKIHLGKPAFVSGHAE

SEQ ID NO: 244293 - protein, 364 aa, unidentified
MITLNYVGLDVHKETIEVVAFRENETTPHIEKRIPNRTKSIKKVFWNLLSEGSVIACYEAGCMGFTLQRLLEGMGVSTVIAAPGKIPRKSSERIKTDRRDARNLATYLRNGDIEAIHIPTVDNEVVRDYLRAREDRRLDLVRMKQRLHKFLLRHGYVYDNIRYWTGRHDKWLQSLEFVTPLMKATFDEYYYGIKGLEEKLRMMDKRIEEIAVSGPYVEGVKKLRCFKGVEYLTALSIVCEVGDFKRFKSAEAFMAFLGLVPKEYSSGSTRRQGGITKSGNTHVRKLLIEASWHYRYKSSPSKRLTERRYGQPAELISYADRAMKRLQGKFFRLVVRGKTSQTAVTAVAREFSGFIWGMMVGQTS

SEQ ID NO: 244294 - protein, 338 aa, unidentified
MKLYGAIDLHSNNNVTVLIDEQDQVVYQKRLPNDLSLIAQQLSGYQDALQGIVVESTYNWYWLVDGLMDQGHRVHLANTAAIQQYEGLKYTDDHTDARWLAHILRLGVLPEGYIYPKEERAVRDLLRKRGQMVRQRTTNLLSIQNLITRNTGSSIRSNRIKTLDAEQVDDLLPNPDLALAVKANLAMIKCAAEQIEILERTVTDRIKLREEFSFLKTVPGIGQILALTIMLETGQVQRFPTVGDYASYCRCVGSQKLSNGKKKGSGNTKNGNKYLAWAFVEAANFAIRYNARIKSFYQRKKAKSHGVVAIKAVAHKLCRACYYIVKDQVAFDVAKAFA

SEQ ID NO: 244295 - protein, 370 aa, unidentified
MAKRSMFVGMDVHKESIDVSLAEEGRDGEVRHYGVIPGDLEAVAKVVRVLRKPTRRLRFVYEAGPCGFGIHRYLTAQGEDCVVVNPSSMPKRSGDRIKTDRRDGDALARLHRAGELTAIYIPAAGDEALRDLVRAREDAVGLSTQAKHRLKAFLLRQGRRYPGRAGWTRPYRRWLADLSFPLAPQHIALQEYRDTIDETERRVERVTDQLRQLTPAWRWAPVVDALQALRGVSFVTAVGLVTEIGDIRRFTHPRQLMAYLGLVPSEYSSGPSVRRGGITKAGNPHARRLLAEAAWAYQGVPRIGRQMLYRQEALPKTVCDIAWKAQLRLTSRFRKLVARGKAKPKVATAIARELTGFIWAIAREVPPPPA

SEQ ID NO: 244296 - protein, 315 aa, unidentified
MTTSSGKFVGIDVAKDKLDVAVLGEKKASQVGNDEGGIGKLIKKLQALNPELIVVEATGGYQRAVVLGLYEAGLPVAVVNPTRVRQYARASGLLAKTDKLDAFNLAEFGKQMKPRRFEAKSEAGRDISALLVRRRQLEEMLKAEKSRLRTVPPKMRGSVERMIETLKEEIKRLEKDLDQFMKENEEWQAQEQILTSAKGVGRITATTLLAELPELGKLDRKKIAALVGLAPMNADSGKKRGYRKTKGGRVEVRNVLYMSTLVATRFNPLIQAQYQELLRRGKVKKVALTACMRKFLTILNAMMRDKAPFRQTDIA

SEQ ID NO: 244297 - protein, 319 aa, unidentified
MNDSITAFVGIDVAKDSFEGHVRPSGERFSLSYDRQGLEELLKRLPARGSCLIVVEATGGYQRTLVVHLLDAGHRVSVVNPRQVRDFARALGILAKTDAIDAEVLARFAEQVRPRTAEKARKNQAELEQLVARRRQLVDLRTAENNRLETITVKAVRKSILHVVGVLDKQIARIEKDILRLIESDDDWNHQARLLTSVPGVGLITAASLLAELPELGLLNRQEIAALVGLAPFNRDSGRFKGKRAIWGGRSAVRSALYMAALTARRCNPVLRPFNQRLEAEGKPFKVAITASMRKLLVILNTMVKNQTPWNPQTNPSIP

SEQ ID NO: 244298 - protein, 330 aa, unidentified
MKKYALFVGVDISKNSLDICLLYADNLKESRHYTIANTPKAIVSFLKKYAATEVLFCMEDTGVYGIPLCQALENADRDYAVVPAIEIKRSKGLHRGKSDKADAKDIANYAFTHLHEIKLYHFSEPDMQELKLLMAEREKLIKAIKLFGTTEENFGFLDKKICAALKKNNQKTVRQLKKQLAEIERLVKELTAHNENMKEQMALLQSVPGIGPQTALLLMSFTRCFTAFDNWRQLACYAGIAPFPYQSGISIKGKTKVSHYAQKRLKSAIHMASLTTKKFDAEIKQYYERKVAEGKNKMSVMNAVRCKLVARAFAVINRGTPFVNTQKFVA

SEQ ID NO: 244299 - protein, 345 aa, unidentified
MGPMYYIGLDVHKQKISYCVKESGGKIYAEGWIPATRHDLDCWMKNLPQPWSAALEATMFSGWIYDHLKPHAAAMKVAHPLMLRAIAAAKKKNDRIDANKICDCLRCDFLPECYMAPTTIRERRRTLRYRNLLVRQMVQMKIKISTLLMEAGISDNKQRLHKAGYFRELLATNPDIDESLSSLLRQCREMVVRLGKMETALIRSLQQDRLLVERVERLMSIPAIGPITALTWALEIGEVQRFSSIKKAISYCGLCGDEQRSANSVQRTPISKQRNKHLQTTLIEAAKMAPRYSPTLAMLYDREKQKGNANRATLAVARKLIAYLMAVDRGQTHFLVVDREACTAA

SEQ ID NO: 244300 - protein, 343 aa, unidentified
MDQITTVGIDLAKSVFQVHGVGATGAVLLQRRLRRAHVIAFFAKLPPCLVGLEACATGHYWARQLRDLGHDVRLIPPRHVKAYVRRNKNDRADAEAICEAVTRPRTRNVPIKSEAQQAALMMHRARDLLVRQRTMLVNALRGHLAEFGIVTPQGLGHVATLAAVVADKNDMRLPGSARATLAVVVAQISAVDAAVADLEAKILTWHQGTDTSQRLATIPGVGPLIASAIVATVPDPSVFRSSREFAAWLGLVPRQNSTGGKERLGSISKQGDRYLRRLLINGAFSALRSKHGRADPWFVALRDRKPPLVAAVAVANKLARIAWAVMSRGEAFHRPHRAEAAAA

SEQ ID NO: 244301 - protein, 346 aa, unidentified
MLYVGLDLSRKRLDFHALAEDGELVDRGAVPADADGLARLVHRLGAHDRELSAVIESMNGARFVHDQLELAGFDVEIADAQRVKGLAPLACKTDRIDAWVLAELARRDLVPAIWLPQPDVRAERERARFRLHLVRQRTRLKNRIHATLIAHGHACPVSDLFGRKGRALLERLAIPEPWRGTLQASLRLIDSLDAEIDACERELRRLGADHRYIPLLMTCPGIGWVLAYTIAAELGDITRFPSPRKLTGYTGLCPRVDQSGEHDRRGPLTKNGPRYLRWALIEAAQHARLSPRYRQLAERKRTQYPGPRGTKIANIVVGRKLAEAIWHMLTRDQPFAPAGATPPLAA

SEQ ID NO: 244302 - protein, 429 aa, unidentified
MNYTQNEKILQVGEGNLVVGIDVGSEKHYARVFDRRGIEYTKKAFVFTNDADGFAGLLEWLASFIDKYDANGVIAGMEPTGHYWFDLAKFLEDNGIKPVLVNPLHVKRSKELDDHLPSKNDLKDPKTIAKLVIDGRYAYPYMPQGVYAELRNASVLRFQIEAEQTRIKNRIQRWLCIYFPEYKEVYGSFDAISSLMVLKQAALPCDIIALGADRINQIWRDAKLRAVGKKRAQTLVETAQRSIGHTEGLETARIEISLLLEDYERISERLVQIMELIKTLVGKVPYADKLMQIKGIGMKTVSGFIAEAGDISRFTDPKQIQKLAGQAIVANSSGKHKGRSKISKRGRKRLRYLLFEATLSLTATNPEFREIHRYYTSRKANPLKKKQSLMVLSNKLIRVFYAILKSGTDYDPAKLLRDIRRPEQLQTAA

SEQ ID NO: 244303 - protein, 348 aa, unidentified
MDATTVAIDLAKDVFEVAIGNRGGQVLHRHRFTRARLQRFLEGQAAGTEVLMEACGTAHHWGRLCQRLQLVPVLLPVQYVRAYVRRNKSDRTDAAALLEARRCGEIAPVPVKTPEQQAWQGLHRIRQQWQKTRTARINGLRGLLREYGIVVGLGARRLHAHVPAIVTTEEAPVPGPLLAALQTLLEEIRELERRIKALDATLVAHLATDDVGQRLQTIPGVGPITASALLASVPHIHQFRRGRQFASWLGLTPREAASGHRVWRGRITKRGDVYLRTLLIHGARSVIRHAHAHARQAHVALTARQRWVLALVSRRGVNKAATAFANHQARVIWAVWRSEQPYRSVATP

SEQ ID NO: 244304 - protein, 346 aa, unidentified
MSEAAVYWIGIDVAKKSFDAALVRPGQHFPETPLRTVPGETFSRDPQGVEKLLAWMREQLKEAPEAPTVRVVMEATGVYSVELTAWLCEQCAMLAPAIVNPERTAAFIKSMGLRNKTDRLDARALAFYGAERKPAPYEPLTPEHRQLRELSRYRDALVAEKVAEGNREEQQPQAKLVRTLQARREQQRKRDIKKVEAEMARVIENTPQLKQDYELLITVPGVAFITAAVILAEMGDLRRFARARQATAFAGVTPRQATSGTSVNGQPHMCKKGNPRVRQALYMAAMSAVRSKTQLRVMYDNLLKQGKLPMVALGAIMRKLVTIMRAMLLSNTKFDPLWKTPAKIPA

SEQ ID NO: 244305 - protein, 360 aa, unidentified
MTTSIPSKTTVSYDSVKLGIDAHAKYYWVSRQLDGATPQPVQKMTYDELLLFVVKQQKLTPNLVTCYEAGAFGFHLHRKFEQLGIKNYVVQPQDWDERGKGVKNDRLDAAALCQRLDRYQRGNTKAFSTVRVPSEDQERERAISRQRQQLMRERQRISAMGRSLLATHNIHVTGKWWKGKTWTVVQKLAPAWVVERLEVFIIILKPLEEQELKLMRQLQEAAQEQKIPRGVGPLTFEILRREVGDWGRFNNRRQVSSYTGLCPREHSSGGKRRSGSVSKSGNPRVRAMLVEMVWRMMRWQPEYKPLRKWAHVLYSPTPNAAAKKKAVVAIARQLAVDLWRIFTGQCKAETYGLIYLPEAA

SEQ ID NO: 244306 - protein, 392 aa, unidentified
MVISVGIDVSKDKHDCFILNSEGEVLAEVFTIPNTMDGFNCLLQKIQDSTTPQDKIKVGLEATGHYSYNLLGFLLDNGLSTYVLNPLRTNIYRKSLSLRKTKTDRVDARTIASMLLSDAGLKPYTDTAYHNEELKSLTRYRFDKVKERAKLKSSIARLVCILFPELEKLVPSLHIASVYALLEEFPGAKQVANTHLTRLKALLETASNGHYKRDMALKIRNAAKNSIGSQMPAKSLELQHTIRLIRELDREIDEIEEQIQSVMDELHSPITTIPGLGFRMAAMILAEVGDFTRFDSPDKLLAYAGMSPSTYQSGQLKNCYPHMEKRGSRYLRYALYNATKYVCHWDPAFADYLAKKRAEGKHYNIAISHAAKKLVRLIFAMEKSRQPYCSAA

SEQ ID NO: 244307 - protein, 355 aa, unidentified
MQYFKDSTTFVKGKQVFCGIDIHQQHWNVCLLCDGEVLERMRIPASYPQLLAILKRYDQARGLRVVYEAGFSGFWLYRDLQKAGYDCLITPPNKAPQSSDRVKTDKRDALKLAQYLSAGILKAVYVPPSEVEADRGVVRRRQQLVKHRTRVKNQIRSFLHVKGIERPASVKSNWSQGYMDWLEGLSFTYDADRFRLQQLLSHYQYIRSELSEVTRYLRYLSKTERYQESYKRLVSARGVGLITAMTFLLEIYDFGRFATMGQFASYLGLTPSQYSSGTHTRLGSITRQGNHHVRRVLVESAWTVIKHDPQLRDKYERIKQRGTNGKKAIVAVARSLGIRLRRCLLDQTDYVMGVC

SEQ ID NO: 244308 - protein, 351 aa, unidentified
MSICEKTYYIGLDVHKNYSTYAIMDKEGNLFKEGNLINDELSTKLPSFVDGRKILAMKTTRNWYAIYDALEDKFDRIYLANTYKAKIIREAKIKTDKISAKLLADLTRANLLPYAYIPPREVRDKREILRCRFSLVKMRSTIKNKLHAVLSKNGYICPYTDILGIRSIEWLKEISEGLYFTYREEINSYIEIAKLIKDKISDIDKQIKEMAMESEEAKIVESHPGIGYYLSLLITTEIVDIERFANVKKLIKYSRLAPGVYSSGGKRYYTHLVKEGSKWLSYGFVEAAKSIIRSRSDEEMVEYYLRIKSKHGHGAATIALARKVLINVYYMLKYRRRYEEFKENRRGQVAS

SEQ ID NO: 244309 - protein, 353 aa, unidentified
MKTYYVGMDVHRASIMIVVLNGAGKVVMQSVIETGAERVRGYLKQLRGKVYVTFEEGTQANWLHEVVRALVTEVVVCDPRHNKLLTSGNKSDRVDAQKLAELLRLGSLKAVYHGDNGMRALKELVRTYDCLVSDTTRVMNRLKAIYRGRAIGCAGHDIYRQDRREQWLEKLTERGAKERASFLYRQLAALKPLRHEAKQLMVKEARRQPAYRWLMSVPQFGSVSVAQLLAIVSTPHRFRSKRQFWTYIGLAVVTRSTADHEVVNGVLRRSQRPVSTRGLNRNHNHLLKRVFKNAAQGACHSGPFKTAYDLRVAQGMAPSLARLTVARQLAAITLAVWKHGEQFNPERMKQQAA

SEQ ID NO: 244310 - protein, 363 aa, unidentified
MHSITNTELSSHEETRCQFNGGRCTIKMGIDVHQDFYVVAEQVGGTNPKPPQRFHKQAFLHWAAKLKHTGAEVHAVYEACGFGFGLQRNLSALGIKCYVVCPQKLDEQNRRVKTDGLDAKALCLKLDRFVQGNRDAMALVRVPTEEEERSRAIHRQREQLVGARKRLEAQGRSLMVNHGLEPVQNWWKPRTFAALPVAQWMRELLLNSQPILLALQEKIAVLTLQLQSAAASNQPRGLGKMTSVIIDREIGDWNRFNNRRQIASYTGLCPGEYSSGNTRLQSCVTKHGNPRLRAALVELAWRLVRFQPSYKPVVKWRQILAKGALATGAARKKAIVAVARQLAVDLWRIKTGRLRAEQLGLTI

SEQ ID NO: 244311 - protein, 429 aa, unidentified
MKPCEQTAQDWLAHRAFGGLDWASEKHNVIVVDARGKVVEDFEIAHSSVGWKKFRERLAPYGAIPFGIETSQGSAVEQLLEAGMKVYPINAKSAKSYRERKAPSGVKDDRLDAWSFADACRVDGHGWRALRPEDPLVKELRLLCRDEVGLIEQRTSFICQLRHALGEYYPIALEAFEDWGSLSAWMFVQRFPTPQILQGAGKRQWEKFLHSRHLWRTQSAPRRMELFAQATELSGTVPMANAKSQLALSLISMLFALEEQLGIYRKRIEELFARHPDHDLFGSLPGAGPKLAPRLLSEIGDDRERFEEGPQALQCLAGSAPVTRRTGKRKVRANPDQWPCHQRWACDKHLRHAMHLFSEHSLTRCVWAKIYYQHHRQKGSSHADALRRLTQRWLKIIYRMWMDRKPYDPILHHHNQLKHGSWVLELKTT

SEQ ID NO: 244312 - protein, 361 aa, unidentified
MRRLILKDTRSQPPQPPGANERVIIAVDLSRTKWVHACRWAGQEQRRVSTPGELRHLQALVSEYEHCKVELIYEACGFGYEIAWWGQQRAIPVTVVAPSTLEKAPGARVKTDGRDAGELAFRAERGMLKGIHIPSRPQHEYRQLSRTYTQALKDRKRQQVRIRLLLQEHGRVAPAGRRSWNEYTRWMATVSLPDSVASCVSELLELRHAADRSVTRLANQLRQLARLPPYKPLVKALCAQAGIGSMTAIRFILEIGDIQRFATADSLVNYLGLTPSEYSTGETIHRGRVRKCGPGFIRAWLVQCAWRAVNRGSDAALRDAFERIAARSGRKRAIVGVARRLALRLRARWLEFEDAQPMTAH

SEQ ID NO: 244313 - protein, 392 aa, unidentified
MVCVGIDVAKDKHDCFILSSEGEVLADVFTIANNREGFETLLQQIHSCTRPSDKIKVGLEATGHYSYNILGFLLEKGLATFLINPLHTNLYRKSLSLRQTKTDRIDARTIAAMLMSDVDLKSYTDTAYHNEELKSLTRYRFDKVKERAKLKQSVSRLVNILFPELETLVPTLHMSSIYAILSEFPGAKQIAGAHLTHFKTVLSDASKGRYDRDKAVEIREAAKRSIGSAMPAKSLELQHTIRLIHELDKEIDEIEAAIKAIIDEMAPPILTIPGISYRMGAMILAEIGDFSRFDSPDKLLAYAGLSPSTYESGKLKATGAYAHMEKRGSRYLRYALFNATKFVCHWEPSFAAYLAKKRAEGKHYNVAISHAAKKLVRLIFALQTSGKAFQPA

SEQ ID NO: 244314 - protein, 325 aa, unidentified
MTGQPSATEESVTVGIDVAKHTIEVAIGADGPILSLANDAAGFEALLEHLAAHRVALVVVEATGGLESALACTLQLAAYALAVVNPRQARDFARAMGQLAKTDRIDARILAQLAQVLARHPERDQFIKPLPTAEQQALAARVTRRRQIMAMLVAEHNRLAQAQARTKKSIHTIIQALRTELERIDTDLAAHVRSHFADLSSLLDSVKGVGKNTISTLIAEVPELGKLRGREISALVGVAPINRDSGVMRGRRTIFGGRASVRHALYMAALVASRHNPVIKLFYERLVAAGKPKKLALVACMRKLLTILNAMVKAGKPWDASLHAA

SEQ ID NO: 244315 - protein, 377 aa, unidentified
MREKLRFLGLDVHAETIAVAIAEPDGEVRSLGTIANREESIRKLIRKLGPVEHLRACYEAGPTGFVLYWQLSQLGVECAVVAPSLVPKKPGDRVKTDRRDALKLARSHRSGDLTAVWVPDEDSESLRDLVRQREAAKQDQLRAKHRLTKFLLRTGQRPPLGLKAWTERYMRWLAQVRYTQPAQEVTRLDCMNEVEHMAARVKRLEEAILEVVKLAPEPMQELIRGLQALRGVAHISAVTIASELGNISSRFESARKLMGYCGVFPSEDSSGKRIRRGGITKAGNAHLRRIVVESAWSYRHLPRVGEKLRKRHQGVPAEITEIAWKAQNRLHKRYMKMMNAGKDQRKVMTAIGRELLGFIWAIGIKAEAAACKQQIAA

SEQ ID NO: 244316 - protein, 408 aa, unidentified
MVVQAVPVCSSTVVVAIDVGKTEFAFSVTDASRALLLKPRTACPMTGSSLKRVVADIVDVLPVMAMVKVGIEAAGHYHRPLLNALWPDGWEVLELNPGHVTEQRRVLGKRTIKTDVIDLQAMTELLLAGRGQPVRDRSLVLGELTAWSAHRTGRVSLRTATKNQLLGQLDRTFPGLTLALPDVLATKVGRLVAAEFADPARLAALGTSRFIRFGATRDLQIRRPVADRLVQAARDALPTADAAVARAVLAADLALLADLDSQVDQATDQLTRLLPDSPFAPLLSVPGWAAVRAGNYGGALGDPTRFDNHRQVYRTAGLNPIQYESAGKRRDSVISREGSVELRRALIDLGMGLWLNDPAAKAYGAQLRARGKKGGVIACAMANRANRIAYAMVRAQASYDPSRWNLED

SEQ ID NO: 244317 - protein, 344 aa, unidentified
MDSIGFDLHLRESQRCVLAADGTEQQRRIPTSVAGLNAFFAARAPAQIVLEASTESEWVAQHLEQLGHVVRVADPNDARLYAGRSRHIKTDVRDARALAEAARRHDWHVAYRPSPARRRLRQELAGRELLVRTRTRLQAQVRSLVRAAGQRVPPAKPETFAERAASVPVPDTLAPLLANLLTVHTAVQAQVLACTARLTALALGDADVVRAMTAPGVGVVTASAYVAALDDVTRFPSGEQVACYLGLVPRERSSSESRRLGGITKAGDTRVRWLLVEAAWTIRRGRTAETAALRAWCQRVERRRGRSVAVVGLARRLAVILYTMWRTERAYEPTRLRGAPGGTA

SEQ ID NO: 244318 - protein, 447 aa, unidentified
MEVVYRRCCGIDIHKDFITACVLVNEPGKQREVRKKEFRTYWSDLQKLKLWLYASKVEQVGMESTGVYWKPVWNVLEGHFPLLLANPYHMRNIPGQKTDQKDSEWISDLLAHGLLRPSFVPPRPIQELKDLTRYRAKLMGECNRVHNRIAKILEDANLKLGSVASDILGLTGRRVIEAIIAGQEHPDWLADKACGTLRAKRDQLRLVLKGRITDHHRYMLRELMADLDQIEAKILRLETEIADRMKPHAGAIERLMTIPGFKLITAWSVVAEMGTDMSAFPDAAHAASWAGLAPGNHQSGGKRRSGRTNKGNRWLRRALVQSAWAVSHKKNCFLTAQFYRRAARRGAKKAIVATAHQLLVIAFHILRDGTVYREKGGNYFDQLNPERTKRKLMARLERMGFDVILRHSTTDPIPPPSAPPPSAPPPSAPRRGRPCKCVERGIDCKHR

SEQ ID NO: 244319 - protein, 388 aa, unidentified
MIYVGIDIAKLNHFAAAISSDGEILIEPFKFSNNYDGFYLLLSHLAPLDQNSIIIGLESTAHYGDNLVRFLISKGFKVCVLNPIQTSFMRKNNVRKTKTDKVDTFVIAKTLMMQDSLRFMALEDLDYIELKELGRFRQKLVKQRTRLKIQLTSYVDQAFPELQYFFKSGLHQNSVYAVLKEAPTPNAIASMHLTHLAHTLEVASHGHFGKDKARELRVLAQKSVGVNDSSLSIQITHTIEQIELLDSQLFSTELEMANLVTCLHSVIMTIPGIGVVNGGMILGEIGDIHRFANPKKLLAFAGLDPTVYQSGNFQAHRTRMSKRGSKVLRYALMNAAHNVVKNNATFKAYYDAKRAEGRTHYNALGHCAGKLVRVIWKMLTDEVAFNLE

SEQ ID NO: 244320 - protein, 346 aa, unidentified
MILNQPPPDTQFISSPVTLPTLGLDIAKDSFDAGLLLGKQSLHRKFPNRPEGFNALQNWLKKLGAGFVHACMEATGSYGQDLALFLHDLKHTVSVLNPASVKAFAQSELSRSKTDKGDAFLLARFCRAMAPAAWSPPPLELRELQALTRRLESLREMHTQEKNRFPVAASALVAASIHEHLAYLAAQIKDLEKTIRDHIQRHPHLKQQCELLTSIPGIGDCTAAKLLAEMPGVGNFKSARQLAAYAGLAPSEHTSGSSVRHQPRLSKVGNASLRKALYMPALCARTHNPLIREFCDRLQLNDPLKKPMSLIGAAMRKLLHLAFGILKSGMPFDPLYEVRRHVALSA

SEQ ID NO: 244321 - protein, 372 aa, unidentified
MDQVTTTFVAMDTHKLTISVAIAEGGRRGETRFLGEIPSRPEAVAKLVERLSKKHAKLAFCYEAGPCGYGLYRQIVALGHECVVVAPSLVPTRPGDRVKTDRRDAVTQASLFRSGELTPVWVPDEAHEAMRDLCRAREAAVETLRRARQQVTSFLLRHGRVYSDGKHWTGKYRKWLASQRFDHPARQIAFEELVQAMEEALARRDRLAGQMQELLPSWSLAKVVAAIQALRGVAAMSAMTLVAEIGDFRRFSNPRHLMAYLGLCPSERSSGAKTARGGITKAGNRRGRRMLVEGAWTYRLPARVGLAILERNKLLPPPIKEIAWKAQVRLCARYRRLAKMGKPINIVCVAIARELAAFVWAIATNDAASATA

SEQ ID NO: 244322 - protein, 430 aa, unidentified
MKSNTQNAKIEAITEKTLVLGIDVGSEMHYARAFDYRGIEYSKKPFKFSNTEAGFATFKEWILDLKERHEKDKVVPGMEPTGHYWFNLGKFLQDNEMKPVLVNPHHVKKSKELDDNNPTKNDRKDPKVIAGLVREGRYMIPYLPDGVYADLRTASNIRFQLQAELTRIQNRISRWFNIYFPEYKTVYGKPDAKSGMLILKAAPLPEDILTLGIDGVNQIWRDAKLRAVGKARAKTLIEAAEHSVGSKEGAVSARMEIRMLLEDYESRNMRLQEVMVLIEELVRKIPMAEKLLEIKGVGIRTVSGFLAEVGDISRFNNPKELQKLAGLALVENSSGKHKGETTISRRGRKRLRYLLFEVAMSLVAKNPEFRELHNYYTTRRLNPLKKMQSLMAIAAKLIRVFYAMLTKGVDYDPKKMVSDIKRPAVYIQAA

SEQ ID NO: 244323 - protein, 370 aa, unidentified
MNEPSTFVGLDAHKNTIVIAMLLPEHREPVEWRIANEPAAVRRLAKKLQREGLGHVRCCYEAGPCGYALQRQLRGQGIDCQVIAPSLIPIRPGAHIKTDRRDARKLAEMLRAGILTEVQPPTEDEEAVRDLVRCRDDAQRDFTRASNRLSKFLLRRGLVCRSGLHAGSQQFESWLARLSFERQADQWVFEDYCLALDQQHSRRECLDARLLEIAQQEPYRVPVGALRCFRGIDTITALALVAELHDPRRFPSARHLMGYLGLVPSESSSGERRRQGGITRSGNRFLRRLLVEAAWHYRHKPKVGVRLRARRVGQPATVIAIADRAQRRLCARSRRMAAHGKRPCIITVAIARELTGFLWPVLQTWVPARP

SEQ ID NO: 244324 - protein, 346 aa, unidentified
MLHAGLDLSRKRLDVCLLSDQGELVEELTAFPDSSGLKALAQRVESDGEPIRAVIESMTGARFVHDTLERHGWEVEIADAQKVKGLAPLAVKTDRIDARVLALLSHRDLVPAIWLPDPRVRGERELARFRLHLVKHRSQLKNRIHSALMSFGRPCPVSDLFGVAGRDLLAELDLPEPWRGNIDASLALIDDLGTQVVEVDSKLRSSGADHPYVPLLLTVPGVGWVLAFTIAAEIGEINRFETPTKLTGYTGLCPRVVQSGDSDRRGPLSKHGPRYLRWALLEATMHALRHPAYAERYQRNKRRLGKQRGAKVAQIDIARRLTVAIWHMLTRNQSFAPRGAALRLAA

SEQ ID NO: 244325 - protein, 321 aa, unidentified
MQQSNLFFIGIDVSKPWFDASLMEVKNHQKQPMITERFNNDPTGIKTFQKWLIKNAVTFDKNSLVVIENTGVYHRHIWHYCSKEQLPIHIGNAAHIKWSLGITRGKSDAVDSKRLCMYACKQADEIKTSAVLNPVFMQLKDLMTARSALVKQLHGMQNYLKELKSSHNKTLQQVIEKAHRQALDGIKKSIKNLEEQIEKIIVADEGIYKNYQLIKSVPGIGHLTAIYLICCTNNFAGKVSGKQLASYAGVVPFEHSSGISIKGRSRVHKMANKDLKKMLHLCALVVLRYSPEFKQYFQRKRLLPTNRALCRQGIVDCPARN

SEQ ID NO: 244326 - protein, 461 aa, unidentified
MPKQRSQSTPIKPVDVLSQMNPDAAGLDIGAEEIYVCVPADRDEQSVRAFGTFTRDLHNLANWLGACEVKTVAMESTGVYWIPVYEILESRGFEVYLVNARHLKNVPGRKTDVLDCQWIQQLHTYGLLRASFRPPEEMCALRALIRHRATLIRCRSSHIQHMQKALQQMNVQLTQVISDITGQTGMRIIRAIVAGERNPHVLARMRDRRCAKSEDDIAAALEGNYKSEHLFVLKQAVNQYDFYDHQIQECDAEIEKAYANLPPADQSGENAPTPPKRTQRKPRKNQAHFDLTSELYRATGVDLTSIDGIDALTAQTVISEIGLDMSKWPTVKHFASWLGLAPHNKKSGGKILSSRTKKTQNRANTALRIAAQSVGRSHSALGGFYRRMKARHGAAQATVATAHKLARIIYHMLKNRCNYVDPGETYYEQQYQERVIRNLKRKAASFGLQLAPIPAVQNHVS

SEQ ID NO: 244327 - protein, 370 aa, unidentified
MSIVMHPDTTFVGLDVHKDSISVGVLRPGEVSPDVDRIFHDEPSIRRLIGGFADPQLLRVCYEAGPTGYGLARLLAGMGVACQVIAPALIPRAPGDKVKTDRRDCRRLARLHRAGELTAIRIPTEREEAVRDLCRARVDMVTDRHRARRRLLSFLLRHGHVYRQGAAWTATHERWLASLRFTDPALTSTFHHYRAVIVSRDAELRALEGDLVLVACEEPFAEPVRRLAAYRGVAELGALTLATEVCDWRRFAHAPAFMGFTGLVPSEYSSGSRSRRGKITRTGPVHLRTQLVESAWAYRHRPIVSQRLRARHDGVGQATIARSWKAQLRLCRRFKRLAARKSNIGLVAAAVARELAGFLWAEMTADSIAV

SEQ ID NO: 244328 - protein, 312 aa, unidentified
MNTIICGVDVSKAWLDAKVGAAGASGRFGNDPMGIAKLEAFCRHHDVELVAMEASGGYERLVFMMLWEKAQPCALVNARNVRRFAEAMGFLEKTDDIDAGVIAQYAEVKRVSPTPLPSAAQQRLKALVSRLSQVTGDLTVNKQRRSAAADAETTASLDEIIFLLKRQQRRLEGEVASLIDDDPLWACLDKAFRQMKGVASRTVARLMAEVPEIGILSNKAIAKLVGLAPIANDSGKRQGRRPVRGGREGPRSILFLIARGAAKYDPNLAAFYQRLQQAGKPKMVARIALARKLLVILNAKARDARTEFANAT

SEQ ID NO: 244329 - protein, 358 aa, unidentified
MQRESKTINFQGQNIYTGIDVHLKSWKVTVMIENVIYKTFSQDPDSRILANYLRKNFPGGQYYSAYEAGFCGYSVHRELVKQGIRNIVVNPSDIPTTDKEKKQKDDKRDSLKIAKSLKSGELEGIYVPSKGIEELRGLVRYRKTLVKEISRNKTRIKSFLHCNGIVIPSELNFASRYWSGKFTLWLKTIEMTTPYGDMVLQETLDTTDFLRKKLLKVTRSLRLLNTGNEYSAQLKLLQSIPGVGLIMAVTLLSELEDFRRFRKLDQLCSYVGLVPRTNSSGEKEKTGGITPRSNKPLRSCIVESAWIASRTDPALILCFNQLCQRMKPTEAIIRIAKKLLNRIRYVINNETEYVQAVV

SEQ ID NO: 244330 - protein, 425 aa, unidentified
MRFIALDVHRDFCEVAIAEEGEVRLAGRVQTTPGELELFAQSLGEDDQLVLEATGNALAIARIVEPYVARVVLANPKSVKAATETAKTDKLDARTLAKLLAGGFLREVWIVDEQTRVLRRRISRRAQLVRQRTREKNQVHATLIRNLKARPPVSDLFGVHGRRWLAGQALPADERETVEACLRQIDFLAAEIAVIDRALAELALASEQMRRLMTLPGVSFVTAAALMGAIGDVGRFPTAGHLVSYIGFDPRVRQSGSEPARHGRISKQGPGEVRHLLVEAAWHAARTYGPLRVFAERLASKRGANVATVAVARKLVVIAWHMLSRDEDYAFARPSLVREKLRKLELLTGAERRKGKRNPVRVFATKEQHQLEKDLARQAEVAYRRLVRDWQPAMKKGTGAAPGRASRGPSSGQAARQNTAPRPAL

SEQ ID NO: 244331 - protein, 389 aa, unidentified
MKKNTTAKKSSKKAQAKADKTRIRRMAAGQRLTIGLDLGDQTTRYCILDEAGNVVSEEQVPTTKVGLEWLFAKMPASRIAMEVGTHSPWVSRCLAGMGHEVIVANAHRVKLITQSVRKNDRIDARQLARLARVDPKLLSPIRHRGEAAQKDLGVIRARAELMEARTQLINSVRGLVKPMGERLKKCDADQVSAELGAGLSEGAQVVIGPLLKAVEAISEQLGKYDEQIAEMAKRYPEGKLLQQVYGVGPLIALTYVLTLEDAQRFTHSRDVGPYLGLTRKQRDSGESQPELGISKTGDRLLRSLLVQGAHCILRKGAPDSDLRTWGLEKMGSGGKRAKKRAIVAVARKLAVLLHHLWATGEVYDPQYNRKGAEAAKTNSQAKPAKAVAA

SEQ ID NO: 244332 - protein, 350 aa, unidentified
MVVVGVDVHKRTHTCVAVDEVGRKVGEKVVTATTSGHAEAVMWTRERFGAEVVWAIEDCRHLSARLERDLLGFDQKVVRVPPKLMAQTRASARTRGKSDPIDALAVARAFLREPDLPVASHDEVSRELKLLVDRREVLVAQRTAMINRLVWRVHELDPERAPKARSLNLPKHRTILGSWLATMDGLVAELARDELTDITRLTEAINELAKRISARVRAVCPALLALPGCGELTAAKLVGETAGVARFKSEAAFARHAGTAPIPVWSGNTAGRVRMTRSGNRQLNAALHRIAITQIRLDGLGQAYYRKRLDAGDSNREALRCLKRRLCRVVFGRLYTDHYNRTQPCQQAAA

SEQ ID NO: 244333 - protein, 341 aa, unidentified
MQIHSVGIDLGKTTFHLVALGAAGKVLVKKKFTQLQLLTFTANMQTSLIGLEACSGAHFLGRALRAQGHDVKLIPAQFVKPFVKSNKNDFIDAEAIAEAVERKNMRFVPIKTDDQLDLQAIHRVRDRLISRRTAVINQLRAFLLERGMVFAKTPAKLRSAMADVLENADADLTPQMRNLIGMLWDEWKLVEQQITALTDDLEKIADADAGCARIRQIPGIGPVVATAIVAAIGNGAAFRKGREFAAWLGIVPRQYSTGGKAKLFGISKRGNVYLRKILIHGARAAVLRIKRDRAPIGAWLDALDSRAPKNVVVVAMANKLARIAWAVLSSGNDYRPATVPA

SEQ ID NO: 244334 - protein, 404 aa, unidentified
MKRTKARGPVQRDAKEVLAEVLGKLTGKLDAPAVSTSAKENRRGNTVGPNRDRLTVGVDLGDRWSQYCILGLEGETLAEGQLRTTQEDVREFFQALTVARVVIEVGTHSAWVQDVITEWGHEVLVANPRLMEGSKRRKRKSDRIDANKLARLGRVDPQSLYPIRHRSREVRQDLVVLRARDALVSVRTELINTTRGLVKSMGTRLPRCSSPSFAEKVKDAIPVEVGEALLPLVQLVETVNDCIARYDQKIEELGREKYGHTTLLRQVKGVGPITSLAYVLTLEDPQRFSSSREVGPYLGLVPKQEDSGDSQPQLGISKTGDRMLRGWLVGSSQYMLGAFGPDTDLRRYGLRLCERGGKNAKKRAVVAVARKLAVLLHHLWVTGDVYEPLHHSGAETRTAQATAA

SEQ ID NO: 244335 - protein, 324 aa, unidentified
MQSISTIGLDIAKSVFQVHGVDAAGQTVLRRQLRRRHVLAFFQKLSPCLVGIEACASSHHWSRELQALGHTVRLMPPAYVKPYVKRQKNDTTDAEAICEAVTRPNMRFVPTKTVEQQSCLMLHRVRHLFIRQQTAVINSIRAHLAEFGIVAPVGRRGVEQLLEVVADTADRRLPEVARACLAALGSQLRALKAQILEFDRRIMVWHRSNATSMRLDAIPGVGPALATALVASIAEPGAFRSGRDFSAWVGLVPKQNSSGGKDKLGSISKQGDRYLRSLFTAGALAVIRYAKIHGTRHRPWLTGLLARRPTKVAAIALAVCASPR

SEQ ID NO: 244336 - protein, 339 aa, unidentified
MPFAAVDLHRRRSQVAVLDDAGAELWNKNVPNGSAAMLTLLESLPTGTPVAVEATYGWSWLVDLLNELRLDPHLAHPGGCKAIAYARLKNDKVDARTLAHLLRTDLLPEAWLAPPEVRELRNLLRHRATLVAMRTGLKVRVRAVLGERGIAAPESLWTKPGRQWLAEVALPPTHRLVVDNVCCLLDNVEQVIGGVEREIRRRACPDERVKALMAIRGIGLITAMTLVAEIGDINRFATARKLCSWAGLTPRVRNSDTTVRHGPVSKMGSPALRWVLGEAAQVAKRHPPYADTYAEIARRRGRNIATTAVARRLLARAFHVLRDLEASQAAPAGAGPIAG

SEQ ID NO: 244337 - protein, 420 aa, unidentified
MKKHSKSCRRSEASSKRAKSRGSVQRDAKEVMAEVLRKLTGRAALDAGVVSGNGKKDGRGNTFGPNRDRLTVGVDLGDRWSQYCILGLEGETLAEGQLRTTQEDVGEFFRGLTTARVVVEVGTHSAWVQDVITECGHEVLVANPRLMEGSKRRKRKSDRIDANKLARLGRVDPQSLYPIRHRSREVRQDLVVLRARDALVSVRTELINTTRGLVKSMGARLPRCSSPSFAEKVKDAIPVEVGEALQPLVQLVETVNECIERYDERIEELGQKKYGHTTRLRQVKGVGPITSLAYVLTLEDRQRFASRREVGPYLGLVPKQEDSGDSQPQLGISKAGDRMLRRLLVGSSQYMLGAFGPDSDLRRYGLRLCEHGGKNAKKRAVVAVARKLAVLLHHLWVTGDVYEPLHQARAGTGTAPAAAA

SEQ ID NO: 244338 - protein, 405 aa, unidentified
MRYYIGVDWADTAHTIWVENADGAKVLTRMIPHTAEGLADWGRWLDEQRAQGVELWAAIERPDGRVVDFLLDHGVVVYPINPKALDRARDRYRVSSSKSDPFDARVLASFLRTDHVHLHPLEPSSAAAQELKLLTRDYTRLVREQTRLVNQLTATLKEYYPRALEVCPDVTAKRAAAFLRTCPTPAAVAALTGEAWQAFATGHRWSAEQAAALWPMLQRPQIPVPAHVVRAKQRLVEVLLRQLEPVVEAVDAYRKDIMDFFAALPAAEWASTLPASQGTLVPTIWAELGDALGRWRSWQHLQGHSGVVPVTRSSGKSQSIAFRFACNLHLRRALQQFAFCSLKSSEWARAYYDRQRTRGHRHQAALRALAAKWVKIIFVLWSRHIPYDENVHLAMMARQHLRQAA

SEQ ID NO: 244339 - protein, 344 aa, unidentified
MEQIIRIGMDTSKQFFQLHGVDSAERPVLRRQLRRSQVLGFFAKLPPTVIGMEACGAAHYWARELRKLGHEVKLMAPQHVKAYVKRNKNDGRDAEGLCEAMSRPTMQFVPVKSEEQQAALMLAGVRQQLIARRTQLSNTIRGYAAEFGLTMAKGLDKIEPLLARIAQDEGLPMLARDLLAIQGREYARLQVELKVIEAKLMAWHRGNADSRRLAQIPGIGPIGATALVMKTPDPRAFASGRHFAAWLGLTPKDHSTAGKTRLGKITRAGDEMLRSVLVAGATAVIQQAMRGRGHPSPWLIALLKRKPPKLAAVALANKIARIAWKLMVTGESYDGARMLGAIAA

SEQ ID NO: 244340 - protein, 342 aa, unidentified
MKIIRVGVDLAKNVFQVHGVDRNEKPVWQRKLKRDEWIKVLLEKIEPGCVIGMEACGGAHHWARLLQAKGYAVKLIAPQFVKPYVKSNKNDANDAEAICEAMSRPNMRFVSIKAVAQQDVQAVHRIRAELIDQRKAKANQIRGLVSEYGLVAPKELLHLRAAIPDWLEDTENGLTSRFRKLLHGTWSDLRMLDQRVKELDQEIAALAMDPVAQRLQQLRGVGPMIATALLATVGDASQFRNGRQMAASLGLTPKQSSSGGKERLLGISKRGDSYVRCLLVHGARSMMYASKGKEDRLSKWVMRISSTRHPNVAAVAMANKTARIAWAMIRNGSDYQPELATV

SEQ ID NO: 244341 - protein, 428 aa, unidentified
MSLALPEALFFAGIDWAAETHAVCVMDAAGKIAAEFTIGHSADGIATLIRRLARYGDPGDLPVAIERPDGRLADLLLEAGHPVVPVRPHAIRTWRDGEVLSGAKSDAGDAAVIAGYLRLRAHKLRVAAPCSDETRALRTVVRTRGDLVEMRVAATSQLPALLDAHWPGARAIFAGVESPVSLEFLTRYPAPAAAAHPGEKRMAAFCVKHGYSGRRTAAGLPARLRSAPAGTGREALTEALRDAVLAAAGVLIALNASVKNLDRSIAAHLGEHPDGAIFTSLPRSGQVNAARVLAERGDARQACGHPGSVAALAGCTPVTRESGKHRAVHFRWACSKRFRVAITTFADNSRHASPRAAKICNDARASGKDHPHATRVLARARIRVIYRCWLDGVPCDPAAHGTGRARQANYRANRGLRLTQGVSCRPLF

SEQ ID NO: 244342 - protein, 423 aa, unidentified
MQTDGVNQQQYAASIGLDWGDQQHAIALQAAGSGRVETSTIKQTPESLHDWVLSLRTRFGGRNVIIAIEQSRGAVINALLGHGFVHVMRVPPKSLARYREAFYPSGAKDDIPDASLLLEWARDHRDKVKLWTPDKPETRALQKLTEFRRDTVGRRIVITNMLTQSLKEYFPQALSWAGELDTHMACDFLEKWPTLEKLQKAKPAQIRKFYQEHGCRRTEVIEQRLEEIRLARPLTQDSAVISTSITVLETLIPQLRSVIDAIDRIESQIHVLFNKHEDRDIFDSFPGAGPVMAPRLLAAMGSDRSRYDAALEVQQHSGIAPVTERSGNSKWVHRRFACPKFFRQTFHEFAGFSIRYSSWARAYYEMQIDKGKGHHAAVRALAYKWIRIIFRCWKKRVPYNEQVYLEALRRKNAPLLEFLDQAA

SEQ ID NO: 244343 - protein, 350 aa, unidentified
MSEHDTFTAGMDIGDKHSHICILDACGEILEETRIRTTKEGVRQYFSVRPGMRVALEAGTHSPWISRILEESEQQVVVANPRRLSLISENQSKNDVTDAELLARLARADPKLLAPVKHRTVEHQRVQSRLRGRDVLVRQRTMAINYVRATVKTHGSRLPKCSAESFHRHADALPEDLKELVAPVMAVIAFLTARIKEYDRIVRKLAEATPEATLLQTAPGVGPNTALAFVSRVETPDRFPVTRDVAPFLGIRPGRRQSGDSDPQRRITKTGDGYTRRLLVTSAQYILGPFGPDSALRQWGLALAERGGRNAKKRAVVAVARKLSVILLTMWKTGKAWEAFPQRPSKKQAA

SEQ ID NO: 244344 - protein, 371 aa, unidentified
MNQLNGEISKGIGAEATQDKALGRVLKLGLDVHYRQVTVAMQEDGGRIKAAGKMNHGAFVDWIGTKLEKGWQLYSCYEAGASGYWLHRELVELGVKNLVVAPKAMGEAEAKRQKTDKRDSAQLCDGLDRYLRGQDQALSVVAVPTLEQEQNRALIRYHRQIIKDRTRAEARGKGLLCTQGIEVGGRWWEGKGWAEVQSDPRLKDWMKEQLEGWQKKILSAQSQEKPLREQIEALAPERLPKGVGAYSAAVLQHEMKGWKRFSNRRQVASYTGLCPGIHLSDGRGKEGSINRCGNPTVRWTLVEMVWRLMIWQPHYGPVRQLAAGLVKSKRAKKRLVVKAARRLAIDLWRLETEQTTAEKLGLIMQLRSSSK

SEQ ID NO: 244345 - protein, 358 aa, unidentified
MKEYISLDAHKRYTFAEREEMTSKQVYQRRIEHQRGAIASYLADAEPGTPVAVEATGNWYWIVDEIEQAHCIAQLVHPRKAKLMMGCINKTDKLDVHGMNLLQRNGTLPMVWIAPPEIRDLRDLPRTRMFFCQERARFKNRIQASLTKYALNVTGYSDGFGVRARIEMEKHILLLPPHTQAMTLELLRQLDLVEVQIASQEKRIRELVKQTPSMQLLHTLPGVGDILAVVIAMEIGDISRFASAERLASYAGTTPRISASGDKIRFGRLRPDVNHYLKWAFIEAANCIRLHAKHYPNRHVTQLYKRIASRRGHPKAVGAVARHLAEAAFYVLSRNEAYKEPKERNRLESNGNASATAA

SEQ ID NO: 244346 - protein, 350 aa, unidentified
MLIIGCDYHPGFQQIAVVDTETGELQERRLSHREEAEKFYRNLATQGMKVRVGMEASGHARWFERLLAELQLELWIGDAAEIRAKRVRKKKTDREDARHILTLVVEDRFPRIWVPSWDNRDVRQLLWHRHRLVQMRTRIMNQLQAVALNEGLRCKKRLWREQGRQQLESFRLAPWASRRRRDLLELLDRLNPRITELTQVIEQEAEKHPAAQLLMTHPGVGALTALAFVLIIGETQRFGCGKQIASYLGLVPEEDSSGESRRLGHISKQGSGILRFFLVEAAQVTVRSDPEWRNKYFHLAMRRGRKIAKVAMARRLAVRLYWMWRKQWDYQQLKKFGSHAGQPGTGVGVK

SEQ ID NO: 244347 - protein, 409 aa, unidentified
MNSLFVGIDVSSKSNVVYLMKPDGAKHSSFTVQNNLSGAKILSQRVASAMTSSNFDNVVLGLESTSVYGDNLVCFLREDFNLSKFKKKIHVLNAKQVNKFKQSYPDLPKNDSVDSFVIADNLRFGRIASEVYMDDYRFKALQNLTRARFFAVQSLTKEKQRFLNYLFMKFSTLTTEKVFSNVFGATSLAVIEEFLTVDEIAYMDLDKLIEFINQKGKNRFPDSEATAKALQAAARASYRLPKTINDSVNQVLAISMSSIKAIGEQIKAFDKAISEQIKLIPNTLESIPGIGAVYAAGIIAEIGDINRFDNQASVAKYAGLAWTQYQSGSFEAQNTRLIKSGNRYLRYYLIEAADSVRKRNSEYANFYNLKYKEVNKYQHKRALALTARKFVRLVFVLLKTNRLYIPSER

SEQ ID NO: 244348 - protein, 340 aa, unidentified
MTIKAIGLDLAKSVFQAHGVDETGATTLAKRLHRKQMLPFFSKLPPCLIGMEACGTAHYWARTLAAMGHEVRLIPPSYVKAYVKRGKSDALDAEAICEAVQRPTMRFVPVKTVEQQSILMAHRARSLLVRQRTMLANALRAHLAELGLVTNPGIANLAKLAQQALSDEDALPSYARTTLEILVRQIMALSEEITTLDRKLLAWHAENEASQRLAAIPGLGIVTATAMAATVTDPEQFRSGRQFAAWLGLTPQQHSTGGKTQLRGISKQGDRYLRRLLVVGATAVIRHVKDKPTPMANWIRKLLEKKPFRIVSVALANKLARIAWVILTRKEAYRPYQLAA

SEQ ID NO: 244349 - protein, 393 aa, unidentified
MHSVGIDIGKRQHVAAICRQGERTADKPVLRFSADRAGLADLGRWLSRHGPVERVVMESSGHYWMPLAAALHRARVPVAIVNPVSAKHFGARRLQRIKSDPADARTLAALGMADRPRIREPLAGAEPREAARFAMHLVEEQSRIDNKITRLIELGFPELERAYDDPTCTSALAILRLAPTAQAVARKHVATLADANRGPGHRAVGITKAAQIQALATDTMAPPELAPQIGFEMQLLIAQHDLLERQIAQAEARVAGLLDGELARRLQTIPGVGPAICATLIAEIGDIFRFSDFDQLVAYAGVHPAEKSSGQKGGPETSWQMAKTGNAYVRAALYRMSVVGLQHNPAIKAHYARKRAQGKSKMNALGHCMKKSLAIVWGIWRGDHDFTPEPPSA

SEQ ID NO: 244350 - protein, 348 aa, unidentified
MGEVSTIGLDIAKNLFQIHGVDADGTVVIRKRIGRARVLEFFAELPPCRVGMEACATAHQWARELRKLGHDTRLMPPTYVKAYVKRGKNDAADAAAICEAVTRPSMRFVPIKDVEQQSVLMLHRVRDLLIRQRTQLINALRAHLAELGLVAAKGREGLHQLVAVVTECGNEQLPSNARFACQAIVTQLHAVQIEISGLDKRITQTHRANADSKRLDTIPGFGVILSTAVAATMADPKAFRTGRDFAAWIGLVPRQNSTGGKERLGSISKQGDRYLRRLLVVGATSVINCARARPHKYPWVIELLGRRPTKVVAVALANKMARIAWAVLAKGQPYRAPTRSSNATVLAA

SEQ ID NO: 244351 - protein, 343 aa, unidentified
MPLYGAIDLHSNNNYVVVIDDKEQIVFRRREPNPLETVVRDLEPFRSELVGVAVESTYNWYWLVDGLAQQGYTMHLVNTAAVQQYEGLKYSNDWSDTLWLARLLRLGVLPEGYIYPRQQRPVRDLLRKRSQLVRHRTAQLLSLGNIMTRHTGNRVSRSELKQLTLEQVNQQLSQPLVALSVDCSLQVAQTLDKQIGRIEQEVQKQLKLDKAAHKTLQLLETVWGVGPVLGRAILLETGPVSRFARVGDYSSYCRAVASQCWSNGRKKGENNAKSGNRYLAWAFVEAANYAALSYRQARVFVERKTAQTNRALAVKALANKLCRASYWVMKEQVKFEPARLFGS

SEQ ID NO: 244352 - protein, 481 aa, unidentified
MKHKSIYSSQSKELRTLFEEAGNSKRVLCVALDYAKDTHVALFCNGQGEILKKPFPVKNTLKGIEYLKERIKKICKKRGILRKHVFLGGEDGGPYALNFIHTFRKDGFIVAGVNAHDAKKQRENIQASSDELDLLGIAKLLLNRRGSVNPAQQGIYLNIRNLFRYRRRMVQMKTAVSNQIHAQVQQLFPGFLDESKSGIPPFSKSCLWLLSDRFSAQQLRRRSLTTLIRKMREQGLSNAEQKVKMLKDYAATVLCASGEYIHTLQTTLKHQISLYRSLEECIEESEHEIACILAQTPGALLTTVRGIGVMLAAGLCAELGNPYQQHPVKNIVSYAGIVPRTVQSGGPEKETKTKSVSKRCNRILKDYVVQSANHIGQHGPLELMTDYHRRDANNQHADFGIGRRYIRLSMHIMLNGEIYTPYYMRNHKMAKEERLAYYMKLWKLLKDKWSRVNALEIAFNREYPLGQWRTMVEELYDVNLN

SEQ ID NO: 244353 - protein, 370 aa, unidentified
MSVRRILAKTIDTDLEYEAIGIDLAKNCVSAALLTTDGEVVCIDRLDYSELEKSAQALSSTTFAMEPCTEMNYLVQKLEAWGHRCLVIGGKNVQNYVENHFSGQKTDLNDAQALAFLAQDTQLRTIKAKDVEQQKYASLTTLREQYIKQYRQTIVSLKGICQAWGLNISKGISGKARLKDLIENHAAFPEELKESLVDMVTHAQTAQKALNKITKTLEELAKSDKVCQLIQTIPGLGSICSCRLRATVGDIKRFKSPKDFPAYYGLVPRSIATGHNERKGKITHRGDRTMRSLMVQAARSLVNMATKGKLKSKQLTKWILKKQKEKMPWGKLVCAVAAKLLRIVRAVLISNKPYNSKIAGVAKCSLPKGS

SEQ ID NO: 244354 - protein, 280 aa, unidentified
MSDVPCFVGMDVAKAQLDIAIRPSGERWAVPNDASGVTTLVDRVQALQPTLIVLEATGGLERAATAALATADLPVVVVNPRQARDFARATGQLAKTDALDARALAHFADVIRPTPRPLPDAQTQELRALLGRRQQLIVMRTAEQNRLAGTSERLMKDIEAHITWLNASIATLDDALEALLRASPLWRENDDLLQSAKGIGPVCARTLLLELPELGTLTRQQIAALVGVAPLNCDSGTLRGRRTIWGGRAHVRTVLYKGPLDNQDSCSAPTSLWLSAAPDA

SEQ ID NO: 244355 - protein, 355 aa, unidentified
MTDVKYIGMDVHQASISIAVLDGGGALLMQSTIRTQACTLREFLRGLEGTLYVTFEEGTWSAWLYDLLSLHVTQAIACDPRHNAWLKSGNKSDKIDARRLAELLRAGMLKPVYHGQRNAHRLKELSRSYLTLVHDSPRVMNRIKAIYRSQGIRCAGQRVYSLRYRVNWLEQLREPGLRQRAALLYQQLDGVQTLRKQARRALLAASRKHPAHRLLLSVPGLGLIRVALLLALMQTPHRFRSKRQLWAYAGLALVTRTSADYRLVHGSLERSRKPIAIRGLNQNHNHDLKEIFKSAALRACRLPGPWRDSFTQRVEQGMKPELARLTMARKLAALTLVLWKKGEPYNPEKLIMQAA

SEQ ID NO: 244356 - protein, 422 aa, unidentified
MLEQTQDEQEIIDAVAALDIGKAELVCCVRVPDPKGGRRRLQEVTTYSTMTRSLQLMVDRLMELGVTRVVMEATSSYWKPPFYLLEAHGFETWLVNAKDVKHLPGRPKTDRLDAVWLCKVAERQMLRPSFVPPIPIRRLRDLTRYRMSLVSDQGAEKNRVEKLLEDAQLKLSVVASDIFGVSGRDMMAALIAGERRPRVLAQLARTRMRAKIPQLEEAFVGQFTDHHGFLLTKMLARIDALSVDIADLDTKIEAQLAPFANTVARLDEIPGVGATTAAVIIAEVGDDMTRFPTPAHLSSWARFAPGVKESAGRKKGTGATGHGDRYLARVLGEAAVSAAKTNTFLGERYRRIARRRGKKKAIVAVGRSILLIVWSLLSDPEARYYDLGPGFYDSHNNPDRKKRNHIRQLEALGYKVTLEPAA

SEQ ID NO: 244357 - protein, 354 aa, unidentified
MIIIGCDYHPGFQQIAYVDTETGELQERALQHREEAEKFYRERAAQGPKVCVGMEASGHARWFERLLAELTFELWIGDAAEIRTKRVRKQKTDRQDAQLILKLMLKDDFPQIWVPSWENRDLRQLLWHRHRMVQARTRLMNQLQEVALNEGLRCKKRLWREAGRQQLEAFRLAPWASRRRQDLLELLDRLNPTIAELTQAIEREVEKCPEARRLQTHPGVGPLTALAFVLIIGKADRFRCGKQIASYLGLVPLEDSSGSRRRLGHITKQGNSLLRFLLVEAAQVTVRSDPEWRSKYHHLMMRRGRKIAKIAMARRLAVRMYWMMRKGWNYEQLKKFGSHAGRPGTGDGVKENIE

SEQ ID NO: 244358 - protein, 351 aa, unidentified
MEKFIGLDVHAASTTFAVIGQSGRRLGTHVVETSGQALVAQLKAISGKKHVCLEEGEQSAWIYEILSPWAERVVVATVPQNRGQKSDERDAYRLAEQLRIGALKNWVFKEPGAYGTLRELGRTHAMVVQDVVRVQNRIKALYRSRGVAVSGTSVYSQKSRKQYLDKLPHASRGAAETLYAQYDAVEQIRRQAEKDLVTEAHRHPISRVLETGPGLGPIRVAQLMPVVVSPGRFRTKRQFWSYCGLGIVMRSTSDWVPKKGGGWMRADVQQTRGLNLNHNHRLKWIFKGAATSIITQLETDPLHQDYKRLTAAGTKPNLAKLTIARKIAAITLSMWKSKEKYDPTKHRKPSS

SEQ ID NO: 244359 - protein, 430 aa, unidentified
MKKRAYRSVSVKSVNVEEVQEELRTMGGKVGVDIGKDEFLVSLRYDDGSFERPWRAKSQEEQRELVWVLKQLHQVRPLPIGMESTGTYGDALRQALTDAGLDVRRVSNKASSDYAEVFDGVSSQHDAKDAAVIAELVAIGKSRPWPWQAPSPADEELSQWVEWLDIYQQQEVQWLGRLEALLARHWPEATSWLSLGRFTLLRTLAEYGGPAGLLGDKLAAKRLAKWGGPFLSPDTIAGLIQSARDTVGVRMSPLAQDQVKKYATQALRTQEEQRRAEAALARLAKTNQVIQAQATAVGLNTACVLWTTLGDVRDYDSGGAYRKAMGLNLKERSSGRFQGQLKITKRGPGRARRWLYYAAMRECQKPAVKPWYEAKKHRENNHGRKALIAIMRKLALALYQVGARGAKYESRKLFPGGPLQSCQPAPAASG

SEQ ID NO: 244360 - protein, 372 aa, unidentified
MRKVIMIGCDLHEESMILKIAEDRQTPETQTVKNTASGRAAMIADLRRRAEAADGTRVIFAYEASGQGFGLYDQLAAAGMECHVLAPTKIARSPRGQKEKTDEKDALDLLELLRGHVLAGNRLPTVWIPDAQIRDDRELVRMRLDVGEKITALKAQVQSLLKRYQLRRGPGLGKGWTKAFRGWLQRELADPILASRSPLGAGGQAALASLLRQLQSLEEEEERLDKQVAALACSPRYEARVREVTKLCGVGMLTAIVFLSELGDLSRFANRRQIAAYLGLVPSSNESGQRNDRKGHITHQGSSRVRKVLCQATWARVRYHEEEKAIYERIKARNPKKKKIAVVAGMRRLAIRMWHLGGAEPDSGACRIAATG

SEQ ID NO: 244361 - protein, 347 aa, unidentified
MSTSTDHSRTDLPSDLPSDPGSPGSRMYAGIDVSKAKLDLARSGSGSDAVETFANDAAGVGRVVEVLAALGPALSVVVVESTGGLERPLVEALLDAGLPVALVQPGRVRYFAKGLGILAKTDRIDALVLRRFGELAAPRLLERRSKNQAELRDLVACRRQLVQTRAQQYNRRSSTFSKAALRSIDAVVGALDRQVESLDRQIRRLLEADDDFKHLDGLLRGVPGVGPALSATIAAELRELGRVDRQRACALAGVAPFNDDSGAVKGKRSIRGGRTALRCVLYMAALSAMRSNPVIRAFAARLKAGGKAGKVVVTACMRKLLTLINAMLRDGLTWDQLDIVKKLATNG

SEQ ID NO: 244362 - protein, 355 aa, unidentified
MKYYVGIDEHSNNVIIGIIDENGKIVFKIKLPNDIVLIIETLKAFKKAITGVVVESTFNWYWLVDALIEAGYKVHLANPAAIKQYEGLKHTNDYDDAFHLANLLRLKILPEGYIYPREQRSIRDLLRKRSMLVRQRTANILSYQNIYNRNTGQKIKSSEIKDMAKNSSETAFQLEHINLSGEATLSIINTFTEKIQAIEKKVLQSMKLQSEFKKLLTIPGIGEILALTIALETGDIKRFEQVGNYASYCRCVQSIRYSNGKKKGENNRKNGNKHLGWAFVEGANYAKRFYPEVKRFYQKKAAATNKIVAIKATAHKLARAAFFVMRDKVDFSMDRAFGLTKIKVVAVNRSGIVGH

SEQ ID NO: 244363 - protein, 366 aa, unidentified
MKEVTTFVGIDAHKKDLFVAMLSGPSATPVTWQLANEPGAVRRLVRKLEREAPGPVRVFYEAGPCGYALQRQITTDRVSCDVIAPALMPRKPGERVKTNRRDARKLAELGRAGLLTVVQPPTPADEAVRDLARARDDAREDLQRSRHRLGKLLLRRGLHYAGKNWTQAHRRWVDSLTWSHSAERAVVEDYQLAIDHTEARLLELDARLAELATQAPYREPVGWLRCFRGIDTLTAMLILAELHDFRRFGSARALMAFLGLVPGEDSSGEKHRRGRITKMGNALVRRILVEASWHYQHRPSVGRALKARRTDQPARVIAIADKAQQRLCRRFRRMLAEHKPAPKVAVAVARELAGFLWAALQPPVVA

SEQ ID NO: 244364 - protein, 372 aa, unidentified
MTSIIYVGMDVHTTNYTLCCYSMEDDRFFAEVQVEPDAKNILKYLARIEKQQSRDCRIVCGYEAGCLGYSLYHQLHAHGIDCVILAPTTMMTKPGKRIKTDRRDARLISKCLAFHTYSPVYIPTEVDDAVKEYIRMRDDANSALTRVKQQIIAFCIRHGKIHDGKSYWTNKHLEWLSSLDLGNKILSEVLQEYLIRYYQLREQVDMYDMRINELAQAEPYRQKVEKLGCFRGIAAHTALSFCVEVGDFRRFATAQQFASYLGLVPGECSSGDKQQYTGITKAGNSHLRKLLVETAQVFGRSATKSGKSVALKERQAKCDSLTVAYADKANARLKKKYFKIAMRSKVNIAKTAVAREMACFIWGMMTDNISCA

SEQ ID NO: 244365 - protein, 476 aa, unidentified
MPRRSCQADLRAIPQLLHESLYLGIDVGKSKHVAGFVSTTLLERSQRFEACPALAFDNSREGFSTLLERIKSYAPVEQCLAIMEKTGHYYRPLMQYLQEFDIPVYLIHVQRRPAGMLKTDKRDALNLANTLYSQVELGVQVADKTQLVRRAVPPTSAAAQLRGLIRHRSELVREATRRKNKLIAICDELFPEFTTILHDPNLPTALALREKFPTPQVLAVASFSSLAEARGKTHCLSDAKLLELQQLAGQSIGTHDLLRQKSLVLEQEQLIKELRVQSDHIQQLEQEICAIIEQAREGQILCSMGLGPIQAASIVAAIGSIENFPNAGTLKSYFGWAPRREQTGTSFDRSQLTRGGYRPMRQMMFLIVAGAVRYQNSEWAKLYQRLIQAKCPMDTLTGKRKGKMRVIGRIAGQMIETMYALLKTDAEMLSKLSPGETPPPPTLYDPEVHRRHREGHYQPVKPSLASNRIILLPKLS

SEQ ID NO: 244366 - protein, 311 aa, unidentified
MENKPTVGVDVAKDRLDVKVLPCGQALVFKRDGEGIAALVEQLGRLDPQIVGVEATGGFEKVVVAALAGAGLPVVVLNPAQVRAFAVALGKRAKTDPIDAEVIARFLEAVRPEVRPVGDEAAELLSDLVTRRRQIVQMIGAERQREQRTSQPRLKRSIARLLVALQKELTELDGQIDEQVKSSAVWREKEALLTSVPGVGKVISRTLLAELPELGSLTRRQIAALAGLCPWTRQSGQWKGKSFISGGRAPVRSALFIAAMVAARRDSVLKAFHQRLIAAGKPKMVALIALARKLLTILNAILRDKKPWANA

SEQ ID NO: 244367 - protein, 434 aa, unidentified
MREAEDEPLFAQRAAGIDIAKAGIEVTIRVPSDRRRGGRQQETRSFGTVRRQLLALADWLRCWQVTKVGMESTADYWKPVFFVLEAEGFDCVLYHAAQVKALPGRPKTDRADSVWLAKITERGALPGSFVPPAEIRRLRTHTRYRRHLTQARTAEKNRVEKLLEDAHLKLSSVISDIHGASGRAMLEAIAAGERNPAVLARLARGTMRGKIAARLEEALDCSFLTGEHAAILAMMLATIDYYTARIAELTAKIRALCQPYEHQIAQLGAVPGTGEITAQDVIAEIGTDMTVFPTAAHLVSWARWCPQTAQSGGKPKGASASGRGNRYIGAALGEATISAGLTRTFPGAKYRRLIKRMPKKKALVATGNSLLTIYHALLSDPQATYAELGADYYERRAGTRRQARNHLRSLERLGYKVTIEPIDPATGELTATPS

SEQ ID NO: 244368 - protein, 344 aa, unidentified
MKITTIGLDLAKSVFQVHGVDATGQIVVRKSLRRSQMLPFFARLPSCLVGIEACGTSHHWARELIKLGHEVRLMPPAYVKPYVKRGKSDAADAEAVCEAVTRPTMRFVPVKSPEQQAALSMHRTRDLLVKQRTQLINMIRGLLAEFGVDIPKGLERALLMARQIVDGKAAEVPFEAAKVVGTLAQQALDTHVRLREIDRDLLVWLRSNDVARRLTTIPGIGPVGATALAASVTDPHQFRSGRQFAAWLGLTPLQKSSGGKERLGRITKMGDKYLRKLLIVGMTSLVRRAKYNPGRIDPRLADLLARKPARVATVAMANKTARVIWAIMARGETYRAGHRPALAA

SEQ ID NO: 244369 - protein, 344 aa, unidentified
MEITTIGLDLAKSVFQVHGVDATGQVVIRRSLRRAQMLPFFTRLPSCLVGMEACGTSHYWARELIKLGHQVRLMPPAYVKPYVKRGKTDAADAEAVCEAVRRPTMRFVPVKSPEQQAALSMHRTRDLLVKQRTQLVNMIRGLLAEFGIDIPKGLERALLMARRIVDGEAPDVPMEAAKIVGTLSQQALDIHIRLREVDRDLLVWQRGNDVARRLMTIPGIGPVGATALAASITDPHQFRSGRQFAAWLGLTPLQKSSGGKQRLGRITKMGDKYLRKLLIVGMTSLVRRARYNPKTVDPRLADLLARKPVRVATVAMANKTARIVWAVMARGETYCAGHRPALAA

SEQ ID NO: 244370 - protein, 428 aa, unidentified
MSNRRRVLDTEQHATTLEHKGAAMLLIGWDWAEASHAVAVMDPAGQVIDQFTITHDETGLASALRRLAHHGSPDQLPVAIETTNGLVVDRLLAAGHPVVPIHPNAFHAARPRWGAARAKTDPGDAAKLADYLRTDGHRLRRLAPTDQATRRLQALTRTRDELVAAKVAATNQLDAVLDAHWPGAAAIFGRLDSPIALAFLDRYPTPQHARHLGHARLRRFLVQHAYCGRRTPQQLLDRLHAAPHAPNSLDSDTVAAVVGAHVMVLRILLGQLVELERAIRAVLDEHLKANLLASLPRIGRVNLAQVLAEIGPILDTASSVEHATVEAGAAPVTRKSGKRQQVSFRWQANPRARQALMTFADNSRHASPWAAKRYADARRRGKRHPHAERILARAWLRVIWACWHAGTVYNPAMHDSEQRLATAQHAAA

SEQ ID NO: 244371 - protein, 352 aa, unidentified
MYQYFVGLDVHKQVIAYCIKAADGTIVNEGSIKARRFDIDQWVQSIPGPWRGGLEATMFSHWIYRRLAPHAARLELGNPARMKAICSGKKKSDKLDARTLADLLRCDMFPVAYVMPPELEGLRRQLRFRRLVVQETTVFKNRTASLLMETGIEYEKRRLHGKRYFQKLLTDNEFIDSELRPLLQHSRKQIESLEGMHEQILTTLTRHPQLKQRVLALSAIPGVGPVTALTWALEVAEPQRFSSIKKAVSYAGLCSALRESAGRIQRGPLSKHRNQHLQSALIEAAKIAPIWNPTLRAVHEKAKQKGNANEATIAVARKLVAYLLAADRAFHTTRLSAAKPDGVCSGMPDLSK

SEQ ID NO: 244372 - protein, 315 aa, unidentified
MKSECMAGFIGIRSQLLAFFEKRPRCLIGMEACAGAHDWGRRLRELGHDVRLMPPSYVKPYVKRGKTDAADAAAICEAVTRPSMRFVAIKSEACSSVLVVHRTRDFLVRQRTQIGNAIRAHMTEFGIVAAKGAQNVDRLKEQLDRLPEAAQLPVSLLFDQLAETDKRIDRLTDEIEEAFKQNETSQRLATIPGVGILSATIIAATTPDVDNFDCARDYAAWLGLTPKPHSTGGKQKVGRISKMGNRYIRRLLYLGAIAQIMLRYRLKREPGADWLSSMLIRKKTKVAAIALAHRMARTIFAVLRDGSRYRPQATA

SEQ ID NO: 244373 - protein, 334 aa, unidentified
MKQVNQVGVDVDSEELVCAMQRAGQRMPLARFANTAPGHQKFIRWATKGGHSARVCLEATGIYSLEFALALDQAKKVEVMVVNPRAIKDFGRACMQRAKTDAVDAGGILDYLERMPFVAWQPPAPEVLELQAINRRIVQLNTELTREKNRRHASAFAGASADAIARDIEVNIHHLERRIERMHDNGLKLVRGVPALATKLAHLVSTKGIAEASAMRLLAELLVLPDDLTAPQWVAHAGLDPRPYESGTSVHRPRRISKVGNRHLRAALYMPALVAIQHDPNVKAFYDKLVAAGKKPMQAVVAVMRKLLHAIWGMLQHDQDFDGEKFFKIAKENA

SEQ ID NO: 244374 - protein, 504 aa, unidentified
MVPASGDETIGGAAQAKTPINSIPAEGWPDLVADKEEIAMRKPRLARKRRIPEPQRSELPRINLDAAGLDIHQAEIWACVPCDRAEEPIRCFGTYTPDLESLADWLQACGIKTVAMESTGVYWIPIYEILEQRGLELYVVNARHAKNVAGRKDDVCDAQWIQTLHSYGLLSRSFLPDATWRPLRAYWRHRMDLIQHRASHIQHMQKALQQMNVQLTQVLSDITGVTGMQIIRAIVAGERDPVTLAQFRDRRCAHSTENIAKALTGNYRAEHVFALKQALALYDFYTAQIAECDAEMERLYAEMQDVSGPDGDPLPPLGPRSNNNSHSKNAPTFDLRTHLYRITGVDLVAITGLEESTIQTIISETGIDMSRWCTVKRFGSWLGLAPRNDISAGKVLRTKTAKQRNRAGQAFRMAAQSVNRSNTAIGAYYRRLAARVGVQQATVATTYKIARIFYTMLKKRTQFQETGADEYERRYRERAIARLGKKAFTFGYRLVPVETEAAAA

SEQ ID NO: 244375 - protein, 348 aa, unidentified
MKFYTKQHRFYCGVDLHADAMYVCILDATGEVVLHQNIPTRPKNFLRLIKPYRNGLVVGCECMFSWYWLADLCAEQEIDFVLGHALYMKAIHGGKAKNDKIDSYKIASLLRGGNFPLAYTYPKPMRATRDLLRRRNHLARKRGELFSHIQNTATQYNLEPLGCIAKPSMRVDLLQKFPDPVVRRMVEVDLVTIEHYEKLLDTLERQLEKVATSHDPVSLALLKSIPGVGKILGMVMLYEIEDIARFPREQDFASYCRLVKPAKESNGKHYGHSGKKIGNAHLRLAFGEAVVLMLKGNKPAQQVLQRLASKHGKGKSLAILAHRLGRSVYYMLKNQVPFDQERFLRKAA

SEQ ID NO: 244376 - protein, 385 aa, unidentified
MDEEANPTTKNGDKHMKKTDKYVGLDVHQDTTVIAVADGGRLGEVRSYGTIPSDLQALAKVLGKLGGEGVRLHVVYEAGPTGFVVYRRLKQMGIDCIVVAPSKTPQPKGVRLKTDRRDALQLARLHRAGELTGINVPDEVDESVRDLTRARADAVHDLTRAKQRLKAFLLRQGYRYPGKANWSEAHQRYLRKLTLPLPALRSVLEEQLLAIDQVTERVKRLDELVEVQVPQWRYYPAVRAVMCLRGFQLNAATVIVAELGDVRRFAHPKNVMAFLGLVPKEDSTGTTRRVGSITKAGNAQARWCLIEAIQKALTPPKISARLSLRQEGQPAAYKELAWKTQVRLHKRGWHLLQRGVMKAKVNVALARELAGFLWDLLRQVPAPEA

SEQ ID NO: 244377 - protein, 349 aa, unidentified
MKKIVKQVLGIDVAQKELVVCLGRMYDDWAPDLYGYKTFANTAKGFIALLLWVKKLTDETIGVRYVMEATGVYHESLAYFLDGKGYEVSIVLPNKISNYFRTLDVKTITDKTASEAIARFGLERKLDTWKRPKEIFKKLRQLTRERDQIVQERTMVKNQLHAEQTEAEPNKRSIKRIQERIKMLNKQEKEIKDEVAILIKDNDEIAKLVIIICSLTGVGLLTTAIVLGETNGFELIRNKRQLASYAGFDIKEKQSGTSVKGKPRISKKGNKHLRKAMHLPALCAIRYDERFKAIFARLVSKHGIKMKAAVAIQRKMLEMIYTLYKTGKEYDKNYLKKDDIKAEQQVLVA

SEQ ID NO: 244378 - protein, 394 aa, unidentified
MCRPGCERDRARPVPEGVESLLTQRLVTVSFPGRACHPLNRLREEGMAMTIVETTRPITGGVDTHLDVHVAAAVDANGGVLGVCSFATTPAGYVELHGWLAGFGTVDRVGVEGTGAYGAGLARHLRGHGLLVIEVDRPNRQERRRNGKSDELDAIEAARAALSGRASGIAKSADGDVEAIRALLVVRRSGRNVRIKYLNQIRHLGFTAPDELRERLRGVHRDRLARTAAALRPTAGSDTVVYATKLAIATLGRRVLALEADAQRLDDELETLVRRTAPSLLEVYGVGVNTAAILLVAAGDNPHRLRSEAAFAHLCGVAPLLASSGKIDRHRLNPGGNRQANHALWRIVFTRMSSDERTRKYVARRSAEGKTIREIMRVLKRYVARELYPHLVRD

SEQ ID NO: 244379 - protein, 343 aa, unidentified
MKVTTIGFDLAKNVFQVHGVDERGYIVVRKQLRRDQVAIFFANLPACLIGMEACGSAHHWARKLQGFGHRVRLISPQFVKPYVKSNKNDAADAEAICEAVARPNMRFVPIKTMEQQAVLSVHRVRQGFVKARTAQANQIRGLLTEFGLVLPQGISNVMRGVPQLIDVATDLPASMRQLIARLLENMKVLDRQVKELEAQIKAWHQGSELSRKLEKIPGIGPLAASALVASIADARSFKNGRQLAAWLGLVPKQDSSGGKAKLLGMSKRGDTYLRTLLIHGARSAIVAAQRKGKPNVWLSGLLARRHPNVAAVALANKNARTIWALLAHECEFRPDYLPRPATA

SEQ ID NO: 244380 - protein, 311 aa, unidentified
MEHSPVVGIDVAKAHLDAHVRPTDETLRVSYDDAGLAALLTRLRAVQPTVIVLEATGGYEVPVVATLAAAGLPVVVVNPRQIRNYARALGQLAKTDPLDARVIARFAEAVRPPVRPLPDAQAQALSALTARRRQLVDMLAAEQNRRRLVRDQPVQRQLAAHIAWLEQALRGLDQDLMTLLRSTAAWREKDDLLRSAAGVGRVTSCTLVADLPELGCLTRRRIGALVGLAPFARDSGVFRGRRMIAGGRAHIRRVLYMATLSAIKHNPAIRDFYHRLVSAGRPPKVALTAAMRKLLTILNAMLRDRRPWQPA

SEQ ID NO: 244381 - protein, 426 aa, unidentified
MKRTQNEKISQIKISTLVVGIDIGKETHFARAFDYRGIELTKLLKFSNTAEGFELLERWMRDTCRQQEKTEVIVGLEPTGHYWFTLGDHLKRQGHKLAIVNPFHVKRTKELDDNSPTKNDRKDPKTIAMLVKDGRYREVYIPEDIYQELREAVEERERLQKQLIAIHNRVIRWLDIRFPEFTEVFKKWTGKTALLTLQTFPTPAKVLETGAEEILATWRTVVKRSIGIKKAQALVKAASKSIGRTTGQVASETSLQNLLAEYELYHAQHERLKQLVQELLLQIPNAVKLLGIKGVGLITAATFVGETGDIHRFEHPRQIQKLAGCNLVENSSGKHKGKTTISRRGRKRLRRGLFMTMIAILGKNPEFRELHHRNLTREKNPLNKMQSIIALCGKLIRVFYAILKNGVDYNPEKMMGDIQQSMKAAA

SEQ ID NO: 244382 - protein, 355 aa, unidentified
MSQEKYIGMDVHQATISVAVMDAGGKLIMECILETRAATILEFIQGLHGTLSLTFEEGTSAAWLHDLLQPHVSWLVVCDPRKAALLKEGNKSDRLDARKLAELLRTNQLKPVYHGDHGVRTLKELGRSYLTLTKDCTRVMNRIKAVYRSWAIPCGGTSVYAPRHRAEWLAKLLEPGVRLRAEHLYQQLDGLQPVRLHARRELLHESHKHAAVKLLRQVPAIGPIRSALLVALLQTPHRFRTKRQLWAYSGFAVETHDSGEYRYVRGKLQRNRERITVRGLNNNHNKDLKNLFKSAAISASTRPGPLHDFYVARVEKGMRPTMARLTLARKIAAITLTLWKKGVSFDPQNLPRQAA

SEQ ID NO: 244383 - protein, 357 aa, unidentified
MSSNMKKYIGLDVHKEAIAIAVLNGAGKLVMESIVETKASTLLDFLHGLRGELHVTLEEGTWAAWLYDVLKPHVEEIVVCNPRRNALLKEGSKSDKVDARKLAELLRGGLLRAVYHGENGLRTLRELARSYLTISKDQARVMSRLKALYRSWGIPCSGTQVYAPRYREQWLSKIAQPGVRRRAELFYQQMDGLSVLRHTVRGELLAESRKHQAVKILRQIPLIGPLRAALLLALMQTPHRFRSKRQLWTYSGLGVETHDSAQHRYVDGQLQHSKKPQQIRGLNQNHNHEMKRIFKSTALSASRCAGPLQDFYAGLLARGMKPEMARLTLARKIAAITLTLWKKGGRFDAEHLKSQAA

SEQ ID NO: 244384 - protein, 333 aa, unidentified
MSAYIGLDVHKDSTFVTVLDQDGRVAVQRKLPNEHVPSFLKQFNVEKIGLEASTHVVPLYRALVSRGFRVEVSHPKKTRYIAEARIKSDKVDSKAIAELVRLEALPQSYMPPPEIACLREKVRRRAFLVRERAKLKTKIRGVLAYEGVKPSEGLGLFTRKGVDWLRSLCLEPIDCYLRVIVVLNGEIRRLSRELKQLAGLDEDVRLLMTIPGLGYYLALLVKAEIGDVNRFKSGDHLCSYAGLVPSTYNSGGVTRHGGITREGSRWLRWAMVEAAMTHVKYDTSITRSYHRIAEKRGRKTAIVATARRLLLSCYSVLKNRRRFRPFPSRSGFT

SEQ ID NO: 244385 - protein, 345 aa, unidentified
MENMYYIGLDVHKKTISYCVKDGSGRIHAEGKIPTTRFDLDRWMKTVPQPWTVAMEATIFTGWIYDHLRPHAAAVKVAHPLMLRAIAAAKKKNDRIDANKIADGLRCNFLPECYMAPTAIRERRRTLRYRNLLVRQTVQLKNRISGLLMEAGVNYNKEKLHKVGYFRELLKSNPDIDESLRPLLQLCRETLVRLQKTESALIRSLARDRFLVERVEHLMTIPAVGPITALTWALEVGEVSRFSSIKKAISYCGLCGAEQSSGEYVKRTPISKQRNKHLQCVLVEAAHMAPRLSPELALLYDREKQKGNANRATLAVARKLVAYLVAIDRSQRDFLLVEKENQAAA

SEQ ID NO: 244386 - protein, 310 aa, unidentified
MDKTIVGIDVSKDRLDVAVRPSGEVFVIERSPVGLEQLTLRLGGLSPCLVALEASGGFETVVAAALGAARLPVVVVNPAQIRAFAKAVGQRAKTDPIDAGVIAHFAEATRPEPRPLPDEATRLLADLVARRRQILEMMVAERQREKRVTVPHLRESIERLLKALKRELTSVDTDINEAVRGSPVWREKEDLLASVPGVGPTIARAMIAEMPELGQLSRRQVAALAGLAPFTRQSGQWRGRSFIGGGRTTVRSALFMGAMVAKRHNPILKAFFDRLVAAGKPKMVALIAVARKLLTVLNAILRDRRPWQTA

SEQ ID NO: 244387 - protein, 341 aa, unidentified
MSVMIGIDPAKGSHAAAAVNGAEVAVAELEVRATRRQAGELLAWAERFPARRWAIESANGHGYLLAQQLVSAGEHVVDVPSMLSARVRVLDSTRSQKNDANDARSVAIVALRNPGLRVVTVEDHVAVLRMLAKRHKQLAGLKTQAAARLHAVLAALIPGGLGKEMVPRQAAALLRRVRPTTMVETERRRLAQQHLSEVRRLEQELKASKARLREAVEASGTSLTDIYGVGPVVAGLLIGYSGDMGRFPTRHHYAAYNGTAPIDASSGAKKRHRLNPRGNRMLNHALHLIAITQLRYPNTEGRNFYERKLKEGKTRKEAIRALKRRLSDVVYRHLQTDQQTR

SEQ ID NO: 244388 - protein, 362 aa, unidentified
MNDIHYIGFDVHKKSVSYCVKTASGEMVQEGQLVARREVLRAWAAAQAQPWRGAMEATLFSAWIYDTLQPYAQQLDMGHPARMKAITAGKKKSDRLDARTIADLLRCNLLPTCYVLSPEMRDLRRLLRYRQLVVGQSVRMQNKMAGLLMETGAPFVKAKLHGKKYFTQLLETLQEVPESVKDLLRMSRGAMEMFEASQKRLVKRLLTEPALQARVERLASIPGVGPITALTWALEIADPQRFPSIGDAVSYCGLTTAFRASAGQEQRGPISKQRNAWLQTALIEAAKLAPRWNPQLAAVHQHELQHGHRNRATLQVARKLVAYLMAVDKSGQPFRLRRSPEVAAAPPTRKKEKARRPALQLT

SEQ ID NO: 244389 - protein, 313 aa, unidentified
MSELYVGVDVSKEQLDVASSDGAVLRVSNDDRGYPVLLKQFEQSPPTLVLMEATGGLERALAVELSAAGIALRIINARHVRHFAKATGLLAKTDRLDAEALVRFAQMLKPEPRPIAPEQTLALQALVLRRRQLVEMLTMERNRLRTAHRGVRKSLQSSIRWLEKRLAEVDEDIDGALRESGVWRERVELLESVPGIARVISVSLLASLPELGQLNRRQISALAGVAPFNRDSGRWQGRRSIYGGRPLVRSALYMAALVGARHNPVLKAFYQRLRGAGKPAKVALTACMRKLLVILNTMIRSGQRWQNTPIAIT

SEQ ID NO: 244390 - protein, 353 aa, unidentified
MIAVDLAKRVFQVAGEDRLGQVIYEDRIRSREAFAAFLRNLPAGVTVLMETGPGAQAWARQLLGQGHTARILPAQHVATHRSGHKNDRNDALAILRAGHDSQIKAVPIKSVQALAMQALHRARSGYVGRRTALSNQMRGLLLEHGIAMAKGDASLVQGVSRAIAEVNQPVPEVLRELLAELLAEWEQLGVRIEALTGKLKASASQDPKARQLMTVRGIGPVIATAVIAKQVEPERFSNARDFAAYFGVAPNQDSSGEKKRLGKMSRRGDGYLRSMMVEGAQAVLRALDTQSQQPDDRRLQRWMSRHGRKGAAIRLANRNFRIVWAMLQNDQSYKRQMPRRAELEDMQEIAMND

SEQ ID NO: 244391 - protein, 392 aa, unidentified
MEVFVGIDVAKETHWVCALDHAARVLLNRAVDNEQADIDALVRELVALGDDVVIGLDITGSLARFLEAVLLAEGLRLVHVPGIAVNRAGHGFAGGERKSDPRDAHTIADLVRTRSLRPILPDDETVIALRLKVTRRREITDDQTRRISRLRQLLGAIHPGLERRLDLTGKGPLVLITRYVTPGEIRSAGHKRIVAYLRKTPHLHAAEALARAALEAAQGQRTVVPGEAVFADMIREIAAEALEARQILGRLDRDIEALLDDHLDGALIRSLPGMGAELTAELIANIGTIDRFPSADALASAAGLAPVIRQSGMSRNWRRAHGGDKALKRVFFQSAFCAVSTRDPLSKAFYDRKRKEGKHHTQAIIALARRRITVLWTMIRSRQAFDPNRKAA

SEQ ID NO: 244392 - protein, 392 aa, unidentified
MVVSVGIDVSKDKHDCFILSSEGEVLVDVFTIPNTMDGFNCLLQRIQDCTTPQGKMKVGLEATGHYSYNLLGFLLDNGLATYVLNPLRTNLYRKSLSLRKTKTDRVDARTIASMLLSDAGLKPYTSTAYHNEELKSLTRYRFDKVKERAKLKSSISRLVCILFPELEKLVPTLHMTSVYSLLEEFPGAKQVAAAHLTRLKTLLETASKGHYKRDMALEIRDAARNSIGSRMPAKSLELQHTIRLTRELDREIDEIEEQIQSIMGELHSPITTIPGLGFRMAAMILAEVGDFTRFDSPDKLLAYAGMSPSTYQSGQLKNCYPHMEKRGSRYLRYALYNATKYVCYWDPAFADYLAKKRAEGKHYNIAISHAAKKLVRLIFAMEKSMQPYCSAS

SEQ ID NO: 244393 - protein, 317 aa, unidentified
MSTSERFIGIDVSKTQLDLAVHMTGKPWQVAYDTAGVKQVVKHLRTLAPTLIVLEATGGLEMRVVSALAAAQLPVAVVNPRQVRAFAHATGTLAKTDRLDAQVLAHFAATMQPTPRPLPDAATQQLSAVLTRRKQLVDMMTAESNRLGAQPNSALRKRVRAHLTWLTKELARTEKELTQLIRQSPLWRVQDDLLQSAQGVGTVLSQTLLADVPELGKLTHKQMAALVGVAPFNRESGGYRGKRRIWGGRACVRAVLYMGALSATKWNPVIKAFYERLLAAGKEKKVALTACMRKLLTILNAMIRDQTKWQDISNITH

SEQ ID NO: 244394 - protein, 246 aa, unidentified
MQLHSIDAETGEIVNKPVKRAVFLEHFANRAPCLIGMEAGGGSQYWARKLTAMGHEVKLMPGKFVKAFVMGNKNDAVDAKAIWLAVQHAERSVAVKTETQQAVLGLHRMREQLVKFRTMQINGLRGLLTEYGEVMGKGRAALDKAQPSVLERLVDRLPAILIDTLREQWSGLAELDKQIAGIERRLQMWMREDKACEEIATMGDAKTFRSGREFAAWIGLVPKQTGSGDKVQLLGISAATRICASC

SEQ ID NO: 244395 - protein, 401 aa, unidentified
MNAVGIDVSKGKSMVCVMRPFGEVVLEPFEVLHTAQNLNDLAGKLKALDGETRVVMEATGNYHKPVAFVLHDAGLFVSVVNPVLIHDYDNNSLRRVKTDKKDAVKIANYTLDKWTRLRQYLPEDDTRLALKNCYRQYQQAVAVRTMLKNNLISSLDLTFPDANKLFSSPAKSNGCEKWVDFIGDFWHSECVSSLSSDAFAKKYLKWCQKHGYNFTRSKSDTIYACAVNAASLPKSPTSKLLIQQQVAQLKAVSQSVAAFQQEMLRLSQQLPEFDTVMEMYGVGPSLGPQLMAEIGDIRRFSSKKLLIAFAGIEPQPNDSGKIVGNDSGISKVGSAVLRRTLFLIMTVILKTQPQDEPVFQFMNKKRSEGKPYKVYMMASANKFLRIYYARVKAVMDSKHSK

SEQ ID NO: 244396 - protein, 340 aa, unidentified
MRQLYAGSDLHGNSNLIGIIDGEGKRVFKKKLPNDLSLVLEALRPFQDEVVGIAVESTYNWYWLVDALMDEGYKVHLANPSAIQQYVGLKYSDDKHDAFWLAEMLRLGILPEGYIYPKEERPVRDLLRKRGHLVRLRTSLVISLQNILSRNLGRKVNVNDVKSMREDRISSFLEMNEDLALAGRVSKEVIDHLTHQIYRIERVVQKRMGLKEQYRYLPTLFGVGKILSLTIMLETGPIGRFPTVGDYVSYCRKAPSQWLSNGKWKGSGNRKNGNKYLSWAYGEASEFARRFHPEPRAYYNRKMQKTNAAVAHSALSNKLARAAYYVMRDQVPFRPEKLFR

SEQ ID NO: 244397 - protein, 350 aa, unidentified
MIVGIDVHKHNHAAALIDDRGGEIATLIIPNTPKGYRSLIDWLVDHGAAEAVVGAESPGSFGRCLVAALAGAGFEVLQVPAWRTHRERHRRGPGKTDPGDAISIAHVVRTKRDELGPAEEPELVRALGMLELQRRRFVRDRTQAIQRLRADWTQHDPVAEAGVIRCDRQRELNKLRRLQLGPSLAARTAARCIRELARDITDLNKRIAELDREIAQLLAEHENPLADLHGAGTNLAATIIAQAGDVRRFRNASAFARFCGAAPIPCGSGQTANRHRLHRGGNRQLNAALYRIAVVQQRHHPQAKIYLARKIAEGKTPREARRALKRHLANVLYRRLYAWANTAPSMNLLT

SEQ ID NO: 244398 - protein, 373 aa, unidentified
MDGRMIYVGLDVHKETIAVAVAHRDPPAELEELGTIPNRPEALQRLMHKLRSRASSLRVCYEAGPCGYAIHRQLRTLGIDCMVVAPSLIPVRPGDRVKTDRRDAVKLARLFRSGELSAVWVPDPAHEALRNLTRLRATAHHDLTRARHRLSKFLLRSGCVAPPDAKPWTQRFLNWTRAVRLEQPLDVRVRDDYFNLVVHLQDRITALDQTLEDTARTNPMARRIAALSTMRGVSTVTATTLVAEWGEIARFTRPRQLMAYTGLVPSESSSGGRTQRGGITKTGSSYLRRVLVEAAFAYRHRPLLGGVIRRRQQGQPEAVTRIAWKAQQRLHRLYTRLMARDKRHQKIVVAVAREMVGFLWAIDREITSATPTA

SEQ ID NO: 244399 - protein, 343 aa, unidentified
MIWVGLDVHKRFSRMGCFDPATGEVHDLGSVSNDASSLQGALEKLPCPKTVVLEAGRSSYHMAGLLESMAEEVWIVDPGEVRRLQHTISKTDRRDAAALAWWAGKGVLTPQWRPDAQTLDLRELTRGKTALTRMSTQVRTMIRMLLARHGHECPHRDLLGDRGQLWLEEVELEGHAGQMLASLREILAVVQAKADDFEHMVEQTSRKHPVARRLRTIPGIGPYLGLALAVEIGDISRFPGPAQLRGYSGLVPAVYQSGDKDARGPLTKAGNKWLRYAAVLAAQRIGQMKEPDPRLKRVFLSVAFRHGRNPGKIAAARRLLDLIYYMLKKEEDYRAPRVRKVAA

SEQ ID NO: 244400 - protein, 348 aa, unidentified
MATTYIGIDLHRTVIQICVLDEQGEVVREERISYHSLAEGLRAVEAVKGFAPGCRVAVEALGLNRWFVNACQAAGLDVLVCDARKLGLRKLGKKTDRRDAYEIARRLRLGDLDRMARTYYPSDAEYGRRKLLRVRHYLVQMRQQTTNQLRAMLNAYQIEAPRCELYSGPSQAKLAALRLPEAELQAAFDALCAVLERIQAQIRTLDHRIAALPRQEAEIRTLVAMLPRIGAQSAATLRAEIGDARRFRTARAVAAYVGLVPTVAQSGDVAHHGRLTKQGNRELRWILSQWAVRLISFDPLVADWAARKGRRMHRNKVRMALARRLLVGVWITLSRGEVFDLRRCLGLA

SEQ ID NO: 244401 - protein, 403 aa, unidentified
MYSSFVGIDIGKWNHQAAFLEVSGKETARSLAFQNTSEGFQSLSESLAPFDKGQTVIGLEATGHYWLALFSFLVDNGWTVKVINPMQSDALRKMNIRKAKTDRKDCVVIADVLRFGRYTETVLPDEDLLQLRELSRCRVAHVELLGDLKRRVLGILDRVFPEFASCFSTVFGSAPTELLQECTDPEELADYDIDKLIKLLEKESRGRHSREKAEELKAKASRSVGTRFGRDALKFELKMLLEQLDFIKGQVKEFDKFLKKLMKNHELIYTIPGISVTLGSAILGEIGDVKRFGTPQQLQAFAGMDPSVTQSGNFQGTQAKMSKRGSPYLRRAVYLAANAARRFDPVFKDFYDRMIARGKHPKQALAAVGTKLLRVIHAVMTSQKPYNPQKLLTPAARISQLNP

SEQ ID NO: 244402 - protein, 334 aa, unidentified
MHYIGLDVHKKTIAYCAKTADGTIVDEGTIQALRPELKEWAAARPAPWKGTLEATMFSGWIYDTLEPHADDLAVAHPASLEAITRAKKKSDKLDSRKLSDLTRINMVPRVWMPPRQQRELRRLLRFRNRLVQQAVWNKNRIATLLMELGEPYTKSKLHTKKYFEPFVDQLEACETDLLLLGVSRDRVEATLSIVRKIENKLLTHALLAKRVELLRTIPVVGAISALTWALEIGDVKRFGKIDQAVSYCGLCSRLNESAGKSRRGPLSKQRNGHLQHVLIEAAKLAPRWNDQLARLHADEVARGHRNQATLAVARKLVALLLAVDRRGTGYEKRE

SEQ ID NO: 244403 - protein, 317 aa, unidentified
MTENCFAGVDVSKGKLDTCLTPGRQRHSCSLDKIEGLIAWLKKRAPRVVAMEATGGYEREAAAALAAEGFAVAIVNPGQVRAFAKASGRLAKTDKLDAETIADFVAAMRPEPRPLPAQETAALQALVVRRRQLIAMRRAEMTRLETTKETSLRKGVERHIAWLKAEIAKIDDDVGGKIEASPVWRAKDQLLQSAPGVGDVLSRTLLAELPELGSLSRGQIAALVGVAPFNRDSGKIRGIRSICGGRAPVRHVLSMATLASVRSNPVIATAYAKLRRAGKPPKLALTACMRRLIVILNTMVKNNTPWRPNVLTSNTVA

SEQ ID NO: 244404 - protein, 341 aa, unidentified
MLKFTVGADISKDKINFALRFLNDYILEKEVDNTTSSLNKFIRQVQSLVKGIAKDKKSEYCLEFIMEHTGIYGNLLIECLSGNKVTMYVIAGLEIKNSTGISRGKNDKIDAQRIADYGVRFADKLKPYALCDQTLTELKSLNTKRTQLVRIKVKLTQSKDDNKKFLGKELQKKLEKINKTIVHELDEAIDKIEADMLELIKSNESIYDNYKIAQSVPGVGKIVAVAFICATNNFTKFQSAKALGSYCGVVPFGKESGRYKGKNKVSPIANKSLKTLLTLGAISCIGRKNTFAAYYQRKVTEDKKNEMLAINNVRNKMVKTLFACIKNKTKYKADYTFSFAA

SEQ ID NO: 244405 - protein, 451 aa, unidentified
MEEKKISLEVVHPDAAGIDIGSRSHWVAVGQNAEDVKEFGVYSDDHQALCNWLKEKGVMHVAMESTGTYWQNLFSALIVEGFEVILVNGKQTKNLKGKKTDIKDCQWIQKLHTLGLLSKSFLPDSTTDIIRTYSRHKLNLLNQSANCIKRMQKYLRLMNMRLEVVVRDIVGETGSKIISEFISGTKDGKKLAQNRHYNCKKTETEIAKALQYNGREDYYFALQQEWQTYQHIQQQINQTDAKIASLLKDIIDKDDNKKQHIAPAKPFKRKNKNSNQNLNFNQVSYQYFEGVDLMAIEGVNESTVMTLISEVGLEGIKKFETAKQFTSWLRLAPNNKISGGKVLSHHLPKGSSRLKLALRNAANAIGNLKEGHLADFFKRINYKKGRATAVSALARKLAVIIWNMIIKGTSYLPPEQYLCLDEKRKLGLVKRIRKQIAKFDLTNSDLGFVSN

SEQ ID NO: 244406 - protein, 343 aa, unidentified
MQSISTIGLDIAKSVFQVHGVDAAGQVVIRRQLRRRHVLAFFQKLPPCLVGIEACASSHHWSRELQALGHTVRLMPPAYVKPYVKRQKNDSTDAEAICEAVTRPNMRFVPTKTVEQQSCLMLHRARHLFIRQQTAVINSIRAYLAEFGIVAPVGRRGVEQLLEVVADRADHRLPEIARVCLAALGSQLRALKAQILEFDRRIIAWHRSSATSRRLDAIPGVGPALATALVASVADARAFRSGRDFSAWVGLVPKQNSSGGKDRLGSISKQGDRYLRSLFTAGALAVIRYARIHGTDHRPWLTRLLARRPTKVAAIALANKLARMAWAMMARGERYKEPAALAA

SEQ ID NO: 244407 - protein, 313 aa, unidentified
MSAIDYVGIDVSKAHLDVCLGEAGPVFRVGNDRAGLARLQRRLGRLAHPHVVCEATGGYTRLLLEAMAGRAIAVSRINPVRIRHYGRALGKLAKTDAIDAGLIVRFARAMQPAATPMPSASQVQLTELVRRRRQLVEELARQKQLEPIPGQPVIAASRTRHLDFLKAEIATLDAAITVQIEHDDQLAHRAELLRTIPGFGAVVAATLVAELPELGQIGPKQIAALVGVAPYNNDSGALRGQAHIRGGRLSVRCMLYMATIAAIRCNPPVKAFYKRLRAQGKPAKLAIVAAMRKLIIIANAMIANDRQWTNDQA

SEQ ID NO: 244408 - protein, 430 aa, unidentified
MFRVTKIIIMEVPNMPEYAALIAIDWADQQHAVCLFDPSTGEREQIIVKHTPAALQEWALSLRQRFGGQPLAVCLEQSRGPLIYALLKYDFFVLYPINPATLAKYRQAFSTARGKDDPTDADYLLDLLEYHRDRLRPWHPDDEKTRTLGLLVEQRRRLTGDRTRISNRLTALLKGYFPQVLDWFEDIRTRLVCDFLERWPQLSLLQQARPATVDKFLRSHHSTSKATNQRRLSELKTAIPLTTDAAVMTASVINVKVLVAQMKTVIAAIAEYDRHIEALCLTHDDYHLFASLPGAGPVHAARLTAALGSDRSRWQTADELVRFSGIAPVIERSGKQFRIRWRYFCPKFFRQTFHEFAAQSIQDSFWARAYYYQQRAKGKDHHPAVRALAFKWIRVIWKCWQSRTPYNEVIYLESLRKKGSSLLKFAADYQ

SEQ ID NO: 244409 - protein, 334 aa, unidentified
MKHIGLDIHKKETQACVLDEKGKVVLVKRVRTDVPDIGHLFKNIEDEAKEELAVVMEATGFYFWIYDCIVARGHDVKVVHPTKVKPLMKARSKTDKNDAFMLAELLRAGCLEGIYIPSPEIREMRDLTRHRESLVRKKGDAKREIIAALDQHGTKVPSELRTNFTQKYKDWARSLNDFVINEKLDLLELLLTKIHNVEKMIEEKYGSDNDVQLMRTVPGIGLVTAAVIKAEVGDVSRFSSAENLAAYVGVSPTTCQSGEKTWGGPTRRGNNRVKHVLIEATLFHYHYCPDSKISSYYQRKKDSIGGKKAVVASSRKLLEALYCMMTRREVFHAH

SEQ ID NO: 244410 - protein, 392 aa, unidentified
MKKNTKSSVTTPAPLTLLNPKCAGIDIGASELFVCIAKNSSEQEVRSFPTFTADLKQMIHWLKKSGIKSVAMESTGVYWIVPYEMLEEAGFEVLLVNAHFFKSVPGRKTDVQDCQWIQQLHSYGLLRGSFRPTHEIVELRTYVRQRSRLFETAGTQVQLMHKALTQMNIQLNHVISDITGVSGLNIIRAILEGKRDPKELANLSVNGCRKNIDVIAKALEGNFRPEHMFALEQAYEAYEFFHKQIRECEEAIRVILSSMQHQSPPPPPDNGNVPSKKSARKTRANRSPYYFNAQDEIKRVTIADLTTIPGIDANTAMKILSEIGTQTSRWANAKAFASWMGLCPGNKISGGKVLNSRTRPSDNRVAQALRMAASTLYRSNTAIGAFFRRMRA

SEQ ID NO: 244411 - protein, 392 aa, unidentified
MGHDSTVYVGLDVHKESITTAYAVDIGEVELLGKIGTSKTDIDRLCQRMQSKATHVRIVYEPGPCGYGLYRQLVQKGFDCMVCAPSLIPKKPGERVKTDRRDAIKLVRSLRAGDLSPVYVPGVEDEAFRDLARAWAAAKADLKHARQRLKSFLLSHGIRYTGSANWGPAHRRWISTFAFPNHWQQLAFDECRRTIEDRLGQCDRLEAALREAVVKWRFYPAVLGLQAMRGIQFTTAVGMLAELGDLSRFEHPRQLMAWLGVTPSEHSSGDRRRQGSITKNGNSYARKLLVEAAWSYRYPARVSPDIQRRHEGIPRPIIDRAWDAQLRLCRRYRKFAARGKNVNIGVVAVARELAGVHLGHQQTGDVPRHTEGCQTLTPRYLIENTESFLKAA

SEQ ID NO: 244412 - protein, 405 aa, unidentified
MEILVDRACGIDVHKATVVACIMGTGITKEIRTYTTMTNDLIRLKNWLRDNRITHVAMESTGVYWKPVFNILEERFEVILVNARHVKNVPGRKTDVKDAEWLCKLLRSGLVRGSFIPPKEVRELRDLTRYKRKLIQTITSEKQRVEKILEDANIKLSSIASDTFGTSGKRIIEELMKGDLKPEAMAELSKGRLRNRKEELKEALVGNMEDHHRFMIQAHLTHIAMMERLLSTVEQKIQETIEHHFKEAFELLKTIPPVKDSASVVIAEMGVNMDLFPTEMHLSSWAGMSPGNNESAGKKKPGVTTHGNKYLKTILIEFGWVASNMKGTYLSSKYHSLVGRRGKKKTLVAIGHKILIMCYHILKYKVPYRELGPRYLDERKKDRIAKNYMKRLASLGYTVTVKEAA

SEQ ID NO: 244413 - protein, 358 aa, unidentified
MQRYIGLDAHAASCTLAIISETGRRLRDFPVETNGAALVEAIRAVPGPRHLIFEEGTHSAWLYETLERHVDEIVVTGVSNSRGPKCDARDAYALAEKLRINAVDKSVFKAPKEFAVLRELARVHSMFVRDVVRVQARLKSIYRSRAISTAGAAVYGPRQRQEWESRLPPAARHATSKLYAHYDLLLELKKQAESELIAESKRHPIARILQTAPGLGPIRVARLLPVVVTPHRFRTKRQFWSYCGLGIVMQSSSDWVRGSNGEWQWAQVAKTRGLSKQHNHTLKETFKGAATSVVQQGEKVPIYADYERLVESGTKPNLAKLTLARKIAAIVLRMWKDEEVYRPDRVSSTTTQAARSTT

SEQ ID NO: 244414 - protein, 414 aa, unidentified
MSTLTNKFSAFVGLDWANSKHDVCVQLGHDGKRTFEIISHTPEALDEWLTKLHHQAKGNIAVAVELTKGPIVYALQKYSFITVYPVQALTLARYRQAFNPSGAKDDPTDAELALDLMLKYPSKVTPLKPSSDDVRVLAQFVEQRRLLVEDKRRYVNRLIDALKQYYPQPLAWFSHRDSGLFFNFISKWPSLQSLKRARENTIRKFFLSHGGNAVSLTEQRIEAIKNAVPLTEDKAVILPYSLFVETLIEQLKTVIVAIKTYDEKIYTLFTDMPDAELFKSLPGTGPCLAPRLLAALGDDRARFTSAQEIQNYAGLSPVTERSGQKCWVHWRWQCSKFIRQSFIEWSAKSVGVSYWAGLYYNQQRAKGKSHQSAVRALAFKWVRIVFRCWKTKVPYDESKYLKALKERNSPLLAA

SEQ ID NO: 244415 - protein, 377 aa, unidentified
MSDTITLVNKVADKVFIGMDLHKNTSTFVVKDKEGKLINSAKVLTDKNDVSKFINSVKRNSGGKELSLAVEPVSQWYYYADLIENLGVDVHLAHPMEVKAISHSHIKTDKIDAGVLADLLRTNFLPEAYFAPAEVRSWKEQCRFRASIMNLRTQTKNKIHAILFKHALKHNFSNRFGKGGQRWLAELELKEPFKGNLDKYLNLVDYLTGEINCAEERITNTVISCPQAKLLISIPGISYCSALTIMAEVGDIERFMSVKHLQSYAGLIPSTYNSGDKQIHGRITKRGSRWLRWIMIEAAYHQVNCKRIPGFGAYYNTLKKRKGSKTAAVATARKLLAVVWRLLKDNRPYEVSDPRCWKSRPIASNLSSVSPVVLIFV

SEQ ID NO: 244416 - protein, 431 aa, unidentified
MKNRTDKRLEEITAGTLIVGVDVAKSVHWARLVDYRGVEFGKALSFKNNRQGYESIVTRINAVRNMKILRYPIETVMIGMEPTGHYWKPLANYLMKTGCRVVCVNPYHTKKSKELDDNSPTKNDKKDAITIARLVKDGRFFDPYLPQEVYGELRNLTNARVSVIKRSNAVKNTITAILDEYFPEIWTVFKKPLKGKASRQILRSCPFPSFILAMDEVGVLSEIKKSVKKTVGMKMVRKLMSAAKDSIGVQYGLDAAKMRLCWLLDELELSEKQLREVEQAMETALQKTGYAAQILGIKGIGIVTAASFLGEVGDPLRFQNARQIANYAGYNLTEDSSGKSKSGTCISKRGRKQLRSILYQMAFTMVGGNNEMKALYRHLTTRKSNPLKKKQALVVVSKKIITVIYSMLKKQETYKPELVLGAVRKELMLAA

SEQ ID NO: 244417 - protein, 351 aa, unidentified
MRFYTRQHIHSCGIDLHAQTMSVCVLDAAGEILLERKLETTPEAFLETIAPYREDLVVACECIFTGYWLGDLCAKGKIDFVLGHALYMKAIHGGQAKNDKIDAHQIAVLLRGGMLPQAYVYPSGMRETRGLLRRRLHLVRKRGQLLAHLQNLTHAYNRGAFEKRIAYPSNREGVVAHFSGEPMVQANVALDLALLERYDALLTDLELQLVRQAKREAPRGFQLLRSIPGIGKVLAMTIVYELHDVQRFERVQQFASYARLVKCAKESAGKRKGTSGAKMGNVHLKRAFSEAAVLFVRHSAEGKRLLARLTQRHGKGKALSILAHKIGRAAYYVLLREKPFDAKKFFAHANP

SEQ ID NO: 244418 - protein, 383 aa, unidentified
MKKSQETLRLKDTTKAAILYIAFELSNSKWKLAFSDGSKIRYKAITAGNLAQLQVEISLAKQKFKIDEDVRVVSCYEAGRDGFWIHRYLESQGIENLVVDSASLEVNRRKRRAKTDRIDVAKLMRMLMRYWGGEKKVWSVVRVPSEDDEDARHLHRSLERLKKERTKHRNRIKGLLIQQGIKVSNPSQKKFLEVLEKIRTWNGQAVAPQLKSHVVREYERLQMVEGQIKELEKEKAERLKNPDTDSLEKVAKLALLYGIGAVSSWTFVMEFFGWRQFQNRREVGALAGLTPTPYDSGKSLREQGISKAGNHRIRTLAVEIAWAWLRFQPQSKLSQWYMKRFGGGGKRMRRIGIVAMARKLLIDLWRYLEYDKLPEGARLKPVA

SEQ ID NO: 244419 - protein, 349 aa, unidentified
MHATTIGVDLAKSRFELAVADQQFRIQRRDRLTRTQFARFFENLAPSLIVMEACGSAHHWARTLRGYGHEVQLLPAQYVRAYVRRNKTDAADAAALIEAARCSEIHCVPVKTVDQQQIQQLHRLRAQWMTTRTARINLLRGALREFGINVPLGAIRGVLAVREALKTDNGLPDALRPWMLEVLQEIAGLEQHIKDIEYQLEELVREDTVMWNLKKIPGIGLLSATALRAAISDVHRFPTGRHLASWLGLTARESSSGERRRLGRISKRGDTYLRTLLIHGARSVLISAQRTAKAGLPRDRLRTWALQTQARCGHNKATVALANKLARIVWATWYHDRRFDANWTPAATH

SEQ ID NO: 244420 - protein, 343 aa, unidentified
MTLIGCDLHARMQQVAVLDTGTGEIQEHQFPHHGDAVERFYAALPRPVTVAVESTGYSLWFHTLIRQLGHTLIVGDAAKIRAMVVRKTKTDRRDALHLLELLRHDRLPTIWVPDPATRDRRALLAHRMRLVRIRTTVKNGLHAIALSHRLVEGSKRLTKPRLAVLQGLSLAPYTARRRDESLELLHWLDEHIRQLDDQVAEAAASDPAARRLLTHPGVGPVTALATIVVLGPVGRFPGSKEVASYVGLAPALHASADTHHLGQITKQGNPFLRLVLVQAASIAIRYDEDLHRLYMTLHRRRGHAKAKVAVARKLLIRLFIMLRDGIDYDEFRRRGRAAQPMPT

SEQ ID NO: 244421 - protein, 347 aa, unidentified
MDHIGIDVHKKESQICILAEGGELMERRIPTQPRRFAEELGARPHARILLESSTESEWVARCLEGLGHEVVVADPNFAPMYATRTRKVKTDRRDARALAEACLLGAYRVAHRLSDAQRHVRARLTVRDTLVRTRTRYISLVRALLRQHGWPVPTGSAEGFGRRVMTLPLPGRLRSEVAPLLAVMRYLQQQLAYSDERIAAVTQTDERVRRLQSVPNIGPVTGAAFVAALDDAARFRRAHEVEAYLGLVPRELSSGETQRRGRITKAGSSRMRWLLIQAAVSMRRLHDPRTAALREWAGHIAARRGKGIAVVALARRLAGILFALLRDGTVYESRQRALAAVPQAVPA

SEQ ID NO: 244422 - protein, 321 aa, unidentified
MAKIICGVDVSSQFLDVFLNPRCQRFPNTVAGIADLLALCQQHHVDLVAVEASGGYERRMYRQLWAAGLPVALCNARAVRDFAKSMGRLEKTDPMDAALIAEYAAANQKLVAHPPQSSAHDQLRALVTRLRQLTETRATQLQQRLLVTDPVVLETFTRLLAFLTSEIRQLQDRIAQLIDADPLWHHLDHAFRSIKGVADRTVACLMAELPEIGTLSHKAVSKLVGLAPLADESGRRHGRRSIRGGRATVRHLLFIVASVVRRYHPDFAAFSQRLAAAGKAKKVILVALAHKLLIRLNAKARDARRQLLPTASLPLTTTIPS

SEQ ID NO: 244423 - protein, 344 aa, unidentified
MDHYAGIDVSLECSSVCVVDASGKVVREAKVVSEPEALIGWFGSLGFELARIGLEAGPLSQWLYAAMKQAGLAVELLETRHVSDAFKAMPVKSDRNDARKIAQLMRLGWFRPVHCKSITAQEIRAMLTARKLVQSKLLDFENSLRGILRGFGLKVGKTTRTNFAGRIEELVKGHPNLQTIGQALLRARAVLLAEFNGFEKRVRAMSRLHDKAKLLMSAPAVGPIVSLTFACAIDDPSRFTSSKQAGPHFGLTPKKYQSGETDYTGRISKHGDASVREALYEAAHIMLTKPIKGCSDLKSWAMRIARRAGTNKAKVALARKLAVIMLRMLKDNVPFNPAAKAATA

SEQ ID NO: 244424 - protein, 350 aa, unidentified
MAKGITETIGLDMGDRYTRYCILDQVSGEQVGSGRVRTTPVGMERFLEHYPRARVVLEVGTHSRWANQVAQDSCAEVLVANPRKLNFIYQNNRKSDEVDAEALARVGRLDPSLLHPIRHRSKAAQADLAILRARAGLVSARTKLVNTLRGIVKSFGWRIPPQAPKRIGHQTLRFVPEELQPALGPLLLSIEALSDEIAEYDSRVDKLADEKYTDSGCFTQVYGVGKLTAMAYLLTIEDQNRFRSSRTAGAFFGLVPRRDQSGAVEKQLSITKAGDRMVRTLLVQCAHRVLASNGPDSDLRRAGERIASRGGRTAKRRAVIAVARKLAVLLHALWRTGEKYEPLKNHAQTA

SEQ ID NO: 244425 - protein, 392 aa, unidentified
MLYLGIDIGKNNHVATLIDSQAKPLFKGFSFANTTVGGESLVSKLSVHLKSTSDVEIGMEATGHYWLSLYSFLVSKGYVIHVINPIQTDGWRKGVEIRKRKTDKIDSFLIADLLRYGDFVETSLSDESIMSLRNLTRFRHYLVGSIGDLKRKAICVLDQTFPEYQGVFSDTFGQTSSELLLHFQTADDFASITAEQLEKALSGITMKSFAKNKLTQISELAANSFGLKFCRDSFSLQLKLLIEQIRFIEAQVSDVEAEIETMLTKLNSPITTIPGVGIVTGATILSEIGDIGRFSNPSKLVAFSGIDATVIQSGESSGTYKMSKRGSPYLRKALFQAALIASNHDPVFKDYYQKKRAEGKHHLTAVGAVARKLCYTIHAILKNNVPYAVQKP

SEQ ID NO: 244426 - protein, 391 aa, unidentified
MIYIGIDVAKDKHDCFITNSDSEVLFKAFTIFNNLDGFNDLYQKIESVMDDVTKVKVGLEATEHYSYNLLGYLIDKGLPTYVINPLHTNLYRKSLSLRQTKTDKVDARTIASMLMSDVNLKSYSDTSYHNEELKSLTRYRFDKVKERAKLKTSVSRLVCILFPELEKLVPTLHMASVYALLSEFPSAKHVATAHLTRLTNLLSKSSKGRYGKDTAITFRDSARASIGSNMPAKSLELKHTIKLIQELDSEIDEIENEIKIIMDEINSPILSIPGINYRMGAMIIAEIGDFNRFDSPDKILAYAGFSPSTYQSGQLDGAYAHMEKRGSRYLRYALYNATKYVCHWDPTFAAYLAKKRAEGKHYNVAISHAVKKLVRVIYHLEKTKQQYIKVA

SEQ ID NO: 244427 - protein, 376 aa, unidentified
MMEKLRFLGLDVHAETITVAVAEADGEVRSLGTIANREESIRKLIRKLGPVEHLRACYEAGPTGFVVYWQLTQLGVKCDVVAPSLVPKKPGDKVKTDRRDALNLARSHRSGDLTAVWVPDEASEAVRDLVRQREAAKQDQLRAKHRLTKFLLRTGQRPPLGVKAWTERYVEWVQQVRYTHPARETTLLDCLNEVQHMEERVKRLEQSIVEVIQLAPVPMQNVVRGLQALRGIAHISAVTIAVELGNITSRFERARDLMGYSGVFPSEDSSGERIRRGGITKSGNAHLRRIVVESAWSYRYRPAIGARLRKRQEGLPAEITEIAWKAQNRLHKRYMTLMARGKEQRKTMTAVARELLGFIWAIGIKAEASCKQQLAA

SEQ ID NO: 244428 - protein, 415 aa, unidentified
MALCLLSDLSCRVWDRQERCCLKGSLDVSRLGSDVAFLPIPDHRNHHFQQEHIMTSNVAGIDPHQDSFTLGIVNQHGIEVCHETFDNNAVGYVEAIDRLTTHRVQLVGVEGSAKWGAHVSIALIAGGLDAREVPPSRSAAQRRSRRLEKTDAVDAIATARALQAEPTLGPVQTLEVYDAAVAKIEAVLEHRRALVATRTLMLHHIGDQIAKLPTEISDQLTTTGKIEARLRRLETINVEDLDTTVSGIYRIEWLQSYVEQDREARRQIRQLERLIDDLLDQHGTTLRDEPGIGPIAAATLVCEVGDPFRFARESKFAKWCGTGAVALSSGEGSGQPVRHRLDFGGNRRINSVLYIASITQQRDTPEASNYLDRKTAEGKTKREARRAHKRHLANRVIRRMWRDEQTRKSLESIAA

SEQ ID NO: 244429 - protein, 410 aa, unidentified
MPERFVGIDVALRDHRVAVLDRDGEAVGQSFTIAATKEGVTTLLQTLPARGATPAQSVIGLEASGHLWENLEGALVGAGYRVLVLNPVQTRRYRDLVRRKAKTDDIDAHVIAGLVRSGAAQQSYVPDEQIQSLRELARLRARLLEDRQDYLRQLIAQLDVVLPEHRTALGDLLSARARGILAQFPTAQHLAQASPRAIRRAAHDAGTRGFSLDEATAVRAAARSSLYSGKAAGARAHVVRTLVSQLERLTTAIEDVDRAATTLLPPSARGTGPSDAELLQTVPGIGPHTAATLLGELGALTRFTDARALVAYVGFYPVISESGERAATPRLSPVGSPIARHALYLAAVNAVRRSAEWRTLYLRKKAQGKHAKQALIVVAVKLLHTVYAMLRHRQPFNASRLLVAPATLRA

SEQ ID NO: 244430 - protein, 423 aa, unidentified
MEVMHERCAGLDVYKAMIVACVRIMAGGKVGRECRTFETTTAGLLALLAWLRESGCRHVAMEATGVYWKPVWNILSDGAFELMVANAAHIKNVPGRKTDVNDAMWIADLVACGLIKASFVPEEPIQELRSLLRARKQLTREQTSHIQRIQKTLEEANIKLDSVISDILGLSGRRMIEAMIAGVRNPFKLAELADRRIKASPKALYDALHGRLTDHHRFLLRLYLGQYDTLDAAIVALDQQVDASVTRMDKEAKAGQATFRSLIILLCTIPGIGALAATTILAEIGRDMSRFPTAGHLVAWAGLCPGQNESAGKRKASRLRKGAPWLKTMLVQCAWAASRKKNSYYKAQFNRLRSKRGPKKAICAVAASLLTAIYHMLKDGTEHHDLGADHFDHRSTAVKANRLVAQLVKLGFQVELHPLAEAA

SEQ ID NO: 244431 - protein, 339 aa, unidentified
MENYYVGIDLHSTNCYIGIIDQNGNRIFNKRANNDLNMIISTLKPFKEKIKGIVIESTFNWYWLVDGLMDEGYAVHLANVCAIKQYEGIKHTDDQSDAFWLAEMLRLKILPTGHIYPKEKRPMRDLLRRRLQLVHHRTALSMSMTSMIQNCTSINLSRYDKKNLTHHEITGLLDHPYQVMSANSINNVIIEINENIDKIEKEINRKVRLTQRYIKLTSVWGIGEILATTIMLETGDVRRFKDVGNYASYCRCVPTIKLSNGKTKGRGNKKCGNQYLAWAYLEAAYCMQRAYPEAKKWFLRKLNKKGRFVAIKALASKIARACYLIMKNNIEFEPSKLFA

SEQ ID NO: 244432 - protein, 343 aa, unidentified
MAHYVGLDVSLKQTSICVVSDTGSVVREGVVDSDPEAIAAFVRSRAPDTVRVGLESGPTATWLWTELKRMGVPVICIDARHAKAVLKMQINKSDRNDAVGIARIMQTGWFKEVRVKGLDCHAVKALLTSRALLVKIKRDLENQIRGLLKNLGRVIGRAKFNGFAARAAELIEDRPELVAVVTPLLKAREAIEKQIDDLDRKVLKLARHDAQIRRFMTVPGIGPITALCFKATIDDPARFKRSRSVGAYIGLTTRRHASGEIDWSGRISKCGDAMLRSYLFEAAGVLLTRVPKWSALKAWGMRLAKRNGLRKAKVAVARKLAVILHRMWIDRTEFTWSNKEAAA

SEQ ID NO: 244433 - protein, 338 aa, unidentified
MAIVFVGIDLAKNVFALHGVDEGGKPVLVRPSVARAKLHALVASLPPCTIGMEACSGAHHWARLFIAVGHTVRLIAPKFVAPYRLSGKRGKTDAADAAAICEALQRPAMRFVPVKSLDQQALLTLHRVRQGFVEQRTAVINRVRGLLTEFGIVMPLKASVVRAQAAAALEDLPGWANLAIGDCLSELHRLDERIAQYDKHLTTQARHDERARQLMRLKGVGETTATALVASVGNAHEFKCGRQFAAWLGLTPGQYSSGGKTRLGRITKAGDGYLRSLFVLGARAVLNASKTRTDALSRWALALQERRGYWRAVVAIAAKNARMAWAVLQRGERFVMPA

SEQ ID NO: 244434 - protein, 446 aa, unidentified
MSKKAQRNSQPKTDRLKGDWKALEIVHPRAAGIDIGGSEHWVAINPELDEEPVRCFGCFTADLEQMADWLVERGVRSVAMQSTGVYWIPVFEILQQHGLEVFLVNARHTKNLPGRKSDIMECQWLLKLHTFGLLLNSFQPSDEVRTARTLWRHRGELVAQASSAIQRMQKALIEMNVQLTNVLSDLSGVSGMAIVQAILAGQRDPKELAALADPQVKATKQVIAKSLQGNWRPELMFVLRQHVEMYRTCQDKIADCDRQLQQHLQSMTPKVELEAHPLGPRPKGKRARGNAPKFDLRTELYRISGVDWTQVDGIDVHSEKSFANWLGLCPTNETSGGKVLNRRTPKVVNRAKVAFRQAASTLIRSQSYLGAQYRRLRIRLGAPKAITAMARKLACLFYRLLNHGKQYVDKGMEYYEQRYRDQQVRFITRRAKELGLQVVVPTPAKA

SEQ ID NO: 244435 - protein, 341 aa, unidentified
MEYGAIDLHLRRSQVRIIDEQEQVVLDRRVDTTRADFERIFAGRARMRILIESSTESEWVAQHLEGLGHEAVVVDPTYAAMYGSRSRKVKTDKRDVAALARANRRGVYRRAHRVPAATRTLRQPLRIRRQLVQQRTGLINLLRAVLRQEGLRLPSGQAESLLTRVERLGVPAILEATLAPLRTMLTALNATLATVDAAREARAAIDPVTQRLMTAPGVGPVLAWTCRAVMDTPDRFGGDASRATAFVGLVPREDSSAERQHKGSITKSGPGDLRALLVQASWAIWHSRRERAAHLRDWVSRLAARRGRRIAVVALARRLTRILYAMWRDTTEFRAPVIVAA

SEQ ID NO: 244436 - protein, 354 aa, unidentified
MEQEACQAEVILGVDTHLDVHVGVVIDAVGRVKGTLSIETNPNGYQQLLSWARSFGRLSRAGIEGTGSYGAGLTRFLERSGVAIFEINRPNRSRRRNRGKSDPTDAESAACAVLSDDATGAPKAQSGLAEALRTLSVARRSAVKAKTQAVNQLRALLVSAPSFIRDALLKVKPEHCVAACAALPNDDEKNPVLASLKTTLRLLAKRWNALHDELRELDKQLTRLTKLAAPLLLGRFGVGPQTAATLLVTAGDNPTRLRNEAALAALCGVSPLQASSGKTSRHRLNRGGQRQANNALWTIAMVRMRSDARTREYVARRNGQGLSKKEIHRCLKRYIVRELYPLILADLADSARAA

SEQ ID NO: 244437 - protein, 482 aa, unidentified
MKEPRMKDNRRSPAPRQAAATKHRSWSPLLKRIQPDAAGVDCGATSHYVAVAEDREPQPVRAFSTFTADLHRLADWLVQCGITTVAMESTGVYWIPLYEVLEERGLEVVLVNARQLHNVRGRKSDVQDCQWLQELHSVGLLQASFRPAGEIVALRSYMRHRQSLVEAAATCIRRMQKALTQMNLKLHHLLSDLTGVTGMAIVRDTLAGVRDPQALAAHRDGRCKASEQDIAAALTGHYRPEHLFALRQNFAAFEFHQRQIAQCDQAIEAQLASLAESRPPASRELPAARPRVKLSKNEPRGELRAPLHRITGGADLSQIDGIGPYGALQLIAEIGTDMSRWRSEKHFSAWLTLAPNNKISGGRLLSSKTQPSANRAAVVLRRCAMSLTRSATALGAYYRRLAYRLGQPKAITATARKLAILVYRVLGGEMVYRDPGATAYDQLHRTRLINGLRRRAQEFGLSLINLETGEVLDHALVPQSVS

SEQ ID NO: 244438 - protein, 412 aa, unidentified
METIIERCCGIDVHKKSITVCLTTGKPGEEPTETVKTFSTMTRDLLACRDWLISEGCTHAAMESTGVYWKPVFNILEDSMEIILANARNVKNVPGRKTDVNDCRWIAKLLRHGLVEGSFIPPKPIRELRDLTRYRQKLTYQRSSEINRLQKFLEDANIKLSSVATDITGVSAQEMIQHLIQEDMTTQEMAQLAKGRLRNKIEQLEQALEGYLSDHHRLILRLSLQMIASYDEAIEKLNIEIDQRMEPHREISQRLETIPGVKKKTIESLIAEIGTDMSRFPSHAHLASWAGVSPGNNESAGKRKSGRATHGDKWLKATLVEAAWAASKTKGSYLKSKYKRLVSRRGRKRGALAVGHNILIIAYHIIKEQCVYKELGAEFFDRLNEQHLINRLTKRINALGYKVDIEKLPMAA

SEQ ID NO: 244439 - protein, 448 aa, unidentified
MEPQEIEDGEHEQILERAAAVDVAKASGMVCTRVPHQARVGQRRTRVWQVDAATNAILELADHLVAEGIEKVTLESTSDYWRIWFYLLEAAGLQVQLVRARDVKQAPGRPKTDKLDAVWLAKLTERGMLRPSFVPPAEIRQLRDYTRLRADLARERTRHYSRLEKLLEDALIKVSAVASKLDAKSVRDMLEALIAGERDPQVLASLARGRMRSKHGRLVQALTGRFDDHHAELARMLLDQIDALTSQIGKLTTRIEELIAAMPAAQGIDADGTTGPAAGHGDGAPVLPAVDRLDEITGIGRQAAQVIIAEIGLQMSVFPTPGHLVSWAKISPQTVQSGAKNRSGKTGKGNPYLKGVLGEAAAAAGRTDTFLGERYRRLARRRGKLKAMVAIARSILVIVWHLLADPAARYHDLGASYHASRIDKQRKTRNHVRQLEALGYTVTLTQAA

SEQ ID NO: 244440 - protein, 413 aa, unidentified
MTLTCVGIDVAKGKSTISALGWGDVVLIKPYDVPHTASALCELAGSLRQLPGEVRVVMEHTGRYWFPVAQVFYEAGLFVCAVNPKLIKDFGDNKLRSIKNDKADSKKLSRYGLKYWTDLVPYIPAEVTRQKLLEFSRQLDASNKLLTGLKNNLQAIVDMTFPGVRKLLKSPARDDGHIKWVDFVCTFYHCNYVRELGEARFMERYRNWCKRHGYSFVSRGAGKIYAIAHNQVTTLPCDADTKLLISEAARQLTSVSAATETWRAKINALASILPEYDCVMSMYGCGKTTGPQLMAEIGDPVRFTGKKNLVNFAGIAPGDNQSGTYRQKSVSASKKGSSHLRKTLFLVMSALLQKSPLDEPVYQFLDRKRAEGKPYYVYMTAGANKFLRIYFSKVRDHLAMLDAASSNSTLANP

SEQ ID NO: 244441 - protein, 457 aa, unidentified
MGDTKKTRSAEGNALPVVHRHAAGIDIGSTFHMVAVRSDVDPQPVRRFESFTGDLHRMADWLTQAGVTTVAMESTGVYWIPAFEILEARGFEVLLVNARDVKNVPGRKTDVTDAQWIQRLHEHGLLRGSFRPSQQVATLRAFVRHRERLVEAAASAVQHMQKALMQMNVQLHHVVSDTTGVTGMHILRAIVAGERDPAVLARLRDVRCQATVETIQAALTGNYRPEHVFALQQSLELYDVYQEKIRGCDAKIEEALRLLHDQGSVRPDRRPDARPSRSKRPQKNEPRFDIRSALHTLLGVDLTQIHGIGPYAALKLVSECGTDMHRWPTAKNFTSWLTLAPGSKITGGKVLSSKTRRSSNRAAHLLRLAAVSVGRTSTALGAFYRRLARRIGKAKAVTATARKLAILFYNTLRHGAAYVDPGATYYEERYRQRTLSNLRRRAHSLGYQLVAATPDGA

SEQ ID NO: 244442 - protein, 407 aa, unidentified
MEGRSIGLDVHRDFCEVAIWEKGTVRSAPKVQTRPEALESFARELGPADRVALEATGNALAVARIIKPHVAEAVIVNTRRLKAIAESKQKTDRHDAKTLAQLLAAGMLSGSWQPDETFRALRRRVARRARLAALRARFKNEILAVLHRNLKRRPPMSDPFGVAGRDWLSRQSLPEDERDTVDAALRQIDFITDEITKLERELARFALESPQARRLMTVPGVGLITAVAFLAQVGDIARFSDPRQLVGYLGLDPRVRQSGASEAITGRISKEGSALVRHVLVEAAHTAIRSPGPLRAFFERVRARRGHAVAIVAVARKMSTLFWQLLTRGEDYAYQMPIVTAKKLRKVELTAGAPARHGGGTGNGLNREQRRQLERRSAEAAENAYRRNVADWQRQQQQHAKKATARA

SEQ ID NO: 244443 - protein, 422 aa, unidentified
MLAEARDDEVIIERIAAVDVGKAELACCVRVPDERRPGRRLQEVEVYPTMTRSLLRLADRLRCLGVTRVVMEATSDYWKPVFYVLEAAGFETWLVNAKDVKHLPGRPKTDKLDCIWLCKVAERQMIRPSFVPPPPIRRLRDMTRYRIDLVTTRTAEKQRAEKLLEDACIKLSVVASDIFGVSGRAMMASLIAGERDPKVLAQLARTAMRRKISALEEAFTGHFTDHHAFLLAKMLARVDALDADLAELDAVIEQMIAPFASAAERLDEVTGIGPVAAAVIIAEIGTDMTRFPTSGHLVSWAKYAPGVKESAGKKKGAGTTGHGNPYLARVLGEAAIATSRTDTFLGERFRRIARRRGSKKAIVAVGRSILVIIWHLLSDPTARYADLGAGFYDARISHSRKTHNHVRQLEALGYKVSLEPAA

SEQ ID NO: 244444 - protein, 392 aa, unidentified
MYIVGIDIGKNHHEASIVSPEGKQIGRSLRFATTHKGADSLMSFIFKNIGNSPCVFGMEATGHYWYPIYSFLKAKGYTIYVINPIQSDSLRKMYIRQTKNDSIDSFLIAEVIRFGQFGTTSMADENILAMRQLCRYRDSVISSRTEIKLRIGTIMEQIFPEYEKQFSSLWVSTSMGILEKYLTPENIENTPIDELFEIIKDKSHNRLTRAKAISIKEAAADTFGIKIAQDAFSFQLKQLIDRMNFLDKQIEALDIEIMKYYEQFDCYLHTIPGIGIIGAATILAEIGDISRFKNSSSLIAFAGIDPTVRQSGEFNSTHNHMSKRGSPYLRHAIFLAATTCSFHNSPLNAYYKKKRDQGKHHLTATGAVARKLTTIIYAVLRDSKPYEPKKFC

SEQ ID NO: 244445 - protein, 314 aa, unidentified
MPAAVVVGIDVSKRTLEVALSNGGGFSVANNEDGISELLARLRPSGAALVVLEASGGYESPAYLALWEAGVPTALINPRDAYHFAQANRQLAKTDQLDARGLCEFGLRMQPEPFPPPEAADEELKALAVRRRQVVKMLAAERTRVQQAPGSVRSSIKRMVRALERELGALDHQIEQRLRDNPRLAQRCAQLEQVPGLGSVTCAILVSRLPELGLLGPKQVAALVGVAPYDHQSGAWRGRSPIFGGRAEVRSALYMATRSAIRCNPVLRSFYRRLRAAGKPAKVAIIAAMRKLLVILNAMLKTNSPWRPPCAVVA

SEQ ID NO: 244446 - protein, 392 aa, unidentified
MYIIGIDIGKNHHEASIVSPKGRQIGHSLRFATTHKGADSLISFIFKNIGDSPCVFGMEATGHYWYPIYSFLKFKGYTIYVINPIQSDSLRKMYIRQTKNDSIDSFLIAEVIRFGQFEATSMADETILAMRQLCRYRDSVVSSGTEIKLRISTIMEQIFPEYEKQFSSLWLGTSMGILEKYLTPENIQNAPIDELFEIIKDKSHNKLTIKKSVSIKDAAADTFGIKIAQDAFAFQLKQLIDRLNFLNEQLEALDHEILSYYEKFDCYLHTIPGIGMIAAATILAEIGDIHRFKNSSALVTFAGIDPTVRQSGEFNSIHNHMSKRGSPYLRHAIFLAATTCSFHNSPLNAYYKKKREQGKHHLTATGAVARKLTTVIYAVLRNGKPYEPKSFC

SEQ ID NO: 244447 - protein, 345 aa, unidentified
MKYYSGLDVSVKETSVCIIDETGKICREVKVVSHPDDLIAALKDPARPIERIGLEAGPLSQWLFEGLATAGLPVVCIETRHTKAFLKAQVNKTDRNDARGIAQMIRVNLYKPVHVKTLTSQKRRALLTARKLLQEKAIAIENDIRGLLRNFGLKVGVIGTIGFDDRIRELVDDSAELLEIMEPLLSARQKLRETFTVLHSKLLAIVREDRACQRLMTIPGVGPVTSLAFISTIDVPARFSKSRAVGSALGLTPVLNQSGESHRIGRVSLCGDGMMRALLYEAAQVMLSRVKKWSWLKAWAMNIAKRRGRQKAIVALARRMAIIMHRMWKDGTEFHWTKDSMLAAI

SEQ ID NO: 244448 - protein, 359 aa, unidentified
MLTKSKKLNFEGQNIYVGIDVHLKSWNVTILSDQMHLKTFNQIPSPEKLSNYLNSNYPKAVYKSAYEAGFCGYWAHRRLMDLGIENIIVNPADIPTTQKETAQKSDPVDSRKIARFLRSGELSELYIPQVETEGDRILLRSRYRILMDLGRIRRRIKSLLYFQGVSYPPALNASVHWSSRFMKWLSEDVHLESESAEESLGLFIKEANQLRSMLLEVNRCIKRLSQSPSYEKPLRLIRSVPGIGIITGMTLLAEIENITRFKNADRLACFVGLVPMCHSSGEKESKGELTFRGKLLLRSYLIESAWIAARIDPALQLAFSELCKRMPVNNAIIRIAKKLLNRIYYVLKNKKEYELCMVL

SEQ ID NO: 244449 - protein, 354 aa, unidentified
MRRLNFQGEKINIGFDVHLKSWKVTVMTGDLILKTFTQPPSPKVLVNYLHKNYPGASYYSAYEAGFCGFWIHYELIKHGINSMVVNPADIPTTHKEKVQKEDKRDSKKIARGLANGELVGIYIPSSHTIADRSLVRTRDAIVGDLRRYKQRIKSTLMFNGIALPEQFDKNSCWSNRFFNWLKEIPMSYNTAKQSMDLLINQCLILRSTVLTTTKQIHALSKTDRYRKNVELLITIPGIGILTAMSLLTELEDIKRFRNNDHLCSFIGLSPTSDSSGNKEKVGNITMRANALLRSTLIECAWMTIRKDPALLNSYLRYCKRMDKNKAIVRIAKKLVHRIQFVLKNQTQYQLMKVD

SEQ ID NO: 244450 - protein, 408 aa, unidentified
MELTPMHQRVVALDVHQAKITACALVEHDDGRLEVIQREFGAFKRDRRALAQWALEIAPQVVVMESTGVYWKSPFAALEAVGIVAWVVNARHVKAVPGRKTDVADAQWLATLARAGLLRASFIPPLLMRQLRLVARQRQKLVGMCSAEKNRLHKVLVDAGIRLNVVVADIHGASARAMVKALIAGRPMHEVLDCKGRLRASRDDLFEALSTEQFSDVHRFVAEEILQHIEQIEQRIARLDNYLLDGLKAYEPQLRLLQTIPGIDLQGAAMLLVEIGADMDHFGSAERLASWVGICPGNNESAGKRKSGRIRRGNAWVRRLLCEFAQAAARTRSALKAKFESLAIRKGHKKSIVALAHKMLRTIFAMLSTGTHYQDKTVDYEALSVARNAPRWIKMLRKHGFIATPASA

SEQ ID NO: 244451 - protein, 493 aa, unidentified
MTDFFMGCDVSKGYADFVVLNSREQVVERSFQLDDTFDGHNTICEFLNGFFKRYKDAVLYVGVESTGGYENNWFALFSRLGAHDNVKAVRLNPLAVKAHHNASMRRIVTDDISALNIATYLIAYKNRTRFEQDTGFESLRKQWKLTEMLKKQHTQLLNQLGFLMYQSNPQLVHYCKDGVPRWILLLLSSYPTAAKLARAKAATVAKIPYISDQRAQSLINDAAQSVAAYVDETAGFIIKELVKQIMALADAIQTQKNHMENNCAIKEVARLCTINGIASYSAIGLLINIVAVERFSTVKKLAAYFGIHPVYRQSGDGEFGFHMSKKGRVEPRAILYMAVLSAINSNPVIAQLYKHCVSNGMEKKAAIGVCMHKLLRIIYGMLRTHTDFDPKVDEQNHKNAHRPAATSHLQKKRRFQQIDPMAPISKRQTKTRNEKGKIPEPHKNDVLKCGVIQDLPVEKNIISRHETKSNFHMPVPVASLVAAELERYELVTH

SEQ ID NO: 244452 - protein, 340 aa, unidentified
MTITTVGIDLAKNVFAVHCIDQNGKAVLVKPKVSRAALSELIAGLPPCVIGMEACSGAHYWARLFRQYGHDVRLMAPKFVSPYRMAGKTGKNDAADAIAICEAVQRPHMRFVPVKDESQQAMQCLHRTRQGFIQERTATYNRLRGLISEFGVIAPQSTDALRHVVSDQKETLPVQVRLCIDDLLTHVTNIEEKIAEYDRVLSRVAKTDHRSQQLMELKGVGPTTASALVASIGNAHDFKNGRQLAAWLGLTPSQYSSGGKSKLGRITKAGDAYLRTLLVQGARSVMVGAENRTDPFSRWVCSLIGRRGYWRAVVAIAAKNARLCWASLHYGDDFKLYSAT

SEQ ID NO: 244453 - protein, 433 aa, unidentified
MESEFAAFVAIDWADQKHAWALEVNPSSDRECGNIDHTPESVDVWAAELALRFPGRPIAVALEQSRGPLVFMLTKYDHLVIFPIHPSTLANYRKSFRPSGAKDDPNDAGLLLDILGRHRDKLRRLDPDTPETRTLQFMVEERRKLVHEKTRYSNRLAAHLKLYFPQVIGWFDEIGSHIVAEFLERWPHLEKLQKARPATIERFFIEHNSRNAERIAERLEQIRKAVPATNDSAVVHSCSVAVIAWAGLLRQLLDAIKDYDEQIDTLARQHPDYALMKSFPGAGPALTPRLIAALGSQRDRYQTAHEVQCYSGIAPVVASSGKQRWVHWRWSCPKFLRQTFHEWALHSIGYSDWARAYYAEQRAKGKRRNTAIRALAFKWIRILFRCWKDHIPYDERAYQQALARRQKKPTAGQPVEVNWENVAGFMKITASGA

SEQ ID NO: 244454 - protein, 359 aa, unidentified
MLYLGIDQHRKQLTVCIRNEEGDVTLRRQVSTEWRRVRAFFAGIREEAGGGGFVVVLEVCGFNHWLVKLLADYDCREVIVVQPEKRSKKKTDRRDANALCEILWLNRQRLLAGKRVQGVRRVQLPGPEDADARQVTGLRKGLTQLRTRTINRIKHVLRKHNVEQECPTKGLDTIRGRKWLAKVALGPMDRLEMDLLLKQWALWDEQIEQLDAEIGKRQAKHKTAAVVATMPGAAAYSSLALGSRIGGIERFRRPGSLANFWGLTPGCRNSGQVTDRLGSITKQGSAMARFILGQLVLHVLRCDRAMRVWYQRIKKRRGSKIARVAVMRRLATIIWHMVKYNKPYVMGGPPGGKGGSSAT

SEQ ID NO: 244455 - protein, 389 aa, unidentified
MGEAIRATVAYLGIDVGKRSHSACGLDKDGEVVFRSDLENRPADIDRPLERAGAGALVVVDQKRNIGALVLARAFAHGNPCAYLPGYAEKQARGMFPGVAKTDAIDAEVIARTARGMPGALRPLAEEPEGAASLRILSSQREFAAAARARAKNRLRATLLEADPALERAVDPSRGWHVAPLAEFGSAAGCSAAGWRRFSAAAKRAGASVAGARAPWEAMLASARSGRRLPAGEDVAVRMLAREIAALDADVAELEGLVADSLAGDEACECLLTVPGIGPKTAAALVTSVDISMFRGHDELASYCGVAPADSRSGTSVRSTSPQRGGNKQLENLLIFSCNSLIGTQNRFGRYYDECRARGMRHNKALKAVARKRLKVIYAVMRDAVPYAA

SEQ ID NO: 244456 - protein, 414 aa, unidentified
MLFVGDDWAEDHHDVELMDAAGRRLAAARLPEGVAGITRLHEMIGAHLGEDAGAGEDAGAGEVAIGIETDRGPWVSALVAAGYTVYAVNPLQAARYRERHGVSGAKSDKADAHTLADMVRTDAHQLRPVAADSPQAEAIKVVARAHKTLIWERTRHTLRLRYVLREYFPAALEAFDDLAAPDTLELLAKAPDPASAAKLNRSQIRAALKHARRRDIDMKTTRIQAALRSQQLGRAPVITAAYAATTRSIAAVLATLTEQINTLRGQVETHFGRHPDAEIILSQPGTGVLLGARVLAEFGDAPGRYADAKARKNYAGTSPITRQSGKRKITHARFVHNDRLVDALMSQAQSALLASPGARAYYDKQRARGLDHHAALRQLANRLVGILHGCLKTRTLYDEATAWSHHNQDQRTAA

SEQ ID NO: 244457 - protein, 411 aa, unidentified
MRLFVGDDWAEDHHDVEVMDQAGKVLAKRRLPEGAAGMAQLHGLVGAALGEDGEDAEVVVGIETDRGPWVAALIAAGYLVFPVNPLLASRYRERHGVSGAKSDAGDAHMLAGMVRTGSHQLRPAAGDSPEAEGIKVLARTHKTLIWERTRATQLLRHQLREYFPAALEAFEDLDAPDTLELPGKAPEPARAARLTRAQVSAALKRARRRNIKDRTDVILAALRGEQLGQPEILTAAYAATVRALIAVIATLNEQVKILQGQVEENFGRHPDAEIYRSQPGMGAVLGARVLAELGDDPHRYADGKARRNYAGTSPVTRASGKKKVVAARFVHNDRLVDALNAQAFASLKASPGARALYDELRARGIEHNDALRRLANRLVGILHGCLKTRTLYDEATAWGHRQNLPQSSAAA

SEQ ID NO: 244458 - protein, 404 aa, unidentified
MRSIGLDIHRDFCEVAIAEGGEVRSPGRIEMTPEALELFAGSLARTDQVALEVSGNAWEVARIIRPHVAKLVVVSPADTGIRAARAKTDRLDARALAKLLAAGSLQSVWVPDDHTRAMRRRLQRRRKLLVVRTKAKNEIHAALMRRLVRKPAVSDLFGKQGRRWLESLELPDEEQETVEGCLRQLDFCESEIAAIEKRIATEALASPEIRRLMTVPGVNVICAATFMAAVGEIHRFGDRRKLVGYLGLDPRVRQSGLSQTSRGRISKQGSASARHALVEASWSVVKAPGPMHSYYQRIRARRGSQVAIVAASRKLACLFWCLLTREEDYAYGQPSLTRKKLRRLELAAGAPKGEGGGGVWSTNKTMRRAEQELARQAEAAYERTVADWQAQRKKGAGATPGRAS

SEQ ID NO: 244459 - protein, 426 aa, unidentified
MSNRIGVAYAVAGRAAGLFKRRHRPLGHRFRWLGGWILLVLPERTQVAWMSLVMGIDQHRAQITAEWLDTETGEVSRARVRPADRAGVRRFLARFAGQQLEVALEATTGWRFLVEELRAVGAVVHLAEPAETAALRGNKRRAKSDRADARHHRELLLAGRLPESWIPPDHILDVRARVRLRHTLIEQHTEWQQRIQAVLYHHGCRQRRRLMEGDGREWLASQALSETAREQITVAMAIIDALDVQLAPLTKELCAWARRQAGCKALIDAYYGIGELCAVTVIAELGDCRRFQNSRDAVRYSGLDVTVYQSDRHRAPGHLSRQGPPALRWALYEAAQVARRPGSPDRGYYEQAAERLGGNRACLALARKLLKRCYHTLRELGDDALTPPVERPQPGPGSAAARRASSGSPRSLEPTTTNQRADVLAA

SEQ ID NO: 244460 - protein, 411 aa, unidentified
MRLFVGDDWAEDHHDVEVMDAAGRVLAKRRLPEGVAGIAQLHELIGRHLGEDADEAEVVIGIETDRGPWVAALVAAGYTVYGVNPLQASRYRERHGVSGAKSDAGDAHMLTDMVRTDSHQLRAVAGDSAEAEGLKVLARTHKTLIWERTRAVQRLRHQLLGYFPGALEAFDDLDAPDALELLGKAPDPARAARLTRAQVSAALKRARRRNIPDRATAVLAALRSPQLGQPAAVTAAYAATVRSLIAVITVLNEQVKILQRQVEEDFGRHPDAEIYRSQPGMGAVLGARVLAEFGDDPHRYTDGKARRNYAATSPITRASGKKKVVAARFIHNDRLVDALNAQAFTALRASPGARALYDEFRGRGIEHNDALRRLANRLVGILRGCLKTRTLYDEATAWSHRQNLPQSSVAA

SEQ ID NO: 244461 - protein, 461 aa, unidentified
MAKQSGKRKKGGAKADATEGLPPLNLHAAGIDVGSAEHYVAVPLDRDVEPVRRFGSFTADLHRMAHWLKDCRITTVVMQSTGVYWMALHDVLESHGFEVNVANARHTKTLPGRKTDVQECQWLQKLHTFGLLNNSFRPPEEIRVLRGYLRQRENLVAAAATCIQHMQKALTEMNIQLANVISDISGTTGLAILYDIVRGERDPYKLAMHKHSRIRASRQEIARSLEGTWRQELLFVLEQSLDLYQTYQQKIQTCDERIDGQLRSMEPKIDPVSEPIPEPRRGKDWRGHQSGFDLRGQLYRITGVDLTRIDGIEVQNAQTIISEVGVDMSRWKTEKHFASWLGLCPDNRISGGKVLKRGTRHVVNRASTALRLAASALLRSQSALGAKFRRLRSKLGAPKAITAMAHMLARLVYRMLKFGHDYVDRGIEFYEAKYQHQQLQRIRKQAAALHMQLIPLTRVVS

SEQ ID NO: 244462 - protein, 355 aa, unidentified
MNKINSNFEGQTIHVGMDVHKASWNLGIHLNDMFIKNVHQKPNPHIMASYLKQHFPGAHYRAVYEAGKFGFWIQRQLTALGIECLVVNPADIPKSQKDTLQKTDPRDARNLGMRLQSGVLRSIHIPDEQQEADRVFFRHRKRIWKDLTRCKNRIKGMLAFSGIDIPEQYDNASWSHNFINWLKAVDCKQQSRRRALDYMITQMEFLRKELLSISNAIRKMMREQRYKTNYYLLRTIPGIGPLTAASILVEIGEVKRFKTFYHLNSFVGLLPMEHSSGQSENKLSLTVRKHRQLRSDLVESAWTARRTDPAMALYFQEQIKRKDHKIVIIKIARKLLSRIRFVLLNQQPYEYGLIK

SEQ ID NO: 244463 - protein, 310 aa, unidentified
MTLPSTWIGIDVSKAWLDIADPVQGRSERIANRPETLAAFADGLAGRGTAVVFEATGAYDRALRHALAAAGVGYARVNPQRARDFARATGQLAKTDAIDAAMLARMGQALHLSADQLPEQERERLALLGKRRDQLVAMRMQEKARRAETGDDALLAGLDDHLAWLDTAIADVEHAVRDLIGASPALAADEALIRSMPGIGPVAATTLIALMPELGRRSPKQIAMLAGLAPVNNDSGARRGQRRIRAGRRRVRQALYMAAVASLTTTSPMKAVYARLRNAGKPAKVAIIALARKMLVTLNAIVRTRKPFAP

SEQ ID NO: 244464 - protein, 428 aa, unidentified
MIKINPLSTLYVGIDVSSKSNVVCTMDFYRNKFIESSFANNQPGADELVQKILECLKEHPNLDTIVAALESTSVYSIHVANYLSSCEALLKFKTYVFVLNPKTTANYKKSFIGLGKTDPIDAFVIADYARAGCIETDPWRGSQFLALKRLTRHRLHLVECITREKAYLVSNLYLKFSELQLLDKDEQPFCDVYGATSSGVLTEYFSPEEIVNASEEELVAFLAKKSRNRIKDINKTADLLKKAARDSYRLDKALYEPLNVSIASSFNCIEAFKKEIKAIDAAIEREIKGLFPNAFIILQSIDGIGPVFAAGIIAEIGDISAFHSSDALAKYAGLYWKHNDSGDFTSEDNHMSKAGNRYLRYYLGEAANSMRTHNAEYGAYYRKKYNEVPKHQHRRALALTSRKFVRLVYGLLARNQLYSGVTLDTSIE

SEQ ID NO: 244465 - protein, 339 aa, unidentified
MGLHCAIDLHGDNGYYGIMDEDGKRVYGKRLPNKLPVILKALEPFKRDLCDGVVVESTYNWYWLVDGLSQNGYSPRLANPAAVDQYDGLKNADDETDAFFLAELSRLKILPEGYIYPKEERPVRDLLRRRLLLVRQRTAHILSFQNLIARERGEKISSNNIQKLHAEEVNQFFEDDRLVLMGRTNIDSIRFLTKQIRDIESAVLKEVKLSPEYKKLLTVPGIGKILALTIMLESGDINRFKKVGNYSSYCRCVQSSRTSNNKKKGENNKKNGNRYLSWAYVEAANFIRRYCPEAKKWHQRKAARSKQVLATKALGSKICKACYFIIKDQVDFDIQKIFG

SEQ ID NO: 244466 - protein, 392 aa, unidentified
MYIVGIDIGKNHHEASIVSPEGKQIGRSLRFATTHKGADSLMNFIFKNIGNSPCVFGMEATGHYWYPIYSFLKARGYTIYVINPIQSDSLRKMYIRQTKNDSIDSFLIAEVIRFGQFTTTSMADENILAMRQLCRYRDSVISSRTEIKLRISTIIEQIFPEYEKQFSSLWLSTSMGILEKYLTPENIENAPIDELFEIIKDKSHNRLTKAKAISIKGAAADTFGIKIAQDTFSFQLKQLIDRMNFLDKQIEALDIEIMKYYEQFDCYLHTIPGIGIIGAATILAEIGDISRFKNSSALVAFAGIDPTVRQSGEFNSTHNHMSKRGSPYLRHAIFLAATTCSFHNSPLNAYYKKKRDQGKHHLTATGAVARKLTTVIYAVLRDSKPYEPKKFC

SEQ ID NO: 244467 - protein, 310 aa, unidentified
MSPDIVHLGVDVSKDSLDVHFLSEPFSLPNSAAGVRKLLKRIAKHPSTVHVICEATGGYERTLVAALHEALIIVSVINPRLARDFARAQNRLAKTDRIDAAVLANYGAAMHPAPTLPLDASTQRLALLVSQRDSLVEERARHKTRLRQAADTWLRNKIKRLISNLNAEITKLEEIMRQTAAASTPLADKAARLDEAAGIDWRSALCLCAHMPELGTLKRGQAAALAGLAPFNRDNGQWRGQRRISGGRAPVRRTLYLASLNAVRKNPILNAFYQRLRAAGKPAKVALTAVARKLLVLLNAAIKNPQISLA

SEQ ID NO: 244468 - protein, 365 aa, unidentified
MKKSSTAAATSKKNLDQKLTIGLDLGDRSSWYCVLNEAGEIVGEQALGTTPKAMKEVFTAMPRSRIALETGMHSPWVSRLLSELGHEVIVAHARNVRLIGESRRKDDRLDARTLARLARIDPQLLSPVKHRSAQAQAHLTVIRARASLVRARTALVNTARGLTKSYGERLRGCNPRNLDLEKAQSLSPELQAALGPLLQALESLSERIAEYNRQIEAIAQRSYPQTALLKQIKGVGTLIALTYMLTLEDPHRFRKSRDAGCYAGLQPGRRNSGQSEPQMHISKEGDPYLRTLLVQGAHHILGPFGADSDLRRWGLKLAERGGKNGKKRAVIATARKLAVLLHRLWVSGEVYEPLHNTKRTIVVAA

SEQ ID NO: 244469 - protein, 481 aa, unidentified
MKPKPQEKTEKVTERRTRRGWHEMNRKQRRETMRKMRSEDLSLDVVHPDAAGTDIGNESHYVAVPPDRDSQPVRSFGCTTAELRAMANWLNQCGIQTVAMQSTGVYWIAVYDTLEEAGLEVYLVNARDTKSLPGRKSDVQESQWLMKLHTYGLLRNSFRPPQEIRTMRTYWRQRHDLVQSAGRHIQRMQKVLTQMNIQLANVLSDVSGVTGQAIIKAILAGERDPHRLAALRDPRVKASEEQIAGYLEGHWQDDLLFVLKQEQEGYEFCQRQMAACDQQLEPYLHQREDRSAGTYLPEETRKGRLHKYGHQPQFDLRAELFRMTGTDLTQIDGVNVMTAMTILSEAGWDMSRWEDEGHFVSWLRLCPDNRISGNKIIGKGRLPTNNGASIALRMVASTLRTSQTYLGAQFRRLRTKLGAPIAIKAMAAKLARLVDRMLRHGMKYVDQGTEFYEAQQRKRDIGHLKRKAAALGFQIIKAPAA

SEQ ID NO: 244470 - protein, 289 aa, unidentified
MKKISTAGVKQTKNFSDQKLTIGLDLGDRSSWYCVLDEAGEVLLEQKLGTTPKAMKEVFGKVPRSRIALETGMHSPWVSRVLSELGHEVIVAHARNVRLIGESRRKDDRFDARTLARLARIDPQLLAPVQHRSAQAQSHLMVIRARAGLVRARTSLINTARGLTKSYGERLRGCNPRNMNGEKAQGLSPELQAALEPLLAAIESLSERIYEYNQKIEKIAKESYPRVARLKQVKGVGTLIALTYMLTLEDAQRFRKSRDVGCYVGLQPGAETRGRASRSSTSGRKAIRI

SEQ ID NO: 244471 - protein, 385 aa, unidentified
MTIQAQVSVYSPVFVPREYDIFAGLDVDHHSIAVTFTDHQRLMQSLRLPYSARQLLNYVGKHFPGQRLAFVYEAGPTGFGLYDELAAAGHVCLVVAPPMVPRAPGQRVKTNRLDSRKLSTSLRGGDLKSIHVPAPKYRELRHLVQLRDTDVKQLTATKCRIKALLLYEGIPFPADAGKEKQWSQQVVNELLELSCSESVRFKLDQLVGTLHFNFNSAAAAQKQIRYFCQKDPELRQAIAWLKSLPGIGEIIATHLVARLGDPLLITNVRQIAGFLGLVSSEHSTGDKQNRGEITRAGDSRLRNKLIQSAWVAIRKDPELREFYQRVYQRHPRQVAARKAIVAVARKLTTRIYAVLKEQRPFVVREVSTAPLTTEETAGQRGRLDG

SEQ ID NO: 244472 - protein, 317 aa, unidentified
MSEVTTIKIFVGIDVSKSNLDVAINPSGEILRFANDPTSIESVVKKLRPLSPERIVVESTGGIEKPLVAALAEAQLNVAMVNPRRVRDYARAMGHLAKTDRIDCMVLAAFAANVDTRLTPLKTDEQELMSALLARRRQLVQMLIEEKNRLASSPTTLRKEIKAHIGYIEKRITRCDDDIDKLVTNSELWRAKDELLQSVPGVGRVVSHTLLAGLPELGTIDRKKIGTLMGLAPLNRDSGKHRGKRHIAAGRATVRSVLYMGTLTAIRVNPVIKAFYKRLVAANKPKKVAIIACMHKLITILNAMLKSNSPWRTIEQP

SEQ ID NO: 244473 - protein, 362 aa, unidentified
MNRNTGMNAGQIIGTMNGQQVVGLDIAKLVFQLHTVDMGTGEIINVQIKRAKVLEYFVNKPKCLIAMEACGGAHYWARELTALGHRVRLLHAKIVRPFVSGNKTDATDARAIWLAVQQPGVKFVGIKSAAQQATLTLHRQRELLMKMRTMQTNALRGLLYEFGAVFAQGRKALFKDVERALEGLADQLPQMVRDSLREQVERIRTLSEDMLAIEKRLGLQLKAAPQMQRIAQIPGVGLLTATAAIATMGEARAFRSGREFCAWLGLVPKQAGTGGKVRLGGISKRGDTYLRTLLIHGARSVLSHAKEPGPWLEQLKGRRPANVVIVAQAAKMARTIWAVTAKEQDYQRGFKSVRPSASMQTV

SEQ ID NO: 244474 - protein, 426 aa, unidentified
MPYRIAGIDVHKRMLAVVVSNVEVESEFQFERRMFGSNPEQLRSLAAWLVAQEVEEVVMESTAQYWKPVWGALERYWKPICEKREGASRRSGTLHLAQALSNRGRKKDFRDAERLVKRLVARELTLSFVPDVEQRLWRTVTRRKYQLTRDRARLQNQVEALLEEAHIKLSSLVSDLLGASARRMLKALAEGETNPAALAALADKQLRATPEQLCDALGACTELNPVYRRLLKMALEQLQFLEQQIGDLDQETASLLRQHQDAVERLAEVPGLGVDSATQIIAEVGPTAATFPSGKHLSSWVGACPGDEESAGVNYSHRSPQGNRHMRRLLNQAANAAVKVKGSIFEIVYRRSVPRLGHNQAIGAIAHRQCRLIWLILHQGVRYEEHGPAVTKQSRQARTARMIRQLRKLGYRVELPNSQSANSAGR

SEQ ID NO: 244475 - protein, 414 aa, unidentified
MESGYRLMVGIDWATEAHQVCVLDRQGRLLEQRRVEHRAEAIAAMTDRLIGLAGGDPASIAVAIEVPRGAVVEALVERGLSVFAINPKQLDRFRDRHTVAGAKDDRRDAFVLADSLRTDLAAFRRVHLDDAWTIRIRELTRIEEDLNTEINRLANQLRDLLLRFYPQLLRLCPAADQPWLWALLKLAPTPAKAQRLRRSSIQRLLHQFRIRKWTADQVRTELKTAPLCVAPGVTEATSTHIALLLPRMELLMAQLKLCSKAVQTALDEKIAEEEQRREHRDVEILLSLPGVGRVVAATMLAEASQLLAQRNYHALRTLGGVAPVTRQSGKRLAVRRRYGCNHRLSNAFYHWARTSSQCDPRAKHHYQTLRRLGHSHGRALRGITDRLLARLVAMLRDQTLYDSTRTLTPNPIAA

SEQ ID NO: 244476 - protein, 356 aa, unidentified
MSRDIKYIGMDVHQEAIVIAVLNASGKLVMETILETKASSLLQFIHGLRGELHVTWEEGTWAAWLYDLLQPQVQQVLVCNPRRNALLKEGNKSDKVDARKLAELLRTGMLRPVYHGENGLRTLRELGRSYQTISKDLTRVMNRLKALYRGWGIPCAGTQVYAARYREGWLNKIAQVGVRRRAELLYQQLDGLQALRRNLRPEFLAESRKHKAAKLLRQIPCIGPIRAARLIALMQTPHRFRSKRQLWTYSGLGIETHDSAQYRFVGGQLQRSKKPQRLRGLNQNHNHEMKEIFKGAATRASCGRGPFRDFYAALLAKGMKPEMARLTLARKIAAITLTLWKRGERFDAGQLKTQAA

SEQ ID NO: 244477 - protein, 346 aa, unidentified
MDHVGIDLHKRDSQICWLYDTGEVREVRIRTTPERFEALFGGQAPAQILIEASTESEWVARHLERLGHVAVVVDPNYAPMYPRRRRRQKNDQRDALALATASRTGTYRAVHRVSAAQRAVRQALTIRDTLVQTRTRGVSVVRSLVRGEGLRVASGQAEGFVGRVAAEPVPEPLATTLAPLLTLLTTLEAAIGAVETHVRTLTADDARVHRLQGVPGVGWITATAFVAAVDAAGRFADAGQLAAYLGLVPRDRSSGEGHRSGPITKTGPSRIRWLLVQAGWRVLRATTADAQPLRRWGLQVAERRGTRVAVIGLARRLARILYALLRDGTAFDPMQVAAGRAVRPAA

SEQ ID NO: 244478 - protein, 412 aa, unidentified
MQVVYERCAGLDVHKRTVVACATTPKADGHPQKDRQTFSTMTVEICQMRDWLKSLGVTHVAMESTGVFWKPIYNVLEGHFELLVVNAQHIKAVPGRKTDQKDAEWIADLLRHGLLRASFVPSAQEREVREFTRHRTKLSQERSRVINRVQKVLEDANIKLAAEALDLMGKSAHAMLQALLQDDVDPATLAELALGKMRVKRDLLEQALTGLLKEQHRFLIREHLEHIKTLDQAIVRASHEIAERLRPFEAQLRRLETIIGIKRRLAEVILAELGTDMGRFPSSRHLASWAGMCPGNRQSAGKRFSGKTRKGSPWLRTALVEAAHAAAHSKNTYLSAQYHRLAIRRGAKKAAVAVGHSLLVIIYHVLTQEKDFEELGGNYFDERSRQAVEKRLVRRLENLGYQVSLTQTPPTL

SEQ ID NO: 244479 - protein, 349 aa, unidentified
MKYYAGLDVSQQTTSICIVDEEGKTVAERKVASCPEAISEALEPFAVTRAGLETGPLSVWLWNGLKERGVPIVCMDARHANAALKMMPAKTDRNDAIGLAQIVRTGWCKSVHVKSTASHEARALLATRSQFVRTRCDLENQIRGVLRTFGILFGKRVGGFAKRAEEIIDGELDASPTIQAVVEALMRARANILEQIRHLEAKVRLIARQNKVVRRLMSVPGVGVITALGFAATIDDPTRFKRSSSAGAYLGLTPRIYASGETMRSGRVSKRGDDFLRRSLYEAANALLTRIPLFSALKSWGLRIARRGGYRKAKVAVARKLAVILHAMWISGEPFRWSSQEPGDLASLQ

SEQ ID NO: 244480 - protein, 414 aa, unidentified
MQILWGERGEEITSIGADVNRATEPPMPQQRKPNDLSRSLIALDMDTTLIAVVELSLSSWLVAGIIPGVERQPLKKLKTDENALLALLHRWRDEAVRAGHKIARIAVAFEAGRDGFWLARWLRAREIEAHVIHASSIAVSREHRRAKTDRLDTELLKRAFVGWLRGERDHCKTASIPGLREEDAKRPSRERESLVGEQSRLVNRMKATLIRLGIRGFNPKLRHAEQRLETLRTPEGEPIPPNTLGELKRDMQRRRFICDQIRSIEQERLERLERTPDTKPHAMVRLLARVTGIGIETADLLVHELLLRNMRDRRAVARYGGLTGSPDRSGGTNREKGMARSGNARVRRGMIQLAWRFLLFQKDSALAQWYRRRTEHAPKARKTMIVALARKLLIALWRLVREGVVPEGVTMRPA

SEQ ID NO: 244481 - protein, 350 aa, unidentified
MDIKTLGLDIGKNTFHMIGADQTGTRHLKKKFSRPKLMEFMAHFPTCLVGMESCGGAHHLAREFTKMGYTVKLIAPRYVKPFIDTRYKNDFNDAAAICEAVTRPHMNFVPIKTIKQQDLIAIHIVRDRFVQQRTALVNELRGLLLERGITINKGISNIIPALESLINGENPSITPVFRDLLRDYRNHCLDKNEEVKKYENQLKAIAKKSPEIKRSIEAPGIGLITATLLEGKIADMGTFKNGRQFAAFLGLVPKQYTTGGKIKLGSISKRGDRALRTLLIHGARSVLFALKRRKTPIDSKHAEWFLELEQNVGIHKAIVGYANKTARILWAMQKYGTKYDPNHSPSNKKK

SEQ ID NO: 244482 - protein, 504 aa, unidentified
MAPGRRLNIGEAQRGTPLGESRGINPPGRPVFTNIGREGCDGMANEERTGRPEGLKPIDEGFPVLRADVAGIDIGSQQHWVCAPTPTGKGREVAVFAATTPGVEQLAAWLKDRGVTSVALESTGVYWIAPHEILEAHGFDVVLVDTRELGRVPGRNKSDRRDCEWIQRLHSCGLLRGAFRPVEQVCMLRTLVRDKGTLIAERADWIRRMQKTLDQMNVRVHRAVSDVDGATGMAILRAIVAGERDPHQLAALRDPRCRKSEVQIAEQLTGHWRDDHLFSLQQALKMYDALSETIAAYEREILRQLERMTNVDRRDDQAPPPTSPTKAKAIKKRGEDPLRHALYRISGVDLTTIDAVGVETVNVVLSEYGPNLSQFPTEKQFVSHVGLAPHTPTSGGKVVKKKKKPGSASARVGAALRMAATSMRHSQTALGAYYRQVARRGGADVAVFATARKLAQYIYRLLRWGQPYVDEGVAAYEKRYQLARAQRLAAAAKNLGYRLIPVEA

SEQ ID NO: 244483 - protein, 376 aa, unidentified
MREKLRFLGLDVHAETIAVAIAEPDGEVRSLGTIANREDSIRKLIRKLGPAENLRACYEAGPTGFVLYWQLSQLGVACAVIAPTLVPKKPGDRVKTDRRDALKLARSHRSGDLTAVWVPDEDSEALRDLVRQREAAKQDQLRARHRLTKFLLRTGQRPPLGLKAWTERWMRWLAQVRYTQPAQEVTRLDCMNEVEHMAARVKRLEEAILEVVKLAPEPMQELIRGLQALRGVAHISAVTIASELGNITSRFESARKLMGYCGVFPSEDSSGKRIRRGGITKCGNAHLRRIVVESAWCYRHLPRVGEKLRKRHQGVPAEITEIAWKAQHRLHKRYMTLTMGGKDRRKVMTAVARELLGFIWAIGIKTEAAATQKMAA

SEQ ID NO: 244484 - protein, 320 aa, unidentified
MSIFAGLDVSDKTTHLCVVDANGVILKRDVVASDPDLLAKWLGKHCPGLVRVVLETGPLSTFLYHGLAERGIPVECICARHAKGVLAARVNKSDVHDAEGLAQLARTGWLKRVHMKASATHIDRAALRIRAQLITTRVAMGNQLRGLLKLFGLRLGAARTPGKRRERLAALYQQRPDLEPLFAPLVASMEVIEDQLRASNRLLESRATEDAVCSRLMSVPGVGPITALTFTASIEDPHRFARSEDVGAYAGLVPRRSQSGERDVRGNISKAGDPMLRRSLYEAANIMLCRVQRPFALQQWGQRIAESKATNAPGLPLLAS

SEQ ID NO: 244485 - protein, 414 aa, unidentified
MKLFVGIDVSAQELEACFMNPDGDTLETLKVENNLHGASHLRDRIVAAADKLSPSEIHIGLESTSVYSWHPAMFLHQDESLRQRNTKVFIINPKLINKFREAYVDLDKTDRIDAWIIADRLRFGRLTTTIVMQEQYIALQRLTRMRYHLIHNLTREKQYFLQNLFYKCNAFRSEVDSSVFGHAIMEMLSEKYSLDEIANMDVADLADYLKEKGKNRFPDPEHVARCIQKAARASYRLSKVVEDSIDIVLGTSIQSIRSIQTQLKELDKAIERILEGISGALCLRSIPGIDRVYAAGILAEIGDIDRFSDQAAVAKYAGLTWRRHQSGSFEAEDTKRIRSGNRFLRYYLVEAANSVKNRDPEFGEYYRKKFNEVPKHQHKRALVLTARKLVRLVDVLLRNDQLYTPRRKVNSAKE

SEQ ID NO: 244486 - protein, 385 aa, unidentified
MTIQIQVPRFIPRDYDVFAGLDVDKKSMAVTFADHAGSQRALRMAHQVTPLVNYVRKHFAGQRVAFAYEAGPTGFGLHDELVRRAYTCVVVAPSKVPRAPGERVKTNRLDSRKLAESLRGGQLHSIHVPSAVYRNLRHLVQMRDTHVRQLTSSKLRIKSLLLFEGIAFPEEHEKWTARAMRELQTLPCSETVRFKLDDLLDTLHFHFQAAARATKQIRQYCLDDPELQQSIDLLLSLPGIGWIVGSHLVARLGNPREIKNGRQIAGFLGIVSSEHSTGDKQNRGEITRSGDSRLRNKLIQSAWTAIKRDPELRAFYRRIYQRHPKKVAARKAIVAVARKLTNRIYVVLKEQRPYVIRPDSSIAPLTVEETVGPRERLDAAQNDQS

SEQ ID NO: 244487 - protein, 358 aa, unidentified
MEFPHFVKAQRKGKSMSIITVGIDLAKNVFAVHGINETGKAELIKPRVARGQLLELIAKLPPCLIGMEACSGAHHWARLFQAYGHTVRLIAPKFVSPYRLSGKRGKNDAADAAAICEAVTRPNMRFVPIKDIEQQAMLCLHRTRQGFVAERTASYNRLRGLIAEFGVVLPQKVERLRREIATHLDSVPGWTKRCAEDLLTHARELDARIDEYDQAIKEAAREDARSRALMALRGIGPTTASALLASLGAGHDFHSGRQVSAWLGLVPGQYSSGGKTRLGRITKAGDGYLRSLLVLGARSILAGLGDKQDRFSRWARELVLRRGYWKAVVAIAAKNARLAWAVLKYGDDFRLAGSEARA

SEQ ID NO: 244488 - protein, 428 aa, unidentified
MSKAAKPRRSAGRKSSTRVRLDDLTDVHDRCAGIDVHKQSVTVCISTGDGQGELREYQTTTGALRELKEWFQQMGVTHVVMESTGIYWQPVWQILEDDSYQLLLANARQVRNMPGRKTDGEDAIWLATLLRKGLIRGSFIPPAEVRALRDLCRTRANLVGDRASVSQRIEKILEQANIKLDTVVTDIMGVSSRRMIEELLDGETDRARIAELALGAMRAKIPQLQEALDGYFLPHQRTMLRVQLSQFDALSGAIAAIEEAIETYARPFAPQMEQLDQIPGIDRIAAATIIGEIGVDMNCFPTPEQFCRWATMAPGNNESAGKKKSGSIGKGNTWLRRIMTQTAWAATRTKNSYFAAQFKRLLRRGPQRALVAVAHSLLGVIWHMLTRHTAYRELGGDYFQRRNQQHLVRSHVRKLENLGFRVQLQPVG

SEQ ID NO: 244489 - protein, 341 aa, unidentified
MYYMGVDNHKQRSHLTIMEEDGAIVKAGSVLNYRSEIQDFLRGLETEMKAVVEAGYSSYVLVDILEDLGVEVKVAHPLEVKAIAKAKIKTDKRDSRILADLLRANLIPEAHKRSPETRRAQRVLRQRVFFVAGQTRVKNRVRALLAQQPEDIQKAIGLEKELFSQKGIARLKAVEMASVDKALVEGLLKLHEELRALIKTSDKLVEELFQKMPEAQRIYTVPGFGKFFSVLVATEIDDIRRFESAAKLHSYAGVIPSTHSSGMRSYQGKMTREGNRWLRWAAVEAVWPAIRHDRGLQLFYQKYASRKKPNAAKVATARRLLTIIYTILKEGRNYVPFHKNE

SEQ ID NO: 244490 - protein, 400 aa, unidentified
MRTVFGIDVSKASSEVAILVNGEKIHGYTMLNDAIGFNRLLNDLKTVHNPEIIFEATGVYSRRLQAFLEEYSYAYTRLNPLEAKKQLDSLRVRKTDKIDAEKLAKSQLVHNRKPTYVQEEVYQHLRDLSRFYQNMTEDLVRTKNRLHKVLQVTFPELETLLSTPTGEQYWNLVMAFPCKEFVLSLSQSNLCEIIRQSTSKRISEKRIAYLTDKLIKLAKQSFCAVKKISPMLEEVRYYAQELLRLSERRQVVLNDMVALAQPLPEYDILRSIPGIAETTATSIIGELGDIRRFQSTNQINAFIGIDLRHYESGNFLAKEHITKRGNPYARKILFKCIHNIASASHTNPCHIADFYEKRKRQSTIASTKPHTIASIHRLIRTMYYLITHNKLYDYSLTQNR

SEQ ID NO: 244491 - protein, 405 aa, unidentified
MEKTTRRLRKAQATIGLDLGDKRHTFCVLDTRGEVVNKGSMRNERNELAKLASAYPGALVVMEAGMHSPWTSRFLDSLGMEVVVANPRKTRTISQSERKSDERDALVLARLGRADRNLLSPIVHGSEETQHDLLQIKLRDSLVRARVALINSVRFTLKSLGYRVSNPSSERFHKLVVEELPESVRALIVHSVASIAELTARIKALEISIARLASEKYPQTIYLQQINGVGPITSLYLVLKIENPQRFTRTRNIGAFVGLGPKRDPSGETDKELRISKCGDRYLRRLLVSAAQHILGPFGTESALRDYGLRLAQDGTAKAKKRAVVAVARKLAVLLLTLWKSRQTLRTFSYDGLKKSDGGSAPPKPRTARRGRRSGGTLEPQLRTDDSERLRFGCSGSTRETSISR

SEQ ID NO: 244492 - protein, 407 aa, unidentified
MKVYIGIDWSQNKHDLCFLNQAGARLAQLIIPHTLAGFWKIDETRKKLGVGIDACQIGLETAHNILLDFLWDQGYSQVFVLHPKMVKGSRGRFRSSAARDDASDALLIADILRTDQGHLRAWQPDTSLTRQIRSRIKFTQFLTTEIVRLTNRQRAVLLRYYPVVLDLFSSLNTLITQHFIREYPAPQAAARLSRDEFENFLKRHRYPKKGLSPRILAQLQQPYPKAAADVIEACYPEAQSLARMLLEMISAKKKMLKELGQLFTQHPDHEVYASLPGTGTFLQPALLSKFGDDRARFPTAGCIQALAGTSPVTISSGKRRRVQFRHSCDHEFRHIAQQWAKSSLRASIWANAYYTSIRPHCESESHAFRCLANRWLAILWRLWQDGQPYDETYHLRQRTLRSQPRII

SEQ ID NO: 244493 - protein, 321 aa, unidentified
MQAHDVFIGVDVAKASLSICRHGEPGCHELSNDEASLRSWLCTLPSPATIAVESTGRYHLAVVRLAHALGHRTFVLNARDVYFYAKALGARGKTDRTDAQIIARYVAEHHATLKPWAAGTPEQERLQELLRCRAGVTSKRMSLRQVLRDVQELAPAVLGLEQQFDELLDLIDRQVATLVAADERLSQGCAALRTITGFGPQGSAMLSALLSRVDFANADALVAYSGLDPRPNDSGVKTGRRRISKRGSPELRRQLYLTAFAASHSKAVGPLYRSIKAKGFKPTQALVILARKLLRVAWAVWKTGKPFDPSLLALPPACAKT

SEQ ID NO: 244494 - protein, 374 aa, unidentified
MGWTPPHLPASMCQTEIEFSVNDKEESTMKINRVGVDLAKNVFQLHGADRQGKTLWKRQLSRDKWLTVLFATVEPGTVIGMEACTGAHHWSRLLLDKGYEVKIIPPQFVKPFVKSNKNDANDAQAICEAMARPNMYPVKVKTIEQQDMQAIHRIRNEIKSHRIAKANQIRGLVAEYGMVAPKELTSLRSAIPKWLEDASNGLTMFFRQLLQGLYEDLSSVDKRMAELDKQIAVIAQQDPIAKRLQQLRGVGPLIATALVATMGDGKQYRKGRDMAAAIGLTPRQHSSGGKDRLLGISKRGDAYLRCLLVHGARSAMRTAKDKDDRLSRWITNLQDRRHANVAACAMANKMARMAWAMMTKGVDYDPDFSSVSAS

SEQ ID NO: 244495 - protein, 353 aa, unidentified
MSKVARKLGEGKREMWVTSKDAAFVGLDVHKVSVHAALMVNGEIMKTWAMPAKKEVIAASLAPYKAALKGVAYEAGPTGFSLARHLIGLGYKVKVVAPSKMRRPSGPQSKSDRLDCRMLARDLARGDMVAVAIPTPTQEADRQVMRLRGQCLAKVKRAKQQIKSFLLQHGIEEPHGLAHWTNESVRGLGALKLNAQLRFCLDRLLEELAYLRGELKSIEDHLAGLARTPRLRKSVAALDAHAGVGPVTAMAFALEVFNPERFRDGKGIGGYTGLAPKVSQTGATRREGPLMKTGRGELRALLVEASWRWVAQDAHARQLFGHLARNTGSKQKAIVGVARHLSIQLWKRLLQAA

SEQ ID NO: 244496 - protein, 381 aa, unidentified
MKTPNVCTPTTGNTGTIFVALELSRRTWLVTIHSPDRDRISHYKVDGGDHVGLLKLIARVRARSAKKLGYEPAVVSCYEAGYDGFWLHRLLTAAGIKNHVFDAASIMVEQRARRAKTDRIDGDKLERTLRQYCGGDRHAVRIVRVPSPEQEDLRRDTREEERLKEEQTSHSNRIKGLLRLHGMPVGDPRRSDYLDWLGKQRDWAGKPVPPRLLAEIAREHARLRVVVEQLAAMEEQPSPARLNPAAAEMGRRRDLLFRLKSLGPAFSSRLVNEAFYKDFRNRREVGAYFGLDGSPWRSGDTNREQGISKAGRARHAAIELAWLWLQHQPESALSKWFRQRAANASKRIRRITIVALARKLMVALWRFLTTGLVPEGAVFKA

SEQ ID NO: 244497 - protein, 473 aa, unidentified
MSTCSLGTHLSLSITVEIVSPGPSRATIEARPERAADRAPAHGRMSLPPRGPVGCCRRGTRRPRRLIGKCRAGAAAGNVSAEGEAIRSNDYRKDTTVKAPSTRPAAVLGLDVGKSSHWACLIDRDGEVLSSAPVRNREAELDALFASVPAGTLVVVDQFRNIGSLAVRRARAAGLGVAHLPGLAASRAAGLFAGEAKTDERDAAVIARTALGVPDSLSGVPGRGEALEAARALSSQRDHVVACATRDKNRLRAVLLESCPALEAAVDLSDRRWLELLAGFGGAWGIARSGAEGPQAEAAGEAAAASTAPPPALIEAENRQVRFLAARISEALDEAGALEAETAALLEGDETYACLLTVPGIGPRTAAQLAVSVDIGRFPDHDHLASYCGIAPRVRSSGTSVRSVRASRRGDARLKSLLIFSCNSLVRSSGRYGEYYRACRARGMGHGRALKAVARKRLRAIYAVMRDRVPYRE

SEQ ID NO: 244498 - protein, 342 aa, unidentified
MVYVGLDVSGKSFVGYAVNERKRCVYKGEQPASRVGLRALVRQIGGGPKLVVFEAGNQMKWIAEALKKMDGVQVHVVHPNEVKWITESRGKTDRVDAKKLAELARADLLPRAVHIVAGPVRELRELVSARQQLQRKRVALITTIRGYVYQEGHRLPAKFFAGVAWREKLARVSVSAPLRLIVQTFMTSIEALVVAEQQLTQRLRTIADPRCDLVETVPALGPLASRVVLSAVDEVQRFDDQKAVANYGALAPTIYQSGAVRHLGRINRDGRQEVRRVLLQCAHTVVRMKSAGAKPLQQFYARIATRRGKKIAVVALARKLLTTAYGVLKSGTPYDPRKLQPA

SEQ ID NO: 244499 - protein, 428 aa, unidentified
MERQEHALAEEQVQDSEQLIERVAALDIGKATLVCCTRVPGEQGRRVQTVTGHATMTRSLGLLADRLLELGVTRVVMEATSDYWKPPFYVLEAHGLQVWLVNAKDVKHLPGRPKTDLLDAVWLCKVAERQMIRPSFVPPPPIRRLRDLTRYRVSLVAERTREKNRVEKLLEDAQIKLSAVVSDLFGVSGRAMLAALIAGERNPRVLADLARGSMRGKISVLTEALIGQVTDHHVFLLQRMLRRVDVLSADIVEIEDRIEAEIAPFADAVARLDKIPGVGITAAQIIIAEIGLDMSRFPTPGHLASWAKFAPGVKESAGRNTGNGSTGHGDPYLARVLGEAAVGASRTDTFLGERYRRIARRRGKKKAIVAVGRSILVIVWHLLNDPEAHFEDLGADFYDKRRGTEAIKRNHVRQLEALGYNVTLQPAA

SEQ ID NO: 244500 - protein, 409 aa, unidentified
MEILYPRCAGLDVHKESVAVCVLTPGPQAEPDQQIQQFGTTTGELRRLRDWLGAHGVTHAAMESTGVYWKPVFNILESACQLILVNARHVKQVPGRKTDKADCAWIASLLRHGLLEASFVPEPEVRELRDLCRMRTTLVRECVQVGNRLRKVLEDANIKLDSVASNTLGMSGRCMIRALIEGRDDAGELAALARGRLRAKLPELEQALEGRVTGHHRFLLRELMRQLDFLEQQVARFEEQIAGGMPPFEWAAELLTTMPGVDRTAACALLAEIGADMSRFASSRHLASWAGLCPGNNESAGKRRSGQSHRGNRWIKGVMTEIAWASTRTKNSYSAAQYRKLAGHRGRKRALVAVANSLLQAVWYMLMQRQTYKSLGADYYDRLHRKDLERSLIRRLEKLGHKVILQPAA

SEQ ID NO: 244501 - protein, 346 aa, unidentified
MPETEVDTFAGIDVSARELSVALRRGKGEDKPAMAKFSNHPSGHKALITHLLRGGRRVRVCLEASGNYSLDLALTLQAHRQVEISVINPRRARRFAESLGQRSQTDPVDARVLCEYAARMPWVVWQPPSSVALHLRAVARAIADLGVIHTQQNNRAHASAASQALPVLVVKEMQRHQKYLEQRMTRLRREALRLIAGDSELDRRFRLMLTTTGIAETSALQILGELAVLPDMLDARQWVAFSGLDPRLFKSGKSVEKRPRISRGGSRHLRRALYMPALVALRRDPYLRRFYQNLLARGKARLQAVVAVMRKLLHALFAMFRTNQSYDGSKLCCAVDMAGNAIAACA

SEQ ID NO: 244502 - protein, 344 aa, unidentified
MTITTIGLDMAKSIFQVHGVDAKGAVAVRKTLRRSQVQSFFSKLPPCLVGIEACGTSHYWAREIARFGHKVRLMPANYVKPYVKRGKSDANDAEAICEAVTRPTTRFVAIKSAEQQAALSMHRTRDFLVKQRTQVVNMIRGLLAEFGVDIPRGIERALLIAKRILDGEALEIPQEAAKVVLMLSQQAFDTHSRIQGIDRDLQRWHRGNELSRRLATIPGVGPIGASALAASVTDPSQFRSGREVAAWLGLTPRQNSSGGKERLGRITKMGDRYLRKLLFVGMMSLVKSARNKPESVDPRLIDLLARKPVRLAAIALANKTARIIWAIMTRGETYRARHVPALAA

SEQ ID NO: 244503 - protein, 422 aa, unidentified
MNENRTKKQEQGRCWVGIDWGGQGHSVCVVNDKRGIVSRFKTGASLTELERLVERLRGFGEIGGIAIESTRDPVVIYLSRAGYTVYLINPKISKQWRACNCVADVKSDERDGLVLAVELARRHETLHPFKEGNPLAAELRGLCEKERELIEQRTALLQRLKALLGQYYRGVLDFFSDWSSPVAWRFIKRFPRPDALARAKKETLIAFLKANRIGLKPIWLERIEARGEMTRWPKPGNSISLELTVMAITAELQALQPTIDKFDKLIAECAEKLPHTHLMQSLPGAGKRLAPALAAITADVACGQRDIQGLRCMTGVAPVEEQSGKRRRVHIRSRCNKHQRNIMHMFANCSLLYCAWAKAFYDMHKEQGDRHATALRKLADKWLKIIMRMLQTGEPYDDDHYVQALRKSRSPIYSRLCGNTCG

SEQ ID NO: 244504 - protein, 345 aa, unidentified
MEPSHYAGLDVSQELTSICVIDEHGAIVWRGKCATDPDAITRTIRQHAPHLVRAGLETGLLSNFLTRALRARGVPTVCIDARHAKAALRVQINKTDANDAHGLAQVVRTGWFREVTIKSMDAQSLRLLLVARAQLVSQRQATANTLRGLLKAFGHVVRKGAGGLFARRVREVCDDNPALCAIAEPMLAVWQSLREQICTLDGQLLKRAKADPAARRLMSIPAVGVIVALAYVAVIDNPGRFRHSSTIGAYVGLTPRRYQSGDIDCAGHISKCGDGLLRSYLFQAANAILTRKVTDSTLRSWGRAMVVRIGLRRTTVAVARKLAVIMHAVWKNDRDFVCAGIPARV

SEQ ID NO: 244505 - protein, 341 aa, unidentified
MKKFIRTAVDLGKNYFQFHGLAGEDGVFVSRKLKRSKVLEFFAQIEPCRVGMEACGSAHHWARELMAMGHEVVLIPPAYIKPYVKRGKNDAVDAAAICEAMARPDMRFVPVKSADDQALLMLHKSRELLIKQRTMSVNALRGHLAEFGLVVAKGINRVDELLALAQADARLPQIAKEVVTELARHLEGLDQSIDAVDDEIAKAHKQNRKSCLIDEVPGIGTLIASVVAASVPDPGVFKSGRDFAAWLGLTPRQNSSGGKEKLGAITKQGNRYIRKMLVVGARSVLRVVGKRKGALADWINALRARKPERLVAVALANKLARICWAIMTTGESFRTDTYVKA

SEQ ID NO: 244506 - protein, 327 aa, unidentified
MFLPILGIDIAKLKFNVCLLATSGKLNHKVFPNTVAGFQQLTAWLVKQGVPRVHACMEATGTYGEALALHLHQAGHTVSVVNPAAIKAFAASRLSRTKTDKVDAELIARFCVAQQPLAWTPPAPEVRHLQALVRRLEALVEMHTAESNRLEAIITIDVVKTSVEEHVAYLDQQIEQTQALIRMHINHHPRLKQQSELLDSIPGIGETTAATLLAEIPDITQYESARQVAAFAGLVPRERRSGSSVRGRTRLSKIGNARLRKALYFPAITALRCSPFFKAWAEGLRGRGKCKMSVIGAAMRKLVHLAYGVLKTGKPFDPEWVQSAKSA

SEQ ID NO: 244507 - protein, 370 aa, unidentified
MEQVIRAYVGLDVHKDSIAIALAEAGRSAGRMVGQIAHDVPKLLKALARLGEPSELHVVYEAGPTGYGLQRALFAKGYRCEVIAPSLIPRRAGDRVKTDRRDCLRLAELARAGELRAVWIPDSGDEAIRDLARAREDAVNSRTQARHQLKAFLLRHGVRYSGKTAWTKSFYCWLGELNFGDPSSQTAFTEYHLAVQAADQRLERLTKALAASVTGWRFEPVVQSLQALRGIDVVSAIGLVAEIGDIARFDHPRKLMAYLGLVPSEHSSGDRVRKGSITKTGNAHARRLLTEAAWNYRFTARIGRAAQARQEKLTEAVKSIAWKAQLRLTARYARLNGRGVHHNKVCVAVARELAGFVWAIARASVAPTPH

SEQ ID NO: 244508 - protein, 454 aa, unidentified
MSNIFLGADVSKGYADIAVIDITGKEVCRPKKYYDTPDGHAALQKQIEALLATPGVTGILAATESTGGYENNWMSLFSRLHGAGFPLQSARLNPRQTCNYGKMGLVRTITDKVSAEIIADFLRCCSDKVRFNEEDVFKSLRRLWSSRELIMKAYKAQVQNLRQLLYDSNPGMLQYMQKHISAWMLAVLRKYPTAAKLSRANVKTLASIRYVTLERAEELISQAKRSIARDDELITELLIVQTIATMRDLDKHMQTLEQAILAEAAKHPEAALIDSISGIGPLSAAGLLIYIGNVSRFPDVKHLASYFGLHPVYKESGDGKTVSRMSKAGQGRPRSVLYMAVLSGIKNNPILRKTFHDAKSHGKNSMSALGICMHKLLRIVYGVLKSGKVFDVSIHDSHVARGVAQTKTVAQQASEQAAFDVAAPVSAREAKKRKKKSGPHGGITPSNTGSPPSP

SEQ ID NO: 244509 - protein, 257 aa, unidentified
MAQNDQIVVGIDVAKGKVDACIRSLSLRQTFPSTAQGHRKLVAWLRKHKVNKAAMEASGGYERDWAKVLRQAGIEVRIVDPKRVRSFALSAGRLAKNDAIDAEMIAWFAETFDEAPSQTHDAAHEELAALVKARKGLIDLKTRLQSQDEHVAPGPVQKAHARVLKSLAAEIAKLEAAISAKVKATPEFAERAEIIESVPGFAETTSATLIAGMPELGKVSKEIAAALLGAAPYDDDSGKRRGERHIKGGRRWVRNAI

SEQ ID NO: 244510 - protein, 373 aa, unidentified
MPKYSTAFGMDVHLRSTTVCALDADTGEAVTRRFPGNPWGEIAGWMDGFPGPSLAAYESGYLGFAPQRELAGLGVECVVAAVSKIPRSAADSASKNDRNDAARMAKAILAHDISPAWVPSPEVEGIRDLAGAYDGATARLATAKQRLLAFLAKRGFVYGGTTPAGNPRKYWTYDFLRWLDKVRPEDDGGVRTLAALRNEVEAAAEARADLLSEYRAAVDASPIAAEVAALQSIKGCAFALAAAFSAEVGDFTRFRSGRQVTAYFGLAPSQRSSGDSVRLGGISGAGNALVRKLAVEGSWCYAAARHQPKLMPRDTGVPLEIRMHGRKGSERLLRRREEMLERGMPQAKANAATAAELVRWLWALGMMCREGAE

SEQ ID NO: 244511 - protein, 351 aa, unidentified
MSITIGVDYHKKTSSYCVIDDAGNKIKRCKLPNQKDAVKNFLLSFDEPICLAMEATRSWSLYYDFIESYVNKFQLGHPKKMKALSESETKNDKHDSQVIAELSHMGYLPQAHVSSPLIRDIRDVVRYRGALVQQRRSIKNMVHSLVDRTVWLEDRPKSFKDIFCQRGIKWLESLNLAPKQKFILTDLLQSLENLNKTIKNIEGYITTFHDEFALMKHLKTVPGFRTGGINTIVVLSEISDINRFRKAKGFVRYAGFIPREHSSAGKISRGRLIKEANMHLRTAIIESTLAAIRIDKGLQAYYKSVKQRSGSSAAVIATARKLATAIYFVLKEQRPYLPHKFDVPPVAACHS

SEQ ID NO: 244512 - protein, 322 aa, unidentified
MEMLSFGGIDVSKDRLDITVLPDEQCSSVSNDAVGWLELIEQLRGSSITAIGVEASGGYERGVVRALLAAGMPVRQVNPFKLRQFAKASGILAKNDRLDARMIASFVAIMPTRPAQRQTPMIEQLAAMLTVRRQLSDHKVATENASRLLEDAMLQRLSRRRVARLTADIDLLDQRLVEIVTADPALAHRFRLLTSMPGVGAVLACTLIALLPELGHMSRKQVAALVGLAPYDFDSGKLKGRRCIWGGRARVRHVLYMAALSASNWNPALKAFHDRLEATGKKPKVVIVAVMRKMITTLNAMLRDGTAWVDRYSGRRSASTAR

SEQ ID NO: 244513 - protein, 430 aa, unidentified
MKSNTQNAKIEAITEKTLVLGIDVGSEMHYARAFDYRGIEYSKKPFKFSNTEAGFVTFKEWILDLKERHEKDKVIPGMEPTGHYWFNLGKFLQDNEMKPVLVNPHHVKKSKELDDNNPTKNDRKDPKVIAGLVREGRYMIPYLPDGVYADLRTASNIRFQLQAELTRIQNRISRWFNIYFPEYKTVYGKPDAKSGMLILKAAPLPEDILTLGIDGVNQIWRDAKLRAVGKARAKTMIEAAEHSVGSKEGAVSARMEIRMLLEDYESRNTRLQEVMVLIEELVRKIPMAEKLLEIKGVGIRTVSGFLAEVGDISRFNNPKELQKLAGLALVENSSGKHKGETTISRRGRKRLRYLLFEVAMSLVSKNQEFRELHNYYTTRRLNPLKKMQSLMAIAAKLIRVFYAMLTKGVDYDPKKMVSDIKRPAVYLQAA

SEQ ID NO: 244514 - protein, 369 aa, unidentified
MDKYIGFDIDSNKTSVCIVQKNKADRYATIGPDAGSMRKFLANEKKDGSRVHLTFEISGQAGFLYDSLTDCADTIKVSNPDKMTWIYRTAKKNDRIDARKMAVLLSIGEIPAVHMPSKEVRQWRMIICHRKKLLAGSVTAKNRIRALLKSQGIRRPLHKGGWWKVINRLWMRRVCEGGIDVNNLWKLQLGNLLDELELAEKNIALVTEYLDVYLAKQAGGRLLMSIPGVGPRTAEAVLAFTDDVERFAGGKEYCGYFGVTPKLDESGNSRRLGHISKKGPSVVRWVLCESAWKAIRYSRSMKSFYERVMAGQQSRKKIAIVAVARKLLSIMRAMLLTGATFDEECVSSLDYGRIARHTFGGIEKLRKTA

SEQ ID NO: 244515 - protein, 380 aa, unidentified
MEKDIRFVGLDVHGETIATAVVDPGGPVESLGTIAHRPESVRKLLRRLGRPDQLRVCYEAGPTGYGLYWILTGMGIHCDVVAPTLIPTKSGDRVKTDRRDAEKLAKYYQNGDLTPVWVPDAEHEALRDLVRAREAAKSDQTRARHRLSKFLLRRDRRAPKGVRRWTQKYLDWVRREVKFDLFAQQATLEDYLAEVLHAGNRIQRLEQRIDDAIEEAPESTRVVIAGLQALRGIATISAVTIVSELGRLSRFARPRQLMGYSGTVSSEHSTGQRVRRGAITKTGNAHFRRILGEAAWAYRYRPHVGPALRKRQKGLPAEVVEIAWKAQERLHRKYLRLVGRGKVKQQVVTAVARELTGFVWAIGVHLEQSMGIEVMPSGTR

SEQ ID NO: 244516 - protein, 398 aa, unidentified
MTESSDYESVQVFIGVDVGKDTHHAVAINRSGKRLFDKALPNDENKLRSLISDLKQHGQILLVVDQPATIGALPVAVARSEGVLVGYLPGLAMRRIADLHAGEAKTDARDAAIIAEAARTLPHALRTLKLADEQIAELSMLCGFDDDLAAQTTQASNRILGLLTQIHPAPERVLGPRLEHPAVLDLLQRYPSPEKLASLGEKKLAAQLCKLAPRLGKRLAADIAQALAEQTVVVPGTNAAAVVLPRLALQLITLRKQRDEVALEVEQRVLAHPLYPVLTSMPGVGVRTAARLLTEVACRAFASAAHLAAYAGLAPVTRRSGSSIRGEHPSRRGNKALKRALFLSAFTALRDPLSRAYYTRKMSQGKRHNQVLIALARRRCDVLFAMMRDGTFYTPQGS

SEQ ID NO: 244517 - protein, 354 aa, unidentified
MIVLGADTHKRSHTIAAVSATSGELLGEQSVLSGVKGAAELLRWARELGEDRVWAIEDCRHVSASLERFLIERGERVLRVHSTLTAGSRRQARGRGKSDSIDALAIARAALREGLETLPAAHLDGPELDLRLLVDHRERLVRARVAVNNTLQWHLHDLWPDLQFPGSALFHGKWGPRIARRLARAEQTTRVRIARDELRRLRELTQSIKALEAEITGLVAQIAPHLLAEPGFGPLTAAKLVGEIAGADRFSSDAKLARAAGIAPIPVSSGNTRRHRLDRGGNRQINATIHRIAVTRLRCHPETKDYVARKRAEGKSTKDAIRCLKRHLTRRIWHLLQTPAPIPDQTLTPTTSLT

SEQ ID NO: 244518 - protein, 374 aa, unidentified
MFERTSVGLDVHARTVVACALNAQTGEIIPHRMTPDHGEILAWIVSLPAPVRVAYEAGPTGFGLARFLLAAGIDTVVAAPSKLQRPSGDRVKTDAKDALHLARLLKLGEVTGVRIPSADQEAARDLVRSREDVRGDLMRSRHRISKLLLRQGIVYSGGQAWTGTHELWLARQRFDNPAQQLTYESSLEAMHEISDRRDRLDEAITAMAYSSEYTPVVRALQCLRGISTLTAFGLAVEIGDWDRFTGSTIGAFLGLVPTEHSSGASRSLGSITKTGNSHARRLLVEAAWHHRRPYNNPSRLMRSRWEEATSEARTRGHAGNRRLHERWISYLDRRKRPVIANVAIARELSGWCWSLATGTHPTPASSPRSIASVH

SEQ ID NO: 244519 - protein, 335 aa, unidentified
MTYIGLDVHKNHSTAAYRDPVTNEICVKKMKTDRDAFVRFVCMLPKPWIVAVEATREAPWICRALLDCGAEVHLANPRQLAPFGKHRRAKTDAKDAELLLDAIEKGYLPEAYLAPLEVQELRAIARTQTTLRGIATMLSNATSSLLCQNGITLPGKKTYSTKNRDSMPQTIEQLSEPYAYSVELLWQLREATEHQTQLLTKQIEKAAKEDEVLKALCQLPGIGALTAFGLVAELGDITRFKTVKNLHSYAGVVPKVSDTGDSHYAGKLPKECNKRLRRLAISAAQSAIRTKKPNEFKETYARLRARHKPANTAKIAAARKVLTRVFHTWKDLVDG

SEQ ID NO: 244520 - protein, 410 aa, unidentified
MEVLYPHCAGLDVHKDTVVGCVRHMVGDRVTTDVKTFKTTTLELMTLSDWLSSQGVTHIAMEATGVYWKPVWHILADGEFELVLANAAHVKNVPGRKTDVNDAMWLADLMAHGLIKASFVPDEPTQQMRDLLRTRKQFVRERSSHLQRIQKTLEDANIKLDSVISDVAGLSGRRMLEALIEGQADAAALAALAHGRIRATAAEPEAALRGRVTAHHRFMLRLHLDHLDAVDAAIARIDKEVDGNVEPFRTAVEMLTGIPGISSLSAEVIVSEIGIDMSRFKTEGNLISWAGLCPRNDESAGKRRSTRMKKGAPWLKTTLIQCAWAATRVKGSYLQAQYLRLRSRRGAKKAIGAVAASMLTAAYHMLNNGTLYEDLGAGHFDQRAKGKQVARLVNRLKDLGYHVQIAPLAA

SEQ ID NO: 244521 - protein, 409 aa, unidentified
MLFCGIDWSEEELEYHLRDGEQSELAKGTVRTTVAGLADLYTALEQHGRPDEIGVAIETCHGAWIQAILDRGYRIYPVNPKAADSFRKALDANGVKTDAIDSKVLAMFLATFHQDQKPLGPDDPEIVKLRILCQDRLRLSEERVAKVNELTAIIKGYYPAFLGVFGCLDSDIALDFLIQHPTQRQFRRLSKRQFAGWLGRHHYTCSRRLDEMLKKLHAPAFDVAEHLQDSKKHLIRYLSRSVKLLNAEMDERDREINDLLDSLPESDWVRSLPGAGGVLAPSLLACFGRDPERFASPGEARAFMGTAPVTRASGKSRSVAFRWGCWKFARRTLQLFADQSRHCCVWAAVLYQKQLDSGHGHHAALRAVAHRWVKILLAMQCTGSRYDEAVYMAAQRRHSLKCPVLKAPY

SEQ ID NO: 244522 - protein, 313 aa, unidentified
MTVPQITLGIDISSTRLDAYAYPAGRAHGVANTAAGIARLVGWARELGAFVVLEATAPFDQGLIRALERAGLAFHRANPKRARDFARSAGFLAKTDAVDARMLALYGTTPALRPTAPVAPERLELQALSTRRDQLVEMRKSERIRLKGVSGPISIQSLQTVIALLDAQIAALDTHIATALARAPDLARDAAILRSGAGVGPVCASVLLAFMPELGTLNRRAVALLAGLAPIARDSGAMRGKRYVGGGRKRVRDALYMASLAAIRIGRWKQAYDHLRALGKAPKQAIIAIARKLLVALNAAIRDQNPINNAQHA

SEQ ID NO: 244523 - protein, 341 aa, unidentified
MKNKSFIGIDISKNVIDASIFCEGTLIKDFPHDVFNNSRKGFGEMCTWLKKNHVVLSNCLFGMEFTGSYSMELEKFLNARNYQFCMLSTHVVKHYPMGPKDKSDKIDSAKIADFLYRYNGTECVKPYNMPDKTMQRLKALMNERKFLVEQRTCFMNRRQLCITKEDAQLYDGYIKKFSRDIENIELEEQKLLATDDSLLSTYKNLLTIPGIGFVNAINVIVITRNFTAFETARQYASYVGVAPHFRTSGTSVKWRPRPSARCDGQAKADLSMAATVVVQYDAELQSFYNRKLGGKQDSDTKRKALNAVKFKLVLRMFAIGKQNRKWEPLDSKSSNEKLAIS

SEQ ID NO: 244524 - protein, 304 aa, unidentified
MRIIGCDLHARQQSLAMLETATGEMVNLTLKHEGNEVREFYSQLPRPVGIEATGSMHWFLNLMDELGIECRVGHPATIRAAAPRRQKNDRLDADLILKLVAENRFPAIWLPTKELLDLRALVRHRHQWVRMRTRIQNALQAIALANGLRRGPSLWSYDGQAKIAFLPLLPHRRSALQAMYQKMDEEIEKLTQQVAEQAGQRSGARRLMTHPGVGPVTALATDVFLGDPKRFADGKALASYVGLIPREYSSGGRQRLGGVTKQGSPLLRFLWGEAGAHAVRRNPELKRFYRRKLVQKGLGRRAWQ

SEQ ID NO: 244525 - protein, 429 aa, unidentified
MEEVDDAELVVERIAALDLGKAGLEACVRVPHTHRPGRRMQELRGYGTTTAQLMEMVAWLRHWAVQRVVMESTSTYWKGVYYLLEAEGFECWLVNAREVKNVPGRAKTDRADAVWLAKVAERGMCRPSLVHPPEIRRLRDLTRYRRALVQDRTREQQRIEKLLEDAQIKISSVLSELHGMSGRAMMDALIAGQRDPQALARLAKGHARKKTERLEEALRGFFTDHHATILRMMLDNSDRISAQIAALDARIEEQIGPFSAQAAQLVDIPGIDTVAAAELIAEIGVDMTRFPSDAHLVSWAKFCPQTHESAGKSRNKGRSKGNPWLAGTLGRIAFANSRADTFLGARYRRLARRRGKQKAIVATGNSVLTIVYHLLSDPAATFCDLGPGYYESRINKHRRAHDLATQLQALTGQHIVIRDGKAVISDAAA

SEQ ID NO: 244526 - protein, 339 aa, unidentified
MAEVYAGLDVSDKMTHVCVVDGSGKIVWAGACATDPEVIARTLKARAPGLARVVLETGPLSAFLYHGLYERGAPVICVCARHAKGVLSVRMNKSDPHDAEGLAQMARTGWFKAVRIKDEATHMVRARLKIREQLIDARQALAGQLRGLLKLFGLRLGKVTTSNKRRERLVALFAQKPELEPIMTPLIESLEAIETQIAGSSRQLAAQAAADPVTARLMTAPGVGPITALVFKTSIEDPGRFARSEDAGAFAGLAPRRNQSGERDIRGRISKAGDPMLRSALYEAANSLLGRLKRPCALRTWGKRLAETKGAKRARVAVARKLAILLHRLWLSETVFRWA

SEQ ID NO: 244527 - protein, 326 aa, unidentified
MTSLPNPISDDRVTVGIDVAKATLEVAISGRTKSLAFANDEAGCAALLAELSGLRVGLVLFEATGGFELACATALQLAGLAVAVVNPRQARDFARAMGHLAKTDRIDAAVLADMARTLLARGDLSKLVKPLPDARQLELQGLVTRRRQLMAMKLAEDHRMKMPGVRQRRSLNTIIKALDREIARVDKDLQTFVGANHAELAALLDSVKGVGKATISTLLAEVPELGKLSGREVSALVGVAPINRDSGTMRGKRSIFGGRPDVRRVLFMAALVASRHNPVIKAFYQRLLAAGKPKKVALVACMRKLLTILNAMVRSGKPWDQALHLG

SEQ ID NO: 244528 - protein, 348 aa, unidentified
MLIIGCDYHPGFQQIAFVDTETGECGERRLTHREEAEQFYGTVKERSVRVGMEASGHARWFERMLRDWQFEVWIGDAAEIRTKRVRKQKTDRQDAQLLLRLMVEDRFPRIWVADAENRDLRQLLWHRHRLVQMRTRVMNQLHVVALHEGLRRKKALWRPAGRNELESLQLAPWASRRRQDLLDILDQLTPKIQELTRALEEEVEKRPVTRRLMTHPGVGPLTALAYELVIGTPDRFHCGKQIASYVGLVPSEESSGDRRRLGHISKQGNVLLRFLLVEGAQVTVRSQPEWRSRFFHLALRRGRKIAKVAMARKLAVHLYWMWRQGRDYNQFEKLGSHAGAPGNRHGAQ

SEQ ID NO: 244529 - protein, 323 aa, unidentified
MNKDIKYFGIDISHLVFDVTDSDGNYYQFKNKLSGFKKFLKLLDSKSHCVMEATGYYHYQLAYYLFEEGIKVSVENPLVVKRFIQMGLSKIKTDKSDSKLICAYAEQVELKLWAGSSKEVQESLQITRALSVYTKQRTMLKNKLHGESVLGEPSKFVVRSLKRSLKQLDKEIKALEDKLLILVKASHQDLFTRIKTIPGIGRKTAIMLIVLTGGFERFSSASELCSYAGLTPVIRQSGSSVKGRPRISKMGNQKLRNLLFMCSFTACKYNKACRDLYERIVAKGKSKKLALIAVCNKLLKQAFAIAKSGLIFDKEYKSTLVKN

SEQ ID NO: 244530 - protein, 428 aa, unidentified
MQNNSSTTPLYIGIDIGKNVHCFGGYVGSELHLIDARQEVRNNQTGYLTFRNWLQGQVASEHYAPIVVGLEPTGIYHEAWAYAIEQDFVHQIDFRFLNPYQTRQKRRQLQNGRKKKTDPIDVEAIAHCLRDGLGNPPCLPGQQTVRFDVWAAEFRQAYREHQRLQLSILTQWDRLWPGVLVDVKAFEKAHPQLKPPEPLVLTRPLERQLVRTILDENPNPYFWRTFSPETLLMFFHEKGLRCGPVAAKRIVQVAQEALLPPPHFADTLTERLRSDFHHFLELATRLEQLKQQAETLVPHSPAAVLTTIPGIGAYLAAQYLAYVVDPHRFQYADQIWSLAGFDIQQNDSGDRRQVGRITRRGDPALRKVLFAIGLNTSQYCPAIAQAKQRALKHGKKHIGAIIHAAHKANRMCFYLLTHQVPYDPKLTR

SEQ ID NO: 244531 - protein, 355 aa, unidentified
MLNTKYIGMDIHKETISIAVMNAAGKVVMECVIETKANTVLQFIHGLRGDLHVTFEEGTWAAWLYDLLKPHVTEVLVCDPRKNALLKQGSKSDKIDARKLAELLRLNHLKPVYHGEHGVRTLKELARSYLTITQDLTRVRNRLKALYRSWAIPCSGTQVYALRHRSEWLGKITEAGVRRRAEHFYQQFDALRPLRQEVRRDLLTEGRKHKARKLLRQIPGIGAIRATLLIALIQPPHRFRTKRQLWNYSGLGLETYDSAQYCVVEGQLQRSKKPVTLRGLNKNHNHDLKAIFKGAALEASSGAGPFHDFYEALLAKGRKASMARLTLARKIAVIALIVWKKEVSFDAKHLKQQAA

SEQ ID NO: 244532 - protein, 327 aa, unidentified
MEQQVAGIDVAKLTLDIVLSNGQKAQHNQFENTPKGHELLVRWLTRQGASSAHICMEATGQYGDGIAEYLYSLGFPVSVVNPARIKHYANSKLRRNKTDKADAQIIAEFCFRENPGLWAPPPASFKDLQALVRHLDGLQATRQQEVNRLNSGIKTPAVVESLIQICSFFDDQINQAKAAIQELIDQHSELKRRQNLLITIPGIGDLTAAKLLGEIRDIQDFQNARQLAAYAGLTPRNFLSGTSVHKKARLSKTGNSHLRKILYMPAISAKKWNSIVSIFCDRLALTGLRPMEIIGAAMRKLIHLVFGILKRGKPFDPNYLSTSMTLP

SEQ ID NO: 244533 - protein, 375 aa, unidentified
MIRFFGIDIHKDVAYVCAVDGQGRIVLSLAVPMNHAFDQFAAQLTKADHVAVEASTNAFAIHDVLARYAGEVVVVNPIKTRLIAEARIKSDKLDAQNLAQLLRSGFIYQVWVPPTEIRELRSLVGQRTGLNKQRTQVKNALQALLRTHRIEYETGKVFTQAGRRWLRSLELPGLATFQRDQHLTLLESIEVNLAAYDKEIARLAGDNPVAKRLMQQTGINYYSALAIYAEIGDIERFSSPKKLCSYAGLVPTLDQSGKKCRVGRITKAGRKRLRWILVECAQVACNHDPSLKKCFDRIAQKKGRNVAVVAVARRLLVRIWHLWHEDENHRHMKKDLWTRKLQDLAYDIGCRELGKQSTDFIQDTAQELEVKLTEE

SEQ ID NO: 244534 - protein, 344 aa, unidentified
MGEVSTIGLDIAKSVFQVHGADSSGVVVVRKRISRLKLLEFFAALPPCLVGIEACPSAHHWGRELQALGHTVRLMPPSYVKAYLKRSKNDANDAAAICEAVTRPSMRFVPIKTKEQQTALMLHRTRQLLVRQRTMLSNALRGHLAELGIVSAKGRNGIGELLRIIADGADNRIAPATRAILDVIARQYSAIGAEIRSIDKSILAWHRSCEASRRLEEIPGIGPIVATALVAEIGDWREFRSGRSLAAWIGLVPKQHTTGGKDKLGSITKQGNRYLRWLLVAGAMAVIRYAQKHGTERRPWLGRLMERRPTMVAAVALANKIARMAWAIMVRGERYQEPKLLVAA

SEQ ID NO: 244535 - protein, 453 aa, unidentified
MPRPTTGGHPDLKMVNPNAAAIDIGSTMHMAAVNPSSCDMPVRAFGTFTQDLHTLADWFSDCGVASVAMESTGVYWIPAFEILEARGFEVILVNARYAKNVPGRKTDVSDAGWLRQLHSYGLLRGSFRPDAEIATLRAYMRQRERLTEYAAAHIQHMQKALMEMNLQLHHVVSDITGATGMKIIRAIVAGERDPDVLADYRDVRCKSSPETIRAALVGNDRAEHVFALAQSLELYDFYKAKIEECDQRLEEAVAALSVKGGKDLPLLQKARIKGRQVNAPAFDVRAALYGVLGTDLTQIHGLGPSLALKLVAECGTDLRAWRTAKHFTSWLCLAPGNKISGGKLLSSKTRRSSSRAAALLRLAATTIGRSDTALGAFYRRLSARIGKQKAVTATARKIAVLFYNAIRHGMTYQDQGAAAYDERHRQRVLANLQRRAKTLGYALAPVSPEPAVS

SEQ ID NO: 244536 - protein, 336 aa, unidentified
MKSWSVTILSETSVLKRMSQGADPDALHRFLTSHYPEAEYYSVYEAGFCGFWIHDRLTELGIHNIVVNPADVPTMSSEKLRKTDAVDSKKLAVSLRAKQLKGIYTPDREALEIRSLIRLKISITKDMTRQKNRIKSQLRYLGIAMPTAYLEPYSHWSKRFLNWLREVEMSTPSGRHTMDILIMQLEALREQKAEMTRKLRALSHTERFEETLHLLMTIPGIGQATGLALMAEIVDITRFSNAEQLAAYVGMVPMCHSSGEHEGVGDITLRKHAILRSNIIEAAWVAIRKDEAMQLCYLNNCKRMVPSKAIVKVARKLVNRIYFVLKRHQPYVNAVA

SEQ ID NO: 244537 - protein, 345 aa, unidentified
MPIVGGLDIHRKQLTFDYLDTETGEVKRGQVAPADRAHLRAWLARFAGREDVAFALEGCTGWRYVTEELAAAGVAAHVAEPADTAFARGRKRHAKTDKTDSRHLRQLLAEGRLPECWIPPGHILECRALLELYHDLRAEHTAWVQRIHAVFFHQGAPALGDGALRTGKDLAALRAAAAAHLSPVGQLQVAVSLEVLEALEARMHQVRHQMLAAARHLTGAKVLAARLYGVGPVTALAMTCWLAGKDRFSSARKAVRFAGLDVTVWSSDRKGPPGRLSRQGPPVLRWAVYEAGQTHARTSAPDHRYYAQVTDRRNGNRAALSEARKILRQAHHILAELGDDALSAA

SEQ ID NO: 244538 - protein, 323 aa, unidentified
MPTKANKKRRSFIGIDVSKKLLEVGVHQSDFRFRCPNDPKNFPLLISELISLRPVRIVLEATGGLERPLLQALQAVGLPVVVVNPRQVRDFAKALGLLAKTDRLDARVLAHFAASIKPPLRPLKSQDETELDALMGRRTQLSDMLAAEKNRRGSAATETTRDDIEEHIEWLEDRLKELDEKLKQQLQCSSVWQQKDKVLQSVKGIGFVTSMSLLAECPELGQLNRHQIAKLAGVAPLNRDSGQQRGSRHIWGGRAQVRRKLYMATLAAIRSNPVIKAFYQRLLDRNKLKKVAIVACMRKLLTIINVMVRENKLWNVKDQPVSA

SEQ ID NO: 244539 - protein, 332 aa, unidentified
MSLELLAIDLGKRSFHLYGVDRDGLIISRKTGRSKLIETIEELDPETIAMEACASAHYWGRRFVAAGRLLINPRFVKPFVKGSKNDAADAEGIFEAATRPTMRFVPVKSIEQQDLQSLHRMRDRVVCARTALINHMRGLLAEYGVILPQGAWRFLAQARDAVADAELSDLARALFCDMLDELGGLDLRLEKLDRQLAAVCRTNEACRRLSKLPGVGAVVATALVAAVDDGRHFRSGRELAAWIGLVPRQYTTGGKPRLGGIGRRANHYLRRQMIHGARAVMFRLAKHDDRRSQWLKGLAARRGFNRTIVALANKTARVAWALLTRKEDYAAA

SEQ ID NO: 244540 - protein, 310 aa, unidentified
MSDIFVGIDVAQDRCNMYVYPLAQQSTFGICDMDNVIARLQDLQPAMIVMEATGGLEVPVAAELVAADLPVTVMNPRQVRDFARAMGILAKTDVIDARVLALFADKVRPESRSLPDARMRALRELVTRRQQLVDMRTMESNRRRMLRSERASTSIELILDTIETEIHNLDREIKKLITKSPIWQKKSDLLKSVPGIGNTTASLLVAALPELGKLNRRQIASLVGLAPMNRDSGTLRGHRTIIGGRRMVRTALYMPTICAIRFNPLIKRFYDRLRTAGKPPKVAITACMRKLLILLNAIVRNNTPWVPHIA

SEQ ID NO: 244541 - protein, 320 aa, unidentified
MICGVDISSASLAVRIGREGAAASFANTVEGISELVAFCRLHQVDLVAMEATGGYEKQSFALLSEQGLAVTILNPRAVRQFALSMGRAEKTDAIDAGMIAWFAEVKNSQPMCLSPASQHHLRALVTRLRQLTEVHTAQRNQQRLITDPAVQASFTELLAVINRQIRELAAAIAALLAADPLWSQLDQAFRTIKGVADRTVARLMAEMPEIGTLSNKTISKLAGVAPLANDSGKHQGKRRVRGGRSSVREILFIVASVVGRYEPDFIAFRERLANAGKPPKVIRIALAHKLLVRLNAKAREVRSQFLHSQPNPSSQQSITA

SEQ ID NO: 244542 - protein, 429 aa, unidentified
MKLEEKKLETPIRAWIGIDWADEKHDVSMYDVDSGEQEALVIRQTPEALQEWLGQLRARYEGGYVAVVLEQGRGGLLNALMSCEFLVLYVINPKSLSSFREAFYGSGATSDPVDAELMREMVRQNPSRFRAWHPDDVLTRSLRLLTEGRRDLVNQSTALTNRLTALLKGYYPQALIWVGNLDTAWACDFLQQWPTLQSLQASSRRQILRFYEKHPRACLDLDEQLKHIQDARALTQDEAVLESSALMVEAVVSQLRPVLASIASFDRKIAVIFRKHPDRPIFESFPGAGAALAPRLTAAFGTDRDRFQAATDMQELAGIAPVTEKSGKKTFVHWRYACPKFMRQTFQEFADHSRRWCKWAKAHYELLRRRGKSHNAAVRALAYKWIRILFRCWKDRQPYQDEVYTKSLFKHGSPLSSLLTECGKPVNGS

SEQ ID NO: 244543 - protein, 344 aa, unidentified
MPASIPSPARYRLFVGVDIAAQTFTTVWMAPGASPGRPVTLDQTPQGFSALQARLLAAGHVAADILVVMEATGSYWVSLATTLAHASFAVAVINPDQAHNVAKAVLQRAKTDAIDARMLARLAATLQPAPWTPPPAIYTELQQRLAERDTLIGLRQQVRNQRHALVQLPVVIPAVRARMEELIATFDAQIATIEREITQILPRDAGWAASAALLVSIAGIGVLTAAWLLVTTLNFTIGATPEAVTAYAGLAPVPKESGTSVRGRGAIGHGGNKRLRTALYMATLSATRYNPPIKAFYERLRAAGKPTKVARCAAARKLLHVAWAVVRKGRAFDPLYAQQRQEAA

SEQ ID NO: 244544 - protein, 372 aa, unidentified
MKKVSTVAAKQAKNFPARSFSEQKLTVGLDLGDRSSWYCVIDDSGAVQMEQRLNTTPKAIGEVFGGMPRSRIALETGMHSPWVSRLLTELGHEVIVAHARSVRLIGESRKKDDRLDAQTLARLVRIDPQLLCPVKHRSAQAQANLSVIRARAGLVRARTALVNTARGLAKSYGERLRSCNVRNMNPEKAAGLSPELQSALEPLLIALQSLSQQIGEYNERIEKLAEQSYPQVALLKQVKGVGTLIALTFLLTLEDPHRFAKSRDVGCYLGLQPGRRNSGQSQPQMHISKEGDPYLRTLLVQGAQHILGPFGPDCDLRRWGLKLAERGGKSGKKRAIVAPARKLAVLLHHLWVSGEVYEPLHTHQRTTMLAAA

SEQ ID NO: 244545 - protein, 424 aa, unidentified
MKVVYQTCCGVDVHKSFLVATIIKTTGGIEPSYQKKRFSTFNNSILQFKQWLLDNDCRDVCMESTGKYWIPVFNLLEDEINVTIANPKWVKAVKGNKDDTKDSKWIGDLFRLGLVKGSYVPCKFVRILREYTRYRYKLVSCRSSEKNRYQNALTVCNIALDSVVSDIFGKSSTSIIDYLLEQSDTSINHEEITSKLLKRLKSKEDAVIESIEGYQMTESQKYRMRLIRAHLDYITAEINDVDSMIESLISSDPDYVNAVQLLCTIPGVKHDSAITVISEIGIDMSQFSNSKRLCCWAGLTPGSNESAGKKKSVRITRAGVYLKPALVQCAHAAVKSKESPYYRKKYESLVKRRGKKRAIIAIARMILTAIYHMLSTGELWNPCDLYKIDMPEDLLEKQKSKAIKQAVKLLQKEGLLPPNEPLAS

SEQ ID NO: 244546 - protein, 342 aa, unidentified
MESAVTMGLDLGKSVFQVHGVDAGGAVVVQRRLTRSKLLAFFAKQPACLVGMEACAAAHHWGREIRKLGHTVRLMPPRYVKPYVKRQKNDAADAEAICEAVTRPSMRFVEIKSCEQQGTLVLHRVRLMLMRQRVQLSNAIRGHMAEYGLVAPAGRNGLQRLIAILDNPDDERVPAVARASLAQLVCQFGLLNGQVLENDRRVRSSARSTELGCRLMEVPGVGPVLASAIVATVPDPAAFKSGRNLAAWIGLVPRQNSSGGKEKLGGITKQGDRYLRQLLVAGALAVIRYAQKHGTKRPWLVQLLARRTPMIAAVALANKMARMIWAMMMTGERYREPMVAAA

SEQ ID NO: 244547 - protein, 349 aa, unidentified
MRKLYVGIDLGCKTCAGAVRDSKGKLLETCGFPTSAENLINFVGKQEGEVRVLIEECELAGWVYRTLLPHAKSVEVSDPRHNAWIARGKRKSDPIDAAKLAELLRGGFYRAVYHPGDEEMANLKIAVQHYDQMTRTTTRLQNQIKARFRQKGIMTTGKGVYGMAGRKKAISMVKSEAIAEMLRQDFRLLDHAQKERAGASRLVTKLSGGLPVIKRLKRIPGVGTISASRFVAYVANPHRFNTKGLVSFSRLAVVKKESGGSSIGREHLSKEGNGAMKALSRTVFNGAMRARRTNGIRDYYQGSLRRTKNETHARLNTQRKILAVMNAVWRDETEYSDYLVTGDGAKRPL

SEQ ID NO: 244548 - protein, 351 aa, unidentified
MIIIGVDYHPSDQYIAFVDTETGEYVERQLNHSDREAEKFYRELAARGVSVRVGMEATGYSRWFERLLAELGIEVWIGDAAEIKTKRVRKQKTDREDARLLLRLMRENNFPRIWVPSPENRDLRQLLWHRHRLVQMRTRIMNQLQAIAMNEGQRRKKKLWNEQGRAQLEKLPLATWASRRRKDLLELLDRMNPTIEELTRAIEQEAKKWPEVLRLMTHPGVGPLTALAFVLIIGTPERFKCGKQIGSYVGLIPCEDSSAGHQRLGHITKQGSSLLRFLLGEAAQAAARWDSDWRRRYIHLAMRRQRNIAKVAMARRLAVRMYWMWRNGWEYSEWVKFGSHAGQLGTRHGVN

SEQ ID NO: 244549 - protein, 347 aa, unidentified
MSEPTLERFVGVDVAKDWLDLCADPPTPDLAAHVSYDDASLHGLCDALERLRPALIVMEASGGLEQRLACEFAARSLMVAVVNPRQARSFARASGQLAKTDTIDARTLCAFAKLIRPQAKPPKDEETRELADLLGRRRQLMDMRIQEMQRQHTASSKTMRKSLSEHLTWLERRIAKLDDDMGRLLRDLSIWRPKDDLLQSSPGVGPVLSRTMLALCPEIGQLNRREIAKLVGVAPLARDSGKYRGRRRIWGGRSDVRRVLCMATHAAMKHNPPIAAFAQREGCWQAAQGHHRRLYAQAAYRHEHRAQNQPGLARLIAPSGLTSDTVAQEGVLPERSERCRAVGSRPG

SEQ ID NO: 244550 - protein, 304 aa, unidentified
MEARHGTKGSTRIPNSASAIGKWLSTLPVGSRIGVEATNRYHELVVQAAQKAGHVVFVLNPRDIKHYATGVACRGKTDSGDAQVIARYIAKEADNLHEHVARSPAQEQLHVLLQQRDSLVRSKAKLNLSLGAGASESAIFGRIFDGLKEAIALLDQQIQQLCRSGEQRDLYRRIMTIPGVGPTVAAFVTHHITRWPLTSSDAWIACTGLDPRPNESGARIGRRRLSKRGNASLRQILYMAAMGLTRSKNGKALYNAIRERGHSSTASFNILARKLARIAWGVFKSGRDFDPAMLKVGQACFQQA

SEQ ID NO: 244551 - protein, 370 aa, unidentified
MAQGSTLFIGLAVHKESIAVAYVAEEREAEVVFLGTIGTRQGDIDKLIRQLQAKGKRLHLVYEAGPCGYWLYRYLTKKNLKCWVVAPSQIPKQAGDRVKTDRRDAVQLARLLRSGDLTPVYVPGVEDEAIRDLVRAREDALKDGKAAKARLKAFLLRQDIRYAGRANWGPAHLRWLAEVVCPTPAQQIVFQEYVRAVSEPTERLPRLEADLQTQGQSWRWAPGVEALQALRGVQFTVAVTLIAELGALSRFDNPRQLMSYLGLTPSEHTSGERRRPGAITKTGNSHARRALIEGAWAYRYPATVSRHLQLRWEKVPTVIQDISGQAQVRLCKRYRRLVARGKNVNQVVVAIAREMAAFVWAIARKVEVTP

SEQ ID NO: 244552 - protein, 319 aa, unidentified
MAQNGLVVAGIDIAKDKADVSIRALSQRQTFPSTAEGRRQLISWLRKHTVTKAVMEASGGYEREWARALRQKDIEVRIVDPKRVRHFAQSAGRLAKNDVIDSDTIAWFAEIFGEAPSQAQDAAREALQQMVNARLGLLDMKTMLSNKGEQDVPEPVQKSHARLLKTIAVELANLEAAITAMIKATPHFAKRAEIVESVPGLAATTSAGLIAAMPELGQVSNEAISALLGVAPYDDDSGKRQGERQIKGGRRKVRNLFYMACLGAATRHNPALRAFYRRLIAKGKKAKVALVACMRKLIVILNIMIARGEKWDASRYAVG

SEQ ID NO: 244553 - protein, 379 aa, unidentified
MIDALEAQDKGDRLSKSSTVMSNRVEIFKDDKLTIGVDLGDRFSHYCVLNGAGEIIREHRLPTTPKGIDEVFSKIPTSRVALETGTHSPWVSRQLARWGHEVIVAHARNVRLIGGSSRKDDRLDARTLARLARIDPGLLGPVRHRSAKAQIHLTVIRARAGLVSARTALVNAARGLTKSYGERLQKCGTQQMNRESAKGLSQELRDALDPLLAEIESLNARIAEYDRRIEQIAKEVYPQVALLKQVKGVGTLIALTYVLTLDDPHRFRRSRDAGCFVGLRPGRRNSGMSQPQLHISKEGDRYLRTMLVQGAHYILGPFGEDSDLRRWGLRLAERGGKNAKKRAVVAVARKLAVLLHKLWVSGEVYEPLRNNHKVVGRVA

SEQ ID NO: 244554 - protein, 338 aa, unidentified
MALHCGMDLHGKNVLCSLTDENDKVVAERRTTTTLSEVLRFLEPHQPLIEGIAVESTYNWYWLVDGLLDAGYRVHLANPNAVKTYDGLKYGDDKGDARHLAHLLRLGLLPTGFIYPKEQRGLRDLLRRRMLLVQERTRFILSLQSLCERVNGGKYRAEMFKRMKPERLEEIIEDPYHQAGAVEYLDVVRRLNQAIYRLEKRVLGECEQSQAYKLLNSIPGIGRVLGMMIAFETGPITRYAKPGNYASYARTVSAIRYSDGKKKGENNRKCGNKYLAWALVQAAHKLIRYCPEARSFYDRKKAKKNGAVATKALACKLARCIYHMLENNEEFDVKKIFG

SEQ ID NO: 244555 - protein, 283 aa, unidentified
MTPYINFIGIDIGKFSFVVATNDQKTTQEYENSSAGIGQFIEDTQSLLATSLLVVETTSGYELNLLYALCQQGHAVHRADTRKVKNFIRSYGSAAKTDALDAKALALYGKERGHALELFQPQSQQTMLLFQLVQRRADLKQILVAEKNRLQSPSTYLVEQSCRLMIDTVEAQLQMLNTQIQQLIAESPILKKKHTVLKTIPGIGDIVASELLILLAELGTLSRRKIASLAGVAPRANDSGCFQGYRQTGRGRGGIKPLLFIASMAARNSHSPLKALGLYQITR

SEQ ID NO: 244556 - protein, 347 aa, unidentified
MYYIGLDVHKKTISYCLKDVPGHVHREGKIGSTRRELDAWINTLPQPQTMAMEATIFTGWIYDHLLPHAEKVKVAHPLMLRAIVAAKKKNDKIDASKIADCLRCDFLPEGHMASTEIRDRRRVLRYRNLVVKQMVQMKNRVSGLLMEIGVSYNKQRLHKVAYFGELMSTNEDISQAVRPLLNLSRGMIRRSGKAEYDLVSSLERDPLLKERLRRLRTVPGVGSITALTWVLEIGDYTRFSSNKQAISYCGLCADEKSSADKVMRMPLSKQRNKHIQRVLIEAAKLAPRESPELAMIRERELQWGNPNRATLAVARKMVCYMMAVERRQQDFVTAGELVPTEAAKNLS

SEQ ID NO: 244557 - protein, 366 aa, unidentified
MIKLYIGIDSHKASNSVAFAFAGTKPPEFFGKLSADIRRFQGSLYKILRKYNLKKDEIKLCYEAGPTGFVLARRLIGLGYDCIVAAPSLIPVKSGDKLKTDKRDAKKIAKLLRSGDLTPVHIPDPNDEVIRDVCRGRTDAVNERQRCQKQLGAFLLRNGYHYTGSTRWTQKHMTYLRDLVLPDPAQKLVREEYLQRIDFMTQQIDRMEDQMNALCQSWQRRPLVEALMGFRGFRELSSMIIISEIGDFTRFEHPKKLMAYLGLVPGEESSGTTRRQGPITKCGNSHARWILVECAGSYNMPAKVGRELSDRQEGLSQEVKALSWKVQNRLCNRWYRLSMRGVLFNKIRVAVARELSSYIWDLSKLI

SEQ ID NO: 244558 - protein, 405 aa, unidentified
MQDATTARFGSVDWATRGHAACVVDAAGQIVDQFTVEHTALGLATLVRHFQQQQVRRVAIERPDGPVVEALLAADLEVVVVSSRAVKALRTRYGLAGNKADRSDAYVLADCLRTDGHRWPALQTDTLQTLALRAAVRARKDLVATRVATANQLRAHLQVVFPAAVGVFAEIDSAIALRFLERFPSQDKATWLSDRRLAAWLQANAYCGRRPATELLQRLRTAAPGVRGPAADALAVVTLSLVRVLRTLVAEIAELETHIREQLALHPDGPIFQSLPRAGTVRAAALLAEIGDCRARFPSSETLAALAGAVPSTRASGQHRVVTFRWACDKKLREALVDFAQDTVRASPWAEQLYRRHRQQRKTHPHAARILTRAWISVLWRCWQDRQPYDPARHRALQRVIAPGG

SEQ ID NO: 244559 - protein, 414 aa, unidentified
MNNSSRNDRPVLPNGRHVVGIDIGQKFHAAAGVTAAGQDFGRAISFDNTRAGVDRLEQLLLKPLGAPARILIGMEATGHYWMPLYFELQRRGYESIVINPIQTRAQFRSRIRKTKTDKLDARSIARLVLKGEARAARIPDENIFELRLLTRHRWRLTGLCGDLQRFSYSLIERIFPEYADVFCTPLLPTGCALINELGLSPQLLAGQPDQVAALIARASRKHVSQTTIRTLLARAAQSIGIGMAERVIVDQLRSVIALLDTIESQRNALDDELARRVAALHSPLFSLGLHAPLVATIHAESDPIADFRRPWQYAAYAGLDPSTCESGNFKGSHAHISKRGSPYLRHALFLAACGLYRRQRALQRLYQRSRKRGHHHTDALVIVAHKLARIIWRLLTDNRPFRANAPTPARATAR

SEQ ID NO: 244560 - protein, 449 aa, unidentified
MSRPQVIDDQEHERVYERVAAVDVAKDTGMVCTRIPNPSRPGARRATVWTVKARMNAIRALGRQLKRDGVEIVTLESTSDYWRIWFFVLEACGLAVQLVHAAQAKNLPGRPKTDKLDAMWLARLTELGLLRASFVPPKAIRDLRDYTRARTRLVQERTRCWQRMEKLLESALVKVSSVASKLTTLSAQDMIKAMIAGERDPEVLAALARTRMKAKHDDLVAALDGMFDDHHGELAGLLLDQIAFLDARIAQLTTRAGQLAAAMPAAWGIDPDGTTGPGAGTGPGAPVLPAVARLAEIPGVSENLARSIIAETGLDMTRFPTAGHLVSWAGLCPSARQSGPRSRPGKKGQGDTWLRGALGQAAVGASGTATFLGERYHRIVRRRGKAKAQVAVARSILVIIWHLLANPETRYTDLGYGYYQARTDTDRKLRNHIRQIQALGFAVTVTKAG

SEQ ID NO: 244561 - protein, 410 aa, unidentified
MLNTLFVGIDVSKRNNVVRFTDSLGDTLTVFSVQNNQDGANNLLEKLHNTLTSNDFQAVSIGMESTSIYADHLAIFLRNDAFLKKWGAKVFVLNAKQVNAFKKAYPELPKNDNIDTLIIADYLRFGRISKEVNPDEKFIALRNLTRARFQVAQNLSREKARFLDTLFYKFSSLDSSKVFSNTFGATSIAVITEFFSTDDINEMPLEDLAKFVMDKGKNKFDDPEQIANDLKAAARSSYRLPKTVNDSVNQLLAVRLVGMRSLQEQLKDLDKAIESYMQLFPAILNSIPGIGPVYSAGLLAEIADIHRFKNHAALAKYAGIAWTEYQSGDYEASNTRLILSGNKYLKYYFLEATNKVRIHDAEFKRYYQSKFKEVPKHQHKRALALTARKLVRLVYSLLSTNQLYIPPTNR

SEQ ID NO: 244562 - protein, 407 aa, unidentified
MGITCGIDWAEAHHDVALVDTNGEIIARTRIDTGAAGFTDLLALIAEHCDSVEDIPIAIETDKNLLVVALADAGFTLYPINPRAVARYRERHGQAGGKSDPGDAAVLAHVLRTDRHMHRPLPAISEQGRAVKTLARQHQEAVWALNQTVSRLRSLLLEFYPQAVQAFPNLKHRAATTVLAAVPTPAAAAKLTSRRVVTLLQRSGRGNHPALAEQILTLLRAPALRQPPQVETAYGHTATGLIAVLVAMREAVDALEAQLGQQFEAHPQAAILRSAPGLGPVLAARVLGEIGDDPERFTHPNNLRSYAGTAPVTMSSGRSHYVKARKVRNKRLADACHWWVFSMLTKSAGARAHYDKRRAAGDHHNAALRNLANKLLGRLWWCLRHDIPWDETAAWPVLTDAFRPVAS

SEQ ID NO: 244563 - protein, 435 aa, unidentified
MEKIRTNVGGIDIGAKKVFTSIEGHPVVSHFTFTEDFVLLRNFLLENHIKSVAMEATGVYWVILYEILEDAGIDVWLVDGRQTKQVPGRKTDVKDCQWIQELHSYGLLNRCLVVDADIKELRSYLRLREDHIESSSKHINQMQKALTLMNIRLKEVLDQIHGASGMAIIEAILNGERDKQVLVRLCHKSVLKNKKELVLKALEGRYTEAGIFALRQAYNGYKFYLQQISECDQKANVVINRIGHCGDGQELKKKRKAIRHHKPIVENLGANLLNIFDSKDATLIAGITDYTWIQLLAETGPDLTRWPSEKHFTSWMALSPGQHNSGKMRRNAKRKGKPKAGQIFRIIAQGLINSKDVAIGSFGRRLRGRKGPKVAVKAMARKVAVLYWRVMVKGLDYAEKGIKQYEEQLILNKMKSFTRLAKELNINTLELQYVT

SEQ ID NO: 244564 - protein, 343 aa, unidentified
MDHFAGLDVSVKETSVCIVDDTGRIVREVKVASEPEALLRELAKSTYRFKRIGLEAGPLSQWLFSTLAEAGLPVICVETRHMRAVLKAQINKTDRNDARGMAQMMRAGLYRPVHVKTLRSQKLRMLLTHRKLLQSKAIAIDNDLRGTLRNFGLKVGTVGTVKFEARIRELVENLPDLAILIEPLLIVRRTLREQFCILHRRLLAIVRDDEVCRRLMTTPGVGPVVSLTYRATVDVPARFRRSKAVGAVFGLTPSKYQSGEINRTGAISKCGDEMMRVMLYEAAQIMLVRSTKWSWLKAWAMQIVRHRGMKKAIVALARRLAVIMHRIWVDGTEFRWTREVAAA

SEQ ID NO: 244565 - protein, 476 aa, unidentified
MARRKLSTFERLQRGERLQRRERRELQRKLEAGDAELKIVHPDAAGIDVGSASHFVSVPAGRDPEPVREFGSWTADLHKLAEWLKACGIRTVAMQSTGVYWIALQEALEKAGLEVFLVNAQGTKNLPGRKSDVQECQWLMKLHTYGLLRNSFRPPDEIRGVRTIWRLRSRFVEEAGSKIQQIQKALTTMNVQLTNVISDISGVTGMAIVRAIVEGERDPRVLAKLRDGRIQASEEEIAHSLEGNWREEVLFELKHVVEGYDFQQKQIGECDAEIEKRMGMLSSHPTREQKEGEAGARKKSAQKPRKNQPGFDLKGELHRIFGVDLTRIDGIHVMTAQVILTELGPDLSAFPSEGDFTSWLELAPRNDITGGRTIRKKARKSKNRVANAFRMAAESLCRSDSYLGARYRKLRGRMEGQPAVKAMARFLACLVYRLLTKGQEYVDKGAAYFEQKRKQRDLVSLQRKAAELGLKLVMAR

SEQ ID NO: 244566 - protein, 348 aa, unidentified
MPIVTADTPTVIGGIDTHQDLHAAAVVSRDGTVLGSQSFSTTRAGYRAMLRWFRSYGELVRVGVEATGTYGAGITRHLALAGVPVLEVTGPDRSLRRAKGKDDSLDAIAAAQAALTGQRVQVAKDRSGAVEALRVLRTTRKTAIKCRRATLQQLHNTIVASPDEVRDQVRNLTRMQLLRTCASWRPDTVGYRDPVVATRIALKSLARRVLDLNDEVADLDRLIEPLVEELGSALTQLEGVGPNSAGEFIVAAGENSDRLRSEAGFAMLCGACPIPASSGKTQRHRLNRGGNRQANSALHIVVLSRMRTDPRTKKYVERRLNEGRTKREIMRCLKRYVAREIYHAIITT

SEQ ID NO: 244567 - protein, 340 aa, unidentified
MTIATIGIDLAKNVFAVHGVDHNGKTVLVKSRVTRAALPELIAGLPPSVIGMEACSGAHYWARLFRQYGHEPRLMAAKFVSPYRMAGKSGKNDAADAQAICEAVRRLHMRFVPVKDESQQAMQCLHRTRQGFIEEKTAIYNRLRGLISEFGVIAPQSTDALRRIVSEQKSYLPLQVQQCVDDLLEHIDRIEDKVSEYDRTLSCMAKTDHRSQRLMELKGIGPTTACALVASIGNAHDFKNGRQLAAWLGLTPSQYSSGGKSKPGRITKAGDSYLRTLLVQGARSVLIGAEKRSDSFSRWVCSLVERRGYWRAVVAIAAKNARLCWASLHYGDDFKLYSAS

SEQ ID NO: 244568 - protein, 355 aa, unidentified
MNSEKYIGLDVHQATISVAVLDSTGKLVMESILETKAATILEFFAGLRGTLSVTFEEGTWAAWLYDLLKPHVAKLVVCNPRKNALLKDGNKSDRIDAHKLAELLYLNKLSSVYHGETGVRLLRELARSYLTIVKDLTRVMCRLKAVYRSWAIPCAGRDVYYTRHRAEWLGKIKEAGVRRRAERLYQQLDMLQYLRQQARRELLAESRKHAITVKLRQIPSLGPIRSALAVALIQTPHRFRTKRQLWAYSGLALETRTSAEYCYVKGGLRRSKKQISIRGLNKDHNHDLKGLFKGAATRASVLPGPFQDFYQRSLAKGIKPTMARLTLARKIAAITLTLWKKGENFDADKLKSQAA

SEQ ID NO: 244569 - protein, 449 aa, unidentified
MNNGNGVSRGDRNRNARLARLRELVPVENAIVGIDLADKKQMVVVTDHDSRVLARRTFRCRAWDLGVALDWAADRATAKGFAGVIVACEPTGHRWRVLGQLAADRAMPFVCVQPMLTSWARRSEDLTHDKTDEKDAVLIARLTAQLRCYVPEPVEETWGRLRHLGARREQLIVEAVSQIQQIRDLLECVWPAALEVARQPFRSRTWAAAMWVVLDRDGGDFDRTRRLGPARFETAVRREITKRGGQKPCLRIVRNLFTALADPAGVIAHRRGALERVQLLLEDWCHNQHKLVDAEQRMTVVLDELELTQLVTSITGLSAVGAAAILAETGDPRRFATARGLVKHAGLAPREKLSGNYVGRTKLTGQGRPRLRVAAWRAVWGAQRANPVYAARYRHLTTREHNKLKPTQAQTVIAAAILRQLHAVVTTGQAWDPDIATYGRRQAAAPMAA

SEQ ID NO: 244570 - protein, 383 aa, unidentified
MKKFFIGVDVSKDTVDVSFFDDDRMKSPEYLAQYSNSPKGFREMVKDLRMCCHGVSSGQWLFCCETTGRYDHPLCHWLVDHGMVVWRESALQIKWSSGIQRGKNDRVDSLRIAEYAWRHQDKMQKFVKPSESLSNLKAAFTHRRRLVEKRTATRCQLKSMSSEKGLSASVARMIVRDLSREIERLSASIATMDESIQKIIRSDSELDRNYRHIISVKGVGPITAVALIVCSGNFKAITSAKKMACYCGVASFRSQSGTSINRKASVSNLSNRQIKSLLSMAARSASRSNPVFAEYFNRTLSRGKPVALVYNNLRNKIITVVYKLIERDCDFDVDYKRMHSTGQRANDPAIRETVWLKKRKKNTTFAIASQRGSRHCWGATCQQ

SEQ ID NO: 244571 - protein, 388 aa, unidentified
MFNNFIGIDVSKDSFNYCVIDSQLTTIEQGSFEMSIKGFENFKNIISKYQKSVIALESTGSYHINILSFIASFKKEVYLVNPVLIKRFIQTISLRKTKTDEIDANLIAKFIFYHNASLKQFVPNNMNEILALSRVRESITRDVAKMKTKLKQDVNTVFPELVKHYNIFTKTILGILKAFPTTQSIKEANESKIKKAVKEIKGKKVYSTIKDVQKLAKESISNNNGIFSKIIEHDVKTLEFLNQQLEEITKTLLEEIKKEKEISMDILTSIDGISDVTAAHFIAEVRDIKNFENRNKLIAFAGTDPSIKESGTSLKQNGKITKKGSSSLRRIIYIMGMSLIRSNQLFKDYYYKKRQEGFKHRKAMTALGNKLLRVIFSLLKKEEKWVKK

SEQ ID NO: 244572 - protein, 340 aa, unidentified
MEKRYIGIDLHRNRFTYCIRLENERTYVTEWALEALARFVKKLRASDEVAVEITSNTRLFHEAVAPHVARVVVVDTNQFRVISRSVKKTDSNDARLLSLYLSKNLLPEVRMKDKDLAQLASLTQTRDTLVKQRSALKNKVNNILSARGLNLAKEALSSEKKLTEVLELPFDEIVRIELRVIVEQIRSLNKSIGELDKTIGEEGSKLEGHQGLSSIKGIGKITGAILLSVIGDVNDFPDEGRLASYFGIVPRVSNSNETERSGRIHKRGTKLGRTALVQSALIAANYSPYLKRFYEQVKARRGAGKAIIALARKFLGIIYRTLKNKWVFEDFPNFVLAEEA

SEQ ID NO: 244573 - protein, 432 aa, unidentified
MNPISVSSPPSKVAAWVGLDWADQQHLVCLYDVGTGQTELSCLEQKPEALQSWLGQLRQRFGGQPVAVVLEQARGAVIYALLSADFLVLYPVNPQSLASYRKAYVTSGAKSDSADAVLLMEMVRNSPQRFRSWTPDDADTRSLQLLTQNRRQLVDQCTAFTNQLTGWLKSYYPQALELAGELDSLQACDFLEKWPTLEALQQARPAQIRKLYLDYGKPRPESLEQRLEQIRRARPLTTDLAAVLSGTMMVRALIEQIRPLRATLERFDQQIAALFRKHPDRLLFESFPGAGAVLAPRLVAAFGTDRDRFESAQDMQQLSGIAPVTEQSGKQRWVHWRWACSKFLRQSFHEFADHSRKWCGWAKALHQRLRRAGKGHHAALRVLAFKWIRILFHCWKTRTGYDEQIYLKSLEKRNPTLWAEAQALPPRKKKAA

SEQ ID NO: 244574 - protein, 372 aa, unidentified
MISIIYVGMDVHTTNYTLCCYSMEDDRFFAEVQVEPDAKNILKYLARIEKQQSRDCRIVCGYEAGCLGYSLYHQLHAHGIDCVILAPTTMMTKPGKRIKTDRRDARLISKCLAFHTYSPVYIPTEVDDAVKEYIRMRDDANSALARVKQQIIAFCIRHGKIHDGKSYWTNKHLEWLSNLDLGNKILSEVLQEYLIRYYQLREQVDMYDMRINELAQAEPYRQKVEKLGCFRGIAAHTALSFCVEVGDFRRFATAQQFASYLGLVPGECSRGDKQQYTGITKAGNSHLRKLLVETAQVFGRSATKSGKSAALKERQAKCDSLTVAYADKANARLKKKYFKIAMRSKVNIAKTAVAREMACFIWGMMTDNISCA

SEQ ID NO: 244575 - protein, 315 aa, unidentified
MHAPRTFMVGIDVSKAHLDVAVEGKRTVVRFDNDAAGRAALAAAVAGAELVVVEATGGYEMATVRALMAADSPVAVVNPRQIRDFARASDRLAKTDQVDARVILHFARAMRPAQIPHIDDGRIALAALVTRRRQLIDMAVAEKNRLEHAPQAVAVLIGETLAALKAQLARVDAAIALAIEAEPDMAARRDLLLTVPGIGEVGAAVLIAELPELGGIDDKKLAALVGVAPMAHDSGAWRGQRHIAGGRATVRCALYMATLSAIRCSPAIKAFYKRLRDAGKPPKVALVAAMRKLIIMINTILKRHTPWNEAQQHGC

SEQ ID NO: 244576 - protein, 350 aa, unidentified
MIIIGVDYHPEFQQIASVDTEAGDFQECRLQHREEAEQFYRELAKRAVAVRIGMEASGHARWLERLFGELQFELWIGDATRICSQRVRKQKTDRQDAQLILQLLVEDRFPRIWVPSAENRDLRQLLWHRHRMVQARTRVMNQLQAVALNEGLRCKKRLWRGQGREQLESFQLGLWASRRRHDLLQLLDQLNPTILELTQAIEGEAEKCPKARLLRTHPGVGALTALAFVLILGDVERFRCGKQVASYLGLAPAEDSSGGRRRLGHISKQGSSMARFLLVEAAQATVRSDPSWRSKYFHLMQRRGRKTAKVALARRLAVDLYWMWRKQWDYEQLIRFGSHAGQRGNPHGVQ

SEQ ID NO: 244577 - protein, 435 aa, unidentified
MAMKVKYEDRLKQKVIAITTDTLVVGVDIAKNYQWARFVDFRGIEHDRALKFKNSKGGFETILARIREICKKENFAKAVVGMEPTGHYWKAFANWLEKQEGITVVLVNPYATKQAKELDDNSQTKSDKKDALTIAKLVKDGRYFELYLPHDVYAELRGLSTARTGLNKRKSALKNTITAVMDEFFPEYAEVFKCPLSGKASRHILKNCPFPKFILALGEGGVTDEIRKAVRKTVGRKKAVQLVKAAKDSIGVDYGEEPARLKLRLMLEELELLEKQTEELEGQMSAALQETDYAEFLLSIKGIGIVTLATCLGELGDPARFDDPRQMSRMAGYNLVEDSSGKNKSGTKISKRGRKNLRSVLYQMALTMVATNDEMKQLYHYLKTREKAPLRKMQALVVVSKKILTLIHTLAKKKESYDPEKVFGHVRREQLKAAA

SEQ ID NO: 244578 - protein, 347 aa, unidentified
MRFYTQAHRYYCGIDLHARWMYVCILDPQGEVLLHRNLRACPETFLKAVEPYRQDLVVAVECIFSWYWLADLCAHHGIEFVLGHALYMKAIHGGKAKNDRIDSQKIAVLLRGGMIPVAYVYPPEMRSTRDLLRRRTYLMRKRAELLVHVQHTNSQYNLPEIGKKIAYRANRSGVAQRFSDPAVQTSIATDLSLIDFYDRLLTQLELFITRQAKQQDHHCFYLLRSVPGIGKILALTILYEIHDIARFPRVQEFVSYCRLVKCSRQSAGKNYGFSGKKIGNVHLKWAFSEAAVLFLRSNPEGQKLLARLERKHGKAKALSILAHKLARTVYFILRREKAFDLTQFLAA

SEQ ID NO: 244579 - protein, 412 aa, unidentified
MTSEVITAVGIDVSKGKSVVAVRRPGGEVILPPTQVNHTAEELAHLVEHLREIGGNIRIVMEHTGMYWRPIAHALKEAGFFVSVVNAILVHNFSDNSLRKVKTDKADALKIANYCLTFWADLRNFSDEDETRQMLKMQCRLYERTQKTSVELRNGLISLLDQTFPGINKVLPSPYCSKRGHYKWVDFVKTFWHKECVKKHSLNAFSNSYQRWCKKERYRFREAEAEKIYCAAQNAVATFPANESTKILIVQAVDCLNAVYESMAVLRAEMRRLASLLPEYEVVMAMQGAGDITGPKLMAEIGDVRRFTSKRALVAFAGMDAPPFQSGNFEAKSRHVSKRGSPHLRRTLFQIMSVVLQHGSADNTVYLFMNKKRAEGKHFYVYMVAGAAKFLRIYYARVKEYLAASEAGTKAA

SEQ ID NO: 244580 - protein, 475 aa, unidentified
MGKGSGTTRGDRRRNARRERLRELLPRDGAVIGIDLGEDKQAVAVIDHDVRVLAGKTVRVKAFRLGDALAWAVGQARAKGFAAVAVACEPTGPRWLQVQRLCAERGLPLVCVQPLVSHLARQQQDYTTHKTDEADCVMIARLAIELHCYIPEELDEAWAQLRHLGRRRAQLITAATASVQRVRDFLSVAWPVAPEACAHPFESVTWLAAMQVVTSRCGGQPEKLAAVGPAKFTALVRQAVAGQGGQRPAGPVCRAVFAALASTEGVVVSHRRGLLRRCADELGDLRRTRAQLRAVEAGMAAVLGELGLSRLADIPGLTAVGAAAILAETGDPRRYDSSSSLVKHAGLSPSGNASGAFEGQAHISRRGRPGLRLTVWRAIWPLLIHNSVMAAKYAAMIAAADAAAAQAVPAPPGTESRQASAAAAARARRAKARVACAASLLRWIYSMVVHDTGWDPDVAAGTASCQHARRQAEAA

SEQ ID NO: 244581 - protein, 373 aa, unidentified
MSGTDFAHPVATATRPEDSTVFVALELSRKSWLVATSSPGEERISKRVVTAGDGPGLLALLGKLRETAERRLGRAVRVVVIQEAGLDGFWVHRLLVDNGLESHVVDAASLAVDRRKRRRKTDVIDAEGLLRALMAWTRGERRVCSMVRPPSPEEEDRRRLCREREALVTERIRHTNRIKGLLAGQGIFDFDPLRPKHRERLDELRTGDGRPLPPCLLAEIRRQLGRLDAVVRDLATVEAERNGLVGLRAMDRPAQSPEEGAKPGGVAEAVTAPVAQGTDPAVAPEEVASSAASEAAPANATSRTAPAEPAALLMKLKGIGPEFAAVLWLEALFRSFGNRRQIAAYAGLAPVPWQSGGIDRDQGIAKAGNPRRR

SEQ ID NO: 244582 - protein, 340 aa, unidentified
MQVSRKNYLGIDVSKPWFDVSLLIVLDHLKQPVITQRFDNSIEGMKLFKKWLVTHGVTFDQNSLVVIENTGIYHRLIWSFCSKYDLQLHIGNAAHIKWSLGIARGKSDVIDAQRLCLYCYKQADELKATPALNPVFMRLKDLMSSRSRLVAQLHSTKNYIKEIQCANDKELLSALEKAHKAAIDGIKKSIGQIEILINKIIREDAAIAANYELIKSVPGIGHLTAVYIICCTNNFAAKISGKQLASYAGVVPFEHSSGISIKGKNRVHKMANKDLKKLLHLCALTAIKYCPEFKQYFDRKKAEGKNGMLVLNAIRNKLVLRVVAVVNKQQPYVDNTKIAA

SEQ ID NO: 244583 - protein, 386 aa, unidentified
MQRNDLSRSLVAFDQNSTLVAVVELSLKTWLIAGLVPGLTRQPLKKQGADADALLALLHRWQGEAIKAGRKIERIVVAFEAGRDGFWLARWLRARGIESYVIHPTSIPVSREHRRAKSDRLDTELLMRAVLGWLRGEVKHCSMVAIPTLAEEDARRPNREHEHLIGERTRILNRLKATMIRHGIRNFNVKLRKALERLAGLRTPEGVALPANTLGELRRDMARLRLIRDQIKEIENRRLQQLRKAPQDGTHPMLLMLAKVMGIGVETADMLVHEVLTRQLRDERAVGRYAGLTGAPDESGSKRREKGLARAGNARVRRGMIQLAWRWLMFQKDSALAKWFQARTANARRNVRKTMIVALARKLLIALWRYATAGEVPAGAKLRPAI

SEQ ID NO: 244584 - protein, 347 aa, unidentified
MLYVGLDLCRKRLDWRALEPEGAVVGGGAVPPDRDGLGLLARRLGDAGQPIKAVIESMTGARFVHDQLELAGWDVRIADAVKARGIAPLACKTDRIDCWVLAELARLELVPEIWLPDPRVRAERERARFRLHLVKHRNSLKNRIHAVLFQHGIANTSSDLFGAGGRRLLERLALPEPWASTVRASLQLIDSLDEQIDACALELRQLGADHRYIPLLLTCPGIGWVLAFTIASEIGDINRFPSPRKLVGYTGLCPRVDQSGERDRRGPLRKNGPNYLRWALVEAAHSAARSHPPYTTIRERMQTRHGKTRGTKIAAIEIARRLAEANWHMLTKNQPFTPASAPASLAA

SEQ ID NO: 244585 - protein, 377 aa, unidentified
MVQSQMIQAEDNTKKHRMYIAFELSNNNWKLAFCDGFKHREKTISARYLNLLQAEIEKARKHFGMEEGVEIYSCYEAGRDGFWLHRYLESCGIKNVVVDSASIEVNRRYRRVKTDRVDAGKLLQMLVRDIAGERKVWSVVRVPSIEQEDARRTNRERDRLLKERTGHINRMKSLLILHGIRMKISKHFKEDIDRVKLWDGSTLPENIKNELRREYDRYTTVNGQLEAVQKEQEKKQTADDRISQQIEALKKLKSIGSVSSRHLILEYFGWRQFKNVKEVGAASGLAPTPYSSGSSQLEQGISKAGNYRVRKVMIELGWLWLRYQSNSKLSNWFIKRFAFGGKRMRRIGIVALARKLLVALWKYLEKGIIPEGATLKA

SEQ ID NO: 244586 - protein, 374 aa, unidentified
MENIITYVGMDTHKKQHKIALHYPRQEEIVEFTINNTVCDIRKMVNKIKKQAPGQVEFCYEAGVCGFTLKRRIKDMGCKCEVIAPSLVPRKPGERIKTDRRDAKKLLMLFKARLLTEVHAPDEKQEAARELTRLRETAKDNLKRIRHQVLKFLTRHGYVYKAGSHWTQKHITWIRTIEFTVPMLTKAFESYFDEMIYCTARLENLDKEVELLAQSEEYKEIVGLLSCFHGIKTLTAIAVITEIFEFGRFESPRRLMSYLGLTPSEDSSGEKQRKGAITKTGNKRVRRLLNETSWHYRHRYVPSAVLKKRRENQPQWAIEIADAAGRRLTKRHRHLINNGKMPCKANIAVARELAGFIWFMVTQYQARKNAKDVA

SEQ ID NO: 244587 - protein, 401 aa, unidentified
MNKIVHYLGLDVHKETIAVSIAPQNSTEVRRYGIIGGSLDAVDKLLKKLAAGGVELRVVYEAGPCGFVLCRHLRSRGMHCEVIAPSLIPKKATDRVKTDRRDADQLARLYRAGELTAIHVPDQEDEAVRDLVRARTSAMVDQRQARNRLKGFLLRLGFRYTGKSSWNDAHKRYLAGLIMPQPPQQIAFQEYIHAINDATERLARLTQAMEDALPAWKRAPVVRALMSLRGVQVLTGMTLVAEVGDFNRFTDARSLMNFFGLTPSEHSSGGSRVQGGITKCGNTHCRRVLTEAAWQYRLKPKVSEAMQKRQEEQPKAVRLLAWKAQQRLHQRFGRLAAKKKSVIAATAVARELAGFVWAIACQVTPTEQPAAPEIIRTCKGKVYRLAAPKKFVAGKKPELKQ

SEQ ID NO: 244588 - protein, 355 aa, unidentified
MEYRSMPVPYLSIGLDLGDTTSHLFALLYNGEIRADKRIPTTMEALREHFEEFPAARIIIEAGGQSQWISEFLNELGHEVLVANPSALGNKKQRRKNDRLDAETRARKGRSDPKELRPIQHRSSARQLDLSVIRARDCLVRSRTLVISTVRSLIKTHGKRLPSCSSPAFAKKAGPLIPENLQPALNPLLETIASFTLKISQYDKYIKELSEKKYPQTARRTQVQGVSFLTALAYVLTLEDSRRFANSRSAGAFVGLVPALDDSGHGTPQLRISRAGNGYLPRLLVNGAHYILGPFGSDCDLKRYGEAIAERGGKNAKKRAVVAVARKLAVLLHRLWVSGDTYDPFYNSRRKEAAA

SEQ ID NO: 244589 - protein, 388 aa, unidentified
MRQSTPVQFGRLFVGMDIHKDNHAAVAVNCFGDPLFKQELGNEVKDFNQLIARVQAITKERQLNPVFGLEDTSGSGEFLARFLFNHGYEVKTINPVLVKRERDYETHPEKSDLADALGVAKVLIQRIDSVPAYNISETTEVSRDIRALTKDRETIVLEQTRLKNQLHALLHHSFGSMYKSLFRDVFAKKALLFWQDFPSAQTLKSSRKRNTAKPDWITRRSADELPHASETQANQIRRKVKRLLAIREELNEIEKELDGLLGQTGQKLDTLPGCGPTLSAVVLAEIKDINRFSSPAKLAKYAGCAPRKLESGKRRRHVKTRSGNRRLNKALYQIALTQISNQGILKAKAYFQKKVNEGKSKKHALTCLKRQIVDIIWSMLKEKRAYYS

SEQ ID NO: 244590 - protein, 342 aa, unidentified
MESIVYVGMDVHKENYTLCCYSLEEDKVQYQQRVTPDYKMILKYLEQIRKQNPEEIEFICGYEAGCLGYTLYHQLTEHGVKCIILAPTTMAITNNKRIKTDKRDAGNIARCLAFHTYGEVHVPTAEDEAVKEYIRMRDDQKKALKIIKQQILAFVLRHGYRYSGGKNYWTIKHITWLKALEMGGVLQESLDEYLVTYDYLTDKIKRLDNRIEELAEEERYKEKVKKLICLLGVKTLTALAIIVEIGDFIRFAKAENMASFLGLVPGEDSSGEKQSRGGITKAGNTHVRRLLVEAAQSYTRGTIGHKSKELKLRQNGNTTQVIAYADKANERLRRKFYRMTLK

SEQ ID NO: 244591 - protein, 343 aa, unidentified
MDKRHYGGIEVSAKQVLVELQSDSATASRREFSNSAEGHQALVRWLASSGRVRVVMEATGLYGLDLALRLEQEPGVELMVANPRAVRHFAHALIKRSKNDPIDAQVLAEFARRMPFRRWQRPSPVALRLHALAGRLQALADMHAAEKNRLHAAQLCEAWPPEVRRDLQRSLGALERAVNRLTRRAVAEISADPDLKLRYQLLLSACGIGPTSAVQILSQLAVLPGDLDARQWVAQAGLDPREYSSGSSVHRKTRISKTGNRRLRRALYMPALVAIVHEPHLRGFYQRLLARGKTKMQALVAVMRKLLHAIFGMFKHQQPFDGSRLFAPPTRMASQTQVAVSHP

SEQ ID NO: 244592 - protein, 314 aa, unidentified
MINNNEISVGIDTGKTQLDFHVRPLDQAFSVANSVAGVKEAIKCLERLQPTRIVIEATGRLELLFVVAAQKARLPVTVANPKHVRRFAQALGKLAKTDRLDAEVIAHYGEAVKPEPTELKPENVRLISDLLARRSQLLAFSTQEKNRLSILPKALHVSLKRHLKQLQAEVKRVEIQLDKLIDLAPEWQQKRDLLMSVNGVGKVLTYTLLSDLPELGQLNRKEIAALVGVAPMNRESGSYNGKRHIRGGRAKIRTVLFMAIMSAVQSNPMLKAKYQQLKAAGKPPKVALVACMRKLLTILNVMMKNGEHWNPQTP

SEQ ID NO: 244593 - protein, 371 aa, unidentified
MGWTAPYGIECARMRLLQSQTREPSVNQIIRIGMDTSKHIFQLHGVDAVERPVLRRKLRRSEVLAFFAKLPPTVIGMEACGAAHYWARELRKLGHEVKLMAPQHVKAYVKRNKNDGRDAEGLCEAMSRPTMQFVPVKTEEQQAALMLAGARQQLIARRTQLSNAIRGYAAEFGLTAAKGLDKIEPLLARIAQDETVPALARELFAVQGQDYAQLQIELKAIEVKLMAWHRANACSRRLAQIPGVGPIGATALVMKTPDPRAFPSGRHFAAWLGLTPKDHSTAGKTRLGKITRAGDEVLRSLLVAGATAVIQQVRNGRGRPSAWLLALLKRKPPKLAAVALANKIARIAWKLMTTGESYDGARMPGAQAFAA

SEQ ID NO: 244594 - protein, 317 aa, unidentified
MAQNGTIVGIDVAKGKIDAAIRFGAEASFANDAEGRSELLAWLQEHGVCKAVMEASGGYEKGWARLLRGAGVEVVIADPKRVRHFAKSAGQLAKNDPIDARMIAWFGEVFGHASGQPHDEERQELDQIVTARLGIARLKEQIDNWGEHEQPKAVQKVHQALLKAVATQLAKLETIIAAKIGKTERFARRAEIIQSVPGLAGTAAAGIIAFLPELGLVDRQAAAALLGVAPFDADSGQRRGERHIQAGRHKLRKLLFMPILSAATQHNPVLKACYQRLIARGKKAKVALIACMRKLIGILNTMLARGEKWDPAKHAIT

SEQ ID NO: 244595 - protein, 376 aa, unidentified
MSQSTTVYVGLDVHKDSIDIALADAARDSEVRHLGTVAGGTDAVTKAMRRLVSAGHRLHIVYEAGPCGFALQRHFAGLGWRCDVVAPSSIPRPPGERVKTDRRDAMKLARLARVGELTPVRVPDSADEAVRDLVRGREDAVREQRNARHRLKALLLRNGIAYSGRSAWTAAHLRWIATVKLPHAAQQIVFQEYLHAITEAGARISRHEQALRDALSTWTLAPVVAALQALRGVQLIAAITLVAEIQDFWRFASPRQLMAYLGLVPCEDSSGPRRRLGAITKAGNAPARRMLVEIAHLYRHPARVSPVIARRQADLPKAVTDIAWAAQTRLCSRFRRLAARRVPHNKIVVAIARELCGFVWAIAREVTPGPHSSNSH

SEQ ID NO: 244596 - protein, 421 aa, unidentified
MNQLSGEPYTAYIGIDWASAKHDICLQLAGSEDRAFDRITHTPEAIETWAQGLYQRFGGPIAVALELSEGPIVSALQKYDFLVLFPIDPKRLAKYREAFVPSGAKDDPTDAEFAMDYLMHHPEKLKALKPESVQMRKLRYLVEARDRIRGDQSRCVNRLIQALKQYYPQAVDWFNDHNTLVFCDFLKQWPTLAKARRARKAKLERFFKEHNVRFARLIEGRVAAIKAATPLTHDEAVIEAHRLQVEILVEQLRLTIKAMKCFDEEIAAIAAQFPDYELLYTALPGAGKVIAPRLLAAFGEDRDRYNCAAQLQKRSGIAPITKRSGNSTWVHWRFQCPKFLRQTFIDYAAQTINKSAWAGAYYRQQRDKGASHHVAVRALAYKWIRVLYRCWQDRTPYDESKYLEALRRRGSPLLKQLAEAA

SEQ ID NO: 244597 - protein, 339 aa, unidentified
MVIVQLNIKFMKRIFVGIDISKDWMDYAVCSDKQVGASNSERIANTVEGITSMFKSLLKKHDKSDLWFCFEHTGNYGLLLSSLLQSERFCYTAVPAIEIKKSIGISRGKNDYIDAKRIAGYAATHSHKLKESKLPSKELLEVKNLLAYRAQLTKIKSQLINSSKSYRVAQQVVDINYISEDLEEKISGLVKSIKEVEKKIETVISSNKELANNYVLIGSVKGIGLVVTAFILVYTNNFTTFDNPRKFNCFTGIAPFEHSSGMNKGISKTSHYRHKYLKSLLFNCANSAAQYDPQLKKYYERKKKEGKKHLCIMNAIACKLIARVFATVKRQSPYVIFVQ

SEQ ID NO: 244598 - protein, 384 aa, unidentified
MNKHSMIFIGLDTHKEFHEVAYCEEQRGAVPVHYGRIPSSKVSVKKLLRQFESKYPGATLHVVYEAGPCGYWIYRLITSLGHCCYVVAPSLIPKKPGERIKTDRRDALKLVRSLKSEDLTPIYVPEPEDEAVRDLSRAREPAMKDLKEAKYQLKALLLRNNIRYEGTANWSKKHLRWLTEMILPHPAQQIVLQEQLQTIEERIRRLERLDNELTHHVHQWRYYPVIKAVQAMRGIRLLVAVGVVAELGDLHRFDHPRKLMAYLGLVPSEHSTGGKRHLGAITKCGNSRARRLLIEGAHSYRYPAKVSTELQLRQEGLPKDILDIAWKAQLRLCKRYQRMSKKGKHYNLIITAIAREMAAYIWAIAKEVVLTPVNPKLRLSRVPA

SEQ ID NO: 244599 - protein, 352 aa, unidentified
MKDVETVYIGIDLHSKTSTVGYMNQQGKYLGQHRIQTTAMNLINQVVSIPGQVKKLTLEQSNMAFWAAEQLQHHVDELIVCDPRKNALISQGENKNDSFDTLALCTLLRLNNLTEVWRPKELGVRRLFFHQVKEYHRLIKLMTIQKRQLQAGLSHWGISKKATRAVYGDPNELLSDIDNPLLREEFAEKIEVIGYLNQRKERQLNRLIDTGKQFPEIKEFLKIPGIGPVGSHTFSGYIQTPHRFRRASQLIKFCKLAVRQFTSDGKRVRSERLSKAGHGQLKNLAHIAWKSSLSSDNEVSRFYRDVLVRSGNEVHARLTTQRKILITMWALWKNKEPYNSKKITYNDGDSTR

SEQ ID NO: 244600 - protein, 342 aa, unidentified
MQITTIGLDIAKNVFQVHGIDSAEKVIVRKRLRRSQVLVFFKALPPCLIGMEACATAHYWARELTKLGHEVRLMPAKDVKAYVKRNKNDAADAEAICEAVRRPTMRFVRVKSAEQQGQLMQHRTRDLVMRQRTQLINALRAHLAELGIVAAKGDKGVKELLTIVADEKDTRLPIDARASVIVLAAQLQAVQALIGSIEKRIKAQHRSNEASKRLETIPGIGIIGATAIAATVADPTVFRSGRDFAAWIGLVPRQDSTGGKQKLGPISKQGDRYVRRILVVGAHSVLRRAKENPEKYPWLTQLLARRPFKVVAVALANKMARMAWALLAHGGTYRAPELAEAA

SEQ ID NO: 244601 - protein, 433 aa, unidentified
MKKQNPLNQKLEAITFQTLIVGIDIAKNLQWARFTNYRGIEQDKAMRFENNKKGFESILAKIYEICKKENFEKAVIGMEPTGHYWKTFANFLIKQKGITVVLVNPYHTKKAKELDDNSQTKSDKKDALTIARLVKDGRYFETYLPHDIYAELRVLTTTRFSMNKRKSAIENTITAVMDEYFPEFITVFKHPFKGKASTQILRSCPIPKFIKELGVEGILAEFKKVVKKTVGYKKAQQLLEAAKESIGVDYGEFSANLKIRQLMEELDLISKQLGEVEIEMQKALEKTGLSEYLLSIKGIGVASLAMCLGEIGDPLRFDDARQISKLAGYNLVEDSSGKNRSGTCISKRGRKNLRCVLYQMALTTVAVNPEIKQFYGYLKTRKNNPLKKMQALVVISKKILTIIFTLAKKKVHYQPENVFGIVRKNQMKELLAA

SEQ ID NO: 244602 - protein, 433 aa, unidentified
MKKNRLQVGIDFSMKKADFCLLHPDGEPLERHRSFSNTVSGYSKARRFLLEAIQEHSYEGIDISGEATNYYWFPFFRMLAQDHELTDEILDIYLLNPRWVKWFKKSLPQDNKTDADDPYYIAERTRQKHPSYTWELQEEWMVLRFYTRLRFRLANLLGSEKNYFQTFLFLRSSAYKSSKCFSDVFGATSRQILTEKPVLEELDTLSTEDLTAHLHELSGHHLENPQNNAQKLKKALRESFPLGETLTPPVQRILDLTLENIQFIENQIAQVNELIEIEVRTHHPEVLALATIPGVGSVFSAGIAAEIGGLQRYFDPPKYDKKRNRYRSRNLRDVEDAVAKMAGLWWPRSSSGGFESEDRHMVKSSNHYLRYYLIQAANVMRRHIPEYSRYYARKYRESSKHKHKRALVLTTRKSVGLIVGLLHRNEAYRPKET

SEQ ID NO: 244603 - protein, 338 aa, unidentified
MKLYAGIDLHSSNNYISIIDEEDQRLFQKRFPNNLEIILPALEPFKESLEGVVVESTFNWYWLVDALQDHGYKVHLANPAAIKQYEGMKVIDDKYDAFWLAHLKRLDLLPEGYIYPKEERQVRDLLRRRLLFVRHRTSHILSLKSSISRNLGVSMSVGEIKKLECKDTEKLFDDAYLALAAKNSISLIRFLTGRVKEVEKEVLFHVKVRPEFRSLLTMPGIGKILALTIMLEVGDIKRFPTVGDYSSYCRCVKSERSSNKKKKGEGNRKNGNKYLAWAYVEAANFAVRSYPDFQSFYNRKKSKRNGIVAIKALSNKLARGSYYVIRDKVPYEASKMFR

SEQ ID NO: 244604 - protein, 361 aa, unidentified
MRPSVSWICATCLRSSPNSRLGRFKAEPAFTRMGIPTVHSDSNANCWVGIDVSKDWIDVVVLVEENRVEQFRCERSAGALAGLAKTLLPYGPQGIVLEATGGLEGVVIAALAGAGLRVMRMNPKRVRDFAGAHGLLAKTDALDAYVLALFGTRMRPPLRAWPESERLQLAAWVAREQQLIVERATERTRLQQASEPALRKSVERVIALLGKEIARLEKQLTAWVAASETWSEQAALLRTAPGVGGKTALRLLAQLPELGHVNRRQIAALVGVAPFAADSGKWRGRRSIRGGRAGVRAILYLASWSAVRAAGALHQFYRRLVDAGKPKQVALIAVARKLLLALNEMMRSGQPWRSANVAIPA

SEQ ID NO: 244605 - protein, 335 aa, unidentified
MQSYGIDLAKEKFDVSFFDLTSKKVSNQPSHKVVKNNFKSIGRFLETLPSDAVLVAEHTGVYGDTLLKCCMDSNVKIAFVGGYVIHRYRATPDRAKTDVLDCALLRDFGERYPDKLKYKKFPEEALYELRQLARHREMLVEQRKQLITADKSEDCRPIRSLAVKRSMDRIKEMLDTEIAETEKEMLKVINGHESIRHNYELVKSVDGVGLITAVELLVKTENFTKITTARQYAAYAGTAPYEKSSGKMDKGAHISKIGNRRSKTLLYICAESARLHNKEIKLYYERRTLIDKKPRHYVLNAIANKLLRIIFTLVEKGEYYDANFIRQDPRVVKYN

SEQ ID NO: 244606 - protein, 346 aa, unidentified
MREVCRIGLDIAKLNFQVHGVDKRGKEVFNKKLRRAEVLPFFANLPSCLVGLEACGGAHYWAREIVGLDAGHTVRLISPRHVKPFIINNKTDAADARAICEVVGRPATRLVNVKTVEQQDMMAWHRIRERKVKERTALVNQIRAFLGEQGIVIAQGITHVRKLLPTLIEDLDNKLSMSARDYLSELYTELVDYDALINKYESRIVAFAKANEACRRLQKIPGIGPLTATAIVAHVGDAKYFKNGRALAAYLGLTPREHSSGGKQKLLGITKRGNSYLRWLLIQGARIVLRYGLLQPEEAVSPRLQWLRGLFGRRGRHIAAVALANKTARIIWALLSSGEAYQPSTA

SEQ ID NO: 244607 - protein, 375 aa, unidentified
MQKSSTIDIDPVIYLAIELSASTWLVVSKIPTSEKTGLHRMEAGDSQALLALIADLRKKVAAKLGVEASVMSCFEAGRDGFWLHRLLSEHGVINHVVEPTSILVNRRARRAKTDRLDAQGLLRILAAHAKGDHDVCSVVRVPTIEEEDAKRQHREREHLVQERVRIENRIAALLTTQGVRKRPSLRSWQKDMEDMRTGDGHPIPPLLRAEVNRLRRRLVMTLEMIREVEAEREQALQTQDDTAGRTIQALRRIRGIGDNFAAVLTREVFYRSFENRRASYLGLTPTPFQSGGMDRDRRISRAGNARARKTLIQLAWLWLRYQPDSNLTCWFRERVGNLQGRTRRIAIVAMARKLLIAIWRYATDGIVPEGAQISI

SEQ ID NO: 244608 - protein, 381 aa, unidentified
MEKYTKFVGLDVHKKTVAVAIADSKSPEVRSYGEIPNTVDSLRRLAKKLSEDGAELQFVYEAGPCGYGVHRRLQEEGHRCQIVAPSLIPRKAGDRVKTDRRDAQVLARLHRAGELTPVWVPGTEQEAMRDLSRLREDLKTEERHLKQRLLAFLLRHDVKAPDDKTRWGGPFMTWLEGRTFENATSQIVYQSYLESVKDAGERIEEVEKEIARALETYSLAPVVMGLRALRGVDVVTAFTIVAEIGDMTRFETASRLMAYLGLTPSERSSGEKTRRGGISKTGNSHVRRVLIESAWHCQRKPGIGKNLKERMNGQSPEVRKIAWEAQKRLFHRYHRLTAKGKRPTVVTTALARELAGFAWAIGCHVMGKPVSLPVETESMSA

SEQ ID NO: 244609 - protein, 320 aa, unidentified
MRNTVGLDISKLTFDATAIVGKTEHSAKFDNDSKGLDQFSDRLKSLGCQNLHICMEATGNYYEEVADYFAQYYSVYVVNPLKISKYAESRFKRTKTGKQDAKLIAQYCRSAQESELVKRQKPTDEQYRLLRMTAAYAQIKSECAAMKNRHHAAKDEEAAKAYAQIIKAMNEQLEVLKEKIKEQTEKPNCKEGVKRLETIPAIGRMTAAVLFHHLTSSKFETSNKFAAFAGLSPQQKESGTSVRGKGKLTKFGNRKLRAVLFMPAMVAYRIRAFPDFIKRLEEKKKPKKVIIAALMRKLAVIAYHVHKKGGDYDPSRYKSA

SEQ ID NO: 244610 - protein, 365 aa, unidentified
MNNAYNTAIGLDVGDRKTQVCVMAKDGKSPKIVMEMAIPTTKEGLAKFLSTQDRSTPVAFETGTHCRWMNEVAQELGFKTYVANPCRLRMITESKTKNDVNDARMLARLALLDPGLLHPVKLRGPEHQKMLNLHGARNLAVKQRTEAIVQLRAMAKSMGFRIAKCQAASFHNLDRRAWPEAFRCIAWPMLKNLEQLAITIKTYEKQIRELAETPTFKAQVERLREIHYVGLYVATGFIAATGGDMDRFEKPRDVGPWLGITPKQDQSGDVDRQCHITKAGSPFMRRLLVESAQMILRDGAVDTDLKAKGLRICARGAKIAKRKAVTAVARALAVLMVAMLKKPDAPYVPLSERCEKELLAMRAST

SEQ ID NO: 244611 - protein, 395 aa, unidentified
MGRIWAGVDAGKTHHHCVVIDEDGKRLLSRRVPNDEPELLELMSDVLDLGGATWAVDLADGAAALLIGILASHDQPLLYISGRKVNRASDGYRGEGKTDARDAAVIADQARIRRDLLPLRPSDEISVELKLLTARRADLVHDRTRAINRLRAALTGIFPALERALDLTNDGPLILLSGYQTPAGLRHLGRARLEVWLKTRKVRGAAQLAQAAVDAAARQHTTLPGEAMAAELIETMAREVMTLNERIKDADKLIEGRFHRHEKAEVITSLPGIGVILGAEFLAATGGDMDAFGTPDRLAGFAGLAPAARDSGRIHGNLHRPQRYHRGLQRVFYTSALISIQKHPESRVFYDRKRREGKRHTQAVLALARRRVNVLWALLRDNRTFQATPPVLKAA

SEQ ID NO: 244612 - protein, 415 aa, unidentified
MTERGDEQMVRDDEPARFIGLDIHHRYVVAVGVDRKQQVILHPRRVDFEHFEDWIRKELGPGDAVALEASCNTWHVHDQLAKVAGWVVVAHAGKVRQIAETRVKTDARDALVLARLLVARMLPEVWVPPDEVRELRSLVSHRQRLVAQRTMARNRLHAVLMRRNLVPPAGEIFSQGRRSWWDDLDLPATEKLLVRQDLGLLDSLHPFITEAETELVRQSQLEPWADQVAFLIQLPGVGVLTAMVLLSAIGDIQRFASPRKLVGYSGLGASVHQSGQVNHTGRITKQGRRELRACMTEAAWVAVDTSEHWRDVFERLAERLGRPKAIVAIARKLLVAVWHVLTEHVADRHARPEQVARKFLAWSWKLRKANRRGLTTAEFIRRELQRLHLGDDLTEVTRGKKRMRLAPVEVTAQTA

SEQ ID NO: 244613 - protein, 346 aa, unidentified
MDHCGLDVHKNETQICTITEAGELLEKRIKTTRERFRDVFEGRPRLKILLEASTESEWVARYLETFGHEVIVADPNYAPMYVQRSRRIKTDRRDAQALAEACRLGVYRPAHRTSDAQRHIRALLSARDALVRTRVRWIMTIRPLLRSEGLRVRTGATETFGDRVRALDLPDHVQCEIAPLLALLPALNEQIRMLDQQLVEMSRTQQESRRLTTAPGVGPVTALSFVATLDRIQRFRGAHQVESYLGLVPREWSSSETQRRGPITKSGNSRTRWLLVQAAHCIRRYSKQPQAAGLREWADRIAQRRGRAVATVALARKLAGILYAMWRDGVDFDASKLCSPGVRPAA

SEQ ID NO: 244614 - protein, 397 aa, unidentified
MNSEHPPRGVWVGIDAGKGFHWACVLDASGEILLSRRVENDEADLVALIDEVLSLAEELVWAVDQPGGGAALLLALLWERDQKVVYLPGLAVDRARDAYRGESKTDERDAHIIADQARMRGDLGELTPGEGDLAELQLLLARRRDLVTDQTRSISRLRDALLSLFPALERALDLNSKGALTLVARYQTPAAIRGVGHKRLVAYLRKRGVKGANALAGKALTAAKAQSVALPAQEVAARICAELAGEVFALKEGIAKLDGELEKRFFARPEARILASLPGMGPVLGSEFLVSVGDLSAFSSADQLAAYAGLVPAARDSGKRVGNDHRMRGGNKVLKRVFYQSAFASLRSSPESRAFYDRKRREGKKHTQALIALARRRVNVLWAMLRDGATFEARSAA

SEQ ID NO: 244615 - protein, 372 aa, unidentified
MNYNTVYVGMDVHKESFSLCAYTIEAEKASHYQRTEADYKKVLNYLEFLRTIYGDDANFICGYEAGCFGYTLYHQLTANNVKCIILAPTTMLEQRSKKRIKTDRRDAEIIAKCLAQHNYSPVHIPTAKDEETKEFLRMRDDHKLALKKVKQQILAFCLRHNYRYDGKSHWTAAHLKWLKALTPEALYKEILDEYLLTYQTLSDKIERLDKRIEELATQDEYKEAVKKLCCFIGVKTHTALSVLVEVGDFKRSASAQHFASYLGLVPGEDSSGDDQNRLGITKAGNRHVRLLLTEASQCYARGQVGFKSKELKSRQSGNTPAVIAYADKANERLRRRYYKMVLNKYKKHNVAKTAIARELACFMWGMMTDNIA

SEQ ID NO: 244616 - protein, 310 aa, unidentified
MGIVNAAIDVGKHQLDVALGSGGERLTEPNEPRAIARLCKRLAAAGCARVLIEGGSYQNLLVGALRAAELPVVIVNPRRVRQFAQSMGRLAKTDALDARVLALYGERLQPPVRELPDEQTRALRELWVRREQLIEMLVMEENRLEHASKALHRSLRAHIDYLRKQIKQADDDLDRAVRNSPMWDKYELLSSVPGVGPVLSVALLADLPELGRLNRREIAALAGVAPFNQDSGTLHGQRRIAGGRPRLRRVLYAASVAAARCNPLLRPFYLRLRAAGKKPKVAQVAVMRKLLTILNLMLKTSTAWRPPCPA

SEQ ID NO: 244617 - protein, 361 aa, unidentified
MKRALKDNQEAFTGQDFYIGIDVHQKQWTISVQSNQMALAKPLTVDPSAGSLSRYLQRQYPGGKYHAVYEAGYSGFWPARDLFTHEIDTIVVNPADIPTMHKERSTKTDSVDSRKLARSLENKELRAIYIPERKAEEYRLLNRYRSQLVRDETRIKNRIKAILAEFNYRVPVELEGNRWSGAYLQWLQKVNFETPYAQIAYNERLEQLAESRKRLAKVLRELKLMATQEPSIGSLVKLLQTVPGVGFLTAILFVVELIDMHRFKRFDELVSYIGLAPSVHQSDERSYSGGLTKRQHHELRSRLLESAWIAVRKDPVLTLKYGQLCKRMNKNKAIIRIAKMLVSRIRTVWKTQTPYVYGVIE

SEQ ID NO: 244618 - protein, 448 aa, unidentified
MAKPKKRRHRKLDRSLPEMRPNAGGIDMGATEIFAAVPADRDSESVRSFPSFTQDLHELADWLQRCRVDTVAMESTGVYWIPLFQILEEVHLVNAQHVHHVPGRKSDVLDCQWLQYLHSVGLLKASFRPEHAVCEIRSLMRHRQNLVEMACVHVQHMHKSLDQMNLQIHHVISDITGVTGLAIVDAIIAGITNPKELAKLRDHRIKASIETVTKSLVGDYRPEHIFTLKQSLTAYRYYQQLIADCDQEIQQRIQAFDTKDDGPTAAAALDSSNSTTATPSSFDLHSHLERIFGVDLTRIPGFECLRIQTIFSELGADLSKFPTDDGFCSWLNLCPKDGSSAGRRIRGPKVKTKNRVAQAFRLAAQSLHHSQSYLGDYYRSQRARHGAVKATKNTAHKLARIFYHLVTTRQPYDETVFAKLEARSHKRRLHKLQSLAKQMGYSLVEANA

SEQ ID NO: 244619 - protein, 461 aa, unidentified
MRNNRKSGDSPGSTRPIEGLPIVRAKVAGIDIGSERHWVCAPGLEGSGREVADFGATTPELVQMAEWLKERKIESVAMESTGVYWIAPHEVLEKNFEVLLVDTRQLARVPGRNKKTDPSDCEWIQRLHSCGLLNGSFRPQEQVCMLRTLVRDKAILVAESADWVRRMQKSLDQMNVRVHRAVSELNGVTGMAIVRAIAAGERDAQKLAQLRDRRCRQSEQEIAEQLSGHWREDHLFSLRQSLKMYDAITERITAYEQEILKKLATMEIEESPGGVVPPVKNLEKGKAIKKRGQEPMRQALYRMSGVDVTQIDAIGVDTVEVVLSEYGPDLSRFPTEKQFVSHATLAPRVRKSGGKPLKHKKRNSASTRVAAALRMAALSLRHSETALGAYYRRLARRIAGDVAVFATARKLATLIYRLLRWGQPYVDEGAEAFEKRYRQQHIKGLAARAKQLGYQLMPTTT

SEQ ID NO: 244620 - protein, 341 aa, unidentified
MTSPLPESILGIDIAKTKVDVQLRWVASSQKPTHRIYDNSPAGHERLLAWLATQQVGHLHACLEATGTYGDALALCMHQAGYTVSIVNPLRIKKYGESELSRVKTDQSDAGLIARFCLTQHPDPWTPPPVERRQLQDLVRSLQDLQHLHQQQVNRQQSGPHGEAVAAATTAVLSCLQTQIATVRTHIEQHILAHKTLKSEYELLLSICGIGPTTAAFLLGELGDLSRFSHVRDLVAYVGLCPQLHRSGTSVHEPSPLSKRGHAPVRKALYFPAMSAARFNPAIKAFYQRLLARGKPKMVALAAAMRKLVHVIYGVLRSGQPFDPAHVSVRPVRPAASREGQ

SEQ ID NO: 244621 - protein, 417 aa, unidentified
MERLYETCCGIDIHKQTAVACLITTGPRGQRARETRTFATTTGALGELRDWLRAAGCTHVAIESTGVYWKPAFNVLEEHCTVIVVNAAHIKQVPGRKTDVADARWIADLLQHGLLRASFIPSRAQRELRDLTRTRTSLIDERSASVNRVQKVLEDANIKVAGAGVVTDIMGKSGRDILAALLAGTLSPAAMAELARGRMRSKREALEKALQGRMSDHHRMLIALHLEHIDLLDEQIERLSAEIAARLRPYEAELLRLETIPGVGRHIAEILAAEMGLNMEQFPSAGHLASWAGMCPGNHESAGKRKKGPLRKGNTALRRALNEAAQAAARTKKPGRTYLRGQYRRLVVRCGKKKAAVAVGHTILRIAYHLLKEKETYREGVLVQLDERRRARVQQRAVDQLRALGYEVTIIPKEPAA

SEQ ID NO: 244622 - protein, 394 aa, unidentified
MPYFAGIDIAKRAHQMVVVDERGQAVGKPLTIANTRDGFTQCVDTLRALPETVQVALEATGPYWLALYEHLTSAGFQVHVFNPLQVHAYRKTGVRITKTDRRDAFWIANFLRIGGSAATPSPNQHLLQVRELTRFRWNLIDQIGDNKRRVLNVLDRIFPEYETLFSDVFLTSSRTLLKQAASADELAAFDLRELTALLHSSSRGRFGVTKAQQVLDAAKNSIGIAFLADAAQLEVGCLIAQIEFLQRQVEQVDLAIEALLTQLPQHLTTIVGIGPVTAATILGEIGDIHRFDTLEKLVGYTGIDARVYQSGQFTASEMHMSKRGSPYLRRAVWLAANIARQHDPELQAYYERKRAEGKHHNTVIGALCRKLLARIFVVLKEQRPYQVRTGGATA

SEQ ID NO: 244623 - protein, 349 aa, unidentified
MKIIGCDFHPSYQQIAMLDPGTGEMVEKALSHERKEEVRAFYAGLEGSARVGIEASGQSQWFERMLAELGHEVWIGDAAKIRASCERKQKTDRRDAELLLRLLAEDRFPRIWVPTAVERDARQLLLHRHKLVRMRTQMKNQLQAQALNQGVQRKRKLWSEAGRKQLESLPLLPWASRRRAELLQLLDQLEASISELDRAVAEQASARPAARRLMTHPGVGPVTALAFTLTMGPAERFQRGKQVASYLGLIPSEHSSGGRQQRLGHISKQGNPFLRGLLVEAAQSAVRYEPEMRRAYQRLAQRKCRALAKVAMARKLAVRLYWMLRLQVNYAQLIQGSHAGQPGTFCGRG

SEQ ID NO: 244624 - protein, 477 aa, unidentified
MVARTGLNRKQRKELARRLRAQDPGLEIVHPHAAGIDVGNSSHYVAVRPDRDPDSVRRFDCFTADLQRLADWLQHCGVTTVAMQSTGVYWIPLYEILDARGFEVYLVNARHTKNLPGRKSDVQESQWLLKLHTYGLLRNSFHPSAEIRVVRTYWRQRGDHVHAVSTCIQRMQKVLTQMNIQLANVISDLSGWTGQRIVRAILAGERDPETLAALSHPGIHATRQTIARSLEGTWQPDLVFVLHQEVAMYDAYLQRIAECDAELERHLKTVADKRADTAPAAKPSPMTPPGSRRSGPKRRRKAGSHAPQFDLGGELQRISGVDLTRIDGIDVGVAQTVISEVGFDMTRWKTEAHFASWLGLCPDNRITGGKVIRKGTRHVVNRAATALRLGATSLLRSQSYLGAQYRRLRGKLGAPKAITAMAHKLARLVYRMLKWGHEYVDKGLQYYEERHREQQVHLLQRKAAKLGLLIVEPMAAD

SEQ ID NO: 244625 - protein, 397 aa, unidentified
MTKKHTQTTLDVSIEYAVIGLDLAKYDVSLAAVTLNEGDVDLDCRVTYAELYEIADKLSPTLFAVEPCNGYSQLNLELEARGHEMRVISGKAVKMWIDTHMSGQKTDINDALALARLTADPDLRPIRAKSLEECRIMTVQGVRQQLVGQRTKTIVSFKGFAQAWGIGIPAGRRNLKKMREAVEAKAELMGAAAVSALTTMLDRVKTLDDQIHQLDKDLEALVSANANGRLLKSVMGVGTQIAGRFITVVGNVKRFDKPRSLVAYIGCVPKNFITGHVNKPRQKKSSAPDLRSKGQGRISLRGDKLLRSLLMQGAACIYMQYCKRQLPDCQLTKWIDKQLAMRKPYGKIMVSLAAKLIRIAWAVLFYGEKFDIHRAGVPRSVLAAMAGQSSNEDAAAA

SEQ ID NO: 244626 - protein, 419 aa, unidentified
MAFKILRRNCCGLDVHKTWIFACIGITDANGRTEYKQARFSSFSNGLRELAGWLTKHSCADVCMESTGKYWIPVFNILEKTCWVTLAHPKYTKPQKGNKTDRKDAKWICDLYMCDMVKPSFIPPADIRQLRDLMRYRTKLTNMLTSEKNRALNCLTVSNLKLDDVFSNVFGKSSRSIVQHILEHPGEQFDVAPFLDRRCKHSVEDVQAAVDGAMSREQAAKLRECLLHIDQLNGHRETIETEILRLAQPYSHQLELLRTVPGFSAAPLTAVALISEIGVDMSVFPSAKHLASWAGCCPRNDQSNNKVKSTRISRAGCYLKPLLVQIANAVIKSDKYPECKERYRRIKSRRGHKKAIIAICRMLLTAIWNVLSKLEPYSAKGYLEDKLTEHSVVISKSQGLELLRKRGYIFKDEVSADSG

SEQ ID NO: 244627 - protein, 438 aa, unidentified
MEILYPCVGGIDVHKKQVTVTARTPDPRRGTRWETTRTFRTFYGELLAMASWLVTERGVTHVSMESTGPYWWPVYSALREVGGPEVVIEVVNAAHVKAVPGRKTDVKDSQWLAQLMEVGLLRGSFLPPEQVRAMRDFTRYQTKLTEERSREKQRLLKVLEAAGIKLDNVASDTFGVSGRSMLVALVAGERDPQVLAGLARGVLRNKTEDLRLALAGRFTAHHGQMVELHLARIDHLDQMLAQVTDKIGHIGDDPNTGLVAPFTAQIELLMTIPGIGERVASVVVSEIGVDMARFPTAKHLAAWAGLAPGNNESAGKRRSGRRRKGNTHLCSILIEAALAASRTRTRIGARYHRLHRRFGGRPNPGAGKKAAFAVAHTLIKVIWNVLATGQPYTDLGHDFYTRRINPETHTKKLIAQLEALSGKKIIFIDDNGGEPPPA

SEQ ID NO: 244628 - protein, 536 aa, unidentified
MLLATIAGRGKQDTDAPLVLNMFVSPSVSMVPGRVRKSLVRPRRFSRLMAIPLRRVPALSHDRGRLPAMAFPLTKETAMPRGRRRTTRVATLPILTPHAAGIDIGATEIYACVPLDRDPQPIRRFGTFTEELRALASWLAQCRVTSVAMESTGVYWIPLYQILESQGFEVCLVNARHVKNVPGRKTDVQDCQWLQYLHTVGLLRGSFRPPETICAIRALLRHRDRLVRLAAVHTQHMQKALNQMNLQLHHVLSDITGVTGLAILDAILAGERDPHVLAQHRDRRIKASRETIAKALVGDYRSEHLFTLRQSLASYRHYQALIAECDAQVQARLAAFDSAIDPAVHPLPPATTSHRKPQGNAPRFDLRAELYRILGIDLTQVDGLNTSTVYSLFSELGADLAPFPSSKHFASWLGLCPDNRISGGKILSVQTRHVKHRVAQALRLAAQSLYRSHSALGAYFRRMRAKLGAPKAITATAHKLARILYHLLTTREPYAESRLAQAEVEHRRRMEIRLRTQARALGFQLVPTPQPVGEVS

SEQ ID NO: 244629 - protein, 311 aa, unidentified
MNTFIGIDVAKEFFDLYDLAEDRHQRFEHTEAGTSACLEYLRQRCPALIVMESTGGYETALAVALFEAGLPVAVVNPKRIRDFARATGQLAKTDEIDARVIARYAATLQPPPQGVWDAQTRTIKALVARRNQLIAMKVAENNRREHIGDPAVGRSITAVIKTLTQEITKVERKLQDQITRTPELQQKADQLTSVPGIGDTTARMLIAEMPELGHLNRRQIAALIGTAPINRDSGKFRGKRMTGGGRRDVRARLFLPTLSAIRCNPAIRPFYQRLLASGKTKMTANVACMRKLITILNAMLAKNQYWEPKYA

SEQ ID NO: 244630 - protein, 361 aa, unidentified
MKKVSRELTKMEAGVATPEMTVGLDLGDRYSHYCLLNSDGEVVEEGRLQSTEAALRRHFEGEDCLRIALECGTHSPWVSRLLNALGHQVIVANARKIPAITGSESKNDRNDAEKLARFAAFDPKLLSPLEHRSEERQVDLNLIHARSTLVRARTMIVNALRGLVKSAGGRLPACSTEFLPARALAAIPLALSAVASPLVEQIVLLNAQIDGMDKQIEKLSAKYPEIVLLRTAPGVGPIVAAAYVLTLGQPDAASNRSAGAFLGLRPAQSQSGAADPQRRISKTGDSFLRSLLVQSAQYVLGSFGPDSELRRWGLKLAATGGKRGKKRAIIAVARKLAVVLHALWRSGQRFQPFPQQAAVAA

SEQ ID NO: 244631 - protein, 341 aa, unidentified
MGEYIGLDVSMKDTAIAVRCDGKRVWRGKCASDPEAIARMIRKHAREPERVIFETGPLSVWFYHALQAEGLPAICVDARHAKAALDMAANKTDANDADGLAHLAEVGFYREVRVKGFDSMLTRTLVAARTKLVRIKTEISNQIRGLMKTFGLVVPAGKGSTFDANVCAKLGESSDLAGIILPLLEAWRSVRMRAAELTRRLIGDARQSEACQLLMSIPGVGVVTATAFATAVEDPANFRTSRSVGAWLGLTTRRYQSGQVDYNGHISRRGDHQVRNLLYEAACVILTRSSAESTLRDWGLKLRERVGFKRAAVAVARKLSVVMHAMLKSGELFDKTAGAPA

SEQ ID NO: 244632 - protein, 349 aa, unidentified
MIIIGVDFHPGFQQIALVDSESGEFQEKRLAHREEAESFYRALAGTGEKVRVGMEASGYARWFERLLTELQIELWIGDASEIERKRARKQKTDREDAQHILQLMVKGDFPKIWVASWENRDLRQLLWHRHRMVQARTRVMNQLQAVARNEGLHCKKRLWRGSGRQQLESFQLGPWASRRRRDLLQLLDRLNPTIEELSQAIEKEAEKCPEAQRLMTHPGVGALTALGFVLILGNAERFECGKQVASYLGLVPLEKSSGKRRRLGHITKQGSSILRFLLVEAAQATVRKNPEWRSKYFHLALRRGRNIAKVAMARRLAIRLYWMWREGQEYQQTRSFGSHTGQPGNPYGV

SEQ ID NO: 244633 - protein, 341 aa, unidentified
MTDITRLAIDTSKSVFTLHGVDVAGRAILRRNLRRRELLSFCERLPPVEVALEACGGSHYWGRVLLALGHRVRLIPPQYVKPFVKRSKNDRNDAEAISVAAAQPSIGSVPVKSAEQQAAAMLLSVRELLVRQRTQLANAMRGHAAEMGVVAPLGEKGLSELQAEVAAADEAAVPAAAKQAIALLGRQAERLEVRRAAIDATLMQQHKTNPVSRRLAAIPGIGPIGALSFALRVDPGQFASARHFAAWLGLVPRECSTAGKQRLGGISRAGDERLRQLLVLGATAVIQHAKPGRPATSPWLLNLLSRKPRKLAAVALANKMARIVWAMMASGDSYRPRPAAA

SEQ ID NO: 244634 - protein, 354 aa, unidentified
MTDIKYVAFDVHQATISAAVLDLSGKLITQAVFQTDASAIRDFLRGFSGTVHLTFEEGTQAQWLFDLARPLVAELIVCNPRENHSMKRGNKSDRKDALQLATLLRAGLLKSVYHGAQQTATLKHLAHNYDALTEDTTRTMNRLKAVFRSQAIKCAGRDVYYTRNRQAWLARLKAEGLQQRAAFLYRQLDHLRELRREARKALLKEARQHHAFKLLCEVPGLGPIRVAQIIAAIGSPHRFRTKRQLWAYCGFGVITRSSADYQVSGDKLERRHKSTQTRGLNQSFSRRLKAAFKGAALEALKTEAVKKIYERLTSSGIRAEMARLTIARKLAAVALAIWKSGEGYDETKMSKLAA

SEQ ID NO: 244635 - protein, 427 aa, unidentified
MAYRVAAADVHKKMIAVVVTDISVEGEYEFERRKFGATPDQLHLLAQWLGQQEVEEVVMESTAQYWKPVWGALERYWKPGRQKREGATQMSGTLHLCQAKSNRGRRGRKSDFVDCERMVKRLVAQELVLSFVPDPEQRLWRTVTRRKYQLTRDKVRFQNQLEALLEEMHIKLSSFVSDLLGLSARRMVKALADGETDPAVLAALADRRLRATPEQLRDALGACTQLHGVYRRLLKMALEELRVMEEQIEQLDREASGLLQPHQDAVLRVAEVPGFGVGSAIQMIAEVGPKAATFETAKALSSWVGVIPGDNETAGEQQSTRSPKGNKNMRRLLNQAAHAAIKVKGSIFEVTFRRLLPRMEYQEAIWAIAHRLCRLLWLILHKGVRYEERGPAVSAKSQRTRAARMIKELQKLGYRVEGGPLPAGTPA

SEQ ID NO: 244636 - protein, 346 aa, unidentified
MEHYVGLDVSLKLTAICIVDRTGKIQREGVVHSDPEAIAAFIKSNAPHVARIGLETGATSTWLWTELNKMGLPVICIDARHAKAALKMQINKSDRNDAVGIARIMQCGWYKEVRVKDLDSHAVKALLVSRALLVKIKRDLENQVRGLLKNLGLVIGPAKMNAFALRAAELTEDRPELAAAVAPLLNARAAIELQIADLDRKVMKLARSNAQVRQFMTAPGIGPVTALCFLATIDDPGRFKRSRSVGAYVGLTTRRYASGEIDWTGRISKCGDKMLRSYLYEAANVLLTRVAKWSALKAWGIRLAKRSGLRKAKVAVARKLAVILHRMWTDGTEFKWSSKEAAQQPA

SEQ ID NO: 244637 - protein, 341 aa, unidentified
MEKNTYFIGLDIACDDFVASVYESPGKPVITKEAIENNPDGFSMLVSWLKEQGINSSNSVICMEATGVYSEACAHYLSANGFKVSVEPPLKVKRAFDPIGHKTDAVDSRQIAEYAYRYNDELRFWQPKQEIVEKIKQLLTAREQFTKQSTAIQNSIKAYEKHVIKVPLSINAHQETLKELKKHIKAIDKELDRLIRQNPTISQITGQLKSIPGVGLLLASDLIAITGAFNDISGHKTLAAFLGICPYQHQSGKSVYRQPHMRNFGPNYARKLLMLAARSCATHNIEFRKYYMRKLAEGKAKQLVLNNISNKIIKIACALIKNNAQYNETYRSVNPLCFNLA

SEQ ID NO: 244638 - protein, 457 aa, unidentified
MPRKKAKSKSDRTLQMVHPNAAAIDVGATLLMAAVRADRTADPVRSFGTFTTDLHRLVDWFAECGVDTVAMESTSVYWIPIYELLDARGFAVFLVNARDAKHVPGRKTDVSDAQWLQRLHSYGLLRASFRPKGQFTQLRAYVRQRERLLEYAASHIQHMQKALTEMNLQLHHVVADITGATGLRIIRSILSGEHDPKTLACLRDYRCHASIETIEKALTGNYRAEHLFALEQALALYDAYHEKVSACDARIEAVLKDLSIGRGHATGALTPSRRRTDQVNGLAFDVRSALFAVLGKDITKIDGFGPYLSLKLVAECGDDLSAWPSAKHFTSWLGLAPNNKISGGKVLSARTRRSGSRSAALLRLAAVTVGRTDTALGAFYRRLSARIGKAKAVTATARKIAVLFYNAVRHGMEYVDPGASFYETRYRKRVVDNLHRRAKAFGFVLQPLEPTPDGAVS

SEQ ID NO: 244639 - protein, 371 aa, unidentified
MSVYVGIDVHRKRSQVAVIDAKGEVLANRNVPNGAEPILKVIGGLPPGTPAAFEACYGTSWLVQLLEDYGFDPHLVHPSRCKAIASARLKNDKVDAAILGQLLRADLLPEAWIAPPPVRALRALLRHRVHLVRLRTRLRNRIHAIVADYGYDRPAGGYWTGPGRAWLATLELPVVSRELVEDYLGLIGGLQARIDRLDWEVRQRARSDPRVKVLTQLPGVGPFTALVILAEVGDISRFASARKLASWAGLTPTVRGSDRVAHYGHIWKGRLGMAALGAVRGSADRQALPGVRARLPAHRQTAGEEDRHHRHRPQAGHPRLAPAHRRRARRSLPTRHAPGSGAVTPPGGVAWPRVSSKINLSRAPARARRID

SEQ ID NO: 244640 - protein, 368 aa, unidentified
MNTVKFIGLDVHKKTITIAIADAGRQNKPRVYGAIANDLDAVDKFCRKMVSTASRLYFVYEAGPCGYGLYRHLTAKGFDCMVAAPSLIPKKSGDRVKTDRRDAAKLAQLHRAGELTAVYVPDPQDEAMRDLSRARYDAVNATQKAKQRLKAFLLRNTIVYSGRSAWSKAYFRWLADISMAYPAQQVTLQEYIDAVHEGLQRVQRLTDQIRQLVPGWRLAPVVSALQAARGVSVVVAVTLLSELGDLSRFQRPSQLMAHLGLVPSEHSSGQSTKRGGITKTGNRHARRVLVEAAWAYRMPARVSRLLLKRQQGVPEQVCRIAWKAQLRLCTRYRRLVARGKLKKKVVTAIARELSAFLWAMAKQVQPTL

SEQ ID NO: 244641 - protein, 345 aa, unidentified
MELHTIGIDLGKTVFHLVGVNLRGEVVVRKKFSRKQLLHFTANLRVKLIGMEACGGAHFLGRALQEQGHEVRLMPAQYVKPYVKTNKSDYIDAEAIAEAVGRPRMRFVPIKTDDQLDLQSLHRVRERWVARRTAVINQIRGLLLERGITLRKGRCHVDAALPGILEDASAKLSGALRVLLAQLRLELAHLETRINEADAVINKTAGENEACRRLVAIPGIGPVTATAIVAAIGNGAAFRKGREFAAWLGVVPREYSTGGKQKLLGISKRGNSYLRRLFVQGARAVLQQSAKQSSGLSAWLAQLTSRTHRNVAGVALANKLARMAWAVLAKNEKYRPPMLAGAATA

SEQ ID NO: 244642 - protein, 367 aa, unidentified
MKKVSTAAVKATKNFSQPKLTIGLDLGDRSSWYCLLDEVGEVLQEQKLSTTPKAMREAFGAMPRCRIALETGTHSPWVSRLLSELGHEVIVAHARSVRLIGESRKKDDRLDARTLARLVRIDPQLLCPVKHRSAKAQADLTVIRARAGLVRARTGLVNTARGLAKSYGERLRGCNVRNMNPEKAEGLSPELQRALQPLLAGIESLSERIRECNEGIEKLAQESYPQVALLKQIKGVGTLIALTYMLTLEDPHRFRKSRDVGCYVGLQPGRRNSGQSEPQMHISKEGDPYLRTLLVQGAHHILGPFGADSDLRRWGLKLAERGGKNGKKRAVIATARKLAVLLHRLWVSGEVYEPLHNSHQTAMPTAA

SEQ ID NO: 244643 - protein, 362 aa, unidentified
MNNHIFVGIDLGDKNSVARIAEDLEKGERFGFVNTRAGRCRLFDEVKRRAERAGGATIVMAYEASSCGFVLCDQARSAGIDCRVLAPTKMEKSVEQKRNKNDDRDADDVLEKLRGHVLAGNRLPTIWVPDLEIRDDREVLRTRLALSERRTQVKTQIQMLLKRHGLEKPSDLGSTGSKQYRVWLESLCEWETIGWGTRQSLASLLRQLKGIEGEMENLDKLVGQLGSQVRHQPIVAALMKEKGVGLLTALVYRTEIGKADRFHRGRHVGKFVGLTPTSHESGQQSDRKGHISRQGPPRLRKVLCQASWVHVRHDPDSRQMYQKLVAKNPKKKKIALVAVMRRLAVRLWHRMREAESVQQTQS

SEQ ID NO: 244644 - protein, 270 aa, unidentified
MTFRPHALHLKAELFVKSSRVHVRDDGFTRCNFHLKFFIMVYRGIDISKSSFVAAYPSTNGNPTKTFPNTTAGMRELIGTLAVAEHHCVMEATSNYGCCCTCYIRTVLPSVLPPPQKKQIKHFSRMMMPVTKTDEKDAYMIAMYGEKMNPPIYKMPSQATIRILTTEGFTYFDNAKQLSRFIGICPTYQQSRTSVNIREHINRNDDERLRSLLYIAFWTALRYNSRECYIRLKANEKPFKVALIAVTNKLVRPVLTITTINSIYRWICPG

SEQ ID NO: 244645 - protein, 408 aa, unidentified
MQVTFGIDVSKSNSTVCELIGESKNELTITNDRPGFIQLLHELAAFSKHPQIIFEATGVYSRRLQAFLEDYGYEYVVLNPLKAKKEMNMGLRYNKTDKTDAYHLALIQRLYRHPVNQSESQTYKQLNALSRFYDQLTSDLVIAKNRLHQALQSTFPEIENLFSSAKGKNYWQIVVRYPHCDLVRREDKKQLINWLMSLKGIAFKHALRTADKLIELAYQAYPVVSCSSIEVEQVQYYAHRLLNLSNQRQRIITKMVKLAKTLPNHDLENLESIPGFAQTTAVRVLAELGDLRRFSNPNKINAFIGIDPGRYQSGEMDSNLSITKHGNAVARKLLYRAIGQIDNAAKTNPCHIADYYESKKLSSQTKGFKKIAIASIHKLIRTIYALIINDQPYDYNVATHNQKDFSRN

SEQ ID NO: 244646 - protein, 421 aa, unidentified
MAYKVAAIDIHKRVLMVVVATAASEIADAAGEALEFECRRFGTGNAERMHVVSWLRERGATEVVMESTAQYWKPVWLDLEPHFAKLQLAQAQSNRAPKGRKNDFRDAKRLARRLLAGELMLSFVPDPEQRAWRTVTRSKCQLVRERAQLQNQLEALLEEMRIKLSSVVSNLLGVSGRRILTALSQGESDPVNLADLGEASLKCGKEKLADALRGSPTPIQLAILKLFLDRLELLDKQIEELDKLVAKELKKHEAAVIRVAEIPGFGTDSAQQMIAEVGVDADAFASADEFSSWVGVCPGSNVSAEENQSSKSPKGNRYVRRLLSQAAHAAVKTKGCHFQAVFRRFLPKLGYNGAIWVVAHRLAGVLWIVLHRGVRYIEKGSETTPKAKKRRAQKLAQALRALGYSVTLTPILSQPLMEANG

SEQ ID NO: 244647 - protein, 332 aa, unidentified
MHLDERPLPQHHFGGDAMASIGEKRVTIGVDPHPGSHTATAVSHLGEVLGSITVGSDAEGCQRLRRWAERHSHRCWAIEGAGNRFVAPLVAELLNDGEQVYAIPPSMTAQYRSRRGRKKDDNVDAENAAKALLANPGISKYLPTRYEQRLKELTRSYQRLSHQLKASRMAAKTINDSLVSQVTLNVVGALEDALTTLKREIEKTVKKVAPDLLEILGVGPIVASVVLAEAGRVTRFANRDHFVAFAGCAPIRWESGAHQTVRVNPGGNRRLNWAAHIIVISRLRIDKNTKAYRDRKLAEGKTQRQVIRLLKTYACRELYRNLIRRQLPTLTT

SEQ ID NO: 244648 - protein, 519 aa, unidentified
MQNLFKTVWILISRIRQEFWLGEEVPLYSGAPETMIGESCKDIPYRILKVESFARNSASFFKVESMKTKKQKDFEQMPVVNFRAAGIDVGSKSHFAAIGQGKEDVREFGSYTNNLHELCGWLKAASITTVALESTGSYWRPLFILLQAYDLNPILVNGKYTKNVQGKKTDVLDCQWIQKLHTMGLLEGSFIPDLFTETLRQYCRHRNYLVENASDYINKMQRALRVTNIRLDMAVTDIAGKSGKDIIEAIIAGERDPEKLASLANIQVKKSREEIILALTGDWRDEYVFELRHCYEVYCYFHLKISECDEQIENLLNTRIEANEKADGEARANYTNKFKIKGKNKPKINLPKLSFQLTGGIDLCEIEGVKSGTIMAILSETGIDLKAFPTAKHFVSWLRLAPNNRVSGGKVISHRTPKGKNLLAEALRRAANSVGLAKKGSLSEFFKRINHKKGRLVAITATARKLAVIIYNMLTKKQPYQPQDQTDYLNKIRMNQIRSMQRRINQLNVLPHELLFVTS

SEQ ID NO: 244649 - protein, 340 aa, unidentified
MSFIGIDVAKATLGYACRPRGEADTVPNDDQGIRALVERLHTHSPTLIVLEATGGYEAAVVAALATADLPVVVANPRQVRDFAKATGQLAKTDAIDARVLALFAERVRPAPRPLPDDAAQALDALLTRRRQLVEMLVAERNRLLVARPAVRRDLQQHIRYLERRLREADDDLHTAVKSSPVWRVKDDLLQSVPGVGRVVSLTLLAELPELGRLSHKEIAALVGVAPLARDSGTLRGKRLVYGGRAPVRAVLYMAALVAARRNPVIRALLRAPAGGGQTGQSRPHRLHAQTARHPQRDRPQRHAVAASSSARDDLIFKTVANDLRISSGRSSPRPHKPTVP

SEQ ID NO: 244650 - protein, 324 aa, unidentified
MTCVCQRQIVKTATVPAEPVQLAESLLRWFPGATLSSASEAGFSGFVLHRALTTAGITNLVVNPASVAVAANDRVKTDRRDAKKLAIDLADGRLRGISIPTEAEELARLLPRPRAQIVEHRATIALQIKAKLHQFGLIPPASRRLMSSRYLRELAAWALPAELHARLTLLADQWRFAPRQLLEVRRLLRAQATAQAELETVYRSAPGIGEVVARTLATELGDMSRFVNERALCSYTGLTPSEYASGASIRRGHISRQGASRLRHVLVETAWRALPRDPILQAIFDRIAATRGKQRAIVAIARRLIGRIRACCRHGTTYAVGTAG

SEQ ID NO: 244651 - protein, 332 aa, unidentified
MRDYRIGCDAHKRYSQVEVQDDRGHVVRQARVYHEAGAVHGFFAQFPEGTPVALESVGNWYWIAEEIEAAGCIPLLTQPAKAKVMMGHVNKTDKLDANGLATLLRIGSLPTVWLPPAEVRDERELPRTRVALCNMRTALKNRIHSTLAKYALSPEDGAELFSKKGQAWLAQPIARLPPETGRCLQQEVELLGSFNEQIQTLEARIREEIALTSSMQLLKTLPGVGDILAIVIDREVGTISRFPGSQNLSSYSGTTPRVSSSCGKTHLGHMRTESNQYLKWAFIEAGNVVAAHHAQPGWTQKHVSKIYLRTRNKKGHSIAVGAVARHLAESAF

SEQ ID NO: 244652 - protein, 343 aa, unidentified
MQAITTVGLDIAKSVFQVHAVDAKGNVVLRRQIKRRYVLAFFQKLPPCLVGIEACASAHHWSRQLQALGHTVRLMPPAYVTPYVKRHKNDAIDAEAICEAVTRPNMRFVATKTREQQSCLTLHRTRHLLIRQHTSVINAIRAHLAEFGIVAPVGRNGVDQLLGIVADASDKRLPELARACVAALGTQLGTLKAQILQFDRLIMAWHRSSEASRRLDEIPGVGPALATALVATVADPRAFRSGRNFSAWIGLVPKQHSSGGKNRLGSISKRGDRYLRFLFVAGALAVIRYAKIHGTKHRPWLTALLARRHTKVAAIALANKIARMTWAIMAKGEHYKEPVALAA

SEQ ID NO: 244653 - protein, 334 aa, unidentified
MHNSNSGAIFVGIDVSARDLAVALQASDQLEPVRAFANTAAGHQELRRYIVRVCVEASGNYSLDLCLALHAANGIELSVINPRLARRFAESLGTRSKTDQVDARVLCLYAQRMPPVPWQPPSRASLHLRSVTRAVEALTCMLVQEKACHHAAEASTALPRVVANELKRHQRYLEQRIQRLRREAVRIISSDADLARRFRLLQTTPGVAETSALQLLGELAVLPSTLDARQWVAHSGLDPRHHRSGTNVEWTPRLSKVGNRRLRRALYMPALVAVRHDPHLRGFYQRLCANGKAPLQALAAVMRKLLHAFHAMLRLDQPYDGARLCPDVALRVHQ

SEQ ID NO: 244654 - protein, 389 aa, unidentified
MLCVGIDVAKRKHDCCIIDSDALKTVESFTFPNSREGFDMLLSKISELGIPKDKIRVGLEATGHYSSNLAHFISEHDLPLNIFNPLLTNRYKQGFSLRKTKTDKVDACAIAQMIVSGKASQTYSPLLYHNEELKSLSRYRSQTIQKCSKLKISVSRLVTILFPELEGLTSSIHLASIYALLKAYPGHEQIAHCSMKRLTRLLSDASQGRFDKSKALEIHQAACRSIGTVSLSASMELVHAITDIEVLKQHVAEIDEKIKEMADQEESSIIDIPGIGYTLCASILGEIGDFKRFPDVDKLLAYAGMSPSKYESGGFHSNHNKMEKRGSPYLRKTLFVAARLVAQNVPKFKEYLEKKLSEHKPYKVALSHVAKKLIRLIYRLGVSRCPYLA

SEQ ID NO: 244655 - protein, 351 aa, unidentified
MASKPRRQRIIGGVDTHGDRHHAAVVLMNGRRLADAGFPATAAGYVDLLAWMRSFGRLHAVGVEGTGSYGAGLARYLRTKAVTVVEVDRPDRRQRRTKGKSDPLDAYAAAEAVLAGRATAVPKAGDGIVESIRALHLVRAGAVKARTACINEMKALVVTAPAALREQLPTRSAGRLADACAELPLSGDLADPTIGIAAALHRLAARYHALTAEITDADKQLAIAVKQARPDLLAIRGVGVETAAQLLSTCGDNPDRLQSEAAFAALCGVSPVPASSGKTTRHRLSRGGDRQTNRALYMIVITRMGHDARTRAYVARRTTQGLSTKDIIRCLKHYLAREIYKTLTRPQPPAK

SEQ ID NO: 244656 - protein, 375 aa, unidentified
MQKKVRFLGLDVHAETIAVAVAEQDGEVRSLGVIPNRAESVRKLIRKLCAGEHLRACYEAGPTGYVLYWQLTELGVECTVVAPTLIPVKAGDRVKTDRRDALKLARCHRAGELTAVWVPDASAEALRDLVRTREAAKQDQLRARHRLSKFLLRTGRRPVTCVKPWTAQYMAWVRQLRYEQAAQEWTRLDLLHEVEHMAERVKRLEDAIREAVKLAPAGMQEVIRGLQALRGIAEISAVTVVAELGQISRFENARQLMGYSGAVPSENSSGRRQQRGAITKTGNAHLRRIAIEAAWSYRLRPAVGPALRKRQEGVPEEIKEMAWKAQLRLHKRYARLAAAGKEQCKITTAVGRELLGFIWAIGVKTEAAASRAMAA

SEQ ID NO: 244657 - protein, 324 aa, unidentified
MTGIICGVDVSSASLVARMGRDGAQAVFPNTAEGIAALAAFCQAHQVEGVAMEATGGYEQQPFILLSAHGLPVAILNPRAVRRFAEGMGLTEKTDAIDAGLIAWFAEVKRSTPCPPPSPHQQHRRALVTRLRQLTQLRTAQRNQRRLITDPAVLAAIDELLTLVERQTRTIEEEIATLIAADPLRTQLDREFRSIKGVATRTVAPLMAEMPEIGTLSNKSIAKLAGLAPLARDSGKHQGKRQVRGGRAAVREILFVVASVAGRYEPDFIAFHQRLTVQSKPPKVVRIALAHKLLVRLNAKAREVRHHMKVLRTPPQPALSALRI

SEQ ID NO: 244658 - protein, 386 aa, unidentified
MSVLSHAAVSTQLNAIFVSLELSRSTWLVTSLSPGRGERISRHQVKGGDVPALLERFAQLQAKACERTGKRYPLVVIQEAGLDGFWIHRCLVREGIESHVVDAASIAASRRSRRAKTDKLDGEALVRTLLAYKRGEPRVCAMVAVPSVEDEDRRRVSRERRSLVVERIRHINRVKGLLFAQGVGDYEPLRINRRARLEELTTGDGRPLPRHVKREIERELDRLELVMRQIKEVERERDTMLEADTATEEAPAPASARLLQLRGIGPEFAGVLHAEGFFRSFSNRRQVACYAGLAPSPWQSGAMDREQGVSKAGNKRLRVTMIQVAWLWLRHQPTSELTRWYEERVQTNGGRARRVMIVALARKLLIALWQFSSAGVVPKGAVLKAA

SEQ ID NO: 244659 - protein, 429 aa, unidentified
MNYTQNEKIEQVTDTTLVIGVDVGSQLHYARAFDNRGKELTKRVLSFPNSIEGFNTFNRWVEKIRTENDKTDVMIGCEPTGHYWFALAKYVSDHQMTLVMVNPFSVKKIKELDDNSPKKTDIKDPKTIAKLVVDGRYSIPYMPEGIYAEIRDLVYSRDRIVKQHNISANRIQRWLAVHFPEYLGIYTRFDAASGLAVLEKAPLPKDIVALGIDGIRKIWHENRMRGRGVTEDRAKILVEAAHNSIGLDGGAGTRSELYMLLEEHRLWISQLEAVEKALEETTLKVDHVEKLLAIKGVGIITIAGFIAEIGDIRRFKSPKQIQKYAGLELVENSSGKHKGRSRISKRGRRKLRRILYQVMIPLLARNKEFREIYDYYVIRVKNPLKRRQAMVAVSCKLIRVFYAVLTKGVDYDRFKMMSDIHRDSELIAA

SEQ ID NO: 244660 - protein, 509 aa, unidentified
MNVSTKSSKNQPNEKKTEKISRAEIRRKQKIDAKQVKSKAKKTITGSVSKTHDPEFILQQADDILKNLKAHTWRDLETAGKFSKNDKLSFISDDMLIVGCDIGSETHYIRAIDTRGRELSKKHLAFSNNEEGFQMAKEWAVDLAARNEKKQIVLGLEPTGHYWFVLAAWMISNGISVVQVNPYAVKQTKELEDNSQLKDDTKDPKLIANLVKDGNYGMPYLPEGLYADLRRLSMFRDQLTEDRIRNINRLHREMKIYFPEYKDAFGKLDGAFSLELLKKAPFPKDILELGVDGIRAIWHEAKLRGRGYSKAAEIVRLAKESVGLKDGTGAAKEAVKWFAEKIIELSTQLFGIENRLHEKCFEIPHAKNIIEISGIGETILAGILAEMGDIDRFDDVKEIQKLSGMGLVACSSGKHKGKTKISHRGRKRLRYWLFQAAKSAVSHAEEFKKLHAYYTTRLSNPLKKMQSLIVIACKILRVIYTILKRGTQYDPEKMLKDIVFPKNQQVAAA

SEQ ID NO: 244661 - protein, 316 aa, unidentified
MNTPELFVGIDVSKTHLDLAARPEGRTLRQTNDPQGIAALIEYLQPLQPTLVVLEATGGLEVPLAAALAAAKVPVAIVNPRQARDFAKATGRLAKNDSIDAAVLAHFAQALRPPARPLPDQEQRSLQALLSRRRQLLEMLTMERNRLDRCSAAPVQNDLQAHIAWLTEHVAQTDKELQHAIQNSPVWRTKEDLLRSIPGIGPVASRTLLAALPELGKLRNREVAALAGLAPLDDDSGRHHGRRHVQGGRAAVRSVLYMAALSAGRFNPVLRDFKERLVRAGKSAKVVLTALARKLVVLANAVLRTERRWDPSFATT

SEQ ID NO: 244662 - protein, 544 aa, unidentified
MSRREAASYRRVSVSTVQYWIDGYRSAGDAERRDGSWAQDRPSTPHRQPGRVSEQMHDRVCEARERTDWGPRLLASELGLAHATVSRCLQRRGLSRLPKEPRDPGRRFEWPCPGDLLQRDTKRLARFTRPGHKVTGDRYRTSAERNAGVGWEFCHSIIDDHSRLAYTEIHADEQAATVTGFVERALAFFAGHGITARRLQTDNAWAYIHNRSLRELLTARGIQHRRIVPRRRGTWARGLDRERVWALEDCRHVSGGLERFLIARGERVVRVSTRLMAGSRRSSRARGKSDRIDAISVARAALAVDLQTLPTAALAGPELDLRLLVDHRERLVRVRVALNSTLQCNLHGLWPELGLPGGALFSVKWSSRIGRRLARADQTMRVRIARDELRRLRELTQTIKALEAEIAELVGRLAPQLVSEPGCGPLTAAKLVGEIAGAHRFSSDAKLARAAGIAPIQISSGKTNRHRLDRGANRQINAAIHRIAITRARCHPETRHYIARKHTEGKTTRDAIRCLKRHLTRRILPAPSATPTQTKTLTSSMSLT

SEQ ID NO: 244663 - protein, 465 aa, unidentified
MNHPQRPHRKQPASGPSLLERMNPNAAGVDCGSEAHYVAVPADRDAAPVRSFKTFTTELHRLADWLTACGVTTVAMESTGVYWIPLYEILEARGFDVVLVNARHVKNVPGRKTDVVDCQWIQELHSVGLLRGSFRPTAAIAALRAYLRHRETLVQSATTHVQRMQKALVQMNLQLSIVISDITGVTGLRMLRAIIAGETDPHALAQHRDYRCQASEAEITAAFTGHYRPEHAFVLQQNLELFDAYQRQLAACDTAIEAHVRTLVAQAPAPAGPLPAPRTRKKPRDNEPRFEIRTPLHQLTGVDLTQIDAIGPYSALRLLAEIGTDMSRWPTEKHFTSWLTLAPHNKISGGRLLSSRTLSSANRAAGILRMAAMSLGRTETALGAFYRRLAYRVGKAKAITATARKLAILVYRTLKEGLLYHDAGAAAYDAQHRTRVLRRLRQRAANLGFALVHRDTGEVLEGAVS

SEQ ID NO: 244664 - protein, 431 aa, unidentified
MNADGKLPSKEVLSPLEYEMSQRSKVCGVDVHKQFFVAALLSQSGGSTLKRFQSDKPGLLEFKEWLLNEHCELVALESTGIYWYSIYSTLEDHIEVIVANPYLIKNIPGRKTDIADAQWIAQLALNDLIKPSRIFPKKQREIRNLTRSREHLVNNRTMLKNRVHRVLESASIKLSSVLADIFGKSGLHIVQGLLAGTDLDTILASIPHEKVRAKEPELRNAIQRNLESSQILIINQCLSLIEQITRRIDELDVEIGAQMHDRENDLKIAMSMPGIGKVSAMTILAEIGNYEEFGTPEKLAAWSGLIPSIYQSADHLKTGPITKRGSPHLRRIMVEVAQAAVKTKNSRLRSFFLQLKLKKGYNKAIVAVARKILCILWTILRKRELYREENVPRKKVSIILKSSPSPRSIQEAIDILGRAGYMIQKLDSPGG

SEQ ID NO: 244665 - protein, 343 aa, unidentified
METYVGLDVSLKTTSVCVVDREGAVVKEGVVVSEPEAIAAFITAHAPGVKRVGLESGATSTWLWRELARRGLPAICIDARHASAALSMQVNKSDRNDAVGLARIMQTGWYRQVQVKSEDSHTIRALLASRALLINTKRTLENHLRGVLKNTGLVIGRAKGGTYSVRVRELLANEPELAAIVRPLLETRTMIDAQLLAMEKLVRGFVKAHRQVQAFMTVPGVGPITALAFMATIDDPTRFRRSRTVGAYCGLTTRRYASGEVDWRGRISKCGDSLLRSYLFEAASALLTRTERACALKTWGLKLAKRTCMKKAKTAVARKLAVLLHRMWCDGTEFRWDVGTARA

SEQ ID NO: 244666 - protein, 343 aa, unidentified
METTRHIGVDLHRNCFTACTRLENGRNYVTEWKLEQLPKFVNQLRPSDEVAVEMTGNTRLFHDAVAPHVKRVVAVNASQFQVITHSVKKTDPHDARNLALYLAKDLLPEVRMKDKARAQIASLTQTRDTLVKQRTALKNKINNLFSAQGLLLSKESLASEKGLKAVLEAQLDVLVELELKILVQQIRSLNHSIAELEETIRRESQKLDGHKNLTSIKGIGGLSAGILLSIIGDIGDFSEEGKLAAYFGIVPRISNSNATERSGRITKHGTKLGRTTLVQCALIAQRFSPYLKTYYERKKKSRGTGKAIIALARKFLGIIYRTLKYQWVFQDFPNFVLAEDATA

SEQ ID NO: 244667 - protein, 371 aa, unidentified
MEHTRFVGLDIHKERISIAVAESGRSGAVEYLGEISNDPVAIGKLCDRLGRSGKTLAFCYEAGPCGYGVHRQLTSLGHRCDVVAPSLIPAKPGDRVKTNRRDATMLARLHRAGELTPVWVPDADHEAMRDLIRLRSVVRQIVTRVRQHLQGFLLRHGRKHGRGTAWRMAYRRWLSTLAFEHPAQQIAFQDYTDAIMDAERRLKRVEEQISGLLPEWNLRPVVDALQAMRGIALINAVVLVAEVGDFTRFSNPRQLMAYFGLVPGERSSGETIRRGGITKTCNPHARRALVEGAWAYRMKARIGRHKVDRIEALPKIIRDIGWKAQVRLCTRYRRLRARGKTANVVNVAIAREMVGFIWSIACTIQSAPKTA

SEQ ID NO: 244668 - protein, 428 aa, unidentified
MDGQEHSRLEDFRQLKKEIRGSKEYLIVGIDVAKDRHHAFFGTATGTTLLKRLVFENTHEGFDKLLIQTEAVKVQHGLQKTVFGLEPTADYHKPLGEFLIKADHRVVLVSGVAVKRNRELLDGRWDKHDTKDSANVADLISQGKCLFYDHPPLPLRELRALVSLKRRLKKQEHGIKARIRNHLLAQYFPELDRYYRHWGSEGLAIVRWCLNPSVIAAMDYGQFTRFVAPQSRSLAQQERLKAIWTRAIDSIGCEAGEALGFEATVMVEELEHIRNAIRATEEKIEEICLQFPEYRYLLTIPGFGPDVSSKVLSAIGDPFRFTTGAQVLKMAGLDLSAERSGDRSDAARPVLSKKGKADLRYALYQAALIASTRNRSFVLYFTNKLRGREREKGIRIKMRVKLAAKLLIIAWTLMKRKEPFNPEYLTTE

SEQ ID NO: 244669 - protein, 315 aa, unidentified
MTSTQVFVGVDISKAQLDLALRPEGQFSVPNNEAGFAQVLEHLNAVHPTLVVLEATGGLELPLTGVLAAAGVPVVVVNPRQVRDFAKATGRLAKTDALDAQMLAHFAEVMRPEPRPLPDEQTQALAAILARRRQLVEMLTAEKNRLGTAGKPVRKSLRTHIAWLERELSHTDRGLAQTIRESPVWREKEALLRSTPGVGPVVTTTLLATLPELGTLTGKQIAALVGVAPLNRDSGTWRGKRTVWGGRAQIRAVLYMAALVAARCNPVIRACYQRLRAAGKAKKVVLTACMRKLLIVLNAMLKHRTPWRAELVQCA

SEQ ID NO: 244670 - protein, 371 aa, unidentified
MTSIIYIGMDIHKENYTMCSYSFAEDELMYKQTVAPDYRMILKYIERVRSKYPGGADVVCGYEAGCLGYTLYHQLKAHGVKCVILAPTTMGITNTNGIKTDKRDAGNIARCLAFRTYSAVHVPTAEDESVKEYIRMRDDQKKALKIVKQQILAFVLRQGYRFEAGKNYWTLKHVQWLKSLRMQGILQESLDEYLVAYDYLSNKIERLDKRIEELAASERYHERVKKLTCLIGVRSHTALATIVEVGDFNRFGRAEQLASYLGMVPGEVSSGGKQSRGSITKAGNSHIRRLLVEAAQGYTRGTVGHKSKDLKRRQNGNTPQIIAYADKANERLRRKFYRMTLKNGSNRNVAATAIAREIACFMWGLMTDHAV

SEQ ID NO: 244671 - protein, 387 aa, unidentified
MDPILECCCGIDVHRDMIEACIILGFENPEKLQQQFLTTPAELRRFNEWLAAADCRYVAMESTGVYWRPVYESIESYFGDDCFLLVANAHQMRNLPGRKSDVKDAEWIATLFQHGLLDPSFVPERTIRDLREFSRTYKNAVSERSRCINRLEKFLQTHGFKLSSVLSDITNDSGIRILTLLSEKGSLSVDDVEKARSRNTKHSATEIQSAVCGTLTANERFLLADFLEQYQVISHHIEKILNKMKSMVEPYQKLIEQMDSIVGIDITASILILAEIGDKPQAYFANSAKLCSWAGLSPRNDQSAGKIKSKKIMPGNPYLKSVLCQCARVAVRSRKNSFSVWYWSHRAKIGDKKSIVAVSRKMLALIYYLFVNDRFYDFDIAMNHLRI

SEQ ID NO: 244672 - protein, 341 aa, unidentified
MKVTTISIDLAKNVFQVMGFTSTGETVFNKRLNRTQLTHFMQMQPPCRVVMEACYSSHYWGRTCESMKHTVHLIPAQHVTPFVRGNKNDRNDTVAIYEASFRPHIRFVPIKTEAQQETLLLHRLRERLLSTRTAATNQLRGLLADFGIIFPLGKASFIEKMKTLSVDSTLPARLTWLVNDIFEEYKTLTLRIKTIEKTLKTDVEANALGQILLSIPGIGYLNASAFVASIGSGQAFASAKEFAVWLGITPKQFASGNKSVMGGISKRGDQYLRKQLIHGARAIISHAGKKNDALSLWITQLRARKTFNCTAVATAHKLARIMWTLLQKQCHYTPQMIKEAA

SEQ ID NO: 244673 - protein, 403 aa, unidentified
MNAVGIDVSKGKSMVAIMRPFGEIVSAPFEIKHTTSDINSLVELINSVEGDSRIVMEHTGRYYEVLAHQLSKANLFVSAINPKLIKDFDNDSLRKVKSDKADAVKIARYALDKWQNLKQYSVMDELRNQLKTMNRQFGFYMKHKTAMKNNLIGILDQTYPGVNTYFDSPARSDGSQKWVHFASTYWHVDCVRKMSLNAFIGHYQKWCKKKKYNFSRTKAEEIYGKAKELVPVLPKDEITKLIIKQAVDQLNSASMTVEELRALMNKAASKLPEYPIVMQMKGVGPSLGPQLMAEIGDVTRFTHKGAITAFAGVDPGVNESGSYEQKSVPTSKRGSADLRKTLFQVMDVLIKTMPQDDPVYKFLDKKRAQGKPYYVYMTAGANKFLRIYYGRMKKYLSSLPQSE

SEQ ID NO: 244674 - protein, 369 aa, unidentified
MKKVACRVQKVNGESLGLDVHQGMTAYCLLGRNGDEVESGRIGGGRKALEVLLDRVIGRKRSHVSLEASGGSLWVYDVLVERYGAERVHIAQARKVAAIANTREKNDANDAFWLAYLTREGRLPEAYIPQGAYRELRVATRERHRTVMAMATDLRVVKGHFRQMGVKPPVTHLNSERGATFVREMAKQTPGSRGLALRSAVRRLDTAASEVAEWNARIAELVNDLPEVKAIEDAIPGMGRVLAATVVAETGPIERFHSPRALAKYTGLTPSDRSTGGKLIHGGISREGNPSLRWALVQAVTICGRMRWGPGGAIRTWVESRQRRMGSKGKAKVAAAHKLAEAIWRLVHHPEGFDVARPFGAAPSNTQAA

SEQ ID NO: 244675 - protein, 411 aa, unidentified
MEILYRCCAGLDVHKKTLVACVRRIDAAGKAHQAVRTFGTMTCHLLALSDWLAEQGVEQVAMESTGVYWKPVFNILEGRLAVMLVNAQHIKQVPGRKTDVKDCAWIAQLLQHGLLRASFVPPPPLRELRDLTRQRAQLVAEKATAANRIQKVLEDANIKLASVATDVLGVSGRDMLEAIIAGEDDAEKLADLARKRLRNKIPALQTALRGRVTEHHRFQLRLLLDHVTHLEGLIGRLGGRIEAVMAPFAEAVERLTTIPGVEHRAAETVIAEIGTDMNQFPTAEHLASWAGMCPGNNESAGKRKSGKTTKGSRWLRQMLTQAAWAASHTKDTYLSARYRRLAARRGKKRALVALGHTLLVIMYHVLKNGGGYRELGADFLDRLEPEGQTRRLVKRLEALGHKVILQPTDAA

SEQ ID NO: 244676 - protein, 349 aa, unidentified
MKTYYVAMDVHSASIVIEVLNGAGKVVMESVVETGAERVRGFLKQLRGKVYVTFEEGTQANWLHDVVRPLVTEVVVCDPRHNKLLQSGNKNDRVDAKKLAELLRLGSLKAVYHGDNGVRTLKELVRTYDCLVSDTTRVMNRLKAIYRGRAIACAGHDIYRQDRRGPWLAKLREPGAKQRARFLYDQLAVLKPLRRKAKLAMVKEARRQTAYLWLMSVPKLGSVSVAQLIAVVGTPHRFRSKHQFWTYVGLAVVTRSTADHEVVNGVLRRSQRPVSTRGLNRNHNHLLKRVFKNAATSACHSGPFKAGYEVRVARGMAPSLARLTIARQLAATTLAIWKRGEQFDPERKK

SEQ ID NO: 244677 - protein, 438 aa, unidentified
MSNKVIFNLDELFISVGIDVGADFSWMSIALPNQQLLGKPYKILHSSMDSLATAVSKIKEAEELYSLESRIFLESTGIYHYPLFCYLRDKGFNCSVINPIITKNSTNINIRKVHNDRFDSKKAALVGLKPDLKVSLMPSDLALNCRNLCREYYDLMDNRSAYVNKLQGELRMAFPQYLGIFSKITANTSLTLLETYTSPSAFIEADPQEIIDTIKSTARFGVAYAASKYNAIIQAAHDANEFGYILDSNIKRIRLYISFIRKYDEEIKNILDAMHELIDANEETDFVKQIHLVETFKGAGFLSAVTLMGEIGNFSAFSKPKQLFAYFGLDPAVKQSGKFEGTKIQISKRGSAIARRAIHTLTLQSISTSRTGEAKNPVLRDYYLKKCESKPKLVAMGAVSHKVCNMIFAILRDNKPFEIITPQEHIQQYNAAKCDIAA

SEQ ID NO: 244678 - protein, 466 aa, unidentified
MPRHSPPRPVKPRPSRAVLEHLNPNAAGIDCGAAEHYAAVPPDRDATAVRSFRTFTGELHALADWLAGCGVTHVAMEATGVYWIPVLEILEARGFVVSLVNARHVKNVPGRKSDVSDCEWLRDRHTMGLLRGSFRPADAVVALRAYLRHRAGLVECAGEQVQRMQKALVQMNVQLPLVVSDITGATGQRILRDIVAGARDPRQLARHRDYRCHASEAEIVAALTGNYRPEHVFVLQQHLALFDMYQTQLAACDAAIAAHLATLVAHAPPREQPLPAPRARPKARENEPRVALREPLYELTGVDLSQIEGIGPYTALRLIAEIGTDMTRWPSAAHFTSWLTLAPRNKISGGRLLSSGTQPSANRAAALLRLAAMSVGRTQSALGAFYRRLAYRVGKAKAITATARKLAIVVYRVLKGELVYDDPGAAAYEAQQRTQALRRLRHRAAHLGFGLLDLSTGEVIATNAVS

SEQ ID NO: 244679 - protein, 316 aa, unidentified
MTDVRYVGIDVAKDSLVVASEPAGLKLALPNDPMGWAQLLESLRGQPVALIVLEATGGYERGMVAALLQEGWKVVVANPRQVRDFARGVGQLAKTDAIDAQVLAHFARVVQPQPRPRPAGQLDVLAELVLRRRQLTDLLTQESNRLPQASHRVVRQSVQKSLQALEKQIHKLDKLIRDHIESDDGLRHKDEIVQSVQGVGPATSAMLLARLPELGRLNRQEIAALVGVAPWDIKSGKWAGHSRIGGGRREVRNMLYMAALSAIRFNPVIRVFYQRLESQGKVFKVAITACMRKLLVILNTMVRNDSQWSPRTAKPA

SEQ ID NO: 244680 - protein, 368 aa, unidentified
MSKTEINRICVGVDLHKTQFTVCALDEGTGTVELEGEFRTNADGYEDFINRMHEIESESGSAIELAVESTGNARFFKNKMESEGFQVVVVNTNKFKVITMSTKKNDANDAATLAFYLSKEMLPESHLCDQTSEEIRRMLKTRSILVQATVKMKNQIHGMMLGYGIETKSAQLQSKKKRQELYQDLADHNFSEFTASSLKVILDSLDDLQKQIKTIEEQLQKMVEDNDNVELLKTMPGIGQIGAITIAAYTNDMSRFGGDFKRFASYLGIVPSVHDSNQTVRRGKITKHGPRELRTAFVQVAMGIIRQPQNTSEWKLMKDYYRMKKEKGSGRAIIALTRKVARIVFAMLNNQEEFNPALMIREEPKLTA

SEQ ID NO: 244681 - protein, 355 aa, unidentified
MNDSKYIGMDVHTATISAAVRDSSGNLVMEATIETKAETILEFVHGLRGSLRVSFEEGTCASWLHDLLKPQVTEVLVCDSRKNALLRVGNKNDREDARKLSELLFLNKLHAVYHGETGIRTLKELARSYLTISRDLTRVMNRLKAIYRGWGIACAGQQVYAPRYRAEWLAKIAEAGVRRRAEVYYQQFDVLAALRQEVRRELLAESRKHPAMRLLRQIPSIGPIRAALLIALMQTPHRFRTKRQLWAYCGLALRTYDSGEYRFVGGQLKRSKKAVTIRGLNKNHNHDLKNIFKGAATRAAATAGPFQKFYEARLASGMKPPMARLTLARKIAAITLLVWKKGVRFDAEQLKQQAA

SEQ ID NO: 244682 - protein, 393 aa, unidentified
MRVSVGVDIGKAEHWVCAIGPDGVVLLSRRVANRPAELAEVVEALRRLGGEVRAGLDVLGGIAGLASGMLAAGGIEVVHVTGVAVNRARAASVGGENKSDPRDARTIAEQVRLRSDLRRVEPRTELDLEIALLASRRSELTEAQTQRLSRLRDLLSSIFPGLEQELDVTLKGPLHLLSRYVTPEEIRAAGVKGLMRHMSKAGGPVRGQVLADKAVAAAIEQKIVLPGERMTAVLVRELAAEGLAARDRILQIDRHLEALLERHPDAALIRSLPGMGAALTAGFIAHAAPLTRFDSADALAAAAGLAPVLRQSGKSRWTRRARGGDHQLKSLMFLGAFCAVQHDPVSEAYYRRKRREGKGHRQAVIALARRRVNVIWAMLRDRTEYRPPTPLAA

SEQ ID NO: 244683 - protein, 349 aa, unidentified
MKIIGCDFHPGYQQIAMLDKNTGEVTEKRLTHSNEGEEAKKFYSELTGPVLVGLEASGQSQWFERCLAELGHELWIGDAAKIRASTERKQKTDRRDANLLLELLEQERFPCVWVPKPAERDVRQLLLHRAKLVRVRTQVKNQLQALALNQGVQRKRKLWTVAGRKQLESLPLLPWASRRRTDLLKLLDELGGSITALDSAVCQEASARPAVRRLMTHPGVGPMTALAFALTLGPAGRFRRGKQVASYFGLIPSEHSSGGKQRLGHISKQGSSFVRGLLVEAAQSAVRHEPQMRREYQRLAQRKCRALAKVAMARKLAVRLYWMLREEVDYAQLLQGSYAGQPESSRGRG

SEQ ID NO: 244684 - protein, 464 aa, unidentified
MSMTLGIDVACRAEHQATLAIDGQPVWRGRKFLTRTTELNRLWDDLALVDPAELTVVLEPTRNAWLVLAQWFRRRGVRVVMVPTTQSADLRKYYSKHTKNDRLDSEVLARLPLLHPEGLREFTGDSSADPLRRLTKQRSTLVKRRTAVYSRLDALLEILGPAWYDVLGSDYTKSGLAFLTRYADPHAVLRLGEARLTRFLQARSRGQYGPAPAKALVAAARETLALWGSEGMDFAELGADIAVEAEQAIFLSTQIKQIDERLANFYAEADPEGIVASAPGVGPVISAVIAGRIGNPHRFTSLAAIRAYSGLVPKVKQSGLGETRSGVTKAGDPLLREMLFIAADHARLVDPQLAAKYVRLMSGDRHRNSAVCHLATDLLTRIATCMRSGQPYVIRDVDGREITEAEGKTIVKTHYKIDPKRRDKAAHRRLRERHKQATGRESQKSLSAPTSRPVATSINPPRMA

SEQ ID NO: 244685 - protein, 350 aa, unidentified
MLIIGCDFHTRYQQIAMMDQATGELVERRLEHQSGEAHAFYRSLPKPVRVGIEATGTLHWFERLLAELGHELWIGDSAEIRARAVRQQKTDQRDAAHILNLLLTNRFPRIWVPSPAERDLRQLLWHRHKLVCMRTLVTNQLHALAMSQGLCRKQKLFTKKGRAELGSLALGPWASRRREELARMLDQLEPSIVELDRAVLNEAKRREDAVRLMTHPGIGPVNALAFVLTIGPVTRFRRSKQVASYLGLNPSEHSSGGKQRLGAISKQGNTMVRWLLVEAAQIAVRLDPELRQDFWRLKSRRGNAVAKVAIARKLAVRLYWMLRSGADYARLVRMQGSPGATLVNASSPLG

SEQ ID NO: 244686 - protein, 387 aa, unidentified
MYPPELSHAMKPLYIGLDVHKEKTSVAIARPGANGEITYHGSIATSLITLERSLRRIAKSHNRTMQDLRVTYEAGGCGMWIARRLAQLKVPCLVAAPSLIARPPGDPVKTDRKDAEMLARLLRSGDLTAVRVPDETDEAIRDLCRARVDAIDDLRRTRTRLLGMLRRLGHNYNGRTHWTQKHRNYLRELSLPFAAHRVILEEQLMQIDQHEERIARIEQNMLGLLDAWRHKDLVAALMGFKGFKHIAAMVIVSEIGDFTRFAHPRKLVKYLGLNCREYSTGSREIKMGITKCGNPHARWILVEEAVHYKPAPKVSRQLGNRQQGLPRWVKELSWKAQNRLHHRFKALASRRMQHNKIKVAVARELAMFIWELGVRMQSLETPQPTNA

SEQ ID NO: 244687 - protein, 344 aa, unidentified
MKITTIGIDLAKNVFQAHGVNEHGKTEKKKQLKRGQVAEFFANLPPCLIGMEACGSAHYWARKLEGFGHTVKLIAPQFVKPYVKTNKNDAADAEAICEAVARPNMRFVPIKNVEQQAVLSLHRVRQGFVKARTAQANQIRGLLGEFGIIIPQGITNIAKRVPELIEDASNDLPGSFRLLVQRLMDHLNELDKQLDELEAQIKAWHRESAASCKLEKIPGIGPITASALVASIGNAKNFDDGRQLAAWLGLVPKQHSTGGKSKLLGISKRGDSYLRTLLIHGARSVILSASKKLDKSRWLRKLMERRNPNVAAVALANKNARIVWALLANEREFRSDYTSALAVA

SEQ ID NO: 244688 - protein, 462 aa, unidentified
MVKSKKRKDKKILELLDGEGKRKKGPVMGVDVHKDVLAACIVSESRVLLETEFKNTKEGINKLISTCKKRKVKSVGMESTAQYHFKLMYGLADANVPFLVANPQQTKTTQGKKTDAIDAKRIAVAHRDGRLKPSVISPKEIMSLRKGMRALLKIIQDQTKIKQRLNQVFHQKDVKLGPVLKTKWGLQVLRRLFQEELTDLLDELLPKRKKEREFEKQLELFTKFKKSLDEIEQYNFGIDISRLYLLSILAEKQRIVYTVIARKNKEFLRQMRILLSIPGVDPDTAAIILAELVDVSYFKTPGKLAKWTGLAPRVYQSGHRKNITGKLHKGGNKFLRRACVLACQNIFAKGSVDNPIHAFMKAKKEGKGTYWLSLCAGARKLLTIIWYLLKSGSQWAVRTATKKIIQKVKVIARRKQKLLEGRLQKFKSLNEKLTREENTIINEMVQSMSMPDQILKVLLESV

SEQ ID NO: 244689 - protein, 478 aa, unidentified
MARKEQTQPHLKAVPMLLHESLYVGVDVGKQRHVAGFVSKTLLQRYERFEACPALAFEQSREGFRTLIDRIRELVPLEQAYLLLESTGHYHRALVQYLQELDVPVYIMPVQKRPVGLIKTDKRDALGLANQLYNQLELGVQLADKTHLVRRLLPASEAALQLKGWMRHRYELMHESTQRKNKLTAICDELFPELTWVLKDPNAVAALKLREHFPTPHAIATTPLTVLAQHRVSSHPSMEQLVELQRLASQTIGTKDVVRQRGLVLEQQQLIRELRMLQEHVQQLDVEIVKLVEQSREGQILTSMPGIGPIQAAAIMAAIGNVLNFENGATLKAYFGWAPKREQSGTSLDRDQLAHTGTRTMKQTMFLVVANAIQRKECEWAKLYERLVPRMCRYDERKRAYRGKLKVLVRIAGQMTEMIYALLKQDAEILSKVPPGQEPPPPILYDPELHQRHRNGEYRPLKNTPPHRKVLRLPERMT

SEQ ID NO: 244690 - protein, 391 aa, unidentified
MFYIGIDIAKHNHEVSIIDDNGKALGKSFSISNSQKGVDKFNTYLDSFNITSENCVIGMESTGHYWINLFSFLVNLKFNVFVINPIQSDAFRKMYIRKTKNDSKDSYIIAQIMRFGEYSSFNISDENIFALRQLSRYRTSLVDECSSWKRKIISILDQVFPEYSNLFSDTFGVTSKELLSKYPLPENMLELSTEELTNLLNKASKGRLGNEKAQEIKESAKNSFGVSFAKQTFSFQIKQIINQISFIESQLKELDNEISNMLKELNSEITTITGIGDVLGACILSEIGDISRFEKASQLVAFAGLDVAVKQSGEFTGTEMKITKRGSPYLRRAIWLAATVASFKDPALSIYYKSLIARGKKHLTAIGTVSRKMCNIIFSVLKNKKVYTPNI

SEQ ID NO: 244691 - protein, 422 aa, unidentified
MKRRGSAGLQVIFHRVCGLDVHKKVVVACLRILDPSGQVRTEIRRFGTMTRELREVLAWLKREHVTHVAMESTGVFWKPVYNILDGNGMEVWVINAQHLKKVPGRKTDVTDAEWIAQLLQCGLLRPSFVPDRTQRDLRDLTRQRTRLVQQRVTVTNRIHKVLEDANIKLAAVASDALGTSGRAMIAAIIGGQEDPDVLAELARRRLRGKIPELRLALEGKVTDHHRFLLGELLDQLDYVERKIATLTARIEQIAPPRFKQCTQLLDTIPGIAEPAAQAILAETGTDMGQFPSHKHFCSWGAQSPGNRESAGKRRSGKPAAGNKWLGAVLTEVAHAASHTKNTYLNAQYHRLTPRRGEKRAIGALKHSILTAIYFMVRDQVAYHDLGADHFTRINPDQQTRYYVRKLERLGHKVQLTPSNEAA

SEQ ID NO: 244692 - protein, 350 aa, unidentified
MRVVAGVDCHKKTHSIVFVDAVGTVLSKLTIPASEQGYAQAIEHANRFDEVEWGLEGTGLYGYGFANALLKAGVVVYEVPGAFTKRHRRHASRLGKSDVLDAQAIAEAVLRESGRLAKYEQFDEQEAVRLLYDRRDRLVRQRSEAINRARAIAIRLALGQLPIRLNSDVAAARILSRVKALRGSSYTVDALVDDIEEALSDVQRLNQTIKRLERGLRPFVARLVPELCDIRGVSTIVAAGLVGHSGNLMTCRSAAAFAMRAGAAPVPCSSGRHFDTVRLNLGGNRQLNRALHVVALTQIRTAGHVGRNYYERKRGEGKTHRGAIRALKRQLATVMFLRLRMARQRLEQPA

SEQ ID NO: 244693 - protein, 356 aa, unidentified
MNQIKECVVGGVDTHKDIHVAAVVNEFNQVISTESFPTTRYGYKKMLMWMSSFVRVSRVGIEFSGTYGLGLLRYMQSSGIDVLEVTAPDNSDRRRRGKDDTLDAENAAHAAFSKLRTVTPKTRDGMVESLRVLKSCRKSAVAARTVALQMIRTSIVSAPDELRETLRYMTRMSLIRTLASTRPDLTNYKDISTAYRITLKSLARRYIELHDEIADLDKMIATIVDTLAPELIKQNAVGYESAAQLLITLGDNPERLKSESSFAALCGVCPIPASSGKTNRHRLNRGGDRAANSALHIIAIGRLRTEDRSKSYIKKRTADGLSKMEALRCLKRYIARELYYLLKNRNTSINCVQITC

SEQ ID NO: 244694 - protein, 341 aa, unidentified
MGWTVAIGIDTHRDGHLAVALDRLGGGRGSLAFSADAKGYLSLWRWAQELGEPAFAIEGTGSYGAGVARFLVAAGTEVYECERPRRAERRRGKSDLIDATLAAGRLLQDSSLPKLRGGGVREDLRLLLLERRGAVRARTAALNQLQAVVVTAPEALRSRLRGLRGQQLTLVAARVRGAEGESAVIAGVLRRLARRVRALGQELNELDSELEAIVTRLVPELLAESGVGPVCAAQLLVSSGDPTRMASEASFAALAGTSPVQASSGLHQRHRLNRGGDRQLNRALHVIALNRVRWHPETAAYHQKQLASGKSPREARRCVKRMLARYFHHRLQIIPALDLTP

SEQ ID NO: 244695 - protein, 353 aa, unidentified
MYYVGADLHKEQTWFYIMDENGTKIDSKSISNSQDSLKSYFASIPTPFTLAVEATYNWYFFIDMAEQFAQTAYLANSYELKAFAKRHKKTDKIDARLIADILRKGFLPKVFIPHQSIRQLKELLHHRINLVRDRSRNIFRLKNTLDKLGADSSGDFTTIKQLRMIPVKTLPEYSQYALTGYIEQIIQLSQRIFKMKTYLKNELLEDKEIQNLITIDGLDYFSAALIKSEIIDINRFASFNRLCAYAGLAPKVSQSGDKAAYHGALMTNRRKNLQWILLETVFHFIRGSSKRMSGYEELKTRKGANTAKVIMARQMLKVIYHVLKEQRPYYSDDNAVRQENQIQSVAAAALHGV

SEQ ID NO: 244696 - protein, 309 aa, unidentified
MNCEKKIYCGIDVSKKHLDAFIDGQSVRYDNTLKGIRCLAQRVGDRHCVFESTGGYERLAAWTLLAGGKTVSIVNPGRVRDYAKSMGQLAKTDLIDAQMITRYAEAASPKANELPPEDQRTLSVLVDRRQQLIDMSLAESNRLETAGELTLRRLIEKHLKWLRKQLTEVEEQVAQLIKNNPEMAEKAGRIRSIKGLGPICAVTLLGHLPELGTLSRQEAAALAGLAPYNRDSGAFRGRRHICGGRKRLRACLYMAAVCAVQHNPVMKELYTRLVEENHRPKKVALTAVMRKLLIAANSAVKNPDFLVAA

SEQ ID NO: 244697 - protein, 344 aa, unidentified
MKIKLLGIDLAKNVFQLCALNQANKVLFNRTVRRAQLRSTIAKLEATIIAMEACSSAHYWGRSFEAMGHTVLLVPAQHVTPFVRGGKSDARDALAICEAAQRPNIHLVPIKTVEQQDIQLLHRLRQRQVQHSTALANQIRSLGREYGVIFPAGIKPLISHLPEALEDGSNELSPVARHALADQYQCLLDTRQAMGAFLLQIEQLAAQYPAYDDLQVLPGIGPMTASAYIAAIGNGRQFKRGRQVGAWLGLAPRQYGTGGELKLGGITKSGDRHLRTLMIHGARAVITRGLKTRPELAQWVQPIIDRQGFNKGVVALANKLARISWVIVSTGEPFDMKQAFKPAS

SEQ ID NO: 244698 - protein, 342 aa, unidentified
MEYYAGIDVSLECSSVCVVDASGKIIREGKVASEPDALISWLKSRGCELIRIGLEAGPLSQWLFAAIREAGLAVELLETRHVRKAFEAMPVKSDRNDARGIAQLMRLGWFRPVHCKSMGAQEVRAVLTARKLIQTKLQDVENSLRGILRGFGLKVGKTTDRSFSGRIQELVKGQPSLEAIGEALLSVRAGLLREFNAFEKRVRAMARLNARTRLLMSTPAVGPIVALTYASAIDDPARFKSSKQTGPHFGLTPKRYQSGETDYSGRISKVGDASVREALYQAAHVMLTKPVKGCPQLKSWAMRIARRAGMSKAKVALARKLAVILHRMLANGTPFNAAAAAA

SEQ ID NO: 244699 - protein, 403 aa, unidentified
MNAVGIDVSKGKSMVTILRPFGEIVSSPFEIKHTSSDILSLIKLIHSIEGESRIVMEHTGHYYEVLAQQFSAAGLFVSAVNPKLVKNFNNDSLRKVKSDKADSIKIARYALDKWQNLKPYSIVDELRTQLKAMNRQFHFYVKQKTAMKNNLINLIDQTYPNANTYFNSPPRSDGSQKWVDFVYTYWHVDYVRKMSLNSFVKHYQNWCKQKKYIFNKSKAEEIYTKATELVPVFPKNEITKRIIRQAIAQLNSTSATVETIRILMNETASKLPEYPIVMQFKGIGPSLGPQLMAEIGDITRFTHKGALTAFAGVDPGVNESGSYAQKSVPTSKRGSSNLRKTLFQVMDVLIKTMPQDDPVYQFMDRKRAQGKPYYVYMTAGANKFLKIYYGRVKEYLCILSESS

SEQ ID NO: 244700 - protein, 297 aa, unidentified
MDILHYLGVDFHPYQQTIAFVDKFGEIKTRCFYHTDKVSLRKFYQQFPTGSVVGVEASGSFQWFEKMLFELNFELKIGNPWLIRKMALSVHKSDQRDAEHILDLLITNRFPEVKQRSEKSQIILAWLNYRDSLVRQRTAIANQLQAMARSFGLARFQTKAKSAKARIVSSNTSDELLFLINSRFTMFENLTAEITSFEEKLHLEALLDERAKLLQTHSGIGDLTALCLVHTLGDVARFARKQQVTAFVGLAPVNHSSGEKIRIGHISKHGSRLLRFLLGQAAQSSNGRAIKNVLLSS

SEQ ID NO: 244701 - protein, 335 aa, unidentified
MLNSETGELVTRRLQHENGEAGAFYASLPAPAQVGIEATGYTQWFERLMAELNYELWVGDAAQIRARAVRRQKTDSRDAEHLLELLSTQRFPRLWIPSPEQRDLRQLLKHRHKLVTMVTTLKNQLHFLAMSQGLCRKSKLWSERGREELESLSLGPWARRRRQELLALLDQLQPQIAELDVAVAQAAAADPAAVDLMTQKGVGPVTALAFVLTLGPVERFQNSRQVVSYLGLNPREHSSGGRQRLGGISKQGNPLMRWLLVEAAQMAVRFDPELRRKYQRLKFRRGGSVAKVALARRLAVRLYWRLRQRKAETQPVRMPGSSGSAVVLPRAGSRH

SEQ ID NO: 244702 - protein, 433 aa, unidentified
MLLTPYNSIEPLVPKGVPMALKIVYQICCGIDVHKTFVVACISSTNKQGVTTYKRHRFSTFTQGLKELLQWLLDNHCKDVCMESTGKYWIPVYNVLENDCTIVLAHPKYVKAIRGKKTDKKDAKWIADLFKHDLVAGSFMPPADIRQLRDLMRYRYKLTCFMSSEKNRFQNCLTVSNIQLASVVSDTFGKSSQRILDKILENPHDTSFDIESLIHGSMKKKLPELELAIDGFITPEQAGKLKIIKKHFEDLESRKAELEELILALASPYQQELDLILTAPSFKNTFTAIGIISEIGVNMEAFPSAKHLCSWAGLTPTNNESAGKKKSVRVSKAGCYIKPLLVQCANSVVKSEKHPEIRNRYLRLRKRRGHKKAIIAIARMLLTALYNMLKNKEPYNSELYRKSDILPVNREITVEQAILMAQFQGYKIKSATE

SEQ ID NO: 244703 - protein, 348 aa, unidentified
MRSQNAVATVYGIDLGKTYFHVVGTDSTGKPVRRAKLTRNNIFEFFANVPVAIIGMEACPGSQWLARKLLALGHVVKIIPAQFVKPYVKSNKNDTIDAAAIAEAVTRPTMRFVPIKHTEQVDLQALHRSRDLSVSSRTRLISQMRAFCLEYGLPIRISPAAFKLAIPGIISDDTNDLTPAMRRLLESLWQDFRILDDRVAAVTAEIAAIANQSDLARRLETVPGIGPLTATAIVSAVGGGKQFRTARDLAAWLGLTPAQYSTGGKTTLLGISKRGNSYVRRLLIHGARSCVMHLDRTRDRLGAWLVGLESRMHANKVVVALANKLARIAWVILNKPGALYERRDPRFA

SEQ ID NO: 244704 - protein, 360 aa, unidentified
MVGTMTWAAMDVHARSTTAAALDVPTGVLTRIRFNTGAVEPVVEWLVGLPGSVRCCYEAGPTGFGLYRAAVAAGIDCQVIAPSKTPRPSGDRNKSDRRDTDLLLRQLMAGALTPVAVPSPTFEAARDLARAREQVRVDLMRCRHRLSKLLLRHGRVYDRTAWTQAHRKWLAAQSFKQPNSELAFVDNLAACDGLLARKQALDERLSHVAREQEFWPLVSRFRCFRGLDTLSALIVALEVGDFTRFARAVQLGSWLGLVPSREQSGEQDVHGSITKTGSKYARRILVEAAWHYARPPRIGQTLASRHDGQPDHILHTAWRAQHRLHRIHRRMRERRKPGNVINTACARELACFLWAAATAP

SEQ ID NO: 244705 - protein, 368 aa, unidentified
MKQALFAGIDLHSNNVMIGIVDQSGRRLKHQKLGCDLKEITSFLEPWKPQLKSVAVESTYNWYWLVDGLRALSYPTKLADPAQIEQYSGIKHADDKNDAFFLADLQRLNILPTGYIYDPALRPVRDLLRRRLGLVHQRSALLLSFKSLYARTTGQAMSLSRLKAMEPNDTKTLYRHPANCLIALLQKEHIDKLCQSIELIEKSVLVQARELPCYQKLLSLPGVGRVLGLTITMEVGEISRFKTPGQFASYCRTVNSQRLSNNKKKGDNNRKCGNKYLAWAFVEAANFAKQHHQHCRRWFDRKAARTSKVIATKALACKLAKAAWYLMSQGSDYDPERMCPEGAMKEEKLKFVRAAASQKIGVGKNPFD

SEQ ID NO: 244706 - protein, 344 aa, unidentified
MTTKLMAGIDLHSNNLFCAIVDLDGKRVFEKRLPCDLETVVRALKPFKKRLEKIAVESTYNWYWLVDGLQDHGYPVVLANPAAMQQYDGIKHADDKSDGFFLAEMLRLNILPTGNICERKVRPVRDLLRRRMGLVHKRTSLILSLKSLHTRMTGRDLSTGSIKALEPEDAKRLFEHPADQLITRLDLQLMEQLGQSIKAIEAMVLAQVKSLPDYQVLQTMPGVGKILGMTITLETVDPKRFASPGDYASYCRCVDSRRFSNGKKKGENNGKCGNKYLAWAFVEAANLAQRHDLGCRRFYDRKKAQVNGIVATKALACKLAKAAWHMMSGNSAYDTARIFPTDKK

SEQ ID NO: 244707 - protein, 341 aa, unidentified
MDHYAGIDVSLECSSVCVVEASGKIVREAKVASEPEALIGWFGSLGLKLARIGLEAGPLSQWLFAAMRQAGLTVELLETRHVRDAFKAMPVKSDRNDARGIAQLMRLGWFRPVHCKSMAAQEVRALLTARKLVQSKLHDMEMSLRGILRGFGLKVGVTTPRRFAGRIRELVAGHANLEVIATAMLAIRDVLLREFVAFEKRVRTMARQDARARLLMSAPGVGAIVSLTFASAIDDVSRFKSSKQVGPHFGLTPKKYQSGETDITGRISKIGDKGVRTALYEAAHIILTRPVKGSALKSWAMKLARRAGMQKAKVALARKLAVIMHRMLVDGTPFKFAAAAA

SEQ ID NO: 244708 - protein, 396 aa, unidentified
MPRIRAGVDIGKEHHHCVVLDAQGERLLSRRVLNDETALLELISDVLALSGETLWAVGINHGGAALLIGLLLGHDQPMVYITGLVVHQASTAYRGQGKTNEKDAFVIADQARMCKDLGLLRPSDEIAVDLRILTARRTDLVNDRTRQINRLRAQLIEIFPALERALNLIEKGPVVLLAGYRTPAAIRRSGASRIGTWLKNRKVKNAGALAKTVVGAAHSQHIALPGKKPAAAMVARLAKWVMALDAEIAELDALIEARFHEHPRAGVIRGLPGMGALLGAEFVAATGGGMAASGTPDRLTSFAGLAPVPRDSGRVSGNMRGPRRYHRGPLRAFCLSSMAGLRSYPASHSCYWRKRNEGRGNKQALLSLAHRRANALWAMIRDGACCRALPNVSTTA

SEQ ID NO: 244709 - protein, 359 aa, unidentified
MQTQSNKLNFTGQKIFVGMDTHKNSWKISIVHEELLLKTFVQPPEPETLANYLKRNYPGADYFTAYEASYCGYWIHYRLTELGINSIVINPADIPTTNKEHVQKEDKRDSRKIARCLRNGDLMPIYIPCKKTIQDRTLIRTRYTLVKEMKRFKNRVKSLLLFYGINIPDEHNSYSGHWPKRLITWLEKLNFEEKTATYSLNILIKQVKYLREMLLDVTRQIRELSKTIDYEQNINLLTSIPGIGLITAMLLVVELENVCRFKSLDQLCSYVGLIPSTNSSGDKEMIGEITSRGHSTLRSAIIESAWITAKNDPALLMTYSKLCKRMEPNKAIIRIAKKLLNRIRFVLKNNQVYVKAIIK

SEQ ID NO: 244710 - protein, 422 aa, unidentified
MLEEDRHTEEIIERVAALDIGKAEVMACVRVPHHDGTGRRLQEVKPYPTMTRSLLRLADRLSELGVTRVVMEATSDYWKPVYFLLEAHGFQTWLVNARDVKHLPGRPTTDKLDAVWLCKVAERQMIRPSFVPPPEIRRLRDMTRYRCDLVEARTAEKQRVEKLLEDAQIKLSVVASDIFGVSGREMMAALIAGQRDPQVLAQLARGRMRVKITQLEEAFTGYFTGHHGFLLTKMLARVDVLSADIAELKTRIEEMVAPFGTAPERLDEIPGLGMIGASVVLAEIGLDMTRFPTAGHLASWAKFAPGVKESAGKKKGTGSTGHGNRYLAKVLGEAAVAAGRTDTFLGERYRRIARRRGKKRAIVALGRTILVIIWHLLSDPNTRFTDLGSDFYDTRLDPERRKRAHIHQLEALGYKVTIEPAA

SEQ ID NO: 244711 - protein, 349 aa, unidentified
MEHIGIDVHKRDSQICLVAEGGELVEQRIRTEPERFAAVLGKRPRARILIEASTDSEWVARGLEALGHEVIVADPNFAPMYATRTRKVKTDRRDARALAEACLLGAYRPAHRLSDPQRHVRGRLGVRDALVRTRTRYISLIRALLRQHGYRVPSGSAEHFSQRVQRLPLPGRLLSVVAPLLAVMRPLNQQLAYSDATIEHLAVQDPRVPRLRSVPCVGPVTAAAFLAAIDDVGRFPHAHQLEAYLGLVPREYSSGETQHRGPITKAGHSRTRWLLIQAAVSILRRHPPEAEALRTWALRIAARRGKQVAVVALARRLAGILYALLRDGSVFEPQRVRPPRPTAPALVAI

SEQ ID NO: 244712 - protein, 392 aa, unidentified
MVYVGIDVAKDKHDCFIVNSDGEVLYDVFTIQNNMGGFEDLLFKIKTASKNPDKVKVGLEATGHYNCNLLGFLKSKGLPTIVINPLHTNAYRKSLSLRKTKTDKVDARAIASMIMSDVSLKPYSDTLYHNEDLKSLSRYRFGKVADRAKLRQSVSRLINILFPELEKLVSTIHAKAVYELLSEFPGAHQIASSNLKHLTSLLETASKGHFGRDKANEIREAARHSISTYLPAKSLELRHTIRLIRELTLEIGEIETEIKKIMDAIDSPILSVPGISYGIGSMIVSEIGDFSRFDSPDKILAYAGCSPTTYQSGQLYSSHSTMEKRGSKYLRWALMNAARYVCNWEPTFAAYLEKKRSEGKHYYVALSHAAKKLVRLLYHLETTGEKYKPISV

SEQ ID NO: 244713 - protein, 433 aa, unidentified
MLKLNYMSTLFVGIDVSSKTNAVYAMDFEENKYISSSFGNNQPGADKLVNMIAECMHKHKNLNTILIVLESTSVYSVHISNFLSTSEVLMPYKPYVFCVNPKATSNYRKSYIGMEKTDPTDAYLIADFGRVGRTKKLEPWRGGQFIALKRLTRHRMHLSECITREKTYMVSNLYLKFSELQLLEGDDKPFGSLYGATSSAVLTEFLSPQEIIDMPEEELLTFLAGKSRNRISDLSKTSELLRKAARDSYRLDKCMYEPLSISLASSFNCIHAYQKEIKLIEQAIEKCINGMNPNALLILQSIPGIGPIWASGILSEIGDITVFHSSDALAKYAGLYWPKGDSGDFTSEDNKMSKAGNPYLRCYLGEAANSVRKHIPEYADFYARKYAEVTKHQHKRALALTSRKLVRLVFGLLAKNQLYTGEKLDTEYNTWSN

SEQ ID NO: 244714 - protein, 280 aa, unidentified
MAVTIVEAAPTVVGGVDTHLDVHMAAALDGIGGLLGVEPFPATPAGYRMLLAWMGSFGAVARVGVEGTGAYGAGLSRFLRRQGVEVIEVDRSNRQARRQHGKSDPADAIEAARAAHNGRARGLAKSRDGNVEAIRALLVAKRSARAVRIKSVNQIRQLTFTAPDALRERMRGLGTVPLMVEAASLRPRPDAGTVVYSTKVALQTLGRRAVSVDAEAARIDELLGELVADTAPSLLDVFGVGVDTAATLLVAAGDNPQRLRSEAAWAHLCGVAPIPASSGR

SEQ ID NO: 244715 - protein, 337 aa, unidentified
MSYLGVDLHTNSFTVCYRTKQGKERMGTYAIDRMDSFRKTLRRTDHLAVEATGNTAWFIEQVRSRVRKVVPVDPNQFKVIRKSVKKTDKHDARMLALFLSKGMLPEARMKQKENAQLHSLATTRDKLVKQRTALVNKIHNVLNSYGLKWKKETLTTEKGLKSIMVYEWDPIVRIELEVLADQIRSLTKHIKRLDDDLVEHGRHLKGHENISSIKGIGDKSASILLSVIGNVKDFASEDKLAAYLGIVPRVKDSNETIRHGRITKHGSTLARTTLVQCALSAKRYSPYLRAYYERIKRTRGSGKAIIATARKLLGIIYKTLINGWVFEDFPNFVIAKT

SEQ ID NO: 244716 - protein, 352 aa, unidentified
MDKYVGLDGHSQTCTFAVMARSGKRLTSKVVETSERALVEAVRSIPGELHLCLEEGTQSAWLHEILSAHVAEIVVAVPEESRGPKDDLRDAWARADDLRTGRIRTRVYKAPKQLAGLRSAASAFRLGTRDVVRAKNRLKAVLRSRGILADTGVYDPSVRNKWLKQLPHGHRQLGEWLGRELDQLVPLREEAEQWLLKESRSHPIIRKLTTGPGMGPIRTTQLVAIVGTPHRFRTSRQFWSYCGLAIVRRSSSDWVRNKRGEWVRAEVHQTRGLTRKRHPVLKSIFKGAATTVIAQLPEDPLHAHYQRMLKSGIKPNLAKLTLARRIAAIELSMWKREEVYDPKRHPVVTDQE

SEQ ID NO: 244717 - protein, 345 aa, unidentified
MKITTVGIDLAKNLFQVHAVDERGKGVLRKQLRREQVSKFFVNLPPCVIGMEACASAHHWGRTLQRFGHTVRLMAPQFVKPYVKTNKNDVADAEAICEAVGRPNMRFVPIKSIEQQAILSVHRVRQGFVKARTAQANQIRGLLGEFGLIIPQGIINVTKRVPELLEDASNELPVAFRQLIDHLTQHLKELDRQVKEFERQIIAWHRGSELSRKLEKIPGIGPLAASALVASIADANSFDNGRQVSAWLGLVPRQSSTGGKPTLLGISKRGDAYLRTLLIHGARSAILAAQRNTQNTNVWLANLLTRRHPNIAAVALANKNVRTVWALLAHGREFKADYVPVRMAA

SEQ ID NO: 244718 - protein, 428 aa, unidentified
MKKHSFSKLAAITPETLIVGVDIAKNAHWARFTDYRGIPLGKALKVLNNKAGFENILTSIKSVCKQNDLPKVILGLEPTGHYWKPLANYLIKHEIKVVLINPYHTKRAKELDDNSPTKNDKKDALTIARLLRDGRFSQLYLPQDVFGELRVLSTTRVSLLKRQNAIKNTIRAVLDEYFPELITVFKHPLKGKACRQILKSCPFPSLILQLGRTKVLTQIKKAVKKTIGPKRVEQLFQAAQDSIGVTYGIPSARLKLTLLIQELELLEKQLDQVEQAMEQALTLTGYKEVILSIPGVGITTAASFLANTGDPLRFTHPRQISKLAGYNLIEDSSGEHQSKTIISKRGRKQLRNVLYQMARTFVAVNSQMKELYHYLKTRPRNPLKKKQALVVIAKKMITIIHSLLKKQNQYQPELVFNQFRLNQIKQVA

SEQ ID NO: 244719 - protein, 476 aa, unidentified
MGDSTTGRQERKRKGNNQRKTGRQGTGGLASMPLLYPDLAGIDIGSRVHYVSVPADRSPDPVRTFGCTTPDLVEMARWLKDCGITHTAMESTGVYWVPVATVLEAEGLRVALVDARESHRLSARKTDVHDCQWIRQLYACGLLRGAFRPASEILPLRSYWRQRQEIVSLCATALHHMHKALELMNLQLHKVVTDIAGATGMRIIRAIVEGQRDPESFLPMVHRACKAAPEEFVKALTGHYAAEHLFALRQALDRYDMYQRQIAELDGELHRATREFASSRPQDCGAQEQAQGKPRGGRRKNQCHFDLADEALRMAGVDLTRIEGIDALTAFTIITEQGVDMSPFPTERHFASHLGLCPDNQITGGRVRKKSTRRVASRAARALRVAAQSLARSKTALGAFYRRIKGRCGAAKAIVATAHKLAKIIYRMLKHGEQYVARGQEEYERQYQERLLKNLARQATRMGCQLIVENSGEVLS

SEQ ID NO: 244720 - protein, 417 aa, unidentified
MKKHNNSAMKSEPISKRAKSRGPVQRDTKEVLAELVETLRKKLDPKVEAGSTGEEDRRGKFRPNLDRLTVGVDLGDQWSHYCILGLEGETLAEGQLRTTQQHIAEFFQALNAARVVFEVGTHSPWVQEVICGCGHEVLVANPRLMEGSKRRKRKNDRIDANKLARLGRVDPQSLHPMRHRSKEVRQDLVVLRARDALVAARTELINATRGLVKSMGARLPKCSSPSFAQKVEEAVPVEIREALLPLVRMAAALSDCIQGYDEKIEKLGREKYGHTALLRQVKGVGPITALAYVLTLENPERFVKSRDVGPYLGLVPKQEDSGESQPQLGISKTGDTMLRKLLVGSAQYILGPFGPDTDLRRYGLRLCERGGKNAKKRAAVAVARKLAVLLHCLWVSGEVYEPLRQGMSPTIAPAVAA

SEQ ID NO: 244721 - protein, 319 aa, unidentified
MSTIVGVDVSKDSFDTAFEKDIKKFVQGKFDNCSEGFCLFYDSLPQGDRVVVMEATGPYYLKLAYFLHEKGEKVSVVNPLKIRRFAQMRFERVKTDKADARIIASYGKSEELKLWEPLEEHIVDIRQICSVMGRMVKDRTAWMNKQEALNNDPKHSLIAMREVEEMIAYITKKLEDMENKLDEIVKDHFDDQNKIIRSIPGIGPKTAIILLALTNGFTRFDTYKEFISYVGLSPRIYDSGTIKGKAHICKLGMSRARQLLYMAARAASKYNTACKLLYDRLLEKGKAKKLALIAVANKLVKQAFALISKSELYAKDFAL

SEQ ID NO: 244722 - protein, 346 aa, unidentified
MGKIIRIGMDTSKQIFQLHGVDEAEQVVLRRRLKRREVLEFFGKLAPTVIGTEACGSSHYWARELTQLGHEVKLMAPQLVKPYVSRGKNDAADAEALCEAMSRPKMRFVPVKSAESQAALMLAGLRDRLVRNRTRLANAIRGYAAEFGLVAAKGKAKLEPLLSRLQADEAVPPLARELFAEHAKEYAQLKTQLEAIDAKLMAWHRANALSRNLARIPGVGPVIASLLVMKTPDPQAFRSGRHFAAWLGLTPKDHSTAGKVRLGVITRAGDEVLRSLLVVGATAVVWQVRRGTGRRPSSWLVELLKRKPPKLAAVALANKIARVAWKLMTTGEIYDANRALPATTAA

SEQ ID NO: 244723 - protein, 411 aa, unidentified
MDVYCGIDWAEDHHDIALADRDGKLLARRRIGDDAAGLAQLLELLAGHGDSAGDLIPVAIETPRGLLVACLRATGRKIYPINPMAVARYRDRHSVAGKKSDHGDSVVLANVLRTDIGMHRPLPDDSELAQAIAVLARAQQDAVWDRTTAHNKLRSHLREYFPGFLVAFADARGGITRPEARAVLAAAPTPAAAAALTLTQLRALLKKAGRSRGIDIEATRLRDAFRIPQMRQPRLVEDAMGRQAIALLRQLDAACVAADDLEHAVTESFNLHPDAGIITSFPGLGPLTGARVLAEIGDDRSRFQDARGLKAYAGAAPVTRASGKTKSVTYRRVKNNRLNATGYTWAFSALTASPGARAHYDRRRDDGDRHAAAQRNLFGRLLGCLHRCLATGQHYDEATAFPASTKLPAAA

SEQ ID NO: 244724 - protein, 274 aa, unidentified
MVTTIGIDPHKATHTAVAIDGSEIVLGEITIQADKDQTTKLLDWAASVGGDGRLWAVEAATGLGYLLSQQLVAHGETVVDVPPVLASRIRVLSSGKSNKNDPNDARSVAIAALRRESLAEVKREDEAAILRMFAKRHRELTALRTQAVCRLHAMLAVLKPGGMGHRLSAKQASRMLGGIRGLDAVGEQRRQMAKAHISDIRRLDRDLEAVKAQIRTAVTAADTTVTDIYGVGPVVAAFLIGYSPPIDRFDTSDRYAAYNGTAPIEVSSGGKVRH

SEQ ID NO: 244725 - protein, 340 aa, unidentified
MQVITIGLDLAKSVFQVHGVDAAGAVLIRKKLRRSEVVAFFRAHPPCLVGLEACATAHHWAREITALGHEVRLMPPSYVKAYVRRQKNDAADAEAICEAVTRPTMRFVPIKSAERQGVLVLHRTRELLVRQRTMLINAIRGHCAEFGIIASQGARRAVELVEQVRQAETLLLPGLARSALLMLADQLDALAVQIHDLERRLMVWHRQDRASQRLATIPGVGVITATALSATIVDPSAFRSGREFAAFLGLVPRQNSSGGKERLGRISKMGDGYLRKLLVVGATSVIRRARTDALAAAPWIRSLLERRPARVVTVAMANKTARIAWAVLARGEVYQAPATA

SEQ ID NO: 244726 - protein, 338 aa, unidentified
MTIVMGIDQHRAQITGEWIDIETGEVQRARVAPADRAGVRRFLARFAGVQLEVAVEATTGWRFVVEELRRVGAVVHLAEPAETAGLRGPKKRAKNDRADARHLRELLMVGRLPESWIPPEHILDLRARVRLRHTLMAQRSEWQQRIQAVLYHHGCPRRRSLIIGDGREWLAVQPLPVGAREQVTVALAVIDALEAQIVPLDRELRAFARRQAGCRALQAHYGIGPLVAVTILAELGDCTRFSASRHAVRFAGIDITVHASDQHRSPGHLSRQGPPALRWALFEAAQSACRPARPDHDYYRQAAARLGHNRACLSVARKLLKRSHHTLRELGEEALAPA

SEQ ID NO: 244727 - protein, 456 aa, unidentified
MRRQQRQPPRAAVVPKLGQHNPAAAGLDIGAEEIWACVPADRDAHPVRAFGTFTPDLHALADWLAQCQVTTIAMESTGVYWIPIYEILEARGFAVALVNARHLKNVPGRKSDVQDCQWLQQLHSYGLLTASFRPAEEMRGLRTYVRQRAMLLEHRAGHIQHLQKALQQMNVQLPQVLSDITGTTGLAIIRAIVAGERDPQVLARLRHGRCQCSEAEIAKALSGHYRPEHVFALKQALALYDFYTAQVQECDTTIEQHYAAIKPVYDEPPPPLGPAPKPNSHAKNAPAFDVRACLYRILGVDLTAIDGLEASSIQVLLSEIGTDMSKWPTEKHFASWLGVAPHNDISGGKVLRSKPLKGNRRAAQVLRLAAQTLGRTQTAVGSYYRRLRARKGPAHAITATAHKLARMLYHILKHRTPYQPQSQETYEHHLRQRAIRHLKRTATRLGFTLLPQPVAA

SEQ ID NO: 244728 - protein, 341 aa, unidentified
MNYAGIDLASKSSAVAVVDEQGNVMEQREVATDAGQLAKVLAPFAPVSVVVESSPLAEWACQVLEDAGHLAQIIDARAAKHLMDARKKTDRRDAQTLAQIVRSGWFQPVHRKSDSARLERTQLQGRQGLVRTYCSLDSQVRGLLRAHGICLGRVSKSRFAQRVRERAQQHSEALVAVLEPLLAVYEHSLEQAEAMKKQMQAQQREDELQQQLQSVPGVGSLTAKVFASTVDDPRRFANGEQVADYAGLTPGVTQSGERCVRGSITRQGDHLLRWHLVEAAHAMIRQGGDCRLKRWARQLAETKGAAKARVALARKLAILLWRLWLKGERFEPEHGTTGAAA

SEQ ID NO: 244729 - protein, 360 aa, unidentified
MLKQNNKLSFKDQTIYVGLDVAKKSWNVTILVEQMFHKTFTQSPVPDVLVGYLNRNFPDAHYICAYEAGLFGFWIYDALTKLGVDCIVVHPADIPTKDKERRNRNDDVDSNKIARNLRSGELTPLYIPSLQAQEDRSLVRMRIIMVKKQTRTKNQLKALLTYYGMDIPDKLANSNWSKQFISWLEDLENLDFKYNSGKQAFSALLSELKYLRSVISQLTKDIGCLSEQEPYKMPVQYLSSIPGISTTTAMVYLTEIVDIKRFKDFDHLSSYFGLIPGEDSSGDTQLHTGISPRRNVNLRVLLIESSWIAVRKDPALLMSFNQLSKRMPKNKAIIRIARKLLNRIYYVLKNRCYYQIGVVS

SEQ ID NO: 244730 - protein, 451 aa, unidentified
MAKRKRAKHGKLDRTLPVLKPNAAGIDVGATEVVVGVPVDRDSESVRTFPTFTSDLHALADWLQKCGIDTVAMESTGVYWIPLFQILEARGIEVCLVNAQHVRHVPGRKSDVLDCQWLQYLHAVGLLNASFRPEQDVCAIRSLLRHRESLVELASVHVQHMQKALDQMNLQIHHVISDITGVTGLAITDAIVEGQRDPDELAKLRDRRIKASLETVTKSLVGDYRPEHIFALKQSRSAYRHYQQLITDCEQEIQHLVETFQNKDGTPTASGPSNETSVSPDSRFDLHNHLERIYGIDLTEVPGLDCLLIQTIFGETGQDLSSKFRSPDTFCSWLNLSPKDGTSAGRRVRGPHIKTKNRAAKAFRLAAQCLHRSTSYLGDFYRSQRARFGAPIAIKNTAHKLARIFYHLVTTRTPYDESVFAKLEAKNQRRRLRKLQSLARSLGYSLVQAQA

SEQ ID NO: 244731 - protein, 347 aa, unidentified
MRFYTRQHRHYCGVDLHARSMYVCVLDQEGSVLVSKDIATAPEPFLELIAPYREDLAVAAECMFTWYWLADLCAREGLVFVLGHALYMRAIHGGKAKNDRIDAHKIAALLRGGMLPQAYVYPQAMRATRDLMRRRNYLMRQRAELLSHITNTNHQYNLPALGVRPARPAERSGLAEHFTEVSVRKSIEVDLSVIGHYDRELPRLERYLESNAQAHDPMALAIVRTIHGMGKVLGLSILYEIHDIGRFARVQQFLSYCRLVKPTKESGGKILGHSGRKIGNAHLKWAFSEAAVCFLRANKPAQALRARLMAKHGKGKSLAIIAARLARAVYFTLRRSEAFDAERFFAH

SEQ ID NO: 244732 - protein, 358 aa, unidentified
MDREGFEKLIVRLPEDKTSFLLGMESTASYHIPLFSYLAAHSYRVVIINPLLIHGFSKRSLRKTKTDKKDAFVIAQFLMREQKTLSAQTPDYLATELKDLARRREKLADHVTSLKADMKRILSVTFPELEYITGVFTKATLRLLMEYPSAHAIRRADPSAVANVFKSENQGNRPRTTVKALMDATASSVGIVSPAKELALKQEASLLMHVEEQMKETTKVLMNILNEKMKQDVEILCSMKGIGDNTAMNFLIEMGGTVEIYENDKKLIAASGLDPSTYESGKYAGKSKISKRGNRHLRRVIWLMATRVIINNELFRTYFYKRRKDGLPYKKAVLATAHKLIRIMFVMLSRKTYLVMVQ

SEQ ID NO: 244733 - protein, 400 aa, unidentified
MYVGWDWASESHDVTAIDQTGKVVFHTEVEHTEAGLTSVLSRLRRLREPAELPVAIERPSGLVVERLLDQGHPVVPIHPNTFNAARPRWGASRAKSDPGDSYRLADFLRTDGHRLRRLEPLSEVTRNLQALVRSRDDQVEARVAAANQLAALLDSHWPGAGAVFERLDSEIALAFLETYPTPESAARLGERRMARFLIRHSYCGRRSPAQLLARLQAAPLAPSRLDPEVLRELVLAQVRLLRTLMTSIANLDRAIAALLPEHPKTAVLAPLPRIGQNVNLGQVLAEVGPILDRAIDVEQAAAECGASPVTKASGKSKSVCFRWAANTRARKALQTWVDNSRHGSPWAAHAYAQARAKGKRHPHAIRILMRAWLRVIWACWHSGQPYDPALHRAAITAAAA

SEQ ID NO: 244734 - protein, 346 aa, unidentified
MMIIGCDFHPSWQQIAWLDSETGETGERKLVHASGDAKRFYEQLAVPALIGMEATGNSQWFIELVEDLGHEIWIGDAAQIRASYVRKQKTDKRDAAHILKLVVEGRFPRLWTPDREQRDLRQLVLHRHKLVEIRSRVKNELQHLAMNKGVQRKAKLWSQAGQKMLRELPLKPWASCRREDLLGLLAMLNQQIGELDDAVQQAAEENPQAKVLMTQPGVGPNTALAYVLTIGDVGRFPRGKQVASYLGLIPHENSSGDRRRTGSISKQGNRMLRSLLVEAAQVAVRFDPEMKKEYLHRCHQKPKGVAKVAAARKLAVRLYWMLRTQVGYPEIVRIESSPRVPLVGAS

SEQ ID NO: 244735 - protein, 355 aa, unidentified
MHPYFVGLDVHKQVIAYCVKQWDGQVVMEGKIKATRAALAEWVGSLPKPWVGGMEATMFSHWIYAALQPHAAELYMGHAARMKAISAGKKKSDKLDSRTIADLLRGNLFPKCFVIPPELGRLRQQLRFRQLVVKQQVSFMNKTAGLLMETGIEYQRRRLHGKQYFSELMASTHWVNQELKPLLKFGRQQIESLAAMDKRLIRMLENHPQLKARVAALRTIDGVGPILALSWALETGTPERFPSIKDAQSYCGLTSAFWESAGQQKRCPISKQRNKHLQTVLIEVGHLAPGYNEKLKALYEKEKAAGADSNQATLEVARKLVAYLLAVDRAFWKSAQSKPAARGPVAFSRHADLSK

SEQ ID NO: 244736 - protein, 405 aa, unidentified
MVVQVLPVTPSTVVVAVDVGKTEFAFSVTDSARSLLLKPRTGCPMTGPSLSRVVADIVEVLPVDAVVKVGIEAAGHYHRPLLHASWPIGWEVLELNPGHVTEQRRVLGKRTIKTDVIDLQAMTELLLAGRGQPVRDRSLLLGELTAWSAHRTSRVLVRTATNTQLLGHLDRSFPGLTLALPDVLATKVGRLVATEFADPARLASLGTSRFIRFGRSRGLHIREPLAERVVQAARDALPNADAAVARMVLAADLALLRDLDGQVDQATDQLARLLPLTPFAPLLTVPGWAAVRAGNYGGALGDPARFDHHRQVYRTAGLNPIQYESAGKRRDSVISREGSVELRRALIDLGIGLWLNDPAAKVYGSALRARGKKGLVIGCAMAHRANRIAFALVRDQSSYDPRRWS

SEQ ID NO: 244737 - protein, 330 aa, unidentified
MKNWNVILGVDVSKLTLDISCAERNVYLKIDNCSKGFAGLKKWCKTNDIDLKETLVVMEYTGGYEYRFIQFCESLSISYCRIPGLEIKQSMGMIRGKSDQADSFRIGRYGEEKIKHLTPSKPLDKKIITLKQLLSFRKRLVREKAGLESTLKEREHMYEVKKTDTVACIARAKIKANAQYIQQLEQEIMEVIKSNEAMLLNYRIITSIKGIGPVNAWMTITYTENFTSFTDARKYAVYVGVIPFGHTSGTSIKGRKQVSHLAQKGLKSELNQAAKTAIIHDQEIRTYAERKLKNKCYPLVLNNVKFKLILRMFSLVKRGEKYVENYKRAA

SEQ ID NO: 244738 - protein, 334 aa, unidentified
MTFELLAIDLGKSSFHLHSIASDGAILSRKVSRSKLAETVNALAPKTIAMEACASAHHWGRQFKDNGREVLLINPRFVKPFVRGSKNDAVDAAAIYEAATRPTMRFVPVKSTTQQDLQSLHRVRERMIIQRTSLINHARGLLAEYGIVLPQGPWRFVSQAPAAVESADLSDLGRELFLELLDQLTDVNDRIAKIDRKISEICREREDCRRLSELPGVGPIIATALVASVEDGRHFKSGRELAAWIGLVPRQYSTGGKPRLGGIGRRANHYLRRQMIHGARAVISRLASHDDRRSQWLKELVARRGFNKAIVALANKTARVAWALLTRQERYAAQ

SEQ ID NO: 244739 - protein, 413 aa, unidentified
MEVLHQRCAGMDISKRDVKVCVRVPGARTNTFTKVVTVYGAMTNDITRLRDYLLAAHVTLVVMEATGDYWKPFYFGLESELNLMLVNPRHARNLPGRKTDVSDAQWLAELGAHGLVRGSFVPPQPIRQLRDLTRSRTIFVRERSREIQRLEKLLEDASIKLSSVATRTLGVSGRLMIEALIAGQRDPVTLASLAQGRLKNKSEQLVEALNGRFNTHHAFAAQMHLDQIDCLEQRIQSLNLRIDAGFESLPPWIESLSTIPGVSKTVAEIIIAETGGDMTQFPTPAQLASWAGVCPGHNESAGKVKSSHARPGNSHLKGALGIAAMASVRANGTYFQARYKRLTARRGPMRALVAIEHSIITAVWHMLTNGTVFEDLGENHFQRTHESSTRHHAINQLHQLGYDVELIPLATTP

SEQ ID NO: 244740 - protein, 340 aa, unidentified
MPFYAALDVAMEKTALCVLNHEGQVVLEINVSSDPSAIADRLEPYQDALSRFGLEAGPLSEWLVRGLVDRGFAPLLLETRHVRAALSARIAKTDRNDARGMADLLRMGWFRAVHLKSLDAREQRTLLSARRTLINRLKDIENSVRGLLRGFGIRLPLALRLKWEGKVRETIAGHPTLSTALEPLLVIRKTLREQVAVLDKKVRDAAKDDPVCRRLMTVPGVGSIVALTYRAAIDDPSRFSSSKSIGACFGLTPRRYQSGESDRVGAISRAGDASVRVALFEAAHVMLTRSSKWSSLKAWAMKLAVRRGAKRAKVALARKLAVILHRMWRTEADFRFTAAA

SEQ ID NO: 244741 - protein, 322 aa, unidentified
MKQKPFLGIDVSKAKAECGLLWADSKYRSKVVSNHTDGFAQLRQWLQKYDAGQAHVCMEATGVYWEELALALSAQGMPVSVVNPAQIKAFGESCLVRTKTDKVDARLIAEFCRAMQPPLWQPPSPSEQALRALVGRLDALQRMRIQESNRLGVARDAVRSNIEAHLHWLDEQIKALTQQIDRHIDQDPDLRRKRDLLDTIPGVGRRTSAMFLAFCSRTDAFANARQCAAFAGLNPQQHQSGSSVRHKARLSKIGHALLRKAMYMPAVVTLYKTAWGKAFRSRLKAAGKPPKLIIGAMMRKLIHVAYGVIKSNKPFDPTLHAT

SEQ ID NO: 244742 - protein, 372 aa, unidentified
MELLHPHCAGLDVHKESVVACIRHMVDGKVTTRVQTFQTTTQGLMALLDWLAAEGCTHIAMEATGVYWKPVWHILSDGEFELTLANAAHVKNVPGRKTDVNDATWLADLMAHGLIRPSFVPDEPTQQMRDLLRTRKQFVRERSTHTQRIQKTLEDANIKLDSVITDIVGLSGRRMIEALIAGQTDPQDLAALAHGRIHATKEELEAALRGRVRGHHRFMLRLHLNHLQAVEEAIASIDQEVSAQLEPFRLAVEMLTTIPGISSLAAEVMVSEIGIDMSRFKTEGHLISWAGLCPKNDESAGKRRSNRMKKGAPWLKTTLIQCAWAASRTKGSYLQAQYLRIHRRGSRFHPHRRLSHAQERHPIPGSRSKPLR

SEQ ID NO: 244743 - protein, 316 aa, unidentified
MKTSEAEQSPAYAGVDISKETLDVSLAGQSPSSYANGAAGVAEFVKALEKRQAPMQVICEPSGGYERELLEALWVAGIPVSLVNAARIRAFARARGLLAKTDKIDASVLRMFGELLRPETLAAPSPQRQRLAALVQRREQLVNILTMEEQRLTQTRDPVVKKLGRSLIRELQKQIEQVEKLIEAQVDDDKTLKGESERLQQVKGIGPVTASTLLAELPELGKLSRNAVGALAGVAPYNRDSGTLRGRRTIRGGRVKVRRVLYMAATVAARFNPILKAFYQRLVAAGKPKKVALTAVMRKLVVLLNYILKNPDFKLA

SEQ ID NO: 244744 - protein, 437 aa, unidentified
MLSYLNLNAAGVDIGATEIYIAVPGDRDPQPVRCFSTFTEDLHAAADWLKACHIETVAMESTSVYWIPLFQILEARGFQVFLVNAHHVKNVPGRKSDVSDCQWLQYLHSVGLLRASFRPEQAVCTVRSILRHRDGLVQMASSHVQHMQKALDQMNLQLHHVISDITGRTGITILEAILAGERNPHQLAKLRDRRVKATEETIAKSLVGDYRREHLFTLRQSLAAFRQYQDWIADCDHEIAQYLEQFESKLDPPPGPTSPSEDGSKSKANEQRFDLQTHLHRIFGVDLTQVPGIQVLTAQTLLAEIGPDLSRFEDGSALASWLGLCPDNRISGGKVLSVKTRKVKNRAATALRMAAHSLHHSQSFLGHFYRRMRAKLGAPKAITATAHKLTRIIYHMVTTGHAYDETICTQNELQNRQRLEARLRKQARELGLQVVAA

SEQ ID NO: 244745 - protein, 323 aa, unidentified
MTKYTEIFGVDISKDVFDVYGSHSGHDQFKNDALGFKSFLKSLPKESLVIMEATGYYHYRLAQFLYKQSVLVSVVNPLSVKRFIQMKLAKVKTDKSDAKAICEYGEINKVPLYTALTNVQSECFQLFRLLDSYLKKRTITKNKLHGENVLGIPSKHVYRSLNRNKKHLDVEIASIEAKLLSLVKQEQQVQLTLLKSIPGLGVKTALFLIVVTDGFTKFETAAQLCSYVGITPTIRQSGSSVRGRSRISKVGNKKLRNLLFLCSFSACKHNKACREIYERIVNKGKSKKLALIAVSNKLLKQAFAIAKSGHPYDETFVSVLLSK

SEQ ID NO: 244746 - protein, 355 aa, unidentified
MNQEKYIGMDVHAATISVAVMNAQGKVLMECVLESKAVTILEFIQGLRGTLALTFEEGTMAAWLHDLLKPHVSRLVVCDPRKNALLRDGSQNDRADARNLAELLRTNQVHAVYHGQHGTRALKELGRSYLTLTQDSTRVMNRIKSVYRSWAIPCAGTSVYSRRHRAEWLAQLVEPGVRIRAEHLYQQLDSLQPVRQAARRELLRESRKHAAVKLLRQIPAIGPIRSALLVALLQTPHRFRTKRQLWAYSGFAVQTYDSGEFRFVRGKLQRNRERITVRGLNRNHNHDVKNLLKGAAISALQRPGPLQDFYAALVEKGMRPSMARLTLARKIAAITLTMWKKGVSFDPKQLQRPAA

SEQ ID NO: 244747 - protein, 411 aa, unidentified
MDVMFARCAGLDVHKKSVVGCVRFPGPRPGERGRETQTFGTTLRELRELAAWLTRHGVTHVAMESTGVYWRPVYAVLEGALTVLLVNARHVKQLPGRKTDVRDCEWLAQLLECGLLRGSFVPPRAVRDLRDLTRLRKSLIRARAQHVNRIAKTLELANIKVGSVATDLMGKTGRAIVEALSRGVDDPERLAACAQGLLLKKRAALREAAEGLLTPHYAFLLQQLLSLIDGVDAHIATLDARIAEAMVPFAEPAALLQTMPGVAQRAAEALLAETGTDMSAFPTPQQFASWARLCPGPHESAGKRRPTGTGKSRTWLRATLQEVAWAAVHTKRSYYRALYYRLRARRGEKKAIVAVQHAMLVALWHILTHRVPHHDLGVDYFDRHNTDRIRRHHVRRLEQIGYEVALVKKAA

SEQ ID NO: 244748 - protein, 389 aa, unidentified
MDEAGKVLVKRRLPEGAAGMTQLHALIGRFLPEDADDAEVVIGIETDRGPWVTALVAAGYVVFPVNPLQASRYRERHGVSGAKSDGGDAHMLADMVRTDSHQLRPAAGDSPEGQGIKVVARAHKTMIWDRTRATQRLRSQLREYVPAALAAFEDLDAPDVLELLGKAPDPDRARRLTRAQVAAALKRARRRDIAGKTDAILAALRGEHLGQPAALTAAYAATARSLIAVITTLNAQVKILEDQVRDHFGRHPDAEIYLSQPGIGAILGARVPGEFGDDPCRYVSAKARKNYGGTSPITRASGKKKVVAARFIHTDRLIDALISWAFASLNASPAARAFYDGQRAKGPDHNDALRRLANRLVGILHGCLKTRTPYDEATAWSHRGSSLAA

SEQ ID NO: 244749 - protein, 345 aa, unidentified
MEIRTIGIDLGKTVFHFVGVNARGRVVVRKKSSRTQLLRFTSNLPQCLIGMEACGGSHFLGRALREQGHDVRLMPAQYVKPYVKTNKNDYIDAEACSEAVTRPTMRFVPIKTDDQLDLQSLHRVRERWVVRRTAVINQIRGMLLERGITIRKGRHHIEESLPGILEDTENKLSGALHVLLTQLRSELQYLHGQIGETDKLIARICGELEQCRRLVAIPGIGPITATATVAAIGNGAAFKKGRGFSAWLGVVPGEHSTGGKQKLTGTSRRGNKYLRKLFVQGAHTVLLQKTKQSTSLSTWLVGLTSRKRPQVATVALANKMARIAWAVLFKGEAYRLPTVPQANAA

SEQ ID NO: 244750 - protein, 355 aa, unidentified
MDSKKYIGMDVHKESISIAVRNAAGKIVMECVIETKASMILQFIDGLRGDLQVTFEEGTSAAWLYDLLKPHVTKLVVCDPRKNASMREGNQSDKIDARRLAELLRLNHLHSVYHGEHGLRSLKELVRSYLTITKDLGRVMSRVKAIYRSWAIPCSGKQVYAPRHRAEWLGKITEPGVRRRAEFYYQQLDALRAVRQQVRRELLAEGKKHPAWKRLCQIPALGPIRAAVLLGILQTPQRFRTKRQLWAYSGFGIETQSSADHRRVNGQLQRVKKQSSVRGLNRNCNHDLKNLFKGAAVVAASKPGPLQEFYATLLSKGMRPEMARLTLARKIATIVLIVWKRGVCFEAQHLKPQTA

SEQ ID NO: 244751 - protein, 375 aa, unidentified
MDSSRDSNGINVPELPCAPDAPGEEESEMQSTTIAVDLAKSVFEVAVSEHPGRVAKRYRFSRGQFSRFLAERTPATIVMEACGTAHFWGREAQARGHRVVLLPPHAVRPYVLRNKTDGADAKGLLEAMRNDELRPVPVKSIDQHVLASLHRMRSAWMATRTARLNILRGLLRELGVTIRVGAQQVVPQVWALVSDAGLRIPDALRPVLAETAREIGELEARIREVERSLESMARVSEVVVRLRTIPGVGLLTATALMAFVGDVRRFPSGRHLASYLGLTPRESSSGLRRRLGAISKRGDPYVRMLLIHGARSVLLHAKKKAYGEQDRLRAWALDRERTRGHNKAAVALANKMTRIVWAVWRREHVFSTRSLKGAA

SEQ ID NO: 244752 - protein, 336 aa, unidentified
MTMIRVGVDTSKHVFQIHGVDENEQPVLRRQIRRSEVAKFFAKLAPTRIGIEACGASHYWARLLRGLGHEVVLIPPQYIKPYVKRGKNDKIDAEAICEAMSRPGMRFVPIKTAEQQAGLTMLGARDLLVKQRTMLINAIRGHAAEFGVTVAKGPKQVGQLLQHLASDEGVPALAREMIGVLASQLDGLEIKLKTIEKRLMAWHRQDQISQCLATIPGIGPISGVSFALKVADPKAFRSGRHFASWIGITPRENSTAGRQKLGRISRAGDEDLRRLLVIGATAVIHAAKPGRTAPWLLALLARKSKKLAAVALANKTARIVWAMMVSGETYRQPAQA

SEQ ID NO: 244753 - protein, 443 aa, unidentified
MQQPVEVHVEEHESIVERVAAVDVAKASGMVCLRTPHEMIPGRRVTKIWPVAATTAALVELGDHLRCERVTRVVLESTSDYWRPFYYLLEAAGLTVWLVNAAQVKNVPGRPKTDKLDAVWLAKLAERSMLSPSLVPTEPMRQVRDLARARFDLVEDRTRVKQRIEKLLEDALIKISSVLTDVLGVSGRTMIEALIAGQRNPTVLAELARGRARRNRATLQRALHGRFTDHHARLTRLLLGQLDELSARIDEVTGLLDAAIRALPTPAADAQDNPAPAGYDSAVARLCAVPGGGPDSVRAVLGEIGLDMRVFGTSARLCSWARVAPRTVQSGRKTGRARTGKGNPYLKSALAQIATGAAKTDTFLGERYRRLIKRMPKAKALVALQRSILVIFFHLLADPTAEFTDLGSDFYAKRIDRARRTTHLLRQLHALGYQVQLTETAAA

SEQ ID NO: 244754 - protein, 357 aa, unidentified
MDKSTTTGFPETTIGLDLGDRRTHACVLNQAGEVTKRLSFWTSRRGLEQAFEGQAPCRVVLEVGTHSPWMSRWFTERGFEVIVANPREVQSITKSHRKNDAADAEQLARLGRADPKLLKPIVHRGEAAQRDRARLAIRRQLVATRASLAIQARGLVKALGERLPKAKPEALPRKARVAGQGDLLPGLSALFDVIEHLNTRIQELDQEVARCAEEHHPETAILRQVPGVGPITSLSFVLALEDPRRFEVSRRVGSYLGLQPRQHDSGESRPELSISKAGDPELRSLLVECAQWILARGPDSDLRRFGERLAQRGGRAAKKKAVVAVARKLAVLLHRLWLTGEAYDPFYASRPSEASAA

SEQ ID NO: 244755 - protein, 349 aa, unidentified
MTKFSKAKSDGNVCTDMFVGMDLHKNYLQVAVLDGKGKVLKNSRIDNDLSKVGRFFDRIGGSGNSSDVKVVMESSCVWYNIYEYLSEERQLDVSLSNPFKTRAIASAKIKTDTLDAVKLADLLRGGYIAKCYVPDRKIMDLRQLVRHRIVLVRMRTKLKNKIHGITLMQGIRITDTSAFSNNYVQKLKQLNDYRIDAYIRLIDSLDSEIKKVSKEIQSRAEKEDMTKLLVTIPGIGYYSALLILSEIGDINRFPDSYHLCSYAGLVPTTHSSGGITYHGAITKTGSKHLRWIMIECVYTHMRISKNSNITRFYTRLANRKGNSKAVVAAASKLLKVVYWVMKEKREYHV

SEQ ID NO: 244756 - protein, 343 aa, unidentified
MEIQTIGIDLGKTLFHLVGVDASGSVVVRKRCSRSQLVAFTANLRVQRIGMEACSGSHFLGRTLRDQGHDVRLMPAQYVKPYVKTNKSDYIDAEAIAEAVQRPTMRFVPIKTEDQLDLQAVHRVRERWVRRRTAVVNQIRGLLLERGLTLPKGRSYVEQALPDILEDATLRLSDSFRVLLAQLKVELDQLTARIEEIGTVLQHTAKENEACQRLTTIPGIGPVIATALIAAIGNGSGFRRGRDLAAWVGIVPREYTTGGKQKLLGISKRGNSYLRRLFVQGARAVMQHRHNQAPGLSAWLAQLLARSHQNVAIVALANKLLRMAWAVLCKNETYRPPALVASS

SEQ ID NO: 244757 - protein, 331 aa, unidentified
MIFSTIIGIDVSKLTLDLHVLPNNQDCQTKNDEKGFKEIVKWLAKVGQIDLSATLFSFENTGFYSYKLSLWLQDKGYRFVMLSGLELKRSLGISRGKSDEIDARKIAEYTFLRRDSITQTILPEQGIIRMKRLLSLRNKLIRQRSGFMATLREAKRAFSRKEDPLYYKIQEDLLKKLSIQIERIEKELHQIIENNSTLKEQYHLILSIKGAGPIAAFTFIAITHGFQKFQTWRKFACYAGIAPFPYRSGTSIMGRNKVSHLANKKIKSLLSNMAVSAVQHNTELKLYYNRRLDDGKNKSSTLNIIKNKLVARIFAVIERGTPYVNTAKFAA

SEQ ID NO: 244758 - protein, 424 aa, unidentified
MKVTYQTCCGVDVHKSFLVATIVKTTGGIEPSYQKKRFSTFNNSILEFKQWLLDNDCHDVCMESTGKYWVPVFNLLEDEINVVIANPKWVKAVKGNKDDAKDSKWIGDLFRLGLVKGSYIPCKKVRILREYTRYRYKLVSCRSSEKNRYQNALTVCNVALDSVVSDIFGKSSTSIIDYLLEQSGSSINHEEIASKLLRSLKSKEDAVIESIEGYQMTDAQKYRMRLVRAHMDYITAEINDVDKMIENVISSDPDFENAVRFLCTIPGVKRDSAITIISEIGTDMTQFSSSKRLCCWAGLTPGSNESAGKKKSVRITRAGVYLKPALVQCAHAAVKSDKSPYYKKKYDSLVKRRGKKRAIIAIARMILTAIYQMLSTGELWNPSDLYKIDMPVALVEKQKAKAIKQAKKLLQQEGLLPPDEPLAS

SEQ ID NO: 244759 - protein, 426 aa, unidentified
MSERDYSKQVARRQRIGDRTLVVGVDIGCASNAVGFMSKEGRVLGSYPIMPNSREGFEQFVKVTEGLKARHGLSDVLIGLEPTGHYWRKFAYFAKAKGCEVRFVRTTALKHHREIDESCSAKSDKQDALTMTNITREGKYIDTVIEDGGMRPLRTLVKVREKIQKRNGSAKNTLHAALDDYFPELKEIFWSMHSRGLWALLQKCPFPTDVVSFKVSALKEIIGRASRRRAEASGKAMAVYQAAKERIGLKQIGSADRYRLRMCLEEVKRTELMIKDIEREIKRMLKDIPQAEYLLSIPGIGAISAAVFLGELGNPLYFQGARQIVKYAGYDPQESDSGYRVSRKFISKKGRWLLRKHLFLMSMRVVVLSRYFQQYYQRKLETKNRFGQLPRKKEILCAVAIKLIKVIFALLRDKRNFEDTVACSVE

SEQ ID NO: 244760 - protein, 430 aa, unidentified
MNYTQNQKIEQVTESTLVLGVDIGSSEHYVRAFDYRGRELTRKVFRFSTDINGFNSFYDWVTQICIKHGKNEAMIGCEPTGHYWYTFYQFVKDHGMKLAFVNPASVKKAKELDDNSPKKTDLKDPKTIAKLVIDGRYSFPYVSEGIYAEIREVTSSRDRIMKELNAASNRIQRWLKIYFPEYLTVYKKFDTTTGMMILEEVPLPTMVTALGVDNIIKIWREHKVRGKGASFNRAKTLVDAAHDSVGKSGGQGAVMEIQMLLEDYKVKKQQLEMVTSVMEELIMQIPNAEKMLSVDGVGLVTVAGFISEVGDISRFKNPKQIQKYAGFELVENSSGKHKGRTTISKRGRKKLRKIIYQVVLPLIQSNKEFRSIYDYYRKRIKNPLKGRQAMIAVGCKLIRVFFAIMTKGVVYNGSKMIEDIHRPTQLPQAA

SEQ ID NO: 244761 - protein, 324 aa, unidentified
MIDGILGIDVSKNTLDVSISSCTKVRTKSFANSSDGWHHLLDWLIAQKIQRVHACLESTGRYSLGIACSLYEAGHVVSIINPAQIRDFVRTKLGRNKTDGIDASRIREYCELFKPSPWAPPSEAHRRLGELQTIRAGIIAGLTEWKNRKNSGIVDTEAQALADATILHFTSQLGAVDKAIALTIDNDSDLRSKRDLLLSINGVGDTLAGVVLAELPGPDVLRSSGEVVAYAGLNPRQHQSGTSVDRATRISKIGNAVLRAALYMPALSAMRYNPVIVALVTRLKSRGRLKPKQIVVAAMRKLLVLCFGVLKTGKPFDPAIAMGC

SEQ ID NO: 244762 - protein, 344 aa, unidentified
MDYFAGLDVSLRSCALCIVDSKGAIVLERELACDVDEITNCLKGFIHPVVRIGFEAGTMSQHLFYGLTNDGFDVVCMEARQVSAALSAMRNKTDKNDARGIAQILRTGWFSPVHMKSREAHNIRALLSCRKALLNKTIDLANEVRGLLKIFGLRLPKTVQHGSFDDLVRPLIAADEVLSQAMLPLLDARVAIYKNYLALDRRVKRAARNDDVCLRMMTVPGVGPIAALTFKAAIDDPARFKSSRTVGAHFGLTPRRYQSGEHDNPGRISRAGDRDVRAILYAAANSLLMRTMAGSQIKSWGMRLMRTKGRRRAVVAVARKLAVLLHRMWTDGTEFRPERVEGVA

SEQ ID NO: 244763 - protein, 344 aa, unidentified
MSYFAGLDVSLRSVSICVIDEDGKIAFERSVPFEIEDVVACLRSVDGIVEQVGFEAGVMSQYLYRGLETAGFDTICMEARQVAAALSAMRNKTDKNDARGIAQVLRSGWFSEVHIKSCDSHYDRALLTSRKTVLRKCIDLEQEVRGLMRAFGVRLPSTLSHRKFEETVLPIIEDDDRIAYALMPMIEAWRSLYASFLELDRRVKATARKDPICLLLMTAPGVGPMTALTFKAAVDDPTRFKSSRIVGAHFGLTPRRFQSGEKDQTGHISRAGDADVREALYSAANSLLMRTKTPSHLKTWGMRLVRSRGRRRATVALARKLAVILHRMWVDGKEFQLTGMEVHT

SEQ ID NO: 244764 - protein, 405 aa, unidentified
MQVVVQRGAALDLHKNMIAAKVHTPDSEAKRLFGTTTRELVSLAEWLRAHDVSHVAMESTGVYWKPVYNVLEEYPFELLLVNSRIYKNPSGEKTDFKDAIWLCDLLRHGLLRGSFVPDREQRERRELVGYRRTLIRERASEVNRVQKILEGANIKLGSVATDVLGVSGRSMLEAIAAGITDPEVLADMAKGKLRRKTDALQEALYGKVGEHQRQMLKWMLGHISDLEERIAAINKELDERMRPFEKQIELLDGIYCVGREAAQAIIAVLGVDMERFPTDGHLSSWAGLSPANHRSAGKRLKAQSNKGNDLLRQTLIECAQAAGQNRGSYFCALFHRIAARHGKKAAAVAVAHAMLVTIYHMLKTGKPYQDLGANYFDQRNEAALTRRMTKRLEELGYEVTLRKAA

SEQ ID NO: 244765 - protein, 412 aa, unidentified
MTDVVAYIGLDWADERHSVHLQTADGRIEHLELEQKPTVLHEWIAKLQERFGGGKIAVALEQRKGAVIHALLLYDCFVLYPINPKALARYREAFTTSGAKHDPRDSELLLDLVVRHRDKLRAWVPDTVESRKLQALCEQRRKLVNQRVALTNRLTSLLKQYFPQALEWVGDLASLQACDFLTQWPTLAAVQAARRATVRRFYYDHNCRKRAVVDARLAAIASARPLTTDAAVIEPLSLSVQTYATQLRTLITAIQTFDARIAQVFAQHADHDIFGSFPGAGDVCAPRLAAAFGTDRARWDSAAEIQAHSGIAPVTERSGKSLWVHHRLACPKFLKQTFHEFADQSIRFSRWARAYYDQQRARGNDHHAALRALAYKWIRILFRCWKERRPYDEQTYVDALRRRGSPLAKNFA

SEQ ID NO: 244766 - protein, 355 aa, unidentified
MVNQDHLEVYGGIDTHADTHHVAAIDATGRRLADVQVPATAADYQAALRFLRSWPGLVKVGIECTGSYGAGVSRAMQVAGIAVSEVNRPNRFDRRIRGKSDPFDAYSAAEAVLSGRASAAPKGGDGLVESLRVLRTSRSSALTARTATINQIKGMLITAPEELRSRYRGLSNTKLIAALAASRPTPAPVTAAEATAYSLRLLARRWQALTEQIEDLSGHLQRLLEDHAPDLMSVFGCGRDTVAQLLITAGDNPDRLRSEAAFAALAGACPIPASSGKTNRHRLNRAGDRQANSALYHIVLVRLRYDQQTRNYATRRIAEGKTKMEIIRCLKRYLVRQLYPLIVQTLQPRRQTTAA

SEQ ID NO: 244767 - protein, 336 aa, unidentified
MYSGIDLHSNNSVVAVIDDGDRVVAQKRLPNDIGKITGFLARWQDELAGVVVESTYNWYWLVDGLQDAGLHVHLANTAAIKQYEGLKHSGDGTDAQHLAHLLRLGILPTGTILPREHRVVRDLARKRMQLVQSCTTHVLAVENIMARQLGGRMTSNQIKRLTDDTIDSLPLAADVGLAIKANVAVIATLQSQIEVLEKRLQERVRPRPQYALLTTVPGIGQTLATVIVLETGPIDRFAEVGNFASYARCVDSVHTSNRKKKGEGNVKNGNKYLAWAFVEAANFARRFCPEAKRFHERKKAKTNNIVATKALAHKLARACYHILKEGKPFDVTRCFA

SEQ ID NO: 244768 - protein, 418 aa, unidentified
MSWTGELVRLFIGDDWAEGHHDVELMDAAGRVLAKRRLPEGVAGMARLHEMIGEQLGEDADGAEVVVGIETGRGPWVLALVAAGYTVYGVNPLQASRYRERHGVSGAKSDSGDAHMLTDMVRTDSHQLRAVAGDSADAEGIKVLARTHKTLIWERTRQVQRLRHQLLGYYPAALDAFDDLDAPDTLELLGKAPDPARAAKLTRAQVSAALKRARRRNIPDRATAILAALRSPQLGQTPAVTAAYAVTVRSLIAVITVLNEQVKALQGQVEEHFGRHPDAEIYRSQPGMGAILGARVLAEFGDDPRRYADGKARRNYAGTSPITRASGKKKVVAARFIHNDRLVDALNAQAFASLNASPGARALYDELRARGIEHNDALRRLANRLVGILHGCLKTRTLYDEATAWGHRQNLPQSSVAA

SEQ ID NO: 244769 - protein, 338 aa, unidentified
MKHVLGIDVAKTKLDVVLLFPDGRCHTKEVDNTAAGFAVLSAWLAKRAVVDLHVGMEATGTYWEAVAEYLVDAGHRVSVVNPAQIKDFGGASLVRTKTDKVDARLIARFCLAQNPEPWSVPSPALRELRALVARREALIGMRTQEHNRLLVAREVVREGIEAHLTQLEKGITEVEAAIHRKIDQDPDLRNQRGLLDSIPGLGEKTIPILLSHIGGEPRFTKAKQVAAYAGLDPRQHESGSSVRGKPRLSKIGHSALRKALYMPAMVTITKTGWGKAFRDRLAAAGKPSMVIIGAMMRKLIHVAFGVLKPVLSLSKGRANPSTQRFMELDSDNSIYEYR

SEQ ID NO: 244770 - protein, 412 aa, unidentified
MLFVGDDWAEDHHDIEIVDEQGRRLARRRLPEGLGGVTRLHALIAGVMPSEWADLPASDAAGQVKIGIETDRGPWVASLVAAGYEVFAINPMSTARYRDRHSTSRAKSDPGDAHVLAEIVRLDRSHHRPVAGDSDDGEAMKLVARGHQTLIWERTRHVLRLRSALREYFPAALDAFDDLDAPDALAVLAAAPDPDRAARMSTARISTALRKANRRDAEARARQIQAILRAPALRQPPAVQQAFAAIVAGQVRLIVALNAEIDALGEVVVEHFGRHPDADLYTSQPGLGFILGARVLAEFGDDPKRYADARARKNYAGTSPITRASGTKKTVLARHVHNDRLVDAVHRWAVSALRGSPGARAYYDAMRARNIGHHAALRQLGNRLVGILHGCLKTRTVYSETRAWAHHNAATA

SEQ ID NO: 244771 - protein, 462 aa, unidentified
MPGREERETSDRSTRPIEGLPVIRASVAGIDLGSERHWVCAATRDRSAREVASFGATTAELRRMAEWLKIRQVESVAMESTGVYWIAPHEVLEGQGLQVLLVDTRQLARVPGRDKKTDPTDCEWIQRLHSCGLLRGSFRPKEAVCMLRTLVRDKANLVAESGDWLRRMQKSLDQMNVRVHRAVSDIDGVTGMAILRAIAGGERDAQKLAKFRNARCSKTEQEIAEQLNGHWREDHVFSLQQGLKMYDAVQERIVAYEQEILRRLGEMEADEPPQPTAPPLQNTNKAKAIKKRGQEAKRQALYRMSGVDMTQIDAVGVETVEVVLSEYGPDLSRFPTEKQFVSHVTLAPRVPQSGAKPVKKKKRNSASTRVAAALRMAALSLRHSQTALGSYYRRIAQRCGGDIAVFATARKLATLVYRLLRWGQPYVDEGAAAYENRYRQHRIARLAATAKQLGYQLTPVTA

SEQ ID NO: 244772 - protein, 350 aa, unidentified
MTTITTIGLDLAKKVFQIHGIDAEGKVVVARKLGRKQVLAFFAKLPPCLVGMEACGSAHYWAREITKLGHTVKLMPPKYVKAYVKRGKTDAGDAAAICEAVTRPSMSFVPVKGPEQQGLSTLHSARSQLIGQRTQLMNGVRGHLSEFGIIAERGMLGLAELAAIVRDESDRRLPVTARAALMVLVRQIETMSAQIAALDTALRKENKASELGPRLETIPSVGPVIASALRARVTDAKLFENGRHLSAWLGLVPENDSTGGKVRQNGLSKKGDRYLRSLLVTGAMAVVQKAQIRPDQNPWVAKLLGRMSAKQAAIAIANKTARIAWAIMVHGGVYEAGHRAPQYRAEACAG

SEQ ID NO: 244773 - protein, 354 aa, unidentified
MEHDSTLYVGLDVHKDSITVAYALGSGEVEVLGKIGTTKADIERLCKRLQSKASRICVVYEAGPCGYGLYRQLVQKGFDCIVCAPSLIPRKPGERVKTDRRDAVKLVRSLRAGDLSAVYVPTVDDEAFRDLARAWVRYTGRADWGPAHRRWLSAFSFDSLWQQLAFDELRRTIEDRLAQCARLEAALREAVVNWRFYPVVLALQTMRGVQFTTAVGILAELGDLSRFAHPRQLMAWLGVTPCEHSSGDKRSQGSITKNGNSYARKLLIEAAWSYQHPARVSPEIQRRHEGIPKPIVDRAWDAQVRLCRRYRRLVARGKQKNIAVVAVARELSGFIWDISRLAMSLAIPREELTA

SEQ ID NO: 244774 - protein, 269 aa, unidentified
MTFRPHALHLKAELFVKSSRVHVRDDGFTRCNFHLKFFIMVSRGIDISKSSFVAAYPSTNGNPTKTFPNTTARMRELIGTLAVAEHHCVMEATSNYGCCCTCYIRTVLPSVLPPPKKQIKHFSRMMMPVTKTDEKDAYMIAMYGEKMNPPIYKMPSQATIRILTTEGFTYFDNAKQLSRFIGICPTYQQSRTSVNIREHINRNDDDRLRSLLYIAFWTALRYNSRECYIRLKANEKPFKVALIAVTNKLVRPVLTITTINSIYRWICPG

SEQ ID NO: 244775 - protein, 369 aa, unidentified
MKTKTTPSVVPTSPATVTPGGFTLGLDLGDRSHHVCVMDATGQIVREGSLLNTRPALAKLIAEFPRATIAIEAGTHSPWISRYLTELGATVLVANPRKLHAISRSERKCDRRDAQMLARLARVDPALLHPIQHGSAQAQHDLLGLKLRDALVRTRVNLINAIRFTLKSLGHSVRNPSSESFHKTVLADVPADCVPVIQPLLTVLAQVTEQIKGMERDLVQRSRKDYPATQRLQQIAGVGPLTALCFVLKIGDPQRFSRGRDVGAYLGLCPRRDQSGGTDKQLRISKCGDGLLRRLLVSAAHYILGPFGPPCALREHGLRLAGTGSAREKKRAVVAVARKLAVLLLSLWKHGTDYEPRVTASPVLVMTPA

SEQ ID NO: 244776 - protein, 338 aa, unidentified
MEIKRIAVDTSKHVFTLVAVDGGGHAVLRRELKRHQVEPFFRKQPSTEVVLEACGGSHHWGRTLMALGHSVRLLPAQYVKPFVRRGKNDRHDALAIAEAAGRPEVRAVPVKSAEQQAAATILRVRELLMKQQTQLANAMRGHASEFGVIVGKGIGNAPALVERVQADAGVPEAAQEMIAVLGAQLAALQAQIAVLDRKIAAQHKGHPVSRMLAEVPGIGVHGALTLALTVDAAQFRSGRHFAAWLGLTPKQHSTGGKPRLGGISREGNERLRALLVLGATSVVRVAKPGRRNASDWLLQLLGRKPRKVVAVALANKMARIVWAMMRSGEAYRHAPAVG

SEQ ID NO: 244777 - protein, 456 aa, unidentified
MKEKELSMQIVHPNAAGIDIGSKTHWVAVDQIPGNVREFGVYTRDHQRLIDHLKTYQITSVAMESTGSYWQTLFHALQKAGFEVILVQGNQTKNVQGKKTDVLDCMWIQKLHSLGLLSSSFLLSDYFQTLRSYYGHREHLIEQTAMYINKMQKALRLMNIRLDVAIRDLAGKSGRAILDAILAGHRDPNYLASLAHFRVKKSPDEIAAALHGNWREDLLFELRSCLAFYDAYRKEILICDQKIQAIMLEFIPDAEALTLESNAGEKPIRKQVNRNSPSFNIRHLAFAHFKIDLFQIPGVSHSTALCILCNMGNDIKRFASAKRFASWLRLVPNNKLSGGRIISSKTPKGKNAIALALRQAADSIGNQKEHPLTPFFKRIAYRKGRNAAITATARKLAVIIWNMVTKTQPYRQPNFELLLEKRKYAQVRNIKSRLFRLNLSDSEMMELFQKTSFPST

SEQ ID NO: 244778 - protein, 349 aa, unidentified
MRFYTKQHRFYCGVDLHADAMYVCILDAAGEVVVHQNIPTRPKDFLRLIKPYRPGLVVGCECMFSWYWLADLCAEENIDFVLGHALYMRAIHGGKAKNDKIDSHKIAVLLRGGSFPLAYAYPRKMRATRDLLRRRNHLARKRAELFAHIQNTATQYNLPEPLGCIAKPSARGDLPARFRDPIVRAMVELDLATIEHYEDLLGVLERGLEKVAIGHDPVNLALLKSIPGVGRILGLVMLYEIEDIARFPREQDFASYCRLVKPAKQSNGKNYGHSGKKIGNAHLRWAFGEAVVLMLKGNKPAQAVLQRLASRHGKGKALAILAHRLGRAVYYMLKNQVPFDQERFLRKAA

SEQ ID NO: 244779 - protein, 344 aa, unidentified
MEQHKTFYVGIDISSQTFTSSIGSANQGWAILGKAETFANTEEGYEDYLKWLSGQGVKTEDSVICMENTGVYSEQVAYVLQSKGFQVCVETPLKVKRAFDVDGHKTDPVDSRQIAEYAFRFYDELRIWKPRREVLEQVKTLLSLREQMVIEKTGYGNTLRAIQRKVVRSDKAEEILKALISTLKEQIKAVESEISSLINQEADLAQECALLDGIPGVGSLLAAQAVVLFHQMDGELTDKKVTSFIGICPLEHSSGTSVKRRPRSSQHGPEVIRKLLNLAARSVCTHVPYYQHYYLRKQAEGKAKALVINNVANKLIDLMVAIFKSGEPYIPGYRSIHPRFLTKS

SEQ ID NO: 244780 - protein, 337 aa, unidentified
MKYSGIDLHSNNSVVVVSDEADRVLVRRRVPNDAAAILGLLAAHREELVGVVVESTYNWYWLVDALQAAGYRVHLANTAAIKRYEGLKHSGDEDDAAYLAHLLRLEILPSGYICPPAARAVRDLARKRMQLVRSRTAQILSVENMLSRETGAGMRSRAVQRLTAQAVEGFGFNPEVEQSMCANVAVIKTLNREIDKLERRLHQCVRLRPEFRLLTSVPGIGQTLATLIMLEVGTIKRFAAVGNFASYARCVDSARISNGKKKGQGNVKNGNAYLAWAFVEAANFARRYCAEARRFYDRKKARTNGIVATKALAHKLARACYHMLKEQKPFDVKRCFA

SEQ ID NO: 244781 - protein, 341 aa, unidentified
MKNLFIGVDFSKEKVDVAILFADGLVETAARVFNEFKTTVSGYRQLVKWVEQNSCGIDSSLWLFCGENTGDYSKGLCNFLYGKGYDMWLENAKSIKDASGLRRLKSDRADASMIAEYAMRNYDKAVMYEPLSESLTQLRELFLYRQMIVRHRCSFQVRRGEKRLTMEKSPVKTMISQSGRHIVSELNKEIEKIDKRIADLIKSDEELTKVFTIVTSVPGIGTQNAVCLIVYTDNFRRFNYDSRKIACYYGLAPFGKDSGTSVHSDPHVHYMANRQIKAMLTQAALAAVNFNPIMARYYMRLVERGKKKQVALNNVKNKLVHLVTAMVRNRQTFTPEYKISA

SEQ ID NO: 244782 - protein, 420 aa, unidentified
MNDVNTKKLKRVNEKMLIAAVDIGKVKHTGYWRCPDGAEIKPFDFFNNGRGFQKFWDGICQAKKAHLIEEVVVGFESTGSYAEPLLHFLRKRGVRLVQVNPFHSKKLRELQGNSPSKTDQKDPKVIADIMELGHALTVIIPEGAAAELRRLTNARERMIERRTVLFNQLQDLVFMIFPEFLEVMRGVKSRSSQYLLRTCPTPEEIIKKGLEDLTQELKKVSRGKLGRDRAEALYKVAWESVGIKEGQKSIVLEITECLLLIEACERFMGRVEKEMADRLREVPYSRCILSIKGIGKVTAAGLIGEVGDFRQFHTLSEILKHAGLDLFEISSGKRKGKRRISKRGRSLLRKLLFFASINTVRKGGVMHEPYQRYLQRGMPRNKALIAIARKLLKVIFALVRDHHTFQRDYIEVPYQFKEAA

SEQ ID NO: 244783 - protein, 426 aa, unidentified
MQYALTQVLPDVPAGGVCAGIDWATADHAACVVDMTGRVTDRFSAAHDKAGIAAMIARLRRNKVTEVAIERGDGPLVDGLLTAGLTVVVITSRQVKNLRSRFGAAGAKDDRFDAFVLADTLRTDRARLRPLVPDTPATISLRMAVRARRDLVRHRVAVCNQLRAHLAVAFPAGITLFHDLDSPISLAFLARFGSQDAAAELDEQAIGAWLATIAVRGRPAPASVLHARLQAAPPGATGADGAAQAGVTAALTATLTALSVQIKALQAQIAGQLAAHPDRHIFTSLPRPGTVRAARLLAEIGDCRSRFPDAESLAGLAGVAPVTRRSGTRIAHGFRWSVNRQLRDALCDFAADSRHASPWAAAIYDDARARGKDHPLAVRITARAWSYVIWRCWHDGTAYDPAKHNALQAVLARQAAQTAGARQQDQ

SEQ ID NO: 244784 - protein, 452 aa, unidentified
MAKKPQRDAQANRAILPVMRPDAAGIDIGATEIFVAVPPDRVDENVRSFPTFTQDLYALADWLKQCGVTTVAMESTGVYWIPLFQILEDRGFQVCLVNARHVKNVPGRRTDVSDCQWLQFLHSVGLLRASYRPEQEVCAVRALLRHRESLVQMAATHVHHMQKALDQMNLQVHHVISDITGQTGLAIVDAILAGKRDPWELAKLRHERIKASEEVIAKSLVGDYRPEHVFTLRQSLIAYRSYQTLIDDCDREIRRCLEEFKTPRQPDASVGAPQKPSKTPAPDGLLRSELKRVFGIDLTKIPGIRVGIAQMLFGEIGPDFKKFRSASAFASWMGLCPDNDISGGKVLWVGTRKVNCRAATALRMAAQSLHHSKSALGDFYRRMRAKLGAPKAITAAAHKLARIIFHLVTTGQEFDDSRFAADQLRHQKRQEAKLRAKAKAMGFELIPLQQAG

SEQ ID NO: 244785 - protein, 419 aa, unidentified
MPTDIKTGVIAGIDVHKKMLAVVVARADAPDKSLQEVKFGATMGELRRLSEWLRQQEVADVVMESTAKYWKPVWMALETSFRLHLAQAMSNRAPRGRKTDFGDCRRLVRRWVAGDLRLSYVPEGEQRKWRLLTHTRLQYVRQVVRLRNQMEGVLEEAGIKLSGVVSDLFGMSGLRILDALAGGQKDAAALAALGDDRLRVSKEALEDALTGRVEAEHQLLLRQHLEQLRELIRQVQELDAAIGASLHQHAEAVGRLCEVPGIAVTAAEQIIAEIGPHAAAFDSPEQMASWIGVCPGRQESGGDSHSTRSPKGNRTMRSVLTQVAWAAVRTRESRWRELFTRWVSRLGPQKAIWAVAHRMARLIWKLLHQGVRYLERELFQLRPEVVARRKQRLVRQLRKLGYEVALKPSLLTDSAPVTR

SEQ ID NO: 244786 - protein, 347 aa, unidentified
MLRVGLDLSRKRLDICAISDQGELVDELAAPFDEEGLCRLSERMAEKHAGRVRAVVESMNGARFVHDTLEAQGWDVLVADAQRVKGLAPLACKTDKIDARVLAELSFRDLVPAIWLPDPQVRRERELARFRLHLVRHRSSLKNRIHSTLITFGKPCPVSDLFGVAGRKLLERLDVPEPWRENVEASVVLIDQLDRQIDAVASELKYVGADHPYVPLLMSAPGVGWLVGFSIACEIGDISRFSSPTKLCGYTGLCPRVIQSGESDRRGPISKHGPKYLRWALFEAALNACDHPLYKERYERTKKRLGRQRGPKVAQIELSRKLAEAIWHMLTRNQPFAPAGAPFRLAA

SEQ ID NO: 244787 - protein, 370 aa, unidentified
MRKDTLYVGLDTDKKSIDIGLAEPLPKGEVRYWGKIANDTAAFERVRKRLQKDGRELVVCYEAGPCGYGLYRWLNGKPGVSCQVVAPALTPRRPGVRVKTNRRDCLTLAKLLRAEELTAVWVPDAAHEAMRDLVRARGAAKEDLNRCRQRLGGFLLRQDIRYAGKPWTQKHRAWLGRLSFAEAAHRLLVGELIEALDQATARRDRLSDHIAELVPNWSLAWLVEALQVLRGYQLINAATVVAEVGDPRRFDNPRRLMGYLGMAISEYSTGERVRRGGITKTGNKRARTALIEAAWTYARPAKRPKAAAARQPAAVRAIADKARHRLSARYRKLIARGKLPTVAVTAIARESLGFIWAIARAAAPDPLRQR

SEQ ID NO: 244788 - protein, 406 aa, unidentified
MLFAGIDWSDEALHFELRTAEGNVLAEGEVPANVAGLTDLFAAWEKHAPPAEIGVAIEATQAAWVQALLDRGYRLYPLNPKTVERFRESLSAVGHKSDRIDRKVIAMFLATLHSQLKPLRPDDPEIVALRIACEDRVRLVEERTAKLNEVRAVVKAYYPAFLGIFGYLESDIALQFLQEFPTQSQLQGIKPGRLKSWLRRHHYTQTHRIADMQAMLTQPTFAVPDHLQQAKAARLRYLAGSLLVLNTELKERERQITETFEKLPEADWYRSLPGAGSVLAPALLACVGRDPDRFETVEQARALMGTAPVTKQSGRFRAVYFRRGCWKFARRTLQLFAEKSCQHCDWARAYYEQRRASGHKHHAAVRALAHKWLKIILALKRTGRAYEEQVFLNSRQRYLSKSLAIP

SEQ ID NO: 244789 - protein, 340 aa, unidentified
MSYYAGIDVSLEESSVCAVDSSGKIVREGKVPSEPKALIAWFSSLGVEFARIGLEAGPTSQWLYAGMQQAGLAVELLETRHVRNAFKIMPVKWGGKDARGIAELIRLGWFRPVHCKSMEAQETRAMLTARKLVQKELLETESSLRGILRGFGLKVGKVSPLLFEGRIRELVAGHPSLEKIADALLSVRRTLWLEFNSFEKRLAAIARSDVRTRLLMTTPGVGIIVALTFASAIDDPSRFKSSKSVGPLFGMTPTRYQSGETDYSGRISKQGDGSVRTVLYEAAHTIICKPLKGCTALKSWAMRLAKRAGRKKATVALARKLAVIMHRMLADGTPFVNQPA

SEQ ID NO: 244790 - protein, 320 aa, unidentified
MDVVLGIDIAKAKFAVALRRDDGKVRHKTFLNTPSGFADLAVWLQRQQVAHVHACLEATGTYGEALALWLHDAGHIVSVVNPAVIHAYAGVQLARSKTDRIDAELIARFTATQRPAAWTPPTPEIRQLQALVRRLDAVQGMRTQEANRLAAGVAVSDVRASIETVLASLDAQIAHVRQLIRDHLDNHPGLRAQRDLLTTIPGIGEATAAVLIAELFDKRYLNARQAAAFAGLVPRLVESGTLRGRSRLSKIGPGRLRKALYFPAVAALRWNPTIRVMRARMQLAGKQPMVIIGAAMRKLIHIAYGVLKTGRAYEPTCAHP

SEQ ID NO: 244791 - protein, 413 aa, unidentified
MDKIYDICCGIDVHKKLIVACLNHKRKKELREFGATTRELMELAEWLQKNECEIVAMESTGSYWKPLYNIMESYGLHAIVVNPAHMKAVPGRKTDVKDAEWIAELLQHGLLQPSYIPSKDQRELRELVQYRKSLVGERTRELNRLQKMLEGANIKLSGTVTNINGKSARKILEYILSGNEIDEKKYDEMYEEKLIAHNLKASKEQILDDLKGFMSPLQRRMLKELLQHLDELNVHIENLNDEIDNFMKPEEKQASQVIQDVTGIGNTSAQTIIAVIGTDMERFPSDRHISSWAGLCPGDNVSAKKRKSGKIRKGNALLKSTLVLCAHAAVRHKSSYFHAQFKRISTHRGKKRAYVAVAHSILIAIYHILKDGVKYQDLGAEYYNQFNAERKIHAYLKKLKALGWEPPKEAVPA

SEQ ID NO: 244792 - protein, 387 aa, unidentified
MVMDAVDQPAEPAPHRPWGVAGIDPHKRTFTAAVLDERGGLHGVASFDTSEQGLAVALAWLGEVGFDLDRGGVEGSAWLGNQVATFLAAAGYDVREVQASRTAERRRRRRRAKTDAEDAQAIARETLAHPDLPPAGKQHAPDPDWEELVALRNQRRSLIAQRRRLLNEAEPVLVGLPLVVRAVLPDTSQVRPRLRALTQGAADQLELTGADRVHLAWLAASAADIGRLDQRIRQLDQRIPAVLARHCCTLTEEVGIAAVGAMELLVEVGDPTRFTTEARFARWCGAAPVAVSSGEGDGEPERHRLDLGGNRRVNSVLHTMHITQARCYQPAKDYLGGKRAEHKTAREARRAHKRLLANVIIRRMWADHQRRRSPTLNLSNPTTPKAA

SEQ ID NO: 244793 - protein, 353 aa, unidentified
MMIIGCDFHPSFQQIAYVDEETGEYGERRLSHREEAARFYVSLSGRQVRVGMEATGNDRWFRKLLSEGGHQLLVGDASAIHASAPREQRTDKRDARHILRLLVENRFPAVWQPSADNEAQRQLLMHRCRLVRMRTRIKNQLDSIAKSEGLTGSRSWSSKRRRQIEGLPLTGWYAERRADLLLLLDGLEQRIEPLDRAVEAAARQDTEARLLMTHPGVGPVISLAYVLVVGDWHRFPRGKQVGSYLGLIPSEASSGKRQQQMGHITKQGNTLLRWLLVEAATTAQRHDASWHRQYVRLSMTKHHGVAKVAIAHKLAVRLYWMLRSGQDYTQMMERGSHARQSECPVGRSRRPIE

SEQ ID NO: 244794 - protein, 347 aa, unidentified
MPTTKITVVGIDLGKNTFHLTGLDERGAIVIRQKVSRGQLEHRFVNMPTCLIGMEACAGAHHLGRQLAALSHNVRLIPAQYVKPFLKGHKNDYRDAEAIAEAVSRPTMRFVPLKTADQLDLQALHRVRSRLVGQRTAVINQIRAFLLEHGITVRQGPSALRHVLPDILAKRTDALSPRMMRLVEGLTEDWRRFDARIDGVTAEIEAVAIQDRDCRRLASSPGVGPIIASAMVAAIGNGSAFVRGRDFGAWLGLVPKQSSTGDRTILGAISKRGNRYLRTLFIQGARAVLLRPNSWPRYGFGQWLETAAKRLHRNVLAVALANKLARIAWSVLAHERGYDPGFTPRAL

SEQ ID NO: 244795 - protein, 354 aa, unidentified
MKRTTKYVALDVHQATTVASVREDSGRVIARSVLPTDGGAIVEFVRGMRGAVHVTFEEGTQAQWLHDLLAPLVDRVVVCDRRGAPRHGNKGDHVDADQLAELLRRGGLRAVYHGSAHRAGLKELTRTYQNLVEDSTRVMLRLKALFRARGIPTAGTAVYHRHQRARWLARLPDGGARFRADALYAELDVLRQLRPKAKAAMVTEARQDPAWPVLRTIPFLGPVRVALLLATMQTPWRFRTKRNLWAYAGLAVVTRSSADYALVAGQPVRRRRAPMTRGLNRNHNRVLKDVFKGAATAATARPGPLQDVYHNVIARGTREELARLTLTRKLAALTLRLWKKGERYDPTKLTTPAR

SEQ ID NO: 244796 - protein, 314 aa, unidentified
MNQTITVGVDTGKLQLDIHIRPLKLFFSVENTEKGIRQALKIIKLHRPNRIVIEATGRLEMPFILACAEAKLPIVRANPLHIKRFAGAIGRRVKSDKFDAELIAYYGEVIQPALTSIKPKSLRLMSDLITRRNQLLSMRTMEKNRLQILPKSLHSTIKPMMTALNHQITKIEKKLVLLIEQCQEYRSKSMILKSCPGIGDIAAASLISNLPELGYITNKQAASLVGVAPIAKESGSCRKRRVVQGGRTQVRTVLYMAMMSAMQCNPVFKAFYTRLVDAGKPKKVAIVACVRKMVVTLNSMLKNDTMWREEVIST

SEQ ID NO: 244797 - protein, 400 aa, unidentified
MFVGWDWASTTHDVTVIDDAGRIVDRWAPEHTEMGLDATMARLARHGPPEQLPVAIERPSGLVVDRLLAAGHPVIPIHPNAFHAARPRWGAAAAKSDPGDSFKLADYLRTDGHRLRRLRPLDAATRELQALSRLRDDHVAAKTAASNQLGALLDAHWPGAKQVFSRLGSQIALAFLDAYPTPESAARLGEARLAAFCRRHSYRGGRSPAELLGRLRSAPAAPVGLAPEVLAELVGAQVRLLRTLLATIAELDRALGTGLLGHAKARLLAPLPRIGEVSLAQVVAEVGPILDRASTVEHATAECGAAPVTKASGKSKAVTFRWAANTKARNALATFAGNSRHSSPWAAKVYADARRRGKHHPHAVRILARAWLRVMWACWHNDTIYDPARHGAERRLATRT

SEQ ID NO: 244798 - protein, 416 aa, unidentified
MKIVRPICCGMDVHKNIIVATIGITNKKTRITEYIQETFSTLNPDLLNLKQWLINHKCFDACMESTGKYWIPVFNILEDEINIYLTHPKYVKAIKGKKTDKKDSKWICDLFKHDLIKFSFIPPKEIRALREISRYRYKLVGMRSSERNRYQNCMTVSNIGIGSVFSDPFGKSAQAIMKEVLESDIIEDEKILKCIHGSCKNKDKILDSIKHCNIETDQRFKMNESMTHMEELQVHINNCEIEMMKRAAPMFDQFMHITQLPGISTLSAILIISEIGVDMKQFESDKQLTCWAGLAPANNESANKKKSVRISKAGQYLKPLLVQCALGAIKDKEGYFGIKYSRIKKRRGHKKAIIAIARMMLVSIYHMILTGETFNPSDYESFRNPKPPIKQQDLTEESAIEFLKKSGFDVSKLTKP

SEQ ID NO: 244799 - protein, 459 aa, unidentified
MPEKKVTRKSRKRQAHLLKAVQPDAAGIDLGSREHWVAGPPRPDGSPNVERFGTTTAELLRLCQWLKQQQVTTVAMESTGVYWIPLFEILDSRGFEVHLVNARQISHVPGRKTDMLDCQWLQLLHSCGLLRGSFRPGDEICRLRALIRERHSVVEQRSDWVRRMQKSLDQMNVCVHHAVSDITGVTGMAIVHAIVDGERDPRVLAHLRDRRCLKTEEQIVAELTGNWRPEHLFNLGQALKIYDHLNGVISDYDTEILRCIDSLQPAVCEDSSAPPPASKAKASKISQRGQEPLRQGLYRMSGFDLTTIDGIGVDTAAVILSELGPDLSAFADEGRFVSYLRLAPNLSISAGKKVPGKFKAVTSTRVSNALRMAATTLRTSKTALGAYYRRISWRKGASVAVFATARKLAQLVYRLIRFGQAYVDEGAKAYETRFTQRRLSSYARALNELGYKIEPLTAQ

SEQ ID NO: 244800 - protein, 425 aa, unidentified
MNYKQNEKINQVKESTLVVGIDIGSTTQYARAFDWRGIELGKVFTFSNSREGFESFKAWMQHLQDKYRKSDVIVGIEPTGHYWFDLGAYLEDEGILLVMVNPYAVKQTKELDDNSQSKNDRKDPKVIAKLVTEGRYSAPYTPDGVYADLRIMVTNRKRLIREMTQIKNRFARWFAIYFPEYTDVFGDYEAQSSMLLLKKVCTPEAIVELGAEKINQIWRDAKLRAVGMKRATTLCETAKRSIGLKKGSSAARYEMKLLLEDYEYKKAQLDAVMEEIEKLCRKIPESEQMLAIKGIGVITVAGFLAEVGDVRRFESPRQIQKLAGLSLRENSSGKHKGQTTISKRGRSKLRAVLFNAAIPLIAKNPEFKSLHEYYTTRANNPLKKKQSVIAISCKLIRVFYAILANGVTYDAQKMLSDIHRQPQAA

SEQ ID NO: 244801 - protein, 415 aa, unidentified
MEVLYGTCCGVDVHKKLLVVCLRSGRKSELRNFGTTTQELFDIANWLKSSDCEMVAMESTGSYWKPLYNILEVMEIPAMVVNAQHMKTVPGRKTDAKDAEWIADLLQHGLLKASYIPDKDQRELRELVRYRKSLIEDRGRELNRLQKMLEGANIKISGTIKDVNGKSGRNILNRIVNGEKIDGKIYDEMYTKGEISHSLKCTREQLIADLNGVLSVLQRKMMKELLRHLDELDNHIKHLDDDIDQFMTPDETTASKMIQDIPGIGNASAQAIISVIGTDMSRFPTDKHISKWAGLCPGNNESAHKRKSGKTAKGNKVLRTTLVNCAHSAVRVKDSFFSAQFARVSAHRGSKRAYVAVAHSMLIAIYHILSEGTVFKDLGSNYYNQFNKERKANSMLKKLKALGYDVTIATAAETA

SEQ ID NO: 244802 - protein, 332 aa, unidentified
MNMNLQGGAVQRQSHPNAGIDVSKEHLDVCWETNELRLGNDGAGWSELAAKLKAADVDLVVVEATGGYERGLVLALQQTGLTVARVNPRQTRDFAKSMGVLAKTDALDARTLRDFADVLARHPQRQRFITPLVDERRQLLASLMTRRRQVVEMRAAEQQRLEHADAMATRSINAVIRALDKQIRQIDKDVDGHMERHFKQQRELLDSVKGVGAVTTLTLLSALPELGRLGRKPIAKLAGLAPLADDSGKRRGVRRIWGGRAQVRSALYMATLSAMRYNPTIAAHYRRLLAAGKPKKVAMVACMRKLLVILNAMLRDNAQWDPARHLVTATSA

SEQ ID NO: 244803 - protein, 340 aa, unidentified
MEKAIMIGLDIAKNVFEVHGRTAAGEVVVRRSLKRGQVEKFFARLPAAVIGMEACGSAHHWARVLGKLGHEVRLMPPAYVKPYVKRNKSDAIDAAACWEAVGRPDMRFVPIKTVEQQAALSLHRSRDLLVSQRTQLTNALRALLSEFGIVAGKGRAGLARLVDELRAGTLELPADAVVVATALADQRAALDAAADALERRIVAQAKADKNAAMLQTAPGVGPLSAHATLATMPDPALFKSGRDFAAWLGLAPRLNGTGGKTRTGAITKQGNSPLRRLLVLGATAWLRQVKARPEKASPWLRGMMARRPSKVVAVAQAARTARILWAMLSHNQPYRAPAIG

SEQ ID NO: 244804 - protein, 420 aa, unidentified
MKVVYQTCCGVDVHKSFLVATIIKTTSGVEPSYQKKRFSTFNNSILQFKEWLVKNQCRDVCMESTGKYWVPVFNLLEDEINITIANPKWVKAVKGNKDDTKDSKWIGDLFRLGLVPGSYIPCKPIRILREFTRYRYKLTSCRTSEKNRYQNALTVCNVALDSIVSDIFGKSATSVIDYLIEQPDNSINHEEIASRLLRSLKKKSDSVIESIEGYQMTDSQKYRMRLIRAHLDYITSTINDIDTMLNSLIAPYENAVQLLCTIPGVDRNSAITVISEIGTDMTPFSNSKRLCCWAGLTPGNNESAGKKKSVRITRAGVYLKPALVQVAHAAVKSDKSPYYKQKYERIMKRRGKKRAIIAIARMILTAIYQMLSTGEAWNPTDLFKIDMPEPMKEKQKEKAIKQAMKLLIREGKISESQLAS

SEQ ID NO: 244805 - protein, 420 aa, unidentified
MEEISEEPAELVERVAALDIGKATLVACVRVPHDAKPGRRRQEIRTFATTTRSLLGLADWLDCLGVTRVVMEATSTYWKPPFYLLEESCACWLVNAREVKHVPGRPKTDKQDAVWLAKLAERGMLRPSFVPPPWQRELRDLTRYRRNLIHERTREKQRVEKLLEDTQIKLSAVVSDMFGVSGRQMLEALIAGQRDPKVLAQLAQGRMRSKLGALAEALTGHFRAHHGYLLRMMLDRIDALGAQADQLTGRIEELLAPFAHHVAQLDDIPGVGRIGAQELIAEIGTEMGRFPSAAHLVSWAKFAPTTKASPGKTKSSSTGKGNPWIGATIGEAAMGASKTKTFLGSRYRRIVKRRGKQRTLVAVGNPGPHHRLPSALGPQARFVDLGADFHDRLHPQRRTRQLIRELEHLSGKQVTLHDAA
